United States Patent Application Publication US 2020/0163878 A1 - sequence listing, part 24

SEQ ID NO: 88249 - RNA, 1410 nt, Artificial Sequence; identical to SEQ ID NO: 88072
  derived and/or modified CDS sequence (opt1) from neuraminidase__InfluenzaA__AHC61406

SEQ ID NO: 88250 - RNA, 1410 nt, Artificial Sequence; identical to SEQ ID NO: 88031
  derived and/or modified CDS sequence (opt1) from neuraminidase__InfluenzaA__AHC61418

SEQ ID NO: 88251 - RNA, 1410 nt, Artificial Sequence; identical to SEQ ID NO: 83542
  derived and/or modified CDS sequence (opt1) from neuraminidase__InfluenzaA__AHC61430

SEQ ID NO: 88252 - RNA, 1410 nt, Artificial Sequence; identical to SEQ ID NO: 88044
  derived and/or modified CDS sequence (opt1) from neuraminidase__InfluenzaA__AHC61442

SEQ ID NO: 88253 - RNA, 1410 nt, Artificial Sequence; identical to SEQ ID NO: 88044
  derived and/or modified CDS sequence (opt1) from neuraminidase__InfluenzaA__AHC61454

SEQ ID NO: 88254 - RNA, 1410 nt, Artificial Sequence
  derived and/or modified CDS sequence (opt1) from neuraminidase__InfluenzaA__AHC61466
augaaccccaaccagaagaucaucaccaucggcagcgugucccugaccaucagcacgaucugcuucuucaugcagaucgccauccucaucaccaccgucacccugcacuucaagcaguacgaguucaacuccccgcccaacaaccaggugaugcugugcgagcccacgaucaucgagcgcaacaccaccgagaucguguaccucaccaacacgaccaucgagaaggagaucugccccaagcuggccgaguaccggaacuggagcaagccgcagugcgacaucaccggguucgcgcccuucuccaaggacaacagcauccgccuguccgccggcggggacaucugggucacccgggagcccuacgugagcugcgaccccgacaagugcuaccaguucgcccucggccaggggacgacccugaacaacgugcacuccaacaacaccguccgcgaccggaccccguaccgcacgcugcucaugaacgagcugggcgugcccuuccaccugggcaccaagcaggucugcaucgccuggagcuccagcuccugccacgacgggaaggccuggcuccacgugugcaucaccggcgacgacaagaacgcgaccgccagcuucaucuacaacgggcggcugguggacuccguggucagcugguccaaggagauccugcgcacgcaggagagcgagugcgugugcaucaacgggaccugcaccguggucaugaccgacggguccgccagcggcaaggccgacacgaagauccucuucaucgaggagggcaagaucgugcacaccagcacccuguccgggagcgcgcagcacguggaggagugcuccugcuacccccgguaccccggcguccgcugcgugugccgggacaacuggaaggggagcaaccgcccgaucguggacaucaacaucaaggaccacuccaucgucagcuccuacgugugcagcggccuggugggcgacacgccccggaagaacgacuccagcuccagcucccacugccucgaccccaacaacgaggagggcggccacggggucaagggcugggccuucgacgacgggaacgacguguggaugggccgcaccaucaacgagaccagccggcugggcuacgagaccuucaaggucaucgaggggugguccaaccccaagagcaagcugcagaucaaccgccaggugaucguggacaagggcaaccgguccggguacagcggcaucuucuccgucgagggcaagagcugcaucaaccgcugcuucuacguggagcucauccgggggcgcaaggaggagaccgaggugcuguggacgagcaacuccaucgucguguucugcggcaccagcgggaccuacggcaccggguccuggccggacggcgccgaccugaaccucaugcccaucuga

SEQ ID NO: 88255 - RNA, 1410 nt, Artificial Sequence; identical to SEQ ID NO: 87995
  derived and/or modified CDS sequence (opt1) from neuraminidase__InfluenzaA__AHC61478

SEQ ID NO: 88256 - RNA, 1410 nt, Artificial Sequence; identical to SEQ ID NO: 88031
  derived and/or modified CDS sequence (opt1) from neuraminidase__InfluenzaA__AHC61490

SEQ ID NO: 88257 - RNA, 1410 nt, Artificial Sequence; identical to SEQ ID NO: 87995
  derived and/or modified CDS sequence (opt1) from neuraminidase__InfluenzaA__AHC61502

SEQ ID NO: 88258 - RNA, 1410 nt, Artificial Sequence; identical to SEQ ID NO: 88044
  derived and/or modified CDS sequence (opt1) from neuraminidase__InfluenzaA__AHC61514

SEQ ID NO: 88259 - RNA, 1410 nt, Artificial Sequence; identical to SEQ ID NO: 86946
  derived and/or modified CDS sequence (opt1) from neuraminidase__InfluenzaA__AHC61526

SEQ ID NO: 88260 - RNA, 1410 nt, Artificial Sequence
  derived and/or modified CDS sequence (opt1) from neuraminidase__InfluenzaA__AHC61538
augaaccccaaccagaagaucaucaccaucggcagcgugucccugaccaucagcacgaucugcuucuucaugcagaucgccauccucaucaccaccgucacccugcacuucaagcaguacgaguucaacuccccgcccaacaaccaggugaugcugugcgagcccacgaucaucgagcgcaacaucaccgagaucguguaccucaccaacaccacgaucgagaaggagaucugccccaagcuggccgaguaccggaacuggagcaagccgcagugcgacaucaccggguucgcgcccuucuccaaggacaacagcauccgccuguccgccggcggggacaucugggucacccgggagcccuacgugagcugcgaccccaacaagugcuaccaguucgcccucggccaggggaccacgcugaacaacgugcacuccaacaacaccguccgcgaccggaccccguaccgcacccugcucaugaacgagcugggcgugcccuuccaccugggcacgaagcaggucugcaucgccuggagcuccagcuccugccacgacgggaaggccuggcuccacgugugcaucaccggcgacgacaagaacgcgaccgccagcuucaucuacaacgggaagcugguggacuccguggucagcugguccaaggagauccugcggacccaggagagcgagugcgugugcaucaacggcacgugcaccguggucaugaccgacggguccgccagcggcaaggccgacaccaagauccucuucaucgaggagggcaagaucgugcacacgagcacccuguccgggagcgcgcagcacguggaggagugcuccugcuacccccgcuaccccggcguccggugcgugugccgcgacaacuggaaggggagcaaccggccgaucguggacaucaacaucaaggaccacuccaucgucagcuccuacgugugcagcggccuggugggcgacacgccccgcaagaacgacuccagcuccagcucccacugccucgaccccaacaacgaggaggggagccacggcgucaaggggugggccuucgacgacggcaacgacguguggauggggcggaccaucaacgagaccucccgccugggcuacgagaccuucaaggucaucgagggcuggagcaaccccaaguccaagcugcagaucaaccgccaggugaucguggaccgggggaaccggagcggcuacuccgggaucuucagcgucgagggcaagagcugcaucaaccgcugcuucuacguggagcucauccgggggcgcaaggaggagaccgaggugcuguggaccuccaacagcaucgucguguucugcggcacguccggcaccuacgggaccggcagcuggccggacggggccgaccugaaccucaugcccaucuga

SEQ ID NO: 88261 - RNA, 1410 nt, Artificial Sequence; identical to SEQ ID NO: 88044
  derived and/or modified CDS sequence (opt1) from neuraminidase__InfluenzaA__AHC61550

SEQ ID NO: 88262 - RNA, 1410 nt, Artificial Sequence
  derived and/or modified CDS sequence (opt1) from neuraminidase__InfluenzaA__AHC61562
augaaccccaaccagaagaucaucaccaucggcagcgugucccugaccaucagcacgaucugcuucuucaugcagaucgccauccucaucaccaccgucacccugcacuucaagcaguacgaguucuacuccccgcccaacaaccaggugaugcugugcgagcccacgaugaucgagcgcaacaucaccgagaucguguaccucaccaacaccacgaucgagaaggagaucugccccaagcuggccgaguaccggaacuggagcaagccgcagugcgacaucaccggguucgcgcccuucuccaaggacaacagcauccgccuguccgccggcggggacaucugggucacccgggagcccuacgugagcugcgaccccgacaagugcuaccaguucgcccucggccaggggaccacgcugaacaacgugcacuccaacaacaccguccgcgaccggaccccguaccgcacccugcucaugaacgagcugggcgugcccuuccaccugggcacgaagcaggucugcaucgccuggagcuccagcuccugccacgacgggaaggccuggcuccacgugugcaucaccggcgacgacaagaacgcgaccgccagcuucaucuacaacgggcggcugguggacuccguggucagcugguccaaggagauccugcgcacccaggagagcgagugcgugugcaucaacggcacgugcaccguggucaugaccgacggguccgccagcggcaaggccgacaccaagauccucuucaucgaggagggcaagaucgugcacacgagcacccuguccgggagcgcgcagcacguggaggagugcuccugcuacccccgguaccccggcguccgcugcgugugccgggacaacuggaaggggagcaaccgcccgaucguggacaucaacaucaaggaccacuccaucgucagcuccuacgugugcagcggccuggugggcgacacgccccggaagaacgacuccagcuccagcucccacugccucgaccccaacaacgaggagggcgggcacggggucaagggcugggccuucgacgacgggaacgacguguggaugggccgcaccaucaacgagaccagccggcugggcuacgagaccuucaaggucaucgaggggugguccaaccccaagagcaagcugcagaucaaccgccaggugaucguggaccggggcaaccgcuccggguacagcggcaucuucuccgucgagagcaagagcugcaucaaccggugcuucuacguggagcucauccgcgggcggaaggaggagaccgaggugcuguggaccuccaacagcaucgucguguucugcggcacguccggcaccuacgggaccggcaccuggccggacggggccgaccugaaccucaugcccaucuga

SEQ ID NO: 88263 - RNA, 1410 nt, Artificial Sequence; identical to SEQ ID NO: 88043
  derived and/or modified CDS sequence (opt1) from neuraminidase__InfluenzaA__AHC61574

SEQ ID NO: 88264 - RNA, 1410 nt, Artificial Sequence; identical to SEQ ID NO: 88044
  derived and/or modified CDS sequence (opt1) from neuraminidase__InfluenzaA__AHC61586

SEQ ID NO: 88265 - RNA, 1410 nt, Artificial Sequence; identical to SEQ ID NO: 86946
  derived and/or modified CDS sequence (opt1) from neuraminidase__InfluenzaA__AHC61598

SEQ ID NO: 88266 - RNA, 1410 nt, Artificial Sequence; identical to SEQ ID NO: 87995
  derived and/or modified CDS sequence (opt1) from neuraminidase__InfluenzaA__AHC61610

SEQ ID NO: 88267 - RNA, 1410 nt, Artificial Sequence; identical to SEQ ID NO: 88043
  derived and/or modified CDS sequence (opt1) from neuraminidase__InfluenzaA__AHC61622

SEQ ID NO: 88268 - RNA, 1410 nt, Artificial Sequence; identical to SEQ ID NO: 83542
  derived and/or modified CDS sequence (opt1) from neuraminidase__InfluenzaA__AHC61634

SEQ ID NO: 88269 - RNA, 1410 nt, Artificial Sequence; identical to SEQ ID NO: 83542
  derived and/or modified CDS sequence (opt1) from neuraminidase__InfluenzaA__AHC61646

SEQ ID NO: 88270 - RNA, 1410 nt, Artificial Sequence; identical to SEQ ID NO: 83542
  derived and/or modified CDS sequence (opt1) from neuraminidase__InfluenzaA__AHC61658

SEQ ID NO: 88271 - RNA, 1410 nt, Artificial Sequence; identical to SEQ ID NO: 86946
  derived and/or modified CDS sequence (opt1) from neuraminidase__InfluenzaA__AHC61670

SEQ ID NO: 88272 - RNA, 1410 nt, Artificial Sequence; identical to SEQ ID NO: 87999
  derived and/or modified CDS sequence (opt1) from neuraminidase__InfluenzaA__AHC61682

SEQ ID NO: 88273 - RNA, 1410 nt, Artificial Sequence; identical to SEQ ID NO: 86946
  derived and/or modified CDS sequence (opt1) from neuraminidase__InfluenzaA__AHC61694

SEQ ID NO: 88274 - RNA, 1410 nt, Artificial Sequence
  derived and/or modified CDS sequence (opt1) from neuraminidase__InfluenzaA__AHC61706
augaaccccaaccagaagaucaucaccaucggcagcgugucccugaccaucagcacgaucugcuucuucaugcagaucgccauccucaucaccaccgucacccugcacuucaagcaguacgaguucaacuccccgcccaacaaccaggugaugcugugcgagcccacgaucaucgagcgcaacaucaccgagaucguguaccucaccaacaccacgaucgagaaggagaucugccccaagcuggccgaguaccggaacuggagcaagccgcagugcgacaucaccggguucgcgcccuucuccaaggacaacagcauccgccuguccgccggcggggacaucugggucacccgggagcccuacgugagcugcgaccccgacaagugcuaccaguucgcccucggccaggggaccacgcugaacaacgugcacuccaacaacaccguccgcgaccggaccccguaccgcacccugcucaugaacgagcugggcgugcccuuccaccugggcacgaagcaggucugcaucgccuggagcuccagcuccugccacgacgggaaggccuggcuccacgugugcaucaccggcgacgacaagaacgcgaccgccagcuucaucuacaacgggcggcugguggacuccguggucagcugguccaaggagauccugcgcacccaggagagcgagugcgugugcaucaacggcacgugcaccguggucaugaccgacggguccgccagcggcaaggccgacaccaagauccucuucaucgaggagggcaagaucgugcacacgagcacccuguccgggagcgcgcagcacguggaggagugcuccugcuacccccgguaccccggcguccgcugcgugugccgggacaacuggaaggggagcaaccgcccgaucguggacaucaacaucaaggagcacuccaucgucagcuccuacgugugcagcggccuggugggcgacacgccccggaagaacgacuccagcuccagcucccacugccucgaccccaacaacgaggagggcgggcacggggucaagggcugggccuucgacgacgggaacgacguguggaugggccgcaccaucaacgagaccagccggcugggcuacgagaccuucaaggucaucgaggggugguccaaccccaagagcaagcugcagaucaaccgccaggugaucguggaccggggcaaccgcuccggguacagcggcaucuucuccgucgagggcaagagcugcaucaaccggugcuucuacguggagcucauccgcgggcggaaggaggagaccgaggugcuguggaccagcaacuccaucgucguguucugcggcacgagcgggaccuacggcaccggguccuggccggacggcgccgaccugaaccucaugcccaucuga

SEQ ID NO: 88275 - RNA, 1410 nt, Artificial Sequence
  derived and/or modified CDS sequence (opt1) from neuraminidase__InfluenzaA__AHC61718
augaaccccaaccagaagaucaucaccaucggcagcgugucccugaccaucagcacgaucugcuucuucaugcagaucgccauccucaucaccaccgucacccugcacuucaagcagugcgaguucaacuccccgcccaacaaccaggugaugcugugcgagcccacgaucaucgagcgcaacaucaccgagaucguguaccucaccaacaccacgaucgagaaggagaucugccccaagcugaccgaguaccggaacuggagcaagccgcagugcgacaucaccggguucgcccccuucuccaaggacaacagcauccgccuguccgcgggcggggacaucugggucacccgggagcccuacgugagcugcgaccccaacaagugcuaccaguucgcccucggccaggggacgacccugaacaacgugcacuccaacaacaccguccgcgaccggaccccguaccgcacgcugcucaugaacgagcugggcgugcccuuccaccugggcaccaagcaggucugcaucgccuggagcuccagcuccugccacgacgggaaggccuggcuccacgugugcaucaccggcgacgacaagaacgccaccgcgagcuucaucuacaacgggaagcugguggacuccguggucagcugguccaaggagauccugcggacgcaggagagcgagugcgugugcaucaacgggaccugcaccguggucaugaccgacggguccgccagcggcaaggccgacacgaagauccucuucaucgaggagggcaagaucgugcacaccagcacccuguccgggagcgcccagcacguggaggagugcuccugcuacccccgcuaccccggcguccggugcgugugccgcgacaacuggaaggggagcaaccggccgaucguggacaucaacaucaaggaccacuccaucgucagcuccuacgugugcagcggccuggugggcgacacgccccgcaagaacgacuccagcuccagcucccacugccucgaccccaacaacgaggagggcggccacggggucaagggcugggcguucgacgacgggaacgacguguggaugggccggaccaucaacgagaccagccgccugggcuacgagaccuucaaggucaucgaggggugguccaaccccaagagcaagcugcagaucaaccgccaggugaucguggaccggggcaaccgguccggguacagcggcaucuucuccgucgagggcaagagcugcaucaaccgcugcuucuacguggagcucauccgggggcgcaaggaggagaccggcgugcuguggacgagcaacuccaucgucguguucugcgggaccagcggcaccuacgggaccggcuccuggccggacggggccgaccugaaccucaugcccaucuga

SEQ ID NO: 88276 - RNA, 1410 nt, Artificial Sequence; identical to SEQ ID NO: 87995
  derived and/or modified CDS sequence (opt1) from neuraminidase__InfluenzaA__AHC61730

SEQ ID NO: 88277 - RNA, 1410 nt, Artificial Sequence; identical to SEQ ID NO: 88044
  derived and/or modified CDS sequence (opt1) from neuraminidase__InfluenzaA__AHC61742

SEQ ID NO: 88278 - RNA, 1410 nt, Artificial Sequence; identical to SEQ ID NO: 87995
  derived and/or modified CDS sequence (opt1) from neuraminidase__InfluenzaA__AHC61754

SEQ ID NO: 88279 - RNA, 1410 nt, Artificial Sequence; identical to SEQ ID NO: 83542
  derived and/or modified CDS sequence (opt1) from neuraminidase__InfluenzaA__AHC61766

SEQ ID NO: 88280 - RNA, 1410 nt, Artificial Sequence; identical to SEQ ID NO: 88031
  derived and/or modified CDS sequence (opt1) from neuraminidase__InfluenzaA__AHC61778

SEQ ID NO: 88281 - RNA, 1410 nt, Artificial Sequence; identical to SEQ ID NO: 88069
  derived and/or modified CDS sequence (opt1) from neuraminidase__InfluenzaA__AHC61790

SEQ ID NO: 88282 - RNA, 1410 nt, Artificial Sequence; identical to SEQ ID NO: 87999
  derived and/or modified CDS sequence (opt1) from neuraminidase__InfluenzaA__AHC61802

SEQ ID NO: 88283 - RNA, 1410 nt, Artificial Sequence; identical to SEQ ID NO: 87995
  derived and/or modified CDS sequence (opt1) from neuraminidase__InfluenzaA__AHC61814

SEQ ID NO: 88284 - RNA, 1410 nt, Artificial Sequence
  derived and/or modified CDS sequence (opt1) from neuraminidase__InfluenzaA__AHC61826
augaaccccaaccagaagaucaucaccaucggcagcgugucccugaccaucagcacgaucugcuucuucaugcagaucgccauccucaucaccaccgucacccugcacuucaagcaguacgaguucaacuccccgcccaacaaccagguggugcugugcgagcccacgaucaucgagcgcaacaucaccgagaucgucuaccucaccaacaccacgaucgagaaggagaucugccccaagccggccgaguaccggaacuggagcaagccccagugcgacaucaccggguucgcgcccuucuccaaggacaacagcauccgccuguccgccggcggggacaucugggugacccgggagcccuacgugagcugcgacccggacaagugcuaccaguucgcccugggccaggggaccacgcucaacaacguccacuccaacaacaccgugcgcgaccggacccccuaccgcacccugcugaugaacgagcucggcgugcccuuccaccugggcacgaagcaggucugcaucgccuggagcuccagcuccugccacgacgggaaggccuggcugcacgugugcaucaccggcgacgacaagaacgcgaccgccagcuucaucuacaacgggcggcucguggacuccgucgugagcugguccaaggagauccugcgcacccaggagagcgagugcgugugcaucaacggcacgugcaccgucgugaugaccgacggguccgccagcggcaaggccgacaccaagauccuguucaucgaggagggcaagaucgugcacacgagcacccucuccgggagcgcgcagcacgucgaggagugcuccugcuacccccgguacccgggcgugcgcugcgugugccgggacaacuggaaggggagcaaccgccccaucgucgacaucaacaucaaggaccacuccaucgugagcuccuacgugugcagcggccuggucggcgacaccccgcggaagaacgacuccagcuccagcucccacugccuggaccccaacaacgaggagggcgggcacggggugaagggcugggccuucgacgacgggaacgacgucuggaugggccgcaccaucaacgagacgagccggcucggcuacgagaccuucaaggugaucgaggggugguccaaccccaagagcaagcugcagaucaaccgccaggugaucgucgaccgguccgaccgcagcggcuacuccgggaucuucagcguggagggcaagagcugcaucaaccggugcuucuacguggagcugauccgcgggcggaaggaggagaccgagguccucuggaccuccaacagcaucgugguguucugcggcacguccggcaccuacgggaccggcagcuggcccgacggggccgaccugaaccugaugcccaucuga

SEQ ID NO: 88285 - RNA, 1410 nt, Artificial Sequence; identical to SEQ ID NO: 87995
  derived and/or modified CDS sequence (opt1) from neuraminidase__InfluenzaA__AHC61838

SEQ ID NO: 88286 - RNA, 1410 nt, Artificial Sequence; identical to SEQ ID NO: 88031
  derived and/or modified CDS sequence (opt1) from neuraminidase__InfluenzaA__AHC61850

SEQ ID NO: 88287 - RNA, 1410 nt, Artificial Sequence; identical to SEQ ID NO: 88044
  derived and/or modified CDS sequence (opt1) from neuraminidase__InfluenzaA__AHC61862

SEQ ID NO: 88288 - RNA, 1410 nt, Artificial Sequence; identical to SEQ ID NO: 87995
  derived and/or modified CDS sequence (opt1) from neuraminidase__InfluenzaA__AHC61874

SEQ ID NO: 88289 - RNA, 1410 nt, Artificial Sequence
  derived and/or modified CDS sequence (opt1) from neuraminidase__InfluenzaA__AHC61886
augaaccccaaccagaagaucaucaccaucggcagcgugucccugaccaucagcacgaucugcuucuucaugcagaucgccauccucaucaccaccgucacccugcacuucaagcaguacgaguucaacccgccgcccaacaaccagguggugcugugcgagcccacgaucaucgagcgcaacaucaccgagaucgucuaccucaccaacaccacgaucgagaaggagaucugccccaagcccgccgaguaccggcacugguccaagccccagugcgacaucaccggguucgcgcccuucagcaaggacaacuccauccgccugagcgccggcggggacaucugggugacccgggagccguacguguccugcgaccccgacaagugcuaccaguucgcccugggccaggggaccacgcucaacaacguccacagcaacaacaccgugcgcgaccggacccccuaccgcacccugcugaugaacgagcucggcgugcccuuccaccugggcacgaagcaggucugcaucgccugguccagcuccagcugccacgacgggaaggccuggcugcacgugugcaucaccggcgacgacaagaacgcgaccgccuccuucaucuacaacgggcggcucguggacagcgucguguccuggagcaaggagauccugcgcacccaggaguccgagugcgugugcaucaacggcacgugcaccgucgugaugaccgacgggagcgccuccggcaaggccgacaccaagauccuguucaucgaggagggcaagaucgugcacacgagcacccucagcggguccgcgcagcacgucgaggagugcagcugcuacccgcgguaccccggcgugcgcugcgugugccgggacaacuggaagggguccaaccgccccaucgucgacaucaacaucaaggaccacagcaucguguccagcuacgugugcuccggccuggucggcgacacgccccggaagaacgacagcuccagcuccagccacugccuggacccgaacaacgaggagggcgggcacggggugaagggcugggccuucgacgacgggaacgacgucuggaugggccgcaccaucaacgagaccucccggcucggcuacgagaccuucaaggugaucgagggguggagcaaccccaaguccaagcugcagaucaaccgccaggugaucgucgaccggggcgaccgcagcggguacuccggcaucuucagcguggaggggaaguccugcaucaaccggugcuucuacguggagcugauccgcggccggaaggaggagaccgagguccucuggaccagcaacagcaucgugguguucugcggcacguccgggaccuacggcaccgggagcuggcccgacggcgccgaccugaaccugaugcccaucuga

SEQ ID NO: 88290 - RNA, 1410 nt, Artificial Sequence; identical to SEQ ID NO: 87999
  derived and/or modified CDS sequence (opt1) from neuraminidase__InfluenzaA__AHC61898

SEQ ID NO: 88291 - RNA, 1410 nt, Artificial Sequence; identical to SEQ ID NO: 88031
  derived and/or modified CDS sequence (opt1) from neuraminidase__InfluenzaA__AHC61910

SEQ ID NO: 88292 - RNA, 1410 nt, Artificial Sequence; identical to SEQ ID NO: 83542
  derived and/or modified CDS sequence (opt1) from neuraminidase__InfluenzaA__AHC61934

SEQ ID NO: 88293 - RNA, 1410 nt, Artificial Sequence
  derived and/or modified CDS sequence (opt1) from neuraminidase__InfluenzaA__AHC61946
augaaccccaaccagaagaucaucaccaucggcagcgugucccugaccaucagcacgaucugcuucuucaugcagaucgccauccucaucaccaccgucacccugcacuucaagcaguacgaguccuacagcccgcccaacaaccaggugaugcugugcgagcccacgaucaucgagcgcaacaucaccgagaucguguaccucaccaacaccacgaucgagaaggagaucugccccaagcuggccgaguaccggaacugguccaagccgcagugcgacaucaccggguucgcgcccuucagcaaggacaacuccauccgccugagcgccggcggggacaucugggucacccgggagcccuacguguccugcgaccccgacaagugcuaccaguucgcccucggccaggggaccacgcugaacaacgugcacagcaacaacaccguccgcgaccggaccccguaccgcacccugcucaugaacgagcugggcgugcccuuccaccugggcacgaagcaggucugcaucgccugguccagcuccagcugccacgacgggaaggccuggcuccacgugugcaucaccggcgacgacaagaacgcgaccgccuccuucaucuacaacgggcggcugguggacagcguggucuccuggagcaaggagauccugcgcacccaggaguccgagugcgugugcaucaacggcacgugcaccguggucaugaccgacgggagcgccagcggcaaggccgacaccaagauccucuucaucgaggagggcaagaucgugcacacguccacccugagcggguccgcgcagcacguggaggagugcagcugcuacccccggaaccccggcguccgcugcgugugccgggacaacuggaagggguccaaccgcccgaucguggacaucaacaucaaggaccacagcaucgucuccagcuacgugugcuccggccuggugggcgacacgccccggaagaacgacagcuccagcuccagccacugccucgaccccaacaacgaggagggcgggcacggggucaagggcugggccuucgacgacgggaacgacguguggaugggccgcaccaucaacgagaccucccggcugggcuacgagaccuucaaggucaucgagggguggagcaaccccaaguccaagcugcagaucaaccgccaggugaucguggaccggggcaaccgcagcggguacuccggcaucuucagcgucgagggcaagagcugcaucaaccggugcuucuacguggagcucauccgcgggcggaaggaggagaccgaggugcuguggaccuccaacagcaucgucguguucugcggcacguccgggaccuacggcaccgggagcuggccggacggcgccgaccugaaccucaugcccaucuga

SEQ ID NO: 88294 - RNA, 1410 nt, Artificial Sequence; identical to SEQ ID NO: 86946
  derived and/or modified CDS sequence (opt1) from neuraminidase__InfluenzaA__AHC61958

SEQ ID NO: 88295 - RNA, 1410 nt, Artificial Sequence; identical to SEQ ID NO: 87995
  derived and/or modified CDS sequence (opt1) from neuraminidase__InfluenzaA__AHC61970

SEQ ID NO: 88296 - RNA, 1410 nt, Artificial Sequence
  derived and/or modified CDS sequence (opt1) from neuraminidase__InfluenzaA__AHC61982
augaaccccaaccagaagaucaucaccaucggcagcgugucccugaccaucagcacgaucugcuucuucaugcagaucgccauccucaucaccaccgucacccugcacuucaagcaguacgaguucaacuccccgcccaacaaccaggugaugcugugcgagcccacgaucaucgagcgcaacaucaccgagaucguguaccucaccaacaccacgaucgagaaggagaucugccccaagcuggccgaguaccggaacuggagcaagccgcagugcgacaucaccggguucgcgcccuucuccaaggacaacagcauccgccuguccgccggcggggacaucugggucacccgggagcccuacgugagcugcgaccccgacaagugcuaccaguucgcccucggccaggggaccacgcugaacaacgugcacuccaacaacaccguccgcgaccggaccccguaccgcacccugcucaugaacgagcugggcgugcccuuccaccugggcacgaagcaggucugcaucgccuggagcuccagcuccugccacgacgggaaggccuggcuccacgugugcaucaccggcgacgacaagaacgcgaccgccagcuucaucuacaacgggcggcugguggacuccguggucagcugguccaaggagauccugcgcacccaggagagcgagugcgugugcaucaacggcacgugcgccguggucaugaccgacggguccgccagcggcaaggcggacaccaagauccucuucaucgaggagggcaagaucgugcacaccagcacgcuguccgggagcgcccagcacguggaggagugcuccugcuacccccgguaccccggcguccgcugcgugugccgggacaacuggaaggggagcaaccgcccgaucguggacaucaacaucaaggaccacggcaucgucuccagcuacgugugcuccggccuggugggggacacgccccggaagaacgacagcuccagcuccagccacugccucgaccccaacaacgaggagggcgggcacggcgucaaggggugggccuucgacgacggcaacgacguguggaugggccgcaccaucaacgagaccucccggcugggguacgagaccuucaaggucaucgagggcuggagcaaccccaaguccaagcugcagaucaaccgccaggugaucguggaccgggggaaccgcagcggcuacuccgggaucuucagcgucgagggcaaguccugcaucaaccggugcuucuacguggagcucauccgcggccggaaggaggagaccgaggugcuguggaccagcaacagcaucgucguguucugcgggaccuccggcacguacgggaccggcagcuggccggacggggccgaccugaaccucaugcccaucuga

SEQ ID NO: 88297 - RNA, 1410 nt, Artificial Sequence; identical to SEQ ID NO: 87999
  derived and/or modified CDS sequence (opt1) from neuraminidase__InfluenzaA__AHC61994

SEQ ID NO: 88298 - RNA, 1410 nt, Artificial Sequence; identical to SEQ ID NO: 88031
  derived and/or modified CDS sequence (opt1) from neuraminidase__InfluenzaA__AHC62006

SEQ ID NO: 88299 - RNA, 1410 nt, Artificial Sequence; identical to SEQ ID NO: 87995
  derived and/or modified CDS sequence (opt1) from neuraminidase__InfluenzaA__AHC62018

SEQ ID NO: 88300 - RNA, 1410 nt, Artificial Sequence; identical to SEQ ID NO: 86946
  derived and/or modified CDS sequence (opt1) from neuraminidase__InfluenzaA__AHC62030

SEQ ID NO: 88301 - RNA, 1410 nt, Artificial Sequence; identical to SEQ ID NO: 87999
  derived and/or modified CDS sequence (opt1) from neuraminidase__InfluenzaA__AHC62042

SEQ ID NO: 88302 - RNA, 1410 nt, Artificial Sequence; identical to SEQ ID NO: 88072
  derived and/or modified CDS sequence (opt1) from neuraminidase__InfluenzaA__AHC62053

SEQ ID NO: 88303 - RNA, 1410 nt, Artificial Sequence
  derived and/or modified CDS sequence (opt1) from neuraminidase__InfluenzaA__AHC62065
augaaccccaaccagaagaucaucaccaucggcagcgugucccugaccaucagcacgaucugcuucuucaugcagaucgccauccucgucaccaccgugacccugcacuucaagcaguacgaguucaacuccccgcccaacaaccaggugaugcugugcgagcccacgaucaucgagcgcaacaucaccgagaucgucuaccucaccaacaccacgaucgagaaggagaucugccccaagccggccgaguaccggaacuggagcaagccccagugcgacaucaccggguucgcgcccuucuccaaggacaacagcauccgccuguccgccggcggggacaucugggugacccgggagcccuacgugagcugcgacccggacaagugcuaccaguucgcccugggccaggggaccacgcucaacaacguccacuccaacaacaccgugcgcgaccggacccccuaccgcacccugcugaugaacgagcucggcgugcccuuccaccugggcacgaagcaggucugcaucgccuggagcuccagcuccugccacgacgggaaggccuggcugcacgugugcaucaccggcgacgacaagaacgcgaccgccagcuucaucuacaacgggcggcucguggacuccgucgugagcugguccaaggagauccugcgcacccaggagagcgagugcgugugcaucaacggcacgugcaccgucgugaugaccgacggguccgccagcggcaaggccgacaccaagauccuguucaucgaggagggcaagaucgugcacacgagcacccucuccgggagcgcgcagcacgucgaggagugcuccugcuacccccgguacccgggcgugcgcugcgugugccgggacaacuggaaggggagcaaccgccccaucgucgacaucaacaucaaggaccacuccaucgugagcuccuacgugugcagcggccuggucggcgacaccccgcggaagaacgacuccagcuccagcucccacugccuggaccccaacaacgaggagggcgggcacggggugaagggcugggccuucgacgacgggaacgacgucuggaugggccgcaccaucaacgagacgagccggcucggcuacgagaccuucaaggugaucgaggggugguccaaccccaagagcaagcugcagaucaaccgccaggugaucgucgaccggggcgaccgcuccggguacagcggcaucuucuccguggagggcaagagcugcaucaaccggugcuucuacguggagcugauccgcgggcggaaggaggagaccgagguccucuggaccagcaacuccaucgugguguucugcggcacgagcgggaccuacggcaccggguccuggcccgacggcgccgaccugaaccugaugcccaucuga

SEQ ID NO: 88304 - RNA, 1410 nt, Artificial Sequence; identical to SEQ ID NO: 88130
  derived and/or modified CDS sequence (opt1) from neuraminidase__InfluenzaA__AHC62077

SEQ ID NO: 88305 - RNA, 1410 nt, Artificial Sequence; identical to SEQ ID NO: 88044
  derived and/or modified CDS sequence (opt1) from neuraminidase__InfluenzaA__AHC62089

SEQ ID NO: 88306 - RNA, 1410 nt, Artificial Sequence; identical to SEQ ID NO: 87995
  derived and/or modified CDS sequence (opt1) from neuraminidase__InfluenzaA__AHC62101

SEQ ID NO: 88307 - RNA, 1410 nt, Artificial Sequence; identical to SEQ ID NO: 88044
  derived and/or modified CDS sequence (opt1) from neuraminidase__InfluenzaA__AHC62113

SEQ ID NO: 88308 - RNA, 1410 nt, Artificial Sequence
  derived and/or modified CDS sequence (opt1) from neuraminidase__InfluenzaA__AHC62125
augaaccccaaccagaagaucaucaccaucggcagcgugucccugaccaucagcacgaucugcuucuucaugcagaucgccauccucaucaccaccgucacccugcacuucaagcaguacgaguucaacuccccgcccaacaaccaggugaugcugugcgagcccacgaucaucgagcgcaacaucaccgagaucguguaccucaccaacaccacgaucgagaaggagaucugccccaagcuggccgaguaccggaacuggagcaagccgcagugcgacaucaccggguucgcgcccuucuccaaggacaacagcauccgccuguccgccggcggggacaucugggucacccgggagcccuacgugagcugcgaccccaacaagugcuaccaguucgcccucggccaggggaccacgcugaacaacgugcacuccaacaacaccguccgcgaccggaccccguaccgcacccugcucaugaacgagcugggcgugcccuuccaccugggcacgaagcaggucugcaucgccuggagcuccagcuccugccacgacgggaaggccuggcuccacgugugcaucaccggcgacgacaagaacgcgaccgccagcuucaucuacaacgggaagcugguggacuccguggucagcugguccaaggagauccugcggacccaggagagcgagugcgugugcaucaacggcacgugcaccguggucaugaccgacggguccgccagcggcaaggccgacaccaagauccucuucaucgaggagggcaagaucgugcacacgagcacccuguccgggagcgcgcagcacguggaggagugcuccugcuacccccgcuaccccggcguccggugcgugugccgcgacaacuggaaggggagcaaccggccgaucguggacaucaacaucaaggaccacuccaucgucagcuccuacgugugcagcggccuggugggcgacacgccccgcaagaacgacuccagcuccagcucccacugccucgaccccaacaacgaggagggcgggcacggggucaagggcugggccuucgacgacgggaacgacguguggaugggccggaccaucaacgagaccagccgccugggcuacgagaccuucaaggucaucgaggggugguccaaccccaagagcaagcugcagaucaaccgccaggugaucguggaccggggcaacaaguccggguacagcggcaucuucuccgucgagggcaagagcugcaucaaccggugcuucuacguggagcucauccgcgggcggaaggaggagaccgaggugcuguggaccagcaacuccaucgucguguucugcggcacgagcgggaccuacggcaccggguccuggccggacggcgccgaccugaaccucaugcccaucuga

SEQ ID NO: 88309 - RNA, 1410 nt, Artificial Sequence
  derived and/or modified CDS sequence (opt1) from neuraminidase__InfluenzaA__AHC62137
augaaccccaaccagaagaucaucaccaucggcagcgugucccugaccaucagcacgaucugcuucuucaugcagaucgccauccucaucaccaccgucacccugcacuucaagcaguacgaguucaacuccccgcccaacaaccaggugaugcugugcgagcccacgaucaucgagcgcaacaucaccgagaucguguaccucaccaacaccacgaucgagaaggagaucugccccaagcuggccgaguaccggaacuggagcaagccgcagugcgacaucaccggguucgcgcccuucuccaaggacaacagcauccgccuguccgccggcggggacaucugggucacccgggagcccuacgugagcugcgaccccgacaagugcuaccaguucgcccucggccaggggaccacgcugaacaacgugcacuccaacaacaccguccgcgaccggaccccguaccgcacccugcucaugaacgagcugggcgugcccuuccaccugggcacgaagcaggucugcaucgccuggagcuccagcuccugccacgacgggaaggccuggcuccacgugugcaucaccggcgacgacaagaacgcgaccgccagcuucaucuacaacgggcggcugguggacuccguggucagcugguccaaggagauccugcgcacccaggagagcgagugcgugugcaucaacggcacgugcaccguggucaugaccgacggguccgccagcggcaaggccgacaccaagauccucuucaucgaggagggcaagaucgugcacacgagcacccuguccgggagcgcgcagcacguggaggagugcuccugcuacccccgguaccccggcguccgcugcgugugccgggacaacuggaaggggagcaaccgcccgaucguggacaucaacaucaaggaccacuccaucgucagcuccuacgugugcagcggccuggugggcgacacgccccggaagaacgacuccagcuccagcucccacugccucgaccccaacaacgaggagggcgggcacggggucaagggcugggccuucgacgacgggaacgacguguggaugggccgcaccaucaacgagaccagccggcugggcuacgagaccuucaaggucaucgaggggugguccaaccccaagagcaagcugcagaucaaccgccaggugaucguggaccggggcgaccgcuccggguacagcggcaucuucuccgucgagggcaagagcugcaucaaccggugcuucuacguggagcucauccgcgggcggaaggaggagaccgaggugcuguggaccagcaacuccaucgucguguucugcggcacgagcgggaccuacggcaccggguccuggccggacggcgccgaccugaaccucaugcccaucuga

SEQ ID NO: 88310 - RNA, 1410 nt, Artificial Sequence
  derived and/or modified CDS sequence (opt1) from neuraminidase__InfluenzaA__AHC62149
augaaccccaaccagaagaucaucaccaucggcagcgugucccugaccaucagcacgaucugcuucuucaugcagaucgccauccucaucaccaccgucacccugcacuucaagcaguacgaguucaacuccccgcccaacaaccaggugaugcugugcgagcccacgaucaucgagcgcaacaucaccgagaucguguaccucaccaacaccacgaucgagaaggagaucugccccaagccggccgaguaccggaacuggagcaagccccagugcgacaucaccggguucgcgcccuucuccaaggacaacagcauccgccuguccgccggcggggacaucugggucacccgggagcccuacgugagcugcgacccggacaagugcuaccaguucgcccugggccaggggaccacgcucaacaacgugcacuccaacaacaccguccgcgaccggacccccuaccgcacccugcugaugaacgagcucggcgugcccuuccaccugggcacgaagcaggucugcaucgccuggagcuccagcuccugccacgacgggaaggccuggcugcacgugugcaucaccggcgacgacaagaacgcgaccgccagcuucaucuacaacgggcggcucguggacuccguggucagcugguccaaggagauccugcgcacccaggagagcgagugcgugugcaucaacggcacgugcaccguggucaugaccgacggguccgccagcggcaaggccgacaccaagauccuguucaucgaggagggcaagaucgugcacacgagcacccucuccgggagcgcgcagcacguggaggagugcuccugcuacccccgguacccgggcguccgcugcgugugccgggacaacuggaaggggagcaaccgccccaucguggacaucaacauccgggaccacuccaucgucagcuccuacgugugcagcggccuggugggcgacaccccgcgcaagaacgacuccagcuccagcucccacugccuggaccccaacaacgaggagggcgggcacggggucaagggcugggccuucgacgacgggaacgacguguggaugggccggaccaucaacgagacgagccgccucggcuacgagaccuucaaggucaucgaggggugguccaaccccaagagcaagcugcagaucaaccgccaggugaucguggaccggggcgaccgguccggguacagcggcaucuucuccgucgagggcaagagcugcaucaaccgcugcuucuacguggagcugauccgggggcgcaaggaggagaccgaggugcucuggaccagcaacuccaucgucguguucugcggcacgagcgggaccuacggcaccggguccuggcccgacggcgccgaccugaaccugaugcccaucuga

SEQ ID NO: 88311 - RNA, 1410 nt, Artificial Sequence; identical to SEQ ID NO: 88031
  derived and/or modified CDS sequence (opt1) from neuraminidase__InfluenzaA__AHC62161

SEQ ID NO: 88312 - RNA, 1410 nt, Artificial Sequence
  derived and/or modified CDS sequence (opt1) from neuraminidase__InfluenzaA__AHC62173
augaaccccaaccagaagaucaucaccaucggcagcgugucccugaccaucagcacgaucugcuucuucaugcagaucgccauccucaucaccaccgucacccugcacuucaagcagugcgaguucaacuccccgcccaacaaccaggugaugcugugcgagcccacgaucaucgagcgcaacaucaccgagaucguguaccucaccaacaccacgaucgagaaggagaucugccccaagcuggccgaguaccggaacuggagcaagccgcagugcgacaucaccggguucgcgcccuucuccaaggacaacagcauccgccuguccgccggcggggacaucugggucacccgggagcccuacgugagcugcgaccccaacaagugcuaccaguucgcccucggccaggggaccacgcugaacaacgugcacuccaacaacaccguccgcgaccggaccccguaccgcacccugcucaugaacgagcugggcgugcccuuccaccugggcacgaagcaggucugcaucgccuggagcuccagcuccugccacgacgggaaggccuggcuccacgugugcaucaccggcgacgacaagaacgcgaccgccagcuucaucuacaacgggaagcugguggacuccguggucagcugguccaaggagauccugcggacccaggagagcgagugcgugugcaucaacggcacgugcaccguggucaugaccgacggguccgccagcggcaaggccgacaccaagauccucuucaucgaggagggcaagaucgugcacacgagcacccuguccgggagcgcgcagcacguggaggagugcuccugcuacccccgcuaccccggcguccggugcgugugccgcgacaacuggaaggggagcaaccggccgaucguggacaucaacaucaaggaccacuccaucgucagcuccuacgugugcagcggccuggugggcgacacgccccgcaagaacgacuccagcuccagcucccacugccucgaccccaacaacgaggagggcgggcacggggucaagggcugggccuucgacgacgggaacgacguguggaugggccggaccaucaacgagaccagccgccugggcuacgagaccuucaaggucaucgaggggugguccaaccccaagagcaagcugcagaucaaccgccaggugaucguggaccggggcaaccgguccggguacagcggcaucuucuccgucgagggcaagagcugcaucaaccgcugcuucuacguggagcucauccgggggcgcaaggaggagaccgaggugcuguggaccagcaacuccaucgucguguucugcggcacgagcgggaccuacggcaccggguccuggccggacggcgccgaccugaaccucaugcccaucuga

SEQ ID NO: 88313 - RNA, 1410 nt, Artificial Sequence; identical to SEQ ID NO: 88044
  derived and/or modified CDS sequence (opt1) from neuraminidase__InfluenzaA__AHC62185

SEQ ID NO: 88314 - RNA, 1410 nt, Artificial Sequence; identical to SEQ ID NO: 86946
  derived and/or modified CDS sequence (opt1) from neuraminidase__InfluenzaA__AHC62197

SEQ ID NO: 88315 - RNA, 1410 nt, Artificial Sequence
  derived and/or modified CDS sequence (opt1) from neuraminidase__InfluenzaA__AHC62209
augaaccccaaccagaagaucaucaccaucggcagcgugucccugaccaucagcacgaucugcuucuucaugcagaucgccauccucaucaccaccgucacccugcacuucaagcaguacgaguucaacuccccgcccaacaaccaggugaugcugugcgagcccacgaucaucgagcgcaacaucaccgagaucguguaccucaccaacaccacgaucgagaaggagaucugccccaagccggccgaguaccggaacuggagcaagccccagugcgacaucaccggguucgcgcccuucuccaaggacaacagcauccgccuguccgccggcggggacaucugggucacccgggagcccuacgugagcugcgacccggacaagugcuaccaguucgcccugggccaggggaccacgcucaacaacgugcacuccaacaacaccguccgcgaccggacccccuaccgcacccugcugaugaacgagcucggcgugcccuuccaccugggcacgaagcaggucugcaucgccuggagcuccagcuccugccacgacgggaaggccuggcugcacgugugcaucaccggcgacgacaagaacgcgaccgccagcuucaucuacaacgggcggcucguggacuccguggucagcugguccaaggagauccugcgcacccaggagagcgagugcgugugcaucaacggcacgugcaccguggucaugaccgacggguccgccagcggcaaggccgacaccaagauccuguucaucgaggagggcaagaucgugcacacgagcacccucuccgggagcgcgcagcacguggaggagugcuccugcuacccccgguacccgggcguccgcugcgugugccgggacaacuggaaggggagcaaccgccccaucguggacaucaacaucaagaaccacuccaucgucagcuccuacgugugcagcggccuggugggcgacaccccgcggaagaacgacuccagcuccagcucccacugccuggaccccaacaacgaggagggcgggcacggggucaagggcugggccuucgacgacgggaacgacguguggaugggccgcaccaucaacgagacgagccggcucggcuacgagaccuucaaggucaucgaggggugguccaaccccaagagcaagcugcagaucaaccgccaggugaucguggaccggggcgaccgcuccggguacagcggcaucuucuccgucgagggcaagagcugcaucaaccggugcuucuacguggagcugauccgcgggcggaaggaggagaccgaggugcucuggaccagcaacuccaucgucguguucugcggcacgagcgggaccuacggcaccggguccuggcccgacggcgccgaccugaaccugaugcccaucuga

SEQ ID NO: 88316 - RNA, 1410 nt, Artificial Sequence; identical to SEQ ID NO: 87999
  derived and/or modified CDS sequence (opt1) from neuraminidase__InfluenzaA__AHC62221

SEQ ID NO: 88317 - RNA, 1410 nt, Artificial Sequence; identical to SEQ ID NO: 83542
  derived and/or modified CDS sequence (opt1) from neuraminidase__InfluenzaA__AHC62233

SEQ ID NO: 88318 - RNA, 1410 nt, Artificial Sequence; identical to SEQ ID NO: 87995
  derived and/or modified CDS sequence (opt1) from neuraminidase__InfluenzaA__AHC62245

SEQ ID NO: 88319 - RNA, 1410 nt, Artificial Sequence
  derived and/or modified CDS sequence (opt1) from neuraminidase__InfluenzaA__AHC62257
augaaccccaaccagaagaucaucaccaucggcagcgugucccugaccaucagcacgaucugcuucuucaugcagaucgccauccucaucaccaccgucacccugcacuucaagcaguacgaguucaacuccccgcccaacaaccaggugaugcugugcgagcccacgaucaucgagcgcaacaucaccgagaucguguaccucaccaacaccacgaucgagaaggagaucugccccaagccggccgaguaccggaacuggagcaagccccagugcgacaucaccggguucgcgcccuucuccaaggacaacagcauccgccuguccgccggcggggacaucugggucacccgggagcccuacgugagcugcgacccggacaagugcuaccaguucgcccugggccaggggaccacgcucaacaacgugcacuccaacaacaccguccgcgaccggacccccuaccgcacccugcugaugaacgagcucggcgugcccuuccaccugggcacgaagcaggucugcaucgccuggagcuccagcuccugccacgacgggaaggccuggcugcacgugugcaucaccggcgacgacaagaacgcgaccgccagcuucaucuacaacgggcggcucguggacuccguggucagcugguccaaggagauccugcgcacccaggagagcgagugcgugugcaucaacggcacgugcaccguggucaugaccgacggguccgccagcggcaaggccgacaccaagauccuguucaucgaggagggcaagaucgugcacacgagcacccucuccgggagcgcgcagcacguggaggagugcuccugcuacccccgguacccgggcguccgcugcgugugccgggacaacuggaaggggagcaaccgccccaucguggacaucaacaucaaggaccacuccaucgucagcuccuacgugugcagcggccuggugggcgacaccccgcggaagaacgacuccagcuccagcucccacugccuggaccccaacaacgaggagggcgggcacggggucaagggcugggccuucgacgacgggaacgacguguggaugggccgcaccaucaacgagacgagccggcucggcuacgagaccuucaaggucaucgaggggugguccaaccccaagagcaagcugcagaucaaccgccaggugaucgugggccgcggggaccgguccggcuacagcgggaucuucuccgucgagggcaagagcugcaucaaccggugcuucuacguggagcugauccgcggccggaaggaggagaccgaggugcucuggaccagcaacuccaucgucguguucugcgggacgagcggcaccuacgggaccggcuccuggcccgacggggccgaccugaaccugaugcccaucuga

SEQ ID NO: 88320 - RNA, 1410 nt, Artificial Sequence; identical to SEQ ID NO: 88072
  derived and/or modified CDS sequence (opt1) from neuraminidase__InfluenzaA__AHC62269

SEQ ID NO: 88321 - RNA, 1410 nt, Artificial Sequence; identical to SEQ ID NO: 88044
  derived and/or modified CDS sequence (opt1) from neuraminidase__InfluenzaA__AHC62281

SEQ ID NO: 88322 - RNA, 1410 nt, Artificial Sequence; identical to SEQ ID NO: 87999
  derived and/or modified CDS sequence (opt1) from neuraminidase__InfluenzaA__AHC62293

SEQ ID NO: 88323 - RNA, 1410 nt, Artificial Sequence; identical to SEQ ID NO: 83542
  derived and/or modified CDS sequence (opt1) from neuraminidase__InfluenzaA__AHC62305

SEQ ID NO: 88324 - RNA, 1410 nt, Artificial Sequence; identical to SEQ ID NO: 87995
  derived and/or modified CDS sequence (opt1) from neuraminidase__InfluenzaA__AHC62317

SEQ ID NO: 88325 - RNA, 1410 nt, Artificial Sequence
  derived and/or modified CDS sequence (opt1) from neuraminidase__InfluenzaA__AHC62329
augaaccccaaccagaagaucaucaccaucggcagcgugucccugaccaucagcacgaucugcuucuucaugcagaucgccauccucaucaccaccgucacccugcacuucaagcaguacgaguucaacuccccgcccaacaaccaggugaugcugugcgagcccacgaucaucgagcgcaacaucaccgagaucguguaccucaccaacaccacgaucgagaaggagaucugccccaagccggccgaguaccggaacuggagcaagccccagugcgacaucaccggguucgcgcccuucuccaaggacaacagcauccgccuguccgccggcggggacaucugggucacccgggagcccuacgugagcugcgacccggacaagugcuaccaguucgcccugggccaggggaccacgcucaacaacgugcacuccaacaacaccguccgcgaccggacccccuaccgcacccugcugaugaacgagcucggcgugcccuuccaccugggcacgaagcaggucugcaucgccuggagcuccagcuccugccacgacgggaaggccuggcugcacgugugcaucaccggcgacgacaagaacgcgaccgccagcuucaucuacaacgggcggcucguggacuccguggucagcugguccaaggagauccugcgcacccaggagagcgagugcgugugcaucaacggcacgugcaccguggucaugaccgacggguccgccagcggcaaggccgacaccaagauccuguucaucgaggagggcaagaucgugcacacgagcacccucuccgggagcgcgcagcacguggaggagugcuccugcuacccccgguacccgggcguccgcugcgugugccgggacaacuggaaggggagcaaccgccccaucguggacaucaacaucaaggaccacuccaucgucagcuccuacgugugcagcggccuggugggcgacaccccgcggaagaacgacuccagcuccagcucccacugccuggaccccaacaacgaggagggcgggcacggggucaagggcugggccuucgacgacgggaacgacguguggaugggccgcaccaucaacgagacgagccggcucggcuacgagaccuucaaggucaucgaggggugguccaaccccaagagcaagcugcagaucaaccgccaggugaucgccgaccggggcgaccgcuccggguacagcggcaucuucuccguggagggcaagagcugcaucaaccggugcuucuacgucgagcugauccgcgggcggaaggaggagaccgaggugcucuggaccagcaacuccaucguggucuucugcggcacgagcgggaccuacggcaccggguccuggcccgacggcgccgaccugaaccugaugcccaucuga

SEQ ID NO: 88326 - RNA, 1410 nt, Artificial Sequence; identical to SEQ ID NO: 87995
  derived and/or modified CDS sequence (opt1) from neuraminidase__InfluenzaA__AHC62341

SEQ ID NO: 88327 - RNA, 1410 nt, Artificial Sequence
  derived and/or modified CDS sequence (opt1) from neuraminidase__InfluenzaA__AHC62353
augaaccccaaccagaagaucaucaccaucggcagcgugucccugaccaucagcacgaucugcuucuucaugcagaucgccauccucaucaccaccgucacccugcacuucaagcaguacgaguucaacuccccgcccaacaaccaggugaugcugugcgagcccacgaucaucgagcgcaacaucaccgagaucguguaccucaccaacaccacgaucgagaaggagaucugccccaagcuggccgaguaccggaacuggagcaagccgcagugcgacaucaccggguucgcgcccuucuccaaggacaacagcauccgccuguccgccggcggggacaucugggucacccgggagcccuacgugagcugcgaccccgacaagugcuaccaguucgcccucggccaggggaccacgcugaacaacgugcacuccaacaacaccguccgcgaccggaccccguaccgcacccugcucaugaacgagcugggcgugcccuuccaccugggcacgaagcaggucugcaucgccuggagcuccagcuccugccacgacgggaaggccuggcuccacgugugcaucaccggcgacgacaagaacgcgaccgccagcuucaucuacaacgggcggcugguggacuccguggucagcugguccaaggagauccugcgcacccaggagagcgagugcgugugcaucaacggcacgugcaccguggucaugaccgacggguccgccagcggcaaggccgacaccaagauccucuucaucgaggagggcaagaucgugcacacgagcacccuguccgggagcgcgcagcacguggaggagugcuccugcuacccccgguaccccggcguccgcugcgugugccgggacaacuggaaggggagcaaccgcccgaucguggacaucaacaucaaggaccacuccaucgucagcuccuacgugugcagcggccuggugggcgacacgccccggaagaccgacuccagcuccagcucccacugccucgaccccaacaacgaggagggcgggcacggggucaagggcugggccuucgacgacgggaacgacguguggaugggccgcaccaucaacgagaccagccggcugggcuacgagaccuucaaggucaucgaggggugguccaaccccaagagcaagcugcagaucaaccgccaggugaucguggaccggggcaaccgcuccggguacagcggcaucuucuccgucgagggcaagagcugcaucaaccggugcuucuacguggagcucauccgcgggcggaaggaggagaccgaggugcuguggacgagcaacuccaucgucguguucugcggcaccagcgggaccuacggcaccggguccuggccggacggcgccgaccugaaccucaugcccaucuga

SEQ ID NO: 88328 - RNA, 1410 nt, Artificial Sequence; identical to SEQ ID NO: 87995
  derived and/or modified CDS sequence (opt1) from neuraminidase__InfluenzaA__AHC62365

SEQ ID NO: 88329 - RNA, 1410 nt, Artificial Sequence; identical to SEQ ID NO: 88212
  derived and/or modified CDS sequence (opt1) from neuraminidase__InfluenzaA__AHC62377

SEQ ID NO: 88330 - RNA, 1410 nt, Artificial Sequence; identical to SEQ ID NO: 88044
  derived and/or modified CDS sequence (opt1) from neuraminidase__InfluenzaA__AHC62389

SEQ ID NO: 88331 - RNA, 1410 nt, Artificial Sequence; identical to SEQ ID NO: 88044
  derived and/or modified CDS sequence (opt1) from neuraminidase__InfluenzaA__AHC62401

SEQ ID NO: 88332 - RNA, 1410 nt, Artificial Sequence; identical to SEQ ID NO: 88072
  derived and/or modified CDS sequence (opt1) from neuraminidase__InfluenzaA__AHC62413

SEQ ID NO: 88333 - RNA, 1410 nt, Artificial Sequence; identical to SEQ ID NO: 88130
  derived and/or modified CDS sequence (opt1) from neuraminidase__InfluenzaA__AHC62425

SEQ ID NO: 88334 - RNA, 1410 nt, Artificial Sequence; identical to SEQ ID NO: 83542
  derived and/or modified CDS sequence (opt1) from neuraminidase__InfluenzaA__AHC62437

SEQ ID NO: 88335 - RNA, 1410 nt, Artificial Sequence; identical to SEQ ID NO: 88044
  derived and/or modified CDS sequence (opt1) from neuraminidase__InfluenzaA__AHC62449

SEQ ID NO: 88336 - RNA, 1410 nt, Artificial Sequence; identical to SEQ ID NO: 87999
  derived and/or modified CDS sequence (opt1) from neuraminidase__InfluenzaA__AHC62461

SEQ ID NO: 88337 - RNA, 1410 nt, Artificial Sequence; identical to SEQ ID NO: 87995
  derived and/or modified CDS sequence (opt1) from neuraminidase__InfluenzaA__AHC62473

SEQ ID NO: 88338 - RNA, 1410 nt, Artificial Sequence; identical to SEQ ID NO: 86170
  derived and/or modified CDS sequence (opt1) from neuraminidase__InfluenzaA__AHC62485

SEQ ID NO: 88339 - RNA, 1410 nt, Artificial Sequence; identical to SEQ ID NO: 88044
  derived and/or modified CDS sequence (opt1) from neuraminidase__InfluenzaA__AHC62509

SEQ ID NO: 88340 - RNA, 1410 nt, Artificial Sequence
  derived and/or modified CDS sequence (opt1) from neuraminidase__InfluenzaA__AHC62521
augaaccccaaccagaagaucaucaccaucggcagcgugucccugaccaucagcacgaucugcuucuucaugcagaucgccauccucaucaccaccgucacccugcacuucaagcaguacgaguucaacuccccgcccaacaaccaggugaugcugugcgagcccacgaucaucgagcgcaacaucaccgagaucguguaccucaccaacaccacgaucgagaaggagaucugccccaagcuggccgaguaccggaacuggagcaagccgcagugcgacaucaccggguucgcgcccuucuccaaggacaacagcauccgccuguccgccggcggggacaucugggucacccgggagcccuacgugagcugcgaccccaacaagugcuaccaguucgcccucggccaggggaccacgcugaacaacgugcacuccaacaacaccguccgcgaccggaccccguaccgcacccugcucaugaacgagcugggcgugcccuuccaccugggcacgaagcaggucugcaucgccuggagcuccagcuccugccacgacgggaaggccuggcuccacgugugcaucaccggcgacgacaagaacgcgaccgccagcuucaucuacaacgggaagcugguggacuccguggucagcugguccaaggagauccugcggacccaggagagcgagugcgugugcaucaacggcacgugcaccguggucaugaccgacggguccgccagcggcaaggccgacaccaagauccucuucaucgaggagggcaagaucgugcacacgagcacccuguccgggagcgcgcagcacguggaggagugcuccugcuacccccgcuaccccggcguccggugcgugugccgcgacaacuggaaggggagcaaccggccgaucguggacaucaacaucaaggaccacuccaucgucagcuccuacgugugcagcggccuggugggcgacacgccccgcaagaacgacuccagcuccagcucccacugccucgaccccaacaacgaggagggcgggcacggggucaagggcugggccuucgacgacgggaacgacguguggaugggccggaccaucaacgagaccagccgccugggcuacgagaccuucaaggucaucgaggggugguccaaccccaagagcaagcugcagaucaaccgccaggugaucguggaccggggcaaccgguccggguacagcggcaucuucuccgucgagggcaagagcugcaucaaccgcugcuucuacguggagcucauccgggggcgcaaggaggagaccgaggugcuguggaccagcaacuccaucaucgucuucugcggcacgagcgggaccuacggcaccggguccuggccggacggcgccgaccugaaccucaugcccaucuga

SEQ ID NO: 88341 - RNA, 1410 nt, Artificial Sequence
  derived and/or modified CDS sequence (opt1) from neuraminidase__InfluenzaA__AHC62533
augaaccccaaccagaagaucaucaccaucggcagcgugucccugaccaucagcacgaucugcuucuucaugcaggucgccauccucaucaccaccgugacccugcacuucaagcaguacgaguucaacuccccgcccaacaaccaggugaugcugugcgagcccacgaucaucgagcgcaacaucaccgagauccucuaccugaccaacaccacgaucgagaaggagaucugccccaagcuggccgaguaccggaacuggagcaagccgcagugcgacaucaccggguucgcgcccuucuccaaggacaacagcauccgccucuccgccggcggggacaucugggucacccgggagcccuacgugagcugcgaccccgacaagugcuaccaguucgcccugggccaggggaccacgcugaacaacgugcacuccaacaacaccguccgcgaccggaccccguaccgcacccuccugaugaacgagcugggcgugcccuuccaccucggcacgaagcaggucugcaucgccuggagcuccagcuccugccacgacgggaaggccuggcugcacgugugcaucaccggcgacgacaagaacgcgaccgccagcuucaucuacaacgggaagcugguggacuccguggucagcugguccaaggagauccuccggacccaggagagcgagugcgugugcaucaacggcacgugcaccguggucaugaccgacggguccgccagcggcaaggccgacaccaagauccuguucaucgaggagggcaagaucgugcacacgagcacccuguccgggagcgcgcagcacguggaggagugcuccugcuacccccgcuaccccggcguccggugcgugugccgcgacaacuggaaggggagcaaccggccgaucguggacaucaacaucaaggaccacuccaucgucagcuccuacgugugcagcggccucgugggcgacacgccccgcaagaacgacuccagcuccagcucccacugccuggaccccaacaacgaggagggcgggaacggggucaagggcugggccuucgacgacgggaacgacguguggaugggccggaccaucaacgagaccagccgccugggcuacgagaccuucaaggucaucgaggggugguccaaccccaagagcaagcuccagaucaaccgccaggugaucguggaccggggcaaccgguccggguacagcggcaucuucuccgucgagggcaagagcugcaucaaccgcugcuucuacguggagcugauccgggggcgcaaggaggagaccgaggugcuguggaccagcaacuccaucgucguguucugcggcacgagcgggaccuacggcaccggguccuggccggacggcgccgaccucaaccugaugcccaucuga

SEQ ID NO: 88342 - RNA, 1410 nt, Artificial Sequence; identical to SEQ ID NO: 88199
  derived and/or modified CDS sequence (opt1) from neuraminidase__InfluenzaA__AHC62545

SEQ ID NO: 88343 - RNA, 1410 nt, Artificial Sequence; identical to SEQ ID NO: 88044
  derived and/or modified CDS sequence (opt1) from neuraminidase__InfluenzaA__AHC62557

SEQ ID NO: 88344 - RNA, 1410 nt, Artificial Sequence; identical to SEQ ID NO: 87995
  derived and/or modified CDS sequence (opt1) from neuraminidase__InfluenzaA__AHC62569

SEQ ID NO: 88345 - RNA, 1410 nt, Artificial Sequence; identical to SEQ ID NO: 88044
  derived and/or modified CDS sequence (opt1) from neuraminidase__InfluenzaA__AHC62581

SEQ ID NO: 88346 - RNA, 1410 nt, Artificial Sequence
  derived and/or modified CDS sequence (opt1) from neuraminidase__InfluenzaA__AHC62593
augaaccccaaccagaagaucaucaccaucggcagcgugucccugaccaucagcacgaucugcuucuucaugcagaucgccauccucaucaccaccgucacccugcacuucaagcaguacgaguucaacuccccgcccaacaaccaggugaugcugugcgagcccacgaucaucgagcgcaacaucaccgagaucguguaccucaccaacaccacgaucgagaaggagaucugccccaagcuggccgaguaccggaacuggagcaagccgcagugcgacaucaccggguucgcgcccuucuccaaggacaacagcauccgccuguccgccggcgggaacaucugggucacccgggagcccuacgugagcugcgaccccgacaagugcuaccaguucgcccucggccaggggaccacgcugaacaacgugcacuccaacaacaccguccgcgaccggaccccguaccgcacccugcucaugaacgagcugggcgugcccuuccaccugggcacgaagcaggucugcaucgccuggagcuccagcuccugccacgacgggaaggccuggcuccacgugugcaucaccggcgacgacaagaacgcgaccgccagcuucaucuacaacgggcggcugguggacuccguggucagcugguccaaggagauccugcgcacccaggagagcgagugcgugugcaucaacggcacgugcaccguggucaugaccgacggguccgccagcggcaaggccgacaccaagauccucuucaucgaggagggcaagaucgugcacacgagcacccuguccgggagcgcgcagcacguggaggagugcuccugcuacccccgguaccccggcguccgcugcgugugccgggacaacuggaaggggagcaaccgcccgaucguggacaucaacaucaaggaccacuccaucgucagcuccuacgugugcagcggccuggugggcgacacgccccggaagaacgacuccagcuccagcucccacugccucgaccccaacaacgaggagggcgggcacggggucaagggcugggccuucgacgacgggaacgacguguggaugggccgcaccaucaacgagaccagccggcugggcuacgagaccuucaaggucaucgaggggugguccaaccccaagagcaagcugcagaucaaccgccaggugaucguggaccggggcaaccgcuccggguacagcggcaucuucuccgucgagggcaagagcugcaucaaccggugcuucuacguggagcucauccgcgggcggaaggaggagaccgaggugcuguggaccagcaacuccaucgucguguucugcggcacgagcgggaccuacggcaccggguccuggccggacggcgccgaccugaaccucaugcccaucuga

SEQ ID NO: 88347 - RNA, 1410 nt, Artificial Sequence; identical to SEQ ID NO: 88031
  derived and/or modified CDS sequence (opt1) from neuraminidase__InfluenzaA__AHC62605

SEQ ID NO: 88348 - RNA, 1410 nt, Artificial Sequence
  derived and/or modified CDS sequence (opt1) from neuraminidase__InfluenzaA__AHC62617
augaaccccaaccagaagaucaucaccaucggcagcgugucccugaccaucagcacgaucugcuucuucaugcagaucgccauccucaucaccaccgucacccugcacuucaagcaguacgaguucaacuccccgcccaacaaccaggugaugcgcugcgagcccacgaucaucgagcggaacaucaccgagaucguguaccugaccaacaccacgaucgagaaggagaucugccccaagcucgccgaguaccgcaacuggagcaagccgcagugcgacaucaccggguucgcgcccuucuccaaggacaacagcauccggcuguccgccggcggggacaucugggucacccgcgagcccuacgugagcugcgaccccaacaagugcuaccaguucgcccugggccaggggaccacgcucaacaacgugcacuccaacaacaccguccgggaccgcaccccguaccggacccugcugaugaacgagcucggcgugcccuuccaccugggcacgaagcaggucugcaucgccuggagcuccagcuccugccacgacgggaaggccuggcugcacgugugcaucaccggcgacgacaagaacgcgaccgccagcuucaucuacaacgggaagcucguggacuccguggucagcugguccaaggagauccugcgcacccaggagagcgagugcgugugcaucaacggcacgugcaccguggucaugaccgacggguccgccagcggcaaggccgacaccaagauccuguucaucgaggagggcaagaucgugcacacgagcacccucuccgggagcgcgcagcacguggaggagugcuccugcuacccccgguaccccggcguccgcugcgugugccgggacaacuggaaggggagcaaccgcccgaucguggacaucaacaucaaggaccacuccaucgucagcuccuacgugugcagcggccuggugggcgacacgccccggaagaacgacuccagcuccagcucccacugccuggaccccaacaacgaggagggcgggcacggggucaagggcugggccuucgacgacgggaacgacguguggaugggccgcaccaucaacgagaccagccggcucggcuacgagaccuucaaggucaucgaggggugguccaaccccaagagcaagcugcagaucaaccgccaggugaucguggaccggggcaaccgcuccggguacagcggcaucuucuccgucgagggcaagagcugcaucaaccggugcuucuacguggagcugauccgcgggcggaaggaggagaccgaggugcucuggaccagcaacuccaucgucguguucugcggcacgagcgggaccuacggcaccggguccuggccggacggcgccgaccugaaccugaugcccaucuga

SEQ ID NO: 88349 - RNA, 1410 nt, Artificial Sequence; identical to SEQ ID NO: 87999
  derived and/or modified CDS sequence (opt1) from neuraminidase__InfluenzaA__AHC62629

SEQ ID NO: 88350 - RNA, 1410 nt, Artificial Sequence
  derived and/or modified CDS sequence (opt1) from neuraminidase__InfluenzaA__AHC62641
augaaccccaaccagaagaucaucaccaucggcagcgugucccugaccaucagcacggucugcuucuucaugcaggucgccauccucaucaccaccgugacccugcacuucaagcaguacgaguucaacuccccgcccaacaaccaggugaugcugugcgagcccacgaucaucgagcgcaacaucaccgagauccucuaccugaccaacaccacgaucgagaaggagaucugccccaagcuggccgaguaccggaacuggagcaagccgcagugcgacaucaccggguucgcgcccuucuccaaggacaacagcauccgccucuccgccggcggggacaucugggugacccgggagcccuacgugagcugcgaccccgacaagugcuaccaguucgcccugggccaggggaccacgcugaacaacguccacuccaacaacaccgugcgcgaccggaccccguaccgcacccuccugaugaacgagcugggcgugcccuuccaccucggcacgaagcaggucugcaucgccuggagcuccagcuccugccacgacgggaaggccuggcugcacgugugcaucaccggcgacgacaagaacgcgaccgccagcuucaucuacaacgggaagcugguggacuccgucgugagcugguccaaggagauccuccggacccaggagagcgagugcgugugcaucaacggcacgugcaccgucgugaugaccgacggguccgccagcggcaaggccgacaccaagauccuguucaucgaggagggcaagaucgugcacacgagcacccuguccgggagcgcgcagcacgucgaggagugcuccugcuacccccgcuaccccggcgugcggugcgugugccgcgacaacuggaaggggagcaaccggccgaucgucgacaucaacaucaaggaccacuccaucgugagcuccuacgugugcagcggccucgucggcgacacgccccgcaagaacgacuccagcuccagcucccacugccuggaccccaacaacgaggagggcgggcacggggugaagggcugggccuucgacgacgggaacgacgucuggaugggccggaccaucaacgagaccagccgccugggcuacgagaccuucaaggugaucgaggggugguccaaccccaagagcaagcuccagaucaaccgccaggugaucgucgaccggggcaaccgguccggguacagcggcaucuucuccguggagggcaagagcugcaucaaccgcugcuucuacguggagcugauccgggggcgcaaggaggagaccgagguccuguggaccagcaacuccaucgugguguucugcggcacgagcgggaccuacggcaccggguccuggccggacggcgccgaccucaaccugaugcccaucuga

SEQ ID NO: 88351 - RNA, 1410 nt, Artificial Sequence; identical to SEQ ID NO: 87999
  derived and/or modified CDS sequence (opt1) from neuraminidase__InfluenzaA__AHC62653

SEQ ID NO: 88352 - RNA, 1410 nt, Artificial Sequence; identical to SEQ ID NO: 87999
  derived and/or modified CDS sequence (opt1) from neuraminidase__InfluenzaA__AHC62665

SEQ ID NO: 88353 - RNA, 1410 nt, Artificial Sequence
  derived and/or modified CDS sequence (opt1) from neuraminidase__InfluenzaA__AHC62677
augaaccccaaccagaagaucaucaccaucggcagcgugucccugaccaucagcacgaucugcuucuucaugcagaucgccauccucaucaccaccgucacccugcacuucaagcaguacgaguucaacuccccgcccaacaaccaggugaugcugugcgagcccacgaucaucgagcgcaacaucaccgagaucguguaccucaccaacaccacgaucgagaaggagaucugccccaagcuggccgaguaccggaacuggagcaagccgcagugcgacaucaccggguucgcgcccuucuccaaggacaacagcauccgccuguccgccggcggggacaucugggucacccgggagcccuacgugagcugcgaccccaacaagugcuaccaguucgcccucggccaggggaccacgcugaacaacgugcacuccaacaacaccguccgcgaccggaccccguaccgcacccugcucaugaacgagcugggcgugcccuuccaccugggcacgaagcaggucugcaucgccuggagcuccagcuccugccacgacgggaaggccuggcuccacgugugcaucaccggcgacgacaagaacgcgaccgccagcuucaucuacaacgggaagcugguggacuccguggucagcugguccaaggagauccugcggacccaggagagcgagugcgugugcaucaacggcacgugcaccguggucaugaccgacggguccgccagcggcaaggccgacaccaagauccucuucaucgaggagggcaagaucgugcacacgagcacccuguccgggagcgcgcagcacguggaggagugcuccugcuacccccgcuaccccggcguccggugcgugugccgcgacaacuggaaggggagcaaccggccgaucguggacaucaacaucaaggaccacuccaucgucagcuccuacgugugcagcggccuggugggcgacacgccccgcaagaacgacaucuccagcuccagccacugccucgaccccaacaacgaggagggcgggcacggggucaagggcugggccuucgacgacgggaacgacguguggaugggccggaccaucaacgagaccucccgccugggcuacgagaccuucaaggucaucgagggguggagcaaccccaaguccaagcugcagaucaaccgccaggugaucguggaccggggcaaccggagcggguacuccggcaucuucagcgucgaggggaaguccugcaucaaccgcugcuucuacguggagcucauccggggccgcaaggaggagaccgaggugcuguggaccagcaacagcaucgucguguucugcggcacguccgggaccuacggcaccgggagcuggccggacggcgccgaccugaaccucaugcccaucuga

SEQ ID NO: 88354 - RNA, 1398 nt, Artificial Sequence
  derived and/or modified CDS sequence (opt1) from neuraminidase__InfluenzaA__AHF20560
augaaccccaaccagaagauccugugcaccagcgccaccgccaucaucaucggcgcgaucacggugcucaucgggaucgccaaccugggccugaacaucgggcuccaccugaagccgggcugcaacugcucccacagccagcccgagaccaccaacaccucccagacgaucaucaacaacuacuacaacgagaccaacaccaccaacauccagauggaggagcgcacgagccggaacuucaacaaccugaccaaggggcucugcaccaucaacuccuggcacaucuacggcaaggacaacgccguccgcaucggcgagagcuccgacgugcuggugacccgggagcccuacgucagcugcgaccccgacgagugccgcuucuacgcccugucccaggggacgaccauccggggcaagcacagcaacgggaccauccacgaccgcucccaguaccgggcccucaucagcuggccgcuguccagcccgcccaccguguacaacucccgcguggagugcaucggcuggagcuccacgagcugccacgacgggaagucccggaugagcaucugcaucagcggccccaacaacaacgcguccgccgucgugugguacaaccgccggcccguggccgagaucaacaccugggcccgcaacauccugcggacccaggagagcgagugcgucugccacaacggcgugugccccguggucuucaccgacggguccgcgacgggccccgccgacacccgcaucuacuacuucaaggaggggaagauccucaagugggagagccugaccggcaccgccaagcacaucgaggagugcuccugcuacggcgagcggacggggaucacgugcacgugccgcgacaacuggcagggcagcaaccggcccgugauccagaucgacccgguggccaugacccacaccucccaguacaucugcagccccguccugaccgacaacccccgccccaacgacccgaacaucgggaagugcaacgaccccuaccccggcaacaacaacaacggggugaagggcuucuccuaccucgacggcgccaacaccuggcuggggcggaccaucagcaccgcgucccgcagcggcuacgagaugcugaaggugcccaacgcccucaccgacgaccgguccaagccgauccaggggcagaccaucguccugaacgccgacuggagcggcuacuccgggagcuucauggacuacugggccgagggcgacugcuaccgcgccugcuucuacguggagcugauccgcggccggcccaaggaggacaaggugugguggaccuccaacagcaucgucuccaugugcagcagcacggaguuccucgagcaguggaacuggcccgacggggcgaagaucgaguacuuccuguga

SEQ ID NO: 88355 - RNA, 1398 nt, Artificial Sequence; identical to SEQ ID NO: 87478
  derived and/or modified CDS sequence (opt1) from neuraminidase__InfluenzaA__AHF20570

SEQ ID NO: 88356 - RNA, 1413 nt, Artificial Sequence; identical to SEQ ID NO: 80656
  derived and/or modified CDS sequence (opt1) from neuraminidase__InfluenzaA__AHG96111

SEQ ID NO: 88357 - RNA, 1413 nt, Artificial Sequence; identical to SEQ ID NO: 80656
  derived and/or modified CDS sequence (opt1) from neuraminidase__InfluenzaA__AHG96123

SEQ ID NO: 88358 - RNA, 1413 nt, Artificial Sequence; identical to SEQ ID NO: 80656
  derived and/or modified CDS sequence (opt1) from neuraminidase__InfluenzaA__AHG96135

SEQ ID NO: 88359 - RNA, 1413 nt, Artificial Sequence; identical to SEQ ID NO: 80656
  derived and/or modified CDS sequence (opt1) from neuraminidase__InfluenzaA__AHG96147

SEQ ID NO: 88360 - RNA, 1413 nt, Artificial Sequence; identical to SEQ ID NO: 80656
  derived and/or modified CDS sequence (opt1) from neuraminidase__InfluenzaA__AHG96159

SEQ ID NO: 88361 - RNA, 1413 nt, Artificial Sequence; identical to SEQ ID NO: 80656
  derived and/or modified CDS sequence (opt1) from neuraminidase__InfluenzaA__AHG96171

SEQ ID NO: 88362 - RNA, 1413 nt, Artificial Sequence; identical to SEQ ID NO: 80656
  derived and/or modified CDS sequence (opt1) from neuraminidase__InfluenzaA__AHG96183

SEQ ID NO: 88363 - RNA, 1413 nt, Artificial Sequence; identical to SEQ ID NO: 80656
  derived and/or modified CDS sequence (opt1) from neuraminidase__InfluenzaA__AHG96195

SEQ ID NO: 88364 - RNA, 1413 nt, Artificial Sequence; identical to SEQ ID NO: 80656
  derived and/or modified CDS sequence (opt1) from neuraminidase__InfluenzaA__AHG96207

SEQ ID NO: 88365 - RNA, 1413 nt, Artificial Sequence; identical to SEQ ID NO: 80656
  derived and/or modified CDS sequence (opt1) from neuraminidase__InfluenzaA__AHG96219

SEQ ID NO: 88366 - RNA, 1413 nt, Artificial Sequence; identical to SEQ ID NO: 80656
  derived and/or modified CDS sequence (opt1) from neuraminidase__InfluenzaA__AHG96231

SEQ ID NO: 88367 - RNA, 1413 nt, Artificial Sequence; identical to SEQ ID NO: 80656
  derived and/or modified CDS sequence (opt1) from neuraminidase__InfluenzaA__AHG96243

SEQ ID NO: 88368 - RNA, 1413 nt, Artificial Sequence; identical to SEQ ID NO: 80656
  derived and/or modified CDS sequence (opt1) from neuraminidase__InfluenzaA__AHG96255

SEQ ID NO: 88369 - RNA, 1413 nt, Artificial Sequence; identical to SEQ ID NO: 80656
  derived and/or modified CDS sequence (opt1) from neuraminidase__InfluenzaA__AHG96267

SEQ ID NO: 88370 - RNA, 1413 nt, Artificial Sequence; identical to SEQ ID NO: 80656
  derived and/or modified CDS sequence (opt1) from neuraminidase__InfluenzaA__AHG96279

SEQ ID NO: 88371 - RNA, 1413 nt, Artificial Sequence; identical to SEQ ID NO: 80656
  derived and/or modified CDS sequence (opt1) from neuraminidase__InfluenzaA__AHG96291

SEQ ID NO: 88372 - RNA, 1413 nt, Artificial Sequence; identical to SEQ ID NO: 80656
  derived and/or modified CDS sequence (opt1) from neuraminidase__InfluenzaA__AHG96303

SEQ ID NO: 88373 - RNA, 1410 nt, Artificial Sequence; identical to SEQ ID NO: 80480
  derived and/or modified CDS sequence (opt1) from neuraminidase__InfluenzaA__AHG96362

SEQ ID NO: 88374 - RNA, 1410 nt, Artificial Sequence; identical to SEQ ID NO: 80480
  derived and/or modified CDS sequence (opt1) from neuraminidase__InfluenzaA__AHG96374

SEQ ID NO: 88375 - RNA, 1410 nt, Artificial Sequence; identical to SEQ ID NO: 80480
  derived and/or modified CDS sequence (opt1) from neuraminidase__InfluenzaA__AHG96386

SEQ ID NO: 88376 - RNA, 1413 nt, Artificial Sequence; identical to SEQ ID NO: 80656
  derived and/or modified CDS sequence (opt1) from neuraminidase__InfluenzaA__AHG96398

SEQ ID NO: 88377 - RNA, 1410 nt, Artificial Sequence; identical to SEQ ID NO: 80480
  derived and/or modified CDS sequence (opt1) from neuraminidase__InfluenzaA__AHG96410

SEQ ID NO: 88378 - RNA, 1410 nt, Artificial Sequence; identical to SEQ ID NO: 80480
  derived and/or modified CDS sequence (opt1) from neuraminidase__InfluenzaA__AHG96422

SEQ ID NO: 88379 - RNA, 1410 nt, Artificial Sequence; identical to SEQ ID NO: 80480
  derived and/or modified CDS sequence (opt1) from neuraminidase__InfluenzaA__AHG96434

SEQ ID NO: 88380 - RNA, 1410 nt, Artificial Sequence; identical to SEQ ID NO: 80480
  derived and/or modified CDS sequence (opt1) from neuraminidase__InfluenzaA__AHG96446

SEQ ID NO: 88381 - RNA, 1410 nt, Artificial Sequence; identical to SEQ ID NO: 80480
  derived and/or modified CDS sequence (opt1) from neuraminidase__InfluenzaA__AHG96458

SEQ ID NO: 88382 - RNA, 1410 nt, Artificial Sequence; identical to SEQ ID NO: 80480
  derived and/or modified CDS sequence (opt1) from neuraminidase__InfluenzaA__AHG96470

SEQ ID NO: 88383 - RNA, 1410 nt, Artificial Sequence; identical to SEQ ID NO: 80480
  derived and/or modified CDS sequence (opt1) from neuraminidase__InfluenzaA__AHG96482

SEQ ID NO: 88384 - RNA, 1410 nt, Artificial Sequence; identical to SEQ ID NO: 80480
  derived and/or modified CDS sequence (opt1) from neuraminidase__InfluenzaA__AHG96494

SEQ ID NO: 88385 - RNA, 1410 nt, Artificial Sequence; identical to SEQ ID NO: 80480
  derived and/or modified CDS sequence (opt1) from neuraminidase__InfluenzaA__AHG96506

SEQ ID NO: 88386 - RNA, 1413 nt, Artificial Sequence; identical to SEQ ID NO: 80656
  derived and/or modified CDS sequence (opt1) from neuraminidase__InfluenzaA__AHG96518

SEQ ID NO: 88387 - RNA, 1413 nt, Artificial Sequence; identical to SEQ ID NO: 80656
  derived and/or modified CDS sequence (opt1) from neuraminidase__InfluenzaA__AHG96530

SEQ ID NO: 88388 - RNA, 1413 nt, Artificial Sequence; identical to SEQ ID NO: 80656
  derived and/or modified CDS sequence (opt1) from neuraminidase__InfluenzaA__AHG96542

SEQ ID NO: 88389 - RNA, 1413 nt, Artificial Sequence; identical to SEQ ID NO: 80656
  derived and/or modified CDS sequence (opt1) from neuraminidase__InfluenzaA__AHG96554

SEQ ID NO: 88390 - RNA, 1413 nt, Artificial Sequence; identical to SEQ ID NO: 80656
  derived and/or modified CDS sequence (opt1) from neuraminidase__InfluenzaA__AHG96566

SEQ ID NO: 88391 - RNA, 1413 nt, Artificial Sequence; identical to SEQ ID NO: 80656
  derived and/or modified CDS sequence (opt1) from neuraminidase__InfluenzaA__AHG96578

SEQ ID NO: 88392 - RNA, 1413 nt, Artificial Sequence; identical to SEQ ID NO: 80656
  derived and/or modified CDS sequence (opt1) from neuraminidase__InfluenzaA__AHG96590

SEQ ID NO: 88393 - RNA, 1413 nt, Artificial Sequence; identical to SEQ ID NO: 80656
  derived and/or modified CDS sequence (opt1) from neuraminidase__InfluenzaA__AHG96602

SEQ ID NO: 88394 - RNA, 1413 nt, Artificial Sequence; identical to SEQ ID NO: 80656
  derived and/or modified CDS sequence (opt1) from neuraminidase__InfluenzaA__AHG96614

SEQ ID NO: 88395 - RNA, 1413 nt, Artificial Sequence; identical to SEQ ID NO: 80656
  derived and/or modified CDS sequence (opt1) from neuraminidase__InfluenzaA__AHG96626

SEQ ID NO: 88396 - RNA, 1413 nt, Artificial Sequence; identical to SEQ ID NO: 80656
  derived and/or modified CDS sequence (opt1) from neuraminidase__InfluenzaA__AHG96638

SEQ ID NO: 88397 - RNA, 1413 nt, Artificial Sequence; identical to SEQ ID NO: 80656
  derived and/or modified CDS sequence (opt1) from neuraminidase__InfluenzaA__AHG96650

SEQ ID NO: 88398 - RNA, 1413 nt, Artificial Sequence; identical to SEQ ID NO: 80656
  derived and/or modified CDS sequence (opt1) from neuraminidase__InfluenzaA__AHG96662

SEQ ID NO: 88399 - RNA, 1413 nt, Artificial Sequence; identical to SEQ ID NO: 80656
  derived and/or modified CDS sequence (opt1) from neuraminidase__InfluenzaA__AHG96674

SEQ ID NO: 88400 - RNA, 1413 nt, Artificial Sequence; identical to SEQ ID NO: 80656
  derived and/or modified CDS sequence (opt1) from neuraminidase__InfluenzaA__AHG96686

SEQ ID NO: 88401 - RNA, 1410 nt, Artificial Sequence; identical to SEQ ID NO: 80480
  derived and/or modified CDS sequence (opt1) from neuraminidase__InfluenzaA__AHG96698

SEQ ID NO: 88402 - RNA, 1410 nt, Artificial Sequence; identical to SEQ ID NO: 80480
  derived and/or modified CDS sequence (opt1) from neuraminidase__InfluenzaA__AHG96710

SEQ ID NO: 88403 - RNA, 1410 nt, Artificial Sequence; identical to SEQ ID NO: 80480
  derived and/or modified CDS sequence (opt1) from neuraminidase__InfluenzaA__AHG96722

SEQ ID NO: 88404 - RNA, 1410 nt, Artificial Sequence; identical to SEQ ID NO: 80480
  derived and/or modified CDS sequence (opt1) from neuraminidase__InfluenzaA__AHG96734

SEQ ID NO: 88405 - RNA, 1410 nt, Artificial Sequence; identical to SEQ ID NO: 80480
  derived and/or modified CDS sequence (opt1) from neuraminidase__InfluenzaA__AHG96746

SEQ ID NO: 88406 - RNA, 1410 nt, Artificial Sequence; identical to SEQ ID NO: 80480
  derived and/or modified CDS sequence (opt1) from neuraminidase__InfluenzaA__AHG96758

SEQ ID NO: 88407 - RNA, 1410 nt, Artificial Sequence; identical to SEQ ID NO: 80480
  derived and/or modified CDS sequence (opt1) from neuraminidase__InfluenzaA__AHG96770

SEQ ID NO: 88408 - RNA, 1410 nt, Artificial Sequence; identical to SEQ ID NO: 80480
  derived and/or modified CDS sequence (opt1) from neuraminidase__InfluenzaA__AHG96782

SEQ ID NO: 88409 - RNA, 1410 nt, Artificial Sequence; identical to SEQ ID NO: 80480
  derived and/or modified CDS sequence (opt1) from neuraminidase__InfluenzaA__AHG96794

SEQ ID NO: 88410 - RNA, 1410 nt, Artificial Sequence; identical to SEQ ID NO: 80480
  derived and/or modified CDS sequence (opt1) from neuraminidase__InfluenzaA__AHG96806

SEQ ID NO: 88411 - RNA, 1410 nt, Artificial Sequence; identical to SEQ ID NO: 80480
  derived and/or modified CDS sequence (opt1) from neuraminidase__InfluenzaA__AHG96818

SEQ ID NO: 88412 - RNA, 1410 nt, Artificial Sequence; identical to SEQ ID NO: 80480
  derived and/or modified CDS sequence (opt1) from neuraminidase__InfluenzaA__AHG96830

SEQ ID NO: 88413 - RNA, 1410 nt, Artificial Sequence; identical to SEQ ID NO: 80480
  derived and/or modified CDS sequence (opt1) from neuraminidase__InfluenzaA__AHG96842

SEQ ID NO: 88414 - RNA, 1410 nt, Artificial Sequence; identical to SEQ ID NO: 80480
  derived and/or modified CDS sequence (opt1) from neuraminidase__InfluenzaA__AHG96854

SEQ ID NO: 88415 - RNA, 1410 nt, Artificial Sequence; identical to SEQ ID NO: 80480
  derived and/or modified CDS sequence (opt1) from neuraminidase__InfluenzaA__AHG96866

SEQ ID NO: 88416 - RNA, 1410 nt, Artificial Sequence; identical to SEQ ID NO: 80480
  derived and/or modified CDS sequence (opt1) from neuraminidase__InfluenzaA__AHG96878

SEQ ID NO: 88417 - RNA, 1410 nt, Artificial Sequence; identical to SEQ ID NO: 80480
  derived and/or modified CDS sequence (opt1) from neuraminidase__InfluenzaA__AHG96890

SEQ ID NO: 88418 - RNA, 1410 nt, Artificial Sequence; identical to SEQ ID NO: 80480
  derived and/or modified CDS sequence (opt1) from neuraminidase__InfluenzaA__AHG96902

SEQ ID NO: 88419 - RNA, 1410 nt, Artificial Sequence; identical to SEQ ID NO: 80480
  derived and/or modified CDS sequence (opt1) from neuraminidase__InfluenzaA__AHG96914

SEQ ID NO: 88420 - RNA, 1410 nt, Artificial Sequence; identical to SEQ ID NO: 80480
  derived and/or modified CDS sequence (opt1) from neuraminidase__InfluenzaA__AHG96926

SEQ ID NO: 88421 - RNA, 1410 nt, Artificial Sequence; identical to SEQ ID NO: 80480
  derived and/or modified CDS sequence (opt1) from neuraminidase__InfluenzaA__AHG96938

SEQ ID NO: 88422 - RNA, 1410 nt, Artificial Sequence; identical to SEQ ID NO: 80480
  derived and/or modified CDS sequence (opt1) from neuraminidase__InfluenzaA__AHG96950

SEQ ID NO: 88423 - RNA, 1410 nt, Artificial Sequence; identical to SEQ ID NO: 80480
  derived and/or modified CDS sequence (opt1) from neuraminidase__InfluenzaA__AHG96962

SEQ ID NO: 88424 - RNA, 1410 nt, Artificial Sequence; identical to SEQ ID NO: 80480
  derived and/or modified CDS sequence (opt1) from neuraminidase__InfluenzaA__AHG96974

SEQ ID NO: 88425 - RNA, 1410 nt, Artificial Sequence; identical to SEQ ID NO: 80480
  derived and/or modified CDS sequence (opt1) from neuraminidase__InfluenzaA__AHG96986

SEQ ID NO: 88426 - RNA, 1410 nt, Artificial Sequence; identical to SEQ ID NO: 80480
  derived and/or modified CDS sequence (opt1) from neuraminidase__InfluenzaA__AHG96998

SEQ ID NO: 88427 - RNA, 1410 nt, Artificial Sequence; identical to SEQ ID NO: 80480
  derived and/or modified CDS sequence (opt1) from neuraminidase__InfluenzaA__AHG97010

SEQ ID NO: 88428 - RNA, 1410 nt, Artificial Sequence; identical to SEQ ID NO: 80480
  derived and/or modified CDS sequence (opt1) from neuraminidase__InfluenzaA__AHG97022

SEQ ID NO: 88429 - RNA, 1410 nt, Artificial Sequence; identical to SEQ ID NO: 80480
  derived and/or modified CDS sequence (opt1) from neuraminidase__InfluenzaA__AHG97034

SEQ ID NO: 88430 - RNA, 1410 nt, Artificial Sequence; identical to SEQ ID NO: 80480
  derived and/or modified CDS sequence (opt1) from neuraminidase__InfluenzaA__AHG97046

SEQ ID NO: 88431 - RNA, 1410 nt, Artificial Sequence
  derived and/or modified CDS sequence (opt1) from neuraminidase__InfluenzaA__AHH00872
augaaccccaaccagaagaucaucaccaucggcagcgugucccugaccaucgccacgaucugcuuccucaugcagaucgccauccuggucaccaccgugacccugcacuucaagcaguacgagugcaacccgccgcccaacaaccaggugaugcucugcgagcccacgaucaucgagcgcaacaucaccgagaucgucuaccugaccaacaccacgaucgagaaggagaucugccccaagcuggcggaguaccggaacuggagcaagccccagugcaacaucaccggguucgcccccuucuccaaggacaacagcauccgccucuccgccggcggggacaucugggugacccgggagcccuacgugagcugcgacccggacaagugcuaccaguucgcccugggccaggggaccacgcugaacaacggccacuccaacgacaccguccacgaccgcacccccuaccggacccuccugaugaacgagcugggcgugcccuuccaccucgggacgaagcaggucugcaucgccuggagcuccagcuccugccacgacggcaaggcguggcugcacgugugcgugaccggggacgacgagaacgccaccgccagcuucaucuacaacggccgccugguggacuccaucgggagcugguccaagaagauccuccggacccaggagagcgagugcgucugcaucaacggcacgugcaccgugaucaugaccgacggcuccgccagcgggaaggcggacaccaagauccuguucaucgaggagggcaagaucgugcacacgagcccccuguccgggagcgcccagcacgucgaggagugcuccugcuacccgcgcuaccccggcgugcggugcgugugccgcgacaacuggaagggcagcaaccggcccaucgucgacaucaacgugaaggacuacuccaucgugagcuccuacgucugcagcgggcucgugggcgacacgccccgcaagaacgacuccagcuccagcucccacugccuggacccgaacaacgaggagggcgggcacggggugaagggcugggccuucgacgacggcaacgacgucuggauggggcggaccaucagcgagaagucccgcagcggcuacgagaccuucaaggugaucgaggggugguccaagcccaacagcaagcugcagaucaaccggcaggucaucaucgaccgcggcaaccgguccggguacagcggcaucuucuccguggagggcaagagcugcaucaaccgcugcuucuacguggagcucauccgggggcgcaagcaggagaccgagguccuguggaccagcaacuccaucgugguguucugcggcaccagcgggaccuacggcacgggguccuggcccgacggcgccgaccugaaccucaugcccaucuga

SEQ ID NO: 88432 - RNA, 1416 nt, Artificial Sequence
  derived and/or modified CDS sequence (opt1) from neuraminidase__InfluenzaA__AHI43497
augaaccccaaccagaagcuguucgcccucagcggcguggccaucgcgcuguccauccugaaccuccugaucgggaucagcaacgucggccugaacaucucccuccaccugaaggggaagggcccgaagcaggaggagaaccugaccugcaccacgaucaaccagaacaacaccaccgugguggagaacaccuacgucaacaacacgaccaucaucaccaaggagaccgacuggaacacgcccagcuaccuccugcugaacaagucccucugcaacguggagggguggguggucaucgccaaggacaacgccauccgcuucggcgagagcgagcagaucaucgugacccgggagcccuacguguccugcgaccccaccggcugcaagauguacgcccugcaccaggggaccacgauccgcaacaagcacagcaacggcaccauccacgaccggaccgccuuccgcgggcugaucuccaccccgcucggcacgccgcccaccgucagcaacuccggguucaugugcgugggcuggagcuccacgaccugccacgacggcaucgggcggaugaccaucugcauccagggcaacaacgacaacgcgaccgccaccguguacuacaacgggcgccugaccacgaccaucaagaccugggcccggaacauccugcgcacccaggagagcgagugcgucugccacaacggcacgugcgccguggugaugaccgacggcuccgcgagcucccaggccuacaccaaggucauguacuuccacaaggggcucgugaucaaggaggaggcccugcggggcagcgcccgccacaucgaggagugcuccugcuacgggcacagccagcgggugaccugcgucugccgcgacaacuggcagggcgccaaccggcccaucaucgagaucgacaugaacacgcuggagcacaccagccgcuacgugugcaccgggauccucaccgacacgucccggcccggcgacaagagcuccggcgacugcagcaaccccaucaccgggucccccggcgcgcagggggugaagggcuucggguuccugaacggcgacaacaccuggcugggccgcaccaucagcccccggucccgcagcggguucgagaugcucaagaucccgaacgccggcaccgaccccaacucccggaucgccgagcgccaggagaucgucgacaacaacaacuggagcggguacuccggcagcuucaucgacuacuggaacaacaacuccgagugcuacaaccccugcuucuacguggagcugauccgggggcgccccgaggaggccaaguacgugugguggacgagcaacucccugaucgcccucugcggcagcccguuccccgucggcuccgggagcuuccccgacggcgcgcagauccaguacuucuccuga

SEQ ID NO: 88433 - RNA, 1410 nt, Artificial Sequence
  derived and/or modified CDS sequence (opt1) from neuraminidase__InfluenzaA__AHJ57439
augaaccccaaccagaagaucaucaccaucggcagcgugucccugaucaucagcaccaucugcuucuucaugcaggucgccauccuccugacgaccgugacccugcacuucaagcaguacgaguucaacuccccgcccaacaaccaggugaugcucugcgagcccaccaucaucgagcgcaacaucacggagaucgucuaccugaccaacaccaccaucgagaaggagaucugccccaagccggccgaguaccggaacuggagcaagccccagugcgacaucacgggguucgcgcccuucuccaaggacaacagcauccgccuguccgccggcggggacaucugggugacccgggagcccuacgugagcugcgacccggacaagugcuaccaguucgcccucggccaggggaccacccugaacaacguccacuccaacaacacggugcgcgaccggacccccuaccgcacccugcucaugaacgagcugggcgugcccuuccaccugggcaccaagcaggucugcaucgccuggagcuccagcuccugccacgacgggaaggccuggcuccacgugugcaucacgggcgacgacaagaacgcgaccgccagcuucaucuacaacgggcggcugguggacuccgucgugagcugguccaaggacauccugcgcacccaggagagcgagugcgugugcaucaacgggaccugcacggucgugaugaccgacggguccgccagcggcaaggccgacaccaagauccucuucaucgaggagggcaagaucgugcacaccagcacgcuguccgggagcgcgcagcacgucgaggagugcuccugcuacccccgguacccgggcgugcgcugcgugugccgggacaacuggaaggggagcaaccgccccaucgucgacaucaacaucaaggaccacuccaucgugagcuccuacgugugcagcggccuggucggcgacaccccgcggaagaacgacuccagcuccagcucccacugccucgaccccaacaacgaggagggcggccacggggugaagggcugggccuucgacgacgggaacgacgucuggaugggccgcaccaucaacgagaccagccggcugggcuacgagacguucaaggugaucgaggggugguccaaccccaagagcaagcugcagaucaaccgccaggugaucgucgaccggggcaaccgcuccggguacagcggcaucuucuccguggagggcaagagcugcaucaaccggugcuucuacguggagcucauccgcgggcggaaggaggagaccgagguccuguggaccagcaacuccaucgugguguucugcggcaccagcgggacguacggcaccggguccuggcccgacggcgccgacaucaaccugaugcccaucuga

SEQ ID NO: 88434 - RNA, 1410 nt, Artificial Sequence
  derived and/or modified CDS sequence (opt1) from neuraminidase__InfluenzaA__AHJ57440
augaaccccaaccagaagaucaucaccaucggcagcgugucccugaucaucagcaccaucugcuucuucaugcagaucgccauccucaucacgaccgucacccugcacuucaagcaguacgaguucaacuccccgcccaacaaccagaugaugcugugcgagcccaccaucaucgagcgcaacaucacggagaucguguaccucaccaacaccaccaucgagaaggagaucugccccaagccggccgaguaccggaacuggagcaagccccagugcgacaucacgggguucgcgcccuucuccaaggacaacagcauccgccuguccgccggcggggacaucugggugacccgggagcccuacgucagcugcgacccggacaagugcuaccaguucgcccugggccaggggaccacccucaacaacggccacuccaacaacacggugcgcgaccggacccccuaccgcacccugcugaugaacgagcucggcgugcccuuccaccuggggaccaagcaggucugcaucgccuggagcuccagcuccugccacgacggcaaggccuggcugcacgugugcaucacgggggacgacaagaacgcgaccgccagcuucaucuacaacggccggcucguggacuccgucgugagcugguccaaggagauccugcgcacccaggagagcgagugcgugugcaucaacgggaccugcacggucgugaugaccgacggcuccgccagcggcaaggccgacaccaagauccuguucaucgaggaggggaagaucgugcacaccagcacgcucuccggcagcgcgcagcacgucgaggagugcuccugcuacccccgguacccgggggugcgcugcgugugccgggacaacuggaagggcagcaaccgccccaucgucgacaucaacaucaaggaccacuccaucgugagcuccuacgugugcagcggccuggucggggacaccccgcggaagaacgacuccagcuccagcucccacugccuggaccccaacaacgaggagggcgggcacggcgugaaggggugggccuucgacgacggcaacgacguguggaugggccgcaccaucaacgagaccagccggcucggguacgagacguucaaggucaucgagggcugguccaaccccaagagcaagcugcagaucaaccgccaggugaucgucgaccgcggggaccgguccggcuacagcgggaucuucuccguggagggcaagagcugcaucaaccggugcuucuacguggagcugauccgcggccggaaggaggagaccgagguccucuggaccagcaacuccaucgugguguucugcgggaccagcggcacguacgggaccggcuccuggcccgacggggccgacaucaaccugaugcccaucuga

SEQ ID NO: 88435 - RNA, 1410 nt, Artificial Sequence
  derived and/or modified CDS sequence (opt1) from neuraminidase__InfluenzaA__AHJ57441
augaaccccaaccagaagaucaucaccaucggcagcgugucccugaucaucagcaccaucugcuucuucaugcagaucgccauccucaucacgaccgucacccugcacuucaagcaguacgaguucaacuccccgcccaacaaccaggugaugcugugcgagcccaccaucaucgagcgcaacaagacggagaucguguaccucaccaacaccaccaucgagaaggagaucugccccaagccggccgaguaccggaacuggagcaagccccagugcgacaucacgggguucgcgcccuucuccaaggacaacagcauccgccuguccgccggcggggacaucugggucacccgggagcccuacgugagcugcgacccggacaagugcuaccaguucgcccugggccaggggaccacccucaacaacgugcacuccaacaacacgguccacgaccgcacccccuaccggacccugcugaugaacgagcucggcgugcccuuccaccugggcaccaagcaggucugcaucgccuggagcuccagcuccugccacgacgggaaggccuggcugcacgugugcaucacgggcgacgacaagaacgcgaccgccagcuucaucuacaacgggcgccucguggacuccguggucagcugguccaaggagauccugcggacccaggagagcgagugcgugugcaucaacgggaccugcacgguggucaugaccgacggguccgccagcggcaaggccgacaccaagauccuguucaucgaggagggcaagaucgugcacaccagcacgcucuccgggagcgcgcagcacguggaggagugcuccugcuacccccgcuacccgggcguccggugcgugugccgcgacaacuggaaggggagcaaccggcccaucguggacaucaacaucaaggaccacuccaucgucagcuccuacgugugcagcggccuggugggcgacaccccgcgcaagaacgacuccagcuccagcucccacugccuggaccccaacaacgaggagggcggccacggggucaagggcugggccuucgacgacgggaacgacguguggaugggccggaccaucaacgagaccagccgccucggcuacgagacguucaaggucaucgaggggugguccaaccccaagagcaagcugcagaucaaccgccaggugaucguggaccggggcaaccgguccggguacagcggcaucuucuccgucgagggcaagagcugcaucaaccgcugcuucuacguggagcugauccgggggcgcaaggaggagaccgaggugcucuggaccagcaacuccaucgucguguucugcggcaccagcgggacguacggcaccggguccuggcccgacggcgccgacaucaaccugaugcccaucuga

SEQ ID NO: 88436 - RNA, 1413 nt, Artificial Sequence
  derived and/or modified CDS sequence (opt1) from neuraminidase__InfluenzaA__AHJ57654
augaaccccaaccagaagaucacgugcaucagcgccaccggcaugacccuguccguggucagccuccugaucgggaucgccaaccugggccucaacaucgggcugcacuacaagguguccgacagcaccaacaucaacaucccgaacaugaacgagaccucccccaccacgaccaucaucaacaaccacccccagaacaacuucaccaacaucaccaacaucaucaugaacaagaacgaggagggcaacuuccugaaccucacgaagccccugugcgaggugaacagcuggcacauccuguccaaggacaacgcgauccgcaucggggagaacgcccacauccucgucacccgggagccguaccugagcugcgacccccagggcugccgcauguucgcccugucccagggcaccacccuccgggggcgccacgccaacggcacgauccacgaccggagccccuuccgcgcccugaucuccugggagauggggcaggcgcccagcccguacaacgcccggguggagugcaucggcugguccagcaccuccugccacgacgggaucagccgcauguccaucugcaucagcggccccaacaacaacgccuccgccguggucugguacggcgggcggcccgugaccgagauccccagcugggcgggcaacauccugcgcacccaggagagcgagugcgugugccacgggggcaucugcccggucgugaugacggacggccccgccaacaaccgggccgagaccaagaucaucuacuucaaggaggggaaggugcagaagaucgaggagcucaagggcaacgcccagcacaucgaggagugcuccugcuacggggccagcggcaugaucaagugcaucugccgcgacaacuggaagggggcgaaccggcccgucaucaccaucgaccccgagaugaugacccacacguccaaguaccugugcagcaagauccugaccgacaccucccgcccgaacgaccccaccaacggcaacugcgacgcccccaucacgggcgggagccccgacccgggcgugaagggguucgccuuccucgacggcgagaacuccuggcuggggcggaccaucagcaaggacucccgcagcggcuacgagaugcugaagauccccaacgccgagaccgacacccaguccggcgccaucagccaccagaucaucgugaacaaccagaacugguccggguacagcggcgcguucaucgacuacugggccaacaaggagugcuucaaccccugcuucuacgucgagcucauccgggggcgccccaaggaguccagcgugcuguggacguccaacagcaucguggcccugugcggcucccgggagcgccucgggagcuggagcuggcacgacggcgccgagaucaucuacuucaaguga

SEQ ID NO: 88437 - RNA, 1410 nt, Artificial Sequence
  derived and/or modified CDS sequence (opt1) from neuraminidase__InfluenzaA__AHJ57666
augaaccccaaccagaagaucaucaccaucggcagcgugucccugaccaucgccacggucagcuuccucaugcagaucgccauccugaccaccaccgugacgcugcacuucaagcacaacgagugcaacaugccgcccaagaaccaggugauguccugcgagcccaucaucaucgagcgcaacaucaccgagaucgucuaccucaacaacaccaccguggagaaggagaucugccccaagguggucgaguaccggaacuggagcaagccgcagugcaagaucacgggguucgcgcccuucuccaaggacaacagcauccgccuguccgccggcggggacaucugggugacccgggagcccuacgugagcugcggccuggggaagugcuaccaguucgcccucggccagggcaccacccuggacaacucccacagcaacgggacgauccacgaccgcaucccccaccggacccugcucaugaacgagcugggcgucccguuccaccuggggaccaagcaggucugcaucgccugguccagcuccagcugccacgacggccgcgccuggcuccacaucugcaucaccggggacgaccggaacgcgacggccuccuucaucuacgacggcaugcugguggacagcaucggcuccuggagcaagaacauccugcgcacccaggaguccgagugcgugugcaucaacgggaccugcgccguggugaugaccgacggcagcgccagcggggucgcggacacgcggauccucuucauccgcgagggcaagaucgugcacaucagcccccuguccggcuccgcccagcacaucgaggagugcagcugcuacccccgguaccccgacgugcgcugcgucugccgggacaacuggaagggguccaaccgcccggugaucgacaucaacauggccgacuacagcaucgacuccaacuacgugugcagcggccuggucggggacacgccccggaacgacgacaacuccagcuccagcaacugccgcgaccccaacaacgagcggggcaaccccggggugaagggcugggccuucgacgacggcaacgacguguggauggggcgcaccaucaaccgggacucccgcagcggcuacgagaccuuccgggucaucgggggcuggaccaccgccaacuccaagagccagaucaaccgccaggugaucgucgacaacaacaacugguccggguacagcggcguguucuccguggagggcaagagcugcaucaaccgcugcuucuacgucgagcucaucaaggggcggccgcaggagccccgcgugugguggaccagcaacuccaucguggucuucugcggcaccagcgggacguacggcaccggguccuggcccgacggcgcgaacaucaacuucaugcccaucuga

SEQ ID NO: 88438 - RNA, 1413 nt, Artificial Sequence
  derived and/or modified CDS sequence (opt1) from neuraminidase__InfluenzaA__AHJ57677
augaaccccaaccagaagaucacgugcaucagcgccaccggcaugacccuguccguggucagcaugcucaucgggaucgccaaccugggccugaacaucgggcuccacuacaagguguccgacagcaccaacaucaacaucccgaacaugaacgagaccucccccaccacgaccgugaucaacaaccacccccagaacaacuucaccaacaucaccaacaucaucgucaacaagaacgaggaggagaacuuccugaaccugacgaagccccucugcgaggugaacagcuggcacauccuguccaaggacaacgcgauccgcaucggcgagaacgcccacauccuggugacccgggagccguaccucagcugcgacccccaggggugccgcauguucgcccugucccagggcaccacccugcggggccagcacgccaacgggacgauccacgaccgcagccccuuccgggcccucaucuccugggagaugggccaggcgcccagcccguacaacgcccgcgucgagugcaucgggugguccagcaccuccugccacgacggcaucagccggauguccaucugcaucagcgggcccaacaacaacgccuccgccguggugugguacggcggccgccccgucaccgagauccccagcugggcggggaacauccugcggacccaggagagcgagugcgugugccacggcgggaucugcccgguggucaugacggacggccccgccaacaaccgcgccgagaccaagaucaucuacuucaaggagggcaagauccagaagguggaggagcugaaggggaacgcccagcacaucgaggagugcuccugcuacggcgccagcgggaugaucaagugcaucugccgggacaacuggaagggcgcgaaccgccccgugaucaccaucgaccccgagaugaugacccacacguccaaguaccucugcagcaagauccugaccgacaccucccggccgaacgaccccaccaacgggaacugcgacgcccccaucacgggcggcagccccgacccgggggucaagggcuucgccuuccuggacggggagaacuccuggcucggccgcaccaucagcaaggacucccggagcggguacgagaugcugaaggugcccaacgccgagaccgacacccaguccggcgccaucagccaccagaugaucgugaacaaccagaacugguccggcuacagcggggcguucaucgacuacugggccaagaaggagugcuucaaccccugcuucuacgucgagcugauccgcggccggcccaaggaguccagcgugcucuggacguccaacagcaucguggcccugugcgggucccgcgagcggcugggcagcuggagcuggcacgacggggccgagaucaucuacuucaaguga

SEQ ID NO: 88439 - RNA, 1413 nt, Artificial Sequence
  derived and/or modified CDS sequence (opt1) from neuraminidase__InfluenzaA__AHJ57689
augaaccccaaccagaagaucacgugcaucagcgccaccggcaugacccuguccguggucagcaugcucaucgggaucgccaaccugggccugaacaucgggcuccacuacaagguguccgacagcaccaacaucaacaucccgaagaugaacgagaccucccccaccacgaccaucaucaacaaccacccccagaacaacuucaccaacaucaccaacaucaucgugaacaagaacgaggaggagaacuuccugaaccugacgaagccccucugcgaggucaacagcuggcacauccuguccaaggacaacgcgauccgcaucggcgagaacgcccacauccuggugacccgggagccguaccucagcugcgacccccaggggugccgcauguucgcccugucccagggcaccacccugcggggccagcacgccaacgggacgauccacgaccgcagccccuuccgggcccucaucuccugggagaugggccaggcgcccagcccguacaacgcccgcguggagugcaucgggugguccagcaccuccugccacgacggcaucagccggauguccaucugcaucagcgggcccaacaacaacgccuccgccgucgugugguacggcggccgccccgugaccgagauccccagcugggcggggaacauccugcggacccaggagagcgagugcgucugccacggcgggaucugcccgguggugaugacggacggccccgccaacaaccgcgccgagaccaagaucaucuacuucaaggagggcaagauccagaagaucgaggagcugaaggggaacgcccagcacaucgaggagugcuccugcuacggcgccagcgggaugaucaagugcaucugccgggacaacuggaagggcgcgaaccgccccgucaucaccaucgaccccgagaugaugacccacacguccaaguaccucugcagcaagauccugaccgacaccucccggccgaacgaccccaccaacgggaacugcgacgcccccaucacgggcggcagccccgacccgggggugaagggcuucgccuuccuggacggggagaacuccuggcucggccgcaccaucagcaaggacucccggagcggguacgagaugcugaaggugcccaacgccgagaccgacacccaguccggcgccaucagccaccagaucaucgucaacaaccagaacugguccggcuacagcggggcguucaucgacuacugggccaacaaggagugcuucaaccccugcuucuacguggagcugauccgcggccggcccaaggaguccagcgugcucuggacguccaacagcaucgucgcccugugcgggucccgcgagcggcugggcagcuggagcuggcacgacggggccgagaucaucuacuucaaguga

SEQ ID NO: 88440 - RNA, 1413 nt, Artificial Sequence
  derived and/or modified CDS sequence (opt1) from neuraminidase__InfluenzaA__AHJ57700
augaaccccaaccagaagaucacgugcaucagcgccaccggcaugacccuguccguggucagccuccugaucgggaucgccaaccugggccucaacaucgggcugcacuacaagguguccgacagcaccaacaucaacaucccgaacaugaacgagaccucccccaccacgaccaucaucaacaaccacccccagaacaacuucaccaacaucaccaacaucaucaugaacaagaacgaggagggcaacuuccugaaccucacgaagccccugugcgaggugaacagcuggcacauccuguccaaggacaacgcgauccgcaucggggagaacgcccacauccucgucacccgggagccguaccugagcugcgacccccagggcugccgcauguucgcccugucccagggcaccacccuccgggggcgccacgccaacggcacgauccacgaccggagccccuuccgcgcccugaucuccugggagauggggcaggcgcccagcccguacaacgcccggguggagugcaucggcugguccagcaccuccugccacgacgggaucagccgcauguccaucugcaucagcggccccaacaacaacgccuccgccguggucugguacggcgggcggcccgugaccgagauccccagcugggcgggcaacauccugcgcacccaggagagcgagugcgugugccacgggggcaucugcccggucgugaugacggacggccccgccaacaaccgggccgagaccaagaucaucuacuucaaggaggggaaggugcagaagaucgaggagcucaagggcaacgcccagcacaucgaggagugcuccugcuacggggccagcggcaugaucaagugcaucugccgcgacaacuggaagggggcgaaccggcccgucaucaccaucgaccccgagaugaugacccacacguccaaguaccugugcagcaagauccugaccgacaccucccgcccgaacgaccccaccaacggcaacugcgacgcccccaucacgggcgggagccccgacccgggcgugaagggguucgccuuccucgacggcgagaacuccuggcuggggcggaccaucagcaaggacucccgcagcggcuacgagaugcugaaggugcccaacgccgagaccgacacccaguccggcgccaucagccaccagaucaucgucaacaaccagaacugguccggguacagcggcgcguucaucgacuacugggccaacaaggagugcuucaaccccugcuucuacguggagcucauccgggggcgccccaaggaguccagcgugcuguggacguccaacagcaucgucgcccugugcggcucccgggagcgccucgggagcuggagcuggcacgacggcgccgagaucaucuacuucaaguga

SEQ ID NO: 88441 - RNA, 1410 nt, Artificial Sequence
  derived and/or modified CDS sequence (opt1) from neuraminidase__InfluenzaA__AHJ57710
augaaccccaaccagaagaucaucaccaucggcagcgugucccugaccaucgccacggucagcuuccucaugcagaucgccauccugaccaccaccgugacgcugcacuucaagcacaacgagugcaacaugccgcccaagaaccaggugauguccugcgagcccaucaucaucgagcgcaacaucaccgagaucgucuaccucaacaacaccaccguggagaaggagaucugccccaagguggucgaguaccggaacuggagcaagccgcagugcaagaucacgggguucgcgcccuucuccaaggacaacagcauccgccuguccgccggcggggacaucugggugacccgggagcccuacgugagcugcggccuggggaagugcuaccaguucgcccucggccagggcaccacccuggacaacucccacagcaacgggacgauccacgaccgcaucccccaccggacccugcucaugaacgagcugggcgucccguuccaccuggggaccaagcaggucugcaucgccugguccagcuccagcugccacgacggccgcgccuggcuccacaucugcaucaccggggacgaccggaacgcgacggccuccuucaucuacgacggcaugcugguggacagcaucuccagcugguccaagaacauccugcgcacccaggagagcgagugcgugugcaucaacgggaccugcgccguggugaugaccgacggcagcgccuccggcgucgcggacacgcggauccucuucauccgcgaggggaagaucgugcacaucagcccccuguccggcagcgcccagcacaucgaggagugcuccugcuacccccgguaccccgacgugcgcugcgucugccgggacaacuggaagggcagcaaccgcccggugaucaacaucaacauggccgacuacuccaucgacagcaacuacgugugcuccgggcuggucggcgacacgccccggaacgacgacaacagcuccagcuccaacugccgcgaccccaacaacgagcgggggaaccccggcgugaaggggugggccuucgacgacggcaacgacguguggaugggccgcaccaucaaccgggacagccgcuccggguacgagaccuuccgggucaucggcggguggaccaccgccaacagcaagucccagaucaaccgccaggugaucgucgacaacaacaacuggagcggcuacuccgggguguucagcguggagggcaagagcugcaucaaccgcugcuucuacgucgagcucauccggggccgcccgcaggagccccgggugugguggaccuccaacagcaucguggucuucugcgggaccuccggcacguacgggaccggcagcuggcccgacggggcgaacaucaacuucaugcccaucuga

SEQ ID NO: 88442 - RNA, 1410 nt, Artificial Sequence
  derived and/or modified CDS sequence (opt1) from neuraminidase__InfluenzaA__AHJ57734
augaaccccaaccagaagaucaucaccaucggcagcgugucccugaccaucgccacggucagcuuccucaugcagaucgccauccugaccaccaccgugacgcugcacuucaagcacaacgagugcaacaugccgcccaagaaccaggugauguccugcgagcccaucaucaucgagcgcaacaucaccgagaucgucuaccucaacaacaccaccguggagaaggagaucugccccaagguggcggaguaccggaacuggagcaagccgcagugcaagaucacgggguucgcccccuucuccaaggacaacagcauccgccuguccgccggcggggacaucugggucacccgggagcccuacgugagcugcggccuggggaagugcuaccaguucgcccucggccagggcaccacccuggacaacucccacagcaacgggacgauccacgaccgcaucccccaccggacccugcucaugaacgagcugggcgugccguuccaccuggggaccaagcaggucugcaucgccugguccagcuccagcugccacgacggccgcgcguggcuccacaucugcaucaccggggacgaccggaacgccacggccuccuucaucuacgacggcaugcugguggacagcaucggcuccuggagcaagaacauccugcgcacccaggaguccgagugcgugugcaucaacgggaccugcgccgucgugaugaccgacggcagcgcgagcgggguggccgacacgcggauccucuucauccgcgagggcaagaucguccacaucagcccccuguccggcuccgcccagcacaucgaggagugcagcugcuacccccgguaccccgacgugcgcugcgugugccgggacaacuggaagggguccaaccgcccggucaucaacaucaacauggccgacuacagcaucgacuccaacuacgugugcagcggccuggugggggacacgccccggaacgacgacaacuccagcuccagcaacugccgcgaccccaacaacgagcggggcaaccccggggucaagggcugggccuucgacgacggcaacgacguguggauggggcgcaccaucaaccgggacucccgcagcggcuacgagaccuuccgggugaucgggggcuggaccaccgcgaacuccaagagccagaucaaccgccaggucaucguggacaacaacaacugguccggguacagcggcgucuucuccguggagggcaagagcugcaucaaccgcugcuucuacguggagcucauccgggggcgcccgcaggagccccgggucugguggaccagcaacuccaucgugguguucugcggcaccagcgggacguacggcaccggguccuggcccgacggcgccaacaucaacuucaugcccaucuga

SEQ ID NO: 88443 - RNA, 1380 nt, Artificial Sequence
  derived and/or modified CDS sequence (opt1) from neuraminidase__InfluenzaA__AHJ57746
augaaccccaaccagaagaucaucaccaucggcagcguguccaucaccaucgccgccgucugcuuccugaugcagaucgcgauccucgccacgaccgugacccugcacuucaagcagaacgagugcaacaucccgagcaagaaccacgugauccccugcgagcccaucaucaucgagcgcaacaucaccgaggucgagauccggcccaagguggccgaguaccgcgacugguccaagccgcagugccagaucacgggguucgcccccuucagcaaggacaacuccauccggcugagcgccggcgggaacaucugggugacccgcgagcccuacgucuccugcggccccgacaagugcuaccaguucgcgcucgggcagggcaccacccugggcaacgggcacagcaacggcacgauccacgacaagaucccgcaccggacccugcucaugaacgagcugggggugcccuuccaccugggcaccaagcaggucugcaucgccugguccagcuccagcugccacgacgggcgcgccuggcuccacgugugcgugaccggcgacgaccggaacgccacggcguccuucaucuacgacggcaugcugguggacagcaucgccuccuggagccagaacauccugcgcacccaggaguccgagugcgucugcaucaacgggaccugcaccguggugaugacggacggcagcgccuccggggucgccgacacccggauccucuucauccgcgagggcaagaucgugcacaucagcccccugagcggcuccgcccagcacaucgaggagugcagcugcuacccccggcacuccgacgugcgcugcgucugccgggacaacuggaaggggagcaaccgcccggugguggacaucaacaugaccgacuacuccaucgacagcuccuacgucugcagcggccuggugggggacacgccccggaacgacgacuccagcuccagcuccaacugccgcgaccccaacaacgagcggggcaaccccggggugaagggcugggcguucgacgacggcgacgacgucuggauggggcgcaccaucagccgggacucccgcagcggcuacgagaccuuccgggugaucgggggcuggaccaccgccaacuccaagagccagaucaaccgccaggucaucguggacaacaacaacugguccggguacagcggcguguucagcgucgagggcaaguccugcaucaaccgcugcuucuacguggagcucauccgggggcgcccgcaggagacgcgggugugguggaccagcaacuccaucgucguguucugcggcaccagcgggaccuacggcacgggguccuggcccgacggcgccaacaucaacuucaugcccaucuga

SEQ ID NO: 88444 - RNA, 1410 nt, Artificial Sequence
  derived and/or modified CDS sequence (opt1) from neuraminidase__InfluenzaA__AHJ57758
augaaccccaaccagaagaucaucaccgugggcagcgucucccuggccaucgccaccaucugccuccugaugcagaucgcgauccuggccacgaccgugacccuccacuucaagcagaacgagugcaacaucccgagcaagaaccaggugaugcccugcgagcccaucaucaucgagcgcaacaucaccgaggucguguaccugaacaacacgaucaucgagaaggagaucugccccaagguggucgaguaccggaacugguccaagccgcagugccagaucaccggguucgcccccuucagcaaggacaacuccauccgccugagcgccggcggggacaucugggugacccgggagcccuacguguccugcagccccuccaagugcuaccaguucgcccucggccaggggaccacgcuggacaacagccacuccaacggcaccauccacgaccgcaucccgcaccggacccugcucaugaacgagcugggcguccccuuccaccuggggaccaagcaggucugcaucgcguggagcuccagcuccugccacgacggccgcgccuggcuccacgugugcaucacgggggacgaccggaacgccaccgccagcuucaucuacaacggcaugcugguggacuccaucagcuccuggagccgcaacauccugcggacccaggagagcgagugcgugugcaucaacgggaccugcacggugaucaugaccgacggcuccgcgagcggcgucgccgacacccgcauccucuucauccgggaggggaacaucgugcacgugagcccccuguccggcuccgcccagcacaucgaggagugcagcugcuacccccgcuacccggacguccggugcgugugccgcgacaacuggaagggguccaaccggcccguggucgacaucaacauggccgacuacagcaucgacucccacuacgugugcagcggccuggugggcgacacgccccgcaacgacgacuccagcuccagcuccaacugcaaggaccccaacaacgagcgggggaacccgggcgucaaggggugggccuucgacgacggcaacgacguguggauggggcgcaccaucagccgggacucccgcagcggcuacgagaccuuccgggucaucggcggguggaccaccgcgaacuccaagagccagaucaaccgccaggugaucguggacaacaacaacuggagcggcuacuccggggucuucagcguggagggcaaguccugcaucaaccgcugcuucuacguggagcucauccgggggcgcccccaggagacgcgggucugguggaccagcaacuccaucgugguguucugcggcaccagcggcaccuacgggacgggcuccuggcccgacggggccaacaucaacuucaugcccaucuga

SEQ ID NO: 88445 - RNA, 1401 nt, Artificial Sequence
  derived and/or modified CDS sequence (opt1) from neuraminidase__InfluenzaA__AHJ57770
augaaccccaaccagaagaucaucgccaucggcagcgugucccugaccaucgccaucaucugcuuccucaugcagaucgcgauccugaccacgaccaugacccugcacuucaagcagaacgagugcagcaacccguccaacaaccaggucgugcccugcgagcccaucaucaucgagcgcaacaccgugcaccucaacagcacgaccaucgagaaggagaucugccccaaggucguggaguacaagaacugguccaagccgcagugccagaucaccggguucgcccccuucagcaaggacaacuccauccggcugagcgccggcggggacaucugggugacccgcgagcccuacgucuccugcagccugggcaagugcuaccaguucgcccucgggcagggcacgacccugaagaacaagcacuccaacggcaccacccacgaccggaucccccaccgcacgcugcucaugaacgagcugggggugccguuccaccugggcaccaagcaggucugcaucgccuggagcuccagcuccugcuacgacgggaaggcguggcuccacaucugcgugaccggcgacgacaagaacgccaccgccagcaucaucuacgacgggaugcugguggacuccaucggcagcugguccaagaacauccugcggacgcaggagagcgagugcgugugcaucaacgggaccugcgccgucgugaugaccgacggcagcgcguccggcaaggccgacacccgcauccucuucauccgggaggggaagaucaucaacaucagcccccuguccggcagcgcccagcacguggaggagugcuccugcuacccccgcuaccccgagguccggugcgugugccgcgacaacuggaagggcagcaaccggccggugcuguacaucaacauggccgacuacuccgucgagagcuccuacgugugcagcgggcucgugggcgacacgccccgcaacgacgacuccagcuccagcuccaacugccgggaccccaacaacgagcgcggggcccccggcgucaaggggugggcguucgacgacggcaacgacguguggaugggccggaccaucaagaacgacagccgcuccggguacgagaccuuccggguggucaacggcuggaccacggccaacagcaagucccagaucaaccgccaggugaucgucgacagcgagaacuggagcggguacuccggcaucuucagcguggaggggaagaacugcaucaaccggugcuucuacguggagcugauccgcggccggccgcaggagccccgcgucugguggaccuccaacagcaucaucguguucugcggcaccuccgggaccuacggcacggggagcuggcccgacggcgccaacaucaacuuccugcccaucuga

SEQ ID NO: 88446 - RNA, 1410 nt, Artificial Sequence
  derived and/or modified CDS sequence (opt1) from neuraminidase__InfluenzaA__AHJ57782
augaaccccaaccagaagaucaucaucaucggcagcgugucccugaccaucgccaccgucugcuuccucaugcagaucgccauccuggcgacgaccgugacccugcacuucaagcagaacgagugcaacaucccgagcaagaaccaggugguccccugcgagcccaucaucaucgagcgcaacaucaccgaggugguguaccucaacaacacgaccaucgagaaggagaucugccccgccgucguggaguaccggaacugguccaagccgcagugccagaucaagggguucgcccccuucagcaaggacaacuccauccgccugagcgccggcggggacaugugggugacccgggagcccuacgucuccugcagccccuccaagugcuaccaguucgcccugggccaggggaccacgcucgacaacaaccacagcaacggcaccauccacgaccgcaucccgcaccggacccugcugaugaacgagcucggcgugcccuuccaccuggggaccaagcaggucugcaucgcgugguccagcuccagcugccacgacggcaaggccuggcugcacgugugcgugacgggggacgaccgcaacgccaccgccuccuucaucuacgacggcaugcucguggacagcaucggguccuggagccagaacauccugcggacccaggaguccgagugcgucugcaucaacgggaccugcacgguggugaugaccgacggcagcgcgagcggcaucgccgacacccgcauccuguucguccgggagggcaagaucgugcacaucagcccccucuccggguccgcccagcacaucgaggagugcagcugcuacccccgcuacccggacgugcggugcgucugccgcgacaacuggaagggcuccaaccggcccaucguggacaucaacauggccgacuacagcaucggcuccagcuacgugugcuccgggcuggucggcgacacgccccgcaacgacgaccgguucagcuccagcaacugccgcgaccccaacuccgagcgggggaacccgggcgugaaggggugggccuucgacgacggcgacgacgucuggaugggccgcaccaucagccgggacucccgcagcggguacgagaccuuccgggugaucggcggguggaccaccgcgaacuccaagagccagaucaaccgccaggugaucgucgacaacaacaacugguccggcuacagcgggguguucagcguggagggcaaguccugcaucaaccgcugcuucuacgucgagcugauccggggccgcccccaggagacgcgggugugguggaccagcaacuccaucguggucuucugcgggaccagcggcaccuacgggacgggcuccuggcccgacggggccaacaucaacuucaugcccaucuga

SEQ ID NO: 88447 - RNA, 1410 nt, Artificial Sequence
  derived and/or modified CDS sequence (opt1) from neuraminidase__InfluenzaA__AHJ57794
augaaccccaaccagaagaucaucaccgugggcagcgucucccuggccaucgccaccaucugcuuccucaugcagaucgcgauccuggccacgaccgugacccugcacuucaagcagaacgagugcaacaucccgagcaagaaccaggugaugcccugcgagcccaucaucaucgagcgcaacaucaccgaggucguguaccucaacaacacgaucaucgagaaggagaucugccccaagguggucgaguaccggaacugguccaagccgcagugccagaucaccggguucgcccccuucagcaaggacaacuccauccgccugagcgccggcggggacaucugggugacccgggagcccuacguguccugcagccccuccaagugcuaccaguucgcccugggccaggggaccacgcucgacaacagccacuccaacggcaccauccacgaccgcaucccgcaccggacccugcugaugaacgagcucggcguccccuuccaccuggggaccaagcaggucugcaucgcguggagcuccagcuccugccacgacggccgcgccuggcugcacgugugcaucacgggggacgaccggaacgccaccgccagcuucaucuacaacggcaugcucguggacuccaucagcuccuggagccgcaacauccugcggacccaggagagcgagugcgugugcaucaacgggaccugcacggugaucaugaccgacggcuccgcgagcggcgucgccgacacccgcauccuguucauccgggaggggaacaucgugcacgugagcccccucuccggcuccgcccagcacaucgaggagugcagcugcuacccccgcuacccggacguccggugcgugugccgcgacaacuggaagggguccaaccggcccguggucgacaucaacauggccgacuacagcaucgacucccacuacgugugcagcggccuggugggcgacacgccccgcaacgacgacuccagcuccagcuccaacugcaaggaccccaacaacgagcgggggaacccgggcgucaaggggugggccagcgacgacggccacgacguguggauggggcgcaccaucggccgggacucccgcagcggcuacgagaccuuccgggucaucgggggcuggaccaccgcgaacuccaagagccagaucaaccgccaggugaucguggacaacaacaacuggagcggguacuccggcgucuucagcguggaggggaaguccugcaucaaccgcugcuucuacguggagcugauccggggccgcccccaggagacgcgggucugguggaccagcaacuccaucgugguguucugcggcaccagcgggaccuacggcacgggguccuggcccgacggcgccaacaucaacuucaugcccaucuga

SEQ ID NO: 88448 - RNA, 1413 nt, Artificial Sequence
  derived and/or modified CDS sequence (opt1) from neuraminidase__InfluenzaA__AHJ57806
augaaccccaaccagaagaucacgugcaucagcgccaccggcaugacccuguccguggucagccuccugaccgggaucgccaaccugggccucaacaucgggcugcacuacaagguguccgacagcaccaacaucuccaucccgaacaugaacgaggcgagccccaccacgaccaucaucaacaaccacccccagaacaacuucaccaacaucaccaacaucaucaugaacaagaacgaggagggcaacuuccugaaccucacgaagccccugugcgaggugaacuccuggcacauccugagcaaggacaacgccauccgcaucggggagaacgcccacauccucgucacccgggagccguaccuguccugcgacccccagggcugccgcauguucgcccugagccagggcaccacccuccgggggcgccacgccaacggcacgauccacgaccggucccccuuccgcgcgcugaucagcugggagauggggcaggcccccuccccguacaacgcccggguggagugcaucggcuggagcuccaccagcugccacgacgggaucucccgcaugagcaucugcaucuccggccccaacaacaacgccagcgcgguggucugguacggcgggcggcccgugaccgagauccccagcugggccggcaacauccugcgcacccaggaguccgagugcgugugccacgggggcaucugcccggucgugaugacggacggccccgccaacaaccgggccgagaccaagaucaucuacuucaaggaggggaagauccagaagaucgaggagcucaagggcaacgcccagcacaucgaggagugcagcugcuacggggcguccggcaugaucaagugcaucugccgcgacaacuggaagggggccaaccggcccgugaucaccaucgaccccgagaugaugacccacacgagcaaguaccugugcuccaagauccugaccgacaccagccgcccgaacgaccccaccaacggcaacugcgacgcccccaucacgggcgggucccccgacccgggcgucaagggguucgccuuccucgacggcaagaacagcuggcuggggcggaccaucuccaaggacagccgcuccggcuacgagaugcugaaggugcccaacgccgagaccgacacccagagcggcgcgaucucccaccagaucaucgugaacaaccagaacuggagcggguacuccggcgccuucaucgacuacugggccaacaaggagugcuucaaccccugcuucuacgucgagcucauccgggggcgccccaaggagagcuccgugcuguggacgagcaacuccaucguggcccugugcggcagccgggagcgccucgggagcugguccuggcacgacggcgccgagaucaucuacuucaaguga

SEQ ID NO: 88449 - RNA, 1380 nt, Artificial Sequence
  derived and/or modified CDS sequence (opt1) from neuraminidase__InfluenzaA__AHJ57818
augaaccccaaccagaagaucacgugcaucagcgccaccggcgugacgcuguccgucgugagccuccugaucgggaucgccaaccugggccucaacaucgggcugcacuacaagguguccgacagcccgaccaucaacauccccaacaugaacgagaccaaccccaucaccacgaacaucaccaacaucaucgucaacaagaacgaggagggcaccuuccugaaccucaccaagccccugugcgaggugaacuccuggcacauccugagcaaggacaacgcgauccgcaucggggaggacgcccacauccucgugacgcgggagccguaccuguccugcgacccccagggcugccgcauguucgcccugagccagggcaccacccuccgggggcgccacgccaacggcaccauccacgaccggucccccuuccgcgcccugaucagcugggagauggggcaggcgcccuccccguacaacacgcgggucgagugcaucggcuggagcuccaccagcugccacgacgggaucucccgcaugagcaucugcaucuccggccccaacaacaacgccagcgccguggugugguaccggggccgccccgucaccgagauccccuccugggccgggaacauccugcggacccaggagagcgagugcgugugccacaagggcaucugcccgguggucaugacggacgggcccgcgaacaacaaggccgccaccaagaucaucuacuucaaggagggcaagauccagaagaucgaggagcuccagggcaacgcccagcacaucgaggagugcagcugcuacggggccgcgggcaugaucaagugcgugugccgcgacaacuggaagggggccaaccggcccaucaucaccaucgaccccgagaugaugacccacacguccaaguaccugugcagcaagauccugaccgacaccucccgcccgaacgaccccaccgacggcaacugcgacgcccccaucaccgggggcagccccgacccgggcgugaagggguucgccuuccucgagggcgagaacuccuggcuggggcggaccaucagcaaggacucccgcagcggcuacgagaugcugaagguccccaacgccgagaccgacacccaguccggggcgaucagccaccagaugaucgugaacaaccagaacugguccggcuacagcggcgccuucaucgacuacugggccaacaaggagugcuucaaccccugcuucuacguggagcucauccgggggcgccccaaggaguccagcguccuguggacguccaacagcaucguggcccugugcggcucccgggagcgccucgggagcugguccuggcacgacggcgccgagaucaucuacuucaaguga

SEQ ID NO: 88450 - RNA, 1410 nt, Artificial Sequence
  derived and/or modified CDS sequence (opt1) from neuraminidase__InfluenzaA__AHJ57830
augaaccccaaccagaagaucaucaccaucggcagcgugucccugaccaucgccacggucagcuuccucaugcagaucgccauccugaccaccaccgugacgcugcacuucaagcacaacgagugcaacaugccgcccaagaaccaggugauguccugcgagcccaucaucaucgagcgcaacaucaccgagaucgucuaccucaacaacaccaccaucgagaaggagaucugccccaaggugguggaguaccggaacuggagcaagccgcagugcaagaucacgggguucgcgcccuucuccaaggacaacagcauccgccuguccgccggcggggacaucugggucacccgggagcccuacgugagcugcggccuggggaagugcuaccaguucgcccucggccagggcaccacccuggacaacucccacagcaacgggacgauccacgaccgcaucccccaccggacccugcucaugaacgagcugggcgugccguuccaccuggggaccaagcaggucugcaucgccugguccagcuccagcugccacgacggccgcgccuggcuccacaucugcaucaccggggacgaccggaacgcgacggccuccuucaucuacgacggcaugcugguggacagcaucggcuccuggagcaagaacauccugcgcacccaggaguccgagugcgugugcaucaacgggaccugcgccgucgugaugaccgacggcagcgccagcgggguggcggacacgcggauccucuucauccgcgagggcaagaucguccacaucagcccccuguccggcuccgcccagcacaucgaggagugcagcugcuacccccgguaccccgacgugcgcugcgugugccgggacaacuggaagggguccaaccgcccggucaucgacaucaacauggccgacuacagcaucgacuccaacuacgugugcagcggccuggugggggacacgccccggaacgacgacaacuccagcuccagcaacugccgcgaccccaacaacgagcggggcaaccccggggucaagggcugggccuucgacgacggcaacgacguguggauggggcgcaccaucaaccgggacucccgcagcggcuacgagaccuuccgggugaucgggggcuggaccaccgccaacuccaagagccagaucaaccgccaggucaucguggacaacaacaacugguccggguacagcggcgucuucuccguggagggcaagagcugcaucaaccgcugcuucuacguggagcucauccgggggcgcccgcaggagccccgggucugguggaccagcaacuccaucgugguguucugcggcaccagcgggacguacggcaccggguccuggcccgacggcgcgaacaucaacuucaugcccaucuga

SEQ ID NO: 88451 - RNA, 1413 nt, Artificial Sequence
  derived and/or modified CDS sequence (opt1) from neuraminidase__InfluenzaA__AHJ57842
augaaccccaaccagaagaucacgugcaucagcgccaccggcaugacccuguccguggucagcaugcucaucgggaucgccaaccugggccugaacaucgggcuccacuacaagguguccgacagcaccaacaucaacaucccgaagaugaacgagaccaaccccaccacgaccaucaucaacaaccacccccagaacaacuucaccaacaucaccaacaucaucgugaacaagaacgaggaggagaacuuccugaaccugacgaagccccucugcgaggucaacuccuggcacauccugagcaaggacaacgcgauccgcaucggcgagaacgcccacauccuggugacccgggagccguaccucuccugcgacccccaggggugccgcauguucgcccugagccagggcaccaccauccggggccagcacgccaacgggacgauccacgaccgcucccccuuccgggcccugaucagcugggagaugggccaggcgcccuccccguacaacgcccgcguggagugcaucggguggagcuccaccagcugccacgacggcaucucccggaugagcaucugcaucuccgggcccaacaacaacgccagcgccgucgugugguacggcggccgccccgugaccgagauccccuccugggcggggaacauccuccggacccaggagagcgagugcgucugccacggcgggaucugcccgguggugaugacggacggccccgccaacaaccgcgccgagaccaagaucaucuacuucaaggagggcaagauccagaagaucgaggagcugaaggggaacgcccagcacaucgaggagugcagcugcuacggcgccuccgggaugaucaagugcaucugccgggacaacuggaagggcgcgaaccgccccgucaucaccaucgaccccgagaugaugacccacacgagcaaguaccugugcuccaagauccucaccgacaccagccggccgaacgaccccaccaacgggaacugcgacgcccccaucacgggcggcuccagcgaccccggggugaagggcuucgccuuccuggacggggagaacuccuggcugggccgcaccaucagcaaggacucccggagcggguacgagaugcucaaggugccgaacgccgagaccgacacccaguccggcgccaucagccaccagaucaucgucaacaaccagaacugguccggcuacagcggggcguucaucgacuacugggccaacaaggagugcuucaaccccugcuucuacguggagcugauccgcggccggcccaaggaguccagcgugcuguggacguccaacagcaucgucgcccucugcgggucccgcgagcggcugggcagcuggagcuggcacgacggggccgagaucaucuacuucaaguga

SEQ ID NO: 88452 - RNA, 1413 nt, Artificial Sequence
  derived and/or modified CDS sequence (opt1) from neuraminidase__InfluenzaA__AHJ57853
augaaccccaaccagaagaucacgugcaucagcgccaccggcaugacccuguccguggucagccuccugaucgggaucgccaaccugggccucaacguggggcugcacuacaaggugaacgacccgaccaacaucaacauccccaacaugaacgagaccucccccaccacgaccaucaucaacaaccacccccagaacaacuucaccaacaucaccaacaucaucgucaacaagaacgaggaggagaacuuccugaaccucacgaagccgcugugcgaggugaacagcuggcacauccuguccaaggacaacgcgauccgcaucggcgagaacgcccacauccucgugacccgggagcccuaccugagcugcgacccccaggggugccgcauguucgcccugucccagggcaccacccuccggggccagcacgccaacgggacgauccacgaccgcagccccuuccgggcccugaucuccugggagaugggccaggcgccgagccccuacaacgcccgcgucgagugcaucgggugguccagcaccuccugccacgacggcaucagccggauguccaucugcaucagcgggcccaacaacaacgccuccgccguggugugguacggcggccgccccgucaccgagaucccgagcugggcggggaacauccugcggacccaggaguccgagugcgugugccacggcgggaucugccccguggucaugacggacggccccgccaacaaccgcgccgagaccaagaucaucuacuucaaggagggcaagauccagaagaucgaggagcucaaggggaacgcccagcacaucgaggagugcagcugcuacggcgccagcgggaugaucaagugcaucugccgggacaacuggaagggcgcgaaccgccccgugaucaccaucgacccggagaugaugacccacacguccaaguaccugugcagcaagauccugaccgacaccucccggcccaacgaccccaccaacgggaacugcgacgcccccaucacgggcggcagcccggaccccggggugaagggcuucgccuuccucgacggggagaacuccuggcugggccgcaccaucagcaaggacucccggagcggguacgagaugcugaagguccccaacgccgagaccgacacccaguccggcgccaucagccaccagaugaucgugaacaaccagaacugguccggcuacagcggggcguucaucgacuacugggccaacaaggagugcuucaaccccugcuucuacguggagcucauccgcggccggccgaaggaguccagcguccuguggacguccaacagcaucguggcccugugcgggucccgcgagcggcucggcagcugguccuggcacgacggggccgagaucaucuacuucaaguga

SEQ ID NO: 88453 - RNA, 1413 nt, Artificial Sequence
  derived and/or modified CDS sequence (opt1) from neuraminidase__InfluenzaA__AHJ57865
augaaccccaaccagaagaucacgugcaucagcgccaccggcaugacccuguccguggucagcaugcucaucgggaucgccaaccugggccugaacaucgggcuccacuacaagguguccgacagcaccaacaucaacaucccgaagaugaacgagaccaaccccaccacgaccaucaucaacaaccacccccagaacaacuucaccaacaucaccaacaucaucgugaacaagaacgaggaggagaacuuccugaaccugacgaagccccucugcgaggucaacuccuggcacauccugagcaaggacaacgcgauccgcaucggcgagaacgcccacauccuggugacccgggagccguaccucuccugcgacccccaggggugccgcauguucgcccugagccagggcaccacccugcggggccgccacgccaacgggacgauccacgaccggucccccuuccgcgcccucaucagcugggagaugggccaggcgcccuccccguacaacgcccggguggagugcaucggguggagcuccaccagcugccacgacggcaucucccgcaugagcaucugcaucuccgggcccaacaacaacgccagcgccgucgugugguacggcggccggcccgugaccgagauccccuccugggcggggaacauccugcgcacccaggagagcgagugcgucugccacggcgggaucugcccgguggugaugacggacggccccgccaacaaccgggccgagaccaagaucaucuacuucaaggagggcaagauccagaagaucgaggagcugaaggggaacgcccagcacaucgaggagugcagcugcuacggcgccuccgggaugaucaagugcaucugccgcgacaacuggaagggcgcgaaccggcccgucaucaccaucgaccccgagaugaugacccacacgagcaaguaccucugcuccaagauccugaccgacaccagccgcccgaacgaccccaccaacgggaacugcgacgcccccaucacgggcggcucccccgacccgggggugaagggcuucgccuuccuggacggggagaacagcuggcucggccggaccaucuccaaggacagccgcuccggguacgagaugcugaaggugcccaacgccgagaccgacacccagagcggcgccaucucccaccagaugaucgucaacaaccagaacuggagcggcuacuccggggcguucaucgacuacugggccaacaaggagugcuucaaccccugcuucuacguggagcugauccggggccgccccaaggagagcuccgugcucuggacgagcaacuccaucgucgcccugugcgggagccgggagcgccugggcuccuggagcuggcacgacggggccgagaucaucuacuucaaguga

SEQ ID NO: 88454 - RNA, 1413 nt, Artificial Sequence
  derived and/or modified CDS sequence (opt1) from neuraminidase__InfluenzaA__AHJ57876
augaaccccaaccagaagaucacgugcaucagcgccaccggcaugacccuguccguggucagccuccugaucgggaucgccaaccugggccucaacaucgggcugcacuacaagguguccgacagcaccaacaucaacaucccgaacaugaacgagaccucccccaccacgaccaucaucaacaaccacccccagaacaacuucaccaacaucaccaacaucaucaugaacaagaacgaggagggcaacuuccugaaccucacgaagccccugugcgaggugaacagcuggcacauccuguccaaggacaacgcgauccgcaucggggagaacgcccacauccucgucacccgggagccguaccugagcugcgacccccagggcugccgcauguucgcccugucccagggcaccacccuccgggggcgccacgccaacggcacgauccacgaccggagccccuuccgcgcccugaucuccugggagauggggcaggcgcccagcccguacaacgcccggguggagugcaucggcugguccagcaccuccugccacgacggcaagagccgcauguccaucugcaucagcgggcccaacaacaacgccuccgccguggucugguacggcgggcggcccaucaccgagauccccagcugggcgggcaacauccugcgcacccaggagagcgagugcgugugccacgggggcaucugcccgguggucaugacggacggccccgccaacaaccgggccgagaccaagaucaucuacuucaaggaggggaaggugcagaagaucgaggagcucaagggcaacgcccagcacaucgaggagugcuccugcuacggggccagcggcaugaucaagugcaucugccgcgacaacuggaagggggcgaaccggcccgugaucaccaucgaccccgagaugaugacccacacguccaaguaccugugcagcaagauccugaccgacaccucccgcccgaacgaccccaccaacggcaacugcgacgcccccaucacgggcgggagccccgacccgggcgucaagggguucgccuuccucgacggcgagaacuccuggcuggggcggaccaucagcaaggacucccgcagcggcuacgagaugcugaaggugcccaacgccgagaccgacacccaguccggcgccaucagccaccagaucaucgugaacaaccagaacugguccggguacagcggcgcguucaucgacuacugggccaacaaggagugcuucaaccccugcuucuacgucgagcucauccgggggcgccccaaggaguccagcgugcuguggacguccaacagcaucguggcccugugcggcucccgggagcgccucgggagcuggagcuggcacgacggcgccgagaucaucuacuucaaguga

SEQ ID NO: 88455 - RNA, 1413 nt, Artificial Sequence
  derived and/or modified CDS sequence (opt1) from neuraminidase__InfluenzaA__AHJ57888
augaaccccaaccagaagaucacgugcaucagcgccaccggcaugacccuguccguggucagcaugcucaucgggaucgccaaccugggccugaacaucgggcuccacuacaagguguccgacagcaccaacaucaacaucccgaacaugaacgagaccucccccaccacgaccaucaccaacaaccacccccagaacaacuucaccaacaucacgaacaucaucgugagcaagaacgaggaggagaacuuccugaaccugaccaagccccucugcgaggucaacuccuggcacauccugagcaaggacaacgcgauccgcaucggcgagaacgcccacauccuggugacccgggagccguaccucuccugcgacccccaggggugccgcauguucgcccugagccagggcaccacgcugcggggccagcacgccaacgggaccauccacgaccgcucccccuuccgggcccucaucagcugggagaugggccaggcgcccuccccguacaacgcccgcguggagugcaucggguggagcuccaccagcugccacgacggcaucucccggaugagcaucugcaucuccgggcccaacaacaacgccagcgccgucgugugguacggcggccgccccgugaccgagauccccagcugggcggggaacauccugcggacgcaggaguccgagugcgucugccacggcgggaucugcccgguggugaugaccgacggccccgccaacaaccgcgccgagaccaagaucaucuacuucaaggagggcaagauccagaagaucgaggagcugaaggggaacgcccagcacaucgaggagugcagcugcuacggcgccuccgggaugaucaagugcaucugccgggacaacuggaagggcgcgaaccgccccgucaucaccaucgaccccgagaugaugacgcacaccagcaaguaccucugcuccaagauccugaccgacaccagccggccgaacgaccccacgaacgggaacugcgacgcccccaucaccggcggcucccccgacccgggggugaagggcuucgccuuccuggacggggagaacagcuggcucggccgcaccaucuccaaggacagccgguccggguacgagaugcugaaggugcccaacgccgagaccgacacgcagagcggcgccaucucccaccagaugaucgucaacaaccagaacuggagcggcuacuccggggcguucaucgacuacugggccaacaaggagugcuucaaccccugcuucuacguggagcugauccgcggccggcccaaggagagcuccgugcucuggaccagcaacuccaucgucgcccugugcgggagccgcgagcggcugggcagcugguccuggcacgacggggccgagaucaucuacuucaaguga

SEQ ID NO: 88456 - RNA, 1413 nt, Artificial Sequence
  derived and/or modified CDS sequence (opt1) from neuraminidase__InfluenzaA__AHJ57900
augaaccccaaccagaagaucacgugcaucagcgccaccggcaugacccuguccguggucagccuccugaucgggaucgccaaccugggccucaacaucgggcugcacuacaagguguccgacagcaccaacaucaacaucccgaacaugaacgagaccucccccaccgcgacgaucaucaacaaccacccccagaacaacuucaccaacaucaccaacaucaucgugaacaagaacgaggaggagaacuucuucaaccuggccaagccccucugcgaggucaacagcuggcacauccuguccaaggacaacgccauccgcaucggcgagaacgcccacauccuggugacccgggagccguaccucagcugcgacccccaggggugccgcauguucgcccugucccagggcacgacccugcggggccagcacgcgaacgggaccauccacgaccgcagccccuuccgggcccucaucuccugggagaugggccaggcccccagcccguacaacgcccgcguggagugcaucgggugguccagcaccuccugccacgacggcaucagccggauguccaucugcaucagcgggcccaacaacaacgcguccgccgucgugugguacggcggccgccccgugacggagauccccagcugggccgggaacauccugcggacccaggagagcgagugcgucugccacggcgggaucugcccgguggugaugaccgacggccccgccaacaaccgcgccgagaccaagaucaucuacuucaaggagggcaagauccagaagaucgaggaccugaaggggaacgcgcagcacaucgaggagugcuccugcuacggcgccagcgggaugaucaagugcaucugccgggacaacuggaagggcgccaaccgccccgucaucacgaucgaccccgagaugaugacccacaccuccaaguaccucugcagcaagauccugaccgacacgucccggccgaacgaccccaccaacgggaacugcgacgcccccaucaccggcggcagccccgacccgggggugaagggcuucgccuuccuggacggggagaacuccuggcucggccgcaccaucagcaaggacucccggagcggguacgagaugcugaaggugcccaacgcggagacggacacccaguccggcgccaucagccaccagaugaucgucaacaaccagaacugguccggcuacagcggggccuucaucgacuacugggccaacaaggagugcuucaaccccugcuucuacguggagcugauccgcggccggcccaaggaguccagcgugcucuggaccuccaacagcaucgucgcccugugcgggucccgcgagcggcugggcagcuggagcuggcacgacggggcggagaucaucuacuucaaguga

SEQ ID NO: 88457 - RNA, 1413 nt, Artificial Sequence
  derived and/or modified CDS sequence (opt1) from neuraminidase__InfluenzaA__AHJ57911
augaaccccaaccagaagaucacgugcaucagcgccaccggcgugacccuguccgucgugagccuccugaucgggaucgccaaccugggccucaacaucgggcugcacuacaagguguccgacagcuccaacaucaacaucccgaacaugaacgagaccaaccccaccaccacgaucaucaacaaccacacccagaacaacuucaagaacaucaccaacaucaucgucaacaagaacgaggagggcaucuuccugaaccucaccaagccccugugcgaggugaacagcuggcacauccuguccaaggacaacgcgauccgcaucggggaggacgcccacauccucgugacgcgggagcccuaccugagcugcgacccgcagggcugccgcauguucgcccugucccagggcaccacccuccgggggcgccacgccaacggcaccauccacgaccggagccccuuccgcgcccugaucuccugggagauggggcaggcgcccagccccuacaacgcccgggucgagugcaucggcugguccagcacguccugccacgacgggaucagccgcauguccaucugcaucagcggcccgaacaacaacgccuccgccguggugugguaccggggccgccccgucaccgagauccccagcugggcggggaacauccugcggacccaggagagcgagugcgugugccacaagggcaucugccccguggucaugaccgacgggccggccaacaaccgcgccgccacgaagaucaucuacuucaaggagggcaagauccagaagaucgaggagcucaagggcaacgcccagcacaucgaggagugcuccugcuacggggcggccggcaugaucaagugcaucugccgggacaacuggcgcggggccaaccggcccgugaucaccaucgaccccgagaugaugacccacaccagcaaguaccugugcuccaagauccugacggacaccagccgccccaacgacccgaccaacggcaacugcgacgcccccaucaccgggggcucccccgaccccggcgugaagggguucgccuuccucgacggcgagaacagcuggcuggggcggacgaucuccaaggacagccgcuccggcuacgagaugcugaaggucccgaacgcggagaccgacacccagagcggguccaccagcuaccagaucaucgugaacaaccagaacugguccggcuacagcggcgccuucaucgacuacugggccaacaaggagugcuucaaccccugcuucuacguggagcucauccgggggcgccccaaggaguccagcguccuguggacguccaacagcaucguggcccugugcggcucccgggagcgccucgggagcuggagcuggcacgacggcgccgagaucaucuacuucaaguga

SEQ ID NO: 88458 - RNA, 1410 nt, Artificial Sequence
  derived and/or modified CDS sequence (opt1) from neuraminidase__InfluenzaA__AHJ57923
augaaccccaaccagaagaucaucaccgugggcagcgucucccuggccaucgccaccaucugcuuccucaugcagaucgcgauccuggccacgaccgugacccugcacuucaagcagaacgagugcaacaucccgagcaagaaccaggugaugcccugcgagcccaucaucaucgagcgcaacaucaccgaggucguguaccucaacaacacgaucaucgagaaggagaucugccccaagguggucgaguaccggaacugguccaagccgcagugccagaucaccggguucgcccccuucagcaaggacaacuccauccgccugagcgccggcggggacaucugggugacccgggagcccuacguguccugcagccccuccaagugcuaccaguucgcccugggccaggggaccacgcucgacaacagccacuccaacggcaccauccacgaccgcaucccgcaccggacccugcugaugaacgagcucggcguccccuuccaccuggggaccaagcaggucugcaucgcguggagcuccagcuccugccacgacggccgcgccuggcugcacgugugcaucacgggggacgaccggaacgccaccgccagcuucaucuacaacggcaugcucguggacuccaucagcuccuggagccgcaacauccugcggacccaggagagcgagugcgugugcaucaacgggaccugcacggugaucaugaccgacggcuccgcgagcggcgucgccgacacccgcauccuguucauccgggaggggaagaucgugcacgugagcccccucuccggcuccgcccagcacaucgaggagugcagcugcuacccccgcuacccggacguccggugcgugugccgcgacaacuggaagggguccaaccggcccguggucgacaucaacauggccgacuacagcaucgacucccacuacgugugcagcggccuggugggcgacacgccccgcaacgacgacuccagcuccagcuccaacugcaaggaccccaacaacgagcgggggaacccgggcgucaaggggugggccuucgacgacggcaacgacguguggauggggcgcaccaucagccgggacucccgcagcggcuacgagaccuuccgggucaucggcggguggaccaccgcgaacuccaagagccagaucaaccgccaggugaucguggacaacaacaacuggagcggcuacuccggggucuucagcguggagggcaaguccugcaucaaccgcugcuucuacguggagcugauccgggggcgcccccaggagacgcgggucugguggaccagcaacuccaucgugguguucugcggcaccagcggcaccuacgggacgggcuccuggcccgacggggccaacaucaacuucaugcccaucuga

SEQ ID NO: 88459 - RNA, 1380 nt, Artificial Sequence
  derived and/or modified CDS sequence (opt1) from neuraminidase__InfluenzaA__AHJ57935
augaaccccaaccagaagaucacgugcaucagcgccaccggcgugacccuguccgucgugagccuccugaucgggaucgccaaccugggccucaacaucgggcugcacuacaagguguccgacagcccgaccaucaacauccccaacaugaacgagaccaaccccaccacgaccaacaucaccaacaucaucgucaacaagaacgaggagggcaccuuccugaaccucacgaagccccugugcgaggugaacuccuggcacauccugagcaaggacaacgcgauccgcaucggggaggacgcccacauccucgugacccgggagccguaccuguccugcgacccccagggcugccgcauguucgcccugagccagggcaccacccuccgggggcgccacgccaacggcacgauccacgaccggucccccuuccgcgcccugaucagcugggagauggggcaggcgcccuccccguacaacacccgggucgagugcaucggcuggagcuccaccagcugccacgacgggaucucccgcaugagcaucugcaucuccggccccaacaacaacgccagcgccguggugugguaccggggccgccccgucaccgagauccccuccugggccgggaacauccugcggacgcaggagagcgagugcgugugccacaagggcaucugcccgguggucaugaccgacgggcccgcgaacaacaaggccgccaccaagaucaucuacuucaaggagggcaagauccagaagaucgaggagcuccagggcaacgcccagcacaucgaggagugcagcugcuacggggccgcgggcaugaucaagugcgugugccgcgacaacuggaagggggccaaccggcccaucaucaccaucgaccccgagaugaugacgcacaccuccaaguaccugugcagcaagauccugaccgacaccucccgcccgaacgaccccacgaacggcaacugcgacgcccccaucaccgggggcagccccgacccgggcgugaagggguucgccuuccucgacggcgagaacuccuggcuggggcggaccaucagcaaggacucccgcagcggcuacgagaugcugaagguccccaacgcccagaccgacacgcaguccgggcccaccagcuaccagcucaucgugaacaaccagaacugguccggcuacagcggcgcguucaucgacuacugggccaacaaggagugcuucaaccccugcuucuacguggagcugauccgggggcgcccgaaggaguccaacguccuguggaccagcaacuccaugguggcccucugcggcagccgggagcgccugggguccuggagcuggcacgacgacgccgagaucaucuacuucaaguga

SEQ ID NO: 88460 - RNA, 1410 nt, Artificial Sequence
  derived and/or modified CDS sequence (opt1) from neuraminidase__InfluenzaA__AHJ57946
augaaccccaaccagaagaucaucaccaucggcagcgugucccugaccaucgccacggucagcuuccucaugcagaucgccauccugaccaccaccgugacgcugcacuucaagcacaacgagugcaacaugccgcccaagaaccaggugauguccugcgagcccaucaucaucgagcgcaacaucaccgagaucgucuaccucaacaacaccaccguggagaaggagaucugccccaagguggucgaguaccggaacuggagcaagccgcagugcaagaucacgggguucgcgcccuucuccaaggacaacagcauccgccuguccgccggcggggacaucugggugacccgggagcccuacgugagcugcggccuggggaagugcuaccaguucgcccucggccagggcaccacccuggacaacucccacagcaacgggacgauccacgaccgcaucccccaccggacccugcucaugaacgagcugggcgucccguuccaccuggggaccaagcaggucugcaucgccugguccagcuccagcugccacgacggccgcgccuggcuccacaucugcaucaccggggacgaccggaacgcgacggccuccuucaucuacgacggcaugcugguggacagcaucggcuccuggagcaagaacauccugcgcacccaggaguccgagugcgugugcaucaacgggaccugcgccguggugaugaccgacggcagcgccagcggggucgcggacacgcggauccucuucauccgcgagggcaagaucgugcacaucagcccccuguccggcuccgcccagcacaucgaggagugcagcugcuacccccgguaccccgacgugcgcugcgucugccgggacaacuggaagggguccaaccgcccggugaucgacaucaacauggccgacuacagcaucgacucccacuacgugugcagcggccuggucggggacacgccccggaacgacgacaacuccagcuccagcaacugccgcgaccccaacaacgagcggggcaaccccggggugaagggcugggccuucgacgacggcaacgacguguggauggggcgcaccaucaaccgggacucccgcagcggcuacgagaccuuccgggucaucgggggcuggaccaccgccaacuccaagagccagaucaaccgccaggugaucgucgacaacaacaacugguccggguacagcggcguguucuccguggagggcaagagcugcaucaaccgcugcuucuacgucgagcucauccgggggcgcccgcaggagccccgggugugguggaccagcaacuccaucguggucuucugcggcaccagcgggacguacggcaccggguccuggcccgacggcgcgaacaucaacuucaugcccaucuga

SEQ ID NO: 88461 - RNA, 1410 nt, Artificial Sequence
  derived and/or modified CDS sequence (opt1) from neuraminidase__InfluenzaA__AHJ57957
augaaccccaaccagaagaucaucaccaucggcagcgugucccugaccaucgccacggucagcuuccucaugcagaucgccauccugaccaccaccgugacgcugcacuucaagcagaacgagugcaacaugccgcccaagaaccaggugauguccugcgagcccaucaucaucgagcgcaacaucaccgagaucgucuaccucaacaacaccaccguggagaaggagaucugccccaagguggucgaguaccggaacuggagcaagccgcagugcaagaucacgggguucgcgcccuucuccaaggacaacagcauccgccuguccgccggcggggacaucugggugacccgggagcccuacgugagcugcggccuggggaagugcuaccaguucgcccucggccagggcaccacccuggacaacucccacagcaacgggacgauccacgaccgcaucccccaccggacccugcucaugaacgagcugggcgucccguuccaccuggggaccaagcaggucugcaucgccugguccagcuccagcugccacgacggccgcgccuggcuccacaucugcaucaccggggacgaccggaacgcgacggccuccuucaucuacgacggcaugcugguggacagcaucggcuccuggagcaagaacauccugcgcacccaggaguccgagugcgugugcaucaacgggaccugcgccguggugaugaccgacggcagcgccagcggggucgcggacacgcggauccucuucauccgcgagggcaagaucgugcacaucagcccccuguccggcuccgcccagcacaucgaggagugcagcugcuacccccgguaccccgacgugcgcugcgucugccgggacaacuggaagggguccaaccgcccggugaucgacaucaacauggccgacuacagcaucgacuccaacuacgugugcagcggccuggucggggacacgccccggaacgacgacaacuccagcuccagcaacugccgcgaccccaacaacgagcggggcaaccccggggugaagggcugggccuucgacuacggcaacgacguguggauggggcgcaccaucaaccgggacucccgcagcggcuacgagaccuuccgggucaucgggggcuggaccaccgccaacuccaagagccagaucaaccgccaggugaucgucgacaacaacaacugguccggguacagcggcguguucuccguggagggcaagagcugcaucaaccgcugcuucuacgucgagcucauccgggggcgcccgcaggagccccgggugugguggaccagcaacuccaucguggucuucugcggcaccagcgggacguacggcaccggguccuggcccgacggcgcgaacaucaacuucaugcccaucuga

SEQ ID NO: 88462 - RNA, 1410 nt, Artificial Sequence
  derived and/or modified CDS sequence (opt1) from neuraminidase__InfluenzaA__AHJ57968
augaaccccaaccagaagaucaucaccgugggcagcgucucccuggccaucgccaccaucugccuccugaugcagaucgcgauccuggccacgaccgugacccuccacuucaagcagaacgagugcaacaucccgagcaagaaccaggugaugcccugcgagcccaucaucaucgagcgcaacaucaccgaggucguguaccugaacaacacgaucaucgagaaggagaucugccccaagguggucgaguaccggaacugguccaagccgcagugccagaucaccggguucgcccccuucagcaaggacaacuccauccgccugagcgccggcggggacaucugggugacccgggagcccuacguguccugcagccccuccaagugcuaccaguucgcccucggccaggggaccacgcuggacaacagccacuccaacggcaccauccacgaccgcaucccgcaccggacccugcucaugaacgagcugggcguccccuuccaccuggggaccaagcaggucugcaucgcguggagcuccagcuccugccacgacggccgcgccuggcuccacgugugcaucacgggggacgaccggaacgccaccgccagcuucaucuacaacggcaugcugguggacuccaucagcuccuggagccgcaacauccugcggacccaggagagcgagugcgugugcaucaacgggaccugcacggugaucaugaccgacggcuccgcgagcggcgucgccgacacccgcauccucuucauccgggaggggaagaucgugcacaucagcccccuguccggcuccgcccagcacaucgaggagugcagcugcuacccccgcuacccggacgugcggugcgucugccgcgacaacuggaagggguccaaccggcccgugaucgacaucaacauggccgacuacagcaucgacuccaacuacgugugcagcggccuggucggcgacacgccccgcaacgacgacaacuccagcuccagcaacugccgggaccccaacaacgagcgcgggaacccgggcgugaaggggugggccuucgacgacggcaacgacguguggauggggcggaccaucaaccgcgacucccggagcggcuacgagaccuuccgcgucaucggcggguggaccaccgcgaacuccaagagccagaucaaccgccaggugaucgucgacaacaacaacugguccggcuacagcgggguguucagcguggagggcaaguccugcaucaaccggugcuucuacgucgagcucauccgcgggcggccccaggagacgcgcgugugguggaccagcaacuccaucguggucuucugcggcaccagcugcaccuacggcacgggguccuggcccgacggcgccaacaucaacuucaugcccaucuga

SEQ ID NO: 88463 - RNA, 1413 nt, Artificial Sequence
  derived and/or modified CDS sequence (opt1) from neuraminidase__InfluenzaA__AHJ57980
augaaccccaaccagaagaacacgugcaucagcgccaucggcaugacccuguccguggucagccuccugaucgggguggccgaccugggccucaacaucgggcugcacuacaagguguccgacagcuccaacaucaacaucccgaacaugaacgagaccaaccccaccaccaccaucaucaacaacaacccccagaacaacuucacgaacaucaccaacaucaucgucaacaagaacgaggaggagaaguuccugaaccucaccaagccccugugcgaggugaacagcuggcacauccuguccaaggacaacgcgauccgcaucggcgaggacgcccacauccucgugacccgggagccguaccugagcugcgacccccaggggugccgcauguucgcccugucccagggcacgacccuccggggccgccacgccaacgggaccauccacgaccggagccccuuccgcgcccugaucuccugggagaugggccaggcgcccagcccguacaacgcccgggucgagugcaucgggugguccagcaccuccugccacgacggcaucagccgcauguccaucugcaucagcgggcccaacaacaacgccuccgccguggugugguacggcggccggcccgucacggagauccccagcugggcggggaacauccugcgcacccaggagagcgagugcgugugccacaagggcaucugcccgguggucaugaccgacgggcccgccaacaaccgggccgccaccaagaucaucuacuucaaggagggcaagauccagaagaucgaggagcucaagggcaacgcccagcacaucgaggagugcuccugcuacggggcggccggcaugaucaagugcaucugccgcgacaacuggaagggggccaaccggcccgugaucacgaucgaccccgagaugaugacccacaccagcaaguaccugugcuccaagauccugaccgacacgagccgcccgaacgaccccaccuccggcaacugcgacgcccccaucaccgggggcagccccgacccgggcgugaagggguucgccuuccucgacggcgagaacuccuggcuggggcggaccaucagcaaggacucccgcagcggcuacgagaugcugaagguccccaacgcggagacggacacccaguccgggcccaucagcuaccagaccaucgugaacaaccagaacugguccggcuacagcggcgccuucaucgacuacugggccaacaaggagugcuucaaccccugcuucuacguggagcucauccgggggcgcccgaaggaguccagcguccuguggaccuccaacagcaucguggcccugugcggcucccgggagcgccucgggagcuggagcuggcacgacggcgccgagaucaucuacuucaaguga

SEQ ID NO: 88464 - RNA, 1410 nt, Artificial Sequence
  derived and/or modified CDS sequence (opt1) from neuraminidase__InfluenzaA__AHJ57992
augaaccccaaccagaagaucaucaccaucggcagcgugucccugaccaucgccacggucagcuuccucaugcagaucgccauccugaccaccaccgugacgcugcacuucaagcacaacgagugcaacaugccgcccaagaaccaggugauguccugcgagcccaucaucaucgagcgcaacaucaccgagaucgucuaccucaacaacaccaccguggagaaggagaucugccccaagguggucgaguaccggaacuggagcaagccgcagugcaagaucacgggguucgcgcccuucuccaaggacaacagcauccgccuguccgccggcggggacaucugggugacccgggagcccuacgugagcugcggccuggggaagugcuaccaguucgcccucggccagggcaccacccuggacaacucccacagcaacgggacgauccacgaccgcaucccccaccggacccugcucaugaacgagcugggcgucccguuccaccuggggaccaagcaggucugcaucgccugguccagcuccagcugccacgacggccgcgccuggcuccacaucugcaucaccggggacgaccggaacgcgacggccuccuucaucuacgacggcaugcugguggacagcaucggcuccuggagcaagaacauccugcgcacccaggaguccgagugcgugugcaucaacgggaccugcgccguggugaugaccgacggcagcgccagcggggucgcggacacgcggauccucuucauccgcgagggcaagaucgugcacaucagcccccuguccggcuccgcccagcacaucgaggagugcagcugcuacccccgguaccccgacgugcgcugcgucugccgggacaacuggaagggguccaaccgcccggugaucaacaucaacauggccgacuacagcaucgacuccaacuacgugugcagcggccuggucggggacacgccccggaacgacgacaacuccagcuccagcaacugccgcgaccccaacaacgagcggggcaaccccggggugaagggcugggccuucgacgacggcaacgacguguggauggggcgcaccaucaaccgggacucccgcagcggcuacgagaccuuccgggucaucgggggcuggaccaccgccaacuccaagagccagaucaaccgccaggugaucgucgacaacaacaacugguccggguacagcggcguguucuccguggagggcaagagcugcaucaaccgcugcuucuacgucgagcucauccgggggcgcccgcaggagccccgggugugguggaccagcaacuccaucguggucuucugcggcaccagcgggacguacggcaccggguccuggcccgacggcgcgaacaucaacuucaugcccaucuga

SEQ ID NO: 88465 - RNA, 1413 nt, Artificial Sequence
  derived and/or modified CDS sequence (opt1) from neuraminidase__InfluenzaA__AHJ58004
augaaccccaaccagaagaucacgugcaucagcgccaccggcgugacgcuguccgucgugagccuccugaucgggaucgccaaccugggccucaacaucgggcugcacuacaagguguccgacagcuccaacaucaacaucccgaacaugaacgagaccaaccccaccaccacgaucaucaacaaccacacccagaacaacuucaagaacaucaccaacaucaucgucaacaagaacgaggagggcaccuuccugaaccucacgaagccccugugcgaggugaacagcuggcacauccuguccaaggacaacgcgauccgcaucggggaggacgcccacauccucgugacccgggagcccuaccugagcugcgacccgcagggcugccgcauguucgcccugucccagggcaccacccuccgggggcgccacgccaacggcacgauccacgaccggagccccuuccgcgcccugaucuccugggagauggggcaggcgcccagccccuacaacgcccgggucgagugcaucggcugguccagcaccuccugccacgacgggaucagccgcauguccaucugcaucagcggcccgaacaacaacgccuccgccguggugugguaccggggccgccccgucaccgagauccccagcugggcggggaacauccugcggacccaggagagcgagugcgugugccacaagggcaucugccccguggucaugacggacgggccggccaacaaccgcgccgccaccaagaucaucuacuucaaggagggcaagauccagaagaucgaggagcucaagggcaacgcccagcacaucgaggagugcuccugcuacggggcggccggcaugaucaagugcaucugccgggacaacuggcgcggggccaaccggcccgugaucaccaucgaccccgagaugaugacccacacgagcaaguaccugugcuccaagauccugaccgacaccagccgccccaacgacccgaccaacggcaacugcgacgagcccaucaccgggggcucccccgaccccggcgugaagggguucgccuuccucgacggcgagaacagcuggcuggggcggaccaucuccaaggacagccgcuccggcuacgagaugcugaaggucccgaacgccgagaccgacacccagagcgggcccacguccuaccagaucaucgugaacaaccagaacuggagcggcuacuccggcgcguucaucgacuacugggccaacaaggagugcuucaaccccugcuucuacguggagcucauccgggggcgccccaaggagagcuccguccuguggaccagcaacuccaucguggcccugugcggcagccgggagcgccucggguccuggagcuggcacgacggcgccgagaucaucuacuucaaguga

SEQ ID NO: 88466 - RNA, 1413 nt, Artificial Sequence
  derived and/or modified CDS sequence (opt1) from neuraminidase__InfluenzaA__AHJ58016
augaaccccaaccagaagaucacgugcaucagcgccaccggcaugacccuguccguggucagcaugcucaucgggaucgccaaccugggccugaacaucgggcuccacuacaagguguccgacagcaccaacaucaacaucccgaagaugaacgagaccaaccccaccacgaccaucaucaacaaccacccccagaacaacuucaccaacaucaccaacaucaucgugaacaagaacgaggaggagaacuuccugaaccugacgaagccccucugcgaggucaacuccuggcacauccugagcaaggacaacgcgauccgcaucggcgagaacgcccacauccuggugacccgggagccguaccucuccugcgacccccaggggugccgcauguucgcccugagccagggcaccacccugcggggccgccacgccaacgggacgauccacgaccggucccccuuccgcgcccucaucagcugggagaugggccaggcgcccuccccguacaacgcccggguggagugcaucggguggagcuccaccagcugccacgacggcaucucccgcaugagcaucugcaucuccgggcccaacaacaacgccagcgccgucgugugguacggcggccggcccgugaccgagauccccuccugggcggggaacauccugcgcacccaggagagcgagugcgucugccacggcgggaucugcccgguggugaugacggacggccccgccaacaaccgggccgagaccaagaucaucuacuucaaggagggcaagauccagaagaucgaggagcugaaggggaacgcccagcacaucgaggagugcagcugcuacggcgccuccgggaugaucaagugcaucugccgcgacaacuggaagggcgcgaaccggcccgucaucaccaucgaccccgagaugaugacccacacgagcaaguaccucugcuccaagauccugaccgacaccagccgcccgaacgaccccaccaacgggaacugcgacgcccccaucacgggcggcucccccgacccgggggugaagggcuucgccuuccuggacgggaagaacagcuggcucggccggaccaucuccaaggacagccgcuccggguacgagaugcugaaggugcccaacgccgagaccgacacccagagcggcgccaucucccaccagaucaucgucaacaaccagaacuggagcggcuacuccggggcguucaucgacuacugggccaacaaggagugcuucaaccccugcuucuacguggagcugauccggggccgccccaaggagagcuccgugcucuggacgagcaacuccaucgucgcccugugcgggagccgggagcgccugggcuccuggagcuggcacgacggggccgagaucaucuaccucaaguga

SEQ ID NO: 88467 - RNA, 1413 nt, Artificial Sequence
  derived and/or modified CDS sequence (opt1) from neuraminidase__InfluenzaA__AHJ58028
augaaccccaaccagaagaucacgugcaucagcgccaccggcaugacccuguccguggucagcaugcucaucgggaucgccaaccugggccugaacaucgggcuccacuacaagguguccgacagcaccaacaucaacaucccgaagaugaacgagaccaaccccaccacgaccaucaucaacaaccacccccagaacaacuucaccaacaucaccaacaucaucgugaacaagaacgaggaggagaacuuccugaaccugacgaagccccucugcgaggucaacuccuggcacauccugagcaaggacaacgcggugcgcaucggcgaggacgcccacauccuggugacccgggagccguaccucuccugcgacccccaggggugccgcauguucgcccugagccagggcaccacccugcggggccgccacgccaacgggacgauccacgaccggucccccuuccgcgcccucaucagcugggagaugggccaggcgcccuccccguacaacacccgggucgagugcaucggguggagcuccaccagcugccacgacggcaucucccgcaugagcaucugcaucuccgggcccaacaacaacgccagcgccguggugugguaccggggccgccccgucaccgagauccccuccugggccggcaacauccugcggacgcaggagagcgagugcgugugccacaaggggaucugcccgguggucaugaccgacggccccgcgaacaaccgcgccgagaccaagaucaucuacuucaaggaggggaagauccagaagaucgaggagcuggagggcaacgcccagcacaucgaggagugcagcugcuacggcaccgccgggaugaucaagugcaucugccgggacaacuggcgcggcgccaaccggcccgugaucacgaucgaccccgagaugaugacccacaccucccgcuaccucugcagcaagauccugaccgacacgucccggccgaacgaccccaccaacgggaacugcgacgcgcccaucaccggcgggagccccgacccgggcgugaagggcuucgccuuccuggacgggaagaacuccuggcucggccgcaccaucagcaaggacucccggagcggguacgagaugcugaagguccccaacgccgagacggacauccaguccggccccaccagcaaccagaucaucgugaacaaccagaacugguccggguacagcggcgccuucaucgacuacugggccaacaaggagugcuucaaccccugcuucuacguggagcugauccgcggccggccgaaggaguccaacguccucuggaccagcaacuccaucguggcgcugugcgggagccgcgagcgccugggcuccuggagcuggcacgacggggccgagaucaucuacuucaaguga

SEQ ID NO: 88468 - RNA, 1410 nt, Artificial Sequence
  derived and/or modified CDS sequence (opt1) from neuraminidase__InfluenzaA__AHJ58040
augaaccccaaccagaagaucaucaccgugggcagcgucucccuggccaucgccaccaucugccuccugaugcagaucgcgauccuggccacgaccgugacccuccacuucaagcagaacgagugcaacaucccgagcaagaaccaggugaugcccugcgagcccaucaucaucgagcgcaacaucaccgaggucguguaccugaacaacacgaucaucgagaaggagaucugccccaagguggucgaguaccggaacugguccaagccgcagugccagaucaccggguucgcccccuucagcaaggacaacuccauccgccugagcgccggcggggacaucugggugacccgggagcccuacguguccugcagccccuccaagugcuaccaguucgcccucggccaggggaccacgcuggacaacagccacuccaacggcaccauccacgaccgcaucccgcaccggacccugcucaugaacgagcugggcguccccuuccaccuggggaccaagcaggucugcaucgcguggagcuccagcuccugccacgacggccgcgccuggcuccacgugugcaucacgggggacgaccggaacgccaccgccagcuucaucuacaacggcaugcugguggacuccaucagcuccuggagccgcaacauccugcggacccaggagagcgagugcgugugcaucaacgggaccugcacggugaucaugaccgacggcuccgcgagcggcgucgccgacacccgcauccucuucauccgggaggggaagaucgugcacgugagcccccuguccggcuccgcccagcacaucgaggagugcagcugcuacccccgcuacccggacguccggugcgugugccgcgacaacuggaagggguccaaccggcccguggucgacaucaacauggccgacuacagcaucgacucccacuacgugugcagcggccuggugggcgacacgccccgcaacgacgacuccagcuccagcuccaacugcaaggaccccaacaacgagcgggggaacccgggcgucaaggggugggccuucgacgacggcaacgacguguggauggggcgcaccaucagccgggacucccgcagcggcuacgagaccuuccgggucaucggcggguggaccaccgcgaacuccaagagccagaucaaccgccaggugaucguggacaacaacaacuggagcggcuacuccggggucuucagcguggagggcaaguccugcaucaaccgcugcuucuacguggagcucauccgggggcgcccccaggagacgcgggucugguggaccagcaacuccaucgugguguucugcggcaccagcggcaccuacgggacgggcuccuggcccgacggggccaacaucaacuucaugcccaucuga

SEQ ID NO: 88469 - RNA, 1410 nt, Artificial Sequence
  derived and/or modified CDS sequence (opt1) from neuraminidase__InfluenzaA__AHJ58052
augaaccccaaccagaagaucaucaccaucggcagcgugucccugaccaucgccacggucagcuuccucaugcagaucgccauccugaccaccaccgugacgcugcacuucaagcacaacgagugcaacaugccgcccaagaaccaggugauguccugcgagcccaucaucaucgagcgcaacaucaccgagaucgucuaccucaacaacaccaccguggagaaggagaucugccccaagguggucgaguaccggaacuggagcaagccgcagugcaagaucacgggguucgcgcccuucuccaaggacaacagcauccgccuguccgccggcggggacaucugggugacccgggagcccuacgugagcugcggccuggggaagugcuaccaguucgcccucggccagggcaccacccuggacaacucccacagcaacgggacgauccacgaccgcaucccccaccggacccugcucaugaacgagcugggcgucccguuccaccuggggaccaagcaggucugcaucgccugguccagcuccagcugccacgacggccgcgccuggcuccacaucugcaucaccggggacgaccggaacgcgacggccuccuucaucuacgacggcaugcugguggacagcaucggcuccuggagcaagaacauccugcgcacccaggaguccgagugcgugugcaucaacgggaccugcgccguggugaugaccgacggcagcgccagcggggucgcggacacgcggauccucuucauccgcgagggcaagaucgugcacaucagcccccuguccggcuccgcccagcacaucgaggagugcagcugcuacccccgguaccccgacgugcgcugcgucugccgggacaacuggaagggguccaaccgcccggugaucgacaucaacauggccgacuacagcaucgacuccaacuacgugugcagcggccuggucggggacacgccccggaacgacgacaacuccagcuccagcaacugccgcgaccccaacaacgagcggggcaaccccggggugaagggcugggccuucgacgacggcaacgacguguggauggggcgcaccaucaaccgggacucccgcagcggcuacgagaccuuccgggucaucgggggcuggaccaccgccaacuccaagagccagaucaaccgccaggugaucgucgacaacaacaacugguccggguacagcggcguguucuccguggagggcaagagcugcaucaaccgcugcuucuacgucgagcucauccgggggcgcccgcaggagccccgggugugguggaccagcaacuccaucguggucuucugcggcaccagcgggacguacggcaccggguccuggcccgacggcgcgaacaucaacuucaugcccaucuga

SEQ ID NO: 88470 - RNA, 1413 nt, Artificial Sequence
  derived and/or modified CDS sequence (opt1) from neuraminidase__InfluenzaA__AHJ58064
augaaccccaaccagaagaucacgugcaucagcgccaccggcaugacccuguccguggucagccuccugaucgggaucgccaaccugggccucaacaucgggcugcacuacaagguguccgacagcaccaacaucaacaucccgaacaugaacgagaccucccccaccacgaccaucaucaacaaccacccccagaacaacuucaccaacaucaccaacaucaucgugaacaagaacgaggaggagaacuuccugaaccucacgaagccccugugcgaggucaacagcuggcacauccuguccaaggacaacgcgauccgcaucggcgagaacgcccacauccucgugacccgggagccguaccugagcugcgacccccaggggugccgcauguucgcccugucccagggcaccacccuccggggccagcacgccaacgggacgauccacgaccgcagccccuuccgggcccugaucuccugggagaugggccaggcgcccagcccguacaacgcccgcguggagugcaucgggugguccagcaccuccugccacgacggcaucagccggauguccaucugcaucagcgggcccaacaacaacgccuccgccgucgugugguacggcggccgccccgugaccgagauccccagcugggcggggaacauccugcggacccaggagagcgagugcgucugccacggcgggaucugcccgguggugaugacggacggccccgccaacaaccgcgccgagaccaagaucaucuacuucaaggagggcaagauccagaagaucgaggagcucaaggggaacgcccagcacaucgaggagugcuccugcuacggcgccagcgggaugaucaagugcaucugccgggacaacuggaagggcgcgaaccgccccgucaucaccaucgaccccgagaugaugacccacacguccaaguaccugugcagcaagauccugaccgacaccucccggccgaacgaccccaucaacgggaacugcgacgcccccaucaccggcggcagccccgacccgggggugaagggcuucgccuuccucgacggggagaacuccuggcugggccgcacgaucagcaaggacucccggagcggguacgagaugcugaaggugcccaacgccgagaccgacacccaguccggcgccaucagccaccagaugaucgucaacaaccagaacugguccggcuacagcggggcguucaucgacuacugggccaacaaggagugcuucaaccccugcuucuacguggagcucauccgcggccggcccaaggaguccagcgugcuguggaccuccaacagcaucgucgcccugugcgggucccgcgagcggcucggcagcuggagcuggcacgacggggccgagaucaucuacuucaaguga

SEQ ID NO: 88471 - RNA, 1401 nt, Artificial Sequence
  derived and/or modified CDS sequence (opt1) from neuraminidase__InfluenzaA__AHJ58075
augaaccccaaccagaagaucaucgccaucggcagcgugucccugaccaucgccaucaucugcuuccuccugcagaucgcgauccugaccacgaccaugacccuccacuuccgccagaacgagugcagcaacccguccaacaaccaggucgugcccugcgagcccaucaucaucgagcggaacaccgugcaccugaacagcacgaccaucgagaaggagaucugccccaaggucgccgaguacaagaacugguccaagccgcagugccagaucaccggguucgcccccuucagcaaggacaacuccauccgccugagcgccggcggggacaucugggugacccgggagcccuacguguccugcagccucggcaagugcuaccaguucgcccuggggcagggcacgacccugaagaacaagcacuccaacggcaccacccacgaccgcaucccccaccggacgcuccugaugaacgagcugggggucccguuccaccucggcaccaagcaggucugcaucgcguggagcuccagcuccugccacgacgggaaggccuggcugcacaucugcgugaccggcgacgacaagaacgccaccgccagcaucaucuacgacgggaugcugguggacuccaucggcagcugguccaagaacauccuccgcacgcaggagagcgagugcgugugcaucaacgggaccugcgcgguggucaugaccgacgggagcgccuccggcaaggccgacacccggauccuguucauccgcgaggggaagaucaucaacaucagcccccuguccggcagcgcccagcacguggaggagugcuccugcuacccccgguaccccgaggugcgcugcgucugccgggacaacuggaagggcagcaaccgcccggugcucuacaucaacauggccgacuacuccaucgagagcuccuacgugugcagcgggcuggucggcgacacgccccgggacgacgacuccagcuccagcuccaacugccgcgaccccaacaacgagcggggcgcgcccggcgugaaggggugggccuucgacgacggcaacgacaucuggaugggccgcaccaucaagagcgacucccggagcggguacgagaccuuccgcguggucaacggcuggaccacggccaacuccaagagccagaucaaccgccaggugaucguggacagcgacuccuggagcggguacuccggcaucuucagcgucgaggggaagaacugcaucaaccggugcuucuacguggagcugauccggggccgcccgcaggagacccgcgucugguggaccuccaacagcaucaucguguucugcggcaccuccgggacguacggcaccgggagcuggcccgacggcgccaacaucaacuucaugcccaucuga

SEQ ID NO: 88472 - RNA, 1413 nt, Artificial Sequence
  derived and/or modified CDS sequence (opt1) from neuraminidase__InfluenzaA__AHJ58087
augaaccccaaccagaagaucacgugcaucagcgccaccggcaugacccuguccguggucagccuccugaucgggaucgccaaccugggccucaacaucgggcugcacuacaagguguccgacagcaccaacaucaacaucccgaacaugaacgagaccucccccaccacgaccaucaucaacaaccacccccagaacaacuucaccaacaucaccaacaucaucgugaacaagaacgaggaggagaacuuccugaaccucacgaagccccugugcgaggucaacagcuggcacauccuguccaaggacaacgcgauccgcaucggcgagaacgcccacauccucgugacccgggagccguaccugagcugcgacccccaggggugccgcauguucgcccugucccagggcaccacccuccggggccagcacgccaacgggacgauccacgaccgcagccccuuccgggcccugaucuccugggagaugggccaggcgcccagcccguacaacgcccgcguggagugcaucgggugguccagcaccuccugccacgacggcaucagccggauguccaucugcaucagcgggcccaacaacaacgccuccgccgucgugugguacggcggccgccccgugaccgagauccccagcugggcggggaacauccugcggacccaggagagcgagugcgucugccacggcgggaucugcccgguggugaugacggacggccccgccaacaaccgcgccgagaccaagaucaucuacuucaaggagggcaagauccagaagaucgaggagcucaaggggaacgcccagcacaucgaggagugcuccugcuacggcgccagcgggaugaucaagugcaucugccgggacaacuggaagggcgcgaaccgccccgucaucaccaucgaccccgagaugaugacccacacguccaaguaccugugcagcaagauccugaccgacaccucccggccgaacgaccccaucaacgggaacugcgacgcccccaucaccggcggcagccccgacccgggggugaagggcuucgccuuccucgacggggacaacuccuggcugggccgcacgaucagcaaggacucccggagcggguacgagaugcugaaggugcccaacgccgagaccgacacccaguccggcgccaucagccaccagaugaucgucaacaaccagaacugguccggcuacagcggggcguucaucgacuacugggccaacaaggagugcuucaaccccugcuucuacguggagcucauccgcggccggcccaaggaguccagcgugcuguggaccuccaacagcaucgucgcccugugcgggucccgcgagcggcucggcagcuggagcuggcacgacggggccgagaucaucuacuucaaguga

SEQ ID NO: 88473 - RNA, 1410 nt, Artificial Sequence
  derived and/or modified CDS sequence (opt1) from neuraminidase__InfluenzaA__AHL80721
augaaccccaaccagaagaucaucaccaucggcagcgugugcaugaccaucgggauggccaaccugauccuccagaucggcaacaucaucuccaucuggaucagccacuccauccagcuggggaaccagaaccagaucgagacgugcaaccagagcgucaucaccuacgagaacaacaccugggugaaccagaccuacgugaacaucuccaacacgaacuucgccgcgggccagagcgucguguccgugaagcuggccgggaacagcucccucugcccggucagcggcugggccaucuacuccaaggacaacagcauccgcaucggcuccaagggggacguguucgugauccgggagcccuucaucagcugcagcccccuggagugccgcaccuucuuccugacccagggcgcccuccugaacgacaagcacuccaacgggaccaucaaggaccggucccccuaccgcacgcugaugagcugcccgaucggcgagguccccucccccuacaacagccgguucgagagcguggccugguccgcgagcgccugccacgacgggaucaacuggcucaccaucggcaucuccggccccgacaacggggccguggccguccugaaguacaacggcaucaucaccgacaccaucaagagcuggcgcaacaacauccugcggacgcaggaguccgagugcgcgugcgugaacgggagcugcuucaccgugaugaccgacggcccguccgacggccaggccagcuacaagaucuuccgcaucgagaaggggaagaucgucaaguccguggagaugaacgcccccaacuaccacuacgaggagugcagcugcuaccccgacuccagcgagaucacgugcgugugccgggacaacuggcacggcuccaaccgccccugggucagcuucaaccagaaccucgaguaccagaucggguacaucugcuccggcaucuucggggacaacccgcggcccaacgacaagaccggcagcugcggccccguguccagcaacggggccaacggcgugaagggguucuccuucaaguacggcaacggggucuggaucggccgcaccaagagcaucagcucccggaagggcuucgagaugaucugggaccccaacggguggaccggcaccgacaacaacuucagcaucaagcaggacgugguggggaucaacgagugguccggcuacagcggguccuucguccagcacccggagcugacgggccuggacugcauccgccccugcuucuggguggagcucauccggggccgccccaaggagaacaccaucuggaccagcggguccagcaucuccuucugcggcgucaacagcgacaccguggggugguccuggcccgacggcgccgagcugccguucacgaucgacaaguga

SEQ ID NO: 88474 - RNA, 1410 nt, Artificial Sequence
  derived and/or modified CDS sequence (opt1) from neuraminidase__InfluenzaA__AHL80732
augaaccccaaccagaagaucaucaccaucggcagcgugugcaugaccaucgggauggccaaccugauccuccagaucggcaacaucaucuccaucuggaucagccacuccauccagcuggggaaccagaaccagaucgagacgugcaaccagagcgucaucaccuacgagaacaacaccugggugaaccagaccuacgugaacaucuccaacacgaacuucgccgcgggccagagcgucguguccgugaagcuggccgggaacagcucccucugcccggucagcggcugggccaucuacuccaaggacaacagcauccgcaucggcuccaagggggacguguucgugauccgggagcccuucaucagcugcagcccccuggagugccgcaccuucuuccugacccagggcgcccuccugaacgacaagcacuccaacgggaccaucaaggaccggucccccuaccgcacgcugaugagcugcccgaucggcgagguccccucccccuacaacagccgguucgagagcguggccugguccgcgagcgccugccacgacgggaucaacuggcucaccaucggcaucuccggccccgacaacggggccguggccguccugaaguacaacggcaucaucaccgacaccaucaagagcuggcgcaacaacauccugcggacgcaggaguccgagugcgcgugcgugaacgggagcugcuucaccgugaugaccgacggcccguccgacggccaggccagcuacaagaucuuccgcaucgagaaggggaagaucgucaaguccguggagaugaacgcccccaacuacuacuacgaggagugcagcugcuaccccgacuccagcgagaucacgugcgugugccgggacaacuggcacggcuccaaccgccccugggucagcuucaaccagaaccucgaguaccagaucggguacaucugcuccggcaucuucggggacaacccgcggcccaacgacaagaccggcagcugcggccccguguccagcaacggggccaacggcgugaagggguucuccuucaaguacggcaacggggucuggaucggccgcaccaagagcaucagcucccggaacggcuucgagaugaucugggaccccaacggguggaccggcaccgacaacaacuucagcaucaagcaggacaucguggggaucaacgagugguccggcuacagcggguccuucgugcagcacccggagcugacgggccuggacugcauccgccccugcuucugggucgagcucauccggggccgccccaaggagaacaccaucuggaccagcggguccagcaucuccuucugcggcgugaacagcgacaccgucgggugguccuggcccgacggcgccgagcugccguucaucaucgacaaguga

SEQ ID NO: 88475 - RNA, 1410 nt, Artificial Sequence; identical to SEQ ID NO: 80762
  derived and/or modified CDS sequence (opt1) from neuraminidase__InfluenzaA__AHL80743

SEQ ID NO: 88476 - RNA, 1410 nt, Artificial Sequence
  derived and/or modified CDS sequence (opt1) from neuraminidase__InfluenzaA__AHL80754
augaaccccaaccagaagaucaucaccaucggcagcgugugcaugaccaucgggauggccaaccugauccuccagaucggcaacaucaucuccaucuggaucagccacuccauccagcuggggaaccagaaccagaucgagacgugcaaccagagcgucaucaccuacgagaacaacaccugggugaaccagaccuacgugaacaucuccaacacgaacuucgccgcgggccagagcgucguguccgugaagcuggccgggaacagcucccucugcccggucagcggcugggccaucuacuccaaggacaacagcauccgcaucggcuccaagggggacguguucgugauccgggagcccuucaucagcugcagcccccuggagugccgcaccuucuuccugacccagggcgcccuccugaacgacaagcacuccaacgggaccaucaaggaccggucccccuaccgcacgcugaugagcugcccgaucggcgagguccccucccccuacaacagccgguucgagagcguggccugguccgcgagcgccugccacgacgggaucaacuggcucaccaucggcaucuccggccccgacaacggggccguggccguccugaaguacaacggcaucaucaccgacaccaucaagagcuggcgcaacaacauccugcggacgcaggaguccgagugcgugugcgugaacgggagcugcuucaccgucaugaccgacggcccguccgacggccaggcgagcuacaagaucuuccgcaucgagaaggggaagaucgugaaguccguggagaugaacgcccccaacuaccacuacgaggagugcagcugcuaccccgacuccagcgagaucacgugcgucugccgggacaacuggcacggcuccaaccgccccugggugagcuucaaccagaaccucgaguaccagaucggguacaucugcuccggcaucuucggggacaacccgcggcccaacgacaagaccggcagcugcggccccguguccagcaacggggccaacggcgucaagggguucuccuucaaguacggcaacgggguguggaucggccgcaccaagagcaucagcucccggaacggcuucgagaugaucugggaccccaacggguggaccggcaccgacaacaacuucagcaucaagcaggacaucguggggaucaacgagugguccggcuacagcggguccuucguccagcacccggagcugacgggccuggacugcauccgccccugcuucuggguggagcucauccggggccgccccaaggagaacaccaucuggaccagcggguccagcaucuccuucugcggcgucaacagcgacaccguggggugguccuggcccgacggcgccgagcugccguucacgaucgacaaguga

SEQ ID NO: 88477 - RNA, 1410 nt, Artificial Sequence; identical to SEQ ID NO: 80762
  derived and/or modified CDS sequence (opt1) from neuraminidase__InfluenzaA__AHL80765

SEQ ID NO: 88478 - RNA, 1410 nt, Artificial Sequence; identical to SEQ ID NO: 80762
  derived and/or modified CDS sequence (opt1) from neuraminidase__InfluenzaA__AHL80776

SEQ ID NO: 88479 - RNA, 1410 nt, Artificial Sequence; identical to SEQ ID NO: 80762
  derived and/or modified CDS sequence (opt1) from neuraminidase__InfluenzaA__AHL80787

SEQ ID NO: 88480 - RNA, 1410 nt, Artificial Sequence
  derived and/or modified CDS sequence (opt1) from neuraminidase__InfluenzaA__AHL80798
augaaccccaaccagaagaucaucaccaucggcagcgugugcaugaccaucgggauggccaaccugauccuccagaucggcaacaucaucuccaucuggaucagccacuccauccagcuggggaaccagaaccagaucgagacgugcaaccagagcgucaucaccuacgagaacaacaccugggugaaccagaccuacgugaacaucuccaacacgaacuucgccgcgggccagagcgucguguccgugaagcuggccgggaacagcucccucugcccggucagcggcugggccaucuacuccaaggacaacagcauccgcaucggcuccaagggggacguguucgugauccgggagcccuucaucagcugcagcccccuggagugccgcaccuucuuccugacccagggcgcccuccugaacgacaagcacuccaacgggaccaucaaggaccggucccccuaccgcacgcugaugagcugcccgaucggcgagguccccucccccuacaacagccgguucgagagcguggccugguccgcgagcgccugccacgacgggaucaacuggcucaccaucggcaucuccggccccgacaacggggccguggccguccugaaguacaacggcaucaucaccgacaccaucaagagcuggcgcaacaacauccugcggacgcaggaguccgagugcgcgugcgugaacgggagcugcuucaccgugaugaccgacggcccguccgacggccaggccagcuacaagaucuuccgcaucgagaaggggaagaucgucaaguccguggagaugaacgcccccaacuaccacuacgaggagugcagcugcuaccccgacuccagcgagaucacgugcgugugccgggacaacuggcacggcuccaaccgccccugggucagcuucaaccagaaccucgaguaccagaucggguacaucugcuccggcaucuucggggacaacccgcggcccaacgacaagaagggcagcugcggccccguguccagcaacggggccaacggcgugaagggguucuccuucaaguacggcaacggggucuggaucggccgcaccaagagcaucagcucccggaacggcuucgagaugaucugggaccccaacggguggaccggcaccgacaacaacuucagcgugaagcaggacaucguggggaucaacgagugguccggcuacagcggguccuucguccagcacccggagcugaccggccuggacugcauccgccccugcuucuggguggagcucauccggggccgccccaaggagaacacgaucuggaccagcggguccagcaucuccuucugcggcgucaacagcgacaccguggggugguccuggcccgacggcgccgagcugccguucaccaucgacaaguga

SEQ ID NO: 88481 - RNA, 1410 nt, Artificial Sequence; identical to SEQ ID NO: 80762
  derived and/or modified CDS sequence (opt1) from neuraminidase__InfluenzaA__AHL80809

SEQ ID NO: 88482 - RNA, 1410 nt, Artificial Sequence; identical to SEQ ID NO: 80762
  derived and/or modified CDS sequence (opt1) from neuraminidase__InfluenzaA__AHL80820

SEQ ID NO: 88483 - RNA, 1410 nt, Artificial Sequence; identical to SEQ ID NO: 80762
  derived and/or modified CDS sequence (opt1) from neuraminidase__InfluenzaA__AHL80831

SEQ ID NO: 88484 - RNA, 1410 nt, Artificial Sequence; identical to SEQ ID NO: 80762
  derived and/or modified CDS sequence (opt1) from neuraminidase__InfluenzaA__AHL80842

SEQ ID NO: 88485 - RNA, 1410 nt, Artificial Sequence; identical to SEQ ID NO: 82050
  derived and/or modified CDS sequence (opt1) from neuraminidase__InfluenzaA__AHL80853

SEQ ID NO: 88486 - RNA, 1410 nt, Artificial Sequence
  derived and/or modified CDS sequence (opt1) from neuraminidase__InfluenzaA__AHL80864
augaaccccaaccagaagaucaucaccaucggcagcgugugcaugaccaucgggauggccaaccugauccuccagaucggcaacaucaucuccaucuggaucagccacuccauccagcuggggaaccagaaccagaucgagacgugcaaccagagcgucaucaccuacgagaacaacaccugggugaaccagaccuacgugaacaucuccaacacgaacuucgccgcgggccagagcgucguguccgugaagcuggccgggaacagcucccucugcccggucagcggcugggccaucuacuccaaggacaacagcauccgcaucggcuccaagggggacguguucgugauccgggagcccuucaucagcugcagcccccuggagugccgcaccuucuuccugacccagggcgcccuccugaacgacaagcacuccaacgggaccaucaaggaccggucccccuaccgcacgcugaugagcugcccgaucggcgagguccccucccccuacaacagccgguucgagagcguggccugguccgcgagcgccugccacgacgggaucaacuggcucaccaucggcaucuccggccccgacaacggggccguggccguccugaaguacaacggcaucaucaccgacaccaucaagagcuggcgcaacaacauccugcggacgcaggaguccgagugcgcgugcgugaacgggagcugcuucaccgugaugaccgacggcccguccgacggccaggccagcuacaagaucuuccgcaucgagaaggggaagaucgucaaguccguggagaugaacgcccccaacuacuacuacgaggagugcagcugcuaccccgacuccagcgagaucacgugcgugugccgggacaacuggcacggcuccaaccgccccugggucagcuucaaccagaaccucgaguaccagaucggguacaucugcuccggcaucuucggggacaacccgcggcccaacgacaagaagggcagcugcggccccguguccagcaacggggccaacggcgugaagggguucuccuucaaguacggcaacggggucuggaucggccgcaccaagagcaucagcucccggaacggcuucgagaugaucugggaccccaacggguggaccggcaccgacaacaacuucagcaucaagcaggacaucguggggaucaacgagugguccggcuacagcggguccuucgugcagcacccggagcugaccggccuggacugcauccgccccugcuucugggucgagcucauccggggccgccccaaggagaacacgaucuggaccagcggguccagcaucuccuucugcggcgugaacagcgacaccgucgggugguccuggcccgacggcgccgagcugccguucaccaucgacaaguga

SEQ ID NO: 88487 - RNA, 1410 nt, Artificial Sequence; identical to SEQ ID NO: 82050
  derived and/or modified CDS sequence (opt1) from neuraminidase__InfluenzaA__AHL80875

SEQ ID NO: 88488 - RNA, 1410 nt, Artificial Sequence; identical to SEQ ID NO: 82050
  derived and/or modified CDS sequence (opt1) from neuraminidase__InfluenzaA__AHL80886

SEQ ID NO: 88489 - RNA, 1410 nt, Artificial Sequence
  derived and/or modified CDS sequence (opt1) from neuraminidase__InfluenzaA__AHL80897
augaaccccaaccagaagaucaucaccaucggcagcgugugcaugaccaucgggauggccaaccugauccuccagaucggcaacaucaucuccaucuggaucagccacuccauccagcuggggaaccagaaccagaucgagacgugcaaccagagcgucaucaccuacgagaacaacaccugggugaaccagaccuacgugaacaucuccaacacgaacuucgccgcgggccagagcgucguguccgugaagcuggccgggaacagcucccucugcccggucagcggcugggccaucuacuccaaggacaacagcauccgcaucggcuccaagggggacguguucgugauccgggagcccuucaucagcugcagcccccuggagugccgcaccuucuuccugacccagggcgcccuccugaacgacaagcacuccaacgggaccaucaaggaccggucccccuaccgcacgcugaugagcugcccgaucggcgagguccccucccccuacaacagccgguucgagagcguggccugguccgcgagcgccugccacgacgggaucaacuggcucaccaucggcaucuccggccccgacaacggggccguggccguccugaaguacaacggcaucaucaccgacaccaucaagagcuggcgcaacaacauccugcggacgcaggaguccgagugcgcgugcaucaacgggagcugcuucaccgugaugaccgacggcccguccgacggccaggccagcuacaagaucuuccgcaucgagaaggggaagaucgugaaguccgucgagaugaacgcccccaacuaccacuacgaggagugcagcugcuaccccgacuccagcgagaucacgugcgugugccgggacaacuggcacggcuccaaccgccccugggugagcuucaaccagaaccucgaguaccagaucggguacaucugcuccggcaucuucggggacaacccgcggcccaacgacaagaagggcagcugcggccccgucuccagcaacggggccaacggcgugaagggguucuccuucaaguacggcaacgggguguggaucggccgcaccaagagcaucagcucccggaacggcuucgagaugaucugggaccccaacggguggaccggcaccgacaacaacuucagcaucaagcaggacaucgucgggaucaacgagugguccggcuacagcggguccuucgugcagcacccggagcugaccggccuggacugcauccgccccugcuucuggguggagcucauccggggccgccccaaggagaacacgaucuggaccagcggguccagcaucuccuucugcggcgucaacagcgacaccguggggugguccuggcccgacggcgccgagcugccguucaccaucgacaaguga

SEQ ID NO: 88490 - RNA, 1410 nt, Artificial Sequence
  derived and/or modified CDS sequence (opt1) from neuraminidase__InfluenzaA__AHL80908
augaaccccaaccagaagaucaucaccaucggcagcgugugcaugaccaucgggauggccaaccugauccuccagaucggcaacaucaucuccaucuggaucagccacuccauccagcuggggaaccagaaccagaucgagacgugcaaccagagcgucaccauccacgagaacaacaccugggugaaccagaccuacgugaacaucuccaacacgaacuucgccgcgggccagagcgucguguccgugaagcuggccgggaacagcucccucugcccggucagcggcugggccaucuacuccaaggacaacagcauccgcaucggcuccaagggggacguguucgugauccgggagcccuucaucagcugcagcccccuggagugccgcaccuucuuccugacccagggcgcccuccugaacgacaagcacuccaacgggaccaucaaggaccggucccccuaccgcacgcugaugagcugcccgaucggcgagguccccucccccuacaacagccgguucgagagcguggccugguccgcgagcgccugccacgacgggaucaacuggcucaccaucggcaucuccggccccgacaacggggccguggccguccugaaguacaacggcaucaucaccgacaccaucaagagcuggcgcaacaacauccugcggacgcaggaguccgagugcgcgugcgugaacgggagcugcuucaccgugaugaccgacggcccguccgacggccaggccagcuacaagaucuuccgcaucgagaaggggaagaucgucaaguccguggagaugaacgcccccaacuacuacuacgaggagugcagcugcuaccccgacuccagcgagaucacgugcgugugccgggacaacuggcacggcuccaaccgccccugggucagcuucaaccagaaccucgaguaccagaucggguacaucugcuccggcaucuucggggacaacccgcggcccaacgacaagaagggcagcugcggccccguguccagcaacggggccaacggcgugaagggguucuccuucaaguacggcaacggggucuggaucggccgcaccaagagcaucagcucccggaacggcuucgagaugaucugggaccccaacggguggaccggcaccgacaacaacuucagcaucaagcaggacaucguggggaucaacgagugguccggcuacagcggguccuucgugcagcacccggagcugaccggccuggacugcauccgccccugcuucugggucgagcucauccggggccgccccaaggagaacacgaucuggaccagcggguccagcaucuccuucugcggcgugaacagcgacaccgucgggugguccuggcccgacggcgccgagcugccguucaccaucgacaaguga

SEQ ID NO: 88491 - RNA, 1410 nt, Artificial Sequence
  derived and/or modified CDS sequence (opt1) from neuraminidase__InfluenzaA__AHL80919
augaaccccaaccagaagaucaucaccaucggcagcgugugcaugaccaucgggauggccaaccugauccuccagaucggcaacaucaucuccaucuggaucagccacuccauccagcuggggaaccagagccagaucgagacgugcaaccaguccgucaucaccuacgagaacaacaccugggugaaccagaccuacgugaacaucagcaacacgaacuucgccgcgggccaguccgucgugagcgugaagcuggccgggaacuccagccucugcccggucuccggcugggccaucuacagcaaggacaacuccauccgcaucggcagcaagggggacguguucgugauccgggagcccuucaucuccugcagcccccuggagugccgcaccuucuuccugacccagggcgcccuccugaacgacaagcacuccaacgggaccaucaaggaccggagccccuaccgcacgcugauguccugcccgaccggcgagguccccagccccuacaacagccgguucgaguccguggccuggagcgcguccgccugccacgacgggaucaacuggcucaccaucggcaucagcggccccgacaacggggccguggccguccugaaguacaacggcaucaucaccgacacgaucaaguccuggcgcaacaacauccugcggacccaggagagcgagugcgcgugcgugaacggguccugcuucaccaucaugaccgacggcccgagcgacggccaggccuccuacaagaucuuccgcaucgagaaggggaagaucgucaagagcguggagaugaacgcccccaacuaccacuacgaggagugcuccugcuaccccgacagcuccgagaucacgugcgugugccgggacaacuggcacggcagcaaccgccccuggguguccuucaaccagaaccucgaguaccagaucggguacaucugcagcggcaucuucggggacaacccgcggcccaacgacaagaccggcuccugcggccccgucagcuccaacggggccaacggcgugaagggguucagcuucaaguacggcaacgggguguggaucggccgcaccaagagcaucuccagccggaagggcuucgagaugaucugggaccccaacggguggaccggcacggacaacaacuucuccaucaagcaggacaucgucgggaucaacgaguggagcggcuacuccgggagcuucgugcagcacccggagcugaccggccuggacugcauccgccccugcuucuggguggagcucauccggggccgccccaaggagaacaccaucuggaccuccgggagcuccaucagcuucugcggcgucaacuccgacacggugggguggagcuggcccgacggcgccgagcugccguucaccaucgacaaguga

SEQ ID NO: 88492 - RNA, 1410 nt, Artificial Sequence; identical to SEQ ID NO: 83542
  derived and/or modified CDS sequence (opt1) from neuraminidase__InfluenzaA__AHL80930

SEQ ID NO: 88493 - RNA, 1410 nt, Artificial Sequence; identical to SEQ ID NO: 83542
  derived and/or modified CDS sequence (opt1) from neuraminidase__InfluenzaA__AHL80949

SEQ ID NO: 88494 - RNA, 1410 nt, Artificial Sequence
  derived and/or modified CDS sequence (opt1) from neuraminidase__InfluenzaA__AHL80961
augaaccccaaccagaagaucaucaccaucggcagcgugugcaugaccaucgggauggccaaccugauccuccagaucggcaacaucaucuccaucuggaucagccacuccauccagcuggggaaccagaaccagaucgagacgugcaaccagagcgucaucaccuacgagaacaacaccugggugaaccagaccuacgugaacaucuccaacacgaacuucgccgcgggccagagcgucguguccgugaagcuggccgggaacagcucccucugcccggucagcggcugggccaucuacuccaaggacaacagcauccgcaucggcuccaagggggacguguucgugauccgggagcccuucaucagcugcagcccccuggagugccgcaccuucuuccugacccagggcgcccuccugaacgacaagcacuccaacgggaccaucaaggaccggucccccuaccgcacgcugaugagcugcccgaucggcgagguccccucccccuacaacagccgguucgagagcguggccugguccgcgagcgccugccacgacgggaucaacuggcucaccaucggcaucuccggccccgacaacggggccguggccguccugaaguacaacggcaucaucaccgacaccaucaagagcuggcgcaacaacauccugcggacgcaggaguccgagugcgcgugcgugaacgggagcugcuucaccaucaugaccgacggcccguccgacggccaggccagcuacaagaucuuccgcaucgagaaggggaagaucgugaaguccgucgagaugaacgcccccaacuaccacuacgaggagugcagcugcuaccccgacuccagcgagaucacgugcgugugccgggacaacuggcacggcuccaaccgccccugggugagcuucaaccagaaccucgaguaccagaucggguacaucugcuccggcaucuucggggacaacccgcggcccaacgacaagaccggcagcugcggccccgucuccagcaacggggccaacggcgugaagggguucuccuucaaguacggcaacgggguguggaucggccgcaccaagagcaucagcucccggaagggcuucgagaugaucugggaccccaacggguggaccggcaccgacaacaacuucagcaucaagcaggacgucguggggaucaacgagugguccggcuacagcggguccuucgugcagcacccggagcugacgggccuggacugcauccgccccugcuucugggucgagcucauccggggccgccccaaggagaacaccaucuggaccagcggguccagcaucuccuucugcggcgugaacagcgacaccgucgggugguccuggcccgacggcgccgagcugccguucacgaucgacaaguga

SEQ ID NO: 88495 - RNA, 1410 nt, Artificial Sequence; identical to SEQ ID NO: 88494
  derived and/or modified CDS sequence (opt1) from neuraminidase__InfluenzaA__AHL80972

SEQ ID NO: 88496 - RNA, 1410 nt, Artificial Sequence; identical to SEQ ID NO: 83542
  derived and/or modified CDS sequence (opt1) from neuraminidase__InfluenzaA__AHL80983

SEQ ID NO: 88497 - RNA, 1410 nt, Artificial Sequence; identical to SEQ ID NO: 83542
  derived and/or modified CDS sequence (opt1) from neuraminidase__InfluenzaA__AHL80992

SEQ ID NO: 88498 - RNA, 1410 nt, Artificial Sequence; identical to SEQ ID NO: 83542
  derived and/or modified CDS sequence (opt1) from neuraminidase__InfluenzaA__AHL81004

SEQ ID NO: 88499 - RNA, 1410 nt, Artificial Sequence
  derived and/or modified CDS sequence (opt1) from neuraminidase__InfluenzaA__AHL81016
augaaccccaaccagaagaucaucaccaucggcagcgugucccugaccaucagcacgaucugcuucuucaugcagaucgccauccucaucaccaccgucacccugcacuucaagcaguacgaguucaacuccccgcccaacaaccaggugaugcugugcgagcccacgaucaucgagcgcaacaucaccgagaucguguaccucaccaacaccacgaucgagaaggagaucugccccaagcuggccgaguaccggaacuggagcaagccgcagugcgacaucaccggguucgcgcccuucuccaaggacaacagcauccgccuguccgccggcggggacaucugggucacccgggagcccuacgugagcugcgacuccgacaagugcuaccaguucgcccucggccaggggaccacgcugaacaacgugcacagcaacaacaccguccgcgaccggacccccuaccgcacccugcucaugaacgagcugggcgugccguuccaccugggcacgaagcaggucugcaucgccugguccagcuccagcugccacgacgggaaggccuggcuccacgugugcaucaccggcgacgacaagaacgcgaccgccuccuucaucuacaacgggcggcugguggacagcguggucuccuggagcaaggagauccugcgcacccaggaguccgagugcgugugcaucaacggcacgugcaccguggucaugaccgacgggagcgccagcggcaaggccgacaccaagauccucuucaucgaggagggcaagaucgugcacacguccacccugagcggguccgcgcagcacguggaggagugcagcugcuacccccgguaccccggcguccgcugcgugugccgggacaacuggaagggguccaaccgccccaucguggacaucaacaucaaggaccacagcaucgucuccagcuacgugugcuccggccuggugggcgacaccccgcggaagaacgacagcuccagcuccagccacugccucgaccccaacaacgaggagggcgggcacggggucaagggcugggccuucgacgacgggaacgacguguggaugggccgcaccaucaacgagacgucccggcugggcuacgagaccuucaaggucaucgagggguggagcaaccccaaguccaagcugcagaucaaccgccaggugaucguggaccggggcaaccgcagcggguacuccggcaucuucagcgucgagggcaagagcugcaucaaccggugcuucuacguggagcucauccgcgggcggaaggaggagaccgaggugcuguggaccuccaacagcaucgucguguucugcggcacguccgggaccuacggcaccgggagcuggcccgacggcgccgaccugaaccucaugccgaucuga

SEQ ID NO: 88500 - RNA, 1410 nt, Artificial Sequence; identical to SEQ ID NO: 83542
  derived and/or modified CDS sequence (opt1) from neuraminidase__InfluenzaA__AHL81028

SEQ ID NO: 88501 - RNA, 1410 nt, Artificial Sequence; identical to SEQ ID NO: 83542
  derived and/or modified CDS sequence (opt1) from neuraminidase__InfluenzaA__AHL81040

SEQ ID NO: 88502 - RNA, 1410 nt, Artificial Sequence; identical to SEQ ID NO: 83542
  derived and/or modified CDS sequence (opt1) from neuraminidase__InfluenzaA__AHL81052

SEQ ID NO: 88503 - RNA, 1410 nt, Artificial Sequence; identical to SEQ ID NO: 88494
  derived and/or modified CDS sequence (opt1) from neuraminidase__InfluenzaA__AHL81064

SEQ ID NO: 88504 - RNA, 1410 nt, Artificial Sequence; identical to SEQ ID NO: 88494
  derived and/or modified CDS sequence (opt1) from neuraminidase__InfluenzaA__AHL81075

SEQ ID NO: 88505 - RNA, 1410 nt, Artificial Sequence
  derived and/or modified CDS sequence (opt1) from neuraminidase__InfluenzaA__AHL81086
augaaccccaaccagaagaucaucaccaucggcagcgugucccugaccaucagcacgaucugcuucuucaugcagaucgccauccucaucaccaccgucacccugcacuucaagcaguacgaguucaacuccccgcccaacaaccaggugaugcugugcaagcccacgaucaucgagcgcaacaucaccgagaucguguaccucaccaacaccacgaucgagaaggagaucugccccaagcuggccgaguaccggaacuggagcaagccgcagugcgacaucaccggguucgcgcccuucuccaaggacaacagcauccgccuguccgccggcggggacaucugggucacccgggagcccuacgugagcugcgaccccgacaagugcuaccaguucgcccucggccaggggaccacgcugaacaacgugcacuccaacaacaccguccgcgaccggaccccguaccgcacccugcucaugaacgagcugggcgugcccuuccaccugggcacgaagcaggucugcaucgccuggagcuccagcuccugccacgacgggaaggccuggcuccacgugugcaucaccggcgacgacaagaacgcgaccgccagcuucaucuacaacgggcggcugguggacuccguggucagcugguccaaggagauccugcgcacccaggagagcgagugcgugugcaucaacggcacgugcaccguggucaugaccgacggguccgccagcggcaaggccgacaccaagauccucuucaucgaggagggcaagaucgugcacacgagcacccuguccgggagcgcgcagcacguggaggagugcuccugcuacccccgguaccccggcguccgcugcgugugccgggacaacuggaaggggagcaaccgcccgaucguggacaucaacaucaaggaccacuccaucgucagcuccuacgugugcagcggccuggugggcgacacgccccggaagaacgacuccagcuccagcucccacugccucgaccccaacaacgaggagggcgggcacggggucaagggcugggccuucgacgacgggaacgacguguggaugggccgcaccaucaacgagaccagccggcugggcuacgagaccuucaaggucaucgaggggugguccaaccccaagagcaagcugcagaucaaccgccaggugaucguggaccggggcaaccgcuccggguacagcggcaucuucuccgucgagggcaagagcugcaucaaccggugcuucuacguggagcucauccgcgggcggaaggaggagaccgaggugcuguggaccagcaacuccaucgucguguucugcggcacgagcgggaccuacggcaccggguccuggccggacggcgccgaccugaaccucaugcccaucuga

SEQ ID NO: 88506 - RNA, 1410 nt, Artificial Sequence
  derived and/or modified CDS sequence (opt1) from neuraminidase__InfluenzaA__AHL81098
augaaccccaaccagaagaucaucaccaucggcagcgugucccugaccaucagcacgaucugcuucuucguccagaucgccauccucaucaccaccgugacccugcacuucaagcaguacgaguucaacuccccgcccaacaaccaggugaugcugugcgagcccacgaucaucgagcgcaacaucaccgagaucgucuaccucaccaacaccacgaucgagaaggagaucugccccaagcuggccgaguaccggaacuggagcaagccgcagugcgacaucaccggguucgcgcccuucuccaaggacaacagcauccgccuguccgccggcggggacaucugggugacccgggagcccuacgugagcugcgaccccgacaagugcuaccaguucgcccucggccaggggaccacgcugaacaacguccacuccaacaacaccgugcgcgaccggaccccguaccgcacccugcucaugaacgagcugggcgugcccuuccaccugggcacgaagcaggucugcaucgccuggagcuccagcuccugccacgacgggaaggccuggcuccacgugugcaucaccggcgacgacaagaacgcgaccgccagcuucaucuacaacgggcggcugguggacuccgucgugagcugguccaaggagauccugcgcacccaggagagcgagugcgugugcaucaacggcacgugcaccgucgugaugaccgacggguccgccagcggcaaggccgacaccaagauccucuucaucgaggagggcaagaucgugcacacgagcacccuguccgggagcgcgcagcacgucgaggagugcuccugcuacccccgguaccccggcgugcgcugcgugugccgggacaacuggaaggggagcaaccgcccgaucgucgacaucaacaucaaggaccacuccaucgugagcuccuacgugugcagcggccuggucggcgacacgccccggaagaacgacuccagcuccagcucccacugccucgaccccaacaacgaggagggcgggcacggggugaagggcugggccuucgacgacgggaacgacgucuggaugggccgcaccaucaacgagaccagccggcugggcuacgagaccuucaaggugaucgaggggugguccaaccccaagagcaagcugcagaucaaccgccaggugaucgucgaccggggcaaccgcuccggguacagcggcaucuucuccguggagggcaagagcugcaucaaccggugcuucuacguggagcucauccgcgggcggaaggaggagaccgagguccuguggaccagcaacuccaucgugguguucugcggcacgagcgggaccuacggcaccggguccuggccggacggcgccgaccugaaccucaugcccaucuga

SEQ ID NO: 88507 - RNA, 1410 nt, Artificial Sequence; identical to SEQ ID NO: 84733
  derived and/or modified CDS sequence (opt1) from neuraminidase__InfluenzaA__AHL81110

SEQ ID NO: 88508 - RNA, 1410 nt, Artificial Sequence; identical to SEQ ID NO: 84733
  derived and/or modified CDS sequence (opt1) from neuraminidase__InfluenzaA__AHL81121

SEQ ID NO: 88509 - RNA, 1410 nt, Artificial Sequence; identical to SEQ ID NO: 83542
  derived and/or modified CDS sequence (opt1) from neuraminidase__InfluenzaA__AHL81132

SEQ ID NO: 88510 - RNA, 1410 nt, Artificial Sequence; identical to SEQ ID NO: 83542
  derived and/or modified CDS sequence (opt1) from neuraminidase__InfluenzaA__AHL81144

SEQ ID NO: 88511 - RNA, 1410 nt, Artificial Sequence; identical to SEQ ID NO: 83542
  derived and/or modified CDS sequence (opt1) from neuraminidase__InfluenzaA__AHL81156

SEQ ID NO: 88512 - RNA, 1410 nt, Artificial Sequence; identical to SEQ ID NO: 85811
  derived and/or modified CDS sequence (opt1) from neuraminidase__InfluenzaA__AHL81168

SEQ ID NO: 88513 - RNA, 1410 nt, Artificial Sequence; identical to SEQ ID NO: 85811
  derived and/or modified CDS sequence (opt1) from neuraminidase__InfluenzaA__AHL81180

SEQ ID NO: 88514 - RNA, 1410 nt, Artificial Sequence; identical to SEQ ID NO: 83542
  derived and/or modified CDS sequence (opt1) from neuraminidase__InfluenzaA__AHL81192

SEQ ID NO: 88515 - RNA, 1410 nt, Artificial Sequence
  derived and/or modified CDS sequence (opt1) from neuraminidase__InfluenzaA__AHL81215
augaaccccaaccagaagaucaucaccaucggcagcgugucccugaccaucagcacgaucugcuucuucaugcagaucgccauccucaucaccaccgucacccugcacuucaagcaguacgaguucaacuccccgcccaacaaccaggugaugcugugcgagcccacgaucaucgagcgcaacaucaccgagaucauguaccucaccaacaccacgaucgagaaggagaucugccccaagcuggccgaguaccggaacuggagcaagccgcagugcgacaucaccggguucgcgcccuucuccaaggacaacagcauccgccuguccgccggcggggacaucugggugacccgggagcccuacgucagcugcgaccccgacaagugcuaccaguucgcccucggccaggggaccacgcugaacaacgugcacuccaacaacaccgugcgcgaccggaccccguaccgcacccugcucaugaacgagcugggcguccccuuccaccugggcacgaagcaggucugcaucgccuggagcuccagcuccugccacgacgggaaggccuggcuccacgugugcaucaccggcgacgacaagaacgcgaccgccagcuucaucuacaacgggcggcugguggacuccguggugagcugguccaaggagauccugcgcacccaggagagcgagugcgucugcaucaacggcacgugcaccguggugaugaccgacggguccgccagcggcaaggccgacaccaagauccucuucaucgaggagggcaagaucguccacacgagcacccuguccgggagcgcgcagcacguggaggagugcuccugcuacccccgguaccccggcgugcgcugcgucugccgggacaacuggaaggggagcaaccgcccgaucguggacaucaacaucaaggaccacuccaucgugagcuccuacgucugcagcggccuggugggcgacacgccccggaagaacgacuccagcuccagcucccacugccucgaccccaacaacgaggagggcgggcacggggugaagggcugggccuucgacgacgggaacgacgucuggaugggccgcaccaucaacgagaccagccggcugggcuacgagaccuucaaggugaucgaggggugguccaaccccaagagcaagcugcagaucaaccgccaggucaucguggaccggggcaaccgcuccggguacagcggcaucuucuccguggagggcaagagcugcaucaaccggugcuucuacgucgagcucauccgcgggcggaaggaggagaccgaggugcuguggaccagcaacuccaucguggucuucugcggcacgagcgggaccuacggcaccggguccuggccggacggcgccgaccugaacuucaugcccaucuga

SEQ ID NO: 88516 - RNA, 1410 nt, Artificial Sequence
  derived and/or modified CDS sequence (opt1) from neuraminidase__InfluenzaA__AHL81227
augaaccccaaccagaagaucaucaccaucggcagcgugugcaugaccaucgggauggccaaccugauccuccagaucggcaacaucaucuccaucuggaucagccacuccauccagcuggggaaccagagccagaucgagacgugcaaccaguccgucaucaccuacgagaacaacaccugggugaaccagaccuacgugaacaucagcaacacgaacuucgccgcgggccaguccgucgugagcgugaagcuggccgggaacuccagccucugcccggucuccggcugggccaucuacagcaaggacaacuccauccgcaucggcagcaagggggacguguucgugauccgggagcccuucaucuccugcagcccccuggagugccgcaccuucuuccugacccagggcgcccuccugaacgacaagcacuccaacgggaccaucaaggaccggagccccuaccgcacgcugauguccugcccgaccggcgagguccccagccccuacaacagccgguucgaguccguggccuggagcgcguccgccugccacgacgggaucaacuggcucaccaucggcaucagcggccccgacaacggggccguggccguccugaaguacaacggcaucaucaccgacacgaucaaguccuggcgcaacaacauccugcggacccaggagagcgagugcgcgugcgugaacggguccugcuucaccaucaugaccgacggcccgagcgacggccaggccuccuacaagaucuuccgcaucgagaaggggaagaucgucaagagcguggagaugaacgcccccaacuaccacuacgaggagugcuccugcuaccccgacagcuccgagaucacgugcgugugccgggacaacuggcacggcagcaaccgccccuggguguccuucaaccagaaccucgaguaccagaucggguacaucugcagcggcaucuucggggacaacccgcggcccaacgacaagaccggcuccugcggccccgucagcuccaacggggccaacggcgugaagggguucagcuucaaguacggcaacgggguguggaucggccgcaccaagagcaucuccagccggaagggcuucgagaugaucugggaccccaacggguggaccggcacggacaacaacuucuccaucaagcaggacaucaucgggaucaacgaguggagcggcuacuccgggagcuucguccagcacccggagcugaccggccuggacugcauccgccccugcuucuggguggagcucauccggggccgccccaaggagaacaccaucuggaccuccgggagcuccaucagcuucugcggcgugaacuccgacacggucggguggagcuggcccgacggcgccgagcugccguucaccaucgacaaguga

SEQ ID NO: 88517 - RNA, 1410 nt, Artificial Sequence; identical to SEQ ID NO: 83542
  derived and/or modified CDS sequence (opt1) from neuraminidase__InfluenzaA__AHL81238

SEQ ID NO: 88518 - RNA, 1410 nt, Artificial Sequence; identical to SEQ ID NO: 83542
  derived and/or modified CDS sequence (opt1) from neuraminidase__InfluenzaA__AHL81250

SEQ ID NO: 88519 - RNA, 1410 nt, Artificial Sequence; identical to SEQ ID NO: 83542
  derived and/or modified CDS sequence (opt1) from neuraminidase__InfluenzaA__AHL81262

SEQ ID NO: 88520 - RNA, 1410 nt, Artificial Sequence; identical to SEQ ID NO: 83542
  derived and/or modified CDS sequence (opt1) from neuraminidase__InfluenzaA__AHL81274

SEQ ID NO: 88521 - RNA, 1410 nt, Artificial Sequence; identical to SEQ ID NO: 83542
  derived and/or modified CDS sequence (opt1) from neuraminidase__InfluenzaA__AHL81286

SEQ ID NO: 88522 - RNA, 1410 nt, Artificial Sequence; identical to SEQ ID NO: 83542
  derived and/or modified CDS sequence (opt1) from neuraminidase__InfluenzaA__AHL81298

SEQ ID NO: 88523 - RNA, 1410 nt, Artificial Sequence; identical to SEQ ID NO: 88494
  derived and/or modified CDS sequence (opt1) from neuraminidase__InfluenzaA__AHL81310

SEQ ID NO: 88524 - RNA, 1410 nt, Artificial Sequence; identical to SEQ ID NO: 84733
  derived and/or modified CDS sequence (opt1) from neuraminidase__InfluenzaA__AHL81332

SEQ ID NO: 88525 - RNA, 1410 nt, Artificial Sequence
  derived and/or modified CDS sequence (opt1) from neuraminidase__InfluenzaA__AHL81343
augaaccccaaccagaagaucaucaccaucggcagcgugucccugaccaucagcacgaucugcuuccucaugcagaucgccauccugaucaccaccgucacccugcacuucaagcaguacgaguucaacuccccgcccaacaaccaggugaugcucugcgagcccacgaucaucgagcgcaacaucaccgagaucguguaccugaccaacaccacgaucgagaaggagaucugccccaagcuggccgaguaccggaacuggagcaagccgcagugcgacaucaccggguucgcgcccuucuccaaggacaacagcauccgccucuccgccggcggggacaucugggucacccgggagcccuacgugagcugcgaccccgacaagugcuaccaguucgcccugggccaggggaccacgcugaacaacgugcacuccaacaacaccguccgcgaccggaccccguaccgcacccuccugaugaacgagcugggcgugcccuuccaccucggcacgaagcaggucugcaucgccuggagcuccagcuccugccacgacgggaaggccuggcugcacgugugcaucaccggcgacgacaagaacgcgaccgccagcuucaucuacaacgggcggcugguggacuccguggucagcugguccaaggagauccuccgcacccaggagagcgagugcgugugcaucaacggcacgugcaccguggucaucaccgacggguccgccagcggcaaggccgacaccaagauccuguucaucgaggagggcaagaucgugcacacgagcacccuguccgggagcgcgcagcacguggaggagugcuccugcuacccccgguaccccggcguccgcugcgugugccgggacaacuggaaggggagcaaccgcccgaucguggacaucaacaucaaggaccacuccaucgucagcuccuacgugugcagcggccucgugggcgacacgccccggaagaacgacuccagcuccagcucccacugcagcgaccccaacaacgaggagggcgggcacggggucaagggcugggccuucgacgacgggaacgacguguggaugggccgcaccaucuccgagaagucccggcugggcuacgagaccuucaaggucaucgagggguggagcaaccccaagagcaagcugcagaucaaccgccaggugaucguggaccggggcaaccgcuccggguacagcggcaucuucagcgucgaggggaaguccugcaucaaccggugcuucuacguggagcucauccgcggccggaaggaggagaccgaggugcuguggaccagcaacuccaucgucguguucugcggcaccagcgggacguacggcaccggguccuggccggacggcgccgacaucaaccugaugcccaucuga

SEQ ID NO: 88526 - RNA, 1410 nt, Artificial Sequence; identical to SEQ ID NO: 83542
  derived and/or modified CDS sequence (opt1) from neuraminidase__InfluenzaA__AHL81355

SEQ ID NO: 88527 - RNA, 1410 nt, Artificial Sequence; identical to SEQ ID NO: 84733
  derived and/or modified CDS sequence (opt1) from neuraminidase__InfluenzaA__AHL81367

SEQ ID NO: 88528 - RNA, 1410 nt, Artificial Sequence; identical to SEQ ID NO: 84733
  derived and/or modified CDS sequence (opt1) from neuraminidase__InfluenzaA__AHL81378

SEQ ID NO: 88529 - RNA, 1410 nt, Artificial Sequence; identical to SEQ ID NO: 84733
  derived and/or modified CDS sequence (opt1) from neuraminidase__InfluenzaA__AHL81389

SEQ ID NO: 88530 - RNA, 1410 nt, Artificial Sequence; identical to SEQ ID NO: 83542
  derived and/or modified CDS sequence (opt1) from neuraminidase__InfluenzaA__AHL81400

SEQ ID NO: 88531 - RNA, 1410 nt, Artificial Sequence; identical to SEQ ID NO: 88515
  derived and/or modified CDS sequence (opt1) from neuraminidase__InfluenzaA__AHL81412

SEQ ID NO: 88532 - RNA, 1410 nt, Artificial Sequence; identical to SEQ ID NO: 80762
  derived and/or modified CDS sequence (opt1) from neuraminidase__InfluenzaA__AHL81422

SEQ ID NO: 88533 - RNA, 1410 nt, Artificial Sequence; identical to SEQ ID NO: 82050
  derived and/or modified CDS sequence (opt1) from neuraminidase__InfluenzaA__AHL81433

SEQ ID NO: 88534 - RNA, 1410 nt, Artificial Sequence
  derived and/or modified CDS sequence (opt1) from neuraminidase__InfluenzaA__AHL88954
augaaccccaaccagaagaucaucaccaucggcagcgugucccugaccaucagcacgaucugcuucuucaugcagaucgccauccucaucaccaccgucacccugcacuucaagcaguacgaguucaacuccccgcccaacaaccaggugaugcugugcgagcccacgaucaucgagcgcaacaucaccgagaucguguaccucaccaacaccacgaucgagaaggagaucugccccaagcuggccgaguaccggaacuggagcaagccgcagugcaacaucaccggguucgcgcccuucuccaaggacaacagcauccgccuguccgccggcggggacaucugggucacccgggagcccuacgugagcugcgaccccgacaagugcuaccaguucgcccucggccaggggaccacgcugaacaacgugcacuccaacgacaccguccacgaccgcaccccguaccggacccugcucaugaacgagcugggcgugcccuuccaccugggcacgaagcaggucugcaucgccuggagcuccagcuccugccacgacgggaaggccuggcuccacgugugcgugaccggcgacgacaagaacgcgaccgccagcuucaucuacaacgggcgccugguggacuccaucgucagcugguccaaggagauccugcggacccaggagagcgagugcgugugcaucaacggcacgugcaccguggucaugaccgacggguccgccagcggcaaggccgacaccaagauccucuucaucaaggagggcaagaucgugcacacgagcacccuguccgggagcgcgcagcacguggaggagugcuccugcuacccccgcuaccccggcguccggugcgugugccgcgacaacuggaaggggagcaaccggccgaucguggacaucaacaucaaggacuacuccaucgucagcuccuacgugugcagcggccuggugggcgacacgccccgcaagaacgacuccagcuccagcucccacugccucgaccccaacaacgaggagggcgggcacggggucaagggcugggccuucgacgacgggaacgacguguggaugggccggaccaucagcgagaagcugcgcuccggcuacgagaccuucaaggucaucgagggguggagcaaccccaacuccaagcugcagaucaaccgccaggugaucguggaccgggacaaccggagcggcuacuccgggaucuucagcgucgagggcaagagcugcaucaaccgcugcuucuacguggagcucauccgggggcgcaaggaggagaccgaggugcuguggaccuccaacagcaucgucguguucugcggcaccuccggcacguacgggaccggcagcuggccggacggggccgacaucaaccugaugcccaucuga

SEQ ID NO: 88535 - RNA, 1410 nt, Artificial Sequence
  derived and/or modified CDS sequence (opt1) from neuraminidase__InfluenzaA__AHL89033
augaaccccaaccagaagaucaucaccaucggcagcgugucccugaccaucagcacgaucugcuucuucaugcagaucgccauccucaucaccaccgucacccugcacuucaagcaguacgaguucaacuccccgcccaacaaccaggugaugcugugcgagcccacgaucaucgagcgcaacaucaccgagaucguguaccucaccaacaccacgaucgagaaggagaucugccccaagcuggccgaguaccggaacuggagcaagccgcagugcaacaucaccggguucgcgcccuucuccaaggacaacagcauccgccuguccgccggcggggacaucugggucacccgggagcccuacgugagcugcgaccccgacaagugcuaccaguucgcccucggccaggggaccacgcugaacaacgugcacuccaacgacaccguccacgaccgcaccccguaccggacccugcucaugaacgagcugggcgugcccuuccaccugggcacgaagcaggucugcaucgccuggagcuccagcuccugccacgacgggaaggccuggcuccacgugugcgugaccggcgacgacaagaacgcgaccgccagcuucaucuacaacgggcgccugguggacuccaucgucagcugguccaaggagauccugcggacccaggagagcgagugcgugugcaucaacggcacgugcaccguggucaugaccgacggguccgccagcggcaaggccgacaccaagauccucuucaucgaggagggcaagaucgugcacacgagcacccuguccgggagcgcgcagcacguggaggagugcuccugcuacccccgcuaccccggcguccggugcgugugccgcgacaacuggaaggggagcaaccggccgaucguggacaucaacaucaaggacuacuccaucgucagcuccuacgugugcagcggccuggugggcgacacgccccgcaagaacgacuccagcuccagcucccacugccucgaccccaacaacgaggagggcgggcacggggucaagggcugggccuucgacgacgggaacgacguguggaugggccggaccaucagcgagaagcugcgcuccggcuacgagaccuucaaggucaucgagggguggagcaaccccaacuccaagcugcagaucaaccgccaggugaucguggaccggggcaaccggagcggguacuccggcaucuucagcgucgaggacaagagcugcaucaaccgcugcuucuacguggagcucauccgggggcgcaaggaggagaccgaggugcuguggaccuccaacagcaucgucguguucugcggcaccuccggcacguacgggaccggcagcuggccggacggggccgacaucaaccugaugcccaucuga

SEQ ID NO: 88536 - RNA, 1410 nt, Artificial Sequence
  derived and/or modified CDS sequence (opt1) from neuraminidase__InfluenzaA__AHL89045
augaaccccaaccagaagaucaucaccaucggcagcgugucccugaccaucagcacgaucugcuucuucaugcagaucgccauccucaucaccaccgucacccugcacuucaagcaguacgaguucaacuccccgcccaacaaccaggugaugcugugcgagcccacgaucaucgagcgcaacaucaccgagaucguguaccucaccaacaccacgaucgagaaggagaucugccccaagcuggccgaguaccggaacuggagcaagccgcagugcaacaucaccggguucgcgcccuucuccaaggacaacagcauccgccuguccgccggcggggacaucugggucacccgggagcccuacgugagcugcgaccccgacaagugcuaccaguucgcccucggccaggggaccacgcugaacaacgugcacuccaacgacaccguccacgaccgcaccccguaccggacccugcucaugaacgagcugggcgugcccuuccaccugggcacgaagcaggucugcaucgccuggagcuccagcuccugccacgacgggaaggccuggcuccacgugugcgugaccggcgacgacaagaacgcgaccgccagcuucaucuacaacgggcgccugguggacuccaucgucagcugguccaaggagauccugcggacccaggagagcgagugcgugugcaucaacggcacgugcaccguggucaugaccgacggguccgccagcggcaaggccgacaccaagauccucuucaucgaggagggcaagaucgugcacacgagcacccuguccgggagcgcgcagcacguggaggagugcuccugcuacccccgccaccccggcguccggugcgugugccgcgacaacuggaaggggagcaaccggccgaucguggacaucaacaucaaggacuacuccaucgucagcuccuacgugugcagcggccuggugggcgacacgccccgcaagaacgacuccagcuccagcucccacugccucgaccccaacaacgaggagggcgggcacggggucaagggcugggccuucgacgacgggaacgacguguggaugggccggaccaucagcgagaagcugcgcuccggcuacgagaccuucaaggucaucgagggguggagcaaccccaacuccaagcugcagaccaaccgccaggugaucguggaccggggcaaccggagcggguacuccggcaucuucagcgucgagggcaagagcugcaucaaccgcugcuucuacguggagcucauccgggggcgcaaggaggagaccgaggugcuguggaccuccaacagcaucgucguguucugcggcacguccgggaccuacggcaccgggagcuggccggacggcgccgacaucaaccugaugcccaucuga

SEQ ID NO: 88537 - RNA, 1410 nt, Artificial Sequence
  derived and/or modified CDS sequence (opt1) from neuraminidase__InfluenzaA__AHL89057
augaaccccaaccagaagaucaucaccaucggcagcgugucccugaccaucagcacgaucugcuucuucaugcagaucgccauccucaucaccaccgucacccugcacuucaagcaguacgaguucaacuccccgcccaacaaccaggugaugcugugcgagcccacgaucaucgagcgcaacaucaccgagaucguguaccucaccaacaccacgaucgagaaggagaucugccccaagcuggccgaguaccggaacuggagcaagccgcagugcaacaucaccggguucgcgcccuucuccaaggacaacagcauccgccuguccgccggcggggacaucugggucacccgggagcccuacgugagcugcgaccccgacaagugcuaccaguucgcccucggccaggggaccacgcugaacaacgugcacuccaacgacaccguccacgaccgcaccccguaccggacccugcucaugaacgagcugggcgugcccuuccaccugggcacgaagcaggucugcaucgccuggagcuccagcuccugccacgacgggaaggccuggcuccacgugugcgugaccggcgacgacaagaacgcgaccgccagcuucaucuacaacgggcgccugguggacuccaucgucagcugguccaaggagauccugcggacccaggagagcgagugcgugugcaucaacggcacgugcaccguggucaugaccgacggguccgccagcggcaaggccgacaccaagauccucuucaucgaggagggcaagaucgugcacacgagcacccuguccgggagcgcgcagcacguggaggagugcuccugcuacccccgcuaccccggcguccggugcgugugccgcgacaacuggaaggggagcaaccggccgaucguggacaucaacaucaaggacuacuccaucgucagcuccuacgugugcagcggccuggugggcgacacgccccgcaagaacgacuccagcuccagcucccacugccucgaccccaacaacgaggagggcgggcacggggucaagggcugggccuucgacgacgggaacgacguguggaugggccggaccaucagcgagaagcugcgcuccggcuacgagaccuucaaggucaucgagggguggagcaagcccaacuccaagcugcagaucaaccgccaggugaucguggaccggggcaaccggagcggguacuccggcaucuucagcgucgagggcaagagcugcaucaaccgcugcuucuacguggagcucauccgggggcgcaaggaggagaccgaggugcuguggaccuccaacagcaucgucguguucugcggcaccuccgggacguacggcaccgggagcuggccggacggcgccgacaucaaccugaugcccaucuga

SEQ ID NO: 88538 - RNA, 1410 nt, Artificial Sequence; identical to SEQ ID NO: 79731
  derived and/or modified CDS sequence (opt1) from neuraminidase__InfluenzaA__AHL89069

SEQ ID NO: 88539 - RNA, 1410 nt, Artificial Sequence; identical to SEQ ID NO: 78736
  derived and/or modified CDS sequence (opt1) from neuraminidase__InfluenzaA__AHL89081

SEQ ID NO: 88540 - RNA, 1410 nt, Artificial Sequence; identical to SEQ ID NO: 78736
  derived and/or modified CDS sequence (opt1) from neuraminidase__InfluenzaA__AHL89093

SEQ ID NO: 88541 - RNA, 1410 nt, Artificial Sequence; identical to SEQ ID NO: 78736
  derived and/or modified CDS sequence (opt1) from neuraminidase__InfluenzaA__AHL89117

SEQ ID NO: 88542 - RNA, 1410 nt, Artificial Sequence; identical to SEQ ID NO: 78736
  derived and/or modified CDS sequence (opt1) from neuraminidase__InfluenzaA__AHL89129

SEQ ID NO: 88543 - RNA, 1410 nt, Artificial Sequence
  derived and/or modified CDS sequence (opt1) from neuraminidase__InfluenzaA__AHL89141
augaaccccaaccagaagaucaucaccaucggcagcgugucccugaccaucagcacgaucugcuucuucaugcagaucgccauccucaucaccaccgucacccugcacuucaagcaguacgaguucaacuccccgcccaacaaccaggugaugcugugcgagcccacgaucaucgagcgcaacaucaccgagaucguguaccucaccaacaccacgaucgagaaggagaucugccccaagcuggccgaguaccggaacuggagcaagccgcagugcaacaucaccggguucgcgcccuucuccaaggacaacagcauccgccuguccgccggcggggacaucugggucacccgggagcccuacgugagcugcgaccccgacaagugcuaccaguucgcccucggccaggggaccacgcugaacaacgugcacuccaacgacaccguccacgaccgcaccccguaccggacccugcucaugaacgagcugggcgugcccuuccaccugggcacgaagcaggucugcaucgccuggagcuccagcuccugccacgacgggaaggccuggcuccacgugugcgugaccggcgacgacaagaacgcgaccgccagcuucaucuacaacgggcgccugguggacuccaucgucagcugguccaaggagauccugcggacccaggagagcgagugcgugugcaucaacggcacgugcaccguggucaugaccgacggguccgccagcggcaaggccgacaccaagauccucuucaucgaggagggcaagaucgugcacacgagcacccuguccgggagcgcgcagcacguggaggagugcuccugcuacccccgcuaccccggcguccggugcgugugccgcgacaacuggaaggggagcaaccggccgaucguggacaucaacaucaaggacuacuccaucgucagcuccuacgugugcagcggccuggugggcgacacgccccgcaagaacgacuccagcuccagcucccacugccucgaccccaacaacgaggagggcgggcacggggucaagggcugggccuucgacgacgggaacgacguguggaugggccggaccaucagcgagaagcugcgccugggcuacgagaccuucaaggucaucgaggggugguccaaccccaacagcaagcuccagaccaaccgccaggugaucguggaccggggcaaccgguccggguacagcggcaucuucuccgucgagggcaagagcugcaucaaccgcugcuucuacguggagcugauccgggggcgcaaggaggagaccgaggugcuguggaccagcaacuccaucgucguguucugcggcacgagcgggaccuacggcaccggguccuggccggacggcgccgacaucaaccucaugcccaucuga

SEQ ID NO: 88544 - RNA, 1410 nt, Artificial Sequence
  derived and/or modified CDS sequence (opt1) from neuraminidase__InfluenzaA__AHL89153
augaaccccaaccagaagaucaucaccaucggcagcgugucccugaccaucagcacgaucugcuucuucaugcagaucgccauccucaucaccaccgucacccugcacuucaagcaguacgaguucaacuccccgcccaacaaccaggugaugcugugcgagcccacgaucaucgagcgcaacaucaccgagaucguguaccucaccaacaccacgaucgagaaggagaucugccccaagcuggccgaguaccggaacuggagcaagccgcagugcaacaucaccggguucgcgcccuucuccaaggacaacagcauccgccuguccgccggcggggacaucugggucacccgggagcccuacgugagcugcgaccccgacaagugcuaccaguucucccucggccaggggaccacgcugaacaacgugcacagcaacgacaccguccacgaccgcaccccguaccggacccugcucaugaacgagcugggcgugcccuuccaccugggcacgaagcaggucugcaucgccugguccagcuccagcugccacgacgggaaggccuggcuccacgugugcgugaccggcgacgacaagaacgccaccgcguccuucaucuacaacgggcgccugguggacagcaucgucuccuggagcaaggagauccugcggacccaggaguccgagugcgugugcaucaacggcacgugcaccguggucaugaccgacgggagcgccagcggcaaggccgacaccaagauccucuucaucgaggagggcaagaucgugcacacguccacccugagcggguccgcccagcacguggaggagugcagcugcuacccccgcuaccccggcguccggugcgugugccgcgacaacuggaagggguccaaccggccgaucguggacaucaacaucaaggacuacagcaucgucuccagcuacgugugcuccggccuggugggcgacacgccccgcaagaacgacagcuccagcuccagccacugccucgaccccaacaacgaggagggcgggcacggggucaagggcugggcguucgacgacgggaacgacguguggaugggccggaccaucuccgagaagcugcgcagcggcuacgagaccuucaaggucaucgaggggugguccaaccccaacagcaagcugcagaucaaccgccaggugaucguggaccggggcaaccgguccggguacagcggcaucuucagcgucgaggggaaguccugcaucaaccgcugcuucuacguggagcucauccggggccgcaaggaggagaccgaggugcuguggaccagcaacuccaucgucguguucugcggcaccagcgggacguacggcaccggguccuggccggacggcgccgacaucaaccugaugcccaucuga

SEQ ID NO: 88545 - RNA, 1410 nt, Artificial Sequence; identical to SEQ ID NO: 78736
  derived and/or modified CDS sequence (opt1) from neuraminidase__InfluenzaA__AHL89165

SEQ ID NO: 88546 - RNA, 1410 nt, Artificial Sequence
  derived and/or modified CDS sequence (opt1) from neuraminidase__InfluenzaA__AHL89177
augaaccccaaccagaagaucaucaccaucggcagcgugucccugaccaucagcacgaucugcuucuucaugcagaucgccauccucaucaccaccgucacccugcacuucaagcaguacgaguucaacuccccgcccaacaaccaggugaugcugugcgagcccacgaucaucgagcgcaacaucaccgagaucguguaccucaccaacaccacgaucgagaaggagaucugccccaagcuggccgaguaccggaacuggagcaagccgcagugcaacaucaccggguucgcgcccuucuccaaggacaacagcauccgccuguccgccggcggggacaucugggucacccgggagcccuacgugagcugcgaccccgacaagugcuaccaguucgcccucggccaggggaccacgcugaacaacgugcacuccaacgacaccguccacgaccgcaccccguaccggacccugcucaugaacgagcugggcgugcccuuccaccugggcacgaagcaggucugcaucgccuggagcuccagcuccugccacgacgggaaggccuggcuccacgugugcgugaccggcgacgacaagaacgcgaccgccagcuucaucuacaacgggcgccugguggacuccaucgucagcugguccaacgagauccugcggacccaggagagcgagugcgugugcaucaacggcacgugcaccguggucaugaccgacggguccgccagcggcaaggccgacaccaagauccucuucaucgaggagggcaagaucgugcacacgagcacccuguccgggagcgcgcagcacguggaggagugcuccugcuacccccgcuaccccggcguccggugcgugugccgcgacaacuggaaggggagcaaccggccgaucguggacaucaacaucaaggacuacuccaucgucagcuccuacgugugcagcggccuggugggcgacacgccccgcaagaacgacuccagcuccagcucccacugccucgaccccaacaacgaggagggcgggcacggggucaagggcugggccuucgacgacgggaacgacguguggaugggccggaccaucagcgagaagcugcgcuccggcuacgagaccuucaaggucaucgagggguggagcaaccccaacuccaagcugcagaucaaccgccaggugaucguggaccggggcaaccggagcggguacuccggcaucuucagcgucgagggcaagagcugcaucaaccgcugcuucuacguggagcucauccgggggcgcaaggaggagaacgaggugcuguggaccuccaacagcaucgucguguucugcggcaccuccgggaccuacggcacggggagcuggccggacggcgccgacaucaaccugaugcccaucuga

SEQ ID NO: 88547 - RNA, 1410 nt, Artificial Sequence; identical to SEQ ID NO: 80588
  derived and/or modified CDS sequence (opt1) from neuraminidase__InfluenzaA__AHL89189

SEQ ID NO: 88548 - RNA, 1410 nt, Artificial Sequence; identical to SEQ ID NO: 79731
  derived and/or modified CDS sequence (opt1) from neuraminidase__InfluenzaA__AHL89201

SEQ ID NO: 88549 - RNA, 1410 nt, Artificial Sequence; identical to SEQ ID NO: 80588
  derived and/or modified CDS sequence (opt1) from neuraminidase__InfluenzaA__AHL89213

SEQ ID NO: 88550 - RNA, 1410 nt, Artificial Sequence
  derived and/or modified CDS sequence (opt1) from neuraminidase__InfluenzaA__AHL89225
augaaccccaaccagaagaucaucaccaucggcagcgugucccugaccaucagcacgaucugcuucuucaugcagaucgccauccucaucaccaccgucacccugcacuucaagcaguacgaguucaacccgccgcccaacaaccaggugaugcugugcgagcccacgaucaucgagcgcaacaucaccgagaucguguaccucaccaacaccacgaucgagaaggagaucugccccaagcuggccgaguaccggaacugguccaagccccagugcaacaucaccggguucgcgcccuucagcaaggacaacuccauccgccugagcgccggcggggacaucugggucacccgggagcccuacguguccugcgacccggacaagugcuaccaguucgcccucggccaggggaccacgcugaacaacgugcacagcaacgacaccguccacgaccgcacccccuaccggacccugcucaugaacgagcugggcgugcccuuccaccugggcacgaagcaggucugcaucgccugguccagcuccagcugccacgacgggaaggccuggcuccacgugugcgugaccggcgacgacaagaacgcgaccgccuccuucaucuacaacgggcgccugguggacagcaucgucuccuggagcaaggagauccugcggacccaggaguccgagugcgugugcaucaacggcacgugcaccguggucaugaccgacgggagcgccuccggcaaggccgacaccaagauccucuucaucgaggagggcaagaucgugcacacgagcacccugagcggguccgcgcagcacguggaggagugcagcugcuacccccgcuacccgggcguccggugcgugugccgcgacaacuggaagggguccaaccggcccaucguggacaucaacaucaaggacuacagcaucgucuccagcuacgugugcuccggccuggugggcgacacgccccgcaagaacgacagcuccagcuccagccacugccucgaccccaacaacgaggagggcgggcacggggucaagggcugggccuucgacgacgggaacgacguguggaugggccggaccaucuccgagaagcugcgccugggcuacgagaccuucaaggucaucgagggguggagcaacccgaacuccaagcuccagaccaaccgccaggugaucguggaccggggcaaccggagcggguacuccggcaucuucagcgucgaggggaaguccugcaucaaccgcugcuucuacguggagcugauccggggccgcaaggaggagaccgaggugcuguggaccagcaacagcaucgucguguucugcggcacguccgggaccuacggcaccgggagcuggcccgacggcgccgacaucaaccucaugcccaucuga

SEQ ID NO: 88551 - RNA, 1410 nt, Artificial Sequence; identical to SEQ ID NO: 80588
  derived and/or modified CDS sequence (opt1) from neuraminidase__InfluenzaA__AHL89237

SEQ ID NO: 88552 - RNA, 1410 nt, Artificial Sequence; identical to SEQ ID NO: 79731
  derived and/or modified CDS sequence (opt1) from neuraminidase__InfluenzaA__AHL89261

SEQ ID NO: 88553 - RNA, 1410 nt, Artificial Sequence
  derived and/or modified CDS sequence (opt1) from neuraminidase__InfluenzaA__AHL89273
augaaccccaaccagaagaucaucaccaucggcagcgugucccugaccaucagcacgaucugcuucuucaugcagaucgccauccucaucaccaccgucacccugcacuucaagcaguacgaguucaacuccccgcccaacaaccaggugaugcugugcgagcccacgaucaucgagcgcaacaucaccgagaucguguaccucaccaacaccacgaucgagaaggagaucugccccaagcuggccgaguaccggaacuggagcaagccgcagugcaacaucaccggguucgcgcccuucuccaaggacaacagcauccgccuguccgccggcggggacaucugggucacccgggagcccuacgugagcugcgaccccgacaagugcuaccaguucgcccucggccaggggaccacgcugaacaacgugcacuccaacgacaccguccacgaccgcaccccguaccggacccugcucaugaacgagcugggcgugcccuuccaccugggcacgaagcaggucugcaucgccuggagcuccagcuccugccacgacgggaaggccuggcuccacgugugcgugaccggcgacgacaagaacgcgaccgccagcuucaucuacaacgggcgccugguggacuccaucgucagcugguccaaggagauccugcggacccaggagagcgagugcgugugcaucaacggcacgugcaccguggucaugaccgacggguccgccagcggcaaggccgacaccaagauccucuucaucgaggagggcaagaucgugcacacgagcacccuguccgggagcgcgcagcacguggaggagugcuccugcuacccccgcuaccccggcguccggugcgugugccgcgacaacuggaaggggagcaaccggccgaucguggacaucaacaucaaggacuacuccaucgucagcuccuacgugugcagcggccuggugggcgacacgccccgcaagaacgacuccagcuccagcucccacugccucgaccccaacaacgaggagggcgggcacggggucaagggcugggccuucgacgacgggaacgacguguggaugggccggaccaucagcgagaagcugcgccugggcuacgagaccuucaaggucaucgaggggugguccaaccccaacagcaagcuccagaccaaccgccaggugaucguggaccggggcaaccgguccggguacagcggcaucuucuccgucgagggcaagagcugcaucaaccgcugcuucuacguggagcugauccgggggcgcaaggaggagaccgacgugcuguggaccagcaacuccaucgucguguucugcggcacgagcgggaccuacggcaccggguccuggccggacggcgccgacaucaaccucaugcccaucuga

SEQ ID NO: 88554 - RNA, 1410 nt, Artificial Sequence
  derived and/or modified CDS sequence (opt1) from neuraminidase__InfluenzaA__AHL89285
augaaccccaaccagaagaucaucaccaucggcagcgugucccugaccaucagcacgaucugcuucuucaugcagaucgccauccucaucaccaccgucacccugcacuucaagcaguacgaguucaacuccccgcccaacaaccaggugaugcugugcgagcccacgaucaucgagcgcaacaucaccgagaucguguaccucaccaacaccacgaucgagaaggagaucugccccaagcuggccgaguaccggaacuggagcaagccgcagugcaacaucaccggguucgcgcccuucuccaaggacaacagcauccgccuguccgccggcggggacaucugggucacccgggagcccuacgugagcugcgaccccgacaagugcuaccaguucgcccucggccaggggaccacgcugaacaacgugcacuccaacgacaccguccacgaccgcaccccguaccggacccugcucaugaacgagcugggcgugcccuuccaccugggcacgaagcaggucugcaucgccuggagcuccagcuccugccacgacgggaaggccuggcuccacgugugcgugaccggcgacgacaagaacgcgaccgccagcuucaucuacaacgggcgccugguggacuccaucgucagcugguccaaggagauccugcggacccaggagagcgagugcgugugcaucaacggcacgugcaccguggucaugaccgacggguccgccagcggcaaggccgacaccaagauccucuucaucgaggagggcaagaucgugcacacgagcacccuguccgggagcgcgcagcacguggaggagugcuccugcuacccccgcuaccccggcguccggugcgugugccgcgacaacuggaaggggagcaaccggccgaucguggacaucaacaucaaggacuacuccaucgucagcuccuacgugugcagcggccuggugggcgacacgccccgcaagaacgacuccagcuccagcucccacugccucgaccccaacaacgaggagggcgggcacggggucaagggcugggccuucgacgacgggaacgacguguggaugggccggaccaucagcgagaagcugcgccugggcuacgagaccuucaaggucaucgaggggugguccaaccccaacagcaagcuccagaccaaccgccaggugaucguggaccggggcaaccgguccggguacagcggcaucuucuccgucgagggcaagagcugcaucaaccgcugcuucuacguggagcugauccgggggcgcaaggaggagaccgacgugcuguggaccagcaacuccaucgucguguucugcagcacguccggcaccuacgggaccggcagcuggccggacggggccgacaucaaccucaugcccaucuga

SEQ ID NO: 88555 - RNA, 1410 nt, Artificial Sequence; identical to SEQ ID NO: 88553
  derived and/or modified CDS sequence (opt1) from neuraminidase__InfluenzaA__AHL89297

SEQ ID NO: 88556 - RNA, 1410 nt, Artificial Sequence; identical to SEQ ID NO: 88553
  derived and/or modified CDS sequence (opt1) from neuraminidase__InfluenzaA__AHL89309

SEQ ID NO: 88557 - RNA, 1410 nt, Artificial Sequence
  derived and/or modified CDS sequence (opt1) from neuraminidase__InfluenzaA__AHL89321
augaaccccaaccagaagaucaucaccaucggcagcgugucccugaccaucagcacgaucugcuucuucaugcagaucgccauccucaucaccaccgucacccugcacuucaagcaguacgaguucaacuccccgcccaacaaccaggugaugcugugcgagcccacgaucaucgagcgcaacaucaccgagaucguguaccucaccaacaccacgaucgagaaggagaucugccccaagcuggccgaguaccggaacuggagcaagccgcagugcgacaucaccggguucgcgcccuucuccaaggacaacagcauccgccuguccgccggcggggacaucugggucacccgggagcccuacgugagcugcgaccccgacaagugcuaccaguucgcccucggccaggggaccacgcugaacaacgugcacuccaacgacaccguccacgaccgcaccccguaccggacccugcucaugaacgagcugggcgugcccuuccaccugggcacgaagcaggucugcaucgccuggagcuccagcuccugccacgacgggaaggccuggcuccacgugugcgugaccggcgacgacaagaacgcgaccgccagcuucaucuacaacgggcgccugguggacuccgucgugagcugguccaaggacauccugcggacccaggagagcgagugcgugugcaucaacggcacgugcaccgucgugaugaccgacggguccgccagcggcaaggccgacaccaagauccucuucaucgaggagggcaagaucgugcacaucagcacgcuguccgggagcgcgcagcacgucgaggagugcuccugcuacccccgcuaccccggcgugcggugcgugugccgcgacaacuggaaggggagcaaccggccgaucgucgacaucaacaucaagaacuacuccaucgugagcuccuacgugugcagcggccuggucggcgacacgccccgcaagaccgacuccagcuccagcucccacugccucgaccccaacaacgaggagggcgggcacggggugaagggcugggccuucgacgacgggaacgacgucuggaugggccggaccaucagcgagaagcugcgccugggcuacgagaccuucaaggugaucgaggggugguccaaccccaacagcaagcuccagaucaaccgccaggugaucgucgaccggggcaaccgguccggguacagcggcaucuucuccguggagggcaagagcugcaucaaccgcugcuucuacguggagcugauccgggggcgcaaggaggagaccgagguccuguggaccagcaacuccaucgugguguucugcggcaccagcgggacguacggcaccggguccuggccggacggcgccgacaucaaccucaugcccaucuga

SEQ ID NO: 88558 - RNA, 1410 nt, Artificial Sequence
  derived and/or modified CDS sequence (opt1) from neuraminidase__InfluenzaA__AHL89333
augaaccccaaccagaagaucaucaccaucggcagcgugucccugaccaucagcacgaucugcuucuucaugcagaucgccauccucaucgccaccgucacccugcacuucaagcaguacgaguucaacuccccgcccaacaaccaggugaugcugugcgagcccaccaucaucgagcgcaacaucacggagaucguguaccucaccaacaccaccaucgagaaggagaucugccccaagcuggcggaguaccggaacuggagcaagccgcagugcaacaucacgggguucgcccccuucuccaaggacaacagcauccgccuguccgccggcggggacaucugggucacccgggagcccuacgugagcugcgaccccgacaagugcuaccaguucgcccucggccaggggaccacccugaacaacgugcacuccaacgacacgguccacgaccgcaccccguaccggacccugcucaugaacgagcugggcgugcccuuccaccugggcaccaagcaggucugcaucgccuggagcuccagcuccugccacgacgggaaggcguggcuccacgugugcgugacgggcgacgacaagaacgccaccgccagcuucaucuacaacgggcgccugguggacuccaucgucagcugguccaaggagauccugcggacccaggagagcgagugcgugugcaucaacgggaccugcgccguggucaugacggacggguccgcgagcggcaaggccgacaccaagauccucuucaucgaggagggcaagaucgugcacaccagcacccuguccgggagcgcccagcacguggaggagugcuccugcuacccccgcuaccccggcguccggugcgugugccgcgacaacuggaaggggagcaaccggccgaucguggacaucaacaucaaggacuacuccaucgucagcuccuacgugugcagcggccuggugggcgacacgccccgcaagaacgacuccagcuccagcucccacugccucgaccccaacaacgaggagggcggccacggggucaagggcugggccuucgacgacgggaacgacguguggaugggccggaccaucagcgagaagcugcgccugggcuacgagaccuucaaggucaucgaggggugguccaaccccaacagcaagcuccagaccaaccgccaggugaucguggaccggggcaaccgguccggguacagcggcaucuucuccgucgagggcaagagcugcaucaaccgcugcuucuacguggagcugauccgggggcgcaaggaggagacggaggugcuguggaccagcaacuccaucgucguguucugcggcaccagcgggaccuacggcacgggguccuggccggacggcgccgacaucaaccucaugcccaucuga

SEQ ID NO: 88559 - RNA, 1410 nt, Artificial Sequence; identical to SEQ ID NO: 78736
  derived and/or modified CDS sequence (opt1) from neuraminidase__InfluenzaA__AHL89345

SEQ ID NO: 88560 - RNA, 1410 nt, Artificial Sequence; identical to SEQ ID NO: 79730
  derived and/or modified CDS sequence (opt1) from neuraminidase__InfluenzaA__AHL89357

SEQ ID NO: 88561 - RNA, 1410 nt, Artificial Sequence; identical to SEQ ID NO: 79731
  derived and/or modified CDS sequence (opt1) from neuraminidase__InfluenzaA__AHL89369

SEQ ID NO: 88562 - RNA, 1410 nt, Artificial Sequence
  derived and/or modified CDS sequence (opt1) from neuraminidase__InfluenzaA__AHL89381
augaaccccaaccagaagaucaucaccaucggcagcgugucccugaccaucagcacgaucugcuucuucaugcagaucgccauccucaucaccaccgucacccugcacuucaagcaguacgaguacaacuccccgcccaacaaccaggugaugcugugcgagcccacgaucaucgagcgcaacaucaccgagaucguguaccucaccaacaccacgaucgagaaggagaucugccccaagcuggccgaguaccggaacuggagcaagccgcagugcaacaucaccggguucgcgcccuucuccaaggacaacagcauccgccuguccgccggcggggacaucugggucacccgggagcccuacgugagcugcgaccccgacaagugcuaccaguucgcccucggccaggggaccacgcugaacaacgugcacuccaacgacaccguccacgaccgcaccccguaccggacccugcucaugaacgagcugggcgugcccuuccaccugggcacgaagcaggucugcaucgccuggagcuccagcuccugccacgacgggaaggccuggcuccacgugugcgugaccggcgacgacaagaacgcgaccgccagcuucaucuacaacgggcgccugguggacuccaucgucagcugguccaaggagauccugcggacccaggagagcgagugcgugugcaucaacggcacgugcaccguggucaugaccgacggguccgccagcggcaaggccgacaccaagauccucuucaucgaggagggcaagaucgugcacacgagcacccuguccgggagcgcgcagcacguggaggagugcuccugcuacccccgcuaccccggcguccggugcgugugccgcgacaacuggaaggggagcaaccggccgaucguggacaucaacaucaaggacuacuccaucgucagcuccuacgugugcagcggccuggugggcgacacgccccgcaagaacgacuccagcuccagcucccacugccucgaccccaacaacgaggagggcgggcacggggucaagggcugggccuucgacgacgggaacgacguguggaugggccggaccaucagcgagaagcugcgccugggcuacgagaccuucaaggucaucgaggggugguccaaccccaacagcaagcuccagaccaaccgccaggugaucguggaccggggcaaccgguccggguacagcggcaucuucuccgucgagggcaagagcugcaucaaccgcugcuucuacguggagcugauccgggggcgcaaggaggagaccgaggugcuguggaccagcaacuccaucgucguguucugcggcacgagcgggaccuacggcaccggguccuggccggacggcgccgacaucaaccucaugcccaucuga

SEQ ID NO: 88563 - RNA, 1410 nt, Artificial Sequence; identical to SEQ ID NO: 88553
  derived and/or modified CDS sequence (opt1) from neuraminidase__InfluenzaA__AHL89405

SEQ ID NO: 88564 - RNA, 1410 nt, Artificial Sequence
  derived and/or modified CDS sequence (opt1) from neuraminidase__InfluenzaA__AHL89417
augaaccccaaccagaagaucaucaccaucggcagcgugucccugaccaucagcacgaucugcuucuucaugcagaucgccauccucaucaccaccgucacccugcacuucaagcaguacgaguucaacuccccgcccaacaaccaggugaugcugugcgagcccacgaucaucgagcgcaacaucaccgagaucguguaccucaccaacaccacgaucgagaaggagaucugccccaagcuggccgaguaccggaacuggagcaagccgcagugcgacaucaccggguucgcgcccuucuccaaggacaacagcauccgccuguccgccggcggggacaucugggucacccgggagcccuacgugagcugcgaccccgacaagugcuaccaguucgcccucggccaggggaccacgcugaacaacgugcacuccaacgacaccguccacgaccgcaccccguaccggacccugcucaugaacgagcugggcgugcccuuccaccugggcacgaagcaggucugcaucgccuggagcuccagcuccugccacgacgggaaggccuggcuccacgugugcgugaccggcgacgacaagaacgcgaccgccagcuucaucuacaacgggcgccugguggacuccgucgugagcugguccaaggacauccugcggacccaggagagcgagugcgugugcaucaacggcacgugcaccgucgugaugaccgacggguccgccagcggcaaggccgacaccaagauccucuucaucgaggagggcaagaucgugcacacgagcacccuguccgggagcgcgcagcacgucgaggagugcuccugcuacccccgcuaccccggcgugcggugcgugugccgcgacaacuggaaggggagcaaccggccgaucgucgacaucgacaucaagaacuacuccaucgugagcuccuacgugugcagcggccuggucggcgacacgccccgcaagaccgacuccagcuccagcucccacugccucgaccccaacaacgaggagggcgggcacggggugaagggcugggccuucgacgacgggaacgacgucuggaugggccggaccaucagcgagaagcugcgccugggcuacgagaccuucaaggugaucgaggggugguccaaccccaacagcaagcuccagaucaaccgccaggugaucgucgaccggggcaaccgguccggguacagcggcaucuucuccguggagggcaagagcugcaucaaccgcugcuucuacguggagcugauccgggggcgcaaggaggagaccgagguccuguggaccagcaacuccaucgugguguucugcggcacgagcgggaccuacggcaccggguccuggccggacggcgccgacaucaaccucaugcccaucuga

SEQ ID NO: 88565 - RNA, 1410 nt, Artificial Sequence; identical to SEQ ID NO: 79731
  derived and/or modified CDS sequence (opt1) from neuraminidase__InfluenzaA__AHL89429

SEQ ID NO: 88566 - RNA, 1410 nt, Artificial Sequence; identical to SEQ ID NO: 78736
  derived and/or modified CDS sequence (opt1) from neuraminidase__InfluenzaA__AHL89441

SEQ ID NO: 88567 - RNA, 1410 nt, Artificial Sequence; identical to SEQ ID NO: 78736
  derived and/or modified CDS sequence (opt1) from neuraminidase__InfluenzaA__AHL89453

SEQ ID NO: 88568 - RNA, 1410 nt, Artificial Sequence
  derived and/or modified CDS sequence (opt1) from neuraminidase__InfluenzaA__AHL89465
augaaccccaaccagaagaucaucaccaucggcagcgugucccugaccaucagcacgaucugcuucuucaugcagaucgccauccucaucaccaccgucacccugcacuucaagcaguacgaguucaacuccccgcccaacaaccaggugaugcugugcgagcccacgaucaucgagcgcaacaucaccgagaucguguaccucaccaacaucaccaucgagaaggagaagugccccaagcuggccgaguaccggaacuggagcaagccgcagugcaacaucacgggguucgcgcccuucuccaaggacaacagcauccgccuguccgccggcggggacaucugggucacccgggagcccuacgugagcugcgaccccgaccgcugcuaccaguucgcccucggccaggggaccacccugaacaacgugcacuccaacgacacgguccacgaccggaccccguaccgcacccugcucaugaacgagcugggcgugcccuuccaccugggcaccaagcaggucugcaucgccuggagcuccagcuccugccacgacgggaaggccuggcuccacgugugcgugacgggcgacgacaagaacgcgaccgccagcuucaucuacaacgggcggcugguggacuccaucgucagcugguccaaggagauccugcgcacccaggagagcgagugcgugugcaucaacgggaccugcacgguggucaugaccgacggguccgccagcggcaaggccgacaccaagauccucuucaucgaggagggcaagaucgugcacaccagcacgcuguccgggagcgcgcagcacguggaggagugcuccugcuacccccgguaccccggcguccgcugcgugugccgggacaacuggaaggggagcaaccgcccgaucguggacaucaacaucaaggacuacuccaucgucagcuccuacgugugcagcggccuggugggcgacacgccccggaagaacgacuccagcuccagcucccacugccucgaccccaacaacgaggagggcggccacggggucaagggcugggccuucgacgacgggaacgacguguggaugggccgcaccaucagcgagaagcugcggcugggcuacgagaccuucaaggucaucgaggggugguccaaccccaacagcaagcuccagaccaaccgccaggugaucguggaccggggcaaccgcuccggguacagcggcaucuucuccgucgagggcaagagcugcaucaaccggugcuucuacguggagcugauccgcgggcggaaggaggagaccgaggugcuguggaccagcaacuccaucgucguguucugcggcaccagcgggacguacggcaccggguccuggccggacggcgccgacaucaaccucaugcccaucuga

SEQ ID NO: 88569 - RNA, 1410 nt, Artificial Sequence; identical to SEQ ID NO: 88543
  derived and/or modified CDS sequence (opt1) from neuraminidase__InfluenzaA__AHL89477

SEQ ID NO: 88570 - RNA, 1410 nt, Artificial Sequence
  derived and/or modified CDS sequence (opt1) from neuraminidase__InfluenzaA__AHL89489
augaaccccaaccagaagaucaucaccaucggcagcgugucccugaccaucagcacgaucugcuucuucaugcagaucgccauccucaucaccaccgucacccugcacuucaagcaguacgaguucaacuccccgcccaacaaccaggugaugcugugcgagcccacgaucaucgagcgcaacaucaccgagaucguguaccucaccaacaccacgaucgagaaggagaucugccccaagcuggccgaguaccggaacuggagcaagccgcagugcuccaucaccggguucgcgcccuucagcaaggacaacuccauccgccugagcgccggcggggacaucugggucacccgggagcccuacguguccugcgaccccgacaagugcuaccaguucgcccucggccaggggaccacgcugaacaacgugcacagcaacgacaccguccacgaccgcaccccguaccggacccugcucaugaacgagcugggcgugcccuuccaccugggcacgaagcaggucugcaucgccugguccagcuccagcugccacgacgggaaggccuggcuccacgugugcgugaccggcgacgacaagaacgcgaccgccuccuucaucuacaacgggcgccugguggacagcaucgucuccuggagcaaggagauccugcggacccaggaguccgagugcgugugcaucaacggcacgugcaccguggucaugaccgacgggagcgccagcggcaaggccgacaccaagauccucuucaucgaggagggcaagaucgugcacacguccacccugagcggguccgcgcagcacguggaggagugcagcugcuacccccgcuaccccggcguccggugcgugugccgcgacaacuggaagggguccaaccggccgaucguggacaucaacaucaaggacuacagcaucgucuccagcuacgugugcuccggccuggugggcgacacgccccgcaagaacgaccggagcuccagcucccacugccucgaccccaacaacgaggagggcgggcacggggucaagggcugggccuucgacgacgggaacgacguguggaugggccgcaccaucagcgagaagucccggagcggcuacgagaccuucaaggucaucgaggggugguccaacccccacagcaagcugcagaucaaccgccaggugaucguggaccggggcaaccgcuccggguacagcggcaucuucagcgucgaggggaaguccugcaucaaccggugcuucuacguggagcugauccgcggccggaaggaggagaccgaggugcucuggaccagcaacuccaucgucguguucugcggcaccagcgggacguacggcaccggguccuggccggacggcgccgacaucaaccugaugcccaucuga

SEQ ID NO: 88571 - RNA, 1410 nt, Artificial Sequence; identical to SEQ ID NO: 79731
  derived and/or modified CDS sequence (opt1) from neuraminidase__InfluenzaA__AHL89501

SEQ ID NO: 88572 - RNA, 1410 nt, Artificial Sequence; identical to SEQ ID NO: 79731
  derived and/or modified CDS sequence (opt1) from neuraminidase__InfluenzaA__AHL89513

SEQ ID NO: 88573 - RNA, 1410 nt, Artificial Sequence; identical to SEQ ID NO: 79731
  derived and/or modified CDS sequence (opt1) from neuraminidase__InfluenzaA__AHL89525

SEQ ID NO: 88574 - RNA, 1410 nt, Artificial Sequence; identical to SEQ ID NO: 79731
  derived and/or modified CDS sequence (opt1) from neuraminidase__InfluenzaA__AHL89537

SEQ ID NO: 88575 - RNA, 1413 nt, Artificial Sequence
  derived and/or modified CDS sequence (opt1) from neuraminidase__InfluenzaA__AHL89549
augaaccccaaccagaagaucaucaccaucggcagcaucuccaucgccaucgggaucaucagccugaugcuccagaucggcaacaucaucuccaucugggccagccacuccauccagaccgggagccagaaccacacgggcaucugcaaccagcgcaucaucaccuacgagaacuccaccugggugaaccacaccuacgucaacaucaacaacacgaacgugguggcggggaaggacaagaccagcgucacccuggccggcaacuccagccugugcuccaucagcggcugggccaucuacaccaaggacaacuccauccggaucgggagcaagggcgacguguucgugauccgcgagccguucaucuccugcagccaccucgagugccggacguucuuccugacccagggggcccugcucaacgacaagcacuccaacggcaccgucaaggaccgcagccccuaccgggcccugauguccugcccccugggggaggcgcccagcccguacaacagcaaguucgaguccguggccuggagcgccuccgccugccacgacggcaugggcuggcucaccaucgggaucagcggccccgacaacggggcgguggccguccugaaguacaacggcaucaucacggagaccaucaaguccuggaagaagcgcauccugcggacccaggagagcgagugcgugugcgugaacggcuccugcuucaccaucaugacggacgggcccagcaacggcgccgccuccuacaagaucuucaagaucgagaaggggaaggucaccaagagcaucgagcucaacgcccccaacuuccacuacgaggagugcuccugcuacccggacaccggcaccgugaugugcgugugccgcgacaacuggcacgggagcaaccggcccugggucuccuucaaccagcaccuggacuaccagaucggcuacaucugcagcggcguguucggggacaacccccgccccaaggacggcaagggguccugcaacccggugacggucgacggcgcggacggggugaagggcuucagcuacaaguacggcaacgggguguggaucggccggaccaaguccaaccgccugcggaagggguucgagaugaucugggaccccaacggcuggaccgacaccgacagcgacuucuccgucaagcaggacgugguggccaucacggacuggagcggguacagcggcuccuucguccagcaccccgagcucaccggccuggacugcauccgccccugcuucuggguggagcugguccgggggcucccgcgcgagaacaccaccaucuggacgagcggcuccagcaucuccuucugcgggguggacagcgacaccgccaacugguccuggcccgacggcgccgagcugcccuucaccaucgacaaguga

SEQ ID NO: 88576 - RNA, 1413 nt, Artificial Sequence; identical to SEQ ID NO: 80054
  derived and/or modified CDS sequence (opt1) from neuraminidase__InfluenzaA__AHL89561

SEQ ID NO: 88577 - RNA, 1413 nt, Artificial Sequence; identical to SEQ ID NO: 80054
  derived and/or modified CDS sequence (opt1) from neuraminidase__InfluenzaA__AHL89573

SEQ ID NO: 88578 - RNA, 1413 nt, Artificial Sequence; identical to SEQ ID NO: 80089
  derived and/or modified CDS sequence (opt1) from neuraminidase__InfluenzaA__AHL89585

SEQ ID NO: 88579 - RNA, 1413 nt, Artificial Sequence
  derived and/or modified CDS sequence (opt1) from neuraminidase__InfluenzaA__AHL89597
augaaccccaaccagaagaucaucaccaucggcagcaucuccaucgccaucgggaucaucagccugaugcuccagaucggcaacaucaucuccaucugggccagccacuccauccagaccgggagccagaaccacacgggcaucugcaaccagcgcaucaucaccuacgagaacuccaccugggugaaccacaccuacgucaacaucaacaacacgaacgugguggcggggaaggacaagaccagcgucacccuggccggcaacuccagccugugcuccaucagcggcugggccaucuacaccaaggacaacuccauccggaucgggagcaagggcgacguguucgugauccgcgagccguucaucuccugcagccaccucgagugccggacguucuuccugacccagggggcccugcucaacgacaagcacuccaacggcaccguccgcgaccggagccccuaccgcgcccugauguccugcccccugggggaggcgcccagcccguacaacagcaaguucgaguccguggccuggagcgccuccgccugccacgacggcaugggcuggcucaccaucgggaucagcggccccgacaacggggcgguggccguccugaaguacaacggcaucaucacggagaccaucaaguccuggaagaagcggauccugcgcacccaggagagcgagugcgugugcgugaacggcuccugcuucaccaucaugacggacgggcccagcaacggcgccgccuccuacaagaucuucaagaucgagaaggggaaggucaccaagagcaucgagcucaacgcccccaacuuccacuacgaggagugcuccugcuacccggacaccggcaccgugaugugcgugugccgggacaacuggcacgggagcaaccgccccugggucuccuucaaccagaaccuggacuaccaggugggcuacaucugcagcggcguguucggggacaacccccggcccaaggacggcaagggguccugcaacccgaugacggucgacggcgcggacggggugaagggcuucagcuacaaguacggcaacgggguguggaucggccgcaccaaguccaacaagcugcggaagggguucgagaugaucugggaccccaacggcuggaccgacaccgacagcgacuucuccgucaagcaggacgugguggccaucacggacuggagcggguacagcggcuccuucguccagcaccccgagcucaccggccuggacugcauccgccccugcuucuggguggagcugguccgggggcucccgcgcgagaacaccaccaucuggacgagcggcuccagcaucuccuucugcgggguggacagcgacaccgccaacugguccuggcccgacggcgccgagcugcccuucaccaucgacaaguga

SEQ ID NO: 88580 - RNA, 1413 nt, Artificial Sequence; identical to SEQ ID NO: 80089
  derived and/or modified CDS sequence (opt1) from neuraminidase__InfluenzaA__AHL89609

SEQ ID NO: 88581 - RNA, 1413 nt, Artificial Sequence
  derived and/or modified CDS sequence (opt1) from neuraminidase__InfluenzaA__AHL89621
augaaccccaaccagaagaucaucaccaucggcagcaucuccaucgccaucgggaucaucagccugaugcuccagaucggcaacaucaucuccaucugggccagccacuccauccagaccgggagccagaaccacacgggcaucugcaaccagcgcaucaucaccuacgagaacuccaccugggugaaccacaccuacgucagcaucaacaacacgaacgugguggcggggaaggacaagaccuccgucacccuggccggcaacagcucccugugcagcaucuccggcugggccaucuacaccaaggacaacagcauccggaucggguccaagggcgacguguucgugauccgcgagccguucaucagcugcucccaccucgagugccggacguucuuccugacccagggggcccugcucaacgacaagcacagcaacggcaccgucaaggaccgcucccccuaccgggcccugaugagcugcccccugggggaggcgcccagcccguacaacuccaaguucgagagcguggccugguccgccagcgccugccacgacggcaugggcuggcucaccaucgggaucuccggccccgacaacggggcgguggccguccugaaguacaacggcaucaucacggagaccaucaagagcuggaagaagcgcauccugcggacccaggaguccgagugcgugugcgugaacggcagcugcuucaccaucaugacggacgggcccuccaacggcgccgccagcuacaagaucuucaagaucgagaaggggaaggucaccaaguccaucgagcucaacgcccccaacuuccacuacgaggagugcagcugcuacccggacaccggcaccgugaugugcgugugccgcgacaacuggcacggguccaaccggcccugggucagcuucaaccagaaccuggacuaccagaucggcuacaucugcuccggcguguucggggacaacccccgccccaaggacggcaaggggagcugcaacccggugacggucgacggcgcggacggggugaagggcuucuccuacaaguacggcaacgggguguggaucggccggaccaagagcaaccgccaccggaagggguucgagaugaucugggaccccaacggcuggaccgacaccgacuccgacuucagcgucaagcaggacgugguggccaucacggacuggagcggguacuccggcagcuucguccagcaccccgagcugaccggccucgacugcauccgccccugcuucuggguggagcugguccgggggcugccgcgcgagaacaccaccaucuggacguccggcagcuccaucagcuucugcgggguggacuccgacaccgccaacuggagcuggcccgacggcgccgagcuccccuucaccaucgacaaguga

SEQ ID NO: 88582 - RNA, 1413 nt, Artificial Sequence; identical to SEQ ID NO: 80080
  derived and/or modified CDS sequence (opt1) from neuraminidase__InfluenzaA__AHL89633

SEQ ID NO: 88583 - RNA, 1413 nt, Artificial Sequence; identical to SEQ ID NO: 80089
  derived and/or modified CDS sequence (opt1) from neuraminidase__InfluenzaA__AHL89645

SEQ ID NO: 88584 - RNA, 1413 nt, Artificial Sequence; identical to SEQ ID NO: 80054
  derived and/or modified CDS sequence (opt1) from neuraminidase__InfluenzaA__AHL89657

SEQ ID NO: 88585 - RNA, 1413 nt, Artificial Sequence
  derived and/or modified CDS sequence (opt1) from neuraminidase__InfluenzaA__AHL89669
augaaccccaaccagaagaucaucaccaucggcagcaucuccaucgccaucgggaucaucagccugaugcuccagaucggcaacaucaucuccaucugggccagccacuccauccagaccgggagccagaaccacacgggcaucugcaaccagcgcaucaucaccuacgagaacuccaccugggugaaccacaccuacgucaacaucaacaacacgaacgugguggcggggaaggacaagaccagcgucacccuggccggcaacuccagccugugcuccaucagcggcugggccaucuacaccaaggacaacuccauccggaucgggagcaagggcgacguguucgugauccgcgagccguucaucuccugcagccaccucgagugccggacguucuuccugacccagggggcccugcucaacgacaagcacuccaacggcaccgucaaggaccgcagccccuaccgggcccugauguccugcccccugggggaggcgcccagcccguacaacagcaaguucgaguccguggccuggagcgccuccgccugccacgacggcaugggcuggcucaccaucgggaucagcggccccgacaacggggcgguggccguccugaaguacaacggcaucaucacggagaccaucaaguccuggaagaagcgcauccugcggacccaggagagcgagugcgugugcgugaacggcuccugcuucaccaucaugacggacgggcccagcaacggcgccgccuccuacaagaucuucaagaucgagaaggggaaggucaccaagagcaucgagcucaacgcccccaacuuccacuacgaggagugcuccugcuacccggacaccggcaccgugaugugcgugugccgcgacaacuggcacgggagcaaccggcccugggucuccuucaaccagaaccuggacuaccaggugggcuacaucugcagcggcguguucggggacaacccccgccccaaggacggcaagggguccugcaacccgaugacggucgacggcgcggacggggugaagggcuucagcuacaaguacggcaacgggguguggaucggccggaccaaguccaacgagcugcgcaagggguucgagaugaucugggaccccaacggcuggaccgacaccgacagcgacuucuccgucaagcaggacgugguggccaucacggacuggagcggguacagcggcuccuucguccagcaccccgagcucaccggccuggacugcauccggcccugcuucuggguggagcugguccgcgggcucccgcgggagaacaccaccaucuggacgagcggcuccagcaucuccuucugcgggguggacagcgacaccgccaacugguccuggcccgacggcgccgagcugcccuucaccaucgacaaguga

SEQ ID NO: 88586 - RNA, 1413 nt, Artificial Sequence
  derived and/or modified CDS sequence (opt1) from neuraminidase__InfluenzaA__AHL89681
augaaccccaaccagaagaucaucaccaucggcagcaucuccaucgccaucgggaucaucagccugaugcuccagaucggcaacaucaucuccaucugggccagccacuccauccagaccgggagccagaaccacacgggcaucugcaaccagcgcaucaucaccuacgagaacuccaccugggugaaccacaccuacgucaacaucaacaacacgaacgugguggcggggaaggacaagaccagcgucacccuggccggcaacuccagccugugcuccaucagcggcugggccaucuacaccaaggacaacuccauccggaucgggagcaagggcgacguguucgugauccgcgagccguucaucuccugcagccaccucgagugccggacguucuuccugacccagggggcccugcucaacgacaagcacuccaacggcaccgucaaggaccgcagccccuaccgggcccugauguccugcccccugggggaggcgcccagcccguacaacagcaaguucgaguccguggccuggagcgccuccgccugccacgacggcaugggcuggcucaccaucgggaucagcggccccgacaacggggcgguggccguccugaaguacaacggcaucaucacggagaccaucaaguccuggaagaagcgcauccugcggacccaggagagcgagugcgugugcgugaacggcuccugcuucaccaucaugacggacgggcccagcaacggcgccgccuccuacaagaucuucaagaucgagaaggggaagaucaccaagagcaucgagcucaacgcccccaacuuccacuacgaggagugcuccugcuacccggacaccggcaccgucaugugcgugugccgcgacaacuggcacgggagcaaccggcccuggguguccuucaaccagaaccuggacuaccaggucggcuacaucugcagcggcguguucggggacaacccccgccccaaggacggcaagggguccugcaacccgaugacgguggacggcgcggacggggucaagggcuucagcuacaaguacggcaacgggguguggaucggccggaccaaguccaacaagcugcgcaagggguucgagaugaucugggaccccaacggcuggaccgacaccgacagcgacuucuccgugaagcaggacgucguggccaucacggacuggagcggguacagcggcuccuucgugcagcaccccgagcucaccggccuggacugcauccggcccugcuucugggucgagcuggugcgcgggcucccgcgggagaacgccaccaucuggaccagcggcuccagcaucuccuucugcggggucgacagcgacacggccaacugguccuggcccgacggcgccgagcugcccuucaccaucgacaaguga

SEQ ID NO: 88587 - RNA, 1413 nt, Artificial Sequence
  derived and/or modified CDS sequence (opt1) from neuraminidase__InfluenzaA__AHL89693
augaaccccaaccagaagaucaucaccaucggcagcaucuccaucgccaucgggaucaucagccugaugcuccagaucggcaacaucaucuccaucugggccagccacuccauccagaccgggagccagaaccacacgggcaucugcaaccagcgcaucaucaccuacgagaacuccaccugggugaaccacaccuacgucaacaucaacaacacgaacgugguggcggggaaggacaagaccagcgucacccuggccggcaacuccagccugugcuccaucagcggcugggccaucuacaccaaggacaacuccauccggaucgggagcaagggcgacguguucgugauccgcgagccguucaucuccugcagccaccucgagugccggacguucuuccugacccagggggcccugcucaacgacaagcacuccaacggcaccgucaaggaccgcagccccuaccgggcccugauguccugcccccugggggaggcgcccagcccguacaacagcaaguucgaguccguggccuggagcgccuccgccugccacgacggcaugggcuggcucaccaucgggaucagcggccccgacaacggggcgguggccguccugaaguacaagggcaucaucacgggcaccaucaaguccuggcgcaagcagauccugcggacccaggagagcgagugcgugugcaugaacggguccugcuucaccaucaugacggacggccccagcaacggggccgccuccuacaagaucuucaagaucgagaagggcaaggugaccaagagcaucgagcucaacgcccccaacuuccacuacgaggagugcuccugcuacccggacaccgggaucgucaugugcgugugccgcgacaacuggcacggcagcaaccggcccuggguguccuucaaccagaaccuggacuaccagaucggcuacaucugcagcggggucuucggcgacaacccccgccccaaggacggggagggcuccugcaacccggugaccguggacggggcggacggcgucaagggcuucagcuacaaguacgacgacgggguguggaucggccggacgaaguccaaccgccugcggaagggguucgagaugaucugggaccccaacggcuggaccaacaccgacagcgacuucuccgugaagcaggacgucguggccaucaccgacuggagcggguacagcggcuccuucgugcagcaccccgagcucacgggccuggacugcauccgccccugcuucugggucgagcuggugcgggggcucccgcgcgagaacaccaccaucuggaccagcggcuccagcaucuccuucugcggggucaacagcgacacggccaacugguccuggcccgacggcgccgagcugcccuucaccaucgacaaguga

SEQ ID NO: 88588 - RNA, 1413 nt, Artificial Sequence
  derived and/or modified CDS sequence (opt1) from neuraminidase__InfluenzaA__AHL89705
augaaccccaaccagaagaucaucaccaucggcagcaucuccaucgccaucgggaucaucagccugaugcuccagaucggcaacaucaucuccaucugggccagccacuccauccagaacgggagccagaaccacaccggcaucugcaaccagcgcaucaucacguacgagaacuccaccugggugaaccacaccuacgucagcaucaacaacaccaacgugguggcggggaaggacaagacguccgucacccuggccggcaacagcucccugugcagcaucuccggcugggccaucuacaccaaggacaacagcauccggaucggguccaagggcgacguguucgugauccgcgagccguucaucagcugcucccaccucgagugccggaccuucuuccugacgcagggggcccugcucaacgacaagcacagcaacggcaccgucaaggaccgcucccccuaccgggcccugaugagcugcccccugggggaggcgcccagcccguacaacuccaaguucgagagcguggccugguccgccagcgccugccacgacggcaugggcuggcucaccaucgggaucuccggccccgacaacggggcgguggccguccugaaguacaacggcaucaucaccgagacgaucaagagcuggaagaagcgcauccugcggacccaggaguccgagugcgugugcgugaacggcagcugcuucaccaucaugaccgacgggcccuccaacggcgccgccagcuacaagaucuucaagaucgagaaggggaaggucacgaaguccaucgagcucaacgcccccaacuuccacuacgaggagugcagcugcuacccggacaccggcaccgugaugugcgugugccgcgacaacuggcacggguccaaccggcccugggucagcuucaaccagaaccuggacuaccagaucggcuacaucugcuccggcguguucggggacaacccccgccccaaggacggcaaggggagcugcaacccggugaccgucgacggcgcggacggggugaagggcuucuccuacaaguacggcaacgggguguggaucggccggaccaagagcaaccgccugcggaagggguucgagaugaucugggaccccaacggcuggacggacaccgacuccgacuucagcgucaagcaggacgugguggccaucaccgacuggagcggguacuccggcagcuucguccagcaccccgagcucacgggccuggacugcauccgccccugcuucuggguggagcugguccgggggcucccgcgcgagaacaccaccaucuggaccuccggcagcuccaucagcuucugcgggguggacuccgacacggccaacuggagcuggcccgacggcgccgagcugcccuucaccaucgacaaguga

SEQ ID NO: 88589 - RNA, 1413 nt, Artificial Sequence; identical to SEQ ID NO: 80054
  derived and/or modified CDS sequence (opt1) from neuraminidase__InfluenzaA__AHL89717

SEQ ID NO: 88590 - RNA, 1413 nt, Artificial Sequence; identical to SEQ ID NO: 80054
  derived and/or modified CDS sequence (opt1) from neuraminidase__InfluenzaA__AHL89729

SEQ ID NO: 88591 - RNA, 1413 nt, Artificial Sequence
  derived and/or modified CDS sequence (opt1) from neuraminidase__InfluenzaA__AHL89753
augaaccccaaccagaagaucaucaccaucggcagcaucuccaucgccaucgggaucaucagccugaugcuccagaucggcaacaucaucuccaucugggccagccacuccauccagaccgggagccagaaccacacgggcaucugcaaccagcgcaucaucaccuacgagaacuccaccugggugaaccacaccuacgucagcaucaacaacacgaacgugguggcggggaacgacaagaccuccgucacccuggccggcaacagcucccugugcagcaucuccggcugggccaucuacaccaaggacaacagcauccggaucggguccaagggcgacguguucgugauccgcgagccguucaucagcugcucccaccucgagugccggacguucuuccugacccagggggcccugcucaacgacaagcacagcaacggcaccgucaaggaccgcucccccuaccgggcccugaugagcugcccccugggggaggcgcccagcccguacaacuccaaguucgagagcguggccugguccgccagcgccugccacgacggcaugggcuggcucaccaucgggaucuccggccccgacaacggggcgguggccguccugaaguacaacggcaucaucacggagaccaucaagagcuggaagaagcgcauccugcggacccaggaguccgagugcgugugcgugaacggcagcugcuucaccaucaugacggacgggcccuccaacggcgccgccagcuacaagaucuucaagaucgagaaggggaaggucaccaaguccaucgagcucaacgcccccaacuuccacuacgaggagugcagcugcuacccggacaccggcaccgugaugugcgugugccgcgacaacuggcacggguccaaccggcccugggucagcuucaaccagaaccuggacuaccagaucggcuacaucugcuccggcguguucggggacaacccccgccccaaggacggcaaggggagcugcaacccggugacggucgacggcgcggacggggugaagggcuucuccuacaaguacggcaacgggguguggaucggccggaccaagagcaaccgccugcggaagggguucgagaugaucugggaccccaacggcuggaccgacaccgacuccgacuucagcgucaagcaggacgugguggccaucacggacuggagcggguacuccggcagcuucguccagcaccccgagcucaccggccuggacugcauccgccccugcuucuggguggagcugguccgggggcucccgcgcgagaacaccaccaucuggacguccggcagcuccaucagcuucugcgggguggacuccgacaccgccaacuggagcuggcccgacggcgccgagcugcccuucaccaucgacaaguga

SEQ ID NO: 88592 - RNA, 1413 nt, Artificial Sequence; identical to SEQ ID NO: 80054
  derived and/or modified CDS sequence (opt1) from neuraminidase__InfluenzaA__AHL89765

SEQ ID NO: 88593 - RNA, 1413 nt, Artificial Sequence; identical to SEQ ID NO: 80095
  derived and/or modified CDS sequence (opt1) from neuraminidase__InfluenzaA__AHL89777

SEQ ID NO: 88594 - RNA, 1413 nt, Artificial Sequence; identical to SEQ ID NO: 80054
  derived and/or modified CDS sequence (opt1) from neuraminidase__InfluenzaA__AHL89789

SEQ ID NO: 88595 - RNA, 1413 nt, Artificial Sequence
  derived and/or modified CDS sequence (opt1) from neuraminidase__InfluenzaA__AHL89801
augaaccccaaccagaagaucaucaccaucggcagcaucuccaucgccaucgggaucaucagccugaugcuccagaucggcaacaucaucuccaucugggccagccacuccauccagaccgggagccagaaccacacgggcaucugcaaccagcgcaucaucaccuacgagaacuccaccugggugaaccacaccuacgucaacaucaacaacacgaacgugguggcggggaaggacaagaccagcgucgcccuggccggcaacuccagccugugcuccaucagcggcugggccaucuacaccaaggacaacuccauccggaucgggagcaagggcgacguguucgugauccgcgagccguucaucuccugcagccaccucgagugccggaccuucuuccugacgcagggggcccugcucaacgacaagcacuccaacggcaccgucaaggaccgcagccccuaccgggcgcugauguccugcccccugggggaggcccccagcccguacaacagcaaguucgaguccguggccuggagcgccuccgcgugccacgacggcaugggcuggcucaccaucgggaucagcggccccgacaacggggccguggccguccugaaguacaacggcaucaucaccgagacgaucaaguccuggaagaagcgcauccugcggacccaggagagcgagugcgugugcgugaacggcuccugcuucaccaucaugaccgacgggcccagcaacggcgccgccuccuacaagaucuucaagaucgagaaggggaaggucaccaagagcaucgagcucaacgcgcccaacuuccacuacgaggagugcuccugcuacccggacacgggcaccgugaugugcgugugccgcgacaacuggcacgggagcaaccggcccugggucuccuucaaccagaaccuggacuaccagaucggcuacaucugcagcggcguguucggggacaacccccgccccaaggacggcaagggguccugcaacccggugaccgucgacggcgccgacggggugaagggcuucagcuacaaguacggcaacgggguguggaucggccggacgaaguccaaccgccugcggaagggguucgagaugaucugggaccccaacggcuggaccaacaccgacagcgacuucuccgucaagcaggacgugguggccaucaccgacuggagcggguacagcggcuccuucguccagcaccccgagcucacgggccuggacugcauccgccccugcuucuggguggagcugguccgggggcucccgcgcgagaacaccaccaucuggaccagcggcuccagcaucuccuucugcgggguggacagcgacacggccaacugguccuggcccgacggcgccgagcugcccuucaccaucgacaaguga

SEQ ID NO: 88596 - RNA, 1413 nt, Artificial Sequence
  derived and/or modified CDS sequence (opt1) from neuraminidase__InfluenzaA__AHL89813
augaaccccaaccagaagaucaucaccaucggcagcaucuccaucgccaucgggaucaucagccugaugcuccagaucggcaacaucaucuccaucugggccagccacuccauccagaccgggagccagaaccacacgggcaucugcaaccagcgcaucaucaccuacgagaacuccaccugggugaaccacaccuacgucaacaucaacaacacgaacgugguggcggggaaggacaagaccagcgucacccuggccggcaacuccagccugugcuccaucagcggcugggccaucuacaccaaggacaacuccauccggaucgggagcaagggcgacguguucgugauccgcgagccguucaucuccugcagccaccucgagugccggacguucuuccugacccagggggcccugcucaacgacaagcacuccaacggcaccgucaaggaccgcagccccuaccgggcccugauguccugcccccugggggaggcgcccagcccguacaacagcaaguucgaguccguggccuggagcgccuccgccugccacgacggcaugggcuggcucaccaucgggaucagcggccccgacaacggggcgguggccguccugaaguacaacggcaucaucacggagaccaucaaguccuggaagaagcgcauccugcggacccaggagagcgagugcgugugcgugaacggcuccugcuucaccaucaugacggacgggcccagcaacggcgccgccuccuacaagaucuucaagaucgagaaggggaaggucaccaagagcaucgagcucaacgcccccaacuuccacuacgaggagugcuccugcuacccggacaccggcaccgugaugugcgugugccgcgacaacuggcacgggagcaaccggcccugggucuccuucaaccagaaccuggacuaccaggugggcuacaucugcagcggcguguucggggacaacccccgccccaaggacggcaagggguccugcaacccgaugacggcggacggcgccgacggggucaagggcuucagcuacaaguacggcaacgggguguggaucggccggaccaaguccaacaagcugcgcaagggguucgagaugaucugggaccccaacggcuggaccgacaccgacagcgacuucuccgugaagcaggacgucguggccaucacggacuggagcggguacagcggcuccuucgugcagcaccccgagcucaccggccuggacugcauccggcccugcuucugggucgagcuggugcgcgggcucccgcgggagaacgccaccaucuggaccagcggcuccagcaucuccuucugcggggucgacagcgacacggccaacugguccuggcccgacggcgcggagcugcccuucaccaucgacaaguga

SEQ ID NO: 88597 - RNA, 1413 nt, Artificial Sequence; identical to SEQ ID NO: 80095
  derived and/or modified CDS sequence (opt1) from neuraminidase__InfluenzaA__AHL89825

SEQ ID NO: 88598 - RNA, 1413 nt, Artificial Sequence; identical to SEQ ID NO: 80054
  derived and/or modified CDS sequence (opt1) from neuraminidase__InfluenzaA__AHL89837

SEQ ID NO: 88599 - RNA, 1413 nt, Artificial Sequence
  derived and/or modified CDS sequence (opt1) from neuraminidase__InfluenzaA__AHL89849
augaaccccaaccagaagaucaucaccaucggcagcaucuccaucgccaucgggaucaucagccugaugcuccagaucggcaacaucaucuccaucugggccagccacuccauccagaccgggagccagaaccacacgggcaucugcaaccagcgcaucaucaccuacgagaacuccaccugggugaaccacaccuacgucuacaucaacaacacgaacgugguggcggggaaggacaagaccagcgucacccuggccggcaacuccagccugugcuccaucagcggcugggccaucuacaccaaggacaacuccauccggaucgggagcaagggcgacguguucgugauccgcgagccguucaucuccugcagccaccucgagugccggacguucuuccugacccagggggcccugcucaacgacaagcacuccaacggcaccgucaaggaccgcagccccuaccgggcccugauguccugcccccugggggaggcgcccagcccguacaacagcaaguucgaguccguggccuggagcgccuccgccugccacgacggcaugggcuggcucaccaucgggaucagcggccccgacaacggggcgguggccguccugaaguacaacggcaucaucacggagaccaucaaguccuggaagaagcgcauccugcggacccaggagagcgagugcgugugcgugaacggcuccugcuucaccaucaugacggacgggcccagcaacggcgccgccuccuacaagaucuucaagaucgagaaggggauggucaccaagagcaucgagcucaacgcccccaacuuccacuacgaggagugcuccugcuacccggacaccggcaccgugaugugcgugugccgcgacaacuggcacgggagcaaccggcccugggucuccuucaaccagaaccuggacuaccagaucggcuacaucugcagcggcguguucggggacaacccccgccccaaggacggcaagggguccugcaacccggugacggucgacggcgcggacggggugaagggcuucagcuacaaguacggcaacgggguguggaucggccggaccaaguccaaccgccugcggaagggguucgagaugaucugggaccccaacggcuggaccaacaccgacagcgacuucuccgucaagcaggacgugguggccaucacggacuggagcggguacagcggcuccuucguccagcaccccgagcucaccggccuggacugcauccgccccugcuucuggguggagcugguccgggggcucccgcgcgagaacaccaccaucuggacgagcggcuccagcaucuccuucugcgggguggacagcgacaccgccaacugguccuggcccgacggcgccgagcugcccuucaccaucgacaaguga

SEQ ID NO: 88600 - RNA, 1410 nt, Artificial Sequence; identical to SEQ ID NO: 80090
  derived and/or modified CDS sequence (opt1) from neuraminidase__InfluenzaA__AHL89861

SEQ ID NO: 88601 - RNA, 1410 nt, Artificial Sequence
  derived and/or modified CDS sequence (opt1) from neuraminidase__InfluenzaA__AHL89873
augaaccccaaccagaagaucaucaccaucggcagcgugucccugaccaucagcacgaucugcuucuucaugcagaccgccauccucaucaccaccgucacgcugcacuucaagcaguacgaguucaacuccccgcccaacaaccaggugaugcugugcgagcccaccaucaucgagcgcaacaucaccgagaucguguaccucaccaacacgaccaucgagaaggagaucugccccaagcuggccgaguaccggaacuggagcaagccgcagugcgacaucaccggguucgcgcccuucuccaaggacaacagcauccgccuguccgccggcggggacaucugggucacccgggagcccuacgugagcugcgaccccgacaagugcuaccaguucgcccucggccaggggacgacccugaacaacgugcacuccaacgacaccguccgcgaccggaccccguaccgcacgcugcucaugaacgagcugggcgugcccuuccaccugggcaccaagcaggucugcaucgccuggagcuccagcuccugccacgacgggaaggccuggcuccacgugugcaucaccggcgacgacaagaacgcgaccgccagcuucaucuacaacgggcggcugguggacuccaucgugagcugguccaaggagauccugcgcacgcaggagagcgagugcgucugcaucaacgggaccugcaccguggugaugaccgacggguccgccagcggcaaggccgacacgaagauccucuucaucgaggagggcaagaucguccacaccagcacccuguccgggagcgcgcagcacguggaggagugcuccugcuacccccgguaccccggcgugcgcugcgucugccgggacaacuggaaggggagcaaccgcccgaucguggacaucaacaucaaggaccacuccaucgugagcuccuacgucugcagcggccuggugggcgacacgccccggaagaacgacuccagcuccagcucccacugccucgaccccaacaacgaggagggcggccacggggugaagggcugggccuucgacgacgggaacgacgucuggaugggccgcaccaucagcgagaagucccggcugggcuacgagaccuucaaggugaucgagggguggagcaaccccaaguccaagcugcagaucaaccgccaggucaucguggacggcgggaaccggagcggcuacuccgggaucuucagcguggagggcaagagcugcaucaaccgcugcuucuacgucgagcucauccggggccgcaaggaggagaccgaggugcuguggaccuccaacagcaucguggucuucugcgggacguccggcaccuacgggaccggcagcuggccggacggggccgacaucaaccugaugcccaucuga

SEQ ID NO: 88602 - RNA, 1410 nt, Artificial Sequence; identical to SEQ ID NO: 80767
  derived and/or modified CDS sequence (opt1) from neuraminidase__InfluenzaA__AHL89885

SEQ ID NO: 88603 - RNA, 1410 nt, Artificial Sequence
  derived and/or modified CDS sequence (opt1) from neuraminidase__InfluenzaA__AHL89897
augaaccccaaccagaagaucaucaccaucggcagcgugucccugaccaucagcacgaucugcuucuucaugcagaucgccauccucaucaccaccgucacccugcacuucaagcaguacgaguucaacuccccgcccaacaaccaggugaugcugugcgagcccacgaucaucgagcgcaacaucaccgagaucguguaccucaccaacaccacgaucgagaaggagaucugccccaagcuggccgaguaccggaacuggagcaagccgcagugcgacaucaccggguucgcgcccuucuccaaggacaacagcauccgccuguccgccggcggggacaucugggucacccgggagcccuacgugagcugcgaccccgacaagugcuaccaguucgcccucggccaggggaccacgcugaacaacgugcacuccaacgacaccguccgcgaccggaccccguaccgcacccugcucaugaacgagcugggcgugcccuuccaccugggcacgaagcaggucugcaucgccuggagcuccagcuccugccacgacgggaaggccuggcuccacgugugcaucaccggcgacgacaagaacgcgaccgccagcuucaucuacaacgggcggcugguggacuccaucgugagcugguccaaggagauccugcgcacccaggagagcgagugcgucugcaucaacggcacgugcaccguggugaugaccgacggguccgccagcggcaaggccgacaccaagauccucuucaucgaggagggcaagaucguccacacgagcacccuguccgggagcgcgcagcacguggaggagugcuccugcuacccccgguaccccggcgugcgcugcgucugccgggacaacuggaaggggagcaaccgcccgaucguggacaucaacaucaaggaccacuccaucgugagcuccuacgucugcagcggccuggugggcgacacgccccggaagaacgacuccagcuccagcucccacugccucgaccccaacaacgaggagggcgggcacggggugaagggcugggccuucgacgacgggaacgacgucuggaugggccgcaccaucagcgagaagucccggcugggcuacgagaccuucaaggugaucgagggguggagcaaccccaaguccaagcugcagaccaaccgccaggucaucguggaccggggcaaccgcagcggguacuccggcaucuucagcguggagggcaagagcugcaucaaccggugcuucuacgucgagcucauccgcgggcggaaggaggagaccgaggugcuguggaccuccaacagcaucguggucuucugcggcacguccgggaccuacggcaccgggagcuggccggacggcgccgacaucaaccugaugcccaucuga

SEQ ID NO: 88604 - RNA, 1410 nt, Artificial Sequence; identical to SEQ ID NO: 80426
  derived and/or modified CDS sequence (opt1) from neuraminidase__InfluenzaA__AHL89909

SEQ ID NO: 88605 - RNA, 1410 nt, Artificial Sequence; identical to SEQ ID NO: 80065
  derived and/or modified CDS sequence (opt1) from neuraminidase__InfluenzaA__AHL89921

SEQ ID NO: 88606 - RNA, 1410 nt, Artificial Sequence; identical to SEQ ID NO: 80426
  derived and/or modified CDS sequence (opt1) from neuraminidase__InfluenzaA__AHL89933

SEQ ID NO: 88607 - RNA, 1410 nt, Artificial Sequence; identical to SEQ ID NO: 80065
  derived and/or modified CDS sequence (opt1) from neuraminidase__InfluenzaA__AHL89945

SEQ ID NO: 88608 - RNA, 1410 nt, Artificial Sequence
  derived and/or modified CDS sequence (opt1) from neuraminidase__InfluenzaA__AHL89957
augaaccccaaccagaagaucaucaccaucggcagcgugucccugaccaucagcacgaucugcuucuucaugcagaucgccauccucaucaccaccgucacccugcacuucaagcaguacgaguucaacuccccgcccaacaaccaggugaugcugugcgagcccacgaucaucgagcgcaacaucaccgagaucguguaccucaccaacaccacgaucgagaaggagaucugccccaagcuggccgaguaccggaacuggagcaagccgcagugcgacaucaccggguucgcgcccuucuccaaggacaacagcauccgccuguccgccggcggggacaucugggucacccgggagcccuacgugagcugcgaccccgacaagugcuaccaguucgcccucggccaggggaccacgcugaacaacgugcacuccaacgacaccguccgcgaccggaccccguaccgcacccugcucaugaacgagcugggcgugcccuuccaccugggcacgaagcaggucugcaucgccuggagcuccagcuccugccacgacgggaaggccuggcuccacgugugcaucaccggcgacgacaagaacgcgaccgccagcuucaucuacaacgggcggcugguggacuccaucgugagcugguccaaggagauccugcgcacccaggagagcgagugcgucugcaucaacggcacgugcaccguggugaugaccgacggguccgccagcggcaaggccgacaccaagauccucuucaucaaggagggcaagaucguccacacgagcacccuguccgggagcgcgcagcacguggaggagugcuccugcuacccccgguaccccggcgugcgcugcgucugccgggacaacuggaaggggagcaaccgcccgaucguggacaucaacaucaaggaccacuccaucgugagcuccuacgucugcagcggccuggugggcgacacgccccggaagaacgacuccagcuccagcucccacugccucgaccccaacaacgaggagggcgggcacggggugaagggcugggccuucgacgacgggaacgacgucuggaugggccgcaccaucagcgagaagucccggcugggcuacgagaccuucaaggugaucgagggguggagcaaccccaaguccaagcugcagaucaaccgccaggucaucguggaccggggcaaccgcagcggguacuccggcaucuucagcguggagggcaagagcugcaucaaccggugcuucuacgucgagcucauccgcgggcggaaggaggagaccgaggugcuguggaccuccaacagcaucguggucuucugcggcaccuccgggacguacggcaccgggagcuggccggacggcgccgacaucaaccugaugcccaucuga

SEQ ID NO: 88609 - RNA, 1410 nt, Artificial Sequence; identical to SEQ ID NO: 79908
  derived and/or modified CDS sequence (opt1) from neuraminidase__InfluenzaA__AHL89969

SEQ ID NO: 88610 - RNA, 1410 nt, Artificial Sequence; identical to SEQ ID NO: 79908
  derived and/or modified CDS sequence (opt1) from neuraminidase__InfluenzaA__AHL89981

SEQ ID NO: 88611 - RNA, 1410 nt, Artificial Sequence
  derived and/or modified CDS sequence (opt1) from neuraminidase__InfluenzaA__AHL89993
augaaccccaaccagaagaucaucaccaucggcagcgugucccugagcaucuccaccaucugcuucuucaugcagaucgccauccucaucacgaccgucacccugcacuucaagcaguacgaguucaacagcccgcccaacaaccaggugaugcugugcgagcccaccaucaucgagcgcaacaucacggagaucguguaccucaccaacaccaccaucgagaaggagaucugccccaagcuggccgaguaccggaacugguccaagccgcagugcgacaucacgggguucgcgcccuucagcaaggacaacuccauccgccugagcgccggcggggacaucugggucacccgggagcccuacguguccugcgaccccgacaagugcuaccaguucgcccucggccaggggaccacccugaacaacgugcacagcaacgacacgguccgcgaccggaccccguaccgcacccugcucaugaacgagcugggcgugcccuuccaccugggcaccaagcaggucugcaucgccugguccagcuccagcugccacgacgggaaggccuggcuccacgugugcaucacgggcgacgacaagaacgcgaccgccuccuucaucuacaacgggcggcugguggacagcaucguguccuggagcaaggagauccugcgcacccaggaguccgagugcgucugcaucaacgggaccugcacgcucgugaugaccgacgggagcgccagcggcaaggccgacaccaagauccuguucaucgaggagggcaagaucgugcacaccuccacgcugagcggguccgcgcagcacgucgaggagugcagcugcuacccccgguaccccggcgugcgcugcgugugccgggacaacuggaagggguccaaccgcccgaucgucgacaucaacaucaaggaccacagcaucguguccagcuacgugugcuccggccucgucggcgacacgccccggaagaacgacagcuccagcuccagccacugccuggaccccaacaacgaggagggcggccacggggugaagggcugggccuucgacgacgggaacgacguguggaugggccgcaccaucuccgagaagucccggcugggcuacgagaccuucaaggucaucgagggguggagcaaccccaagagcaagcuccagaucaaccgccaggugaucgucgaccggggcaaccgcuccggguacagcggcaucuucagcguggaggggaaguccugcaucaaccggugcuucuacguggagcugauccgcggccggaaggaggagaccgagguccuguggaccagcaacuccaucgugguguucugcggcaccagcgggaccuacggcacgggguccuggccggacggcgccgacaucaaccucaugcccaucuga

SEQ ID NO: 88612 - RNA, 1410 nt, Artificial Sequence
  derived and/or modified CDS sequence (opt1) from neuraminidase__InfluenzaA__AHL90005
augaaccccaaccagaagaucaucaccaucggcagcgugucccugaccaucagcacgaucugcuucuucaugcagaucgccauccucaucaccaccgucacccugcacuucaagcaguacgaguucuccagcccgcccaacaaccaggugaugcugugcgagcccacgaucaucaagcgcaacaucaccgagaucguguaccucaccaacaccacgaucgagaaggagaucugccccaagcuggccgaguaccggaacugguccaagccgcagugcgacaucaccggguucgcgcccuucagcaaggacaacuccauccgccugagcgccggcggggacaucugggucacccgggagcccuacguguccugcgaccccgacaagugcuaccaguucgcccucggccaggggaccacgcugaacaacgugcacagcaacgacaccguccacgaccgcaccccguaccggacccugcucaugaacgagcugggcgugcccuuccaccugggcacgaagcaggucugcaucgccugguccagcuccagcugccacgacgggaaggccuggcuccacgugugcgugaccggcgacgacaagaacgcgaccgccuccuucaucuacaacgggcgccugguggacagcaucgucuccuggagcaaggagauccugcggacccaggaguccgagugcgugugcaucaacggcacgugcaccguggucaugaccgacgggagcgccagcggcaaggccgacaccaagauccucuucaucgaggagggcaagaucgugcacacguccacccugagcggguccgcgcagcacguggaggagugcagcugcuacccccgcuaccccggcguccggugcgugugccgcgacaacuggaagggguccaaccggccgaucguggacaucaacaucaaggacuacagcaucgucucccgcuacgugugcagcggccuggugggcgacacgccccggaagaacgacuccuacagcuccagccacugccucgaccccaacaacgaggagggcgggcacggggucaagggcugggccuucgacgacgggaacgacguguggaugggccgcaccaucuccgagaagucccggagcggcuacgagaccuucaaggucaucgagggguggagcaaccccaacuccaagcugcagaucaaccgccaggugaucguggaccggggcaaccgcagcggguacuccggcaucuucagcgucgagggcaagagcugcaucaaccggugcuucuacguggagcugauccgcgggcggaaggaggagaccgaggugcucuggaccuccaacagcaucgucguguucugcggcaccuccgggacguacggcaccgggagcuggccggacggcgccgacaucaaccugaugcccaucuga

SEQ ID NO: 88613 - RNA, 1410 nt, Artificial Sequence; identical to SEQ ID NO: 80114
  derived and/or modified CDS sequence (opt1) from neuraminidase__InfluenzaA__AHL90017

SEQ ID NO: 88614 - RNA, 1410 nt, Artificial Sequence; identical to SEQ ID NO: 80065
  derived and/or modified CDS sequence (opt1) from neuraminidase__InfluenzaA__AHL90029

SEQ ID NO: 88615 - RNA, 1410 nt, Artificial Sequence; identical to SEQ ID NO: 80081
  derived and/or modified CDS sequence (opt1) from neuraminidase__InfluenzaA__AHL90041

SEQ ID NO: 88616 - RNA, 1410 nt, Artificial Sequence; identical to SEQ ID NO: 80081
  derived and/or modified CDS sequence (opt1) from neuraminidase__InfluenzaA__AHL90053

SEQ ID NO: 88617 - RNA, 1410 nt, Artificial Sequence; identical to SEQ ID NO: 86346
  derived and/or modified CDS sequence (opt1) from neuraminidase__InfluenzaA__AHL90065

SEQ ID NO: 88618 - RNA, 1410 nt, Artificial Sequence; identical to SEQ ID NO: 88608
  derived and/or modified CDS sequence (opt1) from neuraminidase__InfluenzaA__AHL90077

SEQ ID NO: 88619 - RNA, 1410 nt, Artificial Sequence; identical to SEQ ID NO: 80090
  derived and/or modified CDS sequence (opt1) from neuraminidase__InfluenzaA__AHL90089

SEQ ID NO: 88620 - RNA, 1410 nt, Artificial Sequence; identical to SEQ ID NO: 80767
  derived and/or modified CDS sequence (opt1) from neuraminidase__InfluenzaA__AHL90101

SEQ ID NO: 88621 - RNA, 1410 nt, Artificial Sequence; identical to SEQ ID NO: 80065
  derived and/or modified CDS sequence (opt1) from neuraminidase__InfluenzaA__AHL90113

SEQ ID NO: 88622 - RNA, 1413 nt, Artificial Sequence; identical to SEQ ID NO: 80656
  derived and/or modified CDS sequence (opt1) from neuraminidase__InfluenzaA__AHL90125

SEQ ID NO: 88623 - RNA, 1413 nt, Artificial Sequence
  derived and/or modified CDS sequence (opt1) from neuraminidase__InfluenzaA__AHL90136
augaaccccaaccagaagaucaucaccaucggcagcaucuccaucgccaucgggaucaucagccugaugcuccagaucggcaacaucaucuccaucugggccagccacuccauccagaccgggagccagaacaacacgggcaucugcaaccagcgcaucaucaccuacgagaacuccaccugggugaaccacaccuacgucaacaucaacaacacgaacgugguggcgggggaggacaagaccagcgucacccuggccggcaacuccagccugugcuccaucagcggcugggccaucuacaccaaggacaacuccauccggaucgggagcaagggcgacguguucgugauccgcgagccguucaucuccugcagccaccucgagugccggacguucuuccugacccagggggcccugcucaacgacaagcacuccaacggcaccgucaaggaccgcagccccuaccgggcccugauguccugcccccugggggaggcgcccagcccguacaacagcaaguucgaguccguggccuggagcgccuccgccugccacgacggcaugggcuggcucaccaucgggaucagcggccccgacaacggggcgguggccguccugaaguacaacggcaucaucacgggcaccaucaaguccuggaagaagcagauccugcgcacccaggagagcgagugcgugugcaugaacggguccugcuucaccaucaugacggacggccccagcaacaaggccgccuccuacaagaucuucaagaucgagaaggggaaggugaccaagagcaucgagcucaacgcccccaacuucuacuacgaggagugcuccugcuacccggacagcggcauggucaugugcgugugccgggacaacuggcacggguccaaccgccccugggugagcuucaaccagaaccuggacuaccagaucggcuacaucugcuccggcgucuucggggacaacccccggcccgaggacggcgaggggagcugcaacccggugaccguggacggcgcgaacggggucaagggcuucuccuacaaguacggcaacgggguguggaucggccgcaccaagagcaaccggcugcgcaagggguucgagaugaucugggaccccaacggcuggacgaacaccgacuccgacuucagcgugaagcaggacgucguggccaucaccgacuggagcggguacuccggcagcuucgugcagcaccccgagcucaccggccuggacugcauccggcccugcuucugggucgagcuggugcgcgggcucccgcgggagaacacgaccaucuggaccuccggcagcuccaucagcuucugcggggucaacuccgacaccgccaacuggagcuggcccgacggcgccgagcugcccuucacgaucgacaaguga

SEQ ID NO: 88624 - RNA, 1413 nt, Artificial Sequence; identical to SEQ ID NO: 80656
  derived and/or modified CDS sequence (opt1) from neuraminidase__InfluenzaA__AHL90160

SEQ ID NO: 88625 - RNA, 1413 nt, Artificial Sequence
  derived and/or modified CDS sequence (opt1) from neuraminidase__InfluenzaA__AHL90172
augaaccccaaccagaagaucaucaccaucggcagcaucuccaucgccaucgggaucaucagccugaugcuccagaucggcaacaucaucuccaucugggccagccacuccauccagaccgggagccagaacaacacgggcaucugcaaccagcgcaucaucaccuacgagaacuccaccugggugaaccacaccuacgucaacaucaacaacacgaacgugguggcgggggaggacaagaccagcgucacccuggccggcaacuccagccugugcuccaucagcggcugggccaucuacaccaaggacaacuccauccggaucgggagcaagggcgacguguucgugauccgcgagccguucaucuccugcagccaccucgagugccggacguucuuccugacccagggggcccugcucaacgacaagcacuccaacggcaccgucaaggaccgcagccccuaccgggcccugauguccugcccccugggggaggcgcccagcccguacaacagcaaguucgaguccguggccuggagcgccuccgccugccacgacggcaugggcuggcucaccaucgggaucagcggccccgacaacggggcgguggccguccugaaguacaacggcaucaucacgggcaccaucaaguccuggaagaagcagauccugcgcacccaggagagcgagugcgugugcaugaacggguccugcuucaccaucaugacggacggccccagcaacaaggccgccuccuacaagaucuucaagaucgagaaggggaaggugaccaagagcaucgagcucaacgcccccaacuuccacuacgaggagugcuccugcuacccggacaccggcaucgucaugugcgugugccgggacaacuggcacgggagcaaccgccccuggguguccuucaaccagaaccuggacuaccagaucggcuacaucugcagcggcgucuucggggacaacccccggcccgaggacggcgaggggaacugcaacccggugaccguggacggcgcgaacggggucaagggcuucuccuacaaguacggcaacgggguguggaucggccgcaccaagagcaaccggcugcgcaagggguucgagaugaucugggaccccaacggcuggacgaacaccgacuccgacuucagcgugaagcaggacgucguggccaucaccgacugguccggguacagcggcagcuucgugcagcaccccgagcucacgggccuggacugcauccggcccugcuucugggucgagcuggugcgcgggcucccgcgggagaacaccaccaucuggaccuccggcagcuccaucagcuucugcggggucaacuccgacacggccaacuggagcuggcccgacggcgccgagcugcccuucaccaucgacaaguga

SEQ ID NO: 88626 - RNA, 1413 nt, Artificial Sequence; identical to SEQ ID NO: 80656
  derived and/or modified CDS sequence (opt1) from neuraminidase__InfluenzaA__AHL90184

SEQ ID NO: 88627 - RNA, 1413 nt, Artificial Sequence; identical to SEQ ID NO: 83954
  derived and/or modified CDS sequence (opt1) from neuraminidase__InfluenzaA__AHL90196

SEQ ID NO: 88628 - RNA, 1413 nt, Artificial Sequence; identical to SEQ ID NO: 80656
  derived and/or modified CDS sequence (opt1) from neuraminidase__InfluenzaA__AHL90220

SEQ ID NO: 88629 - RNA, 1413 nt, Artificial Sequence
  derived and/or modified CDS sequence (opt1) from neuraminidase__InfluenzaA__AHL90232
augaaccccaaccagaagaucaucaccaucggcagcaucuccaucgccaucgggaucaucagccugaugcuccagaucggcaacaucaucuccaucugggccagccacuccauccagaccgggagccagaacaacacgggcaucugcaaccagcgcaucaucaccuacgagaacuccaccugggugaaccacaccuacgucaacaucaacaacacgaacgugguggcgggggaggacaagaccagcgucacccuggccggcaacuccagccugugcuccaucagcggcugggccaucuacaccaaggacaacuccauccggaucgggagcaagggcgacguguucgugauccgcgagccguucaucuccugcagccaccucgagugccggacguucuuccugacccagggggcccugcucaacgacaagcacuccaacggcaccgucaaggaccgcagccccuaccgggcccugauguccugcccccugggggaggcgcccagcccguacaacagcaaguucgaguccguggccuggagcgccuccgccugccacgacggcaugggcuggcucaccaucgggaucagcggccccgacaacggggcgguggccguccugaaguacaacggcaucaucacgggcaccaucaaguccuggaagaagcagauccugcgcacccaggagagcgagugcgugugcaugaacggguccugcuucaccaucaugacggacggccccagcaacaaggccgccuccuacaagaucuucaagaucgagaaggggaaggugaccaagagcaucgagcucaacgcccccaacuuccacuacgaggagugcuccugcuacccggacaccggcaucgucaugugcgugugccgggacaacuggcacgggagcaaccgccccuggguguccuucaaccagaaccuggacuaccagaucggcuacaucugcagcggcgucuucggggacaacccccggcccgaggacggcgagggguccugcaacccggugaccgugaacggcgcgaacggggucaagggcuucagcuacaaguacgacaacggcguguggaucgggcgcacgaaguccaaccggcugcgcaagggcuucgagaugaucugggaccccaacggguggaccaacaccgacagcgacuucuccgugaagcaggacgucguggccaucaccgacuggagcggcuacagcggguccuucgugcagcaccccgagcucacgggccuggacugcauccggcccugcuucugggucgagcuggugcgcggccucccgcgggagaacaccaccaucuggaccagcggguccagcaucuccuucugcggcgucaacagcgacacggccaacugguccuggcccgacggggccgagcugcccuucaccaucgacaaguga

SEQ ID NO: 88630 - RNA, 1413 nt, Artificial Sequence
  derived and/or modified CDS sequence (opt1) from neuraminidase__InfluenzaA__AHL90244
augaaccccaaccagaagaucaucaccaucggcagcaucuccaucgccaucgggaucaucagccugaugcuccagaucggcaacaucaucuccaucugggccagccacuccauccagaccgggagccagaacaacacgggcaucugcaaccagcgcaucaucaccuacgagaacuccaccugggugaaccacaccuacgucaacaucaacaacacgaacgugguggcgggggaggacaagaccagcgucacccuggccggcaacuccagccugugcuccaucagcggcugggccaucuacaccaaggacaacuccauccggaucgggagcaagggcgacguguucgugauccgcgagccguucaucuccugcagccaccucgagugccggacguucuuccugacccagggggcccugcucaacgacaagcacuccaacggcaccgucaaggaccgcagccccuaccgggcccugauguccugcccccugggggaggcgcccagcccguacaacagcaaguucgaguccguggccuggagcgccuccgccugccacgacggcaugggcuggcucaccaucgggaucagcggccccgacaacggggcgguggccguccugaaguacaacggcaucaucacgggcaccaucaaguccuggaagaagcagauccugcgcacccaggagagcgagugcgugugcaugaacggguccugcuucaccaucaugacggacggccccagcaacaaggccgccuccuacaagaucuucaagaucgagaaggggaaggugaccaagagcaucgagcucaacgcccccaacuuccacuacgaggagugcuccugcuacccggacaccggcaucgucaugugcgugugccgggacaacuggcacgggagcaaccgccccuggguguccuucaaccagaaccuggacuaccagaucggcuacaucugcagcggcgucuucggggacaacccccggcccgaggacggcgagggguccugcaacccgaugaccguggacggcgcgaacggggugaagggcuucagcuacaaguacgacaacggcgucuggaucgggcgcacgaaguccaaccggcugcgcaagggcuucgagaugaucugggaccccaacggguggaccaacaccgacagcgacuucuccgugaagcaggacguggucgccaucaccgacuggagcggcuacagcggguccuucgugcagcaccccgagcucacgggccuggacugcauccggcccugcuucuggguggagcugguccgcggccucccgcgggagaacaccaccaucuggaccagcggguccagcaucuccuucugcggcgugaacagcgacacggccuccuggagcuggcccgacggggccgagcugcccuucaccaucgacaaguga

SEQ ID NO: 88631 - RNA, 1413 nt, Artificial Sequence; identical to SEQ ID NO: 81485
  derived and/or modified CDS sequence (opt1) from neuraminidase__InfluenzaA__AHL90256

SEQ ID NO: 88632 - RNA, 1413 nt, Artificial Sequence
  derived and/or modified CDS sequence (opt1) from neuraminidase__InfluenzaA__AHL90268
augaaccccaaccagaagaucaucaccaucggcagcaucuccaucgccaucgggaucaucagccugaugcuccagaucggcaacaucaucuccaucugggccagccacuccauccagaccgggagccagaacaacacgggcaucugcaaccagcgcaucaucaccuacgagaacuccaccugggugaaccacaccuacgucaacaucaacaacacgaacgugguggcgggggaggacaagaccagcgucacccuggccggcaacuccagccugugcuccaucagcggcugggccaucuacaccaaggacaacuccauccggaucgggagcaagggcgacguguucgugauccgcgagccguucaucuccugcagccaccucgagugccggacguucuuccugacccagggggcccugcucaacgacaagcacuccaacggcaccgucaaggaccgcagccccuaccgggcccugauguccugcccccugggggaggcgcccagcccguacaacagcaaguucgaguccguggccuggagcgccuccgccugccacgacggcaugggcuggcucaccaucgggaucagcggccccgacaacggggcgguggccguccugaaguacaacggcaucaucacgggcaccaucaaguccuggaagaagcagauccugcgcacccaggagagcgagugcgugugcaugaacggguccugcuucaccaucaugacggacggccccagcaacaaggccgccuccuacaagaucuucaagaucgagaaggggaaggugaccaagagcaucgagcucaacgcccccaacuuccacuacgaggagugcuccugcuacccggacaccagcaucgucaugugcgugugccgggacaacuggcacggcuccaaccgccccugggugagcuucaaccagaaccuggacuaccagaucggguacaucugcuccggcgucuucggcgacaacccccggcccgaggacggggagggcagcugcaacccggugaccguggacggggcgaacggcgucaagggguucuccuacaaguacgacaacggcguguggaucggccgcaccaagagcaaccggcugcgcaagggguucgagaugaucugggaccccaacggcuggacgaacaccgaccgggacuucuccgugaagcaggacgucguggccaucaccgacuggagcggguacagcggcuccuucgugcagcaccccgagcucacggggcuggacugcauccgccccugcuucugggucgagcuggugcggggccucccgcgcgagaacaccaccaucuggaccagcggcuccagcaucuccuucugcggggucaacagcgacacggccaacugguccuggcccgacggcgccgagcugcccuucaccaucgacaaguga

SEQ ID NO: 88633 - RNA, 1413 nt, Artificial Sequence; identical to SEQ ID NO: 81485
  derived and/or modified CDS sequence (opt1) from neuraminidase__InfluenzaA__AHL90280

SEQ ID NO: 88634 - RNA, 1413 nt, Artificial Sequence
  derived and/or modified CDS sequence (opt1) from neuraminidase__InfluenzaA__AHL90304
augaaccccaaccagaagaucaucaccaucggcagcaucuccaucgccaucgggaucaucagccugaugcuccagaucggcaacaucaucuccaucugggccagccacuccauccagaccgggagccagaacaacacggagaucugcaaccagcgcaucaucaccuacgagaacuccaccugggugaaccacaccuacgucaacaucaacaacacgaacgugguggcgggcgaggacaagaccagcgucacccuggccgggaacuccagccugugcuccaucagcggcugggccaucuacaccaaggacaacuccauccggaucggcagcaagggggacguguucgugauccgcgagccguucaucuccugcagccaccucgagugccggacguucuuccugacccagggcgcccugcucaacgacaagcacuccaacgggaccgucaaggaccgcagccccuaccgggcccugauguccugcccccugggcgaggcgcccagcccguacaacagcaaguucgaguccguggccuggagcgccuccgccugccacgacgggaugggcuggcucaccaucggcaucagcgggcccgacaacggcgcgguggccguccugaaguacaacgggaucaucacgggcaccaucaaguccuggaagaagcagauccugcgcacccaggagagcgagugcgugugcaugaacggcuccugcuucaccaucaugacggacgggcccagcaacaaggccgccuccuacaagaucuucaagaucgagaagggcaaggugaccaagagcaucgagcucaacgcccccaacuuccacuacgaggagugcuccugcuacccggacaccgggaucgucaugugcgugugccgggacaacuggcacggcagcaaccgccccuggguguccuucaaccagaaccuggacuaccagaucggguacaucugcagcggcgucuucggcgacaacccccggcccgaggacggggagggcuccugcaacccggugaccguggacggggcgaacggcgucaagggguucagcuacaaguacgacaacggcguguggaucggccgcacgaaguccaaccggcugcgcaagggguucgagaugaucugggaccccaacggcuggaccaacaccgacagcgacuucuccgugaagcaggacgucguggccaucaccgacuggagcggguacagcggcuccuucgugcagcaccccgagcucacggggcuggacugcauccggcccugcuucugggucgagcuggugcgcggccucccgcgggagaacaccaccaucuggaccagcggcuccagcaucuccuucugcggggucaacagcgacacggccaacugguccuggcccgacggcgccgagcugcccuucaccaucgacaaguga

SEQ ID NO: 88635 - RNA, 1413 nt, Artificial Sequence; identical to SEQ ID NO: 80656
  derived and/or modified CDS sequence (opt1) from neuraminidase__InfluenzaA__AHL90316

SEQ ID NO: 88636 - RNA, 1413 nt, Artificial Sequence
  derived and/or modified CDS sequence (opt1) from neuraminidase__InfluenzaA__AHL90328
augaaccccaacaagaagaucaucaccaucggcagcaucuccaucgccaucgggaucaucagccugaugcuccagaucggcaacaucaucuccaucugggccagccacuccauccagaccgggagccagaacaacacgggcaucugcaaccagcgcaucaucaccuacgagaacuccaccugggugaaccacaccuacgucaacaucaacaacacgaacgugguggcgggggaggacaagaccagcgucacccuggccggcaacuccagccugugcuccaucagcggcugggccaucuacaccaaggacaacuccauccggaucgggagcaagggcgacguguucgugauccgcgagccguucaucuccugcagccaccucgagugccggacguucuuccugacccagggggcccugcucaacgacaagcacuccaacggcaccgucaaggaccgcagccccuaccgggcccugauguccugcccccugggggaggcgcccagcccguacaacagcaaguucgaguccguggccuggagcgccuccgccugccacgacggcaugggcuggcucaccaucgggaucagcggccccgacaacggggcgguggccguccugaaguacaacggcaucaucacgggcaccaucaaguccuggaagaagcagauccugcgcacccaggagagcgagugcgugugcaugaacggguccugcuucaccaucaugacggacggccccagcaacaaggccgccuccuacaagaucuucaagaucgagaaggggaaggugaccaagagcaucgagcucaacgcccccaacuuccacuacgaggagugcuccugcuacccggacaccggcaucgucaugugcgugugccgggacaacuggcacgggagcaaccgccccuggguguccuucaaccagaaccuggacuaccagaucggcuacaucugcagcggcgucuucggggacaacccccggcccgaggacggcgagggguccugcaacccggugaccguggacggcgcgaacggggucaagggcuucagcuacaaguacgacaacggcguguggaucgggcgcacgaaguccaaccggcugcgcaagggcuucgagaugaucugggaccccaacggguggaccaacaccgacagcgacuucuccgugaagcaggacgucguggccgugaccgacuggagcggcuacagcggguccuucguccagcaccccgagcucacgggccuggacugcauccggcccugcuucuggguggagcugguccgcggccucccgcgggagaacaccaccaucuggaccagcggguccagcaucuccuucugcggcgugaacagcgacacggccaacugguccuggcccgacggggccgagcugcccuucaccaucgacaaguga

SEQ ID NO: 88637 - RNA, 1413 nt, Artificial Sequence; identical to SEQ ID NO: 80656
  derived and/or modified CDS sequence (opt1) from neuraminidase__InfluenzaA__AHL90340

SEQ ID NO: 88638 - RNA, 1413 nt, Artificial Sequence
  derived and/or modified CDS sequence (opt1) from neuraminidase__InfluenzaA__AHL90352
augaaccccaaccagaagaucaugaccaucggcagcaucuccaucgccaucgggaucaucagccugaugcuccagaucggcaacaucaucuccaucugggccagccacuccauccagaccgggagccagaacaacacgggcaucugcaaccagcgcaucaucaccuacgagaacuccaccugggugaaccacaccuacgucaacaucaacaacacgaacgugguggcgggggaggacaagaccagcgucacccuggccggcaacuccagccugugcuccaucagcggcugggccaucuacaccaaggacaacuccauccggaucgggagcaagggcgacguguucgugauccgcgagccguucaucuccugcagccaccucgagugccggacguucuuccugacccagggggcccugcucaacgacaagcacuccaacggcaccgucaaggaccgcagccccuaccgggcccugauguccugcccccugggggaggcgcccagcccguacaacagcaaguucgaguccguggccuggagcgccuccgccugccacgacggcaugggcuggcucaccaucgggaucagcggccccgacaacggggcgguggccguccugaaguacaacggcaucaucacgggcaccaucaaguccuggaagaagcagauccugcgcacccaggagagcgagugcgugugcaugaacggguccugcuucaccaucaugacggacggccccagcaacaaggccgccuccuacaagaucuucaagaucgagaaggggaaggugaccaagagcaucgagcucaacgcccccaacuuccacuacgaggagugcuccugcuacccggacaccggcaucgucaugugcgugugccgggacaacuggcacgggagcaaccgccccuggguguccuucaaccagaaccuggacuaccagaucggcuacaucugcagcggcgucuucggggacaacccccggcccgaggacggcgagggguccugcagcccggugaccguggacggcgcgaacggggucaagggcuucuccuacaaguacgacaacggcguguggaucgggcgcaccaagagcaaccggcugcgcaagggcuucgagaugaucugggaccccaacggguggacgaacaccgacuccgacuucagcgugaagcaggacgucguggccaucaccgacuggagcggcuacuccgggagcuucgugcagcaccccgagcucacgggccuggacugcauccggcccugcuucugggucgagcuggugcgcggcaugccgcgggagaacaccaccaucuggaccuccgggagcuccaucagcuucugcggcgucaacuccgacacggccaacuggagcuggcccgacggggccgagcuccccuucaccaucgacaaguga

SEQ ID NO: 88639 - RNA, 1413 nt, Artificial Sequence; identical to SEQ ID NO: 87485
  derived and/or modified CDS sequence (opt1) from neuraminidase__InfluenzaA__AHL90364

SEQ ID NO: 88640 - RNA, 1413 nt, Artificial Sequence; identical to SEQ ID NO: 81485
  derived and/or modified CDS sequence (opt1) from neuraminidase__InfluenzaA__AHL90376

SEQ ID NO: 88641 - RNA, 1410 nt, Artificial Sequence
  derived and/or modified CDS sequence (opt1) from neuraminidase__InfluenzaA__AHL90388
augaaccccaaccagaagaucaucaccaucggcagcgugucccugaucaucagcaccaucugcuucuucaugcagaucgccauccucaucacgaccgucacccugcacuucaagcaguacgaguucaacuccagcccgaacaaccaggugaugcugugcgagcccaccaucaucgagcgcaacaucacggagaucguguaccucaccaacaccaucaucgagaaggagaucugccccaagcuggccgaguaccggaacugguccaagccccagugcgacaucaccggguucgcgccguucagcaaggacaacuccauccgccugagcgccggcggggacaucugggucacgcgggagcccuacguguccugcgaccccgacaagugcuaccaguucgcccucggccaggggaccacccugaacaacgugcacagcaacaacaccguccgcgaccggacgcccuaccgcacccugcucaugaacgagcugggcgugccguuccaccugggcaccaagcaggucugcaucgccugguccagcuccagcugccacgacgggaaggccuggcuccacgugugcaucaccggcgacgacaagaacgcgacggccuccuucaucuacaacgggcggcugguggacagcaucguguccuggagcaaggagauccugcgcacccaggaguccgagugcgucugcaucaacgggaccugcaccguggugaugacggacgggagcgccagcggcaaggccgacaccaagauccucuucaucgaggagggcaagaucguccacaccuccacccugagcggguccgcgcagcacguggaggagugcagcugcuacccccgguaccccggcgugcgcugcgucugccgggacaacuggaagggguccaaccgccccaucguggacaucaacaucaaggaccacagcaucguguccagcuacgucugcuccggccuggugggcgacacgccgcggaagaacgacagcuccagcuccagccacugccucgaccccaacaacgaggagggcggccacggggugaagggcugggccuucgacgacgggaacgacgucuggaugggccgcaccaucuccgagaagucccggcugggcuacgagaccuucaaggugaucgagggguggagcaaccccaagagcaagcugcagaucaaccgccaggucaucguggaccggggcaaccgcuccggguacagcggcaucuucagcguggaggggaaguccugcaucaaccggugcuucuacgucgagcucauccgcggccggaaggaggagaccgaggugcuguggacgagcaacuccaucguggucuucugcggcaccagcgggaccuacggcaccggguccuggcccgacggcgccgacaucaaccugaugccgaucuga

SEQ ID NO: 88642 - RNA, 1410 nt, Artificial Sequence; identical to SEQ ID NO: 80536
  derived and/or modified CDS sequence (opt1) from neuraminidase__InfluenzaA__AHL90400

SEQ ID NO: 88643 - RNA, 1410 nt, Artificial Sequence; identical to SEQ ID NO: 80536
  derived and/or modified CDS sequence (opt1) from neuraminidase__InfluenzaA__AHL90413

SEQ ID NO: 88644 - RNA, 1410 nt, Artificial Sequence
  derived and/or modified CDS sequence (opt1) from neuraminidase__InfluenzaA__AHL90425
augaaccccaaccagaagaucaucaccaucggcagcgugucccugaccaucagcacgaucugcuucuucaugcagaccgccauccucaucaccaccgucacgcugcacuucaagcaguacgaguucaacuccccgcccaacaaccaggugaugcugugcgagcccaccaucaucgagcgcaacaucaccgagaucguguaccucaccaacacgaccaucgagaaggagaucugccccaagcuggccgaguaccggaacuggagcaagccgcagugcgacaucaccggguucgcgcccuucuccaaggacaacagcauccgccuguccgccggcggggacaucugggucacccgggagcccuacgugagcugcgaccccgacaagugcuaccaguucgcccucggccaggggacgacccugaacaacgugcacuccaacgacaccguccacgaccgcaccccguaccggacgcugcucaugaacgagcugggcgugcccuuccaccugggcaccaagcaggucugcaucgccuggagcuccagcuccugccacgacgggaaggccuggcuccacgugugcaucaccggcgacgacaagaacgcgaccgccagcuucaucuacaacgggcgccugguggacuccaucgugagcugguccaaggagauccugcggacgcaggagagcgagugcgucugcaucaacgggaccugcaccguggugaugaccgacggguccgccagcggcaaggccgacacgaagauccucuucaucgaggagggcaagaucguccacaccagcacccuguccgggagcgcgcagcacguggaggagugcuccugcuacccccgcuaccccggcgugcggugcgucugccgcgacaacuggaaggggagcaaccggccgaucguggacaucaacaucaaggaccacuccaucgugagcuccuacgucugcagcggccuggugggcgacacgccccgcaagaacgacuccagcuccagcucccacugccucgaccccaacaacgaggagggcggccacggggugaagggcugggccuucgacgacgggaacgacgucuggaugggccggaccaucagcgagaagucccgccugggcuacgagaccuucaaggugaucgagggguggagcaaccccaaguccaagcugcagaucaaccggcaggucaucguggaccgcggcgaccggagcggguacuccggcaucuucagcguggagggcaagagcugcaucaaccgcugcuucuacgucgagcucauccgggggcgcaaggaggagaccgaggugcuguggaccuccaacagcaucguggucuucugcggcacguccgggaccuacggcaccgggagcuggccggacggcgccgacaucaaccugaugcccaucuga

SEQ ID NO: 88645 - RNA, 1410 nt, Artificial Sequence; identical to SEQ ID NO: 80623
  derived and/or modified CDS sequence (opt1) from neuraminidase__InfluenzaA__AHL90437

SEQ ID NO: 88646 - RNA, 1410 nt, Artificial Sequence; identical to SEQ ID NO: 80536
  derived and/or modified CDS sequence (opt1) from neuraminidase__InfluenzaA__AHL90449

SEQ ID NO: 88647 - RNA, 1410 nt, Artificial Sequence; identical to SEQ ID NO: 80536
  derived and/or modified CDS sequence (opt1) from neuraminidase__InfluenzaA__AHL90461

SEQ ID NO: 88648 - RNA, 1410 nt, Artificial Sequence; identical to SEQ ID NO: 80536
  derived and/or modified CDS sequence (opt1) from neuraminidase__InfluenzaA__AHL90473

SEQ ID NO: 88649 - RNA, 1410 nt, Artificial Sequence; identical to SEQ ID NO: 80536
  derived and/or modified CDS sequence (opt1) from neuraminidase__InfluenzaA__AHL90485

SEQ ID NO: 88650 - RNA, 1410 nt, Artificial Sequence; identical to SEQ ID NO: 80627
  derived and/or modified CDS sequence (opt1) from neuraminidase__InfluenzaA__AHL90497

SEQ ID NO: 88651 - RNA, 1410 nt, Artificial Sequence; identical to SEQ ID NO: 80627
  derived and/or modified CDS sequence (opt1) from neuraminidase__InfluenzaA__AHL90509

SEQ ID NO: 88652 - RNA, 1410 nt, Artificial Sequence
  derived and/or modified CDS sequence (opt1) from neuraminidase__InfluenzaA__AHL90521
augaaccccaaccagaagaucaucaccaucggcagcgugucccugaccaucagcacgaucugcuucuuccuccagaucgccauccugaucaccaccgucacccugcacuucaagcaguacgaguucaacuccccgcccaacaaccaggugaugcucugcgagcccacgaucaucgagcgcaacaucaccgagaucguguaccugaccaacaccacgaucgagaaggagaucugccccaagcuggccgaguaccggaacuggagcaagccgcagugcgacaucaccggguucgcgcccuucuccaaggacaacagcauccgccucuccgccggcggggacaucugggucacccgggagcccuacgugagcugcgaccccgacaagugcuaccaguucgcccugggccaggggaccacgcugaacaacgugcacuccaacaacaccguccgcgaccggaccccguaccgcacccuccugaugaacgagcugggcgugcccuuccaccucggcacgaagcaggucugcaucgccuggagcuccagcuccugccacgacgggaaggccuggcugcacgugugcaucaccggcgacgacaagaacgcgaccgccagcuucaucuacaacgggcggcugguggacuccaucgugagcugguccaaggagauccuccgcacccaggagagcgagugcgucugcaucaacggcacgugcaccguggugaugaccgacggguccgccagcggcaaggccgacaccaagauccuguucaucgaggagggcaagaucguccacacgagcacccuguccgggagcgcgcagcacguggaggagugcuccugcuacccccgguaccccggcgugcgcugcgucugccgggacaacuggaaggggagcaaccgcccgaucguggacaucaacaucaaggaccacuccaucgugagcuccuacgucugcagcggccucgugggcgacacgccccggaagaacgacuccagcuccagcucccacugccuggaccccaacaacgaggagggcgggcacggggugaagggcugggccuucgacgacgggaacgacgucuggaugggccgcaccaucagcgagaagucccggcugggcuacgagaccuucaaggugaucgagggguggagcaaccccaaguccaagcuccagaucaaccgccaggucaucguggaccggggcaaccgcagcggguacuccggcaucuucagcguggagggcaagagcugcaucaaccggugcuucuacgucgagcugauccgcgggcggaaggaggagaccgaggugcuguggaccuccaacagcaucguggucuucugcggcaccuccgggacguacggcaccgggagcuggccggacggcgccgacaucaaccucaugcccaucuga

SEQ ID NO: 88653 - RNA, 1410 nt, Artificial Sequence
  derived and/or modified CDS sequence (opt1) from neuraminidase__InfluenzaA__AHL90533
augaaccccaaccagaagaucaucaccaucggcagcgugucccugaccaucagcacgaucugcuucuucaugcagaccgccauccucaucaccaccgucacgcugcacuucaagcaguacgaguucaacuccccgcccaacaaccaggugaugcugugcgagcccaccaucaucgagcgcaacaucaccgagaucguguaccucaccaacacgaccaucgagaaggagaucugccccaagcuggccgaguaccggaacuggagcaagccgcagugcgacaucaccggguucgcgcccuucuccaaggacaacagcauccgccuguccgccggcggggacaucugggucacccgggagcccuacgugagcugcgaccccgacaagugcuaccaguucgcccucggccaggggacgacccugaacaacgugcacuccaacgacaccguccgcgaccggaccccguaccgcacgcugcucaugaacgagcugggcgugcccuuccaccugggcaccaagcaggucugcaucgccuggagcuccagcuccugccacgacgggaaggccuggcuccacgugugcaucaccggcgacgacaagaacgcgaccgccagcuucaucuacaacgggcggcugguggacuccaucgugagcugguccaaggagauccugcgcacgcaggagagcgagugcgucugcaucaacgggaccugcaccguggugaugaccgacggguccgccagcggcaaggccgacacgaagauccucuucaucgaggagggcaagaucguccacaccagcacccuguccgggagcgcgcagcacguggaggagugcuccugcuacccccgguaccccggcgugcgcugcgucugccgggacaacuggaaggggagcaaccgcccgaucguggacaucaacaucaaggaccacuccaucgugagcuccuacgucugcagcggccuggugggcgacacgccccggaagaacgacuccagcuccagcucccacugccucgaccccaacaacgaggagggcggccacggggugaagggcugggccuucgacgacgggaacgacgucuggaugggccgcaccaucagcgagaagucccggcugggcuacgagaccuucaaggugaucgagggguggagcaaccccaaguccaagcugcagaucaaccgccaggucaucguggagcggggcgaccgcagcggguacuccggcaucuucagcguggagggcaagagcugcaucaaccggugcuucuacgucgagcucauccgcgggcggaaggaggagaccgaggugcuguggaccuccaacagcaucguggucuucugcggcacguccgggaccuacggcaccgggagcuggccggacggcgccgacaucaaccugaugcccaucuga

SEQ ID NO: 88654 - RNA, 1410 nt, Artificial Sequence; identical to SEQ ID NO: 80536
  derived and/or modified CDS sequence (opt1) from neuraminidase__InfluenzaA__AHL90545

SEQ ID NO: 88655 - RNA, 1410 nt, Artificial Sequence; identical to SEQ ID NO: 80623
  derived and/or modified CDS sequence (opt1) from neuraminidase__InfluenzaA__AHL90557

SEQ ID NO: 88656 - RNA, 1410 nt, Artificial Sequence
  derived and/or modified CDS sequence (opt1) from neuraminidase__InfluenzaA__AHL90569
augaaccccaaccagaagaucaucaccaucggcagcgugucccugaccaucagcacgaucugcuucuucaugcagaucgccauccucaucaccaccgucacccugcacuucaagcaguacgaguucaacuccccgcccaacaaccaggugaugcugugcgagcccacgaucaucgagcgcaacaucaccgagaucguguaccucaccaacaccacgaucgagaaggagaucugccccaagcuggccgaguaccggaacuggagcaagccgcagugcgacaucaagggguucgcgcccuucuccaaggacaacagcauccgccuguccgccggcggggacaucugggucacccgggagcccuacgugagcugcgaccccgacaagugcuaccaguucgcccucggccaggggaccacccugaacaacgugcacuccaacaacacgguccgcgaccggaccccguaccgcacccugcucaugaacgagcugggcgugcccuuccaccugggcaccaagcaggucugcaucgccuggagcuccagcuccugccacgacgggaaggccuggcuccacgugugcaucacgggcgacgacaagaacgcgaccgccagcuucaucuacaacgggcggcugguggacuccguggucagcugguccaaggagauccugcgcacccaggagagcgagugcgugugcaucaacgggaccugcacgguggucaugaccgacggguccgccagcggcaaggccgacaccaagauccucuucaucgaggagggcaagaucgugcacaccagcacgcuguccgggagcgcgcagcacguggaggagugcuccugcuacccccgguaccccggcguccgcugcgugugccgggacaacuggaaggggagcaaccgcccgaucguggacaucaacaucaaggaccacuccaucgucagcuccuacgugugcagcggccuggugggcgacacgccccggaagaacgacuccagcuccagcucccacugccucgaccccaacaacgaggagggcggccacggggucaagggcugggccuucgacgacgggaacgacguguggaugggccgcaccaucagcgagaagucccggcugggcuacgagaccuucaaggucaucgagggguggagcaaccccaaguccaagcugcagaucaaccgccaggugaucguggaccggggcaaccgcagcggguacuccggcaucuucagcgucgagggcaagagcugcaucaaccggugcuucuacguggagcucauccgcgggcggaaggaggagaccgaggugcuguggaccuccaacagcaucgucguguucugcggcaccuccgggaccuacggcacggggagcuggccggacggcgccgacaucaaccugaugcccaucuga

SEQ ID NO: 88657 - RNA, 1410 nt, Artificial Sequence; identical to SEQ ID NO: 80623
  derived and/or modified CDS sequence (opt1) from neuraminidase__InfluenzaA__AHL90581

SEQ ID NO: 88658 - RNA, 1410 nt, Artificial Sequence; identical to SEQ ID NO: 80627
  derived and/or modified CDS sequence (opt1) from neuraminidase__InfluenzaA__AHL90593

SEQ ID NO: 88659 - RNA, 1410 nt, Artificial Sequence
  derived and/or modified CDS sequence (opt1) from neuraminidase__InfluenzaA__AHL90605
augaaccccaaccagaagaucaucaccaucggcagcgugucccugaccaucagcacgaucugcuucuucaugcagaucgccauccucaucaccaccgucacccugcacuucaagcaguacgaguucaacuccccgcccaacaaccaggugaugcugugcgagcccacgaucaucgagcgcaacaucaccgagaucguguaccucaccaacaccacgaucgagaaggagaucugccccaagcuggccgaguaccggaacuggagcaagccgcagugcgacaucaccggguucgcgcccuucuccaaggacaacagcauccgccuguccgccggcggggacaucugggucacccgggagcccuacgugagcugcgaccccgacaagugcuaccaguucgcccucggccaggggaccacgcugaacaacgugcacuccaacaacaccguccgcgaccggaccccguaccgcacccugcucaugaacgagcugggcgugcccuuccaccugggcacgaagcaggucugcaucgccuggagcuccagcuccugccacgacgggaaggccuggcuccacgugugcaucaccggcgacgacaagaacgcgaccgccagcuucaucuacaacgggcggcugguggacuccguggucagcugguccaaggagauccugcgcacccaggagagcgagugcgugugcaucaacggcacgugcaccguggucaugaccgacggguccgccagcggcaaggccgacaccaagauccucuucaucgaggagggcaagaucgugcacacgagcacccuguccgggagcgcgcagcacguggaggagugcuccugcuacccccgguaccccggcguccgcugcgugugccgggacaacuggaaggggagcaaccgcccgaucguggacaucaacaucaaggaccacuccaucgucagcuccuacgugugcagcggccuggugggcgacacgccccggaagaacgacuccagcuccagcucccacugccucgaccccaacaacgaggagggcgggcacggggucaagggcugggccuucgacgacgggaacgacguguggaugggccgcaccaucagcgagaagucccggcugggcuacgagaccuucaaggucaucgagggguggagcaaccccaaguccaagcugcagaucaaccgccaggugaucguggaccggggcaaccgcagcggguacuccggcaucuucagcgucgagggcaagagcugcaucaaccggugcuucuacguggagcucauccgcgggcggaaggaggagaccgaggugcuguggaccuccaacagcaucgucguguucugcggcaccuccgggacguacggcaccgggagcuggccggacggcgccaacaucaaccugaugcccaucuga

SEQ ID NO: 88660 - RNA, 1410 nt, Artificial Sequence; identical to SEQ ID NO: 80623
  derived and/or modified CDS sequence (opt1) from neuraminidase__InfluenzaA__AHL90629

SEQ ID NO: 88661 - RNA, 1410 nt, Artificial Sequence; identical to SEQ ID NO: 80623
  derived and/or modified CDS sequence (opt1) from neuraminidase__InfluenzaA__AHL90641

SEQ ID NO: 88662 - RNA, 1410 nt, Artificial Sequence; identical to SEQ ID NO: 80536
  derived and/or modified CDS sequence (opt1) from neuraminidase__InfluenzaA__AHL90653

SEQ ID NO: 88663 - RNA, 1410 nt, Artificial Sequence; identical to SEQ ID NO: 80623
  derived and/or modified CDS sequence (opt1) from neuraminidase__InfluenzaA__AHL90665

SEQ ID NO: 88664 - RNA, 1410 nt, Artificial Sequence
  derived and/or modified CDS sequence (opt1) from neuraminidase__InfluenzaA__AHL90677
augaaccccaaccagaagaucaucaccaucggcagcgugucccugaccaucagcacgaucugcuucuucaugcagaccgccauccucaucaccaccgucacgcugcacuucaagcaguacgaguucaacuccccgcccaacaaccaggugaugcugugcgagcccaccaucaucgagcgcaacaucaccgagaucguguaccucaccaacacgaccaucgagaaggagaucugccccaagcuggccgaguaccggaacuggagcaagccgcagugcgacaucaccggguucgcgcccuucuccaaggacaacagcauccgccuguccgccggcggggacaucugggucacccgggagcccuacgugagcugcgaccccgacaagugcuaccaguucgcccucggccaggggacgacccugaacaacgugcacuccaacaacaccguccgcgaccggaccccguaccgcacgcugcucaugaacgagcugggcgugcccuuccaccugggcaccaagcaggucugcaucgccuggagcuccagcuccugccacgacgggaaggccuggcuccacgugugcaucaccggcgacgacaagaacgcgaccgccagcuucaucuacaacgggaagcugguggacuccaucgugagcugguccaaggagauccugcggacgcaggagagcgagugcgucugcaucaacgggaccugcaccguggugaugaccgacggguccgccagcggcaaggccgacacgaagauccucuucaucgaggagggcaagaucguccacaccagcacccuguccgggagcgcgcagcacguggaggagugcuccugcuacccccgcuaccccggcgugcggugcgucugccgcgacaacuggaaggggagcaaccggccgaucguggacaucaacaucaaggaccacuccaucgugagcuccuacgucugcagcggccuggugggcgacacgccccgcaagaacgacuccagcuccagcucccacugccucgaccccaacaacgaggagggcggccacggggugaagggcugggccuucgacgacgggaacgacgucuggaugggccggaccaucagcgagaagucccgccugggcuacgagaccuucaaggugaucgagggguggagcaaccccaaguccaagcugcagaucaaccggcaggucaucguggaccgcggcaaccggagcggguacuccggcaucuucagcguggagggcaagagcugcaucaaccgcugcuucuacgucgagcucauccgggggcgcaaggaggagaccgaggugcuguggaccuccaacagcaucguggucuucugcggcacguccgggaccuacggcaccgggagcuggccggacggcgccgacaucaaccugaugcccaucuga

SEQ ID NO: 88665 - RNA, 1410 nt, Artificial Sequence; identical to SEQ ID NO: 80623
  derived and/or modified CDS sequence (opt1) from neuraminidase__InfluenzaA__AHL90689

SEQ ID NO: 88666 - RNA, 1410 nt, Artificial Sequence
  derived and/or modified CDS sequence (opt1) from neuraminidase__InfluenzaA__AHL90701
augaaccccaaccagaagaucaucaccaucggcagcgugucccugaccaucagcacgaucugcuucuucaugcagaucgccauccucaucaccaccgucacccugcacuucaagcaguacgaguucaacuccccgcccaacaaccaggugaugcugugcgagcccacgaucaucgagcgcaacaucaccgagaucguguaccucaccaacaccacgaucgagaaggagaucugccccaagcuggccgaguaccggaacuggagcaagccgcagugcgacaucaccggguucgcgcccuucuccaaggacaacagcauccgccuguccgccggcgggggcaucugggucacccgggagcccuacgugagcugcgaccccgacaagugcuaccaguucgcccucgggcagggcaccacgcugaacaacgugcacuccaacaacaccguccgcgaccggaccccguaccgcacccugcucaugaacgagcugggcgugcccuuccaccuggggacgaagcaggucugcaucgccuggagcuccagcuccugccacgacggcaaggccuggcuccacgugugcaucaccggggacgacaagaacgcgaccgccagcuucaucuacaacggccggcugguggacuccguggucagcugguccaaggacauccugcgcacccaggagagcgagugcgugugcaucaacgggacgugcaccguggucaugaccgacggcuccgccagcggcaaggccgacaccaagauccucuucaucgaggaggggaagaucgugcacacgagcacccuguccggcagcgcgcagcacguggaggagugcuccugcuacccccgguaccccgggguccgcugcgugugccgggacaacuggaagggcagcaaccgcccgaucguggacaucaacaucaaggaccacuccaucgucagcuccuacgugugcagcggccuggugggggacacgccccggaagaacgacuccagcuccagcucccacugccucgaccccaacaacgaggagggcgggcacggcgucaaggggugggccuucgacgacggcaacgacguguggaugggccgcaccaucagcgagaagucccggcugggguacgagaccuucaaggucaucgagggcuggagcaaccccaaguccaagcugcagaucaaccgccaggugaucguggaccgggggaaccgcagcggcuacuccgggaucuucagcgucgagggcaagagcugcaucaaccggugcuucuacguggagcucauccgcggccggaaggaggagaccgaggugcuguggaccuccaacagcaucgucguguucugcgggaccuccggcacguacgggaccggcagcuggccggacggggccgacaucaaccugaugcccaucuga

SEQ ID NO: 88667 - RNA, 1410 nt, Artificial Sequence; identical to SEQ ID NO: 83328
  derived and/or modified CDS sequence (opt1) from neuraminidase__InfluenzaA__AHL90713

SEQ ID NO: 88668 - RNA, 1413 nt, Artificial Sequence; identical to SEQ ID NO: 83961
  derived and/or modified CDS sequence (opt1) from neuraminidase__InfluenzaA__AHL90725

SEQ ID NO: 88669 - RNA, 1413 nt, Artificial Sequence; identical to SEQ ID NO: 82954
  derived and/or modified CDS sequence (opt1) from neuraminidase__InfluenzaA__AHL90749

SEQ ID NO: 88670 - RNA, 1413 nt, Artificial Sequence; identical to SEQ ID NO: 81485
  derived and/or modified CDS sequence (opt1) from neuraminidase__InfluenzaA__AHL90761

SEQ ID NO: 88671 - RNA, 1413 nt, Artificial Sequence
  derived and/or modified CDS sequence (opt1) from neuraminidase__InfluenzaA__AHL90773
augaaccccaaccagaagaucaucaccaucggcagcaucuccaucgccaucgggaucaucagccugaugcuccagaucggcaacaucaucuccaucugggccagccacuccauccagaccgggagccagaacaacacgggcaucugcaaccagcgcaucaucaccuacgagaacuccaccugggugaaccacaccuacgucaacaucaacaacacgaacgugguggcgggggaggacaagaccagcaugacccuggccggcaacuccagccugugcuccaucagcggcugggccaucuacaccaaggacaacuccauccggaucgggagcaagggcgacgucuucgugauccgcgagccguucaucuccugcagccaccucgagugccggacguucuuccugacccagggggcccugcucaacgacaagcacuccaacggcaccgugaaggaccgcagccccuaccgggcccugauguccugcccccugggggaggcgcccagcccguacaacagcaaguucgaguccgucgccuggagcgccuccgccugccacgacggcaugggcuggcucaccaucgggaucagcggccccgacaacggggcgguggccgugcugaaguacaacggcaucaucacgggcaccaucaaguccuggaagaagcagauccugcgcacccaggagagcgagugcgucugcaugaacggguccugcuucaccaucaugacggacggccccagcaacaaggccgccuccuacaagaucuucaagaucgagaaggggaaggugaccaagagcaucgagcucaacgcccccaacuucuacuacgaggagugcuccugcuacccggacaccggcaucgugaugugcgucugccgggacaacuggcacgggagcaaccgccccuggguguccuucaaccagaaccuggacuaccagaucggcuacaucugcagcggcguguucggggacaacccccggcccgaggaccgcgagggcuccugcaacccggucaccguggacggggcgaacggcgugaagggguucagcuacaaguacggcaacggcgucuggaucgggcggacgaaguccaaccgccugcggaagggcuucgagaugaucugggaccccaacggguggaccaacaccgacagcgacuucuccgugaagcaggacguggucgccaucaccgacuggagcggcuacagcggguccuucgugcagcaccccgagcucacgggccuggacugcauccgccccugcuucuggguggagcugguccggggccucccgcgcgagaacaccaccaucuggaccagcggguccagcaucuccuucugcggcgugaacagcgacacggccaacugguccuggcccgacggggccgagcugcccuucaccaucgacaaguga

SEQ ID NO: 88672 - RNA, 1413 nt, Artificial Sequence
  derived and/or modified CDS sequence (opt1) from neuraminidase__InfluenzaA__AHL90785
augaaccccaaccagaagaucaucaccaucggcagcaucuccaucgccaucgggaucaucagccugaugcuccagaucggcaacaucaucuccaucugggccagccacuccauccagaccgggagccagaacaacacgggcaucugcaaccagcgcaucaucaccuacgagaacuccaccugggugaaccacaccuacgucaacaucaacaacacgaacgugguggcgggggaggacaagaccagcgucacccuggccggcaacuccagccugugcuccaucagcggcugggccaucuacaccaaggacaacuccauccggaucgggagcaagggcgacguguucgugauccgcgagccguucaucuccugcagccaccucgagugccggacguucuuccugacccagggggcccugcucaacgacaagcacuccaacggcaccgucaaggaccgcagccccuaccgggcccugauguccugcccccugggggaggcgcccagcccguacaacagcaaguucgaguccguggccuggagcgccuccgccugccacgacggcaugggcuggcucaccaucgggaucagcggccccgacaacggggcgguggccguccugaaguacaacggcaucaucacgggcaccaucaaguccuggaagaagcagauccugcgcacccaggagagcgagugcgugugcaugaacggguccugcuucaccaucaugacggacggccccagcaacaaggccgccuccuacaagaucuucaagaucgagaaggggaaggugaccaagagcaucgagcucaacgcccccaacuucuacuacgaggagugcuccugcuacccggacaccggcaucgucaugugcgugugccgggacaacuggcacgggagcaaccgccccuggguguccuucaaccagaaccuggacuaccagaucggcuacaucugcagcggcgucuucggggacaacccccggcccgaggacggcgagggguccugcaacccggugaccgugaacggcgcggacggggucaagggcuucagcuacaaguacggcaacgggguguggaucggccgcacgaaguccaaccggcugcgcaagggguucgagaugaucugggaccccaacggcuggaccaacaccgacagcgacuucuccgugaagcaggacgucguggccaucaccgacuggagcggguacagcggcuccuucgugcagcaccccgagcucacgggccuggacugcauccggcccugcuucugggucgagcuggugcgcgggcucccgcgggagaacaucaccaucuggaccagcggcuccagcaucuccuucugcggggucaacagcgacaccgccaacugguccuggcccgacggcgccgagcugcccuucacgaucgacaaguga

SEQ ID NO: 88673 - RNA, 1413 nt, Artificial Sequence
  derived and/or modified CDS sequence (opt1) from neuraminidase__InfluenzaA__AHL90797
augaaccccaaccagaagaucaucaccaucggcagcaucuccaucgccaucgggaucaucagccugaugcuccagaucggcaacaucaucuccaucugggccagccacuccauccagaccgggagccagaacaacacgggcaucugcaacaagcgcaucaucaccuacgagaacuccaccugggugaaccacaccuacgucaacaucaacaacacgaacgugguggcgggggaggacaagaccagcgucacccuggccggcaacuccagccugugcuccaucagcggcugggccaucuacaccaaggacaacuccauccggaucgggagcaagggcgacguguucgugauccgcgagccguucaucgccugcucccaccucgagugccggacguucuuccugacccagggggcccugcucaacgacaagcacagcaacggcaccgucaaggaccgcucccccuaccgggcgcugaugagcugcccccugggggaggcccccuccccguacaacagcaaguucgagagcguggccugguccgccagcgcgugccacgacggcaugggcuggcucaccaucgggaucuccggccccgacaacggggccguggccguccugaaguacaacggcaucaucacgggcaccaucaagagcuggaagaagcagauccugcgcacccaggaguccgagugcgugugcaugaacgggagcugcuucaccaucaugacggacggccccuccgacaaggccgccagcuacaagaucuucaagaucgagaaggggaaggugaccaaguccaucgagcucaacgcgcccaacuuccacuacgaggagugcagcugcuacccggacaccggcaucgucaugugcgugugccgggacaacuggcacggguccaaccgccccugggugagcuucaaccagaaccuggacuaccagaucggcuacaucugcuccggcgucuucggggacaacccccggcccgaggacggcgaggggagcugcuccccggugaccguggacggcgccaacggggucaagggcuucagcuacaaguacgacaacggcguguggaucgggcgcacgaaguccaaccggcugcgcaagggcuucgaggugaucugggaccccaacggguggaccaacaccgacagcgacuucuccgucaagcaggacgugguggccaucaccgacuggagcggcuacagcggguccuucguccagcaccccgagcucacgggccuggacugcauccggcccugcuucuggguggagcugguccgcggccucccgcgggagaacaccaccaucuggaccagcggguccagcaucuccuucugcggcgugaacagcgacacggccaacugguccuggcccgacggggccgagcugcccuucaccaucgacaaguga

SEQ ID NO: 88674 - RNA, 1413 nt, Artificial Sequence; identical to SEQ ID NO: 81485
  derived and/or modified CDS sequence (opt1) from neuraminidase__InfluenzaA__AHL90809

SEQ ID NO: 88675 - RNA, 1413 nt, Artificial Sequence; identical to SEQ ID NO: 83961
  derived and/or modified CDS sequence (opt1) from neuraminidase__InfluenzaA__AHL90821

SEQ ID NO: 88676 - RNA, 1413 nt, Artificial Sequence
  derived and/or modified CDS sequence (opt1) from neuraminidase__InfluenzaA__AHL90833
augaaccccaaccagcgcaucaucaccaucggcagcaucuccaucgccaucgggaucaucagccugaugcuccagaucggcaacaucaucuccaucugggccagccacuccauccagaccgggagccagaacaacacgggcaucugcaaccagcggaucaucaccuacgagaacuccaccugggugaaccacaccuacgucaacaucaacaacacgaacgugguggcgggggaggacaagaccagcgucacccuggccggcaacuccagccugugcuccaucagcggcugggccaucuacaccaaggacaacuccauccgcaucgggagcaagggcgacguguucgugauccgggagccguucaucuccugcagccaccucgagugccgcacguucuuccugacccagggggcccugcucaacgacaagcacuccaacggcaccgccaaggaccggagccccuaccgcgcgcugauguccugcccccugggggaggcccccagcccguacaacagcaaguucgaguccgucgccuggagcgccuccgcgugccacgacggcaugggcuggcucaccaucgggaucagcggccccgacaacggggccguggccgugcugaaguacaacggcaucaucacgggcaccaucaaguccuggaagaagcagauccugcggacccaggagagcgagugcgucugcaugaacggguccugcuucaccaucaugacggacggccccagcaacaaggccgccuccuacaagaucuucaagaucgagaaggggaaggugaccaagagcaucgagcucaacgcgcccaacuucuacuacgaggagugcuccugcuacccggacaccggcaucgugaugugcgucugccgcgacaacuggcacgggagcaaccggcccuggguguccuucaaccagaaccuggacuaccagaugggcuacaucugcagcggcguguucggggacaacccccgccccgaggacggcgagggguccugcaacccggucaccguggacggcgccaacggggugaagggcuucagcuacaaguacggcaacggggucuggaucggccggacgaaguccaaccgccugcggaagggguucgagaugaucugggaccccaacggcuggaccaacaccgacagcgacuucuccgugaagcaggacguggucgccaucaccgacuggagcggguacagcggcuccuucgugcagcaccccgagcucacgggccuggacugcauccgccccugcuucuggguggagcugguccgggggcucccgcgcgagaacaccaccaucuggaccagcggcuccagcaucuccuucugcggggugaacagcgacacggccaacugguccuggcccgacggcgccgagcugcccuucaccaucgacaaguga

SEQ ID NO: 88677 - RNA, 1413 nt, Artificial Sequence; identical to SEQ ID NO: 81485
  derived and/or modified CDS sequence (opt1) from neuraminidase__InfluenzaA__AHL90845

SEQ ID NO: 88678 - RNA, 1413 nt, Artificial Sequence; identical to SEQ ID NO: 82954
  derived and/or modified CDS sequence (opt1) from neuraminidase__InfluenzaA__AHL90857

SEQ ID NO: 88679 - RNA, 1413 nt, Artificial Sequence; identical to SEQ ID NO: 81485
  derived and/or modified CDS sequence (opt1) from neuraminidase__InfluenzaA__AHL90869

SEQ ID NO: 88680 - RNA, 1413 nt, Artificial Sequence
  derived and/or modified CDS sequence (opt1) from neuraminidase__InfluenzaA__AHL90881
augaaccccaaccagaagaucaucaccaucggcagcaucuccaucgccaucgggaucaucagcaccaugcugcagaucggcuccaucaucagcaucugggccucccacagcauccagacggggucccagaacaacaccggcaucugcaaccagcgcaucaucaccuacgagaacagcaccugggugaaccacacguacgucaacaucaacaacaccaacgugguggcgggggaggacaagaccuccgucacccucgccggcaacagcucccugugcagcaucuccggcugggccaucuacacgaaggacaacagcauccggaucggguccaagggcgacguguucgugauccgcgagccguucaucagcugcucccaccuggagugccggaccuucuuccucacccagggggcccugcugaacgacaagcacagcaacggcaccgucaaggaccgcucccccuaccgggcccucaugagcugcccccugggggaggcgcccagcccguacaacuccaaguucgagagcguggccugguccgccagcgccugccacgacggcaugggcuggcugacgaucgggaucuccggccccgacaacggggcgguggccguccucaaguacaacggcaucaucaccggcaccaucaagagcuggaagaagcagauccugcgcacccaggaguccgagugcgugugcaugaacgggagcugcuucacgaucaugaccgacggccccuccaacaaggccgccagcuacaagaucuucaagaucgagaaggggaaggugaccaaguccaucgagcugaacgcccccaacuucuacuacgaggagugcagcugcuacccggacaccggcaucgucaugugcgugugccgggacaacuggcacggguccaaccgccccugggugagcuucaaccagaaccucgacuaccagaucggcuacaucugcuccggcgucuucggggacaacccccggcccgaggacggcgaggggagcugcaacccggugacgguggacggcgcgaacggggucaagggcuucuccuacaaguacggcaacgggguguggaucggccgcaccaagagcaaccggcugaucaagggguucgagaugaucugggaccccaacggcuggaccaacaccgacuccgacuucagcgugaagcaggacgucguggccaucacggacuggagcggguacuccggcagcuucgugcagcaccccgagcugaccggccucgacugcauccgccccugcuucugggucgagcuggugcgggggcugccgcgcgagaacaccaccaucuggacguccggcagcuccaucagcuucugcggggucaacuccgacaccgccaacuggagcuggcccgacggcgccgagcuccccuucaccaucgacaaguga

SEQ ID NO: 88681 - RNA, 1413 nt, Artificial Sequence; identical to SEQ ID NO: 83961
  derived and/or modified CDS sequence (opt1) from neuraminidase__InfluenzaA__AHL90893

SEQ ID NO: 88682 - RNA, 1413 nt, Artificial Sequence; identical to SEQ ID NO: 82954
  derived and/or modified CDS sequence (opt1) from neuraminidase__InfluenzaA__AHL90905

SEQ ID NO: 88683 - RNA, 1413 nt, Artificial Sequence
  derived and/or modified CDS sequence (opt1) from neuraminidase__InfluenzaA__AHL90917
augaaccccaaccagaagaucaucaccaucggcagcaucuccaucgccaucgggaucaucagccugacccuccagaucggcaacaucaucuccaucugggccagccacuccauccagacggggagccagaacaacaccggcaucugcaaccagcgcaucaucaccuacgagaacuccaccugggugaaccacacguacgucaacaucaacaacaccaacgugguggcgggggaggacaagaccagcgucacccuggccggcaacuccagccugugcuccaucagcggcugggccaucuacacgaaggacaacuccauccggaucgggagcaagggcgacguguucgugauccgcgagccguucaucuccugcagccaccucgagugccggaccuucuuccugacccagggggcccugcucaacgacaagcacuccaacggcaccgucaaggaccgcagccccuaccgggcccugauguccugcccccugggggaggcgcccagcccguacaacagcaaguucgaguccguggccuggagcgccuccgccugccacgacggcaugggcuggcucacgaucgggaucagcggccccgacaacggggcgguggccguccugaaguacaacggcaucaucaccggcaccaucaaguccuggaagaagcagauccugcgcacccaggagagcgagugcgugugcaugaacggguccugcuucacgaucaugaccgacggccccagcaacaaggccgccuccuacaagaucuucaagaucgagaaggggaaggugaccaagagcaucgagcucaacgcccccaacuucuacuacgaggagugcuccugcuacccggacaccggcaucgucaugugcgugugccgggacaacuggcacgggagcaaccgccccuggguguccuucaaccagaaccuggacuaccagaucggcuacaucugcagcggcgucuucggggacaacccccggcccgaggacggcgagggguccugcaacccggugacgguggacggcgcgaacggggucaagggcuucagcuacaaguacggcaacgggguguggaucggccgcaccaaguccaaccggcugcgcaagggguucgagaugaucugggaccccaacggcuggaccaacaccgacagcgacuucuccgugaagcaggacgucguggccaucacggacuggagcggguacagcggcuccuucgugcagcaccccgagcucaccggccuggacugcauccggcccugcuucugggucgagcuggugcgcgggcucccgcgggagaacaccaccaucuggacgagcggcuccagcaucuccuucugcggggucaacagcgacaccgccaacugguccuggcccgacggcgccgagcugcccuucaccaucgacaaguga

SEQ ID NO: 88684 - RNA, 1413 nt, Artificial Sequence
  derived and/or modified CDS sequence (opt1) from neuraminidase__InfluenzaA__AHL90929
augaaccccaaccagaagaucaucaccaucggcagcaucuccaucgccaucgggaucaucagccugaugcuccagaucggcaacaucaucuccaucugggccagccacuccauccagaccgggagccagaacaacacgggcaucugcaaccagcgcaucaucaccuacgagaacuccaccugggugaaccacaccuacgucaacaucaacaacacgaacgugguggcgggggaggacaagaccagcaugacccuggccggcaacuccagccugugcuccaucagcggcugggccaucuacaccaaggacaacuccauccggaucgggagcaagggcgacgucuucgugauccgcgagccguucaucuccugcagccaccucgagugccggacguucuuccugacccagggggcccugcucaacgacaagcacuccaacggcaccgugaaggaccgcagccccuaccgggcccugauguccugcccccugggggaggcgcccagcccguacaacagcaaguucgaguccgucgccuggagcgccuccgccugccacgacggcaugggcuggcucaccaucgggaucagcggccccgacaacggggcgguggccgugcugaaguacaacggcaucaucacgggcaccaucaaguccuggaagaagcagauccugcgcacccaggagagcgagugcgucugcaugaacggguccugcuucaccaucaugacggacggccccagcaacaaggccgccuccuacaagaucuucaagaucgagaaggggaaggugaccaagagcaucgagcucaacgcccccaacuucuacuacgaggagugcuccugcuacccggacaccggcaucgugaugugcgucugccgggacaacuggcacgggagcaaccgccccuggguguccuucaaccagaaccuggacuaccagaucggcuacaucugcagcggcguguucggggacaacccccggcccgaggacggcgagggguccugcaacccggucaccguggacggcgcgaacggggugaagggcuucagcuacaaguacggcaacggggucuggaucggccgcacgaaguccaaccggcugcgcaagggguucgagaugaucugggaccccaacggcuggaccaacaccgacagcgacuucuccgugaagcaggacguggucgccaucaccgacuggagcggguacagcggcuccuucgugcagcaccccgagcucacgggccuggacugcauccggcccugcuucuggguggagcugguccgcgggcucccgcgggagaacaccaccaucuggaccagcggcuccagcaucuccuucugcggggugaacagcgacacggccaacugguccuggcccgacggcgccgagcugcccuucaccaucgacaaguga

SEQ ID NO: 88685 - RNA, 1413 nt, Artificial Sequence; identical to SEQ ID NO: 82954
  derived and/or modified CDS sequence (opt1) from neuraminidase__InfluenzaA__AHL90941

SEQ ID NO: 88686 - RNA, 1413 nt, Artificial Sequence; identical to SEQ ID NO: 82954
  derived and/or modified CDS sequence (opt1) from neuraminidase__InfluenzaA__AHL90953

SEQ ID NO: 88687 - RNA, 1413 nt, Artificial Sequence; identical to SEQ ID NO: 82954
  derived and/or modified CDS sequence (opt1) from neuraminidase__InfluenzaA__AHL90965

SEQ ID NO: 88688 - RNA, 1413 nt, Artificial Sequence
  derived and/or modified CDS sequence (opt1) from neuraminidase__InfluenzaA__AHL90977
augaaccccaaccagaagaucaucaccaucggcagcaucuccaucgccaucgggaucaucagccugaugcuccagaucggcaacaucaucuccaucugggccagccacuccauccagaccgggagccagaacaacacgggcaucugcaaccagcgcaucaucaccuacgagaacuccaccugggugaaccacaccuacgucaacaucaacaacacgaacgugguggcgggggaggacaagaccagcgucacccuggccggcaacuccagccugugcuccaucagcggcugggccaucuacaccaaggacaacuccauccggaucgggagcaagggcgacguguucgugauccgcgagccguucaucuccugcagccaccucgagugccggacguucuuccugacccagggggcccugcucaacgacaagcacuccaacggcaccgucaaggaccgcagccccuaccgggcccugauguccugcccccugggggaggcgcccagcccguacaacagcaaguucgaguccguggccuggagcgccuccgccugccacgacggcaugggcuggcucaccaucgggaucagcggccccgacaacggggcgguggccguccugaaguacaacggcaucaucacgggcaccaucaaguccuggaagaagcagauccugcgcacccaggagagcgagugcgugugcaugaacggguccugcuucaccaucaugacggacggccccagcaacaaggccgccuccuacaagaucuucaagaucgagaaggggaaggugaccaagagcaucgagcucaacgcccccaacuucuacuacgaggagugcuccugcuacccggacaccggcaucgucaugugcgugugccgggacaacuggcacgggagcaaccgccccuggguguccuucaaccagaaccuggacuaccagaucggcuacaucugcagcggcgucuucggggacaacccccggcccgaggacggcgagggguccugcaacccggugaccguggacggcgcgaacggggucaagggcuucagcuacaaguacggcaacgggguguggaucggccgcacgaaguccaaccggcugcgcaagggguucgagaugaucugggaccccaacggcuggaccaacaccgacagcgacuucuccgugaagcaggacgucguggccaucgccgacuggagcggguacagcggcuccuucgugcagcaccccgagcucaccggccuggacugcauccggcccugcuucugggucgagcuggugcgcgggcucccgcgggagaacacgaccaucuggaccagcggcuccagcaucuccuucugcggggucaacagcgacaccgccaacugguccuggcccgacggcgccgagcugcccuucacgaucgacaaguga

SEQ ID NO: 88689 - RNA, 1413 nt, Artificial Sequence; identical to SEQ ID NO: 84228
  derived and/or modified CDS sequence (opt1) from neuraminidase__InfluenzaA__AHL90989

SEQ ID NO: 88690 - RNA, 1413 nt, Artificial Sequence; identical to SEQ ID NO: 88684
  derived and/or modified CDS sequence (opt1) from neuraminidase__InfluenzaA__AHL91001

SEQ ID NO: 88691 - RNA, 1413 nt, Artificial Sequence
  derived and/or modified CDS sequence (opt1) from neuraminidase__InfluenzaA__AHL91013
augaaccccaaccagaagaucaucaccaucggcagcaucuccaucgccaucgggaucaucagccugaugcuccagaucggcaacaucaucuccaucugggccagccacuccauccagaccgggagccagaacaacacgggcaucugcucccagcgcaucaucaccuacgagaacagcaccugggugaaccacaccuacgucaacaucaacaacacgaacgugguggcgggggaggacaagaccuccaugacccuggccggcaacagcucccugugcagcaucuccggcugggccaucuacaccaaggacaacagcauccggaucggguccaagggcgacgucuucgugauccgcgagccguucaucagcugcucccaccucgagugccggacguucuuccugacccagggggcccugcucaacgacaagcacagcaacggcaccgugaaggaccgcucccccuaccgggcccugaugagcugcccccugggggaggcgcccagcccguacaacuccaaguucgagagcgucgccugguccgccagcgccugccacgacggcaugggcuggcucaccaucgggaucuccggccccgacaacggggcgguggccgugcugaaguacaacggcaucaucacgggcaccauccgcagcuggaagaagcagauccugcggacccaggaguccgagugcgucugcaugaacgggagcugcuucaccaucaugacggacggccccuccaacaaggccgccagcuacaagaucuucaagaucgagaaggggaaggugaccaaguccaucgagcucaacgcccccaacuucuacuacgaggagugcagcugcuacccggacaccggcaucgugaugugcgucugccgcgacaacuggcacggguccaaccggcccugggugagcuucaaccagaaccuggacuaccagaucggcuacaucugcuccggcguguucggggacaacccccgccccgaggacggcgaggggagcugcaacccggucaccguggacggcgcgaacggggugaagggcuucuccuacaaguacggcaacggggucuggaucggccggaccaagagcaaccgccugcggaagggguucgagaugaucugggaccccaacggcuggacgaacaccgacuccgacuucagcgugaagcaggacguggucgccaucaccgacuggagcggguacuccggcagcuucgugcagcaccccgagcucacgggccuggacugcauccgccccugcuucuggguggagcugguccgggggcucccgcgcgagaacaccaccaucuggaccuccggcagcuccaucagcuucugcggggugaacuccgacacggccaacuggagcuggcccgacggcgccgagcugcccuucaccaucgacaaguga

SEQ ID NO: 88692 - RNA, 1413 nt, Artificial Sequence; identical to SEQ ID NO: 88684
  derived and/or modified CDS sequence (opt1) from neuraminidase__InfluenzaA__AHL91025

SEQ ID NO: 88693 - RNA, 1410 nt, Artificial Sequence; identical to SEQ ID NO: 81929
  derived and/or modified CDS sequence (opt1) from neuraminidase__InfluenzaA__AHL91037

SEQ ID NO: 88694 - RNA, 1410 nt, Artificial Sequence; identical to SEQ ID NO: 83542
  derived and/or modified CDS sequence (opt1) from neuraminidase__InfluenzaA__AHL91049

SEQ ID NO: 88695 - RNA, 1410 nt, Artificial Sequence
  derived and/or modified CDS sequence (opt1) from neuraminidase__InfluenzaA__AHL91061
augaaccccaaccagaagaucaucaccaucggcagcgugucccugaccaucagcacgaucugcuucuucaugcagaucgccauccucaucaccaccgucacccugcacuucaagcaguacgaguucaacuccccgcccaacaaccaggugaugcugugcgagcccacgaucaucgagcgcaacaucaccgagaucguguaccucaccaacaccacgaucgagaaggagaucugccccaagcuggccgaguaccggaacuggagcaagccgcagugcgacaucaccggguucgcgcccuucuccaaggacaacagcauccgccuguccgccggcggggacaucugggucacccgggagcccuacgugagcugcgaccccgacaagugcuaccaguucgcccucggccaggggaccacgcugaacaacgugcacuccaacaacaccguccgcgaccggaccccguaccgcacccugcucaugaacgagcugggcgugcccuuccaccugggcacgaagcaggucugcaucgccuggagcuccagcuccugccacgacgggaaggccuggcuccacgugugcaucaccggcgacgacaagaacgcgaccgccagcuucaucuacaacgggcggcugguggacuccguggucagcugguccaaggagauccugcgcacccaggagagcgagugcgugugcaucaacggcacgugcaccguggucaugaccgacggguccgccagcggcaaggccgacaccaagauccucuucaucgaggagggcaagaucgugcacacgagcacccuguccgggagcgcgcagcacguggaggagugcuccugcuacccccgguaccccggcguccgcugcgugugccgggacaacuggaaggggagcaaccgcccgaucguggacaucaacaucaaggaccacuccaucgucagcuccuacgugugcagcggccuggugggcgacacgccccggaagaacgacuccagcuccagcucccacugccucaaccccaacaacgaggagggcgggcacggggucaagggcugggccuucgacgacgggaacgacguguggaugggccgcaccaucagcgagaagucccggcugggcuacgagaccuucaaggucaucgagggguggagcaaccacaaguccaagcugcagaucaaccgccaggugaucguggaccggggcaaccgcagcggguacuccggcaucuucagcgucgagggcaagagcugcaucaaccggugcuucuacguggagcucauccgcgggcggaaggaggagaccgaggugcuguggaccuccaacagcaucgucguguucugcggcaccuccgggacguacggcaccgggagcuggcccgacggcgccgaccugaaccucaugccgaucuga

SEQ ID NO: 88696 - RNA, 1410 nt, Artificial Sequence
  derived and/or modified CDS sequence (opt1) from neuraminidase__InfluenzaA__AHL91073
augaaccccaaccagaagaucaucaccaucggcagcgugucccugaccaucagcacgaucugcuucuucaugcagaucgccauccucaucaccaccgucacccugcacuucaagcaguacgaguucaacuccccgcccaacaaccaggugaugcugugcgagcccacgaucaucgagcgcaacaucaccgagaucguguaccucaccaacaccacgaucgagaaggagaucugccccaagcuggccgaguaccggaccuggagcaagccgcagugcgacaucaccggguucgcgcccuucuccaaggacaacagcauccgccuguccgccggcggggacaucugggucacccgggagcccuacgugagcugcgaccccgacaagugcuaccaguucgcccucggccaggggacgacccugaacaacgugcacuccaacaacaccguccgcgaccggaccccguaccgcacgcugcucaugaacgagcugggcgugcccuuccaccugggcaccaagcaggucugcaucgccuggagcuccagcuccugccacgacgggaaggccuggcuccacgugugcaucaccggcgacgacaagaacgcgaccgccagcuucaucuacaacgggcggcugguggacuccguggucagcugguccaaggagauccugcgcacgcaggagagcgagugcgugugcaucaacgggaccugcaccguggucaugaccgacggcuccgccagcggcaaggccgacacgaagauccucuucaucgaggagggcaagaucgugcacaccagcacccuguccgggagcgcgcagcacguggaggagugcuccugcuacccccgguaccccggcguccgcugcgugugccgggacaacuggaaggggagcaaccgcccgaucguggacaucaacaucaaggaccacuccaucgucagcuccuacgugugcagcggccuggugggcgacacgccccggaagaacgacuccagcuccgggagccacugccucgaccccaacaacgaggagggcgggcacggcgucaaggggugggccuucgacgacggcaacgacguguggaugggccgcaccaucuccgagaagucccggcugggguacgagaccuucaaggucaucgagggcuggagcaaccacaagagcaagcugcagaucaaccgccaggugaucguggaccgggggaaccgcuccggcuacagcgggaucuucuccgucgagggcaagagcugcaucaaccggugcuucuacguggagcucauccgcggccggaaggaggagaccgaggugcuguggaccagcaacuccaucgucguguucugcgggacgagcggcaccuacgggaccggcuccuggcccgacggggccgaccugaaccucaugccgaucuga

SEQ ID NO: 88697 - RNA, 1410 nt, Artificial Sequence
  derived and/or modified CDS sequence (opt1) from neuraminidase__InfluenzaA__AHL91085
augaaccccaaccagaagaucaucaccaucggcagcgugucccugaccaucagcacgaucugcuucuucaugcagaucgccauccucaucaccaccgucacccugcacuucaagcaguacgaguucaacuccccgcccaacaaccaggugaugcugugcgagcccaagaucaucgagcgcaacaucacggagaucguguaccucaccaacaccaccaucgagaaggagaucugccccaagcuggccgaguaccggaacuggagcaagccgcagugcgacaucacgggguucgcgcccuucuccaaggacaacagcauccgccuguccgccggcggggacaucugggucacccgggagcccuacgugagcugcgaccccgacaagugcuaccaguucgcccucggccaggggaccacccugaacaacgugcacuccaacaacacgguccgcgaccggaccccguaccgcacccugcucaugaacgagcugggcgugcccuuccaccugggcaccaagcaggucugcaucgccuggagcuccagcuccugccacgacgggaaggccuggcuccacgugugcaucacgggcgacgacaagaacgcgaccgccagcuucaucuacaacgggcggcugguggacuccguggucagcugguccaaggagauccugcgcacccaggagagcgagugcgugugcaucaacggcaucugcaccguggucaugacggacggguccgccagcggcaaggccgacaccaagauccucuucaucgaggagggcaagaucgugcacaccagcacccuguccgggagcgcgcagcacguggaggagugcuccugcuacccccgguaccccggcguccgcugcgugugccgggacaacuggaaggggagcaaccgcccgaucguggacaucaacaucaaggaccacuccaucgucagcuccuacgugugcagcggccuggugggcgacacgccccggaagaacgacuccagcuccagcucccacugccucgaccccaacaacgaggagggcgggcacggggucaagggcugggccuucgacgacgggaacgacguguggaugggccgcaccaucagcgagaagucccggcugggcuacgagaccuucaaggucaucgagggguggagcaaccccaaguccaagcugcagaucaaccgccaggugaucguggaccggggcaaccgcagcggguacuccggcaucuucagcgucgagggcaagagcugcaucaaccggugcuucuacguggagcucauccgcgggcggaaggaggagaccgaggugcuguggacguccaacagcaucgucguguucugcggcaccuccgggaccuacggcaccgggagcuggccggacggcgccgacaucaaccugaugcccaucuga

SEQ ID NO: 88698 - RNA, 1410 nt, Artificial Sequence; identical to SEQ ID NO: 80623
  derived and/or modified CDS sequence (opt1) from neuraminidase__InfluenzaA__AHL91097

SEQ ID NO: 88699 - RNA, 1410 nt, Artificial Sequence
  derived and/or modified CDS sequence (opt1) from neuraminidase__InfluenzaA__AHL91109
augaaccccaaccagaagaucaucaccaucggcagcgugucccugaccaucagcacgaucugcuucuucaugcagaucgccauccucaucaccaccgucacccugcacuucaagcaguacgaguucaacuccccgcccaacaaccaggugaugcugugcgagcccacgaucaucgagcgcaacaucaccgagaucguguaccucaccaacaccacgaucgagaaggagaucugccccaagcuggccgaguaccggaacuggagcaagccgcagugcgacaucaccggguucgcgcccuucuccaaggacaacagcauccgccuguccgccggcggggacaucugggucacccgggagcccuacgugagcugcgaccccgacaagugcuaccaguucgcccucggccaggggaccacgcugaacaacgugcacuccaacaacaccguccgcgaccggaccccguaccgcacccugcucaugaacgagcugggcgugcccuuccaccugggcacgaagcaggucugcaucgccuggagcuccagcuccugccacgacgggaaggccuggcuccacgugugcaucaccggcgacgacaagaacgcgaccgccagcuucaucuacaacgggcggcugguggacuccguggucagcugguccaaggagauccugcgcacccaggagagcgagugcgugugcaucaacggcacgugcaccguggucaugaccgacggguccgccagcggcaaggccgacaccaagauccucuucaucgaggagggcaagaucgugcacacgagcacccuguccgggagcgcgcagcacguggaggagugcuccugcuacccccgguaccccggcguccgcugcgugugccgggacaacuggaaggggagcaaccgcccgaucguggacaucaacaucaaggaccacuccaucgucagcuccuacgugugcagcggccuggugggcgacacgccccggaagaacgacuccagcuccagcucccacugccucgaccccaacaacgaggagggcgggcacggggucaagggcugggccuucgacgacgggaacgacguguggaugggccgcaccaucagcgagaagucccggcugggcuacgagaccuucaaggucaucgagggguggagcaaccacaaguccaagcugcagaucaaccgccaggugaucguggaccggggcaaccgcagcggguacuccggcaucuucagcgucgagggcaagagcugcaucaaccggugcuucuacguggagcucauccgcgggcggaaggaggagaccgaggugcuguggaccuccaacagcaucgucguguucugcggcaccuccgggacguacggcaccgggagcuggcccgacggcgccgaccugaacaucaugccgaucuga

SEQ ID NO: 88700 - RNA, 1410 nt, Artificial Sequence; identical to SEQ ID NO: 81929
  derived and/or modified CDS sequence (opt1) from neuraminidase__InfluenzaA__AHL91121

SEQ ID NO: 88701 - RNA, 1410 nt, Artificial Sequence
  derived and/or modified CDS sequence (opt1) from neuraminidase__InfluenzaA__AHL91133
augaaccccaaccagaagaucaucaccaucggcagcgugucccugaccaucagcacgaucugcuucuucaugcagaucgccauccucaucaccaccgucacccugcacuucaagcaguucgaguucaacuccccgcccaacaaccaggugaugcugugcgagcccacgaucaucgagcgcaacaucaccgagaucguguaccucaccaacaccacgaucgagaaggagaucugccccaagcuggccgaguaccggaacuggagcaagccgcagugcgacaucaccggguucgcgcccuucuccaaggacaacagcauccgccuguccgccggcggggacaucugggucacccgggagcccuacgugagcugcgaccccgacaagugcuaccaguucgcccucggccaggggaccacgcugaacaacgugcacuccaacaacaccguccgcgaccggaccccguaccgcacccugcucaugaacgagcugggcgugcccuuccaccugggcacgaagcaggucugcaucgccuggagcuccagcuccugccacgacgggaaggccuggcuccacgugugcaucaccggcgacgacaagaacgcgaccgccagcuucaucuacaacgggcggcugguggacuccguggucagcugguccaaggagauccugcgcacccaggagagcgagugcgugugcaucaacggcacgugcaccguggucaugaccgacggguccgccagcggcaaggccgacaccaagauccucuucaucgaggagggcaagaucgugcacacgagcacccuguccgggagcgcgcagcacguggaggagugcuccugcuacccccgguaccccggcguccgcugcgugugccgggacaacuggaaggggagcaaccgcccgaucguggacaucaacaucaaggaccacuccaucgucagcuccuacgugugcagcggccuggugggcgacacgccccggaagaacgacuccagcuccagcucccacugccucgaccccaacaacgaggagggcgggcacggggucaagggcugggccuucgacgacgggaacgacguguggaugggccgcaccaucagcgagaagucccggcugggcuacgagaccuucaaggucaucgagggguggagcaaccacaaguccaagcugcagaucaaccgccaggugaucguggaccggggcaaccgcagcggguacuccggcaucuucagcgucgagggcaagagcugcaucaaccggugcuucuacguggagcucauccgcgggcggaaggaggagaccgaggugcuguggaccuccaacagcaucgucguguucugcggcaccuccgggacguacggcaccgggagcuggcccgacggcgccgaccugaaccucaugccgaucuga

SEQ ID NO: 88702 - RNA, 1410 nt, Artificial Sequence; identical to SEQ ID NO: 83328
  derived and/or modified CDS sequence (opt1) from neuraminidase__InfluenzaA__AHL91145

SEQ ID NO: 88703 - RNA, 1410 nt, Artificial Sequence; identical to SEQ ID NO: 83328
  derived and/or modified CDS sequence (opt1) from neuraminidase__InfluenzaA__AHL91157

SEQ ID NO: 88704 - RNA, 1410 nt, Artificial Sequence; identical to SEQ ID NO: 78736
  derived and/or modified CDS sequence (opt1) from neuraminidase__InfluenzaA__AHL91169

SEQ ID NO: 88705 - RNA, 1410 nt, Artificial Sequence; identical to SEQ ID NO: 86170
  derived and/or modified CDS sequence (opt1) from neuraminidase__InfluenzaA__AHL94987

SEQ ID NO: 88706 - RNA, 1410 nt, Artificial Sequence; identical to SEQ ID NO: 86170
  derived and/or modified CDS sequence (opt1) from neuraminidase__InfluenzaA__AHL94999

SEQ ID NO: 88707 - RNA, 1410 nt, Artificial Sequence
  derived and/or modified CDS sequence (opt1) from neuraminidase__InfluenzaA__AHL95011
augaaccccaaccagaagaucaucaccaucggcagcgugucccugaccaucagcacgaucugcuucuucaugcagaucgccauccucaucaccaccgucacccugcacuucaagcaguacgaguucaacuccccgcccaacaaccaggugaugcugugcgagcccacgaucaucgagcgcaacaucaccgagaucguguaccucaccaacaccacgaucgagaaggagaucugccccaagccggccgaguaccggaacuggagcaagccccagugcgacaucaccggguucgcgcccuucuccaaggacaacagcauccgccuguccgccggcggggacaucugggucacccgggagcccuacgugagcugcgacccggacaagugcuaccaguucgcccugggccaggggaccacgcucaacaacgugcacuccaacaacaccguccgcgaccggacccccuaccgcacccugcugaugaacgagcucggcgugcccuuccaccugggcacgaagcaggucugcaucgccuggagcuccagcuccugccacgacgggaaggccuggcugcacgugugcaucaccggcgacgacaagaacgcgaccgccagcuucaucuacaacgggcggcucguggacuccguggucagcugguccaaggagauccugcgcacccaggagagcgagugcgugugcaucaacggcacgugcaccguggucaugaccgacggguccgccagcggcaaggccgacaccaagauccuguucaucgaggagggcaagaucgugcacacgagcacccucuccgggagcgcgcagcacguggaggagugcuccugcuacccccgguacccgggcguccgcugcgugugccgggacaacuggaaggggagcaaccgccccaucguggacaucaacaucaaggaccacuccaucgucagccgguacgugugcuccggccuggugggcgacaccccgcgcaagaacgacagcuccagcuccagccacugccuggaccccaacaacgaggagggcgggcacggggucaagggcugggccuucgacgacgggaacgacguguggaugggccggaccaucaacgagacgucccgccucggcuacgagaccuucaaggucaucgaggggugguucaaccccaagagcaagcugcagaucaaccgccaggugaucguggaccggggcgaccgguccggguacagcggcaucuucuccgucgagggcaagagcugcaucaaccgcugcuucuacguggagcugauccgggggcgcaaggaggagaccgaggugcucuggaccuccaacagcaucgucguguucugcggcacgagcgggaccuacggcaccggguccuggcccgacggcgccgaccugaaccugaugcccaucuga

SEQ ID NO: 88708 - RNA, 1410 nt, Artificial Sequence; identical to SEQ ID NO: 87927
  derived and/or modified CDS sequence (opt1) from neuraminidase__InfluenzaA__AHL95023

SEQ ID NO: 88709 - RNA, 1410 nt, Artificial Sequence; identical to SEQ ID NO: 86170
  derived and/or modified CDS sequence (opt1) from neuraminidase__InfluenzaA__AHL95035

SEQ ID NO: 88710 - RNA, 1410 nt, Artificial Sequence; identical to SEQ ID NO: 86170
  derived and/or modified CDS sequence (opt1) from neuraminidase__InfluenzaA__AHL95047

SEQ ID NO: 88711 - RNA, 1410 nt, Artificial Sequence; identical to SEQ ID NO: 87918
  derived and/or modified CDS sequence (opt1) from neuraminidase__InfluenzaA__AHL95059

SEQ ID NO: 88712 - RNA, 1410 nt, Artificial Sequence; identical to SEQ ID NO: 86170
  derived and/or modified CDS sequence (opt1) from neuraminidase__InfluenzaA__AHL95071

SEQ ID NO: 88713 - RNA, 1410 nt, Artificial Sequence; identical to SEQ ID NO: 86170
  derived and/or modified CDS sequence (opt1) from neuraminidase__InfluenzaA__AHL95083

SEQ ID NO: 88714 - RNA, 1410 nt, Artificial Sequence; identical to SEQ ID NO: 86170
  derived and/or modified CDS sequence (opt1) from neuraminidase__InfluenzaA__AHL95095

SEQ ID NO: 88715 - RNA, 1410 nt, Artificial Sequence; identical to SEQ ID NO: 86170
  derived and/or modified CDS sequence (opt1) from neuraminidase__InfluenzaA__AHL95107

SEQ ID NO: 88716 - RNA, 1410 nt, Artificial Sequence
  derived and/or modified CDS sequence (opt1) from neuraminidase__InfluenzaA__AHL95119
augaaccccaaccagaagaucaucaccaucggcagcgugucccugaccaucagcacgaucugcuucuucaugcagaucgccauccucaucaccaccgucacccugcacuucaagcaguacgaguucaacuccccgcccaacaaccaggugaugcugugcgagcccacgaucaucgagcgcaacaucaccgagaucguguaccucaccaacaccacgaucgagaaggagaucugccccaagccggccgaguaccggaacuggagcaagccccagugcgacaucaccggguucgcgcccuucuccaaggacaacagcauccgccuguccgccggcggggacaucugggucacccgggagcccuacgugagcugcgacccggacaagugcuaccaguucgcccugggccaggggaccacgcucaacaacgugcacuccaacaacaccguccgcgaccggacccccuaccgcacccugcugaugaacgagcucggcgugcccuuccaccugggcacgaagcaggucugcaucgccuggagcuccagcuccugccacgacgggaaggccuggcugcacgugugcaucaccggcgacgacaagaacgcgaccgccagcuucaucuacaacgggcggcucguggacuccguggucagcugguccaaggagauccugcgcacccaggagagcgagugcgugugcaucaacggcacgugcaccguggucaugaccgacggguccgccagcggcaaggccgacaccaagauccuguucaucgaggagggcaagaucgugcacacgagcacccucuccgggagcgcgcagcacguggaggagugcuccugcuacccccgguacccgggcguccgcugcgugugccgggacaacuggaaggggagcaaccgccccaucguggacaucaacaucaaggaccacuccaucgucagccgguacgugugcuccggccuggugggcgacaccccgcgcaagaacgacagccuguccagcucccacugccucgaccccaacaacgaggagggcgggcacggggucaagggcugggccuucgacgacgggaacgacguguggaugggccggaccaucaacgagacgagccgccugggcuacgagaccuucaaggucaucgaggggugguccaaccccaagagcaagcugcagaucaaccgccaggugaucguggaccggggcgaccgguccggguacagcggcaucuucuccgucgagggcaagagcugcaucaaccgcugcuucuacguggagcucauccgggggcgcaaggaggagaccgaggugcuguggaccuccaacagcaucgucguguucugcggcacgagcgggaccuacggcaccggguccuggcccgacggcgccgaccugaaccucaugcccaucuga

SEQ ID NO: 88717 - RNA, 1410 nt, Artificial Sequence; identical to SEQ ID NO: 87399
  derived and/or modified CDS sequence (opt1) from neuraminidase__InfluenzaA__AHL95131

SEQ ID NO: 88718 - RNA, 1410 nt, Artificial Sequence; identical to SEQ ID NO: 87907
  derived and/or modified CDS sequence (opt1) from neuraminidase__InfluenzaA__AHL95143

SEQ ID NO: 88719 - RNA, 1410 nt, Artificial Sequence
  derived and/or modified CDS sequence (opt1) from neuraminidase__InfluenzaA__AHL95155
augaaccccaaccagaagaucaucaccaucggcagcgugucccugaccaucagcacgaucugcuucuucaugcagaucgccauccucaucaccaccgucacccugcacuucaagcaguacgaguucaacuccccgcccaacaaccaggugaugcugugcgagcccacgaucaucgagcgcaacaucaccgagaucguguaccucaccaacaccacgaucgagaaggagaucugccccaagccggccgaguaccggaacuggagcaagccccagugcgggaucaccggcuucgcgcccuucuccaaggacaacagcauccgccuguccgccgggggcgacaucugggucacccgggagcccuacgugagcugcgacccggacaagugcuaccaguucgcccuggggcagggcaccacgcucaacaacgugcacuccaacaacaccguccgcgaccggacccccuaccgcacccugcugaugaacgagcucggcgugcccuuccaccuggggacgaagcaggucugcaucgccuggagcuccagcuccugccacgacggcaaggccuggcugcacgugugcaucaccggggacgacaagaacgcgaccgccagcuucaucuacaacggccggcucguggacuccguggucagcugguccaaggagauccugcgcacccaggagagcgagugcgugugcaucaacgggacgugcaccguggucaugaccgacggcuccgccagcggcaaggccgacaccaagauccuguucaucgaggaggggaagaucgugcacacgagcacccucuccggcagcgcgcagcacguggaggagugcuccugcuacccccgguacccggggguccgcugcgugugccgggacaacuggaagggcagcaaccgccccaucguggacaucaacaucaaggaccacuccaucgucagcuccuacgugugcagcggccuggugggggacacgccccggaagaacgacuccagcuccagcucccacugccuggaccccaacaacgaggagggcagccacggggucaagggcugggccuucgacgacgggaacgacguguggaugggccgcaccaucaacgagaccucccggcucggcuacgagaccuucaaggucaucgagggguggagcaacccgaaguccaagcugcagaucaaccgccaggugaucguggaccggggcgaccgcagcggguacuccggcaucuucagcgucgagggcaagagcugcaucaaccggugcuucuacguggagcugauccgcgggcggaaggaggagaccgaggugcucuggaccuccaacagcaucgucguguucugcggcacguccgggaccuacggcaccgggagcuggcccgacggcgccgaccugaaccugaugcccaucuga

SEQ ID NO: 88720 - RNA, 1410 nt, Artificial Sequence
  derived and/or modified CDS sequence (opt1) from neuraminidase__InfluenzaA__AHL95167
augaaccccaaccagaagaucaucaccaucggcagcgugucccugaccaucagcacgaucugcuucuucaugcagaucgccauccucaucaccaccgucacccugcacuucaagcaguacgaguucaacuccccgcccaacaaccaggugaugcugugcgagcccacgaucaucgagcgcaacaucaccgagaucguguaccucaccaacaccacgaucgagaaggagaucugccccaagccggccgaguaccggaacuggagcaagccccagugcgacaucaccggguucgcgcccuucuccaaggacaacagcauccgccuguccgccggcggggacaucugggucacccgggagcccuacgugagcugcgacccggacaagugcuaccaguucgcccugggccaggggaccacgcucaacaacgugcacuccaacaacaccguccgcgaccggacccccuaccgcacccugcugaugaacgagcucggcgugcccuuccaccugggcacgaagcaggucugcaucgccuggagcuccagcuccugccacgacgggaaggccuggcugcacgugugcaucaccggcgacgacaagaacgcgaccgccagcuucaucuacaacgggcggcucguggacuccguggucagcugguccaaggagauccugcgcacccaggagagcgagugcgugugcaucaacggcacgugcaccguggucaugaccgacggguccgccagcggcaaggccgacaccaagauccuguucaucgaggagggcaagaucgugcacacgagcacccucuccgggagcgcgcagcacguggaggagugcuccugcuacccccgguacccgggcguccgcugcgugugccgggacaacuggaaggggagcaaccgccccaucguggacaucaacaucaaggaccacuccaucgucagccgguaccugugcuccggccuggugggcgacacgccccgcaagaacgacagcuccagcuccagccacugccucgaccccaacaacgaggagggcgggcacggggugaagggcugggccuucgacgacgggaacgacgucuggaugggccggaccaucaacgagaccucccgccugggcuacgagaccuucaaggugaucgagggguggagcaacccgaaguccaagcugcagaucaaccggcaggucaucguggaccgcggcgaccggagcggguacuccggcaucuucagcguggaggggaaguccugcaucaaccgcugcuucuacgucgagcucauccggggccgcaaggaggagaccgaggugcuguggaccagcaacagcaucguggucuucugcggcacguccgggaccuacggcaccgggagcuggcccgacggcgccgaccugaaccucaugcccaucuga

SEQ ID NO: 88721 - RNA, 1410 nt, Artificial Sequence; identical to SEQ ID NO: 86170
  derived and/or modified CDS sequence (opt1) from neuraminidase__InfluenzaA__AHL95179

SEQ ID NO: 88722 - RNA, 1410 nt, Artificial Sequence; identical to SEQ ID NO: 86170
  derived and/or modified CDS sequence (opt1) from neuraminidase__InfluenzaA__AHL95191

SEQ ID NO: 88723 - RNA, 1410 nt, Artificial Sequence; identical to SEQ ID NO: 86170
  derived and/or modified CDS sequence (opt1) from neuraminidase__InfluenzaA__AHL95203

SEQ ID NO: 88724 - RNA, 1410 nt, Artificial Sequence; identical to SEQ ID NO: 86170
  derived and/or modified CDS sequence (opt1) from neuraminidase__InfluenzaA__AHL95215

SEQ ID NO: 88725 - RNA, 1410 nt, Artificial Sequence
  derived and/or modified CDS sequence (opt1) from neuraminidase__InfluenzaA__AHL95227
augaaccccaaccagaagaucaucaccaucggcagcgugucccugaccaucagcacgaucugcuucuucaugcagaucgccauccucaucaccaccgucacccugcacuucaagcaguacgaguucaacuccccgcccaacaaccaggugaugcugugcgagcccacgaucaucgagcgcaacaucaccgagaucguguaccucaccaacaccacgaucgagaaggagaucugccccaagccggccgaguaccggaacuggagcaagccccagugcgggaucaccggcuucgcgcccuucuccaaggacaacagcauccgccuguccgccgggggcgacaucugggucacccgggagcccuacgugagcugcgacccggacaagugcuaccaguucgcccuggggcagggcaccacgcucaacaacaugcacuccaacaacaccgugcgcgaccggacccccuaccgcacccugcugaugaacgagcucggcguccccuuccaccuggggacgaagcaggucugcaucgccuggagcuccagcuccugccacgacggcaaggccuggcugcacgugugcaucaccggggacgacaagaacgcgaccgccagcuucaucuacaacggccggcucguggacuccguggugagcugguccaaggagauccugcgcacccaggagagcgagugcgucugcaucaacgggacgugcaccguggugaugaccgacggcuccgccagcggcaaggccgacaccaagauccuguucaucgaggaggggaagaucguccacacgagcacccucuccggcagcgcgcagcacguggaggagugcuccugcuacccccgguacccgggggugcgcugcgucugccgggacaacuggaagggcagcaaccgccccaucguggacaucaacaucaaggaccacuccaucgugagcuccuacgucugcagcggccuggugggggacaccccgcgggagaacgacuccagcuccagcucccacugccuggaccccaacaacgaggagggcgggcacggcgugaaggggugggccuucgacgacggcaacgacgucuggaugggccgcaccaucaacgagacgagccggcucggguacgagaccuucaaggugaucgagggcugguccaaccccaagagcaagcugcagaucaaccgccaggucaucguggaccgcggggaccgguccggcuacagcgggaucuucuccguggagggcaagagcugcaucaaccggugcuucuacgucgagcugauccgcggccggaaggaggagaccgaggugcucuggaccagcaacuccaucguggucuucugcgggacgagcggcaccuacgggaccggcuccuggcccgacggggccgaccugaaccugaugcccaucuga

SEQ ID NO: 88726 - RNA, 1410 nt, Artificial Sequence; identical to SEQ ID NO: 87907
  derived and/or modified CDS sequence (opt1) from neuraminidase__InfluenzaA__AHL95239

SEQ ID NO: 88727 - RNA, 1410 nt, Artificial Sequence
  derived and/or modified CDS sequence (opt1) from neuraminidase__InfluenzaA__AHL95251
augaaccccaaccagaagaucaucaccaucggcagcgugucccugaccaucagcacgaucugcuucuucaugcagaucgccauccucaucaccaccgucacccugcacuucaagcaguacgaguucaacuccccgcccaacaaccaggugaugcugugcgagcccacgaucaucgagcgcaacaucaccgagaucguguaccucaccaacaccacgaucgagaaggagaucugccccaagccggccgaguaccggaacuggagcaagccccagugcgggaucaccggcuucgcgcccuucuccaaggacaacagcauccgccuguccgccgggggcgacaucugggucacccgggagcccuacgugagcugcgacccggacaagugcuaccaguucgcccuggggcagggcaccacgcucaacaacgugcacuccaacaacaccguccgcgaccggacccccuaccgcacccugcugaugaacgagcucggcgugcccuuccaccuggggacgaagcaggucugcaucgccuggagcuccagcuccugccacgacggcaaggccuggcugcacgugugcaucaccggggacgacaagaacgcgaccgccagcuucaucuacaacggccggcucguggacuccguggucagcugguccaaggagauccugcgcacccaggagagcgagugcgugugcaucaacgggacgugcaccguggucaugaccgacggcuccgccagcggcaaggccgacaccaagauccuguucaucaaggaggggaagaucgugcacacgagcacccucuccggcagcgcgcagcacguggaggagugcuccugcuacccccgguacccggggguccgcugcgugugccgggacaacuggaagggcagcaaccgccccaucguggacaucaacaucaaggaccacuccaucgucagcuccuacgugugcagcggccuggugggggacaccccgcggaagaacgacuccagcuccagcucccacugccuggaccccaacaacgaggagggcgggcacggcgucaaggggugggccuucgacgacggcaacgacguguggaugggccgcaccaucaacgagacgagccggcucggguacgagaccuucaaggucaucgagggcugguccaaccccaagagcaagcugcagaucaaccgccaggugaucguggaccgcggggaccgguccggcuacagcgggaucuucuccgucgagggcaagagcugcaucaaccggugcuucuacguggagcugauccgcggccggaaggaggagaccgaggugcucuggaccagcaacuccaucgucguguucugcgggacgagcggcaccuacgggaccggcuccuggcccgacggggccgaccugaaccugaugcccaucuga

SEQ ID NO: 88728 - RNA, 1410 nt, Artificial Sequence; identical to SEQ ID NO: 86170
  derived and/or modified CDS sequence (opt1) from neuraminidase__InfluenzaA__AHL95263

SEQ ID NO: 88729 - RNA, 1410 nt, Artificial Sequence
  derived and/or modified CDS sequence (opt1) from neuraminidase__InfluenzaA__AHL95275
augaaccccaaccagaagaucaucaccaucggcagcgugucccugaccaucagcacgaucugcuucuucaugcagaucgccauccucaucaccaccgucacccugcacuucaagcaguacgaguucaacuccccgcccaacaaccaggugaugcugugcgagcccacgaucaucgagcgcaacaucaccgagaucguguaccucaccaacaucaccaucgagaaggagaucugccccaagccggccgaguaccggaacuggagcaagccccagugcgggaucacgggcuucgcgcccuucuccaaggacaacagcauccgccuguccgccgggggcgacaucugggucacccgggagcccuacgugagcugcgacccggacaagugcuaccaguucgcccuggggcagggcaccacccucaacaacgugcacuccaacaacacgguccgcgaccggacccccuaccgcacccugcugaugaacgagcucggcgugcccuuccaccuggggaccaagcaggucugcaucgccuggagcuccagcuccugccacgacggcaaggccuggcugcacgugugcaucacgggggacgacaagaacgcgaccgccagcuucaucuacaacggccggcucguggacuccguggucagcugguccaaggagauccugcgcacccaggagagcgagugcgugugcaucaacgggaccugcacgguggucaugaccgacggcuccgccagcggcaaggccgacaccaagauccuguucaucgaggaggggaagaucgugcacaccagcacgcucuccggcagcgcgcagcacguggaggagugcuccugcuacccccgguacccggggguccgcugcgugugccgggacaacuggaagggcagcaaccgccccaucguggacaucaacaucaaggaccacuccaucgucagcuccuacgugugcagcggccuggugggggacaccccgcggaagaacgacuccagcuccagcucccacugccuggaccccaacaacgaggagggcgggcacggcgucaaggggugggccuucgacgacggcaacgacguguggaugggccgcaccaucaacgagaccagccggcucggguacgagacguucaaggucaucgagggcugguccaaccccaagagcaagcugcagaucaaccgccaggugaucguggaccgcggggaccgguccggcuacagcgggaucuucuccgucgagggcaagagcugcaucaaccggugcuucuacguggagcugauccgcggccggaaggaggagaccgaggugcucuggaccagcaacuccaucgucguguucugcgggaccagcggcacguacgggaccggcuccuggcccgacggggccgaccugaaccugaugcccaucuga

SEQ ID NO: 88730 - RNA, 1410 nt, Artificial Sequence; identical to SEQ ID NO: 87413
  derived and/or modified CDS sequence (opt1) from neuraminidase__InfluenzaA__AHL95299

SEQ ID NO: 88731 - RNA, 1410 nt, Artificial Sequence
  derived and/or modified CDS sequence (opt1) from neuraminidase__InfluenzaA__AHL95310
augaaccccaaccagaagaucaucaccaucggcagcgugucccugaccaucagcacgaucugcuucuucaugcagaucgccauccucaucaccaccgucacccugcacuucaagcaguacgaguucaacuccccgcccaacaaccaggugaugcugugcgagcccacgaucaucgagcgcaacaucaccgagaucguguaccucaccaacaccacgaucgagaaggagaucugccccaagccggccgaguaccggaacuggagcaagccccagugcgacaucaccggguucgcgcccuucuccaaggacaacagcauccgccuguccgccggcggggacaucugggucacccgggagcccuacgugagcugcgacccggacaagugcuaccaguucgcccugggccaggggaccacgcucaacaacgugcacuccaacaacaccguccgcgaccggacccccuaccgcacccugcugaugaacgagcucggcgugcccuuccaccugggcacgaagcaggucugcaucgccuggagcuccagcuccugccacgacgggaaggccuggcugcacgugugcaucaccggcgacgacaagaacgcgaccgccagcuucaucuacaacgggcggcucguggacuccguggucagcugguccaaggagauccugcgcacccaggagagcgagugcgugugcaucaacggcacgugcaccguggucaugaccgacggguccgccagcggcaaggccgacaccaagauccuguucaucgaggagggcaagaucgugcacacgagcacccucuccgggagcgcgcagcacguggaggagugcuccugcuacccccgguacccgggcguccgcugcgugugccgggacaacuggaaggggagcaaccgccccaucguggacaucaacaucaaggaccacuccaucgucagccgguacgugugcuccggccuggugggcgacacgccccgcaagaacgacagcuccagcuccagccacugccuggaccccaacaacgaggagggcgggcacggggucaagggcugggccuucgacgacgggaacgacguguggaugggccggaccaucaacgagaccucccgccucggcuacgagaccuucaaggucaucgagggguggagcaacccgaaguccaagcugcagaucaaccgccaggugaucguggaccggggcgaccggagcggguacuccggcaucuucagcgucgaggggaaguccugcaucaaccgcugcuucuacguggagcugauccggggccgcaaggaggagaccgaggugcucuggaccagcaacagcaucgucguguucugcggcacguccgggaccuacggcaccgggagcuggcccgacggcgccaaccugaaccugaugcccaucuga

SEQ ID NO: 88732 - RNA, 1410 nt, Artificial Sequence; identical to SEQ ID NO: 87918
  derived and/or modified CDS sequence (opt1) from neuraminidase__InfluenzaA__AHL95322

SEQ ID NO: 88733 - RNA, 1410 nt, Artificial Sequence; identical to SEQ ID NO: 87895
  derived and/or modified CDS sequence (opt1) from neuraminidase__InfluenzaA__AHL95334

SEQ ID NO: 88734 - RNA, 1410 nt, Artificial Sequence; identical to SEQ ID NO: 86170
  derived and/or modified CDS sequence (opt1) from neuraminidase__InfluenzaA__AHL95423

SEQ ID NO: 88735 - RNA, 1410 nt, Artificial Sequence; identical to SEQ ID NO: 87918
  derived and/or modified CDS sequence (opt1) from neuraminidase__InfluenzaA__AHL95435

SEQ ID NO: 88736 - RNA, 1410 nt, Artificial Sequence; identical to SEQ ID NO: 87895
  derived and/or modified CDS sequence (opt1) from neuraminidase__InfluenzaA__AHL95447

SEQ ID NO: 88737 - RNA, 1410 nt, Artificial Sequence
  derived and/or modified CDS sequence (opt1) from neuraminidase__InfluenzaA__AHL95461
augaaccccaaccagaagaucaucaccaucggcagcgugucccugaccaucagcacgaucugcuucuucaugcagaucgccauccucaucaccaccgucacccugcacuucaagcaguacgaguucaacccgccgcccaacaaccaggugaugcugugcgagcccacgaucaucgagcgcaacaucaccgagaucguguaccucaccaacaccacgaucgagaaggagaucugccccaagcccgccgaguaccggaacugguccaagccccagugcgggaucaccggcuucgcgcccuucagcaaggacaacuccauccgccugagcgccgggggcgacaucugggucacccgggagccguacguguccugcgggcccgacaagugcuaccaguucgcccugggccagggcaccacgcucaacaacaugcacagcaacaacaccgugcgcgaccggacccccuaccgcacccugcugaugaacgagcucgggguccccuuccaccugggcacgaagcaggucugcaucgccugguccagcuccagcugccacgacgggaaggccuggcugcacgugugcaucaccggcgacgacaagaacgcgaccgccuccuucaucuacaacgggcggcucguggacagcgugguguccuggagcaaggagauccugcgcacccaggaguccgagugcgucugcaucaacggcacgugcaccguggugaugaccgacggcagcgccuccgggaaggccgacaccaagauccuguucaucgaggagggcaagaucguccacacgagcacccucagcggguccgcgcagcacguggaggagugcagcugcuacccgcgguaccccggcgugcgcugcgucugccgggacaacuggaagggcuccaaccgccccaucguggacaucaacaucaaggaccacagcaucguguccagcuacgucugcuccgggcuggugggcgacacgccccggaagaacgacagcuccagcuccagccacugccuggacccgaacaacgaggagggcgggcacggggugaagggcugggccuucgacgacggcaacgacgucuggauggggcgcaccaucaacgagaccucccggcucggcuacgagaccuucaaggugaucgagggguggagcaaccccaaguccaagcugcagaucaaccgccaggucaucguggaccggggcgaccgcagcggguacuccggcaucuucagcguggagggcaaguccugcaucaaccggugcuucuacgucgagcugauccgcgggcggaaggaggagaccgaggugcucuggaccagcaacagcaucguggucuucugcggcacguccgggaccuacggcaccgggagcuggcccgacggcgccgaccugaaccugaugcccaucuga

SEQ ID NO: 88738 - RNA, 1410 nt, Artificial Sequence; identical to SEQ ID NO: 86946
  derived and/or modified CDS sequence (opt1) from neuraminidase__InfluenzaA__AHL95473

SEQ ID NO: 88739 - RNA, 1410 nt, Artificial Sequence; identical to SEQ ID NO: 86170
  derived and/or modified CDS sequence (opt1) from neuraminidase__InfluenzaA__AHL95485

SEQ ID NO: 88740 - RNA, 1410 nt, Artificial Sequence; identical to SEQ ID NO: 86170
  derived and/or modified CDS sequence (opt1) from neuraminidase__InfluenzaA__AHL95497

SEQ ID NO: 88741 - RNA, 1410 nt, Artificial Sequence
  derived and/or modified CDS sequence (opt1) from neuraminidase__InfluenzaA__AHL95509
augaaccccaaccagaagaucaucaccaucggcagcgugucccugaccaucagcacgaucugcuucuucaugcagaucgccauccucaucaccaccgucacccugcacuucaagcaguacgaguucaacuccccgcccaacaaccaggugaugcugugcgagcccacgaucaucgagcgcaacaucaccgagaucguguaccucaccaacaccacgaucgagaaggagaucugccccaagccggccgaguaccggaacuggagcaagccccagugcgggaucaccggcuucgcgcccuucuccaaggacaacagcauccgccuguccgccgggggcgacaucugggucacccgggagcccuacgugagcugcgacccggacaagugcuaccaguucgcccuggggcagggcaccacgcucaacaacgugcacuccaacaacaccguccgcgaccggacccccuaccgcacccugcugaugaacgagcucggcgugcccuuccaccuggggacgaagcaggucugcaucgccuggagcuccagcuccugccacgacggcaaggccuggcugcacgugugcaucaccggggacgacaagaacgcgaccgccagcuucaucuacaacggccggcucguggacuccguggucagcugguccaaggagauccugcgcacccaggagagcgagugcgugugcaucaacgggacgugcaccguggucaugaccgacggcuccgccagcggcaaggccgacaccaagauccuguucaucgaggaggggaagaucgugcacacgagcacccucuccggcagcgcgcagcacguggaggagugcuccugcuacccccgguacccggggguccgcugcgugugccgggacaacuggaagggcagcaaccgccccaucguggacaucaacaucaagaaccacuccaucgucagcuccuacgugugcagcggccuggugggggacaccccgcggaagaacgacuccagcuccagcucccacugccuggaccccaacaacgaggagggcgggcacggcgucaaggggugggccuucgacgacggcaacgacguguggaugggccgcaccaucaacgagacgagccggcucggguacgagaccuucaaggucaucgagggcugguccaaccccaagagcaagcugcagaucaaccgccaggugaucguggaccgcggggaccgguccggcuacagcgggaucuucuccgucgagggcaagagcugcaucaaccggugcuucuacguggagcugauccgcggccggaaggaggagaccgaggugcucuggaccagcaacuccaucgucguguucugcgggacgagcggcaccuacgggaccggcuccuggcccgacggggccgaccugaaccugaugcccaucuga

SEQ ID NO: 88742 - RNA, 1410 nt, Artificial Sequence; identical to SEQ ID NO: 86170
  derived and/or modified CDS sequence (opt1) from neuraminidase__InfluenzaA__AHL95521

SEQ ID NO: 88743 - RNA, 1410 nt, Artificial Sequence; identical to SEQ ID NO: 86170
  derived and/or modified CDS sequence (opt1) from neuraminidase__InfluenzaA__AHL95533

SEQ ID NO: 88744 - RNA, 1410 nt, Artificial Sequence; identical to SEQ ID NO: 86170
  derived and/or modified CDS sequence (opt1) from neuraminidase__InfluenzaA__AHL95545

SEQ ID NO: 88745 - RNA, 1410 nt, Artificial Sequence
  derived and/or modified CDS sequence (opt1) from neuraminidase__InfluenzaA__AHL95557
augaaccccaaccagaagaucaucaccaucggcagcgugucccugaccaucagcacgaucugcuucuucauccagaucgccauccucaucaccaccgucacccugcacuucaagcaguacgaguucaacuccccgcccaacaaccaggugaugcugugcgagcccacgaucaucgagcgcaacaucaccgagaucguguaccucaccaacaccacgaucgagaaggagaucugccccaagccggccgaguaccggaacuggagcaagccccagugcgggaucaccggcuucgcgcccuucuccaaggacaacagcauccgccuguccgccgggggcgacaucugggucacccgggagcccuacgugagcugcgacccggacaagugcuaccaguucgcccuggggcagggcaccacgcucaacaacgugcacuccaacaacaccgcccgcgaccggacccccuaccgcacccugcugaugaacgagcucggcguccccuuccaccuggggacgaagcaggucugcaucgccuggagcuccagcuccugccacgacggcaaggcguggcugcacgugugcaucaccggggacgacaagaacgccaccgccagcuucaucuacaacggccggcucguggacuccguggugagcugguccaaggagauccugcgcacccaggagagcgagugcgucugcaucaacgggacgugcaccguggugaugaccgacggcuccgccagcggcaaggcggacaccaagauccuguucaucgaggaggggaagaucguccacacgagcacccucuccggcagcgcccagcacguggaggagugcuccugcuacccccgguacccgggggugcgcugcgucugccgggacaacuggaagggcagcaaccgccccaucguggacaucaacaucaaggaccacuccaucgugagcuccuacgucugcagcggccuggugggggacacgccccggaagaacgacuccagcuccagcucccacugccuggaccccaacaacgaggagggcgggcacggcgugaaggggugggccuucgacgacggcaacgacgucuggaugggccgcaccaucaacgagaccagccggcucggguacgagaccuucaaggugaucgagggcugguccaacccggagagcaagcugcagaucaaccgccaggucaucguggaccgcggggaccgguccggcuacagcgggaucuucuccguggagggcaagagcugcaucaaccggugcuucuacgucgagcugauccgcggccggaaggaggagaccgaggugcucuggaccagcaacuccaucguggucuucugcgggacgagcggcaccuacgggaccggcuccuggcccgacggggccgaccugaaccugaugcccaucuga

SEQ ID NO: 88746 - RNA, 1410 nt, Artificial Sequence; identical to SEQ ID NO: 87895
  derived and/or modified CDS sequence (opt1) from neuraminidase__InfluenzaA__AHL95569

SEQ ID NO: 88747 - RNA, 1410 nt, Artificial Sequence; identical to SEQ ID NO: 86170
  derived and/or modified CDS sequence (opt1) from neuraminidase__InfluenzaA__AHL95581

SEQ ID NO: 88748 - RNA, 1410 nt, Artificial Sequence
  derived and/or modified CDS sequence (opt1) from neuraminidase__InfluenzaA__AHL95605
augaaccccaaccagaagaucaucaccaucggcagcgugucccugaccaucagcacgaucugcuucuucaugcagaucgccauccucaucaccaccgucacccugcacuucaagcaguacgaguucaacuccccgcccaacaaccaggugaugcugugcgagcccacgaucaucgagcgcaacaucaccgagaucguguaccucaccaacaccacgaucgagaaggagaucugccccaagccggccgaguaccggaacuggagcaagccccagugcgggaucaccggcuucgcgcccuucuccaaggacaacagcauccgccuguccgccgggggcgacaucugggucacccgggagcccuacgugagcugcgacccggacaagugcuaccaguucgcccuggggcagggcaccacgcucaacaacgugcacuccaacaacaccguccgcgaccggacccccuaccgcacccugcugaugaacgagcucggcgugcccuuccaccuggggacgaagcaggucugcaucgccuggagcuccagcuccugccacgacggcaaggccuggcugcacgugugcaucaccggggacgacaagaacgcgaccgccagcuucaucuacaacggccggcucguggacuccguggucagcugguccaaggagauccugcgcacccaggagagcgagugcgugugcaucaacgggacgugcaccguggucaugaccgacggcuccgccagcggcaaggccgacaccaagauccuguucaucgaggaggggaagaucgugcacacgagcacccucuccggcagcgcgcagcacguggaggagugcuccugcuacccccgguacccggggguccgcugcgugugccgggacaacuggaagggcagcaaccgccccaucguggacaucaacaucaaggaccacuccaucgucagcuccuacgugugcagcggccuggugggggacacgccccggaagaacgacaucuccagcuccagccacugccuggaccccaacaacgaggagggcgggcacggcgucaaggggugggccuucgacgacggcaacgacguguggaugggccgcaccaucaacgagaccucccggcucggguacgagaccuucaaggucaucgagggcuggagcaacccgaaguccaagcugcagaucaaccgccaggugaucguggaccgcggggaccggagcggcuacuccgggaucuucagcgucgagggcaaguccugcaucaaccggugcuucuacguggagcugauccgcggccggaaggaggagaccgaggugcucuggaccagcaacagcaucgucguguucugcgggacguccggcaccuacgggaccggcagcuggcccgacggggccgaccugaaccugaugcccaucuga

SEQ ID NO: 88749 - RNA, 1410 nt, Artificial Sequence; identical to SEQ ID NO: 86170
  derived and/or modified CDS sequence (opt1) from neuraminidase__InfluenzaA__AHL95617

SEQ ID NO: 88750 - RNA, 1410 nt, Artificial Sequence; identical to SEQ ID NO: 86170
  derived and/or modified CDS sequence (opt1) from neuraminidase__InfluenzaA__AHL95629

SEQ ID NO: 88751 - RNA, 1410 nt, Artificial Sequence; identical to SEQ ID NO: 86170
  derived and/or modified CDS sequence (opt1) from neuraminidase__InfluenzaA__AHL95641

SEQ ID NO: 88752 - RNA, 1410 nt, Artificial Sequence; identical to SEQ ID NO: 86170
  derived and/or modified CDS sequence (opt1) from neuraminidase__InfluenzaA__AHL95653

SEQ ID NO: 88753 - RNA, 1410 nt, Artificial Sequence; identical to SEQ ID NO: 88748
  derived and/or modified CDS sequence (opt1) from neuraminidase__InfluenzaA__AHL95665

SEQ ID NO: 88754 - RNA, 1410 nt, Artificial Sequence; identical to SEQ ID NO: 86170
  derived and/or modified CDS sequence (opt1) from neuraminidase__InfluenzaA__AHL95677

SEQ ID NO: 88755 - RNA, 1410 nt, Artificial Sequence
  derived and/or modified CDS sequence (opt1) from neuraminidase__InfluenzaA__AHL95689
augaaccccaaccagaagaucaucaccaucggcagcgugucccugaccaucagcacgaucugcuucuucaugcagaucgccauccucaucaccaccgucacccugcacuucaagcaguacgaguucgacuccccgcccaacaaccaggugaugcugugcgagcccacgaucaucgagcgcaacaucaccgagaucguguaccucaccaacaccacgaucgagaaggagaucugccccaagccggccgaguaccggaacuggagcaagccccagugcgggaucaccggcuucgcgcccuucuccaaggacaacagcauccgccuguccgccgggggcgacaucugggucacccgggagcccuacgugagcugcgacccggacaagugcuaccaguucgcccuggggcagggcaccacgcucaacaacgugcacuccaacaacaccguccgcgaccggacccccuaccgcacccugcugaugaacgagcucggcgugcccuuccaccuggggacgaagcaggucugcaucgccuggagcuccagcuccugccacgacggcaaggccuggcugcacgugugcaucaccggggacgacaagaacgcgaccgccagcuucaucuacaacggccggcucguggacuccguggucagcugguccaaggagauccugcgcacccaggagagcgagugcgugugcaucaacgggacgugcaccguggucaugaccgacggcuccgccagcggcaaggccgacaccaagauccuguucaucgaggaggggaagaucgugcacacgagcacccucuccggcagcgcgcagcacguggaggagugcuccugcuacccccgguacccggggguccgcugcgugugccgggacaacuggaagggcagcaaccgccccaucguggacaucaacaucaaggaccacuccaucgucagcuccuacgugugcagcggccuggugggggacaccccgcggaagaacgacuccagcuccagcucccacugccuggaccccaacaacgaggagggcgggcacggcgucaaggggugggccuucgacgacggcaacgacguguggaugggccgcaccaucaacgagacgagccggcucggguacgagaccuucaaggucaucgagggcugguccaaccccaagagcaagcugcagaucaaccgccaggugaucguggaccgcggggaccgguccggcuacagcgggaucuucuccgucgagggcaagagcugcaucaaccggugcuucuacguggagcugauccgcggccggaaggaggagaccgaggugcucuggaccagcaacuccaucgucguguucugcgggacgagcggcaccuacgggaccggcuccuggcccgacggggccaaccugaaccugaugcccaucuga

SEQ ID NO: 88756 - RNA, 1410 nt, Artificial Sequence; identical to SEQ ID NO: 86170
  derived and/or modified CDS sequence (opt1) from neuraminidase__InfluenzaA__AHL95701

SEQ ID NO: 88757 - RNA, 1410 nt, Artificial Sequence; identical to SEQ ID NO: 86170
  derived and/or modified CDS sequence (opt1) from neuraminidase__InfluenzaA__AHL95713

SEQ ID NO: 88758 - RNA, 1410 nt, Artificial Sequence
  derived and/or modified CDS sequence (opt1) from neuraminidase__InfluenzaA__AHL95725
augaaccccaaccagaagaucaucaccaucggcagcgugucccugaccaucagcacgaucugcuucuucaugcagaucgccauccucaucaccaccgucacccugcacuucaagcaguacgaguucgacccgccgcccaacaaccaggugaugcugugcgagcccacgaucaucgagcgcaacaucaccgagaucguguaccucaccaacaccacgaucgagaaggagaucugccccaagcccgccgaguaccggaacugguccaagccccagugcgggaucaccggcuucgcgcccuucagcaaggacaacuccauccgccugagcgccgggggcgacaucugggucacccgggagccguacguguccugcgaccccgacaagugcuaccaguucgcccuggggcagggcaccacgcucaacaacgugcacagcaacaacaccguccgcgaccggacccccuaccgcacccugcugaugaacgagcucggcgugcccuuccaccuggggacgaagcaggucugcaucgccugguccagcuccagcugccacgacggcaaggccuggcugcacgugugcaucaccggggacgacaagaacgcgaccgccuccuucaucuacaacggccggcucguggacagcguggucuccuggagcaaggagauccugcgcacccaggaguccgagugcgugugcaucaacgggacgugcaccguggucaugaccgacggcagcgccuccggcaaggccgacaccaagauccuguucaucgaggaggggaagaucgugcacacgagcacccucagcggcuccgcgcagcacguggaggagugcagcugcuacccgcgguaccccgggguccgcugcgugugccgggacaacuggaagggcuccaaccgccccaucguggacaucaacaucaaggaccacagcaucgucuccagcuacgugugcuccggccuggugggggacacgccccggaagaacgacagcuccagcuccagccacugccuggacccgaacaacgaggagggcgggcacggcgucaaggggugggccuucgacgacggcaacgacguguggaugggccgcaccaucaacgagaccucccggcucggguacgagaccuucaaggucaucgagggcuggagcaaccccaaguccaagcugcagaucaaccgccaggugaucguggaccgcggggaccggagcggcuacuccgggaucuucagcgucgagggcaaguccugcaucaaccggugcuucuacguggagcugauccgcggccggaaggaggagaucgaggugcucuggaccagcaacagcaucgucguguucugcgggaccuccggcacguacgggaccggcagcuggcccgacggggccgaccugaaccugaugcccaucuga

SEQ ID NO: 88759 - RNA, 1410 nt, Artificial Sequence; identical to SEQ ID NO: 87907
  derived and/or modified CDS sequence (opt1) from neuraminidase__InfluenzaA__AHL95737

SEQ ID NO: 88760 - RNA, 1410 nt, Artificial Sequence
  derived and/or modified CDS sequence (opt1) from neuraminidase__InfluenzaA__AHL95749
augaaccccaaccagaagaucaucaccaucggcagcgugucccugaccaucagcacgaucugcuucuucaugcagaucgccauccucaucaccaccgucacccugcacuucaagcaguacgaguucaacuccccgcccaacaaccaggugaugcugugcgagcccacgaucaucgagcgcaacaucaccgagaucguguaccucaccaacaccacgaucgagaaggagaucugccccaagccggccgaguaccggaacuggagcaagccccagugcgggaucaccggcuucgcgcccuucuccaaggacaacagcauccgccuguccgccgggggcgacaucugggucacccgggagcccuacgugagcugcgacccggacaagugcuaccaguucgcccuggggcagggcaccacgcucaacaacgugcacuccaacaacaccgcccgcgaccggacccccuaccgcacccugcugaugaacgagcucggcguccccuuccaccuggggacgaagcaggucugcaucgccuggagcuccagcuccugccacgacggcaaggcguggcugcacgugugcaucaccggggacgacaagaacgccaccgccagcuucaucuacaacggccggcucguggacuccguggugagcugguccaaggagauccugcgcacccaggagagcgagugcgucugcaucaacgggacgugcaccguggugaugaccgacggcuccgccagcggcaaggcggacaccaagauccuguucaucgaggaggggaagaucguccacacgagcacccucuccggcagcgcccagcacguggaggagugcuccugcuacccccgguacccgggggugcgcugcgucugccgggacaacuggaagggcagcaaccgccccaucguggacaucaacaucaaggaccacuccaucgugagcuccuacgucugcagcggccuggugggggacaccccgcggaagaacgacuccagcuccagcucccacugccuggaccccaacaacgaggagggcgggcacggcgugaaggggugggccuucgacgacggcaacgacgucuggaugggccgcaccaucaacgagacgagccggcucggguacgagaccuucaaggugaucgagggcugguccaaccccaagagcaagcugcagaucaaccgccaggucaucguggaccgcggggaccgguccggcuacagcgggaucuucuccguggagggcaagagcugcaucaaccggugcuucuacgucgagcugauccgcggccggaaggaggagaccgaggugcucuggaccagcaacuccaucguggucuucugcgggacgagcggcaccuacgggaccggcuccuggcccgacggggccgaccugaaccugaugcccaucuga

SEQ ID NO: 88761 - RNA, 1410 nt, Artificial Sequence; identical to SEQ ID NO: 86170
  derived and/or modified CDS sequence (opt1) from neuraminidase__InfluenzaA__AHL95761

SEQ ID NO: 88762 - RNA, 1410 nt, Artificial Sequence; identical to SEQ ID NO: 86170
  derived and/or modified CDS sequence (opt1) from neuraminidase__InfluenzaA__AHL95773

SEQ ID NO: 88763 - RNA, 1410 nt, Artificial Sequence
  derived and/or modified CDS sequence (opt1) from neuraminidase__InfluenzaA__AHL95785
augaaccccaaccagaagaucaucaccaucggcagcgugucccugaccaucagcacgaucugcuucuucaugcagaucgccauccucaucaccaccgucacccugcacuucaagcaguacgaguucaacuccccgcccaacaaccaggugaugcugugcgagcccacgaucaucgagcgcaacaucaccgagaucguguaccucaccaacaccacgaucgagaaggagaucugccccaagccggccgaguaccggaacuggagcaagccccagugcgacaucaccggguucgcgcccuucuccaaggacaacagcguccgccuguccgccggcggggacaucugggugacccgggagcccuacgugagcugcgacccggacaagugcuaccaguucgcccugggccaggggaccacgcucaacaacguccacuccaacaacaccgugcgcgaccggacccccuaccgcacccugcugaugaacgagcucggcgugcccuuccaccugggcacgaagcaggucugcaucgccuggagcuccagcuccugccacgacgggaaggccuggcugcacgugugcaucaccggcgacgacaagaacgcgaccgccagcuucaucuacaacgggcggcucguggacuccgucgugagcugguccaaggagauccugcgcacccaggagagcgagugcgugugcaucaacggcacgugcaccgucgugaugaccgacggguccgccagcggcaaggccgacaccaagauccuguucaucgaggagggcaagaucgugcacacgagcacccucuccgggagcgcgcagcacgucgaggagugcuccugcuacccccgguacccgggcgugcgcugcgugugccgggacaacuggaaggggagcaaccgccccaucgucgacaucaacaucaaggaccacuccaucgugagcuccuacgugugcagcggccuggucggcgacaccccgcggaagaacgacuccagcuccagcucccacugccuggaccccaacaacgaggagggcgggcacggggugaagggcugggccuucgacgacgggaacgacgucuggaugggccgcaccaucaacgagacgagccggcucggcuacgagaccuucaaggugaucgaggggugguccaaccccaagagcaagcugcagaucaaccgccaggugaucgucgaccggggcgaccgcuccggguacagcggcaucuucuccguggagggcaagagcugcaucaaccggugcuucuacguggagcugauccgcgggcggaaggaggagaccgagguccucuggaccagcaacuccaucgugguguucugcggcacgagcgggaccuacggcaccggguccuggcccgacggcgccgaccugaaccugaugcccaucuga

SEQ ID NO: 88764 - RNA, 1410 nt, Artificial Sequence; identical to SEQ ID NO: 87895
  derived and/or modified CDS sequence (opt1) from neuraminidase__InfluenzaA__AHL95797

SEQ ID NO: 88765 - RNA, 1410 nt, Artificial Sequence; identical to SEQ ID NO: 86170
  derived and/or modified CDS sequence (opt1) from neuraminidase__InfluenzaA__AHL95833

SEQ ID NO: 88766 - RNA, 1410 nt, Artificial Sequence; identical to SEQ ID NO: 87895
  derived and/or modified CDS sequence (opt1) from neuraminidase__InfluenzaA__AHL95845

SEQ ID NO: 88767 - RNA, 1410 nt, Artificial Sequence
  derived and/or modified CDS sequence (opt1) from neuraminidase__InfluenzaA__AHL95857
augaaccccaaccagaagaucaucagcaucggcuccgugagccugaccaucuccaccaucugcuucuucaugcagaucgccauccucaucacgaccgucacccugcacuucaagcaguacgaguucaacagcccgcccaacaaccaggugaugcugugcgagcccaccaucaucgagcgcaacaucacggagaucguguaccucaccaacaccaccaucgagaaggagaucugccccaagccggccgaguaccggaacugguccaagccccagugcgggaucacgggcuucgcgcccuucagcaaggacaacuccauccgccugagcgccgggggcgacaucugggucacccgggagcccuacguguccugcgacccggacaagugcuaccaguucgcccuggggcagggcaccacccucaacaacgugcacagcaacaacacgguccgcgaccggacccccuaccgcacccugcugaugaacgagcucggcgugcccuuccaccuggggaccaagcaggucugcaucgccugguccagcuccagcugccacgacggcaaggccuggcugcacgugugcaucacgggggacgacaagaacgcgaccgccuccuucaucuacaacggccggcucguggacagcguggucuccuggagcaaggagauccugcgcacccaggaguccgagugcgugugcaucaacgggaccugcacgguggucaugaccgacggcagcgccagcggcaaggccgacaccaagauccuguucaucgaggaggggaagaucgugcacaccuccacgcucagcggcuccgcgcagcacguggaggagugcagcugcuacccccgguacccggggguccgcugcgugugccgggacaacuggaagggcuccaaccgccccaucguggacaucaacaucaaggaccacagcaucgucuccagcuacgugugcuccggccuggugggggacacgccccggaagaacgacagcuccagcuccagccacugccuggaccccaacaacgaggagggcgggcacggcgucaaggggugggccuucgacgacggcaacgacguguggaugggccgcaccaucaacgagaccucccggcucggguacgagaccuucaaggucaucgagggcuggagcaacccgaaguccaagcugcagaucaaccgccaggugaucguggaccgcggggaccggagcggcuacuccgggaucuucagcgucgagggcaagagcugcaucaaccggugcuucuacguggagcugauccgcggccggaaggaggagaccgaggugcucuggaccuccaacagcaucgucguguucugcgggaccuccggcacguacgggaccggcagcuggcccgacggggccgaccugaaccugaugcccaucuga

SEQ ID NO: 88768 - RNA, 1410 nt, Artificial Sequence; identical to SEQ ID NO: 86170
  derived and/or modified CDS sequence (opt1) from neuraminidase__InfluenzaA__AHL95869

SEQ ID NO: 88769 - RNA, 1410 nt, Artificial Sequence
  derived and/or modified CDS sequence (opt1) from neuraminidase__InfluenzaA__AHL95881
augaaccccaaccagaagaucaucaccaucggcagcgugugcaugaccaucgggauggccaaccugauccuccagaucggcaacaucaucuccaucuggaucagccacuccauccaggucgggaaccagagccagaucgagacgugcaaccaguccgugaucaccuacgagaacaacaccugggugaaccagaccuacgucaacaucagcaacacgaaccuggccgcgggccaguccguggugagcgucaagcuggccgggaacuccagccucugcccgguguccggcugggccaucuacagcaaggacaacuccgugcgcaucggcagcaagggggacgucuucgugauccgggagcccuucaucuccugcagcccccuggagugccgcaccuucuuccugacccagggcgcccuccugaacgacaagcacuccaacgggaccaucaaggaccggagccccuaccgcacgcugauguccugcccgaucggcgaggugcccagccccuacaacagccgguucgaguccgucgccuggagcgcguccgccugccacgacgggaucaacuggcucaccaucggcaucagcggccccgacuccggggccguggccgugcugaaguacaacggcaucaucaccgacaccaucaagagcuggcgcaacaacauccugcggacgcaggaguccgagugcgcgugcgucaacgggagcugcuucaccaucaugaccgacggcccguccgacggccaggccagcuacaagaucuuccgcaucgagaaggggaagaucgugaaguccguggagaugaacgcccccaacuaccacuacgaggagugcagcugcuaccccgacuccagcgagaucacgugcgucugccgggacaacuggcacggcuccaaccgccccugggugagcuucaaccagaaccucgaguaccagaucggguacaucugcuccggcaucuucggggacaacccgcggcccaacgacaagaccggcagcugcggccccguguccagcaacggggccaacggcgucaagggguucagcuucaaguacggcaacgggguguggaucggccgcaccaaguccaucagcucccggaagggcuucgagaugaucugggaccccaacggguggaccggcaccgacaacaacuucagcaucaagcaggacaucguggggaucaacgagugguccggcuacagcggguccuucguccagcacccggagcugacgggccuggacugcauccgccccugcuucuggguggagcucauccggggccgccccaaggagaacaccaucuggaccagcggguccagcaucuccuucugcggcgucaacagcgacaccguggggugguccuggcccgacggcgccgagcugccguucacgaucgacaaguga

SEQ ID NO: 88770 - RNA, 1410 nt, Artificial Sequence
  derived and/or modified CDS sequence (opt1) from neuraminidase__InfluenzaA__AHL95892
augaaccccaaccagaagaucaucaccaucggcagcgugucccugaccaucagcacgaucugcuucuucaugcagaucgccauccucaucaccaccgucacccugcacuucaagcaguacgaguucaacuccccgcccaacaaccaggugaugcugugcgagcccacgaucaucgagcgcaacaucaccgagaucguguaccucaccaacaccacgaucgagaaggagaucugccccaagccggccgaguaccggaacuggagcaagccccagugcgggaucaccggcuucgcgcccuucuccaaggacaacagcauccgccuguccgccgggggcgacaucugggucacccgggagcccuacgugagcugcgacccggacaagugcuaccaguucgcccuggggcagggcaccacgcucaacaacgugcacuccaacaacaccguccgcgaccggacccccuaccgcacccugcugaugaacgagcucggcgugcccuuccaccuggggacgaagcaggucugcaucgccuggagcuccagcuccugccacgacggcaaggccuggcugcacgugugcaucaccggggacgacaagaacgcgaccgccagcuucaucuacaacggccggcucguggacuccguggucagcugguccaaggagauccugcgcacccaggagagcgagugcgugugcaucaacgggacgugcaccguggucaugaccgacggcuccgccagcggcaaggccgacaccaagauccuguucaucgaggaggggaagaucgugcacacgagcacccucuccggcagcgcgcagcacguggaggagugcuccugcuacccccgguacccggggguccgcugcgugugccgggacaacuggaagggcagcaaccgccccaucguggacaucaacaucaaggaccacuccaucgucagccgguacgugugcuccggccuggugggggacacgccccgcaagaacgacagcuccagcuccagccacugccuggaccccaacaacgaggagggcgggcacggcgucaaggggugggccuucgacgacggcaacgacguguggaugggccggaccaucaacgagaccucccgccucggguacgagaccuucaaggucaucgagggcuggagcaacccgaaguccaagcugcagaucaaccggcaggucaucguggaccgcggggaccggagcggcuacuccgggaucuucagcguggagggcaaguccugcaucaaccgcugcuucuacguggagcugauccggggccgcaaggaggagaccgaggugcucuggaccagcaacagcaucgucguguucugcgggacguccggcaccuacgggaccggcagcuggcccgacggggccgaccugaaccugaugcccaucuga

SEQ ID NO: 88771 - RNA, 1410 nt, Artificial Sequence; identical to SEQ ID NO: 86170
  derived and/or modified CDS sequence (opt1) from neuraminidase__InfluenzaA__AHL95904

SEQ ID NO: 88772 - RNA, 1410 nt, Artificial Sequence
  derived and/or modified CDS sequence (opt1) from neuraminidase__InfluenzaA__AHL95916
augaaccccaaccagaagaucaucaccaucggcagcgugucccugaccaucagcacgaucugcuucuucaugcagaucgccauccucaucaccaccgucacccugcacuucaagcaguacgagcugaacuccccgcccaacaaccaggugaugcucugcgagcccacgaucaucgagcgcaacaucaccgagaucguguaccugaccaacaccacgaucgagaaggagaucugccccaagccggccgaguaccggaacuggagcaagccccagugcgggaucaccggcuucgcgcccuucuccaaggacaacagcauccgccuguccgccgggggcgacaucugggucacccgggagcccuacgugagcugcgacccggacaagugcuaccaguucgcccucgggcagggcaccacgcugaacaacgugcacuccaacaacaccguccgcgaccggacccccuaccgcacccugcucaugaacgagcugggcgugcccuuccaccuggggacgaagcaggucugcaucgccuggagcuccagcuccugccacgacggcaaggccuggcuccacgugugcaucaccggggacgacaagaacgcgaccgccagcuucaucuacaacggccggcugguggacuccguggucagcugguccaaggagauccugcgcacccaggagagcgagugcgugugcaucaacgggacgugcaccguggucaugaccgacggcuccgccagcggcaaggccgacaccaagauccucuucaucgaggaggggaagaucgugcacacgagcacccuguccggcagcgcgcagcacguggaggagugcuccugcuacccccgguacccggggguccgcugcgugugccgggacaacuggaagggcagcaaccgccccaucguggacaucaacaucaaggaccacuccaucgucagcuccuacgugugcagcggccuggugggggacaccccgcggaagaacgacuccagcuccagcucccacugccucgaccccaacaacgaggagggcgggcacggcgucaaggggugggccuucgacgacggcaacgacguguggaugggccgcaccaucaacgagacgagccggcugggguacgagaccuucaaggucaucgagggcugguccaaccccaagagcaagcugcagaucaaccgccaggugaucguggaccgcggggaccgguccggcuacagcgggaucuucuccgucgagggcaagagcugcaucaaccggugcuucuacguggagcucauccgcggccggaaggaggagaccgaggugcuguggaccagcaacuccaucgucguguucugcgggacgagcggcaccuacgggaccggcuccuggcccgacggggccgaccugaaccucaugcccaucuga

SEQ ID NO: 88773 - RNA, 1410 nt, Artificial Sequence; identical to SEQ ID NO: 87907
  derived and/or modified CDS sequence (opt1) from neuraminidase__InfluenzaA__AHL95928

SEQ ID NO: 88774 - RNA, 1410 nt, Artificial Sequence; identical to SEQ ID NO: 87895
  derived and/or modified CDS sequence (opt1) from neuraminidase__InfluenzaA__AHL95940

SEQ ID NO: 88775 - RNA, 1410 nt, Artificial Sequence; identical to SEQ ID NO: 86170
  derived and/or modified CDS sequence (opt1) from neuraminidase__InfluenzaA__AHL95952

SEQ ID NO: 88776 - RNA, 1410 nt, Artificial Sequence; identical to SEQ ID NO: 86170
  derived and/or modified CDS sequence (opt1) from neuraminidase__InfluenzaA__AHL95964

SEQ ID NO: 88777 - RNA, 1410 nt, Artificial Sequence; identical to SEQ ID NO: 86170
  derived and/or modified CDS sequence (opt1) from neuraminidase__InfluenzaA__AHL95976

SEQ ID NO: 88778 - RNA, 1410 nt, Artificial Sequence; identical to SEQ ID NO: 86170
  derived and/or modified CDS sequence (opt1) from neuraminidase__InfluenzaA__AHL95988

SEQ ID NO: 88779 - RNA, 1410 nt, Artificial Sequence; identical to SEQ ID NO: 86170
  derived and/or modified CDS sequence (opt1) from neuraminidase__InfluenzaA__AHL96000

SEQ ID NO: 88780 - RNA, 1410 nt, Artificial Sequence
  derived and/or modified CDS sequence (opt1) from neuraminidase__InfluenzaA__AHL96012
augaaccccaaccagaagaucaucaccaucggcagcgugucccugaccaucagcacgaucugcuucuucaugcagaucgccauccucaucaccaccgucacccugcacuucaagcaguacgaguucaacuccccgcccaacaaccaggugaugcugugcgagcccacgaucaucgagcgcaacaucaccgagaucguguaccucaccaacaccacgaucgagaaggagaucugccccaagccggccgaguaccggaacuggagcaagccccagugcgggaucaccggcuucgcgcccuucuccaaggacaacagcauccgccuguccgccgggggcgacaucugggucacccgggugcccuacgugagcugcgacccggacaagugcuaccaguucgcccuggggcagggcaccacgcucaacaacguccacuccaacaacaccgugcgcgaccggacccccuaccgcacccugcugaugaacgagcucggcgugcccuuccaccuggggacgaagcaggucugcaucgccuggagcuccagcuccugccacgacggcaaggccuggcugcacgugugcaucaccggggacgacaagaacgcgaccgccagcuucaucuacaacggccggcucguggacuccgucgugagcugguccaaggagauccugcgcacccaggagagcgagugcgugugcaucaacgggacgugcaccgucgugaugaccgacggcuccgccagcggcaaggccgacaccaagauccuguucaucgaggaggggaagaucgugcacacgagcacccucuccggcagcgcgcagcacgucgaggagugcuccugcuacccccgguacccgggggugcgcugcgugugccgggacaacuggaagggcagcaaccgccccaucgucgacaucaacaucaaggaccacuccaucgugagcuccuacgugugcagcggccuggucggggacaccccgcggaagaacgacuccagcuccagcucccacugccuggaccccaacaacgaggagggcgggcacggcgugaaggggugggccuucgacgacggcaacgacgucuggaugggccgcaccaucaacgagacgagccggcucggguacgagaccuucaaggugaucgagggcugguccaaccccaagagcaagcugcagaucaaccgccaggugaucgucgaccgcggggaccgguccggcuacagcgggaucuucuccguggagggcaagagcugcaucaaccggugcuucuacguggagcugauccgcggccggaaggaggagaccgagguccucuggaccagcaacuccaucgugguguucugcgggacgagcggcaccuacgggaccggcuccuggcccgacggggccgaccugaaccugaugcccaucuga

SEQ ID NO: 88781 - RNA, 1410 nt, Artificial Sequence
  derived and/or modified CDS sequence (opt1) from neuraminidase__InfluenzaA__AHL96024
augaaccccaaccagaagaucaucaccaucggcagcgugucccugaccaucagcacgaucugcuucuucaugcagaucgccauccucaucaccaccgucacccugcacuucaagcaguacgaguucaacuccccgcccaacaaccaggugaugcugugcgagcccacgaucaucgagcgcaacaucaccgagaucguguaccucaccaacaccacgaucgagaaggagaucugccccaagccggccgaguaccggaacuggagcaagccccagugcgggaucaccggcuucgcgcccuucuccaaggacaacagcauccgccuguccgccgggggcgacaucugggucacccgggagcccuacgugagcugcgacccggacaagugcuaccaguucgcccuggggcagggcaccacgcucaacaacgugcacuccaacaacaccguccgcgaccggacccccuaccgcacccugcugaugaacgagcucggcgugcccuuccaccuggggacgaagcaggucugcaucgccuggagcuccagcuccugccacgacggcaaggccuggcugcacgugugcaucaccggggacgacaagaacgcgaccgccagcuucaucuacaacggccggcucguggacuccguggucagcugguccaaggagaaccugcgcacccaggagagcgagugcgugugcaucaacgggacgugcaccguggucaugaccgacggcuccgccagcggcaaggccgacaccaagauccuguucaucgaggaggggaagaucgugcacacgagcacccucuccggcagcgcgcagcacguggaggagugcuccugcuacccccgguacccggggguccgcugcgugugccgggacaacuggaagggcagcaaccgccccaucguggacaucaacaucaaggaccacuccaucgucagcuccuacgugugcagcggccuggugggggacaccccgcggaagaacgacuccagcuccagcucccacugccuggaccccaacaacgaggagggcgggcacggcgucaaggggugggccuucgacgacggcaacgacguguggaugggccgcaccaucaacgagacgagccggcucggguacgagaccuucaaggucaucgagggcugguccaaccccaagagcaagcugcagaucaaccgccaggugaucguggaccgcggggaccgguccggcuacagcgggaucuucuccgucgagggcaagagcugcaucaaccggugcuucuacguggagcugauccgcggccggaaggaggagaccgaggugcucuggaccagcaacuccaucgucguguucugcgggacgagcggcaccuacgggaccggcuccuggcccgacggggccgaccugaaccugaugcccaucuga

SEQ ID NO: 88782 - RNA, 1410 nt, Artificial Sequence; identical to SEQ ID NO: 86170
  derived and/or modified CDS sequence (opt1) from neuraminidase__InfluenzaA__AHL96036

SEQ ID NO: 88783 - RNA, 1410 nt, Artificial Sequence; identical to SEQ ID NO: 87413
  derived and/or modified CDS sequence (opt1) from neuraminidase__InfluenzaA__AHL96048

SEQ ID NO: 88784 - RNA, 1410 nt, Artificial Sequence; identical to SEQ ID NO: 86170
  derived and/or modified CDS sequence (opt1) from neuraminidase__InfluenzaA__AHL96059

SEQ ID NO: 88785 - RNA, 1410 nt, Artificial Sequence; identical to SEQ ID NO: 87907
  derived and/or modified CDS sequence (opt1) from neuraminidase__InfluenzaA__AHL96071

SEQ ID NO: 88786 - RNA, 1410 nt, Artificial Sequence; identical to SEQ ID NO: 88748
  derived and/or modified CDS sequence (opt1) from neuraminidase__InfluenzaA__AHL96083

SEQ ID NO: 88787 - RNA, 1410 nt, Artificial Sequence; identical to SEQ ID NO: 86170
  derived and/or modified CDS sequence (opt1) from neuraminidase__InfluenzaA__AHL96095

SEQ ID NO: 88788 - RNA, 1410 nt, Artificial Sequence
  derived and/or modified CDS sequence (opt1) from neuraminidase__InfluenzaA__AHL96107
augaaccccaaccagaagaucaucaccaucggcagcgugucccugaccaucagcacgaucugcuucuucaugcagaucgccauccucaucaccaccgucacccugcacuucaagcaguacgaguucaacuccccgcccaacaaccaggugaugcugugcgagcccacgaucaucgagcgcaacaucaccgagaucguguaccucaccaacaccacgaucgagaaggagaucugccccaagccggccgaguaccggaacuggagcaagccccagugcgggaucaccggcuucgcgcccuucuccaaggacaacagcauccgccuguccgccgggggcgacaucugggucacccgggagcccuacgugagcugcgacccggacaagugcuaccaguucgcccuggggcagggcaccacgcucaacaacaugcacuccaacaacaccgugcgcgaccggacccccuaccgcacccugcugaugaacgagcucggcguccccuuccaccuggggacgaagcaggucugcaucgccuggagcuccagcuccugccacgacggcaaggccuggcugcacgugugcaucaccggggacgacaagaacgcgaccgccagcuucaucuacaacggccggcucguggacuccguggugagcugguccaaggagauccugcgcacccaggagagcgagugcgucugcaucaacgggacgugcaccguggugaugaccgacggcuccgccagcggcaaggccgacaccaagauccuguucaucgaggaggggaagaucguccacacgagcacccucuccggcagcgcgcagcacguggaggagugcuccugcuacccccgguacccgggggugcgcugcgucugccgggacaacuggaagggcagcaaccgccccaucguggacaucaacaucaaggaccacuccaucgugagcuccuacgucugcagcggccuggugggggacacgccccggaagaacgacaacuccagcuccagccacugccuggaccccaacaacgaggagggcgggcacggcgugaaggggugggccuucgacgacggcaacgacgucuggaugggccgcaccaucaacgagaccucccggcucggguacgagaccuucaaggugaucgagggcuggagcaacccgaaguccaagcugcagaucaaccgccaggucaucguggaccgcggggaccggagcggcuacuccgggaucuucagcguggagggcaaguccugcaucaaccggugcuucuacgucgagcugauccgcggccggaaggaggagaccgaggugcucuggaccagcaacagcaucguggucuucugcgggacguccggcaccuacgggaccggcagcuggcccgacggggccgaccugaaccugaugcccaucuga

SEQ ID NO: 88789 - RNA, 1410 nt, Artificial Sequence; identical to SEQ ID NO: 86170
  derived and/or modified CDS sequence (opt1) from neuraminidase__InfluenzaA__AHL96119

SEQ ID NO: 88790 - RNA, 1410 nt, Artificial Sequence; identical to SEQ ID NO: 87907
  derived and/or modified CDS sequence (opt1) from neuraminidase__InfluenzaA__AHL96131

SEQ ID NO: 88791 - RNA, 1410 nt, Artificial Sequence; identical to SEQ ID NO: 86170
  derived and/or modified CDS sequence (opt1) from neuraminidase__InfluenzaA__AHL96143

SEQ ID NO: 88792 - RNA, 1410 nt, Artificial Sequence; identical to SEQ ID NO: 86170
  derived and/or modified CDS sequence (opt1) from neuraminidase__InfluenzaA__AHL96167

SEQ ID NO: 88793 - RNA, 1410 nt, Artificial Sequence; identical to SEQ ID NO: 86170
  derived and/or modified CDS sequence (opt1) from neuraminidase__InfluenzaA__AHL96179

SEQ ID NO: 88794 - RNA, 1410 nt, Artificial Sequence
  derived and/or modified CDS sequence (opt1) from neuraminidase__InfluenzaA__AHL96191
augaaccccaaccagaagaucaucaccaucggcagcgugucccugaccaucagcacgaucugcuucuucaugcagaucgccauccucaucaccaccgucacccugcacuucaagcaguacgaguucgacuccccgcccaacaaccaggugaugcugugcgagcccacgaucaucgagcgcaacaucaccgagaucguguaccucaccaacaccacgaucgagaaggagaucugccccaagccggccgaguaccggaacuggagcaagccccagugcgggaucaccggcuucgcgcccuucuccaaggacaacagcauccgccuguccgccgggggcgacaucugggucacccgggagcccuacgugagcugcgacccggacaagugcuaccaguucgcccuggggcagggcaccacgcucaacaacaugcacuccaacaacaccgugcgcgaccggacccccuaccgcacccugcugaugaacgagcucggcguccccuuccaccuggggacgaagcaggucugcaucgccuggagcuccagcuccugccacgacggcaaggccuggcugcacgugugcaucaccggggacgacaagaacgcgaccgccagcuucaucuacaacggccggcucguggacuccguggugagcugguccaaggagauccugcgcacccaggagagcgagugcgucugcaucaacgggacgugcaccguggugaugaccgacggcuccgccagcggcaaggccgacaccaagauccuguucaucgaggaggggaagaucguccacacgagcacccucuccggcagcgcgcagcacguggaggagugcuccugcuacccccgguacccgggggugcgcugcgucugccgggacaacuggaagggcagcaaccgccccaucguggacaucaacaucaaggaccacuccaucgugagcuccuacgucugcagcggccuggugggggacaccccgcggaagaacgacuccagcuccagcucccacugccuggaccccaacaacgaggagggcgggcacggcgugaaggggugggccuucgacgacggcaacgacgucuggaugggccgcaccaucaacgagacgagccggcucggguacgagaccuucaaggugaucgagggcugguccaaccccaagagcaagcugcagaucaaccgccaggucaucguggaccgcggggaccgguccggcuacagcgggaucuucuccguggagggcaagagcugcaucaaccggugcuucuacgucgagcugauccgcggccggaaggaggagaccgaggugcucuggaccagcaacuccaucguggucuucugcgggacgagcggcaccuacgggaccggcuccuggcccgacggggccgaccugaaccugaugcccaucuga

SEQ ID NO: 88795 - RNA, 1410 nt, Artificial Sequence; identical to SEQ ID NO: 87895
  derived and/or modified CDS sequence (opt1) from neuraminidase__InfluenzaA__AHL96203

SEQ ID NO: 88796 - RNA, 1410 nt, Artificial Sequence; identical to SEQ ID NO: 87907
  derived and/or modified CDS sequence (opt1) from neuraminidase__InfluenzaA__AHL96215

SEQ ID NO: 88797 - RNA, 1410 nt, Artificial Sequence; identical to SEQ ID NO: 86170
  derived and/or modified CDS sequence (opt1) from neuraminidase__InfluenzaA__AHL96227

SEQ ID NO: 88798 - RNA, 1410 nt, Artificial Sequence; identical to SEQ ID NO: 86170
  derived and/or modified CDS sequence (opt1) from neuraminidase__InfluenzaA__AHL96239

SEQ ID NO: 88799 - RNA, 1410 nt, Artificial Sequence; identical to SEQ ID NO: 86170
  derived and/or modified CDS sequence (opt1) from neuraminidase__InfluenzaA__AHL96251

SEQ ID NO: 88800 - RNA, 1410 nt, Artificial Sequence; identical to SEQ ID NO: 86170
  derived and/or modified CDS sequence (opt1) from neuraminidase__InfluenzaA__AHL96263

SEQ ID NO: 88801 - RNA, 1410 nt, Artificial Sequence; identical to SEQ ID NO: 87951
  derived and/or modified CDS sequence (opt1) from neuraminidase__InfluenzaA__AHL96277

SEQ ID NO: 88802 - RNA, 1410 nt, Artificial Sequence
  derived and/or modified CDS sequence (opt1) from neuraminidase__InfluenzaA__AHL96308
augaaccccaaccagaagaucaucaccaucggcagcgugucccugaccaucagcacgaucugcuucuucaugcagaucgccauccucaucaccaccgucacccugcacuucaagcaguacgaguucaacuucccgcccaacaaccaggugaugcugugcgagcccacgaucaucgagcgcaacaucaccgagaucguguaccucaccaacaccacgaucgagaaggagaucugccccaagccggccgaguaccggaacugguccaagccccagugcgggaucaccggcuucgcgcccuucagcaaggacaacuccauccgccugagcgccgggggcgacaucugggucacccgggagcccuacguguccugcgacccggacaagugcuaccaguucgcccuggggcagggcaccacgcucaacaacgugcacagcaacaacaccguccgcgaccggacccccuaccgcacccugcugauguccgagcucggcgugcccuuccaccuggggacgaagcaggucugcaucgccuggagcuccagcuccugccacgacggcaaggccuggcugcacgugugcaucaccggggacgacaagaacgcgaccgccagcuucaucuacaacggccggcucguggacuccguggucagcugguccaaggagauccugcgcacccaggagagcgagugcgugugcaucaacgggacgugcaccguggucaugaccgacggcuccgccagcggcaaggccgacaccaagauccuguucaucgaggaggggaagaucgugcacacgagcacccucuccggcagcgcgcagcacguggaggagugcuccugcuacccccgguacccggggguccgcugcgugugccgggacaacuggaagggcagcaaccgccccaucguggacaucaacaucaaggaccacuccaucgucagcuccuacgugugcagcggccuggugggggacaccccgcggaagaacgacuccagcuccagcucccacugccuggaccccaacaacgaggagggcgggcacggcgucaaggggugggccuucgacgacggcaacgacguguggaugggccgcaccaucaacgagacgagccggcucggguacgagaccuucaaggucaucgagggcugguccaaccccaagagcaagcugcagaucaaccgccaggugaucguggaccgcggggaccgguccggcuacagcgggaucuucuccgucgagggcaagagcugcaucaaccggugcuucuacguggagcugauccgcggccggaaggaggagaccgaggugcucuggaccagcaacuccaucgucguguucugcgggacgagcggcaccuacgggaccggcuccuggcccgacggggccgaccugaaccugaugcccaucuga

SEQ ID NO: 88803 - RNA, 1410 nt, Artificial Sequence; identical to SEQ ID NO: 87399
  derived and/or modified CDS sequence (opt1) from neuraminidase__InfluenzaA__AHL96321

SEQ ID NO: 88804 - RNA, 1410 nt, Artificial Sequence; identical to SEQ ID NO: 86170
  derived and/or modified CDS sequence (opt1) from neuraminidase__InfluenzaA__AHL96333

SEQ ID NO: 88805 - RNA, 1410 nt, Artificial Sequence
  derived and/or modified CDS sequence (opt1) from neuraminidase__InfluenzaA__AHL96345
augaaccccaaccagaagaucaucaccaucggcagcgugucccugaccaucagcacgaucugcuucuucaugcagaucgccauccucaucaccaccgucacccugcacuucaagcaguacgaguucaacuccccgcccaacaaccaggugaugcugugcgagcccacgaucaucgagcgcaacaucaccgagaucguguaccucaccaacaccacgaucgagaaggagaucugccccaagccggccgaguaccggaacuggagcaagccccagugcgggaucaccggcuucgcgcccuucuccaaggacaacagcauccgccuguccgccgggggcgacaucugggucacccgggagcccuacgugagcugcgacccggacaagugcuaccaguucgcccuggggcagggcaccacgcucaacaacgugcacuccaacaacaccguccgcgaccggacccccuaccgcacccugcugaugaacgagcucggcgugcccuuccaccuggggacgaagcaggucugcaucgccuggagcuccagcuccugccacgacggcaaggccuggcugcacgugugcaucaccggggacgacaagaacgcgaccgccagcuucaucuacaacggccggcucguggacuccguggucagcugguccaaggagauccugcgcacccaggagagcgagugcgugugcaucaacgggacgugcaccguggucaugaccgacggcuccgccagcggcaaggccgacaccaagauccuguucaucgaggaggggaagaucgugcacacgagcacccucuccggcagcgcgcagcacguggaggagugcuccugcuacccccgguacccggggguccgcugcgugugccgggacaacuggaagggcagcaaccgccccaucguggacaucaacaucaaggaccacuccaucgucagcuccuacgugugcagcggccuggugggggacacgccccggaagaacgacaacuccagcuccagccacugccuggaccccaacaacgaggagggcgggcacggcgucaaggggugggccuucgacgacggcaacgacguguggaugggccgcaccaucaacgagaccucccggcucggguacgagaccuucaaggucaucgagggcuggagcaacccgaaguccaagcugcagaucaaccgccaggugaucguggaccgcggggaccggagcggcuacuccgggaucuucagcgucgagggcaaguccugcaucaaccggugcuucuacguggagcugauccgcggccggaaggaggagaccgaggugcucuggaccagcaacagcaucgucguguucugcgggacguccggcaccuacgggaccggcagcuggcccgacggggccgaccugaaccugaugcccaucuga

SEQ ID NO: 88806 - RNA, 1410 nt, Artificial Sequence; identical to SEQ ID NO: 87895
  derived and/or modified CDS sequence (opt1) from neuraminidase__InfluenzaA__AHL96357

SEQ ID NO: 88807 - RNA, 1410 nt, Artificial Sequence; identical to SEQ ID NO: 86170
  derived and/or modified CDS sequence (opt1) from neuraminidase__InfluenzaA__AHL96369

SEQ ID NO: 88808 - RNA, 1410 nt, Artificial Sequence; identical to SEQ ID NO: 86170
  derived and/or modified CDS sequence (opt1) from neuraminidase__InfluenzaA__AHL96381

SEQ ID NO: 88809 - RNA, 1410 nt, Artificial Sequence; identical to SEQ ID NO: 87907
  derived and/or modified CDS sequence (opt1) from neuraminidase__InfluenzaA__AHL96393

SEQ ID NO: 88810 - RNA, 1410 nt, Artificial Sequence
  derived and/or modified CDS sequence (opt1) from neuraminidase__InfluenzaA__AHL96405
augaaccccaaccagaagaucaucaccaucggcagcgugucccugaccaucagcacgaucugcuucuucaugcagaucgccauccucaucaccaccgucacccugcacuucaagcaguacgaguucaacuccccgcccaacaaccaggugaugcugugcgagcccacgaucaucgagcgcaacaucaccgagaucguguaccucaccaacaccacgaucgagaaggagaucugccccaagccggccgaguaccggaacuggagcaagccccagugcgggaucaccggcuucgcgcccuucuccaaggacaacagcauccgccuguccgccgggggcgacaucugggucacccgggagcccuacgugagcugcgacccggacaagugcuaccaguucgcccuggggcagggcaccacgcucaacaacgugcacuccaacaacaccguccgcgaccggacccccuaccgcacccugcugaugaacgagcucggcgugcccuuccaccuggggacgaagcaggucugcaucgccuggagcuccagcuccugccacgacggcaaggccuggcugcacgugugcaucaccggggacgacaagaacgcgaccgccagcuucaucuacaacggccggcucguggacuccguggucagcugguccaaggagauccugcgcacccaggagagcgagugcgugugcaucaacgggacgugcaccguggucaugaccgacggcuccgccagcggcaaggccgacaccaagauccuguucaucgaggaggggaagaucgugcacacgagcacccucuccggcagcgcgcagcacguggaggagugcuccugcuacccccgguacccggggguccgcugcgugugccgggacaacuggaagggcagcaaccgccccaucguggacaucaacaucaaggaccacuccaucgucagcuccuacgugugcagcggccuggugggggacaccccgcggaagaacgacuccagcuccagcucccacugccugggccccaacaacgaggagggcgggcacggggucaagggcugggccuucgacgacggcaacgacguguggauggggcgcaccaucaacgagacgagccggcucggcuacgagaccuucaaggucaucgaggggugguccaaccccaagagcaagcugcagaucaaccgccaggugaucguggaccggggcgaccgcuccggguacagcggcaucuucuccgucgagggcaagagcugcaucaaccggugcuucuacguggagcugauccgcgggcggaaggaggagaccgaggugcucuggaccagcaacuccaucgucguguucugcggcacgagcgggaccuacggcaccggguccuggcccgacggcgccgaccugaaccugaugcccaucuga

SEQ ID NO: 88811 - RNA, 1410 nt, Artificial Sequence; identical to SEQ ID NO: 86170
  derived and/or modified CDS sequence (opt1) from neuraminidase__InfluenzaA__AHL96417

SEQ ID NO: 88812 - RNA, 1410 nt, Artificial Sequence; identical to SEQ ID NO: 86170
  derived and/or modified CDS sequence (opt1) from neuraminidase__InfluenzaA__AHL96429

SEQ ID NO: 88813 - RNA, 1410 nt, Artificial Sequence
  derived and/or modified CDS sequence (opt1) from neuraminidase__InfluenzaA__AHL96441
augaaccccaaccagaagaucaucaccaucggcagcgugucccugaccaucagcacgaucugcuucuucaugcagaucgccauccucaucaccaccgucacccugcacuucaagcacuacgaguucaacuccccgcccaacaaccaggugaugcugugcgagcccacgaucaucgagcgcaacaucaccgagaucguguaccucaccaacaccacgaucgagaaggagaucugccccaagccggccgaguaccggaacuggagcaagccccagugcgacaucaccggguucgcgcccuucuccaaggacaacagcauccgccuguccgccggcggggacaucugggucacccgggagcccuacgugagcugcgacccggacaagugcuaccaguucgcccugggccaggggaccacgcucaacaacgugcacuccaacaacaccguccgcgaccggacccccuaccgcacccugcugaugaacgagcucggcgugcccuuccaccugggcacgaagcaggucugcaucgccuggagcuccagcuccugccacgacgggaaggccuggcugcacgugugcaucaccggcgacgacaagaacgcgaccgccagcuucaucuacaacgggcggcucguggacuccguggucagcugguccaaggagauccugcgcacccaggagagcgagugcgugugcaucaacggcacgugcaccguggucaugaccgacggguccgccagcggcaaggccgacaccaagauccuguucaucgaggagggcaagaucgugcacacgagcacccucuccgggagcgcgcagcacguggaggagugcuccugcuacccccgguacccgggcguccgcugcgugugccgggacaacuggaaggggagcaaccgccccaucguggacaucaacaucaaggaccacuccaucgucagccgguacgugugcuccggccuggugggcgacacgccccgcaagaacgacagcuccagcuccagccacugccugaaccccaacaacgaggagggcgggcacggggucaagggcugggccuucgacgacgggaacgacguguggaugggccggaccaucaacgagaccucccgccucggcuacgagaccuucaaggucaucgagggguggagcaacccgaaguccaagcugcagaucaaccggcagaucaucguggaccgcggcgaccggagcggguacuccggcaucuucagcguggaggggaaguccugcaucaaccgcugcuucuacgucgagcugauccggggccgcaaggaggagaccgaggugcucuggaccagcaacagcaucguggucuucugcggcacguccgggaccuacggcaccgggagcuggcccgacggcgccgaccugaaccugaugcccaucuga

SEQ ID NO: 88814 - RNA, 1410 nt, Artificial Sequence; identical to SEQ ID NO: 86170
  derived and/or modified CDS sequence (opt1) from neuraminidase__InfluenzaA__AHL96453

SEQ ID NO: 88815 - RNA, 1410 nt, Artificial Sequence; identical to SEQ ID NO: 86170
  derived and/or modified CDS sequence (opt1) from neuraminidase__InfluenzaA__AHL96465

SEQ ID NO: 88816 - RNA, 1410 nt, Artificial Sequence
  derived and/or modified CDS sequence (opt1) from neuraminidase__InfluenzaA__AHL96477
augaaccccaaccagaagaucaucaccaucggcagcgugugcaugaccaucgggauggccaaccugauccuccagaucggcaacaucaucuccaucuggaucagccacuccauccaggucgggaaccagagccagaucgagacgugcaaccaguccgugaucaccuacgagaacaacaccugggugaaccagaccuacgucaacaucagcaacacgaacuucgccgcgggccaguccguggugagcgucaagcuggccgggaacuccagccugugcccgguguccggcugggccaucuacagcaaggacaacuccgugcgcaucggcagcaagggggacgucuucgugauccgggagcccuucaucuccugcagcccccucgagugccgcaccuucuuccugacccagggcgcccugcucaacgacaagcacuccaacgggaccaucaaggaccggagccccuaccgcacgcugauguccugcccgaucggcgaggugcccagccccuacaacagccgguucgaguccgucgccuggagcgcguccgccugccacgacgggaucaacuggcugaccaucggcaucagcggccccgacuccggggccguggccgugcucaaguacaacggcaucaucaccgacaccaucaagagcuggcgcaacaacauccugcggacgcaggaguccgagugcgcgugcgucaacgggagcugcuucaccaucaugaccgacggcccguccgacggccaggccagcuacaagaucuuccgcaucgagaaggggaagaucgugaaguccguggagaugaacgcccccaacuaccacuacgaggagugcagcugcuaccccgacuccagcgagaucacgugcgucugccgggacaacuggcacggcuccaaccgccccugggugagcuucaaccagaaccuggaguaccagaucggguacaucugcuccggcaucuucggggacaacccgcggcccaacgacaagaccggcagcugcggccccguguccagcaacggggccaacggcgucaagggguucagcuucaaguacggcaacgggguguggaucggccgcaccaaguccaucagcucccggaagggcuucgagaugaucugggaccccaacggguggaccggcaccgacaacaacuucagcaucaagcaggacaucguggggaucaacgagugguccggcuacagcggguccuucguccagcacccggagcucacgggccuggacugcauccgccccugcuucuggguggagcugauccggggccgccccaaggagaacaccaucuggaccagcggguccagcaucuccuucugcggcgucaacagcgacaccguggggugguccuggcccgacggcgccgagcucccguucacgaucgacaaguga

SEQ ID NO: 88817 - RNA, 1410 nt, Artificial Sequence; identical to SEQ ID NO: 87907
  derived and/or modified CDS sequence (opt1) from neuraminidase__InfluenzaA__AHL96488

SEQ ID NO: 88818 - RNA, 1410 nt, Artificial Sequence; identical to SEQ ID NO: 86170
  derived and/or modified CDS sequence (opt1) from neuraminidase__InfluenzaA__AHL96500

SEQ ID NO: 88819 - RNA, 1410 nt, Artificial Sequence; identical to SEQ ID NO: 86170
  derived and/or modified CDS sequence (opt1) from neuraminidase__InfluenzaA__AHL96512

SEQ ID NO: 88820 - RNA, 1410 nt, Artificial Sequence; identical to SEQ ID NO: 87399
  derived and/or modified CDS sequence (opt1) from neuraminidase__InfluenzaA__AHL96524

SEQ ID NO: 88821 - RNA, 1410 nt, Artificial Sequence
  derived and/or modified CDS sequence (opt1) from neuraminidase__InfluenzaA__AHL96536
augaaccccaaccagaagaucaucaccaucggcagcgugucccugaccaucagcacgaucugcuucuucacccagaucgccauccucaucaccaccgucacgcugcacuucaagcaguacgaguucaacuccccgcccaacaaccaggugaugcugugcgagcccaccaucaucgagcgcaacaucaccgagaucguguaccucaccaacacgaccaucgagaaggagaucugccccaagccggccgaguaccggaacuggagcaagccccagugcgggaucaccggcuucgcgcccuucuccaaggacaacagcauccgccuguccgccgggggcgacaucugggucacccgggagcccuacgugagcugcgacccggacaagugcuaccaguucgcccuggggcagggcacgaccaucaacaacgugcacuccaacaacaccguccgcgaccggacccccuaccgcacgcuccugaugaacgagcugggcgugcccuuccaccucgggaccaagcaggucugcaucgccuggagcuccagcuccugccacgacggcaaggccuggcugcacgugugcaucaccggggacgacaagaacgcgaccgccagcuucaucuacaacggccggcugguggacuccguggucagcugguccaaggagauccuccgcacgcaggagagcgagugcgugugcaucaacgggaccugcaccguggucaugaccgacggcuccgccagcggcaaggccgacacgaagauccuguucaucgaggaggggaagaucgugcacaccagcacccuguccggcagcgcgcagcacguggaggagugcuccugcuacccccgguacccggggguccgcugcgugugccgggacaacuggaagggcagcaaccgccccaucguggacaucaacaucaaggaccacuccaucgucagcuccuacgugugcagcggccucgugggggacaccccgcggaagaacgacuccagcuccagcucccacugccuggaccccaacaacgaggagggcgggcacggcgucaaggggugggccuucgacgacggcaacgacguguggaugggccgcacgaucaacgagaccagccggcugggguacgagaccuucaaggucaucgagggcugguccaaccccaagagcaagcuccagaucaaccgccaggugaucguggaccgcggggaccgguccggcuacagcgggaucuucuccgucgagggcaagagcugcaucaaccggugcuucuacguggagcugauccgcggccggaaggaggagaccgaggugcuguggacgagcaacuccaucgucguguucugcgggaccagcggcaccuacgggaccggcuccuggcccgacggggccgaccucaaccugaugcccaucuga

SEQ ID NO: 88822 - RNA, 1410 nt, Artificial Sequence; identical to SEQ ID NO: 87907
  derived and/or modified CDS sequence (opt1) from neuraminidase__InfluenzaA__AHL96548

SEQ ID NO: 88823 - RNA, 1410 nt, Artificial Sequence
  derived and/or modified CDS sequence (opt1) from neuraminidase__InfluenzaA__AHL96560
augaaccccaaccagaagaucaucaccaucggcagcgugucccugaccaucagcacgaucugcuucuucaugcagaucgccauccucaucaccaccgucacccugcacuucaagcaguacgaguucaacuccccgcccaacaaccaggugaugcugugcgagcccacgaucaucgagcgcaacaucaccgagaucguguaccucaccaacaccacgaucgagaaggagaucugccccaagccggccgaguaccggaacuggagcaagccccagugcgggaucaccggcuucgcgcccuucuccaaggacaacagcauccgccuguccgccgggggcgacaucugggucacccgggagcccuacgugagcugcgacccggacaagugcuaccaguucgcccuggggcagggcaccacgcucaacaacgugcacuccaacaacaccguccgcgaccggacccccuaccgcacccugcugaugaacgagcucggcgugcccuuccaccuggggacgaagcaggucugcaucgccuggagcuccagcuccugccacgacggcaaggccuggcugcacgugugcaucaccggggacgacaagaacgcgaccgccagcuucaucuacaacggccggcucguggacuccguggucagcugguccaaggagauccugcgcacccaggagagcgagugcgugugcaucaacgggacgugcaccguggucaugaccgacggcaacgccuccggcaaggccgacaccaagauccuguucaucgaggaggggaagaucgugcacacgagcacccucagcggcuccgcgcagcacguggaggagugcagcugcuacccccgguacccggggguccgcugcgugugccgggacaacuggaagggcuccaaccgccccaucguggacaucaacaucaaggaccacagcaucgucuccagcuacgugugcuccggccuggugggggacacgccccggaagaacgacagcuccagcuccagccacugccuggaccccaacaacgaggagggcgggcacggcgucaaggggugggccuucgacgacggcaacgacguguggaugggccgcaccaucaacgagaccucccggcucggguacgagaccuucaaggucaucgagggcuggagcaacccgaaguccaagcugcagaucaaccgccaggugaucguggaccgcggggaccggagcggcuacuccgggaucuucagcgucgagggcaaguccugcaucaaccggugcuucuacguggagcugauccgcggccggaaggaggagaccgaggugcucuggaccagcaacagcaucgucguguucugcgggacguccggcaccuacgggaccggcagcuggcccgacggggccgaccugaaccugaugcccaucuga

SEQ ID NO: 88824 - RNA, 1410 nt, Artificial Sequence; identical to SEQ ID NO: 87381
  derived and/or modified CDS sequence (opt1) from neuraminidase__InfluenzaA__AHL96572

SEQ ID NO: 88825 - RNA, 1410 nt, Artificial Sequence; identical to SEQ ID NO: 88816
  derived and/or modified CDS sequence (opt1) from neuraminidase__InfluenzaA__AHL96584

SEQ ID NO: 88826 - RNA, 1410 nt, Artificial Sequence
  derived and/or modified CDS sequence (opt1) from neuraminidase__InfluenzaA__AHL96595
augaaccccaaccagaagaucaucaccaucggcagcgugucccugaccaucagcacgaucugcuucuucaugcagaucgccauccucaucaccaccgucacccugcacuucaagcaguacgaguucaacuccccgcccaacaaccaggugaugcugugcgagcccacgaucaucgagcgcaacaucaccgagaucguguaccucaccaacaccacgaucgagaaggagaucugccccaagccggccgaguaccggaacuggagcaagccccagugcgggaucaccggcuucgcgcccuucuccaaggacaacagcauccgccuguccgccgggggcgacaucugggucacccgggagcccuacgugagcugcgacccggacaagugcuaccaguucgcccuggggcagggcaccacgcucaacaacgugcacuccaacaacaccguccgcgaccggacccccuaccgcacccugcugaugaacgagcucggcgugcccuuccaccuggggacgaagcaggucugcaucgccuggagcuccagcuccugccacgacggcaaggccuggcugcacgugugcaucaccggggacgacaagaacgcgaccgccagcuucaucuacaacggccggcucguggacuccguggucagcugguccaaggagauccugcgcacccaggagagcgagugcgugugcaucaacgggacgugcaccguggucaugaccgacggcuccgccagcggcaaggccgacaccaagauccuguucaucgaggaggggaagaucgugcacacgagcacccucuccggcagcgcgcagcacguggaggagugcuccugcuacccccgguacccggggguccgcugcgugugccgggacaacuggaagggcagcaaccgccccaucguggacaucaacaucaaggaccacuccaucgucagcuccuacgugugcagcggccuggugggggacaccccgcggaagaacgacuccagcuccagcucccacugccuggaccccaacaacgaggagggcgggcacggcgucaaggggugggccuucgacgacggcaacgacguguggaugggccgcaccaucaacgagacgagccggcucggguacgagaccuucaaggucaucgagggcugguccaaccccaagagcaagcugcagaucaaccgccaggugaucguggaccgcggggaccgguccggcuacagcgggaucuucuccgucgagagcaagagcugcaucaaccggugcuucuacguggagcugauccgcggccggaaggaggagaccgaggugcucuggaccuccaacagcaucgucguguucugcggcacguccgggaccuacggcaccgggagcuggcccgacggcgccgaccugaaccugaugcccaucuga

SEQ ID NO: 88827 - RNA, 1410 nt, Artificial Sequence; identical to SEQ ID NO: 86170
  derived and/or modified CDS sequence (opt1) from neuraminidase__InfluenzaA__AHL96607

SEQ ID NO: 88828 - RNA, 1410 nt, Artificial Sequence
  derived and/or modified CDS sequence (opt1) from neuraminidase__InfluenzaA__AHL96631
augaaccccaaccagaagaucaucaccaucggcagcgugucccugaccaucagcacgaucugcuucuucaugcagaucgccauccucaucaccaccgucacccugcacuucaagcaguacgaguucaacucccugccgaacaaccaggugaugcucugcgagcccacgaucaucgagcgcaacaucaccgagaucguguaccugaccaacaccacgaucgagaaggagaucugccccaagcccgccgaguaccggaacuggagcaagccgcagugcgggaucaccggcuucgcgcccuucuccaaggacaacagcauccgccuguccgccgggggcgacaucugggucacccgggagcccuacgugagcugcgaccccgacaagugcuaccaguucgcccucgggcagggcaccacgcugaacaacaugcacuccaacaacaccgugcgcgaccggaccccguaccgcacccugcucaugaacgagcugggcguccccuuccaccuggggacgaagcaggucugcaucgccuggagcuccagcuccugccacgacggcaaggccuggcuccacgugugcaucaccggggacgacaagaacgcgaccgccagcuucaucuacaacggccggcugguggacuccguggugagcugguccaaggagauccugcgcacccaggagagcgagugcgucugcaucaacgggacgugcaccguggugaugaccgacggcuccgccagcggcaaggccgacaccaagauccucuucaucgaggaggggaagaucguccacacgagcacccuguccggcagcgcgcagcacguggaggagugcuccugcuacccccgguaccccggggugcgcugcgucugccgggacaacuggaagggcagcaaccgcccgaucguggacaucaacaucaaggaccacuccaucgugagcuccuacgucugcagcggccuggugggggacacgccccggaagaacgacuccagcuccagcucccacugccucgaccccaacaacgaggagggcgggcacggcgugaaggggugggccuucgacgacggcaacgacgucuggaugggccgcaccaucaacgagaccagccggcugggguacgagaccuucaaggugaucgagggcugguccaaccccaagagcaagcugcagaucaaccgccaggucaucguggaccgcggggaccgguccggcuacagcgggaucuucuccguggagggcaagagcugcaucaaccggugcuucuacgucgagcucauccgcggccggaaggaggagaccgaggugcuguggaccagcaacuccaucguggucuucugcgggacgagcggcaccuacgggaccggcuccuggccggacggggccgaccugaaccucaugcccaucuga

SEQ ID NO: 88829 - RNA, 1410 nt, Artificial Sequence; identical to SEQ ID NO: 87907
  derived and/or modified CDS sequence (opt1) from neuraminidase__InfluenzaA__AHL96643

SEQ ID NO: 88830 - RNA, 1410 nt, Artificial Sequence; identical to SEQ ID NO: 86170
  derived and/or modified CDS sequence (opt1) from neuraminidase__InfluenzaA__AHL96655

SEQ ID NO: 88831 - RNA, 1410 nt, Artificial Sequence; identical to SEQ ID NO: 86170
  derived and/or modified CDS sequence (opt1) from neuraminidase__InfluenzaA__AHL96667

SEQ ID NO: 88832 - RNA, 1410 nt, Artificial Sequence; identical to SEQ ID NO: 86170
  derived and/or modified CDS sequence (opt1) from neuraminidase__InfluenzaA__AHL96679

SEQ ID NO: 88833 - RNA, 1410 nt, Artificial Sequence; identical to SEQ ID NO: 86170
  derived and/or modified CDS sequence (opt1) from neuraminidase__InfluenzaA__AHL96691

SEQ ID NO: 88834 - RNA, 1410 nt, Artificial Sequence; identical to SEQ ID NO: 86170
  derived and/or modified CDS sequence (opt1) from neuraminidase__InfluenzaA__AHL96703

SEQ ID NO: 88835 - RNA, 1410 nt, Artificial Sequence; identical to SEQ ID NO: 87895
  derived and/or modified CDS sequence (opt1) from neuraminidase__InfluenzaA__AHL96763

SEQ ID NO: 88836 - RNA, 1410 nt, Artificial Sequence; identical to SEQ ID NO: 88748
  derived and/or modified CDS sequence (opt1) from neuraminidase__InfluenzaA__AHL96787

SEQ ID NO: 88837 - RNA, 1410 nt, Artificial Sequence
  derived and/or modified CDS sequence (opt1) from neuraminidase__InfluenzaA__AHL96799
augaaccccaaccagaagaucaucaccaucggcagcgugucccugaccaucagcacgaucugcuucuucaugcagaucgccauccucaucaccaccgucacccugcacuucaagcaguacgaguucaacuccccgcccaacaaccaggugaugcugugcgagcccacgaucaucgagcgcaacaucaccgagaucguguaccucaccaacaccacgaucgagaaggagaucugccccaagccggccgaguaccggaacuggagcaagccccagugcgggaucaccggcuucgcgcccuucuccaaggacaacagcauccgccuguccgccgggggcgacaucugggucacccgggagcccuacgugagcugcgacccggacaagugcuaccaguucgcccuggggcagggcaccacgcucaacaacgugcacuccaacaacaccguccgcgaccggacccccuaccgcacccugcugaugaacgagcucggcgugcccuuccaccuggggacgaagcaggucugcaucgccuggagcuccagcuccugccacgacggcaaggccuggcugcacgugugcaucaccggggacgacaagaacgcgaccgccagcuucaucuacaacggccggcucguggacuccguggucagcugguccaaggagauccugcgcacccaggagagcgagugcgugugcaucaacgggacgugcaccguggucaugaccgacggcuccgccagcggcaaggccgacaccaagauccuguucaucgaggaggggaagaucgugcacacgagcacccucuccggcagcgcgcagcacguggaggagugcuccugcuacccccgguacccggggguccgcugcgugugccgggacaacuggaagggcagcaaccgccccaucguggacaucaacaucaaggaccacuccaucgucagcuccuacgugugcagcggccuggugggggacaccccgcggaagaacgacuccagcuccagcucccacugccuggaccccaacaacgaggagggcgggcacggcgucaaggggugggccuucgacgacggcaacgacguguggaugggccgcaccaucaacgagacgagccggcucggguacgagaccuucaaggucaucgagggcugguccaaccccaagagcaagcugcagaucaaccgccaggugaucguggaccgcggggaccgguccggcuacagcgggaucuucuccgucgagggcaagagcugcaucaaccggugcuucuacguggagcugauccgcggccggaaggacgagaccgaggugcucuggaccagcaacuccaucgucguguucugcgggacgagcggcaccuacgggaccggcuccuggcccgacggggccgaccugaaccugaugcccaucuga

SEQ ID NO: 88838 - RNA, 1410 nt, Artificial Sequence; identical to SEQ ID NO: 87907
  derived and/or modified CDS sequence (opt1) from neuraminidase__InfluenzaA__AHL96811

SEQ ID NO: 88839 - RNA, 1410 nt, Artificial Sequence; identical to SEQ ID NO: 87907
  derived and/or modified CDS sequence (opt1) from neuraminidase__InfluenzaA__AHL96823

SEQ ID NO: 88840 - RNA, 1410 nt, Artificial Sequence; identical to SEQ ID NO: 86170
  derived and/or modified CDS sequence (opt1) from neuraminidase__InfluenzaA__AHL96847

SEQ ID NO: 88841 - RNA, 1410 nt, Artificial Sequence
  derived and/or modified CDS sequence (opt1) from neuraminidase__InfluenzaA__AHL96859
augaaccccaaccagaagaucaucaccaucggcagcgugucccugaccaucagcacgaucugcuucuucaugcagaucgccauccucaucaccaccgucacccugcacuucaagcaguacgaguucaacuccccgcccaacaaccagaugaugcugugcgagcccacgaucaucgagcgcaacaucaccgagaucguguaccucaccaacaccacgaucgagaaggagaucugccccaagccggccgaguaccggaacuggagcaagccccagugcgggaucaccggcuucgcgcccuucuccaaggacaacagcauccgccuguccgccgggggcgacaucugggugacccgggagcccuacgucagcugcgacccggacaagugcuaccaguucgcccuggggcagggcaccacgcucaacaacgugcacuccaacaacaccgugcgcgaccggacccccuaccgcacccugcugaugaacgagcucggcguccccuuccaccuggggacgaagcaggucugcaucgccuggagcuccagcuccugccacgacggcaaggccuggcugcacgugugcaucaccggggacgacaagaacgcgaccgccagcuucaucuacaacggccggcucguggacuccguggugagcugguccaaggagauccugcgcacccaggagagcgagugcgucugcaucaacgggacgugcaccguggugaugaccgacggcuccgccagcggcaaggccgacaccaagauccuguucaucgaggaggggaagaucguccacacgagcacccucuccggcagcgcgcagcacguggaggagugcuccugcuacccccgguacccgggggugcgcugcgucugccgggacaacuggaagggcagcaaccgccccaucguggacaucaacaucaaggaccacuccaucgugagcuccuacgucugcagcggccuggugggggacaccccgcggaagaacgacuccagcuccagcucccacugccuggaccccaacaacgaggagggcgggcacggcgugaaggggugggccuucgacgacggcaacgacgucuggaugggccgcaccaucaacgagacgagccggcucggguacgagaccuucaaggugaucgagggcugguccaaccccaagagcaagcugcagaucaaccgccaggucaucguggaccgcggggaccgguccggcuacagcgggaucuucuccguggagggcaagagcugcaucaaccggugcuucuacgucgagcugauccgcggccggaaggaggagaccgaggugcucuggaccagcaacuccaucguggucuucugcgggacgagcggcaccuacgggaccggcuccuggcccgacggggccgaccugaaccugaugcccaucuga

SEQ ID NO: 88842 - RNA, 1410 nt, Artificial Sequence
  derived and/or modified CDS sequence (opt1) from neuraminidase__InfluenzaA__AHL96871
augaaccccaaccagaagaucaucaccaucggcagcgugucccugaccaucagcacgaucugcuucuucaugcagaucgccauccucaucaccaccgucacccugcacuucaagcaguacgaguucaacuccccgcccaacaaccaggugaugcugugcgagcccacgaucguggagcgcaacaucaccgagaucgucuaccucaccaacaccacgaucgagaaggagaucugccccaagccggccgaguaccggaacuggagcaagccccagugcgggaucaccggcuucgcgcccuucuccaaggacaacagcauccgccuguccgccgggggcgacaucugggugacccgggagcccuacgugagcugcgacccggacaagugcuaccaguucgcccuggggcagggcaccacgcucaacaacguccacuccaacaacaccgugcgcgaccggacccccuaccgcacccugcugaugaacgagcucggcgugcccuuccaccuggggacgaagcaggucugcaucgccuggagcuccagcuccugccacgacggcaaggccuggcugcacgugugcaucaccggggacgacaagaacgcgaccgccagcuucaucuacaacggccggcucguggacuccgucgugagcugguccaaggaggugcugcgcacccaggagagcgagugcgucugcaucaacgggacgugcgccguggugaugaccgacggcuccgccagcggcaaggcggacaccaagauccuguucaucgaggaggggaagaucguccacaccagcacgcucuccggcagcgcccagcacguggaggagugcuccugcuacccccgguacccgggggugcgcugcgucugccgggacaacuggaagggcagcaaccgccccaucguggacaucaacaucaaggaccacuccaucgugagcuccuacgucugcagcggccuggugggggacacgccccggaagaacgaccgcuccagcuccagccacugccuggaccccaacaacgaggagggcgggcacggcgucaaggggugggccuucgacgacggcaacgacguguggaugggccggaccaucaacgagaccucccgccucggguacgagaccuucaaggugaucgagggcuggagcaacccgaaguccaagcugcagaucaaccggcaggucaucguggaccgcggggaccggagcggcuacuccgggaucuucagcguggagggcaaguccugcaucaaccgcugcuucuacgucgagcugauccggggccgcaaggaggagaccgaggugcucuggaccagcaacagcaucguggucuucugcgggaccuccggcacguacgggaccggcagcuggcccgacggggccgaccugaaccugaugcccaucuga

SEQ ID NO: 88843 - RNA, 1410 nt, Artificial Sequence
  derived and/or modified CDS sequence (opt1) from neuraminidase__InfluenzaA__AHL96883
augaaccccaaccagaagaucaucaccaucggcagcgugucccugaccaucagcacgaucugcuucuucaugcagaucgccauccucaucaccaccgucacccugcacuucaagcaguacgaguucaacuccccgcccaacaaccaggugaugcugugcgagcccacgaucaucgagcgcaacaucaccgagaucguguaccucaccaacaccacgaucgagaaggagaucugccccaagagcgccgaguaccggaacugguccaagccgcagugcgggaucaccggcuucgcgcccuucagcaaggacaacuccauccgccugagcgccgggggcgacaucugggucacccgggagcccuacguguccugcgaccccgacaagugcuaccaguucgcccuggggcagggcaccacgcucaacaacaugcacagcaacaacaccgugcgcgaccggaccccguaccgcacccugcugaugaacgagcucggcguccccuuccaccuggggacgaagcaggucugcaucgccugguccagcuccagcugccacgacggcaaggccuggcugcacgugugcaucaccggggacgacaagaacgcgaccgccuccuucaucuacaacggccggcucguggacagcgugguguccuggagcaaggagauccugcgcacccaggaguccgagugcgucugcaucaacgggacgugcaccguggugaugaccgacggcagcgccagcggcaaggccgacaccaagauccuguucaucgaggaggggaagaucguccacacguccacccucagcggcuccgcgcagcacguggaggagugcagcugcuacccccgguaccccggggugcgcugcgucugccgggacaacuggaagggcuccaaccgcccgaucguggacaucaacaucaaggaccacagcaucguguccagcuacgucugcuccggccuggugggggacacgccccggaagaacgacagcuccagcuccagccacugccuggaccccaacaacgaggagggcgggcacggcgugaaggggugggccuucgacgacggcaacgacgucuggaugggccgcaccaucaacgagaccucccggcucggguacgagaccuucaaggugaucgagggcuggagcaaccccaaguccaagcugcagaucaaccgccaggucaucguggaccgcggggaccggagcggcuacuccgggaucuucagcguggagggcaagagcugcaucaaccggugcuucuacgucgagcugauccgcggccggaaggaggagaccgaggugcucuggaccuccaacagcaucguggucuucugcgggacguccggcaccuacgggaccggcagcuggccggacggggccgaccugaaccugaugcccaucuga

SEQ ID NO: 88844 - RNA, 1410 nt, Artificial Sequence; identical to SEQ ID NO: 87895
  derived and/or modified CDS sequence (opt1) from neuraminidase__InfluenzaA__AHL96895

SEQ ID NO: 88845 - RNA, 1410 nt, Artificial Sequence
  derived and/or modified CDS sequence (opt1) from neuraminidase__InfluenzaA__AHL96907
augaaccccaaccagaagaucaucaccaucggcagcgugucccugaccaucagcacgaucugcuucuucaugcagaucgccauccucaucaccaccgucacccugcacuucaagcaguacgaguucaacuccccgcccaacaaccaggugaugcugugcgagcccacgaucguggagcgcaacaucaccgagaucgucuaccucaccaacaccacgaucgagaaggagaucugccccaagccggccgaguaccggaacuggagcaagccccagugcgggaucaccggcuucgcgcccuucuccaaggacaacagcauccgccuguccgccgggggcgacaucugggugacccgggagcccuacgugagcugcgacccggacaagugcuaccaguucgcccuggggcagggcaccacgcucaacaacguccacuccaacaacaccgugcgcgaccggacccccuaccgcacccugcugaugaacgagcucggcgugcccuuccaccuggggacgaagcaggucugcaucgccuggagcuccagcuccugccacgacggcaaggccuggcugcacgugugcaucaccggggacgacaagaacgcgaccgccagcuucaucuacaacggccggcucguggacuccgucgugagcugguccaaggaggugcugcgcacccaggagagcgagugcgucugcaucaacgggacgugcgccguggugaugaccgacggcuccgccagcggcaaggcggacaccaagauccuguucaucgaggaggggaagaucguccacaccagcacgcucuccggcagcgcccagcacguggaggagugcuccugcuacccccgguacccgggggugcgcugcgucugccgggacaacuggaagggcagcaaccgccccaucguggacaucaacaucaaggaccacuccaucgugagcuccuacgucugcagcggccuggugggggacaccccgcggaagaacgacuccagcuccagcucccacugccuggaccccaacaacgaggagggcgggcacggcgucaaggggugggccuucgacgacggcaacgacguguggaugggccgcaccaucaacgagaccagccggcucggguacgagacguucaaggugaucgagggcugguccaaccccaagagcaagcugcagaucaaccgccaggucaucguggaccgcggggaccgguccggcuacagcgggaucuucuccguggagggcaagagcugcaucaaccggugcuucuacgucgagcugauccgcggccggaaggaggagaccgaggugcucuggaccagcaacuccaucguggucuucugcgggaccagcggcacguacgggaccggcuccuggcccgacggggccgaccugaaccugaugcccaucuga

SEQ ID NO: 88846 - RNA, 1410 nt, Artificial Sequence; identical to SEQ ID NO: 87907
  derived and/or modified CDS sequence (opt1) from neuraminidase__InfluenzaA__AHL96919

SEQ ID NO: 88847 - RNA, 1410 nt, Artificial Sequence; identical to SEQ ID NO: 87907
  derived and/or modified CDS sequence (opt1) from neuraminidase__InfluenzaA__AHL96931

SEQ ID NO: 88848 - RNA, 1410 nt, Artificial Sequence; identical to SEQ ID NO: 87907
  derived and/or modified CDS sequence (opt1) from neuraminidase__InfluenzaA__AHL96943

SEQ ID NO: 88849 - RNA, 1410 nt, Artificial Sequence
  derived and/or modified CDS sequence (opt1) from neuraminidase__InfluenzaA__AHL96955
augaaccccaaccagaagaucaucaccaucggcagcgugucccugaccaucagcacgaucugcuucuucaugcagaucgccauccucaucaccaccgucacccugcacuucaagcaguacgaguucaacuccccgagcaacaaccaggugaugcugugcgagcccacgaucaucgagcgcaacaucaccgagaucguguaccucaccaacaccacgaucgagaaggagaucugccccaagcccgccgaguaccggaacugguccaagccgcagugcgggaucaccggcuucgcgcccuucagcaaggacaacuccauccgccugagcgccgggggcaacaucugggucacccgggagcccuacguguccugcgaccccgacaagugcuaccaguucgcccuggggcagggcaccacgcucaacaacgugcacagcaacaacaccguccgcgaccggaccccguaccgcacccugcugaugaacgagcucggcgugcccuuccaccuggggacgaagcaggucugcaucgccugguccagcuccagcugccacgacggcaaggccuggcugcacgugugcaucaccggggacgacaagaacgcgaccgccuccuucaucuacaacggccggcucguggacagcguggucuccuggagcaaggagauccugcgcacccaggaguccgagugcgugugcaucaacgggacgugcaccguggucaugaccgacggcagcgccagcggcaaggccgacaccaagauccuguucaucgaggaggggaagaucgugcacacguccacccucagcggcuccgcgcagcacguggaggagugcagcugcuacccccgguaccccgggguccgcugcgugugccgggacaacuggaagggcuccaaccgcccgaucguggacaucaacaucaaggaccacagcaucgucuccagcuacgugugcuccggccuggugggggacacgccccggaagaacgacagcuccagcuccagccacugccuggaccccaacaacgaggagggcgggcacggcgucaaggggugggccuucgacgacggcaacgacguguggaugggccgcaccaucaacgagaccucccggcucggguacgagaccuucaaggucaucgagggcuggagcaaccccaaguccaagcugcagaucaaccgccaggugaucguggaccgcggggaccggagcggcuacuccgggaucuucagcgucgagggcaagagcugcaucaaccggugcuucuacguggagcugauccgcggccggaaggaggagaccgaggugcucuggaccuccaacagcaucgucguguucugcgggacguccggcaccuacgggaccggcagcuggccggacggggccgaccugaaccugaugcccaucuga

SEQ ID NO: 88850 - RNA, 1410 nt, Artificial Sequence; identical to SEQ ID NO: 88748
  derived and/or modified CDS sequence (opt1) from neuraminidase__InfluenzaA__AHL96967

SEQ ID NO: 88851 - RNA, 1410 nt, Artificial Sequence
  derived and/or modified CDS sequence (opt1) from neuraminidase__InfluenzaA__AHL96979
augaaccccaaccagaagaucaucaccaucggcagcgugucccugaccaucagcacgaucugcuucuucaugcagaucgccauccucaucaccaccgucacccugcacuucaagcaguacgaguucaacuccccgcccaacaaccaggugaugcugugcgagcccacgaucaucgagcgcaacaucaccgagaucguguaccucaccaacaccacgaucgagaaggagaucugccccaagccggccgaguaccggaacuggagcaagccccagugcgacaucaccggguucgcgcccuucuccaaggacaacagcauccgccuguccgccggcggggacaucugggucacccgggagcccuacgugagcugcgacccggacaagugcuaccaguucgcccugggccaggggaccacgcucaacaacaugcacuccaacaacaccgugcgcgaccggacccccuaccgcacccugcugaugaacgagcucggcguccccuuccaccugggcacgaagcaggucugcaucgccuggagcuccagcuccugccacgacgggaaggccuggcugcacgugugcaucaccggcgacgacaagaacgcgaccgccagcuucaucuacaacgggcggcucguggacuccguggugagcugguccaaggagauccugcgcacccaggagagcgagugcgucugcaucaacggcacgugcaccguggugaugaccgacggguccgccagcggcaaggccgacaccaagauccuguucaucgaggagggcaagaucguccacacgagcacccucuccgggagcgcgcagcacguggaggagugcuccugcuacccccgguacccgggcgugcgcugcgucugccgggacaacuggaaggggagcaaccgccccaucguggacaucaacaucaaggaccacuccaucgugagcuccuacgucugcagcggccuggugggcgacaccccgcggaagaacgacuccagcuccagcucccacugccuggaccccaacaacgaggagggcgggcacggggugaagggcugggccuucgacgacgggaacgacgucuggaugggccgcaccaucaacgagacgagccggcucggcuacgagaccuucaaggugaucgaggggugguccaaccccaagagcaagcugcagaucaaccgccaggucaucguggaccggggcgaccgcuccggguacagcggcaucuucuccguggagggcaagagcugcaucaaccggugcuucuacgucgagcugauccgcgggcggaaggaggagaccgaggugcucuggaccagcaacuccaucguggucuucugcggcacgagcgggaccuacggcaccggguccuggcccgacggcgccgaccugaacaucaugcccaucuga

SEQ ID NO: 88852 - RNA, 1410 nt, Artificial Sequence; identical to SEQ ID NO: 87907
  derived and/or modified CDS sequence (opt1) from neuraminidase__InfluenzaA__AHL96991

SEQ ID NO: 88853 - RNA, 1410 nt, Artificial Sequence; identical to SEQ ID NO: 86170
  derived and/or modified CDS sequence (opt1) from neuraminidase__InfluenzaA__AHL97003

SEQ ID NO: 88854 - RNA, 1410 nt, Artificial Sequence
  derived and/or modified CDS sequence (opt1) from neuraminidase__InfluenzaA__AHL97015
augaaccccaaccagaagaucaucaccaucggcagcgugucccugaccaucagcacgaucugcuucuucaugcagaucgccauccucaucaccaccgucacccugcacuucaagcaguacgaguucaacuccccgcccaacaaccaggugaugcugugcgagcccacgaucaucgagcgcaacaucaccgagaucguguaccucaccaacaccacgaucgagaaggagaucugccccaagccggccgaguaccggaacuggagcaagccccagugcgggaucaccggcuucgcgcccuucuccaaggacaacagcauccgccuguccgccgggggcgacaucugggucacccgggagcccuacgugagcugcgacccggacaagugcuaccaguucgcccuggggcagggcaccacgcucaacaacgugcacuccaacaacaccguccgcgaccggacccccuaccgcacccugcugaugaacgagcucggcgugcccuuccaccuggggacgaagcaggucugcaucgccuggagcuccagcuccugccacgacggcaaggccuggcugcacgugugcaucaccggggacgacaagaacgcgaccgccagcuucaucuacaacggccggcucguggacuccguggucagcugguccaaggagauccugcgcacccaggagagcgagugcgugugcaucaacgggacgugcaccguggucaugaccgacggcuccgccagcggcaaggccgacaccaagauccuguucaucgaggaggggaagaucgugcacacgagcacccucuccggcagcgcgcagcacguggaggagugcuccugcuacccccgguacccggggguccgcugcgugugccgggacaacuggaagggcagcaaccgccccaucguggacaucaacaucaaggaccacuccaucgucagcuccuacgugugcagcggccuggugggggacaccccgcggaagaacgacuccagcuccagcucccacugccuggaccccaacaacgaggagggcgggcacggcgucaaggggugggccuucgacgacggcaacgacguguggaugggccgcaccaucaacgagacgagccggcucggguacgagaccuucaaggucaucgagggcugguccaaccccaagagcaagcugcagaucaaccgccagaucaucguggaccgcggggaccgguccggcuacagcgggaucuucuccguggagggcaagagcugcaucaaccggugcuucuacgucgagcugauccgcggccggaaggaggagaccgaggugcucuggaccagcaacuccaucguggucuucugcgggacgagcggcaccuacgggaccggcuccuggcccgacggggccgaccugaaccugaugcccaucuga

SEQ ID NO: 88855 - RNA, 1410 nt, Artificial Sequence; identical to SEQ ID NO: 86170
  derived and/or modified CDS sequence (opt1) from neuraminidase__InfluenzaA__AHL97027

SEQ ID NO: 88856 - RNA, 1410 nt, Artificial Sequence
  derived and/or modified CDS sequence (opt1) from neuraminidase__InfluenzaA__AHL97039
augaaccccaaccagaagaucaucaccaucggcagcgugucccugaccaucagcacgaucugcuucuucaugcagaucgccauccucaucaccaccgucacccugcacuucaagcaguacgaguucaacuccccgcccaacaaccaggugaugcugugcgagcccacgaucaucgagcgcaacaucaccgagaucguguaccucaccaacaccacgaucgagaaggagaucugccccaagccggccgaguaccggaacuggagcaagccccagugcgggaucaccggcuucgcgcccuucuccaaggacaacagcauccgccuguccgccgggggcgacaucugggucacccgggagcccuacgugagcugcgacccggacaagugcuaccaguucgcccuggggcagggcaccacgcucaacaacgugcacuccaacaacaccguccgcgaccggacccccuaccgcacccugcugaugaacgagcucggcgugcccuuccaccuggggacgaagcaggucugcaucgccuggagcuccagcuccugccacgacggcaaggccuggcugcacgugugcaucaccggggacgacaagaacgcgaccgccagcuucaucuacaacggccggcucguggacuccguggucagcugguccaaggagauccugcgcacccaggagagcgagugcgugugcaucaacgggacgugcaccguggucaugaccgacggcaacgccuccggcaaggccgacaccaagauccuguucaucgaggaggggaagaucgugcacacgagcacccucagcggcuccgcgcagcacguggaggagugcagcugcuacccccgguacccggggguccgcugcgugugccgggacaacuggaagggcuccaaccgccccaucguggacaucaacaucaaggacuacagcaucgucuccagcuacgugugcuccggccuggugggggacacgccccggaagaacgacagcuccagcuccagccacugccuggaccccaacaacgaggagggcgggcacggcgucaaggggugggccuucgacgacggcaacgacguguggaugggccgcaccaucaacgagaccucccggcucggguacgagaccuucaaggucaucgagggcuggagcaacccgaaguccaagcugcagaucaaccgccaggugaucguggaccgcggggaccggagcggcuacuccgggaucuucagcgucgagggcaaguccugcaucaaccggugcuucuacguggagcugauccgcggccggaaggaggagaccgaggugcucuggaccagcaacagcaucgucguguucugcgggacguccggcaccuacgggaccggcagcuggcccgacggggccgaccugaaccugaugcccaucuga

SEQ ID NO: 88857 - RNA, 1410 nt, Artificial Sequence; identical to SEQ ID NO: 86170
  derived and/or modified CDS sequence (opt1) from neuraminidase__InfluenzaA__AHL97051

SEQ ID NO: 88858 - RNA, 1410 nt, Artificial Sequence
  derived and/or modified CDS sequence (opt1) from neuraminidase__InfluenzaA__AHL97063
augaaccccaaccagaagaucaucaccaucggcagcgugucccugaccaucagcacgaucugcuucuucaugcagaucgccauccucaucaccaccgucacccugcacuucaagcaguacgaguucaacuccccgcccaacaaccaggugaugcugugcgagcccacgaucaucgagcgcaacaucaccgagaucguguaccucaccaacaccacgaucgagaaggagaucugccccaagccggccgaguaccggaacuggagcaagccccagugcgggaucaccggcuucgcgcccuucuccaaggacaacagcauccgccuguccgccgggggcgacaucugggucacccgggagcccuacgugagcugcgacccggacaagugcuaccaguucgcccuggggcagggcaccacgcucaacaacgugcacuccaacaacaccguccgcgaccggacccccuaccgcacccugcugaugaacgagcucggcgugcccuuccaccuggggacgaagcaggucugcaucgccuggagcuccagcuccugccacgacggcaaggccuggcugcacgugugcaucaccggggacgacaagaacgcgaccgccagcuucaucuacaacggccggcucguggacuccguggucagcugguccaaggagauccugcgcacccaggagagcgagugcgugugcaucaacgggacgugcaccguggucaugaccgacggcuccgccagcggcaaggccgacaccaagauccuguucaucgaggaggggaagaucgugcacacgagcacccucuccggcagcgcgcagcacguggaggagugcuccugcuacccccgguacccggggguccgcugcgugugccgggacaacuggaagggcagcaaccgccccaucguggacaucaacaucaaggaccacuccaucgucagcuccuacgugugcagcggccuggugggggacaccccgcggaagaacgacuccagcuccagcucccacugccugggccccaacaacgaggagggcgggcacggggucaagggcugggccuucgacgacggcaacgacguguggauggggcgcaccaucaacgagacgagccggcucggcuacgagaccuucaaggucaucgacgggugguccaaccccaagagcaagcugcagaucaaccgccaggugaucguggaccggggcgaccgcuccggguacagcggcaucuucuccgucgagggcaagagcugcaucaaccggugcuucuacguggagcugauccgcgggcggaaggaggagaccgaggugcucuggaccagcaacuccaucgucguguucugcggcacgagcgggaccuacggcaccggguccuggcccgacggcgccgaccugaaccugaugcccaucuga

SEQ ID NO: 88859 - RNA, 1410 nt, Artificial Sequence; identical to SEQ ID NO: 86170
  derived and/or modified CDS sequence (opt1) from neuraminidase__InfluenzaA__AHL97075

SEQ ID NO: 88860 - RNA, 1410 nt, Artificial Sequence; identical to SEQ ID NO: 87895
  derived and/or modified CDS sequence (opt1) from neuraminidase__InfluenzaA__AHL97087

SEQ ID NO: 88861 - RNA, 1410 nt, Artificial Sequence; identical to SEQ ID NO: 87399
  derived and/or modified CDS sequence (opt1) from neuraminidase__InfluenzaA__AHL97099

SEQ ID NO: 88862 - RNA, 1410 nt, Artificial Sequence; identical to SEQ ID NO: 86170
  derived and/or modified CDS sequence (opt1) from neuraminidase__InfluenzaA__AHL97111

SEQ ID NO: 88863 - RNA, 1410 nt, Artificial Sequence
  derived and/or modified CDS sequence (opt1) from neuraminidase__InfluenzaA__AHL97123
augaaccccaaccagaagaucaucaccaucggcagcgugucccugaccaucagcacgaucugcuucuucaugcagaucgccauccucaucaccaccgucacccugcacuucaagcaguacgaguucgacuccccgcccaacaaccaggugaugcugugcgagcccacgaucaucgagcgcaacaucaccgagaucguguaccucaccaacaccacgaucgagaaggagaucugccccaagccggccgaguaccggaacuggagcaagccccagugcgggaucaccggcuucgcgcccuucuccaaggacaacagcauccgccuguccgccgggggcgacaucugggucacccgggagcccuacgugagcugcgacccggacaagugcuaccaguucgcccuggggcagggcaccacgcucaacaacgugcacuccaacaacaccguccgcgaccggacccccuaccgcacccugcugaugaacgagcucggcgugcccuuccaccuggggacgaagcaggucugcaucgccuggagcuccagcuccugccacgacggcaaggccuggcugcacgugugcaucaccggggacgacaagaacgcgaccgccagcuucaucuacaacggccggcucguggacuccguggucagcugguccaaggagauccugcgcacccaggagagcgagugcgugugcaucaacgggacgugcaccguggucaugaccgacggcuccgccagcggcaaggccgacaccaagauccuguucaucgaggaggggaagaucgugcacacgagcacccucuccggcagcgcgcagcacguggaggagugcuccugcuacccccgguacccggggguccgcugcgugugccgggacaacuggaagggcagcaaccgccccaucguggacaucaacaucaaggaccacuccaucgucagcuccuacgugugcagcggccuggugggggacaccccgcggcgcaacgacuccagcuccagcucccacugccuggaccccaacaacgaggagggcgggcacggcgucaaggggugggccuucgacgacggcaacgacguguggaugggccggaccaucaacgagacgagccgccucggguacgagaccuucaaggucaucgagggcugguccaaccccaagagcaagcugcagaucaaccggcaggucaucguggaccgcggggaccgguccggcuacagcgggaucuucuccguggagggcaagagcugcaucaaccgcugcuucuacguggagcugauccggggccgcaaggaggagaccgaggugcucuggaccagcaacuccaucgucguguucugcgggacgagcggcaccuacgggaccggcuccuggcccgacggggccgaccugaaccugaugcccaucuga

SEQ ID NO: 88864 - RNA, 1410 nt, Artificial Sequence; identical to SEQ ID NO: 87927
  derived and/or modified CDS sequence (opt1) from neuraminidase__InfluenzaA__AHL97135

SEQ ID NO: 88865 - RNA, 1410 nt, Artificial Sequence
  derived and/or modified CDS sequence (opt1) from neuraminidase__InfluenzaA__AHL97147
augaaccccaaccagaagaucaucaccaucggcagcgugucccugaccaucagcacgaucugcuucuucaugcagaucgccauccucaucaccaccgucacccugcacuucaagcaguacgaguucaacuccccgcccaacaaccaggugaugcugugcgagcccacgaucaucgagcgcaacaucaccgagaucguguaccucaccaacaccacgaucgagaaggagaucugccccaagccggccgaguaccggaacuggagcaagccccagugcgggaucaccggcuucgcgcccuucuccaaggacaacagcauccgccuguccgccgggggcgacaucugggucacccgggagcccuacgugagcugcgacccggacaagugcuaccaguucgcccuggggcagggcaccacgcucaacaacgugcacuccaacaacaccguccgcgaccggacccccuaccgcacccugcugaugaacgagcucggcgugcccuuccaccuggggacgaagcaggucugcaucgccuggagcuccagcuccugccacgacggcaaggccuggcugcacgugugcaucaccggggacgacaagaacgcgaccgccagcuucaucuacaacggccggcucguggacuccguggucagcugguccaaggagauccugcgcacccaggagagcgagugcgugugcaucaacgggacgugcaccguggucaugaccgacggcuccgccagcggcaaggccgacaccaagauccuguucaucgaggaggggaagaucgugcacacgagcacccucuccggcagcgcgcagcacguggaggagugcuccugcuacccccgguacccggggguccgcugcgugugccgggacaacuggcgcggcagcaaccggcccaucguggacaucaacaucaaggaccacuccaucgucagcuccuacgugugcagcggccuggugggggacaccccgcgcaagaacgacuccagcuccagcucccacugccuggaccccaacaacgaggagggcgggcacggcgucaaggggugggccuucgacgacggcaacgacguguggaugggccggaccaucaacgagacgagccgccucggguacgagaccuucaaggucaucgagggcugguccaaccccaagagcaagcugcagaucaaccggcaggucaucguggaccgcggggaccgguccggcuacagcgggaucuucuccguggagggcaagagcugcaucaaccgcugcuucuacguggagcugauccggggccgcaaggaggagaccgaggugcucuggaccagcaacuccaucgucguguucugcgggacgagcggcaccuacgggaccggcuccuggcccgacggggccgaccugaaccugaugcccaucuga

SEQ ID NO: 88866 - RNA, 1410 nt, Artificial Sequence; identical to SEQ ID NO: 86170
  derived and/or modified CDS sequence (opt1) from neuraminidase__InfluenzaA__AHL97159

SEQ ID NO: 88867 - RNA, 1410 nt, Artificial Sequence; identical to SEQ ID NO: 86170
  derived and/or modified CDS sequence (opt1) from neuraminidase__InfluenzaA__AHL97171

SEQ ID NO: 88868 - RNA, 1410 nt, Artificial Sequence; identical to SEQ ID NO: 86170
  derived and/or modified CDS sequence (opt1) from neuraminidase__InfluenzaA__AHL97183

SEQ ID NO: 88869 - RNA, 1410 nt, Artificial Sequence; identical to SEQ ID NO: 86170
  derived and/or modified CDS sequence (opt1) from neuraminidase__InfluenzaA__AHL97195

SEQ ID NO: 88870 - RNA, 1410 nt, Artificial Sequence; identical to SEQ ID NO: 86170
  derived and/or modified CDS sequence (opt1) from neuraminidase__InfluenzaA__AHL97207

SEQ ID NO: 88871 - RNA, 1410 nt, Artificial Sequence; identical to SEQ ID NO: 86170
  derived and/or modified CDS sequence (opt1) from neuraminidase__InfluenzaA__AHL97219

SEQ ID NO: 88872 - RNA, 1410 nt, Artificial Sequence
  derived and/or modified CDS sequence (opt1) from neuraminidase__InfluenzaA__AHL97231
augaaccccaaccagaagaucaucaccaucggcagcgugucccugaccaucagcacgaucugcuucuucaugcagaucgccauccucaucaccaccgucacccugcacuucaagcaguacgacuucaacuccccgcccaacaaccaggugaugcugugcgagcccacgaucaucgagcgcaacaucaccgagaucguguaccucaccaacaccacgaucgagaaggagaucugccccaagccggccgaguaccggaacuggagcaagccccagugcgggaucaccggcuucgcgcccuucuccaaggacaacagcauccgccuguccgccgggggcgacaucugggucacccgggagcccuacgugagcugcgacccggacaagugcuaccaguucgcccuggggcagggcaccacgcucaacaacgugcacuccaacaacaccguccgcgaccggacccccuaccgcacccugcugaugaacgagcucggcgugcccuuccaccuggggacgaagcaggucugcaucgccuggagcuccagcuccugccacgacggcaaggccuggcugcacgugugcaucaccggggacgacaagaacgcgaccgccagcuucaucuacaacggccggcucguggacuccguggucagcugguccaaggagauccugcgcacccaggagagcgagugcgugugcaucaacgggacgugcaccguggucaugaccgacggcuccgccagcggcaaggccgacaccaagauccuguucaucgaggaggggaagaucgugcacacgagcacccucuccggcagcgcgcagcacguggaggagugcuccugcuacccccgguacccggggguccgcugcgugugccgggacaacuggaagggcagcaaccgccccaucguggacaucaacaucaaggaccacuccgucaucagcuccuacgugugcagcggccuggugggggacaccccgcggaagaacgacuccagcuccagcucccacugccuggaccccaacaacgaggagggcgggcacggcgucaaggggugggccuucgacgacggcaacgacguguggaugggccgcaccaucaacgagacgagccggcucggguacgagaccuucaaggucaucggcgggugguccaaccccaagagcaagcugcagaucaaccgccaggugaucguggaccggggcgaccgcuccggguacagcggcaucuucuccgucgagggcaagagcugcaucaaccggugcuucuacguggagcugauccgcgggcggaaggaggagaccgaggugcucuggaccagcaacuccaucgucguguucugcggcacgagcgggaccuacggcaccggguccuggcccgacggcgccgaccugaaccugaugcccaucuga

SEQ ID NO: 88873 - RNA, 1410 nt, Artificial Sequence
  derived and/or modified CDS sequence (opt1) from neuraminidase__InfluenzaA__AHL97243
augaaccccaaccagaagaucaucaccaucggcagcgugucccugaccaucagcacgaucugcuucuucaugcagaucgccauccucaucaccaccgucacccugaacuucaagcaguacgaguucaacuccccgcccaacaaccaggugaugcugugcgagcccacgaucaucgagcgcaacaucaccgagaucguguaccucaccaacaccacgaucgagaaggagaucugccccaagccggccgaguaccggaacuggagcaagccccagugcgggaucaccggcuucgcgcccuucuccaaggacaacagcauccgccuguccgccgggggcgacaucugggucacccgggagcccuacgugagcugcgacccggacaagugcuaccaguucgcccuggggcagggcaccacgcucaacaacgugcacuccaacaacaccguccgcgaccggacccccuaccgcacccugcugaugaacgagcucggcgugcccuuccaccuggggacgaagcaggucugcaucgccuggagcuccagcuccugccacgacggcaaggccuggcugcacgugugcaucaccggggacgacaagaacgcgaccgccagcuucaucuacaacggccggcucguggacuccguggucagcugguccaaggagauccugcgcacccaggagagcgagugcgugugcaucaacgggacgugcaccguggucaugaccgacggcuccgccagcggcaaggccgacaccaagauccuguucaucgaggaggggaagaucgugcacacgagcacccucuccggcagcgcgcagcacguggaggagugcuccugcuacccccgguacccggggguccgcugcgugugccgggacaacuggaagggcagcaaccgccccaucguggacaucaacaucaaggaccacuccaucgucagcuccuacgugugcagcggccuggugggggacaccccgcggaagaacgacuccagcuccagcucccacugccuggaccccaacaacgaggagggcgggcacggcgucaaggggugggccuucgacgacggcaacgacguguggaugggccgcaccaucaacgagacgagccggcucggguacgagaccuucaaggucaucgagggcugguccaaccccaagagcaagcugcagaucaaccgccaggugaucguggaccgcggggaccgguccggcuacagcgggaucuucuccgucgagggcaagagcugcaucaaccggugcuucuacguggagcugauccgcggccggaaggaggagaccgaggugcucuggaccagcaacuccaucgucguguucugcgggacgagcggcaccuacgggaccggcuccuggcccgacggggccgaccugaaccugaugcccaucuga

SEQ ID NO: 88874 - RNA, 1410 nt, Artificial Sequence; identical to SEQ ID NO: 87399
  derived and/or modified CDS sequence (opt1) from neuraminidase__InfluenzaA__AHL97255

SEQ ID NO: 88875 - RNA, 1410 nt, Artificial Sequence
  derived and/or modified CDS sequence (opt1) from neuraminidase__InfluenzaA__AHL97267
augaaccccaaccagaagaucaucaccaucggcagcgugucccugaccaucagcacgaucugcuucuucaugcagaucgccauccucaucaccaccgucacccugcacuucaagcaguacgaguucaacuccccgcccaacaaccaggugaugcugugcgagcccacgaucaucgagcgcaacaucaccgagaucguguaccucaccaacaccacgaucgagaaggagaucugccccaagccggccgaguaccggaacuggagcaagccccagugcgggaucaccggcuucgcgcccuucuccaaggacaacagcauccgccuguccgccgggggcgacaucugggucacccgggagcccuacgugagcugcgacccggacaagugcuaccaguucgcccuggggcagggcaccacgcucaacaacgugcacuccaacaacaccgcccgcgaccggacccccuaccgcacccugcugaugaacgagcucggcguccccuuccaccuggggacgaagcaggucugcaucgccuggagcuccagcuccugccacgacggcaaggcguggcugcacgugugcaucaccggggacgacaagaacgccaccgccagcuucaucuacaacggccggcucguggacuccguggugagcugguccaaggagauccugcgcacccaggagagcgagugcgucugcaucaacgggacgugcaccguggugaugaccgacggcuccgccagcggcaaggcggacaccaagauccuguucaucgaggaggggaagaucguccacacgagcacccucuccggcagcgcccagcacguggaggagugcuccugcuacccccgguacccgggggugcgcugcgucugccgggacaacuggaagggcagcaaccgccccaucguggacaucaacaucaaggaccacuccaucgugagcuccuacgucugcagcggccuggugggggacacgccccggaagaacgacuccuucagcuccagccacugccuggaccccaacaacgaggagggcgggcacggcgugaaggggugggccuucgacgacggcaacgacgucuggaugggccgcaccaucaacgagaccucccggcucggguacgagaccuucaaggugaucgagggcuggagcaacccgaaguccaagcugcagaucaaccgccaggucaucguggaccgcggggaccggagcggcuacuccgggaucuucagcguggagggcaaguccugcaucaaccggugcuucuacgucgagcugauccgcggccggaaggaggagaccgaggugcucuggaccagcaacagcaucguggucuucugcgggacguccggcaccuacgggaccggcagcuggcccgacggggccgaccugaaccugaugcccaucuga

SEQ ID NO: 88876 - RNA, 1410 nt, Artificial Sequence; identical to SEQ ID NO: 86170
  derived and/or modified CDS sequence (opt1) from neuraminidase__InfluenzaA__AHL97279

SEQ ID NO: 88877 - RNA, 1410 nt, Artificial Sequence; identical to SEQ ID NO: 88760
  derived and/or modified CDS sequence (opt1) from neuraminidase__InfluenzaA__AHL97291

SEQ ID NO: 88878 - RNA, 1410 nt, Artificial Sequence; identical to SEQ ID NO: 88748
  derived and/or modified CDS sequence (opt1) from neuraminidase__InfluenzaA__AHL97303

SEQ ID NO: 88879 - RNA, 1410 nt, Artificial Sequence
  derived and/or modified CDS sequence (opt1) from neuraminidase__InfluenzaA__AHL97339
augaaccccaaccagaagaucaucaccaucggcagcgugucccugaccaucagcacgaucugcuucuucaugcagaucgccauccucaucaccaccgucacccugcacuucaagcaguacgaguucgacuccccgcccaacaaccaggugaugcugugcgagcccacgaucaucgagcgcaacaucaccgagaucguguaccucaccaacaccacgaucgagaaggagaucugccccaagccggccgaguaccggaacuggagcaagccccagugcgggaucaccggcuucgcgcccuucuccaaggacaacagcauccgccuguccgccgggggcgacaucugggucacccgggagcccuacgugagcugcgacccggacaagugcuaccaguucgcccuggggcagggcaccacgcucaacaacgugcacuccaacaacaccguccgcgaccggaccagcuaccgcacccugcugaugaacgagcucggcgugcccuuccaccuggggacgaagcaggucugcaucgccugguccagcuccagcugccacgacggcaaggccuggcugcacgugugcaucaccggggacgacaagaacgcgaccgccuccuucaucuacaacggccggcucguggacagcguggucuccuggagcaaggagauccugcgcacccaggaguccgagugcgugugcaucaacgggacgugcaccguggucaugaccgacggcagcgccagcggccgggccgacaccaagauccuguucaucgaggaggggaagaucgugcacacguccacccucagcggcuccgcgcagcacguggaggagugcagcugcuacccccgcuaccccgggguccggugcgugugccgcgacaacuggaagggcuccaaccggccgaucguggacaucaacaucaaggaccacagcaucgucuccagcuacgugugcuccggccuggugggggacacgccccgcaagaacgacagcuccagcuccagccacugccuggaccccaacaacgaggagggcgggcacggcgucaaggggugggccuucgacgacggcaacgacguguggaugggccggaccaucaacgagaccucccgccucggguacgagaccuucaaggucaucgagggcuggagcaaccccaaguccaagcugcagaucaaccggcaggucaucguggaccgcggggaccggagcggcuacuccgggaucuucagcguggagggcaagagcugcaucaaccgcugcuucuacguggagcugauccggggccgcaaggaggagaccgaggugcucuggaccuccaacagcaucgucguguucugcgggacguccggcaccuacgggaccggcagcuggccggacggggccgaccugaaccugaugcccaucuga

SEQ ID NO: 88880 - RNA, 1410 nt, Artificial Sequence; identical to SEQ ID NO: 87895
  derived and/or modified CDS sequence (opt1) from neuraminidase__InfluenzaA__AHL97351

SEQ ID NO: 88881 - RNA, 1410 nt, Artificial Sequence; identical to SEQ ID NO: 88760
  derived and/or modified CDS sequence (opt1) from neuraminidase__InfluenzaA__AHL97363

SEQ ID NO: 88882 - RNA, 1410 nt, Artificial Sequence; identical to SEQ ID NO: 86170
  derived and/or modified CDS sequence (opt1) from neuraminidase__InfluenzaA__AHL97387

SEQ ID NO: 88883 - RNA, 1410 nt, Artificial Sequence
  derived and/or modified CDS sequence (opt1) from neuraminidase__InfluenzaA__AHL97399
augaaccccaaccagaagaucaucaccaucggcagcgugucccugaccaucagcacgaucugcuucuucaugcagaucgccauccucaucaccaccgucacccugcacuucaagcaguacgaguucaacuccccgcccaacaaccaggugaugcugugcgagcccacgaucaucgagcgcaacaucaccgagaucauguaccucaccaacaccacgaucgagaaggagaucugccccaagccggccgaguaccggaacuggagcaagccccagugcgggaucaccggcuucgcgcccuucuccaaggacaacagcauccgccuguccgccgggggcgacaucugggugacccgggagcccuacgucagcugcgacccggacaagugcuaccaguucgcccuggggcagggcaccacgcucaacaacaugcacuccaacaacaccgugcgcgaccggacccccuaccgcacccugcugaugaacgagcucggcgugcccuuccaccuggggacgaagcaggucugcaucgccuggagcuccagcuccugccacgacggcaaggccuggcugcacgugugcaucaccggggacgacaagaacgcgaccgccagcuucaucuacaacggccggcucguggacuccgucgugagcugguccaaggagauccugcgcacccaggagagcgagugcgugugcaucaacgggacgugcaccgucgugaugaccgacggcuccgccagcggcaaggccgacaccaagauccuguucaucgaggaggggaagaucgugcacacgagcacccucuccggcagcgcgcagcacgucgaggagugcuccugcuacccccgguacccgggggugcgcugcgugugccgggacaacuggaagggcagcaaccgccccaucgucgacaucaacaucaaggaccacuccaucgugagcuccuacgugugcagcggccuggucggggacaccccgcggaagaacgacuccagcuccagcucccacugccuggaccccaacaacgaggagggcgggcacggcgugaaggggugggccuucgacgacggcaacgacguguggaugggccgcaccaucaacgagacgagccggcucggguacgagaccuucaaggucaucgagggcugguccaaccccaagagcaagcugcagaucaaccgccaggugaucgucgaccgcggggaccgguccggcuacagcgggaucuucuccguggagggccggagcugcaucaaccgcugcuucuacguggagcugauccggggccgcaaggaggagaccgagguccucuggaccagcaacuccaucgugguguucugcgggacgagcggcaccuacgggaccggcuccuggcccgacggggccgaccugaaccugaugcccaucuga

SEQ ID NO: 88884 - RNA, 1410 nt, Artificial Sequence; identical to SEQ ID NO: 87399
  derived and/or modified CDS sequence (opt1) from neuraminidase__InfluenzaA__AHL97411

SEQ ID NO: 88885 - RNA, 1410 nt, Artificial Sequence
  derived and/or modified CDS sequence (opt1) from neuraminidase__InfluenzaA__AHL97423
augaaccccaaccagaagaucaucaccaucggcagcgugucccugaccaucagcacgaucugcuucuucaugcagaucgccauccucaucaccaccgucacccugcacuucaagcaguacgaguucaacuccccgcccaacaaccaggugaugcugugcgagcccacgaucaucgagcgcaacaucaccgagaucguguaccucaccaacaccacgaucgagaaggagaucugccccaagccggccgaguaccggaacuggagcaagccccagugcgggaucaccggcuucgcgcccuucuccaaggacaacagcauccgccuguccgccgggggcgacaucugggucacccgggagcccuacgugagcugcgacccggacaagugcuaccaguucgcccuggggcagggcaccacgcucaacaacgugcacuccaacaacaccguccgcgaccggacccccuaccgcacccugcugaugaacgagcucggcgugcccuuccaccuggggacgaagcaggucugcaucgccuggagcuccagcuccugccacgacggcaaggccuggcugcacgugugcaucaccggggacgacaagaacgcgaccgccagcuucaucuacaacggccggcucguggacuccguggucagcugguccaaggagauccugcgcacccaggagagcgagugcgugugcaucaacgggacgugcaccguggucaugaccgacggcuccgccagcggcaaggccgacaccaagauccuguucaucgaggaggggaagaucgugcacacgagcacccucuccggcagcgcgcagcacguggaggagugcuccugcuacccccgguacccggggguccgcugcgugugccgggacaacuggaagggcagcaaccgccccaucguggacaucaacaucaaggaccacuccaucgucagcuccuacgugugcagcggccuggugggggacaccccgcggaagaacgacuccagcuccagcucccacugccuggaccccaacaacgaggagggcgggcacggcgucaaggggugggccuucgacgacggcaacgacauguggaugggccgcaccaucaacgagacgagccggcucggguacgagaccuucaaggugaucgagggcugguccaaccccaagagcaagcugcagaucaaccgccaggucaucguggaccgcggggaccgguccggcuacagcgggaucuucuccguggagggcaagagcugcaucaaccggugcuucuacgucgagcugauccgcggccggaaggaggagaccgaggugcucuggaccagcaacuccaucguggucuucugcgggacgagcggcaccuacgggaccggcuccuggcccgacggggccgaccugaaccugaugcccaucuga

SEQ ID NO: 88886 - RNA, 1410 nt, Artificial Sequence
  derived and/or modified CDS sequence (opt1) from neuraminidase__InfluenzaA__AHL97447
augaaccccaaccagaagaucaucaccaucggcagcgugucccugaccaucagcacgaucugcuucuucaugcagaucgccauccucaucaccaccgucacccugcacuucaagcaguacgaguucaacuccccgcccaacaaccaggugaugcugugcgagcccacgaucaucgagcgcaacaucaccgagaucguguaccucaccaacaccacgaucgagaaggagaucugccccaagccggccgaguaccggaacuggagcaagccccagugcgggaucaccggcuucgcgcccuucuccaaggacaacagcauccgccuguccgccgggggcgacaucugggucacccgggagcccuacgugagcugcgacccggacaagugcuaccaguucgcccuggggcagggcaccacgcucaacaacgugcacuccaacaacaccguccgcgaccggacccccuaccgcacccugcugaugaacgagcucggcgugcccuuccaccuggggacgaagcaggucugcaucgccuggagcuccagcuccugccacgacggcaaggccuggcugcacgugugcaucaccggggacgacaagaacgcgaccgccagcuucaucuacaacggccggcucguggacuccguggucagcugguccaaggagauccugcgcacccaggagagcgagugcgugugcaucaacgggacgugcaccguggucaugaccgacggcuccgccagcggcaaggccgacaccaagauccuguucaucgaggaggggaagaucgugcacacgagcacccucuccggcagcgcgcagcacguggaggagugcuccugcuacccccgguacccggggguccgcugcgugugccgggacaacuggaagggcagcaaccgccccaucguggacaucaacaucaaggaccacuccaucgucagcuccuacgugugcagcggccuggugggggacacgccccggaagaacgacuccuucagcuccagccacugccuggaccccaacaacgaggagggcgggcacggcgucaaggggugggccuucgacgacggcaacgacguguggaugggccgcaccaucaacgagaccucccggcucggguacgagaccuucaaggucaucgagggcuggagcaacccgaaguccaagcugcagaucaaccgccaggugaucguggaccgcggggaccggagcggcuacuccgggaucuucagcgucgagggcaaguccugcaucaaccggugcuucuacguggagcugauccgcggccggaaggaggagaccgaggugcucuggaccagcaacagcaucgucguguucugcgggacguccggcaccuacgggaccggcagcuggcccgacggggccgaccugaaccugaugcccaucuga

SEQ ID NO: 88887 - RNA, 1410 nt, Artificial Sequence; identical to SEQ ID NO: 86170
  derived and/or modified CDS sequence (opt1) from neuraminidase__InfluenzaA__AHL97459

SEQ ID NO: 88888 - RNA, 1410 nt, Artificial Sequence; identical to SEQ ID NO: 88760
  derived and/or modified CDS sequence (opt1) from neuraminidase__InfluenzaA__AHL97471

SEQ ID NO: 88889 - RNA, 1410 nt, Artificial Sequence; identical to SEQ ID NO: 87895
  derived and/or modified CDS sequence (opt1) from neuraminidase__InfluenzaA__AHL97483

SEQ ID NO: 88890 - RNA, 1410 nt, Artificial Sequence; identical to SEQ ID NO: 86170
  derived and/or modified CDS sequence (opt1) from neuraminidase__InfluenzaA__AHL97496

SEQ ID NO: 88891 - RNA, 1410 nt, Artificial Sequence; identical to SEQ ID NO: 86170
  derived and/or modified CDS sequence (opt1) from neuraminidase__InfluenzaA__AHL97508

SEQ ID NO: 88892 - RNA, 1410 nt, Artificial Sequence
  derived and/or modified CDS sequence (opt1) from neuraminidase__InfluenzaA__AHL97520
augaaccccaaccagaagaucaucaccaucggcagcgugucccugaccaucagcacgaucugcuucuucaugcagaucgccauccucaucaccaccgucacccugcacuucaagcaguacgaguucaacuccccgcccaacaaccaggugaugcugugcgagcccacgaucaucgagcgcaacaucaccgagaucguguaccucaccaacaccacgaucgagaaggagaccugccccaagccggccgaguaccggaacuggagcaagccccagugcgggaucaccggcuucgcgcccuucuccaaggacaacagcauccgccuguccgccgggggcgacaucugggucacccgggagcccuacgugagcugcgggccggacaagugcuaccaguucgcccugggccagggcacgacccucaacaacaugcacuccaacaacaccgugcgcgaccggacccccuaccgcacgcugcugaugaacgagcucgggguccccuuccaccugggcaccaagcaggucugcaucgccuggagcuccagcuccugccacgacgggaaggccuggcugcacgugugcaucaccggcgacgacaagaacgcgaccgccagcuucaucuacaacgggcggcucguggacuccguggugagcugguccaaggagauccugcgcacgcaggagagcgagugcgucugcaucaacgggaccugcaccguggugaugaccgacggcuccgccagcgggaaggccgacacgaagauccuguucaucgaggagggcaagaucguccacaccagcacccucuccgggagcgcgcagcacguggaggagugcuccugcuacccccgguacccgggcgugcgcugcgucugccgggacaacuggaagggcagcaaccgccccaucguggacaucaacaucaaggaccacuccaucgugagcuccuacgucugcagcgggcuggugggcgacaccccgcggaagaacgacuccagcuccagcucccacugccuggaccccaacaacgaggagggcggccacggggugaagggcugggccuucgacgacggcaacgacgucuggauggggcgcacgaucaacgagaccagccggcucggcuacgagaccuucaaggugaucgaggggugguccaaccccaagagcaagcugcagaucaaccgccaggucaucguggaccggggcgaccgcuccggguacagcggcaucuucuccguggagggcaagagcugcaucaaccggugcuucuacgucgagcugauccgcgggcggaaggaggagaccgaggugcucuggacgagcaacuccaucguggucuucugcggcaccagcgggaccuacggcaccggguccuggcccgacggcgccgaccugaaccugaugcccaucuga

SEQ ID NO: 88893 - RNA, 1410 nt, Artificial Sequence; identical to SEQ ID NO: 86170
  derived and/or modified CDS sequence (opt1) from neuraminidase__InfluenzaA__AHL97532

SEQ ID NO: 88894 - RNA, 1410 nt, Artificial Sequence; identical to SEQ ID NO: 86170
  derived and/or modified CDS sequence (opt1) from neuraminidase__InfluenzaA__AHL97544

SEQ ID NO: 88895 - RNA, 1410 nt, Artificial Sequence; identical to SEQ ID NO: 87895
  derived and/or modified CDS sequence (opt1) from neuraminidase__InfluenzaA__AHL97556

SEQ ID NO: 88896 - RNA, 1410 nt, Artificial Sequence
  derived and/or modified CDS sequence (opt1) from neuraminidase__InfluenzaA__AHL97568
augaaccccaaccagaagaucaucaccaucggcagcgugucccugaccaucagcgccaucugcuucuucaugcagaucgccauccucaucacgaccgucacccugcgcuucaagcaguacgaguucaacuccccgcccaacaaccaggugaugcugugcgagcccaccaucaucgagcggaacaucacggagaucguguaccucaccaacaccaccaucgagaaggagaucugccccaagccggcggaguaccgcaacuggagcaagccccagugcgacaucacgggguucgcccccuucuccaaggacaacagcauccggcuguccgccggcggggacaucugggucacccgcgagcccuacgugagcugcgacccggacaagugcuaccaguucgcccugggccaggggaccacccucacgaacgugcacuccaacaacaccguccgggaccgcacccccuaccggacccugcugaugaacgagcucggcgugcccuuccaccugggcacgaagcaggucugcaucgccuggagcuccagcuccugccacgacgggaaggcguggcugcacgugugcaucaccggcgacgacaagaacgccaccgccagcuucaucuacaacgggcgccucguggacuccguggucagcugguccaaggagauccugcggacccaggagagcgagugcgugugcaucaacggcacgugcaccguggucaugaccgacggguccgccagcggcaaggcggacaccaagauccuguucaucgaggagggcaagaucgugcacacgagcacccucuccgggagcgcccagcacguggaggagugcuccugcuacccccgcuacccgggcguccggugcgugugccgcgacaacuggaaggggagcaaccggcccaucguggacaucaacaucaaggaccacuccaucgucagccgcuacgugugcuccggccuggugggcgacacgccccggaagaacgacagcuccagcuccagccacugccuggaccccaacaacgaggagggcgggcacggggucaagggcugggccuucgacgacgggaacgacguguggaugggccgcaccaucaacgagaccucccggcucggcuacgagaccuucaaggucaucgagggguggagcaacccgaaguccaagcugcagaucaaccgccaggugaucguggaccggggcgaccgcagcggguacuccggcaucuucagcgucgaggggaaguccugcaucaaccggugcuucuacguggagcugauccgcggccgcaaggaggagaccgaggugcucuggaccagcaacagcaucgucguguucugcggcacguccgggaccuacggcaccgggagcuggcccgacggcgccgaccugaaccugaugcccaucuga

SEQ ID NO: 88897 - RNA, 1410 nt, Artificial Sequence; identical to SEQ ID NO: 88810
  derived and/or modified CDS sequence (opt1) from neuraminidase__InfluenzaA__AHL97580

SEQ ID NO: 88898 - RNA, 1410 nt, Artificial Sequence
  derived and/or modified CDS sequence (opt1) from neuraminidase__InfluenzaA__AHL97592
augaaccccaaccagaagaucaucaccaucggcagcgugucccugaccaucagcacgaucugcuucuucaugcagaucgccauccucaucaccaccgucacccugcacuucaagcaguacgaguucaacuccccgcccaacaaccaggugaugcugugcgagcccacgaucaucgagcgcaacaucaccgagaucguguaccucaccaacaccacgaucgagaaggagaucugccccaagccggccgaguaccggaacuggagcaagccccagugcgggaucaccggcuucgcgcccuucuccaaggacaacagcguccgccuguccgccgggggcgacaucugggugacccgggagcccuacgugagcugcgacccggacaagugcuaccaguucgcccuggggcagggcaccacgcucaacaacguccacuccaacaacaccgugcgcgaccggacccccuaccgcacccugcugaugaacgagcucggcgugcccuuccaccuggggacgaagcaggucugcaucgccuggagcuccagcuccugccacgacggcaaggccuggcugcacgugugcaucaccggggacgacaagaacgcgaccgccagcuucaucuacaacggccggcucguggacuccgucgugagcugguccaaggagauccugcgcacccaggagagcgagugcgugugcaucaacgggacgugcaccgucgugaugaccgacggcuccgccagcggcaaggccgacaccaagauccuguucaucgaggaggggaagaucgugcacacgagcacccucuccggcagcgcgcagcacgucgaggagugcuccugcuacccccgguacccgggggugcgcugcgugugccgggacaacuggaagggcagcaaccgccccaucgucgacaucaacaucaaggaccacuccaucgugagcuccuacgugugcagcggccuggucggggacacgccccggaagaacgacuccagcuccagcucccacugccugggccccaacaacgaggagggcgggcacggggugaagggcugggccuucgacgacggcaacgacgucuggauggggcgcaccaucaacgagaccagccgguccggcuacgagaccuucaaggugaucgagggguggagcaacccgaaguccaagcuccagaucaaccgccaggugaucgucgaccggggcgaccgcagcggguacuccggcaucuucagcguggagggcaagagcugcaucaaccggugcuucuacguggagcugauccgcgggcggaaggaggagaccgagguccuguggaccuccaacagcaucgugguguucugcggcacguccgggaccuacggcaccgggagcuggcccgacggcgccgaccucaaccugaugcccaucuga

SEQ ID NO: 88899 - RNA, 1410 nt, Artificial Sequence; identical to SEQ ID NO: 86170
  derived and/or modified CDS sequence (opt1) from neuraminidase__InfluenzaA__AHL97604

SEQ ID NO: 88900 - RNA, 1410 nt, Artificial Sequence
  derived and/or modified CDS sequence (opt1) from neuraminidase__InfluenzaA__AHL97616
augaaccccaaccagaagaucaucaccaucggcagcgugucccugaccaucagcacgaucugcuucuucaugcagaucgccauccucaucaccaccgucacccugcacuucaagcaguacgaguucaacuccccgcccaacaaccaggugaugcugugcgagcccacgaucaucgagcgcaacaucaccgagaucguguaccucaccaacaccacgaucgagaaggagaucugccccaagccggccgaguaccggaacuggagcaagccccagugcgggaucaccggcuucgcgcccuucuccaaggacaacagcauccgccuguccgccgggggcgacaucugggucacccgggagcccuacgugagcugcgacccggacaagugcuaccaguucgcccuggggcagggcaccacgcucaacaacaugcacuccaacaacaccgugcgcgaccggacccccuaccgcacccugcugaugaacgagcucggcguccccuuccaccuggggacgaagcaggucugcaucgccuggagcuccagcuccugccacgacggcaaggccuggcugcacgugugcaucaccggggacgacaagaacgcgaccgccagcuucaucuacaacggccggcucguggacuccguggugagcugguccaaggagguccugcgcacccaggagagcgagugcgugugcaucaacgggacgugcaccguggucaugaccgacggcuccgccagcggcaaggccgacaccaagauccuguucaucgaggaggggaagaucgugcacacgagcacccucuccggcagcgcgcagcacguggaggagugcuccugcuacccccgguacccggggguccgcugcgugugccgggacaacuggaagggcagcaaccgccccaucguggacaucaacaucaaggaccacuccaucgucagcuccuacgugugcagcggccuggugggggacaccccgcggaagaacgacuccagcuccagcucccacugccuggaccccaacaacgaggagggcgggcacggcgucaaggggugggccuucgacgacggcaacgacguguggaugggccgcaccaucaacgagacgagccggcucggguacgagaccuucaaggucaucgagggcugguccaaccccaagagcaagcugcagaucaaccgccaggugaucguggaccgcggggaccgguccggcuacagcgggaucuucuccgucgagggcaagagcugcaucaaccggugcuucuacguggagcugauccgcggccggaaggaggagaccgaggugcucuggaccagcaacuccaucgucguguucugcgggacgagcggcaccuacgggaccggcuccuggcccgacggggccgaccugaaccugaugcccaucuga

SEQ ID NO: 88901 - RNA, 1410 nt, Artificial Sequence; identical to SEQ ID NO: 88760
  derived and/or modified CDS sequence (opt1) from neuraminidase__InfluenzaA__AHL97628

SEQ ID NO: 88902 - RNA, 1410 nt, Artificial Sequence; identical to SEQ ID NO: 86170
  derived and/or modified CDS sequence (opt1) from neuraminidase__InfluenzaA__AHL97640

SEQ ID NO: 88903 - RNA, 1410 nt, Artificial Sequence; identical to SEQ ID NO: 87918
  derived and/or modified CDS sequence (opt1) from neuraminidase__InfluenzaA__AHL97652

SEQ ID NO: 88904 - RNA, 1410 nt, Artificial Sequence; identical to SEQ ID NO: 87918
  derived and/or modified CDS sequence (opt1) from neuraminidase__InfluenzaA__AHL97664

SEQ ID NO: 88905 - RNA, 1410 nt, Artificial Sequence; identical to SEQ ID NO: 87399
  derived and/or modified CDS sequence (opt1) from neuraminidase__InfluenzaA__AHL97676

SEQ ID NO: 88906 - RNA, 1410 nt, Artificial Sequence; identical to SEQ ID NO: 86170
  derived and/or modified CDS sequence (opt1) from neuraminidase__InfluenzaA__AHL97688

SEQ ID NO: 88907 - RNA, 1410 nt, Artificial Sequence; identical to SEQ ID NO: 87895
  derived and/or modified CDS sequence (opt1) from neuraminidase__InfluenzaA__AHL97700

SEQ ID NO: 88908 - RNA, 1410 nt, Artificial Sequence
  derived and/or modified CDS sequence (opt1) from neuraminidase__InfluenzaA__AHL97712
augaaccccaaccagaagaucaucaccaucggcagcgugucccugaccaucagcacgaucugcuucuucaugcagaucgccauccucaucaccaccgucacccugcacuucaagcaguacgaguucaacuccccgcccaacaaccaggugaugcugugcgagcccacgaucaucgagcgcaacaucaccgagaucguguaccucaccaacaccacgaucgagaaggagaucugccccaagccggccgaguaccggaacuggagcaagccccagugcgggaucaccggcuucgcgcccuucuccaaggacaacagcauccgccuguccgccgggggcgacaucugggucacccgggagcccuacgugagcugcgacccggacaagugcuaccaguucgcccuggggcagggcaccacgcucaacaacgugcacuccaacaacaccguccgcgaccggacccccuaccgcacccugcugaugaacgagcucggcgugcccuuccaccuggggacgaagcaggucugcaucgccuggagcuccagcuccugccacgacggcaaggccuggcugcacgugugcaucaccggggacgacaagaacgcgaccgccagcuucaucuacaacggccggcucguggacuccguggucagcugguccaaggagauccugcgcacccaggagagcgagugcgugugcaucaacgggacgugcaccguggucaugaccgacggcuccgccagcggcaaggccgacaccaagauccuguucaucgaggaggggaagaucgugcacacgagcacccucuccggcagcgcgcagcacguggaggagugcuccugcuacccccgguacccggggguccgcugcgugugccgggacaacuggaagggcagcaaccgccccaucguggacaucaacaucaaggaccacuccaucgucagcuccuacgugugcagcggccuggugggggacacgccccggaagaacgacuccaccagcuccagccacugccuggaccccaacaacgaggagggcgggcacggcgucaaggggugggccuucgacgacggcaacgacguguggaugggccgcaccaucaacgagaccucccggcucggguacgagaccuucaaggucaucgagggcuggagcaacccgaaguccaagcugcagaucaaccgccaggugaucguggaccgcggggaccggagcggcuacuccgggaucuucagcgucgagggcaaguccugcaucaaccggugcuucuacguggagcugauccgcggccggaaggaggagaccgaggugcucuggacgagcaacagcaucgucguguucugcgggaccuccggcaccuacgggaccggcagcuggcccgacggggccgaccugaaccugaugcccaucuga

SEQ ID NO: 88909 - RNA, 1410 nt, Artificial Sequence; identical to SEQ ID NO: 87895
  derived and/or modified CDS sequence (opt1) from neuraminidase__InfluenzaA__AHL97724

SEQ ID NO: 88910 - RNA, 1410 nt, Artificial Sequence; identical to SEQ ID NO: 86170
  derived and/or modified CDS sequence (opt1) from neuraminidase__InfluenzaA__AHL97736

SEQ ID NO: 88911 - RNA, 1410 nt, Artificial Sequence
  derived and/or modified CDS sequence (opt1) from neuraminidase__InfluenzaA__AHL97760
augaaccccaaccagaagaucaucaccaucggcagcgugucccugaccaucagcacgaucugcuucuucaugcagaucgccauccucaucaccaccgucacccugcacuucaagcaguacgaguucaacuccccgcccaacaaccaggugaugcugugcgagcccacgaucaucgagcgcaacaucaccgagaucguguaccucaccaacaccacgaucgagaaggagaucugccccaagccggccgaguaccggaacuggagcaagccccagugcgggaucaccggcuucgcgcccuucuccaaggacaacagcauccgccuguccgccgggggcgacaucugggucacccgggagcccuacgugagcugcgacccggacaagugcuaccaguucgcccuggggcagggcaccacgcucaacaacgugcacuccaacaacaccguccgcgaccggacccccuaccgcacccugcugaugaacgagcucggcgugcccuuccaccuggggacgaagcaggucugcaucgccuggagcuccagcuccugccacgacggcaaggccuggcugcacgugugcaucaccggggacgacgagaacgcgaccgccagcuucaucuacaacggccggcucguggacuccguggucagcugguccaaggagauccugcgcacccaggagagcgagugcgugugcaucaacgggacgugcaccguggucaugaccgacggcuccgccagcggcaaggccgacaccaagauccuguucaucgaggaggggaagaucgugcacacgagcacccucuccggcagcgcgcagcacguggaggagugcuccugcuacccccgguacccggggguccgcugcgugugccgggacaacuggaagggcagcaaccgccccaucguggacaucaacaucaaggaccacuccaucgucagcuccuacgugugcagcggccuggugggggacaccccgcggaagaacgacuccagcuccagcucccacugccuggaccccaacaacgaggagggcgggcacggcgucaaggggugggccuucgacgacggcaacgacguguggaugggccgcaccaucaacgagacgagccggcucggguacgagaccuucaaggucaucgagggcugguccaaccccaagagcaagcugcagaucaaccgccaggugaucguggaccgcggggaccgguccggcuacagcgggaucuucuccgucgagggcaagagcugcaucaaccggugcuucuacguggagcugauccgcggccggaaggaggagaccgaggugcucuggaccagcaacuccaucgucguguucugcgggacgagcggcaccuacgggaccggcuccuggcccgacggggccgaccugaaccugaugcccaucuga

SEQ ID NO: 88912 - RNA, 1410 nt, Artificial Sequence
  derived and/or modified CDS sequence (opt1) from neuraminidase__InfluenzaA__AHL97772
augaaccccaaccagaagaucaucaccaucggcagcgugucccugaccaucagcacgaucugcuucuucaugcagaucgccauccucaucaccaccgucacccugcacuucaagcaguacgaguucaacuccccgcccaacaaccaggugaugcugugcgagcccacgaucaucgagcgcaacaucaccgagaucguguaccucaccaacaccacgaucgagaaggagaucugccccaagccggccgaguaccggaacuggagcaagccccagugcgggaucaccggcuucgcgcccuucuccaaggacaacagcauccgccuguccgccgggggcgacaucugggucacccgggagcccuacgugagcugcgacccggacaagugcuaccaguucgcccuggggcagggcaccacgcucaacaacgugcacuccaacaacaccguccgcgaccggacccccuaccgcacccugcugaugaacgagcucggcgugcccuuccaccuggggacgaagcaggucugcaucgccuggagcuccagcuccugccacgacggcaaggccuggcugcacgugugcaucaccggggacgacaagaacgcgaccgccagcuucaucuacaacggccggcucguggacuccguggucagcugguccaaggagauccugcgcacccaggagagcgagugcgugugcaucaacgggacgugcaccguggucaugaccgacggcuccgccagcggcaaggccgacaccaagauccuguucaucgaggaggggaagaucgugcacacgagcacccucuccggcagcgcgcagcacguggaggagugcuccugcuacccccgguacccggggguccgcugcgugugccgggacaacuggaagggcagcaaccgccccaucguggacaucaacaucaaggaccacuccaucgucagcuccuacgugugcagcggccuggugggggacaccccgcggaagaacgacuccagcuccagcucccacugccuggaccccaacaacgaggagggcgggcacggcgucaaggggugggccuucgacgacggcaacgacguguggaugggccgcaccaucaacgagacgagccggcucggguacgagaccuucaaggucaucgagggcugguccaaccccaagagcaagcugcagaucaaccgccaggugaucguggaccgcggggaccgguccggcuacagcgggaucuucuccgucgagggcaagagcugcaucaaccggugcuucuacguggagcugauccgcggccggaaggaggagaccgaggugcucuggaccagcaacuccgucgugguguucugcgggacgagcggcaccuacgggaccggcuccuggcccgacggggccgaccugaaccugaugcccaucuga

SEQ ID NO: 88913 - RNA, 1410 nt, Artificial Sequence; identical to SEQ ID NO: 87399
  derived and/or modified CDS sequence (opt1) from neuraminidase__InfluenzaA__AHL97784

SEQ ID NO: 88914 - RNA, 1410 nt, Artificial Sequence; identical to SEQ ID NO: 86170
  derived and/or modified CDS sequence (opt1) from neuraminidase__InfluenzaA__AHL97796

SEQ ID NO: 88915 - RNA, 1410 nt, Artificial Sequence; identical to SEQ ID NO: 86170
  derived and/or modified CDS sequence (opt1) from neuraminidase__InfluenzaA__AHL97808

SEQ ID NO: 88916 - RNA, 1410 nt, Artificial Sequence; identical to SEQ ID NO: 86170
  derived and/or modified CDS sequence (opt1) from neuraminidase__InfluenzaA__AHL97820

SEQ ID NO: 88917 - RNA, 1410 nt, Artificial Sequence
  derived and/or modified CDS sequence (opt1) from neuraminidase__InfluenzaA__AHL97832
augaaccccaaccagaagaucaucaccaucggcagcgugucccugaccaucagcacgaucugcuucuucaugcagaucgccauccucaucaccaccgucacccugcacuucaagcaguacgaguucgacuccccgcccaacaaccaggugaugcugugcgagcccacgaucaucgagcgcaacaucaccgagaucguguaccucaccaacaccacgaucgagaaggagaucugccccaagccggccgaguaccggagcugguccaagccccagugcgggaucaccggcuucgcgcccuucagcaaggacaacuccauccgccugagcgccgggggcgacaucugggucacccgggagcccuacguguccugcgacccggacaagugcuaccaguucgcccuggggcagggcaccacgcucaacaacgugcacagcaacaacaccguccgcgaccggacccccuaccgcacccugcugaugaacgagcucggcgugcccuuccaccuggggacgaagcaggucugcaucgccugguccagcuccagcugccacgacggcaaggccuggcugcacgugugcaucaccggggacgacaagaacgcgaccgccuccuucaucuacaacggccggcucguggacagcguggucuccuggagcaaggagauccugcgcacccaggaguccgagugcgugugcaucaacgggacgugcaccguggucaugaccgacggcagcgccagcggcaaggccgacaccaagauccuguucaucgaggaggggaagaucgugcacacguccacccucagcggcuccgcgcagcacguggaggagugcagcugcuacccccgguacccggggguccgcugcgugugccgggacaacuggaagggcuccaaccgccccaucguggacaucaacaucaaggaccacagcaucgucuccagcuacgugugcuccggccuggugggggacacgccccggaagaacgacagcuccagcuccagccacugccuggaccccaacaacgaggagggcgggcacggcgucaaggggugggccuucgacgacggcaacgacguguggaugggccgcaccaucaacgagaccucccggcucggguacgagaccuucaaggucaucgagggcuggagcaacccgaaguccaagcugcagaucaaccgccaggugaucguggaccgcggggaccggagcggcuacuccgggaucuucagcgucgagggcaagagcugcaucaaccggugcuucuacguggagcugauccgcggccggaaggaggagaccgaggugcucuggaccuccaacagcaucgucguguucugcgggacguccggcaccuacgggaccggcagcuggcccgacggggccgaccugaaccugaugcccaucuga

SEQ ID NO: 88918 - RNA, 1410 nt, Artificial Sequence; identical to SEQ ID NO: 86170
  derived and/or modified CDS sequence (opt1) from neuraminidase__InfluenzaA__AHL97844

SEQ ID NO: 88919 - RNA, 1410 nt, Artificial Sequence; identical to SEQ ID NO: 88911
  derived and/or modified CDS sequence (opt1) from neuraminidase__InfluenzaA__AHL97856

SEQ ID NO: 88920 - RNA, 1410 nt, Artificial Sequence; identical to SEQ ID NO: 86170
  derived and/or modified CDS sequence (opt1) from neuraminidase__InfluenzaA__AHL97868

SEQ ID NO: 88921 - RNA, 1410 nt, Artificial Sequence; identical to SEQ ID NO: 87895
  derived and/or modified CDS sequence (opt1) from neuraminidase__InfluenzaA__AHL97880

SEQ ID NO: 88922 - RNA, 1410 nt, Artificial Sequence; identical to SEQ ID NO: 86170
  derived and/or modified CDS sequence (opt1) from neuraminidase__InfluenzaA__AHL97892

SEQ ID NO: 88923 - RNA, 1410 nt, Artificial Sequence; identical to SEQ ID NO: 86170
  derived and/or modified CDS sequence (opt1) from neuraminidase__InfluenzaA__AHL97904

SEQ ID NO: 88924 - RNA, 1410 nt, Artificial Sequence; identical to SEQ ID NO: 87907
  derived and/or modified CDS sequence (opt1) from neuraminidase__InfluenzaA__AHL97916

SEQ ID NO: 88925 - RNA, 1410 nt, Artificial Sequence; identical to SEQ ID NO: 86170
  derived and/or modified CDS sequence (opt1) from neuraminidase__InfluenzaA__AHL97928

SEQ ID NO: 88926 - RNA, 1410 nt, Artificial Sequence; identical to SEQ ID NO: 88886
  derived and/or modified CDS sequence (opt1) from neuraminidase__InfluenzaA__AHL97952

SEQ ID NO: 88927 - RNA, 1410 nt, Artificial Sequence; identical to SEQ ID NO: 86170
  derived and/or modified CDS sequence (opt1) from neuraminidase__InfluenzaA__AHL97964

SEQ ID NO: 88928 - RNA, 1410 nt, Artificial Sequence; identical to SEQ ID NO: 86170
  derived and/or modified CDS sequence (opt1) from neuraminidase__InfluenzaA__AHL97976

SEQ ID NO: 88929 - RNA, 1410 nt, Artificial Sequence; identical to SEQ ID NO: 86170
  derived and/or modified CDS sequence (opt1) from neuraminidase__InfluenzaA__AHL97988

SEQ ID NO: 88930 - RNA, 1410 nt, Artificial Sequence
  derived and/or modified CDS sequence (opt1) from neuraminidase__InfluenzaA__AHL98000
augaaccccaaccagaagaucaucaccaucggcagcgugucccugaccaucagcacgaucugcuucuucaugcagaucgccauccucaucaccaccgucacccugcacuucaagcaguacgaguucaacuccccgcccaacaaccaggugaugcugugcgagcccacgaucaucgagcgcaacaucaccgagaucguguaccucaccaacaccacgaucgagaaggagaucugccccaagccggccgaguaccggaacuggagcaagccccagugcgggaucaccggcuucgcgcccuucuccaaggacaacagcauccgccuguccgccgggggcgacaucugggucacccgggagcccuacgugagcugcgacccggacaagugcuaccaguucgcccuggggcagggcaccacgcucaacaacgugcacuccaacaacaccguccgcgaccggacccccuaccgcacccugcugaugaacgagcucggcgugcccuuccaccuggggacgaagcaggucugcaucgccuggagcuccagcuccugccacgacggcaaggccuggcugcacgugugcaucaccggggacgacaagaacgcgaccgccagcuucaucuacaacggccggcucguggacuccguggucagcugguccaaggagauccugcgcacccacgagagcgagugcgugugcaucaacgggacgugcaccguggucaugaccgacggcuccgccagcggcaaggccgacaccaagauccuguucaucgaggaggggaagaucgugcacacgagcacccucuccggcagcgcgcagcacguggaggagugcuccugcuacccccgguacccggggguccgcugcgugugccgggacaacuggaagggcagcaaccgccccaucguggacaucaacaucaaggaccacuccaucgucagcuccuacgugugcagcggccuggugggggacaccccgcggaagaaggacuccagcuccagcucccacugccuggaccccaacaacgaggagggcgggcacggcgucaaggggugggccuucgacgacggcaacgacguguggaugggccgcaccaucaacgagacgagccggcucggguacgagaccuucaaggucaucgagggcugguccaaccccaagagcaagcugcagaucaaccgccaggugaucguggaccgcggggaccgguccggcuacagcgggaucuucuccgucgagggcaagagcugcaucaaccggugcuucuacguggagcugauccgcggccggaaggaggagaccgaggugcucuggaccagcaacuccaucgucguguucugcgggacgagcggcaccuacgggaccggcuccuggcccgacggggccgaccugaaccugaugcccaucuga

SEQ ID NO: 88931 - RNA, 1410 nt, Artificial Sequence
  derived and/or modified CDS sequence (opt1) from neuraminidase__InfluenzaA__AHL98012
augaaccccaaccagaagaucaucaccaucggcagcgugucccugaccaucagcacgaucugcuucuucaugcagaucgccauccucaucaccaccgucacccugcacuucaagcaguacgaguucaacuccccgcccaacaaccaggugaugcugugcgagcccacgaucaucgagcgcaacaucaccgagaucguguaccucaccaacaccacgaucgagaaggagaucugccccaagccggccgaguaccggaacuggagcaagccccagugcgggaucaccggcuucgcgcccuucuccaaggacaacagcauccgccuguccgccgggggcgacaucugggucacccgggagcccuacgugagcugcgacccggacaagugcuaccaguucgcccuggggcagggcaccacgcucaacaacgugcacuccaacaacaccguccgcgaccggacccccuaccgcacccugcugaugaacgagcucggcgugcccuuccaccuggggacgaagcaggucugcaucgccuggagcuccagcuccugccacgacggcaaggccuggcugcacgugugcaucaccggggacgacaagaacgcgaccgccagcuucaucuacaacggccggcucguggacuccguggucagcugguccaaggaggugcugcgcacccaggagagcgagugcgugugcaucaacgggacgugcaccgucgugaugaccgacggcuccgccagcggcaaggccgacaccaagauccuguucaucgaggaggggaagaucgugcacacgagcacccucuccggcagcgcgcagcacgucgaggagugcuccugcuacccccgguacccgggggugcgcugcgugugccgggacaacuggaagggcagcaaccgccccaucgucgacaucaacaucaaggaccacuccaucgugagcuccuacgugugcagcggccuggucggggacaccccgcggaagaacgacuccagcuccagcucccacugccuggaccccaacaacgaggagggcgaccacggggugaagggcugggccuucgacgacgggaacgacgucuggaugggccgcaccaucaacgagacgagccggcucggcuacgagaccuucaaggugaucgaggggugguccaaccccaagagcaagcugcagaucaaccgccaggugaucgucgaccggggcgaccgcuccggguacagcggcaucuucuccguggagggcaagagcugcaucaaccggugcuucuacguggagcugauccgcgggcggaaggaggagaccgagguccucuggaccagcaacuccaucgugguguucugcggcacgagcgggaccuacggcaccggguccuggcccgacggcgccgaccugaaccugaugcccaucuga

SEQ ID NO: 88932 - RNA, 1410 nt, Artificial Sequence; identical to SEQ ID NO: 87907
  derived and/or modified CDS sequence (opt1) from neuraminidase__InfluenzaA__AHL98048

SEQ ID NO: 88933 - RNA, 1410 nt, Artificial Sequence; identical to SEQ ID NO: 87907
  derived and/or modified CDS sequence (opt1) from neuraminidase__InfluenzaA__AHL98060

SEQ ID NO: 88934 - RNA, 1410 nt, Artificial Sequence; identical to SEQ ID NO: 87907
  derived and/or modified CDS sequence (opt1) from neuraminidase__InfluenzaA__AHL98072

SEQ ID NO: 88935 - RNA, 1410 nt, Artificial Sequence; identical to SEQ ID NO: 86170
  derived and/or modified CDS sequence (opt1) from neuraminidase__InfluenzaA__AHL98084

SEQ ID NO: 88936 - RNA, 1410 nt, Artificial Sequence; identical to SEQ ID NO: 87907
  derived and/or modified CDS sequence (opt1) from neuraminidase__InfluenzaA__AHL98096

SEQ ID NO: 88937 - RNA, 1410 nt, Artificial Sequence; identical to SEQ ID NO: 86170
  derived and/or modified CDS sequence (opt1) from neuraminidase__InfluenzaA__AHL98119

SEQ ID NO: 88938 - RNA, 1410 nt, Artificial Sequence; identical to SEQ ID NO: 86170
  derived and/or modified CDS sequence (opt1) from neuraminidase__InfluenzaA__AHL98131

SEQ ID NO: 88939 - RNA, 1410 nt, Artificial Sequence; identical to SEQ ID NO: 86170
  derived and/or modified CDS sequence (opt1) from neuraminidase__InfluenzaA__AHL98143

SEQ ID NO: 88940 - RNA, 1410 nt, Artificial Sequence
  derived and/or modified CDS sequence (opt1) from neuraminidase__InfluenzaA__AHL98155
augaaccccaaccagaagaucaucaccaucggcagcgugucccugaccaucagcacgaucugcuucuucaugcagaucgccauccucaucaccaccgucacccugcacuucaagcaguacgaguucaacuccccgcccaacaaccaggugaugcugugcgagcccacgaucaucgagcgcaacaucaccgagaucguguaccucaccaacaccacgaucgagaaggagaucugccccaagccggccgaguaccggaacuggagcaagccccagugcgggaucaccggcuucgcgcccuucuccaaggacaacagcauccgccuguccgccgggggcgacaucugggucacccgggagcccuacgugagcugcgacccggacaagugcuaccaguucgcccuggggcagggcaccacgcucaacaacgugcacuccaacaacaccguccgcgaccggacccccuaccgcacccugcugaugaacgagcucggcgugcccuuccaccuggggacgaagcaggucugcaucgccuggagcuccagcuccugccacgacggcaaggccuggcugcacgugugcaucaccggggacgacaagaacgcgaccgccagcuucaucuacaacggccggcucguggacuccguggucagcugguccaaggagauccugcgcacccaggagagcgagugcgugugcaucaacgggacgugcaccguggucaugaccgacggcuccgccagcggcaaggccgacaccaagauccuguucaucgaggaggggaagaucgugcacacgagcacccucuccggcagcgcgcagcacguggaggagugcuccugcuacccccgguacccggggguccgcugcgugugccgggacaacuggaagggcagcaaccgccccaucguggacaucaacaucaaggaccacuccaucgucagcuccuacgugugcagcggccuggugggggacacgccccggaagaacgacuccagcuccagcucccacugccuggaccccaacaacgaggagggcgggcacggcgucaaggggugggccuucgacgacggcaacgacguguggaugggccgcaccaucaacgagaccagccggcucggguacgagaccuucaaggucaucgagggcugguccaacagcaaguccaagcugcagaucaaccgccaggugaucguggaccgcggggaccggagcggcuacuccgggaucuucagcgucgagggcaagagcugcaucaaccggugcuucuacguggagcugauccgcggccggaaggaggagaccgaggugcucuggaccuccaacagcaucgucguguucugcgggacguccggcaccuacgggaccggcagcuggccggacggggccgaccugaaccugaugcccaucuga

SEQ ID NO: 88941 - RNA, 1410 nt, Artificial Sequence; identical to SEQ ID NO: 86170
  derived and/or modified CDS sequence (opt1) from neuraminidase__InfluenzaA__AHL98167

SEQ ID NO: 88942 - RNA, 1410 nt, Artificial Sequence; identical to SEQ ID NO: 86170
  derived and/or modified CDS sequence (opt1) from neuraminidase__InfluenzaA__AHL98179

SEQ ID NO: 88943 - RNA, 1410 nt, Artificial Sequence; identical to SEQ ID NO: 86170
  derived and/or modified CDS sequence (opt1) from neuraminidase__InfluenzaA__AHL98191

SEQ ID NO: 88944 - RNA, 1410 nt, Artificial Sequence; identical to SEQ ID NO: 87907
  derived and/or modified CDS sequence (opt1) from neuraminidase__InfluenzaA__AHL98215

SEQ ID NO: 88945 - RNA, 1410 nt, Artificial Sequence
  derived and/or modified CDS sequence (opt1) from neuraminidase__InfluenzaA__AHL98227
augaaccccaaccagaagaucaucaccaucggcagcgugucccugaccaucagcacgaucugcuucuucaugcagaucgccauccucaucaccaccgucacccugcacuucaagcaguacgaguucaacuccccgcccaacaaccaggugaugcugugcgagcccacgaucaucgagcgcaacaucaccgacaucguguaccucaccaacaccacgaucgagaaggagaucugccccaagccggccgaguaccggaacuggagcaagccccagugcgggaucaccggcuucgcgcccuucuccaaggacaacagcauccgccuguccgccgggggcgacaucugggucacccgggagcccuacgugagcugcgacccggacaagugcuaccaguucgcccuggggcagggcaccacgcucaacaacaugcacuccaacaacaccgugcgcgaccggacccccuaccgcacccugcugaugaacgagcucggcguccccuuccaccuggggacgaagcaggucugcaucgccuggagcuccagcuccugccacgacggcaaggccuggcugcacgugugcaucaccggggacgacaagaacgcgaccgccagcuucaucuacaacggccggcucguggacuccguggugagcugguccaaggagauccugcgcacccaggagagcgagugcgucugcaucaacgggacgugcaccguggugaugaccgacggcuccgccagcggcaaggccgacaccaagauccuguucaucgaggaggggaagaucguccacacgagcacccucuccggcagcgcgcagcacguggaggagugcuccugcuacccccgguacccgggggugcgcugcgucugccgggacaacuggaagggcagcaaccgccccaucguggacaucaacaucaaggaccacuccaucgugagcuccuacgucugcagcggccuggugggggacaccccgcggaagaacgacuccagcuccagcucccacugccuggaccccaacaacgaggagggcgggcacggcgugaaggggugggccuucgacgacggcaacgacgucuggaugggccgcaccaucaacgagacgagccggcucggguacgagaccuucaaggugaucgagggcugguccaaccccaagagcaagcugcagaucaaccgccaggucaucguggaccgcggggaccgguccggcuacagcgggaucuucuccguggagggcaagagcugcaucaaccggugcuucuacgucgagcugauccgcggccggaaggaggagaccgaggugcucuggaccagcaacuccaucguggucuucugcgggacgagcggcaccuacgggaccggcuccuggcccgacggggccgaccugaaccugaugcccaucuga

SEQ ID NO: 88946 - RNA, 1410 nt, Artificial Sequence; identical to SEQ ID NO: 86170
  derived and/or modified CDS sequence (opt1) from neuraminidase__InfluenzaA__AHL98239

SEQ ID NO: 88947 - RNA, 1410 nt, Artificial Sequence; identical to SEQ ID NO: 86170
  derived and/or modified CDS sequence (opt1) from neuraminidase__InfluenzaA__AHL98251

SEQ ID NO: 88948 - RNA, 1410 nt, Artificial Sequence; identical to SEQ ID NO: 87918
  derived and/or modified CDS sequence (opt1) from neuraminidase__InfluenzaA__AHL98263

SEQ ID NO: 88949 - RNA, 1410 nt, Artificial Sequence; identical to SEQ ID NO: 86170
  derived and/or modified CDS sequence (opt1) from neuraminidase__InfluenzaA__AHL98275

SEQ ID NO: 88950 - RNA, 1410 nt, Artificial Sequence; identical to SEQ ID NO: 88816
  derived and/or modified CDS sequence (opt1) from neuraminidase__InfluenzaA__AHL98287

SEQ ID NO: 88951 - RNA, 1410 nt, Artificial Sequence
  derived and/or modified CDS sequence (opt1) from neuraminidase__InfluenzaA__AHL98298
augaaccccaaccagaagaucaucaccaucggcagcgugucccugaccaucagcacgaucugcuucuucaugcagaucgccauccucaucaccaccgucacccugcacuucaagcaguacgaguucaacuccccgcccaacaaccaggugaugcugugcgagcccacgaucaucgggcgcaacaucaccgagaucguguaccucaccaacaccacgaucgagaaggagaucugccccaagccggccgaguaccggaacuggagcaagccccagugcggcaucaccggguucgcgcccuucuccaaggacaacagcauccgccuguccgccggcggggacaucugggucacccgggagcccuacgugagcugcgacccggacaagugcuaccaguucgcccugggccagggcaccacgcucaacaacgugcacuccaacaacaccguccgcgaccggacccccuaccgcacccugcugaugaacgagcucggggugcccuuccaccugggcacgaagcaggucugcaucgccuggagcuccagcuccugccacgacgggaaggccuggcugcacgugugcaucaccggcgacgacaagaacgcgaccgccagcuucaucuacaacgggcggcucguggacuccguggucagcugguccaaggagauccugcgcacccaggagagcgagugcgugugcaucaacggcacgugcaccguggucaugaccgacggcuccgccagcgggaaggccgacaccaagauccuguucaucgaggagggcaagaucgugcacacgagcacccucuccgggagcgcgcagcacguggaggagugcuccugcuacccccgguacccgggcguccgcugcgugugccgggacaacuggaagggcagcaaccgccccaucguggacaucaacaucaaggaccacuccaucgucagcuccuacgugugcagcgggcuggugggcgacaccccgcggaagaacgacuccagcuccagcucccacugccuggaccccaacaacgaggagggcgggcacggggucaagggcugggccuucgacgacggcaacgacguguggauggggcgcaccaucaacgagacgagccggcucggcuacgagaccuucaaggucaucgaggggugguccaaccccaagagcaagcugcagaucaaccgccaggugaucguggaccggggcgaccgcuccggguacagcggcaucuucuccgucgagggcaagagcugcaucaaccggugcuucuacguggagcugauccgcgggcggaaggaggagaccgaggugcucuggaccagcaacuccaucgucguguucugcggcacgagcgggaccuacggcaccggguccuggcccgacggcgccgaccugaaccugaugcccaucuga

SEQ ID NO: 88952 - RNA, 1410 nt, Artificial Sequence; identical to SEQ ID NO: 86170
  derived and/or modified CDS sequence (opt1) from neuraminidase__InfluenzaA__AHL98310

SEQ ID NO: 88953 - RNA, 1410 nt, Artificial Sequence; identical to SEQ ID NO: 86170
  derived and/or modified CDS sequence (opt1) from neuraminidase__InfluenzaA__AHL98322

SEQ ID NO: 88954 - RNA, 1410 nt, Artificial Sequence
  derived and/or modified CDS sequence (opt1) from neuraminidase__InfluenzaA__AHL98334
augaaccccaaccagaagaucaucaccaucggcagcgugucccugaccaucagcacgaucugcuucuucaugcagaucgccauccucaucaccaccgucacccugcacuucaagcaguacgaguucaacuccccgcccaacaaccaggugaugcugugcgagcccacgaucaucgagcgcaacaucaccgagguggucuaccucaccaacaccacgaucgagaaggagaucugccccaagccggccgaguaccggaacuggagcaagccccagugcgggaucaccggcuucgcgcccuucuccaaggacaacagcauccgccuguccgccgggggcgacaucugggugacccgggagcccuacgugagcugcgacccggacaagugcuaccaguucgcccuggggcagggcaccacgcucaacaacguccacuccaacaacaccgugcgcgaccggacccccuaccgcacccugcugaugaacgagcucggcgugcccuuccaccuggggacgaagcaggucugcaucgccuggagcuccagcuccugccacgacggcaaggccuggcugcacgugugcaucaccggggacgacaagaacgcgaccgccagcuucaucuacaacggccggcucguggacuccgucgugagcugguccaaggagauccugcgcacccaggagagcgagugcgugugcaucaacgggacgugcaccgucgugaugaccgacggcuccgccagcggcaaggccgacaccaagauccuguucaucgaggaggggaagaucgugcacacgagcacccucuccggcagcgcgcagcacgucgaggagugcuccugcuacccccgguacccgggggugcgcugcgugugccgggacaacuggaagggcagcaaccgccccaucgucgacaucaacaucaaggaccacuccaucgugagcuccuacgugugcagcggccuggucggggacaccccgcggaagaacgacuccagcuccagcucccacugccuggaccccaacaacgaggagggcgggcacggcgugaaggggugggccuucgacgacggcaacgacgucuggaugggccgcaccaucaacgagacgagccggcucggguacgagaccuucaaggugaucgagggcugguccaaccccaagagcaagcugcagaucaaccgccaggugaucgucgaccgcggggaccgguccggcuacagcgggaucuucuccguggagggcaagagcugcaucaaccggugcuucuacguggagcugauccgcggccggaaggaggagaccgagguccucuggaccagcaacuccaucgugguguucugcgggacgagcggcaccuacgggaccggcuccuggcccgacggggccgaccugaaccugaugcccaucuga

SEQ ID NO: 88955 - RNA, 1410 nt, Artificial Sequence
  derived and/or modified CDS sequence (opt1) from neuraminidase__InfluenzaA__AHL98346
augaaccccaaccagaagaucaucaccaucggcagcgugucccugaccaucagcacgaucugcuucuucaugcagaucgccauccucaucaccaccgucacccugcacuucaagcaguacgaguucgacuccccgcccaacaaccaggugaugcugugcgagcccacgaucaucgagcgcaacaucaccgagaucguguaccucaccaacaccacgaucgagaaggagaucugccccaagccggccgaguaccggaacuggagcaagccccagugcgggaucaccggcuucgcgcccuucuccaaggacaacagcauccgccuguccgccgggggcgacaucugggucacccgggagcccuacgugagcugcgacccggacaagugcuaccaguucgcccuggggcagggcaccacgcucaacaacgugcacuccaacaacaccguccgcgaccggacccccuaccgcacccugcugaugaacgagcucggcgugcccuuccaccuggggacgaagcaggucugcaucgccuggagcuccagcuccugccacgacggcaaggccuggcugcacgugugcaucaccggggacgacaagaacgcgaccgccagcuucaucuacaacggccggcucguggacuccguggucagcugguccaaggagauccugcgcacccaggagagcgagugcgugugcaucaacgggacgugcaccguggucaugaccgacggcuccgccagcggcaaggccgacaccaagauccuguucaucgaggaggggaagaucgugcacacgagcacccucuccggcagcgcgcagcacguggaggagugcuccugcuacccccgguacccggggguccgcugcgugugccgggacaacuggaagggcagcaaccgccccaucguggacaucaacaucaaggaccacuccaucgucagcuccuacgugugcagcggccuggugggggacaccccgcggaagaacgacuccagcuccagcucccacugccuggaccccaacaacgaggagggcgggcacggcgucaaggggugggccuucgacgacggcaacgacguguggaugggccgcaccaucaacgagacgagccggcucggguacgagaccuucaaggucaucgagggcugguccaaccccaagagcaagcugcagaucaaccgccaggugaucguggaccgcggggaccgguccggcuacagcgggaucuucuccgucgagggcaagagcugcaucaaccggugcuucuacguggagcugauccgcggccggaaggaggagaacgaggugcucuggaccagcaacuccaucgucguguucugcgggaccagcggcacguacgggaccggcuccuggcccgacggggccgaccugaaccugaugcccaucuga

SEQ ID NO: 88956 - RNA, 1410 nt, Artificial Sequence; identical to SEQ ID NO: 86170
  derived and/or modified CDS sequence (opt1) from neuraminidase__InfluenzaA__AHL98357

SEQ ID NO: 88957 - RNA, 1410 nt, Artificial Sequence; identical to SEQ ID NO: 87918
  derived and/or modified CDS sequence (opt1) from neuraminidase__InfluenzaA__AHL98369

SEQ ID NO: 88958 - RNA, 1410 nt, Artificial Sequence
  derived and/or modified CDS sequence (opt1) from neuraminidase__InfluenzaA__AHL98381
augaaccccaaccagaagaucaucaccaucggcagcgugucccugaccaucagcacgaucugcuucuucaugcagaucgccauccucaucaccaccgucacccugcacuucaagcaguacgaguucaacuccccgcccaacaaccaggugaugcugugcgagcccacgaucaucgagcgcaacaucaccgagaucguguaccucaccaacaccacgaucgagaaggagaucugccccaagccggccgaguaccggaacuggagcaagccccagugcgggaucaccggcuucgcgcccuucuccaaggacaacagcauccgccuguccgccgggggcgacaucugggucacccgggagcccuacgugagcugcgggccggacaagugcuaccaguucgcccugggccagggcaccacgcucaacaacaugcacuccaacaacaccgugcgcgaccggacccccuaccgcacccugcugaugagcgagcucgggguccccuuccaccugggcacgaagcaggucugcaucgccugguccagcuccagcugccacgacgggaaggccuggcugcacgugugcaucaccggcgacgacaagaacgcgaccgccuccuucaucuacaacgggcggcucguggacagcgugguguccuggagcaaggagauccugcgcacccaggaguccgagugcgucugcaucaacggcacgugcaccguggugaugaccgacggcagcgccagcgggaaggccgacaccaagauccuguucaucgaggagggcaagaucguccacacguccacccucagcggguccgcgcagcacguggaggagugcagcugcuacccccgguacccgggcgugcgcugcgucugccgggacaacuggaagggcuccaaccgccccaucguggacaucaacaucaaggaccacagcaccguguccagcuacgucugcuccgggcuggugggcgacacgccccggaagaacgacagcuccagcuccagccacugccuggaccccaacaacgaggagggcgggcacggggugaagggcugggccuucgacgacggcaacgacgucuggauggggcgcaccaucaacgagaccucccggcucggcuacgagaccuucaaggugaucgagggguggagcaacccgaaguccaagcugcagaucaaccgccaggucaucguggaccggggcgaccgcagcggguacuccggcaucuucagcguggagggcaagagcugcaucaaccggugcuucuacgucgagcugauccgcgggcggaaggaggagaccgaggugcucuggacguccaacagcaucguggucuucugcggcaccuccgggaccuacggcaccgggagcuggcccgacggcgccgaccugaaccugaugcccaucuga

SEQ ID NO: 88959 - RNA, 1410 nt, Artificial Sequence
  derived and/or modified CDS sequence (opt1) from neuraminidase__InfluenzaA__AHL98393
augaaccccaaccagaagaucaucaccaucggcagcgugucccugaccaucagcacgaucugcuucuucaugcagaucgccauccucaucaccaccgucacccugcacuucaagcaguacgaguucaacuccccgcccaacaaccagaugaugcugugcgagcccacgaucaucgagcgcaacaucaccgagaucguguaccucaccaacaccacgaucgagaaggagaucugccccaagccggccgaguaccggaacuggagcaagccccagugcgggaucaccggcuucgcgcccuucuccaaggacaacagcauccgccuguccgccgggggcgacaucugggugacccgggagcccuacgucagcugcgggccggacaagugcuaccaguucgcccugggccagggcaccacgcucaacaacaugcacuccaacaacaccgugcgcgaccggacccccuaccgcacccugcugaugaacgagcucggggugcccuuccaccugggcacgaagcaggucugcaucgccuggagcuccagcuccugccacgacgggaaggccuggcugcacgugugcaucaccggcgacgacaagaacgcgaccgccagcuucaucuacaacgggcggcucguggacuccgucgugagcugguccaaggagauccugcgcacccaggagagcgagugcgugugcaucaacggcacgugcaccgucgugaugaccgacggcuccgccagcgggaaggccgacaccaagauccuguucaucgaggagggcaagaucgugcacacgagcacccucuccgggagcgaccagcacaucgaggagugcuccugcuacccccgguacccgggcguccgcugcgugugccgggacaacuggaagggcagcaaccgccccaucguggacaucaacaucaaggaccacuccaucgucagcuccuacgugugcagcgggcuggugggcgacaccccgcggaagaacgacuccagcuccagcucccacugccuggaccccaacaacgaggagggcgggcacggggucaagggcugggcguucgacgacggcaacgacguguggauggggcgcaccaucaacgagacgagccggcucggcuacgagaccuucaaggugaucgaggggugguccaaccccaagagcaagcugcagaucaaccgccaggucaucguggaccggggcgaccgcuccggguacagcggcaucuucuccgucgagggcaagagcugcaucaaccggugcuucuacguggagcugauccgcgggcggaaggaggagaccgaggugcucuggaccagcaacuccaucgucguguucugcggcacgagcgggaccuacggcaccggguccuggcccgacggcgccgaccugaaccugaugcccaucuga

SEQ ID NO: 88960 - RNA, 1410 nt, Artificial Sequence; identical to SEQ ID NO: 86170
  derived and/or modified CDS sequence (opt1) from neuraminidase__InfluenzaA__AHL98405

SEQ ID NO: 88961 - RNA, 1410 nt, Artificial Sequence; identical to SEQ ID NO: 86170
  derived and/or modified CDS sequence (opt1) from neuraminidase__InfluenzaA__AHL98417

SEQ ID NO: 88962 - RNA, 1410 nt, Artificial Sequence; identical to SEQ ID NO: 86170
  derived and/or modified CDS sequence (opt1) from neuraminidase__InfluenzaA__AHL98429

SEQ ID NO: 88963 - RNA, 1410 nt, Artificial Sequence
  derived and/or modified CDS sequence (opt1) from neuraminidase__InfluenzaA__AHL98452
augaaccccacccagaagaucaucaccaucggcagcgugugcaugacgaucgggauggccaaccugauccuccagaucggcaacaucaucuccaucuggaucagccacuccauccagcuggggaaccagagccagaucgagaccugcaaccaguccgucaucaccuacgagaacaacaccugggugaaccagacguacgugaacaucagcaacaccaacuucgccgcgggccaguccgucgugagcgugaagcuggccgggaacuccagccucugcccggucuccggcugggccaucuacagcaaggacaacuccgugcgcaucggcagcaagggggacguguucgucauccgggagcccuucaucuccugcagcccccuggagugccgcaccuucuuccugacccagggcgcccuccugaacgacaagcacuccaacgggacgaucaaggaccggagccccuaccgcacccugauguccugcccgaucggcgaggugcccagccccuacaacagccgguucgaguccguggccuggagcgcguccgccugccacgacgggaucaacuggcucaccaucggcaucagcggccccgacuccggggccgucgccgugcugaaguacaacggcaucaucaccgacacgaucaagagcuggaagaacaacauccugcgcacccaggaguccgagugcgcgugcgugaacgggagcugcuucaccaucaugaccgacggcccguccgacggccaggccagcuacaagaucuuccggaucgagaaggggaagaucgucaaguccguggagaugaacgcccccaacuaccacuacgaggagugcagcugcuaccccgacuccagcgagaucacgugcgugugccgcgacaacuggcacggcuccaaccggcccugggucagcuucaaccagaaccucgaguaccagaucggguacaucugcuccggcguguucggggacaacccgcgccccaacgacaagaccggcagcugcggccccguguccagcaacggggccaacggcgucaagggguucagcuucaaguacggcaacgggguguggaucggccggaccaaguccaucagcucccgcaagggcuucgagaugaucugggaccccaacggguggaccggcacggacaacaacuucagcaucaagcaggacaucguggggaucaacgagugguccggcuacagcggguccuucguccagcacccggagcugaccggccuggacugcauccggcccugcuucuggguggagcucauccgcggccggcccaaggagaacaccaucuggaccagcggguccagcaucuccuucugcggcgucaacagcgacacgguggggugguccuggcccgacggcgccgagcugccguucaccaucgacaaguga

SEQ ID NO: 88964 - RNA, 1410 nt, Artificial Sequence
  derived and/or modified CDS sequence (opt1) from neuraminidase__InfluenzaA__AHL98474
augaaccccaaccagaagaucaucaccaucggcagcgugugcaugaccaucgggauggccaaccugauccuccagaucggcaacaucaucuccaucuggaucagccacuccauccagcuggggaaccagagccagaucgagacgugcaaccaguccgucaucaccuacgagaacaacaccugggugaaccagaccuacgugaacaucagcaacacgaacuucgccgcgggccaguccgucgugagcgugaagcuggccgggaacuccagccucugcccggucuccggcugggccaucuacagcaaggacaacuccgugcgcaucggcagcaagggggacguguucgucauccgggagcccuucaucuccugcagcccccuggagugccgcaccuucuuccugacccagggcgcccuccugaacgacaagcacuccaacgggaccaucaaggaccggagccccuaccgcacgcugauguccugcccgaucggcgaggugcccagccccuacaacagccgguucgaguccguggccuggagcgcguccgccugccacgacgggaucaacuggcucaccaucggcaucagcggccccaacuccggggccgucgccgugcugaaguacaacggcaucaucaccgacaccaucaagagcuggcgcaacaacauccugcggacgcaggaguccgagugcgcgugcgugaacgggagcugcuucaccaucaugaccgacggcccguccgacggccaggccagcuacaagaucuuccgcaucgagaaggggaagaucgucaaguccguggagaugaacgcccccaacuaccacuacgaggagugcagcugcuaccccgacuccagcgagaucacgugcgugugccgggacaacuggcacggcuccaaccgccccugggucagcuucaaccagaaccucgaguaccagaucggguacaucugcuccggcguguucggggacaacccgcggcccaacgacaagaccggcagcugcggccccguguccagcaacggggccaacggcgucaagggguucagcuucaaguacggcaacgggguguggaucggccgcaccaaguccaucagcucccggaagggcuucgagaugaucugggaccccaacggguggaccggcaccgacaacaacuucagcaucaagcaggacaucguggggaucaacgagugguccggcuacagcggguccuucguccagcacccggagcugacgggccuggacugcauccgccccugcuucuggguggagcucauccggggccgccccaaggagaacaccaucuggaccagcggguccagcaucuccuucugcggcgucaacagcgacaccguggggugguccuggcccgacggcgccgagcugccguucacgaucgacaaguga

SEQ ID NO: 88965 - RNA, 1410 nt, Artificial Sequence
  derived and/or modified CDS sequence (opt1) from neuraminidase__InfluenzaA__AHL98485
augaaccccaaccagaagaucaucaccaucggcagcgugucccugaccaucagcacgaucugcuucuucaugcagaucgccauccucaucaccaccgucacccugcacuucaagcaguacgaguucaacuccccgcccaacaaccaggugaugcugugcgagcccacgaucaucgagcgcaacaucaccgagaucguguaccucaccaacaccacgaucgagaaggagaucugccccaagccggccgaguaccggaacuggagcaagccccagugcgggaucaccggcuucgcgcccuucuccaaggacaacagcauccgccuguccgccgggggcgacaucugggucacccgggagcccuacgugagcugcgacccggacaagugcuaccaguucgcccuggggcagggcaccacgcucaacaacgugcacuccaacaacaccguccgcgaccggacccccuaccgcacccugcugaugaacgagcucggcgugcccuuccaccuggggacgaagcaggucugcaucgccuggagcuccagcuccugccacgacggcaaggccuggcugcacgugugcaucaccggggacgacaagaacgcgaccgccagcuucaucuacaacggccggcucguggacuccguggucagcugguccaaggagauccugcgcacccaggagagcgagugcgugugcaucaacgggacgugcaccguggucaugaccgacggcuccgccagcggcaaggccgacaccaagauccuguucaucgaggaggggaagaucgugcacacgagcauccucuccggcagcgcgcagcacguggaggagugcuccugcuacccccgguacccggggguccgcugcgugugccgggacaacuggaagggcagcaaccgccccaucguggacaucaacaucaaggaccacuccaucgucagcuccuacgugugcagcggccuggugggggacaccccgcggaagaacgacuccagcuccagcucccacugccuggaccccaacaacgaggagggcgggcacggcgucaaggggugggccuucgacgacggcaacgacguguggaugggccgcaccaucaacgagaccagccggcucggguacgagacguucaaggucaucgagggcugguccaaccccaagagcaagcugcagaucaaccgccaggugaucguggaccgcggggaccgguccggcuacagcgggaucuucuccgucgagggcaagagcugcaucaaccggugcuucuacguggagcugauccgcggccggaaggaggagaccgaggugcucuggaccagcaacuccaucgucguguucugcgggaccagcggcacguacgggaccggcuccuggcccgacggggccgaccugaaccugaugcccaucuga

SEQ ID NO: 88966 - RNA, 1410 nt, Artificial Sequence; identical to SEQ ID NO: 87399
  derived and/or modified CDS sequence (opt1) from neuraminidase__InfluenzaA__AHL98497

SEQ ID NO: 88967 - RNA, 1410 nt, Artificial Sequence; identical to SEQ ID NO: 86170
  derived and/or modified CDS sequence (opt1) from neuraminidase__InfluenzaA__AHL98509

SEQ ID NO: 88968 - RNA, 1410 nt, Artificial Sequence; identical to SEQ ID NO: 86170
  derived and/or modified CDS sequence (opt1) from neuraminidase__InfluenzaA__AHL98521

SEQ ID NO: 88969 - RNA, 1410 nt, Artificial Sequence; identical to SEQ ID NO: 87399
  derived and/or modified CDS sequence (opt1) from neuraminidase__InfluenzaA__AHL98533

SEQ ID NO: 88970 - RNA, 1410 nt, Artificial Sequence; identical to SEQ ID NO: 86170
  derived and/or modified CDS sequence (opt1) from neuraminidase__InfluenzaA__AHL98545

SEQ ID NO: 88971 - RNA, 1410 nt, Artificial Sequence; identical to SEQ ID NO: 86170
  derived and/or modified CDS sequence (opt1) from neuraminidase__InfluenzaA__AHL98557

SEQ ID NO: 88972 - RNA, 1410 nt, Artificial Sequence; identical to SEQ ID NO: 86170
  derived and/or modified CDS sequence (opt1) from neuraminidase__InfluenzaA__AHL98569

SEQ ID NO: 88973 - RNA, 1410 nt, Artificial Sequence
  derived and/or modified CDS sequence (opt1) from neuraminidase__InfluenzaA__AHL98581
augaaccccaaccagaagaucaucaccaucggcagcgugucccugaccaucagcacgaucugcuucuucaugcagaucgccauccucaucaccaccgucacccugcacuucaagcaguacgaguucaacuccccgcccaacaaccaggugaugcugugcgagcccacgaucaucgagcgcaacaucaccgagaucguguaccucaccaacaccacgaucgagaaggagaucugccccaagccggccgaguaccggaacuggagcaagccccagugcgggaucaccggcuucgcgcccuucuccaaggacaacagcauccgccuguccgccgggggcaacaucugggucacccgggagcccuacgugagcugcgacccggacaagugcuaccaguucgcccuggggcagggcaccacgcucaacaacgugcacuccaacaacaccguccgcgaccggacccccuaccgcacccugcugaugaacgagcucggcgugcccuuccaccuggggacgaagcaggucugcaucgccuggagcuccagcuccugccacgacggcaaggccuggcugcacgugugcaucaccggggacgacaagaacgcgaccgccagcuucaucuacaacggccggcucguggacuccguggucagcugguccaaggagauccugcgcacccaggagagcgagugcgugugcaucaacgggacgugcaccguggucaugaccgacggcuccgccagcggcaaggccgacaccaagauccuguucaucgaggaggggaagaucgugcacacgagcacccucuccggcagcgcgcagcacguggaggagugcuccugcuacccccgguacccggggguccgcugcgugugccgggacaacuggaagggcagcaaccgccccaucguggacaucaacaucaaggaccacuccaucgucagcuccuacgugugcagcggccuggugggggacaccccgcggaagaacgacuccagcuccagcucccacugccuggaccccaacaacgaggagggcgggcacggcgucaaggggugggccuucgacgacggcaacgacguguggaugggccgcaccaucaacgagacgagccggcucggguacgagaccuucaaggucaucgagggcugguccaaccccaagagcaagcugcagaucaaccgccaggugaucguggaccgcggggaccgguccggcuacagcgggaucuucuccgucgagggcaagagcugcaucaaccggugcuucuacguggagcugauccgcggccggaaggaggagaccgaggugcucuggaccagcaacuccaucgucguguucugcgggacgagcggcaccuacgggaccggcuccuggcccgacggggccgaccugaaccugaugcccaucuga

SEQ ID NO: 88974 - RNA, 1410 nt, Artificial Sequence; identical to SEQ ID NO: 86170
  derived and/or modified CDS sequence (opt1) from neuraminidase__InfluenzaA__AHL98593

SEQ ID NO: 88975 - RNA, 1410 nt, Artificial Sequence; identical to SEQ ID NO: 87907
  derived and/or modified CDS sequence (opt1) from neuraminidase__InfluenzaA__AHL98605

SEQ ID NO: 88976 - RNA, 1410 nt, Artificial Sequence; identical to SEQ ID NO: 87399
  derived and/or modified CDS sequence (opt1) from neuraminidase__InfluenzaA__AHL98617

SEQ ID NO: 88977 - RNA, 1410 nt, Artificial Sequence; identical to SEQ ID NO: 87399
  derived and/or modified CDS sequence (opt1) from neuraminidase__InfluenzaA__AHL98629

SEQ ID NO: 88978 - RNA, 1410 nt, Artificial Sequence; identical to SEQ ID NO: 86170
  derived and/or modified CDS sequence (opt1) from neuraminidase__InfluenzaA__AHL98641

SEQ ID NO: 88979 - RNA, 1410 nt, Artificial Sequence; identical to SEQ ID NO: 88748
  derived and/or modified CDS sequence (opt1) from neuraminidase__InfluenzaA__AHL98653

SEQ ID NO: 88980 - RNA, 1410 nt, Artificial Sequence; identical to SEQ ID NO: 86170
  derived and/or modified CDS sequence (opt1) from neuraminidase__InfluenzaA__AHL98665

SEQ ID NO: 88981 - RNA, 1410 nt, Artificial Sequence
  derived and/or modified CDS sequence (opt1) from neuraminidase__InfluenzaA__AHL98677
augaaccccaaccagaagaucaucaccaucggcagcgugucccugaccaucagcacgaucugcuucuucaugcagaucgccauccucaucaccaccgucacccugcacuucaagcaguacgaguucaacuccccgcccaacaaccaggugaugcugugcgagcccacgaucaucgagcgcaacaucaccgagaucguguaccucaccaacaccacgaucgagaaggagaucugccccaagccggccgaguaccggaacuggagcaagccccagugcgggaucaccggcuucgcgcccuucuccaaggacaacagcauccgccuguccgccgggggcgacaucugggucacccgggagcccuacgugagcugcgacccggacaagugcuaccaguucgcccuggggcagggcaccacgcucaacaacgugcacuccaacaacaccguccgcgaccggacgccccaccgcacccugcugaugaacgagcucggcgugcccuuccaccuggggaccaagcaggucugcaucgccuggagcuccagcuccugccacgacggcaaggccuggcugcacgugugcaucaccggggacgacaagaacgcgaccgccagcuucaucuacaacggccggcucguggacuccguggucagcugguccaaggagauccugcgcacccaggagagcgagugcgugugcaucaacgggacgugcaccguggucaugaccgacggcuccgccagcggcaaggccgacaccaagauccuguucaucgaggaggggaagaucgugcacacgagcacccucuccggcaacgcgcagcacguggaggagugcagcugcuacccccgguacccggggguccgcugcgugugccgggacaacuggaagggcuccaaccgccccaucguggacaucaacaucaaggaccacagcaucgucuccagcuacgugugcuccggccuggugggggacacgccccggaagaacgacagcuccagcuccagccacugccuggaccccaacaacgaggagggcgggcacggcgucaaggggugggccuucgacgacggcaacgacguguggaugggccgcaccaucaacgagaccucccggcucggguacgagaccuucaaggucaucgagggcuggagcaacccgaaguccaagcugcagaucaaccgccaggugaucguggaccgcggggaccggagcggcuacuccgggaucuucagcgucgagggcaaguccugcaucaaccggugcuucuacguggagcugauccgcggccggaaggaggagaccgaggugcucuggaccagcaacagcaucgucguguucugcgggacguccggcaccuacgggaccggcagcuggcccgacggggccgaccugaaccugaugcccaucuga

SEQ ID NO: 88982 - RNA, 1410 nt, Artificial Sequence; identical to SEQ ID NO: 87918
  derived and/or modified CDS sequence (opt1) from neuraminidase__InfluenzaA__AHL98689

SEQ ID NO: 88983 - RNA, 1410 nt, Artificial Sequence
  derived and/or modified CDS sequence (opt1) from neuraminidase__InfluenzaA__AHL98702
augaaccccaaccagaagaucaucaccaucggcagcgugucccugaccaucagcacgaucugcuucuucaugcagaucgccauccucaucaccaccgucacccugcacuucaagcaguacgaguucgacuccccgcccaacaaccaggugaugcugugcgagcccacgaucaucgagcgcaacaucaccgagaucguguaccucaccaacaccacgaucgagaaggagaucugccccaagccggccgaguaccggaacuggagcaagccccagugcgggaucaccggcuucgcgcccuucuccaaggacaacagcauccgccuguccgccgggggcgacaucugggucacccgggagcccuacgugagcugcgacccggacaagugcuaccaguucgcccuggggcagggcaccacgcucaacaacggccacuccaacaacaccgugcgcgaccggacccccuaccgcacccugcugaugaacgagcucgggguccccuuccaccugggcacgaagcaggucugcaucgccuggagcuccagcuccugccacgacgggaaggccuggcugcacgugugcaucaccggcgacgacaagaacgcgaccgccagcuucaucuacaacgggcggcucguggacuccguggugagcugguccaaggagauccugcgcacccaggagagcgagugcgucugcaucaacggcacgugcaccguggugaugaccgacggcuccgccagcgggaaggccgacaccaagauccuguucaucgaggagggcaagaucguccacacgagcacccucuccgggagcgcgcagcacguggaggagugcuccugcuacccccgguacccgggcgugcgcugcgucugccgggacaacuggaagggcagcaaccgccccaucguggacaucaacaucaaggaccacuccaucgugagcuccuacgucugcagcgggcuggugggcgacaccccgcggaagaacgacuccagcuccagcucccacugccuggaccccaacaacgaggagggcgggcacggggugaagggcugggccuucgacgacggcaacgacgucuggauggggcgcaccaucaacgagacgagccggcucggcuacgagaccuucaaggugaucgaggggugguccaaccccaagagcaagcugcagaucaaccgccaggucaucguggaccggggcgaccgcuccggguacagcggcaucuucuccguggagggcaagagcugcaucaaccggugcuucuacgucgagcugauccgcgggcggaaggaggagaccgaggugcucuggaccagcaacuccaucguggucuucugcggcacgagcgggaccuacggcaccggguccuggcccgacggcgccgaccugaaccugaugcccaucuga

SEQ ID NO: 88984 - RNA, 1410 nt, Artificial Sequence; identical to SEQ ID NO: 87413
  derived and/or modified CDS sequence (opt1) from neuraminidase__InfluenzaA__AHL98714

SEQ ID NO: 88985 - RNA, 1410 nt, Artificial Sequence
  derived and/or modified CDS sequence (opt1) from neuraminidase__InfluenzaA__AHL98725
augaaccccaaccagaagaucaucaccaucggcagcgugucccugaccaucagcacgaucugcuucuucaugcagaucgccauccucaucaccaccgucacccugcacuucaagcaguacgaguucaacuccccgcccaacaaccaggugaugcugugcgagcccacgaucaucgagcgcaacaucaccgagaucguguaccucaccaacaccacgaucgagaaggagaucugccccaagccggccgaguaccggaacuggagcaagccccagugcgggaucaccggcuucgcgcccuucuccaaggacaacagcauccgccuguccgccgggggcgggaucugggucacccgggagcccuacgugagcugcgacccggacaagugcuaccaguucgcccugggccagggcaccacgcucaacaacgugcacuccaacaacaccguccgcgaccggacccccuaccgcacccugcugaugaacgagcucggggugcccuuccaccugggcacgaagcaggucugcaucgccuggagcuccagcuccugccacgacgggaaggccuggcugcacgugugcaucaccggcgacgacaagaacgcgaccgccagcuucaucuacaacgggcggcucguggacuccguggucagcugguccaaggagauccugcgcacccaggagagcgagugcgugugcaucaacggcacgugcaccguggucaugaccgacggcaacgccuccgggaaggccgacaccaagauccuguucaucgaggagggcaagaucgugcacacgagcacccucagcggguccgcgcagcacguggaggagugcagcugcuacccccgguacccgggcguccgcugcgugugccgggacaacuggaagggcuccaaccgccccaucguggacaucaacaucaaggaccacagcaucgucuccagcuacgugugcuccgggcuggugggcgacacgccccggaagaacgacagcuccagcuccagccacugccuggaccccaacaacgaggagggcgggcacggggucaagggcugggccuucgacgacgagaacgacguguggaugggccgcaccaucaacgagaccucccggcucggguacgagaccuucaaggucaucgagggcuggagcaacccgaaguccaagcugcagaucaaccgccaggugaucguggaccgggggaaccgcagcggcuacuccgggaucuucagcgucgagggcaaguccugcaucaaccggugcuucuacguggagcugauccgcggccggaaggaggagaccgaggugcucuggaccagcaacagcaucgucguguucugcgggacguccggcaccuacgggaccggcagcuggcccgacggggccgaccugaaccugaugcccaucuga

SEQ ID NO: 88986 - RNA, 1410 nt, Artificial Sequence; identical to SEQ ID NO: 87907
  derived and/or modified CDS sequence (opt1) from neuraminidase__InfluenzaA__AHL98737

SEQ ID NO: 88987 - RNA, 1410 nt, Artificial Sequence; identical to SEQ ID NO: 87895
  derived and/or modified CDS sequence (opt1) from neuraminidase__InfluenzaA__AHL98749

SEQ ID NO: 88988 - RNA, 1410 nt, Artificial Sequence; identical to SEQ ID NO: 87907
  derived and/or modified CDS sequence (opt1) from neuraminidase__InfluenzaA__AHL98761

SEQ ID NO: 88989 - RNA, 1410 nt, Artificial Sequence
  derived and/or modified CDS sequence (opt1) from neuraminidase__InfluenzaA__AHL98773
augaaccccaaccagaagaucaucaccaucggcagcgugucccugaccaucagcacgaucugcuucuucaugcagaucgccauccucaucaccaccgucacccugcacuucaagcaguacgaguucaacuccccgcccaacaaccaggugaugcugugcgagcccacgaucaucgagcgcaacaucaccgagaucguguaccucaccaacaccacgaucgagaaggagaucugccccaagccggccgaguaccggaacuggagcaagccccagugcgggaucaccggcuucgcgcccuucuccaaggacaacagcauccgccuguccgccgggggcaacaucugggucacccgggagcccuacgugagcugcgacccggacaagugcuaccaguucgcccuggggcagggcaccacgcucaacaacgugcacuccaacaacaccgcccgcgaccggacccccuaccgcacccugcugaugaacgagcucggcguccccuuccaccuggggacgaagcaggucugcaucgccuggagcuccagcuccugccacgacggcaaggcguggcugcacgugugcaucaccggggacgacaagaacgccaccgccagcuucaucuacaacggccggcucguggacuccguggugagcugguccaaggagauccugcgcacccaggagagcgagugcgucugcaucaacgggacgugcaccguggugaugaccgacggcuccgccagcggcaaggcggacaccaagauccuguucaucgaggaggggaagaucguccacacgagcacccucuccggcagcgcccagcacguggaggagugcuccugcuacccccgguacccgggggugcgcugcgucugccgggacaacuggaagggcagcaaccgccccaucguggacaucaacaucaaggaccacuccaucgugagcuccuacgucugcagcggccuggugggggacaccccgcggaagaacgacuccagcuccagcucccacugccuggaccccaacaacgaggagggcgggcacggcgugaaggggugggccuucgacgacggcaacgacgucuggaugggccgcaccaucaacgagacgagccggcucggguacgagaccuucaaggugaucgagggcugguccaaccccaagagcaagcugcagaucaaccgccaggucaucguggaccgcggggaccgguccggcuacagcgggaucuucuccguggagggcaagagcugcaucaaccggugcuucuacgucgagcugauccgcggccggaaggaggagaccgaggugcucuggaccagcaacuccaucguggucuucugcgggacgagcggcaccuacgggaccggcuccuggcccgacggggccgaccugaaccugaugcccaucuga

SEQ ID NO: 88990 - RNA, 1410 nt, Artificial Sequence; identical to SEQ ID NO: 87927
  derived and/or modified CDS sequence (opt1) from neuraminidase__InfluenzaA__AHL98785

SEQ ID NO: 88991 - RNA, 1410 nt, Artificial Sequence
  derived and/or modified CDS sequence (opt1) from neuraminidase__InfluenzaA__AHL98797
augaaccccaaccagaagaucaucaccaucggcagcgugucccugaccaucagcacgaucugcuucuucacccagaucgccauccucaucaccaccgucacgcugcacuucaagcaguacgaguucaacuccccgcccaacaaccaggugaugcugugcgagcccaccaucaucgagcgcaacaucaccgagaucguguaccucaccaacacgaccaucgagaaggagaucugccccaagccggccgaguaccggaacuggagcaagccccagugcgggaucaccggcuucgcgcccuucuccaaggacaacagcauccgccuguccgccgggggcgacaucugggucacccgggagcccuacgugagcugcgacccggacaagugcuaccaguucgcccuggggcagggcacgacccucaacaacgugcacuccaacaacaccguccgcgaccggacccccuaccgcacgcugcugaugaacgagcucggcgugcccuuccaccuggggaccaagcaggucugcaucgccuggagcuccagcuccugccacgacggcaaggccuggcugcacgugugcaucaccggggacgacaagaacgcgaccgccagcuucaucuacaacggccggcucguggacuccguggucagcugguccaaggagauccugcgcacgcaggagagcgagugcgugugcaucaacgggaccugcaccguggucaugaccgacggcuccgccagcggcaaggccgacacgaagauccuguucaucgaggaggggaagaucgugcacaccagcacccucuccggcagcgcgcagcacguggaggagugcuccugcuacccccgguacccggggguccgcugcgugugccgggacaacuggaagggcagcaaccgccccaucguggacaucaacaucaaggaccacuccaucgucagcuccuacgugugcagcggccuggugggggacacgccccggaagaacgacuccagcuccagcucccacugccuggaccccaacaacgaggagggcgggcacggcgucaaggggugggccuucgacgacggcaacgacguguggaugggccgcaccaucaacgagaccagccgguccggguacgagaccuucaaggucaucgagggcuggagcaacccgaaguccaagcuccagaucaaccgccaggugaucguggaccgcggggaccggagcggcuacuccgggaucuucagcgucgagggcaagagcugcaucaaccggugcuucuacguggagcugauccgcggccggaaggaggagaccgaggugcuguggacguccaacagcaucgucguguucugcgggaccuccggcaccuacgggaccggcagcuggcccgacggggccgaccucaaccugaugcccaucuga

SEQ ID NO: 88992 - RNA, 1410 nt, Artificial Sequence; identical to SEQ ID NO: 86170
  derived and/or modified CDS sequence (opt1) from neuraminidase__InfluenzaA__AHL98809

SEQ ID NO: 88993 - RNA, 1410 nt, Artificial Sequence
  derived and/or modified CDS sequence (opt1) from neuraminidase__InfluenzaA__AHL98821
augaaccccaaccagaagaucaucaccaucggcagcgugucccugaccaucagcacgaucugcuucuucaugcagaucgccauccucaucaccaccgucacccugcacuucaagcaguacgaguucaacuccccgcccaacaaccaggugaugcugugcgagcccacgaucaucgagcgcaacaucaccgagaucguguaccucaccaacaccacgaucgagaaggagaucugccccaagccggccgaguaccggaacuggagcaagccccagugcgggaucaccggcuucgcgcccuucuccaaggacaacagcauccgccuguccgccgggggcgacaucugggucacccgggagcccuacgugagcugcgacccggaccgcugcuaccaguucgcccuggggcagggcaccacgcucaacaacaugcacuccaacaacaccgugcgggaccgcacccccuaccggacccugcugaugaacgagcucggcguccccuuccaccuggggacgaagcaggucugcaucgccuggagcuccagcuccugccacgacggcaaggccuggcugcacgugugcaucaccggggacgacaagaacgcgaccgccagcuucaucuacaacggccgccucguggacuccguggugagcugguccaaggagauccugcggacccaggagagcgagugcgucugcaucaacgggacgugcaccguggugaugaccgacggcuccgccagcggcaaggccgacaccaagauccuguucaucgaggaggggaagaucguccacacgagcacccucuccggcagcgcgcagcacguggaggagugcuccugcuacccccgcuacccgggggugcggugcgucugccgcgacaacuggaagggcagcaaccggcccaucguggacaucaacaucaaggaccacuccaucgugagcuccuacgucugcagcggccuggugggggacaccccgcgcaagaacgacuccagcuccagcucccacugccuggaccccaacaacgaggagggcgggcacggcgugaaggggugggccuucgacgacggcaacgacgucuggaugggccggaccaucaacgagacgagccgccucggguacgagaccuucaaggugaucgagggcugguccaaccccaagagcaagcugcagaucaaccggcaggucaucguggaccgcggggaccgguccggcuacagcgggaucuucuccguggagggcaagagcugcaucaaccgcugcuucuacgucgagcugauccggggccgcaaggaggagaccgaggugcucuggaccagcaacuccaucguggucuucugcgggacgagcggcaccuacgggaccggcuccuggcccgacggggccgaccugaaccugaugcccaucuga

SEQ ID NO: 88994 - RNA, 1410 nt, Artificial Sequence; identical to SEQ ID NO: 86170
  derived and/or modified CDS sequence (opt1) from neuraminidase__InfluenzaA__AHL98833

SEQ ID NO: 88995 - RNA, 1410 nt, Artificial Sequence
  derived and/or modified CDS sequence (opt1) from neuraminidase__InfluenzaA__AHL98845
augaaccccaaccagaagaucaucaccaucggcagcgugucccugaccaucagcacgaucugcuucuucaugcagaucgccauccucaucaccaccgucacccugcacuucaagcaguacgaguucaacuccccgcccaacaaccaggugaugcugugcgagcccacgaucaucgagcgcaacaucaccgagaucguguaccucaucaacaccaccaucgagaaggagaucugccccaagccggccgaguaccggaacuggagcaagccccagugcgggaucacgggcuucgcgcccuucuccaaggacaacagcauccgccuguccgccgggggcgacaucugggucacccgggagcccuacgugagcugcgggccggacaagugcuaccaguucgcccugggccagggcaccacccucaacaacaugcacuccaacaacacggugcgcgaccggacccccuaccgcacccugcugaugaacgagcucgggguccccuuccaccugggcaccaagcaggucugcaucgccuggagcuccagcuccugccacgacgggaaggccuggcugcacgugugcaucacgggcgacgacaagaacgcgaccgccagcuucaucuacaacgggcggcucguggacuccguggugagcugguccaaggagauccugcgcacccaggagagcgagugcgucugcaucaacgggaccugcacgguggugaugaccgacggcuccgccagcgggaaggccgacaccaagauccuguucaucgaggagggcaagaucguccacaccagcacgcucuccgggagcgcgcagcacguggaggagugcuccugcuacccccgguacccgggcgugcgcugcgucugccgggacaacuggaagggcagcaaccgccccaucguggacaucaacaucaaggaccacuccaucgugagcuccuacgucugcagcgggcuggugggcgacaccccgcggaagaacgacuccagcuccagcucccacugccuggaccccaacaacgaggagggcggccacggggugaagggcugggccuucgacgacggcaacgacgucuggauggggcgcaccaucaacgagaccagccggcucggcuacgagacguucaaggugaucgaggggugguccaaccccaagagcaagcugcagaucaaccgccaggucaucguggaccggggcgaccgcuccggguacagcggcaucuucuccguggagggcaagagcugcaucaaccggugcuucuacgucgagcugauccgcgggcggaaggaggagaccgaggugcucuggaccagcaacuccaucguggucuucugcggcaccagcgggacguacggcaccggguccuggcccgacggcgccgaccugaaccugaugcccaucuga

SEQ ID NO: 88996 - RNA, 1410 nt, Artificial Sequence; identical to SEQ ID NO: 87907
  derived and/or modified CDS sequence (opt1) from neuraminidase__InfluenzaA__AHL98857

SEQ ID NO: 88997 - RNA, 1410 nt, Artificial Sequence; identical to SEQ ID NO: 87907
  derived and/or modified CDS sequence (opt1) from neuraminidase__InfluenzaA__AHL98869

SEQ ID NO: 88998 - RNA, 1410 nt, Artificial Sequence; identical to SEQ ID NO: 86170
  derived and/or modified CDS sequence (opt1) from neuraminidase__InfluenzaA__AHL98881

SEQ ID NO: 88999 - RNA, 1410 nt, Artificial Sequence
  derived and/or modified CDS sequence (opt1) from neuraminidase__InfluenzaA__AHL98893
augaaccccaaccagaagaucaucaccaucggcagcgugucccugaccaucagcacgaucugcuucuucaugcagaucgccauccucaucaccaccgucacccugcacuucaagcaguacgaguucgacuccccgcccaacaaccaggugaugcugugcgagcccacgaucaucgagcgcaacaucaccgagaucguguaccucaccaacaccacgaucgagaaggagaucugccccaagccggccgaguaccggaacuggagcaagccccagugcgggaucaccggcuucgcgcccuucuccaaggacaacagcauccgccuguccgccgggggcgacaucugggucacccgggagcccuacgugagcugcgacccggacaagugcuaccaguucgcccuggggcagggcaccacgcucaacaacgugcacuccaacaacaccguccgcgaccggacccccuaccgcacccugcugaugaacgagcucggcgugcccuuccaccuggggacgaagcaggucugcaucgccuggagcuccagcuccugccacgacggcaaggccuggcugcacgugugcaucaccggggacgacaagaacgcgaccgccagcuucaucuacaacggccggcucguggacuccguggucagcugguccaaggagauccugcgcacccaggagagcgagugcgugugcaucaacgggacgugcaccguggucaugaccgacggcuccgccagcggcaaggccgacaccaagauccuguucaucgaggaggggaagaucgugcacacgagcacccucuccggcagcgcgcagcacguggaggagugcuccugcuacccccgguacccggggguccgcugcgugugccgggacaacuggaagggcagcaaccgccccaucguggacaucaacaucaaggaccacuccaucgucagcuccuacgugugcagcggccuggugggggacaccccgcggaagaacgacuccagcuccagcucccacugccuggaccccaacaacgaggagggcgggcacggcgucaaggggugggccuucgacgacggcaacgacguguggaugggccgcaccaucaacgagacgagccggcucggguacgagaccuucaaggucuucgagggcugguccaaccccaagagcaagcugcagaucaaccgccaggugaucguggaccgcggggaccgguccggcuacagcgggaucuucuccgucgagggcaagagcugcaucaaccggugcuucuacguggagcugauccgcggccggaaggaggagaccgaggugcucuggaccagcaacuccaucgucguguucugcgggacgagcggcaccuacgggaccggcuccuggcccgacggggccgaccugaaccugaugcccaucuga

SEQ ID NO: 89000 - RNA, 1410 nt, Artificial Sequence; identical to SEQ ID NO: 87895
  derived and/or modified CDS sequence (opt1) from neuraminidase__InfluenzaA__AHL98905

SEQ ID NO: 89001 - RNA, 1410 nt, Artificial Sequence; identical to SEQ ID NO: 86170
  derived and/or modified CDS sequence (opt1) from neuraminidase__InfluenzaA__AHL98916

SEQ ID NO: 89002 - RNA, 1410 nt, Artificial Sequence; identical to SEQ ID NO: 87918
  derived and/or modified CDS sequence (opt1) from neuraminidase__InfluenzaA__AHL98928

SEQ ID NO: 89003 - RNA, 1410 nt, Artificial Sequence; identical to SEQ ID NO: 86170
  derived and/or modified CDS sequence (opt1) from neuraminidase__InfluenzaA__AHL98940

SEQ ID NO: 89004 - RNA, 1410 nt, Artificial Sequence; identical to SEQ ID NO: 86170
  derived and/or modified CDS sequence (opt1) from neuraminidase__InfluenzaA__AHL98952

SEQ ID NO: 89005 - RNA, 1410 nt, Artificial Sequence; identical to SEQ ID NO: 87895
  derived and/or modified CDS sequence (opt1) from neuraminidase__InfluenzaA__AHL98964

SEQ ID NO: 89006 - RNA, 1410 nt, Artificial Sequence
  derived and/or modified CDS sequence (opt1) from neuraminidase__InfluenzaA__AHL98976
augaaccccaaccagaagaucaucaccaucggcagcgugucccugaccaucagcacgaucugcuucuucaugcagaucgccauccucaucaccaccgucacccugcacuucaagcaguacgaguucaacuccccgcccaacaaccaggugaugcugugcgagcccacgaucguggagcgcaacaucaccgagaucgucuaccucaccaacaccacgaucgagaaggagaucugccccaagccggccgaguaccggaacuggagcaagccccagugcgggaucaccggcuucgcgcccuucuccaaggacaacagcauccgccuguccgccgggggcgacaucugggugacccgggagcccuacgugagcugcgacccggacaagugcuaccaguucgcccuggggcagggcaccacgcucaacaacguccacuccaacaacaccgugcgcgaccggacccccuaccgcacccugcugaugaacgagcucggcgugcccuuccaccuggggacgaagcaggucugcaucgccuggagcuccagcuccugccacgacggcaaggccuggcugcacgugugcaucaccggggacgacaagaacgcgaccgccagcuucaucuacaacggccggcucguggacuccgucgccagcugguccaaggaggugcugcgcacccaggagagcgagugcgugugcaucaacgggacgugcgccgucgugaugaccgacggcuccgcgagcggcaaggccgacaccaagauccuguucaucgaggaggggaagaucgugcacaccagcacgcucuccggcagcgcccagcacgucgaggagugcuccugcuacccccgguacccgggggugcgcugcgugugccgggacaacuggaagggcagcaaccgccccaucgucgacaucaacaucaaggaccacuccaucgugagcuccuacgugugcagcggccuggucggggacaccccgcggaagaacgacuccagcuccagcucccacugccuggaccccaacaacgaggagggcgggcacggcgugaaggggugggccuucgacgacggcaacgacgucuggaugggccgcaccaucaacgagaccagccggcucggguacgagacguucaaggugaucgagggcugguccaaccccaagagcaagcugcagaucaaccgccaggugaucgucgaccgcggggaccgguccggcuacagcgggaucuucuccguggagggcaagagcugcaucaaccggugcuucuacguggagcugauccgcggccggaaggaggagaccgagguccucuggaccagcaacuccaucgugguguucugcgggaccagcggcacguacgggaccggcuccuggcccgacggggccgaccugaaccugaugcccaucuga

SEQ ID NO: 89007 - RNA, 1410 nt, Artificial Sequence; identical to SEQ ID NO: 87895
  derived and/or modified CDS sequence (opt1) from neuraminidase__InfluenzaA__AHL98988

SEQ ID NO: 89008 - RNA, 1410 nt, Artificial Sequence; identical to SEQ ID NO: 86170
  derived and/or modified CDS sequence (opt1) from neuraminidase__InfluenzaA__AHL99000

SEQ ID NO: 89009 - RNA, 1410 nt, Artificial Sequence; identical to SEQ ID NO: 86170
  derived and/or modified CDS sequence (opt1) from neuraminidase__InfluenzaA__AHL99012

SEQ ID NO: 89010 - RNA, 1410 nt, Artificial Sequence
  derived and/or modified CDS sequence (opt1) from neuraminidase__InfluenzaA__AHL99024
augaaccccaaccagaagaucaucaccaucggcagcgugucccugaccaucagcacgaucugcuucuucaugcagaucgccauccucaucaccaccgucacccugcacuucaagcaguacgaguucaacuccccgcccaacaaccaggugaugcugugcgagcccacgaucaucgagcgcaacaucaccgagaucguguaccucaccaacaccacgaucgagaaggagaucugccccaagccggccgaguaccggaacuggagcaagccccagugcgggaucaccggcuucgcgcccuucuccaaggacaacagcauccgccuguccgccgggggcgacaucugggucacccgggagcccuacgugagcugcgacccggacaagugcuaccaguucgcccuggggcagggcaccacgcucaacaacgugcacuccaacaacaccguccgcgaccggacccccuaccgcacccugcugaugaacgagcucggcgugcccuuccaccuggggacgaagcaggucugcaucgccuggagcuccagcuccugccacgacggcaaggccuggcugcacgugugcaucaccggggacgacaagaacgcgaccgccagcuucaucuacaacggccggcucguggacuccguggucagcugguccaaggagauccugcgcacccaggagagcgagugcgugugcaucaacgggacgugcaccguggucaugaccgacggcuccgccagcggcaaggccgacaccaagauccuguucaucgaggaggggaagaucgugcacacgagcacccucuccggcagcgcgcagcacguggaggagugcuccugcuacccccgguacccggggguccgcugcaucugccgggacaacuggaagggcagcaaccgccccaucguggacaucaacaucaaggaccacuccaucgugagcuccuacgucugcagcggccuggugggggacaccccgcggaagaacgacuccagcuccagcucccacugccuggaccccaacaacgaggagggcgggcacggcgugaaggggugggccuucgacgacggcaacgacgucuggaugggccgcaccaucaacgagacgagccggcucggguacgagaccuucaaggugaucgagggcugguccaaccccaagagcaagcugcagaucaaccgccaggucaucguggaccgcggggaccgguccggcuacagcgggaucuucuccguggagggcaagagcugcaucaaccggugcuucuacgucgagcugauccgcggccggaaggaggagaccgaggugcucuggaccagcaacuccaucguggucuucugcgggacgagcggcaccuacgggaccggcuccuggcccgacggggccgaccugaaccugaugcccaucuga

SEQ ID NO: 89011 - RNA, 1410 nt, Artificial Sequence; identical to SEQ ID NO: 87388
  derived and/or modified CDS sequence (opt1) from neuraminidase__InfluenzaA__AHL99036

SEQ ID NO: 89012 - RNA, 1410 nt, Artificial Sequence; identical to SEQ ID NO: 88810
  derived and/or modified CDS sequence (opt1) from neuraminidase__InfluenzaA__AHL99048

SEQ ID NO: 89013 - RNA, 1410 nt, Artificial Sequence; identical to SEQ ID NO: 86170
  derived and/or modified CDS sequence (opt1) from neuraminidase__InfluenzaA__AHL99060

SEQ ID NO: 89014 - RNA, 1410 nt, Artificial Sequence
  derived and/or modified CDS sequence (opt1) from neuraminidase__InfluenzaA__AHL99072
augaaccccaaccagaagaucaucaccaucggcagcgugucccugaccaucagcacgaucugcuucuucaugcagaucgccauccucaucaccaccgucacccugcacuucaagcaguacgaguucaacuccccgcccaacaaccaggugaugcugugcgagcccacgaucaucgagcgcaacaucaccgagaucguguaccucaccaacaccacgaucgagaaggagaucugccccaagccggccgaguaccggaacuggagcaagccccagugcgggaucaccggcuucgcgcccuucuccaaggacaacagcauccgccuguccgccgggggcgacaucugggucacccgggagcccuacgugagcugcgacccggacaagugcuaccaguucgcccuggggcagggcaccacgcucaacaacgugcacuccaacaacaccguccgcgaccggacccccuaccgcacccugcugaugaacgagcucggcgugcccuuccaccuggggacgaagcaggucugcaucgccuggagcuccagcuccugccacgacggcaaggccuggcugcacgugugcaucaccggggacgacaagaacgcgaccgccagcuucaucuacaacggccggcucguggacuccguggucagcugguccaaggagauccugcgcacccaggagagcgagugcgugugcaucaacgggacgugcaccguggucaugaccgacggcuccgccagcggcaaggccgacaccaagauccuguucaucgaggaggggaagaucgugcacacgagcacccucuccggcagcgcgcagcacguggaggagugcuccugcuacccccgguacccggggguccgcugcgugugccgggacaacuggaagggcagcaaccgccccaucguggacaucaacaugaaggaccacuccaucgucagcuccuacgugugcagcggccuggugggggacaccccgcggaagaacgacuccagcuccagcucccacugccuggaccccaacaacgaggagggcgggcacggcgucaaggggugggccuucgacgacggcaacgacguguggaugggccgcaccaucaacgagacgagccggcucggguacgagaccuucaaggucaucgagggcugguccaaccccaagagcaagcugcagaucaaccgccaggugaucguggaccgcggggaccgguccggcuacagcgggaucuucuccgucgagggcaagagcugcaucaaccggugcuucuacguggagcugauccgcggccggaaggaggagaccgaggugcucuggaccagcaacuccaucgucguguucugcgggacgagcggcaccuacgggaccggcuccuggcccgacggggccgaccugaaccugaugcccaucuga

SEQ ID NO: 89015 - RNA, 1410 nt, Artificial Sequence
  derived and/or modified CDS sequence (opt1) from neuraminidase__InfluenzaA__AHL99084
augaaccccaaccagaagaucaucaccaucggcagcgugucccugaccaucagcacgaucugcuucuucaugcagaucgccauccucaucaccaccgucacccugcacuucaagcaguacgaguucaacuccccgcccaacaaccaggugaugcugugcgagcccacgaucaucgagcgcaacaucaccgagaucguguaccucaccaacaccacgaucgagaaggagaucugccccaagccggccgaguaccggaacuggagcaagccccagugcgggaucaccggcuucgcgcccuucuccaaggacaacagcauccgccuguccgccgggggcgacaucugggucacccgggagcccuacgugagcugcgacccggaccgcugcuaccaguucgcccuggggcagggcaccacgcucaacaacaugcacuccaacaacaccgugcgggaccgcacccccuaccggacccugcugaugaacgagcucggcguccccuuccaccuggggacgaagcaggucugcaucgccuggagcuccagcuccugccacgacggcaaggccuggcugcacgugugcaucaccggggacgacaagaacgcgaccgccagcuucaucuacaacggccgccucguggacuccguggugagcugguccaaggagauccugcggacccaggagagcgagugcgucugcaucaacgggacgugcaccguggugaugaccgacggcuccgccagcggcaaggccgacaccaagauccuguucaucgaggaggggaagaucguccacacgagcacccucuccggcagcgcgcagcacguggaggagugcuccugcuacccccgcuacccgggggugcggugcgucugccgcgacaacuggaagggcagcaaccggcccaucguggacaucaacaucaaggaccacaacaucguguccagcuacgucugcuccggccuggugggggacacgccccgcaagaacgacagcuccagcuccagccacugccuggaccccaacaacgaggagggcgggcacggcgugaaggggugggccuucgacgacggcaacgacgucuggaugggccggaccaucaacgagaccucccgccucggguacgagaccuucaaggugaucgagggcuggagcaacccgaaguccaagcugcagaucaaccggcaggucaucguggaccgcggggaccggagcggcuacuccgggaucuucagcguggagggcaaguccugcaucaaccgcugcuucuacgucgagcugauccggggccgcaaggaggagaccgaggugcucuggaccagcaacagcaucguggucuucugcgggacguccggcaccuacgggaccggcagcuggcccgacggggccgaccugaaccugaugcccaucuga

SEQ ID NO: 89016 - RNA, 1410 nt, Artificial Sequence; identical to SEQ ID NO: 86170
  derived and/or modified CDS sequence (opt1) from neuraminidase__InfluenzaA__AHL99096

SEQ ID NO: 89017 - RNA, 1410 nt, Artificial Sequence; identical to SEQ ID NO: 86170
  derived and/or modified CDS sequence (opt1) from neuraminidase__InfluenzaA__AHL99108

SEQ ID NO: 89018 - RNA, 1410 nt, Artificial Sequence; identical to SEQ ID NO: 86170
  derived and/or modified CDS sequence (opt1) from neuraminidase__InfluenzaA__AHL99120

SEQ ID NO: 89019 - RNA, 1410 nt, Artificial Sequence; identical to SEQ ID NO: 86170
  derived and/or modified CDS sequence (opt1) from neuraminidase__InfluenzaA__AHL99132

SEQ ID NO: 89020 - RNA, 1410 nt, Artificial Sequence
  derived and/or modified CDS sequence (opt1) from neuraminidase__InfluenzaA__AHL99144
augaaccccaaccagaagaucaucaccaucggcagcgugucccugaccaucagcacgaucugcuucuucaugcagaucgccauccucaucaccaccgucacccugcacuucaagcaguacgaguucaacuccccgcccaacaaccaggugaugcugugcgagcccacgaucaucgagcgcaacaucaccgagaucguguaccucaccaacaccacgaucgagaaggagaucugccccaagccggccgaguaccggaacuggagcaagccccagugcgggaucaccggcuucgcgcccuucuccaaggacaacagcauccgccuguccgccgggggcgacaucugggucacccgggagcccuacgugagcugcgacccggacaagugcuaccaguucgcccuggggcagggcaccacgcucaacaacgugcacuccaacaacaccguccgcgaccggacccccuaccgcacccugcugaugaacgagcucggcgugcccuuccaccuggggacgaagcaggucugcaucgccuggagcuccagcuccugccacgacggcaaggccuggcugcacgugugcaucaccggggacgacaagaacgcgaccgccagcuucaucuacaacggccggcucguggacuccguggucagcugguccaaggagauccugcgcacccaggagagcgagugcgugugcaucaacgggacgugcaccguggucaugaccgacggcuccgccagcggcaaggccgacaccaagauccuguucaucgaggaggggcggaucgugcacacgagcacccucuccggcagcgcgcagcacguggaggagugcuccugcuacccccgcuacccggggguccggugcgugugccgcgacaacuggaagggcagcaaccggcccaucguggacaucaacaucaaggaccacuccaucgucagcuccuacgugugcagcggccuggugggggacaccccgcgcaagaacgacuccagcuccagcucccacugccuggaccccaacaacgaggagggcgggcacggcgucaaggggugggccuucgacgacggcaacgacguguggaugggccggaccaucaacgagacgagccgccucggguacgagaccuucaaggucaucgagggcugguccaaccccaagagcaagcugcagaucaaccggcaggucaucguggaccgcggggaccgguccggcuacagcgggaucuucuccguggagggcaagagcugcaucaaccgcugcuucuacguggagcugauccggggccgcaaggaggagaccgaggugcucuggaccagcaacuccaucgucguguucugcgggacgagcggcaccuacgggaccggcuccuggcccgacggggccgaccugaaccugaugcccaucuga

SEQ ID NO: 89021 - RNA, 1410 nt, Artificial Sequence; identical to SEQ ID NO: 86170
  derived and/or modified CDS sequence (opt1) from neuraminidase__InfluenzaA__AHL99156

SEQ ID NO: 89022 - RNA, 1410 nt, Artificial Sequence
  derived and/or modified CDS sequence (opt1) from neuraminidase__InfluenzaA__AHL99168
augaaccccaaccagaagaucaucaccaucggcagcgugucccugaccaucagcacgaucugcuucuucaugcagaucgccauccucaucaccaccgucacccugcacuucaagcaguacgaguucaacuccccgcccaacaaccaggugaugcugugcgagcccacgaucaucgagcgcaacaccaccgagaucguguaccucaccaacacgaccaucgagaaggagaucugccccaagccggccgaguaccggaacuggagcaagccccagugcgggaucaccggcuucgcgcccuucuccaaggacaacagcauccgccuguccgccgggggcgacaucugggucacccgggagcccuacgugagcugcgacccggacaagugcuaccaguucgcccuggggcagggcacgacccucaacaacgugcacuccaacaacaccguccgcgaccggacccccuaccgcacgcugcugaugaacgagcucggcgugcccuuccaccuggggaccaagcaggucugcaucgccuggagcuccagcuccugccacgacggcaaggccuggcugcacgugugcaucaccggggacgacaagaacgcgaccgccagcuucaucuacaacggccggcucguggacuccguggucagcugguccaaggagauccugcgcacgcaggagagcgagugcgugugcaucaacgggaccugcaccguggucaugaccgacggcuccgccagcggcaaggccgacacgaagauccuguucaucgaggaggggaagaucgugcacaccagcacccucuccggcagcgcgcagcacguggaggagugcuccugcuacccccgguacccggggguccgcugcgugugccgggacaacuggaagggcagcaaccgccccaucguggacaucaacaucaaggaccacuccaucgucagcuccuacgugugcagcggccuggugggggacaccccgcggaagaacgacuccagcuccagcucccacugccuggaccccaacaacgaggagggcgggcacggcgucaaggggugggccuucgacgacggcaacgacguguggaugggccgcacgaucaacgagaccagccggcucggguacgagaccuucaaggucaucgagggcugguccaaccccaagagcaagcugcagaucaaccgccaggugaucguggaccgcggggaccgguccggcuacagcgggaucuucuccgucgagggcaagagcugcaucaaccggugcuucuacguggagcugauccgcggccggaaggaggagaccgaggugcucuggacgagcaacuccaucgucguguucugcgggaccagcggcaccuacgggaccggcuccuggcccgacggggccgaccugaaccugaugcccaucuga

SEQ ID NO: 89023 - RNA, 1410 nt, Artificial Sequence; identical to SEQ ID NO: 86170
  derived and/or modified CDS sequence (opt1) from neuraminidase__InfluenzaA__AHL99180

SEQ ID NO: 89024 - RNA, 1410 nt, Artificial Sequence; identical to SEQ ID NO: 87034
  derived and/or modified CDS sequence (opt1) from neuraminidase__InfluenzaA__AHL99204

SEQ ID NO: 89025 - RNA, 1410 nt, Artificial Sequence
  derived and/or modified CDS sequence (opt1) from neuraminidase__InfluenzaA__AHL99216
augaaccccaaccagaagaucaucaccaucggcagcgugucccugaccaucagcacgaucugcuucuucaugcagaucgccauccucaucaccaccgucacccugcacuucaagcaguacgaguucaacuccccgcccaacaaccaggugaugcugugcgagcccacgaucaucgagcgcaacaucaccgagaucguguaccucaccaacaccacggucgagaaggagaucugccccaagccggccgaguaccggaacuggagcaagccccagugcgggaucaccggcuucgcgcccuucuccaaggacaacagcauccgccuguccgccgggggcgacaucugggugacccgggagcccuacgugagcugcgacccggacaagugcuaccaguucgcccuggggcagggcaccacgcucaacaacguccacuccaacaacaccgugcgcgaccggacccccuaccgcacccugcugaugaacgagcucggcgugcccuuccaccuggggacgaagcaggucugcaucgccuggagcuccagcuccugccacgacggcaaggccuggcugcacgugugcaucaccggggacgacaagaacgcgaccgccagcuucaucuacaacggccggcucguggacuccgucgugagcugguccaaggagauccugcgcacccaggagagcgagugcgugugcaucaacgggacgugcaccgucgugaugaccgacggcuccgccagcggcaaggccgacaccaagauccuguucaucgaggaggggaagaucgugcacacgagcacccucuccggcagcgcgcagcacgucgaggagugcuccugcuacccccgguacccgggggugcgcugcgugugccgggacaacuggaagggcagcaaccgccccaucaucgacaucaacaucaaggaccacuccaucgucagcuccuacgugugcagcggccuggugggggacaccccgcggaagaacgacuccagcuccagcucccacugccuggaccccaacaacgaggagggcgggcacggcgucaaggggugggccuucgacgacggcaacgacguguggaugggccgcaccaucaacgagacgagccggcucggguacgagaccuucaaggucaucgagggcugguccaaccccaagagcaagcugcagaucaaccgccaggugaucguggaccgcggggaccgguccggcuacagcgggaucuucuccgucgagggcaagagcugcaucaaccggugcuucuacguggagcugauccgcggccggaagaaggagaccgaggugcucuggaccagcaacuccaucgucguguucugcgggacgagcggcaccuacgggaccggcuccuggcccgacggggccgaccugaaccugaugcccaucuga

SEQ ID NO: 89026 - RNA, 1410 nt, Artificial Sequence; identical to SEQ ID NO: 86170
  derived and/or modified CDS sequence (opt1) from neuraminidase__InfluenzaA__AHL99228

SEQ ID NO: 89027 - RNA, 1410 nt, Artificial Sequence; identical to SEQ ID NO: 86170
  derived and/or modified CDS sequence (opt1) from neuraminidase__InfluenzaA__AHL99240

SEQ ID NO: 89028 - RNA, 1410 nt, Artificial Sequence; identical to SEQ ID NO: 86170
  derived and/or modified CDS sequence (opt1) from neuraminidase__InfluenzaA__AHL99252

SEQ ID NO: 89029 - RNA, 1410 nt, Artificial Sequence; identical to SEQ ID NO: 86170
  derived and/or modified CDS sequence (opt1) from neuraminidase__InfluenzaA__AHL99264

SEQ ID NO: 89030 - RNA, 1410 nt, Artificial Sequence; identical to SEQ ID NO: 86170
  derived and/or modified CDS sequence (opt1) from neuraminidase__InfluenzaA__AHL99276

SEQ ID NO: 89031 - RNA, 1410 nt, Artificial Sequence; identical to SEQ ID NO: 87907
  derived and/or modified CDS sequence (opt1) from neuraminidase__InfluenzaA__AHL99288

SEQ ID NO: 89032 - RNA, 1410 nt, Artificial Sequence; identical to SEQ ID NO: 88810
  derived and/or modified CDS sequence (opt1) from neuraminidase__InfluenzaA__AHL99300

SEQ ID NO: 89033 - RNA, 1410 nt, Artificial Sequence; identical to SEQ ID NO: 86170
  derived and/or modified CDS sequence (opt1) from neuraminidase__InfluenzaA__AHL99312

SEQ ID NO: 89034 - RNA, 1410 nt, Artificial Sequence
  derived and/or modified CDS sequence (opt1) from neuraminidase__InfluenzaA__AHL99324
augaaccccaaccagaagaucaucaccaucggcagcgugucccugaccaucagcacgaucugcuucuucaugcagaucgccauccucaucaccaccgucacccugcacuucaagcaguacgaguucaacuccccgcccaacaaccaggugauccugugcgagcccacgaucaucgagcgcaacaucaccgagaucguguaccucaccaacaccacgaucgagaaggagaucugccccaagccggccgaguaccggaacuggagcaagccccagugcgggaucaccggcuucgcgcccuucuccaaggacaacagcauccgccuguccgccgggggcgacaucugggucacccgggagcccuacgugagcugcgacccggacaagugcuaccaguucgcccuggggcagggcaccacgcucaacaacgugcacuccaacaacaccguccgcgaccggacccccuaccgcacccugcugaugaacgagcucggcgugcccuuccaccuggggacgaagcaggucugcaucgccuggagcuccagcuccugccacgacggcaaggccuggcugcacgugugcaucaccggggacgacaagaacgcgaccgccagcuucaucuacaacggcaagcucguggacuccguggucagcugguccaaggagauccugcggacccaggagagcgagugcgugugcaucaacgggacgugcaccguggucaugaccgacggcuccgccagcggcaaggccgacaccaagauccuguucaucgaggaggggaagaucgugcacacgagcacccucuccggcagcgcgcagcacguggaggagugcuccugcuacccccgcuacccggggguccggugcgugugccgcgacaacuggaagggcagcaaccggcccaucguggacaucaacaucaaggaccacuccaucgucagcuccuacgugugcagcggccuggugggggacaccccgcgcaagaacgacuccagcuccagcucccacugccuggaccccaacaacgaggagggcgggcacggcgucaaggggugggccuucgacgacggcaacgacguguggaugggccggaccaucaacgagacgagccgccucggguacgagaccuucaaggucaucgagggcugguccaaccccaagagcaagcugcagaucaaccggcaggucaucguggaccgcggggaccgguccggcuacagcgggaucuucuccguggagggcaagagcugcaucaaccgcugcuucuacguggagcugauccggggccgcaaggaggagaccgaggugcucuggaccagcaacuccaucgucguguucugcgggacgagcggcaccuacgggaccggcuccuggcccgacggggccgaccugaaccugaugcccaucuga

SEQ ID NO: 89035 - RNA, 1410 nt, Artificial Sequence; identical to SEQ ID NO: 87413
  derived and/or modified CDS sequence (opt1) from neuraminidase__InfluenzaA__AHL99348

SEQ ID NO: 89036 - RNA, 1410 nt, Artificial Sequence; identical to SEQ ID NO: 87413
  derived and/or modified CDS sequence (opt1) from neuraminidase__InfluenzaA__AHL99359

SEQ ID NO: 89037 - RNA, 1410 nt, Artificial Sequence
  derived and/or modified CDS sequence (opt1) from neuraminidase__InfluenzaA__AHL99370
augaaccccaaccagaagaucaucaccaucggcagcgugucccugaccaucacgaccaucugcuucuucaugcagaucgccauccucaucaccaccgucacgcugcacuucaagcaguacgaguucaacagcccgcccaacaaccagaugaugcugugcgagcccaccaucaucgagcgcaacaucaccgagaucguguaccucaccaacacgaccaucgagaaggagaucugccccaagccggccgaguaccggaacugguccaagccccagugcgggaucaccggcuucgcgcccuucagcaaggacaacuccauccgccugagcgccgggggcgacaucugggugacccgggagcccuacgucuccugcgacccggacaagugcuaccaguucgcccuggggcagggcacgacccucaacaacgugcacagcaacaacaccgugcgcgaccggacccccuaccgcacgcugcugaugaacgagcucggcguccccuuccaccuggggaccaagcaggucugcaucgccugguccagcuccagcugccacgacggcaaggccuggcugcacgugugcaucaccggggacgacaagaacgcgaccgccuccuucaucuacaacggccggcucguggacagcgugguguccuggagcaaggagauccugcgcacgcaggaguccgagugcgucugcaucaacgggaccugcaccguggugaugaccgacggcagcgccuccggcaaggccgacacgaagauccuguucaucgaggaggggaagaucguccacaccagcacccucagcggcuccgcgcagcacguggaggagugcagcugcuacccccgguacccgggggugcgcugcgucugccgggacaacuggaagggcuccaaccgccccaucguggacaucaacaucaaggaccacagcaucguguccagcuacgucugcuccggccuggugggggacacgccccggaagaacgacagcuccagcuccagccacugccuggaccccaacaacgaggagggcgggcacggcgugaaggggugggccuucgacgacggcaacgacgucuggaugggccgcaccaucaacgagaccucccggcucggguacgagaccuucaaggugaucgagggcuggagcaacccgaaguccaagcugcagaucaaccgccaggucaucguggaccgcggggaccggagcggcuacuccgggaucuucagcguggagggcaaguccugcaucaaccggugcuucuacgucgagcugauccgcggccggaaggaggagaccgaggugcucuggacgagcaacagcaucguggucuucugcgggaccuccggcaccuacgggaccggcagcuggcccgacggggccgaccugaaccugaugcccaucuga

SEQ ID NO: 89038 - RNA, 1410 nt, Artificial Sequence; identical to SEQ ID NO: 86170
  derived and/or modified CDS sequence (opt1) from neuraminidase__InfluenzaA__AHL99393

SEQ ID NO: 89039 - RNA, 1410 nt, Artificial Sequence; identical to SEQ ID NO: 86170
  derived and/or modified CDS sequence (opt1) from neuraminidase__InfluenzaA__AHL99417

SEQ ID NO: 89040 - RNA, 1410 nt, Artificial Sequence; identical to SEQ ID NO: 86170
  derived and/or modified CDS sequence (opt1) from neuraminidase__InfluenzaA__AHL99429

SEQ ID NO: 89041 - RNA, 1410 nt, Artificial Sequence; identical to SEQ ID NO: 86170
  derived and/or modified CDS sequence (opt1) from neuraminidase__InfluenzaA__AHL99441

SEQ ID NO: 89042 - RNA, 1410 nt, Artificial Sequence; identical to SEQ ID NO: 86170
  derived and/or modified CDS sequence (opt1) from neuraminidase__InfluenzaA__AHL99453

SEQ ID NO: 89043 - RNA, 1410 nt, Artificial Sequence; identical to SEQ ID NO: 86170
  derived and/or modified CDS sequence (opt1) from neuraminidase__InfluenzaA__AHL99477

SEQ ID NO: 89044 - RNA, 1410 nt, Artificial Sequence; identical to SEQ ID NO: 88810
  derived and/or modified CDS sequence (opt1) from neuraminidase__InfluenzaA__AHL99489

SEQ ID NO: 89045 - RNA, 1410 nt, Artificial Sequence
  derived and/or modified CDS sequence (opt1) from neuraminidase__InfluenzaA__AHL99501
augaaccccaaccagaagaucaucaccaucggcagcgugucccugaccaucagcacgaucugcuucuucaugcagaucgccauccucaucaccaccgucacccugcacuucaagcaguacgaguucaacuccccgcccaacaaccaggugaugcugugcgagcccacgaucaucgagcgcaacaucaccgagaucguguaccucaccaacaccacgaucgagaaggagaucugccccaagccggccgaguaccggaacuggagcaagccccagugcgggaucaccggcuucgcgcccuucuccaaggacaacagcauccgccuguccgccgggggcgacaucugggucacccgggagcccuacgugagcugcgacccggacaagugcuaccaguucgcccuggggcagggcaccacgcucaacaacgugcacuccaacaacaccguccgcgaccggacccccuaccgcacccugcugaugaacgagcucggcgugcccuuccaccuggggacgaagcaggucugcaucgccuggagcuccagcuccugccacgacggcaaggccuggcugcacgugugcaucaccggggacgacaagaacgcgaccgccagcuucaucuacaacggccggcucguggacuccguggucagcugguccaaggagauccugcgcacccaggagagcgagugcgugugcaucaacgggacgugcaccguggucaugaccgacggcuccgccagcggcaaggccgacaccaagauccuguucaucgaggaggggaagaucgugcacacgagcacccucuccggcagcgcgcagcacguggaggagugcuccugcuacccccgguacccggggguccgcugcgugugccgggacaacuggaagggcagcaaccgccccaucguggacaucaacaucaaggaccacuccaccgucagcuccuacgugugcagcggccuggugggggacaccccgcggaagaacgacuccagcuccagcucccacugccuggaccccaacaacgaggagggcgggcacggcgucaaggggugggccuucgacgacggcaacgacguguggaugggccgcacgaucaacgagaccagccggcucggguacgagaccuucaaggucaucgagggcugguccaaccccaagagcaagcugcagaucaaccgccaggugaucguggaccgcggggaccgguccggcuacagcgggaucuucuccgucgagggcaagagcugcaucaaccggugcuucuacguggagcugauccgcggccggaaggaggagaccgaggugcucuggacgagcaacuccaucgucguguucugcgggaccagcggcaccuacgggaccggcuccuggcccgacggggccgaccugaaccugaugcccaucuga

SEQ ID NO: 89046 - RNA, 1410 nt, Artificial Sequence; identical to SEQ ID NO: 86170
  derived and/or modified CDS sequence (opt1) from neuraminidase__InfluenzaA__AHL99525

SEQ ID NO: 89047 - RNA, 1410 nt, Artificial Sequence
  derived and/or modified CDS sequence (opt1) from neuraminidase__InfluenzaA__AHL99537
augaaccccaaccagaagaucaucaccaucggcagcgugucccugaccaucagcacgaucugcuucuucaugcagaucgccauccucaucaccaccgucacccugcacuucaagcaguacgaguucaacuccccgcccaacaaccaggugaugcugugcgagcccacgaucaucgagcgcaacaucaccgagaucguguaccucaccaacaccacgaucgagaaggagaucugccccaagccggccgaguaccggaacuggagcaagccccagugcgggaucaccggcuucgcgcccuucuccaaggacaacagcauccgccuguccgccgggggcgacaucugggucacccgggagcccuacgugagcugcgacccggacaagugcuaccaguucgcccuggggcagggcaccacgcucaacaacgugcacuccaacaacaccguccgcgaccggaccagcuaccgcacccugcugaugaacgagcucggcgugcccuuccaccuggggacgaagcaggucugcaucgccugguccagcuccagcugccacgacggcaaggccuggcugcacgugugcaucaccggggacgacaagaacgcgaccgccuccuucaucuacaacggccggcucguggacagcguggucuccuggagcaaggagauccugcgcacccaggaguccgagugcgugugcaucaacgggacgugcaccguggucaugaccgacggcagcgccagcggcaaggccgacaccaagauccuguucaucgaggaggggaagaucgugcacacguccacccucagcggcuccgcgcagcacguggaggagugcagcugcuacccccgguaccccgggguccgcugcgugugccgggacaacuggaagggcuccaaccgcccgaucguggacaucaacaucaaggaccacagcaucgucuccagcuacgugugcuccggccuggugggggacacgccccggaagaacgacagcuccagcuccagccacugccuggaccccaacaacgaggagggcgggcacggcgucaaggggugggccuucgacgacggcaacgacguguggaugggccgcaccaucaacgagaccucccggcucggguacgagaccuucaaggucaucgagggcuggagcaaccccaaguccaagcugcagaucaaccgccaggugaucguggaccgcggggaccggagcggcuacuccgggaucuucagcgucgagggcaagagcugcaucaaccggugcuucuacguggagcugauccgcggccggaaggaggagaccgaggugcucuggaccuccaacagcaucgucguguucugcgggacguccggcaccuacgggaccggcagcuggccggacggggccgaccugaaccugaugcccaucuga

SEQ ID NO: 89048 - RNA, 1410 nt, Artificial Sequence; identical to SEQ ID NO: 87907
  derived and/or modified CDS sequence (opt1) from neuraminidase__InfluenzaA__AHL99549

SEQ ID NO: 89049 - RNA, 1410 nt, Artificial Sequence; identical to SEQ ID NO: 86170
  derived and/or modified CDS sequence (opt1) from neuraminidase__InfluenzaA__AHL99561

SEQ ID NO: 89050 - RNA, 1410 nt, Artificial Sequence
  derived and/or modified CDS sequence (opt1) from neuraminidase__InfluenzaA__AHL99573
augaaccccaaccagaagaucaucaccaucggcagcgugucccugaccaucagcacgaucugcuucuucaugcagaucgccauccucaucaccaccgucacccugcacuucaagcaguacgaguucaacuccccgcccaacaaccaggugaugcugugcgagcccacgaucaucgagcgcaacaucaccgagaucguguaccucaccaacaccacgggggagaaggagaucugccccaagccggccgaguaccggaacuggagcaagccccagugcggcaucaccggguucgcgcccuucuccaaggacaacagcauccgccuguccgccggcggggacaucugggucacccgggagcccuacgugagcugcgacccggacaagugcuaccaguucgcccugggccagggcaccacgcucaacaacgugcacuccaacaacaccguccgcgaccggacccccuaccgcacccugcugaugaacgagcucggggugcccuuccaccugggcacgaagcaggucugcaucgccuggagcuccagcuccugccacgacgggaaggccuggcugcacgugugcaucaccggcgacgacaagaacgcgaccgccagcuucaucuacaacgggcggcucguggacuccguggucagcugguccaaggagauccugcgcacccaggagagcgagugcgugugcaucaacggcacgugcaccguggucaugaccgacggcuccgccagcgggaaggccgacaccaagauccuguucaucgaggagggcaagaucgugcacacgagcacccucuccgggagcgcgcagcacguggaggagugcuccugcuacccccgguacccgggcguccgcugcgugugccgggacaacuggaagggcagcaaccgccccaucaucgacaucaacaucaaggaccacuccaucgugagcuccuacgucugcagcgggcuggugggcgacaccccgcggaagaacgacuccagcuccagcucccacugccuggaccccaacaacgaggagggcgggcacggggugaagggcugggccuucgacgacggcaacgacgucuggauggggcgcaccaucaacgagacgagccggcucggcuacgagaccuucaaggugaucgaggggugguccaaccccaagagcaagcugcagaucaaccgccaggucaucguggacaagggcgaccgguccggguacagcggcaucuucuccguggagggcaagagcugcaucaaccgcugcuucuacgucgagcugauccgggggcgcaaggaggagaccgaggugcucuggaccagcaacuccaucguggucuucugcggcacgagcgggaccuacggcaccggguccuggcccgacggcgccgaccugaaccugaugcccaucuga

SEQ ID NO: 89051 - RNA, 1410 nt, Artificial Sequence
  derived and/or modified CDS sequence (opt1) from neuraminidase__InfluenzaA__AHL99585
augaaccccaaccagaagaucaucaccaucggcagcgugucccugaccaucagcacgaucugcuucuucaugcagaucgccauccucaucaccaccgucacccugcacuucaagcaguacgaguucaacuccccgcccaacaaccaggugaugcugugcgagcccacgaucaucgagcgcaacaucaccgagaucguguaccucaccaacaccacgaucgagaaggagaucugccccaagccggccgaguaccggaacuggagcaagccccagugcgggaucaccggcuucgcgcccuucuccaaggacaacagcauccgccuguccgccgggggcgacaucugggucacccgggagcccuacgugagcugcgacccggacaagugcuaccaguucgcccuggggcagggcaccacgcucaacaacgugcacuccaacaacaccgcccgcgaccggacccccuaccgcacccugcugaugaacgagcucggcguccccuuccaccuggggacgaagcaggucugcaucgccuggagcuccagcuccugccacgacggcaaggcguggcugcacgugugcaucaccggggacgacaagaacgccaccgccagcuucaucuacaacggccggcucguggacuccguggugagcugguccaaggagauccugcgcacccaggagagcgagugcgucugcaucaacgggacgugcaccguggugaugaccgacggcuccgccagcggcaaggcggacaccaagauccuguucaucgaggaggggaagaucguccacacgagcacccucuccggcagcgcccagcacguggaggagugcuccugcuacccccgguacccgggggugcgcugcgucugccgggacaacuggaagggcagcaaccgccccaucguggacaucaacaucaaggaccacuccaucgugagcuccuacgucugcagcggccuggugggggacaccccgcggaagaacgacuccagcuccagcucccacugccugaaccccaacaacgaggagggcgggcacggcgugaaggggugggccuucgacgacggcaacgacgucuggaugggccgcaccaucaacgagacgagccggcucggguacgagaccuucaaggugaucgagggcugguccaaccccaagagcaagcugcagaucaaccgccaggucaucguggaccgcggggaccgguccggcuacagcgggaucuucuccguggagggcaagagcugcaucaaccggugcuucuacgucgagcugauccgcggccggaaggaggagaccgaggugcucuggaccagcaacuccaucguggucuucugcgggacgagcggcaccuacgggaccggcuccuggcccgacggggccgaccugaaccugaugcccaucuga

SEQ ID NO: 89052 - RNA, 1410 nt, Artificial Sequence
  derived and/or modified CDS sequence (opt1) from neuraminidase__InfluenzaA__AHL99597
augaaccccaaccagaagaucaucaccaucggcagcgugugcaugaccaucgggauggccaaccugauccuccagaucggcaacaucaucuccaucuggaucagccacuccauccaggucgggaaccagagccagaucgagacgugcaaccaguccgugaucaccuacgagaacaacaccugggugaaccagaccuacgucaacaucagcaacacgaacuucgccgugggccaguccguggucagcgugaagcuggcggggaacuccagccugugcccgguguccggcugggccaucuacagcaaggacaacuccguccgcaucggcagcaagggggacguguucgugauccgggagcccuucaucuccugcagcccccucgagugccgcaccuucuuccugacccagggcgcccugcucaacgacaagcacuccaacgggaccaucaaggaccggagccccuaccgcacgcugauguccugcccgaucggcgagguccccagccccuacaacagccgguucgaguccguggccuggagcgccuccgcgugccacgacgggaucaacuggcugaccaucggcaucagcggccccgacuccggggccguggccguccucaaguacaacggcaucaucaccgacaccaucaagagcuggcgcaacgacauccugcggacgcaggaguccgagugcgccugcgugaacgggagcugcuucaccaucaugaccgacggcccguccgacggccaggcgagcuacaagaucuuccgcaucgagaaggggaagaucgugaaguccgucgagaugaacgcccccaacuaccacuacgaggagugcagcugcuaccccgacuccagcgagaucacgugcgugugccgggacaacuggcacggcuccaaccgccccugggugagcuucaaccagaaccuggaguaccagaucggguacaucugcuccggcaucuucggggacaacccgcggcccaacgacaagaccggcagcugcggccccgucuccagcaacggggccaacggcgugaagggguucagcuucaaguacggcaacgggguguggaucggccgcaccaaguccaucagcucccggaagggcuucgagaugaucugggaccccaacggguggaccggcaccgacaacaacuucagcaucaagcaggacaucgucgggaucaacgagugguccggcuacagcggguccuucgugcagcacccggagcucacgggccuggacugcauccgccccugcuucugggucgagcugauccggggccgccccaaggagaacaccaucuggaccagcggguccagcaucuccuucugcggcgugaacagcgacaccguggggugguccuggcccgacggcgccgagcucccguucacgaucgacaaguga

SEQ ID NO: 89053 - RNA, 1410 nt, Artificial Sequence
  derived and/or modified CDS sequence (opt1) from neuraminidase__InfluenzaA__AHL99608
augaaccccaaccagaagaucaucaccaucggcagcgugucccugaccaucagcacgaucugcgucuucaugcagaucgccauccucaucaccaccgugacccugcacuucaagcaguacgaguucaacuccccgcccaacaaccaggugaugcugugcgagcccacgaucaucgagcgcaacaucaccgagaucgucuaccucaccaacaccacgaucgagaaggagaucugccccaagccggccgaguaccggaacuggagcaagccccagugcgggaucaccggcuucgcgcccuucuccaaggacaacagcauccgccuguccgccgggggcgacaucugggugacccgggagcccuacgugagcugcgacccggacaagugcuaccaguucgcccuggggcagggcaccacgcucaacaacguccacuccaacaacaccgugcgcgaccggacccccuaccgcacccugcugaugaacgagcucggcgugcccuuccaccuggggacgaagcaggucugcaucgccuggagcuccagcuccugccacgacggcaaggccuggcugcacgugugcaucaccggggacgacaagaacgcgaccgccagcuucaucuacaacggccggcucguggacuccgucgugagcugguccaaggagauccugcgcacccaggagagcgagugcgugugcaucaacgggacgugcaccgucgugaugaccgacggcuccgccagcggcaaggccgacaccaagauccuguucaucgaggaggggaagaucgugcacacgagcacccucuccggcagcgcgcagcacgucgaggagugcuccugcuacccccgguacccgggggugcgcugcgugugccgggacaacuggaagggcagcaaccgccccaucgucgacaucaacaucaaggaccacuccaucgugagcuccuacgugugcagcggccuggucggggacaccccgcggaagaacgacuccagcuccagcucccacugccuggaccccaacaacgaggagggcgggcacggcgugaaggggugggccuucgacgacggcaacgacgucuggaugggccgcaccaucaacgagacgagccggcucggguacgagaccuucaaggugaucgagggcugguccaaccccaagagcaagcugcagaucaaccgccaggugaucgucgaccgcggggaccgguccggcuacagcgggaucuucuccguggagggcaagagcugcaucaaccggugcuucuacguggagcugauccgcggccggaaggaggagaccgagguccucuggaccagcaacuccaucgugguguucugcgggacgagcggcaccuacgggaccggcuccuggcccgacggggccgaccugaaccugaugcccaucuga

SEQ ID NO: 89054 - RNA, 1410 nt, Artificial Sequence
  derived and/or modified CDS sequence (opt1) from neuraminidase__InfluenzaA__AHL99620
augaaccccaaccagaagaucaucaccaucggcagcgugucccugaccaucagcacgaucugcuucuucaugcagaucgccauccucaucaccaccgucacccugcacuucaagcaguacgaguucaacuccccgcccaacaaccaggugaugcugugcgagcccacgaucaucgagcgcaacaucaccgagaucguguaccucaccaacaccacgaucgagaaggagaucugccccaagccggccgaguaccggaacuggagcaagccccagugcgggaucaccggcuucgcgcccuucuccaaggacaacagcauccgccuguccgccgggggcgacaucugggucacccgggagcccuacgugagcugcgacccggacaagugcuaccaguucgcccuggggcagggcaccacgcucaacaacgugcacuccaacaacaccguccgcgaccggacccccuaccgcacccugcugaugaacgagcucggcgugcccuuccaccuggggacgaagcaggucugcaucgccuggagcuccagcuccugccacgacggcaaggccuggcugcacgugugcaucaccggggacgacaagaacgcgaccgccagcuucaucuacaacggcaagcucguggacuccguggucagcugguccaaggagauccugcggacccaggagagcgagugcgugugcaucaacgggacgugcaccguggucaugaccgacggcuccgccagcggcaaggccgacaccaagauccuguucaucgaggaggggaagaucgugcacacgagcacccucuccggcagcgcgcagcacguggaggagugcuccugcuacccccgcuacccggggguccggugcgugugccgcgacaacuggaagggcagcaaccggcccaucguggacaucaacaucaaggaccacuccaucgucagcuccuacgugugcagcggccuggugggggacaccccgcgcaagaacgacuccagcuccagcucccacugccuggaccccaacaacgaggagggcgggcacggcgucaaggggugggccuucgacgacggcaacgacguguggaugggccggaccaucaacgagacgagccgccucggguacgagaccuucaaggucaucgagggcugguccaaccccaagagcaagcugcagaucaaccggcaggucaucguggaccgcggggaccgguccggcuacagcgggaucuucuccguggagggcaagagcugcaucaaccgcugcuucuacguggagcugauccggggccgcaaggaggagaccgaggugcucuggaccagcaacuccaucgucguguucugcgggacgagcggcaccuacgggaccggcuccuggcccgacggggccgaccugaaccugaugcccaucuga

SEQ ID NO: 89055 - RNA, 1410 nt, Artificial Sequence
  derived and/or modified CDS sequence (opt1) from neuraminidase__InfluenzaA__AHL99632
augaaccccaaccagaagaucaucaccaucggcagcgugucccugaccaucagcacgaucugcuucuucaugcagaucgccauccucaucaccaccgucacccugcacuucaagcaguacgaguucaacuccccgcccaacaaccaggugaugcugugcgagcccacgaccaucgagcgcaacaucaccgagaucguguaccucaccaacacgaccaucgagaaggagaucugccccaagccggccgaguaccggaacuggagcaagccccagugcgggaucaccggcuucgcgcccuucuccaaggacaacagcauccgccuguccgccgggggcgacaucugggucacccgggagcccuacgugagcugcgacccggacaagugcuaccaguucgcccuggggcagggcacgacccucaacaacgugcacuccaacaacaccguccgcgaccggacccccuaccgcacgcugcugaugaacgagcucggcgugcccuuccaccuggggaccaagcaggucugcaucgccuggagcuccagcuccugccacgacggcaaggccuggcugcacgugugcaucaccggggacgacaagaacgcgaccgccagcuucaucuacaacggccggcucguggacuccguggucagcugguccaaggagauccugcgcacgcaggagagcgagugcgugugcaucaacgggaccugcaccguggucaugaccgacggcuccgccagcggcaaggccgacacgaagauccuguucaucgaggaggggaagaucgugcacaccagcacccucuccggcagcgcgcagcacguggaggagugcuccugcuacccccgguacccggggguccgcugcgugugccgggacaacuggaagggcagcaaccgccccaucguggacaucaacaucaaggaccacuccaucgucagcuccuacgugugcagcggccuggugggggacaccccgcggaagaacgacuccagcuccagcucccacugccuggaccccaacaacgaggagggcgggcacggcgucaaggggugggccuucgacgacggcaacgacguguggaugggccgcacgaucaacgagaccagccggcucggguacgagaccuucaaggucaucgagggcugguccaaccccaagagcaagcugcagaucaaccgccaggugaucguggaccgcggggaccgguccggcuacagcgggaucuucuccgucgagggcaagagcugcaucaaccggugcuucuacguggagcugauccgcggccggaaggaggagaccgaggugcucuggacgagcaacuccaucgucguguucugcgggaccagcggcaccuacgggaccggcuccuggcccgacggggccgaccugaaccugaugcccaucuga

SEQ ID NO: 89056 - RNA, 1410 nt, Artificial Sequence; identical to SEQ ID NO: 88845
  derived and/or modified CDS sequence (opt1) from neuraminidase__InfluenzaA__AHL99644

SEQ ID NO: 89057 - RNA, 1410 nt, Artificial Sequence
  derived and/or modified CDS sequence (opt1) from neuraminidase__InfluenzaA__AHL99668
augaaccccaaccagaagaucaucaccaucggcagcgugucccugaccaucagcacgaucugcuucuucaugcagaucgccauccucaucaccaccgucacccugcacuucaagcaguacgaguucaacuccccgcccaacaaccaggugaugcugugcgagcccacgaucaucgagcgcaacaucaccgagaucguguaccucaccaacaccacggucgagaaggagaucugccccaagccggccgaguaccggaacuggagcaagccccagugcgggaucaccggcuucgcgcccuucuccaaggacaacagcauccgccuguccgccgggggcgacaucugggugacccgggagcccuacgugagcugcgacccggacaagugcuaccaguucgcccuggggcagggcaccacgcucaacaacguccacuccaacaacaccgugcgcgaccggacccccuaccgcacccugcugaugaacgagcucggcgugcccuuccaccuggggacgaagcaggucugcaucgccuggagcuccagcuccugccacgacggcaaggccuggcugcacgugugcaucaccggggacgacaagaacgcgaccgccagcuucaucuacaacggccggcucguggacuccgucgugagcugguccaaggagauccugcgcacccaggagagcgagugcgugugcaucaacgggacgugcaccgucgugaugaccgacggcuccgccagcggcaaggccgacaccaagauccuguucaucgaggaggggaagaucgugcacacgagcacccucuccggcagcgcgcagcacgucgaggagugcuccugcuacccccgguacccgggggugcgcugcgugugccgggacaacuggaagggcagcaaccgccccaucaucgacaucaacaucaaggaccacuccaucgucagcuccuacgugugcagcggccuggugggggacaccccgcggaagaacgacuccagcuccagcucccacugccuggaccccaacaacgaggagggcgggcacggcgucaaggggugggccuucgacgacggcaacgacguguggaugggccgcaccaucaacgagacgagccggcucggguacgagaccuucaaggucaucgagggcugguccaaccccaagagcaagcugcagaucaaccgccaggugaucguggaccgcggggaccgguccggcuacagcgggaucuucuccgucgagggcaagagcugcaucaaccggugcuucuacguggagcugauccgcggccggaaggaggagaccgaggugcucuggaccagcaacuccaucgucguguucugcgggacgagcggcaccuacgggaccggcuccuggcccgacggggccgaccugaaccugaugcccaucuga

SEQ ID NO: 89058 - RNA, 1410 nt, Artificial Sequence; identical to SEQ ID NO: 86170
  derived and/or modified CDS sequence (opt1) from neuraminidase__InfluenzaA__AHL99680

SEQ ID NO: 89059 - RNA, 1410 nt, Artificial Sequence
  derived and/or modified CDS sequence (opt1) from neuraminidase__InfluenzaA__AHL99692
augaaccccaaccagaagaucaucaccaucggcagcgugucccugaccaucagcacgaccugcuucuucaugcagaucgccauccucaucaccaccgucacgcugcacuucaagcaguacgaguucaacuccccgcccaacaaccaggugaugcugugcgagcccaccaucaucgagcgcaacaucaccgagaucguguaccucaccaacacgaccaucgagaaggagaucugccccaagccggccgaguaccggaacuggagcaagccccagugcgggaucaccggcuucgcgcccuucuccaaggacaacagcauccgccuguccgccgggggcgacaucugggucacccgggagcccuacgugagcugcgacccggacaagugcuaccaguucgcccuggggcagggcacgacccucaacaacgugcacuccaacaacaccguccgcgaccggacccccuaccgcacgcugcugaugaacgagcucggcgugcccuuccaccuggggaccaagcaggucugcaucgccuggagcuccagcuccugccacgacggcaaggccuggcugcacgugugcaucaccggggacgacaagaacgcgaccgccagcuucaucuacaacggccggcucguggacuccguggucagcugguccaaggagauccugcgcacgcaggagagcgagugcgugugcaucaacgggaccugcaccguggucaugaccgacggcuccgccagcggcaaggccgacacgaagauccuguucaucgaggaggggaagaucgugcacaccagcacccucuccggcagcgcgcagcacguggaggagugcuccugcuacccccgguacccggggguccgcugcgugugccgggacaacuggaagggcagcaaccgccccaucguggacaucaacaucaaggaccacuccaucgucagcuccuacgugugcagcggccuggugggggacaccccgcggaagaacgacuccagcuccagcucccacugccuggaccccaacaacgaggagggcgggcacggcgucaaggggugggccuucgacgacggcaacgacguguggaugggccgcacgaucaacgagaccagccggcucggguacgagaccuucaaggucaucgagggcugguccaaccccaagagcaagcugcagaucaaccgccaggugaucguggaccgcggggaccgguccggcuacagcgggaucuucuccgucgagggcaagagcugcaucaaccggugcuucuacguggagcugauccgcggccggaaggaggagaccgaggugcucuggacgagcaacuccaucgucguguucugcgggaccagcggcaccuacgggaccggcuccuggcccgacggggccgaccugaaccugaugcccaucuga

SEQ ID NO: 89060 - RNA, 1410 nt, Artificial Sequence; identical to SEQ ID NO: 86170
  derived and/or modified CDS sequence (opt1) from neuraminidase__InfluenzaA__AHL99704

SEQ ID NO: 89061 - RNA, 1410 nt, Artificial Sequence; identical to SEQ ID NO: 86170
  derived and/or modified CDS sequence (opt1) from neuraminidase__InfluenzaA__AHL99716

SEQ ID NO: 89062 - RNA, 1410 nt, Artificial Sequence; identical to SEQ ID NO: 89052
  derived and/or modified CDS sequence (opt1) from neuraminidase__InfluenzaA__AHL99740

SEQ ID NO: 89063 - RNA, 1410 nt, Artificial Sequence
  derived and/or modified CDS sequence (opt1) from neuraminidase__InfluenzaA__AHL99751
augaaccccaaccagaagaucaucaccaucggcagcgugucccugaccaucagcacgaucugcuucuucaugcagaucgccauccucaucaccaccgucacccugcacuucaagcaguacgaguucaacuccccgcccaacaaccaggugaugcugugcgagcccacgaucaucgagcgcaacaucaccgagaucguguaccucaccaacaccacggucgagaaggagaucugccccaagccggccgaguaccggaacuggagcaagccccagugcgggaucaccggcuucgcgcccuucuccaaggacaacagcauccgccuguccgccgggggcgacaucugggugacccgggagcccuacgugagcugcgacccggacaagugcuaccaguucgcccuggggcagggcaccacgcucaacaacguccacuccaacaacaccgcccgcgaccggacccccuaccgcacccugcugaugaacgagcucggcgugcccuuccaccuggggacgaagcaggucugcaucgccuggagcuccagcuccugccacgacggcaaggcguggcugcacgugugcaucaccggggacgacaagaacgccaccgccagcuucaucuacaacggccggcucguggacuccguggucagcugguccaaggagauccugcgcacccaggagagcgagugcgugugcaucaacgggacgugcaccguggucaugaccgacggcuccgccagcggcaaggcggacaccaagauccuguucaucgaggaggggaagaucgugcacacgagcacccucuccggcagcgcccagcacguggaggagugcuccugcuacccccgguacccggggguccgcugcgugugccgggacaacuggaagggcagcaaccgccccaucguggacaucaacaucaaggaccacuccaucgucagcuccuacgugugcagcggccuggugggggacaccccgcggaagaacgacuccagcuccagcucccacugccugaaccccaacaacgaggagggcgggcacggcgucaaggggugggccuucgacgacggcaacgacguguggaugggccgcaccaucaacgagacgagccggcucggguacgagaccuucaaggucaucgagggcugguccaaccccaagagcaagcugcagaucaaccgccaggugaucguggaccgcggggaccgguccggcuacagcgggaucuucuccgucgagggcaagagcugcaucaaccggugcuucuacguggagcugauccgcggccggaaggaggagaccgaggugcucuggaccagcaacuccaucgucguguucugcgggacgagcggcaccuacgggaccggcuccuggcccgacggggccgaccugaaccugaugcccaucuga

SEQ ID NO: 89064 - RNA, 1410 nt, Artificial Sequence
  derived and/or modified CDS sequence (opt1) from neuraminidase__InfluenzaA__AHL99763
augaaccccaaccagaagaucaucaccaucggcagcgugucccugaccaucagcacgaucugcuucuucaugcagaucgccauccucaucaccaccgucacccugcacuucaagcaguacgaguucaacuccccgcccaacaaccaggugaugcugugcgagcccacgaucaucgagcgcaacaucaccgagaucguguaccucaccaacaccacgaucgagaaggagaucugccccaagccggccgaguaccggaacuggagcaagccccagugcgggaucaccggcuucgcgcccuucuccaaggacaacagcauccgccuguccgccgggggcgacaucugggucacccgggagcccuacgugagcugcgacccggacaagugcuaccaguucgcccuggggcagggcaccacgcucaacaacgugcacuccaacaacaccguccgcgaccggacccccuaccgcacccugcugaugaacgagcucggcgugcccuuccaccuggggacgaagcaggucugcaucgccuggagcuccagcuccugccacgacggcaaggccuggcugcacgugugcaucaccggggacgacaagaacgcgaccgccagcuucaucuacaacggccggcucguggacuccguggucagcugguccaaggagauccugcgcacccaggagagcgagugcgugugcaucaacgggacgugcaccguggucaugaccgacggcuccgccagcggcaaggccgacaccaagauccuguucaucgaggaggggaagaucgugcacacgagcacccucuccggcagcgcgcagcacguggaggagugcuccugcuacccccgguacccggggguccgcugcgugugccgggacaacuggaagggcagcaaccgccccaucguggacaucaacaucaaggaccacuccaucgucagcuccuacgugugcagcggccuggugggggacaccccgcggaagaacgacuccagcuccagcucccacugccuggaccccaacaacgaggagggcgggcacggcgucaaggggugggccuucgacgacggcaacgacguguggaugggccgcaccaucaacgagacgagccggcucggguacgagaccuucaaggucaucgagggcugguccaaccccaagagcaagcugcagaugaaccgccaggugaucguggaccgcggggaccgguccggcuacagcgggaucuucuccgucgagggcaagagcugcaucaaccggugcuucuacguggagcugauccgcggccggaaggaggagaccgaggugcucuggaccagcaacuccaucgucguguucugcgggacgagcggcaccuacgggaccggcuccuggcccgacggggccgaccugaaccugaugcccaucuga

SEQ ID NO: 89065 - RNA, 1410 nt, Artificial Sequence; identical to SEQ ID NO: 86170
  derived and/or modified CDS sequence (opt1) from neuraminidase__InfluenzaA__AHL99775

SEQ ID NO: 89066 - RNA, 1410 nt, Artificial Sequence
  derived and/or modified CDS sequence (opt1) from neuraminidase__InfluenzaA__AHL99787
augaaccccaaccagaagaucaucaccaucggcagcgugucccugaccaucagcacgaucugcuucuucaugcagaucgccauccucaucaccaccgucacccugcacuucaagcaguacgaguucaacuccccgcccaacaaccaggugaugcugugcgagcccacgaucaucgagcgcaacaucaccgagaucguguaccucaccaacaccacgaucgagaaggagaucugccccaagccggccgaguaccggaacuggagcaagccccagugcgggaucaccggcuucgcgcccuucuccaaggacaacagcauccgccuguccgccgggggcgacaucugggucacccgggagcccuacgugagcugcgacccggacaagugcuaccaguucgcccuggggcagggcaccacgcucaacaacgugcacuccaacaacaccguccgcgaccggacccccuaccgcacccugcugaugaacgagcucggcgugcccuuccaccuggggacgaagcaggucugcaucgccuggagcuccagcuccugccacgacggcaaggccuggcugcacgugugcaucaccggggacgacaagaacgcgaccgccagcuucaucuacaacggccggcucguggacuccguggucagcugguccaaggagauccugcgcacccaggagagcgagugcgugugcaucaacgggacgugcaccguggucaugaccgacggcuccgccagcggcaaggccgacaccaagauccuguucaucgaggaggggaagaucgugcacacgagcacccucuccggcagcgcgcagcacguggaggagugcuccugcuacccccgguacccggggguccgcugcgugugccgggacaacuggaagggcagcaaccgccccaucguggacaucaacaucaaggaccacuccaucgucagcuccuacgugugcagcggccuggugggggacacgccccggaagaacgacuccagcuccagcucccacugccuggaccccaacaacgaggagggcgggcacggcgucaaggggugggccuucgacgacggcaacgacguguggaugggccgcaccaucaacgagaccagccggcucggguacgagaccuucaaggucaucgagggcugguccaacccggagagcaagcugcagaucaaccgccaggugaucguggaccgcggggaccgguccggcuacagcgggaucuucuccgucgagggcaagagcugcaucaaccggugcuucuacguggagcugauccgcggccggaaggaggagaccgaggugcucuggaccagcaacuccaucgucguguucugcgggacgagcggcaccuacgggaccggcuccuggcccgacggggccgaccugaaccugaugcccaucuga

SEQ ID NO: 89067 - RNA, 1410 nt, Artificial Sequence
  derived and/or modified CDS sequence (opt1) from neuraminidase__InfluenzaA__AHL99799
augaaccccaaccagaagaucaucaccaucggcagcgugucccugaccaucagcacgaucugcuucuucaugcagaucgccauccucaucaccaccgucacccugcacuucaagcaguacgaguucaacuccccgcccaacaaccaggugaugcugugcgagcccacgaucaucgagcgcaacaucaccgagaucguguaccucaccaacaccacgaucgagaaggagaucugccccaagccggccgaguaccggaacuggagcaagccccagugcgggaucaccggcuucgcgcccuucuccaaggacaacagcauccgccuguccgccgggggcgacaucugggucacccgggagcccuacgugagcugcgacccggacaagugcuaccaguucgcccuggggcagggcaccacgcucaacaacgugcacuccaacaacaccguccgcgaccggacccccuaccgcacccugcugaugaacgagcucggcgugcccuuccaccuggggacgaagcaggucugcaucgccuggagcuccagcuccugccacgacggcaaggccuggcugcacgugugcaucaccggggacgacaagaacgcgaccgccagcuucaucuacaacggccggcucguggacuccguggucagcugguccaaggagauccugcgcacccaggagagcgagugcgugugcaucaacgggacgugcaccguggucaugaccgacggcuccgccagcggcaaggccgacaccaagauccuguucaucgaggaggggaagaucgugcacacgagcacccucuccggcagcgcgcagcacguggaggagugcuccugcuacccccgguacccggggguccgcugcaucugccgggacaacuggaagggcagcaaccgccccaucguggacaucaacaucaaggaccacuccaucgugagcuccuacgucugcagcggccuggugggggacaccccgcggaagaacgacuccagcuccagcucccacugccugggccccaacaacgaggagggcgggcacggggugaagggcugggccuucgacgacggcaacgacgucuggauggggcgcaccaucaacgagacgagccggcucggcuacgagaccuucaaggugaucgaggggugguccaaccccaagagcaagcugcagaucaaccgccaggucaucguggaccggggcgaccgcuccggguacagcggcaucuucuccguggagggcaagagcugcaucaaccggugcuucuacgucgagcugauccgcgggcggaaggaggagaccgaggugcucuggaccagcaacuccaucguggucuucugcggcacgagcgggaccuacggcaccggguccuggcccgacggcgccgaccugaaccugaugcccaucuga

SEQ ID NO: 89068 - RNA, 1410 nt, Artificial Sequence; identical to SEQ ID NO: 86170
  derived and/or modified CDS sequence (opt1) from neuraminidase__InfluenzaA__AHL99811

SEQ ID NO: 89069 - RNA, 1410 nt, Artificial Sequence
  derived and/or modified CDS sequence (opt1) from neuraminidase__InfluenzaA__AHL99823
augaaccccaaccagaagaucaucaccaucggcagcgugucccugaccaucagcacgaucugcuucuucaugcagaucgccauccucaucaccaccgucacccugcacuucaagcaguacgaguucaacuccccgcccaacaaccaggugaugcugugcgagcccacgaucaucgagcgcaacaucaccgagaucguguaccucaccaacaccacgaucgagaaggagaucugccccaagccggccgaguaccggaacuggagcaagccccagugcgggaucaccggcuucgcgcccuucuccaaggacaacagcauccgccuguccgccgggggcgacaucugggucacccgggagcccuacgugagcugcgacccggacaagugcuaccaguucgcccuggggcagggcaccacgcucaacaacgugcacuccaacaacaccguccgcgaccggacccccuaccgcacccugcugaugaacgagcucggcgugcccuuccaccuggggacgaagcaggucugcaucgccuggagcuccagcuccugccacgacggcaaggccuggcugcacgugugcaucaccggggacgacaagaacgcgaccgccagcuucaucuacaacggccggcucguggacuccguggucagcugguccaaggagauccugcgcacccaggagagcgagugcgugugcaucaacgggacgugcgccguggucaugaccgacggcuccgccagcggcaaggcggacaccaagauccuguucaucgaggaggggaagaucgugcacaccagcacgcucuccggcagcgcccagcacguggaggagugcuccugcuacccccgguacccggggguccgcugcgugugccgggacaacuggaagggcagcaaccgccccaucguggacaucaacaucaaggaccacuccaucgucagcuccuacgugugcagcggccuggugggggacaccccgcggaagaacgacuccagcuccagcucccacugccuggaccccaacaacgaggagggcgggcacggcgucaaggggugggccuucgacgacggcaacgacguguggaugggccgcaccaucaacgagaccagccggcucggguacgagacguucaaggucaucgagggcugguccaaccccaagagcaagcugcagaucaaccgccaggugaucguggaccgcggggaccgguccggcuacagcgggaucuucuccgucgagggcaagagcugcaucaaccggugcuucuacguggagcugauccgcggccggaaggaggagaccgaggugcucuggaccagcaacuccaucgucguguucugcgggaccagcggcacguacgggaccggcuccuggcccgacggggccgaccugaaccugaugcccaucuga

SEQ ID NO: 89070 - RNA, 1410 nt, Artificial Sequence
  derived and/or modified CDS sequence (opt1) from neuraminidase__InfluenzaA__AHL99835
augaaccccaaccagaagaucaucaccaucggcagcgugucccugaccaucagcacgaucugcuucuucaugcagaucgccauccucaucaccaccgucacccugcacuucaagcaguacgaguucaacuccccgcccaacaaccaggugaugcugugcgagcccacgaucaucgagcgcaacaucaccgagaucguguaccucaccaacaccacgaucgagaaggagaucugccccaagccggccgaguaccggaacuggagcaagccccagugcgggaucaccggcuucgcgcccuucuccaaggacaacagcauccgccuguccgccgggggcgacaucugggucacccgggagcccuacgugagcugcgccccggacaagugcuaccaguucgcccuggggcagggcaccacgcucaacaacgugcacuccaacaacaccguccgcgaccggacccccuaccgcacccugcugaugaacgagcucggcgugcccuuccaccuggggacgaagcaggucugcaucgccuggagcuccagcuccugccacgacggcaaggcguggcugcacgugugcaucaccggggacgacaagaacgccaccgccagcuucaucuacaacggccggcucguggacuccguggucagcugguccaaggagauccugcgcacccaggagagcgagugcgugugcaucaacgggacgugcaccguggucaugaccgacggcuccgccagcggcaaggcggacaccaagauccuguucaucgaggaggggaagaucgugcacacgagcacccucuccggcagcgcccagcacguggaggagugcuccugcuacccccgguacccggggguccgcugcgugugccgggacaacuggaagggcagcaaccgccccaucguggacaucaacaucaaggaccacuccaucgucagcuccuacgugugcagcggccuggugggggacaccccgcggaagaacgacuccagcuccagcucccacugccuggaccccaacaacgaggagggcgggcacggcgucaaggggugggccuucgacgacggcaacgacguguggaugggccgcaccaucaacgagacgagccggcucggguacgagaccuucaaggucaucgagggcugguccaaccccaagagcaagcugcugaucaaccgccaggugaucguggaccgcggggaccgguccggcuacagcgggaucuucuccgucgagggcaagagcugcaucaaccggugcuucuacguggagcucauccgcggccggaaggaggagaccgaggugcuguggaccagcaacuccaucgucguguucugcgggacgagcggcaccuacgggaccggcuccuggcccgacggggccgaccugaaccucaugcccaucuga

SEQ ID NO: 89071 - RNA, 1410 nt, Artificial Sequence; identical to SEQ ID NO: 86170
  derived and/or modified CDS sequence (opt1) from neuraminidase__InfluenzaA__AHL99847

SEQ ID NO: 89072 - RNA, 1410 nt, Artificial Sequence; identical to SEQ ID NO: 87399
  derived and/or modified CDS sequence (opt1) from neuraminidase__InfluenzaA__AHL99859

SEQ ID NO: 89073 - RNA, 1410 nt, Artificial Sequence
  derived and/or modified CDS sequence (opt1) from neuraminidase__InfluenzaA__AHL99871
augaaccccaaccagaagaucaucaccaucggcagcgugucccugaccaucagcacgaucugcuucuucaugcagaucgccauccucaccaccaccgucacgcugcacuucaagcaguacgaguucaacuccccgcccaacaaccaggugaugcugugcgagcccaccaucaucgagcgcaacaucaccgagaucguguaccucaccaacacgaccaucgagaaggagaucugccccaagccggccgaguaccggaacuggagcaagccccagugcgacaucaccggguucgcgcccuucuccaaggacaacagcauccgccuguccgccggcggggacaucugggucacccgggagcccuacgugagcugcgacccggacaagugcuaccaguucgcccugggccaggggacgacccucaacaacgugcacuccaacaacaccguccgcgaccggacccccuaccgcacgcugcugaugaacgagcucggcgugcccuuccaccugggcaccaagcaggucugcaucgccuggagcuccagcuccugccacgacgggaaggccuggcugcacgugugcaucaccggcgacgacaagaacgcgaccgccagcuucaucuacaacgggcggcucguggacuccguggucagcugguccaaggagauccugcgcacgcaggagagcgagugcgugugcaucaacgggaccugcaccguggucaugaccgacggguccgccagcggcaaggccgacacgaagauccuguucaucgaggagggccggaucgugcacaccagcacccucuccgggagcgcgcagcacguggaggagugcuccugcuacccccgcuacccgggcguccggugcgugugccgcgacaacuggaaggggagcaaccggcccaucguggacaucaacaucaaggaccacuccaucgucagccgcuacgugugcuccggccuggugggcgacacgccccggaagaacgacagcuccagcuccagccacugccuggaccccaacaacgaggagggcggccacggggucaagggcugggccuucgacgacgggaacgacguguggaugggccgcaccaucaacgagaccucccggcucggcuacgagaccuucaaggucaucgagggguggagcaacccgaaguccaagcugcagaucaaccgccaggugaucguggaccggggcgaccgcagcggguacuccggcaucuucagcgucgaggggaaguccugcaucaaccggugcuucuacguggagcugauccgcggccgcaaggaggagaccgaggugcucuggacgagcaacagcaucgucguguucugcggcaccuccgggaccuacggcaccgggagcuggcccgacggcgccgaccugaaccugaugcccaucuga

SEQ ID NO: 89074 - RNA, 1410 nt, Artificial Sequence; identical to SEQ ID NO: 86170
  derived and/or modified CDS sequence (opt1) from neuraminidase__InfluenzaA__AHL99883

SEQ ID NO: 89075 - RNA, 1410 nt, Artificial Sequence; identical to SEQ ID NO: 89051
  derived and/or modified CDS sequence (opt1) from neuraminidase__InfluenzaA__AHL99895

SEQ ID NO: 89076 - RNA, 1410 nt, Artificial Sequence; identical to SEQ ID NO: 86170
  derived and/or modified CDS sequence (opt1) from neuraminidase__InfluenzaA__AHL99907

SEQ ID NO: 89077 - RNA, 1410 nt, Artificial Sequence; identical to SEQ ID NO: 86170
  derived and/or modified CDS sequence (opt1) from neuraminidase__InfluenzaA__AHL99919

SEQ ID NO: 89078 - RNA, 1410 nt, Artificial Sequence
  derived and/or modified CDS sequence (opt1) from neuraminidase__InfluenzaA__AHL99943
augaaccccaaccagaagaucaucaccaucggcagcgugucccugaccaucagcacgaucugcuucuucaugcagaucgccauccucaucaccaccgucacccugcacuucaagcagcacgaguucaacuccccgcccaacaaccaggugaugcugugcgagcccacgaucaucgagcgcaacaucaccgagaucguguaccucaccaacaccacgaucgagaaggagaucugccccaagccggccgaguaccggaacuggagcaagccccagugcgggaucaccggcuucgcgcccuucuccaaggacaacagcauccgccuguccgccgggggcgacaucugggucacccgggagcccuacgugagcugcgacccggacaagugcuaccaguucgcccuggggcagggcaccacgcucaacaacgugcacuccaacaacaccguccgcgaccggacccccuaccgcacccugcugaugaacgagcucggcgugcccuuccaccuggggacgaagcaggucugcaucgccuggagcuccagcuccugccacgacggcaaggccuggcugcacgugugcaucaccggggacgacaagaacgcgaccgccagcuucaucuacaacggccggcucguggacuccguggucagcugguccaaggagauccugcgcacccaggagagcgagugcgugugcaucaacgggacgugcaccguggucaugaccgacggcuccgccagcggcaaggccgacaccaagauccuguucaucgaggaggggaagaucgugcacacgagcacccucuccggcagcgcgcagcacguggaggagugcuccugcuacccccgguacccggggguccgcugcgugugccgggacaacuggaagggcagcaaccgccccaucguggacaucaacaucaaggaccacuccaucgucagcuccuacgugugcagcggccuggugggggacaccccgcggaagaacgacuccagcuccagcucccacugccuggaccccaacaacgaggagggcgggcacggcgucaaggggugggccuucgacgacggcaacgacguguggaugggccgcaccaucaacgagacgagccggcucggguacgagaccuucaaggucaucgagggcugguccaaccccaagagcaagcugcagaucaaccgccaggugaucguggaccgcggggaccgguccggcuacagcgggaucuucuccgucgagggcaagagcugcaucaaccggugcuucuacguggagcugauccgcggccggaaggaggagaccgaggugcucuggaccagcaacuccaucgucguguucugcgggacgagcggcaccuacgggaccggcuccuggcccgacggggccgaccugaaccugaugcccaucuga

SEQ ID NO: 89079 - RNA, 1410 nt, Artificial Sequence; identical to SEQ ID NO: 86170
  derived and/or modified CDS sequence (opt1) from neuraminidase__InfluenzaA__AHL99955

SEQ ID NO: 89080 - RNA, 1410 nt, Artificial Sequence
  derived and/or modified CDS sequence (opt1) from neuraminidase__InfluenzaA__AHL99967
augaaccccaaccagaagaucaucaccaucggcagcgugucccugaccaucagcacgaucugcuucuucaugcagaucgccauccucaucaccaccgucacccugcacuucaagcaguacgaguucaacuccccgcccaacaaccaggugaugcugugcgagcccacgaucaucgagcgcaacaucaccgagaucguguaccucaccaacaccacgaucgagaaggagaucugccccaagccggccgaguaccggaacuggagcaagccccagugcgggaucaccggcuucgcgcccuucuccaaggacaacagcauccgccuguccgccgggggcgacaucugggucacccgggagcccuacgugagcugcgacccggacaagugcuaccaguucgcccuggggcagggcaccacgcucaacaacgugcacuccaacaacaccguccacgaccgcacccccuaccggacccugcugaugaacgagcucggcgugcccuuccaccuggggacgaagcaggucugcaucgccuggagcuccagcuccugccacgacggcaaggccuggcugcacgugugcaucaccggggacgacaagaacgcgaccgccagcuucaucuacaacggccgccucguggacuccguggucagcugguccaaggagauccugcggacccaggagagcgagugcgugugcaucaacgggacgugcaccguggucaugaccgacggcuccgccagcggcaaggccgacaccaagauccuguucaucgaggaggggaagaucgugcacacgagcacccucuccggcagcgcgcagcacguggaggagugcuccugcuacccccgcuacccggggguccggugcgugugccgcgacaacuggaagggcagcaaccggcccaucguggacaucaacaugaaggaccacuccaucgucagcuccuacgugugcagcggccuggugggggacaccccgcgcaagaacgacuccagcuccagcucccacugccuggaccccaacaacgaggagggcgggcacggcgucaaggggugggccuucgacgacggcaacgacguguggaugggccggaccaucaacgagacgagccgccucggguacgagaccuucaaggucaucgagggcugguccaaccccaagagcaagcugcagaucaaccggcaggucaucguggaccgcggggaccgguccggcuacagcgggaucuucuccguggagggcaagagcugcaucaaccgcugcuucuacguggagcugauccggggccgcaaggaggagaccgaggugcucuggaccagcaacuccaucgucguguucugcgggacgagcggcaccuacgggaccggcuccuggcccgacggggccgaccugaaccugaugcccaucuga

SEQ ID NO: 89081 - RNA, 1410 nt, Artificial Sequence
  derived and/or modified CDS sequence (opt1) from neuraminidase__InfluenzaA__AHL99979
augaaccccaaccagaagaucaucaccaucggcagcgugucccugaccaucagcacgaucugcuucuucaugcagaucgccauccucaucaccaccgucgcccugcacuucaagcagcacgaguucaacuccccgcccaacaaccaggugaugcugugcgagcccaccaucaucgagcgcaacaucacggagaucguguaccucaccaacaccaccaucgagaaggagaucugccccaagccggcggaguaccggaacuggagcaagccccagugcgggaucacgggcuucgcccccuucuccaaggacaacagcauccgccuguccgccgggggcgacaucugggucacccgggagcccuacgugagcugcgacccggacaagugcuaccaguucgcccuggggcagggcaccacccucaacaacgugcacuccaacaacacgguccgcgaccggacccccuaccgcacccugcugaugaacgagcucggcgugcccuuccaccuggggaccaagcaggucugcaucgccuggagcuccagcuccugccacgacggcaaggcguggcugcacgugugcaucacgggggacgacaagaacgccaccgccagcuucaucuacaacggccggcucguggacuccguggucagcugguccaaggagauccugcgcacccaggagagcgagugcgugugcaucaacgggaccugcacgguggucaugaccgacggcuccgccagcggcaaggcggacaccaagauccuguucaucgaggaggggaagaucgugcacaccagcacgcucuccggcagcgcccagcacguggaggagugcuccugcuacccccgguacccggggguccgcugcgugugccgggacaacuggaagggcagcaaccgccccaucguggacaucaacaucaaggaccacuccaucgucagcuccuacgugugcagcggccuggugggggacaccccgcggaagaacgacuccagcuccagcucccacugccuggaccccaacaacgaggagggcgggcacggcgucaaggggugggccuucgacgacggcaacgacguguggaugggccgcaccaucaacgagaccagccggcucggguacgagacguucaaggucaucgagggcugguccaaccccaagagcaagcugcagaucaaccgccaggugaucguggaccgcggggaccgguccggcuacagcgggaucuucuccgucgagggcaagagcugcaucaaccggugcuucuacguggagcugauccgcggccggaaggaggagaccgaggugcucuggaccagcaacuccaucgucguguucugcgggaccagcggcacguacgggaccggcuccuggcccgacggggccgaccugaaccugaugcccaucuga

SEQ ID NO: 89082 - RNA, 1410 nt, Artificial Sequence; identical to SEQ ID NO: 89078
  derived and/or modified CDS sequence (opt1) from neuraminidase__InfluenzaA__AHL99991

SEQ ID NO: 89083 - RNA, 1410 nt, Artificial Sequence; identical to SEQ ID NO: 86170
  derived and/or modified CDS sequence (opt1) from neuraminidase__InfluenzaA__AHM00004

SEQ ID NO: 89084 - RNA, 1410 nt, Artificial Sequence; identical to SEQ ID NO: 86170
  derived and/or modified CDS sequence (opt1) from neuraminidase__InfluenzaA__AHM00016

SEQ ID NO: 89085 - RNA, 1410 nt, Artificial Sequence; identical to SEQ ID NO: 86170
  derived and/or modified CDS sequence (opt1) from neuraminidase__InfluenzaA__AHM00028

SEQ ID NO: 89086 - RNA, 1410 nt, Artificial Sequence; identical to SEQ ID NO: 89078
  derived and/or modified CDS sequence (opt1) from neuraminidase__InfluenzaA__AHM00040

SEQ ID NO: 89087 - RNA, 1410 nt, Artificial Sequence; identical to SEQ ID NO: 86170
  derived and/or modified CDS sequence (opt1) from neuraminidase__InfluenzaA__AHM00052

SEQ ID NO: 89088 - RNA, 1410 nt, Artificial Sequence; identical to SEQ ID NO: 87034
  derived and/or modified CDS sequence (opt1) from neuraminidase__InfluenzaA__AHM00064

SEQ ID NO: 89089 - RNA, 1410 nt, Artificial Sequence; identical to SEQ ID NO: 86170
  derived and/or modified CDS sequence (opt1) from neuraminidase__InfluenzaA__AHM00076

SEQ ID NO: 89090 - RNA, 1410 nt, Artificial Sequence; identical to SEQ ID NO: 86170
  derived and/or modified CDS sequence (opt1) from neuraminidase__InfluenzaA__AHM00088

SEQ ID NO: 89091 - RNA, 1410 nt, Artificial Sequence
  derived and/or modified CDS sequence (opt1) from neuraminidase__InfluenzaA__AHM00100
augaaccccaaccagaagaucaucaccaucggcagcaucugcaugaccaucgggauggccaaccugauccuccagaucggcaacaucaucuccaucuggaucagccacuccauccagcuggggaaccagagccagaucgagacgugcaaccaguccgugaucaccuacgagaacaacaccugggucaaccagaccuacgugaacaucagcaacacgaacuucgccgcgggccaguccguggucagcgugaagcuggccgggaacuccagccucugcccgguguccggcugggccaucuacagcaaggacaacuccauccgcaucggcagcaagggggacgucuucgugauccgggagcccuucaucuccugcagcccccuggagugccgcaccuucuuccugacccagggcgcccuccugaacgacaagcacuccaacgggaccaucaaggaccggagccccuaccgcacgcugauguccugcccgaucggcgaggugcccagccccuacaacagccgguucgaguccgucgccuggagcgcguccgccugccacgacgggaucaacuggcucaccaucggcaucagcggccccgacaacggggccguggccgugcugaaguacaacggcgucaucaccgacaccaucaaguccuggcgcaacaacauccugcggacgcaggagagcgagugcgcgugcgugaacggguccugcuucaccaucaugaccgacggcccgagcgacggccaggccuccuacaagaucuuccgcaucgagaaggggaagaucgucaagagcguggagaugaacgcccccaacuaccacuacgaggagugcuccugcuaccccgacagcuccgagaucacgugcgugugccgggacaacuggcacggcagcaaccgccccuggguguccuucaaccagaaccucgaguaccagaucggguacaucugcagcggcaucuucggggacaacccgcggcccaacgacaagaccggcuccugcggccccgucagcuccaacggggccaacggcgugaagggguucagcuucaaguacggcaacgggguguggaucggccgcaccaagagcaucuccagccggaagggcuucgagaugaucugggaccccaacggguggaccggcaccgacaacaacuucuccacgaagcaggacaucgucgggaucaacgaguggagcggcuacuccgggagcuucgugcagcacccggagcugaccggccuggacugcauccgccccugcuucuggguggagcucauccggggccgccccaaggagaacaccaucuggaccuccgggagcuccaucagcuucugcggcgucaacuccgacacggugggguggagcuggcccgacggcgccgagcugccguucaccaucgacaacuga

SEQ ID NO: 89092 - RNA, 1410 nt, Artificial Sequence; identical to SEQ ID NO: 89014
  derived and/or modified CDS sequence (opt1) from neuraminidase__InfluenzaA__AHM00111

SEQ ID NO: 89093 - RNA, 1410 nt, Artificial Sequence; identical to SEQ ID NO: 89078
  derived and/or modified CDS sequence (opt1) from neuraminidase__InfluenzaA__AHM00123

SEQ ID NO: 89094 - RNA, 1410 nt, Artificial Sequence; identical to SEQ ID NO: 87399
  derived and/or modified CDS sequence (opt1) from neuraminidase__InfluenzaA__AHM00135

SEQ ID NO: 89095 - RNA, 1410 nt, Artificial Sequence; identical to SEQ ID NO: 87907
  derived and/or modified CDS sequence (opt1) from neuraminidase__InfluenzaA__AHM00147

SEQ ID NO: 89096 - RNA, 1410 nt, Artificial Sequence; identical to SEQ ID NO: 89078
  derived and/or modified CDS sequence (opt1) from neuraminidase__InfluenzaA__AHM00159

SEQ ID NO: 89097 - RNA, 1410 nt, Artificial Sequence; identical to SEQ ID NO: 86170
  derived and/or modified CDS sequence (opt1) from neuraminidase__InfluenzaA__AHM00171

SEQ ID NO: 89098 - RNA, 1410 nt, Artificial Sequence; identical to SEQ ID NO: 86170
  derived and/or modified CDS sequence (opt1) from neuraminidase__InfluenzaA__AHM00183

SEQ ID NO: 89099 - RNA, 1410 nt, Artificial Sequence
  derived and/or modified CDS sequence (opt1) from neuraminidase__InfluenzaA__AHM00195
augaaccccaaccagaagaucaucaccaucggcagcgugucccugaccaucagcacgaucugcuucuucaugcagaucgccauccucaucaccaccgucacccugcacuucaagcaguacgaguucaacuccccgcccaacaaccaggugaugcugugcgagcccacgaucaucgagcgcaacaucaccgagaucguguaccucaccaacaccacgaucgagaaggagaucugccccaagccggccgaguaccggaacuggagcaagccccagugcgacaucaccggguucgcgcccuucuccaaggacaacagcauccgccuguccgccggcggggacaucugggucacccgggagcccuacgugagcugcgacccggacaagugcuaccaguucgcccugggccaggggaccacgcucaacaacgugcacuccaacaacaccguccgcgaccggacccccuaccgcacccugcugaugaacgagcucggcgugcccuuccaccugggcacgaagcaggucugcaucgccuggagcuccagcuccugccacgacgggaaggccuggcugcacgugugcaucaccggcgacgacaagaacgcgaccgccagcuucaucuacaacgggcggcucguggacuccguggucagcugguccaaggagauccugcgcacccaggagagcgagugcgugugcaucaacggcacgugcaccguggucaugaccgacggguccgccagcggcaaggccgacaccaaggugcuguucaucgaggagggcaagaucgugcacacgagcacccucuccgggagcgcgcagcacgucgaggagugcuccugcuacccccgguacccgggcgugcgcugcgugugccgggacaacuggaaggggagcaaccgccccaucgucgacaucaacaucaaggaccacuccaucgugagccgguacgugugcuccggccuggucggcgacacgccccgcaagaacgacagcuccagcuccagccacugccuggaccccaacaacgaggagggcgggcacggggugaagggcugggccuucgacgacgggaacgacgucuggaugggccggaccaucaacgagaccucccgccucggcuacgagaccuucaaggugaucgagggguggagcaacccgaaguccaagcugcagaucaaccgccaggugaucgucgaccggggcgaccggagcggguacuccggcaucuucagcguggaggggaaguccugcaucaaccgcugcuucuacguggagcugauccggggccgcaaggaggagaccgagguccucuggaccagcaacagcaucgugguguucugcggcacguccgggaccuacggcaccgggagcuggcccgacggcgccgaccugaaccugaugcccaucuga

SEQ ID NO: 89100 - RNA, 1410 nt, Artificial Sequence
  derived and/or modified CDS sequence (opt1) from neuraminidase__InfluenzaA__AHM00207
augaaccccaaccagaagaucaucaccaucggcagcgugucccugaccaucagcacgaucugcuucuucaugcagaucgccauccucaucaccaccgucacccugcacuucaagcagcacgaguucaacuccccgcccaacaaccaggugaugcugugcgagcccacgaucaucgagcgcaacaucaccgagaucguguaccucaccaacaccacgaucgagaaggagaucugccccaagccggccgaguaccggaacuggagcaagccccagugcgggaucaccggcuucgcgcccuucuccaaggacaacagcauccgccuguccgccgggggcaacaucugggucacccgggagcccuacgugagcugcgacccggacaagugcuaccaguucgcccuggggcagggcaccacgcucaacaacgugcacuccaacaacaccguccgcgaccggacccccuaccgcacccugcugaugaacgagcucggcgugcccuuccaccuggggacgaagcaggucugcaucgccuggagcuccagcuccugccacgacggcaaggccuggcugcacgugugcaucaccggggacgacaagaacgcgaccgccagcuucaucuacaacggccggcucguggacuccguggucagcugguccaaggagauccugcgcacccaggagagcgagugcgugugcaucaacgggacgugcaccguggucaugaccgacggcuccgccagcggcaaggccgacaccaagauccuguucaucgaggaggggaagaucgugcacacgagcacccucuccggcagcgcgcagcacguggaggagugcuccugcuacccccgguacccggggguccgcugcgugugccgggacaacuggaagggcagcaaccgccccaucguggacaucaacaucaaggaccacuccaucgucagcuccuacgugugcagcggccuggugggggacaccccgcggaagaacgacuccagcuccagcucccacugccuggaccccaacaacgaggagggcgggcacggcgucaaggggugggccuucgacgacggcaacgacguguggaugggccgcaccaucaacgagacgagccggcucggguacgagaccuucaaggucaucgagggcugguccaaccccaagagcaagcugcagaucaaccgccaggugaucguggaccgcggggaccgguccggcuacagcgggaucuucuccgucgagggcaagagcugcaucaaccggugcuucuacguggagcugauccgcggccggaaggaggagaccgaggugcucuggaccagcaacuccaucgucguguucugcgggacgagcggcaccuacgggaccggcuccuggcccgacggggccgaccugaaccugaugcccaucuga

SEQ ID NO: 89101 - RNA, 1410 nt, Artificial Sequence; identical to SEQ ID NO: 89078
  derived and/or modified CDS sequence (opt1) from neuraminidase__InfluenzaA__AHM00219

SEQ ID NO: 89102 - RNA, 1410 nt, Artificial Sequence; identical to SEQ ID NO: 86170
  derived and/or modified CDS sequence (opt1) from neuraminidase__InfluenzaA__AHM00231

SEQ ID NO: 89103 - RNA, 1410 nt, Artificial Sequence; identical to SEQ ID NO: 86170
  derived and/or modified CDS sequence (opt1) from neuraminidase__InfluenzaA__AHM00243

SEQ ID NO: 89104 - RNA, 1410 nt, Artificial Sequence; identical to SEQ ID NO: 86170
  derived and/or modified CDS sequence (opt1) from neuraminidase__InfluenzaA__AHM00255

SEQ ID NO: 89105 - RNA, 1410 nt, Artificial Sequence
  derived and/or modified CDS sequence (opt1) from neuraminidase__InfluenzaA__AHM00267
augaaccccaaccagaagaucaucaccaucggcagcgugucccugaccaucagcacgaucugcuucuucaugcagaucgccauccucaucaccaccgucacccugcacuucaagcaguacgaguucaacuccccgcccaacaaccaggugaugcugugcgagcccacgaucaucgagcgcaacaucaccgagaucguguaccucaccaacaccacgaucgagaaggagaucugccccaagccggccgaguaccggaacuggagcaagccccagugcgggaucaccggcuucgcgcccuucuccaaggacaacagcauccgccuguccgccgggggcgacaucugggucacccgggagcccuacgugagcugcgacccggacaagugcuaccaguucgcccuggggcagggcaccacgcucaacaacgugcacuccaacaacaccguccgcgaccggacccccuaccgcacccugcugaugaacgagcucggcgugcccuuccaccuggggacgaagcaggucugcaucgccuggagcuccagcuccugccacgacggcaaggccuggcugcacgugugcaucaccggggacgacaagaacgcgaccgccagcuucaucuacaacggccggcucguggacuccguggccagcugguccaaggagauccugcgcacccaggagagcgagugcgucugcaucaacgggacgugcaccguggugaugaccgacggcuccgccagcggcaaggcggacaccaagauccuguucaucgaggaggggaagaucguccacacgagcacccucuccggcagcgcccagcacguggaggagugcuccugcuacccccgguacccgggggugcgcugcgucugccgggacaacuggaagggcagcaaccgccccaucguggacaucaacaucaaggaccacuccaucgugagcuccuacgucugcagcggccuggugggggacaccccgcggaagaacgacuccagcuccagcucccacugccuggaccccaacaacgaggagggcgggcacggcgugaaggggugggccuucgacgacggcaacgacgucuggaugggccgcaccaucaacgagacgagccggcucggguacgagaccuucaaggugaucgagggcugguccaaccccaagagcaagcugcagaucaaccgccaggucaucguggaccgcggggaccgguccggcuacagcgggaucuucuccguggagggcaagagcugcaucaaccggugcuucuacgucgagcugauccgcggccggaaggaggagaccgaggugcucuggaccagcaacuccaucguggucuucugcgggacgagcggcaccuacgggaccggcuccuggcccgacggggccgaccugaaccugaugcccaucuga

SEQ ID NO: 89106 - RNA, 1410 nt, Artificial Sequence; identical to SEQ ID NO: 87399
  derived and/or modified CDS sequence (opt1) from neuraminidase__InfluenzaA__AHM00279

SEQ ID NO: 89107 - RNA, 1410 nt, Artificial Sequence; identical to SEQ ID NO: 86170
  derived and/or modified CDS sequence (opt1) from neuraminidase__InfluenzaA__AHM00291

SEQ ID NO: 89108 - RNA, 1410 nt, Artificial Sequence; identical to SEQ ID NO: 86170
  derived and/or modified CDS sequence (opt1) from neuraminidase__InfluenzaA__AHM00303

SEQ ID NO: 89109 - RNA, 1410 nt, Artificial Sequence; identical to SEQ ID NO: 86170
  derived and/or modified CDS sequence (opt1) from neuraminidase__InfluenzaA__AHM00315

SEQ ID NO: 89110 - RNA, 1410 nt, Artificial Sequence; identical to SEQ ID NO: 87399
  derived and/or modified CDS sequence (opt1) from neuraminidase__InfluenzaA__AHM00327

SEQ ID NO: 89111 - RNA, 1410 nt, Artificial Sequence; identical to SEQ ID NO: 87399
  derived and/or modified CDS sequence (opt1) from neuraminidase__InfluenzaA__AHM00339

SEQ ID NO: 89112 - RNA, 1410 nt, Artificial Sequence; identical to SEQ ID NO: 89078
  derived and/or modified CDS sequence (opt1) from neuraminidase__InfluenzaA__AHM00351

SEQ ID NO: 89113 - RNA, 1410 nt, Artificial Sequence; identical to SEQ ID NO: 89014
  derived and/or modified CDS sequence (opt1) from neuraminidase__InfluenzaA__AHM00363

SEQ ID NO: 89114 - RNA, 1410 nt, Artificial Sequence
  derived and/or modified CDS sequence (opt1) from neuraminidase__InfluenzaA__AHM00375
augaaccccaaccagaagaucaucaccaucggcagcgugucccugaccaucagcacgaucugcuucuucaugcagaucgccauccucaucaccaccgucacccugcacuucaagcagcacgaguucaacuccccgcccaacaaccaggugaugcugugcgagcccacgaucaucgagcgcaacaucaccgagaucguguaccucaccaacaccacgaucgagaaggaggucugccccaagccggccgaguaccggaacuggagcaagccccagugcgggaucaccggcuucgcgcccuucuccaaggacaacagcauccgccuguccgccgggggcgacaucugggugacccgggagcccuacgugagcugcgacccggacaagugcuaccaguucgcccuggggcagggcaccacgcucaacaacguccacuccaacaacaccgugcgcgaccggacccccuaccgcacccugcugaugaacgagcucggcgugcccuuccaccuggggacgaagcaggucugcaucgccuggagcuccagcuccugccacgacggcaaggccuggcugcacgugugcaucaccggggacgacaagaacgcgaccgccagcuucaucuacaacggccggcucguggacuccgucgugagcugguccaaggagauccugcgcacccaggagagcgagugcgugugcaucaacgggacgugcaccgucgugaugaccgacggcuccgccagcggcaaggccgacaccaagauccuguucaucgaggaggggaagaucgugcacacgagcacccucuccggcagcgcgcagcacgucgaggagugcuccugcuacccccgguacccgggggugcgcugcgugugccgggacaacuggaagggcagcaaccgccccaucgucgacaucaacaucaaggaccacuccaucgugagcuccuacgugugcagcggccuggucggggacaccccgcggaagaacgacuccagcuccagcucccacugccuggaccccaacaacgaggagggcgggcacggcgugaaggggugggccuucgacgacggcaacgacgucuggaugggccgcaccaucaacgagacgagccggcucggguacgagaccuucaaggugaucgagggcugguccaaccccaagagcaagcugcagaucaaccgccaggugaucgucgaccgcggggaccgguccggcuacagcgggaucuucuccguggagggcaagagcugcaucaaccggugcuucuacguggagcugauccgcggccggaaggaggagaccgagguccucuggaccagcaacuccaucgugguguucugcgggacgagcggcaccuacgggaccggcuccuggcccgacggggccgaccugaaccugaugcccaucuga

SEQ ID NO: 89115 - RNA, 1410 nt, Artificial Sequence
  derived and/or modified CDS sequence (opt1) from neuraminidase__InfluenzaA__AHM00398
augaaccccaaccagaagaucaucaccaucggcagcgugucccugaccaucagcacgaucugcuucuucaugcagaucgccauccucaucaccaccgucacccugcacuucaagcagcacgaguucaacuccccgcccaacaaccaggugaugcugugcgagcccacgaucaucgagcgcaacaucaccgagaucguguaccucaccaacaccacgaucgagaaggagaucugccccaagccggccgaguaccggaacuggagcaagccccagugcgggaucaccggcuucgcgcccuucuccaaggagaacagcauccgccuguccgccgggggcgacaucugggucacccgggagcccuacgugagcugcgacccggacaagugcuaccaguucgcccuggggcagggcaccacgcucaacaacgugcacuccaacaacaccguccgcgaccggacccccuaccgcacccugcugaugaacgagcucggcgugcccuuccaccuggggacgaagcaggucugcaucgccuggagcuccagcuccugccacgacggcaaggccuggcugcacgugugcaucaccggggacgacaagaacgcgaccgccagcuucaucuacaacggccggcucguggacuccguggucagcugguccaaggagauccugcgcacccaggagagcgagugcgugugcaucaacgggacgugcaccguggucaugaccgacggcuccgccagcggcaaggccgacaccaagauccuguucaucgaggaggggaagaucgugcacacgagcacccucuccggcagcgcgcagcacguggaggagugcuccugcuacccccgguacccggggguccgcugcgugugccgggacaacuggaagggcagcaaccgccccaucguggacaucaacaucaaggaccacuccaucgucagcuccuacgugugcagcggccuggugggggacaccccgcggaagaacgacuccagcuccagcucccacugccuggaccccaacaacgaggagggcgggcacggcgucaaggggugggccuucgacgacggcaacgacguguggaugggccgcaccaucaacgagacgagccggcucggguacgagaccuucaaggucaucgagggcugguccaaccccaagagcaagcugcagaucaaccgccaggugaucguggaccgcggggaccgguccggcuacagcgggaucuucuccgucgagggcaagagcugcaucaaccggugcuucuacguggagcugauccgcggccggaaggaggagaccgaggugcucuggaccagcuccagcaucgucguguucugcgggacguccggcaccuacgggaccggcagcuggcccgacggggccgaccugaaccugaugcccaucuga

SEQ ID NO: 89116 - RNA, 1410 nt, Artificial Sequence; identical to SEQ ID NO: 86170
  derived and/or modified CDS sequence (opt1) from neuraminidase__InfluenzaA__AHM00410

SEQ ID NO: 89117 - RNA, 1410 nt, Artificial Sequence
  derived and/or modified CDS sequence (opt1) from neuraminidase__InfluenzaA__AHM00422
augaaccccaaccagaagaucaucaccaucggcagcgugucccugaccaucagcacgaucugcuucuucaugcagaucgccauccucgucaccaccgugacccugcacuucaagcaguacgaguucaacuccccgcccaacaaccaggugaugcugugcgagcccacgaucaucgagcgcaacaucaccgagaucgucuaccucaccaacaccacgaucgagaaggagaucugccccaagccggccgaguaccggaacuggagcaagccccagugcgggaucaccggcuucgcgcccuucuccaaggacaacagcauccgccuguccgccgggggcgacaucugggugacccgggagcccuacgugagcugcgacccggacaagugcuaccaguucgcccuggggcagggcaccacgcucaacaacguccacuccaacaacaccgugcgcgaccggacccccuaccgcacccugcugaugaacgagcucggcgugcccuuccaccuggggacgaagcaggucugcaucgccuggagcuccagcuccugccacgacggcaaggccuggcugcacgugugcaucaccggggacgacaagaacgcgaccgccagcuucaucuacaacggccggcucguggacuccgucgugagcugguccaaggagauccugcgcacccaggagagcgagugcgugugcaucaacgggacgugcaccgucgugaugaccgacggcuccgccagcggcaaggccgacaccaagauccuguucaucgaggaggggaagaucgugcacacgagcacccucuccggcagcgcgcagcacgucgaggagugcuccugcuacccccgguacccgggggugcgcugcgugugccgggacaacuggaagggcagcaaccgccccaucgucgacaucaacaucaaggaccacuccaucgugagcuccuacgugugcagcggccuggucggggacaccccgcggaagaacgacuccagcuccagcucccacugccuggaccccaacaacgaggagggcgggcacggcgugaaggggugggccuucgacgacggcaacgacgucuggaugggccgcaccaucaacgagacgagccggcucggguacgagaccuucaaggugaucgagggcugguccaaccccaagagcaagcugcagaucaaccgccaggugaucgucgaccgcggggaccgguccggcuacagcgggaucuucuccguggagggcaagagcugcaucaaccggugcuucuacguggagcugauccgcggccggaaggaggagaccgagguccucuggaccagcaacuccaucgugguguucugcgggacgagcggcaccuacgggaccggcuccuggcccgacggggccgaccugaaccugaugcccaucuga

SEQ ID NO: 89118 - RNA, 1410 nt, Artificial Sequence
  derived and/or modified CDS sequence (opt1) from neuraminidase__InfluenzaA__AHM00434
augaaccccaaccagaagaucaucaccaucggcagcgugucccugaccaucagcacgaucugcuucuucaugcagaucgccauccucaucaccaccgucacccugcacuucaagcaguacgaguucaacccgccgcccaacaaccaggugaugcugugcgagcccacgaucaucgagcgcaacaucaccgagaucguguaccucaccaacaccacgaucgagaaggagaucugccccaagcccgccgaguaccggaacugguccaagccccagugcgggaucaccggcuucgcgcccuucagcaaggacaacuccauccgccugagcgccgggggcgacaucugggucacccgggagccguacguguccugcgaccccgacaagugcuaccaguucgcccuggggcagggcaccacgcucaacaacgugcacagcaacaacaccguccgcgaccggacccccuaccgcacccugcugaugaacgagcucggcgugcccuuccaccuggggacgaagcaggucugcaucgccugguccagcuccagcugccacgacggcaaggccuggcugcacgugugcaucaccggggacgacaagaacgcgaccgccuccuucaucuacaacggccggcucguggacagcguggucuccuggagcaaggagauccugcgcacccaggaguccgagugcgugugcaucaacgggacgugcaccguggucaugaccgacggcagcgccuccggcaaggccgacaccaagauccuguucaucgaggaggggaagaucgugcacacgagcacccucagcggcuccgcgcagcacguggaggagugcagcugcuacccgcgguaccccgggguccgcugcgugugccgggacaacuggaagggcuccaaccgccccaucguggacaucaacaucaaggaccacagcaucgucuccagcuacgugugcuccggccuggugggggacacgccccggaagaacgacagcuccagcuccagccacugccuggacccgaacaacgaggagggcgggcacggcgucaaggggugggccuucgacgacggcaacgacguguggaugggccgcaccaucaacgagaccucccggcucggguacgagaccuucaaggucaucgagggcuggagcaaccccaaguccaagcugcagaucaaccgccaggugaucguggaccgcggggaccggagcggcuacuccgggaucuucagcgucgagggcaaguccugcaucaaccggugcuucuacguggagcugauccgcggccggaaggaggagaccgaggugcucuggaccagcaacagcaucgucguguucugcgggacguccggcaccuacgggaccggcagcuggcccgacggggccgaccugaaccugaugcccaucuga

SEQ ID NO: 89119 - RNA, 1410 nt, Artificial Sequence; identical to SEQ ID NO: 86170
  derived and/or modified CDS sequence (opt1) from neuraminidase__InfluenzaA__AHM00446

SEQ ID NO: 89120 - RNA, 1410 nt, Artificial Sequence; identical to SEQ ID NO: 89078
  derived and/or modified CDS sequence (opt1) from neuraminidase__InfluenzaA__AHM00458

SEQ ID NO: 89121 - RNA, 1410 nt, Artificial Sequence; identical to SEQ ID NO: 89078
  derived and/or modified CDS sequence (opt1) from neuraminidase__InfluenzaA__AHM00470

SEQ ID NO: 89122 - RNA, 1410 nt, Artificial Sequence; identical to SEQ ID NO: 89078
  derived and/or modified CDS sequence (opt1) from neuraminidase__InfluenzaA__AHM00482

SEQ ID NO: 89123 - RNA, 1410 nt, Artificial Sequence; identical to SEQ ID NO: 89078
  derived and/or modified CDS sequence (opt1) from neuraminidase__InfluenzaA__AHM00494

SEQ ID NO: 89124 - RNA, 1410 nt, Artificial Sequence
  derived and/or modified CDS sequence (opt1) from neuraminidase__InfluenzaA__AHM00506
augaaccccaaccagaagaucaucaccaucggcagcgugucccugaccaucagcacgaucugcuucuucaugcagaucgccauccucaucaccaccgucacccugcacuucaagcaguacgaguucaacuccccgcccaacaaccaggugaugcugugcgagcccacgaucaucgagcgcaacaucaccgagaucguguaccucaccaacaccacgaucgagaaggagaucugccccaagccggccgaguaccggaacuggagcaagccccagugcgggaucaccggcuucgcgcccuucuccaaggacaacagcauccgccuguccgccgggggcgacaucugggucacccgggagcccuacgugagcugcgacccggacaagugcuaccaguucgcccuggggcagggcaccacgcucaacaacgugcacuccaacaacaccguccgcgaccggacccccuaccgcacccugcugaugaacgagcucggcgugcccuuccaccuggggacgaagcaggucugcaucgccuggagcuccagcuccugccacgacggcaaggccuggcugcacgugugcaucaccggggacgacaagaacgcgaccgccagcuucaucuacaacggccggcucguggacuccguggucagcugguccaaggagauccugcgcacccaggagagcgagugcgugugcaucaacgggacgugcaccguggucaugaccgacggcuccgccagcggcaaggccgacaccaagauccuguucaucgaggaggggaagaucgugcacacgagcacccucuccggcagcgcgcagcacguggaggagugcuccugcuacccccgguacccggggguccgcugcgugugccgggacaacuggaagggcagcaaccgccccaucguggacaucaacaucaaggaccacuccaucgucagcuccuacgugugcagcggccuggugggggacaccccgcggaagaacgacuccagcuccagcucccacugccuggaccccaacaacgaggagggcgggcacggcgucaaggggugggccuucgacgacggcaacgacguguggaugggccgcaccaucaacgagacgagccggcucggguacgagaccuucaaggucaucgagggcugguccaaccccaagagcaagcugcagaucaaccgccaggugaucgugaaccgcggggaccgguccggcuacagcgggaucuucuccgucgagggcaagagcugcaucaaccggugcuucuacguggagcugauccgcggccggaaggaggagaccgaggugcucuggaccagcaacuccaucgucguguucugcgggacgagcggcaccuacgggaccggcuccuggcccgacggggccgaccugaaccugaugcccaucuga

SEQ ID NO: 89125 - RNA, 1410 nt, Artificial Sequence; identical to SEQ ID NO: 86170
  derived and/or modified CDS sequence (opt1) from neuraminidase__InfluenzaA__AHM00518

SEQ ID NO: 89126 - RNA, 1410 nt, Artificial Sequence
  derived and/or modified CDS sequence (opt1) from neuraminidase__InfluenzaA__AHM00530
augaaccccaaccagaagaucaucaccaucggcagcgugucccugaccaucagcacgaucugcuucuccaugcagaucgccauccucaucaccaccgucacccugcacuucaagcaguacgaguucaacccgccgcccaacaaccaggugaugcugugcgagcccacgaucaucgagcgcaacaucaccgagaucguguaccucaccaacaccacgaucgagaaggagaucugccccaagcccgccgaguaccggaacuggagcaagccccagugcgggaucaccggcuucgcgcccuucuccaaggacaacagcauccgccuguccgccgggggcgacaucugggucacccgggagccguacgugagcugcgaccccgacaagugcuaccaguucgcccuggggcagggcaccacgcucaacaacgugcacuccaacaacaccguccgcgaccggacccccuaccgcacccugcugaugaacgagcucggcgugcccuuccaccuggggacgaagcaggucugcaucgccuggagcuccagcuccugccacgacggcaaggccuggcugcacgugugcaucaccggggacgacaagaacgcgaccgccagcuucaucuacaacggccggcucguggacuccguggucagcugguccaaggagauccugcgcacccaggagagcgagugcgugugcaucaacgggacgugcaccguggucaugaccgacggcuccgccagcggcaaggccgacaccaagauccuguucaucgaggaggggaagaucgugcacacgagcacccucuccggcagcgcgcagcacguggaggagugcuccugcuacccgcgguaccccgggguccgcugcgugugccgggacaacuggaagggcagcaaccgccccaucguggacaucaacaucaaggaccacuccaucgucagcuccuacgugugcagcggccuggugggggacacgccccggaagaacgacuccagcuccagcucccacugccuggacccgaacaacgaggagggcgggcacggcgucaaggggugggccuucgacgacggcaacgacguguggaugggccgcaccaucaacgagaccagccggcucggguacgagaccuucaaggucaucgagggcugguccaaccccaagagcaagcugcagaucaaccgccaggugaucguggaccgcggggaccgguccggcuacagcgggaucuucuccgucgagggcaagagcugcaucaaccggugcuucuacguggagcugauccgcggccggaaggaggagaccgaggugcucuggaccagcaacuccaucgucguguucugcgggacgagcggcaccuacgggaccggcuccuggcccgacggggccgaccugaaccugaugcccaucuga

SEQ ID NO: 89127 - RNA, 1410 nt, Artificial Sequence; identical to SEQ ID NO: 87399
  derived and/or modified CDS sequence (opt1) from neuraminidase__InfluenzaA__AHM00542

SEQ ID NO: 89128 - RNA, 1410 nt, Artificial Sequence
  derived and/or modified CDS sequence (opt1) from neuraminidase__InfluenzaA__AHM00546
augaaccccaaccagaagaucaucaccaucggcagcgugucccugaccaucagcacgaucugcuucuucaugcagaucgccauccucaucaccaccgucacccugcacuucaagcaguacgaguucaacuccccgcccaacaaccaggugaugcugugcgagcccacgaucaucgagcgcaacaucaccgagaucguguaccucaccaacaccacgaucgagaaggagaucugccccaagccggccgaguaccggaacuggagcaagccccagugcgacaucaccggguucgcgcccuucuccaaggacaacagcauccgccuguccgccggcggggacaucugggucacccgggagcccuacgugagcugcgacccggacaagugcuaccaguucgcccugggccaggggaccacgcucaacaacgugcacuccaacaacaccguccgcgaccggacccccuaccgcacccugcugaugaacgagcucggcgugcccuuccaccugggcacgaagcaggucugcaucgccuggagcuccagcuccugccacgacgggaaggccuggcugcacgugugcaucaccggcgacgacaagaacgcgaccgccagcuucaucuacaacgggcggcucguggacuccguggucagcugguccaaggagauccugcgcacccaggagagcgagugcgugugcaucaacggcacgugcaccguggucaugaccgacggguccgccagcggcaaggccgacaccaagauccuguucaucgaggagggcaagaucgugcacacgagcacccucuccgggagcgcgcagcacguggaggagugcuccugcuacccccgguacccgggcguccgcugcgugugccgggacaacuggaaggggagcaaccgccccaucguggacaucaacaucaaggaccacuccaucgucagcaaguacgugugcuccggccuggugggcgacacgccccggaagaacgacagcuccagcuccagccacugccuggaccccaacaacgaggagggcgggcacggggucaagggcugggccuucgacgacgggaacgacguguggaugggccgcaccaucaacgagaccucccggcucggcuacgagaccuucaaggucaucgagggguggagcaacccgaaguccaagcugcagaucaaccgccaggugaucguggaccggggcgaccgcagcggguacuccggcaucuucagcgucgaggggaaguccugcaucaaccggugcuucuacguggagcugauccgcggccggaaggaggagaccgaggugcucuggaccagcaacagcaucgucguguucugcggcacguccgggaccuacggcaccgggagcuggcccgacggcgccgaccugaaccugaugcccaucuga

SEQ ID NO: 89129 - RNA, 1410 nt, Artificial Sequence
  derived and/or modified CDS sequence (opt1) from neuraminidase__InfluenzaA__AHM00558
augaaccccaaccagaagaucaucaccaucggcagcgugucccugaccaucagcacgaucugcuucuucaugcagaucgccauccucaucaccaccgucacccugcacuucaagcaguacgaguucaacuccccgcccaacaaccaggugaugcugugcgagcccacgaucaucgagcgcaacaucaccgagaucguguaccucaccaacaccacgaucgagaaggaggucugccccaagccggccgaguaccggaacuggagcaagccccagugcgggaucaccggcuucgcgcccuucuccaaggacaacagcauccgccuguccgccgggggcgacaucugggugacccgggagcccuacgugagcugcgacccggacaagugcuaccaguucgcccuggggcagggcaccacgcucaacaacguccacuccaacaacaccgugcgcgaccggacccccuaccgcacccugcugaugaacgagcucggcgugcccuuccaccuggggacgaagcaggucugcaucgccuggagcuccagcuccugccacgacggcaaggccuggcugcacgugugcaucaccggggacgacaagaacgcgaccgccagcuucaucuacaacggccggcucguggacuccgucgugagcugguccaaggagauccugcgcacccaggagagcgagugcgugugcaucaacgggacgugcaccgucgugaugaccgacggcuccgccagcggcaaggccgacaccaagauccuguucaucgaggaggggaagaucgugcacacgagcacccucuccggcagcgcgcagcacgucgaggagugcuccugcuacccccgguacccgggggugcgcugcgugugccgggacaacuggaagggcagcaaccgccccaucgucgacaucaacaucaaggaccacuccaucgugagcuccuacgugugcagcggccuggucggggacaccccgcggaagaacgacuccagcuccagcucccacugccuggaccccaacaacgaggagggcgggcacggcgugaaggggugggccuucgacgacggcaacgacgucuggaugggccgcaccaucaacgagacgagccggcucggguacgagaccuucaaggugaucgagggcugguccaaccccaagagcaagcugcagaucaaccgccaggugaucgucgaccgcggggaccgguccggcuacagcgggaucuucuccguggagggcaagagcugcaucaaccggugcuucuacguggagcugauccgcggccggaaggaggagaccgagguccucuggaccagcaacuccaucgugguguucugcgggacgagcggcaccuacgggaccggcuccuggcccgacggggccgaccugaaccugaugcccaucuga

SEQ ID NO: 89130 - RNA, 1410 nt, Artificial Sequence; identical to SEQ ID NO: 86170
  derived and/or modified CDS sequence (opt1) from neuraminidase__InfluenzaA__AHM00570

SEQ ID NO: 89131 - RNA, 1410 nt, Artificial Sequence; identical to SEQ ID NO: 86170
  derived and/or modified CDS sequence (opt1) from neuraminidase__InfluenzaA__AHM00582

SEQ ID NO: 89132 - RNA, 1410 nt, Artificial Sequence
  derived and/or modified CDS sequence (opt1) from neuraminidase__InfluenzaA__AHM00594
augaaccccaaccagaagaucaucaccaucggcagcgugucccugaccaucagcacgaucugcuucuucaugcagaucgccauccucaucaccaccgucacccugcacuucaagcagcacgaguucaacuccccgcccaacaaccaggugaugcugugcgagcccacgaucaucgagcgcaacaucaccgagaucgugcaccucaccaacaccacgaucgagaaggagaucugccccaagccggccgaguaccggaacuggagcaagccccagugcgggaucaccggcuucgcgcccuucuccaaggacaacagcauccgccuguccgccgggggcgacaucugggucacccgggagcccuacgugagcugcgacccggacaagugcuaccaguucgcccuggggcagggcaccacgcucaacaacgugcacuccaacaacaccguccgcgaccggacccccuaccgcacccugcugaugaacgagcucggcgugcccuuccaccuggggacgaagcaggucugcaucgccuggagcuccagcuccugccacgacggcaaggccuggcugcacgugugcaucaccggggacgacaagaacgcgaccgccagcuucaucuacaacggccggcucguggacuccguggucagcugguccaaggagauccugcgcacccaggagagcgagugcgugugcaucaacgggacgugcaccguggucaugaccgacggcuccgccagcggcaaggccgacaccaagauccuguucaucgaggaggggaagaucgugcacacgagcacccucuccggcagcgcgcagcacguggaggagugcuccugcuacccccgguacccggggguccgcugcgugugccgggacaacuggaagggcagcaaccgccccaucguggacaucaacaucaaggaccacuccaucgucagcuccuacgugugcagcggccuggugggggacaccccgcggaagaacgacuccagcuccagcucccacugccuggaccccaacaacgaggagggcgggcacggcgucaaggggugggccuucgacgacggcaacgacguguggaugggccgcaccaucaacgagacgagccggcucggguacgagaccuucaaggucaucgagggcugguccaaccccaagagcaagcugcagaucaaccgccaggugaucguggaccgcggggaccgguccggcuacagcgggaucuucuccgucgagggcaagagcugcaucaaccggugcuucuacguggagcugauccgcggccggaaggaggagaccgaggugcucuggaccagcaacuccaucgucguguucugcgggacgagcggcaccuacgggaccggcuccuggcccgacggggccgaccugaaccugaugcccaucuga

SEQ ID NO: 89133 - RNA, 1410 nt, Artificial Sequence; identical to SEQ ID NO: 86170
  derived and/or modified CDS sequence (opt1) from neuraminidase__InfluenzaA__AHM00606

SEQ ID NO: 89134 - RNA, 1410 nt, Artificial Sequence; identical to SEQ ID NO: 86170
  derived and/or modified CDS sequence (opt1) from neuraminidase__InfluenzaA__AHM00618

SEQ ID NO: 89135 - RNA, 1410 nt, Artificial Sequence; identical to SEQ ID NO: 86170
  derived and/or modified CDS sequence (opt1) from neuraminidase__InfluenzaA__AHM00630

SEQ ID NO: 89136 - RNA, 1410 nt, Artificial Sequence; identical to SEQ ID NO: 86170
  derived and/or modified CDS sequence (opt1) from neuraminidase__InfluenzaA__AHM00642

SEQ ID NO: 89137 - RNA, 1410 nt, Artificial Sequence; identical to SEQ ID NO: 87399
  derived and/or modified CDS sequence (opt1) from neuraminidase__InfluenzaA__AHM00654

SEQ ID NO: 89138 - RNA, 1410 nt, Artificial Sequence; identical to SEQ ID NO: 86170
  derived and/or modified CDS sequence (opt1) from neuraminidase__InfluenzaA__AHM00666

SEQ ID NO: 89139 - RNA, 1410 nt, Artificial Sequence; identical to SEQ ID NO: 89078
  derived and/or modified CDS sequence (opt1) from neuraminidase__InfluenzaA__AHM00678

SEQ ID NO: 89140 - RNA, 1410 nt, Artificial Sequence; identical to SEQ ID NO: 87413
  derived and/or modified CDS sequence (opt1) from neuraminidase__InfluenzaA__AHM00690

SEQ ID NO: 89141 - RNA, 1410 nt, Artificial Sequence; identical to SEQ ID NO: 87399
  derived and/or modified CDS sequence (opt1) from neuraminidase__InfluenzaA__AHM00701

SEQ ID NO: 89142 - RNA, 1410 nt, Artificial Sequence
  derived and/or modified CDS sequence (opt1) from neuraminidase__InfluenzaA__AHM00713
augaaccccaaccagaagaucaucaccaucggcagcgugucccugaccaucagcacgaucugcuucuucaugcagaucgccauccucaucaccaccgucacccugcacuucaagcaguacgaguucaacuccccgcccaacaaccaggugaugcugugcgagcccacgaucaucgagcgcaacaucaccgagaucguguaccucaccaacaccacgaucgagaaggagaucugccccaagagcgccgaguaccggaacugguccaagccgcagugcgggaucaccggcuucgcgcccuucagcaaggacaacuccauccgccugagcgccgggggcgacaucugggucacccgggagcccuacguguccugcgaccccgacaagugcuaccaguucgcccuggggcagggcaccacgcucaacaacgugcacagcaacaacaccguccgcgaccggaccccguaccgcacccugcugaugaacgagcucggcgugcccuuccaccuggggacgaagcaggucugcaucgccugguccagcuccagcugccacgacggcaaggccuggcugcacgugugcaucaccggggacgacaagaacgcgaccgccuccuucaucuacaacggccggcucguggacagcguggucuccuggagcaaggagauccugcgcacccaggaguccgagugcgugugcaucaacgggacgugcaccguggucaugaccgacggcagcgccagcggcaaggccgacaccaagauccuguucaucgaggaggggaagaucgugcacacguccacccucagcggcuccgcgcagcacguggaggagugcagcugcuacccccgguaccccgggguccgcugcgugugccgggacaacuggaagggcuccaaccgcccgaucguggacaucaacaucaaggaccacagcaucgucuccagcuacgugugcuccggccuggugggggacacgccccggaagaacgacagcuccagcuccagccacugccuggaccccaacaacgaggagggcgggcacggcgucaaggggugggccuucgacgacggcaacgacguguggaugggccgcaccaucaacgagaccucccggcucggguacgagaccuucaaggucaucgagggcuggagcaaccccaaguccaagcugcagaucaaccgccaggugaucguggaccgcggggaccggagcggcuacuccgggaucuucagcgucgagggcaagagcugcaucaaccggugcuucuacguggagcugauccgcggccggaaggaggagaccgaggugcucuggaccuccaacagcaucgucguguucugcgggacguccggcaccuacgggaccggcagcuggccggacggggccgaccugaaccugaugcccaucuga

SEQ ID NO: 89143 - RNA, 1410 nt, Artificial Sequence; identical to SEQ ID NO: 86170
  derived and/or modified CDS sequence (opt1) from neuraminidase__InfluenzaA__AHM00725

SEQ ID NO: 89144 - RNA, 1410 nt, Artificial Sequence; identical to SEQ ID NO: 86170
  derived and/or modified CDS sequence (opt1) from neuraminidase__InfluenzaA__AHM00737

SEQ ID NO: 89145 - RNA, 1410 nt, Artificial Sequence; identical to SEQ ID NO: 89078
  derived and/or modified CDS sequence (opt1) from neuraminidase__InfluenzaA__AHM00749

SEQ ID NO: 89146 - RNA, 1410 nt, Artificial Sequence; identical to SEQ ID NO: 86170
  derived and/or modified CDS sequence (opt1) from neuraminidase__InfluenzaA__AHM00761

SEQ ID NO: 89147 - RNA, 1410 nt, Artificial Sequence; identical to SEQ ID NO: 87399
  derived and/or modified CDS sequence (opt1) from neuraminidase__InfluenzaA__AHM00785

SEQ ID NO: 89148 - RNA, 1410 nt, Artificial Sequence; identical to SEQ ID NO: 87034
  derived and/or modified CDS sequence (opt1) from neuraminidase__InfluenzaA__AHM00797

SEQ ID NO: 89149 - RNA, 1410 nt, Artificial Sequence
  derived and/or modified CDS sequence (opt1) from neuraminidase__InfluenzaA__AHM00809
augaaccccaaccagaagaucaucaccaucggcagcgugucccugaccaucagcacgaucugcuucuucauccagaucgccauccucaucaccaccgucacccugcacuucaagcaguacgaguucaacuccccgcccaacaaccaggugaugcugugcgagcccacgaucaucgagcgcaacaucaccgagaucguguaccucaccaacaccacgaucgagaaggagaucugccccaagccggccgaguaccggaacuggagcaagccccagugcgacaucaccggguucgcgcccuucuccaaggacaacagcauccgccuguccgccggcggggacaucugggucacccgggagcccuacgugagcugcgacccggacaagugcuaccaguucgcccugggccaggggaccacgcucaacaacaugcacuccaacaacaccgugcgcgaccggacccccuaccgcacccugcugaugaacgagcucggcguccccuuccaccugggcacgaagcaggucugcaucgccuggagcuccagcuccugccacgacgggaaggccuggcugcacgugugcaucaccggcgacgacaagaacgcgaccgccagcuucaucuacaacgggcggcucguggacuccguggugagcugguccaaggagauccugcgcacccaggagagcgagugcgucugcaucaacggcacgugcaccguggugaugaccgacggguccgccagcggcaaggccgacaccaagauccuguucaucgaggagggcaagaucguccacacgagcacccucuccgggagcgcgcagcacguggaggagugcuccugcuacccccgguacccgggcgugcgcugcgucugccgggacaacuggaaggggagcaaccgccccaucguggacaucaacaucaaggaccacuccaucgugagcuccuacgucugcagcggccuggugggcgacaccccgcggaagaacgacuccagcuccagcucccacugccuggaccccaacaacgaggagggcgggcacggggugaagggcugggccuucgacgacgggaacgacgucuggaugggccgcaccaucaacgagacgagccggcucggcuacgagaccuucaaggugaucgaggggugguccaaccccaagagcaagcugcagaucaaccgccaggucaucguggaccggggcgaccgcuccggguacagcggcaucuucuccguggagggcaagagcugcaucaaccggugcuucuacgucgagcugauccgcgggcggaaggaggagaccgaggugcucuggaccagcaacuccaucguggucuucugcggcacgagcgggaccuacggcaccggguccuggcccgacggcgccgaccugaaccugaugcccaucuga

SEQ ID NO: 89150 - RNA, 1410 nt, Artificial Sequence; identical to SEQ ID NO: 89078
  derived and/or modified CDS sequence (opt1) from neuraminidase__InfluenzaA__AHM00821

SEQ ID NO: 89151 - RNA, 1410 nt, Artificial Sequence; identical to SEQ ID NO: 89078
  derived and/or modified CDS sequence (opt1) from neuraminidase__InfluenzaA__AHM00833

SEQ ID NO: 89152 - RNA, 1410 nt, Artificial Sequence; identical to SEQ ID NO: 87034
  derived and/or modified CDS sequence (opt1) from neuraminidase__InfluenzaA__AHM00845

SEQ ID NO: 89153 - RNA, 1410 nt, Artificial Sequence; identical to SEQ ID NO: 86170
  derived and/or modified CDS sequence (opt1) from neuraminidase__InfluenzaA__AHM00857

SEQ ID NO: 89154 - RNA, 1410 nt, Artificial Sequence; identical to SEQ ID NO: 86170
  derived and/or modified CDS sequence (opt1) from neuraminidase__InfluenzaA__AHM00869

SEQ ID NO: 89155 - RNA, 1410 nt, Artificial Sequence; identical to SEQ ID NO: 86170
  derived and/or modified CDS sequence (opt1) from neuraminidase__InfluenzaA__AHM00881

SEQ ID NO: 89156 - RNA, 1410 nt, Artificial Sequence; identical to SEQ ID NO: 87399
  derived and/or modified CDS sequence (opt1) from neuraminidase__InfluenzaA__AHM00893

SEQ ID NO: 89157 - RNA, 1410 nt, Artificial Sequence
  derived and/or modified CDS sequence (opt1) from neuraminidase__InfluenzaA__AHM00905
augaaccccaaccagaagaucaucaccaucggcagcgugucccugaccaucagcacgaucugcuucuucaugcagaucgccauccucaucaccaccgucacccugcacuucaagcaguacgaguucaacuccccgcccaacaaccaggugaugcugugcgagcccacgaucaucgagcgcaacaucaccgagaucguguaccucaccaacaccacgaucgagaaggagaucugccccaagccggccgaguaccggaacuggagcaagccccagugcgggaucaccggcuucgcgcccuucuccaaggacaacagcauccgccuguccgccgggggcgacaucugggucacccgggagcccuacgugagcugcgacccggacaagugcuaccaguucgcccuggggcagggcaccacgcucaacaacgugcacuccaacaacaccguccgcgaccggacccccuaccgcacccugcugaugaacgagcucggcgugcccuuccaccuggggacgaagcaggucugcaucgccuggagcuccagcuccugccacgacggcaaggccuggcugcacgugugcaucaccggggacgacaagaacgcgaccgccagcuucaucuacaacggccggcucguggacuccguggucagcugguccaaggagauccugcgcacccaggagagcgagugcgugugcaucaacgggacgugcaccguggucaugaccgacggcuccgccagcggcaaggccgacaccaagauccuguucaucgaggaggggaagaucgugcacacgagcacccucuccggcagcgcgcagcacguggaggagugcuccugcuacccccgguacccggggguccgcugcgugugccgggacaacuggaagggcagcaaccgccccaucguggacaucaacaucaaggaccacuccaucgucagcuccuacgugugcagcggccuggugggggacacgccccggaagaccgacuccagcuccagcggccacugccuggaccccaacaacgaggagggcgggcacggggucaagggcugggccuucgacgacggcaacgacguguggauggggcgcaccaucaacgagaccucccggcucggcuacgagaccuucaaggucaucgagggguggagcaacccgaaguccaagcugcagaucaaccgccaggugaucguggaccggggcgaccgcagcggguacuccggcaucuucagcgucgagggcaaguccugcaucaaccggugcuucuacguggagcugauccgcgggcggaaggaggagaccgaggugcucuggacgagcaacagcaucgucguguucugcggcaccuccgggaccuacggcaccgggagcuggcccgacggcgccgaccugaaccugaugcccaucuga

SEQ ID NO: 89158 - RNA, 1410 nt, Artificial Sequence
  derived and/or modified CDS sequence (opt1) from neuraminidase__InfluenzaA__AHM00917
augaaccccaaccagaagaucaucaccaucggcagcgugucccugaccaucagcacgaucugcuucuucaugcagaucgccauccucaucaccaccgucacccugcacuucaagcaguacgaguucaacuccccgcccaacaaccaggugaugcugugcgagcccacgaucaucgagcgcaacaucaccgagaucguguaccucaccaacaccacgaucgagaaggagaucugccccaagccggccgaguaccggaacuggagcaagccccagugcgggaucaccggcuucgcgcccuucuccaaggacaacagcauccgccuguccgccgggggcgacaucugggucacccgggagcccuacgugagcugcgacccggacaagugcuaccaguucgcccuggggcagggcaccacgcucaacaacgugcacuccaacaacaccguccgcgaccggacccccuaccgcacccugcugaugaacgagcucggcgugcccuuccaccuggggacgaagcaggucugcaucgccuggagcuccagcuccugccacgacggcaaggccuggcugcacgugugcaucaccggggacgacaagaacgcgaccgccagcuucaucuacaacggccggcucguggacuccguggucagcugguccaaggagauccugcgcacccaggagagcgagugcgugugcaucaacgggacgugcaccguggucaugaccgacggcuccgccagcggcaaggccgacaccaagauccuguucaucgaggaggggaagaucgugcacacgagcacccucuccggcagcgcgcagcacguggaggagugcuccugcuacccccgguacccggggguccgcugcgugugccgggacaacuggaagggcagcaaccgccccaucguggacaucaacaucaaggaccacuccaucgucagcuccuacgugugcagcggccuggugggggacaccccgcggaagaacgacuccagcuccagcucccacugccuggaccccaacaacgaggagggcgggcacggcgucaaggggugggccuucgacgacggcaacgacaucuggaugggccgcaccaucaacgagacgagccggcucggguacgagaccuucaaggugaucgagggcugguccaaccccaagagcaagcugcagaucaaccgccaggucaucguggaccgcggggaccgguccggcuacagcgggaucuucuccguggagggcaagagcugcaucaaccggugcuucuacgucgagcugauccgcggccggaaggaggagaccgaggugcucuggaccagcaacuccaucguggucuucugcgggacgagcggcaccuacgggaccggcuccuggcccgacggggccgaccugaaccugaugcccaucuga

SEQ ID NO: 89159 - RNA, 1410 nt, Artificial Sequence; identical to SEQ ID NO: 86170
  derived and/or modified CDS sequence (opt1) from neuraminidase__InfluenzaA__AHM00929

SEQ ID NO: 89160 - RNA, 1410 nt, Artificial Sequence
  derived and/or modified CDS sequence (opt1) from neuraminidase__InfluenzaA__AHM00941
augaaccccaaccagaagaucaucaccaucggcagcgugucccugaccaucagcacgaucugcuucuucaugcagaucgccauccucaucaccaccgucacccugcacuucaagcaguacgaguucaacuccccgcccaacaaccaggugaugcugugcgagcccacgaucaucgagcgcaacaucaccgagaucguguaccucaccaacaccacgaucgagaaggagaucugccccaagccggccgaguaccggaacuggagcaagccccagugcgacaucaccggguucgcgcccuucuccaaggacaacagcauccgccuguccgccggcggggacaucugggucacccgggagcccuacgugagcugcgacccggacaagugcuaccaguucgcccugggccaggggaccacgcucaacaacgugcacuccaacaacaccauccgcgaccggacccccuaccgcacccugcugaugaacgagcucggcguccccuuccaccugggcacgaagcaggucugcaucgccuggagcuccagcuccugccacgacgggaaggccuggcugcacgugugcaucaccggcgacgacaagaacgcgaccgccagcuucaucuacaacgggcggcucguggacuccguggugagcugguccaaggagauccugcgcacccaggagagcgagugcgucugcaucaacggcacgugcaccguggugaugaccgacggguccgccagcggcaaggccgacaccaagauccuguucaucgaggagggcaagaucguccacacgagcacccucuccgggagcgcgcagcacguggaggagugcuccugcuacccccgguacccgggcgugcgcugcgucugccgggacaacuggaaggggagcaaccgccccaucguggacaucaacaucaaggaccacuccaucgugagccgguacgucugcuccggccuggugggcgacacgccccgcaagaacgacagcuccagcuccagccacugccuggaccccaacaacgaggagggcgggcacggggugaagggcugggccuucgacgacgggaacgacgucuggaugggccggaccaucaacgagaccucccgccucggcuacgagaccuucaaggugaucgagggguggagcaacccgaaguccaagcugcagaucaaccggcaggucaucguggaccgcggcgaccggagcggguacuccggcaucuucagcguggaggggaaguccugcaucaaccgcugcuucuacgucgagcugauccggggccgcaaggaggagaccgaggugcucuggaccagcaacagcaucguggucuucugcggcacguccgggaccuacggcaccgggagcuggcccgacggcgccgaccugaaccugaugcccaucuga

SEQ ID NO: 89161 - RNA, 1410 nt, Artificial Sequence
  derived and/or modified CDS sequence (opt1) from neuraminidase__InfluenzaA__AHM00953
augaaccccaaccagaagaucaucaccaucggcagcgugucccugaccaucagcacgaucugcuucuucaugcagaucgccauccucaucaccaccgucacccugcacuucaagcaguacgccuucaacuccccgcccaacaaccaggugaugcugugcgagcccacgaucaucgagcgcaacaucaccgagaucguguaccucaccaacaccacgaucgagaaggagaucugccccaagccggcggaguaccggaacuggagcaagccccagugcgggaucaccggcuucgcccccuucuccaaggacaacagcauccgccuguccgccgggggcgacaucugggucacccgggagcccuacgugagcugcgacccggacaagugcuaccaguucgcccuggggcagggcaccacgcucaacaacgugcacuccaacaacaccguccgcgaccggacccccuaccgcacccugcugaugaacgagcucggcgugcccuuccaccuggggacgaagcaggucugcaucgccuggagcuccagcuccugccacgacggcaaggcguggcugcacgugugcaucaccggggacgacaagaacgccaccgccagcuucaucuacaacggccggcucguggacuccguggucagcugguccaaggagauccugcgcacccaggagagcgagugcgugugcaucaacgggacgugcaccguggucaugaccgacggcuccgccagcggcaaggcggacaccaagauccuguucaucgaggaggggaagaucgugcacacgagcacccucuccggcagcgcccagcacguggaggagugcuccugcuacccccgguacccggggguccgcugcgugugccgggacaacuggaagggcagcaaccgccccaucguggacaucaacaucaaggaccacuccaucgucagcuccuacgugugcagcggccuggugggggacaccccgcggaagaacgacuccagcuccagcucccacugccuggaccccaacaacgaggagggcgggcacggcgucaaggggugggccuucgacgacggcaacgacguguggaugggccgcaccaucaacgagacgagccggcucggguacgagaccuucaaggucaucgagggcugguccaaccccaagagcaagcugcagaucaaccgccaggugaucguggaccgcggggaccgguccggcuacagcgggaucuucuccgucgagggcaagagcugcaucaaccggugcuucuacguggagcugauccgcggccggaaggaggagaccgaggugcucuggaccagcaacuccaucgucguguucugcgggacgagcggcaccuacgggaccggcuccuggcccgacggggccgaccugaaccugaugcccaucuga

SEQ ID NO: 89162 - RNA, 1410 nt, Artificial Sequence; identical to SEQ ID NO: 87399
  derived and/or modified CDS sequence (opt1) from neuraminidase__InfluenzaA__AHM00965

SEQ ID NO: 89163 - RNA, 1410 nt, Artificial Sequence; identical to SEQ ID NO: 87399
  derived and/or modified CDS sequence (opt1) from neuraminidase__InfluenzaA__AHM00977

SEQ ID NO: 89164 - RNA, 1398 nt, Artificial Sequence
  derived and/or modified CDS sequence (opt1) from neuraminidase__InfluenzaA__AHM24226
augaaccccaaccagaagauccugugcaccagcgccaccgccaucaucaucggcgcgaucgccgugcucaucgggaucgccaaccugggccugaacaucgggcuccaccugaagccgggcugcaacugcucccacagccagcccgagacgaccaacaccucccagaccaucaucaacaacuacuacaacgagacgaacaucaccaacauccagauggaggagcgcaccagccggaacuucaacaaccugaccaaggggcucugcacgaucaacuccuggcacaucuacggcaaggacaacgccguccgcaucggcgagagcuccgacgugcuggugacccgggagcccuacgucagcugcgaccccgacgagugccgcuucuacgcccugucccaggggaccaccauccggggcaagcacagcaacgggacgauccacgaccgcucccaguaccgggcgcucaucagcuggccgcuguccagcccgcccaccguguacaacucccgcguggagugcaucggcuggagcuccaccagcugccacgacgggaagucccggaugagcaucugcaucagcggccccaacaacaacgccuccgccgucgugugguacaaccgccggcccguggccgagaucaacaccugggcgcgcaacauccugcggacgcaggagagcgagugcgucugccacaacggcgugugccccguggucuucaccgacggguccgccaccggccccgccgacacccgcaucuacuacuucaaggaggggaagaugcucaagugggagagccugacgggcaccgccaagcacaacgaggagugcuccugcuacggcgagcggaccgggaucacgugcacgugccgcgacaacuggcagggcagcaaccggcccgugauccagaucgacccgguggccaugacccacaccucccaguacaucugcagccccguccugaccgacaacccccgccccaacgacccgaacaucgggaagugcaacgaccccuaccccggcaacaacaacaacggggugaagggcuucuccuaccucgacggcgcgaacaccuggcuggggcggaccaucagcaccgccucccgcagcggcuacgagaugcugaaggugcccaacgcccucaccgacgaccgguccaagccgauccaggggcagacgaucguccugaacgccgacuggagcggcuacuccgggagcuucauggacuacugggccgagggcgacugcuaccgcgcgugcuucuacguggagcugauccgcggccggcccaaggaggacaaggugugguggaccuccaacagcaucgucuccaugugcagcagcaccgaguuccucgggcaguggaacuggcccgacggcgccaagaucgaguacuuccuguga

SEQ ID NO: 89165 - RNA, 1398 nt, Artificial Sequence; identical to SEQ ID NO: 87478
  derived and/or modified CDS sequence (opt1) from neuraminidase__InfluenzaA__AHM24238

SEQ ID NO: 89166 - RNA, 1398 nt, Artificial Sequence
  derived and/or modified CDS sequence (opt1) from neuraminidase__InfluenzaA__AHM24250
augaaccccaaccagaagauccugugcaccagcgccaccgccaucaucaucggcgcgaucgccgugcucaucgggaucgccaaccugggccugaacaucgggcuccaccugaagccguccugcaacugcagccacucccagcccgagacgaccaacaccagccagaccaucaucaacaacuacuacaacgagacgaacaucaccaacauccagauggaggagcgcaccucccggaacuucaacaaccugaccaagggccucugcacgaucaacagcuggcacaucuacgggaaggacaacgccguccgcaucggcgagaacuccgacgugcuggugacccgggagcccuacgucagcugcgaccccgacgagugccgcuucuacgcccugucccagggcaccaccauccgggggaagcacagcaacggcacgauccacgaccgcucccaguaccgggcgcucaucagcuggccgcuguccagcccgcccaccguguacaacucccgcguggagugcaucggguggagcuccaccagcugccacgacggcaagucccggaugagcaucugcaucagcgggcccaacaacaacgccuccgccgucgugugguacaaccgccggcccguggccgagaucaacaccugggcgcgcaacauccugcggacgcaggagagcgagugcgucugccacaacggcgugugccccguggucuucaccgacggcuccgccaccgggcccgccgacacccgcaucuacuacuucaaggagggcaagauccucaagugggagagccugacggggaccgccaagcacaucgaggagugcuccugcuacggcgagcggaccggcaucacgugcacgugccgcgacaacuggcaggggagcaaccggcccgugauccagaucgacccgguggccaugacccacaccucccaguacaucugcagccccguccugaccgacaacccccgccccaacgacccgaacaucggcaagugcaacgaccccuaccccgggaacaacaacaacggcgugaagggguucuccuaccucgacggcgcgaacaccuggcugggccggaccaucagcaccgccucccgcagcggguacgagaugcugaaggugcccaacgcccucaccgacgaccgguccaagccgauccagggccagacgaucguccugaacgccgacuggagcggguacuccggcagcuucauggacuacugggccgagggggacugcuaccgcgcgugcuucuacguggagcugauccgcggccggcccaaggaggacaaggugugguggaccuccaacagcaucgucuccaugugcagcagcaccgaguuccucggccaguggaacuggcccgacggggccaagaucgaguacuuccuguga

SEQ ID NO: 89167 - RNA, 1410 nt, Artificial Sequence; identical to SEQ ID NO: 84733
  derived and/or modified CDS sequence (opt1) from neuraminidase__InfluenzaA__AHM98312

SEQ ID NO: 89168 - RNA, 1410 nt, Artificial Sequence
  derived and/or modified CDS sequence (opt1) from neuraminidase__InfluenzaA__AHM98331
augaaccccaaccagaagaucaucaccaucggcagcgugugcaugaccaucgggauggccaaccugauccuccagaucggcaacaucaucuccaucuggaucagccacuccauccagcuggggaaccagagccagaucgagacgugcaaccaguccgucaucaccuacgagaacaacaccugggugaaccagaccuacgugaacaucagcaacacgaacuucgccgcgggccaguccgucgugagcgugaagcuggccgggaacuccagccucugcccggucuccggcugggccaucuacagcaaggacaacuccauccgcaucggcagcaagggggacguguucgugauccgggagcccuucaucuccugcagcccccuggagugccgcaccuucuuccugacccagggcgcccuccugaacgacaagcacuccaacgggaccaucaaggaccggagccccuaccgcacgcugauguccugcccgaucggcgagguccccagccccuacaacagccgguucgaguccguggccuggagcgcguccgccugccacgacgggaucaacuggcucaccaucggcaucagcggccccgacaacggggccguggccguccugaaguacaacggcaucaucaccgacaccaucaaguccuggcgcaacaacauccugcggacgcaggagagcgagugcgcgugcgugaacggguccugcuucaccaucaugaccgacggcccgagcgacggccaggccuccuacaagaucuuccgcaucgagaaggggaagaucgucaagagcguggagaugaacgcccccaacuaccacuacgaggagugcuccugcuaccccgacagcuccgagaucacgugcgugugccgggacaacuggcacggcagcaaccgccccuggguguccuucaaccagaaccucgaguaccagaucggguacaucugcagcggcaucuucggggacaacccgcggcccaacgacaagaccggcuccugcggccccgucagcuccaacggggccaacggcgugaagggguucagcuucaaguacggcaacgggguguggaucggccgcaccaagagcaucuccagccggaagggcuucgagaugaucugggaccccaacggguggaccggcaccgacaacaacuucuccaucaagcaggacaucgucgggaucaacgaguggagcggcuacuccgggagcuucgugcagcacccggagcugacgggccuggacugcauccgccccugcuucuggguggagcucauccggggccgccccaaggagaacaccaucuggaccuccgggagcuccaucagcuucugcggcguccacuccgacaccgugggguggagcuggcccgacggcgccgagcugccguucacgaucgacaaguga

SEQ ID NO: 89169 - RNA, 1410 nt, Artificial Sequence; identical to SEQ ID NO: 84749
  derived and/or modified CDS sequence (opt1) from neuraminidase__InfluenzaA__AHM98342

SEQ ID NO: 89170 - RNA, 1410 nt, Artificial Sequence
  derived and/or modified CDS sequence (opt1) from neuraminidase__InfluenzaA__AHM98353
augaaccccaaccagaagaucaucaccaucggcagcgugugcaugaccaucgggauggccaaccugauccuccagaucggcaacaucaucuccaucuggaucagccacuccauccagcuggggaaccagagccagaucgagacgugcaaccaguccgucaucaccuacgagaacaacaccugggugaaccagaccuacgugaacaucagcaacacgaacuucgccgcgggccaguccgucgugagcgugaagcuggccgggaacuccagccucugcccggucuccggcugggccaucuacagcaaggacaacuccauccgcaucggcagcaagggggacguguucgugauccgggagcccuucaucuccugcagcccccuggagugccgcaccuucuuccugacccagggcgcccuccugaacgacaagcacuccaacgggaccaucaaggaccggagccccuaccgcacgcugauguccugcccgaucggcgagguccccagccccuacaacagccgguucgaguccguggccuggagcgcguccgccugccacgacgggaucaacuggcucaccaucggcaucagcggccccgacaacggggccguggccguccugaaguacaacggcaucaucaccgacaccaucaaguccuggcgcaacaacauccugcggacgcaggagagcgagugcgcgugcguggacggguccugcuucaccaucaugaccgacggcccgagcgacggccaggccuccuacaagaucuuccgcaucgagaaggggaagaucgucaagagcguggagaugaacgcccccaacuaccacuacgaggagugcuccugcuaccccgacagcuccgagaucacgugcgugugccgggacaacuggcacggcagcaaccgccccuggguguccuucaaccagaaccucgaguaccagaucggguacaucugcagcggcaucuucggggacaacccgcggcccaacgacaagaccggcuccugcggccccgucagcuccaacggggccaacggcgugaagggguucagcuucaaguacggcaacgggguguggaucggccgcaccaagagcaucuccagccggaagggcuucgagaugaucugggaccccaacggguggaccggcaccgacaacaacuucuccaucaagcaggacaucgucgggaucaacgaguggagcggcuacuccgggagcuucgugcagcacccggagcugacgggccuggacugcauccgccccugcuucuggguggagcucauccggggccgccccaaggagaacaccaucuggaccuccgggagcuccaucagcuucugcggcgucaacuccgacaccgugggguggagcuggcccgacggcgccgagcugccguucacgaucgacaaguga

SEQ ID NO: 89171 - RNA, 1410 nt, Artificial Sequence
  derived and/or modified CDS sequence (opt1) from neuraminidase__InfluenzaA__AHM98364
augaaccccaaccagaagaucaucaccaucggcagcgugugcaugaccaucgggauggccaaccugauccuccagaucggcaacaucaucuccaucuggaucagccacuccauccagcuggggaaccagagccagaucgagacgugcaaccaguccgucaucaccuacgagaacaacaccugggugaaccagaccuacgugaacaucagcaacacgaacuucgccgcgggccaguccgucgugagcgugaaccuggccgggaacuccagccucugcccggucuccggcugggccaucuacagcaaggacaacuccauccgcaucggcagcaagggggacguguucgugauccgggagcccuucaucuccugcagcccccuggagugccgcaccuucuuccugacccagggcgcccuccugaacgacaagcacuccaacgggaccaucaaggaccggagccccuaccgcacgcugauguccugcccgaucggcgagguccccagccccuacaacagccgguucgaguccguggccuggagcgcguccgccugccacgacgggaucaacuggcucaccaucggcaucagcggccccgacaacggggccguggccguccugaaguacaacggcaucaucaccgacaccaucaaguccuggcgcaacaacauccugcggacgcaggagagcgagugcgcgugcgugaacggguccugcuucaccaucaugaccgacggcccgagcgacggccaggccuccuacaagaucuuccgcaucgagaaggggaagaucgucaagagcguggagaugaacgcccccaacuaccacuacgaggagugcuccugcuaccccgacagcuccgagaucacgugcgugugccgggacaacuggcacggcagcaaccgccccuggguguccuucaaccagaaccucgaguaccagaucggguacaucugcagcggcaucuucggggacaacccgcggcccaacgacaagaccggcuccugcggccccgucagcuccaacggggccaacggcgugaagggguucagcuucaaguacggcaacgggguguggaucggccgcaccaagagcaucuccagccggaagggcuucgagaugaucugggaccccaacggguggaccggcaccgacaacaacuucuccaucaagcaggacaucgucgggaucaacgaguggagcggcuacuccgggagcuucgugcagcacccggagcugacgggccuggacugcauccgccccugcuucuggguggagcucauccggggccgccccaaggagaacaccaucuggaccuccgggagcuccaucagcuucugcggcgucaacuccgacaccgugggguggagcuggcccgacggcgccgagcugccguucacgaucgacaaguga

SEQ ID NO: 89172 - RNA, 1410 nt, Artificial Sequence
  derived and/or modified CDS sequence (opt1) from neuraminidase__InfluenzaA__AHM98375
augaaccccaaccagaagaucaucaccaucggcagcgugugcaugaccaucgggauggccaaccugauccuccagaucggcaacaucaucuccaucuggaucagccacuccauccagcuggggaaccagaaccagaucgagacgugcaaccagagcgucaucaccuacgagaacaacaccugggugaaccagaccuacgugaacaucuccaacacgaacuucgccgcgggccagagcgucguguccgugaagcuggccgggaacagcucccucugcccggucagcggcugggccaucuacuccaaggacaacagcauccgcaucggcuccaagggggacguguucgugauccgggagcccuucaucagcugcagcccccuggagugccgcaccuucuuccugacccagggcgcccuccugaacgacaagcacuccaacgggaccaucaaggaccggucccccuuccgcacgcugaugagcugcccgaucggcgagguccccucccccuacaacagccgguucgagagcguggccugguccgcgagcgccugccacgacgggaucaacuggcucaccaucggcaucuccggccccgacaacggggccguggccguccugaaguacaacggcaucaucaccgacaccaucaagagcuggcgcaacaacauccugcggacgcaggaguccgagugcgcgugcgugaacgggagcugcuucaccaucaugaccgacggcccguccgacggccaggccagcuacaagaucuuccgcaucgagaaggggaagaucgugaaguccgucgagaugaacgcccccaacuaccacuacgaggagugcagcugcuaccccgacuccagcgagaucacgugcgugugccgggacaacuggcacggcuccaaccgccccugggugagcuucaaccagaaccucgaguaccagaucggguacaucugcuccggcaucuucggggacaacccgcggcccaacgacaagaccggcagcugcggccccgucuccagcaacggggccaacggcgugaagggguucuccuucaaguacggcaacgggguguggaucggccgcaccaagagcaucagcucccggaagggcuucgagaugaucugggaccccaacggguggaccggcaccgacaacaacuucagcaucaagcaggacaucgucgggaucaacgagugguccggcuacagcggguccuucgugcagcacccggagcugacgggccuggacugcauccgccccugcuucuggguggagcucauccggggccgccccaaggagaacaccaucuggaccagcggguccagcaucuccuucugcggcgucaacagcgacaccguggggugguccuggcccgacggcgccgagcugccguucacgaucgacaaguga

SEQ ID NO: 89173 - RNA, 1410 nt, Artificial Sequence; identical to SEQ ID NO: 84733
  derived and/or modified CDS sequence (opt1) from neuraminidase__InfluenzaA__AHM98386

SEQ ID NO: 89174 - RNA, 1410 nt, Artificial Sequence
  derived and/or modified CDS sequence (opt1) from neuraminidase__InfluenzaA__AHM98408
augaaccccaaccagaagaucaucaccaucggcagcgugugcaugaccaucgggauggccaaccugauccuccagaucggcaacaucaucuccaucuggaucagccacuccauccagcuggggaaccagagccagaucgagacgugcaaccaguccgucaucaccuacgagaacaacaccuggaucaaccagaccuacgugaacaucagcaacacgaacuucgccgcgggccaguccguggucagcgugaagcuggccgggaacuccagccucugcccgguguccggcugggccaucuacagcaaggacaacuccauccgcaucggcagcaagggggacgucuucgugauccgggagcccuucaucuccugcagcccccuggagugccgcaccuucuuccugacccagggcgcccuccugaacgacaagcacuccaacgggaccaucaaggaccggagccccuaccgcacgcugauguccugcccgaucggcgaggugcccagccccuacaacagccgguucgaguccgucgccuggagcgcguccgccugccacgacgggaucaacuggcucaccaucggcaucagcggccccgacaacggggccguggccgugcugaaguacaacggcaucaucaccgacaccaucaaguccuggcgcaacaacauccugcggacgcaggagagcgagugcgcgugcgucaacggguccugcuucaccaucaugaccgacggcccgagcgacggccaggccuccuacaagaucuuccgcaucgagaaggggaagaucgucaagagcguggagaugaacgcccccaacuaccacuacgaggagugcuccugcuaccccgacagcuccgagaucacgugcgugugccgggacaacuggcacggcagcaaccgccccuggguguccuucaaccagaaccucgaguaccagaucggguacaucugcagcggcaucuucggggacaacccgcggcccaacgacaagaccggcuccugcggccccgugagcuccaacggggccaacggcgucaagggguucagcuucaaguacggcaacgggguguggaucggccgcaccaagagcaucuccagccggaagggcuucgagaugaucugggaccccaacggguggaccggcaccgacaacuccuucagcaucaagcaggacaucguggggaucaacgagugguccggcuacagcggguccuucguccagcacccggagcugacgggccuggacugcauccgccccugcuucuggguggagcucauccggggccgccccaaggagaacaccaucuggaccagcggguccagcaucuccuucugcggcgugaacagcgacaccgucgggugguccuggcccgacggcgccgagcugccguucacgaucgacaaguga

SEQ ID NO: 89175 - RNA, 1410 nt, Artificial Sequence; identical to SEQ ID NO: 89174
  derived and/or modified CDS sequence (opt1) from neuraminidase__InfluenzaA__AHM98419

SEQ ID NO: 89176 - RNA, 1410 nt, Artificial Sequence
  derived and/or modified CDS sequence (opt1) from neuraminidase__InfluenzaA__AHM98430
augaaccccaaccagaagaucaucaccaucggcagcgugugcaugaccaucgggauggccaaccugauccuccagaucggcaacaucaucuccaucuggaucagccacuccauccagcuggggaaccagagccagaucgagacgugcaaccagaacgucaucaccuacgagaacaacaccugggugaaccagaccuacgugaacaucuccaacacgaacuucgccgcgggccagagcgucgugccggugaagcuggccgggaacuccagccucugccccgucuccggcugggccaucuacagcaaggacaacuccauccgcaucggcagcaagggggacguguucgugauccgggagcccuucaucuccugcagcccccuggagugccgcaccuucuuccugacccagggcgcccuccugaacgacaagcacuccaacgggaccaucaaggaccggagcccguaccgcacgcugauguccugccccaucggcgagguccccagccccuacaacucccgguucgagagcguggccuggagcgcguccgccugccacgacgggaucaacuggcucaccaucggcaucagcggcccggacaacggggccguggccguccugaaguacaacggcaucaucaccgacaccaucaaguccuggcgcaacaacauccugcggacgcaggagagcgagugcgcgugcgugaacggguccugcuucaccaucaugaccgacggccccagcgacggccaggccuccuacaagaucuuccgcaucgagaaggggaagaucgucaagagcguggagaugaacgcccccaacuaccacuacgaggagugcuccugcuaccccgacagcuccgagaucacgugcgugugccgggacaacuggcacggcagcaaccgcccguggguguccuucaaccagaaccucgaguaccagaucggguacaucugcagcggcaucuucggggacaacccccggcccaacgacaagaccggcuccugcggccccgucagcuccaacggggccaacggcgugaagggguucagcuucaaguacggcaacgggguguggaucggccgcaccaaguccaucagcagccggaagggcuucgagaugaucugggacccgaacggguggaccggcaccgacaacaacuucuccaucaagcaggacaucgucgggaucaacgaguggagcggcuacuccgggagcuucgugcagcaccccgagcugacgggccuggacugcauccgccccugcuucuggguggagcucauccggggccgccccaaggagaacaccaucuggaccuccgggagcuccaucagcuucugcggcgucaacuccgacaccgugggguggagcuggccggacggcgccgagcugcccuucacgaucgacaaguga

SEQ ID NO: 89177 - RNA, 1410 nt, Artificial Sequence; identical to SEQ ID NO: 84981
  derived and/or modified CDS sequence (opt1) from neuraminidase__InfluenzaA__AHM98441

SEQ ID NO: 89178 - RNA, 1410 nt, Artificial Sequence
  derived and/or modified CDS sequence (opt1) from neuraminidase__InfluenzaA__AHM98452
augaaccccaaccagaagaucaucaccaucggcagcgugugcaugaccaucgggauggccaaccugauccuccagaucggcaacaucaucuccaucuggaucagccacuccauccagcugcgcaaccagagccagaucgagacgugcaaccaguccgucaucaccuacgagaacaacaccugggugaaccagaccuacgugaacaucagcaacacgaacuucgccgcggggcaguccgucgugagcgugaagcuggccggcaacuccagccucugcccggucuccgggugggccaucuacagcaaggacaacuccauccggaucggcagcaagggcgacguguucgugauccgcgagcccuucaucuccugcagcccccuggagugccggaccuucuuccugacccagggggcccuccugaacgacaagcacuccaacggcaccaucaaggaccgcagccccuaccggacgcugauguccugcccgaucggggagguccccagccccuacaacagccgcuucgaguccguggccuggagcgcguccgccugccacgacggcaucaacuggcucaccaucgggaucagcggccccgacaacggcgccguggccguccugaaguacaacgggaucaucaccgacaccaucaaguccuggcggaacaacauccugcgcacgcaggagagcgagugcgcgugcgugaacggcuccugcuucaccaucaugaccgacgggccgagcgacggccaggccuccuacaagaucuuccggaucgagaagggcaagaucgucaagagcguggagaugaacgcccccaacuaccacuacgaggagugcuccugcuaccccgacagcuccgagaucacgugcgugugccgcgacaacuggcacgggagcaaccggcccuggguguccuucaaccagaaccucgaguaccagaucggcuacaucugcagcgggaucuucggcgacaacccgcgccccaacgacaagaccggguccugcggccccgucagcuccaacggcgccaacggggugaagggcuucagcuucaaguacgggaacggcguguggaucgggcggaccaagagcaucuccagccgcaagggcuucgagaugaucugggaccccaacggcuggaccgggaccgacaacaacuucuccaucaagcaggacaucgucggcgugaacgaguggagcggguacuccggcagcuucgugcagcacccggagcugacggggcuggacugcauccggcccugcuucugggucgagcucauccgcggccggcccaaggagaacaccaucuggaccuccggcagcuccaucagcuucugcggggugaacuccgacaccgucggcuggagcuggcccgacggggccgagcugccguucacgaucgacaaguga

SEQ ID NO: 89179 - RNA, 1410 nt, Artificial Sequence; identical to SEQ ID NO: 84733
  derived and/or modified CDS sequence (opt1) from neuraminidase__InfluenzaA__AHM98474

SEQ ID NO: 89180 - RNA, 1410 nt, Artificial Sequence
  derived and/or modified CDS sequence (opt1) from neuraminidase__InfluenzaA__AHM98485
augaaccccaaccagaagaucaucaccaucggcagcgugugcaugaccaucgggauggccaaccugauccuccagaucggcaacaucaucuccaucuggaucagccacuccauccagcuggggaaccagagccagaucgagacgugcaaccaguccgucaucaccuacgagaacaacaccugggugaaccagaccuacgugaacaucagcaacacgaacuucgccgcgggccaguccgucgugagcgugaagcuggucgggaacuccagccucugcccgguguccggcugggccaucuacagcaaggacaacuccauccgcaucggcagcaagggggacguguucgucauccgggagcccuucaucuccugcagcccccuggagugccgcaccuucuuccugacccagggcgcccuccugaacgacaagcacuccaacgggaccaucaaggaccggagccccuaccgcacgcugauguccugcccgaucggcgaggugcccagccccuacaacagccgguucgaguccguggccuggagcgccuccgcgugccacgacgggaucaacuggcucaccaucggcaucagcggccccgacaacggggccgucgccgugcugaaguacaacggcaucaucaccgacaccaucaaguccuggcgcaacaacauccugcggacgcaggagagcgagugcgccugcgugaacggguccugcuucaccaucaugaccgacggcccgagcgacggccaggcguccuacaagaucuuccgcaucgagaaggggaagaucgucaagagcguggagaugaacgcccccaacuaccacuacgaggagugcuccugcuaccccgacagcuccgagaucacgugcgugugccgggacaacuggcacggcagcaaccgccccugggucuccuucaaccagaaccucgaguaccagaucggguacaucugcagcggcaucuucggggacaacccgcggcccaacgacaagaccggcuccugcggccccgugagcuccaacggggccaacggcgugaagggguucagcuucaaguacggcaacggggucuggaucggccgcaccaagagcaucuccagccggaagggcuucgagaugaucugggaccccaacggguggaccggcaccgacaacaacuucuccaucaagcaggacaucguggggaucaacgaguggagcggcuacuccgggagcuucgugcagcacccggagcugacgggccuggacugcauccgccccugcuucugggucgagcucauccggggccgccccaaggagaacaccaucuggaccuccgggagcuccaucagcuucugcggcgugaacuccgacaccgucggguggagcuggcccgacggcgccgagcugccguucacgaucgacaaguga

SEQ ID NO: 89181 - RNA, 1410 nt, Artificial Sequence
  derived and/or modified CDS sequence (opt1) from neuraminidase__InfluenzaA__AHM98496
augaaccccaaccagaagaucaucaccaucggcagcgugugcaugaccaucgggauggccaaccugauccuccagaucggcaacaucaucuccaucuggaucagccacuccauccagcuggggaaccagaaccagaucgagacgugcaaccagagcgucaucaccuacgagaacaacaccugggugaaccagaccuacgugaacaucuccaacacgaacuucgccgcgggccagagcgucguguccgugaagcuggccgggaacagcucccucugcccggucagcggcugggccaucuacuccaaggacaacagcauccgcaucggcuccaagggggacguguucgugauccgggagcccuucaucagcugcagcccccuggagugccgcaccuucuuccugacccagggcgcccuccugaacgacaagcacagcaacgggaccaucaagaaccggucccccuaccgcacgcugaugagcugcccgaucggcgagguccccucccccuacaacagccgguucgagagcguggccugguccgcgagcgccugccacgacgggaucaacuggcucaccaucggcaucuccggccccgacaacggggccguggccguccugaaguacaacggcaucaucaccgacaccaucaagagcuggcgcaacaacauccugcggacgcaggaguccgagugcgcgugcgugaacgggagcugcuucaccaucaugaccgacggcccguccgacggccaggccagcuacaagaucuuccgcaucgagaaggggaagaucgugaaguccgucgagaugaacgcccccaacuaccacuacgaggagugcagcugcuaccccgacuccagcgagaucaagugcgugugccgggacaacuggcacggcuccaaccgccccugggugagcuucaaccagaaccucgaguaccagaucggguacaucugcuccggcaucuucggggacaacccgcggcccaacgacaagaccggcagcugcggccccgucuccagcaacggggccaacggcgugaagggguucuccuucaaguacggcaacgggguguggaucggccgcacgaaguccaucagcucccggaagggcuucgagaugaucugggaccccaacggguggaccggcaccgacaacaacuucagcaucaagcaggacaucgucgggaucaacgagugguccggcuacagcggguccuucgugcagcacccggagcugaccggccuggacugcauccgccccugcuucuggguggagcucauccggggccgccccaaggagaacacgaucuggaccagcggguccagcaucuccuucugcggcgucaacagcgacaccguggggugguccuggcccgacggcgccgagcugccguucaccaucgacaaguga

SEQ ID NO: 89182 - RNA, 1410 nt, Artificial Sequence; identical to SEQ ID NO: 84733
  derived and/or modified CDS sequence (opt1) from neuraminidase__InfluenzaA__AHM98507

SEQ ID NO: 89183 - RNA, 1410 nt, Artificial Sequence
  derived and/or modified CDS sequence (opt1) from neuraminidase__InfluenzaA__AHM98518
augaaccccaaccagaagaucaucaccaucggcagcgugugcaugaccaucgggauggccaaccugauccuccagaucggcaacaucaucuccaucuggaucagccacuccauccagcuggggaaccagagccagaucgagacgugcaaccaguccgucaucaccuacgagaacaacaccuggaucaaccagaccuacgugaacaucagcaacacgaacuucgccgcgggccaguccguggucagcgugaagcuggccgggaacuccagccucugcccgguguccggcugggccaucuacagcaaggacaacuccauccgcaucggcagcaagggggacgucuucgugauccgggagcccuucaucuccugcagcccccuggagugccgcaccuucuuccugacccagggcgcccuccugaacgacaagcacuccaacgggaccaucaaggaccggagccccuaccgcacgcugauguccugcccgaucggcgaggugcccagccccuacaacagccgguucgaguccgucgccuggagcgcguccgccugccacgacgggaucaacuggcucaccaucggcaucagcggccccgacaacggggccguggccgugcugaaguacaacggcaucaucaccgacaccaucaaguccuggcgcaacaacauccugcggacgcaggagagcgagugcgcgugcgucaacggguccugcuucaccaucaugaccgacggcccgagcgacggccaggccuccuacaagaucuuccgcaucgagaaggggaagaucgucaagagcguggagaugaacgcccccaacuaccacuacgaggagugcuccugcuaccccgacagcuccgagaucacgugcgugugccgggacaacuggcacggcagcaaccgccccuggguguccuucaaccagaaccucgaguaccagaucggguacaucugcagcggcaucuucggggacaacccgcggcccaacgacaagaccggcuccugcggccccgugagcuccaacggggccaacggcgucaagggguucagcuucaaguacggcaacgggguguggaucggccgcaccaagagcaucuccagccggaagggcuucgagaugaucugggaccccaacggguggaccggcaccgacaacaacuucuccaucaagcaggacaucguggggaucaacgaguggagcggcuacuccgggagcuucguccagcacccggagcugacgggccuggacugcauccgccccugcuucuggguggagcucauccggggccgccccaaggagaacaccaucuggaccuccgggagcuccaugagcuucugcggcgugaacuccgacaccgucggguggagcuggcccgacggcgccgagcugccguucacgaucgacaaguga

SEQ ID NO: 89184 - RNA, 1410 nt, Artificial Sequence; identical to SEQ ID NO: 84281
  derived and/or modified CDS sequence (opt1) from neuraminidase__InfluenzaA__AHM98529

SEQ ID NO: 89185 - RNA, 1410 nt, Artificial Sequence; identical to SEQ ID NO: 85025
  derived and/or modified CDS sequence (opt1) from neuraminidase__InfluenzaA__AHM98540

SEQ ID NO: 89186 - RNA, 1410 nt, Artificial Sequence
  derived and/or modified CDS sequence (opt1) from neuraminidase__InfluenzaA__AHM98562
augaaccccaaccagaagaucaucaccaucggcagcgugugcaugaccaucgggauggccaaccugauccuccagaucggcaacaucaucuccaucuggaucagccacuccauccagcuggggaaccagaaccagaucgagacgugcaaccagagcgucaucaccuacgagaacaacaccugggugaaccagaccuacgugaacaucuccaacacgaacuucgccgcgggccagagcgucguguccgugaagcuggccgggaacagcucccucugcccggucagcggcugggccaucuacuccaaggacaacagcauccgcaucggcuccaagggggacguguucgugauccgggagcccuucaucagcugcagcccccuggagugccgcaccuucuuccugacccagggcgcccuccugaacgacaagcacuccaacgggaccaucaaggaccggucccccuaccgcacgcugaugagcugcccgaucggcgagguccccucccccuacaacagccgguucgagagcguggccugguccgcgagcgccugccacgacgggaucaacuggcucaccaucggcaucuccggccccgacaacggggccguggccguccugaaguacaacggcaucaucaccgacaccaucaagagcuggcgcaacaacauccugcggacgcaggaguccgagugcgcgugcgugaacgggagcugcuucaccaucaugaccgacggcccguccgacggccaggccagcuacaagaucuuccgcaucgagaaggggaagaucgugaaguccgucgagaugaacgcccccaacuaccacuacgaggagugcagcugcuaccccgacuccagcgagaucacgugcgugugccgggacaacuggcacggcuccaaccgccccugggugagcuucaaccagaaccucgaguaccagaucggguacaucugcuccggcaucuucggggacaacccgcggcccaacgacaaggccggcagcugcggccccgucuccagcaacggggccaacggcgugaagggguucuccuucaaguacggcaacgggguguggaucggccgcaccaagagcaucagcucccggaagggcuucgagaugaucugggaccccaacggguggaccggcaccgacaacaacuucagcaucaagcaggacaucgucgggaucaacgagugguccggcuacagcggguccuucgugcagcacccggagcugaccggccuggacugcauccgccccugcuucuggguggagcucauccggggccgccccaaggagaacacgaucuggaccagcggguccagcaucuccuucugcggcgucaacagcuacaccguggggugguccuggcccgacggcgcggagcugccguucaccaucgacaaguga

SEQ ID NO: 89187 - RNA, 1410 nt, Artificial Sequence; identical to SEQ ID NO: 89176
  derived and/or modified CDS sequence (opt1) from neuraminidase__InfluenzaA__AHM98573

SEQ ID NO: 89188 - RNA, 1410 nt, Artificial Sequence
  derived and/or modified CDS sequence (opt1) from neuraminidase__InfluenzaA__AHM98584
augaaccccaaccagaagaucaucaccaucggcagcgugugcaugaccaucgggauggccaaccugauccuccagaucggcaacaucaucuccaucuggaucagccacuccauccagcuggggaaccagagccagaucgagacgugcaaccaguccgucaucaccuacgagaacaacaccuggaucaaccagaccuacgugaacaucagcaacacgaacuucgccgcgggccaguccguggucagcgugaagcuggccgggaacuccagccucugcccgguguccggcugggccaucuacagcaaggacaacuccauccgcaucggcagcaagggggacgucuucgugauccgggagcccuucaucuccugcagcccccuggagugccgcaccuucuuccugacccagggcgcccuccugaacgacaagcacuccaacgggaccaucaaggaccggagccccuaccgcacgcugauguccugcccgaucggcgaggugcccagccccuacaacagccgguucgaguccgucgccuggagcgcguccgccugccacgacgggaucaacuggcucaccaucggcaucagcggccccgacaacggggccguggccgugcugcgcuacaacggcaucaucaccgacaccaucaaguccuggcggaacaacauccugcgcacgcaggagagcgagugcgcgugcgucaacggguccugcuucaccaucaugaccgacggcccgagcgacggccaggccuccuacaagaucuuccggaucgagaaggggaagaucgucaagagcguggagaugaacgcccccaacuaccacuacgaggagugcuccugcuaccccgacagcuccgagaucacgugcgugugccgcgacaacuggcacggcagcaaccggcccuggguguccuucaaccagaaccucgaguaccagaucggguacaucugcagcggcaucuucggggacaacccgcgccccaacgacaagaccggcuccugcggccccgugagcuccaacggggccaacggcgucaagggguucagcuucaaguacggcaacgggguguggaucggccggaccaagagcaucuccagccgcaagggcuucgagaugaucugggaccccaacggguggaccggcaccgacaacuccuucagcaucaagcaggacaucguggggaucaacgagugguccggcuacagcggguccuucguccagcacccggagcugacgggccuggacugcauccggcccugcuucuggguggagcucauccgcggccggcccaaggagaacaccaucuggaccagcggguccagcaucuccuucugcggcgugaacagcgacaccgucgggugguccuggcccgacggcgccgagcugccguucacgaucgacaaguga

SEQ ID NO: 89189 - RNA, 1410 nt, Artificial Sequence; identical to SEQ ID NO: 89176
  derived and/or modified CDS sequence (opt1) from neuraminidase__InfluenzaA__AHM98595

SEQ ID NO: 89190 - RNA, 1410 nt, Artificial Sequence; identical to SEQ ID NO: 84733
  derived and/or modified CDS sequence (opt1) from neuraminidase__InfluenzaA__AHM98606

SEQ ID NO: 89191 - RNA, 1410 nt, Artificial Sequence
  derived and/or modified CDS sequence (opt1) from neuraminidase__InfluenzaA__AHM98617
augaaccccaaccagaagaucaucaccaucggcagcgugugcaugaccaucgggauggccaaccugauccuccagaucggcaacaucaucuccaucuggaucagccacuccauccagcuggggaaccagagccagaucgagacgugcaaccaguccgucaucaccuacgagaacaacaccuggaucaaccagaccuacgugaacaucagcaacacgaacuucgccgcgggccaguccguggucagcgugaagcuggccgggaacuccagccucugcccgguguccggcugggccaucuacagcaaggacaacuccauccgcaucggcagcaagggggacgucuucgugauccgggagcccuucaucuccugcagcccccugggcugccgcaccuucuuccugacccagggggcccuccugaacgacaagcacuccaacggcaccaucaaggaccggagccccuaccgcacgcugauguccugcccgaucggggaggugcccagccccuacaacagccgguucgaguccgucgccuggagcgcguccgccugccacgacggcaucaacuggcucaccaucggcaucagcgggcccgacaacggcgccguggccgugcugaaguacaacgggaucaucaccgacaccaucaaguccuggcgcaacaacauccugcggacgcaggagagcgagugcgcgugcgucaacggcuccugcuucaccaucaugaccgacggcccgagcgacgggcaggccuccuacaagaucuuccgcaucgagaagggcaagaucgucaagagcguggagaugaacgcccccaacuaccacuacgaggagugcuccugcuaccccgacagcuccgagaucacgugcgugugccgggacaacuggcacgggagcaaccgccccuggguguccuucaaccagaaccucgaguaccagaucggcuacaucugcagcgggaucuucggcgacaacccgcggcccaacgacaagaccggcuccugcgggcccgugagcuccaacggcgccaacggggucaagggcuucagcuucaaguacgggaacggcguguggaucggccgcaccaagagcaucuccagccggaagggguucgagaugaucugggaccccaacggcuggaccgggaccgacaacuccuucagcaucaagcaggacaucgugggcaucaacgagugguccggguacagcggcuccuucguccagcacccggagcugacgggccuggacugcauccgccccugcuucuggguggagcucauccgggggcgccccaaggagaacaccaucuggaccagcggcuccagcaucuccuucugcggggugaacagcgacaccgucggcugguccuggcccgacggcgccgagcugccguucacgaucgacaaguga

SEQ ID NO: 89192 - RNA, 1410 nt, Artificial Sequence; identical to SEQ ID NO: 89174
  derived and/or modified CDS sequence (opt1) from neuraminidase__InfluenzaA__AHM98628

SEQ ID NO: 89193 - RNA, 1410 nt, Artificial Sequence
  derived and/or modified CDS sequence (opt1) from neuraminidase__InfluenzaA__AHM98639
augaaccccaaccagaagaucaucaccaucggcagcgugugcaugaccaucgggauggccaaccugauccuccagaucggcaacaucaucuccaucuggaucagccacuccauccagcuggggaaccagagccagaucgagacgugcaaccaguccgucaucaucuacgagaacaacaccuggaucaaccagaccuacgugaacaucagcaacaccaacuucgccgcggagcaguccguggucagcgugaagcuggccggcaacuccagccucugcccgguguccgggugggccaucuacagcaaggacaacuccauccgcaucggcagcaagggcgacgucuucgugauccgggagcccuucaucuccugcagcccccuggagugccgcacguucuuccugacccagggggcccuccugaacgacaagcacuccaacggcaccaucaaggaccggagccccuaccgcacccugauguccugcccgaucggggaggugcccagccccuacaacagccgguucgaguccgucgccuggagcgcguccgccugccacgacggcaucaacuggcucacgaucgggaucagcggccccgacaacggcgccguggccgugcugaaguacaacgggaucaucaccgacaccaucaaguccuggcgcaacaacauccugcggacccaggagagcgagugcgcgugcgucaacggcuccugcuucacgaucaugaccgacgggccgagcgacggccaggccuccuacaagaucuuccgcaucgagaagggcaagaucgucaagagcguggagaugaacgcccccaacuaccacuacgaggagugcuccugcuaccccgacagcuccgagaucacgugcgugugccgggacaacuggcacgggagcaaccgccccuggguguccuucaaccagaaccucgaguaccagaucggcuacaucugcagcgggaucuucggcgacaacccgcggcccaacgacaagaccggguccugcggccccgugagcuccaacggcgccaacggggucaagggcuucagcuucaaguacgggaacggcguguggaucgggcgcaccaagagcaucuccagccggaagggcuucgagaugaucugggaccccaacggcuggaccgggaccgacaacuccuucagcaucaagcaggacaucgugggcaucaacgagugguccggguacagcggcuccuucguccagcacccggagcugaccgggcuggacugcauccgccccugcuucuggguggagcucauccggggccgccccaaggagaacacgaucuggaccagcggcuccagcaucuccuucugcggggugaacagcgacaccgucggcugguccuggcccgacggggccgagcugccguucaccaucgacaaguga

SEQ ID NO: 89194 - RNA, 1410 nt, Artificial Sequence; identical to SEQ ID NO: 84733
  derived and/or modified CDS sequence (opt1) from neuraminidase__InfluenzaA__AHM98650

SEQ ID NO: 89195 - RNA, 1410 nt, Artificial Sequence; identical to SEQ ID NO: 84733
  derived and/or modified CDS sequence (opt1) from neuraminidase__InfluenzaA__AHM98661

SEQ ID NO: 89196 - RNA, 1410 nt, Artificial Sequence
  derived and/or modified CDS sequence (opt1) from neuraminidase__InfluenzaA__AHM98672
augaaccccaaccagaagaucaucaccaucggcagcgugugcaugaccaucgggauggccaaccugauccuccagaucggcaacaucaucuccaucuggaucagccacuccauccagcuggggaaccagagccagaucgagacgugcaaccagaacgucaucaccuacgagaacaacaccugggugaaccagaccuacgugaacaucuccaacacgaacuucgccgcggagcagagcgucgugccggugaagcuggccggcaacuccagccucugccccgucuccgggugggccaucuacagcaaggacaacuccauccgcaucggcagcaagggcgacguguucgugauccgggagcccuucaucuccugcagcccccuggagugccgcaccuucuuccugacccagggggcccuccugaacgacaagcacuccaacggcaccaucaaggaccggagcccguaccgcacgcugauguccugccccaucggggagguccccagccccuacaacucccgguucgagagcguggccuggagcgcguccgccugccacgacggcaucaacuggcucaccaucgggaucagcggcccggacaacggcgccguggccguccugaaguacaacgggaucaucaccgacaccaucaaguccuggcgcaacaacauccugcggacgcaggagagcgagugcgcgugcgugaacggcuccugcuucaccaucaugaccgacgggcccagcgacggccaggccuccuacaagaucuuccgcaucgagaagggcaagaucgucaagagcguggagaugaacgcccccaacuaccacuacgaggagugcuccugcuaccccgacagcuccgagaucacgugcgugugccgggacaacuggcacgggagcaaccgcccguggguguccuucaaccagaaccucgaguaccagaucggcuacaucugcagcgggaucuucggcgacaacccccggcccaacgacaagaccggguccugcggccccgucagcuccaacggcgccaacggggugaagggcuucagcuucaaguacgggaacggcguguggaucgggcgcaccaaguccaucagcagccggaagggcuucgagaugaucugggacccgaacggcuggaccgggaccgacaacaacuucuccaucaagcaggacaucgucggcaucaacgaguggagcggguacuccggcagcuucgugcagcaccccgagcugacggggcuggacugcauccgccccugcuucuggguggagcucauccggggccgccccaaggagaacaccaucuggaccuccggcagcuccaucagcuucugcggggucaacuccgacaccgugggcuggagcuggccggacggggccgagcugcccuucacgaucgacaaguga

SEQ ID NO: 89197 - RNA, 1410 nt, Artificial Sequence
  derived and/or modified CDS sequence (opt1) from neuraminidase__InfluenzaA__AHM98683
augaaccccaaccagaagaucaucaccaucggcagcgugugcaugaccaucgggauggccaaccugauccuccagaucggcaacaucaucuccaucuggaucagccacuccauccagcuggggaaccagaaccagaucgagacgugcaaccagagcgucaucaccuacgagaacaacaccugggugaaccagaccuacgugaacaucuccaacacgaacuucgacgccggccagagcgucguguccgugcgccuggcggggaacagcucccucugcccggucagcggcugggccaucuacuccaaggacaacagcauccggaucggcuccaagggggacguguucgugauccgcgagcccuucaucagcugcagcccccuggagugccggaccuucuuccugacccagggcgcccuccugaacgacaagcacuccaacgggaccaucaaggaccgcucccccuaccggacgcugaugagcugcccgaucggcgagguccccucccccuacaacagccgcuucgagagcguggccugguccgccagcgcgugccacgacggguucaacuggcucaccaucggcaucuccggccccgacaacggggccguggccguccugaaguacaacggcaucaucaccgacaccauccggagcuggcgcaacaacauccugcggacgcaggaguccgagugcgccugcgugaacgggagcugcuucaccaucaugaccgacggcccguccgacggccaggcgagcuacaagaucuuccgcaucgagaaggggaagaucgugaaguccgucgagaugaacgcccccaacuaccacuacgaggagugcagcugcuaccccgacuccagcgagaucacgugcgugugccgggacaacuggcacggcuccaaccgccccugggugagcuucaaccagaaccucgaguaccagaucggguacaucugcuccggcaucuucggggacaacccgcggcccaacgacaagaccggcagcugcggccccgucuccagcaacggggccaacggcgugaagggguucuccuucaaguacggcaacgggguguggaucggccgcaccaagagcaucagcucccggaagggcuucgagaugaucugggaccccaacggguggaccggcaccgacaacaacuucagcaucaagcaggacaucgucgggaucaacgagugguccggcuacagcggguccuucgugcagcacccggagcugacgggccuggacugcauccgccccugcuucuggguggagcucauccggggccgccccaaggagaacaccaucuggaccagcggguccagcaucuccuucugcggcgucaacagcgacaccguggggugguccuggcccgacggcgccgagcugccguucacgaucgacaaguga

SEQ ID NO: 89198 - RNA, 1410 nt, Artificial Sequence; identical to SEQ ID NO: 84733
  derived and/or modified CDS sequence (opt1) from neuraminidase__InfluenzaA__AHM98693

SEQ ID NO: 89199 - RNA, 1410 nt, Artificial Sequence; identical to SEQ ID NO: 87182
  derived and/or modified CDS sequence (opt1) from neuraminidase__InfluenzaA__AHM98704

SEQ ID NO: 89200 - RNA, 1410 nt, Artificial Sequence; identical to SEQ ID NO: 87182
  derived and/or modified CDS sequence (opt1) from neuraminidase__InfluenzaA__AHM98715

SEQ ID NO: 89201 - RNA, 1410 nt, Artificial Sequence; identical to SEQ ID NO: 84733
  derived and/or modified CDS sequence (opt1) from neuraminidase__InfluenzaA__AHM98726

SEQ ID NO: 89202 - RNA, 1410 nt, Artificial Sequence
  derived and/or modified CDS sequence (opt1) from neuraminidase__InfluenzaA__AHM98737
augaaccccaaccagaagaucaucaccaucggcagcgugugcaugaccaucgggauggccaaccugauccuccagaucggcaacaucaucuccaucuggaucagccacuccauccagcugcgcaaccagagccagaucgagacgugcaaccaguccgucaucaacuacgagaacaacaccugggugaaccagaccuacgugaacaucagcaacaccaacuucgccgcggggcaguccgucgugagcgugaagcuggccggcaacuccagccucugcccggucuccgggugggccaucuacagcaaggacaacuccauccggaucggcagcaagggcgacguguucgugauccgcgagcccuucgucuccugcagcccccuggagugccggacguucuuccugacccagggggcccuccugaacgacaagcacuccaacggcaccaucaaggaccgcagccccuaccggacccugauguccugcccgaucggggaggugcccagccccuacaacagccgcuucgaguccguggccuggagcgcguccgccugccacgacggcaucaacuggcucacgaucgggaucagcggccccgacaacggcgccgucgccgugcugaaguacaacgggaucaucaccgacaccaucaaguccuggcggaacgacauccugcgcacccaggagagcgagugcgcgugcgugaacggcuccugcuucacgaucaugaccgacgggccgagcgacggccaggccuccuacaagaucuuccggaucgagaagggcaagaucgucaagagcguggagaugaacgcccccaacuaccacuacgaggagugcuccugcuaccccgacagcuccgagaucacgugcgugugccgcgacaacuggcacgggagcaaccggcccugggucuccuucaaccagaaccucgaguaccagaucggcuacaucugcagcgggaucuucggcgacaacccgcgccccaacgacaagaccggguccugcggccccgugagcuccaacggcgccaacggggugaagggcuucagcuucaaguacgggaacggcgucuggaucgggcggaccaagagcaucuccagccgcaagggcuucgagaugaucugggaccccaacggcuggaccgggaccgacaacaacuucuccaucaagcaggacaucgugggcaucaacgaguggagcggguacuccggcagcuucgugcagcacccggagcugaccgggcuggacugcauccggcccugcuucugggucgagcucauccgcggccggcccaaggagaacacgaucuggaccuccggcagcuccaucagcuucugcggggugaacuccgacaccgucggcuggagcuggcccgacggggccgagcugccguucaccaucgacaaguga

SEQ ID NO: 89203 - RNA, 1410 nt, Artificial Sequence; identical to SEQ ID NO: 87182
  derived and/or modified CDS sequence (opt1) from neuraminidase__InfluenzaA__AHM98748

SEQ ID NO: 89204 - RNA, 1410 nt, Artificial Sequence; identical to SEQ ID NO: 87182
  derived and/or modified CDS sequence (opt1) from neuraminidase__InfluenzaA__AHM98759

SEQ ID NO: 89205 - RNA, 1410 nt, Artificial Sequence
  derived and/or modified CDS sequence (opt1) from neuraminidase__InfluenzaA__AHM98770
augaaccccaaccagaagaucaucaccaucggcagcgugugcaugaccaucgggauggccaaccugauccuccagaucggcaacaucaucuccaucuggaucagccacuccauccagcugcgcaaccagagccagaucgagacgugcaaccaguccgccaucaccuacgagaacaacaccugggucaaccagaccuacgugaacaucagcaacacgaacuucgcggccgggcaguccguggucagcgugaagcuggccggcaacuccagccucugcccgguguccgggugggccaucuacagcaaggacaacuccauccggaucggcagcaagggcgacgucuucgugauccgcgagcccuucaucuccugcagcccccuggagugccggaccuucuuccugacccagggggcccuccugaacgacaagcacuccaacggcaccaucaaggaccgcagccccuaccggacgcugauguccugcccgaucggggaggugcccagccccuacaacagccgcuucgaguccgucgcguggagcgccuccgccugccacgacggcaucaacuggcucaccaucgggaucagcggccccgacaacggcgccguggcggugcugaaguacaacgggaucaucaccgacaccaucaaguccuggcggaacaacauccugcgcacgcaggagagcgagugcgccugcgucaacggcuccugcuucaccaucaugaccgacgggccgagcgacggccaggccuccuacaagaucuuccggaucgagaagggcaagaucgucaagagcguggagaugaacgcccccaacuaccacuacgaggagugcuccugcuaccccgacagcuccgagaucacgugcgugugccgcgacaacuggcacgggagcaaccggcccuggguguccuucaaccagaaccucgaguaccagaucggcuacaucugcagcgggaucuucggcgacaacccgcgccccaacgacaagaccggguccugcggccccgugagcuccaacggcgccaacggggucaagggcuucagcuucaaguacgggaacggcguguggaucgggcggaccaagagcaucuccagccgcaagggcuucgagaugaucugggaccccaacggcuggaccgggaccgacaacaacuucuccaucaagcaggacaucgugggcaucaacgaguggagcggguacuccggcagcuucguccagcacccggagcugacggggcuggacugcauccggcccugcuucuggguggagcucauccgcggccggcccaaggagaacaccaucuggaccuccggcagcuccaucagcuucugcggggugaacuccgacaccgucggcuggagcuggcccgacggggcggagcugccguucacgaucgacaaguga

SEQ ID NO: 89206 - RNA, 1410 nt, Artificial Sequence
  derived and/or modified CDS sequence (opt1) from neuraminidase__InfluenzaA__AHM98781
augaaccccaaccagaagaucaucaccaucggcagcgugugcaugaccaucgggauggccaaccugauccuccagaucggcaacaucaucuccaucuggaucagccacuccauccagcuggggaaccagaaccagaucgagacgugcaaccagagcgucaucaccuacgagaacaacaccugggugaaccagaccuacgugaacaucuccaacacgaacuucgccgcgggccagagcgucguguccgugaagcuggccgggaacagcucccucugcccggucagcggcugggccaucuacuccaaggacaacagcauccgcaucggcuccaagggggacguguucgugauccgggagcccuucaucagcugcagcccccuggagugccgcaccuucuuccugacccagggcgcccuccugaacgacaagcacuccaacgggaccaucaaggaccggucccccuaccgcacgcugaugagcugcccgaucggcgagguccccucccccuacaacagccgguucgagagcguggccugguccgcgagcgccugccacgacgggaucaacuggcucaccaucggcaucuccggccccgacaacggggccguggccguccugaaguacaacggcaucaucaccgacaccaucaagagcuggcgcaacaacauccugcggacgcaggaguccgagugcgcgugcgugaacgggagcugcuucaccaucaugaccgacggcccguccgacggccaggccagcuacaagaucuuccgcaucgagaaggggaagaucgugaaguccgucgagaugaacgcccccaacuaccacuacgaggagugcagcugcuaccccgacuccagcgagaucacgugcgugugccgggacaacuggcacggcuccaaccgccccugggugagcuucaaccagaaccucgaguaccagaucggguacaucugcuccggcaucuucggggacaacccgcggcccagcgacaagaccggcuccugcggccccgucagcuccaacggggccaacggcgugaagggguucagcuucaaguacggcaacgggguguggaucggccgcaccaagagcaucuccagccggaagggcuucgagaugaucugggaccccaacggguggaccggcaccgacaacuccuucagcaucaagcaggacaucgucgggaucaacgagugguccggcuacagcggguccuucgugcagcacccggagcugacgggccuggacugcauccgccccugcuucuggguggagcucauccggggccgccccaaggagaacaccaucuggaccagcggguccagcaucuccuucugcggcgucaacagcgggaccgugggcugguccuggcccgacggcgccgagcugccguucacgaucgacaaguga

SEQ ID NO: 89207 - RNA, 1410 nt, Artificial Sequence; identical to SEQ ID NO: 84733
  derived and/or modified CDS sequence (opt1) from neuraminidase__InfluenzaA__AHM98801

SEQ ID NO: 89208 - RNA, 1410 nt, Artificial Sequence; identical to SEQ ID NO: 84281
  derived and/or modified CDS sequence (opt1) from neuraminidase__InfluenzaA__AHM98812

SEQ ID NO: 89209 - RNA, 1410 nt, Artificial Sequence
  derived and/or modified CDS sequence (opt1) from neuraminidase__InfluenzaA__AHM98823
augaaccccaaccagaagaucaucaccaucggcagcgugugcaugaccaucgggauggccaaccugauccuccagaucggcaacaucaucuccaucuggaucagccacuccauccagcuggggaaccagagccagaucgagacgugcaaccaguccgucaucaccuacgagaacaacaccugggugaaccagaccuacaucaacaucagcaacacgaacuucgccgcgggccaguccguggucagcgugaagcuggccgggaacuccagccucugcccgguguccggcugggccaucuacagcaaggacaacuccauccgcaucggcagcaagggggacgucuucgugauccgggagcccuucaucuccugcagccccuccgagugccgcaccuucuuccugacccagggcgcccugcucaacgacaagcacagcaacgggaccaucaaggaccggucccccuaccgcacgcugaugagcugcccgaucggcgaggugcccagccccuacaacucccgguucgagagcgucgccugguccgcgagcgccugccacgacgggaucaacuggcugaccaucggcaucuccggccccgacaacggggccguggccgugcucaaguacaacggcaucaucaccgacaccaucaagagcuggcgcaacaacauccugcggacgcaggaguccgagugcgcgugcgucaacgggagcugcuucaccaucaugaccgacggcccguccgacggccaggccagcuacaagaucuuccgcaucgagaaggggaagaucgugaaguccguggagaugaacgcccccaacuaccacuacgaggagugcagcugcuaccccgacuccagcgagaucacgugcgucugccgggacaacuggcacggcuccaaccgccccugggugagcuucaaccagaaccuggaguaccagaucggguacaucugcuccggcaucuucggggacaacccgcggcccaacgacaagaccggcagcugcggccccguguccagcaacggggccaacggcgucaagggguucagcuucaaguacggcaacgggguguggaucggccgcaccaaguccaucagcucccggaagggcuucgagaugaucugggaccccaacggguggaccggcaccgacaacaacuucagcaucaagcaggacaucguggggaucaacgagugguccggcuacagcggguccuucguccagcacccggagcucacgggccuggacugcauccgccccugcuucuggguggagcugauccggggccgccccaaggagaacaccaucuggaccagcggguccagcaucuccuucugcggcgugaacagcgacaccgucgggugguccuggcccgacggcgccgagcucccguucacgaucgacaaguga

SEQ ID NO: 89210 - RNA, 1410 nt, Artificial Sequence
  derived and/or modified CDS sequence (opt1) from neuraminidase__InfluenzaA__AHM98839
augaaccccaaccagaagaucaucaccaucggcagcgugugcaugaccgucgggauggccaaccugauccuccagaucggcaacaucaucuccaucuggaucagccacuccauccagcuggggaaccagagccagaucgagacgugcaaccaguccgugaucaccuacgagaacaacaccugggugaaccagaccuacgucaacaucagcaacacgaacuucgccgcgggccaguccguggugagcgucaagcuggccgggaacuccagccucugcccgguguccggcugggccaucuacagcaaggacaacuccauccgcaucggcagcaagggggacguguucgucauccgggagcccuucaucuccugcagcccccuggagugccgcaccuucuuccugacccagggcgcccuccugaacgacaagcacuccaacgggaccaucaaggaccggagccccuaccgcacgcugauguccugcccgaucggcgaggugcccagccccuacaacagccgguucgaguccguggccuggagcgcguccgccugccacgacgggaucaacuggcucaccaucggcaucagcggccccgacaacggggccgucgccgugcugaaguacaacggcaucaucaccgacaccaucaaguccuggcgcaacaacauccugcggacgcaggagagcgagugcgcgugcgugaacggguccugcuucaccaucaugaccgacggcccgagcgacggccaggccuccuacaagaucuuccgcaucgagaaggggaagaucgucaagagcguggagaugaacgcccccaacuaccacuacgaggagugcuccugcuaccccgacagcuccgagaucacgugcgugugccgggacaacuggcacggcagcaaccgccccugggucuccuucaaccagaaccucgaguaccagaucggguacaucugcagcggcaucuucggggacaacccgcggcccaacgacaagaccggcuccugcggccccgugagcuccaacggggccaacggcgugaagggguucagcuucaaguacggcaacggggucuggaucggccgcaccaagagcaucuccagccggaagggcuucgagaugaucugggaccccaacggguggaccggcaccgacaacaacuucuccaucaagcaggacaucguggggaucaacgaguggagcggcuacuccgggagcuucgugcagcacccggagcugacgggccuggacugcauccgccccugcuucugggucgagcucauccggggccgccccaaggagaacaccaucuggaccuccgggagcuccaucagcuucugcggcgugaacuccgacaccgucggguggagcuggcccgacggcgccgagcugccguucacgaucgacaaguga

SEQ ID NO: 89211 - RNA, 1410 nt, Artificial Sequence; identical to SEQ ID NO: 84281
  derived and/or modified CDS sequence (opt1) from neuraminidase__InfluenzaA__AHM98850

SEQ ID NO: 89212 - RNA, 1410 nt, Artificial Sequence; identical to SEQ ID NO: 84281
  derived and/or modified CDS sequence (opt1) from neuraminidase__InfluenzaA__AHM98861

SEQ ID NO: 89213 - RNA, 1410 nt, Artificial Sequence
  derived and/or modified CDS sequence (opt1) from neuraminidase__InfluenzaA__AHM98901
augaaccccaaccagaagaucaucaccaucggcagcgugugcaugaccaucgggauggccaaccugauccuccagaucggcaacaucaucuccaucuggaucagccacuccauccagcuggggaaccagaaccagaucgagacgugcaaccagagcgucaucaccuacgagaacaacaccugggugaaccagaccuacgugaacaucuccaacacgaacuucgccgcgggccagagcgucguguccgugaagcuggccgggaacagcucccucugcccggucagcggcugggccaucuacuccaaggacaacagcauccgcaucggcuccaagggggacguguucgugauccgggagcccuucaucagcugcagcccccuggagugccgcaccuucuuccugacccagggcgcccuccugaacgacaagcacuccaacgggaccaucaaggaccggagcccccaccgcacgcugauguccugcccgaucggcgagguccccucccccuacaacagccgguucgagagcguggccugguccgcgagcgccugccacgacgggaucaacuggcucaccaucggcaucuccggccccgacaacggggccguggccguccugaaguacaacggcaucaucaccgacaccaucaagagcuggcgcaacaacauccugcggacgcaggaguccgagugcgcgugcgugaacgggagcugcuucaccaucaugaccgacggcccguccgacggccaggccagcuacaagaucuuccgcaucgagaaggggaagaucgugaaguccgucgagaugaacgcccccaacuaccacuacgaggagugcagcugcuaccccgacuccagcgagaucacgugcgugugccgggacaacuggcacggcuccaaccgccccugggugagcuucaaccagaaccucgaguaccagaucggguacaucugcuccggcaucuucggggacaacccgcggcccaacgacaagaccggcagcugcggccccgucuccagcaacggggccaacggcgugaagggguucuccuucaaguacggcaacgggguguggaucggccgcaccaagagcaucagcucccggaagggcuucgagaugaucugggaccccaacggguggaccggcaccgacaacaacuucagcaucaagcaggacaucgucgggaucaacgagugguccggcuacagcggguccuucgugcagcacccggagcugacgggccuggacugcauccgccccugcuucuggguggagcucauccggggccgccccaaggagaacaccaucuggaccagcggguccagcaucuccuucugcggcgucaacagcgacaccguggggugguccuggcccgacggcgccgagcugccguucacgaucgacaaguga

SEQ ID NO: 89214 - RNA, 1410 nt, Artificial Sequence; identical to SEQ ID NO: 87870
  derived and/or modified CDS sequence (opt1) from neuraminidase__InfluenzaA__AHM98912

SEQ ID NO: 89215 - RNA, 1410 nt, Artificial Sequence; identical to SEQ ID NO: 87870
  derived and/or modified CDS sequence (opt1) from neuraminidase__InfluenzaA__AHM98923

SEQ ID NO: 89216 - RNA, 1410 nt, Artificial Sequence; identical to SEQ ID NO: 87870
  derived and/or modified CDS sequence (opt1) from neuraminidase__InfluenzaA__AHM98935

SEQ ID NO: 89217 - RNA, 1410 nt, Artificial Sequence; identical to SEQ ID NO: 87870
  derived and/or modified CDS sequence (opt1) from neuraminidase__InfluenzaA__AHM98943

SEQ ID NO: 89218 - RNA, 1410 nt, Artificial Sequence; identical to SEQ ID NO: 87870
  derived and/or modified CDS sequence (opt1) from neuraminidase__InfluenzaA__AHM98954

SEQ ID NO: 89219 - RNA, 1410 nt, Artificial Sequence; identical to SEQ ID NO: 87870
  derived and/or modified CDS sequence (opt1) from neuraminidase__InfluenzaA__AHM98972

SEQ ID NO: 89220 - RNA, 1410 nt, Artificial Sequence; identical to SEQ ID NO: 87870
  derived and/or modified CDS sequence (opt1) from neuraminidase__InfluenzaA__AHM98978

SEQ ID NO: 89221 - RNA, 1410 nt, Artificial Sequence; identical to SEQ ID NO: 87870
  derived and/or modified CDS sequence (opt1) from neuraminidase__InfluenzaA__AHM98990

SEQ ID NO: 89222 - RNA, 1410 nt, Artificial Sequence; identical to SEQ ID NO: 87870
  derived and/or modified CDS sequence (opt1) from neuraminidase__InfluenzaA__AHM99000

SEQ ID NO: 89223 - RNA, 1410 nt, Artificial Sequence; identical to SEQ ID NO: 87870
  derived and/or modified CDS sequence (opt1) from neuraminidase__InfluenzaA__AHM99011

SEQ ID NO: 89224 - RNA, 1410 nt, Artificial Sequence; identical to SEQ ID NO: 87846
  derived and/or modified CDS sequence (opt1) from neuraminidase__InfluenzaA__AHM99022

SEQ ID NO: 89225 - RNA, 1410 nt, Artificial Sequence; identical to SEQ ID NO: 87846
  derived and/or modified CDS sequence (opt1) from neuraminidase__InfluenzaA__AHM99034

SEQ ID NO: 89226 - RNA, 1410 nt, Artificial Sequence; identical to SEQ ID NO: 87846
  derived and/or modified CDS sequence (opt1) from neuraminidase__InfluenzaA__AHM99046

SEQ ID NO: 89227 - RNA, 1410 nt, Artificial Sequence; identical to SEQ ID NO: 87846
  derived and/or modified CDS sequence (opt1) from neuraminidase__InfluenzaA__AHM99057

SEQ ID NO: 89228 - RNA, 1410 nt, Artificial Sequence; identical to SEQ ID NO: 87846
  derived and/or modified CDS sequence (opt1) from neuraminidase__InfluenzaA__AHM99068

SEQ ID NO: 89229 - RNA, 1410 nt, Artificial Sequence; identical to SEQ ID NO: 87870
  derived and/or modified CDS sequence (opt1) from neuraminidase__InfluenzaA__AHM99078

SEQ ID NO: 89230 - RNA, 1410 nt, Artificial Sequence
  derived and/or modified CDS sequence (opt1) from neuraminidase__InfluenzaA__AHN00720
augaacaccaaccagcgcaucaucaccaucggcacgaucugccugaucguggggaucaucagccuccugcugcagaucggcaacaucgucucccucuggaucagccacuccauccagaccgaggagaagucccaccccgaggugugcaaccagagcgugaucaccuacgagaacaacaccugggucaaccagacguacaucaacaucagcaacaccaacaucgccgccgggcagggcgugaccccgaucauccuggcggggaacuccagccugugccccaucuccggcugggccaucuacagcaaggacaacuccauccggaucggcagcaagggggacaucuucgugaugcgcgagcccuucaucuccugcagccaccucgagugccggaccuucuuccugacgcagggcgcccugcucaacgaccgccacuccaacgggaccgucaaggaccggagccccuaccgcacccugauguccugcccgaucggcgaggcccccagccccuacaacucccgguucgagagcguggccuggagcgcguccgccugccacgacgggaugggcuggcugaccaucggcaucagcgggcccgacaacggcgccguggccguccucaaguacaacgggaucaucacggacaccaugaaguccuggcgcaacaagauccugcggacccaggagagcgagugcgugugcaucaacggcuccugcuucaccaucaugacggacggcccgagcaacgggcaggcguccuacaagaucuucaagauggagaagggcaagaucaucaagagcaucgagcuggacgcccccaacuaccacuacgaggagugcuccugcuaccccgacaccgggaagguggucugcgugugccgcgacaacuggcacgccagcaaccggcccuggguguccuucgaccagaaccucgacuaccagaucggcuacaucugcagcggggucuucggcgacaacccgcgcuccaacgacggcaaggggaacugcggccccgugcugagcaacggggccaacggcgugaagggguucuccuuccgguacggcaacggcgucuggaucgggcgcaccaagagcaucuccagccgguccggcuucgagaugaucugggaccccaacggguggaccgagacggacagcagcuucuccaugaagcaggacaucaucgcccugaccgacuggagcggcuacuccgggagcuucgugcagcaccccgagcucaccggcaugaacugcauccgcccgugcuucuggguggagcugauccggggccagcccaaggaguccaccaucuggacgagcggguccagcaucuccuucugcggcgucaacagcgagaccgcguccuggagcuggcccgacggggccgaccugcccuucaccaucgacaaguga

SEQ ID NO: 89231 - RNA, 1410 nt, Artificial Sequence
  derived and/or modified CDS sequence (opt1) from neuraminidase__InfluenzaA__AHN00767
augaacaccaaccagcgcaucaucaccaucggcacgaucugccugaucguggggaucaucagccuccugcugcagaucggcaacaucgucucccucuggaucagccacuccauccagaccggggagaagucccaccccgaggugugcaaccagagcgugaucaccuacgagaacaacaccugggucaaccagacguacgugaacaucagcaacaccaacaucgccgccggccagggggugaccccgaucauccuggcgggcaacuccagccugugccccaucuccggcugggccaucuacagcaaggacaacuccauccggaucgggagcaagggcgacaucuucgucaugcgcgagcccuucaucuccugcagccaccucgagugccggaccuucuuccugacgcagggggcccugcucaacgaccgccacuccaacggcaccgugaaggaccggagccccuaccgcacccugauguccugcccgaucggggaggcccccagccccuacaacucccgguucgagagcguggccuggagcgcguccgccugccacgacggcaugggcuggcugaccaucgggaucagcggccccgacaacggggccgucgccgugcucaaguacaacggcaucaucacggacaccaucaaguccuggcgcaacaagauccugcggacccaggagagcgagugcgugugcaucaacggcuccugcuucaccaucaugacggacgggccgagcaacggccaggcguccuacaagaucuucaagauggagaaggggaagaucaucaagagcaucgagcuggacgcccccaacuaccacuacgaggagugcuccugcuaccccgacaccggcaaggucgugugcgugugccgcgacaacuggcacgccagcaaccggcccugggucuccuucgaccagaaccucgacuaccagaucggguacaucugcagcggcguguucggcgacaacccgcgcuccaacgacgggaagggcaacugcgggcccgugcugagcaacggcgccaacggggucaagggcuucuccuuccgguacggcaacgggguguggaucggccgcaccaagagcaucuccagccgguccggguucgagaugaucugggaccccaacggcuggaccgagacggacagcagcuucuccaugaagcaggacaucaucgcccugaccgacuggagcggguacuccggcagcuucgugcagcaccccgagcucaccggcaugaacugcauccgcccgugcuucugggucgagcugauccgggggcagcccaaggaguccaccaucuggacgagcggcuccagcaucuccuucugcggggugaacagcgagaccgcguccuggagcuggcccgacggcgccgaccugcccuucaccaucgacaaguga

SEQ ID NO: 89232 - RNA, 1398 nt, Artificial Sequence
  derived and/or modified CDS sequence (opt1) from neuraminidase__InfluenzaA__AHN96324
augaaccccaaccagaagauccugugcaccagcgccaccgccaucaucaucggcgcgaucgccgugcucaucgggaucgccaaccugggccugaacaucgggcuccaccugaagccguccugcaacugcagccacucccagcccgagacgaccaacaccagccagaccaucaucaacaacuacuacaacgagacgaacaucaccaacauccagauggaggagcgcaccucccggaacuucaacaaccugaccaagggccucugcacgaucaacagcuggcacaucuacgggaaggacaacgccguccgcaucggcgaguccagcgacgugcuggugacccgggagcccuacgucuccugcgaccccgacgagugccgcuucuacgcccugagccagggcaccaccauccgggggaagcacuccaacggcacgauccacgaccgcagccaguaccgggcgcucaucuccuggccgcugagcuccccgcccaccguguacaacagccgcguggagugcaucgggugguccagcaccuccugccacgacggcaagagccggaugagcaucugcaucuccgggcccaacaacaacgccagcgccgucgugugguacaaccgccggcccguggccgagaucaacaccugggcgcgcaacauccugcggacgcaggaguccgagugcgucugccacaacggcgugugccccguggucuucaccgacggcagcgccaccgggcccgccgacacccgcaucuacuacuucaaggagggcaagauccucaagugggagucccugacggggaccgccaagcacaucgaggagugcagcugcuacggcgagcggaccggcaucacgugcacgugccgcgacaacuggcagggguccaaccggcccguggugcagaucgacccggucgccaugacccacaccagccaguacaucugcucccccgugcugaccgacaacccccgccccaacgacccgaacaucggcaagugcaacgaccccuaccccgggaacaacaacaacggcgugaagggguucagcuaccucgacggcgcgaacaccuggcugggccggaccaucuccaccgccagccgcuccggguacgagaugcugaagguccccaacgcccucaccgacgaccggagcaagccgauccagggccagacgaucgugcugaacgccgacugguccggguacagcggcuccuucauggacuacugggccgagggggacugcuaccgcgcgugcuucuacguggagcugauccgcggccggcccaaggaggacaaggucugguggaccagcaacuccaucgugagcaugugcagcuccaccgaguuccucggccaguggaacuggcccgacggggccaagaucgaguacuuccuguga

SEQ ID NO: 89233 - RNA, 1410 nt, Artificial Sequence; identical to SEQ ID NO: 85167
  derived and/or modified CDS sequence (opt1) from neuraminidase__InfluenzaA__AHN96448

SEQ ID NO: 89234 - RNA, 1410 nt, Artificial Sequence; identical to SEQ ID NO: 86170
  derived and/or modified CDS sequence (opt1) from neuraminidase__InfluenzaA__AHN96450

SEQ ID NO: 89235 - RNA, 1410 nt, Artificial Sequence
  derived and/or modified CDS sequence (opt1) from neuraminidase__InfluenzaA__AHN96451
augaaccccaaccagaagaucaucaccaucggcagcgugucccugaccaucagcacgaucugcuucuucaugcagaucgccauccucaucaccaccgucacccugcacuucaagcaguacgaguucaacuccccgcccaacaaccaggugaugcugugcgagcccacgaucaucgagcgcaacaucaccgagaucauguaccucaccaacaccacgaucgagaaggagaucugccccaagccggccgaguaccggaacuggagcaagccccagugcgggaucaccggcuucgcgcccuucuccaaggacaacagcauccgccuguccgccgggggcgacaucugggugacccgggagcccuacgucagcugcgacccggacaagugcuaccaguucgcccuggggcagggcaccacgcucaacaacgugcacuccaacaacaccgugcgcgaccggacccccuaccgcacccugcugaugaacgagcucggcguccccuuccaccuggggacgaagcaggucugcaucgccuggagcuccagcuccugccacgacggcaaggccuggcugcacgugugcaucaccggggacgacaagaacgcgaccgccagcuucaucuacaacggccggcucguggacuccguggugagcugguccaaggagauccugcgcacccaggagagcgagugcgucugcaucaacgggacgugcaccguggugaugaccgacggcuccgccagcggcaaggccgacaccaagauccuguucaucgaggaggggaagaucguccacacgagcacccucuccggcagcgcgcagcacguggaggagugcuccugcuacccccgguacccgggggugcgcugcgucugccgggacaacuggaagggcagcaaccgccccaucguggacaucaacaucaaggaccacuccaucgugagcuccuacgucugcagcggccuggugggggacaccccgcggaagaacgacuccagcuccagcucccacugccuggaccccaacaacgaggagggcgggcacggcgugaaggggugggccuucgacgacggcaacgacgucuggaugggccgcaccaucaacgagacgagccggcucggguacgagaccuucaaggugaucgagggcugguccaaccccaagagcaagcugcagaucaaccgccaggucaucguggaccgcggggaccgguccggcuacagcgggaucuucuccguggagggcaagagcugcaucaaccggugcuucuacgucgagcugauccgcggccggaaggaggagaccgaggugcucuggaccagcaacuccaucguggucuucugcgggacgagcggcaccuacgggaccggcuccuggcccgacggggccgaccugaaccugaugcccaucuga

SEQ ID NO: 89236 - RNA, 1410 nt, Artificial Sequence
  derived and/or modified CDS sequence (opt1) from neuraminidase__InfluenzaA__AHN96453
augaaccccaaccagaagaucaucaccaucggcagcgugucccugaccaucagcacgaucugcuucuucaugcagaucgccauccucaucaccaccgucacccugcacuucaagcaguacgaguucaacuccccgcccaacaaccaggugaugcugugcgagcccacgaucaucgagcgcaacaucaccgagaucguguaccucaccaacaccacgaucgagaaggagaucugccccaagccggccgaguaccggaacuggagcaagccccagugcgggaucaccggcuucgcgcccuucuccaaggacaacagcauccgccuguccgccgggggcgacaucugggucacccgggagcccuacgugagcugcgacccggacaagugcuaccaguucgcccuggggcagggcaccacgcucgacaacgugcacuccaacaacaccguccgcaaccggacccccuaccgcacccugcugaugaacgagcucggcgugcccuuccaccuggggacgaagcaggucugcaucgccuggagcuccagcuccugccacgacggcaaggccuggcugcacgugugcaucaccggggacgacaagaacgcgaccgccagcuucaucuacaacggccggcucguggacuccguggucagcugguccaaggacauccugcgcacccaggagagcgagugcgugugcaucaacgggacgugcaccguggucaugaccgacggcuccgccagcggcaaggccgacaccaagauccuguucaucgaggaggggaagaucgugcacacgagcacccucuccggcagcgcgcagcacguggaggagugcuccugcuacccccgguacccggggguccgcugcgugugccgggacaacuggaagggcagcaaccgccccaucguggacaucaacaucaaggaccacuccaucgucagcuccuacgugugcagcggccuggugggggacaccccgcggaagaacgacuccagcuccagcucccacugccuggaccccaacaacgaggagggcgggcacggcgucaaggggugggccuucgacgacggcaacgacguguggaugggccgcaccaucaacgagacgagccggcucggguacgagaccuucaaggucaucgagggcugguccaaccccaagagcaagcugcagaucaaccgccaggugaucguggaccgcggggaccgguccggcuacagcgggaucuucuccaucgagggcaagagcugcaucaaccggugcuucuacgucgagcugauccgcggccggaaggaggagaccgaggugcucuggaccagcaacuccaucguggucuucugcgggacgagcggcaccuacgggaccggcuccuggcccgacggggccgaccugaaccugaugcccaucuga

SEQ ID NO: 89237 - RNA, 1410 nt, Artificial Sequence
  derived and/or modified CDS sequence (opt1) from neuraminidase__InfluenzaA__AHZ13526
augaaccccaaccagaagaucaucaccaucggcagcgugucccugaccaucgccacgaucugcuuccucaugcagaucgccauccuggucaccaccgugacccugcacuucaagcaguacgagugcagcuccccgcccaacaaccaggugaugcccugcgagcccaucaucaucgagcgcaacaugacggagaucgucuaccucaccaacaccaccaucgagaaggagaucugcccgaagcugguggaguaccggaacuggagcaagccccagugcaagaucacgggguucgcgcccuucuccaaggacaacagcauccgccuguccgccggcggggacaucugggugacccgggagcccuacgucagcugcgacccgggcaagugcuaccaguucgcccucgggcagggcaccacccugaacaacaagcacuccaacgacacgauccacgaccgcacccccuaccggacccugcucaugaacgagcugggcgugcccuuccaccuggggaccaagcaggucugcaucgccuggagcuccagcuccugccacgacggcaaggccuggcuccacgugugcgugacggggcacgacaagaacgcgaccgccagcuucaucuacgacggccgccugguggacuccaucgggagcugguccaagaacauccugcggacccaggagagcgagugcgucugcaucaacgggaccugcacgguggugaugaccgacggcuccgccagcgaccgcgccgacaccaagauccucuucaucgaggagggcaagaucguccacaucagcccccuguccggcagcgcgcagcacguggaggagugcuccugcuacccgcgguaccccggggugcgcugcgucugccgggacaacuggaagggcagcaaccgccccaucguggacaucaacgugaaggacuacuccaucgucagcuccuacgugugcagcggccuggugggggacacgccccggaagaacgacggcuccagcuccagcuacugccgcaacccgaacaacgagaaggggaaccacggcgucaaggggugggccuucgacgacggcaacgacguguggaugggccggaccaucggggaggagcuccgcuccggcuacgagaccuucaaggucaucgggggcuggagcacccccaacuccaagcugcagaucaaccgccaggugaucguggacagcaacaaccgguccggguacagcggcaucuucuccgucgagggcaagagcugcaucaaccggugcuucuacguggagcugauccgcgggcgggagcaggagacccgcgugugguggacgagcaacuccaucgucguguucugcggcaccagcgggaccuacggcaccggguccuggcccgacggcgccgacaucaaccucaugcccaucuga

SEQ ID NO: 89238 - RNA, 1413 nt, Artificial Sequence; identical to SEQ ID NO: 84229
  derived and/or modified CDS sequence (opt1) from neuraminidase__InfluenzaA__AHZ13584

SEQ ID NO: 89239 - RNA, 1410 nt, Artificial Sequence; identical to SEQ ID NO: 86946
  derived and/or modified CDS sequence (opt1) from neuraminidase__InfluenzaA__AHZ35575

SEQ ID NO: 89240 - RNA, 1410 nt, Artificial Sequence; identical to SEQ ID NO: 86946
  derived and/or modified CDS sequence (opt1) from neuraminidase__InfluenzaA__AHZ35587

SEQ ID NO: 89241 - RNA, 1410 nt, Artificial Sequence
  derived and/or modified CDS sequence (opt1) from neuraminidase__InfluenzaA__AHZ35611
augaaccccaaccagaagaucaucaccaucggcagcgugucccugaccaucagcacgaucugcuucuucaugcagaucgccauccucaucaccaccgucacccugcacuucaagcaguacgaguucaacuccccgcccaacaaccaggugaugcugugcgagcccacgaucaucgagcgcaacaucaccgagaucguguaccucaccaacaccacgaucgagaaggagaucugccccaagccggccgaguaccggaacuggagcaagccccagugcgacaucaccggguucgcgcccuucuccaaggacaacagcauccgccuguccgccggcggggacaucugggucacccgggagcccuacgugagcugcgacccggacaagugcuaccaguucgcccugggccaggggaccacgcucaacaacgugcacuccaacaacaccguccgcgaccggacccccuaccgcacccugcugaugaacgagcucggcgugcccuuccaccugggcacgaagcaggucugcaucgccuggagcuccagcuccugccacgacgggaaggccuggcugcacgugugcaucaccggcgacgacaagaacgcgaccgccagcuucaucuacaacgggcggcucguggacuccguggucagcugguccaaggagauccugcgcacccaggagagcgagugcgugugcaucaacggcacgugcaccguggucaugaccgacggguccgccagcggcaaggccgacaccaagauccuguucaucgaggagggcaagaucgugcacacgagcacccucuccgggagcgcgcagcacguggaggagugcuccugcuacccccgguacccgggcguccgcugcgugugccgggacaacuggaaggggagcaaccgccccaucguggacaucaacaucaaggaccacuccaucgucagcuccuacgugugcagcggccuggugggcgacaccccgcggaagaacgacuccagcuccagcucccacugccuggaccccaacaacgaggagggcgggcacggggucaagggcugggccuucgacgacgggaacgacguguggaugggccgcaccaucaacgagacgagccggcucggcuacgagaccuucaaggucaucgaggggugguccaaccccaagagcaagcugcagaucaaccgccaggugaucguggaccggggcgaccgcuccggguacagcggcaucuucuccgucgaggggcggagcugcaucaaccgcugcuucuacguggagcugauccggggccgcaaggaggagaccgaggugcucuggaccagcaacuccaucgucguguucugcggcacgagcgggaccuacggcaccggguccuggcccgacggcgccgaccugaaccugaugcccaucuga

SEQ ID NO: 89242 - RNA, 1410 nt, Artificial Sequence; identical to SEQ ID NO: 86946
  derived and/or modified CDS sequence (opt1) from neuraminidase__InfluenzaA__AHZ35623

SEQ ID NO: 89243 - RNA, 1410 nt, Artificial Sequence; identical to SEQ ID NO: 86946
  derived and/or modified CDS sequence (opt1) from neuraminidase__InfluenzaA__AHZ35635

SEQ ID NO: 89244 - RNA, 1410 nt, Artificial Sequence
  derived and/or modified CDS sequence (opt1) from neuraminidase__InfluenzaA__AHZ35647
augaaccccaaccagaagaucaucaccaucggcagcgugucccugaccaucagcacgaucugcuucuucaugcagaucgccauccucaucaccaccgucacccugcacuucaagcaguacgaguucaacuccccgcccaacaaccaggugaugcugugcgagcccacgaucaucgagcgcaacaucaccgagaucguguaccucaccaacaccacgaucgagaaggagaucugccccaagccggccgaguaccggaacuggagcaagccccagugcgacaucaccggguucgcgcccuucuccaaggacaacagcauccgccuguccgccggcggggacaucugggucacccgggagcccuacgugagcugcgacccggacaagugcuaccaguucgcccugggccaggggaccacgcucaacaacgugcacuccaacaacaccguccgcgaccggacccccuaccgcacccugcugaugaacgagcucggcgugcccuuccaccugggcacgaagcaggucugcaucgccuggagcuccagcuccugccacgacgggaaggccuggcugcacgugugcaucaccggcgacgacaagaacgcgaccgccagcuucaucuacaacgggcggcucguggacuccguggucagcugguccaaggagauccugcgcacccaggagagcgagugcgugugcaucaacggcacgugcaccguggucaugaccgacggguccgccagcggcaaggccgacaccaagauccuguucaucgaggagggcaagaucgugcacacgagcacccucuccgggagcgcgcagcacguggaggagugcuccugcuacccccgguacccggacguccgcugcgugugccgggacaacuggaagggcagcaaccgccccaucguggacaucaacaucaaggaccacuccaucgucagcuccuacgugugcagcgggcuggugggcgacaccccgcggaagaacgacuccagcuccagcucccacugccuggaccccaacaacgaggagggcgggcacggcgucaaggggugggccuucgacgacggcaacgacguguggauggggcgcaccaucaacgagacgagccggcucggcuacgagaccuucaaggucaucgagggcugguccaaccccaagagcaagcugcagaucaaccgccaggugaucguggaccgcggggaccgguccggcuacagcgggaucuucuccgucgagggcaagagcugcaucaaccggugcuucuacguggagcugauccgcgggcggaaggaggagaccgaggugcucuggaccagcaacuccaucgucguguucugcggcacgagcggcaccuacgggaccggcuccuggcccgacggggccgaccugaaccugaugcccaucuga

SEQ ID NO: 89245 - RNA, 1410 nt, Artificial Sequence; identical to SEQ ID NO: 86946
  derived and/or modified CDS sequence (opt1) from neuraminidase__InfluenzaA__AHZ35659

SEQ ID NO: 89246 - RNA, 1410 nt, Artificial Sequence; identical to SEQ ID NO: 86946
  derived and/or modified CDS sequence (opt1) from neuraminidase__InfluenzaA__AHZ35671

SEQ ID NO: 89247 - RNA, 1410 nt, Artificial Sequence; identical to SEQ ID NO: 86946
  derived and/or modified CDS sequence (opt1) from neuraminidase__InfluenzaA__AHZ35683

SEQ ID NO: 89248 - RNA, 1410 nt, Artificial Sequence
  derived and/or modified CDS sequence (opt1) from neuraminidase__InfluenzaA__AHZ35695
augaaccccaaccagaagaucaucaccaucggcagcgugucccugaccaucagcacgaucugcuucuucaugcagaucgccauccucaucaccaccgucacccugcacuucaagcaguacgaguucaacccgccgcccaacaaccaggugaugcugugcgagcccacgaucaucgagcgcaacaucaccgagaucguguaccucaccaacaccacgaucgagaaggagaucugccccaagcccgccgaguaccggaacugguccaagccccagugcgacaucaccggguucgcgcccuucagcaaggacaacuccauccgccugagcgccggcggggacaucugggucacccgggagccguacguguccugcgaccccgacaagugcuaccaguucgcccugggccaggggaccacgcucaacaacgugcacagcaacaacaccguccgcgaccggacccccuaccgcacccugcugaugaacgagcucggcgugcccuuccaccugggcacgaagcaggucugcaucgccugguccagcuccagcugccacgacgggaaggccuggcugcacgugugcaucaccggcgacgacaagaacgcgaccgccuccuucaucuacaacgagcggcucguggacagcguggucuccuggagcaaggagauccugcgcacccaggaguccgagugcgugugcaucaacgggacgugcaccguggucaugaccgacggcagcgccuccgggaaggccgacaccaagauccuguucaucgaggagggcaagaucgugcacacgagcacccucagcggcuccgcgcagcacguggaggagugcagcugcuacccgcgguaccccgggguccgcugcgugugccgggacaacuggaagggcuccaaccgccccaucguggacaucaacaucaaggaccacagcaucgucuccagcuacgugugcuccgggcuggugggcgacacgccccggaagaacgacagcuccagcuccagccacugccuggacccgaacaacgaggagggcgggcacggcgucaaggggugggccuucgacgacggcaacgacguguggauggggcgcaccaucaacgagaccucccggcucggcuacgagaccuucaaggucaucgagggcuggagcaaccccaaguccaagcugcagaucaaccgccaggugaucguggaccgcggggaccggagcggcuacuccgggaucuucagcgucgagggcaacuccugcaucaaccggugcuucuacguggagcugauccgcgggcggaaggaggagaccgaggugcucuggaccagcaacagcaucgucguguucugcggcacguccggcaccuacgggaccggcagcuggcccgacggggccgaccugaaccugaugcccaucuga

SEQ ID NO: 89249 - RNA, 1410 nt, Artificial Sequence
  derived and/or modified CDS sequence (opt1) from neuraminidase__InfluenzaA__AHZ35719
augaaccccaaccagaagaucaucaccaucggcagcgugucccugaccaucagcacgaucugcuucuucaugcagaucgccauccucaucaccaccgucacccugcacuucaagcaguacgaguucaacuccccgcccaacaaccaggugaugcugugcgagcccacgaucaucgagcgcaacaucaccgagaucguguaccucaccaacaccacgaucgagaaggagaucugccccaagccggccgaguaccggaacuggagcaagccccagugcgacaucaccggguucgcgcccuucuccaaggacaacagcauccgccuguccgccggcggggacaucugggucacccgggagcccuacgugagcugcgacccggacaagugcuaccaguucgcccugggccaggggaccacgcucaacaacgugcacuccaacaacaccguccgcgaccggacccccuaccgcacccugcugaugaacgagcucggcgugcccuuccaccugggcacgaagcaggucugcaucgccuggagcuccagcuccugccacgacgggaaggccuggcugcacgugugcaucaccggcgacgacaagaacgcgaccgccagcuucaucuacaacgggcggcucguggacuccguggucagcugguccaaggagauccugcgcacccaggagagcgagugcgugugcaucaacggcacgugcaccguggucaugaccgacggguccgccagcggcaaggccgacaccaagauccuguucaucgaggagggcaagaucgugcacacgagcacccucuccgggagcgcgcagcacguggaggagugcuccugcuacccccgguacccgggcguccgcugcgugugccgggacaacuggaaggggagcaaccgccccaucguggacaucaacaucaaggaccacuccaucgucagcuccuacgugugcagcggccuggugggcgacaccccgcggaagaacgacuccagcuccagcucccacugccuggaccccaacaacgaggagggcgggcacggggucaagggcugggccuucgacgacgggaacgacguguggaugggccgcaccaucaacgagacgagccggcucggcuacgagaccuucaaggucaucgaggggugguccaaccccaagagcaagcugcagaucaaccgccaggugaucguggaccggggcgaccgcuccggguacagcggcaucuucuccgucgagggcaagagcugcaucaaccggugcuucuacguggagcugauccgcgggcggaaggaggagaccgaggugcucuggaccagcaacuccaucgucguguucugcggcacgagcgggaccuacggcaccggguccuggcccgacggcgccgaccugaaccugacccccaucuga

SEQ ID NO: 89250 - RNA, 1410 nt, Artificial Sequence; identical to SEQ ID NO: 86946
  derived and/or modified CDS sequence (opt1) from neuraminidase__InfluenzaA__AHZ35731

SEQ ID NO: 89251 - RNA, 1410 nt, Artificial Sequence; identical to SEQ ID NO: 86946
  derived and/or modified CDS sequence (opt1) from neuraminidase__InfluenzaA__AHZ35743

SEQ ID NO: 89252 - RNA, 1410 nt, Artificial Sequence; identical to SEQ ID NO: 86946
  derived and/or modified CDS sequence (opt1) from neuraminidase__InfluenzaA__AHZ35755

SEQ ID NO: 89253 - RNA, 1410 nt, Artificial Sequence; identical to SEQ ID NO: 86946
  derived and/or modified CDS sequence (opt1) from neuraminidase__InfluenzaA__AHZ35767

SEQ ID NO: 89254 - RNA, 1410 nt, Artificial Sequence; identical to SEQ ID NO: 86946
  derived and/or modified CDS sequence (opt1) from neuraminidase__InfluenzaA__AHZ35779

SEQ ID NO: 89255 - RNA, 1410 nt, Artificial Sequence
  derived and/or modified CDS sequence (opt1) from neuraminidase__InfluenzaA__AHZ35803
augaaccccaaccagaagaucaucaccaucggcagcgugugcaugaccaucgggauggccaaccugaugcuccagaucggcaacaucaucuccaucuggaucagccacuccauccagcuggggaacaagaaccagaucgagacgugcaaccagagcgucaucaccuacgagaacaacaccugggugaaccagaccuacgugaacaucuccaacacgaacuucgccgcgggccagagcgucguguccgugaagaucgccgggaacagcucccugugcccggucagcggcugggccaucuacuccaaggacaacagcauccgcaucggcuccaagggggacguguucgugauccgggagcccuucaucagcugcagcccccucgagugccgcaccuucuuccugacccagggcgcccugcucaacgacaagcacuccaacgggaccaucaaggaccggucccccuaccgcacgcugaugagcugcccgaucggcgagguccccucccccuacaacagccgguucgagagcguggccugguccgcgagcgccugccacgacgggaucaacuggcugaccaucggcaucuccggccccgacaacggggccguggccguccucaaguacaacggcaucaucaccgacaccaucaagagcuggcgcaacaacauccugcggacgcaggaguccgagugcgcgugcgugaacgggagcugcuucaccaucaugaccgacggcccguccgacggccaggccagcuacaagaucuuccgcaucgagaaggggaagaucgugaaguccgucgagaugaacgcccccaacuaccacuacgaggagugcagcugcuaccccgacuccagcgagaucacgugcgugugccgggacaacuggcacggcuccaaccgccccugggugagcuucaaccagaaccuggaguaccagaucggguacaucugcuccggcaucuucggggacaacccgcggccccacgacaagaccggcagcugcggccccgucuccagcaacggggccaacggcgugaagggguucuccuucaaguacggcaacgggguguggaucggccgcaccaagagcaucagcucccggaagggcuucgagaugaucugggaccccaacggguggaccggcaccgacaacaacuucagcaucaagcaggacaucgucgggaugaacgagugguccggcuacagcggguccuucgugcagcacccggagcucacgggccuggacugcauccgccccugcuucuggguggagcugauccggggccgccccaaggagaacaccaucuggaccagcggguccagcaucuccuucugcggcgucaacagcgacaccguggggugguccuggcccgacggcgccgagcucccguucacgaucgacaaguga

SEQ ID NO: 89256 - RNA, 1410 nt, Artificial Sequence
  derived and/or modified CDS sequence (opt1) from neuraminidase__InfluenzaA__AHZ35814
augaaccccaaccagaagaucaucaccaucggcagcgugucccugaccaucagcacgaucugcuucuucaugcagaucgccauccucaucaccaccgucacccugcacuucaagcaguacgaguucaacuccccgcccaacaaccaggugaugcugugcgagcccacgaucaucgagcgcaacaucaccgagaucguguaccucaccaacaccacgaucgagaaggagaucugccccaagcuggccgaguaccggaacuggagcaagccgcagugcgacaucaccggguucgcgcccuucuccaaggacaacagcauccgccuguccgccggcggggaccucugggucacccgggagcccuacgugagcugcgaccccgacaagugcuaccaguucgcccugggccaggggaccacgcugaacaacgugcacuccaacaacaccguccgcgaccggaccccguaccgcacccuccugaugaacgagcugggcgugcccuuccaccucggcacgaagcaggucugcaucgccuggagcuccagcuccugccacgacgggaaggccuggcugcacgugugcaucaccggcgacgacaagaacgcgaccgccagcuucaucuacaacgggcggcugguggacuccguggucagcugguccaaggagauccuccgcacccaggagagcgagugcgugugcaucaacggcacgugcaccguggucaugaccgacggguccgccagcggcaaggccgacaccaagauccuguucaucgaggagggcaagaucgugcacacgagcacccuguccgggagcgcgcagcacguggaggagugcuccugcuacccccgguaccccggcguccgcugcgugugccgggacaacuggaaggggagcaaccgcccgaucguggacaucaacaucaaggaccacuccaucgucagcuccuacgugugcagcggccucgugggcgacacgccccggaagaacgacuccagcuccagcucccacugccuggaccccaacaacgaggagggcgggcacggggucaagggcugggccuucgacgacgggaacgacguguggaugggccgcaccaucaacgagaccagccggcugggcuacgagaccuucaaggucaucgaggggugguccaaccccaagagcaagcuccagaucaaccgccaggugaucguggaccggggcaaccgcuccggguacagcggcaucuucuccgucgagggcaagagcugcaucaaccggugcuucuacguggagcugauccgcgggcggaaggaggagaccgaggugcuguggaccagcaacuccaucgucguguucugcggcacgagcgggaccuacggcaccggguccuggccggacggcgccgaccucaaccugaugcccaucuga

SEQ ID NO: 89257 - RNA, 1410 nt, Artificial Sequence
  derived and/or modified CDS sequence (opt1) from neuraminidase__InfluenzaA__AHZ35837
augaaccccaaccagaagaucaucaccaucggcagcgugugcaugaccaucgggauggccaaccugaugcuccagaucggcaacaucaucuccaucuggaucagccacuccauccagcuggggaacaagaaccagaucgagacgugcaaccagagcgucaucaccuacgagaacaacaccugggugaaccagaccuacgugaacaucuccaacacgaacuucgccgcgggccagagcgucguguccgugaagaucgccgggaacagcucccugugcccggucagcggcugggccaucuacuccaaggacaacagcauccgcaucggcuccaagggggacguguucgugauccgggagcccuucaucagcugcagcccccucgagugccgcaccuucuuccugacccagggcgcccugcucaacgacaagcacuccaacgggaccaucaaggaccggucccccuaccgcacgcugaugagcugcccgaucggcgagguccccucccccuacaacagccgguucgagagcguggccugguccgcgagcgccugccacgacgggaucaacuggcugaccaucggcaucuccggccccgacaacggggccguggccguccucaaguacaacggcaucaucaccgacaccaucaagagcuggcgcaacaacauccugcggacgcaggaguccgagugcgcgugcgugaacgggagcugcuucaccaucaugaccgacggcccguccgacggccaggccagcuacaagaucuuccgcaucgagaaggggaagaucgugaaguccgucgagaugaacgcccccaacuaccacuacgaggagugcagcugcuaccccgacuccagcgagaucacgugcgugugccgggacaacuggcacggcuccaaccgccccugggugagcuucaaccagaaccuggaguaccagaucggguacaucugcuccggcaucuucggggacaacccgcggccccacgacaagaccggcagcugcggccccgucuccagcaacggggccaacggcgugaagggguucuccuucaaguacggcaacgggguguggaucggccgcaccaagagcaucagcucccggaagggcuucgagaugaucugggaccccaacggguggaccggcaccgacaacaacuucagcaucaagcaggacaucgucgggaucaacgagugguccggcuacagcggguccuucgugcagcacccggagcucacgggccuggacugcauccgccccugcuucuggguggagcugauccggggccgccccaaggagaacaccaucuggaccagcggguccagcaucuccuucugcggcgucaacagcgacaccguggggugguccuggcccgacggcgccgagcucccguucacgaucgacaaguga

SEQ ID NO: 89258 - RNA, 1410 nt, Artificial Sequence; identical to SEQ ID NO: 89257
  derived and/or modified CDS sequence (opt1) from neuraminidase__InfluenzaA__AHZ35848

SEQ ID NO: 89259 - RNA, 1410 nt, Artificial Sequence; identical to SEQ ID NO: 89257
  derived and/or modified CDS sequence (opt1) from neuraminidase__InfluenzaA__AHZ35859

SEQ ID NO: 89260 - RNA, 1410 nt, Artificial Sequence; identical to SEQ ID NO: 89256
  derived and/or modified CDS sequence (opt1) from neuraminidase__InfluenzaA__AHZ35870

SEQ ID NO: 89261 - RNA, 1410 nt, Artificial Sequence; identical to SEQ ID NO: 89256
  derived and/or modified CDS sequence (opt1) from neuraminidase__InfluenzaA__AHZ35882

SEQ ID NO: 89262 - RNA, 1410 nt, Artificial Sequence
  derived and/or modified CDS sequence (opt1) from neuraminidase__InfluenzaA__AHZ35894
augaaccccaaccagaagaucaucaccaucggcagcgugugcaugaccaucgggauggccaaccugaugcuccagaucggcaacaucaucuccaucuggaucagccacuccauccagcuggggaacaagaaccagaucgagacgugcaaccagagcgucaucaccuacgagaacaacaccugggugaaccagaccuacgugaacaucuccaacacgaacuucgccgcgggccagagcgucguguccgugaagaucgccgggaacagcucccugugcccggucagcggcugggccaucuacuccaaggacaacagcauccgcaucggcuccaagggggacguguucgugauccgggagcccuucaucagcugcagcccccucgagugccgcaccuucuuccugacccagggcgcccugcucaacgacaagcacuccaacgggaccaucaaggaccggucccccuaccgcacgcugaugagcugcccgaucggcgagguccccucccccuacaacagccgguucgagagcguggccugguccgcgagcgccugccacgacgggaucaacuggcugaccaucggcaucuccggccccgacaacggggccguggccguccucaaguacaacggcaucaucaccgacaccaucaagagcuggcgcaacaacauccugcggacgcaggaguccgagugcgcgugcgugaacgggagcugcuucaccaucaugaccgacggcccguccgacggccaggccagcuacaagaucuuccgcaucgagaaggggaagaucgugaaguccgucgagaugaacgcccccaacuaccacuacgaggagugcagcugcuaccccgacuccagcgagaucacgugcgugugccgggacaacuggcacggcuccaaccgccccugggugagcuucaaccagaaccuggaguaccagaucggguacaucugcuccggcaucuucggggacaacccgcggccccacgacaagaccggcagcugcggccccgucuccagcaacggggccaacggcgugaagggguucuccuucaaguacggcagcgggguguggaucggccgcaccaagagcaucuccagccggaagggcuucgagaugaucugggaccccaacggguggaccggcaccgacaacaacuucuccaucaagcaggacaucgucgggaucaacgaguggagcggcuacuccgggagcuucgugcagcacccggagcucacgggccuggacugcauccgccccugcuucuggguggagcugauccggggccgccccaaggagaacaccaucuggaccuccgggagcuccaucagcuucugcggcgucaacuccgacaccgugggguggagcuggcccgacggcgccgagcucccguucacgaucgacaaguga

SEQ ID NO: 89263 - RNA, 1410 nt, Artificial Sequence; identical to SEQ ID NO: 89257
  derived and/or modified CDS sequence (opt1) from neuraminidase__InfluenzaA__AHZ35905

SEQ ID NO: 89264 - RNA, 1410 nt, Artificial Sequence; identical to SEQ ID NO: 89257
  derived and/or modified CDS sequence (opt1) from neuraminidase__InfluenzaA__AHZ35916

SEQ ID NO: 89265 - RNA, 1410 nt, Artificial Sequence; identical to SEQ ID NO: 84982
  derived and/or modified CDS sequence (opt1) from neuraminidase__InfluenzaA__AHZ35927

SEQ ID NO: 89266 - RNA, 1410 nt, Artificial Sequence
  derived and/or modified CDS sequence (opt1) from neuraminidase__InfluenzaA__AHZ35938
augaaccccaaccagaagaucaucaccaucggcagcgugugcaugaucaucgggauggccaaccugauccuccagaucggcaacaucaucuccaucuggaucagccacuccauccagcuggggaaccagaaccagaucgagaccugcaaccagagcgucaucacguacgagaacaacaccugggugaaccagaccuacgugaacaucuccaacaccaacuucgccgcgggccagagcgucguguccgugaagcuggccgggaacagcucccucugcccggucagcggcugggccaucuacuccaaggacaacagcauccgcaucggcuccaagggggacguguucgugauccgggagcccuucaucagcugcagcccccuggagugccgcacguucuuccugacccagggcgcccuccugaacgacaagcacuccaacgggaccaucaaggaccggucccccuaccgcacccugaugagcugcccgaucggcgagguccccucccccuacaacagccgguucgagagcguggccugguccgcgagcgccugccacgacgggaucaacuggcucacgaucggcaucuccggccccgacaacggggccguggccguccugaaguacaacggcaucaucaccgacaccaucaagagcuggcgcaacaacauccugcggacccaggaguccgagugcgcgugcgugaacgggagcugcuucacgaucaugaccgacggcccguccgacggccaggccagcuacaagaucuuccgcaucgagaaggggaagaucgugaaguccgucgagaugaacgcccccaacuaccacuacgaggagugcagcugcuaccccgacuccagcgagaucacgugcgugugccgggacaacuggcacggcuccaaccgccccugggugagcuucaaccagaaccucgaguaccagaucggguacaucugcuccggcaucuucggggacaacccgcggccccacgacaagaccggcagcugcggccccgucuccagcaacggggccaacggcgugaagggguucuccuucaaguacggcaacgggguguggaucggccgcaccaagagcaucagcucccggaagggcuucgagaugaucugggaccccaacggguggaccggcaccgacaacaacuucagcaucaagcaggacaucgucgggaucaacgagugguccggcuacagcggguccuucgugcagcacccggagcugaccggccuggacugcauccgccccugcuucuggguggagcucauccggggccgccccaaggagaacacgaucuggaccagcggguccagcaucuccuucugcggcgucaacagcgacaccguggggugguccuggcccgacggcgccgagcugccguucaccaucgacaaguga

SEQ ID NO: 89267 - RNA, 1410 nt, Artificial Sequence; identical to SEQ ID NO: 89256
  derived and/or modified CDS sequence (opt1) from neuraminidase__InfluenzaA__AHZ35949

SEQ ID NO: 89268 - RNA, 1410 nt, Artificial Sequence
  derived and/or modified CDS sequence (opt1) from neuraminidase__InfluenzaA__AHZ35961
augaaccccaaccagaagaucaucaccaucggcagcgugugcaugaccaucgggauggccaaccugaugcuccagaucggcaacaucaucuccaucuggaucagccacuccauccagcuggggaacaagaaccagaucgagacgugcaaccagagcgucaucaccuacgagaacaacaccugggugaaccagaccuacgugaacaucuccaacacgaacuucgccgcgggccagagcgucguguccgugaagaucgccgggaacagcucccugugcccggucagcggcugggccaucuacuccaaggacaacagcauccgcaucggcuccaagggggacguguucgugauccgggagcccuucaucagcugcagcccccucgagugccgcaccuucuuccugacccagggcgcccugcucaacgacaagcacuccaacgggaccaucaaggaccggucccccuaccgcacgcugaugagcugcccgaucggcgagguccccucccccuacaacagccgguucgagagcguggccugguccgcgagcgccugccacgacgggaucaacuggcugaccaucggcaucuccggccccgacaacggggccguggccguccucaaguacaacggcaucaucaccgacaccaucaagagcuggcgcaacaacauccugcggacgcaggaguccgagugcgcgugcgugaacgggagcugcuucaccaucaugaccgacggcccguccgacggccaggccagcuacaagaucuuccgcaucgagaaggggaagaucgugaaguccgucgagaugaacgcccccaacuaccacuacgaggagugcagcugcuaccccgacuccagcgagaucacgugcgugugccgggacaacuggcacggcuccaaccgccccugggugagcuucaaccagaaccuggaguaccagaucggguacaucugcuccggcaucuucggggacaacccgcggccccacgacaagaccggcagcugcggccccgucuccagcaacggggccaacggcgugaagggguucuccuucaaguacggcaacgggguguggaucggccgcaccaagagcaucagcucccggaagggcuucgagaugaucugggaccccaacggguggaccggcaccgacaacaacuucagcaucaagcaggacaucgucgggaucaacgagugguccggcuacagcggguccuucgugcagcacccggagcucacgggccuggacugcauccgccccugcuucuggguggagcugauccggggccgccccaaggagagcaccaucuggaccuccgggagcuccaucagcuucugcggcgucaacuccgacaccgugggguggagcuggcccgacggcgccgagcucccguucacgaucgacaaguga

SEQ ID NO: 89269 - RNA, 1410 nt, Artificial Sequence; identical to SEQ ID NO: 89257
  derived and/or modified CDS sequence (opt1) from neuraminidase__InfluenzaA__AHZ35972

SEQ ID NO: 89270 - RNA, 1410 nt, Artificial Sequence
  derived and/or modified CDS sequence (opt1) from neuraminidase__InfluenzaA__AHZ35983
augaaccccaaccagaagaucaccaccaucggcagcgugugcaugacgaucgggauggccaaccugaugcuccagaucggcaacaucaucuccaucuggaucagccacuccauccagcuggggaacaagaaccagaucgagaccugcaaccagagcgucaucaccuacgagaacaacaccugggugaaccagacguacgugaacaucuccaacaccaacuucgccgcgggccagagcgucguguccgugaagaucgccgggaacagcucccugugcccggucagcggcugggccaucuacuccaaggacaacagcauccgcaucggcuccaagggggacguguucgugauccgggagcccuucaucagcugcagcccccucgagugccgcaccuucuuccugacccagggcgcccugcucaacgacaagcacuccaacgggacgaucaaggaccggucccccuaccgcacccugaugagcugcccgaucggcgagguccccucccccuacaacagccgguucgagagcguggccugguccgcgagcgccugccacgacgggaucaacuggcugaccaucggcaucuccggccccgacaacggggccguggccguccucaaguacaacggcaucaucaccgacacgaucaagagcuggcgcaacaacauccugcggacccaggaguccgagugcgcgugcgugaacgggagcugcuucaccaucaugaccgacggcccguccgacggccaggccagcuacaagaucuuccgcaucgagaaggggaagaucgugaaguccgucgagaugaacgcccccaacuaccacuacgaggagugcagcugcuaccccgacuccagcgagaucacgugcgugugccgggacaacuggcacggcuccaaccgccccugggugagcuucaaccagaaccuggaguaccagaucggguacaucugcuccggcaucuucggggacaacccgcggccccacgacaagaccggcagcugcggccccgucuccagcaacggggccaacggcgugaagggguucuccuucaaguacggcaacgggguguggaucggccgcaccaagagcaucagcucccggaagggcuucgagaugaucugggaccccaacggguggaccggcacggacaacaacuucagcaucaagcaggacaucgucgggaucaacgagugguccggcuacagcggguccuucgugcagcacccggagcucaccggccuggacugcauccgccccugcuucuggguggagcugauccggggccgccccaaggagaacaccaucuggaccagcggguccagcaucuccuucugcggcgucaacagcgacacgguggggugguccuggcccgacggcgccgagcucccguucaccaucgacaaguga

SEQ ID NO: 89271 - RNA, 1410 nt, Artificial Sequence; identical to SEQ ID NO: 89257
  derived and/or modified CDS sequence (opt1) from neuraminidase__InfluenzaA__AHZ35994

SEQ ID NO: 89272 - RNA, 1410 nt, Artificial Sequence; identical to SEQ ID NO: 89257
  derived and/or modified CDS sequence (opt1) from neuraminidase__InfluenzaA__AHZ36005

SEQ ID NO: 89273 - RNA, 1410 nt, Artificial Sequence; identical to SEQ ID NO: 89257
  derived and/or modified CDS sequence (opt1) from neuraminidase__InfluenzaA__AHZ36016

SEQ ID NO: 89274 - RNA, 1410 nt, Artificial Sequence
  derived and/or modified CDS sequence (opt1) from neuraminidase__InfluenzaA__AHZ36027
augaaccccaaccagaagaucaucaccaucggcagcgugugcaugaccaucgggauggccaaccugauccuccagaucggcaacaucaucuccaucuggaucagccacuccauccagcuggggaaccagaaccagaucgagacgugcaaccagagcgucaucaucuacgagaacaacaccugggugaaccagaccuacgugaacaucuccaacaccaacuucgccgcgggccagagcgucguguccgugaagcuggccgggaacagcucccucugcccggucagcggcugggccaucuacuccaaggacaacagcauccgcaucggcuccaagggggacguguucgugauccgggagcccuucaucagcugcagcccccuggagugccgcacguucuuccugacccagggcgcccuccugaacgacaagcacuccaacgggaccaucaaggaccggucccccuaccgcacccugaugagcugcccgaucggcgagguccccucccccuacaacagccgguucgagagcguggccugguccgcgagcgccugccacgacggguucaacuggcucacgaucggcaucuccggccccgacaacggggccguggccguccugaaguacaacggcaucaucaccgacaccaucaagagcuggcgcaacaacauccugcggacccaggaguccgagugcgcgugcgugaacgggagcugcuucacgaucaugaccgacggcccguccgacggccaggccagcuacaagaucuuccgcaucgagaaggggaagaucgugaaguccgucgagaugaacgcccccaacuaccacuacgaggagugcagcugcuaccccgacuccagcgagaucacgugcgugugccgggacaacuggcacggcuccaaccgccccugggugagcuucaaccagaaccucgaguaccagaucggguacaucugcuccggcaucuucggggacaacccgcggcccaacgacaagaccggcagcugcggccccgucuccagcaacggggccaacggcgugaagggguucuccuucaaguacggcaacgggguguggaucggccgcaccaagagcaucagcucccggaagggcuucgagaugaucugggaccccaacggguggaccggcaccgacaacaacuucagcaucaagcaggacaucaucgggaucaacgagugguccggcuacagcggguccuucguccagcacccggagcugaccggccuggacugcauccgccccugcuucuggguggagcucauccggggccgccccaaggagaacacgaucuggaccagcggguccagcaucuccuucugcggcgugaacagcgacaccgucgggugguccuggcccgacggcgccgagcugccguucaccaucgacaaguga

SEQ ID NO: 89275 - RNA, 1410 nt, Artificial Sequence
  derived and/or modified CDS sequence (opt1) from neuraminidase__InfluenzaA__AHZ36050
augaaccccaaccagaagaucaucaccaucggcagcgugucccugaccaucagcacgaucugcuucuucaugcagaucgccauccucaucaccaccgucacccugcacuucaagcaguacgaguucaacuccccgcccaacaaccaggugaugcugugcgagcccacgaucaucgagcgcaacaucaccgagaucguguaccucaccaacaccacgaucgagaaggagaucugccccaagcuggccgaguaccggaacuggagcaagccgcagugcgacaucaccggguucgcgcccuucuccaaggacaacagcauccgccuguccgccggcggggacaucugggucacccgggagcccuacgugagcugcgaccccgacaagugcuaccaguucgcccucggccaggggaccacgcugaacaacgugcacuccaacaacaccguccgcgaccggaccccguaccgcacccugcucaugaacgagcugggcgugcccuuccaccugggcacgaagcaggucugcaucgccuggagcuccagcuccugccacgacgggaaggccuggcuccacgugugcaucaccggcgacgacaagaacgcgaccgccagcuucaucuacaacgggcggcugguggacuccguggucagcugguccaaggagauccugcgcacccaggagagcgagugcgugugcaucaacggcacgugcaccguggucaugaccgacggguccgccagcggcaaggccgacaccaagauccucuucaucgaggagggcaagaucgugcacacgagcacccuguccgggagcgcgcagcacguggaggagugcuccugcuacccccgguaccccggcguccgcugcgugugccgggacaacuggaaggggagcaaccgcccgaucguggacaucaacaucaaggaccacuccaucgucagcuccuacgugugcagcggccuggugggcgacacgccccggcgcaacgacuccagcuccagcucccacugccucgaccccaacaacgaggagggcgggcacggggucaagggcugggccuucgacgacgggaacgacguguggaugggccggaccaucaacgagaccagccgccugggcuacgagaccuucaaggucaucgaggggugguccaaccccaagagcaagcugcagaucaaccgccaggugaucguggaccggggcaaccgguccggguacagcggcaucuucuccgucgagggcaagagcugcaucaaccgcugcuucuacguggagcucauccgggggcgcaaggaggagaccgaggugcuguggaccagcaacuccaucgucguguucugcggcacgagcgggaccuacggcaccggguccuggccggacggcgccgaccugaaccucaugcccaucuga

SEQ ID NO: 89276 - RNA, 1410 nt, Artificial Sequence
  derived and/or modified CDS sequence (opt1) from neuraminidase__InfluenzaA__AHZ36062
augaaccccaaccagaagaucaucaccaucggcagcgugugcaugaccaucgggauggccaaccugaugcuccagaucggcaacaucaucuccaucuggaucagccacuccauccagcuggggaacaagaaccagaucgagacgugcaaccagagcgucaucaccuacgagaacaacaccugggugaaccagaccuacgugaacaucuccaacacgaacuucgccgcgggccagagcgucguguccgugaagaucgccgggaacagcucccugugcccggucagcggcugggccaucuacuccaaggacaacagcauccgcaucggcuccaagggggacguguucgugauccgggagcccuucaucagcugcagcccccucggcugccgcaccuucuuccugacccagggggcccugcucaacgacaagcacuccaacggcaccaucaaggaccggucccccuaccgcacgcugaugagcugcccgaucggggagguccccucccccuacaacagccgguucgagagcguggccugguccgcgagcgccugccacgacggcaucaacuggcugaccaucggcaucuccgggcccgacaacggcgccguggccguccucaaguacaacgggaucaucaccgacaccaucaagagcuggcgcaacaacauccugcggacgcaggaguccgagugcgcgugcgugaacggcagcugcuucaccaucaugaccgacggcccguccgacgggcaggccagcuacaagaucuuccgcaucgagaagggcaagaucgugaaguccgucgagaugaacgcccccaacuaccacuacgaggagugcagcugcuaccccgacuccagcgagaucacgugcgugugccgggacaacuggcacggguccaaccgccccugggugagcuucaaccagaaccuggaguaccagaucggcuacaucugcuccgggaucuucggcgacaacccgcggccccacgacaagaccggcagcugcgggcccgucuccagcaacggcgccaacggggugaagggcuucuccuucaaguacgggaacggcguguggaucggccgcaccaagagcaucagcucccggaagggguucgagaugaucugggaccccaacggcuggaccgggaccgacaacaacuucagcaucaagcaggacaucgucggcaucaacgagugguccggguacagcggcuccuucgugcagcacccggagcucacgggccuggacugcauccgccccugcuucuggguggagcugauccgggggcgccccaaggagaacaccaucuggaccagcggcuccagcaucuccuucugcggggucaacagcgacaccgugggcugguccuggcccgacggcgccgagcucccguucacgaucgacaaguga

SEQ ID NO: 89277 - RNA, 1410 nt, Artificial Sequence; identical to SEQ ID NO: 89257
  derived and/or modified CDS sequence (opt1) from neuraminidase__InfluenzaA__AHZ36084

SEQ ID NO: 89278 - RNA, 1410 nt, Artificial Sequence
  derived and/or modified CDS sequence (opt1) from neuraminidase__InfluenzaA__AHZ36095
augaaccccaaccagaagaucaucaccaucggcagcgugugcaugaccaucgggauggccaaccugauccuccagaucggcaacaucaucuccaucuggaucagccacuccauccagcuggggaaccagaaccagaucgagacgugcaaccagagcgucaucaucuacgagaacaacaccugggugaaccagaccuacgugaacaucuccaacaccaacuucgccgcgggccagagcgucguguccgugaagcuggccgggaacagcucccucugcccggucagcggcugggccaucuacuccaaggacaacagcauccgcaucggcuccaagggggacguguucgugauccgggagcccuucaucagcugcagcccccuggagugccgcacguucuuccugacccagggcgcccuccugaacgacaagcacuccaacgggaccaucaaggaccggucccccuaccgcacccugaugagcugcccgaucggcgagguccccucccccuacaacagccgguucgagagcguggccugguccgcgagcgccugccacgacggguucaacuggcucacgaucggcaucuccggccccgacaacggggccguggccguccugaaguacaacggcaucaucaccgacaccaucaagagcuggcgcaacaacauccugcggacccaggaguccgagugcgcgugcgugaacgggagcugcuucacgaucaugaccgacggcccguccgacggccaggccagcuacaagaucuuccgcaucgagaaggggaagaucgugaaguccgucgagaugaacgcccccaacuaccacuacgaggagugcagcugcuaccccgacuccagcgagaucacgugcgugugccgggacaacuggcacggcuccaaccgccccugggugagcuucaaccagaaccucgaguaccagaucggguacaucugcuccggcaucuucggggacaacccgcggcccaacgacaagaccggcggcugcgggcccgucagcuccaacggcgccaacggggugaagggcuucagcuucaaguacgggaacggcguguggaucggccgcaccaaguccaucagcagccggaagggguucgagaugaucugggaccccaacggcuggaccgggaccgacaacaacuucuccaucaagcaggacaucaucggcaucaacgaguggagcggguacuccggcagcuucguccagcacccggagcugaccggccuggacugcauccgccccugcuucuggguggagcucauccgggggcgccccaaggagaacacgaucuggaccuccggcagcuccaucagcuucugcggggugaacuccgacaccgucggcuggagcuggcccgacggcgccgagcugccguucaccaucgacaaguga

SEQ ID NO: 89279 - RNA, 1410 nt, Artificial Sequence; identical to SEQ ID NO: 89257
  derived and/or modified CDS sequence (opt1) from neuraminidase__InfluenzaA__AHZ36106

SEQ ID NO: 89280 - RNA, 1410 nt, Artificial Sequence
  derived and/or modified CDS sequence (opt1) from neuraminidase__InfluenzaA__AHZ36117
augaaccccaaccagaagaucaucaccaucggcagcgugugcaugaccaucgggauggccaaccugauccuccagaucggcaacaucaucuccaucuggaucagccacuccauccagcuggggaaccagaaccagaucgagacgugcaaccagagcgucaucaucuacgagaacaacaccugggugaaccagaccuacgugaacaucuccaacaccaacuucgccgcgggccagagcgucguguccgugaagcuggccgggaacagcucccucugcccggucagcggcugggccaucuacuccaaggacaacagcauccgcaucggcuccaagggggacguguucgugauccgggagcccuucaucagcugcagcccccuggagugccgcacguucuuccugacccagggcgcccuccugaacgacaagcacagcaacgggaccaucaaggaccggucccccuaccgcacccugaugagcugcuccaucggcgaggucccgagccccuacaacagccgguucgaguccguggccuggagcgcguccgccugccacgacggguucaacuggcucacgaucggcaucagcggccccgacaacggggccguggccguccugaaguacaacggcaucaucaccgacaccaucaaguccuggcgcaacaacauccugcggacccaggagagcgagugcgcgugcgugaacggguccugcuucacgaucaugaccgacggccccagcgacggccaggccuccuacaagaucuuccgcaucgagaaggggaagaucgugaaguccgucgagaugaacgccccgaacuaccacuacgaggagugcuccugcuaccccgacagcuccgagaucacgugcgugugccgggacaacuggcacggcagcaaccgccccuggguguccuucaaccagaaccucgaguaccagaucggguacaucugcagcggcaucuucggggacaacccccggccgaacgacaagaccggcuccugcggccccgucagcuccaacggggccaacggcgugaagggguucagcuucaaguacggcaacgggguguggaucggccgcaccaagagcaucuccagccggaagggcuucgagaugaucugggaccccaacggguggaccggcaccgacaacaacuucuccaucaagcaggacaucaucgggaucaacgaguggagcggcuacuccgggagcuucguccagcaccccgagcugaccggccuggacugcauccgcccgugcuucuggguggagcucauccggggccgccccaaggagaacacgaucuggaccuccgggagcuccaucagcuucugcggcgugaacuccgacaccgucggguggagcuggcccgacggcgccgagcugcccuucaccaucgacaaguga

SEQ ID NO: 89281 - RNA, 1410 nt, Artificial Sequence; identical to SEQ ID NO: 89257
  derived and/or modified CDS sequence (opt1) from neuraminidase__InfluenzaA__AHZ36128

SEQ ID NO: 89282 - RNA, 1410 nt, Artificial Sequence; identical to SEQ ID NO: 89257
  derived and/or modified CDS sequence (opt1) from neuraminidase__InfluenzaA__AHZ36139

SEQ ID NO: 89283 - RNA, 1410 nt, Artificial Sequence; identical to SEQ ID NO: 89275
  derived and/or modified CDS sequence (opt1) from neuraminidase__InfluenzaA__AHZ36150

SEQ ID NO: 89284 - RNA, 1410 nt, Artificial Sequence; identical to SEQ ID NO: 89257
  derived and/or modified CDS sequence (opt1) from neuraminidase__InfluenzaA__AHZ36161

SEQ ID NO: 89285 - RNA, 1410 nt, Artificial Sequence; identical to SEQ ID NO: 89257
  derived and/or modified CDS sequence (opt1) from neuraminidase__InfluenzaA__AHZ36172

SEQ ID NO: 89286 - RNA, 1410 nt, Artificial Sequence
  derived and/or modified CDS sequence (opt1) from neuraminidase__InfluenzaA__AHZ36183
augaaccccaaccagaagaucaucaccaucggcagcgugugcaugaccaucgggauggccaaccugaugcuccagaucggcaacaucaucuccaucuggaucagccacuccauccagcuggggaacaagaaccagaucgagacgugcaaccagagcgucaucaccuacgagaacaacaccugggugaaccagaccuacgugaacaucuccaacacgaacuucgccgcgggccagagcgucguguccgugaagaucgccgggaacagcucccugugcccggucagcggcugggccaucuacuccaaggacaacagcauccgcaucggcuccaagggggacguguucgugauccgggagcccuucaucagcugcagcccccucgagugccgcaccuucuuccugacccagggcgcccugcucaacgacaagcacuccaacgggaccaucaaggaccggucccccuaccgcacgcugaugagcugcccgaucggcgagguccccucccccuacaacagccgguucgagagcguggccugguccgcgagcgccugccacgacgggaucaacuggcugaccaucggcaucuccggccccgacaacggggccguggccguccucaaguacaacggcaucaucaccgacaccaucaagagcuggcgcaacaacauccugcggacgcaggaguccgagugcgcgugcgugaacgggagcugcuucaccaucaugaccgacggcccguccgacggccaggccagcuacaagaucuuccgcaucgagaaggggaagaucgugaaguccgucgagaugaacgcccccaacuaccacuacgaggagugcagcugcuaccccgacuccagcgagaucacgugcgugugccgggacaacuggcacggcuccaaccgccccugggugagcuucaaccagaaccuggaguaccagaucggguacaucugcuccggcauccucggggacaacccgcggccccacgacaagaccggcagcugcggccccgucuccagcaacggggccaacggcgugaagggguucuccuucaaguacggcaacgggguguggaucggccgcaccaagagcaucagcucccggaagggcuucgagaugaucugggaccccaacggguggaccggcaccgacaacaacuucagcaucaagcaggacaucgucgggaucaacgagugguccggcuacagcggguccuucgugcagcacccggagcugacgggccuggacugcauccgccccugcuucuggguggagcucauccggggccgccccaaggagaacaccaucuggaccagcggguccagcaucuccuucugcggcgucaacagcgacaccguggggugguccuggcccgacggcgccgagcugccguucacgaucgacaaguga

SEQ ID NO: 89287 - RNA, 1410 nt, Artificial Sequence; identical to SEQ ID NO: 89256
  derived and/or modified CDS sequence (opt1) from neuraminidase__InfluenzaA__AHZ36194

SEQ ID NO: 89288 - RNA, 1410 nt, Artificial Sequence; identical to SEQ ID NO: 89275
  derived and/or modified CDS sequence (opt1) from neuraminidase__InfluenzaA__AHZ36206

SEQ ID NO: 89289 - RNA, 1410 nt, Artificial Sequence; identical to SEQ ID NO: 89257
  derived and/or modified CDS sequence (opt1) from neuraminidase__InfluenzaA__AHZ36218

SEQ ID NO: 89290 - RNA, 1410 nt, Artificial Sequence; identical to SEQ ID NO: 89275
  derived and/or modified CDS sequence (opt1) from neuraminidase__InfluenzaA__AHZ36229

SEQ ID NO: 89291 - RNA, 1410 nt, Artificial Sequence; identical to SEQ ID NO: 89257
  derived and/or modified CDS sequence (opt1) from neuraminidase__InfluenzaA__AHZ36241

SEQ ID NO: 89292 - RNA, 1410 nt, Artificial Sequence; identical to SEQ ID NO: 89257
  derived and/or modified CDS sequence (opt1) from neuraminidase__InfluenzaA__AHZ36252

SEQ ID NO: 89293 - RNA, 1410 nt, Artificial Sequence; identical to SEQ ID NO: 89257
  derived and/or modified CDS sequence (opt1) from neuraminidase__InfluenzaA__AHZ36263

SEQ ID NO: 89294 - RNA, 1410 nt, Artificial Sequence; identical to SEQ ID NO: 86946
  derived and/or modified CDS sequence (opt1) from neuraminidase__InfluenzaA__AHZ36274

SEQ ID NO: 89295 - RNA, 1410 nt, Artificial Sequence; identical to SEQ ID NO: 89257
  derived and/or modified CDS sequence (opt1) from neuraminidase__InfluenzaA__AHZ36286

SEQ ID NO: 89296 - RNA, 1410 nt, Artificial Sequence
  derived and/or modified CDS sequence (opt1) from neuraminidase__InfluenzaA__AHZ36297
augaaccccaaccagaagaucaucaccaucggcagcgugucccugaccaucagcacgaucugcuucuucaugcagaucgccauccucaucaccaccgucacccugcacuucaagcaguacgaguucaacuccccgcccaacaaccaggugaugcugugcgagcccacgaucaucgagcgcaacaucaccgagaucguguaccucaccaacaccacgaucgagaaggagaucugcccccggccggccgaguaccgcaacuggagcaagccccagugcgacaucaccggguucgcgcccuucuccaaggacaacagcauccggcuguccgccggcggggacaucugggucacccgcgagcccuacgugagcugcgacccggacaagugcuaccaguucgcccugggccaggggaccacgcucaacaacgugcacuccaacaacaccguccgggaccgcacccccuaccggacccugcugaugaacgagcucggcgugcccuuccaccugggcacgaagcaggucugcaucgccuggagcuccagcuccugccacgacgggaaggccuggcugcacgugugcaucaccggcgacgacaagaacgcgaccgccagcuucaucuacaacgggcgccucguggacuccguggucagcugguccaaggagauccugcggacccaggagagcgagugcgugugcaucaacggcacgugcaccguggucaugaccgacggguccgccagcggcaaggccgacaccaagauccuguucaucgaggagggcaagaucgugcacacgagcacccucuccgggggcgcgcagcacguggaggagugcagcugcuacccccgcuacccggggguccggugcgugugccgcgacaacuggaagggcuccaaccggcccaucguggacaucaacaucaaggaccacagcaucgucuccagcuacgugugcuccggccuggugggggacacgccccgcaagaacgacagcuccagcuccagccacugccuggaccccaacaacgaggagggcgggcacggcgucaaggggugggccuucgacgacggcaacgacguguggaugggccggaccaucaacgagaccucccgccucggguacgagaccuucaaggucaucgagggcuggagcaacccgaaguccaagcugcagaucaaccggcaggucaucguggaccgcggggaccggagcggcuacuccgggaucuucagcguggagggcaaguccugcaucaaccgcugcuucuacguggagcugauccggggccgcaaggaggagaccgaggugcucuggaccagcaacagcaucgucguguucugcgggacguccggcaccuacgggaccggcagcuggcccgacggggccgaccugaaccugaugcccaucuga

SEQ ID NO: 89297 - RNA, 1410 nt, Artificial Sequence
  derived and/or modified CDS sequence (opt1) from neuraminidase__InfluenzaA__AHZ36309
augaaccccaaccagaagaucaucaccaucggcagcgugugcaugaccaucgggauggccaaccugaugcuccagaucggcaacaucaucuccaucuggaucagccacuccauccagcugggggacaagaaccagaucgagacgugcaaccagagcgucaucaccuacgagaacaacaccugggugaaccagaccuacgugaacaucuccaacacgaacuucgccgcgggccagagcgucguguccgugaagaucgccgggaacagcucccugugcccggucagcggcugggccaucuacuccaaggacaacagcauccgcaucggcuccaagggggacguguucgugauccgggagcccuucaucagcugcagcccccucgagugccgcaccuucuuccugacccagggcgcccugcucaacgacaagcacuccaacgggaccaucaaggaccggucccccuaccgcacgcugaugagcugcccgaucggcgagguccccucccccuacaacagccgguucgagagcguggccugguccgcgagcgccugccacgacgggaucaacuggcugaccaucggcaucuccggccccgacaacggggccguggccguccucaaguacaacggcaucaucaccgacaccaucaagagcuggcgcaacaacauccugcggacgcaggaguccgagugcgcgugcgugaacgggagcugcuucaccaucaugaccgacggcccguccgacggccaggccagcuacaagaucuuccgcaucgagaaggggaagaucgugaaguccgucgagaugaacgcccccaacuaccacuacgaggagugcagcugcuaccccgacuccagcgagaucacgugcgugugccgggacaacuggcacggcuccaaccgccccugggugagcuucaaccagaaccuggaguaccagaucggguacaucugcuccggcaucuucggggacaacccgcggccccacgacaagaccggcagcugcggccccgucuccagcaacggggccaacggcgugaagggguucuccuucaaguacggcaacgggguguggaucggccgcaccaagagcaucagcucccggaagggcuucgagaugaucugggaccccaacggguggaccggcaccgacaacaacuucagcaucaagcaggacaucgucgggaucaacgagugguccggcuacagcggguccuucgugcagcacccggagcucacgggccuggacugcauccgccccugcuucuggguggagcugauccggggccgccccaaggagaacaccaucuggaccagcggguccagcaucuccuucugcggcgucaacagcgacaccguggggugguccuggcccgacggcgccgagcucccguucacgaucgacaaguga

SEQ ID NO: 89298 - RNA, 1410 nt, Artificial Sequence; identical to SEQ ID NO: 89257
  derived and/or modified CDS sequence (opt1) from neuraminidase__InfluenzaA__AHZ36320

SEQ ID NO: 89299 - RNA, 1410 nt, Artificial Sequence; identical to SEQ ID NO: 89257
  derived and/or modified CDS sequence (opt1) from neuraminidase__InfluenzaA__AHZ36331

SEQ ID NO: 89300 - RNA, 1410 nt, Artificial Sequence; identical to SEQ ID NO: 86946
  derived and/or modified CDS sequence (opt1) from neuraminidase__InfluenzaA__AHZ36353

SEQ ID NO: 89301 - RNA, 1410 nt, Artificial Sequence
  derived and/or modified CDS sequence (opt1) from neuraminidase__InfluenzaA__AHZ36365
augaaccccaaccagaagaucaucaccaucggcagcgugugcaugaccaucgggauggccaaccugaugcuccagaucggcaacaucaucuccaucuggaucagccacccgauccagcuggggaacaagaaccagaucgagacgugcaaccaguccgucaucaccuacgagaacaacaccugggugaaccagaccuacgugaacaucagcaacacgaacuucgccgcgggccaguccgucgugagcgugaagaucgccgggaacuccagccugugccccgucuccggcugggccaucuacagcaaggacaacuccauccgcaucggcagcaagggggacguguucgugauccgggagcccuucaucuccugcagcccccucgagugccgcaccuucuuccugacccagggcgcccugcucaacgacaagcacuccaacgggaccaucaaggaccggagcccguaccgcacgcugauguccugccccaucggcgagguccccagccccuacaacucccgguucgagagcguggccuggagcgcguccgccugccacgacgggaucaacuggcugaccaucggcaucagcggcccggacaacggggccguggccguccucaaguacaacggcaucaucaccgacaccaucaaguccuggcgcaacaacauccugcggacgcaggagagcgagugcgcgugcgugaacggguccugcuucaccaucaugaccgacggccccagcgacggccaggccuccuacaagaucuuccgcaucgagaaggggaagaucgucaagagcguggagaugaacgcccccaacuaccacuacgaggagugcuccugcuaccccgacagcuccgagaucacgugcgugugccgggacaacuggcacggcagcaaccgcccguggguguccuucaaccagaaccuggaguaccagaucggguacaucugcagcggcaucuucggggacaacccccggccccacgacaagaccggcuccugcggccccgucagcuccaacggggccaacggcgugaagggguucagcuucaaguacggcaacgggguguggaucggccgcaccaaguccaucagcagccggaagggcuucgagaugaucugggacccgaacggguggaccggcaccgacaacaacuucuccaucaagcaggacaucgucgggaucaacgaguggagcggcuacuccgggagcuucgugcagcaccccgagcucacgggccuggacugcauccgccccugcuucuggguggagcugauccggggccgccccaaggagaacaccaucuggaccuccgggagcuccaucagcuucugcggcgucaacuccgacaccgugggguggagcuggccggacggcgccgagcuccccuucacgaucgacaaguga

SEQ ID NO: 89302 - RNA, 1410 nt, Artificial Sequence; identical to SEQ ID NO: 86946
  derived and/or modified CDS sequence (opt1) from neuraminidase__InfluenzaA__AHZ36376

SEQ ID NO: 89303 - RNA, 1410 nt, Artificial Sequence; identical to SEQ ID NO: 86946
  derived and/or modified CDS sequence (opt1) from neuraminidase__InfluenzaA__AHZ36388

SEQ ID NO: 89304 - RNA, 1410 nt, Artificial Sequence; identical to SEQ ID NO: 86946
  derived and/or modified CDS sequence (opt1) from neuraminidase__InfluenzaA__AHZ36400

SEQ ID NO: 89305 - RNA, 1410 nt, Artificial Sequence; identical to SEQ ID NO: 86946
  derived and/or modified CDS sequence (opt1) from neuraminidase__InfluenzaA__AHZ36412

SEQ ID NO: 89306 - RNA, 1410 nt, Artificial Sequence; identical to SEQ ID NO: 86946
  derived and/or modified CDS sequence (opt1) from neuraminidase__InfluenzaA__AHZ36424

SEQ ID NO: 89307 - RNA, 1410 nt, Artificial Sequence; identical to SEQ ID NO: 86946
  derived and/or modified CDS sequence (opt1) from neuraminidase__InfluenzaA__AHZ36436

SEQ ID NO: 89308 - RNA, 1410 nt, Artificial Sequence
  derived and/or modified CDS sequence (opt1) from neuraminidase__InfluenzaA__AHZ36448
augaaccccaaccagaagaucaucaccaucggcagcgugucccugaccaucagcacgaucugcuucuucaugcagaucgccauccucaucaccaccgucacccugcacuucaagcaguacgaguucaacuccccgcccaacaaccaggugaugcugugcgagcccacgaucaucgagaagaacaucaccgagaucguguaccucaccaacaccacgaucgagaaggagaucugccccaagccggccgaguaccgcaacuggagcaagccccagugcgacaucaccggguucgcgcccuucuccaaggacaacagcauccggcuguccgccggcggggacaucugggucacccgcgagcccuacgugagcugcgacccggacaagugcuaccaguucgcccugggccaggggaccacgcucaacaacgugcacuccaacaacaccguccgggaccgcacccccuaccggacccugcugaugaacgagcucggcgugcccuuccaccugggcacgaagcaggucugcaucgccuggagcuccagcuccugccacgacgggaaggccuggcugcacgugugcaucaccggcgacgacaagaacgcgaccgccagcuucaucuacaacgggcgccucguggacuccguggucagcugguccaaggagauccugcggacccaggagagcgagugcgugugcaucaacggcacgugcaccguggucaugaccgacggguccgccagcggcaaggccgacaccaagauccuguucaucgaggagggcaagaucgugcacacgagcacccucuccgggagcgcgcagcacguggaggagugcuccugcuacccccgcuacccgggcguccggugcgugugccgcgacaacuggaaggggagcaaccggcccaucguggacaucaacaucaaggaccacuccaucgucagcuccuacgugugcagcggccuggugggcgacaccccgcgcaagaacgacuccagcuccagcucccacugccuggaccccaacaacgaggagggcgggcacggggucaagggcugggccuucgacgacgggaacgacguguggaugggccggaccaucaacgagacgagccgccucggcuacgagaccuucaaggucaucgaggggugguccaaccccaagagcaagcugcagaucaaccgccaggugaucguggaccggggcgaccgguccggguacagcggcaucuucuccgucgagggcaagagcugcaucaaccgcugcuucuacguggagcugauccgggggcgcaaggaggagaccgaggugcucuggaccagcaacuccaucgucguguucugcggcacgagcgggaccuacggcaccggguccuggcccgacggcgccgaccugaaccugaugcccaucuga

SEQ ID NO: 89309 - RNA, 1410 nt, Artificial Sequence; identical to SEQ ID NO: 86946
  derived and/or modified CDS sequence (opt1) from neuraminidase__InfluenzaA__AHZ36460

SEQ ID NO: 89310 - RNA, 1410 nt, Artificial Sequence; identical to SEQ ID NO: 86946
  derived and/or modified CDS sequence (opt1) from neuraminidase__InfluenzaA__AHZ36472

SEQ ID NO: 89311 - RNA, 1410 nt, Artificial Sequence; identical to SEQ ID NO: 86946
  derived and/or modified CDS sequence (opt1) from neuraminidase__InfluenzaA__AHZ36484

SEQ ID NO: 89312 - RNA, 1410 nt, Artificial Sequence; identical to SEQ ID NO: 86946
  derived and/or modified CDS sequence (opt1) from neuraminidase__InfluenzaA__AHZ36496

SEQ ID NO: 89313 - RNA, 1410 nt, Artificial Sequence; identical to SEQ ID NO: 86946
  derived and/or modified CDS sequence (opt1) from neuraminidase__InfluenzaA__AHZ36508

SEQ ID NO: 89314 - RNA, 1410 nt, Artificial Sequence; identical to SEQ ID NO: 86946
  derived and/or modified CDS sequence (opt1) from neuraminidase__InfluenzaA__AHZ36520

SEQ ID NO: 89315 - RNA, 1410 nt, Artificial Sequence
  derived and/or modified CDS sequence (opt1) from neuraminidase__InfluenzaA__AHZ36532
augaaccccaaccagaagaucaucaccaucggcagcgugucccugaccaucagcacgaucugcuucuucaugcagaucgccauccucaucaccaccgucacccugcacuucaagcaguacgaguucaacuccccgcccaacaaccaggugaugcugugcgagcccacgaucaucgagcgcaacaucaccgagaucguguaccucaccaacaccacgaucgagaaggagaucugccccaagccggccgaguaccggaccuggagcaagccccagugcgacaucaccggguucgcgcccuucuccaaggacaacagcauccgccuguccgccggcggggacaucugggucacccgggagcccuacgugagcugcgacccggacaagugcuaccaguucgcccugggccaggggacgacccucaacaacgugcacuccaacaacaccguccgcgaccggacccccuaccgcacgcugcugaugaacgagcucggcgugcccuuccaccugggcaccaagcaggucugcaucgccuggagcuccagcuccugccacgacgggaaggccuggcugcacgugugcaucaccggcgacgacaagaacgcgaccgccagcuucaucuacaacgggcggcucguggacuccguggucagcugguccaaggagauccugcgcacgcaggagagcgagugcgugugcaucaacgggaccugcaccguggucaugaccgacggguccgccagcggcaaggccgacacgaagauccuguucaucgaggagggcaagaucgugcacaccagcacccucuccgggagcgcgcagcacguggaggagugcuccugcuacccccgguacccgggcguccgcugcgugugccgggacaacuggaaggggagcaaccgccccaucguggacaucaacaucaaggaccacuccaucgucagcuccuacgugugcagcggccuggugggcgacaccccgcggaagaacgacuccagcuccagcucccacugccuggaccccaacaacgaggagggcggccacggggucaagggcugggccuucgacgacgggaacgacguguggaugggccgcacgaucaacgagaccagccggcucggcuacgagaccuucaaggucaucgaggggugguccaaccccaagagcaagcugcagaucaaccgccaggugaucguggaccggggcgaccgcuccggguacagcggcaucuucuccgucgagggcaagagcugcaucaaccggugcuucuacguggagcugauccgcgggcggaaggaggagaccgaggugcucuggacgagcaacuccaucgucguguucugcggcaccagcgggaccuacggcaccggguccuggcccgacggcgccgaccugaaccugaugcccaucuga

SEQ ID NO: 89316 - RNA, 1410 nt, Artificial Sequence; identical to SEQ ID NO: 86946
  derived and/or modified CDS sequence (opt1) from neuraminidase__InfluenzaA__AHZ36544

SEQ ID NO: 89317 - RNA, 1410 nt, Artificial Sequence; identical to SEQ ID NO: 86946
  derived and/or modified CDS sequence (opt1) from neuraminidase__InfluenzaA__AHZ36556

SEQ ID NO: 89318 - RNA, 1410 nt, Artificial Sequence; identical to SEQ ID NO: 86946
  derived and/or modified CDS sequence (opt1) from neuraminidase__InfluenzaA__AHZ36568

SEQ ID NO: 89319 - RNA, 1410 nt, Artificial Sequence; identical to SEQ ID NO: 86946
  derived and/or modified CDS sequence (opt1) from neuraminidase__InfluenzaA__AHZ36580

SEQ ID NO: 89320 - RNA, 1410 nt, Artificial Sequence; identical to SEQ ID NO: 86946
  derived and/or modified CDS sequence (opt1) from neuraminidase__InfluenzaA__AHZ36592

SEQ ID NO: 89321 - RNA, 1410 nt, Artificial Sequence; identical to SEQ ID NO: 86946
  derived and/or modified CDS sequence (opt1) from neuraminidase__InfluenzaA__AHZ36604

SEQ ID NO: 89322 - RNA, 1410 nt, Artificial Sequence; identical to SEQ ID NO: 86946
  derived and/or modified CDS sequence (opt1) from neuraminidase__InfluenzaA__AHZ36616

SEQ ID NO: 89323 - RNA, 1410 nt, Artificial Sequence
  derived and/or modified CDS sequence (opt1) from neuraminidase__InfluenzaA__AHZ36628
augaaccccaaccagaagaucaucaccaucggcagcgugucccugaccaucagcacgaucugcuucuucaugcagaucgccauccucaucaccaccgucacccugcacuucaagcagugcgaguucaacuccccgcccaacaaccaggugaugcugugcgagcccacgaucaucgagcgcaacaucaccgagaucguguaccucaccaacaccacgaucgagaaggagaucugccccaagccggccgaguaccggaacuggagcaagccccagugcgacaucaccggguucgcgcccuucuccaaggacaacagcauccgccuguccgccggcggggacaucugggucacccgggagcccuacgugagcugcgacccggacaagugcuaccaguucgcccugggccaggggaccacgcucaacaacgugcacuccaacaacaccguccgcgaccggacccccuaccgcacccugcugaugaacgagcucggcgugcccuuccaccugggcacgaagcaggucugcaucgccuggagcuccagcuccugccacgacgggaaggccuggcugcacgugugcaucaccggcgacgacaagaacgcgaccgccagcuucaucuacaacgggcggcucguggacuccguggucagcugguccaaggagauccugcgcacccaggagagcgagugcgugugcaucaacggcacgugcaccguggucaugaccgacggguccgccagcggcaaggccgacaccaagauccuguucaucgaggagggcaagaucgugcacacgagcacccucuccgggagcgcgcagcacguggaggagugcuccugcuacccccgguacccgggcguccgcugcgugugccgggacaacuggaaggggagcaaccgccccaucguggacaucaacaucaaggaccacuccaucgucagcuccuacgugugcagcggccuggugggcgacaccccgcggaagaacgacuccagcuccagcucccacugccuggaccccaacaacgaggagggcgggcacggggucaagggcugggccuucgacgacgggaacgacguguggaugggccgcaccaucaacgagacgagccggcucggcuacgagaccuucaaggucaucgaggggugguccaaccccaagagcaagcugcagaucaaccgccaggugaucguggaccggggcgaccgcuccggguacagcggcaucuucuccgucgagggcaagagcugcaucaaccggugcuucuacguggagcugauccgcgggcggaaggaggagaccgaggugcucuggaccagcaacuccaucgucguguucugcggcacgagcgggaccuacggcaccggguccuggcccgacggcgccgaccugaaccugaugcccaucuga

SEQ ID NO: 89324 - RNA, 1410 nt, Artificial Sequence
  derived and/or modified CDS sequence (opt1) from neuraminidase__InfluenzaA__AHZ36640
augaaccccaaccagaagaucaucaccaucggcagcgugucccugaccaucagcacgaucugcuucuucaugcagaucgccauccucaucaccaccgucacccugcacuucaagcaguacgaguucaacuccccgcccaacaaccaggugaugcugugcgagcccacgaucaucgagcgcaacaucaccgagaucguguaccucaccaacaccacgaucgagaaggagaucugccccaagccggccgaguaccggaacuggagcaagccccagugcgacaucaccggguucgcgcccuucuccaaggacaacagcauccgccuguccgccggcggggacaucugggucacccgggagcccuacgugagcugcgacccggacaagugcuaccaguucgcccugggccaggggaccacgcucaacaacgugcacuccaacaacaccguccacgaccgcacccccuaccggacccugcugaugaacgagcucggcgugcccuuccaccugggcacgaagcaggucugcaucgccuggagcuccagcuccugccacgacgggaaggccuggcugcacgugugcaucaccggcgacgacaagaacgcgaccgccagcuucaucuacaacgggcgccucguggacuccguggucagcugguccaaggagauccugcggacccaggagagcgagugcgugugcaucaacggcacgugcaccguggucaugaccgacggguccgccagcggcaaggccgacaccaagauccuguucaucgaggagggcaagaucgugcacacgagcacccucuccgggagcgcgcagcacguggaggagugcuccugcuacccccgcuacccgggcguccggugcgugugccgcgacaacuggaaggggagcaaccggcccaucguggacaucaacaucaaggaccacuccaucgucagcuccuacgugugcagcggccuggugggcgacaccccgcgcaagaacgacuccagcuccagcucccacugccuggaccccaacaacgaggagggcgggcacggggucaagggcugggccuucgacgacgggaacgacguguggaugggccggaccaucaacgagacgagccgccucggcuacgagaccuucaaggucaucgaggggugguccaaccccaagagcaagcugcagaucaaccgccaggugaucguggaccggggcgaccgguccggguacagcggcaucuucuccgucgagggcaagagcugcaucaaccgcugcuucuacguggagcugauccgggggcgcaaggaggagaccgaggugcucuggaccagcaacuccaucgucguguucugcggcacgagcgggaccuacggcaccggguccuggcccgacggcgccgaccugaaccugaugcccaucuga

SEQ ID NO: 89325 - RNA, 1410 nt, Artificial Sequence; identical to SEQ ID NO: 86946
  derived and/or modified CDS sequence (opt1) from neuraminidase__InfluenzaA__AHZ36652

SEQ ID NO: 89326 - RNA, 1410 nt, Artificial Sequence; identical to SEQ ID NO: 86170
  derived and/or modified CDS sequence (opt1) from neuraminidase__InfluenzaA__AHZ36664

SEQ ID NO: 89327 - RNA, 1410 nt, Artificial Sequence; identical to SEQ ID NO: 86170
  derived and/or modified CDS sequence (opt1) from neuraminidase__InfluenzaA__AHZ36676

SEQ ID NO: 89328 - RNA, 1410 nt, Artificial Sequence; identical to SEQ ID NO: 86170
  derived and/or modified CDS sequence (opt1) from neuraminidase__InfluenzaA__AHZ36688

SEQ ID NO: 89329 - RNA, 1398 nt, Artificial Sequence; identical to SEQ ID NO: 87478
  derived and/or modified CDS sequence (opt1) from neuraminidase__InfluenzaA__AHZ39689

SEQ ID NO: 89330 - RNA, 1398 nt, Artificial Sequence; identical to SEQ ID NO: 87478
  derived and/or modified CDS sequence (opt1) from neuraminidase__InfluenzaA__AHZ39713

SEQ ID NO: 89331 - RNA, 1398 nt, Artificial Sequence; identical to SEQ ID NO: 87478
  derived and/or modified CDS sequence (opt1) from neuraminidase__InfluenzaA__AHZ39725

SEQ ID NO: 89332 - RNA, 1398 nt, Artificial Sequence; identical to SEQ ID NO: 87478
  derived and/or modified CDS sequence (opt1) from neuraminidase__InfluenzaA__AHZ39737

SEQ ID NO: 89333 - RNA, 1398 nt, Artificial Sequence
  derived and/or modified CDS sequence (opt1) from neuraminidase__InfluenzaA__AHZ39749
augaaccccaaccagaagauccugugcaucagcgccaccgccaucaucaucggcgcgaucgccgugcucaucgggaucgccaaccugggccugaacaucgggcuccaccugaagccgggcugcaacugcucccacagccagcccgagaccacgaacaccucccagaccaucaucaacaacuacuacaacgagaccaacaucacgaacauccagauggaggagcgcaccagccggaacuucaacaaccugaccaaggggcucugcaccaucaacuccuggcacaucuacggcaaggacaacgccguccgcaucggcgagagcuccgacgugcuggugacgcgggagcccuacgucagcugcgaccccgacgagugccgcuucuacgcccugucccaggggaccaccauccggggcaagcacagcaacgggaccauccacgaccgcucccaguaccgggcgcucaucagcuggccgcuguccagcccgcccacgguguacaacucccgcguggagugcaucggcuggagcuccaccagcugccacgacgggaagucccggaugagcaucugcaucagcggccccaacaacaacgccuccgccgucgugugguacaaccgccggcccguggccgagaucaacaccugggcgcgcaacauccugcggacccaggagagcgagugcgucugccacaacggcgugugccccguggucuucacggacggguccgccaccggccccgccgacacccgcaucuacuacuucaaggaggggaagauccucaagugggagagccugaccggcacggccaagcacaucgaggagugcuccugcuacggcgagcggaccgggaucacgugcacgugccgcgacaacuggcagggcagcaaccggcccgugauccagaucgacccgguggccaugacccacaccucccaguacaucugcagccccguccugaccgacaacccccgccccaacgacccgaacaucgggaagugcaacgaccccuaccccggcaacaacaacaacggggugaagggcuucuccuaccucgacggcgcgaacaccuggcuggggcggaccaucagcaccgccucccgcagcggcuacgagaugcugaaggugcccaacgcccucaccgacgaccgguccaagccgauccaggggcagaccaucguccugaacgccgacuggagcggcuacuccgggagcuucauggacuacugggccgagggcgacugcuaccgcgcgugcuucuacguggagcugauccgcggccggcccaaggaggacaaggugugguggacguccaacagcaucgucuccaugugcagcagcaccgaguuccucgggcaguggaacuggcccgacggcgccaagaucgaguacuuccuguga

SEQ ID NO: 89334 - RNA, 1398 nt, Artificial Sequence; identical to SEQ ID NO: 89333
  derived and/or modified CDS sequence (opt1) from neuraminidase__InfluenzaA__AHZ39761

SEQ ID NO: 89335 - RNA, 1398 nt, Artificial Sequence; identical to SEQ ID NO: 87478
  derived and/or modified CDS sequence (opt1) from neuraminidase__InfluenzaA__AHZ39773

SEQ ID NO: 89336 - RNA, 1398 nt, Artificial Sequence; identical to SEQ ID NO: 87478
  derived and/or modified CDS sequence (opt1) from neuraminidase__InfluenzaA__AHZ39785

SEQ ID NO: 89337 - RNA, 1410 nt, Artificial Sequence
  derived and/or modified CDS sequence (opt1) from neuraminidase__InfluenzaA__AHZ39797
augaaccccaaccagaagaucaucaccaucggcagcgugucccugaccaucagcacggucugcuucuucaugcagaucgccauccucaucaccaccgugacccugcacuucaagcaguacgaguucaacccgccgcccaacaaccaggugaugcugugcgagcccacgaucaucgagcgcaacaucaccgagaucgucuaccucaccaacaccacgaucgagaaggagaucugccccaagcccgccgaguaccggaacugguccaagccccagugcgggaucaccggcuucgcgcccuucagcaaggacaacuccauccgccugagcgccgggggcgacaucugggugacccgggagccguacguguccugcgaccccgacaagugcuaccaguucgcccuggggcagggcaccacgcucaacaacguccacagcaacaacaccgugcgcgaccggacccccuaccgcacccugcugaugaacgagcucggcgugcccuuccaccuggggacgaagcaggucugcaucgccugguccagcuccagcugccacgacggcaaggccuggcugcacgugugcaucaccggggacgacaagaacgcgaccgccuccuucaucuacaacggccggcucguggacagcgucguguccuggagcaaggagauccugcgcacccaggaguccgagugcgugugcaucaacgggacgugcaccgucgugaugaccgacggcagcgccuccggcaagagcgacaccaagauccuguucaucgaggaggggaagaucgugcacacgagcacccucuccggcagcgcccagcacgucgaggagugcuccugcuacccgcgguaccccggggugcgcugcgugugccgggacaacuggaagggcagcaaccgccccaucgucgacaucaacaucaaggaccacuccaucgugagcuccuacgugugcagcggccuggucggggacacgccccggaagaacgacuccagcuccagcucccacugccuggacccgaacaacgaggagggcgggcacggcgugaaggggugggcguucgacgacggcaacgacgucuggaugggccgcaccaucaacgagaccagccggcucggguacgagaccuucaaggugaucgagggcugguccaaccccaagagcaagcugcagaucaaccgccaggugaucgucgaccgcggggaccgguccggcuacagcgggaucuucuccguggagggcaagagcugcaucaaccggugcuucuacguggagcugauccgcggccggaaggaggagaccgagguccucuggaccagcaacuccaucgugguguucugcgggacgagcggcaccuacgggaccggcuccuggcccgacggggccgaccugaaccugaugcccaucuga

SEQ ID NO: 89338 - RNA, 1410 nt, Artificial Sequence
  derived and/or modified CDS sequence (opt1) from neuraminidase__InfluenzaA__AHZ39821
augaaccccaaccagaagaucaucaccaucggcagcgugucccugaccaucagcacgaucugcuucuucaugcagaccgccauccucaucaccaccgucacgcugcacuucaagcaguacgaguucaacuccccgcccaacaaccaggugaugcugugcgagcccaccaucaucgagcgcaacaucaccgagaucguguaccucaccaacacgaccaucgagaaggagaucugccccaagcuggccgaguaccggaacuggagcaagccgcagugcgacaucaccggguucgcgcccuucuccaaggacaacagcauccgccuguccgccggcggggacaucugggucacccgggagcccuacgugagcugcgaccccgacaagugcuaccaguucgcccucggccaggggacgacccugaacaacgugcacuccaacaacaccguccgcgaccggaccccguaccgcacgcugcucaugaacgagcugggcgugcccuuccaccugggcaccaagcaggucugcaucgccuggagcuccagcuccugccacgacgggaaggccuggcuccacgugugcaucaccggcgacgacaagaacgcgaccgccagcuucaucuacaacgggcggcugguggacuccguggucagcugguccaaggagauccugcgcacgcaggagagcgagugcgugugcaucaacgggaccugcaccguggucaugaccgacggguccgccagcggcaaggccgacacgaagauccucuucaucgaggagggcaagaucgugcacaccagcacccuguccgggagcgcgcagcacguggaggagugcuccugcuacccccgguaccccggcguccgcugcgugugccgggacaacuggaaggggagcaaccgcccgaucguggacaucaacaucaaggaccacuccaucgucagcuccuacgugugcagcggccuggugggcgacacgccccggcgcaacgacuccagcuccagcucccacugccucgaccccaacaacgaggagggcggccacggggucaagggcugggccuucgacgacgggaacgacguguggaugggccggaccaucaacgagaccagccgccugggcuacgagaccuucaaggucaucgaggggugguccaaccccaagagcaagcugcagaucaaccgccaggugaucguggaccggggcaaccgguccggguacagcggcaucuucuccgucgagggcaagagcugcaucaaccgcugcuucuacguggagcucauccgggggcgcaaggaggagaccgaggugcuguggacgagcaacuccaucgucguguucugcggcaccagcgggaccuacggcaccggguccuggccggacggcgccgaccugaaccucaugcccacguga

SEQ ID NO: 89339 - RNA, 1410 nt, Artificial Sequence; identical to SEQ ID NO: 87413
  derived and/or modified CDS sequence (opt1) from neuraminidase__InfluenzaA__AHZ39833

SEQ ID NO: 89340 - RNA, 1410 nt, Artificial Sequence; identical to SEQ ID NO: 86170
  derived and/or modified CDS sequence (opt1) from neuraminidase__InfluenzaA__AHZ39844

SEQ ID NO: 89341 - RNA, 1410 nt, Artificial Sequence
  derived and/or modified CDS sequence (opt1) from neuraminidase__InfluenzaA__AHZ39856
augaaccccaaccagaagaucaucaccaucggcagcgugucccugaccaucagcacgaucugcuucuucaugcagaucgccauccucaucaccaccgucacccugcacuucaagcaguacgaguucaacuccccgcccaacaaccaggugaugcugugcgagcccacgaucaucgagcgcaacaucaccgagaucguguaccucaccaacaccacgaucgagaaggagaucugccccaagccggccgaguaccggaacuggagcaagccccagugcgacaucaccggguucgcgcccuucuccaaggacaacagcauccgccuguccgccggcggggacaucugggucacccgggagcccuacgugagcugcgacccggacaagugcuaccaguucgcccugggccaggggaccacgcucaacaacgugcacuccaacaacaccguccgcgaccggacccccuaccgcacccugcugaugaacgagcucggcgugcccuuccaccugggcacgaagcaggucugcaucgccuggagcuccagcuccugccacgacgggaaggccuggcugcacgugugcaucaccggcgacgacaagaacgcgaccgccagcuucaucuacaacgggcggcucguggacuccguggucagcugguccaaggagauccugcgcacccaggagagcgagugcgugugcaucaacggcacgugcaccguggucaugaccgacggguccgccagcggcaaggccgacaccaagauccuguucaucgaggagggcaagaucgugcacacgagcacccucuccgggagcgcgcagcacguggaggagugcuccugcuacccccgguacccgggcguccgcugcgugugccgggacaacuggaaggggagcaaccgccccaucguggacaucaacaucaaggaccacuccaucgucagccgguacgugugcuccggccuggugggcgacacgccccgcaagaacgacagcuccagcuccagccacugccuggaccccaacaacgaggagggcgggcacggggucaagggcugggccuucgacgacgggaacgacguguggaugggccggaccaucaacgagaccucccgccucggcuacgagaccuucaaggucaucgagggguggagcaacccgaaguccaagcugcccaucaaccgccaggugaucguggaccggggcgaccggagcggguacuccggcaucuucagcgucgaggggaaguccugcaucaaccgcugcuucuacguggagcugauccggggccgcaaggaggagaccgaggugcucuggaccagcaacagcaucgucguguucugcggcacguccgggaccuacggcaccgggagcuggcccgacggcgccgaccugaaccugaugcccaucuga

SEQ ID NO: 89342 - RNA, 1410 nt, Artificial Sequence; identical to SEQ ID NO: 86170
  derived and/or modified CDS sequence (opt1) from neuraminidase__InfluenzaA__AHZ39868

SEQ ID NO: 89343 - RNA, 1410 nt, Artificial Sequence
  derived and/or modified CDS sequence (opt1) from neuraminidase__InfluenzaA__AHZ39892
augaaccccaaccagaagaucaucaccaucggcagcgugucccugaccaucagcacgaucugcuucuucaugcagaucgccauccucaucaccaccgucacccugcacuucaagcaguacgaguucaacuccccgcccaacaaccagguggugcugugcgagcccacgaucaucgagcgcaacaucaccgagaucgucuaccucaccaacaccacgaucgagaaggagaucugccccaagccggccgaguaccggaacuggagcaagccccagugcgacaucaccggguucgcgcccuucuccaaggacaacagcauccgccuguccgccggcggggacaucugggugacccgggagcccuacgugagcugcgacccggacaagugcuaccaguucgcccugggccaggggaccacgcucaacaacguccacuccaacaacaccgugcgcgaccggacccccuaccgcacccugcugaugaacgagcucggcgugcccuuccaccugggcacgaagcaggucugcaucgccuggagcuccagcuccugccacgacgggaaggccuggcugcacgugugcaucaccggcgacgacaagaacgcgaccgccagcuucaucuacaacgggcggcucguggacuccgucgugagcugguccaaggagauccugcgcacccaggagagcgagugcgugugcaucaacggcacgugcaccgucgugaugaccgacggguccgccagcggcaaggccgacaccaagauccuguucaucgaggagggcaagaucgugcacacgagcacccucuccgggagcgcgcagcacgucgaggagugcuccugcuacccccgguacccgggcgugcgcugcgugugccgggacaacuggaaggggagcaaccgccccaucgucgacaucaacaucaaggaccacuccaucgugagccgguacgugugcuccggccuggucggcgacacgccccgcaagaacgacagcuccagcuccagccacugccuggaccccaacaacgaggagggcgggcacggggugaagggcugggccuucgacgacgggaacgacgucuggaugggccggaccaucaacgagaccucccgccucggcuacgagaccuucaaggugaucgagggguggagcaacccgaaguccaagcugcagaucaaccgccaggugaucgucgaccggggcgaccggagcggguacuccggcaucuucagcguggaggggaaguccugcaucaaccgcugcuucuacguggagcugauccggggccgcaaggaggagaccgagguccucuggaccagcaacagcaucgugguguucugcggcacguccgggaccuacggcaccgggagcuggcccgacggcgccgaccugaaccugaugcccaucuga

SEQ ID NO: 89344 - RNA, 1410 nt, Artificial Sequence; identical to SEQ ID NO: 87378
  derived and/or modified CDS sequence (opt1) from neuraminidase__InfluenzaA__AHZ39904

SEQ ID NO: 89345 - RNA, 1410 nt, Artificial Sequence; identical to SEQ ID NO: 87378
  derived and/or modified CDS sequence (opt1) from neuraminidase__InfluenzaA__AHZ39916

SEQ ID NO: 89346 - RNA, 1410 nt, Artificial Sequence; identical to SEQ ID NO: 86170
  derived and/or modified CDS sequence (opt1) from neuraminidase__InfluenzaA__AHZ39928

SEQ ID NO: 89347 - RNA, 1410 nt, Artificial Sequence
  derived and/or modified CDS sequence (opt1) from neuraminidase__InfluenzaA__AHZ39940
augaaccccaaccagaagaucaucaccaucggcagcgugucccugaccaucagcacgaucugcuucuucaugcagaucgccauccucaucaccaccgucacccugcacuucaagcaguacgaguucaacuccccgcccaacaaccaggugaugcugugcgagcccacgaucaucgagcgcaacaugaccgagaucguguaccucaccaacaccacgaucgagaaggagaucugccccaagccggccgaguaccggaacuggagcaagccccagugcgggaucaccggcuucgcgcccuucuccaaggacaacagcauccgccuguccgccgggggcgacaucugggucacccgggagcccuacgugagcugcgacccggacaagugcuaccaguucgcccuggggcagggcaccacgcucaacaacgugcacuccaacaacaccguccgcgaccggacccccuaccgcacccugcugaugaacgagcucggcgugcccuuccaccuggggacgaagcaggucugcaucgccuggagcuccagcuccugccacgacggcaaggccuggcugcacgugugcaucaccggggacgacaagaacgcgaccgccagcuucaucuacaacggccggcucguggacuccguggucagcugguccaaggagauccugcgcacccaggagagcgagugcgugugcaucaacgggacgugcaccguggucaugaccgacggcuccgccagcggcaaggccgacaccaagauccuguucaucgaggaggggaagaucgugcacacgagcacccucuccggcagcgcgcagcacguggaggagugcuccugcuacccccgguacccggggguccgcugcgugugccgggacaacuggaagggcagcaaccgccccaucguggacaucaacaucaaggaccacuccaucgucagcuccuacgugugcagcggccuggugggggacaccccgcggaagaccgacuccagcuccagcucccacugccuggaccccaacaacgaggagggcgggcacggcgucaaggggugggccuucgacgacggcaacgacguguggaugggccgcacgaucaacgagaccagccggcucggguacgagaccuucaaggucaucgagggcugguccaaccccaagagcaagcugcagaucaaccgccaggugaucguggaccgcggggaccgguccggcuacagcgggaucuucuccgucgagggcaagagcugcaucaaccggugcuucuacguggagcugauccgcggccggaaggaggagaccgaggugcucuggacgagcaacuccaucgucguguucugcgggaccagcggcaccuacgggaccggcuccuggcccgacggggccgaccugaaccugaugcccaucuga

SEQ ID NO: 89348 - RNA, 1410 nt, Artificial Sequence; identical to SEQ ID NO: 86170
  derived and/or modified CDS sequence (opt1) from neuraminidase__InfluenzaA__AHZ39952

SEQ ID NO: 89349 - RNA, 1410 nt, Artificial Sequence; identical to SEQ ID NO: 86170
  derived and/or modified CDS sequence (opt1) from neuraminidase__InfluenzaA__AHZ39976

SEQ ID NO: 89350 - RNA, 1410 nt, Artificial Sequence
  derived and/or modified CDS sequence (opt1) from neuraminidase__InfluenzaA__AHZ39988
augaaccccaaccagaagaucaucaccaucggcagcgugucccugaccaucagcacgaucugcuucuucaugcagaucgccauccucaucaccaccgucacccugcacuucaagcaguacgaguucaacuccccgcccaacaaccaggugaugcugugcgagcccacgaucaucgagcgcaacaucaccgagaucguguaccucaccaacaccacgaucgagaaggagaucugccccaagccggccgaguaccggaacuggagcaagccccagugcgggaucaccggcuucgcgcccuucuccaaggacaacagcauccgccuguccgccgggggcgacaucugggucacccgggagcccuacgugagcugcgacccggacaagugcuaccaguucgcccuggggcagggcaccacgcucaacaacaugcacuccaacaacaccgugcgcgaccggacccccuaccgcacccugcugaugaacgagcucggcguccccuuccaccuggggacgaagcaggucugcaucgccuggagcuccagcuccugccacgacggcaaggccuggcugcacgugugcaucaccggggacgacaagaacgcgaccgccagcuucaucuacaacggccggcucguggacuccguggugagcugguccaaggagauccugcgcacccaggagagcgagugcgucugcaucaacgggacgugcaccguggugaugaccgacggcuccgccagcggcaaggccgacaccaagauccuguucaucgaggaggggaagaucguccacacgagcacccucuccggcagcacccagcacguggaggagugcuccugcuacccccgguacccgggggugcgcugcgucugccgggacaacuggaagggcagcaaccgccccaucguggacaucaacaucaaggaccacuccaucgugagcuccuacgucugcagcggccuggugggggacaccccgcggaagaacgacuccagcuccagcucccacugccuggaccccaacaacgaggagggcgggcacggcgugaaggggugggcguucgacgacggcaacgacgucuggaugggccgcacgaucaacgagaccagccggcucggguacgagaccuucaaggugaucgagggcugguccaaccccaagagcaagcugcagaucaaccgccaggucaucguggaccgcggggaccgguccggcuacagcgggaucuucuccguggagggcaagagcugcaucaaccggugcuucuacgucgagcugauccgcggccggaaggaggagaccgaggugcucuggacgagcaacuccaucguggucuucugcgggaccagcggcaccuacgggaccggcuccuggcccgacggggccgaccugaaccugaugcccaucuga

SEQ ID NO: 89351 - RNA, 1410 nt, Artificial Sequence; identical to SEQ ID NO: 86170
  derived and/or modified CDS sequence (opt1) from neuraminidase__InfluenzaA__AHZ40000

SEQ ID NO: 89352 - RNA, 1410 nt, Artificial Sequence; identical to SEQ ID NO: 86170
  derived and/or modified CDS sequence (opt1) from neuraminidase__InfluenzaA__AHZ40012

SEQ ID NO: 89353 - RNA, 1410 nt, Artificial Sequence
  derived and/or modified CDS sequence (opt1) from neuraminidase__InfluenzaA__AHZ40024
augaaccccaaccagaagaucaucaccaucggcagcgugucccugaccaucagcacgaucugcuucuucaugcagaucgccauccucaucaccaccgucacccugcacuucaagcaguacgaguucaacuccccgcccaacaaccaggugaugcugugcgagcccacgaucaucgagcgcaacaucaccgagaucguguaccucaccaacaccacgaucgagaaggagaucugccccaagccggccgaguaccggaacuggagcaagccccagugcgggaucaccggcuucgcgcccuucuccaaggacaacagcauccgccuguccgccgggggcgacaucugggucacccgggagcccuacgugagcugcgacccggacaagugcuaccaguucgcccuggggcagggcaccacgcucaacaacgugcacuccaacaacaccguccgcgaccggacccccuaccgcacccugcugaugaacgagcucggcgugcccuuccaccuggggacgaagcaggucugcaucgccuggagcuccagcuccugccacgacggcaaggccuggcugcacgugugcaucaccggggacgacaagaacgcgaccgccagcuucaucuacaacggccggcucguggacuccguggucagcugguccaaggagauccugcgcacccaggagagcgagugcgugugcaucaacgggacgugcaccguggucaugaccgacggcuccgccagcggcaaggccgacaccaagauccuguucaucgaggaggggaagaucgugcacacgagcacccucuccggcagcgcgcagcacguggaggagugcuccugcuacccccgguacccggggguccgcugcgugugccgggacaacuggaagggcagcaaccgccccaucguggacaucaacaucaaggaccacuccaucgucagcuccuacgugugcagcggccuggugggggacaccccgcggaagaacgacuccagcuccagcucccacugccuggaccccaacaacgaggagggcgggcacggcgucaaggggugggccuucgacgacggcaacgacguguggaugggccgcaccaucaacgagacgagccggcucggguucgagaccuucaaggucaucgagggcugguccaaccccaagagcaagcugcagaucaaccgccaggugaucguggaccgcggggaccgguccggcuacagcgggaucuucuccgucgagggcaagagcugcaucaaccggugcuucuacguggagcugauccgcggccggaaggaggagaccgaggugcucuggaccagcaacuccaucgucguguucugcgggacgagcggcaccuacgggaccggcuccuggcccgacggggccgaccugaaccugaugcccaucuga

SEQ ID NO: 89354 - RNA, 1410 nt, Artificial Sequence; identical to SEQ ID NO: 86170
  derived and/or modified CDS sequence (opt1) from neuraminidase__InfluenzaA__AHZ40036

SEQ ID NO: 89355 - RNA, 1410 nt, Artificial Sequence; identical to SEQ ID NO: 87381
  derived and/or modified CDS sequence (opt1) from neuraminidase__InfluenzaA__AHZ40048

SEQ ID NO: 89356 - RNA, 1410 nt, Artificial Sequence; identical to SEQ ID NO: 86170
  derived and/or modified CDS sequence (opt1) from neuraminidase__InfluenzaA__AHZ40063

SEQ ID NO: 89357 - RNA, 1410 nt, Artificial Sequence
  derived and/or modified CDS sequence (opt1) from neuraminidase__InfluenzaA__AHZ40075
augaaccccaaccagaagaucaucaccaucggcagcgugucccugaccaucagcacggucugcuucuucaugcagaucgccauccucaucaccaccgugacccugcacuucaagcaguacgaguucaacuccccgcccaacaaccaggugaugcugugcgagcccacgaucaucgagcgcaacaucaccgagaucgucuaccucaccaacaccacgaucgagaaggagaucugccccaagccggccgaguaccggaacuggagcaagccccagugcgggaucaccggcuucgcgcccuucuccaaggacaacagcauccgccuguccgccgggggcgacaucugggugacccgggagcccuacgugagcugcgacccggacaagugcuaccaguucgcccuggggcagggcaccacgcucaacaacguccacuccaacaacaccgugcgcgaccggacccccuaccgcacccugcugaugaacgagcucggcgugcccuuccaccuggggacgaagcaggucugcaucgccuggagcuccagcuccugccacgacggcaaggccuggcugcacgugugcaucaccggggacgacaagaacgcgaccgccagcuucaucuacaacggccggcucguggacuccgucgugagcugguccaaggagauccugcgcacccaggagagcgagugcgugugcaucaacgggacgugcaccgucgugaugaccgacggcuccgccagcggcaaggccgacaccaagauccuguucaucgaggaggggaagaucgugcacacgagcacccucuccggcagcgcgcagcacgucgaggagugcuccugcuacccccgguacccgggggugcgcugcgugugccgggacaacuggaagggcagcaaccgccccaucgucgacaucaacaucaaggaccacuccaucgugagcuccuacgugugcagcggccuggucggggacacgccccggaagaacgacuccagcuccagcucccacugccuggaccccaacaacgaggagggcgggcacggcgugaaggggugggccuucgacgacggcaacgacgucuggaugggccgcaccaucaacgagaccagccggcucggguacgagaccuucaaggugaucgagggcugguccaacagcaaguccaagcugcagaucaaccgccaggugaucgucgaccgcggggaccggagcggcuacuccgggaucuucagcguggagggcaagagcugcaucaaccggugcuucuacguggagcugauccgcggccggaaggaggagaccgagguccucuggaccuccaacagcaucgugguguucugcgggacguccggcaccuacgggaccggcagcuggccggacggggccgaccugaaccugaugcccaucuga

SEQ ID NO: 89358 - RNA, 1410 nt, Artificial Sequence; identical to SEQ ID NO: 86170
  derived and/or modified CDS sequence (opt1) from neuraminidase__InfluenzaA__AHZ40087

SEQ ID NO: 89359 - RNA, 1410 nt, Artificial Sequence; identical to SEQ ID NO: 87381
  derived and/or modified CDS sequence (opt1) from neuraminidase__InfluenzaA__AHZ40099

SEQ ID NO: 89360 - RNA, 1410 nt, Artificial Sequence
  derived and/or modified CDS sequence (opt1) from neuraminidase__InfluenzaA__AHZ40111
augaaccccaaccagaagaucaucaccaucggcagcgugucccugaccaucagcacgaucugcuucuucaugcagaucgccauccucaucaccaccgucacccugcacuucaagcaguacgaguucaacccgccgcccaacaaccaggugaugcugugcgagcccacgaucaucgagcgcaacaucaccgagaucguguaccucaccaacaccacgaucgagaaggagaucugcccgaagcuggccgaguaccggaacugguccaagccccagugcgacaucaccggguucgcgcccuucagcaaggacaacuccauccgccugagcgccggcggggacaucugggucacccgggagcccuacguguccugcgacccggacaagugcuaccaguucgcccucggccaggggaccacgcugaacaacgugcacagcaacaacaccguccgcgaccggacccccuaccgcacccugcucaugaacgagcugggcgugcccuuccaccugggcacgaagcaggucugcaucgccugguccagcuccagcugccacgacgggaaggccuggcuccacgugugcaucaccggcgacgacaagaacgcgaccgccuccuucaucuacaacgggcggcugguggacagcguggucuccuggagcaaggacauccugcgcacccaggaguccgagugcgugugcaucaacggcacgugcgccguggucaugaccgacgggagcgccuccggcaaggcggacaccaagauccucuucaucgaggagggcaagaucgugcacaccagcacgcugagcggguccgcccagcacguggaggagugcagcugcuacccccgguacccgggcguccgcugcgugugccgggacaacuggaagggguccaaccgccccaucguggacaucaacaucaaggaccacagcaucgucuccagcuacgugugcuccggccuggugggcgacacgccccggaagaacgacagcuccagcuccgggcacugccucgaccccaacaacgaggagggcgggcacggcgucaaggggugggccuucgacgacggcaacgacguguggaugggccgcaccaucaacgagaccagccggcugggguacgagaccuucaaggucaucgagggcugguccaaccccaagagcaagcugcagaucaaccgccaggugaucguggaccgggggaaccgcuccggcuacagcgggaucuucuccgucgagggcaagaacugcaucaaccggugcuucuacguggagcucauccgcggccggaaggaggagaccgaggugcuguggaccagcaacuccaucgucguguucugcgggaccagcggcacguacgggaccggcagcuggcccgacggggccgaccugaaccucaugcccaucuga

SEQ ID NO: 89361 - RNA, 1410 nt, Artificial Sequence
  derived and/or modified CDS sequence (opt1) from neuraminidase__InfluenzaA__AHZ40123
augaaccccaaccagaagaucaucaccaucggcagcgugucccugaccaucagcacgaucugcuucuucaugcagaucgccauccucaucaccaccgucacccugcacuucaagcaguacgaguucaacuccccgcccaacaaccaggugaugcugugcgagcccacgaucaccgagcgcaacaucaccgagaucguguaccucaccaacacgaccaucgagaaggagaucugccccaagccggccgaguaccggaacuggagcaagccccagugcgggaucaccggcuucgcgcccuucuccaaggacaacagcauccgccuguccgccgggggcgacaucugggucacccgggagcccuacgugagcugcgacccggacaagugcuaccaguucgcccuggggcagggcacgacccucaacaacgugcacuccaacaacaccguccgcgaccggacccccuaccgcacgcugcugaugaacgagcucggcgugcccuuccaccuggggaccaagcaggucugcaucgccuggagcuccagcuccugccacgacggcaaggccuggcugcacgugugcaucaccggggacgacaagaacgcgaccgccagcuucaucuacaacggccggcucguggacuccguggucagcugguccaaggagauccugcgcacgcaggagagcgagugcgugugcaucaacgggaccugcaccguggucaugaccgacggcuccgccagcggcaaggccgacacgaagauccuguucaucgaggaggggaagaucgugcacacccggacccucagcggcuccgcgcagcacguggaggagugcagcugcuacccccgcuacccggggguccggugcgugugccgcgacaacuggaagggcuccaaccggcccaucguggacaucaacaucaaggaccacagcaucgucuccagcuacgugugcuccggccuggugggggacacgccccgcaagaacgacagcuccagcuccagccacugccuggaccccaacaacgaggagggcgggcacggcgucaaggggugggccuucgacgacggcaacgacguguggaugggccggaccaucaacgagaccucccgccucggguacgagaccuucaaggucaucgagggcuggagcaacccgaaguccaagcugcagaucaaccggcaggucaucguggaccgcggggaccggagcggcuacuccgggaucuucagcguggagggcaaguccugcaucaaccgcugcuucuacguggagcugauccggggccgcaaggaggagaccgaggugcucuggacgagcaacagcaucgucguguucugcgggaccuccggcaccuacgggaccggcagcuggcccgacggggccgaccugaaccugaugcccaucuga

SEQ ID NO: 89362 - RNA, 1410 nt, Artificial Sequence; identical to SEQ ID NO: 86170
  derived and/or modified CDS sequence (opt1) from neuraminidase__InfluenzaA__AHZ40133

SEQ ID NO: 89363 - RNA, 1410 nt, Artificial Sequence; identical to SEQ ID NO: 87388
  derived and/or modified CDS sequence (opt1) from neuraminidase__InfluenzaA__AHZ40145

SEQ ID NO: 89364 - RNA, 1410 nt, Artificial Sequence
  derived and/or modified CDS sequence (opt1) from neuraminidase__InfluenzaA__AHZ40157
augaaccccaaccagaagaucaucaccaucggcagcgugucccugaccaucagcacgaucugcuucuucaugcagaucgccauccucaucaccaccgucacccugcacuucaagcaguacgaguucaacuccccgcccaacaaccaggugaugcugugcgagcccacgaucaucgagcgcaacaucaccgagaucguguaccucaccaacaccacgaucgagaaggagcugugccccaagcuggccgaguaccggaacuggagcaagccgcagugcgacaucaccggguucgcgcccuucuccaaggacaacagcauccgccucuccgccggcggggacaucugggucacccgggagcccuacgugagcugcgaccccgacaagugcuaccaguucgcccugggccaggggaccacgcugaacaacgugcacuccaacaacaccguccgcgaccggaccccguaccgcacccuccugaugaacgagcugggcgugcccuuccaccucggcacgaagcaggucugcauggccuggagcuccagcuccugccacgacgggaaggccuggcugcacgugugcaucaccggcgacgacaagaacgcgaccgccagcuucaucuacaacgggaagcugguggacuccguggucagcugguccaaggagauccuccggacccaggagagcgagugcgugugcaucaacggcacgugcaccguggucaugaccgacggguccgccagcggcaaggccgacaccaagauccuguucaucgaggagggcaagaucgugcacacgagcacccuguccgggagcgcgcagcacguggaggagugcuccugcuacccccgcuaccccggcguccggugcgugugccgcgacaacuggaaggggagcaaccggccgaucguggacaucaacaucaaggaccacuccaucgucagcuccuacgugugcagcggccucgugggcgacacgccccgcaagaccgacuccagcuccagcucccacugccuggaccccaacaacgaggagggcgggcacggggucaagggcugggccuucgacgacgggaacgacguguggaugggccggaccaucaacgagaccagccgccugggcuacgagaccuucaaggucaucgaggggugguccaaccccaagagcaagcuccagaucaaccgccaggugaucguggaccggggcgaccgguccggguacagcggcaucuucuccgucgagggcaagagcugcaucaaccgcugcuucuacguggagcugauccgggggcgcaaggaggagaccgccgugcuguggacgagcaacuccaucgucguguucugcggcaccagcgggaccuacggcaccggguccuggccggacggcgccgaccucaaccugaugcccaucuga

SEQ ID NO: 89365 - RNA, 1410 nt, Artificial Sequence
  derived and/or modified CDS sequence (opt1) from neuraminidase__InfluenzaA__AHZ40169
augaaccccaaccagaagaucaucaccaucggcagcgugugcaugaccaucgggauggccaaccugauccuccagaucggcaacaucaucuccaucuggaucagccacuccauccagcuggagaaccagagccagaucgagacgugcaaccaguccgucaucaccuacgagaacaacaccugggugaaccagaccuacgugaacaucagcaacacgaacuucgccgcggggcaguccgucgugagcgugaagcuggccggcaacuccagccucugcccggucuccgggugggccaucuacagcaaggacaacuccgugcgcaucggcagcaagggcgacguguucgucauccgggagcccuucaucuccugcagcccccuggagugccgcaccuucuuccugacccagggggcccuccugaacgacaagcacuccaacggcaccaucaaggaccggagccccuaccgcacgcugauguccugcccgaucggggaggugcccagccccuacaacagccgguucgaguccguggccuggagcgcguccgccugccacgacggcaucaacuggcucaccaucgggaucagcggccccgacuccggcgccgucgccgugcugaaguacaacgggaucaucaccgacaccaucaagagcuggcgcaacaacauccugcggacgcaggaguccgagugcgcgugcgugaacggcagcugcuucaccaucaugaccgacgggccguccgacggccaggccagcuacaagaucuuccgcaucgagaagggcaagaucgucaaguccguggagaugaacgcccccaacuaccacuacgaggagugcagcugcuaccccgacuccagcgagaucacgugcgugugccgggacaacuggcacggguccaaccgccccugggucagcuucaaccagaaccucgaguaccagaucggcuacaucugcuccgggaucuucggcgacaacccgcggcccaacgacaagaccgggagcugcggccccguguccagcaacggcgccaacggggugaagggcuucagcuucaaguacgggaacggcgucuggaucgggcgcaccaaguccaucagcucccggaagggcuucgagaugaucugggaccccaacggcuggaccgggaccgacaacaacuucagcaucaagcaggacaucgugggcaucaacgagugguccggguacagcggcuccuucgugcagcacccggagcugacggggcuggacugcauccgccccugcuucugggucgagcucauccggggccgccccaaggagaacaccaucuggaccagcggcuccagcaucuccuucugcggggugaacagcgacaccgucggcugguccuggcccgacggggccgagcugccguucacgaucgacaaguga

SEQ ID NO: 89366 - RNA, 1410 nt, Artificial Sequence
  derived and/or modified CDS sequence (opt1) from neuraminidase__InfluenzaA__AHZ40180
augaaccccaaccagaagaucaucaccaucggcagcgugucccugaccaucagcacgaucugcuucuucaugcagaucaccauccucaucaccaccgucacgcugcacuucaagcaguacgaguucaacuccccgcccaacaaccaggugaugcugugcgagcccaccaucaucgagcgcaacaucaccgagaucguguaccucaccaacacgaccaucgagaaggagaucugccccaagccggccgaguaccggaacuggagcaagccccagugcgggaucaccggcuucgcccccuucuccaaggacaacagcauccgccuguccgccgggggcgacaucugggucacccgggagcccuacgugagcugcgacccggacaagugcuaccaguucgcgcuggggcagggcacgacccucaacaacgugcacuccaacaacaccguccgcgaccggacccccuaccgcacgcugcugaugaacgagcucggcgugcccuuccaccuggggaccaagcaggucugcaucgccuggagcuccagcuccugccacgacggcaaggccuggcugcacgugugcaucaccggggacgacaagaacgccaccgcgagcuucaucuacaacggccggcucguggacuccguggucagcugguccaaggagauccugcgcacgcaggagagcgagugcgugugcaucaacgggaccugcaccguggucaugaccgacggcuccgccagcggcaaggccgacacgaagauccuguucaucgaggaggggaagaucgugcacaccagcacccucuccggcagcgcccagcacguggaggagugcuccugcuacccccgguacccggggguccgcugcgugugccgggacaacuggaagggcagcaaccgccccaucguggacaucaacaucaaggaccacuccaucgucagcuccuacgugugcagcggccuggugggggacaccccgcggaagaacgacuccagcuccagcucccacugccuggaccccaacaacgaggagggcgggcacggcgucaaggggugggcguucgacgacggcaacgacguguggaugggccgcacgaucaacgagaccagccggcucggguacgagaccuucaaggucaucgagggcugguccaaccccaagagcaagcugcagaucaaccgccaggugaucguggaccgcggggaccgguccggcuacagcgggaucuucuccgucgagggcaagagcugcaucaaccggugcuucuacguggagcugauccgcggccggaaggaggagaccgaggugcucuggacgagcaacuccaucgucguguucugcgggaccagcggcaccuacgggaccggcuccuggcccgacggggccgaccugaaccugaugcccaucuga

SEQ ID NO: 89367 - RNA, 1410 nt, Artificial Sequence; identical to SEQ ID NO: 87034
  derived and/or modified CDS sequence (opt1) from neuraminidase__InfluenzaA__AHZ40192

SEQ ID NO: 89368 - RNA, 1410 nt, Artificial Sequence; identical to SEQ ID NO: 86170
  derived and/or modified CDS sequence (opt1) from neuraminidase__InfluenzaA__AHZ40204

SEQ ID NO: 89369 - RNA, 1410 nt, Artificial Sequence; identical to SEQ ID NO: 86170
  derived and/or modified CDS sequence (opt1) from neuraminidase__InfluenzaA__AHZ40216

SEQ ID NO: 89370 - RNA, 1410 nt, Artificial Sequence; identical to SEQ ID NO: 87399
  derived and/or modified CDS sequence (opt1) from neuraminidase__InfluenzaA__AHZ40228

SEQ ID NO: 89371 - RNA, 1410 nt, Artificial Sequence
  derived and/or modified CDS sequence (opt1) from neuraminidase__InfluenzaA__AHZ40240
augaaccccaaccagaagaucaucaccaucggcagcgugucccugaccaucagcacgaucugcuuccucaugcagaucgccauccugaucaccaccgccacccugcacuucaagcaguacgaguucaacuccccgcccaacaaccaggucaugcucugcgagcccacgaucaucgagcgcaacaucaccgagaucguguaccugaccaacaccacgaucgagaaggagaucugccccaagccggcggaguaccggaacuggagcaagccccagugcgggaucaccggcuucgcccccuucuccaaggacaacagcauccgccuguccgccgggggcgacaucugggugacccgggagcccuacgucagcugcgacccggacaagugcuaccaguucgcccucgggcagggcaccacgcugaacaacgugcacuccaacaacaccgugcgcgaccggacccccuaccgcacccugcucaugaacgagcugggcguccccuuccaccuggggacgaagcaggucugcaucgccuggagcuccagcuccugccacgacggcaaggcguggcuccacgugugcaucaccggggacgacaagaacgccaccgccagcuucaucuacaacggccggcugguggacuccguggugagcugguccaaggagauccugcgcacccaggagagcgagugcgucugcaucaacgggacgugcaccguggugaugaccgacggcuccgccagcggcaaggcggacaccaagauccucuucaucgaggaggggaagaucguccacacgagcacccuguccggcagcgcccagcacguggaggagugcuccugcuacccccgguacccgggggugcgcugcgucugccgggacaacuggaagggcagcaaccgccccaucguggacaucaacaucaaggaccgguccaucgugagcuccuacgucugcagcggccuggugggggacaccccgcgcaagaacgacuccagcuccagcucccacugccucgaccccaacaacgaggagggcgggcacggcgugaaggggugggccuucgacgacggcaacgacgucuggaugggccggaccaucaacgagacgagccgccugggguacgagaccuucaaggugaucgagggcugguccaaccccaagagcaagcugcagaucaaccggcaggucaucguggaccgcggggaccgguccggcuacagcgggaucuucuccguggagggcaagagcugcaucaaccgcugcuucuacgucgagcucauccggggccgcaaggaggagaccgaggugcuguggaccagcaacuccaucguggucuucugcgggacgagcggcaccuacgggaccggcuccuggcccgacggggccgaccugaaccucaugcccaucuga

SEQ ID NO: 89372 - RNA, 1410 nt, Artificial Sequence
  derived and/or modified CDS sequence (opt1) from neuraminidase__InfluenzaA__AHZ40252
augaaccccaaccagaagaucaucaccaucggcagcgugucccugaccaucagcacgaucugcuucuucaugcagaucgccauccucaucaccaccgucacccugcacuucaagcaguacgaguucaacuccccgcccaacaaccaggugaugcugugcgagcccacgaucaucgagcgcaacaucaccgagaucguguaccucaccaacaccacgaucgagaaggagaucugccccaagccggccgaguaccggaacuggagcaagccccagugcgggaucaccggcuucgcgcccuucuccaaggacaacagcauccgccuguccgccgggggcgacaucugggucacccgggagcccuacgugagcugcgacccggacaagugcuaccaguucgcccuggggcagggcaccacgcucaacaacgugcacuccaacaacaccguccgcgaccggacccccuaccgcacccugcugaugaacgagcucggcgugcccuuccaccuggggacgaagcaggucugcaucgccuggagcuccagcuccugccacgacggcaaggccuggcugcacgugugcaucaccggggaggacaagaacgcgaccgccagcuucaucuacaacggccggcucguggacuccaucgugagcugguccaaggagauccugcgcacccaggagagcgagugcgucugcaucaacgggacgugcaccguggugaugaccgacggcuccgccagcggcaaggccgacaccaagauccuguucaucgaggaggggaagaucguccacacgagcacccucuccggcagcgcgcagcacguggaggagugcuccugcuacccccgguacccgggggugcgcugcgucugccgggacaacuggaagggcagcaaccgccccaucguggacaucaacaucaaggaccacuccaucgugagcuccuacgucugcagcggccuggugggggacaccccgcggaagaacgacuccagcuccagcucccacugccuggaccccaacaacgaggagggcgggcacggcgugaaggggugggccuucgacgacggcaacgacgucuggaugggccgcaccaucaacgagacgagccggcucggguacgagaccuucaaggugaucgagggcugguccaaccccaagagcaagcugcagaucaaccgccaggucaucguggaccgcggggaccgguccggcuacagcgggaucuucuccguggagggcaagagcugcaucaaccggugcuucuacgucgagcugauccgcggccggaaggaggagaccgaggugcucuggaccagcaacuccaucguggucuucugcgggacgagcggcaccuacgggaccggcuccuggcccgacggggccgaccugaaccugaugcccaucuga

SEQ ID NO: 89373 - RNA, 1410 nt, Artificial Sequence; identical to SEQ ID NO: 89118
  derived and/or modified CDS sequence (opt1) from neuraminidase__InfluenzaA__AHZ40264

SEQ ID NO: 89374 - RNA, 1410 nt, Artificial Sequence; identical to SEQ ID NO: 86170
  derived and/or modified CDS sequence (opt1) from neuraminidase__InfluenzaA__AHZ40276

SEQ ID NO: 89375 - RNA, 1410 nt, Artificial Sequence
  derived and/or modified CDS sequence (opt1) from neuraminidase__InfluenzaA__AHZ40288
augaaccccaaccagaagaucaucaccaucggcagcgugucccugaccaucagcacgaucugcuucuucaugcagaucgccauccucaucaccaccgucacccugcacuucaagcaguacgaguucaacuccccgcccaacaaccaggugaugcugugcgagcccacgaucaucgagcgcaacaucaccgagaucguguaccucaccaacaccacgaucgagaaggagaucugccccaagcuggccgaguaccggaacuggagcaagccgcagugcgacaucaccggguucgcgcccuucuccaaggacaacagcauccgccuguccgccggcggggacaucugggucacccgggagcccuacgugagcugcgaccccgacaagugcuaccaguucgcccucggccaggggaccacgcugaacaacgugcacuccaacaacaccguccgcgaccggaccccguaccgcacccugcucaugaacgagcugggcgugcccuuccaccugggcacgaagcaggucugcaucgccuggagcuccagcuccugccacgacgggaaggccuggcuccacgugugcaucaccggcgacgacaagaacgcgaccgccagcuucaucuacaacgggcggcugguggacuccgugaucagcugguccaaggacauccugcgcacccaggagagcgagugcgucugcaucaacggcacgugcgccguggugaugaccgacggguccgccagcggcaaggcggacaccaagauccucuucaucgaggagggcaagaucguccacaccagcacgcuguccgggagcgcccagcacguggaggagugcuccugcuacccccgguaccccggcgugcgcugcgucugccgggacaacuggaaggggagcaaccgcccgaucguggacaucaacaucaaggaccacuccaucgugagcuccuacgucugcagcggccuggugggcgacacgccccggaagaacgacuccagcuccagcgggcacugccucgaccccaacaacgaggagggcgggcacggcgugaaggggugggccuucgacgacggcaacgacgucuggaugggccgcaccaucaacgagaccucccggcugggguacgagaccuucaaggugaucgagggcuggagcaaccccaaguccaagcugcagaucaaccgccaggucaucguggaccgggggaaccgcagcggcuacuccgggaucuucagcguggagggcaagaacugcaucaaccggugcuucuacgucgagcucauccgcggccggaaggaggagaccgaggugcuguggaccuccaacagcaucguggucuucugcgggaccagcggcacguacgggaccggcuccuggccggacggggccgaccugaaccucaugcccaucuga

SEQ ID NO: 89376 - RNA, 1410 nt, Artificial Sequence
  derived and/or modified CDS sequence (opt1) from neuraminidase__InfluenzaA__AHZ40312
augaaccccaaccagaagaucaucaccaucggcagcgugucccugaccaucagcacgaucugcuucuucaugcagaucgccauccucaucaccaccgucacccugcacuucaagcaguacgaguucaacuacccgcccaacaaccaggugaugcugugcgagcccacgaucaucgagcgcaacaucaccgagaucguguaccucaccaacaccacgaucgagaaggagaucugccccaagccggccgaguaccggaacugguccaagccccagugcgggaucaccggcuucgcgcccuucagcaaggacaacuccauccgccugagcgccgggggcgacaucugggucacccgggagcccuacguguccugcgacccggacaagugcuaccaguucgcccuggggcagggcaccacgcucaacaacgugcacagcaacaacaccguccgcgaccggacccccuaccgcacccugcugaugaacgagcucggcgugcccuuccaccuggggacgaagcaggucugcaucgccugguccagcuccagcugccacgacggcaaggccuggcugcacgugugcaucaccggggacgacaagaacgcgaccgccuccuucaucuacaacggccggcucguggacagcguggucuccuggagcaaggagauccugcgcacccaggaguccgagugcgugugcaucaacgggacgugcaccguggucaugaccgacggcagcgccuccggcaaggccgacaccaagauccuguucaucgaggaggggaagaucgugcacacgagcacccucagcggcuccgcgcagcacguggaggagugcagcugcuacccccgguacccggggguccgcugcgugugccgggacaacuggaagggcuccaaccgccccaucguggacaucaacaucaaggaccacagcgucguguccagcuacgugugcuccggccuggucggggacacgccccggaagaacgacagcuccagcuccagccacugccuggaccccaacaacgaggagggcgggcacggcgugaaggggugggccuucgacgacggcaacgacgucuggaugggccgcaccaucaacgagaccucccggcucggguacgagaccuucaaggugaucgagggcuggagcaacccgaaguccaagcugcagaucaaccgccaggugaucgucgaccgcggggaccggagcggcuacuccgggaucuucagcguggagggcaaguccugcaucaaccggugcuucuacguggagcugauccgcggccggaaggaggagaccgagguccucuggaccagcaacagcaucgugguguucugcgggacguccggcaccuacgggaccggcagcuggcccgacggggccgaccugaaccugaugcccaucuga

SEQ ID NO: 89377 - RNA, 1410 nt, Artificial Sequence; identical to SEQ ID NO: 86170
  derived and/or modified CDS sequence (opt1) from neuraminidase__InfluenzaA__AHZ40324

SEQ ID NO: 89378 - RNA, 1410 nt, Artificial Sequence; identical to SEQ ID NO: 86170
  derived and/or modified CDS sequence (opt1) from neuraminidase__InfluenzaA__AHZ40336

SEQ ID NO: 89379 - RNA, 1410 nt, Artificial Sequence; identical to SEQ ID NO: 89353
  derived and/or modified CDS sequence (opt1) from neuraminidase__InfluenzaA__AHZ40348

SEQ ID NO: 89380 - RNA, 1410 nt, Artificial Sequence; identical to SEQ ID NO: 87378
  derived and/or modified CDS sequence (opt1) from neuraminidase__InfluenzaA__AHZ40360

SEQ ID NO: 89381 - RNA, 1410 nt, Artificial Sequence
  derived and/or modified CDS sequence (opt1) from neuraminidase__InfluenzaA__AHZ40372
augaaccccaaccagaagaucaucaccaucggcagcgugucccugaccaucagcacgaucugcuucuucaugcagaucgccauccucaucaccaccgucacccugcacuucaagcaguacgaguucaacuccccgcccaacaaccaggugaugcugugcgagcccacgaucaucgagcgcaacaucaccgagaucguguaccucaccaacaccacgaucgagaaggagaucugccccaagccggccgaguaccggaacuggagcaagccccagugcgggaucaccggcuucgcgcccuucuccaaggacaacagcauccgccuguccgccgggggcgacaucugggucacccgggagcccuacgugagcugcgacccggacaagugcuaccaguucgcccuggggcagggcaccacgcucaacaacgugcacuccaacaacaccguccgcgaccggacccccuaccgcacccugcugaugaacgagcucggcgugcccuuccaccuggggacgaagcaggucugcaucgccuggagcuccagcuccugccacgacggcaaggccuggcugcacgugugcaucaccggggacgacaagaacgcgaccgccagcuucaucuacaacggccggcucguggacuccguggucagcugguccaaggagauccugcgcacccaggagagcgagugcgugugcaucaacgggacgugcaccguggucaugaccgacggcuccgccagcggcaaggccgacaccaagauccuguucaucgaggaggggaagaucgugcacacgagcacccucuccggcagcgcgcagcacguggaggagugcuccugcuacccccgguacccggggguccgcugcgugugccgggacaacuggaagggcagcaaccgccccaucguggacaucaacaucaaggaccacuccaucgucagcuccuacgugugcagcggccuggugggggacaccccgcggaagaacgacuccagcuccagcucccacugccuggaccccaacaacgaggagggcgaccacggggucaagggcugggccuucgacgacgggaacgacguguggaugggccgcaccaucaacgagacgagccggcucggcuacgagaccuucaaggucaucgaggggugguccaaccccaagagcaagcugcagaucaaccgccaggugaucguggaccggggcgaccgcuccggguacagcggcaucuucuccgucgagggcaagagcugcaucaaccggugcuucuacguggagcugauccgcgggcggaaggaggagaccgaggugcucuggaccagcaacuccaucgucguguucugcggcacgagcgggaccuacggcaccggguccuggcccgacggcgccgaccugaaccugaugcccaucuga

SEQ ID NO: 89382 - RNA, 1410 nt, Artificial Sequence; identical to SEQ ID NO: 87034
  derived and/or modified CDS sequence (opt1) from neuraminidase__InfluenzaA__AHZ40384

SEQ ID NO: 89383 - RNA, 1410 nt, Artificial Sequence; identical to SEQ ID NO: 86170
  derived and/or modified CDS sequence (opt1) from neuraminidase__InfluenzaA__AHZ40396

SEQ ID NO: 89384 - RNA, 1410 nt, Artificial Sequence; identical to SEQ ID NO: 86170
  derived and/or modified CDS sequence (opt1) from neuraminidase__InfluenzaA__AHZ40408

SEQ ID NO: 89385 - RNA, 1410 nt, Artificial Sequence; identical to SEQ ID NO: 86170
  derived and/or modified CDS sequence (opt1) from neuraminidase__InfluenzaA__AHZ40420

SEQ ID NO: 89386 - RNA, 1410 nt, Artificial Sequence
  derived and/or modified CDS sequence (opt1) from neuraminidase__InfluenzaA__AHZ40432
augaaccccaaccagaagaucaucaccaucggcagcgugucccugaccaucagcacgaucugcuucuucaugcagaucgccauccucaucaccaccgucacccugcacuucaagcaguacgaguucaacuccccgcccaacaaccaggugaugcugugcgagcccacgaucaucgagcgcaacaucaccgagaucguguaccucaccaacaccacgaucgagaaggagaucugccccaagccggccgaguaccggaacuggagcaagccccagugcgacaucaccggguucgcgcccuucuccaaggacaacagcauccgccuguccgccggcggggacaucugggucacccgggagcccuacgugagcugcgacccggacaagugcuaccaguucgcccugggccaggggaccacgcucaacaacgugcacuccaacaacaccguccgcgaccggacccccuaccgcacccugcugaugaacgagcucggcgugcccuuccaccugggcacgaagcaggucugcaucgccuggagcuccagcuccugccacgacgggaaggccuggcugcacgugugcaucaccggcgacgacaagaacgcgaccgccagcuucaucuacaacgggcggcucguggacuccguggucagcugguccaaggagauccugcgcacccaggagagcgagugcgugugcaucaacggcacgugcaccguggucaugaccgacggguccgccagcggcaaggccgacaccaagauccuguucaucgaggagggcaagaucgugcacacgagcacccucuccgggagcgcgcagcacguggaggagugcuccugcuacccccgguacccgggcguccgcugcgugugccgggacaacuggaaggggagcaaccgccccaucaucgacaucaacaucaaggaccacuccaucgugagccgguacgucugcuccggccuggugggcgacacgccccgcaagaacgacagcuccagcuccagccacugccuggaccccaacaacgaggagggcgggcacggggugaagggcugggccuucgacgacgggaacgacgucuggaugggccggaccaucaacgagaccucccgccucggcuacgagaccuucaaggugaucgagggguggagcaacccgaaguccaagcugcagaucaaccggcaggucaucguggaccgcggcgaccggagcggguacuccggcaucuucagcguggaggggaaguccugcaucaaccgcugcuucuacgucgagcugauccggggccgcaaggaggagaccgaggugcucuggaccagcaacagcaucguggucuucugcggcacguccgggaccuacggcaccgggagcuggcccgacggcgccgaccugaaccugaugcccaucuga

SEQ ID NO: 89387 - RNA, 1410 nt, Artificial Sequence; identical to SEQ ID NO: 86170
  derived and/or modified CDS sequence (opt1) from neuraminidase__InfluenzaA__AHZ40444

SEQ ID NO: 89388 - RNA, 1410 nt, Artificial Sequence
  derived and/or modified CDS sequence (opt1) from neuraminidase__InfluenzaA__AHZ40456
augaaccccaaccagaagaucaucaccaucggcagcgugucccugaccaucagcacgaucugcuucuucaugcagaucgccauccucaucaccaccgucacccugcacuucaagcaguacgaguucaacuccccgcccaacaaccaggugaugcugugcgagcccacgaucaucgagcgcaacaucaccgagaucguguaccucaccaacaccacgaucgagaaggagaucugccccaagccggccgaguaccggaacuggagcaagccccagugcgacaucaccggguucgcgcccuucuccaaggacaacagcauccgccuguccgccggcggggacaucugggucacccgggagcccuacgugagcugcgacccggacaagugcuaccaguucgcccugggccaggggaccacgcucaacaacaugcacuccaacaacaccgugcgcgaccggacccccuaccgcacccugcugaugaacgagcucggcguccccuuccaccugggcacgaagcaggucugcaucgccuggagcuccagcuccugccacgacgggaaggccuggcugcacgugugcaucaccggcgacgacaagaacgcgaccgccagcuucaucuacaacgggcggcucguggacuccguggugagcugguccaaggagauccugcgcacccaggagagcgagugcgucugcaucaacggcacgugcaccguggugaugaccgacggguccgccagcggcaaggccgacaccaagauccuguucaucgaggagggcaagaucguccacacgagcacccucuccgggagcgcgcagcacguggaggagugcuccugcuacccccgguacccgggcgugcgcugcgucugccgggacaacuggaaggggagcaaccgccccaucguggacaucaacaucaaggaccacuccaucgugagcuccuacgucugcagcggccuggugggcgacaccccgcggaagaacgacuccagcuccagcucccacugccuggaccccaacaacgaggagggcgggcacggggugaagggcugggccuucgacgacgggaacgacgucuggaugggccgcaccaucaacgagacgagccggcucggcuacgagaccuucaaggugaucgaggggugguccaaccccaagagcaagcugcagaucaaccgccaggucaucguggaccggggcgaccgcuccggguacagcggcaucuucuccguggagggcaagagcugcaucaaccggugcuucuacgucgagcugauccgcgggcggaaggaggagaccgaggugcucuggaccagcaacuccaucguggucuucugcggcacgagcgggaccuacggcaccggguccuggcccgacggcgccgaccugaaccugaugcccaucuga

SEQ ID NO: 89389 - RNA, 1410 nt, Artificial Sequence
  derived and/or modified CDS sequence (opt1) from neuraminidase__InfluenzaA__AHZ40468
augaaccccaaccagaagaucaucaccaucggcagcgugucccugaccaucagcacgaucugcuucuucaugcagaucgccauccucaucaccaccgucacccugcacuucaagcaguacgaguucaacuccccgcccaacaaccaggugaugcugugcgagcccacgaucaucgagcgcaacaucaccgagaucguguaccucaccaacaccacgaucgagaaggagaucugccccaagccggccgaguaccggaacuggagcaagccccagugcgggaucaccggcuucgcgcccuucuccaaggacaacagcauccgccuguccgccgggggcgacaucugggucacccgggagcccuacgugagcugcgacccggacaagugcuaccaguucgcccuggggcagggcaccacgcucaacaacgugcacuccaacaacaccguccgcgaccggacccccuaccgcacccugcugaugaacgagcucggcgugcccuuccaccuggggacgaagcaggucugcaucgccuggagcuccagcuccugccacgacggcaaggccuggcugcacgugugcaucaccgggaacgacaagaacgcgaccgccagcuucaucuacaacggccggcucguggacuccguggucagcugguccaaggagauccugcgcacccaggagagcgagugcgugugcaucaacgggacgugcaccguggucaugaccgacggcuccgccagcggcaaggccgacaccaagauccuguucaucgaggaggggaagaucgugcacacgagcacccucuccggcagcgcgcagcacguggaggagugcuccugcuacccccgguacccggggguccgcugcgugugccgggacaacuggaagggcagcaaccgccccaucguggacaucaacaucaaggaccacuccaucgucagcuccuacgugugcagcggccuggugggggacaccccgcggaagaacgacuccagcuccagcucccacugccuggaccccaacaacgaggagggcgggcacggcgucaaggggugggccuucgacgacggcaacgacguguggaugggccgcaccaucaacgagacgagccggcucggguacgagaccuucaaggucaucgagggcugguccaaccccaagagcaagcugcagaucaaccgccaggugaucguggaccgcggggaccgguccggcuacagcgggaucuucuccgucgagggcaagagcugcaucaaccggugcuucuacguggagcugauccgcggccggaaggaggagaccgaggugcucuggaccagcaacuccaucgucguguucugcgggacgagcggcaccuacgggaccggcuccuggcccgacggggccgaccugaaccugaugcccaucuga

SEQ ID NO: 89390 - RNA, 1410 nt, Artificial Sequence; identical to SEQ ID NO: 87378
  derived and/or modified CDS sequence (opt1) from neuraminidase__InfluenzaA__AHZ40480

SEQ ID NO: 89391 - RNA, 1410 nt, Artificial Sequence; identical to SEQ ID NO: 88816
  derived and/or modified CDS sequence (opt1) from neuraminidase__InfluenzaA__AHZ40492

SEQ ID NO: 89392 - RNA, 1410 nt, Artificial Sequence; identical to SEQ ID NO: 86170
  derived and/or modified CDS sequence (opt1) from neuraminidase__InfluenzaA__AHZ40503

SEQ ID NO: 89393 - RNA, 1410 nt, Artificial Sequence; identical to SEQ ID NO: 86170
  derived and/or modified CDS sequence (opt1) from neuraminidase__InfluenzaA__AHZ40515

SEQ ID NO: 89394 - RNA, 1410 nt, Artificial Sequence
  derived and/or modified CDS sequence (opt1) from neuraminidase__InfluenzaA__AHZ40527
augaaccccaaccagaagaucaucaccaucggcagcgugucccugaccaucagcacgaugugcuucuucaugcagaucgccauccucaucaccaccgucacccugcacuucaagcaguacgaguucgacuccccgcccaacaaccaggugaugcugugcgagcccacgaucaucgagcgcaacaucaccgagaucguguaccucaccaacaccacgaucgagaaggagaucugccccaagccggccgaguaccggaacuggagcaagccccagugcgggaucaccggcuucgcgcccuucuccaaggacaacagcauccgccuguccgccgggggcgacaucugggucacccgggagcccuacgugagcugcgacccggacaagugcuaccaguucgcccuggggcagggcaccacgcucaacaacgugcacuccaacaacaccguccgcgaccggacccccuaccgcacccugcugaugaacgagcucggcgugcccuuccaccuggggacgaagcaggucugcaucgccuggagcuccagcuccugccacgacggcaaggccuggcugcacgugugcaucaccggggacgacaagaacgcgaccgccagcuucaucuacaacggccggcucguggacuccguggucagcugguccaaggagauccugcgcacccaggagagcgagugcgugugcaucaacgggacgugcaccguggucaugaccgacggcuccgccagcggcaaggccgacaccaagauccuguucaucgaggaggggaagaucgugcacacgagcacccucuccggcagcgcgcagcacguggaggagugcuccugcuacccccgguacccggggguccgcugcgugugccgggacaacuggaagggcagcaaccgccccaucguggacaucaacaucaaggaccacuccaucgucagcuccuacgugugcagcggccuggugggggacaccccgcggaagaacgacuccagcuccagcucccacugccuggaccccaacaacgaggagggcgggcacggcgucaaggggugggccuucgacgacggcaacgacguguggaugggccgcaccaucaacgagacgagccggcucggguacgagaccuucaaggucaucgagggcugguccaaccccaagagcaagcugcagaucaaccgccaggugaucguggaccgcggggaccgguccggcuacagcgggaucuucuccgucgagggcaagagcugcaucaaccggugcuucuacguggagcugauccgcggccggaaggaggagaccgaggugcucuggaccagcaacuccaucgucguguucugcgggacgagcggcaccuacgggaccggcuccuggcccgacggggccgaccugaaccugaugcccaucuga

SEQ ID NO: 89395 - RNA, 1410 nt, Artificial Sequence
  derived and/or modified CDS sequence (opt1) from neuraminidase__InfluenzaA__AHZ40539
augaaccccaaccagaagaucaucaccaucggcagcgugucccugaccaucagcacgaucugcuucuucaugcagaucgccauccucaucaccaccgucacccugcacuucaagcaguacgaguucaacuccccgcccaacaaccaggugaugcugugcgagcccacgaucaucgagcgcaacaucaccgagaucguguaccucaccaacaccacgaucgagaaggagaucugccccaagccggccgaguaccggaacuggagcaagccccagugcgggaucaccggcuucgcgcccuucuccaaggacaacagcauccgccuguccgccgggggcgacaucugggucacccgggagcccuacgugagcugcgacccggacaagugcuaccaguucgcccuggggcagggcaccacgcucaacaacgugcacuccaacaacaccguccgcgaccggacccccuaccgcacccugcugaugaacgagcucggcgugcccuuccaccuggggacgaagcaggucugcaucgccuggagcuccagcuccugccacgacggcaaggccuggcugcacgugugcaucaccggggacgacaagaacgcgaccgccagcuucaucuacaacggccggcucguggacuccguggucagcugguccaaggagauccugcgcacccaggagagcgagugcgugugcaucaacgggacgugcaccguggucaugaccgacggcuccgccagcggcaaggccgacaccaagauccuguucaucgaggaggggaagaucgugaacacgagcacccucuccggcagcgcgcagcacguggaggagugcuccugcuacccccgguacccggggguccgcugcgugugccgggacaacuggaagggcagcaaccgccccaucguggacaucaacaucaaggaccacuccaucgucagcuccuacgugugcagcggccuggugggggacaccccgcggaagaacgacuccagcuccagcucccacugccuggaccccaacaacgaggagggcgggcacggcgucaaggggugggccuucgacgacggcaacgacguguggaugggccgcaccaucaacgagacgagccggcucggguacgagaccuucaaggucaucgagggcugguccaaccccaagagcaagcugcagaucaaccgccaggugaucguggaccgcggggaccgguccggcuacagcgggaucuucuccgucgagggcaagagcugcaucaaccggugcuucuacguggagcugauccgcggccggaaggaggagaccgaggugcucuggaccagcaacuccaucgucguguucugcgggacgagcggcaccuacgggaccggcuccuggcccgacggggccgaccugaaccugaugcccaucuga

SEQ ID NO: 89396 - RNA, 1410 nt, Artificial Sequence; identical to SEQ ID NO: 86170
  derived and/or modified CDS sequence (opt1) from neuraminidase__InfluenzaA__AHZ40551

SEQ ID NO: 89397 - RNA, 1410 nt, Artificial Sequence
  derived and/or modified CDS sequence (opt1) from neuraminidase__InfluenzaA__AHZ40563
augaaccccaaccagaagaucaucaccaucggcagcgugucccugaccaucagcacggucugcuucuucaugcagaucgccauccucaucaccaccgugacccugcacuucaagcaguacgaguucaacuccagcccgaacaaccaggugaugcugugcgagcccacgaucaucgagcgcaacaucaccgagaucgucuaccucaccaacaccacgaucgagaaggagaucugccccaagcccgccgaguaccggaacugguccaagccgcagugcgggaucaccggcuucgcgcccuucagcaaggacaacuccauccgccugagcgccgggggcgacaucugggugacccgggagcccuacguguccugcgaccccgacaagugcuaccaguucgcccuggggcagggcaccacgcucaacaacguccacagcaacaacaccgugcgcgaccggaccccguaccgcacccugcugaugaacgagcucggcgugcccuuccaccuggggacgaagcaggucugcaucgccugguccagcuccagcugccacgacggcaaggccuggcugcacgugugcaucaccggggacgacaagaacgcgaccgccuccuucaucuacaacggccggcucguggacagcgucguguccuggagcaaggagauccugcgcacccaggaguccgagugcgugugcaucaacgggacgugcaccgucgugaugaccgacggcagcgccagcggcaaggccgacaccaagauccuguucaucgaggaggggaagaucgugcacacguccacccucagcggcuccgcgcagcacgucgaggagugcagcugcuacccccgguaccccggggugcgcugcgugugccgggacaacuggaagggcuccaaccgcccgaucgucgacaucaacaucaaggaccacagcaucguguccagcuacgugugcuccggccuggucggggacacgccccggaagaacgacagcuccagcuccagccacugccuggaccccaacaacgaggagggcgggcacggcgugaaggggugggccuucgacgacggcaacgacgucuggaugggccgcaccaucaacgagaccucccggcucggguacgagaccuucaaggugaucgagggcuggagcaacuccaagagcaagcugcagaucaaccgccaggugaucgucgaccgcggggaccgguccggcuacagcgggaucuucagcguggagggcaaguccugcaucaaccggugcuucuacguggagcugauccgcggccggaaggaggagaccgagguccucuggaccagcaacuccaucgugguguucugcgggacgagcggcaccuacgggaccggcuccuggcccgacggggccgaccugaaccugaugccgaucuga

SEQ ID NO: 89398 - RNA, 1410 nt, Artificial Sequence
  derived and/or modified CDS sequence (opt1) from neuraminidase__InfluenzaA__AHZ40575
augaaccccaaccagaagaucaucaccaucggcagcgugucccugaccaucagcacgaucugcuucuucaugcagaucgccauccucaucaccaccgucacccugcacuucaagcaguacgaguucaacuccccgcccaacaaccaggugaugcugugcgagcccacgaucaucgagcgcaacaucaccgagaucguguaccucaccaacaccacgaucgagaaggagaucugccccaagccggccgaguaccggaacuggagcaagccccagugcgggaucaccggcuucgcgcccuucuccaaggacaacagcauccgccuguccgccgggggcgacaucugggucacccgggagcccuacgugagcugcgacccggacaagugcuaccaguucgcccuggggcagggcaccacgcucaacaacgugcacuccaacaacaccguccgcgaccggacccccuaccgcacccugcugaugaacgagcucggcgugcccuuccaccuggggacgaagcaggucugcaucgccuggagcuccagcuccugccacgacggcaaggccuggcugcacgugugcaucaccggggacgacaagaacgcgaccgccagcuucaucuacaacggccggcucguggacuccguggucagcugguccaaggagauccugcgcacccaggagagcgagugcgugugcaucaacgggacgugcaccguggucaugaccgacggcuccgccagcggcaaggccgacaccaagauccuguucaucgaggaggggaagaucgugcacacgagcacccucuccggcagcgcgcagcacguggaggagugcuccugcuacccccgguacccggggguccgcugcgugugccgggacaacuggaagggcagcaaccgccccaucguggacaucaacaucaaggaccacuccaucgucagcuccuacgugugcagcggccuggugggggacaccccgcggaagaacgacuccagcuccagcucccacugccuggaccccaacaacgaggagggcgggcacggcgucaaggggugggccuucgacgacggcaacgacguguggaugggccgcaccaucaacgagacgagccggcucggguacgagaccuucaaggucaucgagggcugguccaaccccaagagcaagcugcagaucucccgccaggugaucguggaccgcggggaccggagcggcuacuccgggaucuucagcgucgagggcaagagcugcaucaaccggugcuucuacguggagcugauccgcggccggaaggaggagaccgaggugcucuggaccuccaacagcaucgucguguucugcgggacguccggcaccuacgggaccggcagcuggcccgacggggccgaccugaaccugaugcccaucuga

SEQ ID NO: 89399 - RNA, 1410 nt, Artificial Sequence; identical to SEQ ID NO: 89117
  derived and/or modified CDS sequence (opt1) from neuraminidase__InfluenzaA__AHZ40586

SEQ ID NO: 89400 - RNA, 1410 nt, Artificial Sequence
  derived and/or modified CDS sequence (opt1) from neuraminidase__InfluenzaA__AHZ40598
augaaccccaaccagaagaucaucaccaucggcagcgugugcaugaccaucgggauggccaaccugauccuccagaucggcaacaucaucuccaucuggaucagccacuccauccaggucgggaaccagagccagaucgagacgugcaaccaguccgugaucaccuacgagaacaacaccugggugaaccagaccuacgucaacaucagcaacacgaacuucgccgcgggccagccggugguguccgucaagcuggccgggaacagcucccugugccccgugagcggcugggccaucuacuccaaggacaacagcgugcgcaucggcuccaagggggacgucuucgugauccgggagcccuucaucagcugcagcccccucgagugccgcaccuucuuccugacccagggcgcccugcucaacgacaagcacagcaacgggaccaucaaggaccgguccccguaccgcacgcugaugagcugccccaucggcgaggugcccucccccuacaacagccgguucgagagcgucgccugguccgcgagcgccugccacgacgggaucaacuggcugaccaucggcaucuccggcccggacagcggggccguggccgugcucaaguacaacggcaucaucaccgacaccaucaaguccuggcgcaacgacauccugcggacgcaggagagcgagugcgcgugcgucaacggguccugcuucaccaucaugaccgacggccccagcgacggccaggccuccuacaagaucuuccgcaucgagaaggggaagaucgugaaguccguggagaugaacgcccccaacuaccacuacgaggagugcuccugcuaccccgacagcuccgagaucacgugcgucugccgggacaacuggcacggcagcaaccgcccguggguguccuucaaccagaaccuggaguaccagaucggguacaucugcagcggcaucuucggggacaacccccggcccaacgacaagaccggcuccugcggccccgugagcuccaacggggccaacggcgucaagggguucagcuucaaguacggcaacgggguguggaucggccgcaccaagagcaucuccagccggaagggcuucgagaugaucugggacccgaacggguggaccggcaccgacaacaacuucuccaucaagcaggacaucguggggaucaacgaguggagcggcuacuccgggagcuucguccagcaccccgagcucacgggccuggacugcauccgccccugcuucuggguggagcugauccggggccgccccaaggagaacaccaucuggaccuccgggagcuccaucagcuucugcggcgucaacuccgacaccgugggguggagcuggccggacggcgccgagcuccccuucacgaucgacaaguga

SEQ ID NO: 89401 - RNA, 1410 nt, Artificial Sequence; identical to SEQ ID NO: 86170
  derived and/or modified CDS sequence (opt1) from neuraminidase__InfluenzaA__AHZ40609

SEQ ID NO: 89402 - RNA, 1410 nt, Artificial Sequence; identical to SEQ ID NO: 87399
  derived and/or modified CDS sequence (opt1) from neuraminidase__InfluenzaA__AHZ40629

SEQ ID NO: 89403 - RNA, 1410 nt, Artificial Sequence; identical to SEQ ID NO: 87381
  derived and/or modified CDS sequence (opt1) from neuraminidase__InfluenzaA__AHZ40641

SEQ ID NO: 89404 - RNA, 1410 nt, Artificial Sequence
  derived and/or modified CDS sequence (opt1) from neuraminidase__InfluenzaA__AHZ40653
augaaccccaaccagaagaucaucaccaucggcagcgugucccugaccaucagcacgaucugcuucuucaugcagaucgccauccucaucaccaccgucacccugcacuucaagcaguacgaguucaacuccccgcccaacaaccaggugaugcugugcgagcccacgaucaucgagcgcaacaucaccgagaucguguaccucaccaacaccacgaucgagaaggagaucugccccaagccggccggguaccggaacuggagcaagccccagugcggcaucaccggguucgcgcccuucuccaaggacaacagcauccgccuguccgccggcggggacaucugggucacccgggagcccuacgugagcugcgacccggacaagugcuaccaguucgcccugggccagggcaccacgcucaacaacgugcacuccaacaacaccguccgcgaccggacccccuaccgcacccugcugaugaacgagcucggggugcccuuccaccugggcacgaagcaggucugcaucgccuggagcuccagcuccugccacgacgggaaggccuggcugcacgugugcaucaccggcgacgacaagaacgcgaccgccagcuucaucuacaacgggcggcucguggacuccguggucagcugguccaaggagauccugcgcacccaggagagcgagugcgugugcaucaacggcacgugcaccguggucaugaccgacggcuccgccagcgggaaggccgacaccaagauccuguucaucgaggagggcaagaucgugcacacgagcacccucuccgggagcgcgcagcacguggaggagugcuccugcuacccccgguacccgggcguccgcugcgugugccgggacaacuggaagggcagcaaccgccccaucguggacaucaacaucaaggaccacuccaucgucagcuccuacgugugcagcgggcuggugggcgacaccccgcggaagaacgacuccagcuccagcucccacugccuggaccccaacaacgaggagggcgggcacggggucaagggcugggccuucgacgacggcaacgacguguggauggggcgcaccaucaacgagacgagccggcucggcuacgagaccuucaaggucaucgaggggugguccaaccccaagagcaagcugcagaucaaccgccaggugaucguggaccggggcgaccgcuccggguacagcggcaucuucuccgucgagggcaagagcugcaucaaccggugcuucuacguggagcugauccgcgggcggaaggaggagaccgaggugcucuggaccagcaacuccaucgucguguucugcggcacgagcgggaccuacggcaccggguccuggcccgacggcgccgaccugaaccugaugcccaucuga

SEQ ID NO: 89405 - RNA, 1410 nt, Artificial Sequence; identical to SEQ ID NO: 87399
  derived and/or modified CDS sequence (opt1) from neuraminidase__InfluenzaA__AHZ40665

SEQ ID NO: 89406 - RNA, 1410 nt, Artificial Sequence; identical to SEQ ID NO: 87399
  derived and/or modified CDS sequence (opt1) from neuraminidase__InfluenzaA__AHZ40677

SEQ ID NO: 89407 - RNA, 1410 nt, Artificial Sequence; identical to SEQ ID NO: 86170
  derived and/or modified CDS sequence (opt1) from neuraminidase__InfluenzaA__AHZ40689

SEQ ID NO: 89408 - RNA, 1410 nt, Artificial Sequence
  derived and/or modified CDS sequence (opt1) from neuraminidase__InfluenzaA__AHZ40713
augaaccccaaccagaagaucaucaccaucggcagcgugucccugaccaucagcacgaucugcuucuucaugcagaucgccauccucaucaccaccgucacccugcacuucaagcaguacgaguucaacuccccgcccaacaaccaggugaugcugugcgagcccacgaucaucgagcgcaacaucaccgagaucguguaccucaccaacaccacgaucgagaaggagaucugccccaagccggccgaguaccggaacuggagcaagccccagugcgggaucaccggcuucgcgcccuucuccaaggacaacagcauccgccuguccgccgggggcgacaucugggucacccgggagcccuacgugagcugcgacccggacaagugcuaccaguucgcccuggggcagggcaccacgcucaacaacgugcacuccaacaacaccguccgcgaccggacccccuaccgcacccugcugaugaacgagcucggcgugcccuuccaccuggggacgaagcaggucugcaucgccuggagcuccagcuccugccacgacggcaaggccuggcugcacgugugcaucaccggggacgacaagaacgcgaccgccagcuucaucuacaacggccggcucguggacuccguggucagcugguccaaggagauccugcgcacccaggagagcgagugcgugugcaucaacgggacgugcaccguggucaugaccgacggcuccgccagcggcaaggccgacaccaagauccuguucaucgaggaggggaagaucgugcacacgagcacccucuccggcagcgcgcagcacguggaggagugcuccugcuacccccgguacccggggguccgcugcgugugccgggacaacuggaagggcagcaaccgccccaucguggacaucaacaucaaggaccacuccaucgucagcuccuacgugugcagcggccuggugggggacaccccgcggaagaacgacuccagcuccagcucccacugccuggaccccaacaacgaggagggcgggcacggcgucaaggggugggccuucgacgacggcaacgacguguggaugggccgcaccaucaacgagacgagccggcucggguacgagaccuucaaggucaucgagggcugguccaaccccaagagcaagcugcagaucaaccgccaggugaucguggaccgcggggacaaguccggcuacagcgggaucuucuccgucgagggcaagagcugcaucaaccggugcuucuacguggagcugauccggggccgcaaggaggagaccgaggugcucuggaccagcaacuccaucgucguguucugcgggacgagcggcaccuacgggaccggcuccuggcccgacggggccgaccugaaccugaugcccaucuga

SEQ ID NO: 89409 - RNA, 1410 nt, Artificial Sequence
  derived and/or modified CDS sequence (opt1) from neuraminidase__InfluenzaA__AHZ40725
augaaccccaaccagaagaucaucaccaucggcagcgugucccugaccaucagcacgaucugcuucuucaugcagaucgccauccucaucaccaccgucacccugcacuucaagcaguacgaguucaacuccccgcccaacaaccaggugaugcugugcgagcccacgaucaucgagcgcaacaucaccgagaucguguaccucaccaacaccacgaucgagaaggagaucugccccaagccggccgaguaccggaacuggagcaagccccagugcgggaucaccggcuucgcgcccuucuccaaggacaacagcauccgccuguccgccgggggcgacaucugggucacccgggagcccuacgugagcugcgacccggacaagugcuaccaguucgcccuggggcagggcaccacgcucaacaacgugcacuccaacaacaccguccgcgaccggacccccuaccgcacccugcugaugaacgagcucggcgugcccuuccaccuggggacgaagcaggucugcaucgccuggagcuccagcuccugccacgacggcaaggccuggcugcacgugugcaucaccggggacgacaagaacgcgaccgccagcuucaucuacaacggccggcucguggacuccguggucagcugguccaaggagauccugcgcacccaggagagcgagugcgugugcaucaacgggacgugcaccguggucaugaccgacggcuccgccagcggcaaggccgacaccaagauccuguucaucgaggaggggaagaucgugcacacgagcacccucuccggcagcgcgcagcacguggaggagugcuccugcuacccccgguacccggggguccgcugcgugugccgggacaacuggaagggcagcaaccgccccaucguggacaucaacaucaaggaccacuccaucgucagcggcuacgugugcuccgggcuggugggcgacacgccccggaagaacgacagcuccagcuccagccacugccuggaccccaacaacgaggagggcgggcacggggucaagggcugggccuucgacgacggcaacgacguguggauggggcgcaccaucaacgagaccucccggcucggcuacgagaccuucaaggucaucgagggguggagcaacccgaaguccaagcugcagaucaaccgccaggugaucguggaccggggcgaccgcagcggguacuccggcaucuucagcgucgagggcaaguccugcaucaaccggugcuucuacguggagcugauccgcgggcggaaggaggagaccgaggugcucuggaccagcaacagcaucgucguguucugcggcacguccgggaccuacggcaccgggagcuggcccgacggcgccgaccugaaccugaugcccaucuga

SEQ ID NO: 89410 - RNA, 1410 nt, Artificial Sequence; identical to SEQ ID NO: 87388
  derived and/or modified CDS sequence (opt1) from neuraminidase__InfluenzaA__AHZ40737

SEQ ID NO: 89411 - RNA, 1410 nt, Artificial Sequence
  derived and/or modified CDS sequence (opt1) from neuraminidase__InfluenzaA__AHZ40749
augaaccccaaccagaagaucaucaccaucggcagcgugucccugaccaucagcacgaucugccucuucaugcagaucgccauccugaucaccaccgucacccugcacuucaagcaguacgaguucaacuccccgcccaacaaccaggugaugcucugcgagcccacgaucaucgagcgcaacaucaccgagaucguguaccugaccaacaccacgaucgagaaggagaucugccccaagccggccgaguaccggaacuggagcaagccccagugcgggaucaccggcuucgcgcccuucuccaaggacaacagcauccgccuguccgccgggggcgacaucugggucacccgggagcccuacgugagcugcgacccggacaagugcuaccaguucgcccucgggcagggcaccacgcugaacaacgugcacuccaacaacaccguccgcgaccggacccccuaccgcacccugcucaugaacgagcugggcgugcccuuccaccuggggacgaagcaggucugcaucgccuggagcuccagcuccugccacgacggcaaggccuggcuccacgugugcaucaccggggacgacaagaacgcgaccgccagcuucaucuacaacggccggcugguggacuccguggucagcugguccaaggagauccugcgcacccaggagagcgagugcgugugcaucaacgggacgugcaccguggucaugaccgacggcuccgccagcggcaaggccgacaccaagauccucuucaucgaggaggggaagaucgugcacacgagcacccuguccggcagcgcgcagcacguggaggagugcuccugcuacccccgguacccggggguccgcugcgugugccgggacaacuggaagggcagcaaccgccccaucguggacaucaacaucaaggaccacuccaucgucagcuccuacgugugcagcggccuggugggggacaccccgcggaagaacgacuccagcuccagcucccacugccucgaccccaacaacgaggagggcgggcacggcgucaaggggugggccuucgacgacggcaacgacguguggaugggccgcaccaucaacgagacgagccggcugggguacgagaccuucaaggucaucgagggcugguccaaccccaagagcaagcugcagaucaaccgccaggugaucguggaccgcggggaccgguccggcuacagcgggaucuucuccgucgagggcaagagcugcaucaaccggugcuucuacguggagcucauccgcggccggaaggaggagaccgaggugcuguggaccagcaacuccaucgucguguucugcgggacgagcggcaccuacgggaccggccccuggcccgacggggccgaccugaaccucaugcccaucuga

SEQ ID NO: 89412 - RNA, 1410 nt, Artificial Sequence
  derived and/or modified CDS sequence (opt1) from neuraminidase__InfluenzaA__AHZ40761
augaaccccaaccagaagaucaucaccaucggcagcgugucccugaccaucagcacgaucugcuucuucaugcagaucgccauccucaucaccaccgucacccugcacuucaagcaguacgaguucaacuccccgcccaacaaccaggugaugcugugcgagcccacgaucaucgagcgcaacaucaccgagaucguguaccucaccaacaccacgaucgagaaggagcugugccccaagcuggccgaguaccggaacuggagcaagccgcagugcgacaucaccggguucgcgcccuucuccaaggacaacagcauccgccucuccgccggcggggacaucugggucacccgggagcccuacgugagcugcgaccccgacaagugcuaccaguucgcccugggccaggggaccacgcugaacaacgugcacuccaacaacaccguccgcgaccggaccccguaccgcacccuccugaugaacgagcugggcgugcccuuccaccucggcacgaagcaggucugcauggccuggagcuccagcuccugccacgacgggaaggccuggcugcacgugugcaucaccggcgacgacaagaacgcgaccgccagcuucaucuacaacgggaagcugguggacuccguggucagcugguccaaggagauccuccggacccaggagagcgagugcgugugcaucaacggcacgugcaccguggucaugaccgacggguccgccagcggcaaggccgacaccaagauccuguucaucgaggagggcaagaucgugcacacgagcacccuguccgggagcgcgcagcacguggaggagugcuccugcuacccccgcuaccccggcguccggugcgugugccgcgacaacuggaaggggagcaaccggccgaucguggacaucaacaucaaggaccacuccaucgucagcuccuacgugugcagcggccucgugggcgacacgccccgcaagaccgacuccagcuccagcucccacugccuggaccccaacaacgaggagggcgggcacggggucaagggcugggccuucgacgacgggaacgacguguggaugggccggaccaucaacgagaccagccgccugggcuacgagaccuucaaggucaucgaggggugguccaaccccaagagcaagcuccagaucaaccgccaggugaucguggaccggggcgaccgguccggguacagcggcaucuucuccgucgagggcaagagcugcaucaaccgcugcuucuacguggagcugauccgggggcgcaagaaggagaccgccgugcuguggacgagcaacuccaucgucguguucugcggcaccagcgggaccuacggcaccggguccuggccggacggcgccgaccucaaccugaugcccaucuga

SEQ ID NO: 89413 - RNA, 1410 nt, Artificial Sequence; identical to SEQ ID NO: 86170
  derived and/or modified CDS sequence (opt1) from neuraminidase__InfluenzaA__AHZ40773

SEQ ID NO: 89414 - RNA, 1410 nt, Artificial Sequence; identical to SEQ ID NO: 80752
  derived and/or modified CDS sequence (opt1) from neuraminidase__InfluenzaA__AHZ40785

SEQ ID NO: 89415 - RNA, 1410 nt, Artificial Sequence; identical to SEQ ID NO: 80752
  derived and/or modified CDS sequence (opt1) from neuraminidase__InfluenzaA__AHZ40796

SEQ ID NO: 89416 - RNA, 1410 nt, Artificial Sequence; identical to SEQ ID NO: 80752
  derived and/or modified CDS sequence (opt1) from neuraminidase__InfluenzaA__AHZ40807

SEQ ID NO: 89417 - RNA, 1410 nt, Artificial Sequence; identical to SEQ ID NO: 80752
  derived and/or modified CDS sequence (opt1) from neuraminidase__InfluenzaA__AHZ40818

SEQ ID NO: 89418 - RNA, 1410 nt, Artificial Sequence; identical to SEQ ID NO: 80752
  derived and/or modified CDS sequence (opt1) from neuraminidase__InfluenzaA__AHZ40829

SEQ ID NO: 89419 - RNA, 1410 nt, Artificial Sequence; identical to SEQ ID NO: 80752
  derived and/or modified CDS sequence (opt1) from neuraminidase__InfluenzaA__AHZ40840

SEQ ID NO: 89420 - RNA, 1410 nt, Artificial Sequence; identical to SEQ ID NO: 80752
  derived and/or modified CDS sequence (opt1) from neuraminidase__InfluenzaA__AHZ40851

SEQ ID NO: 89421 - RNA, 1410 nt, Artificial Sequence; identical to SEQ ID NO: 80752
  derived and/or modified CDS sequence (opt1) from neuraminidase__InfluenzaA__AHZ40862

SEQ ID NO: 89422 - RNA, 1410 nt, Artificial Sequence; identical to SEQ ID NO: 80752
  derived and/or modified CDS sequence (opt1) from neuraminidase__InfluenzaA__AHZ40873

SEQ ID NO: 89423 - RNA, 1410 nt, Artificial Sequence; identical to SEQ ID NO: 80752
  derived and/or modified CDS sequence (opt1) from neuraminidase__InfluenzaA__AHZ40884

SEQ ID NO: 89424 - RNA, 1410 nt, Artificial Sequence; identical to SEQ ID NO: 80752
  derived and/or modified CDS sequence (opt1) from neuraminidase__InfluenzaA__AHZ40895

SEQ ID NO: 89425 - RNA, 1410 nt, Artificial Sequence; identical to SEQ ID NO: 80752
  derived and/or modified CDS sequence (opt1) from neuraminidase__InfluenzaA__AHZ40906

SEQ ID NO: 89426 - RNA, 1410 nt, Artificial Sequence; identical to SEQ ID NO: 80752
  derived and/or modified CDS sequence (opt1) from neuraminidase__InfluenzaA__AHZ40917

SEQ ID NO: 89427 - RNA, 1410 nt, Artificial Sequence; identical to SEQ ID NO: 80752
  derived and/or modified CDS sequence (opt1) from neuraminidase__InfluenzaA__AHZ40928

SEQ ID NO: 89428 - RNA, 1410 nt, Artificial Sequence; identical to SEQ ID NO: 80752
  derived and/or modified CDS sequence (opt1) from neuraminidase__InfluenzaA__AHZ40939

SEQ ID NO: 89429 - RNA, 1410 nt, Artificial Sequence; identical to SEQ ID NO: 80752
  derived and/or modified CDS sequence (opt1) from neuraminidase__InfluenzaA__AHZ40950

SEQ ID NO: 89430 - RNA, 1410 nt, Artificial Sequence; identical to SEQ ID NO: 80752
  derived and/or modified CDS sequence (opt1) from neuraminidase__InfluenzaA__AHZ40961

SEQ ID NO: 89431 - RNA, 1410 nt, Artificial Sequence; identical to SEQ ID NO: 80752
  derived and/or modified CDS sequence (opt1) from neuraminidase__InfluenzaA__AHZ40972

SEQ ID NO: 89432 - RNA, 1410 nt, Artificial Sequence; identical to SEQ ID NO: 80752
  derived and/or modified CDS sequence (opt1) from neuraminidase__InfluenzaA__AHZ40983

SEQ ID NO: 89433 - RNA, 1410 nt, Artificial Sequence; identical to SEQ ID NO: 80752
  derived and/or modified CDS sequence (opt1) from neuraminidase__InfluenzaA__AHZ40994

SEQ ID NO: 89434 - RNA, 1410 nt, Artificial Sequence; identical to SEQ ID NO: 80752
  derived and/or modified CDS sequence (opt1) from neuraminidase__InfluenzaA__AHZ41005

SEQ ID NO: 89435 - RNA, 1410 nt, Artificial Sequence; identical to SEQ ID NO: 80752
  derived and/or modified CDS sequence (opt1) from neuraminidase__InfluenzaA__AHZ41016

SEQ ID NO: 89436 - RNA, 1410 nt, Artificial Sequence; identical to SEQ ID NO: 80752
  derived and/or modified CDS sequence (opt1) from neuraminidase__InfluenzaA__AHZ41027

SEQ ID NO: 89437 - RNA, 1410 nt, Artificial Sequence; identical to SEQ ID NO: 80752
  derived and/or modified CDS sequence (opt1) from neuraminidase__InfluenzaA__AHZ41049

SEQ ID NO: 89438 - RNA, 1410 nt, Artificial Sequence; identical to SEQ ID NO: 80752
  derived and/or modified CDS sequence (opt1) from neuraminidase__InfluenzaA__AHZ41060

SEQ ID NO: 89439 - RNA, 1410 nt, Artificial Sequence; identical to SEQ ID NO: 80752
  derived and/or modified CDS sequence (opt1) from neuraminidase__InfluenzaA__AHZ41071

SEQ ID NO: 89440 - RNA, 1410 nt, Artificial Sequence; identical to SEQ ID NO: 80752
  derived and/or modified CDS sequence (opt1) from neuraminidase__InfluenzaA__AHZ41082

SEQ ID NO: 89441 - RNA, 1410 nt, Artificial Sequence; identical to SEQ ID NO: 80752
  derived and/or modified CDS sequence (opt1) from neuraminidase__InfluenzaA__AHZ41093

SEQ ID NO: 89442 - RNA, 1410 nt, Artificial Sequence; identical to SEQ ID NO: 80752
  derived and/or modified CDS sequence (opt1) from neuraminidase__InfluenzaA__AHZ41104

SEQ ID NO: 89443 - RNA, 1410 nt, Artificial Sequence; identical to SEQ ID NO: 80752
  derived and/or modified CDS sequence (opt1) from neuraminidase__InfluenzaA__AHZ41115

SEQ ID NO: 89444 - RNA, 1410 nt, Artificial Sequence; identical to SEQ ID NO: 80752
  derived and/or modified CDS sequence (opt1) from neuraminidase__InfluenzaA__AHZ41126

SEQ ID NO: 89445 - RNA, 1410 nt, Artificial Sequence; identical to SEQ ID NO: 80752
  derived and/or modified CDS sequence (opt1) from neuraminidase__InfluenzaA__AHZ41137

SEQ ID NO: 89446 - RNA, 1410 nt, Artificial Sequence; identical to SEQ ID NO: 80752
  derived and/or modified CDS sequence (opt1) from neuraminidase__InfluenzaA__AHZ41148

SEQ ID NO: 89447 - RNA, 1410 nt, Artificial Sequence; identical to SEQ ID NO: 80752
  derived and/or modified CDS sequence (opt1) from neuraminidase__InfluenzaA__AHZ41159

SEQ ID NO: 89448 - RNA, 1410 nt, Artificial Sequence; identical to SEQ ID NO: 80752
  derived and/or modified CDS sequence (opt1) from neuraminidase__InfluenzaA__AHZ41170

SEQ ID NO: 89449 - RNA, 1410 nt, Artificial Sequence; identical to SEQ ID NO: 80752
  derived and/or modified CDS sequence (opt1) from neuraminidase__InfluenzaA__AHZ41181

SEQ ID NO: 89450 - RNA, 1410 nt, Artificial Sequence; identical to SEQ ID NO: 80752
  derived and/or modified CDS sequence (opt1) from neuraminidase__InfluenzaA__AHZ41205

SEQ ID NO: 89451 - RNA, 1410 nt, Artificial Sequence; identical to SEQ ID NO: 80752
  derived and/or modified CDS sequence (opt1) from neuraminidase__InfluenzaA__AHZ41251

SEQ ID NO: 89452 - RNA, 1410 nt, Artificial Sequence; identical to SEQ ID NO: 80752
  derived and/or modified CDS sequence (opt1) from neuraminidase__InfluenzaA__AHZ41266

SEQ ID NO: 89453 - RNA, 1410 nt, Artificial Sequence; identical to SEQ ID NO: 80752
  derived and/or modified CDS sequence (opt1) from neuraminidase__InfluenzaA__AHZ41284

SEQ ID NO: 89454 - RNA, 1410 nt, Artificial Sequence; identical to SEQ ID NO: 80752
  derived and/or modified CDS sequence (opt1) from neuraminidase__InfluenzaA__AHZ41295

SEQ ID NO: 89455 - RNA, 1410 nt, Artificial Sequence; identical to SEQ ID NO: 80752
  derived and/or modified CDS sequence (opt1) from neuraminidase__InfluenzaA__AHZ41306

SEQ ID NO: 89456 - RNA, 1410 nt, Artificial Sequence; identical to SEQ ID NO: 80752
  derived and/or modified CDS sequence (opt1) from neuraminidase__InfluenzaA__AHZ41317

SEQ ID NO: 89457 - RNA, 1410 nt, Artificial Sequence; identical to SEQ ID NO: 80752
  derived and/or modified CDS sequence (opt1) from neuraminidase__InfluenzaA__AHZ41328

SEQ ID NO: 89458 - RNA, 1410 nt, Artificial Sequence; identical to SEQ ID NO: 80752
  derived and/or modified CDS sequence (opt1) from neuraminidase__InfluenzaA__AHZ41339

SEQ ID NO: 89459 - RNA, 1410 nt, Artificial Sequence; identical to SEQ ID NO: 80752
  derived and/or modified CDS sequence (opt1) from neuraminidase__InfluenzaA__AHZ41350

SEQ ID NO: 89460 - RNA, 1410 nt, Artificial Sequence; identical to SEQ ID NO: 80752
  derived and/or modified CDS sequence (opt1) from neuraminidase__InfluenzaA__AHZ41369

SEQ ID NO: 89461 - RNA, 1410 nt, Artificial Sequence; identical to SEQ ID NO: 80752
  derived and/or modified CDS sequence (opt1) from neuraminidase__InfluenzaA__AHZ41380

SEQ ID NO: 89462 - RNA, 1410 nt, Artificial Sequence; identical to SEQ ID NO: 80752
  derived and/or modified CDS sequence (opt1) from neuraminidase__InfluenzaA__AHZ41391

SEQ ID NO: 89463 - RNA, 1410 nt, Artificial Sequence; identical to SEQ ID NO: 80752
  derived and/or modified CDS sequence (opt1) from neuraminidase__InfluenzaA__AHZ41402

SEQ ID NO: 89464 - RNA, 1410 nt, Artificial Sequence; identical to SEQ ID NO: 80752
  derived and/or modified CDS sequence (opt1) from neuraminidase__InfluenzaA__AHZ41413

SEQ ID NO: 89465 - RNA, 1410 nt, Artificial Sequence; identical to SEQ ID NO: 80752
  derived and/or modified CDS sequence (opt1) from neuraminidase__InfluenzaA__AHZ41444

SEQ ID NO: 89466 - RNA, 1410 nt, Artificial Sequence; identical to SEQ ID NO: 80752
  derived and/or modified CDS sequence (opt1) from neuraminidase__InfluenzaA__AHZ41455

SEQ ID NO: 89467 - RNA, 1410 nt, Artificial Sequence; identical to SEQ ID NO: 80752
  derived and/or modified CDS sequence (opt1) from neuraminidase__InfluenzaA__AHZ41476

SEQ ID NO: 89468 - RNA, 1410 nt, Artificial Sequence; identical to SEQ ID NO: 80752
  derived and/or modified CDS sequence (opt1) from neuraminidase__InfluenzaA__AHZ41487

SEQ ID NO: 89469 - RNA, 1410 nt, Artificial Sequence; identical to SEQ ID NO: 80752
  derived and/or modified CDS sequence (opt1) from neuraminidase__InfluenzaA__AHZ41498

SEQ ID NO: 89470 - RNA, 1410 nt, Artificial Sequence; identical to SEQ ID NO: 80752
  derived and/or modified CDS sequence (opt1) from neuraminidase__InfluenzaA__AHZ41509

SEQ ID NO: 89471 - RNA, 1410 nt, Artificial Sequence; identical to SEQ ID NO: 80752
  derived and/or modified CDS sequence (opt1) from neuraminidase__InfluenzaA__AHZ41520

SEQ ID NO: 89472 - RNA, 1410 nt, Artificial Sequence; identical to SEQ ID NO: 80752
  derived and/or modified CDS sequence (opt1) from neuraminidase__InfluenzaA__AHZ41531

SEQ ID NO: 89473 - RNA, 1410 nt, Artificial Sequence; identical to SEQ ID NO: 80752
  derived and/or modified CDS sequence (opt1) from neuraminidase__InfluenzaA__AHZ41542

SEQ ID NO: 89474 - RNA, 1410 nt, Artificial Sequence; identical to SEQ ID NO: 80752
  derived and/or modified CDS sequence (opt1) from neuraminidase__InfluenzaA__AHZ41553

SEQ ID NO: 89475 - RNA, 1410 nt, Artificial Sequence; identical to SEQ ID NO: 80752
  derived and/or modified CDS sequence (opt1) from neuraminidase__InfluenzaA__AHZ41564

SEQ ID NO: 89476 - RNA, 1410 nt, Artificial Sequence; identical to SEQ ID NO: 80752
  derived and/or modified CDS sequence (opt1) from neuraminidase__InfluenzaA__AHZ41586

SEQ ID NO: 89477 - RNA, 1410 nt, Artificial Sequence; identical to SEQ ID NO: 80752
  derived and/or modified CDS sequence (opt1) from neuraminidase__InfluenzaA__AHZ41597

SEQ ID NO: 89478 - RNA, 1410 nt, Artificial Sequence; identical to SEQ ID NO: 80752
  derived and/or modified CDS sequence (opt1) from neuraminidase__InfluenzaA__AHZ41608

SEQ ID NO: 89479 - RNA, 1410 nt, Artificial Sequence; identical to SEQ ID NO: 80752
  derived and/or modified CDS sequence (opt1) from neuraminidase__InfluenzaA__AHZ41619

SEQ ID NO: 89480 - RNA, 1410 nt, Artificial Sequence; identical to SEQ ID NO: 80752
  derived and/or modified CDS sequence (opt1) from neuraminidase__InfluenzaA__AHZ41630

SEQ ID NO: 89481 - RNA, 1410 nt, Artificial Sequence; identical to SEQ ID NO: 80752
  derived and/or modified CDS sequence (opt1) from neuraminidase__InfluenzaA__AHZ41641

SEQ ID NO: 89482 - RNA, 1410 nt, Artificial Sequence; identical to SEQ ID NO: 80752
  derived and/or modified CDS sequence (opt1) from neuraminidase__InfluenzaA__AHZ41652

SEQ ID NO: 89483 - RNA, 1410 nt, Artificial Sequence; identical to SEQ ID NO: 80752
  derived and/or modified CDS sequence (opt1) from neuraminidase__InfluenzaA__AHZ41663

SEQ ID NO: 89484 - RNA, 1410 nt, Artificial Sequence; identical to SEQ ID NO: 80752
  derived and/or modified CDS sequence (opt1) from neuraminidase__InfluenzaA__AHZ41674

SEQ ID NO: 89485 - RNA, 1410 nt, Artificial Sequence; identical to SEQ ID NO: 80752
  derived and/or modified CDS sequence (opt1) from neuraminidase__InfluenzaA__AHZ41685

SEQ ID NO: 89486 - RNA, 1410 nt, Artificial Sequence; identical to SEQ ID NO: 80752
  derived and/or modified CDS sequence (opt1) from neuraminidase__InfluenzaA__AHZ41696

SEQ ID NO: 89487 - RNA, 1410 nt, Artificial Sequence; identical to SEQ ID NO: 80752
  derived and/or modified CDS sequence (opt1) from neuraminidase__InfluenzaA__AHZ41707

SEQ ID NO: 89488 - RNA, 1410 nt, Artificial Sequence; identical to SEQ ID NO: 80752
  derived and/or modified CDS sequence (opt1) from neuraminidase__InfluenzaA__AHZ41718

SEQ ID NO: 89489 - RNA, 1410 nt, Artificial Sequence; identical to SEQ ID NO: 80752
  derived and/or modified CDS sequence (opt1) from neuraminidase__InfluenzaA__AHZ41729

SEQ ID NO: 89490 - RNA, 1410 nt, Artificial Sequence; identical to SEQ ID NO: 80752
  derived and/or modified CDS sequence (opt1) from neuraminidase__InfluenzaA__AHZ41740

SEQ ID NO: 89491 - RNA, 1410 nt, Artificial Sequence; identical to SEQ ID NO: 80752
  derived and/or modified CDS sequence (opt1) from neuraminidase__InfluenzaA__AHZ41751

SEQ ID NO: 89492 - RNA, 1410 nt, Artificial Sequence; identical to SEQ ID NO: 80752
  derived and/or modified CDS sequence (opt1) from neuraminidase__InfluenzaA__AHZ41762

SEQ ID NO: 89493 - RNA, 1410 nt, Artificial Sequence; identical to SEQ ID NO: 87413
  derived and/or modified CDS sequence (opt1) from neuraminidase__InfluenzaA__AHZ42564

SEQ ID NO: 89494 - RNA, 1410 nt, Artificial Sequence; identical to SEQ ID NO: 86170
  derived and/or modified CDS sequence (opt1) from neuraminidase__InfluenzaA__AHZ42575

SEQ ID NO: 89495 - RNA, 1410 nt, Artificial Sequence
  derived and/or modified CDS sequence (opt1) from neuraminidase__InfluenzaA__AHZ42587
augaaccccaaccagaagaucaucaccaucggcagcgugucccugaccaucagcacgaucugcuucuucaugcagaucgccauccucaucaccaccgucacccugcacuucaagcaguacgaguucaacuccccgcccaacaaccaggugaugcugugcgagcccacgaucaucgagcgcaacaucaccgagaucguguaccucaccaacaccacgaucgagaaggagaugugccccaagccggccgaguaccggaacuggagcaagccccagugcgggaucaccggcuucgcgcccuucuccaaggacaacagcauccgccuguccgccgggggcgacaucugggucacccgggagcccuacgugagcugcgacccggacaagugcuaccaguucgcccuggggcagggcaccacgcucaacaacgugcacuccaacaacaccguccgcgaccggacccccuaccgcacccugcugaugaacgagcucggcgugcccuuccaccuggggacgaagcaggucugcaucgccuggagcuccagcuccugccacgacggcaaggccuggcugcacgugugcaucaccggggacgacaagaacgcgaccgccagcuucaucuacaacggccggcucguggacuccguggucagcugguccaaggagauccugcgcacccaggagagcgagugcgugugcaucaacgggacgugcaccguggucaugaccgacggcuccgccagcggcaaggccgacaccaagauccuguucaucgaggaggggaagaucgugcacacgagcacccucuccggcagcgcgcagcacguggaggagugcuccugcuacccccgguacccggggguccgcugcgugugccgggacaacuggaagggcagcaaccgccccaucguggacaucaacaucaaggaccacuccaucgucagcuccuacgugugcagcggccuggugggggacaccccgcggaagaacgacuccagcuccagcucccacugccuggaccccaacaacgaggagggcgggcacggcgucaaggggugggccuucgacgacggcaacgacguguggaugggccgcaccaucaacgagacgagccggcucggguacgagaccuucaaggucaucgagggcugguccaaccccaagagcaagcugcagaucaaccgccaggugaucguggaccgcggggaccgguccggcuacagcgggaucuucuccgucgagggcaagagcugcaucaaccggugcuucuacguggagcugauccgcggccggaaggaggagaccgaggugcucuggaccagcaacuccaucgucguguucugcgggacgagcggcaccuacgggaccggcuccuggcccgacggggccgaccugaaccugaugcccaucuga

SEQ ID NO: 89496 - RNA, 1413 nt, Artificial Sequence
  derived and/or modified CDS sequence (opt1) from neuraminidase__InfluenzaA__AHZ42599
augaaccccaaccagaagaucaucaccaucggcagcgugucccugaccaucagcacgaucugcuucuucaugcagaucgccauccucaucaccaccgucacccugcacuucaagcaguacgaguucaacuccccgcccaagaacaaccaggugaugcugugcgagcccacgaucaucgagcgcaacaucaccgagaucguguaccucaccaacaccacgaucgagaaggagaucugccccaagccggccgaguaccggaacuggagcaagccccagugcgggaucaccggcuucgcgcccuucuccaaggacaacagcauccgccuguccgccgggggcgacaucugggucacccgggagcccuacgugagcugcgacccggacaagugcuaccaguucgcccuggggcagggcaccacgcucaacaacgugcacuccaacaacaccguccgcgaccggacccccuaccgcacccugcugaugaacgagcucggcgugcccuuccaccuggggacgaagcaggucugcaucgccuggagcuccagcuccugccacgacggcaaggccuggcugcacgugugcaucaccggggacgacaagaacgcgaccgccagcuucaucuacaacggccggcucguggacuccguggucagcugguccaaggagauccugcgcacccaggagagcgagugcgugugcaucaacgggacgugcaccguggucaugaccgacggcuccgccagcgagaaggccgacaccaagauccuguucaucgaggagggcaagaucgugcacacgagcacccucuccgggagcgcgcagcacguggaggagugcuccugcuacccccgguacccgggcguccgcugcgugugccgggacaacuggaaggggagcaaccgccccaucguggacaucaacaucaaggaccacuccaucgucagcuccuacgugugcagcggccuggugggcgacaccccgcggaagaacgacuccagcuccagcucccacugccuggaccccaacaacgaggagggcgggcacggggucaagggcugggccuucgacgacgggaacgacguguggaugggccgcaccaucaacgagacgagccggcucggcuacgagaccuucaaggucaucgaggggugguccaaccccaagagcaagcugcagaucaaccgccaggugaucguggaccggggcgaccgcuccggguacagcggcaucuucuccgucgagggcaagagcugcaucaaccggugcuucuacguggagcugauccgcgggcggaaggaggagaccgaggugcucuggaccagcaacuccaucgucguguucugcggcacgagcgggaccuacggcaccggguccuggcccgacggcgccgaccugaaccugaugcccaucuga

SEQ ID NO: 89497 - RNA, 1410 nt, Artificial Sequence; identical to SEQ ID NO: 88816
  derived and/or modified CDS sequence (opt1) from neuraminidase__InfluenzaA__AHZ42611

SEQ ID NO: 89498 - RNA, 1410 nt, Artificial Sequence; identical to SEQ ID NO: 86170
  derived and/or modified CDS sequence (opt1) from neuraminidase__InfluenzaA__AHZ42622

SEQ ID NO: 89499 - RNA, 1410 nt, Artificial Sequence; identical to SEQ ID NO: 89357
  derived and/or modified CDS sequence (opt1) from neuraminidase__InfluenzaA__AHZ42634

SEQ ID NO: 89500 - RNA, 1410 nt, Artificial Sequence; identical to SEQ ID NO: 89400
  derived and/or modified CDS sequence (opt1) from neuraminidase__InfluenzaA__AHZ42646

SEQ ID NO: 89501 - RNA, 1410 nt, Artificial Sequence; identical to SEQ ID NO: 86170
  derived and/or modified CDS sequence (opt1) from neuraminidase__InfluenzaA__AHZ42657

SEQ ID NO: 89502 - RNA, 1410 nt, Artificial Sequence; identical to SEQ ID NO: 89117
  derived and/or modified CDS sequence (opt1) from neuraminidase__InfluenzaA__AHZ42669

SEQ ID NO: 89503 - RNA, 1410 nt, Artificial Sequence; identical to SEQ ID NO: 86170
  derived and/or modified CDS sequence (opt1) from neuraminidase__InfluenzaA__AHZ42681

SEQ ID NO: 89504 - RNA, 1410 nt, Artificial Sequence
  derived and/or modified CDS sequence (opt1) from neuraminidase__InfluenzaA__AHZ42693
augaaccccaaccagaagaucaucaccaucggcagcgugugcaugaccaucgggauggccaaccugauccuccagaucggcaacaucaucuccaucuggaucagccacuccauccagcuggggaaccagagccagaucgagacgugcaaccaguccgucaucaccuacgagaacaacaccugggugaaccagaccuacgugaacaucagcaacacgaacuucgccgcgggccaguccgucgugagcgugaagcuggccgggaacuccagccucugcccggucuccggcugggccaucuacagcaaggacaacuccgugcgcaucggcagcaagggggacguguucgucauccgggagcccuucaucuccugcagcccccuggagugccgcaccuucuuccugacccagggcgcccuccugaacgacaagcacuccaacgggaccaucaaggaccggagccccuaccgcacgcugauguccugcccgaucggcgaggugcccagccccuacaacagccgguucgaguccguggccuggagcgcguccgccugccacgacgggaucaacuggcucaccaucggcaucagcggccccgacuccggggccgucgccgugcugaaguacaacggcaucaucaccgacaccaucaagagcuggcgcaacaacauccugcggacgcaggaguccgagugcgcgugcgugaacgggagcugcuucaccaucaugaccgacggcccguccgacggccaggccagcuacaagaucuuccgcaucgagaaggggaagaucgucaaguccguggagaugaacgcccccaacuaccacuacgaggagugcagcugcuaccccgacuccagcgagaucacgugcgugugccgggacaacuggcacggcuccaaccgccccugggucagcuucaaccagaaccucgaguaccagaucggguacaucugcuccggcaucuucggggacaacccgcggcccaacgacaagaccggcagcugcggccccguguccagcaacggggccaacggcgugaagggguucagcuucaaguacggcaacggggucuggaucggccgcaccaaguccaucagcucccggaagggcuucgagaugaucugggaccccaacggguggaccggcaccgacaacaacuucagcaucaagcaggacaucguggggaucaacgagugguccggcuacagcggguccuucgugcagcacccggagcugacgggcauggacugcauccgccccugcuucugggucgagcugauccggggccgccccaaggagaacaccaucuggaccagcggguccaucaucagcuucugcggcgugaacuccgacaccgucggguggagcuggcccgacggcgccgagcucccguucacgaucgacaaguga

SEQ ID NO: 89505 - RNA, 1410 nt, Artificial Sequence; identical to SEQ ID NO: 86170
  derived and/or modified CDS sequence (opt1) from neuraminidase__InfluenzaA__AHZ42704

SEQ ID NO: 89506 - RNA, 1410 nt, Artificial Sequence
  derived and/or modified CDS sequence (opt1) from neuraminidase__InfluenzaA__AHZ42716
augaaccccaaccagaagaucaucaccaucggcagcgugucccugaccaucagcacgaucugcuucuucaugcagaucgccauccucaucaccaccgucacccugcacuucaagcaguacgaguucaacuccccgcccaacaaccaggugaugcugugcgagcccacgaucaucgagcgcaacaucaccgagaucguguaccucaccaacaccacgaucgagaaggagaucugccccaagccggccgaguaccggaacuggagcaagccccagugcgggaucaccggcuucgcgcccuucuccaaggacaacagcauccgccuguccgccgggggcgacaucugggucacccgggagcccuacgugagcugcgacccggacaagugcuaccaguucgcccuggggcagggcaccacgcucaacaacgugcacuccaacaacaccguccgcgaccggacccccuaccgcacccugcugaugaacgagcucggcgugcccuuccaccuggggacgaagcaggucugcaucgccuggagcuccagcuccugccacgacggcaaggccuggcugcacgugugcaucaccggggacgacaagaacgcgaccgccagcuucaucuacaacggccggcucguggacuccguggucagcugguccaaggagauccugcgcacccaggagagcgagugcgugugcaucaacgggacgugcaccguggucaugaccgacggcuccgccagcggcaaggccgacaccaagauccuguucaucgaggaggggaagaucgugcacacgagcacccucuccggcagcgcgcagcacguggaggagugcuccugcuacccccgguacccggggguccgcugcgugugccgggacaacuggaagggcagcaaccgccccaucguggacaucaacaucaaggaccacuccaucgucagcuccuacgugugcagcggccuggugggggacaccccgcggaagaacgacuccagcuccagcucccacugccuggaccccaacaacgaggagggcgggcacggcgucaaggggugggccuucgacgacggcaacgacguguggaugggccgcaccaucaacgagacgagccggcucggguacgagaccuucaaggucaucgagggcugguccaaccccaagagcaaguuccagaucaaccgccaggugaucguggaccgcggggaccgguccggcuacagcgggaucuucuccgucgagggcaagagcugcaucaaccggugcuucuacguggagcugauccgcggccggaaggaggagaccgaggugcuguggaccagcaacuccaucgucguguucugcgggacgagcggcaccuacgggaccggcuccuggcccgacggggccgaccucaaccugaugcccaucuga

SEQ ID NO: 89507 - RNA, 1410 nt, Artificial Sequence; identical to SEQ ID NO: 86170
  derived and/or modified CDS sequence (opt1) from neuraminidase__InfluenzaA__AHZ42728

SEQ ID NO: 89508 - RNA, 1410 nt, Artificial Sequence; identical to SEQ ID NO: 87413
  derived and/or modified CDS sequence (opt1) from neuraminidase__InfluenzaA__AHZ42740

SEQ ID NO: 89509 - RNA, 1410 nt, Artificial Sequence; identical to SEQ ID NO: 87381
  derived and/or modified CDS sequence (opt1) from neuraminidase__InfluenzaA__AHZ42751

SEQ ID NO: 89510 - RNA, 1410 nt, Artificial Sequence
  derived and/or modified CDS sequence (opt1) from neuraminidase__InfluenzaA__AHZ42763
augaaccccaaccagaagaucaucaccaucggcagcgugucccugaccaucagcacgaucugcuucuucaugcagaucgccauccucaucaccaccgucacccugcacuucaagcaguacgaguucaacuccccgcccaacaaccaggugaugcugugcgagcccacgaucaucgagcgcaacaucaccgagaucguguaccucaccaacaccacgaucgagaaggagaucugccccaagccggccgaguaccggaacuggagcaagccccagugcgacaucaccggguucgcgcccuucuccaaggacaacagcauccgccuguccgccggcggggacaucugggucacccgggagcccuacgugagcugcgacccggacaagugcuaccaguucgcccugggccaggggaccacgcucaacaacgugcacuccaacaacaccguccgcgaccggacccccuaccgcacccugcugaugaacgagcucggcgugcccuuccaccugggcacgaagcaggucugcaucgccuggagcuccagcuccugccacgacgggaaggccuggcugcacgugugcaucaccggcgacgacaagaacgcgaccgccagcuucaucuacaacgggcggcucguggacuccguggucagcugguccaaggagauccugcgcacccaggagagcgagugcgugugcaucaacggcacgugcaccguggucaugaccgacggguccgccagcggcaaggccgacaccaagauccuguucaucgaggagggcaagaucguguacacgagcacccucuccgggagcgcgcagcacguggaggagugcuccugcuacccccgguacccgggcguccgcugcgugugccgggacaacuggaaggggagcaaccgccccaucguggacaucaacaucaaggaccacuccaucgucagccgguacgugugcuccggccuggugggcgacacgccccgcaagaacgacagcuccagcuccagccacugccuggaccccaacaacgaggagggcgggcacggggucaagggcugggccuucgacgacgggaacgacguguggaugggccggaccaucaacgagaccucccgccucggcuacgagaccuucaaggucaucgagggguggagcaacccgaaguccaagcugcagaucaaccgccaggugaucguggaccggggcgaccggagcggguacuccggcaucuucagcgucgaggggaaguccugcaucaaccgcugcuucuacguggagcugauccggggccgcaaggaggagaccgaggugcucuggaccagcaacagcaucgucguguucugcggcacguccgggaccuacggcaccgggagcuggcccgacggcgccgaccugaaccugaugcccaucuga

SEQ ID NO: 89511 - RNA, 1410 nt, Artificial Sequence; identical to SEQ ID NO: 87399
  derived and/or modified CDS sequence (opt1) from neuraminidase__InfluenzaA__AHZ42775

SEQ ID NO: 89512 - RNA, 1410 nt, Artificial Sequence; identical to SEQ ID NO: 86170
  derived and/or modified CDS sequence (opt1) from neuraminidase__InfluenzaA__AHZ42787

SEQ ID NO: 89513 - RNA, 1410 nt, Artificial Sequence
  derived and/or modified CDS sequence (opt1) from neuraminidase__InfluenzaA__AHZ42799
augaaccccaaccagaagaucaucaccaucggcagcgugucccugaccaucagcacgaucugcuucuucaugcagaucgccauccucaucaccaccgucacccugcacuucaagcaguacgaguucaacuccccgcccaacaaccaggugaugcugugcgagcccacgaucaucgagcgcaacaucaccgagaucguguaccucaccaacaccacgaucgagaaggagaucugccccaagccggccgaguaccggaacuggagcaagccccagugcgggaucaccggcuucgcgcccuucuccaaggacaacagcauccgccuguccgccgggggcgacaucugggucacccgggagcccuacgugagcugcgacccggacaagugcuaccaguucgcccuggggcagggcaccacgcucaacaacgugcacuccaacaacaccguccgcgaccggacccccuaccgcacccugcugaugaacgagcucggcgugcccuuccaccuggggacgaagcaggucugcaucgccuggagcuccagcuccugccacgacggcaaggccuggcugcacgugugcaucaccggggacgacaagaacgcgaccgccagcuucaucuacaacggccggcucguggacuccguggucagcugguccaaggagauccugcgcacccaggagagcgagugcgugugcaucaacgggacgugcaccguggucaugaccgacggcuccgccagcggcaaggccgacaccaagauccuguucaucgaggaggggaagaucgugcacacgagcacccucuccggcagcgcgcagcacguggaggagugcuccugcuacccccgguacccggggguccgcugcgugugccgggacaacuggaagggcagcaaccgccccaucaucgacaucaacaucaaggaccacuccaucgugagcuccuacgucugcagcggccuggugggggacaccccgcggaagaacgacuccagcuccagcucccacugccuggaccccaacaacgaggagggcgggcacggcgugaaggggugggccuucgacgacggcaacgacgucuggaugggccgcaccaucaacgagacgagccggcucggguacgagaccuucaaggugaucgagggcugguccaaccccaagagcaagcugcagaucaaccgccaggucaucguggaccgcggggaccgguccggcuacagcgggaucuucuccguggagggcaagagcugcaucaaccggugcuucuacgucgagcugauccgcggccggaaggaggagaccgaggugcucuggaccagcaacuccaucguggucuucugcgggacgagcggcaccuacgggaccggcuccuggcccgacggggccgaccugaaccugaugcccaucuga

SEQ ID NO: 89514 - RNA, 1410 nt, Artificial Sequence
  derived and/or modified CDS sequence (opt1) from neuraminidase__InfluenzaA__AHZ42811
augaaccccaaccagaagaucaucaccaucggcagcgugucccugaccaucagcacgaucugcuucuucaugcagaucgccauccucaucaccaccgucacccugcacuucaagcaguacgaguucaacuccccgcccaacaaccaggugaugcugugcgagcccacgaucaucgagcgcaacaucaccgagaucguguaccucaccaacaccacgaucgagaaggagaucugccccaagccggccgaguaccggaacuggagcaagccccagugcgggaucaccggcuucgcgcccuucuccaaggacaacagcauccgccuguccgccgggggcgacaucugggucacccgggagcccuacgugagcugcgacccggacaagugcuaccaguucgcccuggggcagggcaccacgcucaacaacgugcacuccaacaacaccguccgcgaccggacccccuaccgcacccugcugaugaacgagcucggcgugcccuuccaccuggggacgaagcaggucugcaucgccuggagcuccagcuccugccacgacggcaaggccuggcugcacgugugcaucaccggggacgacaagaacgcgaccgccagcuucaucuacaacggccggcucguggacuccguggucagcugguccaaggagauccugcgcacccaggagagcgagugcgugugcaucaacgggacgugcaccguggucaugaccgacggcuccgccagcggcaaggccgacaccaagauccuguucaucgaggaggggaagaucgugcacacgagcacccucuccggcagcgcgcagcacguggaggagugcuccugcuacccccgguacccggggguccgcugcgugugccgggacaacuggaagggcagcaaccgccccaucguggacaucaacaucaaggaccacuccaucgucagcuccuacgugugcagcggccuggugggggacaccccgcggaagaacgacuccagcuccagcucccacugccuggaccccaacaacgaggagggcgggcacggcgucaaggggugggccuucgacgacggcaacgacguguggaugggccgcaccaucaacgagacgagccggcucggguacgagaccuucaaggucaucgagggcugguccaaccccaagagcaagcugcagaucaaccgccaggugaucguggggcggggcgaccgcuccggguacagcggcaucuucuccgucgagggcaagagcugcaucaaccggugcuucuacguggagcugauccgcgggcggaaggaggagaccgaggugcucuggaccagcaacuccaucgucguguucugcggcacgagcgggaccuacggcaccggguccuggcccgacggcgccgaccugaaccugaugcccaucuga

SEQ ID NO: 89515 - RNA, 1410 nt, Artificial Sequence
  derived and/or modified CDS sequence (opt1) from neuraminidase__InfluenzaA__AHZ42823
augaaccccaaccagaagaucaucaccaucggcagcgugugcaugaccaucgggauggccaaccugauccuccagaucggcaacaucaucuccaucuggaucagccacuccauccagcuggggaaccagagccagaucgagacgugcaaccaguccgucaucaccuacgagaacaacaccugggugaaccagaccuacgugaacaucagcaacacgaacuucgccgcggagcaguccgucgugagcgugaagcuggccggcaacuccagccucugcccggucuccgggugggccaucuacagcaaggacaacuccgugcgcaucggcagcaagggcgacguguucgucauccgggagcccuucaucuccugcagcccccuggagugccgcaccuucuuccugacccagggggcccuccugaacgacaagcacuccaacggcaccaucaaggaccggagccccuaccgcacgcugauguccugcccgaucggggaggugcccagccccuacaacagccgguucgaguccguggccuggagcgcguccgccugccacgacggcaucaacuggcucaccaucgggaucagcggccccgacuccggcgccgucgccgugcugaaguacaacgggaucaucaccgacaccaucaagagcuggcgcaacaacauccugcggacgcaggaguccgagugcgcgugcgugaacggcagcugcuucaccaucaugaccgacgggccguccgacggccaggccagcuacaagaucuuccgcaucgagaagggcaagaucgucaaguccguggagaugaacgcccccaacuaccacuacgaggagugcagcugcuaccccgacuccagcgagaucacgugcgugugccgggacaacuggcacggguccaaccgccccugggucagcuucaaccagaaccucgaguaccagaucggcuacaucugcuccgggaucuucggcgacaacccgcggcccaacgacaagaccgggagcugcggccccguguccagcaacggcgccaacggggugaagggcuucagcuucaaguacgggaacggcgucuggaucgggcgcaccaaguccaucagcucccggaagggcuucgagaugaucugggaccccaacggcuggaccgggaccgacaacaacuucagcaucaagcaggacaucgugggcaucaacgagugguccggguacagcggcuccuucgugcagcacccggagcugacggggcuggacugcauccgccccugcuucugggucgagcucauccggggccgccccaaggagaacaccaucuggaccagcggcuccagcaucuccuucugcggggugaacagcgacaccgucggcugguccuggcccgacggggccgagcugccguucacgaucgacaaguga

SEQ ID NO: 89516 - RNA, 1410 nt, Artificial Sequence
  derived and/or modified CDS sequence (opt1) from neuraminidase__InfluenzaA__AHZ42834
augaaccccaaccagaagaucaucaccaucggcagcgugucccugaccaucagcacgaucugcuucuucaugcagaccgccauccucaucaccaccgucacgcugcacuucaagcaguacgaguucaacuccccgcccaacaaccaggugaugcugugcgagcccaccaucaucgagcgcaacaucaccgagaucguguaccucaccaacacgaccaucgagaaggagaucugccccaagccggccgaguaccggaacuggagcaagccccagugcgggaucaccggcuucgcgcccuucuccaaggacaacagcauccgccuguccgccgggggcgacaucugggucacccgggagcccuacgugagcugcgacccggacaagugcuaccaguucgcccuggggcagggcacgacccucaacaacgugcacuccaacaacaccguccgcgaccggacccccuaccgcacgcugcugaugaacgagcucggcgugcccuuccaccuggggaccaagcaggucugcaucgccuggagcuccagcuccugccacgacggcaaggccuggcugcacgugugcaucaccggggacgacaagaacgcgaccgccagcuucaucuacaacggccggcucguggacuccguggucagcugguccaaggagauccugcgcacgcaggagagcgagugcgugugcaucaacgggaccugcaccguggucaugaccgacggcuccgccagcggcaaggccgacacgaagauccuguucaucgaggaggggaagaucgugcacaccagcacccucuccggcagcgcgcagcacguggaggagugcuccugcuacccccgguacccggggguccgcugcgugugccgggacaacuggaagggcagcaaccgccccaucguggacaucaacaucaaggaccacuccaucgucagcuccuacgugugcagcggccuggugggggacaccccgcggaagaacgacuccagcuccagcucccacugccuggaccccaacaacgaggagggcgggcacggcgucaaggggugggccuucgacgacggcaacgacguguggaugggccgcacgaucaacgagaccagccggcucggguacgagaccuucaaggucaucgagggcugguccaaccccaagagcaagcugcagaucaaccgccaggugaucguggaccgcggggaccgguccggcuacagcgggaucuucuccgucgagggcaagagcugcaucaaccggugcuucuacguggagcugauccgcggccggaaggaggagaccgaggugcucuggacgagcaacuccaucgucguguucugcgggaccagcggcaccuacgggaccggcuccuggcccgacggggccgaccugaaccugaugcccaucuga

SEQ ID NO: 89517 - RNA, 1410 nt, Artificial Sequence; identical to SEQ ID NO: 86170
  derived and/or modified CDS sequence (opt1) from neuraminidase__InfluenzaA__AHZ42846

SEQ ID NO: 89518 - RNA, 1410 nt, Artificial Sequence; identical to SEQ ID NO: 86170
  derived and/or modified CDS sequence (opt1) from neuraminidase__InfluenzaA__AHZ42858

SEQ ID NO: 89519 - RNA, 1410 nt, Artificial Sequence; identical to SEQ ID NO: 86170
  derived and/or modified CDS sequence (opt1) from neuraminidase__InfluenzaA__AHZ42870

SEQ ID NO: 89520 - RNA, 1410 nt, Artificial Sequence; identical to SEQ ID NO: 86170
  derived and/or modified CDS sequence (opt1) from neuraminidase__InfluenzaA__AHZ42882

SEQ ID NO: 89521 - RNA, 1410 nt, Artificial Sequence
  derived and/or modified CDS sequence (opt1) from neuraminidase__InfluenzaA__AHZ42894
augaaccccaaccagaagaucaucaccaucggcagcgugucccugaccaucagcacgaucugcuucuucaugcagaucgccauccucaucaccaccgucacccugcacuucaagcaguacgaguucaacuccccgcccaacaaccaggugaugcugugcgagcccacgaucaucgagcgcaacaucaccgagaucguguaccucaccaacaccacgaucgagaaggagaucugccccaagccggccgaguaccggaacuggagcaagccccagugcgggaucaccggcuucgcgcccuucuccaaggacaacagcauccgccuguccgccgggggcgacaucugggucacccgggagcccuacgugagcugcgacccggacaagugcuaccaguucgcccuggggcagggcaccacgcucaacaacgugcacuccaacaacaccguccgcgaccggacccccuaccgcacccugcugaugaacgagcucggcgugcccuuccaccuggggacgaagcaggucugcaucgccuggagcuccagcuccugccacgacggcaaggccuggcugcacgugugcaucaccggggacgacaagaacgcgaccgccagcuucaucuacaacggccggcucguggacuccguggucagcugguccaaggagauccugcgcacccaggagagcgagugcgugugcaucaacgggacgugcaccguggucaugaccgacggcuccgccagcggcaaggccgacaccaagauccuguucaucgaggaggggaagaucgugcacacgagcacccucuccggcagcgcgcagcacguggaggagugcuccugcuacccccgguacccggggguccgcugcgugugccgggacaacuggaagggcagcaaccgccccaucguggacaucaacaucaaggaccacuccaucgucagcuccuacgugugcagcggccuggugggggacaccccgcggaagaacgacuccagcuccagcucccacugccuggaccccaacaacgaggagggcgggcacggcgucaaggggugggccuucgacgacggcaacgacguguggaugggccgcaccaucaacgagacgagccggcucggguacgagaccuucaaggucaucgagggcugguccaaccccaagagcaagcugcagaucaaccgccaggugaucguggacaagggggaccgguccggcuacagcgggaucuucuccgucgagggcaagagcugcaucaaccgcugcuucuacguggagcugauccggggccgcaaggaggagaccgaggugcucuggaccagcaacuccaucgucguguucugcgggacgagcggcaccuacgggaccggcuccuggcccgacggggccgaccugaaccugaugcccaucuga

SEQ ID NO: 89522 - RNA, 1410 nt, Artificial Sequence; identical to SEQ ID NO: 86170
  derived and/or modified CDS sequence (opt1) from neuraminidase__InfluenzaA__AHZ42906

SEQ ID NO: 89523 - RNA, 1410 nt, Artificial Sequence; identical to SEQ ID NO: 87399
  derived and/or modified CDS sequence (opt1) from neuraminidase__InfluenzaA__AHZ42918

SEQ ID NO: 89524 - RNA, 1398 nt, Artificial Sequence; identical to SEQ ID NO: 87478
  derived and/or modified CDS sequence (opt1) from neuraminidase__InfluenzaA__AHZ59750

SEQ ID NO: 89525 - RNA, 1398 nt, Artificial Sequence; identical to SEQ ID NO: 87478
  derived and/or modified CDS sequence (opt1) from neuraminidase__InfluenzaA__AHZ59762

SEQ ID NO: 89526 - RNA, 1398 nt, Artificial Sequence; identical to SEQ ID NO: 87478
  derived and/or modified CDS sequence (opt1) from neuraminidase__InfluenzaA__AHZ59774

SEQ ID NO: 89527 - RNA, 1398 nt, Artificial Sequence; identical to SEQ ID NO: 87478
  derived and/or modified CDS sequence (opt1) from neuraminidase__InfluenzaA__AHZ59786

SEQ ID NO: 89528 - RNA, 1398 nt, Artificial Sequence; identical to SEQ ID NO: 87478
  derived and/or modified CDS sequence (opt1) from neuraminidase__InfluenzaA__AHZ59798

SEQ ID NO: 89529 - RNA, 1398 nt, Artificial Sequence; identical to SEQ ID NO: 87478
  derived and/or modified CDS sequence (opt1) from neuraminidase__InfluenzaA__AHZ59810

SEQ ID NO: 89530 - RNA, 1398 nt, Artificial Sequence; identical to SEQ ID NO: 87478
  derived and/or modified CDS sequence (opt1) from neuraminidase__InfluenzaA__AHZ59822

SEQ ID NO: 89531 - RNA, 1398 nt, Artificial Sequence; identical to SEQ ID NO: 87478
  derived and/or modified CDS sequence (opt1) from neuraminidase__InfluenzaA__AHZ59834

SEQ ID NO: 89532 - RNA, 1398 nt, Artificial Sequence; identical to SEQ ID NO: 87478
  derived and/or modified CDS sequence (opt1) from neuraminidase__InfluenzaA__AHZ59846

SEQ ID NO: 89533 - RNA, 1398 nt, Artificial Sequence; identical to SEQ ID NO: 87478
  derived and/or modified CDS sequence (opt1) from neuraminidase__InfluenzaA__AHZ59858

SEQ ID NO: 89534 - RNA, 1398 nt, Artificial Sequence; identical to SEQ ID NO: 87478
  derived and/or modified CDS sequence (opt1) from neuraminidase__InfluenzaA__AHZ59870

SEQ ID NO: 89535 - RNA, 1398 nt, Artificial Sequence; identical to SEQ ID NO: 87478
  derived and/or modified CDS sequence (opt1) from neuraminidase__InfluenzaA__AHZ59882

SEQ ID NO: 89536 - RNA, 1398 nt, Artificial Sequence; identical to SEQ ID NO: 87478
  derived and/or modified CDS sequence (opt1) from neuraminidase__InfluenzaA__AHZ59918

SEQ ID NO: 89537 - RNA, 1398 nt, Artificial Sequence; identical to SEQ ID NO: 87478
  derived and/or modified CDS sequence (opt1) from neuraminidase__InfluenzaA__AHZ59930

SEQ ID NO: 89538 - RNA, 1398 nt, Artificial Sequence; identical to SEQ ID NO: 87478
  derived and/or modified CDS sequence (opt1) from neuraminidase__InfluenzaA__AHZ59942

SEQ ID NO: 89539 - RNA, 1398 nt, Artificial Sequence; identical to SEQ ID NO: 87478
  derived and/or modified CDS sequence (opt1) from neuraminidase__InfluenzaA__AHZ59954

SEQ ID NO: 89540 - RNA, 1398 nt, Artificial Sequence; identical to SEQ ID NO: 87478
  derived and/or modified CDS sequence (opt1) from neuraminidase__InfluenzaA__AHZ59966

SEQ ID NO: 89541 - RNA, 1398 nt, Artificial Sequence; identical to SEQ ID NO: 87478
  derived and/or modified CDS sequence (opt1) from neuraminidase__InfluenzaA__AHZ59991

SEQ ID NO: 89542 - RNA, 1398 nt, Artificial Sequence; identical to SEQ ID NO: 87478
  derived and/or modified CDS sequence (opt1) from neuraminidase__InfluenzaA__AHZ60003

SEQ ID NO: 89543 - RNA, 1398 nt, Artificial Sequence; identical to SEQ ID NO: 87478
  derived and/or modified CDS sequence (opt1) from neuraminidase__InfluenzaA__AHZ60015

SEQ ID NO: 89544 - RNA, 1398 nt, Artificial Sequence; identical to SEQ ID NO: 87478
  derived and/or modified CDS sequence (opt1) from neuraminidase__InfluenzaA__AHZ60027

SEQ ID NO: 89545 - RNA, 1398 nt, Artificial Sequence; identical to SEQ ID NO: 87478
  derived and/or modified CDS sequence (opt1) from neuraminidase__InfluenzaA__AHZ60039

SEQ ID NO: 89546 - RNA, 1398 nt, Artificial Sequence; identical to SEQ ID NO: 87478
  derived and/or modified CDS sequence (opt1) from neuraminidase__InfluenzaA__AHZ60051

SEQ ID NO: 89547 - RNA, 1398 nt, Artificial Sequence; identical to SEQ ID NO: 87478
  derived and/or modified CDS sequence (opt1) from neuraminidase__InfluenzaA__AHZ60063

SEQ ID NO: 89548 - RNA, 1398 nt, Artificial Sequence; identical to SEQ ID NO: 87478
  derived and/or modified CDS sequence (opt1) from neuraminidase__InfluenzaA__AHZ60075

SEQ ID NO: 89549 - RNA, 1398 nt, Artificial Sequence; identical to SEQ ID NO: 87478
  derived and/or modified CDS sequence (opt1) from neuraminidase__InfluenzaA__AHZ60087

SEQ ID NO: 89550 - RNA, 1398 nt, Artificial Sequence; identical to SEQ ID NO: 87478
  derived and/or modified CDS sequence (opt1) from neuraminidase__InfluenzaA__AHZ60099

SEQ ID NO: 89551 - RNA, 1410 nt, Artificial Sequence; identical to SEQ ID NO: 86170
  derived and/or modified CDS sequence (opt1) from neuraminidase__InfluenzaA__AHZ60111

SEQ ID NO: 89552 - RNA, 1410 nt, Artificial Sequence; identical to SEQ ID NO: 80426
  derived and/or modified CDS sequence (opt1) from neuraminidase__InfluenzaA__AIA26299

SEQ ID NO: 89553 - RNA, 1374 nt, Artificial Sequence
  derived and/or modified CDS sequence (opt1) from neuraminidase__InfluenzaA__AIC64891
augaaccccaaccagaagaucaucaccaucggcagcgugugcaugaccaucgggauggccaaccugauccuccagaucggcaacaucaucuccaucuggaucagccacuccauccagcuggggaaccagaaccagaucgagacgugcaaccagagcgucaucaccuacgagaacaacaccaacuucgccgcgggccaguccguggugagcgucaagcuggccgggaacuccagccucugcccgguguccggcugggccaucuacagcaaggacaacuccgugcgcaucggcagcaagggggacgucuucgugauccgggagcccuucaucuccugcagcccccuggagugccgcaccuucuuccugacgcagggcgcccuccugaacgacaagcacuccaacgggaccaucaaggaccggagccccuaccgcacccugauguccugcccgaucggcgaggugcccagccccuacaacucccgguucgagagcgucgccuggagcgcguccgccugccacgacgggaucaacuggcucaccaucggcaucagcggccccgacaacggggccguggccgugcugaaguacaacggcaucaucacggacaccaucaaguccuggcgcaacaacauccugcggacccaggagagcgagugcgcgugcgucaacggguccugcuucaccgugaugacggacggcccgagcaacggccaggccuccuacaagaucuuccgcaucgagaaggggaagaucgucaagagcguggagaugaacgcccccaacuaccacuacgaggagugcuccugcuaccccgacagcuccgagaucacgugcgugugccgggacaacuggcacggcagcaaccgccccuggguguccuucaaccagaaccucgaguaccagaucggguacaucugcagcggcaucuucggggacaacccgcggcccaacgacaagaccggcuccugcggccccgucagcuccaacggggccaacggcgugaagggguucagcuucaaguacggcaacgggguguggaucggccgcaccaaguccaucagcagccggaacggcuucgagaugaucugggaccccaacggguggaccggcaccgacaacaacuucuccaucaagcaggacaucgucgggaucaacgaguggagcggcuacuccgggagcuucgugcagcacccggagcugaccggccuggacugcauccgccccugcuucuggguggagcucauccggggccgccccaaggagaacaccaucuggacguccgggagcuccaucagcuucugcggcgucaacuccgacaccgugggguggagcuggcccgacggcgccgagcugccguucaccaucgacaaguga

SEQ ID NO: 89554 - RNA, 1350 nt, Artificial Sequence
  derived and/or modified CDS sequence (opt1) from neuraminidase__InfluenzaA__AID48084
augaaccccaacaagaagaucaucaccaucggcagcaucugcauggugaccgggauggucucccugaugcuccagaucggcaaccugaucagcaucugggugucccacagcauccacacggggaaccagcacaaggccgagccgaucuccaacaccaaccugcucaccgagaagaccguggccagcgucaagcuggcgggcaacuccagccugugccccaucaacgggugggccguguacuccaaggacaacagcauccgcaucggcuccaagggcgacguguucgucauccgggagcccuucaucagcugcucccaccucgagugccgcacguucuuccugacccagggggcccugcucaacgacaagcacagcaacggcaccgugaaggaccggagcccccaccgcacccugauguccugcccggugggggaggcccccucccccuacaacagccgguucgaguccgucgccuggagcgcgagcgccugccacgacggcacguccuggcugaccaucgggaucagcggccccgacaacggcgccguggccgugcucaaguacaacgggaucaucaccgacaccaucaaguccuggcgcaacaacauccugcggacgcaggagagcgagugcgcgugcgucaacggcuccugcuucaccgugaugaccgacgggccgagcaacggccaggccucccacaagaucuucaagauggagaagggcaagguggucaagagcguggagcuggacgcccccaacuaccacuacgaggagugcuccugcuaccccgacgccggggagaucacgugcgugugccgcgacaacuggcacggcagcaaccggcccugggucuccuucaaccagaaccucgaguaccagaucggguacaucugcagcggcguguucggggacaacccgcgccccaacgacggcgccggcuccugcgggcccgugagcuccaacggcgcguacggggucaagggcuucagcuucaaguacgggaacggcguguggaucggccggaccaaguccaccaacagccgcuccggguucgagaugaucugggaccccaacggcuggaccgagaccgacagcagcuucuccgugaagcaggacaucgucgccaucacggacuggagcggguacuccggcagcuucgugcagcacccggagcugaccgggcuggacugcauccggcccugcuucugggucgagcucauccgcggccggcccaaggaguccaccaucuggaccagcggcuccagcaucuccuucugcggggugaacagcgacacggugggcugguccuggcccgacggggccgagcugccguucaccaucgacaaguga

SEQ ID NO: 89555 - RNA, 1410 nt, Artificial Sequence
  derived and/or modified CDS sequence (opt1) from neuraminidase__InfluenzaA__AID70507
augaaccccaaccagaagaucaucaccaucggcagcgugugcaccacgaucgggauggccaaccugauccuccagaucggcaacaucaucuccaucuggaucagccacuccauccagcuggggaaccagaaccagaucgagaccugcaaccagagcgucaucaccuacgagaacaagaccugggugaaccagacguacgugaacaucuccaacaccaacuucgccgcgggccagagcgucguguccgugaagcuggccgggaacagcucccucugcccggucagcggcugggccaucuacuccaaggacaacagcauccgcaucggcuccaagggggacguguucgugauccgggagcccuucaucagcugcagcccccuggagugccgcaccuucuuccugacccagggcgcccuccugaacgacaagcacuccaacgggacgaucaaggaccggucccccuaccgcacccugaugagcugcccgaucggcgagguccccucccccuacaacagccgguucgagagcguggccugguccgcgagcgccugccacgacgggaucaacuggcucaccaucggcaucuccggccccgacaacggggccguggccguccugaaguacaacggcaucaucaccgacacgaucaagagcuggcgcaacaacauccugcggacccaggaguccgagugcgcgugcgugaacgggagcugcuucaccgugaugaccgacggcccguccgacggccaggccagcuacaagaucuuccgcaucgagaaggggaagaucgucaaguccguggagaugaacgcccccaacuaccacuacgaggagugcagcugcuaccccgacuccagcgagaucacgugcgugugccgggacaacuggcacggcuccaaccgccccugggucagcuucaaccagaaccucgaguaccagaucggguacaucugcuccggcaucuucggggacaacccgcggcccaacgacaagaccggcagcugcgaccccguguccuucaacggcgccaacggggugaagggcuucagcuucaaguacgggaacggcgucuggaucgggcgcaccaaguccaucagcagccggaacggcuucgagaugaucugggaccccaacggcuggaccgggacggacaacaaguucuccaucaagcaggacaucgugggcaucaacgaguggagcggguacuccggcagcuucgugcagcacccggagcugaccgggcuggacugcauccgccccugcuucugggucgagcucauccggggccgccccaaggagaacaccaucuggaccuccggcagcuccaucagcuucugcggggugaacuccgacacggucggcugguucuggcccgacggggccgagcugccguucaccaucgacaaguga

SEQ ID NO: 89556 - RNA, 1410 nt, Artificial Sequence
  derived and/or modified CDS sequence (opt1) from neuraminidase__InfluenzaA__AID70508
augaaccccaaccagaagaucaucaccaucggcagcgugugcaugaccaucgggauggccaaccugauccuccagaucggcaacaucaucuccaucuggaucagccacuccauccagcuggggaaccagagccagaucgagacgugcaaccaguccgucaucaccuacgagaacaacaccugggugaaccagaccuacgugaacaucagcaacacgaacuucgccgcgggccaguccgucgugagcgugaagcuggccgggaacuccagccucugcccggucuccggcugggccaucuacagcaaggacaacuccauccgcaucggcagcaagggggacguguucgugauccgggagcccuucaucuccugcagcccccuggagugccgcaccuucuuccugacccagggcgcccuccugaacgacaagcacuccaacgggaccaucaaggaccggagccccuaccgcacgcugauguccugcccgaucggcgagguccccagccccuacaacagccgguucgaguccguggccuggagcgcguccgccugccacgacgggaucaacuggcucaccaucggcaucagcggccccaacaacggggccguggccguccugaaguacaacggcaucaucaccgacaccaucaaguccuggcgcaacaacauccugcggacgcaggagagcgagugcgcgugcgugaacggguccugcuucaccaucaugaccgacggcccgagcgacggccaggccuccuacaagaucuuccgcaucgagaaggggaagaucgucaagagcguggagaugaacgcccccaacuaccacuacgaggagugcuccugcuaccccgacagcuccgagaucacgugcgugugccgggacaacuggcacggcagcaaccgccccuggguguccuucaaccagaaccucgaguaccagaucggguacaucugcagcggcaucuucggggacaacccgcggcccaacgacaagaccggcuccugcggccccgucagcuccaacggggccaacggcgugaagggguucagcuucaaguacggcaacgggguguggaucggccgcaccaagagcaucuccagccggaagggcuucgagaugaucugggaccccaacggguggaccggcaccgacaacaacuucuccaucaagcaggacaucgucgggaucaacgaguggagcggcuacuccgggagcuucgugcagcacccggagcugacgggccuggacugcauccgccccugcuucuggguggagcucauccggggccgccccaaggagaacaccaucuggaccuccgggagcuccaucagcuucugcggcgucaacuccgacaccgugggguggagcuggcccgacggcgccgagcugccguucacgaucgacaaguga

SEQ ID NO: 89557 - RNA, 1410 nt, Artificial Sequence
  derived and/or modified CDS sequence (opt1) from neuraminidase__InfluenzaA__AID70509
augaaccccaaccagaagaucaucaccaucggcagcgugugcaugaccaucgggauggccaaccugauccuccagaucggcaacaucaucuccaucuggaucagccacuccauccagcuggggaaccagagccagaucgagacgugcaaccaguccgucaucaccuacgagaacaacaccugggugaaccagaccuacgugaacaucagcaacacgaacuucgccgcgggccaguccgucgugagcgugaagcuggccgggaacuccagccucugcccggucuccggcugggccaucuacagcaaggacaacuccauccgcaucggcagcaagggggacguguucgugauccgggagcccuucaucuccugcagcccccuggagugccgcaccuucuuccugacccagggcgcccuccugaacgacaagcacuccaacgggaccaucaaggaccggagccccuaccgcacgcugauguccugcccgaucggcgagguccccagccccuacaacagccgguucgaguccguggccuggagcgcguccgccugccacgacgggaucaacuggcucaccaucggcaucagcggccccgacaacggggccguggccguccugaaguacaacggcaucaucaccgacaccaucaaguccuggcgcaacaacauccugcggacgcaggagagcgagugcgcgugcgugaacggguccugcuucaccaucaugaccgacggcccgagcgacggccaggccuccuacaagaucuuccgcaucgagaaggggaagaucgucaagagcguggagaugaacgcccccaacuaccacuacgaggagugcuccugcuaccccgacagcuccgagaucacgugcgugugccgggacaacuggcacggcagcaaccgccccuggguguccuucaaccagaaccucgaguaccagaucggguacaucugcagcggcaucuucggggacaacccgcggcccaacgacaagaccggcuccugcggccccgucagcuccaacggggccaacggcgugaagggguucagcuucaaguacggcaacgggguguggaucggccgcaccaagagcaucaacucccggaagggcuucgagaugaucugggaccccaacggguggaccggcaccgacaacaacuucagcaucaagcaggacaucgucgggaucaacgagugguccggcuacagcggguccuucgugcagcacccggagcugacgggccuggacugcauccgccccugcuucuggguggagcucauccggggccgccccaaggagaacaccaucuggaccagcggguccagcaucuccuucugcggcgucaacagcgacaccguggggugguccuggcccgacggcgccgagcugccguucacgaucgacaaguga

SEQ ID NO: 89558 - RNA, 1410 nt, Artificial Sequence
  derived and/or modified CDS sequence (opt1) from neuraminidase__InfluenzaA__AID70510
augaaccccaaccagaagaucaucaccaucggcagcgugugcaucaccaucgggauggccaaccugauccuccagaucggcaacaucaucuccaucuggaucagccacuccauccagcuggggaaccagagccagaucgagacgugcaaccaguccgucaucaccuacgagaacaacaccugggugaaccagaccuacgugaacaucagcaacacgaacuucgccgcgggccaguccgucgugagcgugaagcuggccgggaacuccagccucugcccggucuccggcugggccaucuacagcaaggacaacuccauccgcaucggcagcaagggggacguguucgugauccgggagcccuucaucuccugcagcccccuggagugccgcaccuucuuccugacccagggcgcccuccugaacgacaagcacuccaacgggaccaucaaggaccggagccccuaccgcacgcugauguccugcccgaucggcgagguccccagccccuacaacagccgguucgaguccguggccuggagcgcguccgccugccacgacgggaucaacuggcucaccaucggcaucagcggccccgacaacggggccguggccguccugaaguacaacggcaucaucaccgacaccaucaaguccuggcgcaacaacauccugcggacgcaggagagcgagugcgcgugcgugaacggguccugcuucaccaucaugaccgacggcccgagcgacggccaggccuccuacaagaucuuccgcaucgagaaggggaagaucgucaagagcguggagaugaacgcccccaacuaccacuacgaggagugcuccugcuaccccgacagcuccgagaucacgugcgugugccgggacaacuggcacggcagcaaccgccccuggguguccuucaaccagaaccucgaguaccagaucggguacaucugcagcggcaucuucggggacaacccgcggcccaacgacaagaccggcuccugcggccccgucagcuccaacggggccaacggcgugaagggguucagcuucaaguacggcaacgggguguggaucggccgcaccaagagcaucuccagccggaagggcuucgagaugaucugggaccccaacggguggaccggcaccgacaacaacuucuccaucaagcaggacaucgucgggaucaacgaguggagcggcuacuccgggagcuucgugcagcacccggagcugacgggccuggacugcauccgccccugcuucuggguggagcucauccggggccgccccaaggagaacaccaucuggaccuccgggagcuccaucagcuucugcggcgucaacuccgacaccgugggguggagcuggcccgacggcgccgagcugccguucacgaucgacaaguga

SEQ ID NO: 89559 - RNA, 1410 nt, Artificial Sequence
  derived and/or modified CDS sequence (opt1) from neuraminidase__InfluenzaA__AID70511
augaaccccaaccagaagaucaucaccaugggcagcguguggaugaccaucgggauggccaaccugauccuccaguccggcaacaucaucagcaucuggaucucccacagcauccagcugcgcaaccagucccagaucgagacgugcaaccagagcgucaucaccuacgagaacaacaccugggugaaccagaccuacgugaacaucuccaacacgaacuucgccgcggggcagagcgucguguccgugaagcuggccggcaacagcucccucugcccggucagcgggugggccaucuacuccaaggacaacagcauccggaucggcuccaagggcgacguguucgugauccgcgagcccuucaucagcugcagcccccuggagugccggaccuucuuccugacccagggggcccuccugaacgacaagcacuccaacggcaccaucaaggaccgcucccccuaccggacgcugaugagcugcccgaucggggagguccccagccccuacaacucccgcuucgagagcguggccugguccgcgagcgccugccacgacggcaucaacuggcucaccaucgggaucuccggccccgacaacggcgccguggccguccugaaguacaacgggaucaucaccgacaccaucaagagcuggcggaacaacauccugcgcacgcaggaguccgagugcgcgugcgugaacggcagcugcuucaccaucaugaccgacgggccguccgacggccaggccagcuacaagaucuuccggaucgagaagggcaagaucgugaaguccgucgagaugaacgcccccaacuaccacuacgaggagugcagcugcuaccccgacuccagcgagaucacgugcgugugccgcgacaacuggcacggguccaaccggcccugggugagcuucaaccagaaccucgaguaccagaucggcuacaucugcuccgggaucuucggcgacaacccgcgccccaacgacaagaccgggagcugcggccccgucuccagcaacggcgccaacggggugaagggcuucagcuucaaguacgggaacggcguguggaucgggcggaccaaguccaucagcucccgcaagggcuucgagaugaucugggaccccaacggcuggaccgggaccgacaacaacuucagcaucaagcaggacaucgucggcaucaacgagugguccggguacagcggcuccuucgugcagcacccggagcugacggggcuggacugcauccggcccugcuucuggguggagcucauccgcggccggcccaaggagaacaccaucuggaccagcggcuccagcaucuccuucugcggggucaacagcgacaccgugggcugguccuggcccgacggggccgagcugccguucacgaucgacaaguga

SEQ ID NO: 89560 - RNA, 1410 nt, Artificial Sequence
  derived and/or modified CDS sequence (opt1) from neuraminidase__InfluenzaA__AID70512
augaaccccaaccagaagaucaucaccaucggcagcguguggaugaccaucgggauggccaaccugauccuccagaucggcaacaucaucuccaucuggaucagccacuccauccagcuggggaaccagagccagaucgagacgugcaaccaguccgucaucaccuacgagaacaacaccugggugaaccagaccuacgugaacaucagcaacacgaacuucgccgcgggccaguccgucgugagcgugaagcuggccgggaacuccagccucugcccggucuccggcugggccaucuacagcaaggacaacuccauccgcaucggcagcaagggggacguguucgugauccgggagcccuucaucuccugcagcccccuggagugccgcaccuucuuccugacccagggcgcccuccugaacgacaagcacuccaacgggaccaucaaggaccggagccccuaccgcacgcugauguccugcccgaucggcgagguccccagccccuacaacagccgguucgaguccguggccuggagcgcguccgccugccacgacgggaucaacuggcucaccaucggcaucagcggccccgacaacggggccguggccguccugaaguacaacggcaucaucaccgacaccaucaaguccuggcgcaacaacauccugcggacgcaggagagcgagugcgcgugcgugaacggguccugcuucaccaucaugaccgacggcccgagcgacggccaggccuccuacaagaucuuccgcaucgagaaggggaagaucgucaagagcguggagaugaaggcccccaacuaccacuacgaggagugcuccugcuaccccgacagcuccgagaucacgugcgugugccgggacaacuggcacggcagcaaccgccccuggguguccuucaaccagaaccucgaguaccagaucggguacaucugcagcggcaucuucggggacaacccgcggcccaacgacaagaccggcuccugcggccccgucagcuccaacggggccaacggcgugaagggguucagcuucaaguacggcaacgggguguggaucggccgcaccaagagcaucuccagccggaagggcuucgagaugaucugggaccccaacggguggaccggcaccgacaacaacuucuccaucaagcaggacaucaucgggaucaacgaguggagcggcuacuccgggagcuucguccagcacccggagcugacgggccuggacugcauccgccccugcuucuggguggagcucauccggggccgccccaaggagaacaccaucuggaccuccgggagcuccaucagcuucugcggcgugaacuccgacaccgucggguggagcuggcccgacggcgccgagcugccguucacgaucgacaaguga

SEQ ID NO: 89561 - RNA, 1410 nt, Artificial Sequence; identical to SEQ ID NO: 84281
  derived and/or modified CDS sequence (opt1) from neuraminidase__InfluenzaA__AID70514

SEQ ID NO: 89562 - RNA, 1410 nt, Artificial Sequence
  derived and/or modified CDS sequence (opt1) from neuraminidase__InfluenzaA__AID70515
augaaccccaaccagaagaucaucaccaucggcagcgugugcaugaccaucgggauggccaaccugauccuccagaucggcaacaucaucuccaucuggaucagccacuccauccagcugcgcaaccagagccagaucgagacgugcaaccaguccgucaucaccuacgagaacaacaccugggugaaccagaccuacgugaacaucagcaacacgaacuucgccgcggggcaguccgucgugagcgugaagcuggccggcaacuccagccucugcccggucuccgggugggccaucuacagcaaggacaacuccauccggaucggcagcaagggcgacguguucgugauccgcgagcccuucaucuccugcagcccccuggagugccggaccuucuuccugacccagggggcccuccugaacgacaagcacuccaacggcaccaucaaggaccgcagccccuaccggacgcugauguccugcccgaucggggagguccccagccccuacaacagccgcuucgaguccguggccuggagcgcguccgccugccacgacggcaucaacuggcucaccaucgggaucagcggccccgacaacggcgccguggccguccugaaguacaacgggaucaucaccgacaccaucaaguccuggcggaacaacauccugcgcacgcaggagagcgagugcgcgugcgugaacggcuccugcuucaccaucaugaccgacgggccgagcgacggccaggccuccuacaagaucuuccggaucgagaagggcaagaucgucaagagcguggagaugaacgcccccaacuaccacuacgaggagugcuccugcuaccccgacagcuccgagaucacgugcgugugccgcgacaacuggcacgggagcaaccggcccuggguguccuucaaccagaaccucgaguaccagaucggcuacaucugcagcgggaucuucggcgacaacccgcgccccaacgacaagaccggguccugcggccccgucagcuccaacggcgccaacggggugaagggcuucagcuucaaguacagcaacgggguguggaucggccggaccaaguccaucagcucccgcaagggguucgagaugaucugggaccccaacggcuggaccggcaccgacaacaacuucagcaucaagcaggacaucgucgggaucaacgagugguccggcuacagcggguccuucgugcagcacccggagcugacgggccuggacugcauccggcccugcuucuggguggagcucauccgcgggcggcccaaggagaacaccaucuggaccagcggcuccagcaucuccuucugcggcgucaacagcgacaccguggggugguccuggcccgacggcgccgagcugccguucacgaucgacaaguga

SEQ ID NO: 89563 - RNA, 1410 nt, Artificial Sequence; identical to SEQ ID NO: 87182
  derived and/or modified CDS sequence (opt1) from neuraminidase__InfluenzaA__AID70516

SEQ ID NO: 89564 - RNA, 1410 nt, Artificial Sequence
  derived and/or modified CDS sequence (opt1) from neuraminidase__InfluenzaA__AID70517
augaaccccaaccagaagaucaucaccaucggcagcgugugcaugaccaucgggauggccaaccugacgcuccagaucggcaacaucaucuccaucuggaucagccacuccauccagcuggggaaccagaaccagaucgagaccugcaaccagagcgucaucaccuacgagaacaacaccugggugaaccagacguacgugaacaucuccaacaccaacuucgccgcgggccagagcgucguguccgugaagcuggccgggaacagcucccucugcccggucagcggcugggccaucuacuccaaggacaacagcauccgcaucggcuccaagggggacguguucgugauccgggagcccuucaucagcugcagcccccuggagugccgcaccuucuuccugacccagggcgcccuccugaacgacaagcacagcaacgggacgaucaaggaccggucccccuaccgcacccugaugagcugcccgaucggcgagguccccucccccuacaacagccgguucgagagcguggccugguccgcgagcgccugccacgacgggaucaacuggcucaccaucggcaucuccggccccgacaacggggccguggccguccugaaguacaacggcaucaucaccgacacgaucaagagcuggcgcaacaacauccugcggacccaggaguccgagugcgcgugcgugaacgggagcugcuucaccaucaugaccgacggcccgaacgacggccaggccuccuacaagaucuuccgcaucgagaaggggaagaucgugaaguccgucgagaugaacgcccccaacuaccacuacgaggagugcuccugcuaccccgacagcuccgagaucacgugcgugugccgggacaacuggcacggcagcaaccgccccuggguguccuucaaccagaaccucgaguaccagaucggguacaucugcagcggcaucuucggggacaacccgcggcccaacgacaagaccggcuccugcggccccgucagcuccaacggggccaacggcgugaagggguucagcuucaaguacggcaacgggguguggaucggccgcaccaaguccaucagcagccggaagggcuucgagaugaucugggaccccaacggguggaccggcacggacaacaacuucuccaucaagcaggacaucgucgggaucaacgaguggagcggcuacuccgggagcuucgugcagcacccggagcugaccggccuggacugcauccgccccugcuucuggguggagcucauccggggccgccccaaggagaacaccaucuggaccuccgggagcuccaucagcuucugcggcgucaacuccgacacggugggguggagcuggcccgacggcgccgagcugccguucaccaucgacaaguga

SEQ ID NO: 89565 - RNA, 1410 nt, Artificial Sequence
  derived and/or modified CDS sequence (opt1) from neuraminidase__InfluenzaA__AID70518
augaaccccaaccagaagaucaucaccaucggcagcgugugcaugaccaucgggauggccaaccugauccuccagaucggcaacaucaucuccaucuggaucagccacuccauccagcugcgcaaccagagccagaucgagacgugcaaccaguccgucaucaccuacgagaacaacaccugggugaaccagaccuacgugaacaucagcaacacgaacuucgccgcggggcaguccgucgugagcgugaagcuggccggcaacuccagccucugcccggucuccgggugggccaucuacagcaaggacaacuccauccggaucggcagcaagggcgacguguucgugauccgcgagcccuucaucuccugcagcccccuggagugccggaccuucuuccugacccagggggcccuccugaacgacaagcacuccaacggcaccaucaaggaccgcagccccuaccggacgcugauguccugcccgaucggggagauccccagccccuacaacagccgcuucgaguccgucgccuggagcgcguccgccugccacgacggcaucaacuggcucaccaucgggaucagcggccccgacaacggcgccguggccgugcugaaguacaacgggaucaucaccgacaccaucaaguccuggcggaacaacauccugcgcacgcaggagagcgagugcgcgugcgucaacggcuccugcuucaccaucaugaccgacgggccgagcgacggccaggccuccuacaagaucuuccggaucgagaagggcaagaucgucaagagcguggagaugaacgcccccaacuaccacuacgaggagugcuccugcuaccccgacagcuccgagaucacgugcgugugccgcgacaacuggcacgggagcaaccggcccuggguguccuucaaccagaaccucgaguaccagaucggcuacaucugcagcgggaucuucggcgacaacccgcgccccaacgacaagaccggguccugcggccccgugagcuccaacggcgccaacggggucaagggcuucagcuucaaguacgggaacggcguguggaucgggcggaccaagagcaucuccagccgcaagggcuucgagaugaucugggaccccaacggcuggaccgggaccgacaacaacuucuccaucaagcaggacaucgugggcaucaacgaguggagcggguacuccggcagcuucguccagcacccggagcugacggggcuggacugcauccggcccugcuucuggguggagcucauccgcggccggcccaaggagaacaccaucuggaccuccggcagcuccaucagcuucugcggggugaacuccgacaccgucggcuggagcuggcccgacggggccgagcugccguucacgaucgacaaguga

SEQ ID NO: 89566 - RNA, 1410 nt, Artificial Sequence
  derived and/or modified CDS sequence (opt1) from neuraminidase__InfluenzaA__AID70519
augaaccccaaccagaagaucaucaccaucggcagcgugugcaugaccaucgggauggccaaccugauccuccagaucggcaacaucaucuccaucuggaucagccacuccauccagcuggggaaccagagccagaucgagacgugcaaccaguccgucaucaccuacgagaacaacaccugggugaaccagaccuacgugaacaucagcaacacgaacuucgccgcgggccaguccgucgugagcgugaagcuggccgggaacuccagccucugcccggucuccggcugggccaucuacagcaaggacaacuccauccgcaucggcagcaagggggacguguucgugauccgggagcccuucaucuccugcagcccccuggagugccgcaccuucuuccugacccagggcgcccuccugaacgacaagcacuccaacgggaccaucaaggaccggagccccuaccgcacgcugauguccugcccgaucggcgagguccccagccccuacaacagccgguucgaguccguggccuggagcgcguccgccugccacgacgggaucaacuggcucaccaucggcaucagcggccccgacaacggggccguggccguccugaaguacaacggcaucaucaccgacaccaucaaguccuggcgcaacaacauccugcggacgcaggagagcgagugcgcgugcgugaacggguccugcuucaccaucaugaccgacggcccgagcgacggccaggccuccuacaagaucuuccgcaucgagaaggggaagaucgucaagagcguggagaugaaggcccccaacuaccacuacgaggagugcuccugcuaccccgacagcuccgagaucacgugcgugugccgggacaacuggcacggcagcaaccgccccuggguguccuucaaccagaaccucgaguaccagaucggguacaucugcagcggcaucuucggggacaacccgcggcccaacgacaagaccggcuccugcggccccgucagcuccaacggggccaacggcgugaagggguucagcuucaaguacggcaacgggguguggaucggccgcaccaagagcaucuccagccggaagggcuucgagaugaucugggaccccaacggguggaccggcaccgacaacaacuucuccaucaagcaggacaucgucgggaucaacgaguggagcggcuacuccgggagcuucgugcagcacccggagcugacgggccuggacugcauccgccccugcuucuggguggagcucauccggggccgccccaaggagaacaccaucuggaccuccgggagcuccaucagcuucugcggcgucaacuccgacaccgugggguggagcuggcccgacggcgccgagcugccguucacgaucgacaaguga

SEQ ID NO: 89567 - RNA, 1410 nt, Artificial Sequence
  derived and/or modified CDS sequence (opt1) from neuraminidase__InfluenzaA__AID70520
augaaccccaaccagaagaucaucaccaucggcagcgugugcaugaccaucgggauggccaaccugauccuccagaucggcaacaucaucuccaucuggaucagccacuccauccagcugcgcaaccagagccagaucgagacgugcaaccaguccgucaucaccuacgagaacaacaccugggugaaccagaccuacgugaacaucagcaacacgaacuucgccgcggggcaguccgucgugagcgugaagcuggccggcaacuccagccucugcccggucuccgggugggccaucuacagcaaggacaacuccauccggaucggcagcaagggcgacguguucgugauccgcgagcccuucaucuccugcagcccccuggagugccggaccuucuuccugacccagggggcccuccugaacgacaagcacuccaacggcaccaucaaggaccgcagccccuaccggacgcugauguccugcccgaucggggagguccccagccccuacaacagccgcuucgaguccguggccuggagcgcguccgccugccacgacggcaucaacuggcucaccaucgggaucagcggccccgacaacggcgccguggccguccugaaguacaacgggaucaucaccgacaccaucaaguccuggcggaacaacauccugcgcacgcaggagagcgagugcgcgugcgugaacggcuccugcuucaccaucaugaccgacgggccgagcgacggccaggccuccuacaagaucuuccggaucgagaagggcaagaucgucaagagcguggagaugaacgcccccaacuaccacuacgaggagugcuccugcuaccccgacagcuccgagaucacgugcgugugccgcgacaacuggcacgggagcaaccggcccuggguguccuucaaccagaaccucgaguaccagaucggcuacaucugcagcgggaucuucggcgacaacccgcgccccaacgacaagaccggguccugcggccccgucagcuccaacggcgccaacggggugaagggcuucagcuucaaguacgggaacggcguguggaucgggcggaccaagagcaucuccagccgcaagggcuucgagaugaucugggaccccaacggcuggaccgggaccgacaacaacuucuccaucaagcaggacaucgucggcaucaacgaguggagcggguacuccggcagcuucgugcagcacccggagcugacggggcuggacugcauccggcccugcuucuggguggagcucauccgcggccggcccaaggagaacaccaucuggaccuccggcagcuccaucagcuucugcggggucaacuccggcaccgugggguggagcuggcccgacggcgccgagcugccguucacgaucgacaaguga

SEQ ID NO: 89568 - RNA, 1410 nt, Artificial Sequence
  derived and/or modified CDS sequence (opt1) from neuraminidase__InfluenzaA__AID70521
augaaccccaaccagaagaucaucaccaucggcagcgugucccugaccaucagccgcaucugcuucuucaugcagaucgccauccucaucaacacggucacccugcacuucaagcaguacgaguucaacuccccgcccaacaaccaggugaugcugugcgagcccaccaucaucgagcggaacaucaccaagaucguguaccucacgaacaccaccaucgagaaggagaucugccccaagcuggccgaguaccgcagcugguccaagccgcagugcgacaucaccggguucgcgcccuucagcaaggacaacuccauccggcugagcgccggcggggacaucugggucacgcgcgagcccuacguguccugcgaccccgacaagugcuuccaguucgcccucggccaggggaccacccugaacaacgugcacagcaacgacaccguccacgaccggacgccguaccgcacccugcucaugaacgagcugggcgugcccuuccaccugggcaccaagcaggucugcaucgccugguccagcuccagcugccacgacgggaaggccuggcuccacgugugcaucaccggcgacgacaagaacgcgacggccuccaucaucuacaacgggcggcugguggacagcaucguguccuggagcaagaagauccugcgcacccaggaguccgagugcgucugcaucaacgggaccugcaccguggugaugacggacgggagcgccagcggcaaggccgacaccaagauccucuucaucgaggagggcaagaucguccacaccuccacccugagcggguccgcgcagcacguggaggagugcagcugcuacccccgguaccccggcgugcgcugcgucugccgggacaacuggaagggguccaaccgcccgaucguggacaucaacaucaaggacuacagcaucguguccagcuacgucugcuccggcuucgugggcgacacgccccggaagcccgaccgcagcuccagcucccacugccuggaccccaacaacgaggagggcggccacggggugaagggcugggccuucgacgacgggaacgacgucuggaugggccggaccaucagcgagaagucccgccucggcuacgagaccuucaaggugaucgggggcuggagcaacccgaacuccaagagccagaucaaccggcaggucaucguggaccgcgggaaccgguccggcuacagcgggaucuucagcguggagggcaaguccugcaucaaccgcugcuucuacgucgagcugauccggggccgcaaggacgagaccgaggugcuguggacgagcaacuccaucguggucuucugcgggaccagcggcaccuacgggaccggcuccuggcccgacggggccgacaucaaccucaugcccaucuga

SEQ ID NO: 89569 - RNA, 1410 nt, Artificial Sequence
  derived and/or modified CDS sequence (opt1) from neuraminidase__InfluenzaA__AID70522
augaaccccaaccagaagaucaucaccaucggcagcgugucccugaccaucagcacgaucugcuucuucaugcagaucgccauccucaucaccaccgucacccugcacuuccgccaguacgaguucaacuccccgcccaacaaccaggugaugcugugcgagcccacgaucaucgagcggaacaucaccgagaucguguaccucaccaacaccacgaucgagaaggagaucugccccaagcuggccgaguaccgcaacuggagcaagccgcagugcgacaucaccggguucgcgcccuucuccaaggacaacagcauccggcuguccgccggcggggacaucugggucacccgcgagcccuacgugagcugcgaccccgacaagugcuaccaguucgcccucggccaggggaccacgcugaacaacgugcacuccaacaacaccguccgggaccgcaccccguaccggacccugcucaugaacgagcugggcgugcccuuccaccugggcacgaagcaggucugcaucgccuggagcuccagcuccugccacgacgggaaggccuggcuccacgugugcaucaccggcgacgacaagaacgcgaccgccagcuucaucuacaacgggcgccugguggacuccguggucagcugguccaaggagauccugcggacccaggagagcgagugcgugugcaucaacggcacgugcaccguggucaugaccgacggguccgccagcggcaaggccgacaccaagauccucuucaucgaggagggcaagaucgugcacacgagcacccuguccgggagcgcgcagcacguggaggagugcuccugcuacccccgcuaccccggcguccggugcgugugccgcgacaacuggaaggggagcaaccggccgaucguggacaucaacaucaaggaccacuccaucgucagcuccuacgugugcagcggccuggugggcgacacgccccgcaagaacgacuccagcuccagcucccacugccucgaccccaacaacgaggagggcgggcacggggucaagggcugggccuucgacgacgggaacgacguguggaugggccggaccaucaacgagaccagccgccugggcuacgagaccuucaaggucaucgaggggugguccaaccccaagagcaagcugcagaucaaccgccaggugaucguggaccggggcaaccgguccggguacagcggcaucuucuccgucgagggcaagagcugcaucaaccgcugcuucuacguggagcucauccgggggcgcaaggaggagaccgaggugcuguggaccagcaacuccaucgucguguucugcggcacgagcgggaccuacggcaccggguccuggccggacggcgccgaccugaaccucaugcccaucuga

SEQ ID NO: 89570 - RNA, 1410 nt, Artificial Sequence
  derived and/or modified CDS sequence (opt1) from neuraminidase__InfluenzaA__AID70523
augaaccccaaccagaagaucaagaccaucggcagcgugucccugaccaacagcacgaucugcaucuucaugcagaucgccauccucaucaccaccgucacccugcacuucaagcaguacgaguucaacuccccgcccaacaaccaggugaugcugugcgagcccacgaucaucgagcgcaacaucaccgagaucguguaccucaccaacaccacgaucgagaaggagaucugccccaagcuggccgaguaccggaacuggagcaagccgcagugcgacaucaccggguucgcgcccuucuccaaggacaacagcauccgccuguccgccggcggggacaucugggucacccgggagcccuacgugagcugcgaccccgacaagugcuaccaguucgcccucggccaggggaccacgcugaacaacgugcacuccaacaacaccguccgcgaccggaccccguaccgcacccugcucaugaacgagcugggcgugcccuuccaccugggcacgaagcaggucugcaucgccuggagcuccagcuccugccacgacgggaaggccuggcuccacgugugcaucaccggcgacgacaagaacgcgaccgccagcuucaucuacaacgggcggcugguggacuccguggucagcugguccaaggagauccugcgcacccaggagagcgagugcgugugcaucaacggcacgugcaccguggucaugaccgacggguccgccagcggcaaggccgacaccaagauccucuucaucgaggagggcaagaucgugcacacgagcacccuguccgggagcgcgcagcacguggaggagugcuccugcuacccccgguaccccggcguccgcugcgugugccgggacaacuggaaggggagcaaccgcccgaucguggacaucaacaucaaggaccacuccaucgucagcuccuacgugugcagcggccuggugggcgacacgccccggaagaacgacuccagcuccagcucccacugccucgaccccaacaacgaggagggcgggcacggggucaagggcugggccuucgacgacgggaacgacguguggaugggccgcaccaucaacgagaccagccggcugggcuacgagaccuucaaggucaucgaggggugguccaaccccaagagcaagcugcagaucaaccgccaguucaucguggaccggggcaaccgcuccggguacagcggcaucuucuccguggagggcaagagcugcaucaaccggugcuucuacgucgagcucauccgcgggcggaaggaggagaccgaggugcuguggaccagcaacuccaucguggucuucugcggcacgagcgggaccuacggcaccggguccuggccggacggcgccgaccugaaccucaugcccaucuga

SEQ ID NO: 89571 - RNA, 1410 nt, Artificial Sequence
  derived and/or modified CDS sequence (opt1) from neuraminidase__InfluenzaA__AID70524
augaaccccaaccagaagaucaucaccaucggcgccguguggcgcaccaucagcacgaucugcuucuucaugcagaucgccuuccugaucaccaccgucacccuccacuucaagcaguacgaguucaacuccccgcccaacaaccaggugaugcccugcgagcccacgaucaucgagcggaacaucaccgagaucguguaccugaccaacaccacgaucgagaaggagaucugcccgaagcuggcggaguaccgcaacuggagcaagccccagugcgacaucaccggguucgcccccuucuccaaggacaacagcauccggcucuccgccggcggggacaucugggucacccgcgagcccuacgugagcugcgacccggacaagugcuaccaguucgcccugggccaggggaccacgcugaacaacgugcacuccaacaacaccguccgggaccgcacccccuaccggacccuccugaugaacgagcugggcgugcccuuccaccucggcacgaagcaggucugcaucgccuggagcuccagcuccugccacgacgggaaggcguggcugcacgugugcaucaccggcgacgacaagaacgccaccgccagcuucaucuacaacgggcgccugguggacuccguggucagcugguccaaggagauccuccggacccaggagagcgagugcgugugcaucaacggcacgugcaccguggucaugaccgacggguccgccagcggcaaggcggacaccaagauccuguucaucgaggagggcaagaucgugcacacguccacccugagcgggagcgcccagcacguggaggagugcuccugcuacccccgcuacccgggcguccggugcgugugccgcgacaacuggaaggggagcaaccggcccaucguggacaucaacaucaaggaccacuccaucgucagcuccuacgugugcagcggccucgugggcgacaccccgcgcaagaacgacuccagcuccagcucccacugccuggaccccaacaacgaggagggcgggcacggggucaagggcugggccuucgacgacgggaacgacguguggaugggccggaccaucaacgagacgagccgccugggcuacgagaccuucaaggucaucgaggggugguccaaccccaagagcaagcuccagaucaaccgccaggugaucguggaccggggcaaccgguccggguacagcggcaucuucuccgucgagggcaagagcugcaucaaccgcugcuucuacguggagcugauccgggggcgcaaggaggagaccgaggugcuguggaccuccaacagcaucgucguguucugcggcacgagcgggaccuacggcaccggguccuggcccgacggcgccgaccucaaccugaugcccaucuga

SEQ ID NO: 89572 - RNA, 1410 nt, Artificial Sequence
  derived and/or modified CDS sequence (opt1) from neuraminidase__InfluenzaA__AID70525
augaaccccaaccagaagaucaucaccaucggcagcgugucccugaccaucuggaucaucugcuucuucaugcagaucgccauccucaucacgaccgucacccugcacuucaagcaguacgaguucaacagcccgcccaacaaccaggugaugcugugcgagcccaccaucaucgagcgcaacaucacggagaucguguaccucaccaacaccaccaucgagaaggagaucugccccaagcuggccgaguaccggaacugguccaagccgcagugcgacaucacgggguucgcgcccuucagcaaggacaacuccauccgccugagcgccggcggggacaucugggucacccgggagcccuacguguccugcgaccccgacaagugcuaccaguucgcccucggccaggggaccacccugaacaacgugcacagcaacaacacgguccgcgaccggaccccguaccgcacccugcucaugaacgagcugggcgugcccuuccaccugggcaccaagcaggucugcaucgccugguccagcuccagcugccacgacgggaaggccuggcuccacgugugcaucacgggcgacgacaagaacgcgaccgccuccuucaucuacaacgggcggcugguggacagcguggucuccuggagcaaggagauccugcgcacccaggaguccgagugcgugugcaucaacgggaccugcacgguggucaugaccgacgggagcgccuccggcaaggccgacaccaagauccucuucaucgaggagggcaagaucgugcacaccagcacgcugagcggguccgcgcagcacguggaggagugcagcugcuacccccgguaccccggcguccgcugcgugugccgggacaacuggaagggguccaaccgcccgaucguggacaucaacaucaaggaccacagcaucgucuccagcuacgugugcuccggccuggugggcgacacgccccggaagaacgacagcuccagcuccagccacugccucgaccccaacaacgaggagggcggccacggggucaagggcugggccuucgacgacgggaacgacguguggaugggccgcaccaucaacgagaccucccggcugggcuacgagaccuucaaggucaucgagggguggagcaaccccaaguccaagcugcagaucaaccgccaggugaucguggaccggggcaaccgcagcggguacuccggcaucuucagcgucgaggggaaguccugcaucaaccggugcuucuacguggagcucauccgcggccggaaggaggagaccgaggugcuguggaccagcaacagcaucgucguguucugcggcaccuccgggacguacggcaccgggagcuggccggacggcgccgaccugaacaucaugcccaucuga

SEQ ID NO: 89573 - RNA, 1410 nt, Artificial Sequence; identical to SEQ ID NO: 83542
  derived and/or modified CDS sequence (opt1) from neuraminidase__InfluenzaA__AID70526

SEQ ID NO: 89574 - RNA, 1410 nt, Artificial Sequence
  derived and/or modified CDS sequence (opt1) from neuraminidase__InfluenzaA__AID70527
augaaccccaaccagaagaucaucaccaucggcagcgugucccugaccauguggaucaucugcuucuucaugcagaucgccauccucaucacgaccgucacccugcacuucaagcaguacgaguucaacagcccgcccaacaaccaggugaugcugugcgagcccaccaucaucgagcgcaacaucacggagaucguguaccucaccaacaccaccaucgagaaggagaucugccccaagcuggccgaguaccggaacugguccaagccgcagugcgacaucacgggguucgcgcccuucagcaaggacaacuccauccgccugagcgccggcggggacaucugggucacccgggagcccuacguguccugcgaccccgacaagugcuaccaguucgcccucggccaggggaccacccugaacaacgugcacagcaacaacacgguccgcgaccggaccccguaccgcacccugcucaugaacgagcugggcgugcccuuccaccugggcaccaagcaggucugcaucgccugguccagcuccagcugccacgacgggaaggccuggcuccacgugugcaucacgggcgacgacaagaacgcgaccgccuccuucaucuacaacgggcggcugguggacagcguggucuccuggagcaaggagauccugcgcacccaggaguccgagugcgugugcaucaacgggaccugcacgguggucaugaccgacgggagcgccuccggcaaggccgacaccaagauccucuucaucgaggagggcaagaucgugcacaccagcacgcugagcggguccgcgcagcacguggaggagugcagcugcuacccccgguaccccggcguccgcugcgugugccgggacaacuggaagggguccaaccgcccgaucguggacaucaacaucaaggaccacagcaucgucuccagcuacgugugcuccggccuggugggcgacacgccccggaagaacgacagcuccagcuccagccacugccucgaccccaacaacgaggagggcggccacggggucaagggcugggccuucgacgacgggaacgacguguggaugggccgcaccaucaacgagaccucccggcugggcuacgagaccuucaaggucaucgagggguggagcaaccccaaguccaagcugcagaucaaccgccaggugaucguggaccggggcaaccgcagcggguacuccggcaucuucagcgucgaggggaaguccugcaucaaccggugcuucuacguggagcucauccgcggccggaaggaggagaccgaggugcuguggaccagcaacagcaucgucguguucugcggcaccuccgggacguacggcaccgggagcuggccggacggcgccgaccugaaccucaugcccaucuga

SEQ ID NO: 89575 - RNA, 1410 nt, Artificial Sequence
  derived and/or modified CDS sequence (opt1) from neuraminidase__InfluenzaA__AID70528
augaaccccaaccagaagaucaucaccaucggcagcgugucccugagcaucuccaccaucugcuucuucaugcagaucgccauccucaucacgaccgucacccugcacuucaagcaguacgaguucaacagcccgcccaacaaccaggugaugcugugcgagcccaccaucaucgagcgcaacaucacggagaucguguaccucaccaacaccaccaucgagaaggagaucugccccaagcuggccgaguaccggaacugguccaagccgcagugcgacaucacgggguucgcgcccuucagcaaggacaacuccauccgccugagcgccggcggggacaucugggucacccgggagcccuacguguccugcgaccccgacaagugcuaccaguucgcccucggccaggggaccacccugaacaacgugcacagcaacaacacgguccgcgaccggaccccguaccgcacccugcucaugaacgagcugggcgugcccuuccaccugggcaccaagcaggucugcaucgccugguccagcuccagcugccacgacgggaaggccuggcuccacgugugcaucacgggcgacgacaagaacgcgaccgccuccuucaucuacaacgggcggcugguggacagcguggucuccuggagcaaggagauccugcgcacccaggaguccgagugcgugugcaucaacgggaccugcacgguggucaugaccgacgggagcgccagcggcaaggccgacaccaagauccucuucaucgaggagggcaagaucgugcacaccuccacgcugagcggguccgcgcagcacguggaggagugcagcugcuacccccgguaccccggcguccgcugcgugugccgggacaacuggaagggguccaaccgcccgaucguggacaucaacaucaaggaccacagcaucgucuccagcuacgugugcuccggccuggugggcgacacgccccggaagaacgacagcuccagcuccagccacugccucgaccccaacaacgaggagggcggccacggggucaagggcugggccuucgacgacgggaacgacguguggaugggccgcaccaucaacgagaccucccggcugggcuacgagaccuucaaggucaucgagggguggagcaaccccaaguccaagcugcagaucaaccgccaggugaucguggaccggggcaaccgcagcggguacuccggcaucuucagcgucgagggcaagagcugcaucaaccggugcuucuacguggagcucauccgcgggcggaaggaggagaccgaggugcuguggaccuccaacagcaucgucguguucugcggcaccuccgggacguacggcaccgggagcuggccggacggcgccgaccugaaccucaugcccaucuga

SEQ ID NO: 89576 - RNA, 1410 nt, Artificial Sequence; identical to SEQ ID NO: 83542
  derived and/or modified CDS sequence (opt1) from neuraminidase__InfluenzaA__AID70529

SEQ ID NO: 89577 - RNA, 1410 nt, Artificial Sequence
  derived and/or modified CDS sequence (opt1) from neuraminidase__InfluenzaA__AID70530
augaaccccaaccagaagaucaucaccaucggcagcgugucccugaccaucagcacgaucugcuucuucaugcagaucgccauccucaucaccaccgucacccugcacuucaagcaguacgaguucaacuccccgcccaacaaccaggugaugcugugcgagcccacgaucaucgagcgcaacaucaccgagaucguguaccucaccaacaccacgaucgagaaggagaucugccccaagcuggccgaguaccggaacuggagcaagccgcagugcgacaucaccggguucgcgcccuucuccaaggacaacagcauccgccuguccgccggcggggacaucugggucacccgggagcccuacgugagcugcgaccccgacaagugcuaccaguucgcccucggccaggggaccacgcugaacaacgugcacuccaacaacaccguccgcgaccggaccccguaccgcacccugcucaugaacgagcugggcgugcccuuccaccugggcacgaagcaggucugcaucgccuggagcuccagcuccugccacgacgggaaggccuggcuccacgugugcaucaccggcgacgacaagaacgcgaccgccagcuucaucuacaacgggcggcugguggacuccguggucagcugguccaaggagauccugcgcacccaggagagcgagugcgugugcaucaacggcacgugcaccguggucaugaccgacggguccgccagcggcaaggccgacaccaagauccucuucaucgaggagggcaagaucgugcacacgagcacccuguccgggagcgcgcagcacguggaggagugcuccugcuacccccgguaccccggcguccgcugcgugugccgggacaacuggaaggggagcaaccgcccgaucguggacaucaacaucaaggaccacuccaucgucagcuccuacgugugcagcggccuggugggcgacacgccccggaagaacgacuccagcuccagcucccacugccucgaccccaacaacgaggagggcgggcacggggucaagggcugggccuucgacgacgggaacgacguguggaugggccgcaccaucaacgagaccagccggcugggcuacgagaccuucaaggucaucgaggggugguccaaccccaagagcaagcugcagaucaaccgccaggugaucguggaccggggcaaccgcuccggguacagcggcaucuucuccgucgagggcaagagcugcaucaaccggugcuucuacguggagcucauccgcgggcggaaggaggagaccgaggugcuguggaccagcaacuccaucgucguguucugcggcacgagcgggaccuacggcaccggguccuggccggacggcgccgaccugaacaucaugcccaucuga

SEQ ID NO: 89578 - RNA, 1410 nt, Artificial Sequence; identical to SEQ ID NO: 83542
  derived and/or modified CDS sequence (opt1) from neuraminidase__InfluenzaA__AID70531

SEQ ID NO: 89579 - RNA, 1410 nt, Artificial Sequence
  derived and/or modified CDS sequence (opt1) from neuraminidase__InfluenzaA__AID70532
augaaccccaaccagaagaucaucaccaucggcagcgugucccugaccaucagcacgaucugcuucuucaugcagaucgccauccucaucaccaccgucacccugcacuucaagcaguacgaguucaacuccccgcccaacaaccaggugaugcugugcgagcccacgaucaucgagcgcaacaucaccgagaucguguaccucaccaacaccacgaucgagaaggagaucugccccaagcuggccgaguaccggaacuggagcaagccgcagugcgacaucaccggguucgcgcccuucuccaaggacaacagcauccgccuguccgccggcggggacaucugggucacccgggagcccuacgugagcugcgaccccgacaagugcuaccaguucgcccucggccaggggaccacgcugaacaacgugcacuccaacaacaccguccgcgaccggaccccguaccgcacccugcucaugaacgagcugggcgugcccuuccaccugggcacgaagcaggucugcaucgccuggagcuccagcuccugccacgacgggaaggccuggcuccacgugugcaucaccggcgacgacaagaacgcgaccgccagcuucaucuacaacgggcggcugguggacuccguggucagcugguccaaggagauccugcgcacccaggagagcgagugcgugugcaucaacggcacgugcaccguggucaugaccgacggguccgccagcggcaaggccgacaccaagauccucuucaucgaggagggcaagaucgugcacacgagcacccuguccgggagcgcgcagcacguggaggagugcuccugcuacccccgguaccccggcguccgcugcgugugccgggacaacuggaaggggagcaaccgcccgaucguggacaucaacaucaaggaccacuccaucgucagcuccuacgugugcagcggccuggugggcgacacgccccggaagaacgacuccagcuccagcucccacugccucgaccccaacaacgaggagggcgggcacggggucaagggcugggccuucgacgacgggaacgacguguggaugggccgcaccaucaacgagaccagccggcugggcuacgagacccugaaggucaucgaggggugguccaaccccaagagcaagcuccagaucaaccgccaggugaucguggaccggggcaaccgcuccggguacuacggcaucuucagcgucgaggggaaguccugcaucaaccggugcuucuacguggagcugaucuggggccgcaaggaggagaucgaggugcuguggaccagcaacagcaaggucguguucugcggcaccuccgggacguacggcaccgggagcuccccggacggcgccgaccucaacuucaugcccaucuga

SEQ ID NO: 89580 - RNA, 1410 nt, Artificial Sequence
  derived and/or modified CDS sequence (opt1) from neuraminidase__InfluenzaA__AID70533
augaaccccaaccagaagaucaucaccaucggcagcgugucccuggccaucagcaccaucugcuucuucaugcagaucgccauccucaucacgaccgucacccugcacuucaagcaguacgaguucaacuccccgcccaacaaccaggugaugcugugcgagcccaccaucaucgagcgcaacaucacggagaucguguaccucaccaacaccaccaucgagaaggagaucugccccaagcuggcggaguaccggaacuggagcaagccgcagugcgacaucacgggguucgcccccuucuccaaggacaacagcauccgccuguccgccggcggggacaucugggucacccgggagcccuacgugagcugcgaccccgacaagugcuaccaguucgcccucggccaggggaccacccugaacaacgugcacuccaacaacacgguccgcgaccggaccccguaccgcacccugcucaugaacgagcugggcgugcccuuccaccugggcaccaagcaggucugcaucgccuggagcuccagcuccugccacgacgggaaggcguggcuccacgugugcaucacgggcgacgacaagaacgccaccgccagcuucaucuacaacgggcggcugguggacuccguggucagcugguccaaggagauccugcgcacccaggagagcgagugcgugugcaucaacgggaccugcacgguggucaugaccgacggguccgccagcggcaaggcggacaccaagauccucuucaucgaggagggcaagaucgugcacaccagcacgcuguccgggagcgcccagcacguggaggagugcuccugcuacccccgguaccccggcguccgcugcgugugccgggacaacuggaaggggagcaaccgcccgaucguggacaucaacaucaaggaccacuccaucgucagcuccuacgugugcagcggccuggugggcgacacgccccggaagaacgacuccagcuccagcucccacugccucgaccccaacaacgaggagggcggccacggggucaagggcugggccuucgacgacgggaacgacguguggaugggccgcaccaucaacgagaccagccggcugggcuacgagaccuucaaggucaucgaggggugguccaaccccaagagcaagcugcagaucaaccgccaggugaucguggaccggggcaaccgcuccggguacagcggcaucuucuccgucgagggcaagagcugcaucaaccggugcuucuacguggagcucauccgcgggcggaaggaggagaccgaggugcuguggaccagcaacuccaucgucguguucugcggcaccagcgggacguacggcaccggguccuggccggacggcgccgaccugaaccucaugcccaucuga

SEQ ID NO: 89581 - RNA, 1410 nt, Artificial Sequence
  derived and/or modified CDS sequence (opt1) from neuraminidase__InfluenzaA__AID70534
augaaccccaaccagaagaucaucaccaucggcagcgugucccugagcaucuacaucaucugcuucuucaugcagaucgccauccucaucaccacggucacccugcacuucaagcaguacgaguucaacuccccgcccaacaaccaggccaugcccugcgagcccaccaucaucgagcgcaacaucaccgagaucguguaccugacgaacaccaccaucgagaaggagaucugcccgaagcucgcggaguaccggaacuggagcaagccccagugcgacaucaccggguucgcccccuucuccaaggacaacagcauccgccuguccgccggcggggacaucugggugacgcgggagcccuacgucagcugcgacccggacaagugcuaccaguucgcccugggccaggggaccacccucaacaacgugcacuccaacaacaccgugcgcgaccggacgcccuaccgcacccugcugaugaacgagcucggcguccccuuccaccugggcaccaagcaggucugcaucgccuggagcuccagcuccugccacgacgggaaggcguggcugcacgugugcaucaccggcgacgacaagaacgccacggccagcuucaucuacaacgggcggcucguggacuccguggugagcugguccaaggagauccugcgcacccaggagagcgagugcgucugcaucaacgggaccugcaccguggugaugacggacggguccgccagcggcaaggcggacaccaagauccuguucaucgaggagggcaagaucguccacaccagcacccucuccgggagcgcccagcacguggaggagugcuccugcuacccccgguacccgggcgugcgcugcgucugccgggacaacuggaaggggagcaaccgccccaucguggacaucaacaucaaggaccacuccaucgugagcuccuacgucugcagcggccuggugggcgacacgccccggaagaacgacuccagcuccagcucccacugccuggaccccaacaacgaggagggcggccacggggugaagggcugggccuucgacgacgggaacgacgucuggaugggccgcaccaucaacgagaccagccggcucggcuacgagaccuucaaggugaucgaggggugguccaaccccaagagcaagcugcagaucaaccgccaggucaucguggaccggggcaaccgcuccggguacagcggcaucuucuccguggagggcaagagcugcaucaaccggugcuucuacgucgagcugauccgcgggcggaaggaggagacggaggugcucuggaccagcaacuccaucguggucuucugcggcaccagcgggaccuacggcacgggguccuggccggacggcgccgaccugaaccugaugcccaucuga

SEQ ID NO: 89582 - RNA, 1410 nt, Artificial Sequence
  derived and/or modified CDS sequence (opt1) from neuraminidase__InfluenzaA__AID70535
augaaccccaaccagaagaucaucaccaucggcagcgugucccuggccaugugcaccaucugcuucuucaugcagaucgccauccucaucacgaccgucacccugcacuucaagcaguacgaguucaacagcccgcccaacaaccaggcgaugcccugcgagcccaccaucaucgagcgcaacaucacggagaucguguaccugaccaacaccaccaucgagaaggagaucugcccgaagcucgccgaguaccggaacugguccaagccccagugcgacaucacgggguucgcccccuucagcaaggacaacuccauccgccugagcgccggcggggacaucugggugacccgggagcccuacgucuccugcgacccggacaagugcuaccaguucgcccugggccaggggaccacccucaacaacgugcacagcaacaacacggugcgcgaccggacccccuaccgcacccugcugaugaacgagcucggcguccccuuccaccugggcaccaagcaggucugcaucgcgugguccagcuccagcugccacgacgggaaggccuggcugcacgugugcaucacgggcgacgacaagaacgccaccgccuccuucaucuacaacgggcggcucguggacagcgugguguccuggagcaaggagauccugcgcacccaggaguccgagugcgucugcaucaacgggaccugcacgguggugaugaccgacgggagcgcguccggcaaggccgacaccaagauccuguucaucgaggagggcaagaucguccacaccagcacgcucagcggguccgcccagcacguggaggagugcagcugcuacccccgguacccgggcgugcgcugcgucugccgggacaacuggaagggguccaaccgccccaucguggacaucaacaucaaggaccacagcaucguguccagcuacgucugcuccggccuggugggcgacacgccccggaagaacgacagcuccagcuccagccacugccuggaccccaacaacgaggagggcggccacggggugaagggcugggccuucgacgacgggaacgacgucuggaugggccgcaccaucaacgagaccucccggcucggcuacgagaccuucaaggugaucgagggguggagcaacccgaaguccaagcugcagaucaaccgccaggucaucguggaccggggcaaccgcagcggguacuccggcaucuucagcguggaggggaaguccugcaucaaccggugcuucuacgucgagcugauccgcggccggaaggaggagaccgaggugcucuggaccagcaacagcaucguggucuucugcggcaccuccgggacguacggcaccgggagcuggcccgacggcgccgaccugaaccugaugcccaucuga

SEQ ID NO: 89583 - RNA, 1410 nt, Artificial Sequence
  derived and/or modified CDS sequence (opt1) from neuraminidase__InfluenzaA__AID70536
augaaccccaaccagaagaucaucaccaucggcagcgugucccugaccaucagcacggucugcuucuucaugcagaucgccauccucaucaccaccgugacccugcacuucaagcaguacgaguucaacuccccgcccaacaaccaggugaugcugugcgagcccacgaucaucgaccgcaacaucaccgagaucgucuaccucaccaacaccacgaucgagaaggagaucugccccaagcuggccgaguaccggaacuggagcaagccgcagugcgacaucaccggguucgcgcccuucuccaaggacaacagcauccgccuguccgccggcggggacaucugggugacccgggagcccuacgugagcugcgaccccgacaagugcuaccaguucgcccucggccaggggaccacgcugaacaacguccacuccaacaacaccgugcgcgaccggaccccguaccgcacccugcucaugaacgagcugggcgugcccuuccaccugggcacgaagcaggucugcaucgccuggagcuccagcuccugccacgacgggaaggccuggcuccacgugugcaucaccggcgacgacaagaacgcgaccgccagcuucaucuacaacgggcggcugguggacuccgucgugagcugguccaaggagauccugcgcacccaggagagcgagugcgugugcaucaacggcacgugcaccgucgugaugaccgacggguccgccagcggcaaggccgacaccaagauccucuucaucgaggagggcaagaucgugcacacgagcacccuguccgggagcgcgcagcacgucgaggagugcuccugcuacccccgguaccccggcgugcgcugcgugugccgggacaacuggaaggggagcaaccgcccgaucgucgacaucaacaucaaggaccacuccaucgugagcuccuacgugugcagcggccuggucggcgacacgccccggaagaacgacuccagcuccagcucccacugccucgaccccaacaacgaggagggcgggcacggggugaagggcugggccuucgacgacgggaacgacgucuggaugggccgcaccaucaacgagaccagccggcugggcuacgagaccuucaaggugaucgaggggugguccaaccccaagagcaagcugcagaucaaccgccaggugaucgucgaccggggcaaccgcuccggguacagcggcaucuucuccguggagggcaagagcugcaucaaccggugcuucuacguggagcucauccgcgggcggaaggaggagaccgagguccuguggaccagcaacuccaucgugguguucugcggcacgagcgggaccuacggcaccggguccuggccggacggcgccgaccugaaccucaugcccaucuga

SEQ ID NO: 89584 - RNA, 1410 nt, Artificial Sequence; identical to SEQ ID NO: 83542
  derived and/or modified CDS sequence (opt1) from neuraminidase__InfluenzaA__AID70537

SEQ ID NO: 89585 - RNA, 1410 nt, Artificial Sequence
  derived and/or modified CDS sequence (opt1) from neuraminidase__InfluenzaA__AID70538
augaaccccaaccagaagaagaucaccaucggcgccgugagccugaccaugugcacggucugcaucuucaugcagaucgccauccucaucaccaccgugacccugcacuuccgccaguacgaguucaacuccccgcccaacaaccaggugaugcugugcgagcccacgaucaucgagcggaacaucaccgagaucgucuaccucaccaacaccacgaucgagaaggagaucugccccaagcuggcggaguaccgcaacuggagcaagccgcagugcgacaucaccggguucgcccccuucuccaaggacaacagcauccggcuguccgccggcggggacaucugggugacccgcgagcccuacgugagcugcgaccccgacaagugcuaccaguucgcccucggccaggggaccacgcugaacaacguccacuccaacaacaccgugcgggaccgcaccccguaccggacccugcucaugaacgagcugggcgugcccuuccaccugggcacgaagcaggucugcaucgccuggagcuccagcuccugccacgacgggaaggcguggcuccacgugugcaucaccggcgacgacaagaacgccaccgccagcuucaucuacaacgggcgccugguggacuccgucgugagcugguccaaggagauccugcggacccaggagagcgagugcgugugcaucaacggcacgugcaccgucgugaugaccgacggguccgccagcggcaaggcggacaccaagauccucuucaucgaggagggcaagaucgugcacacguccacccugagcgggagcgcccagcacgucgaggagugcuccugcuacccccgcuaccccggcgugcggugcgugugccgcgacaacuggaaggggagcaaccggccgaucgucgacaucaacaucaaggaccacuccaucgugagcuccuacgugugcagcggccuggucggcgacacgccccgcaagaacgacuccagcuccagcucccacugccucgaccccaacaacgaggagggcgggcacggggugaagggcugggccuucgacgacgggaacgacgucuggaugggccggaccaucaacgagaccagccgccugggcuacgagaccuucaaggugaucgaggggugguccaaccccaagagcaagcugcagaucaaccgccaggugaucgucgaccggggcaaccgguccggguacagcggcaucuucuccguggagggcaagagcugcaucaaccgcugcuucuacguggagcucauccgggggcgcaaggaggagaccgagguccuguggaccuccaacagcaucgugguguucugcggcacgagcgggaccuacggcaccggguccuggccggacggcgccgaccugaaccucaugcccaucuga

SEQ ID NO: 89586 - RNA, 1410 nt, Artificial Sequence
  derived and/or modified CDS sequence (opt1) from neuraminidase__InfluenzaA__AID70539
augaaccccaaccagaagaucaucaccaucggcagcgugucccugaccaucagcacgaucugcuucuucaugcagaucgccauccucaucaccaccgucacccugcacuucaagcaguacgaguucaacuccccgcccaacaaccaggugaugcugugcgagcccacgaucaucgagcgcaacaucaccgagaucguguaccucaccaacaccacgaucgagaaggagaucugccccaagcuggccgaguaccggaacuggagcaagccgcagugcgacaucaccggguucgcgcccuucuccaaggacaacagcauccgccuguccgccggcggggacaucugggucacccgggagcccuacgugagcugcgaccccgacaagugcuaccaguucgcccucggccaggggaccacgcugaacaacgugcacuccaacaacaccguccgcgaccggaccccguaccgcacccugcucaugaacgagcugggcgugcccuuccaccugggcacgaagcaggucugcaucgccuggagcuccagcuccugccacgacgggaaggccuggcuccacgugugcaucaccggcgacgacaagaacgcgaccgccagcuucaucuacaacgggcggcugguggacuccguggucagcugguccaaggagauccugcgcacccaggagagcgagugcgugugcaucaacggcacgugcaccguggucaugaccgacggguccgccagcggcaaggccgacaccaagauccucuucaucgaggagggcaagaucgugcacacgagcacccuguccgggagcgcgcagcacguggaggagugcuccugcuacccccgguaccccggcguccgcugcgugugccgggacaacuggaaggggagcaaccgcccgaucguggacaucaacaucaaggaccacuccaucgucagcuccuacgugugcagcggccuggugggcgacacgccccggaagaacgacuccagcuccagcucccacugccucaaccccaacaacgaggagggcgggcacggggucaagggcugggccuucgacgacgggaacgacguguggaugggccgcaccaucaacgagaccagccggcugggcuacgagaccuucaaggucaucgaggggugguccaaccccaagagcaagcugcagaucaaccgccaggugaucguggaccggggcaaccgcuccggguacagcggcaucuucuccgucgagggcaagagcugcaucaaccggugcuucuacguggagcucauccgcgggcggaaggaggagaccgaggugcuguggaccagcaacuccaucgucguguucugcggcacgagcgggaccuacggcaccggguccuggccggacggcgccgaccugaaccucaugcccaucuga

SEQ ID NO: 89587 - RNA, 1410 nt, Artificial Sequence; identical to SEQ ID NO: 83542
  derived and/or modified CDS sequence (opt1) from neuraminidase__InfluenzaA__AID70540

SEQ ID NO: 89588 - RNA, 1410 nt, Artificial Sequence; identical to SEQ ID NO: 83542
  derived and/or modified CDS sequence (opt1) from neuraminidase__InfluenzaA__AID70541

SEQ ID NO: 89589 - RNA, 1410 nt, Artificial Sequence
  derived and/or modified CDS sequence (opt1) from neuraminidase__InfluenzaA__AID70633
augaaccccaaccagaagaucaucaccaucggcagcgugugcaugaccaucgggauggccaaccugauccuccagaucggcaacaucaucuccaucugggucagccacuccauccagcuggggaaccagagccagaucgaggccugcaaccaguccgugaucacguacgagaacaacaccugggugaaccagaccuacgucaacaucagcaacaccaacuucgcggccggccaguccguggugagcgucaagcuggccgggaacuccagccucugcccgguguccggcugggccaucuacagcaaggacaacuccgugcgcaucggcagcaagggggacgucuucgugauccgggagcccuucaucuccugcagcccccuggagugccgcacguucuuccugacccagggcgcccuccugaacgacaagcacuccaacgggaccaucaaggaccggagccccuaccgcacccugauguccugcccgaucggcgaggugcccagccccuacaacagccgguucgaguccgucgcguggagcgccuccgccugccacgacgggaucaacuggcucacgaucggcaucagcggccccgacuccggggccguggcggugcugaaguacaacggcaucaucaccgacaccaucaagagcuggcgcaacaacauccugcggacccaggaguccgagugcgccugcgucaacgggagcugcuucacgaucaugaccgacggcccguccgacggccaggccagcuacaagaucuuccgcaucgagaaggggaagaucgugaaguccguggagaugaacgcccccaacuaccacuacgaggagugcagcugcuaccccgacuccagcgagaucacgugcgucugccgggacaacuggcacggcuccaaccgccccugggugagcuucaaccagaaccucgaguaccagaucggguacaucugcuccggcguguucggggacaacccgcggcccaacgacaagaccggcagcugcggccccgucuccagcaacggggccaacggcgugaagggguucagcuucaaguacggcaacgggguguggaucggccgcaccaaguccaucagcucccggaagggcuucgagaugaucugggaccccaacggguggaccggcaccgacaacaaguucagcaucaagcaggacaucgucgggaucaacgagugguccggcuacagcggguccuucgugcagcacccggagcugaccggccuggacugcauccgccccugcuucugggucgagcucauccggggccgccccgaggagaacacgaucuggaccagcggguccagcaucuccuucugcggcgugaacagcgacaccguggggugguccuggcccgacggcgcggagcugccguucaccaucgacaaguga

SEQ ID NO: 89590 - RNA, 1398 nt, Artificial Sequence
  derived and/or modified CDS sequence (opt1) from neuraminidase__InfluenzaA__AID70635
augaaccccaagcagaagauccugugcaccagcgccaccgccaucaucaucggcgcgaucgccgugcucaucgggaucgccaaccugggccugaacaucgggcuccaccugaagccgggcugcaacugcucccacagccagcccgagacgaccaacaccucccagaccaucaucaacaacuacuacaacgagacgaacaucaccaacauccagauggaggagcgcaccagccggaacuucaacaaccugaccaaggggcucugcacgaucaacuccuggcacaucuacggcaaggacaacgccguccgcaucggcgagagcuccgacgugcuggugacccgggagcccuacgucagcugcgaccccgacgagugccgcuucuacgcccugucccaggggaccaccauccggggcaagcacagcaacgggacgauccacgacggcucccaguaccgcgcgcucaucagcuggccgcuguccagcccgcccaccguguacaacucccggguggagugcaucggguggagcuccaccagcugccacgacggcaagucccgcaugagcaucugcaucagcggccccaacaacaacgccuccgccgucgugugguacaaccggcgccccguggccgagaucaacaccugggcgcggaacauccugcgcacgcaggagagcgagugcgucugccacaacggggugugccccguggucuucaccgacggcuccgccaccgggcccgccgacacccggaucuacuacuucaaggagggcaagauccucaagugggagagccugacgggcaccgccaagcacaucgaggagugcuccugcuacggggagcgcaccggcaucacgugcacgugccgggacaacuggcaggggagcaaccgccccgugauccagaucgacccgguggccaugacccacaccucccaguacaucugcagccccguccugaccgacaacccccggcccaacgacccgaacaucggcaagugcaacgaccccuaccccgggaacaacaacaacggcgugaagggcuucuccuaccucgacggggcgaacaccuggcugggccgcaccaucagcaccgccucccggagcggguacgagaugcugaaggugcccaacgcccucaccgacgaccgcuccaagccgauccagggccagacgaucguccugaacgccgacuggagcggguacuccggcagcuucauggacuacugggccgagggcgacugcuaccgggcgugcuucuacguggagcugauccgcgggcgccccaaggaggacaaggugugguggaccuccaacagcaucgucuccaugugcagcagcaccgaguuccucggccaguggaacuggcccgacggggccaagaucgaguacuuccuguga

SEQ ID NO: 89591 - RNA, 1401 nt, Artificial Sequence
  derived and/or modified CDS sequence (opt1) from neuraminidase__InfluenzaA__AIG44695
augaaccccaaccagaagaucaccgccaucggcagcgugucccugaucaucgccaucaucugccuccugaugcagaucgcgauccugaccacgaccaugacccuccacuuccgccagaacgagugcagcaacccguccaacaaccaggucaugcccugcgagcccaucaucaucgagcggaacaccgugcaccugaacagcacgaccaucgagcgcgagaucugccccaagguggccgaguacaagaacugguccaagccgcagugccagaucaccggguucgcccccuucagcaaggacaacuccauccggcugagcgccuccggcgacaucugggucacccgcgagcccuacgugagcugcucccucgacaagugcuaccaguucgcccuggggcagggcacgacccugaagaacaagcacagcaacgggaccacccacgaccggacgccccaccgcacccuccugaugaacgagcugggcgugccguuccaccucggcaccaagcaggucugcaucgcgugguccagcuccagcugcuacgacgggaaggccuggcugcacgugugcgugaccggcgacgacaagaacgccacggccuccaucaucuacgacgggaugcuggucgacagcgugggcuccuggagcaagaacauccuccggacccaggagagcgagugcgugugcaucaacgggaccugcgcggucgugaugaccgacggcuccgccagcggcaaggccgacacgcgcgugcuguucauccgggaggggaagaucaucaacaucagcccccuguccggcuccgcccagcacgucgaggagugcagcugcuacccccgcuaccccgaggugcggugcgugugccgcgacaacuggaagggguccaaccggccgauccucuacaucaacauggccgacuacagcaucgaguccagcuacgucugcuccggccuggugggcgacacgccccgcaacgacgacagcuccagcuccagcaacugccgggaccccaacaacgagcgcggggcgcccggcgugaaggggugggccuucgacgacggcaacgacgucuggauggggcggaccaucaagaacggcucccgcagcggcuacgagaccuuccggguggugaacggguggaccauggccaacuccaagagccagaucaaccgccaggucaucguggacagcgacggcugguccggguacagcggcaucuucuccgucgaggggaagaagugcaucaaccggugcuucuacguggagcugauccgcggccgcccgcaggagccccgggugugguggaccagcaacuccaucaucgucuucugcggcaccagcgggaccuacggcacgggguccuggcccgacggcgccaacaucaacuucaugcccaucuga

SEQ ID NO: 89592 - RNA, 1410 nt, Artificial Sequence
  derived and/or modified CDS sequence (opt1) from neuraminidase__InfluenzaA__AIJ10793
augaaccccaaccagaagaucaucaccaucggcagcgugucccugaccaucagcacgaucugcuucuucaugcagaucgccauccucaucaccaccgucacccugcacuucaagcaguacgaguucaacuccccgcccaacaaccaggugaugcugugcgagcccacgaucaucgagcgcaacaucaccgagaucguguaccucaccaacaccacgaucgagaaggagaucugccccaagcuggccgaguaccggaacuggagcaagccgcagugcgacaucaccggguucgcgcccuucuccaaggacaacagcauccgccuguccgccggcggggacaucugggucacccgggagcccuacgugagcugcgaccccgacaagugcuaccaguucgcccucggccaggggaccacgcugaacaacgugcacuccaacaacaccguccgcgaccggaccccguaccgcacccugcucaugaacgagcugggcgugcccuuccaccugggcacgaagcaggucugcaucgccuggagcuccagcuccugccacgacgggaaggccuggcuccacgugugcaucaccggcgacgacaagaacgcgaccgccagcuucaucuacaacgggcggcugguggacuccguggucagcugguccaaggagauccugcgcacccaggagagcgagugcgugugcaucaacggcacgugcaccguggucaugaccgacggguccgccagcggcaaggccgacaccaagauccucuucaucgaggagggcaagaucgugcacacgagcacccuguccgggagcgcgcagcacguggaggagugcuccugcuacccccgguaccccggcguccgcugcgugugccgggacaacuggaaggggagcaaccgcccgaucguggacaucaacaucaaggaccacuccaucgucagcuccuacgugugcagcggccuggugggcgacacgccccggaagaacgacuccagcuccagcucccacugccucgaccccaacaacgaggagggcgggcacggggucaagggcugggccuucgacgacgggaacgacguguggaugggccgcaccaucaacgagaccagccggcugggcuacgagaccuucaaggccaucgaggggugguccaaccccaagagcaagcugcagaccaaccgccaggucaucguggaccggggcaaccgcuccggguacagcggcaucuucuccguggagggcaagagcugcaucaaccggugcuucuacgucgagcucauccgcgggcggaaggaggagaccgaggugcuguggacgagcaacuccaucguggucuucugcggcaccagcgggaccuacggcaccggguccuggccggacggcgccgaccugaaccucaugcccaucuga

SEQ ID NO: 89593 - RNA, 1410 nt, Artificial Sequence; identical to SEQ ID NO: 83542
  derived and/or modified CDS sequence (opt1) from neuraminidase__InfluenzaA__AIJ10794

SEQ ID NO: 89594 - RNA, 1410 nt, Artificial Sequence; identical to SEQ ID NO: 85167
  derived and/or modified CDS sequence (opt1) from neuraminidase__InfluenzaA__AIJ10795

SEQ ID NO: 89595 - RNA, 1410 nt, Artificial Sequence; identical to SEQ ID NO: 85167
  derived and/or modified CDS sequence (opt1) from neuraminidase__InfluenzaA__AIJ10796

SEQ ID NO: 89596 - RNA, 1410 nt, Artificial Sequence
  derived and/or modified CDS sequence (opt1) from neuraminidase__InfluenzaA__AIJ10797
augaaccccaaccagaagaucaucaccaucggcagcgugucccugaccaucagcacgaucugcuucuucaugcagaucgccauccucaucaccaccgucacccugcacuucaagcaguacgaguucaacuccccgcccaacaaccaggugaugcugugcgagcccacgaucaucgagcgcaacaucaccgagaucguguaccucaccaacaccacgaucgagaaggagaucugccccaagcuggccgaguaccggaacuggagcaagccgcagugcgacaucaccggguucgcgcccuucuccaaggacaacagcauccgccuguccgccggcggggacaucugggucacccgggagcccuacgugagcugcgaccccgacaagugcuaccaguucgcccucggccaggggaccacgcugaacaacgugcacuccaacaacaccguccgcgaccggaccccguaccgcacccugcucaugaacgagcugggcgugcccuuccaccugggcacgaagcaggucugcaucgccuggagcuccagcuccugccacgacgggaaggccuggcuccacgugugcaucaccggcgacgacaagaacgcgaccgccagcuucaucuacaacgggaagcugguggacuccguggucagcugguccaaggagauccugcggacccaggagagcgagugcgugugcaucaacggcacgugcaccguggucaugaccgacggguccgccagcggcaaggccgacaccaagauccucuucaucgaggagggcaagaucgugcacacgagcacccuguccgggagcgcgcagcacguggaggagugcuccugcuacccccgcuaccccggcguccggugcgugugccgcgacaacuggaaggggagcaaccggccgaucguggacaucaacaucaaggaccacuccaucgucagcuccuacgugugcagcggccuggugggcgacacgccccgcaagaacgacuccagcuccagcucccacugccucgaccccaacaacgaggagggcgggcacggggucaagggcugggccuucgacgacgggaacgacguguggaugggccggaccaucaacgagaccagccgccugggcuacgagaccuucaaggucaucgaggggugguccaaccccaagagcaagcugcagaucaaccgccaggugaucguggaccggggcaaccgguccggguacagcggcaucuucuccgucgaggacaagagcugcaucaaccgcugcuucuacguggagcucauccgggggcgcaaggaggagaccgaggugcuguggaccagcaacuccaucgucguguucugcggcacgagcggcaccuacgggaccggcuccuggccggacggggccgaccugaaccucaugcccaucuga

SEQ ID NO: 89597 - RNA, 1410 nt, Artificial Sequence
  derived and/or modified CDS sequence (opt1) from neuraminidase__InfluenzaA__AIJ10798
augaaccccaaccagaagaucaucaccaucggcagcgugucccugaccaucagcacgaucugcuucuucaugcagaucgccauccucaucaccaccgucacccugcacuucaagcaguacgaguucaacuccccgcccaacaaccaggugaugcugugcgagcccacgaucaucgagcgcaacaucaccgagaucguguaccucaccaacaccacgaucgagaaggagaucugccccacccuggccgaguaccggaacuggagcaagccgcagugcgacaucaccggguucgcgcccuucuccaaggacaacagcauccgccuguccgccggcggggacaucugggucacccgggagcccuacgugagcugcgaccccgacaagugcuaccaguucgcccucggccaggggacgacccugaacaacgugcacuccaacaacaccguccgcgaccggaccccguaccgcacgcugcucaugaacgagcugggcgugcccuuccaccugggcaccaagcaggucugcaucgccuggagcuccagcuccugccacgacgggaaggccuggcuccacgugugcaucaccggcgacgacaagaacgcgaccgccagcuucaucuacaacgggcggcugguggacuccguggucagcugguccaaggagauccugcgcacgcaggagagcgagugcgugugcaucaacgggaccugcaccguggucaugaccgacggguccgccagcggcaaggccgacacgaagauccucuucaucgaggagggcaagaucgugcacaccagcacccuguccgggagcgcgcagcacguggaggagugcuccugcuacccccgguaccccggcguccgcugcgugugccgggacaacuggaaggggagcaaccgcccgaucguggacaucaacaucaaggaccacuccaucgucagcuccuacgugugcagcggccuggugggcgacacgccccggaagaacgacuccagcuccagcucccacugccucgaccccaacaacgaggagggcggccacggggucaagggcugggccuucgacgacgggaacgacguguggaugggccgcaccaucaacgagaccagccggcugggcuacgagaccuucaaggucaucgaggggugguccaaccccaagagcaagcugcagaucaaccgccaggugaucguggaccggggcaaccgcuccggguacagcggcaucuucuccgucgagggcaagagcugcaucaaccggugcuucuacguggagcucauccgcgggcggaaggaggagaccgaggugcuguggacgagcaacuccaucgucguguucugcggcaccagcgggaccuacggcaccggguccuggccggacggcgccgaccugaaccucaugcccaucuga

SEQ ID NO: 89598 - RNA, 1410 nt, Artificial Sequence; identical to SEQ ID NO: 85167
  derived and/or modified CDS sequence (opt1) from neuraminidase__InfluenzaA__AIJ10799

SEQ ID NO: 89599 - RNA, 1410 nt, Artificial Sequence
  derived and/or modified CDS sequence (opt1) from neuraminidase__InfluenzaA__AIJ10800
augaaccccaaccagaagaucaucaccaucggcagcgugucccugaccaucagcacgaucugcuucuucaugcagaucgccauccucaucaccaccgucacccugcacuucaagcaguacgaguucaacuccagcccgaacaaccaggugaugcugugcgagcccacgaucaucgagcgcaacaucaccgagaucguguaccucaccaacaccacgaucgagaaggagaucugccccaagcuggccgaguaccggaacugguccaagccccagugcgacaucaccggguucgcgccguucagcaaggacaacuccauccgccugagcgccggcggggacaucugggucacccgggagcccuacguguccugcgaccccgacaagugcuaccaguucgcccucggccaggggaccacgcugaacaacgugcacagcaacaacaccguccgcgaccggacccccuaccgcacccugcucaugaacgagcugggcgugccguuccaccugggcacgaagcaggucugcaucgccugguccagcuccagcugccacgacgggaaggccuggcuccacgugugcaucaccggcgacgacaagaacgcgaccgccuccuucaucuacaacgggaagcugguggacagcguggucuccuggagcaaggagauccugcggacccaggaguccgagugcgugugcaucaacggcacgugcaccguggucaugaccgacgggagcgccagcggcaaggccgacaccaagauccucuucaucgaggagggcaagaucgugcacacguccacccugagcggguccgcgcagcacguggaggagugcagcugcuacccccgcuaccccggcguccggugcgugugccgcgacaacuggaagggguccaaccggcccaucguggacaucaacaucaaggaccacagcaucgucuccagcuacgugugcuccggccuggugggcgacaccccgcgcaagaacgacagcuccagcuccagccacugccucgaccccaacaacgaggagggcgggcacggggucaagggcugggccuucgacgacgggaacgacguguggaugggccggaccaucaacgagacgucccgccugggcuacgagaccuucaaggucaucgagggguggagcaaccccaaguccaagcugcagaucaaccgccaggugaucguggaccggggcaaccggagcggguacuccggcaucuucagcgucgagggcaagagcugcaucaaccgcugcuucuacguggagcucauccgggggcgcaaggaggagaccgaggugcuguggaccuccaacagcaucgucguguucugcggcacguccgggaccuacggcaccgggagcuggcccgacggcgccgaccugaaccucaugccgaucuga

SEQ ID NO: 89600 - RNA, 1410 nt, Artificial Sequence; identical to SEQ ID NO: 86170
  derived and/or modified CDS sequence (opt1) from neuraminidase__InfluenzaA__AIJ10801

SEQ ID NO: 89601 - RNA, 1410 nt, Artificial Sequence; identical to SEQ ID NO: 86170
  derived and/or modified CDS sequence (opt1) from neuraminidase__InfluenzaA__AIJ10803

SEQ ID NO: 89602 - RNA, 1410 nt, Artificial Sequence; identical to SEQ ID NO: 86170
  derived and/or modified CDS sequence (opt1) from neuraminidase__InfluenzaA__AIJ10804

SEQ ID NO: 89603 - RNA, 1410 nt, Artificial Sequence; identical to SEQ ID NO: 86170
  derived and/or modified CDS sequence (opt1) from neuraminidase__InfluenzaA__AIJ10805

SEQ ID NO: 89604 - RNA, 1410 nt, Artificial Sequence
  derived and/or modified CDS sequence (opt1) from neuraminidase__InfluenzaA__AIJ10806
augaaccccaaccagaagaucaucaccaucggcagcgugucccugaccaucagcacgaucugcuucuucaugcagaucgccauccucaucaccaccgucacccugcacuucaagcaguacgaguucaacuccccgcccaacaaccaggugaugcugugcgagcccacgaucaucgagcgcaacaucaccgagaucguguaccucaccaacaccacgaucgagaaggagaucugccccaagccggccgaguaccggaacuggagcaagccccagugcgggaucaccggcuucgcgcccuucuccaaggacaacagcauccgccuguccgccgggggcgacaucugggucacccgggagcccuacgugagcugcgacccggacaagugcuaccaguucgcccuggggcagggcaccacgcucaacaacgugcacuccaacaacaccguccgcgaccggacccccuaccgcacccugcugaugaacgagcucggcgugcccuuccaccuggggacgaagcaggucugcaucgccuggagcuccagcuccugccacgacggcaaggccuggcugcacgugugcaucaccggggacgacaagaacgcgaccgccagcuucaucuacaacggccggcucguggacuccguggucagcugguccaaggagauccugcgcacccaggagagcgagugcgugugcaucaacgggacgugcaccguggucaugaccgacggcuccgccagcggcaaggccgacaccaagauccuguucaucgaggaggggaagaucgugcacacgagcacccucuccggcagcgcgcagcacguggaggagugcuccugcuacccccgguacccggggguccgcugcgugugccgggacaacuggaagggcagcaaccgccccaucguggacaucaacaucaaggaccacuccaucgucagcuccuacgugugcagcggccuggugggggacacgccccggaagaacgacuccagcuccaucagccacugccuggaccccaacaacgaggagggcgggcacggcgucaaggggugggccuucgacgacggcaacgacguguggaugggccgcaccaucaacgagaccucccggcucggguacgagaccuucaaggucaucgagggcuggagcaacccgaaguccaagcugcagaucaaccgccaggugaucguggaccgcggggaccggagcggcuacuccgggaucuucagcgucgagggcaaguccugcaucaaccggugcuucuacguggagcugauccgcggccggaaggaggagaccgaggugcucuggaccagcaacagcaucgucguguucugcgggacguccggcaccuacgggaccggcagcuggcccgacggggccgaccugaaccugaugcccaucuga

SEQ ID NO: 89605 - RNA, 1410 nt, Artificial Sequence
  derived and/or modified CDS sequence (opt1) from neuraminidase__InfluenzaA__AIJ10807
augaaccccaaccagaagaucaucaccaucggcagcgugucccugaccaucagcacgaucugcuucuucaugcagaucgccauccucaucaccaccgucacccugcacuucaagcaguacgaguucaacuccccgcccaacaaccaggugaugcugugcgagcccacgaucaucgagcgcaacaucaccgagaucguguaccucaccaacaccacgaucgagaaggagaucugccccaagccggccgaguaccggaacuggagcaagccccagugcgggaucaccggcuucgcgcccuucuccaaggacaacagcauccgccuguccgccgggggcgacaucugggucacccgggaggccuacgugagcugcgaccccgacaagugcuaccaguucgcccuggggcagggcaccacgcucaacaacgugcacuccaacaacaccguccgcgaccggaccccguaccgcacccugcugaugaacgagcucggcgugcccuuccaccuggggacgaagcaggucugcaucgccuggagcuccagcuccugccacgacggcaaggcguggcugcacgugugcaucaccggggacgacaagaacgccaccgccagcuucaucuacaacggccggcucguggacuccguggucagcugguccaaggagauccugcgcacccaggagagcgagugcgugugcaucaacgggacgugcaccguggucaugaccgacggcuccgccagcggcaaggcggacaccaagauccuguucaucgaggaggggaagaucgugcacacgagcacccucuccggcagcgcccagcacguggaggagugcuccugcuacccccgguaccccgggguccgcugcgugugccgggacaacuggaagggcagcaaccgcccgaucguggacaucaacaucaaggaccacuccaucgucagcuccuacgugugcagcggccuggugggggacacgccccggaagaacgacuccagcuccagcucccacugccuggaccccaacaacgaggagggcgggcacggcgucaaggggugggccuucgacgacggcaacgacguguggaugggccgcaccaucaacgagaccagccggcucggguacgagaccuucaaggucaucgagggcugguccaaccccaagagcaagcugcagaucaaccgccaggugaucguggaccgcggggaccgguccggcuacagcgggaucuucuccgucgagggcaagagcugcaucaaccggugcuucuacguggagcugauccgcggccggaaggaggagaccgaggugcucuggaccagcaacuccaucgucguguucugcgggacgagcggcaccuacgggaccggcuccuggccggacggggccgaccugaaccugaugcccaucuga

SEQ ID NO: 89606 - RNA, 1410 nt, Artificial Sequence
  derived and/or modified CDS sequence (opt1) from neuraminidase__InfluenzaA__AIJ10808
augaaccccaaccagaagaucaucaccaucggcagcgugucccugaccaucagcacgaucugcuucuucaugcagaucgccauccucaucaccaccgucacccugcacuucaagcaguacgaguucaacuccccgcccaacaaccaggugaugcugugcgagcccacgaucaucgagcgcaacaucaccgagaucguguaccucaccaacaccacgaucgagaaggagaucugccccaagccggccgaguaccggaacuggagcaagccccagugcgggaucaccggcuucgcgcccuucuccaaggacaacagcauccgccuguccgccgggggcgacaucugggucacccgggagcccuacgugagcugcgacccggacaagugcuaccaguucgcccuggggcagggcaccacgcucaacaacgugcacuccaacaacaccguccgcgaccggacccccuaccgcacccugcugaugaacgagcucggcgugcccuuccaccuggggacgaagcaggucugcaucgccuggagcuccagcuccugccacgacggcaaggccuggcugcacgugugcaucaccggggacgacaagaacgcgaccgccagcuucaucuacaacggccggcucguggacuccguggucagcugguccaaggaggugcugcgcacccaggagagcgagugcgugugcaucaacgggacgugcaccgucgugaugaccgacggcuccgccagcggcaaggccgacaccaagauccuguucaucgaggaggggaagaucgugcacacgagcacccucuccggcagcgcgcagcacgucgaggagugcuccugcuacccccgguacccgggggugcgcugcgugugccgggacaacuggaagggcagcaaccgccccaucgucgacaucaacaucaaggaccacuccaucgugagcuccuacgugugcagcggccuggucggggacaccccgcggaagaacgacuccagcuccagcucccacugccuggaccccaacaacgaggagggcgggcacggcgugaaggggugggccuucgacgacggcaacgacgucuggaugggccgcaccaucaacgagacgagccggcucggguacgagaccuucaaggugaucgagggcugguccaaccccaagagcaagcugcagaucaaccgccaggugaucgucgaccgcggggaccgguccggcuacagcgggaucuucuccguggagggcaagagcugcaucaaccggugcuucuacguggagcugauccgcggccggaaggaggagaccgagguccucuggaccagcaacuccaucgugguguucugcgggacgagcggcaccuacgggaccggcuccuggcccgacggggccgaccugaaccugaugcccaucuga

SEQ ID NO: 89607 - RNA, 1410 nt, Artificial Sequence; identical to SEQ ID NO: 86170
  derived and/or modified CDS sequence (opt1) from neuraminidase__InfluenzaA__AIJ10809

SEQ ID NO: 89608 - RNA, 1410 nt, Artificial Sequence; identical to SEQ ID NO: 86170
  derived and/or modified CDS sequence (opt1) from neuraminidase__InfluenzaA__AIJ10810

SEQ ID NO: 89609 - RNA, 1410 nt, Artificial Sequence
  derived and/or modified CDS sequence (opt1) from neuraminidase__InfluenzaA__AIJ10812
augaaccccaaccagaagaucaucaccaucggcagcgugucccugaccaucagcacgaucugcuucuucaugcagaucgccauccucaucaccaccgucacccugcacuucaagcaguacgaguucaacuccccgcccaacaaccaggugaugcugugcgagcccacgaucauggagcgcaacgugaccgagaucgucuaccucaccaacaccacgaucgagaaggagaucugccccaagccggccgaguaccggaacuggagcaagccccagugcgggaucaccggcuucgcgcccuucuccaaggacaacagcauccgccuguccgccgggggcgacaucugggugacccgggagcccuacgugagcugcgacccggacaagugcuaccaguucgcccuggggcagggcaccacgcucaacaacguccacuccaacaacaccgugcgcgaccggacccccuaccgcacccugcugaugaacgagcucggcgugcccuuccaccuggggacgaagcaggucugcaucgccuggagcuccagcuccugccacgacggcaaggccuggcugcacgugugcaucaccggggacgacaagaacgcgaccgccagcuucaucuacaacggccggcucguggacuccgucgugagcugguccaaggagauccugcgcacccaggagagcgagugcgugugcaucaacgggacgugcaccgucgugaugaccgacggcuccgccagcggcaaggccgacaccaagauccuguucaucgaggaggggaagaucgugcacacgagcacccucuccggcagcgcgcagcacgucgaggagugcuccugcuacccccgguacccgggggugcgcugcgugugccgggacaacuggaagggcagcaaccgccccaucgucgacaucaacaucaaggaccacuccaucgugagcuccuacgugugcagcggccuggucggggacaccccgcggaagaacgacuccagcuccagcucccacugccuggaccccaacaacgaggagggcgggcacggcgugaaggggugggccuucgacgacggcaacgacgucuggaugggccgcaccaucaacgagacgagccggcucggguacgagaccuucaaggugaucgagggcugguccaaccccaagagcaagcugcagaucaaccgccaggugaucgucgaccgcggggaccgguccggcuacagcgggaucuucuccguggagggcaagagcugcaucaaccggugcuucuacguggagcugauccgcggccggaaggaggagaccgagguccucuggaccagcaacuccaucgugguguucugcgggacgagcggcaccuacgggaccggcuccuggcccgacggggccgaccugaaccugaugcccaucuga

SEQ ID NO: 89610 - RNA, 1410 nt, Artificial Sequence
  derived and/or modified CDS sequence (opt1) from neuraminidase__InfluenzaA__AIJ10813
augaaccccaaccagaagaucaucaccaucggcagcgugucccugaccaucagcacgaucugcuucuucaugcagaucgccauccucaucaccaccgucacccugcacuucaagcaguacgaguucaacuccccgcccaacaaccaggugaugcugugcgagcccacgaucauggagcgcaacgugaccgagaucgucuaccucaccaacaccacgaucgagaaggagaucugccccaagccggccgaguaccggaacuggagcaagccccagugcgggaucaccggcuucgcgcccuucuccaaggacaacagcauccgccuguccgccgggggcgacaucugggugacccgggagcccuacgugagcugcgacccggacaagugcuaccaguucgcccuggggcagggcaccacgcucaacaacguccacuccaacaaccccgugcgcgaccggacccccuaccgcacccugcugaugaacgagcucggcgugcccuuccaccuggggaccaagcaggucugcaucgccuggagcuccagcuccugccacgacggcaaggccuggcugcacgugugcaucacgggggacgacaagaacgcgaccgccagcuucaucuacaacggccggcucguggacuccgucgugagcugguccaaggagauccugcgcacccaggagagcgagugcgugugcaucaacgggaccugcacggucgugaugaccgacggcuccgccagcggcaaggccgacaccaagauccuguucaucgaggaggggaagaucgugcacaccagcacgcucuccggcagcgcgcagcacgucgaggagugcuccugcuacccgcgguaccccggggugcgcugcgugugccgggacaacuggaagggcagcaaccgccccaucgucgacaucaacaucaaggaccacuccaucgugagcuccuacgugugcagcggccuggucggggacacgccccggaagaacgacuccagcuccagcucccacugccuggacccgaacaacgaggagggcgggcacggcgugaaggggugggccuucgacgacggcaacgacgucuggaugggccgcaccaucaacgagaccagccggcucggguacgagaccuucaaggugaucgagggcugguccaaccccaagagcaagcugcagaucaaccgccaggugaucgucgaccgcggggaccgguccggcuacagcgggaucuucuccguggagggcaagagcugcaucaaccggugcuucuacguggagcugauccgcggccggaaggaggagaccgagguccucuggaccagcaacuccaucgugguguucugcgggaccagcggcacguacgggaccggcuccuggcccgacggggccgaccugaaccugaugcccaucuga

SEQ ID NO: 89611 - RNA, 1410 nt, Artificial Sequence
  derived and/or modified CDS sequence (opt1) from neuraminidase__InfluenzaA__AIJ10814
augaaccccaaccagaagaucaucaccaucggcagcgugucccugaccaucagcacgaucugcuucuucaugcagaucgccauccucaucaccaccgucacccugcacuucaagcaguacgaguucaacuccccgcccaacaaccaggugaugcugugcgagcccacgaucguggagcgcaacaucaccgagaucgucuaccucaccaacaccacgaucgagaaggagaucugccccaagccggccgaguaccggaacuggagcaagccccagugcgggaucaccggcuucgcgcccuucuccaaggacaacagcauccgccuguccgccgggggcgacaucugggugacccgggagcccuacgugagcugcgacccggacaagugcuaccaguucgcccuggggcagggcaccacgcucaacaacguccacuccaacaacaccgugcgcgaccggacccccuaccgcacccugcugaugaacgagcucggcgugcccuuccaccuggggacgaagcaggucugcaucgccuggagcuccagcuccugccacgacggcaaggccuggcugcacgugugcaucaccggggacgacaagaacgcgaccgccagcuucaucuacaacggccggcucguggacuccgucgugagcugguccaaggagauccugcgcacccaggagagcgagugcgugugcaucaacgggacgugcaccgucgugaugaccgacggcuccgccagcggcaaggccgacaccaagauccuguucaucgaggaggggaagaucgugcacacgagcacccucuccggcagcgcgcagcacgucgaggagugcuccugcuacccccgguacccgggggugcgcugcgugugccgggacaacuggaagggcagcaaccgccccaucgucgacaucaacaucaaggaccacuccaucgugagcuccuacgugugcagcggccuggucggggacaccccgcggaagaacgacuccagcuccagcucccacugccuggaccccaacaacgaggagggcgggcacggcgugaaggggugggccuucgacgacggcaacgacgucuggaugggccgcaccaucaacgagacgagccggcucggguacgagaccuucaaggugaucgagggcugguccaaccccaagagcaagcugcagaucaaccgccaggugaucgucgacaagggggaccgguccggcuacagcgggaucuucuccguggagggcaagagcugcaucaaccgcugcuucuacguggagcugauccggggccgcaaggaggagaccgagguccucuggaccagcaacuccaucgugguguucugcgggacgagcggcaccuacgggaccggcuccuggcccgacggggccgaccugaaccugaugcccaucuga

SEQ ID NO: 89612 - RNA, 1410 nt, Artificial Sequence
  derived and/or modified CDS sequence (opt1) from neuraminidase__InfluenzaA__AIJ10815
augaaccccaaccagaagaucaucaccaucggcagcgugucccugaccaucagcacgaucugcuucuucaugcagaucgccauccucaucaccaccgucacccugcacuucaagcaguacgaguucaacuccccgcccaacaaccaggugaugcugugcgagcccacgaucaucgagcgcaacaucaccgagaucguguaccucaccaacaccacgaucgagaaggagaucugccccaagccggccgaguaccggaacuggagcaagccccagugcgggaucaccggcuucgcgcccuucuccaaggacaacagcauccgccuguccgccgggggcgacaucugggucacccgggagcccuacgugagcugcgacccggacaagugcuaccaguucgcccuggggcagggcaccacgcucaacaacgugcacuccaacaacaccguccgcgaccggacccccuaccgcacccugcugaugaacgagcucggcgugcccuuccaccuggggacgaagcaggucugcaucgccuggagcuccagcuccugccacgacggcaaggccuggcugcacgugugcaucaccggggacgacaagaacgcgaccgccagcuucaucuacaacggccggcucguggacuccguggucagcugguccaaggagauccugcgcacccaggagagcgagugcgugugcaucaacgggacgugcaccguggucaugaccgacggcuccgccagcggcaaggccgacaccaagauccuguucaucgaggaggggaagaucgugcacacgagcacccucuccggcagcgcgcagcacguggaggagugcuccugcuacccccgguacccggggguccgcugcgugugccgggacaacuggaagggcagcaaccgccccaucguggacaucaacaucaaggaccacuccaucgucagcuccuacgugugcagcggccuggugggggacaccccgcggaagaacgacuccagcuccagcucccacugccuggaccccaacaacgaggagggcgggcacggcgucaaggggugggccuucgacgacggcaacgacguguggaugggccgcaccaucaacgagacgagccggcucggguacgagaccuucaaggucaucgagggcugguccaaccccaagagcaagcugcagaucaaccgccaggugaucguggaccgcggggaccgguccggcuacagcgggaucuucuccgucgagggcaagagcugcaucaaccggugcuucuacguggagcugauccgcggccggaaggaggagaacgaggugcucuggaccagcaacuccaucgucguguucugcgggaccagcggcacguacgggaccggcuccuggcccgacggggccgaccugaaccugaugcccaucuga

SEQ ID NO: 89613 - RNA, 1410 nt, Artificial Sequence
  derived and/or modified CDS sequence (opt1) from neuraminidase__InfluenzaA__AIJ10816
augaaccccaaccagaagaucaucaccaucggcagcgugucccugaccaucagcacgaucugcuucuucaugcagaucgccauccucaucaccaccgucacccugcacuucaagcaguacgaguucaacuccccgcccaacaaccaggugaugcugugcgagcccacgaucaucgagcgcaacaucaccgagaucguguaccucaccaacaccacgaucgagaaggagaucugccccaagccggccgaguaccggaacuggagcaagccccagugcgggaucaccggcuucgcgcccuucuccaaggacaacagcauccgccuguccgccgggggcgacaucugggucacccgggagcccuacgugagcugcgacccggacaagugcuaccaguucgcccuggggcagggcaccacgcucaacaacgugcacuccaacaacaccguccgcgaccggacccccuaccgcacccugcugaugaacgagcucggcgugcccuuccaccuggggacgaagcaggucugcaucgccuggagcuccagcuccugccacgacggcaaggccuggcugcacgugugcaucaccggggacgacaagaacgcgaccgccagcuucaucuacaacggccggcucguggacuccguggucagcugguccaaggagauccugcgcacccaggagagcgagugcgugugcaucaacgggacgugcaccguggucaugaccgacggcuccgccagcggcaaggccgacaccaagauccuguucaucgaggaggggaagaucgugcacacgagcacccucuccggcagcgcgcagcacguggaggagugcuccugcuacccccgguacccggggguccgcugcgugugccgggacaacuggaagggcagcaaccgccccaucguggacaucaacaucaaggaccacuccaucgucagcuccuacgugugcagcggccuggugggggacaccccgcggaagaacgacuccagcuccagcucccacugccuggaccccaacaacgaggagggcgggcacggcgucaaggggugggccuucgacgacggcaacgacguguggaugggccgcaccaucaacgagacgagccggcucggguacgagaccuucaaggucaucgagggcugguccaaccccaagagcaagcugcagaucaaccgccaggugaucguggaccgcggggaccgguccggcuacagcgggaucuucuccgucgagggcaagggcugcaucaaccggugcuucuacguggagcugauccgcgggcggaaggaggagaccgaggugcucuggaccagcaacagcaucgucguguucugcggcacguccgggaccuacggcaccgggagcuggcccgacggcgccgaccugaaccugaugcccaucuga

SEQ ID NO: 89614 - RNA, 1410 nt, Artificial Sequence; identical to SEQ ID NO: 86170
  derived and/or modified CDS sequence (opt1) from neuraminidase__InfluenzaA__AIJ10817

SEQ ID NO: 89615 - RNA, 1410 nt, Artificial Sequence; identical to SEQ ID NO: 86170
  derived and/or modified CDS sequence (opt1) from neuraminidase__InfluenzaA__AIJ10818

SEQ ID NO: 89616 - RNA, 1410 nt, Artificial Sequence
  derived and/or modified CDS sequence (opt1) from neuraminidase__InfluenzaA__AIJ10819
augaaccccaaccagaagaucaucaccaucggcagcgugucccugaccaucagcacgaucugcuucuucaugcagaucgccauccucaucaccaccgucgcccugcacuucaagcaguacgaguucaacuccccgcccaacaaccaggugaugcugugcgagcccaccaucaucgagcgcaacaucacggagaucguguaccucaccaacaccaccaucgagaaggagaucugccccaagccggcggaguaccggaacuggagcaagccccagugcgggaucacgggcuucgcccccuucuccaaggacaacagcauccgccuguccgccgggggcgacaucugggucacccgggagcccuacgugagcugcgacccggacaagugcuaccaguucgcccuggggcagggcaccacccucaacaacgugcacuccaacaacacgguccgcgaccggacccccuaccgcacccugcugaugaacgagcucggcgugcccuuccaccuggggaccaagcaggucugcaucgccuggagcuccagcuccugccacgacggcaaggcguggcugcacgugugcaucacgggggacgacaagaacgccaccgccagcuucaucuacaacggccggcucguggacuccguggucagcugguccaaggagauccugcgcacccaggagagcgagugcgugugcaucaacgggaccugcacgguggucaugaccgacggcuccgccagcggcaaggcgaacaccaagauccuguucaucgaggaggggaagaucgugcacaccagcacgcucuccggcagcgcccagcacguggaggagugcuccugcuacccccgguacccggggguccgcugcgugugccgggacaacuggaagggcagcaaccgccccaucguggacaucaacaucaaggaccacuccaucgucagcuccuacgugugcagcggccuggugggggacaccccgcggaagaacgacuccagcuccagcucccacugccuggaccccaacaacgaggagggcgggcacggcgucaaggggugggccuucgacgacggcaacgacguguggaugggccgcaccaucaacgagaccagccggcucggguacgagacguucaaggucaucgagggcugguccaaccccaagagcaagcugcagaucaaccgccaggugaucguggaccgcggggaccgguccggcuacagcgggaucuucuccgucgagggcaagagcugcaucaaccggugcuucuacguggagcugauccgcggccggaaggaggagaccgaggugcucuggaccagcaacuccaucgucguguucugcgggaccagcggcacguacgggaccggcuccuggcccgacggggccgaccugaaccugaugcccaucuga

SEQ ID NO: 89617 - RNA, 1410 nt, Artificial Sequence; identical to SEQ ID NO: 86170
  derived and/or modified CDS sequence (opt1) from neuraminidase__InfluenzaA__AIJ10820

SEQ ID NO: 89618 - RNA, 1410 nt, Artificial Sequence; identical to SEQ ID NO: 86170
  derived and/or modified CDS sequence (opt1) from neuraminidase__InfluenzaA__AIJ10821

SEQ ID NO: 89619 - RNA, 1410 nt, Artificial Sequence
  derived and/or modified CDS sequence (opt1) from neuraminidase__InfluenzaA__AIJ10822
augaaccccaaccagaagaucaucaccaucggcagcgugucccugaccaucagcacgaucugcuucuucaugcagaucgccauccucaucaccaccgucacccugcacuucaagcaguacgaguucaacuccccgcccaacaaccaggugaugcugugcgagcccacgaucaucgagcgcaacaucaccgagaucguguaccucaccaacaccacgaucgagaaggagaucugccccaagccggccgaguaccggaacuggagcaagccccagugcgggaucaccggcuucgcgcccuucuccaaggacaacagcauccgccuguccgccgggggcgacaucugggucacccgggagcccuacgugagcugcgacccggacaagugcuaccaguucgcccuggggcagggcaccacgcucaacaacgugcacuccaacaacaccguccgcgaccggacccccuaccgcacccugcugaugaacgagcucggcgugcccuuccaccuggggacgaagcaggucugcaucgccuggagcuccagcuccugccacgacggcaaggccuggcugcacgugugcaucaccggggacgacaagaacgcgaccgccagcuucaucuacaacggccggcucguggacuccguggucagcugguccaaggacauccugcgcacccaggagagcgagugcgugugcaucaacgggacgugcaccguggucaugaccgacggcuccgccagcggcaaggccgacaccaagauccuguucaucgaggaggggaagaucgugcacacgagcacccucuccggcagcgcgcagcacguggaggagugcuccugcuacccccgguacccggggguccgcugcgugugccgggacaacuggaagggcagcaaccgccccaucguggacaucaacaucaaggaccacuccaucgucagcuccuacgugugcagcggccuggugggggacaccccgcggaagaacgacuccagcuccagcucccacugccuggaccccaacaacgaggagggcgggcacggcgucaaggggugggccuucgacgacggcaacgacguguggaugggccgcaccaucaacgagacgagccggcucggguacgagaccuucaaggucaucgagggcugguccaaccccaagagcaagcugcagaucaaccgccaggugaucguggaccgcggggaccgguccggcuacagcgggaucuucuccgucgagggcaagagcugcaucaaccggugcuucuacguggagcugauccgcggccggaaggaggagaacgaggugcucuggaccagcaacuccaucgucguguucugcgggaccagcggcacguacgggaccggcuccuggcccgacggggccgaccugaaccugaugcccaucuga

SEQ ID NO: 89620 - RNA, 1410 nt, Artificial Sequence
  derived and/or modified CDS sequence (opt1) from neuraminidase__InfluenzaA__AIJ10823
augaaccccaaccagaagaucaucaccaucggcagcgugucccugaccaucagcacgaucugcuucuucaugcagaucgccauccucaucaccaccgucacccugcacuucaaccaguacgaguucaacuccccgcccaacaaccaggugaugcugugcgagcccacgaucaucgagcgcaacaucaccgagaucguguaccucaccaccacgaccaucgagaaggagaucugccccaagccggccgaguaccggaacuggagcaagccccagugcgggaucaccggcuucgcgcccuucuccaaggacaacagcauccgccuguccgccgggggcgacaucugggucacccgggagcccuacgugagcugcgacccggacaagugcuaccaguucgcccuggggcagggcacgacccucaacaacgugcacuccaacaacaccguccgcgaccggacccccuuccgcacgcugcugaugaacgagcucggcgugcccuuccaccuggggaccaagcaggucugcaucgccuggagcuccagcuccugccacgacggcaaggccuggcugcacgugugcaucaccggggacgacaagaacgcgaccgccagcuucaucuacaacggccggcucguggacuccguggucagcugguccaaggagauccugcgcacgcaggagagcgagugcgugugcaucaacgggaccugcaccguggucaugaccgacggcuccgccagcggcaaggccgugacgaagauccuguucaucgaggaggggaagaucgugcacaccagcacccucuccggcagcgcgcagcacgucgaggagugcuccugcuacccccgguacccgggggugcgcugcgugugccgggacaacuggaagggcagcaaccgccccaucgucgacaucaacaucaaggaccacuccaucgugagcggcuacgugugcuccgggcuggucggcgacacgccccggaagaacgacagcuccagcuccagccacugccugaaccccaacaacgaggagggcgggcacggggugaagggcugggccuucgacgacggcaacgacgucuggauggggcgcaccaucaacgagaccucccggcucggcuacgagaccuucaaggugaucgagggguggagcaacccgaaguccaagcugcagaucaaccgccaggugaucgucgaccggggcgaccgcagcggguacuccggcaucuucagcguggagggcaaguccugcaucaaccggugcuucuacguggagcugauccgcgggcggaaggaggagaccgagguccucuggacgagcaacagcaucgugguguucugcggcaccuccgggaccuacggcaccgggagcuggcccgacggcgccgaccugaaccugaugcccaucuga

SEQ ID NO: 89621 - RNA, 1410 nt, Artificial Sequence
  derived and/or modified CDS sequence (opt1) from neuraminidase__InfluenzaA__AIJ10824
augaaccccaaccagaagaucaucaccaucggcagcgugucccugaccaucagcacgaucugcuucuucaugcagaucgccauccucaucaccaccgucacccugcacuucaagcaguacgaguucaacuccccgcccaacaaccagguggugcugugcgagcccacgaucaucgagcgcaacaucaccgagaucgucuaccucaccaacaccacgaucgagaaggagaucugccccaagccggccgaguaccggaacuggagcaagccccagugcgggaucaccggcuucgcgcccuucuccaaggacaacagcauccgccuguccgccgggggcgacaucugggugacccgggagcccuacgugagcugcgacccggacaagugcuaccaguucgcccuggggcagggcaccacgcucaacaacguccacuccaacaacaccgugcgcgaccggacccccuaccgcacccugcugaugaacgagcucggcgugcccuuccaccuggggacgaagcaggucugcaucgccuggagcuccagcuccugccacgacggcaaggccuggcugcacgugugcaucaccggggacgacaagaacgcgaccgccagcuucaucuacaacggccggcucguggacuccgucgugagcugguccaaggagauccugcgcacccaggagagcgagugcgugugcaucaacgggacgugcaccgucgugaugaccgacggcuccgccagcggcaaggccgacaccaagauccuguucaucgaggaggggaagaucgugcacacgagcacccucuccggcagcgcgcagcacgucgaggagugcuccugcuacccccgguacccgggggugcgcugcgugugccgggacaacuggaagggcagcaaccgccccaucgucgacaucaacaucaaggaccacuccaucgugagcuccuacgugugcagcggccuggucggggacaccccgcggaagaacgacuccagcuccagcucccacugccuggaccccaacaacgaggagggcgggcacggcgugaaggggugggccuucgacgacggcaacgacgucuggaugggccgcaccaucaacgagacgagccggcucggguacgagaccuucaaggugaucgagggcugguccaaccccaagagcaagcugcagaucaaccgccaggugaucgucgaccgcggggaccgguccggcuacagcgggaucuucuccguggagggcaagagcugcaucaaccggugcuucuacguggagcugauccgcggccggaaggaggagaccgagguccucuggaccagcaacuccaucgugguguucugcgggacgagcggcaccuacgggaccggcuccuggcccgacggggccgaccugaaccugaugcccaucuga

SEQ ID NO: 89622 - RNA, 1410 nt, Artificial Sequence
  derived and/or modified CDS sequence (opt1) from neuraminidase__InfluenzaA__AIJ10827
augaaccccaaccagaagaucaucaccaucggcagcgugucccugaccaucagcacgaucugcuucuucaugcagaucgccauccucaucaccaccgucacccugcacuucaagcaguacgaguucaacuccccgcccaacaaccaggugaugcugugcgagcccacgaucaucgagcgcaacaucaccgagaucguguaccucaccaacaccacgaucgagaaggagaucugccccaagccggccgaguaccggaacuggagcaagccccagugcgggaucaccggcuucgcgcccuucuccaaggacaacagcauccgccuguccgccgggggcgacaucugggucacccgggagcccuacgugagcugcgacccggacaagugcuaccaguucgcccuggggcagggcaccacgcucaacaacgugcacuccaacaacaccguccgcgaccggacccccuaccgcacccugcugaugaacgagcucggcgugcccuuccaccuggggacgaagcaggucugcaucgccuggagcuccagcuccugccacgacggcaaggccuggcugcacgugugcaucaccggggacgacaagaacgcgaccgccagcuucaucuacaacggccggcucguggacuccguggucagcugguccaaggacauccugcgcacccaggagagcgagugcgugugcaucaacgggacgugcaccguggucaugaccgacggcuccgccagcggcaaggccgacaccaagauccuguucaucgaggaggggaagaucgugcacacgagcacccucuccggcagcgcgcagcacguggaggagugcuccugcuacccccgguacccggggguccgcugcgugugccgggacaacuggaagggcagcaaccgccccaucguggacaucaacaucaaggaccacuccaucgucagcuccuacgugugcagcggccuggugggggacaccccgcggaagaacgacuccagcuccagcucccacugccuggaccccaacaacgaggagggcgggcacggcgucaaggggugggccuucgacgacggcaacgacguguggaugggccgcaccaucaacgagacgagccggcucggguacgagaccuucaaggucaucgagggcugguccaaccccaagagcaagcugcagaucaaccgccaggugaucguggaccgcggggaccgguccggcuacagcgggaucuucuccaucgagggcaagagcugcaucaaccggugcuucuacgucgagcugauccgcggccggaaggaggagaccgaggugcucuggaccagcaacuccaucguggucuucugcgggacgagcggcaccuacgggaccggcuccuggcccgacggggccgaccugaaccugaugcccaucuga

SEQ ID NO: 89623 - RNA, 1410 nt, Artificial Sequence
  derived and/or modified CDS sequence (opt1) from neuraminidase__InfluenzaA__AIJ10828
augaaccccaaccagaagaucaucaccaucggcagcgugucccugaccaucagcacgaucugcuucuucaugcagaucgccauccucaucaccaccgucacccugcacuucaagcaguacgaguucaacuccccgcccaacaaccaggugaugcugugcgagcccacgaucaucgagcgcaacaucaccgagaucguguaccucaccaacaccacgaucgagaaggagaucugccccaagccggccgaguaccggaacuggagcaagccccagugcgggaucaccggcuucgcgcccuucuccaaggacaacagcauccgccuguccgccgggggcgacaucugggucacccgggagcccuacgugagcugcgacccggacaagugcuaccaguucgcccuggggcagggcaccacgcucaacaacgugcacuccaacaacaccguccgcgaccggacccccuaccgcacccugcugaugaacgagcucggcgugcccuuccaccuggggacgaagcaggucugcaucgccuggagcuccagcuccugccacgacggcaaggccuggcugcacgugugcaucaccggggacgacaagaacgcgaccgccagcuucaucuacaacggccggcucguggacuccguggucagcugguccaaggacauccugcgcacccaggagagcgagugcgugugcaucaacgggacgugcaccguggucaugaccgacggcuccgccagcggcaaggccgacaccaagauccuguucaucgaggaggggaagaucgugcacacgagcacccucuccggcagcgcgcagcacguggaggagugcuccugcuacccccgguacccggggguccgcugcgugugccgggacaacuggaagggcagcaaccgccccaucguggacaucaacaucaaggaccacuccaucgucagcuccuacgugugcagcggccuggugggggacaccccgcggaagaacgacuccagcuccagcucccacugccuggaccccaacaacgaggagggcgggcacggcgucaaggggugggccuucgacgacggcaacgacguguggaugggccgcaccaucaacgagacgagccggcucggguacgagaccuucaaggucaucgagggcugguccaaccccaagagcaagcugcagaucaaccgccaggugaucguggaccgcggggaccgguccggcuacagcgggaucuucuccaucgagggcaagagcugcaucaaccggugcuucuacgucgagcugauccgcggccggaaggaggagaccgaggugguguggaccagcaacuccaucgucguguucugcgggacgagcggcaccuacgggaccggcuccuggcccgacggggccgaccucaaccugaugcccaucuga

SEQ ID NO: 89624 - RNA, 1410 nt, Artificial Sequence
  derived and/or modified CDS sequence (opt1) from neuraminidase__InfluenzaA__AIJ10829
augaaccccaaccagaagaucaucaccaucggcagcgugucccugaccaucagcacgaucugcuucuucaugcagaucgccauccucaucaccaccgucacccugcacuucaagcaguacgaguucaacuccccgcccaacaaccaggugaugcugugcgagcccacgaucaucgagcgcaacaucaccgagaucguguaccucaccaacaccacgaucgagaaggagaucugccccaagccggccgaguaccggaacuggagcaagccccagugcgggaucaccggcuucgcgcccuucuccaaggacaacagcauccgccuguccgccgggggcgacaucugggucacccgggagcccuacgugagcugcgacccggacaacugcuaccaguucgcccuggggcagggcaccacgcucaacaacgugcacuccaacaacaccguccgcgaccggacccccuaccgcacccugcugaugaacgagcucggcgugcccuuccaccuggggacgaagcaggucugcaucgccuggagcuccagcuccugccacgacggcaaggccuggcugcacgugugcaucaccggggacgacaagaacgcgaccgccagcuucaucuacaacggccggcucguggacuccguggucagcugguccaaggacauccugcgcacccaggagagcgagugcgugugcaucaacgggacgugcaccguggucaugaccgacggcuccgccagcggcaaggccgacaccaagauccuguucaucgaggaggggaagaucgugcacacgagcacccucuccggcagcgcgcagcacguggaggagugcuccugcuacccccgguacccggggguccgcugcgugugccgggacaacuggaagggcagcaaccgccccaucguggacaucaacaucaaggaccacuccaucgucagcuccuacgugugcagcggccuggugggggacaccccgcggaagaacgacuccagcuccagcucccacugccuggaccccaacaacgaggagggcgaccacggggucaagggcugggccuucgacgacgggaacgacguguggaugggccgcaccaucaacgagacgagccggcucggcuacgagaccuucaaggucaucgaggggugguccaaccccaagagcaagcugcagaucaaccgccaggugaucguggaccggggcgaccgcuccggguacagcggcaucuucuccaucgagggcaagagcugcaucaaccggugcuucuacgucgagcugauccgcgggcggaaggaggagaccgaggugcucuggaccagcaacuccaucguggucuucugcggcacgagcgggaccuacggcaccggguccuggcccgacggcgccgaccugaaccugaugcccaucuga

SEQ ID NO: 89625 - RNA, 1410 nt, Artificial Sequence
  derived and/or modified CDS sequence (opt1) from neuraminidase__InfluenzaA__AIJ10830
augaaccccaaccagaagaucaucaccaucggcagcgugucccugaccaucagcacgaucugcuucuucaugcagaucgccauccucaucaccaccgucacccugcacuucaagcaguacgaguucaacuccccgcccaacaaccaggugaugcugugcgagcccacgaucaucgagcgcaacaucaccgagaucguguaccucaccaacaccacgaucgagaaggagaucugccccaagccggccgaguacaagaacuggagcaagccccagugcgggaucaccggcuucgcgcccuucuccaaggacaacagcauccggcuguccgccgggggcgacaucugggucacccgcgagcccuacgugagcugcgacccggacaagugcuaccaguucgcccuggggcagggcaccacgcucaacaacgugcacuccaacaacaccguccgggaccgcacccccuaccggacccugcugaugaacgagcucggcgugcccuuccaccuggggacgaagcaggucugcaucgccuggagcuccagcuccugccacgacggcaaggccuggcugcacgugugcaucaccggggacgacaagaacgcgaccgccagcuucaucuacaacggccgccucguggacuccguggucagcugguccaaggacauccugcggacccaggagagcgagugcgugugcaucaacgggacgugcaccguggucaugaccgacggcuccgccagcggcaaggccgacaccaagauccuguucaucgaggaggggaagaucgugcacacgagcacccucuccggcagcgcgcagcacguggaggagugcuccugcuacccccgcuacccggggguccggugcgugugccgcgacaacuggaagggcagcaaccggcccaucguggacaucaacaucaaggaccacuccaucgucagcuccuacgugugcagcggccuggugggggacaccccgcgcaagaacgacuccagcuccagcucccacugccuggaccccaacaacgaggagggcgggcacggcgucaaggggugggccuucgacgacggcaacgacguguggaugggccggaccaucaacgagacgagccgccucggguacgagaccuucaaggucaucgagggcugguccaaccccaagagcaagcugcagaucaaccggcaggucaucguggaccgcggggaccgguccggcuacagcgggaucuucuccaucgagggcaagagcugcaucaaccgcugcuucuacguggagcugauccggggccgcaaggaggagaccgaggugcucuggaccagcaacuccaucguggucuucugcgggacgagcggcaccuacgggaccggcuccuggcccgacggggccgaccugaaccugaugcccaucuga

SEQ ID NO: 89626 - RNA, 1410 nt, Artificial Sequence; identical to SEQ ID NO: 89622
  derived and/or modified CDS sequence (opt1) from neuraminidase__InfluenzaA__AIJ10831

SEQ ID NO: 89627 - RNA, 1410 nt, Artificial Sequence; identical to SEQ ID NO: 89622
  derived and/or modified CDS sequence (opt1) from neuraminidase__InfluenzaA__AIJ10832

SEQ ID NO: 89628 - RNA, 1410 nt, Artificial Sequence
  derived and/or modified CDS sequence (opt1) from neuraminidase__InfluenzaA__AIJ10834
augaaccccaaccagaagaucaucaccaucggcagcgugucccugaccaucagcacgaucugcuucuucaugcagaucgccauccucaucaccaccgucacccugcacuucaagcaguacgaguucaacuccccgcccaacaaccaggugaugcugugcgagcccacgaucaucgagcgcaacaucaccgagaucguguaccucaccaacaccacgaucgagaaggagaucugccccaagccggccgaguaccggaacuggagcaagccccagugcgggaucaccggcuucgcgcccuucuccaaggacaacagcauccgccuguccgccgggggcgacaucugggucacccgggagcccuacgugagcugcgacccggacaagugcuaccaguucgcccuggggcagggcaccacgcucaacaacgugcacuccaacaacaccguccgcgaccggacccccuaccgcacccugcugaugaacgagcucggcgugcccuuccaccuggggacgaagcaggucugcaucgccuggagcuccagcuccugccacgacggcaaggccuggcugcacgugugcaucaccggggacgacaagaacgcgaccgccagcuucaucuacaacggccggcucguggacuccguggucagcugguccaaggacauccugcgcacccaggagagcgagugcgugugcaucaacgggacgugcaccguggucaugaccgacggcuccgccagcggcaaggccgacaccaagauccuguucaucgaggaggggaagaucgugcacacgagcacccucuccggcagcgcgcagcacguggaggagugcuccugcuacccccgguacccggggguccgcugcgugugccgggacaacuggaagggcagcaaccgccccaucguggacaucaacaucaaggaccacuccaucgucagcuccuacgugugcagcggccuggugggggacaccccgcggaagaacgacuccagcuccagcucccacugccuggaccccaacaacgaggagggcgggcacggcgucaaggggugggccuucgacgacggcaacgacguguggaugggccgcaccaucaacgagacgagccggcucggguacgagaccuucaaggucaucgagggcugguccaaccccaagagcaagcugcagaucaaccgccaggugaucguggaccgcggggaccgguccggcuacagcgggaucuucuccaucgagagcaagagcugcaucaaccggugcuucuacgucgagcugauccgcggccggaaggaggagaccgaggugcucuggaccuccaacagcaucguggucuucugcggcacguccgggaccuacggcaccgggagcuggcccgacggcgccgaccugaaccugaugcccaucuga

SEQ ID NO: 89629 - RNA, 1410 nt, Artificial Sequence
  derived and/or modified CDS sequence (opt1) from neuraminidase__InfluenzaA__AIJ10835
augaaccccaaccagaagaucaucaccaucggcagcgugucccugaccaucagcacgaucugcuucuucaugcagaucgccauccucaucaccaccgucacccugcacuucaagcaguacgaguucaacuccacgccgaacaaccaggugaugcugugcgagcccaccaucaucgagcgcaacaucaccgagaucguguaccucaccaacacgaccaucgagaaggagaucugccccaagcccgccgaguaccggaacuggagcaagccgcagugcgggaucaccggcuucgcgcccuucuccaaggacaacagcauccgccuguccgccgggggcgacaucugggucacccgggagcccuacgugagcugcgaccccgacaagugcuaccaguucgcccuggggcagggcacgacccucaacaacgugcacuccaacaacaccguccgcgaccggaccccguaccgcacgcugcugaugaacgagcucggcgugcccuuccaccuggggaccaagcaggucugcaucgccuggagcuccagcuccugccacgacggcaaggccuggcugcacgugugcaucaccggggacgacaagaacgcgaccgccagcuucaucuacaacggccggcucguggacuccguggucagcugguccaaggacauccugcgcacgcaggagagcgagugcgugugcaucaacgggaccugcaccguggucaugaccgacggcuccgccagcggcaaggccgacacgaagauccuguucaucgaggaggggaagaucgugcacaccagcacccucuccggcagcgcgcagcacguggaggagugcuccugcuacccccgguaccccgggguccgcugcgugugccgggacaacuggaagggcagcaaccgcccgaucguggacaucaacaucaaggaccacuccaucgucagcuccuacgugugcagcggccuggugggggacacgccccggaagaacgacuccagcuccagcucccacugccuggaccccaacaacgaggagggcgggcacggcgucaaggggugggccuucgacgacggcaacgacguguggaugggccgcaccaucaacgagaccagccggcucggguacgagaccuucaaggucaucgagggcugguccaaccccaagagcaagcugcagaucaaccgccaggugaucguggaccgcggggaccgguccggcuacagcgggaucuucuccaucgagggcaagagcugcaucaaccggugcuucuacgucgagcugauccgcggccggaaggaggagaccgaggugcucuggacgagcaacuccaucguggucuucugcgggaccagcggcaccuacgggaccggcuccuggccggacggggccgaccugaaccugaugcccaucuga

SEQ ID NO: 89630 - RNA, 1410 nt, Artificial Sequence; identical to SEQ ID NO: 89622
  derived and/or modified CDS sequence (opt1) from neuraminidase__InfluenzaA__AIJ10836

SEQ ID NO: 89631 - RNA, 1410 nt, Artificial Sequence
  derived and/or modified CDS sequence (opt1) from neuraminidase__InfluenzaA__AIJ10837
augaaccccaaccagaagaucaucaccaucggcagcgugucccugaccaucagcacgaucugcuucuucaugcagaucgccauccucaucaccaccgucacccugcacuucaagcaguacgaguucaacuccccgcccaacaaccaggugaugcugugcgagcccacgaucaucgagcgcaacaucaccgagaucguguaccucaccaacaccacgaucgagaaggagaucugccccaagccggccgaguaccggaacuggagcaagccccagugcgggaucaccggcuucgcgcccuucuccaaggacaacagcauccgccuguccgccgggggcgacaucugggucacccgggagcccuacgugagcugcgacccggacaagugcuaccaguucgcccuggggcagggcaccacgcucaacaacgugcacuccaacaacaccguccgcgaccggacccccuaccgcacccugcugaugaacgagcucggcgugcccuuccaccuggggacgaagcaggucugcaucgccuggagcuccagcuccugccacgacggcaaggccuggcugcacgugugcaucaccggggacgacaagaacgcgaccgccagcuucaucuacaacggccggcucguggacuccguggucagcugguccaaggacauccugcgcacccaggagagcgagugcgugugcaucaacgggacgugcaccguggucaugaccgacggcuccgccagcggcaaggccgacaccaagauccuguucaucgaggaggggaagaucauccacacgagcacccucuccggcagcgcgcagcacguggaggagugcuccugcuacccccgguacccgggggugcgcugcgucugccgggacaacuggaagggcagcaaccgccccaucguggacaucaacaucaaggaccacuccaucgugagcuccuacgucugcagcggccuggugggggacaccccgcggaagaacgacuccagcuccagcucccacugccuggaccccaacaacgaggagggcgggcacggcgugaaggggugggccuucgacgacggcaacgacgucuggaugggccgcaccaucaacgagacgagccggcucggguacgagaccuucaaggugaucgagggcugguccaaccccaagagcaagcugcagaucaaccgccaggucaucguggaccgcggggaccgguccggcuacagcgggaucuucuccaucgagggcaagagcugcaucaaccggugcuucuacguggagcugauccgcggccggaaggaggagaccgagguccucuggaccagcaacuccaucgugguguucugcgggacgagcggcaccuacgggaccggcuccuggcccgacggggccgaccugaaccugaugcccaucuga

SEQ ID NO: 89632 - RNA, 1410 nt, Artificial Sequence; identical to SEQ ID NO: 89622
  derived and/or modified CDS sequence (opt1) from neuraminidase__InfluenzaA__AIJ10838

SEQ ID NO: 89633 - RNA, 1410 nt, Artificial Sequence
  derived and/or modified CDS sequence (opt1) from neuraminidase__InfluenzaA__AIJ10841
augaaccccaaccagaagaucaucaccaucggcagcgugucccugaccaucagcacgaucugcuucuucaugcagaucgccauccucaucaccaccgucacccugcacuucaagcaguacgaguucaacuccccgcccaacaaccaggugaugcugugcgagcccacgaucaucgagcgcaacaucaccgagaucguguaccucaccaacaccacgaucgagaaggagaucugccccaagccggccgaguaccggaacuggagcaagccccagugcgggaucaccggcuucgcgcccuucuccaaggacaacagcauccgccuguccgccgggggcgacaucugggucacccgggagcccuacgugagcugcgacccggacaagugcuaccaguucgcccuggggcagggcaccacgcucaacaacgugcacuccaacaacaccguccgcgaccggacccccuaccgcacccugcugaugaacgagcucggcgugcccuuccaccuggggacgaagcaggucugcaucgccuggagcuccagcuccugccacgacggcaaggccuggcugcacgugugcaucaccggggacgacaagaacgcgaccgccagcuucaucuacaacggccggcucguggacuccguggucagcugguccaaggacauccugcgcacccaggagagcgagugcgugugcaucaacgggacgugcaccguggucaugaccgacggcuccgccagcggcgaggccgacaccaagauccuguucaucgaggaggggaagaucgugcacacgagcacccucuccggcagcgcgcagcacguggaggagugcuccugcuacccccgguacccggggguccgcugcgugugccgggacaacuggaagggcagcaaccgccccaucguggacaucaacaucaaggaccacuccaucgucagcuccuacgugugcagcggccuggugggggacaccccgcggaagaacgacuccagcuccagcucccacugccuggaccccaacaacgaggagggcgggcacggcgucaaggggugggccuucgacgacggcaacgacguguggaugggccgcaccaucaacgagacgagccggcucggguacgagaccuucaaggucaucgagggcugguccaaccccaagagcaagcugcagaucaaccgccaggugaucguggaccgcggggaccgguccggcuacagcgggaucuucuccaucgagggcaagagcugcaucaaccggugcuucuacgucgagcugauccgcggccggaaggaggagaccgaggugcucuggaccagcaacuccaucguggucuucugcgggacgagcggcaccuacgggaccggcuccuggcccgacggggccgaccugaaccugaugcccaucuga

SEQ ID NO: 89634 - RNA, 1410 nt, Artificial Sequence
  derived and/or modified CDS sequence (opt1) from neuraminidase__InfluenzaA__AIJ10842
augaaccccaaccagaagaucaucaccaucggcagcgugucccugaccaucagcacgaucugcuucuucaugcagaucgccauccucaucaccaccgucacccugcacuucaagcaguacgaguucaacccgccgcccaacaaccaggugaugcugugcgagcccacgaucaucgagcgcaacaucaccgagaucguguaccucaccaacaccacgaucgagaaggagaucugccccaagcccgccgaguaccggaacugguccaagccccagugcgggaucaccggcuucgcgcccuucagcaaggacaacuccauccgccugagcgccgggggcgacaucugggucacccgggagccguacguguccugcgaccccgacaagugcuaccaguucgcccuggggcagggcaccacgcucaacaacgugcacagcaacaacaccguccgcgaccggacccccuaccgcacccugcugaugaacgagcucggcgugcccuuccaccuggggacgaagcaggucugcaucgccugguccagcuccagcugccacgacggcaaggccuggcugcacgugugcaucaccggggacgacaagaacgcgaccgccuccuucaucuacaacggccggcucguggacagcguggucuccuggagcaaggacauccugcgcacccaggaguccgagugcgugugcaucaacgggacgugcaccguggucaugaccgacggcagcgccuccggcaaggccgacaccaagauccuguucaucgaggaggggaagaucgugcacacgagcacccucagcggcuccgcgcagcacguggaggagugcagcugcuacccgcgguaccccgggguccgcugcgugugccgggacaacuggaagggcuccaaccgccccaucguggacaucaacaucaaggaccacagcaucgucuccagcuacgugugcuccggccuggugggggacacgccccggaagaacgacagcuccagcuccagccacugccuggacccgaacaacgaggagggcgggcacggcgucaaggggugggccuucgacgacggcaacgacguguggaugggccgcaccaucaacgagaccucccggcucggguacgagaccuucaaggucaucgagggcuggagcaaccccaaguccaagcugcagaucaaccgccaggugaucguggaccgcggggaccggagcggcuacuccgggaucuucagcaucgagggcaaguccugcaucaaccggugcuucuacgucgagcugauccgcggccggaaggaggagaccgaggugcucuggaccagcaacagcaucguggucuucugcgggacguccggcaccuacgggaccggcagcuggcccgacggggccgaccugaaccugaugcccaucuga

SEQ ID NO: 89635 - RNA, 1410 nt, Artificial Sequence; identical to SEQ ID NO: 89622
  derived and/or modified CDS sequence (opt1) from neuraminidase__InfluenzaA__AIJ10843

SEQ ID NO: 89636 - RNA, 1410 nt, Artificial Sequence
  derived and/or modified CDS sequence (opt1) from neuraminidase__InfluenzaA__AIJ10844
augaaccccaaccagaagaucaucaccaucggcagcgugucccugaccaucagcacgaucugcuucuucaugcagaucgccauccucaucaccaccgucacccugcacuucaagcaguacgaguucaacuccccgcccaacaaccaggugaugcugugcgagcccacgaucaucgagcgcaacaucaccgagaucguguaccucaccaacaccacgaucgagaaggagaucugccccaagccggccgaguaccggaacuggagcaagccccagugcgggaucaccggcuucgcgcccuucuccaaggacaacagcauccgccuguccgccgggggcgacaucugggucacccgggagcccuacgugagcugcgacccggacaagugcuaccaguucgcccuggggcagggcaccacgcucaacaacgugcacuccaacaacaccguccgcgaccggacccccuuccgcacccugcugaugaacgagcucggcgugcccuuccaccuggggacgaagcaggucugcaucgccuggagcuccagcuccugccacgacggcaaggccuggcugcacgugugcaucaccggggacgacaagaacgcgaccgccagcuucaucuacaacggccggcucguggacuccguggucagcugguccaaggagauccugcgcacccaggagagcgagugcgugugcaucaacgggacgugcaccguggucaugaccgacggcuccgccagcggcaaggccgugaccaagauccuguucaucgaggaggggaagaucgugcacacgagcacccucuccggcagcgcgcagcacgucgaggagugcuccugcuacccccgguacccgggggugcgcugcgugugccgggacaacuggaagggcagcaaccgccccaucgucgacaucaacaucaaggaccacuccaucgugagcggcuacgugugcuccgggcuggucggcgacaccccgcggaagaacgacagcuccagcuccgggcacugccuggaccccaacaacgaggagggcgggcacggcgugaagggcugggccuucgacgacgggaacgacgucuggaugggccgcaccaucaacgagacgagccggcucggguacgagaccuucaaggugaucaagggcugguccaaccccaagagcaagcugcagaucaaccgccaggugaucgucgaccgcggggaccgguccggcuacagcggcaucuucuccguggagggcaagagcugcaucaaccggugcuucuacguggagcugauccgcgggcggaaggaggagaccgagguccucuggaccuccaacagcaucgugguguucugcgggacgagcggcaccuacgggaccggcuccuggcccgacggcgccgaccugaaccugaugcccaucuga

SEQ ID NO: 89637 - RNA, 1410 nt, Artificial Sequence
  derived and/or modified CDS sequence (opt1) from neuraminidase__InfluenzaA__AIJ10845
augaaccccaaccagaagaucaucaccaucggcagcgugucccugaccaucagcacgaucugcuucuucaugcagaucgccauccucaucaccaccgucacccugcacuucaagcaguacgaguucaacuccccgcccaacaaccaggugaugcugugcgagcccacgaucaucgagcgcaacaucaccgagaucguguaccucaccaacaccaucaucgagaaggagaucugccccaagccggccgaguaccggaacuggagcaagccccagugcgggaucacgggcuucgcgcccuucuccaaggacaacagcauccgccuguccgccgggggcgacaucugggucacccgggagcccuacgugagcugcgacccggacaagugcuaccaguucgcccuggggcagggcaccacccucaacaacgugcacuccaacaacacgguccgcgaccggacccccuuccgcacccugcugaugaacgagcucggcgugcccuuccaccuggggaccaagcaggucugcaucgccuggagcuccagcuccugccacgacggcaaggccuggcugcacgugugcaucacgggggacgacaagaacgcgaccgccagcuucaucuacaacggccggcucguggacuccguggucagcugguccaaggagauccugcgcacccaggagagcgagugcgugugcaucaacgggaccugcacgguggucaugaccgacggcuccgccagcggcaaggccgugaccaagauccuguucaucgaggaggggaagaucgugcacaccagcacgcucuccggcagcgcgcagcacgucgaggagugcuccugcuacccccgguacccgggggugcgcugcgugugccgggacaacuggaagggcagcaaccgccccaucgucgacaucaacaucaaggaccacuccaucgugagcggcuacgugugcuccgggcuggucggcgacacgccccggaagaacgacagcuccagcuccagccacugccuggaccccaacaacgaggagggcgggcacggggugaagggcugggccuucgacgacggcaacgacgucuggauggggcgcaccaucaacgagaccucccggcucggcuacgagaccuucaaggugaucgagggguggagcaacccgaaguccaagcugcagaucaaccgccaggugaucgucgaccggggcgaccgcagcggguacuccggcaucuucagcguggagggcaaguccugcaucaaccggugcuucuacguggagcugauccgcgggcggaaggaggagaccgagguccucuggaccagcaacagcaucgugguguucugcggcaccuccgggacguacggcaccgggagcuggcccgacggcgccgaccugaaccugaugcccaucuga

SEQ ID NO: 89638 - RNA, 1410 nt, Artificial Sequence
  derived and/or modified CDS sequence (opt1) from neuraminidase__InfluenzaA__AIJ10847
augaaccccaaccagaagaucaucaccaucggcagcgugucccugaccaucagcacgaucugcuucuucaugcagaucgccauccucaucaccaccgucacccugcacuucaagcaguacgaguucaacuccccgcccaacaaccaggugaugcugugcgagcccacgaucaucgagcgcaacaucaccgagaucguguaccucaccaacaccacgaucgagaaggagaucugccccaagccggccgaguaccggaacuggagcaagccccagugcgggaucaccggcuucgcgcccuucuccaaggacaacagcauccgccuguccgccgggggcgacaucugggucacccgggagcccuacgugagcugcgacccggacaagugcuaccaguucgcccuggggcagggcaccacgcucaacaacgugcacuccaacaacaccguccgcgaccggacccccuaccgcacccugcugaugaacgagcucggcgugcccuuccaccuggggacgaagcaggucugcaucgccuggagcuccagcuccugccacgacggcaaggccuggcugcacgugugcaucaccggggacgacaagaacgcgaccgccagcuucaucuacaacggccggcucguggacuccguggucagcugguccaaggacauccugcgcacccaggagagcgagugcgugugcaucaacgggacgugcaccguggucaugaccgacggcuccgccagcggcaaggccgacaccaagauccuguucaucgaggaggggaagaucgugcacacgagcacccucuccggcagcgcgcagcacguggaggagugcuccugcuacccccgguacccggggguccgcugcgugugccgggacaacuggaagggcagcaaccgccccaucguggacaucaacaucaaggaccacuccaucgucagcuccuacgugugcagcggccuggugggggacacgccccggaagaacgacuccuucagcuccagccacugccuggaccccaacaacgaggagggcgggcacggcgucaaggggugggccuucgacgacggcaacgacguguggaugggccgcaccaucaacgagaccucccggcucggguacgagaccuucaaggucaucgagggcuggagcaacccgaaguccaagcugcagaucaaccgccaggugaucguggaccgcggggaccggagcggcuacuccgggaucuucagcaucgagggcaaguccugcaucaaccggugcuucuacgucgagcugauccgcggccggaaggaggagaccgaggugcucuggaccagcaacagcaucguggucuucugcgggacguccggcaccuacgggaccggcagcuggcccgacggggccgaccugaaccugaugcccaucuga

SEQ ID NO: 89639 - RNA, 1410 nt, Artificial Sequence; identical to SEQ ID NO: 89622
  derived and/or modified CDS sequence (opt1) from neuraminidase__InfluenzaA__AIJ10848

SEQ ID NO: 89640 - RNA, 1410 nt, Artificial Sequence
  derived and/or modified CDS sequence (opt1) from neuraminidase__InfluenzaA__AIJ10849
augaaccccaaccagaagaucaucaccaucggcagcgugucccugaccaucagcacgaucugcuucuucaugcagaucgccauccucaucaccaccgucacccugcacuucaagcaguacgaguucaacuccccgcccaacaaccaggugaugcugugcgagcccacgaucaucgagcgcaacaucaccgagaucguguaccucaccaacaccacgaucgagaaggagaucugccccaagccggccgaguaccggaacuggagcaagccccagugcgggaucaccggcuucgcgcccuucuccaaggacaacagcauccgccuguccgccgggggcgacaucugggucacccgggagcccuacgugagcugcgacccggacaagugcuaccaguucgcccuggggcagggcaccacgcucaacaacgugcacuccaacaacaccguccgcgaccggacccccuuccgcacccugcugaugaacgagcucggcgugcccuuccaccuggggacgaagcaggucugcaucgccuggagcuccagcuccugccacgacggcaaggccuggcugcacgugugcaucaccggggacgacaagaacgcgaccgccagcuucaucuacaacggccggcucguggacuccguggucagcugguccaaggagauccugcgcacccaggagagcgagugcgugugcaucaacgggacgugcaccguggucaugaccgacggcuccgccagcggcaaggccgugaccaagauccuguucaucgaggaggggaagaucgugcacacgagcacccucuccggcagcgcgcagcacgucgaggagugcuccugcuacccccgguacccgggggugcgcugcgugugccgggacaacuggaagggcagcaaccgccccaucgucgacaucaacaucaaggaccacuccaucgugagcggcuacgugugcuccgggcuggucggcgacacgccccggaagaacgacagcuccagcuccagccacugccuggaccccaacaacgaggagggcgggcacggggugaagggcugggccuucgacgacggcaacgacgucuggauggggcgcaccaucaacgagaccucccggcucggcuacgagaccuucaaggugaucgagggguggagcaacccgaaguccaagcugcagaucaaccgccaggugaucgucgaccggggcgaccgcagcggguacuccggcaucuucagcguggagggcaaguccugcaucaaccggugcuucuacguggagcugauccgcgggcggaaggaggagaccgagguccucuggaccagcaacagcaucgugguguucugcggcacguccgggaccuacggcaccgggagcuggcccgacggcgccgaccugaaccugaugcccaucuga

SEQ ID NO: 89641 - RNA, 1410 nt, Artificial Sequence; identical to SEQ ID NO: 89640
  derived and/or modified CDS sequence (opt1) from neuraminidase__InfluenzaA__AIJ10851

SEQ ID NO: 89642 - RNA, 1410 nt, Artificial Sequence; identical to SEQ ID NO: 89640
  derived and/or modified CDS sequence (opt1) from neuraminidase__InfluenzaA__AIJ10852

SEQ ID NO: 89643 - RNA, 1410 nt, Artificial Sequence; identical to SEQ ID NO: 89636
  derived and/or modified CDS sequence (opt1) from neuraminidase__InfluenzaA__AIJ10853

SEQ ID NO: 89644 - RNA, 1410 nt, Artificial Sequence; identical to SEQ ID NO: 89636
  derived and/or modified CDS sequence (opt1) from neuraminidase__InfluenzaA__AIJ10854

SEQ ID NO: 89645 - RNA, 1410 nt, Artificial Sequence
  derived and/or modified CDS sequence (opt1) from neuraminidase__InfluenzaA__AIJ10855
augaaccccaaccagaagaucaucaccaucggcagcgugucccugaccaucagcacgaucugcuucuucaugcagaucgccauccucaucaccaccgucacccugcacuucaagcaguacgaguucaacuccccgcccaacaaccaggugaugcugugcgagcccacgaucaucgagcgcaacaucaccgagaucguguaccucaccaacaccacgaucgagaaggagaucugccccaagccggccgaguaccggaacuggagcaagccccagugcgggaucaccggcuucgcgcccuucuccaaggacaacagcauccgccuguccgccgggggcgacaucugggucacccgggagcccuacgugagcugcgacccggacaagugcuaccaguucgcccuggggcagggcaccacgcucaacaacgugcacuccaacaacaccguccgcgaccggacccccuuccgcacccugcugaugaacgagcucggcgugcccuuccaccuggggacgaagcaggucugcaucgccuggagcuccagcuccugccacgacggcaaggccuggcugcacgugugcaucaccggggacgacaagaacgcgaccgccagcuucaucuacaacggccggcucguggacuccguggucagcugguccaaggagauccugcgcacccaggagagcgagugcgugugcaucaacgggacgugcaccguggucaugaccgacggcuccgccagcggcaaggccgugaccaagauccuguucaucgaggaggggaagaucgugcacacgagcacccucuccggcagcgcgcagcacgucgaggagugcuccugcuacccccgguacccgggggugcgcugcgugugccgggacaacuggaagggcagcaaccgccccaucgucgacaucaacaucaaggaccacuccaucgugagcggcuacgugugcuccgggcuggucggcgacacgccccggaagaacgacagcuccagcuccagccacugccuggaccccaacaacgaggagggggaccacggcgugaaggggugggccuucgacgacggcaacgacgucuggaugggccgcaccaucaacgagaccucccggcucggguacgagaccuucaaggugaucgagggcuggagcaacccgaaguccaagcugcagaucaaccgccaggugaucgucgaccgcggggaccggagcggcuacuccgggaucuucagcguggagggcaaguccugcaucaaccggugcuucuacguggagcugauccgcggccggaaggaggagaccgagguccucuggaccagcaacagcaucgugguguucugcgggacguccggcaccuacgggaccggcagcuggcccgacggggccgaccugaaccugaugcccaucuga

SEQ ID NO: 89646 - RNA, 1410 nt, Artificial Sequence
  derived and/or modified CDS sequence (opt1) from neuraminidase__InfluenzaA__AIJ10856
augaaccccaacaagaagaucaucaccaucggcagcgugucccugaccaucagcacgaucugcuucuucaugcagaucgccauccucaucaccaccgucacccugcacuucaagcaguacgaguucaacuccccgcccaacaaccaggugaugcugugcgagcccacgaucaucgagcgcaacaucaccgagaucguguaccucaccaacaccacgaucgagaaggagaucugccccaagccggccgaguaccggaacuggagcaagccccagugcgggaucaccggcuucgcgcccuucuccaaggacaacagcauccgccuguccgccgggggcgacaucugggucacccgggagcccuacgugagcugcgacccggacaagugcuaccaguucgcccuggggcagggcaccacgcucaagaacgugcacuccaacaacaccguccgcgaccggacccccuaccgcacccugcugaugaacgagcucggcgugcccuuccaccuggggacgaagcaggucugcaucgccuggagcuccagcuccugccacgacggcaaggccuggcugcacgugugcaucaccggggacgacaagaacgcgaccgccagcuucaucuacaacggccggcucguggacuccguggucagcugguccaaggacauccugcgcacccaggagagcgagugcgugugcaucaacgggacgugcaccguggucaugaccgacggcuccgccagcggcaaggccgacaccaagauccuguucaucgaggaggggaagaucgugcacacgagcacccucuccggcagcgcgcagcacguggaggagugcuccugcuacccccgguacccggggguccgcugcgugugccgggacaacuggaagggcagcaaccgccccaucguggacaucaacaucaaggaccacuccaucgucagcuccuacgugugcagcggccuggugggggacaccccgcggaagaacgacuccuucagcuccggccacugccuggaccccaacaacgaggagggcgggcacggggucaagggcugggccuucgacgacggcaacgacguguggauggggcgcaccaucaacgagacgagccggcucggcuacgagaccuucaaggucaucgaggggugguccaaccccaagagcaagcugcagaucaaccgccaggugaucguggaccggggcgaccgcuccggguacagcggcaucuucuccaucgagggcaagagcugcaucaaccggugcuucuacgucgagcugauccgcgggcggaaggaggagaccgaggugcucuggaccuccaacagcaucguggucuucugcggcacgagcgggaccuacggcaccggguccuggcccgacggcgccgaccugaaccugaugcccaucuga

SEQ ID NO: 89647 - RNA, 1410 nt, Artificial Sequence; identical to SEQ ID NO: 89622
  derived and/or modified CDS sequence (opt1) from neuraminidase__InfluenzaA__AIJ10857

SEQ ID NO: 89648 - RNA, 1410 nt, Artificial Sequence; identical to SEQ ID NO: 86170
  derived and/or modified CDS sequence (opt1) from neuraminidase__InfluenzaA__AIJ29348

SEQ ID NO: 89649 - RNA, 1410 nt, Artificial Sequence; identical to SEQ ID NO: 86170
  derived and/or modified CDS sequence (opt1) from neuraminidase__InfluenzaA__AIJ29350

SEQ ID NO: 89650 - RNA, 1410 nt, Artificial Sequence
  derived and/or modified CDS sequence (opt1) from neuraminidase__InfluenzaA__AIJ29352
augaaccccaaccagaagaucaucaccaucggcagcgugucccugaccaucagcacgaucugcuucuucaugcagaucgccauccucaucaccaccgucacccugcacuucaagcaguacgaguucaacuccccgcccaacaaccaggugaugcugugcgagcccacgaucaucgagcgcaacaucaccgagaucguguaccucaccaacaccacgaucgagaaggagaucugccccaagccggccaaguaccggaacuggagcaagccccagugcgggaucaccggcuucgcgcccuucuccaaggacaacagcauccgccuguccgccgggggcgacaucugggucacccgggagcccuacgugagcugcgacccggacaagugcuaccaguucgcccuggggcagggcaccacgcucaacaacgugcacuccaacaacaccguccgcgaccggacccccuaccgcacccugcugaugaacgagcucggcgugcccuuccaccuggggacgaagcaggucugcaucgccuggagcuccagcuccugccacgacggcaaggccuggcugcacgugugcaucaccggggacgacaagaacgcgaccgccagcuucaucuacaacggccggcucguggacuccguggucagcugguccaaggagauccugcgcacccaggagagcgagugcgugugcaucaacgggacgugcaccguggucaugaccgacggcuccgccagcggcaaggccgacaccaagauccuguucaucgaggaggggaagaucgugcacacgagcacccucuccggcagcgcgcagcacguggaggagugcuccugcuacccccgguacccggggguccgcugcgugugccgggacaacuggaagggcagcaaccgccccaucguggacaucaacaucaaggaccacuccaucgucagcuccuacgugugcagcggccuggugggggacaccccgcggaagaacgacuccagcuccagcucccacugccuggaccccaacaacgaggagggcgggcacggcgucaaggggugggccuucgacgacggcaacgacguguggaugggccgcaccaucaacgagacgagccggcucggguacgagaccuucaaggucaucgagggcugguccaaccccaagagcaagcugcagaucaaccgccaggugaucguggaccgcggggaccgguccggcuacagcgggaucuucuccgucgagggcaagagcugcaucaaccggugcuucuacguggagcugauccgcggccggaaggaggagaccgaggugcucuggaccagcaacuccaucgucguguucugcgggacgagcggcaccuacgggaccggcuccuggcccgacggggccgaccugaaccugaugcccaucuga

SEQ ID NO: 89651 - RNA, 1410 nt, Artificial Sequence; identical to SEQ ID NO: 85167
  derived and/or modified CDS sequence (opt1) from neuraminidase__InfluenzaA__AIJ29354

SEQ ID NO: 89652 - RNA, 1410 nt, Artificial Sequence; identical to SEQ ID NO: 86946
  derived and/or modified CDS sequence (opt1) from neuraminidase__InfluenzaA__AIJ29356

SEQ ID NO: 89653 - RNA, 1410 nt, Artificial Sequence; identical to SEQ ID NO: 86946
  derived and/or modified CDS sequence (opt1) from neuraminidase__InfluenzaA__AIJ29358

SEQ ID NO: 89654 - RNA, 1410 nt, Artificial Sequence
  derived and/or modified CDS sequence (opt1) from neuraminidase__InfluenzaA__AIJ29360
augaaccccaaccagaagaucaucaccaucggcagcgugucccugaccaucagcacgaucugcuucuucaugcagaucgccauccucaccaccaccgucacgcugcacuucaagcaguacgaguucaacuccccgcccaacaaccaggugaugcugugcgagcccaccaucaucgagcgcaacaucaccgagaucguguaccucaccaacacgaccaucgagaaggagaucugccccaagccggccgaguaccggaacuggagcaagccccagugcgggaucaccggcuucgcgcccuucuccaaggacaacagcauccgccuguccgccgggggcgacaucugggucacccgggagcccuacgugagcugcgacccggacaagugcuaccaguucgcccuggggcagggcacgacccucaacaacgugcacuccaacaacaccguccgcgaccggacccccuaccgcacgcugcugaugaacgagcucggcgugcccuuccaccuggggaccaagcaggucugcaucgccuggagcuccagcuccugccacgacggcaaggccuggcugcacgugugcaucaccggggacgacaagaacgcgaccgccagcuucaucuacaacggccggcucguggacuccguggucagcugguccaaggagauccugcgcacgcaggagagcgagugcgugugcaucaacgggaccugcaccguggucaugaccgacggcuccgccagcggcaaggccgacacgaagauccuguucaucgaggaggggaagaucgugcacaccagcacccucuccggcagcgcgcagcacguggaggagugcuccugcuacccccgguacccggggguccgcugcgugugccgggacaacuggaagggcagcaaccgccccaucguggacaucaacaucaaggaccacuccaucgucagcuccuacgugugcagcggccuggugggggacaccccgcggaagaacgacuccagcuccagcucccacugccuggaccccaacaacgaggagggcgggcacggcgucaaggggugggccuucgacgacggcaacgacguguggaugggccgcacgaucaacgagaccagccggcucggguacgagaccuucaaggucaucgagggcugguccaaccccaagagcaagcugcagaucaaccgccaggugaucguggaccgcggggaccgguccggcuacagcgggaucuucuccgucgagggcaagagcugcaucaaccggugcuucuacguggagcugauccgcggccggaaggaggagaccgaggugcucuggacgagcaacuccaucgucguguucugcgggaccagcggcaccuacgggaccggcuccuggcccgacggggccgaccugaaccugaugcccaucuga

SEQ ID NO: 89655 - RNA, 1410 nt, Artificial Sequence; identical to SEQ ID NO: 86170
  derived and/or modified CDS sequence (opt1) from neuraminidase__InfluenzaA__AIJ29362

SEQ ID NO: 89656 - RNA, 1410 nt, Artificial Sequence
  derived and/or modified CDS sequence (opt1) from neuraminidase__InfluenzaA__AIL93626
augaaccccaaccagaagaucaucaccaucggcagcgugugcaugaccaucgggauggccaaccugauccuccagaucggcaacaucaucuccaucuggaucagccacuccauccagcuggggaaccagagccagaucgaggccugcaaccaguccgucaucacguacgagaacaacaccuacgugaaccagaccuacgugaacaucagcaacaccaacuucgcggccggccgcuccgucgugagcgugaagcuggccgggaacuccagccucugcccggucuccggcugggccaucuacagcaaggacaacuccgugcggaucggcagcaagggggacguguucgucauccgcgagcccuucaucuccugcagcccccuggagugccggacguucuuccugacccagggcgcccuccugaacgacaagcacuccaacgggaccaucaaggaccgcagccccuaccggacccugauguccugcccgaucggcgaggugcccagccccuacaacagccgcuucgaguccguggcguggagcgccuccgccugccacgacgggaucaacuggcucacgaucggcaucagcggccccgacuccggggccgucgcggugcugaaguacaacggcaucaucaccgacaccaucaagagcuggaagaacaacauccugcggacccaggaguccgagugcgccugcgugaacgggagcugcuucacgaucaugaccgacggcccguccgacggccaggccagcuacaagaucuuccgcaucgagaaggggaagaucgucaaguccguggagaugaacgcccccaacuaccacuacgaggagugcagcugcuaccccgacuccagcgagaucacgugcgugugccgggacaacuggcacggcuccaaccgccccugggucagcuucaaccagaaccucgaguaccagaucggguacaucugcuccggcguguucggggacaacccgcggcccaacgacaagaccggcagcugcggccccgugcuguccaacggggccaacggcgucaagggguucagcuucaaguacggcaacgggguguggaucggccgcaccaagagcaucuccagccggaagggcuucgagaugaucugggaccccaacggguggaccggcaccgacaacaacuucuccaucaagcaggacaucguggggaucaacgaguggagcggcuacuccgggagcuucguccagcacccggagcugaccggccucgacugcauccgccccugcuucuggguggagcugauccggggccgccccaaggagaacacgaucuggaccuccgggagcuccaucagcuucugcggcgucaacuccgacaccgugggguggagcuggcccgacggcgcggagcugccguucaccaucgacaaguga

SEQ ID NO: 89657 - RNA, 1410 nt, Artificial Sequence
  derived and/or modified CDS sequence (opt1) from neuraminidase__InfluenzaA__AIL93648
augaaccccaaccagaagaucaucaccaucggcagcgugucccugaccaucagcacgaucugcuucuucaugcagaucgccauccucaucaccaccgucacccugcacuucaagcaguacgaguucaacuccccgcccaacaaccaggugaugcugugcgagcccacgaucaucgagcgcaacaucaccgagaucguguaccucaccaacaccacgaucgagaaggagaucugccccaagccggccgaguaccggaacuggagcaagccccagugcgggaucaccggcuucgcgcccuucuccaaggacaacagcauccgccuguccgccgggggcgacaucugggucacccgggagcccuacgugagcugcgacccggacaagugcuaccaguucgcccuggggcagggcaccacgcucaacaacgugcacuccaacaacaccguccgcgaccggacccccuaccgcacccugcugaugaacgagcucggcgugcccuuccaccuggggacgaagcaggucugcaucgccuggagcuccagcuccugccacgacggcaaggccuggcugcacgugugcaucaccggggacgacaagaacgcgaccgccagcuucaucuacaacggccggcucguggacuccguggucagcugguccaaggagauccugcgcacccaggagagcgagugcgugugcaucaacgggacgugcaccguggucaugaccgacggcuccgccagcggcaaggccgacaccaagauccuguucaucgaggaggggcggaucgugcacacgagcacccucuccggcagcgcgcagcacguggaggagugcuccugcuacccccgcuacccggggguccggugcgugugccgcgacaacuggaagggcagcaaccggcccaucguggacaucaacaucaaggaccacuccaucgucagcuccuacgugugcagcggccuggugggggacaccccgcgcaagaacgacuccagcuccagcucccacugccuggaccccaacaacgaggagggcgggcacggcgucaaggggugggccuucgacgacggcaacgacguguggaugggccggaccaucaacgagacgagccgccucggguacgagaccuucaaggucaucgagggcugguccaaccccaagagcaagcugcagaucaacaagcaggucaucguggaccgcggggaccgguccggcuacagcgggaucuucuccguggagggcaagagcugcaucaaccggugcuucuacguggagcugauccgcggccggaaggaggagaccgaggugcucuggaccagcaacuccaucgucguguucugcgggacgagcggcaccuacgggaccggcuccuggcccgacggggccgaccugaaccugaugcccaucuga

SEQ ID NO: 89658 - RNA, 1410 nt, Artificial Sequence; identical to SEQ ID NO: 86170
  derived and/or modified CDS sequence (opt1) from neuraminidase__InfluenzaA__AIL93660

SEQ ID NO: 89659 - RNA, 1410 nt, Artificial Sequence; identical to SEQ ID NO: 86170
  derived and/or modified CDS sequence (opt1) from neuraminidase__InfluenzaA__AIL93672

SEQ ID NO: 89660 - RNA, 1410 nt, Artificial Sequence
  derived and/or modified CDS sequence (opt1) from neuraminidase__InfluenzaA__AIL93684
augaaccccaaccagaagaucaucaccaucggcagcgugugcaugaccaucgggauggccaaccugauccuccagaucggcaacaucaucuccaucuggaucagccacuccauccagcuggggaaccagagccagaucgaggccugcaaccaguccgucaucacguacgagaacaacaccugggugaaccagaccuacgugaacaucagcaacaccaacuccgcgacgggccagagcgucguguccgugaagcuggccgggaacagcucccucugcccggucagcggcugggccaucuacuccaaggacaacagcgugcgcaucggcuccaagggggacguguucgucauccgggagcccuucaucagcugcagcccccuggagugccgcaccuucuuccugacccagggcgcccuccugaacgacaagcacuccaacgggaccaucaaggaccggucccccuaccgcacgcugaugagcugcccgaucggcgaggugcccagccccuacaacucccgguucgagagcguggccugguccgcgagcgccugccacgacgggaucaacuggcucaccaucggcaucuccggccccgacagcggggccgucgccgugcugaaguacaacggcaucaucaccgacaccaucaaguccuggaagaacaacauccugcgcacgcaggagagcgagugcgcgugcgugaacggguccugcuucaccaucaugaccgacggcccgagcgacggccaggccuccuacaagaucuuccggaucgagaaggggaagaucgucaagagcguggagaugaacgcccccaacuaccacuacgaggagugcuccugcuaccccgacagcuccgagaucacgugcgugugccgcgacaacuggcacggcagcaaccggcccugggucuccuucaaccagaaccucgaguaccagaucggguacaucugcagcggcguguucggggacaacccgcgccccaacgacaagaccggcuccugcggccccgugcugagcaacggggccaacggcgucaagggguucagcuucaaguacggcaacgggguguggaucggccggaccaaguccaucagcucccgcaagggcuucgagaugaucugggaccccaacggguggaccggcaccgacaacaacuucagcaucaagcaggacaucguggggaucaacgagugguccggcuacagcggguccuucguccagcacccggagcugacgggccucgacugcauccggcccugcuucuggaucgagcugauccgcggccggcccaaggagaacaccaucuggaccagcggguccagcaucuccuucugcggcgugaacagcgacaccgucgggugguccuggcccgacggcgccgagcugccguucacgaucgacaaguga

SEQ ID NO: 89661 - RNA, 1410 nt, Artificial Sequence
  derived and/or modified CDS sequence (opt1) from neuraminidase__InfluenzaA__AIL93719
augaaccccaaccagaagaucaucaccaucggcagcgugucccugaccaucagcacgaucugcuucuucaugcagaucgccauccucaucaccaccgucacccugcacuucaagcaguacgaguucaacuccccgcccaacaaccaggugaugcugugcgagcccacgaucaucgagcgcaacaucaccgagaucguguaccucaccaacaccacgaucgagaaggagaucugccccaagccggccgaguaccggaacuggagcaagccccagugcgggaucaccggcuucgcgcccuucuccaaggacaacagcauccgccuguccgccgggggcgacaucugggucacccgggagcccuacgugagcugcgacccggacaagugcuaccaguucgcccuggggcagggcaccacgcucaacaacgugcacuccaacaacaccguccgcgaccggacccccuaccgcacccugcugaugaacgagcucggcgugcccuuccaccuggggacgaagcaggucugcaucgccuggagcuccagcuccugccacgacggcaaggccuggcugcacgugugcaucaccggggacgacaagaacgcgaccgccagcuucaucuacaacggccggcucguggacuccguggucagcugguccaaggagauccugcgcacccaggagagcgagugcgugugcaucaacgggacgugcaccguggucaugaccgacggcuccgccagcggcaaggccgacaccaagauccuguucaucgaggaggggaagaucgugcacacgagcacccucuccggcagcgcgcagcacguggaggagugcuccugcuacccccgguacccggggguccgcugcgugugccgggacaacuggaagggcagcaaccgccccaucguggacaucaacaucaaggaccacuccaucgucagcuccuacgugugcagcggccuggugggggacaccccgcggaagaacgacuccagcuccagcucccacugccuggaccccaacaacgaggagggcgggcacggcgucaaggggugggccuucgacgacggcaacgacguguggaugggccgcaccaucaacgagacgagccggcucggguacgagaccuucaaggucaucgagggcugguccaaccccaagagcaagcugcagaucaacaagcaggucaucguggaccgcggggaccgguccggcuacagcgggaucuucuccguggagggcaagagcugcaucaaccgcugcuucuacguggagcugauccggggccgcaaggaggagaccgaggugcucuggaccagcaacuccaucgucguguucugcgggacgagcggcaccuacgggaccggcuccuggcccgacggggccgaccugaaccugaugcccaucuga

SEQ ID NO: 89662 - RNA, 1410 nt, Artificial Sequence; identical to SEQ ID NO: 89661
  derived and/or modified CDS sequence (opt1) from neuraminidase__InfluenzaA__AIL93743

SEQ ID NO: 89663 - RNA, 1410 nt, Artificial Sequence; identical to SEQ ID NO: 89661
  derived and/or modified CDS sequence (opt1) from neuraminidase__InfluenzaA__AIL93755

SEQ ID NO: 89664 - RNA, 1410 nt, Artificial Sequence; identical to SEQ ID NO: 86170
  derived and/or modified CDS sequence (opt1) from neuraminidase__InfluenzaA__AIL93767

SEQ ID NO: 89665 - RNA, 1410 nt, Artificial Sequence; identical to SEQ ID NO: 86170
  derived and/or modified CDS sequence (opt1) from neuraminidase__InfluenzaA__AIL93779

SEQ ID NO: 89666 - RNA, 1410 nt, Artificial Sequence
  derived and/or modified CDS sequence (opt1) from neuraminidase__InfluenzaA__AIL93791
augaaccccaaccagaagaucaucaccaucggcagcgugucccugaccaucagcacgaucugcuucuucaugcagaucgccauccucaucaccaccgucacccugcacuucaagcaguacaaguucaacuccccgcccaacaaccaggugaugcugugcgagcccacgaucaucgagcgcaacaucaccgagaucguguaccucaccaacaccacgaucgagaaggagaucugccccaagccggccgaguaccggaacuggagcaagccccagugcgggaucaccggcuucgcgcccuucuccaaggacaacagcauccgccuguccgccgggggcgacaucugggucacccgggagcccuacgugagcugcgacccggacaagugcuaccaguucgcccuggggcagggcaccacgcucaacaacgugcacuccaacaacaccguccgcgaccggacccccuaccgcacccugcugaugaacgagcucggcgugcccuuccaccuggggacgaagcaggucugcaucgccuggagcuccagcuccugccacgacggcaaggccuggcugcacgugugcaucaccggggacgacaagaacgcgaccgccagcuucaucuacaacggccggcucguggacuccguggucagcugguccaaggagauccugcgcacccaggagagcgagugcgugugcaucaacgggacgugcaccguggucaugaccgacggcuccgccagcggcaaggccgacaccaagauccuguucaucgaggaggggaagaucgugcacacgcggacccucagcggcuccgcgcagcacguggaggagugcagcugcuacccccgcuacccggggguccggugcgugugccgcgacaacuggaagggcuccaaccggcccaucguggacaucaacaucaaggaccacagcaucgucuccagcuacgugugcuccggccuggugggggacacgccccgcaagaacgacagcuccagcuccagccacugccuggaccccaacaacgaggagggcgggcacggcgucaaggggugggccuucgacgacggcaacgacguguggaugggccggaccaucaacgagaccucccgccucggguacgagaccuucaaggucaucgagggcuggagcaacccgaaguccaagcugcagaucaacaagcaggucaucguggaccgcggggaccggagcggcuacuccgggaucuucagcguggagggcaaguccugcaucaaccggugcuucuacguggagcugauccgcggccggaaggaggagaccgaggugcucuggaccagcaacagcaucgucguguucugcgggacguccggcaccuacgggaccggcagcuggcccgacggggccgaccugaaccugaugcccaucuga

SEQ ID NO: 89667 - RNA, 1410 nt, Artificial Sequence; identical to SEQ ID NO: 89661
  derived and/or modified CDS sequence (opt1) from neuraminidase__InfluenzaA__AIL93803

SEQ ID NO: 89668 - RNA, 1410 nt, Artificial Sequence
  derived and/or modified CDS sequence (opt1) from neuraminidase__InfluenzaA__AIL93815
augaaccccaaccagaagaucaucaccaucggcagcgugucccugaccaucagcacgaucugcuucuucaugcagaucgccauccucaucaccaccgucacccugcacuucaagcaguacgaguucaacuccccgcccaacaaccaggugaugcugugcgagcccacgaucaucgagcgcaacaucaccgagaucguguaccucaccaacaccacgaucgagaaggagaucugccccaagccggccgaguaccggaacuggagcaagccccagugcgggaucaccggcuucgcgcccuucuccaaggacaacagcauccgccuguccgccgggggcgacaucugggucacccgggagcccuacgugagcugcgacccggacaagugcuaccaguucgcccuggggcagggcaccacgcucaacaacgugcacuccaacaacaccguccgcgaccggacccccuaccgcacccugcugaugaacgagcucggcgugcccuuccaccuggggacgaagcaggucugcaucgccuggagcuccagcuccugccacgacggcaaggccuggcugcacgugugcaucaccggggacgacaagaacgcgaccgccagcuucaucuacaacggccggcucguggacuccguggucagcugguccaaggagauccugcgcacccaggagagcgagugcgugugcaucaacgggacgugcaccguggucaugaccgacggcuccgccagcggcaaggccgacaccaagauccuguucaucgaggaggggaagaucgugcacacgagcacccucuccggcagcgcgcagcacguggaggagugcuccugcuacccccgguacccggggguccgcugcgugugccgggacaacuggaagggcagcaaccgccccaucguggacaucaacaucaaggaccacuccaucgucuacagcuacgugugcuccggccuggugggggacacgccccggaagaacgacagcuccagcuccagccacugccugaaccccaacaacgaggagggcgggcacggcgucaaggggugggccuucgacgacggcaacgacguguggaugggccgcaccaucaacgagaccucccggcucggguacgagaccuucaaggucaucgagggcuggagcaacccgaaguccaagcugcagaucaaccgccaggugaucguggaccgcggggaccggagcggcuacuccgggaucuucagcgucgagggcaaguccugcaucaaccggugcuucuacguggagcugauccgcggccggaaggaggagaccgaggugcucuggaccagcaacagcaucgucguguucugcgggacguccggcaccuacgggaccggcagcuggcccgacggggccgaccugaaccugaugcccaucuga

SEQ ID NO: 89669 - RNA, 1410 nt, Artificial Sequence; identical to SEQ ID NO: 86170
  derived and/or modified CDS sequence (opt1) from neuraminidase__InfluenzaA__AIL93827

SEQ ID NO: 89670 - RNA, 1410 nt, Artificial Sequence
  derived and/or modified CDS sequence (opt1) from neuraminidase__InfluenzaA__AIL93839
augaaccccaaccagaagaucaucaccaucggcagcgugugcaugaccaucgggauggccaaccugauccuccagaucggcaacaucaucuccaucuggaucagccacuccauccagcuggggaaccagagccagaucgaggccugcaaccaguccgucaucacguacgagaacaacaccugggugaaccagaccuacgugaacaucagcaacaccaacuucgcgacgggccaguccgucgugagcgugaagcuggccgggaacuccagccucugcccggucuccggcugggccaucuacagcaaggacaacuccgugcgcaucggcagcaagggggacguguucgucauccgggagcccuucaucuccugcagcccccuggagugccgcaccuucuuccugacccagggcgcccuccugaacgacaagcacuccaacgggaccaucaaggaccggagccccuaccgcacgcugauguccugcccgaucggcgaggugcccagccccuacaacagccgguucgaguccguggccuggagcgcguccgccugccacgacgggaucaacuggcucaccaucggcaucagcggccccgacuccggggccgucgccgugcugaaguacaacggcaucaucaccgacaccaucaagagcuggaagaacaacauccugcgcacgcaggaguccgagugcgcgugcgugaacgggagcugcuucaccaucaugaccgacggcccguccgacggccaggccagcuacaagaucuuccggaucgagaaggggaagaucgucaaguccguggagaugaacgcccccaacuaccacuacgaggagugcagcugcuaccccgacuccagcgagaucacgugcgugugccgcgacaacuggcacggcuccaaccggcccugggucagcuucaaccagaaccucgaguaccagaucggguacaucugcuccggcguguucggggacaacccgcgccccaacgacaagaccggcagcugcggccccguguccagcaacggggccaacggcgucaagggguucagcuucaaguacggcaacgggguguggaucggccggaccaaguccaucagcucccgcaagggcuucgagaugaucugggaccccaacggguggaccggcaccgacaacaacuucagcaucaagcaggacaucguggggaucaacgagugguccggcuacagcggguccuucguccagcacccggagcugacgggccuggacugcauccggcccugcuucuggguggagcucauccgcggccggcccaaggagaacaccaucuggaccagcggguccagcaucuccuucugcggcgucaacagcgacaccguggggugguccuggcccgacggcgccgagcugccguucacgaucgacaaguga

SEQ ID NO: 89671 - RNA, 1410 nt, Artificial Sequence
  derived and/or modified CDS sequence (opt1) from neuraminidase__InfluenzaA__AIL93850
augaaccccaaccagaagaucaucaccaucggcagcgugugcaugaccaucgggauggccaaccugauccuccagaucggcaacaucaucuccaucuggaucagccacuccauccagcuggggaaccagagccagaucgaggccugcaaccaguccgucaucacguacgagaacaacaccugggugaaccagaccuacgugaacaucagcaacaccaacuucgcgacgggccaguccgucgugagcgugaagcuggccgggaacuccagccucugcccggucuccggcugggccaucuacagcaaggacaacuccgugcgcaucggcagcaagggggacguguucgucauccgggagcccuucaucuccugcagcccccuggagugccgcaccuucuuccugacccagggcgcccuccugaacgacaagcacuccaacgggaccaucaaggaccggagccccuaccgcacgcugauguccugcccgaucggcgaggugcccagccccuacaacagccgguucgaguccguggccuggagcgcguccgccugccacgacgggaucaacuggcucaccaucggcaucagcggccccgacuccggggccgucgccgugcugaaguacaacggcaucaucaccgacaccaucaagagcuggaagaacaacauccugcgcacgcaggaguccgagugcgcgugcgugaacgggagcugcuucaccaucaugaccgacggcccguccgacggccaggccagcuacaagaucuuccggaucgagaaggggaagaucgucaaguccguggagaugaacgcccccaacuaccacuacgaggagugcagcugcuaccccgacuccagcgagaucacgugcgugugccgcgacaacuggcacggcuccaaccggcccugggucagcuucaaccagaaccucgaguaccagaucggguacaucugcuccggcguguucggggacaacccgcgccccaacgacaagaccggcagcugcggccccguguccagcaacggggccaagggcgucaagggguucagcuucaaguacggcaacgggguguggaucggccggaccaaguccaucagcucccgcaagggcuucgagaugaucugggaccccaacggguggaccggcaccgacaacaacuucagcaucaagcaggacaucguggggaucaacgagugguccggcuacagcggguccuucguccagcacccggagcugacgggccuggacugcauccggcccugcuucuggguggagcucauccgcggccggcccaaggagaacaccaucuggaccagcggguccagcaucuccuucugcggcgucaacagcgacaccguggggugguccuggcccgacggcgccgagcugccguucacgaucgacaaguga

SEQ ID NO: 89672 - RNA, 1410 nt, Artificial Sequence; identical to SEQ ID NO: 89661
  derived and/or modified CDS sequence (opt1) from neuraminidase__InfluenzaA__AIL93861

SEQ ID NO: 89673 - RNA, 1410 nt, Artificial Sequence
  derived and/or modified CDS sequence (opt1) from neuraminidase__InfluenzaA__AIL93885
augaaccccaaccagaagaucaucaccaucggcagcgugucccugaccaucagcacgaucugcuucuucaugcagaucgccauccucaucaccaccgucacccugcacuucaagcaguacgaguucgacuccccgcccaacaaccaggugaugcugugcgagcccacgaucaucgagcgcaacaucaccgagaucguguaccucaccaacaccacgaucgagaaggagaucugccccaagccggccgaguaccggaacuggagcaagccccagugcgggaucaccggcuucgcgcccuucuccaaggacaacagcauccgccuguccgccgggggcgacaucugggucacccgggagcccuacgugagcugcgacccggacaagugcuaccaguucgcccuggggcagggcaccacgcucaacaacgugcacuccaacaacaccguccgcgaccggacccccuaccgcacccugcugaugaacgagcucggcgugcccuuccaccuggggacgaagcaggucugcaucgccuggagcuccagcuccugccacgacggcaaggccuggcugcacgugugcaucaccggggacgacaagaacgcgaccgccagcuucaucuacaacggccggcucguggacuccguggucagcugguccaaggagauccugcgcacccaggagagcgagugcgugugcaucaacgggacgugcaccguggucaugaccgacggcuccgccagcggcaaggccgacaccaagauccuguucaucgaggaggggaagaucgugcacacgagcacccucuccggcagcgcgcagcacguggaggagugcuccugcuacccccgguacccggggguccgcugcgugugccgggacaacuggaagggcagcaaccgccccaucguggacaucaacaucaaggaccacuccaucgucagcuccuacgugugcagcggccuggugggggacaccccgcggaagaacgacuccagcuccagcucccacugccuggaccccaacaacgaggagggcgggcacggcgucaaggggugggccuucgacgacggcaacgacguguggaugggccgcaccaucaacgagacgagccggcucggguacgagaccuucaaggucaucgagggcugguccaaccccaagagcaagcugcagaucaaccgccaggugaucguggaccgcggggaccgguccggcuacagcggggucuucuccguggagggcaagagcugcaucaaccggugcuucuacguggagcugauccgcggccggaaggaggagaccgagguccucuggaccagcaacuccaucgugguguucugcgggacgagcggcaccuacgggaccggcuccuggcccgacggggccgaccugaaccugaugcccaucuga

SEQ ID NO: 89674 - RNA, 1410 nt, Artificial Sequence; identical to SEQ ID NO: 89661
  derived and/or modified CDS sequence (opt1) from neuraminidase__InfluenzaA__AIL93897

SEQ ID NO: 89675 - RNA, 1410 nt, Artificial Sequence
  derived and/or modified CDS sequence (opt1) from neuraminidase__InfluenzaA__AIL93909
augaaccccaaccagaagaucaucaccaucggcagcgugugcaugaccaucgggauggccaaccugauccuccagaucggcaacaucaucuccaucuggaucagccacuccauccagcuggggaaccagagccagaucgagacgugcaaccaguccgucaucaccuacgagaacaacaccugggugaaccagaccuacgugaacaucagcaacacgaacuucgccgcgggccaguccgucgugagcgugaagcuggccgggaacuccagccucugcccggucuccggcugggccaucuacagcaaggacaacuccauccgcaucggcagcaagggggacguguucgugauccgggagcccuucaucuccugcagcccccuggagugccgcaccuucuuccugacccagggcgcccuccugaacgacaagcacuccaacgggaccaucaaggaccggagccccuaccgcacgcugauguccugcccgaucggcgagguccccagccccuacaacagccgguucgaguccguggccuggagcgcguccgccugccacgacgggaucaacuggcucaccaucggcaucagcggccccgacuccggggccguggccguccugaaguacaacggcaucaucaccgacaccaucaagagcuggcgcaacaacauccugcggacgcaggaguccgagugcgugugcgugaacgggagcugcuucaccaucaugaccgacggcccguccgacggccaggcgagcuacaagaucuuccgcaucgagaaggggaagaucgucaaguccguggagaugaacgcccccaacuaccacuacgaggagugcagcugcuaccccgacuccagcgagaucacgugcgugugccgggacaacuggcacggcuccaaccgccccugggucagcuucaaccagaaccucgaguaccagaucggguacaucugcuccggcaucuucggggacaacccgcggcccaacgacaagaccggcagcugcggccccguguccagcaacggggccaacggcgugaagggguucagcuucaaguacggcaacggggucuggaucggccgcaccaaguccaucagcucccggaagggcuucgagaugaucugggaccccaacggguggaccggcaccgacaacaacuucagcaucaagcaggacaucguggggaucaacgagugguccggcuacagcggguccuucgugcagcacccggagcugacgggccuggacugcauccgccccugcuucugggucgagcucauccggggccgccccaaggagaacaccaucuggaccagcggguccagcaucuccuucugcggcgugaacagcgacaccgucgggugguccuggcccgacggcgccgagcugccguucacgaucgacaaguga

SEQ ID NO: 89676 - RNA, 1410 nt, Artificial Sequence; identical to SEQ ID NO: 89661
  derived and/or modified CDS sequence (opt1) from neuraminidase__InfluenzaA__AIL93920

SEQ ID NO: 89677 - RNA, 1410 nt, Artificial Sequence
  derived and/or modified CDS sequence (opt1) from neuraminidase__InfluenzaA__AIL93943
augaaccccaaccagaagaucaucaccaucggcagcgugugcaugaccaucgggauggccaaccugauccuccagaucggcaacaucaucuccaucugggucagccacuccauccagcuggggaaccagagccagaucgagacgugcaaccaguccgugaucaccuacgagaacaacaccugggugaaccagaccuacgucaacaucagcaacacgaacuucgccgcgggccaguccguggugagcgucaagcuggccgggaacuccagccucugcccgguguccggcugggccaucuacagcaaggacaacuccgugcgcaucggcagcaagggggacgucuucgugauccgggagcccuucaucuccugcagccccuccgagugccgcaccuucuuccugacccagggcgcccugcucaacgacaagcacagcaacgggaccaucaaggaccggucccccuaccgcacgcugaugagcugcccgaucggcgaggugcccagccccuacaacucccgguucgagagcgucgccugguccgcgagcgccugccacgacgggaucaacuggcugaccaucggcaucuccggccccgacagcggggccguggccgugcucaaguacaacggcaucaucaccgacaccaucaaguccuggcgcaacaacauccugcggacgcaggagagcgagugcgcgugcgucaacggguccugcuucaccaucaugaccgacggcccgagcgacggccaggccuccuacaagaucuuccgcaucgagaaggggaagaucgucaagagcguggagaugaacgcccccaacuaccacuacgaggagugcuccugcuaccccgacagcuccgagaucacgugcgugugccgggacaacuggcacggcagcaaccgccccuggguguccuucaaccagaaccuggaguaccagaucggguacaucugcagcggcguguucggggacaacccgcggcccaacgacaagaccggcuccugcggccccgucagcagcaacggggccaacggcgugaagggguucuccuucaaguacggcaacgggguguggaucggccgcaccaagagcaucuccagccggaagggcuucgagaugaucugggaccccaacggguggaccggcaccgacaacaacuucuccaucaagcaggacaucgucgggaucaaggaguggagcggcuacuccgggagcuucgugcagcacccggagcucacgggccuggacugcauccgccccugcuucugggucgagcugauccggggccgccccgaggagaacaccaucuggaccuccgggagcuccaucagcuucugcggcgugaacuccgacaccgugggguggagcuggcccgacggcgccgagcucccguucacgaucgacaaguga

SEQ ID NO: 89678 - RNA, 1410 nt, Artificial Sequence; identical to SEQ ID NO: 89661
  derived and/or modified CDS sequence (opt1) from neuraminidase__InfluenzaA__AIL93954

SEQ ID NO: 89679 - RNA, 1410 nt, Artificial Sequence; identical to SEQ ID NO: 89661
  derived and/or modified CDS sequence (opt1) from neuraminidase__InfluenzaA__AIL93966

SEQ ID NO: 89680 - RNA, 1410 nt, Artificial Sequence
  derived and/or modified CDS sequence (opt1) from neuraminidase__InfluenzaA__AIL93978
augaaccccaaccagaagaucaucaccaucggcagcgugucccugaccaucagcacgaucugccucuucaugcagaucgccauccugaucaccaccgucacccugcacuucaagcaguacgaguucaacuccccgcccaacaaccaggugaugcucugcgagcccacgaucaucgagcgcaacaucaccgagaucguguaccugaccaacaccacgaucgagaaggagaucugccccaagccggccgaguaccggaacuggagcaagccccagugcgggaucaccggcuucgcgcccuucuccaaggacaacagcauccgccuguccgccgggggcgacaucugggucacccgggagcccuacgugagcugcgacccggacaagugcuaccaguucgcccucgggcagggcaccacgcugaacaacgugcacuccaacaacaccguccgcgaccggacccccuaccgcacccugcucaugaacgagcugggcgugcccuuccaccuggggacgaagcaggucugcaucgccuggagcuccagcuccugccacgacggcaaggccuggcuccacgugugcaucaccggggacgacaagaacgcgaccgccagcuucaucuacaacggccggcugguggacuccguggucagcugguccaaggagauccugcgcacccaggagagcgagugcgugugcaucaacgggacgugcaccguggucaugaccgacggcuccgccagcggcaaggccgacaccaagauccucuucaucgaggaggggaagaucgugcacacgagcacccuguccggcagcgcgcagcacguggaggagugcuccugcuacccccgguacccggggguccgcugcgugugccgggacaacuggaagggcagcaaccgccccaucguggacaucaacaucaaggaccacuccaucgucagcuccuacgugugcagcggccuggugggggacaccccgcggaagaacgacuccagcuccagcucccacugccucgaccccaacaacgaggagggcgggcacggcgucaaggggugggccuucgacgacggcaacgacguguggaugggccgcaccaucaacgagacgagccggcugggguacgagaccuucaaggucaucgagggcugguccaaccccaagagcaagcugcagaucaaccgccaggugaucguggaccgcggggaccgguccggcuacagcgggaucuucuccgucgagggcaagagcugcaucaaccggugcuucuacguggagcucauccgcggccggaaggaggagaccgaggugcuguggaccagcaacuccaucgucguguucugcgggacgagcggcaccuacgggaccggcuccuggcccgacggggccgaccugaaccucaugcccaucuga

SEQ ID NO: 89681 - RNA, 1410 nt, Artificial Sequence; identical to SEQ ID NO: 89670
  derived and/or modified CDS sequence (opt1) from neuraminidase__InfluenzaA__AIL93990

SEQ ID NO: 89682 - RNA, 1410 nt, Artificial Sequence; identical to SEQ ID NO: 86170
  derived and/or modified CDS sequence (opt1) from neuraminidase__InfluenzaA__AIL94001

SEQ ID NO: 89683 - RNA, 1410 nt, Artificial Sequence; identical to SEQ ID NO: 89661
  derived and/or modified CDS sequence (opt1) from neuraminidase__InfluenzaA__AIL94013

SEQ ID NO: 89684 - RNA, 1410 nt, Artificial Sequence; identical to SEQ ID NO: 89661
  derived and/or modified CDS sequence (opt1) from neuraminidase__InfluenzaA__AIL94025

SEQ ID NO: 89685 - RNA, 1410 nt, Artificial Sequence; identical to SEQ ID NO: 89661
  derived and/or modified CDS sequence (opt1) from neuraminidase__InfluenzaA__AIL94037

SEQ ID NO: 89686 - RNA, 1410 nt, Artificial Sequence; identical to SEQ ID NO: 89661
  derived and/or modified CDS sequence (opt1) from neuraminidase__InfluenzaA__AIL94049

SEQ ID NO: 89687 - RNA, 1410 nt, Artificial Sequence; identical to SEQ ID NO: 89670
  derived and/or modified CDS sequence (opt1) from neuraminidase__InfluenzaA__AIL94061

SEQ ID NO: 89688 - RNA, 1410 nt, Artificial Sequence
  derived and/or modified CDS sequence (opt1) from neuraminidase__InfluenzaA__AIL94072
augaaccccaaccagaagaucaucaccaucggcagcgugugcaugaccaucgggauggccaaccugauccuccagaucggcaacaucaucuccaucuggaucagccacuccauccagcuggggaaccagagccagaucgaggccugcaaccaguccgucaucacguacgagaacaacaccugggugaaccagaccuacgugaacaucagcaacaccaacuucgcgacgggccaguccgucgugagcgugaagcuggccgggaacuccagccucugcccggucuccggcugggccaucuacagcaaggacaacuccgugcgcaucggcagcaagggggacguguucgucauccgggagcccuucaucuccugcagcccccuggagugccgcaccuucuuccugacccagggcgcccuccugaacgacaagcacuccaacgggaccaucaaggaccggagccccuaccgcacgcugauguccugcccgaucggcgaggugcccagccccuacaacagccgguucgaguccguggccuggagcgcguccgccugccacgacgggaucaacuggcucaccaucggcaucagcggccccgacuccggggccgucgccgugcugaaguacaacggcaucaucaccgacaccaucaagagcuggaagaacaacauccugcgcacgcaggaguccgagugcgcgugcgugaacgggagcugcuucaccaucaugaccgacggcccguccgacggccaggccagcuacaagaucuuccggaucgagaaggggaagaucgucaaguccguggagaugaacgcccccaacuaccacuacgaggagugcagcugcuaccccgacuccagcgagaucacgugcgugugccgcgacaacuggcacggcuccaaccggcccugggucagcuucaaccagaaccucgaguaccagaucggguacaucugcuccggcguguucggggacaacccgcgccccaacgacaagaccggcagcugcggccccgugcuguccaacggggccaacggcgucaagggguucagcuucaaguacggcaacgggguguggaucggccggaccaagagcaucuccagccgcaagggcuucgagaugaucugggaccccaacggguggaccggcaccgacaacaacuucuccaucaagcaggacaucguggggaucaacgaguggagcggcuacuccgggagcuucguccagcacccggagcugacgggccucgacugcauccggcccugcuucuggaucgagcugauccgcggccggcccaaggagaacaccaucuggaccuccgggagcuccaucagcuucugcggcgugaacuccgacaccgucggguggagcuggcccgacggcgccgagcugccguucacgaucgacaaguga

SEQ ID NO: 89689 - RNA, 1410 nt, Artificial Sequence; identical to SEQ ID NO: 89670
  derived and/or modified CDS sequence (opt1) from neuraminidase__InfluenzaA__AIL94083

SEQ ID NO: 89690 - RNA, 1410 nt, Artificial Sequence; identical to SEQ ID NO: 89661
  derived and/or modified CDS sequence (opt1) from neuraminidase__InfluenzaA__AIL94238

SEQ ID NO: 89691 - RNA, 1410 nt, Artificial Sequence
  derived and/or modified CDS sequence (opt1) from neuraminidase__InfluenzaA__AIL94250
augaaccccaaccagaagaucaucaccaucggcagcgugugcaugaccaucgggauggccaaccugauccuccagaucggcaacaucaucuccaucuggaucagccacuccauccagcuggggaaccagagccagaucgaggccugcaaccaguccgucaucacguacgagaacaacaccugggugaaccagaccuacgugaacaucagcaacaccaacuucgcggccggccaguccgucgugagcgugaagcuggccgggaacuccagccucugcccggucuccggcugggccaucuacagcaaggacaacuccgugcgcaucggcagcaagggggacguguucgucauccgggagcccuucaucuccugcagcccccuggagugccgcacguucuuccugacccagggcgcccuccugaacgacaagcacuccaacgggaccaucaaggaccggagccccuaccgcacccugauguccugcccgaucggcgaggugcccagccccuacaacagccgguucgaguccguggcguggagcgccuccgccugccacgacgggaucaacuggcucacgaucggcaucagcggccccgacuccggggccgucgcggugcugaaguacaacggcaucaucaccgacaccaucaagagcuggaagaacaacauccugcgcacccaggaguccgagugcgccugcgugaacgggagcugcuucacgaucaugaccgacggcccgaacgacggccaggccuccuacaagaucuuccggaucgagaaggggaagaucgucaagagcguggagaugaacgcccccaacuaccacuacgaggagugcuccugcuaccccgacagcuccgagaucacgugcgugugccgcgacaacuggcacggcagcaaccggcccugggucuccuucaaccagaaccucgaguaccagaucggguacaucugcagcggcguguucggggacaacccgcgccccaacgacaagaccggcuccugcggccccgugagcuccaacggggccaacggcgucaagggguucagcuucaaguacggcaacgggguguggaucggccggaccaagagcaucuccagccgcaagggcuucgagaugaucugggaccccaacggguggaccggcaccgacaacaacuucuccaucaagcaggacaucguggggaucaacgaguggagcggcuacuccgggagcuucguccagcacccggagcugaccggccuggacugcauccggcccugcuucuggguggagcucauccgcggccggcccaaggagaacacgaucuggaccuccgggagcuccaucagcuucugcggcgucaacuccgacaccgugggguggagcuggcccgacggcgcggagcugccguucaccaucgacaaguga

SEQ ID NO: 89692 - RNA, 1410 nt, Artificial Sequence; identical to SEQ ID NO: 86170
  derived and/or modified CDS sequence (opt1) from neuraminidase__InfluenzaA__AIL94261

SEQ ID NO: 89693 - RNA, 1410 nt, Artificial Sequence; identical to SEQ ID NO: 86170
  derived and/or modified CDS sequence (opt1) from neuraminidase__InfluenzaA__AIL94273

SEQ ID NO: 89694 - RNA, 1410 nt, Artificial Sequence; identical to SEQ ID NO: 86170
  derived and/or modified CDS sequence (opt1) from neuraminidase__InfluenzaA__AIL94285

SEQ ID NO: 89695 - RNA, 1410 nt, Artificial Sequence
  derived and/or modified CDS sequence (opt1) from neuraminidase__InfluenzaA__AIL94297
augaaccccaaccagaagaucaucaccaucggcagcgugucccugaccaucagcacgaucugcuucuucaugcagaucgccauccucaucaccaccgucacccugcacuucaagcaguacgaguucaacuccccgcccaacaaccaggugaugcugugcgagcccacgaucaucgagcgcaacaucaccgagaucguguaccucaccaacaccacgaucgagaaggagaucugccccaagccggccgaguaccggaacuggagcaagccccagugcgggaucaccggcuucgcgcccuucuccaaggacaacagcauccgccuguccgccgggggcgacaucugggucacccgggagcccuacgugagcugcgacccggacaagugcuaccaguucgcccuggggcagggcaccacgcucaacaacgugcacuccaacaacaccguccgcgaccggacccccuaccgcacccugcugaugaacgagcucggcgugcccuuccaccuggggacgaagcaggucugcaucgccuggagcuccagcuccugccacgacggcaaggccuggcugcacgugugcaucaccggggacgacaagaacgcgaccgccagcuucaucuacaacggccggcucguggacuccguggucagcugguccaaggagauccugcgcacccaggagagcgagugcgugugcaucaacgggacgugcaccguggucaugaccgacggcuccgccagcggcaaggccgacaccaagauccuguucaucgaggaggggaagaucgugcacacgcggacccucagcggcuccgcgcagcacguggaggagugcagcugcuacccccgcuacccggggguccggugcgugugccgcgacaacuggaagggcuccaaccggcccaucguggacaucaacaucaaggaccacagcaucgucuccagcuacgugugcuccggccuggugggggacacgccccgcaagaacgacagcuccagcuccagccacugccuggaccccaacaacgaggagggcgggcacggcgucaaggggugggccuucgacgacggcaacgacguguggaugggccggaccaucaacgagaccucccgccucggguacgagaccuucaaggucaucgagggcuggagcaacccgaaguccaagcugcagaucaacaagcaggucaucguggaccgcggggaccggagcggcuacuccgggaucuucagcguggagggcaaguccugcaucaaccggugcuucuacguggagcugauccgcggccggaaggaggagaccgaggugcucuggaccagcaacagcaucgucguguucugcgggacguccggcaccuacgggaccggcagcuggcccgacggggccgaccugaaccugaugcccaucuga

SEQ ID NO: 89696 - RNA, 1410 nt, Artificial Sequence; identical to SEQ ID NO: 89661
  derived and/or modified CDS sequence (opt1) from neuraminidase__InfluenzaA__AIL94309

SEQ ID NO: 89697 - RNA, 1410 nt, Artificial Sequence; identical to SEQ ID NO: 89680
  derived and/or modified CDS sequence (opt1) from neuraminidase__InfluenzaA__AIL94321

SEQ ID NO: 89698 - RNA, 1410 nt, Artificial Sequence; identical to SEQ ID NO: 86170
  derived and/or modified CDS sequence (opt1) from neuraminidase__InfluenzaA__AIL94368

SEQ ID NO: 89699 - RNA, 1410 nt, Artificial Sequence
  derived and/or modified CDS sequence (opt1) from neuraminidase__InfluenzaA__AIL94380
augaaccccaaccagaagaucaucaccaucggcagcgugucccugaccaucagcacgaucugcuucuucaugcagaucgccauccucaucaccaccgucacccugcacuucaagcaguacgaguucaacuccccgcccaacaaccaggugaugcugugcgagcccacgaucaucgagcgcaacaucaccgagaucguguaccucaccaacaccacgaucgagaaggagaucugccccaagccggccgaguaccggaacuggagcaagccccagugcgggaucaccggcuucgcgcccuucuccaaggacaacagcauccgccuguccgccgggggcgacaucugggucacccgggagcccuacgugagcugcgacccggacaagugcuaccaguucgcccuggggcagggcaccacgcucaacaacgugcacuccaacaacaccguccgcgaccggacccccuaccgcacccugcugaugaacgagcucggcgugcccuuccaccuggggacgaagcaggucugcaucgccuggagcuccagcuccugccacgacggcaaggccuggcugcacgugugcaucaccggggacgacaagaacgcgaccgccagcuucaucuacaacggccggcucguggacuccguggucagcugguccaaggagauccugcgcacccaggagagcgagugcgugugcaucaacgggacgugcaccguggucaugaccgacggcuccgccagcggcaaggccgacaccaagauccuguucaucgaggaggggaagaucgugcacacgagcacccucuccggcagcgcgcagcacguggaggagugcuccugcuacccccgguacccggggguccgcugcgugugccgggacaacuggaagggcagcaaccgccccguggucgacaucaacaucaaggaccacuccaucgugagcuccuacgugugcagcggccuggucggggacaccccgcggaagaacgacuccagcuccagcucccacugccuggaccccaacaacgaggagggcgggcacggcgugaaggggugggccuucgacgacggcaacgacgucuggaugggccgcaccaucaacgagacgagccggcucggguacgagaccuucaaggugaucgagggcugguccaaccccaagagcaagcugcagaucaacaagcaggucaucguggaccgcggggaccgguccggcuacagcgggaucuucuccguggagggcaagagcugcaucaaccgcugcuucuacguggagcugauccggggccgcaaggaggagaccgagguccucuggaccagcaacuccaucgugguguucugcgggacgagcggcaccuacgggaccggcuccuggcccgacggggccgaccugaaccugaugcccaucuga

SEQ ID NO: 89700 - RNA, 1410 nt, Artificial Sequence
  derived and/or modified CDS sequence (opt1) from neuraminidase__InfluenzaA__AIL94392
augaaccccaaccagaagaucaucaccaucggcagcgugugcaugaccaucgggauggccaaccugauccuccagaucggcaacaucaucuccaucuggaucagccacuccauccagcuggggaaccagagccagaucgaggccugcaaccaguccgucaucacguacgagaacaacaccugggugaaccagaccuacgugaacaucagcaacaccaacuucgcggccggccaguccgucgugagcgugaagcuggccgggaacuccagccucugcccggucuccggcugggccaucuacagcaaggacaacuccgugcgcaucggcagcaagggggacguguucgucauccgggagcccuucaucuccugcagcccccuggagugccgcacguucuuccugacccagggcgcccuccugaacgacaagcacuccaacgggaccaucaaggaccggagccccuaccgcacccugauguccugcccgaucggcgaggugcccagccccuacaacagccgguucgaguccguggcguggagcgccuccgccugccacgacgggaucaacuggcucacgaucggcaucagcggccccgacuccggggccgucgcggugcugaaguacaacggcaucaucaccgacaccaucaagagcuggaagaacaacauccugcgcacccaggaguccgagugcgccugcgugaacgggagcugcuucacgaucaugaccgacggcccguccgacggccaggccagcuacaagaucuuccggaucgagaaggggaagaucgucaaguccguggagaugaacgcccccaacuaccacuacgaggagugcagcugcuaccccgacuccagcgagaucacgugcgugugccgcgacaacuggcacggcuccaaccggcccugggucagcuucaaccagaaccucgaguaccagaucggguacaucugcuccggcguguucggggacaacccgcgccccaacgacaagaccggcagcugcggccccguguccagcaacggggccaacggcgucaagggguucagcuucaaguacggcaacgggguguggaucggccggaccaaguccaucagcucccgcaagggcuucgagaugaucugggaccccaacggguggaccggcaccgacaacaacuucagcaucaagcaggacaucguggggaucaacgagugguccggcuacagcggguccuucguccagcacccggagcugaccggccuggacugcauccggcccugcuucuggguggagcucauccgcggccggcccaaggagaacacgaucuggaccagcggguccagcaucuccuucugcggcgucaacagcgacaccguggggugguccuggcccgacggcgcggagcugccguucaccaucgacaaguga

SEQ ID NO: 89701 - RNA, 1410 nt, Artificial Sequence
  derived and/or modified CDS sequence (opt1) from neuraminidase__InfluenzaA__AIL94403
augaaccccaaccagaagaucaucaccaucggcagcgugugcaugaccaucgggauggccaaccugauccuccagaucggcaacaucaucuccaucuggaucagccacuccauccagcuggggaaccagagccagaucgaggccugcaaccaguccgucaucacguacgagaacaacaccugggugaaccagaccuacgugaacaucagcaacaccaacuucgcggccggccaguccgucgugagcgugaagcuggccgggaacuccagccucugcccggucuccggcugggccaucuacagcaaggacaacuccgugcgcaucggcagcaagggggacguguucgucauccgggagcccuucaucuccugcagcccccuggagugccgcacguucuuccugacccagggcgcccuccugaacgacaagcacuccaacgggaccaucaaggaccggagccccuaccgcacccugauguccugcccgaucggcgaggugcccagccccuacaacagccgguucgaguccguggcguggagcgccuccgccugccacgacgggaucaacuggcucacgaucggcaucagcggccccgacuccggggccgucgcggugcugaaguacaacggcaucaucaccgacaccaucaagagcuggaagaacaacauccugcgcacccaggaguccgagugcgccugcgugaacgggagcugcuucacgaucaugaccgacggcccguccgacggccaggccagcuacaagaucuuccggaucgagaaggggaagaucgucaaguccguggagaugaacgcccccaacuaccacuacgaggagugcagcugcuaccccgacuccagcgagaucacgugcgugugccgcgacaacuggcacggcuccaaccggcccugggucagcuucaaccagaaccucgaguaccagaucggguacaucugcuccggcguguucggggacaacccgcgccccaacgacaagaccggcagcugcgaccccguguccagcaacggcgccaacggggucaagggcuucagcuucaaguacgggaacggcguguggaucgggcggaccaaguccaucagcucccgcaagggcuucgagaugaucugggaccccaacggcuggaccgggaccgacaacaacuucagcaucaagcaggacaucgugggcaucaacgagugguccggguacagcggcuccuucguccagcacccggagcugaccgggcuggacugcauccggcccugcuucuggguggagcucauccgcggccggcccaaggagaacacgaucuggaccagcggcuccagcaucuccuucugcggggucaacagcgacaccgugggcugguccuggcccgacggggcggagcugccguucaccaucgacaaguga

SEQ ID NO: 89702 - RNA, 1410 nt, Artificial Sequence; identical to SEQ ID NO: 86170
  derived and/or modified CDS sequence (opt1) from neuraminidase__InfluenzaA__AIL94426

SEQ ID NO: 89703 - RNA, 1410 nt, Artificial Sequence
  derived and/or modified CDS sequence (opt1) from neuraminidase__InfluenzaA__AIL94438
augaaccccaaccagaagaucaucaccaucggcagcgugugcaugaccaucgggauggccaaccugauccuccagaucggcaacaucaucuccaucuggaucagccacuccauccagcuggggaaccagagccagaucgaggccugcaaccaguccgucaucacguacgagaacaacaccugggugaaccagaccuacgugaacaucagcaacaccaacuucgcgacgggccaguccgucgugagcgugaagcuggccgggaacuccagccucugcccggucuccggcugggccaucuacagcaaggacaacuccgugcgcaucggcagcaagggggacguguucgucauccgggagcccuucaucuccugcagcccccuggagugccgcaccuucuuccugacccagggcgcccuccugaacgacaagcacuccaacgggaccaucaaggaccggagccccuaccgcacgcugauguccugcccgaucggcgaggugcccagccccuacaacagccgguucgaguccguggccuggagcgcguccgccugccacgacgggaucaacuggcucaccaucggcaucagcggccccgacuccggggccgucgccgugcugaaguacaacggcaucaucaccgacaccaucaagagcuggaagaacaacauccugcgcacgcaggaguccgagugcgcgugcgugaacgggagcugcuucaccaucaugaccgacggcccguccgacggccaggccagcuacaagaucuuccggaucgagaaggggaagaucgucaaguccguggagaugaacgcccccaacuaccacuacgaggagugcagcugcuaccccgacuccagcgagaucacgugcgugugccgcgacaacuggcacggcuccaaccggcccugggucagcuucaaccagaaccucgaguaccagaucggguacaucugcuccggcguguucggggacaacccgcgccccaacgacaagaccggcagcugcggccccguguccagcaacggggccaacggcgucaagggguucagcuucaaguacggcaacgggguguggaucggccggaccaaguccgugagcucccgcaagggcuucgagaugaucugggaccccaacggguggaccggcaccgacaacaacuucagcaucaagcaggacaucgucgggaucaacgagugguccggcuacagcggguccuucgugcagcacccggagcugacgggccuggacugcauccggcccugcuucugggucgagcucauccgcggccggcccaaggagaacaccaucuggaccagcggguccagcaucuccuucugcggcgugaacagcgacaccguggggugguccuggcccgacggcgccgagcugccguucacgaucgacaaguga

SEQ ID NO: 89704 - RNA, 1410 nt, Artificial Sequence
  derived and/or modified CDS sequence (opt1) from neuraminidase__InfluenzaA__AIL94449
augaaccccaaccagaagaucaucaccaucggcagcgugucccugaccaucagcacgaucugcuucuucaugcagaucgccauccucaucaccaccgucacccugcacuucaagcaguacgaguucaacuccccgcccaacaaccaggugaugcugugcgagcccacgaucaucgagcgcaacaucaccgagaucguguaccucaccaacaccacgaucgagaaggagaucugccccaagccggccaaguaccggaacuggagcaagccccagugcgggaucaccggcuucgcgcccuucuccaaggacaacagcauccgccuguccgccgggggcgacaucugggucacccgggagcccuacgugagcugcgacccggacaagugcuaccaguucgcccuggggcagggcaccacgcucaacaacgugcacuccaacaacaccguccgcgaccggacccccuaccgcacccugcugaugaacgagcucggcgugcccuuccaccuggggacgaagcaggucugcaucgccuggagcuccagcuccugccacgacggcaaggccuggcugcacgugugcaucaccggggacgacaagaacgcgaccgccagcuucaucuacaacggccggcucguggacuccguggucagcugguccaaggagauccugcgcacccaggagagcgagugcgugugcaucaacgggacgugcaccguggucaugaccgacggcuccgccagcggcaaggccgacaccaagauccuguucaucgaggaggggaagaucgugcacacgagcacccucuccggcagcgcgcagcacguggaggagugcuccugcuacccccgguacccggggguccgcugcgugugccgggacaacuggaagggcagcaaccgccccaucguggacaucaacaucaaggaccacuccaucgucuacagcuacgugugcuccggccuggugggggacacgccccggaagaacgacagcuccagcuccagccacugccugaaccccaacaacgaggagggcgggcacggcgucaaggggugggccuucgacgacggcaacgacguguggaugggccgcaccaucaacgagaccucccggcucggguacgagaccuucaaggucaucgagggcuggagcaacccgaaguccaagcugcagaucaaccgccaggugaucguggaccgcggggaccggagcggcuacuccgggaucuucagcgucgagggcaaguccugcaucaaccggugcuucuacguggagcugauccgcggccggaaggaggagaccgaggugcucuggaccagcaacagcaucgucguguucugcgggacguccggcaccuacgggaccggcagcuggcccgacggggccgaccugaaccugaugcccaucuga

SEQ ID NO: 89705 - RNA, 1410 nt, Artificial Sequence; identical to SEQ ID NO: 89699
  derived and/or modified CDS sequence (opt1) from neuraminidase__InfluenzaA__AIL94461

SEQ ID NO: 89706 - RNA, 1410 nt, Artificial Sequence
  derived and/or modified CDS sequence (opt1) from neuraminidase__InfluenzaA__AIL94473
augaaccccaaccagaagaucaucaccaucggcagcgugugcaugaccaucgggauggccaaccugauccuccagaucggcaacaucaucuccaucugggucgggcacagcauccagcugggcaaccagucccagaucgagacgugcaaccagagcgugaucaccuacgagaacaacaccugggugaaccagaccuacgucaacaucuccaacacgaacuucgccgcggggcagagcguggugccggucaagcuggccggcaacuccagccucugccccguguccggcugggccaucuacagcaaggacaacuccgugcgcaucgggagcaagggcgacgucuucgugauccgggagcccuucaucuccugcagcccccuggagugccgcaccuucuuccugacccagggggcccuccugaacgacaagcacuccaacggcaccaucaaggaccggagcccguaccgcacgcugauguccugccccaucggggaggugcccagccccuacaacucccgguucgagagcgucgccuggagcgcguccgccugccacgacggcaucaacuggcucaccaucggcaucagcgggccggacuccggcgccguggccgugcugaaguacaacgggaucaucaccgacaccaucaagagcuggcgcaacaacauccugcggacgcaggaguccgagugcgcgugcgucaacggcagcugcuucaccaucaugaccgacggccccuccgacgggcaggccagcuacaagaucuuccgcaucgagaagggcaagaucgugaaguccguggagaugaacacccccaacuaccacuacgaggagugcagcugcuaccccgacuccagcgagaucacgugcgucugccgggacaacuggcacggguccaaccgcccgugggugagcuucaaccagaaccucgaguaccagaucggcuacaucugcuccgggguguucggcgacaacccccggcccaacgacaagaccggcagcugcgggcccgucuccagcaacggcgccaacggggugaagggcuucuccuucaaguacgggaacggcguguggaucggccgcaccaagagcaucagcucccggaagggguucgagaugaucugggacccgaacggcuggaccgggacggacaacaacuucagcaucaagcaggacaucgucggcaucaaggagugguccggguacagcggcuccuucgugcagcaccccgagcugaccggccuggacugcauccgccccugcuucugggucgagcucauccgggggcgccccgaggagaacaccaucuggaccagcggcuccagcaucuccuucugcggggugaacagcgacaucgugggcugguccuggccggacggcgccgagcugcccuucacgaucgacaaguga

SEQ ID NO: 89707 - RNA, 1410 nt, Artificial Sequence; identical to SEQ ID NO: 88760
  derived and/or modified CDS sequence (opt1) from neuraminidase__InfluenzaA__AIL94484

SEQ ID NO: 89708 - RNA, 1410 nt, Artificial Sequence; identical to SEQ ID NO: 89670
  derived and/or modified CDS sequence (opt1) from neuraminidase__InfluenzaA__AIL94507

SEQ ID NO: 89709 - RNA, 1410 nt, Artificial Sequence
  derived and/or modified CDS sequence (opt1) from neuraminidase__InfluenzaA__AIL94518
augaaccccaaccagaagaucaucaccaucggcagcgugucccugaccaucagcacgaucugcuucuucaugcagaucgccauccucaucaccaccgucacccugcacuucaagcaguacgaguucaacuccccgcccaacaaccaggugaugcugugcgagcccacgaucaucgagcgcaacaucaccgagaucguguaccucaccaacaccacgaucgagaaggagaucugccccaagccggccgaguaccggaacuggagcaagccccagugcgggaucaccggcuucgcgcccuucuccaaggacaacagcauccgccuguccgccgggggcgacaucugggucacccgggagcccuacgugagcugcgacccggacaagugcuaccaguucgcccuggggcagggcaccacgcucaacaacgugcacuccaacaacaccguccgcgaccggacccccuaccgcacccugcugaugaacgagcucggcgugcccuuccaccuggggacgaagcaggucugcaucgccuggagcuccagcuccugccacgacggcaaggccuggcugcacgugugcaucaccggggacgacaagaacgcgaccgccagcuucaucuacaacggccggcucguggacuccguggucagcugguccaaggagauccugcgcacccaggagagcgagugcgugugcaucaacgggacgugcaccguggucaugaccgacggcuccgccagcggcaaggccgacaccaagauccuguucaucgaggaggggaagaucgugcacacgagcacccucuccggcagcgcgcagcacguggaggagugcuccugcuacccccgguacccggggguccgcugcgugugccgggacaacuggaagggcagcaaccgccccaucguggacaucaacaucaaggaccacuccaucgucagcuccuacgugugcagcggccuggugggggacaccccgcggaagaacgacuccagcuccagcucccacugccuggaccccaacaacgaggagggcgggcacggcgucaaggggugggccuucgacgacggcaacgacguguggaugggccgcaccaucaacgagacgagccggcucggguacgagaccuucaaggucaucgagggcugguccaaccccaagagcaagcugcagaucaacaagcaggucaucguggaccgcggggaccgguccggcuacagcgggaucuucuccguggagggcaagagcugcaucaaccgcugcuucuacguggagcugauccggggccgcaaggaggagaccgaggugcucuggaccagcaacuccaucgucguguucugcgggacgagcggcaccuacgggaccggcuccuggcccgacggggccgaccugagccugaugcccaucuga

SEQ ID NO: 89710 - RNA, 1410 nt, Artificial Sequence
  derived and/or modified CDS sequence (opt1) from neuraminidase__InfluenzaA__AIL94530
augaaccccaaccagaagaucaucaccaucggcagcgugucccugaccaucagcacgaucugcuucuucaugcagaucgccauccucaucaccaccgucacccugcacuucaagcaguacgaguucaacuccccgcccaacaaccaggugaugcugugcgagcccacgaucaucgagcgcaacaucaccgagaucguguaccucaccaacaccacgaucgagaaggagaucugccccaagccggccgaguaccggaacuggagcaagccccagugcgggaucaccggcuucgcgcccuucuccaaggacaacagcauccgccuguccgccgggggcgacaucugggucacccgggagcccuacgugagcugcgacccggacaagugcuaccaguucgcccuggggcagggcaccacgcucaacaacgugcacuccaacaacaccguccgcgaccggacccccuaccgcacccugcugaugaacgagcucggcgugcccuuccaccuggggacgaagcaggucugcaucgccuggagcuccagcuccugccacgacggcaaggccuggcugcacgugugcaucaccggggacgacaagaacgcgaccgccagcuucaucuacaacggccggcucguggacuccguggucagcugguccaaggagauccugcgcacccaggagagcgagugcgugugcaucaacgggacgugcaccguggucaugaccgacggcuccgccagcggcaaggccgacaccaagauccuguucaucgaggaggggaagaucgugcacacgagcacccucuccggcagcgcgcagcacguggaggagugcuccugcuacccccgguacccggggguccgcugcgugugccgggacaacuggaagggcagcaaccgccccaucguggacaucaacaucaaggaccacuccaucgucagcuccuacgugugcagcggccuggugggggacaccccgcggaagaacgacuccagcuccagcucccacugccugaaccccaacaacgaggagggcgggcacggcgucaaggggugggccuucgacgacggcaacgacguguggaugggccgcaccaucaacgagacgagccggcucggguacgagaccuucaaggucaucgagggcugguccaaccccaagagcaagcugcagaucaaccgccaggugaucguggaccgcggggaccgguccggcuacagcgggaucuucuccgucgagggcaagagcugcaucaaccggugcuucuacguggagcugauccgcggccggaaggaggagaccgaggugcucuggaccagcaacuccaucgucguguucugcgggacgagcggcaccuacgggaccggcuccuggcccgacggggccgaccugaaccugaugcccaucuga

SEQ ID NO: 89711 - RNA, 1410 nt, Artificial Sequence; identical to SEQ ID NO: 89700
  derived and/or modified CDS sequence (opt1) from neuraminidase__InfluenzaA__AIL94542

SEQ ID NO: 89712 - RNA, 1410 nt, Artificial Sequence; identical to SEQ ID NO: 89670
  derived and/or modified CDS sequence (opt1) from neuraminidase__InfluenzaA__AIL94553

SEQ ID NO: 89713 - RNA, 1410 nt, Artificial Sequence; identical to SEQ ID NO: 89661
  derived and/or modified CDS sequence (opt1) from neuraminidase__InfluenzaA__AIL94564

SEQ ID NO: 89714 - RNA, 1410 nt, Artificial Sequence; identical to SEQ ID NO: 89670
  derived and/or modified CDS sequence (opt1) from neuraminidase__InfluenzaA__AIL94576

SEQ ID NO: 89715 - RNA, 1410 nt, Artificial Sequence
  derived and/or modified CDS sequence (opt1) from neuraminidase__InfluenzaA__AIL94587
augaaccccaaccagaagaucaucaccaucggcagcgugugcaugaccaucgggauggccaaccugauccuccagaucggcaacaucaucuccaucuggaucagccacuccauccagcuggggaaccagagccagaucgaggccugcaaccaguccgucaucacguacgagaacaacaccugggugaaccagaccuacgugaacaucagcaacaccaacuucgcggccggccaguccgucgugagcgugaagcuggccgggaacuccagccucugcccggucuccggcugggccaucuacagcaaggacaacuccgugcgcaucggcagcaagggggacguguucgucauccgggagcccuucaucuccugcagcccccuggagugccgcacguucuuccugacccagggcgcccuccugaacgacaagcacuccaacgggaccaucaaggaccggagccccuaccgcacccugauguccugcccgaucggcgaggugcccagccccuacaacagccgguucgaguccguggcguggagcgccuccgccugccacgacgggaucaacuggcucacgaucggcaucagcggccccgacuccggggccgucgcggugcugaaguacaacggcaucaucaccgacaccaucaagagcuggaagaacaacauccugcgcacccaggaguccgagugcgccugcgugaacgggagcugcuucacgaucaugaccgacggcccguccgacggccaggccagcuacaagaucuuccggaucgagaaggggaagaucgucaaguccguggagauggacgcccccaacuaccacuacgaggagugcagcugcuaccccgacuccagcgagaucacgugcgugugccgcgacaacuggcacggcuccaaccggcccugggucagcuucaaccagaaccucgaguaccagaucggguacaucugcuccggcguguucggggacaacccgcgccccaacgacaagaccggcagcugcggccccguguccagcaacggggccaacggcgucaagggguucagcuucaaguacggcaacgggguguggaucggccggacgaaguccaucagcucccgcaagggcuucgagaugaucugggaccccaacggguggaacggcaccgacaacaacuucagcaucaagcaggacaucguggggaucaacgagugguccggcuacagcggguccuucguccagcacccggagcugaccggccuggacugcauccggcccugcuucuggguggagcucauccgcggccggcccaaggagaacaccaucuggaccgggggcagcuccaucagcuucugcggggucaacuccgacaccgugggcuggagcuggcccgacggcgcggagcugccguucaccaucgacaaguga

SEQ ID NO: 89716 - RNA, 1410 nt, Artificial Sequence; identical to SEQ ID NO: 89700
  derived and/or modified CDS sequence (opt1) from neuraminidase__InfluenzaA__AIL94598

SEQ ID NO: 89717 - RNA, 1410 nt, Artificial Sequence
  derived and/or modified CDS sequence (opt1) from neuraminidase__InfluenzaA__AIL94609
augaaccccaaccagaagaucaucaccaucggcagcgugucccugaccaucagcacgaucugccucuucaugcagaucgccauccugaucaccaccgucacccugcacuucaagcaguacgaguucaacuccccgcccaacaaccaggugaugcucugcgagcccacgaucaucgagcgcaacaucaccgagaucguguaccugaccaacaccacgaucgagaaggagaucugccccaagccggccgaguaccggaacuggagcaagccccagugcgggaucaccggcuucgcgcccuucuccaaggacaacagcauccgccuguccgccgggggcgacaucugggucacccgggagcccuacgugagcugcgacccggacaagugcuaccaguucgcccucgggcagggcaccacgcugaacaacgugcacuccaacaacaccguccgcgaccggacccccuaccgcacccugcucaugagcgagcugggcgugcccuuccaccuggggacgaagcaggucugcaucgccugguccagcuccagcugccacgacggcaaggccuggcuccacgugugcaucaccggggacgacaagaacgcgaccgccuccuucaucuacaacggccggcugguggacagcguggucuccuggagcaaggagauccugcgcacccaggaguccgagugcgugugcaucaacgggacgugcaccguggucaugaccgacggcagcgccagcggcaaggccgacaccaagauccucuucaucgaggaggggaagaucgugcacacguccacccugagcggcuccgcgcagcacguggaggagugcagcugcuacccccuguacccggggguccggugcgugugccgcgacaacuggaagggcuccaaccggcccaucguggacaucaacaucaaggaccacagcaucgucuccagcuacgugugcuccggccucgugggggacacgccccgcaagaacgacagcuccagcuccagccacugccuggaccccaacaacgaggagggcgggcacggcgucaaggggugggccuucgacgacggcaacgacguguggaugggccggaccaucaacgagaccucccgccugggguacgagaccuucaaggucaucgagggcuggagcaacccgaaguccaagcuccagaucaaccggcaggucaucguggaccgcggggaccggagcggcuacuccgggaucuucagcguggagggcaagagcugcaucaaccgcugcuucuacguggagcugauccggggccgcaaggaggagaccgaggugcuguggaccuccaacagcaucgucguguucugcgggacguccggcaccuacgggaccggcagcuggcccgacggggccgaccucaaccugaugcccaucuga

SEQ ID NO: 89718 - RNA, 1410 nt, Artificial Sequence
  derived and/or modified CDS sequence (opt1) from neuraminidase__InfluenzaA__AIL94621
augaaccccaaccagaagaucaucaccaucggcagcgugugcaugaccaucgggauggccaaccugauccuccagaucggcaacaucaucuccaucuggaucagccacuccauccagcuggggaaccagagccagaucgaggccugcaaccaguccgucaucacguacgagaacaacaccugggugaaccagaccuacgugaacaucagcaacaccaacuucgcggccggccaguccgucgugccggugaagcuggccgggaacagcucccucugccccgucagcggcugggccaucuacuccaaggacaacagcgugcgcaucggcuccaagggggacguguucgucauccgggagcccuucaucagcugcagcccccuggagugccgcacguucuuccugacccagggcgcccuccugaacgacaagcacuccaacgggaccaucaaggaccgguccccguaccgcacccugaugagcugccccaucggcgaggugcccucccccuacaacagccgguucgagagcguggcgugguccgccagcgccugccacgacgggaucaacuggcucacgaucggcaucuccggcccggacagcggggccgucgcggugcugaaguacaacggcaucaucaccgacaccaucaaguccuggaagaacaacauccugcgcacccaggagagcgagugcgccugcgugaacggguccugcuucacgaucaugaccgacggccccagcgacggccaggccuccuacaagaucuuccggaucgagaaggggaagaucgucaagagcguggagaugaacgcccccaacuaccacuacgaggagugcuccugcuaccccgacagcuccgagaucacgugcgugugccgcgacaacuggcacggcagcaaccggccgugggucuccuucaaccagaaccucgaguaccagaucggguacaucugcagcggcguguucggggacaacccccgccccaacgacaagaccggcuccugcggccccgugagcuccaacggggccaacggcgucaagggguucagcuucaaguacggcaacgggguguggaucggccggaccaagagcaucuccagccgcaagggcuucgagaugaucugggacccgaacggguggaccggcaccgacaacgacuucuccaucaagcaggacaucguggggaucaacgaguggagcggcuacuccgggagcuucguccagcaccccgagcugaccggccuggacugcauccggcccugcuucuggguggagcucauccgcggccggcccaaggagaacacgaucuggaccuccgggagcuccaucagcuucugcggcgucaacuccgacaccgugggguggagcuggccggacggcgcggagcugcccuucaccaucgacaaguga

SEQ ID NO: 89719 - RNA, 1410 nt, Artificial Sequence; identical to SEQ ID NO: 89670
  derived and/or modified CDS sequence (opt1) from neuraminidase__InfluenzaA__AIL94632

SEQ ID NO: 89720 - RNA, 1410 nt, Artificial Sequence; identical to SEQ ID NO: 86170
  derived and/or modified CDS sequence (opt1) from neuraminidase__InfluenzaA__AIL94643

SEQ ID NO: 89721 - RNA, 1410 nt, Artificial Sequence
  derived and/or modified CDS sequence (opt1) from neuraminidase__InfluenzaA__AIL94655
augaaccccaaccagaagaucaucaccaucggcagcgugugcaugaccaucgggauggccaaccugauccuccagaucggcaacaucaucuccaucuggaucagccacuccauccagcuggggaaccagagccagaucgagacgugcaaccaguccgucaucaccuacgagaacaacaccugggugaaccagaccuacgugaacaucagcaacacgaacuucgccgcgggccaguccgucgugagcgugaagcuggccgggaacuccagccucugcccggucuccggcugggccaucuacagcaaggacaacuccauccgcaucggcagcaagggggacguguucgugauccgggagcccuucaucuccugcagcccccuggagugccgcaccuucuuccugacccagggcgcccuccugaacgacaagcacuccaacgggaccaucaaggaccggagccccuaccgcacgcugauguccugcccgaucggcgagguccccagccccuacaacagccgguucgaguccguggccuggagcgcguccgccugccacgacgggaucaacuggcucaccaucggcaucagcggccccgacuccggggccguggccguccugaaguacaacggcaucaucaccgacaccaucaagagcuggcgcaacaacauccugcggacgcaggaguccgagugcgcgugcgugaacgggagcugcuucaccaucaugaccgacggcccguccgacggccaggccagcuacaagaucuuccgcaucgagaaggggaagaucgugaaguccgucgagaugaacgcccccaacuaccacuacgaggagugcagcugcuaccccgacuccagcgagaucacgugcgugugccgggacaacuggcacggcuccaaccgccccugggugagcuucaaccagaaccucgaguaccagaucggguacaucugcuccggcaucuucggggacaacccgcggcccaacgacaagaccggcagcugcggccccgucuccagcaacggggccaacggcgugaagggguucagcuucaaguacggcaacgggguguggaucggccgcaccaaguccaucagcucccggaagggcuucgagaugaucugggaccccaacggguggaccggcaccgacaacaacuucagcaucaagcaggacaucgucgggaucaacgagugguccggcuacagcggguccuucgugcagcacccggagcugacgggccuggacugcauccgccccugcuucuggguggagcucauccggggccgccccaaggagaacaccaucuggaccagcggguccagcaucuccuucugcggcgucaacagcgacaccguggggugguccuggcccgacggcgccgagcugccguucacgaucgacaaguga

SEQ ID NO: 89722 - RNA, 1410 nt, Artificial Sequence
  derived and/or modified CDS sequence (opt1) from neuraminidase__InfluenzaA__AIL94677
augaaccccaaccagaagaucaucaccaucggcagcgugugcaugaccaucgggauggccaaccugauccuccagaucggcaacaucaucuccaucuggaucagccacuccauccagcuggggaaccagagccagaucgaggccugcaaccaguccgucaucacguacgagaacaacaccugggugaaccagaccuacgugaacaucagcaacaccaacuucgcggccggccaguccgucgugccggugaagcuggccgggaacagcucccucugccccgucagcggcugggccaucuacuccaaggacaacagcgugcgcaucggcuccaagggggacguguucgucauccgggagcccuucaucagcugcagcccccuggagugccgcacguucuuccugacccagggcgcccuccugaacgacaagcacuccaacgggaccaucaaggaccgguccccguaccgcacccugaugagcugccccaucggcgaggugcccucccccuacaacagccgguucgagagcguggcgugguccgccagcgccugccacgacgggaucaacuggcucacgaucggcaucuccggcccggacagcggggccgucgcggugcugaaguacaacggcaucaucaccgacaccaucaaguccuggaagaacaacauccugcgcacccaggagagcgagugcgccugcgugaacggguccugcuucacgaucaugaccgacggccccagcgacggccaggccuccuacaagaucuuccggaucgagaaggggaagaucgucaagagcguggagaugaacgcccccaacuaccacuacgaggagugcuccugcuaccccgacagcuccgagaucacgugcgugugccgcgacaacuggcacggcagcaaccggccgugggucuccuucaaccagaaccucgaguaccagaucggguacaucugcagcggcguguucggggacaacccccgccccaacgacaagaccggcuccugcggccccgugagcuccaacggggccaacggcgucaagggguucagcuucaaguacggcaacgggguguggaucggccggaccaagagcaucuccagccgcaagggcuucgagaugaucugggacccgaacggguggaccggcaccgacaacaacuucuccaucaagcaggacaucguggggaucaacgaguggagcggcuacuccgggagcuucguccagcaccccgagcugaccggccuggacugcauccggcccugcuucuggguggagcucauccgcggccggcccaaggagaacacgaucuggaccuccgggagcuccaucagcuucugcggcgucaacuccgacaccgugggguggagcuggccggacggcgcggagcugcccuucaccaucgacaaguga

SEQ ID NO: 89723 - RNA, 1410 nt, Artificial Sequence; identical to SEQ ID NO: 89661
  derived and/or modified CDS sequence (opt1) from neuraminidase__InfluenzaA__AIL94688

SEQ ID NO: 89724 - RNA, 1410 nt, Artificial Sequence
  derived and/or modified CDS sequence (opt1) from neuraminidase__InfluenzaA__AIL94700
augaaccccaaccagaagaucaucaccaucggcagcgugucccugaccaucagcacgaucugcuucuucaugcagaucgccauccucaucaccaucgucacccugcacuucaagcaguacgaguucaacuccccgcccaacaaccaggugaugcugugcgagcccaccaucaucgagcgcaacaucacggagaucguguaccucaccaacaccaccaucgagaaggagaucugccccaagccggccgaguaccggaacuggagcaagccccagugcgggaucacgggcuucgcgcccuucuccaaggacaacagcauccgccuguccgccgggggcgacaucugggucacccgggagcccuacgugagcugcgacccggacaagugcuaccaguucgcccuggggcagggcaccacccucaacaacgugcacuccaacaacacgguccgcgaccggacccccuaccgcacccugcugaugaacgagcucggcgugcccuuccaccuggggaccaagcaggucugcaucgccuggagcuccagcuccugccacgacggcaaggccuggcugcacgugugcaucacgggggacgacaagaacgcgaccgccagcuucaucuacaacggccggcucguggacuccguggucagcugguccaaggagauccugcgcacccaggagagcgagugcgugugcaucaacgggaccugcacgguggucaugaccgacggcuccgccagcggcaaggccgacaccaagauccuguucaucgaggaggggaagaucgugcacaucagcacccucuccggcagcgcgcagcacguggaggagugcuccugcuacccccgguacccggggguccgcugcgugugccgggacaacuggaagggcagcaaccgccccaucguggacaucaacaucgaggaccacuccaucgucagcuccuacgugugcagcggccuggugggggacacgccccggaagaacgacuccagcuccagcucccacugccuggaccccaacaacgaggagggcgggcacggcgucaaggggugggccuucgacgacggcaacgacguguggaugggccgcaccaucaacgagaccagccggcucggguacgagaccuucaaggucaucgagggcugguccaaccccaagagcaagcugcagaucaaccgccaggugaucguggaccgcggggaccgguccggcuacagcgggaucuucuccgucgagggcaagagcugcaucaaccggugcuucuacguggagcugauccgcggccggaaggaggagacggaggugcucuggaccagcaacuccaucgucguguucugcgggaccagcggcaccuacgggacgggcuccuggccggacggggccgaccugaaccugaugcccaucuga

SEQ ID NO: 89725 - RNA, 1410 nt, Artificial Sequence; identical to SEQ ID NO: 89670
  derived and/or modified CDS sequence (opt1) from neuraminidase__InfluenzaA__AIL94712

SEQ ID NO: 89726 - RNA, 1410 nt, Artificial Sequence; identical to SEQ ID NO: 89700
  derived and/or modified CDS sequence (opt1) from neuraminidase__InfluenzaA__AIL94723

SEQ ID NO: 89727 - RNA, 1410 nt, Artificial Sequence
  derived and/or modified CDS sequence (opt1) from neuraminidase__InfluenzaA__AIL94734
augaaccccaaccagaagaucaucaccaucggcagcgugucccugaccaucagcacgaucugcuucuucaugcagaucgccauccucaucaccaccgucacccugcacuucaagcaguacgaguucaacuccccgcccaacaaccaggugaugcugugcgagcccacgaucaucgagcgcaacaucaccgagaucguguaccucaccaacaccacgaucgagaaggagaucugccccaagccggccgaguaccggaacuggagcaagccccagugcgggaucaccggcuucgcgcccuucuccaaggacaacagcauccgccuguccgccgggggcgacaucugggucacccgggagcccuacgugagcugcgacccggacaagugcuaccaguucgcccuggggcagggcaccacgcucaacaacgagcacuccaacaacaccgugcgcgaccggacccccuaccgcacccugcugaugaacgagcucggcguccccuuccaccuggggacgaagcaggucugcaucgccuggagcuccagcuccugccacgacggcaaggccuggcugcacgugugcaucaccggggacgacaagaacgcgaccgccagcuucaucuacaacggccggcucguggacuccguggugagcugguccaaggagauccugcgcacccaggagagcgagugcgucugcaucaacgggacgugcaccguggugaugaccgacggcuccgccagcggcaaggccgacaccaagauccuguucaucgaggaggggaagaucguccacaucagcacgcucuccggcagcgcgcagcacguggaggagugcuccugcuacccccgguacccgggggugcgcugcgucugccgggacaacuggaagggcagcaaccgccccaucguggacaucaacaucaaggaccacuccaucgugagcuccuacgucugcagcggccuggugggggacaccccgcggaagaacgacuccagcuccagcucccacugccuggaccccaacaacgaggagggcgggcacggcgugaaggggugggccuucgacgacggcaacgacgucuggaugggccgcaccaucaacgagaccagccggcucggguacgagacguucaaggugaucgagggcugguccaaccccaagagcaagcugcagaucaaccgccaggucaucguggaccgcggggaccgguccggcuacagcgggaucuucuccguggagggcaagagcugcaucaaccggugcuucuacgucgagcugauccgcggccggaaggaggagaccgaggugcucuggaccagcaacuccaucguggucuucugcgggaccagcggcacguacgggaccggcuccuggcccgacggggccgaccugaaccugaugcccaucuga

SEQ ID NO: 89728 - RNA, 1410 nt, Artificial Sequence; identical to SEQ ID NO: 89670
  derived and/or modified CDS sequence (opt1) from neuraminidase__InfluenzaA__AIL94746

SEQ ID NO: 89729 - RNA, 1410 nt, Artificial Sequence; identical to SEQ ID NO: 89700
  derived and/or modified CDS sequence (opt1) from neuraminidase__InfluenzaA__AIL94757

SEQ ID NO: 89730 - RNA, 1410 nt, Artificial Sequence; identical to SEQ ID NO: 89661
  derived and/or modified CDS sequence (opt1) from neuraminidase__InfluenzaA__AIL94768

SEQ ID NO: 89731 - RNA, 1410 nt, Artificial Sequence; identical to SEQ ID NO: 86170
  derived and/or modified CDS sequence (opt1) from neuraminidase__InfluenzaA__AIL94780

SEQ ID NO: 89732 - RNA, 1410 nt, Artificial Sequence; identical to SEQ ID NO: 89700
  derived and/or modified CDS sequence (opt1) from neuraminidase__InfluenzaA__AIL94803

SEQ ID NO: 89733 - RNA, 1410 nt, Artificial Sequence; identical to SEQ ID NO: 89680
  derived and/or modified CDS sequence (opt1) from neuraminidase__InfluenzaA__AIL94814

SEQ ID NO: 89734 - RNA, 1410 nt, Artificial Sequence
  derived and/or modified CDS sequence (opt1) from neuraminidase__InfluenzaA__AIL94826
augaaccccaaccagaagaucaucaccaucggcagcgugucccugaccaucagcacgaucugcuucuucaugcagaucgccauccucaucaccaccgucacccugcacuucaagcaguacgaguucaacucccugccgaacaaccaggugaugcucugcgagcccacgaucaucgagcgcaacaucaccgagaucguguaccugaccaacaccacgaucgagaaggagaucugccccaagcccgccgaguaccggaacuggagcaagccgcagugcgggaucaccggcuucgcgcccuucuccaaggacaacagcauccgccuguccgccgggggcgacaucugggucacccgggagcccuacgugagcugcgaccccgacaagugcuaccaguucgcccucgggcagggcaccacgcugaacaacgugcacuccaacaacaccgcccgcgaccggaccccguaccgcacccugcucaugaacgagcugggcguccccuuccaccuggggacgaagcaggucugcaucgccuggagcuccagcuccugccacgacggcaaggcguggcuccacgugugcaucaccggggacgacaagaacgccaccgccagcuucaucuacaacggccggcugguggacuccguggugagcugguccaaggagauccugcgcacccaggagagcgagugcgucugcaucaacgggacgugcaccguggugaugaccgacggcuccgccagcggcaaggcggacaccaagauccucuucaucgaggaggggaagaucguccacacgagcacccuguccggcagcgcccagcacguggaggagugcuccugcuacccccgguaccccggggugcgcugcgucugccgggacaacuggaagggcagcaaccgcccgaucguggacaucaacaucaaggaccacuccaucgugagcuccuacgucugcagcggccuggugggggacacgccccggaagaacgacuccagcuccagcucccacugccucaaccccaacaacgaggagggcgggcacggcgugaaggggugggccuucgacgacggcaacgacgucuggaugggccgcaccaucaacgagaccagccggcugggguacgagaccuucaaggugaucgagggcugguccaaccccaagagcaagcugcagaucaaccgccaggucaucguggaccgcggggaccgguccggcuacagcgggaucuucuccguggagggcaagagcugcaucaaccggugcuucuacgucgagcucauccgcggccggaaggaggagaccgaggugcuguggaccagcaacuccaucguggucuucugcgggacgagcggcaccuacgggaccggcuccuggccggacggggccgaccugaaccucaugcccaucuga

SEQ ID NO: 89735 - RNA, 1410 nt, Artificial Sequence
  derived and/or modified CDS sequence (opt1) from neuraminidase__InfluenzaA__AIL94850
augaaccccaaccagaagaucaucaccaucggcagcgugucccugaccaucagcacgaucugcuucuucaugcagaucgccauccucaucaccaccgucacccugcacuucaagcaguacgaguucaacuccccgcccaacaaccaggugaugcuguucgagcccacgaucaucgagcgcaacaucaccgagaucguguaccucaccaacaccacgaucgagaaggagaucugccccaagcuggccgaguaccggaacuggagcaagccgcagugcgacaucaccggguucgcgcccuucuccaaggacaacagcauccgccuguccgccggcggggacaucugggucacccgggagcccuacgugagcugcgaccccgacaagugcuaccaguucgcccucggccaggggaccacgcugaacaacgugcacuccaacgacaccguccgcgaccggaccccguaccgcacccugcucaugaacgagcugggcgugcccuuccaccugggcacgaagcaggucugcaucgccuggagcuccagcuccugccacgacgggaaggccuggcuccacgugugcaucaccggcgacgacaagaacgcgaccgccagcuucaucuacaacgggcggcugguggacuccaucgugagcugguccaaggagauccugcgcacccaggagagcgagugcgucugcaucaacggcacgugcaccguggugaugaccgacggguccgccagcggcaaggccgacaccaagauccucuucaucaaggagggcaagaucguccacacgagcacccuguccgggagcgcgcagcacguggaggagugcuccugcuacccccgguaccccggcgugcgcugcgucugccgggacaacuggaaggggagcaaccgcccgaucguggacaucaacaucaaggaccacuccaucgugagcuccuacgucugcagcggccuggugggcgacacgccccggaagaacgacuccagcuccagcucccacugccucgaccccaacagcgaggagggcgggcacggggugaagggcugggccuucgacgacgggaacgacgucuggaugggccgcaccaucuccgagaagucccggcugggcuacgagaccuucaaggugaucgagggguggagcaaccccaagagcaaguuccagaucaaccgccaggucaucguggaccggggcaaccgcuccggguacagcggcaucuucagcguggaggggaaguccugcaucaaccggugcuucuacgucgagcugauccgcggccggaaggaggagaccgaggugcucuggaccagcaacuccaucguggucuucugcggcaccagcgggacguacggcaccggguccuggccggacggcgccgaccugaaccugaugcccaucuga

SEQ ID NO: 89736 - RNA, 1410 nt, Artificial Sequence; identical to SEQ ID NO: 83434
  derived and/or modified CDS sequence (opt1) from neuraminidase__InfluenzaA__AIL94862

SEQ ID NO: 89737 - RNA, 1410 nt, Artificial Sequence; identical to SEQ ID NO: 83434
  derived and/or modified CDS sequence (opt1) from neuraminidase__InfluenzaA__AIL94874

SEQ ID NO: 89738 - RNA, 1410 nt, Artificial Sequence
  derived and/or modified CDS sequence (opt1) from neuraminidase__InfluenzaA__AIL94886
augaaccccaaccagaagaucaucaccaucggcagcgugugcaugaccaucgggauggccaaccugaugcuccagaucggcaacaucaucuccaucuggaucagccacuccauccagcuggggaacaagaaccagaucgagacgugcaaccagagcgucaucaccuacgagaacaacaccugggugaaccagaccuacgugaacaucuccaacacgaacuucgccgcgggccagagcgucguguccgugaagaucgccgggaacagcucccugugcccggucagcggcugggccaucuacuccaaggacaacagcauccgcaucggcuccaagggggacguguucgugauccgggagcccuucaucagcugcagcccccucgagugccgcaccuucuuccugacccagggcgcccugcucaacgacaagcacuccaacgggaccaucaaggaccggucccccuaccgcacgcugaugagcugcccgaucggcgagguccccucccccuacaacagccgguucgagagcguggccugguccgcgagcgccugccacgacgggaucaacuggcugaccaucggcaucuccggccccgacgacggggccguggccguccucaaguacaacggcaucaucaccgacaccaucaagagcuggcgcaacaacauccugcggacgcaggaguccgagugcgcgugcgugaacgggagcugcuucaccaucaugaccgacggcccguccgacggccaggccagcuacaagaucuuccgcaucgagaaggggaagaucgugaaguccgucgagaugaacgcccccaacuaccacuacgaggagugcagcugcuaccccgacuccagcgagaucacgugcgugugccgggacaacuggcacggcuccaaccgccccugggugagcuucaaccagaaccuggaguaccagaucggguacaucugcuccggcaucuucggggacaacccgcggccccacgacaagaccggcagcugcggccccgucuccagcaacggggccaacggcgugaagggguucuccuucaaguacggcaacgggguguggaucggccgcaccaagagcaucagcucccggaagggcuucgagaugaucugggaccccaacggguggaccggcaccgacaacaacuucagcaucaagcaggacaucgucgggaucaacgagugguccggcuacagcggguccuucgugcagcacccggagcucacgggccuggacugcauccgccccugcuucuggguggagcugauccggggccgccccaaggagaacaccaucuggaccagcggguccagcaucuccuucugcggcgucaacagcgacaccguggggugguccuggcccgacggcgccgagcucccguucacgaucgacaaguga

SEQ ID NO: 89739 - RNA, 1410 nt, Artificial Sequence; identical to SEQ ID NO: 86946
  derived and/or modified CDS sequence (opt1) from neuraminidase__InfluenzaA__AIL94897

SEQ ID NO: 89740 - RNA, 1410 nt, Artificial Sequence; identical to SEQ ID NO: 89734
  derived and/or modified CDS sequence (opt1) from neuraminidase__InfluenzaA__AIL94909

SEQ ID NO: 89741 - RNA, 1410 nt, Artificial Sequence; identical to SEQ ID NO: 86170
  derived and/or modified CDS sequence (opt1) from neuraminidase__InfluenzaA__AIL94921

SEQ ID NO: 89742 - RNA, 1410 nt, Artificial Sequence; identical to SEQ ID NO: 86170
  derived and/or modified CDS sequence (opt1) from neuraminidase__InfluenzaA__AIL94933

SEQ ID NO: 89743 - RNA, 1410 nt, Artificial Sequence; identical to SEQ ID NO: 89661
  derived and/or modified CDS sequence (opt1) from neuraminidase__InfluenzaA__AIL94945

SEQ ID NO: 89744 - RNA, 1410 nt, Artificial Sequence
  derived and/or modified CDS sequence (opt1) from neuraminidase__InfluenzaA__AIL94957
augaaccccaaccagaagaucaucaccaucggcagcgugugcaugaccaucgggauggccaaccugauccuccagaucggcaacaucaucuccaucuggaucagccacuccauccagcuggggaaccagagccagaucgaggccugcaaccaguccgucaucacguacgagaacaacaccugggugaaccagaccuacgugaacaucagcaacaccaacuucgcggccggccaguccgucgugagcgugaagcuggccgggaacuccagccucugcccggucuccggcugggccaucuacagcaaggacaacuccgugcgcaucggcagcaagggggacguguucgucauccgggagcccuucaucuccugcagcccccuggagugccgcacguucuuccugacccagggcgcccuccugaacgacaagcacuccaacgggaccaucaaggaccggagccccuaccgcacccugauguccugcccgaucggcgaggugcccagccccuacaacagccgguucgaguccguggcguggagcgccuccgccugccacgacgggaucaacuggcucacgaucggcaucagcggccccgacuccggggccgucgcggugcugaaguacaacggcaucaucaccgacaccaucaagagcuggaagaacaacauccugcgcacccaggaguccgagugcgccugcgugaacgggagcugcuucacgaucaugaccgacggcccguccgacggccaggccagcuacaagaucuuccggaucgagaaggggaagaucgucaaguccguggagauggacgcccccaacuaccacuacgaggagugcagcugcuaccccgacuccagcgagaucacgugcgugugccgcgacaacuggcacggcuccaaccggcccugggucagcuucaaccagaaccucgaguaccagaucggguacaucugcuccggcguguucggggacaacccgcgccccaacgacaagaccggcagcugcggccccguguccagcaacggggccaacggcgucaagggguucagcuucaaguacggcaacgggguguggaucggccggaccaaguccaucagcucccgcaagggcuucgagaugaucugggaccccaacggguggaacggcaccgacaacaacuucagcaucaagcaggacaucguggggaucaacgagugguccggcuacagcggguccuucguccagcacccggagcugaccggccuggacugcauccggcccugcuucuggguggagcucauccgcggccggcccaaggagaacaccaucuggacgagcggguccagcaucuccuucugcggcgucaacagcgacaccguggggugguccuggcccgacggcgcggagcugccguucaccaucgacaaguga

SEQ ID NO: 89745 - RNA, 1410 nt, Artificial Sequence; identical to SEQ ID NO: 89734
  derived and/or modified CDS sequence (opt1) from neuraminidase__InfluenzaA__AIL94968

SEQ ID NO: 89746 - RNA, 1410 nt, Artificial Sequence
  derived and/or modified CDS sequence (opt1) from neuraminidase__InfluenzaA__AIM55840
augaaccccaaccagaagaucaucaccaucggcagcgugugcaugaccaucgggauggccaaccugauccuccagaucggcaacaucaucuccaucuggaucagccacuccauccaggucgggaaccagagccagaucgagaucugcaaccaguccgugaucacguacgagaacaacaccugggugaaccagaccuacgucaacaucagcaacaccaacuucgccgcgggccagccggugguguccgucaagcuggccgggaacagcucccugugccccgugagcggcugggccaucuacuccaaggacaacagcgugcgcaucggcuccaagggggacgucuucgugauccgggagcccuucaucagcugcagcccccucgagugccgcacguucuuccugacccagggcgcccugcucaacgacaagcacagcaacgggaccaucaaggaccgguccccguaccgcacccugaugagcugccccaucggcgaggugcccucccccuacaacagccgguucgagagcgucgccugguccgcgagcgccugccacgacgggaucaacuggcugacgaucggcaucuccggcccggacagcggggccguggccgugcucaaguacaacggcaucaucaccgacaccaucaaguccuggcgcaacgacauccugcggacccaggagagcgagugcgcgugcgucaacggguccugcuucacgaucaugaccgacggccccagcgacggccaggccuccuacaagaucuuccgcaucgagaaggggaagaucgugaaguccguggagaugaacgcccccaacuaccacuucgaggagugcuccugcuaccccgacagcuccgagaucacgugcgucugccgggacaacuggcacggcagcaaccgcccguggguguccuucaaccagaaccuggaguaccagaucggguacaucugcagcggcaucuucggggacaacccccggcccaacgacaagaccggcuccugcggccccgugagcuccaacggggccaacggcgucaagggguucagcuucaaguacggcaacgggguguggaucggccgcaccaagagcaucuccagccggaagggcuucgagaugaucugggacccgaacggguggaccggcaccgacaacaacuucuccaucaagcaggacaucguggggaucaacgaguggagcggcuacuccgggagcuucguccagcaccccgagcucaccggccuggacugcauccgccccugcuucuggguggagcugauccggggccgccccaaggagaacacgaucuggaccuccgggagcuccaucagcuucugcggcgucaacuccgacaccgugggguggagcuggccggacggcgccgagcuccccuucaccaucgacaaguga

SEQ ID NO: 89747 - RNA, 1410 nt, Artificial Sequence
  derived and/or modified CDS sequence (opt1) from neuraminidase__InfluenzaA__AIM55851
augaaccccaaccagaagaucaucaccaucggcagcgugugcaugaccaucgggauggccaaccugauccuccagaucggcaacaucaucuccaucugggucagccacuccauccagcuggggaaccagagccagaucgagacgugcaaccaguccgugaucaccuacgagaacaacaccugggugaaccagaccuacgucaacaucagcaacacgaacuucgccgcgggccaguccguggugccggucaagcuggccgggaacagcucccucugccccgugagcggcugggccaucuacuccaaggacaacagcgugcgcaucggcuccaagggggacgucuucgugauccgggagcccuucaucagcugcagcccccuggagugccgcaccuucuuccugacccagggcgcccuccugaacgacaagcacagcaacgggaccaucaaggaccgguccccguaccgcacgcugaugagcugccccaucggcgaggugcccucccccuacaacagccgguucgagagcgucgccugguccgcgagcgccugccacgacgggaucaacuggcucaccaucggcaucuccggcccggacagcggggccguggccgugcugaaguacaacggcaucaucaccgacaccaucaaguccuggcgcaacaacauccugcggacgcaggagagcgagugcgcgugcgucaacggguccugcuucaccaucaugaccgacggccccagcgacggccaggccuccuacaagaucuuccgcaucgagaaggggcggaucgugaaguccguggagaugaacgcccccaacuaccacuacgaggagugcuccugcuaccccgacagcuccgagaucacgugcgucugccgcgacaacuggcacggcagcaaccggccguggguguccuucaaccagaaccucgaguaccagaucggguacaucugcagcggcguguucggggacaacccccgccccaacgacaagaccggcuccugcggccccgucagcuccaacggggccaacggcgugaagggguucagcuucaaguacggcaacgggguguggaucggccggaccaagagcaucuccagccgcaagggcuucgagaugaucugggacccgaacggguggaccggcaccgacaacaaguucuccaucaagcaggacaucgucgggaucaacgaguggagcggcuacuccgggagcuucgugcagcaccccgagcugacgggccuggacugcauccggcccugcuucugggucgagcucauccgcggccggcccgaggagaacaccaucuggaccuccgggagcuccaucagcuucugcggcgugaaguccgacaccgugggguggagcuggccggacggcgccgagcugcccuucacgaucgacaaguga

SEQ ID NO: 89748 - RNA, 1410 nt, Artificial Sequence
  derived and/or modified CDS sequence (opt1) from neuraminidase__InfluenzaA__AIM55862
augaaccccaaccagaagaucaucaccaucggcagcgugugcaugaccaucgggauggccaaccugauccuccagaucggcaacaucaucuccaucugggucagccacuccauccagcuggggaaccagagccagaucgagacgugcaaccaguccgugaucaccuacgagaacaacaccugggugaaccagaccuacgucaacaucagcaacacgaacuucgccgcgggccaguccguggugccggucaagcuggccgggaacagcucccucugccccgugagcggcugggccaucuacuccaaggacaacagcgugcgcaucggcuccaagggggacgucuucgugauccgggagcccuucaucagcugcagcccccuggagugccgcaccuucuuccugacccagggcgcccuccugaacgacaagcacagcaacgggaccaucaaggaccgguccccguaccgcacgcugaugagcugccccaucggcgaggugcccucccccuacaacagccgguucgagagcgucgccugguccgcgagcgccugccacgacgggaucaacuggcucaccaucggcaucuccggcccggacagcggggccguggccgugcugaaguacaacggcaucaucaccgacaccaucaaguccuggcgcaacaacauccugcggacgcaggagagcgagugcgcgugcgucaacggguccugcuucaccaucaugaccgacggccccagcgacggccaggccuccuacaagaucuucaagaucgagaaggggaagaucgugaaguccguggagaugaacgcccccaacuaccacuacgaggagugcuccugcuaccccgacagcuccgagaucacgugcgucugccgcgacaacuggcacggcagcaaccggccguggguguccuucaaccagaaccucgaguaccagaucggguacaucugcagcggcguguucggggacaacccccgccccaacgacaagaccggcuccugcggccccgucagcuccaacggggccaacggcgugaagggguucagcuucaaguacggcaacgggguguggaucggccggaccaagagcaucuccagccgcaagggcuucgagaugaucugggacccgaacggguggaacggcaccgacaacaacuucuccaucaagcaggacaucgucgggaucaaggaguggagcggcuacuccgggagcuucgugcagcaccccgagcugaccggccuggacugcauccggcccugcuucugggucgagcucauccgcggccggcccgaggagaacacgaucuggaccuccgggagcuccaucagcuucugcggcgugaacuccgacaccgugggguggagcuggccggacggcgccgagcugcccuucaccaucgacaaguga

SEQ ID NO: 89749 - RNA, 1410 nt, Artificial Sequence
  derived and/or modified CDS sequence (opt1) from neuraminidase__InfluenzaA__AIM55873
augaaccccaaccagaagaucaucaccaucggcagcgugugcaugaccaucgggauggccaaccugauccuccagaucggcaacaucaucuccaucugggucagccacuccauccagcuggggaaccagagccagaucgagacgugcaaccaguccgugaucaccuacgagaacaacaccugggugaaccagaccuacgucaacaucagcaacacgaacuucgccgcgggccaguccguggugccggucaagcuggccgggaacagcucccucugccccgugagcggcugggccaucuacuccaaggacaacagcgugcgcaucggcuccaagggggacgucuucgugauccgggagcccuucaucagcugcagcccccuggagugccgcaccuucuuccugacccagggcgcccuccugaacgacaagcacagcaacgggaccaucaaggaccgguccccguaccgcacgcugaugagcugccccaucggcgaggugcccucccccuacaacagccgguucgagagcgucgccugguccgcgagcgccugccacgacgggaucaacuggcucaccaucggcaucuccggcccggacagcggggccguggccgugcugaaguacaacggcaucaucaccgacaccaucaaguccuggcgcaacaacauccugcggacgcaggagagcgagugcgcgugcgucaacggguccugcuucaccaucaugaccgacggccccagcgacggccaggccuccuacaagaucuuccgcaucgagaaggggaagaucgugaaguccguggagaugaacgcccccaacuaccacuacgaggagugcuccugcuaccccgacagcuccgagaucacgugcgucugccgggacaacuggcacggcagcaaccgcccguggguguccuucaaccagaaccucgaguaccagaucggguacaucugcagcggcguguucggggacaacccccggcccaacgacaagaccggcuccugcggccccgucagcuccaacggggccaacggcgugaagggguucagcuucaaguacggcaacgggguguggaucggccgcaccaagagcaucuccagccggaagggcuucgagaugaucugggacccgaacggguggaccggcaccgacaacaacuucuccaucaagcaggacaucgucgggaucaaggaguggagcggcuacuccgggagcuucgugcagcaccccgagcugacgggccuggacugcauccgccccugcuucugggucgagcucauccggggccgccccgaggagaacaccaucuggaccuccgggagcuccaucagcuucugcggcgugaacuccgacaccgugggguggagcuggccggacggcgccgagcugcccuucacgaucgacaaguga

SEQ ID NO: 89750 - RNA, 1410 nt, Artificial Sequence; identical to SEQ ID NO: 89749
  derived and/or modified CDS sequence (opt1) from neuraminidase__InfluenzaA__AIM55884

SEQ ID NO: 89751 - RNA, 1410 nt, Artificial Sequence; identical to SEQ ID NO: 89749
  derived and/or modified CDS sequence (opt1) from neuraminidase__InfluenzaA__AIM55918

SEQ ID NO: 89752 - RNA, 1410 nt, Artificial Sequence
  derived and/or modified CDS sequence (opt1) from neuraminidase__InfluenzaA__AIM55929
augaaccccaaccagaagaucaucaccaucggcagcgugugcaugaccaucgggauggccaaccugauccuccagaucggcaacaucaucuccaucugggucagccacuccauccagcuggggaaccagagccagaucgagacgugcaaccaguccgugaucaccuacgagaacaacaccugggugaaccagaccuacgucaacaucagcaacacgaacuucgccgcgggccaguccguggugagcgucaagcuggccgggaacuccagccucugcccgguguccggcugggccaucuacagcaaggacaacuccgugcgcaucggcagcaagggggacgucuucgugauccgggagcccuucaucuccugcagcccccuggagugccgcaccuucuuccugacccagggcgcccuccugaacgacaagcacuccaacgggaccaucaaggaccggagccccuaccgcacgcugauguccugcccgaccggcgaggugcccagccccuacaacagccgguucgaguccgucgccuggagcgcguccgccugccacgacgggaucaacuggcucaccaucggcaucagcggccccgacuccggggccguggccgugcugaaguacaacggcaucaucaccgacacgaucaagagcuggcgcaacaacauccugcggacccaggaguccgagugcgcgugcgucaacgggagcugcuucaccaucaugaccgacggcccguccgacggccaggccagcuacaagaucuuccgcaucgagaaggggaagaucgugaaguccguggagaugaacgcccccaacuaccacuacgaggagugcagcugcuaccccgacuccagcgagaucacgugcgucugccgggacaacuggcacggcuccaaccgccccugggugagcuucaaccagaaccucgaguaccagaucggguacaucugcuccggcguguucggggacaacccgcggcccaacgacaagaccggcagcugcggccccgucuccagcaacggggccaacggcgugaagggguucagcuucaaguacggcaacgggguguggaucggccgcaccaaguccaucagcucccggaagggcuucgagaugaucugggaccccaacggguggaccggcacggacaacaacuucagcaucaagcaggacaucgucgggaucaaggagugguccggcuacagcggguccuucgugcagcacccggagcugaccggccuggacugcauccgccccugcuucugggucgagcucauccggggccgccccgaggagaacaccaucuggaccagcggguccagcaucuccuucugcggcgugaacagcgacacgguggggugguccuggcccgacggcgccgagcugccguucaccaucgacaaguga

SEQ ID NO: 89753 - RNA, 1410 nt, Artificial Sequence
  derived and/or modified CDS sequence (opt1) from neuraminidase__InfluenzaA__AIM55940
augaaccccaaccagaagaucaucaccaucggcagcgugugcaugaccaucgggauggccaaccugauccuccagaucggcaacaucaucuccaucugggucagccacuccauccagcuggggaaccagagccagaucgagacgugcaaccaguccgugaucaccuacgagaacaacaccugggugaaccagaccuacgucaacaucagcuccacgaacuucgccgcgggccagagcguggugccggucaagcuggccgggaacuccagccucugccccguguccggcugggccaucuacagcaaggacaacuccgugcgcaucggcagcaagggggacgucuucgugauccgggagcccuucaucuccugcagcccccuggagugccgcaccuucuuccugacccagggcgcccuccugaacgacaagcacuccaacgggaccaucaaggaccggagcccguaccgcacgcugauguccugccccaucggcgaggugcccagccccuacaacagccgguucgaguccgucgccuggagcgcguccgccugccacgacgggaucaacuggcucaccaucggcaucagcggcccggacuccggggccguggccgugcugaaguacaacggcaucaucaccgacaccaucaagagcuggcgcaacaacauccugcggacgcaggaguccgagugcgcgugcgucaacgggagcugcuucaccaucaugaccgacggccccuccgacggccaggccagcuacaagaucuuccgcaucgagaaggggaagaucgugaaguccguggagaugaacgcccccaacuaccacuacgaggagugcagcugcuaccccgacuccagcgagaucacgugcgucugccgggacaacuggcacggcuccaaccgcccgugggugagcuucaaccagaaccucgaguaccagaucggguacaucugcuccggcguguucggggacaacccccggcccaacgacaagaccggcagcugcggccccgucuccagcaacggggccaacggcgugaagggguucagcuucaaguacggcaacgggguguggaucggccgcaccaaguccaucagcucccggaagggcuucgagaugaucugggacccgaacggguggaccggcaccgacaacaacuucagcaucaagcaggacaucgucgggaucaaggagugguccggcuacagcggguccuucgugcagcaccccgagcugacgggccuggacugcauccgccccugcuucugggucgagcucauccggggccgccccgaggagaacaccaucuggaccagcggguccagcaucuccuucugcggcgugaacagcgacaccguggggugguccuggccggacggcgccgagcugcccuucacgaucgacaaguga

SEQ ID NO: 89754 - RNA, 1410 nt, Artificial Sequence
  derived and/or modified CDS sequence (opt1) from neuraminidase__InfluenzaA__AIM55965
augaaccccaaccagaagaucaucaccaucggcagcgugugcaugaccaucgggauggccaaccugauccuccagaucggcaacaucaucuccaucugggucagccacuccauccagcuggggaaccagagccagaucgagacgugcaaccaguccgugaucaccuacgagaacaacaccugggugaaccagaccuacgucaacaucagcaacacgaacuucgccgcgggccaguccguggugccggucaagcuggccgggaacagcucccucugccccgugagcggcugggccaucuacuccaaggacaacagcgugcgcaucggcuccaagggggacgucuucgugauccgggagcccuucaucagcugcagcccccuggagugccgcaccuucuuccugacccagggcgcccuccugaacgacaagcacagcaacgggaccaucaaggaccgguccccguaccgcacgcugaugagcugccccaucggcgaggugcccucccccuacaacagccgguucgagagcgucgccugguccgcgagcgccugccacgacgggaucaacuggcucaccaucggcaucuccggcccggacagcggggccguggccgugcugaaguacaacggcaucaucaccgacaccaucaaguccuggcgcaacaacauccugcggacgcaggagagcgagugcgcgugcgucaacggguccugcuucaccaucaugaccgacggccccagcgacggccaggccuccuacaagaucuuccgcaucgagaaggggaagaucgugaaguccguggagaugaacgcccccaacuaccacuacgaggagugcuccugcuaccccgacagcuccgagaucacgugcgucugccgggacaacuggcacggcagcaaccgcccguggguguccuucaaccagaaccucgaguaccagaucggguacaucugcagcggcguguucggggacaacccccggcccaacgacaagaccggcuccugcggccccgucagcuccaacggggccaacggcgugaagggguucagcuucaaguacggcaacgggguguggaucggccgcaccaagagcaucuccagccggaagggcuucgagaugaucugggacccgaacggguggaccggcaccgacaacaacuucuccaucaagcaggacaucgucgggaucaaggaguggagcggcuacuccgggagcuucgugcagcaccccgagcugacgggccuggacugcauccgccccugcuucugggucgagcucauccggggccgccccgaggagaacaccaucuggaccuccgggagcuccaucagcuucugcggcgugaacuccgacgccgugggguggagcuggccggacggcgcggagcugcccuucaccaucgacaaguga

SEQ ID NO: 89755 - RNA, 1410 nt, Artificial Sequence
  derived and/or modified CDS sequence (opt1) from neuraminidase__InfluenzaA__AIM55976
augaaccccaaccagaagaucaucaccaucggcagcgugugcaugaccaucgggauggccaaccugauccuccagaucggcaacaucaucuccaucugggucagccacuccauccagcuggggaaccagagccagaucgagacgugcaaccaguccgugaucaccuacgagaacaacaccugggugaaccagaccuacgucaacaucagcaacacgaacuucgccgcgggccaguccguggugagcgucaagcuggccgggaacuccagccucugcccgguguccggcugggccaucuacagcaaggacaacuccgugcgcaucggcagcaagggggacgucuucgugauccgggagcccuucaucuccugcagcccccuggagugccgcaccuucuuccugacccagggcgcccuccugaacgacaagcacuccaacgggaccaucaaggaccggagccccuaccgcacgcugauguccugcccgaucggcgaggugcccagccccuacaacagccgguucgaguccgucgccuggagcgcguccgccugccacgacgggaucaacuggcucaccaucggcaucagcggccccgacuccggggccguggccgugcugaaguacaacggcaucaucaccgacaccaucaagagcuggcgcaacaacauccugcggacgcaggaguccgagugcgcgugcgucaacgggagcugcuucaccaucaugaccgacggcccguccgacggccaggccagcuacaagaucuuccgcaucgagaaggggaagaucgugaaguccguggagaugaacgcccccaacuaccacuacgaggagugcagcugcuaccccgacuccagcgagaucacgugcgucugccgggacaacuggcacggcuccaaccgccccugggugagcuucaaccagaaccucgaguaccagaucggguacaucugcuccggcguguucggggacaacccgcggcccaacgacaagaccggcagcugcggccccgucuccagcaacggggccaacggcgugaagggguucagcuucaaguacggcaacgggguguggaucggccgcaccaaguccaucagcucccggaagggcuucgagaugaucugggaccccaacggguggaccggcaccgacaacaacuucagcaucaagcaggacaucgucgggaucaaggagugguccggcuacagcggguccuucgugcagcacccggagcugacgggccuggacugcauccgccccugcuucugggucgagcucauccggggccgccccgaggagaacaccaucuggaccagcggguccagcaucuccuucugcggcgugaacagcgacaccguggggugguccuggcccgacggcgccgagcugccguucacgaucgacaaguga

SEQ ID NO: 89756 - RNA, 1410 nt, Artificial Sequence
  derived and/or modified CDS sequence (opt1) from neuraminidase__InfluenzaA__AIM55987
augaaccccaaccagaagaucaucaccaucggcagcgugugcaugaccaucgggauggccaaccugauccuccagaucggcaacaucaucuccaucugggucagccacuccauccagcuggggaaccagagccagaucgagacgugcaaccaguccgugaucaccuacgagaacaacaccugggugaaccagaccuacgucaacaucagcaacacgaacuucgccgcgggccaguccguggugagcgucaagcuggccgggaacuccagccucugcccgguguccggcugggccaucuacagcaaggacaacuccgugcgcaucggcagcaagggggacgucuucgugauccgggagcccuucaucuccugcagcccccuggagugccgcaccuucuuccugacccagggcgcccuccugaacgacaagcacuccaacgggaccaucaaggaccggagccccuaccgcacgcugauguccugcccgaccggcgaggugcccagccccuacaacagccgguucgaguccgucgccuggagcgcguccgccugccacgacgggaucaacuggcucaccaucggcaucagcggccccgacuccggggccguggccgugcugaaguacaacggcaucaucaccgacacgaucaagagcuggcgcaacaacauccugcggacccaggaguccgagugcgcgugcgucaacgggagcugcuucaccaucaugaccgacggcccguccgacggccaggccagcuacaagaucuuccgcaucgagaaggggaagaucgugaaguccguggagaugaacgcccccaacuaccacuacgaggagugcagcugcuaccccgacuccagcgagaucacgugcgucugccgggacaacuggcacggcuccaaccgccccugggugagcuucaaccagaaccucgaguaccagaucggguacaucugcuccggcguguucggggacaacccgcggcccaacgacaagaccggcagcugcggccccgucuccagcaacggggccaacggcgugaagggguucagcuucaaguacggcaacgggguguggaucggccgcaccaaguccaucagcucccggaagggcuucgagaugaucugggaccccaacggguggaccggcacggacaacaacuucagcaucaagcaggacaucgucgggaucaaggagugguccggcuacagcggguccuucgugcagcacccggagcugaccggccuggacugcauccgccccugcuucugggucgagcucauccggggccgccccgaggagaacaccaucuggaccagcggguccagcaucuccuucugcggcgugaacagcgacacgguggacugguccuggcccgacggggccgagcugccguucaccaucgacaaguga

SEQ ID NO: 89757 - RNA, 1410 nt, Artificial Sequence
  derived and/or modified CDS sequence (opt1) from neuraminidase__InfluenzaA__AIM55998
augaaccccaaccagaagaucaucaccaucggcagcgugugcaugaccaucgggauggccaaccugauccuccagaucggcaacacgaucuccaucugggucagccacuccauccagcuggggaaccagagccagaucgagaccugcaaccaguccgugaucaccuacgagaacaacaccugggugaaccagacguacgucaacaucagcaacaccaacuucgccgcgggccaguccguggugccggucaagcuggccgggaacagcucccucugccccgugagcggcugggccaucuacuccaaggacaacagcgugcgcaucggcuccaagggggacgucuucgugauccgggagcccuucaucagcugcagcccccuggagugccgcaccuucuuccugacccagggcgcccuccugaacgacaagcacagcaacgggacgaucaaggaccgguccccguaccgcacccugaugagcugccccaucggcgaggugcccucccccuacaacagccgguucgagagcgucgccugguccgcgagcgccugccacgacgggaucaacuggcucaccaucggcaucuccggcccggacagcggggccguggccgugcugaaguacaacggcaucaucaccgacacgaucaaguccuggcgcaacaacauccugcggacccaggagagcgagugcgcgugcgucaacggguccugcuucaccaucaugaccgacggccccagcgacggccaggccuccuacaagaucuuccgcaucgagaaggggaagaucgugaaguccguggagaugaacgcccccaacuaccacuacgaggagugcuccugcuaccccgacagcuccgagaucacgugcgucugccgggacaacuggcacggcagcaaccgcccguggguguccuucaaccagaaccucgaguaccagaucggguacaucugcagcggcguguucggggacaacccccggcccaacgacaagaccggcuccugcggccccgucagcuccaacggggccaacggcgugaagggguucagcuucaaguacggcaacgggguguggaucggccgcaccaagagcaucuccagccggaagggcuucgagaugaucugggacccgaacggguggaccggcacggacaacaaguucuccaucaagcaggacaucgucgggaucaacgaguggagcggcuacuccgggagcuucgugcagcaccccgagcugaccggccuggacugcauccgccccugcuucugggucgagcucauccggggccgccccgaggagaacaccaucuggaccuccgggagcuccaucagcuucugcggcgugaaguccgacacggugggguggagcuggccggacggcgccgagcugcccuucaccaucgacaaguga

SEQ ID NO: 89758 - RNA, 1410 nt, Artificial Sequence; identical to SEQ ID NO: 89755
  derived and/or modified CDS sequence (opt1) from neuraminidase__InfluenzaA__AIM56009

SEQ ID NO: 89759 - RNA, 1410 nt, Artificial Sequence; identical to SEQ ID NO: 89755
  derived and/or modified CDS sequence (opt1) from neuraminidase__InfluenzaA__AIM56020

SEQ ID NO: 89760 - RNA, 1410 nt, Artificial Sequence; identical to SEQ ID NO: 89755
  derived and/or modified CDS sequence (opt1) from neuraminidase__InfluenzaA__AIM56031

SEQ ID NO: 89761 - RNA, 1410 nt, Artificial Sequence
  derived and/or modified CDS sequence (opt1) from neuraminidase__InfluenzaA__AIM56042
augaaccccaaccagaagaucaucaccaucggcagcgugugcaugaccaucgggauggccaaccugauccuccagaucggcaacaucaucuccaucugggucagccacuccauccagcuggggaaccagagccagaucgagacgugcaaccaguccgugaucaccuacgagaacaacaccugggugaaccagaccuacgucaacaucagcaacacgaacuucgccgcgggccaguccguggugccggucaagcuggccgggaacagcucccucugccccgugagcggcugggccaucuacuccaaggacaacagcgugcgcaucggcuccaagggggacgucuucgugauccgggagcccuucaucagcugcagcccccuggagugccgcaccuucuuccugacccagggcgcccuccugaacgacaagcacagcaacgggaccaucaaggaccgguccccguaccgcacgcugaugagcugccccaucggcgaggugcccucccccuacaacagccgguucgagagcgucgccugguccgcgagcgccugccacgacgggaucaacuggcucaccaucggcaucuccggcccggacagcggggccguggccgugcugaaguacaacggcaucaucaccgacaccaucaaguccuggcgcaacaacauccugcggacgcaggagagcgagugcgcgugcgucaacggguccugcuucaccaucaugaccgacggccccagcaacggccaggccuccuacaagaucuuccgcaucgagaaggggaagaucgugaaguccguggagaugaacgcccccaacuaccacuacgaggagugcuccugcuaccccgacagcuccgagaucacgugcgucugccgggacaacuggcacggcagcaaccgcccguggguguccuucaaccagaaccucgaguaccagaucggguacaucugcagcggcguguucggggacaacccccggcccaacgacaagaccggcuccugcggccccgucagcuccaacggggccaacggcgugaagggguucagcuucaaguacggcaacgggguguggaucggccgcaccaagagcaucuccagccggaagggcuucgagaugaucugggacccgaacggguggaccggcaccgacaacaacuucuccaucaagcaggacaucgucgggaucaaggaguggagcggcuacuccgggagcuucgugcagcaccccgagcugacgggccuggacugcauccgccccugcuucugggucgagcucauccggggccgccccgaggagaacaccaucuggaccuccgggagcuccaucagcuucugcggcgugaacuccgacaccgugggguggagcuggccggacggcgccgagcugcccuucacgaucgacaaguga

SEQ ID NO: 89762 - RNA, 1410 nt, Artificial Sequence
  derived and/or modified CDS sequence (opt1) from neuraminidase__InfluenzaA__AIM56053
augaaccccaaccagaagaucaucaccaucggcagcgugugcaugaccaucgggauggccaaccugauccuccagaucggcaacaucaucuccaucugggucagccacuccauccagcuggggaaccagagccagaucgagacgugcaaccaguccgugaucaccuacgagaacaacaccugggugaaccagaccuacgucaacaucagcaacacgaacuucgccgcgggccaguccguggugagcgucaagcuggccgggaacuccagccucugcccgguguccggcugggccaucuacagcaaggacaacuccgugcgcaucggcagcaagggggacgucuucgugauccgggagcccuucaucuccugcagcccccuggagugccgcaccuucuuccugacccagggcgcccuccugaacgacaagcacuccaacgggaccaucaaggaccggagccccuaccgcacgcugauguccugcccgaucggcgaggugcccagccccuacaacagccgguucgaguccgucgccuggagcgcguccgccugccacgacgggaucaacuggcucaccaucggcaucagcggccccgacuccggggccguggccgugcugaaguacaacggcaucaucaccgacaccaucaagagcuggcgcaacaacauccugcggacgcaggaguccgagugcgcgugcgucaacgggagcugcuucaccaucaugaccgacggcccguccgacgagcaggccagcuacaagaucuuccgcaucgagaagggcaagaucgugaaguccguggagaugaacgcccccaacuaccacuacgaggagugcagcugcuaccccgacuccagcgagaucacgugcgucugccgggacaacuggcacggguccaaccgccccugggugagcuucaaccagaaccucgaguaccagaucggcuacaucugcuccgggguguucggcgacaacccgcggcccaacgacaagaccgggagcugcggccccgucuccagcaacggcgccaacggggugaagggcuucagcuucaaguacgggaacggcguguggaucgggcgcaccaaguccaucagcucccggaagggcuucgagaugaucugggaccccaacggcuggaccgggaccgacaacaacuucagcaucaagcaggacaucgucggcaucaaggagugguccggguacagcggcuccuucgugcagcacccggagcugacggggcuggacugcauccgccccugcuucugggucgagcucauccggggccgccccgaggagaacaccaucuggaccagcggcuccagcaucuccuucugcggggugaacagcgacaccgugggcugguccuggcccgacggggccgagcugccguucacgaucgacaaguga

SEQ ID NO: 89763 - RNA, 1410 nt, Artificial Sequence
  derived and/or modified CDS sequence (opt1) from neuraminidase__InfluenzaA__AIM56064
augaaccccaaccagaagaucaucaccaucggcagcgugugcaugaccaucgggauggccaaccugauccuccagaucggcaacaucaucuccaucugggucagccacuccauccagcuggggaaccagagccagaucgagacgugcaaccaguccgugaucaccuacgagaacaacaccugggugaaccagaccuacgucaacaucagcaacacgaacuucgccgcgggccaguccguggugccggucaagcuggccgggaacagcucccucugccccgugagcggcugggccaucuacuccaaggacaacagcgugcgcaucggcuccaagggggacgucuucgugauccgggagcccuucaucagcugcagcccccuggagugccgcaccuucuuccugacccagggcgcccuccugaacgacaagcacagcaacgggaccaucaaggaccgguccccguaccgcacgcugaugagcugccccaucggcgaggugcccucccccuacaacagccgguucgagagcgucgccugguccgcgagcgccugccacgacgggaucaacuggcucaccaucggcaucuccggcccggacagcggggccguggccgugcugaaguacaacggcaucaucaccgacaccaucaaguccuggcgcaacaacauccugcggacgcaggagagcgagugcgcgugcgucaacggguccugcuucaccaucaugaccgacggccccagcgacggccaggccuccuacaagaucuuccgcaucgagaaggggaagaucgugaaguccguggagaugaacgcccccaacuaccacuacgaggagugcuccugcuaccccgacagcuccgagaucacgugcgucugccgggacaacuggcacggcagcaaccgcccguggguguccuucaaccagaaccucgaguaccagaucggguacaucugcagcggcguguucggggacaacccccggcccaacgacaagaccggcuccugcggccccgucagcuccaacggggccaacggcgugaagggguucagcuucaaguacggcaacgggguguggaucggccgcaccaagagcaucuccagccggaagggcuucgagaugaucugggacccgaacggguggaccggcaccgacaacaacuucuccaucaagcaggacaucgucgggaucaaggaguggagcggcuacuccgggagcuucgugcagcaccccgagcugacgggccuggacugcauccgccccugcuucugggucgagcucgugcggggccgccccgaggagaacaccaucuggaccuccgggagcuccaucagcuucugcggcgugaacuccgacaccgucggguggagcuggccggacggcgccgagcugcccuucacgaucgacaaguga

SEQ ID NO: 89764 - RNA, 1410 nt, Artificial Sequence
  derived and/or modified CDS sequence (opt1) from neuraminidase__InfluenzaA__AIM56086
augaaccccaaccagaagaucaucaccaucggcagcgugugcaugaccaucgggauggccaaccugauccuccagaucggcaacaucaucuccaucugggucagccacuccauccagcuggggaaccagagccacaucgagacgugcaaccaguccgugaucaccuacgagaacaacaccugggugaaccagaccuacgucaacaucagcaacacgaacuucgccgcgggccaguccguggugccggucaagcuggccgggaacagcucccucugccccgugagcggcugggccaucuacuccaaggacaacagcgugcgcaucggcuccaagggggacgucuucgugauccgggagcccuucaucagcugcagcccccuggagugccgcaccuucuuccugacccagggcgcccuccugaacgacaagcacuccaacgggaccaucaaggaccgguccccguaccgcacgcugaugagcugccccaucggcgaggugcccucccccuacaacagccgguucgagagcgucgccugguccgcgagcgccugccacgacgggaucaacuggcucaccaucggcaucuccggcccggacaacggggccguggccgugcugaaguacaacggcaucaucaccgacaccaucaagagcuggcgcaacaacauccugcggacgcaggaguccgagugcgcgugcgucaacgggagcugcuucaccaucaugaccgacggccccuccgacggccaggccagcuacaagaucuuccgcaucgagaaggggaagaucgugaaguccguggagaugaacgcccccaacuaccacuacgaggagugcagcugcuaccccgacuccagcgagaucacgugcgucugccgggacaacuggcacggcuccaaccgcccgugggugagcuucaaccagaaccucgaguaccagaucggguacaucugcuccggcguguucggggacaacccccggcccaacgacaagaccggcagcugcggccccgucaccuccaacggggccaacggcgugaagggguucagcuucaaguacggcaacgggguguggaucggccgcaccaaguccaucagcagccggaagggcuucgagaugaucugggacccgaacggguggaccggcacggacaacaacuucuccaucaagcaggacaucaucgggaucaaggaguggagcggcuacuccgggagcuucguccagcaccccgagcugaccggccuggacugcauccgccccugcuucuggguggagcucauccggggccgccccgaggagaacaccaucuggaccuccgggagcuccaucagcuucugcggcgucaacuccgacacggugggguggagcuggccggacggcgccgagcugcccuucaccaucgacaaguga

SEQ ID NO: 89765 - RNA, 1410 nt, Artificial Sequence
  derived and/or modified CDS sequence (opt1) from neuraminidase__InfluenzaA__AIM56097
augaaccccaaccagaagaucaucaccaucggcagcgugugcaugaccaucgggauggccaaccugauccuccagaucggcaacaucaucuccaucugggucagccacuccauccagcuggggaaccagagccagaucgagacgugcaaccaguccgugaucaccuacgagaacaacaccugggugaaccagaccuacgucaacaucagcaacacgaacuucgccgcggagcaguccguggugagcgucaagcuggccggcaacuccagccucugcccgguguccgggugggccaucuacagcaaggacaacuccgugcgcaucggcagcaagggcgacgucuucgugauccgggagcccuucaucuccugcagcccccuggagugccgcaccuucuuccugacccagggggcccuccugaacgacaagcacuccaacggcaccaucaaggaccggagccccuaccgcacgcugauguccugcccgaucggggaggugcccagccccuacaacagccgguucgaguccgucgccuggagcgcguccgccugccacgacggcaucaacuggcucaccaucgggaucagcggccccgacuccggcgccguggccgugcugaaguacaacgggaucaucaccgacaccaucaagagcuggcgcaacaacauccugcggacgcaggaguccgagugcgcgugcgucaacggcagcugcuucaccaucaugaccgacgggccguccgacggccaggccagcuacaagaucuuccgcaucgagaagggcaagaucgugaaguccguggagaugaacgcccccaacuaccacuacgaggagugcagcugcuaccccgacuccagcgagaucacgugcgucugccgggacaacuggcacggguccaaccgccccugggugagcuucaaccagaaccucgaguaccagaucggcuacaucugcuccgggguguucggcgacaacccgcggcccaacgacaagaccgggagcugcggccccgucuccagcaacggcgccaacggggugaagggcuucagcuucaaguacgggaacggcguguggaucgggcgcaccaaguccaucagcucccggaagggcuucgagaugaucugggaccccaacggcuggaccgggaccgacaacaacuucagcaucaagcaggacaucgucggcaucaaggagugguccggguacagcggcuccuucgugcagcacccggagcugacggggcuggacugcauccgccccugcuucugggucgagcucauccggggccgccccgaggagaacaccaucuggaccagcggcuccagcaucuccuucugcggggugaacagcgacaccgugggcugguccuggcccgacggggccgagcugccguucacgaucgacaaguga

SEQ ID NO: 89766 - RNA, 1410 nt, Artificial Sequence
  derived and/or modified CDS sequence (opt1) from neuraminidase__InfluenzaA__AIM56108
augaaccccaaccagaagaucaucaccaucggcagcgugugcaugaccaucgggauggccaaccugauccuccagaucggcaacaucaucuccaucugggucagccacuccauccagcuggggaaccagagccagaucgagacgugcaaccaguccgugaucaccuacgagaacaacaccuggaucaaccagaccuacgugaacaucagcaacacgaacuucgccgcgggccaguccgucgugccggugaagcuggccgggaacagcucccucugccccgucagcggcugggccaucuacuccaaggacaacagcgugcgcaucggcuccaagggggacguguucgucauccgggagcccuucaucagcugcagcccccuggagugccgcaccuucuuccugacccagggcgcccuccugaacgacaagcacuccaacgggaccaucaaggaccgguccccguaccgcacgcugaugagcugccccaucggcgaggugcccucccccuacaacagccgguucgagagcguggccugguccgcgagcgccugccacgacgggaucaacuggcucaccaucggcaucuccggcccggacagcggggccgucgccgugcugaaguacaacggcaucaucaccgacaccaucaaguccuggcgcaacaacauccugcggacgcaggagagcgagugcgcgugcgugaacggguccugcuucaccaucaugaccgacggccccagcgacggccaggccuccuacaagaucuuccgcaucgagaaggggaagaucgucaagagcguggagaugaacgcccccaacuaccacuacgaggagugcuccugcuaccccgacagcuccgagaucacgugcgugugccgggacaacuggcacggcagcaaccgcccgugggucuccuucaaccagaaccucgaguaccagaucggguacaucugcagcggcguguucggggacaacccccggcccaacgacaagaccggcuccugcggccccgugagcuccaacggggccaacggcgucaagggguucagcuucaaguacggcaacgggguguggaucggccgcaccaagagcaucuccagccggaagggcuucgagaugaucugggacccgaacggguggaccggcaccgacaacaacuucuccaucaagcaggacaucguggggaucaaggaguggagcggcuacuccgggagcuucguccagcaccccgagcugacgggccuggacugcauccgccccugcuucuggguggagcucauccggggccgccccgaggagaacaccaucuggaccuccgggagcuccaucagcuucugcggcgucaacuccgacaccgugggguggagcuggccggacggcgccgagcugcccuucacgaucgacaaguga

SEQ ID NO: 89767 - RNA, 1410 nt, Artificial Sequence
  derived and/or modified CDS sequence (opt1) from neuraminidase__InfluenzaA__AIM56119
augaaccccaaccagaagaucaucaccaucggcagcgugugcaugaccaucgggauggccaaccugauccuccagaucggcaacaucaucuccaucugggucagccacuccauccagaucgggaaccagagccagaucgagacgugcaaccaguccgugaucaccuacgagaacaacaccugggugaaccagaccuacgucaacaucagcaacacgaacuucgccgcgggccaguccguggugagcgucaagcuggccgggaacuccagccugugcccgguguccggcugggccaucuacagcaaggacaacuccgugcgcaucggcagcaagggggacgucuucgugauccgggagcccuucaucuccugcagcccccucgagugccgcaccuucuuccugacccagggcgcccugcucaacgacaagcacuccaacgggaccaucaaggaccggagccccuaccgcacgcugauguccugcccgaucggcgaggugcccagccccuacaacagccgguucgaguccgucgccuggagcgcguccgccugccacgacgggaucaacuggcugaccaucggcaucagcggccccgacuccggggccguggccgugcucaaguacaacggcaucaucaccgacaccaucaagagcuggcgcaacaacauccugcggacgcaggaguccgagugcgcgugcgucaacgggagcugcuucaccaucaugaccgacggcccguccgacggccaggccagcuacaagaucuuccgcaucgagaaggggaagaucgugaaguccguggagaugaacgcccccaacuaccacuacgaggagugcagcugcuaccccgacuccagcgagaucacgugcgucugccgggacaacuggcacggcuccaaccgccccugggugagcuucaaccagaaccuggaguaccagaucggguacaucugcuccggcguguucggggacaacccgcggcccaacgacaagaccggcagcugcggccccgucuccagcaacggggccaacggcgugaagggguucagcuucaaguacggcaacgggguguggaucggccgcaccaaguccaucagcucccggaagggcuucgagaugaucugggaccccaacggguggaccggcaccgacaacaaguucagcaucaagcaggacaucgucgggaucaacgagugguccggcuacagcggguccuucgugcagcacccggagcucacgggccuggacugcauccgccccugcuucugggucgagcugauccggggccgccccgaggagaacaccaucuggaccagcggguccagcaucuccuucugcggcgugaacagcgacaccguggggugguccuggcccgacggcgccgagcucccguucacgaucgacaaguga

SEQ ID NO: 89768 - RNA, 1410 nt, Artificial Sequence
  derived and/or modified CDS sequence (opt1) from neuraminidase__InfluenzaA__AIM56130
augaaccccaaccagaagaucaucaccaucggcagcgugugcaugaccaucgggauggccaaccugauccuccagaucggcaacaucaucuccaucugggucagccacuccauccagcuggggaaccagagccagaucgagacgugcaaccaguccgugaucaccuacgagaacaacaccugggugaaccagaccuacgucaacaucagcaacacgaacuucgccgcgggccaguccguggugccggucaagcuggccgggaacagcucccucugccccgugagcggcugggccaucuacuccaaggacaacagcgugcgcaucggcuccaagggggacgucuucgugauccgggagcccuucaucagcugcagcccccuggagugccgcaccuucuuccugacccagggcgcccuccugaacgacaagcacagcaacgggaccaucaaggaccgguccccguaccgcacgcugaugagcugccccaucggcgaggugcccucccccuacaacagccgguucgagagcgucgccugguccgcgagcgccugccacgacgggaucaacuggcucaccaucggcaucuccggcccggacagcggggccguggccgugcugaaguacaacggcaucaucaccgacaccaucaaguccuggcgcaacaacauccugcggacgcaggagagcgagugcgcgugcgucaacggguccugcuucaccaucaugaccgacggccccagcgacggccaggccuccuacaagaucuuccgcaucgagaaggggaagaucgugaaguccguggagaugaacgcccccaacuaccacuacgaggagugcuccugcuaccccgacagcuccgagaucacgugcgucugccgggacaacuggcacggcagcaaccgcccguggguguccuucaaccagaaccucgaguaccagaucggguacaucugcagcggcguguucggggacaacccccggcccaacgacaagaccggcuccugcggccccgucagcuccaacggggccaacggcgugaagggguucagcuucaaguacggcaacgggguguggaucggccgcaccaagagcaucuccagccggaagggcuucgagaugaucugggacccgaacggguggaccggcaccgacaacaaguucuccaucaagcaggacaucgucgggaucaacgaguggagcggcuacuccgggagcuucgugcagcaccccgagcugacgggccuggacugcauccgccccugcuucugggucgagcucauccggggccgccccgaggagaacaccaucuggaccuccgggagcuccaucagcuucugcggcgugaaguccgacaccgugggguggagcuggccggacggcgccgagcugcccuucacgaucgacaaguga

SEQ ID NO: 89769 - RNA, 1410 nt, Artificial Sequence
  derived and/or modified CDS sequence (opt1) from neuraminidase__InfluenzaA__AIM56141
augaaccccaaccagaagaucaucaccaucggcagcgugugcaugaccaucgggauggccaaccugauccuccagaucggcaacaucaucuccaucugggucagccacuccauccagcuggggaaccagagccagaucgagacgugcaaccaguccgugaucaucuacgagaacaacaccugggugaaccagaccuacgucaacaucagcaacaccaacuucgccgcgggccaguccguggugagcgucaagcuggccgggaacuccagccucugcccgguguccggcugggccaucuacagcaaggacaacuccgugcgcaucggcagcaagggggacgucuucgugauccgggagcccuucaucuccugcagcccccuggagugccgcacguucuuccugacccagggcgcccuccugaacgacaagcacuccaacgggaccaucaaggaccggagccccuaccgcacccugauguccugcccgaucggcgaggugcccagccccuacaacagccgguucgaguccgucgccuggagcgcguccgccugccacgacgggaucaacuggcucacgaucggcaucagcggccccgacuccggggccguggccgugcugaaguacaacggcaucaucaccgacaccaucaagagcuggcgcaacaacauccugcggacccaggaguccgagugcgcgugcgucaacgggagcugcuucacgaucaugaccgacggcccguccgacggccaggccagcuacaagaucuuccgcaucgagaaggggaagaucgugaaguccguggagaugaacgcccccaacuaccacuacgaggagugcagcugcuaccccgacuccagcgagaucacgugcgucugccgggacaacuggcacggcuccaaccgccccugggugagcuucaaccagaaccucgaguaccagaucggguacaucugcuccggcguguucggggacaacccgcggcccaacgacaagaccggcagcugcggccccgucuccagcaacggggccaacggcgugaagggguucagcuucaaguacggcaacgggguguggaucggccgcaccaaguccaucagcucccggaagggcuucgagaugaucugggaccccaacggguggaccggcaccgacaacaacuucagcaucaagcaggacaucgucgggaucaaggagugguccggcuacagcggguccuucgugcagcacccggagcugaccggccuggacugcauccgccccugcuucugggucgagcucauccggggccgccccgaggagaacacgaucuggaccagcggguccagcaucuccuucugcggcgugaacagcgacaccguggggugguccuggcccgacggcgccgagcugccguucaccaucgacaaguga

SEQ ID NO: 89770 - RNA, 1410 nt, Artificial Sequence; identical to SEQ ID NO: 89755
  derived and/or modified CDS sequence (opt1) from neuraminidase__InfluenzaA__AIM56152

SEQ ID NO: 89771 - RNA, 1410 nt, Artificial Sequence
  derived and/or modified CDS sequence (opt1) from neuraminidase__InfluenzaA__AIM56163
augaaccccaaccagaagaucaucaccaucggcagcgugugcaugaccaucgggauggccaaccugauccuccagaucggcaacaucaucuccaucugggucagccacuccauccagcuggggaaccagagccacaucgagacgugcaaccaguccgugaucaccuacgagaacaacaccugggugaaccagaccuacgucaacaucagcaacacgaacuucgccgcgggccaguccguggugccggucaagcuggccgggaacagcucccucugccccgugagcggcugggccaucuacuccaaggacaacagcgugcgcaucggcuccaagggggacgucuucgugauccgggagcccuucaucagcugcagcccccuggagugccgcaccuucuuccugacccagggcgcccuccugaacgacaagcacuccaacgggaccaucaaggaccgguccccguaccgcacgcugaugagcugccccaucggcgaggugcccucccccuacaacagccgguucgagagcgucgccugguccgcgagcgccugccacgacgggaucaacuggcucaccaucggcaucuccggcccggacaacggggccguggccgugcugaaguacaacggcaucaucaccgacaccaucaagagcuggcgcaacaacauccugcggacgcaggaguccgagugcgcgugcgucaacgggagcugcuucaccaucaugaccgacggccccuccgacggccaggccagcuacaagaucuuccgcaucgagaaggggaagaucgugaaguccguggagaugaacgcccccaacuaccacuacgaggagugcagcugcuaccccgacuccagcgagaucacgugcgucugccgggacaacuggcacggcuccaaccgcccgugggugagcuucaaccagaaccucgaguaccagaucggguacaucugcuccggcguguucggggacaacccccggcccaacgacaagaccggcagcugcggccccgucaccuccaacggggccaacggcgugaagggguucagcuucaaguacggcaacgggguguggaucggccgcaccaaguccaucagcagccggaagggcuucgagaugaucugggacccgaacggguggaccggcacggacaacaacuucuccaucaagcaggacaucgucgggaucaaggaguggagcggcuacuccgggagcuucgugcagcaccccgagcugaccggccuggacugcauccgccccugcuucugggucgagcucauccggggccgccccgaggagaacaccaucuggaccuccgggagcuccaucagcuucugcggcgugaacuccgacacggugggguggagcuggccggacggcgccgagcugcccuucaccaucgacaaguga

SEQ ID NO: 89772 - RNA, 1410 nt, Artificial Sequence
  derived and/or modified CDS sequence (opt1) from neuraminidase__InfluenzaA__AIM56174
augaaccccaaccagaagaucaucaccaucggcagcgugugcaugaccaucgggauggccaaccugauccuccagaucggcaacaucaucuccaucugggucagccacuccauccagcuggggaaccagagccagaucgagacgugcaaccaguccgugaucaccuacgagaacaacaccugggugaaccagaccuacgucaacaucagcaacacgaacuucgccgcgggccaguccguggugccggucaagcuggccgggaacagcucccucugccccgugagcggcugggccaucuacuccaaggacaacagcgugcgcaucggcuccaagggggacgucuucgugauccgggagcccuucaucagcugcagcccccuggagugccgcaccuucuuccugacccagggcgcccuccugaacgacaagcacagcaacgggaccaucaaggaccgguccccguaccgcacgcugaugagcugccccaucggcgaggugcccucccccuacaacagccgguucgagagcgucgccugguccgcgagcgccugccacgacgggaucaacuggcucaccaucggcaucuccggcccggacagcggggccguggccgugcugaaguacaacggcaucaucaccgacaccaucaaguccuggcgcaacaacauccugcggacgcaggagagcgagugcgcgugcgucaacggguccugcuucaccaucaugaccgacggccccagcgacggccaggccuccuacaagaucuuccgcaucgagaaggggaagaucgugaaguccguggagaugaacgcccccaacuaccacuacgaggagugcuccugcuaccccgacagcuccgagaucacgugcgucugccgggacaacuggcacggcagcaaccgcccguggguguccuucaaccagaaccucgaguaccagaucggguacaucugcagcggcguguucggggacaacccccggcccaacgacaagaccggcuccugcggccccgucagcuccaacggggccaacggcgugaagggguucagcuucaaguacggcaacgggguguggaucggccgcaccaagagcaucuccagccggaagggcuucgagaugaucugggacccgaacggguggaccggcaccgacaacaacuucuccaucaagcaggacaucgucgggaucaaggaguggagcggcuacuccgggagcuucgugcagcaccccgagcugacgggccuggacugcauccgccccugcuucugggucgagcucauccggggccgccccgaggagaacaccaucuggaccuccgggagcuccaucagcuucugcggcgugaacuccgacaccgugggguggagcuggccggacggcgccgagcugcccuucacggucgacaaguga

SEQ ID NO: 89773 - RNA, 1410 nt, Artificial Sequence; identical to SEQ ID NO: 89768
  derived and/or modified CDS sequence (opt1) from neuraminidase__InfluenzaA__AIM56185

SEQ ID NO: 89774 - RNA, 1410 nt, Artificial Sequence; identical to SEQ ID NO: 89767
  derived and/or modified CDS sequence (opt1) from neuraminidase__InfluenzaA__AIM56196

SEQ ID NO: 89775 - RNA, 1410 nt, Artificial Sequence; identical to SEQ ID NO: 89749
  derived and/or modified CDS sequence (opt1) from neuraminidase__InfluenzaA__AIM56207

SEQ ID NO: 89776 - RNA, 1410 nt, Artificial Sequence
  derived and/or modified CDS sequence (opt1) from neuraminidase__InfluenzaA__AIM56229
augaaccccaaccagaagaucaucaccaucggcagcgugugcaugaccaucgggauggccaaccugauccuccagaucggcaacacgaucuccaucugggucagccacuccauccagaucgggaaccagagccagaucgagaccugcaaccaguccgugaucaccuacgagaacaacaccugggugaaccagacguacgucaacaucagcaacaccaacuucgccgcgggccaguccguggugagcgucaagcuggccgggaacuccagccugugcccgguguccggcugggccaucuacagcaaggacaacuccgugcgcaucggcagcaagggggacgucuucgugauccgggagcccuucaucuccugcagcccccucgagugccgcaccuucuuccugacccagggcgcccugcucaacgacaagcacuccaacgggacgaucaaggaccggagccccuaccgcacccugauguccugcccgaucggcgaggugcccagccccuacaacagccgguucgaguccgucgccuggagcgcguccgccugccacgacgggaucaacuggcugaccaucggcaucagcggccccgacuccggggccguggccgugcucaaguacaacggcaucaucaccgacacgaucaagagcuggcgcaacaacauccugcggacccaggaguccgagugcgcgugcgucaacgggagcugcuucaccaucaugaccgacggcccguccgacggccacgccagcuacaagaucuuccgcaucgagaaggggaagaucgugaaguccguggagaugaacgcccccaacuaccacuacgaggagugcagcugcuaccccgacuccagcgagaucacgugcgucugccgggacaacuggcacggcuccaaccgccccugggugagcuucaaccagaaccuggaguaccagaucggguacaucugcuccggcguguucggggacaacccgcggcccaacgacaagaccggcagcugcggccccgucuccagcaacggggccaacggcgugaagggguucagcuucaaguacggcaacgggguguggaucggccgcaccaaguccaucagcucccggaagggcuucgagaugaucugggaccccaacggguggaccggcacggacaacaaguucagcaucaagcaggacaucgucgggaucaacgagugguccggcuacagcggguccuucgugcagcacccggagcucaccggccuggacugcauccgccccugcuucugggucgagcugauccggggccgccccgaggagaacaccaucuggaccagcggguccagcaucuccuucugcggcgugaacagcgacacgguggggugguccuggcccgacggcgccgagcucccguucaccaucgacaaguga

SEQ ID NO: 89777 - RNA, 1410 nt, Artificial Sequence
  derived and/or modified CDS sequence (opt1) from neuraminidase__InfluenzaA__AIM56240
augaaccccaaccagaagaucaucaccaucggcagcgugugcaugaccaucgggauggccaaccugauccuccagaucggcaacaucaucuccaucuggaucagccacuccauccaggucgggaaccagagccagaucgagacgugcaaccaguccgugaucaccuacgagaacaacaccugggugaaccagaccuacgucaacaucagcaacacgaacuucgccgcgggccagccggugguguccgucaagcuggccgggaacagcucccugugcagcguguccggcugggccaucuacagcaaggacaacuccgugcgcaucggcagcaagggggacgucuucgugauccgggagcccuucaucuccugcagcccccucgagugccgcaccuucuuccugacccagggcgcccugcucaacgacaagcacuccaacgggaccaucaaggaccggagccccuaccgcacgcugauguccugcccgaucggcgaggugcccagccccuacaacagccgguucgaguccgucgccuggagcgcguccgccugccacgacgggaucaacuggcugaccaucggcaucagcggccccgacuccggggccguggccgugcucaaguacaacggcaucaucaccgacaccaucaagagcuggcgcaacgacauccugcggacgcaggaguccgagugcgcgugcgucaacgggagcugcuucaccaucaugaccgacggcccguccgacggccaggccagcuacaagaucuuccgcaucgagaaggggaagaucgugaaguccguggagaugaacgcccccaacuaccacuacgaggagugcagcugcuaccccgacuccagcgagaucacgugcgucugccgggacaacuggcacggcuccaaccgccccugggugagcuucaaccagaaccuggaguaccagaucggguacaucugcuccggcaucuucggggacaacccgcggcccaacgacaagaccggcagcugcggccccguguccagcaacggggccaacggcgucaagggguucagcuucaaguacggcaacgggguguggaucggccgcaccaaguccaucagcucccggaagggcuucgagaugaucugggaccccaacggguggaccggcaccgacaacaacuucagcaucaagcaggacaucguggggaucaacgagugguccggcuacagcggguccuucguccagcacccggagcucacgggccuggacugcauccgccccugcuucuggguggagcugauccggggccgccccaaggagaacaccaucuggaccagcggguccagcaucuccuucugcggcgucaacagcgacaccguggggugguccuggcccgacggcgccgagcucccguucacgaucgacaaguga

SEQ ID NO: 89778 - RNA, 1410 nt, Artificial Sequence
  derived and/or modified CDS sequence (opt1) from neuraminidase__InfluenzaA__AIM56251
augaaccccaaccagaagaucaucaccaucggcagcgugugcaugaccaucgggauggccaaccugauccuccagaucggcaacaucaucuccaucugggucagccacuccauccagcuggggaaccagagccacaucgagacgugcaaccaguccgugaucaccuacgagaacaacaccugggugaaccagaccuacgucaacaucagcaacacgaacuucgccgcgggccaguccguggugccggucaagcuggccgggaacagcucccucugccccgugagcggcugggccaucuacuccaaggacaacagcgugcgcaucggcuccaagggggacgucuucgugauccgggagcccuucaucagcugcagcccccuggagugccgcaccuucuuccugacccagggcgcccuccugaacgacaagcacagcaacgggaccaucaaggaccgguccccguaccgcacgcugaugagcugccccaucggcgaggugcccucccccuacaacagccgguucgagagcgucgccugguccgcgagcgccugccacgacgggaucaacuggcucaccaucggcaucuccggcccggacagcggggccguggccgugcugaaguacaacggcaucaucaccgacaccaucaaguccuggcgcaacaacauccugcggacgcaggagagcgagugcgcgugcgucaacggguccugcuucaccaucaugaccgacggccccagcgacggccaggccuccuacaagaucuuccgcaucgagaaggggaagaucgugaaguccguggagaugaacgcccccaacuaccacuacgaggagugcuccugcuaccccgacagcuccgagaucacgugcgucugccgggacaacuggcacggcagcaaccgcccguggguguccuucaaccagaaccucgaguaccagaucggguacaucugcagcggcguguucggggacaacccccggcccaacgacaagaccggcuccugcggccccgucagcuccaacggggccaacggcgugaagggguucagcuucaaguacggcaacgggguguggaucggccgcaccaagagcaucuccagccggaagggcuucgagaugaucugggacccgaacggguggaccggcaccgacaacaacuucuccaucaagcaggacaucgucgggaucaaggaguggagcggcuacuccgggagcuucgugcagcaccccgagcugacgggccuggacugcauccgccccugcuucugggucgagcucauccggggccgccccgaggagaacaccaucuggaccuccgggagcuccaucagcuucugcggcgugaacuccgacaccgugggguggagcuggccggacggcgccgagcugcccuucacgaucgacaaguga

SEQ ID NO: 89779 - RNA, 1410 nt, Artificial Sequence; identical to SEQ ID NO: 89778
  derived and/or modified CDS sequence (opt1) from neuraminidase__InfluenzaA__AIM56262

SEQ ID NO: 89780 - RNA, 1410 nt, Artificial Sequence; identical to SEQ ID NO: 89749
  derived and/or modified CDS sequence (opt1) from neuraminidase__InfluenzaA__AIM56273

SEQ ID NO: 89781 - RNA, 1410 nt, Artificial Sequence
  derived and/or modified CDS sequence (opt1) from neuraminidase__InfluenzaA__AIM56284
augaaccccaaccagaagaucaucaccaucggcagcgugugcaucaccaucgggauggccaaccugauccuccagaucggcaacaucaucuccaucugggucagccacuccauccagaucgggaaccagagccagaucgagacgugcaaccaguccgugaucaccuacgagaacaacaccugggugaaccagaccuacgucaacaucagcaacacgaacuucgccgcgggccaguccguggugagcgucaagcuggccgggaacuccagccugugcccgguguccggcugggccaucuacagcaaggacaacuccgugcgcaucggcagcaagggggacgucuucgugauccgggagcccuucaucuccugcagcccccucgagugccgcaccuucuuccugacccagggcgcccugcucaacgacaagcacuccaacgggaccaucaaggaccggagccccuaccgcacgcugauguccugcccgaucggcgaggugcccagccccuacaacagccgguucgaguccgucgccuggagcgcguccgccugccacgacgggaucaacuggcugaccaucggcaucagcggccccgacuccggggccguggccgugcucaaguacaacggcaucaucaccgacaccaucaagagcuggcgcaacaacauccugcggacgcaggaguccgagugcgcgugcgucaacgggagcugcuucaccaucaugaccgacggcccguccgacggccaggccagcuacaagaucuuccgcaucgagaaggggaagaucgugaaguccguggagaugaacgcccccaacuaccacuacgaggagugcagcugcuaccccgacuccagcgagaucacgugcgucugccgggacaacuggcacggcuccaaccgccccugggugagcuucaaccagaaccuggaguaccagaucggguacaucugcuccggcguguucggggacaacccgcggcccaacgacaagaccggcagcugcggccccgucuccagcaacggggccaacggcgugaagggguucagcuucaaguacggcaacgggguguggaucggccgcaccaaguccaucagcucccggaagggcuucgagaugaucugggaccccaacggguggaccggcaccgacaacaaguucagcaucaagcaggacgucguggggaucaacgagugguccggcuacagcggguccuucguccagcacccggagcucacgggccuggacugcauccgccccugcuucuggguggagcugauccggggccgccccgaggagaacaccaucuggaccagcggguccagcaucuccuucugcggcgugaacagcgacaccgucgggugguccuggcccgacggcgccgagcucccguucacgaucgacaaguga

SEQ ID NO: 89782 - RNA, 1410 nt, Artificial Sequence; identical to SEQ ID NO: 89749
  derived and/or modified CDS sequence (opt1) from neuraminidase__InfluenzaA__AIM56295

SEQ ID NO: 89783 - RNA, 1410 nt, Artificial Sequence; identical to SEQ ID NO: 89749
  derived and/or modified CDS sequence (opt1) from neuraminidase__InfluenzaA__AIM56306

SEQ ID NO: 89784 - RNA, 1410 nt, Artificial Sequence; identical to SEQ ID NO: 89749
  derived and/or modified CDS sequence (opt1) from neuraminidase__InfluenzaA__AIM56317

SEQ ID NO: 89785 - RNA, 1410 nt, Artificial Sequence; identical to SEQ ID NO: 89768
  derived and/or modified CDS sequence (opt1) from neuraminidase__InfluenzaA__AIM56339

SEQ ID NO: 89786 - RNA, 1410 nt, Artificial Sequence
  derived and/or modified CDS sequence (opt1) from neuraminidase__InfluenzaA__AIM56350
augaaccccaaccagaagaucaucaccaucggcagcgugugcaugaccaucgggauggccaaccugauccuccagaucggcaacaucaucuccaucugggucagccacuccauccagcuggggaaccagagccagaucgagacgugcaaccaguccgugaucaccuacgagaacaacaccugggugaaccagaccuacgucaacaucagcaacacgaacuucgccgcgggccaguccguggugccggucaagcuggccgggaacagcucccucugccccgugagcggcugggccaucuacuccaaggacaacagcgugcgcaucggcuccaagggggacgucuucgugauccgggagcccuucaucagcugcagcccccuggagugccgcaccuucuuccugacccagggcgcccuccugaacgacaagcacagcaacgggaccaucaaggaccgguccccguaccgcacgcugaugagcugccccaucggcgaggugcccucccccuacaacagccgguucgagagcgucgccugguccgcgagcgccugccacgacgggaucaacuggcucaccaucggcaucuccggcccggacagcggggccguggccgugcugaaguacaacggcaucaucaccgacaccaucaaguccuggcgcaacaacauccugcggacgcaggagagcgagugcgcgugcgucaacggguccugcuucaccaucaugaccgacggccccagcgacggccaggccuccuacaagaucuuccgcaucgagaaggggaagaucgugaaguccguggagaugaacgcccccaacuaccacuacgaggagugcuccugcuaccccgacagcuccgagaucacgugcgucugccgggacaacuggcacggcagcaaccgcccguggguguccuucaaccagaaccucgaguaccagaucggguacaucugcagcggcguguucggggacaacccccggcccaacgacaagaccggcuccugcggccccgucagcuccaacggggccaacggcgugaagggguucagcuucaaguacggcaacgggguguggaucggccgcaccaagagcaucuccagccggaagggcuucgagaugaucugggacccgaacggguggaccggcaccgacaacaacuucuccaucaagcaggacaucgucgggaucaaggaguggagcggcuacuccgggagcuucgugcagcaccccgagcugacgggccuggacugcauccgccccugcuucugggucgagcucauccggggccgccccgaggagaacaccaucuggaccuccgggagcuccaucagcuucugcggcaucaacuccgacaccgugggguggagcuggccggacggcgccgagcugcccuucacgaucgacaaguga

SEQ ID NO: 89787 - RNA, 1410 nt, Artificial Sequence; identical to SEQ ID NO: 89778
  derived and/or modified CDS sequence (opt1) from neuraminidase__InfluenzaA__AIM56361

SEQ ID NO: 89788 - RNA, 1410 nt, Artificial Sequence; identical to SEQ ID NO: 89749
  derived and/or modified CDS sequence (opt1) from neuraminidase__InfluenzaA__AIM56372

SEQ ID NO: 89789 - RNA, 1410 nt, Artificial Sequence; identical to SEQ ID NO: 89778
  derived and/or modified CDS sequence (opt1) from neuraminidase__InfluenzaA__AIM56383

SEQ ID NO: 89790 - RNA, 1410 nt, Artificial Sequence
  derived and/or modified CDS sequence (opt1) from neuraminidase__InfluenzaA__AIM56394
augaaccccaaccagaagaucaucaccaucggcagcgugugcaugaccaucgggauggccaaccugauccuccagaucggcaacaucaucuccaucugggucagccacuccauccagaucgggaaccagagccagaucgagacgugcaaccaguccgugaucaccuacgagaacaacaccugggugaaccagaccuacgucaacaucagcaacacgaacuucgccgcgggccaguccguggugagcgucaagcuggccgggaacuccagccugugcccgguguccggcugggccaucuacagcaaggacaacuccgugcgcaucggcagcaagggggacgucuucgugauccgggagcccuucaucuccugcagcccccucgagugccgcaccuucuuccugacccagggcgcccugcucaacgacaagcacuccaacgggaccaucaaggaccggagccccuaccgcacgcugauguccugcccgaucggcgaggugcccagccccuacaacagccgguucgaguccgucgccuggagcgcguccgccugccacgacgggaucaacuggcugaccaucggcaucagcggccccgacuccggggccguggccgugcucaaguacaacggcaucaucaccgacaccaucaagagcuggcgcaacaacauccugcggacgcaggaguccgagugcgcgugcgucaacgggagcugcuucaccaucaugaccgacggcccguccgacggccaggccagcuacaagaucuuccgcaucgagaaggggaagaucgugaaguccguggagaugaacgcccccaacuaccacuacgaggagugcagcugcuaccccgacuccagcgagaucacgugcgucugccgggacaacuggcacggcuccaaccgccccugggugagcuucaaccagaaccuggaguaccagaucggguacaucugcuccggcaucuucggggacaacccgcggcccaacgacaagaccggcagcugcggccccguguccagcaacggggccaacggcgucaagggguucagcuucaaguacggcaacgggguguggaucggccgcaccaaguccaucagcucccggaagggcuucgagaugaucugggaccccaacggguggaccggcaccgacaacaaguucagcaucaagcaggacaucguggggaucaacgagugguccggcuacagcggguccuucguccagcacccggagcucacgggccuggacugcauccgccccugcuucuggguggagcugauccggggccgccccgaggagaacaccaucuggaccagcggguccagcaucuccuucugcggcgucaacagcgacaccguggggugguccuggcccgacggcgccgagcucccguucacgaucgacaaguga

SEQ ID NO: 89791 - RNA, 1410 nt, Artificial Sequence; identical to SEQ ID NO: 89767
  derived and/or modified CDS sequence (opt1) from neuraminidase__InfluenzaA__AIM56405

SEQ ID NO: 89792 - RNA, 1410 nt, Artificial Sequence
  derived and/or modified CDS sequence (opt1) from neuraminidase__InfluenzaA__AIM56416
augaaccccaaccagaagaucaucaccaucggcagcgugugcaugaccaucgggauggccaaccugauccuccagaucggcaacaucaucuccaucugggucagccacuccauccagcuggggaaccagagccacaucgagacgugcaaccaguccgugaucaccuacgagaacaacaccugggugaaccagaccuacgucaacaucagcaacaucaacuucgccgcgggccaguccguggugccggucaagcuggccgggaacagcucccucugccccgugagcggcugggccaucuacuccaaggacaacagcgugcgcaucggcuccaagggggacgucuucgugauccgggagcccuucaucagcugcagcccccuggagugccgcacguucuuccugacccagggcgcccuccugaacgacaagcacuccaacgggaccaucaaggaccgguccccguaccgcacccugaugagcugccccaucggcgaggugcccucccccuacaacagccgguucgagagcgucgccugguccgcgagcgccugccacgacgggaucaacuggcucacgaucggcaucuccggcccggacaacggggccguggccgugcugaaguacaacggcaucaucaccgacaccaucaagagcuggcgcaacaacauccugcggacccaggaguccgagugcgcgugcgucaacgggagcugcuucacgaucaugaccgacggccccuccgacggccaggccagcuacaagaucuuccgcaucgagaaggggaagaucgugaaguccguggagaugaacgcccccaacuaccacuacgaggagugcagcugcuaccccgacuccagcgagaucacgugcgucugccgggacaacuggcacggcuccaaccgcccgugggugagcuucaaccagaaccucgaguaccagaucggguacaucugcuccggcguguucggggacaacccccggcccaacgacaagaccggcagcugcggccccgucaccuccaacggggccaacggcgugaagggguucagcuucaaguacggcaacgggguguggaucggccgcaccaaguccaucagcagccggaagggcuucgagaugaucugggacccgaacggguggaccggcaccgacaacaacuucuccaucaagcaggacaucgucgggaucaaggaguggagcggcuacuccgggagcuucgugcagcaccccgagcugacgggccuggacugcauccgccccugcuucugggucgagcucauccggggccgccccgaggagaacaccaucuggaccuccgggagcuccaucagcuucugcggcgugaacuccgacaccgugggguggagcuggccggacggcgccgagcugcccuucacgaucgacaaguga

SEQ ID NO: 89793 - RNA, 1410 nt, Artificial Sequence; identical to SEQ ID NO: 89767
  derived and/or modified CDS sequence (opt1) from neuraminidase__InfluenzaA__AIM56428

SEQ ID NO: 89794 - RNA, 1410 nt, Artificial Sequence; identical to SEQ ID NO: 89749
  derived and/or modified CDS sequence (opt1) from neuraminidase__InfluenzaA__AIM56439

SEQ ID NO: 89795 - RNA, 1410 nt, Artificial Sequence
  derived and/or modified CDS sequence (opt1) from neuraminidase__InfluenzaA__AIM56450
augaaccccaaccagaagaucaucaccaucggcagcgugugcaugaccaucgggauggccaaccugauccuccagaucggcaacaucaucuccaucuggaucagccacuccauccaggucgggaaccagagccagaucgagacgugcaaccaguccgugaucaccuacgagaacaacaccugggugaaccagaccuacgucaacaucagcaacacgaacuucgccgcgggccagccggugguguccgucaagcuggccgggaacagcucccugugccccgugagcggcugggccaucuacuccaaggacaacagcgugcgcgucggcuccaagggggacguguucgugauccgggagcccuucaucagcugcagcccccucgagugccgcaccuucuuccugacccagggcgcccugcucaacgacaagcacagcaacgggaccaucaaggaccgguccccguaccgcacgcugaugagcugccccaucggcgagguccccucccccuacaacagccgguucgagagcguggccugguccgcgagcgccugccacgacgggaucaacuggcugaccaucggcaucuccggcccggacagcggggccguggccguccucaaguacaacggcaucaucaccgacaccaucaaguccuggcgcaacgacauccugcggacgcaggagagcgagugcgcgugcgugaacggguccugcuucaccaucaugaccgacggccccagcgacggccaggccuccuacaagaucuuccgcaucgagaaggggaagaucgugaaguccgucgagaugaacgcccccaacuaccacuacgaggagugcuccugcuaccccgacagcuccgagaucacgugcgugugccgggacaacuggcacggcagcaaccgcccguggguguccuucaaccagaaccuggaguacaagaucggguacaucugcagcggcaucuucggggacaacccccggcccaacgacaagaccggcuccugcggccccgucagcuccaacggggccaacggcgugaagggguucagcuucaaguacggcaacgggguguggaucggccgcaccaagagcaucuccagccggaagggcuucgagaugaucugggacccgaacggguggaccggcaccgacaacaacuucuccgucaagcaggacaucguggggaucaacgaguggagcggcuacuccgggagcuucguccagcaccccgagcucacgggccuggacugcauccgccccugcuucuggguggagcugauccggggccgccccaaggagaacaccaucuggaccuccgggagcuccaucagcuucugcggcgugaacuccgacaccgucggguggagcuggccggacggcgccgagcuccccuucacgaucgacaaguga

SEQ ID NO: 89796 - RNA, 1410 nt, Artificial Sequence
  derived and/or modified CDS sequence (opt1) from neuraminidase__InfluenzaA__AIM56461
augaaccccaaccagaagaucaucaccaucggcagcgugugcaugaccaucgggauggccaaccugauccuccagaucggcaacaucaucuccaucugggucagccacuccauccagaucgggaaccagagccagaucgagacgugcaaccaguccgugaucaccuacgagaacaacaccugggugaaccagaccuacgucaacaucagcaacacgaacuucgccgcgggccaguccguggugagcgucaagcuggccgggaacuccagccugugcccgguguccggcugggccaucuacagcaaggacaacuccgugcgcaucggcagcaagggggacgucuucgugauccgggagcccuucaucuccugcagcccccucgagugccgcaccuucuuccugacccagggcgcccugcucaacgacaagcacuccaacgggaccaucaaggaccggagccccuaccgcacgcugauguccugcccgaucggcgaggugcccagccccuacaacagccgguucgaguccgucgccuggagcgcguccgccugccacgacgggaucaacuggcugaccaucggcaucagcggccccgacuccggggccguggccgugcucaaguacaacggcaucaucaccgacaccaucaagagcuggaagaacaacauccugcgcacgcaggaguccgagugcgcgugcgucaacgggagcugcuucaccaucaugaccgacggcccguccgacggccaggccagcuacaagaucuuccggaucgagaaggggaagaucgugaaguccguggagaugaacgcccccaacuaccacuacgaggagugcagcugcuaccccgacuccagcgagaucacgugcgucugccgcgacaacuggcacggcuccaaccggcccugggugagcuucaaccagaaccuggaguaccagaucggguacaucugcuccggcguguucggggacaacccgcgccccaacgacaagaccggcagcugcggccccgucuccagcaacggggccaacggcgugaagggguucagcuucaaguacggcaacgggguguggaucggccggaccaaguccaucagcucccgcaagggcuucgagaugaucugggaccccaacggguggaccggcaccgacaacaaguucagcaucaagcaggacaucgucggggugaacgagugguccggcuacagcggguccuucguccagcacccggagcucacgggccuggacugcauccggcccugcuucuggguggagcugauccgcggccggcccgaggagaacaccaucuggaccagcggguccagcaucuccuucugcggcgugaacagcgacaccgucgggugguccuggcccgacggcgccgagcucccguucacgaucgacaaguga

SEQ ID NO: 89797 - RNA, 1410 nt, Artificial Sequence
  derived and/or modified CDS sequence (opt1) from neuraminidase__InfluenzaA__AIM56472
augaaccccaaccagaagaucaucaccaucggcagcgugugcaugaccaucgggauggccaaccugauccuccagaucggcaacaucaucuccaucugggucagccacuccauccagaucgggaaccagagccagaucgagacgugcaaccaguccgugaucaccuacgagaacaacaccugggugaaccagaccuacgucaacaucagcaacacgaacuucgccgcgggccaguccguggugagcgucaagcuggccgggaacuccagccugugcccgguguccggcugggccaucuacagcaaggacaacuccgugcgcaucggcagcaagggggacgucuucgugauccgggagcccuucaucuccugcagcccccucgagugccgcaccuucuuccugacccagggcgcccugcucaacgacaagcacuccaacgggaccaucaaggaccggagccccuaccgcacgcugauguccugcccgaucggcgaggugcccagccccuacaacagccgguucgaguccgucgccuggagcgcguccgccugcaacgacgggaucaacuggcugaccaucggcaucagcggccccgacuccggggccguggccgugcucaaguacaacggcaucaucaccgacaccaucaagagcuggcgcaacaacauccugcggacgcaggaguccgagugcgcgugcgucaacgggagcugcuucaccaucaugaccgacggcccguccgacggccaggccagcuacaagaucuuccgcaucgagaaggggaagaucgugaaguccguggagaugaacgcccccaacuaccacuacgaggagugcagcugcuaccccgacuccagcgagaucacgugcgucugccgggacaacuggcacggcuccaaccgccccugggugagcuucaaccagaaccuggaguaccagaucggguacaucugcuccggcguguucggggacaacccgcggcccaacgacaagaccggcagcugcggccccgucuccagcaacggggccaacggcgugaagggguucagcuucaaguacggcaacgggguguggaucggccgcaccaaguccaucagcucccggaagggcuucgagaugaucugggaccccaacggguggaccggcaccgacaacaaguucagcaucaagcaggacaucgucgggaucaacgagugguccggcuacagcggguccuucgugcagcacccggagcucacgggccuggacugcauccgccccugcuucugggucgagcugauccggggccgccccgaggagaacaccaucuggaccagcggguccagcaucuccuucugcggcgugaacagcgacaccguggggugguccuggcccgacggcgccgagcucccguucacgaucgacaaguga

SEQ ID NO: 89798 - RNA, 1410 nt, Artificial Sequence; identical to SEQ ID NO: 89755
  derived and/or modified CDS sequence (opt1) from neuraminidase__InfluenzaA__AIM56483

SEQ ID NO: 89799 - RNA, 1410 nt, Artificial Sequence; identical to SEQ ID NO: 89778
  derived and/or modified CDS sequence (opt1) from neuraminidase__InfluenzaA__AIM56494

SEQ ID NO: 89800 - RNA, 1410 nt, Artificial Sequence; identical to SEQ ID NO: 89768
  derived and/or modified CDS sequence (opt1) from neuraminidase__InfluenzaA__AIM56505

SEQ ID NO: 89801 - RNA, 1410 nt, Artificial Sequence; identical to SEQ ID NO: 89767
  derived and/or modified CDS sequence (opt1) from neuraminidase__InfluenzaA__AIM56516

SEQ ID NO: 89802 - RNA, 1410 nt, Artificial Sequence
  derived and/or modified CDS sequence (opt1) from neuraminidase__InfluenzaA__AIM56527
augaaccccaaccagaagaucaucaccaucggcagcgugugcaugaccaucgggauggccaaccugauccuccagaucggcaacaucaucuccaucugggucagccacuccauccagcuggggaaccagagccagaucgagacgugcaaccaguccgugaucaccuacgagaacaacaccugggugaaccagaccuacgucaacaucagcaacacgaacuucgccgcggagcaguccguggugagcgucaagcuggccggcaacuccagccucugcccgguguccgggugggccaucuacagcaaggacaacuccgugcgcaucggcagcaagggcgacgucuucgugauccgggagcccuucaucuccugcagcccccuggagugccgcaccuucuuccugacccagggggcccuccugaacgacaagcacuccaacggcaccaucaaggaccggagccccuaccgcacgcugauguccugcccgaucggggaggugcccagccccuacaacagccgguucgaguccgucgccuggagcgcguccgccugccacgacggcaucaacuggcucaccaucgggaucagcggccccgacuccggcgccguggccgugcugaaguacaacgggaucaucaccgacaccaucaagagcuggcgcaacaacauccugcggacgcaggaguccgagugcgcgugcgucaacggcagcugcuucaccaucaugaccgacgggccguccgacggccaggccagcuacaagaucuuccgcaucgagaagggcaagaucgugaaguccguggagaugaacgcccccaacuaccacuacgaggagugcagcugcuaccccgacuccagcgagaucacgugcgucugccgggacaacuggcacggguccaaccgccccugggugagcuucaaccagaaccucgaguaccagaucggcuacaucugcuccggggugcugggcgacaacccgcggcccaacgacaagaccgggagcugcggccccgucuccagcaacggcgccaacggggugaagggcuucagcuucaaguacgggaacggcguguggaucgggcgcaccaaguccaucagcucccggaagggcuucgagauggucugggaccccaacggcuggaccgggaccgacaacaacuucagcaucaagcaggacaucgugggcaucaaggagugguccggguacagcggcuccuucguccagcacccggagcugacggggcucgacugcauccgccccugcuucuggguggagcugauccggggccgccccgaggagaacaccaucuggaccagcggcuccagcaucuccuucugcggggugaacagcgacaccgucggcugguccuggcccgacggggccgagcugccguucacgaucgacaaguga

SEQ ID NO: 89803 - RNA, 1410 nt, Artificial Sequence; identical to SEQ ID NO: 89749
  derived and/or modified CDS sequence (opt1) from neuraminidase__InfluenzaA__AIM56538

SEQ ID NO: 89804 - RNA, 1410 nt, Artificial Sequence
  derived and/or modified CDS sequence (opt1) from neuraminidase__InfluenzaA__AIM56549
augaaccccaaccagaagaucaucaccaucggcagcgugugcaugaccaucgggauggccaaccugauccuccagaucggcaacaucaucuccaucugggucagccacuccauccagaucgggaaccagagccagaucgagacgugcaaccaguccgugaucaccuacgagaacaacaccugggugaaccagaccuacgucaacaucagcaacacgaacuucgccgcgggccaguccguggugagcgucaagcuggccgggaacuccagccugugcccgguguccggcugggccaucuacagcaaggacaacuccgugcgcaucggcagcaagggggacgucuucgugauccgggagcccuucaucuccugcagcccccucgagugccgcaccuucuuccugacccagggcgcccugcucaacgacaagcacuccaacgggaccaucaaggaccggagccccuaccgcacgcugauguccugcccgaucggcgaggugcccagccccuacaacagccgguucgaguccgucgccuggagcgcguccgccugccacgacgggaucaacuggcugaccaucggcaucagcggccccgacuccggggccguggccgugcucaaguacaacggcaucaucaccgacaccaucaagagcuggcgcaacaacauccugcggacgcaggaguccgagugcgcgugcgucaacgggagcugcuucaccaucaugaccgacggcccguccgacggccaggccagcuacaagaucuuccgcaucgagaaggggaagaucgugaaguccguggagaugaacgcccccaacuaccacuacgaggagugcagcugcuaccccgacuccagcgaggugaccugcgucugccgggacaacuggcacggcuccaaccgccccugggugagcuucaaccagaaccuggaguaccagaucggguacaucugcuccggcgucuucggggacaacccgcggcccaacgacaagacgggcagcugcggccccguguccagcaacggggccaacggcgugaagggguucagcuucaaguacggcaacggggucuggaucggccgcaccaaguccaucagcucccggaagggcuucgagaugaucugggaccccaacggguggaccggcaccgacaacaaguucagcaucaagcaggacaucguggggaucaacgagugguccggcuacagcggguccuucguccagcacccggagcucacgggccuggacugcauccgccccugcuucuggguggagcugauccggggccgccccgaggagaacaccaucuggaccagcggguccagcaucuccuucugcggcgugaacagcgacaccgucgggugguccuggcccgacggcgccgagcucccguucacgaucgacaaguga

SEQ ID NO: 89805 - RNA, 1410 nt, Artificial Sequence
  derived and/or modified CDS sequence (opt1) from neuraminidase__InfluenzaA__AIM56560
augaaccccaaccagaagaucaucaccaucggcagcgugugcaugaccaucgggauggccaaccugauccuccagaucggcaacaucaucuccaucugggucagccacuccauccagcuggggaaccagagccacaucgagacgugcaaccaguccgugaucaccuacgagaacaacaccugggugaaccagaccuacgucaacaucagcaacacgaacuucgccgcgggccaguccguggugccggucaagcuggccgggaacagcucccucugccccgugagcggcugggccauccacuccaaggacaacagcgugcgcaucggcuccaagggggacgucuucgugauccgggagcccuucaucagcugcagcccccuggagugccgcaccuucuuccugacccagggcgcccuccugaacgacaagcacuccaacgggaccaucaaggaccgguccccguaccgcacgcugaugagcugccccaucggcgaggugcccucccccuacaacagccgguucgagagcgucgccugguccgcgagcgccugccacgacgggaucaacuggcucaccaucggcaucuccggcccggacaacggggccguggccgugcugaaguacaacggcaucaucaccgacaccaucaagagcuggcgcaacaacauccugcggacgcaggaguccgagugcgcgugcgucaacgggagcugcuucaccaucaugaccgacggccccuccgacggccaggccagcuacaagaucuuccgcaucgagaaggggaagaucgugaaguccguggagaugaacgcccccaacuaccacuacgaggagugcagcugcuaccccgacuccagcgagaucacgugcgucugccgggacaacuggcacggcuccaaccgcccgugggugagcuucaaccagaaccucgaguaccagaucggguacaucugcuccggcguguucggggacaacccccggcccaacgacaagaccggcagcugcggccccgucaccuccaacggggccaacggcgugaagggguucagcuucaaguacggcaacgggguguggaucggccgcaccaaguccaucagcagccggaagggcuucgagaugaucugggacccgaacggguggaccggcacggacaacaacuucuccaucaagcaggacaucgucgggaucaaggaguggagcggcuacuccgggagcuucgugcagcaccccgagcugaccggccuggacugcauccgccccugcuucugggucgagcucauccggggccgccccgaggagaacaccaucuggaccuccgggagcuccaucagcuucugcggcgugaacuccgacacggugggguggagcuggccggacggcgccgagcugcccuucaccaucgacaaguga

SEQ ID NO: 89806 - RNA, 1410 nt, Artificial Sequence; identical to SEQ ID NO: 89755
  derived and/or modified CDS sequence (opt1) from neuraminidase__InfluenzaA__AIM56571

SEQ ID NO: 89807 - RNA, 1410 nt, Artificial Sequence
  derived and/or modified CDS sequence (opt1) from neuraminidase__InfluenzaA__AIM56582
augaaccccaaccagaagaucaucaccaucggcagcgugugcaucaccaucgggauggccaaccugauccuccagaucggcaacaucaucuccaucugggucagccacuccauccagcuggggaaccagagccagaucgagacgugcaaccaguccgugaucaccuacgagaacaacaccugggugaaccagaccuacgucaacaucagcaacacgaacuucgccgcgggccaguccguggugagcgucaagcuggccgggaacuccagccucugcccgguguccggcugggccaucuacagcaaggacaacuccgugcgcaucggcagcaagggggacgucuucgugauccgggagcccuucaucuccugcagcccccuggagugccgcaccuucuuccugacccagggcgcccuccugaacgacaagcacuccaacgggaccaucaaggaccggagccccuaccgcacgcugauguccugcccgaucggcgaggugcccagccccuacaacagccgguucgaguccgucgccuggagcgcguccgccugccacgacgggaucaacuggcucaccaucggcaucagcggccccgacuccggggccguggccgugcugaaguacaacggcaucaucaccgacaccaucaagagcuggcgcaacaacauccugcggacgcaggaguccgagugcgcgugcgucaacgggagcugcuucaccaucaugaccgacggcccguccgacggccaggccagcuacaagaucuuccgcaucgagaaggggaagaucgugaaguccguggagaugaacgcccccaacuaccacuacgaggagugcagcugcuaccccgacuccagcgagaucacgugcgucugccgggacaacuggcacggcuccaaccgccccugggugagcuucaaccagaaccucgaguaccagaucggguacaucugcuccggcguguucggggacaacccgcggcccaacgacaagaccggcagcugcggccccgucuccagcaacggggccaacggcgugaagggguucagcuucaaguacggcaacgggguguggaucggccgcaccaaguccaucagcucccggaagggcuucgagaugaucugggaccccaacggguggaccggcaccgacaacaacuucagcaucaagcaggacaucgucgggaucaaggagugguccggcuacagcggguccuucgugcagcacccggagcugacgggccuggacugcauccgccccugcuucugggucgagcucauccggggccgccccgaggagaacaccaucuggaccagcggguccagcaucuccuucugcggcgugaacagcgacaccguggggugguccuggcccgacggcgccgagcugccguucacgaucgacaaguga

SEQ ID NO: 89808 - RNA, 1410 nt, Artificial Sequence
  derived and/or modified CDS sequence (opt1) from neuraminidase__InfluenzaA__AIM56593
augaaccccaaccagaagaucaucaccaucggcagcgugugcaugaccaucgggauggccaaccugauccuccagaucggcaacaucaucuccaucugggucagccacuccauccagcuggggaaccagagccagaucgagacgugcaaccaguccgugaucaccuacgagaacaacaccugggugaaccagaccuacgucaacaucagcaacacgaacuucgccgcggagcaguccguggugagcgucaagcuggccggcaacuccagccucugcccgguguccgggugggccaucuacagcaaggacaacuccgugcgcaucggcagcaagggcgacgucuucgugauccgggagcccuucaucuccugcagcccccuggagugccgcaccuucuuccugacccagggggcccuccugaacgacaagcacuccaacggcaccaucaaggaccggagccccuaccgcacgcugauguccugcccgaucggggaggugcccagccccuacaacagccgguucgaguccgucgccuggagcgcguccgccugccacgacggcaucaacuggcucaccaucgggaucagcggccccgacuccggcgccguggccgugcugaaguacaacgggaucaucaccgacaccaucaagagcuggcgcaacaacauccugcggacgcaggaguccgagugcgcgugcgucaacggcagcugcuucaccaucaugaccgacgggccguccgacggccaggccagcuacaagaucuuccgcaucgagaagggcaagaucgugaaguccguggagaugaacgcccccaacuaccacuacgaggagugcagcugcuaccccgacuccagcgagaucacgugcgucugccgggacaacuggcacggguccaaccgccccugggugagcuucaaccagaaccucgaguaccagaucggcuacaucugcuccggggugcugggcgacaacccgcggcccaacgacaagaccgggagcugcggccccgucuccagcaacggcgccaacggggugaagggcuucagcuucaaguacgggaacggcguguggaucgggcgcaccaaguccaucagcucccggaagggcuucgagaugaucugggaccccaacggcuggaccgagaccgacaacaacuucagcaucaagcaggacaucgucgggaucaaggagugguccggcuacagcggguccuucgugcagcacccggagcugacgggccucgacugcauccgccccugcuucugggucgagcugauccgggggcgccccgaggagaacaccaucuggaccagcggcuccagcaucuccuucugcggcgugaacagcgacaccguggggugguccuggcccgacggcgccgagcugccguucacgaucgacaaguga

SEQ ID NO: 89809 - RNA, 1410 nt, Artificial Sequence
  derived and/or modified CDS sequence (opt1) from neuraminidase__InfluenzaA__AIM56604
augaaccccaaccagaagaucaucaccaucggcagcgugugcaugaccaucgggauggccaaccugauccuccagaucggcaacaucaucuccaucugggucagccacuccauccagaucgggaaccagagccagaucgagacgugcaaccaguccgugaucaccuacgagaacaacaccugggugaaccagaccuacgucaacaucagcaacaucaacuucgccgcgggccaguccguggugagcgucaagcuggccgggaacuccagccugugcccgguguccggcugggccaucuacagcaaggacaacuccgugcgcaucggcagcaagggggacgucuucgugauccgggagcccuucaucuccugcagcccccucgagugccgcacguucuuccugacccagggcgcccugcucaacgacaagcacuccaacgggaccaucaaggaccggagccccuaccgcacccugauguccugcccgaucggcgaggugcccagccccuacaacagccgguucgaguccgucgccuggagcgcguccgccugccacgacgggaucaacuggcugacgaucggcaucagcggccccgacuccggggccguggccgugcucaaguacaacggcaucaucaccgacaccaucaagagcuggcgcaacaacauccugcggacccaggaguccgagugcgcgugcgucaacgggagcugcuucacgaucaugaccgacggcccguccgacggccaggccagcuacaagaucuuccgcaucgagaaggggaagaucgugaaguccguggagaugaacgcccccaacuaccacuacgaggagugcagcugcuaccccgacuccagcgagaucacgugcgucugccgggacaacuggcacggcuccaaccgccccugggugagcuucaaccagaaccuggaguaccagaucggguacaucugcuccggcguguucggggacaacccgcggcccaacgacaagaccggcagcugcggccccgucuccagcaacggggccaacggcgugaagggguucagcuucaaguacggcaacgggguguggaucggccgcaccaaguccaucagcucccggaagggcuucgagaugaucugggaccccaacggguggaccggcaccgacaacaaguucagcaucaagcaggacaucgucgggaucaacgagugguccggcuacagcggguccuucgugcagcacccggagcucaccggccuggacugcauccgccccugcuucugggucgagcugauccggggccgccccgaggagaacacgaucuggaccagcggguccagcaucuccuucugcggcgugaacagcgacaccguggggugguccuggcccgacggcgccgagcucccguucaccaucgacaaguga

SEQ ID NO: 89810 - RNA, 1410 nt, Artificial Sequence
  derived and/or modified CDS sequence (opt1) from neuraminidase__InfluenzaA__AIM56615
augaaccccaaccagaagaucaucaccaucggcagcgugugcaugaccaucgggauggccaaccugauccuccagaucggcaacaucaucuccaucugggucagccacuccauccagaucgggaaccagagccagaucgagacgugcaaccaguccgugaucaccuacgagaacaacaccugggugaaccagaccuacgucgacaucagcaacacgaacuucgccgcgggccaguccguggugagcgucaagcuggccgggaacuccagccugugcccgguguccggcugggccaucuacagcaaggacaacuccgugcgcaucggcagcaagggggacgucuucgugauccgggagcccuucaucuccugcagcccccucgagugccgcaccuucuuccugacccagggcgcccugcucaacgacaagcacuccaacgggaccaucaaggaccggagccccuaccgcacgcugauguccugcccgaucggcgaggugcccagccccuacaacagccgguucgaguccgucgccuggagcgcguccgccugccacgacgggaucaacuggcugaccaucggcaucagcggccccgacuccggggccguggccgugcucaaguacaacggcaucaucaccgacaccaucaagagcuggcgcaacaacauccugcggacgcaggaguccgagugcgcgugcgucaacgggagcugcuucaccaucaugaccgacggcccguccgacggccaggccagcuacaagaucuuccgcaucgagaaggggaagaucgugaaguccguggagaugaacgcccccaacuaccacuacgaggagugcagcugcuaccccgacuccagcgagaucacgugcgucugccgggacaacuggcacggcuccaaccgccccugggugagcuucaaccagaaccuggaguaccagaucggguacaucugcuccggcguguucggggacaacccgcggcccaacgacaagaccggcagcugcggccccgucuccagcaacggggccaacggcgugaagggguucagcuucaaguacuccaacggcguguggaucgggcgcaccaagagcaucuccagccggaagggcuucgagaugaucugggaccccaacggcuggaccgggaccgacaacaaguucuccaucaagcaggacaucgucggcaucaacgaguggagcggguacuccggcagcuucgugcagcacccggagcucacggggcuggacugcauccgccccugcuucugggucgagcugauccggggccgccccgaggagaacaccaucuggaccuccggcagcuccaucagcuucugcggggugaacuccgacaccgugggcuggagcuggcccgacggggccgagcucccguucacgaucgacaaguga

SEQ ID NO: 89811 - RNA, 1410 nt, Artificial Sequence; identical to SEQ ID NO: 89804
  derived and/or modified CDS sequence (opt1) from neuraminidase__InfluenzaA__AIM56626

SEQ ID NO: 89812 - RNA, 1410 nt, Artificial Sequence; identical to SEQ ID NO: 89749
  derived and/or modified CDS sequence (opt1) from neuraminidase__InfluenzaA__AIM56637

SEQ ID NO: 89813 - RNA, 1410 nt, Artificial Sequence; identical to SEQ ID NO: 89755
  derived and/or modified CDS sequence (opt1) from neuraminidase__InfluenzaA__AIM56648

SEQ ID NO: 89814 - RNA, 1410 nt, Artificial Sequence
  derived and/or modified CDS sequence (opt1) from neuraminidase__InfluenzaA__AIM56659
augaaccccaaccagaagaucaucaccaucggcagcgugugcaugaccaucgggauggccaaccugauccuccagaucggcaacaucaucuccaucugggucagccacuccauccagcuggggaaccagagccacaucgagacgugcaaccaguccgugaucaccuacgagaacaacaccugggugaaccagaccuacgucaacaucagcaacacgaacuucgccgcgggccaguccguggugccggucaagcuggccgggaacagcucccucugccccgugagcggcugggccaucuacuccaaggacaacagcgugcgcaucggcuccaagggggacgucuucgugauccgggagcccuucaucagcugcagcccccuggagugccgcaccuucuuccugacccagggcgcccuccugaacgacaagcacagcaacgggaccaucaaggaccgguccccguaccgcacgcugaugagcugccccaucggcgaggugcccucccccuacaacagccgguucgagagcgucgccugguccgcgagcgccugccacgacgggaucaacuggcucaccaucggcaucuccggcccggacagcggggccguggccgugcugaaguacaacggcaucaucaccgacaccaucaaguccuggcgcaacaacauccugcggacgcaggagagcgagugcgcgugcgucaacggguccugcuucaccaucaugaccgacggccccagcgacggccaggccuccuacaagaucuuccgcaucgagaaggggaagaucgugaaguccguggagaugaacgcccccaacuaccacuacgaggagugcuccugcuaccccgacagcuccgagaucacgugcgucugccgggacaacuggcacggcagcaaccgcccguggguguccuucaaccagaaccucgaguaccagaucggguacaucugcagcggcguguucggggacaacccccggcccaacgacaagaucggcuccugcggccccgucagcuccaacggggccaacggcgugaagggguucagcuucaaguacggcaacgggguguggaucggccgcaccaagagcaucuccagccggaagggcuucgagaugaucugggacccgaacggguggaccggcaccgacaacaacuucuccaucaagcaggacaucgucgggaucaaggaguggagcggcuacuccgggagcuucgugcagcaccccgagcugaccggccuggacugcauccgccccugcuucugggucgagcucauccggggccgccccgaggagaagacgaucuggaccuccgggagcuccaucagcuucugcggcgugaacuccgacaccgugggguggagcuggccggacggcgccgagcugcccuucaccaucgacaaguga

SEQ ID NO: 89815 - RNA, 1410 nt, Artificial Sequence
  derived and/or modified CDS sequence (opt1) from neuraminidase__InfluenzaA__AIM56670
augaaccccaaccagaagaucaucaccaucggcagcgugugcaugaccaucgggauggccaaccugauccuccagaucggcaacacgaucuccaucugggucagccacuccauccagaucgggaaccagagccagaucgagaccugcaaccaguccgugaucaccuacgagaacaacaccugggugaaccagacguacgucaacaucagcaacaccaacuucgccgcgggccaguccguggugagcgucaagcuggccgggaacuccagccugugcccgguguccggcugggccaucuacagcaaggacaacuccgugcgcaucggcagcaagggggacgucuucgugauccgggagcccuucaucuccugcagcccccucgagugccgcaccuucuuccugacccagggcgcccugcucaacgacaagcacuccaacgggacgaucaaggaccggagccccuaccgcacccugauguccugcccgaucggcgaggugcccagccccuacaacagccgguucgaguccgucgccuggagcgcguccgccugccacgacgggaucaacuggcugaccaucggcaucagcggccccgacuccggggccguggccgugcucaaguacaacggcaucaucaccgacacgaucaagagcuggcgcaacaacauccugcggacccaggaguccgagugcgcgugcgucaacgggagcugcuucaccaucaugaccgacggcccguccgacggccaggccagcuacaagaucuuccgcaucgagaaggggaagaucgugaaguccguggagaugaacgcccccaacuaccacuacgaggagugcagcugcuaccccgacuccagcgagaucacgugcgucugccgggacaacuggcacggcuccaaccgccccugggugagcuucaaccagaaccuggaguaccagaucggguacaucugcuccggcguguucggggacaacccgcggcccaacgacaagaccggcagcugcggccccgucuccagcaacggggccaacggcgugaagggguucagcuucaaguacggcaacgggguguggaucggccgcaccaaguccaucagcucccggaagggcuucgagaugaucugggaccccaacggguggaccggcacggacaacaaguucagcaucaagcaggacaucgucgggaucaacgagugguccggcuacagcggguccuucgugcagcacccggagcucaccggccuggacugcauccgccccugcuucugggucgagcugauccggggccgccccgaggagaacaccaucuggaccagcggguccagcaucuccuucugcggcgugaacagcgacacgguggggugguccuggcccgacggcgccgagcucccguucaccaucgacaaguga

SEQ ID NO: 89816 - RNA, 1410 nt, Artificial Sequence; identical to SEQ ID NO: 89767
  derived and/or modified CDS sequence (opt1) from neuraminidase__InfluenzaA__AIM56703

SEQ ID NO: 89817 - RNA, 1410 nt, Artificial Sequence
  derived and/or modified CDS sequence (opt1) from neuraminidase__InfluenzaA__AIM56714
augaaccccaaccagaagaucaucaccaucggcagcgugugcaugaccaucgggauggccaaccugauccuccagaucggcaacaucaucuccaucugggucagccacuccauccagaucgggaaccagagccagaucgagacgugcaaccaguccgugaucaccuacgagaacaacaccugggugaaccagaccuacgucaacaucagcaacacgaacuucgccgcgggccaguccguggugagcgucaagcuggccgggaacuccagccugugcccgguguccggcugggccaucuacagcaaggacaacuccgugcgcaucggcagcaagggggacgucuucgugauccgggagcccuucaucuccugcagcccccucgagugccgcaccuucuuccugacccagggcgcccugcucaacgacaagcacuccaacgggaccaucaaggaccggagccccuaccgcacgcugauguccugcccgaucggcgaggugcccagccccuacaacagccgguucgaguccgucgccuggagcgcguccgccugccacgacgggaucaacuggcugaccaucggcaucagcggccccgacuccggggccguggccgugcucaaguacaacggcaucaucaccgacaccaucaagagcuggcgcaacaacauccugcggacgcaggaguccgagugcgcgugcgucaacgggagcugcuucaccaucaugaccgacggcccguccgacggccaggccagcuacaagaucuuccgcaucgagaaggggaagaucgugaaguccguggagaugaacgcccccaacuaccacuacgaggagugcagcugcuaccccgacuccagcgagaucacgugcgucugccgggacaacuggcacggcuccaaccgccccugggugagcuucaaccagaaccuggaguaccagaucggguacaucugcuccggcguguucggggacaacccgcggcccaacgacaagaccggcagcugcggccccguccccuccaacggggccaacggcgugaagggguucagcuucaaguacggcaacgggguguggaucggccgcaccaagagcaucuccagccggaagggcuucgagaugaucugggacccgaacggguggaccggcaccgacaacaaguucuccaucaagcaggacaucgucgggaucaacgaguggagcggcuacuccgggagcuucgugcagcaccccgagcucacgggccuggacugcauccgccccugcuucugggucgagcugauccggggccgccccgaggagaacaccaucuggaccuccgggagcuccaucagcuucugcggcgugaacuccgacaccgugggguggagcuggccggacggcgccgagcuccccuucacgaucgacaaguga

SEQ ID NO: 89818 - RNA, 1410 nt, Artificial Sequence
  derived and/or modified CDS sequence (opt1) from neuraminidase__InfluenzaA__AIM56725
augaaccccaaccagaagaucaucaccaucggcagcgugugcaugaccaucgggauggccaaccugauccuccagaucggcaacaucaucuccaucugggucagccacuccauccagaucgggaaccagagccagaucgagacgugcaaccaguccgugaucaccuacgagaacaacaccugggugaaccagaccuacgucaacaucagcaacacgaacuucgccgcgggccaguccguggugagcgucaagcuggccgggaacuccagccugugcccgguguccggcugggccaucuacagcaaggacaacuccgugcgcaucggcagcaagggggacgucuucgugauccgggagcccuucaucuccugcagcccccucgagugccgcaccuucuuccugacccagggcgcccugcucaacgacaagcacuccaacgggaccaucaaggaccggagccccuaccgcacgcugauguccugcccgaucggcgaggugcccagccccuacaacagccgguucgaguccgucgccuggagcgcguccgccugccacgacgggaucaacuggcugaccaucggcaucagcggccccgacuccggggccguggccgugcucaaguacaacggcaucaucaccgacaccaucaagagcuggcgcaacaacauccugcggacgcaggaguccgagugcgcgugcgucaacgggagcugcuucaccaucaugaccgacggcccguccgacggccaggccagcuacaagaucuuccgcaucgagaaggggaagaucgugaaguccguggagaugaacgcccccaacuaccacuacgaggagugcagcugcuaccccgacuccagcgaggugaccugcgucugccgggacaacuggcacggcuccaaccgccccugggugagcuucaaccagaaccuggaguaccagaucggguacaucugcuccggcaucuucggggacaacccgcggcccaacgacaagacgggcagcugcggccccgucuccagcaacggggccaacggcgugaagggguucagcuucaaguacggcaacgggguguggaucggccgcaccaaguccaucagcucccggaagggcuucgagaugaucugggaccccaacggguggaccggcaccgacaacaaguucagcaucaagcaggacaucgucgggaucaacgagugguccggcuacagcggguccuucgugcagcacccggagcucacgggccuggacugcauccgccccugcuucugggucgagcugauccggggccgccccgaggagaacaccaucuggaccagcggguccagcaucuccuucugcggcgugaacagcgacaccguggggugguccuggcccgacggcgccgagcucccguucacgaucgacaaguga

SEQ ID NO: 89819 - RNA, 1410 nt, Artificial Sequence; identical to SEQ ID NO: 89767
  derived and/or modified CDS sequence (opt1) from neuraminidase__InfluenzaA__AIM56736

SEQ ID NO: 89820 - RNA, 1410 nt, Artificial Sequence
  derived and/or modified CDS sequence (opt1) from neuraminidase__InfluenzaA__AIM56747
augaaccccaaccagaagaucaucaccaucggcagcgugugcaugaccaucgggauggccaaccugauccuccagaucggcaacaucaucuccaucugggucagccacuccauccagaucgggaaccagagccagaucgagacgugcaaccaguccgugaucaccuacgagaacaacaccugggugaaccagaccuacgucaacaucagcaacacgaacuucgccgcgggccaguccguggugagcgucaagcuggccgggaacuccagccugugcccgguguccggcugggccaucuacagcaaggacaacuccgugcgcaucggcagcaagggggacgucuucgugauccgggagcccuucaucuccugcagcucccucgagugccgcaccuucuuccugacccagggcgcccugcucaacgacaagcacagcaacgggaccaucaaggaccggucccccuaccgcacgcugaugagcugccccaucggcgaggugccgagccccuacaacucccgguucgagagcgucgccugguccgcgagcgccugccacgacgggaucaacuggcugaccaucggcaucuccggccccgacagcggggccguggccgugcucaaguacaacggcaucaucaccgacaccaucaaguccuggcgcaacaacauccugcggacgcaggagagcgagugcgcgugcgucaacggguccugcuucaccaucaugaccgacggccccagcgacggccaggccuccuacaagaucuuccgcaucgagaaggggaagaucgucaagagcguggagaugaacgccccgaacuaccacuacgaggagugcuccugcuaccccgacagcuccgagaucacgugcgugugccgggacaacuggcacggcagcaaccgccccuggguguccuucaaccagaaccuggaguaccagaucggguacaucugcagcggcguguucggggacaacccccggccgaacgacaagaccggcuccugcggccccgucagcagcaacggggccaacggcgugaagggguucuccuucaaguacggcaacgggguguggaucggccgcaccaagagcaucuccagccggaagggcuucgagaugaucugggaccccaacggguggaccggcaccgacaacaaguucuccaucaagcaggacaucgucgggaucaacgaguggagcggcuacuccgggagcuucgugcagcaccccgagcucacgggccuggacugcauccgcccgugcuucugggucgagcugauccggggccgccccgaggagaacaccaucuggaccuccgggagcuccaucagcuucugcggcgugaacuccgacaccgugggguggagcuggcccgacggcgccgagcuccccuucacgaucgacaaguga

SEQ ID NO: 89821 - RNA, 1410 nt, Artificial Sequence; identical to SEQ ID NO: 89804
  derived and/or modified CDS sequence (opt1) from neuraminidase__InfluenzaA__AIM56758

SEQ ID NO: 89822 - RNA, 1410 nt, Artificial Sequence; identical to SEQ ID NO: 89767
  derived and/or modified CDS sequence (opt1) from neuraminidase__InfluenzaA__AIM56769

SEQ ID NO: 89823 - RNA, 1410 nt, Artificial Sequence
  derived and/or modified CDS sequence (opt1) from neuraminidase__InfluenzaA__AIM56780
augaaccccaaccagaagaucaucaccaucggcagcgugugcaugaccaucgggauggccaaccugauccuccagaucggcaacaucaucuccaucugggucagccacuccauccagcuggggaaccagagccagaucggcacgugcaaccaguccgugaucaccuacgagaacaacaccugggugaaccagaccuacgucaacaucagcaacacgaacuucgccgcggggcaguccguggugagcgucaagcuggccggcaacuccagccucugcccgguguccggcugggccaucuacagcaaggacaacuccgugcgcaucgggagcaagggcgacgucuucgugauccgggagcccuucaucuccugcagcccccuggagugccgcaccuucuuccugacccagggggcccuccugaacgacaagcacuccaacggcaccaucaaggaccggagccccuaccgcacgcugauguccugcccgaucggggaggugcccagccccuacaacagccgguucgaguccgucgccuggagcgcguccgccugccacgacggcaucaacuggcucaccaucggcaucagcgggcccgacuccggcgccguggccgugcugaaguacaacgggaucaucaccgacaccaucaagagcuggcgcaacaacauccugcggacgcaggaguccgagugcgcgugcgucaacggcagcugcuucaccaucaugaccgacggcccguccgacgggcaggccagcuacaagaucuuccgcaucgagaagggcaagaucaucaaguccguggagaugaacgcccccaacuaccacuacgaggagugcagcugcuaccccgacuccagcgagaucacgugcgugugccgggacaacuggcacggguccaaccgccccugggucagcuucaaccagaaccucgaguaccagaucggcuacaucugcuccgggguguucggcgacaacccgcggcccaacgacaagaccggcagcugcgggcccguguccagcaacggcgccaacggggucaagggcuucagcuucaaguacgggaacggcguguggaucggccgcaccaaguccaucagcucccggaagggguucgagaugaucugggaccccaacggcuggaccgggaccgacaacaaguucagcaucaagcaggacaucgugggcauccacgagugguccggguacagcggcuccuucguccagcacccggagcugacgggccuggacugcauccgccccugcuucuggguggagcucauccgggggcgccccgaggagaacaccaucuggaccagcggcuccagcaucuccuucugcggggucaacagcgacaccgugggcugguccuggcccgacggcgccgagcugccguucacgaucgacaaguga

SEQ ID NO: 89824 - RNA, 1410 nt, Artificial Sequence
  derived and/or modified CDS sequence (opt1) from neuraminidase__InfluenzaA__AIM56791
augaaccccaaccagaagaucaucaccaucggcagcgugugcaugaccaucgggauggccaaccugauccuccagaucggcaacaucaucuccaucugggucagccacuccauccagcuggggaaccagagccagaucgagacgugcaaccaguccgugaucaccuacgagaacaacaccugggugaaccagaccuacgucaacaucagcaacacgaacuucgccgcgggccaguccguggugagcgucaagcuggccgggaacuccagccucugcccgguguccggcugggccaucuacagcaaggacaacuccgugcgcaucggcagcaagggggacgucuucgugauccgggagcccuucaucuccugcagcccccuggagugccgcaccuucuuccugacccagggcgcccuccugaacgacaagcacuccaacgggaccaucaaggaccggagccccuaccgcacgcugauguccugcccgaucggcgaggugcccagccccuacaacagccgguucgaguccgucgccuggagcgcguccgccugccacgacgggaucagcuggcucaccaucggcaucuccggccccgacagcggggccguggccgugcugaaguacaacggcaucaucaccgacaccaucaaguccuggcgcaacaacauccugcggacgcaggagagcgagugcgcgugcgucaacggguccugcuucaccaucaugaccgacggcccgagcgacggccaggccuccuacaagaucuuccgcaucgagaaggggaagaucgucaagagcguggagaugaacgcccccaacuaccacuacgaggagugcuccugcuaccccgacagcuccgagaucacgugcgugugccgggacaacuggcacggcagcaaccgccccuggguguccuucaaccagaaccucgaguaccagaucggguacaucugcagcggcguguucggggacaacccgcggcccaacgacaagaccggcuccugcggccccgucagcagcaacggggccaacggcgugaagggguucuccuucaaguacggcaacgggguguggaucggccgcaccaagagcaucuccagccggaagggcuucgagaugaucugggaccccaacggguggaccggcaccgacaacaacuucuccaucaagcaggacaucgucgggaucaaggaguggagcggcuacuccgggagcuucgugcagcacccggagcugacgggccuggacugcauccgccccugcuucugggucgagcucauccggggccgccccgaggagaacaccaucuggaccuccgggagcuccaucagcuucugcggcgugaacuccgacaccgugggguggagcuggcccgacggcgccgagcugccguucacgaucgacaaguga

SEQ ID NO: 89825 - RNA, 1410 nt, Artificial Sequence
  derived and/or modified CDS sequence (opt1) from neuraminidase__InfluenzaA__AIM56813
augaaccccaaccagaagaucaucaccaucggcagcgugugcaugaccaucgggauggccaaccugauccuccagaucggcaacaucaucuccaucugggucagccacuccauccagaucgggaaccagagccagaucgagacgugcaaccaguccgugaucaccuacgagaacaacaccugggugaaccagaccuacgucaacaucagcaacacgaacuucgccgcgggccaguccguggugagcgucaagcuggccgggaacuccagccugugcccgguguccggcugggccaucuacagcaaggacaacuccgugcgcaucggcagcaagggggacgucuucgugauccgggagcccuucaucuccugcagcccccucgagugccgcaccuucuuccugacccagggcgcccugcucaacgacaagcacuccaacgggaccaucaaggaccggagccccuaccgcacgcugauguccugcccgaucggcgaggugcccagccccuacaacagcaaguucgaguccgucgccuggagcgcguccgccugccacgacgggaucaacuggcugaccaucggcaucagcggccccgacaacggggccguggccgugcucaaguacaacggcaucaucaccgacaccaucaaguccuggcggaacaacauccugcgcacgcaggagagcgagugcgcgugcgucaacggguccugcuucaccaucaugaccgacggcccgagcgacggccaggccuccuacaagaucuuccggaucgagaaggggaagaucgucaagagcguggagaugaacgcccccaacuaccacuacgaggagugcuccugcuaccccgacagcuccgagaucacgugcgugugccgcgacaacuggcacggcagcaaccggcccuggguguccuucaaccagaaccuggaguaccagaucggguacaucugcagcggcguguucggggacaacccgcgccccaacgacaagaccggcuccugcggccccgucagcuccaacggggccaacggcgugaagggguucagcuucaaguacggcaacgggguguggaucggccggaccaagagcaucuccagccgcaagggcuucgagaugaucugggaccccaacggguggaccggcaccgacaacaaguucuccaucaagcaggacaucgucgggaucaacgaguggagcggcuacuccgggagcuucgugcagcacccggagcucacgggccuggacugcauccggcccugcuucugggucgagcugauccgcggccggcccgaggagaacaccaucuggaccuccgggagcuccaucagcuucugcggcgugaacuccgacaccgugggguggagcuggcccgacggcgccgagcucccguucacgaucgacaaguga

SEQ ID NO: 89826 - RNA, 1410 nt, Artificial Sequence
  derived and/or modified CDS sequence (opt1) from neuraminidase__InfluenzaA__AIM56824
augaaccccaaccagaagaucaucaccaucggcagcgugugcaugaccaucgggauggccaaccugauccuccagaucggcaacaucaucuccaucugggucagccacuccauccagaucgggaaccagagccagaucgagacgugcaaccaguccgugaucaccuacgagaacaacaccugggugaaccagaccuacgucaacaucagcaacacgaacuucgccgcgggccaguccguggugagcgucaagcuggccgggaacuccagccugugcccgguguccggcugggccaucuacagcaaggacaacuccgugcgcaucggcagcaagggggacgucuucgugauccgggagcccuucaucuccugcagcccccucgagugccgcaccuucuuccugacccagggcgcccugcucaacgacaagcacuccaacgggaccaucaaggaccggagccccuaccgcacgcugauguccugcccgaucggcgaggugcccagccccuacaacagccgguucgaguccgucgccuggagcgcguccgccugccacgacgggaucaacuggcugaccaucggcaucagcggccccgacuccggggccguggccgugcucaaguacaacggcaucaucaccgacaccaucaagagcuggcgcaacaacauccugcggacgcaggaguccgagugcgcgugcgucaacgggagcugcuucaccaucaugaccgacggcccguccgacggccaggccagcuacaagaucuuccgcaucgagaaggggaagaucgugaaguccguggagaugaacgcccccaacuaccacuacgaggagugcagcugcuaccccgacuccagcgagaucacgugcgucugccgggacaacuggcacggcuccaaccgccccugggugagcuucaaccagaaccuggaguaccagaucggguacaucugcuccggcguguucggggacaacccgcggcccaacgacaagaccggcagcugcggccccguccccuccaacggggccaacggcgugaagggguucagcuucaaguacagcaacggcguguggaucgggcgcaccaaguccaucagcucccggaagggcuucgagaugaucugggacccgaacggcuggaccgggaccgacaacaaguucagcaucaagcaggacaucgucggcaucaacgagugguccggguacagcggcuccuucgugcagcaccccgagcucacggggcuggacugcauccgccccugcuucugggucgagcugauccggggccgccccgaggagaacaccaucuggaccagcggcuccagcaucuccuucugcggggugaacagcgacaccgugggcugguccuggccggacggggccgagcuccccuucacgaucgacaaguga

SEQ ID NO: 89827 - RNA, 1398 nt, Artificial Sequence
  derived and/or modified CDS sequence (opt1) from neuraminidase__InfluenzaA__AIN76385
augaaccccaaccagaagauccugugcaccagcgccaccgccaucaucaucggcgcgaucgccgugcucaucgggaucgccaaccugggccugaacaucgggcuccaccugaagccgggcugcaacugcucccacagccagcccgggacgaccaacaccucccagaccaucaucaacaacuacuacaacgagacgaacaucaccaacauccagauggaggagcgcaccagccggaacuucaacucccugaccaagggccucugcacgaucaacagcuggcacaucuacggcaaggacaacgccguccgcaucggggaguccagcgacgugcuggugacccgggagcccuacgucuccugcgaccccgacgagugccgcuucuacgcccugagccagggcaccaccauccgggggaagcacuccaacggcacgauccacgaccgcagccaguaccgggcgcucaucuccuggccgcugagcuccccgcccaccguguacaacagccgcguggagugcaucgggugguccagcaccuccugccacgacggcaagagccggaugagcaucugcaucuccggccccaacaacaacgccagcgccgucgugugguacaaccgccggcccguggccgagaucaacaccugggcgcgcaacauccugcggacgcaggaguccgagugcgucugccacaacgggaucugccccaucguguucaccgacggcagcgccaccgggcccgccgacacccgcaucuacuacuucaaggagggcaagauccucaagugggagucccugacgggcaccgccaagcacaucgaggagugcagcugcuacggggagcggaccggcaucacgugcacgugcaaggacaacuggcagggguccaaccgccccgugauccagaucgacccggucgccaugacccacaccagccaguacaucugcucccccgugcugaccgacacgccccggcccaacgacccgaacaucggcaagugcaacgaccccuaccccgggaacaacaacaacggcgugaagggcuucagcuaccucgacggggcgaacaccuggcugggccgcaccaucuccaccgccagccgguccggguacgagaugcugaagguccccaacgcccucaccgacgaccgcagcaagccgauccagggccagaccaucgugcugaacgccgacugguccggguacagcggcuccuucauggacuacugggccgagggcgacugcuaccgggcgugcuucuacguggagcugauccgcgggcgccccaaggaggacaaggucugguggaccagcaacuccaucgugagcaugugcagcuccaccgaguuccucggccaguggaacuggcccgacggggcccggaucgaguacuuccuguga

SEQ ID NO: 89828 - RNA, 1410 nt, Artificial Sequence; identical to SEQ ID NO: 78111
  derived and/or modified CDS sequence (opt1) from neuraminidase__InfluenzaA__AIP93105

SEQ ID NO: 89829 - RNA, 1410 nt, Artificial Sequence
  derived and/or modified CDS sequence (opt1) from neuraminidase__InfluenzaA__AIP93117
augaaccccaaccagaagaucaucaccaucggcagcgugucccugaccaucgccacggucugcuuccucaugcagaucgccauccuggcgaccaccgugacccugcacuucaagcagcacgagugcgacagcccggccuccaaccaggugaugcccugcgagcccaucaucaucgagcgcaacaucacggagaucgucuaccucaacaacaccaccaucgagaaggagaucugccccgaggugguggaguaccggaacuggagcaagccgcagugccagaucaccggguucgcccccuucuccaaggacaacagcauccgccuguccgccggcggggacaucugggucacgcgggagcccuacgugagcugcgaccccggcaagugcuaccaguucgcccuggggcagggcaccacccucgacaacaagcacuccaacggcaccauccacgaccgcaucccgcaccggacgcugcugaugaacgagcucggggugcccuuccaccugggcaccaagcaggucugcguggcguggagcuccagcuccugccacgacgggaaggccuggcugcacgugugcgucaccggcgacgaccgcaacgccaccgccagcuucaucuacgacgggcggcucguggacuccaucggcagcuggucccagaacauccugcgcacgcaggagagcgagugcgugugcaucaacgggaccugcaccgucgugaugaccgacggcuccgcgagcggccgggccgacacgcgcauccuguucaucaaggaggggaagaucgugcacaucagcccccucuccggcagcgcccagcacaucgaggagugcuccugcuacccccgguacccggacguccgcugcaucugccgggacaacuggaagggcagcaaccgccccgugaucgacaucaacauggaggacuacuccaucgacagcuccuacgugugcagcgggcuggucggcgacacgccccggaacgacgacuccagcuccaacagcaacugccgcgaccccaacaacgagcgggggaacccgggcgugaaggggugggccuucgacaacggcgacgacguguggaugggccgcaccaucuccaaggaccugcggagcggguacgagaccuucaaggucaucggcgggugguccacccccaacagcaagucccaggugaaccgccaggucaucguggacaacaacaacuggagcggcuacuccgggaucuucagcguggagggcaagagcugcaucaaccggugcuucuacgucgagcucauccgcggccgcccccaggagacccgggugugguggaccuccaacagcaucguggucuucugcgggaccuccggcacguacgggaccggcagcuggcccgacggggccaacaucaacuucaugccgaucuga

SEQ ID NO: 89830 - RNA, 1410 nt, Artificial Sequence
  derived and/or modified CDS sequence (opt1) from neuraminidase__InfluenzaA__AIR93973
augaaccccaaccagaagaucaucaccaucggcagcgugugcaugaccaucgggauggccaaccugauccuccagaucggcaacaucaucuccaucuggaucagccacuccauccagcuggggagccgcaaccagaucgaggccugcaaccaguccgucaucacguacgagaacaacaccugggugaaccagaccuacgugaacaucagcaacaccaacuucgcggccggccaguccgucgugccggugaagcuggccgggaacagcucccucugccccgucagcggcugggccaucuacuccaaggacaacagcauccggaucggcuccaagggggacguguucgugauccgcgagcccuucaucagcugcagcccccuggagugccggacguucuuccugacccagggcgcccuccugaacgacaagcacuccaacgggaccaucaaggaccgcuccccguaccggacccugaugagcugccccaucggcgagguccccucccccuacaacagccgcuucgagagcguggcgugguccgccagcgccugccacgacgggaucaacuggcucacgaucggcaucuccggcccggacaacggggccguggcgguccugaaguacaacggcaucaucaccgacaccaucaagagcuggcggaacaacauccugcgcacccaggaguccgagugcgugugcgugaacgggagcugcuucacggucaugaccgacggccccuccaacggccaggccagcuacaagaucuuccggaucgagaaggggaagaucgugaaguccguggagaugaacgcccccaacuaccacuacgaggagugcagcugcuaccccgacuccagcgagaucacgugcgucugccgcgacaacuggcacggcuccaaccggccgugggugagcuucaaccagaaccucgaguaccagaucggguacaucugcuccggcaucuucggggacaacccccgccccaacgacaagaccggcagcugcggccccguguccagcaacggggccaacggcgucaagggguucuccuucaaguacggcaacgggguguggaucggccggaccaagagcaucagcucccgcaacggcuucgagaugaucugggacccgaacggguggaccgagaccgacaacaacuucagcaucaagcaggacaucgugggcaucaacgagugguccggguacagcggcuccuucguccagcaccccgagcugaccgggcuggacugcauccggcccugcuucuggguggagcucauccgcggccggcccaaggagaacacgaucuggaccagcggcuccagcaucuccuucugcggggucaacagcaacaccgugggcugguccuggccggacggggccgagcugcccuucaccaucgacaaguga

SEQ ID NO: 89831 - RNA, 1410 nt, Artificial Sequence
  derived and/or modified CDS sequence (opt1) from neuraminidase__InfluenzaA__AIR93984
augaaccccaaccagaagaucaucaccaucggcagcgugugcaugaccaucgggauggccaaccugauccuccagaucggcaacaucaucuccaucuggaucagccacuccauccagcuggggaaccagaaccagaucgagacgugcaaccagagcgucaucaccuacgagaacaacaccugggugaaccagaccuacgugaacaucuccaacacgaacuucgccgcgggccagagcgucguguccgugaagcuggccgggaacagcucccucugcccggucagcggcugggccaucuacuccaaggacaacagcauccgcaucggcuccaagggggacguguucgugauccgggagcccuucaucagcugcagcccccuggagugccgcaccuucuuccugacccagggcgcccuccugaacgacaagcacuccaacgggaccaucaaggaccggucccccuaccgcacgcugaugagcugcccgaucggcgagguccccucccccuacaacagccgguucgagagcguggccugguccgcgagcgccugccacgacgggaucaacuggcucaccaucggcaucuccggccccgacaacggggccguggccguccugaaguacaacggcaucaucaccgacaccaucaagagcuggcgcaacaacauccugcggacgcaggaguccgagugcgcgugcgugaacgggagcugcuucaccgugaugaccgacggcccguccaacggccaggccagcuacaagaucuuccgcaucgagaaggggaagaucgucaaguccguggagaucaacgcccccaacuaccacuacgaggagugcagcugcuaccccgacuccagcgagaucacgugcgugugccgggacaacuggcacggcuccaaccgccccugggucagcuucaaccagaaccucgaguaccagaucggguacaucugcuccggcaucuucggggacaacccgcggcccaacgacaagaccggcagcugcggccccguguccagcaacggggccaacggcgugaagggguucuccuucaaguacggcaacggggucuggaucggccgcaccaagagcaucagcucccggaacggcuucgagaugaucugggaccccaacggguggaccggcaccgacaacaacuucagcaucaagcaggacaucguggggaucaacgagugguccggcuacagcggguccuucgugcagcacccggagcugacgggccugggcugcauccgccccugcuucugggucgagcucauccgggggcgccccaaggagaacaccaucuggaccagcggcuccagcaucuccuucugcggggugaacagcgacaccgucggcugguccuggcccgacggcgccgagcugccguucacgaucgacaaguga

SEQ ID NO: 89832 - RNA, 1410 nt, Artificial Sequence
  derived and/or modified CDS sequence (opt1) from neuraminidase__InfluenzaA__AIR93995
augaaccccaaccagaagaucaucaucaucggcagcgugugcaugaccaucgggauggccaaccugauccuccagaucggcaacaucaucuccaucuggaucagccacuccauccagcuggggaaccagaaccagaucgagaccugcaaccagagcgucaucacguacgagaacaacaccugggugaaccagaccuacgugaacaucuccaacaccaacuucgccgcgggccagagcgucgugccggugaagcuggccgggaacuccagccucugccccgucuccggcugggccaucuacagcaaggacaacuccauccgcaucggcagcaagggggacguguucgugauccgggagcccuucaucuccugcagcccccuggagugccgcacguucuuccugacccagggcgcccuccugaacgacaagcacuccaacgggaccaucaaggaccggagcccguaccgcacccugauguccugccccaucggcgagguccccagccccuacaacucccgguucgagagcguggccuggagcgcguccgccugccacgacgggaucaacuggcucacgaucggcaucagcggcccggacaacggggccguggccguccugaaguacaacggcaucaucaccgacaccaucaaguccuggaagaacaacauccugcgcacccaggagagcgagugcgugugcgugaacggguccugcuucacggucaugaccgacggccccagcaacggccaggcguccuacaagaucuuccggaucgagaaggggaagaucgucaagagcguggagaugaacgcccccaacuaccacuacgaggagugcuccugcuaccccgacagcuccgagaucacgugcgugugccgcgacaacuggcacggcagcaaccggccguggguguccuucaaccagaaccucgaguaccagaucggguacaucugcagcggcguguucggggacaacccccgccccaacgacaagaccggcuccugcggccccgucagcuccaacggggccaacggcgugaagggguucagcuucaaguacggcaacgggguguggaucggccggaccaaguccaucagcagccgcaacggcuucgagaugaucugggacccgaacggguggaccggcaccgacaacaacuucuccaucaagcaggacaucaucgggaucaacgaguggagcggcuacuccgggagcuucguccagcaccccgagcugaccggcauggacugcauccggcccugcuucuggguggagcugauccgcggccggcccaaggagaacacgaucuggaccuccgggagcuccaucagcuucugcggcgucaacuccgacaccgugggguggagcuggccggacggcgccgagcuccccuucaccaucgacaaguga

SEQ ID NO: 89833 - RNA, 1401 nt, Artificial Sequence
  derived and/or modified CDS sequence (opt1) from neuraminidase__InfluenzaA__AIR94118
augaaccccaaccagaagaucaucgccaucggcagcgugucccugaucaucgccaucaucugccuccugaugcagaucgcgauccugaccaccacgaugacccuccacuuccgccagaacgagugcaacaacagcuccaacaaccaggucaugccgugcgagcccaucaucaucgagcggaacaccgugcaccugaacagcaccacgaucgagcgcgagaucugccccaagguggccgaguacaagaacugguccaagccccagugccagaucaccggguucgccccguucagcaaggacaacuccauccggcugagcgccggcggggacaucugggucacccgcgagcccuacguguccugcagccucgacaagugcuaccaguucgcccugggccaggggaccacgcugaagaacaagcacuccaacggcaccacccacgaccggacgccccaccgcacccuccugaugaacgagcugggcgugcccuuccaccucgggaccaagcaggucugcaucgcguggagcuccagcuccugcuacgacggcaaggccuggcugcacaucugcgugaccggggacgacaagaacgccaccgccagcaucaucuacaacggcaugcugguggacuccaucgggagcugguccaagaacauccuccggacgcaggagagcgagugcgucugcaucaacgggaccugcgcgguggugaugaccgacggcagcgccuccggcaaggccgacacccgcguccuguucaucaaggagggcaagaucaucaacaucagcccgcuguccgggagcgcccagcacguggaggagugcuccugcuacccccgguaccccgaggugcgcugcgucugccgggacaacuggaagggcagcaaccgccccauccucuacaucaacauggccgacuacuccaucgagagcuccuacgugugcagcggccuggugggggacacgccgcggaacgacgacuccagcuccagcuccaacugcaaggaccccaacagcgagcgcggcgcgcccggggucaagggcugggccuucgacgacgggaacgacguguggaugggccggaccaucaagaacggcucccgcagcggguacgagaccuuccggguggucaacggcuggaccguggccaacuccaagagccaggugaaccgccaggucaucguggacagcgacgacugguccggguacagcggcaucuucuccgucgaggggaagaagugcaucaaccggugcuucuacguggagcugauccgcggccggccccaggagccgcgcgugugguggacgagcaacuccaucaucgucuucugcggcaccagcgggaccuacggcaccggguccuggcccgacggcgccaacaucaacuucaugcccaucuga

SEQ ID NO: 89834 - RNA, 1410 nt, Artificial Sequence
  derived and/or modified CDS sequence (opt1) from neuraminidase__InfluenzaA__AIT38335
augaaccccaaccagaagaucaucaccaucggcagcgugucccugaccaucgccacgaucugcuuccucaugcagaucgccauccuggucaccaccgugacccugcacuucaagcaguacgagugcaacagcccgcccacgaaccaggugaugcucugcgagcccaccaucaucgagcgcaacaucaccgagaucgucuaccugaccaacacgaccaucgagaaggagaucugccccaagcugguggaguaccggaacugguccaagccgcagugcaagaucaccggguucgcgcccuucagcaaggacaacuccauccgccucagcgccggcggggacaucugggugacccgggagcccuacgucuccugcgaccccgacaagugcuaccaguucgcccugggccaggggacgacccugaacaaccgccacagcaacgacaccgugcacgaccggaccccguaccgcacgcuccugaugaacgagcugggcauccccuuccaccucggcaccaagcaggucugcaucgccugguccagcuccagcugccacgacgggaaggccuggcugcacgugugcgugaccggccacgacgagaacgcgaccgccuccuucaucuacgacgggcggcugguggacagcaucgucuccuggagcaagcgcauccuccggacgcaggaguccgagugcgugugcaucgacgggaccugcaccguggucaugaccgacgggagcgccuccggccgcgccgacacgcggauccuguucaucaaggagggcaagaucauccacaucagccagcugagcggguccgcgcagcacguggaggagugcagcugcuacccccgcuaccccggcgugcggugcgucugccgcgacaacuggaagggguccaaccggccgaucguggacaucaacgugaaggacuacagcaucaacuccagcuacgucugcuccggccucgugggcgacacgccccgcaagaacgacagcuucuccagcuccuacugccugaaccccaacaacgaggagggcggccacggggugaagggcugggccuucgacgacggggacgacgucuggaugggccggaccaucaacgagaagcugcgcagcggcuacgagaccuucaaggugaucaaggggugguccaagcccaacagcaagcuccagaucaaccggcaggucaucguggaccgcggcaaccgguccggguacagcggcaucuucuccguggaggggaagggcugcaucaaccgcugcuucuacgucgagcugauccgcggccggaagcaggagaccgaggugugguggaccagcaacuccaucguggucuucugcgggaccagcggcaccuacgggacgggcagcuggccggacggggccaacaucaaccugaugcccaucuga

SEQ ID NO: 89835 - RNA, 1410 nt, Artificial Sequence
  derived and/or modified CDS sequence (opt1) from neuraminidase__InfluenzaA__AIT38346
augaaccccaaccagaagaucaucaccaucggcagcaucucccugaccaucgccacgaucugcuuccuccuccagguggccauccuggucaccaccgugacccugcacuucaagcaguucgagugcaacccgacgcccaacaaccaggugaugcugugcgagcccaccgucaucgagcgcaacaucaccaagaucguguaccugaccaacacgaccguggagaaggagaucugccccaagccggcggaguaccggaacuggagcaagccccagugcaagaucaccggguucgcccccuucuccaaggacaacagcauccgccucuccgccggcggggacaucugggucacccgggagcccuacgugagcugcgccccgaacaagugcuaccaguucgcccugggccaggggacgacccugaacaaccgccacuccaacgacaccgugcacgaccggacccccuaccgcacgcuccugaugaacgagcugggcauccccuuccaccucggcaccaagcaggucugcaucgcguggagcuccagcuccugccacgacgggaaggccuggcugcacgugugcgugaccggccacgacaagaacgccaccgccagcuucaucuacgacgggcggcuggucgacuccaucggcagcugguccaagaacauccuccgcacgcaggagagcgagugcgugugcaucaacgggaccugcaccguggucaugaccgacggcuccgcgagcggccgggccgacacgaagauccuguucaucaaggaggggaagaucauccacaucucccagcugagcggcagcgcccagcacguggaggagugcuccugcuacccccgcuacccgggggugcggugcgucugccgcgacaacuggaagggcagcaaccggcccaucguggacaucaacgugcgcgacuacuccaucgucagcuccuacgugugcagcggccucgugggggacacgccccggaagaacgacuccuucagcuccagccacugccugaaccccaacaacgaggagggcgggcacggcgucaaggggugggccuucgacgacggcgacgacguguggaugggccgcaccaucuccgagaagcugcggagcggguacgagaccuucaaggucaucaagggcugguccaagccgaacagcaagcuccagaucaaccgccaggugaucguggaccgggggaaccgcuccggcuacagcgggaucuucuccgucgagggcaagagcugcaucaaccggugcuucuacguggagcugauccgcggccgcaagcaggagaccgaggugugguggaccuccaacagcaucgucguguucugcgggaccagcggcaccuacgggacgggcuccuggcccgacggggccgacaucaaccugaugcccaucuga

SEQ ID NO: 89836 - RNA, 1410 nt, Artificial Sequence
  derived and/or modified CDS sequence (opt1) from neuraminidase__InfluenzaA__AIT38361
augaaccccaaccagaagaucaucaccaucggcagcaucucccugaccaucgccacgaucugcuuccucaugcaggucgccauccuggugaccaccgugacccugcacuucaagcaguacgagugcaacagcacgccgaacaaccaggugaugcucugcgagcccaccgucaucgagcgcaacaucaccaagaucguguaccugaccaacacgaccguggucaaggaggugugccccaagcccgcggaguaccggaacugguccaagccgcagugcaagaucaccggguucgcccccuucagcaaggacaacuccauccgccugagcgccggcggggacaucugggugacccgggagcccuacgucuccugcgcccccaacaagugcuaccaguucgcccucggccaggggacgacccugaacaaccgccacagcaacgacaccgugcacgaccggaccccguaccgcacgcugcucaugaacgagcugggcauccccuuccaccugggcaccaagcaggucugcaucgcgugguccagcuccagcugcuacgacgggaaggccuggcuccacgugugcgugaccggccacgacaagaacgccaccgccuccuucaucuacgacgggcggcugguggacagcaucggcuccuggagcaagaacauccugcgcacgcaggaguccgagugcgucugcaucaacgggaccugcaccguggugaugaccgacggcagcgcguccggccgggccgacacgaagauccucuucaucaaggaggggaagaucauccacaucagccagcugagcggcuccgcccagcacgucgaggagugcagcugcuacccccgcuaccccggggugcggugcgugugccgcgacaacuggaagggcuccaaccggccgaucgucgacaucaacaugcgcgacuacagcaucguguccagcuacgugugcuccggccuggucggggacacgccccgggagaacgacagcuucuccagcucccacugccucaaccccaacaacgaggagggcgggcacggcgugaaggggugggccuucgacgacggcgacgacgucuggaugggccgcaccaucagcgagaagcugcgguccggguacgagaccuucaaggugaucaagggcuggagcaagcccaacuccaagcugcagaucaaccgccaggugaucgucgaccgggggaaccgcagcggcuacuccgggaucuucagcguggagggcaaguccugcaucaaccggugcuucuacguggagcucauccgcggccgcaagcaggagaccgaggucugguggaccagcaacagcaucgugguguucugcgggaccuccggcaccuacgggacgggcagcuggccggacggggccgacaucaaccugaugcccaucuga

SEQ ID NO: 89837 - RNA, 1410 nt, Artificial Sequence
  derived and/or modified CDS sequence (opt1) from neuraminidase__InfluenzaA__AIT38375
augaaccccaaccagaagaucaucaccaucggcagcgugugcaugaccaucgggauggucaaccugauccuccagaucggcaacaucaucuccaucuggaucagccacuccauccagcuggggaaccagaaccagaucgagaucugcaaccagagcgugaucacguacgagaacaacaccugggugaaccagaccuacgucaacaucuccaacaccaacuucgccgccggccagagcguggugccggucaagcuggcggggaacuccagccucugcuccgugagcggcugggccaucuacuccaaggacaacagcauccgcaucggcuccaagggggacguguucgucauccgggagcccuucaucagcugcagcccccuggagugccgcacguucuuccugacccagggcgcccuccugaacgacaagcacuccaacgggaccaucaaggaccggucccccuaccgcacccugaugagcugcccgaucggcgaggugcccucccccuacaacagccgguucgagagcguggccugguccgccagcgcgugccacgacgggaucaacuggcucacgaucggcaucuccggccccgacaacggggccgucgccgugcugaaguacaacggcaucaucaccgacaccaucaagagcuggcgcaacaacauccugcggacccaggaguccgagugcgccugcgugaacgggagcugcuucacggucaugaccgacggcccguccgacggccaggcgagcuacaagaucuuccgcaucgagaaggggaagaucgugaaguccguggagaugaacgcccccaacuaccacuacgaggagugcagcugcuaccccgacuccagcgagaucacgugcgucugccgggacaacuggcacggcuccaaccgccccugggugagcuucaaccagaaccucgaguaccagaucggguacaucugcuccggcaucuucggggacaacccgcggcccaacgacaagaccggcagcugcggccccguguccagcaacggggccaacggcgucaagggguucuccuucaaguacggcaacgggguguggaucggccgcaccaagagcaucagcucccggaacggcuucgagaugaucugggaccccaacggguggaccggcaccgacaacaacuucagcaucaagcaggacaucguggggaucaacgagugguccggcuacagcggguccuucguccagcacccggagcugaccggccuggacugcauccgccccugcuucuggguggagcucauccggggccgccccaaggagaacacgaucuggaccagcggguccagcaucuccuucugcggcgucaacagcgacaccguggggugguccuggcccgacggcgccgagcugccguucaccaucgacaaguga

SEQ ID NO: 89838 - RNA, 1410 nt, Artificial Sequence
  derived and/or modified CDS sequence (opt1) from neuraminidase__InfluenzaA__AIT93148
augaaccccaaccagaagaucaucaccaucggcagcgugugcaugaccaucgggauggccaaccugauccuccagaucggcaacaucaucuccaucugggucagccacuccauccagcuggggaaccagagccagaucgagacgugcaaccaguccgugaucaccuacgagaacaacaccugggugaaccagaccuacgucaacaucagcaacacgaacuucgccgcgggccaguccguggugagcgucaagcuggccgggaacuccagccucugcccgguguccggcugggccaucuacagcaaggacaacuccgugcgcaucggcagcaagggggacgucuucgugauccgggagcccuucaucuccugcagcccccuggagugccgcaccuucuuccugacccagggcgcccuccugaacgacaagcacuccaacgggaccaucaaggaccggagccccuaccgcacgcugauguccugcccgaucggcgaggugcccagccccuacaacagccgguucgaguccgucgccuggagcgcguccgccugccacgacgggaucaacuggcucaccaucggcaucagcggccccgacuccggggccguggccgugcugaaguacaacggcaucaucaccgacaccaucaagagcuggcgcaacaacauccugcggacgcaggaguccgagugcgcgugcgucaacgggagcugcuucaccaucaugaccgacggcccguccgacggccaggccagcuacaagaucuuccgcaucgagaaggggaagaucgugaaguccguggagaugaacgcccccaacuaccacuacgaggagugcagcugcuaccccgacuccagcgagaucacgugcgucugccgggacaacuggcacggcuccaaccgccccugggugagcuucaaccagaaccucgaguaccagaucggguacaucugcuccggcguguucggggacaacccgcggcccaacgacaagaccggcagcugcggccccgucuccagcaacggggccaacggcgugaagggguucagcuucaaguacggcaacgggguguggaucggccgcaccaaguccaucagcucccggaagggcuucgagaugaucugggaccccaacggguggaccggcaccgacaacaaguucagcaucaagcaggacaucgucgggaucaacgagugguccggcuacagcggguccuucgugcagcacccggagcugacgggccuggacugcauccgccccugcuucugggucgagcucauccggggccgccccgaggagaacaccaucuggaccagcggguccagcaucuccuucugcggcgugaacagcgacaccguggggugguccuggcccgacggcgccgagcugccguucacgaucgacaaguga

SEQ ID NO: 89839 - RNA, 1410 nt, Artificial Sequence; identical to SEQ ID NO: 82664
  derived and/or modified CDS sequence (opt1) from neuraminidase__InfluenzaA__AIU39701

SEQ ID NO: 89840 - RNA, 1410 nt, Artificial Sequence; identical to SEQ ID NO: 80762
  derived and/or modified CDS sequence (opt1) from neuraminidase__InfluenzaA__AIU39703

SEQ ID NO: 89841 - RNA, 1410 nt, Artificial Sequence
  derived and/or modified CDS sequence (opt1) from neuraminidase__InfluenzaA__AIU39705
augaaccccaaccagaagaucaucaccaucggcagcgugugcaugaccaucgggauggccaaccugauccuccagaucggcaacaucaucuccaucuggaucagccacuccauccagcuggggaaccagagccagaucgagacgugcaaccaguccgucaucaccuacgagaacaacaccugggugaaccagaccuacgugaacaucagcaacacgaacuucgccgcgggccaguccgucgugagcgugaagcuggccgggaacuccagccucugcccggucuccggcugggccaucuacagcaaggacaacuccauccgcaucggcagcaagggggacguguucgugauccgggagcccuucaucuccugcagcccccuggagugccgcaccuucuuccugacccagggcgcccuccugaacgacaagcacuccaacgggaccaucaaggaccggagccccuaccgcacgcugauguccugcccgaucggcgagguccccagccccuacaacagccgguucgaguccguggccuggagcgcguccgccugccacgacgggaucaacuggcucaccaucggcaucagcggccccgacaacggggccguggccguccugaaguacaacggcaucaucaccgacaccaucaaguccuggcgcaacaacauccugcggacgcaggagagcgagugcgcgugcgugaacggguccugcuucaccgugaugaccgacggcccgagcgacggccaggccuccuacaagaucuuccgcaucgagaaggggaagaucgucaagagcguggagaugaacgcccccaacuaccacuacgaggagugcuccugcuaccccgacagcuccgagaucacgugcgugugccgggacaacuggcacggcagcaaccgccccugggucuccuucaaccagaaccucgaguaccagaucggguacaucugcagcggcaucuucggggacaacccgcggcccaacgacaacaccggcuccugcggccccgugagcuccaacggggccaacggcgugaagggguucagcuucaaguacggcaacggggucuggaucggccgcaccaagagcaucuccagccggaacggcuucgagaugaucugggaccccaacggguggaccggcaccgacaacaacuucuccaucaagcaggacaucguggggaucaacgaguggagcggcuacuccgggagcuucgugcagcacccggagcugacgggccuggacugcauccgccccugcuucugggucgagcucauccggggccgccccaaggagaacaccaucuggaccuccgggagcuccaucagcuucugcggcgugaacuccgacaccgucggguggagcuggcccgacggcgccgagcugccguucacgaucgacaaguga

SEQ ID NO: 89842 - RNA, 1413 nt, Artificial Sequence
  derived and/or modified CDS sequence (opt1) from neuraminidase__InfluenzaA__AIU46611
augaaccccaaccagaagaucacgugcaucagcgccaccggcaugacccuguccguggucagcaugcucaucgggaucgccaaccugggccugaacaucgggcuccacuacaaggugggcgacuccaccaacaucaacaucccgaacaugaacgagaccagccccaccacgaccaucaucaacaaccacccccagaacaacuucaccaacaucaccaacaucaucgugacgcgcaacgaggaggggcaccuccugaaccugaccaagccccugugcgaggucaacuccuggcacauccugagcaaggacaacgcgauccggaucggcgaggacgcccacaucaucgugacccgcgagccguaccucuccugcgacccccagggcugccggauguucgcccugagccaggggaccacgcugcgcggcaagcacgccaacgggaccauccacgaccggucccccuuccgcgcccucgugagcugggagaugggccaggcgcccuccccguacaacacccgggucgagugcaucggguggagcuccaccagcugccacgacggcaucucccgcaugagcaucugcaucuccggccccaacaacaacgccagcgccguggugugguacgggggccggcccgucacggagauccccuccugggccgggaacauccugcgcacccaggagagcgagugcgugugccacggcggcaucugcccgguggucaugaccgacgggcccgcgaacaaccgggccgagaccaagaucaucuacuucaaggagggcaagaucaagaagaucgaggagcugaagggggacgcccagcacaucgaggagugcagcugcuacggcgccuccgagaugaucaagugcaucugccgcgacaacuggaagggggccaaccggcccgugaucacgaucgaccccgagaugaugacccacaccagcaaguaccucugcuccaagauccugaccgacacgagccgcccgaacgaccccaccaacggcaacugcgaggcgcccaucaccggcgggucccccgacccgggcgugaagggguucgccuuccuggacggcgagaacagcuggcucgggcggaccaucuccaaggacagccgcuccggcuacgagaugcugaagguccccaacgccgagacggacacccagagcggcgccaucucccaccagaucaucgugaacaaccagaacuggagcggguacuccggcgccuucaucgacuacugggcgaacaaggagugcuucaaccccugcuucuacguggagcugauccgggggcgccccaaggagagcuccguccucuggaccagcaacuccaucguggcccugugcggcagcaaggagcggcugggguccuggagcuggcacgacggcgccgagaucaucuacuucaaguga

SEQ ID NO: 89843 - RNA, 1410 nt, Artificial Sequence
  derived and/or modified CDS sequence (opt1) from neuraminidase__InfluenzaA__AIV09221
augaaccccaaccagaagaucaucaccaucggcagcgugugcaugaccaucgggauggccaaccugauccuccagaucggcaacaucacguccaucuggaucagccacuccauccagaucgggaaccgcaaccagaucgaggccugcaaccagagcgucaucaccuacgagaacaacaccugggugaaccagaccuacgugaacaucuccaacacgaacuucgcggucggccagagcguggugccggucaagcuggccgggaacuccagccugugccccguguccggcugggccaucuacagcaaggacaacuccauccggaucggcagcaagggggacguguucgucauccgcgagcccuucaucuccugcagcccccucgagugccggaccuucuuccugacccagggcgcccugcucaacgacaagcacuccaacgggaccaucaaggaccgcagcccguaccggacgcugauguccugccccaucggcgaggugcccagccccuacaacucccgcuucgagagcguggccuggagcgcguccgccugccacgacgggaucaacuggcugaccaucggcaucagcggcccggacaacggggccgucgccgugcucaaguacaacggcaucaucaccgacaccaucaaguccuggcggaacaacauccugcgcacgcaggagagcgagugcgugugcgucaacggguccugcuucaccgugaugaccgacggccccagcaacggccaggcguccuacaagaucuuccggaucgagaaggggaagaucgucaagagcguggagaugaacgcccccaacuaccacuacgaggagugcuccugcuaccccgacagcuccgagaucacgugcgugugccgcgacaacuggcacggcagcaaccggccguggguguccuucaaccagaaccuggaguaccagaucggguacaucugcagcggcaucuucggggacaacccccgccccaacgacaagaccggcuccugcggccccgucccgagcaacggggccaacggcgugaagggguucuccuucaaguacggcaacgggguguggaucggccggaccaagagcaucuccagccgcaacggcuucgagaugaucugggaccccaacggguggaccgagaccgacaacgacuucagcaucaagcaggacaucgucggcaucaacgagugguccggguacagcggcuccuucgugcagcaccccgagcucacggggcuggacugcauccggcccugcuucugggucgagcugauccgcggccggccgaaggagaacaccaucuggaccagcggcuccagcaucuccuucugcggggugaacagcaacaccguggacugguccuggcccgacggcgccgagcuccccuucacgaucgacaaguga

SEQ ID NO: 89844 - RNA, 1410 nt, Artificial Sequence
  derived and/or modified CDS sequence (opt1) from neuraminidase__InfluenzaA__AIW60703
augaaccccaaccagaagaucaucaccaucggcagcgugucccugaccaucgccacgaucugcuuccucaugcagaucgucauccuggugaccaccgugacccugcacuucaagcaguacgagugcaacagcccgcccaacaaccaggucaugcucugcgagcccacgaucaucgagcgcaacaucaccgagaucguguaccugaccaacaccacgaucgagaaggagaucugccccaagcuggccgaguaccggaacugguccaagccgcagugcaagaucaccggguucgcgcccuucagcaaggacaacuccauccgccucagcgccggcggggacaucugggugacccgggagcccuacgucuccugcgaccccgacaagugcuaccaguucgcccugggccaggggaccacgcugaacaaccgccacagcaacgacaccgugcacgaccggaccccguaccgcacccuccugaugaacgagcugggcgugcccuuccaccucggcacgaagcaggucugcaucgccugguccagcuccagcugccacgacgggaaggccuggcugcacgugugcgugaccggccacgacgagaacgcgaccgccuccuucaucuacgacgggcggcuggucgacagcaucggcuccuggagcaagaagauccuccgcacccaggaguccgagugcgugugcaucaacgggacgugcaccguggucaugaccgacggcagcgccuccggccgggccgacaccaagauccuguucaucgaggaggggaagaucgugcacaucagcccccugagcggcuccgcgcagcacguggaggagugcagcugcuacccccaguacuccgggguccgcugcgugugccgggacaacuggaagggcagcaaccgcccgaucguggacaucaacgucaaggacuacuccaucgugagcuccuacgugugcagcggccucgucggggacacgccccggaagaacgacuccagcuccagcucccacugccugaaccccaacaacgaggagggcgggcacggcgugaaggggugggccuucgacgacggcaacgacgucuggaugggccgcaccaucagcgagaagcugcgguccggguacgagaccuucaaggugaucggcggguggagcaagcccaacuccaagcuccagaucaaccgccaggugaucgucgaccggggcaaccgcagcggguacuccggcaucuucagcguggagggcaagaacugcaucaaccggugcuucuacguggagcugauccgcgggcggaagcaggagaccgaggucugguggacgagcaacuccaucgugguguucugcggcaccagcgggaccuacggcaccggguccuggccggacggcgccgacaucaaccugaugcccaucuga

SEQ ID NO: 89845 - RNA, 1410 nt, Artificial Sequence
  derived and/or modified CDS sequence (opt1) from neuraminidase__InfluenzaA__AIW60704
augaaccccaaccagaagaucaucaccaucggcagcgugucccugaccaucgccacgaucugcuuccucaugcagaucgucauccuggugaccaccgugacccugcacuucaagcaguacgagugcaacagcccgcccaacaaccaggucaugcucugcgagcccacgaucaucgagcgcaacaucaccgagaucguguaccugaccaacaccacgaucgagaaggagaucugccccaagcuggccgaguaccggaacugguccaagccgcagugcaagaucaccggguucgcgcccuucagcaaggacaacuccauccgccucagcgccggcggggacaucugggugacccgggagcccuacgucuccugcgaccccgacaagugcuaccaguucgcccugggccaggggaccacgcugaacaaccgccacagcaacgacaucgugcacgaccggaccccguaccgcacccuccugaugaacgagcugggcgugcccuuccaccucggcaccaagcaggucugcaucgccugguccagcuccagcugccacgacgggaaggccuggcugcacgugugcgugacgggccacgacgagaacgcgaccgccuccuucaucuacgacgggcggcuggucgacagcaucggcuccuggagcaagaagauccuccgcacccaggaguccgagugcgugugcaucaacgggaccugcacgguggucaugaccgacggcagcgccuccggccgggccgacaccaagauccuguucaucgaggaggggaagaucgugcacaucagcccccugagcggcuccgcgcagcacguggaggagugcagcugcuacccccaguacuccgggguccgcugcgugugccgggacaacuggaagggcagcaaccgcccgaucguggacaucaacgucaaggacuacuccaucgugagcuccuacgugugcagcggccucgucggggacacgccccggaagaacgacuccagcuccagcucccacugccugaaccccaacaacgaggagggcgggcacggcgugaaggggugggccuucgacgacggcaacgacgucuggaugggccgcaccaucagcgagaagcugcgguccggguacgagaccuucaaggugaucggcggguggagcaagcccaacuccaagcuccagaucaaccgccaggugaucgucgaccggggcaaccgcagcggguacuccggcaucuucagcguggagggcaagaacugcaucaaccggugcuucuacguggagcugauccgcgggcggaagcaggagaccgaggucugguggaccagcaacuccaucgugguguucugcggcacgagcgggaccuacggcaccggguccuggccggacggcgccgacaucaaccugaugcccaucuga

SEQ ID NO: 89846 - RNA, 1410 nt, Artificial Sequence
  derived and/or modified CDS sequence (opt1) from neuraminidase__InfluenzaA__AIW60705
augaaccccaaccagaagaucaucaccaucggcagcgugucccugaccaucgccacgaucugcuuccucaugcagaucgccauccuggucaccaccgugacccugcacuucaagcaguacgagugcaacagcccgcccaacaaccaggugaugcucugcgagcccacgaucaucgagcgcaacaucaccgagaucgucuaccugaccaacaccacgaucgagaaggagaucugccccaagcuggcggaguaccggaacugguccaagccgcagugcaagaucaccggguucgcccccuucagcaaggacaacuccauccgccucagcgccggcggggacaucugggugacccgggagcccuacguguccugcgaccccgacaagugcuaccaguucgcccugggccaggggaccacgcugaacaaccgccacagcaacgacaccguccacgaccggaccccguaccgcacccuccugaugaacgagcugggcgugcccuuccaccucggcacgaagcaggucugcaucgccugguccagcuccagcugccacgacgggaaggcguggcugcacgugugcgugaccggccacgacgagaacgccaccgccuccuucaucuacgacgggcggcugguggacagcaucggcuccuggagcaagaagauccuccgcacccaggaguccgagugcgucugcaucaacgggacgugcaccguggugaugaccgacggcagcgccuccggccgggcggacaccaagauccuguucaucgaggaggggaagaucguccacaucagcccccugagcggcuccgcccagcacguggaggagugcagcugcuacccccgcuacuccggggugcggugcgucugccgcgacaacuggaagggcagcaaccggccgaucguggacaucaacgugaaggacuacuccaucgucagcuccuacgugugcagcggccucgugggggacacgccccgcaagaacgacuccagcuccagcucccacugccugaaccccaacaacgaggagggcgggcacggcgucaaggggugggccuucgacgacggcaacgacguguggaugggccggaccaucagcgagaaguuccgcuccggguacgagaccuucaaggucaucggcggguggagcaagcccaacuccaagcugcagaucaaccgccaggugaucguggaccggggcaaccggagcggguacuccggcaucuucagcgucgagggcaagagcugcaucaaccgcugcuucuacguggagcucauccgggggcgcaagcaggagaccgaggugugguggacguccaacagcaucgucguguucugcggcaccuccgggaccuacggcaccgggagcuggccggacggcgccgacaucaaccugaugcccaucuga

SEQ ID NO: 89847 - RNA, 1410 nt, Artificial Sequence; identical to SEQ ID NO: 89846
  derived and/or modified CDS sequence (opt1) from neuraminidase__InfluenzaA__AIW60706

SEQ ID NO: 89848 - RNA, 1410 nt, Artificial Sequence
  derived and/or modified CDS sequence (opt1) from neuraminidase__InfluenzaA__AIW60708
augaaccccaaccagaagaucaucaccaucggcagcgugucccugaccaucgccacgaucugcuuccucaugcagaucgccauccuggucaccaccgugacccugcacuucaagcaguacgagugcaacagcccgcccaacaaccaggugaugcucugcgagcccacgaucaucgagcgcaacaucaccgagaucgucuaccugaccaacaccacgaucgagaaggagaucugccccaagcuggcggaguaccggaacugguccaagccgcagugcaacaucaccggguucgcccccuucagcaaggacaacuccauccgccucagcgccggcggggacaucugggugacccgggagcccuacguguccugcgaccccgacaagugcuaccaguucgcccugggccaggggaccacgcugaacaaccgccacagcaacgacaccguccacgaccggaccccguaccgcacccuccugaugaacgagcugggcgugcccuuccaccucggcacgaagcaggucugcaucgccugguccagcuccagcugccacgacgggaaggcguggcugcacgugugcgugaccggccacgacgagaacgccaccgccuccuucaucuacaacgggcggcugguggacagcaucggcuccuggagcaagaagauccuccgcacccaggaguccgagugcgucugcaucaacgggacgugcaccguggugaugaccgacggcagcgccuccggcaaggcggacaccaagauccuguucaucgaggaggggaagaucguccacaucagcccccugagcggcuccgcccagcacguggaggagugcagcugcuacccccgguacccgggggugcgcugcgucugccgggacaacuggaagggcuccaaccgccccaucguggacaucaacgugaaggacuacagcaucgucuccagcuacgugugcuccggccucgugggggacacgccccggaagaacgacagcuccagcuccagccacugccugaaccccaacaacgaggagggcgggcacggcgucaaggggugggccuucgacgacggcaacgacguguggaugggccgcaccaucuccgagaagcugcggagcggguacgagaccuucaaggucaucgagggcugguccaacccgaacagcaagcuccagaucaaccgccaggugaucguggaccgggggaacuccagcggcuacuccgggaucuucagcgucgagggcaagagcugcaucaaccgcugcuucuacguggagcugauccggggccgcaagcaggagaccgaggugugguggacguccaacagcaucgucgugcugugcgggaccuccggcaccuacgggaccggcagcuggcccgacggggccgacaucaaccucaugcccaucuga

SEQ ID NO: 89849 - RNA, 1410 nt, Artificial Sequence
  derived and/or modified CDS sequence (opt1) from neuraminidase__InfluenzaA__AIW60710
augaaccccaaccagaagaucaucaccaucggcagcgugucccugaccaucgccacgaucugcuuccucaugcagaucgccauccuggucaccaccgugacccugcacuucaagcaguacgagugcaacagcccgcccaacaaccaggugaugcucugcgagcccacgaucaucgagcgcaacaucaccgagaucgucuaccugaccaacaccacgaucgagaaggagaucugccccaagcuggcggaguaccggaacugguccaagccgcagugcaacaucaccggguucgcccccuucagcaaggacaacuccauccgccucagcgccggcggggacaucugggugacccgggagcccuacguguccugcgaccccgacaagugcuaccaguucgcccugggccaggggaccacgcugaacaacggccacagcaacgacaccguccacgaccgcaccccguaccggacccuccugaugaacgagcugggcgugcccuuccaccucgggacgaagcaggucugcaucgccugguccagcuccagcugccacgacggcaaggcguggcugcacgugugcgugaccggggacgacgagaacgccaccgccuccuucaucuacaacggccgccugguggacagcaucggguccuggagcaagaagauccuccggacccaggaguccgagugcgucugcaucaacggcacgugcaccguggugaugaccgacggcagcgccuccgggaaggcggacaccaagauccuguucaucgaggagggcaagaucguccacacgagcagccuguccgggagcgcccagcacguggaggagugcuccugcuacccccgcuaccccggcgugcggugcgucugccgcgacaacuggaagggcagcaaccggccgaccguggacaucaacgugaaggacuacuccaucgucagcuccuacgugugcagcgggcucgugggcgacacgccccgcaagaacgacuccagcuccagcucccacugccuggaccccaacaacgaggagggcgggcacggggucaagggcugggccuucgacgacggcaacgacguguggauggggcggaccaucagcgagaagcugcgcuccggcuacgagaccuucaaggucaucgagggguggagcaagcccaacuccaagcuccagaucaaccgccaggugaucguggaccggggcaaccggagcggguacuccggcaucuucagcgucgagagcaaguccugcaucaaccgcugcuucuacguggagcugauccggggccgcaagcaggagaccgaggugcuguggaccagcaacuccaucgucguguucugcgggaccagcggcacguacgggaccggcuccuggccggacggggccgacaucaaccucaugcccaucuga

SEQ ID NO: 89850 - RNA, 1410 nt, Artificial Sequence; identical to SEQ ID NO: 78615
  derived and/or modified CDS sequence (opt1) from neuraminidase__InfluenzaA__AIW60711

SEQ ID NO: 89851 - RNA, 1410 nt, Artificial Sequence; identical to SEQ ID NO: 78615
  derived and/or modified CDS sequence (opt1) from neuraminidase__InfluenzaA__AIW60712

SEQ ID NO: 89852 - RNA, 1410 nt, Artificial Sequence
  derived and/or modified CDS sequence (opt1) from neuraminidase__InfluenzaA__AIW60713
augaaccccaaccagaagaucaucaccaucggcagcgugucccugaccaucagcacgaucugcuucuucaugcagaucgccauccucaucaccaccgucacccugcacuucaagcaguacgaguucuccagcccgcccaacaaccaggugaugcugugcgagcccacgaucaucgagcgcaacaucaccgagaucguguaccucaccaacaccacgaucgagaaggagaucugccccaagcuggccgaguaccggaacugguccaagccgcagugcgacaucaccggguucgcgcccuucagcaaggacaacuccauccgccugagcgccggcggggacaucugggucacccgggagcccuacguguccugcgaccccgacaagugcuaccaguucgcccucggccaggggaccacgcugaacaacgugcacagcaacgacaccguccacgaccgcaccccguaccggacccugcucaugaacgagcugggcgugcccuuccaccugggcacgaagcaggucugcaucgccugguccagcuccagcugccacgacgggaaggccuggcuccacgugugcgugaccggcgacgacaagaacgcgaccgccuccuucaucuacaacgggcgccugguggacagcaucgucuccuggagcaaggagauccugcggacccaggaguccgagugcgugugcaucaacggcacgugcaccguggucaugaccgacgggagcgccagcggcaaggccgacaccaagauccucuucaucgaggagggcaagaucgugcacacguccacccugagcggguccgcgcagcacguggaggagugcagcugcuacccccgcuaccccggcguccggugcgugugccgcgacaacuggaagggguccaaccggccgaucguggacaucaacaucaaggacuacagcaucgccuccagcuacgucugcuccggccuggugggcgacacgccccgcaagaacgacagcuccagcuccagccacugccucgaccccaacaacgaggagggcgggcacggggugaagggcugggccuucgacgacgggaacgacgucuggaugggccggaccaucuccgagaagcugcgcagcggcuacgagaccuucaaggugaucgaggggugguccaaccccaacagcaagcugcagaucaaccggcaggucaucguggaccgcggcaaccgguccggguacagcggcaucuucagcguggaggggaaguccugcaucaaccgcugcuucuacgucgagcucauccggggccgcaaggaggagaccgaggugcuguggaccagcaacuccaucguggucuucugcggcaccagcgggacguacggcaccggguccuggccggacggcgccgacaucaaccugaugcccaucuga

SEQ ID NO: 89853 - RNA, 1410 nt, Artificial Sequence
  derived and/or modified CDS sequence (opt1) from neuraminidase__InfluenzaA__AIW60714
augaaccccaaccagaagaucaucaccaucggcagcgugucccugaccaucagcacgaucugcuucuucaugcagaucgccauccucaucaccaccgucacccugcacuucaagcaguacgaguucuccagcccgcccaacaaccaggugaugcugugcgagcccacgaucaucgagcgcaacaucaccgagaucguguaccucaccaacaccacgaucgagaaggagaucugccccaagcuggccgaguaccggaacugguccaagccgcagugcgacaucaccggguucgcgcccuucagcaaggacaacuccauccgccugagcgccggcggggacaucugggucacccgggagcccuacguguccugcgaccccgacaagugcuaccaguucgcccucggccaggggaccacgcugaacaacgugcacagcaacgacaccguccacgaccgcaccccguaccggacccugcucaugaacgagcugggcgugcccuuccaccugggcacgaagcaggucugcaucgccugguccagcuccagcugccacgacgggaaggccuggcuccacgugugcgugaccggcgacgacaagaacgcgaccgccuccuucaucuacaacgggcgccugguggacagcaucgucuccuggagcaaggagauccugcggacccaggaguccgagugcgugugcaucaacggcacgugcaccguggucaugaccgacgggagcgccagcggcaaggccgacaccaagauccucuucaucgaggagggcaagaucgugcacacguccacccugagcggguccgcgcagcacguggaggagugcagcugcuacccccgcuaccccggcguccggugcgugugccgcgacaacuggaagggguccaaccggccgaucguggacaucaacaucaaggacuacagcaucgccuccagcuacgucugcuccggccuggugggcgacacgccccgcaagaacgacagcuccagcuccagccacugccucgaccccaacaacgaggagggcgggcacggggugaagggcugggccuucgacgacgggaacgacgucuggaugggccggaccaucuccgagaagcugcgcagcggcuacgagaccuucaaggugaucgaggggugguccaaccccaacagcaagcugcagaucaaccggcaggucaucgugggccgcgggaaccgguccggcuacagcgggaucuucagcguggagggcaaguccugcaucaaccgcugcuucuacgucgagcucauccggggccgcaaggaggagaccgaggugcuguggaccagcaacuccaucguggucuucugcgggaccagcggcacguacgggaccggcuccuggccggacggggccgacaucaaccugaugcccaucuga

SEQ ID NO: 89854 - RNA, 1410 nt, Artificial Sequence
  derived and/or modified CDS sequence (opt1) from neuraminidase__InfluenzaA__AIW60715
augaaccccaaccagaagaucaucaccaucggcagcgugucccugaccaucagcacgaucugcuucuucaugcagaucgccauccucaucaccaccgucacccugcacuucaagcaguacgaguucaacuccccgcccaacaaccaggugaugcugugcgagcccacgaucaucgagcgcaacaucaccgagaucguguaccucaccaacaccacgaucgagaaggagaucugccccaagcuggccgaguaccggaacuggagcaagccgcagugcgacaucaccggguucgcgcccuucuccaaggacaacagcauccgccuguccgccggcggggacaucugggucacccgggagcccuacgugagcugcgaccccgacaagugcuaccaguucgcccucggccaggggaccacgcugaacaacgugcacuccaacgacaccguccgcgaccggaccccguaccgcacccugcucaugaacgagcugggcgugcccuuccaccugggcacgaagcaggucugcaucgccuggagcuccagcuccugccacgacgggaaggccuggcuccacgugugcaucaccggcgacgacaagaacgcgaccgccagcuucaucuacaacgggcggcugguggacuccaucgugagcugguccaagaagauccugcgcacccaggagagcgagugcgucugcaucaacggcacgugcaccguggugaugaccgacggguccgccagcggcaaggccgacaccaagauccucuucaucgaggagggcaagaucguccacacgagcacccuguccgggagcgcgcagcacguggaggagugcuccugcuacccccgguaccccggcgugcgcugcgucugccgggacaacuggaaggggagcaaccgcccgaucguggacaucaacaucaaggaccacuccaucgugagcuccuacgucugcagcggccuggugggcgacacgccccggaagaacgacuccagcuccagcucccacugccucgaccccaacaacgaggagggcgggcacggggugaagggcugggccuucgacgacgggaacgacgucuggaugggccgcaccaucagcgagaagucccggcugggcuacgagaccuucaaggugaucgagggguggagcaaccccaaguccaagcugcagaucaaccgccaggucaucguggaccggggcaaccgcagcggguacuccggcaucuucagcguggagggcaagagcugcaucaaccggugcuucuacgucgagcucauccgcgggcggaaggaggagaccgaggugcuguggaccuccaacagcaucguggucuucugcggcaccuccgggacguacggcaccgggagcuggccggacggcgccgacaucaaccugaugcccaucuga

SEQ ID NO: 89855 - RNA, 1410 nt, Artificial Sequence; identical to SEQ ID NO: 80535
  derived and/or modified CDS sequence (opt1) from neuraminidase__InfluenzaA__AIW60716

SEQ ID NO: 89856 - RNA, 1410 nt, Artificial Sequence
  derived and/or modified CDS sequence (opt1) from neuraminidase__InfluenzaA__AIY54970
augaaccccaaccagaagaucaucaccaucggcagcgugucccugaccaucagcacgaucugcuucuucaugcagaucgccauccucaucaccaccgucacccugcacuucaagcaguacgaguucaacuccccgcccaacaaccaggugaugcugugcgagcccacgaucaucgagcgcaacaucaccgagaucguguaccucaccaacaccacgaucgagaaggagaucugccccaagcuggccgaguaccggaacuggagcaagccgcagugcaacaucaccggguucgcgcccuucuccaaggacaacagcauccgccuguccgccggcggggacaucugggucacccgggagcccuacgugagcugcgaccccgacaagugcuaccaguucgcccucggccaggggaccacgcugaacaacgugcacuccaacgacaccguccacgaccgcaccccguaccggacccugcucaugaacgagcugggcgugcccuuccaccugggcacgaagcaggucugcaucgccuggagcuccagcuccugccacgacgggaaggccuggcuccacgugugcgugaccggcgacgacgagaacgcgaccgccagcuucaucuacaacgggcgccugguggacuccaucgucagcugguccaagaagauccugcggacccaggagagcgagugcgugugcaucaacggcacgugcaccguggucaugaccgacggguccgccagcggcaaggccgacaccaagauccucuucaucgaggagggcaagaucgugcacacgagcacccuguccgggagcgcgcagcacguggaggagugcuccugcuacccccgcuaccccggcguccggugcgugugccgcgacaacuggaaggggagcaaccggccgaucguggacaucaacaucaaggacuacuccaucgucagcuccuacgugugcagcggccuggugggcgacacgccccgcaagaccgacuccagcuccagcucccacugccucgaccccaacaacgaggagggcgggcacggggucaagggcugggccuucgacgacgggaacgaccuguggaugggccggaccaucagccagaaccugcgcuccggcuacgagaccuucaaggugaucgagggguggagcaaccccaacuccaagcuccagaucaaccggcaggucaucguggaccgcggcaaccggagcggguacuccggcaucuucagcguggagggcaagagcugcaucaaccgcugcuucuacgucgagcugauccgggggcgcaagcaggagaccgaggugcuguggaccuccaacagcaucguggucuucugcggcacguccgggaccuacggcaccgggagcuggccggacggcgccgacaucaaccucaugcccaucuga

SEQ ID NO: 89857 - RNA, 1410 nt, Artificial Sequence
  derived and/or modified CDS sequence (opt1) from neuraminidase__InfluenzaA__AIY54974
augaaccccaaccagaagaucaucaccaucggcagcgugucccugaccaucagcacgaucugcuucuucaugcagaucgccauccucaucaccaccgucacccugcacuucaagcaguacgaguucaacuccccgcccaacaaccaggugaugcugugcgagcccacgaucaucgagcgcaacaucaccgagaucguguaccucaccaacaccacgaucgagaaggagaucugccccaagcuggccgaguaccggaacuggagcaagccgcagugcgacaucaccggguucgcgcccuucuccaaggacaacagcauccgccuguccgccggcggggacaucugggucacccgggagcccuacgugagcugcgaccccgacaagugcuaccaguucgcccucggccaggggaccacgcugaacaacgugcacuccaacgacaccguccacgaccgcaccccguaccggacccugcucaugagcgagcugggcgugcccuuccaccugggcacgaagcaggucugcaucgccugguccagcuccagcugccacgacgggaaggccuggcuccacgugugcgugaccggcgacgacaagaacgcgaccgccuccuucaucuacaacgggcgccugguggacagcaucgucuccuggagcaagaagauccugcggacccaggaguccgagugcgugugcaucaacggcacgugcaccguggucaugaccgacgggagcgccagcggcaaggccgacaccaagauccucuucaucgaggagggcaagaucgugcacacguccacccugagcggguccgcgcagcacguggaggagugcagcugcuacccccgcuaccccggcguccggugcgugugccgcgacaacuggaagggguccaaccggccgaucguggacaucaacaucaaggacuacagcaucgucuccagcuacgugugcuccggccuggugggcgacacgccccgcaagaacgacagcuccagcuccagccacugccucgaccccaacaacgaggagggcgggcacggggucaagggcugggccuucgacgacgggaacgacguguggaugggccggaccaucuccgagaagcugcgcagcggcuacgagaccuucaaggucaucgaggggugguccaaccccaacagcaagcugcagaucaaccgccaggugaagguggaccggggcaaccgguccggguacagcggcaucuucagcgucgaggggaaguccugcaucaaccgcugcuucuacguggagcucauccggggccgcaaggaggagaccaaggugcuguggaccagcaacuccaucgucguguucugcggcaccagcgggacguacggcaccggguccuggccggacggcgccgacaucaaccugaugcccaucuga

SEQ ID NO: 89858 - RNA, 1410 nt, Artificial Sequence
  derived and/or modified CDS sequence (opt1) from neuraminidase__InfluenzaA__AIY54982
augaaccccaaccagaagaucaucaccaucggcagcgugucccugaccaucagcacgaucugcuucuucaugcagaucgccauccucaucaccaccgucacccugcacuucaagcaguacgaguucaacuccccgcccaacaaccaggugaugcugugcgagcccacgaucaucgagcgcaacaucaccgagaucguguaccucaccaacaccacgaucgagaaggagaucugccccaagcuggccgaguaccggaacuggagcaagccgcagugcgacaucaccggguucgcgcccuucuccaaggacaacagcauccgccuguccgccggcggggacaucugggucacccgggagcccuacgugagcugcgaccccgacaagugcuaccaguucgcccucggccaggggaccacgcugaacaacgugcacuccaacgacaccguccacgaccgcaccccguaccggacccugcucaugaacgagcugggcgugcccuuccaccugggcacgaagcaggucugcaucgccuggagcuccagcuccugccacgacgggaaggccuggcuccacgugugcgugaccggcgacgacaagaacgcgaccgccagcuucaucuacaacgggcgccugguggacuccaucgucagcugguccaaggagauccugcggacccaggagagcgagugcgugugcaucaacggcacgugcaccguggucaugaccgacggguccgccagcggcaaggccgacaccaagauccucuucaucgaggagggcaagaucgugcacacgagcacccuguccgggagcgcgcagcacguggaggagugcuccugcuacccccgcuaccccggcguccggugcgugugccgcgacaacuggaaggggagcaaccggccgaucguggacaucaacaucaaggacuacuccaucgucagcuccuacgugugcagcggccuggugggcgacacgccccgcaagaacgacuccagcuccagcucccacugccucgaccccaacaacgaggagggcgggcacggggucaagggcugggccuucgacgacgggaacgacguguggaugggccggaccaucagcgagaaguuccgcuccggcuacgagaccuucaaggucaucgagggguggagcaaccccaacuccaagcugcagaucaaccgccaggugaucguggaccggggcaaccggagcggguacuccggcaucuucagcgucgagggcaagagcugcaucaaccgcugcuucuacguggagcugauccgggggcgcaaggaggagaccgaggugcucuggaccuccaacagcaucgucguguucugcggcaccuccgggacguacggcaccgggagcuggccggacggcgccgacaucaaccugaugcccaucuga

SEQ ID NO: 89859 - RNA, 1410 nt, Artificial Sequence
  derived and/or modified CDS sequence (opt1) from neuraminidase__InfluenzaA__AIY54990
augaaccccaaccagaagaucaucaccaucggcagcgugucccugaccaucagcacgaucugcuucuucaugcagaucgccauccucaucaccaccgucacccugcacuucaagcaguacgaguucuccagcccgcccaacaaccaggugaugcugugcgagcccacgaucaucgagcgcaacaucaccgagaucguguaccucaccaacaccacgaucgagaaggagaucugccccaagcuggccgaguaccggaacugguccaagccgcagugcgggaucaccggcuucgcgcccuucagcaaggacaacuccauccgccugagcgccgggggcgacaucugggucacccgggagcccuacguguccugcgaccccgacaagugcuaccaguucgcccucgggcagggcaccacgcugaacaacgugcacagcaacgacaccguccacgaccgcaccccguaccggacccugcucaugaacgagcugggcgugcccuuccaccuggggacgaagcaggucugcaucgccugguccagcuccagcugccacgacggcaaggccuggcuccacgugugcgugaccggggacgacaagaacgcgaccgccuccuucaucuacaacggccgccugguggacagcaucgucuccuggagcaaggagauccugcggacccaggaguccgagugcgugugcaucaacgggacgugcaccguggucaugaccgacggcagcgccagcggcaaggccgacaccaagauccucuucaucgaggaggggaagaucgugcacacguccacccugagcggcuccgcgcagcacguggaggagugcagcugcuacccccgcuaccccgggguccggugcgugugccgcgacaacuggaagggcuccaaccggccgaucguggacaucaacaucaaggacuacagcaucgucucccgcuacgugugcagcggccuggugggggacacgccccggaagaacgacuccagcuccagcucccacugccucgaccccaacaacgaggagggcgggcacggcgucaaggggugggccuucgacgacggcaacgacguguggaugggccgcaccaucagcgagaagucccggagcggguacgagaccuucaaggucaucgagggcugguccaaccccaacagcaagcugcagaucaaccgccaggugaucguggaccgggggaaccgcuccggcuacagcgggaucuucagcgucgagggcaaguccugcaucaaccggugcuucuacguggagcugauccgcggccggaaggaggagaccgaggugcucuggaccagcaacuccaucgucguguucugcgggaccagcggcacguacgggaccggcuccuggccggacggggccgacaucaaccugaugcccaucuga

SEQ ID NO: 89860 - RNA, 1401 nt, Artificial Sequence
  derived and/or modified CDS sequence (opt1) from neuraminidase__InfluenzaA__AJD78177
augaaccccaaccagaagaucaucgccaucggcagcgugucccugaucaucgccgucaucugccuccugaugcagaucgcgauccugaccaccacgaugacccuccacuucaugcagaacgagugcagcaacccguccaacaaccaggugaugcccugcgagcccaucaucaucgagcgcaacaccgugcaccugaacaacaccacgaucgagcgggagaucugccccaaggccgccgaguacaagaacuggagcaagccgcagugccagaucaccggguucgcccccuucuccaaggacaacagcauccgccuguccgccggcggggacaucugggucacccgggagcccuacgugagcugcucccucgacaagugcuaccaguucgcgcugggccaggggaccacgcugaagaacaagcacagcaacggcaccacccacgaccgcacgccccaccggacccuccugaugaacgagcugggcgugccguuccaccucgggaccaagcaggucugcaucgccugguccagcuccagcugcuacgacggcaaggccuggcugcacaucugcgugaccggggacgacaagaacgccaccgcguccaucaucuacgacggcaugcugguggacagcaucggguccuggagcaagaacauccuccgcacgcaggaguccgagugcgucugcaucaacgggaccugcgccguggugaugaccgacggcagcgccagcggcaaggccgacacccggguccuguucauccgcgagggcaagaucaucaacaucagcccccuguccggguccgcccagcacguggaggagugcagcugcuacccccgguaccccgaggugcgcugcgucugccgggacaacuggaagggcuccaaccgcccgauccucuacaucaacauggcggacuacagcaucgaguccagcuacgugugcuccggccuggugggggacacgccccggaacgacgacagcuccagcuccagcaacugccgcgaccccaacaacgagcggggcgcccccggggucaagggcugggccuucgacgacgggaacgacguguggaugggccgcaccaucaagaacggcucccggagcggguacgagaccuuccgcguggucaacggcuggaccauggccaacuccaagagccagaucaaccgccaggugaucguggacuccgacgacuggagcggguacagcggcaucuucuccgucgaggggaagaagugcaucaaccggugcuucuacguggagcugauccggggccgcccgcaggagccccgcgucugguggacgagcaacuccaucaucguguucugcggcaccagcgggaccuacggcaccggguccuggcccgacggcgccaacaucaacuucaugcccaucuga

SEQ ID NO: 89861 - RNA, 1401 nt, Artificial Sequence
  derived and/or modified CDS sequence (opt1) from neuraminidase__InfluenzaA__AJD78189
augaaccccaaccagaagaucaucgccaucggcagcgugucccugaucaucgccaucaucugccuccugaugcagaucgcgauccugaccaccacgaugacccuccacuuccgccagaacgagugcaacaacagcuccaacaaccaggucaugccgugcgagcccaucaucaucgagcggaacaccgugcaccugaacagcaccacgaucgagcgcgagaucugccccaagguggccgaguacaagaacugguccaagccccagugccagaucaccggguucgccccguucagcaaggacaacuccauccggcugagcgccggcggggacaucugggucacccgcgagcccuacguguccugcagccucgacaagugcuaccaguucgcccugggccaggggaccacgcugaagaacaagcacuccaacggcaccacccacgaccggaccagccaccgcacgcuccugaugaacgagcugggcgugcccuuccaccucgggaccaagcaggucugcaucgcgugguccagcuccagcugcuacgacggcaaggccuggcugcacaucugcgugaccggggacgacaagaacgccaccgccuccaucaucuacaacggcaugcugguggacagcaucggguccuggagcaagaacauccuccggacgcaggagagcgagugcgucugcaucaacgggaccugcgcgguggugaugaccgacggcuccgccagcggcaaggccgacacccgcguccuguucauccgggagggcaagaucaucaacaucagcccccuguccggguccgcccagcacguggaggagugcagcugcuacccgcgcuaccccgaggugcggugcgucugccgcgacaacuggaagggcuccaaccggcccauccucuacaucaacauggccgacuacagcaucgaguccagcuacgugugcuccggccuggugggggacacgccccgcaacgacgacagcuccagcuccagcaacugcaaggacccgaacuccgagcggggcgcgcccggggucaagggcugggccuucgacgacgggaacgacguguggaugggccgcaccaucaagaacggcagccgguccggguacgagaccuuccgcgugcugaacggcuggaccgucgccaacagcaagagccagaucaaccgccaggugaucguggacuccgacgacuggagcggguacuccggcaucuucagcgucgaggggaagaagugcaucaaccggugcuucuacguggagcucauccggggccgcccccaggagccccgcgucugguggacguccaacagcaucaucguguucugcggcaccuccgggaccuacggcaccgggagcuggccggacggcgccaacaucaacuucaugcccaucuga

SEQ ID NO: 89862 - RNA, 1401 nt, Artificial Sequence
  derived and/or modified CDS sequence (opt1) from neuraminidase__InfluenzaA__AJD78201
augaaccccaaccagaagaucaccgccaucggcagcgugucccugaucaucgccaucaucugccuccugaugcagaucgcgauccugaccacgaccaugacccuccacuuccgccagaaggagugcagcaacccguccaacaaccaggucaugcccugcgagcccaucaucaucgagcggaacaccgugcaccugaacagcacgaccaucgagcgcgagaucugccccaagguggccgaguacaagaacugguccaagccgcagugccugaucaccggguucgcccccuucagcaaggacaacuccauccggcucagcgccggcggggacaucugggucacccgcgagcccuacguguccugcagccccgacaagugcuaccaguucgcccugggccaggggacgacccugaagaacaagcacuccaacggcaccacccacgaccggacgccgcaccgcacccuccugaugaacgagcugggcgugcccuuccaccucgggaccaagcaggucugcaucgcguggagcuccagcuccugcuacgacggcaaggccuggcugcacaucugcgugaccggggacgacaagaacgccacggccagcaucaucuacgacggcaugcugguggacuccaucgggagcugguccaagaacauccuccggacccaggagagcgagugcgucugcaucaacgggaccugcgcgguggugaugaccgacggcagcgccuccggcgucgccgacacgcgcgugcuguucauccgggagggcaagaucaucaacauccgcccccugagcggguccgcccagcacguggaggagugcagcugcuacccccgguacccggagguccgcugcgugugccgggacaacuggaagggcuccaaccgccccaucaucuacaucaacauggccgacuacagcaucgaguccagcuacgugugcuccggccucgucggggacacgccccggaacgacgacagcuccagcuccagcaacugccgcgaccccaacaacgagcggggcgcgccgggggugaagggcugggccuucgacgacgggaacgacguguggaugggccgcaccaucaagaacggcucccggagcggguacgagaccuuccgcgucaucaacggcuggaccauggccaacuccaagagccagaucaaccgccaggugaucguggacuccgacgacuggagcggguacagcggcaucuucuccgucgaggggaagaagugcaucaaccggugcuucuacguggagcugauccgcggccggccccaggagccccgcgucugguggaccagcaacuccaucaucguguucugcggcaccagcgggaccuacggcacgggguccuggcccgacggcgccaacaucaacuucaugccgaucuga

SEQ ID NO: 89863 - RNA, 1401 nt, Artificial Sequence
  derived and/or modified CDS sequence (opt1) from neuraminidase__InfluenzaA__AJD78213
augaaccccaaccagaagaucaccgccaucggcagcgugucccugaucaucgccaucaucugccucuucaugcagaucgcgauccugaccacgaccaugacccugcacuuccgccagaaggagugcagcaacccguccaacaaccaggucaugcccugcgagcccaucaucaucgagcggaacaccgugcaccucaacagcacgaccaucgagcgcgagaucugccccaagguggccgaguacaagaacugguccaagccgcagugccugaucaccggguucgcccccuucagcaaggacaacuccauccggcugagcgccggcggggacaucugggucacccgcgagcccuacguguccugcagccccgacaagugcuaccaguucgcccucggccaggggacgacccugaagaacaagcacuccaacggcaccacccacgaccggacgccgcaccgcacccugcucaugaacgagcugggcgugcccuuccaccuggggaccaagcaggucugcaucgcguggagcuccagcuccugcuacgacggcaaggccuggcuccacaucugcgugaccggggacgacaagaacgccacggccagcaucaucuacgacggcaugcugguggacuccaucgggagcugguccaagaacauccugcggacccaggagagcgagugcgucugcaucaacgggaccugcgcgguggugaugaccgacggcagcgccuccggcgucgccgacacgcgcguccucuucauccgggagggcaagaucaucaacauccgcccccugagcggguccgcccagcacguggaggagugcagcugcuacccccgguacccggaggugcgcugcgugugccgggacaacuggaagggcuccaaccgccccaucaucuacaucaacauggccgacuacagcaucgaguccagcuacgugugcuccggccuggucggggacacgccccggaacgacgacagcuccagcuccagcaacugccgcgaccccaacaacgagcggggcgcgccgggggugaagggcugggccuucgacgacgggaacgacguguggaugggccgcaccaucaagaacggcucccggagcggguacgagaccuuccgcgucaucaacggcuggaccauggccaacuccaagagccagaucaaccgccaggugaucguggacuccgacgacuggagcggguacagcggcaucuucuccgucgaggggaagaagugcaucaaccggugcuucuacguggagcucauccgcggccggccccaggagccccgcgucugguggaccagcaacuccaucaucguguucugcggcaccagcgggaccuacggcacgggguccuggcccgacggcgccaacaucaacuucaugccgaucuga

SEQ ID NO: 89864 - RNA, 1410 nt, Artificial Sequence; identical to SEQ ID NO: 86946
  derived and/or modified CDS sequence (opt1) from neuraminidase__InfluenzaA__AJI80140

SEQ ID NO: 89865 - RNA, 1410 nt, Artificial Sequence; identical to SEQ ID NO: 86946
  derived and/or modified CDS sequence (opt1) from neuraminidase__InfluenzaA__AJI80152

SEQ ID NO: 89866 - RNA, 1410 nt, Artificial Sequence; identical to SEQ ID NO: 89722
  derived and/or modified CDS sequence (opt1) from neuraminidase__InfluenzaA__AJI80164

SEQ ID NO: 89867 - RNA, 1410 nt, Artificial Sequence; identical to SEQ ID NO: 89661
  derived and/or modified CDS sequence (opt1) from neuraminidase__InfluenzaA__AJI80175

SEQ ID NO: 89868 - RNA, 1410 nt, Artificial Sequence; identical to SEQ ID NO: 89661
  derived and/or modified CDS sequence (opt1) from neuraminidase__InfluenzaA__AJI80187

SEQ ID NO: 89869 - RNA, 1410 nt, Artificial Sequence; identical to SEQ ID NO: 89661
  derived and/or modified CDS sequence (opt1) from neuraminidase__InfluenzaA__AJI80199

SEQ ID NO: 89870 - RNA, 1410 nt, Artificial Sequence; identical to SEQ ID NO: 89661
  derived and/or modified CDS sequence (opt1) from neuraminidase__InfluenzaA__AJI80211

SEQ ID NO: 89871 - RNA, 1410 nt, Artificial Sequence; identical to SEQ ID NO: 87895
  derived and/or modified CDS sequence (opt1) from neuraminidase__InfluenzaA__AJI80223

SEQ ID NO: 89872 - RNA, 1410 nt, Artificial Sequence; identical to SEQ ID NO: 89661
  derived and/or modified CDS sequence (opt1) from neuraminidase__InfluenzaA__AJI80235

SEQ ID NO: 89873 - RNA, 1410 nt, Artificial Sequence; identical to SEQ ID NO: 87895
  derived and/or modified CDS sequence (opt1) from neuraminidase__InfluenzaA__AJI80247

SEQ ID NO: 89874 - RNA, 1410 nt, Artificial Sequence; identical to SEQ ID NO: 89680
  derived and/or modified CDS sequence (opt1) from neuraminidase__InfluenzaA__AJI80259

SEQ ID NO: 89875 - RNA, 1410 nt, Artificial Sequence; identical to SEQ ID NO: 86170
  derived and/or modified CDS sequence (opt1) from neuraminidase__InfluenzaA__AJI80271

SEQ ID NO: 89876 - RNA, 1410 nt, Artificial Sequence; identical to SEQ ID NO: 89661
  derived and/or modified CDS sequence (opt1) from neuraminidase__InfluenzaA__AJI80283

SEQ ID NO: 89877 - RNA, 1410 nt, Artificial Sequence
  derived and/or modified CDS sequence (opt1) from neuraminidase__InfluenzaA__AJI80306
augaaccccaaccagaagaucaucaccaucggcagcgugucccugaccaucagcacgaucugcuucuucaugcagaucgccauccucaucaccaccgucacccugcacuucaagcaguacgaguucaacuccccgcccaacaaccaggugaugcugugcgagcccacgaucaucgagcgcaacaucaccgagaucguguaccucaccaacaccacgaucgagaaggagaucugccccaagccggccgaguaccggaacuggagcaagccccagugcgggaucaccggcuucgcgcccuucuccaaggacaacagcauccgccuguccgccgggggcgacaucugggucacccgggagcccuacgugagcugcgacccggacaagugcuaccaguucgcccuggggcagggcaccacgcucaacaacgugcacuccaacaacaccguccuggaccgcacccccuaccggacccugcucaugaacgagcugggcgugcccuuccaccuggggacgaagcaggucugcaucgccuggagcuccagcuccugccacgacggcaaggccuggcuccacgugugcaucaccggggacgacaagaacgcgaccgccagcuucaucuacaacggccgccugguggacuccguggucagcugguccaaggagauccugcggacccaggagagcgagugcgugugcaucaacgggacgugcaccguggucaugaccgacggcuccgccagcggcaaggccgacaccaagauccucuucaucgaggaggggaagaucgugcacacgagcacccuguccggcagcgcgcagcacguggaggagugcuccugcuacccccgcuacccggggguccggugcgugugccgcgacaacuggaagggcagcaaccggcccaucguggacaucaacaucaaggaccacuccaucgucagcuccuacgugugcagcggccuggugggggacaccccgcgcaagaacgacuccagcuccagcucccacugccucgaccccaacaacgaggagggcgggcacggcgucaaggggugggccuucgacgacggcaacgacguguggaugggccggaccaucaacgagacgagccgccugggguacgagaccuucaaggucaucgagggcugguccaaccccaagagcaagcugcagaucaacaagcaggucaucguggaccgcggggaccgguccggcuacagcgggaucuucuccguggagggcaagagcugcaucaaccggugcuucuacguggagcucauccgcggccggaaggaggagaccgaggugcuguggaccagcaacuccaucgucguguucugcgggacgagcggcaccuacgggaccggcuccuggcccgacggggccgaccugaaccucaugcccaucuga

SEQ ID NO: 89878 - RNA, 1410 nt, Artificial Sequence
  derived and/or modified CDS sequence (opt1) from neuraminidase__InfluenzaA__AJI80318
augaaccccaaccagaagaucaucaccaucggcagcgugugcaugaccaucgggauggccaaccugauccuccagaucggcaacaucaucuccaucuggaucagccacuccauccagcuggggaaccagagccagaucgaggccugcaaccagaacgucaucacguacgagaacaacaccugggugaaccagaccuacgugaacaucuccaacaccaacuucgcgacgggccagagcgucguguccgugaagcuggccgggaacagcucccucugcccggucagcggcugggccaucuacuccaaggacaacagcgugcgcaucggcuccaagggggacguguucgucauccgggagcccuucaucagcugcagcccccuggagugccgcaccuucuuccugacccagggcgcccuccugaacgacaagcacuccaacgggaccaucaaggaccggucccccuaccgcacgcugaugagcugcccgaucggcgaggugcccucccccuacaacagccgguucgagagcguggccugguccgcgagcgccugccacgacgggaucaacuggcucaccaucggcaucuccggccccgacagcggggccgucgccgugcugaaguacaacggcaucaucaccgacaccaucaaguccuggaagaacaacauccugcgcacgcaggagagcgagugcgcgugcgugaacggguccugcuucaccaucaugaccgacggcccgagcgacggccaggccuccuacaagaucuuccggaucgagaaggggaagaucgucaagagcguggagaugaacgcccccaacuaccacuacgaggagugcuccugcuaccccgacagcuccgagaucacgugcgugugccgcgacaacuggcacggcagcaaccggcccugggucuccuucaaccagaaccucgaguaccagaucggguacaucugcagcggcguguucggggacaacccgcgccccaacgacaagaccggcuccugcggccccgugagcuccaacggggccaacggcgucaagggguucagcuucaaguacggcaacgggguguggaucggccggaccaagagcaucuccagccgcaagggcuucgagaugaucugggaccccaacggguggaccggcaccgacaacaacuucuccaucaagcaggacaucguggggaucaacgaguggagcggcuacuccgggagcuucguccagcacccggagcugacgggccuggacugcauccggcccugcuucuggguggagcucauccgcggccggcccaaggagaacaccaucuggaccuccgggagcuccaucagcuucugcggcgucaacuccgacaccgugggguggagcuggcccgacggcgccgagcugccguucacgaucgacaaguga

SEQ ID NO: 89879 - RNA, 1410 nt, Artificial Sequence
  derived and/or modified CDS sequence (opt1) from neuraminidase__InfluenzaA__AJI80329
augaaccccaaccagaagaucaucaccaucggcagcgugugcaugaccaucgggauggccaaccugauccuccagaucggcaacaucaucuccaucuggaucagccacuccauccagcuggggaaccagagccagaucgagacgugcaaccaguccgucaucaccuacgagaacaacaccugggugaaccagaccuacgugaacaucagcaacacgaacuucgccgcgggccaguccgucgugagcgugaagcuggccgggaacuccagccucugcccggucuccggcugggccaucuacagcaaggacaacuccgugcgcaucggcagcaagggggacguguucgucauccgggagcccuucaucuccugcagcccccuggagugccgcaccuucuuccugacccagggcgcccuccugaacgacaagcacuccaacgggaccaucaaggaccggagccccuaccgcacgcugauguccugcccgaucggcgaggugcccagccccuacaacagccgguucgaguccguggccuggagcgcguccgccugccacgacgggaucaacuggcucaccaucggcaucagcggccccgacuccggggccgucgccgugcugaaguacaacggcaucaucaccgacaccaucaagagcuggaagaacaacauccugcgcacgcaggaguccgagugcgcgugcgugaacgggagcugcuucaccaucaugaccgacggcccguccgacggccaggccagcuacaagaucuuccggaucgagaaggggaagaucgucaaguccguggagaugaacgcccccaacuaccacuacgaggagugcagcugcuaccccgacuccagcgagaucacgugcgugugccgcgacaacuggcacggcuccaaccggcccugggucagcuucaaccagaaccucgaguaccagaucggguacaucugcuccggcguguucggggacaacccgcgccccaacgacaagaccggcagcugcggccccguguccagcaacggggccaacggcgucaagggguucagcuucaaguacggcaacgggguguggaucggccggaccaaguccaucagcucccgcaagggcuucgagaugaucugggaccccaacggguggaccggcaccgacaacaacuucagcaucaagcaggacaucguggggaucaacgagugguccggcuacagcggguccuucguccagcacccggagcugacgggccuggacugcauccggcccugcuucuggguggagcucauccgcggccggcccaaggagaacaccaucuggaccagcggguccagcaucuccuucugcggcgucaacagcgacaccguggggugguccuggcccgacggcgccgagcugccguucacgaucgacaaguga

SEQ ID NO: 89880 - RNA, 1410 nt, Artificial Sequence
  derived and/or modified CDS sequence (opt1) from neuraminidase__InfluenzaA__AJI80340
augaaccccaaccagaagaucaucaccaucggcagcgugugcaugaccaucgggauggccaaccugauccuccagaucggcaacaucaucuccaucuggaucagccacuccauccagcuggggaaccagagccagaucgagacgugcaaccaguccgucaucaccuacgagaacaacaccugggugaaccagaccuacgugaacaucagcaacacgaacuucgccgcgggccaguccgucgugagcgugaagcuggccgggaacuccagccucugcccggucuccggcugggccaucuacagcaaggacaacuccauccgcaucggcagcaagggggacguguucgugauccgggagcccuucaucuccugcagcccccuggagugccgcaccuucuuccugacccagggcgcccuccugaacgacaagcacuccaacgggaccaucaaggaccggagccccuaccgcacgcugauguccugcccgaucggcgagguccccagccccuacaacagccgguucgaguccguggccuggagcgcguccgccugccacgacgggaucaacuggcucaccaucggcaucagcggccccgacuccggggccguggccguccugaaguacaacggcaucaucaccgacaccaucaagagcuggaagaacaacauccugcgcacgcaggaguccgagugcgcgugcgugaacgggagcugcuucaccaucaugaccgacggcccguccgacggccaggccagcuacaagaucuuccggaucgagaaggggaagaucgugaaguccgucgagaugaacgcccccaacuacuacuacgaggagugcagcugcuaccccgacuccagcgagaucacgugcgugugccgcgacaacuggcacggcuccaaccggcccugggugagcuucaaccagaaccucgaguaccagaucggguacaucugcuccggcaucuucggggacaacccgcgccccaacgacaagaccggcagcugcggccccgucuccagcaacggggccaacggcgugaagggguucagcuucaaguacggcaacgggguguggaucggccggaccaaguccaucagcucccgcaagggcuucgagaugaucugggaccccaacggguggaccggcaccgacaacaacuucagcaucaagcaggacaucgucgggaucaacgagugguccggcuacagcggguccuucgugcagcacccggagcugacgggccuggacugcauccggcccugcuucuggguggagcucauccgcggccggcccaaggagaacaccaucuggaccagcggguccagcaucuccuucugcggcgucaacagcgacaccguggggugguccuggcccgacggcgccgagcugccguucacgaucgacaaguga

SEQ ID NO: 89881 - RNA, 1410 nt, Artificial Sequence; identical to SEQ ID NO: 86170
  derived and/or modified CDS sequence (opt1) from neuraminidase__InfluenzaA__AJI80351

SEQ ID NO: 89882 - RNA, 1410 nt, Artificial Sequence
  derived and/or modified CDS sequence (opt1) from neuraminidase__InfluenzaA__AJI80363
augaaccccaaccagaagaucaucaccaucggcagcgugucccugaccaucagcacgaucugcuucuucaugcagaucgccauccucaucaccaccgucacccugcacuucaagcaguacgaguucaacucccugccgaacaaccaggugaugcucugcgagcccacgaucaucgagcgcaacaucaccgagaucguguaccugaccaacaccacgaucgagaaggagaucugccccaagcccgccgaguaccggaacuggagcaagccgcagugcgggaucaccggcuucgcgcccuucuccaaggacaacagcauccgccuguccgccgggggcgacaucugggucacccgggagcccuacgugagcugcgaccccgacaagugcuaccaguucgcccucgggcagggcaccacgcugaacaacgugcacuccaacaacaccgcccgcgaccggaccccguaccgcacccugcucaugaacgagcugggcguccccuuccaccuggggacgaagcaggucugcaucgccuggagcuccagcuccugccacgacggcaaggcguggcuccacgugugcaucaccggggacgacaagaacgccaccgccagcuucaucuacaacggccggcugguggacuccguggugagcugguccaaggagauccugcgcacccaggagagcgagugcgucugcaucaacgggacgugcaccguggugaugaccgacggcuccgccagcggcaaggcggacaccaagauccucuucaucgaggaggggaagaucguccacacgagcacccuguccggcggggcccagcacguggaggagugcagcugcuacccccgguaccccggcgugcgcugcgucugccgggacaacuggaagggcuccaaccgcccgaucguggacaucaacaucaaggaccacagcaucguguccagcuacgucugcuccgggcuggugggcgacacgccccggaagaacgacagcuccagcuccagccacugccucaaccccaacaacgaggagggcgggcacggggugaagggcugggccuucgacgacggcaacgacgucuggauggggcgcaccaucaacgagaccucccggcugggcuacgagaccuucaaggugaucgagggguggagcaaccccaaguccaagcugcagaucaaccgccaggucaucguggaccggggcgaccgcagcggguacuccggcaucuucagcguggagggcaaguccugcaucaaccggugcuucuacgucgagcucauccgcgggcggaaggaggagaccgaggugcuguggaccagcaacagcaucguggucuucugcggcacguccgggaccuacggcaccgggagcuggccggacggcgccgaccugaaccucaugcccaucuga

SEQ ID NO: 89883 - RNA, 1410 nt, Artificial Sequence
  derived and/or modified CDS sequence (opt1) from neuraminidase__InfluenzaA__AJI80375
augaaccccaaccagaagaucaucaccaucggcagcgugucccugaccaucagcacgaucugccucuucaugcagaucgccauccugaucaccaccgucacccugcacuucaagcagcacgaguucaacuccccgcccaacaaccaggugaugcucugcgagcccacgaucaucgagcgcaacaucaccgagaucguguaccugaccaacaccacgaucgagaaggagaucugccccaagccggccgaguaccggaacuggagcaagccccagugcgggaucaccggcuucgcgcccuucuccaaggacaacagcauccgccuguccgccgggggcgacaucugggucacccgggagcccuacgugagcugcgacccggacaagugcuaccaguucgcccucgggcagggcaccacgcugaacaacgugcacuccaacaacaccguccgcgaccggacccccuaccgcacccugcucaugaacgagcugggcgugcccuuccaccuggggacgaagcaggucugcaucgccuggagcuccagcuccugccacgacggcaaggccuggcuccacgugugcaucaccggggacgacaagaacgcgaccgccagcuucaucuacaacggccggcugguggacuccguggucagcugguccaaggagauccugcgcacccaggagagcgagugcgugugcaucaacgggacgugcaccguggucaugaccgacggcuccgccagcggcaaggccgacaccaagauccucuucaucgaggaggggaagaucgugcacacgagcacccuguccggcagcgcgcagcacguggaggagugcuccugcuacccccgguacccggggguccgcugcgugugccgggacaacuggaagggcagcaaccgccccaucguggacaucaacaucaaggaccacuccaucgucagcuccuacgugugcagcggccuggugggggacaccccgcggaagaacgacuccagcuccagcucccacugccucgaccccaacaacgaggagggcgggcacggcgucaaggggugggccuucgacgacggcaacgacguguggaugggccgcaccaucaacgagacgagccggcugggguacgagaccuucaaggucaucgagggcugguccaaccccaagagcaagcugcagaucaaccgccaggugaucguggaccgcggggaccgguccggcuacagcgggaucuucuccgucgagggcaagagcugcaucaaccggugcuucuacguggagcucauccgcggccggaaggaggagaccgaggugcuguggaccagcaacuccaucgucguguucugcgggacgagcggcaccuacgggaccggcuccuggcccgacggggccgaccugaaccucaugcccaucuga

SEQ ID NO: 89884 - RNA, 1410 nt, Artificial Sequence; identical to SEQ ID NO: 89700
  derived and/or modified CDS sequence (opt1) from neuraminidase__InfluenzaA__AJI80387

SEQ ID NO: 89885 - RNA, 1410 nt, Artificial Sequence; identical to SEQ ID NO: 89700
  derived and/or modified CDS sequence (opt1) from neuraminidase__InfluenzaA__AJI80398

SEQ ID NO: 89886 - RNA, 1410 nt, Artificial Sequence; identical to SEQ ID NO: 89700
  derived and/or modified CDS sequence (opt1) from neuraminidase__InfluenzaA__AJI80409

SEQ ID NO: 89887 - RNA, 1410 nt, Artificial Sequence; identical to SEQ ID NO: 89700
  derived and/or modified CDS sequence (opt1) from neuraminidase__InfluenzaA__AJI80420

SEQ ID NO: 89888 - RNA, 1410 nt, Artificial Sequence; identical to SEQ ID NO: 89700
  derived and/or modified CDS sequence (opt1) from neuraminidase__InfluenzaA__AJI80431

SEQ ID NO: 89889 - RNA, 1410 nt, Artificial Sequence; identical to SEQ ID NO: 89695
  derived and/or modified CDS sequence (opt1) from neuraminidase__InfluenzaA__AJI80442

SEQ ID NO: 89890 - RNA, 1410 nt, Artificial Sequence; identical to SEQ ID NO: 89700
  derived and/or modified CDS sequence (opt1) from neuraminidase__InfluenzaA__AJI80454

SEQ ID NO: 89891 - RNA, 1410 nt, Artificial Sequence; identical to SEQ ID NO: 89695
  derived and/or modified CDS sequence (opt1) from neuraminidase__InfluenzaA__AJI80465

SEQ ID NO: 89892 - RNA, 1410 nt, Artificial Sequence; identical to SEQ ID NO: 89700
  derived and/or modified CDS sequence (opt1) from neuraminidase__InfluenzaA__AJI80477

SEQ ID NO: 89893 - RNA, 1410 nt, Artificial Sequence; identical to SEQ ID NO: 89700
  derived and/or modified CDS sequence (opt1) from neuraminidase__InfluenzaA__AJI80488

SEQ ID NO: 89894 - RNA, 1410 nt, Artificial Sequence; identical to SEQ ID NO: 89722
  derived and/or modified CDS sequence (opt1) from neuraminidase__InfluenzaA__AJI80499

SEQ ID NO: 89895 - RNA, 1410 nt, Artificial Sequence; identical to SEQ ID NO: 89700
  derived and/or modified CDS sequence (opt1) from neuraminidase__InfluenzaA__AJI80510

SEQ ID NO: 89896 - RNA, 1410 nt, Artificial Sequence; identical to SEQ ID NO: 89722
  derived and/or modified CDS sequence (opt1) from neuraminidase__InfluenzaA__AJI80521

SEQ ID NO: 89897 - RNA, 1410 nt, Artificial Sequence
  derived and/or modified CDS sequence (opt1) from neuraminidase__InfluenzaA__AJJ98767
augaaccccaaccagaagaucaucaccaucggcagcgugucccugaccaucagcacgaucugcuucuucaugcagaucgccauccucaucaccaccgucacccugcacuucaagcaguacgaguucaacuccccgagcaacaaccaggugaugcugugcgagcccacgaucaucgagcgcaacaucaccgagaucguguaccucaccaacaccacgaucgagaaggagaagugccccaagcccgccgaguaccggaacugguccaagccgcagugcgacaucaccggguucgcgcccuucagcaaggacaacuccauccgccugagcgccggcggggacaucugggucacccgggagcccuacguguccugcgaccccgacaagugcuaccaguucgcccugggccaggggaccacgcucaacaacgugcacagcaacaacaccguccgcgaccggaccccguaccgcacccugcugaugaacgagcucggcgugcccuuccaccugggcacgaagcaggucugcaucgccugguccagcuccagcugccacgacgggaaggccuggcugcacgugugcaucaccggcgacgacaagaacgcgaccgccuccuucaucuacaacgggcggcucguggacagcguggucuccuggagcaaggagauccugcgcacccaggaguccgagugcgugugcaucaacggcacgugcaccguggucaugaccgacgggagcgccagcggcaaggccgacaccaagauccuguucaucgaggagggcaagaucgugcacacguccacccucagcggguccgcgcagcacguggaggagugcagcugcuacccccgguaccccggcguccgcugcgugugccgggacaacuggaagggguccaaccgcccgaucguggacaucaacaucaaggaccacagcaucgucuccagcuacgugugcuccggccuggugggcgacacgccccggaagaacgacagcuccagcuccagccacugccuggaccccaacaacgaggagggcgggcacggggucaagggcugggccuucgacgacggggacgacguguggaugggccgcaccaucuccgagaagucccggcucggcuacgagaccuucaaggucaucgagggguggagcaaccccaagagcaagcugcagaucaaccgccaggugaucguggaccggggcaaccgcuccggguacagcggcaucuucagcgucgaggggaaguccugcaucaaccggugcuucuacguggagcugauccgcggccggaaggaggagaccgacgugcucuggaccagcaacuccaucgucguguucugcggcaccagcgggacguacggcaccggguccuggccggacggcgccgacaucaaccugaugcccaucuga

SEQ ID NO: 89898 - RNA, 1410 nt, Artificial Sequence
  derived and/or modified CDS sequence (opt1) from neuraminidase__InfluenzaA__AJJ98779
augaaccccaaccagaagaucaucaccaucggcagcgugucccugaccaucagcacgaucugcuucuucaugcagaccgccauccucaucaccaccgucacgcugcacuucaagcaguacgaguucaacuccccgcccaacaaccaggugaugcugugcgagcccaccaucaucgagcgcaacaucaccgagaucguguaccucaccaacacgaccaucgagaaggagaucugccccaagccggccgaguaccggaacuggagcaagccccagugcgacaucaccggguucgcgcccuucuccaaggacaacagcauccgccuguccgccggcggggacaucugggucacccgggagcccuacgugagcugcgacccggacaagugcuaccaguucgcccugggccaggggacgacccucaacaacgugcacuccaacgacaccguccgcgaccggacccccuaccgcacgcugcugaugaacgagcucggcgugcccuuccaccugggcaccaagcaggucugcaucgccuggagcuccagcuccugccacgacgggaaggccuggcugcacgugugcaucaccggcgacgacaagaacgcgaccgccagcuucaucuacaacgggcggcucguggacuccaucgugagcuggacgaaggagauccugcgcacccaggaguccgagugcgucugcaucaacgggaccugcaccguggugaugacggacgggagcgccuccggcaaggccgacaccaagauccuguucaucgaggagggcaagaucguccacaccagcacccucagcggguccgcgcagcacguggaggagugcagcugcuacccccgguacccgggcgugcgcugcgucugccgggacaacuggaagggguccaaccgccccaucguggacaucaacaucaaggaccacagcaucguguccagcuacgucugcuccggccuggugggcgacacgccccggaagaacgacagcuccagcuccagccacugccuggaccccaacaacgaggagggcggccacggggugaagggcugggccuucgacgacgggaacgacgucuggaugggccgcaccaucuccgagaagucccggcucggcuacgagaccuucaaggugaucgagggguggagcaaccccaagagcaagcugcagaucaaccgccaggucaucguggaccggggcaaccgcuccggguacagcggcaucuucuccguggagggcaagagcugcaucaaccggugcuucuacgucgagcugauccgcgggcggaaggaggagaccgaggugcucuggacgagcaacuccaucguggucuucugcggcaccagcgggaccuacggcaccggguccuggccggacggcgccgacaucaaccugaugcccaucuga

SEQ ID NO: 89899 - RNA, 1410 nt, Artificial Sequence; identical to SEQ ID NO: 86170
  derived and/or modified CDS sequence (opt1) from neuraminidase__InfluenzaA__AJJ98791

SEQ ID NO: 89900 - RNA, 1410 nt, Artificial Sequence
  derived and/or modified CDS sequence (opt1) from neuraminidase__InfluenzaA__AJJ98803
augaaccccaaccagaagaucaucaccaucggcagcgugucccugaccaucagcacgaucugcuucuucaugcagaucgccauccucaucaccaccgucacccugcacuucaagcaguacgaguucaacuccccgcccaacaaccaggugaugcugugcgagcccacgaucaucgagcgcaacaucaccgagaucguguaccucaccaacaccacgaucgagaaggagaucugccccaagccggccgaguaccggaacuggagcaagccccagugcgggaucaccggcuucgcgcccuucuccaaggacaacagcauccgccuguccgccgggggcgacaucugggucacccgggagcccuacgugagcugcgacccggacaagugcuaccaguucgcccuggggcagggcaccacgcucaacaacgugcacuccaacaacaagguccgcgaccggacccccuaccgcacccugcugaugaacgagcucggcgugcccuuccaccuggggaccaagcaggucugcaucgccuggagcuccagcuccugccacgacggcaaggccuggcugcacgugugcaucacgggggacgacaagaacgcgaccgccagcuucaucuacaacggccggcucguggacuccguggucagcugguccaaggagauccugcgcacccaggagagcgagugcgugugcaucaacgggaccugcacgguggucaugaccgacggcuccgccagcggcaaggccgacaccaagauccuguucaucgaggaggggaagaucgugcacaccagcacgcucuccggcagcgcgcagcacguggaggagugcuccugcuacccccgguacccggggguccgcugcgugugccgggacaacuggaagggcagcaaccgccccaucguggacaucaacaucaaggaccacuccaucgucagcuccuacgugugcagcggccuggugggggacaccccgcggaagaacgacuccagcuccagcucccacugccuggaccccaacaacgaggagggcgggcacggcgucaaggggugggccuucgacgacggcaacgacguguggaugggccgcaccaucaacgagaccagccggcucggguacgagacguucaaggucaucgagggcugguccaaccccaagagcaagcugcagaucaaccgccaggugaucguggaccgcggggaccgguccggcuacagcgggaucuucuccgucgagggcaagagcugcaucaaccggugcuucuacguggagcugauccgcggccggaaggaggagaccgaggugcucuggaccagcaacuccaucgucguguucugcgggaccagcggcacguacgggaccggcuccuggcccgacggggccgaccugaaccugaugcccaucuga

SEQ ID NO: 89901 - RNA, 1410 nt, Artificial Sequence; identical to SEQ ID NO: 86170
  derived and/or modified CDS sequence (opt1) from neuraminidase__InfluenzaA__AJJ98815

SEQ ID NO: 89902 - RNA, 1410 nt, Artificial Sequence
  derived and/or modified CDS sequence (opt1) from neuraminidase__InfluenzaA__AJJ98827
augaaccccaaccagaagaucaucaccaucggcagcgugucccugaccaucagcacgaucugcuucuucaugcagaucgccauccucaucaccaccgucacccugcacuucaagcaguacgaguucaacuccccgcccaacaaccaggugaugcugugcgagcccacgaucaucgagcgcaacaucaccgagaucguguaccucaccaacaccacgaucgagaaggagaucugccccaagccggccgaguaccggaacuggagcaagccccagugcgggaucaccggcuucgcgcccuucuccaaggacaacagcauccgccuguccgccgggggcgacaucugggucacccgggagcccuacgugagcugcgacccggacaagugcuaccaguucgcccuggggcagggcaccacgcucaacaacgugcacuccaacaacaccguccgcgaccggacccccuaccgcacccugcugaugaacgagcucggcgugcccuuccaccuggggacgaagcaggucugcaucgccuggagcuccagcuccugccacgacggcaaggccuggcugcacgugugcaucaccggggacgacaagaacgcgaccgccagcuucaucuacaacggccggcucguggacuccguggucagcugguccaaggagauccugcgcacccaggagagcgagugcgugugcaucaacgggacgugcaccguggucaugaccgacggcuccgccagcggcaaggccgacaccaagauccuguucaucgaggaggggaagaucgugcacacgagcacccucuccggcagcgcgcagcacguggaggagugcuccugcuacccccgguacccggggguccgcugcgugugccgggacaacuggaagggcagcaaccgccccaucguggacaucaacaucaaggaccacaacaucgucuccagcuacgugugcuccggccuggugggggacacgccccggaagaacgacagcuccagcuccagccacugccuggaccccaacaacgaggagggcgggcacggcgucaaggggugggccuucgacgacggcaacgacguguggaugggccgcaccaucaacgagaccucccggcucggguacgagaccuucaaggucaucgagggcuggagcaacccgaaguccaagcugcagaucaaccgccaggugaucguggaccgcggggaccggagcggcuacuccgggaucuucagcgucgagggcaaguccugcaucaaccggugcuucuacguggagcugauccgcggccggaaggaggagaccgaggugcucuggaccagcaacagcaucgucguguucugcgggacguccggcaccuacgggaccggcagcuggcccgacggggccgaccugaaccugaugcccaucuga

SEQ ID NO: 89903 - RNA, 1410 nt, Artificial Sequence; identical to SEQ ID NO: 85167
  derived and/or modified CDS sequence (opt1) from neuraminidase__InfluenzaA__AJJ98839

SEQ ID NO: 89904 - RNA, 1410 nt, Artificial Sequence; identical to SEQ ID NO: 83542
  derived and/or modified CDS sequence (opt1) from neuraminidase__InfluenzaA__AJJ98851

SEQ ID NO: 89905 - RNA, 1410 nt, Artificial Sequence
  derived and/or modified CDS sequence (opt1) from neuraminidase__InfluenzaA__AJJ98863
augaaccccaaccagaagaucaucaccaucggcagcgugucccugaccaucagcacgaucugcuucuucaugcagaucgccauccucaucaccaccgucacccugcacuucaagcaguacgaguucaacuccccgcccaacaaccaggugaugcugugcgagcccacgaucaucgagcgcaacaucaccgagaucguguaccucaccaacaccacgaucgagaaggagaucugccccaagccggccgaguaccggaacuggagcaagccccagugcgacaucaccggguucgcgcccuucuccaaggacaacagcauccgccuguccgccggcggggacaucugggucacccgggagcccuacgugagcugcgacccggacaagugcuaccaguucgcccugggccaggggaccacgcucaacaacgugcacuccaacaacaccguccgcgagcggacccccuaccgcacccugcugaugaacgagcucggcgugcccuuccaccugggcacgaagcaggucugcaucgccuggagcuccagcuccugccacgacgggaaggccuggcugcacgugugcaucaccggcgacgacaagaacgcgaccgccagcuucaucuacaacgggcggcucguggacuccguggucagcugguccaaggagauccugcgcacccaggagagcgagugcaucugcaucaacggcacgugcaccguggugaugaccgacggguccgccagcggcaaggccgacaccaagauccuguucaucgaggagggcaagaucguccacacgagcacccucuccgggagcgcgcagcacguggaggagugcuccugcuacccccgguacccgggcgugcgcugcgucugccgggacaacuggaaggggagcaaccgccccaucguggacaucaacaugaaggaccacuccaucgugagcuccuacgucugcagcggccuggugggcgacacgccccggaagaacgacuccagcuccagcucccacugccuggaccccaacaacgaggagggcgggcacggggugaagggcugggccuucgacgacgggaacgacgucuggaugggccgcaccaucagcgagaagucccggcucggcuacgagaccuucaaggugaucgagggguggagcaacccgaaguccaagcugcagaucaaccgccaggucaucguggaccggggcaaccgcagcggguacuccggcaucuucagcguggagggcaagagcugcaucaaccggugcuucuacgucgagcugauccgcgggcggaaggaggagaccgaggugcucuggaccuccaacagcaucguggucuucugcggcaccuccgggacguacggcaccgggagcuggcccgacggcgccgacaucaaccugaugcccaucuga

SEQ ID NO: 89906 - RNA, 1410 nt, Artificial Sequence
  derived and/or modified CDS sequence (opt1) from neuraminidase__InfluenzaA__AJJ98875
augaaccccaaccagaagaucaucaccaucggcagcgugucccugaccaucagcacgaucugcuucuucaugcagaucgccauccucaucaccaccgucacccugcacuucaagcaguacgaguucaacuccccgcccaacaaccaggugaugcugugcgagcccacgaucaucgagcgcaacaucaccgagaucguguaccucaccaacaccacgaucgagaaggagaucugccccaagccggccgaguaccggaacuggagcaagccccagugcgacaucaccggguucgcgcccuucuccaaggacaacagcauccgccuguccgccggcggggacaucugggucacccgggagcccuacgugagcugcgacccggacaagugcuaccaguucgcccugggccaggggaccacgcucaacaacgugcacuccaacgacaccguccgcaaccggacccccuaccgcacccugcugaugaacgagcucggcgugcccuuccaccugggcacgaagcaggucugcaucgccuggagcuccagcuccugccacgacgggaaggccuggcugcacgugugcaucaccggcgacgacaagaacgcgaccgccagcuucaucuacaacgggcggcucguggacuccguggucagcugguccaaggagauccugcgcacccaggagagcgagugcgugugcaucaacggcacgugcaccguggucaugaccgacggguccgccagcggcaaggccgacaccaagauccuguucaucgaggagggcaagaucgugcacacgagcacccucuccgggagcgcgcagcacguggaggagugcuccugcuacccccgguacccgggcguccgcugcgugugccgggacaacuggaaggggagcaaccgccccaucguggacaucaacaucaaggaccacuccaucgucagcuccuacgugugcagcggccuggugggcgacacgccccggaagaacgacuccagcuccagcucccacugccuggaccccaacaacgaggagggcgggcacggggucaagggcugggccuucgacgacgggaacgacguguggaugggccgcaccaucagcgagaagucccggcucggcuacgagaccuucaaggucaucgagggguggagcaacccgaaguccaagcugcagaucaaccgccaggugaucguggaccggggcaaccgcagcggguacuccggcaucuucagcgucgagggcaagagcugcaucaaccggugcuucuacguggagcugauccgcgggcggaaggaggagaccgaggugcucuggaccuccaacagcaucgucguguucugcggcaccuccgggacguacggcaccgggagcuggcccgacggcgccgacaucaaccugaugcccaucuga

SEQ ID NO: 89907 - RNA, 1410 nt, Artificial Sequence
  derived and/or modified CDS sequence (opt1) from neuraminidase__InfluenzaA__AJJ98887
augaaccccaaccagaagaucaucaccaucggcagcgugucccugaccaucagcacgaucugcuucuucaugcagaucgccauccucaucaccaccgucacccugcacuucaagcaguacgaguucaacuccccgcccaacaaccaggugaugcugugcgagcccacgaucaucgagcgcaacaucaccgagaucguguaccucaccaacaccacgaucgagaaggagaucugccccaagcuggccgaguaccggaacuggagcaagccgcagugcgacaucaccggguucgcgcccuucuccaaggacaacagcauccgccuguccgccggcggggacaucugggucacccgggagcccuacgugagcugcgaccccgacaagugcuaccaguucgcccucggccaggggaccacgcugaacaacgugcacuccaacaacaccguccgcaaccggaccccguaccgcacccugcucaugaacgagcugggcgugcccuuccaccugggcacgaagcaggucugcaucgccuggagcuccagcuccugccacgacgggaaggccuggcuccacgugugcaucaccggcgacgacaagaacgcgaccgccagcuucaucuacaacgggcggcugguggacuccaucgugagcugguccaaggagauccugcgcacccaggagagcgagugcgucugcaucaacggcacgugcaccguggugaugaccgacggguccgccagcggcaaggccgacaccaagauccucuucaucgaggagggcaagaucguccacacgagcacccuguccgggagcgcgcagcacguggaggagugcuccugcuacccccgguaccccggcgugcgcugcgucugccgggacaacuggaaggggagcaaccgcccgaucguggacaucaacaucaaggaccacuccaucgugagcuccuacgucugcagcggccuggugggcgacacgccccggaagaacgacuccagcuccagcucccacugccucgaccccaacaacgaggagggcgggcacggggugaagggcugggccuucgacgacgggaacgacgucuggaugggccgcaccaucagcgagaagucccggcugggcuacgagaccuucaaggugaucgagggguggagcaaccccaaguccaagcugcagaucaaccgccaggucaucguggaccggggcaaccgcagcggguacuccggcaucuucagcguggagggcaagagcugcaucaaccggugcuucuacgucgagcucauccgcgggcggaaggaggagaccgacgugcuguggaccuccaacagcaucguggucuucugcggcaccuccgggacguacggcaccgggagcuggccggacggcgccgacaucaaccugaugcccaucuga

SEQ ID NO: 89908 - RNA, 1410 nt, Artificial Sequence
  derived and/or modified CDS sequence (opt1) from neuraminidase__InfluenzaA__AJJ98899
augaaccccaaccagaagaucaucaccaucggcagcgugucccugaccaucagcacgaucugcuucuucaugcagaccgccauccucaucaccaccgucacgcugcacuucaagcaguacgaguucaacuccccgcccaacaaccaggugaugcugugcgagcccaccaucaucgagcgcaacaucaccgagaucguguaccucaccaacacgaccaucgagaaggagaucugccccaagcuggccgaguaccggaacuggagcaagccgcagugcgacaucaccggguucgcgcccuucuccaaggacaacagcauccgccuguccgccggcggggacaucugggucacccgggagcccuacgugagcugcgaccccgacaagugcuaccaguucgcccucggccaggggacgacccugaacaacgugcacuccaacaacaccguccgcaaccggaccccguaccgcacgcugcucaugaacgagcugggcgugcccuuccaccugggcaccaagcaggucugcaucgccuggagcuccagcuccugccacgacgggaaggccuggcuccacgugugcaucaccggcgacgacaagaacgcgaccgccagcuucaucuacaacgggcggcugguggacuccaucgugagcugguccaaggagauccugcgcacgcaggagagcgagugcgucugcaucaacgggaccugcaccguggugaugaccgacggguccgccagcggcaaggccgacacgaagauccucuucaucgaggagggcaagaucguccacaccagcacccuguccgggagcgcgcagcacguggaggagugcuccugcuacccccgguaccccggcgugcgcugcgucugccgggacaacuggaaggggagcaaccgcccgaucguggacaucaacaucaaggaccacuccaucgugagcuccuacgucugcagcggccuggugggcgacacgccccggaagaacgacuccagcuccagcucccacugccucgaccccaacaacgaggagggcggccacggggugaagggcugggccuucgacgacgggaacgacgucuggaugggccgcaccaucagcgagaagucccggcugggcuacgagaccuucaaggugaucgagggguggagcaaccccaaguccaagcugcagaucaaccgccaggucaucguggaccggggcaaccgcagcggguacuccggcaucuucagcguggagggcaagagcugcaucaaccggugcuucuacgucgagcucauccgcgggcggaaggaggagaccgaggugcuguggaccuccaacagcaucguggucuucugcggcacguccgggaccuacggcaccgggagcuggccggacggcgccgacaucaaccugaugcccaucuga

SEQ ID NO: 89909 - RNA, 1410 nt, Artificial Sequence; identical to SEQ ID NO: 86170
  derived and/or modified CDS sequence (opt1) from neuraminidase__InfluenzaA__AJJ98911

SEQ ID NO: 89910 - RNA, 1410 nt, Artificial Sequence; identical to SEQ ID NO: 86946
  derived and/or modified CDS sequence (opt1) from neuraminidase__InfluenzaA__AJJ98923

SEQ ID NO: 89911 - RNA, 1410 nt, Artificial Sequence
  derived and/or modified CDS sequence (opt1) from neuraminidase__InfluenzaA__AJJ98935
augaaccccaaccagaagaucaucaccaucggcagcgugucccugaccaucagcacgaucugcuucuucaugcagaucgccauccucaucaccaccgucacccugcacuucaagcgcuacgaguucaacuccccgcccaacaaccaggugaugcugugcgagcccacgaucaucgagcggaacaucaccgagaucguguaccucaccaacaccacgaucgagaaggagaucugccccaagccggccgaguaccgcaacuggagcaagccccagugcgggaucaccggcuucgcgcccuucuccaaggacaacagcauccggcuguccgccgggggcgacaucugggucacccgcgagcccuacgugagcugcgacccggacaagugcuaccaguucgcccuggggcagggcaccacgcucaacaacgugcacuccaacaacaccguccgggaccgcacccccuaccggacccugcugaugaacgagcucggcgugcccuuccaccuggggacgaagcaggucugcaucgccuggagcuccagcuccugccacgacggcaaggccuggcugcacgugugcaucaccggggacgacaagaacgcgaccgccagcuucaucuacaacggccgccucguggacuccguggucagcugguccaaggagauccugcggacccaggagagcgagugcgugugcaucaacgggacgugcaccguggucaugaccgacggcuccgccagcggcaaggccgacaccaagauccuguucaucgaggaggggaagaucgugcacacgagcacccucuccggcagcgcgcagcacguggaggagugcuccugcuacccccgcuacccggggguccggugcgugugccgcgacaacuggaagggcagcaaccggcccaucguggacaucaacaucaaggaccacuccaucgucagcuccuacgugugcagcggccuggugggggacaccccgcgcaagaacgacuccagcuccagcucccacugccuggaccccaacaacgaggagggcgggcacggcgucaaggggugggccuucgacgacggcaacgacguguggaugggccggaccaucaacgagacgagccgccucggguacgagaccuucaaggucaucgagggcugguccaaccccaagagcaagcugcagaucaaccggcaggucaucguggaccgcggggaccgguccggcuacagcgggaucuucuccguggagggcaagagcugcaucaaccgcugcuucuacguggagcugauccggggccgcaaggaggagaccgaggugcucuggaccagcaacuccaucgucguguucugcgggacgagcggcaccuacgggaccggcuccuggcccgacggggccgaccugaaccugaugcccaucuga

SEQ ID NO: 89912 - RNA, 1410 nt, Artificial Sequence
  derived and/or modified CDS sequence (opt1) from neuraminidase__InfluenzaA__AJJ98947
augaaccccaaccagaagaucaucaccaucggcagcgugucccugaccaucagcacgaucugcuucuucaugcagaucgccauccucaucaccaccgucacccugcacuucaagcaguacgaguucaacuccccgcccaacaaccaggugacgcugugcgagcccaccaucaucgagcgcaacaucaccgagaucguguaccucaccaacacgaccaucgagaaggagaucugccccaagcuggccgaguaccggaacuggagcaagccgcagugcgacaucaccggguucgcgcccuucuccaaggacaacagcauccgccuguccgccggcggggacaucugggucacccgggagcccuacgugagcugcgaccccgacaagugcuaccaguucgcccucggccaggggacgacccugaacaacgugcacuccaacaacaccguccgcgaccggaccccguaccgcacgcugcucaugaacgagcugggcgugcccuuccaccugggcaccaagcaggucugcaucgccuggagcuccagcuccugccacgacgggaaggccuggcuccacgugugcaucaccggcaacgacaagaacgcgaccgccagcuucaucuacaacgggcggcugguggacuccguggucagcugguccaaggagauccugcgcacgcaggagagcgagugcgugugcaucaacgggaccugcaccguggucaugaccgacggguccgccagcggcaaggccgacacgaagauccucuucaucgaggagggcaagaucgugcacaccagcacccuguccgggagcgcgcagcacguggaggagugcuccugcuacccccgguaccccggcguccgcugcgugugccgggacaacuggaaggggagcaaccgcccgaucguggacaucaacaucaaggaccacuccaucgucagcuccuacgugugcagcggccuggugggcgacacgccccggaagaacgacuccagcuccagcucccacugccucgaccccaacaacgaggagggcggccacggggucaagggcugggccuucgacgacgggaacgacguguggaugggccgcaccaucaacgagaccagccggcugggcuacgagaccuucaaggucaucgaggggugguccaaccccaagagcaagcugcagaucaaccgccaggugaucguggaccggggcaaccgcuccggguacagcggcaucuucuccgucgagggcaagagcugcaucaaccggugcuucuacguggagcucauccgcgggcggaaggaggagaccgaggugcuguggacgagcaacuccaucgucguguucugcggcaccagcgggaccuacggcaccggguccuggccggacggcgccgaccugaaccucaugcccaucuga

SEQ ID NO: 89913 - RNA, 1410 nt, Artificial Sequence
  derived and/or modified CDS sequence (opt1) from neuraminidase__InfluenzaA__AJJ98971
augaaccccaaccagaagaucaucaccaucggcagcgugucccugaccaucagcacgaucugcuucuucaugcagaucgccauccucaucaccaccgucacccugcacuucaagcaguacgaguucaacuccccgcccaacaaccaggugaugcugugcgagcccacgaucaucgagcgcaacaucaccgagaucguguaccucaccaacaccacgaucgagaaggagaucugccccaagcuggccgaguaccggaacuggagcaagccgcagugcgacaucaccggguucgcgcccuucuccaaggacaacagcauccgccuguccgccggcggggacaucugggucacccgggagcccuacgugagcugcgaccccgacaagugcuaccaguucgcccucggccaggggaccacgcugaacaacgugcacuccaacgacaccguccgcaaccggaccccguaccgcacccugcucaugaacgagcugggcgugcccuuccaccugggcacgaagcaggucugcaucgccuggagcuccagcuccugccacgacgggaaggccuggcuccacgugugcaucaccggcgacgacaagaacgcgaccgccagcuucaucuacaacgggcggcugguggacuccguggucagcugguccaaggagauccugcgcacccaggagagcgagugcgugugcaucaacggcacgugcaccguggucaugaccgacggguccgccagcggcaaggccgacaccaagauccucuucaucgaggagggcaagaucgugcacacgagcacccuguccgggagcgcgcagcacguggaggagugcuccugcuacccccgguaccccggcguccgcugcgugugccgggacaacuggaaggggagcaaccgcccgaucguggacaucaacaucaaggaccacuccaucgucagcuccuacgugugcagcggccuggugggcgacacgccccggaagaacgacuccagcuccagcucccacugccucgaccccaacaacgaggagggcgggcacggggucaagggcugggccuucgacgacgggaacgacguguggaugggccgcaccaucagcgagaagucccggcugggcuacgagaccuucaaggucaucgagggguggagcaaccccaaguccaagcugcagaucaaccgccaggugaucguggaccggggcaaccgcagcggguacuccggcaucuucagcgucgagggcaagagcugcaucaaccggugcuucuacguggagcucauccgcgggcggaaggaggagaccgaggugcuguggaccuccaacagcaucgucguguucugcggcaccuccgggacguacggcaccgggagcuggccggacggcgccgacaucaaccugaugcccaucuga

SEQ ID NO: 89914 - RNA, 1410 nt, Artificial Sequence
  derived and/or modified CDS sequence (opt1) from neuraminidase__InfluenzaA__AJJ98995
augaaccccaaccagaagaucaucaccaucggcagcgugucccugaccaucagcacgaucugcuucuucaugcagaucgccauccucaucaccaccgucacccugcacuucaagcaguacgaguucaacuccccgcccaacaaccaggugaugcugugcgagcccacgaucaucgagcgcaacaugaccgagaucguguaccucaccaacaccacgaucgagaaggagaucugccccaagccggccgaguaccggaacuggagcaagccccagugcgacaucaccggguucgcgcccuucuccaaggacaacagcauccgccuguccgccggcggggacaucugggucacccgggagcccuacgugagcugcgacccggacaagugcuaccaguucgcccugggccaggggaccacgcucaacaacgugcacuccaacaacaucguccgcgaccggacccccuaccgcacccugcugaugaacgagcucggcgugcccuuccaccugggcaccaagcaggucugcaucgccuggagcuccagcuccugccacgacgggaaggccuggcugcacgugugcaucacgggcgacgacaagaacgcgaccgccagcuucaucuacaacgggcggcucguggacuccguggucagcugguccaaggagauccugcgcacccaggagagcgagugcgugugcaucaacgggaccugcacgguggucaugaccgacggguccgccagcggcaaggccgacaccaagauccuguucaucgaggagggcaagaucgugcacaccagcacgcucuccgggagcgcgcagcacguggaggagugcuccugcuacccccgguacccgggcguccgcugcgugugccgggacaacuggaaggggagcaaccgccccaucguggacaucaacaucaaggaccacuccaucgucagcuccuacgugugcagcggccuggugggcgacaccccgcggaagaacgacuccagcuccagcucccacugccuggaccccaacaacgaggagggcggccacggggucaagggcugggccuucgacgacgggaacgacguguggaugggccgcaccaucaacgagaccagccggcucggcuacgagacguucaaggucaucgaggggugguccaaccccaagagcaagcugcagaucaaccgccaggugaucguggaccgguccgaccgcagcggcuacuccgggaucuucagcgucgagggcaagagcugcaucaaccggugcuucuacguggagcugauccgcgggcggaaggaggagaccgaggugcucuggaccuccaacagcaucgucguguucugcggcaccuccggcacguacgggaccggcagcuggcccgacggggccgaccugaaccugaugcccaucuga

SEQ ID NO: 89915 - RNA, 1410 nt, Artificial Sequence; identical to SEQ ID NO: 85167
  derived and/or modified CDS sequence (opt1) from neuraminidase__InfluenzaA__AJJ99007

SEQ ID NO: 89916 - RNA, 1410 nt, Artificial Sequence
  derived and/or modified CDS sequence (opt1) from neuraminidase__InfluenzaA__AJJ99019
augaaccccaaccagaagaucaucaccaucggcagcgugucccugaccaucagcacgaucugcuucuucaugcagaccgccauccucaucaccaccgucacgcugcacuucaagcagugcgaguucaacuccccgcccaacaaccaggugaugcugugcgagcccaccaucaucgagcgcaacaucaccgagaucguguaccucaccaacacgaccaucgagaaggagaucugccccaagcuggccgaguaccggaacuggagcaagccgcagugcgacaucaccggguucgcgcccuucuccaaggacaacagcauccgccuguccgccggcggggacaucugggucacccgggagcccuacgugagcugcgaccccgacaagugcuaccaguucgcccucggccaggggacgacccugaacaacgugcacuccaacaacaccguccgcgaccggaccccguaccgcacgcugcucaugaacgagcugggcgugcccuuccaccugggcaccaagcaggucugcaucgccuggagcuccagcuccugccacgacgggaaggccuggcuccacgugugcaucaccggcgacgacaagaacgcgaccgccagcuucaucuacaacgggcggcugguggacuccguggucagcugguccaaggagauccugcgcacgcaggagagcgagugcgugugcaucaacgggaccugcaccguggucaugaccgacggguccgccagcggcaaggccgacacgaagauccucuucaucgaggagggcaagaucgugcacaccagcacccuguccgggagcgcgcagcacguggaggagugcuccugcuacccccgguaccccggcguccgcugcgugugccgggacaacuggaaggggagcaaccgcccgaucguggacaucaacaucaaggaccacuccaucgucagcaacuacgugugcuccggccuggugggcgacacgccccggaagaacgacagcuccagcuccagccacugccucgaccccaacaacgaggagggcggccacggggucaagggcugggccuucgacgacgggaacgacguguggaugggccgcaccaucuccgagaagucccgguucggcuacgagaccuucaaggucaucgagggguggagcaaccccaagagcaagcugcagaucaaccgccaggugaucguggaccggggcaaccgcuccggguacagcggcaucuucuccgucgagggcaagagcugcaucaaccggugcuucuacguggagcugauccgcgggcggaaggaggagaccgaggugcucuggaccagcaacuccaucgucguguucugcggcacgagcgggaccuacggcaccggguccuggccggacggcgccgacaucaaccugaugcccaucuga

SEQ ID NO: 89917 - RNA, 1410 nt, Artificial Sequence
  derived and/or modified CDS sequence (opt1) from neuraminidase__InfluenzaA__AJJ99031
augaaccccaaccagaagaucaucaccaucggcagcgugucccugaccaucagcacgaucugcuucuucaugcagaucgccauccucaucaccaccgucacccugcacuucaagcaguacgaguucaacuccccgcccaacaaccaggugaugcugugcgagcccacgaucaucgagcgcaacaucaccgagaucguguaccucaccaacaccacgaucgagaaggagaucugccccaagcuggccgaguaccggaacuggagcaagccgcagugcgacaucaccggguucgcgcccuucuccaaggacaacagcauccgccuguccgccggcggggacaucugggucacccgggagcccuacgugagcugcgaccccgacaagugcuaccaguucgcccucggccaggggaccacgaucaacaacgugcacuccaacgacaccguccgcgaccggaccccguaccgcacccugcugaugaacgagcucggcgugcccuuccaccugggcacgaagcaggucugcaucgccuggagcuccagcuccugccacgacgggaaggccuggcugcacgugugcaucaccggcgacgacaagaacgcgaccgccagcuucaucuacaacgggcggcucguggacuccguggucagcugguccaaggagauccugcgcacccaggagagcgagugcgugugcaucaacggcacgugcaccguggucaugaccgacggguccgccagcggcaaggccgacaccaagauccuguucaucgaggagggcaagaucgugcacacgagcacccucuccgggagcgcgcagcacguggaggagugcuccugcuacccccgguaccccggcguccgcugcgugugccgggacaacuggaaggggagcaaccgcccgaucguggacaucaacaucaaggaccacuccaucgucagcuccuacgugugcagcggccuggugggcgacacgccccggaagaacgacuccagcuccagcucccacugccuggaccccaacaacgaggagggcgggcacggggucaagggcugggccuucgacgacgggaacgacguguggaugggccgcaccaucagcgagaagucccggcucggcuacgagaccuucaaggucaucgagggguggagcaaccccaaguccaagcugcagaucaaccgccaggugaucguggaccggggcaaccgcagcggguacuccggcaucuucagcgucgagggcaagagcugcaucaaccggugcuucuacguggagcugauccgcgggcggaaggaggagaccgaggugcucuggaccuccaacagcaucgucguguucugcggcaccuccgggacguacggcaccgggagcuggccggacggcgccgacaucaaccugaugcccaucuga

SEQ ID NO: 89918 - RNA, 1410 nt, Artificial Sequence
  derived and/or modified CDS sequence (opt1) from neuraminidase__InfluenzaA__AJJ99043
augaaccccaaccagaagaucaucaccaucggcagcgugucccugaccaucagcacgaucugcuucuucaugcagaucgccauccucaucaccaccgucacccugcacuucaagcaguacgaguucaacuccccgcccaacaaccaggugaugcugugcgagcccacgaucaucgagcgcaacaucaccgagaucguguaccucaccaacaccacgaucgagaaggagaucugccccaagcuggccgaguaccggaaguggagcaagccgcagugcaacaucaccggguucgcgcccuucuccaaggacaacagcauccgccuguccgccggcggggacaucugggucacccgggagcccuacgugagcugcgaccccgacaagugcuaccaguucgcccucggccaggggaccacgcugaacaacgugcacuccaacgacaccguccgcgaccggaccccguaccgcacccugcucaugaacgagcugggcgugcccuuccaccugggcacgaagcaggucugcaucgccuggagcuccagcuccugccacgacgggaaggccuggcuccacgugugcgugaccggcgacgacaagaacgcgaccgccagcuucaucuacaacgggcggcugguggacuccaucgucagcugguccaaggagauccugcgcacccaggagagcgagugcgugugcaucaacggcacgugcaccguggucaugaccgacggguccgccagcggcaaggccgacaccaagauccucuucaucgaggagggcaagaucgugcacacgagcacccuguccgggagcgcgcagcacguggaggagugcuccugcuacccccgguaccccggcguccgcugcgugugccgggacaacuggcgcgggagcaaccggccgaucguggacaucaacaugaaggacuacuccaucgucagcuccuacgugugcagcggccuggugggcgacacgccccgcaagaacgacuccagcuccagcgggcacugccucgaccccaacaacgaggagggcgggcacggcgucaaggggugggccuucgacgacggcaacgacguguggaugggccggaccaucuccgagaagucccgcagcggguacgagaccuucaaggucaucgagggcuggagcaaccccaacuccaagcugcagaucaaccgccaggugaucguggaccgggggaaccggagcggcuacuccgggaucuucagcgucgagggcaagagcugcaucaaccgcugcuucuacguggagcugauccggggccgcaaggaggagaccgaggugcucuggaccuccaacagcaucgucguguucugcgggaccuccggcacguacgggaccggcagcuggccggacggggccgacaucaaccugaugcccaucuga

SEQ ID NO: 89919 - RNA, 1410 nt, Artificial Sequence
  derived and/or modified CDS sequence (opt1) from neuraminidase__InfluenzaA__AJJ99067
augaaccccaaccagaagaucaucaccaucggcagcgugucccugaccaucagcacgaucugcuucuucaugcagaucgccauccucaucaccaccgucacccugcacuucaagcaguacgaguucaacuccccgcccaacaaccaggugaugcugugcgagcccacgaucaucgagcgcaacaucaccgagaucguguaccucaccaacaccacgaucgagaaggagaucugccccaagccggccgaguaccggaacuggagcaagccccagugcgggaucaccggcuucgcgcccuucuccaaggacaacagcauccgccuguccgccgggggcgacaucugggucacccgggagcccuacgugagcugcgacccggacaagugcuaccaguucgcccuggggcagggcaccacgcucaacaacgugcacuccaacaacaccguccgcggccggacccccuaccgcacccugcugaugaacgagcucggggugcccuuccaccugggcacgaagcaggucugcaucgccuggagcuccagcuccugccacgacgggaaggccuggcugcacgugugcaucaccggcgacgacaagaacgcgaccgccagcuucaucuacaacgggcggcucguggacuccguggucagcugguccaaggacauccugcgcacccaggagagcgagugcgugugcaucaacggcacgugcaccguggucaugaccgacggcuccgccagcgggaaggccgacaccaagauccuguucaucgaggagggcaagaucgugcacacgagcacccucuccgggagcgcgcagcacguggaggagugcuccugcuacccccgguacccgggcguccgcugcgugugccgggacaacuggaagggcagcaaccgccccaucguggacaucaacaucaaggaccacuccaucgucagcuccuacgugugcagcgggcuggugggcgacaccccgcggaagaacgacuccagcuccagcucccacugccuggaccccaacaacgaggagggcgggcacggggucaagggcugggccuucgacgacggcaacgacguguggauggggcgcaccaucaacgagacgagccggcucggcuacgagaccuucaaggucaucgaggggugguccaaccccaagagcaagcugcagaucaaccgccaggugaucguggaccggggcgaccgcuccggguacagcggcaucuucuccgucgagggcaagagcugcaucaaccggugcuucuacguggagcugauccgcgggcggaaggaggagaccgaggugcucuggaccagcaacuccaucgucguguucugcggcacgagcgggaccuacggcaccggguccuggcccgacggcgccgaccugaaccugaugcccaucuga

SEQ ID NO: 89920 - RNA, 1410 nt, Artificial Sequence
  derived and/or modified CDS sequence (opt1) from neuraminidase__InfluenzaA__AJJ99079
augaaccccaaccagaagaucaucaccaucggcagcgugucccugaccaucagcacgaucugcuucuucaugcagaucgccauccucaucaccaccgucacccugcacuucaagcaguacgaguucaacuccccgcccaacaaccaggugaugcugugcgagcccacgaucaucgagcgcaacaucaccgagaucguguaccucaccaacaccacgaucgagaaggagaucugccccaagccggccgaguaccggaacuggagcaagccccagugcgggaucaccggcuucgcgcccuucuccaaggacaacagcauccgccuguccgccgggggcgacaucugggucacccgggagcccuacgugagcugcgacccggacaagugcuaccaguucgcccuggggcagggcaccacgcucaacaacgugcacuccaacaacaccguccgcaaccggacccccuaccgcacccugcugaugaacgagcucggcgugcccuuccaccuggggacgaagcaggucugcaucgccuggagcuccagcuccugccacgacggcaaggccuggcugcacgugugcaucaccggggacgacaagaacgcgaccgccagcuucaucuacaacggccggcucguggacuccguggucagcugguccaaggagauccugcgcacccaggagagcgagugcgugugcaucaacgggacgugcaccguggucaugaccgacggcuccgccagcggcaaggccgacaccaagauccuguucaucgaggaggggaagaucgugcacacgagcacccucuccggcagcgcgcagcacguggaggagugcuccugcuacccccgguacccggggguccgcugcgugugccgggacaacuggaagggcagcaaccgccccaucguggacaucaacaucaaggaccacuccaucgucagcuccuacgugugcagcggccuggugggggacaccccgcggaagaacgacuccagcuccagcucccacugccuggaccccaacaacgaggagggcgggcacggcgucaaggggugggccuucgacgacggcaacgacguguggaugggccgcaccaucaacgagacgagccggcucggguacgagaccuucaaggucaucgagggcugguccaaccccaagagcaagcugcagaucaaccgccaggugaucguggaccgcggggaccgguccggcuacagcgggaucuucuccgucgagggcaagagcugcaucaaccggugcuucuacguggagcugauccgcggccggaaggaggagaccgaggugcucuggaccagcaacuccaucgucguguucugcgggacgagcggcaccuacgggaccggcuccuggcccgacggggccgaccugaaccugaugcccaucuga

SEQ ID NO: 89921 - RNA, 1410 nt, Artificial Sequence
  derived and/or modified CDS sequence (opt1) from neuraminidase__InfluenzaA__AJJ99091
augaaccccaaccagaagaucaucaccaucggcagcgugucccugaccaucagcacgaucugcuucuucaugcagaucgccauccucaucaccaccgucacccugcacuucaagcaguacgaguucaacuccccgcccaacaaccaggugaugcugugcgagcccacgaucaucgagcgcaacaucaccgagaucguguaccucaccaacaccacgaucgagaaggagaucugccccaagccggccgaguaccggaacuggagcaagccccagugcgggaucaccggcuucgcgcccuucuccaaggacaacagcauccgccuguccgccgggggcgacaucugggucacccgggagcccuacgugagcugcgacccggacaagugcuaccaguucgcccuggggcagggcaccacgcucaacaacgugcacuccaacaacaccguccgcgaccggacccccuaccgcacccugcugaugaacgagcucggcgugcccuuccaccuggggacgaagcaggucugcaucgccuggagcuccagcuccugccacgacggcaaggccuggcugcacgugugcaucaccggggacgacaagaacgcgaccgccagcuucaucuacaacggccggcucguggacuccguggucagcugguccaaggagauccugcgcacccaggagagcgagugcgugugcaucaacgggacgugcaccguggucaugaccgacggcuccgccagcggcaaggccgacaccaagauccuguucaucgaggaggggaagaucgugcacacgagcacccucuccggcagcgcgcagcacguggaggagugcuccugcuacccccgguacccggggguccgcugcgugugccgggacaacuggaagggcagcaaccgccccaucguggacaucaacaucaaggaccacuccaucgucagcuccuacgugugcagcggccuggugggggacaccccgcggaagaacgacuccagcuccagcucccacugccuggaccccaacaacgaggagggcgggcacggcgucaaggggugggccuucgacgacggcaacgaccucuggaugggccgcaccaucaacgagacgagccggcugggguacgagaccuucaaggugaucgagggcugguccaaccccaagagcaagcugcagaucaaccgccaggucaucguggaccgcggggaccgguccggcuacagcgggaucuucuccguggagggcaagagcugcaucaaccggugcuucuacgucgagcucauccgcggccggaaggaggagaccgaggugcuguggaccagcaacuccaucguggucuucugcgggacgagcggcaccuacgggaccggcuccuggcccgacggggccgaccugaaccucaugcccaucuga

SEQ ID NO: 89922 - RNA, 1410 nt, Artificial Sequence
  derived and/or modified CDS sequence (opt1) from neuraminidase__InfluenzaA__AJJ99103
augaaccccaaccagaagaucaucaccaucggcagcgugucccugaccaucagcacgaucugcuucuucaugcagaucgccauccucaucaccaccgucacccugcacuucaagcaguacgaguucaacuccccgcccaacaaccaggugaugcugugcgagcccacgaucaucgagcgcaacaugaccgagaucguguaccucaccaacaccacgaucgagaaggagaucugccccaagccggccgaguaccggaacuggagcaagccccagugcgacaucaccggguucgcgcccuucuccaaggacaacagcauccgccuguccgccggcggggacaucugggucacccgggagcccuacgugagcugcgacccggacaagugcuaccaguucgcccugggccaggggaccacgcucaacaacgugcacuccaacaacaccguccgcaaccggacccccuaccgcacccugcugaugaacgagcucggcgugcccuuccaccugggcacgaagcaggucugcaucgccuggagcuccagcuccugccacgacgggaaggccuggcugcacgugugcaucaccggcgacgacaagaacgcgaccgccagcuucaucuacaacgggcggcucguggacuccguggucagcugguccaaggagauccugcgcacccaggagagcgagugcgugugcaucaacggcacgugcaccguggucaugaccgacggguccgccagcggcaaggccgacaccaagauccuguucaucgaggagggcaagaucgugcacacgagcacccucuccgggagcgcgcagcacguggaggagugcuccugcuacccccgguacccgggcguccgcugcgugugccgggacaacuggaaggggagcaaccgccccaucguggacaucaacaucaaggaccacuccaucgucagcuccuacgugugcagcggccuggugggcgacaccccgcggaagaacgacuccagcuccagcucccacugccuggaccccaacaacgaggagggcgggcacggggucaagggcugggccuucgacgacgggaacgacguguggaugggccgcaccaucaacgagacgagccggcucggcuacgagaccuucaaggucaucgaggggugguccaaccccaagagcaagcugcagaucaaccgccaggugaucguggaccgguccgaccgcagcggcuacuccgggaucuucagcgucgagggcaagagcugcaucaaccggugcuucuacguggagcugauccgcgggcggaaggaggagaccgaggugcucuggaccuccaacagcaucgucguguucugcggcacguccggcaccuacgggaccggcagcuggcccgacggggccgaccugaaccugaugcccaucuga

SEQ ID NO: 89923 - RNA, 1410 nt, Artificial Sequence; identical to SEQ ID NO: 89389
  derived and/or modified CDS sequence (opt1) from neuraminidase__InfluenzaA__AJJ99115

SEQ ID NO: 89924 - RNA, 1410 nt, Artificial Sequence; identical to SEQ ID NO: 88309
  derived and/or modified CDS sequence (opt1) from neuraminidase__InfluenzaA__AJJ99127

SEQ ID NO: 89925 - RNA, 1410 nt, Artificial Sequence; identical to SEQ ID NO: 89597
  derived and/or modified CDS sequence (opt1) from neuraminidase__InfluenzaA__AJJ99139

SEQ ID NO: 89926 - RNA, 1410 nt, Artificial Sequence
  derived and/or modified CDS sequence (opt1) from neuraminidase__InfluenzaA__AJJ99151
augaaccccaaccagaagaucaucaccaucggcagcgugucccugaccaucagcacgaucugcuucuucaugcagaucgccauccucaucaccaccgucacccugcacuucaagcaguacgaguucaacuccccgcccaacaaccaggugaugcugugcgagcccacgaucaucgagcgcaacaucaccgagaucguguaccucaccaacaccacgaucgagaaggagaucugccccaagccggccgaguaccggaacuggagcaagccccagugcgacaucaccggguucgcgcccuucuccaaggacaacagcauccgccuguccgccggcggggacaucugggucacccgggagcccuacgugagcugcgacccggacaagugcuaccaguucgcccugggccaggggaccacgcucaacaacgugcacuccaacaacaccguccgcgaccggacccccuaccgcacccugcugaugaacgagcucggcgugcccuuccaccugggcacgaagcaggucugcaucgccuggagcuccagcuccugccacgacgggaaggccuggcugcacgugugcaucaccggcgacgacaagaacgcgaccgccagcuucaucuacaacgggcggcucguggacuccguggucagcugguccaaggagauccugcgcacccaggagagcgagugcgugugcaucaacggcacgugcaccguggucaugaccgacggguccgccagcggcaaggccgacaccaagauccuguucaucgaggagggcaagaucgugcacacgagcacccucuccgggagcgcgcagcacguggaggagugcuccugcuacccccgguacccgggcguccgcugcgugugccgggacaacuggaaggggagcaaccgccccaucguggacaucaacaucaaggaccacuccaucgucagcuccuacgugugcagcggccuggugggcgacacgccccggaagaacgacuccagcuccagcucccacugccuggaccccaacaacgaggagggcgggcacggggucaagggcugggccuucgacgacgggaacgacguguggaugggccgcaccaucagcgagaagucccggcucggcuacgagaccuucaaggucaucgagggguggagcaacccgaaguccaagcugcagaucaaccgccaggugaucguggaccggggcaaccgcagcggguacuccggcaucuucagcgucgagggcaagagcugcaucaaccggugcuucuacguggagcugauccgcgggcggaaggaggagaccgaggugcucuggaccuccaacagcaucgucguguucugcggcaccuccgggacguacggcaccgggagcuggcccgacggcgccgacaucaaccugaugcccaucuga

SEQ ID NO: 89927 - RNA, 1410 nt, Artificial Sequence; identical to SEQ ID NO: 80623
  derived and/or modified CDS sequence (opt1) from neuraminidase__InfluenzaA__AJJ99163

SEQ ID NO: 89928 - RNA, 1410 nt, Artificial Sequence
  derived and/or modified CDS sequence (opt1) from neuraminidase__InfluenzaA__AJJ99175
augaaccccaaccagaagaucaucaccaucggcagcgugucccugaccaucagcacgaucugccucuucaugcagaucgccauccugaucaccaccgucacccugcacuucaagcaguacgaguucaacuccccgcccaacaaccaggugaugcucugcgagcccacgaucaucgagcgcaacaucaccgagaucguguaccugaccaacaccacgaucgagaaggagaucugccccaagcuggccgaguaccggaacuggagcaagccgcagugcgacaucaccggguucgcgcccuucuccaaggacaacagcauccgccucuccgccggcggggacaucugggucacccgggagcccuacgugagcugcgaccccgacaagugcuaccaguucgcccugggccaggggaccacgcugaacaacgugcacuccaacaacaccguccgcgaccggaccccguaccgcacccuccugaugaacgagcugggcgugcccuuccaccucggcacgaagcaggucugcaucgccuggagcuccagcuccugccacgacgggaaggccuggcugcacgugugcaucaccggcgacgacaagaacgcgaccgccagcuucaucuacaacgggcggcugguggacuccguggucagcugguccaaggagauccuccgcacccaggagagcgagugcgugugcaucaacggcacgugcaccguggucaugaccgacggguccgccagcggcaaggccgacaccaagauccuguucaucgaggagggcaagaucgugcacacgagcacccuguccgggagcgcgcagcacguggaggagugcuccugcuacccccgguaccccggcguccgcugcgugugccgggacaacuggaaggggagcaaccgcccgaucguggacaucaacaucaaggaccacuccaucgucagcuccuacgugugcagcggccucgugggcgacacgccccggaagaacgacuccagcuccagcucccacugccuggaccccaacaacgaggagggcgggcacggggucaagggcugggccuucgacgacgggaacgacguguggaugggccgcaccaucagcgagaagucccggcugggcuacgagaccuucaaggucaucgagggguggagcaaccccaaguccaagcuccagaucaaccgccaggugaucguggaccggggcaaccgcagcggguacuccggcaucuucagcgucgagggcaagagcugcaucaaccggugcuucuacguggagcugauccgcgggcggaaggaggagaccgaggugcuguggaccuccaacagcaucgucguguucugcggcaccuccgggacguacggcaccgggagcuggccggacggcaccgacaucaaccucaugcccaucuga

SEQ ID NO: 89929 - RNA, 1410 nt, Artificial Sequence
  derived and/or modified CDS sequence (opt1) from neuraminidase__InfluenzaA__AJJ99199
augaaccccaaccagaagaucaucaccaucggcagcgugucccugaccaucagcacgaucugcuucuucaugcagaucgccauccucaucaccaccgucacccugcacuucaagcaguacgaguucaacuccccgcccaacaaccaggugaugcugugcgagcccacgaucaucgagcgcaacaucaccgagaucguguaccucaccaacaccacgaucgagaaggagaucugccccaagcuggccgaguaccggaacuggagcaagccgcagugcgacaucaccggguucgcgcccuucuccaaggacaacagcauccgccuguccgccggcggggacaucugggucacccgggagcccuacgugagcugcgaccccgacaagugcuaccaguucgcccucggccaggggaccacgcugaacaacgugcacuccaacgacaccguccgcaaccggaccccguaccgcacccugcucaugaacgagcugggcgugcccuuccaccugggcacgaagcaggucugcaucgccuggagcuccagcuccugccacgacgggaaggccuggcuccacgugugcaucaccggcgacgacaagaacgcgaccgccagcuucaucuacaacgggcggcugguggacuccaucgugagcugguccaaggagauccugcgcacccaggagagcgagugcgucugcaucaacggcacgugcaccguggugaugaccgacggguccgccagcggcaaggccgacaccaagauccucuucaucgaggagggcaagaucguccacacgagcacccuguccgggagcgcgcagcacguggaggagugcuccugcuacccccgguaccccggcgugcgcugcgucugccgggacaacuggaaggggagcaaccgcccgaucguggacaucaacaucaaggaccacuccaucgugagcuccuacgucugcagcggccuggugggcgacacgccccggaagaacgacuccagcuccagcucccacugccucgaccccaacaacgaggagggcgggcacggggugaagggcugggccuucgacgacgggaacgacgucuggaugggccgcaccaucagcgagaagucccggcugggcuacgagaccuucaaggugaucgagggguggagcaaccccaaguccaagcugcagaucaaccgccaggucaucguggaccggggcaaccgcagcggguacuccggcaucuucagcguggagggcaagagcugcaucaaccggugcuucuacgucgagcucauccgcgggcggaaggaggagaccgaggugcuguggaccuccaacagcaucguggucuucugcggcaccuccgggacguacggcaccgggagcuggccggacggcgccgacaucaaccugaugcccaucuga

SEQ ID NO: 89930 - RNA, 1410 nt, Artificial Sequence; identical to SEQ ID NO: 80767
  derived and/or modified CDS sequence (opt1) from neuraminidase__InfluenzaA__AJJ99211

SEQ ID NO: 89931 - RNA, 1410 nt, Artificial Sequence
  derived and/or modified CDS sequence (opt1) from neuraminidase__InfluenzaA__AJJ99223
augaaccccaaccagaagaucaucaccaucggcagcgugucccugaccaucagcacgaucugcuucuucaugcagaucgccauccucaucaccaccgucacccugcacuucaagcaguacgaguucaacuccccgcccaacaaccaggugaugcugugcgagcccacgaucaucgagcgcaacaucaccgagaucguguaccucaccaacaccacgaucgagaaggagaucugccccaagcuggccgaguaccggaacuggagcaagccgcagugcgacaucaccggguucgcgcccuucuccaaggacaacagcauccgccuguccgccggcggggacaucugggucacccgggagcccuacgugagcugcgaccccgacaagugcuaccaguucgcccucggccaggggaccacgcugaacaacgugcacuccaacgacaccguccgcaaccggaccccguaccgcacccugcucaugaacgagcugggcgugcccuuccaccugggcacgaagcaggucugcaucgccuggagcuccagcuccugccacgacgggaaggccuggcuccacgugugcaucaccggcgacgacaagaacgcgaccgccagcuucaucuacaacgggcggcugguggacuccaucgugagcugguccaaggagauccugcgcacccaggagagcgagugcgucugcaucaacggcacgugcaccguggugaugaccgacggguccgccagcggcgaggccgacaccaagauccucuucaucgaggagggcaagaucguccacacgagcacccuguccgggagcgcgcagcacguggaggagugcuccugcuacccccgguaccccggcgugcgcugcgucugccgggacaacuggaaggggagcaaccgcccgaucguggacaucaacaucaaggaccacuccaucgugagcuccuacgucugcagcggccuggugggcgacacgccccggaagaacgacuccagcuccagcucccacugccucgaccccaacaacgaggagggcgggcacggggugaagggcugggccuucgacgacgggaacgacgucugggugggccgcaccaucagcgagaagucccggcugggcuacgagaccuucaaggucaucgagggguggagcaaccccaaguccaagcugcagaucaaccgccaggugaucguggaccggggcaaccgcagcggguacuccggcaucuucagcgucgagggcaagagcugcaucaaccggugcuucuacguggagcucauccgcgggcggaaggaggagaccgaggugcuguggaccuccaacagcaucgucguguucugcggcaccuccgggacguacggcaccgggagcuggccggacggcgccgacaucaaccugaugcccaucuga

SEQ ID NO: 89932 - RNA, 1410 nt, Artificial Sequence
  derived and/or modified CDS sequence (opt1) from neuraminidase__InfluenzaA__AJJ99235
augaaccccaaccagaagaucaucaccaucggcagcgugucccugaccaucagcacgaucugcuucuucaugcagaucgccauccucaucaccaccgucacccugcacuucaagcaguacgaguucaacuccccgcccaacaaccaggugaugcugugcgagcccacgaucaucgagcgcaacaucaccgagaucguguaccucaccaacaccacgaucgagaaggagaucugccccaagccggccgaguaccggaacuggagcaagccccagugcgacaucaccggguucgcgcccuucuccaaggacaacagcauccgccuguccgccggcggggacaucugggucacccgggagcccuacgugagcugcgacccggacaagugcuaccaguucgcccugggccaggggaccacgcucaacaacgugcacuccaacgacaccguccgcgaccggacccccuaccgcacccugcugaugaacgagcucggcgugcccuuccaccugggcacgaagcaggucugcaucgccuggagcuccagcuccugccacgacgggaaggccuggcugcacgugugcaucaccggcgacgacaagaacgcgaccgccagcuucaucuacaacgggcggcucguggacuccaucgugagcugguccaaggagauccugcgcacccaggagagcgagugcgucugcaucaacggcacgugcaccguggugaugaccgacggguccgccagcggcgaggccgacaccaagauccuguucaucgaggagggcaagaucguccacacgagcacccucuccgggagcgcgcagcacguggaggagugcuccugcuacccccgguacccgggcgugcgcugcgucugccgggacaacuggaaggggagcaaccgccccaucguggacaucaacaucaaggaccacuccaucgugagcuccuacgucugcagcggccuggugggcgacacgccccggaagaacgacuccagcuccagcucccacugccuggaccccaacaacgaggagggcgggcacggggugaagggcugggccuucgacgacgggaacgacgucuggaugggccgcaccaucagcgagaagucccggcucggcuacgagaccuucaaggugaucgagggguggagcaacccgaaguccaagcugcagaucaaccgccaggucaucguggaccggggcaaccgcagcggguacuccggcaucuucagcguggagggcaagagcugcaucaaccggugcuucuacgucgagcugauccgcgggcggaaggaggagaccgaggugcucuggaccuccaacagcaucguggucuucugcggcaccuccgggacguacggcaccgggagcuggcccgacggcgccgacaucaaccugaugcccaucuga

SEQ ID NO: 89933 - RNA, 1410 nt, Artificial Sequence
  derived and/or modified CDS sequence (opt1) from neuraminidase__InfluenzaA__AJJ99246
augaaccccaaccagaagaucaucaccaucggcagcgugugcaugaccaucgggauggccaaccugauccuccagaucggcaacaucaucuccaucuggaucagccacuccauccagcuggggaaccagagccagaucgagacgugcaaccagaacgucaucaccuacgagaacaacaccugggugaaccagaccuacgugaacaucuccaacacgaacuucgccgcgggccagagcgucguguccgugaagcuggccgggaacagcucccucugcccggucagcggcugggccaucuacuccaaggacaacagcgugcgcaucggcuccaagggggacguguucgucauccgggagcccuucaucagcugcagcccccuggagugccgcaccuucuuccugacccagggcgcccuccugaacgacaagcacagcaacgggaccaucaaggaccggucccccuaccgcacgcugaugagcugcccgaucggcgaggugcccucccccuacaacagccgguucgagagcguggccugguccgcgagcgccugccacgacgggaucaacuggcucaccaucggcaucuccggccccgacagcggggccgucgccgugcugaaguacaacggcaucaucaccgacaccaucaaguccuggcgcaacaacauccugcggacgcaggagagcgagugcgcgugccucaacggguccugcuucaccaucaugaccgacggcccgagcgacggccaggccuccuacaagaucuuccgcaucgagaaggggaagaucgugaaguccgucgagaugaacgcccccaacuaccacuacgaggagugcuccugcuaccccgacagcuccgagaucacgugcgugugccgggacaacuggcacggcagcaaccgccccuggguguccuucaaccagaaccuggaguaccagaucggguacaucugcagcggcaucuucggggacaacccgcggcccaacgacaagaccggcuccugcggccccgucagcuccagcggggccaacggcgugaagggguucagcuucaaguacggcaacgggguguggaucggccgcaccaaguccaucagcucccggaagggcuucgagaugaucugggaccccaacggguggaccggcaccgacaacaacuucagcaucaagcaggacaucgucgggaucaacgagugguccggcuacagcggguccuucgugcagcacccggagcugacgggccucgacugcauccgccccugcuucuggguggagcugauccggggccgccccaaggagaacaccaucuggaccagcggguccagcaucuccuucugcggcgucaacagcgacaccguggggugguccuggcccgacggcgccgagcugccguucacgaucgacaaguga

SEQ ID NO: 89934 - RNA, 1410 nt, Artificial Sequence
  derived and/or modified CDS sequence (opt1) from neuraminidase__InfluenzaA__AJJ99257
augaaccccaaccagaagaucaucaccaucggcagcgugugcaugaccaucgggauggccaaccugauccuccagaucggcaacaucaucuccaucuggaucagccacuccauccagcuggggaaccagaaccagaucgagacgugcaaccagagcgucaucaccuacgagaacaacaccugggugaaccagaccuacgugaacaucuccaacacgaacuucgccgcgggccagagcgucguguccgugaagcuggccgggaacagcucccucugcccggucagcggcugggccaucuacuccaaggacaacagcauccgcaucggcuccaagggggacguguucgugauccgggagcccuucaucagcugcagcccccuggagugccgcaccuucuuccugacccagggcgcccuccugaacgacaagcacuccaacgggaccaucaaggaccggucccccuaccgcacgcugaugagcugcccgaucggcgagguccccucccccuacaacagccgguucgagagcguggccugguccgcgagcgccugccacgacgggaucaacuggcucaccaucggcaucuccggccccgacaacggggccguggccguccugaaguacaacggcaucaucaccgacaccaucaagagcuggcgcaacaacauccugcggacgcaggaguccgagugcgcgugcgugaacgggagcugcuucaccaucaugaccgacggcccguccgacggccaggccagcuacaagaucuuccgcaucgagaaggggaagaucgugaaguccgucgagaugaacgcccccaacuaccacuacgaggagugcagcugcuaccccgacuccagcgagaucacgugcgugugccgggacaacuggcacggcuccaaccgccccugggugagcuucaaccagaaccucgaguaccagaucggguacaucugcuccggcaucuucggggacaacccgcggcccaacgacaagaccggcagcugcggccccguccccuccaacggggccaacggcgugaagggguucagcuucaaguacggcaacgggguguggaucggccgcaccaaguccaucagcagccggaagggcuucgagaugaucugggacccgaacggguggaccggcaccgacaacuccuucagcaucaagcaggacaucgucgggacgaacgagugguccggcuacagcggguccuucgugcagcaccccgagcugaccggccuggacugcauccgccccugcuucuggguggagcucauccggggccgccccaaggagaacaccaucuggaccagcggguccagcaucuccuucugcggcgucaacagcgggacggugggcugguccuggccggacggcgccgagcugcccuucaccaucgacaaguga

SEQ ID NO: 89935 - RNA, 1413 nt, Artificial Sequence; identical to SEQ ID NO: 80656
  derived and/or modified CDS sequence (opt1) from neuraminidase__InfluenzaA__AJJ99269

SEQ ID NO: 89936 - RNA, 1410 nt, Artificial Sequence; identical to SEQ ID NO: 84982
  derived and/or modified CDS sequence (opt1) from neuraminidase__InfluenzaA__AJJ99280

SEQ ID NO: 89937 - RNA, 1410 nt, Artificial Sequence; identical to SEQ ID NO: 84733
  derived and/or modified CDS sequence (opt1) from neuraminidase__InfluenzaA__AJJ99291

SEQ ID NO: 89938 - RNA, 1413 nt, Artificial Sequence
  derived and/or modified CDS sequence (opt1) from neuraminidase__InfluenzaA__AJJ99303
augaaccccaaccagaagaucaucaccaucggcagcaucuccaucgccaucgggaucaucagccugaugcuccagaucggcaacaucaucuccaucugggccagccacuccauccagaccgggagccagaacaacacgggcaucugcaaccagcgcaucaucaccuacgagaacuccaccugggugaaccacaccuacgucaacaucaacaacacgaacgugguggcgggggaggacaagaccagcgucacccuggccggcaacuccagccugugcuccaucagcggcugggccaucuacaccaaggacaacuccauccggaucgggagcaagggcgacguguucgugauccgcgagccguucaucuccugcagccaccucgagugccggacguucuuccugacccagggggcccugcucaacgacaagcacuccaacggcaccgucaaggaccgcagccccuaccgggcccugauguccugcccccugggggaggcgcccagcccguacaacagcaaguucgaguccguggccuggagcgccuccgccugccacgacggcaugggcuggcucaccaucgggaucagcggccccgacaacggggcgguggccguccugaaguacaacggcaucaucacgggcaccaucaaguccuggaagaagcagauccugcgcacccaggagagcgagugcgugugcaugaacggguccugcuucaccaucaugacggacggccccagcaacaaggccgccuccuacaagaucuucaagaucgagaaggggaaggugaccaagagcauggagcucaacgcccccaacuuccacuacgaggagugcuccugcuacccggacaccggcaucgucaugugcgugugccgggacaacuggcacgggagcaaccgccccuggguguccuucaaccagaaccuggacuaccagaucggcuacaucugcagcggcgucuucggggacaacccccggcccgaggacggcgagggguccugcaacccggugaccguggacggcgcgaacggggucaagggcuucagcuacaaguacgacaacggcguguggaucgggcgcacgaaguccaaccggcugcgcaagggcuucgagaugaucugggaccccaacggguggaccaacaccgacagcgacuucuccgugaagcaggacgucguggccaucaccgacuggagcggcuacagcggguccuucgugcagcaccccgagcucacgggccuggacugcauccggcccugcuucugggucgagcuggugcgcggccucccgcgggagaacaccaccaucuggaccagcggguccagcaucuccuucugcggcgucaacagcgacacggccaacugguccuggcccgacggggccgagcugcccuucaccaucgacaaguga

SEQ ID NO: 89939 - RNA, 1410 nt, Artificial Sequence
  derived and/or modified CDS sequence (opt1) from neuraminidase__InfluenzaA__AJJ99314
augaaccccaaccagaagaucaucaccaucggcagcgccugcaugaccaucgggauggccaaccugauccuccagaucggcaacaucaucuccaucuggaucagccacuccauccagcuggggaaccagaaccagaucgagacgugcaaccagagcgugaucaccuacgagaacaacaccugggucaaccagaccuacgugaacaucuccaacacgaacuucgcggccggccagagcguggucuccgugaagcuggccgggaacagcucccucugcccggugagcggcugggccaucuacuccaaggacaacagcauccgcaucggcuccaagggggacgucuucgugauccgggagcccuucaucagcugcagcccccuggagugccgcaccuucuuccugacccagggcgcccuccugaacgacaagcacuccaacgggaccaucaaggaccggucccccuaccgcacgcugaugagcugcccgaucggcgaggugcccucccccuacaacagccgguucgagagcgucgcgugguccgccagcgccugccacgacgggaucaacuggcucaccaucggcaucuccggccccgacaacggggccguggcggugcugaaguacaacggcaucaucaccgacaccaucaagagcuggcgcaacaacauccugcggacgcaggaguccgagugcgccugcgucaacgggagcugcuucaccgugaugaccgacggcccguccgacggccaggccagcuacaagaucuuccgcaucgagaaggggaagaucgugaaguccgucgagaugaacgcccccaacuaccacuacgaggagugcagcugcuaccccgacuccagcgagaucacgugcgugugccgggacaacuggcacggcuccaaccgccccugggugagcuucaaccagaaccucgaguaccagaucggguacaucugcuccggcaucuucggggacaacccgcggcccaacgacaagaccggcagcugcggccccgucuccagcaacggggccaacggcgugaagggguucuccuucaaguacggcaacgggguguggaucggccgcaccaagagcaucagcucccggaacggcuucgagaugaucugggaccccaacggguggaccggcaccgacaacaacuucagcaucaagcaggacaucgucgggaucaacgagugguccggcuacagcggguccuucgugcagcacccggagcugacgggccuggacugcauccgccccugcuucuggguggagcucauccggggccgccccaaggagaacaccaucuggaccagcggguccagcaucuccuucugcggcgucaacagcgacaccguggggugguccuggcccgacggcgcggagcugccguucacgaucgacaaguga

SEQ ID NO: 89940 - RNA, 1413 nt, Artificial Sequence
  derived and/or modified CDS sequence (opt1) from neuraminidase__InfluenzaA__AJJ99326
augaaccccaaccagaagaucaucaccaucggcagcaucuccaucgccaucgggaucaucagccugaugcuccagaucggcaacaucaucuccaucugggccagccacuccauccagaccgggagccagaacaacacgggcaucugcaaccagcgcaucaucaccuacgagaacuccaccugggugaaccacaccuacgucaacaucaacaacacgaacgugguggcgggggaggacaagaccagcgucacccuggccggcaacuccagccugugcuccaucagcggcugggccaucuacaccaaggacaacuccauccggaucgggagcaagggcgacguguucgugauccgcgagccguucaucuccugcagccaccucgagugccggacguucuuccugacccagggggcccugcucaacgacaagcacuccaacggcaccgucaaggaccgcagccccuaccgggcccugauguccugcccccugggggaggcgcccagcccguacaacagcaaguucgaguccguggccuggagcgccuccgccugccacgacggccucggcuggcugaccaucgggaucagcggccccgacaacggggcgguggccguccugaaguacaacggcaucaucacgggcaccaucaaguccuggaagaagcagauccuccgcacccaggagagcgagugcgugugcaugaacggguccugcuucaccaucaugacggacggccccagcaacaaggccgccuccuacaagaucuucaagaucgagaaggggaaggugaccaagagcaucgagcugaacgcccccaacuucuacuacgaggagugcuccugcuacccggacaccggcaucgucaugugcgugugccgggacaacuggcacgggagcaaccgccccuggguguccuucaaccagaaccuggacuaccagaucggcuacaucugcagcggcgucuucggggacaacccccggcccgaggacggcgagggguccugcaacccggugaccguggacggcgcgaacggggucaagggcuucagcuacaaguacggcaacgggguguggaucggccgcacgaaguccaaccggcuccgcaagggguucgagaugaucugggaccccaacggcuggaccaacaccgacagcgacuucuccgugaagcaggacgucguggccaucaccgacuggagcggguacagcggcuccuucgugcagcaccccgagcugacgggccuggacugcauccggcccugcuucugggucgagcucgugcgcgggcugccgcgggagaacaccaccaucuggaccagcggcuccagcaucuccuucugcggggucaacagcgacacggccaacugguccuggcccgacggcgccgagcugcccuucaccaucgacaaguga

SEQ ID NO: 89941 - RNA, 1410 nt, Artificial Sequence; identical to SEQ ID NO: 82406
  derived and/or modified CDS sequence (opt1) from neuraminidase__InfluenzaA__AJJ99337

SEQ ID NO: 89942 - RNA, 1410 nt, Artificial Sequence; identical to SEQ ID NO: 81869
  derived and/or modified CDS sequence (opt1) from neuraminidase__InfluenzaA__AJJ99348

SEQ ID NO: 89943 - RNA, 1410 nt, Artificial Sequence; identical to SEQ ID NO: 80762
  derived and/or modified CDS sequence (opt1) from neuraminidase__InfluenzaA__AJJ99359

SEQ ID NO: 89944 - RNA, 1410 nt, Artificial Sequence
  derived and/or modified CDS sequence (opt1) from neuraminidase__InfluenzaA__AJJ99370
augaaccccaaccagaagaucaucaccaucggcagcgugugcaugaucaucgggauggccaaccugauccuccagaucggcaacaucaucuccaucuggaucagccacuccauccagcuggggaaccagagccagaucgagaccugcaaccaguccgucaucacguacgagaacaacaccugggugaaccagaccuacgugaacaucagcaacaccaacuucgccgcgggccaguccgucgugagcgugaagcuggccgggaacuccagccucugcccggucuccggcugggccaucuacagcaaggacaacuccauccgcaucggcagcaagggggacguguucgugauccgggagcccuucaucuccugcagcccccuggagugccgcacguucuuccugacccagggcgcccuccugaacgacaagcacuccaacgggaccaucaaggaccggagcccccaccgcacccugauguccugcccgaucggcgagguccccagccccuacaacagccgguucgaguccguggccuggagcgcguccgccugccacgacgggaucaacuggcucacgaucggcaucagcggccccgacaacggggccguggccguccugaaguacaacggcaucaucaccgacaccaucaaguccuggcgcaacaacauccugcggacccaggagagcgagugcgcgugcgugaacggguccugcuucacgaucaugaccgacggcccgagcgaccgccaggccuccuacaagaucuuccggaucgagaagggcaagaucgucaagagcguggagaugaacgcccccaacuaccacuacgaggagugcuccugcuaccccgacagcuccgagaucacgugcgugugccgcgacaacuggcacgggagcaaccggcccuggguguccuucaaccagaaccucgaguaccagaucggcuacaucugcagcgggaucuucggcgacaacccgcgccccaacgacaagaccggguccugcggccccgucagcuccaacggcgccaacggggugaagggcuucagcuucaaguacgggaacggcguguggaucgggcggaccaagagcaucuccagccgcaagggcuucgagaugaucugggaccccaacggcuggaccgggaccgacaacaacuucuccaucaagcaggacaucgucggcaucaacgaguggagcggguacuccggcagcuucgugcagcacccggagcugaccgggcuggacugcauccggcccugcuucuggguggagcucauccgcggccggcccaaggagaacacgaucuggaccuccggcagcuccaucagcuucugcggggucaacuccgacaccgugggcuggagcuggcccgacggggccgagcugccguucaccaucgacaaguga

SEQ ID NO: 89945 - RNA, 1410 nt, Artificial Sequence; identical to SEQ ID NO: 84281
  derived and/or modified CDS sequence (opt1) from neuraminidase__InfluenzaA__AJJ99381

SEQ ID NO: 89946 - RNA, 1410 nt, Artificial Sequence
  derived and/or modified CDS sequence (opt1) from neuraminidase__InfluenzaA__AJJ99392
augaaccccaaccagaagaucaucaccaucggcagcgugugcaugaccaucgggauggccaaccugauccuccagaucggcaacaucaucuccaucuggaucagccacuccauccagcuggggaaccagaaccagaucgagacgugcaaccagagcgucaucaccuacgagaacaacaccugggugaaccagaccuacgugaacaucuccaacacgaacuucgccgcgggccagagcgucguguccgugaagcuggccgggaacagcucccucugcccggucagcggcugggccaucuacuccaaggacaacagcauccgcaucggcuccaagggggacguguucgugauccgggagcccuucaucagcugcagcccccuggagugccgcaccuucuuccugacccagggcgcccuccugaacgacaagcacuccaacgggaccaucaaggaccggucccccuaccgcacgcugaugagcugcccgaucggcgagguccccucccccuacaacagccgguucgagagcguggccugguccgcgagcgccugccacgacgggaucaacuggcucaccaucggcaucuccggccccgacaacggggccguggccguccugaaguacaacggcaucaucaccgacaccaucaagagcuggcgcaacaacauccugcggacgcaggaguccgagugcgcgugcgugaacgggagcugcuucaccgugaugaccgacggcccguccgacggccaggccagcuacaagaucuuccgcaucgagaaggggaagaucgucaaguccguggagaugaacgcccccaacuaccacuacgaggagugcagcugcuaccccgacuccagcgagaucacgugcgugugccgggacaacuggcacggcuccaaccgccccugggucagcuucaaccagaaccucgaguaccagaucggguacaucugcuccggcaucuucggggacaacccgcggcccaacgacaagaccggcagcugcggccccgugucccccaacggggccaacggcgugaagggguucagcuucaaguacggcaacggggucuggaucggccgcaccaaguccaucagcagccggaacggcuucgagaugaucugggacccgaacggguggaccggcaccgacaacaacuucuccaucaagcaggacaucguggggaucaacgaguggagcggcuacuccgggagcuucgugcagcaccccgagcugacgggccuggacugcauccgccccugcuucugggucgagcucauccggggccgccccaaggagaacaccaucuggaccuccgggagcuccaucagcuucugcggcgugaacuccgacaccgucggguggagcuggccggacggcgccaagcugcccuucacgaucgacaaguga

SEQ ID NO: 89947 - RNA, 1410 nt, Artificial Sequence; identical to SEQ ID NO: 80762
  derived and/or modified CDS sequence (opt1) from neuraminidase__InfluenzaA__AJJ99403

SEQ ID NO: 89948 - RNA, 1413 nt, Artificial Sequence; identical to SEQ ID NO: 81485
  derived and/or modified CDS sequence (opt1) from neuraminidase__InfluenzaA__AJJ99415

SEQ ID NO: 89949 - RNA, 1413 nt, Artificial Sequence
  derived and/or modified CDS sequence (opt1) from neuraminidase__InfluenzaA__AJJ99427
augaaccccaaccagaagaucaucaccaucggcagcaucuccaucgccaucgggaucaucagccugaugcuccagaucggcaacaucaucuccaucugggccagccacuccauccagaccgggagccagaacaacacgggcaucugcaaccagcgcaucaucaccuacgagaacuccaccugggugaaccacaccuacgucaacaucaacaacacgaacgugguggcgggggaggacaagaccagcgucacccuggccggcaacuccagccugugcuccaucagcggcugggccguguacaccaaggacaacuccauccggaucgggagcaagggcgacguguucgucauccgcgagccguucaucuccugcagccaccucgagugccggacguucuuccugacccagggggcccugcucaacgacaagcacuccaacggcaccgugaaggaccgcagccccuaccgggcccugauguccugcccccugggggaggcgcccagcccguacaacagcaaguucgaguccguggccuggagcgccuccgccugccacgacggcaugggcuggcucaccaucgggaucagcggccccgacaacggggcggucgccgugcugaaguacaacggcaucaucacgggcaccaucaaguccuggaagaagcagauccugcgcacccaggagagcgagugcgugugcaugaacggguccugcuucaccaucaugacggacggccccagcgacaaggccgccuccuacaagaucuucaagaucgagaaggggaaggucaccaagagcaucgagcucaacgcccccaacuucuacuacgaggagugcuccugcuacccggacaccggcaucgugaugugcgugugccgggacaacuggcacgggagcaaccgccccugggucuccuucaaccagaaccuggacuaccagaucggcuacaucugcagcggcguguucggggacaacccccggcccgaggacggcgagggguccugcaacccggugaccgucgacggcgcgaacggggugaagggcuucagcuacaaguacggcaacgggguguggaucggccgcacgaaguccaaccggcugcgcaagggguucgagaugaucugggaccccaacggcuggaucaacaccgacagcgacuucuccgucaagcaggacgugguggccaucaccgacuggagcggguacagcggcuccuucguccagcaccccgagcucaccggccuggacugcauccggcccugcuucuggguggagcugguccgcgggcucccgcgggagaacacgaccaucuggaccagcggcuccagcaucuccuucugcggggugaacagcgacaccgccaacugguccuggcccgacggcgccgagcugcccuucacgaucgacaaguga

SEQ ID NO: 89950 - RNA, 1413 nt, Artificial Sequence
  derived and/or modified CDS sequence (opt1) from neuraminidase__InfluenzaA__AJJ99439
augaaccccaaccagaagaucaucaccaucggcagcaucuccaucgccaucgggaucaucagccugaugcuccagaucggcaacaucaucuccaucugggccagccacuccauccagaccgggagccagaacaacacgggcaucugcaaccagcgcaucaucaccuacgagaacuccaccugggugaaccacaccuacgucaacaucaacaacacgaacgugguggcgggggaggacaagaccagcgucacccuggccggcaacuccagccugugcuccaccagcggcugggccaucuacacgaaggacaacuccauccggaucgggagcaagggcgacguguucgugauccgcgagccguucaucuccugcagccaccucgagugccggaccuucuuccugacccagggggcccugcucaacgacaagcacuccaacggcaccgucaaggaccgcagccccuaccgggcccugauguccugcccccugggggaggcgcccagcccguacaacagcaaguucgaguccguggccuggagcgccuccgccugccacgacggcaugggcuggcucacgaucgggaucagcggccccgacaacggggcgguggccguccugaaguacaacggcaucaucaccggcaccaucaaguccuggaagaagcagauccugcgcacccaggagagcgagugcgugugcaugaacggguccugcuucacgaucaugaccgacggccccagcaacaaggccgccuccuacaagaucuucaagaucgagaaggggaaggugaccaagagcaucgagcucaacgcccccaacuucuacuacgaggagugcuccugcuacccggacaccggcaucgucaugugcgugugccgggacaacuggcacgggagcaaccgccccuggguguccuucaaccagaaccuggacuaccagaucggcuacaucugcagcggcgucuucggggacaacccccggcccgaggacggcgagggguccugcaacccggugacgguggacggcgcgaacggggucaagggcuucagcuacaaguacggcaacgggguguggaucggccgcaccaaguccaaccggcugcgcaagggguucgagaugaucugggaccccaacggcuggaccaacaccgacagcgacuucuccgugaagcaggacgucguggccaucacggacuggagcggguacagcggcuccuucgugcagcaccccgagcucaccggccuggacugcauccggcccugcuucugggucgagcuggugcgcgggcucccgcgggagaacaccaccaucuggacgagcggcuccagcaucuccuucugcggggucaacagcgacaccgccaacugguccuggcccgacggcgccgagcugcccuucaccaucgacaaguga

SEQ ID NO: 89951 - RNA, 1413 nt, Artificial Sequence
  derived and/or modified CDS sequence (opt1) from neuraminidase__InfluenzaA__AJJ99451
augaaccccaaccagaagaucaucaccaucggcagcaucuccaucgccaucgggaucaucagccugaugcuccagaucggcaacaucaucuccaucugggccagccacuccauccagaccgggagccagaacaacacgggcaucugcaaccagcgcaucaucaccuacgagaacuccaccugggugaaccacaccuacgucaacaucaacaacacgaacgugguggcgggggaggacaagaccagcgucacccuggccggcaacuccagccugugcuccaucagcggcugggccaucuacaccaaggacaacuccauccggaucgggagcaagggcgacguguucgugauccgcgagccguucaucuccugcagccaccucgagugccggacguucuuccugacccagggggcccugcucaacgacaagcacuccaaccgcaccgucaaggaccggagccccuaccgcgcccugauguccugcccccugggcgaggcgcccagcccguacaacagcaaguucgaguccguggccuggagcgccuccgccugccacgacgggaugggcuggcucaccaucggcaucagcgggcccgacaacggcgcgguggccguccugaaguacaacgggaucaucacgggcaccaucaaguccuggaagaagcagauccugcggacccaggagagcgagugcgugugcaugaacggcuccugcuucaccaucaugacggacgggcccagcaacaaggccgccuccuacaagaucuucaagaucgagaagggcaaggugaccaagagcaucgagcucaacgcccccaacuuccacuacgaggagugcuccugcuacccggacaccgggaucgucaugugcgugugccgcgacaacuggcacggcagcaaccggcccuggguguccuucaaccagaaccuggacuaccagaucggguacaucugcagcggcgucuucggcgacaacccccgccccgaggacggggagggcuccugcaacccggugaccguggacggggcgaacggcgucaagggguucagcuacaaguacgacaacggcguguggaucggccggacgaaguccaaccgccugcggaagggguucgagaugaucugggaccccaacggcuggaccaacaccgacagcgacuucuccgugaagcaggacgucguggccaucaccgacuggagcggguacagcggcuccuucgugcagcaccccgagcucacggggcuggacugcauccgccccugcuucugggucgagcuggugcggggccucccgcgcgagaacaccaccaucuggaccagcggcuccagcaucuccuucugcggggucaacagcgacacggccaacugguccuggcccgacggcgccgagcugcccuucaccaucgacaaguga

SEQ ID NO: 89952 - RNA, 1413 nt, Artificial Sequence; identical to SEQ ID NO: 80656
  derived and/or modified CDS sequence (opt1) from neuraminidase__InfluenzaA__AJJ99463

SEQ ID NO: 89953 - RNA, 1410 nt, Artificial Sequence
  derived and/or modified CDS sequence (opt1) from neuraminidase__InfluenzaA__AJJ99474
augaaccccaaccagaagaucaucaccaucggcagcgugugcaugaccaucgggaucgccaaccugauccuccagaucggcaacaucaucuccaucuggaucagccacuccauccagcuggggaaccagaaccagaucgagacgugcaaccagagcgucaucaucuacgagaacaacaccugggugaaccagaccuacgugaacaucuccaacaccaacuucgccgcgggccagagcgucguguccgugaagcuggccgggaacagcucccucugcccggucagcggcugggccaucuacuccaaggacaacagcauccgcaucggcuccaagggggacguguucgugauccgggagcccuucaucagcugcagcccccuggagugccgcacguucuuccugacccagggcgcccuccugaacgacaagcacuccaacgggaccaucaaggaccggucccccuaccgcacccugaugagcugcccgaucggcgagguccccucccccuacaacagccgguucgagagcguggccugguccgcgagcgccugccacgacgggaucaacuggcucacgaucggcaucuccggccccgacaacggggccguggccguccugaaguacaacggcaucaucaccgacaccaucaagagcuggcgcaacaacauccugcggacccaggaguccgagugcgcgugcgugaacgggagcugcuucacgaucaugaccgacggcccguccgacggccaggccagcuacaagaucuuccgcaucgagaaggggaagaucaucaaguccguggagaugaacgcccccaacuaccacuacgaggagugcagcugcuaccccgacuccagcgagaucacgugcgucugccgggacaacuggcacggcuccaaccgccccugggugagcuucaaccagaaccucgaguaccagaucggguacaucugcuccggcaucuucggggacaacccgcggcccaacgacaagaccggcagcugcggccccguguccagcaacggggccaacggcgucaagggguucuccuucaaguacggcaacgggguguggaucggccgcaccaagagcaucagcucccggaagggcuucgagaugaucugggaccccaacggguggaccggcaccgacaacagcuucuccaucaagcaggacaucguggggaucaacgaguggagcggcuacuccgggagcuucguccagcacccggagcugaccggccuggacugcauccgccccugcuucuggguggagcucauccggggccgccccaaggagaacacgaucuggaccuccgggagcuccaucagcuucugcggcgugaacuccgggaccgucggcuggagcuggcccgacggcgccgagcugccguucaccaucgacaaguga

SEQ ID NO: 89954 - RNA, 1410 nt, Artificial Sequence; identical to SEQ ID NO: 84733
  derived and/or modified CDS sequence (opt1) from neuraminidase__InfluenzaA__AJJ99496

SEQ ID NO: 89955 - RNA, 1410 nt, Artificial Sequence
  derived and/or modified CDS sequence (opt1) from neuraminidase__InfluenzaA__AJJ99507
augaaccccaaccagaagaucaucaccaucggcagcgugugcaugaccaucgggauggccaaccugauccuccagaucggcaacaucaucuccaucuggaucagccacuccauccagcuggggaaccagaaccagaucgagacgugcaaccagagcgucaucaccuacgagaacaacaccugggugaaccagaccuacgugaacaucuccaacacgaacuucgccgcgggccagagcgucguguccgugaagcuggccgggaacagcucccucugcccggucagcggcugggccaucuacuccaaggacaacagcauccgcaucggcuccaagggggacguguucgugauccgggagcccuucaucagcugcagcccccuggagugccgcaccuucuuccugacccagggcgcccuccugaacgacaagcacuccaacgggaccaucaaggaccggucccccuaccgcacgcugaugagcugcccgaucggcgagguccccucccccuacaacagccgguucgagagcguggccugguccgcgagcgccugccacgacgggaucaacuggcucaccaucggcaucuccggccccgacaacggggccguggccguccugaaguacaacggcaucaucaccgacaccaucaagagcuggcgcaacaacauccugcggacgcaggaguccgagugcgcgugcgugaacgggagcugcuucaccgugaugaccgacggcccguccgacggccaggccagcuacaagaucuuccgcaucgagaaggggaagaucgucaaguccguggagaugaacgcccccaacuaccacuacgaggagugcagcugcuaccccgacuccagcgagaucacgugcgugugccgggacaacuggcacggcgccaaccgccccugggucuccuucaaccagaaccucgaguaccagaucggguacaucugcagcggcaucuucggggacaacccgcggcccaacgacaagaccggcuccugcggccccgugagcuccaacggggccaacggcgugaagggguucagcuucaaguacgacaacggcgucuggaucgggcgcaccaaguccaucagcagccggaacggcuucgagaugaucugggaccccaacggcuggaccgggaccgacaacgacuucuccaucaagcaggacaucgugggcaucaacgaguggagcggguacuccggcagcuucgugcagcacccggagcugacggggcuggacugcauccgccccugcuucugggucgagcucauccggggccgccccaaggagaacaccaucuggaccuccggcagcuccaucagcuucugcggggugaacuccgacaccgucggcuggagcuggcccgacggggcggagcugccguucacgaucgacaaguga

SEQ ID NO: 89956 - RNA, 1410 nt, Artificial Sequence; identical to SEQ ID NO: 80762
  derived and/or modified CDS sequence (opt1) from neuraminidase__InfluenzaA__AJJ99518

SEQ ID NO: 89957 - RNA, 1410 nt, Artificial Sequence
  derived and/or modified CDS sequence (opt1) from neuraminidase__InfluenzaA__AJJ99529
augaaccccaaccagaagaucaucaccaucggcagcgugugcaugaccaucgggauggccaaccugauccuccaggucggcaacaucaucuccaucuggaucagccacuccauccagcuggggaaccagaaccagaucgagacgugcaaccagagcgugaucaccuacgagaacaacaccugggugaaccagaccuacgucaacaucuccaacacgaacuucgccgcgggccagagcgugguguccgucaagcuggccgggaacagcucccucugcccggugagcggcugggccaucuacuccaaggacaacagcauccgcaucggcuccaagggggacguguucgucauccgggagcccuucaucagcugcagcccccuggagugccgcaccuucuuccugacccagggcgcccuccugaacgacaagcacuccaacgggaccaucaaggaccggucccccuaccgcacgcugaugagcugcccgaucggcgaggugcccucccccuacaacagccgguucgagagcguggccugguccgcgagcgccugccacgacggguucaacuggcucaccaucggcaucuccggccccgacaacggggccgucgccgugcugaaguacaacggcaucaucaccgacaccaucaagagcuggcgcaacaacauccugcggacgcaggaguccgagugcgcgugcgugaacgggagcugcuucaccaucaugaccgacggcccguccgacggccaggccagcuacaagaucuuccgcaucgagaaggggaagaucaucaaguccgucgagaugaacgcccccaacuaccacuacgaggagugcagcugcuaccccgacuccagcgagaucacgugcgugugccgggacaacuggcacggcuccaaccgccccugggugagcuucaaccagaaccucgaguaccagaucggguacaucugcuccggcaucuucggggacaacccgcggcccaacgacaagaccggcagcugcggccccgucuccagcaacggggccaacggcgugaagggguucuccuucaaguacggcaacgggguguggaucggccgcaccaagagcaucagcucccggaagggcuucgagaugaucugggaccccaacggguggaccggcaccgacaacagcuucuccaucaagcaggacaucgucgggaucaacgaguggagcggcuacuccgggagcuucgugcagcacccggagcugacgggccuggacugcauccgccccugcuucuggguggagcucauccggggccgccccaaggagaacaccaucuggaccuccgggagcuccaucagcuucugcggcgucaacuccgggaccgugggcuggagcuggcccgacggcgccgagcugccguucacgaucgacaaguga

SEQ ID NO: 89958 - RNA, 1410 nt, Artificial Sequence
  derived and/or modified CDS sequence (opt1) from neuraminidase__InfluenzaA__AJJ99540
augaaccccaaccagaagaucaucaccaucggcagcgugugcaugaccaucgggauggccaaccugauccuccagaucggcaacaucaucuccaucuggaucagccacuccauccagcuggggaaccagaaccagaucgagacgugcaaccagagcgucaucaccuacgagaacaacaccugggugaaccagaccuacgugaacaucuccaacacgaacuucgccgcgggccagagcgucguguccgugaagcuggccgggaacagcucccucugcccggucagcggcugggccaucuacuccaaggacaacagcauccgcaucggcuccaagggggacguguucgugauccgggagcccuucaucagcugcagcccccuggagugccgcaccuucuuccugacccagggcgcccuccugaacgacaagcacuccaacgggaccaucaaggaccggucccccuaccgcacgcugaugagcugcccgaucggcgagguccccucccccuacaacagccgguucgagagcguggccugguccgcgagcgccugccacgacgggaucaacuggcucaccaucggcaucuccggccccgacaacggggccguggccguccugaaguacaacggcaucaucaccgacaccaucaagagcuggcgcaacaacauccugcggacgcaggaguccgagugcgcgugcgugaacgggagcugcuucaccaucaugaccgacggcccguccgacggccaggccagcuacaagaucuuccgcaucgagaaggggaagaucgugaaguccgucgagaugaacgcccccaacuaccacuacgaggagugcagcugcuaccccgacuccagcaagaucacgugcgugugccgggacaacuggcacggcuccaaccgccccugggugagcuucaaccagaaccucgaguaccagaucggguacaucugcuccggcaucuucggggacaacccgcggcccaacgacaagaccggcagcugcggccccgucuccagcaacggggccaacggcgugaagggguucuccuucaaguacggcaacgggaucuggaucggccgcaccaagagcaucagcucccggaagggcuucgagaugaucugggaccccaacggguggaccggcaccgacaacaacuucagcaucaagcaggacaucguggggaucaacgagugguccggcuacagcggguccuucguccagcacccggagcugacgggccuggacugcauccgccccugcuucuggguggagcucauccggggccgccccaaggagaacaccaucuggaccagcggguccagcaucuccuucugcggcgugaacagcgacaccgucgggugguccuggcccgacggcgccgagcugccguucacgaucgacaaguga

SEQ ID NO: 89959 - RNA, 1410 nt, Artificial Sequence
  derived and/or modified CDS sequence (opt1) from neuraminidase__InfluenzaA__AJJ99551
augaaccccaaccagaagaucaucaccaucggcagcgugugcaugaccaucgggauggccaaccugauccuccagaucggcaacaucaucuccaucuggaucagccacuccauccagcuggggaaccagagccagacggagaccugcaaccaguccgucaucaccuacgagaacaacaccugggugaaccagacguacgugaacaucagcaacaccaacccggccgcgggccaguccgucgugagcgugaagcuggccgggaacuccagccucugccccgucuccggcugggccaucuacagcaaggacaacuccauccgcaucggcagcaagggggacguguucgugauccgggagcccuucaucuccugcagcucccuggagugccgcaccuucuuccugacccagggcgcccuccugaacgacaagcacagcaacgggacgaucaaggaccggucccccuaccgcacccugaugagcugcccgaucggcgagguccccagccccuacaacucccgguucgagagcguggccugguccgcgagcgccugccacgacgggaucaacuggcucaccaucggcaucuccggccccgacaacggggccguggccguccugaaguacaacggcaucaucaccgacacgaucaagagcuggcgcaacaacauccugcggacccaggaguccgagugcgcgugcgugaacgggagcugcuucaccaucaugaccgacggcccguccgacggccaggccagcuacaagaucuuccgcaucgagaaggggaagaucgugaaguccgucgagaugaacgcccccaacuaccacuacgaggagugcagcugcuaccccgacuccagcgagaucacgugcgugugccgggacaacuggcacggcuccaaccgccccugggugagcuucaaccagaaccucgaguaccagaucggguacaucugcuccggcaucuucggggacaacccgcggcccaacgacaagaccggcagcugcggccccgucuccagcaacggggccaacggcgugaagggguucagcuucaaguacggcaacgggguguggaucggccgcaccaaguccaucagcucccggaagggcuucgagaugaucugggaccccaacggguggaccggcacggacaacaacuucagcaucaagcaggacaucgucgggaucaacgagugguccggcuacagcggguccuucgugcagcacccggagcugaccggccuggacugcauccgccccugcuucuggguggagcucauccggggccgccccaaggagaacaccaucuggaccagcggguccagcaucuccuucugcggcgucaacagcgacacgguggggugguccuggcccgacggcgccgagcugccguucaccaucgacaaguga

SEQ ID NO: 89960 - RNA, 1410 nt, Artificial Sequence; identical to SEQ ID NO: 84749
  derived and/or modified CDS sequence (opt1) from neuraminidase__InfluenzaA__AJJ99562

SEQ ID NO: 89961 - RNA, 1410 nt, Artificial Sequence
  derived and/or modified CDS sequence (opt1) from neuraminidase__InfluenzaA__AJJ99573
augaaccccaaccagaagaucaucaccaucggcagcgugugcaugaccaucgggauggccaaccugauccuccagaucggcaacaucaucuccaucuggaucagccacuccauccagcuggggaaccagagccagaucgagacgugcaaccaguccgucaucaccuacgagaacaacaccugggugaaccagaccuacgugaacaucagcaacacgaacuucgccgcgggccaguccgucgugagcgugaagcuggccgggaacuccagccucugcccggucuccggcugggccaucuacagcaaggacaacuccauccgcaucggcagcaagggggacguguucgugauccgggagcccuucaucuccugcagcccccuggagugccgcaccuucuuccugacccagggcgcccuccugaacgacaagcacuccaacgggaccaucaaggaccggagccccuaccgcacgcugauguccugcccgaucggcgagguccccagccccuacaacagccgguucgaguccguggccuggagcgcguccgccugccacgacgggaucaacuggcucaccaucggcaucagcggccccgacaacggggccguggccguccugaaguacaacggcaucaucaccgacaccaucaaguccuggcgcaacaacauccugcggacgcaggagagcgagugcgcgugcgugaacggguccugcuucaccaucaugaccgacggcccgagcgacggccaggccuccuacaagaucuuccgcaucgagaaggggaagaucgucaagagcguggagaugaacgcccccaacuaccacuacgaggagugcuccugcuaccccgacagcuccgagaucacgugcgugugccgggacaacuggcacggcagcaaccgccccuggguguccuucaaccagaaccucgaguaccagaucggguacaucugcagcggcaucuucggggacaacccgcggcccaacgacaagaccggcuccugcggccccgucagcuccaacggggccaacggcgugaagggguucagcuucaaguacggcaacgggguguggaucggccgcaccaagagcaucuccagccggaagggcuucgagaugaucugggaccccaacggguggaccggcaccgacaacaacuucuccaucaagcaggacgucguggggaucaacgaguggagcggcuacuccgggagcuucgugcagcacccggagcugacgggccuggacugcauccgccccugcuucugggucgagcucauccggggccgccccaaggagaacaccaucuggaccuccgggagcuccaucagcuucugcggcgugaacuccgacaccgucggguggagcuggcccgacggcgccgagcugccguucacgaucgacaaguga

SEQ ID NO: 89962 - RNA, 1410 nt, Artificial Sequence; identical to SEQ ID NO: 89939
  derived and/or modified CDS sequence (opt1) from neuraminidase__InfluenzaA__AJJ99584

SEQ ID NO: 89963 - RNA, 1410 nt, Artificial Sequence
  derived and/or modified CDS sequence (opt1) from neuraminidase__InfluenzaA__AJJ99595
augaaccccaaccagaagaucaucaccaucggcagcgugugcaugaccaucgggauggccaaccugaucuuccagaucggcaacaucaucuccaucuggaucagccacuccauccagcucgggaaccagaaccagaucgagacgugcaaccagagcgucaucaccuacgagaacaacaccugggugaaccagaccuacgugaacaucuccaacacgaacuucgccgcgggccagagcgucguguccgugaagcuggccgggaacagcucccugugcccggucagcggcugggccaucuacuccaaggacaacagcauccgcaucggcuccaagggggacguguucgugauccgggagcccuucaucagcugcagcccccucgagugccgcaccuucuuccugacccagggcgcccugcucaacgacaagcacuccaacgggaccaucaaggaccggucccccuaccgcacgcugaugagcugcccgaucggcgagguccccucccccuacaacagccgguucgagagcguggccugguccgcgagcgccugccacgacgggaucaacuggcugaccaucggcaucuccggccccgacaacggggccguggccguccucaaguacaacggcaucaucaccgacaccaucaagagcuggcgcaacaacauccugcggacgcaggaguccgagugcgcgugcgugaacgggagcugcuucaccgugaugaccgacggcccguccgacggccaggccagcuacaagaucuuccgcaucgagaaggggaagaucgucaaguccguggagaugaacgcccccaacuaccacuacgaggagugcagcugcuaccccgacuccagcgagaucacgugcgugugccgggacaacuggcacggcuccaaccgccccugggucagcuucaaccagaaccuggaguaccagaucggguacaucugcuccggcaucuucggggacaacccgcggcccaacgacaagaccggcagcugcggccccguguccagcaacggggccaacggcgugaagggguucuccuucaaguacggcaacggggucuggaucggccgcaccaagagcaucagcucccggaacggcuucgagaugaucugggaccccaacggguggaccggcaccgacaacaacuucagcaucaagcaggacaucguggggaucaacgagugguccggcuacagcggguccuucgugcagcacccggagcucacgggccuggacugcauccgccccugcuucugggucgagcugauccggggccgccccaaggagaacaccaucuggaccagcggguccagcaucuccuucugcggcgugaacagcgacaccgucgggugguccuggcccgacggcgccgagcucccguucacgaucgacaaguga

SEQ ID NO: 89964 - RNA, 1410 nt, Artificial Sequence
  derived and/or modified CDS sequence (opt1) from neuraminidase__InfluenzaA__AJJ99606
augaaccccaaccagaagaucaucaccaucggcagcgugugcaugaccaucgggauggccaaccugauccuccagaucggcaacaucaucuccaucuggaucagccacuccauccagcuggggaaccagaaccagaucgagacgugcaaccagagcgucaucaccuacgagaacaacaccugggugaaccagaccuacgugaacaucuccaacacgaacuucgccgcgggccagagcgucguguccgugaagcuggccgggaacagcucccucugcccggucagcggcugggccaucuacuccaaggacaacagcauccgcaucggcuccaagggggacguguucgugauccgggagcccuucaucagcugcagcccccuggagugccgcaccuucuuccugacccagggcgcccuccugaacgacaagcacuccaacgggaccaucaaggaccggucccccuaccgcacgcugaugagcugcccgaucggcgagguccccucccccuacaacagccgguucgagagcguggccugguccgcgagcgccugccacgacgggaucaacuggcucaccaucggcaucuccggccccgacaacggggccguggccguccugaaguacaacggcgugaucaccgacaccaucaagagcuggcgcaacaacauccugcggacgcaggaguccgagugcgcgugcgugaacgggagcugcuucaccgucaugaccgacggcccguccgacggccaggccagcuacaagaucuuccgcaucgagaaggggaagaucgugaaguccguggagaugaacgcccccaacuaccacuacgaggagugcagcugcuaccccgacuccagcgagaucacgugcgucugccgggacaacuggcacggcuccaaccgccccugggugagcuucaaccagaaccucgaguaccagaucggguacaucugcuccggcaucuucggggacaacccgcggcccaacgacaagaccggcagcugcggccccguguccagcaacggggccaacggcgucaagggguucuccuucaaguacggcaacgggguguggaucggccgcaccaagagcaucagcucccggaacggcuucgagaugaucugggaccccaacggguggaccggcaccgacaacaacuucagcaucaagcaggacaucguggggaucaacgagugguccggcuacagcggguccuucguccagcacccggagcugacgggccuggacugcauccgccccugcuucuggguggagcucauccggggccgccccaaggagaacaccaucuggaccagcggguccagcaucuccuucugcggcgucaacagcgacaccguggggugguccuggcccgacggcgccgagcugccguucacgaucgacaaguga

SEQ ID NO: 89965 - RNA, 1413 nt, Artificial Sequence; identical to SEQ ID NO: 81485
  derived and/or modified CDS sequence (opt1) from neuraminidase__InfluenzaA__AJJ99618

SEQ ID NO: 89966 - RNA, 1413 nt, Artificial Sequence
  derived and/or modified CDS sequence (opt1) from neuraminidase__InfluenzaA__AJJ99630
augaaccccaaccagaagaucaucaccaucggcagcaucuccaucgccaucgggaucaucagccugaugcuccagaucggcaacaucaucuccaucugggccagccacuccauccagaccgggagccagaacaacacgggcaucugcaaccagcgcaucaucaccuacgagaacuccaccugggugaaccacaccuacgucaacaucaacaacacgaacgugguggcgggggaggacaagaccagcgucacccuggccggcaacuccagccugugcuccaucagcggcugggccaucuacaccaaggacaacuccauccggaucgggagcaagggcgacguguucgugauccgcgagccguucaucuccugcagccaccucgagugccggacguucuuccugacccagggggcccugcucaacgacaagcacuccaacggcaccgucaaggaccgcagccccuaccgggcccugauguccugcccccugggggaggcgcccagcccguacaacagcaaguucgaguccguggccuggagcgccuccgccugccacgacggcaugggcuggcucaccaucgggaucagcggccccgacaacggggcgguggccguccugaaguacaacggcaucaucacgggcaccaucaaguccuggaagaagcagauccugcgcacccaggagagcgagugcgugugcaugaacggguccugcuucaccaucaugacggacggccccagcaacaaggccgccuccuacaagaucuucaagaucgagaaggggaaggugaccaagagcaucgagcucaacgcccccaacuucuacuacgaggagugcuccugcuacccggacaccggcaucgucaugugcgugugccgggacaacuggcacgggagcaaccgccccuggguguccuucaaccagaaccuggacuaccagaucggcuacaucugcagcggcgucuucggggacaacccccggcccgaggacggcgagggguccugcaacccggugaccguggacggcgcgaacggggucaagggcuucagcuacaaguacggcaacgggguguggaucggccgcacgaaguccaaccggcugcgcaagggguucgagaugaucugggaccccaacggcuggaccaacaccgacagcgacuucuccaugaagcagaacguggucgccaucaccgacuggagcggguacagcggcuccuucgugcagcaccccgagcucacgggccuggacugcauccggcccugcuucuggguggagcugguccgcgggcucccgcgggagaacaccaccaucuggaccagcggcuccagcaucuccuucugcggggugaacagcgacacggccaacugguccuggcccgacggcgccgagcugcccuucaccaucgacaaguga

SEQ ID NO: 89967 - RNA, 1413 nt, Artificial Sequence; identical to SEQ ID NO: 81485
  derived and/or modified CDS sequence (opt1) from neuraminidase__InfluenzaA__AJJ99642

SEQ ID NO: 89968 - RNA, 1413 nt, Artificial Sequence; identical to SEQ ID NO: 81485
  derived and/or modified CDS sequence (opt1) from neuraminidase__InfluenzaA__AJJ99654

SEQ ID NO: 89969 - RNA, 1413 nt, Artificial Sequence
  derived and/or modified CDS sequence (opt1) from neuraminidase__InfluenzaA__AJJ99666
augaaccccaaccagaagaucaucaccaucggcagcaucuccaucgccaucgggaucaucagccugaugcuccagaucggcaacaucaucuccaucugggccagccacuccauccagaccgggagccagaacaacacgggcaucugcaaccagcgcaucaucaccuacgagaacuccaccugggugaaccacaccuacgucaacaucaacaacaacaacgugguggcgggggaggacaagacgagcgucacccuggccggcaacuccagccugugcuccaucagcggcugggccaucuacaccaaggacaacuccauccggaucgggagcaagggcgacguguucgugauccgcgagccguucaucuccugcagccaccucgagugccggaccuucuuccugacgcagggggcccugcucaacgacaagcacuccaacggcaccgucaaggaccgcagccccuaccgggcccugauguccugcccccugggggaggcgcccagcccguacaacagcaaguucgaguccguggccuggagcgccuccgccugccacgacggcaugggcuggcucaccaucgggaucagcggccccgacaacggggcgguggccguccugaaguacaacggcaucaucaccggcacgaucaaguccuggaagaagcagauccugcgcacccaggagagcgagugcgugugcaugaacggguccugcuucaccaucaugaccgacggccccagcaacaaggccgccuccuacaagaucuucaagaucgagaaggggaaggugaccaagagcaucgagcucaacgcccccaacuuccacuacgaggagugcuccugcuacccggacacgggcaucgucaugugcgugugccgggacaacuggcacgggagcaaccgccccuggguguccuucaaccagaaccuggacuaccagaucggcuacaucugcagcggcgucuucggggacaacccccggcccgaggacggcgagggguccugcaacccggugaccguggacggcgcgaacggggucaagggcuucagcuacaaguacgacaacggcguguggaucgggcgcaccaaguccaaccggcugcgcaagggcuucgagaugaucugggaccccaacggguggacgaacaccgacagcgacuucuccgugaagcaggacgucguggccaucaccgacuggagcggcuacagcggguccuucgugcagcaccccgagcucaccggccuggacugcauccggcccugcuucugggucgagcuggugcgcggccucccgcgggagaacacgaccaucuggaccagcggguccagcaucuccuucugcggcgucaacagcgacaccgccaacugguccuggcccgacggggccgagcugcccuucacgaucgacaaguga

SEQ ID NO: 89970 - RNA, 1410 nt, Artificial Sequence
  derived and/or modified CDS sequence (opt1) from neuraminidase__InfluenzaA__AJJ99677
augaaccccaaccagaagaucaucaccaucggcagcgugugcaugaccaucgggauggccaaccugauccuccagaucggcaacaucaucuccaucuggaucagccacuccauccagcuggggaaccagaaccagaucgagacgugcaaccagagcgucaucaccuacgagaacaacaccugggugaaccagaccuacgugaacaucuccaacacgaacuucgccgcgggccagagcgucguguccgugaagcuggccgggaacagcucccucugcccggucagcggcugggccaucuacuccaaggacaacagcauccgcaucggcuccaagggggacguguucgugauccgggagcccuucaucagcugcagcccccuggagugccgcaccuucuuccugacccagggcgcccuccugaacgacaagcacuccaacgggaccaucaaggaccggucccccuaccgcacgcugaugagcugcccgaucggcgagguccccucccccuacaacagccgguucgagagcguggccugguccgcgagcgccugccacgacgggaucaacuggcucaccaucggcaucuccggccccgacaacggggccguggccguccugaaguacaacggcaucaucaccgacaccaucaagagcuggcgcaacaacauccugcggacgcaggaguccgagugcgcgugcgugaacgggagcugcuucaccaucaugaccgacggcccguccgacggccaggccagcuacaagaucuuccgcaucgagaaggggaagaucaucaaguccguggagaugaacgcccccaacuaccacuacgaggagugcagcugcuaccccgacuccagcgagaucacgugcgucugccgggacaacuggcacggcuccaaccgccccugggugagcuucaaccagaaccucgaguaccagaucggguacaucugcuccggcaucuucggggacaacccgcggcccaacgacaagaccggcagcugcggccccguguccagcaacggggccaacggcgucaagggguucuccuucaaguacggcaacgggguguggaucggccgcaccaagagcaucagcucccggaagggcuucgagaugaucugggaccccaacggguggaccggcaccgacaacagcuucuccaucaagcaggacaucguggggaugaacgaguggagcggcuacuccgggagcuucguccagcacccggagcugacgggccuggacugcauccgccccugcuucuggguggagcucauccggggccgccccaaggagaacaccaucuggaccuccgggagcuccaucagcuucugcggcgugaacuccgggaccgucggcuggagcuggcccgacggcgccgagcugccguucacgaucgacaaguga

SEQ ID NO: 89971 - RNA, 1410 nt, Artificial Sequence
  derived and/or modified CDS sequence (opt1) from neuraminidase__InfluenzaA__AJJ99688
augaaccccaaccagaagaucaucaccaucggcagcgugugcaugaccaucgggauggccaaccugauccuccagaucggcaacaucaucuccaucuggaucagccacuccauccagcuggggaaccagaaccagaucgagacgugcaaccagagcgucaucaccuacgagaacaacaccugggugaaccagaccuacgugaacaucuccaacacgaacuucgccgcgggccagagcgucguguccgugaagcuggccgggaacagcucccucugcccggucagcggcugggccaucuacuccaaggacaacagcauccgcaucggcuccaagggggacguguucgugauccgggagcccuucaucagcugcagcccccuggagugccgcaccuucuuccugacccagggcgcccuccugaacgacaagcacuccaacgggaccaucaaggaccggucccccuaccgcacgcugaugagcugcccgaucggcgagguccccucccccuacaacagccgguucgagagcguggccugguccgcgagcgccugccacgacgggaucaacuggcucaccaucggcaucuccggccccgacaacggggccguggccguccugaaguacaacggcaucaucaccgacaccaucaagagcuggcgcaacaacauccugcggacgcaggaguccgagugcgcgugcgugaacgggagcugcuucaccaucaugaccgacggcccguccgacggccaggccagcuacaagaucuuccgcaucgagaaggggaagaucaucaaguccguggagaugaacgcccccaacuaccacuacgaggagugcagcugcuaccccgacuccagcgagaucacgugcgucugccgggacaacuggcacggcuccaaccgccccugggugagcuucaaccagaaccucgaguaccagaucggguacaucugcuccggcaucuucggggacaacccgcggcccaacgacaagaccggcagcugcggccccguguccagcaacggggccaacggcgucaagggguucuccuucaaguacggcaacgggguguggaucggccgcaccaagagcaucagcucccggaagggcuucgagaugaucugggaccccaacggguggaccggcaccgacaacagcuucuccaucaagcaggacaucguggggaucaacgaguggagcggcuacuccgggagcuucguccagcacccggagcugacgggccuggacugcauccgccccugcuucuggguggagcucauccggggccgccccaaggagaacaccaucuggaccuccgggagcuccaucagcuucugcggcgugaacuccgggaccgucggcuggagcuggcccgacggcgccgagcugccguucacgaucgacaaguga

SEQ ID NO: 89972 - RNA, 1410 nt, Artificial Sequence
  derived and/or modified CDS sequence (opt1) from neuraminidase__InfluenzaA__AJJ99710
augaaccccaaccagaagaucaucaccaucggcagcgugugcaugaccaucgggauggccaaccugauccuccagaucggcaacaucaucuccaucuggaucagccacuccauccagcuggggaaccagagccagaucgagacgugcaaccaguccgucaucaccuacgagaacaacaccugggugaaccagaccuacgugaacaucagcaacacgaacuucgccgcgggccaguccgucgugagcgugaagcuggccgggaacuccagccucugcccggucuccggcugggccaucuacagcaaggacaacuccauccgcaucggcagcaagggggacguguucgugauccgggagcccuucaucuccugcagcccccuggagugccgcaccuucuuccugacccagggcgcccuccugaacgacaagcacuccaacgggaccaucaaggaccggagccccuaccgcacgcugauguccugcccgaucggcgagguccccagccccuacaacagccgguucgaguccguggccuggagcgcguccgccugccacgacgggaucaacuggcucaccaucggcaucagcggccccgacaacggggccguggccguccugaaguacaacggcaucaucaccgacaccaucaaguccuggcgcaacaacauccugcggacgcaggagagcgagugcgcgugcgugaacggguccugcuucaccaucaugaccgacggcccgagcgacggccaggccuccuacaagaucuuccgcaucgagaaggggaagaucgucaagagcguggagaugaacgcccccaacuaccacuacgaggagugcuccugcuaccccgacagcuccaagaucacgugcgugugccgggacaacuggcacggcagcaaccgccccuggguguccuucaaccagaaccucgaguaccagaucggguacaucugcagcggcaucuucggggacaacccgcggcccaacgacaagaccggcuccugcggccccgucagcuccaacggggccaacggcgugaagggguucagcuucaaguacggcaacgggguguggaucggccgcaccaagagcaucuccagccggaagggcuucgagaugaucugggaccccaacggguggaccggcaccgacaacaacuucuccaucaagcaggacaucgucgggaucaacgaguggagcggcuacuccgggagcuucgugcagcacccggagcugacgggccuggacugcauccgccccugcuucuggguggagcucauccggggccgccccaaggagaacaccaucuggaccuccgggagcuccaucagcuucugcggcgucaacuccgacaccgugggguggagcuggcccgacggcgccgagcugccguucacgaucgacaaguga

SEQ ID NO: 89973 - RNA, 1410 nt, Artificial Sequence; identical to SEQ ID NO: 84281
  derived and/or modified CDS sequence (opt1) from neuraminidase__InfluenzaA__AJJ99721

SEQ ID NO: 89974 - RNA, 1410 nt, Artificial Sequence; identical to SEQ ID NO: 84281
  derived and/or modified CDS sequence (opt1) from neuraminidase__InfluenzaA__AJJ99732

SEQ ID NO: 89975 - RNA, 1410 nt, Artificial Sequence; identical to SEQ ID NO: 84981
  derived and/or modified CDS sequence (opt1) from neuraminidase__InfluenzaA__AJJ99743

SEQ ID NO: 89976 - RNA, 1410 nt, Artificial Sequence; identical to SEQ ID NO: 82315
  derived and/or modified CDS sequence (opt1) from neuraminidase__InfluenzaA__AJJ99754

SEQ ID NO: 89977 - RNA, 1410 nt, Artificial Sequence
  derived and/or modified CDS sequence (opt1) from neuraminidase__InfluenzaA__AJJ99765
augaaccccaaccagaagaucaucaccaucggcagcgugugcaugaccaucgggauggccaaccugauccuccagaucggcaacaucaucuccaucuggaucagccacuccauccagcuggggaaccagaaccagaucgagacgugcaaccagagcgucaucaccuacgagaacaacaccugggugaaccagaccuacgugaacaucuccaacacgaacuucgccaccggccagagcgucguguccgugaagcuggcggggaacagcucccucugcccggucagcggcugggccaucuacuccaaggacaacagcauccgcaucggcuccaagggggacguguucgugauccgggagcccuucaucagcugcagcccccuggagugccgcaccuucuuccugacccagggcgcccuccugaacgacaagcacuccaacgggacgaucaaggaccggucccccuaccgcacccugaugagcugcccgaucggcgagguccccucccccuacaacagccgguucgagagcguggccugguccgccagcgcgugccacgacgggaucaacuggcucaccaucggcaucuccggccccgacaacggggccguggccguccugaaguacaacggcaucaucaccgacacgaucaagagcuggcgcaacaacauccugcggacccaggaguccgagugcgccugcgugaacgggagcugcuucaccgugaugaccgacggcccguccgacggccaggcgagcuacaagaucuuccgcaucgagaaggggaagaucgucaaguccguggagaugaacgcccccaacuaccacuacgaggagugcagcugcuaccccgacuccagcgagaucacgugcgugugccgggacaacuggcacggcuccaaccgccccugggucagcuucaaccagaaccucgaguaccagaucggguacaucugcuccggcaucuucggggacaacccgcggcccaacgacaagaccggcagcugcggccccguguccagcaacggggccaacggcgugaagggguucuccuucaaguacggcaacggggucuggaucggccgcaccaagagcaucagcucccggaacggcuucgagaugaucugggaccccaacggguggaccggcacggacaacaacuucagcaucaagcaggacaucguggggaucaacgagugguccggcuacagcggguccuucgugcagcacccggagcugaccggccuggacugcauccgccccugcuucugggucgagcucauccggggccgccccaaggagaacaccaucuggaccagcggguccagcaucuccuucugcggcgugaacagcgacacggucgggugguccuggcccgacggcgccgagcugccguucaccaucgacaaguga

SEQ ID NO: 89978 - RNA, 1413 nt, Artificial Sequence
  derived and/or modified CDS sequence (opt1) from neuraminidase__InfluenzaA__AJJ99777
augaaccccaaccagaagaucaucaccaucggcagcaucuccaucgccaucgggaucaucagccugauccuccagaucggcaacaucaucuccaucugggccagccacuccauccagaccgggagccagaacaacacgggcaucugcaaccagcgcaucaucaccuacgagaacuccaccugggugaaccacaccuacgucaacaucaacaacacgaacgugguggcgggggaggacaagaccagcgucacccuggccggcaacuccagccugugcuccaucagcggcugggccaucuacaccaaggacaacuccauccggaucgggagcaagggcgacguguucgugauccgcgagccguucaucuccugcagccaccucgagugccggacguucuuccugacccagggggcccugcucaacgacaagcacuccaacggcaccgucaaggaccgcagccccuaccgggcccugauguccugcccccugggggaggcgcccagcccguacaacagcaaguucgaguccguggccuggagcgccuccgccugccacgacggcaugggcuggcucaccaucgggaucagcggccccgacaacggggcgguggccguccugaaguacaacggcaucaucacgggcaccaucaaguccuggaagaagcagauccugcgcacccaggagagcgagugcgugugcaugaacggguccugcuucaccaucaugacggacggccccagcaacaaggccgccuccuacaagaucuucaagaucgagaaggggaaggugaccaagagcaucgagcucaacgcccccaacuucuacuacgaggagugcuccugcuacccggacaccggcaucgucaugugcgugugccgggacaacuggcacgggagcaaccgccccuggguguccuucaaccagaaccuggacuaccagaucggcuacaucugcagcggcgucuucggggacaacccccggcccgaggacggcgagggguccugcaacccggugaccguggacggcgcgaacggggucaagggcuucagcuacaaguacggcaacgggguguggaucggccgcacgaaguccaaccggcugcgcaagggguucgagaugaucugggaccccaacggcuggaccaacaccgacagcgacuucuccgugaagcaggacgucguggccaucaccgacuggagcggguacagcggcuccuucgugcagcaccccgagcucacgggccuggacugcauccggcccugcuucugggucgagcuggugcgcgggcucccgcgggagaacaccgccgucuggaccagcggcuccagcaucuccuucugcggggugaacagcgacaccgccaacugguccuggcccgacggcgccgagcugcccuucacgaucgacaaguga

SEQ ID NO: 89979 - RNA, 1410 nt, Artificial Sequence; identical to SEQ ID NO: 80762
  derived and/or modified CDS sequence (opt1) from neuraminidase__InfluenzaA__AJJ99788

SEQ ID NO: 89980 - RNA, 1413 nt, Artificial Sequence
  derived and/or modified CDS sequence (opt1) from neuraminidase__InfluenzaA__AJJ99800
augaaccccaaccagaagaucaucaccaucggcagcaucuccaucgccaucgggaucaucagccugaugcuccagaucggcaacaucaucuccaucugggccagccacuccauccagaccgggagccagaacaacacgggcaucugcaaccagcgcaucaucaccuacgagaacuccaccugggugaaccacaccuacgucaacaucaacaacacgaacgugguggcgggggaggacaagaccagcgucacccuggccggcaacuccagccugugcuccaucagcggcugggccaucuacaccaaggacaacuccauccggaucgggagcaagggcgacguguucgugauccgcgagccguucaucuccugcagccaccucgagugccggacguucuuccugacccagggggcccugcucaacgacaagcacuccaacggcaccgucaaggaccgcagccccuaccgggcccugauguccugcccccugggggaggcgcccagcccguacaacagcaaguucgaguccguggccuggagcgccuccgccugccacgacggcaugggcuggcucaccaucgggaucagcggccccgacaacggggcgguggccguccugaaguacaacggcaucaucacgggcaccaucaaguccuggaagaagcagauccugcgcacccaggagagcgagugcgugugcaugaacggguccugcuucaccaucaugacggacggccccagcaacaaggccgccuccuacaagaucuucaagaucgagaaggggaaggugaccaagagcaucgagcucaacgcccccaacuucuacuacgaggagugcuccugcuacccggacaccggcaucgucaugugcgugugccgggacaacuggcacgggagcaaccgccccuggguguccuucaaccagaaccuggacuaccagaucggcuacaucugcagcggcgucuucggggacaacccccggcccgaggacggcgagggguccugcaacccggugaccguggacggcgcgaacggggucaagggcuucagcuacaaguacggcaacgggguguggaucggccgcacgaaguccaaccggcugcgcaagggguucgagaugaucugggaccccaacggcuggaccaacaccgacagcgacuucuccgugaagcaggacgucguggccaucaccgacuggagcggguacagcggcuccuucgugcagcaccccgagcucacgggccuggacugcauccggcccugcuucugggucgagcuggugcgcgggcucccgcgggagaacaccaccaucuggaccagcggcuccagcaucuccuucugcggggucaacagcgacacggccaacugguccuggcccgacggcgccgagcugcccuucaucaucgacaaguga

SEQ ID NO: 89981 - RNA, 1413 nt, Artificial Sequence; identical to SEQ ID NO: 81485
  derived and/or modified CDS sequence (opt1) from neuraminidase__InfluenzaA__AJJ99812

SEQ ID NO: 89982 - RNA, 1413 nt, Artificial Sequence
  derived and/or modified CDS sequence (opt1) from neuraminidase__InfluenzaA__AJJ99824
augaaccccaaccagaagaucaucaccaucggcagcaucuccaucgccaucgggaccaucagccugaugcuccagaucggcaacaucaucuccaucugggccagccacuccauccagacggggagccagaacaacaccggcaucugcaaccagcgcaucaucaccuacgagaacuccaccugggugaaccacacguacgucaacaucaacaacaccaacgugguggcgggggaggacaagaccagcgucacccuggccggcaacuccagccugugcuccaucagcggcugggccaucuacacgaaggacaacuccauccggaucgggagcaagggcgacguguucgugauccgcgagccguucaucuccugcagccaccucgagugccggaccuucuuccugacccagggggcccugcucaacgacaagcacuccaacggcaccgucaaggaccgcagccccuaccgggcccugauguccugcccccugggggaggcgcccagcccguacaacagcaaguucgaguccguggccuggagcgccuccgccugccacgacggcaugggcuggcucacgaucgggaucagcggccccgacaacggggcgguggccguccugaaguacaacggcaucaucaccggcaccaucaaguccuggaagaagcagauccugcgcacccaggagagcgagugcgugugcaugaacggguccugcuucacgaucaugaccgacggccccagcaacaaggccgccuccuacaagaucuucaagaucgagaaggggaaggugaccaagagcaucgagcucaacgcccccaacuuccacuacgaggagugcuccugcuacccggacaccggcaucgucaugugcgugugccgggacaacuggcacgggagcaaccgccccuggguguccuucaaccagaaccuggacuaccagaucggcuacaucugcagcggcgucuucggggacaacccccggcccgaggacggcgagggguccugcaacccggugacgguggacggcgcgaacggggucaagggcuucagcuacaaguacgacaacggcguguggaucgggcgcaccaaguccaaccggcugcgcaagggcuucgagaugaucugggaccccaacggguggaccaacaccgacagcgacuucuccgugaagcaggacgucguggccaucacggacuggagcggcuacagcggguccuucgugcagcaccccgagcucaccggccuggacugcauccggcccugcuucugggucgagcuggugcgcggccucccgcgggagaacaccaccaucuggacgagcggguccagcaucuccuucugcggcgucaacagcgacaccgccaacugguccuggcccgacggggccgagcugcccuucaccaucgacaaguga

SEQ ID NO: 89983 - RNA, 1410 nt, Artificial Sequence; identical to SEQ ID NO: 89971
  derived and/or modified CDS sequence (opt1) from neuraminidase__InfluenzaA__AJJ99835

SEQ ID NO: 89984 - RNA, 1410 nt, Artificial Sequence; identical to SEQ ID NO: 84281
  derived and/or modified CDS sequence (opt1) from neuraminidase__InfluenzaA__AJJ99846

SEQ ID NO: 89985 - RNA, 1410 nt, Artificial Sequence; identical to SEQ ID NO: 84281
  derived and/or modified CDS sequence (opt1) from neuraminidase__InfluenzaA__AJJ99857

SEQ ID NO: 89986 - RNA, 1410 nt, Artificial Sequence
  derived and/or modified CDS sequence (opt1) from neuraminidase__InfluenzaA__AJJ99868
augaaccccaaccagaagaucaucaccaucggcagcgugugcaugaccaucgggauggccaaccugauccuccagaucggcaacaucaucuccaucuggaucagccacuccauccagcuggggaaccagaaccagaucgagacgugcaaccagagcgucaucaccuacgagaacaacaccugggugaaccagaccuacgugaacaucuccaacacgaacuucgccgcgggccagagcgucguguccgugaagcuggccgggaacagcucccucugcccggucagcggcugggccaucuacuccaaggacaacagcauccgcaucggcuccaagggggacguguucgugauccgggagcccuucaucagcugcagcccccuggagugccgcaccuucuuccugacccagggcgcccuccugaacgacaagcacuccaacgggaccaucaaggaccggucccccuaccgcacgcugaugagcugcccgaucggcgagguccccucccccuacaacagccgguucgagagcguggccugguccgcgagcgccugccacgacgggaucaacuggcucaccaucggcaucuccggccccgacaacggggccguggccguccugaaguacaacggcaucaucaccgacaccaucaagagcuggcgcaacaacauccugcggacgcaggaguccgagugcgcgugcgugaacgggagcugcuucaccgugaugaccgacggcccguccgacggccaggccagcuacaagaucuuccgcaucgagaaggggaagaucgucaaguccguggagaugaacgcccccaacuaccacuacgaggagugcagcugcuaccccgacuccagcgugaucacgugcgucugccgggacaacuggcacggcuccaaccgccccugggugagcuucaaccagaaccucgaguaccagaucggguacaucugcuccggcaucuucggggacaacccgcggcccaacgacaagaccggcagcugcggccccguguccagcaacggggccaacggcgucaagggguucuccuucaaguacggcaacgggguguggaucggccgcaccaagagcaucagcucccggaacggcuucgagaugaucugggaccccaacggguggaccggcaccgacaacaacuucagcaucaagcagaacaucguggggaucaacgagugguccggcuacagcggguccuucguccagcacccggagcugacgggccuggacugcauccgccccugcuucuggguggagcucauccggggccgccccaaggagaacaccaucuggaccagcggguccagcaucuccuucugcggcgucaacagcgacaccguggggugguccuggcccgacggcgccgagcugccguucacgaucgacaaguga

SEQ ID NO: 89987 - RNA, 1410 nt, Artificial Sequence; identical to SEQ ID NO: 83181
  derived and/or modified CDS sequence (opt1) from neuraminidase__InfluenzaA__AJJ99879

SEQ ID NO: 89988 - RNA, 1410 nt, Artificial Sequence; identical to SEQ ID NO: 80762
  derived and/or modified CDS sequence (opt1) from neuraminidase__InfluenzaA__AJJ99890

SEQ ID NO: 89989 - RNA, 1410 nt, Artificial Sequence
  derived and/or modified CDS sequence (opt1) from neuraminidase__InfluenzaA__AJJ99901
augaaccccaaccagaagaucaucaccaucggcagcgugugcaugaccaucgggauggccaaccugauccuccagaucggcaacaucaucuccaucuggaucagccacuccauccagcuggggaaccagaaccagaucgagacgugcaaccagagcgucaucaccuacgagaacaacaccugggugaaccagaccuacgugaacaucuccaacacgaacuucgccgcgggccagagcgucguguccgugaagcuggccgggaacagcucccucugcccggucagcggcugggccaucuacuccaaggacaacagcauccgcaucggcuccaagggggacguguucgugauccgggagcccuucaucagcugcagcccccuggagugccgcaccuucuuccugacccagggcgcccuccugaacgacaagcacuccaacgggaccaucaaggaccggucccccuaccgcacgcugaugagcugcccgaucggcgagguccccucccccuacaacagccgguucgagagcguggccugguccgcgagcgccugccacgacgggaucaacuggcucaccaucggcaucuccggccccgacaacggggccguggccguccugaaguacaacggcaucaucaccgacaccaucaagagcuggcgcaacaacauccugcggacgcaggaguccgagugcgcgugcgugaacgggagcugcuucaccaucaugaccgacggcccguccgacggccaggccagcuacaagaucuuccgcaucgagaaggggaagaucgugaaguccgucgagaugaacgcccccaacuaccacuacgaggagugcagcugcuaccccgacuccagcgagaucacgugcgugugccgggacaacuggcacggcuccaaccgccccugggugagcuucaaccagaaccucgaguaccagaucggguacaucugcuccggcaucuucggggacaacccgcggcccaacgacaagaccggcagcugcggccccgucuccagcaacggggccaacggcgugaagggguucuccuucaaguacggcaacgggguguggaucggccgcaccaagagcaucagcucccggaagggcuucgagaugaucugggaccccaacggguggaccggcaccgacaacagcuucuccaucaagcaggacaucgucgggaucaacgaguggagcggcuacuccgggagcuucgugcagcacccggagcugacgggccuggacugcauccgccccugcuucuggguggagcucauccggggccgccccaaggagaacaccaucuggaccuccgggagcuccaucagcuucugcggcgucgacuccgggaccgugggcuggagcuggcccgacggcgccgagcugccguucacgaucgacaaguga

SEQ ID NO: 89990 - RNA, 1410 nt, Artificial Sequence
  derived and/or modified CDS sequence (opt1) from neuraminidase__InfluenzaA__AJJ99912
augaaccccaaccagaagaucaucaccaucggcagcgugugcaugaccaucgggauggccaaccugauccuccagaucggcaacaucaucuccaucuggaucagccacuccauccagcuggggaaccagagccagaucgagacgugcaaccaguccgucaucaccuacgagaacaacaccugggugaaccagaccuacgugaacaucagcaacacgaacuucgccgcgggccaguccgucgugagcgugaagcuggccgggaacuccagccucugcccggucuccggcugggccaucuacagcaaggacaacuccauccgcaucggcagcaagggggacguguucgugauccgggagcccuucaucuccugcagcccccuggagugccgcaccuucuuccugacccagggcgcccuccugaacgacaagcacuccaacgggaccaucaaggaccggagccccuaccgcacgcugauguccugcccgaucggcgagguccccagccccuacaacagccgguucgaguccguggccuggagcgcguccgccugccacgacgggaucaacuggcucaccaucggcaucagcggccccgacaacggggccguggccguccugaaguacaacggcaucaucaccgacaccaucaaguccuggcgcaacaacauccugcggacgcaggagagcgagugcgcgugcgugaacggguccugcuucaccaucaugaccgacggcccgagcgacggccaggccuccuacaagaucuuccgcaucgagaaggggaagaucgucaagagcguggagaugaacgcccccaacuaccacuacgaggagugcuccugcuaccccgacagcuccaagaucacgugcgugugccgggacaacuggcacggcagcaaccgccccuggguguccuucaaccagaaccucgaguaccagaucggguacaucugcagcggcaucuucggggacaacccgcggcccaaggacaagaccggcuccugcggccccgucagcuccaacggggccaacggcgugaagggguucagcuucaaguacggcaacgggguguggaucggccgcaccaagagcaucuccagccggaagggcuucgagaugaucugggaccccaacggguggaccggcaccgacaacaacuucuccaucaagcaggacaucgucgggaucaacgaguggagcggcuacuccgggagcuucgugcagcacccggagcugacgggccuggacugcauccgccccugcuucuggguggagcucauccggggccgccccaaggagaacaccaucuggaccuccgggagcuccaucagcuucugcggcgucaacuccgacaccgugggguggagcuggcccgacggcgccgagcugccguucacgaucgacaaguga

SEQ ID NO: 89991 - RNA, 1410 nt, Artificial Sequence; identical to SEQ ID NO: 84281
  derived and/or modified CDS sequence (opt1) from neuraminidase__InfluenzaA__AJJ99923

SEQ ID NO: 89992 - RNA, 1410 nt, Artificial Sequence; identical to SEQ ID NO: 84733
  derived and/or modified CDS sequence (opt1) from neuraminidase__InfluenzaA__AJJ99934

SEQ ID NO: 89993 - RNA, 1410 nt, Artificial Sequence; identical to SEQ ID NO: 84281
  derived and/or modified CDS sequence (opt1) from neuraminidase__InfluenzaA__AJJ99945

SEQ ID NO: 89994 - RNA, 1410 nt, Artificial Sequence
  derived and/or modified CDS sequence (opt1) from neuraminidase__InfluenzaA__AJJ99956
augaaccccaaccagaagaucaucaccaucggcagcgugugcaugaccaucgggauggccaaccugauccuccagaucggcaacaucaucuccaucuggaucagccacuccauccagcuggggaaccagaaccagaucgagacgugcaaccagagcgucaucaccuacgagaacaacaccugggugaaccagaccuacgugaacaucuccaacacgaacuucgccgcgggccagagcgucguguccgugaagcuggccgggaacagcucccucugcccggucagcggcugggccaucuacuccaaggacaacagcauccgcaucggcuccaagggggacguguucgugauccgggagcccuucaucagcugcagcccccuggagugccgcaccuucuuccugacccagggcgcccuccugaacgacaagcacuccaacgggaccaucaaggaccggucccccuaccgcacgcugaugagcugcccgaucggcgagguccccucccccuacaacagccgguucgagagcguggccugguccgcgagcgccugccacgacgggaucaacuggcucaccaucggcaucuccggccccgacaacggggccguggccguccugaaguacaacggcaucaucaccgacaccaucaagagcuggcgcaacaacauccugcggacgcaggaguccgagugcgcgugcgugaacgggagcugcuucaccgugaugaccgacggcccguccgacggccaggccagcuacaagaucuuccgcaucgagaaggggaagaucgucaaguccguggagaugaacgcccccaacuaccacuacgaggagugcagcugcuaccccgacuccagcgagaucacgugcgugugccgggacaacuggcacggcuccaaccgccccugggucagcuucaaccagaaccucgaguaccagaucggguacaucugcuccggcaucuucggggacaacccgcggcccaacgacaagaccggcagcugcggccccgugcuguccaacggggccaacggcgugaagggguucagcuucaaguacggcaacggggucuggaucggccgcaccaaguccaucagcagccggaacggcuucgagaugaucugggaccccaacggguggaccggcaccgacaacaacuucuccaucaagcaggacaucguggggaucaacgaguggagcggcuacuccgggagcuucgugcagcacccggagcugacgggccucgacugcauccgccccugcuucugggucgagcugauccggggccgccccaaggagaacaccaucuggaccuccgggagcuccaucagcuucugcggcgugaacuccgacaccgucggguggagcuggcccgacggcgccgagcugccguucacgaucgacaaguga

SEQ ID NO: 89995 - RNA, 1410 nt, Artificial Sequence; identical to SEQ ID NO: 80762
  derived and/or modified CDS sequence (opt1) from neuraminidase__InfluenzaA__AJJ99967

SEQ ID NO: 89996 - RNA, 1413 nt, Artificial Sequence
  derived and/or modified CDS sequence (opt1) from neuraminidase__InfluenzaA__AJJ99991
augaaccccaaccagaagaucaucaccaucggcagcaucuccaucgccaucgggaucaucagccugaugcuccagaucggcaacaucaucuccaucugggccagccacuccauccagaccgggagccagaacaacacgggcaucugcaaccagcgcaucaucaccuacgagaacugcaccugggugaaccacaccuacgucaacaucaacaacacgaacgugguggcgggggaggacaagaccuccgucacccuggccggcaacagcucccugugcagcaucuccggcugggccaucuacaccaaggacaacagcauccggaucggguccaagggcgacguguucgugauccgcgagccguucaucagcugcucccaccucgagugccggacguucuuccugacccagggggcccugcucaacgacaagcacagcaacggcaccgucaaggaccgcucccccuaccgggcccugaugagcugcccccugggggaggcgcccuccccguacaacagcaaguucgagagcguggccugguccgccagcgccugccacgacggcaugggcuggcucaccaucgggaucuccggccccgacaacggggcgguggccguccugaaguacaacggcaucaucacgggcaccaucaagagcuggaagaagcagauccugcgcacccaggaguccgagugcgugugcaugaacgggagcugcuucaccaucaugacggacggccccuccaacaaggccgccagcuacaagaucuucaagaucgagaaggggaaggugaccaaguccaucgagcucaacgcccccaacuuccacuacgaggagugcagcugcuacccggacaccggcaucgucaugugcgugugccgggacaacuggcacggguccaaccgccccugggugagcuucaaccagaaccuggacuaccagaucggcuacaucugcuccggcgucuucggggacaacccccggcccgaggacggcgaggggagcugcaacccggugaccguggacggcgcgaacggggucaagggcuucuccuacaaguacgacaacggcguguggaucgggcgcaccaagagcaaccggcugcgcaagggcuucgagaugaucugggaccccaacggguggacgaacaccgacuccgacuucagcgugaagcaggacgucguggccaucaccgacugguccggcuacagcgggagcuucgugcagcaccccgagcucacgggccuggacugcauccggcccugcuucugggucgagcuggugcgcggccucccgcgggagaacaccaccaucuggaccuccgggagcuccaucagcuucugcggcgucaacuccgacacggccaacuggagcuggcccgacggggccgagcugcccuucaccaucgacaaguga

SEQ ID NO: 89997 - RNA, 1410 nt, Artificial Sequence; identical to SEQ ID NO: 89971
  derived and/or modified CDS sequence (opt1) from neuraminidase__InfluenzaA__AJK00003

SEQ ID NO: 89998 - RNA, 1410 nt, Artificial Sequence
  derived and/or modified CDS sequence (opt1) from neuraminidase__InfluenzaA__AJK00014
augaaccccaaccagaagaucaucaccaucggcagcgugugcaugaccaucgggauggccaaccugauccuccagaucggcaacaucaucuccaucuggaucagccacuccauccagcuggggaaccagagccagaucgagacgugcaaccaguccgucaucaccuacgagaacaacaccugggugaaccagaccuacgugaacaucagcaacacgaacuucgccgcgggccaguccgucgugagcgugaagcuggccgggaacuccagccucugcccggucuccggcugggccaucuacagcaaggacaacuccauccgcaucggcagcaagggggacguguucgugauccgggagcccuucaucuccugcagcccccuggagugccgcaccuucuuccugacccagggcgcccuccugaacgacaagcacuccaacgggaccaucaaggaccggagccccuaccgcacgcugauguccugcccgaucggcgagguccccagccccuacaacagccgguucgaguccguggccuggagcgcguccgccugccacgacgggaucaacuggcucaccaucggcaucagcggccccgacaacggggccguggccguccugaaguacaacggcgugaucaccgacaccaucaaguccuggcgcaacaacauccugcggacgcaggagagcgagugcgcgugcgugaacggguccugcuucaccaucaugaccgacggcccgagcgacggccaggccuccuacaagaucuuccgcaucgagaaggggaagaucgucaagagcguggagaugaacgcccccaacuaccacuacgaggagugcuccugcuaccccgacagcuccgagaucacgugcgugugccgggacaacuggcacggcagcaaccgccccugggucuccuucaaccagaaccucgaguaccagaucggguacaucugcagcggcaucuucggggacaacccgcggcccaacgacaagaccggcuccugcggccccgugagcuccaacggggccaacggcgugaagggguucagcuucaaguacggcaacggggucuggaucggccgcaccaagagcaucuccagccggaagggcuucgagaugaucugggaccccaacggguggaccggcaccgacaacaacuucuccacgaagcaggacaucguggggaucaacgaguggagcggcuacuccgggagcuucgugcagcacccggagcugaccggccuggacugcauccgccccugcuucugggucgagcucauccggggccgccccaaggagaacaccaucuggaccuccgggagcaucaucuccuucugcggcgugaacagcgacacggucgggugguccuggcccgacggcgccgagcugccguucaccaucgacaacuga

SEQ ID NO: 89999 - RNA, 1410 nt, Artificial Sequence
  derived and/or modified CDS sequence (opt1) from neuraminidase__InfluenzaA__AJK00025
augaaccccaaccagaagaucaucaccaucggcagcgugugcaugaccaucgggauggccaaccugauccuccagaucggcaacaucaucuccaucuggaucagccacuccauccagcuggggaaccagaaccagaucgagacgugcaaccagagcgucaucaccuacgagaacaacaccugggugaaccagaccuacgugaacaucuccaacacgaacuucgccgcgggccagagcgucguguccgugaagcuggccgggaacagcucccucugcccggucagcggcugggccaucuacuccaaggacaacagcauccgcaucggcuccaagggggacguguucgugauccgggagcccuucaucagcugcagcccccuggagugccgcaccuucuuccugacccagggcgcccuccugaacgacaagcacuccaacgggaccaucaaggaccggucccccuaccgcacgcugaugagcugcccgaucggcgagguccccucccccuacaacagccgguucgagagcguggccugguccgcgagcgccugccacgacgggaucaacuggcucaccaucggcaucuccggccccgacaacggggccguggccguccugaaguacaacggcaucaucaccgacaccaucaagagcuggcgcaacaacauccugcggacgcaggaguccgagugcgcgugcgugaacgggagcugcuucaccaucaugaccgacggcccguccgacggccaggccagcuacaagaucuuccgcaucgagaaggggaagaucgugaaguccgucgagaugaacgcccccaacuaccacuacgaggagugcagcugcuaccccgacuccagcgagaucacgugcgugugccgggacaacuggcacggcuccaaccgccccugggugagcuucaaccagaaccucgaguaccagaucggguacaucugcuccggcaucuucggggacaacccgcggcccaacgacaagaccggcagcugcggccccgucuccagcaacggggccaacggcgugaagggguucuccuucaaguacggcaacgggguguggaucggccgcaccaagagcaucagcucccggaagggcuucgagaugaucugggaccccaacggguggaccggcaccgacaacagcuucuccaucaagcaggacaucgucgggaucaacgaguggagcggcuacuccgggagcuucgugcagcacccggagcugacgggccuggacugcauccgccccugcuucuggguggagcucauccggggccgccccaaggagaacaccaucuggaccuccgggagcuccaucagcuucugcggcgucaacuccgggaccgugggcuggagcuggcccgacggcgccgagcugccguucacgaucgacaaguga

SEQ ID NO: 90000 - RNA, 1410 nt, Artificial Sequence
  derived and/or modified CDS sequence (opt1) from neuraminidase__InfluenzaA__AJK00036
augaaccccaaccagaagaucaucaccaucggcagcgugugcaugaccaucgggauggccaaccugauccuccagaucggcaacaucaucuccaucuggaucagccacuccauccagcuggggaaccagagccagaucgagacgugcaaccaguccgucaucaccuacgagaacaacaccugggugaaccagaccuacgugaacaucagcaacaucaacuucgccgcgggccaguccgucgugagcgugaagcuggccgggaacuccagccucugcccggucuccggcugggccaucuacagcaaggacaacuccauccgcaucggcagcaagggggacguguucgugauccgggagcccuucaucuccugcagcccccuggagugccgcacguucuuccugacccagggcgcccuccugaacgacaagcacuccaacgggaccaucaaggaccggagccccuaccgcacccugauguccugcccgaucggcgagguccccagccccuacaacagccgguucgaguccguggccuggagcgcguccgccugccacgacgggaucaacuggcucacgaucggcaucagcggccccgacaacggggccguggccguccugaaguacaacggcaucaucaccgacaccaucaaguccuggcgcaacaacauccugcggacccaggagagcgagugcgcgugcgugaacggguccugcuucacgaucaugaccgacggcccgagcgacggccaggccuccuacaagaucuuccgcaucgagaaggggaagaucgucaagagcguggagaugaacgcccccaacuaccacuacgaggagugcuccugcuaccccgacagcuccgagaucacgugcgugugccgggacaacuggcacggcagcaaccgccccuggguguccuucaaccagaaccucgaguaccagaucggguacaucugcagcggcaucuucggggacaacccgcggcccaacgacaagaccggcuccugcggccccgucagcuccaacggggccaacggcgugaagggguucagcuucaaguacggcaacgggguguggaucggccgcaccaagagcaucuccagccggaagggcuucgagaugaucugggaccccaacggguggaccggcaccgacaacaacuucuccaucaagcaggacaucgucgggaucaacgaguggagcggcuacuccgggagcuucgugcagcacccggagcugaccggccuggacugcauccgccccugcuucuggguggagcucauccggggccgccccaaggagaacacgaucuggaccuccgggagcuccaucagcuucugcggcgucaacuccgacaccgugggguggagcuggcccgacggcgccgagcugccguucaccaucgacaaguga

SEQ ID NO: 90001 - RNA, 1410 nt, Artificial Sequence; identical to SEQ ID NO: 84981
  derived and/or modified CDS sequence (opt1) from neuraminidase__InfluenzaA__AJK00047

SEQ ID NO: 90002 - RNA, 1410 nt, Artificial Sequence; identical to SEQ ID NO: 84981
  derived and/or modified CDS sequence (opt1) from neuraminidase__InfluenzaA__AJK00058

SEQ ID NO: 90003 - RNA, 1410 nt, Artificial Sequence
  derived and/or modified CDS sequence (opt1) from neuraminidase__InfluenzaA__AJK00069
augaaccccaaccagaagaucaucaccaucggcagcgugugcaugaccaucgggauggccaaccugauccuccagaucggcaacaucaucuccaucuggaucagccacuccauccagcuggggaaccagaaccagaucgagacgugcaaccagagcgucaucaccuacgagaacaacaccugggugaaccagaccuacuucaacaucuccaacacgaacuucgccgcgggccagagcguggucuccgugaagcuggccgggaacagcucccucugcccggugagcggcugggccaucuacuccaaggacaacagcauccgcaucggcuccaagggggacgucuucgugauccgggagcccuucaucagcugcagcccccuggagugccgcaccuucuuccugacccagggcgcccuccugaacgacaagcacuccaacgggaccaucaaggaccggucccccuaccgcacgcugaugagcugcccgaucggcgaggugcccucccccuacaacagccgguucgagagcgucgccugguccgcgagcgccugccacgacgggaucaacuggcucaccaucggcaucuccggccccgacaacggggccguggccgugcugaaguacaacggcaucaucaccgacaccaucaagagcuggcgcaacaacauccugcggacgcaggaguccgagugcgcgugcgucaacgggagcugcuucaccgugaugaccgacggcccguccgacggccaggccagcuacaagaucuuccgcaucgagaaggggaagaucgugaaguccgucgagaugaacgcccccaacuaccacuacgaggagugcagcugcuaccccgacuccagcgagaucacgugcgugugccgggacaacuggcacggcuccaaccgccccugggugagcuucaaccagaaccucgaguaccagaucggguacaucugcuccggcaucuucggggacaacccgcggcccaacgacaagaccggcagcugcggccccgucuccagcaacggggccaacggcgugaagggguucuccuucaaguacggcaacgggguguggaucggccgcaccaagagcaucagcucccggaacggcuucgagaugaucugggaccccaacggguggaccggcaccgacaacaacuucagcaucaagcaggacaucgucgggaucaacgagugguccggcuacagcggguccuucgugcagcacccggagcugacgggccuggacugcauccgccccugcuucuggguggagcucauccggggccgccccaaggagaacaccaucuggaccagcggguccagcaucuccuucugcggcgucaacagcgacaccguggggugguccuggcccgacggcgccgagcugccguucacgaucgacaaguga

SEQ ID NO: 90004 - RNA, 1413 nt, Artificial Sequence; identical to SEQ ID NO: 81485
  derived and/or modified CDS sequence (opt1) from neuraminidase__InfluenzaA__AJK00081

SEQ ID NO: 90005 - RNA, 1413 nt, Artificial Sequence; identical to SEQ ID NO: 80656
  derived and/or modified CDS sequence (opt1) from neuraminidase__InfluenzaA__AJK00093

SEQ ID NO: 90006 - RNA, 1413 nt, Artificial Sequence
  derived and/or modified CDS sequence (opt1) from neuraminidase__InfluenzaA__AJK00105
augagccccaaccagaagaucaucaccaucggcuccaucagcaucgccaucgggaucaucucccugaugcuccagaucggcaacaccaucagcaucugggccucccacagcauccagacggggucccagaacaacaccggcaucugcaaccagcgcaucaucaccuacgagaacagcaccugggugaaccacacguacgucaacaucaacaacaccaacgugguggcgggggaggacaagaccuccgucacccuggccggcaacagcucccugugcagcaucuccggcugggccaucuacacgaaggacaacagcauccggaucggguccaagggcgacguguucgugauccgcgagccguucaucagcugcucccaccucgagugccggaccuucuuccugacccagggggcccugcucaacgacaagcacagcaacggcaccgucaaggaccgcucccccuaccgggcccugaugagcugcccccugggggaggcgcccagcccguacaacuccaaguucgagagcguggccugguccgccagcgccugccacgacggcaugggcuggcucacgaucgggaucuccggccccgacaacggggcgguggccguccugaaguacaacggcaucaucaccggcaccaucaagagcuggaagaagcagauccugcgcacccaggaguccgagugcgugugcaugaacgggagcugcuucacgaucaugaccgacggccccuccaacaaggccgccagcuacaagaucuucaagaucgagaaggggaaggugaccaaguccaucgagcucaacgcccccaacuuccacuacgaggagugcagcugcuacccggacaccggcaucgucaugugcgugugccgggacaacuggcacggguccaaccgccccugggugagcuucaaccagaaccuggacuaccagaucggcuacaucugcuccggcgucuucggggacaacccccggcccgaggacggcgaggggagcugcaacccggugacgguggacggcgcgaacggggucaagggcuucuccuacaaguacgacaacggcguguggaucgggcgcaccaagagcaaccggcugcgcaagggcuucgagaugaucugggaccccaacggguggaccaacaccgacuccgacuucagcgugaagcaggacgucguggccaucacggacuggagcggcuacuccgggagcuucgugcagcaccccgagcucaccggccuggacugcauccggcccugcuucugggucgagcuggugcgcggccucccgcgggagaacaccaccaucuggacguccgggagcuccaucagcuucugcggcgucaacuccgacaccgccaacuggagcuggcccgacggggccgagcugcccuucaccaucgacaaguga

SEQ ID NO: 90007 - RNA, 1410 nt, Artificial Sequence; identical to SEQ ID NO: 83037
  derived and/or modified CDS sequence (opt1) from neuraminidase__InfluenzaA__AJK00116

SEQ ID NO: 90008 - RNA, 1410 nt, Artificial Sequence; identical to SEQ ID NO: 81869
  derived and/or modified CDS sequence (opt1) from neuraminidase__InfluenzaA__AJK00127

SEQ ID NO: 90009 - RNA, 1410 nt, Artificial Sequence; identical to SEQ ID NO: 80762
  derived and/or modified CDS sequence (opt1) from neuraminidase__InfluenzaA__AJK00138

SEQ ID NO: 90010 - RNA, 1350 nt, Artificial Sequence
  derived and/or modified CDS sequence (opt1) from neuraminidase__InfluenzaA__AJK00152
augaaccccaaccagaagaucaucaccaucggcagcaucugcauggugaccgggaucgucucccugaugcuccagaucggcaacaucaucagcaugugggugucccacagcauccagacgcgcaaccagcaccagaccgagccgauccggaacaccaacuuccugaccgagaacgccguggccuccgucacgcuggcggggaacagcucccucugccccauccgcggcugggccgugcacagcaaggacaacuccauccggaucgggagcaagggcgacguguucgucauccgcgagcccuucaucuccugcagccaccuggagugccggaccuucuuccugacccagggcgcccucaucaacgacaagcacuccaacgggaccgugaaggaccgcagcccccaccggacgcugauguccugcccggugggcgaggcccccagccccuacaacucccgcuucgagagcgucgccugguccgcgagcgccugccacgacgggaccagcuggcugaccaucggcaucuccgggcccgacaacggcgccguggccgugcucaaguacaacggcaucaucaccgacacgaucaagagcuggcggaacaacauccugcgcacccaggaguccgagugcgcgugcgucaacgggagcugcuucaccgugaugaccgacggcccguccaacgggcaggccagcuacaagaucuucaagauggagaagggcaagguggucaaguccguggagcugaacgcccccaacuaccacuacgaggagugcagcugcuaccccgacgccggcgagaucacgugcgugugccgggacaacuggcacggguccaaccgccccugggucagcuucaaccagaaccucgaguaccagaucggcuacaucugcuccgggguguucggcgacaacccgcggcccaacgacgggaccggcagcugcggccccgugucccccaacggggccuacggcaucaagggguucagcuucaaguacggcaacggggucuggaucggccgcaccaaguccaccaacagccgguccggcuucgagaugaucugggacccgaacggguggacgggcaccgacagcgacuucuccgugaagcaggacaucguggagaucaccgacuggagcggguacagcggcuccuucguccagcaccccgagcugaccgggcuggacugcauccgccccugcuucuggguggagcucauccggggccgccccaaggagagcacgaucuggaccuccggcagcuccaucagcuucugcggggucaacuccgacaccgugagcugguccuggccggacggcgcggagcugcccuucaccaucgacaaguga

SEQ ID NO: 90011 - RNA, 1350 nt, Artificial Sequence
  derived and/or modified CDS sequence (opt1) from neuraminidase__InfluenzaA__AJK00167
augaaccccaaccagaagaucaucaccaucggcagcaucugcauggugaucgggaucgucucccugaugcuccagaucggcaacaugaucagcaucugggugucccacagcauccagaccgggaaccagcaccaggccgagccgauccgcaacgccaacuuccugacggagaacgcgguggccuccgucacccuggccggcaacagcucccucugccccgugcgggggugggccgugcacagcaaggacaacuccauccgcaucggcagcaagggcgacgucuucgugauccgggagcccuucaucuccugcagccaccuggagugccgcaccuucuuccugacccagggggcccuccugaacgacaagcacuccaacggcacggugaaggaccggagcccccaccgcacccugauguccugcccggucggggaggcgcccagccccuacaacucccgguucgagagcguggccugguccgccagcgccugccacgacggcaccagcuggcucaccaucgggaucuccggccccgacaacggcgcgguggccguccugaaguacaacgggaucaucacggacaccaucaagagcuggcgcaacaacauccugcggacccaggaguccgagugcgccugcgugaacggcagcugcuucaccgugaugacggacgggccguccaacggccaggccagcuacaagaucuucaagauggagaagggcaaggucgugaaguccguggagcucaacgcccccaacuaccacuacgaggagugcagcugcuaccccgacgcgggggagaucacgugcgucugccgcgacaacuggcacggcuccaaccggcccugggugagcuucaaccagaaccuggaguaccagaucggguacaucugcuccggcguguucggggacaacccgcgccccaacgacggcaccggcagcugcgggcccgucucccccaacggcgccuacgggaucaagggcuucagcuucaaguacgggaacggcguguggaucggccggaccaaguccaccaacagccgcuccggguucgagaugaucugggacccgaacggcuggaccgagaccgacagcaacuucuccgugaagcaggacaucgucgccaucaccgacuggagcggguacagcggcuccuucgugcagcaccccgagcugacggggcucgacugcauccggcccugcuucugggucgagcugauccgcggccggcccaaggagagcaccaucuggaccuccggcagcuccaucagcuucugcggggugaacuccgacaccgugagcugguccuggccggacggcgccgagcugcccuucacgaucgacaaguga

SEQ ID NO: 90012 - RNA, 1350 nt, Artificial Sequence
  derived and/or modified CDS sequence (opt1) from neuraminidase__InfluenzaA__AJK00178
augaaccccaaccagaagaucaucaccaucggcagcaucugcauggugaucgggaucgucucccugaugcuccagaucggcaacaugaucagcaucugggccucccacagcauccgcaccgggaaccagaaccagguggagccgaucaucaacacgaacuuccccaccgagaaggccgcggccuccaucacccuggccggcaacagcucccugugccccauccgggggugggccauccacagcaaggacaacuccauccgcaucggcagcaagggcgacguguucgucauccgggagcccuucaucuccugcagccaccucgagugccgcaccuucuuccugacgcagggggcccugcucaacgacaagcacuccaacggcaccgugaaggaccggagcccgcaccgcacccugauguccugccccgugggggaggcgcccagccccuacaacucccgguucgagagcgucgccugguccgccagcgccugccacgacggcaccagcuggcugacgaucgggaucuccggcccggacaacggcgcgguggccgugcucaaguacaacgggaucaucaccgacaccaucaagaccuggcgcaacaacauccugcggacgcaggagagcgagugcgccugcgucaacggcuccugcuucaccgugaugaccgacgggcccagcgacggccaggccuccuacaagaucuucaagauggagaagggcaaggugaucaagagcgucgagcuggacgcccccaacuaccacuacgaggagugcuccugcuaccccgacgcgggggagaucacgugcgugugccgcgacaacuggcacggcagcaaccggccguggguguccuucaaccagaaccucgaguaccagaucggguacaucugcagcggcgucuucggggacaacccccgccccaccgacggcaccggcuccugcgggcccgugagccacaacggcgccuacggggugaagggcuucuccuucaaguacgggaacggcgucuggaucggccggaccaagagcccgaacucccgcagcggguucgagaugaucugggaccccaacggcugguccgagaccgacagcuccuucagcgugaagcaggacaucguggccaucacggacuggagcggguacuccggcagcuucguccagcaccccgagcugaccgggcuggacugcauccggcccugcuucuggguggagcucauccgcggccggccgaaggaguccaccguguggaccagcggcuccagcaucuccuucugcggggucaacagcgacacgguguccuggagcuggcccgacggcgccgagcugcccuucaccaucgacaaguga

SEQ ID NO: 90013 - RNA, 1350 nt, Artificial Sequence
  derived and/or modified CDS sequence (opt1) from neuraminidase__InfluenzaA__AJK00199
augaaccccaaccagaagaucaucaccaucggcagcaucugcauggugaucgggaucgucucccugaugcuccagaucggcaacaugaucagcaucugggugucccacagcauccagaccgggaaccagaaccagguggagccgaucaucaacacgaacuuccugaccgagaaggccgucguguccaucacccuggccggcaacagcucccucugccccauccgcgggugggcgauccacagcaaggacaacuccauccggaucggcagcaagggcgacguguucgucauccgcgagcccuucaucuccugcagccaccuggagugccggaccuucuuccugacgcagggggcccuccugaacgacaagcacuccaacggcaccgugaaggaccgcagcccccaccggacccugauguccugcccggugggggaggcccccagccccuacaacucccgcuucgagagcgucgccugguccgccagcgcgugccacgacggcaccagcuggcucacgaucgggaucuccggccccgacaacggcgccgccgccgugcugaaguacaacgggaucaucaccgacaccaucaagagcuggcggaacaacauccugcgcacccaggaguccgagugcgcgugcgugaacggcagcugcuucacggucaugaccgacgggccguccgacggccaggccagcuacaagaucuucaagauggagaagggcaaggugaucaaguccguggagcucgacgcccccaacuaccacuacgaggagugcagcugcuaccccgacgccggggagaucacgugcgucugccgggacaacuggcacggcuccaaccgccccugggugagcuucaaccagaaccuggaguaccagaucggguacaucugcuccggcguguucggggacaacccgcggcccaacgacggcaccggcagcugcucccccgucagccacaacggggccuacggcgugaagggguucuccuucaaguacggcaacgggguguggaucggccgcaccaagagccccaacucccggagcggcuucgagaugaucugggacccgaacgggugguccgagaccgacagcagcuucuccgucaagcaggacaucguggcgaucaccgacuggagcggcuacuccgggagcuucgugcagcaccccgagcugaccggccucgacugcauccgccccugcuucugggucgagcugauccgggggcgccccaaggaguccacgguguggaccagcggcuccagcaucuccuucugcggcgucaacagcgacaccguguccuggagcuggccggacggggccgagcugcccuucaccaucgacaaguga

SEQ ID NO: 90014 - RNA, 1350 nt, Artificial Sequence
  derived and/or modified CDS sequence (opt1) from neuraminidase__InfluenzaA__AJK00208
augaaccccaaccagaagaucaucaccaucggcagcaucugcauggugaccgggaucgucucccugaugcuccagaucggcaacaucaucagcaugugggugucccacagcauccagacgcgcaaccagcaccagaccgagccgauccggaacaccaacuuccugaccgagaacgccguggccuccgucacgcuggcggggaacagcucccucugccccauccgcggcugggccgugcacagcaaggacaacuccauccggaucgggagcaagggcgacguguucgucauccgcgagcccuucaucuccugcagccaccuggagugccggaccuucuuccugacccagggcgcccuccugaacgacaagcacuccaacgggaccgugaaggaccgcagcccccaccggacgcugauguccugcccggugggcgaggcccccagccccuacaacucccgcuucgagagcgucgccugguccgcgagcgccugccacgacgggaccagcuggcucaccaucggcaucuccgggcccgacaacggcgccguggccgugcugaaguacaacggcaucaucaccgacacgaucaagagcuggcggaacaacauccugcgcacccaggaguccgagugcgcgugcgucaacgggagcugcuucaccgugaugaccgacggcccguccaacgggcaggccagcuacaagaucuucaagauggagaagggcaagguggucaaguccguggagcucaacgcccccaacuaccacuacgaggagugcagcugcuaccccgacgccggcgagaucaucugcgugugccgggacaacuggcacggguccaaccgccccugggucagcuucaaccagaaccuggaguaccagaucggcuacaucugcuccgggguguucggcgacaacccgcggcccaacgacgggacgggcagcugcggccccgugucccccaacggggccuacggcaucaagggguucagcuucaaguacggcaacggggucuggaucggccgcaccaaguccaccaacagccgguccggcuucgagaugaucugggacccgaacggguggaccggcacggacagcgacuucuccgugaagcaggacaucguggagaucaccgacuggagcggguacagcggcuccuucguccagcaccccgagcugaccgggcucgacugcauccgccccugcuucuggguggagcugauccggggccgccccaaggagagcaccaucuggacguccggcagcuccaucagcuucugcggggucaacuccgacaccgugagcugguccuggccggacggcgcggagcugcccuucaccaucgacaaguga

SEQ ID NO: 90015 - RNA, 1350 nt, Artificial Sequence
  derived and/or modified CDS sequence (opt1) from neuraminidase__InfluenzaA__AJK00219
augaaccccaaccagaagaucaucaccaucggcagcaucugcauggugaccgggaucgucucccugaugcuccagaucggcaacaucaucagcaugugggugucccacagcauccagacgcgcaaccagcaccaggccgagccgauccggaacaccaacuuccugaccgagaacgccguggcguccgucacccuggccgggaaccucagccugugccccauccgcggcugggccgugcacuccaaggacaacaacauccggaucgggagcaagggcgacguguucgucauccgcgagcccuucaucuccugcagccaccuggagugccggacguucuuccucacccagggcgcccugcugaacgacaagcacuccaacgggaccgugaaggaccgcagcccccaccggacccucauguccugcccggugggcgaggcccccagccccuacaacucccgcuucgagagcgucgcgugguccgccagcgccugccacgacgggacguccuggcugaccaucggcaucagcgggcccgacaacggcgccguggcggugcugaaguacaacggcaucaucaccgacaccaucaagagcuggcggaacaacauccuccgcacgcaggaguccgagugcgccugcgucaacgggagcugcuucaccgugaugaccgacggcccguccaacgggcaggccagcuacaagaucuucaagauggagaagggcaagguggucaaguccguggagcugaacgcccccaacuaccacuacgaggagugcagcugcuaccccgacgccggcgagaucaucugcgugugccgggacaacuggcacggguccaaccgccccugggucagcuucaaccagaaccuggaguaccagaucggcuacaucugcuccgggguguucggcgacaacccgcggcccaacgacgggaccggcagcugcggccccgugucccccaacggggcguacggcaucaagggguucagcuucaaguacggcaacggggucuggaucggccgcacgaaguccaccaacagccgguccggcuucgagaugaucugggacccgaacggguggaccggcaccgacagcgacuucuccgugaagcaggacaucguggagaucacggacuggagcggguacuccggcagcuucguccagcaccccgagcucaccgggcuggacugcauccgccccugcuucuggguggagcugauccggggccgccccaaggagagcaccaucuggaccuccggcagcuccaucagcuucugcggggucaacuccgacacggugagcugguccuggccggacggcgccgagcuccccuucaccaucgacaaguga

SEQ ID NO: 90016 - RNA, 1350 nt, Artificial Sequence
  derived and/or modified CDS sequence (opt1) from neuraminidase__InfluenzaA__AJK00230
augaaccccaaccagaagaucaucaccaucggcagcaucugcauggugaccgggaucgucucccugaugcuccagaucggcaacaucaucagcaugugggugucccacagcauccagacgcgcaaccagcaccagaccgagccgauccggaacaccaacuuccugaccgagaacgccguggccuccgucacgcuggcggggaacagcucccucugccccauccgcggcugggccgugcacagcaaggacaacuccauccggaucgggagcaagggcgacguguucgucauccgcgagcccuucaucuccugcagccaccuggagugccggaccuucuuccugacccagggcgcccucaucaacgacaagcacuccaacgggaccgugaaggaccgcagcccccaccggacgcugauguccugcccggugggcgaggcccccagccccuacaacucccgcuucgagagcgucgccugguccgcgagcgccugccacgacgggaccagcuggcugaccaucggcaucuccgggcccgacaacggcgccguggccgugcucaaguacaacggcaucaucaccgacacgaucaagagcuggcggaacaacauccugcgcacccaggaguccgagugcgcgugcgucaacgggagcugcuucaccgugaugaccgacggcccguccaacgggcaggccagcuacaagaucuucaagauggagaagggcaagguggucaaguccguggagcugaacgcccccaacuaccacuacgaggagugcagcugcuaccccgacgccggcgagaucaucugcgugugccgggacaacuggcacggguccaaccgccccugggucagcuucaaccagaaccucgaguaccagaucggcuacaucugcuccgggguguucggcgacaacccgcggcccaacgacgggacgggcagcugcggccccgugucccccaacggggccuacggcaucaagggguucagcuucaaguacggcaacggggucuggaucggccgcaccaaguccaccaacagccgguccggcuucgagaugaucugggacccgaacggguggaccggcacggacagcgacuucuccgugaagcaggacaucguggagaucaccgacuggagcggguacagcggcuccuucguccagcaccccgagcugaccgggcuggacugcauccgccccugcuucuggguggagcucauccggggccgccccaaggagagcaccaucuggacguccggcagcuccaucagcuucugcggggucaacuccgacaccgugagcugguccuggccggacggcgcggagcugcccuucaccaucgacaaguga

SEQ ID NO: 90017 - RNA, 1380 nt, Artificial Sequence
  derived and/or modified CDS sequence (opt1) from neuraminidase__InfluenzaA__AJS18470
augaaccccaaccagaagaucacgugcaucagcgccaccggcgugacccuguccgucgugagccuccugaucgggaucgccaaccugggccucaacaucgggcugcacuacaagguggacgacuccaccaccaucaacaucccgaacaugaacgagaccaaccccacgaucaccaacaucaccaacaucaucgucaacaagaacgaggagcgcaccuuccugaaccucacgaagccccugugcgaggugaacagcuggcacauccuguccaaggacaacgcgauccggaucggcgaggacgcccacauccucgugacccgcgagcccuaccugagcugcgacccgcaggggugccggauguucgcccugucccagggcaccacccuccgcggccggcacgccaacgggacgauccacgaccgcagccccuuccgggcccugaucuccugggagaugggccaggcgcccagccccuacaacacccgcgucgagugcaucgggugguccagcaccuccugccacgacggcaucagccggauguccaucugcaucagcgggccgaacaacaacgccuccgccguggugugguaccgcggccggcccgucaccgagauccccagcugggugggcaacauccugcgcacgcaggaguccgagugcgugugccacaaggggaucugccccgucgugaugaccgacggcccggccaacaacaaggcggccaccaagaucaucuacuucaaggaggggaagauccagaagaucgaggagcuccagggcaacgcccagcacguggaggagugcagcugcuacggcgccgccgggaugaucaagugcgucugccgggacaacuggaagggcgcgaaccgccccaucaucaccaucgaccccgagaugaugacgcacaccagcaaguaccugugcuccaagauccugaccgacaccagccggcccaacgacccgacgaacgggaacugcgacgcccccaucaucggcgggucccccgaccccggcgugaagggcuucgccuaccucgacggggagaacagcuggcugggccgcaccaucuccaaggacagccgguccggguacgagaugcugaaggugccgaacgccgagaccgacacccagagcggccccacguccuaccagcucaucgucaacaaccagaacuggagcggguacuccggcgccuucaucgacuacugggcgaacaagggcugcuucaaccccugcuucuacguggagcugauccgcgggcggcccaaggagaucgacgugcuguggaccagcaacuccauggucgcccucugcggcagccgcgagcggcugggguccuggagcuggcacgacggcgccgagaucaucuacuucaaguga

SEQ ID NO: 90018 - RNA, 1380 nt, Artificial Sequence
  derived and/or modified CDS sequence (opt1) from neuraminidase__InfluenzaA__AJS18481
augaaccccaaccagaagaucacgugcaucagcgccaccggcgugacccuguccgucgugagccuccugaucgggaucgccaaccugggccucaacaucgggcugcacuacaagguguccgacagcaccaccaucaacuccccgaacaugaacgagaccaaccccacgaccaccaacaucaccaacaucaucgucaacaagaacgaggagcgcacguuccugaaccucaccaagccccugugcgaggugaacagcuggcacauccuguccaaggacaacgcgauccggaucggcgaggaggcccacauccucgugacccgcgagcccuaccugagcugcgacccgcaggggugccggauguucgcccugucccagggcaccacgcuccgcggccggcacgccaacgggaccauccacgaccgcagccccuuccgggcccugaucuccugggagaugggccaggcgcccagccccuacaacacccgcgucgagugcaucgggugguccagcaccuccugccacgacggcaucagccggauguccaucugcaucagcgggccgaacaacaacgccuccgccguggugugguaccgcggccggcccgucacggagauccccagcugggccggcaacauccugcgcacccaggagagcgagugcgugugccacaaggggaucugccccguggucaugaccgacggcccggcgaacaacaaggccgccaccaagaucaucuacuuccgggaggggaagauccagaagaucgaggagcuccagggcaacgcccagcacaucgaggagugcuccugcuacggcgccgcggggaugaucaagugcgccugccgcgacaacuggaagggcgccaaccggcccaucaucacgaucgaccccgagaugaugacccacaccagcaaguaccugugcuccaagauccugaccgacacgagccgccccaacgacccgaccaacgggaacugcgacgcccccgugaccggcgggucccccgaccccggcaucaagggcuucgccuuccucgacggggagaacagcuggcugggccggaccaucuccaagaacagccgcuccggguacgagaugcugaaggugccgaacgcggagacggacacccagagcggccccaccuccuaccagcucaucgucaacaaccagaacuggagcggguacuccggcgccuucaucgacuacugggccaacaaggagugcuucaaccccugcuucuacguggagcugauccggggccgccccaaggagagcgacgugcuguggaccuccaacagcauggucgcccucugcgggucccgggagcgccugggcagcugguccuggcacgacggggccgagaucaucuacuucaaguga

SEQ ID NO: 90019 - RNA, 1410 nt, Artificial Sequence
  derived and/or modified CDS sequence (opt1) from neuraminidase__InfluenzaA__AKA59350
augaaccccaaccagaagaucaucaccaucggcagcgugugcaugaccaucggggucgccaaccugauccuccagaucggcaacaucaucuccaucuggaucagccacuccauccagcuggggaaccagaaccagaucgagacgugcaaccagagcgugaucaccuacgagaacaacaccugggugaaccagaccgacgucaacaucuccaacacgaacuucgccgcgggccagagcgugguguccgucaagcuggccgggaacagcucccucugcccggugagcggcugggccaucuacuccaaggacaacagcauccgcaucggcuccaagggggacguguucgucauccgggagcccuucaucagcugcagcccccuggagugccgcaccuucuuccugacccagggcgcccuccugaacgacaagcacuccaacgggaccaucaaggaccggucccccuaccgcacgcugaugagcugcccgaucggcgaggugcccucccccuacaacagccgguucgagagcguggccugguccgcgagcgccugccacgacgggaucaacuggcucaccaucggcaucuccggccccgacaacggggccgucgccgugcugaaguacaacggcaucaucaccgacaccaucaagagcuggcgcaacaacauccugcggacgcaggaguccgagugcgugugcgucaacgggagcugcuucaccgugaugaccgacggcccguccaacggccaggcgagcuacaagaucuuccgcaucgagaaggggaagaucgugaaguccgucgagaugaacgcccccaacuaccacuacgaggagugcagcugcuaccccgacuccagcgagaucacgugcgugugccgggacaacuggcacggcuccaaccgccccugggugagcuucaaccagaaccucgaguaccagaucggguacaucugcuccggcaucuucggggacaacccgcggcccaacgacaagaccggcagcugcggccccgucuccagcaacggggccaacggcgugaagggguucuccuucaaguacggcaacgggguguggaucggccgcaccaagagcaucagcucccggaacggcuucgagaugaucugggaccccaacggguggaccggcaccgacaacaacuucagcaucaagcaggacaucgucgggaucaacgagugguccggcuacagcggguccuucgugcagcacccggagcugacgggccuggacugcauccgccccugcuucugggucgagcucauccggggccgccccaaggagaacaccguguggaccagcggguccagcaucuccuucugcggcgugaacagcgacaccgucgggugguccuggcccgacggcgccgagcugccguucacgaucgacaaguga

SEQ ID NO: 90020 - RNA, 1410 nt, Artificial Sequence
  derived and/or modified CDS sequence (opt1) from neuraminidase__InfluenzaA__AKA59352
augaaccccaaccagaagaucaucaccaucggcagcgugugcaugaccaucgggauggccaaccugaugcuccagaucggcaacaucaucuccaucuggaucagccacuccauccagcuggggaaccagaaccagaucgagacgugcaaccagagcgucaucaccuacgagaacaacaccugggugaaccagaccuacgugaacaucuccaacacgaaccuggccgucggccagagcgugguguccaccaagcucgcggggaacagcucccugugcccggucagcggcugggccaucuacuccaaggacaacagcauccgcaucggcuccaagggggacguguucgugauccgggagcccuucaucagcugcagcccccuggagugccgcaccuucuuccucacccagggcgcccugcugaacgacaagcacuccaacgggacgaucaaggaccggucccccuaccgcacccucaugagcugcccgaucggcgagguccccucccccuacaacagccgguucgagagcguggccugguccgccagcgcgugccacgacgggaucaacuggcugaccaucggcaucuccggccccgacaacggggccguggccguccugaaguacaacggcaucaucaccgacacgaucaagagcuggcgcaacaacauccuccggacccaggaguccgagugcgccugcgugaacgggagcugcuucaccgugaugaccgacggcccguccgacggccaggcgagcuacaagaucuuccgcaucgagaaggggaagaucgucaaguccguggagaugaacgcccccaacuaccacuacgaggagugcagcugcuaccccgacuccagcgagaucacgugcgugugccgggacaacuggcacggcuccaaccgccccugggucagcuucaaccagaaccuggaguaccagaucggguacaucugcuccggcaucuucggggacaacccgcggcccaacgacaagaccggcagcugcggccccguguccagcaacggggccaacggcgugaagggguucuccuucaaguacggcaacggggucuggaucggccgcaccaagagcaucagcucccggaacggcuucgagaugaucugggaccccaacggguggaccggcacggacaacaacuucagcaucaagcaggacaucguggggaucaacgagugguccggcuacagcggguccuucgugcagcacccggagcugaccggccucgacugcauccgccccugcuucugggucgagcugauccggggccgccccaaggagaacaccaucuggaccagcggguccagcaucuccuucugcggcgugaacagcgacacggucgggugguccuggcccgacggcgccgagcugccguucaccaucgacaaguga

SEQ ID NO: 90021 - RNA, 1410 nt, Artificial Sequence
  derived and/or modified CDS sequence (opt1) from neuraminidase__InfluenzaA__AKA59354
augaaccccaaccagaagaucaucaccaucggcagcgugugcaugaccaucggggucgccaaccugauccuccagaucggcaacaucaucuccaucuggaucagccacuccauccagcuggggaaccagaaccagaucgagacgugcaaccagagcgugaucaccuacgagaacaacaccugggccaaccagaccuacgugaacaucuccaacacgaacuucgcggccggccagagcgucguguccgugaagcuggccgggaacagcucccucugcccggucagcggcugggccaucuacuccaaggacaacagcauccgcaucggcuccaagggggacguguucgugauccgggagcccuucaucagcugcagcccccuggagugccgcaccuucuuccugacccagggcgcccuccugaacgacaagcacuccaacgggaccaucaaggaccggucccccuaccgcacgcugaugagcugcccgaucggcgagguccccucccccuacaacagccgguucgagagcguggcgugguccgccagcgccugccacgacgggaucaacuggcucaccaucggcaucuccggccccgacaacggggccguggcgguccugaaguacaacggcaucaucaccgacaccaucaagagcuggcgcaacaacauccugcggacgcaggaguccgagugcgugugcgugaacgggagcugcuucaccgucaugaccgacggcccguccaacggccaggccagcuacaagaucuuccgcaucgagaaggggaagaucgugaaguccguggagaugaacgcccccaacuaccacuacgaggagugcagcugcuaccccgacuccagcgagaucacgugcgucugccgggacaacuggcacggcuccaaccgccccugggugagcuucaaccagaaccucgaguaccagaucggguacaucugcuccggcaucuucggggacaacccgcggcccaacgacaagaccggcagcugcggccccguguccagcaacggggccaacggcgucaagggguucuccuucaaguacggcaacgggguguggaucggccgcaccaagagcaucagcucccggaacggcuucgagaugaucugggaccccaacggguggaccgagaccgacaacaacuucagcaucaagcaggacaucgugggcaucaacgagugguccggguacagcggcuccuucguccagcacccggagcugacggggcuggacugcauccgccccugcuucuggguggagcucauccggggccgccccaaggagaacaccgucuggaccagcggcuccagcaucuccuucugcggggugaacagcgacaccgugggcugguccuggcccgacggggccgagcugccguucacgaucgacaaguga

SEQ ID NO: 90022 - RNA, 1380 nt, Artificial Sequence
  derived and/or modified CDS sequence (opt1) from neuraminidase__InfluenzaA__AKS48026
augaaccccaaccagaagaucacgugcaucagcgccaccggcgugacccuguccgucgugagccuccugaucgggaucgccaaccugggccucaacaucgggcugcacuacaagguguccgacagcaccaccaucaacaucccgaacaugaacgagaccaaccccacgaccaccaacaucaccaacaucaucgucaacaagaacgaggagcgcacguuccugaaccucaccaagccccugugcgaggugaacuccuggcacauccugagcaaggacaacgcgauccggaucggcgaggacgcccacauccucgugacccgcgagcccuaccuguccugcgacccgcaggggugccggauguucgcccugagccagggcaccacgcuccgcggccggcacgccaacgggaccauccacgacaagucccccuuccgcgcccugaucagcugggagaugggccaggcgcccucccccuacaacacccgggucgagugcaucggguggagcuccaccagcugccacgacggcaucucccgcaugagcaucugcaucuccgggccgaacaacaacgccagcgccguggugugguaccggggccgccccgucacggagauccccuccugggugggcaacauccugcggacccaggagagcgagugcgugugccacaaggggaucugccccgucgugaugaccgacggcccggccaacaacaaggcggccaccaagaucaucuacuucaaggaggggaagauccagaagaucgaggagcuccagggcaacgcccagcacaucgaggagugcagcugcuacggcgccgccgggaugaucaagugcgugugccgcgacaacuggaagggcgcgaaccggcccaucaucacgaucgaccccgagaugaugacccacaccuccaaguaccugugcagcaagauccugaccgacacgucccgccccaacgacccgaccaacgggaacugcgacgagcccaucaccggcgggagccccgaccccggcgucaagggcuucgccuuccucgacggggagaacuccuggcugggccggaccaucagcaaggacucccgcagcggguacgagaugcugaaggugccgaacgccgagacggacacccaguccggccccaccagcuaccagcucaucgugaacaaccagaacugguccggguacagcggcgccuucaucgacuacugggccaacaaggagugcuucaaccccugcuucuacgucgagcugauccggggccgccccaaggagaucgacgugcugugggcguccaacagcaugguggcccucugcgggucccgggagcgccugggcagcugguccuggcacgacggggccgagaucaucuacuucaaguga

SEQ ID NO: 90023 - RNA, 1380 nt, Artificial Sequence
  derived and/or modified CDS sequence (opt1) from neuraminidase__InfluenzaA__AKS48040
augaaccccaaccagaagaucacgugcaucagcgccaccggcaugacccuguccguggucagccuccugaucgggaucgccaaccugggccucaacaucgggcugcacuacaagguguccgacagcaccaccaucaacaucccgaacaugaacgagaccaaccccacgaccaccaacaucaccaacaucaucgugaacaagaacgaggagcgcacguuccugaaccucaccaagccccugugcgaggucaacuccuggcacauccugagcaaggacaacgcgauccggaucggcgaggacgcccacauccucgugacccgcgagcccuaccuguccugcgacccgcaggggugccggauguucgcccugagccagggcaccacgcuccgcggccggcacgccaacgggaccauccacgaccgcucccccuuccgggcccugaucagcugggagaugggccaggcgcccucccccuacaacacccgcguggagugcaucggguggagcuccaccagcugccacgacggcaucucccggaugagcaucugcaucuccgggccgaacaacaacgccagcgccgucgugugguaccgcggccggcccgugacggagauccccuccugggucggcaacauccugcgcacccaggagagcgagugcgugugccacaaggggaucugccccguggucaugaccgacggcccggccaacaacaaggcggccaccaagaucaucuacuucaaggaggggaagauccagaagaucgaggagcuccagggcaacgcccagcacaucgaggagugcagcugcuacggcgccgccgggaugaucaagugcgugugccgggacaacuggaagggcgcgaaccgccccaucaucacgaucgaccccgagaugaugacccacaccuccaaguaccugugcagcaagauccugaccgacacgucccggcccaacgacccgaccaacgggaacugcgacgcccccaucaccggcgggagccccgaccccggcgugaagggcuucgccuuccucgacggggagaacuccuggcugggccgcaccaucagcaaggacucccggagcggguacgagaugcugaaggucccgaacgccgagacggacacccaguccggccccaccagcuaccagcucaucgugaacaaccagaacugguccggguacagcggcgccuucaucgacuacugggcgaacaaggagugcuucaaccccugcuucuacguggagcugauccgcggccggcccaaggagaucgacguccugugggccuccaacagcaugguggcccucugcgggucccgcgagcggcugggcagcugguccuggcacgacggggccgagaucaucuacuucaaguga

SEQ ID NO: 90024 - RNA, 1380 nt, Artificial Sequence
  derived and/or modified CDS sequence (opt1) from neuraminidase__InfluenzaA__ALO75898
augaaccccaaccagaagaucacgugcaucagcgccaccggcgugacccuguccgucgugagccuccugaucgggaucgccaaccugggccucaacaucgggcugcacuacaagguguccgacagcaccaccaucaacaucccgaacaugaacgagaccaaccccacgaccaccaacaucaccaacaucaucgucaacaagaacgaggagcgcacguuccugaaccucaccaagccccugugcgaggugaacuccuggcacauccugagcaaggacaacgcgauccggaucggcgaggacgcccacauccucgugacccgcgagcccuaccuguccugcgacccgcaggggugccggauguucgcccugagccagggcaccacgcuccgcggccggcacgccaacgggaccauccacgaccgcucccccuuccgggcccugaucagcugggagaugggccaggcgcccucccccuacaacacccgcgucgagugcaucggguggagcuccaccagcugccacgacggcaucucccggaugagcaucugcaucuccgggccgaacaacaacgccagcgccguggugugguaccgcggccggcccgucacggagauccccuccugggugggcaacauccugcgcacccaggagagcgagugcgugugccacaaggggaucugccccgucgugaugaccgacggcccggccaacaacaaggcggccaccaagaucaucuacuucaaggaggggaagauccagaagaucgaggagcuccagggcaacgcccagcacaucgaggagugcagcugcuacggcgccgccgggaugaucaagugcgugugccgggacaacuggaagggcgcgaaccgccccaucaucacgaucgaccccgagaugaugacccacaccuccaaguaccugugcagcaagauccugaccgacacgucccggcccaacgacccgaccaacgggaacugcgacgcccccaucaccggcgggagccccgaccccggcgucaagggcuucgccuuccucgacggggagaacuccuggcugggccgcaccaucagcaaggacucccggagcggguacgagaugcugaaggugccgaacgccgagacggacacccaguccggccccaccagcuaccagcucaucgugaacaaccagaacugguccggguacagcggcgccuucaucgacuacugggcgaacaaggagugcuucaaccccugcuucuacgucgagcugauccgcggccggcccaaggagaucgacgugcugugggccuccaacagcaugguggcccucugcgggucccgcgagcggcugggcagcugguccuggcacgacggggccgagaucaucuacuucaaguga

SEQ ID NO: 90025 - RNA, 1380 nt, Artificial Sequence; identical to SEQ ID NO: 90024
  derived and/or modified CDS sequence (opt1) from neuraminidase__InfluenzaA__ALO75910

SEQ ID NO: 90026 - RNA, 1380 nt, Artificial Sequence
  derived and/or modified CDS sequence (opt1) from neuraminidase__InfluenzaA__ALO75922
augaaccccaaccagaagaucacgugcaucagcgccaccggcgugacccuguccgucgugagccuccugaucgggaucgccaaccugggccucaacaucgggcugcacuacaagguguccgacagcaccaccaucaacaucccgaacaugaacgagaccaaccccacgaccaccaacaucaccaacaucaucgucaacaagaacgaggagcgcacguuccugaaccucaccaagccccugugcgaggugaacuccuggcacauccugagcaaggacaacgcgauccggaucggcgaggacgcccacauccucgugacccgcgagcccuaccuguccugcgacccgcaggggugccggauguucgcccugagccagggcaccacgcuccgcggccggcacgccaacgggaccauccacgaccgcucccccuuccgggcccugaucagcugggagaugggccaggcgcccucccccuacaacacccgcgucgagugcaucggguggagcuccaccagcugccacgacggcaucucccggaugagcaucugcaucuccgggccgaacaacaacgccagcgccguggugugguaccgcggccggcccgucacggagauccccuccugggugggcaacauccugcgcacccaggagagcgagugcgugugccacaaggggaucugccccgucgugaugaccgacggcccggccaacaacaaggcggccaccaagaucaucuacuucaaggaggggaagauccagaagaucgaggagcuccagggcaacgcccagcacaucgaggagugcagcugcuacggcgccgccgggaugaucaagugcgugugccgggacaacuggaagggcgcgaaccgccccaucaucacgaucgaccccgagaugaugacccacaccuccaaguaccugugcagcaagauccugaccgacacgucccggcccaacgacccgaccaacgggaacugcgacgagcccaucaccggcgggagccccgaccccggcgucaagggcuucgccuuccucgacggggagaacuccuggcugggccgcaccaucagcaaggacucccggagcggguacgagaugcugaaggugccgaacgccgagacggacacccaguccggccccaccagcuaccagcucaucgugaacaaccagaacugguccggguacagcggcgccuucaucgacuacugggccaacaaggagugcuucaaccccugcuucuacgucgagcugauccgcggccggcccaaggagaucgacgugcugugggcguccaacagcaugguggcccucugcgggucccgcgagcggcugggcagcugguccuggcacgacggggccgagaucaucuacuucaaguga

SEQ ID NO: 90027 - RNA, 1401 nt, Artificial Sequence
  derived and/or modified CDS sequence (opt1) from neuraminidase__InfluenzaA__ALT20083
augaaccccaaccagcgcaucaccgccaucggcagcgugucccugaucaucgccaucaucugccuccugaugcagaucgcgauccugaccacgaccaugacccuccacuuccggcagaacgagugcagcaacccguccaacaaccaggucaugcccugcgagcccaucaucaucgagcgcaacaccgugcaccugaacagcacgaccaucgagcgggagaucugccccaagguggccgaguacaagaacugguccaagccgcagugccagaucaccggguucgcccccuucagcaaggacaacuccauccgccugagcgccuccggcgacaucugggucacccgggagcccuacgugagcugcucccucaacaagugcuaccaguucgcccuggggcagggcacgacccugaagaacaagcacagcaacgggaccacccacgaccgcacgccccaccggacccuccugaugaacgagcugggcgugccguuccaccucggcaccaagcaggucugcaucgcgugguccagcuccagcugcuacgacgggaaggccuggcugcacgugugcgugaccggcgacgacaagaacgccacggccuccaucaucuacgacgggaugcuggucgacagcaucggcuccuggagcaagaacauccuccgcacccaggagagcgagugcgugugcaucaacgggaccugcgcgguggucaugaccgacggcuccgccagcggcaaggccgacacgcgggugcuguucauccgcgaggggaagaucaucaacaucagcccccuguccggcuccgcccagcacguggaggagugcagcugcuacccccgguaccccgagguccgcugcgugugccgggacaacuggaagggguccaaccgcccgauccucuacaucaacauggccgacuacagcaucgaguccagcuacgugugcuccggccuggucggcgacacgccccggaacgacgacagcuccagcuccagcaacugccgcgaccccaacaacgagcgcggggcgcccggcgugaaggggugggccuucgacgacggcaacgacguguggauggggcggaccaucaagaacggcucccggagcggcuacgagaccuuccgcgucgugaacggguggaccauggccaacuccaagagccagaucaaccgccaggugaucgucgacagcaacgacugguccggcuacagcgggaucuucuccguggagggcaagaagugcaucaaccggugcuucuacgucgagcugauccgcgggcggccgcaggagccccgcgugugguggaccagcaacuccaucaucguguucugcggcaccagcggcaccuacgggacgggcuccuggcccgacggggccaacaucaacuucaugcccaucuga

SEQ ID NO: 90028 - RNA, 1410 nt, Artificial Sequence
  derived and/or modified CDS sequence (opt1) from neuraminidase__InfluenzaA__AMA65392
augaaccccaaccagaagaucaucaccaucggcagcgugugcaugaccaucgggauggccaaccugauccuccagaucggcaacaucaucuccaucugggucagccacuccauccagaucgggaaccagagccagaucgagacgugcaaccaguccgugaucaccuacgagaacaacaccugggugaaccagaccuacgucaacaucagcaacacgaacuucgccgcgggccaguccguggugagcgucaagcuggccgggaacuccagccugugcccgguguccggcugggccaucuacagcaaggacaacuccgugcgcaucggcagccgcggggacgucuucgugauccgggagcccuucaucuccugcagcccccucgagugccggaccuucuuccugacccagggcgcccugcucaacgacaagcacuccaacgggaccaucaaggaccgcagccccuaccggacgcugauguccugcccgaucggcgaggugcccagccccuacaacagccgcuucgaguccgucgccuggagcgcguccgccugccacgacgggaucaacuggcugaccaucggcaucagcggccccgacuccggggccguggccgugcucaaguacaacggcaucaucaccgacaccaucaagagcuggcggaacaacauccugcgcacgcaggaguccgagugcgcgugcgucaacgggagcugcuucaccaucaugaccgacggcccguccgacggccaggccagcuacaagaucuuccggaucgagaaggggaagaucaucaaguccguggagaugaaggcccccaacuaccacuacgaggagugcagcugcuaccccgacuccagcgagaucacgugcgugugccgcgacaacuggcacggcuccaaccggcccugggucagcuucaaccagaaccuggaguaccagaugggguacaucugcuccggcguguucggggacaacccgcgccccaacgacaagaccggcagcugcggccccguguccagcaacggggccaacggcgucaagggguucagcuucaaguacggcaacgggguguggaucggccggaccaaguccaucagcucccgcaagggcuucgagaugaucugggaccccaacggguggaccggcaccgacaacaaguucagcaucaagcaggacaucguggggaucaacgagugguccggcuacagcggguccuucguccagcacccggagcucacgggccuggacugcauccggcccugcuucuggguggagcugauccgcggccggcccgaggagaacaccaucuggaccagcggguccagcaucuccuucugcggcgucaacagcgacaccguggggugguccuggcccgacggcgccgagcucccguucacgaucgacaaguga

SEQ ID NO: 90029 - RNA, 1410 nt, Artificial Sequence
  derived and/or modified CDS sequence (opt1) from neuraminidase__InfluenzaA__AMA65394
augaaccccaaccagaagaucaucaccaucggcagcgugugcaugaccaucgggauggccaaccugauccuccagaucggcaacaucaucuccaucugggucagccacuccauccagaucgggaaccagagccagaucgagacgugcaaccaguccgugaucaccuacgagaacaacaccugggugaaccagaccuacgucaacaucagcaacacgaacuucgccgcgggccaguccguggugagcgucaagcuggccgggaacuccagccugugcccgguguccggcugggccaucuacagcaaggacaacuccgugcgcaucggcagcaagggggacgucuucgugauccgggagcccuucaucuccugcagcccccucgagugccgcaccuucuuccugacccagggcgcccugcucaacgacaagcacuccaacgggaccaucaaggaccggagccccuaccgcacgcugauguccugcccgaucggcgaggugcccagccccuacaacagccgguucgaguccgucgccuggagcgcguccgccugccacgacgggaucaacuggcugaccaucggcaucagcggccccgacuccggggccguggccgugcucaaguacaacggcaucaucaccgacaccaucaagagcuggcgcaacaacauccugcggacgcaggaguccgagugcgcgugcgucaacgggagcugcuucaccaucaugaccgacggcccguccgacggccaggccagcuacaagaucuuccgcaucgagaaggggaagaucaucaaguccguggagaugaaggcccccaacuaccacuacgaggagugcagcugcuaccccgacuccagcgagaucacgugcgugugccgggacaacuggcacggcuccaaccgccccugggucagcuucaaccagaaccuggaguaccagaugggguacaucugcuccggcguguucggggacaacccgcggcccaacgacaagaccggcagcugcggccccguguccagcaacggggccaacggcgucaagggguucagcuucaaguacggcaacgggguguggaucggccgcaccaaguccaucagcucccggaagggcuucgagaugaucugggaccccaacggguggaccggcaccgacaacaaguucagcaucaagcaggacaucguggggaucaacgagugguccggcuacagcggguccuucguccagcacccggagcucacgggccuggacugcauccgccccugcuucuggguggagcugauccggggccgccccgaggagaacaccaucuggaccagcggguccagcaucuccuucugcggcgucaacagcgacaccguggggugguccuggcccgacggcgccgagcucccguucacgaucgacaaguga

SEQ ID NO: 90030 - RNA, 1410 nt, Artificial Sequence
  derived and/or modified CDS sequence (opt1) from neuraminidase__InfluenzaA__BAA00618
augaaccccaaccagaagaucaucaccaugggcagcguguccaucaucaucgccaucgucugccugcucaugcagaucgccauccuggugaccacggugacccugcacuuccgccagcacgagagcgacuccccgcccagcaaccaggucauccccugcgagcccaucaucaucgagcggaacaucaccgagaucguguaccucaacaacaccacgaucgagaaggagaccugcccgaaguccguggaguaccgcaacuggagcaagccccagugcaagaucaccggguucgcgcccuucuccaaggacaacagcauccggcuguccgccggcggggacaucugggucacccgcgagcccuacgugagcugcgacccgggcaagugcuaccaguucgcccuggggcagggcacgacccucgacaacaagcacuccaacgacaccauccacgaccggaucccccaccgcacccugcugaugaacgagcucggcgugcccuuccaccuggggacgcggcaggucugcaucgccuggagcuccagcuccugccacgacggcaaggccuggcugcacgugugcgugaccggggacgacaagaacgcgaccgccagcuucaucuacaacggccgccucgucgacuccaucgggagcuggucccagaacauccugcggacccaggagagcgagugcgugugcaucaacggcacgugcaccguggucaugaccgacggcagcgccuccgggcgcgccgacacccggauccuguucaucgaggagggcaagaucgugcacaucagcccccucuccgggagcgcgcagcacguggaggagugcuccugcuacccgcgcuaccccgacguccggugcaucugccgcgacaacuggaagggcagcaacucccccgugguggacaucaacaugaaggacuacagcaucgacuccagcuacgucugcuccggccuggugggggacacgccccggaacgacgaccgcagcuccaagagcaacugccggaacccgaacaacgagcgcggcaaccacggggugaagggcugggccuucgacaacggggacgacgucuggaugggccggaccaucuccaaggaccugcgcagcggcuacgagaccuucaaggugaucgggggcugguccacccccaacagcaagucccagacgaaccggcaggucaucguggacagcaacaacuggagcggguacuccggcaucuucagcguggaggggaaguccugcaucaaccgcugcuucuacgucgagcucauccgcggccggaagcaggagacccgcgugugguggaccagcaacuccaucguggucuucugcggcaccagcgggacguacggcaccggguccuggcccgacggcgccaacaucgacuucaugcccaucuga

SEQ ID NO: 90031 - RNA, 1410 nt, Artificial Sequence
  derived and/or modified CDS sequence (opt1) from neuraminidase__InfluenzaA__BAA00619
augaaccccaaccagaagaucaucaccaucggcagcgugucccugaccuucgccgccaucugcuuccucaugcagaucgcgauccuggucacgaccgugacccugaacuucaagcaguacgagugcgacccgcccgccaccaaccaggugaugcccugcgagcccaucaucaucgagcgcaacaucacggagaucgucuaccucaccaacaccaccaucgagcgggagaucugcccgaagcugguggaguaccgcaacuggagcaagccccagugcaagaucacgggguucgcccccuucuccaaggacaacagcauccggcuguccgccggcggggacaucugggugacccgcgagcccuacgucagcugcgacccgggccggugcuaccaguucgcccucgggcagggcaccacccuggacaacaagcacuccaacgacacgauccacgaccgcacgccccaccggacccugcucaugaacgagcugggcgugcccuuccaccuggggacccgccaggugugcaucgcguggagcuccagcuccugccacgacggcaaggccuggcuccacgucugcaucaccggguacgacaagaacgccaccgccagcuucaucuacgacggccggcugguggacuccaucgggagcugguccaagaacauccugcgcacccaggagagcgagugcgugugcaucaacgggaccugcacggucgugaugaccgacggcuccgcgagcggccgggccgacacccgcauccucuucaucgaggagggccggaucgugcacaucagcccccuguccgggagcgcccagcacgucgaggagugcuccugcuacccgcgcuaccccggcgugcggugcaucugccgcgacaacuggaagggcagcaaccggcccguggucgacaucaacgugaaggacuacuccaucaacagcuccuacgugugcagcgggcuggucggcgacacgccccgcaacaacgaccgguccagcaacuccuacugccagaacccgaacaacgagaaggggaaccacggcgugaaggggugggccuucgacgacggcaacgacguguggaugggccgcaccaucagcgaggacucccggagcggguaccagaccuucaaggucaucggcgggugguccacccccaacagcaagcuccagaucaaccgccaggugaucgucgacuccgacaaccgcagcggcuacuccgggaucuucagcguggagggcaaguccugcaucaaccggugcuucuacguggagcugauccgcggccggcgccaggagacccgggucugguggacgagcaacagcaucgugguguucugcgggaccuccggcaccuacgggaccggcagcuggcccgacggggccgacaucaaccugaugcccaucuga

SEQ ID NO: 90032 - RNA, 1410 nt, Artificial Sequence
  derived and/or modified CDS sequence (opt1) from neuraminidase__InfluenzaA__BAA00620
augaaccccaaccagaagaucaugaccaucggcagcgugucccugaucaucgccgccgucugcuuccucaugcagaucgcgauccuggugaccacggugacccugcacuucaagcagugcgagugcgacagcccguccaacaaccaggucaagcccugcgagcccaucaucaucgagcgcaacaucaccgagaucguguaccucaacaacaccacgaucgagaaggagaccugccccaagcugguggaguaccggaacuggagcaagccgcagugcaagaucaccggguucgcccccuucuccaaggacaacagcauccgccuguccgccggcggggacaucugggucacccgggagcccuacgugagcugcgaccccggcaagugcuaccaguucgcccucgggcagggcacgacccuggacaacaagcacuccaacgacaccauccacgaccgcaucccgcaccggacccugcucaugaacgagcugggcgugcccuuccaccuggggacgcgccaggucugcaucgccuggagcuccagcuccugccacgacggcaaggcguggcuccacgugugcgugaccggggacgacaagaacgccaccgccagcuucaucuacgacggccggcuggucgacuccaucgggagcuggucccagaacauccugcgcacccaggagagcgagugcgugugcaucaacggcacgugcaccguggucaugaccgacggcuccgccagcgggcgggcggacacccgcauccucuucaucgaggagggcaagaucgugcacaucagcccccuguccgggagcgcccagcacguggaggagugcuccugcuacccccgguacccgaacguccgcugcaucugccgggacaacuggaagggcagcaaccgccccaucguggacaucaacaugaaggacuacuccaucgacagcuccuacgugugcagcggccuggucggggacacgccccggaacgacgaccgcuccagcaaguccaacugccggaaccccaacaacgagaagggcaaccacggggugaagggcugggccuucgacaacggggacgacguguggaugggccgcaccaucagcaaggaccuccgguccggcuacgagaccuucaaggucaucgggggcugguucaccccgaacagcaagucccaggugaaccgccaggucaucguggacagcgacaaccgguccggguacagcggcaucuucuccguggagggcaagagcugcaucaaccgcugcuucuacgucgagcugauccgcgggcggggccaggagacgcgcgugugguggaccagcaacuccaucguggucuucugcgggaccagcggcaccuacgggaagggcuccuggcccgacggggccaacaucaacuucaugcccaucuga

SEQ ID NO: 90033 - RNA, 1410 nt, Artificial Sequence
  derived and/or modified CDS sequence (opt1) from neuraminidase__InfluenzaA__BAA00621
augaaccccaaccagaagaucaucaccaucggcagcgugucccugaccaucgccacgaucugcuuccucaugcagaucgccauccuggucaccaccgugacccugcacuucaagcaguacgagugcgacagcccggcgaacaaccaggugaugcccugcgagcccaucaucaucgagcgcaacaucacggagaucgucuaccucaccaacaccaccaucgagaaggagaucugccccaagcugguggaguaccggaacugguccaagccgcagugcaagaucacgggguucgcccccuucagcaaggacaacuccauccgccugagcgccggcggggacaucugggugacccgggagcccuacgucuccugcgaccccggcaagugcuaccaguucgcccucgggcagggcaccacccuggacaacaagcacagcaacgacacgauccacgaccgcaccccgcaccggacccugcucaugaacgagcugggcgugcccuuccaccuggggacccgccaggugugcaucgccugguccagcuccagcugccacgacggcaaggcguggcuccacgucugcgugacgggguacgacaagaacgccaccgccuccuucaucuacgacggccggcugguggacagcaucggguccuggagccagaacauccugcgcacccaggaguccgagugcgucugcaucaacgggaccugcacgguggugaugaccgacggcagcgccuccggccgggcggacaccaagauccucuucaucgaggagggcaagaucguccacaccagcccccugagcggguccgcccagcacguggaggagugcagcugcuacccccgcuacccgggcgugcggugcaucugccgcgacaacuggaagggcuccaaccggcccgucguggacaucaacgugaaggacuacagcaucgacuccagcuacgucugcuccgggcuggugggcgacacgccccgcaagaacgaccggagcuccagcuccuacugccgcaaccccaacaacgagaaggggacccacggcgugaaggggugggccuucgacgacggcaacgacgucuggaugggccggaccaucagcgaggacucccgcagcggguacgagaccuucaaggugaucggcgggugguccacgccgaacagcaagcuccagaucaaccggcaggucaucguggacuccaacgaccgcagcggcuacuccgggaucuucagcguggagggcaagagcugcaucaaccggugcuucuacgucgagcugauccgcggccgcgagcaggagacccgggugugguggaccuccaacagcaucguggucuucugcgggaccuccggcacguacgggaccggcagcuggcccgacggggccgacaucaaccugaugcccaucuga

SEQ ID NO: 90034 - RNA, 1413 nt, Artificial Sequence
  derived and/or modified CDS sequence (opt1) from neuraminidase__InfluenzaA__BAA06714
augaaccccaaccagaagaucaucaccaucggcagcaucuccauggccaucgggaucaucagccugauccuccagaucggcaacaucaucuccaucugggugagccacuccauccagaccgggagccagaaccacacgggcaucugcaaccagcgcaucaucaccuacgagaacuccaccugggucaaccagaccuacgugaacaucaacaacacgaacguggucgccgggaaggacaagaccagcgugacccuggcgggcaacuccagccugugcccgauccggggcugggccaucuacaccaaggacaacuccauccgcaucgggagcaagggcgacguguucgucauccgggagcccuucaucuccugcagccaccucgagugccgcacguucuuccugacccagggggcccugcucaacgacaagcacuccaacggcaccgugaaggaccggagccccuaccgccggcugauguccugcccccugggggaggccccgagccccuacaacucccgcuucgagagcaucgccuggagcgcguccgccugccacgacggcaugggcuggcucaccaucgggaucagcggccccgacgacggggccguggccguccugaaguacaacggcaucaucacggagaccaucaaguccuggaagaagcggauccugcgcacccaggagagcgagugcgugugcgugaacggcuccugcuucaccaucaugacggacgggcccagcaacggccaggcguccuaccggaucuucaagaucgagaaggggaaggucaccaagagcaucgagcucgacgccccgaacucccacuacgaggagugcagcugcuaccccgacaccggcaccgugaugugcgugugccgcgacaacuggcacggguccaaccggcccugggucagcuucaaccagaaccuggacuaccagaucggcuacaucugcuccggcguguucggggacaacccgccgcccaaggacggcaaggggagcugcgaccccgugacggucgacggcgccgacggggugaagggcuucuccuaccgcuacggcaacgggguguggaucggccggaccaagagcaaccgcuuccggaagggguucgagaugaucugggaccccaacggcuggaccgacaccgacuccgacuuccuggucaagcaggacgugguggccaugacggacuggagcggguacuccggcagcuucguccagcaccccgagcucaccggccuggacugcaugcgccccugcuucuggguggagcugguccgggggcgcccccgggagaacaccaccaucuggacgagcggcuccagcaucuccuucugcggggugaacagcgacaccgccaacugguccuggcccgacggcgcggagcucccguucaccaucgacaaguga

SEQ ID NO: 90035 - RNA, 1413 nt, Artificial Sequence
  derived and/or modified CDS sequence (opt1) from neuraminidase__InfluenzaA__BAA06715
augaaccccaaccagaagaucaucaccaucggcagcaucuccauggccaucgggaucaucagccugauccuccagaucggcaacaucaucuccaucugggccagccacuccauccagaccgggagccagaaccacacgggcaucugcaaccagcgcaucaucaccuacgagaacuccaccugggugaaccagaccuacgucaacaucaacaacacgaacgugguggcggggaaggacaagaccagcgucacccuggccggcaacuccagccugugcccgauccggggcugggccaucuacaccaaggacaacuccauccgcaucgggagcaagggcgacguguucgugauccgggagcccuucaucuccugcagccaccucgagugccgcacguucuuccugacccagggggcccugcucaacgacaagcacuccaacggcaccgucaaggaccggagccccuaccgcgcccugauguccugcccccugggggaggcgccgagccccuacaacucccgguucgagagcguggccuggagcgccuccgccugccacgacggcaugggcuggcucaccaucgggaucagcggccccgacaacggggcgguggccguccugaaguacaacggcaucaucacggagaccaucaaguccuggaagaagcgcauccugcggacccaggagagcgagugcgugugcgugaacggcuccugcuucaccaucaugacggacgggcccagcaacggcgccgccuccuaccgcaucuucaagaucgagaaggggaaggucaccaagagcaucgagcucgacgccccgaacuaccacuacgaggagugcuccugcuaccccgacaccggcaccgugaugugcgugugccgggacaacuggcacgggagcaaccgccccuccgucagcuucaaccagaaccuggacuaccagaucggcuacaucugcuccggcguguucggggacaacccccggccgaaggacggcgaggggagcugcaaccccgugacggucgacggcgcggacggggugaagggcuucuccuaccgcuacggcaacgggguguggaucggccggaccaagagcaaccgccugcggaagggguucgagaugaucugggaccccaacggcuggaccgacaccgacuccgacuucagcgucaagcaggacgugguggccaugacggacugguccggguacagcggcagcuucguccagcaccccgagcucaccggccuggacugcaugcgcccgugcuucuggguggagcugauccgggggcgcccccgggagaagaccaccaucuggacguccggcagcuccaucagcuucugcggggucaacuccgacaccgccaacuggagcuggcccgacggcgccgagcuccccuucaccaucgacaaguga

SEQ ID NO: 90036 - RNA, 1410 nt, Artificial Sequence
  derived and/or modified CDS sequence (opt1) from neuraminidase__InfluenzaA__BAA06716
augaacaccaaccagcgcaucaucaccaucggcacgaucugccugaucguggggaucaucagccuccugcugcagaucggcaacaucauccuccuguggaugucccacagcauccagaccggggagaagucccaccccaaggucugcaaccagagcgugaucaccuacgagaacaacaccugggugaaccagacguacgucaacaucuccaacaccaacaucgccgccggccagggggugaccccgaucauccuggcgggcaacagcucccucugccccaucagcggcugggccaucuacuccaaggacaacagcauccggaucggguccaagggcgacaucuucgugaugcgcgagcccuucaucagcugcucccaccuggagugccggaccuucuuccugacgcagggggcccuccugaacgaccgccacagcaacggcaccgucaaggaccggucccccuaccgcacccugaugagcugcccgaucggggaggcccccucccccuacaacagccgguucgaguccguggccuggagcgcgagcgccugccacgacggcaugggcuggcucaccaucgggaucuccggccccgacaacggggccguggccguccugaaguacaacggcaucaucacggacaccaucaagagcuggcgcaacaagauccugcggacccaggaguccgagugcgugugcaucaacggcagcugcuucaccaucaugacggacgggccguccaacggccaggcgagcuacaagcuguucaagauggagaaggggaagaucaucaaguccaucgagcucgacgcccccaacuaccacuacgaggagugcagcugcuaccccgacaccggcaagguggucugcgugugccgcgacaacuggcacgccuccaaccggcccugggugagcuucgaccagaaccuggacuaccagaucggguacaucugcuccggcgucuucggcgacaacccgcgcagcaacgacgggaagggcaacugcgggcccgugcucuccaacggcgccaacggggugaagggcuucagcuuccgguacggcaacggggucuggaucggccgcaccaaguccaucagcucccggcgcggguucgagaugaucugggaccccaacggcuggaccgagacggacagcuccuucagcaugaagcaggacaucaucgcccugaccgacuggagcggguacuccggcagcuucgugcagcaccccgagcugaccggcaugaacugcauccggccgugcuucuggguggagcucauccgcgggcagcccaaggaguccaccaucuggacgagcggcuccagcaucuccuucugcggggucaacagcggcaccgcguccuggagcuggcccgacggcgccgaccugcccuucaccaucgacaaguga

SEQ ID NO: 90037 - RNA, 1413 nt, Artificial Sequence
  derived and/or modified CDS sequence (opt1) from neuraminidase__InfluenzaA__BAA06717
augaaccccaaccagaagaucaucaccaucggcagcaucuccauggccaucgggaucaucagccugauccuccagaucggcaacaucaucuccaucugggccagccacuccauccagaccgggagccagaaccacacgggcaucugcaaccagcgcaugaucaccuacgagaacuccaccugggugaaccagaccuacgucaacaucagcaacacgaacgugguggcggggaaggacaagaccuccgucacccuggccggcaacagcucccugugcccgauccggggcugggccaucuacaccaaggacaacagcauccgcaucggguccaagggcgacguguucgugauccgggagcccuucaucagcugcucccaccucgagugccgcacguucuuccugacccagggggcccugcucaacgacaagcacagcaacggcaccgucaaggaccggucccccuaccgcgcccugaugagcugcccccugggggaggcgccgucccccuacaacagccgguucgagagcguggccugguccgccagcgccugccacgacggcaugggcuggcucaccaucgggaucuccggccccgacgacggggcgguggccguccugaaguacaacggcaucaucacggagaccaucaagagcuggcgcaagcagauccugcggacccaggaguccgagugcgugugcgugaacggcagcugcuucaccaucaugacggacgggcccuccgacggcccggccagcuaccgcaucuucaagaucgagaaggggaaggucaccaaguccaucgagcucgacgcccccaacuaccacuacgaggagugcagcugcuaccccgacaccggcaccgugaugugcgugugccgggacaacuggcacggguccaaccgccccugggucagcuucaaccagaaccuggacuaccagaucggcuacaucugcuccggcguguucggggacaacccgcggcccaaggacggcgaggggagcugcaaccccgugacggucgacggcgccgacggggugaagggcuucuccuaccgcuacggcaacgggguguggaucggccggaccaagagcaaccgccugcggaagggguucgagaugaucugggaccccaacggcuggaccgacaccgacuccgacuucagcgucaagcaggacgugguggcgaugacggacugguccggguacagcggcagcuucguccagcacccggagcucaccggccuggacugcaugcgccccugcuucuggguggagcugauccgggggcgcccccgggagaagaccaccaucuggacguccggcagcuccaucagcuucugcggggucaacuccgacaccgccaacuggagcuggcccgacggcgccgagcucccguucaccaucgacaaguga

SEQ ID NO: 90038 - RNA, 1413 nt, Artificial Sequence
  derived and/or modified CDS sequence (opt1) from neuraminidase__InfluenzaA__BAA06718
augaaccccaaccagaagaucaucaccaucggcagcaucugcauggccaucgggaucaucucccugauccuccagaucggcaacaucgugagcaucuggaucucccacagcauccagaccgggucccagaacuacacgggcaucugcaaccagcgcaucaucaccuacgagaacagcaccugggucaaccagaccuacgugaacaucaacaacacgaacguggucgccgggcaggacaccaccuccguggcgcuggccggcaacagcucccugugcccgaucagcggcugggccaucuacuccaaggacaacagcauccggaucggguccaagggcgacguguucgucauccgcgagcccuucaucagcugcucccaccucgagugccggaccuucuuccugacgcagggggcccugcucaacgacaagcacagcaacggcaccgugaaggaccgcucccccuaccggcgccugaugagcugccccaucggggaggccccgucccccuacaacagccgguucgagagcguggcgugguccgccagcgccugccacgacggcaugggcuggcugaccaucgggaucuccggccccgacgacggggccgucgcggugcucaaguacaacggcaucaucaccgagacgaucaagagcuggcgcaagcggauccugcgcacccaggaguccgagugcgugugcgucaacggcagcugcuucaccaucaugaccgacgggcccaacaacggcccggccuccuaccggaucuucaagaucgagaaggggaagaucaccaagagcaucgagcuggacgcccccaacucccacuacgaggagugcagcugcuaccccgacgccggcacggugaugugcgugugccgcgacaacuggcacggguccaaccggcccugggucagcuucaaccagaaccucgacuaccagaucggcuacaucugcuccggcguguucggggacaacccgcgccccaaggacggcaaggggagcugcgaccccgugaccgucgacggcgccgacggggugaagggcuucuccuaccgguacggcaacgggguguggaucggccgcaccaagagcaacuccagccggcgcggguucgagaugaucugggaccccaacggcuggacggacaccgacuccaaguuccuggucaagcaggacgugguggcgaugaccgacuggagcggguacagcggcuccuucguccagcacccggagcugaccggccucgacugcaugcggcccugcuucuggguggagcugguccgcgggcggccccgcgagaacacgaccaucuggaccagcggcuccagcaucuccuucugcggggugaacggcgacaccgccaacuggagcuggcccgacggcgccgagcugccguucacgaucgacaaguga

SEQ ID NO: 90039 - RNA, 1413 nt, Artificial Sequence
  derived and/or modified CDS sequence (opt1) from neuraminidase__InfluenzaA__BAA06720
augaaccccaaccagaagaucaucaccaucggcagcaucuccauggccaucgggaucaucagccugauccuccagaucggcaacaucaucuccaucugggugagccacuccauccagaccgggagccagaaccacacgggcaucugcaaccagcgcaucaucaccuacgagaacuccaccugggucaaccagaccuacgugaacaucaacaacacgaacguggucgccgggaaggacaagaccagcgugacccuggcgggcaacuccagccugugcccgauccucggcugggccaucuacaccaaggacaacuccauccggaucgggagcaagggcgacguguucgucauccgcgagcccuucaucuccugcagccaccuggagugccggacguucuuccugacccagggggcccuccugaacgacaagcacuccaacggcaccgugaaggaccgcagccccuaccggcgccugauguccugcccccucggggaggccccgagccccuacaacucccgguucgagagcguggccuggagcgcguccgccugccacgacggcaugggcuggcugaccaucgggaucagcggccccgacgacggggccgucgccgugcugaaguacaacggcaucaucacggagaccaucaaguccuggaagaagcgcauccuccggacccaggagagcgagugcgugugcgucaacggcuccugcuucaccaucaugacggacgggcccagcaacggcgcggccuccuaccgcaucuucaagaucgagaaggggaaggugaccaagagcaucgagcuggacgccccgaacucccacuacgaggagugcagcugcuaccccgacaccggcaccgugaugugcgucugccgggacaacuggcacggguccaaccgccccugggugagcuucaaccagaaccuggacuaccagaucggcuacaucugcuccggcguguucggggacaacccgccgcccaaggacggcaaggggagcugcaaccccgucacgguggacggcgccgacggggugaagggcuucuccuaccgguacggcaacggggucuggaucggccgcaccaagagcaaccgguuccgcaagggguucgagaugaucugggaccccaacggcuggaccgacaccgacuccgacuucagcgugaagcaggacguggucgccaugacggacugguccggguacagcggcagcuucgugcagcaccccgagcucaccggccuggacugcaugcggcccugcuucugggucgagcuggugcgcgggcggccccgcgagaacaccaccaucuggacguccggcagcuccaucagcuucugcggggugaacuccgacaccgcgaacuggagcuggcccgacggcgccgagcucccguucaccaucgacaaguga

SEQ ID NO: 90040 - RNA, 1410 nt, Artificial Sequence
  derived and/or modified CDS sequence (opt1) from neuraminidase__InfluenzaA__BAD16637
augaaccccaaccagaagaucaucaccaucggcagcgugucccugaccaucgccacggucugcuuccucaugcagaucgccauccuggcgaccaccgugacccugcacuucaagcagcacgagugcgacagcccggccuccaaccaggugaugcccugcgagcccaucaucaucgagcgcaacaucacggagaucgucuaccucaacaacaccaccaucgagaaggagaucugccccgaggugguggaguaccggaacuggagcaagccgcagugccagaucaccggguucgcccccuucuccaaggacaacagcauccgccuguccgccggcggggacaucugggucacgcgggagcccuacgugagcugcgaccccggcaagugcuaccaguucgcccuggggcagggcaccacccucgacaacaagcacuccaacggcaccauccacgaccgcaucccgcaccggacgcugcugaugaacgagcucggggugcccuuccaccugggcaccaagcaggucugcguggcguggagcuccagcuccugccacgacgggaaggccuggcugcacgugugcgucaccggcgacgaccgcaacgccaccgccagcuucaucuacgacgggcggcucguggacuccaucggcagcuggucccagaacauccugcgcacgcaggagagcgagugcgugugcaucaacgggaccugcaccgucgugaugaccgacggcuccgcgagcggccgggccgacacgcgcauccuguucaucaaggaggggaagaucgugcacaucagcccccucuccggcagcgcccagcacaucgaggagugcuccugcuacccccgguacccggacguccgcugcaucugccgggacaacuggaagggcagcaaccgccccgugaucgacaucaacauggaggacuacuccaucgacagcuccuacgugugcagcgggcuggucggcgacacgccccggaacgacgacuccagcuccaacagcaacugccgcgaccccaacaacgagcgggggaacccgggcgugaaggggugggccuucgacaacggcgacgacguguggaugggccgcaccaucuccaaggacagccgguccggguacgagaccuucaaggucaucggcggguggagcacccccaacuccaagagccaggugaaccgccaggucaucgugggcaacaacaacugguccggguacagcggcaucuucagcguggagggcaaguccugcaucaaccggugcuucuacgucgagcugauccgcgggaugccccaggagacccgcgugugguggaccagcaacuccaucguggucuucugcggcaccagcgggacguacggcaccggguccuggcccgacggcgccaacaucaacuucaugccgaucuga

SEQ ID NO: 90041 - RNA, 1410 nt, Artificial Sequence
  derived and/or modified CDS sequence (opt1) from neuraminidase__InfluenzaA__BAD16638
augaaccccaaccagaagaucaucaccaucggcagcgugucccugaccaucgccacggucugcuuccucaugcagaucgccauccuggcgaccaccgugacccugcacuucaagcagcacgagugcgacagcccggccuccaaccaggugaugcccugcgagcccaucaucaucgagcgcaacaucacggagaucgucuaccucaacaacaccaccaucgagaaggagaucugccccgaggugguggaguaccggaacuggagcaagccgcagugccagaucaccggguucgcccccuucuccaaggacaacagcauccgccuguccgccggcggggacaucugggucacgcgggagcccuacgugagcugcgaccccggcaagugcuaccaguucgcccuggggcagggcaccacccucgacaacaagcacuccaacggcaccauccacgaccgcaucccgcaccggacgcugcugaugaacgagcucggggugcccuuccaccugggcaccaagcaggucugcguggcguggagcuccagcuccugccacgacgggaaggccuggcugcacgugugcgucaccggcgacgaccgcaacgccaccgccagcuucaucuacgacgggcggcucguggacuccaucggcagcuggucccagaacauccugcgcacgcacgagagcgagugcgugugcaucaacgggaccugcaccgucgugaugaccgacggcuccgcgagcggccgggccgacacgcgcauccuguucaucaaggaggggaagaucgugcacaucagcccccucuccggcagcgcccagcacaucgaggagugcuccugcuacccccgguacccggacguccgcugcaucugccgggacaacuggaagggcagcaaccgccccgugaucgacaucaacauggaggacuacuccaucgacagcuccuacgugugcagcgggcuggucggcgacacgccccggaacgacgacuccagcuccaacagcaacugccgcgaccccaacaacgagcgggggaacccgggcgugaaggggugggccuucgacaacggcgacgacguguggaugggccgcaccaucaacaaggacucccggagcggguacgagaccuucaaggucaucggcgggugguccacccccaacagcaagucccaggugaaccgccaggucaucguggacaacaacaacuggagcggcuacuccgggaucuucagcguggagggcaagagcugcaucaaccggugcuucuacgucgagcugauccgcggccgcccccaggagacccgggugugguggaccuccaacagcaucguggucuucugcgggaccuccggcacguacgggaccggcagcuggcccgacggggccaacaucaacuucaugccgaucuga

SEQ ID NO: 90042 - RNA, 1410 nt, Artificial Sequence; identical to SEQ ID NO: 87221
  derived and/or modified CDS sequence (opt1) from neuraminidase__InfluenzaA__BAD16639

SEQ ID NO: 90043 - RNA, 1410 nt, Artificial Sequence
  derived and/or modified CDS sequence (opt1) from neuraminidase__InfluenzaA__BAD16640
augaaccccaaccagaagaucaucaccaucggcagcgugucccugaccaucgccacggucugcuuccucaugcagaucgccauccuggugaccaccgugacccugcacuucaagcagcacgagugcgacagcccggcguccaaccaggucaugcccugcgagcccaucaucaucgagcgcaacaucacggagaucguguaccucaacaacaccaccaucgagaaggagaucugccccgagguggucgaguaccggaacuggagcaagccgcagugccagaucaccggguucgcccccuucuccaaggacaacagcauccgccuguccgccggcggggacaucugggugacgcgggagcccuacgugagcugcgaccccggcaagugcuaccaguucgcccuggggcagggcaccacccucgacaacaagcacuccaacgacaccauccacgaccgcaucccgcaccggacgcugcugaugaacgagcucggcguccccuuccaccuggggacccgccaggugugcguggccuggagcuccagcuccugccacgacggcaaggcguggcugcacgucugcgugaccggggacgacaagaacgccaccgccagcuucaucuacgacggccggcucauggacuccaucgggagcuggucccagaacauccugcgcacgcaggagagcgagugcgugugcaucaacgggaccugcaccgucgugaugaccgacggcuccgccagcgggcgggcggacacgcgcauccuguucaucgaggagggcaagaucgugcacaucagcccccucuccgggagcgcccagcacgucgaggagugcuccugcuacccccgguacccggacgugcgcugcaucugccgggacaacuggaagggcagcaaccgccccgugaucgacaucaacauggaggacuacuccaucgacagcuccuacgucugcagcggccuggugggggacacgccccggaacgacgaccgcuccagcaacuccaacugccggaaccccaacaacgagcgcggcaacccgggggugaagggcugggccuucgacaacggggacgacgucuggaugggccggaccaucagcaaggaccugcgcuccggcuacgagaccuucaaggugaucgggggcuggagcacccccaacuccaagagccagaucaaccggcaggucaucguggacuccaacaacuggagcggguacuccggcaucuucagcguggagggcaagagcugcaucaaccgcugcuucuacgucgagcucauccgcggccggcagcaggagacccgcgugugguggaccuccaacagcaucguggucuucugcggcaccuccgggacguacggcaccgggagcuggcccgacggcgccaacaucaacuucaugcccaucuga

SEQ ID NO: 90044 - RNA, 1410 nt, Artificial Sequence
  derived and/or modified CDS sequence (opt1) from neuraminidase__InfluenzaA__BAD16641
augaaccccaaccagaagaucaucaccaucggcagcgccucccugaccaucgccacggugugcuuccucaugcagaucgcgauccuggucaccaccgugacccugcacuucaagcagcacgagugcgacagcccggccuccaaccaggugaugcccugcgagcccaucaucaucgagcgcaacacgaccgagaucgucuaccucaacaacaccaccaucgagaaggagaucugccccaaggugguggaguaccggaacuggagcaagccgcagugcaagaucacgggguucgcccccuucuccaaggacaacagcauccgccuguccgccggcggggacaucugggucacccgggagcccuacgugagcugcgaccccggcaagugcuaccaguucgcccuggggcagggcaccacccucgacaacaagcacuccaacgacacgauccacgaccgcaucccgcaccggacccugcugaugaacgagcucggcgugcccuuccaccuggggacccgccaggucugcaucgcguggagcuccagcuccugccacgacggcaaggccuggcugcacgugugcgugaccggggacgacaagaacgccacggccagcuucaucuacgacggccggcucgucgacuccaucgggagcuggucccagaacauccugcgcacccaggagagcgagugcgugugcaucaacgggaccugcaccguggucaugacggacggcuccgcgagcgggcgggccgacacccgcauccuguucaucgaggagggcaagaucgugcacaucagcccccucuccgggagcgcccagcacguggaggagugcuccugcuacccccgguacccggacguccgcugcaucugccgggacaacuggaagggcagcaaccgccccgugguggacaucaacauggaggacuacuccaucgacagcuccuacgucugcagcggccuggugggggacacgccccggaacgacgaccgcuccagcaacuccaacugccggaaccccaacaacgagaagggcaaccagggggugaagggcugggccuucgacaacggggacgacgucuggaugggccgcaccaucagcaaggaccugcgguccggcuacgagaccuucaaggugaucgggggcuggagcaccccgaacuccaagagccagaucaaccgccaggucaucguggacuccgacaaccggagcggguacuccggcaucuucagcguggagggcaagagcugcaucaaccgcugcuucuacgucgagcucauccgcggccggaagcaggagacccgcgugugguggaccuccaacagcaucguggucuucugcggcacguccgggaccuacggcaccgggagcuggcccgacggcgccaacaucaaccugaugcccaucuga

SEQ ID NO: 90045 - RNA, 1410 nt, Artificial Sequence
  derived and/or modified CDS sequence (opt1) from neuraminidase__InfluenzaA__BAD16642
augaaccccaaccagaagaucaucaccaucggcagcgugucccugaccaucgccacggucugcuuccucaugcagaucgccauccuggugaccaccgugacccugcacuucaagcaguacgagugcgacagcccggcguccaaccaggucaugcccugcgagcccaucaucaucgagcgcaacaucacggagaucguguaccucaacaacaccaccaucgacaaggagaagugccccaagguggucgaguaccggaacuggagcaagccgcagugccagaucaccggguucgcccccuucuccaaggacaacagcauccgccuguccgccggcggggacaucugggugacgcgggagcccuacgugagcugcgaccacggcaagugcuaccaguucgcccuggggcagggcaccacccucgacaacaagcacuccaacgacaccauccacgaccgcaucccccaccggacgcugcugaugaacgagcucggcgucccguuccaccuggggacccgccaggugugcaucgccuggagcuccagcuccugccacgacggcaaggcguggcugcacgugugcaucaccggggacgacaagaacgccaccgccagcuucaucuacgacggccggcucgucgacuccaucgggagcuggucccagaacauccugcgcacgcaggagagcgagugcgugugcaucaacgggaccugcaccguggucaugaccgacggcuccgccagcggccgggcggacacgcgcauccuguucaucgaggagggcaagaucgugcacaucagcccccucuccgggagcgcccagcacguggaggagugcuccugcuacccccgguaccccggcguccgcugcaucugccgggacaacuggaagggcagcaaccgcccggugguggacaucaacauggaggacuacuccaucgacagcuccuacgucugcagcgggcuggugggcgacacgccccggaacgacgaccgcuccagcaacuccaacugccggaaccccaacaacgagcgcgggaaccagggcgugaaggggugggccuucgacaacggcgacgacgucuggaugggccggaccaucagcaaggaccugcgcuccggguacgagaccuucaaggugaucggcggguggagcacccccaacuccaagagccagaucaaccggcaggucaucguggacuccgacaaccgcagcggcuacuccgggaucuucagcguggagggcaagagcugcaucaaccgcugcuucuacgucgagcucauccggggccgcaagcaggagacccgggugugguggaccuccaacagcaucguggucuucugcgggaccuccggcacguacgggaccggcagcuggccggacggggccaacaucaacuucaugcccaucuga

SEQ ID NO: 90046 - RNA, 1410 nt, Artificial Sequence
  derived and/or modified CDS sequence (opt1) from neuraminidase__InfluenzaA__BAD16643
augaaccccaaccagaagaucaucaccaucggcagcgugucccugaccaucgccacgaucugcuuccucaugcagaucgccauccuggucaccaccgugacccugcacuucaagcaguacgagugcgacagcccggcgaacaaccaggugaugcccugcgagcccaucaucaucgagcgcaacaucacggagaucgucuaccucaccaacaccaccaucgagaaggagaucugccccaagcugguggaguaccggaacugguccaagccgcagugcaagaucacgggguucgcccccuucagcaaggacaacuccauccgccugagcgccggcggggacaucugggugacccgggagcccuacgucuccugcgaccccggcaagugcuaccaguucgcccucgggcagggcaccacccuggacaacaagcacagcaacgacacgauccacgaccgcaccccgcaccggacccugcucaugaacgagcugggcgugcccuuccaccuggggacccgccaggugugcaucgccugguccagcuccagcugccacgacggcaaggcguggcuccacgucugcgugacgggguacgacaagaacgccaccgccuccuucaucuacgacggccggcugguggacagcaucggguccuggagccagaacauccugcgcacccaggaguccgagugcgucugcaucaacgggaccugcacgguggugaugaccgacggcagcgccuccgggcgggcggacaccaagauccucuucaucgaggagggcaagaucguccacaucagcccccugagcggguccgcccagcacguggaggagugcagcugcuacccccgcuacccgggcgugcggugcaucugccgcgacaacuggaagggcuccaaccggcccgucguggacaucaacgugaaggacuacagcaucgacuccagcuacgucugcuccgggcuggugggcgacacgccccgcaacaacgaccggagcuccaacagcuacugccgcaaccccaacaacgagaaggggaaccacggcgugaaggggugggccuucgacgacggcaacgacgucuggaugggccggaccaucuccgaggacagccgcuccggguacgagaccuucaaggugaucggcggccucuucaccccgaacagcaagcugcagaucaaccggcaggucaucguggacuccgacaaccgcagcggcuacuccgggaucuucagcguggagggcaaguccugcaucaaccggugcuucuacgucgagcugauccgcggccgcgagcaggagacccgggugugguggacgagcaacagcaucguggucuucugcgggaccuccggcaccuacgggaccggcagcuggcccgacggggccgacaucaaccucaugcccaucuga

SEQ ID NO: 90047 - RNA, 1410 nt, Artificial Sequence
  derived and/or modified CDS sequence (opt1) from neuraminidase__InfluenzaA__BAD16644
augaaccccaaccagaagaucaucaccaucggcagcgugucccugaccaucgccacgaucugcuuccucaugcagaucgccauccuggucaccaccgugacccugcacuucaagcaguacgagugcgacagcccgcccaacaaccaggugaugcccugcgagcccaucaucaucgagcgcaacaucacggagaucgucuaccucaccaacaccaccaucgagaaggagaucugcccgaagcugguggaguaccggaacugguccaagccccagugcaagaucacgggguucgcgcccuucagcaaggacaacuccauccgccugagcgccggcggggacaucugggugacccgggagcccuacgucuccugcgacccgggcaagugcuaccaguucgcccucgggcagggcaccacccuggacaacaagcacagcaacgacacgauccacgaccgcacgccccaccggacccugcucaugaacgagcugggcgugcccuuccaccuggggacccgccaggugugcaucgccuggucccggagcuccugccacgacggcaaggccuggcuccacgucugcgugaccggguacgacaagaacgcgaccgccagcuucaucuacgacggccgccugguggacuccaucgggagcugguccaagaacauccugcggacccaggagagcgagugcgucugcaucaacgggaccugcacgguggugaugaccgacggcuccgccagcggccgcgccgacaccaagauccucuucaucgaggagggcaagaucguccacaucagcccccuguccgggagcgcgcagcacguggaggagugcuccugcuacccgcgguaccccggcgugcgcugcaucugccgggacaacuggaagggcagcaaccgccccgucguggacaucaacgugaaggacuacuccaucgacagcuccuacgucugcagcgggcuggugggcgacacgccccggaacaacgaccgcuccagcaacuccuacugccggaacccgaacaacgagaaggggaaccacggcgugaaggggugggccuucgacgacggcaacgacgucuggaugggccgcaccaucagcgaggacucccggagcgggugcgagaccuucaaggugaucggcgggugguccacccccaacagcaagcuccagaucaaccgccaggucaucguggacuccgacaaccggagcggcuacuccgggaucuucagcguggagggcaaguccugcaucaaccgcugcuucuacgucgagcugauccgcggccgggagcaggagacccgcgugugguggacgagcaacagcaucguggucuucugcgggaccuccggcaccuacgggaccggcagcuggcccgacggggccgacaucaaccugaugcccaucuga

SEQ ID NO: 90048 - RNA, 1410 nt, Artificial Sequence; identical to SEQ ID NO: 78600
  derived and/or modified CDS sequence (opt1) from neuraminidase__InfluenzaA__BAD16645

SEQ ID NO: 90049 - RNA, 1410 nt, Artificial Sequence; identical to SEQ ID NO: 86568
  derived and/or modified CDS sequence (opt1) from neuraminidase__InfluenzaA__BAD16646

SEQ ID NO: 90050 - RNA, 1410 nt, Artificial Sequence; identical to SEQ ID NO: 78600
  derived and/or modified CDS sequence (opt1) from neuraminidase__InfluenzaA__BAD16647

SEQ ID NO: 90051 - RNA, 1410 nt, Artificial Sequence
  derived and/or modified CDS sequence (opt1) from neuraminidase__InfluenzaA__BAD16648
augaaccccaaccagaagaucaucaccaucggcagcgugucccugaccaucgccacgaucugcuuccucaugcagaucgccauccuggucaccaccgugacccugcacuucaagcaguacgagugcagcuccccgcccaacaaccaggugaugcccugcgagcccaucaucaucgagcgcaacaucacggagaucgucuaccucaccaacaccaccaucgagaaggagaucugcccgaagcugguggaguaccggaacuggagcaagccccagugcaagaucacgggguucgcgcccuucuccaaggacaacagcauccgccuguccgccggcggggacaucugggugacccgggagcccuacgucagcugcgacccgggcaagugcuaccaguucgcccucgggcagggcaccacccuggacaacaagcacuccaacgacacgauccacgaccgcacccccuaccggacccugcucaugaacgagcugggcgugcccuuccaccuggggacccgccaggugugcaucgccuggagcuccagcuccugccacgacggcaaggccuggcuccacgucugcgugacgggguacgacaagaacgcgaccgccagcuucaucuacgacggccggcugguggacuccaucgggagcugguccaagaacauccugcgcacccaggagagcgagugcgucugcaucuacgggaccugcacgguggugaugaccgacggcuccgccagcgagcgggccgagaccaagauccucuucaucgaggagggcaagaucguccacaucagcccccuguccggcagcgcgcagcacguggaggagugcuccugcuacccgcgcuaccccggggugcggugcgucugccgcgacaacuggaagggcagcaaccggcccgugguggacaucaacgucaaggacuacuccaucgugagcuccuacgugugcagcggccuggucggggacacgccccgcaagaacgaccgguccagcuccagcuacugccgcaacccgaacaacgagaagggcaaccacggggugaagggcugggccuucgacgacgggaacgacgucuggaugggccggaccaucuccgaggagagccgcuccggcuacgagaccuucaaggugaucgggggcuggagcacccccaacuccaagcuccagaucaaccgccaggugaucgucgacagcgacaaccgguccggguacagcggcaucuucagcguggaggggaaguccugcaucaaccggugcuucuacguggagcugauccgcggccgcgagcaggagacccgggucugguggacgagcaacuccaucgugguguucugcggcaccagcgggaccuacggcaccggguccuggcccgacggcgccgacaucaaccugaugcccaucuga

SEQ ID NO: 90052 - RNA, 1410 nt, Artificial Sequence
  derived and/or modified CDS sequence (opt1) from neuraminidase__InfluenzaA__BAE07203
augaaccccaaccagaagaucaccaccaucggcagcaucugcauggugaucgggaucgucucccugaugcuccagaucggcaacaucaucagcaucugggugucccacagcauccagacggggaaccagcaccaggccgagccgugcaaccaguccaucaucaccuacgagaacaacaccugggugaaccagaccuacgucaacaucagcaacacgaacuuccugaccgagaaggccguggcguccgugacccuggccggcaacagcucccucugccccaucagcgggugggccgucuacuccaaggacaacggcauccgcaucggcagcaagggggacguguucgugauccgggagcccuucaucuccugcagccaccuggagugccgcaccuucuuccugacgcagggcgcccuccugaacgacaagcacuccaacgggaccgucaaggaccggagcccccaccgcacccugauguccugcccggugggcgaggcccccagccccuacaacucccgguucgagagcguggcguggagcgccuccgccugccacgacgggaccagcuggcucacgaucggcaucuccggccccgacaacggggccgucgcggugcugaaguacaacggcaucaucaccgacaccaucaagagcuggcgcaacaacaucaugcggacccaggaguccgagugcgccugcgugaacgggagcugcuucacggucaugaccgacggcccguccaacggccaggccagcuacaagaucuuccgcaucgagaaggggaagguggugaaguccgccgagcugaacgcccccaacuaccacuacgaggagugcagcugcuaccccgacgcgggcgagaucacgugcgucugccgggacaacuggcacggguccaaccgccccugggugagcuucaaccagaaccucgaguaccggaucggcuacaucugcuccgggguguucggcgacaacccgcgccccaacgacggcaccgggagcugcggccccgucucccccaagggggccuacggcaucaagggguucagcuucaaguacggcaacggcguguggaucgggcggaccaaguccaccaacagccgcuccggcuucgagaugaucugggacccgaacggguggaccggcaccgacagcaacuucagcgugaagcaggacaucgucgccaucacggacugguccggguacagcggcuccuucgugcagcaccccgagcugaccggccuggacugcauccggcccugcuucugggucgagcucauccgcgggcggcccaaggagagcaccaucuggaccuccggcagcuccaucagcuucugcggggugaacuccgacacggugggcuggagcuggccggacggcgccgagcugcccuucaccaucgacaaguga

SEQ ID NO: 90053 - RNA, 1410 nt, Artificial Sequence
  derived and/or modified CDS sequence (opt1) from neuraminidase__InfluenzaA__BAF46322
augaaccccaacccgaagaucaucaccaucggcagcgugucccugaccaucagcacgaucugcuucuucaugcagaucgccauccucaucaccaccgucacccugcacuucaagcaguacgaguucaacuccccgcccaacaaccaggugaugcugugcgagcccacgaucaucgagcgcaacaucaccgagaucguguaccucaccaacaccacgaucgagaaggagaucugccccaagcuggccgaguaccggaacuggagcaagccccagugcgacaucaccggguucgcgcccuucuccaaggacaacagcauccgccuguccgccggcggggacaucugggucacccgggagcccuacgugagcugcgacccggacaagugcuaccaguucgcccucggccaggggaccacgcugaacaacgugcacuccaacgacaccguccacgaccgcacccccuaccggacccugcucaugaacgagcugggcgugcccuuccaccugggcacgaagcaggucugcaucgccuggagcuccagcuccugccacgacgggaaggccuggcuccacgugugcgugaccggcgacgacaagaacgcgaccgccagcuucaucuacaacgggcgccugguggacuccaucgucagcugguccaagaagauccugcggacccaggagagcgagugcgugugcaucaacggcacgugcaccguggucaugaccgacggguccgccagcggcaaggccgacaccaagauccucuucaucgaggagggcaagaucgugcacacgagcacccuguccgggagcgcgcagcacguggaggagugcuccugcuacccccgcuacccgggcguccggugcgugugccgcgacaacuggaaggggagcaaccggcccaucguggacaucaacaucaaggacuacuccaucgucagcuccuacgugugcagcggccuggugggcgacacgccccgcaagaacgacuccagcuccagcucccacugccucgaccccaacaacgaggagggcgggcacggggucaagggcugggccuucgacgacgggaacgacguguggaugggccggaccaucagcgagaagcugcgcuccggcuacgagaccuucaaggucaucgagggguggagcaacccgaacuccaagcugcagaucaaccgccaggugaucguggaccggggcaaccggagcggguacuccggcaucuucagcgucgagggcaagagcugcaucaaccgcugcuucuacguggagcucauccgggggcgcaaggaggagaccgaggugcuguggaccuccaacagcaucgucguguucugcggcaccuccgggacguacggcaccgggagcuggcccgacggcgccgacaucaaccugaugcccaucuga

SEQ ID NO: 90054 - RNA, 1410 nt, Artificial Sequence; identical to SEQ ID NO: 78738
  derived and/or modified CDS sequence (opt1) from neuraminidase__InfluenzaA__BAF46323

SEQ ID NO: 90055 - RNA, 1410 nt, Artificial Sequence
  derived and/or modified CDS sequence (opt1) from neuraminidase__InfluenzaA__BAF46324
augaaccccaaccagaagaucaucaccaucggcagcgugucccugaccaucagcacgaucugcuucuucaugcagaucgccauccucaucaccaccgucacccugcacuucaagcaguacgaguucaacuccccgcccaacaaccaggugaugcugugcgagcccacgaucaucgagcgcaacaucaccgagaucguguaccucaccaacaccacgaucgagaaggagaucugccccaagcuggccgaguaccggaacuggagcaagccgcagugcgacaucaccggguucgcgcccuucuccaaggacaacagcauccgccuguccgccggcggggacaucugggucacccgggagcccuacgugagcugcgaccccgacaagugcuaccaguucgcccucggccaggggaccacgcugaacaacgugcacuccaacgacaucguccacgaccgcaccccguaccggacccugcucaugaacgagcugggcgugcccuuccaccugggcaccaagcaggucugcaucgccuggagcuccagcuccugccacgacgggaaggccuggcuccacgugugggugacgggcgacgacaagaacgcgaccgccagcuucaucuacaacgggcgccugguggacuccaucgucagcugguccaagaagauccugcggacccaggagagcgagugcgugugcaucaacgggaccugcacgguggucaugaccgacggguccgccagcggcaaggccgacaccaagauccucuucaucgaggagggcaagaucgugcacaccagcacgcuguccgggagcgcgcagcacguggaggagugcuccugcuacccccgcuaccccggcguccggugcgugugccgcgacaacuggaaggggagcaaccggccgaucguggacaucaacaucaaggacuacuccaucgucagcuccuacgugugcagcggccuggugggcgacacgccccgcaagaacgacuccagcuccagcucccacugccucgaccccaacaacgaggagggcggccacggggucaagggcugggccuucgacgacgggaacgacguguggaugggccggaccaucagcgagaagcugcgcuccggcuacgagaccuucaaggucaucgagggguggagcaaccccaacuccaagcugcagaucaaccgccaggugaucguggaccggggcaaccggagcggguacuccggcaucuucagcgucgagggcaagagcugcaucaaccgcugcuucuacguggagcucauccgggggcgcaaggaggagaccgaggugcuguggaccuccaacagcaucgucguguucugcggcaccuccgggaccuacggcacggggagcuggccggacggcgccgacaucaaccugaugcccaucuga

SEQ ID NO: 90056 - RNA, 1410 nt, Artificial Sequence
  derived and/or modified CDS sequence (opt1) from neuraminidase__InfluenzaA__BAF46332
augaaccccaaccagaagaucaucaccaucggcagcgugucccugaccaucagcacgaucugcuucuucaugcagaucgccauccucaucaccaccgucacccugcacuucaagcaguacgaguucaacuccccgcccaacaaccaggugaugcugugcgagcccacgaucaucgagcgcaacaucaccgagaucguguaccucaccaacaccacgaucgagaaggagaucugccccaagcuggccgaguaccggaaguggagcaagccgcagugcaacaucaccggguucgcgcccuucuccaaggacaacagcauccgccuguccgccggcggggacaucugggucacccgggagcccuacgugagcugcgaccccgacaagugcuaccaguucgcccucggccaggggaccacgcugaacaacgugcacuccaacgacaccguccgcgaccggaccccguaccgcacccugcucaugaacgagcugggcgugcccuuccaccugggcacgaagcaggucugcaucgccuggagcuccagcuccugccacgacgggaaggccuggcuccacgugugcgugaccggcgacgacaagaacgcgaccgccagcuucaucuacaacgggcggcugguggacuccaucgucagcugguccaaggagauccugcgcacccaggagagcgagugcgugugcaucaacggcacgugcaccguggucaugaccgacggguccgccagcggcaaggccgacaccaagauccucuucaucgaggagggcaagaucgugcacacgagcacccuguccgggagcgcgcaccacguggaggagugcuccugcuacccccgguaccccggcguccgcugcgugugccgggacaacuggaaggggagcaaccgcccgaucguggacaucaacaucaaggacuacuccaucgucagcuccuacgugugcagcggccuggugggcgacacgccccggaagaacgacuccagcuccagcucccacugccucgaccccaacaacgaggagggcgggcacggggucaagggcugggccuucgacgacgggaacgacguguggaugggccgcaccaucagcgagaagcugcgguccggcuacgagaccuucaaggucaucgagggguggagcaaccccaacuccaagcugcagaucaaccgccaggugaucguggaccggggcaaccgcagcggguacuccggcaucuucagcgucgagggcaagagcugcaucaaccggugcuucuacguggagcucauccgcgggcggaaggaggagaccgaggugcuguggaccuccaacagcaucgucguguucugcggcaccuccgggacguacggcaccgggagcuggccggacggcgccgacaucaaccugaugcccaucuga

SEQ ID NO: 90057 - RNA, 1410 nt, Artificial Sequence
  derived and/or modified CDS sequence (opt1) from neuraminidase__InfluenzaA__BAF46334
augaaccccaaccagaagaucaucaccaucggcagcgugucccugaccaucagcacgaucugcuucuucaugcagaucgccauccucaucaccaccgucacccugcacuucaagcaguacgaguucaacuccccgcccaacaaccaggugaugcugugcgagcccacgaucaucgagcgcaacaucaccgagaucguguaccucaccaacaccacgaucgagaaggagaucugccccaagcuggccgaguaccggaaguggagcaagccgcagugcaacaucaccggguucgcgcccuucuccaaggacaacagcauccgccuguccgccggcggggacaucugggucacccgggagcccuacgugagcugcgaccccgacaagugcuaccaguucgcccucggccaggggaccacgcugaacaacgugcacuccaacgacaccguccgcgaccggaccccguaccgcacccugcucaugaacgagcugggcgugcccuuccaccugggcacgaagcaggucugcaucgccuggagcuccagcuccugccacgacgggaaggccuggcuccacgugugcgugaccggcgacgacaagaacgcgaccgccagcuucaucuacaacgggcggcugguggacuccaucgucagcugguccaaggagauccugcgcacccaggagagcgagugcgugugcaucaacggcacgugcaccguggucaugaccgacggguccgccagcggcaaggccgacaccaagauccucuucaucgaggagggcaagaucgugcacacgagcacccuguccgggagcgcgcagcacguggaggagugcuccugcuacccccgguaccccggcguccgcugcgugugccgggacaacuggaaggggagcaaccgcccgaucguggacaucaacaucaaggacuacuccaucgucagcuccuacgugugcagcggccuggugggcgacacgccccggaagaacgacuccagcuccagcucccacugccucgaccccaacaacgaggagggcgggcacggggucaagggcugggccuucgacgacgggaacgacguguggaugggccgcaccaucagcgagaagcugcgguccggcuacgagaccuucaaggucaucgagggguggagcaaccccaacuccaagcugcagaucaaccgccaggugaucguggaccggggcaaccgcagcggguacuccggcaucuucagcgucgagggcaagagcugcaucaaccggugcuucuacguggagcucauccgcgggcggaaggaggagaccgaggugcuguggaccuccaacagcaucgucguguucugcggcaccuccgggacguacggcaccgggagcuggccggacggcgccgacaucaaccugaugcccaucuga

SEQ ID NO: 90058 - RNA, 1410 nt, Artificial Sequence; identical to SEQ ID NO: 90057
  derived and/or modified CDS sequence (opt1) from neuraminidase__InfluenzaA__BAF46335

SEQ ID NO: 90059 - RNA, 1410 nt, Artificial Sequence
  derived and/or modified CDS sequence (opt1) from neuraminidase__InfluenzaA__BAF46337
augaaccccaaccagaagaucaucaccaucggcagcgugucccugaccaucagcacgaucugcuucuucaugcagaucgccauccucaucaccaccgucacccugcacuucaagcaguacgaguucaacuccccgcccaacaaccaggugaugcugugcgagcccacgaucaucgagcgcaacaucaccgagaucguguaccucaccaacaccacgaucgagaaggagaucugccccaagcuggccgaguaccggaaguggagcaagccgcagugcaacaucaccggguucgcgcccuucuccaaggacaacagcauccgccuguccgccggcggggacaucugggucacccgggagcccuacgugagcugcgaccccgacaagugcuaccaguucgcccucggccaggggaccacgcugaacaacgugcacuccaacgacaccguccgcgugcggaccccguaccgcacccugcucaugaacgagcugggcgugcccuuccaccugggcacgaagcaggucugcaucgccuggagcuccagcuccugccacgacgggaaggccuggcuccacgugugcgugaccggcgacgacaagaacgcgaccgccagcuucaucuacaacgggcggcuggucgacuccaucgugagcugguccaaggagauccugcgcacccaggagagcgagugcgugugcaucaacggcacgugcaccgucgugaugaccgacggguccgccagcggcaaggccgacaccaagauccucuucaucgaggagggcaagaucgugcacacgagcacccuguccgggagcgcgcagcacgucgaggagugcuccugcuacccccgguaccccggcgugcgcugcgugugccgggacaacuggaaggggagcaaccgcccgaucgucgacaucaacaucaaggacuacuccaucgugagcuccuacgugugcagcggccuggucggcgacacgccccggaagaacgacuccagcuccagcucccacugccucgaccccaacaacgaggagggcgggcacggggugaagggcugggccuucgacgacgggaacgacgucuggauggcccgcaccaucagcgagaagcugcgguccggcuacgagaccuucaaggugaucgagggcuggagcaaccccaacuccaagcugcagaucaaccgccaggugaucgucgaccgggggaaccgcagcggcuacuccgggaucuucagcguggagggcaagagcugcaucaaccggugcuucuacguggagcucauccgcgggcggaaggaggagaccgagguccuguggaccuccaacagcaucgugguguucugcggcaccuccggcacguacgggaccggcagcuggccggacggggccgacaucaaccugaugcccaucuga

SEQ ID NO: 90060 - RNA, 1410 nt, Artificial Sequence; identical to SEQ ID NO: 90057
  derived and/or modified CDS sequence (opt1) from neuraminidase__InfluenzaA__BAF46345

SEQ ID NO: 90061 - RNA, 1410 nt, Artificial Sequence
  derived and/or modified CDS sequence (opt1) from neuraminidase__InfluenzaA__BAF46346
augaaccccaaccagaagaucaucaccaucggcagcgugucccugaccaucagcacgaucugcuucuucaugcagaucgccauccucaucaccaccgucacccugcacuucaagcaguacgaguucaacuccccgcccaacaaccaggugaugcugugcgagcccacgaucaucgagcgcaacaucaccgagaucguguaccucaccaacaccacgaucgagaaggagaucugccccaagcuggccgaguaccggaaguggagcaagccgcagugcaacaucgcgggguucgcccccuucuccaaggacaacagcauccgccuguccgccggcggggacaucugggucacccgggagcccuacgugagcugcgaccccgacaagugcuaccaguucgcccucggccaggggaccacccugaacaacgugcacuccaacgacacgguccgcgaccggaccccguaccgcacccugcucaugaacgagcugggcgugcccuuccaccugggcaccaagcaggucugcaucgccuggagcuccagcuccugccacgacgggaaggcguggcuccacgugugcgugacgggcgacgacaagaacgccaccgccagcuucaucuacaacgggcggcugguggacuccaucgucagcugguccaaggagauccugcgcacccaggagagcgagugcgugugcaucaacgggaccugcacgguggucaugaccgacggguccgccagcggcaaggcggacaccaagauccucuucaucgaggagggcaagaucgugcacaccagcacgcuguccgggagcgcccagcacguggaggagugcuccugcuacccccgguaccccggcgucaucugcgugugccgcgacaacuggaaggggagcaaccggccgaucguggacaucaacaucaaggacuacuccaucgucagcuccuacgugugcagcggccuggugggcgacacgccccgcaagaacgacuccagcuccagcucccacugccucgaccccaacaacgaggagggcggccacggggucaagggcugggccuucgacgacgggaacgacguguggaugggccggaccaucagcgagaagcugcgcuccggcuacgagaccuucaaggucaucgagggguggagcaaccccaacuccaagcugcagaucaaccgccaggugaucguggaccggggcaaccggagcggguacuccggcaucuucagcgucgagggcaagagcugcaucaaccgcugcuucuacguggagcucauccgggggcgcaaggaggagaccgaggugcuguggaccuccaacagcaucgucguguucugcggcaccuccgggaccuacggcacggggagcuggccggacggcgccgacaucaaccugaugcccaucuga

SEQ ID NO: 90062 - RNA, 1410 nt, Artificial Sequence
  derived and/or modified CDS sequence (opt1) from neuraminidase__InfluenzaA__BAF46347
augaaccccaaccagaagaucaucaccaucggcagcgugucccugaccaucagcacgaucugcuucuucaugcagaucgccauccucaucaccaccgucacccugcacuucaagcaguacgaguucaacuccccgcccaacaaccaggugaugcugugcgagcccacgaucaucgagcgcaacaucaccgagaucguguaccucaccaacaccacgaucgagaaggagaucugccccaagcuggccgaguaccggaaguggagcaagccgcagugcaacaucaccggguucgcgcccuucuccaaggacaacagcauccgccuguccgccggcggggacaucugggucacccgggagcccuacgugagcugcgaccccgacaagugcuaccaguucgcccucggccaggggaccacgcugaacaacgugcacuccaacgacaccguccgcgaccggaccccguaccgcacccugcucaugaacgagcugggcgugcccuuccaccugggcacgaagcaggucugcaucgccuggagcuccagcuccugccacgacgggaaggccuggcuccacgugugcgugaccggcgacgacaagaacgcgaccgccaccuucaucuacaacgggcggcugguggacagcaucgucuccuggagcaaggagauccugcgcacgcaggaguccgagugcgugugcaucaacgggaccugcaccguggucaugaccgacgggagcgccuccggcaaggccgacacgaagauccucuucaucgaggagggcaagaucgugcacaccagcacccugagcggguccgcgcagcacguggaggagugcagcugcuacccccgguaccccggcguccgcugcgugugccgggacaacuggaagggguccaaccgcccgaucguggacaucaacaucaaggacuacagcaucgucuccagcuacgugugcuccggccuggugggcgacacgccccggaagaacgacagcuccagcuccagccacugccucgaccccaacaacgaggagggcggccacggggucaagggcugggccuucgacgacgggaacgacguguggaugggccgcaccaucuccgagaagcugcggagcggcuacgagaccuucaaggucaucgaggggugguccaaccccaacagcaagcugcagaucaaccgccaggugaucguggaccggggcaaccgcuccggguacagcggcaucuucuccgucgagggcaagagcugcaucaaccggugcuucuacguggagcucauccgcgggcggaaggaggagaccgaggugcuguggaccagcaacuccaucgucguguucugcggcacgagcgggaccuacggcaccggguccuggccggacggcgccgacaucaaccugaugcccaucuga

SEQ ID NO: 90063 - RNA, 1410 nt, Artificial Sequence
  derived and/or modified CDS sequence (opt1) from neuraminidase__InfluenzaA__BAF46349
augaaccccaaccagaagaucaucaccaucggcagcgugucccugaccaucagcacgaucugcuucuucaugcagaucgccauccucaucaccaccgucacccugcacuucaagcaguacgaguucaacuccccgcccaacaaccaggugaugcugugcgagcccacgaucaucgagcgcaacaucaccgagaucguguaccucaccaacaccacgaucgagaaggagaucugccccaagcuggccgaguaccggaaguggagcaagccgcagugcaacaucaccggguucgcgcccuucuccaaggacaacagcauccgccuguccgccggcggggacaucugggucacccgggagcccuacgugagcugcgaccccgacaagugcuaccaguucgcccucggccaggggaccacgcugaacaacgugcacuccaacgacaccguccgcgcccggaccccguaccgcacccugcucaugaacgagcugggcgugcccuuccaccugggcacgaagcaggucugcaucgccuggagcuccagcuccugccacgacgggaaggcguggcuccacgugugcgugaccggcgacgacaagaacgccaccgccagcuucaucuacaacgggcggcugguggacuccaucgucagcugguccaaggagauccugcgcacccaggagagcgagugcgugugcaucaacggcacgugcaccguggucaugaccgacggguccgccagcggcaaggcggacaccaagauccucuucaucgaggagggcaagaucgugcacacgagcacccuguccgggagcgcccagcacguggaggagugcuccugcuacccccgguaccccggcguccgcugcgugugccgggacaacuggaaggggagcaaccgcccgaucguggacaucaacaucaaggacuacuccaucgucagcuccuacgugugcagcggccuggugggcgacacgccccggaagaacgacuccagcuccagcucccacugccucgaccccaacaacgaggagggcgggcacggggucaagggcugggccuucgacgacgggaacgacguguggaugggccgcaccaucagcgagaagcugcgguccggcuacgagaccuucaaggucuucgagggguggagcaaccccaacuccaagcugcagaucaaccgccaggugaucguggaccggggcaaccgcagcggguacuccggcaucuucagcgucgagggcaagagcugcaucaaccggugcuucuacguggagcucauccgcgggcggaaggaggagaccgaggugcuguggaccuccaacagcaucgucguguucugcggcaccuccgggacguacggcaccgggagcuggccggacggcgccgacaucaaccugaugcccaucuga

SEQ ID NO: 90064 - RNA, 1410 nt, Artificial Sequence; identical to SEQ ID NO: 90057
  derived and/or modified CDS sequence (opt1) from neuraminidase__InfluenzaA__BAF46350

SEQ ID NO: 90065 - RNA, 1410 nt, Artificial Sequence
  derived and/or modified CDS sequence (opt1) from neuraminidase__InfluenzaA__BAF46351
augaaccccauccagaagaucaucaccaucggcagcgugucccugaccaucagcacgaucugcuucuucaugcagaucgccauccucaucaccaccgucacccugcacuucaagcaguacgaguucaacuccccgcccaacaaccaggugaugcugugcgagcccacgaucaucgagcgcaacaucaccgagaucguguaccucaccaacaccacgaucgagaaggagaucugccccaagcuggccgaguaccggaaguggagcaagccgcagugcaacaucaccggguucgcgcccuucuccaaggacaacagcauccgccuguccgccggcggggacaucugggucacccgggagcccuacgugagcugcgaccccgacaagugcuaccaguucgcccucggccaggggaccacgcugaacaacgugcacuccaacgacaccguccgcgaccggaccccguaccgcacccugcucaugaacgagcugggcgugcccuuccaccugggcacgaagcaggucugcaucgccuggagcuccagcuccugccacgacgggaaggccuggcuccacgugugcgugaccggcgacgacaagaacgcgaccgccagcuucaucuacaacgggcggcugguggacuccaucgucagcugguccaaggagauccugcgcacccaggagagcgagugcgugugcaucaacggcacgugcaccguggucaugaccgacggguccgccagcggcaaggccgacaccaagauccucuucaucgaggagggcaagaucgugcacacgagcacccuguccgggagcgcgcagcacguggaggagugcuccugcuacccccgguaccccggcguccgcugcgugugccgggacaacuggaaggggagcaaccgcccgaugguggacaucaacaucaaggacuacuccaucgucagcuccuacgugugcagcggccuggugggcgacacgccccggaagaacgacuccagcuccagcucccacugccucgaccccaacaacgaggagggcgggcacggggucaagggcugggccuucgacgacgggaacgacguguggaugggccgcaccaucagcgagaagcugcgguccggcuacgagaccuucaaggucaucgagggguggagcaaccccaacuccaagcugcagaucaaccgccaggugaucguggaccggggcaaccgcagcggguacuccggcaucuucagcgucgagggcaagagcugcaucaaccggugcuucuacguggagcucauccgcgggcggaaggaggagaccgaggugcuguggaccuccaacagcaucgucguguucugcggcaccuccgggacguacggcaccgggagcuggccggacggcgccgacaucaaccugaugcccaucuga

SEQ ID NO: 90066 - RNA, 1410 nt, Artificial Sequence
  derived and/or modified CDS sequence (opt1) from neuraminidase__InfluenzaA__BAF46368
augaaccccaaccagaagaucaucaccaucggcagcgugucccugaccaucagcacgaucugcuucuucaugcagaucgccauccucaucaccaccgucacccugcacuucaagcaguacgaguucaacuccccgcccaacaaccaggugaugcugugcgagcccacgaucaucgagcgcaacaucaccgagaucguguaccucaccaacaccacgaucgagaaggagaucugccccaagcuggccgaguaccggaacuggagcaagccgcagugcaacaucaccggguucgcgcccuucuccaaggacaacagcauccgccuguccgccggcggggacaucugggucacccgggagcccuacgugagcugcgaccccgacaagugcuaccaguucgcccucggccaggggaccacgcugaacaacgugcacuccaacgacaccguccgcgagcggaccccguaccgcacccugcucaugaacgagcugggcgugcccuuccaccugggcacgaagcaggucugcaucgccuggagcuccagcuccugccacgacgggaaggccuggcuccacgugugcgugaccggcgacgacaagaacgcgaccgccagcuucaucuacaacgggcggcugguggacuccaucgucagcugguccaaggagauccugcgcacccaggagagcgagugcgugugcaucaacggcacgugcaccguggucaugaccgacggguccgccagcggcaaggccgacaccaagauccucuucaucgaggagggcaagaucgugcacacgagcacccuguccgggagcgcgcagcacguggaggagugcuccugcuacccccgguaccccggcguccgcugcgugugccgggacaacuggaaggggagcaaccgcccgaucguggacaucaacaucaaggacuacuccaucgucagcuccuacgugugcagcggccuggugggcgacacgccccggaagaacgacuccagcuccagcucccacugccucgaccccaacaacgaggagggcgggcacggggucaagggcugggccuucgacgacgggaacgacguguggaugggccgcaccaucagcgagaagcugcgguccggcuacgagaccuucaaggucaucgagggguggagcaaccccaacuccaagcugcagaucaaccgccaggugaucguggaccggggcaaccgcagcggguacuccggcaucuucagcgucgagggcaagagcugcaucaaccggugcuucuacguggagcucauccgcgggcggaaggaggagaccgaggugcuguggaccuccaacagcaucgucguguucugcggcaccuccgggacguacggcaccgggagcuggccggacggcgccgacaucaaccugaugcccaucuga

SEQ ID NO: 90067 - RNA, 1410 nt, Artificial Sequence
  derived and/or modified CDS sequence (opt1) from neuraminidase__InfluenzaA__BAF46369
augaaccccaaccagaagaucaucaccaucggcagcgugucccugaccaucagcacgaucugcuucuucaugcagaucgccauccucaucaccaccgucacccugcacuucaagcaguacgaguucaacuccccgcccaacaaccaggugaugcugugcgagcccacgaucaucgagcgcaacaucaccgagaucguguaccucaccaacaccacgaucgagaaggagaucugccccaagcuggccgaguaccggaacuggagcaagccgcagugcaacaucaccggguucgcgcccuucuccaaggacaacagcauccgccuguccgccggcggggacaucugggucacccgggagcccuacgugagcugcgaccccgacaagugcuaccaguucgcccucggccaggggaccacgcugaacaacgugcacuccaacgacaccguccacgaccgcaccccguaccggacccugcucaugaacgagcugggcgugcccuuccaccugggcacgaagcaggucugcaucgccuggagcuccagcuccugccacgacgggaaggccuggcuccacgugugcgugaccggcgacgacaagaacgcgaccgccagcuucaucuacaacgggaagcugguggacuccaucgucagcugguccaaggagauccugcgcacccaggagagcgagugcgugugcaucaacggcacgugcaccguggucaugaccgacggguccgccagcggcaaggccgacaccaagauccucuucaucgaggagggcaagaucgugcacacgagcacccuguccgggagcgcgcagcacguggaggagugcuccugcuacccccgguaccccggcguccgcugcgugugccgggacaacuggaaggggagcaaccgcccgaucguggacaucaacaucaaggacuacuccaucgucagcuccuacgugugcagcggccuggugggcgacacgccccggaagaacgacuccagcuccagcucccacugccucgaccccaacaacgaggagggcgggcacggggucaagggcugggccuucgacgacgggaacgacguguggaugggccgcaccaucagcgagaagucccggagcggcuacgagaccuuccaggucaucgaggggugguccaacagcaacuccaagcugcagaucaaccgccaggugaucguggaccggggcaaccgcagcggguacagcggcaucuucuccgucgagggcaagagcugcaucaaccggugcuucuacguggagcugauccgcgggcggaaggaggagaccgaggugcucuggaccuccaacagcaucgucguguucugcggcaccuccgggacguacggcaccgggagcuggcccgacggcgccgacaucaaccugaugccgaucuga

SEQ ID NO: 90068 - RNA, 1410 nt, Artificial Sequence
  derived and/or modified CDS sequence (opt1) from neuraminidase__InfluenzaA__BAF46370
augaaccccaaccagaagaucaucaccaucggcagcgugucccugaccaucagcacgaucugcuucuucaugcagaucgccauccucaucaccaccgucacccugcacuucaagcaguacgaguucaacucccugccgaacaaccaggugaugcucugcgagcccacgaucaucgagcgcaacaucaccgagaucguguaccugaccaacaccacgaucgagaaggagaucugccccaagcuggccgaguaccggaacuggagcaagccccagugcaacaucaccggguucgcgccguucuccaaggacaacagcauccgccucuccgccggcggggacaucugggucacccgggagcccuacgugagcugcgaccccgacaagugcuaccaguucgcccugggccaggggaccacgcugaacaacgugcacuccaacgacaccguccacgaccgcacccccuaccggacccuccugaugaacgagcugggcgugccguuccaccucggcacgaagcaggucugcaucgccuggagcuccagcuccugccacgacgggaaggccuggcugcacgugugcgugaccggcgacgacaagaacgcgaccgccagcuucaucuacaacgggcgccugguggacuccaucgucagcugguccaaggagauccuccggacccaggagagcgagugcgugugcaucaacggcacgugcaccguggucaugaccgacggguccgccagcggcaaggccgacaccaagauccuguucaucgaggagggcaagaucgugcacacgagcacccuguccgggagcgcgcagcacguggaggagugcuccugcuacccccgcuaccccggcguccggugcgugugccgcgacaacuggaaggggagcaaccggcccaucguggacaucaacaucaaggacuacuccaucgucagcuccuacgugugcagcggccucgugggcgacaccccgcgcaagaacgacuccagcuccagcucccacugccuggaccccaacaacgaggagggcgggcacggggucaagggcugggccuucgacgacgggaacgacguguggaugggccggaccaucagcgagaagcugcgcuccggcuacgagacguucaaggucaucgagggguggagcaaccccaacuccaagcuccagaucaaccgccaggugaucguggaccggggcaaccggagcggguacuccggcaucuucagcgucgagggcaagagcugcaucaaccgcugcuucuacguggagcugauccgggggcgcaaggaggagaccgaggugcuguggaccuccaccagcaucgucguguucugcggcuccagcgggacguacggcaccggguccuggcccgacggcgccgacaucaaccucaugccgaucuga

SEQ ID NO: 90069 - RNA, 1410 nt, Artificial Sequence
  derived and/or modified CDS sequence (opt1) from neuraminidase__InfluenzaA__BAF46371
augaaccccaaccagaagaucaucaccaucggcagcgugucccugaccaucagcacgaucugcuucuucaugcagaucgccauccucaucaccaccgucacccugcacuucaagcaguacgaguucaacuccccgcccaacaaccaggugaugcugugcgagcccacgaucaucgagcgcaacaucaccgagaucgugcaccucaccaacaccacgaucgagaaggagaucugccccaagcuggccgaguaccggaacuggagcaagccgcagugcaacaucaccggguucgcgcccuucuccaaggacaacagcauccgccuguccgccggcggggacaucugggucacccgggagcccuacgugagcugcgaccccgacaagugcuaccaguucgcccucggccaggggaccacgcugaacaacgugcacuccaacgacaccguccacgaccgcaccccguaccggacccugcucaugaacgagcugggcgugcccuuccaccugggcacgaagcaggucugcaucgccuggagcuccagcuccugccacgacgggaaggccuggcuccacgugugcgugaccggcgacgacaagaacgcgaccgccagcuucaucuacaacgggcgccugguggacuccaucgucagcugguccaaggagauccugcggacccaggagagcgagugcgugugcaucaacggcacgugcaccguggucaugaccgacggguccgccagcggcaaggccgacaccaagauccucuucaucgaggagggcaagaucgugcacacgagcacccuguccgggagcgcgcagcacguggaggagugcuccugcuacccccgcuaccccggcguccggugcgugugccgcgacaacuggaaggggagcaaccggccgaucguggacaucaacaucaaggacuacuccaucgucagcuccuacgugugcagcggccuggugggcgacacgccccgcaagaacgacuccagcuccagcucccacugccucgaccccaacaacgaggagggcgggcacggggucaagggcugggccuucgacgacgggaacgacguguggaugggccggaccaucagcgagaagcugcgcuccggcuacgagaccuucaaggucaucgagggguggagcaaccccaacuccaagcugcagaccaaccgccaggugaucguggaccggagcaaccgguccggcuacagcgggaucuucagcgucgagggcaaguccugcaucaaccgcugcuucuacguggagcucauccgggggcgcaaggaggagaccgaggugcuguggaccagcaacuccaucgucguguucugcggcacgagcggcaccuacgggaccggcuccuggccggacggggccgacaucaaccugaugcccaucuga

SEQ ID NO: 90070 - RNA, 1410 nt, Artificial Sequence
  derived and/or modified CDS sequence (opt1) from neuraminidase__InfluenzaA__BAF46372
augaaccccaaccagaagaucaucaccaucggcagcgugucccugaccaucagcacgaucugcuucuucaugcagaucgccauccucaucaccaccgucacccugcacuucaagcaguacgaguucaacuccccgcccaacaaccaggugaugcugugcgagcccacgaucaucgagcgcaacaucaccgagaucguguaccucaccaacaccacgaucgagaaggagaucugccccaagcuggccgaguaccggaacuggagcaagccgcagugcgacaucgcgggguucgcccccuucuccaaggacaacagcauccgccuguccgccggcggggacaucugggucacccgggagcccuacgugagcugcgaccccgacaagugcuaccaguucgcccucggccaggggaccacccugaacaacgugcacuccaacgacacgguccacgaccgcaccccguaccggacccugcucaugaacgagcugggcgugcccuuccaccugggcaccaagcaggucugcaucgccuggagcuccagcuccugccacgacgggaaggcguggcuccacgugugcgugacgggcgacgacaagaacgccaccgccagcuucaucuacaacgggcgccugguggacuccaucgucagcugguccaagaagauccugcggacccaggagagcgagugcgugugcaucaacgggaccugcacgguggucaugaccgacggguccgccagcggcaaggcggacaccaagauccucuucaucgaggagggcaagaucgugcacaccagcacgcuguccgggagcgcccagcacguggaggagugcuccugcuacccccgcuaccccggcguccggugcgugugccgcgacaacuggaaggggagcaaccggccgaucguggacaucaacaucaaggacuacuccaucgucagcuccuacgugugcagcggccuggugggcgacacgccccgcaagaacgacuccagcuccagcucccacugccucgaccccaacaacgaggagggcggccacggggucaagggcugggccuucgacgacgggaacgacguguggaugggccggaccaucagcgagaagcugcgcuccggcuacgagaccuucaaggucaucgagggguggagcaaccccaacuccaagcugcagaucaaccgccaggugaucguggaccggggcaaccggagcggguacuccggcaucuucagcgucgagggcaagagcugcaucaaccgcugcuucuacguggagcucauccgggggcgcaaggaggagaccgaggugcuguggaccuccaacagcaucgucguguucugcggcaccuccgggaccuacggcacggggagcuggccggacggcgccgacaucaaccugaugcccaucuga

SEQ ID NO: 90071 - RNA, 1410 nt, Artificial Sequence
  derived and/or modified CDS sequence (opt1) from neuraminidase__InfluenzaA__BAF46385
augaaccccaaccagaagaucaucaccaucggcagcgugucccugaccaucagcacgaucugcuucuucaugcagaucgccauccucaucaccaccgucacccugcacuucaagcaguacgaguucaacuccccgcccaacaaccaggugaugcugugcgagcccacgaucaucgagcgcaacaucaccgagaucguguaccucaccaacaccacgaucgagaaggagaucugccccaagcuggccgaguaccggaacuggagcaagccgcagugcaacaucaccggguucgcgcccuucuccaaggacaacagcauccgccuguccgccggcggggacaucugggucacccgggagcccuacgugagcugcgaccccgacaagugcuaccaguucgcccucggccaggggaccacgcugaacaacgugcacuccaacgacaccguccacgaccgcaccccguaccggacccugcucaugaacgagcugggcgugcccuuccaccugggcacgaagcaggucugcaucgccuggagcuccagcuccugccccgacgggaaggccuggcuccacgugugcgugaccggcgacgacaagaacgcgaccgccagcuucaucuacaacgggcgccugguggacuccaucgucagcugguccaaggagauccugcggacccaggagagcgagugcgugugcaucaacggcacgugcaccguggucaugaccgacggguccgccagcggcaaggccgacaccaagauccucuucaucgaggagggcaagaucgugcacacgagcacccuguccgggagcgcgcagcacguggaggagugcuccugcuacccccgcuacccgggcgcccggugcgucugccgcgacaacuggaaggggagcaaccggcccaucguggacaucaacaucaaggacuacuccaucgugagcuccuacgucugcagcggccuggugggcgacacgccccgcaagaacgacuccagcuccagcucccacugccucgaccccaacaacgaggagggcgggcacggggugaagggcugggccuucgacgacgggaacgacgucuggaugggccggaccaucagcgagaagcugcgcuccggcuacgagaccuucaaggugaucgagggguggagcaacccgaacuccaagcugcagaccaaccggcaggucaucguggaccgcggcaaccggagcggguacuccggcaucuucagcguggagggcaagagcugcaucaaccgcugcuucuacgucgagcucauccgggggcgcaaggaggagaccgaggugcuguggaccuccaacagcaucguggucuucugcggcacguccagcaccuacgggaccggcuccuggcccgacggggccgacaucaaccugaugcccaucuga

SEQ ID NO: 90072 - RNA, 1410 nt, Artificial Sequence
  derived and/or modified CDS sequence (opt1) from neuraminidase__InfluenzaA__BAF46386
augaaccccaaccagaagaucaucaccaucggcagcgugucccugaccaucagcacgaucugcuucuucaugcagaucgccauccucaucaccaccgucacccugcacuucaagcaguacgaguucaacuccccgcccaacaaccaggugaugcugugcgagcccacgaucaucgagcgcaacaucaccgagaucguguaccucaccaacaccacgaucgagaaggagaucugccccaagcuggccgaguaccggaacuggagcaagccgcagugcaacaucaccggguucgcgcccuucuccaaggacaacagcauccgccuguccgccggcggggacaucugggucacccgggagcccuacgugagcugcgaccccgacaagugcuaccaguucgcccucggccaggggaccacgcugaacaacgugcacuccaacgacaccguccacgaccgcaccccguaccggacccugcucaugaacgagcugggcgugcccuuccaccugggcacgaagcaggucugcaucgccuggagcuccagcuccugccacgacgggaaggccuggcuccacgugugcgugaccggcgacgacaagaacgcgaccgccagcuucaucuacaacgggcgccugguggacuccaucgucagcugguccaaggagauccugcggacccaggagagcgagugcgugugcaucaacggcacgugcaccguggucaugaccgacggguccgccagcggcaaggccgacaccaagauccucuucaucgaggagggcaagaucgugcacacgagcacccuguccgggagcgcgcagcacguggaggagugcuccugcuacccccgcuaccccggcguccggugcgugugccgcgacaacuggaaggggagcaaccggccgaucguggacaucaacaucaaggacuacuccaucgucagcuccuacgugugcagcggccuggugggcgacacgccccgcaagaacgacuccagcuccagcucccacugccucgaccccaacaacgaggagggcgggcacggggucaagggcugggccuucgacgacgggaacgacguguggaugggccggaccaucagcgagaagcugcgcuccggcuacgagaccuucaaggucaucgagggguggagcaaccccaacuccaagcugcagaccaaccgccaggugaucguggaccggggcaaccggagcggguacuccggcaucuucagcgucgagggcaagagcugcaucaaccgcugcuucuacguggagcucauccgggggcgcaaggaggagaccgaggugcuguggaccuccaacagcaucgucguguucugcggcacguccagcaccuacgggaccggcuccuggccggacggggccgacaucaaccugaugcccaucuga

SEQ ID NO: 90073 - RNA, 1410 nt, Artificial Sequence; identical to SEQ ID NO: 80588
  derived and/or modified CDS sequence (opt1) from neuraminidase__InfluenzaA__BAF46387

SEQ ID NO: 90074 - RNA, 1410 nt, Artificial Sequence
  derived and/or modified CDS sequence (opt1) from neuraminidase__InfluenzaA__BAF46388
augaaccccaaccagaagaucaucaccaucggcagcgugucccugaccaucagcacgaucugcuucuucaugcagaucgccauccucaucaccaccgucacccugcacuucaagcaguacgaguucaacuccccgcccaacaaccaggugaugcugugcgagcccacgaucaucgagcgcaacaucaccgagaucguguaccucaccaacaccacgaucgagaaggagaucugccccaagcuggccgaguaccggaacuggagcaagccgcagugcaacaucaccggguucgcgcccuucuccaaggacaacagcauccgccuguccgccggcggggacaucugggucacccgggagcccuacgugagcugcgaccccgacaagugcuaccaguucgcccucggccaggggaccacgcugaacaacgugcacuccaacgacaccguccacgaccgcaccccguaccggacccugcucaugaacgagcugggcgugcccuuccaccugggcacgaagcaggucugcaucgccuggagcuccagcuccugccacgacgggaaggccuggcuccacgugugcgugaccggcgacgacaagaacgcgaccgccagcuucaucuacaacgggcgccugguggacuccaucgucagcugguccaaggagauccugcggacccaggagagcgagugcgugugcaucaacggcacgugcaccguggucaugaccgacggguccgccagcggcaaggccgacaccaagauccucuucaucgaggagggcaagaucgugcacacgagcacccuguccgggagcgcgcagcacguggaggagugcuccugcuacccccgcuaccccggcguccggugcgugugccgcgacaacuggaaggggagcaaccggccgaucguggacaucaacaucaaggacuacuccaucgucagcuccuacgugugcagcggccuggugggcgacacgccccgcaagaacgacuccagcuccagcucccacugccucgaccccaacaacgaggagggcgggcacggggucaagggcugggccuucgacgacgggaacgacguguggaugggccggaccaucagcgagaagcugcgcuccggcuacgagaccuucaaggucaucgagggguggagcaaccccaacuccaagcugcagaucaaccggcaggacaucguggaccgcggcaaccggagcggguacuccggcaucuucagcguggagggcaagagcugcaucaaccgcugcuucuacgucgagcucauccgggggcgcaaggaggagaacgaggugcuguggaccuccaacagcaucguggucuucugcggcaccuccgggaccuacggcacggggagcuggccggacggcgccgacaucaaccugaugcccaucuga

SEQ ID NO: 90075 - RNA, 1410 nt, Artificial Sequence
  derived and/or modified CDS sequence (opt1) from neuraminidase__InfluenzaA__BAF47922
augaaccccaaccagaagaucaucaccaucggcagcgugucccugaccaucagcacgaucugcuucuucaugcagaucgccauccucaucaccaccgucacccugcacuucaagcaguacgaguucaacuccccgcccaacauccaggugaugcugugcgagcccacgaucaucgagcgcaacaucaccgagaucguguaccucaccaacaccacgaucgagaaggagaucugccccaagcuggccgaguaccggaacuggagcaagccgcagugcgacaucaccggguucgcgcccuucuccaaggacaacagcauccgccuguccgccggcggggacaucugggucacccgggagcccuacgugagcugcgaccccgacaagugcuaccaguucgcccucggccaggggaccacgcugaacaacgugcacuccaacgacaccguccacgaccgcaccccguaccggacccugcucaugaacgagcugggcgugcccuuccaccugggcacgaagcaggucugcaucgccuggagcuccagcuccugccacgacgggaaggccuggcuccacgugugcgugaccggcgacgacaagaacgcgaccgccagcuucaucuacaacgggcgccugguggacuccaucgucagcugguccaaggagauccugcggacccaggagagcgagugcgugugcaucaacggcacgugcaccguggucaugaccgacggguccgccagcggcaaggccgacaccaagauccucuucaucgaggagggcaagaucgugcacacgagcacccuguccgggagcgcgcagcacguggaggagugcuccugcuacccccgcuaccccggcguccggugcgugugccgcgacaacuggaaggggagcaaccggccgaucguggacaucaacaucaaggacuacuccaucgccagcuccuacgucugcagcggccuggugggcgacacgccccgcaagaacgacuccagcuccagcucccacugccucgaccccaacaacgaggagggcgggcacggggugaagggcugggccuucgacgacgggaacgacgucuggaugggccggaccaucagcgagaagcugcgcuccggcuacgagaccuucaaggugaucgagggguggagcaaccccaacuccaagcugcagaucaaccggcaggucaucguggaccgcggcaaccggagcggguacuccggcaucuucagcguggagggcaagagcugcaucaaccgcugcuucuacgucgagcucauccgggggcgcaaggaggagaccgaggugcuguggaccuccaacagcaucguggucuucugcggcaccuccgggacguacggcaccgggagcuggccggacggcgccgacaucaaccugaugcccaucuga

SEQ ID NO: 90076 - RNA, 1410 nt, Artificial Sequence; identical to SEQ ID NO: 78718
  derived and/or modified CDS sequence (opt1) from neuraminidase__InfluenzaA__BAF47923

SEQ ID NO: 90077 - RNA, 1410 nt, Artificial Sequence
  derived and/or modified CDS sequence (opt1) from neuraminidase__InfluenzaA__BAF47924
augaaccccaaccagaagaucaucaccaucggcagcgugucccugaccaucagcacgaucugcuucuucaugcagaucgccauccucaucaccaccgucacccugcacuucaagcaguacgaguucaacuccccgcccaacaaccaggugaugcugugcgagcccacgaucaucgagcgcaacaucaccgagaucguguaccucaccaacaccacgaucgagaaggagaucugccccaagcuggccgaguaccggaacuggagcaagccgcagugcaacaucaccggguucgcgcccuucuccaaggacaacagcauccgccuguccgccggcggggacaucugggucacccgggagcccuacgugagcugcgaccccgacaagugcuaccaguucgcccucggccaggggaccacgcugaacaacgugcacuccaacgacaccguccacgaccgcaccccguaccggacccugcucaugaacgagcugggcgugcccuuccaccugggcacgaagcaggucugcaucgccuggagcuccagcuccugccacgacgggaaggccuggcuccacgugugcgugaccggcgacgacaagaacgcgaccgccagcuucaucuacaacgggcgccugguggacuccaucgucagcugguccaaggagauccugcggacccaggagagcgagugcgugugcaucaacggcacgugcaccguggucaugaccgacggguccgccagcggcaaggccgacaccaagauccucuucaucgaggagggcaagaucgugcacacgagcacccuguccgggagcgcgcagcacguggaggagugcuccugcuacccccgcuaccccggcguccggugcgugugccgcgacaacuggaaggggagcaaccggccgaucguggacaucaacaucaaggacuacuccaucgucagcuccuacgugugcagcggccuggugggcgacacgccccgcaagaacgacuccagcuccagcucccacugccucgaccccaacagcgaggagggcgggcacggggucaagggcugggccuucgacgacgggaacgacguguggaugggccggaccaucuccgagaagcugcgcagcggcuacgagaccuucaaggucaucgaggggugguccaaccccaacagcaagcugcagaccaaccgccaggugaucguggaccggggcaaccgguccggguacagcggcaucuucagcgucgaggggaaguccugcaucaaccgcugcuucuacguggagcucauccggggccgcaaggaggagaccgaggugcuguggaccagcaacuccaucgucguguucugcggcacgagcgggaccuacggcaccggguccuggccggacggcgccgacaucaaccugaugcccaucuga

SEQ ID NO: 90078 - RNA, 1410 nt, Artificial Sequence; identical to SEQ ID NO: 78736
  derived and/or modified CDS sequence (opt1) from neuraminidase__InfluenzaA__BAF47925

SEQ ID NO: 90079 - RNA, 1410 nt, Artificial Sequence; identical to SEQ ID NO: 78736
  derived and/or modified CDS sequence (opt1) from neuraminidase__InfluenzaA__BAF47926

SEQ ID NO: 90080 - RNA, 1410 nt, Artificial Sequence; identical to SEQ ID NO: 84723
  derived and/or modified CDS sequence (opt1) from neuraminidase__InfluenzaA__BAF47927

SEQ ID NO: 90081 - RNA, 1410 nt, Artificial Sequence; identical to SEQ ID NO: 80588
  derived and/or modified CDS sequence (opt1) from neuraminidase__InfluenzaA__BAF47928

SEQ ID NO: 90082 - RNA, 1410 nt, Artificial Sequence
  derived and/or modified CDS sequence (opt1) from neuraminidase__InfluenzaA__BAF47929
augaaccccaaccagaagaucaucaccaucggcagcgugucccugaccaucagcacgaucugcuucuucaugcagaucgccauccucaucaccaccgucacccugcacuucaagcaguacgaguucaacuccccgcccaacaaccaggugaugcugugcgagcccacgaucaucgagcgcaacaucaccgagaucguguaccucaccaacaccacgaccgagaaggagaucugccccaagcuggccgaguaccggaacuggagcaagccgcagugcaacaucaccggguucgcgcccuucuccaaggacaacagcauccgccuguccgccggcggggacaucugggucacccgggagcccuacgugagcugcgaccccgacaagugcuaccaguucgcccucggccaggggacgacccugaacaacgugcacuccgacgacaccguccacgaccgcaccccguaccggacgcugcucaugaacgagcugggcgugcccuuccaccugggcaccaagcaggucugcaucgccuggagcuccagcuccugccacgacgggaaggccuggcuccacgugugcgugaccggcgacgacaagaacgcgaccgccagcuucaucuacaacgggcgccugguggacuccaucgucagcugguccaaggagauccugcggacgcaggagagcgagugcgugugcaucaacgggaccugcaccguggucaugaccgacggguccgccagcggcaaggccgacacgaagauccucuucaucgaggagggcaagaucgugcacaccagcacccuguccgggagcgcgcagcacguggaggagugcuccugcuacccccgcuaccccggcguccggugcgugugccgcgacaacuggaaggggagcaaccggccgaucguggacaucaacaucaaggacuacuccaucgucagcuccuacgugugcagcggccuggugggcgacacgccccgcaagaacgacuccagcuccagcucccacugccucgaccccaacaacgaggagggcggccacggggucaagggcugggccuucgacgacgggaacgacguguggaugggccggaccaucagcgagaagcugcgcuccggcuacgagaccuucaaggucaucgagggguggagcaaccccaacuccaagcugcagaucaaccgccaggugaucguggaccggggcaaccggagcggguacuccggcaucuucagcgucgagggcaagagcugcaucaaccgcugcuucuacguggagcucauccgggggcgcaaggaggagaacgaggugcuguggaccuccaacagcaucgucguguucugcggcaccuccgggacguacggcaccgggagcuggccggacggcgccgacaucaaccugaugcccaucuga

SEQ ID NO: 90083 - RNA, 1410 nt, Artificial Sequence
  derived and/or modified CDS sequence (opt1) from neuraminidase__InfluenzaA__BAF47930
augaaccccaaccagaagaucaucaccaucggcagcgugucccugaccaucagcacgaucugcuucuucaugcagaucgccauccucaucaccaccgucacccugcacuucaagcaguacgaguucaacuccccgcccaacaaccaggugaugcugugcgagcccacgaucaucgagcgcaacaucaccgagaucguguaccucaccaacaccacgaucgagaaggagaucugccccaagcuggccgaguaccggaacuggagcaagccgcagugcaacaucaccggguucgcgcccuucuccaaggacaacagcauccgccuguccgccggcggggacaucugggucacccgggagcccuacgugagcugcgaccccgacaagugcuaccaguucgcccucggccaggggaccacgcugaacaacgugcacuccaacgacaccguccacggccgcaccccguaccggacccugcucaugaacgagcugggcgugcccuuccaccuggggacgaagcaggucugcaucgccuggagcuccagcuccugccacgacggcaaggccuggcuccacgugugcgugaccggggacgacaagaacgcgaccgccagcuucaucuacaacggccgccugguggacuccaucgucagcugguccaaggagauccugcggacccaggagagcgagugcgugugcaucaacgggacgugcaccguggucaugaccgacggcuccgccagcggcaaggccgacaccaagauccucuucaucgaggaggggaagaucgugcacacgagcacccuguccggcagcgcgcagcacguggaggagugcuccugcuacccccgcuaccccgggguccggugcgugugccgcgacaacuggaagggcagcaaccggccgaucguggacaucaacaucaaggacuacuccaccgucagcuccuacgugugcagcggccuggugggggacacgccccgcaagaacgacuccagcuccagcggccacugccucgaccccaacaacgaggagggcgggcacggggucaagggcugggccuucgacgacggcaacgacguguggauggggcggaccaucuccgagaagcugcgcagcggcuacgagaccuucaaggucaucgaggggugguccaaccccaacagcaagcugcagaucaaccgccaggugaucguggaccggggcaaccgguccggguacagcggcaucuucuccgucgagggcaagagcugcaucaaccgcugcuucuacguggagcucauccgggggcgcaaggaggagaccgaggugcuguggaccagcaacuccaucgucguguucugcggcacgagcgggaccuacggcaccggguccuggccggacggcgccgacaucaaccugaugcccaucuga

SEQ ID NO: 90084 - RNA, 1410 nt, Artificial Sequence; identical to SEQ ID NO: 84723
  derived and/or modified CDS sequence (opt1) from neuraminidase__InfluenzaA__BAF47931

SEQ ID NO: 90085 - RNA, 1410 nt, Artificial Sequence
  derived and/or modified CDS sequence (opt1) from neuraminidase__InfluenzaA__BAF47932
augaaccccaaccagaagaucaucaccaucggcagcgugucccugaccaucagcacgaucugcuucuucaugcagaucgccauccucaucaccaccgucacccugcacuucaagcaguacgaguucaacuccccgcccaacaaccaggugaugcugugcgagcccacgaucaucgagcgcaacaucaccgagaucguguaccucaccaacaccacgaucgagaaggagaucugccccaagcuggccgaguaccggaacuggagcaagccgcagugcaacaucaccggguucgcgcccuucuccaaggacaacagcauccgccuguccgccggcggggacaucugggucacccgggagcccuacgugagcugcgaccccgacaagugcuaccaguucgcccucggccaggggaccacgcugaacaacgugcacuccaacgacaccguccacgaccgcaccccguaccggacccugcucaugaacgagcugggcgugcccuuccaccugggcacgaagcaggucugcaucgccuggagcuccagcuccugccacgacgggaaggccuggcuccacgugugcgugaccggcgacgacaagaacgcgaccgccagcuucaucuacaacgggcgccugguggacuccaucgucagcugguccaaggagauccugcggacccaggagagcgagugcgugugcaucaacggcacgugcaccguggucaugaccgacggguccgccagcggcaaggccgacaccaagauccucuucaucgaggagggcaagaucgugcacacgagcacccuguccgggagcgcgcagcacguggaggagugcuccugcuacccccgcuaccccggcguccggugcgugugccgcgacaacuggaaggggagcaaccggccgaucguggacaucaacaucaaggacuacuccaucgucagcuccuacgugugcagcggccuggugggcgacacgccccgcaagaacgacuccagcuccagcgggcacugccucgaccccaacaacgaggagggcgggcacggcgucaaggggugggccuucgacgacggcaacgacguguggaugggccggaccaucuccgagaagcugcgcagcggguacgagaccuucaaggucaucgagggcugguccaaccccaacagcaagcugcagaucaaccgccaggugaucguggaccgggggaaccgguccggcuacagcgggaucuucuccgucgagggcaagagcugcaucaaccgcugcuucuacguggagcucauccggggccgcaaggaggagaccgaggugcuguggaccagcaacuccaucgucguguucugcgggaccagcggcacguacgggaccggcuccuggccggacggggccgacaucaaccugaugcccaucuga

SEQ ID NO: 90086 - RNA, 1410 nt, Artificial Sequence; identical to SEQ ID NO: 78736
  derived and/or modified CDS sequence (opt1) from neuraminidase__InfluenzaA__BAF47933

SEQ ID NO: 90087 - RNA, 1410 nt, Artificial Sequence; identical to SEQ ID NO: 78738
  derived and/or modified CDS sequence (opt1) from neuraminidase__InfluenzaA__BAF47934

SEQ ID NO: 90088 - RNA, 1410 nt, Artificial Sequence; identical to SEQ ID NO: 78738
  derived and/or modified CDS sequence (opt1) from neuraminidase__InfluenzaA__BAF47935

SEQ ID NO: 90089 - RNA, 1410 nt, Artificial Sequence
  derived and/or modified CDS sequence (opt1) from neuraminidase__InfluenzaA__BAF47936
augaaccccaaccagaagaucaucaccaucggcagcgugucccugaccaucagcacgaucugcuucuucaugcagaucgccauccucaucaccaccgucacccugcacuucaagcaguacgaguucaacuccccgcccaacaaccaggugaugcugugcgagcccacgaucaucgagcgcaacaucaccgagaucguguaccucaccaacaccacgaucgagaaggagaucugccccaagcuggccgaguaccggaacuggagcaagccgcagugcaacaucaccggguucgcgcccuucuccaaggacaacagcauccgccuguccgccggcggggacaucugggucacccgggagcccuacgugagcugcgaccccgacaagugcuaccaguucgcccucggccaggggaccacgcugaacaacgugcacuccaacgacaccguccacgaccgcaccccguaccggacccugcucaugaacgagcugggcgugcccuuccaccugggcacgaagcaggucugcaucgccuggagcuccagcuccugccacgacgggaaggccuggcuccacgugugcaucaccggcgacgacaagaacgcgaccgccagcuucaucuacaacgggcgccugguggacuccaucgugagcugguccaaggagauccugcggacccaggagagcgagugcgucugcaucaacggcacgugcaccguggugaugaccgacggguccgccagcggcaaggccgacaccaagauccucuucaucgaggagggcaagaucguccacacgagcacccuguccgggagcgcgcagcacguggaggagugcuccugcuacccccgcuaccccggcgugcggugcgucugccgcgacaacuggaaggggagcaaccggccgaucguggacaucaacaucaaggacuacuccaucgugagcuccuacgucugcagcggccuggugggcgacacgccccgcaagaacgacuccagcuccagcgggcacugccucgaccccaacaacgaggagggcgggcacggcgugaaggggugggccuucgacgacggcaacgacgucuggaugggccggaccaucuccgagaagcugcgcagcggguacgagaccuucaaggugaucgagggcugguccaaccccaacagcaagcugcagaucaaccggcaggucaucguggaccgcgggaaccgguccggcuacagcgggaucuucuccguggagggcaagagcugcaucaaccgcugcuucuacgucgagcucauccggggccgcaaggaggagaccgaggugcuguggaccagcaacuccaucguggucuucugcgggaccagcggcacguacgggaccggcuccuggccggacggggccgacaucaaccugaugcccaucuga

SEQ ID NO: 90090 - RNA, 1410 nt, Artificial Sequence
  derived and/or modified CDS sequence (opt1) from neuraminidase__InfluenzaA__BAF47937
augaaccccaaccagaagaucaucaccaucggcagcgugucccugaccaucagcacgaucugcuucuucaugcagaucgccauccucaucaccaccgucacccugcacuucaagcaguacgaguucaacuccccgcccaacaaccaggugaugcugugcgagcccacgaucaucgagcgcaacaucaccgagaucguguaccucaccaacaccacgaucgagaaggagaucugccccaagcuggccgaguaccggaacuggagcaagccgcagugcaacaucaccggguucgcgcccuucuccaaggacaacagcauccgccuguccgccggcggggacaucugggucacccgggagcccuacgugagcugcggccccgacaagugcuaccaguucgcccucgggcagggcaccacgcugaacaacgugcacuccaacgacaccguccacgaccgcaccccguaccggacccugcucaugaacgagcugggcgugcccuuccaccuggggacgaagcaggucugcaucgccuggagcuccagcuccugccacgacggcaaggccuggcuccacgugugcgugaccggggacgacaagaacgcgaccgccagcuucaucuacaacggccgccugguggacuccaucgucagcugguccaaggagauccugcggacccaggagagcgagugcgugugcaucaacgggacgugcaccguggucaugaccgacggcuccgccagcggcaaggccgacaccaagauccucuucaucgaggaggggaagaucgugcacacgagcacccuguccggcagcgcgcagcacguggaggagugcuccugcuacccccgcuaccccgggguccggugcgugugccgcgacaacuggaagggcagcaaccggccgaucguggacaucaacaucaaggacuacuccaucgucagcuccuacgugugcagcggccuggugggggacacgccccgcaagaacgacuccagcuccagcucccacugccucgaccccaacaacgaggagggcgggcacggcgucaaggggugggccuucgacgacggcaacgacguguggaugggccggaccaucagcgagaagcugcgcuccggguacgagaccuucaaggucaucgagggcuggagcaaccccaacuccaagcugcagaucaaccgccaggugaucguggaccgggggaaccggagcggcuacuccgggaucuucagcgucgagggcaagagcugcaucaaccgcugcuucuacguggagcucauccggggccgcaaggaggagaccgaggugcuguggaccuccaacagcaucgucguguucugcgggaccuccggcacguacgggaccggcagcuggccggacggggccgacaucaaccugaugcccaucuga

SEQ ID NO: 90091 - RNA, 1410 nt, Artificial Sequence
  derived and/or modified CDS sequence (opt1) from neuraminidase__InfluenzaA__BAF47938
augaaccccaaccagaagaucaucaccaucggcagcgugucccugaccaucagcacgaucugcuucuucaugcagaucgccauccucaucaccaccgucacccugcacuucaagcaguacgaguucaacucccugccgaacaaccaggugaugcucugcgagcccacgaucaucgagcgcaacaucaccgagaucguguaccugaccaacaccacgaucgagaaggagaucugccccaagcuggccgaguaccggaacuggagcaagccccagugcaacaucaccggguucgcgccguucuccaaggacaacagcauccgccucuccgccggcggggacaucugggucacccgggagcccuacgugagcugcgaccccgacaagugcuaccaguucgcccugggccaggggaccacgcugaacaacgugcacuccaacgacaccguccacggccgcacccccuaccggacccuccugaugaacgagcugggcgugccguuccaccucgggacgaagcaggucugcaucgccuggagcuccagcuccugccacgacggcaaggccuggcugcacgugugcgugaccggggacgacaagaacgcgaccgccagcuucaucuacaacggccgccugguggacuccaucgucagcugguccaaggagauccuccggacccaggagagcgagugcgugugcaucaacgggacgugcaccguggucaugaccgacggcuccgccagcggcaaggccgacaccaagauccuguucaucgaggaggggaagaucgugcacacgagcacccuguccggcagcgcgcagcacguggaggagugcuccugcuacccccgcuaccccgggguccggugcgugugccgcgacaacuggaagggcagcaaccggcccaucguggacaucaacaucaaggacuacuccaucgucagcuccuacgugugcagcggccucgugggggacaccccgcgcaagaccgacuccagcuccagcucccacugccuggaccccaacaacgaggagggcgggcacggcgucaaggggugggccuucgacgacggcaacgacguguggaugggccggacgaucagcgagaagcugcgcuccggguacgagaccuucaaggucaucgagggcuggagcaaccccaacuccaagcuccagaucaaccgccaggugaucguggaccgggggaaccggagcggcuacuccgggaucuucagcgucgagggcaagagcugcaucaaccgcugcuucuacguggagcugauccggggccgcaaggaggagaccgaggugcuguggaccuccaacagcaucgucguguucugcgggacguccggcaccuacgggaccggcagcuggcccgacggggccgacaucaaccucaugccgaucuga

SEQ ID NO: 90092 - RNA, 1410 nt, Artificial Sequence; identical to SEQ ID NO: 78738
  derived and/or modified CDS sequence (opt1) from neuraminidase__InfluenzaA__BAF47939

SEQ ID NO: 90093 - RNA, 1410 nt, Artificial Sequence
  derived and/or modified CDS sequence (opt1) from neuraminidase__InfluenzaA__BAF47940
augaaccccaaccagaagaucaucaccaucggcagcgugucccugaccaucagcacgaucugcuucuucaugcagaucgccauccucaucaccaccgucacccugcacuucaagcaguacgaguucaacuccccgcccaacaaccaggugaugcugugcgagcccacgaucaucgagcgcaacaucaccgagaucguguaccucaccaacaccacgaucgagaaggagaucugccccaagcuggccgaguaccggaacuggagcaagccgcagugcgacaucaccggguucgcgcccuucuccaaggacaacagcauccgccuguccgccggcggggacaucugggucacccgggagcccuacgugagcugcgaccccgacaagugcuaccaguucgcccucggccaggggaccacgcugaacaacgugcacuccaacgacaccguccacgaccgcaccccguaccggacccugcucaugaacgagcugggcgugcccuuccaccugggcacgaagcaggucugcaucgccuggagcuccagcuccugccacgacgggaaggccuggcuccacgugugcgugaccggcgacgacaagaacgcgaccgccagcuucaucuacaacgggcgccugguggacuccaucgucagcugguccaagaagauccugcggacccaggagagcgagugcgugugcaucaacggcacgugcaccguggucaugaccgacggguccgccagcggcaaggccgacaccaagauccucuucaucgaggagggcaagaucgugcacacgagcacccuguccgggagcgcgcagcacguggaggagugcuccugcuacccccgcuaccccggcguccggugcgugugccgcgacaacuggaaggggagcaaccggccgaucguggacaucaacaucaaggacuacuccaucgucagcuccuacgugugcagcggccuggugggcgacacgccccgcaagaacgacuccagcuccagcucccacugccucgaccccaacaacgaggagggcgggcacggggucaagggcugggccuucgacgacgggaacgacguguggaugggccggaccaucagcgagaagcugcgcuccggcuacgagaccuucaaggucaucgagggguggagcaaccccaacuccaagcugcagaucaaccgccaggugaucguggaccggggcaaccggagcggguacuccggcaucuucagcgucgagggcaagagcugcaucaaccgcugcuucuacguggagcucauccgggggcgcaaggagaagaccgaggugcuguggaccuccaacagcaucgucguguucugcggcaccuccgggacguacggcaccgggagcuggccggacggcgccgacaucaaccugaugcccaucuga

SEQ ID NO: 90094 - RNA, 1410 nt, Artificial Sequence; identical to SEQ ID NO: 78736
  derived and/or modified CDS sequence (opt1) from neuraminidase__InfluenzaA__BAF47941

SEQ ID NO: 90095 - RNA, 1410 nt, Artificial Sequence
  derived and/or modified CDS sequence (opt1) from neuraminidase__InfluenzaA__BAF47943
augaaccccaaccagaagaucaucaccaucggcagcgugucccugaccaucagcacgaucugcuucuucaugcagaucgccauccucaucaccaccgucacccugcacuucaagcaguacgaguucaacuccccgcccaacaaccaggugaugcugugcgagcccacgaucaucgagcgcaacaucaccgagaucguguaccucaccaacaccacgaucgagaaggagaucugccccaagcuggccgaguaccggaacuggagcaagccgcagugcaacaucaccggguucgcgcccuucuccaaggacaacagcauccgccuguccgccggcggggacaucugggucacccgggagcccuacgugagcugcgaccccgacaagugcuaccaguucgcccucggccaggggaccacgcugaacaacgugcacuccaacgacaccguccacgaccgcaccccguaccggacccugcucaugaucgagcugggcgugcccuuccaccugggcacgaagcaggucugcaucgccuggagcuccagcuccugccacgacgggaaggccuggcuccacgugugcgugaccggcgacgacaagaacgcgaccgccagcuucaucuacaacgggcgccugguggacuccaucgucagcugguccaaggagauccugcggacccaggagagcgagugcgugugcaucaacggcacgugcaccguggucaugaccgacggguccgccagcggcaaggccgacaccaagauccucuucaucgaggagggcaagaucgugcacacgagcacccuguccgggagcgcgcagcacguggaggagugcuccugcuacccccgcuaccccggcguccggugcgugugccgcgacaacuggaaggggagcaaccggccgaucguggacaucaacaucaaggacuacuccaucgucagcuccuacgugugcagcggccuggugggcgacacgccccgcaagaacgacuccagcuccagcucccacugccucgaccccaacaacgaggagggcgggcacggggucaagggcugggccuucgacgacgggaacgacguguggaugggccggaccaucagcgagaagcugcgcuccggcuacgagaccuucaaggucaucgagggguggagcaaccccaacuccaagcugcagaccaaccgccaggugaucguggaccggggcaaccggagcggguacuccggcaucuucagcgucgagggcaagagcugcaucaaccgcugcuucuacguggagcucauccgggggcgcaaggaggagaccgaggugcuguggaccuccaacagcaucgucguguucugcggcacguccgggaccuacggcaccgggagcuggccggacggcgccgacaucaaccugaugcccaucuga

SEQ ID NO: 90096 - RNA, 1410 nt, Artificial Sequence
  derived and/or modified CDS sequence (opt1) from neuraminidase__InfluenzaA__BAF47944
augaaccccaaccagaagaucaucaccaucggcagcgugucccugaccaucagcacgaucugcuucuucaugcagaucgccauccucaucaccaccgucacccugcacuucaagcaguacgaguucaacuccccgcccaacaaccaggugaugcugugcgagcccacgaucaucgagcgcaacaucaccgagaucguguaccucaccaacaccacgaucgagaaggagaucugccccaagcugaccgaguaccggaacuggagcaagccgcagugcaacaucaccggguucgcccccuucuccaaggacaacagcauccgccuguccgcgggcggggacaucugggucacccgggagcccuacgugagcugcgaccccgacaagugcuaccaguucgcccucggccaggggacgacccugaacaacgugcacuccaacgacccgguccacgaccgcacccccuaccggacccugcucaugaacgagcugggcgugcccuuccaccugggcacgaagcaggucugcaucgccuggagcuccagcuccugccacgacgggaaggccuggcuccacgugugcgugaccggcgacgacaagaacgccaccgcgagcuucaucuacaacgggcgccugguggacuccaucgucagcugguccaaggagauccugcggacccaggagagcgagugcgugugcaucaacggcacgugcaccguggucaugaccgacggguccgccagcggcaaggccgacaccaagauccucuucaucgaggagggcaagaucgugcacacgagcacccuguccgggagcgcccagcacguggaggagugcuccugcuacccccgcuacccgggcguccggugcgugugccgcgacaacuggaaggggagcaaccggcccaucguggacaucaacaucaaggacuacuccaucgucagcuccuacgugugcagcggccuggugggcgacacgccccgcaagaacgacuccagcuccagcucccacugccucgaccccaacaacgaggagggcgggcacggggucaagggcugggcguucgacgacgggaacgacguguggaugggccggaccaucagcgagaagcugcgcuccggcuacgagaccuucaaggucaucgagggguggagcaacccgaacuccaagcugcagaccaaccgccaggugaucguggaccggggcaaccggagcggguacuccggcaucuucagcgucgagggcaagagcugcaucaaccgcugcuucuacguggagcucauccgggggcgcaaggaggagaccgaggugcuguggaccuccaacagcaucgucguguucugcggcacguccgggaccuacggcaccgggagcuggcccgacggcgccgacaucaaccugaugcccaucuga

SEQ ID NO: 90097 - RNA, 1410 nt, Artificial Sequence
  derived and/or modified CDS sequence (opt1) from neuraminidase__InfluenzaA__BAF47945
augaaccccaaccagaagaucaucaccaucggcagcgugucccugaccaucagcacgaucugcuucuucaugcagaucgccauccucaucaccaccgucacccugcacuucaagcaguacgaguucaacuccccgcccaacaaccaggugaagcugugcgagcccacgaucaucgagcgcaacaucaccgagaucguguaccucaccaacaccacgaucgagaaggagaucugccccaagcuggccgaguaccggaacuggagcaagccgcagugcaacaucaccggguucgcgcccuucuccaaggacaacagcauccgccuguccgccggcggggacaucugggucacccgggagcccuacgugagcugcgaccccgacaagugcuaccaguucgcccucggccaggggaccacgcugaacaacgugcacuccaacgacaccguccacgaccgcaccccguaccggacccugcucaugaacgagcugggcgugcccuuccaccugggcacgaagcaggucugcaucgccuggagcuccagcuccugccacgacgggaaggccuggcuccacgugugcgugaccggcgacgacaagaacgcgaccgccagcuucaucuacaacgggcgccugguggacuccaucgucagcugguccaaggagauccugcggacccaggagagcgagugcgugugcaucaacggcacgugcaccguggucaugaccgacggguccgccagcggcaaggccgacaccaagauccucuucaucgaggagggcaagaucgugcacacgagcacccuguccgggagcgcgcagcacguggaggagugcuccugcuacccccgcuaccccggcguccggugcgugugccgcgacaacuggaaggggagcaaccggccgaucguggacaucaacaucaaggacuacuccaucgucagcuccuacgugugcagcggccuggugggcgacacgccccgcaagaacgacuccagcuccagcucccacugccucgaccccaacaacgaggagggcgggcacggggucaagggcugggccuucgacgacgggaacgacguguggaugggccggaccaucagcgagaagcugcgcuccggcuacgagaccuucaaggucaucgagggguggagcaaccccaacuccaagcugcagaccaaccgccaggugaucguggaccggggcaaccggagcggguacuccggcaucuucagcgucgagggcaagagcugcaucaaccgcugcuucuacguggagcucauccgggggcgcaaggaggagaccgaggugcuguggaccuccaacagcaucgucguguucugcggcacguccgggaccuacggcaccgggagcuggccggacggcgccgacaucaaccugaugcccaucuga

SEQ ID NO: 90098 - RNA, 1410 nt, Artificial Sequence
  derived and/or modified CDS sequence (opt1) from neuraminidase__InfluenzaA__BAF47946
augaaccccaaccagaagaucaucaccaucggcagcgugucccugaccaucagcacgaucugcuucuucaugcagaucgccauccucaucaccaccgucacccugcacuucaagcaguacgaguucaacuccccgcccaacaaccaggugaugcugugcgagcccacgaucaucgagcgcaacaucaccgagaucguguaccucaccaacaccacgaucgagaaggagaucugccccaagcuggccgaguaccggaacuggagcaagccgcagugcaacaucaccggguucgcgcccuucuccaaggacaacagcauccgccuguccgccggcggggacaucugggucacccgggagcccuacgugagcugcgaccccgacaagugcuaccaguucgcccucggccaggggaccacgcugaacaacgugcacuccaacgacaccguccacgaccgcaccccguaccggacccugcucaugaacgagcugggcgugcccuuccaccugggcacgaagcaggucugcaucgccuggagcuccagcuccugccacgacgggaaggccuggcuccacgugugcgugaccggcgacgacaagaacgcgaccgccagcuucaucuacaacgggcgccugguggacuccaucgucagcugguccaaggagauccugcggacccaggagagcgagugcgugugcaucaacggcacgugcaccguggucaugaccgacggguccgccagcggcaaggccgacaccaagauccucuucaucgaggagggcaagaucgugcacacgagcacccuguccgggagcgcgcagcacguggaggagugcuccugcuacccccgcuaccccggcguccggugcgugugccgcgacaacuggaaggggagcaaccggccgaucguggacaucaacaucaaggacuacuccaucgucagcuccuacgugugcagcggccuggugggcgacacgccccgcaagaacgacuccagcuccagcucccacugccucgaccccaacaacgaggagggcgggcacggggucaagggcugggccuucgacgacgggaacgacguguggaugggccggaccaucagcgagaagcugcgcuccggcuacgagaccuucaagguccuggagggguggagcaaccccaacuccaagcuccagaccaaccgccaggugaucguggaccggggcaaccggagcggguacuccggcaucuucagcgucgagggcaagagcugcaucaaccgcugcuucuacguggagcugauccgggggcgcaaggaggagaccgaggugcuguggaccuccaacagcaucgucguguucugcggcacguccgggaccuacggcaccgggagcuggccggacggcgccgacaucaaccucaugcccaucuga

SEQ ID NO: 90099 - RNA, 1410 nt, Artificial Sequence
  derived and/or modified CDS sequence (opt1) from neuraminidase__InfluenzaA__BAF47948
augaaccccaaccagaagaucaucaccaucggcagcgugucccugaccaucagcacgaucugcuucuucaugcagaucgccauccucaucaccaccgucacccugcacuucaagcaguacgaguucaacuccccgcccaacaaccaggugaugcugugcgagcccacgaucaucgagcgcaacaucaccgagaucguguaccucaccaacaccacgaucgagaaggagaucugccccaagcuggccgaguaccggaacuggagcaagccgcagugcgacaucaccggguucgcgcccuucuccaaggacaacagcauccgccuguccgccggcggggacaucugggucacccgggagcccuacgugagcugcgaccccgacaagugcuaccaguucgcccucggccaggggaccacgcugaacaacgugcacuccaacgacaagguccacgaccgcaccccguaccggacccugcucaugaacgagcugggcgugcccuuccaccugggcaccaagcaggucugcaucgccuggagcuccagcuccugccacgacgggaaggccuggcuccacgugugcgugacgggcgacgacaagaacgcgaccgccagcuucaucuacaacgggcgccugguggacuccaucgucagcugguccaagaagauccugcggacccaggagagcgagugcgugugcaucaacgggaccugcacgguggucaugaccgacggguccgccagcggcaaggccgacaccaagauccucuucaucgaggagggcaagaucgugcacaccagcacgcuguccgggagcgcgcagcacguggaggagugcuccugcuacccccgcuaccccggcguccggugcgugugccgcgacaacuggaaggggagcaaccggccgaucguggacaucaacaucaaggacuacuccaucgucagcuccuacgugugcagcggccuggugggcgacacgccccgcaagaacgacuccagcuccagcucccacugccucgaccccaacaacgaggagggcggccacggggucaagggcugggccuucgacgacgggaacgacguguggaugggccggaccaucagcgagaagcugcgcuccggcuacgagaccuucaaggucaucgagggguggagcaacuccaacagcaagcugcagaucaaccgccaggugaucguggaccggggcaaccgguccggguacagcggcaucuucagcgucgaggggaaguccugcaucaaccgcugcuucuacguggagcucauccggggccgcaaggaggagaccgaggugcuguggaccagcaacuccaucgucguguucugcggcaccagcgggaccuacggcacgggguccuggcccgacggcgccgacaucaaccugaugccgaucuga

SEQ ID NO: 90100 - RNA, 1410 nt, Artificial Sequence
  derived and/or modified CDS sequence (opt1) from neuraminidase__InfluenzaA__BAF47949
augaaccccaaccagaagaucaucaccaucggcagcgugucccugaccaucagcacgaucugcuucuucaugcagaucgccauccucaucaccaccgucacccugcacuucaagcaguacgaguucaacuccccgcccaacaaccaggugaugcugugcgagcccacgaucaucgagcgcaacaucaccgagaucguguaccucaccaacaccacgaucgagaaggagaucugccccaagcuggccgaguaccggaacuggagcaagccgcagugcgacaucaccggguucgcgcccuucuccaaggacaacagcauccgccuguccgccggcggggacaucugggucacccgggagcccuacgugagcugcgaccccgacaagugcuaccaguucgcccucggccaggggaccacgcugaacaacgugcacuccaacgacaagguccacgaccgcaccccguaccggacccugcucaugaacgagcugggcgugcccuuccaccugggcaccaagcaggucugcaucgccuggagcuccagcuccugccacgacgggaaggccuggcuccacgugugcgugacgggcgacgacaagaacgcgaccgccagcuucaucuacaacgggcgccugguggacuccaucgucagcugguccaagaagauccugcggacccaggagagcgagugcgugugcaucaacgggaccugcacgguggucaugaccgacggguccgccagcggcaaggccgacaccaagauccucuucaucgaggagggcaagaucgugcacaccagcacgcuguccgggagcgcgcagcacguggaggagugcuccugcuacccccgcuaccccggcguccggugcgugugccgcgacaacuggaaggggagcaaccggccgaucguggacaucaacaucaaggacuacuccaucgucagcuccuacgugugcagcggccuggugggcgacacgccccgcaagaacgacuccagcuccagcucccacugccucgaccccaacaacgaggagggcggccacggggucaagggcugggccuucgacgacgggaacgacguguggaugggccggaccaucagcgagaagcugcgcuccggcuacgagaccuucaaggucaucgagggguggagcaaccccaacuccaagcugcagaucaaccgccaggugaucguggaccggggcaaccggagcggguacuccggcaucuucagcgucgagggcaagagcugcaucaaccgcugcuucuacguggagcucauccgggggcgcaaggaggagaccgaggugcuguggaccuccaacagcaucgucguguucugcggcaccuccgggaccuacggcacggggagcuggccggacggcgccgacaucaaccugaugcccaucuga

SEQ ID NO: 90101 - RNA, 1410 nt, Artificial Sequence; identical to SEQ ID NO: 78738
  derived and/or modified CDS sequence (opt1) from neuraminidase__InfluenzaA__BAF47950

SEQ ID NO: 90102 - RNA, 1410 nt, Artificial Sequence
  derived and/or modified CDS sequence (opt1) from neuraminidase__InfluenzaA__BAF47951
augaaccccaaccagaagaucaucaccaucggcagcgugucccugaccaucagcacgaucugcuucuucaugcagaucgccauccucaucaccaccgucacccugcacuucaagcaguacgaguucaacuccccgcccaacaaccaggugaugcugugcgagcccacgaucaucgagcgcaacaucaccgagaucguguaccucaccaacaccacgaucgagaaggagaucugccccaagcuggccgaguaccggaacuggagcaagccgcagugcgacaucaccggguucgcgcccuucuccaaggacaacagcauccgccuguccgccggcggggacaucugggucacccgggagcccuacgugagcugcgaccccgacaagugcuaccaguucgcccucggccaggggaccacgcugaacaacgugcacuccaacgacaccguccacgaccgcaccccguaccggacccugcucaugaacgagcugggcgugcccuuccaccugggcacgaagcaggucugcaucgccuggagcuccagcuccugccacgacgggaaggccuggcuccacgugugcgugaccggcgacgacaagaacgcgaccgccagcuucaucuacaacgggcgccugguggacuccaucgucagcugguccaagaagauccugcggacccaggagagcgagugcgugugcaucaacggcacgugcaccguggucaugaccgacggguccgccagcggcaaggccgacaccaagauccucuucaucgaggagggcaagaucgugcacacgagcacccuguccgggagcgcgcagcacguggaggagugcuccugcuacccccgcuaccccggcguccggugcgugugccgcgacaacuggaaggggagcaaccggccgaucguggacaucaacaucaaggacuacuccaucgucagcuccuacgugugcagcggccuggugggcgacacgccccgcaagaacgacuccagcuccagcucccacugccucgaccccaacaacgaggagggcgggcacggggucaagggcugggccuucgacgacgggaacgacguguggaugggccggaccaucagcgagaagcugcgcuccggcuacgagaccuucaaggucaucgagggguggagcaacuccaacagcaagcugcagaucaaccgccaggugaucguggaccggggcaaccgguccggguacagcggcaucuucagcgucgaggggaaguccugcaucaaccgcugcuucuacguggagcucauccggggccgcaaggaggagaccgaggugcuguggaccagcaacuccaucgucguguucugcggcaccagcgggacguacggcaccggguccuggcccgacggcgccgacaucaaccugaugccgaucuga

SEQ ID NO: 90103 - RNA, 1410 nt, Artificial Sequence
  derived and/or modified CDS sequence (opt1) from neuraminidase__InfluenzaA__BAF47952
augaaccccaaccagaagaucaucaccaucggcagcgugucccugaccaucagcacgaucugcuucuucaugcagaucgccauccucaucaccaccgucacccugcacuucaagcaguacgaguucaacuccccgcccaacaaccaggugaugcugugcgagcccacgaucaucgagcgcaacaucaccgagaucguguaccucaccaacaccacgaucgagaaggagaucugccccaagcuggccgaguaccggaacuggagcaagccgcagugcaacaucaccggguucgcgcccuucuccaaggacaacagcauccgccuguccgccggcggggacaucugggucacccgggagcccuacgugagcugcgaccccgacaagugcuaccaguucgcccucggccaggggaccacgcugaacaacgugcacuccaacgacaccguccacgaccgcaccccguaccggacccugcucaugaacgagcugggcgugcccuuccaccugggcacgaagcaggucugcaucgccuggagcuccagcuccugccacgacgggaaggccuggcuccacgugugcgugaccggcgacgacaagaacgcgaccgccagcuucaucuacaacgggcgccugguggacuccaucgucagcugguccaaggagauccugcggacccaggagagcgagugcgugugcaucaacggcacgugcaccguggucaugaccgacggguccgccagcggcaaggccgacaccaagauccucuucaucgaggagggcaagaucgugcacacgagcacccuguccgggagcgcgcagcacguggaggagugcuccugcuacccccgcuaccccggcguccggugcgugugccgcgacaacuggaaggggagcaaccggccgaucguggacaucaacaucaaggacuacuccaucgucagcuccuacgugugcagcggccuggugggcgacacgccccgcaagaacgacuccagcuccagcucccacugccucgaccccaacaacgaggagggcgggcacggggucaagggcugggccuucgacgacgggaacgacguguggaugggccggaccaucagcgagaagcugcgcuccggcuacgagaccuucaaggucaucgagggguggagcaaccccaacuccaagcugcagaccaaccgccaggugaucguggaccggggcaaccggagcggguacuccggcaucuucagcgucgagggcaagagcugcaucaaccgcugcuucuacguggagcucauccgggggcgcaaggaggagaccgaggugcuguggaccuccaacagcaucgucguguucugcggcacguccgggaccuacggcaccgggagcuggccggacggcgccaacaucaaccugaugcccaucuga

SEQ ID NO: 90104 - RNA, 1410 nt, Artificial Sequence
  derived and/or modified CDS sequence (opt1) from neuraminidase__InfluenzaA__BAF47953
augaaccccaaccagaagaucaucaccaucggcagcgugucccugaccaucagcacgaucugcuucuucaugcagaucgccauccucaucaccaccgucacccugcacuucaagcaguacgaguucaacuccccgcccaacaaccaggugaugcugugcgagcccacgaucaucgagcgcaacaucaccgagaucguguaccucaccaacaccacgaucgagaaggagaucugccccaagcuggccgaguaccggaacuggagcaagccgcagugcgacaucaccggguucgcgcccuucuccaaggacaacagcauccgccuguccgccggcggggacaucugggucacccgggagcccuacgugagcugcgaccccgacaagugcuaccaguucgcccucggccaggggaccacgcugaacaacgugcacuccaacgacaccguccacgaccgcaccccguaccggacccugcucaugaacgagcugggcgugcccuuccaccugggcacgaagcaggucugcaucgccuggagcuccagcuccugccacgacgggaaggccuggcuccacgugugcgugaccggcgacgacgagaacgcgaccgccagcuucaucuacaacgggcgccugguggacuccaucgucagcugguccaagaagauccugcggacccaggagagcgagugcgugugcaucaacggcacgugcaccguggucaugaccgacggguccgccagcggcaaggccgacaccaagauccucuucaucgaggagggcaagaucgugcacacgagcacccuguccgggagcgcgcagcacguggaggagugcuccugcuacccccgcuaccccggcguccggugcgugugccgcgacaacuggaaggggagcaaccggccgaucguggacaucaacaucaaggacuacuccaucgucagcuccuacgugugcagcggccuggugggcgacacgccccgcaagaacgacuccagcuccagcucccacugccucgaccccaacaacgaggagggcgggcacggggucaagggcugggccuucgacgacgggaacgacguguggaugggccggaccaucagcgagaagcugcgcuccggcuacgagaccuucaaggucaucgagggguggagcaaccccaacuccaagcugcagaucaaccgccaggugaucguggaccggggcaaccggagcggguacuccggcaucuucagcgucgagggcaagagcugcaucaaccgcugcuucuacguggagcucauccgggggcgcaaggaggagaccgaggugcuguggaccuccaacagcaucgucguguucugcggcaccuccgggacguacggcaccgggagcuggccggacggcgccgacaucaaccugaugcccaucuga

SEQ ID NO: 90105 - RNA, 1410 nt, Artificial Sequence; identical to SEQ ID NO: 90057
  derived and/or modified CDS sequence (opt1) from neuraminidase__InfluenzaA__BAF47954

SEQ ID NO: 90106 - RNA, 1410 nt, Artificial Sequence; identical to SEQ ID NO: 90057
  derived and/or modified CDS sequence (opt1) from neuraminidase__InfluenzaA__BAF47955

SEQ ID NO: 90107 - RNA, 1410 nt, Artificial Sequence
  derived and/or modified CDS sequence (opt1) from neuraminidase__InfluenzaA__BAF47956
augaaccccaaccagaagaucaucaccaucggcagcgugucccugaccaucagcacgaucugcuucuucaugcagaucgccauccucaucaccaccgucacccugcacuucaagcaguacgaguucaacuccccgcccaacaaccaggugaugcugugcgagcccacgaucaucgagcgcaacaucaccgagaucguguaccucaccaacaccacgaucgagaaggagaucugccccaagcuggccgaguaccggaaguggagcaagccgcagugcaacaucaccggguucgcgcccuucuccaaggacaacagcauccgccuguccgccggcggggacaucugggucacccgggagcccuacgugagcugcgaccccgacaagugcuaccaguucgcccucggccaggggaccacgcugaacaacgugcacuccaacgacaccguccgcgaccggaccccguaccgcacccugcucaugaacgagcugggcgugcccuuccaccugggcacgaagcaggucugcaucgccuggagcuccagcuccugccacgacgggaaggccuggcuccacgugugcgugaccggcgacgacaagaacgcgaccgccagcuucaucuacaacgggcggcugguggacuccaucgucagcugguccaaggagauccugcgcacccaggagagcgagugcgugugcaucaacggcacgugcaccguggucaugaccgacggguccgccagcggcaaggccgacaccaagauccucuucaucgaggagggcaagaucgugcacacgagcacccuguccgggagcgcgcagcacguggaggagugcuccugcuacccccgguaccccggcguccgcugcgugugccgggacaacuggaaggggagcaaccgcccgaucguggacaucaacaucaaggacuacuccaucgucagcuccuacgugugcagcggccuggugggcgacacgccccggaagaacgacuccagcuccagcucccacugccucgaccccaacaacgaggagggcgggcacggggucaagggcugggccuucgacgacgggaacgacguguggaugggccgcaccaucagcgagaagcugcgguccggcuacgagaccuucaaggucaucgagggguggagcaaccccaacuccaagcugcagaucaaccgccaggugaucguggaccggggcaaccgcagcggguacuccggcaucuucagcgucgagggcaagagcugcaucaaccggugcuucuacguggagcucauccgcgggcggaaggaggagaccgaggugcuguggaccuccaacagcaucgucguguucugcggcaccuccgggacguacggcaccgggagcuggccggacggcgccgacaucaacuucaugcccaucuga

SEQ ID NO: 90108 - RNA, 1410 nt, Artificial Sequence
  derived and/or modified CDS sequence (opt1) from neuraminidase__InfluenzaA__BAF47958
augaaccccaaccagaagaucaucaccaucggcagcgugucccugaccaucagcacgaucugcuucuucaugcagaucgccauccucaucaccaccgucacccugcacuucaagcaguacgaguucaacuccccgcccaacaaccaggugaugcugugcgagcccacgaucaucgagcgcaacaucaccgagaucguguaccucaccaacaccacgaucgagaaggagaucugccccaagcuggccgaguaccggaaguggagcaagccgcagugcaacaucaccggguucgcgcccuucuccaaggacaacagcauccgccuguccgccggcggggacaucugggucacccgggagcccuacgugagcugcgaccccgacaagugcuaccaguucgcccucggccaggggaccacgcugaacaacgugcacuccaacgacaccguccgcgaccggaccccguaccgcacccugaugaugaacgagcucggcgugcccuuccaccugggcacgaagcaggucugcaucgccuggagcuccagcuccugccacgacgggaaggccuggcugcacgugugcgugaccggcgacgacaagaacgcgaccgccagcuucaucuacaacgggcggcucguggacuccaucgucagcugguccaaggagauccugcgcacccaggagagcgagugcgugugcaucaacggcacgugcaccguggucaugaccgacggguccgccagcggcaaggccgacaccaagauccuguucaucgaggagggcaagaucgugcacacgagcacccucuccgggagcgcgcagcacguggaggagugcuccugcuacccccgguaccccggcguccgcugcgugugccgggacaacuggaaggggagcaaccgcccgaucguggacaucaacaucaaggacuacuccaucgucagcuccuacgugugcagcggccuggugggcgacacgccccggaagaacgacuccagcuccagcucccacugccuggaccccaacaacgaggagggcgggcacggggucaagggcugggccuucgacgacgggaacgacguguggaugggccgcaccaucagcgagaagcuccgguccggcuacgagaccuucaaggucaucgagggguggagcaaccccaacuccaagcugcagaucaaccgccaggugaucguggaccggggcaaccgcagcggguacuccggcaucuucagcgucgagggcaagagcugcaucaaccggugcuucuacguggagcugauccgcgggcggaaggaggagaccgaggugcucuggaccuccaacagcaucgucguguucugcggcaccuccgggacguacggcaccgggagcuggaccgacggcgccgacaucaacuucaugccgaucuga

SEQ ID NO: 90109 - RNA, 1410 nt, Artificial Sequence
  derived and/or modified CDS sequence (opt1) from neuraminidase__InfluenzaA__BAF47959
augaaccccaaccagaagaucaucaccaucggcagcgugucccugaccaucagcacgaucugcuucuucaugcagaucgccauccucaucaccaccgucacccugcacuucaagcaguacgaguucaacuccccgcccaacaaccaggugaugcugugcgagcccacgaucaucgagcgcaacaucaccgagaucguguaccucaccaacaccacgaucgagaaggagaucugccccaagcuggccgaguaccggaacuggagcaagccgcagugcaacaucaccggguucgcgcccuucuccaaggacaacagcauccgccuguccgccggcggggacaucugggucacccgggagcccuacgugagcugcgaccccgacaagugcuaccaguucgcccucggccaggggaccacgcugaacaacgugcacuccaacuacaccguccacgaccgcaccccguaccggacccugcucaugaacgagcugggcgugcccuuccaccugggcacgaagcaggucugcaucgccuggagcuccagcuccugccacgacgggaaggccuggcuccacgugugcgugaccggcgacgacaagaacgcgaccgccagcuucaucuacaacgggcgccugguggacuccaucgucagcugguccaaggagauccugcggacccaggagagcgagugcgugugcaucaacggcacgugcaccguggucaugaccgacggguccgccagcggcaaggccgacaccaagauccucuucaucgaggagggcaagaucgugcacacgagcacccuguccgggagcgcgcagcacguggaggagugcuccugcuacccccgcuaccccggcguccggugcgugugccgcgacaacuggaaggggagcaaccggccgaucguggacaucaacaucaaggacuacuccaucgucagcuccuacgugugcagcggccuggugggcgacacgccccgcaagaacgacuccagcuccagcgggcacugccucgaccccaacaacgaggagggcgggcacggcgucaaggggugggccuucgacgacggcaacgacguguggaugggccggaccaucuccgagaagcugcgcagcggguacgagaccuucaaggucaucgagggcugguccaaccccaacagcaagcugcagaucaaccgccaggugaucguggaccgggggaaccgguccggcuacagcgggaucuucuccgucgagggcaagagcugcaucaaccgcugcuucuacguggagcucauccggggccgcaaggaggagaccgaggugcuguggaccagcaacuccaucgucguguucugcgggaccagcggcacguacgggaccggcuccuggccggacggggccgacaucaaccugaugcccaucuga

SEQ ID NO: 90110 - RNA, 1410 nt, Artificial Sequence
  derived and/or modified CDS sequence (opt1) from neuraminidase__InfluenzaA__BAF47960
augaaccccaaccagaagaucaucaccaucggcagcgugucccugaccaucagcacgaucugcuucuucaugcagaucgccauccucaucaccaccgucacccugcacuucaagcaguacgaguucaacuccccgcccaacaaccaggugaugcugugcgagcccacgaucaucgagcgcaacaucaccgagaucguguaccucaccaacaccacgaucgagaaggagaucugccccaagcuggccgaguaccggaacuggagcaagccgcagugcaacaucaccggguucgcgcccuucuccaaggacaacagcauccgccuguccgccggcggggacaucugggucacccgggagcccuacgugagcugcgaccccgacaagugcuaccaguucgcccucggccaggggaccacgcugaacaacgugcacuccaacgacaccguccacaaccgcaccccguaccggacccugcucaugaacgagcugggcgugcccuuccaccugggcacgaagcaggucugcaucgccuggagcuccagcuccugccacgacgggaaggccuggcuccacgugugcgugaccggcgacgacaagaacgcgaccgccagcuucaucuacaacgggcgccugguggacuccaucgucagcugguccaaggagauccugcggacccaggagagcgagugcgugugcaucaacggcacgugcaccguggucaugaccgacggguccgccagcggcaaggccgacaccaagauccucuucaucgaggagggcaagaucgugcacacgagcacccuguccgggagcgcgcagcacguggaggagugcuccugcuacccccgcuaccccggcguccggugcgugugccgcgacaacuggaaggggagcaaccggccgaucguggacaucaacaucaaggacuacuccaucgucagcuccuacgugugcagcggccuggugggcgacacgccccgcaagaacgacuccagcuccagcgggcacugccucgaccccaacaacgaggagggcgggcacggcgucaaggggugggccuucgacgacggcaacgacguguggaugggccggaccaucuccgagaagcugcgcagcggguacgagaccuucaaggucaucgagggcugguccaaccccaacagcaagcugcagaucaaccgccaggugaucguggaccgggggaaccgguccggcuacagcgggaucuucuccgucgagggcaagagcugcaucaaccgcugcuucuacguggagcucauccggggccgcaaggaggagaccgaggugcuguggaccagcaacuccaucgucguguucugcgggaccagcggcacguacgggaccggcuccuggccggacggggccgacaucaaccugaugcccaucuga

SEQ ID NO: 90111 - RNA, 1410 nt, Artificial Sequence
  derived and/or modified CDS sequence (opt1) from neuraminidase__InfluenzaA__BAF47975
augaaccccaaccagaagaucaucaccaucggcagcgugucccugaccaucagcacgaucugcuucuucaugcagaucgccauccucaucaccaccgucacccugcacuucaagcaguacgaguucaacuccccgcccaacaaccaggugaugcugugcgagcccacgaucaucgagcgcaacaucaccgagaucguguaccucaccaacaccacgaucgagaaggagaucugccccaagcuggccgaguaccggaaguggagcaagccgcagugcaacaucaccggguucgcgcccuucuccaaggacaacagcauccgccuguccgccggcggggacaucugggucacccgggagcccuacgugagcugcgaccccgacaagugcuaccaguucgcccucggccaggggaccacgcugaacaacgugcacuccaacgacaccguccgcgaccggaccccguaccgcacccugcucaugaacgagcugggcgugcccuuccaccugggcacgaagcaggucugcaucgccuggagcuccagcuccugccacgacgggaaggccuggcuccacgugugcgugaccggcgacgacaagaacgcgaccgccagcuucaucuacaacgggcggcugguggacuccaucgucagcugguccaaggagauccugcgcacccaggagagcgagugcgugugcaucaacggcacgugcaccguggucaugaccgacggguccgccagcggcaaggccgacaccaagauccucuucaucgaggagggcaagaucgugcacacgagcacccuguccgggagcgcgcagcacguggaggagugcuccugcuacccccgguaccccggcguccgcugcgugugccgggacaacuggaaggggagcaaccgcccgaucguggacaucaacaucaaggacuacuccaucgucagcuccuacgugugcagcggccuggugggcgacacgccccggaagaacgacuccagcuccagcucccacugccucgaccccaacaacgaggagggcgggcacggggucaagggcugggccuucgacgacgggaacgacguguggaugggccgcaccaucagcgagaagcugcgguccggcuacgagaccuucaaggucaucgagggguggagcaaccccaacuccaagcugcagaucaaccgccaggugaucguggaccggggcaaccgcagcggguacuccggcaucuucagcgucgagggcaagagcugcaucaaccggugcuucuacguggagcucauccgcgggcggaaggaggagaccgaggugcuguggaccuccaacagcaucgucguguucugcggcaccuccgggacguacggcaccgggagcuggccggacggcgccgacaucaaccacaugcccaucuga

SEQ ID NO: 90112 - RNA, 1410 nt, Artificial Sequence; identical to SEQ ID NO: 78736
  derived and/or modified CDS sequence (opt1) from neuraminidase__InfluenzaA__BAF47976

SEQ ID NO: 90113 - RNA, 1410 nt, Artificial Sequence
  derived and/or modified CDS sequence (opt1) from neuraminidase__InfluenzaA__BAF47977
augaaccccaaccagaagaucaucaccaucggcagcgugucccugaccaucagcacgaucugcuucuucaugcagaucgccauccucaucaccaccgucacccugcaguucaagcaguacgaguucaacuccccgcccaacaaccaggugaugcugugcgagcccacgaucaucgagcgcaacaucaccgagaucguguaccucaccaacaccacgaucgagaaggagaucugccccaagcuggccgaguaccggaacuggagcaagccgcagugcaacaucaccggguucgcgcccuucuccaaggacaacagcauccgccuguccgccggcggggacaucugggucacccgggagcccuacgugagcugcgaccccgacaagugcuaccaguucgcccucggccaggggaccacgcugaacaacgugcacuccaacgacaccguccacggccgcaccccguaccggacccugcucaugaacgagcugggcgugcccuuccaccuggggacgaagcaggucugcaucgccuggagcuccagcuccugccacgacggcaaggccuggcuccacgugugcgugaccggggacgacaagaacgcgaccgccagcuucaucuacaacggccgccugguggacuccaucgucagcugguccaaggagauccugcggacccaggagagcgagugcgugugcaucaacgggacgugcaccguggucaugaccgacggcuccgccagcggcaaggccgacaccaagauccucuucaucgaggaggggaagaucgugcacacgagcacccuguccggcagcgcgcagcacguggaggagugcuccugcuacccccgcuaccccgggguccggugcgugugccgcgacaacuggaagggcagcaaccggccgaucguggacaucaacaucaaggacuacuccaucgucagcuccuacgugugcagcggccuggugggggacacgccccgcaagaacgacuccagcuccagcucccacugccucgaccccaacaacgaggagggcgggcacggcgucaaggggugggccuucgacgacggcaacgacguguggaugggccggaccaucagcgagaagcugcgcuccggguacgagaccuucaaggucaucgagggcuggagcaaccccaacuccaagcugcagaccaaccgccaggugaucguggaccgggggaaccggagcggcuacuccgggaucuucagcgucgagggcaagagcugcaucaaccgcugcuucuacguggagcucauccggggccgcaaggaggagaccgaggugcuguggaccuccaacagcaucgucguguucugcgggacguccggcaccuacgggaccggcagcuggccggacggggccgacaucaaccugaugcccaucuga

SEQ ID NO: 90114 - RNA, 1410 nt, Artificial Sequence
  derived and/or modified CDS sequence (opt1) from neuraminidase__InfluenzaA__BAF47978
augaaccccaaccagaagaucaucaccaucggcagcgugucccugaccaucagcacgaucugcuucuucaugcagaucgccauccucgucaccaccgugacccugcacuucaagcaguacgaguucaacuccccgcccaacaaccaggugaugcugugcgagcccacgaucaucgagcgcaacaucaccgagaucgucuaccucaccaacaccacgaucgagaaggagaucugccccaagcuggccgaguaccggaacuggagcaagccgcagugcaacaucaccggguucgcgcccuucuccaaggacaacagcauccgccuguccgccggcggggacaucugggugacccgggagcccuacgugagcugcgaccccgacaagugcuaccaguucgcccucggccaggggaccacgcugaacaacguccacuccaacgacaccgugcacgaccgcaccccguaccggacccugcucaugaacgagcugggcgugcccuuccaccugggcacgaagcaggucugcaucgccuggagcuccagcuccugccacgacgggaaggccuggcuccacgugugcgugaccggcgacgacaagaacgcgaccgccagcuucaucuacaacgggcgccuggucgacuccaucgugagcugguccaaggagauccugcggacccaggagagcgagugcgugugcaucaacggcacgugcaccgucgugaugaccgacggguccgccagcggcaaggccgacaccaagauccucuucaucgaggagggcaagaucgugcacacgagcacccuguccgggagcgcgcagcacgucgaggagugcuccugcuacccccgcuaccccggcgugcggugcgugugccgcgacaacuggaaggggagcaaccggccgaucgucgacaucaacaucaaggacuacuccaucgugagcuccuacgugugcagcggccuggucggcgacacgccccgcaagaacgacuccagcuccagcucccacugccucgaccccaacaacgaggagggcgggcacggggugaagggcugggccuucgacgacgggaacgacgccuggaugggccggaccaucagcgagaagcugcgcuccggcuacgagaccuucaaggucaucgagggguggagcaaccccaacuccaagcugcagaucaaccgccaggugaucguggaccggggcaaccggagcggguacuccggcaucuucagcgucgagggcaagagcugcaucaaccgcugcuucuacguggagcucauccgggggcgcaaggaggagaccgaggugcuguggaccuccaacagcaucgucguguucugcggcaccuccgggacguacggcaccgggagcuggccggacggcgccgacaucaaccugaugcccaucuga

SEQ ID NO: 90115 - RNA, 1410 nt, Artificial Sequence
  derived and/or modified CDS sequence (opt1) from neuraminidase__InfluenzaA__BAF47979
augaaccccaaccagaagaucaucaccaucggcagcgugucccugaccaucagcacgaucugcuucuucaugcagaucgccauccucaucaccaccgucacccugcacuucaagcaguacgaguucaacuccccgcccaacaaccaggugaugcugugcgagcccacgaucaucgagcgcaacaucaccgagaucguguaccucaccaacaccacgaucgagaaggagaucugccccaagcuggccgaguaccggaacuggagcaagccgcagugcaacaucaccggguucgcgcccuucuccaaggacaacagcauccgccuguccgccggcggggacaucugggucacccgggagcccuacgugagcugcgaccccgacaagugcuaccaguucgcccucggccaggggaccacgcugaacaacgugcacuccaacgacaccguccacaaccgcaccccguaccggacccugcucaugaacgagcugggcgugcccuuccaccugggcacgaagcaggucugcaucgccuggagcuccagcuccugccacgacgggaaggccuggcuccacgugugcgugaccggcgacgacaagaacgcgaccgccagcuucaucuacaacgggcgccugguggacuccaucgucagcugguccaaggagauccugcggacccaggagagcgagugcgugugcaucaacggcacgugcaccguggucaugaccgacggguccgccagcggcaaggccgacaccaagauccucuucaucgaggagggcaagaucgugcacacgagcacccuguccgggagcgcgcagcacguggaggagugcuccugcuacccccgcuaccccggcguccggugcgugugccgcgacaacuggaaggggagcaaccggccgaucguggacaucaacaucaaggacuacuccaucgucagcuccuacgugugcagcggccuggugggcgacacgccccgcaagaacgacuccagcuccagcucccacugccucgaccccaacaacgaggagggcgggcacggggucaagggcugggccuucgacgacgggaacgacguguggaugggccggaccaucagcgagaagcugcgcuccggcuacgagaccuucaaggucaucgagggguggagcaaccccaacuccaagcugcagaccaaccgccaggugaucguggaccggggcaaccggagcggguacuccggcaucuucagcgucgagggcaagagcugcaucaaccgcugcuucuacguggagcucauccgggggcgcaaggaggagaccgaggugcuguggaccuccaacagcaucgucguguucugcggcacguccgggaccuacggcaccgggagcuggccggacggcgccgacaucaaccugaugcccaucuga

SEQ ID NO: 90116 - RNA, 1410 nt, Artificial Sequence; identical to SEQ ID NO: 80588
  derived and/or modified CDS sequence (opt1) from neuraminidase__InfluenzaA__BAF47980

SEQ ID NO: 90117 - RNA, 1410 nt, Artificial Sequence
  derived and/or modified CDS sequence (opt1) from neuraminidase__InfluenzaA__BAF47981
augaaccccaaccagaagaucaucaccaucggcagcgugucccugaccaucagcacgaucugccucuucaugcagaucgccauccugaucaccaccgucacccugcacuucaagcaguacgaguucaacuccccgcccaacaaccaggugaugcucugcgagcccacgaucaucgagcgcaacaucaccgagaucguguaccugaccaacaccacgaucgagaaggagaucugccccaagcuggccgaguaccggaaguggagcaagccgcagugcaacaucaccggguucgcgcccuucuccaaggacaacagcauccgccucuccgccggcggggacaucugggucacccgggagcccuacgugagcugcgaccccgacaagugcuaccaguucgcccugggccaggggaccacgcugaacaacgugcacuccaacgacaccguccgcaaccggaccccguaccgcacccuccugaugaacgagcugggcgugcccuuccaccucggcacgaagcaggucugcaucgccuggagcuccagcuccugccacgacgggaaggccuggcugcacgugugcgugaccggcgacgacaagaacgcgaccgccagcuucaucuacaacgggcggcugguggacuccaucgucagcugguccaaggagauccuccgcacccaggagagcgagugcgugugcaucaacggcacgugcaccguggucaugaccgacggguccgccagcggcaaggccgacaccaagauccuguucaucgaggagggcaagaucgugcacacgagcacccuguccgggagcgcgcagcacguggaggagugcuccugcuacccccgguaccccggcguccgcugcgugugccgggacaacuggaaggggagcaaccgcccgaucguggacaucaacaucaaggacuacuccaucgucagcuccuacgugugcagcggccucgugggcgacacgccccggaagaacgacuccagcuccagcucccacugccuggaccccaacaacgaggagggcgggcacggggucaagggcugggccuucgacgacgggaacgacguguggaugggccgcaccaucagcgagaagcugcgguccggcuacgagaccuucaaggucaucgagggguggagcaaccccaacuccaagcuccagaucaaccgccaggugaucguggaccggggcaaccgcagcggguacuccggcaucuucagcgucgagggcaagagcugcaucaaccggugcuucuacguggagcugauccgcgggcggaaggaggagaccgaggugcuguggaccuccaacagcaucgucguguucugcggcaccuccgggacguacggcaccgggagcuggccggacggcgccgacaucaaccucaugcccaucuga

SEQ ID NO: 90118 - RNA, 1410 nt, Artificial Sequence
  derived and/or modified CDS sequence (opt1) from neuraminidase__InfluenzaA__BAF47982
augaaccccaaccagaagaucaucaccaucggcagcgugucccugaccaucagcacgaucugcuucuucaugcagaucgccauccucaucaccaccgucacccugcacuucaagcaguacgaguucaacuccccgcccaacaaccaggugaugcugugcgagcccacgaucaucgagcgcaacaucaccgagaucguguaccucaccaacaccacgaucgagaaggagaucugccccaagcuggccgaguaccggaaguggagcaagccgcagugcaacaucaccggguucgcgcccuucuccaaggacaacagcauccgccuguccgccggcggggacaucugggucacccgggagcccuacgugagcugcgaccccgacaagugcuaccaguucgcccucggccaggggaccacgcugaacaacgugcacuccaacgacaccguccgcaaccggaccccguaccgcacccugcucaugaacgagcugggcgugcccuuccaccugggcacgaagcaggucugcaucgccuggagcuccagcuccugccacgacgggaaggccuggcuccacgugugcgugaccggcgacgacaagaacgcgaccgccagcuucaucuacaacgggcggcugguggacuccaucgucagcugguccaaggagauccugcgcacccaggagagcgagugcgugugcaucaacggcacgugcaccguggucaugaccgacggguccgccagcggcaaggccgacaccaagauccucuucaucgaggagggcaagaucgugcacacgagcacccuguccgggagcgcgcagcacguggaggagugcuccugcuacccccgguaccccggcguccgcugcgugugccgggacaacuggaaggggagcaaccgcccgaucguggacaucaacaucaaggacuacuccaucgucagcuccuacgugugcagcggccuggugggcgacacgccccggaagaacgacuccagcuccagcucccacugccucgaccccaacaacgaggagggcgggcacggggucaagggcugggccuucgacgacgggaacgacguguggaugggccgcaccaucagcgagaagcugcgguccggcuacgagaccuucaaggucaucgagggguggagcaaccccaacuccaagcugcagaucaaccgccaggugaucguggaccggggcaaccgcagcggguacuccggcaucuucagcgucgagggcaagagcugcaucaaccggugcuucuacguggagcucauccgcgggcggaaggaggagaccgaggugcuguggaccuccaacagcaucgucguguucugcggcaccuccgggacguacggcaccgggagcuggccggacggcgccgacaucaaccugaugcccaucuga

SEQ ID NO: 90119 - RNA, 1410 nt, Artificial Sequence; identical to SEQ ID NO: 80588
  derived and/or modified CDS sequence (opt1) from neuraminidase__InfluenzaA__BAF47983

SEQ ID NO: 90120 - RNA, 1410 nt, Artificial Sequence
  derived and/or modified CDS sequence (opt1) from neuraminidase__InfluenzaA__BAF47984
augaaccccaaccagaagaucaucaccaucggcagcgugucccugaccaucagcacgaucugcuucuucaugcagaucgccauccucaucaccaccgucacccugcacuucaagcaguacgaguucaacuccccgcccaacaaccaggugaugcugugcgagcccacgaucaucgagcgcaacaucaccgagaucguguaccucaccaacaccacgaucgagaaggagaucugccccaagcuggccgaguaccggaacuggagcaagccgcagugcaacaucaccggguucgcgcccuucuccaaggacaacagcauccgccuguccgccggcggggacaucugggucacccgggagcccuacgugagcugcgaccccgacaagugcuaccaguucgcccucggccaggggaccacgcugaacaacgugcacuccaacgacaccguccacggccgcaccccguaccggacccugcucaugaacgagcugggcgugcccuuccaccuggggacgaagcaggucugcaucgccuggagcuccagcuccugccacgacggcaaggccuggcuccacgugugcgugaccggggacgacaagaacgcgaccgccagcuucaucuacaacggccgccugguggacuccaucgucagcugguccaaggagauccugcggacccaggagagcgagugcgugugcaucaacgggacgugcaccguggucaugaccgacggcuccgccagcggcaaggccgacaccaagauccucuucaucgaggaggggaagaucgugcacacgagcacccuguccggcagcgcgcagcacguggaggagugcuccugcuacccccgcuaccccgggguccggugcgugugccgcgacaacuggaagggcagcaaccggccgaucguggacaucaacaucaaggacuacuccaucgucagcuccuacgugugcagcggccuggugggggacacgccccgcaagaacgacuccagcuccagcucccacugccucgaccccaacaacgaggagggcgaccacggggucaagggcugggccuucgacgacgggaacgacguguggaugggccggaccaucagcgagaagcugcgcuccggcuacgagaccuucaaggucaucgagggguggagcaaccccaacuccaagcugcagaucaaccgccaggugaucguggaccggggcaaccggagcggguacuccggcaucuucagcgucgagggcaagagcugcaucaaccgcugcuucuacguggagcucauccgggggcgcaaggaggagaccgaggugcuguggaccuccaacagcaucgucguguucugcggcaccuccgggacguacggcaccgggagcuggccggacggcgccgacaucaaccugaugcccaucuga

SEQ ID NO: 90121 - RNA, 1410 nt, Artificial Sequence
  derived and/or modified CDS sequence (opt1) from neuraminidase__InfluenzaA__BAF47985
augaaccccaaccagaagaucaucaccaucggcagcgugucccugaccaucagcacgaucugcuucuucaugcagaucgccauccucaucaccaccgucacccugcacuucaagcaguacgaguucaacuucccgcccaacaaccaggugaugcugugcgagcccacgaucaucgagcgcaacaucaccgagaucguguaccucaccaacaccacgaucgagaaggagaucugccccaagcuggccgaguaccggaacugguccaagccgcagugcgacaucaccggguucgcgcccuucagcaaggacaacuccauccgccugagcgccggcggggacaucugggucacccgggagcccuacguguccugcgaccccgacaagugcuaccaguucgcccucggccaggggaccacgcugaacaacgugcacagcaacgacaccguccacgaccgcaccccguaccggacccugcucaugaacgagcugggcgugcccuuccaccugggcacgaagcaggucugcaucgccugguccagcuccagcugccacgacgggaaggccuggcuccacgugugcgugaccggcgacgacaagaacgcgaccgccuccuucaucuacaacgggcgccugguggacagcaucgucuccuggagcaagaagauccugcggacccaggaguccgagugcgugugcaucaacggcacgugcaccguggucaugaccgacgggagcgccuccggcaaggccgacaccaagauccucuucaucgaggagggcaagaucgugcacacgagcacccugagcggguccgcgcagcacguggaggagugcagcugcuacccccgcuaccccggcguccggugcgugugccgcgacaacuggaagggguccaaccggccgaucguggacaucaacaucaaggacuacagcaucgucuccagcuacgugugcuccggccuggugggcgacacgccccgcaagaacgacagcuccagcuccagccacugccucgaccccaacaacgaggagggcgggcacggggucaagggcugggccuucgacgacgggaacgacguguggaugggccggaccaucuccgagaagcugcgcagcggcuacgagaccuucaaggucaucgaggggugguccaaccccaacagcaagcugcagaucaaccgccaggugaucguggaccggggcaaccgguccggguacagcggcaucuucuccgucgagggcaagagcugcaucaaccgcugcuucuacguggagcucauccgggggcgcaaggaggagaccgaggugcuguggaccagcaacuccaucgucguguucugcggcaccagcgggacguacggcaccggguccuggccggacggcgccgacaucaaccugaugcccaucuga

SEQ ID NO: 90122 - RNA, 1410 nt, Artificial Sequence
  derived and/or modified CDS sequence (opt1) from neuraminidase__InfluenzaA__BAF47986
augaaccccaaccagaagaucaucaccaucggcagcgugucccugaccaucagcacgaucugcuucuucaugcagaucgccauccucaucaccaccgucacccugcacuucaagcaguacgaguucaacuucccgcccaacaaccaggugaugcugugcgagcccacgaucaucgagcgcaacaucaccgagaucguguaccucaccaacaccacgaucgagaaggagaucugccccaagcuggccgaguaccggaacugguccaagccgcagugcgacaucaccggguucgcgcccuucagcaaggacaacuccauccgccugagcgccggcggggacaucugggucacccgggagcccuacguguccugcgaccccgacaagugcuaccaguucgcccucggccaggggaccacgcugaacaacgugcacagcaacgacaccguccacgaccgcaccccguaccggacccugcucaugaacgagcugggcgugcccuuccaccugggcacgaagcaggucugcaucgccugguccagcuccagcugccacgacgggaaggccuggcuccacgugugcgugaccggcgacgacaagaacgcgaccgccuccuucaucuacaacgggcgccugguggacagcaucgucuccuggagcaagaagauccugcggacccaggaguccgagugcgugugcaucaacggcacgugcaccguggucaugaccgacgggagcgccuccggcaaggccgacaccaagauccucuucaucgaggagggcaagaucgugcacacgagcacccugagcggguccgcgcagcacguggaggagugcagcugcuacccccgcuaccccggcguccggugcgugugccgcgacaacuggaagggguccaaccggccgaucguggacaucaacaucaaggacuacagcaucgucuccagcuacgugugcuccggccuggugggcgacacgccccgcaagaacgacagcuccagcuccagccacugccucgaccccaacaacgaggagggcgggcacggggucaagggcugggccuucgacgacgggaacgacguguggaugggccggaccaucuccgagaagcugcgcagcggcuacgagaccuucaaggucaucgaggggugguccaaccccaacagcaagcugcagaucaaccgccaggugaucguggaccggggcaaccgguccggguacagcggcaucuucuccgucgagggcaagagcugcaucaaccgccgguucuacguggagcucauccgcgggcggaaggaggagaccgaggugcuguggaccagcaacuccaucgucguguucugcggcaccagcgggacguacggcaccggguccuggccggacggcgccgacaucaaccugaugcccaucuga

SEQ ID NO: 90123 - RNA, 1410 nt, Artificial Sequence
  derived and/or modified CDS sequence (opt1) from neuraminidase__InfluenzaA__BAF47987
augaaccccaaccagaagaucaucaccaucggcagcgugucccugaccaucagcacgaucugcuucuucaugcagaucgccauccucaucaccaccgucacccugcacuucaagcaguacgaguucaacuucccgcccaacaaccaggugaugcugugcgagcccacgaucaucgagcgcaacaucaccgagaucguguaccucaccaacaccacgaucgagaaggagaucugccccaagcuggccgaguaccggaacugguccaagccgcagugcgacaucaccggguucgcgcccuucagcaaggacaacuccauccgccugagcgccggcggggacaucugggucacccgggagcccuacguguccugcgaccccgacaagugcuaccaguucgcccucggccaggggaccacgcugaacaacgugcacagcaacgacaagguccacgaccgcaccccguaccggacccugcucaugaacgagcugggcgugcccuuccaccugggcaccaagcaggucugcaucgccugguccagcuccagcugccacgacgggaaggccuggcuccacgugugcgugacgggcgacgacaagaacgcgaccgccuccuucaucuacaacgggcgccugguggacagcaucgucuccuggagcaagaagauccugcggacccaggaguccgagugcgugugcaucaacgggaccugcacgguggucaugaccgacgggagcgccuccggcaaggccgacaccaagauccucuucaucgaggagggcaagaucgugcacaccagcacgcugagcggguccgcgcagcacguggaggagugcagcugcuacccccgcuaccccggcguccggugcgugugccgcgacaacuggaagggguccaaccggccgaucguggacaucaacaucaaggacuacagcaucgucuccagcuacgugugcuccggccuggugggcgacacgccccgcaagaacgacagcuccagcuccagccacugccucgaccccaacaacgaggagggcggccacggggucaagggcugggccuucgacgacgggaacgacguguggaugggccggaccaucuccgagaagcugcgcagcggcuacgagaccuucaaggucaucgaggggugguccaaccccaacagcaagcugcagaucaaccgccaggugaucguggaccggggcaaccgguccggguacagcggcaucuucuccgucgagggcaagagcugcaucaaccgcugcuucuacguggagcucauccgggggcgcaaggaggagaccgaggugcuguggaccagcaacuccaucgucguguucugcggcaccagcgggaccuacggcacgggguccuggccggacggcgccgacaucaaccugaugcccaucuga

SEQ ID NO: 90124 - RNA, 1410 nt, Artificial Sequence; identical to SEQ ID NO: 78738
  derived and/or modified CDS sequence (opt1) from neuraminidase__InfluenzaA__BAF47988

SEQ ID NO: 90125 - RNA, 1410 nt, Artificial Sequence; identical to SEQ ID NO: 78738
  derived and/or modified CDS sequence (opt1) from neuraminidase__InfluenzaA__BAF47989

SEQ ID NO: 90126 - RNA, 1410 nt, Artificial Sequence
  derived and/or modified CDS sequence (opt1) from neuraminidase__InfluenzaA__BAF47990
augaaccccaaccagaagaucaucaccaucggcagcgugucccugaccaucagcacgaucugcuucuucaugcagaucgccauccucaucaccaccgucacccugcacuucaagcaguacgaguucaacuccccgcccaacaaccaggugaugcugugcgagcccacgaucaucgagcgcaacaucaccgagaucguguaccucaccaacaccacgaucgagaaggagaucugccccaagcuggccgaguaccggaacuggagcaagccgcagugcaacaucaccggguucgcgcccuucuccaaggacaacagcauccgccuguccgccggcggggacaucugggucacccgggagcccuacgugagcugcgaccccgacaagugcuaccaguucgcccucggccaggggaccacgcugaacaacgugcacuccaacgacaccguccacgaccgcaccccguaccggacccugcucaugaacgagcugggcgugcccuuccaccugggcacgaagcaggucugcaucgccuggagcuccagcuccugccacgacgggaaggccuggcuccacgugugcgugaccggcgacgacaagaacgcgaccgccagcuucaucuacaacgggcgccugguggacuccaucgucagcugguccaaggagauccugcggacccaggagagcgagugcgugugcaucaacggcacgugcaccgugaucaugaccgacggguccgccagcggcaaggccgacaccaagauccucuucaucgaggagggcaagaucguccacacgagcacccuguccgggagcgcgcagcacguggaggagugcuccugcuacccccgcuaccccggcgugcggugcgucugccgcgacaacuggaaggggagcaaccggccgaucguggacaucaacaucaaggacuacuccaucgugagcuccuacgucugcagcggccuggugggcgacacgccccgcaagaacgacuccagcuccagcucccacugccucgaccccaacaacgaggagggcgggcacggggugaagggcugggccuucgacgacgggaacgacgucuggaugggccggaccgugagcgagaagcugcgcuccggcuacgagaccuucaaggucaucgagggguggagcaaccccaacuccaagcugcagaucaaccgccaggugaucguggaccggggcaaccggagcggguacuccggcaucuucagcgucgagggcaagagcugcaucaaccgcugcuucuacguggagcucauccgggggcgcaaggaggagaccgaggugcuguggaccuccaacagcaucgucguguucugcggcaccuccgggacguacggcaccgggagcuggccggacggcgccgacaucaaccugaugcccaucuga

SEQ ID NO: 90127 - RNA, 1410 nt, Artificial Sequence
  derived and/or modified CDS sequence (opt1) from neuraminidase__InfluenzaA__BAF47991
augaaccccaaccagaagaucaucaccaucggcagcgugucccugaccaucagcacgaucugcuucuucaugcagaucgccauccucaucaccaccgucacccugcacuucaagcaguacgaguucaacuccccgcccaacaaccaggugaugcugugcgagcccacgaucaucgagcgcaacaucaccgagaucguguaccucaccaacaccacgaucgagaaggagaucugccccaagcuggccgaguaccggaacuggagcaagccgcagugcgacaucaccggguucgcgcccuucuccaaggacaacagcauccgccuguccgccggcggggacaucugggucacccgggagcccuacgugagcugcgaccccgacaagugcuaccaguucgcccucggccaggggaccacgcugaacaacgugcacuccaacgacaucguccacgaccgcaccccguaccggacccugcucaugaacgagcugggcgugcccuuccaccugggcaccaagcaggucugcaucgccuggagcuccagcuccugccacgacgggaaggccuggcuccacgugugcgugacgggcgacgacaagaacgcgaccgccagcuucaucuacaacgggcgccugguggacuccaucgucagcugguccaagaagauccugcggacccaggagagcgagugcgugugcaucaacgggaccugcacgguggucaugaccgacggguccgccagcggcaaggccgacaccaagauccucuucaucgaggagggcaagaucgugcacaccagcacgcuguccgggagcgcgcagcacguggaggagugcuccugcuacccccgcuaccccggcauccggugcgucugccgcgacaacuggaaggggagcaaccggccgaucguggacaucaacaucaaggacuacuccaucgugagcuccuacgucugcagcggccuggugggcgacacgccccgcaagaacgacuccagcuccagcucccacugccucgaccccaacaacgaggagggcggccacggggugaagggcugggccuucgacgacgggaacgacgucuggaugggccggaccaucagcgagaagcugcgcuccggcuacgagaccuucaaggugaucgagggguggagcaaccccaacuccaagcugcagaucaaccggcaggucaucguggaccgcggcaaccggagcggguacuccggcaucuucagcguggagggcaagagcugcaucaaccgcugcuucuacgucgagcucauccgggggcgcaaggaggagaccgaggugcuguggaccuccaacagcaucguggucuucugcggcaccuccgggaccuacggcacggggagcuggccggacggcgccgacaucaaccugaugcccaucuga

SEQ ID NO: 90128 - RNA, 1410 nt, Artificial Sequence
  derived and/or modified CDS sequence (opt1) from neuraminidase__InfluenzaA__BAF47992
augaaccccaaccagaagaucaucaccaucggcagcgugucccugaccaucagcacgaucugcuucuucaugcagaucgccauccucaucaccaccgucacccugcacuucaagcaguacgaguucaacuccccgcccaacaaccaggugaugcugugcgagcccacgaucaucgagcgcaacaucaccgagaucguguaccucaccaacaccacgaucgagaaggagaucugccccaagcuggccgaguaccggaacuggagcaagccgcagugcaacaucaccggguucgcgcccuucuccaaggacaacagcauccgccuguccgccggcggggacaucugggucacccgggagcccuacgugagcugcgagcccgacaagugcuacccguucgcccucgugcagggcaccacgcugaacaacguccacuccaacgacaccgugcacgaccgcacccccuaccggacccugcucaugaacgagcugggggugcccuuccaccugggcacgaagcaggucugcaucgccuggagcuccagcuccugccacgacggcaaggccuggcuccacgugugcgugaccggggacgacaagaacgcgaccgccagcuucaucuacaacggccgccuggucgacuccaucgugagcugguccaaggagauccugcggacccaggagagcgagugcgugugcaucaacgggacgugcaccgucgugaugaccgacggcuccgccagcgggaaggccgacaccaagauccucuucaucgaggagggcaagaucgugcacacgagcacccuguccggcagcgcgcagcacgucgaggagugcuccugcuacccccgcuacccgggggugcggugcgugugccgcgacaacuggaagggcagcaaccggcccaucgucgacaucaacaucaaggacuacuccaucgugagcuccuacgugugcagcgggcuggucggcgacacgccccgcaagaacgacuccagcuccagcggccacugccucgaccccaacaacgaggagggcgggcacggggugaagggcugggccuucgacgacgggaacgacgucuggaugggccggaccaucuccgagaagcugcgcagcggcuacgagaccuucaaggugaucgaggggugguccaacccgaacagcaagcugcagaucaaccgccaggugaucgucgaccggggcaaccgguccggguacagcggcaucuucuccguggagggcaagagcugcaucaaccgcugcuucuacguggagcucauccgggggcgcaaggaggagaccgagguccuguggaccagcaacuccuucgugguguucugcggcaccagcgggacguacggcaccggguccuggcccgacggcgccgacaucaaccugaugcccaucuga

SEQ ID NO: 90129 - RNA, 1410 nt, Artificial Sequence; identical to SEQ ID NO: 90085
  derived and/or modified CDS sequence (opt1) from neuraminidase__InfluenzaA__BAF47993

SEQ ID NO: 90130 - RNA, 1410 nt, Artificial Sequence; identical to SEQ ID NO: 78736
  derived and/or modified CDS sequence (opt1) from neuraminidase__InfluenzaA__BAF47994

SEQ ID NO: 90131 - RNA, 1410 nt, Artificial Sequence
  derived and/or modified CDS sequence (opt1) from neuraminidase__InfluenzaA__BAF47995
augaaccccaaccagaagaucaucaccaucggcagcgugucccugaccaucagcacgaucugcuucuucaugcagaucgccauccucaucaccaccgucacccugcacuucaagcaguacgaguucaacuccccgcccaacaaccaggugaugcugugcgagcccacgaucaucgagcgcaacaucaccgagaucguguaccucaccaacaccacgaucgagaaggagaucugccccaagcuggccgaguaccggaacuggagcaagccgcagugcaacaucaccggguucgcgcccuucuccaaggacaacagcauccgccuguccgccggcggggacaucugggucacccgggagcccuacgugagcugcgaccccgacaagugcuaccaguucgcccucggccaggggaccacgcugaacaacgugcacuccaacgacaccguccacggccgcaccccguaccggacccugcucaugaacgagcugggcgugcccuuccaccuggggacgaagcaggucugcaucgccuggagcuccagcuccugccacgacggcaaggccuggcuccacgugugcgugaccggggacgacaagaacgcgaccgccagcuucaucuacaacggccgccugguggacuccaucgucagcugguccaaggagauccugcggacccaggagagcgagugcgugugcaucaacgggacgugcaccguggucaugaccgacggcuccgccagcggcaaggccgacaccaagauccucuucaucgaggaggggaagaucgugcacacgagcacccuguccggcagcgcgcagcacguggaggagugcuccugcuacccccgcuaccccgggguccggugcgugugccgcgacaacuggaagggcagcaaccggccgaucguggacaucaacaucaaggacuacuccaucgucagcuccuacgugugcagcggccuggugggggacacgccccgcaagaacgacuccagcuccagcucccacugccucgaccccaacaacgaggagggcgggcacggcgucaaggggugggccuucgacgacggcaacgacguguggaugggccggaccaucagcgagaagcugcgcuccggguacgagaccuucaaggucaucgagggcuggagcaaccccaacuccaagcugcagaucaaccgccaggugaucguggaccgggggaaccggagcggcuacuccgggaucuucagcgucgagggcaagagcugcaucaaccgcugcuucuacguggagcucauccggggccgcaaggaggagaccgaggugcuguggaccuccaacagcaucgucguguucugcgggaccuccggcacguacgggaccggcagcuggccggacggggccgacaucaaccugaugcccaucuga

SEQ ID NO: 90132 - RNA, 1410 nt, Artificial Sequence; identical to SEQ ID NO: 90131
  derived and/or modified CDS sequence (opt1) from neuraminidase__InfluenzaA__BAF47996

SEQ ID NO: 90133 - RNA, 1410 nt, Artificial Sequence; identical to SEQ ID NO: 78738
  derived and/or modified CDS sequence (opt1) from neuraminidase__InfluenzaA__BAF47997

SEQ ID NO: 90134 - RNA, 1410 nt, Artificial Sequence
  derived and/or modified CDS sequence (opt1) from neuraminidase__InfluenzaA__BAF57504
augaaccccaaccagaagaucaucaccaucggcagcgugucccugaccaucagcacgaucugcuucuucaugcagaucgccauccucaucaccaccgucacccugcacuucaagcaguacgaguucaacccgccgcccaacaaccaggugaugcugugcgagcccacgaucaucgagcgcaacaucaccgagaucguguaccucaccaacaccacgaucgagaaggagaucugccccaagcuggccgaguaccggaacugguccaagccccagugcaacaucaccggguucgcgcccuucagcaaggacaacuccauccgccugagcgccggcggggacaucugggucacccgggagcccuacguguccagcgacccggacaagugcuaccaguucgcccucggccaggggaccacgcugaacaacgugcacuccaacgacaccguccacgaccgcacccccuaccggacccugcucaugaaggagcugggcgugcccuuccaccugggcacgaagcaggucugcaucgccuggagcuccagcuccugccacgacgggaaggccuggcuccacgugugcgugaccggcgacgacgagaacgcgaccgccagcuucaucuacaacgggcgccugguggacuccgucgugagcugguccaagaagauccugcggacccaggagagcgagugcgugugcaucaacggcacgugcaccgucgugaugaccgacggguccgccagcggcaaggccgacaccaagauccucuucaucgaggagggcaagaucgugcacacgagcucccugagcggguccgcgcagcacgucgaggagugcagcugcuacccccgcuacccgggcgugcggugcgugugccgcgacaacuggaagggguccaaccggcccaucgucgacaucaacaucaaggacuacagcaucguguccagcuacgugugcuccggccuggucggcgacacgccccgcaagaacgacagcuccagcuccagccacugccucgaccccaacaacgaggagggcgggcacggggugaagggcugggccuucgacgacgggaacgacgucuggaugggccggaccaucuccgagaagcugcgcagcggcuacgagaccuucaaggugaucgaggggugguccaacccgaacagcaagcugcagaucaaccgccaggugaucgucgaccggggcaaccgguccggguacagcggcaucuucagcguggaggggaaguccugcaucaaccgcugcuucuacguggagcucauccggggccgcaagcaggagaccgagguccuguggaccagcaacuccaucgugguguucugcggcaccagcgggaccuacggcacgggguccuggcccgacggcgccgacaucaaccugaugcccaucuga

SEQ ID NO: 90135 - RNA, 1410 nt, Artificial Sequence
  derived and/or modified CDS sequence (opt1) from neuraminidase__InfluenzaA__BAF57508
augaaccccaaccagaagaucaucaccaucggcagcgugucccugaccaucagcacgaucugcuucuucaugcagaucgccauccucaucaccacccugacccugcacuucaagcaguacgaguucaacuccccgcccaacaaccaggucaugcucugcgagcccacgaucaucgagcgcaacaucaccgagaucguguaccugaccaacaccacgaucgagaaggagaucugccccaagcuggccgaguaccggaacuggagcaagccgcagugcaacaucaccggguucgcgcccuucuccaaggacaacagcauccgccucuccgccggcggggacaucugggugacccgggagcccuacgucagcugcgaccccgacaagugcuaccaguucgcccugggccaggggaccacgcugaacaacgugcacuccaacgacaccgugcacgaccgcaccccguaccggacccuccugaugaacgagcugggcguccccuuccaccucggcacgaagcaggucugcaucgccuggagcuccagcuccugccacgacgggaaggccuggcugcacgugugcgugaccggcgacgacgagaacgcgaccgccagcuucaucuacaacgggcgccugguggacuccaucgugagcugguccaagaagauccuccggacccaggagagcgagugcgucugcaucaacggcacgugcaccguggugaugaccgacggguccgccagcggcaaggccgacaccaagauccuguucaucgaggagggcaagaucguccacacgagcacccuguccgggagcgcgcagcacguggaggagugcuccugcuacccccgcuaccccggcgugcggugcgucugccgcgacaacuggaaggggagcaaccggccgaucguggacaucaacaucaaggacuacuccaucgugagcuccuacgucugcagcggccucgugggcgacacgccccgcaagaacgacuccagcuccagcucccacugccuggaccccaacaacgaggagggcgggcacggggugaagggcugggccuucgacgacgggaacgacgucuggaugggccggaccaucagcgagaagcugcgcuccggcuacgagaccuucaaggugaucgagggguggagcaaccccaacuccaagcuccagaucaaccggcaggucaucguggaccgcggcaaccggagcggguacuccggcaucuucagcguggagggcaagagcugcaucaaccgcugcuucuacgucgagcugauccgggggcgcaagcaggagaccgaggugcuguggaccuccaacagcaucguggucuucugcggcaccuccgggacguacggcaccgggagcuggccggacggcgccgacaucaaccucaugcccaucuga

SEQ ID NO: 90136 - RNA, 1410 nt, Artificial Sequence; identical to SEQ ID NO: 79953
  derived and/or modified CDS sequence (opt1) from neuraminidase__InfluenzaA__BAF57511

SEQ ID NO: 90137 - RNA, 1410 nt, Artificial Sequence
  derived and/or modified CDS sequence (opt1) from neuraminidase__InfluenzaA__BAF57515
augaaccccaaccagcgcaucaucaccaucggcagcgugucccugaccaucagcacgaucugcuucuucaugcagaucgccauccucaucaccaccgucacccugcacuucaagcaguacgaguucaacuccccgcccaacaaccaggugaugcugugcgagcccacgaucaucgagcggaacaucaccgagaucguguaccucaccaacaccacgaucgagaaggagaucugccccaagcuggccgaguaccgcaacuggagcaagccgcagugcaacaucaccggguucgcgcccuucuccaaggacaacagcauccggcuguccgccggcggggacaucugggucacccgcgagcccuacgugagcugcgaccccgacaagugcuaccaguucgcccucggccaggggaccacgcugaacaacgugcacuccaacgacaagguccacgaccggaccccguaccgcacccugcucaugaacgagcugggcgugcccuuccaccugggcaccaagcaggucugcaucgccuggagcuccagcuccugccacgacgggaaggccuggcuccacgugugcgugacgggcgacgacgagaacgcgaccgccagcuucaucuacaacgggcggcugguggacuccaucgucagcugguccaagaagauccugcgcacccaggagagcgagugcgugugcaucaacgggaccugcacgguggucaugaccgacggguccgccagcggcaaggccgacaccaagauccucuucaucgaggagggcaagaucgugcacaccagcacgcuguccgggagcgcgcagcacguggaggagugcuccugcuacccccgguaccccggcguccgcugcgugugccgggacaacuggaaggggagcaaccgcccgaucguggacaucaacaucaaggacuacuccaucgucagcuccuaccugugcagcggccucgugggcgacacgccccggaagaacgacuccagcuccagcucccacugccuggaccccaacaacgaggagggcggccacggggugaagggcugggccuucgacgacgggaacgacgucuggaugggccgcaccaucagcgagaagcugcgguccggcuacgagaccuucaaggugaucgagggguggagccaccccaacucccagcuccagaucaaccgccaggucaucguggaccggggcaaccgcagcggguacuccggcaucuucagcguggagggcaagagcugcaucaaccggugcuucuacgucgagcugauccgcgggcggaagcaggagaccgaggugcuguggaccuccaacagcaucguggucuucugcggcaccuccgggaccuacggcacggggagcuggccggacggcgccgacaucaaccucaugcccaucuga

SEQ ID NO: 90138 - RNA, 1410 nt, Artificial Sequence
  derived and/or modified CDS sequence (opt1) from neuraminidase__InfluenzaA__BAF57522
augaaccccaaccagaagaucaucaccaucggcagcgugucccugaccaucagcacgaucugcuucuucaugcagaucgccauccucaucaccaccgucacccugcacuucaagcaguacgaguucaacuccccgcccaacaaccaggugaugcugugcgagcccacgaucaucgagcgcaacaucaccgagaucguguaccucaccaacaccaucaucgagaaggagaucugccccaagcuggccgaguaccggaacuggagcaagccgcagugcaacaucacgggguucgcgcccuucuccaaggacaacagcauccgccuguccgccggcggggacaucugggucacccgggagcccuacgugagcugcgaccccgacaagugcuaccaguucgcccucggccaggggaccacccugaacaacgugcacuccaacgacacgguccacgaccgcaccccguaccggacccugcucaugaacgagcugggcgugcccuuccaccugggcaccaagcaggucugcaucgccuggagcuccagcuccugccacgacgggaaggccuggcuccacgugugcgugacgggcgacgacgagaacgcgaccgccagcuucaucuacaacgggcgccugguggacuccaucgucagcugguccaagaagauccugcggacccaggagagcgagugcgugugcaucaacgggaccugcacgguggucaugaccgacggguccgccagcggcaaggccgacaccaagauccucuucaucgaggagggcaagaucgugcacaccagcacgcuguccgggagcgcgcagcacguggaggagugcuccugcuacccccgcuaccccggcguccggugcgugugccgcgacaacuggaaggggagcaaccggccgaucguggacaucaacaucaaggacuacuccaucgucagcuccuacgugugcagcggccuggugggcgacacgccccgcaagaacgaccggucccgcagcucccacugccucgaccccaacaacgaggagggcggccacggggucaagggcugggccuucgacgacgggaacgacguguggaugggccggaccaucagcgagaagcugcgcuccggcuacgagaccuucaaggucaucgagggguggagcaagcccaacuccaagcugcagaucaaccgccaggugaucguggaccggggcaaccggaccggguacagcggcaucuucuccgucgagggcaagagcugcaucaaccgcugcuucuacguggagcucauccgggggcgcaagcaggagaccgaggugcuguggaccuccaacagcaucgucguguucugcggcaccagcgggacguacggcaccggguccuggccggacggcgccgacaucaaccugaugcccaucuga

SEQ ID NO: 90139 - RNA, 1410 nt, Artificial Sequence
  derived and/or modified CDS sequence (opt1) from neuraminidase__InfluenzaA__BAF57529
augaaccccaaccagaagaucaucaccaucggcagcgugucccugaccaucagcacgaucugcuucuucaugcagaucgccauccucaucaccaccgucacccugcacuucaagcaguacgaguucaacuccccgcccaacaaccaggugaugcugugcgagcccacgaucaucgagcgcaacaucaccgagaucguguaccucaccaacaccacgaucgagaaggagaucugccccaagcuggccgaguaccggaacuggagcaagccgcagugcgacaucaccggguucgcgcccuucuccaaggacaacagcauccgccuguccgccggcggggacaucugggucacccgggagcccuacgugagcugcgaccccgacaagugcuaccaguucgcccucggccaggggaccacgcugaacaacgugcacuccaacgacaagguccacgagcgcaccccguaccggacccugcucaugaacgagcugggcgugcccuuccaccugggcaccaagcaggucugcaucgccuggagcuccagcuccugccacgacgggaaggccuggcuccacgugugcgugacgggcgacgacaagaacgcgaccgccagcuucaucuacaacgggcgccugguggacuccaucgucagcugguccaagaagauccugcggacccaggagagcgagugcgugugcaucaacgggaccugcacgguggucaugaccgacggguccgccagcggcaaggccgacaccaagauccucuucaucgaggagggcaagaucgugcacaccagcacgcuguccgggagcgcgcagcacguggaggagugcuccugcuacccccgcuaccccggcguccggugcgugugccgcgacaacuggaaggggagcaaccggccgaucguggacaucaacaucaaggacuacuccaucgucagcuccuacgugugcagcggccuggugggcgacacgccccgcaagaacgacuccagcuccagcucccacugccucgaccccaacaacgaggagggcggccacggggucaagggcugggccuucgacgacgggaacgacguguggaugggccggaccaucagcgagaagcugcgcuccggcuacgagaccuucaaggucaucgagggguggagcaaccccaacuccaagcugcagaucaaccgccaggugaucguggaccggggcaaccggagcggguacuccggcaucuucagcgucgagggcaagagcugcaucaaccgcugcuucuacguggagcucauccgggggcgcaaggaggagaccgaggugcuguggaccuccaacagcaucgucguguucugcggcaccuccgggaccuacggcacggggagcuggccggacggcgccgacaucaaccugaugcccaucuga

SEQ ID NO: 90140 - RNA, 1410 nt, Artificial Sequence; identical to SEQ ID NO: 85575
  derived and/or modified CDS sequence (opt1) from neuraminidase__InfluenzaA__BAF57532

SEQ ID NO: 90141 - RNA, 1410 nt, Artificial Sequence; identical to SEQ ID NO: 85575
  derived and/or modified CDS sequence (opt1) from neuraminidase__InfluenzaA__BAF57536

SEQ ID NO: 90142 - RNA, 1410 nt, Artificial Sequence
  derived and/or modified CDS sequence (opt1) from neuraminidase__InfluenzaA__BAF57539
augaaccccaaccagaagaucaucaccaucggcagcgugucccugaccaucagcacgaucugcuucuucaugcagaucgccauccucaucaccaccgucacccugcacuucaagcaguacgaguucaacuccccgcccaacaaccaggugaugcugugcgagcccacgaucaucgagcgcaacaucaccgagaucguguaccucaccaacaccacgaucgagaaggagaucugccccaagcuggccgaguaccggaacuggagcaagccgcagugcgacaucaccggguucgcgcccuucuccaaggacaacagcauccgccuguccgccggcggggacaucugggucacccgggagcccuacgugagcugcgaccccgacaagugcuaccaguucgcccucggccaggggaccacgcugaacaacgugcacuccaacgacaccguccacgaccgcaccccguaccggacccugcucaugaacgagcugggcgugcccuuccaccugggcacgaagcaggucugcaucgccuggagcuccagcuccugccacgacgggaaggccuggcuccacgugugcgugaccggcgacgacaagaacgcgaccgccagcuucaucuacaacgggcgccugaucgacuccaucgugagcugguccaagaagauccugcggacccaggagagcgagugcgucugcaucaacggcacgugcaccguggugaugaccgacggguccgccagcggcaaggccgacaccaagauccucuucaucgaggagggcaagaucguccacacgagcacccuguccgggagcgcgcagcacguggaggagugcuccugcuacccccgcuaccccggcgugcggugcgucugccgcgacaacuggaaggggagcaaccggccgaucguggacaucaacaucaaggacuacuccaucgugagcuccuacgucugcagcggccuggugggcgacacgccccgcaagaacgacuccagcuccagcucccacugccucgaccccaacaacgaggagggcgggcacggggugaagggcugggccuucgacgacgggaacgacgucuggaugggccggaccaucagcgagaagcugcgcuccggcuacgagaccuucaaggugaucgagggguggagcaaccccaacuccaagcugcagaucaaccggcaggucaucguggaccgcggcaaccggagcggguacuccggcaucuucagcguggagggcaagagcugcaucaaccgcugcuucuacgucgagcucauccgggggcgcaaggagaagaccgaggugcuguggaccuccaacagcaucguggucuucugcggcaccuccgggacguacggcaccgggagcuggccggacggcgccgacaucaaccugaugcccaucuga

SEQ ID NO: 90143 - RNA, 1410 nt, Artificial Sequence
  derived and/or modified CDS sequence (opt1) from neuraminidase__InfluenzaA__BAF57543
augaaccccaaccagaagaucaucaccaucggcagcgugucccugaccaucagcacgaucugcuucuucaugcagaucgccauccucaucaccaccgucacccugcacuucaagcaguacgaguucaacuccccgcccaacaaccaggugaugcugugcgagcccacgaucaucgagcgcaacaucaccgagaucguguaccucaccaacaccacgaucgagaaggagaucugccccaagcuggccgaguaccggaacuggagcaagccgcagugcgacaucaccggguucgcgcccuucuccaaggacaacagcauccgccuguccgccggcggggacaucugggucacccgggagcccuacgugagcugcgaccccgacaagugcuaccaguucgcccucggccaggggaccacgcugaacaacgugcacuccaacgacaccguccacgaccgcaccccguaccggacccugcucaugaacgagcugggcgugcccuuccaccugggcacgaagcaggucugcaucgccuggagcuccagcuccugccacgacgggaaggccuggcuccacgugugcgugaccggcgacgacaagaacgcgaccgccagcuucaucuacaacgggcgccugguggacuccaucgucagcugguccaagaagauccugcggacccaggagagcgagugcgugugcaucaacggcacgugcaccguggucaugaccgacggguccgccagcggcaaggccgacaccaagauccucuucaucgaggagggcaagaucgugcacacgagcacccuguccgggagcgcgcagcacguggaggagugcuccugcuacccccgcuaccccggcguccggugcgugugccgcgacaacuggaaggggagcaaccggccgaucguggacaucaacaucaaggacuacuccaucgucagcuccuacgugugcagcggccuggugggcgacacgccccgcaagaacgacuccagcuccagcucccacugccucgaccccaacaacgaggagggcgggcacggggucaagggcugggccuucgacgacgggaacgacguguggaugggccggaccaucagcgagaagcugcgcuccggcuacgagaccuucaaggucaucgagggguggagcaaccccaacuccaagcugcagaucaaccgccaggugaucguggaccggggcaaccggagcggguacuccgccaucuucagcgucgagggcaagagcugcaucaaccgcugcuucuacguggagcucauccgggggcgcaaggaggagaccgaggugcuguggaccuccaacagcaucgucguguucugcggcaccuccggcacguacgggaccggcagcuggccggacggggccgacaucaaccugaugcccaucuga

SEQ ID NO: 90144 - RNA, 1410 nt, Artificial Sequence
  derived and/or modified CDS sequence (opt1) from neuraminidase__InfluenzaA__BAF57547
augaaccccaaccagaagaucaucaccaucggcagcgugucccugaccaucagcacgaucugcuucuucaugcagaucgccauccucaucaccaccgucacccugcacuucaagcaguacgaguucaacuccccgcccaacaaccaggugaugcugugcgagcccacgaucaucgagcgcaacaucaccgagaucguguaccucaccaacaccacgaucgagaaggagaucugccccaagcuggccgaguaccggaacuggagcaagccgcagugcgacaucaccggguucgcgcccuucuccaaggacaacagcauccgccuguccgccggcggggacaucugggucacccgggagcccuacgugagcugcgaccccgacaagugcuaccaguucgcccucggccaggggaccacgcugaacaacgugcacuccaacgacaccguccacgaccgcaccccguaccggacccugcucaugaacgagcugggcgugcccuuccaccugggcacgaagcaggucugcaucgccuggagcuccagcuccugccacgacgggaaggccuggcuccacgugugcgugaccggcgacgacaagaacgcgaccgccagcuucaucuacaacgggcgccugguggacuccaucgucagcugguccaagaagauccugcggacccaggagagcgagugcgugugcaucaacggcacgugcaccguggucaugaccgacggguccgccagcggcaaggccgacaccaagauccucuucaucgaggagggcaagaucgugcacacgagcacccuguccgggagcgcgcagcacguggaggagugcuccugcuacccccgcuaccccggcguccggugcgugugccgcgacaacuggaaggggagcaaccggccgaucguggacaucaacaucaaggacuacuccaucgucagcuccuacgugugcagcggccuggugggcgacacgccccgcaagaacgacuccagcuccagcucccacugccucgaccccaacaacgaggagggcgggcacggggucaagggcugggccuucgacgacgggaacgacguguggaugggccggaccaucagcgagaagcugcgcuccggcuacgagaccuucaaggucaucgagggguggagcaaccccaacuccaagcugcagaucaaccgccaggugaucguggaccggggcaaccggagcggguacuccggcaucuucagcgucgagggcaagagcugcaucaaccgcugcuucuacguggagcucauccgggggcgcaaggaggagaccgaggcccuguggaccuccaacagcaucguggucuucugcggcaccuccgggacguacggcaccgggagcuggccggacggcgccgacaucaaccugaugcccaucuga

SEQ ID NO: 90145 - RNA, 1410 nt, Artificial Sequence; identical to SEQ ID NO: 78738
  derived and/or modified CDS sequence (opt1) from neuraminidase__InfluenzaA__BAF57551

SEQ ID NO: 90146 - RNA, 1410 nt, Artificial Sequence; identical to SEQ ID NO: 78738
  derived and/or modified CDS sequence (opt1) from neuraminidase__InfluenzaA__BAF57555

SEQ ID NO: 90147 - RNA, 1410 nt, Artificial Sequence; identical to SEQ ID NO: 78736
  derived and/or modified CDS sequence (opt1) from neuraminidase__InfluenzaA__BAF57559

SEQ ID NO: 90148 - RNA, 1410 nt, Artificial Sequence
  derived and/or modified CDS sequence (opt1) from neuraminidase__InfluenzaA__BAF57563
augaaccccaaccagaagaucaucaccaucggcagcgugucccugaccaucagcacgaucugcuucuucaugcagaucgccauccucaucaccaccgucacccugcacuucaagcaguacgaguucaacuccccgcccaacaaccaggugaugcugugcgagcccacgaucaucgagcgcaacaucaccgagaucguguaccucaccaacaccacgaucgagaaggagaucugccccaagcuggccgaguaccggaacuggagcaagccgcagugcgacaucaccggguucgcgcccuucuccaaggacaacagcauccgccuguccgccggcggggacaucugggucacccgggagcccuacgugagcugcgaccccgacaagugcuaccaguucgcccucggccaggggaccacgcugaacaacgugcacuccaacgacaucguccacgaccgcaccccguaccggacccugcucaugaacgagcugggcgugcccuuccaccugggcaccaagcaggucugcaucgccuggagcuccagcuccugccacgacgggaaggccuggcuccacgugugcgugacgggcgacgacaagaacgcgaccgccagcuucaucuacaacgggcgccugguggacuccaucgucagcugguccaaggagauccugcggacccaggagagcgagugcgugugcaucaacgggaccugcacgguggucaugaccgacggguccgccagcggcaaggccgacaccaagauccucuucaucgaggagggcaagaucgugcacaccagcacgcuguccgggagcgcgcagcacguggaggagugcuccugcuacccccgcuaccccggcguccggugcgugugccgcgacaacuggaaggggagcaaccggccgaucguggacaucaacaucaaggacuacuccaucgucagcuccuacgugugcagcggccuggugggcgacacgccccgcaagaacgacuccagcuccagcucccacugccucgaccccaacaacgaggagggcggccacggggucaagggcugggccuucgacgacgggaacgacguguggaugggccggaccaucagcgagaagcugcgcuccggcuacgagaccuucaaggucaucgagggguggagcaaccccaacuccaagcugcagaucaaccgccaggugaucguggaccggggcaaccggagcggguacuccggcaucuucagcgucgagggcaagagcugcaucaaccgcugcuucuacguggagcucauccgggggcgcaaggaggagaccgaggugcuguggaccuccaacagcaucgucguguucugcggcaccuccgggaccuacggcacggggagcuggccggacggcgccgacaucaaccugaugcccaucuga

SEQ ID NO: 90149 - RNA, 1410 nt, Artificial Sequence; identical to SEQ ID NO: 78736
  derived and/or modified CDS sequence (opt1) from neuraminidase__InfluenzaA__BAF57571

SEQ ID NO: 90150 - RNA, 1410 nt, Artificial Sequence; identical to SEQ ID NO: 85480
  derived and/or modified CDS sequence (opt1) from neuraminidase__InfluenzaA__BAF57575

SEQ ID NO: 90151 - RNA, 1410 nt, Artificial Sequence; identical to SEQ ID NO: 78351
  derived and/or modified CDS sequence (opt1) from neuraminidase__InfluenzaA__BAF57579

SEQ ID NO: 90152 - RNA, 1410 nt, Artificial Sequence
  derived and/or modified CDS sequence (opt1) from neuraminidase__InfluenzaA__BAF57583
augaaccccaaccagaagaucaucaccaucggcagcgugucccugaccaucagcacgaucugcuucuucaugcagaucgccauccucaucaccaccgucacccugcacuucaagcaguacgaguucaacuccccgcccaacaaccaggugaugcugugcgagcccacgaucaucgagcgcaacaucaccgagaucguguaccucaccaacaccacgaucgagaaggagaucugccccaagcuggccgaguaccggaacuggagcaagccgcagugcaacaucaccggguucgcgcccuucuccaaggacaacagcauccgccuguccgccggcggggacauccgggucacccgcgagcccuacgugagcugcgaccccgacaagugcuaccaguucgcccucggccaggggaccacgcugaacaacgugcacuccaacgacaccguccacgaccggaccccguaccgcacccugcucaugaacgagcugggcgugcccuuccaccugggcacgaagcaggucugcaucgccuggagcuccagcuccugccacgacgggaaggccuggcuccacgugugcgugaccggcgacgacaagaacgcgaccgccagcuucaucuacaacgggcggcugguggacuccaucgucagcugguccaaggagauccugcgcacccaggagagcgagugcgugugcaucaacggcacgugcaccguggucaugaccgacggguccgccagcggcaaggccgacaccaagauccucuucaucgaggagggcaagaucgugcacacgagcacccuguccgggagcgcgcagcacguggaggagugcuccugcuacccccgguaccccggcguccgcugcgugugccgggacaacuggaaggggagcaaccgcccgaucguggacaucaacaucaaggacuacuccaucgucagcuccuacgugugcagcggccuggugggcgacacgccccggaagaacgacuccagcuccagcucccacugccucgaccccaacaacgaggagggcgggcacggggucaagggcugggccuucgacgacgggaacgacguguggaugggccgcaccaucagcgagaagcugcgguccggcuacgagaccuucaaggucaucgagggguggagcaaccccaacuccaagcugcagaucaaccgccaggugaucguggaccggggcaaccgcagcggguacuccggcaucuucagcgucgagggcaagagcugcaucaaccggugcuucuacguggagcucauccgcgggcggaaggaggagaccgaggugcuguggaccuccaacagcaucgucguguucugcggcaccuccgggacguacggcaccgggagcuggccggacggcgccgacaucaaccugaugcccaucuga

SEQ ID NO: 90153 - RNA, 1410 nt, Artificial Sequence
  derived and/or modified CDS sequence (opt1) from neuraminidase__InfluenzaA__BAF57587
augaaccccaaccagaagaucaucaccaucggcagcgugucccugaccaucagcacgaucugcuucuucaugcagaucgccauccucaucaccaccgucacccugcacuucaagcagugcgaguucaacuccccgcccaacaaccaggugaugcugugcgagcccacgaucaucgagcgcaacaucaccgagaucguguaccucaccaacaccacgaucgagaaggagaucugccccaagcuggccgaguaccggaacuggagcaagccgcagugcaacaucaccggguucgcgcccuucuccaaggacaacagcauccgccuguccgccggcggggacaucugggucacccgggagcccuacgugagcugcgaccccgacaagugcuaccaguucgcccucggccaggggaccacgcugaacaacgugcacuccaacgacaccguccacgaccgcaccccguaccggacccugcucaugaacgagcugggcgugcccuuccaccugggcacgaagcaggucugcaucgccuggagcuccagcuccugccacgacgggaaggccuggcuccacgugugcgugaccggcgacgacaagaacgcgaccgccagcuucaucuacaacgggcgccugguggacuccaucgucagcugguccaaggagauccugcggacccaggagagcgagugcgugugcaucaacggcacgugcaccguggucaugaccgacggguccgccagcggcaaggccgacaccaagauccucuucaucgaggagggcaagaucgugcacacgagcacccuguccgggagcgcgcagcacguggaggagugcuccugcuacccccgcuaccccggcguccggugcgugugccgcgacaacuggaaggggagcaaccggccgaucguggacaucaacaucaaggacuacuccaucgucagcuccuacgugugcagcggccuggugggcgacacgccccgcaagaacgacuccagcuccagcucccacugccucgaccccaacaacgaggagggcgggcacggggucaagggcugggccuucgacgacgggaacgacguguggaugggccggaccaucagcgagaagcugcgcuccggcuacgagaccuucaaggucaucgagggguggagcaaccccaacuccaagcugcagaucaaccgccaggugaucguggaccggggcaaccggagcggguacuccggcaucuucagcgucgagggcaagagcugcaucaaccgcugcuucuacguggagcucauccgggggcgcaaggaggagaccgaggugcuguggaccuccaacagcaucgucguguucugcggcaccuccgggacguacggcaccgggagcuggccggacggcgccgacaucaaccugaugcccaucuga

SEQ ID NO: 90154 - RNA, 1410 nt, Artificial Sequence
  derived and/or modified CDS sequence (opt1) from neuraminidase__InfluenzaA__BAF57591
augaaccccaaccagaagaucaucaccaucggcagcgugucccugaccaucagcacgaucugcuucuucaugcagaucgccauccucaucaccaccgucacccugcacuucaagcaguacgaguucaacuccccgcccaacaaccaggugaugcugugcgagcccacgaucaucgagcgcaacaucaccgagaucguguaccucaccaacaccacgaucgagaaggagaucugccccaagcuggccgaguaccggaacuggagcaagccgcagugcgacaucaccggguucgcgcccuucuccaaggacaacagcauccgccuguccgccggcggggacaucugggucacccgggagcccuacgugagcugcgaccccgacaagugcuaccaguucgcccucggccaggggaccacgcugaacaacgugcacuccaacgacaccguccacgaccgcaccccguaccggacccugcucaugaacgagcugggcgugcccuuccaccugggcacgaagcaggucugcaucgccuggagcuccagcuccugccacgacgggaaggccuggcuccacgugugcgugaccggcgacgacaagaacgcgaccgccagcuucaucuacaacgggcgccugguggacuccaucgucagcugguccaaggagauccugcggacccaggagagcgagugcgugugcaucaacggcacgugcaccguggucaugaccgacggguccgccagcggcaaggccgacaccaagauccucuucaucgaggagggcaagaucgugcacacgagcacccuguccgggagcgcgcagcacguggaggagugcuccugcuacccccgcuaccccggcguccggugcgugugccgcgacaacuggaaggggagcaaccggccgaucgugcacaucaacaucaaggacuacuccaucgucagcuccuacgugugcagcggccuggugggcgacacgccccgcaagaacgacuccagcuccagcucccacugccucaaccccaacaacgaggagggcgggcacggggucaagggcugggccuucgacgacgggaacgacguguggaugggccggaccaucagcgagaagcugcgccugggcuacgagaccuucaaggucaucgaggggugguccaaccccaacagcaagcuccagaucaaccgccaggugaucguggaccggggcaaccgguccggguacagcggcaucuucuccgucgagggcaagagcugcaucaaccgcugcuucuacguggagcugauccgggggcgcaaggaggagaccgaggugcuguggaccagcaacuccaucgucguguucugcggcaccagcgggacguacggcaccggguccuggccggacggcgccgacaucaaccucaugcccaucuga

SEQ ID NO: 90155 - RNA, 1410 nt, Artificial Sequence
  derived and/or modified CDS sequence (opt1) from neuraminidase__InfluenzaA__BAF57595
augaaccccaaccagaagaucaucaccaucggcagcgugucccugaccaucagcacgaucugcuucuucaugcagaucgccauccucaucaccaccgucacccugcacuucaagcaguacgaguucaacuccccgcccaacaaccaggugaugcugugcgagcccacgaucaucgagcgcaacaucaccgagaucguguaccucaccaacaccacgaucgagaaggagaucugccccaagaucgccgaguaccggaacuggagcaagccgcagugcaacaucaccggguucgcgcccuucuccaaggacaacagcauccgccuguccgccggcggggacaucugggucacccgggagcccuacgugagcugcgaccccgacaagugcuaccaguucgcccugggccaggggaccacgcucaacaacgugcacuccaacgacaccguccacgaccgcaccccguaccggacccugcugaugaacgagcucggcgugcccuuccaccugggcacgaagcaggucugcaucgccuggagcuccagcuccugccacgacgggaaggccuggcugcacgugugcgugaccggcgacgacaagaacgcgaccgccagcuucaucuacaacgggcgccucguggacuccaucgucagcugguccaaggagauccugcggacccaggagagcgagugcgugugcgugaacggcacgugcaccgucgugaugaccgacggguccgccagcggcaaggccgacaccaagauccuguucaucgaggagggcaagaucgugcacacgagcacccucuccgggagcgcgcagcacgucgaggagugcuccugcuacccccgcuaccccggcgugcggugcgugugccgcgacaacuggaaggggagcaaccggccgaucgucgacaucaacaucaaggacuacuccaucgugagcuccuacgugugcagcggccuggucggcgacacgccccgcaagaacgacuccagcuccagcucccacugccuggaccccaacaacgaggagggcgggcacggggugaagggcugggccuucgacgacgggaacgacgucuggaugggccggaccaucagcgagaagcuccgcuccggcuacgagaccuucaaggugaucgagggguggagcaaccccaacuccaagcugcagaucaaccgccaggugaucgucgaccggggcaaccggagcggguacuccggcaucuucagcguggagggcaagagcugcaucaaccgcugcuucuacguggagcugauccgggggcgcaaggaggagaccgagguccucuggaccuccaacagcaucgugguguucugcggcaccuccgggacguacggcaccgggagcuggccggacggcgccgacaucaaccugaugcccaucuga

SEQ ID NO: 90156 - RNA, 1410 nt, Artificial Sequence; identical to SEQ ID NO: 85480
  derived and/or modified CDS sequence (opt1) from neuraminidase__InfluenzaA__BAF57599

SEQ ID NO: 90157 - RNA, 1410 nt, Artificial Sequence
  derived and/or modified CDS sequence (opt1) from neuraminidase__InfluenzaA__BAF57603
augaaccccaaccagaagaucaucaccaucggcagcgugucccugaccaucagcacgaucugcuucuucaugcagaucgccauccucaucaccaccgucacccugcacuucaagcaguacgaguucaacuccccgcccaacaaccaggugaugcugugcgagcccacgaucaucgagcgcaacaucaccgagaucguguaccucaccaacaccacgaucgagaaggagaucugccccaagcuggccgaguaccggaacuggagcaagccgcagugcaacaucaccggguucgcgcccuucuccaaggacaacagcauccgccuguccgccggcggggacaucugggucacccgggagcccuacgugagcugcgaccccgacaagugcuaccaguucgcccucggccaggggaccacgcugaacaacgugcacuccaacgacaccguccacgaccgcaccccguaccggacccugcucaugaacgagcugggcgugcccuuccaccugggcacgaagcaggucugcaucgccuggagcuccagcuccugccacgacgggaaggccuggcuccacgugugcgugaccggcgacgacaagaacgcgaccgccagcuucaucuacaacgggcgccugguggacuccaucgucagcugguccaaggagauccugcggacccaggagagcgagugcgugugcaucaacggcacgugcaccguggucaugaccgacggguccgccagcggcaaggccgacaccaagauccucuucaucgaggagggcaagaucgugcacacgagcacccuguccgggagcgcgcagcacguggaggagugcuccugcuacccccgcuaccccggcguccggugcgugugccgcgacaacuggaaggggagcaaccggccgaucguggacaucaacaucaaggacuacuccaucgucagcuccuacgugugcagcggccuggugggcgacacgccccgcaagaacgacuccagcuccagcucccacugccucgaccccaacaacgaggagggcgggcacggggucaagggcugggccuucgacgacgggaacgacguguggaugggccggaccaucagcgagaagcugcgcuccggcuacgagaccuucaaggucaucgagggguggagcaaccccgacuccaagcugcagaucaaccgccaggugaucguggaccggggcaaccggagcggguacuccggcaucuucagcgucgagggcaagagcugcaucaaccgcugcuucuacguggagcucauccgggggcgcaaggaggagaccgaggugcugggcaccuccaacagcaucgucguguucugcgggaccuccggcacguacgggaccggcagcuggccggacggggccgacaucaaccugaugcccaucuga

SEQ ID NO: 90158 - RNA, 1410 nt, Artificial Sequence; identical to SEQ ID NO: 85575
  derived and/or modified CDS sequence (opt1) from Neuraminidase__InfluenzaA__BAF62620

SEQ ID NO: 90159 - RNA, 1413 nt, Artificial Sequence
  derived and/or modified CDS sequence (opt1) from neuraminidase__InfluenzaA__BAF63036
augaaccccaaccagaagaucaucaccaucggcagcaucuccaucgccaucgggaucaucagccugaugcuccagaucggcaacaucaucuccaucugggccagccacuccauccagaccgggagccagaaccacacgggcaucugcaaccagcgcaucaucaccuacgagaacuccaccugggugaaccacaccuacgucacgaucaacaacaccaacgugguggcggggaaggacaagaccagcgucacccuggccggcaacuccagccugugcuccaucagcggcugggccaucuacacgaaggacaacuccauccggaucgggagcaagggcgacguguucgugauccgcgagccguucaucuccugcagccaccucgagugccggaccuucuuccugacccagggggcccugcucaacgacaagcacuccaacggcaccgucaaggaccgcagccccuaccgggcccugauguccugcccccugggggaggcgcccagcccguacaacagcaaguucgaguccguggccuggagcgccuccgccugccacgacggcaugggcuggcucacgaucgggaucagcggccccgacaacggggcgguggccguccugaaguacaacggcaucaucaccgagaccaucaaguccuggaagaagcgcauccugcggacccaggagagcgagugcgugugcgugaacggcuccugcuucacgaucaugaccgacgggcccagcaacggcgccgccuccuacaagaucuucaagaucgagaaggggaaggucaccaagagcaucgagcucaacgcccccaacuuccacuacgaggagugcuccugcuacccggacaccggcacggugaugugcgugugccgcgacaacuggcacgggagcaaccggcccugggucuccuucaaccagaaccuggacuaccagaucggcuacaucugcagcggcguguucggggacaacccccgccccaaggacggcaagggguccugcaacccggugaccgucgacggcgcggacggggugaagggcuucagcuacaaguacggcaacgggguguggaucggccggaccaaguccaaccgccugcggaagggguucgagaugaucugggaccccaacggcuggaccgacacggacagcgacuucuccgucaagcaggacgugguggccaucaccgacuggagcggguacagcggcuccuucguccagcaccccgagcucaccggccuggacugcauccgccccugcuucuggguggagcugguccgggggcucccgcgcgagaacaccacgaucuggaccagcggcuccagcaucuccuucugcggggugaacagcgacaccgccaacugguccuggcccgacggcgccgagcugcccuucaccaucgacaaguga

SEQ ID NO: 90160 - RNA, 1413 nt, Artificial Sequence; identical to SEQ ID NO: 85465
  derived and/or modified CDS sequence (opt1) from neuraminidase__InfluenzaA__BAF63040

SEQ ID NO: 90161 - RNA, 1413 nt, Artificial Sequence
  derived and/or modified CDS sequence (opt1) from neuraminidase__InfluenzaA__BAF63047
augaaccccaaccagaagaucaucaccaucggcagcaucuccaucgccaucgggaucaucagccuggugcuccagaucggcaacaucaucuccaucugggccagccacuccauccagaccgggagccagaaccacacgggcaucugcaaccagcgcaucaucaccuacgagaacuccaccugggucaaccacaccuacgugaacaucaacaacacgaacguggucgcggggaaggacaagaccagcgugacccuggccggcaacuccagccugugcuccaucagcggcugggccaucuacaccaaggacaacuccauccggaucgggagcaagggcgacguguucgucauccgcgagccguucaucuccugcagccaccucgagugccggacguucuuccugacccagggggcccugcucaacgacaagcacuccaacggcaccgugaaggaccgcagccccuaccgggcccugauguccugcccccugggggaggcgcccagcccguacaacagcaaguucgaguccguggccuggagcgccuccgccugccacgacggcaugggcuggcucaccaucgggaucagcggccccgacaacggggcggucgccgugcugaaguacaacggcaucaucacggagaccaucaaguccuggaagaagcgcauccugcggacccaggagagcgagugcgugugcgucaacggcuccugcuucaccaucaugacggacgggcccagcaacggcgccgccuccuacaagaucuucaagaucgagaaggggaaggugaccaagagcaucgagcucaacgcccccaacuuccacuacgaggagugcuccugcuacccggacaccggcaccgugaugugcgucugccgcgacaacuggcacgggagcaaccggcccuggguguccuucaaccagaaccuggacuaccagaucggcuacaucugcagcggcguguucggggacaacccccgccccaaggacggcgagggguccugcaacccggucacgguggacggcgcggacggggugaagggcuucagcuacaaguacggcaacggggucuggaucggccggaccaaguccaaccgccugcggaagggguucgagaugaucugggaccccaacggcuggaccgacaccgacagcgacuucuccgugaagcaggacguggucgccaucacggacuggagcggguacagcggcuccuucgugcagcaccccgagcucaccggccuggacugcauccgccccugcuucugggucgagcuggugcgggggcucccgcgcgagaacaccaccaucuggacgagcggcuccagcaucuccuucugcggggugaacagcgacaccgccgacugguccuggcccgacggcgccgagcugcccuucaccaucgacaaguga

SEQ ID NO: 90162 - RNA, 1413 nt, Artificial Sequence
  derived and/or modified CDS sequence (opt1) from neuraminidase__InfluenzaA__BAF63058
augaaccccaaccagaagaucaucaccaucggcagcaucuccaucgccaucgggaucaucagccugaugcuccagaucggcaacaucaucuccaucugggccagccacuccauccagaccgggagccagaaccacacgggcaucugcaaccagcgcaucaucaccuacgagaacuccaccugggugaaccacaccuacgucaacaucaacaacacgaacgugguggcggggaaggacaagaccagcgucacccuggccggcaacuccagccugugcgccaucuccggcugggccaucuacaccaaggacaacagcauccggaucggguccaagggcgacguguucgugauccgcgagccguucaucagcugcucccaccucgagugccggacguucuuccugacccagggggcccugcucaacgacaagcacagcaacggcaccgucaaggaccgcucccccuaccgggcgcugaugagcugcccccugggggaggcccccuccccguacaacagcaaguucgagagcguggccugguccgccagcgcgugccacgacggcaugggcuggcucaccaucgggaucuccggccccgacaacggggccguggccguccugaaguacaacggcaucaucacggagaccaucaagagcuggaagaagcgcauccugcggacccaggaguccgagugcgugugcgugaacggcagcugcuucaccaucaugacggacgggcccuccaacgaggccgccagcuacaagaucuucaagaucgagaagggcaaggucaccaaguccaucgagcucaacgcgcccaacuuccacuacgaggagugcagcugcuacccggacaccgggaccgugaugugcgugugccgcgacaacuggcacggcuccaaccggcccugggucagcuucaaccccaaccuggacuaccagaucggguacaucugcuccggcguguucggcgacaacccccgcccgaaggacggggagggcagcugcaaccccgugacggucgacggggccgacggcgugaagggguucuccuacaaguacggcaacggcguguggaucgggcggaccaagagcaaccgccugcggaagggcuucgagauggucugggaccccaacggguggaccgacaccgacuccgacuucagcgugaagcaggacguggucgccaucacggacugguccggcuacagcgggagcuucgugcagcaccccgagcucaccggccuggacugcauccgcccgugcuucugggucgagcuggugcggggccuccccaaggagaacaccaccaucuggacguccgggagcuccaucagcuucugcggcgugaacuccgacaccgccaacuggagcuggcccgacggggccgagcugcccuucaccaucgacaaguga

SEQ ID NO: 90163 - RNA, 1413 nt, Artificial Sequence; identical to SEQ ID NO: 85465
  derived and/or modified CDS sequence (opt1) from neuraminidase__InfluenzaA__BAF63065

SEQ ID NO: 90164 - RNA, 1413 nt, Artificial Sequence; identical to SEQ ID NO: 85465
  derived and/or modified CDS sequence (opt1) from neuraminidase__InfluenzaA__BAF63069

SEQ ID NO: 90165 - RNA, 1413 nt, Artificial Sequence; identical to SEQ ID NO: 85465
  derived and/or modified CDS sequence (opt1) from neuraminidase__InfluenzaA__BAF63079

SEQ ID NO: 90166 - RNA, 1413 nt, Artificial Sequence; identical to SEQ ID NO: 85465
  derived and/or modified CDS sequence (opt1) from neuraminidase__InfluenzaA__BAF63092

SEQ ID NO: 90167 - RNA, 1413 nt, Artificial Sequence; identical to SEQ ID NO: 85465
  derived and/or modified CDS sequence (opt1) from neuraminidase__InfluenzaA__BAF63098

SEQ ID NO: 90168 - RNA, 1413 nt, Artificial Sequence
  derived and/or modified CDS sequence (opt1) from neuraminidase__InfluenzaA__BAF63104
augaaccccaaccagaagaucaucaccaucggcagcaucuccaucgccaucgggaucaucagccugaugcuccaggugggcaucgucguguccaucugggccagccacuccauccagaccgggagccagaaccacacgggcaucugcaaccagcgcaucaucaccuacgagaacuccaccugggugaaccacaccuacgucaacaucaacaacacgaacgugguggcggggaaggacaagaccagcgucgcccuggccggcaacuccagccugugcuccaucagcggcugggccaucuacaccaaggacaacuccauccggaucgggagcaagggcgacguguucgugauccgcgagccguucaucuccugcagccaccucgagugccggaccuucuuccugacgcagggggcccugcucaacgacaagcacuccaacggcaccgucaaggaccgcagccccuaccgggcgcugauguccugcccccugggggaggcccccagcccguacaacagcaaguucgaguccguggccuggagcgccuccgcgugccacgacggcaugggcuggcucaccaucgggaucagcggccccgacaacggggccguggccguccugaaguacaacggcaucaucaccgagacgaucaaguccuggaagaagcgcauccugcggacccaggagagcgagugcgugugcgugaacggcuccugcuucaccaucaugaccgacgggcccagcaacggcgccgccuccuacaagaucuucaagaucgagaaggggcaggucaccaagagcguggagcucaacgcgcccaacuuccacuacgaggagugcuccugcuacccggacacgggcaccgugaugugcgucugccgcgacaacuggcacgggagcaaccggcccuggguguccuucaaccagaaccuggacuaccagaucggcuacaucugcagcggcguguucggggacaacccccgccccaaggacggcaagggguccugcaacccggucaccguggacggcgccgacggggugaagggcuucagcuacaaguacggcaacggggucuggaucggccggacgaaguccaaccgccugcggaagggguucgagaugaucugggaccccaacggcuggaccgacaccgacagcgacuucuccgugaagcaggacgucguggccaucaccgacuggagcggguacagcggcuccuucgugcagcaccccgagcucacgggccuggacugcauccgccccugcuucugggucgagcuggugcgggggcucccgcgcgagaacaccaccaucuggaccagcggcuccagcaucuccuucugcgggguggacagcgacacggccaacugguccuggcccgacggcgccgagcugcccuucaccaucgacaaguga

SEQ ID NO: 90169 - RNA, 1413 nt, Artificial Sequence
  derived and/or modified CDS sequence (opt1) from neuraminidase__InfluenzaA__BAF63112
augaaccccaaccagaagaucaucaccaucggcagcaucuccaucgccaucgggaucaucagccugaugcuccaggugggcaacaucaucuccaucugggccagccacuccauccagaccgggagccagaaccacacgggcaucugcaaccagcgcaucaucaccuacgagaacuccaccugggucaaccacaccuacgugaacaucaacaacacgaacguggucgcggggaaggacaagaccagcguggcccuggccggcaacuccagccugugcuccaucagcggcugggccaucuacaccaaggacaacuccauccggaucgggagcaagggcgacguguucgucauccgcgagccguucaucuccugcagccaccucgagugccggaccuucuuccugacgcagggggcccugcucaacgacaagcacuccaacggcaccgugaaggaccgcagccccuaccgggcgcugauguccugcccccugggggaggcccccagcccguacaacagcaaguucgaguccguggccuggagcgccuccgcgugccacgacggcaugggcuggcucaccaucgggaucagcggccccgacaacggggccgucgccgugcugaaguacaacggcaucaucaccgagacgaucaaguccuggaagaagcgcauccugcggacccaggagagcgagugcgugugcgucaacggcuccugcuucaccaucaugaccgacgggcccagcaacggcgccgccuccuacaagaucuucaagaucgagaagggccaggugaccaagagcguggagcucaacgcgcccaacuuccacuacgaggagugcuccugcuacccggacacggggaccgucaugugcgugugccgcgacaacuggcacgggagcaaccggcccuggguguccuucaaccagaaccuggacuaccagaucggcuacaucugcagcggcgucuucggggacaacccccgccccaaggacggcaagggguccugcaacccggugaccguggacggcgccgacggggucaagggcuucagcuacaaguacggcaacgggguguggaucggccggacgaaguccaaccgccugcggaagggguucgagaugaucugggaccccaacggcuggaccgacaccgacagcgacuucuccgugaagcaggacgucguggccaucaccgacuggagcggguacagcggcuccuucguccagcaccccgagcucacgggccuggacugcauccgccccugcuucuggguggagcuggugcgggggcucccgcgcgagaacaccaccaucuggaccagcggcuccagcaucuccuucugcggggucgacagcgacacggccaacugguccuggcccgacggcgccgagcugcccuucaccaucgacaaguga

SEQ ID NO: 90170 - RNA, 1413 nt, Artificial Sequence
  derived and/or modified CDS sequence (opt1) from neuraminidase__InfluenzaA__BAF63116
augaaccccaaccagaagaucaucaccaucggcagcaucuccaucgccaucgggaucaucagccugaugcuccaggugggcaacaucaucuccaucugggccagccacuccauccagaccgggagccagaaccacacgggcaucugcaaccagcgcaucaucaccuacgagaacuccaccugggucaaccacaccuacgugaacaucaacaacacgaacguggucgcggggaaggacaagaccagcguggcccuggccggcaacuccagccugugcuccaucagcggcugggccaucuacaccaaggacaacuccauccggaucgggagcaagggcgacguguucgucauccgcgagccguucaucuccugcagccaccucgagugccggaccuucuuccugacgcagggggcccugcucaacgacaagcacuccaacggcaccgugaaggaccgcagccccuaccgggcgcugauguccugcccccugggggaggcccccagcccguacaacagcaaguucgaguccguggccuggagcgccuccgcgugccacgacggccucggcuggcugaccaucgggaucagcggccccgacaacggggccgucgccgugcugaaguacaacggcaucaucaccgagacgaucaaguccuggaagaagcgcauccuccggacccaggagagcgagugcgugugcgucaacggcuccugcuucaccaucaugaccgacgggcccagcaacggcgccgccuccuacaagaucuucaagaucgagaagggccaggugaccaagagcguggagcugaacgcgcccaacuuccacuacgaggagugcuccugcuacccggacacggggaccgucaugugcgugugccgcgacaacuggcacgggagcaaccggcccuggguguccuucaaccccgaccuggacuaccagaucggcuacaucugcagcggcgucuucggggacaacccccgcccgaaggacggcaagggguccugcaaccccgugaccguggacggcgccgacggggucaagggcuucagcuacaaguacggcaacgggguguggaucggccggacgaaguccaaccgccuccggaagggguucgagaugaucugggaccccaacggcuggaccgacaccgacagcgacuucuccgugaagcaggacgucguggccaucaccgacuggagcggguacagcggcuccuucguccagcaccccgagcugacgggccuggacugcauccgcccgugcuucuggguggagcucgugcgggggcugccccgcgagaacaccaccaucuggaccagcggcuccagcaucuccuucugcggggucgacagcgacacggccaacugguccuggcccgacggcgccgagcugcccuucaccaucgacaaguga

SEQ ID NO: 90171 - RNA, 1413 nt, Artificial Sequence
  derived and/or modified CDS sequence (opt1) from neuraminidase__InfluenzaA__BAF63124
augaaccccaaccagaagaucaucaccaucggcagcaucuccaucgccaucgggaucaucagccugaugcuccagaucggcaacaucaucuccaucugggccagccacuccauccagaccgggagccagaaccacacgggcaucugcaaccagcgcaucaucaccuacgagaacuccaccugggugaaccacaccuacgucaacaucaacaacacgaacgugguggcggggaaggacaagaccagcgucacccuggccggcaacuccagccugugcuccaucagcggcugggccaucuacaccaaggacaacuccauccggaucgggagcaagggcgacguguucgugauccgcgagccguucaucuccugcagccaccucgagugccggacguucuuccugacccagggggcccugcucaacgacaagcacuccaacggcaccgucaaggaccgcagccccuaccgggcccugauguccugcccccugggggaggcgcccagcccguacaacagcaaguucgaguccguggccuggagcgccuccgccugccacgacggcaugggcuggcucaccaucgggaucagcggccccgacaacggggcgguggccguccugaaguacaacggcaucaucacggagaccaucaaguccuggaagaagcgcauccugcggacccaggagagcgagugcgugugcgugaacggcuccugcuucaccaucaugacggacgggcccagcaacggcgccgccuccuacaagaucuucaagaucgagaaggggaaggucaccaagagccgcgagcucaacgcccccaacuuccacuacgaggagugcuccugcuacccggacaccggcaccgugaugugcgugugccgggacaacuggcacgggagcaaccgccccugggucuccuucaaccccaaccuggacuaccagaucggcuacaucugcagcggcguggugggggacaacccccggccgaaggacggcaagggguccugcaaccccgucacggcggacggcgccgacggggugaagggcuucagcuacaaguacggcaacgggguguggaucggccgcaccaaguccaaccggcugcgcaagggguucgagaugaucugggaccccaacggcuggaccgacaccgacagcgacuucuccgucaagcaggacgugguggccaucacggacuggagcggguacagcggcuccuucguccagcaccccgagcucaccggccuggacugcauccggccgugcuucuggguggagcugguccgcgggcucccccgggagaacaccaccaucuggacgagcggcuccagcaucuccuucugcgggguggacagcgacaccgccaacugguccuggcccgacggcgccgagcugcccuucaccaucgacaaguga

SEQ ID NO: 90172 - RNA, 1413 nt, Artificial Sequence; identical to SEQ ID NO: 85527
  derived and/or modified CDS sequence (opt1) from neuraminidase__InfluenzaA__BAF63132

SEQ ID NO: 90173 - RNA, 1413 nt, Artificial Sequence
  derived and/or modified CDS sequence (opt1) from neuraminidase__InfluenzaA__BAF63136
augaaccccaaccagaagaucaucaccaucggcagcaucuccaucgccaucgggaucaucagccugaugcuccagaucggcaacaucaucuccaucugggccagccacuccauccagaccgggagccagaaccacacgggcaucugcaaccagcgcaucaucaccuacgagaacuccaccugggugaaccacaccuacgucaacaucaacaacacgaacgugguggcggggaaggacaagaccagcgucacccuggccggcaacuccagccugugcuccaucagcggcugggccaucuacaccaaggacaacuccauccggaucgggagcaagggcgacguguucgugauccgcgagccguucaucuccugcagccaccucgagugcaagacguucuuccugacccagggggcccugcucaacgacaagcacuccaacggcaccgucaaggaccggagccccuaccgcgcccugauguccugcccccugggggaggcgcccagcccguacaacagcaaguucgaguccguggccuggagcgccuccgccugccacgacggcaugggcuggcucaccaucgggaucagcggccccgacaacggggcgguggccguccugaaguacaacggcaucaucacgggcaccaucaaguccuggaagaagcagauccugcggacccaggagagcgagugcgugugcaugaacggguccugcuucaccaucaugacggacggccccagcaacggggccgccuccuacaagaucuucaagaucgagaagggcaaggugaccaagagcaucgagcucaacgcccccaacuuccacuacgaggagugcuccugcuacccggacaccgggaccgucaugugcgugugccgcgacaacuggcacggcagcaaccggcccuggguguccuucaaccagaaccuggacuaccagaucggcuacaucugcagcggggucuucggcgacaacccccgccccaaggacggggagggcuccugcaacccggugacgguggacggggcgaacggcgucaagggcuucagcuacaaguacgggaacggcguguggaucgggcggaccaaguccaaccgccugcggaagggcuucgagaugaucugggaccccaacggguggaccaacaccgacagcgacuucuccgugaagcaggacgucguggccaucacggacuggagcggcuacagcggcuccuucgugcagcaccccgagcucaccgggcuggacugcauccgccccugcuucugggucgagcuggugcggggccucccgcgcgagaacaccaccaucuggacgagcggguccagcaucuccuucugcggcgucaacagcgacaccgccaacugguccuggcccgacggcgccgagcugcccuucaccaucgacaaguga

SEQ ID NO: 90174 - RNA, 1350 nt, Artificial Sequence
  derived and/or modified CDS sequence (opt1) from neuraminidase__InfluenzaA__BAH24021
augaaccccaaccagaagaucaucaccaucggcagcaucugcauggugaucgggaucgucucccugaugcuccagaucggcaacauggugagccugugggugucccacagcauccagaccgggaaccagcaccaggucgagccgaucuccaacacgaacuuccugaccgagaaggccguggccagcgugacccucgcgggcaacuccagccugugccccauccgcgggugggccguccacuccaaggacaacagcauccggaucggcuccaagggcgacguguucgugauccgcgagcccuucaucagcugcucccaccuggagugccggaccuucuuccucacgcagggggcccugcugaacgacaagcacagcaacggcaccgucaaggaccgcagcccccaccggacccucaugagcugcccggugggggaggcccccucccccuacaacagccgcuucgaguccguggccuggagcgcgagcgccugccacgacggcaccuccuggcugacgaucgggaucagcggccccgacaacggcgccgucgccgugcugaaguacaacgggaugaucaccgacaccaucaaguccuggcggaacaacauccuccgcacccaggagagcgagugcgcgugcgugaacggcuccugcuucacggucaugaccgacgggccgagcaacggccaggccuccuacaagaucuucaagauggagaagggcaagguggugaaguccgucgagcuggacgcccccaacuaccacuacgaggagugcuccugcuaccccgacgccggggagaucacgugcgugugccgggacaacuggcacggcagcaaccgccccuggguguccuucaaccagaaccuggaguaccagaucggguacaucugcagcggcgucuucggggacaacccgcggcccaacggcggcaccggguccugcggccccgugagccccaacggggccuacggcgugaagggguucuccuucaaguacggcaacggcgucuggaucgggcgcaccaagagcccguccagccgguccggcuucgagaugaucugggaccccaacggguggaccgagaccgacagcagcuucuccgugaagcaggacaucgucgcgaucaccgacuggagcggcuacuccgggagcuucgugcagcaccccgagcucacgggccuggacugcauccgccccugcuucuggguggagcugauccggggccgcccgaaggaguccaccaucuggaccagcggguccagcaucuccuucugcggcgucaacagcgacaccguguccuggagcuggcccgacggggccgagcuccccuucacgaucgacaaguga

SEQ ID NO: 90175 - RNA, 1410 nt, Artificial Sequence; identical to SEQ ID NO: 80917
  derived and/or modified CDS sequence (opt1) from neuraminidase__InfluenzaA__BAH95825

SEQ ID NO: 90176 - RNA, 1410 nt, Artificial Sequence; identical to SEQ ID NO: 80752
  derived and/or modified CDS sequence (opt1) from neuraminidase__InfluenzaA__BAH95826

SEQ ID NO: 90177 - RNA, 1410 nt, Artificial Sequence
  derived and/or modified CDS sequence (opt1) from neuraminidase__InfluenzaA__BAJ07994
augaaccccaaccagaagaucaccaccaucggcagcaucugcauggugaucgggaucgucucccugaugcuccagaucggcaacaucaucagcaucugggugucccacagcauccagacggggaaccagcaccaggccgagccgugcaaccaguccaucaucaccuacgagaacaacaccugggugaaccagaccuacgucaacaucagcaacacgaacuuccugaccgagaaggccguggcguccgugacccuggccggcaacagcucccucugccccaucagcgggugggccgucuacuccaaggacaacggcauccgcaucggcagcaagggggacguguucgugauccgggagcccuucaucuccugcagccaccuggagugccgcaucuucuuccugacccagggcgcccuccugaacgacaagcacuccaacgggacggucaaggaccggagcccccaccgcacccugauguccugcccggugggcgaggcccccagccccuacaacucccgguucgagagcguggcguggagcgccuccgccugccacgacgggaccagcuggcucaccaucggcaucuccggccccgacaacggggccgucgcggugcugaaguacaacggcaucaucacggacaccaucaagagcuggcgcaacaacaucaugcggacccaggaguccgagugcgccugcgugaacgggagcugcuucaccgucaugacggacggcccguccaacggccaggccagcuacaagaucuuccgcaucgagaaggggaagguggugaaguccgccgagcugaacgcccccaacuaccacuacgaggagugcagcugcuaccccgacgcgggcgagaucacgugcgucugccgggacaacuggcacggguccaaccgccccugggugagcuucaaccagaaccucgaguaccggaucggcuacaucugcuccgggguguucggcgacaacccgcgccccaacgacggcaccgggagcugcggccccgucucccccaagggggccuacggcaucaagggguucagcuucaaguacggcaacggcguguggaucgggcggaccaaguccaccaacagccgcuccggcuucgagaugaucugggacccgaacggguggaccggcaccgacagcaacuucagcgugaagcaggacaucgucgccaucaccgacugguccggguacagcggcuccuucgugcagcaccccgagcugacgggccuggacugcauccggcccugcuucugggucgagcucauccgcgggcggcccaaggagagcaccaucuggaccuccggcagcuccaucagcuucugcggggugaacuccgacaccgugggcuggagcuggccggacggcgccgagcugcccuucacgaucgacaaguga

SEQ ID NO: 90178 - RNA, 1350 nt, Artificial Sequence
  derived and/or modified CDS sequence (opt1) from neuraminidase__InfluenzaA__BAK23415
augaaccccaaccagaagaucaucaccaucggcagcgugugcaugaucaucgggaucgucucccugaugcuccagaucggcaacaugaucagcaucuggguggggcacuccauccagaccggcaaccagugccacgccgagccgaucagcaacacgaaguuccccaccgagaaggccgcggccuccgugacccuggccgggaacagcucccugugccccaucagcggcugggccgucuacuccaaggacaacagcauccgcaucggcucccgcggggacguguucgugauccgggagcccuucaucagcugcucccaccucgagugccggaccuucuuccugacgcagggcgcccugcucaacgacaagcacagcaacgggaccgucaaggaccgcuccccgcaccggacccugaugagcugccccgugggcgaggcgcccucccccuacaacagccgcuucgaguccguggccuggagcgccagcgccugccacgacgggaccuccuggcugacgaucggcaucagcggcccggacaacggggcggucgccgugcucaaguacaacggcaucaucaccgacaccaucaaguccuggcggaacaacauccugcgcacccaggagagcgagugcgccugcaucaacggguccugcuucacggugaugaccgacggccccagcuccggccaggccagcuacaagaucuucaagauggagaaggggaaggucgugaaguccguggagcuggacgcccccaacuaccacuacgaggagugcagcugcuaccccgacgcgggcgagaucacgugcgucugccgggacaacuggcacggguccaaccgcccgugggugagcuucaaccagaaccucgaguaccagaucggcuacaucugcuccgggguguucggcgacaacccccggcccaacgacggcaccgggagcugcggccccgucuccccgaacggggccuacggcgugaagggguucagcuucaaguacggcaacggcguguggaucgggcgcaccaaguccaccaacagccgguccggcuucgagaugaucugggaccccaacggguggaccggcaccgacagcagcuucuccgucaagcaggacaucguggccaucacggacuggagcggguacuccggcagcuucgugcagcaccccgagcugaccggccuggacugcauccgccccugcuucugggucgagcucauccgggggcgcccgaaggaguccaccaucuggaccagcggcuccagcaucuccuucugcggggugaacagcgacacggucuccuggagcuggcccgacggcgccgagcugcccuucaccaucgacaaguga

SEQ ID NO: 90179 - RNA, 1350 nt, Artificial Sequence
  derived and/or modified CDS sequence (opt1) from neuraminidase__InfluenzaA__BAK23416
augaaccccaaccagaagaucaucaccaucggcagcaucugcauggugaucgggaucgucucccugaugcuccagaucggcaacaugaucagcaucugggugucccacagcauccagaccgggaaccagugccaggccgagccgaucuccaacacgaaguuccugaccgagaaggccguggcgagcgucacccuggccggcaacuccagccucugccccaucuccgggugggccguguacagcaaggacaacuccauccgcaucggcagccggggcgacguguucgucauccgcgagcccuucaucuccugcagccaccuggagugccggaccuucuuccugacgcagggggcccuccugaacgacaagcacuccaacggcaccgugaaggaccgcagcccccaccggacccugauguccugcccggugggggaggcccccagccccuacaacucccgcuucgagagcgucgcguggagcgccuccgccugccacgacggcaccagcuggcucacgaucgggaucuccggccccgacaacggcgccguggcggugcugaaguacaacgggaucaucaccgacaccaucaagagcuggcggaacaacauccugcgcacccaggaguccgagugcgccugcgucaacggcagcugcuucacggugaugaccgacgggccguccagcggccaggccuccuacaagaucuucaagauggagaagggcaagguggucaagagcguggagcucgacgcccccaacuaccacuacgaggagugcuccugcuaccccgacgccggggagaucacgugcgugugccgggacaacuggcacggcagcaaccgccccugggucuccuucaaccagaaccuggaguaccagaucggguacaucugcagcggcguguucggggacaacccgcggcccaacgacggcaccggcuccugcgggcccgcgagccccaacggcgccuacggggugaagggcuucuccuucaaguacgggaacggcgucuggaucggccgcaccaagagcaccaacucccggagcggguucgagaugaucugggacccgaacggcuggaccgggaccgacagcuccuucagcgugaagcaggacaucguggccaucacggacugguccggcuacagcggguccuucguccagcaccccgagcugaccggccucgacugcauccgccccugcuucuggguggagcugauccggggccgccccaaggagagcaccaucuggaccuccgggagcuccaucagcuucugcggcgucaacuccgacacggugagcugguccuggccggacggggccgagcugcccuucaccaucgacaaguga

SEQ ID NO: 90180 - RNA, 1350 nt, Artificial Sequence
  derived and/or modified CDS sequence (opt1) from neuraminidase__InfluenzaA__BAK23417
augaaccccaaccagaagaucaucaccaucggcagcaucugcauggugaucgggaucgucucccugaugcuccagaucggcaacaugaucagcaucugggugucccacagcauccagaccgggaaccagugccaguccgagccgaucagcaacacgaaguuccugaccgagaaggccguggccuccgucacccuggcgggcaacagcucccucugccccaucagcgggugggccguguacuccaaggacaacagcauccgcaucggcucccggggcgacguguucgucauccgcgagcccuucaucagcugcucccaccuggagugccggaccuucuuccugacgcagggggcccuccugaacgacaagcacagcaacggcaccgugaaggaccgcagcccccaccggacccugauguccugcccggugggggaggcccccucccccuacaacagccgcuucgagagcgucgccugguccgcgagcgccugccacgacggcaucuccuggcucaccaucgggaucagcggccccgacaacggcgccguggccgugcugaaguacaacgggaucaucacggacaccaucaaguccuggcggaacaacauccugcgcacccaggagagcgagugcgcgugcgucaacggcuccugcuucaccgugaugacggacgggccgagcuccggccaggccagcuacaagaucuucaagauggagaagggcaagguggucaaguccguggagcucgacgcccccaacuaccacuacgaggagugcagcugcuaccccgacgccggggagaucacgugcgugugccgggacaacuggcacggcuccaaccgccccugggucagcuucaaccagaaccuggaguaccagaucggguacaucugcuccggcguguucggggacaacccgcggcccaacgacggcaccggcagcugcgggcccgugucccccaacggcgccuacggggucaagggcuucagcuucaaguacgggaacggcguguggaucggccgcaccaaguccaccaacagccggagcggguucgagaugaucugggacccgaacggcuggaccgggaccgacuccagcuucuccgugaagcaggacaucgucgcgaucaccgacuggagcggcuacuccgggagcuucgugcagcaccccgagcugacgggccucgacugcauccgccccugcuucugggucgagcugauccggggccgccccaaggaguccaccaucuggaccagcggguccagcaucuccuucugcggcgugaacggggacaccgugagcugguccuggccggacggcgccgagcugcccuucacgaucgacaaguga

SEQ ID NO: 90181 - RNA, 1350 nt, Artificial Sequence
  derived and/or modified CDS sequence (opt1) from neuraminidase__InfluenzaA__BAK23418
augaaccccaaccagaccaucaucaccaucggcagcaucugcauggugaucgggaucgucucccugaugcuccagaucggcaacaugaucagcaucugggugucccacagcauccagacggggaaccagugccaggccgagccgaucuccaacaccaaguuccugaccgagaaggccguggcgagcgucacccuggccggcaacuccagccucugccccaucuccgggugggccguguacagcaaggacaacuccauccgcaucggcagccggggcgacguguucgucauccgcgagcccuucaucuccugcagccaccuggagugccggacguucuuccugacccagggggcccuccugaacgacaagcacuccaacggcaccgugaaggaccgcagcccccaccggacccugauguccugcccggugggggaggcccccagccccuacaacucccgcuucgagagcgucgcguggagcgccuccgccugccacgacggcacgagcuggcucaccaucgggaucuccggccccgacaacggcgccguggcggugcugaaguacaacgggaucaucaccgacaccaucaagagcuggcggaacaacauccugcgcacgcaggaguccgagugcgccugcgucaacggcagcugcuucaccgugaugaccgacgggccguccagcggccaggccuccuacaagaucuucaagauggagaagggcaagguggucaagagcguggagcucgacgcccccaacuaccacuacgaggagugcuccugcuaccccgacgccggggagaucacgugcgugugccgggacaacuggcacggcagcaaccgccccugggucuccuucaaccagaaccuggaguaccagaucggguacaucugcagcggcguguucggggacaacccgcggcccaacgacggcaccggcuccugcgggcccgugagccccaacggcgcguacggggucaagggcuucuccuucaaguacgggaacggcguguggaucggccgcaccaagagcaccaacucccggagcggguucgagaugaucugggacccgaacggcuggaccgggacggacagcuccuucagcgugaagcaggacaucgucgccaucaccgacugguccggcuacagcggguccuucgugcagcaccccgagcugaccggccucgacugcauccgccccugcuucugggucgagcugauccggggccgccccaaggagagcaccaucuggacguccgggagcuccaucagcuucugcggcgugaacuccgacaccgugagcugguccuggccggacggggccgagcugcccuucaccaucgacaaguga

SEQ ID NO: 90182 - RNA, 1350 nt, Artificial Sequence; identical to SEQ ID NO: 80601
  derived and/or modified CDS sequence (opt1) from neuraminidase__InfluenzaA__BAK23420

SEQ ID NO: 90183 - RNA, 1350 nt, Artificial Sequence; identical to SEQ ID NO: 80601
  derived and/or modified CDS sequence (opt1) from neuraminidase__InfluenzaA__BAK23421

SEQ ID NO: 90184 - RNA, 1350 nt, Artificial Sequence
  derived and/or modified CDS sequence (opt1) from neuraminidase__InfluenzaA__BAK23422
augaaccccaaccagaagaucaucaccaucggcagcgugugcauggucaucgggaucgugucccugaugcuccagaucggcaacaugaucagcaucuggguggggcacuccauccagaccggcaaccagugccacgccgagccgaucagcaacacgaaguuccccaccgagaaggccgcggccuccgucacccuggccgggaacagcucccugugccccaucagcggcugggccguguacuccaaggacaacagcauccgcaucggcucccgcggggacguguucgucauccgggagcccuucaucagcugcucccaccucgagugccggaccuucuuccugacgcagggcgcccugcucaacgacaagcacagcaacgggaccgugaaggaccgcuccccgcaccggacccugaugagcugccccgugggcgaggcgcccucccccuacaacagccgcuucgaguccgucgccuggagcgccagcgccugccacgacgggaccuccuggcugacgaucggcaucagcggcccggacaacggggcgguggccgugcucaaguacaacggcaucaucaccgacaccaucaaguccuggcggaacaacauccugcgcacccaggagagcgagugcgccugcgucaacggguccugcuucacggugaugaccgacggccccagcuccggccaggccagcuacaagaucuucaagauggagaaggggaagguggucaaguccguggagcuggacgcccccaacuaccacuacgaggagugcagcugcuaccccgacgcgggcgagaucacgugcgugugccgggacaacuggcacggguccaaccgcccgugggucagcuucaaccagaaccucgaguaccagaucggcuacaucugcuccgggguguucggcgacaacccccggcccaacgacggcaccgggagcugcggccccguguccccgaacggggccuacggcgucaagggguucagcuucaaguacggcaacggcguguggaucgggcgcaccaaguccaccaacagccgguccggcuucgagaugaucugggaccccaacggguggaccggcaccgacagcagcuucuccgugaagcaggacaucgucgccaucacggacuggagcggguacuccggcagcuucgugcagcaccccgagcugaccggccuggacugcauccgccccugcuucugggucgagcucauccgggggcgcccgaaggaguccaccaucuggaccagcggcuccagcaucuccuucugcggggugaacagcgacacgguguccuggagcuggcccgacggcgccgagcugcccuucaccaucgacaaguga

SEQ ID NO: 90185 - RNA, 1350 nt, Artificial Sequence
  derived and/or modified CDS sequence (opt1) from neuraminidase__InfluenzaA__BAK23423
augaaccccaaccagaagaucaucaccaucggcagcaucugcauggugaucgggaucgucucccugaugcuccagaucggcaacaugaucagcaucugggugucccacagcauccagaccgggaaccagugccaggccgagccgaucuccacgaccaaguuccugaccgagaaggccguggcgagcgucacccuggccggcaacuccagccucugccccaucuccgggugggccguguacagcaaggacaacuccauccgcaucggcccccggggcgacguguucgucauccgcgagcccuucaucagcugcucccaccuggagugccggacguucuuccugacccagggggcccuccugaacgacaagcacagcaacggcaccgugaaggaccgcuccccgcaccggacccugaugagcugccccgugggggaggcccccucccccuacaacagccgcuucgaguccgucgcguggagcgccagcgccugccacgacggcaucuccuggcucacgaucgggaucagcggcccggacaacggcgccguggcggugcugaaguacaacgggaucaucaccgacaccaucaaguccuggcggaacaacauccugcgcacccaggagagcgagugcgccugcgucaacggcuccugcuucacggugaugaccgacgggcccagcuccggccaggccagcuacaagaucuucaagauggagaagggcaagguggucaaguccguggagcucgacgcccccaacuaccacuacgaggagugcagcugcuaccccgacgccggggagaucacgugcgugugccgggacaacuggcacggcuccaaccgcccgugggucagcuucaaccagaaccuggaguaccagaucggguacaucugcuccggcguguucggggacaacccccggcccaacgacggcaccggcagcugcgggcccguguccccgaacggcgcguacggggucaagggcuucagcuucaaguacgggaacggcguguggaucggccgcaccaaguccaccaacagccgguccggguucgagaugaucugggaccccaacggcuggaccgggaccgacagcagcuucuccgugaagcaggacaucgucgccaucacggacuggagcggcuacuccgggagcuucgugcagcaccccgagcugaccggccucgacugcauccgccccugcuucugggucgagcugauccggggccgcccgaaggaguccaccaucuggaccagcggguccagcaucuccuucugcggcgugaacagcgacacgguguccuggagcuggcccgacggggccgagcugcccuucaccaucgacaaguga

SEQ ID NO: 90186 - RNA, 1350 nt, Artificial Sequence
  derived and/or modified CDS sequence (opt1) from neuraminidase__InfluenzaA__BAK23424
augaaccccaaccagaagaucaucaccaucggcagcaucugcauggugaucgggaucgucucccugaugcuccagaucggcaacaugaucagcaucugggugucccacagcauccagaccgggaaccagugccagggcgagccgaucuccaacacgaaguuccugaccgagaaggccguggccagcgucacccuggcggggaacuccagccucugccccaucuccggcugggccguguacagcaaggacaacuccauccgcaucggcagccgcggggacguguucgucauccgggagcccuucaucuccugcagccaccuggagugccggaccuucuuccugacgcagggcgcccuccugaacgacaagcacuccaacgggaccgugaaggaccgcagcccccaccggacccugauguccugcccggugggcgaggcccccagccccuacaacucccgcuucgagagcgucgccuggagcgcguccgccugccacgacgggaccagcuggcucacgaucggcaucuccggccccgacaacggggccguggccgugcugaaguacaacggcaucaucaccgacaccaucaagagcuggcggaacaacauccugcgcacccaggaguccgagugcgcgugcgucaacgggagcugcuucacggugaugaccgacggcccguccagcggccaggccuccuacaagaucuucaagauggagaaggggaagguggucaagagcguggagcucgacgcccccaacuaccacuacgaggagugcuccugcuaccccgacgccggcgagaucacgugcgugugccgggacaacuggcacgggagcaaccgccccugggucuccuucaaccagaaccuggaguaccagaucggcuacaucugcagcgggguguucggcgacaacccgcggcccaacgacggcaccggguccugcggccccguguucagcaacggggccuacggcgucaagggguucuccuucaaguacggcaacggcguguggaucgggcgcaccaagagcaccaacucccggagcggcuucgagaugaucugggaccccaacggguggaccggcaccgacagcuccuucagcgggaagcaggacaucguggcgaucacggacugguccggcuacagcggcuccuucguccagcacccggagcugaccgggcucgacugcauccgccccugcuucuggguggagcugauccggggccgccccaaggagagcaccaucuggaccuccgggagcuccaucagcuucugcggcgucaacuccgacacggugagcugguccuggcccgacggcgccgagcugccguucaccaucgacaaguga

SEQ ID NO: 90187 - RNA, 1350 nt, Artificial Sequence
  derived and/or modified CDS sequence (opt1) from neuraminidase__InfluenzaA__BAK23425
augaaccccaaccagaagaucaucaccaucggcagcaucugcauggugaucgggaucgucucccugaugcuccagaucggcaacaugaucagcaucugggugucccacagcauccagaccgggaaccagugccaggccgagccgaucuccaacacgaaguuccugaccgagaaggccguggcgagcgucacccuggccggcaacuccagccucugccccaucuccgggugggccguguacagcaaggacaacuccauccgcaucggcagccggggcgacguguucgucauccgcgagcccuucaucuccugcagccaccuggagugccggaccuucuuccugacgcagggggcccuccugaacgacaagcacuccaacggcaccgugaaggaccgcagcccccaccggacccugauguccugcccggugggggaggcccccagccccuacaacucccgcuucgagagcgucgcguggagcgccuccgccugccacgacggcaucagcuggcucaccaucgggaucuccggccccgacaacggcgccguggcggugcugaaguacaacgggaucaucacggacaccaucaagagcuggcggaacaacauccugcgcacccaggaguccgagugcgccugcgucaacggcagcugcuucaccgugaugacggacgggccguccagcggccaggccuccuacaagaucuucaagauggagaagggcaagguggucaagagcguggagcucgacgcccccaacuaccacuacgaggagugcuccugcuaccccgacgccggggagaucacgugcgugugccgggacaacuggcacggcagcaaccgccccugggucuccuucaaccagaaccuggaguaccagaucggguacaucugcagcggcguguucggggacaacccgcggcccaacgacggcaccggcuccugcgggcccgugagccccaacggcgcguacggggucaagggcuucuccuucaaguacgggaacggcguguggaucggccgcaccaagagcaccaacucccggagcggguucgagaugaucugggacccgaacggcuggaucgggaccgacagcuccuucagcgugaagcaggacaucgucgccaucaccgacugguccggcuacagcggguccuucgugcagcaccccgagcugaccggccucgacugcauccgccccugcuucugggucgagcugauccggggccgccccaaggagagcacgaucuggaccuccgggagcuccaucagcuucugcggcgugaacuccgacaccgugagcugguccuggccggacggggccgagcugcccuucaccaucgacaaguga

SEQ ID NO: 90188 - RNA, 1350 nt, Artificial Sequence
  derived and/or modified CDS sequence (opt1) from neuraminidase__InfluenzaA__BAK23426
augaaccccaaccagaagaucaucaccaucggcagcaucugcauggugaucgggaucgucucccugaugcuccagaucggcaacaugaucagcaucugggugucccacagcauccagaccgggaaccagugccaggccgagccgaucuccaacacgaaguucuucaccgagaaggccguggcgagcgucacccuggccggcaacuccagccugugccccaucuccgggugggccguguacagcaaggacaacuccauccgcaucggcagccggggcgacguguucaucauccgcgagcccuucaucuccugcagccaccucgagugccggaccuucuuccugacgcagggggcccugcucaacgacaagcacuccaacggcaccgucaaggaccgcagcccccaccggacccugauguccugcccggugggggaggcccccagccccuacaacucccgcuucgagagcguggcguggagcgccuccgccugccacgacggcaccagcuggcugacgaucgggaucuccggccccgacaacggcgccgucgcggugcucaaguacaacgggaucaucaccgacaccaucaagagcuggcggaacaacauccugcgcacccaggaguccgagugcgccugcgugaacggcagcugcuucacggucaugaccgacgggccguccagcggccaggccuccuacaagaucuucaagauggagaagggcaagguggucaagagcguggagcuggacgcccccaacuaccacuacgaggagugcuccugcuaccccgacgccggggagaucacgugcgugugccgggacaacuggcacggcagcaaccgccccuggguguccuucaaccagaaccucgaguaccagaucggguacaucugcagcggcgucuucggggacaacccgcggcccaacgacggcaccggcuccugcgggcccgugagccccaacggcgcguacggggugaagggcuucuccuucaaguacgggaacggcgucuggaucggccgcaccaagagcaccaacucccggagcggguucgagaugaucugggacccgaacggcuggaccgggaccgacagcuccuucagcgugaagcaggacaucguggccaucacggacugguccggcuacagcggguccuucguccagcaccccgagcugaccggccuggacugcauccgccccugcuucuggguggagcucauccggggccgccccaaggagagcaccaucuggaccuccgggagcuccaucagcuucugcggcgucaacuccgacacggugagcugguccuggccggacggggccgagcugcccuucaccaucgacaaguga

SEQ ID NO: 90189 - RNA, 1350 nt, Artificial Sequence; identical to SEQ ID NO: 90187
  derived and/or modified CDS sequence (opt1) from neuraminidase__InfluenzaA__BAK23427

SEQ ID NO: 90190 - RNA, 1350 nt, Artificial Sequence
  derived and/or modified CDS sequence (opt1) from neuraminidase__InfluenzaA__BAK23428
augaaccccaaccagaagaucaucaccaucggcagcaucugcauggugaucgggaucgucucccugaugcuccagaucggcaacaugaucagcaucugggugucccacagcauccagaccgggaaccagugccaggccgagccgaucuccaacacgaaguuccugaccgagaaggccguggcgagcgucacccuggccggcaacuccagccucugccccaucuccgggugggccguguacagcaaggacaacuccauccgcaucggcagccggggcgacguguucgucauccgcgagcccuucaucuccugcagccaccuggagugccggaccuucuuccugacgcagggggcccuccugaacgacaagcacuccaacggcaccgugaaggaccgcagcccccaccggacccugauguccugcccggugggggaggcccccagccccuacaacucccgcuucgagagcgucgcguggagcgccuccgccugccacgacggcaccagcuggcucacgaucgggaucuccggccccgacaacggcgccguggcggugcugaaguacaacgggaucaucaccgacaccaucaagagcuggcggaacaacauccugcgcacccaggaguccgagugcgccugcgucaacggcagcugcuucacggugaugaccgacgggccguccagcggccaggccuccuacaagaucuucaagauggagaagggcaagguggucaagagcguggagcucgacgcccccaacuaccacuacgaggagugcuccugcuaccccgacgccggggagaucacgugcgugugccgggacaacuggcacggcagcaaccgccccugggucuccuucaaccagaaccuggaguaccagaucggguacaucugcagcggcguguucggggacaacccgcggcccaacgacggcaccggcuccugcgggcccgugagccccaacggcgcguacggggucaagggcuucuccuucaaguacgggaacggcguguggaucggccgcaccaagagcaccaacucccggagcggguucgagaugaucugggacccgaacggcuggaccgggaccgacagcuccgugagcgucaagcaggacaucguggccaucacggacugguccggcuacagcggguccuucguccagcaccccgagcugaccggccucgacugcauccgccccugcuuccggguggagcugauccgcggccggcccaaggagagcaccaucuggaccuccgggagcuccaucagcuucugcggcgugaacuccgacacggucagcugguccuggccggacggggccgagcugcccuucaccaucgacaaguga

SEQ ID NO: 90191 - RNA, 1350 nt, Artificial Sequence; identical to SEQ ID NO: 90187
  derived and/or modified CDS sequence (opt1) from neuraminidase__InfluenzaA__BAK23429

SEQ ID NO: 90192 - RNA, 1350 nt, Artificial Sequence
  derived and/or modified CDS sequence (opt1) from neuraminidase__InfluenzaA__BAK23430
augaaccccaaccagaagaucaucaccaucggcagcaucugcauggugaucgggaucgucucccugaugcuccagaucggcaacaugaucagcaucugggugucccacagcauccagaccgggaaccagugccaggccgagccgaucuccaacacgaaguuccugaccgagaaggccguggcgagcgucacccuggccggcaacuccagccucugccccaucuccgggugggccguguacagcaaggacaacuccauccgcaucggcagccggggcgacguguucgucauccgcgagcccuucaucuccugcagccaccuggagugccggaccuucuuccugacgcagggggcccuccugaacgacaagcacuccaacggcaccgugaaggaccgcagcccccaccggacccugauguccugcccggugggggaggcccccagccccuacaacucccgcuucgagagcgucgcguggagcgccuccgccugccacgacggcaucagcuggcucaccaucgggaucuccggccccgacaacggcgccguggcggugcugaaguacaacgggaucaucacggacaccaucaagagcuggcggaacaacauccugcgcacccaggaguccgagugcgccugcgucaacggcagcugcuucaccgugaugacggacgggccguccagcggccaggccuccuacaagaucuucaagauggagaagggcaagguggucaagagcguggagcucgacgcccccaacuaccacuacgaggagugcuccugcuaccccgacgccggggagaucacgugcgugugccgggacaacuggcacggcagcaaccgccccugggucuccuucaaccagaaccuggaguaccagaucggguacaucugcagcggcguguucggggacaacccgcggcccaacgacggcaccggcuccugcgggcccgugagccccaacggcgcguacggggucaagggcuucuccuucaaguacgggaacggcguguggaucggccgcaccaagagcaccaacucccggagcggguucgagaugaucugggacccgaacggcuggaucgggaccgacagcuccuucagcgugaagcaggacaucgucgccaucaccgacugguccggcuacagcggguccuucgugcagcaccccgagcugaccggccucgacugcaugcgccccugcuucugggucgagcugauccggggccgccccaaggagagcacgaucuggaccuccgggagcuccaucagcuucugcggcgugaacuccgacaccgugagcugguccuggccggacggggccgagcugcccuucaccaucgacaaguga

SEQ ID NO: 90193 - RNA, 1350 nt, Artificial Sequence
  derived and/or modified CDS sequence (opt1) from neuraminidase__InfluenzaA__BAK23431
augaaccccaaccagaagaucaucaccaucggcagcaucugcauggugaucgggaucgucucccugaugcuccagaucggcaacaugaucagcaucugggugucccacagcauccagaccgggaaccagugccaggccgagccgaucuccaacacgaaguuccugaccgagaaggccguggcgagcgucacccuggccggcaacuccagccucugccccaucuccgggugggccguguacagcaaggacaacuccauccgcaucggcagccggggcgacguguucgucauccgcgagcccuucaucuccugcagccaccuggagugccggaccuucuuccugacgcagggggcccuccugaacgacaagcacuccaacggcaccgugaaggaccgcagcccccaccggacccugauguccugcccggugggggaggcccccagccccuacaacucccgcuucgagagcgucgcguggagcgccuccgccugccacgacggcaccagcuggcucacgaucgggaucuccggccccgacaacggcgccguggcggugcugaaguacaacgggaucaucaccgacaccaucaagagcuggcggaacaacauccugcgcacccaggaguccgagugcgccugcgucaacggcagcugcuucacggugaugaccgacgggccguccagcggccaggccuccuacaagaucuucaagauggagaagggcaagguggucaagagcguggagcucgacgcccccaacuaccacuacgaggagugcuccugcuaccccgacgccggggagaucacgugcgugugccgggacaacuggcacggcagcaaccgccccugggucuccuucaaccagaaccuggaguaccagaucggguacaucugcagcggcguguucggggacaacccgcggcccaacgacggcaccggcuccugcgggcccgugagccccaacggcgcguacggggucaagggcuucuccuucaaguacgggaacggcguguggaucggccgcaccaagagcaccaacucccggagcggguucgagaugaucuggggcccgaacggguggaccggcaccgacagcuccuucagcgugaagcaggacaucgucgccaucacggacugguccggguacagcggcuccuucgugcagcaccccgagcugaccggccucgacugcauccgccccugcuucugggucgagcugauccgggggcgccccaaggagagcaccaucuggaccuccggcagcuccaucagcuucugcggggugaacuccgacacggugagcugguccuggccggacggcgccgagcugcccuucaccaucgacaaguga

SEQ ID NO: 90194 - RNA, 1350 nt, Artificial Sequence; identical to SEQ ID NO: 90187
  derived and/or modified CDS sequence (opt1) from neuraminidase__InfluenzaA__BAK23432

SEQ ID NO: 90195 - RNA, 1350 nt, Artificial Sequence; identical to SEQ ID NO: 90187
  derived and/or modified CDS sequence (opt1) from neuraminidase__InfluenzaA__BAK23433

SEQ ID NO: 90196 - RNA, 1410 nt, Artificial Sequence
  derived and/or modified CDS sequence (opt1) from neuraminidase__InfluenzaA__BAM65748
augaaccccaaccagaagaucaucaccaucggcagcgugucccugaccaucagcacgaucugcuucuucaugcagaucgccauccucaucaccaccgucacccugcacuucaagcaguacgaguucaacuccccgcccaacaaccaggugaugcugugcgagcccacgaucaucgagcgcaacaucaccgagaucguguaccucaccaacaccacgaucgagaaggagaucugccccaagcuggccgaguaccggaacuggagcaagccgcagugcgacaucaccggguucgcgcccuucuccaaggacaacagcauccgccuguccgccggcggggacaucugggucacccgggagcccuacgugagcugcgaccccgacaagugcuuccaguucgcccucggccaggggaccacgcugaacaacgugcacuccaacgacaccguccacgaccgcaccccguaccggacccugcucaugaacgagcugggcgugcccuuccaccugggcacgaagcaggucugcaucgccuggagcuccagcuccugccacgacgggaaggccuggcuccacgugugcgugaccggcgacgacaagaacgcgaccgccagcuucaucuacaacgggcgccugguggacuccaucgucagcugguccaagaagauccugcggacccaggagagcgagugcgugugcaucaacggcacgugcaccguggucaugaccgacggguccgccagcggcaaggccgacaccaagauccucuucaucgaggagggcaagaucgugcacacgagcacccuguccgggagcgcgcagcacguggaggagugcuccugcuacccccgcuaccccggcguccggugcgugugccgcgacaacuggaaggggagcaaccggccgaucguggacaucaacaucaaggacuacuccaucgucagcuccuacgugugcagcggccuggugggcgacacgccccgcaagaccgacuccagcuccagcucccacugccucgaccccaacaacgaggagggcgggcacggggucaagggcugggccuucgacgacgggaacgacguguggaugggccggaccaucagcgagaagucccgccugggcuacgagaccuucaaggucaucgggggcuggagcaaccccaacuccaagagccagaucaaccgccaggugaucguggacauggggaaccgguccggcuacagcgggaucuucagcgucgagggcaaguccugcaucaaccggugcuucuacguggagcugauccgcggccggaaggacgagaccgaggugcucuggaccagcaacuccaucgucguguucugcgggacgagcggcaccuacgggaccggcuccuggccggacggggccgacaucaagcugaugagcaucuga

SEQ ID NO: 90197 - RNA, 1350 nt, Artificial Sequence
  derived and/or modified CDS sequence (opt1) from neuraminidase__InfluenzaA__BAM85817
augaaccccaaccagaagaucaucaccaucggcagcaucugcauggugaccgggaucgucucccugaugcuccagaucggcaacaugaucagcaucugggugucccacagcauccacacggggaaccagcaccaguccgagccgaucagcaacaccaacuuccugaccgagaaggccguggccuccgucaagcuggcgggcaacagcucccucugccccaucaacgggugggccguguacagcaaggacaacuccauccgcaucggcagcaagggcgacguguucgucauccgggagcccuucaucuccugcagccaccuggagugccgcaccuucuuccugacgcagggggcccuccugaacgacaagcacuccaacggcaccgugaaggaccggagcccccaccgcacccugauguccugcccggugggggaggcccccagccccuacaacucccgguucgagagcgucgccuggagcgcguccgccugccacgacggcaccagcuggcucacgaucgggaucuccggccccgacaacggcgccguggccgugcugaaguacaacgggaucaucaccgacaccaucaagagcuggcgcaacaacauccugcggacccaggaguccgagugcgcgugcgucaacggcagcugcuucacggugaugaccgacgggccguccaacggccaggccagccacaagaucuucaagauggagaagggcaagguggucaaguccguggagcucgacgcccccaacuaccacuacgaggagugcagcugcuaccccaacgccggggagaucacgugcgugugccgcgacaacuggcacggcuccaaccggcccugggucagcuucaaccagaaccuggaguaccagaucggguacaucugcuccggcguguucggggacaacccgcgccccaacgacggcaccggcagcugcgggcccguguccagcaacggcgccuacggggucaagggcuucuccuucaaguacgggaacggcguguggaucggccggaccaagagcaccaacucccgcagcggguucgagaugaucugggaccccaacggcuggaccgagaccgacagcuccuucagcgugaagcaggacaucgucgcgaucacggacugguccggguacagcggcuccuucgugcagcacccggagcugaccgggcucgacugcauccggcccugcuucugggucgagcugauccgcggccggcccaaggagagcaccaucuggaccuccggcagcuccaucagcuucugcggggugaacuccgacacggugggcuggagcuggcccgacggggccgagcugccguucaccaucgacaaguga

SEQ ID NO: 90198 - RNA, 1350 nt, Artificial Sequence
  derived and/or modified CDS sequence (opt1) from neuraminidase__InfluenzaA__BAM85818
augaaccccaaccagaagaucaucaccaucggcagcaucugcauggugaucgggaucgucucccugaugcuccagaucggcaacaugaucagcaucugggugucccacagcauccagaccgggaaccagcaccaggccgagccgauccgcaacacgaacuuccugaccgagaacgccguggcguccgucacccuggccggcaacagcucccucugccccauccgggggugggccgugcacagcaaggacaacuccauccgcaucggcagcaagggcgacguguucgucauccgggagcccuucaucuccugcagccaccuggagugccgcaccuucuuccugacgcagggggcccuccugaacgacaagcacuccaacggcaccgugaaggaccggagcccccaccgcacccugauguccugcccggugggggaggcccccagccccuacaacucccgguucgagagcgucgcgugguccgccagcgccugccacgacggcaccagcuggcucacgaucgggaucuccggccccgacaacggcgccguggcggugcugaaguacaacgggaucaucaccgacaccaucaagagcuggcgcaacaacauccugcggacccaggaguccgagugcgccugcgucaacggcagcugcuucacggugaugaccgacgggccguccaacggccaggccagcuacaagaucuucaagauggagaagggcaagguggucaaguccguggagcucaacgcccccaacuaccacuacgaggagugcagcugcuaccccgacgccggggagaucaucugcgugugccgcgacaacuggcacggcuccaaccggcccugggucagcuucaaccagaaccuggaguaccagaucggguacaucugcuccggcguguucggggacaacccgcgccccaacgacggcaccggcagcugcgggcccgugucccccaacggcgcguacgggaucaagggcuucagcuucaaguacgggaacggcgucuggaucggccggaccaaguccacgaacagccgcuccggguucgagaugaucugggacccgaacggcuggaccgggaccgacagcaacuucuccgugaagcaggacaucguggccaucaccgacuggagcggcuacagcggguccuucguccagcaccccgagcugacgggccucgacugcauccggcccugcuucuggguggagcugauccgcggccggcccaaggagagcaccaucuggaccuccgggagcuccaucagcuucugcggcgucaacuccgacaccgugagcugguccuggccggacggggccgagcugcccuucacgaucgacaaguga

SEQ ID NO: 90199 - RNA, 1350 nt, Artificial Sequence
  derived and/or modified CDS sequence (opt1) from neuraminidase__InfluenzaA__BAM85819
augaaccccaaccagaagaucaucaccaucggcagcaucugcauggugaucgggaucgucucccugaugcuccagaucggcaacaugaucagcaucugggugucccacagcauccagaccgggaaccagaaccagguggagccgaucaucaacacgaacuuccugaccgagaaggccgucgccuccaucacccuggcgggcaacagcucccucugccccauccgcgggugggccauccacagcaaggacaacuccauccggaucggcagcaagggcgacguguucgugauccgcgagcccuucaucuccugcagccaccuggagugccggaccuucuuccugacgcagggggcccuccugaacgacaagcacuccaacggcaccgucaaggaccgcagcccccaccggacccugauguccugcccggugggggaggcccccagccccuacaacucccgcuucgagagcguggccugguccgcgagcgccugccacgacggcaccagcuggcucacgaucgggaucuccggccccgacaacggcgccgucgccgugcugaaguacaacgggaucaucaccgacaccaucaagagcuggcggaacaacauccugcgcacccaggaguccgagugcgcgugcgugaacggcagcugcuucacggucaugaccgacgggccguccgacggccaggccagcuacaagaucuucaagauggagaagggcaaggugaucaaguccguggagcucgacgcccccaacuaccacuacgaggagugcagcugcuaccccgacgccggggagaucacgugcgucugccgggacaacuggcacggcuccaaccgccccugggugagcuucaaccagaaccuggaguaccagaucggguacaucugcuccggcguguucggggacaacccgcggcccaacgacggcaccggcagcugcgggcccgucucccacaacggcgccuacggggugaagggcuucagcuucaaguacgggaacggcguguggaucggccgcaccaagucccccaacagccgguccggguucgagaugaucugggacccgaacggcuggagcgagaccgacuccagcuucagcgucaagcaggacaucguggcgaucaccgacugguccggguacagcggcuccuucgugcagcaccccgagcugaccgggcucgacugcauccgccccugcuucugggucgagcugauccggggccgccccaaggagagcacgguguggaccuccggcagcuccaucagcuucugcggggucuccagcgacaccguguccuggagcuggccggacggcgccgagcugcccuucaccaucgacaaguga

SEQ ID NO: 90200 - RNA, 1350 nt, Artificial Sequence
  derived and/or modified CDS sequence (opt1) from neuraminidase__InfluenzaA__BAM85820
augaaccccaaccagaagaucaucaccaucggcagcaucugcauggugaucgggaucgucucccugaugcuccagaucggcaacaugaucagcaucugggugucccacagcauccagaccgggaaccagcaccaggccgagccgaucuccaacacgaacuuccugaccgagaaggccguggcgagcgucacccuggccggcaacuccagccucugccccauccgcgggugggccgugcacuccaaggacaacagcauccggaucggcuccaagggcgacguguucgucauccgcgagcccuucaucagcugcucccaccuggagugccggaccuucuuccugacgcagggggcccuccugaacgacaagcacagcaacggcaccgugaaggaccgcagcccccaccggacccugauguccugcccggugggggaggcccccucccccuacaacagccgcuucgaguccgucgcguggagcgccagcgccugccacgacggcaccuccuggcucacgaucgggaucagcggccccgacaacggcgccguggcggugcugaaguacaacgggaucaucaccgacaccaucaaguccuggcggaacaacauccugcgcacccaggagagcgagugcgccugcgucaacggcuccugcuucacggugaugaccgacgggccgagcaacggccaggccuccuacaagaucuucaagauggagaagggcaagguggucaagagcguggagcucgacgcccccaacuaccacuacgaggagugcuccugcuaccccgacgccggggagaucacgugcgugugccgggacaacuggcacggcagcaaccgccccugggucuccuucaaccagaaccuggaguaccagaucggguacaucugcagcggcguguucggggacaacccgcggcccaacgacggcaccggcuccugcgggcccgugagccccaacggcgcguacggggucaagggcuucuccuucaaguacgggaacggcguguggaucggccgcaccaagagcaccaacucccggagcggguucgagaugaucugggacccgaacggcuggaccgggaccgacuccagcuucagcgugaagcaggacaucgucgccaucacggacugguccggcuacagcggguccuucgugcagcaccccgagcugaccggccucgacugcauccgccccugcuucugggucgagcugauccggggccgccccaaggagagcaccaucuggaccuccgggagcuccaucagcuucugcggcgugaacuccgacacggugagcugguccuggccggacggggccgagcugcccuucaccaucgacaaguga

SEQ ID NO: 90201 - RNA, 1350 nt, Artificial Sequence; identical to SEQ ID NO: 79032
  derived and/or modified CDS sequence (opt1) from neuraminidase__InfluenzaA__BAM85821

SEQ ID NO: 90202 - RNA, 1350 nt, Artificial Sequence
  derived and/or modified CDS sequence (opt1) from neuraminidase__InfluenzaA__BAM85822
augaaccccaaccagaagaucaucaccaucggcagcaucugcauggugaccgggaucgucucccugaugcuccagaucggcaacaugaucagcaucugggugucccacagcauccacacggggaaccagcaccaguccgagccgaucagcaacaccaacuuccugaccgagaaggccguggccuccgucaagcuggcgggcaacagcucccucugccccaucaacgggugggccguguacagcaaggacaacuccauccgcaucggcagcaagggcgacguguucgucauccgggagcccuucaucuccugcagccaccuggagugccgcaccuucuuccugacgcagggggcccuccugaacgacaagcacuccaacggcaccgugaaggaccggagcccccaccgcacccugauguccugcccggugggggaggcccccagccccuacaacucccgguucgagagcgucgccuggagcgcguccgccugccacgacggcaccagcuggcucacgaucgggaucuccggccccgacaacggcgccguggccguggucaaguacaacgggaucaucaccgacaccaucaagagcuggcgcaacaacauccugcggacccaggaguccgagugcgcgugcgugaacggcagcugcuucacggugaugaccgacgggccguccaacagccaggccucccacaagaucuucaagauggagaagggcaaggucgucaagagcguggagcuggacgcccccaacuaccacuacgaggagugcuccugcuaccccgacgccggcgagaucacgugcgugugccgcgacaacuggcacgggagcaaccggcccuggguguccuucaaccagaaccucgaguaccagaucggcuacaucugcagcgggguguucggcgacaacccgcgccccaacgacgggaccggcuccugcggccccgucagcuccaacggggccuacggcgugaagggguucagcuucaaguacggcaacgggguguggaucggccggaccaaguccaccaacagccgcagcggcuucgagaugaucugggaccccaacggguggaccgagaccgacuccagcuucuccgucaagcaggacaucguggcgaucacggacuggagcggcuacuccgggagcuucguccagcacccggagcugaccggccuggacugcauccggcccugcuucuggguggagcucauccgcgggcggcccaaggaguccaccaucuggaccagcggcuccagcaucuccuucugcggcgugaacagcgacacggucgggugguccuggcccgacggcgccgagcugccguucaccaucgacaaguga

SEQ ID NO: 90203 - RNA, 1410 nt, Artificial Sequence
  derived and/or modified CDS sequence (opt1) from neuraminidase__InfluenzaA__BAM85823
augaaccccaaccagaagaucaccaccaucggcagcaucugcauggugaucgggaucgucucccugaugcuccagaucggcaacaucaucagcaucugggugucccacagcauccagacggggaaccagcaccaggccggcccgugcaaccaguccaucaucaccuacgagaacaacaccugggugaaccagaccuacgucaacaucagcaacacgaacuuccugaccgagaagaccguggccuccgugacccuggcggggaacagcucccucugccccaucagcggcugggccgucuacuccaaggacaacggcauccgcaucgggagcaagggcgacguguucgugauccgggagcccuucaucuccugcagccaccuggagugccgcacguucuuccugacccagggggcccuccugaacgacaagcacuccaacggcaccgucaaggaccggagcccccaccgcacccugauguccugcccggugggggaggcccccagccccuacaacucccgguucgagagcguggccuggagcgcguccgccugccacgacggcaucaacuggcucacgaucggcaucagcgggcccgacaacggcgccgucgccgugcugaaguacaacgggaucaucaccgacaccaucaaguccuggcgcaacaacauccugcggacccaggagagcgagugcgcgugcgugaacggcuccugcuucacgaucaugaccgacggcccgagcaacgggcaggccuccuacaagaucuuccgcaucgagaagggcaaggucgucaagagcguggagcucaacgcccccaacuaccacuacgaggagugcuccugcuaccccgacgccggggagaucacgugcgugugccgggacaacuggcacggcagcaaccgccccuggguguccuucaaccagaaccuggaguaccagaucggguacaucugcagcggcaucuucggcgacaacccgcggcccaacgacgggaccggcuccugcgggcccgugagccccaacggcgccuacgggaucaagggcuucuccuucaaguacggcaacggggucuggaucggccgcaccaagagcaccaacucccggagcggguucgagaugaucugggacccgaacggcuggaccgggaccgacuccaacuucagcgugaagcaggacaucguggcgaucacggacuggagcggcuacuccggcagcuucguccagcaccccgagcugaccgggcucgacugcauccgccccugcuucuggguggagcugauccggggccgccccaaggaguccaccaucuggaccagcggguccagcaucuccuucugcggcgucaacagcgacacggugggcugguccuggccggacggggccgagcugcccuucaccaucgacaaguga

SEQ ID NO: 90204 - RNA, 1350 nt, Artificial Sequence
  derived and/or modified CDS sequence (opt1) from neuraminidase__InfluenzaA__BAM85824
augaaccccaaccagaagaucaucaccaucggcagcaucugcauggugaucgggaucgucucccugcuccugcagaucggcaacaugaucagcaucuggaucucccacagcauccagaccgggaaccagcaccaggccgaguccaucagcaacacgaacccgcugaccgagaaggccguggcguccgugacccucgccggcaacagcucccugugccccauccgcgggugggccguccacagcaaggacaacuccauccggaucggcagcaagggcgacguguucgugauccgcgagcccuucaucuccugcagccaccuggagugccggaccuucuuccucacgcagggggcccugcugaacgacaagcacuccaacggcaccgucaaggaccgcagcccccaccggacccucauguccugcccggugggggaggcccccagccccuacaacucccgcuucgagagcguggcguggagcgccuccgccugccacgacggcaccagcuggcugacgaucgggaucuccggccccgacaacggcgccgucgcggugcugaaguacaacgggaucaucaccgacaccaucaagagcuggcggaacaacauccuccgcacccaggaguccgagugcgccugcgugaacggcagcugcuucacggucaugaccgacgggccguccaacggccaggccagcuacaagaucuucaagauggagaagggcaagguggugaaguccgucgagcuggacgcccccaacuaccacuacgaggagugcagcugcuaccccgacgccuccgagaucacgugcgugugccgggacaacuggcacgggagcaaccgccccuggguguccuucaaccagaaccuggaguaccagaucggcuacaucugcagcggggucuucggcgacaacccgcggcccaacgacgggaccggcuccugcggccccauguuccccaacggggcguacggcaucaagggguucagcuucaaguacggcaacgggguguggaucggccgcaccaaguccaccaacagccgguccggcuucgagaugaucugggacccgaacggguggaccggcaccgacagcagcuucuccgugaagcaggacaucgucgccaucacggacuggagcggguacuccggcagcuucgugcagcaccccgagcucaccgggcuggacugcauccgccccugcuucuggguggagcugauccggggccgccccaaggaguccaccaucuggaccagcggcuccagcaucuccuucugcggggucaacagcgacacgguguccuggagcuggccggacggcgccgagcuccccuucaccaucgacaaguga

SEQ ID NO: 90205 - RNA, 1350 nt, Artificial Sequence
  derived and/or modified CDS sequence (opt1) from neuraminidase__InfluenzaA__BAM85825
augaaccccaaccagaagaucaucaccaucggcagcaucugcauggugaucgggaucgucucccugaugcuccagaucggcaacaugaucagcaucugggugucccacagcauccagaccgggaaccagaaccagguggagccgaucaucaacacgaacuuccugaccgagaaggccgucgccuccaucacccuggcgggcaacagcucccucugccccauccgcgggugggccauccacagcaaggacaacuccauccggaucggcagcaagggcgacguguucgugauccgcgagcccuucaucuccugcagccaccuggagugccggaccuucuuccugacgcagggggcccuccugaacgacaagcacuccaacggcaccgucaaggaccgcagcccccaccggacccugauguccugcccggugggggaggcccccagccccuacaacucccgcuucgagagcguggccugguccgcgagcgccugccacgacggcaccagcuggcucacgaucgggaucuccggccccgacaacggcgccgucgccgugcugaaguacaacgggaucaucaccgacaccaucaagagcuggcggaacaacauccugcgcacccaggaguccgagugcgcgugcgugaacggcagcugcuucacggucaugaccgacgggccguccaacggccaggccagcuacaagaucuucaagauggagaagggcaaggugaucaaguccguggagcucgacgcccccaacuaccacuacgaggagugcagcugcuaccccgacgccggggagaucacgugcgucugccgggacaacuggcacggcuccaaccgccccugggugagcuucaaccagaaccuggaguaccagaucggguacaucugcuccggcguguucggggacaacccgcggcccaacgacggcaccggcagcugcgggcccgucucccacaacggcgccuacggggugaagggcuucagcuucaaguacgggaacggcguguggaucggccgcaccaagucccccaacagccgguccggguucgagaugaucugggacccgaacggcuggagcgagaccgacuccagcuucagcgucaagcaggacaucguggcgaucaccgacugguccggguacagcggcuccuucgugcagcaccccgagcugaccgggcucgacugcauccgccccugcuucugggucgagcugauccggggccgccccaaggagagcacgguguggaccuccggcagcuccaucagcuucugcggggucaacuccgacaccgugagcugguccuggccggacggcgccgagcugcccuucaccaucgacaaguga

SEQ ID NO: 90206 - RNA, 1350 nt, Artificial Sequence
  derived and/or modified CDS sequence (opt1) from neuraminidase__InfluenzaA__BAM85826
augaaccccaaccagaagaucaucaccaucggcagcaucugcauggugaucgggaucgucucccugaugcuccagaucggcaacaugaucagcaucugggugucccacagcauccagaccgggaaccagcgccaggccgagccgaucuccaacacgaaguuccugaccgagaaggccguggcgagcgucacccuggccggcaacuccagccucugccccaucuccgggugggccguguacagcaaggacaacuccauccggaucggcagccgcggcgacguguucgucauccgggagcccuucaucuccugcagccaccuggagugccgcaccuucuuccugacgcagggggcccuccugaacgacaagcacuccaacggcaccgugaaggaccggagcccccaccgcacccugauguccugcccggugggggaggcccccagccccuacaacucccgguucgagagcgucgcguggagcgccuccgccugccacgacggcaccagcuggcucacgaucgggaucuccggccccgacaacggcgccguggcggugcugaaguacaacgggaucaucaccgacaccaucaagagcuggcgcaacaacauccugcggacccaggaguccgagugcgccugcgucaacggcagcugcuucacggugaugaccgacgggccguccaacggccaggccagcuacaagaucuucaagauggagaagggcaagguggucaaguccguggagcucgacgcccccaacuaccacuacgaggagugcagcugcuaccccgacgccggggagaucacgugcgugugccgcgacaacuggcacggcuccaaccggcccugggucagcuucaaccagaaccuggaguaccagaucggguacaucugcuccggcguguucggggacaacccgcgccccaacgacggcaccggcagcugcgggcccgugucccugaacggcgcguacggggucaagggcuucagcuucaaguacgggaacggcguguggaucggccggaccaaguccaccaacagccgcuccggguucgagaugaucugggaccccaacggcuggaccgggaccgacagcagcuucuccgugaagcaggacaucgucgccaucacggacuggagcggcuacuccgggagcuucgugcagcacccggagcucaccggccuggacugcauccggcccugcuucugggucgagcugauccgcggccggcccaaggaguccaccaucuggaccagcggguccagcaucuccuucugcggcgugaacagcgacacgguguccuggagcuggcccgacggggccgagcucccguucaccaucgacaaguga

SEQ ID NO: 90207 - RNA, 1350 nt, Artificial Sequence
  derived and/or modified CDS sequence (opt1) from neuraminidase__InfluenzaA__BAM85827
augaaccccaaccagaagaucaucaccaucggcagcaucugcauggugaucggggucgugucccugaugcuccagaccggcaacaucaucagcaucugggugucccacagcauccagaaggggaaccagcaccaggccgaguccaucagcaacacgaacccgcugaccgagaaggccgucgcguccgugacccuggccggcaacagcucccucugccccauccgcgggugggccgugcacagcaaggacaacaacauccggaucggcuccaagggcgacgucuucgugauccgcgagcccuucaucagcugcucccaccuggagugccggaccuucuuccugacgcagggggcccuccugaacgacaagcacagcaacggcaccgugaaggaccgcagcccccaccggacccugaugagcugcccggucggggaggcccccucccccuacaacagccgcuucgaguccguggcguggagcgccagcgccugccacgacggcaccuccuggcucacgaucgggaucagcggccccgacaacgaggccguggcgguccugaaguacaacggcaucaucaccgacaccaucaaguccuggcggaacaacauccugcgcacccaggagagcgagugcgccugcgugaacggguccugcuucacggugaugaccgacggcccgagcaacgggcaggccuccuacaagaucuucaagauggagaagggcaaggucgugaaguccguggagcucgacgcccccaacuaccacuacgaggagugcuccugcuaccccgacgccggcgagaucacgugcgucugccgggacaacuggcacgggagcaaccgccccuggguguccuucaaccagaaccuggaguaccagaucggcuacaucugcagcgggguguucggcgacaacccgcggcccaacgacgggaccggcuccugcggccccaugagccccaacggggcguacggcgucaagggguucuccuucaaguacggcaacgggguguggaucggccgcaccaagagcaccaccucccggagcggcuucgagaugaucugggacccgaacggguggaccggcacggacuccagcuucagcgugaagcaggacaucgucgccaucaccgacugguccggguacagcggcuccuucgugcagcaccccgagcugaccgggcucgacugcauccgccccugcuucugggucgagcugauccggggccgccccaaggagagcaccaucuggacguccggcagcuccaucagcuucugcgggguggacuccgacaccgugagcugguccuggccggacggcgccgagcugcccuucaccaucgacaaguga

SEQ ID NO: 90208 - RNA, 1350 nt, Artificial Sequence
  derived and/or modified CDS sequence (opt1) from neuraminidase__InfluenzaA__BAM85828
augaaccccaaccagaagaucaucaccaucggcagcaucugcauggugaucgggaucgucucccugaugcuccagaucggcaacaugaucagcaucugggugucccacagcauccagaccgggaaccagcgccaggccgagccgaucuccaacacgaaguuccugaccgagaaggccguggcgagcgucacccuggccggcaacuccagccucugccccaucuccgggugggccguguacagcaaggacaacuccauccggaucggcagccgcggcgacguguucgucauccgggagcccuucaucuccugcagccaccuggagugccgcaccuucuuccugacgcagggggcccuccugaacgacaagcacuccaacggcaccgugaaggaccggagcccccaccgcacccugauguccugcccggugggggaggcccccagccccuacaacucccgguucgagagcgucgcguggagcgccuccgccugccacgacggcaccagcuggcucacgaucgggaucuccggccccgacaacggcgccguggcggugcugaaguacaacgggaucaucaccgacaccaucaagagcuggcgcaacaacauccugcggacccaggaguccgagugcgccugcgucaacggcagcugcuucacggugaugaccgacgggccguccaacggccaggccagcuacaagaucuucaagauggagaagggcaagguggucaaguccguggagcucgacgcccccaacuaccacuacgaggagugcagcugcuaccccgacgccggggagaucacgugcgugugccgcgacaacuggcacggcuccaaccggcccugggucagcuucaaccagaaccuggaguaccagaucggguacaucugcuccggcguguucggggacaacccgcgccccaacgacggcaccggcagcugcgggcccgugucccccaacggcgcguacggggucaagggcuucagcuucaaguacgggaacggcguguggaucggccggaccaaguccaccaacagccgcuccggguucgagaugaucugggacccgaacggcuggaccgggaccgacagcagcuucuccgugaagcaggacaucgucgccaucacggacuggagcggcuacuccgggagcuucgugcagcaccccgagcugaccggccucgacugcauccggcccugcuucugggucgagcugauccgcggccggcccaaggaguccaccaucuggaccagcggguccagcaucuccuucugcggcgugaacagcgacacgguguccuggagcuggccggacggggccgagcugcccuucaccaucgacaaguga

SEQ ID NO: 90209 - RNA, 1350 nt, Artificial Sequence
  derived and/or modified CDS sequence (opt1) from neuraminidase__InfluenzaA__BAM85829
augaaccccaaccagaagaucaucaccaucggcagcaucugcaugaucaucgggaucgugucccugaugcuccagaucggcaacaucaucagcaucugggucucccacagcauccagaccgggaaccagcaccaggccgagccgaucuccgacacgaacuuccugaccgagaaggccguggcgagcgugauccuggccggcaacuccagccucugccacaucuccgggugggccguccacagcaaggacaacuccauccgcaucggcagcaagggcgacguguucgugauccgggagcccuucaucuccugcagccaccuggagugccgcaccuucuuccugacccagggggcccuccugaacgacaagcacuccaacggcacggucaaggaccggagcccccaccgcacccugauguccugccccgugggggaggccccgagccccuacaacucccgguucgagagcguggcguggagcgccuccgccugccacgacggcaccagcuggcucaccaucgggaucuccggccccgacaacggcgccgucgcggugcugaaguacaacgggaucaucacggacaccaucaagagcuggcgcaacuacauccugcggacccaggaguccgagugcgccugcgugaacggcagcugcuucaccgucaugacggacgggcccuccaacggccaggccagcuacaagaucuucaagaucgagaagggcaagguggugaaguccgucgagcucgacgccccgaacuaccacuacgaggagugcagcugcuaccccgacgccggggagaucacgugcgugugccgcgacaacuggcacggcuccaaccggcccugggugagcuucaaccagaaccuggaguaccagaucggguacaucugcuccggcgucuucggggacacgccccgcccgaacgacggcaccggcagcugcgggcccgugucccccaacggcgcguacggggugaagggcuucagcuucaaguacgggaacggcgucuggaucggccggaccaaguccaccaacagccgcuccggguucgagaugaucugggaccccaacggcuggaccgggaccgacagcagcuucuccgugaagcaggaccugguggccaucaccgacuggagcggcuacuccgggagcuucguccagcacccggagcucaccggccuggacugcauccggcccugcuucuggguggagcugauccgcggccggcccaaggaguccaccaucuggaccagcggguccagcaucuccuucugcggcgucaacagcgacacgguggggugguccuggcccgacggcgccgagcucccguucaccaucgacaaguga

SEQ ID NO: 90210 - RNA, 1413 nt, Artificial Sequence
  derived and/or modified CDS sequence (opt1) from neuraminidase__InfluenzaA__BAM85830
augaaccccaaccagaagaucaucaccaucggcagcaucugcauggccaucgggaccaucucccugauccuccagaucggcaacaucaucagcaucuggaucucccacagcauccagacggggucccagaaccacaccggcaucugcaaccagcgcaucaucaccuacgagaacaacaccugggugaaccagacguacgucaacaucagcaacaccaacgugguggccgggaaggacaccaccuccaugauccuggcgggcaacagcucccugugcccgauccggggcugggccaucuacagcaaggacaacuccauccgcaucgggagcaagggcgacgucuucgugauccgggagcccuucaucuccugcagccaccucgagugccgcacguucuuccugacccagggggcccugcucaacgacaagcacuccaacggcaccgugaaggaccggagccccuaccgcgcccugauguccugccccaucggggaggccccgagccccuacaacucccgguucgagagcgucgcguggagcgccuccgccugccacgacggcaugggcuggcugaccaucgggaucagcggccccgacgacggggccguggcggugcucaaguacaacggcaucaucacggagaucaucaaguccuggcgcaagcagauccugcggacccaggagagcgagugcgucugcgugaacggcuccugcuucaccaucaugaccgacgggcccagcaacggcccggccuccuaccgcaucuucaagaucaagaaggggaagaucaccaagagcaucgagcuggacgcccccaacucccacuacgaggagugcagcugcuaccccgacacgggcaaggugaugugcgucugccgggacaacuggcacggguccaaccgccccugggugagcuucaaccagaaccucgacuaccagaucggcuacaucugcuccggcguguucggggacaacccgcggcccaaggacggcaaggggagcugcgaccccgucaacguggacggcgccgacggggugaagggcuucuccuaccgcuacggcaacggggucuggaucggccggaccaagagcaacuccagccgcaagggguucgagaugaucugggaccccaacggcuggaccgacacggacgggaacuuccuggugaagcaggacguggucgccaugaccgacugguccggcuacagcggcagcuucgugcagcacccggagcugaccgggcucgacugcaugcggcccugcuucuggguggagcugauccgcggccagccccgggagaagaccacgaucuggaccuccgggagcuccaucagcuucugcggcgucaacuccgacaccgugaacuggagcuggcccgacggcgcggagcugccguucaccaucgacaaguga

SEQ ID NO: 90211 - RNA, 1413 nt, Artificial Sequence
  derived and/or modified CDS sequence (opt1) from neuraminidase__InfluenzaA__BAM85831
augaaccccaaccagaagaucaucaccaucggcagcaucuccaucgccaucgggaucaucagccugaugcuccagaucggcaacaucaucuccaucugggccagccacuccauccagaccgggagccagaaccacacgggcgugugcaaccagcgcaucaucaccuacgagaacuccaccugggucaaccacaccuacgugaacaucaacaacacgaacgugaucgcggggaaggacaagaccagcgucacccuggccggcaacuccagccugugcuccaucagcggcugggccaucuacaccaaggacaacuccauccggaucgggagcaagggcgacguguucgugauccgcgagccguucaucuccugcagccaccucgagugccggacguucuuccugacccagggggcccugcucaacgacaagcacuccaacggcaccgucaaggaccgcagccccuaccgggcccugauguccugcccccugggggaggcgcccagcccguacaacagcaaguucgaguccguggccuggagcgccuccgccugccacgacggcaucggcuggcucaccaucgggaucagcggccccgacaacggggcgguggccguccugaaguacaacggcaucaucacggagaccaucaaguccuggaagaagcagauccugcgcacccaggagagcgagugcgugugcgugaacggcuccugcuucaccaucaugacggacgggcccagcaacggcgccgccuccuacaagaucuucaagaucgagaaggggaaggucaccaagagcaucgagcucaacgcccccaacuuccacuacgaggagugcuccugcuacccggacaccggcaccgugaugugcgugugccgggacaacuggcacgggagcaaccgccccugggucuccuucaaccagaaccuggacuaccagaucggcuacaucugcagcggcguguucggggacaacccccggccccgcgacggcgagggguccugcaacccggugacggcggacggcgccaacggggucaagggcuucagcuacaaguacggcaacgggguguggaucggccggaccaaguccaaccgccugcggaagggguucgagaugaucugggaccccaacggcuggaccgacaccgacagcgacuucuccgugaagcaggacgucguggccaucacggacuggagcggguacagcggcuccuucgugcagcaccccgagcucaccggccuggggugcauccgccccugcuucugggucgagcuggugcggggccucccgcgcgagaacaccaccaucuggacgagcggguccagcaucuccuucugcggcgucaacagcgacaccgccaacugguccuggcccgacggcgccgagcugcccuucaccaucgacaaguga

SEQ ID NO: 90212 - RNA, 1413 nt, Artificial Sequence; identical to SEQ ID NO: 85532
  derived and/or modified CDS sequence (opt1) from neuraminidase__InfluenzaA__BAM85832

SEQ ID NO: 90213 - RNA, 1410 nt, Artificial Sequence
  derived and/or modified CDS sequence (opt1) from neuraminidase__InfluenzaA__BAM85833
augaaccccaaccagaagaucaucaccaucggcagcacgugcauggugaucgggaucaucucccugauccuccagaucggcaacaucaucagcaucugggucucccacagcauccagaccgggaaccagaaccagccggagaccugcaaccaguccgugaucaccuacgagaacaagaccugggugaaccagacguacgucaacaucagcaacaccaaccuggugaucgagcgcgacgugaucuccgucgcccugcucggcaacagcucccugugccccaucagcgggugggccaucuacuccaaggacaacggcauccggaucggcagcaagggggacguguucgugauccgcgagcccuucaucuccugcagccaccuggagugccggaccuucuuccucacccagggcgcgcugcugaacgacaagcacuccaacgggacggucaaggaccgcagccccuaccggacccucauguccugcccggugggcgaggcccccagccccuacaacucccgcuucgagagcguggccuggagcgccuccgccugccacgacgggaucagcuggcugaccgucggcaucuccggccccgacaacggggcgguggccgugcugaaguacaacggcaucaucaccgacacggucaagagcuggcggaacaacauccuccgcacccaggaguccgagugcgccugcaucaacgggagcugcuucaccaucaugaccgacggcccguccaacggccaggccagcuacaagaucuucaagaucgagaaggggaagguggugaaguccgucgagcugaacgcgcccaacuaccacuacgaggagugcagcugcuaccccgacgccuccgagaucaugugcgugugccgggacaacuggcacggcagcaaccgccccuggguguccuucaaccggaaccuggaguaccagaucggguacaucugcagcggcgucuucggggacaacccgcgccccaacgacggcacgggcuccugcgggcccgugagcuccaacggcgccuacggggugaagggcuucagcuucaaguacgggaagggcgucuggaucggccggaccaaguccaccagcagccgcuccggguucgagaugaucugggaccccaacggcuggaccgagacggacagcuccuucagcgugaagcaggacaucgucgccaucaccgacugguccggguacagcggcuccuucgugcagcacccggagcucaccgggcuggacugcauccggcccugcuucuggguggagcugauccgcggccggcccaaggagaacaccaucuggacgagcggcuccagcaucuccuucugcggggucaacagcgacaccgugggcugguccuggcccgacggggccgagcucccguucaccaucgacaaguga

SEQ ID NO: 90214 - RNA, 1410 nt, Artificial Sequence
  derived and/or modified CDS sequence (opt1) from neuraminidase__InfluenzaA__BAM85834
augaaccccaaccagaagaucaucaccaucggcagcgugucccugaccgucgccacggugugcuuccucaugcagaucgccauccugaccaccaccgugacgcugcacuucaagcagaacgagugcagcaucccggcgaacaaccaggucaugcccugcgagcccaucgugaucgagcgcaacaucaccgagaucguguaccucaacaacaccaccaucgagaaggagaucugccugaaggccgccgaguaccggaacugguccaagccccagugccagaucacgggguucgccccguucagcaaggacaacuccauccgccugagcgccggcggggacaucugggucacccgggagcccuacguguccugcgaccccagcaagugcuaccaguucgcgcucggccaggggaccacccuggagaacaagcacuccaacggcacgauccacgaccgcaucccccaccggacccugcucaugaacgagcugggcgugccguuccaccuggggaccaagcaggucugcaucgccuggagcuccagcuccugccacgacggcaaggccuggcuccacgugugcgugaccggggacgaccgcaacgccacggcgagcuucaucuacgacggcaugcuggucgacuccaucgggagcuggucccagaacauccugcggacccaggagagcgagugcgugugcaucaacgggaccugcgccguggucaugaccgacggcuccgccagcggccgcgccgacacgcggauccucuucauccgcgagggcaagaucgugcacaucagcccccuguccgggagcgcccagcacaucgaggagugcuccugcuacccccgguaccccaucauccgcugcgugugccgggacaacuggaagggcagcaaccgcccggucaucgacaucaacauggcggacuacuccaucgacagcuccuacgugugcagcggccuggugggggacacgccccggaacgacgacuccagcuccagcuccaacugccgcgaccccaacaacgagcggggcaaccccggggucaagggcugggccuucgacaacgggaacgacguguggaugggccgcaccaucagcaaggacucccggagcggcuacgagaccuuccgcgugaucgggggcugggccaccgccaacuccaagagccagaccaaccggcaggucaucguggacaacaacaacugguccggguacagcggcaucuucagcgucgaguccaagagcugcaucaaccgcugcuucuacguggagcucauccgcgggcggccgcaggagacccgcgugugguggaccuccaacagcaucgucguguucugcggcacguccggcaccuacgggaccggcagcuggcccgacggggccaacaucaacuucaugcccaucuga

SEQ ID NO: 90215 - RNA, 1410 nt, Artificial Sequence
  derived and/or modified CDS sequence (opt1) from neuraminidase__InfluenzaA__BAM85835
augaaccccaaccagaagaucaucaccaucggcagcgugucccugaccaucgccacggucugcuuccucaugcagaucgccauccuggcgaccaccgugacccugcacuucaagcagaacgagugcagcaucccggccaacaaccaggugguccccugcgagcccaucaucaucgagcgcaacaucacggagaucguguaccucaacaacaccaccaucgagaaggagaucugcuccaaggccguggacuaccggaacuggagcaagccccagugccagaucaccggguucgccccguucuccaaggacaacagcauccgccuguccgccggcggggacaucugggucacgcgggagcccuacgugagcugcgacaccuccaagugcuaccaguucgcgcugggccaggggaccacccucgacaacaagcacagcaacggcacgauccacgaccgcaucccccaccggacccugcugaugaacgagcucggcgugcccuuccaccuggggaccaagcaggucugcaucgccugguccagcuccagcugccacgacggcaaggccuggcugcacgugugcgugaccggggacgaccgcaacgccacggcguccuucaucuacaacggcaugcucgucgacagcaucggguccuggagccagaacauccugcggacccaggaguccgagugcgugugcaucaacggcagcugcaccguggucaugaccgacggcagcgccuccgggaaggccgacacgcgcauccuguucgugaaggagggcaagaucauccacaucagcccgcucuccgggagcgcccagcacaucgaggagugcuccugcuacccccgguaccccaacgugcgcugcgucugccgggacaacuggcgcggcagcaaccggcccgugaucgacaucaacauggccgacuacuccaucgacagcuccuacgugugcagcggccuggucggggacaccccgcgcaacgacgacaacuccagcuccagcaacugccgggaccccaacaacgagcgcggcaaccccggggugaagggcugggcguucgacuccggggacgacguguggaugggccggaccaucagccgcgacucccggagcggcuacgagaccuucaaggucaucgggggcugggccacggccaacuccaagagccagaccagccgccaggugaucgucgacaacaacaacugguccggguacagcggcguguucuccguggagcacaagagcugcaucaaccggugcuucuacgucgagcugauccgcgggcgcccccaggagacccgggugugguggaccuccaacagcaucguggucuucugcggcacguccggcaccuacgggaccggcagcuggccggacggggccaacaucaacuucaugcccaucuga

SEQ ID NO: 90216 - RNA, 1410 nt, Artificial Sequence
  derived and/or modified CDS sequence (opt1) from neuraminidase__InfluenzaA__BAM85836
augaaccccaaccagaagaucaucaccaucggcagcgugucccugaccaucgccacgaucugcuuccucaugcagaucgccauccuggcgaccaccgucacccugcacuucaagcagaacgggugcagcaucccguccaacaaccagguggugcccugcgagcccaucaucgucgagcgcaacaucacggagaucguguaccucaacaacaccaccaucgagaaggagcugugccccaaggugcuggaguaccgggacuggagcaagccgcagugccagaucaccggcuucgcccccuucuccaaggacaacagcauccgccucuccgccgggggcgacaucugggucacgcgggagcccuacgugagcugcucccccgacaagugcuaccaguucgcccuggggcagggcaccacccuggacaaccgccacagcaacggcaccauccacgaccggaucccgcaccgcacgcuccugaugaacgagcugggggugcccuuccaccucggcaccaagcaggucugcaucgccugguccagcuccagcugccacgacgggcgggcguggcugcacgugugcgugaccggcgacgaccgcaacgccaccgccuccuucaucuacgacgggaugcuggucgacagcaucggcuccuggagccagaacauccuccggacgcaggaguccgagugcgugugcaucaacgggaccugcaccguggucaugaccgacggcagcgccagcggccgcgcggacacgcggauccuguucgugaaggaggggaagaucgugcacaucagcccccuguccggcuccgcccagcacaucgaggagugcagcugcuacccccgcuacccggacguccggugcgugugccgcgacaacuggaagggcuccaaccggcccaucaucgacaucaacauggccgacuacagcaucggguccagcuacgugugcuccggccucgucggggacacgccccgcaacgacgacagcuccagcaacuccaacugccgggaccccaacaacgagcgcggcaacccgggggugaagggcugggccuucgacuacggcaacgacguguggauggggcggaccaucagcaaggacucccgcagcggcuacgagaccuuccgggucaucgggggcuggaccaccgccaacuccaagagccaggugaaccgccaggucaucguggacaacuccaacuggagcggguacagcggcaucuucuccguggagggcaagagcugcaucaaccgcugcuucuacgucgagcugauccgggggcgcccccaggagacccgggugugguggaccuccaacagcaucguggucuucugcggcacguccgggaccuacggcaccgggagcuggcccgacggcgcgaacaucaacuucaugcccaucuga

SEQ ID NO: 90217 - RNA, 1410 nt, Artificial Sequence
  derived and/or modified CDS sequence (opt1) from neuraminidase__InfluenzaA__BAO79717
augaaccccaaccagaagaucaucaccaucggcagcgugucccugaccaucagcacgaucugcuucuucaugcagaucgccauccucaucaccaccgucacccugcacuucaagcaguacgaguucaacuccccgcccaacaaccaggugaugcugugcgagcccacgaucaucgagcgcaacaucaccgagaucguguaccucaccaacaccacgaucgagaaggagaucugccccaagccggccgaguaccggaacuggagcaagccccagugcgggaucaccggcuucgcgcccuucuccaaggacaacagcauccgccuguccgccgggggcgacaucugggucacccgggagcccuacgugagcugcgacccggacaagugcuaccaguucgcccuggggcagggcaccacgcucaacaacgugcacuccaacaacaccguccgcgaccggacccccuaccgcacccugcugaugaacgagcucggcgugcccuuccaccuggggacgaagcaggucugcaucgccuggagcuccagcuccugccacgacggcaaggccuggcugcacgugugcaucaccggggacgacaagaacgcgaccgccagcuucaucuacaacggccggcucguggacuccguggucagcugguccaaggacauccugcgcacccaggagagcgagugcgugugcaucaacgggacgugcaccguggucaugaccgacggcuccgccagcggcaaggccgacaccaagauccuguucaucgaggaggggaagaucgugcacacgagcacccucuccggcagcgcgcagcacguggaggagugcuccugcuacccccgguacccggggguccgcugcgugugccgggacaacuggaagggcagcaaccgccccaucguggacaucaacaucaaggaccacuccaucgucagcuccuacgugugcagcggccuggugggggacaccccgcggaagaacgacuccagcuccagcucccacugccuggaccccaacaacgaggagggcgggcacggcgucaaggggugggccuucgacgacggcaacgacguguggaugggccgcaccaucaacgagacgagccggcucggguacgagaccuucaaggucaucgagggcugguccaaccccaagagcaagcugcagaucaaccgccaggugaucguggaccgcggggaccgguccggcuacagcgggaucuucuccgucgagggcaagaacugcaucaaccggugcuucuacguggagcugauccgcggccggaaggaggagaccgaggugcucuggaccagcaacagcaucgucguguucugcgggacguccggcaccuacgggaccggcagcuggcccgacggggccgaccugaaccugaugcccaucuga

SEQ ID NO: 90218 - RNA, 1413 nt, Artificial Sequence; identical to SEQ ID NO: 79083
  derived and/or modified CDS sequence (opt1) from neuraminidase__InfluenzaA__CAA33354

SEQ ID NO: 90219 - RNA, 1404 nt, Artificial Sequence
  derived and/or modified CDS sequence (opt1) from Neuraminidase__InfluenzaA__CAB95858
augaaccccaaccagaagaucaucgcccugggcagcguguccaucaccaucgccaccaucugccuccugaugcagaucgcgauccuggccacgaccaugacccuccacuucaacgagugcaccaacccgagcaacaaccaggccaugcccugcgagcccaucaucaucgagcgcaacaucacggagaucguccaccugaacaacaccaccaucgagaaggaguccugccccaagguggccgaguacaagaacuggagcaagccgcagugccagaucaccggguucgcccccuucuccaaggacaacagcauccggcuguccgcgggcggggacaucugggugacgcgcgagcccuacgucagcugcggccucgggaacugcuaccaguucgcccugggccagggcaccacccugaacaacaagcacuccaacgggaccauccacgaccggagcccccaccgcacgcuccugaugaacgagcugggcgugccguuccaccucgggaccaagcaggucugcaucgccugguccagcuccagcugccacgacggcaaggccuggcugcacgugugcgugaccggggacgaccggaacgcgaccgccuccaucaucuacgacggcaugcugacggacagcaucggcuccuggagcaagaacauccuccgcacccaggaguccgagugcgugugcaucaacgggaccugcaccgucgugaugacggacggcagcgccagcgggcgggccgacaccaagauccuguucauccgcgagggcaagaucgugcacaucagcccccuguccggcuccgcccagcacgucgaggagugcagcugcuacccccgguaccccgaggugcgcugcgugugccgggacaacuggaagggguccaaccgcccgguccucuacaucaacguggcggacuacagcguggacuccagcuacgucugcuccggccuggugggggacacgccccggaacgacgacagcuccagcuccagcaacugccgcgaccccaacaacgagcggggcgggcccggcgugaagggcugggccuucgacaacgggaacgacgucuggaugggccgcaccaucaagaaggacucccggagcggguacgagaccuuccgcguggugggcggguggaccaccgccaacuccaagagccagaucaaccggcaggucaucguggacuccgacaacuggagcggcuacagcggcaucuucuccgucgaggggaagaccugcaucaaccgcugcuucuacguggagcugauccggggccgcccgcaggagacgcgcgugugguggaccagcaacuccaucaucgucuucugcgggaccagcggcaccuacgggacgggcuccuggcccgacggcgccaacaucaacuucaugagcaucuga

SEQ ID NO: 90220 - RNA, 1404 nt, Artificial Sequence
  derived and/or modified CDS sequence (opt1) from neuraminidase__InfluenzaA__CAB95859
augaaccccaaccagaagaucaucgcccugggcagcguguccaucaccaucgccaccaucugccuccugaugcagaucgcgauccuggccacgaccaugacccuccacuucaacgagugcaccaacccgagcaacaaccaggccguccccugcgagcccaucaucaucgagcgcaacaucacggagaucgugcaccugaacaacaccaccaucgagaaggaguccugccccaagguggccgaguacaagaacuggagcaagccgcagugccagaucaccggguucgcccccuucuccaaggacaacagcauccggcuguccgcgggcggggacaucugggucacgcgcgagcccuacgugagcugcggccucgggaagugcuaccaguucgcccugggccagggcaccacccugaacaacaagcacuccaacgggaccauccacgaccggagcccccaccgcacgcuccugaugaacgagcugggcgugccguuccaccucgggaccaagcaggucugcaucgccugguccagcuccagcugccacgacggcaaggccuggcugcacgugugcgugaccggggacgaccggaacgcgaccgccuccaucaucuacgacggcaugcugacggacagcaucggcuccuggagcaagaacauccuccgcacccaggaguccgagugcgucugcaucaacgggaccugcaccguggugaugacggacggcagcgccagcgggcgggccgacaccaagauccuguucauccgcgagggcaagaucguccacaucggcccccuguccgggagcgcccagcacguggaggagugcuccugcuacccccgguaccccgaggugcgcugcgucugccgggacaacuggaagggcagcaaccgcccggugcucuacaucaacguggcggacuacuccgucgacagcuccuacgugugcagcgggcuggugggcgacacgccccggaacgacgacuccagcuccagcuccaacugccgcgaccccaacaacgagcgcgggggccccggcgucaaggggugggccuucgacaacggcaacgacguguggauggggcggaccaucaagaaggacagccgguccggcuacgagaccuuccgcguggucgggggcuggaccaccgccaacagcaagucccagaucaaccgccaggugaucgucgacagcgacaacugguccggcuacagcgggaucuucagcguggagggcaagaccugcaucaaccggugcuucuacguggagcugauccgggggcgcccgcaggagacgcgcgucugguggaccuccaacagcaucaucguguucugcggcaccuccgggaccuacggcacgggcagcuggcccgacggggccaacaucaacuucauguccaucuga

SEQ ID NO: 90221 - RNA, 1410 nt, Artificial Sequence; identical to SEQ ID NO: 78597
  derived and/or modified CDS sequence (opt1) from Neuraminidase__InfluenzaA__CAC19707

SEQ ID NO: 90222 - RNA, 1410 nt, Artificial Sequence
  derived and/or modified CDS sequence (opt1) from neuraminidase__InfluenzaA__CAD29959
augaaccccaaccagaagaucaucaccaucggcagcgugucccugaccaucgccacgaucugcuuccucaugcagaucgccauccuggucaccaccgugacccugcacuucaagcaguacgagugcaacagcccgcccaacaaccaggugaugcucugcgagcccacgaucaucgagcgcaacaucaccgagaucgucuaccugaccaacaccacgaucgagaaggagaucugccccaagcuggcggaguaccggaacugguccaagccgcagugcaacaucaccggguucgcccccuucagcaaggacaacuccauccgccucagcgccggcggggacaucugggugacccgggagcccuacguguccugcgaccccgacaagugcuaccaguucgcccugggccaggggaccacgcugaacaacggccacagcaacgacaccguccacgaccgcaccccguaccggacccuccugaugaacgagcugggcgugcccuuccaccucgggacgaagcaggucugcaucgccugguccagcuccagcugccacgacggcaaggcguggcugcacgugugcgugaccggggacgacgagaacgccaccgccuccuucaucuacaacggccgccugguggacagcaucggguccuggagcaagaagauccuccggacccaggaguccgagugcgucugcaucaacggcacgugcaccguggugaugaccgacggcagcgccuccgggaaggcggacaccaagauccuguucaucgaggagggcaagaucguccacacgagcccccugagcggguccgcccagcacguggaggagugcagcugcuacccccgcuacccgggcgugcggugcgucugccgcgacaacuggaagggcuccaaccggcccaucguggacaucaacgugaaggacuacagcaucgucuccagcuacgugugcuccgggcucgugggcgacacgccccgcaagaacgacagcuccagcuccagccacugccugaaccccaacaacgaggagggcgggcacggggucaagggcugggccuucgacgacggcaacgacguguggauggggcggaccaucuccgagaagcugcgcagcggcuacgagaccuucaaggucaucgaggggugguccaagccgaacagcaagcuccagaucaaccgccaggugaucguggaccggggcaaccgguccggguacagcggcaucuucuccgucgagggcaagagcugcaucaaccgcugcuucuacguggagcugauccgggggcgcaagcaggagaccgaggugcuguggaccagcaacuccaucgucguguucugcggcaccagcgggaccuacggcacgggguccuggcccgacggcgccgacaucaaccucaugcccaucuga

SEQ ID NO: 90223 - RNA, 1410 nt, Artificial Sequence
  derived and/or modified CDS sequence (opt1) from neuraminidase__InfluenzaA__CAD29960
augaaccccaaccagaagaucaucaccaucggcagcgugucccugaccaucgccacgaucugcuuccucaugcagaucgccauccuggucaccaccgugacccugcacuucaagcaguacgagugcaacccgccgcccaacaaccaggugaugcucugcgagcccacgaucaucgagcgcaacaucaccgagaucgucuaccugaccaacaccacgaucgagaaggagaucugccccaagcuggcggaguaccggaacuggagcaagccccagugcaacaucaccggguucgcccccuucuccaaggacaacagcauccgccucuccgccggcggggacaucugggugacccgggagcccuacgugagcugcgacccggacaagugcuaccaguucgcccugggccaggggaccacgcugaacaacggccacuccaacgacaccguccacgugcgcacccccuaccggacccuccugaugaacgagcugggcgugcccuuccaccucgggacgaagcaggucugcaucgccuggagcuccagcuccugccacgacggcaaggcguggcugcacgugugcgugaccggggacgacgagaacgccaccgccagcuucaucuacaacggccgccuggucgacuccaucgggagcugguccaagaagauccuccggacccaggagagcgagugcgugugcaucaacggcacgugcaccguggucaugaccgacggcuccgccagcgggaaggcggacaccaagauccuguucaucgaggagggcaagaucgugcacacgagcccccuguccgggagcgcccagcacguggaggagugcuccugcuacccgcgcuaccccggcguccggugcgugugccgcgacaacuggaagggcagcaaccggcccaucguggacaucaacgucaaggacuacuccaucgugagcuccuacgugugcagcgggcucgucggcgacacgccccgcaagaacgacuccagcuccagcucccacugccugaacccgaacaacgaggagggcgggcacggggugaagggcugggccuucgacgacggcaacgacgucuggauggggcggaccaucagcgagaagcugcgcuccggcuacgagaccuucaaggugaucgagggguggagcaagcccaacuccaagcuccagaucaaccgccaggugaucgucgaccggggcaaccggagcggguacuccggcaucuucagcguggagggcaaguccugcaucaaccgcugcuucuacguggagcugauccgggggcgcaagcaggagaccgagguccuguggaccagcaacagcaucgugguguucugcggcaccuccgggaccuacggcacggggagcuggcccgacggcgccgacaucaaccucaugcccaucuga

SEQ ID NO: 90224 - RNA, 1410 nt, Artificial Sequence
  derived and/or modified CDS sequence (opt1) from neuraminidase__InfluenzaA__CAD29961
augaaccccaaccagaagaucaucaccaucggcagcgugucccugaccaucagcacgaucugcuucuucaugcagaucgccauccucgucaccaccgugacccugcacuucaagcaguacgagugcaacuccccgcccaacaaccaggugaugcugugcgagcccacgaucaucgagcgcaacaccaccgagaucgucuaccucaccaacacgaccaucgagaaggagaucugccccaagcuggccgaguaccggaacuggagcaagccgcagugcaacaucaccggguucgcgcccuucuccaaggacaacagcauccgccuguccgccggcggggacaucugggugacccgggagcccuacgugagcugcgaccccgacaagugcuaccaguucgcccucggccaggggacgacccugaacaacggccacuccaacgacaccguccacgaccgcaccccguaccggacgcugcucaugaacgagcugggcgugcccuuccaccuggggaccaagcaggucugcaucgccuggagcuccagcuccugccacgacggcaaggccuggcuccacgugugcgugaccggggacgacgagaacgcgaccgccagcuucaucuacaacggccgccugguggacuccaucgggagcugguccaagaagauccugcggacgcaggagagcgagugcgucugcaucaacgggaccugcaccguggugaugaccgacggcuccgccagcgggaaggccgacacgaagauccucuucaucgaggagggcaagaucguccacaccagcacccuguccgggagcgcgcagcacguggaggagugcuccugcuacccccgcuaccccggcgugcggugcgucugccgcgacaacuggaagggcagcaaccggccgaucguggacaucaacaucaaggacuacuccaucgugagcuccuacgucugcagcgggcuggugggcgacacgccccgcaagaacgacuccagcuccagcucccacugccucgaccccaacaacgaggagggcggccacggggugaagggcugggccuucgacgacggcaacgacgucuggauggggcggaccaucagcgagaagcugcgcuccggcuacgagaccuucaaggugaucgagggguggagcaagcccaacuccaagcugcagaucaaccggcaggucaucguggaccgcggcaaccggagcggguacuccggcaucuucagcguggagggcaagagcugcaucaaccgcugcuucuacgucgagcucauccgggggcgcaagcaggagaccgaggugcuguggaccuccaacagcaucguggucuucugcggcacguccgggaccuacggcaccgggagcggcccggacggcgccgacaucaaccugaugcccaucuga

SEQ ID NO: 90225 - RNA, 1410 nt, Artificial Sequence; identical to SEQ ID NO: 85569
  derived and/or modified CDS sequence (opt1) from neuraminidase__InfluenzaA__CAD29962

SEQ ID NO: 90226 - RNA, 1410 nt, Artificial Sequence; identical to SEQ ID NO: 78308
  derived and/or modified CDS sequence (opt1) from neuraminidase__InfluenzaA__CAD29963

SEQ ID NO: 90227 - RNA, 1410 nt, Artificial Sequence; identical to SEQ ID NO: 78308
  derived and/or modified CDS sequence (opt1) from neuraminidase__InfluenzaA__CAD29964

SEQ ID NO: 90228 - RNA, 1410 nt, Artificial Sequence; identical to SEQ ID NO: 78308
  derived and/or modified CDS sequence (opt1) from neuraminidase__InfluenzaA__CAD29965

SEQ ID NO: 90229 - RNA, 1410 nt, Artificial Sequence; identical to SEQ ID NO: 78308
  derived and/or modified CDS sequence (opt1) from neuraminidase__InfluenzaA__CAD29966

SEQ ID NO: 90230 - RNA, 1410 nt, Artificial Sequence; identical to SEQ ID NO: 78064
  derived and/or modified CDS sequence (opt1) from neuraminidase__InfluenzaA__CAD29967

SEQ ID NO: 90231 - RNA, 1410 nt, Artificial Sequence; identical to SEQ ID NO: 78064
  derived and/or modified CDS sequence (opt1) from neuraminidase__InfluenzaA__CAD29968

SEQ ID NO: 90232 - RNA, 1410 nt, Artificial Sequence; identical to SEQ ID NO: 78597
  derived and/or modified CDS sequence (opt1) from neuraminidase__InfluenzaA__CAD29969

SEQ ID NO: 90233 - RNA, 1410 nt, Artificial Sequence
  derived and/or modified CDS sequence (opt1) from neuraminidase__InfluenzaA__CAD29970
augaaccccaaccagaagaucaucaccaucggcagcgugucccugaccaucgccacgaucugcuuccucaugcagaucgccauccuggucaccaccgugacccugcacuucaagcaguacgagugcaacagcccgcccaacaaccaggugaugcucugcgagcccacgaucaucgagcgcaacaucaccgagaucgucuaccugaccaacaccacgaucgagaaggagaucugccccaagcuggcggaguaccggaacugguccaagccgcagugcaagaucaccggguucgcccccuucagcaaggacaacuccauccgccucagcgccggcggggacaucugggugacccgggagcccuacguguccugcgaccccgacaagugcuaccaguucgcccugggccaggggaccacgcugaacaaccgccacagcaacgacaccguccacgaccggaccccguaccgcacccuccugaugaacgagcugggcgugcccuuccaccucggcacgaagcaggucugcaucgccugguccagcuccagcugccacgacgggaaggcguggcugcacgugugcgugaccggccacgacgagaacgccaccgccuccuucaucuacgacgggcggcugguggacagcaucggcuccuggagcaagaagauccuccgcacccaggaguccgagugcgucugcaucaacgggacgugcaccguggugaugaccgacggcagcgccuccggccgggcggacaccaagauccuguucaucgaggaggggaagaucguccacaucagcccccugagcggcuccgcccagcacguggaggagugcagcugcuacccccgcuacccggggauccggugcgugugccgcgacaacuggaagggcuccaaccggcccaucgucgacaucaacgugaaggacuacagcaucguguccagcuacgucugcuccggccucgugggggacacgccccgcaagaacgacagcuccagcuccagccacugccugaaccccaacaacgaggagggcgggcacggcgugaaggggugggccuucgacgacggcaacgacgucuggaugggccggaccaucuccgagaagcugcgcagcggguacgagaccuucaaggugaucgagggcugguccaagccgaacagcaagcuccagaucaaccggcaggucaucguggaccgcgggaaccgguccggcuacagcgggaucuucuccguggagggcaagagcugcaucaaccgcugcuucuacgucgagcugauccggggccgcaagcaggagaccgaggugugguggacgagcaacuccaucguggucuucugcgggaccagcggcaccuacgggaccggcuccuggcccgacggggccgacaucaaccugaugcccaucuga

SEQ ID NO: 90234 - RNA, 1410 nt, Artificial Sequence; identical to SEQ ID NO: 80579
  derived and/or modified CDS sequence (opt1) from neuraminidase__InfluenzaA__CAD29971

SEQ ID NO: 90235 - RNA, 1410 nt, Artificial Sequence
  derived and/or modified CDS sequence (opt1) from neuraminidase__InfluenzaA__CAD29972
augaaccccaaccagaagaucaucaccaucggcagcgugucccugaccaucgccacgaucugcuuccucaugcagaucgucauccuggugaccaccgugacccugcacuucaagcaguacgagugcaacagcccgcccaacaaccaggucaugcucugcgagcccacgaucaucgagcgcaacaucaccgagaucguguaccugaccaacaccacgaucgagaaggagaucugccccaagcuggccgaguaccggaacugguccaagccgcagugcaacaucaccggguucgcgcccuucagcaaggacaacuccauccgccucagcgccggcggggacaucugggugacccgggagcccuacgucuccugcgaccccgacaagugcuaccaguucgcccugggccaggggaccacgcugaacaacggccacagcaacgacaccgugcacgaccgcaccccguaccggacccuccugaugaacgagcugggcgugcccuuccaccucgggacgaagcaggucugcaucgccugguccagcuccagcugccacgacggcaaggccuggcugcacgugugcgugaccggggacgacaagaacgcgaccgccuccuucaucuacaacggccgccuggucgacagcaucggguccuggagcaagaagauccuccggacccaggaguccgagugcgugugcaucaacggcacgugcgccguggucaugaccgacggcagcgccuccgggaaggcggacaccaagauccuguucaucgaggagggcaagaucgggcacaccagccugcucagcggcuccgcccagcacguggaggagugcagcugcuacccccgcuaccccggcgugcggugcgucugccgcgacaacuggaagggguccaaccggccgaucguggacaucaacgugaaggacuacagcaucgucuccagcuacgugugcuccggccuggugggggacacgccccgcaagaacgacagcuccagcuccagccacugccuggaccccaacaacgaggagggcgggcacggcgucaagggcugggccuucgacgacgggaacgacguguggaugggccggaccaucuccgagaagcuccgcagcggguacgagaccuucaaggucaucgagggcugguccaagcccaacagcaagcugcagaucaaccgccaggugaucguggaccgggggaaccgguccggcuacagcggcaucuucuccgucgagggcaagagcugcaucaaccgcugcuucuacguggagcugauccgggggcgcaaccaggagaccgagauccucuggacgagcaacuccaucguggucuucugcgggaccagcggcaccuacgggaccggcuccuggccggacggcgccgacaucaaccugaugcccaucuga

SEQ ID NO: 90236 - RNA, 1410 nt, Artificial Sequence
  derived and/or modified CDS sequence (opt1) from neuraminidase__InfluenzaA__CAD29973
augaaccccaaccagaagaucaucaccaucggcagcgugucccugaccaucgccacgaucugcuuccucaugcagaucgccauccuggucaccaccgugacccugcacuucaagcaguacgagugcaacagcccgcccaacaaccaggugaugcucugcgagcccacgaucaucgagcgcaacaucaccgagaucgucuaccugaccaacaccacgaucgagaaggagaucugccccaagcuggcggaguaccggaacugguccaagccgcagugcaagaucaccggguucgcccccuucagcaaggacaacuccauccgccucagcgccggcggggacaucugggugacccgggagcccuacguguccugcgaccccggcaagugcuaccaguucgcccuggggcagggcaccacgcugaacaaccgccacagcaacgacaccguccacgaccggaccccguaccgcacccuccugaugaacgagcugggcgugcccuuccaccucgggacgaagcaggucugcaucgccugguccagcuccagcugccacgacggcaaggcguggcugcacgugugcgugaccgggcacgacgagaacgccaccgccuccuucaucuacgacggccggcugguggacagcaucggguccuggagcaagaagauccuccgcacccaggaguccgagugcgucugcaucaacggcacgugcaccguggugaugaccgacggcagcgccuccgggcgggcggacaccaagauccuguucaucgaggagggcaagaucguccacaucagcccccugagcggguccgcccagcacguggaggagugcagcugcuacccccgcuacuccggcgugcggugcgucugccgcgacaacuggaagggcagcaaccggccgaucguggacaucaacgugaaggacuacuccaucgucagcuccuacgugugcagcgggcucgugggcgacacgccccgcaagaacgacuccagcuccagcucccacugccugaaccccaacaacgaggagggcgggcacggggucaagggcugggccuucgacgacggcaacgacguguggauggggcggaccaucagcgagaagcugcgcuccggcuacgagaccuucaaggucaucgggggcuggagcaagcccaacuccaagcuccagaucaaccgccaggugaucguggaccgggggaaccggagcggcuacuccggcaucuucagcgucgagggcaagagcugcaucaaccgcugcuucuacguggagcugauccgggggcgcaagcaggagaccgaggugugguggacguccaacagcaucgucguguucugcgggaccuccggcaccuacgggaccggcagcuggccggacggcgccgacaucaaccugaugcccaucuga

SEQ ID NO: 90237 - RNA, 1410 nt, Artificial Sequence; identical to SEQ ID NO: 86608
  derived and/or modified CDS sequence (opt1) from neuraminidase__InfluenzaA__CAD29974

SEQ ID NO: 90238 - RNA, 1410 nt, Artificial Sequence
  derived and/or modified CDS sequence (opt1) from neuraminidase__InfluenzaA__CAD29984
augaaccccaaccagaagaucaucaccaucggcagcgugucccugaccaucgccacgaucugcuuccucaugcagaucgccauccuggucaccaccgugacccugcacuucaagcaguacgagugcaacagcccgcccaacaaccaggugaugcucugcgagcccacgaucaucgagcgcaacaucaccgagaucgucuaccugaccaacaccacgaucgagaaggagaucugccccaagcuggcggaguaccggaacugguccaagccgcagugcaacaucaccggguucgcccccuucagcaaggacaacuccauccgccucagcgccggcggggacaucugggugacccgggagcacuacguguccugcgaccgcgacaagugcuaccaguucgcccugggccaggggaccacgcugaacaacggccacagcaacgacaccguccacgaccggacccccuaccgcacccuccugaugaacgagcugggcgugcccuuccaccucgggacgaagcaggucugcaucgccugguccagcuccagcugccaccacggcaaggcguggcugcacgugugcgugaccggggacgacgagaacgccaccgccuccuucaucuacaacggccggcugguggacagcaucggguccuggagcaagaagauccuccgcacccaggaguccgagugcgucugcaucaacggcacgugcaccguggugaugaccgacggcagcgccuccgggaaggcggacaccaagauccuguucaucaaggagggcaagaucguccacacgagcagccuguccgggagcgcccagcacguggaggagugcuccugcuacccgcgguaccccggcgugcgcugcgucugccgggacaacuggaagggcagcaaccgccccaucguggacaucaacgugaaggacuacuccaucgucagcuccuacgugugcagcgggcucgugggcgacacgccccggaagaacgacuccagcuccagcucccacugccuggacccgaacaacgaggagggcgggcacggggucaagggcugggccuucgacgacggcaacgacguguggauggggcgcaccaucagcgagaagcugcgguccggcuacgagaccuucaaggucaucgagggguggagcaaggccaacuccaagcuccagaucaaccgccaggugaucguggaccggggcaaccgcagcggguacuccggcaucuucagcgucgagagcaaguccugcaucaaccggugcuucuacguggagcugauccgcggccggaagcaggagaccgaggugcuguggaccagcaacuccaucgucguguucugcgggaccagcggcaccuacgggacgggcuccuggcccgacggggccgacaucaaccucaugcccaucuga

SEQ ID NO: 90239 - RNA, 1410 nt, Artificial Sequence
  derived and/or modified CDS sequence (opt1) from neuraminidase__InfluenzaA__CAD29985
augaaccccaaccagaagaucaucaccaucggcagcgugucccugaccaucgccacgaucugcuuccucaugcagaucgccauccuggucaccaccgugacccugcacuucaagcaguacgagugcaacagcccgcccaacaaccaggugaugcucugcgagcccacgaucaucgagcgcaacaucaccgagaucgucuaccugaccaacaccacgaucgagaaggagaucugccccaagcuggcggaguaccggaacugguccaagccgcagugcaacaucaccggguucgcccccuucagcaaggacaacuccauccgccucagcgccggcggggacaucugggugacccgggagcccuacguguccugcgaccccgacaagugcuaccaguucgcccugggccaggggaccacgcugaacaacggccacagcaacgacaccguccacgaccgcaccccguaccggacccuccugaugaacgagcugggcgugcccuuccaccucgggacgaagcaggucugcaucgccugguccagcuccagcugccacgacggcaaggcguggcugcacgugugcgugaccggggacgacgagaacgccaccgccuccuucaucuacaacggccgccugguggacagcaucggguccuggagcaagaagauccuccggacccaggaguccgagugcgucugcaucaacggcacgugcaccguggugaugaccgacggcagcgccuccgggaaggcggacaccaagauccuguucaucgaggagggcaagaucguccacaucagcacgcugagcggguccgcccagcacguggaggagugcagcugcuacccccgcuaccccggcgugcggugcgucugccgcgacaacuggaagggcuccaaccggccgaucguggacaucaacgugaaggacuacagcaucgucuccagcuacgugugcuccgggcucgugggcgacacgccccgcaagaacgacagcuucuccagcucccacugccuggaccccaacaacgaggagggcgggcacggggucaagggcugggccuucgacgacggcaacgacguguggauggggcggaccaucagcgagaagcugcgcuccggcuacgagaccuucaaggucaucgagggguggagcaagcccaacuccaagcuccagaucaaccgccaggugaucguggagcggggcaaccggagcggguacuccggcaucuucagcgucgagggcaaguccugcaucaaccgcugcuucuacguggagcugauccgggggcgcaaggaggagaccgaggugugguggaccagcaacagcaucgucguguucugcggcaccucccggaccuacgggacgggcagcuggccggacggggccgacaucaaccugaugcccaucuga

SEQ ID NO: 90240 - RNA, 1410 nt, Artificial Sequence
  derived and/or modified CDS sequence (opt1) from neuraminidase__InfluenzaA__CAD29988
augaaccccaaccagaagaucaucaccaucggcagcgugucccugaccaucgccacgaucugcuuccucaugcagaucgccauccuggucaccaccgugacccugcacuucaagcaguacgagugcaacagcccgcccaacaaccaggugaugcucugcgagcccacgaucaucgagcgcaacaucaccgagaucgucuaccugaccaacaccacgaucgagaaggagaucugccccaagcuggcggaguaccggaacugguccaagccgcagugcaacaucaccggguucgcccccuucagcaaggacaacuccauccgccucagcgccggcggggacaucugggugacccgggagcccuacguguccugcgaccccgacaagugcuaccaguucgcccugggccaggggaccacgcugaacaacggccacagcaacgacaccguccacgaccgcaccccguaccggacccuccugaugaacgagcugggcgugcccuuccaccucgggacgcgccaggugugcaucgccugguccagcuccagcugccacgacggcaaggcguggcugcacgucugcgugaccggggacgacgagaacgccaccgccuccuucaucuacaacggccggcugguggacagcaucggguccuggagcaagaagauccuccgcacccaggaguccgagugcgucugcaucaacggcacgugcaccguggugaugaccgacggcagcgccuccgagaaggcggacaccaagauccuguucaucgaggaggggaagaucguccacaucagcacgcugagcggcuccgcccagcacguggaggagugcagcugcuacccccgguaccccggggugcgcugcgucugccgggacaacuggaagggcuccaaccgcccgaucguggacaucaacgugaaggacuacagcaucgucuccagcuacgugugcuccggccucgugggggacacgccccggaagaacgacagcuucuccagcucccacugccuggaccccaacaacgaggagggcgggcacggcgucaaggggugggccuucgacgacggcaacgacguguggaugggccgcaccaucagcgagaagcugcgguccggguacgagaccuucaaggucaucgagggcuggagcaagcccaacuccaagcuccagaucaaccgccaggugaucguggagcgggggaaccgcagcggcuacuccgggaucuucagcgucgagggcaaguccugcaucaaccggugcuucuacguggagcugauccgcggccggaaggaggagaccgaggugugguggaccagcaacagcaucgucguguucugcgggaccuccggcaccuacgggacgggcagcuggccggacggggccgacaucaaccugaugcccaucuga

SEQ ID NO: 90241 - RNA, 1410 nt, Artificial Sequence
  derived and/or modified CDS sequence (opt1) from neuraminidase__InfluenzaA__CAD29990
augaaccccaaccagaagaucaucaccaucggcagcgugucccugaccaucgccacgaucugcuuccucaugcagaucgccauccuggucaccaccgugacccugcacuucaagcaguacgagugcaacagcccgcccaacaaccaggugaugcucugcgagcccacgaucaucgagcgcaacaucaccgagaucgucuaccugaccaacaccacgaucgagaaggagaucugccccaagcuggcggaguaccggaacugguccaagccgcagugcaacaucaccggguucgcccccuucagcaaggacaacuccauccgccucagcgccggcggggacaucugggugacccgggagcccuacguguccugcgaccccgacaagugcuaccaguucgcccugggccaggggaccacgcugaacaacggccacagcaacgacaccguccacggccgcaccccguaccggacccuccugaugaacgagcugggggugcccuuccaccucggcacgaagcaggucugcaucgccugguccagcuccagcugccacgacgggaaggcguggcugcacgugugcgugaccggcgacgacgagaacgccaccgccuccuucaucuacaacgggcgccugguggacagcaucggcuccuggagcaagaagauccuccggacccaggaguccgagugcgucugcaucaacggcacgugcaccguggugaugaccgacgggagcgccuccggcaaggcggacaccaagauccuguucaucgaggaggggaagaucguccacacgagccugcucagcggcuccgcccagcacguggaggagugcagcugcuacccccgcuaccccggcgugcggugcgucugccgcgacaacuggaagggguccaaccggccgaucguggacaucaacgugaaggacuacagcaucgucuccagcuacgugugcuccggccuggugggggacacgccccgcaagaacgacaacagcuccagcucccacugccuggaccccaacaacgaggagggcgggcacggcgucaagggcugggccuucgacgacgggaacgacguguggaugggccggaccaucagcgagaagcuccgcuccggguacgagaccuucaaggucaucgagggcuggagcaagcccaacuccaagcugcagaucaaccgccaggugaucguggaccgggggaaccggagcggcuacuccggcaucuucagcgucgaggggaaguccugcaucaaccgcugcuucuacguggagcugauccggggccgcaagcaggagaccgaggugcucuggaccagcaacagcaucgucguguucugcgggaccuccggcaccuacgggacgggcagcuggccggacggcgccgacaucaaccugaugcccaucuga

SEQ ID NO: 90242 - RNA, 1410 nt, Artificial Sequence; identical to SEQ ID NO: 78085
  derived and/or modified CDS sequence (opt1) from neuraminidase__InfluenzaA__CAD29991

SEQ ID NO: 90243 - RNA, 1410 nt, Artificial Sequence
  derived and/or modified CDS sequence (opt1) from neuraminidase__InfluenzaA__CAD29992
augaaccccaaccagaagaucaucaccaucggcagcgugucccugaccaucgccacgaucugcuuccucaugcagaucgccauccuggucaccaccgugacccugcacuucaagcaguacgagugcaacagcccgcccaacaaccaggugaugcucugcgagcccacgaucaucgagcgcaacaucaccgagaucgucuaccugaccaacaccacgaucgagaaggagaucugccccaagcuggcggaguaccggaacugguccaagccgcagugcaacaucaccggguucgcccccuucagcaaggacaacuccauccgccucagcgccggcggggacaucugggugacccgggagcccuacguguccugcgaccccgacaagugcuaccaguucgcccugggccaggggaccacgcugaacaacggccacagcaacgacaccguccacgaccgcaccccguaccggacccuccugaugaacgagcugggcgugcccuuccaccucgggacgaagcaggucugcaucgccugguccagcuccagcugccacgacggcaaggcguggcugcacgugugcgugaccggggacgacgagaacgccaccgccuccuucaucuacaacggccgccugguggacagcaucggguccuggagcaagaagauccuccggacccaggaguccgagugcgucugcaucaacggcacgugcaccguggugaugaccgacggcagcgccuccgggaaggcggacaccaagauccuguucaucgaggagggcaagaucguccacacgagccugcucagcggguccgcccagcacguggaggagugcagcugcuacccccgcuaccccggcgugcggugcgucugccgcgacaacuggaagggcuccaaccggccgaucguggacaucaacgugaaggaccgcagcaucgucuccagcuacgugugcuccgggcuggugggcgacacgccccggaagaacgacagcuccagcuccagccacugccuggaccccaacaacgaggagggcgggcacggggucaagggcugggccuucgacgacggcaacgacguguggauggggcgcaccaucuccgagaagcuccggagcggcuacgagaccuucaaggucaucgaggggugguccaagcccaacagcaagcugcagaucaaccgccaggugaucguggaccggggcaaccgcuccggguacagcggcaucuucuccgucgagggcaagagcugcaucaaccggugcuucuacguggagcugauccgcgggcggaagcaggagaccgaggugcucuggaccagcaacuccaucgucguguucugcggcaccagcgggaccuacggcacgggguccuggccggacggcgccgacaucaaccugaugcccaucuga

SEQ ID NO: 90244 - RNA, 1410 nt, Artificial Sequence
  derived and/or modified CDS sequence (opt1) from neuraminidase__InfluenzaA__CAD29993
augaaccccaaccagaagaucaucaccaucggcagcgugucccugaccaucgccacgaccugcuuccucaugcagaucgccauccuggucaccaccgugacgcugcacuucaagcaguacgagugcaacagcccgcccaacaaccaggugaugcucugcgagcccaccaucaucgagcgcaacaucaccgagaucgucuaccugaccaacacgaccaucgagaaggagaucugccccaagcuggcggaguaccggaacugguccaagccgcagugcaacaucaccggguucgcccccuucagcaaggacaacuccauccgccucagcgccggcggggacaucugggugacccgggagcccuacguguccugcgaccccgacaagugcuaccaguucgcccugggccaggggacgacccugaacaacggccacagcaacgacaccguccacgaccgcaccccguaccggacgcuccugaugaacgagcugggcgugcccuuccaccucgggaccaagcaggucugcaucgccugguccagcuccagcugccacgacggcaaggcguggcugcacgugugcgugaccggggacgacgagaacgccaccgccuccuucaucuacaacggccgccugguggacagcaucggguccuggagcaagaagauccuccggacgcaggaguccgagugcgucugcaucaacgggaccugcaccguggugaugaccgacggcagcgccuccgggaaggcggacacgaagauccuguucaucgaggagggcaagaucguccacaccagcccccugagcggguccgcccagcacguggaggagugcagcugcuacccccgcuacccgggcgugcggugcgucugccgcgacaacuggaagggcuccaaccggcccaucguggacaucaacgugaaggacuacagcaucgucuccagcuacgugugcuccgggcucgugggcgacacgccccgcaagaacgacagcuccagcuccagccacugccuggaccccaacaacgaggagggcggccacggggucaagggcugggccuucgacgacggcaacgacguguggauggggcggaccaucuccgagaagcugcgcagcggcuacgagaccuucaaggucaucgaggggugguccaagccgaacagcaagcuccagaucaaccgccaggugaucguggaccggggcaaccgguccggguacagcggcaucuucuccgucgagggcaagagcugcaucaaccgcugcuucuacguggagcugauccgggggcgcaagcaggagaccgaggugcuguggaccagcaacuccaucgucguguucugcggcaccagcgggacguacggcaccggguccuggcccgacggcgccgacaucaaccucaugcccaucuga

SEQ ID NO: 90245 - RNA, 1410 nt, Artificial Sequence; identical to SEQ ID NO: 79773
  derived and/or modified CDS sequence (opt1) from neuraminidase__InfluenzaA__CAD29994

SEQ ID NO: 90246 - RNA, 1413 nt, Artificial Sequence; identical to SEQ ID NO: 80477
  derived and/or modified CDS sequence (opt1) from neuraminidase__InfluenzaA__CAD57252

SEQ ID NO: 90247 - RNA, 1413 nt, Artificial Sequence
  derived and/or modified CDS sequence (opt1) from neuraminidase__InfluenzaA__CAD57253
augaaccccaaccagaagaucaucaccaucggcagcauccgcaucgccaucgggaucaucucccugaugcuccagaucggcaacaucaucagcaucugggccucccacagcauccagaccgggucccagaaccacacgggcgugugcaaccagcggaucaucaccuacgagaacagcaccugggucaaccacaccuacgugaacaucaacaacacgaacgugaucgcggggaaggacaagaccuccgucacccuggccggcaacagcucccugugcagcaucuccggcugggccaucuacaccaaggacaacagcauccgcaucggguccaagggcgacguguucgugauccgggagccguucaucagcugcucccaccucgagugccgcacguucuuccugacccagggggcccugcucaacgacaagcacagcaacggcaccgucaaggaccggucccccuaccgcgcccugaugagcugcccccugggggaggcgcccuccccguacaacagcaaguucgagagcguggccugguccgccagcgccugccacgacggcaugggcuggcucaccaucgggaucuccggccccgacaacggggcgguggccguccugaaguacaacggcaucaucacggagaccaucaagagcuggaagaagcagauccugcggacccaggaguccgagugcgugugcgugaacggcagcugcuucaccaucaugacggacgggcccuccaacggcgccgccagcuacaagaucuucaagaucgagaaggggaagaucaccaaguccaucgagcucaacgcccccaacuuccacuacgaggagugcagcugcuacccggacaccggcaccgucaugugcgugugccgcgacaacuggcacggguccaaccggcccugggugagcuucaaccagaaccuggacuaccagaucggcuacaucugcuccggcgucuucggggacaacccccgccccaaggacggcgaggggagcugcaacccggugacgguggacggcgcgaacggggucaagggcuucuccuacaaguacggcaacgggguguggaucggccggaccaagagcaaccgccugcggaagggguucgagaugaucugggaccccaacggcuggaccgacaccgacuccgacuucagcgugaagcaggacgucguggccaucacggacugguccggguacagcggcagcuucgugcagcaccccgagcucaccggccuggacugcauccgccccugcuucugggucgagcuggugcgggggcucccgaaggagaacaccaccaucuggacguccggcagcuccaucagcuucugcggggucaacuccgacaccgccaacuggagcuggcccgacggcgccgagcugcccuucaccaucgacaaguga

SEQ ID NO: 90248 - RNA, 1413 nt, Artificial Sequence; identical to SEQ ID NO: 78420
  derived and/or modified CDS sequence (opt1) from neuraminidase__InfluenzaA__CAD57255

SEQ ID NO: 90249 - RNA, 1413 nt, Artificial Sequence
  derived and/or modified CDS sequence (opt1) from neuraminidase__InfluenzaA__CAD57256
augaaccccaaccagaagaucaucaccaucggcagcaucuccguggccaucgggaucaucagccugaugcuccagaucggcaacaucaucuccaucugggccagccacuccauccagaccgggagccagaaccacacgggcaucugcaaccagcgcaucaucaccuacgagaacuccaccugggucaaccacaccuacgugaacaucaacaacacgaacguggucgcggggaaggacaagaccagcgugacccuggccggcaacuccagccugugcuccaucagcggcugggccaucuacaccaaggacaacuccauccggaucgggagcaagggcgacguguucgucauccgcgagccguucaucuccugcagccaccucgagugccggacguucuuccugacccagggggcccugcucaacgacaagcacuccaacggcaccgugaaggaccgcagccccuaccgggcccugauguccugcccccugggggaggcgcccagcccguacaacagcaaguucgaguccguggccuggagcgccuccgccugccacgacggcaugggcuggcucaccaucgggaucagcggccccgacaacggggcggucgccgugcugaaguacaacggcaucaucacggagaccaucaaguccuggaagaagcgcauccugcggacccaggagagcgagugcgugugcgucaacggcuccugcuucaccaucaugacggacgggcccagcaacggcgccgccuccuaccgcaucuucaagaucgagaaggggcgggugaccaagagcaucgagcucgacgcccccaacuaccacuacgaggagugcuccugcuacccggacaccggcaccgugaugugcgucugccgcgacaacuggcacgggagcaaccggcccuggguguccuucaaccagaaccuggacuaccagaucggcuacaucugcagcggcguguucggggacaacccccgccccaaggacggcgagggguccugcaacccggucacgguggacggcgcggacggggugaagggcuucagcuacaaguacggcaacggggucuggaucggccggaccaaguccaaccgccugcggaagggguucgagaugaucugggaccccaacggcuggaccgacaccgacagcgacuucuccgugaagcaggacguggucgccaucacggacuggagcggguacagcggcuccuucgugcagcaccccgagcucaccggccuggacugcauccgccccugcuucugggucgagcuggugcgggggcgcccgcgggagaacaccaccaucuggacgagcggcuccagcaucuccuucugcggggugaacagcgacaccgccaacugguccuggcccgacggcgccgagcuccccuucaccaucgacaaguga

SEQ ID NO: 90250 - RNA, 1413 nt, Artificial Sequence
  derived and/or modified CDS sequence (opt1) from neuraminidase__InfluenzaA__CAD57257
augaaccccaaccagaagaucaucaccaucggcagcaucuccaucgccaucgggaucaucagccugaugcuccagaucggcaacaucaucuccaucugggccagccacuccauccagaccgggagccagaaccacacgggcaucugcaaccagcgcaucaucaccuacgagaacuccaccugggugaaccacaccuacgucaacaucaacaacacgaacgugguggcggggaaggacaagaccagcgucacccuggccggcaacuccagccugugcuccaucagcggcugggccaucuacaccaaggacaacuccauccggaucgggagcaagggcgacguguucgugauccgcgagccguucaucuccugcagccaccucgagugccggacguucuuccugacccagggggcccugcucaacgacaagcacuccaacggcaccgucaaggaccgcagccccuaccgggcccugauguccugcccccugggggaggcgcccagcccguacaacagcaaguucgaguccguggccuggagcgccuccgccugccacgacggcaugggcuggcucaccaucgggaucagcggccccgacaacggggcgguggccguccugaaguacaacggcaucaucacggagaccaucaaguccuggaagaagcgcauccugcggacccaggagagcgagugcgugugcgugaacggcuccugcuucaccaucaugacggacgggcccagcaacggcgccgccuccuacaagaucuucaagaucgagaaggggaaggucaccaagagcaucgagcucaacgcccccaacucccacuacgaggagugcagcugcuacccggacaccggcaccgugaugugcgugugccgcgacaacuggcacggguccaaccggcccugggucagcuucaaccagaaccuggacuaccagaucggcuacaucugcuccggcguguucggggacaacccccgccccaaggacggcgaggggagcugcaacccggugacggucgacggcgcggacggggugaagggcuucuccuaccgguacggcaacgggguguggaucggccgcaccaagagcaaccggcugcgcaagggguucgagaugaucugggaccccaacggcuggaccgacaccgacuccgacuucagcaugaagcaggacgucguggccaugacggacuggagcggguacuccggcagcuucgugcagcaccccgagcucaccggccuggacugcauccggcccugcuucugggucgagcuggugcgcgggcggccgcgcgagaacaccaccaucuggacguccggcagcuccaucagcuucugcggggucaacuccgacaccgccaacuggagcuggcccgacggcgccgagcuccccuucaccaucgacaaguga

SEQ ID NO: 90251 - RNA, 1413 nt, Artificial Sequence
  derived and/or modified CDS sequence (opt1) from neuraminidase__InfluenzaA__CAD57258
augaaccccaaccagaagaucaucaccaucggcagcaucuccguggccaucgggaucaucagccugauccuccagaucggcaacaucaucuccaucugggccagccacuccauccagaccgggagccagaacuacacgggcaucugcaaccagcgcaucaucaccuacgagaacuccaccugggucaaccagaccuacgugaacaucaacaacacgaacguggucgcggggaaggacaagaccagcauggugcuggccggcaacuccagccugugcccgauccggggcugggccaucuacaccaaggacaacuccauccgcaucgggagcaagggcgacaucuucgugauccgggagcccuucaucuccugcagccaccucgagugccgcaccuucuuccugacgcagggggcccugcucaacgacaagcacuccaacggcaccgucaaggaccggagccccuaccgcgcccugauguccugcccccugggggaggcgccgagccccuacaacucccgguucgagagcguggccuggagcgccuccgccugccacgacggccucggcuggcugaccaucgggaucagcggccccgacaacggggcgguggccguccugaaguacaacggcaucaucaccgagacgaucaaguccuggaagaagcagauccuccgcacccaggagagcgagugcgugugcgugaacggcuccugcuucaccaucaugaccgacgggcccagcaaccgggccgccuccuaccgcaucuucaagaucgagaagggccgggucaccaagagcaucgagcuggacgccccgaacuaccacuacgaggagugcuccugcuaccccgacacggggaccgugaugugcgugugccgcgacaacuggcacggcagcaaccggcccugggucuccuucaaccagaaccuggacuaccagaucggguacaucugcagcggcguguucggcgacaacccccgcccgaaggacggggagggcuccugcaaccccgugaccgucgacggggcggacggcgugaagggguucagcuaccgguacggcaacggcguguggaucgggcgcacgaaguccaaccggcuccgcaagggcuucgagaugaucugggaccccaacggguggaccgacaccgacagcgacuucuccaugaagcaggacgucguggccaugaccgacuggagcggcuacuccgggagcuucgugcagcaccccgagcugacgggccuggacugcaugcggccgugcuucugggucgagcucgugcgcggccugccccgggagaacaccaccaucuggaccagcggguccagcaucuccuucugcggcgucaacagcgagacggccaacugguccuggcccgacggggccgagcugcccuucaccaucgacaaguga

SEQ ID NO: 90252 - RNA, 1413 nt, Artificial Sequence
  derived and/or modified CDS sequence (opt1) from neuraminidase__InfluenzaA__CAD57259
augaaccccaaccagaagaucaucaccaucggcagcaucuccaucgccaucgggaucaucagccugauccuccagaucggcaacaucaucuccaucugggccagccacuccauccagaccgagagccagaaccacacggggaucugcaaccagcgcaucaucaccuacgagaacuccaccugggugaaccagaccuacgucaacaucaacaacacgaacguggcggccggcaaggacaagaccagcaugacccuggccgggaacuccagccugugcccgauccggggcugggccaucuacaccaaggacaacuccauccgcaucggcagcaagggggacaucuucgugauccgggagcccuucaucuccugcagccaccucgagugccgcacguucuuccugacccagggcgcccugcucaacgacaagcacuccaacgggaccgucaaggaccggagccccuaccgcgcgcugauguccugcccccugggcgaggccccgagccccuacaacucccgguucgagagcguggccuggagcgccuccgcgugccacgacgggcucggcuggcugaccaucggcaucagcgggcccgacaacggcgccguggccguccugaaguacaacgggaucaucacggagaccaucaaguccuggaagaagcgcauccuccggacccaggagagcgagugcgugugcaugaacggcuccugcuucaccaucaugacggacggccccagcaacggggccgccuccuaccgcaucuucaagaucgagaagggccgggugaccaagagcaucgagcuggacgcgccgaacuaccacuacgaggagugcuccugcuaccccgagaccgggaccgucaugugcgugugccgcgacaacuggcacggcagcaaccggcccuggguguccuucaaccagaaccuggacuaccagaucggguacaucugcagcggcgucuucggcgacaacccccgcccgaaggacggggagggcuccugcaaccccgugacgguggacggggccgacggcgucaagggguucagcuaccgguacggcaacggcguguggaucgggcgcaccaaguccaaccggcuccgcaagggcuucgagaugaucugggaccccaacggguggaccgacaccgacagcgacuucuccaugaagcaggacaucguggccaugacggacuggagcggcuacuccgggagcuucguccagcaccccgagcugaccggccuggacugcaugcggccgugcuucuggguggagcucgugcgcggccugccccgggagaacaccaccaucuggacgagcggguccagcaucuccuucugcggcgucaacagcgacaccgccaacugguccuggcccgacggggccgagcugcccuucaccaucgacaaguga

SEQ ID NO: 90253 - RNA, 1413 nt, Artificial Sequence
  derived and/or modified CDS sequence (opt1) from neuraminidase__InfluenzaA__CAD57264
augaaccccaaccagaagaucaucaccaucggcagcaucuccguggccaucgggaucaucagccugauccuccagaucggcaacaucaucuccaucugggccagccacuccauccagaccgggagccagaacuacacgggcaucugcaaccagcgcaucaucaccuacgagaacuccaccugggucaaccagaccuacgugaacaucaacaacacgaacguggucgcggggaaggacaagaccagcaugacccuggccggcaacuccagccugugcccgauccggggcugggccaucuacaccaaggacaacuccauccgcaucgggagcaagggcgacguguucgugauccgggagcccuucaucuccugcagccaccucgagugccgcacguucuuccugacccagggggcccugcucaacgacaagcacuccaacggcaccgucaaggaccggagccccuaccgcgcccugauguccugcccccugggggaggcgccgagccccuacaacucccgguucgagagcguggccuggagcgccuccgccugccacgacggccucggcuggcugaccaucgggaucagcggccccgacaacggggcgguggccguccugaaguacaacggcaucaucacggagaccaucaaguccuggaagaagcagauccuccgcacccaggagagcgagugcgugugcgugaacggcuccugcuucaccaucaugacggacgggcccagcaacggcgccgccuccuaccggaucuucaagaucgagaaggggcgcgucaccaagagcaucgagcuggacgccccgaacuaccacuacgaggagugcuccugcuaccccgacaccggcaccgugaugugcgugugccgggacaacuggcacgggagcaaccgccccugggucuccuucaaccagaaccuggacuaccagaucggcuacaucugcagcggcguguucggggacaacccccggccgaaggacggcgagggguccugcaaccccgugacggucgacggcgcgaacggggugaagggcuucagcuaccgcuacggcaacgggguguggaucggccggaccaaguccaaccgccuccggaagggguucgagaugaucugggaccccaacggcuggaccgacaccgacagcgacuucuccaugaagcaggacgucguggccaugacggacuggagcggguacuccggcagcuucgugcagcaccccgagcugaccggccuggacugcaugcgcccgugcuucugggucgagcucgugcgggggcugccccgcgagaacaccaccaucuggacgagcggcuccagcaucuccuucugcggggucaacagcgagaccgccaacugguccuggcccgacggcgccgagcugcccuucaccaucgacaaguga

SEQ ID NO: 90254 - RNA, 1350 nt, Artificial Sequence
  derived and/or modified CDS sequence (opt1) from neuraminidase__InfluenzaA__CBW54819
augaaccccaaccagaagaucaucaccaucggcagcaucugcauggugaucgggaucgucucccugaugcuccagaucggcaacaugaucagcaucugggugucccacagcauccagaccgggaaccagugccaggccgagccgaucuccaacacgaaguuccugaccgagaaggccguggcgagcgucacccuggccggcaacuccagccucugccccaucuccgggugggccguguacagcaaggacaacuccauccgcaucggcagccggggcgacguguucgucauccgcgagcccuucaucuccugcagccaccuggagugccggaccuucuuccugacgcagggggcccuccugaacgacaagcacuccaacggcaccgugaaggaccgcagcccccaccggacccugauguccugcccggugggggaggcccccagccccuacaacucccgcuucgagagcgucgcguggagcgccuccgccugccacgacggcaucagcuggcucaccaucgggaucuccggccccgacaacggcgccguggcggugcugaaguacaacgggaucaucacggacaccaucaagagcuggcggaacaacauccugcgcacccaggaguccgagugcgccugcgucaacggcagcugcuucaccgugaugacggacgggccguccagcggccaggccuccuacaagaucuucaagauggagaagggcaagguggucaagagcguggagcucgacgcccccaacuaccacuacgaggagugcuccugcuaccccgacgccggggagaucacgugcgugugccgggacaacuggcacggcagcaaccgccccugggucuccuucaaccagaaccuggaguaccggaucggguacaucugcagcggcguguucggggacaacccgcgccccaacgacggcaccggcuccugcgggcccgugagccccaacggcgcguacggggucaagggcuucuccuucaaguacggggacggcguguggaucggccggaccaagagcaccaacucccgcagcggguucgagauggugugggacccgaacggcuggaccgggaccgacagcuccuucagcgucaagcaggacaucguggccaucaccgacugguccggcuacagcggguccuucguccagcaccccgagcugacgggccucgacugcauccggcccugcuucuggguggagcugauccgcggccggcccaaggagagcaccaucuggaccuccgggagcuccaucagcuucugcggcgugaacuccgacaccgucagcugguccuggccggacggggccgagcugcccuucacgaucgacaaguga

SEQ ID NO: 90255 - RNA, 1350 nt, Artificial Sequence
  derived and/or modified CDS sequence (opt1) from neuraminidase__InfluenzaA__CBW54821
augaaccccaaccagaagaucaucaccaucggcagcaucugcaucgugaucgggaucgucucccugaugcuccagaucggcaacaugaucagcaucugggugucccacagcauccagaccgggaaccagugccaggccgagccgaucuccaacacgaaguuccugaccgagaaggccguggcgagcgucacccuggccggcaacuccagccucugccccaucuccgggugggccguguacagcaaggacaacuccauccgcaucggcagccggggcgacguguucgucauccgcgagcccuucaucuccugcagccaccuggagugccggaccuucuuccugacgcagggggcccuccugaacgacaagcacuccaacggcaccgugaaggaccgcagcccccaccggacccugauguccugcccggugggggaggcccccagccccuacaacucccgcuucgagagcgucgcguggagcgccuccgccugccacgacggcaucagcuggcucaccaucgggaucuccggccccgacaacggcgccguggcggugcugaaguacaacgggaucaucacggacaccaucaagagcuggcggaacaacauccugcgcacccaggaguccgagugcgccugcaucaacggcagcugcuucaccgucaugacggacgggccguccagcggccaggccuccuacaagaucuucaagauggagaagggcaagguggucaagagcguggagcucgacgcccccaacuaccacuacgaggagugcuccugcuaccccgacgccggggagaucacgugcgugugccgggacaacuggcacggcagcaaccgccccuggguguccuucaaccagaaccuggaguaccagaucggguacaucugcagcggcgucuucggggacaacccgcggcccaacgacggcaccggcuccugcgggcccgugagccccaacggcgcguacggggugaagggcuucuccuucaaguacgggaacggcgucuggaucggccgcaccaagagcaccaacucccggagcggguucgagaugaucugggacccgaacggcuggaccgggaccgacagcuccuucagcgugaagcaggacaucguggccaucaccgacugguccggcuacagcggguccuucguccagcaccccgagcugacgggccucgacugcauccgccccugcuucuggguggagcugauccggggccagcccaaggagagcaccaucuggaccuccgggagcuccaucagcuucugcggcgucaacuccgacaccgugagcugguccuggccggacggggccgagcugcccuucacgaucgacaaguga

SEQ ID NO: 90256 - RNA, 1410 nt, Artificial Sequence
  derived and/or modified CDS sequence (opt1) from neuraminidase__InfluenzaA__CCG47912
augaaccccaaccagaagaucaucaccaucggcagcgugucccugaccaucgccacgaugugccucuucaugcagaucgccauccugaucaccaccgucacccugcacuucaagcaguacgagugcgacagcccggcgaacaaccaggugaugcccugcgagcccaucaucaucgagaagaacaucacgaagaucguguaccucaccaacaccaccaucgagaaggaggucugccccaagcugggggaguaccgcaacugguccaagccgcagugccggaucacgggcuucgcccccuucagcaaggacaacuccauccgccugagcgccgggggcgccaucugggugacccgggagcccuacguguccugcgaccccaacaagugcuaccaguucgcccucgggcagggcaccacccuggacaaccgccacagcaacgacacgauccacgaccggaccccguaccgcacccugcucaugaacgagcugggcguccccuuccaccuggggacccgccaggugugcaucgcgugguccagcuccagcugccacgacggcaaggccuggcuccacgugugcgucacggggcacgacaagaacgccaccgccuccuucaucuacgacggcaagcugguggacagcaucuccagcuggucccagaacauccugcggacccaggagagcgagugcgugugcaucaacgggaucugcaccgucgugaugacggacggcuccgcgagcggcaaggccgacaccaagauccucuucaucgaggaggggaaggugauccacaucagcccccugcugggcuccgcccagcacgucgaggagugcagcugcuacccccgguacccggacgugcgcugcaucugccgggacaacuggaagggguccaaccgccccaucguggacauccggaugaaggacuacagcaucggcuccagcuacaugugcuccggccucgucggggacacgccccgcaacaacgacggcagcuccaacagcaacugccggaaccccaacaacgagcgcgggaaccacggcgugaaggggugggccuucgacgacggcaacgacaucuggaugggccggaccaucuccaaggacagccgccugggguacgagaccuucaagguggucggcggguggucccagccgaacagcaaguuccagaucaaccgccaggugaucguggacuccgacaaccggagcggcuacuccgggaucuucagcgucgagggcaaguccugcaucaaccggugcuucuacguggagcugauccgcggccgccggcaggagacccgcgucugguggaccagcaacagcaucgugguguucugcgggaccuccggcacguacgggagcggcuccuggcccgacggggccgacaucaacuucaugcccaucuga

SEQ ID NO: 90257 - RNA, 1353 nt, Artificial Sequence
  derived and/or modified CDS sequence (opt1) from neuraminidase__InfluenzaA__AAF74321
augaaccccaaccagaagaucaucaccaucggcagcaucugcaugguggucgggaucaucucccugaugcuccagaucggcaacaucaucagcgugugggugucccacaccauccagacguggcacccgaaccagcccgagcccugcaaccagagcaucaacuucuacaccgagcaggccgccgcguccgucacccuggccgggaacagcucccugugccccaucagcggcugggccaucuacuccaaggacaacagcauccgcaucggguccaagggcgacguguucgugauccgggagccguucaucagcugcucccaccucgagugccgcaccuucuuccugacgcagggcgcccugcucaacgacaagcacagcaacgggaccgucaaggaccggucccccuaccgcacccugaugagcugccccgugggcgaggcccccuccccguacaacagccgguucgaguccguggcguggagcgccagcgccugccacgacgggaucuccuggcugaccaucggcaucagcgggcccgacaacggcgccgucgcggugcucaaguacaacggcaucaucacggacaccaucaaguccuggcgcaacaacauccugcggacccaggagagcgagugcgccugcgugaacggguccugcuucaccgucaugacggacggccccagcaacgagcaggccuccuacaagaucuucaagaucgagaaggggcgcguggugaaguccgucgagcugaacgcccccaacuaccacuaccaggagugcuccugcuacccggacgccggcgagaucacgugcgugugccgggacaacuggcacggcagcaaccgccccuggguguccuucaaccagaaccucgaguaccagaucggguacaucugcagcggcgucuucggggacagcccccggcccaacgacggcaccgggagcugcggcccggugucccugaacggcgcguacggggugaagggcuucagcuucaaguacgggaacggcgucuggaucgggcgcaccaaguccaccagcucccggagcggcuucgagaugaucugggaccccaacggcuggaccgagaccgacagcuccuucagccugaagcaggacaucaucgccaucaccgacugguccggguacagcggcuccuucauccagcaccccgagcucacggggcugaacugcaugcgccccugcuucuggguggagcugauccggggccgcccgaaggagaagaccaucuggaccagcggguccagcaucuccuucugcggcgugaacagcgacaccgucggcugguccuggcccgacggggccgagcuccccuucacgaucgacaaguga

SEQ ID NO: 90258 - RNA, 1353 nt, Artificial Sequence
  derived and/or modified CDS sequence (opt1) from neuraminidase__InfluenzaA__AAF74322
augaaccccaaccagaagaucaucaccaucggcagcaucugcaugguggucgggaucaucucccugaugcuccagaucggcaacaccaucagcgugugggugucccacaucaucaagacguggcacccgaaccagcccgagcccugcaaccagagcaucaacuucuacaccgagcaggccgccgcguccgucacccuggccgggaacagcucccugugccccaucagcggcugggccaucuacuccaaggacaacagcauccgcaucggguccaagggcgacguguucgugauccgggagccguucaucagcugcucccaccucgagugccgcaccuucuuccugacgcagggcgcccugcucaacgacaagcacagcaacgggaccgucaaggaccggucccccuaccgcacccugaugagcugccccgugggcgaggcccccuccccguacaacagccgguucgaguccguggcguggagcgccagcgccugccacgacgggaucuccuggcugaccaucggcaucagcgggcccgacaacggcgccgucgcggugcucaaguacaacggcaucaucacggacaccaucaaguccuggcgcaacaacacccugcggacccaggagagcgagugcgccugcgugaacggguccugcuucacggucaugaccgacggccccagcaacgagcaggccuccuacaagaucuucaagaucgagaaggggcgcguggugaaguccgucgagcugaacgcccccaacuaccacuacgaggagugcuccugcuacccggacgccggcgagaucacgugcgugugccgggacaacuggcacggcagcaaccgccccuggguguccuucaaccagaaccucgaguaccagaucggguacaucugcagcggcgucuucggggacagcccccggcccaacgacggcaccgggagcugcggcccggugucccugaacggcgcguacggggugaagggcuucagcuucaaguacgggaacggcgucuggaucgggcgcaccaaguccaccagcucccggagcggcuucgagaugaucugggaccccaacggcuggaccgagaccgacagcuccuucagccugaagcaggacaucaucgccaucacggacugguccggguacagcggcuccuucauccagcaccccgagcucaccgggcugaacugcaugcgccccugcuucuggguggagcugauccggggccgcccgaaggagaagaccaucuggaccagcggguccagcaucuccuucugcggcgugaacagcgacacggucggcugguccuggcccgacggggccgagcuccccuucaccaucgacaaguga

SEQ ID NO: 90259 - RNA, 1353 nt, Artificial Sequence
  derived and/or modified CDS sequence (opt1) from neuraminidase__InfluenzaA__AAF74323
augaaccccaaccagaagaucaucaccaucggcagcaucugcaugguggucgggaucaucucccugaugcuccagaucggcaacaucaucagcguguggaucucccacaucauccagaccuggcacccgaaccagcccgagcccugcaaccagagcaucaacuucuacacggagcaggccgccgcguccgugacccuggccgggaacagcucccugugccccaucagcggcugggccaucuacuccaaggacaacagcauccgcaucggguccaagggcgacgucuucgugauccgggagccguucaucagcugcucccaccucgagugccgcaccuucuuccugacccagggcgcccugcucaacgacaagcacagcaacgggacggugaaggaccggucccccuaccgcacccugaugagcugccccgucggcgaggcccccuccccguacaacagccgguucgaguccguggcguggagcgccagcgccugccacgacgggaucuccuggcugaccaucggcaucagcgggcccgacaacgaggccguggcgguccucaaguacaacggcaucaucaccgacacgauccgcuccuggcggaacaacauccugcgcacccaggagagcgagugcgccugcgugaacggcuccugcuucaccgugaugaccgacgggcccagcaacgagcaggccuccuacaagaucuucaagaucgagaagggccgggucgugaaguccguggagcugaacgcccccaacuaccacuacgaggagugcuccugcuacccggacgccggggagaucacgugcgucugccgcgacaacuggcacggcagcaaccggcccuggguguccuucaaccagaaccucgaguaccagaucggcuacaucugcagcgggguguucggcgacagcccccgccccaacgacgggaccggcagcugcgggccggucucccugaacggcgcguacggcgugaagggguucagcuucaaguacggcaacgggguguggaucggccggaccaaguccaccagcucccgcagcggguucgagaugaucugggaccccaacggcuggacggagaccgacagcuccuucagccugaagcaggacaucaucgccgucaccgacugguccggcuacagcggguccuucauccagcaccccgagcucaccggccugaacugcaugcggcccugcuucuggguggagcugauccgcgggcggccgaaggagaagacgaucuggaccagcggcuccagcaucuccuucugcggggugaacagcgacaccgucggcugguccuggcccgacggcgccgagcuccccuucaccaucgacaaguga

SEQ ID NO: 90260 - RNA, 1353 nt, Artificial Sequence
  derived and/or modified CDS sequence (opt1) from neuraminidase__InfluenzaA__AAF74324
augaaccccaaccagaagaucaucaccaucggcagcaucugcaugguggucgggaucaucucccugaugcuccagaucggcaacaucaucagcgugugggugucccacaucauccagaccuggcacccgaaccagcccgagcccugcaaccagagcaucaacuucuacacggagcaggccgccgcguccgucacccuggccgggaacagcucccugugccccaucagcggcugggccaucuacuccaaggacaacagcauccgcaucggguccaagggcgacguguucgugauccgggagccguucaucagcugcucccaccucgagugccgcaccuucuuccugacccagggcgcccugcucaacgacaagcacagcaacgggacggucaaggaccggucccccuaccgcacccugaugagcugccccgugggcgaggcccccuccccguacaacagccgguucgaguccguggcguggagcgccagcgccugccacgacgggaucuccuggcugaccaucggcaucagcgggcccgacaacggcgccgucgcggugcucaaguacaacggcaucaucaccgacacgaucaaguccuggcgcaacaacauccugcggacccaggagagcgagugcgccugcgugaacggguccugcuucaccgucaugaccgacggccccagcaacgagcaggccuccuacaagaucuucaagaucgagaaggggcgcguggugaaguccgucgagcugaacgcccccaacuaccacuacgaggagugcuccugcuacccggacgccggcgagaucacgugcgugugccgggacaacuggcacggcagcaaccgccccuggguguccuucaaccagaaccucgaguaccagaucggguacaucugcagcggcgucuucggggacagcccccggcccaacgacggcaccgggagcugcggcccggugucccugaacggcgcguacggggugaagggcuucagcuucaaguacgggaacggcgucuggaucgggcgcaccaaguccaccagcucccggagcggcuucgagaugaucugggaccccaacggcuggacggagaccgacagcuccuucagccugaagcaggacaucaucgccaucaccgacugguccggguacagcggcuccuucauccagcaccccgagcucaccgggcugaacugcaugcgccccugcuucuggguggagcugauccggggccgcccgaaggagaagacgaucuggaccagcggguccagcguguccuucugcggcgucaacagcgacaccaugggcugguccuggcccgacggggccgagcuccccuucaccaucgacaaguga

SEQ ID NO: 90261 - RNA, 1353 nt, Artificial Sequence
  derived and/or modified CDS sequence (opt1) from neuraminidase__InfluenzaA__AAF74325
augaaccccaaccagaagaucaucaccaucggcagcaucugcaugguggucgggaucaucucccugaugcuccagaucggcaacaccaucagcgugugggugucccacaucaucaagacguggcacccgaaccagcccgagcccugcaaccagagcaucaacuucuacaccgagcaggccgccgcguccgucacccuggccgggaacagcucccugugccccaucagcggcugggccaucuacuccaaggacaacagcauccgcaucggguccaagggcgacguguucgugauccgggagccguucaucagcugcucccaccucgagugccgcaccuucuuccugacgcagggcgcccugcucaacgacaagcacagcaacgggaccgucaaggaccggucccccuaccgcacccugaugagcugccccgugggcgaggcccccuccccguacaacagccgguucgaguccguggcguggagcgccagcgccugccacgacgggaucuccuggcugaccaucggcaucagcgggcccgacaacggcgccgucgcggugcucaaguacaacggcaucaucacggacaccaucaaguccuggcgcaacaacacccugcggacccaggagagcgagugcgccugcgugaacggguccugcuucacggucaugaccgacggccccagcaacgagcaggccuccuacaagaucuucaagaucgagaaggggcgcguggugaaguccgucgagcugaacgcccccaacuaccacuacgaggagugcuccugcuacccggacgccggcgagaucacgugcgugugccgggacaacuggcacggcagcaaccgccccuggguguccuucaaccagaaccucgaguaccagaucggguacaucugcagcggcgucuucggggacagcccccggcccaacgacggcaccgggagcugcggcccggugucccugaacggcgcguacggggugaagggcuucagcuucaaguacgggaacggcgucuggaucgggcgcaccaaguccaccagcucccggagcggcuucgagaugaucugggaccccaacggcuggaccgagaccgacagcuccuucagccugaagcaggacaucaucgccaucacggacugguccggguacagcggcuccuucauccagcaccccgagcucaccgggcugaacugcaugcgccccugcuucuggguggagcugauccggggccgcccgaaggagaagaccaucuggaccagcggguccagcaucuccuucugcggcgugaacagcgacacggucggcugguccuggcccgacggggccgagcuccccuacaccaucgacaaguga

SEQ ID NO: 90262 - RNA, 1410 nt, Artificial Sequence; identical to SEQ ID NO: 80752
  derived and/or modified CDS sequence (opt1) from neuraminidase__InfluenzaA__EPI239900

SEQ ID NO: 90263 - RNA, 1410 nt, Artificial Sequence; identical to SEQ ID NO: 81101
  derived and/or modified CDS sequence (opt1) from neuraminidase__InfluenzaA__EPI221062

SEQ ID NO: 90264 - RNA, 1410 nt, Artificial Sequence; identical to SEQ ID NO: 80752
  derived and/or modified CDS sequence (opt1) from neuraminidase__InfluenzaA__EPI534079

SEQ ID NO: 90265 - RNA, 1410 nt, Artificial Sequence; identical to SEQ ID NO: 80752
  derived and/or modified CDS sequence (opt1) from neuraminidase__InfluenzaA__AGM53851

SEQ ID NO: 90266 - RNA, 1410 nt, Artificial Sequence
  derived and/or modified CDS sequence (opt1) from neuraminidase__InfluenzaA__EPI731464
augaaccccaaccagaagaucaucaccaucggcagcgugugcaugaccaucgggauggccaaccugauccuccagaucggcaacaucaucuccaucuggaucagccacuccauccagcuggggaaccagaaccagaucgagacgugcaaccagagcgucaucaccuacgagaacaacaccugggugaaccagaccuacgugaacaucuccaacacgaacuucgccgcgggccagagcgucguguccgugaagcuggccgggggcagcucccucugcccggucagcggcugggccaucuacuccaaggacaacagcgugcgcaucggguccaagggcgacguguucgucauccgggagcccuucaucagcugcagcccccuggagugccgcaccuucuuccugacccagggggcccuccugaacgacaagcacuccaacggcaccaucaaggaccggucccccuaccgcacgcugaugagcugcccgaucggggaggugcccucccccuacaacagccgguucgagagcguggccugguccgcgagcgccugccacgacggcaucaacuggcucaccaucggcaucuccgggcccgacaacggcgccgucgccgugcugaaguacaacgggaucaucaccgacaccaucaagagcuggcgcaacaacauccugcggacgcaggaguccgagugcgcgugcgugaacggcagcugcuucaccgucaugaccgacggcccguccaacgggcaggccagcuacaagaucuuccgcaucgagaagggcaagaucgugaaguccguggagaugaacgcccccaacuaccacuacgaggagugcagcugcuaccccgacuccagcgagaucacgugcgucugccgggacaacuggcacggguccaaccgccccugggugagcuucaaccagaaccucgaguaccagaucggcuacaucugcuccgggaucuucggcgacaacccgcggcccaacgacaagaccggcagcugcgggcccguguccagcaacggcgccaacggggucaagggcuucuccuucaaguacgggaacggcguguggaucggccgcaccaagagcaucagcucccggaacggguucgagaugaucugggaccccaacggcuggaccgggaccgacaacaacuucagcaucaagcaggacaucgugggcaucaacgagugguccggguacagcggcuccuucguccagcacccggagcugacgggccuggacugcauccgccccugcuucuggguggagcucauccgggggcgccccaaggagaacaccaucuggaccagcggcuccagcaucuccuucugcggggucaacagcgacaccgugggcugguccuggcccgacggcgccgagcugccguucacgaucgacaaguga

SEQ ID NO: 90267 - RNA, 1410 nt, Artificial Sequence; identical to SEQ ID NO: 80752
  derived and/or modified CDS sequence (opt1) from neuraminidase__InfluenzaA__EPI696973

SEQ ID NO: 90268 - RNA, 1410 nt, Artificial Sequence
  derived and/or modified CDS sequence (opt1) from neuraminidase__InfluenzaA__EPI662593
augaaccccaaccagaagaucaucaccaucggcagcaucugcaugaccaucgggauggccaaccugauccuccagaucggcaacaucaucuccaucugggugagccacuccauccagaucgggaaccagagccagaucgagacgugcaaccaguccgucaucaccuacgagaacaacaccugggugaaccagaccuacgugaacaucagcaacacgaacuucgccgcgggccaguccgucgugagcgugaagcuggccgggaacuccagccugugcccggucuccggcugggccaucuacagcaaggacaacuccgugcgcaucggcagcaagggggacguguucgucauccgggagcccuucaucuccugcagcccccucgagugccgcaccuucuuccugacccagggcgcccugcucaacgacaagcacuccaacgggaccaucaaggaccggagccccuaccgcacgcugauguccugcccgaucggcgaggugcccagccccuacaacagccgguucgaguccguggccuggagcgcguccgccugccacgacgggaucaacuggcugaccaucggcaucagcggccccgacuccggggccgucgccgugcucaaguacaacggcaucaucaccgacaccaucaagagcuggcgcaacaacauccugcggacgcaggaguccgagugcgcgugcgugaacgggagcugcuucaccaucaugaccgacggcccguccgacggccaggccagcuacaagaucuuccgcaucgagaaggggaagaucaucaaguccgucgagaugaaggcccccaacuaccacuacgaggagugcagcugcuaccccgacuccagcgagaucacgugcgugugccgggacaacuggcacggcuccaaccgccccugggugagcuucaaccagaaccuggaguaccagaugggguacaucugcuccggcgucuucggggacaacccgcggcccaacgacaagaccggcagcugcggccccguguccagcaacggggccaacggcgugaagggguucagcuucaaguacggcaacggggucuggaucggccgcaccaaguccaucagcucccggaagggcuucgagaugaucugggaccccaacggguggaccggcaccgacaacaaguucagcaucaagcaggacaucguggggaucaacgagugguccggcuacagcggguccuucgugcagcacccggagcucacgggccuggacugcauccgccccugcuucugggucgagcugauccggggccgccccgaggagaacaccaucuggaccagcggguccagcaucuccuucugcggcgugaacagcgacaccgucgggugguccuggcccgacggcgccgagcucccguucacgaucgacaaguga

SEQ ID NO: 90269 - RNA, 1410 nt, Artificial Sequence; identical to SEQ ID NO: 90268
  derived and/or modified CDS sequence (opt1) from neuraminidase__InfluenzaA__EPI830229

SEQ ID NO: 90270 - RNA, 1410 nt, Artificial Sequence; identical to SEQ ID NO: 87861
  derived and/or modified CDS sequence (opt1) from neuraminidase__InfluenzaA__AGU92879

SEQ ID NO: 90271 - RNA, 1410 nt, Artificial Sequence; identical to SEQ ID NO: 87860
  derived and/or modified CDS sequence (opt1) from neuraminidase__InfluenzaA__AGU92857

SEQ ID NO: 90272 - RNA, 1410 nt, Artificial Sequence; identical to SEQ ID NO: 87859
  derived and/or modified CDS sequence (opt1) from neuraminidase__InfluenzaA__AGU92846

SEQ ID NO: 90273 - RNA, 1410 nt, Artificial Sequence; identical to SEQ ID NO: 87870
  derived and/or modified CDS sequence (opt1) from neuraminidase__InfluenzaA__AGU92835

SEQ ID NO: 90274 - RNA, 1410 nt, Artificial Sequence; identical to SEQ ID NO: 87846
  derived and/or modified CDS sequence (opt1) from neuraminidase__InfluenzaA__AGU92703

SEQ ID NO: 90275 - RNA, 1410 nt, Artificial Sequence
  derived and/or modified CDS sequence (opt1) from neuraminidase__InfluenzaA__EPI643117
augaaccccaaccagaagaucaucaccaucggcagcgugucccugaccaucagcacgaucugcuucuucaugcagaucgccauccucaucaccaccgucacccugcacuucaagcaguacgaguucaacuccccgcccaacaaccaggugaugcugugcgagcccacgaucaucgagcgcaacaucaccgagaucguguaccucaccaacaccacgaucgagaaggagaucugccccaagccggccgaguaccggaacuggagcaagccccagugcgggaucaccggcuucgcgcccuucuccaaggacaacagcauccgccuguccgccgggggcgacaucugggucacccgggagcccuacgugagcugcgacccggacaagugcuaccaguucgcccuggggcagggcaccacgcucaacaacgugcacuccaacaacaccguccgcgaccggacccccuaccgcacccugcugaugaacgagcucggcgugcccuuccaccuggggacgaagcaggucugcaucgccuggagcuccagcuccugccacgacggcaaggccuggcugcacgugugcaucaccggggacgacaagaacgcgaccgccagcuucaucuacaacggccggcucguggacuccguggucagcugguccaaggacauccugcgcacccaggagagcgagugcaucugcaucaacgggacgugcaccguggugaugaccgacggcuccgccagcggcaaggccgacaccaagauccuguucaucgaggaggggaagaucguccacacgagcacccucuccggcagcgcgcagcacguggaggagugcuccugcuacccccgguacccgggggugcgcugcgucugccgggacaacuggaagggcagcaaccgccccaucguggacaucaacaucaaggaccacuccaucgugagcuccuacgucugcagcggccuggugggggacaccccgcggaagaacgacuccagcuccagcucccacugccuggaccccaacaacgaggagggcgggcacggcgugaaggggugggccuucgacgacggcaacgacgucuggaugggccgcaccaucaacgagacgagccggcucggguacgagaccuucaaggugaucgagggcugguccaaccccaagagcaagcugcagaccaaccgccaggucaucguggaccgcggggaccgguccggcuacagcgggaucuucuccguggagggcaagagcugcaucaaccggugcuucuacgucgagcugauccgcggccggaaggaggagaccgaggugcucuggacgagcaacuccaucguggucuucugcgggaccagcggcaccuacgggaccggcuccuggcccgacggggccgaccugaaccugaugcccaucuga

SEQ ID NO: 90276 - RNA, 1410 nt, Artificial Sequence
  derived and/or modified CDS sequence (opt1) from neuraminidase__InfluenzaA__EPI675797
augaaccccaaccagaagaucaucaccaucggcagcgugucccugaccaucagcacgaucugcuucuucaugcagaucgccauccucaucaccaccgucacccugcacuucaagcaguacgaguucaacuccccgcccaacaaccaggugaugcugugcgagcccacgaucaucgagcgcaacaucaccgagaucguguaccucaccaacaccacgaucgagaaggagaucugccccaagccggccgaguaccggaacuggagcaagccccagugcgggaucaccggcuucgcgcccuucuccaaggacaacagcauccgccuguccgccgggggcgacaucugggucacccgggagcccuacgugagcugcgacccggacaagugcuaccaguucgcccuggggcagggcaccacgcucaacaacgugcacuccaacaacaagguccgcgaccggacccccuaccgcacccugcugaugaacgagcucggcgugcccuuccaccuggggaccaagcaggucugcaucgccuggagcuccagcuccugccacgacggcaaggccuggcugcacgugugcaucacgggggacgacaagaacgcgaccgccagcuucaucuacaacggccggcucguggacuccguggucagcugguccaaggacauccugcgcacccaggagagcgagugcaucugcaucaacgggaccugcacgguggugaugaccgacggcuccgccagcggcaaggccgacaccaagauccuguucaucgaggaggggaagaucguccacaccagcacgcucuccggcagcgcgcagcacguggaggagugcuccugcuacccccgguacccgggggugcgcugcgucugccgggacaacuggaagggcagcaaccgccccaucguggacaucaacaucaaggaccacuccaucgugagcuccuacgucugcagcggccuggugggggacaccccgcggaagaacgacuccagcuccagcucccacugccuggaccccaacaacgaggagggcgggcacggcgugaaggggugggccuucgacgacggcaacgacgucuggaugggccgcaccaucaacgagaccagccggcucggguacgagacguucaaggugaucgagggcugguccaaccccaagagcaagcugcagaccaaccgccaggucaucguggaccgcggggaccgguccggcuacagcgggaucuucuccguggagggcaagagcugcaucaaccggugcuucuacgucgagcugauccgcggccggaaggaggagaccgaggugcucuggaccagcaacuccaucguggucuucugcgggacgagcggcaccuacgggaccggcuccuggcccgacggggccgaccugaaccugaugcccaucuga

SEQ ID NO: 90277 - RNA, 1410 nt, Artificial Sequence; identical to SEQ ID NO: 90275
  derived and/or modified CDS sequence (opt1) from neuraminidase__InfluenzaA__EPI578429

SEQ ID NO: 90278 - RNA, 1410 nt, Artificial Sequence; identical to SEQ ID NO: 90275
  derived and/or modified CDS sequence (opt1) from neuraminidase__InfluenzaA__EPI614405

SEQ ID NO: 90279 - RNA, 1350 nt, Artificial Sequence; identical to SEQ ID NO: 90197
  derived and/or modified CDS sequence (opt1) from neuraminidase__InfluenzaA__AAT73329

SEQ ID NO: 90280 - RNA, 1350 nt, Artificial Sequence; identical to SEQ ID NO: 90197
  derived and/or modified CDS sequence (opt1) from neuraminidase__InfluenzaA__AAW80723

SEQ ID NO: 90281 - RNA, 1350 nt, Artificial Sequence; identical to SEQ ID NO: 90197
  derived and/or modified CDS sequence (opt1) from neuraminidase__InfluenzaA__EF541467

SEQ ID NO: 90282 - RNA, 1398 nt, Artificial Sequence; identical to SEQ ID NO: 87478
  derived and/or modified CDS sequence (opt1) from neuraminidase__InfluenzaA__EPI439509

SEQ ID NO: 90283 - RNA, 1410 nt, Artificial Sequence
  derived and/or modified CDS sequence (opt1) from neuraminidase__InfluenzaA__EPI482776
augaacaccaaccagcgcaucaucaccaucggcacggugugcaugaucgucgggaucaucagccugcuccugcagaucggcaacaucgugucccuguggaucagccacuccauccagaccgggugggagaaccacaccgugaugugcaaccagagcgucaucaccuacgugaacaacacgugggugaaccggaccuacgucaacaucuccaacaucaagaucgccaccauccaggacgugaccagcaucauccucgccggcaacuccagccugugccccguguccgggugggcggucuacagcaaggacaacuccauccgcaucggcagcaagggcgacaucuucgugauccgggagccguucaucuccugcagccagcuggagugccgcacguucuuccucacccagggggcccugcugaacgacaagcacuccaacggcaccgugaaggaccggagccccuaccgcacccucauguccugccccaucggggaggcccccagcccguacaacucccgguucgagagcgucgccuggagcgccuccgcgugccacgacggcaugggguggcugacgaucggcaucagcggccccgacaacggggccguggccgugcugaaguacaacggcaucaucaccgacaccaucaaguccuggcgcaacaagauccuccggacccaggagagcgagugcgucugcaugaacggguccugcuucacggugcugaccgacggccccagcaacggccaggccuccuacaagaucuucaagguggagaaggggaagaucaucaagagcaucgagcuggacgcgcccaacuaccacuacgaggagugcuccugcuacccggacaccggcaaggucaugugcgugugccgcgacaacuggcacgccagcaaccggcccuggguguccuucaaccagaaccucgacuaccagaucggguacaucugcagcggcgucuucggggacaacccccgcuccaacgacggcaagggcaacugcgggcccgugcugagcaacggcgccaacggggugaagggcuucuccuaccgguacgggaacggcgucuggaucggccgcaccaagagcaucaacucccggagcggguucgagaugaucugggacccgaacggcuggacggagaccgacuccagcuucagcaugaagcaggacaucaucgcccugaacgacugguccggguacagcggcuccuucgugcagcaccccgagcucaccgggaugaacugcauccgccccugcuucugggucgagcugauccggggccagcccaaggagagcaccaucugggccuccggcagcuccaucagcuucugcggggugaacuccgagacggcgagcugguccuggccggacggcgccgaccugcccuucaccaucgacaaguga

SEQ ID NO: 90284 - RNA, 1410 nt, Artificial Sequence
  derived and/or modified CDS sequence (opt1) from neuraminidase__InfluenzaA__EPI745533
augaaccccaaccagaagaucaucaccaucggcagcgugugcaucaccaucgggauggccaaccugauccuccagaucggcaacaucaucuccaucuggaucagccacuccauccagcuggggaaccagaaccagaucgagacgugcaaccagagcgucaucaccuacgagaacaacaccugggugaaccagaccuacgugaacaucuccaacacgaacuucgccgcgggccagagcgucguguccgugaagcuggccgggaacagcucccucugcccggucagcggcugggccaucuacuccaaggacaacagcauccgcaucggcuccaagggggacguguucgugauccgggagcccuucaucagcugcagcccccuggagugccgcaccuucuuccugacccagggcgcccuccugaacgacaagcacuccaacgggaccaucaaggaccggucccccuaccgcacgcugaugagcugcccgaucggcgagguccccucccccuacaacagccgguucgagagcguggccugguccgcgagcgccugccacgacgggaucuccuggcucaccaucggcaucagcggccccgacaacggggccguggccguccugaaguacaacggcaucaucaccgacaccaucaaguccuggcgcaacaacauccugcggacgcaggagagcgagugcgcgugcgugaacggguccugcuucaccgugaugaccgacggcccgagcgacggccaggccuccuacaagaucuuccgcaucgagaaggggaagaucgucaagagcguggagaugaacgcccccaacuaccacuacgaggagugcuccugcuaccccgacagcuccgagaucacgugcgugugccgggacaacuggcacggcagcaaccgccccugggucuccuucaaccagaaccucgaguaccagaucggguacaucugcagcggcaucuucggggacaacccgcggcccaacgacaagaccggcuccugcggccccgugagcuccaacggggccaacggcgugaagggguucagcuucaaguacggcaacggggucuggaucggccgcaccaagagcaucuccagccggaacggcuucgagaugaucugggaccccaacggguggaccggcaccgacaacaacuucuccaucaagcaggacaucguggggaucaacgaguggagcggcuacuccgggagcuucgugcagcacccggagcugacgggccuggacugcaucaagcccugcuucugggucgagcucauccgcggccggcccaaggagaacaccaucuggaccuccgggagcuccaucagcuucugcggcgugaacuccgacaccgucggguggagcuggcccgacggcgccgagcugccguucacgaucgacaaguga

SEQ ID NO: 90285 - RNA, 1410 nt, Artificial Sequence; identical to SEQ ID NO: 80752
  derived and/or modified CDS sequence (opt1) from neuraminidase__InfluenzaA__AEE69012

SEQ ID NO: 90286 - RNA, 1410 nt, Artificial Sequence; identical to SEQ ID NO: 80752
  derived and/or modified CDS sequence (opt1) from neuraminidase__InfluenzaA__EPI176609

SEQ ID NO: 90287 - RNA, 1410 nt, Artificial Sequence; identical to SEQ ID NO: 80752
  derived and/or modified CDS sequence (opt1) from neuraminidase__InfluenzaA__EPI176472

SEQ ID NO: 90288 - RNA, 1410 nt, Artificial Sequence
  derived and/or modified CDS sequence (opt1) from neuraminidase__InfluenzaA__EPI280340
augaaccccaaccagaagaucaucaccaucggcagcgugugcaucaccaucgggauggccaaccugauccuccagaucggcaacaucaucuccaucuggaucagccacuccauccagcuggggaaccagaaccagaucgagacgugcaaccagagcgucaucaccuacgagaacaacaccugggugaaccagaccuacgugaacaucuccaacacgaacuucgccgcgggccagagcgucguguccgugaagcuggccgggaacagcucccucugcccggucagcggcugggccaucuacuccaaggacaacagcauccgcaucggcuccaagggggacguguucgugauccgggagcccuucaucagcugcagcccccuggagugccgcaccuucuuccugacccagggcgcccuccugaacgacaagcacuccaacgggaccaucaaggaccggucccccuaccgcacgcugaugagcugcccgaucggcgagguccccucccccuacaacagccgguucgagagcguggccugguccgcgagcgccugccacgacgggaucuccuggcucaccaucggcaucagcggccccgacaacggggccguggccguccugaaguacaacggcaucaucaccgacaccaucaaguccuggcgcaacaacauccugcggacgcaggagagcgagugcgcgugcgugaacggguccugcuucaccgugaugaccgacggcccgagcgacggccaggccuccuacaagaucuuccgcaucgagaaggggaagaucgucaagagcguggagaugaacgcccccaacuaccacuacgaggagugcuccugcuaccccgacagcuccgagaucacgugcgugugccgggacaacuggcacggcagcaaccgccccugggucuccuucaaccagaaccucgaguaccagaucggguacaucugcagcggcaucuucggggacaacccgcggcccaacgacaagaccggcuccugcggccccgugagcuccaacggggccaacggcgugaagggguucagcuucaaguacggcaacggggucuggaucggccgcaccaagagcaucuccagccggaacggcuucgagaucaucugggaccccaacggguggaccggcaccgacaacaacuucuccaucaagcaggacaucguggggaucaacgaguggagcggcuacuccgggagcuucgugcagcacccggagcugacgggccuggacugcauccgccccugcuucugggucgagcucauccggggccgccccaaggagaacaccaucuggaccuccgggagcuccaucagcuucugcggcgugaacuccgacaccgucggguggagcuggcccgacggcgccgagcugccguucacgaucgacaaguga

SEQ ID NO: 90289 - RNA, 1410 nt, Artificial Sequence; identical to SEQ ID NO: 80752
  derived and/or modified CDS sequence (opt1) from neuraminidase__InfluenzaA__EPI240318

SEQ ID NO: 90290 - RNA, 1410 nt, Artificial Sequence; identical to SEQ ID NO: 80752
  derived and/or modified CDS sequence (opt1) from neuraminidase__InfluenzaA__EPI183133

SEQ ID NO: 90291 - RNA, 1410 nt, Artificial Sequence; identical to SEQ ID NO: 80752
  derived and/or modified CDS sequence (opt1) from neuraminidase__InfluenzaA__EPI369141

SEQ ID NO: 90292 - RNA, 1410 nt, Artificial Sequence
  derived and/or modified CDS sequence (opt1) from neuraminidase__InfluenzaA__EPI482787
augaacaccaaccagcgcaucaucaccaucggcacggugugccugaucgucgggaucgugagccuccugcugcagaucggcaacaucgugucccucuggaucagccacuccauccagaccgggaagcggagccaccccgagaccugcucccagaacgucaucaccuacgagaacaacacgugggugaaccagaccuacgugaacaucagcaacaccaacaucgucgacggccagggggugaccuccaucauccuggccggcaacagcccgcugugccccaucuccggcugggccaucuacagcaaggacaacuccauccgcaucgggagcaagggcgacaucuucgugauccgggagcccuucaucuccugcagccaccucgagugccgcacguucuuccugacccagggggcgcugcucaacgaccggcacuccaacggcaccgucaaggaccgcagccccuaccggacccugauguccugcccgaucggggaggcccccagccccuacaacucccgcuucgagagcguggccuggagcgccuccgccugccacgacggcaugggcuggcugacgaucgggaucagcggccccgacaacggggcgguggccguccucaaguacaacggcaucaucaccgacaccaucaaguccuggcggaacaagauccugcgcacccaggagagcgagugcgugugcaucaacggcuccugcuucacgaucaugaccgacgggccgagcaacggccaggccuccuacaagaucuucaagauggagaaggggaagaucaucaagagcguggagcuggacgcccccaacuaccacuacgaggagugcuccugcuaccccgacaccggcaaggucgugugcgugugccgggacaacuggcacgcgagcaaccgccccugggucaccuucgaccagaaccucaacuaccagaucggguacaucugcuccggcguguucggcgacaacccgcggagcaacgacgggaagggcaacugcgggcccgugcccuccaacggcgccaacggggucaagggcuucagcuuccgcuacggcaacgggguguggaucggccggacgaaguccaucagcucccgcagcggguucgagaugaucugggaccccaacggcuggaccgagaccgacuccagcuucagcaucaagcaggacaucaucgcccugaccgacugguccggguacagcggcuccuucgugcagcacccggagcugacgggcaugaacugcaucaagcccugcuucugggucgagcucauccgggggcagcccaaggagagcaccaucuggaccuccggcagcuccaucagcuucugcgggguggacuccgagaccgucagcugguccuggcccgacggcgccgaccugccguucacgaucgacaaguga

SEQ ID NO: 90293 - RNA, 1410 nt, Artificial Sequence
  derived and/or modified CDS sequence (opt1) from neuraminidase__InfluenzaA__EPI482790
augaacaccaaccagcgcaucaucaccaucggcacggugugccugaucgucgggaucaucagccuccugcugcagaucggcaacauggugucccucuggaucagccacuccauccagaccgggggcaagaaccacaccgagaugugcaaccagaacgugaucaccuacgucaacaacacgugggugaaccggaccuacgugaacaucagcaacaccaagaucgucaacgugcaggacguggucuccgugauccugaccgggaacagcucccugugccccaucagcggcugggccaucuacuccaaggacaacagcauccgcaucggcuccaagggggacaucuucgugauccgggagccguucaucagcugcucccaccucgagugccgcacguucuuccugacccagggcgcccugcucaacgacaagcacagcaacgggaccgucaaggaccggucccccuaccgcacccugaugagcugccccgugggcgaggcgcccuccccguacaacagccgguucgaguccguggccuggagcgccagcgccugccacgacgggaugggcuggcugacgaucggcaucuccgggcccgacaacggcgccgucgcggugcucaaguacaacgggaucaucaccgacaccaucaagagcuggcgcaacaagauccugcggacccaggaguccgagugcgugugcaugaacggcagcugcuucacgguccugaccgacggccccuccaacgggcaggccagcuacaagaucuucaagauggagaagggcaagaucaucaaguccaucgagcucgacgcccccaacuaccacuacgaggagugcagcugcuacccggacgccgggaaggugaugugcgugugccgcgacaacuggcacgcguccaaccggcccugggucagcuucgaccagaaccuggacuaccagaucggcuacaucugcuccgggguguucggcgacaacccccgcagcaacgacggcaaggggaacugcggccccgugcacuccaacggggccaacggcgucaagggguucagcuaccgguacggcaacggcguguggaucgggcgcaccaaguccaucaacagccgguccggcuucgagaugaucugggacccgaacggguggaccggcacggacagcuccuucagcaugaagcaggacaucaucgcccugaccgacuggagcggguacuccggcagcuucguccagcaccccgagcucaccggcaugaacugcauccgccccugcuucuggguggagcugauccgggggcagcccaaggagaacaccaucugggccuccggcagcuccaucagcuucugcggggugaacggcgagacggccuccuggagcuggccggacggcgcggaccugcccuucaccaucgacaaguga

SEQ ID NO: 90294 - RNA, 1410 nt, Artificial Sequence
  derived and/or modified CDS sequence (opt1) from neuraminidase__InfluenzaA__EPI291797
augaacaccaaccagcgcaucaucaccaucggcacggugugcaugaucgucgggaucaucagccugcuccugcagaucggcaacaucgugucccuguggaucagccacuccauccagaccgggugggagaaccacaccgagaugugcaaccagagcgugaucaccuacgucaacaacacgugggugaaccggaccuacgugaacaucuccaacaccaacaucgccaccauccaggacgucacgagcaucauccucgccggcaacuccagccugugccccguguccgggugggcgaucuacagcaaggacaacuccauccgcaucggcagcaagggcgacaucuucgugauccgggagccguucaucuccugcagccagcuggagugccgcaccuucuuccucacccagggggcccugcugaacgacaagcacuccaacggcaccgucaaggaccggagccccuaccgcacgcucauguccugccccaucggggaggcccccagcccguacaacucccgguucgagagcguggccuggagcgccuccgcgugccacgacggcaugggguggcugaccaucggcaucagcggccccgacaacggggccguggccguccugaaguacaacggcaucaucaccgacaccaucaaguccuggcgcaacaagauccuccggacgcaggagagcgagugcgugugcaugaacggguccugcuucaccgugcugaccgacggccccagcaacggccaggccuccuacaagaucuucaaggucgagaaggggaagaucaucaagagcaucgagcuggacgcgcccaacuaccacuacgaggagugcuccugcuacccggacaccggcaaggugaugugcgugugccgcgacaacuggcacgccagcaaccggcccugggucuccuucaaccagaaccucgacuaccagaucggguacaucugcagcggcguguucggggacaacccccgcuccaacgacggcaagggcaacugcgggcccgugcugagcaacggcgccaacggggucaagggcuucuccuaccgguacgggaacggcguguggaucggccgcaccaagagcaucaacucccggagcggguucgagaugaucugggacccgaacggcuggacggagaccgacuccagcuucagcaugaagcaggacaucaucgcccugaccgacugguccggguacagcggcuccuucgugcagcaccccgagcucacggggaugaacugcauccgccccugcuucugggucgagcugauccggggccagcccaaggagagcaccaucugggccuccggcagcuccaucagcuucugcggggugaacuccgagaccgcgagcugguccuggccggacggcgccgaccugcccuucaccaucgacaaguga

SEQ ID NO: 90295 - RNA, 1410 nt, Artificial Sequence; identical to SEQ ID NO: 90294
  derived and/or modified CDS sequence (opt1) from neuraminidase__InfluenzaA__EPI482798

SEQ ID NO: 90296 - RNA, 1410 nt, Artificial Sequence
  derived and/or modified CDS sequence (opt1) from neuraminidase__InfluenzaA__EPI638969
augaacaccaaccagcgcaucaucaccaucggcacggugugcaugaucgucgggaugaucagccugcuccugcagaucggcuccaucgugagccuguggaucucccacagcauccagaccgggugggagaaccacaccggcgugugcaaccaguccgucaucaccuacgugaacaacacgugggugaaccggaccuacgucaacaucagcaacaucaagaucgccaccauccaggacgugacccccaucauccucgccgggaacuccagccugugcccggugaacggcugggcggucuacuccaaggacaacagcauccgcaucggcuccaagggggacaucuucgugauccgggagcccuucaucagcugcucccagcuggagugccgcacguucuuccucacccagggcgcccugcugaacgacaagcacagcaacgggaccgugaaggaccggucccccuaccgcacccucaugagcugccccaucggcgaggccccgucccccuacaacagccgguucgaguccgucgccuggagcgccagcgcgugccacgacgggaugggcuggcugacgaucggcaucuccgggcccgacaacggcgccguggccgugcugaaguacaacgggaucaucaccgacaccaucaagagcuggcgcaacaagauccuccggacccaggaguccgagugcgucugcaugaacggcagcugcuucacggugcugaccgacggccccuccaacgggcaggccagcuacaagaucuucaagguggagaagggcaagaucaucaaguccaucgagcuggacgcgccgaacuaccacuacgaggagugcagcugcuaccccgacaccgggaaggucaugugcgugugccgcgacaacuggcacgccuccaaccggcccugggugagcuucaaccagaaccucgacuaccagaucggcuacaucugcuccggggucuucggcgacaacccccgcagcaccgacggcaaggggaacugcggcccggugcuguccaacggggccaacggcgugaagggguucagcuaccgguacggcaacggcgucuggaucgggcgcacgaaguccaucaacagccgguccggcuucgagaugaucugggaccccaacggguggaccgagaccgacagcuccuucagcaugaagcaggacaucaucgcccugaacgacuacagcggcuacuccgggagcuucgugcagcaccccgagcucaccggcaugaacugcauccgccccugcuucugggucgagcugauccggggccagccgaaggaguccacgaucugggccagcggguccagcaucuccuucugcggcgugaacagcgagaccgcguccuggagcuggcccgacggggccgaccugcccuucgccaucgacaaguga

SEQ ID NO: 90297 - RNA, 1410 nt, Artificial Sequence
  derived and/or modified CDS sequence (opt1) from neuraminidase__InfluenzaA__ABI19012
augaacaccaaccagcgcaucaucaccaucggcacggugugccugaucgucgggaucaucagccuccugcugcagaucggcaacauggugucccucuggaucagccacuccauccagaccgggggcaagaaccacaccgagaugugcaaccagaacgugaucaccuacgucaacaacacgugggugaaccggaccuacgugaacaucagcaacaccaagaucgucaacgugcaggacguggucuccgugauccugaccgggaacagcucccugugccccaucagcggcugggccaucuacuccaaggacaacagcauccgcaucggcuccaagggggacaucuucgugauccgggagccguucaucagcugcucccaccucgagugccgcacguucuuccugacccagggcgcccugcucaacgacaagcacagcaacgggaccgucaaggaccggucccccuaccgcacccugaugagcugccccaucggcgaggcgcccuccccguacaacagccgguucgaguccguggccuggagcgccagcgccugccacgacgggaugggcuggcugacgaucggcaucuccgggcccgacaacggcgccguggcgguccucaaguacaacgggaucaucaccgacaccaucaagagcuggcgcaacaagauccugcggacccaggaguccgagugcgugugcaugaacggcagcugcuucacggugcugaccgacggccccuccaacgggcaggccagcuacaagaucuucaagauggagaagggcaagaucaucaaguccaucgagcucgacgcccccaacuaccacuacgaggagugcagcugcuacccggacgccgggaaggucaugugcgugugccgcgacaacuggcacgcguccaaccggcccugggugagcuucgaccagaaccuggacuaccagaucggcuacaucugcuccggggucuucggcgacaacccccgcagcaacgacggcaaggggaacugcggccccgugcacuccaacggggccaacggcgugaagggguucagcuaccgguacggcaacggcgucuggaucgggcgcaccaaguccaucaacagccgguccggcuucgagaugaucugggacccgaacggguggaccggcacggacagcuccuucagcaugaagcaggacaucaucgcccugaccgacuggagcggguacuccggcagcuucgugcgccaccccgagcucaccggcaugaacugcauccggcccugcuucugggucgagcugauccgcgggcagcccaaggagaacaccaucugggccuccggcagcuccaucagcuucugcggggugaacggcgagacggccuccuggagcuggccggacggcgcggaccugcccuucaccaucgacaaguga

SEQ ID NO: 90298 - RNA, 1410 nt, Artificial Sequence
  derived and/or modified CDS sequence (opt1) from neuraminidase__InfluenzaA__EPI687791
augaaccccaaccagaagaucaucaccaucggcagcaucugcaugaccaucgggauggccaaccugauccuccagaucggcaacaucaucuccaucugggugagccacuccauccagaucgggaaccagagccagaucgagacgugcaaccaguccgucaucaccuacgagaacaacaccugggugaaccagaccuacgugaacaucagcaacacgaacuucgccgcgcgccaguccgucgugagcgugaagcuggccggcaacuccagccugugcccggucuccgggugggccaucuacagcaaggacaacuccgugcggaucggcagcaagggcgacguguucgucauccgcgagcccuucaucuccugcagcccccucgagugccggaccuucuuccugacccagggggcccugcucaacgacaagcacuccaacggcaccaucaaggaccgcagccccuaccggacgcugauguccugcccgaucggggaggugcccagccccuacaacagccgcuucgaguccguggccuggagcgcguccgccugccacgacggcaucaacuggcugaccaucgggaucagcggccccgacuccggcgccgucgccgugcucaaguacaacgggaucaucaccgacaccaucaagagcuggcggaacaacauccugcgcacgcaggaguccgagugcgcgugcgugaacggcagcugcuucaccaucaugaccgacgggccguccgacggccaggccagcuacaagaucuuccggaucgagaagggcaagaucaucaaguccgucgagaugaaggcccccaacuaccacuacgaggagugcagcugcuaccccgacuccagcgagaucacgugcgugugccgcgacaacuggcacggguccaaccggcccugggugagcuucaaccagaaccuggaguaccagaugggcuacaucugcuccggggucuucggcgacaacccgcgccccaacgacaagaccgggagcugcggccccguguccagcaacggcgccaacggggugaagggcuucagcuucaaguacgggaacggcgucuggaucgggcggaccaaguccaucagcucccgcaagggcuucgagaugaucugggaccccaacggcuggaccgggaccgacaacaaguucagcaucaagcaggacaucgugggcaucaacgagugguccggguacagcggcuccuucgugcagcacccggagcucacggggcuggacugcauccggcccugcuucugggucgagcugauccgcggccggcccgaggagaacaccaucuggaccagcggcuccagcaucuccuucugcggggugaacagcgacaccgucggcugguccuggcccgacggggccgagcucccguucacgaucgacaaguga

SEQ ID NO: 90299 - RNA, 1410 nt, Artificial Sequence
  derived and/or modified CDS sequence (opt1) from neuraminidase__InfluenzaA__EPI841266
augaaccccaaccagaagaucaucaccaucggcagcaucugcaugaccaucgggauggccaaccugauccuccagaucggcaacaucaucuccaucugggugagccacuccauccagaucgggaaccagagccagaucgagacgugcaaccaguccgucaucaccuacgagaacaacaccugggugaaccagaccuacgugaacaucagcaacacgaacuucgccgcgcgccaguccgucgugagcgugaagcuggccggcaacuccagccugugcccggucuccgggugggccaucuacagcaaggacaacuccgugcggaucggcagcaagggcgacguguucgucauccgcgagcccuucaucuccugcagcccccucgagugccggaccuucuuccugacccagggggcccugcucaacgacaagcacuccaacggcaccaucaaggaccgcagccccuaccggacgcugauguccugcccgaucggggaggugcccagccccuacaacagccgcuucgaguccguggccuggagcgcguccgccugccacgacggcaucaacuggcugaccaucgggaucagcggccccgacuccggcgccgucgccgugcucaaguacaacgggaucaucaccgacaccaucaagagcuggcggaacaacauccugcgcacgcaggaguccgagugcgcgugcgugaacggcagcugcuucaccaucaugaccgacgggccguccgacggccaggccagcuacaagaucuuccggaucgaggagggcaagaucaucaaguccgucgagaugaaggcccccaacuaccacuacgaggagugcagcugcuaccccgacuccagcgagaucacgugcgugugccgcgacaacuggcacggguccaaccggcccugggugagcuucaaccagaaccuggaguaccagaugggcuacaucugcuccggggucuucggcgacaacccgcgccccaacgacaagaccgggagcugcggccccguguccagcaacggcgccaacggggugaagggcuucagcuucaaguacgggaacggcgucuggaucgggcggaccaaguccaucagcucccgcaagggcuucgagaugaucugggaccccaacggcuggaccgggaccgacaacaaguucagcaucaagcaggacaucgugggcaucaacgagugguccggguacagcggcuccuucgugcagcacccggagcucacggggcuggacugcauccggcccugcuucugggucgagcugauccgcggccggcccgaggagaacaccaucuggaccagcggcuccagcaucuccuucugcggggugaacagcgacaccgucggcugguccuggcccgacggggccgagcucccguucacgaucgacaaguga

SEQ ID NO: 90300 - RNA, 1410 nt, Artificial Sequence
  derived and/or modified CDS sequence (opt1) from neuraminidase__InfluenzaA__EPI291844
augaacaccaaccagcgcaucaucaccaucggcacggugugccugaucgucgggaucaucagccuccugcugcagaucggcaccauggugucccucuggaucagccacuccauccagaccgggggcaagaaccacaccgagaugugcaaccagaacgugaucacguacgucaacaacaccugggugaaccggaccuacgugaacaucagcaacaccaagaucgucaacgugcaggacguggucuccgugauccugacggggaacagcucccugugccccaucagcggcugggccaucuacuccaaggacaacagcauccgcaucggcuccaagggggacaucuucgugauccgggagccguucaucagcugcucccaccucgagugccgcaccuucuuccugacccagggcgcccugcucaacgacaagcacagcaacgggaccgucaaggaccggucccccuaccgcacgcugaugagcugccccaucggcgaggcgcccuccccguacaacagccgguucgaguccguggccuggagcgccagcgccugccacgacgggaugggcuggcugaccaucggcaucuccgggcccgacaacggcgccguggcgguccucaaguacaacgggaucaucaccgacaccaucaagagcuggcgcaacaagauccugcggacgcaggaguccgagugcgugugcaugaacggcagcugcuucaccgugcugaccgacggccccuccaacgggcaggccagcuacaagaucuucaagauggagaagggcaagaucaucaaguccaucgagcucgacgcccccaacuaccacuacgaggagugcagcugcuacccggacgccgggaaggucaugugcgugugccgcgacaacuggcacgcguccaaccggcccugggugagcuucgaccagaaccuggacuaccagaucggcuacaucugcuccggggucuucggcgacaacccccgcagcaacgacggcaaggggaacugcggccccgugcacuccaacggggccaacggcgugaagggguucagcuacaaguacggcaacggcgucuggaucgggcggaccaaguccaucaacagccgcuccggcuucgagaugaucugggacccgaacggguggacgggcaccgacagcuccuucagcaugaagcaggacaucaucgcccugaccgacuggagcggguacuccggcagcuucgugcagcaccccgagcucaccggcaugaacugcauccggcccugcuucugggucgagcugauccgcgggcagcccaaggagaacacgaucugggccuccggcagcuccaucagcuucugcggggugaacggcgagaccgccuccuggagcuggccggacggcgcggaccugcccuucaccaucgacaaguga

SEQ ID NO: 90301 - RNA, 1410 nt, Artificial Sequence
  derived and/or modified CDS sequence (opt1) from neuraminidase__InfluenzaA__EPI558120
augaacaccaaccagcgcaucaucaccaucggcacggugugcaugaucgucgggaucaucagccugcuccugcagaucggcaacaucgugucccuguggaucagccacuccauccagaccgggugggagaaccacaccgagaugugcaaccagagcgugaucaccuacgucaacaacacguggaugaaccggaccuacgugaacaucuccaacaucaagaucgccaccauccaggacgugaccagcaucguccucgccggcaacuccagccugugccccguguccgggugggcgguguacagcaaggacaacuccauccgcaucggcagcaagggcgacaucuucgucauccgggagccguucaucuccugcagccagcuggagugccgcacguucuuccucacccagggggcccugcugaacgacaagcacuccaacggcaccgugaaggaccggagccccuaccgcacccucauguccugccccaucggggaggcccccagcccguacaacucccgguucgagagcguggccuggagcgccuccgcgugccacgacggcaugggguggcugacgaucggcaucagcggccccgacaacggggccgucgccgugcugaaguacaacggcaucaucaccgacaccaucaaguccuggcgcaacaagauccuccggacccaggagagcgagugcgugugcaucaacggguccugcuucacgguccugaccgacggccccagcaacggccaggccuccuacaagaucuucaagguggagaaggggaagaucaucaagagcaucgagcuggacgcgcccaacuaccacuacgaggagugcuccugcuacccggacaccggcaaggugaugugcaucugccgcgacaacuggcacgccagcaaccggcccugggucuccuucgaccagaaccucgacuaccagaucggguacaucugcagcggcguguucggggacaacccccgcuccaacgacggcaagggcaacugcgggcccgugcugagcaacggcgccaacggggucaagggcuucuccuaccgguacgggaacggcguguggaucggccgcaccaagagcaucaacucccggagcggguucgagaugaucugggacccgaacggcuggacggagaccgacuccagcuucagcaugaagcaggacaucaucgcccugaacgacugguccggguacagcggcuccuucgugcagcaccccgagcucaccgggaugaacugcauccgccccugcuucugggucgagcugauccggggccagcccaaggagagcaccaucugggccuccggcagcuccaucagcuucugcggggugaacuccgagacggcgagcugguccuggccggacggcgccgaccugcccuucaccaucgacaaguga

SEQ ID NO: 90302 - RNA, 1410 nt, Artificial Sequence
  derived and/or modified CDS sequence (opt1) from neuraminidase__InfluenzaA__EPI564138
augaaccccaaccagaagaucaucaccaucggcagcgugucccugaccaucagcacgaucugcuucuucaugcagaucgccauccucaucaccaccgucacccugcacuucaagcaguacgaguucaacuccccgcccaacaaccaggugaugcugugcgagcccacgaucaucgagcgcaacaucaccgagaucguguaccucaccaacaccacgaucgagaaggagaucugccccaagccggccgaguaccggaacuggagcaagccccagugcgggaucaccggcuucgcgcccuucuccaaggacaacagcauccgccuguccgccgggggcgacaucugggucacccgggagcccuacgugagcugcgacccggacaagugcuaccaguucgcccuggggcagggcaccacgcucaacaacgugcacuccaacaacaccguccgcgaccggacccccuaccgcacccugcugaugaacgagcucggcgugcccuuccaccuggggacgaagcaggucugcaucgccuggagcuccagcuccugccacgacggcaaggccuggcugcacgugugcaucaccggggacgacaagaacgcgaccgccagcuucaucuacaacggccggcucguggacuccguggucagcugguccaaggacauccugcgcacccaggagagcgagugcgugugcaucaacgggacgugcaccguggucaugaccgacggcuccgccagcggcaaggccgacaccaagauccuguucaucgaggaggggaagaucgugcacacgagcaagcucuccggcagcgcgcagcacguggaggagugcuccugcuacccccgguacccggggguccgcugcgugugccgggacaacuggaagggcagcaaccgccccaucguggacaucaacaucaaggaccacuccaucgucagcuccuacgugugcagcggccuggugggggacaccccgcggaagaacgacuccagcuccagcucccacugccuggaccccaacaacgaggagggcgggcacggcgucaaggggugggccuucgacgacggcaacgacguguggaugggccgcaccaucaacgagaccagccggcucggguacgagacguucaaggucguggagggcugguccaaccccaagagcaagcugcagaucaaccgccaggugaucgucgaccgcggggaccgguccggcuacagcgggaucuucuccguggagggcaagagcugcaucaaccggugcuucuacguggagcugauccgcggccggaaggaggagaccgagguccucuggaccagcaacuccaucgugguguucugcgggaccagcggcacguacgggaccggcuccuggcccgacggggccgaccugaaccugaugcccaucuga

SEQ ID NO: 90303 - RNA, 1410 nt, Artificial Sequence
  derived and/or modified CDS sequence (opt1) from neuraminidase__InfluenzaA__ANM92825
augaaccccaaccagaagaucaucaccaucggcagcaucugcaugaccaucgggauggccaaccugauccuccagaucggcaacaucaucuccaucugggugagccacuccauccagaucgggaaccagagccagaucgagacgugcaaccaguccgucaucaccuacgagaacaacaccugggugaaccagaccuacgugaacaucagcaacacgaacuucgccgcgggccaguccgucgugagcgugaagcuggccgggaacuccagccugugcccggucuccggcugggccaucuacagcaaggacaacuccgugcgcaucggcagcaagggggacguguucgucauccgggagcccuucaucuccugcagcccccucgagugccgcaccuucuuccugacccagggcgcccugcucaacgacaagcacuccaacgggaccaucaaggaccggagccccuaccgcacgcugauguccugcccgaucggcgaggugcccagccccuacaacagccgguucgaguccguggccuggagcgcguccgccugccacgacgggaucaacuggcugaccaucggcaucagcggccccgacuccggggccgucgccgugcucaaguacaacggcaucaucaccgacaccaucaagagcuggcgcaacaacauccugcggacgcaggaguccgagugcgcgugcgugaacgggagcugcuucaccaucaugaccgacggcccguccgacggccaggccagcuacaagaucuuccgcaucgagaaggggaagaucaucaaguccgucgagaugaaggcccccaacuaccacuacgaggagugcagcugcuaccccgacuccagcgagaucacgugcgugugccgggacaacuggcacggcuccaaccgccccugggugagcuucaaccagaaccuggaguaccagaugggguacaucugcuccggcgucuucggggacaacccgcggcccaacgacaagaccggcaacugcggccccgugagcuccaacggggccaacggcgugaagggguucagcuucaaguacggcaacggggucuggaucggccgcaccaagagcaucuccagccggaagggcuucgagaugaucugggaccccaacggguggaccggcaccgacaacaaguucuccaucaagcaggacaucguggggaucaacgaguggagcggcuacuccgggagcuucgugcagcacccggagcucacgggccuggacugcauccgccccugcuucugggucgagcugauccggggccgccccgaggagaacaccaucuggaccuccgggagcuccaucagcuucugcggcgugaacuccgacaccgucggguggagcuggcccgacggcgccgagcucccguucacgaucgacaaguga

SEQ ID NO: 90304 - RNA, 1410 nt, Artificial Sequence
  derived and/or modified CDS sequence (opt1) from neuraminidase__InfluenzaA__EPI291694
augaacaccaaccagcgcaucaucaccaucggcacggugugccugaucgucgggaucgugagccuccugcugcagaucggcaacaucgugucccucuggaucagccacuccauccagaccggggagaagaaccacagcgaggucugcaaccagaacaucaucaccuacgagaacaagaccugggugaaccagacguacgugaacaucuccaacaccaacaucgccgagggccagggggucaccagcaucauccuggccggcaacuccagccugugccccguguccggcugggcgaucuacagcaaggacaacuccauccggaucgggagcaagggcgacaucuucgugauccgcgagccguucaucuccugcagccaccucgagugccggaccuucuuccugacgcagggggcccugcucaacgaccgccacuccaacggcaccgucaaggaccggagccccuaccgcacccugauguccugccugaccggggaggcccccagccccuacaacucccgguucgagagcguggccuggagcgccuccgcgugccacgacggcaugggcuggcucacgaucgggaucagcggcccggacaacggggccguggccguccugaaguacaacggcaucaucaccgacaccaucaaguccuggcgcaacaagauccugcggacccaggagagcgagugcgugugcaucaacggcuccugcuucacgaucaugaccgacgggcccagcaacggccaggccuccuacaagaucuucaagauggagaaggggaagaucaucaagagcguggagcucgacgcgcccaacuaccacuacgaggagugcuccugcuaccccgacaccggcaaggucgugugcgugugccgcgacaacuggcacgccagcaaccggccgugggucuccuucgaccagaaccuggacuaccagaucggguacaucugcagcggcguguucggcgacaacccccgcuccaacgacgggaagggcaacugcgggcccgugcccagcaacggcgccaacggggucaagggcuucuccuuccgguacggcaacgggguguggaucggccgcaccaagagcaucaucucccggagcggguucgagaugaucugggacccgaacggcuggacggagaccgacuccagcuucagcaucaagcaggacaucaucgcccugaccgacugguccggguacagcggcuccuucgugcagcaccccgagcucaccggcaugaacugcauccgccccugcuucugggucgagcugauccgggggcagcccaaggagagcacgaucuggaccuccggcagcuccaucagcuucugcgggguggacuccgagaccgccagcugguccuggccggacggcgcggaccugcccuucaccaucgacaaguga

SEQ ID NO: 90305 - RNA, 1410 nt, Artificial Sequence; identical to SEQ ID NO: 81238
  derived and/or modified CDS sequence (opt1) from neuraminidase__InfluenzaA__EPI241027

SEQ ID NO: 90306 - RNA, 1410 nt, Artificial Sequence; identical to SEQ ID NO: 80762
  derived and/or modified CDS sequence (opt1) from neuraminidase__InfluenzaA__EPI177405

SEQ ID NO: 90307 - RNA, 1410 nt, Artificial Sequence; identical to SEQ ID NO: 80762
  derived and/or modified CDS sequence (opt1) from neuraminidase__InfluenzaA__EPI242475

SEQ ID NO: 90308 - RNA, 1410 nt, Artificial Sequence
  derived and/or modified CDS sequence (opt1) from neuraminidase__InfluenzaA__EPI590131
augaacgccaaccagcgcaucaucaccaucggcaccgugugccugaucaucgggaucaucagccuccugcugcagaucggcaacauggucucccucuggaucagccacuccauccagaccgggggcaagaaccacacggagaugugcaaccagaacgugaucaccuacgugaacaacaccugggucaaccggacguacgugaacaucagcaacaccaagaucgugaacguccaggacgugguguccgucauccugaccgggaacagcucccugugcagcaucuccggcugggccaucuacagcaaggacaacuccauccgcaucggcagcaagggggacaucuucgugauccgggagcccuucaucuccugcagccaccucgagugccgcaccuucuuccugacgcagggcgcgcugcucaacgacaagcacuccaacgggaccgugaaggaccggagcccguaccgcacccugauguccugccccaucggcgaggcccccagccccuacaacucccgguucgagagcgucgccuggagcgccuccgccugccacgacgggaucggcuggcugaccaucggcaucagcgggccggacaacggcgcgguggccgugcucaaguacaacgggaucaucacggacaccaucaaguccuggcgcaacaagauccugcggacccaggagagcgagugcgucugcaugaacggcuccugcuucgccgugcugaccgacggccccagcaacgggcaggccuccuacaagaucuucaaggugaagcagggcaagaucaucaagagcaucgagcucgacgcgcccaacuaccacuacgaggagugcuccugcuaccccgacgccgggaaggucaugugcgugugccgcgacaacuggcacgccagcaaccggccguggguguccuucgaccaggaccugaacuaccagaucggcuacaucugcagcggggucuucggcgacaacccccgcuccaacgacggcaaggggaacugcggccccgugcacagcaacggggccaacggcgugaagggguucuccuaccgguacggcaacggcgucuggaucgggcgcaccaagagcauccacucccggagcggcuucgagaugaucugggaccccaacggguggacgggcaccgacuccagcuucagcaugaagcaggacaucaucgcccugaccgacugguccggguacagcggcuccuucgugcagcacccggagcucacgggcaugaacugcauccgccccugcuucugggucgagcugauccgggggcagcccaaggagaacaccaucugggcgagcggcuccagcaucuccuucugcggggugaacggcgagaccgccagcugguccuggcccgacggcgccgaccugccguucaccaucgacaaguga

SEQ ID NO: 90309 - RNA, 1410 nt, Artificial Sequence
  derived and/or modified CDS sequence (opt1) from neuraminidase__InfluenzaA__EPI68596
augaacaccaaccagcgcaucaucaccaucggcacggugugccugaucgucgggaucgugagccuccugcugcagaucggcaacaucgugucccucuggaucagccacuccauccagaccggggagaagaaccacagcgagaucugcucccagaacgucaucaccuacgagaacaacaccugggugaaccagacguacgugaacaucagcaacaccaacaucgccgacggccagggggucaccuccaucauccuggccggcaacagcucccugugccccaucagcggcugggcgaucuacuccaaggacaacagcauccggaucggguccaagggcgacaucuucgugauccgcgagccguucaucagcugcucccaccucgagugccggaccuucuuccugacgcagggggcccugcucaacgaccgccacagcaacggcaccgugaaggaccggucccccuaccgcacccugaugagcugccccaucggggaggcccccuccccguacaacagccgguucgagagcgucgccugguccgccagcgcgugccacgacggcaugggcuggcugaccaucgggaucuccggccccgacaacggggccguggccgugcucaaguacaacggcaucaucacggacaccaucaagagcuggcgcaacaagauccugcggacccaggaguccgagugcgucugcaucaacggcagcugcuucaccaucaugacggacgggcccuccaacggccaggccagcuacaagaucuucaagauggagaaggggaagaucaucaaguccguggagcuggacgcgcccaacuaccacuacgaggagugcagcugcuacccggacaccggcaagguggucugcgugugccgcgacaacuggcacgccuccaaccggcccugggugagcuucgaccagaaccucgacuaccagaucggguacaucugcuccggcgucuucggcgacaacccccgcagcaacgacgggaagggcaacugcgggcccgugcuguccaacggcgccaacggggugaagggcuucagcuuccgguacggcaacggggucuggaucggccgcaccaaguccaucagcucccggagcggguucgagaugaucugggacccgaacggcuggaccgagacggacagcuccuucagcaucaagcaggacaucaucgcccugaccgacugguccggguacagcggcuccuucgugcagcaccccgagcucaccggcaugaacugcauccgccccugcuucuggguggagcugauccgggggcagcccaaggagagcaccaucuggacguccggcagcuccaucagcuucugcggggucgacuccgagaccgccagcugguccuggccggacggcgcggaccugcccuucaccaucgacaaguga

SEQ ID NO: 90310 - RNA, 1365 nt, Artificial Sequence; identical to SEQ ID NO: 79743
  derived and/or modified CDS sequence (opt1) from neuraminidase__InfluenzaA__EPI115409

SEQ ID NO: 90311 - RNA, 1365 nt, Artificial Sequence; identical to SEQ ID NO: 79743
  derived and/or modified CDS sequence (opt1) from neuraminidase__InfluenzaA__ABD77678/m1

SEQ ID NO: 90312 - RNA, 1410 nt, Artificial Sequence; identical to SEQ ID NO: 80752
  derived and/or modified CDS sequence (opt1) from neuraminidase__InfluenzaA__EPI185224

SEQ ID NO: 90313 - RNA, 1410 nt, Artificial Sequence; identical to SEQ ID NO: 90268
  derived and/or modified CDS sequence (opt1) from neuraminidase__InfluenzaA__EPI697745

SEQ ID NO: 90314 - RNA, 1410 nt, Artificial Sequence; identical to SEQ ID NO: 90268
  derived and/or modified CDS sequence (opt1) from neuraminidase__InfluenzaA__EPI768524

SEQ ID NO: 90315 - RNA, 1410 nt, Artificial Sequence
  derived and/or modified CDS sequence (opt1) from neuraminidase__InfluenzaA__EPI726929
augaaccccaaccagaagaucaucaccaucggcagcaucuccaugaccaucgggauggccaaccugauccuccagaucggcaacaucaucagcaucugggugucccacagcauccagaucgggaaccagucccagaucgagacgugcaaccagagcgucaucaccuacgagaacaacaccugggugaaccagaccuacgugaacaucuccaacacgaacuucgccgcgggccagagcgucguguccgugaagcuggccgggaacagcucccugugcccggucagcggcugggccaucuacuccaaggacaacagcgugcgcaucggcuccaagggggacguguucgucauccgggagcccuucaucagcugcagcccccucgagugccgcaccuucuuccugacccagggcgcccugcucaacgacaagcacuccaacgggaccaucaaggaccggucccccuaccgcacgcugaugagcugcccgaucggcgaggugcccagccccuacaacucccgguucgagagcguggccugguccgcgagcgccugccacgacgggaucaacuggcugaccaucggcaucuccggccccgacagcggggccgucgccgugcucaaguacaacggcaucaucaccgacaccaucaaguccuggcgcaacaacauccugcggacgcaggagagcgagugcgcgugcgugaacggguccugcuucaccaucaugaccgacggcccgagcgacggccaggccuccuacaagaucuuccgcaucgagaaggggaagaucaucaagagcgucgagaugaaggcccccaacuaccacuacgaggagugcuccugcuaccccgacagcuccgagaucacgugcgugugccgggacaacuggcacggcagcaaccgccccuggguguccuucaaccagaaccuggaguaccagaugggguacaucugcagcggcgucuucggggacaacccgcggcccaacgacaagaccggcuccugcggccccgugagcagcaacggggccaacggcgugaagggguucuccuucaaguacggcaacggggucuggaucggccgcaccaagagcaucuccagccggaagggcuucgagaugaucugggaccccaacggguggaccggcaccgacaacaaguucuccaucaagcaggacaucguggggaucaacgaguggagcggcuacuccgggagcuucgugcagcacccggagcucacgggccuggacugcauccgccccugcuucugggucgagcugauccggggccgccccgaggagaacaccaucuggaccuccgggagcuccaucagcuucugcggcgugaacuccgacaccgucggguggagcuggcccgacggcgccgagcucccguucacgaucgacaaguga

SEQ ID NO: 90316 - RNA, 1410 nt, Artificial Sequence; identical to SEQ ID NO: 90315
  derived and/or modified CDS sequence (opt1) from neuraminidase__InfluenzaA__EPI813816

SEQ ID NO: 90317 - RNA, 1410 nt, Artificial Sequence
  derived and/or modified CDS sequence (opt1) from neuraminidase__InfluenzaA__EPI466627
augaaccccaaccagaagaucaucaccaucggcagcgugugcaugaccaucgggauggccaaccugauccuccagaucggcaacaucaucuccaucugggucagccacuccauccagcuggggaaccagagccagaucgagacgugcaaccaguccgugaucaccuacgagaacaacaccugggugaaccagaccuacgucaacaucagcaacacgaacuucgccgcgggccaguccguggugagcgucaagcuggccgggaacuccagccucugcccgguguccggcugggccaucuacagcaaggacaacuccgugcgcaucggcagcaagggggacgucuucgugauccgggagcccuucaucuccugcagcccccuggagugccgcaccuucuuccugacccagggcgcccuccugaacgacaagcacuccaacgggaccaucaaggaccggagccccuaccgcacgcugauguccugcccgaucggcgaggugcccagccccuacaacagccgguucgaguccgucgccuggagcgcguccgccugccacgacgggaucaacuggcucaccaucggcaucagcggccccgacuccggggccguggccgugcugaaguacaacggcaucaucaccgacaccaucaagagcuggcgcaacaacauccugcggacgcaggaguccgagugcgcgugcgucaacgggagcugcuucaccaucaugaccgacggcccguccgacggccaggccagcuacaagaucuuccgcaucgagaaggggaagaucgugaaguccguggagaugaacgcccccaacuaccacuacgaggagugcagcugcuaccccgacuccagcgagaucacgugcgucugccgggacaacuggcacggcuccaaccgccccugggugagcuucaaccagaaccucgaguaccagaucggguacaucugcuccggcguguucggggacaacccgcggcccaacgacaagaccggcagcugcggccccgucuccagcaacggggccaacggcgugaagggguucagcuucaaguacggcaacgggguguggaucggccgcaccaaguccaucagcucccggaagggcuucgagaugaucugggaccccaacggguggaccggcaccgacaacaacuucagcaucaagcaggacaucgucgggaucaacgagugguccggcuacagcggguccuucgugcagcacccggagcugacgggccuggacugcauccgccccugcuucugggucgagcucauccggggccgccccgaggagaacaccaucuggaccagcggguccagcaucuccuucugcggcgugaacagcgacaccguggggugguccuggcccgacggcgccgagcugccguucacgaucgacaaguga

SEQ ID NO: 90318 - RNA, 1410 nt, Artificial Sequence
  derived and/or modified CDS sequence (opt1) from neuraminidase__InfluenzaA__EPI541965
augaaccccaaccagaagaucaucaccaucggcagcgugugcaugaccaucgggauggccaaccugauccuccagaucggcaacaucaucuccaucugggucagccacuccauccagcuggggaaccagagccagaucgagacgugcaaccaguccgugaucaccuacgagaacaacaccugggugaaccagaccuacgucaacaucagcaacacgaacuucgccgcgggccagccggugguguccgucaagcuggccgggaacagcucccucugccccgugagcggcugggccaucuacuccaaggacaacagcgugcgcaucggcuccaagggggacgucuucgugauccgggagcccuucaucagcugcagcccccuggagugccgcaccuucuuccuggcccagggcgcccuccugaacgacaagcacagcaacgggaccaucaaggaccgguccccguaccgcacccugaugagcugccccaucggcgaggugcccucccccuacaacagccgguucgagagcgucgcgugguccgccagcgccugccacgacgggaucaacuggcucacgaucggcaucuccggcccggacagcggggccguggcggugcugaaguacaacggcaucaucaccgacaccaucaaguccuggcgcaacaacauccugcggacccaggagagcgagugcgccugcgucaacggguccugcuucacgaucaugaccgacggccccagcgacggccaggccuccuacaagaucuuccgcaucgagaaggggaagaucgugaaguccguggagaugaacgcccccaacuaccacuacgaggagugcuccugcuaccccgacagcuccgagaucacgugcgucugccgggacaacuggcacggcagcaaccgcccguggguguccuucaaccagaaccucgaguaccagaucggguacaucugcagcggcguguucggggacaacccccggcccaacgacaagaccggcuccugcggccccgucagcuccaacggggccaacggcgugaagggguucagcuucaaguacggcaacgggguguggaucggccgcaccaagagcaucuccagccggaagggcuucgagaugaucugggacccgaacggguggaccggcaccgacaacaacuucuccaucaagcaggacaucgucgggaucaacgaguggagcggcuacuccgggagcuucgugcagcaccccgagcugaccggccuggacugcauccgccccugcuucugggucgagcucauccggggccgccccgaggagaacacgaucuggaccuccgggagcuccaucagcuucugcggcgugaacuccgacaccgugggguggagcuggccggacggcgcggagcugcccuucaccaucgacaaguga

SEQ ID NO: 90319 - RNA, 1410 nt, Artificial Sequence
  derived and/or modified CDS sequence (opt1) from neuraminidase__InfluenzaA__EPI652004
augaaccccaaccagaagaucaucaccaucggcagcgugugcaugaccaucgggauggccaaccugauccuccagaucggcaacaucaucuccaucugggucagccacuccauccagaucgggaaccagagccagaucgagacgugcaaccaguccgugaucaccuacgagaacaacaccugggugaaccagaccuacgucaacaucagcaacacgaacuucgccgcgggccaguccguggugagcgucaagcuggccgggaacuccagccugugcccgguguccggcugggccaucuacagcaaggacaacuccgugcgcaucggcagcaagggggacgucuucgugauccgggagcccuucaucuccugcagcccccucgagugccgcaccuucuuccuggcccagggcgcccugcucaacgacaagcacuccaacgggaccaucaaggaccggagccccuaccgcacccugauguccugcccgaucggcgaggugcccagccccuacaacagccgguucgaguccgucgcguggagcgccuccgccugccacgacgggaucaacuggcugacgaucggcaucagcggccccgacuccggggccguggcggugcucaaguacaacggcaucaucaccgacaccaucaagagcuggcgcaacaacauccugcggacccaggaguccgagugcgccugcgucaacgggagcugcuucacgaucaugaccgacggcccguccgacggccaggccagcuacaagaucuuccgcaucgagaaggggaagaucgugaaguccguggagaugaacgcccccaacuaccacuacgaggagugcagcugcuaccccgacuccagcgagaucacgugcgucugccgggacaacuggcacggcuccaaccgccccugggugagcuucaaccagaaccuggaguaccagaucggguacaucugcuccggcguguucggggacaacccgcggcccaacgacaagaccggcagcugcggccccgucuccagcaacggggccaacggcgugaagggguucagcuucaaguacggcaacgggguguggaucggccgcaccaaguccaucagcucccggaagggcuucgagaugaucugggaccccaacggguggaccggcaccgacaacaacuucagcaucaagcaggacaucgucgggaucaacgagugguccggcuacagcggguccuucgugcagcacccggagcucaccggccuggacugcauccgccccugcuucugggucgagcugauccggggccgccccgaggagaacacgaucuggaccagcggguccagcaucuccuucugcggcgugaacagcgacaccguggggugguccuggcccgacggcgcggagcucccguucaccaucgacaaguga

SEQ ID NO: 90320 - RNA, 1410 nt, Artificial Sequence
  derived and/or modified CDS sequence (opt1) from neuraminidase__InfluenzaA__EPI62526
augaacaccaaccagcgcaucaucaccaucggcacggugugccugaucgucgggaucgugagccuccugcugcagaucggcaacaucgugucccucuggaucagccacuccauccagaccggggagaagaaccaccccgagaucugcagccagaacgucaucaccuacgagaacaacaccugggugaaccagacguacgugaacaucuccaacaccaacaucgucgacggccagggggugaccagcaucauccuggccggcaacuccagccugugcccgaucuccggcugggccaucuacagcaaggacaacuccauccggaucgggagcaagggcgacaucuucgugauccgcgagcccuucaucuccugcagccaccucgagugccggaccuucuuccugacgcagggggcgcugcucaacgaccgccacuccaacggcaccgucaaggaccggagccccuaccgcacccugauguccugccccaucggggaggccccgagccccuacaacucccgguucgagagcguggccuggagcgccuccgccugccacgacggcaugggcuggcugaccaucgggaucagcggccccgacaacggggcgguggccguccucaaguacaacggcaucaucacggacaccaucaaguccuggcgcaacaagauccugcggacccaggagagcgagugcgugugcaucaacggcuccugcuucaccaucaugacggacgggcccagcaacggccaggccuccuacaagaucuucaagauggagaaggggaagaucaucaagagcguggagcuggacgccccgaacuaccacuacgaggagugcuccugcuaccccgacaccggcaaggucgugugcgugugccgcgacaacuggcacgcgagcaaccggcccugggucuccuucgaccagaaccucgacuaccagaucggguacaucugcagcggcguguucggcgacaacccccgcuccaacgacgggaagggcaacugcgggccggugcugagcaacggcgccaacggggucaagggcuucuccuuccgguacggcaacgggguguggaucggccgcaccaagagcaucuccagccgguccggguucgagaugaucugggaccccaacggcuggaccgagacggacagcagcuucuccaucaagcaggacaucaucgcccugaccgacuggagcggguacuccggcagcuucgugcagcaccccgagcucaccggcaugaacugcauccgccccugcuucugggucgagcugauccgggggcagccgaaggaguccaccaucuggacgagcggcuccagcaucuccuucugcgggguggacagcgagaccgccuccuggagcuggcccgacggcgccgaccugcccuucaccaucgacaaguga

SEQ ID NO: 90321 - RNA, 1410 nt, Artificial Sequence; identical to SEQ ID NO: 80752
  derived and/or modified CDS sequence (opt1) from neuraminidase__InfluenzaA__EPI189183

SEQ ID NO: 90322 - RNA, 1410 nt, Artificial Sequence; identical to SEQ ID NO: 80752
  derived and/or modified CDS sequence (opt1) from neuraminidase__InfluenzaA__EPI180576

SEQ ID NO: 90323 - RNA, 1410 nt, Artificial Sequence
  derived and/or modified CDS sequence (opt1) from neuraminidase__InfluenzaA__EPI346918
augaacaccaaccagcgcaucaucaccaucggcacggugugcaugaucgucgggaucaucagccugcuccugcagaucggcaacaucgugucccuguggaucagccacuccauccagaccgggugggagaaccacaccgagaugugcaaccagaacgugaucaccuacgucaacaacacgugggugaaccggaccuacgugaacgucagcaacaccaacaucgccaccauccaggacgugacguccaucgugcucgccggcaacagcucccugugccccgucagcgggugggcgaucuacuccaaggacaacagcauccgcaucggcuccaagggcgacaucuucgugauccgggagccguucaucagcugcucccagcuggagugccgcaccuucuuccucacccagggggcccugcugaacgacaagcacagcaacggcaccgugaaggaccggucccccuaccgcacgcucaugagcugccccaucggggaggcccccuccccguacaacagccgguucgaguccgucgccuggagcgccagcgcgugccacgacggcaugggguggcugaccaucggcaucuccggccccgacaacggggccguggccgugcugaaguacaacggcaucaucaccgacaccaucaagagcuggcgcaacaagauccuccggacgcaggaguccgagugcgucugcaugaacgggagcugcuucaccgugcugaccgacggccccuccaacggccaggccagcuacaagaucuucaagguggagaaggggcgcaucaucaaguccaucgagcuggacgcgcccaacuaccacuacgaggagugcagcugcuacccggacaccggcaaggucaugugcgugugccgggacaacuggcacgccuccaaccgccccugggugagcuucaaccagaaccucgacuaccagaucggguacaucugcuccggcgucuucggggacaacccccggagcaacgacggcaagggcaacugcgggcccgugcuguccaacggcgccaacggggugaagggcuucagcuaccgcuacgggaacggcgucuggaucggccggacgaaguccaucaacagccgccggggguucgagaucaucugggacccgaacggcuggaccgagaccgacuccagcuucuccaugaagcaggacaucaucgcccugaccgacuggagcggguacagcggcuccuucgugcagcaccccgagcucacggggaugaacugcauccgccccugcuucugggucgagcugauccggggccagcccaaggagagcaccaucugggccuccggcagcuccaucagcuucugcggggugaacuccgagaccgcgagcugguccuggccggacggcgccgaccugcccuucaccaucgacaaguga

SEQ ID NO: 90324 - RNA, 1410 nt, Artificial Sequence; identical to SEQ ID NO: 81340
  derived and/or modified CDS sequence (opt1) from neuraminidase__InfluenzaA__EPI240976

SEQ ID NO: 90325 - RNA, 1410 nt, Artificial Sequence; identical to SEQ ID NO: 78119
  derived and/or modified CDS sequence (opt1) from neuraminidase__InfluenzaA__EPI3165

SEQ ID NO: 90326 - RNA, 1410 nt, Artificial Sequence; identical to SEQ ID NO: 90045
  derived and/or modified CDS sequence (opt1) from neuraminidase__InfluenzaA__EPI957

SEQ ID NO: 90327 - RNA, 1410 nt, Artificial Sequence; identical to SEQ ID NO: 86170
  derived and/or modified CDS sequence (opt1) from neuraminidase__InfluenzaA__EPI507593

SEQ ID NO: 90328 - RNA, 1410 nt, Artificial Sequence; identical to SEQ ID NO: 86170
  derived and/or modified CDS sequence (opt1) from neuraminidase__InfluenzaA__EPI461954

SEQ ID NO: 90329 - RNA, 1410 nt, Artificial Sequence; identical to SEQ ID NO: 86170
  derived and/or modified CDS sequence (opt1) from neuraminidase__InfluenzaA__EPI461954

SEQ ID NO: 90330 - RNA, 1410 nt, Artificial Sequence
  derived and/or modified CDS sequence (opt1) from neuraminidase__InfluenzaA__EPI668104
augaaccccaaccagaagaucaucaccaucggcagcgugucccugaccaucagcacgaucugcuucuucaugcagaucgccauccucaucaccaccgucacccugcacuucaagcaguacgaguucaacuccccgcccaacaaccaggugaugcugugcgagcccacgaucaucgagcgcaacaucaccgagaucguguaccucaccaacaccacgaucgagaaggagaucugccccaagccggccgaguaccggaacuggagcaagccccagugcgggaucaccggcuucgcgcccuucuccaaggacaacagcauccgccuguccgccgggggcgacaucugggucacccgggagcccuacgugagcugcgacccggacaagugcuaccaguucgcccuggggcagggcaccacgcucaacaacgugcacuccaacaacaccguccgcgaccggacccccuaccgcacccugcugaugaacgagcucggcgugcccuucuaccuggggacgaagcaggucugcaucgccuggagcuccagcuccugccacgacggcaaggccuggcugcacgugugcaucaccggggacgacaagaacgcgaccgccagcuucaucuacaacggccggcucguggacuccguggucagcugguccaaggacauccugcgcacccaggagagcgagugcgugugcaucaacgggacgugcaccguggucaugaccgacggcaacgccuccggcaaggccgacaccaagauccuguucaucgaggaggggaagaucgugcacacgagcaagcucagcggcuccgcgcagcacguggaggagugcagcugcuacccccgguacccggggguccgcugcgugugccgggacaacuggaagggcuccaaccgccccaucguggacaucaacaucaaggaccacagcaucgucuccagcuacgugugcuccggccuggugggggacacgccccggaagaacgacagcuccagcuccagccacugccuggaccccaacaacgaggagggcgggcacggcgucaaggggugggccuucgacgacggcaacgacguguggaugggccgcaccaucaacgagaccucccggcucggguacgagaccuucaaggucguggagggcuggagcaacccgaaguccaagcugcagaucaaccgccaggugaucgucgaccgcggggaccggagcggcuacuccgggaucuucagcguggagggcaaguccugcaucaaccggugcuucuacguggagcugauccgcggccggaaggaggagaccgagguccucuggaccagcaacagcaucgugguguucugcgggaccuccggcacguacgggaccggcagcuggcccgacggggccgaccugaaccugaugcccaucuga

SEQ ID NO: 90331 - RNA, 1410 nt, Artificial Sequence
  derived and/or modified CDS sequence (opt1) from neuraminidase__InfluenzaA__EPI578445
augaaccccaaccagaagaucaucaccaucggcagcgugucccugaccaucagcacgaucugcuucuucaugcagaucgccauccucaucaccaccgucacccugcacuucaagcaguacgaguucaacuccccgcccaacaaccaggugaugcugugcgagcccacgaucaucgagcgcaacaucaccgagaucguguaccucaccaacaccacgaucgagaaggagaucugccccaagccggccgaguaccggaacuggagcaagccccagugcgggaucaccggcuucgcgcccuucuccaaggacaacagcauccgccuguccgccgggggcgacaucugggucacccgggagcccuacgugagcugcgacccggacaagugcuaccaguucgcccuggggcagggcaccacgcucaacaacgugcacuccaacaacaccguccgcgaccggacccccuaccgcacccugcugaugaacgagcucggcgugcccuuccaccuggggacgaagcaggucugcaucgccuggagcuccagcuccugccacgacggcaaggccuggcugcacgugugcaucaccggggacgacaagaacgcgaccgccagcuucaucuacaacggccggcucguggacuccguggucagcugguccaaggacauccugcgcacccaggagagcgagugcgugugcaucaacgggacgugcaccguggucaugaccgacggcaacgccuccggcaaggccgacaccaagauccuguucaucgaggaggggaagaucgugcacacgagcaagcucagcggcuccgcgcagcacguggaggagugcagcugcuacccccgguacccggggguccgcugcgugugccgggacaacuggaagggcuccaaccgccccaucguggacaucaacaucaaggaccacagcaucgucuccagcuacgugugcuccggccuggugggggacacgccccggaagaacgacagcuccagcuccagccacugccuggaccccaacaacgaggagggcgggcacggcgucaaggggugggccuucgacgacggcaacgacguguggaugggccgcaccaucaacgagaccucccggcucggguacgagaccuucaaggucguggagggcuggagcaacccgaaguccaagcugcagaucaaccgccaggugaucgucgaccgcggggaccggagcggcuacuccgggaucuucagcguggagggcaaguccugcaucaaccggugcuucuacguggagcugauccgcggccggaaggaggagaccgagguccucuggaccagcaacagcaucgugguguucugcgggaccuccggcacguacgggaccggcagcuggcccgacggggccgaccugaaccugaugcccaucuga

SEQ ID NO: 90332 - RNA, 1410 nt, Artificial Sequence; identical to SEQ ID NO: 90331
  derived and/or modified CDS sequence (opt1) from neuraminidase__InfluenzaA__EPI551883

SEQ ID NO: 90333 - RNA, 1410 nt, Artificial Sequence
  derived and/or modified CDS sequence (opt1) from neuraminidase__InfluenzaA__EPI344388
augaaccccaaccagaagaucaucaccaucggcagcgugucccugaucaucgccaccaucugcuuccucaugcagaucgccauccuggucacgaccgugacccugcacuucaagcagcacgacuacaacagcccgcccaacaaccaggcgaugcucugcgagcccaccaucaucgagcgcaacacgaccgagaucguguaccugaccaacaccacgaucgagaaggagaucugccccaagcuggccgaguaccggaacugguccaagccgcagugcaacaucaccggguucgcccccuucagcaaggacaacuccauccgccucagcgccggcggggacaucugggucacccgggagcccuacguguccugcgaccccgacaagugcuaccaguucgcccugggccaggggaccacgcugaacaacggccacagcaacaacaccgugcacgaccgcaccccguaccggacccuccugaugaacgagcugggcguccccuuccaccucgggacgcgccaggugugcauggcgugguccagcuccagcugccacgacggcaaggccuggcugcacgugugcaucaccgggaacgacaacaacgccaccgccuccuucaucuacaacggccggcuggucgacagcaucggguccuggagcaagaacauccuccgcacccaggaguccgagugcgugugcaucaacggcacgugcaccguggucaugaccgacggcagcgcguccgggaaggccgacaccaagauccuguucguggaggagggcaagaucgugcacaucagcacgcugagcggguccgcccagcacgucgaggagugcagcugcuacccccgguuccccggcgugcgcugcgugugccgggacaacuggaagggcuccaaccgcccgaucgucgacaucaacgugaagaacuacagcaucguguccagcuacgucugcuccgggcucgugggcgacacgccccgcaagagcgacuccgugagcuccagcuacugccuggaccccaacaacgagaagggcgggcacggggucaagggcugggccuucgacgacggcaacgacguguggauggggcggaccaucaacgagacccugcggcucggcuacgagaccuucaaggucaucgaggggugguccaaggccaacagcaagcugcagaccaaccgccaggugaucguggagaagggcgaccgguccggguacagcggcaucuucuccgucgagggcaagagcugcaucaaccgcugcuucuacguggagcugauccgggggcgcaaggaggagaccaaggugugguggaccuccaacagcaucgucguguucugcggcacgagcgggaccuacggcaccggguccuggcccgacggcgcggacaucaaccucaugccgaucuga

SEQ ID NO: 90334 - RNA, 1410 nt, Artificial Sequence; identical to SEQ ID NO: 90333
  derived and/or modified CDS sequence (opt1) from neuraminidase__InfluenzaA__EPI347601

SEQ ID NO: 90335 - RNA, 1410 nt, Artificial Sequence
  derived and/or modified CDS sequence (opt1) from neuraminidase__InfluenzaA__EPI642512
augaaccccaaccagaagaucaucaccaucggcagcaucucccugaucaucgccaccaucugcuuccucaugcagaucgccauccuggugaucacggucacccugcacuucaagcagcacaacugcgacagcuccccgaacaaccaggugauguucugcgagcccaccaucaucgagcgcaacaagaccgagaucguguaccucaucaacacgaccgucgagaaggagaucugccccaagcccaccgaguaccggaacuggagcaagccgcagugcaacaucaccggguucgcgcccuucuccaaggacaacagcauccgccuguccgccggcggggacaucugggugacgcgggagcccuacgugagcugcgaccccgacaagugcuaccaguucgcccugggccaggggaccacccucaacaacggccacuccaacgacaccguccacgaccgcacgccguaccggacccugcugaugaacgagcucggcgugcccuuccaccuggggacccgccaggugugcaucgccuggagcuccagcuccugccacgacggcaaggccuggcugcacgucugcaucaccggggacgacggcaacgcgacggccagcuucaucuacaacgggcggcucguggacuccaucggcagcugguccaagaacauccugcgcacccaggagagcgagugcgugugcaucaacgggaccugcaccgucgugaugacggacggcuccgccagcggcaaggccgacaccaagauccuguucaucgaggaggggaagaucauccacaucagcacccucuccggcagcgcgcagcacguggaggagugcuccugcuacccccgguaccccggcguccgcugcgugugccgggacaacuggaaggggagcaaccgcccgaucguggacaucaacgucaaggacuacuccaucgugagcuccuacgugugcagcggccuggucggggacacgccccggaagaacgacuccuucagcuccagccacugccuggaccccaacaacgaggagggcgggcacggcgugaagggcugggccuucgacgacgggaacgacguguggaugggccgcaccaucuccgagaagucccggcucggguacgagaccuucaaggucgugaagggcuggagcgagcccaacagcaagcugcagaccaaccgccaggucaucguggggcggggcaaccgcuccggcuacagcgggaucuucuccaucgagggcaagaacugcaucaaccggugcuucuacguggagcugauccgcgggcggaaggaggagaccaaggucugguggacgagcaacagcaucgugguguucugcggcaccuccgggaccuacggcaccggcagcuggccggacggggccgacaucaaccucaugcccaucuga

SEQ ID NO: 90336 - RNA, 1410 nt, Artificial Sequence
  derived and/or modified CDS sequence (opt1) from neuraminidase__InfluenzaA__AIE52540
augaaccccaaccagaagaucaucaccaucggcagcgugucccugaucaucgccaccaucugcuuccucaugcagaucgccauccuggucacgaccgugacccugcacuucaagcagcacgacuacaacagcccgcccaacaaccaggugaugcucugcgagcccaccaucaucgagcgcaacacgaccgagaucgucuaccugaccaacaucaccaucgagaaggagaucugccccaagcuggcggaguaccggaacugguccaagccgcagugcaacaucacgggguucgcccccuucagcaaggacaacuccauccgccucagcgccggcggggacaucugggugacccgggagcccuacguguccugcgaccccgacaagugcuaccaguucgcccugggccaggggaccacccugaacaaccgccacagcaacaacacgguccacgaccgguccccguaccgcacccuccugaugaacgagcugggcgugcccuuccaccucggcacccgccaggugugcaucgccuggagcuccagcuccugccacgacgggaaggcguggcugcacgucugcaucaccggcgacgacaacaacgccacggccagcuucaucuacaacgggcggcugguggacuccaucggcagcugguccaagaacauccuccggacccaggagagcgagugcgugugcaucaacgggaccugcaccgucgugaugacggacggcuccgccagcggcaaggcggacaccaagauccuguucaucgaggaggggaagaucgugcacaucagcacccuguccggcagcgcccagcacgucgaggagugcuccugcuacccccgcuaccccggggugcggugcgugugccgcgacaacuggaagggcagcaaccggccgaucgucgacaucaacaugaaggacuacuccaucgccagcuccuacgugugcagcggccucgugggggacacgccccgcaagaacgacuccuucagcuccagccacugccuggaccccaacaacgagaagggcgggcacggcgucaaggggugggccuucgacgacggcaacgacguguggaugggccggaccaucuccgaggaguuccgccugggguacgagaccuucaaggugaucaagggcuggagcaaccccaacuccaagcuccagaccaaccggcaggucaucguggagaaggggaaccgcagcggcuacuccggggucuucagcaucgaggacaaguccugcaucaaccggugcuucuacguggagcugauccgcggccggaaggaggagaccaaggugugguggacgagcaacagcaucgucguguucugcggcaccuccgggaccuacggcaccgggagcuggccggacggcgccgacaucaaccugaugcccaucuga

SEQ ID NO: 90337 - RNA, 1410 nt, Artificial Sequence; identical to SEQ ID NO: 90336
  derived and/or modified CDS sequence (opt1) from neuraminidase__InfluenzaA__EPI465399

SEQ ID NO: 90338 - RNA, 1410 nt, Artificial Sequence; identical to SEQ ID NO: 90336
  derived and/or modified CDS sequence (opt1) from neuraminidase__InfluenzaA__EPI328899

SEQ ID NO: 90339 - RNA, 1410 nt, Artificial Sequence; identical to SEQ ID NO: 90336
  derived and/or modified CDS sequence (opt1) from neuraminidase__InfluenzaA__EPI328901

SEQ ID NO: 90340 - RNA, 1410 nt, Artificial Sequence
  derived and/or modified CDS sequence (opt1) from neuraminidase__InfluenzaA__EPI574645
augaaccccaaccagaagaucaucaccaucggcagcgugucccugaccaucagcacgaucugcuucuucaugcagaucgccauccucaucaccaccgucacccugcacuucaagcaguacgaguucaacuccccgcccaacaaccagguggugcugugcgagcccacgaucaucgagcgcaacaucaccgagaucgucuaccucaccaacaccacgaucgagaaggagaucugccccaagccggccgaguaccggaacuggagcaagccccagugcgggaucaccggcuucgcgcccuucuccaaggacaacagcauccgccuguccgccgggggcgacaucugggugacccgggagcccuacgugagcugcgacccggacaagugcuaccaguucgcccuggggcagggcaccacgcucaacaacggccacuccaacaacaccguccgcgaccggacccccuaccgcacccugcugaugaacgagcucggggugcccuuccaccugggcacgaagcaggucugcaucgccuggagcuccagcuccugccacgacgggaaggccuggcugcacgugugcaucaccggcgacgacaagaacgcgaccgccagcuucaucuacaacgggcggcucguggacuccguggucagcugguccaaggacauccugcgcacccaggagagcgagugcgugugcaucaacggcacgugcaccguggucaugaccgacggcuccgccagcgggaaggccgacaccaagauccuguucaucgaggagggcaagaucauccacacgagcacccucuccgggagcgcgcagcacguggaggagugcuccugcuacccccgguacccgggcgugcgcugcgucugccgggacaacuggaagggcagcaaccgccccaucguggacaucaacaucaaggaccacuccaucgugagcuccuacgucugcagcgggcuggugggcgacaccccgcggaagaacgacuccagcuccagcucccacugccuggaccccaacaacgaggagggcgggcacggggugaagggcugggccuucgacgacggcaacgacgucuggauggggcgcaccaucaacgagacgagccggcucggcuacgagaccuucaaggugaucgaggggugguccaaccccaagagcaagcugcagaucaaccgccaggucaucguggaccggggcgaccgcuccggguacagcggcaucuucuccguggagggcaagagcugcaucaaccggugcuucuacgucgagcugauccgcgggcggaaggaggagaacgaggugcucuggaccagcaacuccaucguggucuucugcggcaccagcgggacguacggcaccggguccuggcccgacggcgccgaccugaaccugaugcccaucuga

SEQ ID NO: 90341 - RNA, 1410 nt, Artificial Sequence
  derived and/or modified CDS sequence (opt1) from neuraminidase__InfluenzaA__EPI563214
augaaccccaaccagaagaucaucaccaucggcagcgugucccugaccaucagcacgaucugcuucuucaugcagaucgccauccucaucaccaccgucacccugcacuucaagcaguacgaguucaacuccccgcccaacaaccaggugaugcugugcgagcccacgaucaucgagcgcaacaucaccgagaucguguaccucaccaacaccacgaucgagaaggagaucugccccaagccggccgaguaccggaacuggagcaagccccagugcuccaucaccggguucgcgcccuucagcaaggacaacuccauccgccugagcgccggcggggacaucugggucacccgggagcccuacguguccugcgacccggacaagugcuaccaguucgcccugggccaggggaccacgcucaacaacgugcacagcaacaacaccguccgcgaccggacccccuaccgcacccugcugaugaacgagcucggcgugcccuuccaccugggcacgaagcaggucugcaucgccugguccagcuccagcugccacgacgggaaggccuggcugcacgugugcaucaccggcgacgacaagaacgcgaccgccuccuucaucuacaacgggcggcucguggacagcguggucuccuggagcaaggacauccugcgcacccaggaguccgagugcgugugcaucaacggcacgugcaccguggucaugaccgacgggagcgccagcggcaaggccgacaccaagauccuguucaucgaggagggcaagaucguguacacguccaagcucagcggguccgcgcagcacguggaggagugcagcugcuacccccgguacccgggcguccgcugcgugugccgggacaacuggaagggguccaaccgccccaucguggacaucaacaucaaggaccacagcaucgucuccagcuacgugugcuccggccuggugggcgacacgccccggaagaacgacagcuccagcuccagccacugccuggaccccaacaacgaggagggcgggcacggggucaagggcugggccuucgacgacgggaacgacguguggaugggccgcaccaucaacgagaccucccggcucggcuacgagaccuucaaggucguggagggguggagcaacccgaaguccaagcugcagaucaaccgccaggugaucgucgaccggggcgaccgcagcggguacuccggcaucuucagcguggagggcaagagcugcaucaaccggugcuucuacguggagcugauccgcgggcggaaggaggagaccgagguccucuggaccuccaacagcaucgugguguucugcggcaccuccgggacguacggcaccgggagcuggcccgacggcgccgaccugaaccugaugcccaucuga

SEQ ID NO: 90342 - RNA, 1410 nt, Artificial Sequence; identical to SEQ ID NO: 90341
  derived and/or modified CDS sequence (opt1) from neuraminidase__InfluenzaA__EPI553998

SEQ ID NO: 90343 - RNA, 1410 nt, Artificial Sequence
  derived and/or modified CDS sequence (opt1) from neuraminidase__InfluenzaA__EPI551568
augaaccccaaccagaagaucaucaccaucggcagcgugucccugaccaucagcacgaucugcuucuucaugcagaucgccauccucaucaccaccgucacccugcacuucaagcaguacgaguucaacuccccgcccaacaaccaggugaugcugugcgagcccacgaucaucgagcgcaacaucaccgagaucguguaccucaccaacaccacgaucgagaaggagaucugccccaagccggccgaguaccggaacuggagcaagccccagugcuccaucaccggguucgcgcccuucagcaaggacaacuccauccgccugagcgccggcggggacaucugggucacccgggagcccuacguguccugcgacccggacaagugcuaccaguucgcccugggccaggggaccacgcucaacaacgugcacagcaacaacaucguccgcgaccggacccccuaccgcacccugcugaugaacgagcucggcgugcccuuccaccugggcaccaagcaggucugcaucgccugguccagcuccagcugccacgacgggaaggccuggcugcacgugugcaucacgggcgacgacaagaacgcgaccgccuccuucaucuacaacgggcggcucguggacagcguggucuccuggagcaaggacauccugcgcacccaggaguccgagugcgugugcaucaacgggaccugcacgguggucaugaccgacgggagcgccagcggcaaggccgacaccaagauccuguucaucgaggagggcaagaucguguacaccuccaagcucagcggguccgcgcagcacguggaggagugcagcugcuacccccgguacccgggcguccgcugcgugugccgggacaacuggaagggguccaaccgccccaucguggacaucaacaucaaggaccacagcaucgucuccagcuacgugugcuccggccuggugggcgacacgccccggaagaacgacagcuccagcuccagccacugccuggaccccaacaacgaggagggcggccacggggucaagggcugggccuucgacgacgggaacgacguguggaugggccgcaccaucaacgagaccucccggcucggcuacgagaccuucaaggucguggagggguggagcaacccgaaguccaagcugcagaucaaccgccaggugaucgucgaccggggcgaccgcagcggguacuccggcaucuucagcguggagggcaagagcugcaucaaccggugcuucuacguggagcugauccgcgggcggaaggaggagacggagguccucuggaccuccaacagcaucgugguguucugcggcaccuccgggaccuacggcacggggagcuggcccgacggcgccgaccugaaccugaugcccaucuga

SEQ ID NO: 90344 - RNA, 1410 nt, Artificial Sequence
  derived and/or modified CDS sequence (opt1) from neuraminidase__InfluenzaA__EPI629737
augaaccccaaccagaagaucaucgccaucggcagcgugucccugaccaucagcaccaucugcuucuucaugcagaucgccauccucaucacgaccgucacccugcacuucaagcaguacgaguucaacuccccgcccaacaaccaggugaugcugugcgagcccaccaucaucgagcgcaacaucacggagaucguguaccucaccaacaccaccaucgagaaggagaucugccccaagccggcggaguaccggaacuggagcaagccccagugcuccaucacgggguucgcccccuucagcaaggacaacuccauccgccugagcgccggcggggacaucugggucacccgggagcccuacguguccugcgacccggacaagugcuaccaguucgcccugggccaggggaccacccucaacaacgugcacagcaacaacacgguccgcgaccggacccccuaccgcacccugcugaugaacgagcucggcgugcccuuccaccugggcaccaagcaggucugcaucgccugguccagcuccagcugccacgacgggaaggcguggcugcacgugugcaucacgggcgacgacaagaacgccaccgccuccuucaucuacaacgggcggcucguggacagcguggucuccuggagcaaggacauccugcgcacccaggaguccgagugcgugugcaucaacgggaccugcacgguggucaugaccgacgggagcgccagcggcaaggcggacaccaagauccuguucaucgaggagggcaagaucguguacaccuccaagcucagcggguccgcccagcacguggaggagugcagcugcuacccccgguacccgggcguccgcugcgugugccgggacaacuggaagggguccaaccgccccaucguggacaucaacaucaaggaccacagcaucgucuccagcuacgugugcuccggccuggugggcgacacgccccggaagaacgacagcuccagcuccagccacugccuggaccccaacaacgaggagggcggccacggggucaagggcugggccuucgacgacgggaacgacguguggaugggccgcaccaucaacgagaccucccggcucggcuacgagaccuucaaggucguggagggguggagcaacccgaaguccaagcugcagaucaaccgccaggugaucgucgaccggggcgaccgcagcggguacuccggcaucuucagcguggagggcaagagcugcaucaaccggugcuucuacguggagcugauccgcgggcggaaggaggagacggagguccucuggaccuccaacagcaucgugguguucugcggcaccuccgggaccuacggcacggggagcuggcccgacggcgccgaccugaaccugaugcccaucuga

SEQ ID NO: 90345 - RNA, 1410 nt, Artificial Sequence; identical to SEQ ID NO: 90341
  derived and/or modified CDS sequence (opt1) from neuraminidase__InfluenzaA__EPI631886

SEQ ID NO: 90346 - RNA, 1410 nt, Artificial Sequence; identical to SEQ ID NO: 90341
  derived and/or modified CDS sequence (opt1) from neuraminidase__InfluenzaA__EPI577025

SEQ ID NO: 90347 - RNA, 1410 nt, Artificial Sequence; identical to SEQ ID NO: 87895
  derived and/or modified CDS sequence (opt1) from neuraminidase__InfluenzaA__EPI404926

SEQ ID NO: 90348 - RNA, 1410 nt, Artificial Sequence; identical to SEQ ID NO: 87895
  derived and/or modified CDS sequence (opt1) from neuraminidase__InfluenzaA__EPI492687

SEQ ID NO: 90349 - RNA, 1410 nt, Artificial Sequence
  derived and/or modified CDS sequence (opt1) from neuraminidase__InfluenzaA__EPI530648
augaaccccaaccagaagaucaucaccaucggcagcgugucccugaccaucagcacgaucugcuucuucaugcagaucgccauccucaucaccaccgucacccugcacuucaagcaguacgaguucaacuccccgcccaacaaccaggugaugcugugcgagcccacgaucaucgagcgcaacaucaccgagaucguguaccucaccaacaccacgaucgagaaggagaucugccccaagccggccgaguaccggaacuggagcaagccccagugcgggaucaccggcuucgcgcccuucuccaaggacaacagcauccgccuguccgccgggggcgacaucugggucacccgggagcccuacgugagcugcgacccggacaagugcuaccaguucgcccuggggcagggcaccacgcucaacaacgugcacuccaacaacaccguccgcgaccggacccccuaccgcacccugcugaugaacgagcucggcgugcccuuccaccuggggacgaagcaggucugcaucgccuggagcuccagcuccugccacgacggcaaggccuggcugcacgugugcaucaccggggacgacaagaacgcgaccgccagcuucaucuacaacggccggcucguggacuccguggucagcugguccaaggacauccugcgcacccaggagagcgagugcgugugcaucaacgggacgugcaccguggucaugaccgacggcuccgccagcggcaaggccgacaccaagauccuguucaucgaggaggggaagaucgugcacacgagcacccucuccggcagcgcgcagcacguggaggagugcuccugcuacccccgguacccggggguccgcugcgugugccgggacaacuggaagggcagcaaccgccccaucguggacaucaacaucaaggaccacuccaucgucagcuccuacgugugcagcggccuggugggggacaccccgcggaagaacgacuccagcuccagcucccacugccuggaccccaacaacgaggagggcgggcacggcgucaaggggugggccuucgacgacggcaacgacguguggaugggccgcaccaucaacgagacgagccggcucggguacgagaccuucaaggucaucgagggcugguccaaccccaagagcaagcugcagaccaaccgccaggugaucguggaccgcggggaccgguccggcuacagcgggaucuucuccgucgagggcaagagcugcaucaaccggugcuucuacguggagcugauccgcggccggaaggaggagaccgaggugcucuggacgagcaacuccaucgucguguucugcgggaccagcggcaccuacgggaccggcuccuggcccgacggggccgaccugaaccugaugcccaucuga

SEQ ID NO: 90350 - RNA, 1410 nt, Artificial Sequence; identical to SEQ ID NO: 90331
  derived and/or modified CDS sequence (opt1) from neuraminidase__InfluenzaA__EPI684314

SEQ ID NO: 90351 - RNA, 1410 nt, Artificial Sequence
  derived and/or modified CDS sequence (opt1) from neuraminidase__InfluenzaA__EPI614459
augaaccccaaccagaagaucaucaccaucggcagcgugucccugaccaucagcacgaucugcuucuucaugcagaucgccauccucaucaccaccgucacccugcacuucaagcaguacaaguucaacuccccgcccaacaaccaggugaugcugugcgagcccacgaucaucgagcgcaacaucaccgagaucguguaccucaccaacaccacgaucgagaaggagaucugccccaagccggccgaguaccggaacuggagcaagccccagugcgggaucaccggcuucgcgcccuucuccaaggacaacagcauccgccuguccgccgggggcgacaucugggucacccgggagcccuacgugagcugcgacccggacaagugcuaccaguucgcccuggggcagggcaccacgcucaacaacgugcacuccaacaacaccguccgcgaccggacccccuaccgcacccugcugaugaacgagcucggcgugcccuuccaccuggggacgaagcaggucugcaucgccuggagcuccagcuccugccacgacggcaaggccuggcugcacgugugcaucaccggggacgacaagaacgcgaccgccagcuucaucuacaacggccggcucguggacuccguggucagcugguccaaggacauccugcgcacccaggagagcgagugcgugugcaucaacgggacgugcaccguggucaugaccgacggcuccgccagcggcaaggccgacaccaagauccuguucaucgaggaggggaagaucgugcacacgagcacccucuccggcagcgcgcagcacguggaggagugcuccugcuacccccgguacccggggguccgcugcgugugccgggacaacuggaagggcagcaaccgccccaucguggacaucaacaucaaggaccacuccaucgucagcuccuacgugugcagcggccuggugggggacaccccgcggaagaacgacuccagcuccagcucccacugccuggaccccaacaacgaggagggcgggcacggcgucaaggggugggccuucgacgacggcaacgacguguggaugggccgcaccaucaacgagacgagccggcucggguacgagaccuucaaggucaucgagggcugguccaaccccaagagcaagcugcagaccaaccgccaggugaucguggaccgcggggaccgguccggcuacagcgggaucuucuccgucgagggcaagagcugcaucaaccggugcuucuacguggagcugauccgcggccggaaggaggagaccgaggugcucuggacgagcaacuccaucgucguguucugcgggaccagcggcaccuacgggaccggcuccuggcccgacggggccgaccugaaccugaugcccaucuga

SEQ ID NO: 90352 - RNA, 1410 nt, Artificial Sequence; identical to SEQ ID NO: 90351
  derived and/or modified CDS sequence (opt1) from neuraminidase__InfluenzaA__EPI541466

SEQ ID NO: 90353 - RNA, 1410 nt, Artificial Sequence; identical to SEQ ID NO: 90351
  derived and/or modified CDS sequence (opt1) from neuraminidase__InfluenzaA__EPI696968

SEQ ID NO: 90354 - RNA, 1410 nt, Artificial Sequence; identical to SEQ ID NO: 90351
  derived and/or modified CDS sequence (opt1) from neuraminidase__InfluenzaA__EPI674598

SEQ ID NO: 90355 - RNA, 1410 nt, Artificial Sequence; identical to SEQ ID NO: 90349
  derived and/or modified CDS sequence (opt1) from neuraminidase__InfluenzaA__EPI530678

SEQ ID NO: 90356 - RNA, 1410 nt, Artificial Sequence
  derived and/or modified CDS sequence (opt1) from neuraminidase__InfluenzaA__EPI530680
augaaccccaaccagaagaucaucaccaucggcagcgugucccugaccaucagcacgaucugcuucuucaugcagaucgccauccucaucaccaccgucacccugcacuucaagcaguacgaguucaacuccccgcccaacaaccaggugaugcugugcgagcccacgaucaucgagcgcaacaucaccgagaucguguaccucaccaacaccacgaucgagaaggagaucugccccaagccggccgaguaccggaacuggagcaagccccagugcgggaucaccggcuucgcgcccuucuccaaggacaacagcauccgccuguccgccgggggcgacaucugggucacccgggagcccuacgugagcugcgacccggacaagugcuaccaguucgcccuggggcagggcaccacgcucaacaacgugcacuccaacaacaccguccgcgaccggacccccuaccgcacccugcugaugaacgagcucggcgugcccuuccaccuggggacgaagcaggucugcaucgccuggagcuccagcuccugccacgacggcaaggccuggcugcacgugugcaucaccggggacgacaagaacgcgaccgccagcuucaucuacaacggccggcucguggacuccguggucagcugguccaaggacauccugcgcacccaggagagcgagugcgugugcaucaacgggacgugcaccguggucaugaccgacggcuccgccagcggcaaggccgacaccaagauccuguucaucgaggaggggaagaucgugcacacgagcacccucuccggcagcgcgcagcacguggaggagugcuccugcuacccccgguacccggggguccgcugcgugugccgggacaacuggaagggcagcaaccgccccaucguggacaucaacaucaaggaccacuccaucgucagcuccuacgugugcagcggccuggugggggacaccccgcggaagaacgacuccagcuccagcucccacugccuggaccccaacaacgaggagggcgggcacggcgucaaggggugggccuucgacgacggcaacggcguguggauggggcgcaccaucaacgagacgagccggcucggcuacgagaccuucaaggucaucgaggggugguccaaccccaagagcaagcugcagaccaaccgccaggugaucguggaccggggcgaccgcuccggguacagcggcaucuucuccgucgagggcaagagcugcaucaaccggugcuucuacguggagcugauccgcgggcggaaggaggagaccgaggugcucuggacgagcaacuccaucgucguguucugcggcaccagcgggaccuacggcaccggguccuggcccgacggcgccgaccugaaccugaugcccaucuga

SEQ ID NO: 90357 - RNA, 1410 nt, Artificial Sequence; identical to SEQ ID NO: 78062
  derived and/or modified CDS sequence (opt1) from neuraminidase__InfluenzaA__EPI7603

SEQ ID NO: 90358 - RNA, 1410 nt, Artificial Sequence; identical to SEQ ID NO: 90349
  derived and/or modified CDS sequence (opt1) from neuraminidase__InfluenzaA__EPI814527

SEQ ID NO: 90359 - RNA, 1410 nt, Artificial Sequence; identical to SEQ ID NO: 90349
  derived and/or modified CDS sequence (opt1) from neuraminidase__InfluenzaA__EPI674737

SEQ ID NO: 90360 - RNA, 1410 nt, Artificial Sequence; identical to SEQ ID NO: 90349
  derived and/or modified CDS sequence (opt1) from neuraminidase__InfluenzaA__EPI614443

SEQ ID NO: 90361 - RNA, 1410 nt, Artificial Sequence; identical to SEQ ID NO: 90349
  derived and/or modified CDS sequence (opt1) from neuraminidase__InfluenzaA__EPI551812

SEQ ID NO: 90362 - RNA, 1410 nt, Artificial Sequence; identical to SEQ ID NO: 90349
  derived and/or modified CDS sequence (opt1) from neuraminidase__InfluenzaA__EPI696961

SEQ ID NO: 90363 - RNA, 1410 nt, Artificial Sequence; identical to SEQ ID NO: 90349
  derived and/or modified CDS sequence (opt1) from neuraminidase__InfluenzaA__EPI740789

SEQ ID NO: 90364 - RNA, 1410 nt, Artificial Sequence
  derived and/or modified CDS sequence (opt1) from neuraminidase__InfluenzaA__EPI377498
augaaccccaaccagaagaucaucaccaucggcagcgugucccugaccaucagcacgaucugcuucuucaugcagaucgccauccucaucaccaccgucacccugcacuucaagcaguacgaguucaacuccccgcccaacaaccaggugaugcugugcgagcccacgaucaucgagcgcaacaucaccgagaucguguaccucaccaacaccacgaucgagaaggagaucugccccaagccggccgaguaccggaacuggagcaagccccagugcgggaucaccggcuucgcgcccuucuccaaggacaacagcauccgccuguccgccgggggcgacaucugggucacccgggagcccuacgugagcugcgacccggacaagugcuaccaguucgcccuggggcagggcaccacgcucaacaacgugcacuccaacaacaccguccacgaccgcacccccuaccggacccugcugaugaacgagcucggcgugcccuuccaccuggggacgaagcaggucugcaucgccuggagcuccagcuccugccacgacggcaaggccuggcugcacgugugcaucaccggggacgacaagaacgcgaccgccagcuucaucuacaacggccgccucguggacuccguggucagcugguccaaggagauccugcggacccaggagagcgagugcgugugcaucaacgggacgugcaccguggucaugaccgacggcuccgccagcggcaaggccgacaccaagauccuguucaucgaggaggggaagaucgugcacacgagcacccucuccggcagcgcgcagcacguggaggagugcuccugcuacccccgcuacccggggguccggugcgugugccgcgacaacuggaagggcagcaaccggcccaucguggacaucaacaucaaggaccacuccaucgucagcuccuacgugugcagcggccuggugggggacaccccgcgcaagaacgacuccagcuccagcucccacugccuggaccccaacaacgaggagggcgggcacggcgucaaggggugggccuucgacgacggcaacgacguguggaugggccggaccaucaacgagacgagccgccucggguacgagaccuucaaggucaucgagggcugguccaaccccaagagcaagcugcagaucaaccggcaggucaucguggaccgcggggaccgguccggcuacagcgggaucuucuccguggagggcaagagcugcaucaaccgcugcuucuacguggagcugauccggggccgcaaggaggagaccgaggugcucuggaccagcaacuccaucgucguguucugcgggacgagcggcaccuacgggaccggcuccuggcccgacggggccgaccugaaccugaugcccaucuga

SEQ ID NO: 90365 - RNA, 1410 nt, Artificial Sequence; identical to SEQ ID NO: 90364
  derived and/or modified CDS sequence (opt1) from neuraminidase__InfluenzaA__EPI377498

SEQ ID NO: 90366 - RNA, 1410 nt, Artificial Sequence; identical to SEQ ID NO: 90364
  derived and/or modified CDS sequence (opt1) from neuraminidase__InfluenzaA__EPI391246

SEQ ID NO: 90367 - RNA, 1410 nt, Artificial Sequence; identical to SEQ ID NO: 90364
  derived and/or modified CDS sequence (opt1) from neuraminidase__InfluenzaA__EPI407122

SEQ ID NO: 90368 - RNA, 1410 nt, Artificial Sequence; identical to SEQ ID NO: 90364
  derived and/or modified CDS sequence (opt1) from neuraminidase__InfluenzaA__EPI407125

SEQ ID NO: 90369 - RNA, 1410 nt, Artificial Sequence; identical to SEQ ID NO: 90331
  derived and/or modified CDS sequence (opt1) from neuraminidase__InfluenzaA__EPI562038

SEQ ID NO: 90370 - RNA, 1410 nt, Artificial Sequence; identical to SEQ ID NO: 90331
  derived and/or modified CDS sequence (opt1) from neuraminidase__InfluenzaA__EPI562038

SEQ ID NO: 90371 - RNA, 1410 nt, Artificial Sequence; identical to SEQ ID NO: 86641
  derived and/or modified CDS sequence (opt1) from neuraminidase__InfluenzaA__EU716525

SEQ ID NO: 90372 - RNA, 1350 nt, Artificial Sequence
  derived and/or modified CDS sequence (opt1) from neuraminidase__InfluenzaA__EPI232422
augaaccccaaccagaagaucaucaccaucggcagcaucugcauggugaucgggaucgucucccugaugcuccagaucggcaacaugaucagcaucugggugucccacagcauccagaccgggaaccagcgccaggccgagccgaucuccaacacgaaguuccugaccgagaaggccguggcgagcgucacccuggccggcaacuccagccucugccccaucuccgggugggccguguacagcaaggacaacuccauccggaucggcagccgcggcgacguguucgucauccgggagcccuucaucuccugcagccaccuggagugccgcaccuucuuccugacgcagggggcccuccugaacgacaagcacuccaacggcaccgugaaggaccggagcccccaccgcacccugauguccugcccggugggggaggcccccagccccuacaacucccgguucgagagcgucgcguggagcgccuccgccugccacgacggcaccagcuggcucacgaucgggaucuccggccccgacaacggcgccguggcggugcugaaguacaacgggaucaucaccgacaccaucaagagcuggcgcaacaacauccugcggacccaggaguccgagugcgccugcgucaacggcagcugcuucacggugaugaccgacgggccguccagcggccaggccuccuacaagaucuucaagauggagaagggcaagguggucaagagcguggagcucgacgcccccaacuaccacuacgaggagugcuccugcuaccccgacgccggggagaucacgugcgugugccgcgacaacuggcacggcagcaaccggcccugggucuccuucaaccagaaccuggaguaccagaucggguacaucugcagcggcguguucggggacaacccgcgccccaacgacggcaccggcuccugcgggcccgugagccccaacggcgcguacggggucaagggcuucuccuucaaguacgggaacggcguguggaucggccggaccaagagcaccaacucccgcagcggguucgagaugaucugggacccgaacggcuggaccgggaccgacagcuccuucagcgugaagcaggacaucgucgccaucacggacugguccggcuacagcggguccuucgugcagcaccccgagcugaccggccucgacugcauccggcccugcuucugggucgagcugauccgcggccggcccaaggagagcaccaucuggaccuccgggagcuccaucagcuucugcggcgugaacuccgacacggugagcugguccuggccggacggggccgagcugcccuucaccaucgacaaguga

SEQ ID NO: 90373 - RNA, 1350 nt, Artificial Sequence; identical to SEQ ID NO: 90208
  derived and/or modified CDS sequence (opt1) from neuraminidase__InfluenzaA__EPI227593

SEQ ID NO: 90374 - RNA, 1350 nt, Artificial Sequence
  derived and/or modified CDS sequence (opt1) from neuraminidase__InfluenzaA__EPI435658
augaaccccaaccagaagaucgugaccaucggcagcaucugcauggucaucgggaucaucucccugaugcuccagaucggcaacaucaucagcaucugggugucccacagcauccagaccgggaaccagcaccagacggagccgauccgcaacaccaacuuccugaccgagaacgccguggccuccgucacccuggcgggcaacagcucccucugccccauccgggggugggccgugcacagcaaggacaacuccauccgcaucggcagcaagggcgacguguucgucauccgggagcccuucaucuccugcagccaccuggagugccgcacguucuuccugacccagggggcccuccugaacgacaagcacuccaacggcaccgugaaggaccggagcccccaccgcacccugauguccugcccgaucggggaggcccccagccccuacaacucccgguucgagagcguggccugguccgcgagcgccugccacgacggcacgagcuggcucaucaucgggaucuccggccccgacaacggcgccgucgccgugcugaaguacaacgggaucaucaccgacaccaucaagagcuggcgcaacaacauccugcggacccaggaguccgagugcgcgugcgugaacggcagcugcuucacggucaugaccgacgggccguccaacggccaggccagcuacaagaucuucaagaucgagaagggcaagguggugaaguccgucgagcucaacgcccccaacuaccacuacgaggagugcagcugcuaccccgacgccggggagaucaucugcgugugccgcgacaacuggcacggcuccaaccggcccugggugagcuucaaccagaaccuggaguaccagaucggguacaucugcuccggcgucuucggggacaacccgcgccccaacgacggcaccggcagcugcgggcccgugucccccaacggcgccuacggggugaagggcuucagcuucaaguacgggaacggcgucuggaucggccggaccaaguccacgcacagccgcuccggguucgagaugaucugggacccgaacggcuggaccgggaccgacagcgaguucuccaugaagcaggacaucguggcgaucaccgacuggagcggcuacagcggguccuucgugcagcaccccgagcugacgggccucgacugcauccggcccugcuucugggucgagcugauccgcggccggcccaaggagagcaccaucuggaccuccgggagcuccaucagcuucugcggcgugaacuccgacaccgucagcugguccuggccggacggggccgagcugcccuucacgaucgacaaguga

SEQ ID NO: 90375 - RNA, 1350 nt, Artificial Sequence; identical to SEQ ID NO: 90374
  derived and/or modified CDS sequence (opt1) from neuraminidase__InfluenzaA__EPI492513

SEQ ID NO: 90376 - RNA, 1350 nt, Artificial Sequence; identical to SEQ ID NO: 83721
  derived and/or modified CDS sequence (opt1) from neuraminidase__InfluenzaA__EPI165066

SEQ ID NO: 90377 - RNA, 1350 nt, Artificial Sequence
  derived and/or modified CDS sequence (opt1) from neuraminidase__InfluenzaA__EPI531308
augaaccccaaccagaagaucaucaccaucggcagcaucugcauggugaccggggucgugucccugaugcuccaggugggcaacaugaucagcaucuggaucucccacagcauccacacggggaaccagcaccaggccgagccgaucuccaacaccaacuuccacaccgagaaggccgucgugagcgcgaagcuggccggcaacuccagccugugccccaucaacgggugggccguguacuccaaggacaacagcauccgcaucggcuccaagggcgacgucuucgugauccgggagcccuucaucagcugcucccaccucgagugccgcaccuucuuccugacgcagggggcccugcucaacgacaagcacagcaacggcaccgccaaggaccggagcccccaccgcacccugauguccugcccggugggggaggcgcccucccccuacaacagccgguucgaguccgucgccuggagcgccagcgccugccacgacggcaccuccuggcugacgaucgggaucagcggccccgacaacggcgcgguggccgugcucaaguacaacgggaucaucaccgacaccaucaaguccuggcgcaacaacguccugcggacccaggagagcgagugcgccugcgugaacggcuacugcuucacggugaugaccgacgggccguccaacggccaggccagccacaagaucuucaagauggagaagggcaaggucaucaaguccguggagcuggacgcccccaacuaccacuacgaggagugcagcugcuaccccgacgcgggggagaucacgugcgugugccgcgacaacuggcacggcuccaaccggcccuggaucagcuucaaccagaaccucgaguaccagaucggguacaucugcuccggcgucuucggggacaacccgcgccccaacgacggcaagggcagcugcgggcccguguccagcaacggcgccuacggggugaagggcuucuccuucaaguacgggaacggcgucuggaucggccggaccaagagcaccaacucccgcagcggguucgagaugaucugggaccccaacggcuggaccgagaccgacuccagcuucagcgugaagcaggacaucguggccaucaccgacugguccggguacagcggcuccuucguccagcacccggagcugacggggcuggacugcauccggcccugcuucuggguggagcucauccgcggccggcccaaggagggcaccaucuggaccagcggguccagcaucuccuucugcggcgucagcggggacaccgugggcugguccuggcccgacggcgccgagcugccguucacgaucgacaaguga

SEQ ID NO: 90378 - RNA, 1350 nt, Artificial Sequence
  derived and/or modified CDS sequence (opt1) from neuraminidase__InfluenzaA__EPI433308
augaaccccaaccagaagaucaucaccaucggcagcaucugcauggugaucgggaucgucucccugaugcuccagaucggcaaccugaucagcaucugggugucccacagcauccagcgcgggaaccugaaccagguggagccgaucuccaacaccagcuuccccacggagaaggccgucgccuccgugacccucgcgggcaacagcucccugugccccauccgggggugggccgugcacagcaaggacaacuccauccgcaucggcagcaagggcgacgucuucgugauccgggagcccuucaucuccugcagccaccuggagugccgcaccuucuuccucacccagggggcccugcugaacgacaagcacuccaacggcacggugaaggaccggagcccgcaccgcacccucauguccugccccgucggggaggcccccagccccuacaacucccgguucgagagcguggccuggagcgcguccgccugccacgacggcaccagcuggcugaccaucgggaucuccggcccggacaacggcgccguggccgucgugaaguacaacgggaucaucacggacaccaucaagagcuggggcaacaacauccugcgcacccaggaguccgagugcgcgugcgugaacgggagcugcuucaccgucaugacggacggccccuccaacggccaggccagcuacaagaucuucaagauggagaaggggaaggugaucaaguccguggagcucgacgcccccaacuaccacuacgaggagugcagcugcuaccccgacgccggcgagaucacgugcgucugccgggacaacuggcacggguccaaccgcccgugggugagcuucaaccagaaccuggaguaccagaucggcuacaucugcuccgggguguucggcgacaacccccggcccaacgacggcaccgggagcugcggccccgucuccccgaacggggccuacggcgugaagggguucagcuucaaguacggcaacggcguguggaucgggcgcaccaagucccccaacagccgguccggcuucgagaugaucugggaccccaacggguggagcgagaccgacagcuccuucagcgucaagcaggacauccuggcggugaccgacugguccggcuacagcggguccuucguccagcaccccgagcucaccggccuggacugcauccgcccgugcuucuggguggagcugauccggggccgccccgaggagagcaccaucuggacguccgggagcuccaucagcuucugcggcgugaacuccgacaccgucagcugguccuggcccgacggggccgagcuccccuucaccaucgacaaguga

SEQ ID NO: 90379 - RNA, 1350 nt, Artificial Sequence
  derived and/or modified CDS sequence (opt1) from neuraminidase__InfluenzaA__EPI114974
augaaccccaaccagaagaucaucaccaucggcagcaucugcauggugaucgggaucgucucccugaugcuccagaucggcaacaugaucagcaucugggugucccacagcauccagaccgggaaccagcgccaggccgagccgaucuccaacacgaaguuccugaccgagaaggccguggcgagcgucacccuggccggcaacuccagccucugccccaucuccgggugggccguguacagcaaggacaacuccauccggaucggcagccgcggcgacguguucgucauccgggagcccuucaucuccugcagccaccuggagugccgcaccuucuuccugacgcagggggcccuccugaacgacaagcacuccaacggcaccgugaaggaccggagcccccaccgcacccugauguccugcccggugggggaggcccccagccccuacaacucccgguucgagagcgucgcguggagcgccuccgccugccacgacggcaccagcuggcucacgaucgggaucuccggccccgacaacggcgccguggcggugcugaaguacaacgggaucaucaccgacaccaucaagagcuggcgcaacaacauccugcggacccaggaguccgagugcgccugcgucaacggcagcugcuucacggugaugaccgacgggccguccaacggccaggccagcuacaagaucuucaagauggagaagggcaagguggucaaguccaucgagcucgacgcccccaacuaccacuacgaggagugcagcugcuaccccgacgccggggagaucacgugcgugugccgcgacaacuggcacggcuccaaccggcccugggugagcuucaaccagaaccuggaguaccagaucggguacaucugcuccggcgucuucggggacaacccgcgccccaacgacggcaccggcagcugcgggcccgugucccccaacggcgcguacggggugaagggcuucagcuucaaguacgggaacggcgucuggaucggccggaccaaguccaccaacagccgcuccggguucgagaugaucugggacccgaacggcuggaccgggaccgacagcagcuucuccgugaagcaggacaucguggccaucacggacuggagcggcuacuccgggagcuucguccagcaccccgagcugaccggccucgacugcauccggcccugcuucuggguggagcugauccgcggccggcccaaggaguccaccaucuggaccagcggguccagcaucuccuucugcggcgucaacagcgacacgguguccuggagcuggccggacggggccgagcugcccuucaccaucgacaaguga

SEQ ID NO: 90380 - RNA, 1350 nt, Artificial Sequence
  derived and/or modified CDS sequence (opt1) from neuraminidase__InfluenzaA__EPI622495
augaaccccaaccagaagaucaccaccaucggcagcaucugcauggugaucgggaucgucucccugaugcuccagaucggcaacauggugagcaucugggugucccacagcauccagacgcgcaaccagcggcaggccgagccgaucuccaacacccgcagccugaccgagaaggccgucgcguccgugacccuggccgggaacagcucccucugccccaucagcggcugggccguguacuccaaggacaacagcauccggaucggguccaagggcgacgucuucgugauccgcgagcccuucaucagcugcucccaccuggagugccggacguucuuccugacccagggcgcccuccugaacgacaagcacagcaacgggaccgugaaggaccgcagcccccaccggacccugauguccugcccggucggcgaggcccccucccccuacaacagccgcuucgagagcguggcgugguccgccagcgccugccacgacgggacguccuggcucaccaucggcaucagcgggcccgacaacggcgccguggcggucgugaaguacaacggcaucaucaccgacaccaucaaguccuggcggaacaacauccugcgcacgcaggagagcgagugcgugugcgucaacggguccugcuucaccgugaugaccgacggcccgagcaacaagcaggccuccuacaagaucuucaagauggagaaggggaagguggucaagagcaucgagcuggacgcccccaacuaccacuacgaggagugcuccugcuaccccgacgccggcgagaucacgugcgugugccgggacaacuggcacggcagcaaccgccccuggcucuccuucaaccagaaccuggaguaccagaucggguacaucugcagcggcguguucggggacaacccgcggcccaacgacggcaccggguccugcggccccgucagcuccaacggcgccuacggggugaagggcuucagcuucaaguacgggaacggcguguggaucgggcgcaccaaguccaccaacagccggagcggcuucgagaugaucugggaccccaacggcuggaccgggacggacuccagcuucuccaugaagcaggacaucgucgcgaucaccgacuggagcggcuacuccgggagcuucgugcagcacccggagcugaccggccucgacugcauccgccccugcuucugggucgagcuggugcgggggcgccccaaggagggcaccaucuggacguccggcagcuccaucagcuucugcggggugaacuccgacaccgucagcugguccuggcccgacggcgccgagcugccguucaccaucgacaaguga

SEQ ID NO: 90381 - RNA, 1350 nt, Artificial Sequence
  derived and/or modified CDS sequence (opt1) from neuraminidase__InfluenzaA__EPI349847
augaaccccaaccagaagaucaccaccaucggcagcaucugcauggugaucgggaucgucucccugaugcuccagaucggcaacauggugagcaucugggugucccacagcauccagacgcgcaaccagcggcaggccgagccgaucuccaacacccgcagccugaccgagaaggccgucgcguccgugacccuggccgggaacagcucccucugccccaucagcggcugggccguguacuccaaggacaacagcauccggaucggguccaagggcgacgucuucgugauccgcgagcccuucaucagcugcucccaccuggagugccggacguucuuccugacccagggcgcccuccugaacgacaagcacagcaacgggaccgugaaggaccgcagcccccaccggacccugauguccugcccggucggcgaggcccccucccccuacaacagccgcuucgagagcguggcgugguccgccagcgccugccacgacgggacguccuggcucaccaucggcaucagcgggcccgacaacggcgccguggcggucgugaaguacaacggcaucaucaccgacaccaucaaguccuggcggaacaacauccugcgcacgcaggagagcgagugcgugugcgucaacggguccugcuucaccgugaugaccgacggcccgagcaacaagcaggccuccuacaagaucuucaagauggagaaggggaagguggucaagagcaucgagcuggacgcccccaacuaccacuacgaggagugcuccugcuaccccgacgccggcgagaucacgugcgugugccgggacaacuggcacggcagcaaccgccccuggcucuccuucaaccagaaccuggaguaccagaucggguacaucugcagcggcguguucggggacaacccgcggcccaacgacggcaccggguccugcggccccgucagccacaacggcgccuacggggugaagggcuucuccuucaaguacgggaacggcguguggaucgggcgcaccaagagcaccaacucccggagcggcuucgagaugaucugggaccccaacggcuggaccgggacggacagcuccuucagcaugaagcaggacaucgucgcgaucaccgacugguccggcuacagcggguccuucgugcagcacccggagcugaccggccucgacugcauccgccccugcuucugggucgagcuggugcgggggcgccccaaggagggcaccaucuggacgagcggcuccagcaucuccuucugcggggugaacagcgacaccgucuccuggagcuggcccgacggcgccgagcugccguucaccaucgacaaguga

SEQ ID NO: 90382 - RNA, 1350 nt, Artificial Sequence
  derived and/or modified CDS sequence (opt1) from neuraminidase__InfluenzaA__EPI174804
augaaccccaaccagaagaucaucaccaucggcagcaucugcauggugaucgggaucgucucccugaugcuccagaucggcaacauggugagcaucugggugucccacagcauccagacccgcaaccagcggcaggccgagccgaucuccaacaccaagagccugaccgagaaggccgucgcguccgugacccuggccgggaacagcucccucugccccaucagcggcugggccguguacuccaaggacaacagcauccgcaucggguccaagggcgacgucuucgugauccgggagcccuucaucagcugcucccaccuggagugccgcaccuucuuccugacgcagggcgcccuccugaacgacaagcacagcaacgggaccaucaaggaccggagcccccaccgcacccugauguccugcccggugggcgaggcccccucccccuacaacagccgguucgagagcgucgcgugguccgccagcgccugccacgacgggaccuccuggcucacgaucggcaucagcgggcccgacaacggcgccguggcggugcugaaguacaacggcaucaucaccgacaccaucaaguccuggcgcaacaacauccugcggacccaggagagcgagugcgccugcgucaacggguccugcuucgccgugaugacggacggcccgagcaaccgccaggccuccuacaagaucuucaagauggagaaggggaagguggucaagagcaucgagcucgacgcccccaacuaccacuacgaggagugcuccugcuaccccgacgcgggcgagaucacgugcgugugccgggacaacuggcacggcagcaaccgccccuggcuguccuucaaccagaaccuggaguaccagaucggguacaucugcagcggcguguucggggacaacccgcggcccaacgacggcaccggguccugcggccccgucagcuccaacggcgccuacggggugaagggcuucagcuucaaguacgggaacggcguguggaucgggcgcaccaaguccacgaacagccggagcggcuucgagaugaucugggaccccaacggcuggaccgagaccgacuccagcuucuccaugaagcaggacaucgucgccaucaccgacuggagcggguacuccggcagcuucgugcagcacccggagcucacggggcuggacugcauccgccccugcuucuggguggagcugguccggggccgccccaaggaguccaccaucuggaccagcggguccagcaucuccuucugcggcgugaacagcgacaccgucuccuggagcuggcccgacggcgccgagcucccguucacgaucgacaaguga

SEQ ID NO: 90383 - RNA, 1350 nt, Artificial Sequence
  derived and/or modified CDS sequence (opt1) from neuraminidase__InfluenzaA__EPI492441
augaaccccaaccagaagaucauggccaucggcagcgugugcauggucaucgggaucgugucccugaugcuccagaucggcaacaccaucagcaucugggugucccacagcuuccagacccgcguccagcaccaggccgagccgauccggaacacgaacuuccugaccgagaacgcgguggccuccgugacccuggccgggaacagcucccucugccccauccgcggcugggccguccacagcaaggacaacuccauccggaucgggagcaagggcgacguguucgugauccgcgagcccuucaucuccugcagccaccuggagugccggaccuucuuccugacgcagggcgcccuccugaacgacaagcacuccaaccgcaccgucaaggaccggagcccccaccgcacccugauguccugcccggugggggaggugcccagccccuacaacucccgguucgagagcgucgcgugguccgccagcgccugccacgacggcaccagcuggcucacgaucgggaucuccggccccgacaacggggccguggcggugcugaaguacaacggcaucaucaccgacaccaucaagagcuggcgcaacaacauccugcggacccaggaguccgagugcgccugcgucaacggcuucugcuucacggugaugaccgacgggccgagcaacggccaggccuccuacaagaucuucaagaugaagaaggggaagguggucaagagcguggagcucaacgcccccaacuaccacuacgaggagugcuccugcuaccccgacgccggcgagaucaugugcgugugccgcgacaacuggcacggcagcaaccggcccugggucuccuucaaccagaaccuggaguaccagaucggguacaucugcagcggcguguucggggacaacccgcgccccaacgacggcaccggguccugcggccccgugagccccaacggcgcguacgggaucaagggcuucuccuucaaguacgggaacggcgucuggaucgggcggaccaagagcacgaacucccgcagcggcuucgagauggugugggacccgaacggcuggaccgacaccgacuccgacuucagcaucaagcaggacaucgucgccaucaccgacugguccggguacagcggcagcuucgugcagcaccccgagcugacggggcucgacugcauccggcccugcuucuggguggagcugauccgcggccggcccaaggaguccaccaucuggaccagcggguccagcaucuccuucugcggcgucaacagcgagaccguguccuggagcuggccggacggcgccgagcugcccuucacgaucgacaaguga

SEQ ID NO: 90384 - RNA, 1350 nt, Artificial Sequence; identical to SEQ ID NO: 90011
  derived and/or modified CDS sequence (opt1) from neuraminidase__InfluenzaA__EPI164142

SEQ ID NO: 90385 - RNA, 1350 nt, Artificial Sequence
  derived and/or modified CDS sequence (opt1) from neuraminidase__InfluenzaA__EPI827076
augaaccccaaccagaagaucgugaccaucggcagcaucugcauggucaucgggaucaucucccugaugcuccagaucggcaacaucaucagcaucugggugucccacagcauccagaccgggaaccagcaccagacggagccgauccgcaacaccaacuuccugaccgagaacgccguggccuccgucacccuggcgggcaacagcucccucugccccaucaaggggugggccgugcacagcaaggacaacuccauccggaucggcagcaagggcgacguguucgucauccgcgagcccuucaucuccugcagccaccuggagugccggacguucuuccugacccagggggcccuccugaacgacaagcacuccaacggcaccgugaaggaccgcagcccccaccggacccugauguccugcccgaucggggaggcccccagccccuacaacucccgcuucgagagcguggccugguccgcgagcgccugccacgacggcacgagcuggcucaucaucgggaucuccggccccgacaacggcgccgucgccgugcugaaguacaacgggaucaucaccgacaccaucaagagcuggcggaacaacauccugcgcacccaggaguccgagugcgcgugcgugaacggcagcugcuucgccgucaugacggacgggccguccaacggccaggccagcuacaagaucuucaagaucgagaagggcaagguggugaaguccgucgagcucaacgcccccaacuaccacuacgaggagugcagcugcuaccccgacgccggggagaucaucugcgugugccgggacaacuggcacggcuccaaccgccccugggugagcuucaaccagaaccuggaguaccagaucggguacaucugcuccggcgucuucggggacaacccgcggcccaacgacggcaccggcagcugcgggcccguguccagcaacggcgcguacggggugaagggcuucuccuucaaguacgggaacggcgucuggaucggccgcaccaagagcacccacucccggagcggguucgagaugaucugggaccccaacggcuggacggggaccgacuccgaguucagcaugaagcaggacaucguggccaucaccgacuggagcggcuacuccgggagcuucgugcagcacccggagcugaccggccucgacugcauccgccccugcuucugggucgagcugauccggggccgccccaaggaguccacgaucuggaccagcggguccagcaucuccuucugcggcgugaacagcgacaccgucuccuggagcuggcccgacggggccgagcugccguucaccaucgacaaguga

SEQ ID NO: 90386 - RNA, 1350 nt, Artificial Sequence; identical to SEQ ID NO: 80603
  derived and/or modified CDS sequence (opt1) from neuraminidase__InfluenzaA__EPI168491

SEQ ID NO: 90387 - RNA, 1350 nt, Artificial Sequence
  derived and/or modified CDS sequence (opt1) from neuraminidase__InfluenzaA__EPI827078
augaaccccaaccagaagaucaucaccaucggcagcaucugcauggugaucgggaucgccucccugaugcuccagaucggcaacaucaucagcaucuggaucucccacagcauccagaccgggaaccagugccagaacgaguccaucagcaacacgaaguuccuggccgagaaggcggucgccuccgugacccuggccggcaacagcucccucugcccggugagcgggugggccgucuacuccaaggacaacagcauccgcaucggcuccaagggcgacguguucgugauccgggagcccuucaucagcugcucccaccuggagugccgcaccuucuuccugacccagggggcccuccugaacgacaagcacagcaacggcacggucaaggaccggagcccccaccgcacccugauguccugccccgugggggaggcgccgucccccuacaacagccgguucgagagcguggccugguccgccagcgccugccacgacggcaccuccuggcucaccaucgggaucagcggccccgacuccggcgcggucgccgugcugaaguacaacgggaucaucacggacaccaucaagagcuggcgcaacaacaucaugcggacccaggaguccgagugcgccugcgugaacggcagcugcuucaccaucaugacggacgggcccuccagcggccaggccuccuacaagaucuucaagauggagaagggcaaggucaucaagagcguggagcuggacgccccgaacuaccacuacgaggagugcuccugcuaccccgacgcgggggagaucacgugcgugugccgcgacaacuggcacggcagcaaccggcccuggaucuccuucaaccagaaccucgaguaccagaucggguacaucugcagcggcgucuucggggacaacccccgcccgaacgacggcaccggcuccugcgggcccguguuccccaacggcgccuacggggugaagggcuucagcuucaaguacgggaacggcgucuggaucggccggaccaaguccaccaacagccgcagcggguucgagaugaucugggaccccaacggcuggaccgggaccgacuccagcuucuccgugaagcaggacaucguggccaucaccgaguggagcggcuacuccgggagcuucguccagcacccggagcugacgggccuggacugcauccggcccugcuucuggguggagcucauccgcggccggcccaaggaguccaccaucuggaccagcggguccagcaucuccuucugcggcgugaacggggacaccgucagcugguccuggcccgacggcgccgagcugccguucacgaucgacaaguga

SEQ ID NO: 90388 - RNA, 1350 nt, Artificial Sequence
  derived and/or modified CDS sequence (opt1) from neuraminidase__InfluenzaA__EPI594521
augaaccccaaccagaagaucaucaccaucggcagcaucugcguggggaucggcaucgucucccugaugcuccagaucgggaacauggugagcaucugggugaaccacuccauccagaccgagaaccagugccaggccgagagcaucuccaacacgaaguuccugaccgagaaggccgucgcgccggugacccugaugggcaacagcucccucugccccaucagcgggugggccgugcacuccaaggacaacagcauccgcaucggcuccaagggcgacgucuucgugauccgggagcccuucaucagcugcucccaccuggagugccgcaccuucuuccugacgcagggggcccuccugaacgacaagcacagcaacggcaccgugaaggaccggagcccccaccgcgcccugauguccugcccggucggggaggcccccucccccuacaacagccgguucgaguccguggcguggagcgccagcgccugccacgacggcaccggguggcucaccaucggcaucuccggccccgacaacggggccguggcgguccugaaguacaacggcaucaucacggacaccaucaagagcuggcgcaacaacauccugcggacccaggaguccgagugcgccugcgugaacgggagcugcuucaccgugaugacggacggcccguccaacggccaggccagcuacaagaucuucaagcucgagaaggggaaggucgugaaguccguggagcuggacgcccccaacuaccacuacgaggagugcagcugcuaccccgacgccggcgagaucacgugcgucugccgcgacaacuggcacggguccaaccggcccugggugagcuucaaccagaaccuggaguaccagaucggcuacaucugcuccgggguguucggcgacaacccgcgccccaacgacggcaccgggagcugcggccccgucucccccaacggggcguacggcgugaagggguucagcuucaaguacggcaacggcguguggaucgggcggaccaaguccaccaacagccgcuccggcuucgagaugaucugggacccgaacggguggaccgagaccgacagcuccuucagcgucaagcaggacaucguggccaucaccgacuggagcggcuacuccgggagcuucguccagcaccccgagcucacgggccuggacugcauccggcccugcuucuggguggagcugauccgcggccggcccaaggaguccaccaucuggaccagcggguccagcaucuccuucugcggcgugaacagcgacaccgucgggugguccuggccggacggcgccgaggugcccuucacgaucgacaaguga

SEQ ID NO: 90389 - RNA, 1410 nt, Artificial Sequence
  derived and/or modified CDS sequence (opt1) from neuraminidase__InfluenzaA__EPI5787
augaaccccaaccagaagaucaucaccaucggcagcaucugcaugguggucgggaucaucucccugaugcuccagaucggcaacaucaucagcaucugggugucccacagcauccagaccgggaaccagcaccaggccgagccgugcaaccaguccaucaucacguacgagaacaacaccugggugaaccagaccuacgucaacaucagcaacaccaacuuccugacggagaaggccguggcguccgugacccuggccggcaacagcucccucugccccaucagcgggugggccguccacuccaaggacaacggcauccgcaucggcagcaagggggacguguucgugauccgggagcccuucaucuccugcagccaccuggagugccgcaccuucuuccugacccagggcgcccuccugaacgacaagcacuccaacgggacggucaaggaccggagcccccaccgcacccugauguccugcccggugggcgaggcccccagccccuacaacucccgguucgagagcguggcguggagcgccuccgccugccacgacgggaccagcuggcucaccaucggcaucuccggccccgacaacggggccgucgcggugcugaaguacaacggcaucaucacggacaccaucaagagcuggcgcaacaacauccugcggacccaggaguccgagugcgccugcgugaacgggagcugcuucaccgucaugacggacggcccguccaacggccaggccagcuacaagaucuucaagauggagaaggggaagguggugaaguccgucgagcucaacgcccccaacuaccacuacgaggagugcagcugcuaccccgacgccggcgagaucacgugcgugugccgcgacaacuggcacggguccaaccggcccugggugagcuucaaccagaaccuggaguaccagaucggcuacaucugcuccggggucuucggcgacaacccgcgccccaacgacggcaccgggagcugcggccccgugucccccaacggggcguacggcgugaagggguucagcuucaaguacggcaacggcgucuggaucgggcggaccaaguccaccaacagccgcuccggcuucgagaugaucugggacccgaacggguggaccggcaccgacagcagcuucuccgugaagcaggacaucgucgccaucaccgacuggagcggguacuccggcagcuucgugcagcaccccgagcugacgggccucgacugcauccggcccugcuucuggguggagcugauccgcgggcggcccaaggaguccaccaucuggaccagcggcuccagcaucuccuucugcggggucaacagcgacaccgugggcugguccuggccggacgacgccgagcugcccuucacgaucgacaaguga

SEQ ID NO: 90390 - RNA, 1410 nt, Artificial Sequence; identical to SEQ ID NO: 90389
  derived and/or modified CDS sequence (opt1) from neuraminidase__InfluenzaA__EPI5787

SEQ ID NO: 90391 - RNA, 1350 nt, Artificial Sequence; identical to SEQ ID NO: 85089
  derived and/or modified CDS sequence (opt1) from neuraminidase__InfluenzaA__EPI267031

SEQ ID NO: 90392 - RNA, 1350 nt, Artificial Sequence; identical to SEQ ID NO: 86669
  derived and/or modified CDS sequence (opt1) from neuraminidase__InfluenzaA__EPI376539

SEQ ID NO: 90393 - RNA, 1350 nt, Artificial Sequence
  derived and/or modified CDS sequence (opt1) from neuraminidase__InfluenzaA__EPI124069
augaaccccaaccagaagaucaucaccaucggcagcaucugcauggugaucgggaucgucucccugaugcuccagaucggcaacaugaucagcaucugggugucccacagcauccagaccgggaaccagcaccaggccgaguccaucagcaacacgaacccgcugaccgagaaggccguggcguccgucacccuggccggcaacagcucccucugccccauccgcgggugggccgugcacagcaaggacaacaacauccggaucggcuccaagggcgacguguucgucauccgcgagcccuucaucagcugcucccaccuggagugccggaccuucuuccugacgcagggggcccuccugaacgacaagcacagcaacggcaccgugaaggaccgcagcccccaccggacccugauguccugcccggugggggaggcccccucccccuacaacagccgcuucgaguccgucgcguggagcgccagcgccugccacgacggcaccuccuggcucacgaucgggaucagcggccccgacaacgaggccguggcggugcugaaguacaacggcaucaucaccgacaccaucaaguccuggcggaacaacauccugcgcacccaggagagcgagugcgccugcgucaacggguccugcuucacggugaugaccgacggcccgagcgacgggcaggccuccuacaagaucuucaagauggagaagggcaagguggucaagagcguggagcucgacgcccccaacuaccacuacgaggagugcuccugcuaccccgacgccggcgagaucacgugcgugugccgggacaacuggcacgggagcaaccgccccugggucuccuucaaccagaaccuggaguaccagaucggcuacaucugcagcgggguguucggcgacaacccgcggcccaacgacgggaccggcuccugcggccccaugagccccaacggggcguacggcgugaagggguucuccuucaaguacggcaacggggucuggaucggccgcaccaagagcaccaacucccggagcggcuucgagaugaucugggacccgaacggguggaccggcaccgacuccagcuucagcgugaagcaggacaucguggccaucacggacugguccggguacagcggcuccuucguccagcaccccgagcugaccgggcucgacugcauccgccccugcuucuggguggagcugauccggggccgccccaaggagagcaccaucuggaccuccggcagcuccaucagcuucugcggggucaacuccgacacggugagcugguccuggccggacggcgccgagcugcccuucaccaucgacaaguga

SEQ ID NO: 90394 - RNA, 1350 nt, Artificial Sequence
  derived and/or modified CDS sequence (opt1) from neuraminidase__InfluenzaA__EPI342499
augaaccccaaccagaagaucaucaccaucggcagcaucugcauggugaucgggaucgucucccugaugcuccagaucggcaacaugaucagcaucuggaucucccacagcauccagaaggggaaccagcaccgcaccgaguccaucagcaacacgaacccgcugaccgagaaggccguggccuccgugacccugaccggcaacagcucccucugccccauccgggggugggcgguccacagcaaggacaacaacauccgcaucggcuccaagggcgacguguucgugauccgggagcccuucaucagcugcucccaccuggagugccgcacguucuuccugacccagggggcccuccugaacgacaagcacagcaacggcaccgucaaggaccggagcccccaccgcacccugauguccugcccgcucggggaggcccccucccccuacaacagccgguucgaguccguggccuggagcgccagcgcgugccacgacggcacgggguggcugaccaucggcaucuccggccccgacaacgaggccguggccguccugaaguacaacgggaucaucaccgacaccaucaagagcuggcgcaacaacauccuccggacgcaggaguccgagugcgccugcgugaacggcagcugcuucaccgugaugaccgacgggccguccaacggccaggcgagcuacaagaucuucaagaugcgcaagggcaaggucgugaaguccguggagcuggacgcccccaacuaccacuacgaggagugcagcugcuaccccgacaccggggagaucacgugcgucugccgggacaacuggcacggcuccaaccgccccuggaucagcuucaaccagaaccuggaguaccagaucggguacaucugcuccggcaucuucggggacaacccgcggcccaacgacggcaccggcagcugcgggcccaugucccccaacggcgccuacggggugaagggcuucagcuucaaguacgggaacggcguguggaucggccgcaccaaguccaccaacagccgguccggguucgagaugaucugggacccgaacggcuggacggagaccgacagcuccuucagcgucaagcaggacaucguggccaucaccgacuggagcggguacuccggcagcuucgugcagcaccccgagcucaccgggcuggacugcauccgccccugcuucugggucgagcugauccggggccgccccaaggaguccacgaucuggaccagcggcuccagcaucuccuucugcggggugaacagcgacaccguguccuggagcuggccggacggcgccgagcuccccuucaccaucgacaaguga

SEQ ID NO: 90395 - RNA, 1350 nt, Artificial Sequence
  derived and/or modified CDS sequence (opt1) from neuraminidase__InfluenzaA__EPI103069
augaaccccaaccagaagaucaucaccaucggcagcaucugcauggugaucgggaucgucucccugaugcuccagaucggcaacaugaucagcaucugggugucccacagcauccagaccgggaaccagcgccaggccgagccgaucuccaacacgaaguuccugaccgagaaggccguggcgagcgucacccuggccggcaacuccagccucugccccaucuccgggugggccguguacagcaaggacaacuccauccggaucggcagccgcggcgacguguucgucauccgggagcccuucaucuccugcagccaccuggagugccgcaccuucuuccugacgcagggggcccuccugaacgacaagcacuccaacggcaccaucaaggaccggagcccccaccgcacccugauguccugcccggugggggaggcccccagccccuacaacucccgguucgagagcguggcguggagcgccuccgccugccacgacggcaccagcuggcucacgaucgggaucuccggccccgacaacggcgccgucgcggugcugaaguacaacgggaucaucaccgacaccaucaagagcuggcgcaacaacauccugcggacccaggaguccgagugcgccugcgugaacggcagcugcuucacggucaugaccgacgggccguccagcggccaggccuccuacaagaucuucaagauggagaagggcaagguggucaagagcguggagcucgacgcccccaacuaccacuacgaggagugcuccugcuaccccgacgccggggagaucacgugcgugugccgcgacaacuggcacggcagcaaccggcccuggguguccuucaaccagaaccuggaguaccagaucggguacaucugcagcggcgucuucggggacaacccgcgccccaacgacggcaccggcuccugcgggcccgugagccccaacggcgcguacggggugaagggcuucuccuucaaguacgggaacggcgucuggaucggccggaccaagagcaccaacucccgcagcggguucgagaugaucugggacccgaacggcuggaccgggaccgacagcuccuucagcgugaagcaggacaucguggccaucacggacugguccggcuacagcggguccuucguccagcaccccgagcugaccggccucgacugcauccggcccugcuucuggguggagcugauccgcggccggcccaaggagagcaccaucuggaccuccgggagcuccaucagcuucugcggcgucaacuccgacacggugagcugguccuggccggacggggccgagcugcccuucaccaucgacaaguga

SEQ ID NO: 90396 - RNA, 1350 nt, Artificial Sequence; identical to SEQ ID NO: 90372
  derived and/or modified CDS sequence (opt1) from neuraminidase__InfluenzaA__EPI227595

SEQ ID NO: 90397 - RNA, 1410 nt, Artificial Sequence
  derived and/or modified CDS sequence (opt1) from neuraminidase__InfluenzaA__EPI569385
augaaccccaaccagaagaucaucaccaucggcagcgugucccugaccaucgccacggucugcuuccucaugcagaucgccauccuggcgaccaccgugacccugcacuucaagcagaacgagugcagcaucccgcccaacaaccaggugguccccugcgagcccaucaucaucgagaagaacaucacggagaucguguaccucaacaacaccaccaucgagaaggaggugugcccggagguccccgaguaccgcaacugguccaagccccagugccagaucaccggguucgcccccuucagcaaggacaacuccauccggcugagcgccggcggggacaucugggugacgcgcgagccguacguguccugcagccccggcaagugcuaccaguucgcccuggggcagggcaccacccucaacaacaagcacuccaacggcaccauccacgaccggaucccccaccgcacgcugcugaugagcgagcucgggguccccuuccaccugggcaccaagcaggucugcaucgccugguccagcuccagcugccacgacgggaaggcguggcugcacgugugcgugaccggcgacgaccggaacgccaccgccuccuucaucuacgacgggaugcucgccgacagcaucggcuccuggagccagaacauccugcgcacgcaggaguccgagugcgugugcaucaacgggaccugcaccguggucaugaccgacgggagcgcgagcggccgggccgacacgcgcauccuguucaucaaggaggggaagaucgugcacaucuccccgcucagcggcuccgcccagcacaucgaggagugcagcugcuacccccgguaccccgacgugcgcugcgucugccgggacaacuggaagggcuccaaccgccccgugaucgacaucaacauggccgacuacagcaucgacuccagcuacgugugcuccgggcuggucggcgacaccccgcggaacgacgacagcuccagcuccagcaacugccgcgaccccaacaacgagcgggggaaccccggcgugaaggggugggccuucgacaacggcaacgacguguggaugggccgcaccaucuccgaggacagccgguccggguacgagaccuuccgcgucacggacggcuggaccaccgcgaacagcaagucccaggugaaccggcagaucaucgucgacaacaacaacuggagcggguacagcggcaucuucuccguggagggcaagagcugcaucaaccgcugcuucuacguggagcugauccggggccgcccccaggagacccgcgucugguggacguccaacagcaucgugguguucugcggcaccuccgggaccuacggcaccgggagcuggccggacggcgccaacaucaacuucaugcccaucuga

SEQ ID NO: 90398 - RNA, 1380 nt, Artificial Sequence
  derived and/or modified CDS sequence (opt1) from neuraminidase__InfluenzaA__EPI736916
augaaccccaaccagaagaucacgugcaucagcgccaccggcgugacccuguccgucgugagccuccugaucgggaucgccaaccugggccucaacaucgggcugcacuacaagguguccgacagcaccaccaucuccaucccgaacaugaacgagaccaaccccacgaccaccaacaucaccaacaucaucgucaacaagaacgaggagcgcacguuccugaaccucaccaagccccugugcgaggugaacagcuggcacauccuguccaaggacaacgcgauccggaucggcgaggacgcccacauccucgugacccgcgagcccuaccugagcugcgacccgcaggggugccggauguucgcccugucccagggcaccacgcuccgcggccggcacgccaacgggaccauccacgaccgcagccccuuccgggcccugaucuccugggagaugggccaggcgcccagccccuacaacacccgcgucgagugcaucgggugguccagcaccuccugccacgacggcaucagccggauguccaucugcaucagcgggccgaacaacaacgccuccgccguggugugguaccgcggccggcccgucacggagauccccagcugggccggcaacauccugcgcacccaggagagcgagugcgugugccacaaggggaucugccccguggucaugaccgacggcccggcgaacaacaaggccgccaccaagaucaucuacuucaaggaggggaaggugcagaagaucgaggagcuccagggcaacgcccagcacaucgaggagugcuccugcuacggcgccgcggggaugaucaagugcgugugccgggacaacuggaagggcgccaaccgccccaucaucacgaucgaccccgagaugaugacccacaccagcaaguaccugugcuccaagauccugaccgacacgagccggcccaacgacccgaccaacgggaacugcgacgcccccaucaccggcgggucccccgaccccggcgucaagggcuucgccuuccucgacggggagaacagcuggcugggccgcaccaucuccaaggacagccgguccggguacgagaugcugaaggugccgaacgccgagacggacacccagagcggccccaccuccuaccagcucaucgugaacaaccagaacuggagcggguacuccggcgcguucaucgacuacugggccaacaaggagugcuucaaccccugcuucuacgucgagcugauccgcggccggcccaaggagagcgacgugcuguggaccuccaacagcaugguggcccucugcgggucccgcgagcggcugggcagcugguccuggcacgacggggccgagaucaucuacuucaaguga

SEQ ID NO: 90399 - RNA, 1380 nt, Artificial Sequence; identical to SEQ ID NO: 90018
  derived and/or modified CDS sequence (opt1) from neuraminidase__InfluenzaA__EPI593891

SEQ ID NO: 90400 - RNA, 1380 nt, Artificial Sequence
  derived and/or modified CDS sequence (opt1) from neuraminidase__InfluenzaA__EPI691380
augaaccccaaccagaagaucgugugcaucagcgucaccggcgugacccuguccguggucagccuccugaucgggaucacgaaccugggccucaacaucgggcugcacuacaagguguccgacagcaccaccaucaacaucccgaacaugaacgagaccaaccccacgaccaccaacaucaccaacaucaucaugaacaagaacgaggagcgcacguuccugaagcucaccaagccccugugcgaggugaacuccuggcacauccugagcaaggacaacgccauccggaucggcgaggacgcccacauccucgucacccgcgagcccuaccuguccugcgacccgcaggggugccggauguucgcgcugagccagggcaccacgcuccgcggccagcacgccaacgggaccauccacgaccggucccccuuccgcgcccugaucagcugggagaugggccaggcccccucccccuacaacacccggguggagugcaucggguggagcuccaccagcugccacgacggcaucucccgcaugagcaucugcaucuccgggccgaacaacaacgccagcgcgguggucugguaccggggccgccccgugacggagauccccuccugggccggcaacauccugcggacccaggagagcgagugcgugugccacaaggggaucugccccgucgugaugaccgacggcccggccaacaacaaggccgcgaccaagaucaucuacuucaaggaggggaagauccagaagacggaggagcuccagggcaacgcccagcacaucgaggagugcagcugcuacggcgccgccgggaugaucaagugcgugugccgcgacaacuggaagggcgccaaccggcccaucaucaccaucgaccccgagaugaugacccacaccuccaaguaccugugcagcaagauccugacggacaccucccgccccaacgacccgaccaacgggaacugcgacgcgcccaucaccggcgggagccccgaccccggcgucaagggcuucgccuuccucgacggggagaacuccuggcugggccggacgaucagcaaggacucccgcagcggguacgagaugcugaaggugccgaacgccgagaucgacauccaguccggccccaucagcuaccagcucguggucaacaaccagaacugguccggguacagcggcgccuucaucgacuacugggccaacaaggagugcuucaaccccugcuucuacguggagcugauccggggccgccccaaggaguccggggugcuguggaccagcaacuccauggucgcgcucugcggcagccgggagcgccugggguccuggagcuggcacgacggcgccgagaucaucuacuucaaguga

SEQ ID NO: 90401 - RNA, 1413 nt, Artificial Sequence
  derived and/or modified CDS sequence (opt1) from neuraminidase__InfluenzaA__EPI533584
augaaccccaaccagaagaucacgugcaucagcgccaccggcaugacccuguccguggucagcaugcucaucgggaucgccaaccugggccugaacaucgggcuccacuacaagguguccgacagcaccaacaucaacaucccgaacaugaacgagaccucccccaccacgaccaucaucaacaaccacccccagaacaacuucaccaacaucaccaacaucaucgugacgaagaacgaggagggccaccuccugaaccugaccaagccccugugcgaggucaacagcuggcacauccuguccaaggacaacgcgauccgcaucggggaggacgcccacaucaucgugacccgggagccguaccucagcugcgacccccagggcugccgcauguucgcccugucccagggcaccacgcugcgggggaagcacgccaacggcaccauccacgaccgcagccccuuccgggcccucguguccugggagauggggcaggcgcccagcccguacaacacccgcgucgagugcaucggcugguccagcaccuccugccacgacgggaucagccggauguccaucugcaucagcggccccaacaacaacgccuccgccguggugugguacggcgggcgccccgucacggagauccccagcugggccggcaacauccugcggacccaggagagcgagugcgugugccacgggggcaucugcccgguggucaugaccgacggccccgcgaacaaccgcgccgagaccaagaucaucuacuucaaggaggggaagaucaagaagaucgaggagcugaagggcgacgcccagcacaucgaggagugcuccugcuacggggccagcgagaugaucaagugcaucugccgggacaacuggaagggcgccaaccgccccgugaucacgaucgaccccgagaugaugacccacaccuccaaguaccucugcagcaagauccugaccgacacgucccggccgaacgaccccaccaacgggaagugcgaggcgcccaucaccggcggcagccccgacccgggggugaagggcuucgccuuccuggacggggagaacuccuggcucggccgcaccaucagcaaggacucccggagcggguacgagaugcugaagguccccaacgccgagacggacacccaguccggcgccaucagccaccagaucaucgugaacaaccagaacugguccggcuacagcggggccuucaucgacuacugggcgaacaaggagugcuucaaccccugcuucuacguggagcugauccgcggccggcccaaggaguccagcguccucuggaccuccaacagcaucguggcccugugcggguccaaggagcgccugggcagcuggagcuggcacgacggggccgagaucaucuacuucaaguga

SEQ ID NO: 90402 - RNA, 1380 nt, Artificial Sequence; identical to SEQ ID NO: 90022
  derived and/or modified CDS sequence (opt1) from neuraminidase__InfluenzaA__EPI641400

SEQ ID NO: 90403 - RNA, 1380 nt, Artificial Sequence; identical to SEQ ID NO: 90022
  derived and/or modified CDS sequence (opt1) from neuraminidase__InfluenzaA__EPI587620

SEQ ID NO: 90404 - RNA, 1410 nt, Artificial Sequence
  derived and/or modified CDS sequence (opt1) from neuraminidase__InfluenzaA__EPI569392
augaaccccaaccagaagaucgugaccaucggcagccugucccucgggcuggucguguucaacgugcugcuccacgccgucagcaucauccugaccgugcuggcccucggcaaguccgagaacaacgggaucugcaacggcacggugguccgcgaguacaacgagaccgugcggaucgagaaggugacccagugguacaacaccagcgucguggaguacgugccgcacuggaacgaggggacguacaucaacaacaccgagcccaucugcgacgucaagggcuucgcgcccuucuccaaggacaacggcauccgcguggggagccggggccacaucuucgugauccgcgagcccuucgucuccugcagcccgguggggugccggaccuucuuccugacccagggcucccugcucaacgacaagcacagcaacgggacggugaaggaccgcucccccuuccggacccugaugagcgucgaggugggccagucccccaacguguaccaggcccgcuucgaggccgucgccuggagcgccaccgcgugccacgacggcaagaaguggauggccaucggggugaccggccccgacuccaaggccguggccgucgugcacuacgggggcgucccgacggacguggugaacagcugggcgggcgacauccugcggacccaggaguccagcugcacgugcauccaggggaacugcuacugggucaugaccgacggccccgccaaccgccaggcccaguaccggaucuacaaggccaaccaggggaagaucaucggccgcaaggacguguccuucagcgggggccacaucgaggagugcagcugcuaccccaacgacggcaagguggagugcgucugccgggacaacuggaccgggaccaaccgccccgugcucaucaucuccccggaccugagcuaccgggugggcuaccugugcgccgggcuccccuccgacacgccccgcggcgaggacacccaguucgucgggagcugcaccucccccaugggcaaccagggcuacggggugaagggcuucggguuccggcagggcaccgacgugugggucgggcgcaccaucagccggaccucccgcagcggcuucgagaucauccggaucaagaacggcuggacgcagaccuccaaggagcagauccgccgccaggugguggucgacaacagcaacugguccggguacagcggcuccuucacccugccgguggagcugagcgggcgggagugccucgugcccugcuucugggucgagaugauccgcggccggcccgaggagcgcaccaucuggacguccagcuccagcaucgugaugugcggcguggacuacgagaucgcggacugguccuggcacgacggggccauccugcccuucgacaucgacaaguga

SEQ ID NO: 90405 - RNA, 1368 nt, Artificial Sequence
  derived and/or modified CDS sequence (opt1) from neuraminidase__InfluenzaA__EPI459857
augaaccccaaccagaagaucaucaccaucggcagcaucugcauggugaucgggaccgucucccugaucguccaggugggcaacaucauccucaucugggugaaccacagcauccagacgugcaucaccuacgagaacaacaccugggugaaccagaccuacguguccaacacgaacuuccugaccgggcaggccgucgccagcgugacccuggcgggcaacuccagccucugcccgaucuccgggugggccaucuacagcaaggacaacggcauccgcaucggcuccaagggggacguguucgucauccgggagcccuucaucagcugcucccaccuggagugccgcaccuucuuccugacgcagggcgcccuccugaacgacaagcacagcaacgggaccaucaaggaccggucccccuaccgcacccugaugagcugccccgugggcgaggccccgucccccuacaacagccgguucgaguccguggccuggagcgcguccgccugccacgacgggaucaacuggcucaccaucggcaucagcggccccgacaacgaggccgucgccgugcugaaguacaacggggugaucacggacaccaucaagagcuggcgcaacaacauccugcggacccaggaguccgagugcgcgugcgucaacggcagcugcuucaccgugaugacggacgggcccuccaacggccaggccagcuacaagaucuucaagaucgagaagggcaaggugguccgcuccguggagcucgacgccccgaacuaccacuacgaggagugcagcugcuaccccgacgccggggagaucacgugcgugugccgggacaacuggcacggcuccaaccgccccugggucagcuucaaccagaaccuggaguaccagaccggguacaucugcuccggcguguucggggacagcccccggccgaacgacggcaccggcuccugcgggcccgugagcuccaacggcgccuucggggucaagggcuucagcuucaaguacgggaacggcguguggaucggccgcaccaagaccaccaacucccggagcggguucgagaugaucugggaccccaacggcuggaccgagacggacuccagcuucuccaugaagcaggacaucaucgcgaucaccgacuggagcggguacagcggcuccuucguccagcaccccgagcugaccgggcucaacugcaugcgcccgugcuucuggguggagcugauccggggccagccccgcgagaacaccaucuggacgagcggcuccagcaucuccuucugcggggugaacagcgagaccgucggcugguccuggcccgacggggccgagcugcccuucaccaucgacaaguga

SEQ ID NO: 90406 - RNA, 1416 nt, Artificial Sequence
  derived and/or modified CDS sequence (opt1) from neuraminidase__InfluenzaA__EPI242204
augaaccccaaccagaagcuguucgcccucagcggcguggccaucgcgcuguccguccugaaccuccugaucgggaucagcaacgugggccugaacgugucccuccaccugaagggggagggcgucaagcaggagaacaaccugaccugcaccacgaucacccagaacaacaccaccgugguggagaacacguacgucaacaacaccaccaucaucaacaaggggaccaaccucaaggccccgaacuaccugcugcucaacaagagccugugcuccguggagggcuggguggucaucgccaaggacaacgccauccgcuucggcgagagcgagcagaucaucgugacgcgggagcccuacguguccugcgaccccagcgggugcaagauguacgcccugcaccagggcaccaccauccgcaacaagcacuccaacgggaccauccacgaccggacgaccuuccgcggccucaucagcacgccccuggggaccccgcccaccgucuccaacagcgacuucaucugcgugggcugguccagcaccuccugccacgacggcguggggcggaugaccaucugcauccagggcaacaacgacaacgcgaccgccacggucuacuacaaccgccggcugaccaccaccaucaagacgugggccaagaacauccuccgcacccaggagagcgagugcgugugccacaacgggaccugcgccguggucaugaccgacggccccgcguccagccaggccuacacgaagaucauguacuuccacaagggccugaucaucaaggaggagccccugcggggguccgcccgccacaucgaggagugcagcugcuacggccacgaccagaaggugagcugcgugugccgggacaacuggcagggggccaaccgcccgaucaucgagaucgacauguccacccucgagcacaccagccgguacgucugcaccggcgugcugacggacaccucccgccccggggacaagcccaacggcgacugcagcaaccccaucaccggcuccccgggggcccccggcgugaagggguucggcuuccugaacggggacaacaccuggcucggccggacgaucagcccccgcucccggagcggcuucgagaugcugaagauccccaacgcggagaccgacccgaacucccgcaucaucgagcggcaggagaucgucgacaacagcaacugguccggguacagcggcuccuucaucgacuacugggacgaggccaacgagugcuacaaccccugcuucuacguggagcugauccgcgggcggcccgaggaggccaaguacgucugguggaccagcaacucccucaucgcccugugcggcagccccguguccguggggagcggcuccuucccggacggcgcccagauccaguacuucagcuga

SEQ ID NO: 90407 - RNA, 1416 nt, Artificial Sequence
  derived and/or modified CDS sequence (opt1) from neuraminidase__InfluenzaA__EPI408029
augaaccccaaccagaagcuguucgcccucagcggcguggccaucgcgcuguccguccugaaccuccugaucgggaucagcaacgugggccugaacaugucccuccaccugaagggggagggcgugaagcaggagaacaaccugaccugcaccacgaucacccagaacaacaccaccgucguggagaacacguacgugaacaacaccaccaucaucaacaaggggaccaaccucaaggccccgaacuaccugcugcucaacaagagccugugcuccgucgagggcuggguggugaucgccaaggacaacgccauccgcuucggcgagagcgagcagaucaucgucacgcgggagcccuacguguccugcgaccccagcgggugcaagauguacgcccugcaccagggcaccaccauccgcaacaagcacuccaacgggaccauccacgaccggacgaccuuccgcggccuccugagcacgccccuggggaccccgcccaccguguccaacagcgacuucaucugcgucggcugguccagcaccuccugccacgacggcguggggcggaugaccaucugcauccagggcaacaacgacaacgcgaccgccacgguguacuacaaccgccggcucaccaccaccaucaagacgugggccaagaacauccugcgcacccaggagagcgagugcgucugccacaacgggaccugcgccguggugaugaccgacggccccgcguccagccaggccuacacgaagaucauguacuuccacaagggccugaucaucaaggaggagccccuccggggguccgcccgccacaucgaggagugcagcugcuacggccacgaccagaaggucagcugcgugugccgggacaacuggcagggggccaaccgcccgaucaucgagaucgacauguccacccuggagcacaccagccgguacgugugcaccggcguccugacggacaccucccgccccggggacaagcccaacggcgacugcagcaaccccaucaccggcuccccgggggcccccggcgugaagggguucggcuuccucaacggggacaacaccuggcugggccggacgaucagcccccgcucccggagcggcuucgagaugcugaagauccccaacgcggagaccgacccgaacucccgcaucaucgagcggcaggagaucguggacaacagcaaccgcuccggguacagcggcuccuucaucgacuacugggacgaggccaacgagugcuacaaccccugcuucuacgucgagcucauccgggggcgccccgaggaggccaaguacgugugguggaccagcaacucccugaucgcccugugcggcagccccgucuccguggggagcggcuccuucccggacggcgcccagauccaguacuucagcuga

SEQ ID NO: 90408 - RNA, 1398 nt, Artificial Sequence; identical to SEQ ID NO: 87478
  derived and/or modified CDS sequence (opt1) from neuraminidase__InfluenzaA__EPI439509

SEQ ID NO: 90409 - RNA, 1350 nt, Artificial Sequence; identical to SEQ ID NO: 90011
  derived and/or modified CDS sequence (opt1) from neuraminidase__InfluenzaA__EPI164223

SEQ ID NO: 90410 - RNA, 1398 nt, Artificial Sequence; identical to SEQ ID NO: 87478
  derived and/or modified CDS sequence (opt1) from neuraminidase__InfluenzaA__EPI486493

SEQ ID NO: 90411 - RNA, 1398 nt, Artificial Sequence
  derived and/or modified CDS sequence (opt1) from neuraminidase__InfluenzaA__EPI740737
augaaccccaaccagaagauccugugcaccagcgccaccgccaucacgaucuccgcgaucgccgugcucaucggcaucgccaaccuggggcugaacaucggccuccaccugaagccggggugcaacugcagccacucccagcccgagaccaccaacaccagccagacgaucaucaacaacuacuacaacgagaccaacaucaccaacauccagaucgaggagcgcaccucccggaacuucaacaaccugacgaagggccucugcaccaucaacagcuggcacaucuacgggaaggacaacgccguccgcaucggcgaguccagcgacgugcuggugacccgggagcccuacgucuccugcgaccccgacgagugccgcuucuacgcccugagccagggcaccacgauccgggggaagcacuccaacggcaccauccacgaccgcagccaguaccgggcgcucaucuccuggccgcugagcuccccgcccaccgugcacaacagccgcguggagugcaucgggugguccagcaccuccugccacgacggcaagagccggaugagcaucugcaucuccgggcccaacaacaacgccagcgccgucgugugguacaaccgccggcccguggccgagaucaacacgugggcgcgcaacauccugcggacccaggaguccgagugcgucugccacaacggcgugugccccguggucuucaccgacggccccgccaccgggcccgccgacacgcgcaucuacuacuucaaggagggcaagauccucaagugggagagccugaccgggaccgccaagcacaucgaggagugcuccugcuacggcgagcggaccggcaucacgugcacgugccgcgacaacuggcaggggagcaaccggccgguggugcagaucgaccccgucgccaugacccacaccucccaguacaucugcagccccgugcugaccgacagcccccgcccgaacgaccccaacaucggcaagugcaacgaccccuaccccgggaacaacaacaacggcgugaagggguucuccuaccucgacggcgcgaacaccuggcugggccggaccaucuccaccgccagccgcuccggguacgagaugcugaaggucccgaacgcccucacggacgaccggagcaagcccauccagggccagaccaucgugcugaacgccgacugguccggguacagcggcuccuucauggacuacugggccgagggggacugcuaccgcgcgugcuucuacguggagcugauccgcggccggcccaaggaggacaaggucugguggaccagcaacuccaucgugagcaugugcagcuccaccgaguuccucggccaguggaacuggcccgacggggccaagaucgaguacuuccuguga

SEQ ID NO: 90412 - RNA, 1398 nt, Artificial Sequence
  derived and/or modified CDS sequence (opt1) from neuraminidase__InfluenzaA__EPI730494
augaaccccaaccagaagauccugugcaccagcgccaccgccaucacgaucggcgcgaucgccgugcucaucgggaucgccaaccugggccugaacaucgggcuccaccugaagccgggcugcaacugcucccacagccagcccgagaucaccaacaccucccagaccaucaucaacaacuacuacagcgagacgaacaucaccaacauccagauggaggagcgcaccuccaagaacuucaacaaccugaccaaggggcucugcacgaucaacagcuggcacaucuacggcaaggacaacgccguccggaucggcgaguccagcgacgugcuggugacccgcgagcccuacgucuccugcgaccccgacgagugccgguucuacgcccugagccaggggaccaccauccgcggcaagcacuccaacgggacgauccacgaccggagccaguaccgcgcgcucaucuccuggccgcugagcuccccgcccaccguguacaacagccggguggagugcaucggcugguccagcaccuccugccacgacggcaagagccgcaugagcaucugcaucuccgggcccaacaacaacgccagcgccgucgugugguacaaccggcgccccguggccgagaucaacaccugggcgcggaacauccugcgcacgcaggaguccgagugcgucugccacaacggcgugugccccguggucuucaccgacgggagcgccaccggccccgccgacacccggaucuacuacuucaaggaggggaagauccucaagugggagucccugacgggcaccgccaagcacaucgaggagugcagcugcuacggcgagcgcaccgggaucacgugcacgugccgggacaacuggcagggcuccaaccgccccgugauccagaucgacccgguggccaugacccacaccagccaguacaucugcucccccguccugaccgacaacccccggcccaacgacccgaacaucgggaagugcaacgaccccuaccccggcaacaacaacaacgggaucaagggcuucagcuaccucgacggcgcgaacaccuggcuggggcgcaccaucuccaccgccagccgguccggcuacgagaugcugaaggugcccaacgcccucaccgacgaccgcagcaagccgauccaggggcagacgaucgugcugaacgccgacugguccggcuacagcggguccuucauggacuacugggccgagggcgacugcuaccgggcgugcuucuacgucgagcugauccgcggccgccccaaggaggacaaggugugguggaccagcaacuccaucgugagcaugugcagcuccaccgaguuccucgggcaguggaacuggcccgacggcgccaagaucgaguacuuccuguga

SEQ ID NO: 90413 - RNA, 1398 nt, Artificial Sequence
  derived and/or modified CDS sequence (opt1) from neuraminidase__InfluenzaA__EPI712925
augaaccccaaccagaagauccugugcaccagcgccaccgccaucacgaucggcgcgaucgccgugcucaucgggaucgccaaccugggccugaacaucgggcuccaccugaagccgggcugcaacugcucccacagccagcccgagaccaccaacaccucccagacgaucaucaacaacuacuacaacgagaccaacaucaccaacauccagaucgaggagcgcaccagccggaacuucaacaaccugacgaaggggcucugcaccaucaacuccuggcacaucuacggcaaggacaacgccguccgcaucggcgagagcuccgacgugcuggugacccgggagcccuacgucagcugcgaccccgacgagugccgcuucuacgcccugucccaggggaccacgauccggggcaagcacagcaacgggaccauccacgaccgcucccaguaccgggcgcucaucagcuggccgcuguccagcccgcccaccgugcacaacucccgcguggagugcaucggcuggagcuccaccagcugccacgacgggaagucccggaugagcaucugcaucagcggccccaacaacaacgccuccgccgucgugugguacaaccgccggcccguggccgagaucaacacgugggcgcgcaacauccugcggacccaggagagcgagugcgucugccacaacggcgugugccccguggucuucaccgacgggcccgccaccggccccgccgacacgcgcaucuacuacuucaaggaggggaagauccucaagugggagucccugaccggcaccgccaagcacaucgaggagugcagcugcuacggcgagcggaccgggaucacgugcacgugccgcgacaacuggcagggcuccaaccggccgguggugcagaucgaccccgucgccaugacccacaccagccaguacaucugcucccccgugcugaccgacagcccccgcccgaacgaccccaacaucgggaagugcaacgaccccuaccccggcaacaacaacaacggggugaagggcuucuccuaccucgacggcgcgaacaccuggcuggggcggaccaucagcaccgccucccgcagcggcuacgagaugcugaaggucccgaacgcccucacggacgaccgguccaagcccauccaggggcagaccaucgugcugaacgccgacuggagcggcuacuccgggagcuucauggacuacugggccgagggcgacugcuaccgcgcgugcuucuacguggagcugauccgcggccggcccaaggaggacaaggucugguggaccuccaacagcaucguguccaugugcagcagcaccgaguuccucgggcaguggaacuggcccgacggcgccaagaucgaguacuuccuguga

SEQ ID NO: 90414 - RNA, 1398 nt, Artificial Sequence
  derived and/or modified CDS sequence (opt1) from neuraminidase__InfluenzaA__EPI448938
augaaccccaaccagaagauccugugcaccagcgccaccgccaucaucaucggcgcgaucgccgugcucaucgggauggccaaccugggccugaacaucgggcuccaccugaagccgggcugcaacugcucccacagccagcccgagacgaccaacaccucccagaccaucaucaacaacuacuacaacgagacgaacaucaccaacauccagauggaggagcgcaccagccggaacuucaacaaccugaccaaggggcucugcacgaucaacuccuggcacaucuacggcaaggacaacgccguccgcaucggcgagagcuccgacgugcuggugacccgggagcccuacgucagcugcgaccccgacgagugccgcuucuacgcccugucccaggggaccaccauccggggcaagcacagcaacgggacgauccacgaccgcucccaguaccgggcgcucaucagcuggccgcuguccagcccgcccaccguguacaacucccgcguggagugcaucggcuggagcuccaccagcugccacgacgggaagucccggaugagcaucugcaucagcggccccaacaacaacgccuccgccgucgugugguacaaccgccggcccguggccgagaucaacaccugggcgcgcaacauccugcggacgcaggagagcgagugcgucugccacaacggcgugugccccguggucuucaccgacggguccgccaccggccccgccgacacccgcaucuacuacuucaaggaggggaagauccucaagugggagagccugacgggcaccgccaagcacaucgaggagugcuccugcuacggcgagcggaccgggaucacgugcacgugccgcgacaacuggcagggcagcaaccggcccgugauccagaucgacccgguggccaugacccacaccucccaguacaucugcagccccguccugaccgacaacccccgccccaacgacccgaacaucgggaagugcaacgaccccuaccccggcaacaacaacaacggggugaagggcuucuccuaccucgacggcgcgaacaccuggcuggggcggaccaucagcaccgccucccgcagcggcuacgagaugcugaaggugcccaacgcccucaccgacgaccgguccaagccgauccaggggcagacgaucguccugaacgccgacuggagcggcuacuccgggagcuucauggacuacugggccgagggcgacugcuaccgcgcgugcuucuacguggagcugauccgcggccggcccaaggaggacaaggugugguggaccuccaacagcaucgucuccaugugcagcagcaccgaguuccucgggcaguggaacuggcccgacggcgccaagaucgaguacuuccuguga

SEQ ID NO: 90415 - RNA, 1410 nt, Artificial Sequence
  derived and/or modified CDS sequence (opt1) from neuraminidase__InfluenzaA__EPI445995
augaaccccaaccagaagaucaucgcccugggcagcgccucccucaccaucgcgaucaucugccugcugauccagaucgccauccucgccaccacgaugacccugcacuucaugcagaacgagcacaccaacagcacccgcaacaagguggucccgugcgaguccaucaucaucgagcggaacaucacggagaucgugcaccugaacgggaccaucaucgagaaggagagcugccccaaggccguggaguacaagaacugguccaagccccagugccagaucaccggcuucgcccccuucagcaaggacaacuccauccgccucagcgccgggggcgacaucugggucacccgggagccguacguguccugcagccuguccaagugcuaccaguucgcgcuggggcagggcacgacccucaacaaccgccacagcaacggcaccacccacgaccggucccccuaccgcacgcugcugaugagcgagcucggggugcccuuccaccugggcaccaagcaggucugcaucgccugguccagcuccagcugccacgacgggcgggccuggcugcacgugugcgugaccggcgacgacaagaacgcgaccgccuccgucaucuacgggggcaugcucacggacagcaucggcagcugguccaagaacauccugcgcacccaggagagcgagugcgugugcaucaacgggaccugcaccguggucaugacggacggcuccgccagcgggcgggccgacacccgcauccuguucauccgggagggcaagaucgugcacaucagcccccucuccggcuccgcccagcacguggaggagugcagcugcuacccgcgcuaccccgagguccggugcgugugccgcgacaacuggaagggguccaaccggcccgugcuguacaucaacgucgcggacuacagcaucgacuccagcuacgugugcuccggccuggugggggacacgccccgcaacgaggacagcuccagcuccagcaacugccgggacccgaacaacgagcgcggcgggcccggcgucaagggcugggccuucgacaacggggacgacguguggaugggccggaccaucaagaaggacucccgcgccggguacgagaccuuccggguggucgacggcuggacccucgccaacagcaagagccagaccaaccgccaggugaucgucgacuccgacaacuggagcggguacuccggcauguucagcguggagggcaagaccugcaucaaccgcugcuucuacguggagcugauccgggggcgcccccaggagacgcgggucugguggaccuccaacagcaucaucguguucugcggcaccuccgggaccuacggcacggggagcuggcccgacggcgccgacaucaacuucauguccaucuga

SEQ ID NO: 90416 - RNA, 1410 nt, Artificial Sequence
  derived and/or modified CDS sequence (opt1) from neuraminidase__InfluenzaA__EPI470861
augaaccccaaccagaagaucaucgccaucggcagcgugucccugaccaucgccaccaucugccuccugaugcagaucgcgauccuggccacgaccaugacccuccacuucaagcagaacgagugcaucaacagcuccaacaaccaggucgugccgugcgagcccaucaucaucgagcgcaacaucaccgagaucgugcaccugaacagcacgacccuggagaaggagaucugccccaaggucgccgacuaccggaacugguccaagccccagugccagaucaccggguucgccccguucagcaaggacaacuccauccgccucagcgccggcggggacaucugggugacccgggagcccuacguguccugcggccuggggaagugcuaccaguucgcgcugggccagggcacgacccucgagaacaagcacagcaacgggaccgcccacgaccgcacgccccaccggacccugcugaugaacgagcucggcguccccuuccaccuggccaccaagcaggucugcaucgccugguccagcuccagcugccacgacgggaaggcguggcugcacgugugcgugaccggcgacgaccgcaacgccaccgccuccaucaucuacgacgggauccucguggacagcaucggcuccuggagcaagaacauccugcggacgcaggaguccgagugcgugugcaucaacgggaccugcgccgucgugaugaccgacggcagcgccagcggccgcgcggacacccggauccuguucauccgcgaggggaagaucgcccacaucuccccgcucagcggcuccgcccagcacguggaggagugcagcugcuacccccgguaccccgagguccgcugcgugugccgggacaacuggaagggcuccaaccgccccgugcuguacaucaacauggccaacuacagcaucgacuccagcuacgucugcuccgggcuggugggcgacacgccgcggaacgacgaccgcagcuccagcuccaacugccgggaccccaacaacgagcgcggggcccccggcgugaaggggugggcguucgacaacggcaacgacaucuggaugggccggaccaucaagaaggacagccgcuccggguacgagaccuuccgggucaucggcggguggaccacggccaacagcaagucccagaucaaccgccaggugaucguggacagcgacaacuccagcggcuacagcgggaucuucuccgucgagggcaagagcugcaucaaccgcugcuucuacguggagcucauccggggccgccccaaggagacccgggucugguggaccuccaacagcaucaucguguucugcgggaccuccggcacguacgggaccggcagcuggccggacggggccaacaucaacuucaugcccaucuga

SEQ ID NO: 90417 - RNA, 1401 nt, Artificial Sequence
  derived and/or modified CDS sequence (opt1) from neuraminidase__InfluenzaA__EPI498036
augaaccccaaccagaagaucaucgccaucggcagcgugucccugaucaucgccaucaucugccuccugaugcagaucgcgauccugaccaccacgaugacccuccacuuccgccagaacgagugcagcaacccguccaacaaccaggucaugcccugcgagcccaucauccuggagcggaacaccgugcaccugaacagcaccaucaucgagcgcgagaucugccccaagguggccgacuacaagaacugguccaagccgcagugccagaucacgggguucgcccccuucagcaaggacaacuccauccggcucagcgccggcggggacaucugggucacccgcgagcccuacguguccugcagccuggacaagugcuaccaguucgcccugggccaggggaccacccucaagaacaagcacuccaacggcacgacccacgaccggacgccccaccgcacccugcugaugaacgagcucggcgugccguuccaccuggggaccaagcaggucugcaucgcguggagcuccagcuccugcuacgacggcaaggccuggcugcacaucugcgugaccggggacgacaagaacgccaccgccagcaucaucuacgacggcaugcucguggacuccaucgggagcugguccaagaacauccugcggacccaggagagcgagugcgucugcaucaacggcacgugcgcgguggugaugaccgacggcagcgccuccgggaaggccgacacccgcguccuguucauccgggagggcaagaucaucaacaucagcccccucuccgggagcgcccagcacguggaggagugcuccugcuacccccgcuaccccgaggugcggugcgucugccgcgacaacuggaagggcagcaaccggccgauccuguacaucaacauggccgacuacuccaucgagagcuccuacgugugcagcggccuggugggggacacgccccgcaacgacgacuccagcuccagcuccaacugccgggaccccaacaacgagcgcggcgcgcccggggucaagggcugggccuucgacgacgggaacgacguguggaugggccggaccaucaagaacggcagccgcuccggguacgagaccuuccggguggucaacggcuggaccauggccaacagcaagucccagaucaaccgccaggugaucguggacagcgacgacuggagcggguacuccggcaucuucagcgucgaggggaagaagugcaucaaccggugcuucuacguggagcucauccgcggccgcccgcaggagccccgggucugguggaccuccaacagcaucaucguguucugcggcacguccgggaccuacggcaccgggagcuggcccgacggcgccaacaucaacuucaugcccguguga

SEQ ID NO: 90418 - RNA, 1410 nt, Artificial Sequence
  derived and/or modified CDS sequence (opt1) from neuraminidase__InfluenzaA__EPI470902
augaaccccaaccagaagaucguggccaucggcagcgccucccugaccaucgcgaccaugugccuccugaugcagaucgcccuguucgccacgaccaugacccuccacuucaagcagaccgggugcacgaacagcuccgacaaccaggccgucccgugcggccccaucaucaucgagcgcaacaucaccgagaucgugcaccugaacagcaccacccuggagaaggagacgugccccaaguccgccggguaccggaacuggagcaagccccagugccagaucaccggcuucgcgccguucuccaaggacaacagcauccgccucgccgccgccggggacaucugggugacccgggagcccuacgucuccugcggccugggcaagugcuaccaguucgcgcuggggcagggcaccacgcucgacaacaagcacagcaacgggaccacccacgaccgcacgccccaccggacccugcugaugaacgagcucggcgugcccuuccaccuggccaccaagcaggucugcaucgccugguccagcuccagcugccacgacgggaaggccuggcugcacgugugcgugaccggcgacgacaagaacgccaccgcguccaucaucuacgacggcauccucguggacagcaucgccuccuggagcaagaacauccugcgcacgcaggaguccgagugcgucugcaucaacgggaccugcaccguggugaugaccgacggcagcgccagcgggcgggccgacacgcgcauccuguucauccgggagggcaagaucguccacaucuccccgcucagcggcuccgcccagcacguggaggagugcagcugcuacccccgcuaccccgaggugcggugcgucugccgcgacaacuggaagggguccaaccggcccgugcuguucaucaacauggcggacuacagcaucgacuccagcuacgugugcuccggccuggucggggacaccccgcgcaacgacgaccggagcuccagcuccaacugccgcgaccccaacaacgagcggggcgcccccggggugaagggcugggccuucgacagcggcaacgacaucuggauggggcgcaccaucgagaaggacucccggagcggcuacgagaccuuccgcgugaucgggggcugguccacggccaacagcaagucccagaucaaccggcaggucaucguggaccgcgacaacagcagcggguacuccggcaucuucagcguggagggcaaguccugcaucaaccgcugcuucuacgucgagcucauccgggggcgccccaaggagaaccgggugugguggaccagcaacuccaucaucgucuucugcggcaccagcgggaccuacggcacgggguccuggccggacggcgccaacaucaaccugaugcccaucuga

SEQ ID NO: 90419 - RNA, 1401 nt, Artificial Sequence
  derived and/or modified CDS sequence (opt1) from neuraminidase__InfluenzaA__EPI838241
augaaccccaaccagaagaucaccgccaucggcagcgugucccugaucaucgccaucaucugccuccugaugcagaucgcgauccugaccacgaccaugacccuccacuuccgccagaacgagugcagcaacuccagcaacaaccaggucaugccgugcgagcccaucaucaucgagcggaacaccgugcaccugaacuccacgaccaucgagcgcgagaucugccccaagguggccgaguacaagaacuggagcaagccccagugccagaucaccggguucgccccguucuccaaggacaacagcauccggcuguccgccagcggcgacaucugggucacccgcgagcccuacguguccugcagccucgacaagugcuaccaguucgcccuggggcagggcacgacccugaagaacaagcacuccaacgggaccgcgcacgaccggacgccccaccgcacccuccugaugaacgagcugggcgugcccuuccaccucggcaccaagcaggucugcaucgccuggagcuccagcuccugcuacgacgggaaggccuggcugcacgugugcgugaccggcgacgacaagaacgccaccgcgagcaucaucuacgacgggaugcuggucgacuccaucggcagcuggagcaagaacauccuccggacgcaggaguccgagugcgugugcaucaacgggaccugcgccguggucaugaccgacggcagcgccuccggcaaggccgacacccgcgugcuguucauccgggaggggaagaucaucaacaucagcccgcuguccggcagcgcccagcacguggaggagugcuccugcuacccccgcuaccccgagguccggugcgugugccgcgacaacuggaaggggagcaaccggcccauccucuacaucaacauggcggacuacuccaucgagagcuccuacgugugcagcggccuggucggcgacacgccgcgcaacgacgacuccagcuccagcuccaacugccgggaccccaacaacgagcgcggggcccccggcgugaaggggugggccuucgacgacggcaacgacguguggauggggcggaccaucaagaacggcagccgcuccggcuacgagaccuuccgggucgugaacggguggaccauggccaacagcaagagccagaucaaccgccaggugaucgucgaguccgacgacuggagcggcuacuccgggaucuucagcguggagggcaagaagugcaucaaccggugcuucuacgucgagcugauccgcgggcgcccccaggagccgcgggugugguggacguccaacagcaucaucguguucugcggcaccuccggcaccuacgggaccggcagcuggcccgacggggccaacaucaacuucaugcccaucuga

SEQ ID NO: 90420 - RNA, 1401 nt, Artificial Sequence; identical to SEQ ID NO: 90419
  derived and/or modified CDS sequence (opt1) from neuraminidase__InfluenzaA__EPI680525

SEQ ID NO: 90421 - RNA, 1401 nt, Artificial Sequence; identical to SEQ ID NO: 90027
  derived and/or modified CDS sequence (opt1) from neuraminidase__InfluenzaA__EPI690481

SEQ ID NO: 90422 - RNA, 1755 nt, Artificial Sequence
  derived and/or modified CDS sequence (opt1) from hemagglutinin__InfluenzaB__ABL76276
augaaggccaucaucgugcugcucauggucgugaccagcaacgccgaccgcaucugcaccggcaucacguccagcaacagcccccacguggucaagaccgcgacccagggggaggugaacgugaccggcgucaucccgcugacgaccacccccaccaagucccacuucgccaaccugaaggggacgaagacccggggcaagcucugcccgaccugccugaacugcaccgaccuggacguggcccucgggcgccccaugugcgugggcaucacgcccuccgccaaggccagcauccugcacgagguccggcccgugaccuccggcugcuuccccaucaugcacgaccgcaccaagauccggcagcugcccaaccuccugcgcggguacgagaagauccggcugagcacccagaacgugaucaacgcggagaaggccccgggcgggcccuaccgccucggcacguccgggagcugccccaacgccaccucccggagcggcuucuucgccaccauggcgugggccgucccccgcgacaacaacaagaccgccacgaacccgcugaccguggaggugccccacaucugcaccaaggaggaggaccagaucaccgucuggggcuuccacuccgacaacaagacgcagaugaagaaccuguacggggacagcaacccccagaaguucaccuccagcgccaacggcgugaccacccacuacgugucccagaucgggggcuuccccgaccagacggaggacggcgggcucccgcagagcggccggaucgucguggacuacauggugcagaagcccgggaagaccggcaccaucgucuaccagcgcgggauccugcugccccagaagguguggugcgccuccggccggagcaaggugaucaagggcagccucccccugaucggggaggcggacugccugcacgagaaguacggcgggcucaacaaguccaagccguacuacaccggcgagcacgccaaggccaucgggaacugccccaucugggucaagacgccccugaagcuggccaacggcaccaaguaccggcccccggccaagcuccugaaggagcgcggcuucuucggggcgaucgccggcuuccuggagggcgggugggaggggaugaucgccggcuggcacggcuacaccagccacggggcccacggcguggccgucgcggccgaccucaaguccacccaggaggccaucaacaagaucacgaagaaccugaacagccuguccgagcucgaggugaagaaccugcagcgccugagcggggccauggacgagcuccacaacgagauccuggagcuggacgagaagguggacgaccuccgggccgacaccaucuccagccagaucgagcuggcgguccugcucuccaacgagggcaucaucaacagcgaggacgagcaccuccuggcccuggagcgcaagcugaagaagaugcugggccccuccgccguggacaucgggaacggcugcuucgagaccaagcacaagugcaaccagaccugccucgaccggaucgccgcggggaccuucaacgccggcgaguucagccugcccacguucgacucccugaacaucaccgccgccagccucaacgacgacgggcuggacaaccacaccauccugcuguacuacuccaccgccgcgagcucccucgccgugacgcugaugaucgccaucuucaucgucuacaugaucagccgcgacaacguguccugcagcaucugccuguga

SEQ ID NO: 90423 - RNA, 1755 nt, Artificial Sequence
  derived and/or modified CDS sequence (opt1) from hemagglutinin__InfluenzaB__ABL76287
augaaggccaucaucgugcugcucauggucgugaccagcaacgccgaccgcaucugcaccggcaucacguccagcaacagcccccacguggucaagaccgcgacccagggggaggugaacgugaccggcgucaucccgcugacgaccacccccaccaagucccacuucgccaaccugaaggggacgaagacccggggcaagcucugcccgaccugccugaacugcaccgaccuggacguggcccucgggcgccccaugugcgugggcgucacgcccuccgccaaggccagcauccugcacgaggugcggcccgugaccuccggcugcuuccccaucaugcacgaccgcaccaagauccggcagcugcccaaccuccugcgcggguacgagaagauccggcugagcacccagaacgucaucaacgcggagaaggccccgggcgggcccuaccgccucggcacguccgggagcugccccaacgccaccucccggagcggcuucuucgccaccauggcgugggccgugccccgcgacaacaacaagaccgccacgaacccgcugaccaucgaggugccccacaucugcaccaaggaggaggaccagaucaccgucuggggcuuccacuccgacaacaagauccagaugaagaaccuguacggggacagcaacccccagaaguucacguccagcgccaacggcgugaccacccacuacgugucccagaucgggggcuuccccgaccagaccgaggacggcgggcucccgcagagcggccggaucgucguggacuacauggugcagaagcccgggaagacgggcaccaucgucuaccagcgcgggauccugcugccccagaagguguggugcgccuccggccggagcaaggugaucaagggcagccucccccugaucggggaggcggacugccugcacgagaaguacggcgggcucaacaaguccaagccguacuacaccggcgagcacgccaaggccaucgggaacugccccaucugggucaagacgccccugaagcuggccaacggcaccaaguaccggcccccggccaagcuccugaaggagcgcggcuucuucggggcgaucgccggcuuccuggagggcgggugggaggggaugaucgccggcuggcacggcuacaccagccacggggcccacggcguggccgucgcggccgaccucaaguccacccaggaggccaucaacaagaucaccaagaaccugaacagccuguccgagcucgaggugaagaaccugcagcgccugagcggggccauggacgagcuccacaacgagauccuggagcuggacgagaagguggacgaccuccgggccgacacgaucuccagccagaucgagcuggcgguccugcucuccaacgagggcaucaucaacagcgaggacgagcaccuccuggcccuggagcgcaagcugaagaagaugcugggccccuccgccguggacaucgggaacggcugcuucgagaccaagcacaagugcaaccagaccugccucgaccggaucgccgcggggaccuucaacgccggcgaguucagccugcccaccuucgacucccugaacaucacggccgccagccucaacgacgacgggcuggacaaccacaccauccugcuguacuacuccaccgccgcgagcucccucgccgugacccugaugaucgccaucuucaucgucuacaugaucagccgcgacaacguguccugcagcaucugccuguga

SEQ ID NO: 90424 - RNA, 1755 nt, Artificial Sequence
  derived and/or modified CDS sequence (opt1) from hemagglutinin__InfluenzaB__ABL76298
augaaggccaucaucgugcugcucauggucgugaccagcaacgccgaccgcaucugcaccggcaucacguccagcaacagcccccacguggucaagaccgcgacccagggggaggugaacgugaccggcgucaucccgcugacgaccacccccaccaagucccacuucgccaaccugaaggggacgaagacccggggcaagcucugcccgaccugccugaacugcaccgaccuggacguggcccucgggcgccccaugugcgugggcgucacgcccuccgccaaggccagcauccugcacgaggugcggcccgugaccuccggcugcuuccccaucaugcacgaccgcaccaagauccggcagcugcccaaccuccugcgcggguacgagaagauccggcugagcacccagaacgucaucaacgcggagaaggccccgggcgggcccuaccgccucggcacguccgggagcugccccaacgccaccucccggagcggcuucuucgccaccauggcgugggccgugccccgcgacaacaacaagaccgccacgaacccgcugaccguggaggucccccacaucugcaccaaggaggaggaccagaucaccguguggggcuuccacuccgacaacaagacgcagaugaagaaccuguacggggacagcaacccccagaaguucaccuccagcgccaacggcgugaccacccacuacgucucccagaucgggggcuuccccgaccagacggaggacggcgggcucccgcagagcggccggaucgugguggacuacaugguccagaagcccgggaagaccggcaccaucguguaccagcgcgggauccugcugccccagaagguguggugcgccuccggccggagcaaggucaucaagggcagccucccccugaucggggaggcggacugccugcacgagaaguacggcgggcucaacaaguccaagccguacuacaccggcgagcacgccaaggccaucgggaacugccccaucugggugaagacgccccugaagcuggccaacggcaccaaguaccggcccccggccaagcuccugaaggagcgcggcuucuucggggcgaucgccggcuuccuggagggcgggugggaggggaugaucgccggcuggcacggcuacaccagccacggggcccacggcgucgccguggcggccgaccucaaguccacccaggaggccaucaacaagaucacgaagaaccugaacagccuguccgagcucgaggugaagaaccugcagcgccugagcggggccauggacgagcuccacaacgagauccuggagcuggacgagaaggucgacgaccuccgggccgacaccaucuccagccagaucgagcuggcggugcugcucuccaacgagggcaucaucaacagcgaggacgagcaccuccuggcccuggagcgcaagcugaagaagaugcugggccccuccgccguggacaucgggaacggcugcuucgagaccaagcacaagugcaaccagaccugccucgaccggaucgccgcggggaccuucaacgccggcgaguucagccugcccacguucgacucccugaacaucaccgccgccagccucaacgacgacgggcuggacaaccacaccauccugcuguacuacuccaccgccgcgagcucccucgccgucacgcugaugaucgccaucuucaucguguacauggugagccgcgacaacgucuccugcagcaucugccuguga

SEQ ID NO: 90425 - RNA, 1755 nt, Artificial Sequence
  derived and/or modified CDS sequence (opt1) from hemagglutinin__InfluenzaB__ABL76309
augaaggccaucaucgugcugcucauggucgugaccagcaacgccgaccgcaucugcaccggcaucacguccagcaacagcccccacguggucaagaccgcgacccagggggaggugaacgugaccggcgucaucccgcugacgaccacccccaccaagucccacuucgccaaccugaaggggacgaagacccggggcaagcucugcccgaccugccugaacugcaccgaccuggacguggcccucgggcgccccaugugcgugggcgucacgcccuccgccaaggccagcauccugcacgaggugcggcccgugaccuccggcugcuuccccaucaugcacgaccgcaccaagauccggcagcugcccaaccuccugcgcggguacgagaagauccggcugagcacccagaacgucaucaacgcggagaaggccccgggcgggcccuaccgccucggcacguccgggagcugccccaacgccaccucccggagcggcuucuucgccaccauggcgugggccgugccccgcgacaacaacaagaccgccacgaacccgcugaccguggaggucccccacaucugcaccaaggaggaggaccagaucaccguguggggcuuccacuccgacaacaagacgcagaugaagaaccuguacggggacagcaacccccagaaguucaccuccagcgccaacggcgugaccacccacuacgucucccagaucgggggcuuccccgaccagacggaggacggcgggcucccgcagagcggccggaucgugguggacuacaugguccagcgccccgggaagaccggcaccaucguguaccagcgggggauccugcugccccagaagguguggugcgccuccggccgcagcaaggucaucaagggcagccucccccugaucggggaggcggacugccugcacgagaaguacggcgggcucaacaaguccaagccguacuacaccggcgagcacgccaaggccaucgggaacugccccaucugggugaagacgccccugaagcuggccaacggcaccaaguaccggcccccggccaagcuccugaaggagcgcggcuucuucggggcgaucgccggcuuccuggagggcgggugggaggggaugaucgccggcuggcacggcuacaccagccacggggcccacggcgucgccguggcggccgaccucaaguccacccaggaggccaucaacaagaucacgaagaaccugaacagccuguccgagcucgaggugaagaaccugcagcggcugagcggggccauggacgagcuccacaacgagauccuggagcuggacgagaaggucgacgaccuccgcgccgacaccaucuccagccagaucgagcuggcggugcugcucuccaacgagggcaucaucaacagcgaggacgagcaccuccuggcccuggagcggaagcugaagaagaugcugggccccuccgccguggacaucgggaacggcugcuucgagaccaagcacaagugcaaccagaccugccucgaccgcaucgccgcggggaccuucaacgccgaggaguucagccugcccacguucgacucccugaacaucaccgccgccagccucaacgacgacggccuggacaaccacaccauccugcuguacuacuccaccgccgcgagcucccucgccgucacgcugaugaucgccaucuucaucguguacaugaucagccgggacaacguguccugcagcaucugccuguga

SEQ ID NO: 90426 - RNA, 1755 nt, Artificial Sequence
  derived and/or modified CDS sequence (opt1) from hemagglutinin__InfluenzaB__ABL76331
augaaggccaucaucgugcugcucauggucgugaccagcaacgccgaccgcaucugcaccggcaucacguccagcaacagcccccacguggucaagaccgcgacccagggggaggugaacgugaccggcgucaucccgcugacgaccacccccaccaagucccacuucgccaaccugaaggggacgaagacccggggcaagcucugcccgaccugccugaacugcaccgaccuggacguggcccucgggcgccccaugugcgugggcaucacgcccuccgccaaggccagcauccugcacgagguccggcccgugaccuccggcugcuuccccaucaugcacgaccgcaccaagauccggcagcugcccaaccuccugcgcggguacgagaagauccggcugagcacccagaacgugaucaacgcggagaaggccccgggcgggcccuaccgccucggcacguccgggagcugccccaacgccaccucccggagcggcuucuucgccaccauggcgugggccgucccccgcgacaacaacaagaccgccacgaacccgcugaccaucgaggugccccacaucugcaccaaggaggaggaccagaucaccguguggggcuuccacuccgacaacaagacgcagaugaagaaccuguacggggacagcaacccccagaaguucaccuccagcgccaacggcgucaccacccacuacgugucccagaucgggggcuuccccgaccagacggaggacggcgggcucccgcagagcggccggaucguggucgacuacauggugcagaagcccgggaagaccggcaccaucguguaccagcgcgggauccugcugccccagaaggucuggugcgccuccggccggagcaaggugaucaagggcagccucccccugaucggggaggcggacugccugcacgagaaguacggcgggcucaacaaguccaagccguacuacaccggcgagcacgccaaggccaucgggaacugccccaucugggugaagacgccccugaagcuggccaacggcaccaaguaccggcccccggccaagcuccugaaggagcgcggcuucuucggggcgaucgccggcuuccuggagggcgggugggaggggaugaucgccggcuggcacggcuacaccagccacggggcccacggcgucgccguggcggccgaccucaaguccacccaggaggccaucaacaagaucacgaagaaccugaacagccuguccgagcucgaggucaagaaccugcagcgccugagcggggccauggacgagcuccacaacgagauccuggagcuggacgagaagguggacgaccuccgggccgacaccaucuccagccagaucgagcuggcggugcugcucuccaacgagggcaucaucaacagcgaggacgagcaccuccuggcccuggagcgcaagcugaagaagaugcugggccccuccgccgucgacaucgggaacggcugcuucgagaccaagcacaagugcaaccagaccugccucgaccggaucgccgcggggaccuucaacgccggcgaguucagccugcccacguucgacucccugaacaucaccgccgccagccucaacgacgacgggcuggacaaccacaccauccugcuguacuacuccaccgccgcgagcucccucgccgugacgcugaugaucgccaucuucaucguguacaugaucagccgcgacaacgucuccugcagcaucugccuguga

SEQ ID NO: 90427 - RNA, 1755 nt, Artificial Sequence
  derived and/or modified CDS sequence (opt1) from hemagglutinin__InfluenzaB__ABL76342
augaaggccaucaucgugcugcucauggucgugaccagcaacgccgaccgcaucugcaccggcaucacguccagcaacagcccccacguggucaagaccgcgacccagggggaggugaacgugaccggcgucaucccgcugacgaccacccccaccaagucccacuucgccaaccugaaggggacgaagacccggggcaagcucugcccgaccugccugaacugcaccgaccuggacguggcccucgggcgccccaugugcgugggcgucacgcccuccgccaaggccagcauccugcacgaggugcggcccgugaccuccggcugcuuccccaucaugcacgaccgcaccaagauccggcagcugcccaaccuccugcgcggguacgagaagauccggcugagcacccagaacgucaucaacgcggagaaggccccgggcgggcccuaccgccucggcacguccgggagcugccccaacgccaccucccggagcggcuucuucgccaccauggcgugggccgugccccgcgacaacaacaagaccgccacgaacccgcugaccguggaggucccccacaucugcaccaaggaggaggaccagaucaccguguggggcuuccacuccgacaacaagacgcagaugaagaaccuguacggggacagcaacccccagaaguucaccuccagcgccaacggcgugaccacccacuacgucucccagaucggggacuuccccgaccagacggaggacggcggccucccgcagagcgggcggaucgugguggacuacaugguccagaagcccggcaagaccgggaccaucguguaccagcgcggcauccugcugccccagaagguguggugcgccuccgggcggagcaaggucauccgcggcagccucccccugaucggcgaggcggacugccugcacgagaaguacgggggccucaacaaguccaagccguacuacaccggggagcacgccaaggccaucggcaacugccccaucugggugaagacgccccugaagcuggccaacgggaccaaguaccggcccccggccaagcuccugaaggagcgcggcuucuucggcgcgaucgccggguuccuggagggcgggugggagggcaugaucgccggguggcacggcuacaccagccacggcgcccacggggucgccguggcggccgaccucaaguccacccaggaggccaucaacaagaucacgaagaaccugaacagccuguccgagcucgaggugaagaaccugcagcggcugagcggcgccauggacgagcuccacaacgagauccuggagcuggacgagaaggucgacgaccuccgcgccgacaccaucuccagccagaucgagcuggcggugcugcucuccaacgaggggaucaucaacagcgaggacgagcaccuccuggcccuggagcggaagcugaagaagaugcugggccccuccgccguggacaucggcaacgggugcuucgagaccaagcacaagugcaaccagaccugccucgaccgcaucgccgcgggcaccuucaacgccggggacuucagccugcccacguucgacucccugaacaucaccgccgccagccucaacgacgacggccuggacaaccacaccauccugcuguacuacuccaccgccgcgagcucccucgccgucacgcugaugaucgccaucuucaucguguacaugaucagccgggacaacguguccugcagcaucugccuguga

SEQ ID NO: 90428 - RNA, 1755 nt, Artificial Sequence
  derived and/or modified CDS sequence (opt1) from hemagglutinin__InfluenzaB__ABL76353
augaaggccaucaucgugcugcucauggucgugaccagcaacgccgaccgcaucugcaccggcaucacguccagcaacagcccccacguggucaagaccgcgacccagggggaggugaacgugaccggcgucaucccgcugacgaccacccccaccaagucccacuucgccaaccugaaggggacgaagacccggggcaagcucugcccgaccugccugaacugcaccgaccuggacguggcccucgggcgccccaugugcgugggcgucacgcccuccgccaaggccagcauccugcacgaggugcggcccgugaccuccggcugcuuccccaucaugcacgaccgcaccaagauccggcagcugcccaaccuccugcgcggguacgagaagauccggcugagcacccagaacgucaucaacgcggagaaggccccgggcgggcccuaccgccucggcacguccgggagcugccccaacgccaccucccggagcggcuucuucgccaccauggcgugggccgugccccgcgacaacaacaagaccgccacgaacccgcugaccguggaggucccccacaucugcaccaaggaggaggaccagaucaccguguggggcuuccacuccgacaacaagacgcagaugaagaaccuguacggggacagcaacccccagaaguucaccuccagcgccaacggcgugaccacccacuacgucucccagaucgggggcuuccccgaccagacggaggacggcgggcucccgcagagcggccggaucgugguggacuacaugguccagaagcccgggaagaccggcaccaucguguaccagcgcgggauccugcugccccagaagguguggugcgccuccggccggagcaaggucauccgcggcagccucccccugaucggggaggcggacugccugcacgagaaguacggcgggcucaacaaguccaagccguacuacaccggcgagcacgccaaggccaucgggaacugccccaucugggugaagacgccccugaagcuggccaacggcaccaaguaccggcccccggccaagcuccugaaggagcgcggcuucuucggggcgaucgccggcuuccuggagggcgggugggaggggaugaucgccggcuggcacggcuacaccagccacggggcccacggcgucgccguggcggccgaccucaaguccacccaggaggccaucaacaagaucacgaagaaccugaacagccuguccgagcucgaggugaagaaccugcagcggcugagcggggccauggacgagcuccacaacgagauccuggagcuggacgagaaggucgacgaccuccgcgccgacaccaucuccagccagaucgagcuggcggugcugcucuccaacgagggcaucaucaacagcgaggacgagcaccuccuggcccuggagcggaagcugaagaagaugcugggccccuccgccguggacaucgggaacggcugcuucgagaccaagcacaagugcaaccagaccugccucgaccgcaucgccgcggggaccuucaacgccggcgacuucagccugcccacguucgacucccugaacaucaccgccgccagccucaacgacgacgggcuggacaaccacaccauccugcuguacuacuccaccgccgcgagcucccucgccgucacgcugaugaucgccaucuucaucguguacaugaucagccgggacaacguguccugcagcaucugccuguga

SEQ ID NO: 90429 - RNA, 1755 nt, Artificial Sequence
  derived and/or modified CDS sequence (opt1) from hemagglutinin__InfluenzaB__ABL76375
augaaggccaucaucgugcugcucauggucgugaccagcaacgccgaccgcaucugcaccggcaucacguccagcaacagcccccacguggucaagaccgcgacccagggggaggugaacgugaccggcgccaucccgcugacgaccacccccaccaagucccacuucgccaaccugaaggggacgaagacccggggcaagcucugcccgaccugccugaacugcaccgaccuggacgucgcccucgggcgccccaugugcgugggcaucacgcccuccgccaaggcgagcauccugcacgaggugcggcccgucaccuccggcugcuuccccaucaugcacgaccgcaccaagauccggcagcugcccaaccuccugcgcggguacgagaagauccggcugagcacccagaacgugaucaacgccgagaaggccccgggcgggcccuaccgccucggcacguccgggagcugccccaacgccaccuccaagagcggcuucuucgcgaccauggccugggccgugccccgggacaacaacaagaccgccacgaacccgcugaccgucgaggugccccacaucugcaccaaggaggaggaccagaucaccguguggggcuuccacuccgacaacaagacgcagaugaagaaccuguacggggacagcaacccccagaaguucaccuccagcgccaacggcaucaccacccacuacgucucccagaucgggggcuuccccgaccagacggaggacggcgggcucccgcagagcggccgcaucgugguggacuacaugguccagaagcccgggaagaccggcaccaucguguaccagcgggggauccugcugccccagaagguguggugcgcguccggccgcagcaaggucaucaagggcagccucccccugaucggggaggccgacugccugcacgagaaguacggcgggcucaacaaguccaagccguacuacaccggcgagcacgccaaggccaucgggaacugccccaucugggugaagacgccccugaagcuggccaacggcaccaaguaccggcccccggcgaagcuccugaaggagcgcggcuucuucggggccaucgccggcuuccuggagggcgggugggaggggaugaucgccggcuggcacggcuacaccagccacggggcccacggcguggcggucgccgccgaccucaaguccacccaggaggccaucaacaagaucacgaagaaccugaacagccuguccgagcucgaggugaagaaccugcagcggcugagcggggccauggacgagcuccacaacgagauccuggagcuggacgagaaggucgacgaccuccgcgcggacaccaucuccagccagaucgagcuggccgugcugcucuccaacgagggcaucaucaacagcgaggacgagcaccuccuggcccuggagcggaagcugaagaagaugcugggccccuccgccguggacaucgggaacggcugcuucgagaccaagcacaagugcaaccagaccugccucgaccgcaucgcggccgggaccuucaacgccggcgaguucagccugcccacguucgacucccugaacaucaccgccgccagccucaacgacgacgggcuggacaaccacaccauccugcuguacuacuccaccgcggccagcucccucgccgucacgcugaugaucgccaucuucaucguguacaugaucagccgggacaacguguccugcagcaucugccuguga

SEQ ID NO: 90430 - RNA, 1755 nt, Artificial Sequence; identical to SEQ ID NO: 90429
  derived and/or modified CDS sequence (opt1) from hemagglutinin__InfluenzaB__ABL76386

SEQ ID NO: 90431 - RNA, 1755 nt, Artificial Sequence
  derived and/or modified CDS sequence (opt1) from hemagglutinin__InfluenzaB__ABL76408
augaaggccaucaucgugcugcucauggucgugaccagcaacgccgaccgcaucugcaccggcaucacguccagcaacagcccccacguggucaagaccgcgacccagggggaggugaacgugaccggcgccaucccgcugacgaccacccccaccaagucccacuucgccaaccugaaggggacgaagacccggggcaagcucugcccgaccugcuucaacugcaccgaccuggacgucgcccuggggcgccccaugugcgugggcaucacgcccuccgccaaggcgagcauccuccacgaggugcggcccgucaccuccggcugcuuccccaucaugcacgaccgcaccaagauccggcagcugcccaaccugcuccgcggguacgagaagauccggcugagcacccagaacgugaucgacgccgagaaggccccgggcgggcccuaccgccugggcacguccgggagcugccccaacgccaccuccaagagcggcuucuucgcgaccauggccugggccgugccccggggcaacaacaagaccgccacgaacccgcucaccgucgaggugccccacaucugcaccaaggaggaggaccagaucaccguguggggguuccacuccgacaacaagacgcagaugaagaaccuguacggcgacagcaacccccagaaguucaccuccagcgccaacgggaucaccacccacuacgucucccagaucggcggcuuccccgaccagacggaggacgggggccugccgcagagcgggcgcaucgugguggacuacaugguccagaagcccggcaagaccgggaccaucguguaccagcggggcauccuccugccccagaagguguggugcgcguccggccgcagcaaggucaucaaggggagccugccccucaucggcgaggccgacugccugcacgagaaguacgggggccugaacaaguccaagccguacuacaccggggagcacgccaaggccaucggcaacugccccaucugggugaagacgccccucaagcuggccaacggcaccaaguaccggcccccggcgaagcugcucaaggagcgcggguucuucggcgccaucgccggguuccuggagggcgggugggagggcaugaucgccggcuggcacggguacaccagccacggcgcccacgggguggcggucgccgccgaccugaaguccacccaggaggccaucaacaagaucacgaagaaccucaacagccuguccgagcuggaggugaagaaccuccagcggcugagcggcgccauggacgagcugcacaacgagauccucgagcuggacgagaaggucgacgaccugcgcgcggacaccaucuccagccagaucgagcucgccgugcugcuguccaacgagggcaucaucaacagcgaggacgagcaccuccuggcccuggagcggaagcucaagaagaugcuggggcccuccgccguggacaucggcaacgggugcuucgagaccaagcacaagugcaaccagaccugccuggaccgcaucgcggccggcaccuucaacgccggggaguucagccuccccacguucgacucccugaacaucaccgccgccagccugaacgacgacggccucgacaaccacaccauccugcuguacuacuccaccgcggccagcucccuggccgucacgcucaugaucgccaucuucaucguguacaugaucagccgggacaacguguccugcagcaucugccuguga

SEQ ID NO: 90432 - RNA, 1755 nt, Artificial Sequence
  derived and/or modified CDS sequence (opt1) from hemagglutinin__InfluenzaB__ABL76419
augaaggccaucaucgugcugcucauggucgugaccagcaacgccgaccgcaucugcaccggcaucacguccagcaacagcccccacguggucaagaccgcgacccagggggaggugaacgugaccggcgccaucccgcugacgaccacccccaccaagucccacuucgccaaccugaaggggacgaagacccggggcaagcucugcccgaccugcuucaacugcaccgaccuggacgucgcccuggggcgccccaugugcgugggcaucacgcccuccgccaaggcgagcauccuccacgagauccggcccgugaccuccggcugcuuccccaucaugcacgaccgcaccaagauccggcagcugcccaaccugcuccgcggguacgagaagauccggcugagcacccagaacgucaucgacgccgagaaggccccgggcgggcccuaccgccugggcacguccgggagcugccccaacgccaccuccaagagcggcuucuucgcgaccauggccugggccgugccccggggcaacaacaagaccgccacgaacccgcucaccguggaggucccccacaucugcaccaaggaggaggaccagaucaccguguggggguuccacuccgacaacaagacgcagaugaagaaccuguacggcgacagcaacccccagaaguucaccuccagcgccaacgggaucaccacccacuacgugucccagaucggcggcuuccccgaccagacggaggacgggggccugccgcagagcgggcgcaucgucguggacuacauggugcagaagcccggcaagaccgggaccaucgucuaccagcggggcauccuccugccccagaagguguggugcgcguccggccgcagcaaggugaucaaggggagccugccccucaucggcgaggccgacugccugcacgagaaguacgggggccugaacaaguccaagccguacuacaccggggagcacgccaaggccaucggcaacugccccaucugggucaagacgccccucaagcuggccaacggcaccaaguaccggcccccggcgaagcugcucaaggagcgcggguucuucggcgccaucgccggguuccuggagggcgggugggagggcaugaucgccggcuggcacggguacaccagccacggcgcccacgggguggcgguggccgccgaccugaaguccacccaggaggccaucaacaagaucacgaagaaccucaacagccuguccgagcuggaggucaagaaccuccagcggcugagcggcgccauggacgagcugcacaacgagauccucgagcuggacgagaagguggacgaccugcgcgcggacaccaucuccagccagaucgagcucgccguccugcuguccaacgagggcaucaucaacagcgaggacgagcaccuccuggcccuggagcggaagcucaagaagaugcuggggcccuccgccguggacaucggcaacgggugcuucgagaccaagcacaagugcaaccagaccugccuggaccgcaucgcggccggcaccuucaacgccggggaguucagccuccccacguucgacucccugaacaucaccgccgccagccugaacgacgacggccucgacaaccacaccauccugcuguacuacuccaccgcggccagcucccuggccgugacgcucaugaucgccaucuucaucgucuacaugaucagccgggacaacguguccugcagcaucugccuguga

SEQ ID NO: 90433 - RNA, 1758 nt, Artificial Sequence
  derived and/or modified CDS sequence (opt1) from hemagglutinin__InfluenzaB__ABL76441
augaaggccaucaucgugcugcucauggucgugaccagcaacgccgaccgcaucugcaccggcaucacguccagcaacagcccccacguggucaagaccgcgacccagggggaggugaacgugaccggcgucaucccgcugacgaccacccccaccaagagccacuucgccaaccugaaggggacgaagacccggggcaagcucugccccaagugccugaacugcaccgaccuggacguggcccucgggcgccccaagugcaccggcaacaucccguccgccaaggugagcauccugcacgagguccggcccgugacguccggcugcuuccccaucaugcacgaccgcaccaagauccggcagcugcccaaccuccugcgcggguacgagcacauccggcugagcacccacaacgugaucaacgccgagaaggcgccgggcgggcccuacaagaucggcaccuccgggagcugccccaacgucacgaacggcaacggcuucuucgccaccauggccugggccgugcccaagaacgacaacaacaagaccgcgaccaacucccucacgaucgaggugccguacaucugcaccgagggggaggaccagaucaccgucuggggcuuccacagcgacaacgagacccagauggccaagcuguacggggacuccaagccccagaaguucacgagcuccgccaacggcgugaccacccacuacgugagccagaucggcggguuccccaaccagaccgaggacggcgggcugccccaguccggccgcaucgucguggacuacauggugcagaaguccgggaagccgggcacgaucaccuaccagcggggcauccuccugccccagaaggucuggugcgccuccgggcgcagcaaggugaucaagggcagccugccccucaucggggaggccgacugccugcacgagaaguacggcgggcugaacaaguccaagcccuacuacaccggcgagcacgcgaaggccaucggcaacugcccgaucugggugaagacgccccucaagcuggccaacgggaccaaguaccggccgcccgccaagcugcucaaggagcgcggcuucuucggggccaucgcgggcuuccuggagggcgggugggagggcaugaucgccggguggcacggcuacaccagccacggggcccacggcgucgccguggccgcggaccugaaguccacccaggaggccaucaacaagaucaccaagaaccucaacagccuguccgagcuggaggucaagaaccuccagcggcugagcggcgccauggacgagcugcacaacgagauccucgagcuggacgagaagguggacgaccugcgcgccgacacgaucuccagccagaucgagcucgccgugcugcuguccaacgaggggaucaucaacagcgaggacgagcaccuccuggcgcuggagcggaagcucaagaagaugcugggccccuccgccgucgagaucgggaacggcugcuucgagaccaagcacaagugcaaccagaccugccuggaccgcaucgccgccgggaccuucgacgcgggcgaguucagccuccccaccuucgacucccugaacaucacggccgccagccugaacgacgacgagcucgacaaccacaccauccugcuguacuacuccaccgccgccagcucccuggcggugacccucaugaucgccaucuucguggucuacauggugagccgggacaacguguccugcagcaucugccuguga

SEQ ID NO: 90434 - RNA, 1758 nt, Artificial Sequence
  derived and/or modified CDS sequence (opt1) from hemagglutinin__InfluenzaB__ABL76463
augaaggccaucaucgugcugcucauggucgugaccagcaacgccgaccgcaucugcaccggcaucacguccagcaacagcccccacguggucaagaccgcgacccagggggaggugaacgugaccggcgucaucccgcugacgaccacccccaccaagagccacuucgccaaccugaaggggacgaagacccggggcaagcucugccccaagugccugaacugcaccgaccuggacguggcccucgggcgccccaagugcaccggcaacaucccguccgccaaggugagcauccugcacgagguccggcccgugacguccggcugcuuccccaucaugcacgaccgcaccaagauccggcagcugcccaaccuccugcgcggguacgagcacauccggcugagcacccacaacgugaucaacgccgagaaggcgccgggcgggcccuacaagaucggcaccuccgggagcugccccaacgucacgaacggcaacggcuucuucgccaccauggccugggccgugcccaagaacgacaacaacaagaccgcgaccaacucccucacgaucgaggugccguacaucugcaccgagggggaggaccagaucaccgucuggggcuuccacagcgacaacgagacccagauggccaagcuguacggggacuccaagccccagaaguucacgagcuccgccaacggcgugaccacccacuacgugagccagaucggcggguuccccaaccagaccgaggacggcgggcugccccaguccggccgcaucgucguggacuacauggugcagaaguccgggaagacgggcaccaucaccuaccagcggggcauccuccugccgcagaaggucuggugcgccuccgggcgcagcaaggugaucaagggcagccugccccucaucggggaggccgacugccugcacgagaaguacggcgggcugaacaaguccaagcccuacuacaccggcgagcacgcgaaggccaucggcaacugccccaucugggugaagacgccgcucaagcuggccaacgggaccaaguaccggccgcccgccaagcugcucaaggagcgcggcuucuucggggccaucgcgggcuuccuggagggcgggugggagggcaugaucgccggguggcacggcuacaccagccacggggcccacggcgucgccguggccgcggaccugaaguccacccaggaggccaucaacaagaucacgaagaaccucaacagccuguccgagcuggaggucaagaaccuccagcggcugagcggcgccauggacgagcugcacaacgagauccucgagcuggacgagaaggugaacgaccugcgcgccgacaccaucuccagccagaucgagcucgccgugcugcuguccaacgaggggaucaucaacagcgaggacgagcaccuccuggcgcuggagcggaagcucaagaagaugcugggccccuccgccgucgagaucgggaacggcugcuucgagaccaagcacaagugcaaccagaccugccuggaccgcaucgccgccgggaccuucgacgcgggcgaguucagccuccccacguucgacucccugaacaucaccgccgccagccugaacgacgacggccucgacaaccacaccauccugcuguacuacuccaccgccgccagcucccuggcggugacgcucaugaucgccaucuucguggucuacauggugagccgggacaacguguccugcagcaucugccuguga

SEQ ID NO: 90435 - RNA, 1758 nt, Artificial Sequence
  derived and/or modified CDS sequence (opt1) from hemagglutinin__InfluenzaB__ABL76474
augaaggccaucaucgugcugcucauggucgugaccagcaacgccgaccgcaucugcaccggcaucacguccagcaacagcccccacguggucaagaccgcgacccagggggaggugaacgugaccggcgucaucccgcugacgaccacccccaccaagagccacuucgccaaccugaaggggacgaagacccggggcaagcucugccccaagugccugaacugcaccgaccuggacguggcccucgggcgccccaagugcaccggcaacaucccguccgccaaggugagcauccugcacgagguccggcccgugacguccggcugcuuccccaucaugcacgaccgcaccaagauccggcagcugcccaaccuccugcgcggguacgagcacauccggcugagcacccacaacgugaucaacgccgagaaggcgccgggcgggcccuacaagaucggcaccuccgggagcugccccaacgucacgaacggcaacggcuucuucgccaccauggccugggccgugcccaagaacgacaacaacaagaccgcgaccaacucccucacgaucgaggugccguacaucugcaccgagggggaggaccagaucaccgucuggggcuuccacagcgacaacgagacccagauggccaagcuguacggggacuccaagccccagaaguucacgagcuccgccaacggcgugaccacccacuacgugagccagaucggcggguuccccaaccagaccgaggacggcgggcugccccaguccggccgcaucgucguggacuacauggugcagaaguccgggaagacgggcaccaucaccuaccagcggggcauccuccugccgcagaaggucuggugcgccuccgggcgcagcaaggugaucaagggcagccugccccucaucggggaggccgacugccugcacgagaaguacggcgggcugaacaaguccaagcccuacuacaccggcgagcacgcgaaggccaucggcaacugccccaucugggugaagacgccgcucaagcuggccaacgggaccaaguaccggccgcccgccaagcugcucaaggagcgcggcuucuucggggccaucgcgggcuuccuggagggcgggugggagggcaugaucgccggguggcacggcuacaccagccacggggcccacggcgucgccguggccgcggaccugaaguccacccaggaggccaucaacaagaucacgaagaaccucaacagccuguccgagcuggaggucaagaaccuccagcggcugagcggcgccauggacgagcugcacaacgagauccucgagcuggacgagaagguggacgaccugcgcgccgacaccaucuccagccagaucgagcucgccgugcugcuguccaacgaggggaucaucaacagcgaggacgagcaccuccuggcgcuggagcggaagcucaagaagaugcugggccccuccgccgucgagaucgggaacggcugcuucgagaccaagcacaagugcaaccagaccugccuggaccgcaucgccgccgggaccuucgacgcgggcgaguucagccuccccacguucgacucccugaacaucaccgccgccagccugaacgacgacgagcucgacaaccacaccauccugcuguacuacuccaccgccgccagcucccuggcggugacgcucaugaucgccaucuucguggucuacauggugagccgggacaacguguccugcagcaucugccuguga

SEQ ID NO: 90436 - RNA, 1758 nt, Artificial Sequence
  derived and/or modified CDS sequence (opt1) from hemagglutinin__InfluenzaB__ABL76485
augaaggccaucaucgugcugcucauggucgugaccagcaacgccgaccgcaucugcaccggcaucacguccagcaacagcccccacguggucaagaccgcgacccagggggaggugaacgugaccggcgucaucccgcugacgaccacccccaccaagagccacuucgccaaccugaaggggacgaagacccggggcaagcucugccccaagugccugaacugcaccgaccuggacguggcccucgggcgccccaagugcaccggcaacaucccguccgccgaggugagcauccugcacgagguccggcccgugacguccggcugcuuccccaucaugcacgaccgcaccaagauccggcagcugcccaaccuccugcgcggguacgagcacauccggcugagcacccacaacgugaucaacgccgagaaggcgccgggcgggcccuacaagaucggcaccuccgggagcugccccaacgucacgaacggcaacggcuucuucgugaccauggccugggccgugcccaagaacgacaacaacaagaccgccaccaacucccucacgaucgaggucccguacaucugcaccgagggggaggaccagaucaccguguggggcuuccacagcgacaacgagacccagauggcgaagcuguacggggacuccaagccccagaaguucacgagcuccgccaacggcgugaccacccacuacgucagccagaucggcggguuccccaaccagaccgaggacggcgggcugccccaguccggccgcaucgugguggacuacaugguccagaaguccgggaagacgggcaccaucaccuaccagcggggcauccuccugccgcagaagguguggugcgccuccgggcgcagcaaggugaucaagggcagccugccccucaucggggaggccgacugccugcacgagaaguacggcgggcugaacaaguccaagcccuacuacaccggcgagcacgccaaggcgaucggcaacugccccaucugggucaagacgccgcucaagcuggccaacgggaccaaguaccggccgcccgccaagcugcucaaggagcgcggcuucuucggggccaucgccggcuuccuggagggcgggugggagggcaugaucgcgggguggcacggcuacaccagccacggggcccacggcguggccgucgccgccgaccugaaguccacccaggaggcgaucaacaagaucacgaagaaccucaacagccuguccgagcuggaggugaagaaccuccagcggcugagcggcgccauggacgagcugcacaacgagauccucgagcuggacgagaagguggacgaccugcgcgccgacaccaucuccagccagaucgagcucgccguccugcuguccaacgaggggaucaucaacagcgagaacgagcaccuccuggcccuggagcggaagcucaagaagaugcugggccccuccgcgguggagaucgggaacggcugcuucgagaccaagcacaagugcaaccagaccugccuggaccgcaucgccgccgggaccuucgacgccggcgaguucagccuccccacguucgacucccugaacaucaccgcggccagccugaacgacgacggccucgacaaccacaccauccugcuguacuacuccaccgccgccagcucccuggccgugacgcucaugaucgcgaucuucgucguguacauggugagccgggacaacgucuccugcagcaucugccuguga

SEQ ID NO: 90437 - RNA, 1758 nt, Artificial Sequence
  derived and/or modified CDS sequence (opt1) from hemagglutinin__InfluenzaB__ABL76507
augaaggccaucaucgugcugcucauggucgugaccagcaacgccgaccgcaucugcaccggcaucacguccagcaacagcccccacguggucaagaccgcgacccagggggaggugaacgugaccggcgucaucccgcugacgaccacccccaccaagagccacuucgccaaccugaaggggacgaagacccggggcaagcucugccccaagugccugaacugcaccgaccuggacguggcccucgggcgccccaagugcaccggcaacaucccguccgccgaggugagcauccugcacgagguccggcccgugacguccggcugcuuccccaucaugcacgaccgcaccaagauccggcagcugcccaaccuccugcgcggguacgagcacauccggcugagcacccacaacgugaucaacgccgagaaggcgccgggcgggcccuacaagaucggcaccuccgggagcugccccaacgucacgaacggcaacggcuucuucgccaccauggccugggccgugcccaagaacgacaacaacaagaccgcgaccaacucccucacgaucgaggugccguacaucugcaccgagggggaggaccagaucaccgucuggggcuuccacagcgacaacgagauccagauggccaagcuguacggggacuccaagccccagaaguucaccagcuccgccaacggcgugacgacccacuacgugagccagaucggcggguuccccaaccagaccgaggacggcgggcugccccaguccggccgcaucgucguggacuacauggugcagaaguccgggaagaccggcacgaucaccuaccagcggggcauccuccugccgcagaaggucuggugcgccuccgggcgcagcaaggugaucaagggcagccugccccucaucggggaggccgacugccugcacgagaaguacggcgggcugaacaaguccaagcccuacuacaccggcgagcacgcgaaggccaucggcaacugccccaucugggugaagaccccgcucaagcuggccaacgggacgaaguaccggccgcccgccaagcugcucaaggagcgcggcuucuucggggccaucgcgggcuuccuggagggcgggugggagggcaugaucgccggguggcacggcuacaccagccacggggcccacggcgucgccguggccgcggaccugaaguccacccaggaggccaucaacaagaucaccaagaaccucaacagccuguccgagcuggaggucaagaaccuccagcggcugagcggcgccauggacgagcugcacaacgagauccucgagcuggacgagaagguggacgaccugcgcgccgacacgaucuccagccagaucgagcucgccgugcugcuguccaacgaggggaucaucaacagcgaggacgagcaccuccuggcgcuggagcggaagcucaagaagaugcugggccccuccgccgucgagaucgggaacggcugcuucgagaccaagcacaagugcaaccagaccugccuggaccgcaucgccgccgggaccuucgacgcgggcgaguucagccuccccaccuucgacucccugaacaucacggccgccagccugaacgacgacggccucgacaaccacaccauccugcuguacuacuccaccgccgccagcucccuggcggugacccucaugaucgccaucuucguggucuacauggugagccgggacaacguguccugcagcaucugccuguga

SEQ ID NO: 90438 - RNA, 1758 nt, Artificial Sequence
  derived and/or modified CDS sequence (opt1) from hemagglutinin__InfluenzaB__ABL76518
augaaggccaucaucgugcugcucauggucgugaccagcaacgccgaccgcaucugcaccggcaucacguccagcaacagcccccacguggucaagaccgcgacccagggggaggugaacgugaccggcgucaucccgcugacgaccacccccaccaagagccacuucgccaaccugaaggggacgaagacccggggcaagcucugccccaagugccugaacugcaccgaccuggacguggcccucgggcgccccaagugcaccggcaacaucccguccgccgaggugagcauccugcacgagguccggcccgugacguccggcugcuuccccaucaugcacgaccgcaccaagauccggcagcugcccaaccuccugcgcggguacgagcacauccggcugagcacccacaacgugaucaacgccgagaaggcgccgggcgggcccuacaagaucggcaccuccgggagcugccccaacgucacgaacggcaacggcuucuucgccaccauggccugggccgugcccaagaacgacaacaacaagaccgcgaccaacucccucacgaucgaggugccguacaucugcaccgagggggaggaccagaucaccgucuggggcuuccacagcgacaacgagaaccagauggccaagcuguacggggacuccaagccccagaaguucaccagcuccgccaacggcgugacgacccacuacgugagccagaucggcggguuccccaaccagaccgaggacggcgggcugccccaguccggccgcaucgucguggacuacauggugcagaaguccgggaagaccggcacgaucaccuaccagcggggcauccuccugccgcagaaggucuggugcgccuccgggcgcagcaaggugaucaagggcagccugccccucaucggggaggccgacugccugcacgagaaguacggcgggcugaacaaguccaagcccuacuacaccggcgagcacgcgaaggccaucggcaacugccccaucugggugaagaccccgcucaagcuggccaacgggacgaaguaccggccgcccgccaagcugcucaaggagcgcggcuucuucggggccaucgcgggcuuccuggagggcgggugggagggcaugaucgccggguggcacggcuacaccagccacggggcccacggcgucgccguggccgcggaccugaaguccacccaggaggccaucaacaagaucaccaagaaccucaacagccuguccgagcuggaggucaagaaccuccagcggcugagcggcgccauggacgagcugcacaacgagauccucgagcuggacgagaagguggacgaccugcgcgccgacacgaucuccagccagaucgagcucgccgugcugcuguccaacgaggggaucaucaacagcgaggacgagcaccuccuggcgcuggagcggaagcucaagaagaugcugggccccuccgccgucgagaucgggaacggcugcuucgagaccaagcacaagugcaaccagaccugccuggaccgcaucgccgccgggaccuucgacgcgggcgaguucagccuccccaccuucgacucccugaacaucacggccgccagccugaacgacgacggccucgacaaccacaccauccugcuguacuacuccaccgccgccagcucccuggcggugacccucaugaucgccaucuucguggucuacauggugagccgggacaacguguccugcagcaucugccuguga

SEQ ID NO: 90439 - RNA, 1758 nt, Artificial Sequence
  derived and/or modified CDS sequence (opt1) from hemagglutinin__InfluenzaB__ABL76529
augaaggccaucaucgugcugcucauggucgugaccagcaacgccgaccgcaucugcaccggcaucacguccagcaacagcccccacguggucaagaccgcgacccagggggaggugaacgugaccggcgucaucccgcugacgaccacccccaccaagagccacuucgccaaccugaaggggacgaagacccggggcaagcucugccccaagugccugaacugcaccgaccuggacguggcccucgggcgccccaagugcaccggcaacaucccguccgccgaggugagcauccugcacgagguccggcccgugacguccggcugcuuccccaucaugcacgaccgcaccaagauccggcagcugcccaaccuccugcgcggguacgagcacauccggcugagcacccacaacgugaucaacgccgagaaggcgccgggcgggcccuacaagaucggcaccuccgggagcugccccaacgucacgaacggcaacggcuucuucgugaccauggccugggccgugcccaagaacgacaacaacaagaccgccaccaacucccucacgaucgaggucccguacaucugcaccgagggggaggaccagaucaccguguggggcuuccacagcgacaacgagacccagauggcgaagcuguacggggacuccaagccccagaaguucacgagcuccgccaacggcgugaccacccacuacgucagccagaucggcggguuccccaaccagaccgaggacggcgggcugccccaguccggccgcaucgugguggacuacaugguccagaaguccgggaagacgggcaccaucaccuaccagcggggcauccuccugccgcagaagguguggugcgccuccgggcgcagcaaggugaucaagggcagccugccccucaucggggaggccgacugccugcacgagaaguacggcgggcugaacaaguccaagcccuacuacaccggcgagcacgccaaggcgaucggcaacugccccaucugggucaagacgccgcucaagcuggccaacgggaccaaguaccggccgcccgccaagcugcucaaggagcgcggcuucuucggggccaucgccggcuuccuggagggcgggugggagggcaugaucgcgggguggcacggcuacaccagccacggggcccacggcguggccgucgccgccgaccugaaguccacccaggaggcgaucaacaagaucacgaagaaccucaacagccuguccgagcuggaggugaagaaccuccagcggcugagcggcgccauggacgagcugcacaacgagauccucgagcuggacgagaagguggacgaccugcgcgccgacaccaucuccagccagaucgagcucgccguccugcuguccaacgaggggaucaucaacagcgaggacgagcaccuccuggcccuggagcggaagcucaagaagaugcugggccccuccgcgguggagaucgggaacggcugcuucgagaccaagcacaagugcaaccagaccugccuggaccgcaucgccgccgggaccuucgacgccggcgaguucagccuccccacguucgacucccugaacaucaccgcggccagccugaacgacgacggccucgacaaccacaccauccugcuguacuacuccaccgccgccagcucccuggccgugacgcucaugaucgcgaucuucgucguguacauggugagccgggacaacgucuccugcagcaucugccuguga

SEQ ID NO: 90440 - RNA, 1758 nt, Artificial Sequence
  derived and/or modified CDS sequence (opt1) from hemagglutinin__InfluenzaB__ABL76540
augaaggccaucaucgugcugcucauggucgugaccagcaacgccgaccgcaucugcaccggcaucacguccagcaacagcccccacguggucaagaccgcgacccagggggaggugaacgugaccggcgucaucccgcugacgaccacccccaccaagagccacuucgccaaccugaaggggacgaagacccggggcaagcucugccccaagugccugaacugcaccgaccuggacguggcccucgggcgccccaagugcaccggcaacaucccguccgccgaggugagcauccugcacgaggucaagcccgugacguccggcugcuuccccaucaugcacgaccggaccaagauccgccagcugcccaaccuccugcggggguacgagcacauccgccugagcacccacaacgugaucaacgccgagaaggcgccgggcgggcccuacaagaucggcaccuccgggagcugccccaacgucacgaacggcaacggcuucuucgccaccauggccugggccgugcccaagaacgacaacaacaagaccgcgaccaacucccucacgaucgaggugccguacaucugcaccgagggggaggaccagaucaccgucuggggcuuccacagcgacaacgagacccagauggccaagcuguacggggacuccaagccccagaaguucacgagcuccgccaacggcgugaccacccacuacgugagccagaucggcggguuccccaaccagaccgaggacggcgggcugccccaguccggccggaucgucguggacuacauggugcagaaguccgggaagacgggcaccaucaccuaccagcgcggcauccuccugccgcagaaggucuggugcgccuccgggcggagcaaggugaucaagggcagccugccccucaucggggaggccgacugccugcacgagaaguacggcgggcugaacaaguccaagcccuacuacaccggcgagcacgcgaaggccaucggcaacugccccaucugggugaagacgccgcucaagcuggccaacgggaccaaguaccgcccgcccgccaagcugcucaaggagcggggcuucuucggggccaucgcgggcuuccuggagggcgggugggagggcaugaucgccggguggcacggcuacaccagccacggggcccacggcgucgccguggccgcggaccugaaguccacccaggaggccaucaacaagaucacgaagaaccucaacagccuguccgagcuggaggucaagaaccuccagcgccugagcggcgccauggacgagcugcacaacgagauccucgagcuggacgagaagguggacgaccugcgggccgacaccaucuccagccagaucgagcucgccgugcugcuguccaacgaggggaucaucaacagcgaggacgagcaccuccuggcgcuggagcgcaagcucaagaagaugcugggccccuccgccgucgagaucgggaacggcugcuucgagaccaagcacaagugcaaccagaccugccuggaccggaucgccgccgggaccuucgacgcgggcgaguucagccuccccacguucgacucccugaacaucaccgccgccagccugaacgacgacggccucgacaaccacaccauccugcuguacuacuccaccgccgccagcucccuggcggugacgcucaugaucgccaucuucguggucuacauggugagccgcgacaacguguccugcagcaucugccuguga

SEQ ID NO: 90441 - RNA, 1758 nt, Artificial Sequence
  derived and/or modified CDS sequence (opt1) from hemagglutinin__InfluenzaB__ABL76551
augaaggccaucaucgugcugcucauggucgugaccagcaacgccgaccgcaucugcaccggcaucacguccagcaacagcccccacguggucaagaccgcgacccagggggaggugaacgugaccggcgucaucccgcugacgaccacccccaccaagagccacuucgccaaccugaaggggacgaagacccggggcaagcucugccccaagugccugaacugcaccgaccuggacguggcccucgggcgccccaagugcaccggcaacaucccguccgccgaggugagcauccugcacgagguccggcccgugacguccggcugcuuccccaucaugcacgaccgcaccaagauccggcagcugcccaaccuccugcgcggguacgagcacauccggcugagcacccacaacgugaucaacgccgagaaggcgccgggcgggcccuacaagaucggcaccuccgggagcugccccaacgucacgaacggcaacggcuucuucgccaccauggccugggccgugcccaagaacgacaacaacaagaccgcgaccaacucccucacgaucgaggugccguacaucugcaccgagggggaggaccagaucaccgucuggggcuuccacagcgacaacgagacccagauggccaagcuguacggggacuccaagccccagaaguucacgagcuccgccaacggcgugaccacccacuacgugagccagaucggcggguuccccaaccagaccgaggacggcgggcugccccaguccggccgcaucgucguggacuacauggugcagaaguccgggaagacgggcaccaucaccuaccagcggggcauccuccugccgcagaaggucuggugcgccuccgggcgcagcaaggugaucaagggcagccugccccucaucggggaggccgacugccugcacgagaaguacggcgggcugaacaaguccaagcccuacuacaccggcgagcacgcgaaggccaucggcaacugccccaucugggugaagacgccgcucaagcuggccaacgggaccaaguaccggccgcccgccaagcugcucaaggagcgcggcuucuucggggccaucgcgggcuuccuggagggcgggugggagggcaugaucgccggguggcacggcuacaccagccacggggcccacggcgucgccguggccgcggaccugaaguccacccaggaggccaucaacaagaucacgaagaaccucaacagccuguccgagcuggaggucaagaaccuccagcggcugagcggcgccauggacgagcugcacaacgagauccucgagcuggacgagaagguggacgaccugcgcgccgacaccaucuccagccagaucgagcucgccgugcugcuguccaacgaggggaucaucaacagcgaggacgagcaccuccuggcgcuggagcggaagcucaagaagaugcugggccccuccgccgucgagaucgggaacggcugcuucgagaccaagcacaagugcaaccagaccugccuggaccgcaucgccgccgggaccuucgacgcgggcgaguucagccuccccacguucgacucccugaacaucaccgccgccagccugaacgacgacggccucgacaaccacaccauccugcuguacuacuccaccgccgccagcucccuggcggugacgcucaugauggccaucuucguggucuacauggugagccgggacaacguguccugcagcaucugccuguga

SEQ ID NO: 90442 - RNA, 1758 nt, Artificial Sequence
  derived and/or modified CDS sequence (opt1) from hemagglutinin__InfluenzaB__ABL76562
augaaggccaucaucgugcugcucauggucgugaccagcaacgccgaccgcaucugcacccggaucacguccagcaacagcccccacguggucaagaccgcgacccagggcgaggugaacgugaccggggucaucccgcugacgaccacccccaccaagagccacuucgccaaccugaagggcacgaagacccgcgggaagcucugccccaagugccugaacugcaccgaccuggacguggcccucggccggcccaagugcaccgggaacaucccguccgccgaggugagcauccugcacgagguccgccccgugacguccggcugcuuccccaucaugcacgaccggaccaagauccgccagcugcccaaccuccugcggggcuacgagcacauccgccugagcacccacaacgugaucaacgccgagaaggcgcccgggggccccuacaagaucgggaccuccggcagcugccccaacgucacgaacgggaacggcuucuucgccaccauggccugggccgugcccaagaacgacaacaacaagaccgcgaccaacucccucacgaucgaggugccguacaucugcaccgagggcgaggaccagaucaccgucuggggguuccacagcgacaacgagacccagauggccaagcuguacggcgacuccaagccccagaaguucacgagcuccgccaacggggugaccacccacuacgugagccagaucggcggcuuccccaaccagaccgaggacgggggccugccccaguccgggcggaucgucguggacuacauggugcagaaguccggcaagacggggaccaucaccuaccagcgcggcauccuccugccgcagaaggucuggugcgccuccggccggagcaaggugaucaaggggagccugccccucaucggcgaggccgacugccugcacgagaaguacgggggccugaacaaguccaagcccuacuacaccggggagcacgcgaaggccaucggcaacugccccaucugggugaagacgccgcucaagcuggccaacggcaccaaguaccgcccgcccgccaagcugcucaaggagcggggguucuucggcgccaucgcgggguuccuggagggcgggugggagggcaugaucgccggcuggcacggguacaccagccacggcgcccacggggucgccguggccgcggaccugaaguccacccaggaggccaucaacaagaucacgaagaaccucaacagccuguccgagcuggaggucaagaaccuccagcgccugagcggcgccauggacgagcugcacaacgagauccucgagcuggacgagaagguggacgaccugcgggccgacaccaucuccagccagaucgagcucgccgugcugcuguccaacgagggcaucaucaacagcgaggacgagcaccuccuggcgcuggagcgcaagcucaagaagaugcuggggcccuccgccgucgagaucggcaacgggugcuucgagaccaagcacaagugcaaccagaccugccuggaccggaucgccgccggcaccuucgacgugggggaguucagccucccgacguucgacucccugaacaucaccgcggccagccugaacgacgacggccucgacaaccacaccauccugcuguacuacuccaccgccgccagcucccuggccgugacgcucaugaucgcgaucuucgucguguacauggugagccgcgacaacgucuccugcagcaucugccuguga

SEQ ID NO: 90443 - RNA, 1758 nt, Artificial Sequence
  derived and/or modified CDS sequence (opt1) from hemagglutinin__InfluenzaB__ABL76573
augaaggccaucaucgugcugcucauggucgugaccagcaacgccgaccgcaucugcaccggcaucacguccagcaacagcccccacguggucaagaccgcgacccagggggaggugaacgugaccggcgucaucccgcugacgaccacccccaccaagagccacuucgccaaccugaaggggacgaagacccggggcaagcucugccccaagugccugaacugcaccgaccuggacguggcccucgggcgccccaagugcaccggcaacaucccguccgccgaggugagcauccugcacgagguccggcccgugacguccggcugcuuccccaucaugcacgaccgcaccaagauccggcagcugcccaaccuccugcgcggguacgagcacauccggcugagcacccacaacgugaucaacgccgagaaggcgccgggcgggcccuacaagaucggcaccuccgggagcugccccaacgucacgaacggcaacggcuucuucgccaccauggccugggccgugcccaagaacgacaacaacaagaccgcgaccaacucccucacgaucgaggugccguacaucugcaccgagggggaggaccagaucaccgucuggggcuuccacagcgacaacgagacccagauggccaagcuguacggggacuccaagccccagaaguucacgagcuccgccaacggcgugaccacccacuacgugagccagaucggcggguuccccaaccagaccgaggacggcgggcugccccaguccggccgcaucgucguggacuacauggugcagaaguccgggaagacgggcaccaucaccuaccagcggggcauccuccugccgcagaaggucuggugcgccuccgggcgcagcaaggugaucaagggcagccugccccucaucggggaggccgacugccugcacgagaaguacggcgggcugaacaaguccaagcccuacuacaccggcgagcacgcgaaggccaucggcaacugccccaucugggugaagacgccgcucaagcuggccaacgggaccaaguaccggccgcccgccaagcugcucaaggagcgcggcuucuucggggccaucgcgggcuuccuggagggcgggugggagggcaugaucgccggguggcacggcuacaccagccacggggcccacggcgucgccguggccgcggaccugaaguccacccaggaggccaucaacaagaucacgaagaaccucaacagccuguccgagcuggaggucaagaaccuccagcggcugagcggcgccauggacgagcugcacaacgagauccucgagcuggacgagaagguggacgaccugcgcgccgacaccaucuccagccagaucgagcucgccgugcugcuguccaacgaggggaucaucaacagcgaggacgagcaccuccuggcgcuggagcggaagcucaagaagaugcugggccccuccgccgucgagaucgggaacggcugcuucgagaccaagcacaagugcaaccagaccugccuggaccgcaucgccgccgggaccuucgacgcgggcgaguucagccuccccacguucgacucccugaacaucaccgccgccagccugaacgacgacggccucgacaaccacaccauccugcuguacuacuccaccgccgccagcucccuggcggugacgcucaugaucgccaucuucguggucuacauggugagccgggacaacguguccugcagcaucugccuguga

SEQ ID NO: 90444 - RNA, 1758 nt, Artificial Sequence; identical to SEQ ID NO: 90443
  derived and/or modified CDS sequence (opt1) from hemagglutinin__InfluenzaB__ABL76584

SEQ ID NO: 90445 - RNA, 1758 nt, Artificial Sequence; identical to SEQ ID NO: 90443
  derived and/or modified CDS sequence (opt1) from hemagglutinin__InfluenzaB__ABL76595

SEQ ID NO: 90446 - RNA, 1758 nt, Artificial Sequence; identical to SEQ ID NO: 90443
  derived and/or modified CDS sequence (opt1) from hemagglutinin__InfluenzaB__ABL76606

SEQ ID NO: 90447 - RNA, 1758 nt, Artificial Sequence
  derived and/or modified CDS sequence (opt1) from hemagglutinin__InfluenzaB__ABL76617
augaaggccaucaucgugcugcucauggucgugaccagcaacgccgaccgcaucugcaccggcaucacguccagcaacagcccccacguggucaagaccgcgacccagggggaggugaacgugaccggcgucaucccgcugacgaccacccccaccaagagccacuucgccaaccugaaggggacggagacccggggcaagcucugccccaagugccugaacugcaccgaccuggacguggcccucgggcgccccaagugcaccggcaacaucccguccgccaaggugagcauccugcacgagguccggcccgugacguccggcugcuuccccaucaugcacgaccgcaccaagauccggcagcugcccaaccuccugcgcggguacgagcacauccggcugagcacccacaacgugaucaacgccgagaaggcgccgggcgggcccuacaagaucggcaccuccgggagcugccccaacgucacgaacggcaacggcuucuucgccaccauggccugggccgugcccaagaacgacaacaacaagaccgcgaccaacucccucacgaucgaggugccguacaucugcaccgagggggaggaccagaucaccgucuggggcuuccacagcgacaacgagacccagauggccaagcuguacggggacuccaagccccagaaguucacgagcuccgccaacggcgugaccacccacuacgugagccagaucggcggguuccccaaccagaccgaggacggcgggcugccccaguccggccgcaucgucguggacuacauggugcagaaguccgggaagacgggcaccaucaccuaccagcggggcauccuccugccgcagaaggucuggugcgccuccgggcgcagcaaggugaucaagggcagccugccccucaucggggaggccgacugccugcacgagaaguacggcgggcugaacaaguccaagcccuacuacaccggcgagcacgcgaaggccaucggcaacugccccaucugggugaagacgccgcucaagcuggccaacgggaccaaguaccggccgcccgccaagcugcucaaggagcgcggcuucuucggggccaucgcgggcuuccuggagggcgggugggagggcaugaucgccggguggcacggcuacaccagccacggggcccacggcgucgccguggccgcggaccugaaguccacccaggaggccaucaacaagaucacgaagaaccucaacagccuguccgagcuggaggucaagaaccuccagcggcugagcggcgccauggacgagcugcacaacgagauccucgagcuggacgagaagguggacgaccugcgcgccgacaccaucuccagccagaucgagcucgccgugcugcuguccaacgaggggaucaucaacagcgaggacgagcaccuccuggcgcuggagcggaagcucaagaagaugcugggccccuccgccgucgagaucgggaacggcugcuucgagaccaagcacaagugcaaccagaccugccuggaccgcaucgccgccgggaccuucgacgcgggcgaguucagccuccccacguucgacucccugaacaucaccgccgccagccugaacgacgacggccucgacaaccacaccauccugcuguacuacuccaccgccgccagcucccuggcggugacgcucaugaucgccaucuucguggucuacauggugagccgggacaacguguccugcagcaucugccuguga

SEQ ID NO: 90448 - RNA, 1755 nt, Artificial Sequence
  derived and/or modified CDS sequence (opt1) from hemagglutinin__InfluenzaB__ABL76628
augaaggccaucaucgugcugcucauggucgugaccagcaacgccgaccgcaucugcaccggcaucacguccagcaacagcccccacguggucaagaccgcgacccagggggaggugaacgugaccggcgucaucccgcugacgaccacccccaccaaguccuacuucgccaaccugaaggggacgcggacccgcggcaagcucugccccgacugccugaacugcaccgaccuggacguggcccucgggcggcccaugugcgugggcaccacgccguccgccaaggccagcauccugcacgagguccgccccgugaccuccggcugcuuccccaucaugcacgaccggaccaagauccgccagcuggcgaaccuccugcggggguacgagaacauccgccugagcacccagaacgugaucgacgccgagaaggcccccggcgggccguaccggcucggcacguccgggagcugccccaacgccaccuccaagagcggcuucuucgcgaccauggccugggccguccccaaggacaacaacaagaacgccaccaacccccugacgguggaggugccgcacaucugcaccgagggcgaggaccagaucaccgucuggggguuccacuccgacaacaagacccagaugaagaaccuguacggcgacagcaacccccagaaguucacguccagcgccaacggggugaccacccacuacgugucccagaucggcggcuuccccgaccagaccgaggacgggggccucccccagagcgggcgcaucgucguggacuacaugaugcagaagccgggcaagacggggaccaucguguaccagcggggcguccugcugccccagaagguguggugcgcguccggccgcagcaaggugaucaaggggagccucccccugaucggcgaggccgacugccugcacgagaaguacgggggccucaacaaguccaagcccuacuacaccggggagcacgccaaggccaucggcaacugcccgaucugggucaagacgccccugaagcuggccaacggcaccaaguaccggccgcccgcgaagcuccugaaggagcgcggguucuucggcgccaucgccggguuccuggagggcgggugggagggcaugaucgccggcuggcacggguacaccagccacggcgcccacgggguggcggucgccgccgaccucaaguccacccaggaggccaucaacaagaucaccaagaaccugaacagccuguccgagcucgaggugaagaaccugcagcggcugagcggcgccauggacgagcuccacaacgagauccuggagcuggacgagaagguggacgaccuccgcgcggacacgaucuccagccagaucgagcuggccguccugcucuccaacgagggcaucaucaacagcgaggacgagcaccuccuggcccuggagcggaagcugaagaagaugcuggggcccuccgccguggacaucggcaacgggugcuucgagaccaagcacaagugcaaccagaccugccucgaccgcaucgcggccggcaccuucaacgccggggaguucagccugcccaccuucgacucccugaacaucacggccgccagccucaacgacgacggccuggacaaccacaccauccugcuguacuacuccaccgcggccagcucccucgccgugacccugaugcuggccaucuucaucgucuacauggugagccgggacaacguguccugcagcaucugccucuga

SEQ ID NO: 90449 - RNA, 1755 nt, Artificial Sequence
  derived and/or modified CDS sequence (opt1) from hemagglutinin__InfluenzaB__ABL76639
augaaggccaucaucgugcugcucauggucgugaccagcaacgccgaccgcaucugcaccggcaucacguccagcaacagcccccacguggucaagaccgcgacccagggggaggugaacgugaccggcgucaucccgcugacgaccacccccaccaaguccuacuucgccaaccugaaggggacgcggacccgcggcaagcucugccccgacugccugaacugcaccgaccuggacguggcccucgggcggcccaugugcgugggcaccacgccguccgccaaggccagcauccugcacgagguccgccccgugaccuccggcugcuuccccaucaugcacgaccggaccaagauccgccagcuggcgaaccuccugcggggguacgagaacauccgccugagcacccagaacgugaucgacgccgagaaggcccccggcgggccguaccggcucggcacguccgggagcugccccaacgccaccuccaagagcggcuucuucgcgaccauggccugggccguccccaaggacaacaacaagaacgccaccaacccccugacgguggaggugccguacaucugcaccgagggcgaggaccagaucaccgucuggggguuccacuccgacaacaagacccagaugaagaaccuguacggcgacagcaacccccagaaguucacguccagcgccaacggggugaccacccacuacgugucccagaucggcggcuuccccgaccagaccgaggacgggggccucccccagagcgggcgcaucgucguggacuacaugaugcagaagccgggcaaggcggggacgaucguguaccagcggggcguccugcugccccagaagguguggugcgccuccggccgcagcaaggugaucaaggggagccucccccugaucggcgaggccgacugccugcacgagaaguacgggggccucaacaaguccaagcccuacuacaccggggagcacgccaaggccaucggcaacugcccgaucugggucaagacgccccugaagcuggcgaacggcaccaaguaccggccgcccgccaagcuccugaaggagcgcggguucuucggcgccaucgccggguuccuggagggcgggugggagggcaugaucgccggcuggcacggguacaccagccacggcgcgcacgggguggccgucgccgccgaccucaaguccacccaggaggccaucaacaagaucaccaagaaccugaacagccuguccgagcucgaggugaagaaccugcagcggcugagcggcgcgauggacgagcuccacaacgagauccuggagcuggacgagaagguggacgaccuccgcgccgacaccaucuccagccagaucgagcuggccguccugcucuccaacgagggcaucaucaacagcgaggacgagcaccuccuggcccuggagcggaagcugaagaagaugcuggggcccuccgcgguggacaucggcaacgggugcuucgagacgaagcacaagugcaaccagaccugccucgaccgcaucgccgccggcaccuucaacgccggggaguucagccugcccaccuucgacucccugaacaucaccgccgcgagccucaacgacgacggccuggacaaccacacgauccugcuguacuacuccaccgccgccagcucccucgccgugacccugaugcuggccaucuucaucgucuacauggugagccgggacaacguguccugcagcaucugccucuga

SEQ ID NO: 90450 - RNA, 1755 nt, Artificial Sequence
  derived and/or modified CDS sequence (opt1) from hemagglutinin__InfluenzaB__ABL76683
augaaggccaucaucgugcugcucauggucgugaccagcaacgccgaccgcaucugcaccggcaucacguccagcaacagcccccacguggucaagaccgcgacccagggggaggugaacgugaccggcgucaucccgcugacgaccacccccaccaaguccuacuucgccaaccugaaggggacgcggacccgcggcaagcucugccccgacugccugaacugcaccgaccuggacguggcccucgggcggcccaugugcgugggcaccacgccguccgccaaggccagcauccugcacgagguccgccccgugaccuccggcugcuuccccaucaugcacgaccggaccaagauccgccagcuggcgaaccuccugcggggguacgagaacauccgccugagcacccagaacgugaucgacgccgagaaggcccccggcgggccguaccggcucggcacguccgggagcugccccaacgccaccuccaagagcggcuucuucgcgaccauggccugggccguccccaaggacaacaacaagaacgccaccaacccccugacgguggaggugccguacaucugcaccgagggcgaggaccagaucaccgucuggggguuccacuccgacaacaagacccagaugaagaaccuguacggcgacagcaacccccagaaguucacguccagcgccaacggggugaccacccacuacgugucccagaucggcggcuuccccgaccagaccgaggacgggggccucccccagagcgggcgcaucgucguggacuacaugaugcagaagccgggcaagacggggaccaucguguaccagcggggcguccugcugccccagaagguguggugcgcguccggccgcagcaaggugaucaaggggagccucccccugaucggcgaggccgacugccugcacgagaaguacgggggccucaacaaguccaagcccuacuacaccggggagcacgccaaggccaucggcaacugcccgaucugggucaagacgccccugaagcuggccaacggcaccaaguaccggccgcccgcgaagcuccugaaggagcgcggguucuucggcgccaucgccggguuccuggagggcgggugggagggcaugaucgccggcuggcacggguacaccagccacggcgcccacgggguggcggucgccgccgaccucaaguccacccaggaggccaucaacaagaucaccaagaaccugaacagccuguccgagcucgaggugaagaaccugcagcggcugagcggcgccauggacgagcuccacaacgagauccuggagcuggacgagaagguggacgaccuccgcgcggacacgaucuccagccagaucgagcuggccguccugcucuccaacgagggcaucaucaacagcgaggacgagcaccuccuggcccuggagcggaagcugaagaagaugcuggggcccuccgccguggacaucggcaacgggugcuucgagaccaagcacaagugcaaccagaccugccucgaccgcaucgcggccggcaccuucaacgccggggaguucagccugcccaccuucgacucccugaacaucacggccgccagccucaacgacgacggccuggacaaccacaccauccugcuguacuacuccaccgcggccagcucccucgccgugacccugaugcuggccaucuucaucgucuacauggugagccgggacaacguguccugcagcaucugccucuga

SEQ ID NO: 90451 - RNA, 1752 nt, Artificial Sequence
  derived and/or modified CDS sequence (opt1) from hemagglutinin__InfluenzaB__ABL76694
augaaggccaucaucgugcugcucauggucgugaccagcaacgccgaccgcaucugcaccggcaucacguccagcaacagcccccacguggucaagaccgcgacccagggggaggugaacgugaccggcgucaucccgcugacgaccacccccaccaagucccacuucgccaaccugaaggggacgaagacccggggcaagcucugccccaacugccugaacugcaccgaccuggacguggcccucgggcgccccaugugcgugggcaccacgccguccgccaaggccagcauccugcacgagguccggcccgugaccuccggcugcuuccccaucaugcacgaccgcaccaagauccggcagcugcccaaccuccugcgcggguacgagaacauccggcugagcacccagaacgugaucaacgcggagcgcgccccgggcgggcccuaccggcucggcacguccgggagcugccccaacgucaccucccgcgacggcuucuucgccaccauggccugggcggugccccgggacaacaagaccgccacgaacccgcugaccguggagguccccuacaucugcaccaagggcgaggaccagaucaccguguggggguuccacagcgacaacaagacgcagaugaagaaccuguacggcgacuccaacccccagaaguucaccagcuccgccaacggggugaccacccacuacgucagccagaucggcggcuuccccaaccagacggaggacgggggccucccgcaguccgggcgcaucgugguggacuacaugguccagaagcccggcaagaccgggaccaucguguaccagcggggcgugcugcugccccagaaggucuggugcgccagcggccgcuccaaggugaucaaggggagccucccccugaucggcgaggccgacugccugcacgagaaguacgggggccucaacaagagcaagccguacuacaccggggagcacgcgaaggccaucggcaacugccccaucugggucaagacgccccugaagcuggccaacggcaccaaguaccggcccccggccaagcuccugaaggagcgcggguucuucggcgccaucgcgggguuccuggagggcgggugggagggcaugaucgccggcuggcacggguacaccucccacggcgcccacgggguggccguggccgcggaccucaagagcacccaggaggccaucaacaagaucacgaagaaccugaacucccugagcgagcucgaggucaagaaccugcagcggcuguccggcgccauggacgagcuccacaacgagauccuggagcuggacgagaagguggacgaccuccgcgccgacaccaucagcucccagaucgagcuggccgugcugcucagcaacgagggcaucaucaacuccgaggacgagcaccuccuggcgcuggagcggaagcugaagaagaugcuggggcccagcgccgucgacaucggcaacgggugcuucgagaccaagcacaagugcaaccagaccugccucgaccgcaucgccgccggcaccuucaacgcgggggaguucucccugcccacguucgacagccugaacaucaccgccgccucccucaacgacgacggccuggacaaccacaccauccugcuguacuacagcaccgccgccuccagccucgcggugacgcugaugaucgccaucuucaucguguacauggucucccgggacaacgugagcugcuccaucugccuguga

SEQ ID NO: 90452 - RNA, 1758 nt, Artificial Sequence
  derived and/or modified CDS sequence (opt1) from hemagglutinin__InfluenzaB__ABL76716
augaaggccaucaucgugcugcucauggucgugaccagcaacgccgaccgcaucugcaccggcaucacguccagcaacagcccccacguggucaagaccgcgacccagggggaggugaacgugaccggcgucaucccgcugacgaccacccccaccaagagccacuucgccaaccugaaggggacggagacccggggcaagcucugccccaagugccugaacugcaccgaccuggacguggcccucgggcgccccaagugcaccggcaacaucccguccgcccgggugagcauccugcacgagguccgccccgugacguccggcugcuuccccaucaugcacgaccggaccaagauccgccagcugcccaaccuccugcggggguacgagcacauccgccugagcacccacaacgugaucaacgccgagaacgcgccgggcgggcccuacaagaucggcaccuccgggagcugccccaacgucacgaacggcaacggcuucuucgccaccauggccugggccgugcccaagaacgacaacaacaagaccgcgaccaacucccucacgaucgaggugccguacaucugcaccgagggggaggaccagaucaccgucuggggcuuccacagcgacaacgagacccagauggccaagcuguacggggacuccaagccccagaaguucacgagcuccgccaacggcgugaccacccacuacgugagccagaucggcggguuccccaaccagaccgaggacggcgggcugccccaguccggccggaucgucguggacuacauggugcagaaguccgggaagacgggcaccaucaccuaccagcgcggcauccuccugccgcagaaggucuggugcgccuccgggcggagcaaggugaucaagggcagccugccccucaucggggaggccgacugccugcacgagaaguacggcgggcugaacaaguccaagcccuacuacaccggcgagcacgcgaaggccaucggcaacugccccaucugggugaagacgccgcucaagcuggucaacgggaccaaguaccgcccgcccgccaagcugcucaaggagcggggcuucuucggggccaucgccggcuuccuggagggcgggugggagggcaugaucgcgggguggcacggcuacaccagccacggggcccacggcguggccgucgccgccgaccugaaguccacccaggaggcgaucaacaagaucacgaagaaccucaacagccuguccgagcuggaggugaagaaccuccagcgccugagcggcgccauggacgagcugcacaacgagauccucgagcuggacgagaagguggacgaccugcgggccgacaccaucuccagccagaucgagcucgccguccugcuguccaacgaggggaucaucaacagcgaggacgagcaccuccuggcccuggagcgcaagcucaagaagaugcugggccccuccgcgguggagaucgggaacggcugcuucgagaccaagcacaagugcaaccagaccugccuggaccggaucgccgccgggaccuucgacgccggcgaguucagccuccccacguucgacucccugaacaucaccgcggccagccugaacgacgacggccucgacaaccacaccauccugcuguacuacuccaccgccgccagcucccuggccgugacgcucaugaucgcgaucuucgucguguacauggugagccgcgacaacgucuccugcagcaucugccuguga

SEQ ID NO: 90453 - RNA, 1755 nt, Artificial Sequence
  derived and/or modified CDS sequence (opt1) from hemagglutinin__InfluenzaB__ABL76760
augaaggccaucaucgugcugcucauggucgugaccagcaacgccgaccgcaucugcaccggcaucacguccagcaacagcccccacguggucaagaccgcgacccagggggaggugaacgugaccggcgucaucccgcugacgaccacccccaccaagucccacuucgccaaccugaaggggacgaagacccggggcaagcucugcccgaccugccugaacugcaccgaccuggacguggcccucgggcgccccaugugcgugggcgucacgcccuccgccaaggccagcauccugcacgaggugcggcccgugaccuccggcugcuuccccaucaugcacgaccgcaccaagauccggcagcugcccaaccuccugcgcggguacgagaagauccggcugagcacccagaacgucaucaacgcggagaaggccccgggcgggcccuaccgccucggcacguccgggagcugccccaacgccaccucccggagcggcuucuucgccaccauggcgugggccgugccccgcgacaacaacaagaccgccacgaacccgcugaccaucgaggugccccacaucugcaccaaggaggaggaccagaucaccgucuggggcuuccacuccgacaacaagacgcagaugaagaaccuguacggggacagcaacccccagaaguucaccuccagcgccaacggcgugaccacccacuacgugucccagaucgggggcuuccccgaccagacggaggacggcgggcucccgcagagcggccggaucgucguggacuacauggugcagaagcccgggaagaccggcaccaucgucuaccagcgcgggauccugcugccccagaagguguggugcgccuccggccggagcaaggugaucaagggcagccucccccugaucggggaggcggacugccugcacgagaaguacggcgggcucaacaaguccaagccguacuacaccggcgagcacgccaaggccaucgggaacugccccaucugggucaagacgccccugaagcuggccaacggcaccaaguaccggcccccggccaagcuccugaaggagcgcggcuucuucggggcgaucgccggcuuccuggagggcgggugggaggggaugaucgccggcuggcacggcuacaccagccacggggcccacggcguggccgucgcggccgaccucaaguccacccaggaggccaucaacaagaucacgaagaaccugaacagccuguccgagcucgaggugaagaaccugcagcgccugagcggggccauggacgagcuccacaacgagauccuggagcuggacgagaagguggacgaccuccgggccgacaccaucuccagccagaucgagcuggcgguccugcucuccaacgagggcaucaucaacagcgaggacgagcaccuccuggcccuggagcgcaagcugaagaagaugcugggccccuccgccguggacaucgggaacggcugcuucgagaccaagcacaagugcaaccagaccugccucgaccggaucgccgcggggaccuucgacgccggcgaguucagccugcccacguucgacucccugaacaucaccgccgccagccucaacgacgacgggcuggacaaccacaccauccugcuguacuacuccaccgccgcgagcucccucgccgugacgcugaugaucgccaucuucaucgucuacaugaucagccgcgacaacguguccugcagcaucugccuguga

SEQ ID NO: 90454 - RNA, 1755 nt, Artificial Sequence
  derived and/or modified CDS sequence (opt1) from hemagglutinin__InfluenzaB__ABL76771
augaaggccaucaucgugcugcucauggucgugaccagcaacgccgaccgcaucugcaccggcaucacguccagcaacagcccccacguggucaagaccgcgacccagggggaggugaacgugaccggcgucaucccgcugacgaccacccccaccaagucccacuucgccaaccugaaggggacgaagacccggggcaagcucugcccgaccugccugaacugcaccgaccuggacguggcccucgggcgccccaugugcgugggcgucacgcccuccgccaaggccagcauccugcacgaggugcggcccgugaccuccggcugcuuccccaucaugcacgaccgcaccaagauccggcagcugcccaaccuccugcgcggguacgagaagauccggcugagcacccagaacgucaucaacgcggagaaggccccgggcgggcccuaccgccucggcacguccgggagcugccccaacgccaccucccggagcggcuucuucgccaccauggcgugggccgugccccgcgacaacaacaagaccgccacgaacccgcugaccaucgaggugccccacaucugcaccaaggaggaggaccagaucaccgucuggggcuuccacuccgacgacaagacgcagaugaagaaccuguacggggacagcaacccccagaaguucaccuccagcgccaacggcgugaccacccacuacgugucccagaucgggggcuuccccgaccagacggaggacggcgggcucccgcagagcggccggaucgucguggacuacauggugcagaagcccgggaagaccggcaccaucgucuaccagcgcgggauccugcugccccagaagguguggugcgccuccggccggagcaaggugaucaagggcagccucccccugaucggggaggcggacugccugcacgagaaguacggcgggcucaacaaguccaagccguacuacaccggcgagcacgccaaggccaucgggaacugccccaucugggucaagacgccccugaagcuggccaacggcaccaaguaccggcccccggccaagcuccugaaggagcgcggcuucuucggggcgaucgccggcuuccuggagggcgggugggaggggaugaucgccggcuggcacggcuacaccagccacggggcccacggcguggccgucgcggccgaccucaaguccacccaggaggccaucaacaagaucacgaagaaccugaacagccuguccgagcucgaggugaagaaccugcagcgccugagcggggccauggacgagcuccacaacgagauccuggagcuggacgagaagguggacgaccuccgggccgacaccaucuccagccagaucgagcuggcgguccugcucuccaacgagggcaucaucaacagcgaggacgagcaccuccuggcccuggagcgcaagcugaagaagauccugggccccuccgccguggacaucgggaacggcugcuucgagaccaagcacaagugcaaccagaccugccucgaccggaucgccgcggggaccuucgacgccggcgaguucagccugcccacguucgacucccugaacaucaccgccgccagccucaacgacgacgggcuggacaaccacaccauccugcuguacuacuccaccgccgcgagcucccucgccgugacgcugaugaucgccaucuucaucgucuacaugaucagccgcgacaacguguccugcagcaucugccuguga

SEQ ID NO: 90455 - RNA, 1755 nt, Artificial Sequence
  derived and/or modified CDS sequence (opt1) from hemagglutinin__InfluenzaB__ABL76782
augaaggccaucaucgugcugcucauggucgugaccagcaacgccgaccgcaucugcaccggcaucacguccagcaacagcccccacguggucaagaccgcgacccagggggaggugaacgugaccggcgucaucccgcugacgaccacccccaccaagucccacuucgccaaccugaaggggacgaagacccggggcaagcucugcccgaccugccugaacugcaccgaccuggacguggcccucgggucccccaugugcgugggcaucacgcccagcgccaaggccuccauccugcacgagguccgccccgugaccagcggcugcuuccccaucaugcacgaccggaccaagauccgccagcugcccaaccuccugcggggguacgagaagauccgccuguccacccagaacgugaucaacaucgagaaggcgccgggcgggcccuaccggcucggcacgagcggguccugccccaacgccaccagccgcuccggcuucuucgccaccauggccugggcggucccccgggacaacaacaagaccgccacgaacccgcugaccguggaggugccccacaucugcaccaaggaggaggaccagaucaccgucuggggcuuccacagcgacaacaaggcccagaugaagaaccuguacggggacuccaacccccagaaguucacgagcuccgccaacggcgugaccacccacuacgugagccagaucgggggcuuccccgaccagaccgaggacggcgggcucccgcaguccggccgcaucgucguggacuacauggugcagaagcccgggaagacgggcaccaucgucuaccagcgggggauccugcugccccagaagguguggugcgccagcggccgcagcaaggugaucaagggcucccucccccugaucggggaggcggacugccugcacgagaaguacggcgggcucaacaagagcaagccguacuacaccggcgagcacgccaaggccaucgggaacugccccaucugggucaagacgccccugaagcuggccaacggcaccaaguaccggcccccggccaagcuccugaaggagcgcggcuucuucggggcgaucgccggcuuccuggagggcgggugggaggggaugaucgccggcuggcacggcuacaccucccacggggcccacggcguggccgucgcggccgaccucaagagcacccaggaggccaucaacaagaucaccaagaaccugaacucccugagcgagcucgaggugaagaaccugcagcggcuguccggggccauggacgagcuccacaacgagauccuggagcuggacgagaagguggacgaccuccgcgccgacacgaucagcucccagaucgagcuggcgguccugcucagcaacgagggcaucaucaacuccgaggacgagcaccuccuggcccuggagcggaagcugaagaagaugcugggccccagcgccguggacaucgggaacggcugcuucgagaccaagcacaagugcaaccagaccugccucgaccgcaucgccgcggggaccuucaacgccggcgaguucucccugcccaccuucgacagccugaacaucacggccgccucccucaacgacgacgggcuggacaaccacaccauccugcuguacuacagcaccgccgcguccagccucgccgugacccugaugaucgccaucuucaucgucuacaugaucucccgggacaacgugagcugcagcaucugccuguga

SEQ ID NO: 90456 - RNA, 1755 nt, Artificial Sequence; identical to SEQ ID NO: 90429
  derived and/or modified CDS sequence (opt1) from hemagglutinin__InfluenzaB__ABL76793

SEQ ID NO: 90457 - RNA, 1755 nt, Artificial Sequence; identical to SEQ ID NO: 90429
  derived and/or modified CDS sequence (opt1) from hemagglutinin__InfluenzaB__ABL76815

SEQ ID NO: 90458 - RNA, 1758 nt, Artificial Sequence
  derived and/or modified CDS sequence (opt1) from hemagglutinin__InfluenzaB__ABL76826
augaaggccaucaucgugcugcucauggucgugaccagcaacgccgaccgcaucugcaccggcaucacguccagcaacagcccccacguggucaagaccgcgacccagggggaggugaacgugaccggcgucaucccgcugacgaccacccccaccaagagccacuucgccaaccugaaggggacgaagacccggggcaagcucugccccgagugccugaacugcaccgaccuggacguggcccucgggcgccccaagugcaccggcaacaucccguccgccaaggugagcauccugcacgagguccggcccgugacguccggcugcuuccccaucaugcacgaccgcaccaagauccggcagcugcccaaccuccugcgcggguacgagcacauccggcugagcacccacaacgugaucaacgccgagaaggcgccgggcgggcccuacaagaucggcaccuccgggagcugccccaacgucacgaacggcaacggcuucuucgccaccauggccugggccgugcccaagaacgacaacaacaagaccgcgaccaacucccucacgaucgaggugccguacaucugcaccgagggggaggaccagaucaccgucuggggcuuccacagcgacaacgagacccagauggccaagcuguacggggacuccaagccccagaaguucacgagcuccgccaacggcgugaccacccacuacgugagccagaucggcggguuccccaaccagaccgaggacggcgggcugccccaguccggccgcaucgucguggacuacauggugcagaaguccgggaagacgggcaccaucaccuaccagcggggcauccuccugccgcagaaggucuggugcgccuccgggcgcagcaaggugaucaagggcagccugccccucaucggggaggccgacugccugcacgagaaguacggcgggcugaacaaguccaagcccuacuacaccggcgagcacgcgaaggccaucggcaacugccccaucugggugaagacgccgcucaagcuggccaacgggaccaaguaccggccgcccgccaagcugcucaaggagcgcggcuucuucggggccaucgcgggcuuccuggagggcgggugggagggcaugaucgccggguggcacggcuacaccagccacggggcccacggcgucgccguggccgcggaccugaaguccacccaggaggccaucaacaagaucacgaagaaccucaacagccuguccgagcuggaggucaagaaccuccagcggcugagcggcgccauggacgagcugcacaacgagauccucgagcuggacgagaagguggacgaccugcgcgccgacaccaucuccagccagaucgagcucgccgugcugcuguccaacgaggggaucaucaacagcgaggacgagcaccuccuggcgcuggagcggaagcucaagaagaugcugggccccuccgccgucgagaucgggaacggcugcuucgagaccaagcacaagugcaaccagaccugccuggaccgcaucgccgccgggaccuucgacgcgggcgaguucagccuccccacguucgacucccugaacaucaccgccgccagccugaacgacgacggccucgacaaccacaccauccugcuguacuacuccaccgccgccagcucccuggcggugacgcucaugaucgccaucuucguggucuacauggugagccgggacaacguguccugcagcaucugccuguga

SEQ ID NO: 90459 - RNA, 1758 nt, Artificial Sequence
  derived and/or modified CDS sequence (opt1) from hemagglutinin__InfluenzaB__ABL76837
augaaggccaucaucgugcugcucauggucgugaccagcaacgccgaccgcaucugcaccggcaucacguccagcaacagcccccacguggucaagaccgcgacccagggggaggugaacgugaccggcgucaucccgcugacgaccacccccaccaagagccacuucgccaaccugaaggggacgaagacccggggcaagcucugccccaagugccugaacugcaccgaccuggacguggcccucgggcgccccaagugcaccggcaacaucccguccgccgaggugagcauccugcacgagguccggcccgugacguccggcugcuuccccaucaugcacgaccgcaccaaggugcggcagcugcccaaccuccugcgcggguacgagcacauccggcugagcacccacaacgucaucaacgccgagaaggcgccgggcgggcccuacaagaucggcaccuccgggagcugccccaacgugacgaacggcaacggcuucuucgccaccauggccugggccgugcccaagaacgacaacaacaagaccgcgaccaacucccucacggucgaggugccguacaucugcaccgagggggaggaccagaucaccguguggggcuuccacagcgacuccgagacccagauggccaagcuguacggggacagcaagccccagaaguucacguccagcuccaacggcgucaccacccacuacgugagccagaucggcggguuccccaaccagaccgaggacggcgggcugccccaguccggccgcaucguggucgacuacauggugcagaaguccgggaagacgggcaccaucaccuaccagcggggcauccuccugccgcagaagguguggugcgccagcgggcgcuccaaggucaucaagggcagccugccccucaucggggaggccgacugccugcacgagcgguacggcgggcugaacaaguccaagcccuacuacaccggcgagcacgccaaggcgaucggcaacugccccaucugggugaagacgccgcucaagcuggccaacgggaccaaguaccgcccgcccgccaagcugcucaaggagcggggcuucuucggggccaucgccggcuuccuggagggcgggugggagggcaugaucgcgggguggcacggcuacaccagccacggggcccacggcgucgccguggccgccgaccugaaguccacccaggaggcgaucaacaagaucacgaagaaccucaacagccuguccgagcuggaggugaagaaccuccagcgccugagcggcgccauggacgagcugcacaacgagauccucgagcuggacgagaaggucgacgaccugcgggccgacaccaucuccagccagaucgagcucgccgugcugcuguccaacgaggggaucaucaacagcgaggacgagcaccuccuggcccuggagcgcaagcucaagaagaugcugggccccuccgcgguggagaucgggaacggcugcuucgagaccaagcacaagugcaaccagaccugccuggaccggaucgccgccgggaccuucgacgccggcgaguucagccuccccacguucgacucccugaacaucaccgcggccagccugaacgacgacggccucgacaaccacaccauccugcuguacuacuccaccgccgccagcucccuggccgucacgcucaugaucgcgaucuucgugguguacauggucagccgcgacaacgugagcugcuccaucugccuguga

SEQ ID NO: 90460 - RNA, 1755 nt, Artificial Sequence
  derived and/or modified CDS sequence (opt1) from hemagglutinin__InfluenzaB__ABL76848
augaaggccaucaucgugcugcucauggucgugaccagcaacgccgaccgcaucugcaccggcaucacguccagcaacuccagccacguggucaagaccgcgacccagggggaggugaacgugaccggcgccaucccccugacgaccaccccgaccaagucccacuucgccaaccugaaggggacgaagacccggggcaagcucugcccgaccugccugaacugcaccgaccuggacgucgcccucgggcgccccaugugcgugggcaucacgccgcccgccaaggcgagcauccugcacgaggugcggcccgucaccuccggcugcuuccccaucaugcacgaccgcaccaagauccggcagcugcccaaccuccugcgcggguacgagaagauccggcugagcacccagaacgugaucaacgccgagaaggcccccggcgggcccuaccgccucggcacguccgggagcugccccaacgccaccuccaagagcggcuucuucgcgaccauggccugggccgugccccgggacaacaacaagaccgccacgaacccgcugaccgucgaggugccccacaucugcaccaaggaggaggaccagaucaccguguggggcuuccacuccgacaacaagacgcagaugaagaaccuguacggggacagcaacccccagaaguucaccuccagcgccaacggcaucaccacccacuacgucucccagaucgggggcuuccccgaccagacggaggacggcgggcucccgcagagcggccgcaucgugguggacuacaugguccagaagcccgggaagaccggcaccaucguguaccagcgggggauccugcugccccagaagguguggugcgcguccggccgcagcaaggucaucaagggcagccucccccugaucggggaggccgacugccugcacgagaaguacggcgggcucaacaaguccaagccguacuacaccggcgagcacgccaaggccaucgggaacugccccaucugggugaagacgccccugaagcuggccaacggcaccaaguaccggcccccggcgaagcuccugaaggagcgcggcuucuucggggccaucgccggcuuccuggagggcgggugggaggggaugaucgccggcuggcacggcuacaccagccacggggcccacggcguggcggucgccgccgaccucaaguccacccaggaggccaucaacaagaucacgaagaaccugaacagccuguccgagcucgaggugaagaaccugcagcggcugagcggggccauggacgagcuccacaacgagauccuggagcuggacgagaaggucgacgaccuccgcgcggacaccaucuccagccagaucgagcuggccgugcugcucuccaacgagggcaucaucaacagcgaggacgagcaccuccuggcccuggagcggaagcugaagaagaugcugggccccuccgccguggacaucgggaacggcugcuucgagaccaagcacaagugcaaccagaccugccucgaccgcaucgcggccgggaccuucaacgccggcgaguucagccugcccacguucgacucccugaacaucaccgccgccagccucaacgacgacgggcuggacaaccacaccauccugcuguacuacuccaccgcggccagcucccucgccgucacgcugaugaucgccaucuucaucguguacaugaucagccgggacaacguguccugcagcaucugccuguga

SEQ ID NO: 90461 - RNA, 1755 nt, Artificial Sequence; identical to SEQ ID NO: 90429
  derived and/or modified CDS sequence (opt1) from hemagglutinin__InfluenzaB__ABL76859

SEQ ID NO: 90462 - RNA, 1755 nt, Artificial Sequence
  derived and/or modified CDS sequence (opt1) from hemagglutinin__InfluenzaB__ABL76881
augaaggccaucaucgugcugcucauggucgugaccagcaacgccgaccgcaucugcaccggcaucacguccagcaacagcccccacguggucaagaccgcgacccagggggaggugaacgugaccggcgucaucccgcugacgaccacccccaccaagucccacuucgccaaccugaaggggacgcggacccgcggcaagcucugccccgacugccugaacugcaccgaccuggacguggcccucgggcggcccaugugcgugggcaccacgccguccgccaaggccagcauccugcacgagguccgccccgugaccuccggcugcuuccccaucaugcacgaccggaccaagauccgccagcugcccaaccuccugcggggguacgagaacauccgccugagcacccagaacgugaucgacgcggagaaggccuccggcgggccguaccggcucggcacgagcggguccugccccaacgccaccagcaaguccggcuucuucgccaccauggcgugggccguccccaaggacaacaacaagaacgccaccaacccccugacgguggaggugccguacaucugcaccgagggcgaggaccagaucaccgucuggggguuccacagcgacaacgagacccagaugaagaaccuguacggcgacuccaacccccagaaguucacgagcuccgccaacggggugaccacccacuacgugagccagaucggcggcuuccccgaccagaaggaggacgggggccucccccaguccgggcgcaucgucguggacuacauggugcagaagccgggcaagaccgggacgaucgucuaccagcggggcgugcugcugccccagaagguguggugcgccagcggccgcagcaaggucaucaaggggucccucccccugaucggcgaggcggacugccugcacgagaaguacgggggccucaacaagagcaagcccuacuacaccggggagcacgccaaggccaucggcaacugcccgaucugggugaagacgccccugaagcuggccaacggcaccaaguaccggccgcccgccaagcuccugaaggagcgcggguucuucggcgcgaucgccggguuccuggagggcgggugggagggcaugaucgccggcuggcacggguacaccucccacggcgcccacggggucgccguggcggccgaccucaagagcacccaggaggccaucaacaagaucaccaagaaccugaacucccugagcgagcucgaggugaagaaccugcagcggcuguccggcgccauggacgagcuccacaacgagauccuggagcuggacgagaaggucgacgaccuccgcgccgacaccaucagcucccagaucgagcuggcggugcugcucagcaacgagggcaucaucaacuccgaggacgagcaccuccuggcccuggagcggaagcugaagaagaugcuggggcccagcgccguggacaucggcaacgggugcuucgagacgaagcacaagugcaaccagaccugccucgaccgcaucgccgcgggcaccuucaacgccggggaguucucccugcccaccuucgacagccugaacaucaccgccgccucccucaacgacgacggccuggacaaccacacgauccugcuguacuacagcaccgccgcguccagccucgccgucacccugaugcuggccaucuucaucguguacauggugucccgggacaacgucagcugcagcaucugccucuga

SEQ ID NO: 90463 - RNA, 1755 nt, Artificial Sequence
  derived and/or modified CDS sequence (opt1) from hemagglutinin__InfluenzaB__ABL76892
augaaggccaucaucgugcugcucauggucgugaccagcaacgccgaccgcaucugcaccggcaucacguccagcaacagcccccacguggucaagaccgcgacccagggggaggugaacgugaccggcgucaucccgcugacgaccacccccaccaagucccacuucgccaaccugaaggggacgcggacccgcggcaagcucugccccgacugccugaacugcaccgaccuggacguggcccucgggcggcccaugugcgugggcaccacgccguccgccaaggccagcauccugcacgagguccgccccgugaccuccggcugcuuccccaucaugcacgaccggaccaagauccgccagcugcccaaccuccugcggggguacgagaacauccgccugagcacccagaacgugaucgacgcggagaaggccccgggcgggcccuaccggcucggcacguccgggagcugccccaacgccaccuccaagagcggcuucuucgccaccauggcgugggccguccccaaggacaacaacaagaacgccaccaacccgcugacgguggaggugcccuacgucugcaccgagggcgaggaccagaucaccguguggggguuccacuccgacaacaagacccagaugaagaaccuguacggcgacagcaacccccagaaguucacguccagcgccaacggggugaccacccacuacgucucccagaucggcggcuuccccgaccagaccgaggacgggggccucccgcagagcgggcgcaucgugguggacuacaugguccagaagcccggcaagacggggaccaucguguaccagcggggcgugcugcugccccagaaggucuggugcgccuccggccgcagcaaggugaucaaggggagccucccccugaucggcgaggcggacugccugcacgagaaguacgggggccucaacaaguccaagccguacuacaccggggagcacgccaaggccaucggcaacugccccaucugggucaagacgccccugaagcuggccaacggcaccaaguaccggcccccggccaagcuccugaaggagcgcggguucuucggcgcgaucgccggguuccuggagggcgggugggagggcaugaucgccggcuggcacggguacaccagccacggcgcccacgggguggccguggcggccgaccucaaguccacccaggaggccaucaacaagaucaccaagaaccugaacagccuguccgagcucgaggucaagaaccugcagcggcugagcggcgccauggacgagcuccacaacgagauccuggagcuggacgagaagguggacgaccuccgcgccgacacgaucuccagccagaucgagcuggcggugcugcucuccaacgagggcaucaucaacagcgaggacgagcaccuccuggcccuggagcggaagcugaagaagaugcuggggcccuccgccgucgacaucggcaacgggugcuucgagaccaagcacaagugcaaccagaccugccucgaccgcaucgccgcgggcaccuucaacgccggggaguucagccugcccaccuucgacucccugaacaucacggccgccagccucaacgacgacggccuggacaaccacaccauccugcuguacuacuccaccgccgcgagcucccucgccgugacccugaugcuggccaucuucaucguguacauggucagccgggacaacguguccugcagcaucugccucuga

SEQ ID NO: 90464 - RNA, 1755 nt, Artificial Sequence
  derived and/or modified CDS sequence (opt1) from hemagglutinin__InfluenzaB__ABL76903
augaaggccaucaucgugcugcucauggucgugaccagcaacgccgaccgcaucugcaccggcaucacguccagcaacagcccccacguggucaagaccgcgacccagggggaggugaacgugaccggcgucaucccgcugacgaccacccccaccaaguccuacuucgccaaccugaaggggacgcggacccgcggcaagcucugccccgacugccugaacugcaccgaccuggacguggcccucgggcggcccaugugcgugggcaccacgccguccgccaaggccagcauccugcacgagguccgccccgugaccuccggcugcuuccccaucaugcacgaccggaccaagauccgccagcugcccaaccuccugcggggguacgagaacauccgccugagcacccaguccgugaucgacgcggagaaggccccgggcgggcccuaccggcucggcacgagcggguccugccccaacgccaccagcaaguccggcuucuucgccaccauggcgugggccguccccaaggacaacaacaagaacgccaccaacccgcugacgguggaggugcccuacaucugcaccgagggcgaggaccagaucaccgucuggggguuccacagcgacgacaagacccagaugaagaaccuguacggcgacuccaacccccagaaguucacgagcuccgccaacggggugaccacccacuacgugagccagaucggcggcuuccccgaccagaccgaggacgggggccucccgcaguccgggcgcaucgucguggacuacaugauccagaagcccggcaagacggggaccaucguguaccagcggggcguccugcugccccagaagguguggugcgccagcggccgcagcaaggugaucaaggggucccucccccugaucggcgaggcggacugccugcacgagaaguacgggggccucaacaagagcaagccguacuacaccggggagcacgccaaggccaucggcaacugccccaucugggucaagacgccccugaagcuggccaacggcaccaaguaccggcccccggccaagcuccugaaggagcgcggguucuucggcgcgaucgccggguuccuggagggcgggugggagggcaugaucgccggcuggcacggguacaccucccacggcgcccacgggguggccgucgcggccgaccucaagagcacccaggaggccaucaacaagaucaccaagaaccugaacucccugagcgagcucgaggugaagaaccugcagcggcuguccggcgccauggacgagcuccacaacgagauccuggagcuggacgagaagguggacgaccuccgcgccgacacgaucagcgcgcagaucgagcuggccguccugcucuccaacgagggcaucaucaacagcgaggacgagcaccuccuggcccuggagcggaagcugaagaagaugcuggggcccuccgccguggacaucggcaacgggugcuucgagaccaagcacaagugcaaccagaccugccucgaccgcaucgcggccggcaccuucaacgccggggaguucagccugcccaccuucgacucccugaacaucacggccgccagccucaacgacgacggccuggacaaccacaccauccugcuguacuacuccaccgcggccagcucccucgccgugacccugaugcuggccaucuucaucgucuacauggugagccgggacaacguguccugcagcaucugccucuga

SEQ ID NO: 90465 - RNA, 1758 nt, Artificial Sequence
  derived and/or modified CDS sequence (opt1) from hemagglutinin__InfluenzaB__ABL76914
augaaggccaucaucgugcugcucauggucgugaccagcaacgccgaccgcaucugcaccggcaucacguccagcaacagcccccacguggucaagaccgcgacccagggggaggugaacgugaccggcgucaucccgcugacgaccacccccaccaagagccacuucgccaaccugaaggggacgaagacccggggcaagcucugccccaagugccugaacugcaccgaccuggacguggcccucgggcgccccaagugcaccggcaacaucccguccgccgaggugagcauccugcacgagguccggcccgugacguccggcugcuuccccaucaugcacgaccgcaccaagauccggcagcugcccaaccuccugcgcggguacgagcacauccggcugagcacccacaacgugaucaacgccgagaaggcgccgggcgggcccuacaagaucggcaccuccgggagcugccccaacgucacgaacggcaacggcuucuucgccaccauggccugggccgugcccaagaacgacaacaacaagaccgcgaccaacucccucacgaucgaggugccguacaucugcaccgagggggaggaccagaucaccgucuggggcuuccacagcgacaacgaggcccagauggccaagcuguacggggacuccaagccccagaaguucaccagcuccagcaacggcgugacgacccacuacgugucccagaucggcggguuccccaaccagaccgaggacggcgggcugccccagagcggccgcaucgucguggacuacauggugcagaaguccgggaagaccggcacgaucaccuaccagcggggcauccuccugccgcagaaggucuggugcgccagcgggcgcagcaaggugaucaagggcucccugccccucaucggggaggccgacugccugcacgagcgguacggcgggcugaacaagagcaagcccuacuacaccggcgagcacgcgaaggccaucggcaacugccccaucugggugaagaccccgcucaagcuggccaacgggacgaaguaccgcccgcccgccaagcugcucaaggagcggggcuucuucggggccaucgcgggcuuccuggagggcgggugggagggcaugaucgccggguggcacggcuacaccucccacggggcccacggcgucgccguggccgcggaccugaaguccacccaggaggccaucaacaagaucaccaagaaccucaacucccugagcgagcuggaggucaagaaccuccagcgccuguccggcgccauggacgagcugcacaacgagauccucgagcuggacgagaagguggacgaccugcgggccgacacgaucagcucccagaucgagcucgccgugcugcugagcaacgaggggaucaucaacuccgaggacgagcaccuccuggcgcuggagcgcaagcucaagaagaugcugggccccagcgccgucgagaucgggaacggcugcuucgagaccaagcacaagugcaaccagaccugccuggaccggaucgccgccgggaccuucgacgcgggcgaguucucccuccccaccuucgacagccugaacaucacggccgccucccugaacgacgacggccucgacaaccacaccauccugcuguacuacagcaccgccgccuccagccuggcggugacccucaugaucgccaucuucguggucuacauggugucccgcgacaacgugagcugcagcaucugccuguga

SEQ ID NO: 90466 - RNA, 1755 nt, Artificial Sequence
  derived and/or modified CDS sequence (opt1) from hemagglutinin__InfluenzaB__ABL76936
augaaggccaucaucgugcugcucauggucgugaccagcaacgccgaccgcaucugcaccggcaucacguccagcaacagcccccacguggucaagaccgcgacccagggggaggugaacgugaccggcgucaucccgcugacgaccacccccaccaagucccacuucgccaaccugaaggggacgaagacccggggcaagcucugcccgaccugccugaacugcaccgaccuggacguggcccucgggcgccccaugugcgugggcacgacccccuccgccaaggccagcauccugcacgagguccggcccgugaccuccggcugcuuccccaucaugcacgaccgcaccaagauccggcagcugcccaaccuccugcgcggguacgagaagauccggcugagcacgcagaacgugaucaacgcggagaaggccccgggcgggcccuaccgccucggcaccuccgggagcugccccaacgccaccucccggagcggcuucuucgccaccauggcgugggccgucccccgcgacaacaacaagacggccaccaacccgcugaccguggaggugcccuacaucugcaccaaggaggaggaccagaucacggucuggggcuuccacuccgacgacaagacccagaugaagaaccuguacggggacagcaacccccagaaguucaccuccagcgccaacggcgugaccacgcacuacgugucccagaucgggggcuuccccgaccagaccgaggacggcgggcucccgcagagcggccggaucgucguggacuacauggugcagaagcccgggaagaccggcaccaucgucuaccagcgcggggugcugcugccccagaagguguggugcgccuccggccggagcaaggucaucaagggcagccucccccugaucggggaggcggacugccugcacgagaaguacggcgggcucaacaaguccaagccguacuacacgggcgagcacgccaaggccaucgggaacugccccaucugggugaagacgccccugaagcuggccaacggcaccaaguaccggcccccggccaagcuccugaaggagcgcggcuucuucggggcgaucgccggcuuccuggagggcgggugggaggggaugaucgccggcuggcacggcuacaccagccacggggcccacggcgucgccguggcggccgaccucaaguccacccaggaggccaucaacaagaucaccaagaaccugaacagccuguccgagcucgaggugaagaaccugcagcgccugagcggggccauggacgagcuccacaacgagauccuggagcuggacgagaaggucgacgaccuccgggccgacaccaucuccagccagaucgagcuggcggugcugcucuccaacgagggcaucaucaacagcgaggacgagcaccuccuggcccuggagcgcaagcugaagaagaugcugggccccuccgccguggacaucgggaacggcugcuucgagaccaagcacaagugcaaccagaccugccucgaccggaucgccgcggggacguucaacgccggcgaguucagccugcccaccuucgacucccugaacaucaccgccgccagccucaacgacgacgggcuggacaaccacaccauccugcuguacuacuccacggccgcgagcucccucgccgucacccugaugaucgccaucuucaucguguacauggugagccgcgacaacgucuccugcagcaucugccuguga

SEQ ID NO: 90467 - RNA, 1755 nt, Artificial Sequence
  derived and/or modified CDS sequence (opt1) from hemagglutinin__InfluenzaB__ABL76947
augaaggccaucaucgugcugcucauggucgugaccagcaacgccgaccgcaucugcaccggcaucacguccagcaacagcccccacguggucaagaccgcgacccagggggaggugaacgugaccggcgccaucccgcugacgaccacccccaccaagucccacuucgccaaccugaaggggacgaagacccggggcaagcucugcccgaccugccugaacugcaccgaccuggacgucgcccucgggcgccccaugugcgugggcaucacgcccuccgccaaggcgagcauccugcacgaggugcggcccgucaccuccggcugcuuccccaucaugcacgaccgcaccaagauccggcagcugcccaaccuccugcgcggguacgagaagauccggcugagcacccagaacgugaucaacgccgagaaggccccgggcgggcccuaccgccucggcacguccgggagcugccccaacgccaccucccggagcggcuucuucgcgaccauggccugggccgugccccgcgacaacaacaagaccgccacgaacccgcugaccgucgaggugccccacaucugcaccaaggaggaggaccagaucaccguguggggcuuccacuccgacgacaagacgcagaugaagaaccuguacggggacagcaacccccagaaguucaccuccagcaccaacggcaucaccacgcacuacgucucccagaucgggggcuuccccgaccagaccgaggacggcgggcucccgcagagcggccggaucgugguggacuacaugguccagaagcccgggaagaccggcaccaucguguaccagcgcgggauccugcugccccagaagguguggugcgccuccggccggagcaaggucaucaagggcagccucccccugaucggggaggcggacugccugcacgagaaguacggcgggcucaacaaguccaagccguacuacacgggcgagcacgccaaggccaucgggaacugccccaucugggugaagacgccccugaagcuggccaacggcaccaaguaccggcccccggccaagcuccugaaggagcgcggcuucuucggggcgaucgccggcuuccuggagggcgggugggaggggaugaucgccggcuggcacggcuacaccagccacggggcccacggcguggccgucgcggccgaccucaaguccacccaggaggccaucaacaagaucaccaagaaccugaacagccuguccgagcucgaggugaagaaccugcagcgccugagcggggccauggacgagcuccacaacgagauccuggagcuggacgagaaggucgacgaccuccgggccgacaccaucuccagccagaucgagcuggcggugcugcucuccaacgagggcaucaucaacagcgaggacgagcaccuccuggcccuggagcgcaagcugaagaagaugcugggccccuccgccguggacaucgggaacggcugcuucgagaccaagcacaagugcaaccagaccugccucgaccggaucgccgcggggacguucaacgccggcgaguucagccugcccaccuucgacucccugaacaucaccgccgccagccucaacgacgacgggcuggacaaccacaccauccugcuguacuacuccacggccgcgagcucccucgccgucacccugaugaucgccaucuucaucguguacaugaucagccgcgacaacguguccugcagcaucugccuguga

SEQ ID NO: 90468 - RNA, 1758 nt, Artificial Sequence
  derived and/or modified CDS sequence (opt1) from hemagglutinin__InfluenzaB__ABL76958
augaaggccaucaucgugcugcucauggucgugaccagcaacgccgaccgcaucugcaccggcaucacguccagcaacagcccccacguggucaagaccgcgacccagggggaggugaacgugaccggcgucaucccgcugacgaccacccccaccaagagccacuucgccaaccugaaggggacgaagacccggggcaagcucugccccaagugccugaacugcaccgaccuggacguggcccucgggcgccccaagugcaccggcaacaucccguccgccaaggugagcauccugcacgagguccggcccgugacguccggcugcuuccccaucaugcacgaccgcaccaagauccggcagcugcccaaccuccugcgcggguacgagcacauccggcugagcacccacaacgugaucaacgccgagaaggcgccgggcgggcccuacaagaucggcaccuccgggagcugccccaacgucacgaacggcaacggcuucuucgccaccauggccugggccgugcccaagaacgacaacaacaagaccgcgaccaacucccucacgaucgaggugccguacaucugcaccgagggggaggaccagaucaccgucuggggcuuccacagcgacaacgaggcccagauggccaagcuguacggggacuccaagccccagaaguucaccagcuccgccaacggcgugacgacccacuacgugagccagaucggcggguuccccaaccagaccgaggacggcgggcugccccaguccggccgcaucgucguggacuacauggugcagaaguccgggaagaccggcacgaucaccuaccagcggggcauccuccugccgcagaaggucuggugcgccuccgggcgcagcaaggugaucaagggcagccugccccucaucggggaggcggacugccugcacgagaaguacggcgggcugaacaaguccaagcccuacuacaccggcgagcacgccaaggccaucggcaacugccccaucugggugaagaccccgcucaagcuggccaacgggacgaaguaccggccgcccgccaagcugcucaaggagcgcggcuucuucggggcgaucgccggcuuccuggagggcgggugggagggcaugaucgccggguggcacggcuacaccagccacggggcccacggcgucgccguggcggccgaccugaaguccacccaggaggccaucaacaagaucaccaagaaccucaacagccuguccgagcuggaggucaagaaccuccagcggcugagcggcgccauggacgagcugcacaacgagauccucgagcuggacgagaagguggacgaccugcgcgccgacacgaucuccagccagaucgagcucgcggugcugcuguccaacgaggggaucaucaacagcgaggacgagcaccuccuggcccuggagcggaagcucaagaagaugcugggccccuccgccgucgagaucgggaacggcugcuucgagaccaagcacaagugcaaccagaccugccuggaccgcaucgccgcggggaccuucaacgccggcgaguucagccuccccaccuucgacucccugaacaucacggccgccagccugaacgacgacggccucgacaaccacaccauccugcuguacuacuccaccgccgcgagcucccuggccgugacccucaugaucgccaucuucguggucuacauggugagccgggacaacaucuccugcagcaucugccuguga

SEQ ID NO: 90469 - RNA, 1758 nt, Artificial Sequence
  derived and/or modified CDS sequence (opt1) from hemagglutinin__InfluenzaB__ABL76969
augaaggccaucaucgugcugcucauggucgugaccagcaacgccgaccgcaucugcaccggcaucacguccagcaacagcccccacguggucaagaccgcgacccagggggaggugaacgugaccggcgucaucccgcugacgaccacccccaccaagagccacuucgccaaccugaaggggacgcggacccgcggcaagcucugccccaagugccugaacugcaccgaccuggacguggcccucgggcggcccaagugcaccggcaacaucccguccgccaaggugagcauccugcacgagguccgccccgugacguccggcugcuuccccaucaugcacgaccggaccaagauccgccagcugcccaaccuccugcggggguacgagcacauccgccugagcauccacaacgugaucaacgccgagaaggcgccgggcgggcccuacaagaucggcaccuccgggagcugccccaacgucaccaacggcaacggcuucuucgccacgauggccugggccgugcccaagaacgacaacaacaagaccgcgaccaacucccucaccaucgaggugccguacaucugcacggagggggaggaccagaucaccgucuggggcuuccacagcgacaacgaggcccagauggccaagcuguacggggacuccaagccccagaaguucaccagcuccgccaacggcgugaccacgcacuacgugagccagaucggcggguuccccaaccagaccgaggacggcgggcugccccaguccggccggaucgucguggacuacauggugcagaaguccgggaagaccggcaccaucacguaccagcgcggcauccuccugccgcagaaggucuggugcgccuccgggcggagcaaggugaucaagggcagccugccccucaucggggaggcggacugccugcacgagaaguacggcgggcugaacaaguccaagcccuacuacaccggcgagcacgccaaggccaucggcaacugccccaucugggugaagaccccgcucaagcuggccaacgggaccaaguaccgcccgcccgccaagcugcucaaggagcggggcuucuucggggcgaucgccggcuuccuggagggcgggugggagggcaugaucgccggguggcacggcuacacgagccacggggcccacggcgucgccguggcggccgaccugaaguccacccaggaggccaucaacaagaucaccaagaaccucaacagccuguccgagcuggaggucaagaaccuccagcgccugagcggcgccauggacgagcugcacaacgagauccucgagcuggacgagaagguggacgaccugcgggccgacaccaucuccagccagaucgagcucgcggugcugcuguccaacgaggggaucaucaacagcgaggacgagcaccuccuggcccuggagcgcaagcucaagaagaugcugggccccuccgccgucgagaucgggaacggcugcuucgagacgaagcacaagugcaaccagaccugccuggaccggaucgccgcggggaccuucgacgccggcgaguucagccuccccaccuucgacucccugaacaucaccgccgccagccugaacgacgacggccucgacaaccacacgauccugcuguacuacuccaccgccgcgagcucccuggccgugacccucaugaucgccaucuucguggucuacauggugagccgcgacaacguguccugcagcaucugccuguga

SEQ ID NO: 90470 - RNA, 1755 nt, Artificial Sequence
  derived and/or modified CDS sequence (opt1) from hemagglutinin__InfluenzaB__ABL76980
augaaggccaucaucgugcugcucauggucgugaccagcaacgccgaccgcaucugcaccggcaucacguccagcaacagcccccacguggucaagaccgcgacccagggggaggugaacgugaccggcgucaucccgcugacgaccacccccaccaagucccacuucgccaaccugaaggggacgaagacccggggcaagcucugcccgaccugccugaacugcaccgaccuggacguggcccucgggcgccccaugugcgugggcaucacgcccuccgccaaggccagcauccugcacgagguccggcccgugaccuccggcugcuuccccaucaugcacgaccgcaccaagauccggcagcugcccaaccuccugcgcggguacgagaagauccggcugagcacccagaacgugaucaacgcggagaaggccccgggcgggcccuaccgccucggcacguccgggagcugccccaacgccaccuccaagagcggcuucuucgccaccauggcgugggccgucccccgggacaacaacaagaccgccacgaacccgcugaccguggaggugcccuacaucugcaccaaggaggaggaccagaucaccgucuggggcuuccacuccgacaacaagacgcagaugaagaaccuguacggggacagcgacccccagaaguucaccuccagcgccaacggcgugaccacccacuacgugucccagaucgggggcuuccccgaccagacggaggacggcgggcucccgcagagcggccgcaucgucguggacuacauggugcagaagcccgggaagaccggcaccaucgucuaccagcgggggauccugcugccccagaagguguggugcgccuccggccgcagcaaggugaucaagggcagccucccccugaucggggaggcggacugccugcacgagaaguacggcgggcucaacaaguccaagccguacuacaccggcgagcacgccaaggccaucgggaacugccccaucugggucaagacgccccugaagcuggccaacggcaccaaguaccggcccccggccaagcuccugaaggagcgcggcuucuucggggcgaucgccggcuuccuggagggcgggugggaggggaugaucgccggcuggcacggcuacaccagccacggggcccacggcguggccgucgcggccgaccucaaguccacccaggaggccaucaacaagaucacgaagaaccugaacagccuguccgagcucgaggugaagaaccugcagcggcugagcggggccauggacgagcuccacaacgagauccuggagcuggacgagaagguggacgaccuccgcgccgacaccaucuccagccagaucgagcuggcgguccugcucuccaacgagggcaucaucaacagcgaggacgagcaccuccuggcccuggagcggaagcugaagaagaugcugggccccuccgccguggacaucgggaacggcugcuucgagaccaagcacaagugcaaccagaccugccucgaccgcaucgccgcggggaccuucaacgccggcgaguucagccugcccacguucgacucccugaacaucaccgccgccagccucaacgacgacgggcuggacaaccacaccauccugcuguacuacuccaccgccgcgagcucccucgccgugacgcugaugaucgccaucuucaucgucuacaugaucagccgggacaacguguccugcagcaucugccuguga

SEQ ID NO: 90471 - RNA, 1752 nt, Artificial Sequence
  derived and/or modified CDS sequence (opt1) from hemagglutinin__InfluenzaB__ABL76991
augaaggccaucaucgugcugcucauggucgugaccagcaacgccgaccgcaucugcaccggcaucacguccagcaacagcccccacguggucaagaccgcgacccagggggaggugaacgugaccggcgucaucccgcugacgaccacccccaccaagucccacuucgccaaccugaaggggacgaagacccggggcaagcucugccccaacugccugaacugcaccgaccuggacguggcccucgggcgccccaugugcaucggcaucaccccguccgccaaggccagcauccugcacgaggugcggcccgucacguccggcugcuuccccaucaugcacgaccgcaccaagauccggcagcugcccaaccuccugcgcggguacgagcacauccggcugagcacccacaacgugaucaacgcggagcgcgccccgggcgggcccuaccggcucggcaccuccgggagcugccccaacgugacgucccgcagcggcuucuucgccaccauggccugggcggucccccgggacaacaagaccgccaccaacccgcugacgguggaggugcccuacaucugcaccaagggcgaggaccagaucaccgucuggggguuccacuccgacaacaagauccagaugaagaaccuguacggcgacagcaacccccagaaguucaccuccagcgccaacgggaucacgacccacuacgugucccagaucggcggcuuccccaaccagaccgaggacgggggccucccgcagagcgggcgcaucguggucgacuacauggugcagaagcccggcaagaccgggacgaucguguaccagcggggcguccugcugccccagaagguguggugcgccuccggccgcagcaaggugaucaaggggagccucccccugaucggcgaggccgacugccugcacgagaaguacgggggccucaacaaguccaagccguacuacaccggggagcacgcgaaggccaucggcaacugccccaucugggucaagacgccccugaagcuggccaacggcaccaaguaccggcccccggccaagcuccugaaggagaagggguucuucggcgccaucgcgggguuccuggagggcgggugggagggcaugaucgccggcuggcacggguacaccagccacggcgcccacgggguggccgucgccgcggaccucaaguccacccaggaggccaucaacaagaucaccaagaaccugaacagccuguccgagcucgaggugaagaaccugcagcgccugagcggcgccauggacgagcuccacaacgagauccuggagcuggacgagaagguggacgaccuccgggccgacaccaucuccagccagaucgagcuggccguccugcucuccaacgagggcaucaucaacagcgaggacgagcaccuccuggcgcuggagcgcaagcugaagaagaugcuggggcccuccgccguggacaucggcaacgggugcuucgagacgaagcacaagugcaaccagaccugccucgaccggaucgccgccggcaccuucaacgcgggggaguucagccugcccaccuucgacucccugaacaucaccgccgccagccucaacgacgacggccuggacaaccacacgauccugcuguacuacuccaccgccgccagcucccucgcggugacccugaugaucgccaucuucaucgucuacauggugagccgcgacaacguguccugcagcaucugccuguga

SEQ ID NO: 90472 - RNA, 1755 nt, Artificial Sequence
  derived and/or modified CDS sequence (opt1) from hemagglutinin__InfluenzaB__ABL77002
augaaggccaucaucgugcugcucauggucgugaccagcaacgccgaccgcaucugcaccggcaucacguccagcaacagcccccacguggucaagaccgcgacccagggggaggugaacgugaccggcgucaucccgcugacgaccacccccaccaagucccacuucgccaaccugaaggggacgaagacccggggcaagcucugcccgaccugccugaacugcaccgaccuggacguggcccucgggcgccccaugugcgugggcgucacgcccuccgccaaggccagcauccugcacgaggugcggcccgugaccuccggcugcuuccccaucaugcacgaccgcaccaagauccggcagcugcccaaccuccugcgcggguacgagaagauccggcugagcacccagaacgucaucaacgcggagaaggccccgggcgggcccuaccgccucggcacguccgggagcugccccaacgccaccucccggagcggcuucuucgccaccauggcgugggccgugccccgcgacaacaacaagaccgccacgaacccgcugaccaucgaggugccccacaucugcaccaaggaggaggaccagaucaccaucuggggcuuccacuccgacgacaagacgcagaugaagaaccuguacggggacagcaacccccagaaguucaccuccagcgccaacggcgucaccacccacuacgugucccagaucgggggcuuccccgaccagacggaggacggcgggcucccgcagagcggccggaucguggucgacuacauggugcagaagcccgggaagaccggcaccaucguguaccagcgcgggauccugcugccccagaaggucuggugcgccuccggccggagcaaggugaucaagggcagccucccccugaucggggaggcggacugccugcacgagaaguacggcgggcucaacaaguccaagccguacuacaccggcgagcacgccaaggccaucgggaacugccccaucugggugaagacgccccugaagcuggccaacggcaccaaguaccggcccccggccaagcuccugaaggagcgcggcuucuucggggcgaucgccggcuuccuggagggcgggugggaggggaugaucgccggcuggcacggcuacaccagccacggggcccacggcgucgccguggcggccgaccucaaguccacccaggaggccaucaacaagaucacgaagaaccugaacagccuguccgagcucgaggucaagaaccugcagcgccugagcggggccauggacgagcuccacaacgagauccuggagcuggacgagaagguggacgaccuccgggccgacaccaucuccagccagaucgagcuggcggugcugcucuccaacgagggcaucaucaacagcgaggacgagcaccuccuggcccuggagcgcaagcugaagaagaugcugggccccuccgccgucgacaucgggaacggcugcuucgagaccaagcacaagugcaaccagaccugccucgaccggaucgccgcggggaccuucgacgccggcgaguucagccugcccacguucgacucccugaacaucaccgccgccagccucaacgacgacgggcuggacaaccacaccauccugcuguacuacuccaccgccgcgagcucccucgccgugacgcugaugaucgccaucuucaucguguacaugaucagccgcgacaacgucuccugcagcaucugccuguga

SEQ ID NO: 90473 - RNA, 1755 nt, Artificial Sequence
  derived and/or modified CDS sequence (opt1) from hemagglutinin__InfluenzaB__ABL77013
augaaggccaucaucgugcugcucauggucgugaccagcaacgccgaccgcaucugcaccggcaucacguccagcaacagcccccacguggucaagaccgcgacccagggggaggugaacgugaccggcgucaucccgcugacgaccacccccaccaaguccuacuucgccaaccugaaggggacgaagacccggggcaagcucugcccgaccugccugaacugcaccgaccuggacguggcccucgggcgccccaugugcgugggcaucacgcccuccgccaaggccagcauccugcacgagguccggcccgugaccuccggcugcuuccccaucaugcacgaccgcaccaagauccggcagcugcccaaccuccugcgcggguacgagaagauccggcugagcacccagaacgugaucaacgcggagaaggccccgggcgggcccuaccgccucggcacguccgggagcugccccaacgccaccuccaagagcggcuucuucgccaccauggcgugggccgucccccgggacaacaacaagaccgccacgaacccgcugaccguggaggugcccuacaucugcaccaaggaggaggaccagaucaccgucuggggcuuccacuccgacaacaagaaccagaugaagaaccuguacggggacagcgacccccagaaguucacguccagcgccaacggcgugaccacccacuacgugucccagaucgggggcuuccccgaccagaccgaggacggcgggcucccgcagagcggccgcaucgucguggacuacauggugcagaagcccgggaagacgggcaccaucgucuaccagcgggggauccugcugccccagaagguguggugcgccuccggccgcagcaaggugaucaagggcagccucccccugaucggggaggcggacugccugcacgagaaguacggcgggcucaacaaguccaagccguacuacaccggcgagcacgccaaggccaucgggaacugccccaucugggucaagacgccccugaagcuggccaacggcaccaaguaccggcccccggccaagcuccugaaggagcgcggcuucuucggggcgaucgccggcuuccuggagggcgggugggaggggaugaucgccggcuggcacggcuacaccagccacggggcccacggcguggccgucgcggccgaccucaaguccacccaggaggccaucaacaagaucaccaagaaccugaacagccuguccgagcucgaggugaagaaccugcagcggcugagcggggccauggacgagcuccacaacgagauccuggagcuggacgagaagguggacgaccuccgcgccgacacgaucuccagccagaucgagcuggcgguccugcucuccaacgagggcaucaucaacagcgaggacgagcaccuccuggcccuggagcggaagcugaagaagaugcugggccccuccgccguggacaucgggaacggcugcuucgagaccaagcacaagugcaaccagaccugccucgaccgcaucgccgcggggaccuucaacgccggcgaguucagccugcccaccuucgacucccugaacaucacggccgccagccucaacgacgacgggcuggacaaccacaccauccugcuguacuacuccaccgccgcgagcucccucgccgugacccugaugaucgccaucuucaucgucuacaugaucagccgggacaacguguccugcagcaucugccuguga

SEQ ID NO: 90474 - RNA, 1755 nt, Artificial Sequence
  derived and/or modified CDS sequence (opt1) from hemagglutinin__InfluenzaB__ABL77024
augaaggccaucaucgugcugcucauggucgugaccagcaacgccgaccgcaucugcaccggcaucacguccagcaacagcccccacguggucaagaccgcgacccagggggaggugaacgugaccggcgccaucccgcugacgaccacccccaccaagucccacuucgccaaccugaaggggacgaagacccggggcaagcucugcccgaccugccugaacugcaccgaccuggacgucgcccucgggcgccccaugugcgugggcaucacgcccuccgccaaggcgagcauccugcacgaggugcggcccgucaccuccggcugcuuccccaucaugcacgaccgcaccaagauccggcagcugcccaaccuccugcgcggguacgagaagauccggcugagcacccagaacgugaucaacgccgagaaggccccgggcgggcccuaccgccucggcacguccgggagcugccccaacgccaccuccaagagcggcuucuucgcgaccauggccugggccgugccccgggacaacaacaagaccgccacgaacccgcugaccgucgaggugccccacaucugcaccaaggaggaggaccagaucaccguguggggcuuccacuccgacgacaagacgcagaugaagaaccuguacggggacagcaacccccagaaguucaccuccagcgccaacggcaucaccacccacuacgucucccagaucgggggcuuccccgaccagacggaggacggcgggcucccgcagagcggccgcaucgugguggacuacaugguccagaagcccgggaagaccggcaccaucguguaccagcgggggauccugcugccccagaagguguggugcgcguccggccgcagcaaggucaucaagggcagccucccccugaucggggaggccgacugccugcacgagaaguacggcgggcucaacaaguccaagccguacuacaccggcgagcacgccaaggccaucgggaacugccccaucugggugaagacgccccugaagcuggccaacggcaccaaguaccggcccccggcgaagcuccugaaggagcgcggcuucuucggggccaucgccggcuuccuggagggcgggugggaggggaugaucgccggcuggcacggcuacaccagccacggggcccacggcguggcggucgccgccgaccucaaguccacccaggaggccaucaacaagaucacgaagaaccugaacagccuguccgagcucgaggugaagaaccugcagcggcugagcggggccauggacgagcuccacaacgagauccuggagcuggacgagaaggucgacgaccuccgcgcggacaccaucuccagccagaucgagcuggccgugcugcucuccaacgagggcaucaucaacagcgaggacgagcaccuccuggcccuggagcggaagcugaagaagaugcugggccccuccgccguggacaucgggaacggcugcuucgagaccaagcacaagugcaaccagaccugccucgaccgcaucgcggccgggaccuucaacgccggcgaguucagccugcccacguucgacucccugaacaucaccgccgccagccucaacgacgacgggcuggacaaccacaccauccugcuguacuacuccaccgcggccagcucccucgccgucacgcugaugaucgccaucuucaucguguacaugaucagccgggacaacguguccugcagcaucugccuguga

SEQ ID NO: 90475 - RNA, 1755 nt, Artificial Sequence
  derived and/or modified CDS sequence (opt1) from hemagglutinin__InfluenzaB__ABL77035
augaaggccaucaucgugcugcucauggucgugaccagcaacgccgaccgcaucugcaccggcaucacguccagcaacagcccccacguggucaagaccgcgacccagggggaggugaacgugaccggcgccaucccgcugacgaccacccccaccaagucccacuucgccaaccugaaggggacgaagacccggggcaagcucugcccgaccugccugaacugcaccgaccuggacgucgcccucgggcgccccaugugcgugggcaucacgcccuccgccaaggcgagcauccugcacgaggugcggcccgucaccuccggcugcuuccccaucaugcacgaccgcaccaagauccggcagcugcccaaccuccugcgcggguacgagaagauccggcugagcacccagaacgugaucaacgccgagaaggccccgggcgggcccuaccgccucggcacguccgggagcugccccaacgccaccucccggagcggcuucuucgcgaccauggccugggccgugccccgcgacaacaacaagaccgccacgaacccgcugaccgucgaggugccccacaucugcaccaaggaggaggaccagaucaccguguggggcuuccacuccgacgacaagacgcagaugaagaaccuguacggggacagcaacccccagaaguucaccuccagcgccaacggcgucaccacccacuacgugucccagaucgggggcuuccccgaccagacggaggacggcgggcucccgcagagcggccggaucguggucgacuacauggugcagaagcccgggaagaccggcaccaucguguaccagcgcgggauccugcugccccagaaggucuggugcgcguccggccggagcaaggugaucaagggcagccucccccugaucggggaggccgacugccugcacgagaaguacggcgggcucaacaaguccaagccguacuacaccggcgagcacgccaaggccaucgggaacugccccaucugggugaagacgccccugaagcuggccaacggcaccaaguaccggcccccggcgaagcuccugaaggagcgcggcuucuucggggccaucgccggcuuccuggagggcgggugggaggggaugaucgccggcuggcacggcuacaccagccacggggcccacggcgucgcgguggccgccgaccucaaguccacccaggaggccaucaacaagaucacgaagaaccugaacagccuguccgagcucgaggucaagaaccugcagcgccugagcggggccauggacgagcuccacaacgagauccuggagcuggacgagaagguggacgaccuccgggcggacaccaucuccagccagaucgagcuggccgugcugcucuccaacgagggcaucaucaacagcgaggacgagcaccuccuggcccuggagcgcaagcugaagaagaugcugggccccuccgccgucgacaucgggaacggcugcuucgagaccaagcacaagugcaaccagaccugccucgaccggaucgcggccgggaccuucaacgccggcgaguucagccugcccacguucgacucccugaacaucaccgccgccagccucaacgacgacgggcuggacaaccacaccauccugcuguacuacuccaccgcggccagcucccucgccgugacgcugaugaucgccaucuucaucguguacaugaucagccgcgacaacgucuccugcagcaucugccuguga

SEQ ID NO: 90476 - RNA, 1755 nt, Artificial Sequence
  derived and/or modified CDS sequence (opt1) from hemagglutinin__InfluenzaB__ABL77046
augaaggccaucaucgugcugcucauggucgugaccagcaacgccgaccgcaucugcaccggcaucacguccagcaacagcccccacguggucaagaccgcgacccagggggaggugaacgugaccggcgccaucccgcugacgaccacccccaccaagucccacuucgccaaccugaaggggacgaagacccggggcaagcucugcccgaccugccugaacugcaccgaccuggacgucgcccucgggcgccccaugugcgugggcaucacgcccuccgccaaggcgagcauccugcacgaggugcggcccgucaccuccggcugcuuccccaucaugcacgaccgcaccaagauccggcagcugcccaaccuccugcgcggguacgagaagauccggcugagcacccagaacgugaucaacgccgagaaggccccgggcgggcccuaccgccucggcacguccgggagcugccccaacgccaccuccaagagcggcuucuucgcgaccauggccugggccgugccccgggacaacaacaagaccgccacgaacccgcugaccgucgaggugccccacaucugcaccaaggaggaggaccagaucaccguguggggcuuccacuccgacgacaagacgcagaugaagaaccuguacggggacagcaacccccagaaguucaccuccagcgccaacggcaucaccacccacuacgucucccagaucgggggcuuccccgaccagacggaggacggcgggcucccgcagagcggccgcaucgugguggacuacaugguccagaagcccgggaagaccggcaccaucguguaccagcgggggauccugcugccccagaagguguggugcgcguccggccgcagcaaggucaucaagggcagccucccccugaucggggaggccgacugccugcacgagaaguacggcgggcucaacaaguccaagccguacuacaccggcgagcacgccaaggccaucgggaacugccccaucugggugaagacgccccugaagcuggccaacggcaccaaguaccggcccccggcgaagcuccugaaggagcgcggcuucuucggggccaucgccggcuuccuggagggcgggugggaggggaugaucgccggcuggcacggcuacaccagccacggggcccacggcguggcggucgccgccgaccucaaguccacccaggaggccaucaacaagaucacgaagaaccugaacagccuguccgagcucgaggugaagaaccugcagcggcugagcggggccauggacgagcuccacaacgagauccuggagcuggacgagaaggucgacgaccuccgcgcggacaccaucuccagccagaucgagcuggccgugcugcucuccaacgagggcaucaucaacagcgaggacgagcaccuccuggcccuggagcggaagcugaagaagaugcugggccccuccgccaucgacaucgggaacggcugcuucgagaccaagcacaagugcaaccagaccugccucgaccgcaucgcggccgggaccuucaacgccggcgaguucagccugcccacguucgacucccugaacaucaccgccgccagccucaacgacgacgggcuggacaaccacaccauccugcuguacuacuccaccgcggccagcucccucgccgugacgcugaugaucgccaucuucaucgucuacaugaucagccgggacaacguguccugcagcaucugccuguga

SEQ ID NO: 90477 - RNA, 1755 nt, Artificial Sequence
  derived and/or modified CDS sequence (opt1) from hemagglutinin__InfluenzaB__ABL77057
augaaggccaucaucgugcugcucauggucgugaccagcaaggccgaccgcaucugcaccggcaucacguccagcaacagcccccacguggucaagaccgcgacccagggggaggugaacgugaccggcgccaucccgcugacgaccacccccaccaagucccacuucgccaaccugaaggggacgaagacccggggcaagcucugcccgaccugccugaacugcaccgaccuggacgucgcccucgggcgccccaugugcgugggcaucacgcccuccgccaaggcgagcauccugcacgaggugaagcccgucaccuccggcugcuuccccaucaugcacgaccggaccaagauccgccagcugcccaaccuccugcggggguacgagaagauccgccugagcacccagaacgugaucaacgccgagaaggccccgggcgggcccuaccggcucggcacguccgggagcugccccaacgccaccuccaagagcggcuucuucgcgaccauggccugggccgugccccgcgacaacaacaagaccgccacgaacccgcugaccgucgaggugccccacaucugcaccaaggaggaggaccagaucaccguguggggcuuccacuccgacaacaagccccagaugaagaaccuguacggggacagcaacccccagaaguucacguccagcgccaacggcaucaccacccacuacgucucccagaucgggggcuucccggagcagaccgaggacggcgggcucccccagagcggccggaucgugguggacuacaugguccagaagcccgggaagacgggcaccaucguguaccagcgcgggauccugcugccccagaagguguggugcgcguccggccggagcaaggucaucaagggcagccucccgcugaucggggaggccgacugccugcacgagaaguacggcgggcucaacaaguccaagcccuacuacaccggcgagcacgccaaggccaucgggaacugccccaucugggugaagacgccccugaagcuggccaacggcaccaaguaccgcccgcccgcgaagcuccugaaggagcggggcuucuucggggccaucgccggcuuccuggagggcgggugggaggggaugaucgccggcuggcacggcuacaccagccacggggcccacggcguggcggucgccgccgaccucaaguccacccaggaggccaucaacaagaucaccaagaaccugaacagccuguccgagcucgaggugaagaaccugcagcgccugagcggggccauggacgagcuccacaacgagauccuggagcuggacgagaaggucgacgaccuccgggcggacacgaucuccagccagaucgagcuggccgugcugcucuccaacgagggcaucaucaacagcgaggacgagcaccuccuggcccuggagcgcaagcugaagaagaugcugggccccuccgccguggacaucgggaacggcugcuucgagaccaagcacaagugcaaccagaccugccucgaccggaucgcggccgggaccuucaacgccggcgaguucagccugcccaccuucgacucccugaacaucacggccgccagccucaacgacgacgggcuggacaaccacaccauccugcuguacuacuccaccgcggccagcucccucgccgucacccugaugaucgccaucuucaucguguacaugaucagccgcgacaacguguccugcagcaucugccuguga

SEQ ID NO: 90478 - RNA, 1758 nt, Artificial Sequence
  derived and/or modified CDS sequence (opt1) from hemagglutinin__InfluenzaB__ABL77068
augaaggccaucaucgugcugcucauggucgugaccagcaacgccgaccgcaucugcaccggcaucacguccagcaacagcccccacguggucaagaccgcgacccagggggaggugaacgugaccggcgucaucccgcugacgaccacccccaccaagagccacuucgccaaccugaaggggacgaagacccggggcaagcucugccccaagugccugaacugcaccgaccuggacguggcccucgggcgccccaagugcaccggcaacaucccguccgccaaggugagcauccugcacgagguccggcccgugacguccggcugcuuccccaucaugcacgaccgcaccaagauccggcagcugcccaaccuccugcgcggguacgagcggauccgccugagcaaccacaacgugaucaacgccgagaaggcgccgggcgggcccuacaagaucggcaccuccgggagcugccccaacgucaccaacggcaacggcuucuucgccacgauggccugggccgugcccaagaacgagaacaacaagaccgcgaccaacucccucaccaucgaggugccguacaucugcacggagggggaggaccagaucaccgucuggggcuuccacagcgacaacgagaaccagauggccaagcuguacggggacuccaagccccagaaguucaccagcuccgccaacggcgugaccacgcacuacgugagccagaucggcggguuccccaaccagaccgaggacggcgggcugccccaguccggccggaucgucguggacuacauggugcagaaguccgggaagaccggcaccaucacguaccagcgcggcauccuccugccgcagaaggucuggugcgccuccgggcggagcaaggugaucaagggcagccugccccucaucggggaggccgacugccugcacgagaaguacggcgggcugaacaaguccaagcccuacuacaccggcgagcacgcgaaggccaucggcaacugccccaucugggugaagaccccgcucaagcuggccaacgggaccaaguaccgcccgcccgccaagcugcucaaggagcggggcuucuucggggccaucgcgggcuuccuggagggcgggugggagggcaugaucgccggguggcacggcuacacgagccacggggcccacggcgucgccguggccgcggaccugaaguccacccaggaggccaucaacaagaucaccaagaaccucaacagccuguccgagcuggaggucaagaaccuccagcgccugagcggcgccauggacgagcugcacaacgagauccucgagcuggacgagaagguggacgaccugcgggccgacaccaucuccagccagaucgagcucgccgugcugcuguccaacgaggggaucaucaacagcgaggacgagcaccuccuggcgcuggagcgcaagcucaagaagaugcugggccccuccgccgucgagaucgggaacggcugcuucgagacgaagcacaagugcaaccagaccugccuggaccggaucgccgccgggaccuucaacgcgggcgaguucagccuccccaccuucgacucccugaacaucaccgccgccagccugaacgacgacggccucgacaaccacacgauccugcuguacuacuccaccgccgccagcucccuggcggugacccucaugaucgccaucuucguggucuacauggugagccgcgacaacguguccugcagcaucugccuguga

SEQ ID NO: 90479 - RNA, 1758 nt, Artificial Sequence
  derived and/or modified CDS sequence (opt1) from hemagglutinin__InfluenzaB__ABL77090
augaaggccaucaucgugcugcucauggucgugaccagcaacgccgaccgcaucugcaccggcaucacguccagcaacagcccccacguggucaagaccgcgacccagggggaggugaacgugaccggcgucaucccgcugacgaccacccugaccaagagccacuucgccaaccucaaggggacgaagacccggggcaagcugugccccaagugccugaacugcaccgaccucgacguggcccuggggcgccccaagugcaccggcaacauccccuccgccaaggugagcauccugcacgagguccggccggugacguccggcugcuuccccaucaugcacgaccgcaccaagauccggcagcuccccaaccugcugcgcggguacgagcggauccgccucagcaaccacaacgugaucaacgccgagaaggcgcccggcgggccguacaagaucggcaccuccgggagcugccccaacgucaccaacggcaacggcuucuucgccacgauggccugggccgugcccaagaacgagaacaacaagaccgcgaccaacucccugaccaucgaggugcccuacaucugcacggagggggaggaccagaucaccgucuggggcuuccacagcgacaacgagauccagauggugaagcuguacggggacuccaagccgcagaaguucaccagcuccgccaacggcgugaccacgcacuacgucagccagaucggcggguuccccaaccagaucgaggacggcgggcucccccaguccggccggaucgugguggacuacaugguccagaaguccgggaagaccggcaccaucaccuaccagcgcggcauccugcugccccagaagguguggugcgccuccgggcggagcaagaucaucaagggcagccucccgcugaucggggaggccgacugccugcacgagaaguacggcgggcucaacaaguccaagcccuacuacacgggcgagcacgccaaggcgaucggcaacugccccaucugggugaagacgccccugaagcuggccaacgggaccaaguaccgcccgcccgccaagcuccugaaggagcggggcuucuucggggccaucgccggcuuccuggagggcgggugggagggcaugaucgcgggguggcacggcuacaccagccacggggcccacggcgucgccguggccgccgaccucaaguccacccaggaggcgaucaacaagaucaccaagaaccugaacagccuguccgagcucgaggucaagaaccugcagcgccugagcggcgccauggacgagcuccacaacgagauccuggagcuggacgagaagguggacgaccuccgggccgacaccaucuccagccagaucgagcuggccgugcugcucuccaacgaggggaucaucaacagcgaggacgagcaccuccuggcccuggagcgcaagcugaagaagaugcugggccccuccgcggucgagaucgggaacggcugcuucgagaccaagcacaagugcaaccagacgugccucgaccggaucgccgccgggaccuucaacgccggcgaguucagccugcccaccuucgacucccugaacaucaccgcggccagccucaacgacgacggccuggacaaccacaccauccugcuguacuacuccacggccgccagcucccucgccgugacccugaugaucgcgaucuucguggucuacauggugagccgcgacaacguguccugcagcaucugccuguga

SEQ ID NO: 90480 - RNA, 1755 nt, Artificial Sequence
  derived and/or modified CDS sequence (opt1) from hemagglutinin__InfluenzaB__ABL77101
augaaggccaucaucgugcugcucauggucgugaccagcaaggccgaccgcaucugcaccggcaucacguccagcaacagcccccacguggucaagaccgcgacccagggggaggugaacgugaccggcgccaucccgcugacgaccacccccaccaagucccacuucgccaaccugaaggggacgaagacccggggcaagcucugcccgaccugccugaacugcaccgaccuggacgucgcccucgggcgccccaugugcgugggcaucacgcccuccgccaaggcgagcauccugcacgaggugaagcccgucaccuccggcugcuuccccaucaugcacgaccggaccaagauccgccagcugcccaaccuccugcggggguacgagaagauccgccugagcacccagaacgugaucaacgccgagaaggccccgggcgggcccuaccggcucggcacguccgggagcugccccaacgccaccuccaagagcggcuucuucgcgaccauggccugggccgugccccgcgacaacaacaagaccgccacgaacccgcugaccgucgaggugccccacaucugcaccaaggaggaggaccagaucaccguguggggcuuccacuccgacgacaagacgcagaugaagaaccuguacggggacagcaacccccagaaguucaccuccagcgccaacggcaucaccacccacuacgucucccagaucgggggcuuccccgagcagacggaggacggcgggcucccgcagagcggccggaucgugguggacuacaugguccagaagcccgggaagaccggcaccaucguguaccagcgcgggauccugcugccccagaagguguggugcgcguccggccggagcaaggucaucaagggcagccucccccugaucggggaggccgacugccugcacgagaaguacggcgggcucaacaaguccaagccguacuacaccggcgagcacgccaaggccaucgggaacugccccaucugggugaagacgccccugaagcuggccaacggcaccaaguaccggcccccggcgaagcuccugaaggagcgcggcuucuucggggccaucgccggcuuccuggagggcgggugggaggggaugaucgccggcuggcacggcuacaccagccacggggcccacggcguggcggucgccgccgaccucaaguccacccaggaggccaucaacaagaucacgaagaaccugaacagccuguccgagcucgaggugaagaaccugcagcgccugagcggggccauggacgagcuccacaacgagauccuggagcuggacgagaaggucgacgaccuccgggcggacaccaucuccagccagaucgagcuggccgugcugcucuccaacgagggcaucaucaacagcgaggacgagcaccuccuggcccuggagcgcaagcugaagaagaugcugggccccuccgccguggacaucgggaacggcugcuucgagaccaagcacaagugcaaccagaccugccucgaccggaucgcggccgggaccuucaacgccggcgaguucagccugcccacguucgacucccugaacaucaccgccgccagccucaacgacgacgggcuggacaaccacaccauccugcuguacuacuccaccgcggccagcucccucgccgucacgcugaugaucgccaucuucaucguguacaugaucagccgcgacaacguguccugcagcaucugccuguga

SEQ ID NO: 90481 - RNA, 1758 nt, Artificial Sequence
  derived and/or modified CDS sequence (opt1) from hemagglutinin__InfluenzaB__ABL77134
augaaggccaucaucgugcugcucauggucgugaccagcaacgccgaccgcaucugcaccggcaucacguccagcaacagcccccacguggucaagaccgcgacccagggggaggugaacgugaccggcgucaucccgcugacgaccacccccaccaagagccacuucgccaaccugaaggggacgaagacccggggcaagcucugccccaagugccugaacugcaccgaccuggacguggcccucgggcgccccaagugcaccggcaacaucccguccgccaaggugagcauccugcacgagguccggcccgugacguccggcugcuuccccaucaugcacgaccgcaccaagauccggcagcugcccaaccuccugcgcggguacgagcggauccgccugagcaaccacaacgugaucaacgccgagaaggcgccgggcgggcccuacaagaucggcaccuccgggagcugccccaacgucaccaacggcaacggcuucuucgccacgauggccugggccgugcccaagaacgagaacaacaagaccgcgaccaacucccucaccaucgaggugccguacaucugcacggagggggaggaccagaucaccgucuggggcuuccacagcgacaacgaggcccagauggccaagcuguacggggacuccaagccccagaaguucaccagcuccgccaacggcgugaccacgcacuacgugagccagaucggcggguuccccaaccagaccgaggacggcgggcugccccaguccggccggaucgucguggacuacauggugcagaaguccgggaagaccggcaccaucacguaccagcgcggcauccuccugccgcagaaggucuggugcgccuccgggcggagcaaggugaucaagggcagccugccccucaucggggaggcggacugccugcacgagaaguacggcgggcugaacaaguccaagcccuacuacaccggcgagcacgccaaggccaucggcaacugccccaucugggugaagaccccgcucaagcuggccaacgggaccaaguaccgcccgcccgccaagcugcucaaggagcggggcuucuucggggcgaucgccggcuuccuggagggcgggugggagggcaugaucgccggguggcacggcuacacgagccacggggcccacggcgucgccguggcggccgaccugaaguccacccaggaggccaucaacaagaucaccaagaaccucaacagccuguccgagcuggaggucaagaaccuccagcgccugagcggcgccauggacgagcugcacaacgagauccucgagcuggacgagaagguggacgaccugcgggccgacaccaucuccagccagaucgagcucgcggugcugcuguccaacgaggggaucaucaacagcgaggacgagcaccuccuggcccuggagcgcaagcucaagaagaugcugggccccuccgccgucgagaucgggaacggcugcuucgagacgaagcacaagugcaaccagaccugccuggaccggaucgccgcggggaccuucaacgccggcgaguucagccuccccaccuucgacucccugaacaucaccgccgccagccugaacgacgacggccucgacaaccacacgauccugcuguacuacgccaccgcggccuccagccuggccgugacccucaugaucgccaucuucguggucuacauggugucccgcgacaacgugagcugcuccaucugccuguga

SEQ ID NO: 90482 - RNA, 1758 nt, Artificial Sequence
  derived and/or modified CDS sequence (opt1) from hemagglutinin__InfluenzaB__ABL77145
augaaggccaucaucgugcugcucauggucgugaccagcaacgccgaccgcaucugcaccggcaucacguccagcaacagcccccacguggucaagaccgcgacccagggggaggugaacgugaccggcgucaucccgcugacgaccacccccaccaagagccacuucgccaaccugaaggggacgaagacccggggcaagcucugccccaagugccugaacugcaccgaccuggacguggcccucgggcgccccaagugcaccggcaacaucccguccgccaaggugagcauccugcacgagguccggcccgugacguccggcugcuuccccaucaugcacgaccgcaccaagauccggcagcugcccaaccuccugcgcggguacgagcggauccgccugagcaaccacaacgugaucaacgccgaggaggcgccgggcgggcccuacaagaucggcaccuccgggagcugccccaacgucaccaacggcaacggcuucuucgccacgauggccugggccgugcccaagaacgagaacaacaagaccgcgaccaacucccucaccaucgaggugccguacaucugcacggagggggaggaccagaucaccgucuggggcuuccacagcgacuccgagacccagauggccaagcuguacggggacagcaagccccagaaguucaccuccagcgccaacggcgugacgacccacuacgugucccagaucggcggguuccccaaccagaccgaggacggcgggcugccccagagcggccggaucgucguggacuacauggugcagaaguccgggaagaccggcacgaucaccuaccagcgcggcauccuccugccgcagaaggucuggugcgccagcgggcggagcaaggugaucaagggcucccugccccucaucggggaggccgacugccugcacgagaaguacggcgggcugaacaagagcaagcccuacuacaccggcgagcacgcgaaggccaucggcaacugccccaucugggugaagaccccgcucaagcuggccaacgggacgaaguaccgcccgcccgccaagcugcucaaggagcggggcuucuucggggccaucgcgggcuuccuggagggcgggugggagggcaugaucgccggguggcacggcuacaccucccacggggcccacggcgucgccguggccgcggaccugaaguccacccaggaggccaucaacaagaucaccaagaaccucaacucccugagcgagcuggaggucaagaaccuccagcgccuguccggcgccauggacgagcugcacaacgagauccucgagcuggacgagaagguggacgaccugcgggccgacacgaucagcucccagaucgagcucgccgugcugcugagcaacgaggggaucaucaacuccgaggacgagcaccuccuggcgcuggagcgcaagcucaagaagaugcugggccccagcgccgucgagaucgggaacggcugcuucgagaccaagcacaagugcaaccagaccugccuggaccggaucgccgccgggaccuucaacgcgggcgaguucucccuccccaccuucgacagccugaacaucacggccgccucccugaacgacgacggccucgacaaccacaccauccugcuguacuacagcaccgccgccuccagccuggcggugacccucaugaucgccaucuucguggucuacauggugucccgcgacaacgugagcugcagcaucugccuguga

SEQ ID NO: 90483 - RNA, 1755 nt, Artificial Sequence
  derived and/or modified CDS sequence (opt1) from hemagglutinin__InfluenzaB__ABL77156
augaaggccaucaucgugcugcucauggucgugaccagcaacgccgaccgcaucugcaccggcaucacguccagcaacagcccccacguggucaagaccgcgacccagggggaggugaacgugaccggcgucaucccgcugacgaccacccccaccaaguccuacuucgccaaccugaaggggacgcggacccgcggcaagcucugccccgacugccugaacugcaccgaccuggacguggcccucgggcggcccaugugcgugggcaccacgccguccgccaaggccagcauccugcacgagguccgccccgugaccuccggcugcuuccccaucaugcacgaccggaccaagauccgccagcugcccaaccuccugcggggguacgagaacauccgccugagcacccagaacgugaucgacgcggagaaggccccgggcgggcccuaccggcucggcacguccgggagcugccccaacgccaccuccaagagcggcuucuucgccaccauggcgugggccguccccaaggacaacaacaagaacgccaccaacccgcugacgguggaggugcccuacgucugcaccgagggcgaggaccagaucaccguguggggguuccacuccgacgacaagacccagaugaagaaccuguacggcgacagcaacccccagaaguucacguccagcgccaacggggugaccacccacuacgucucccagaucggcggcuuccccgaccagaccgaggacgggggccucccgcagagcgggcgcaucgugguggacuacaugguccagaagcccggcaagacggggaccaucguguaccagcggggcgugcugcugccccagaaggucuggugcgccuccggccgcagcaaggugaucaaggggagccucccccugaucggcgaggcggacugccugcacgagaaguacgggggccucaacaaguccaagccguacuacaccggggagcacgccaaggccaucggcaacugccccaucugggucaagacgccccugaagcuggccaacggcaccaaguaccggcccccggccaagcuccugaaggagcgcggguucuucggcgcgaucgccggguuccuggagggcgggugggagggcaugaucgccggcuggcacggguacaccagccacggcgcccacgggguggccguggcggccgaccucaaguccacccaggaggccaucaacaagaucaccaagaaccugaacagccuguccgagcucgaggucaagaaccugcagcggcugagcggcgccauggacgagcuccacaacgagauccuggagcuggacgagaagguggacgaccuccgcgccgacacgaucuccagccagaucgagcuggcggugcugcucuccaacgagggcaucaucaacagcgaggacgagcaccuccuggcccuggagcggaagcugaagaagaugcuggggcccuccgccgucgacaucggcaacgggugcuucgagaccaagcacaagugcaaccagaccugccucgaccgcaucgccgcgggcaccuucaacgccggggaguucagccugcccaccuucgacucccugaacaucacggccgccagccucaacgacgacggccuggacaaccacaccauccugcuguacuacuccaccgccgcgagcucccucgccgugacccugaugcuggccaucuucaucguguacauggucagccgggacaacguguccugcagcaucugccucuga

SEQ ID NO: 90484 - RNA, 1758 nt, Artificial Sequence
  derived and/or modified CDS sequence (opt1) from hemagglutinin__InfluenzaB__ABL77178
augaaggccaucaucgugcugcucauggucgugaccagcaacgccgaccgcaucugcaccggcaucacguccagcaacagcccccacguggucaagaccgcgacccagggggaggugaacgugaccggcgucaucccgcugacgaccacccccaccaagagccacuucgccaaccugaaggggacgaagacccggggcaagcucugccccaagugccugaacugcaccgaccuggacguggcccucgggcgccccaagugcaccggcaacaucccguccgccaaggugagcauccugcacgagguccggcccgugacguccggcugcuuccccaucaugcacgaccgcaccaagauccggcagcugcccaaccuccugcgcggguacgagcggauccgccugagcaaccacaacgugaucaacgccgagaaggcgccgggcgggcccuacaagaucggcaccuccgggagcugccccaacgucaccaacggcaacggcuucuucgccacgauggccugggccgugcccaagaacgagaacaacaagaccgcgaccaacucccucaccaucgaggugccguacaucugcacggagggggaggaccagaucaccgucuggggcuuccacagcgacuccgagacccagauggccaagcuguacggggacagcaagccccagaaguucaccuccagcgccaacggcgugacgacccacuacgugucccagaucggcggguuccccaaccagaccgaggacggcgggcugccccagagcggccggaucgucguggacuacauggugcagaaguccgggaagaccggcacgaucaccuaccagcgcggcauccuccugccgcagaaggucuggugcgccagcgggcggagcaaggugaucaagggcucccugccccucaucggggaggccgacugccugcacgagaaguacggcgggcugaacaagagcaagcccuacuacaccggcgagcacgcgaaggccaucggcaacugccccaucugggugaagaccccgcucaagcuggccaacgggacgaaguaccgcccgcccgccaagcugcucaaggagcggggcuucuucggggccaucgcgggcuuccuggagggcgggugggagggcaugaucgccggguggcacggcuacaccucccacggggcccacggcgucgccguggccgcggaccugaaguccacccaggaggccaucaacaagaucaccaagaaccucaacucccugagcgagcuggaggucaagaaccuccagcgccuguccggcgccauggacgagcugcacaacgagauccucgagcuggacgagaagguggacgaccugcgggccgacacgaucagcucccagaucgagcucgccgugcugcugagcaacgaggggaucaucaacuccgaggacgagcaccuccuggcgcuggagcgcaagcucaagaagaugcugggccccagcgccgucgagaucgggaacggcugcuucgagaccaagcacaagugcaaccagaccugccuggaccggaucgccgccgggaccuucaacgcgggcgaguucucccuccccaccuucgacagccugaacaucacggccgccucccugaacgacgacggccucgacaaccacaccauccugcuguacuacagcaccgccgccuccagccuggcggugacccucaugaucgccaucuucguggucuacauggugucccgcgacaacgugagcugcagcaucugccuguga

SEQ ID NO: 90485 - RNA, 1755 nt, Artificial Sequence
  derived and/or modified CDS sequence (opt1) from hemagglutinin__InfluenzaB__ABL77189
augaaggccaucaucgugcugcucauggucgugaccagcaacgccgaccgcaucugcaccggcaucacguccagcaacagcccccacguggucaagaccgcgacccagggggaggugaacgugaccggcgucaucccgcugacgaccacccccaccaaguccuacuucgccaaccugaaggggacgcggacccgcggcaagcucugccccgacugccugaacugcaccgaccuggacguggcccucgggauccccaugugcgugggcaccacgccguccgccaaggccagcauccugcacgagguccggcccgugaccuccggcugcuuccccaucaugcacgaccgcaccaagauccggcagcugcccaaccuccugcgcggguacgagaacauccggcugagcacccagaacgugaucgacgcggagaaggccccgggcgggcccuaccgccucggcacguccgggagcugccccaacgccaccuccaagagcggcuucuucgccaccauggcgugggccguccccaaggacaacaacaagaacgccaccaacccgcugacgguggaggugcccuacgucugcaccgagggcgaggaccagaucaccguguggggguuccacuccgacaacaagauccagaugaagaaccuguacggcgacagcaacccccagaaguucaccuccagcgccaacggggugacgacccacuacgucucccagaucggcggcuuccccgaccagaccgaggacgggggccucccgcagagcgggcggaucgugguggacuacaugguccagaagcccggcaagaccgggacgaucguguaccagcgcggcgugcugcugccccagaaggucuggugcgccuccggccggagcaaggugaucaaggggagccucccccugaucggcgaggcggacugccugcacgagaaguacgggggccucaacaaguccaagccguacuacaccggggagcacgccaaggccaucggcaacugccccaucugggucaagacgccccugaagcuggccaacggcaccaaguaccggcccccggccaagcuccugaaggagcgcggguucuucggcgcgaucgccggguuccuggagggcgggugggagggcaugaucgccggcuggcacggguacaccagccacggcgcccacgggguggccguggcggccgaccucaaguccacccaggaggccaucaacaagaucaccaagaaccugaacagccuguccgagcucgaggucaagaaccugcagcgccugagcggcgccauggacgagcuccacaacgagauccuggagcuggacgagaagguggacgaccuccgggccgacaccaucuccagccagaucgagcuggcggugcugcucuccaacgagggcaucaucaacagcgaggacgagcaccuccuggcccuggagcgcaagcugaagaagaugcuggggcccuccgccgucgacaucggcaacgggugcuucgagacgaagcacaagugcaaccagaccugccucgaccggaucgccgcgggcaccuucaacgccggggaguucagccugcccaccuucgacucccugaacaucaccgccgccagccucaacgacgacggccuggacaaccacacgauccugcuguacuacuccaccgccgcgagcucccucgccgugacccugaugcuggccaucuucaucguguacauggucagccgcgacaacguguccugcagcaucugccucuga

SEQ ID NO: 90486 - RNA, 1758 nt, Artificial Sequence
  derived and/or modified CDS sequence (opt1) from hemagglutinin__InfluenzaB__ABL77200
augaaggccaucaucgugcugcucauggucgugaccagcaacgccgaccgcaucugcaccggcaucacguccagcaacagcccccacguggucaagaccgcgacccagggggaggugaacgugaccggcgucaucccgcugacgaccacccccaccaagagccacuucgccaaccugaaggggacgaagacccggggcaagcucugccccaagugccugaacugcaccgaccuggacguggcccucgggcgccccaagugcaugggcaacaucccguccgccaaggugagcauccugcacgagguccggcccgugaccuccggcugcuuccccaucaugcacgaccgcacgaagauccggcagcugcccaaccuccugcgcggguacgagcacauccggcugagcacccacaacgugaucaacgccgagaaggcgccgggcgggcccuacaagaucggcaccuccgggagcugccccaacgucaccaacggcaacggcuucuucgccacgauggccugggccgugcccaagaacgacaacaacaagaccgcgaccaacucccucaccaucgaggugccguacaucugcacggagggggaggaccagaucaccgucuggggcuuccacagcgacaacgagacccagauggccaagcuguacggggacuccaagccccagaaguucaccagcuccgccaacggcgugacgacccacuacgugagccagaucggcggguuccccaaccagaccgaggacggcgggcugccccaguccggccgcaucgucguggacuacauggugcagaaguccgggaaggccggcaccaucacguaccagcggggcauccuccugccgcagaaggucuggugcgccuccgggcgcagcaaggugaucaagggcagccugccccucaucggggaggcggacugccugcacgagaaguacggcgggcugaacaaguccaagcccuacuacaccggcgagcacgccaaggccaucggcaacugccccaucugggugaagaccccgcucaagcuggccaacgggaccaaguaccggccgcccgccaagcugcucaaggagcgcggcuucuucggggcgaucgccggcuuccuggagggcgggugggagggcaugaucgccggguggcacggcuacacgagccacggggcccacggcgucgccguggcggccgaccugaaguccacccaggaggccaucaacaagaucaccaagaaccucaacagccuguccgagcuggaggucaagaaccuccagcggcugagcggcgccauggacgagcugcacaacgagauccucgagcuggacgggaagguggacgaccugcgcgccgacaccaucuccagccagaucgagcucgcggugcugcuguccaacgagggcaucaucaacagcgaggacgagcaccuccuggcccuggagcggaagcucaagaagaugcuggggcccuccgccgucgagaucggcaacgggugcuucgagacgaagcacaagugcaaccagaccugccuggaccgcaucgccgcgggcaccuucgacgccggcgaguucagccuccccaccuucgacucccugaacaucaccgccgccagccugaacgacgacgggcucgacaaccacacgauccugcuguacuacuccaccgccgcgagcucccuggccgugacccucaugaucgccaucuucguggucuacauggugagccgggacaacguguccugcagcaucugccuguga

SEQ ID NO: 90487 - RNA, 1755 nt, Artificial Sequence
  derived and/or modified CDS sequence (opt1) from hemagglutinin__InfluenzaB__ABL77222
augaaggccaucaucgugcugcucauggucgugaccagcaacgccgaccgcaucugcaccggcaucacguccagcaacagcccccacguggucaagaccgcgacccagggggaggugaacgugaccggcgucaucccgcugacgaccacccccaccaaguccuacuucgccaaccugaaggggacgcggacccgcggcaagcucugccccgacugccugaacugcaccgaccuggacguggcccucgggcggcccaugugcgugggcaccacgccguccgccaaggccagcauccugcacgagguccgccccgugaccuccggcugcuuccccaucaugcacgaccggaccaagauccgccagcuggcgaaccuccugcggggguacgagaacauccgccugagcacccagaacgugaucgacgccgagaaggcccccggcgggccguaccggcucggcacguccgggagcugccccaacgccaccuccaagagcggcuucuucgcgaccauggccugggccguccccaaggacaacaacaagaacgccaccaacccccugacgguggaggugccguacaucugcaccgagggcgaggaccagaucaccgucuggggguuccacuccgacagcaagacccagaugaagaaccuguacggcgacuccaacccccagaaguucacgagcuccgccaacggggugaccacccacuacgugagccagaucggcggcuuccccgaccagaccgaggacgggggccucccccaguccgggcgcaucgucguggacuacaugaugcagaagccgggcaagacggggaccaucguguaccagcggggcguccugcugccccagaagguguggugcgcgagcggccgcagcaaggugaucaaggggucccucccccugaucggcgaggccgacugccugcacgagaaguacgggggccucaacaagagcaagcccuacuacaccggggagcacgccaaggccaucggcaacugcccgaucugggucaagacgccccugaagcuggccaacggcaccaaguaccggccgcccgcgaagcuccugaaggagcgcggguucuucggcgccaucgccggguuccuggagggcgggugggagggcaugaucgccggcuggcacggguacaccucccacggcgcccacgggguggcggucgccgccgaccucaagagcacccaggaggccaucaacaagaucaccaagaaccugaacucccugagcgagcucgaggugaagaaccugcagcggcuguccggcgccauggacgagcuccacaacgagauccuggagcuggacgagaagguggacgaccuccgcgcggacacgaucagcucccagaucgagcuggccguccugcucagcaacgagggcaucaucaacuccgaggacgagcaccuccuggcccuggagcggaagcugaagaagaugcuggggcccagcgccguggacaucggcaacgggugcuucgagaccaagcacaagugcaaccagaccugccucgaccgcaucgcggccggcaccuucaacgccggggaguucucccugcccaccuucgacagccugaacaucacggccgccucccucaacgacgacggccuggacaaccacaccauccugcuguacuacagcaccgcggccuccagccucgccgugacccugaugcuggccaucuucaucgucuacauggugucccgggacaacgugagcugcagcaucugccucuga

SEQ ID NO: 90488 - RNA, 1758 nt, Artificial Sequence
  derived and/or modified CDS sequence (opt1) from hemagglutinin__InfluenzaB__ABL77233
augaaggccaucaucgugcugcucauggucgugaccagcaacgccgaccgcaucugcaccggcaucacguccagcaacagcccccacguggucaagaccgcgacccagggggaggugaacgugaccggcgucaucccgcugacgaccacccccaccaagagccacuucgccaaccugaaggggacgaagacccggggcaagcucugccccaagugccugaacugcaccgaccuggacguggcccucgggcgccccaagugcaccggcaacaucccguccgccgaggugagcauccugcacgagguccggcccgugacguccggcugcuuccccaucaugcacgaccgcaccaagauccggcagcugcccaaccuccugcgcggguacgagcacauccggcugagcacccacaacgugaucaacgccgagaaggcgccgggcgggcccuacaagaucggcaccuccgggagcugccccaacgucacgaacggcaacggcuucuucgccaccauggccugggccgugcccaagaacgacaacaacaagaccgcgaccaacucccucacgaucgaggugccguacaucugcaccgagggggaggaccagaucaccaucuggggcuuccacagcgacaacgaggcccagauggccaagcuguacggggacuccaagccccagaaguucaccagcuccgccaacggcgucacgacccacuacgugagccagaucggcggguuccccaaccagaccgaggacggcgggcugccccaguccggccgcaucguggucgacuacauggugcagaagucccggaagaccgggacgaucaccuaccagcgcggcauccuccugccgcagaagguguggugcgccuccggccggagcaaggucaucaaggggagccugccccucaucggcgaggcggacugccugcacgagaaguacgggggccugaacaaguccaagcccuacuacaccggggagcacgccaaggccaucggcaacugccccaucugggugaagaccccgcucaagcuggccaacggcacgaaguaccgcccgcccgccaagcugcucaaggagcggggguucuucggcgcgaucgccggguuccuggagggcgggugggagggcaugaucgccggcuggcacggguacaccagccacggcgcccacgggguggccgucgcggccgaccugaaguccacccaggaggccaucaacaagaucaccaagaaccucaacagccuguccgagcuggaggugaagaaccuccagcgccugagcggcgccauggacgagcugcacaacgagauccucgagcuggacgagaaggucgacgaccugcgggccgacacgaucuccagccagaucgagcucgcggugcugcuguccaacgagggcaucaucaacagcgaggacgagcaccuccuggcccuggagcgcaagcucaagaagaugcuggggcccuccgccguggagaucggcaacgggugcuucgagaccaagcacaagugcaaccagaccugccuggaccggaucgccgcgggcaccuucgacgccggggaguucagccuccccaccuucgacucccugaacaucacggccgccagccugaacgacgacggccucgacaaccacaccauccugcuguacuacuccaccgccgcgagcucccuggccgucacccucaugaucgccaucuucgugguguacauggucagccgcgacaacguguccugcagcaucugccuguga

SEQ ID NO: 90489 - RNA, 1758 nt, Artificial Sequence
  derived and/or modified CDS sequence (opt1) from hemagglutinin__InfluenzaB__ABL77244
augaaggccaucaucgugcugcucauggucgugaccagcaacgccgaccgcaucugcaccggcaucacguccagcaacagcccccacguggucaagaccgcgacccagggggaggugaacgugaccggcgucaucccgcugacgaccacccccaccaagagccacuucgccaaccugaaggggacgaagacccggggcaagcucugccccaagugccugaacugcaccgaccuggacguggcccucgggcgccccaagugcaccggcacgaucccguccgccaaggccagcauccugcacgaggugaagcccgucaccuccggcugcuuccccaucaugcacgaccggaccaagauccgccagcugcccaaccuccugcggggguacgagcacauccgccugagcacccacaacgugaucaacgcggagacggccccgggcgggcccuacaaggugggcaccuccgggagcugccccaacgucaccaacggcaacggcuucuucgccaccauggccugggcggugcccaagaacgacaacaacaagacggccaccaacccgcucaccguggagguccccuacaucugcaccgagggggaggaccagaucacgguguggggcuuccacuccgacaacgaggcccagauggugaagcuguacggggacagcaagccccagaaguucaccuccagcgccaacggcgucaccacccacuacgugucccagaucggcggguuccccaaccaggccgaggacggcgggcugccgcagagcggccggaucguggucgacuacauggugcagaaguccgggaagacgggcaccaucaccuaccagcgcggcauccuccugccccagaagguguggugcgcgagcgggcgguccaaggucaucaagggcagccugccccucaucggggaggccgacugccugcacgagaaguacggcgggcugaacaagagcaagcccuacuacaccggcgagcacgccaaggccaucggcaacugcccgaucugggugaagacgccccucaagcuggccaacgggaccaaguaccgcccgcccgcgaagcugcucaaggagaagggcuucuucggggccaucgccggcuuccuggagggcgggugggagggcaugaucgccggguggcacggcuacaccucccacggggcccacggcgucgcgguggccgccgaccugaaguccacccaggaggccaucaacaagaucacgaagaaccucaacucccugagcgagcuggaggugaagaaccuccagcggcuguccggcgccauggacgagcugcacaacaagauccucgagcuggacgagaaggucgacgaccugcgcgcggacaccaucagcucccagaucgagcucgccgugcugcugagcaacgaggggaucaucaacuccgaggacgagcaccuccuggcccuggagcggaagcucaagaagaugcugggccccagcgccguggagaucgggaacggcugcuucgagaccaagcacaagugcaaccagaccugccuggaccgcaucgcggccgggaccuucaacgccggcgaguucucccuccccacguucgacagccugaacaucaccgccgccucccugaacgacgacggccucgacaaccacaccauccugcuguacuacagcaccgcggccuccagccuggccgucacgcucaugaucgccaucuucaucguguacauggugucccgggacaacgucagcugcuccaucugccuguga

SEQ ID NO: 90490 - RNA, 1752 nt, Artificial Sequence
  derived and/or modified CDS sequence (opt1) from hemagglutinin__InfluenzaB__ABL77255
augaaggccaucaucgugcugcucauggucgugaccagcaacgccgaccgcaucugcaccggcaucacguccagcaacagcccccacguggucaagaccgcgacccagggggaggugaacgugaccggcgucaucccgcugacgaccacccccaccaagucccacuucgccaaccugaaggggacgaagacccggggcaagcucugccccaacugccugaacugcaccgaccuggacguggcccucgggcgccccaugugcaugggcaccaucccguccgccaaggccagcauccugcacgaggugcggcccgucacguccggcugcuuccccaucaugcacgaccgcaccaagauccggcagcugcccaaccuccugcgcggguacgagaacauccggcugagcacccacaacgugaucaacgcggagcgcgccccgggcgggcccuaccggcucggcaccuccgggagcugccccaacgugacgucccgcaacggcuucuucgccaccauggccugggcggucccccgggacaacaagaccgccaccaacccgcugacgguggaggugcccuacaucugcaccaagggcgaggaccagaucaccgucuggggguuccacagcgacgacaagacccagaugaagaaccuguacggcgacuccaacccccagaaguucacgagcuccgccaacggggugaccacccacuacgugagccagaucggcgacuuccccaaccagaccgaggacggcgggcucccgcaguccggccgcaucgucguggacuacauggugcagaagcccgggaagacgggcaccaucgucuaccagcgcggggugcugcugccccagaagguguggugcgccagcggccgguccaaggucaucaagggcagccucccccugaucggggaggccgacugccugcacgagaaguacggcgggcucaacaagagcaagccguacuacaccggcgagcacgcgaaggccaucgggaacugccccaucugggugaagacgccccugaagcuggccaacggcaccaaguaccggcccccggccaagcuccugaaggagcgcggcuucuucggggccaucgcgggcuuccuggagggcgggugggaggggaugaucgccggcuggcacggcuacaccucccacggggcccacggcgucgccguggccgcggaccucaagagcacccaggaggccaucaacaagaucaccaagaaccugaacucccugagcgagcucgaggugaagaaccugcagcggcuguccggggccauggacgagcuccacaacgagauccuggagcuggacgagaaggucgacgaccuccgcgccgacacgaucagcucccagaucgagcuggccgugcugcucagcaacgagggcaucaucaacuccgaggacgagcaccuccuggcgcuggagcggaagcugaagaagaugcugggccccagcgccguggacaucgggaacggcugcuucgagaccaagcacaagugcaaccagaccugccucgaccgcaucgccgccgggaccuucaacgcgggcgaguucucccugcccaccuucgacagccugaacaucacggccgccucccucaacgacgacgggcuggacaaccacaccauccugcuguacuacagcaccgccgccuccagccucgcggucacccugaugaucgccaucuucaucguguacauggugucccgggacaacgucagcugcuccaucugccuguga

SEQ ID NO: 90491 - RNA, 1752 nt, Artificial Sequence
  derived and/or modified CDS sequence (opt1) from hemagglutinin__InfluenzaB__ABL77266
augaaggccaucaucgugcugcucauggucgugaccagcaacgccgaccgcaucugcaccggcaucacguccagcaacagcccccacguggucaagaccgcgacccagggggaggugaacgugaccggcgucaucccgcugacgaccacccccaccaagucccacuucgccaaccugaaggggacgaagacccggggcaagcucugccccaacugccugaacugcaccgaccuggacguggcccucgggcgccccaugugcgugggcaccacgccguccgccaaggccagcauccugcacgagguccggcccgugaccuccggcugcuuccccaucaugcacgaccgcaccaagauccggcagcugcccaaccuccugcgcggguacgagaacauccggcugagcacccagaacgugaucaacgcggagcgcgccccgggcgggcccuaccggcucggcacguccgggagcugccccaacgucaccucccgcgacggcuucuucgccaccauggccugggcggugccccgggacaacaagaccgccacgaacccgcugaccguggagguccccuacaucugcaccaagggcgaggaccagaucaccguguggggguuccacagcgacuccaagacgcagaugaagaaccuguacggcgacagcaacccccagaaguucaccuccagcgccaacggggugaccacccacuacgucucccagaucggcggcuuccccaaccagacggaggacgggggccucccgcagagcgggcgcaucgugguggacuacaugguccagaagcccggcaagaccgggaccaucguguaccagcggggcgugcugcugccccagaaggucuggugcgccuccggccgcagcaaggugaucaaggggagccucccccugaucggcgaggccgacugccugcacgagaaguacgggggccucaacaaguccaagccguacuacaccggggagcacgcgaaggccaucggcaacugccccaucugggucaagacgccccugaagcuggccaacggcaccaaguaccggcccccggccaagcuccugaaggagcgcggguucuucggcgccaucgcgggguuccuggagggcgggugggagggcaugaucgccggcuggcacggguacaccagccacggcgcccacgggguggccguggccgcggaccucaaguccacccaggaggccaucaacaagaucacgaagaaccugaacagccuguccgagcucgaggucaagaaccugcagcggcugagcggcgccauggacgagcuccacaacgagauccuggagcuggacgagaagguggacgaccuccgcgccgacaccaucuccagccagaucgagcuggccgugcugcucuccaacgagggcaucaucaacagcgaggacgagcaccuccuggcgcuggagcggaagcugaagaagaugcuggggcccuccgccgucgacaucggcaacgggugcuucgagaccaagcacaagugcaaccagaccugccucgaccgcaucgccgccggcaccuucaacgcgggggaguucagccugcccacguucgacucccugaacaucaccgccgccagccucaacgacgacggccuggacaaccacaccauccugcuguacuacuccaccgccgccagcucccucgcggugacgcugaugaucgccaucuucaucguguacauggucagccgggacaacguguccugcagcaucugccuguga

SEQ ID NO: 90492 - RNA, 1752 nt, Artificial Sequence
  derived and/or modified CDS sequence (opt1) from hemagglutinin__InfluenzaB__ABL77277
augaaggccaucaucgugcugcucauggucgugaccagcaacgccgaccgcaucugcaccggcaucacguccagcaacagcccccacguggucaagaccgcgacccagggggaggugaacgugaccggcgucaucccgcugacgaccacccccaccaagucccacuucgccaaccugaaggggacgaagacccggggcaagcucugccccaacugccugaacugcaccgaccuggacguggcccucgggcgccccaugugcgugggcaacaccccguccgccaaggccagcauccugcacgagguccggcccgugacguccggcugcuuccccaucaugcacgaccgcaccaagauccggcagcugcccaaccuccugcgcggguacgagaacauccggcugagcacccagaacgugaucaacgcggagcgcgccccgggcgggcccuaccggcucggcaccuccgggagcugccccaacgucacgaaccgcgacggcuucuucgccaccauggccugggcggugccccgggacaacaagaccgccaccaacccgcugacgguggagguccccuacaucugcaccaagggcgaggaccagaucaccguguggggguuccacuccgacaacaagauccagaugaagaaccuguacggcgacagcaacccccagaaguucaccuccagcgccaacggggugacgacccacuacgucucccagaucggcggcuuccccaaccagaccgaggacgggggccucccgcagagcgggcgcaucgugguggacuacaugguccagaagcccggcaagaccgggacgaucguguaccagcggggcgugcugcugccccagaaggucuggugcgccuccggccgcagcaaggugaucaaggggucccucccccugaucggcgaggccgacugccugcacgagaaguacgggggccucaacaagagcaagccguacuacaccggggagcacgcgaaggccaucggcaacugccccaucugggucaagacgccccugaagcuggccaacggcaccaaguaccggcccccggccaagcuccugaaggagcgcggguucuucggcgccaucgcgggguuccuggagggcgggugggagggcaugaucgccggcuggcacggguacaccagccacggcgcccacgggguggccguggccgcggaccucaaguccacccaggaggccaucaacaagaucaccaagaaccugaacagccuguccgagcucgaggucaagaaccugcagcggcugagcggcgccauggacgagcuccacaacgagauccuggagcuggacgagaagguggacgaccuccgcgccgacaccaucuccagccagaucgagcuggccgugcugcucuccaacgagggcaucaucaacagcgaggacgagcaccuccuggcgcuggagcggaagcugaagaagaugcuggggcccuccgccgucgacaucggcaacgggugcuucgagacgaagcacaagugcaaccagaccugccucgaccgcaucgccgccggcaccuucaacgcgggggaguucagccugcccaccuucgacucccugaacaucaccgccgccagccucaacgacgacggccuggacaaccacacgauccugcuguacuacuccaccgccgccagcucccucgcggugacccugaugaucgccaucuucaucguguacauggucagccgggacaacguguccugcagcaucugccuguga

SEQ ID NO: 90493 - RNA, 1752 nt, Artificial Sequence
  derived and/or modified CDS sequence (opt1) from hemagglutinin__InfluenzaB__ABL77288
augaaggccaucaucgugcugcucauggucgugaccagcaacgccgaccgcaucugcaccggcaucacguccagcaacagcccccacguggucaagaccgcgacccagggggaggugaacgugaccggcgucaucccgcugacgaccacccccaccaagucccacuucgccaaccugaaggggacgaagacccggggcaagcucugccccaacugccugaacugcaccgaccuggacguggcccucgggcgccccaugugcgugggcaccacgccguccgccaaggccagcauccugcacgagguccggcccgugaccuccggcugcuuccccaucaugcacgaccgcaccaagauccggcagcugcccaaccuccugcgcggguacgagcacauccggcugagcacccagaacgugaucaacgcggagaaggccccgggcgggcccuacaagcucggcacguccgggagcugccccaacgccaccucccgcagcggcuucuucgccaccauggcgugggccgucccccgggacaacaagaccgccacgaacccgcugaccguggaggugcccuacaucugcaccaagggcgaggaccagaucaccgucuggggguuccacuccgacacgaagacccagaugaagaaccuguacggcgacagcaacccccagaaguucaccuccagcgccaacggggugaccacgcacuacgugucccagaucggcggcuuccccgaccagaccgaggacgggggccucccgcagagcgggcgcaucgucguggacuacauggugcagaagcccggcaagaccgggaccaucgucuaccagcggggcgugcugcugccccagaagguguggugcgccuccggccgcagcaaggucaucaaggggagccucccccugaucggcgaggcggacugccugcacgagaaguacgggggccucaacaaguccaagccguacuacacgggggagcacgccaaggccaucggcaacugccccaucugggugaagacgccccugaagcuggccaacggcaccaaguaccggcccccggccaagcuccugaaggagcgcggguucuucggcgcgaucgccggguuccuggagggcgggugggagggcaugaucgccggcuggcacggguacaccagccacggcgcccacggggucgccguggcggccgaccucaaguccacccaggaggccaucaacaagaucaccaagaaccugaacagccuguccgagcucgaggugaagaaccugcagcggcugagcggcgccauggacgagcuccacaacgagauccuggagcuggacgagaaggucgacgaccuccgcgccgacaccaucuccagccagaucgagcuggcggugcugcucuccaacgagggcaucaucaacagcgaggacgagcaccuccuggcccuggagcggaagcugaagaagaugcuggggcccuccgccguggacaucggcaacgggugcuucgagaccaagcacaagugcaaccagaccugccucgaccgcaucgccgcgggcacguucaacgccggggaguucagccugcccaccuucgacucccugaacaucaccgccgccagccucaacgacgacggccuggacaaccacaccauccugcuguacuacuccacggccgcgagcucccucgccgucacccugaugaucgccaucuucaucguguacauggugagccgggacaacgucuccugcagcaucugccuguga

SEQ ID NO: 90494 - RNA, 1752 nt, Artificial Sequence
  derived and/or modified CDS sequence (opt1) from hemagglutinin__InfluenzaB__ABL77299
augaaggccaucaucgugcugcucauggucgugaccagcaacgccgaccgcaucugcaccggcaucacguccagcaacagcccccacguggucaagaccgcgacccagggggaggugaacgugaccggcgucaucccgcugacgaccacccccaccaagucccacuucgccaaccugaaggggacgaagacccggggcaagcucugccccaacugccugaacugcaccgaccuggacguggcccucgggcgccccaugugcaucggcaacaucccguccgccaaggccagcauccugcacgaggugcggcccgucaccuccggcugcuuccccaucaugcacgaccgcacgaagauccggcagcugcccaaccuccugcgcggguacgagcacauccggcugagcacccacaacgugaucaacgcggagcgcgccccgggcgggcccuaccggcucggcaccuccgggagcugccccaacgugaccucccgcagcggcuucuucgccacgauggccugggcggucccccgggacaacaagaccgccaccaacccgcugaccguggaggugcccuacaucugcacgaagggcgaggaccagaucaccgucuggggguuccacuccgacaacgagacccagaugaagaaccuguacggcgacagcaacccccagaaguucaccuccagcgccaacgggaucacgacccacuacgugucccagaucggcggcuuccccaaccagaccgaggacgggggccucccgcagagcgggcgcaucguggucgacuacauggugcagaagcccggcaagaccgggacgaucguguaccagcggggcguccugcugccccagaagguguggugcgccuccggccgcagcaaggugaucaaggggagccucccccugaucggcgaggccgacugccugcacgagaaguacgggggccucaacaaguccaagccguacuacaccggggagcacgcgaaggccaucggcaacugccccaucugggucaagacgccccugaagcuggccaacggcaccaaguaccggcccccggccaagcuccugaaggagcgcggguucuucggcgccaucgcgggguuccuggagggcgggugggagggcaugaucgccggcuggcacggguacaccagccacggcgcccacgggguggccgucgccgcggaccucaaguccacccaggaggccaucaacaagaucaccaagaaccugaacagccuguccgagcucgaggugaagaaccugcagcggcugagcggcgccauggacgagcuccacaacgagauccuggagcuggacgagaagguggacgaccuccgcgccgacaccaucuccagccagaucgagcuggccguccugcucuccaacgagggcaucaucaacagcgaggacgagcaccuccuggcgcuggagcggaagcugaagaagaugcuggggcccuccgccguggacaucggcaacgggugcuucgagacgaagcacaagugcaaccagaccugccucgaccgcaucgccgccggcaccuucaacgcgggggaguucagccugcccaccuucgacucccugaacaucaccgccgccagccucaacgacgacggccuggacaaccacacgauccugcuguacuacuccaccgccgccagcucccucgcggugacccugaugaucgccaucuucaucgucuacauggugagccgggacaacguguccugcagcaucugccuguga

SEQ ID NO: 90495 - RNA, 1752 nt, Artificial Sequence
  derived and/or modified CDS sequence (opt1) from hemagglutinin__InfluenzaB__ABL77310
augaaggccaucaucgugcugcucauggucgugaccagcaacgccgaccgcaucugcaccggcaucacguccagcaacagcccccacguggucaagaccgcgacccagggggaggugaacgugaccggcgucaucccgcugacgaccacccccaccaagucccacuucgccaaccugaaggggacgaagacccggggcaagcucugccccaacugccugaacugcaccgaccuggacguggcccucgggcgccccaugugcaucggcaccaucccguccgccaaggccagcauccugcacgaggugcggcccgucacguccggcugcuuccccaucaugcacgaccgcaccaagauccggcagcugcccaaccuccugcgcggguacgagcacauccggcugagcacccacaacgugaucaacgcggagcgcgccccgggcgggcccuaccggcucggcaccuccgggagcugccccaacgugacgucccgcagcggcuucuucgccaccauggccugggcggucccccgggacaacaagaccgccaccaacccgcugacgguggaggugcccuacaucugcaccaagggcgaggaccagaucaccgucuggggguuccacuccgacaacaagaaccagaugaagaaccuguacggcgacagcaacccccagaaguucaccuccagcgccaacggggugacgacccacuacgugucccagaucggcggcuuccccaaccagaccgaggacgggggccucccgcagagcgggcgcaucgucguggacuacauggugcagaagcccggcaagaccgggacgaucgucuaccagcggggcgugcugcugccccagaagguguggugcgucuccggccgcagcaaggugaucaaggggagccucccccugaucggcgaggccgacugccugcacgagaaguacgggggccucaacaaguccaagccguacuacaccggggagcacgccaaggcgaucggcaacugccccaucugggucaagacgccccugaagcuggccaacggcaccaaguaccggcccccggccaagcuccugaaggagcgcggguucuucggcgccaucgccggguuccuggagggcgggugggagggcaugaucgcgggcuggcacggguacaccagccacggcgcccacgggguggccguggccgccgaccucaaguccacccaggaggcgaucaacaagaucaccaagaaccugaacagccuguccgagcucgaggucaagaaccugcagcggcugagcggcgccauggacgagcuccacaacgagauccuggagcuggacgagaagguggacgaccuccgcgccgacaccaucuccagccagaucgagcuggccgugcugcucuccaacgagggcaucaucaacagcgaggacgagcaccuccuggcccuggagcggaagcugaagaagaugcuggggcccuccgcggucgacaucggcaacgggugcuucgagacgaagcacaagugcaaccagaccugccucgaccgcaucgccgccggcaccuucaacgccggggaguucagccugcccaccuucgacucccugaacaucaccgcggccagccucaacgacgacggccuggacaaccacacgauccugcuguacuacuccaccgccgccagcucccucgccgugacccugaugaucgcgaucuucaucguguacauggucagccgggacaacguguccugcagcaucugccuguga

SEQ ID NO: 90496 - RNA, 1758 nt, Artificial Sequence
  derived and/or modified CDS sequence (opt1) from hemagglutinin__InfluenzaB__ABL77321
augaaggccaucaucgugcugcucauggucgugaccagcaacgccgaccgcaucugcaccggcaucacguccagcaacagcccccacguggucaagaccgcgacccagggggaggugaacgugaccggcgucaucccgcugacgaccacccccaccaagagccacuucgccaaccugaaggggacgaagacccggggcaagcucugccccaagugccugaacugcaccgaccuggacguggcccucgggcgccccaagugcaccggcacgaucccguccgccaaggugagcauccugcacgaggucaagcccgugaccuccggcugcuuccccaucaugcacgaccggaccaagauccgccagcugcccaaccuccugcggggguacgagcacauccgccugagcacccacaacgugaucaacgccgagaaggcgccgggcgggcccuacaagaucggcacguccgggagcugccccaacaucaccaacggcaacggcuucuucgccaccauggccugggccguccccaagaacgacaacaacaagaccgcgacgaacucccucaccguggaggugccguacaucugcaccgagggggaggaccagaucaccgucuggggcuuccacagcgacaacgagacgcagauggccaagcuguacggggacuccaagccccagaaguucaccagcuccgccaacggcgugaccacccacuacgugagccagaucggcggguuccccaaccaggccgaggacggcgggcugccccaguccggccggaucgucguggacuacauggugcagaaguccgggaagacgggcaccaucaccuaccagcgcggcauccuccugccgcagaaggucuggugcgccuccgggcggagcaaggugaucaagggcagccugccccucaucggggaggcggacugccugcacgagaaguacggcgggcugaacaaguccaagcccuacuacaccggcgagcacgccaaggccaucggcaacugccccaucugggugaagacgccgcucaaccuggccaacgggaccaaguaccgcccgcccgccaagcugcucaaggagcggggcuucuucggggcgaucgccggcuuccuggagggcgggugggagggcaugaucgccggguggcacggcuacaccagccacggggcccacggcgucgccguggcggccgaccugaaguccacccaggaggccaucaacaagaucacgaagaaccucaacagccuguccgagcuggaggucaagaaccuccagcgccugagcggcgccauggacgagcugcacaacgagauccucgagcuggacgagaagguggacgaccugcgggccgacaccaucuccagccagaucgagcucgcggugcugcuguccaacgaggggaucaucaacagcgaggacgagcaccuccuggcccuggagcgcaagcucaagaagaugcugggccccuccgccgucgagaucgggaacggcugcuucgagaccaagcacaagugcaaccagaccugccuggaccggaucgccgcggggaccuucaacgccggcgaguucagccuccccacguucgacucccugaacaucaccgccgccagccugaacgacgacggccucgacaaccacaccauccugcuguacuacuccaccgccgcgagcucccuggccgugacgcucaugaucgccaucuucaucguguacauggucagccgcgacaacguguccugcagcaucugccuguga

SEQ ID NO: 90497 - RNA, 1755 nt, Artificial Sequence
  derived and/or modified CDS sequence (opt1) from hemagglutinin__InfluenzaB__ABL77332
augaaggccaucaucgugcugcucauggucgugaccagcaacgccgaccgcaucugcaccggcaucacguccagcaacagcccccacguggucaagaccgcgacccagggggaggugaacgugaccggcgucaucccgcugacgaccacccccaccaagucccacuucgccaaccugaaggggacgaagacccggggcaagcucugccccaacugccugaacugcaccgaccuggacguggcccucgggcgccccaugugcgugggcaccacgccguccgccaaggccagcauccugcacgagguccggcccgugaccuccggcugcuuccccaucaugcacgaccgcaccaagauccggcagcugcccaaccuccugcgcggguacgagaacauccggcugagcacccagaacgugaucaacgcggagaaggccccgggcgggcccuacaagcucggcacguccgggagcugccccaacgccaccucccgcagcggcuucuucgccaccauggcgugggccgucccccgggacaacaacaagaccgccacgaacccgcugaccguggaggugcccuacaucugcaccaagggcgaggaccagaucaccgucuggggguuccacuccgacgacaagacgcagaugaagaaccuguacggcgacagcaacccccagaaguucaccuccagcgccaacggggugaccacccacuacgugucccagaucggcggcuuccccgaccagacggaggacgggggccucccgcagagcgggcgcaucgucguggacuacauggugcagaagcccggcaagaccgggaccaucgucuaccagcggggcgugcugcugccccagaagguguggugcgccuccggccgcagcaaggucaucaaggggagccucccccugaucggcgaggcggacugccugcacgagaaguacgggggccucaacaaguccaagccguacuacaccggggagcacgccaaggccaucggcaacugccccaucugggugaagacgccccugaagcuggccaacggcaccaaguaccggcccccggccaagcuccugaaggagcgcggguucuucggcgcgaucgccggguuccuggagggcgggugggagggcaugaucgccggcuggcacggguacaccagccacggcgcccacggggucgccguggcggccgaccucaaguccacccaggaggccaucaacaagaucacgaagaaccugaacagccuguccgagcucgaggugaagaaccugcagcggcugagcggcgccauggacgagcuccacaacgagauccuggagcuggacgagaaggucgacgaccuccgcgccgacaccaucuccagccagaucgagcuggcggugcugcucuccaacgagggcaucaucaacagcgaggacgagcaccuccuggcccuggagcggaagcugaagaagaugcuggggcccuccgccguggacaucggcaacgggugcuucgagaccaagcacaagugcaaccagaccugccucgaccgcaucgccgcgggcaccuucaacgccggggaguucagccugcccacguucgacucccugaacaucaccgccgccagccucaacgacgacggccuggacaaccacgccauccugcuguacuacuccaccgcggccagcucccucgccgucacccugaugaucgccaucuucaucguguacauggugagccgggacaacgucuccugcagcaucugccuguga

SEQ ID NO: 90498 - RNA, 1755 nt, Artificial Sequence
  derived and/or modified CDS sequence (opt1) from hemagglutinin__InfluenzaB__ABL77343
augaaggccaucaucgugcugcucauggucgugaccagcaacgccgaccgcaucugcaccggcaucacguccagcaacagcccccacguggucaagaccgcgacccagggggaggugaacgugaccggcgucaucccgcugacgaccacccccaccaagucccacuucgccaaccugaaggggacgaagacccggggcaagcucugccccaacugccugaacugcaccgaccuggacguggcccucgggcgccccaugugcgugggcaccacgccguccgccaaggccagcauccugcacgagguccggcccgugaccuccggcugcuuccccaucaugcacgaccgcaccaagauccggcagcugcccaaccuccugcgcggguacgagaacauccggcugagcacccagaacgugaucaacgcggagaaggccccgggcgggcccuaccgccucggcacguccgggagcugccccaacgccaccucccggagcggcuucuucgccaccauggcgugggccgucccccgcgacaacaacaagaccgccacgaacccgcugaccguggaggugcccuacaucugcaccaagggcgaggaccagaucaccgucuggggguuccacuccgacaacaagauccagaugaagaaccuguacggcgacagcaacccccagaaguucacguccagcgccaacggggugaccacccacuacgugucccagaucggcggcuuccccgaccagaccgaggacgggggccucccgcagagcgggcggaucgucguggacuacauggugcagaagcccggcaagacggggaccaucgucuaccagcgcggcgugcugcugccccagaagguguggugcgccuccggccggagcaaggucgugaaggggagccucccccugaucggcgaggcggacugccugcacgagaaguacgggggccucaacaaguccaagccguacuacaccggggagcacgccaaggccaucggcaacugccccaucugggucaagacgccccugaagcuggccaacggcaccaaguaccggcccccggccaagcuccugaaggagcgcggguucuucggcgcgaucgccggguuccuggagggcgggugggagggcaugaucgccggcuggcacggguacaccagccacggcgcccacgggguggccguggcggccgaccucaaguccacccaggaggccaucaacaagaucaccaagaaccugaacagccuguccgagcucgaggucaagaaccugcagcgccugagcggcgccauggacgagcuccacaacgagauccuggagcuggacgagaagguggacgaccuccgggccgacacgaucuccagccagaucgagcuggcggugcugcucuccaacgagggcaucaucaacagcgaggacgagcaccuccuggcccuggagcgcaagcugaagaagaugcuggggcccuccgccgucgacaucggcaacgggugcuucgagaccaagcacaagugcaaccagaccugccucgaccggaucgccgcgggcaccuucaacgccggggaguucagccugcccaccuucgacucccugaacaucacggccgccagccucaacgacgacggccuggacaaccacaccauccugcuguacuacuccaccgccgcgagcucccucgccgugacccugaugaucgccaucuucaucguguacauggucagccgcgacaacguguccugcagcaucugccuguga

SEQ ID NO: 90499 - RNA, 1755 nt, Artificial Sequence
  derived and/or modified CDS sequence (opt1) from hemagglutinin__InfluenzaB__ABL77365
augaaggccaucaucgugcugcucauggucgugaccagcaacgccgaccgcaucugcaccggcaucacguccagcaacagcccccacguggucaagaccgcgacccagggggaggugaacgugaccggcgucaucccgcugacgaccacccccaccaagucccacuucgccaaccugaaggggacgaagacccggggcaagcucugccccaacugccugaacugcaccgaccuggacguggcccucgggcgccccaugugcgugggcaccacgccguccgccaaggccagcauccugcacgagguccggcccgugaccuccggcugcuuccccaucaugcacgaccgcaccaagauccggcagcugcccaaccuccugcgcggguacgagaacauccggcugagcacccagaacgugaucaacgcggagaaggccccgggcgggcccuaccgccucggcacguccgggagcugccccaacgccaccucccggagcggcuucuucgccaccauggcgugggccgucccccgcgacaacaacaagaccgccacgaacccgcugaccguggaggugcccuacgucugcaccgagggcgaggaccagaucaccguguggggguuccacuccgacaacaagacgcagaugaagaaccuguacggcgacagcaacccccagaaguucaccuccagcgccaacggggugaccacccacuacgucucccagaucggcggcuuccccgaccaggccgaggacgggggccucccgcagagcgggcggaucgugguggacuacaugguccagaagcccggcaagacggggaccaucguguaccagcgcggcgugcugcugccccagaaggucuggugcgcguccggccggagcaaggugaucaaggggagccucccccugaucggcgaggccgacugccugcacgagaaguacgggggccucaacaaguccaagccguacuacaccggggagcacgccaaggccaucggcaacugccccaucugggucaagacgccccugaagcuggccaacggcaccaaguaccggcccccggcgaagcuccugaaggagcgcggguucuucggcgccaucgccggguuccuggagggcgggugggagggcaugaucgccggcuggcacggguacaccagccacggcgcccacgggguggcgguggccgccgaccucaaguccacccaggaggccaucaacaagaucaccaagaaccugaacagccuguccgagcucgaggucaagaaccugcagcgccugagcggcgccauggacgagcuccacaacgagauccuggagcuggacgagaagguggacgaccuccgggcggacacgaucuccagccagaucgagcuggccgugcugcucuccaacgagggcaucaucaacagcgaggacgagcaccuccuggcccuggagcgcaagcugaagaagaugcuggggcccuccgccgucgacaucggcaacgggugcuucgagaccaagcacaagugcaaccagaccugccucgaccggaucgcggccggcaccuucaacgccggggaguucagccugcccaccuucgacucccugaacaucacggccgccagccucaacgacgacggccuggacaaccacaccauccugcuguacuacuccaccgcggccagcucccucgccgugacccugaugaucgccaucuucaucguguacauggucagccgcgacaacguguccugcagcaucugccuguga

SEQ ID NO: 90500 - RNA, 1755 nt, Artificial Sequence
  derived and/or modified CDS sequence (opt1) from hemagglutinin__InfluenzaB__ABL84340
augaaggccaucaucgugcugcucauggucgugaccagcaacgccgaccgcaucugcaccggcaucacguccagcaacagcccccacguggucaagaccgcgacccagggggaggugaacgugaccggcgucaucccgcugacgaccacccccaccaagucccacuucgccaaccugaaggggacgaagacccggggcaagcucugcccgaccugccugaacugcaccgaccuggacguggcccucgggcgccccaugugcgugggcaucacgcccuccgccaaggccagcauccugcacgagguccggcccgugaccuccggcugcuuccccaucaugcacgaccgcaccaagauccggcagcugcccaaccuccugcgcggguacgagaagauccggcugagcacccagaacgugaucaacgcggagaaggccccgggcgggcccuaccgccucggcacguccgggagcugccccaacaccaccuccaagagcggcuucuucgccaccauggccugggcggucccccgggacaacaacaagacggccaccaacccgcugaccguggaggugccccacaucugcaccaaggaggaggaccagaucacggucuggggcuuccacuccgacaacaagacccagaugaagaaccuguacggggacagcaacccccagaaguucaccuccagcgccaacggcgugaccacgcacuacgugucccagaucgggggcuuccccgaccagaccgaggacggcgggcucccgcagagcggccgcaucgucguggacuacauggugcagaagcccgggaagaccggcaccaucgucuaccagcgggggauccugcugccccagaagguguggugcgccuccggccgcagcaaggugaucaagggcagccucccccugaucggggaggccgacugccugcacgagaaguacggcgggcucaacaaguccaagccguacuacacgggcgagcacgcgaaggccaucgggaacugccccaucugggucaagacgccccugaagcuggccaacggcaccaaguaccggcccccggccaagcuccugaaggagcgcggcuucuucggggccaucgcgggcuuccuggagggcgggugggaggggaugaucgccggcuggcacggcuacaccagccacggggcccacggcguggccgucgccgcggaccucaaguccacccaggaggccaucaacaagaucaccaagaaccugaacagccuguccgagcucgaggugaagaaccugcagcggcugagcggggccauggacgagcuccacaacgagauccuggagcuggacgagaagguggacgaccuccgcgccgacaccaucuccagccagaucgagcuggccguccugcucuccaacgagggcaucaucaacagcgaggacgagcaccuccuggcgcuggagcggaagcugaagaagaugcugggccccuccgccguggacaucgggaacggcugcuucgagaccaagcacaagugcaaccagaccugccucgaccgcaucgccgccgggacguucaacgcgggcgaguucagccugcccaccuucgacucccugaacaucaccgccgccagccucaacggggacggccuggacaaccacaccauccugcuguacuacuccacggccgccagcucccucgcggugacccugaugaucgccaucuucaucgucuacaugaucagccgggacaacguguccugcagcaucugccuguga

SEQ ID NO: 90501 - RNA, 1755 nt, Artificial Sequence; identical to SEQ ID NO: 90422
  derived and/or modified CDS sequence (opt1) from hemagglutinin__InfluenzaB__ABN50382

SEQ ID NO: 90502 - RNA, 1755 nt, Artificial Sequence; identical to SEQ ID NO: 90422
  derived and/or modified CDS sequence (opt1) from hemagglutinin__InfluenzaB__ABN50393

SEQ ID NO: 90503 - RNA, 1755 nt, Artificial Sequence
  derived and/or modified CDS sequence (opt1) from hemagglutinin__InfluenzaB__ABN50404
augaaggccaucaucgugcugcucauggucgugaccagcaacgccgaccgcaucugcaccggcaucacguccagcaacagcccccacguggucaagaccgcgacccagggggaggugaacgugaccggcgucaucccgcugacgaccacccccaccaagucccacuucgccaaccugaaggggacgaagacccggggcaagcucugcccgaccugccugaacugcaccgaccuggacguggcccucgggcgccccaugugcgugggcgucacgcccuccgccaaggccagcauccugcacgaggugcggcccgugaccuccggcugcuuccccaucaugcacgaccgcaccaagauccggcagcugcccaaccuccugcgcggguacgagaagauccggcugagcacccagaacgucaucaacgcggagaaggccccgggcgggcccuaccgccucggcacguccgggagcugccccaacgccaccucccggagcggcuucuucgccaccauggcgugggccgugccccgcgacaacaacaagaccgccacgaacccgcugaccguggaggucccccacaucugcaccaaggaggaggaccagaucaccguguggggcuuccacuccgacaacaagacgcagaugaagaaccuguacggggacagcaacccccagaaguucaccuccagcgccaacggcgugaccacccacuacgucucccagaucgggggcuuccccgaccagacggaggacggcgggcucccgcagagcggccggaucgugguggacuacaugguccagaagcccgggaagaccggcaccaucguguaccagcgcgggauccugcugccccagaagguguggugcgccuccggccggagcaaggucaucaagggcagccucccccugaucggggaggcggacugccugcacgagaaguacggcgggcucaacaaguccaagccguacuacaccggcgagcacgccaaggccaucgggaacugccccaucugggugaagacgccccugaagcuggccaacggcaccaaguaccggcccccggccaagcuccugaaggagcgcggcuucuucggggcgaucgccggcuuccuggagggcgggugggaggggaugaucgccggcuggcacggcuacaccagccacggggcccacggcgucgccguggcggccgaccucaaguccacccaggaggccaucaacaagaucacgaagaaccugaacagccuguccgagcucgaggugaagaaccugcagcgccugagcggggccauggacgagcuccacaacgagauccuggagcuggacgagaaggucgacgaccuccgggccgacaccaucuccagccagaucgagcuggcggugcugcucuccaacgagggcaucaucaacagcgaggacgagcaccuccuggcccuggagcgcaagcugaagaagaugcugggccccuccgccguggacaucgggaacggcugcuucgagaccaagcacaagugcaaccagaccugccucgaccggaucgccgcggggaccuucaacgccggcgaguucagccugcccacguucgacucccugaacaucaccgccgccagccucaacgacgacgggcuggacaaccacaccauccugcuguacuacuccaccgccgcgagcucccucgccgucacgcugaugaucgccaucuucaucguguacaugaucagccgcgacaacguguccugcagcaucugccuguga

SEQ ID NO: 90504 - RNA, 1755 nt, Artificial Sequence; identical to SEQ ID NO: 90431
  derived and/or modified CDS sequence (opt1) from hemagglutinin__InfluenzaB__ABN50415

SEQ ID NO: 90505 - RNA, 1755 nt, Artificial Sequence; identical to SEQ ID NO: 90431
  derived and/or modified CDS sequence (opt1) from hemagglutinin__InfluenzaB__ABN50426

SEQ ID NO: 90506 - RNA, 1755 nt, Artificial Sequence
  derived and/or modified CDS sequence (opt1) from hemagglutinin__InfluenzaB__ABN50437
augaaggccaucaucgugcugcucauggucgugaccagcaacgccgaccgcaucugcaccggcaucacguccagcaacagcccccacguggucaagaccgcgacccagggggaggugaacgugaccggcgucaucccgcugacgaccacccccaccaaguccuacuucgccaaccugaaggggacgcggacccgcggcaagcucugccccgacugccugaacugcaccgaccuggacguggcccucgggcggcccaugugcgugggcaccacgccguccgccaaggccagcauccugcacgagguccgccccgugaccuccggcugcuuccccaucaugcacgaccggaccaagauccgccagcugcccaaccuccugcggggguacgagaacauccgccugagcacccagaacgugaucgacgcggagaaggccccgggcgggcccuaccggcucggcacguccgggagcugccccaacgccaccuccaagagcggcuucuucgccaccauggcgugggccguccccaaggacaacaacaagaacgccaccaacccgcugacgguggaggugcccuacaucugcaccgagggcgaggaccagaucaccgucuggggguuccacuccgacaacaagacccagaugaagaaccuguacggcgaccccaacccccagaaguucacgagcuccgccaacggggugaccacccacuacgugagccagaucggcggcuucccggaccagaccgaggacgggggccucccccaguccgggcgcaucgucguggacuacaugaugcagaagcccggcaagacggggaccaucguguaccagcggggcguccugcugccccagaagguguggugcgccagcggcaaguccaaggugaucaaggggagccucccgcugaucggcgaggcggacugccugcacgagaaguacgggggccucaacaagagcaagcccuacuacaccggggagcacgccaaggccaucggcaacugccccaucugggucaagacgccccugaagcuggccaacggcaccaaguaccgcccgcccgccaagcuccugaaggagcggggguucuucggcgcgaucgccggguuccuggagggcgggugggagggcaugaucgccggcuggcacggguacaccucccacggcgcccacgggguggccgucgcggccgaccucaagagcacccaggaggccaucaacaagaucaccaagaaccugaacucccugagcgagcucgaggugaagaaccugcagcgccuguccggcgccauggacgagcuccacaacgagauccuggagcuggacgagaagguggacgaccuccgggccgacacgaucagcucccagaucgagcuggcgguccugcucagcaacgagggcaucaucaacuccgaggacgagcaccuccuggcccuggagcgcaagcugaagaagaugcuggggcccagcgccguggacaucggcaacgggugcuucgagaccaagcacaagugcaaccagaccugccucgaccggaucgccgcgggcaccuucaacgccggggaguucucccugcccaccuucgacagccugaacaucacggccgccucccucaacgacgacggccuggacaaccacaccauccugcuguacuacagcaccgccgcguccagccucgccgugacccugaugcuggccaucuucaucgucuacauggugucccgcgacaacgugagcugcuccaucugccucuga

SEQ ID NO: 90507 - RNA, 1758 nt, Artificial Sequence
  derived and/or modified CDS sequence (opt1) from hemagglutinin__InfluenzaB__ABN50459
augaaggcccugaucgugcuccugauggucgugaccagcaacgccgaccgcaucugcaccggcaucacguccagcaacagcccccacguggucaagaccgcgacccagggggaggugaacgugaccggcgucaucccgcugacgaccacccccaccaagagccacuucgccaaccucaaggggacgaagacccggggcaagcugugccccaagugccugaacugcaccgaccucgacguggcccuggggcgccccaagugcaccggcaacaucccguccgccgaggugagcauccugcacgagguccggcccgugacguccggcugcuuccccaucaugcacgaccgcaccaagauccggcagcuccccaaccugcugcgcggguacgagcacauccggcucagcacccacaacgugaucaacgccgagaaggcgccgggcgggcccuacaagaucggcaccuccgggagcugccccaacgucacgaacggcaacggcuucuucgccaccauggccugggccgugcccaagaacgacaacaacaagaccgcgaccaacucccugacgaucgaggugccguacaucugcaccgagggggaggaccagaucaccaucuggggcuuccacagcgacaacgagauccagauggccaagcuguacggggacuccaagccccagaaguucaccagcuccgccaacggcgucacgacccacuacgugagccagaucggcggguuccccaaccagaccgaggacggcgggcucccccaguccggccgcaucguggucgacuacauggugcagaaguccgggaagaccggcacgaucaccuaccagcggggcauccugcugccgcagaagguguggugcgccuccgggcgcagcaaggucaucaagggcagccucccccugaucggggaggccgacugccugcacgagaaguacggcgggcucaacaaguccaagcccuacuacaccggcgagcacgcgaaggccaucggcaacugccccaucugggugaagaccccgcugaagcuggccaacgggacgaaguaccggccgcccgccaagcuccugaaggagcgcggcuucuucggggccaucgcgggcuuccuggagggcgggugggagggcaugaucgccggguggcacggcuacaccagccacggggcccacggcguggccgucgccgcggaccucaaguccacccaggaggccaucaacaagaucaccaagaaccugaacagccuguccgagcucgaggugaagaaccugcagcggcugagcggcgccauggacgagcuccacaacgagauccuggagcuggacgagaaggucgacgaccuccgcgccgacacgaucuccagccagaucgagcuggccgugcugcucuccaacgaggggaucaucaacagcgaggacgagcaccuccuggcgcuggagcggaagcugaagaagaugcugggccccuccgccguggagaucgggaacggcugcuucgagaccaagcacaagugcaaccagaccugccucgaccgcaucgccgccgggaccuucgacgcgggcgaguucagccugcccaccuucgacucccugaacaucacggccgccagccucaacgacgacggccuggacaaccacaccauccugcuguacuacuccaccgccgccagcucccucgcggucacccugaugaucgccaucuucgugguguacauggucagccgggacaacguguccugcagcaucugccuguga

SEQ ID NO: 90508 - RNA, 1758 nt, Artificial Sequence
  derived and/or modified CDS sequence (opt1) from hemagglutinin__InfluenzaB__ABN50470
augaaggccaucaucgugcugcucauggucgugaccagcaacgccgaccgcaucugcaccggcaucacguccagcaacagcccccacguggucaagaccgcgacccagggggaggugaacgugaccggcgucaucccgcugacgaccacccccaccaagagccacuucgccaaccugaaggggacgaagacccggggcaagcucugccccaagugccugaacugcaccgaccuggacguggcccucgggcgccccaagugcaccggcaacaucccguccgccaaggugagcauccugcacgagguccggcccgugacguccggcugcuuccccaucaugcacgaccgcaccaagauccggcagcugcccaaccuccugcgcggguacgagcggauccgccugagcaaccacaacgugaucaacgccgagaaggcgccgggcgggcccuacaagaucggcaccuccgggagcugccccaacgucaccaacggcaacggcuucuucgccacgauggccugggccgugcccaagaacgagaacaacaagaccgcgaccaacucccucaccaucgaggugccguacaucugcacggagggggaggaccagaucaccgucuggggcuuccacagcgacaacgagauccagauggccaagcuguacggggacuccaagccccagaaguucaccagcuccgccaacggcgugaccacgcacuacgugagccagaucggcggguuccccaaccagaccgaggacggcgggcugccccaguccggccggaucgucguggacuacauggugcagaaguccgggaagaccggcaccaucacguaccagcgcggcauccuccugccgcagaaggucuggugcgccuccgggcggagcaaggugaucaagggcagccugccccucaucggggaggccgacugccugcacgagaaguacggcgggcugaacaaguccaagcccuacuacaccggcgagcacgcgaaggccaucggcaacugccccaucugggugaagaccccgcucaagcuggccaacgggaccaaguaccgcccgcccgccaagcugcucaaggagcggggcuucuucggggccaucgcgggcuuccuggagggcgggugggagggcaugaucgccggguggcacggcuacacgagccacggggcccacggcgucgccguggccgcggaccugaaguccacccaggaggccaucaacaagaucaccaagaaccucaacagccuguccgagcuggaggucaagaaccuccagcgccugagcggcgccauggacgagcugcacaacgagauccucgagcuggacgagaagguggacgaccugcgggccgacaccaucuccagccagaucgagcucgccgugcugcuguccaacgaggggaucaucaacagcgaggacgagcaccuccuggcgcuggagcgcaagcucaagaagaugcugggccccuccgccgucgagaucgggaacggcugcuucgagacgaagcacaagugcaaccagaccugccuggaccggaucgccgccgggaccuucaacgcgggcgaguucagccuccccaccuucgacucccugaacaucaccgccgccagccugaacgacgacggccucgacaaccacacgauccugcuguacuacuccaccgccgccagcucccuggcggugacccucaugaucgccaucuucguggucuacauggugagccgcgacaacguguccugcagcaucugccuguga

SEQ ID NO: 90509 - RNA, 1755 nt, Artificial Sequence
  derived and/or modified CDS sequence (opt1) from hemagglutinin__InfluenzaB__ABN50481
augaaggccaucaucgugcugcuccuggucgugaccagcaacgccgaccgcaucugcaccggcaucacguccagcaacagcccccacguggucaagaccgcgacccagggggaggugaacgugaccggcgccaucccgcugacgaccacccccaccaagucccacuucgccaaccucaaggggacgaagacccggggcaagcugugcccgaccugcuucaacugcaccgaccuggacgucgcccucgggcgccccaugugcgugggcaucacgcccuccgccaaggcgagcauccugcacgaggugcggcccgucaccuccggcugcuuccccaucaugcacgaccgcaccaagauccggcagcugcccaaccuccugcgcggguacgagaagauccggcugagcacccagaacgugaucgacgccgagaaggccccgggcgggcccuaccgccucggcacguccgggagcugccccaacgccaccuccaagagcggcuucuucgcgaccauggccugggccgugccccgggacaacaacaagaccgccacgaacccgcugaccgucgaggugccccacaucugcaccaaggaggaggaccagaucaccguguggggcuuccacuccgacaacaagacgcagaugaagaaccuguacggggacagcaacccccagaaguucaccuccagcgccaacggcaucaccacccacuacgucucccagaucgggggcuuccccgaccagacggaggacggcgggcucccgcagagcggccgcaucgugguggacuacaugguccagaagcccgggaagaccggcaccaucguguaccagcgggggauccugcugccccagaagguguggugcgcguccggccgcagcaaggucaucaagggcagccucccccugaucggggaggccgacugccugcacgagaaguacggcgggcucaacaaguccaagccguacuacaccggcgagcacgccaaggccaucgggaacugccccaucugggugaagacgccccugaagcuggccaacggcaccaaguaccggcccccggcgaagcuccugaaggagcgcggcuucuucggggccaucgccggcuuccuggagggcgggugggaggggaugaucgccggcuggcacggcuacaccagccacggggcccacggcguggcggucgccgccgaccucaaguccacccaggaggccaucaacaagaucacgaagaaccugaacagccuguccgagcucgaggugaagaaccugcagcggcugagcggggccauggacgagcuccacaacgagauccuggagcuggacgagaaggucgacgaccuccgcgcggacaccaucuccagccagaucgagcuggccgugcugcucuccaacgagggcaucaucaacagcgaggacgagcaccuccuggcccuggagcggaagcugaagaagaugcugggccccuccgccguggacaucgggaacggcugcuucgagaccaagcacaagugcaaccagaccugccucgaccgcaucgcggccgggaccuucaacgccggcgaguucagccugcccacguucgacucccugaacaucaccgccgccagccucaacgacgacgggcuggacaaccacaccauccugcuguacuacuccaccgcggccagcucccucgccgucacgcugaugaucgccaucuucaucguguacaugaucagccgggacaacguguccugcagcaucugccuguga

SEQ ID NO: 90510 - RNA, 1755 nt, Artificial Sequence
  derived and/or modified CDS sequence (opt1) from hemagglutinin__InfluenzaB__ABN50503
augaaggccaucaucgugcugcucauggucgugaccagcaacgccgaccgcaucugcaccggcaucacguccagcaacagcccccacguggucaagaccgcgacccagggggaggugaacgugaccggcgucaucccgcugacgaccacccccaccaagucccacuucgccaaccugaaggggacgaagacccggggcaagcucugcccgaccugccugaacugcaccgaccuggacguggcccucgggcgccccaugugcgugggcgucacgcccuccgccaaggccagcauccugcacgaggugcggcccgugaccuccggcugcuuccccaucaugcacgaccgcaccaagauccggcagcugcccaaccuccugcgcggguacgagaagauccggcugagcacccagaacgucaucaacgcggagaaggccccgggcgggcccuaccgccucggcacguccgggagcugccccaacgccaccucccggagcggcuucuucgccaccauggcgugggccgugcccaaggacaacaacaagaccgccacgaacccgcugaccguggaggucccccacaucugcaccaaggaggaggaccagaucaccguguggggcuuccacuccgacgacaagacgcagaugaagaaccuguacggggacagcaacccccagaaguucaccuccagcgccaacggcgugaccacccacuacgucucccagaucgggggcuuccccgaccagacggaggacggcgggcucccgcagagcggccgcaucgugguggacuacaugguccagaagcccgggaagaccggcaccaucguguaccagcgggggauccugcugccccagaagguguggugcgccuccggccgcagcaaggucaucaagggcagccucccccugaucggggaggcggacugccugcacgagaaguacggcgggcucaacaaguccaagccguacuacaccggcgagcacgccaaggccaucgggaacugccccaucugggugaagacgccccugaagcuggccaacggcaccaaguaccggcccccggccaagcuccugaaggagcgcggcuucuucggggcgaucgccggcuuccuggagggcgggugggaggggaugaucgccggcuggcacggcuacaccagccacggggcccacggcgucgccguggcggccgaccucaaguccacccaggaggccaucaacaagaucacgaagaaccugaacagccuguccgagcucgaggugaagaaccugcagcggcugagcggggccauggacgagcuccacaacgagauccuggagcuggacgagaaggucgacgaccuccgcgccgacaccaucuccagccagaucgagcuggcggugcugcucuccaacgagggcaucaucaacagcgaggacgagcaccuccuggcccuggagcggaagcugaagaagaugcugggccccuccgccguggacaucgggaacggcugcuucgagaccaagcacaagugcaaccagaccugccucgaccgcaucgccgcggggaccuucaacgccggcgaguucagccugcccacguucgacucccugaacaucaccgccgccagccucaacgacgacgggcuggacaaccacaccauccugcuguacuacuccaccgccgcgagcucccucgccgucacgcugaugaucgccaucuucaucguguacaugaucagccgggacaacguguccugcagcaucugccuguga

SEQ ID NO: 90511 - RNA, 1755 nt, Artificial Sequence
  derived and/or modified CDS sequence (opt1) from hemagglutinin__InfluenzaB__ABN50514
augaaggccaucaucgugcugcucauggucgccaccagcaacgcggaccgcaucugcaccggcaucacguccagcaacagcccccacguggugaagaccgccacccagggggaggucaacgugaccggcgugaucccgcugacgaccacccccaccaaguccuacuucgccaaccugaaggggacgcggacccgcggcaagcucugccccgacugccugaacugcaccgaccuggacgucgcccucgggcggcccaugugcgugggcaccacgccguccgccaaggcgagcauccugcacgaggugcgccccgucaccuccggcugcuuccccaucaugcacgaccggaccaagauccgccagcugcccaaccuccugcggggguacgagaacauccgccugagcacccagaacgugaucgacgccgagaaggccccgggcgggcccuaccggcucggcacguccgggagcugccccaacgccaccuccaagagcggcuucuucgcgaccauggccugggccgugcccaaggacaacaacaagaacgccaccaacccgcugacggucgaggugcccuacgugugcaccgagggcgaggaccagaucaccgucuggggguuccacuccgacaacaagccccagaugaagaaccuguacggcgacagcaacccccagaaguucaccuccagcgccaacggggugacgacccacuacgugucccagaucggcggcuucccggaccagaccgaggacgggggccucccccagagcgggcgcaucgucguggacuacauggugcagaagcccggcaagaccgggacgaucgucuaccagcggggcgugcugcugccccagaagguguggugcgcguccggccgcagcaaggucaucaaggggagccucccgcugaucggcgaggccgacugccugcacgagaaguacgggggccucaacaaguccaagcccuacuacaccggggagcacgccaaggccaucggcaacugccccaucugggugaagacgccccugaagcuggccaacggcaccaaguaccggccgcccgcgaagcuccugaaggagcgcggguucuucggcgccaucgccggguuccuggagggcgggugggagggcaugaucgccggcuggcacggguacaccagccacggcgcccacggggucgcgguggccgccgaccucaaguccacccaggaggccaucaacaagaucaccaagaaccugaacagccuguccgagcucgaggugaagaaccugcagcggcugagcggcgccauggacgagcuccacgacgagauccuggagcuggacgagaaggucgacgaccuccgcgcggacaccaucuccagccagaucgagcuggccgugcugcucuccaacgagggcaucaucaacagcgaggacgagcaccuccuggcccuggagcggaagcugaagaagaugcuggggcccuccgccguggacaucggcaacgggugcuucgagacgaagcacaagugcaaccagaccugccucgaccgcaucgcggccggcaccuucaacgccggggaguucagccugcccaccuucgacucccugaacaucaccgccgccagccucaacgacgacggccuggacaaccacacgauccugcuguacuacuccaccgcggccagcucccucgccgucacccugaugcuggccaucuucaucguguacauggugagccgggacaacgucuccugcagcaucugccucuga

SEQ ID NO: 90512 - RNA, 1755 nt, Artificial Sequence
  derived and/or modified CDS sequence (opt1) from hemagglutinin__InfluenzaB__ABN50525
augaaggccaucaucgugcugcucauggucgugaccagcaacgccgaccgcaucugcaccggcaucacguccagcaacagcccccacguggucaagaccgcgacccagggggaggugaacgugaccggcgucaucccgcugacgaccacccccaccaaguccuacuucgccaaccugaaggggacgcggacccgcggcaagcucugccccgacugccugaacugcaccgaccuggacguggcccucgggcggcccaugugcgugggcaccacgccguccgccaaggccagcauccugcacgagguccgccccgugaccuccggcugcuuccccaucaugcacgaccggaccaagauccgccagcugcccaaccuccugcggggguacgagaacauccgccugagcacccagaacgugaucgacgcggagaaggccccgggcgggcccuaccggcucggcacguccgggagcugccccaacgccaccuccaagagcggcuucuucuccaccauggccugggcgguccccaaggacaacaacaagaacgccaccaacccgcugacgguggaggugcccuacgucugcaccgagggcgaggaccagaucaccguguggggguuccacagcgacaacaagacccagaugaagaaccuguacggcgacuccaacccccagaaguucacgagcuccgccaacggggugaccacccacuacgucagccagaucggcggcuuccccgaccagaccgaggacgggggccucccgcaguccgggcgcaucgugguggacuacaugguccagaagcccggcaagacggggaccaucguguaccagcggggcgugcugcugccccagaaggucuggugcgccagcggccgcagcaaggugaucaaggggucccucccccugaucggcgaggccgacugccugcacgagaaguacgggggccucaacaagagcaagccguacuacaccggggagcacgcgaaggccaucggcaacugccccaucugggucaagacgccccugaagcuggccaacggcaccaaguaccggcccccggccaagcuccugaaggagcgcggguucuucggcgccaucgcgggguuccuggagggcgggugggagggcaugaucgccggcuggcacggguacaccucccacggcgcccacgggguggccguggccgcggaccucaagagcacccaggaggccaucaacaagaucaccaagaaccugaacucccugagcgagcucgaggucaagaaccugcagcggcuguccggcgccauggacgagcuccacaacgagauccuggagcuggacgagaagguggacgaccuccgcgccgacacgaucagcucccagaucgagcuggccgugcugcucagcaacgagggcaucaucaacuccgaggacgagcaccuccuggcgcuggagcggaagcugaagaagaugcuggggcccagcgccgucgacaucggcaacgggugcuucgagaccaagcacaagugcaaccagaccugccucgaccgcaucgccgccggcaccuucaacgcgggggaguucucccugcccaccuucgacagccugaacaucacggccgccucccucaacgacgacggccuggacaaccacaccauccugcuguacuacagcaccgccgccuccagccucgcggugacccugaugcuggccaucuucaucguguacauggucucccgggacaacgugagcugcagcaucugccucuga

SEQ ID NO: 90513 - RNA, 1758 nt, Artificial Sequence
  derived and/or modified CDS sequence (opt1) from hemagglutinin__InfluenzaB__ABN50536
augaaggccaucaucgugcugcucauggucgugaccagcaacgccgaccgcaucugcaccggcaucacguccagcaacagcccccacguggucaagaccgcgacccagggggaggugaacgugaccggcgucaucccgcugacgaccacccccaccaagagccacuucgccaaccugaaggggacgaagacccggggcaagcucugccccaagugccugaacugcaccgaccuggacguggcccucgggcgccccaagugcaccggcaacaucccguccgccaaggugagcauccugcacgagguccggcccgugacguccggcugcuuccccaucaugcacgaccgcaccaagauccggcagcugcccaaccuccugcgcggguacgagcggauccgccugagcaaccacaacgugaucaacgccgaggaggcgccgggcgggcccuacaagaucggcaccuccgggagcugccccaacgucaccaacggcaacggcuucuucgccacgauggccugggccgugcccaagaacgagaacaacaagaccgcgaccaacucccucaccaucgaggugccguacaucugcacggagggggaggaccagaucaccgucuggggcuuccacagcgacaacgagauccagauggccaagcuguacggggacuccaagccccagaaguucaccagcuccgccaacggcgugaccacgcacuacgugagccagaucggcggguuccccaaccagaccgaggacggcgggcugccccaguccggccggaucgucguggacuacauggugcagaaguccgggaagaccggcaccaucacguaccagcgcggcauccuccugccgcagaaggucuggugcgccuccgggcggagcaaggugaucaagggcagccugccccucaucggggaggccgacugccugcacgagaaguacggcgggcugaacaaguccaagcccuacuacaccggcgagcacgcgaaggccaucggcaacugccccaucugggugaagaccccgcucaagcuggccaacgggaccaaguaccgcccgcccgccaagcugcucaaggagcggggcuucuucggggccaucgcgggcuuccuggagggcgggugggagggcaugaucgccggguggcacggcuacacgagccacggggcccacggcgucgccguggccgcggaccugaaguccacccaggaggccaucaacaagaucaccaagaaccucaacagccuguccgagcuggaggucaagaaccuccagcgccugagcggcgccauggacgagcugcacaacgagauccucgagcuggacgagaagguggacgaccugcgggccgacaccaucuccagccagaucgagcucgccgugcugcuguccaacgaggggaucaucaacagcgaggacgagcaccuccuggcgcuggagcgcaagcucaagaagaugcugggccccuccgccgucgagaucgggaacggcugcuucgagacgaagcacaagugcaaccagaccugccuggaccggaucgccgccgggaccuucaacgcgggcgaguucagccuccccaccuucgacucccugaacaucaccgccgccagccugaacgacgacggccucgacaaccacacgauccugcuguacuacuccaccgccgccagcucccuggcggugacccucaugaucgccaucuucguggucuacauggugagccgcgacaacguguccugcagcaucugccuguga

SEQ ID NO: 90514 - RNA, 1758 nt, Artificial Sequence
  derived and/or modified CDS sequence (opt1) from hemagglutinin__InfluenzaB__ABN50547
augaaggccaucaucgugcugcucauggucgugaccagcaacgccgaccgcaucugcaccggcaucacguccagcaacagcccccacguggucaagaccgcgacccagggggaggugaacgugaccggcgucaucccgcugacgaccacccccaccaagagccacuucgccaaccugaaggggacgaagacccggggcaagcucugccccaagugccugaacugcaccgaccuggacguggcccucgggcgccccaagugcaccggcaacaucccguccgccaaggugagcauccugcacgagguccggcccgugacguccggcugcuuccccaucaugcacgaccgcaccaagauccggcagcugcccaaccuccugcgcggguacgagcacauccggcugagcacccacaacgugaucaacgccgagaaggcgccgggcgggcccuacaagaucggcaccuccgggagcugccccaacgucacgaacggcaacggcuucuucgccaccauggccugggccgugcccaagaacgacaacaacaagaccgcgaccaacucccucacgaucgaggugccguacaucugcaccgagggggaggaccagcugaccgucuggggcuuccacagcgacaacgagaaccagauggccaagcuguacggggacuccaagccccagaaguucaccagcuccgccaacggcgugacgacccacuacgugagccagaucggcggguuccccaaccagaccgaggacggcgggcucccccaguccggccgcaucgucguggacuacauggugcagaaguccgggaagaccggcacgaucaccuaccagcggggcauccugcugccgcagaaggucuggugcgccuccgggcgcagcaaggugaucaagggcagccucccccugaucggggaggccgacugccugcacgagaaguacggcgggcucaacaaguccaagcccuacuacaccggcgagcacgcgaaggccaucggcaacugccccaucugggugaagaccccgcugaagcuggccaacgggacgaaguaccggccgcccgccaagcuccugaaggagcgcggcuucuucggggccaucgcgggcuuccuggagggcgggugggagggcaugaucgccggguggcacggcuacaccagccacggggcccacggcgucgccguggccgcggaccucaaguccacccaggaggccaucaacaagaucaccaagaaccugaacagccuguccgagcucgaggucaagaaccugcagcggcugagcggcgccauggacgagcuccacaacgagauccuggagcuggacgagaagguggacgaccuccgcgccgacacgaucuccagccagaucgagcuggccgugcugcucuccaacgaggggaucaucaacagcgaggacgagcaccuccuggcgcuggagcggaagcugaagaagaugcugggccccuccgccgucgagaucgggaacggcugcuucgagaccaagcacaagugcaaccagaccugccucgaccgcaucgccgccgggaccuucgacgcgggcgaguucagccugcccaccuucgacucccugaacaucacggccgccagccucaacgacgacggccuggacaaccacaccauccugcuguacuacuccaccgccgccagcucccucgcggugacccugaugaucgccaucuucguggucuacauggugagccgggacaacguguccugcagcaucugccuguga

SEQ ID NO: 90515 - RNA, 1758 nt, Artificial Sequence
  derived and/or modified CDS sequence (opt1) from hemagglutinin__InfluenzaB__ABN50558
augaaggccaucaucgugcugcucauggucgugaccagcaacgccgaccgcaucugcaccggcaucacguccagcaacagcccccacguggucaagaccgcgacccagggggaggugaacgugaccggcgucaucccgcugacgaccacccccaccaagagccacuucgccaaccugaaggggacgaagacccggggcaagcucugccccaagugccugaacugcaccgaccuggacguggcccucgggcgccccaagugcaccggcaacaucccguccgccaaggugagcauccugcacgagguccggcccgugacguccggcugcuuccccaucaugcacgaccgcaccaagauccggcagcugcccaaccuccugcgcggguacgagcacauccggcugagcacccacaacgugaucaacgccgagaaggcgccgggcgggcccuacaagaucggcaccuccgggagcugccccaacgucacgaacggcaacggcuucuucgccaccauggccugggccgugcccaagaacgacaacaacaagaccgcgaccaacucccucacgaucgaggugccguacaucugcaccgagggggaggaccagaucaccgucuggggcuuccacagcgacaaggagacccagauggccaagcuguacggggacuccaagccccagaaguucacgagcuccgccaacggcgugaccacccacuacgugagccagaucggcggguuccccaaccagaccgaggacggcgggcugccccaguccggccgcaucgucguggacuacaugaugcagaaguccgggaagacgggcaccaucaccuaccagcggggcauccuccugccgcagaagguguggugcgccuccgggcgcagcaaggucaucaagggcagccugccccucaucggggaggccgacugccugcacgagaaguacggcgggcugaacaaguccaagcccuacuacaccggcgagcacgcgaaggccaucggcaacugccccaucugggugaagacgccgcucaagcuggccaacgggaccaaguaccggccgcccgccaagcugcucaaggagcgcggcuucuucggggccaucgcgggcuuccuggagggcgggugggagggcaugaucgccggguggcacggcuacaccagccacggggcccacggcguggccgucgccgcggaccugaaguccacccaggaggccaucaacaagaucacgaagaaccucaacagccuguccgagcuggaggugaagaaccuccagcggcugagcggcgccauggacgagcugcacaacgagauccucgagcuggacgagaaggucgacgaccugcgcgccgacaccaucuccagccagaucgagcucgccgugcugcuguccaacgaggggaucaucaacagcgaggacgagcaccuccuggcgcuggagcggaagcucaagaagaugcugggccccuccgccguggagaucgggaacggcugcuucgagaccaagcacaagugcaaccagaccugccuggaccgcaucgccgccgggaccuucgacgcgggcgaguucagccuccccacguucgacucccugaacaucaccgccgccagccugaacgacgacggccucgacaaccacaccauccugcuguacuacuccaccgccgccagcucccuggcggucacgcucaugaucgccaucuucgugguguacauggucagccgggacaacguguccugcagcaucugccuguga

SEQ ID NO: 90516 - RNA, 1755 nt, Artificial Sequence; identical to SEQ ID NO: 90431
  derived and/or modified CDS sequence (opt1) from hemagglutinin__InfluenzaB__ABN50569

SEQ ID NO: 90517 - RNA, 1758 nt, Artificial Sequence; identical to SEQ ID NO: 90443
  derived and/or modified CDS sequence (opt1) from hemagglutinin__InfluenzaB__ABN50580

SEQ ID NO: 90518 - RNA, 1758 nt, Artificial Sequence
  derived and/or modified CDS sequence (opt1) from hemagglutinin__InfluenzaB__ABN50591
augaaggccaucaucgugcugcucauggucgugaccagcaacgccgaccgcaucugcaccggcaucacguccagcaacagcccccacguggucaagaccgcgacccagggggaggugaacgugaccggcgucaucccgcugacgaccacccccaccaagagccacuucgccaaccugaaggggacgaagacccggggcaagcucugccccaagugccugaacugcaccgaccuggacguggcccucgggcgccccaagugcaccggcaacaucccguccgccaaggugagcauccugcacgagguccggcccgugacguccggcugcuuccccaucaugcacgaccgcaccaagauccggcagcugcccaaccuccugcgcggguacgagcggauccgccugagcaaccacaacgugaucaacgccgagaaggcgccgggcgggcccuacaagaucggcaccuccgggagcugccccaacgucaccaacggcaacggcuucuucgccacgauggccugggccgugcccaagaacgagaacaacaagaccgcgaccaacucccucaccaucgaggugccguacaucugcacggagggggaggaccagaucaccgucuggggcuuccacagcgacaacgaggcccagauggccaagcuguacggggacuccaagccccagaaguucaccagcuccgccaacggcgugaccacgcacuacgugagccagaucggcggguuccccaaccagaccgaggacggcgggcugccccaguccggccggaucgucguggacuacauggugcagaaguccgggaagaccggcaccaucacguaccagcgcggcauccuccugccgcagaaggucuggugcgccuccgggcggagcaaggugaucaagggcagccugccccucaucggggaggcggacugccugcacgagaaguacggcgggcugaacaaguccaagcccuacuacaccggcgagcacgccaaggccaucggcaacugccccaucugggugaagaccccgcucaagcuggccaacgggaccaaguaccgcccgcccgccaagcugcucaaggagcggggcuucuucggggcgaucgccggcuuccuggagggcgggugggagggcaugaucgccggguggcacggcuacacgagccacggggcccacggcgucgccguggcggccgaccugaaguccacccaggaggccaucaacaagaucaccaagaaccucaacagccuguccgagcuggaggucaagaaccuccagcgccugagcggcgccauggacgagcugcacaacgagauccucgagcuggacgagaagguggacgaccugcgggccgacaccaucuccagccagaucgagcucgcggugcugcuguccaacgaggggaucaucaacagcgaggacgagcaccuccuggcccuggagcgcaagcucaagaagaugcugggccccuccgccgucgagaucgggaacggcugcuucgagacgaagcacaagugcaaccagaccugccuggaccggaucgccgcggggaccuucaacgccggcgaguucagccuccccaccuucgacucccugaacaucaccgccgccagccugaacgacgacggccucgacaaccacacgauccugcuguacuacuccaccgccgcgagcucccuggccgugacccucaugaucgccaucuucguggucuacauggugagccgcgacaacguguccugcagcaucugccuguga

SEQ ID NO: 90519 - RNA, 1758 nt, Artificial Sequence
  derived and/or modified CDS sequence (opt1) from hemagglutinin__InfluenzaB__ABN50602
augaaggccaucaucgugcugcucauggucgugaccagcaacgccgaccgcaucugcaccggcaucacguccagcaacagcccccacguggucaagaccgcgacccagggggaggugaacgugaccggcgucaucccgcugacgaccacccccaccaagagccacuucgccaaccugaaggggacgaagacccggggcaagcucugccccaagugccugaacugcaccgaccuggacguggcccucgggcgccccaagugcaugggcaccaucccguccgccaaggccagcauccugcacgaggugaagcccgucacguccggcugcuuccccaucaugcacgaccggaccaagauccgccagcugcccaaccuccugcggggguacgagaacauccgccugagcacccacaacgugaucaacgcggagaccgccccgggcgggcccuacaagaucggcacguccgggagcugccccaacaucaccaacggcaacggcuucuucgccaccauggccugggcggugcccaagaacgacaacaacaagaccgccacgaacccgcucaccgucgaggugcccuacaucugcaccgagggggaggaccagaucaccguguggggcuuccacuccgacaacgagacgcagauggucaagcuguacggggacagcaagccccagaaguucaccuccagcgccaacggcgugaccgcccacuacgugucccagaucggcggguuccccaaccaggccgaggacggcgggcugccgcagagcggccggaucgucguggacuacauggugcagaaguccgggaagaccggcacgaucaccuaccagcgcggcauccuccugccccagaaggucuggugcgcgagcgggcgguccaaggugaucaagggcagccugccccucaucggggaggccgacugccugcacgagaaguacggcgggcugaacaagagcaagcccuacuacaccggcgagcacgccaaggccaucggcaacugcccgaucugggugaagacgccccucaagcuggccaacgggaccaaguaccgcccgcccgcgaagcugcucaaggagcggggcuucuucggggccaucgccggcuuccuggagggcgggugggagggcaugaucgccggguggcacggcuacaccucccacggggcccacggcgucgcgguggccgccgaccugaaguccacccaggaggccaucaacaagaucaccaagaaccucaacucccugagcgagcuggaggucaagaaccuccagcgccuguccggcgccauggacgagcugcacaacgagauccucgagcuggacgagaagguggacgaccugcgggcggacacgaucagcucccagaucgagcucgccgugcugcugagcaacgaggggaucaucaacuccgaggacgagcaccuccuggcccuggagcgcaagcucaagaagaugcugggccccagcgccgucgacaucgggaacggcugcuucgagaccaagcacaagugcaaccagaccugccuggaccggaucgcggccgggaccuucaacgccggcgaguucucccuccccaccuucgacagccugaacaucacggccgccucccugaacgacgacggccucgacaaccacaccauccugcuguacuacagcaccgcggccuccagccuggccgugacccucaugaucgccaucuucaucguguacauggucucccgcgacaacgugagcugcuccaucugccuguga

SEQ ID NO: 90520 - RNA, 1752 nt, Artificial Sequence
  derived and/or modified CDS sequence (opt1) from hemagglutinin__InfluenzaB__ABN50624
augaaggccaucaucgugcugcucauggucgugaccagcaacgccgaccgcaucugcaccggcaucacguccagcaacagcccccacguggucaagaccgcgacccagggggaggugaacgugaccggcgucaucccgcugacgaccacccccaccaagucccacuucgccaaccugaaggggacgaagacccggggcaagcucugccccaacugccugaacugcaccgaccuggacguggcccucgggcgccccaugugcaucggcaccaucccguccgccaaggccagcauccugcacgaggugcggcccgucacguccggcugcuuccccaucaugcacgaccgcaccaagauccggcagcugcccaaccuccugcgcggguacgagaacauccggcugagcacccacaacgugaucaacgcggagcgcgccccgggcgggcccuaccggcucggcaccuccgggagcugccccaacgugacguccaagagcggcuucuucgccaccauggccugggcggucccccgcgacaacaagaccgccaccaacccgcugacgguggaggugcccuacaucugcaccaagggcgaggaccagaucaccgucuggggguuccacuccgacaacaagaaccagaugaagaaccuguacggcgacagcaacccccagaaguucaccuccagcgugaacggggugacgacccacuacgucucccagaucggcggcuuccccaaccagaccgaggacgggggccucccgcagagcgggcggaucgugguggacuacaugguccagaagcccggcaagaccgggacgaucguguaccagcgcggcgugcugcugccccagaaggucuggugcgccuccggccggagcaaggugaucaaggggagccucccccugaucggcgaggccgacugccugcacgagaaguacgggggccucaacaaguccaagccguacuacaccggggagcacgccaaggcgaucggcaacugccccaucugggucaagacgccccugaagcuggccaacggcaccaaguaccggcccccggccaagcuccugaaggagcgcggguucuucggcgccaucgccggguuccuggagggcgggugggagggcaugaucgcgggcuggcacggguacaccagccacggcgcccacgggguggccguggccgccgaccucaaguccacccaggaggcgaucaacaagaucaccaagaaccugaacagccuguccgagcucgaggucaagaaccugcagcgccugagcggcgccauggacgagcuccacaacgagauccuggagcuggacgagaagguggacgaccuccgggccgacaccaucuccagccagaucgagcuggccgugcugcucuccaacgagggcaucaucaacagcgaggacgagcaccuccuggcccuggagcgcaagcugaagaagaugcuggggcccuccgcggucgacaucggcaacgggugcuucgagacgaagcacaagugcaaccagaccugccucgaccggaucgccgccggcaccuucaacgccggggaguucagccugcccaccuucgacucccugaacaucaccgcggccagccucaacgacgacggccuggacaaccacacgauccugcuguacuacuccaccgccgccagcucccucgccgugacccugaugaucgcgaucuucaucguguacauggucagccgcgacaacguguccugcagcaucugccuguga

SEQ ID NO: 90521 - RNA, 1752 nt, Artificial Sequence
  derived and/or modified CDS sequence (opt1) from hemagglutinin__InfluenzaB__ABN50635
augaaggccaucaucgugcugcucauggucgugaccagcaacgccgaccgcaucugcaccggcaucacguccagcaacagcccccacguggucaagaccgcgacccagggggaggugaacgugaccggcgucaucccgcugacgaccacccccaccaagucccacuucgccaaccugaaggggacgaagacccggggcaagcucugccccaacugccugaacugcaccgaccuggacguggcccucgggcgccccaugugcaucggcaccaucccguccgccaaggccagcauccugcacgaggugcggcccgucacguccggcugcuuccccaucaugcacgaccgcaccaagauccggcagcugcccaaccuccugcgcggguacgagcacauccggcugagcacccacaacgugaucaacgcggagcgcgccccgggcgggcccuaccggcucggcaccuccgggagcugccccaacgugacgucccgcagcggcuucuucgccaccauggccugggcggucccccgggacaacaagaccgccaccaacccgcugacgguggaggugcccuacaucugcaccaagggcgaggaccagaucaccgucuggggguuccacuccgacagcaagacccagaugaagaaccuguacggcgacuccaacccccagaaguucacgagcuccgccaacggggugaccacccacuacgugagccagaucggcggcuuccccaaccagaccgaggacgggggccucccgcaguccgggcgcaucgucguggacuacauggugcagaagcccggcaagacggggaccaucgucuaccagcggggcgugcugcugccccagaagguguggugcgccagcggccgcagcaaggucaucaaggggucccucccccugaucggcgaggccgacugccugcacgagaaguacgggggccucaacaagagcaagccguacuacaccggggagcacgcgaaggccaucggcaacugccccaucugggugaagacgccccugaagcuggccaacggcaccaaguaccggcccccggccaagcuccugaaggagcgcggguucuucggcgccaucgcgggguuccuggagggcgggugggagggcaugaucgccggcuggcacggguacaccucccacggcgcccacggggucgccguggccgcggaccucaagagcacccaggaggccaucaacaagaucaccaagaaccugaacucccugagcgagcucgaggugaagaaccugcagcggcuguccggcgccauggacgagcuccacaacgagauccuggagcuggacgagaaggucgacgaccuccgcgccgacacgaucagcucccagaucgagcuggccgugcugcucagcaacgagggcaucaucaacuccgaggacgagcaccuccuggcgcuggagcggaagcugaagaagaugcuggggcccagcgccguggacaucggcaacgggugcuucgagaccaagcacaagugcaaccagaccugccucgaccgcaucgccgccggcaccuucaacgcgggggaguucucccugcccaccuucgacagccugaacaucacggccgccucccucaacgacgacggccuggacaaccacaccauccugcuguacuacagcaccgccgccuccagccucgcggucacccugaugaucgccaucuucaucguguacauggugucccgggacaacgucagcugcagcaucugccuguga

SEQ ID NO: 90522 - RNA, 1752 nt, Artificial Sequence
  derived and/or modified CDS sequence (opt1) from hemagglutinin__InfluenzaB__ABN50646
augaaggccaucaucgugcugcucauggucgugaccagcaacgccgaccgcaucugcaccggcaucacguccagcaacagcccccacguggucaagaccgcgacccagggggaggugaacgugaccggcgucaucccgcugacgaccacccccaccaagucccacuucgccaaccugaaggggacgaagacccggggcaagcucugccccaacugccugaacugcaccgaccuggacguggcccucgggcgccccaugugcaucggcaccaucccguccgccaaggccagcauccugcacgaggugcggcccgucacguccggcugcuuccccaucaugcacgaccgcaccaagauccggcagcugcccaaccuccugcgcggguacgagcacauccggcugagcacccacaacgugaucaacgcggagcgcgccccgggcgggcccuaccggcucggcaccuccgggagcugccccaacgugacgucccgcagcggcuucuucgccaccauggccugggcggucccccgggacaacaagaccgccaccaacccgcugacgguggaggugcccuacaucugcaccaagggcgaggaccagaucaccgucuggggguuccacuccgacaacaagaaccagaugaagaaccuguacggcgacagcaacccccagaaguucaccuccagcgccaacggggugacgacccacuacgugucccagaucggcggcuuccccaaccagaccgaggacgggggccucccgcagagcgggcgcaucgucguggacuacauggugcagaagcccggcaagaccgggacgaucgucuaccagcggggcgugcugcugccccagaagguguggugcgccuccggccgcagcaaggucaucaaggggagccucccccugaucggcgaggccgacugccugcacgagaaguacgggggccucaacaaguccaagccguacuacaccggggagcacgcgaaggccaucggcaacugccccaucugggugaagacgccccugaagcuggccaacggcaccaaguaccggcccccggccaagcuccugaaggagcgcggguucuucggcgccaucgcgggguuccuggagggcgggugggagggcaugaucgccggcuggcacggguacaccagccacggcgcccacggggucgccguggccgcggaccucaaguccacccaggaggccaucaacaagaucaccaagaaccugaacagccuguccgagcucgaggugaagaaccugcagcggcugagcggcgccauggacgagcuccacaacgagauccuggagcuggacgagaaggucgacgaccuccgcgccgacaccaucuccagccagaucgagcuggccgugcugcucuccaacgagggcaucaucaacagcgaggacgagcaccuccuggcgcuggagcggaagcugaagaagaugcuggggcccuccgccguggacaucggcaacgggugcuucgagacgaagcacaagugcaaccagaccugccucgaccgcaucgccgccggcaccuucaacgcgggggaguucagccugcccaccuucgacucccugaacaucaccgccgccagccucaacgacgacggccuggacaaccacacgauccugcuguacuacuccaccgccgccagcucccucgcggucacccugaugaucgccaucuucaucguguacauggugagccgggacaacgucuccugcagcaucugccuguga

SEQ ID NO: 90523 - RNA, 1752 nt, Artificial Sequence
  derived and/or modified CDS sequence (opt1) from hemagglutinin__InfluenzaB__ABN50657
augaaggccaucaucgugcugcucauggucgugaccagcaacgccgaccgcaucugcaccggcaucacguccagcaacagcccccacguggucaagaccgcgacccagggggaggugaacgugaccggcgucaucccgcugacgaccacccccaccaagucccacuucgccaaccugaaggggacgaagacccggggcaagcucugccccaacugccugaacugcaccgaccuggacguggcccucgggcgccccaugugcgugggcaucaccccguccgccaaggccagcauccugcacgagguccggcccgugacguccggcugcuuccccaucaugcacgaccgcaccaagauccggcagcugcccaaccuccugcgcggguacgagaacauccggcugagcacccagaacgugaucaacgcggagaaggccccgggcgggcccuaccgccucggcaccuccgggagcugccccaacgucacgucccggaccggcuucuucgccaccauggccugggcggugccccgcgacaacaagaccgccacgaacccgcugaccguggagguccccuacaucugcaccaagggcgaggaccagaucaccguguggggguuccacagcgacaacaagacgcagaugaagaaccuguacggcgacuccaacccccagaaguucaccagcuccgccaacggggugaccacccacuacgucagccagaucggcggcuuccccgaccagacggaggacgggggccucccgcaguccgggcggaucgugguggacuacaugguccagaagcccggcaagaccgggaccaucguguaccagcgcggcauccugcugccccagaagguguggugcgccagcggccgguccaaggucaucaaggggagccucccccugaucggcgaggccgacugccugcacgagaaguacgggggccucaacaagagcaagccguacuacaccggggagcacgcgaaggccaucggcaacugccccaucugggugaagacgccccugaagcuggccaacggcaccaaguaccggcccccggccaagcuccugaaggagcgcggguucuucggcgccaucgcgggguuccuggagggcgggugggagggcaugaucgccggcuggcacggguacaccucccacggcgcccacggggucgccguggccgcggaccucaagagcacccaggaggccaucaacaagaucacgaagaaccugaacucccugagcgagcucgaggugaagaaccugcagcgccuguccggcgccauggacgagcuccacaacgagauccuggagcuggacgagaaggucgacgaccuccgggccgacaccaucagcucccagaucgagcuggccgugcugcucagcaacgagggcaucaucaacuccgaggacgagcaccuccuggcgcuggagcgcaagcugaagaagaugcuggggcccagcgccguggacaucggcaacgggugcuucgagaccaagcacaagugcaaccagaccugccucgaccggaucgccgccggcaccuucaacgcgggggaguucucccugcccacguucgacagccugaacaucaccgccgccucccucaacgacgacggccuggacaaccacaccauccugcuguacuacagcaccgccgccuccagccucgcggucacgcugaugaucgccaucuucaucguguacauggugucccgcgacaacgucagcugcuccaucugccuguga

SEQ ID NO: 90524 - RNA, 1755 nt, Artificial Sequence
  derived and/or modified CDS sequence (opt1) from hemagglutinin__InfluenzaB__ABN50679
augaaggccaucaucgugcugcucauggucgugaccagcaacgccgaccgcaucugcaccggcaucacguccagcaacagcccccacguggucaagaccgcgacccagggggaggugaacgugaccggcgucaucccgcugacgaccacccccaccaagucccacuucgccaaccugaaggggacgaagacccggggcaagcucugccccaacugccugaacugcaccgaccuggacguggcccucgggcgccccaugugcgugggcaccacgccguccgccaaggccagcauccugcacgagguccggcccgugaccuccggcugcuuccccaucaugcacgaccgcaccaagauccggcagcugcccaaccuccugcgcggguacgagaacauccggcugagcacccagaacgugaucaacgcggagaaggccccgggcgggcccuaccgccucggcacguccgggagcugccccaacgccaccucccggagcggcuucuucgccaccauggcgugggccgucccccgcgacaacaacaagaccgccacgaacccgcugaccguggaggugcccuacaucugcaccaagggcgaggaccagaucaccgucuggggguuccacuccgacgacaagacgcagaugaagaaccuguacggcgacagcaacccccagaaguucaccuccagcgccaacggggugaccacccacuacgugucccagaucggcggcuuccccgaccagacggaggacgggggccucccgcagagcgggcggaucgucguggacuacauggugcagaagcccggcaagaccgggaccaucgucuaccagcgcggcgugcugcugccccagaagguguggugcgccuccggccggagcaaggucaucaaggggagccucccccugaucggcgaggcggacugccugcacgagaaguacgggggccucaacaaguccaagccguacuacaccggggagcacgccaaggccaucggcaacugccccaucugggugaagacgccccugaagcuggccaacggcaccaaguaccggcccccggccaagcuccugaaggagcgcggguucuucggcgcgaucgccggguuccuggagggcgggugggagggcaugaucgccggcuggcacggguacaccagccacggcgcccacggggucgccguggcggccgaccucaaguccacccaggaggccaucaacaagaucacgaagaaccugaacagccuguccgagcucgaggugaagaaccugcagcgccugagcggcgccauggacgagcuccacaacgagauccuggagcuggacgagaaggucgacgaccuccgggccgacaccaucuccagccagaucgagcuggcggugcugcucuccaacgagggcaucaucaacagcgaggacgagcaccuccuggcccuggagcgcaagcugaagaagaugcuggggcccuccgccguggacaucggcaacgggugcuucgagaccaagcacaagugcaaccagaccugccucgaccggaucgccgcgggcaccuucaacgccggggaguucagccugcccacguucgacucccugaacaucaccgccgccagccucaacgacgacggccuggacaaccacaccauccugcuguacuacuccaccgccgcgagcucccucgccgucacgcugaugaucgccaucuucaucguguacauggugagccgcgacaacgucuccugcagcaucugccuguga

SEQ ID NO: 90525 - RNA, 1755 nt, Artificial Sequence
  derived and/or modified CDS sequence (opt1) from hemagglutinin__InfluenzaB__ABN50690
augaaggccaucaucgugcugcucauggucgugaccagcaacgccgaccgcaucugcaccggcaucacguccagcaacagcccccacguggucaagaccgcgacccagggggaggugaacgugaccggcgucaucccgcugacgaccacccccaccaagucccacuucgccaaccugaaggggacgaagacccggggcaagcucugccccaacugccugaacugcaccgaccuggacguggcccucgggcgccccaugugcgugggcaccacgccguccgccaaggccagcauccugcacgagguccggcccgugaccuccggcugcuuccccaucaugcacgaccgcaccaagauccggcagcugcccaaccuccugcgcggguacgagaacauccggcugagcacccagaacgugaucaacgcggagaaggccccgggcgggcccuaccgccucggcacguccgggagcugccccaacgccaccucccggagcggcuucuucgccaccauggcgugggccgucccccgcgacaacaacaagaccgccacgaacccgcugaccguggaggugcccuacgucugcaccgagggcgaggaccagaucaccguguggggguuccacuccgacaacaagacgcagaugaagaaccuguacggcgacagcaacccccagaaguucaccuccagcgccaacggggugaccacccacuacgucucccagaucggcggcuuccccgaccagacggaggacgggggccucccgcagagcgggcggaucgugguggacuacaugguccagaagcccggcaagaccgggaccaucguguaccagcgcggcgugcugcugccccagaaggucuggugcgccuccggccggagcaaggugaucaaggggagccucccccugaucggcgaggcggacugccugcacgagaaguacgggggccucaacaaguccaagccguacuacaccggggagcacgccaaggccaucggcaacugccccaucugggucaagacgccccugaagcuggccaacggcaccaaguaccggcccccggccaagcuccugaaggagcgcggguucuucggcgcgaucgccggguuccuggagggcgggugggagggcaugaucgccggcuggcacggguacaccagccacggcgcccacgggguggccguggcggccgaccucaaguccacccaggaggccaucaacaagaucacgaagaaccugaacagccuguccgagcucgaggucaagaaccugcagcgccugagcggcgccauggacgagcuccacaacgagauccuggagcuggacgagaagguggacgaccuccgggccgacaccaucuccagccagaucgagcuggcggugcugcucuccaacgagggcaucaucaacagcgaggacgagcaccuccuggcccuggagcgcaagcugaagaagaugcuggggcccuccgccgucgacaucggcaacgggugcuucgagaccaagcacaagugcaaccagaccugccucgaccggaucgccgcgggcaccuucaacgccggggaguucagccugcccacguucgacucccugaacaucaccgccgccagccucaacgacgacggccuggacaaccacaccauccugcuguacuacuccaccgccgcgagcucccucgccgugacgcugaugaucgccaucuucaucguguacauggucagccgcgacaacguguccugcagcaucugccuguga

SEQ ID NO: 90526 - RNA, 1752 nt, Artificial Sequence
  derived and/or modified CDS sequence (opt1) from hemagglutinin__InfluenzaB__ABN50701
augaaggccaucaucgugcugcucauggucgugaccagcaacgccgaccgcaucugcaccggcaucacguccagcaacagcccccacguggucaagaccgcgacccagggggaggugaacgugaccggcgucaucccgcugacgaccacccccaccaagucccacuucgccaaccugaaggggacgaagacccggggcaagcucugccccaacugccugaacugcaccgaccuggacguggcccucgggcgccccaugugcgugggcaucaccccguccgccaaggccagcauccugcacgagguccggcccgugacguccggcugcuuccccaucaugcacgaccgcaccaagauccggcagcugcccaaccuccugcgcggguacgagaacauccggcugagcacccagaacgugaucaacgcggagaaggccccgggcgggcccuaccgccucggcaccuccgggagcugccccaacgucacgucccggaccggcuucuucgccaccauggccugggcggugccccgcgacaacaagaccgccacgaacccgcugaccguggagguccccuacaucugcaccaagggcgaggaccagaucaccguguggggguuccacagcgacaacaaggcccagaugaagaaccuguacggcgacuccaacccccagaaguucacgagcuccgccaacggggugaccacccacuacgucagccagaucggcggcuuccccgaccagaccgaggacgggggccucccgcaguccgggcggaucgugguggacuacaugguccagaagcccggcaagacggggaccaucguguaccagcgcggcauccugcugccccagaagguguggugcgccagcggccgguccaaggucaucaaggggagccucccccugaucggcgaggcggacugccugcacgagaaguacgggggccucaacaagagcaagccguacuacaccggggagcacgccaaggccaucggcaacugccccaucugggugaagacgccccugaagcuggccaacggcaccaaguaccggcccccggccaagcuccugaaggagcgcggguucuucggcgcgaucgccggguuccuggagggcgggugggagggcaugaucgccggcuggcacggguacaccucccacggcgcccacggggucgccguggcggccgaccucaagagcacccaggaggccaucaacaagaucaccaagaaccugaacucccugagcgagcucgaggugaagaaccugcagcgccuguccggcgccauggacgagcuccacaacgagauccuggagcuggacgagaaggucgacgaccuccgggccgacacgaucagcucccagaucgagcuggcggugcugcucagcaacgagggcaucaucaacuccgaggacgagcaccuccuggcccuggagcgcaagcugaagaagaugcuggggcccagcgccguggacaucggcaacgggugcuucgagaccaagcacaagugcaaccagaccugccucgaccggaucgccgcgggcaccuucaacgccggggaguucucccugcccaccuucgacagccugaacaucacggccgccucccucaacgacgacggccuggacaaccacaccauccugcuguacuacagcaccgccgcguccagccucgccgucacccugaugaucgccaucuucaucguguacauggugucccgcgacaacgucagcugcuccaucugccuguga

SEQ ID NO: 90527 - RNA, 1755 nt, Artificial Sequence; identical to SEQ ID NO: 90525
  derived and/or modified CDS sequence (opt1) from hemagglutinin__InfluenzaB__ABN50712

SEQ ID NO: 90528 - RNA, 1755 nt, Artificial Sequence
  derived and/or modified CDS sequence (opt1) from hemagglutinin__InfluenzaB__ABN50723
augaaggccaucaucgugcugcucauggucgugaccagcaacgccgaccgcaucugcaccggcaucacguccagcaacagcccccacguggucaagaccgcgacccagggggaggugaacgugaccggcgucaucccgcugacgaccacccccaccaagucccacuucgccaaccugcgggggacgaagacccgcggcaagcucugcccgaccugccugaacugcaccgaccuggacguggcccucgggcggcccaugugcgugggcacgacccccuccgccaaggccagcauccugcacgagguccgccccgugaccuccggcugcuuccccaucaugcacgaccggaccaagauccgccagcugcccaaccuccugcggggguacgagaagauccgccugagcacgcagaacgugaucaacgcggagaaggccccgggcgggcccuaccggcucggcaccuccgggagcugccccaacgccaccucccgcagcggcuucuucgccaccauggcgugggccgucccccgggacaacaacaagacggccaccaacccgcugaccguggaggugcccuacaucugcaccaaggaggaggaccagaucacggucuggggcuuccacuccgacaacaagacccagaugaagaaccuguacggggacagcaacccccagaaguucaccuccagcgccaacggcgugaccacgcacuacgugucccagaucgggggcuuccccgaccagaccgaggacggcgggcucccgcagagcggccgcaucgucguggacuacauggugcagaagcccgggaagaccggcaccaucgucuaccagcgggggauccugcugccccagaagguguggugcgccuccggccgcagcaaggugaucaagggcagccucccccugaucggggaggcggacugccugcacgagaaguacggcgggcucaacaaguccaagccguacuacacgggcgagcacgccaaggccaucgggaacugccccaucugggucaagacgccccugaagcuggccaacggcaccaaguaccggcccccggccaagcuccugaaggagcgcggcuucuucggggcgaucgccggcuuccuggagggcgggugggaggggaugaucgccggcuggcacggcuacaccagccacggggcccacggcguggccgucgcggccgaccucaaguccacccaggaggccaucaacaagaucaccaagaaccugaacagccuguccgagcucgaggugaagaaccugcagcggcugagcggggccauggacgagcuccacaacgagauccuggagcuggacgagaagguggacgaccuccgcgccgacaccaucuccagccagaucgagcuggcgguccugcucuccaacgagggcaucaucaacagcgaggacgagcaccuccuggcccuggagcggaagcugaagaagaugcugggccccuccgccguggacaucgggaacggcugcuucgagaccaagcacaagugcaaccagaccugccucgaccgcaucgccgcggggacguucaacgccggcgaguucagccugcccaccuucgacucccugaacaucaccgccgccagccucaacgacgacgggcuggacaaccacaccauccugcuguacuacuccacggccgcgagcucccucgccgugacccugaugaucgccaucuucaucgucuacaugaucagccgggacaacguguccugcagcaucugccuguga

SEQ ID NO: 90529 - RNA, 1755 nt, Artificial Sequence
  derived and/or modified CDS sequence (opt1) from hemagglutinin__InfluenzaB__ABN50734
augaaggccaucaucgugcugcucauggucgugaccagcaacgccgaccgcaucugcaccggcaucacguccagcaacagcccccacguggucaagaccgcgacccagggggaggugaacgugaccggcgccaucccgcugacgaccacccccaccaagucccacuucgccaaccugaaggggacgaagacccggggcaagcucugcccgaccugccugaacugcaccgaccuggacgucgcccucgggcgccccaugugcgugggcaucacgcccuccgccaaggcgagcauccugcacgaggugcggcccgucaccuccggcugcuuccccaucaugcacgaccgcaccaagauccggcagcugcccaaccuccugcgcggguacgagaagauccggcugagcacccagaacgugaucaacgccgagaaggccccgggcgggcccuaccgccucggcacguccgggagcugccccaacgccaccucccggagcggcuucuucaccaccauggcgugggccgugccccgcgacaacaacaagacggccaccaacccgcugaccgucgaggugccccacaucugcaccaaggaggaggaccagaucacgguguggggcuuccacuccgacgacaagacccagaugaagaaccuguacggggacagcaacccccagaaguucaccuccagcaccaacggcaucacgacccacuacgucucccagaucgggggcuuccccgaccagaccgaggacggcgggcucccgcagagcggccggaucgugguggacuacaugguccagaagcccgggaagaccggcacgaucguguaccagcgcgggauccugcugccccagaagguguggugcgccuccggccggagcaaggucaucaagggcagccucccccugaucggggaggccgacugccugcacgagaaguacggcgggcucaacaaguccaagccguacuacaccggcgagcacgcgaaggccaucgggaacugccccaucugggugaagacgccccugaagcuggccaacggcaccaaguaccggcccccggccaagcuccugaaggagcgcggcuucuucggggccaucgcgggcuuccuggagggcgggugggaggggaugaucgccggcuggcacggcuacaccagccacggggcccacggcguggccgucgccgcggaccucaaguccacccaggaggccaucaacaagaucaccaagaaccugaacagccuguccgagcucgaggugaagaaccugcagcgccugagcggggccauggacgagcuccacaacgagauccuggagcuggacgagaaggucgacgaccuccgggccgacaccaucuccagccagaucgagcuggccgugcugcucuccaacgagggcaucaucaacagcgaggacgagcaccuccuggcgcuggagcgcaagcugaagaagaugcugggccccuccgccguggacaucgggaacggcugcuucgagaccaagcacaagugcaaccagacgugccucgaccggaucgccgccgggaccuucaacgcgggcgaguucagccugcccaccuucgacucccugaacaucaccgccgccagccucaacgacgacgggcuggacaaccacacgauccugcuguacuacuccaccgccgccagcucccucgcggucacccugaugaucgccaucuucaucguguacaugaucagccgcgacaacguguccugcagcaucugccuguga

SEQ ID NO: 90530 - RNA, 1758 nt, Artificial Sequence
  derived and/or modified CDS sequence (opt1) from hemagglutinin__InfluenzaB__ABN50745
augaaggccaucaucgugcugcucauggucgugaccagcaacgccgaccgcaucugcaccggcaucacguccagcaacagcccccacguggucaagaccgcgacccagggggaggugaacgugaccggcgucaucccgcugacgaccacccccaccaagagccacuucgccaaccugaaggggacgaagacccggggcaagcucugccccaagugccugaacugcaccgaccuggacguggcccucgggcgccccaagugcaccggcaacaucccguccgccaaggugagcauccugcacgagguccggcccgugacguccggcugcuuccccaucaugcacgaccgcaccaagauccggcagcugcccaaccuccugcgcggguacgagcacauccggcugagcacccacaacgugaucaacgccgagaaggcgccgggcgggcccuacaagaucggcaccuccgggagcugccccaacaucacgaacggcaacggcuucuucgccaccauggccugggccguccccaagaacgacaacaacaagaccgcgaccaacucccucacgaucgaggugccguacaucugcaccgagggggaggaccagaucaccguguggggcuuccacagcgacaacgagacccagauggccaagcuguacggggacuccaagccccagaaguucacgagcuccgccaacggcgucaccacccacuacgugagccagaucggcggguuccccaaccagaccgaggacggcgggcugccccaguccggccgcaucguggucgacuacauggugcagaaguccgggaagacgggcaccaucaccuaccagcggggcauccuccugccgcagaagguguggugcgccuccgggcgcagcaaggucaucaagggcagccugccccucaucggggaggccgacugccugcacgagaaguacggcgggcugaacaaguccaagcccuacuacaccggcgagcacgcgaaggccaucggcaacugccccaucugggugaagacgccgcucaagcuggccaacgggaccaaguaccggccgcccgccaagcugcucaaggagcgcggcuucuucggggccaucgcgggcuuccuggagggcgggugggagggcaugaucgccggguggcacggcuacaccagccacggggcccacggcguggccgucgccgcggaccugaaguccacccaggaggccaucaacaagaucacgaagaaccucaacagccuguccgagcuggaggugaagaaccuccagcggcugagcggcgccauggacgagcugcacaacgagauccucgagcuggacgagaaggucgacgaccugcgcgccgacaccaucuccagccagaucgagcucgccgugcugcuguccaacgaggggaucaucaacagcgaggacgagcaccuccuggcgcuggagcggaagcucaagaagaugcugggccccuccgccguggagaucgggaacggcugcuucgagaccaagcacaagugcaaccagaccugccuggaccgcaucgccgccgggaccuucaacgcgggcgaguucagccuccccacguucgacucccugaacaucaccgccgccagccugaacgacgacggccucgacaaccacaccauccugcuguacuacuccaccgccgccagcucccuggcggucacgcucaugaucgccaucuucgugguguacauggucagccgggacaacguguccugcagcaucugccuguga

SEQ ID NO: 90531 - RNA, 1752 nt, Artificial Sequence
  derived and/or modified CDS sequence (opt1) from hemagglutinin__InfluenzaB__ABN51184
augaaggccaucaucgugcugcucauggucgugaccagcaacgccgaccgcaucugcaccggcaucacguccagcaacagcccccacguggucaagaccgcgacccagggggaggugaacgugaccggcgucaucccgcugacgaccacccccaccaagucccacuucgccaaccugaaggggacgaagacccggggcaagcucugccccaacugccugaacugcaccgaccuggacguggcccucgggcgccccaugugcaucggcaccaucccguccgccaaggccagcauccugcacgaggugcggcccgucacguccggcugcuuccccaucaugcacgaccgcaccaagauccggcagcugcccaaccuccugcgcggguacgagaacauccggcugagcacccacaacgugaucaacgcggagcgcgccccgggcgggcccuaccggcucggcaccuccgggagcugccccaacgugacguccaagagcggcuucuucgccaccauggccugggcggucccccgcgacaacaagaccgccaccaacccgcugacgguggaggugcccuacaucugcaccaagggcgaggaccagaucaccgucuggggguuccacuccgacaacaagauccagaugaagaaccuguacggcgacagcaacccccagaaguucaccuccagcgccaacggggugacgacccacuacgugucccagaucggcggcuuccccaaccagaccgaggacgggggccucccgcagagcgggcggaucgucguggacuacauggugcagaagcccggcaagaccgggacgaucgucuaccagcgcggcgugcugcugccccagaagguguggugcgccuccggccggagcaaggucaucaaggggagccucccccugaucggcgaggccgacugccugcacgagaaguacgggggccucaacaaguccaagccguacuacaccggggagcacgcgaaggccaucggcaacugccccaucugggugaagacgccccugaagcuggccaacggcaccaaguaccggcccccggccaagcuccugaaggagcgcggguucuucggcgccaucgcgggguuccuggagggcgggugggagggcaugaucgccggcuggcacggguacaccagccacggcgcccacggggucgccguggccgcggaccucaaguccacccaggaggccaucaacaagaucaccaagaaccugaacagccuguccgagcucgaggugaagaaccugcagcgccugagcggcgccauggacgagcuccacaacgagauccuggagcuggacgagaaggucgacgaccuccgggccgacaccaucuccagccagaucgagcuggccgugcugcucuccaacgagggcaucaucaacagcgaggacgagcaccuccuggcgcuggagcgcaagcugaagaagaugcuggggcccuccgccguggacaucggcaacgggugcuucgagacgaagcacaagugcaaccagaccugccucgaccggaucgccgccggcaccuucaacgcgggggaguucagccugcccaccuucgacucccugaacaucaccgccgccagccucaacgacgacggccuggacaaccacacgauccugcuguacuacuccaccgccgccagcucccucgcggucacccugaugaucgccaucuucaucguguacauggugagccgcgacaacgucuccugcagcaucugccuguga

SEQ ID NO: 90532 - RNA, 1752 nt, Artificial Sequence
  derived and/or modified CDS sequence (opt1) from hemagglutinin__InfluenzaB__ABN51195
augaaggccaucaucgugcugcucauggucgugaccagcaacgccgaccgcaucugcaccggcaucacguccagcaacagcccccacguggucaagaccgcgacccagggggaggugaacgugaccggcgucaucccgcugacgaccacccccaccaagucccacuucgccaaccugaaggggacgaagacccggggcaagcucugccccaacugccugaacugcaccgaccuggacguggcccucgggcgccccaugugcaucggcaccaucccguccgccaaggccagcauccugcacgaggugcggcccgucacguccggcugcuuccccaucaugcacgaccgcaccaagauccggcagcugcccaaccuccugcgcggguacgagaacauccggcugagcacccacaacgugaucaacgcggagcgcgccccgggcgggcccuaccggcucggcaccuccgggagcugccccaacgugacgucccgcagcggcuucuucgccaccauggccugggcggucccccgggacaacaagaccgccaccaacccgcugacgguggaggugcccuacaucugcaccaagggcgaggaccagaucaccgucuggggguuccacuucgacaacaagauccagaugaagaaccuguacggcgacuccaacccccagaaguucaccagcuccgccaacggggugacgacccacuacgugagccagaucggcggcuuccccaaccagaccgaggacgggggccucccgcaguccgggcgcaucgucguggacuacauggugcagaagcccggcaagaccgggacgaucgucuaccagcggggcgugcugcugccccagaagguguggugcgccagcggccgcuccaaggucaucaaggggagccucccccugaucggcgaggccgacugccugcacgagaaguacgggggccucaacaagagcaagccguacuacaccggggagcacgcgaaggccaucggcaacugccccaucugggugaagacgccccugaagcuggccaacggcaccaaguaccggcccccggccaagcuccugaaggagcgcggguucuucggcgccaucgcgggguuccuggagggcgggugggagggcaugaucgccggcuggcacggguacaccucccacggcgcccacggggucgccguggccgcggaccucaagagcacccaggaggccaucaacaagaucaccaagaaccugaacucccugagcgagcucgaggugaagaaccugcagcggcuguccggcgccauggacgagcuccacaacgagauccuggagcuggacgagaaggucgacgaccuccgcgccgacaccaucagcucccagaucgagcuggccgugcugcucagcaacgagggcaucaucaacuccgaggacgagcaccuccuggcgcuggagcggaagcugaagaagaugcuggggcccagcgccguggacaucggcaacgggugcuucgagacgaagcacaagugcaaccagaccugccucgaccgcaucgccgccggcaccuucaacgcgggggaguucucccugcccaccuucgacagccugaacaucaccgccgccucccucaacgacgacggccuggacaaccacacgauccugcuguacuacagcaccgccgccuccagccucgcggucacccugaugaucgccaucuucaucguguacauggugucccgggacaacgucagcugcuccaucugccuguga

SEQ ID NO: 90533 - RNA, 1758 nt, Artificial Sequence
  derived and/or modified CDS sequence (opt1) from hemagglutinin__InfluenzaB__ABN58661
augaaggccaucaucgugcugcucauggucgugaccagcaacgccgaccgcaucugcaccggcaucacguccagcaacagcccccacguggucaagaccgcgacccagggggaggugaacgugaccggcgucaucccgcugacgaccacccccaccaagagccacuucgccaaccugaaggggacgaagacccggggcaagcucugccccaagugccugaacugcaccgaccuggacguggcccucgggcgccccaagugcaccggcacgaucccguccgccaaggugagcauccugcacgaggucaagcccgugaccuccggcugcuuccccaucaugcacgaccggaccaagauccgccagcugcccaaccuccugcggggguacgagcacauccgccugagcacccacaacgugaucaacgccgagaaggcgccgggcgggcccuacaagaucggcacguccgggagcugccccaacgucaccaacggcaacggcuucuucgccaccauggccugggccgugcccaagaacgacaacaacaagaccgcgacgaacucccucaccguggaggucccguacaucugcaccgagggggaggaccagaucaccguguggggcuuccacagcgacaacgagacgcagauggccaagcuguacggggacuccaagccccagaaguucaccagcuccgccaacggcgugaccacccacuacgucagccagaucggcggguuccccaaccaggccgaggacggcgggcugccccaguccggccggaucgugguggacuacaugguccagaaguccgggaagacgggcaccaucaccuaccagcgcggcauccuccugccgcagaagguguggugcgccuccgggcggagcaaggugaucaagggcagccugccccucaucggggaggcggacugccugcacgagaaguacggcgggcugaacaaguccaagcccuacuacaccggcgagcacgccaaggccaucggcaacugccccaucugggucaagacgccgcucaagcuggccaacgggaccaaguaccgcccgcccgccaagcugcucaaggagcggggcuucuucggggcgaucgccggcuuccuggagggcgggugggagggcaugaucgccggguggcacggcuacaccagccacggggcccacggcguggccgucgcggccgaccugaaguccacccaggaggccaucaacaagaucacgaagaaccucaacagccuguccgagcuggaggugaagaaccuccagcgccugagcggcgccauggacgagcugcacaacgagauccucgagcuggacgagaagguggacgaccugcgggccgacaccaucuccagccagaucgagcucgcgguccugcuguccaacgaggggaucaucaacagcgaggacgagcaccuccuggcccuggagcgcaagcucaagaagaugcugggccccuccgccguggagaucgggaacggcugcuucgagaccaagcacaagugcaaccagaccugccuggaccggaucgccgcggggaccuucaacgccggcgaguucagccuccccacguucgacucccugaacaucaccgccgccagccugaacgacgacggccucgacaaccacaccauccugcuguacuacuccaccgccgcgagcucccuggccgugacgcucaugaucgccaucuucaucgucuacauggugagccgcgacaacguguccugcagcaucugccuguga

SEQ ID NO: 90534 - RNA, 1755 nt, Artificial Sequence; identical to SEQ ID NO: 90422
  derived and/or modified CDS sequence (opt1) from hemagglutinin__InfluenzaB__ABN59445

SEQ ID NO: 90535 - RNA, 1755 nt, Artificial Sequence
  derived and/or modified CDS sequence (opt1) from hemagglutinin__InfluenzaB__ABO72377
augaaggccaucaucgugcugcucauggucgugaccagcaacgccgaccgcaucugcaccggcaucacguccagcaacagcccccacguggucaagaccgcgacccagggggaggugaacgugaccggcgccaucccgcugacgaccacccccaccaagucccacuucgccaaccugaaggggacgaagacccggggcaagcucugcccgaccugcuucaacugcaccgaccuggacgucgcccuggggcgccccaugugcgugggcaucacgcccuccgccaaggcgagcauccuccacgaggugcggcccgucaccuccggcugcuuccccaucaugcacgaccgcaccaagauccggcagcugcccaaccugcuccgcggguacgagaagauccggcugagcacccagaacgugaucgacgccgagaaggccccgggcgggcccuaccgccugggcacguccgggagcugccccaacgccaccuccaagagcggcuucuucgcgaccauggccugggccgugccccgggacaacaacaagaccgccacgaacccgcucaccgucgaggugccccacaucugcaccaaggaggaggaccagaucaccguguggggcuuccacuccgacaacaagacgcagaugaagaaccuguacggggacagcaacccccagaaguucaccuccagcgccaacggcaucaccacccacuacgucucccagaucgggggcuuccccgaccagacggaggacggcgggcugccgcagagcggccgcaucgugguggacuacaugguccagaagcccgggaagaccggcaccaucguguaccagcgggggauccuccugccccagaagguguggugcgcguccggccgcagcaaggucaucaagggcagccugccccucaucggggaggccgacugccugcacgagaaguacggcgggcugaacaaguccaagccguacuacaccggcgagcacgccaaggccaucgggaacugccccaucugggugaagacgccccucaagcuggccaacggcaccaaguaccggcccccggcgaagcugcucaaggagcgcggcuucuucggggccaucgccggcuuccuggagggcgggugggaggggaugaucgccggcuggcacggcuacaccagccacggggcccacggcguggcggucgccgccgaccugaaguccacccaggaggccaucaacaagaucacgaagaaccucaacagccuguccgagcuggaggugaagaaccuccagcggcugagcggggccauggacgagcugcacaacgagauccucgagcuggacgagaaggucgacgaccugcgcgcggacaccaucuccagccagaucgagcucgccgugcugcuguccaacgagggcaucaucaacagcgaggacgagcaccuccuggcccuggagcggaagcucaagaagaugcugggccccuccgccguggacaucgggaacggcugcuucgagaccaagcacaagugcaaccagaccugccuggaccgcaucgcggccgggaccuucaacgccggcgaguucagccuccccacguucgacucccugaacaucaccgccgccagccugaacgacgacgggcucgacaaccacaccauccugcuguacuacuccaccgcggccagcucccuggccgucacgcucaugaucgccaucuucaucguguacaugaucagccgggacaacguguccugcagcaucugccuguga

SEQ ID NO: 90536 - RNA, 1755 nt, Artificial Sequence; identical to SEQ ID NO: 90429
  derived and/or modified CDS sequence (opt1) from hemagglutinin__InfluenzaB__ABR15973

SEQ ID NO: 90537 - RNA, 1752 nt, Artificial Sequence
  derived and/or modified CDS sequence (opt1) from hemagglutinin__InfluenzaB__ABR15995
augaaggccaucaucgugcugcucauggucgugaccagcaacgccgaccgcaucugcaccggcaucacguccagcaacagcccccacguggucaagaccgcgacccagggggaggugaacgugaccggcgucaucccgcugacgaccacccccaccaagucccacuucgccaaccugaaggggacgaagacccggggcaagcucugccccaacugccugaacugcaccgaccuggacguggcccucgggcgccccaugugcaucggcaucaccccguccgccaaggccagcauccugcacgaggugcggcccgucacguccggcugcuuccccaucaugcacgaccgcaccaagauccggcagcugcccaaccuccugcgcggguacgagcacauccggcugagcacccacaacgugaucaacgcggagcgcgccccgggcgggcccuaccggcucggcaccuccgggagcugccccaacgugacgucccgcagcggcuucuucgccaccauggccugggcggucccccgggacaacaagaccgccaccaacccgcugacgguggaggugcccuacaucugcaccaagggcgaggaccagaucaccgucuggggguuccacuccgacuacaagacccagaugaagaaccuguacggcgacagcaacccccagaaguucacguccagcgccaacgggaucaccacccacuacgugucccagaucggcggcuuccccaaccagaccgaggacgggggccucccgcagagcgggcgcaucguggucgacuacauggugcagaagcccggcaagacggggaccaucguguaccagcggggcguccugcugccccagaagguguggugcgccuccggccgcagcaaggugaucaaggggagccucccccugaucggcgaggccgacugccugcacgagaaguacgggggccucaacaaguccaagccguacuacaccggggagcacgcgaaggccaucggcaacugccccaucugggucaagacgccccugaagcuggccaacggcaccaaguaccggcccccggccaagcuccugaaggagcgcggguucuucggcgccaucgcgggguuccuggagggcgggugggagggcaugaucgccggcuggcacggguacaccagccacggcgcccacgggguggccgucgccgcggaccucaaguccacccaggaggccaucaacaagaucaccaagaaccugaacagccuguccgagcucgaggugaagaaccugcagcggcugagcggcgccauggacgagcuccacaacgagauccuggagcuggacgagaagguggacgaccuccgcgccgacacgaucuccagccagaucgagcuggccguccugcucuccaacgagggcaucaucaacagcgaggacgagcaccuccuggcgcuggagcggaagcugaagaagaugcuggggcccuccgccguggacaucggcaacgggugcuucgagaccaagcacaagugcaaccagaccugccucgaccgcaucgccgccggcaccuucaacgcgggggaguucagccugcccaccuucgacucccugaacaucacggccgccagccucaacgacgacggccuggacaaccacaccauccugcuguacuacuccaccgccgccagcucccucgcggugacccugaugaucgccaucuucaucgucuacauggugagccgggacaacguguccugcagcaucugccuguga

SEQ ID NO: 90538 - RNA, 1758 nt, Artificial Sequence
  derived and/or modified CDS sequence (opt1) from hemagglutinin__InfluenzaB__ABR16017
augaaggccaucaucgugcugcucauggucgugaccagcaacgccgaccgcaucugcaccggcaucacguccagcaacagcccccacguggucaagaccgcgacccagggggaggugaacgugaccggcgucaucccgcugacgaccacccccaccaagagccacuucgccaaccugaaggggacggagacccggggcaagcucugccccaagugccugaacugcaccgaccuggacguggcccucgggcgccccaagugcaccggcaacaucccguccgcccgggugagcauccugcacgagguccgccccgugacguccggcugcuuccccaucaugcacgaccggaccaagauccgccagcugcccaaccuccugcggggguacgagcacauccgccugagcacccacaacgugaucaacgccgagaacgcgccgggcgggcccuacaagaucggcaccuccgggagcugccccaacgucacgaacggcaacggcuucuucgccaccauggccugggccgugcccaagaacgacaacaacaagaccgcgaccaacucccucacgaucgaggugccguacaucugcaccgagggggaggaccagaucaccgucuggggcuuccacagcgacaacgagacccagauggccaagcuguacggggacuccaagccccagaaguucacgagcuccgccaacggcgugaccacccacuacgugagccagaucggcggguuccccaaccagaccgaggacggcgggcugccccaguccggccggaucgucguggacuacauggugcagaaguccgggaagacgggcaccaucaccuaccagcgcggcauccuccugccgcagaaggucuggugcgccuccgggcggagcaaggugaucaagggcagccugccccucaucggggaggccgacugccugcacgagaaguacggcgggcugaacaaguccaagcccuacuacaccggcgagcacgcgaaggccaucggcaacugccccaucugggugaagacgccgcucaagcuggccaacgggaccaaguaccgcccgcccgccaagcugcucaaggagcggggcuucuucggggccaucgcgggcuuccuggagggcgggugggagggcaugaucgccggguggcacggcuacaccagccacggggcccacggcgucgccguggccgcggaccugaaguccacccaggaggccaucaacaagaucacgaagaaccucaacagccuguccgagcuggaggucaagaaccuccagcgccugagcggcgccauggacgagcugcacaacgagauccucgagcuggacgagaagguggacgaccugcgggccgacaccaucuccagccagaucgagcucgccgugcugcuguccaacgaggggaucaucaacagcgaggacgagcaccuccuggcgcuggagcgcaagcucaagaagaugcugggccccuccgccgucgagaucgggaacggcugcuucgagaccaagcacaagugcaaccagaccugccuggaccggaucgccgccgggaccuucgacgcgggcgaguucagccuccccacguucgacucccugaacaucaccgccgccagccugaacgacgacggccucgacaaccacaccauccugcuguacuacuccaccgccgccagcucccuggcggugacgcucaugaucgccaucuucguggucuacauggugagccgcgacaacguguccugcagcaucugccuguga

SEQ ID NO: 90539 - RNA, 1758 nt, Artificial Sequence; identical to SEQ ID NO: 90538
  derived and/or modified CDS sequence (opt1) from hemagglutinin__InfluenzaB__ACA64899

SEQ ID NO: 90540 - RNA, 1758 nt, Artificial Sequence
  derived and/or modified CDS sequence (opt1) from hemagglutinin__InfluenzaB__ACA64932
augaaggccaucaucgugcugcucauggucgugaccagcaacgccgaccgcaucugcaccggcaucacguccagcaacagcccccacguggucaagaccgcgacccagggggaggugaacgugaccggcgucaucccgcugacgaccacccccaccaagagccacuucuccaaccugaaggggacggagacccggggcaagcucugccccaagugccugaacugcaccgaccuggacguggcccucgggcgccccaagugcaccggcaacaucccgagcgcccggguguccauccugcacgagguccgccccgugacgagcggcugcuuccccaucaugcacgaccggaccaagauccgccagcugcccaaccuccugcggggguacgagcacauccgccuguccacccacaacgugaucaacgccgagaacgccccgggcgggcccuacaagaucggcaccagcggguccugccccaacgucacgaacggcaacggcuucuucgcgaccauggccugggccgugcccaagaacgacaucaacaagaccgccaccaacagccucacgaucgaggugccguacaucugcaccgagggggaggaccagaucaccgucuggggcuuccacuccgacaacgagacccagauggcgaagcuguacggggacagcaagccccagaaguucacguccagcgccaacggcgugaccacccacuacgugucccagaucggcggguuccccaaccagaccgaggacggcgggcugccccagagcggccggaucgucguggacuacauggugcagaaguccgggaagacgggcaccaucaccuaccagcgcggcauccuccugccgcagaaggucuggugcgccagcgggcggagcaaggugaucaagggcucccugccccucaucggggaggccgacugccugcacgagaaguacggcgggcugaacaagagcaagcccuacuacaccggcgagcacgccaaggcgaucggcaacugccccaucugggugaagacgccgcucaagcuggccaacgggaccaaguaccgcccgcccgccaagcugcucaaggagcggggcuucuucggggccaucgccggcuuccuggagggcgggugggagggcaugaucgcgggguggcacggcuacaccucccacggggcccacggcgucgccguggccgccgaccugaaguccacccaggaggcgaucaacaagaucacgaagaaccucaacucccugagcgagcuggaggucaagaaccuccagcgccuguccggcgccauggacgagcugcacaacgagauccucgagcuggacgagaagguggacgaccugcgggccgacaccaucagcucccagaucgagcucgccgugcugcugagcaacgaggggaucaucaacuccgaggacgagcaccuccuggcccuggagcgcaagcucaagaagaugcugggccccagcgcggucgagaucgggaacggcugcuucgagaccaagcacaagugcaaccagaccugccuggacaagaucgccgccgggaccuucgacgccggcgaguucucccuccccacguucgacagccugaacaucaccgcggccucccugaacgacgacggccucgacaaccacaccauccugcuguacuacagcaccgccgccuccagccuggccgugacgcucaugaucgcgaucuucguggucuacauggugucccgggacaacgugagcugcagcaucugccuguga

SEQ ID NO: 90541 - RNA, 1758 nt, Artificial Sequence; identical to SEQ ID NO: 90538
  derived and/or modified CDS sequence (opt1) from hemagglutinin__InfluenzaB__ACA64943

SEQ ID NO: 90542 - RNA, 1758 nt, Artificial Sequence
  derived and/or modified CDS sequence (opt1) from hemagglutinin__InfluenzaB__ACA64954
augaaggccaucaucgugcugcucauggucgugaccagcaacgccgaccgcaucugcaccggcaucacguccagcaacagcccccacguggucaagaccgcgacccagggggaggugaacgugaccggcgucaucccgcugacgaccacccccaccaagagccacuucgccaaccugaaggggacggagacccggggcaagcucugccccaagugccugaacugcaccgaccuggacguggcccucgggcgccccaagugcaccggcaacaucccguccgcccgggugagcauccugcacgagguccgccccgugacguccggcugcuuccccaucaugcacgaccggaccaagauccgccagcugcccaaccuccugcggggguacgagcacauccgccugagcacccacaacgugaucaacgccgagaacgcgccgggcgggcccuacaagaucggcaccuccgggagcugccccaacgucacgaacggcaacggcuucuucgccaccauggccugggccgugcccaagaacgacaacaacaagaccgcgaccuccagccucacgaucgaggugccguacaucugcaccgagggggaggaccagaucaccgucuggggcuuccacuccgacaacgagacccagauggccaagcuguacggggacagcaagccccagaaguucacguccagcgccaacggcgugaccacccacuacgugucccagaucggcggguuccccaaccagaccgaggacggcgggcugccccagagcggccggaucgucguggacuacauggugcagaaguccgggaagacgggcaccaucaccuaccagcgcggcauccuccugccgcagaaggucuggugcgccagcgggcggagcaaggugaucaagggcucccugccccucaucggggaggccgacugccugcacgagaaguacggcgggcugaacaagagcaagcccuacuacaccggcgagcacgcgaaggccaucggcaacugccccaucugggugaagacgccgcucaagcuggccaacgggaccaaguaccgcccgcccgccaagcugcucaaggagcggggcuucuucggggccaucgcgggcuuccuggagggcgggugggagggcaugaucgccggguggcacggcuacaccucccacggggcccacggcgucgccguggccgcggaccugaaguccacccaggaggccaucaacaagaucacgaagaaccucaacucccugagcgagcuggaggucaagaaccuccagcgccuguccggcgccauggacgagcugcacaacgagauccucgagcuggacgagaagguggacgaccugcgggccgacaccaucagcucccagaucgagcucgccgugcugcugagcaacgaggggaucaucaacuccgaggacgagcaccuccuggcgcuggagcgcaagcucaagaagaugcugggccccagcgccgucgagaucgggaacggcugcuucgagaccaagcacaagugcaaccagaccugccuggaccggaucgccgccgggaccuucgacgcgggcgaguucucccuccccacguucgacagccugaacaucaccgccgccucccugaacgacgacggccucgacaaccacaccauccugcuguacuacagcaccgccgccuccagccuggcggugacgcucaugaucgccaucuucguggucuacauggugucccgcgacaacgugagcugcagcaucugccuguga

SEQ ID NO: 90543 - RNA, 1758 nt, Artificial Sequence; identical to SEQ ID NO: 90538
  derived and/or modified CDS sequence (opt1) from hemagglutinin__InfluenzaB__ACA64965

SEQ ID NO: 90544 - RNA, 1758 nt, Artificial Sequence
  derived and/or modified CDS sequence (opt1) from hemagglutinin__InfluenzaB__ACA64998
augaaggccaucaucgugcugcucauggucgugaccagcaacgccgaccgcaucugcaccggcaucacguccagcaacagcccccacguggucaagaccgcgacccagggggaggugaacgugaccggcgucaucccgcugacgaccacccccaccaagagccacuucgccaaccugaaggggacggagacccggggcaagcucugccccaagugcuucaacugcaccgaccuggacguggcccuggggcgccccaagugcaccggcaacaucccguccgcccgggugagcauccuccacgagguccgccccgugacguccggcugcuuccccaucaugcacgaccggaccaagauccgccagcugcccaaccugcuccggggguacgagcacauccgccugagcacccacaacgugaucaacgccgagaacgcgccgggcgggcccuacaagaucggcaccuccgggagcugccccaacgucacgaacggcaacggcuucuucgccaccauggccugggccgugcccaagaacgacaacaacaagaccgcgaccaacucccugacgaucgaggugccguacaucugcaccgagggggaggaccagaucaccgucuggggcuuccacagcgacaacgagacccagauggccaagcucuacggggacuccaagccccagaaguucacgagcuccgccaacggcgugaccacccacuacgugagccagaucggcggguuccccaaccagaccgaggacggcgggcugccccaguccggccggaucgucguggacuacauggugcagaaguccgggaagacgggcaccaucaccuaccagcgcggcauccugcucccgcagaaggucuggugcgccuccgggcggagcaaggugaucaagggcagccugccccugaucggggaggccgacugccuccacgagaaguacggcgggcugaacaaguccaagcccuacuacaccggcgagcacgcgaaggccaucggcaacugccccaucugggugaagacgccgcugaagcucgccaacgggaccaaguaccgcccgcccgccaagcugcugaaggagcggggcuucuucggggccaucgcgggcuuccucgagggcgggugggagggcaugaucgccggguggcacggcuacaccagccacggggcccacggcgucgccguggccgcggaccugaaguccacccaggaggccaucaacaagaucacgaagaaccugaacagccucuccgagcuggaggucaagaaccugcagcgccucagcggcgccauggacgagcugcacaacgagauccuggagcucgacgagaagguggacgaccugcgggccgacaccaucuccagccagaucgagcuggccgugcuccuguccaacgaggggaucaucaacagcgaggacgagcaccuccuggcgcuggagcgcaagcugaagaagaugcucggccccuccgccgucgagaucgggaacggcugcuucgagaccaagcacaagugcaaccagaccugccuggaccggaucgccgccgggaccuucgacgcgggcgaguucagccugcccacguucgacucccucaacaucaccgccgccagccugaacgacgacggccuggacaaccacaccauccuccuguacuacuccaccgccgccagcucccuggcggugacgcugaugaucgccaucuucguggucuacauggugagccgcgacaacguguccugcagcaucugccucuga

SEQ ID NO: 90545 - RNA, 1758 nt, Artificial Sequence
  derived and/or modified CDS sequence (opt1) from hemagglutinin__InfluenzaB__ACA65020
augaaggccaucaucgugcugcucauggucgugaccagcaacgccgaccgcaucugcaccggcaucacguccagcaacagcccccacguggucaagaccgcgacccagggggaggugaacgugaccggcgucaucccgcugacgaccacccccaccaagagccacuucuccaaccugaaggggacggagacccggggcaagcucugccccaagugccugaacugcaccgaccuggacguggcccucgggcgccccaagugcaccggcaacaucccgagcgcccggguguccauccugcacgagguccgccccgugacgagcggcugcuuccccaucaugcacgaccggaccaagauccgccagcugcccaaccuccugcggggguacgagcacauccgccuguccacccacaacgugaucaacgccgagaacgccccgggcgggcccuacaagaucggcaccagcggguccugccccaacgucacgaacggcaacggcuucuucgcgaccauggccugggccgugcccaagaacgacaacaacaagaccgccaccaacagccucacgaucgaggugccguacaucugcaccgagggggaggaccagaucaccaucuggggcuuccacuccgacaacgagacccagauggcgaagcuguacggggacagcaagccccagaaguucacguccagcgccaacggcgucaccacccacuacgugucccagaucggcggguuccccaaccagaccgaggacggcgggcugccccagagcggccggaucguggucgacuacauggugcagaaguccgggaagacgggcaccaucaccuaccagcgcggcauccuccugccgcagaagguguggugcgccagcgggcggagcaaggucaucaagggcucccugccccucaucggggaggccgacugccugcacgagaaguacggcgggcugaacaagagcaagcccuacuacaccggcgagcacgccaaggcgaucggcaacugccccaucugggugaagacgccgcucaagcuggccaacgggaccaaguaccgcccgcccgccaagcugcucaaggagcggggcuucuucggggccaucgccggcuuccuggagggcgggugggagggcaugaucgcgggguggcacggcuacaccucccacggggcccacggcguggccgucgccgccgaccugaaguccacccaggaggcgaucaacaagaucacgaagaaccucaacucccugagcgagcuggaggugaagaaccuccagcgccuguccggcgccauggacgagcugcacaacgagauccucgagcuggacgagaaggucgacgaccugcgggccgacaccaucagcucccagaucgagcucgccgugcugcugagcaacgaggggaucaucaacuccgaggacgagcaccuccuggcccuggagcgcaagcucaagaagaugcugggccccagcgcgguggaggucgggaacggcugcuucgagaccaagcacaagugcaaccagaccugccuggaccggaucgccgccgggaccuucgacgccggcgaguucucccuccccacguucgacagccugaacaucaccgcggccucccugaacgacgacggccucgacaaccacaccauccugcuguacuacagcaccgccgccuccagccuggccgugacgcucaugaucgcgaucuucguggucuacauggugucccgcgacaacgugagcugcagcaucugccuguga

SEQ ID NO: 90546 - RNA, 1758 nt, Artificial Sequence; identical to SEQ ID NO: 90544
  derived and/or modified CDS sequence (opt1) from hemagglutinin__InfluenzaB__ACA65031

SEQ ID NO: 90547 - RNA, 1758 nt, Artificial Sequence
  derived and/or modified CDS sequence (opt1) from hemagglutinin__InfluenzaB__ACA65042
augaaggccaucaucgugcugcucauggucgugaccagcaacgccgaccgcaucugcaccggcaucacguccagcaacagcccccacguggucaagaccgcgacccagggggaggugaacgugaccggcgucaucccgcugacgaccacccccaccaagagccacuucuccaaccugaaggggacggagacccggggcaagcucugccccaagugccugaacugcaccgaccuggacguggcccucgggcgccccaagugcaccggcaacaucccgagcgcccggguguccauccugcacgagguccgccccgugacgagcggcugcuuccccaucaugcacgaccggaccaagauccgccagcugcccaaccuccugcggggguacgagcacauccgccuguccacccacaacgugaucaacgccgagaacgccccgggcgggcccuacaagaucggcaccagcggguccugccccaacgucacgaacggcaacggcuucuucgcgaccauggccugggccgugcccaagaacgacaacaacaagaccgccaccaacagccucacgaucgaggugccguacaucugcaccgagggggaggaccagaucaccgucuggggcuuccacuccgacaacgagacccagauggcgaagcuguacggggacagcaagccccagaaguucacguccagcgccaacggcgugaccacccacuacgugucccagaucggcggguuccccaaccagaccgaggacggcgggcugccccagagcggccggaucaucgucgacuacauggugcagaaguccgggaagacgggcaccaucaccuaccagcgcggcauccuccugccgcagaagguguggugcgccagcgggcggagcaaggucaucaagggcucccugccccucaucggggaggccgacugccugcacgagaaguacggcgggcugaacaagagcaagcccuacuacaccggcgagcacgccaaggcgaucggcaacugccccaucugggugaagacgccgcucaagcuggccaacgggaccaaguaccgcccgcccgccaagcugcucaaggagcggggcuucuucggggccaucgccggcuuccuggagggcgggugggagggcaugaucgcgggguggcacggcuacaccucccacggggcccacggcguggccgucgccgccgaccugaaguccacccaggaggcgaucaacaagaucacgaagaaccucaacucccugagcgagcuggaggugaagaaccuccagcgccuguccggcgccauggacgagcugcacaacgagauccucgagcuggacgagaaggucgacgaccugcgggccgacaccaucagcucccagaucgagcucgccgugcugcugagcaacgaggggaucaucaacuccgaggacgagcaccuccuggcccuggagcgcaagcucaagaagaugcugggccccagcgcgguggagaucgggaacggcugcuucgagaccaagcacaagugcaaccagaccugccuggaccggaucgccgccgggaccuucgacgccggcgaguucucccuccccacguucgacagccugaacaucaccgcggccucccugaacgacgacggccucgacaaccacaccauccugcuguacuacagcaccgccgccuccagccuggccgucacgcucaugaucgcgaucuucgugguguacauggucucccgcgacaacgugagcugcagcaucugccuguga

SEQ ID NO: 90548 - RNA, 1758 nt, Artificial Sequence
  derived and/or modified CDS sequence (opt1) from hemagglutinin__InfluenzaB__ACA65053
augaaggccaucaucgugcugcucauggucgugaccagcaacgccgaccgcaucugcaccggcaucacguccagcaacagcccccacguggucaagaccgcgacccagggggaggugaacgugaccggcgucaucccgcugacgaccacccccaccaagagccacuucgccaaccugaaggggacggagacccggggcaagcucugccccaagugccugaacugcaccgaccuggacguggcccucgggcgccccaagugcaccggcaacaucccguccgcccgggugagcauccugcacgagguccgccccgugacguccggcugcuuccccaucaugcacgaccggaccaagauccgccagcugcccaaccuccugcggggguacgagcacauccgccugagcacccggaacgugaucaacgccgagaacgcgccgggcgggcccuacaagaucggcaccuccgggagcugccccaacgucacgaacggcaacggcuucuucgccaccauggccugggccgugcccaagaacgacaacaacaagaccgcgaccaacucccucacgaucgaggugccguacaucugcaccgagggggaggaccagaucaccgucuggggcuuccacagcgacaacgagacccagauggccaagcuguacggggacuccaagccccagaaguucacgagcuccgccaacggcgugaccacccacuacgugagccagaucggcggguuccccaaccagaccgaggacggcgggcugccccaguccggccgcaucgucguggacuacauggugcagaaguccgggaagacgggcaccaucaccuaccagcggggcauccuccugccgcagaaggucuggugcgccuccgggcgcagcaaggugaucaagggcagccugccccucaucggggaggccgacugccugcacgagaaguacggcgggcugaacaaguccaagcccuacuacaccggcgagcacgcgaaggccaucggcaacugccccaucugggugaagacgccgcucaagcuggccaacgggaccaaguaccggccgcccgccaagcugcucaaggagcgcggcuucuucggggccaucgcgggcuuccuggagggcgggugggagggcaugaucgccggguggcacggcuacaccagccacggggcccacggcgucgccguggccgcggaccugaaguccacccaggaggccaucaacaagaucacgaagaaccucaacagccuguccgagcuggaggucaagaaccuccagcggcugagcggcgccauggacgagcugcacaacgagauccucgagcuggacgagaagguggacgaccugcgcgccgacaccaucuccagccagaucgagcucgccgugcugcuguccaacgaggggaucaucaacagcgaggacgagcaccuccuggcgcuggagcggaagcucaagaagaugcugggccccuccgccgucgagaucgggaacggcugcuucgagaccaagcacaagugcaaccagaccugccuggaccgcaucgccgccgggaccuucgacgcgggcgaguucagccuccccacguucgacucccugaacaucaccgccgccagccugaacgacgacggccucgacaaccacaccauccugcuguacuacuccaccgccgccagcucccuggcggugacgcucaugaucgccaucuucguggucuacauggugagccgggacaacguguccugcagcaucugccuguga

SEQ ID NO: 90549 - RNA, 1758 nt, Artificial Sequence
  derived and/or modified CDS sequence (opt1) from hemagglutinin__InfluenzaB__ACA65075
augaaggccaucaucgugcugcucauggucgugaccagcaacgccgaccgcaucugcaccggcaucacguccagcaacagcccccacguggucaagaccgcgacccagggggaggugaacgugaccggcgucaucccgcugacgaccacccccaccaagagccacuucgccaaccugaaggggacggagacccggggcaagcucugccccaagugccugaacugcaccgaccuggacguggcccucgggcgccccaagugcaccggcaacaucccguccgcccgggugagcauccugcacgagguccgccccgugacguccggcugcuuccccaucaugcacgaccggaccaagauccgccagcugcccaaccuccugcggggguacgagcacauccgccugagcacccacaacgugaucaacgccgagaacgcgccgggcgggcccuacaagaucggcaccuccgggagcugccccaacaucacgaacggcaacggcuucuucgccaccauggccugggccguccccaagaacgacaacaacaagaccgcgaccaacucccucacgaucgaggugccguacaucugcaccgagggggaggaccagaucaccguguggggcuuccacagcgacaacgagacccagauggccaagcuguacggggacuccaagccccagaaguucacgagcuccgccaacggcgucaccacccacuacgugagccagaucggcggguuccccaaccagaccgaggacggcgggcugccccaguccggccggaucguggucgacuacauggugcagaaguccgggaagacgggcaccaucaccuaccagcgcggcauccuccugccgcagaagguguggugcgccuccgggcggagcaaggucaucaagggcagccugccccucaucggggaggccgacugccugcacgagaaguacggcgggcugaacaaguccaagcccuacuacaccggcgagcacgcgaaggccaucggcaacugccccaucugggugaagacgccgcucacccuggccaacgggaccaaguaccgcccgcccgccaagcugcucaaggagcggggcuucuucggggccaucgcgggcuuccuggagggcgggugggagggcaugaucgccggguggcacggcuacaccagccacggggcccacggcguggccgucgccgcggaccugaaguccacgcaggaggccaucaacaagaucaccaagaaccucaacagccuguccgagcuggaggugaagaaccuccagcgccugagcggcgccauggacgagcugcacaacgagauccucgagcuggacgagaaggucgacgaccugcgggccgacaccaucuccagccagaucgagcucgccgugcugcuguccaacgaggggaucaucaacagcgaggacgagcaccuccuggcgcuggagcgcaagcucaagaagaugcugggccccuccgccguggagaucgggaacggcugcuucgagaccaagcacaagugcaaccagaccugccuggaccggaucgccgccgggacguucgacgcgggcgaguucagccuccccaccuucgacucccugaacaucaccgccgccagccugaacgacgacggccucgacaaccacaccauccugcuguacuacuccacggccgccagcucccuggcggucacccucaugaucgccaucuucgugguguacauggucagccgcgacaacguguccugcagcaucugccuguga

SEQ ID NO: 90550 - RNA, 1758 nt, Artificial Sequence; identical to SEQ ID NO: 90538
  derived and/or modified CDS sequence (opt1) from hemagglutinin__InfluenzaB__ACA65086

SEQ ID NO: 90551 - RNA, 1758 nt, Artificial Sequence; identical to SEQ ID NO: 90538
  derived and/or modified CDS sequence (opt1) from hemagglutinin__InfluenzaB__ACA65097

SEQ ID NO: 90552 - RNA, 1758 nt, Artificial Sequence; identical to SEQ ID NO: 90538
  derived and/or modified CDS sequence (opt1) from hemagglutinin__InfluenzaB__ACA96552

SEQ ID NO: 90553 - RNA, 1758 nt, Artificial Sequence; identical to SEQ ID NO: 90538
  derived and/or modified CDS sequence (opt1) from hemagglutinin__InfluenzaB__ACA96563

SEQ ID NO: 90554 - RNA, 1758 nt, Artificial Sequence; identical to SEQ ID NO: 90538
  derived and/or modified CDS sequence (opt1) from hemagglutinin__InfluenzaB__ACA96574

SEQ ID NO: 90555 - RNA, 1758 nt, Artificial Sequence; identical to SEQ ID NO: 90538
  derived and/or modified CDS sequence (opt1) from hemagglutinin__InfluenzaB__ACA96585

SEQ ID NO: 90556 - RNA, 1758 nt, Artificial Sequence
  derived and/or modified CDS sequence (opt1) from hemagglutinin__InfluenzaB__ACA96596
augaaggccaucaucgugcugcucauggucgugaccagcaacgccgaccgcaucugcaccggcaucacguccagcaacagcccccacguggucaagaccgcgacccagggggaggugaacgugaccggcgucaucccgcugacgaccacccccaccaagagccacuucgccaaccugaaggggacggagacccggggcaagcucugccccaagugccugaacugcaccgaccuggacguggcccucgggcgccccaagugcaccggcaacaucccguccgcccgggugagcauccugcacgagguccgccccgugacguccggcugcuuccccaucaugcacgaccggaccaagauccgccagcugcccaaccuccugcggggguacgagcacauccgccugagcacccacaacgugaucaacgccgagaacgcgccgggcgggcccuacaagaucggcaccuccgggagcugccccaacgucacgaacggcaacggcuucuucgccaccauggccugggccgugcccaagaacgacaacaacaagaccgcgaccaacucccucacgaucgaggugccguacaucugcaccgagggggaggaccagaucaccgucuggggcuuccacagcgacaacgagacccagauggccaagcuguacggggacuccaagccccagaaguucacgagcuccgccaacggcgugaccacccacuacgugagccagaucggcggguuccccaaccagaccgaggacggcgggcugccccaguccggccggaucgucguggacuacauggugcagaaguccgggaagacgggcaccaucaccuaccagcgcggcauccuccugccgcagaaggucuggugcgccuccgggcggagcaaggugaucaagggcagccugccccucaucggggaggccgacugccugcacgagaaguacggcgggcugaacaaguccaagcccuacuacaccggcgagcacgcgaaggccaucggcaacugccccaucugggugaagacgccgcucaagcuggccaacgggaccaaguaccgcccgcccgccaagcugcucaaggagcggggcuucuucggggccaucgcgggcuuccuggagggcgggugggagggcaugaucgccggguggcacggcuacaccagccacggggcccacggcgucgccguggccgcggaccugaaguccacccaggaggccaucgacaagaucacgaagaaccucaacagccuguccgagcuggaggucaagaaccuccagcgccugagcggcgccauggacgagcugcacaacgagauccucgagcuggacgagaagguggacgaccugcgggccgacaccaucuccagccagaucgagcucgccgugcugcuguccaacgaggggaucaucaacagcgaggacgagcaccuccuggcgcuggagcgcaagcucaagaagaugcugggccccuccgccgucgagaucgggaacggcugcuucgagaccaagcacaagugcaaccagaccugccuggaccggaucgccgccgggaccuucgacgcgggcgaguucagccuccccacguucgacucccugaacaucaccgccgccagccugaacgacgacggccucgacaaccacaccauccugcuguacuacuccaccgccgccagcucccuggcggugacgcucaugaucgccaucuucguggucuacauggugagccgcgacaacguguccugcagcaucugccuguga

SEQ ID NO: 90557 - RNA, 1758 nt, Artificial Sequence; identical to SEQ ID NO: 90538
  derived and/or modified CDS sequence (opt1) from hemagglutinin__InfluenzaB__ACA96607

SEQ ID NO: 90558 - RNA, 1758 nt, Artificial Sequence
  derived and/or modified CDS sequence (opt1) from hemagglutinin__InfluenzaB__ACA96618
augaaggccaucaucgugcugcucauggucgugaccagcaacgccgaccgcaucugcaccggcaucacguccagcaacagcccccacguggucaagaccgcgacccagggggaggugaacgugaccggcgucaucccgcugacgaccacccccaccaagagccacuucgccaaccugaaggggacggagacccggggcaagcucugccccaagugccugaacugcaccgaccuggacguggcccucgggcgccccaagugcaccggcaacaucccguccgcccgggugagcauccugcacgagguccgccccgugacguccggcugcuuccccaucaugcacgaccggaccaagauccgccagcugcccaaccuccugcggggguacgagcacauccgccugagcacccacaacgugaucaacgccgagaacgcgccgggcgggcccuacaagaucggcaccuccgggagcugccccaacgucacgaacggcaacggcuucuucgccaccauggccugggccgugcccaagaacgacaacaacaagaccgcgaccaacucccucacgaucgaggugccguacaucugcaccgagggggaggaccagaucaccgucuggggcuuccacagcgacaacgagacccagauggccaagcuguacggggacuccaagccccagaaguucacgagcuccgccaacggcgugaccacccacuacgugagccagaucggcggguuccccaaccagaccgaggacggcgggcugccccaguccggccggaucgucguggacuacauggugcagaaguccgggaagacgggcaccaucaccuaccagcgcggcauccuccugccgcagaaggucuggugcgccuccgggcggagcaaggugaucaagggcagccugccccucaucggggaggccgacugccugcacgagaaguacggcgggcugaacaaguccaagcccuacuacaccggcgagcacgcgaaggccaucggcaacugccccaucugggugaagacgccgcucaagcuggccaacgggaccaaguaccgcccgcccgccaagcugcucaaggagcggggcuucuucggggccaucgcgggcuuccuggagggcgggugggagggcaugaucgccggguggcacggcuacaccagccacggggcccacggcgucgccguggccgcggaccugaaguccacccaggaggccaucaacaagaucacgaagaaccucaacagccuguccgagcuggaggucaagaaccuccagcgccugagcggcgccauggacgagcugcacaacgagauccucgagcuggacgagaagguggacgaccugcgggccgacaccaucuccagccagaucgagcucgccgugcugcuguccaacgaggggaucaucaacagcgaggacgagcaccuccuggcgcuggagcgcaagcucaagaagaugcugggccccuccgccgucgagaucgggaacggcugcuucgagaccaagcacaagugcaaccagaccugccuggaccggaucgccgccgggaccuucgacgcgggcgaguucuuccuccccacguucgacagccugaacaucaccgccgccucccugaacgacgacggccucgacaaccacaccauccugcuguacuacagcaccgccgccuccagccuggcggugacgcucaugaucgccaucuucguggucuacauggugucccgcgacaacgugagcugcuccaucugccuguga

SEQ ID NO: 90559 - RNA, 1758 nt, Artificial Sequence; identical to SEQ ID NO: 90538
  derived and/or modified CDS sequence (opt1) from hemagglutinin__InfluenzaB__ACA96629

SEQ ID NO: 90560 - RNA, 1758 nt, Artificial Sequence; identical to SEQ ID NO: 90544
  derived and/or modified CDS sequence (opt1) from hemagglutinin__InfluenzaB__ACA96640

SEQ ID NO: 90561 - RNA, 1755 nt, Artificial Sequence
  derived and/or modified CDS sequence (opt1) from hemagglutinin__InfluenzaB__ACD56566
augaaggccaucaucgugcugcucauggucgugaccagcaacgccgaccgcaucugcaccggcaucacguccagcaacagcccccacguggucaagaccgcgacccagggggaggugaacgugaccggcgucaucccgcugacgaccacccccaccaaguccuacuucgccaaccugaaggggacgcggacccgcggcaagcucugccccgacugccugaacugcaccgaccuggacguggcccucgggcggcccaugugcgugggcaccacgccguccgccaaggccagcauccugcacgagguccgccccgugaccuccggcugcuuccccaucaugcacgaccggaccaagauccgccagcugcccaaccuccugcggggguacgagaacauccgccugagcacccagaacguggucgacgcggagaacgccccgggcgggcccuaccggcucggcacguccgggagcugccccaacgccaccuccaagagcggcuucuucgccaccauggcgugggccgugcccaaggacaacaacaagaacgccaccaacccgcugacgguggagguccccuacgugugcaccgagggcgaggaccagaucaccguguggggguuccacuccgacaacaagacccagaugaagaaccuguacggcgacagcaacccccagaaguucacguccagcgccaacggggucaccacccacuacgugucccagaucggcggcuuccccgcccagaccgaggacgggggccucccgcagagcgggcgcaucguggucgacuacauggugcagaagccccggaagacgggcaccaucguguaccagcgcgggguccugcugccccagaagguguggugcgcguccggccggagcaaggucaucaagggcagccucccccugaucggggaggccgacugccugcacgagaaguacggcgggcucaacaaguccaagccguacuacaccggcgagcacgccaaggccaucgggaacugccccaucugggugaagacgccccugaagcuggccaacggcaccaaguaccggcccccggcgaagcuccugaaggagcgcggcuucuucggggccaucgccggcuuccuggagggcgggugggaggggaugaucgccggcuggcacggcuacaccagccacggggcccacggcguggcggucgccgccgaccucaaguccacccaggaggccaucaacaagaucaccaagaaccugaacagccuguccgagcucgaggugaagaaccugcagcgccugagcggggccauggacgagcuccacaacgagauccuggagcuggacgagaagguggacgaccuccgggcggacacgaucuccagccagaucgagcuggccguccugcucuccaacgagggcaucaucaacagcgaggacgagcaccuccuggcccuggagcgcaagcugaagaagaugcugggccccuccgccguggacaucgggaacggcugcuucgagaccaagcacaagugcaaccagaccugccucgacaagaucgcggccgggaccuucaacgccggcgaguucagccugcccaccuucgacucccugaacaucacggccgccagccucaacgacgacgggcuggacaaccacaccauccugcuguacuacuccaccgcggccagcucccucgccgugacccugaugcuggccaucuucaucgucuacauggugagccgggacaacguguccugcagcaucugccucuga

SEQ ID NO: 90562 - RNA, 1755 nt, Artificial Sequence
  derived and/or modified CDS sequence (opt1) from hemagglutinin__InfluenzaB__ACD56577
augaaggccaucaucgugcugcucauggucgugaccagcaacgccgaccgcaucugcaccggcaucacguccagcaacagcccccacguggucaagaccgcgacccagggggaggugaacgugaccggcgucaucccgcugacgaccacccccaccaaguccuacuucgccaaccugaaggggacgcggacccgcggcaagcucugccccgacugccugaacugcaccgaccuggacguggcccucgggcggcccaugugcgugggcaccacgccguccgccaaggccagcauccugcacgagguccgccccgugaccuccggcugcuuccccaucaugcacgaccggaccaagauccgccagcugcccaaccuccugcggggguacgagaacauccgccugagcacccagaacgugaucgacgcggagaacgccccgggcgggcccuaccggcucggcacguccgggagcugccccaacgccaccuccaagagcggcuucuucgccaccauggcgugggccguccccaaggacaacaacaagaacgccaccaacccgcugacgguggaggugcccuacaucugcaccgagggcgaggaccagaucaccgucuggggguuccacuccgacaacaaggcccagaugaagaaccuguacggcgacagcaacccccagaaguucaccuccagcgccaacggggugacgacccacuacgugucccagaucggcggcuuccccgcgcagaccgaggacgggggccucccgcagagcgggcgcaucgucguggacuacauggugcagaagccccggaagaccggcacgaucgucuaccagcgcggggugcugcugccccagaagguguggugcgccuccggccggagcaaggucaucaagggcagccucccccugaucggggaggccgacugccugcacgagaaguacggcgggcucaacaaguccaagccguacuacaccggcgagcacgccaaggccaucgggaacugccccaucugggugaagacgccccugaagcuggcgaacggcaccaaguaccggcccccggccaagcuccugaaggagcgcggcuucuucggggccaucgccggcuuccuggagggcgggugggaggggaugaucgccggcuggcacggcuacaccagccacggggcgcacggcgucgccguggccgccgaccucaaguccacccaggaggccaucaacaagaucaccaagaaccugaacagccuguccgagcucgaggugaagaaccugcagcgccugagcggggcgauggacgagcuccacaacgagauccuggagcuggacgagaaggucgacgaccuccgggccgacaccaucuccagccagaucgagcuggccgugcugcucuccaacgagggcaucaucaacagcgaggacgagcaccuccuggcccuggagcgcaagcugaagaagaugcugggccccuccgcgguggacaucgggaacggcugcuucgagacgaagcacaagugcaaccagaccugccucgaccggaucgccgccgggaccuucaacgccggcgaguucagccugcccaccuucgacucccugaacaucaccgccgcgagccucaacgacgacgggcuggacaaccacacgauccugcuguacuacuccaccgccgccagcucccucgccgucacccugaugcuggccaucuucaucguguacauggugagccgcgacaacgucuccugcagcaucugccucuga

SEQ ID NO: 90563 - RNA, 1758 nt, Artificial Sequence; identical to SEQ ID NO: 90544
  derived and/or modified CDS sequence (opt1) from hemagglutinin__InfluenzaB__ACF41658

SEQ ID NO: 90564 - RNA, 1758 nt, Artificial Sequence
  derived and/or modified CDS sequence (opt1) from hemagglutinin__InfluenzaB__ACF54136
augaaggccaucaucgugcugcucauggucgugaccagcaacgccgaccgcaucugcaccggcaucacguccagcaacagcccccacguggucaagaccgcgacccagggggaggugaacgugaccggcgucaucccgcugacgaccacccccaccaagagccacuucgccaaccugaaggggacggagacccggggcaagcucugccccaagugccugaacugcaccgaccuggacguggcccucgggcgccccaagugcaccggcaacaucccguccgcccgggugagcauccugcacgagguccgccccgugacguccggcugcuuccccaucaugcacgaccggaccaagauccgccagcugcccaaccuccugcggggguacgagcacauccgccugagcacccacaacgugaucaacgccgagaacgcgccgggcgggcccuacaagaucggcaccuccgggagcugccccaacgucacgaacggcaacggcuucuucgccaccauggccugggccgugcccaagaacgacaacaacaagaccgcgaccaacucccucacgaucgaggugccguacaucugcaccgagggggaggaccagaucaccgucuggggcuuccacagcgacaacaagacccagauggccaagcuguacggggacuccaagccccagaaguucacgagcuccgccaacggcgugaccacccacuacgugagccagaucggcggguuccccaaccagaccgaggacggcgggcugccccaguccggccggaucgucguggacuacauggugcagaaguccgggaagacgggcaccaucaccuaccagcgcggcauccuccugccgcagaaggucuggugcgccuccgggcggagcaaggugaucaagggcagccugccccucaucggggaggccgacugccugcacgagaaguacggcgggcugaacaaguccaagcccuacuacaccggcgagcacgcgaaggccaucggcaacugccccaucugggugaagacgccgcucaagcuggccaacgggaccaaguaccgcccgcccgccaagcugcucaaggagcggggcuucuucggggccaucgcgggcuuccuggagggcgggugggagggcaugaucgccggguggcacggcuacaccagccacggggcccacggcgucgccguggccgcggaccugaaguccacccaggaggccaucaacaagaucacgaagaaccucaacagccuguccgagcuggaggucaagaaccuccagcgccugagcggcgccauggacgagcugcacaacgagauccucgagcuggacgagaagguggacgaccugcgggccgacaccaucuccagccagaucgagcucgccgugcugcuguccaacgaggggaucaucaacagcgaggacgagcaccuccuggcgcuggagcgcaagcucaagaagaugcugggccccuccgccgucgagaucgggaacggcugcuucgagaccaagcacaagugcaaccagaccugccuggaccggaucgccgccgggaccuucgacgcgggcgaguucagccuccccacguucgacucccugaacaucaccgccgccagccugaacgacgacggccucgacaaccacaccauccugcuguacuacuccaccgccgccagcucccuggcggugacgcucaugaucgccaucuucguggucuacauggugagccgcgacaacaucuccugcagcaucugccuguga

SEQ ID NO: 90565 - RNA, 1758 nt, Artificial Sequence; identical to SEQ ID NO: 90538
  derived and/or modified CDS sequence (opt1) from hemagglutinin__InfluenzaB__ACF54147

SEQ ID NO: 90566 - RNA, 1755 nt, Artificial Sequence
  derived and/or modified CDS sequence (opt1) from hemagglutinin__InfluenzaB__ACF54158
augaaggccaucaucgugcugcucauggucgugaccagcaacgccgaccgcaucugcaccggcaucacguccagcaacagcccccacguggucaagaccgcgacccagggggaggugaacgugaccggcgucaucccgcugacgaccacccccaccaaguccuacuucgccaaccugaaggggacgcggacccgcggcaagcucugccccgacugccugaacugcaccgaccuggacguggcccucgggcggcccaugugcgugggcaccacgccguccgccaaggccagcauccugcacgagguccgccccgugaccuccggcugcuuccccaucaugcacgaccggaccaagauccgccagcuggcgaaccuccugcggggguacgagaacauccgccugagcacccagaacgugaucgacgccgagaaggcccccggcgggccguaccggcucggcacguccgggagcugccccaacgccaccuccaagagcggcuucuucgcgaccauggccugggccguccccaaggacaacaacaagaacgccaccaacccccugacgguggaggugccguacaucugcaccgagggcgaggaccagaucaccgucuggggguuccacuccgacaacaagacccagaugaagaaccuguacggcgacagcaacccccagaaguucacguccagcgccaacggggugaccacccacuacgugucccagaucggcggcuuccccgaccagaccgaggacgggggccucccccagagcgggcgcaucgucguggacuacaugaugcagaagccgggcaagacggggaccaucguguaccagcggggcguccugcugccccagaagguguggugcgcguccggccgcagcaaggugaucaaggggagccucccccugaucggcgaggccgacugccugcacgagaaguacgggggccucaacaagucccggcccuacuacaccggggagcacgccaaggccaucggcaacugcccgaucugggucaagacgccccugaagcuggccaacggcaccaaguaccgcccgcccgcgaagcuccugaaggagcggggguucuucggcgccaucgccggguuccuggagggcgggugggagggcaugaucgccggcuggcacggguacaccagccacggcgcccacgggguggcggucgccgccgaccucaaguccacccaggaggccaucaacaagaucaccaagaaccugaacagccuguccgagcucgaggugaagaaccugcagcgccugagcggcgccauggacgagcuccacaacgagauccuggagcuggacgagaagguggacgaccuccgggcggacacgaucuccagccagaucgagcuggccguccugcucuccaacgagggcaucaucaacagcgaggacgagcaccuccuggcccuggagcgcaagcugaagaagaugcuggggcccuccgccguggacaucggcaacgggugcuucgagaccaagcacaagugcaaccagaccugccucgaccggaucgcggccggcaccuucaacgccggggaguucagccugcccaccuucgacucccugaacaucacggccgccagccucaacgacgacggccuggacaaccacaccauccugcuguacuacuccaccgcggccagcucccucgccgugacccugaugcuggccaucuucaucgucuacauggugagccgcgacaacguguccugcagcaucugccucuga

SEQ ID NO: 90567 - RNA, 1755 nt, Artificial Sequence
  derived and/or modified CDS sequence (opt1) from hemagglutinin__InfluenzaB__ACF54169
augaaggccaucaucgugcugcucauggucgugaccagcaacgccgaccgcaucugcaccggcaucacguccagcaacagcccccacguggucaagaccgcgacccagggggaggugaacgugaccggcgucaucccgcugacgaccacccccaccaaguccuacuucgccaaccugaaggggacgcggacccgcggcaagcucugccccgacugccugaacugcaccgaccuggacguggcccucgggcggcccaugugcgugggcaccacgccguccgccaaggccagcauccugcacgagguccgccccgugaccuccggcugcuuccccaucaugcacgaccggaccaagauccgccagcugcccaaccuccugcggggguacgagaacauccgccugagcacccagaacgugaucgacgcggagaacgccccgggcgggcccuaccggcucggcacguccgggagcugccccaacgccaccuccaagagcggcuucuucgccaccauggcgugggccguccccaaggacaacaacaagaacgccaccaacccgcugacgguggaggugcccuacgucugcaccgagggcgaggaccagaucaccguguggggguuccacuccgacaacaagacccccaugaagaaccuguacggcgacagcaacccccagaaguucacguccagcgccaacggggugaccacccacuacgucucccagaucggcggcuucccggcccagaccgaggacgaggggaucccccagagcggccgcaucgugguggacuacaugguccagaagccccggaagacggggaccaucguguaccagcgcggcgugcuccugccccagaaggucuggugcgcguccgggcggagcaaggugaucaagggcagccugccgcucaucggcgaggccgacugccugcacgagaaguacgggggccugaacaaguccaagcccuacuacaccggggagcacgccaaggccaucggcaacugccccaucugggucaagacgccccucaagcuggccaacgggaccaaguaccgcccgcccgcgaagcugcucaaggagcggggcuucuucggcgccaucgccggguuccuggagggcgggugggagggcaugaucgccggguggcacggcuacaccagccacggcgcccacgggguggcgguggccgccgaccugaaguccacccaggaggccaucagcaagaucaccaagaaccucaacucccugagcgagcuggaggucaagaaccuccagcgccuguccggcgccauggacgagcugcacaacgagauccucgagcuggacgagaagguggacgaccugcgggcggacacgaucagcucccagaucgagcucgccgugcugcugagcaacgaggggaucaucaacuccgaggacgagcaccuccuggcccuggagcgcaagcucaagaagaugcugggccccagcgccgucgacaucggcaacgggugcuucgagaccaagcacaagugcaaccagaccugccuggaccggaucgcggccggcaccuucaacgccggggaguucucccuccccaccuucgacagccugaacaucacggccgccucccugaacgacgacggccucgacaaccacaccauccugcuguacuacagcaccgcggccuccagccuggccgugacccucaugcuggccaucuucaucguguacauggucucccgcgacaacgugagcugcagcaucugccuguga

SEQ ID NO: 90568 - RNA, 1755 nt, Artificial Sequence
  derived and/or modified CDS sequence (opt1) from hemagglutinin__InfluenzaB__ACF54180
augaaggccaucaucgugcugcucauggucgugaccagcaacgccgaccgcaucugcaccggcaucacguccagcaacagcccccacguggucaagaccgcgacccagggggaggugaacgugaccggcgucaucccgcugacgaccacccccaccaaguccuacuucgccaaccugaaggggacgcggacccgcggcaagcucugccccgacugccugaacugcaccgaccuggacguggcccucgggcggcccaugugcgugggcaccacgccguccgccaaggccagcauccugcacgagguccgccccgugaccuccggcugcuuccccaucaugcacgaccggaccaagauccgccagcugcccaaccuccugcggggguacgagaacauccgccugagcacccagaacgugaucgacgcggagaacgccccgggcgggcccuaccggcucggcacguccgggagcugccccaacgccaccuccaagagcggcuucuucgccaccauggcgugggccguccccaaggacaacaacaagaacgccaccaacccgcugacgguggaggugcccuacgucugcaccgagggcgaggaccagaucaccguguggggguuccacuccgacaacaagacccccaugaagaaccuguacggcgacagcaacccccagaaguucacguccagcgccaacggggugaccacccacuacgucucccagaucggcggcuucccggcccagaccgaggacgggggccucccccagagcgggcgcaucgugguggacuacaugguccagaagccccggaagacgggcaccaucguguaccagcgcggggugcugcugccccagaaggucuggugcgcguccggccggagcaaggugaucaagggcagccucccgcugaucggggaggccgacugccugcacgagaaguacggcgggcucaacaaguccaagcccuacuacaccggcgagcacgccaaggccaucgggaacugccccaucugggucaagacgccccugaagcuggccaacggcaccaaguaccgcccgcccgcgaagcuccugaaggagcggggcuucuucggggccaucgccggcuuccuggagggcgggugggaggggaugaucgccggcuggcacggcuacaccagccacggggcccacggcguggcgguggccgccgaccucaaguccacccaggaggccaucaacaagaucaccaagaaccugaacagccuguccgagcucgaggucaagaaccugcagcgccugagcggggccauggacgagcuccacaacgagauccuggagcuggacgagaagguggacgaccuccgggcggacacgaucuccagccagaucgagcuggccgugcugcucuccaacgagggcaucaucaacagcgaggacgagcaccuccuggcccuggagcgcaagcugaagaagaugcugggccccuccgccgucgacaucgggaacggcugcuucgagaccaagcacaagugcaaccagaccugccucgaccggaucgcggccgggaccuucaacgccggcgaguucagccugcccaccuucgacucccugaacaucacggccgccagccucaacgacgacgggcuggacaaccacaccauccugcuguacuacuccaccgcggccagcucccucgccgugacccugaugcuggccaucuucaucguguacauggucagccgcgacaacguguccugcagcaucugccucuga

SEQ ID NO: 90569 - RNA, 1755 nt, Artificial Sequence
  derived and/or modified CDS sequence (opt1) from hemagglutinin__InfluenzaB__ACF54202
augaaggccaucaucgugcugcucauggucgugaccagcaacgccgaccgcaucugcaccggcaucacguccagcaacagcccccacguggucaagaccgcgacccagggggaggugaacgugaccggcgucaucccgcugacgaccacccccaccaaguccuacuucgccaaccugaaggggacgcggacccgcggcaagcucugccccgacugccugaacugcaccgaccuggacguggcccucgggcggcccaugugcgugggcaccacgccguccgccaaggccagcauccugcacgagguccgccccgugaccuccggcugcuuccccaucaugcacgaccggaccaagauccgccagcugcccaaccuccugcggggguacgagaacauccgccugagcacccagaacgugaucgacgcggagaacgccccgggcgggcccuaccggcucggcacgucccgcagcugccccaacgccaccuccaagagcggguucuucgccaccauggcgugggccguccccaaggacaacaacaagaacgccaccaacccgcugacgguggaggugcccuacgucugcaccgagggcgaggaccagaucaccguguggggcuuccacuccgacaacaagacccagaugaagaaccuguacggggacagcaacccccagaaguucacguccagcgccaacggcgugaccacccacuacgucucccagaucgggggcuuccccgcccagaccgaggacgagggccucccgcagagcgggcggaucgugguggacuacaugguccagaagccccgcaagacgggcaccaucguguaccagcgcggggugcugcugccccagaaggucuggugcgcguccggccggagcaaggugaucaaggggagccucccccugaucggcgaggccgacugccugcacgagaaguacggcgggcucaacaaguccaagccguacuacaccggcgagcacgccaaggccaucgggaacugccccaucugggucaagacgccccugaagcuggccaacggcaccaaguaccggcccccggcgaagcuccugaaggagcgcggguucuucggcgccaucgccggcuuccuggagggcgggugggaggggaugaucgccggcuggcacggguacaccagccacggcgcccacggcguggcgguggccgccgaccucaaguccacccaggaggccaucaacaagaucaccaagaaccugaacagccuguccgagcucgaggucaagaaccugcagcggcugagcggggccauggacgagcuccacaacgagauccuggagcuggacgagaagguggacgaccuccgcgcggacacgaucuccagccagaucgagcuggccgugcugcucuccaacgagggcaucaucaacagcgaggacgagcaccuccuggcccuggagcggaagcugaagaagaugcuggggcccuccgccgucgacaucggcaacggcugcuucgagaccaagcacaagugcaaccagaccugccucgaccgcaucgcggccgggaccuucaacgccggcgaguucagccugcccaccuucgacucccugaacaucacggccgccagccucaacgacgacgggcuggacaaccacaccauccugcuguacuacuccaccgcggccagcucccucgccgugacccugaugcuggccaucuucaucguguacauggucagccgggacaacguguccugcagcaucugccucuga

SEQ ID NO: 90570 - RNA, 1755 nt, Artificial Sequence
  derived and/or modified CDS sequence (opt1) from hemagglutinin__InfluenzaB__ACF54213
augaaggccaucaucgugcugcucauggucgugaccagcaacgccgaccgcaucugcaccggcaucacguccagcaacagcccccacguggucaagaccgcgacccagggggaggugaacgugaccggcgucaucccgcugacgaccacccccaccaaguccuacuucgccaaccugaaggggacgcggacccgcggcaagcucugccccgacugccugaacugcaccgaccuggacguggcccucgggcggcccaugugcgugggcaccacgccguccgccaaggccagcauccugcacgagguccgccccgugaccuccggcugcuuccccaucaugcacgaccggaccaagauccgccagcugcccaaccuccugcggggguacgagaacauccgccugagcacccagaacgugaucgacgcggagaaggccccgggcgggcccuaccggcucggcacguccgggagcugccccaacgccaccuccaagagcggcuucuucgccaccauggcgugggccguccccaaggacaacaacaagaacgccaccaacccgcugacgguggaggugcccuacaucugcaccgagggcgaggaccagaucaccgucuggggguuccacuccgacgacaagacccagaugaagaaccuguacggcgacagcaacccccagaaguucacguccagcgccaacggggugaccacccacuacgugucccagaucggcggcuuccccgaccagaccgaggacgggggccucccgcagagcgggcgcaucgucguggacuacaugaugcagaagcccggcaagacggggaccaucguguaccagcggggcguccugcugccccagaagguguggugcgccuccggccgcagcaaggugaucaaggggagccucccccugaucggcgaggcggacugccugcacgagaaguacgggggccucaacaaguccaagccguacuacaccggggagcacgccaaggccaucggcaacugccccaucugggucaagacgccccugaagcuggccaacggcaccaaguaccggcccccggccaagcuccugaaggagcgcggguucuucggcgcgaucgccggguuccuggagggcgggugggagggcaugaucgccggcuggcacggguacaccagccacggcgcccacgggguggccgucgcggccgaccucaaguccacccaggaggccaucaacaagaucaccaagaaccugaacagccuguccgagcucgaggugaagaaccugcagcggcugagcggcgccauggacgagcuccacaacgagauccuggagcuggacgagaagguggacgaccuccgcgccgacacgaucuccagccagaucgagcuggcgguccugcucuccaacgagggcaucaucaacagcgagaacgagcaccuccuggcccuggagcggaagcugaagaagaugcuggggcccuccgccguggacaucggcaacgggugcuucgagaccaagcacaagugcaaccagaccugccucgaccgcaucgccgcgggcaccuucaacgccggggaguucagccugcccaccuucgacucccugaacaucacggccgccagccucaacgacgacggccuggacaaccacaccauccugcuguacuacuccaccgccgcgagcucccucgccgugacccugaugcuggccaucuucaucgucuacauggugagccgggacaacguguccugcagcaucugccucuga

SEQ ID NO: 90571 - RNA, 1758 nt, Artificial Sequence
  derived and/or modified CDS sequence (opt1) from hemagglutinin__InfluenzaB__ACF54224
augaaggccaucaucgugcugcucauggucgugaccagcaacgccgaccgcaucugcaccggcaucacguccagcaacagcccccacguggucaagaccgcgacccagggggaggugaacgugaccggcgucaucccgcugacgaccacccccaccaagagccacuucgccaaccugaaggggacgaagacccggggcaagcucugccccaagugccugaacugcaccgaccuggacguggcccucgggcgccccaagugcaccggcaacaucccguccgccgaggugagcauccugcacgagguccggcccgugacguccggcugcuuccccaucaugcacgaccgcaccaagauccggcagcugcccaaccuccugcgcggguacgagcacauccggcugagcacccacaacgugaucaacgccgagaaggcgccgggcgggcccuacaagaucggcaccuccgggagcugccccaacgucacgaacggcaacggcuucuucgccaccauggccugggccgugcccaagaacgacaacaacaagaccgcgaccaacucccucacgaucgaggugccguacaucugcaccgagggggaggaccagaucaccgucuggggcuuccacagcgacaacgagacccagauggccaagcuguacggggacuccaagccccagaaguucacgagcuccagcaacggcgugaccacccacuacgugucccagaucggcggguuccccaaccagaccgaggacggcgggcugccccagagcggccgcaucgucguggacuacauggugcagaaguccgggaagacgggcaccaucaccuaccagcggggcauccuccugccgcagaaggucuggugcgccagcgggcgcagcaaggugaucaagggcucccugccccucaucggggaggccgacugccugcacgagcgguacggcgggcugaacaagagcaagcccuacuacaccggcgagcacgccaaggcgaucggcaacugccccaucugggugaagacgccgcucaagcuggccaacgggaccaaguaccgcccgcccgccaagcugcucaaggagcggggcuucuucggggccaucgccggcuuccuggagggcgggugggagggcaugaucgcgggguggcacggcuacaccucccacggggcccacggcgucgccguggccgccgaccugaaguccacccaggaggcgaucaacaagaucacgaagaaccucaacucccugagcgagcuggaggucaagaaccuccagcgccuguccggcgccauggacgagcugcacaacgagauccucgagcuggacgagaagguggacgaccugcgggccgacaccaucagcucccagaucgagcucgccgugcugcugagcaacgaggggaucaucaacuccgaggacgagcaccuccuggcccuggagcgcaagcucaagaagaugcugggccccagcgcggucgagaucgggaacggcugcuucgagaccaagcacaagugcaaccagaccugccuggaccggaucgccgccgggaccuucgacgccggcgaguucucccuccccacguucgacagccugaacaucaccgcggccucccugaacgacgacggccucgacaaccacaccauccugcuguacuacagcaccgccgccuccagccuggccgugacgcucaugaucgcgaucuucguggucuacauggugucccgcgacaacgugagcugcagcaucugccuguga

SEQ ID NO: 90572 - RNA, 1755 nt, Artificial Sequence
  derived and/or modified CDS sequence (opt1) from hemagglutinin__InfluenzaB__ACF54257
augaaggccaucaucgugcugcucauggucgugaccagcaacgccgaccgcaucugcaccggcaucacguccagcaacagcccccacguggucaagaccgcgacccagggggaggugaacgugaccggcgccaucccgcugacgaccacccccaccaagucccacuucgccaaccugaaggggacgaagacccggggcaagcucugcccgaccugccugaacugcaccgaccuggacgucgcccucgggcgccccaugugcgugggcaucacgcccuccgccaaggcgagcauccugcacgaggugcggcccgucaccuccggcugcuuccccaucaugcacgaccgcaccaagauccggcagcugcccaaccuccugcgcggguacgagaagauccggcugagcacccagaacgugaucgacgccgagaaggccccgggcgggcccuaccgccucggcacguccgggagcugccccaacgccaccuccaagagcggcuucuucgcgaccauggccugggccgugccccgggagaacaacaagaccgccacgaacccgcugaccgucgaggugccccacaucugcaccaaggaggaggaccagaucaccguguggggcuuccacuccgacaacaagccccagaugaagaaccuguacggggacagcaacccccagaaguucacguccagcgccaacggcaucaccacccacuacgucucccagaucgggggcuucccggaccagaccgaggacggcgggcucccccagagcggccgcaucgugguggacuacaugguccagaagcccgggaagacgggcaccaucguguaccagcgggggauccugcugccccagaagguguggugcgcguccggccgcagcaaggucaucaagggcagccucccgcugaucggggaggccgacugccugcacgagaaguacggcgggcucaacaaguccaagcccuacuacaccggcgagcacgccaaggccaucgggaacugccccaucugggugaagacgccccugaagcuggccaacggcaccaaguaccggccgcccgcgaagcuccugaaggagcgcggcuucuucggggccaucgccggcuuccuggagggcgggugggaggggaugaucgccggcuggcacggcuacaccagccacggggcccacggcguggcggucgccgccgaccucaaguccacccaggaggccaucaacaagaucaccaagaaccugaacagccuguccgagcucgaggugaagaaccugcagcggcugagcggggccauggacgagcuccacaacgagauccuggagcuggacgagaaggucgacgaccuccgcgcggacacgaucuccagccagaucgagcuggccgugcugcucuccaacgagggcaucaucaacagcgaggacgagcaccuccuggcccuggagcggaagcugaagaagaugcugggccccuccgccguggacaucgggaacggcugcuucgagaccaagcacaagugcaaccagaccugccucgaccgcaucgcggccgggaccuucaacgccggcgaguucagccugcccaccuucgacucccugaacaucacggccgccagccucaacgacgacgggcuggacaaccacaccauccugcuguacuacuccaccgcggccagcucccucgccgucacccugaugaucgccaucuucaucguguacaugaucagccgggacaacguguccugcagcaucugccuguga

SEQ ID NO: 90573 - RNA, 1755 nt, Artificial Sequence
  derived and/or modified CDS sequence (opt1) from hemagglutinin__InfluenzaB__ACF54268
augaaggccaucaucgugcugcucauggucgugaccagcaacgccgaccgcaucugcaccggcaucacguccagcaacagcccccacguggucaagaccgcgacccagggggaggugaacgugaccggcgccaucccgcugacgaccacccccaccaagucccacuucgccaaccugaaggggacgaagacccggggcaagcucugcccgaccugccugaacugcaccgaccuggacgucgcccucgggcgccccaugugcgugggcaucacgcccuccgccaaggcgagcauccugcacgaggugcggcccgucaccuccggcugcuuccccaucaugcacgaccgcaccaagauccggcagcugcccaaccuccugcgcggguacgagaagauccggcugagcacccagaacgugaucgacgccgagaaggccccgggcgggcccuaccgccucggcacguccgggagcugccccaacgccaccuccaagagcggcuucuucgcgaccauggccugggccgugccccgggagaacaacaagaccgccacgaacccgcugaccgucgaggugccccacaucugcaccaaggaggaggaccagaucaccguguggggcuuccacuccgacaacaagauccagaugaagaaccuguacggggacagcaacccccagaaguucacguccagcgccaacggcaucaccacccacuacgucucccagaucgggggcuuccccgaccagaccgaggacggcgggcucccgcagagcggccgcaucgugguggacuacaugguccagaagcccgggaagacgggcaccaucguguaccagcgggggauccugcugccccagaagguguggugcgcguccggccgcagcaaggucaucaagggcagccucccccugaucggggaggccgacugccugcacgagaaguacggcgggcucaacaaguccaagccguacuacaccggcgagcacgccaaggccaucgggaacugccccaucugggugaagacgccccugaagcuggccaacggcaccaaguaccggcccccggcgaagcuccugaaggagcgcggcuucuucggggccaucgccggcuuccuggagggcgggugggaggggaugaucgccggcuggcacggcuacaccagccacggggcccacggcguggcggucgccgccgaccucaaguccacccaggaggccaucaacaagaucaccaagaaccugaacagccuguccgagcucgaggugaagaaccugcagcggcugagcggggccauggacgagcuccacaacgagauccuggagcuggacgagaaggucgacgaccuccgcgcggacacgaucuccagccagaucgagcuggccgugcugcucuccaacgagggcaucaucaacagcgaggacgagcaccuccuggcccuggagcggaagcugaagaagaugcugggccccuccgccaucgacaucgggaacggcugcuucgagaccaagcacaagugcaaccagaccugccucgaccgcaucgcggccgggaccuucaacgccggcgaguucagccugcccaccuucgacucccugaacaucacggccgccagccucaacgacgacgggcuggacaaccacaccauccugcuguacuacuccaccgcggccagcucccucgccgugacccugaugaucgccaucuucaucgucuacaugaucagccgggacaacguguccugcagcaucugccuguga

SEQ ID NO: 90574 - RNA, 1755 nt, Artificial Sequence
  derived and/or modified CDS sequence (opt1) from hemagglutinin__InfluenzaB__ACF54279
augaaggccaucaucgugcugcucauggucgugaccagcaacgccgaccgcaucugcaccggcaucacguccagcaacagcccccacguggucaagaccgcgacccagggggaggugaacgugaccggcgccaucccgcugacgaccacccccaccaagucccacuucgccaaccugaaggggacgaagacccggggcaagcucugcccgaccugccugaacugcaccgaccuggacgucgcccucgggcgccccaugugcgugggcaucacgcccuccgccaaggcgagcauccugcacgaggugcggcccgucaccuccggcugcuuccccaucaugcacgaccgcaccaagauccggcagcugcccaaccuccugcgcggguacgagaagauccggcugagcacccagaacgugaucgacgccgagaaggccccgggcgggcccuaccgccucggcacguccgggagcugccccaacgccaccuccaagagcggcuucuucgcgaccauggccugggccgugccccgggagaacaacaagaccgccacgaacccgcugaccgucgaggugccccacaucugcaccaaggaggaggaccagaucaccguguggggcuuccacuccgacaacaagacgcagaugaagaaccuguacggggacagcaacccccagaaguucaccuccagcgccaacggcaucaccacccacuacgucucccagaucgggggcuuccccgaccagacggaggacggcgggcucccgcagagcggccgcaucgugguggacuacaugguccagaagcccgggaagaccggcaccaucguguaccagcgggggauccugcugccccagaagguguggugcgcguccggccgcagcaaggucaucaagggcagccucccccugaucggggaggccgacugccugcacgagaaguacggcgggcucaacaaguccaagccguacuacaccggcgagcacgccaaggccaucgggaacugccccaucugggugaagacgccccugaagcuggccaacggcaccaaguaccggcccccggcgaagcuccugaaggagcgcggcuucuucggggccaucgccggcuuccuggagggcgggugggaggggaugaucgccggcuggcacggcuacaccagccacggggcccacggcguggcggucgccgccgaccucaaguccacccaggaggccaucaacaagaucacgaagaaccugaacagccuguccgagcucgaggugaagaaccugcagcggcugagcggggccauggacgagcuccacaacgagauccuggagcuggacgagaaggucgacgaccuccgcgcggacaccaucuccagccagaucgagcuggccgugcugcucuccaacgagggcaucaucaacagcgaggacgagcaccuccuggcccuggagcggaagcugaagaagaugcugggccccuccgccguggacaucgggaacggcugcuucgagaccaagcacaagugcaaccagaccugccucgaccgcaucgcggccgggaccuucaacgccggcgaguucagccugcccacguucgacucccugaacaucaccgccgccagccucaacgacgacgggcuggacaaccacaccauccugcuguacuacuccaccgcggccagcucccucgccgucacgcugaugaucgccaucuucaucguguacaugaucagccgggacaacguguccugcagcaucugccuguga

SEQ ID NO: 90575 - RNA, 1755 nt, Artificial Sequence
  derived and/or modified CDS sequence (opt1) from hemagglutinin__InfluenzaB__ACF54290
augaaggccaucaucgugcugcucauggucgugaccagcaacgccgaccgcaucugcaccggcaucacguccagcaacagcccccacguggucaagaccgcgacccagggggaggugaacgugaccggcgucaucccgcugacgaccacccccaccaaguccuacuucgccaaccugaaggggacgcggacccgcggcaagcucugccccgacugccugaacugcaccgaccuggacguggcccucgggcggcccaugugcgugggcaccacgccguccgccaaggccagcauccugcacgagguccgccccgugaccuccggcugcuuccccaucaugcacgaccggaccaagauccgccagcugcccaaccuccugcggggguacgagaacauccgccugagcacccagaacguggucgacgcggagaacgccccgggcgggcccuaccggcucggcacguccgggagcugccccaacgccaccuccaagagcggcuucuucgccaccauggcgugggccgugcccaaggacaacaacaagaacgccaccaacccgcugacgguggagguccccuacgugugcaccgagggcgaggaccagaucaccguguggggguuccacuccgacaagaagacccagaugaagaaccuguacggcgacagcaacccccagaaguucacguccagcgccaacggggucaccacccacuacgugucccagaucggcggcuuccccgcccagaccgaggacgggggccucccgcagagcgggcgcaucguggucgacuacauggugcagaagccccggaagacgggcaccaucguguaccagcgcgggguccugcugccccagaagguguggugcgcguccggccggagcaaggucaucaagggcagccucccccugaucggggaggccgacugccugcacgagaaguacggcgggcucaacaaguccaagccguacuacaccggcgagcacgccaaggccaucgggaacugccccaucugggugaagacgccccugaagcuggccaacggcaccaaguaccggcccccggcgaagcuccugaaggagcgcggcuucuucggggccaucgccggcuuccuggagggcgggugggaggggaugaucgccggcuggcacggcuacaccagccacggggcccacggcguggcggucgccgccgaccucaaguccacccaggaggccaucaacaagaucaccaagaaccugaacagccuguccgagcucgaggugaagaaccugcagcgccugagcggggccauggacgagcuccacaacgagauccuggagcuggacgagaagguggacgaccuccgggcggacacgaucuccagccagaucgagcuggccguccugcucuccaacgagggcaucaucaacagcgaggacgagcaccuccuggcccuggagcgcaagcugaagaagaugcugggccccuccgccguggacaucgggaacggcugcuucgagaccaagcacaagugcaaccagaccugccucgacaagaucgcggccgggaccuucaacgccggcgaguucagccugcccaccuucgacucccugaacaucacggccgccagccucaacgacgacgggcuggacaaccacaccauccugcuguacuacuccaccgcggccagcucccucgccgugacccugaugcuggccaucuucaucgucuacauggugagccgggacaacguguccugcagcaucugccucuga

SEQ ID NO: 90576 - RNA, 1758 nt, Artificial Sequence
  derived and/or modified CDS sequence (opt1) from hemagglutinin__InfluenzaB__ACF54312
augaaggccaucaucgugcugcucauggucgugaccagcaacgccgaccgcaucugcaccggcaucacguccagcaacagcccccacguggucaagaccgcgacccagggggaggugaacgugaccggcgucaucccgcugacgaccacccccaccaagagccacuucgccaaccugaaggggacgaagacccggggcaagcucugccccaagugccugaacugcaccgaccuggacguggcccucgggcgccccaagugcaccggcaacaucccguccgccgaggugagcauccugcacgagguccggcccgugacguccggcugcuuccccaucaugcacgaccgcaccaagauccggcagcugcccaaccuccugcgcggguacgagcacauccggcugagcacccacaacgugaucaacgccgagaaggcgccgggcgggcccuacaagaucggcaccuccgggagcugccccaacgucacgaacggcaacggcuucuucgccaccauggccugggccgugcccaagaacgacaacaacaagaccgcgaccaacucccucacgaucgaggugccguacaucugcaccgagggggaggaccagaucaccgucuggggcuuccacagcgacuccgagacccagauggccaagcuguacggggacagcaagccccagaaguucacguccagcuccaacggcgugaccacccacuacaucagccagaucggcggguuccccaaccagaccgaggacggcgggcugccccaguccggccgcaucguggucgacuacauggugcagaaguccgggaagacgggcaccaucaccuaccagcggggcauccuccugccgcagaagguguggugcgccagcgggcgcuccaaggucaucaagggcagccugccccucaucggggaggccgacugccugcacgagaaguacggcgggcugaacaaguccaagcccuacuacaccggcgagcacgccaaggcgaucggcaacugccccaucugggugaagacgccgcucaagcuggccaacgggaccaaguaccggccgcccgccaagcugcucaaggagcgcggcuucuucggggccaucgccggcuuccuggagggcgggugggagggcaugaucgcgggguggcacggcuacaccagccacggggcccacggcguggccgucgccgccgaccugaaguccacccaggaggcgaucaacaagaucacgaagaaccucaacagccuguccgagcuggaggugaagaaccuccagcggcugagcggcgccauggacgagcugcacaacgagauccucgagcuggacgagaaggucgacgaccugcgcgccgacaccaucuccagccagaucgagcucgccgugcugcuguccaacgaggggaucaucaacagcgaggacgagcaccuccuggcccuggagcggaagcucaagaagaugcugggccccuccgcgaucgagaucgggaacggcugcuucgagaccaagcacaagugcaaccagaccugccuggaccgcaucgccgccgggaccuucgacgccggcgaguucagccuccccacguucgacucccugaacaucaccgcggccagccugaacgacgacggccucgacaaccacaccauccugcuguacuacuccaccgccgccagcucccuggccgugacgcucaugaucgcgaucuucgucguguacauggugagccgggacaacgucagcugcuccaucugccuguga

SEQ ID NO: 90577 - RNA, 1758 nt, Artificial Sequence
  derived and/or modified CDS sequence (opt1) from hemagglutinin__InfluenzaB__ACF54323
augaaggccaucaucgugcugcucauggucgugaccagcaacgccgaccgcaucugcaccggcaucacguccagcaacagcccccacguggucaagaccgcgacccagggggaggugaacgugaccggcgucaucccgcugacgaccacccccaccaagagccacuucgccaaccugaaggggacggagacccggggcaagcucugccccaagugccugaacugcaccgaccuggacguggcccucgggcgccccaagugcaccggcaacaucccguccgcccgggugagcauccugcacgagguccgccccgugacguccggcugcuuccccaucaugcacgaccggaccaagauccgccagcugcccaaccuccugcggggguacgagcacauccgccugagcacccggaacgugaucaacgccgagaacgcgccgggcgggcccuacaagaucggcaccuccgggagcugccccaacgucacgaacggcaacggcuucuucgccaccauggccugggccgugcccaagaacgacaacaacaagaccgcgaccaacucccucacgaucgaggugccguacaucugcaccgagggggaggaccagaucaccgucuggggcuuccacagcgacaacgaggcccagauggccaagcuguacggggacuccaagccccagaaguucaccagcuccgccaacggcgugacgacccacuacgugagccagaucggcggguuccccaaccagaccgaggacggcgggcugccccaguccggccgcaucgucguggacuacauggugcagaaguccgggaagaccggcacgaucaccuaccagcggggcauccuccugccgcagaaggucuggugcgccuccgggcgcagcaaggugaucaagggcagccugccccucaucggggaggcggacugccugcacgagaaguacggcgggcugaacaaguccaagcccuacuacaccggcgagcacgccaaggccaucggcaacugccccaucugggugaagaccccgcucaagcuggccaacgggacgaaguaccggccgcccgccaagcugcucaaggagcgcggcuucuucggggcgaucgccggcuuccuggagggcgggugggagggcaugaucgccggguggcacggcuacaccagccacggggcccacggcgucgccguggcggccgaccugaaguccacccaggaggccaucaacaagaucaccaagaaccucaacagccuguccgagcuggaggucaagaaccuccagcggcugagcggcgccauggacgagcugcacaacgagauccucgagcuggacgagaagguggacgaccugcgcgccgacacgaucuccagccagaucgagcucgcggugcugcuguccaacgaggggaucaucaacagcgaggacgagcaccuccuggcccuggagcggaagcucaagaagaugcugggccccuccgccgucgagaucgggaacggcugcuucgagaccaagcacaagugcaaccagaccugccuggaccgcaucgccgcggggaccuucgacgccggcgaguucagccuccccaccuucgacucccugaacaucacggccgccagccugaacgacgacggccucgacaaccacaccauccugcuguacuacuccaccgccgcgagcucccuggccgugacccucaugaucgccaucuucguggucuacauggugagccgggacaacguguccugcagcaucugccuguga

SEQ ID NO: 90578 - RNA, 1755 nt, Artificial Sequence
  derived and/or modified CDS sequence (opt1) from hemagglutinin__InfluenzaB__ACF54345
augaaggccaucaucgugcugcucauggucgugaccagcaacgccgaccgcaucugcaccggcaucacguccagcaacagcccccacguggucaagaccgcgacccagggggaggugaacgugaccggcgucaucccgcugacgaccacccccaccaaguccuacuucgccaaccugaaggggacgcggacccgcggcaagcucugccccgacugccugaacugcaccgaccuggacguggcccucgggcggcccaugugcgugggcaccacgccguccgccaaggccagcauccugcacgagguccgccccgugaccuccggcugcuuccccaucaugcacgaccggaccaagauccgccagcuggcgaaccuccugcggggguacgagaacauccgccugagcacccagaacgugaucgacgccgagaaggcccccggcgggccguaccggcucggcacguccgggagcugccccaacgccaccuccaagagcggcuucuucgcgaccauggccugggccguccccaaggacaacaacaagaacgccaccaacccccugacgguggaggugccguacaucugcaccgagggcgaggaccagaucaccgucuggggguuccacuccgacaacaaggcccagaugaagaaccuguacggcgacagcaacccccagaaguucaccuccagcgcgaacggggugacgacccacuacgugucccagaucggcggcuuccccgaccagaccgaggacgggggccucccccagagcgggcgcaucgucguggacuacaugauccagaagccgggcaagaccgggacgaucguguaccagcggggcguccugcugccccagaagguguggugcgccuccggccgcagcaaggugaucaaggggagccucccccugaucggcgaggccgacugccugcacgagaaguacgggggccucaacaaguccaagcccuacuacaccggggagcacgccaaggccaucggcaacugcccgaucugggucaagacgccccugaagcuggcgaacggcaccaaguaccggccgcccgccaagcuccugcgcgagcggggguucuucggcgccaucgccggguuccuggagggcgggugggagggcaugaucgccggcuggcacggguacaccagccacggcgcgcacgggguggccgucgccgccgaccucaaguccacccaggaggccaucaacaagaucaccaagaaccugaacagccuguccgagcucgaggugaagaaccugcagcgccugagcggcgcgauggacgagcuccacaacgagauccuggagcuggacgagaagguggacgaccuccgggccgacaccaucuccagccagaucgagcuggccguccugcucuccaacgagggcaucaucaacagcgaggacgagcaccuccuggcccuggagcgcaagcugaagaagaugcuggggcccuccgcgguggacaucggcaacgggugcuucgagacgaagcacaagugcaaccagaccugccucgaccggaucgccgccggcaccuucaacgccggggaguucagccugcccaccuucgacucccugaacaucaccgccgcgagccucaacgacgacggccuggacaaccacacgauccugcuguacuacuccaccgccgccagcucccucgccgugacccugaugcuggccaucuucaucgucuacauggugagccgcgacaacguguccugcagcaucugccucuga

SEQ ID NO: 90579 - RNA, 1755 nt, Artificial Sequence
  derived and/or modified CDS sequence (opt1) from hemagglutinin__InfluenzaB__ACF54367
augaaggccaucaucgugcugcucauggucgugaccagcaacgccgaccgcaucugcaccggcaucacguccagcaacagcccccacguggucaagaccgcgacccagggggaggugaacgugaccggcgucaucccgcugacgaccgcccccaccaaguccuacuucgccaaccugaaggggacccggacgcgcggcaagcucugccccgacugccugaacugcaccgaccuggacguggcccucgggcggcccaugugcgugggcaccaccccguccgccaaggcgagcauccugcacgagguccgccccgugacguccggcugcuuccccaucaugcacgaccggaccaagauccgccagcuggccaaccuccugcggggguacgagaacauccgccugagcacccagaacgugaucgacgccgagaaggcccccggcgggccguaccggcucggcaccuccgggagcugccccaacgcgacguccaagagcggcuucuucgccaccauggccugggccguccccaaggacaacaacaagaacgccaccaacccccugaccguggaggugccguacaucugcacggagggcgaggaccagaucaccgucuggggguuccacuccgacagcaagacccagaugaagaaccuguacggcgacuccaacccccagaaguucaccagcuccgcgaacggggugacgacccacuacgugagccagaucggcggcuuccccgaccagaccgaggacgggggccucccccaguccgggcgcaucgucguggacuacaugaugcagaagccgggcaagaccgggacgaucguguaccagcggggcguccugcugccccagaagguguggugcgccagcggccgcagcaaggugaucaaggggucccucccccugaucggcgaggccgacugccugcacgagaaguacgggggccucaacaagagcaagcccuacuacaccggggagcacgccaaggccaucggcaacugcccgaucugggucaagacgccccugaagcuggcgaacggcaccaaguaccggccgcccgccaagcuccugaaggagcgcggguucuucggcgccaucgccggguuccuggagggcgggugggagggcaugaucgccggcuggcacggguacaccucccacggcgcgcacgggguggccgucgccgccgaccucaagagcacccaggaggccaucaacaagaucaccaagaaccugaacucccugagcgagcucgaggugaagaaccugcagcggcuguccggcgcgauggacgagcuccacaacgagauccuggagcuggacgagaagguggacgaccuccgcgccgacaccaucagcucccagaucgagcuggccguccugcucagcaacgagggcaucaucaacuccgaggacgagcaccuccuggcccuggagcggaagcugaagaagaugcuggggcccagcgcgguggacaucggcaacgggugcuucgagacgaagcacaagugcaaccagaccugccucgaccgcaucgccgccggcaccuucaacgccggggaguucucccugcccaccuucgacagccugaacaucaccgccgcgucccucaacgacgacggccuggacaaccacacgauccugcuguacuacagcaccgccgccuccagccucgccgugacccugaugcuggccaucuucaucgucuacauggugucccgggacaacgugagcugcagcaucugccucuga

SEQ ID NO: 90580 - RNA, 1755 nt, Artificial Sequence
  derived and/or modified CDS sequence (opt1) from hemagglutinin__InfluenzaB__ACN32556
augaaggccaucaucgugcugcucauggucgugaccagcaacgccgaccgcaucugcaccggcaucacguccagcaacagcccccacguggucaagaccgcgacccagggggaggugaacgugaccggcgccaucccgcugacgaccacccccaccaagucccacuucgccaaccugaaggggacgaagacccggggcaagcucugcccgaccugccugaacugcaccgaccuggacgucgcccucgggcgccccaugugcgugggcaucacgcccuccgccaaggcgagcauccugcacgaggugcggcccgucaccuccggcugcuuccccaucaugcacgaccgcaccaagauccggcagcugcccaaccuccugcgcggguacgagaagauccggcugagcacccagaacgugaucaacgccgagaaggccccgggcgggcccuaccgccucggcacguccgggagcugccccaacgccaccuccaagagcggcuucuucgcgaccauggccugggccgugccccgggacaacaacaagaccgccacgaacccgcugaccgucgaggugccccacaucugcaccaaggaggaggaccagaucaccguguggggcuuccacuccgacaacaagacgcagaugaagaaccuguacggggacagcaacccccagaaguucaccuccuucgccaacggcaucaccacccacuacgucagccagaucgggggcuuccccgaccagacggaggacggcgggcucccgcaguccggccgcaucgugguggacuacaugguccagaagcccgggaagaccggcaccaucguguaccagcgggggauccugcugccccagaagguguggugcgcgagcggccgcuccaaggucaucaagggcagccucccccugaucggggaggccgacugccugcacgagaaguacggcgggcucaacaagagcaagccguacuacaccggcgagcacgccaaggccaucgggaacugccccaucugggugaagacgccccugaagcuggccaacggcaccaaguaccggcccccggcgaagcuccugaaggagcgcggcuucuucggggccaucgccggcuuccuggagggcgggugggaggggaugaucgccggcuggcacggcuacaccucccacggggcccacggcguggcggucgccgccgaccucaagagcacccaggaggccaucaacaagaucacgaagaaccugaacucccugagcgagcucgaggugaagaaccugcagcggcuguccggggccauggacgagcuccacaacgagauccuggagcuggacgagaaggucgacgaccuccgcgcggacaccaucagcucccagaucgagcuggccgugcugcucagcaacgagggcaucaucaacuccgaggacgagcaccuccuggcccuggagcggaagcugaagaagaugcugggccccagcgccguggacaucgggaacggcugcuucgagaccaagcacaagugcaaccagaccugccucgaccgcaucgcggccgggaccuucaacgccggcgaguucucccugcccacguucgacagccugaacaucaccgccgccucccucaacgacgacgggcuggacaaccacaccauccugcuguacuacagcaccgcggccuccagccucgccgucacgcugaugaucgccaucuucaucguguacaugaucucccgggacaacgugagcugcuccaucugccuguga

SEQ ID NO: 90581 - RNA, 1758 nt, Artificial Sequence
  derived and/or modified CDS sequence (opt1) from hemagglutinin__InfluenzaB__ACN32567
auggaggccaucaucgugcugcucauggucgugaccagcaacgccgaccgcaucugcaccggcaucacguccagcaacagcccccacguggucaagaccgcgacccagggggaggugaacgugaccggcgucaucccgcugacgaccacccccaccaagagccacuucgccaaccugaaggggacggagacccggggcaagcucugccccaagugccugaacugcaccgaccuggacguggcccucgggcgccccaagugcaccggcaacaucccguccgcccgggugagcauccugcacgagguccgccccgugacguccggcugcuuccccaucaugcacgaccggaccaagauccgccagcugcccaaccuccugcggggguacgagcacauccgccugagcacccacaacgugaucaacgccgagaacgcgccgggcgggcccuacaagaucggcaccuccgggagcugccccaacgucacgaacggcaacggcuucuucgccaccauggccugggccgugcccaagaacgacaacaacaagaccgcgaccaacucccucacgaucgaggugccguacaucugcaccgagggggaggaccagaucaccgucuggggcuuccacagcgacaacgagacccagauggccaagcuguacggggacuccaagccccagaaguucacgagcuccgccaacggcgugaccacccacuacgugagccagaucggcggguuccccaaccagaccgaggacggcgggcugccccaguccggccggaucgucguggacuacauggugcagaaguccgggaagacgggcaccaucaccuaccagcgcggcauccuccugccgcagaaggucuggugcgccuccgggcggagcaaggugaucaagggcagccugccccucaucggggaggccgacugccugcacgagaaguacggcgggcugaacaaguccaagcccuacuacaccggcgagcacgcgaaggccaucggcaacugccccaucugggugaagacgccgcucaagcuggccaacgggaccaaguaccgcccgcccgccaagcugcucaaggagcggggcuucuucggggccaucgcgggcuuccuggagggcgggugggagggcaugaucgccggguggcacggcuacaccagccacggggcccacggcgucgccguggccgcggaccugaaguccacccaggaggccaucaacaagaucacgaagaaccucaacagccuguccgagcuggaggucaagaaccuccagcgccugagcggcgccauggacgagcugcacaacgagauccucgagcuggacgagaagguggacgaccugcgggccgacaccaucuccagccagaucgagcucgccgugcugcuguccaacgaggggaucaucaacagcgaggacgagcaccuccuggcgcuggagcgcaagcucaagaagaugcugggccccuccgccgucgagaucgggaacggcugcuucgagaccaagcacaagugcaaccagaccugccuggaccggaucgccgccgggaccuucgacgcgggcgaguucagccuccccacguucgacucccugaacaucaccgccgccagccugaacgacgacggccucgacaaccacaccauccugcuguacuacuccaccgccgccagcucccuggcggugacgcucaugaucgccaucuucguggucuacauggugagccgcgacaacguguccugcagcaucugccuguga

SEQ ID NO: 90582 - RNA, 1758 nt, Artificial Sequence; identical to SEQ ID NO: 90538
  derived and/or modified CDS sequence (opt1) from hemagglutinin__InfluenzaB__ACN32578

SEQ ID NO: 90583 - RNA, 1758 nt, Artificial Sequence
  derived and/or modified CDS sequence (opt1) from hemagglutinin__InfluenzaB__ACN32589
augaaggccaucaucgugcugcucauggucgugaccagcaacgccgaccgcaucugcaccggcaucacguccagcaacagcccccacguggucaagaccgcgacccagggggaggugaacgugaccggcgucaucccgcugacgaccacccccaccaagagccacuucuccaaccugaaggggacggagacccggggcaagcucugccccaagugccugaacugcaccgaccuggacguggcccucgggcgccccaagugcaccggcaacaucccgagcgcccggguguccauccugcacgagguccgccccgugacgagcggcugcuuccccaucaugcacgaccggaccaagauccgccagcugcccaaccuccugcggggguacgagcacauccgccuguccacccacaacgugaucaacgccgagaacgccccgggcgggcccuacaagaucggcaccagcggguccugccccaacgucacgaacggcaacggcuucuucgcgaccauggccugggccgugcccaagaacgacaacaacaagaccgccaccaacagccucacgaucgaggugccguacaucugcaccgagggggaggaccagaucaccaucuggggcuuccacuccgacaacgagacccagauggcgaagcuguacggggacagcaagccccagaaguucacguccagcgccaacggcgucaccacccacuacgugucccagaucggcggguuccccaaccagaccgaggacggcgggcugccccagagcggccggaucguggucgacuacauggugcagaaguccgggaagacgggcaccaucaccuaccagcgcggcauccuccugccgcagaagguguggugcgccagcgggcggagcaaggucaucaagggcucccugccccucaucggggaggccgacugccugcacgagaaguacggcgggcugaacaagagcaagcccuacuacaccggcgagcacgccaaggcgaucggcaacugccccaucugggugaagacgccgcucaagcuggccaacgggaccaaguaccgcccgcccgccaagcugcucaaggagcggggcuucuucggggccaucgccggcuuccuggagggcgggugggagggcaugaucgcgggguggcacggcuacaccucccacggggcccacggcguggccgucgccgccgaccugaaguccacccaggaggcgaucaacaagaucacgaagaaccucaacucccugagcgagcuggaggugaagaaccuccagcgccuguccggcgccauggacgagcugcacaacgagauccucgagcuggacgagaaggucgacgaccugcgggccgacaccaucagcucccagaucgagcucgccgugcugcugagcaacgaggggaucaucaacuccgaggacgagcaccuccuggcccuggagcgcaagcucaagaagaugcugggccccagcgcgguggagaucgggaacggcugcuucgagaccaagcacaagugcaaccagaccugccuggaccggaucgccgccgggaccuucgacgccggcgaguucucccuccccacguucgacagccugaacaucaccgcggccucccugaacgacgacggccucgacaaccacaccauccugcuguacuacagcaccgccgccuccagccuggccgucacgcucaugaucgcgaucuucgugguguacauggucucccgcgacaacgugagcugcagcaucugccuguga

SEQ ID NO: 90584 - RNA, 1758 nt, Artificial Sequence
  derived and/or modified CDS sequence (opt1) from hemagglutinin__InfluenzaB__ACN32600
augaaggccaucaucgugcugcucauggucgugaccagcaacgccgaccgcaucugcaccggcaucacguccagcaacagcccccacguggucaagaccgcgacccagggggaggugaacgugaccggcgucaucccgcugacgaccacccccaccaagagccacuucuccaaccugaaggggacggagacccggggcaagcucugccccaagugccugaacugcaccgaccuggacguggcccucgggcgccccaagugcaccggcaacaucccgagcgcccggguguccauccugcacgagguccgccccgugacgagcggcugcuuccccaucaugcacgaccggaccaagauccgccagcugcccaaccuccugcggggguacgagcacauccgccuguccacccacaacgugaucaacgccgagaacgccccgggcgggcccuacaagaucggcaccagcggguccugccccaacgucacgaacggcaacggcuucuucgcgaccauggccugggccgugcccaagaacgacaacaacaagaccgccaccaacagccucacgaucgaggugccguacaucugcaccgagggggaggaccagaucaccgucuggggcuuccacuccgacaacgagacccagauggcgaagcuguacggggacagcaagccccagaaguucacguccagcgccaacggcgugaccacccacuacgugucccagaucggcggguuccccaaccagaccgaggacggcgggcugccccagagcggccggaucgucguggacuacauggugcagaaguccgggaagacgggcaccaucaccuaccagcgcggcauccuccugccgcagaaggucuggugcgccagcgggcggagcaaggugaucaagggcucccugccccucaucggggaggccgacugccugcacgagaaguacggcgggcugaacaagagcaagcccuacuacaccggcgagcacgccaaggcgaucggcaacugccccaucugggugaagacgccgcucaagcuggccaacgggaccaaguaccgcccgcccgcccggcugcucaaggagcgcggcuucuucggggccaucgccggcuuccuggagggcgggugggagggcaugaucgcgggguggcacggcuacaccucccacggggcccacggcgucgccguggccgccgaccugaaguccacccaggaggcgaucaacaagaucacgaagaaccucaacucccugagcgagcuggaggucaagaaccuccagcggcuguccggcgccauggacgagcugcacaacgagauccucgagcuggacgagaagguggacgaccugcgcgccgacaccaucagcucccagaucgagcucgccgugcugcugagcaacgaggggaucaucaacuccgaggacgagcaccuccuggcccuggagcggaagcucaagaagaugcugggccccagcgcggucgagaucgggaacggcugcuucgagaccaagcacaagugcaaccagaccugccuggaccgcaucgccgccgggaccuucgacgccggcgaguucucccuccccacguucgacagccugaacaucaccgcggccucccugaacgacgacggccucgacaaccacaccauccugcuguacuacagcaccgccgccuccagccuggccgugacgcucaugaucgcgaucuucguggucuacauggugucccgggacaacgugagcugcagcaucugccuguga

SEQ ID NO: 90585 - RNA, 1758 nt, Artificial Sequence; identical to SEQ ID NO: 90549
  derived and/or modified CDS sequence (opt1) from hemagglutinin__InfluenzaB__ACN32611

SEQ ID NO: 90586 - RNA, 1755 nt, Artificial Sequence; identical to SEQ ID NO: 90450
  derived and/or modified CDS sequence (opt1) from hemagglutinin__InfluenzaB__ACN32716

SEQ ID NO: 90587 - RNA, 1758 nt, Artificial Sequence; identical to SEQ ID NO: 90538
  derived and/or modified CDS sequence (opt1) from hemagglutinin__InfluenzaB__ACN32771

SEQ ID NO: 90588 - RNA, 1758 nt, Artificial Sequence; identical to SEQ ID NO: 90544
  derived and/or modified CDS sequence (opt1) from hemagglutinin__InfluenzaB__ACN32782

SEQ ID NO: 90589 - RNA, 1758 nt, Artificial Sequence
  derived and/or modified CDS sequence (opt1) from hemagglutinin__InfluenzaB__ACO05957
augaaggccaucaucgugcugcucauggucgugaccagcaacgccgaccgcaucugcaccggcaucacguccagcaacagcccccacguggucaagaccgcgacccagggggaggugaacgugaccggcgucaucccgcugacgaccacccccaccaagagccacuucgccaaccugaaggggacggagacccggggcaagcucugccccaagugccugaacugcaccgaccuggacguggcccucgggcgccccaagugcaccggcaacaucccguccgcccgggugagcauccugcacgagguccgccccgugacguccggcugcuuccccaucaugcacgaccggaccaagauccgccagcugcccaaccuccugcggggguacgagcacauccgccugagcacccacaacgugaucaacgccgagaacgcgccgggcgggcccuacaagaucggcaccuccgggagcugccccaacgucacgaacggcaacggcuucuucgccaccauggccugggccgugcccaagaacgacaacaacaagaccgcgaccaacucccucacgaucgaggugccguacaucugcaccgagggggaggaccagaucaccgucuggggcuuccacagcgacaacgagauccagauggccaagcuguacggggacuccaagccccagaaguucaccagcuccgccaacggcgugacgacccacuacgugagccagaucggcggguuccccaaccagaccgaggacggcgggcugccccaguccggccggaucgucguggacuacauggugcagaaguccgggaagaccggcacgaucaccuaccagcgcggcauccuccugccgcagaaggucuggugcgccuccgggcggagcaaggugaucaagggcagccugccccucaucggggaggccgacugccugcacgagaaguacggcgggcugaacaaguccaagcccuacuacaccggcgagcacgcgaaggccaucggcaacugccccaucugggugaagaccccgcucaagcuggccaacgggacgaaguaccgcccgcccgccaagcugcucaaggagcggggcuucuucggggccaucgcgggcuuccuggagggcgggugggagggcaugaucgccggguggcacggcuacaccagccacggggcccacggcgucgccguggccgcggaccugaaguccacccaggaggccaucaacaagaucaccaagaaccucaacagccuguccgagcuggaggucaagaaccuccagcgccugagcggcgccauggacgagcugcacaacgagauccucgagcuggacgagaagguggacgaccugcgggccgacacgaucuccagccagaucgagcucgccgugcugcuguccaacgaggggaucaucaacagcgaggacgagcaccuccuggcgcuggagcgcaagcucaagaagaugcugggccccuccgccgucgagaucgggaacggcugcuucgagaccaagcacaagugcaaccagaccugccuggaccggaucgccgccgggaccuucgacgcgggcgaguucagccuccccaccuucgacucccugaacaucacggccgccagccugaacgacgacggccucgacaaccacaccauccugcuguacuacuccaccgccgccagcucccuggcggugacccucaugaucgccaucuucguggucuacauggugagccgcgacaacguguccugcagcaucugccuguga

SEQ ID NO: 90590 - RNA, 1755 nt, Artificial Sequence
  derived and/or modified CDS sequence (opt1) from hemagglutinin__InfluenzaB__ACO05968
augaaggccaucaucgugcugcucauggucgugaccagcaacgccgaccgcaucugcaccggcaucacguccagcaacagcccccacguggucaagaccgcgacccagggggaggugaacgugaccggcgucaucccgcugacgaccacccccaccaaguccuacuucgccaaccugaaggggacgcggacccgcggcaagcucugccccgacugccugaacugcaccgaccuggacguggcccucgggcggcccaugugcgugggcaccacgccguccgccaaggccagcauccugcacgagguccgccccgugaccuccggcugcuuccccaucaugcacgaccggaccaagauccgccagcugcccaaccuccugcggggguacgagaacauccgccugagcacccagaacgugaucgacgcggagaaggccccgggcgggcccuaccggcucggcacguccgggagcugccccaacgccaccuccaagagcggcuucuucgccaccauggcgugggccguccccaaggacaacaacaagaacgccaccaacccgcugacgguggaggugcccuacaucugcaccgagcgcgaggaccagaucaccgucuggggcuuccacuccgacaacaagacccagaugaagaaccuguacggggacagcaacccccagaaguucacguccagcgccaacggcgugaccacccacuacgugucccagaucgggagcuuccccgaccagaccgaggacggcggccucccgcaguccgggcggaucgucguggacuacaugaugcagaagcccggcaagacggggaccaucguguaccagcgcggcguccugcugccccagaagguguggugcgccagcgggcggagcaaggugaucaagggcucccucccccugaucggcgaggcggacugccugcacgagaaguacgggggccucaacaagagcaagccguacuacaccggggagcacgccaaggccaucggcaacugccccaucugggucaagacgccccugaagcuggccaacgggaccaaguaccggcccccggccaagcuccugaaggagcgcggcuucuucggcgcgaucgccggguuccuggagggcgggugggagggcaugaucgccggguggcacggcuacaccucccacggcgcccacgggguggccgucgcggccgaccucaagagcacccaggaggccaucaacaagaucaccaagaaccugaacucccugagcgagcucgaggugaagaaccugcagcgccuguccggcgccauggacgagcuccacaacgagauccuggagcuggacgagaagguggacgaccuccgggccgacacgaucagcucccagaucgagcuggcgguccugcucagcaacgaggggaucaucaacuccgaggacgagcaccuccuggcccuggagcgcaagcugaagaagaugcugggccccagcgccguggagaucggcaacgggugcuucgagaccaagcacaagugcaaccagaccugccucgaccggaucgccgcgggcaccuucaacgccggggaguucucccugcccaccuucgacagccugaacaucacggccgccucccucaacgacgacggccuggacaaccacaccauccugcuguacuacagcaccgccgcguccagccucgccgugacccugaugcuggccaucuucaucgucuacauggugucccgcgacaacgugagcugcagcaucugccucuga

SEQ ID NO: 90591 - RNA, 1755 nt, Artificial Sequence
  derived and/or modified CDS sequence (opt1) from hemagglutinin__InfluenzaB__ACO05979
augaaggccaucaucgugcugcucauggucgugaccagcaacgccgaccgcaucugcaccggcaucacguccagcaacagcccccacguggucaagaccgcgacccagggggaggugaacgugaccggcgucaucccgcugacgaccacccccaccaaguccuacuucgccaaccugaaggggacgcggacccgcggcaagcucugccccgacugccugaacugcaccgaccuggacguggcccucgggcggcccaugugcgugggcaccacgccguccgccaaggccagcauccugcacgagguccgccccgugaccuccggcugcuuccccaucaugcacgaccggaccaagauccgccagcugcccaaccuccugcggggguacgagaacauccgccugagcacccagaacgugaucgacgcggagaaggccccgggcgggcccuaccggcucggcacguccgggagcugccccaacgccaccuccaagagcggcuucuucgccaccauggcgugggccguccccaaggacaacaacaagaacgccaccaacccgcugacgguggaggugcccuacaucugcaccgagggcgaggaccagaucaccgucuggggguuccacuccgacaacaagacccagaugaagaaccuguacggcgacagcaacccccagaaguucacguccagcgccaacggggugaccacccacuacgugucccagaucggcagcuuccccgaccagaccgaggacggcgggcucccgcaguccggccgcaucgucguggacuacaugaugcagaagcccgggaagacgggcaccaucguguaccagcgcgggguccugcugccccagaagguguggugcgccagcggccggagcaaggugaucaagggcucccucccccugaucggggaggcggacugccugcacgagaaguacggcgggcucaacaagagcaagccguacuacaccggcgagcacgccaaggccaucgggaacugccccaucugggucaagacgccccugaagcuggccaacggcaccaaguaccggcccccggccaagcuccugaaggagcgcggcuucuucggggcgaucgccggcuuccuggagggcgggugggaggggaugaucgccggcuggcacggcuacaccucccacggggcccacggcguggccgucgcggccgaccucaagagcacccaggaggccaucaacaagaucaccaagaaccugaacucccugagcgagcucgaggugaagaaccugcagcggcuguccggggccauggacgagcuccacaacgagauccuggagcuggacgagaagguggacgaccuccgcgccgacacgaucagcucccagaucgagcuggcgguccugcucagcaacgagggcaucaucaacuccgaggacgagcaccuccuggcccuggagcggaagcugaagaagaugcugggccccagcgccguggagaucgggaacggcugcuucgagaccaagcacaagugcaaccagaccugccucgaccgcaucgccgcggggaccuucaacgccggcgaguucucccugcccaccuucgacagccugaacaucacggccgccucccucaacgacgacgggcuggacaaccacaccauccugcuguacuacagcaccgccgcguccagccucgccgugacccugaugcuggccaucuucaucgucuacauggugucccgggacaacgugagcugcagcaucugccucuga

SEQ ID NO: 90592 - RNA, 1755 nt, Artificial Sequence; identical to SEQ ID NO: 90591
  derived and/or modified CDS sequence (opt1) from hemagglutinin__InfluenzaB__ACO05990

SEQ ID NO: 90593 - RNA, 1758 nt, Artificial Sequence
  derived and/or modified CDS sequence (opt1) from hemagglutinin__InfluenzaB__ACO06001
augaaggccaucaucgugcugcucauggucgugaccagcaacgccgaccgcaucugcaccggcaucacguccagcaacagcccccacguggucaagaccgcgacccagggggaggugaacgugaccggcgucaucccgcugacgaccacccccaccaagagccacuucgccaaccugaaggggacggagacccggggcaagcucugccccaagugccugaacugcaccgaccuggacguggcccucgggcgccccaagugcaccggcaacaucccguccgcccgggugagcauccugcacgagguccgccccgugacguccggcugcuuccccaucaugcacgaccggaccaagauccgccagcugcccaaccuccugcggggguacgagcacauccgccugagcacccacaacgugaucaacgccgagaacgcgccgggcgggcccuacaagaucggcaccuccgggagcugccccaacgucacgaacggcaacggcuucuucgccaccauggccugggccgugcccaagaacgacaacaacaagaccgcgaccaacucccucacgaucgaggugccguacaucugcaccgagggggaggaccagaucaccgucuggggcuuccacagcgacaacgagaaccagauggccaagcuguacggggacuccaagccccagaaguucaccagcuucgccaacggcgugacgacccacuacgugucccagaucggcggguuccccaaccagaccgaggacggcgggcugccccagagcggccggaucgucguggacuacauggugcagaaguccgggaagaccggcacgaucaccuaccagcgcggcauccuccugccgcagaaggucuggugcgccagcgggcgguccaaggugaucaagggcagccugccccucaucggggaggccgacugccugcacgagaaguacggcgggcugaacaagagcaagcccuacuacaccggcgagcacgcgaaggccaucggcaacugccccaucugggugaagaccccgcucaagcuggccaacgggacgaaguaccgcccgcccgccaagcugcucaaggagcggggcuucuucggggccaucgcgggcuuccuggagggcgggugggagggcaugaucgccggguggcacggcuacaccucccacggggcccacggcgucgccguggccgcggaccugaaguccacccaggaggccaucaacaagaucaccaagaaccucaacucccugagcgagcuggaggucaagaaccuccagcgccuguccggcgccauggacgagcugcacaacgagauccucgagcuggacgagaagguggacgaccugcgggccgacacgaucagcucccagaucgagcucgccgugcugcugagcaacgaggggaucaucaacuccgaggacgagcaccuccuggcgcuggagcgcaagcucaagaagaugcugggccccagcgccgucgagaucgggaacggcugcuucgagaccaagcacaagugcaaccagaccugccuggaccggaucgccgccgggaccuucgacgcgggcgaguucucccuccccaccuucgacagccugaacaucacggccgccucccugaacgacgacggccucgacaaccacaccauccugcuguacuacagcaccgccgccuccagccuggcggugacccucaugaucgccaucuucguggucuacauggugucccgcgacaacgugagcugcuccaucugccuguga

SEQ ID NO: 90594 - RNA, 1755 nt, Artificial Sequence; identical to SEQ ID NO: 90591
  derived and/or modified CDS sequence (opt1) from hemagglutinin__InfluenzaB__ACO06012

SEQ ID NO: 90595 - RNA, 1755 nt, Artificial Sequence; identical to SEQ ID NO: 90591
  derived and/or modified CDS sequence (opt1) from hemagglutinin__InfluenzaB__ACO06023

SEQ ID NO: 90596 - RNA, 1755 nt, Artificial Sequence
  derived and/or modified CDS sequence (opt1) from hemagglutinin__InfluenzaB__ACO06062
augaaggccaucaucgugcugcucauggucgugaccagcaacgccgaccgcaucugcaccggcaucacguccagcaacagcccccacguggucaagaccgcgacccagggggaggugaacgugaccggcgucaucccgcugacgaccacccccaccaaguccuacuucgccaaccugaaggggacgcggacccgcggcaagcucugccccgacugccugaacugcaccgaccuggacguggcccucgggcggcccaugugcgugggcaccacgccguccgccaaggccagcauccugcacgagguccgccccgugaccuccggcugcuuccccaucaugcacgaccggaccaagauccgccagcugcccaaccuccugcggggguacgagaacauccgccugagcacccagaacgugaucgacgcggagaaggccccgggcgggcccuaccggcucggcacguccgggagcugccccaacgccaccuccaagagcggcuucuucgccaccauggcgugggccguccccaaggacaacaacaagaacgccaccaacccgcugacgguggaggugcccuacaucugcaccgagggcgaggaccagaucaccgucuggggguuccacuccgacaacaagacccagaugaagaaccuguacggcgacagcaacccccagaaguucacguccagcgccaacggggugaccacccacuacgugucccagaucgacagcuuccccgaccagaccgaggacggcggccucccgcaguccgggcgcaucgucguggacuacaugaugcagaagcccggcaagacggggaccaucguguaccagcggggcguccugcugccccagaagguguggugcgccagcgggcgcagcaaggugaucaagggcucccucccccugaucggcgaggcggacugccugcacgagaaguacgggggccucaacaagagcaagccguacuacaccggggagcacgccaaggccaucggcaacugccccaucugggucaagacgccccugaagcuggccaacgggaccaaguaccggcccccggccaagcuccugaaggagcgcggcuucuucggcgcgaucgccggguuccuggagggcgggugggagggcaugaucgccggguggcacggcuacaccucccacggcgcccacgggguggccgucgcggccgaccucaagagcacccaggaggccaucaacaagaucaccaagaaccugaacucccugagcgagcucgaggugaagaaccugcagcggcuguccggcgccauggacgagcuccacaacgagauccuggagcuggacgagaagguggacgaccuccgcgccgacacgaucagcucccagaucgagcuggcgguccugcucagcaacgaggggaucaucaacuccgaggacgagcaccuccuggcccuggagcggaagcugaagaagaugcugggccccagcgccguggagaucggcaacgggugcuucgagaccaagcacaagugcaaccagaccugccucgaccgcaucgccgcgggcaccuucaacgccggggaguucucccugcccaccuucgacagccugaacaucacggccgccucccucaacgacgacggccuggacaaccacaccauccugcuguacuacagcaccgccgcguccagccucgccgugacccugaugcuggccaucuucaucgucuacauggugucccgggacaacgugagcugcagcaucugccucuga

SEQ ID NO: 90597 - RNA, 1758 nt, Artificial Sequence
  derived and/or modified CDS sequence (opt1) from hemagglutinin__InfluenzaB__ACO94661
augaaggccaucaucgugcugcucauggucgugaccagcaacgccgaccgcaucugcaccggcaucacguccagcaacagcccccacguggucaagaccgcgacccagggggaggugaacgugaccggcgucaucccgcugacgaccacccccaccaagagccacuucgccaaccugaaggggacggagacccggggcaagcucugccccaagugccugaacugcaccgaccuggacguggcccucgggcgccccaagugcaccggcaacaucccguccgcccgggugagcauccugcacgagguccgccccgugacguccggcugcuuccccaucaugcacgaccggaccaagauccgccagcugcccaaccuccugcggggguacgagcacauccgccugagcacccacaacgugaucaacgccgagaacgcgccgggcgggcccuacaagaucggcaccuccgggagcugccccaacgucacgaacggcaacggcuucuucaccaccauggccugggccgugcccaagaacgacaacaacaagaccgccacgaacucccucaccaucgaggugccguacaucugcaccgagggggaggaccagaucaccgucuggggcuuccacagcgacaacgagacgcagauggcgaagcuguacggggacuccaagccccagaaguucaccagcuccgccaacggcgugaccacccacuacgugagccagaucggcggguuccccaaccagacggaggacggcgggcugccccaguccggccggaucgucguggacuacauggugcagaaguccgggaagaccggcaccaucaccuaccagcgcggcauccuccugccgcagaaggucuggugcgccuccgggcggagcaaggugaucaagggcagccugccccucaucggggaggccgacugccugcacgagaaguacggcgggcugaacaaguccaagcccuacuacacgggcgagcacgccaaggcgaucggcaacugccccaucugggugaagaccccgcucaagcuggccaacgggaccaaguaccgcccgcccgccaagcugcucaaggagcggggcuucuucggggccaucgccggcuuccuggagggcgggugggagggcaugaucgcgggguggcacggcuacaccagccacggggcccacggcgucgccguggccgccgaccugaaguccacgcaggaggcgaucaacaagaucaccaagaaccucaacagccuguccgagcuggaggucaagaaccuccagcgccugagcggcgccauggacgagcugcacaacgagauccucgagcuggacgagaagguggacgaccugcgggccgacaccaucuccagccagaucgagcucgccgugcugcuguccaacgaggggaucaucaacagcgaggacgagcaccuccuggcccuggagcgcaagcucaagaagaugcugggccccuccgcggucgagaucgggaacggcugcuucgagaccaagcacaagugcaaccagaccugccuggaccggaucgccgccgggacguucgacgccggcgaguucagccuccccaccuucgacucccugaacaucaccgcggccagccugaacgacgacggccucgacaaccacaccauccugcuguacuacuccacggccgccagcucccuggccgugacccucaugaucgcgaucuucguggucuacauggugagccgcgacaacguguccugcagcaucugccuguga

SEQ ID NO: 90598 - RNA, 1758 nt, Artificial Sequence; identical to SEQ ID NO: 90538
  derived and/or modified CDS sequence (opt1) from hemagglutinin__InfluenzaB__ACR15622

SEQ ID NO: 90599 - RNA, 1758 nt, Artificial Sequence
  derived and/or modified CDS sequence (opt1) from hemagglutinin__InfluenzaB__ACR15633
augaaggccaucaucgugcugcucauggucgugaccagcaacgccgaccgcaucugcaccggcaucacguccagcaacagcccccacguggucaagaccgcgacccagggggaggugaacgugaccggcgucaucccgcugacgaccacccccaccaagagccacuucgccaaccugaaggggacggagacccggggcaagcucugccccaagugccugaacugcaccgaccuggacguggcccucgggcgccccaagugcaccggcaacaucccguccgcccgggugagcauccugcacgagguccgccccgugacguccggcugcuuccccaucaugcacgaccggaccaagauccgccagcugcccaaccuccugcggggguacgagcacauccgccugagcacccacaacgugaucaacgccgagaacgcgccgggcgggcccuacaagaucggcaccuccgggagcugccccaacgucacgaacggcaacggcuucuucgccaccauggccugggccgugcccaagaacgacaacaacaagaccgcgaccaacucccucacgaucgaggugccguacaucugcaccgagggggaggaccagaucaccgucuggggcuuccacagcgacuccgagacccagauggccaagcuguacggggacagcaagccccagaaguucacguccagcgccaacggcgugaccacccacuacgugucccagaucggcggguuccccaaccagaccgaggacggcgggcugccccagagcggccggaucgucguggacuacauggugcagaaguccgggaagacgggcaccaucaccuaccagcgcggcauccuccugccgcagaaggucuggugcgccagcgggcggagcaaggugaucaagggcucccugccccucaucggggaggccgacugccugcacgagaaguacggcgggcugaacaagagcaagcccuacuacaccggcgagcacgcgaaggccaucggcaacugccccaucugggugaagacgccgcucaagcuggccaacgggaccaaguaccgcccgcccgccaagcugcucaaggagcggggcuucuucggggccaucgcgggcuuccuggagggcgggugggagggcaugaucgccggguggcacggcuacaccucccacggggcccacggcgucgccguggccgcggaccugaaguccacccaggaggccaucaacaagaucacgaagaaccucaacucccugagcgagcuggaggucaagaaccuccagcgccuguccggcgccauggacgagcugcacaacgagauccucgagcuggacgagaagguggacgaccugcgggccgacaccaucagcucccagaucgagcucgccgugcugcugagcaacgaggggaucaucaacuccgaggacgagcaccuccuggcgcuggagcgcaagcucaagaagaugcugggccccagcgccgucgagaucgggaacggcugcuucgagaccaagcacaagugcaaccagaccugccuggaccggaucgccgccgggaccuucgacgcgggcgaguucucccuccccacguucgacagccugaacaucaccgccgccucccugaacgacgacggccucgacaaccacaccauccugcuguacuacagcaccgccgccuccagccuggcggugacgcucaugaucgccaucuucguggucuacauggugucccgcgacaacgugagcugcagcaucugccuguga

SEQ ID NO: 90600 - RNA, 1755 nt, Artificial Sequence
  derived and/or modified CDS sequence (opt1) from hemagglutinin__InfluenzaB__ACR15644
augaaggccaucaucgugcugcucauggucgugaccagcaacgccgaccgcaucugcaccggcaucacguccagcaacagcccccacguggucaagaccgcgacccagggggaggugaacgugaccggcgucaucccgcugacgaccacccccaccaaguccuacuucgccaaccugaaggggacgcggacccgcggcaagcucugccccgacugccugaacugcaccgaccuggacguggcccucgggcggcccaugugcgugggcaccacgccguccgccaaggccagcauccugcacgagguccgccccgugaccuccggcugcuuccccaucaugcacgaccggaccaagauccgccagcugcccaaccuccugcggggguacgagaacauccgccugagcacccagaacgugaucgacgcggagaacgccccgggcgggcccuaccggcucggcacguccgggagcugccccaacgccaccuccaagagcggcuucuucgccaccauggcgugggccguccccaaggacaacaacaagaacgccaccaacccgcugacgguggaggugcccuacgucugcaccgagggcgaggaccagaucaccguguggggguuccacuccgacaacaagauccagaugaagaaccuguacggcgacagcaacccccagaaguucaccuccagcgccaacggggugacgacccacuacgucucccagaucggcggcuuccccgcccagaccgaggacgggggccucccgcagagcgggcgcaucgugguggacuacaugguccagaagccccggaagaccggcacgaucguguaccagcgcggggugcugcugccccagaaggucuggugcgcguccggccggagcaaggugaucaagggcagccucccccugaucggggaggccgacugccugcacgagaaguacggcgggcucaacaaguccaagccguacuacaccggcgagcacgccaaggccaucgggaacugccccaucugggucaagacgccccugaagcuggccaacggcaccaaguaccggcccccggcgaagcuccugaaggagcgcggcuucuucggggccaucgccggcuuccuggagggcgggugggaggggaugaucgccggcuggcacggcuacaccagccacggggcccacggcguggcgguggccgccgaccucaaguccacccaggaggccaucaacaagaucaccaagaaccugaacagccuguccgagcucgaggucaagaaccugcagcgccugagcggggccauggacgagcuccacaacgagauccuggagcuggacgagaagguggacgaccuccgggcggacaccaucuccagccagaucgagcuggccgugcugcucuccaacgagggcaucaucaacagcgaggacgagcaccuccuggcccuggagcgcaagcugaagaagaugcugggccccuccgccgucgacaucgggaacggcugcuucgagacgaagcacaagugcaaccagaccugccucgaccggaucgcggccgggaccuucaacgccggcgaguucagccugcccaccuucgacucccugaacaucaccgccgccagccucaacgacgacgggcuggacaaccacacgauccugcuguacuacuccaccgcggccagcucccucgccgugacccugaugcuggccaucuucaucguguacauggucagccgcgacaacguguccugcagcaucugccucuga

SEQ ID NO: 90601 - RNA, 1758 nt, Artificial Sequence
  derived and/or modified CDS sequence (opt1) from hemagglutinin__InfluenzaB__ACR15655
augaaggccaucaucgugcugcucauggucgugaccagcaacgccgaccgcaucugcaccggcaucacguccagcaacagcccccacguggucaagaccgcgacccagggggaggugaacgugaccggcgucaucccgcugacgaccacccccaccaagagccacuucgccaaccugaaggggacggagacccggggcaagcucugccccaagugccugaacugcaccgaccuggacguggcccucgggcgccccaagugcaccggcaacaucccguccgcccgggugagcauccugcacgagguccgccccgugacguccggcugcuuccccaucaugcacgaccggaccaagauccgccagcugcccaaccuccugcggggguacgagcacauccgccugagcacccacaacgugaucaacgccgagaacgcgccgggcgggcccuacaagaucggcaccuccgggagcugccccaacgucacgaacggcaacggcuucuucgccaccauggccugggccgugcccaagaacgacaacaacaagaccgcgaccaacucccucacgaucgaggugccguacaucugcaccgagggggaggaccagaucaccgucuggggcuuccacagcgacuccgagacccagauggccaagcuguacggggacagcaagccccagaaguucacguccagcgccaacggcgugaccacccacuacgugucccagaucggcggguuccccaaccagaccgaggacggcgggcugccccagagcggccggaucgucguggacuacauggugcagaaguccgggaagacgggcaccaucaccuaccagcgcggcauccuccugccgcagaaggucuggugcgccagcgggcggagcaaggugaucaagggcucccugccccucaucggggaggccgacugccugcacgagaaguacggcgggcugaacaagagcaagcccuacuacaccggcgagcacgcgaaggccaucggcaacugccccaucugggugaagacgccgcucaagcuggccaacgggaccaaguaccgcccgcccgccaagcugcucaaggagcggggcuucuucggggccaucgcgggcuuccuggagggcgggugggagggcaugaucgccggguggcacggcuacaccucccacggggcccacggcgucgccguggccgcggaccugaaguccacccaggaggccaucaacaagaucacgaagaaccucaacucccugagcgagcuggaggucaagaaccuccagcgccuguccggcgccauggacgagcugcacaacgagauccucgagcuggacgagaagguggacgaccugcgggccgacaccaucagcucccagaucgagcucgccgugcugcugagcaacgaggggaucaucaacuccgaggacgagcaccuccuggcgcuggagcgcaagcucaagaagaugcugggccccagcgccgucgagaucgggaacggcugcuucgagaccaagcacaagugcaaccagaccugccuggaccggaucgccgccgggaccuucgacgcgggcgaguucucccuccccacguucgacagccugaacaucaccgccgccucccugaacgacgacggccucgacaaccacaccauccugcuguacuacagcaccgccgccuccagccuggcggugacgcucaugaucgccaucuucguggucuacauggugucccgcgacaacaucagcugcagcaucugccuguga

SEQ ID NO: 90602 - RNA, 1758 nt, Artificial Sequence
  derived and/or modified CDS sequence (opt1) from hemagglutinin__InfluenzaB__ACR15666
augaaggccaucaucgugcugcucauggucgugaccagcaacgccgaccgcaucugcaccggcaucacguccagcaacagcccccacguggucaagaccgcgacccagggggaggugaacgugaccggcgucaucccgcugacgaccacccccaccaagagccacuucgccaaccugaaggggacggagacccggggcaagcucugccccaagugccugaacugcaccgaccuggacguggcccucgggcgccccaagugcaccggcaacaucccguccgcccgggugagcauccugcacgagguccgccccgugacguccggcugcuuccccaucaugcacaaccggaccaagauccgccagcugcccaaccuccugcggggguacgagcacauccgccugagcacccacaacgugaucaacgccgagaacgcgccgggcgggcccuacaagaucggcaccuccgggagcugccccaacgucacgaacggcaacggcuucuucgccaccauggccugggccgugcccaagaacgacaacaacaagaccgcgaccaacucccucacgaucgaggugccguacaucugcaccgagggggaggaccagaucaccgucuggggcuuccacagcgacgacgagacccagauggccaagcuguacggggacuccaagccccagaaguucacgagcuccgccaacggcgugaccacccacuacgugagccagaucggcggguuccccaaccagaccgaggacggcgggcugccccaguccggccggaucgucguggacuacauggugcagaaguccgggaagacgggcaccaucaccuaccagcgcggcauccuccugccgcagaaggucuggugcgccuccgggcggagcaaggugaucaagggcagccugccccucaucggggaggccgacugccugcacgagaaguacggcgggcugaacaaguccaagcccuacuacaccggcgagcacgcgaaggccaucggcaacugccccaucugggugaagacgccgcucaagcuggccaacgggaccaaguaccgcccgcccgccaagcugcucaaggagcggggcuucuucggggccaucgcgggcuuccuggagggcgggugggagggcaugaucgccggguggcacggcuacaccagccacggggcccacggcgucgccguggccgcggaccugaaguccacccaggaggccaucaacaagaucacgaagaaccucaacagccuguccgagcuggaggucaagaaccuccagcgccugagcggcgccauggacgagcugcacaacgagauccucgagcuggacgagaagguggacgaccugcgggccgacaccaucuccagccagaucgagcucgccgugcugcuguccaacgaggggaucaucaacagcgaggacgagcaccuccuggcgcuggagcgcaagcucaagaagaugcugggccccuccgccgucgagaucgggaacggcugcuucgagaccaagcacaagugcaaccagaccugccuggaccggaucgccgccgggaccuucgacgcgggcgaguucagccuccccacguucgacucccugaacaucaccgccgccagccugaacgacgacggccucgacaaccacaccauccugcuguacuacuccaccgccgccagcucccuggcggugacgcucaugaucgccaucuucguggucuacauggugagccgcgacaacguguccugcagcaucugccuguga

SEQ ID NO: 90603 - RNA, 1758 nt, Artificial Sequence
  derived and/or modified CDS sequence (opt1) from hemagglutinin__InfluenzaB__ACR15677
augaaggccaucaucgugcugcucauggucgugaccagcaacgccgaccgcaucugcaccggcaucacguccagcaacagcccccacguggucaagaccgcgacccagggggaggugaacgugaccggcgucaucccgcugacgaccacccccaccaagagccacuucgccaaccugaaggggacgaagacccggggcaagcucugccccaagugccugaacugcaccgaccuggacguggcccucgggcgccccaagugcaccggcaacaucccguccgccaaggugagcauccugcacgagguccggcccgugacguccggcugcuuccccaucaugcacgaccgcaccaagauccggcagcugcccaaccuccugcgcggguacgagcacauccggcugagcacccacaacgugaucaacgccgagaaggcgccgggcgggcccuacaagaucggcaccuccgggagcugccccaacaucacgaacggcaacggcuucuucgccaccauggccugggccguccccaagaacgacaacaacaagaccgcgaccaacucccucacgaucgaggugccguacaucugcaccgagggggaggaccagaucaccguguggggcuuccacagcgacaacgaggcccagauggccaagcuguacggggacuccaagccccagaaguucaccagcuccgccaacggcgucacgacccacuacgugagccagaucggcggguuccccaaccagaccgaggacggcgggcugccccaguccggccgcaucguggucgacuacauggugcagaaguccgggaagaccggcacgaucaccuaccagcggggcauccuccugccgcagaagguguggugcgccuccgggcgcagcaaggucaucaagggcagccugccccucaucggggaggcggacugccugcacgagaaguacggcgggcugaacaaguccaagcccuacuacaccggcgagcacgccaaggccaucggcaacugccccaucugggugaagaccccgcucaagcuggccaacgggacgaaguaccggccgcccgccaagcugcucaaggagcgcggcuucuucggggcgaucgccggcuuccuggagggcgggugggagggcaugaucgccggguggcacggcuacaccagccacggggcccacggcguggccgucgcggccgaccugaaguccacccaggaggccaucaacaagaucaccaagaaccucaacagccuguccgagcuggaggugaagaaccuccagcggcugagcggcgccauggacgagcugcacaacgagauccucgagcuggacgagaaggucgacgaccugcgcgccgacacgaucuccagccagaucgagcucgcggugcugcuguccaacgaggggaucaucaacagcgaggacgagcaccuccuggcccuggagcggaagcucaagaagaugcugggccccuccgccguggagaucgggaacggcugcuucgagaccaagcacaagugcaaccagaccugccuggaccgcaucgccgcggggaccuucgacgccggcgaguucagccuccccaccuucgacucccugaacaucacggccgccagccugaacgacgacggccucgacaaccacaccauccugcuguacuacuccaccgccgcgagcucccuggccgucacccucaugaucgccaucuucgugguguacauggucagccgggacaacguguccugcagcaucugccuguga

SEQ ID NO: 90604 - RNA, 1755 nt, Artificial Sequence; identical to SEQ ID NO: 90591
  derived and/or modified CDS sequence (opt1) from hemagglutinin__InfluenzaB__ACR15710

SEQ ID NO: 90605 - RNA, 1755 nt, Artificial Sequence
  derived and/or modified CDS sequence (opt1) from hemagglutinin__InfluenzaB__ACR15721
augaaggccaucaucgugcugcucauggucgugaccagcaacgccgaccgcaucugcaccggcaucacguccagcaacagcccccacguggucaagaccgcgacccagggggaggugaacgugaccggcgucaucccgcugacgaccacccccaccaagucccacuucgccaaccugaaggggacgaagacccggggcaagcucugccccaacugccugaacugcaccgaccuggacguggcccucgggcgccccaugugcgugggcaccacgccguccgccaaggccagcauccugcacgagguccggcccgugaccuccggcugcuuccccaucaugcacgaccgcaccaagauccggcagcugcccaaccuccugcgcggguacgagaacauccggcugagcacccagaacgugaucaacgcggagaaggccccgggcgggcccuaccgccucggcacguccgggagcugccccaacgccaccucccggagcggcuucuucgccaccauggcgugggccgucccccgcgacgacaacaagaccgccacgaacccgcugaccguggaggugcccuacgucugcaccgagggcgaggaccagaucaccguguggggguuccacuccgacaacaaggcccagaugaagaaccuguacggcgacagcaacccccagaaguucacguccagcgccaacggggugaccacccacuacgucucccagaucggcggcuuccccgaccagaccgaggacgggggccucccgcagagcgggcggaucgugguggacuacaugguccagaagcccggcaagacggggaccaucguguaccagcgcggcgugcugcugccccagaaggucuggugcgcguccggccggagcaaggugaucaaggggagccucccccugaucggcgaggccgacugccugcacgagaaguacgggggccucaacaaguccaagccguacuacaccggggagcacgccaaggccaucggcaacugccccaucugggucaagacgccccugaagcuggccaacggcaccaaguaccggcccccggcgaagcuccugaaggagcgcggguucuucggcgccaucgccggguuccuggagggcgggugggagggcaugaucgccggcuggcacggguacaccagccacggcgcccacgggguggcgguggccgccgaccucaaguccacccaggaggccaucaacaagaucaccaagaaccugaacagccuguccgagcucgaggucaagaaccugcagcgccugagcggcgccauggacgagcuccacaacgagauccuggagcuggacgagaagguggacgaccuccgggcggacacgaucuccagccagaucgagcuggccgugcugcucuccaacgagggcaucaucaacagcgaggacgagcaccuccuggcccuggagcgcaagcugaagaagaugcuggggcccuccgccgucgacaucggcaacgggugcuucgagaccaagcacaagugcaaccagaccugccucgaccggaucgcggccggcaccuucaacgccggggaguucagccugcccaccuucgacucccugaacaucacggccgccagccucaacgacgacggccuggacaaccacaccauccugcuguacuacuccaccgcggccagcucccucgccgugacccugaugaucgccaucuucaucguguacauggucagccgcgacaacguguccugcagcaucugccuguga

SEQ ID NO: 90606 - RNA, 1758 nt, Artificial Sequence
  derived and/or modified CDS sequence (opt1) from hemagglutinin__InfluenzaB__ACR39336
augaaggccaucaucgugcugcucauggucgugaccagcaacgccgaccgcaucugcaccggcaucacguccagcaacagcccccacguggucaagaccgcgacccagggggaggugaacgugaccggcgucaucccgcugacgaccacccccaccaagagccacuucgccaaccugaaggggacggagacccggggcaagcucugccccaagugccugaacugcaccgaccuggacguggcccucgggcgccccaagugcaccggcaacaucccguccgcccgggugagcauccugcacgagguccgccccgugacguccggcugcuuccccaucaugcacgaccggaccaagauccgccagcugcccaaccuccugcggggguacgagcacauccgccugagcacccacaacgugaucaacgccgagaacgcgccgggcgggcccuacaagaucggcaccuccgggagcugccccaacgucacgaacggcaacggcuucuucgccaccauggccugggccgugcccaagaacgacaacaacaagaccgcgaccaacucccucacgaucgaggugccguacaucugcaccgagggggaggaccagaucaccgucuggggcuuccacagcgacaacgaggcccagauggccaagcuguacggggacuccaagccccagaaguucaccagcuccgccaacggcgugacgacccacuacgugagccagaucggcggguuccccaaccagaccgaggacggcgggcugccccaguccggccggaucgucguggacuacauggugcagaaguccgggaagaccggcacgaucaccuaccagcgcggcauccuccugccgcagaaggucuggugcgccuccgggcggagcaaggugaucaagggcagccugccccucaucggggaggcggacugccugcacgagaaguacggcgggcugaacaaguccaagcccuacuacaccggcgagcacgccaaggccaucggcaacugccccaucugggugaagaccccgcucaagcuggccaacgggacgaaguaccgcccgcccgccaagcugcucaaggagcggggcuucuucggggcgaucgccggcuuccuggagggcgggugggagggcaugaucgccggguggcacggcuacaccagccacggggcccacggcgucgccguggcggccgaccugaaguccacccaggaggccaucaacaagaucaccaagaaccucaacagccuguccgagcuggaggucaagaaccuccagcgccugagcggcgccauggacgagcugcacaacgagauccucgagcuggacgagaagguggacgaccugcgggccgacacgaucuccagccagaucgagcucgcggugcugcuguccaacgaggggaucaucaacagcgaggacgagcaccuccuggcccuggagcgcaagcucaagaagaugcugggccccuccgccgucgagaucgggaacggcugcuucgagaccaagcacaagugcaaccagaccugccuggaccggaucgccgcggggaccuucgacgccggcgaguucagccuccccaccuucgacucccugaacaucacggccgccagccugaacgacgacggccucgacaaccacaccauccugcuguacuacuccaccgccgcgagcucccuggccgugacccucaugaucgccaucuucguggucuacauggugagccgcgacaacguguccugcagcaucugccuguga

SEQ ID NO: 90607 - RNA, 1755 nt, Artificial Sequence
  derived and/or modified CDS sequence (opt1) from hemagglutinin__InfluenzaB__AEA51386
augaaggccaucaucgugcugcucauggucgugaccagcaacgccgaccgcaucugcaccggcaucacguccagcaacagcccccacguggucaagaccgcgacccagggggaggugaacgugaccggcgucaucccgcugacgaccacccccaccaaguccuacuucgccaaccugaaggggacgcggacccgcggcaagcucugccccgacugccugaacugcaccgaccuggacguggcccucgggcggcccaugugcgugggcaccacgccguccgccaaggccagcauccugcacgagguccgccccgugaccuccggcugcuuccccaucaugcacgaccggaccaagauccgccagcugcccaaccuccugcggggguacgagaacauccgccugagcacccagaacgugaucgacgcggagaaggccccgggcgggcccuaccggcucggcacguccgggagcugccccaacgccaccuccaagagcggcuucuucgccaccauggcgugggccguccccaaggacaacuacaagaacgccaccaacccgcugacgguggaggugcccuacaucugcaccgagggcgaggggcagaucaccgucuggggcuuccacuccgacaacaagccccagaugaagaaccuguacggggacagcaacccccagaaguucaccuccagcgccuccggcgugacgacccacuacgugagccagaucggcgacuucccggaccagaccgaggacgggggccucccccaguccgggcgcaucgucguggacuacaugaugcagaagcccggcaagaccgggacgaucguguaccagcggggcguccugcugccccagaagguguggugcgccagcggccgcagcaaggugaucaaggggucccucccgcugaucggcgaggcggacugccugcacgagaaguacgggggccucaacaagagcaagcccuacuacaccggggagcacgccaaggccaucggcaacugccccaucugggucaucacgccccagaagcuggccaacggcaccaccuucuccccgcccgccaagcugcucaaggagcggggguucuucggcgcgaucgccggguuccuggagggcgggugggagggcaugaucgccggcuggcacggguacaccagccacggcgcccacgggguggccgucgcggccgaccugaaguccacccaggaggccaucaacaagaucaccaagaaccucaacagccuguccgagcuggaggugaagaaccuccagcgccugagcggcgccauggacgagcugcacaacgagauccucgagcuggacgagaagguggacgaccugcgggccgacacgaucuccagccagaucgagcucgcgguccugcuguccaacgagggcaucaucaacagcgaggacgagcaccuccuggcccuggagcgcaagcucaagaagaugcuggggcccuccgccguggacaucggcaacgggugcuucgagaccaagcacaagugcaaccagaccugccuggaccggaucgccgcgggcaccuucaacgccggggaguucagccuccccaccuucgacucccugaacaucacggccgccagccugaacgacgacggccucgacaaccacaccauccugcuguacuacuccaccgccgcgagcucccuggccgugacccucaugcuggccaucuucaucgucuacauggugagccgcgacaacgugagcugcuccaucugccuguga

SEQ ID NO: 90608 - RNA, 1755 nt, Artificial Sequence
  derived and/or modified CDS sequence (opt1) from hemagglutinin__InfluenzaB__AEA51387
augaaggccaucaucgugcugcucauggucgugaccagcaacgccgaccgcaucugcaccgagaucacguccagcaacuccccgcugguggucaagaccgcgacccagggcgaggugaacgugaccggggucaucccgcugacgaccacccccaccaagagcuacuucgccaaccucaagggcacgcggacccgcgggaagcugugccccgacugccugaacugcaccgaccucgacguggcccugggccggcccaugugcguggggaccacgccguccgccaaggccagcauccugcacgagguccgccccgugaccuccggcugcuuccccaucaugcacgaccggaccaagauccgccagcuccccaaccugcugcggggcuacgagaacauccgccucagcacccagaacgugaucgacgcggagaaggcccccgggggccccuaccggcuggggacguccggcagcugccccaacgccaccuccaagaucggguucuucgccaccauggcgugggccguccccaaggacaacuacaagaacgccaccaacccgcugacgguggaggugcccuacaucugcaccgagggcgaggaccagaucaccgucuggggcuuccacagcgacaacaagacccagaugaagaaccucuacggggacuccaacccccagaaguucacgagcuccgccaacggcgugaccacccacuacgugagccagaucggggacuuccccgaccagaccgaggacggcggccugccgcaguccgggcgcaucgucguggacuacaugaugcagaagcccggcaagacggggcccaucguguaccagcggggcguccugcucccccagaagguguggugcgccagcgggcgcuccaaggugaucaagggcagccugccgcugaucggcgaggcggacugccuccacgagaaguacgggggccugaacaagagcaaguacucccacaccggggaccacgccaagacccugggcaacugccccaucugggucaagacgccccucaagcuggccaacgggaccaaguaccggcccccggccaagcugcucaaggagcgcggcuucuucggcgccaucgcgggguuccuggagggcgggugggagggcaugaucgccggguggcacggcuacaccagccacggcgcccacgggguggccgucgccgcggaccugaaguccacccaggaggccaucaacaagaucaccaagaaccucaacagccuguccgagcuggaggugaagaaccuccagcggcugagcggcgccauggacgagcugcacaacgagauccucgagcuggacgagaagguggacgaccugcgcgccgacacgaucuccagccagaucgagcucgccguccugcuguccaacgaggggaucaucaacagcgaggacgagcaccuccuggcgcuggagcggaagcucaagaagaugcugggccccuccgccguggacaucggcaacgggugcuucgagaccaagcacaagugcaaccagaccugccuggaccgcaucgccgccggcaccuucaacgcgggggaguucagccuccccaccuucgacucccugaacaucacggccgccagccugaacgacgacggccuggacaaccacaccauccuccuguacuacuccaccgccgccagcucccuggcggugacccucaugcuggccaucuucaucgucuacauggugagccgggacaacguguccugcagcaucugccuguga

SEQ ID NO: 90609 - RNA, 1755 nt, Artificial Sequence
  derived and/or modified CDS sequence (opt1) from hemagglutinin__InfluenzaB__AEA51388
augaaggccaucaucgugcugcucauggucgugaccagcaacgccgaccgcaucugcaccggcaucacguccagcaacagcccccacguggucaagaccgcgacccagggggaggugaacgugaccggcgucaucccgcugacgaccacccccaccaaguccuacuucgccaaccugaaggggacgcggacccgcggcaagcucugccccgacugccugaacugcaccgaccuggacguggcccucgggcggcccaugugcgugggcaccacgccguccgccaaggccagcauccugcacgagguccgccccgugaccuccggcugcuuccccaucaugcacgaccggaccaagauccgccagcugcccaaccuccugcggggguacgagaacauccgccugagcacccagaacgugaucgacgcggagaaggccccgggcgggcccuaccggcucggcacguccgggagcugccccaacgccaccuccaagaucggcuucuucgccaccauggcgugggccguccccaaggacaacuacaagaacgccaccaacccgcugacgguggaggugcccuacaucugcaccgagggcgaggaccagaucaccgucuggggguuccacagcgacaacaagacccagaugaagaaccuguacggcgacuccaacccccagaaguucacgagcuccgccaacggggugaccacccacuacgugagccagaucggcgacuuccccgaccagaccgaggacggcgggcucccgcaguccggccgcaucgucguggacuacaugaugcagaagcccgggaagacgggcaccaucguguaccagcgcgggguccugcugccccagaagguguggugcgccagcggccgguccaaggugaucaagggcagccucccccugaucggggaggcggacugccugcacgagaaguacggcgggcucaacaagagcaagccguccuacaccggcgagcacgccaaggccaaggggaacugccccaucugggucaacacgccccugaagcuggccaacggcaccaaguaccggcccccggccaagcuguucaaggagcgcggcuucuucggggcgaucgccggcuuccucgagggcgggugggaggggaugaucgccggcuggcacggcuacaccagccacggggcccacggcguggccgucgcggccgaccugaaguccacccaggaggccaucaacaagaucaccaagaaccucaacagccuguccgagcuggaggugaagaaccuccagcggcugagcggggccauggacgagcugcacaacgagauccucgagcuggacgagaagguggacgaccugcgcgccgacacgaucuccagccagaucgagcucgcgguccugcuguccaacgagggcaucaucaacagcgaggacgagcaccuccuggcccuggagcggaagcucaagaagaugcugggccccuccgccguggacaaggggaacggcugcuucgagaccaagcacaagugcaaccagaccugccuggaccgcaucgccgcggggaccuucaacgccggcgaguucagccuccccaccuucgacucccugaacaucacggccgccagccugaacgacgacgggcucgacaaccacaccauccugcuguacuacuccaccgccgcgagcucccuggccgugacccucaugcuggccaucuucaucgucuacauggugagccgggacaacguguccugcagcaucugccuguga

SEQ ID NO: 90610 - RNA, 1755 nt, Artificial Sequence
  derived and/or modified CDS sequence (opt1) from hemagglutinin__InfluenzaB__AEA51389
augaaggccaucaucgugcugcucauggucgugaccagcaacgccgaccgcaucugcaccggcaucacguccagcaucagcccccugguggacaagaccgcgacccagggggaggucaacgugaccggcgugaucccgcugacgaccacccccaccaaguccuacuucgccaacgucaaggggacgcggacccgcggcaagcucugccccgacugccugaacugcaccgaccuggacguggcccucgggcggcccaugugcgugggcaccacgccguccgccaaggccagcauccugcacgagguccgccccgugaccuccggcugcuuccccaucaugcacgaccggaccaagauccgccagcugcccaaccuccugcggggguacgagaacauccgccugagcacccagaacgugaucgacgcgcagaaggccccgggcgggcccuaccggcucggcacguccgggagcugccccaacgccaccuccaagaucggcuucuucgccaccauggcgugcgccguccccaaggacaacuacaagaacgccaccaacccgcugacgguggaggugcccuacauccgcaccgagggcgaggaccagaucaccgucuggggguuccacagcgacaacaagacccagaugaagaaccuguacggcgacuccaacccgcccaaguucacgagcuccgccaacggggugaccacccacuacgugagccagaccggcgacuuccccgaccagacggaggacggcgggcucccgcccuccggccggaucgucguggacuacaugaugcagaagcccgggaagaccggcaccaucgccuaccagcgcggggugcugcugccccagaaggucuggugcgcgagcggccgguccaaggugaucaagggcagccucccccugaucggggaggccgacugccugcacgagaaguacggcgggcucaacaagagcaagccgccccacaccggcgagcacacgaaggccaucgggaacugccccaucugggugaagacgccccugaagcuggccaacggcaccaaguaccgccccuccgccaagcuccugaaggagcggggcuucuucggggcgaucgccggcuuccuggagggcgggugggaggggaugaucgccggcuggcacggcuacaccagccacggggcccacggcgucgccguggcggccgaccucaaguccacccaggaggccaucaacaagaucaccaagaaccugaacagccuguccgagcucgaggucaagaaccugcagcgccugagcggggccauggacgagcuccacaacgagauccuggagcuggacgagaagguggacgaccuccgggccgacaccaucuccagccagaucgagcuggcggugcugcucuccaacgagggcaucaucaacagcgaggacgagcaccuccuggcccuggagcgcaagcugaagaagaugcugggccccuccgccgucgacaucgggaacggcugcuucgagaccaagcacaagugcaaccagaccugccucgaccggaucgccgcggggacguucaacgccggcgaguucuuccugccgaccuucgacagccugaacaucaccgccgccucccucaacgacgacgggcuggacaaccacaccauccugcuguacuacagcacggccgcguccagccucgccgugacccugaugcuggccaucuucaucguguacauggucucccgcgacaacgugagcugcuccaucugccucuga

SEQ ID NO: 90611 - RNA, 1755 nt, Artificial Sequence
  derived and/or modified CDS sequence (opt1) from hemagglutinin__InfluenzaB__AEA51390
augaaggccaucaucgugcugcucauggucgugaccagcaacgccgaccgcaucugcaccggcaucacguccagcaacagcccccacguggucaagaccgcgacccagggggaggugaacgugaccggcgucaucccgcugacgaccacccccaccaaguccuacuucgccaaccugaaggggacgcggacccgcggcaagcucugccccgacugccugaacugcaccgaccuggacguggcccucgggcggcccaugugcgugggcaccacgccguccgccaaggccagcauccugcacgagguccgccccgugaccuccggcugcuuccccaucaugcacgaccggaccaagauccgccagcugcccaaccuccugcggggguacgagaacauccgccugagcacccagaacgugaucgacgcggagaaggccccgggcgggcccuaccggcucggcacguccgggagcugccccaacgccaccuccaagaucggcuucuucgccaccauggcgugggccguccccaaggacaacuacaagaacgccaccaacccgcugacgguggaggugcccuacaucugcaccgagggcgaggaccagaucaccgucuggggguuccacagcgacaacaagacccagaugaagaaccuguacggcgacuccaacccccagaaguucacgagcuccgccaacggggugaccacccacuacgugagccagaucggcgacuuccccgaccagaccgaggacggcgggcucccgcccuccggccgcaucgucguggacuacaugaugcagaagcccgggaagacgggcaccaucguguaccagcgcgggggccugcugccccagaaggucuggugcgccagcggccgguccaaggugaucaaggggagccucccgcugaucggcgaggcggacugccugcacgagaaguacgggggccucaacaagagcaagcccuacuacaccggggagcacgccaaggccaucggcaacugccccaucugggugaagcccccgcugaagcuggccaacggcaccaaguaccggccgcccgccaagcuguucaaggagcgcggguucuucggcgcgcuggccggguuccuggagggcgggugggagggcaugaucgccggcuggcacggguacacgucccacggcgcccacggggucgccguggcggccgaccucaagagcacccaggaggccaucaacaagaucaccaagaaccugaacucccugagcgagcucgaggucaagaaccugcagcggcuguccggcgccauggacgagcuccacaacgagauccuggagcuggacgagaagguggacgaccuccgcgccgacaccaucagcucccagaucgagcuggcggugcugcucagcaacgagggcaucaucaacuccgaggacgagcaccuccuggcccucgagcggaagcugaagaagaugcuggggcccagcgccgucgacaucggcaacgggugcuucgagacgaagcacaagugcaaccagaccugccucgaccgcaucgccgcgggcaccuucaacgccggggaguucucccugcccaccuucgacagccugaacaucaccgccgccucccucaacgacgacggccuggacaaccacacgauccugcuguacuacagcaccgccgcguccagccucgccgugacccugaugcuggccaucuucaucguguacauggucucccgggacaacgugagcugcuccaucugccucuga

SEQ ID NO: 90612 - RNA, 1758 nt, Artificial Sequence
  derived and/or modified CDS sequence (opt1) from hemagglutinin__InfluenzaB__AEA51391
augaaggccaucaucgugcugcucauggucgugaccagcaacgccgaccgcaucugcaccggcaucacguccagcaacagcccccacguggucaagaccgcgacccagggggaggugaacgugaccggcgucaucccgcugacgaccacccccaccaagagccacuucgccaaccugaaggggacggagacccggggcaagcucugccccaagugccugaacugcaccgaccuggacguggcccucgggcgccccaagugcaccggcaagaucccguccgcccgggugagcauccugcacgagguccgccccgugacguccggcugcuuccccaucaugcacgaccggaccaagauccgccagcugcccaaccuccugcggggguacgagcacauccgccugagcacccacaacgugaucaacgccgagaacgcgccgggcgggcccuacaagaucggcaccuccgggagcugccccaacaucacgaacggcaacggcuucuucgccaccauggccugggccguccccaagaacgacaagaacaagaccgcgaccaacccgcucacgaucgaggugcccuacaucugcaccgagggggaggaccagaucaccguguggggcuuccacuccgucaacgagacccagauggccaagcuguacggggacagcaagccccagaaguucacguccagcgccaacggcgugaccacccacuacaucucccagaucggcggguuccccaaccagaccgaggacggcgggcugccgcagagcggccggaucguggucgacuacauggugcagaaguccgggaagacgggcaccaucaccuaccagcgcggcauccuccugccccagaagguguggugcgccagcgggcgguccaaggucaucaagggcagccugccccucaucggggaggccgacugccugcacgagaaguacggcgggcugaacaagagcaagcccuacuacaccggcgagcacgcgaaggccaucggcaacugcccgaucugggugaagacgccccucaagcuggccaacgggaccaaguaccgcccgcccgccaagcugcucaaggagcggggcuucuucggggccaucgcgggcuuccuggagggcgggugggagggcaugaucgccggguggcacggcuacaccucccacggggcccacggcgugcccgucgccgccgaccugaaguccacccaggaggcgaucaacaagaucacgaagaaccucaacucccugagcgagcuggaggugaagaaccuccagcgccuguccggcgccauggacgagcugcacaacgagauccucgagcuggacgagaaggucgacgaccugcgggccgacaccaucagcucccagaucgagcucgccgugcugcugagcaacgaggggaucaucaacuccgaggacgagcaccuccuggcccuggagcgcaagcucaagaagaugcugggccccagcgcgguggagaucgggaacggcugcuucgagaccaagcacaagugcaaccagaccugccuggaccggaucgccgccgggaccuucgacgccggcgaguucucccuccccacguucgacagccugaacaucaccgcggccucccugaacgacgacggccucgacaaccacaccauccugcuguacuacagcaccgccgccuccagccuggccgucacgcucaugaucgcgaucuucgugguguacauggucucccgcgacaacgugagcugcuccaucugccuguga

SEQ ID NO: 90613 - RNA, 1758 nt, Artificial Sequence
  derived and/or modified CDS sequence (opt1) from hemagglutinin__InfluenzaB__AEA51392
augaaggccaucaucgugcugcucauggucgugaccagcaacgccgaccgcaucugcaccggcaucacguccagcaacagcccccacguggucaagaccgcgacccagggggaggugaacgugaccggcgucaucccgcugacgaccacccccaccaagagccacuucgccaaccugaaggggacggagacccggggcaagcucugccccaagugccccaacugcaccgaccuggacguggcccuggggcgcccgaagugcaccggcaagauccccuccgcccgggugagcauccuccacgagguccgccccgugacguccggcugcuuccccaucaugcacgaccggaccaagauccgccagcugccgaaccugcuccggggguacgagcacauccgccugagcacccacaacgugaucaacgccgagaacgcgcccggcgggcccuacaagaucggcaccuccgggagcugccccaacgucacgaacggcaacggcuucuucgccaccauggccugggccgugccgaagaacgacaagaacaagaccgcgaccaacccccugacgaucgaggugcccuacaucugcaccgagggggaggaccagaucaccgucuggggcuuccacuccgacaacgagacccagauggccaagcucuacggggacagcaagccccagaaguucacguccagcgccaacggcggcaccacccacuacgugucccagaucgggggcuucccgaaccagaccgaggacgggggccugccccagagcgggcggaucguggucgacuacauggugcagaaguccggcaagacgggcaccaucaccuaccagcgcgggauccugcucccccagaagguguggugcgccagcggccgguccaaggucaucaaggggagccugccccugaucggcgaggccgacugccuccacgagaaguacgggggccugaacaagagcaagccguacuacaccggcgagcacgcgaaggccaucgggaacugccccaucugggugaagacgccccugaagcucgccaacggcaccaagaacaucgcccccgccaagcugcugaaggagcgcggguucuucggcgcgaucgccggguuccucgagggcggcugggaggggaugaucgccggcuggcacggguacaccucccacggcgcccacggcguggccgucgcggccgaccugaaguccacccaggaggccaucaacaagaucacgaagaaccugaacucccucagcgagcuggaggugaagaaccugcagcggcucuccggggccauggacgagcugcacaacgagauccuggagcucgacgagaaggucgacgaccugcgcgccgacaccaucagcucccagaucgagcuggcggugcuccugagcaacgagggcaucaucaacuccgaggacgagcaccuccuggcccuggagcggaagcugaagaagaugcucgggccgagcgccguggagaucggcaacgggugcuucgagaccaagcacaagugcaaccagaccugccuggaccgcaucgccgcgggcaccuucgacgccggcgaguucucccugcccacguucgacagccucaacaucaccgccgccucccugaacgacgacgggcuggacaaccacaccauccuccuguacuacagcaccgccgcguccagccuggccgucacgcugaugaucgccaucuucgugguguacauggucucccgggacaacgugagcugcuccaucugccucuga

SEQ ID NO: 90614 - RNA, 1755 nt, Artificial Sequence
  derived and/or modified CDS sequence (opt1) from hemagglutinin__InfluenzaB__AEA51395
augaaggccaucaucgugcugcucauggucgugaccagcaacgccgaccgcaucugcaccggcaucacguccagcaacagcccccacguggucaagaccgcgacccugggggaggugaacgugaccggcgucaucccgcugacgaccacccccaccaaguccuacuucgccaaccucaaggggacgcggacccgcggcaagcugugccccgacugccugaacugcaccgaccucgacguggcccuggggcggcccaugugcgugggcaccacgccguccgccaaggccagcauccugcacgagguccgccccgugaccuccggcugcuuccccaucaugcacgaccggaccaagauccgccagcuccccaaccugcugcggggguacgagaacauccgccucagcacccagaacgugaucgacgcggagaaggccccgggcgggcccuaccggcugggcacguccgggagcugccccaacgccaccuccaagaucggcuucuucgccaccauggcgugggccguccccaaggacaacuacaagaacgccaccaacccgcugacgguggaggugcccuacaucugcaccgagggcgaggaccaguucaccgucuggggguuccacagcgacaacaucacccagcucaagaaccuguucggcgacuccaacccccagcgcuucacgagcuccgccaacggggugaccacccacuacgugagccagaucggcgacuuccccgaccagaccgaggacggcgggcugccgcaguccggccggaucgucguggacuacgugaugcagaagcccgggaagacgggcaccaucgucuaccagcgcggggugcuccugccgcccaaggugugguucgcccggggccgcagcaaggucaucaagggcucccugccccucaucggggaggcggacugcauccacgagaaguacggcgggcugaacaagagcaagcccuacuacaccggcgagcacgccaaggccaucgggaacugccccaucugggugaagacgccccugaagcucgccaacggcaccaaguaccggccgcccgccaagcugcugaaggagcgcggcuucuucggggcgaucgccggcuuccucgagggcgggugggaggggaugaucgccggcuggcacggcuacaccagccacggggcccacggcgucgccguggcggccgaccugaaguccacccaggaggccaucaacaagaucaccaagaaccugaacagccucuccgagcuggaggugaagaaccugcagcggcucagcggggccauggacgagcugcacaacgagauccuggagcucgacgagaaggucgacgaccugcgcgccgacacgaucuccagccagaucgagcuggcggugcuccuguccaacgagggcaucaucaacagcgaggacgagcaccuccuggcccuggagcggaagcugaagaagaugcucggccccuccgccguggacaucgggaacggcugcuucgagaccaagcacaagugcaaccagaccugccuggaccgcaucgccgcggggaccuucaacgccggcgaguucagccugcccaccuucgacucccucaacaucacggccgccagccugaacgacgacgggcuggacaaccacaccauccugcucuacuacuccaccgccgcgagcucccuggccgucacccugaugcucgccaucuucaucguguacauggugagccgggacaacgucuccugcagcaucugccuguga

SEQ ID NO: 90615 - RNA, 1758 nt, Artificial Sequence
  derived and/or modified CDS sequence (opt1) from hemagglutinin__InfluenzaB__AEA51398
augaaggccaucaucgugcugcucauggucgugaccagcaacgccgaccgcaucugcaccggcaucacguccagcaacagcccccacguggucaagaccgcgacccagggggaggugaacgugaccggcgucaucccgcugacgaccacccccaccaagucccacuucgccaaccugaaggggacggagacccggggcaagcucugccccaagugccccaacugcaccgaccuggacguggcccuggggcgcccgaagugcaccggcaagauccccuccgcccgggugagcauccuccacgagguccgccccgugacguccggcugcuuccccaucaugcacgaccggaccaagauccgccagcugccgaaccugcuccggggguacgagcacauccgccugagcacccacaacgugaucaacgccgagaacgcgcccggcgggcccuacaagaucggcaccuccgggagcugccccaacgucacgaacggcaucggcuucuucgccaccauggccugggccgugccgaagaacgacaagaacaagaccgcgaccaacccccugacgaucgaggugcccuacaucugcaccgagggggaggaccagaucaccgucuggggcuuccacuccgacaacgagacccagauggccaagcucuacggggacagcaagccccagaaguucacguccagcgccaacggcgugaccacccacuacgugucccagaucggcggguucccgaaccagaccgaggacggcgggcugccccagagcggccggaucgucguggacuacauggugcagaaguccgggaagacgggcaccaucaccuaccagcgcggcauccugcucccccagaaggucuggugcgccagcgggcgguccaaggugaucaagggcagccugccccugaucggggaggccgacugccuccacgagaaguacggcgggcugaacaagagcaaguccuacuacaccggcgagcacgcgaaggccaucggcaacugcccgaucugggugaagacgccccugaagcucgccaacgggaccaaguaccgcccgcccgcccaccugagcuacuucugcggcuucuucggggccaucgcgggcuuccuggagggcgggugggagggcaugaucgccggguggaacggcuacaccucccacggggcccacggcgucgccguggucgccgaccucaagagcacccaggaggcgaucaacaagaucacgaagaaccugaacucccugagcgagcucgaggugaagaaccugcagcggcuguccggcgccauggacgagcuccacaacgagauccuggagcuggacgagaagguggacgaccuccgcgccgacaccaucagcucccagaucgagcuggccguccugcucagcaacgaggggaucaucaacuccgaggacgagcaccuccuggcccuggagcggaagcugaagaagaugcugggccccagcgcgguggagaucgggaacggcugcuucgagaccaagcacaagugcaaccagaccugccucgaccgcaucgccgccgggaccuucgacgccggcgaguucucccugcccacguucgacagccugaacaucaccgcggccucccucaacgacgacggccuggacaaccacaccauccugcucuacuacagcaccgccgccuccagccuggccgugacgcugaugaucgcgaucuucgucguguacauggugucccgggacaacgucagcugcagcaucugccuguga

SEQ ID NO: 90616 - RNA, 1758 nt, Artificial Sequence
  derived and/or modified CDS sequence (opt1) from hemagglutinin__InfluenzaB__AEA51399
augaaggccaucaucgugcugcucauggucgugaccagcaacgccgaccgcaucugcaccggcaucacggcgucccagagccccaacaucgacaaguccagcacccagggggaggugaacgucaccggcgugaucccgcugaccacgacccccaccaagucccacuucgccaaccugaaggggaccgagacgcggggcaagcucugccccaagugccccaacugcaccgaccuggacguggcccuggggcgcccgaagugcaccggcaagauccccagcgcccgggucuccauccuccacgaggugcgccccgugaccagcggcugcuuccccaucaugcacgaccggacgaagauccgccagcugccgaaccugcuccggggguacgagcacauccgccuguccacccacaacgucaucaacgccgagaacgcgcccggcgggcccuacaagaucggcaccagcggguccugccccaacgugaccaacggcaucggcuucuucgccacgauggccugggccgugccgaagaacgacaagaacaagaccgcgaccaacccccugaccaucgagguccccuacaucugcacggagggggaggaccagaucaccguguggggcuuccacagcgacaacgagacccagauggccaagcucuacggggacuccaagccccagaaguucaccagcuccgccaacggcgugacgacccacuacgucagccagaucggcggguucccgaaccagaccgaggacggcgggcugccccaguccggccggaucgugguggacuacaugguccagaaguccgggaagaccggcacgaucaccuaccagcgcggcauccugcucccccagaagguguggugcgccagcgggcggagcaaggugaucaagggcagccugccccugaucggggaggccgacugccuccacgagaaguacggcgggcugaacaaguccaagagcuacuacaccggcgagcacgcgaaggccaucggcaacugcccgaucugggucaagacgccccugaagcucgccaacgggaccaaguaccgcccgcccgcccaccuguccuacuucugcggcuucuucggggccaucgcgggcuuccuggagggcgggugggagggcaugaucgccggguggaacggcuacaccagccacggggcccacggcguggccguggucgccgaccucaaguccacccaggaggcgaucaacaagaucaccaagaaccugaacagccuguccgagcucgaggugaagaaccugcagcggcugagcggcgccauggacgagcuccacaacgagauccuggagcuggacgagaaggucgacgaccuccgcgccgacacgaucuccagccagaucgagcuggccgugcugcucuccaacgaggggaucaucaacagcgaggacgagcaccuccuggcccuggagcggaagcugaagaagaugcugggccccuccgcgguggagaucgggaacggcugcuucgagaccaagcacaagugcaaccagaccugccucgaccgcaucgccgccgggaccuucgacgccggcgaguucagccugcccaccuucgacucccugaacaucacggcggccagccucaacgacgacggccuggacaaccacaccauccugcucuacuacuccaccgccgccagcucccuggccgucacccugaugaucgcgaucuucgugguguacauggucagccgggacaacgugagcugcuccaucugccuguga

SEQ ID NO: 90617 - RNA, 1758 nt, Artificial Sequence
  derived and/or modified CDS sequence (opt1) from hemagglutinin__InfluenzaB__AEG21014
augaaggccaucaucgugcugcucauggucgugaccagcaacgccgaccgcaucugcaccggcaucacguccagcaacagcccccacguggucaagaccgcgacccagggggaggugaacgugaccggcgucaucccgcugacgaccacccccaccaagagccacuucgccaaccugaaggggacggagacccggggcaagcucugccccaagugccugcacugcaccgaccuggacguggcccucgggcgccccaagugcaccggcaagaucccguccgcccgggugagcauccugcacgagguccgccccgugacguccggcugcuuccccaucaugcacgaccggaccaagauccgccagcugcccaaccuccugcggggguacgagcacauccgccugagcacccacaacgugaucaacgccgagaacgcgccgggcgggcccuacaagaucggcaccuccgggagcugccccaacgucacgaacggcaacggcuucuucgccaccauggccugggccgugcccaagaacgacaacaacaagaccgcgaccaacucccucacgaucgaggugccguacaucugcaccgagggggaggaccagaucaccgucuggggcuuccacagcgacaacgagacccagauggccaagcuguacggggacuccaagccccagaaguucacgagcuccgccaacggcgugaccacccacuacgugagccagaugggcggguuccccaaccagaccgaggacggcgggcugccccaguccggccggaucgucguggacuacauggugcagaaguccgggaagacgggcaccaucaccuaccagcgcggcauccuccugccgcagaaggucuggugcgccuccgggcggagcaaggugaucaagggcagccugccccucaucggggaggccgacugccugcacgagaaguacggcgggcugaacaaguccaagcccuacuacaccggcgagcacgcgaaggccaucggcaacugccccaucugggugaagacgccgcucaagcuggccaacgggaccaaguaccgcccgcccgccaagcugcucauggagcggggcuucuucggggccaucgcgggcuuccuggagggcgggugggagggcaugaucgccggguggcacggcuacaccagccacggggcccacggcgucgccguggccgcggaccugaaguccacccaggaggccaucaacaagaucacgaagaaccucaacagccuguccgagcuggaggucaagaaccuccagcgccugagcggcgccauggacgagcugcacaacgagauccucgagcuggacgagaagguggacgaccugcgggccgacaccaucuccagccagaucgagcucgccgugcugcuguccaacgaggggaucaucaacagcgaggacgagcaccuccuggcgcuggagcgcaagcucaagaagaugcugggccccuccgccgucgagaucgggaacggcugcuucgagaccaagcacaagugcaaccagaccugccuggaccggaucgccgccgggaccuucgacgcgggcgaguucagccuccccacguucgacucccugaacaucaccgccgccagccugaacgacgacggccucgacaaccacaccauccugcuguacuacuccaccgccgccagcucccuggcggugacgcucaugaucgccaucuucguggucuacauggugagccgcgacaacguguccugcagcaucugccuguga

SEQ ID NO: 90618 - RNA, 1755 nt, Artificial Sequence
  derived and/or modified CDS sequence (opt1) from hemagglutinin__InfluenzaB__AEG21015
augaaggccaucaucgugcugcucauggucgugaccagcaacgccgaccgcaucugcaccggcaucacguccagcaacagcccccacguggucaagaccgcgacccagggggaggugaacgugaccggcgucaucccgcugacgaccacccccaccaagagcuacuucgccaaccugaaggggacgcggacccgcggcaagcucugccccgacugccugaacugcaccgaccuggacguggcccucgggcggcccaugugcgugggcaccacgccguccgccaaggccagcauccugcacgagguccgccccgugaccuccggcugcuuccccaucaugcacgaccggaccaagauccgccagcugcccaaccuccugcggggguacgagaacauccgccugagcacccagaacgugaucgacgcggagaaggccccgggcgggcccuaccggcucggcacguccgggagcugccccaacgccaccuccaagaacggcuucuucgccaccauggcgugggccguccccaaggacaacuacaagggcgccaccaacccgaagacgguggaggugcccuacaucugcaccgagggggagggccagaucaccgucuggggguuccacagcgacaacaagccccagaugaagaaccuguacggcgacuccaacccccagaaguucaccagcuccgccagcggcgugacgacccacuacgugucccagaucggggacuucccggaccagaccgaggacggcgggcugccccagagcggccgcaucgucguggacuacaugaugcagaagcccgggaagaccggcacgaucguguaccagcggggcguccuccugccccagaagguguggugcgccuccgggcgcagcaaggugaucaagggcagccugccgcucaucggggaggcggacugccugcacgagaaguacggcgggcugaacaaguccaagcccuacuacaccggcgagcacgccaaggccaucggcaacugccccaucugggucaucacgccccagaagcucgccaacgggaccaccuucagcccgcccgccaagcugcugaaggagcggggcuucuucggggcgaucgccggcuuccucgagggcgggugggagggcaugaucgccggguggcacggcuacaccucccacggggcccacggcguggccgucgcggccgaccugaaguccacccaggaggccaucaacaagaucaccaagaaccugaacucccucagcgagcuggaggugaagaaccugcagcgccucuccggcgccauggacgagcugcacaacgagauccuggagcucgacgagaagguggacgaccugcgggccgacacgaucagcucccagaucgagcuggcgguccuccugagcaacgaggggaucaucaacuccgaggacgagcaccuccuggcccuggagcgcaagcugaagaagaugcucggccccagcgccguggacaucgggaacggcugcuucgagaccaagcacaagugcaaccagaccugccuggaccggaucgccgcggggaccuucaacgccggcgaguucucccugcccaccuucgacagccucaacaucacggccgccucccugaacgacgacggccuggacaaccacaccauccuccuguacuacagcaccgccgcguccagccuggccgugacccugaugcucgccaucuucaucgucuacauggugucccgcgacaacgugagcugcagcaucugccuguga

SEQ ID NO: 90619 - RNA, 1755 nt, Artificial Sequence
  derived and/or modified CDS sequence (opt1) from hemagglutinin__InfluenzaB__AEG21016
augaaggccaucaucgugcugcucauggucgugaccagcaacgccgaccgcaucugcaccggcaucacguccagcaacagcccccacguggucaagaccgcgacccagggggaggugaacgugaccggcgucaucccgcugacgaccacccccaccaaguccuacuucgccaaccugaaggggacgcggacccgcggcaagcucugccccgacugccugaacugcaccgaccuggacguggcccucgggcggcccaugugcgugggcaccacgccguccgccaaggccagcauccugcacgagguccgccccgugaccuccggcugcuuccccaucaugcacgaccggaccaagauccgccagcugcccaaccuccugcggggguacgagaacauccgccugagcacccagaacgugaucgacgcggagaaggccccgggcgggcccuaccggcucggcacguccgggagcugccccaacgccaccuccaagaucggcuucuucgccaccauggcgugggccguccccaaggacaacuacaagcgcgccaccaacccgaagacgguggaggugcccuacaucugcaccgagggcgaggaccagaucaccgucuggggguuccacagcgacaacaagccccagaugaagaaccccuacggcgacuccaacccgcagaaguucaccagcuccgccagcggggugacgacccacuacgugucccagaucggcgacuuccccgaccagaccgaggacggcgggcugccccagagcggccggaucgucguggacuacaugaugcagaagcccgggaagaccggcacgaucguguaccagcgcgggguccugcucccgcagaagguguggugcgccuccggccggagcaaggugaucaagggcagccugccccugaucggggaggcggacugccuccacgagaaguacggcgggcugaacaaguccaagcccuacuacaccggcgagcacgccaaggccaucgggaacugccccaucugggucaagaccccgcugaagcucgccaacggcaccaaguaccgcccgcccgccaagcugcugaaggagcggggcuucuucggggcgaucgccggcuuccucgagggcgggugggaggggaugaucgccggcuggcacggcuacacgagccacggggcccacggcguggccgucgcggccgaccugaaguccacccaggaggccaucaacaagaucaccaagaaccugaacagccucuccgagcuggaggugaagaaccugcagcgccucagcggggccauggacgagcugcacaacgagauccuggagcucgacgagaagguggacgaccugcgggccgacaccaucuccagccagaucgagcuggcgguccuccuguccaacgagggcaucaucaacagcgaggacgagcaccuccuggcccuggagcgcaagcugaagaagaugcucggccccuccgccguggacaucgggaacggcugcuucgagacgaagcacaagugcaaccagaccugccuggaccggaucgccgcggggaccuucaacgccggcgaguucagccugcccaccuucgacucccucaacaucaccgccgccagccugaacgacgacgggcuggacaaccacacgauccuccuguacuacuccaccgccgcgagcucccuggccgugacccugaugcucgccaucuucaucgucuacauggugagccgcgacaacguguccugcagcaucugccuguga

SEQ ID NO: 90620 - RNA, 1755 nt, Artificial Sequence
  derived and/or modified CDS sequence (opt1) from hemagglutinin__InfluenzaB__AEG21017
augaaggccaucaucgugcugcucauggucgugaccagcaacgccgaccgcaucugcaccggcaucacguccagcaacagcccccacguggucaagaccgcgacccagggggaggugaacgugaccggcgucaucccgcugacgaccacccccaccaaguccuacuucgccaaccugaaggggacgcggacccgcggcaagcucugccccgacugccugaacugcaccgaccuggacguggcccucgggcggcccaugugcgugggcaccacgccguccgccaaggccagcauccugcacgagguccgccccgugaccuccggcugcuuccccaucaugcacgaccggaccaagauccgccagcugcccaaccuccugcggggguacgagaacauccgccugagcacccagaacgugaucgacgcggagaaggccccgggcgggcccuaccggcucggcacguccgggagcugccccaacgccaccuccaagaucggcuucuucgccaccauggcgugggccguccccaaggacaacuacaagaacgccaccaacccgcugacgguggaggugcccuacaucugcaccgagggcgaggaccagaucaccgucuggggguuccacagcgacaacaagacccagaugaagaaccuguacggcgacuccaacccccagaaguucacgagcuccgccaacggggugaccacccacuacgugagccagaucggcgacuuccccgaccagaccgaggacggcgggcucccgcaguccggccgcaucgucguggacuacaugaugcagaagcccgggaagacgggcaccaucguguaccagcgcgggguccugcugccccagaagguguggugcgccagcggccgguccaaggugaucaagggcagccucccccugaucggggaggcggacugccugcacgagaaguacggcgggcucaacaagagcaagccguccuacaccggcgagcacgccaaggccaucgggaacugccccaucugggucaagacgccccugaagcuggccaacggcaccaaguaccggcccccggccaagcuccugaaggagcgcggcuucuucggggcgaucgccggcuuccuggagggcgggugggaggggaugaucgccggcuggcacggcuacaccagccacggggcccacggcguggccgucgcggccgaccucaaguccacccaggaggccaucaacaagaucaccaagaaccugaacagccuguccgagcucgaggugaagaaccugcagcggcugagcggggccauggacgagcuccacaacgagauccuggagcuggacgagaagguggacgaccuccgcgccgacacgaucuccagccagaucgagcuggcgguccugcucuccaacgagggcaucaucaacagcgaggacgagcaccuccuggcccuggagcggaagcugaagaagaugcugggccccuccgccguggacaucgggaacggcugcuucgagaccaagcacaagugcaaccagaccugccucgaccgcaucgccgcggggaccuucaacgccggcgaguucagccugcccaccuucgacucccugaacaucacggccgccagccucaacgacgacgggcuggacaaccacaccauccugcuguacuacuccaccgccgcgagcucccucgccgugacccugaugcuggccaucuucaucgucuacauggugagccgggacaacguguccugcagcaucugccucuga

SEQ ID NO: 90621 - RNA, 1755 nt, Artificial Sequence
  derived and/or modified CDS sequence (opt1) from hemagglutinin__InfluenzaB__AEG21018
augaaggccaucaucgugcugcucauggucgugaccagcaacgccgaccgcaucugcaccggcaucacguccagcaucagcccccugguggacaagaccgcgacccagggggaggucaacgugaccggcgugaucccgcugacgaccacccccaccaagagcuacuucgccaacgucaaggggacgcggacccgcggcaagcucugccccgacugccugaacugcaccgaccuggacguggcccucgggcggcccaugugcgugggcaccacgccguccgccaaggccagcauccugcacgagguccgccccgugaccuccggcugcuuccccaucaugcacgaccggaccaagauccgccagcugcccaaccuccugcggggguacgagaacauccgccugagcacccagaacgugaucgacgcgcagaaggccccgggcgggcccuaccggcucggcacguccgggagcugccccaacgccaccuccaagaucggcuucuucgccaccauggcgugcgccguccccaaggacaacuacaagaacgccaccaacccgcugacgguggaggugcccuacauccgcaccgagggcgaggaccagaucaccgucuggggguuccacagcgacaacaagacccagaugaagaaccuguacggcgacuccaacccgcccaaguucacgagcuccgccaacggggugaccacccacuacgugagccagaccggcgacuuccccgaccagacggaggacggcgggcucccgcccuccggccggaucgucguggacuacaugaugcagaagcccgggaagaccggccccaucgccuaccagcgcggggugcugcugccccagaaggucuggugcgcgagcggccgguccaaggugaucaagggcagccucccccugaucggggaggccgacugccugcacgagaaguacggcgggcucaacaagagcaaguacucccacaccggcgaccacgccaagacccuggggaacugccccaucugggugaagacgccgcugaagcucgccaacggcaccaaguaccgccccagcgccaagcugcugaaggagcggggcuucuucggggcgaucgccggcuuccucgagggcgggugggaggggaugaucgccggcuggcacggcuacaccucccacggggcccacggcgucgccguggcggccgaccugaaguccacccaggaggccaucaacaagaucacgaagaaccugaacucccucagcgagcuggaggucaagaaccugcagcgccucuccggggccauggacgagcugcacaacgagauccuggagcucgacgagaagguggacgaccugcgggccgacaccaucagcucccagaucgagcuggcggugcuccugagcaacgagggcaucaucaacuccgaggacgagcaccuccuggcccuggagcgcaagcugaagaagaugcucggccccagcgccgucgacaucgggaacggcugcuucgagaccaagcacaagugcaaccagaccugccuggaccggaucgccgcggggaccuucaacgccggcgaguucucccugcccacguucgacagccucaacaucaccgccgccucccugaacgacgacgggcuggacaaccacaccauccugcucuacuacagcaccgccgcguccagccuggccgugacgcugaugcucgccaucuucaucguguacauggucucccgcgacaacgugagcugcagcaucugccuguga

SEQ ID NO: 90622 - RNA, 1755 nt, Artificial Sequence
  derived and/or modified CDS sequence (opt1) from hemagglutinin__InfluenzaB__AEG21019
augaaggccaucaucgugcugcucauggucgugaccagcaacgccgaccgcaucugcaccggcaucacguccagcaacagcccccacguggucaagaccgcgacccagggggaggugaacgugaccggcgucaucccgcugacgaccacccccaccaaguccuacuucgccaaccugaaggggacgcggacccgcggcaagcucugccccgacugccugaacugcaccgaccuggacguggcccucgggcggcccaugugcgugggcaccacgccguccgccaaggccagcauccugcacgagguccgccccgugaccuccggcugcuuccccaucaugcacgaccggaccaagauccgccagcugcccaaccuccugcggggguacgagaacauccgccugagcacccagaacgugaucgacgcggagaaggccccgggcgggcccuaccggcucggcacguccgggagcugccccaacgccaccuccaagaucggcuucuucgccaccauggcgugggccguccccaaggacaacuacaagaacgccaccaacccgcugacgguggaggugcccuacaucugcaccgagggcgaggaccagaucaccgucuggggguuccacagcgacaacaagacccagaugaagaaccuguacggcgacuccaacccccagaaguucacgagcuccgccaacggggugaccacccacuacgugagccagaccggcgacuuccccgaccagacggaggacggcgggcucccgcccuccggccgcaucgucguggacuacaugaugcagaagcccgggaagaccggcaccaucguguaccagcgcgggguccugcugccccagaagguguggugcgccagcggccgguccaaggugaucaagggcagccucccgcugaucggggaggcggacugccugcacgagaaguacggcgggcucaacaagagcaagcccuccuacaccggcgagcacgccaaggccaucgggaacugccccaucugggucaagacgccccugaagcuggccaacggcaccaaguaccggccgagcgccaagcuccugaaggagcgcggcuucuucggggcgaucgccggcuuccuggagggcgggugggaggggaugaucgccggcuggcacggcuacaccucccacggggcccacggcguggccgucgcggccgaccucaagagcacccaggaggccaucaacaagaucacgaagaaccugaacucccugagcgagcucgaggugaagaaccugcagcggcuguccggggccauggacgagcuccacaacgagauccuggagcuggacgagaagguggacgaccuccgcgccgacaccaucagcucccagaucgagcuggcgguccugcucagcaacgagggcaucaucaacuccgaggacgagcaccuccuggcccuggagcggaagcugaagaagaugcugggccccagcgccguggacaucgggaacggcugcuucgagaccaagcacaagugcaaccagaccugccucgaccgcaucgccgcggggaccuucaacgccggcgaguucucccugcccacguucgacagccugaacaucaccgccgccucccucaacgacgacgggcuggacaaccacaccauccugcuguacuacagcaccgccgcguccagccucgccgugacgcugaugcuggccaucuucaucgucuacauggugucccgggacaacgugagcugcagcaucugccucuga

SEQ ID NO: 90623 - RNA, 1758 nt, Artificial Sequence
  derived and/or modified CDS sequence (opt1) from hemagglutinin__InfluenzaB__AEG21021
augaaggccaucaucgugcugcucauggucgugaccagcaacgccgaccgcaucugcaccggcaucacguccagcaacagcccccacguggucaagaccgcgacccagggggaggugaacgugaccggcgucaucccgcugacgaccacccccaccaagagccacuucgccaaccugaaggggacggagacccggggcaagcucugccccaagugccugaacugcaccgaccuggacguggcccucgggcgccccaagugcaccggcaagaucccguccgcccgggugagcauccugcacgagguccgccccgugacguccggcugcuuccccauccugcacgaccggaccaagauccgccagcuccccaaccugcugcggggguacgagcacauccgccucagcacccacaacgugaucaacgccgagaacgcgccgggcgggcccuacaagaucggcaccuccgggagcugccccaacaucacgaacggcaacggcuucuucgccaccauggccugggccguccccaagaacgacaagaacaagaccgcgaccaacccgcuguccaucgaggugcccuacaucugcacggagggggaggaccagaucaccguguggggcuuccacagcgacaacgagacccagauggccaagcuguacggggacuccaagccccagaaguucaccagcuccgccaacggcgucgccacgcacuacgugagccagaucggcggguuccccaaccagaccgaggacggcgggcucccgcaguccggccggaucguggucgacuacauggugcagaaguccgggaagaccggcaccaucacguaccagcgcggcauccugcugccccagaagguguggugcgccuccgggcggagcaaggucaucaagggcagccucccccuguucggggaggcggacugccugcacgagaaguacggcggguucaacaaguccaagcccuacuacaccggcgagcacgccaaggccaucggcaacugcccgaucugggugaagacgccccucaagcuggccaacgggaccaaguaccgcccgcccgccaagcuguucaaggagcggggcuucuucggggcgaucgccggcuuccucgagggcgggugggagggcaugaucgccggguggcacggcuacaccagccacggggcccacggcguggccgucgcggccgaccugaaguccacccaggaggccaucaacaagaucaccaagaaccugaacagccucuccgagcuggaggugaagaaccugcagcgccucagcggcgccauggacgagcugcacaacgagauccuggagcucgacgagaaggucgacgaccugcgggccgacaccaucuccagccagaucgagcuggcggugcuccuguccaacgaggggaucaucaacagcgaggacgagcaccuccuggcccuggagcgcaagcugaagaagaugcucggccccuccgccguggagaucgggaacggcugcuucgagacgaagcacaagugcaaccagaccugccuggaccggaucgccgcggggaccuucgacgccggcgaguucagccugcccaccuucgacucccucaacaucaccgccgccagccugaacgacgacggccuggacaaccacacgauccuccuguacuacuccaccgccgcgagcucccuggccgucacccugaugaucgccaucuucgugguguacauggucagccgcgacaacguguccugcagcaucugccucuga

SEQ ID NO: 90624 - RNA, 1758 nt, Artificial Sequence
  derived and/or modified CDS sequence (opt1) from hemagglutinin__InfluenzaB__AEG21022
augaaggccaucaucgugcugcucauggucgugaccagcaacgccgaccgcaucugcaccggcaucacguccagcaacagcccccacguggucaagaccgcgacccagggggaggugaacgugaccggcgucaucccgcugacgaccacccccaccaagagccacuucgccaaccugaaggggacggagacccggggcaagcucugccccaagugccugaacugcaccgaccuggacguggcccucgggcgccccaagugcaccggcacgaccccguccgcccgggccagcauccugcacgaggugcgccccgucaccuccggcugcuuccccauccugcacgaccggaccaagauccgccagcuccccaaccugcugcggggguacgagcacauccgccucagcacgcacaacgugaucaacgcggagaacgccccgggcgggcccuacaagaucggcaccuccgggagcugccccaacaucaccaacggcaacggcuucuucgccaccauggccugggcggugcccaagaacgacaagaacaagacggccaccaacccgcuguccgucgaggugcccuacaucugcaccgagggggaggaccagaucaccguguggggcuuccacagcgacaacgagacgcagauggccaagcuguacggggacuccaagccccagaaguucaccagcuccgccaacggcgucgccacccacuacgugagccagaucggcggguuccccaaccagaccgaggacggcgggcucccgcaguccggccggaucguggucgacuacauggugcagaaguccgggaagacgggcaccaucaccuaccagcgcggcauccugcugccccagcggggguggugcgcguccggccgcagcaaggugaucaaggggagccucccccuguucggcgaggccgacugccugcacgagaaguacgggggccucaacaaguccaagcccuacuacaccggcgagcacgccaaggccaucgggaacugcccgaucugggucaagacgccccugaagcuggccaacggcaccaaguaccggccgcccgcgaagcuguucaaggagcgcggguucuucggcgccaucgccggguuccucgagggcggcugggaggggaugaucgccggcuggcacggguacaccagccacggcgcccacggcgugcccguggcggccgaccugaaguccacccaggaggccaucaacaagaucacgaagaaccucaacagccuguccgagcuggaggucaagaaccuccagcggcugagcggggccauggacgagcugcacaacgagauccucgagcuggacgagaagguggacgaccugcgcgccgacaccaucuccagccagaucgagcucgcgguccugcuguccaacgagggcaucaucaacagcgaggacgagcaccuccuggcccuggagcggaagcucaagaagaugcuggggcccuccgccguggagaucggcaacgggugcuucgagaccaagcacaagugcaaccagaccugccuggaccgcaucgccgcgggcaccuucgacgccggcgaguucagccuccccacguucgacucccugaacaucaccgccgccagccugaacgacgacgggcucgacaaccacaccauccugcuguacuacuccaccgccgcgagcucccuggccgugacgcucaugaucgccaucuucgucguguacauggugagccgggacaacgucuccugcagcaucugccuguga

SEQ ID NO: 90625 - RNA, 1755 nt, Artificial Sequence
  derived and/or modified CDS sequence (opt1) from hemagglutinin__InfluenzaB__AEG21023
augaaggccaucaucgugcugcucauggucgugaccagcaacgccgaccgcaucugcaccggcaucacguccagcaacagcccccacguggucaagaccgcgacccugggggaggugaacgagaccggcgugaucccgcugacgaccacccccaccaaguccuacuucgccaaccucaaggggacgcggacccgcggcaagcugugccccgacugccugaacugcaccgaccucgacgucgcccuggggcggcccaugugcgugggcaccacgccguccgccaaggccagcauccugcacgaggugcgccccgucaccuccggcugcuuccccaucaugcacgaccggaccaagauccgccagcuccccaaccugcugcggggguacgagaacauccgccucagcacccagaacgugaucgacgcggagaaggccccgggcgggcccuaccggcugggcacguccgggagcugccccaacgccaccuccaagaucggcuucuucgccaccauggcgugggccgugcccaaggacaacuacaagaacgccaccaacccgcugacggucgaggugcccuacaucugcaccgagggcgaggaccagaucaccguguggggguuccacagcgacaacaagacccagaugaagaaccucuacggcgacuccaacccccagaaguucacgagcuccgccaacgggguccccacccacuacgugagccagaucggcgacuucccggaccccaccgaggacggcgggcugccccaguccggccgcaucgggguggacuacaugaugcagaagcccggcaagaccgggacgaucgucuaccagcggggcgugcugcucccgcagaagguguggugcgccagcggccgcuccaaggucaucaaggggagccugccccugaucggcgaggcggacugccuccacgagaaguacgggggccugaacaagagcaagcccuacuacaccggggagcacgccaaggccaucggcaacugccccaucugggugaagaccccgcugaagcucgccaacggcaccaaguaccggccgcccgccaagcugcugaaggagcgcggguucuucggcgcgaucuccggguuccucgagggcgggugggagggcaugaucgccggcuggcacggguacacgagccacggcgcccacgggguggccgucgccgcggaccugaaguccacccaggaggccaucaacaagaucaccaagaaccugaacagccucuccgagcuggaggugaagaaccugcagcggcucagcggcgccauggacgagcugcacaacgagauccuggagcucgacgagaaggucgacgaccugcgcgccgacaccaucuccagccagaucgagcuggccgugcuccuguccaacgagggcaucaucaacagcgaggacgagcaccuccuggcgcuggagcggaagcugaagaagaugcucgggcccuccgccguggagaucggcaacgggugcuucgagacgaagcacaagugcaaccagaccugcagcgaccgcaucgccgccggcaccuucgacgcgggggaguucucccugcccaccuucgacagccugaacaucaccgccgccucccucaacgacgacggccuggacaaccacacgauccugcuguacuacagcaccgccgccuccagccucgcggucacccugaugaucgccaucuucgugguguacauggucucccgggacaacgugagcugcagcaucugccuguga

SEQ ID NO: 90626 - RNA, 1758 nt, Artificial Sequence
  derived and/or modified CDS sequence (opt1) from hemagglutinin__InfluenzaB__AEG21024
augaaggccaucaucgugcugcucauggucgugaccagcaacgccgaccgcaucugcaccggcaucacguccagcuccagcccccacguggucaagaccgcgacccagggggaggugaacgugaccggcgucaucccgcugacgaccacccccaccaaguccuacuucgccaaccugaaggggacggagacccggggcaagcucugccccgacugccccaacugcaccgaccuggacguggcccuggggcgcccgaacugcuggggcaacauccccagcgcccggguguccauccuccacgagguccgccccgugaccagcggcugcuuccccaucaugcacgaccggacgaagauccgccagcugccgaaccugcuccggggguacgagcacauccgccuguccacccacaacgugaucaacgccgagaacgcgcccggcgggcccuacaagaucggcaccagcggguccugccccaacgucaccaacggcaacggcuucuucgccacgauggccugggccgugccgaaggacgacaagaacaacgcggccacccaccuccugaccaucgaggugcccuucuucugcaccgggggcgagcaccacaucgccgucuggggguuccccagcgacaacgacacgcugauggccaagcuguucggcgacuccaacccccagauguucagcuccagcgccaacggcaccaccacccacuacgugucccagaucgggggcuucccgaaccagacggaggacgggggccucccccagagcgggcggaucguggucgacuacauggugcagaaguccggcaagaccggcaccaucgcguaccagcgcggggugcugcugccccagaaggucuggugcgccagcggccggagcaaggugaucaaggggucccucccccugaucggcgaggccgacugccugcacgagaaguacgggggccucaacaagagcaagccguacuacaccggcgagcacgccaaggccaucgggaacugccccaucugggugaagacgccccugaagcuggcgaacggcaccaaguaccggcccccggccaagcuccugaaggagcgcggguucuucggcgccaucgccggguuccuggagggcggcugggaggggaugaucgccggcuggcacggguacaccucccacggcgcgcacggcgucgccguggccgccgaccucaagagcacccaggaggccaucaacaagaucacgaagaaccugaacucccugagcgagcucgaggucaagaaccugcagcgccuguccggggcgauggacgagcuccacaacgagauccuggagcuggacgagaagguggacgaccuccgggccgacaccaucagcucccagaucgagcuggccgugcugcucagcaacgagggcaucaucaacuccgaggacgagcaccuccuggcccuggagcgcaagcugaagaagaugcuggggcccagcgcggucgagaucggcaacgggugcuucgagaccaagcacaagugcaaccagaccugccucgaccggaucgccgccggcacguucgacgccggcgaguucucccugcccaccuucgacagccugaacaucaccgccgcgucccucaacgacgacgggcuggacaaccacaccauccugcuguacuacagcaccgccgccuccagccucgccgugacgcugaugaucgccaucuucguggucuacauggugucccgcgacaacgugagcugcagcaucugccuguga

SEQ ID NO: 90627 - RNA, 1755 nt, Artificial Sequence
  derived and/or modified CDS sequence (opt1) from hemagglutinin__InfluenzaB__AEG21025
augaaggccaucaucgugcugcucauggucgugaccagcaacgccgaccgcaucugcaccggcaucacguccagcaacagcccccacguggucaagaccgcgacccugggggaggugaacgagaccggcgugaucccgcugacgaccacccccaccaaguccuacuucgccaaccucaaggggacgcggacccgcggcaagcugugccccgacugccugaacugcaccgaccucgacgucgcccuggggcggcccaugugcgugggcaccacgccguccgccaaggccagcauccugcacgaggugcgccccgucaccuccggcugcuuccccaucaugcacgaccggaccaagauccgccagcuccccaaccugcugcggggguacgagaacauccgccucagcacccagaacgugaucgacgcggagaaggccccgggcgggcccuaccggcugggcacguccgggagcugccccaacgccaccuccaagaucggcuucuucgccaccauggcgugggccgugcccaaggacaacuacaagaacgccaccaacccgcugacggucgaggugcccuacaucugcaccgagggcgaggaccagaucaccguguggggguuccacagcgacaucaagacccagaugaagaaccucuacggcgacuccaacccccagaaguucacgagcuccgccaacgggguccccacccacuacgugagccagaucggcgacuucccggaccccaccgaggacggcgggcugccccaguccggccgcaucgggguggacuacaugaugcagaagcccggcaagaccgggacgaucgucuaccagcggggcgugcugcucccgcagaagguguggugcgccagcggccgcuccaaggucaucaaggggagccugccccugaucggcgaggcggacugccuccacgagaaguacgggggccugaacaagagcaagcccuacuacaccggggagcacgccaaggccaucggcaacugccccaucugggugaagaccccgcugaagcucgccaacggcaccaaguaccggccgcccgccaagcugcugaaggagcgcggguucuucggcgcgaucuccggguuccucgagggcgggugggagggcaugaucgccggcuggcacggguacacgagccacggcgcccacgggguggccgucgccgcggaccugaaguccacccaggaggccaucaacaagaucaccaagaaccugaacagccucuccgagcuggaggugaagaaccugcagcggcucagcggcgccauggacgagcugcacaacgagauccuggagcucgacgagaaggucgacgaccugcgcgccgacaccaucuccagccagaucgagcuggccgugcuccuguccaacgagggcaucaucaacagcgaggacgagcaccuccuggcgcuggagcggaagcugaagaagaugcucgggcccuccgccguggagaucggcaacgggugcuucgagacgaagcacaagugcaaccagaccugcagcgaccgcaucgccgccggcaccuucgacgcgggggaguucucccugcccaccuucgacagccugaacaucaccgccgccucccucaacgacgacggccuggacaaccacacgauccugcuguacuacagcaccgccgccuccagccucgcggucacccugaugaucgccaucuucgugguguacauggucucccgggacaacgugagcugcagcaucugccuguga

SEQ ID NO: 90628 - RNA, 1758 nt, Artificial Sequence
  derived and/or modified CDS sequence (opt1) from hemagglutinin__InfluenzaB__AEG21026
augaaggccaugauggugcugcucauggucgugaccagcaacgccgaccgcaucugcaccggcaucacguccagcaacagcccccacguggucaagaccgcgacccagggggaggugaacgugaccggcgucaucccgcugacgaucacccccaccaagagccacuucgccaaccugaaggugaaggagacccgggggaagcucugccccaagugccccaacugcacggaccuggacguggcccugggccgcccgaagugcaccgggaagauccccuccgcccgggucagcauccuccacgaggacacccccgugaccuccggcugcauccccaucaugcacgaccgcacgaagauccggcagcugccgaaccugcuccgcggcuacgagcacauccggcugagcacccacaacgugaucaacgccgaguccgcgcccgggggccccuacaagaucgggaccagcggcuccugccccaacgucaccaacgggaucggcuucuucgccacgauggccugggccgugccgaagaacgacaagaacaagaccgcgaccaacccccugaccaucgaggugcccuacaucugcacggagggcgaggaccagaucaccgucuggggguuccacuucgacaacgagacccagauggccaagcucuacggcgacagcaagccccagguguucaccuccagcgccaacggggugaacgccgacuucgucucccagauccgcggcuucccgaaccagacggaggacggcgggcugccccagagcggccggaucgugguggacuacaugguccagaaguccgggaagaccggcaccaucaccuaccagcgcgggauccugcucccccagaagguguggugcgccagcggccgguccaaggugaucaaggagagccugccccugaucggcgaggcguacuuccagcaggaggaguacgggggccucaacaagagcaaguccuacuacacggaggagcacgccaaggccaucgggaucugcccgaucugggucaagacgccccugaagcuggccaacaagaccaaguaccgcccgcccgcccaccucagcuacuucugcggcuucuucggggcgaucgccggcuuccuggagggcgggugggagggcaugaucgccggguggaacggcuacaccucccacggggcccacggcguggccgucguggcggaccugaaguccacccaggaggccaucaacaagaucaccaagaaccucaacucccugagcgagcuggagguggagacccuccagcggcuguccggcgccauggacgagcugcacaacgagauccucgagcuggacgagaaggucgacgaccaccgcgccgacaccaucagcucccagaucgagcugcccgaccagcucagcaacgacggguccaucaacagcgaggacgagcaccuccuggcccuggagcggaagcugaagaagaugcugggccccuccaacggggacaagggcagcggcgggaucgagacgaagcacaagugcaaccagaccugccucgaccgcaucgcggccggcaccuucgacgccgggggcuucucccaccccaccuucgacagcaagaacgugaccgccgcgucccugaacgacgacgggcuggacagcggcacgauccuccuguacuacuccaccgacgugagcaaccuggccgucaccgugaugaugggcaucuucgugaaguacauggucagccgggacaacguguccugcagcaucugccucuga

SEQ ID NO: 90629 - RNA, 1758 nt, Artificial Sequence
  derived and/or modified CDS sequence (opt1) from hemagglutinin__InfluenzaB__AEG21027
augaaggccaucaucgugcugcucauggucgugaccagcaacgccgaccgcaucugcaccggcaucacguccagcaacagcccccacguggucaagaccgcgacccagggggaggugaacgugaccggcgucaucccgcugacgaucacccccaccaagagccacuucgccaaccugaaggggaccgagacgcggggcaagcucugccccaagugccccaacugcaccgaccuggacguggcccuggggcgcccgaagugcaccggcaagauccccuccgcccgggugagcauccuccacgagguccgccccgugaccuccggcugcuuccccaucaugcacgaccggacgaagauccgccagcugccgaaccugcuccggggguacgagcacauccgccugagcacccacaacgugaucaacgccgagaacgcgcccggcgggcccuacaagaucggcaccuccgggagcugccccaacgucaccaacggcaucggcuucuucgccacgauggccugggccgugccgaagaacgacaagaacaagaccgcgaccaacccccugaccaucgaggugcccuacaucugcacggagggggaggaccagaucaccgucuggggcuuccacuucgacaacgagacccagauggccaagcucuacggggacuccaagccccagaaguucaccagcuccgccaacggcgugaacgccgacuucgugagccagaucggcggguucccgaaccagacggaggacggcgggcugccccaguccggccggaucgucguggacuacauggugcagaaguccgggaagaccggcaccaucaccuaccagcgcggcauccugcucccccagaaggucuggugcgccuccgggcggagcaaggugaucaaggagucccugccccugaucggcgaggcguacuuccagcaggaggaguacgggggccucaacaagagcaagagcuacuacacgggggagcacgccaaggccaucggcaacugcccgaucugggugaagacgccccugaagcuggccaacggcaccaaguaccgcccgcccgcccaccucuccuacuucugcggguucuucggcgcgaucgccggguuccuggagggcgggugggagggcaugaucgccggcuggaacggguacaccagccacggcgcccacggggucgccguggucgcggaccugaaguccacccaggaggccaucaacaagaucaccaagaaccucaacagccuguccgagcuggagguggagacccuccagcggcugagcggcgccauggacgagcugcacaacgagauccucgagaucgacgagaagguggacgaccaccgcgccgacaccaucuccagccagaucgagcuggccguccugcucuccaacgagggcaucaucaacagcgaggacgagcaccuccuggcgcuggagcggaagcugaagaagaugcuggggcccuccaacggcgacaaggggagcggcgggaucgagacgaagcacaagugcaaccagaccugccucgaccgcaucgccgccggcaccuucgacgccggcgaguucucccugcccaccuucgacagccugaacaucaccgcggccucccucaacgacgacgggcuggacagcggcacgauccugcucuacuacuccaccgacgugagcaaccuggccgugaccgucaugauggggaucuucgugaaguacauggugucccgggacaacgucagcugcagcaucugccuguga

SEQ ID NO: 90630 - RNA, 1758 nt, Artificial Sequence
  derived and/or modified CDS sequence (opt1) from hemagglutinin__InfluenzaB__AEG21028
augaaggccaucaucgugcugcucauggucgugaccagcaacgccgaccgcaucugcaccggcaucacggcgucccagagccccaacaucgacaaguccagcacccagggggaggugaacgucuccugcgugaucccgcugaccaccacgcccaccaagagccacuucgccaaccugaaggugaaggagacccggggcaagcucugccccaagugccccaacugcaccgaccuggacgucucccuggggcgcccgaagugcacgggcaagauccccagcgcccggguguccauccuccacgaggugcgccccgucgccagcgggggcuuccccaucaugcacgaccggaccaagauccgccagcugccgaaccugcuccggggcuacgagcacauccgccuguccacccacaacgugaucaacgccgagaacgcgcccgggggccccuacaagaucgggaccagcggcuccugccccaacgugacgaacgggaucggcuucuucgccaccauggccugggccgucccgaagaacgacaagaacaagaccgcgaccaacccccugacgaucgaggugcccuacaucugcaccgagggcgaggaccagaucaccguguggggguuccacagcgacaacgagacccagauggccaagcucuacggcgacuccaagccccagaaguucacgagcuccgccaacggggucaccacccacuacgccgccaagcggccgugcuuccccaaccagaccgaggacggcggccugccccagagcgggcgcaucgugguggacuacaugguccagaaguccggcaagacggggaccaucaccuaccagcggggcauccugcucccccagaagguguggugcgcgagcgggcgcagcaaggugaucaagggcucccugccgcugaucggcgaggccgacugccuccacgagaaguacgggggccugaacaagagcaaguccuacuacaccggggagcacgccaaggccaucggcaacugccccaucugggucaagacgccccugaagcucgccagccggaccauguccaagacccccgcgcaccugagcuacuucugcggguucuucggcgccaucgccggcuuccuggagggcgggugggaggggaugaucgccggcuggaacggguacaccucccacggcgcccacggcguggcgguggucgccgaccucaagagcacgcaggaggccaucaacaagaucaccaagaaccugaacucccugagcgagcucgaggugaagaaccugcagcgccuguccggggccauggacgagcuccacaacgagauccuggagcuggacgagaaggucgacgaccuccgggccgacaccaucagcucccagaucgagcuggcggugcugcucagcaacgagggcaucaucaacuccgaggacgagcaccuccuggcccuggagcgcaagcugaagaagaugcuggggccgagcgccguggagaucggcaacggcugcuucgagaccaagcacaagugcaaccagacgugccucgaccggaucgccgcggggaccuucgacgccggcgaguucucccugcccaccuucgacagccugaacaucaccgccgccucccucaacgacgacgggcuggacaaccacaccauccugcucuacuacagcacggccgcgagcucccuggccgucacccugaugaucgccaucuucgugguguacauggucagccgcgacaacguguccugcagcaucugccuguga

SEQ ID NO: 90631 - RNA, 1758 nt, Artificial Sequence
  derived and/or modified CDS sequence (opt1) from hemagglutinin__InfluenzaB__AEG21029
augaaggccaucaucgugcugcucauggucgugaccagcaacgccgaccgcaucugcaccggcaucacguccagcaacagcccccacguggucaagaccgcgacccagggggaggugaacgugaccggcgucaucccgcugacgaccacccccaccaagagccacuucgccaaccugaaggggacggagacccggggcaagcucugccccaagugccccaacugcaccgaccuggacguggcccuggggcgcccgaagugcaccggcaagauccccuccgcccgggugagcauccuccacgagguccgccccgugacguccggcugcuuccccaucaugcacgaccggaccaagauccgccagcugccgaaccugcuccggggguacgagcacauccgccugagcacccacaacgugaucaacgccgagaacgcgcccggcgggcccuacaagaucggcaccuccgggagcugccccaacgucacgaacggcaucggcuucuucgccaccauggccugggccgugccgaagaacgacaagaacaagaccgcgaccaacccccugacgaucgaggugcccuacaucugcaccgagggggaggaccagaucaccgucuggggcuuccacuccgacagcgagacccagauggccaagcucuacggggacuccaagccccagaaguucacgagcuccgccaacggcgugaccacccacuacgugagccagaucggcggguucccgaaccagaccgaggacggcgggcugccccaguccggccggaucgucguggacuacauggugcagaaguccgggaagacgggcaccaucaccuaccagcgcggcauccugcucccccagaaggucuggugcgccuccgggcggagcaaggugaucaagggcagccugccccugaucggggaggccgacugccuccacgagaaguacggcgggcugaacaaguccaagccguacuacaccggcgagcacgcgaaggccaucggcaacugccccaucugggugaagacgccccugaagcucgccaacgggaccaaguaccggcccccggccaagcugcugaaggagcgcggcuucuucggggccaucgcgggcuuccucgagggcgggugggagggcaugaucgccggguggcacggcuacaccagccacggggcccacggcgucgccguggccgcggaccugaaguccacccaggaggccaucaacaagaucacgaagaaccugaacagccucuccgagcuggaggucaagaaccugcagcgccucagcggcgccauggacgagcugcacaacgagauccuggagcucgacgagaagguggacgaccugcgggccgacaccaucuccagccagaucgagcuggccgugcuccuguccaacgaggggaucaucaacagcgaggacgagcaccuccuggcgcuggagcgcaagcugaagaagaugcucggccccuccgccgucgagaucgggaacggcugcuucgagaccaagcacaagugcaaccagaccugccuggaccggaucgccgccgggaccuucgacgcgggcgaguucagccugcccacguucgacucccucaacaucaccgccgccagccugaacgacgacggccuggacaaccacaccauccuccuguacuacuccaccgccgccagcucccuggcggugacgcugaugaucgccaucuucguggucuacauggugagccgcgacaacguguccugcagcaucugccucuga

SEQ ID NO: 90632 - RNA, 1758 nt, Artificial Sequence
  derived and/or modified CDS sequence (opt1) from hemagglutinin__InfluenzaB__AEO80052
augaaggccaucaucgugcugcucauggucgugaccagcaacgccgaccgcaucugcaccggcaucacguccagcaacagcccccacguggucaagaccgcgacccagggggaggugaacgugaccggcgucaucccgcugacgaccacccccaccaagagccacuucgccaaccugaaggggacggagacccggggcaagcucugccccaagugccccaacugcaccgaccuggacguggcccuggggcgcccgaagugcaccggcaagauccccuccgcccgggugagcauccuccacgagguccgccccgugacguccggcugcuuccccaucaugcacgaccggaccaagauccgccagcugccgaaccugcuccggggguacgagcacauccgccugagcacccacaacgugaucaacgccgagaacgcgcccggcgggcccuacaagaucggcaccuccgggagcugccccaacgucacgaacggcaacggcuucuucgccaccauggccugggccgugccgaagaacgacaagaacaagaccgcgaccaacccccugacgaucgaggugcccuacaucugcaccgagggggaggaccagaucaccgucuggggcuuccacuccgacaacgagacccagauggccaagcucuacggggacagcaagccccagaaguucacguccagcgccaacggcgugaccacccacuacgugucccagaucggcggguucccgaaccagaccgaggacggcgggcugccccagagcggccggaucgucguggacuacauggugcagaaguccgggaagacgggcaccaucaccuaccagcgcggcauccugcucccccagaaggucuggugcgccagcgggcgguccaaggugaucaagggcagccugccccugaucggggaggccgacugccuccacgagaaguacggcgggcugaacaagagcaagccguacuacaccggcgagcacgcgaaggccaucggcaacugccccaucugggugaagacgccccugaagcucgccaacgggaccaaguaccggcccccggccaagcugcugaaggagcgcggcuucuucggggccaucgcgggcuuccucgagggcgggugggagggcaugaucgccggguggcacggcuacaccucccacggggcccacggcgucgccguggccgcggaccugaaguccacccaggaggccaucaacaagaucacgaagaaccugaacucccucagcgagcuggaggucaagaaccugcagcgccucuccggcgccauggacgagcugcacaacgagauccuggagcucgacgagaagguggacgaccugcgggccgacaccaucagcucccagaucgagcuggccgugcuccugagcaacgaggggaucaucaacuccgaggacgagcaccuccuggcgcuggagcgcaagcugaagaagaugcucggccccagcgccgucgagaucgggaacggcugcuucgagaccaagcacaagugcaaccagaccugccuggaccggaucgccgccgggaccuucgacgcgggcgaguucucccugcccacguucgacagccucaacaucaccgccgccucccugaacgacgacggccuggacaaccacaccauccuccuguacuacagcaccgccgccuccagccuggcggugacgcugaugaucgccaucuucguggucuacauggugucccgcgacaacgugagcugcuccaucugccucuga

SEQ ID NO: 90633 - RNA, 1758 nt, Artificial Sequence; identical to SEQ ID NO: 90538
  derived and/or modified CDS sequence (opt1) from hemagglutinin__InfluenzaB__AEO80067

SEQ ID NO: 90634 - RNA, 1755 nt, Artificial Sequence
  derived and/or modified CDS sequence (opt1) from hemagglutinin__InfluenzaB__AEO80078
augaaggagaucaucgugcugcucauggucgugaccagcaacgccgaccgcaucugcaccggcaucacguccagcaacagcccccacguggucaagaccgccacccagggggaggugaacgugaccggcgucaucccgcugacgaccacccccaccaaguccuacuucgcgaaccugaaggggacgcggacccgcggcaagcucugccccgacugccugaacugcaccgaccuggacguggcccucgggcggcccaugugcgugggcaccacgccguccgccaaggccagcauccugcacgagguccgccccgugaccuccggcugcuuccccaucaugcacgaccggaccaagauccgccagcuggccaaccuccugcggggguacgagaacauccgccugagcacccagaacgugaucgacgcggagaaggcccccggcgggccguaccggcucggcacguccgggagcugccccaacgccaccuccaagagcggcuucuucgccaccauggcgugggccguccccaaggacaacaacaagaacgccaccaacccccugacgguggaggugccguacaucugcaccgagggcgaggaccagaucaccgucuggggguuccacuccgacaacaagacccagaugaagaaccuguacggcgacagcaacccccagaaguucacguccagcgccaacggggugaccacccacuacgugucccagaucggcggcuuccccgaccagaccgaggacgggggccucccccagagcgggcgcaucgucguggacuacaugaugcagaagccgggcaagacggggaccaucguguaccagcggggcguccugcugccccagaagguguggugcgccuccggccgcagcaaggugaucaaggggagccucccccugaucggcgaggcggacugccugcacgagaaguacgggggccucaacaaguccaagcccuacuacaccggggagcacgccaaggccaucggcaacugcccgaucugggucaagacgccccugaagcuggccaacggcaccaaguaccggccgcccgccaagcuccugaaggagcgcggguucuucggcgcgaucgccggguuccuggagggcgggugggagggcaugaucgccggcuggcacggguacaccagccacggcgcccacgggguggccgucgcggccgaccucaaguccacccaggaggccaucaacaagaucaccaagaaccugaacagccuguccgagcucgaggugaagaaccugcagcggcugagcggcgccauggacgagcuccacaacgagauccuggagcuggacgagaagguggacgaccuccgcgccgacacgaucuccagccagaucgagcuggcgguccugcucuccaacgagggcaucaucaacagcgaggacgagcaccuccuggcccuggagcggaagcugaagaagaugcuggggcccuccgccguggacaucggcaacgggugcuucgagaccaagcacaagugcaaccagaccugccucgaccgcaucgccgcgggcaccuucaacgccggggaguucagccugcccaccuucgacucccugaacaucacggccgccagccucaacgacgacggccuggacaaccacaccauccugcuguacuacuccaccgccgcgagcucccucgccgugacccugaugcuggccaucuucaucgucuacauggugagccgggacaacguguccugcagcaucugccucuga

SEQ ID NO: 90635 - RNA, 1758 nt, Artificial Sequence
  derived and/or modified CDS sequence (opt1) from hemagglutinin__InfluenzaB__AEO80086
augaaggccaucaucgugcugcucauggucgugaccagcaacgccgaccgcaucugcaccggcaucacguccagcaacagcccccacguggucaagaccgcgacccagggggaggugaacgugaccggcgucaucccgcugacgaccacccccaccaagagccacuucgccaaccugaaggggacgaagacccggggcaagcucugccccaagugccugaacugcaccgaccuggacguggcccucgggcgccccaagugcaccggcaacaucccguccgccaaggugagcauccugcacgagguccggcccgugacguccggcugcuuccccaucaugcacgaccgcaccaagauccggcagcugcccaaccuccugcgcggguacgagcacauccggcugagcacccacaacgugaucaacgccgagaaggcgccgggcgggcccuacaagaucggcaccuccgggagcugccccaacgucacgaacggcaacggcuucuucgccaccauggccugggccgugcccaagaacgacaacaacaagaccgcgaccaacucccucacgaucgaggugccguacaucugcaccgagggggaggaccagaucaccaucuggggcuuccacagcgacaacgagacccagauggccaagcuguacggggacuccaagccccagaaguucacgagcuccgccaacggcgucaccacccacuacgugagccagaucggcggguuccccaaccagaccgaggacggcgggcugccccaguccggccgcaucguggucgacuacauggugcagaaguccgggaagacgggcaccaucaccuaccagcggggcauccuccugccgcagaagguguggugcgccuccgggcgcagcaaggucaucaagggcagccugccccucaucggggaggccgacugccugcacgagaaguacggcgggcugaacaaguccaagcccuacuacaccggcgagcacgcgaaggccaucggcaacugccccaucugggugaagacgccgcucaagcuggccaacgggaccaaguaccggccgcccgccaagcugcucaaggagcgcggcuucuucggggccaucgcgggcuuccuggagggcgggugggagggcaugaucgccggguggcacggcuacaccagccacggggcccacggcguggccgucgccgcggaccugaaguccacccaggaggccaucaacaagaucacgaagaaccucaacagccuguccgagcuggaggugaagaaccuccagcggcugagcggcgccauggacgagcugcacaacgagauccucgagcuggacgagaaggucgacgaccugcgcgccgacaccaucuccagccagaucgagcucgccgugcugcuguccaacgaggggaucaucaacagcgaggacgagcaccuccuggcgcuggagcggaagcucaagaagaugcugggccccuccgccguggagaucgggaacggcugcuucgagaccaagcacaagugcaaccagaccugccuggaccgcaucgccgccgggaccuucgacgcgggcgaguucagccuccccacguucgacucccugaacaucaccgccgccagccugaacgacgacggccucgacaaccacaccauccugcuguacuacuccaccgccgccagcucccuggcggucacgcucaugaucgccaucuucgugguguacauggucagccgggacaacguguccugcagcaucugccuguga

SEQ ID NO: 90636 - RNA, 1755 nt, Artificial Sequence
  derived and/or modified CDS sequence (opt1) from hemagglutinin__InfluenzaB__AEO80097
augaaggccaucaucgugcugcucauggucgugaccagcaacgccgaccgcaucugcaccggcaucacguccagcaacagcccccacguggucaagaccgcgacccagggggaggugaacgugaccggcgucaucccgcugacgaccacccccaccaagucccacuucgccaaccugaaggggacgcggacccgcggcaagcucugccccgacugccugaacugcaccgaccuggacguggcccucgggcggcccaugugcgugggcaccacgccguccgccaaggccagcauccugcacgagguccgccccgugaccuccggcugcuuccccaucaugcacgaccggaccaagauccgccagcuggcgaaccuccugcggggguacgagaacauccgccugagcacccagaacgugaucgacgccgagaaggcccccggcgggccguaccggcucggcacguccgggagcugccccaacgccaccuccaagagcggcuucuucgcgaccauggccugggccguccccaaggacaacaacaagaacgccaccaacccccugacgguggaggugccguacaucugcaccgagggcgaggaccagaucaccgucuggggguuccacuccgacaacaagacccagaugaagaaccuguacggcgacagcaacccccagaaguucacguccagcgccaacggggugaccacccacuacgugucccagaucggcggcuuccccgaccagaccgaggacgggggccucccccagagcgggcgcaucgucguggacuacaugaugcagaagccgggcaagacggggaccaucguguaccagcggggcguccugcugccccagaagguguggugcgcguccggccgcagcaaggugaucaaggggagccucccccugaucggcgaggccgacugccugcacgagaaguacgggggccucaacaaguccaagcccuacuacaccggggagcacgccaaggccaucggcaacugcccgaucugggucaagacgccccugaagcuggccaacggcaccaaguaccggccgcccgcgaagcuccugaaggagcgcggguucuucggcgccaucgccggguuccuggagggcgggugggagggcaugaucgccggcuggcacggguacaccagccacggcgcccacgggguggcggucgccgccgaccucaaguccacccaggaggccaucaacaagaucaccaagaaccugaacagccuguccgagcucgaggugaagaaccugcagcggcugagcggcgccauggacgagcuccacaacgagauccuggagcuggacgagaagguggacgaccuccgcgcggacacgaucuccagccagaucgagcuggccguccugcucuccaacgagggcaucaucaacagcgaggacgagcaccuccuggcccuggagcggaagcugaagaagaugcuggggcccuccgccguggacaucggcaacgggugcuucgagaccaagcacaagugcaaccagaccugccucgaccgcaucgcggccggcaccuucaacgccggggaguucagccugcccaccuucgacucccugaacaucacggccgccagccucaacgacgacggccuggacaaccacaccauccugcuguacuacuccaccgcggccagcucccucgccgugacccugaugcuggccaucuucaucgucuacauggugagccgggacaacguguccugcagcaucugccucuga

SEQ ID NO: 90637 - RNA, 1755 nt, Artificial Sequence; identical to SEQ ID NO: 90450
  derived and/or modified CDS sequence (opt1) from hemagglutinin__InfluenzaB__AEO80108

SEQ ID NO: 90638 - RNA, 1758 nt, Artificial Sequence; identical to SEQ ID NO: 90538
  derived and/or modified CDS sequence (opt1) from hemagglutinin__InfluenzaB__AEO80145

SEQ ID NO: 90639 - RNA, 1758 nt, Artificial Sequence; identical to SEQ ID NO: 90597
  derived and/or modified CDS sequence (opt1) from hemagglutinin__InfluenzaB__AEO80154

SEQ ID NO: 90640 - RNA, 1758 nt, Artificial Sequence
  derived and/or modified CDS sequence (opt1) from hemagglutinin__InfluenzaB__AEO80183
augaaggccaucaucgugcugcucauggucgugaccagcaacgccgaccgcaucugcaccggcaucacguccagcaacagcccccacguggucaagaccgcgacccagggggaggugaacgugaccggcgucaucccgcugacgaccacccccaccaagagccacuucgccaaccugaaggggacggagacccggggcaagcucugccccaagugccugaacugcaccgaccuggacguggcccucgggcgccccaagugcaccggcaacaucccguccgcccgggugagcauccugcacgagguccgccccgugacguccggcugcuuccccaucaugcacgaccggaccaagauccgccagcugcccaaccuccugcggggguacgagcacauccgccugagcacccacaacgugaucaacgccgagaacgcgccgggcgggcccuacaagaucggcaccuccgggagcugccccaacgucacgaacggcaacggcuucuucgccaccauggccugggccgugcccaagaacgacaacaacaagaccgcgaccaacucccucacgaucgaggugccguacaucugcaccgagggggaggaccagaucaccgucuggggcuuccacagcgacaucgagacccagauggccaagcuguacggggacuccaagccccagaaguucacgagcuccgccaacggcgugaccacccacuacgugagccagaucggcggguuccccaaccagaccgaggacggcgggcugccccaguccggccggaucgucguggacuacauggugcagaaguccgggaagacgggcaccaucaccuaccagcgcggcauccuccugccgcagaaggucuggugcgccuccgggcggagcaaggugaucaagggcagccugccccucaucggggaggccgacugccugcacgagaaguacggcgggcugaacaaguccaagcccuacuacaccggcgagcacgcgaaggccaucggcaacugccccaucugggugaagacgccgcucaagcuggccaacgggaccaaguaccgcccgcccgccaagcugcucaaggagcggggcuucuucggggccaucgcgggcuuccuggagggcgggugggagggcaugaucgccggguggcacggcuacaccagccacggggcccacggcgucgccguggccgcggaccugaaguccacccaggaggccaucaacaagaucacgaagaaccucaacagccuguccgagcuggaggucaagaaccuccagcgccugagcggcgccauggacgagcugcacaacgagauccucgagcuggacgagaagguggacgaccugcgggccgacaccaucuccagccagaucgagcucgccgugcugcuguccaacgaggggaucaucaacagcgaggacgagcaccuccuggcgcuggagcgcaagcucaagaagaugcugggccccuccgccgucgagaucgggaacggcugcuucgagaccaagcacaagugcaaccagaccugccuggaccggaucgccgccgggaccuucgacgcgggcgaguucagccuccccacguucgacucccugaacaucaccgccgccagccugaacgacgacggccucgacaaccacaccauccugcuguacuacuccaccgccgccagcucccuggcggugacgcucaugaucgccaucuucguggucuacauggugagccgcgacaacguguccugcagcaucugccuguga

SEQ ID NO: 90641 - RNA, 1758 nt, Artificial Sequence
  derived and/or modified CDS sequence (opt1) from hemagglutinin__InfluenzaB__AEO80194
augaaggccaucaucgugcugcucauggucgugaccagcaacgccgaccgcaucugcaccggcaucacguccagcaacagcccccacguggucaagaccgcgacccagggggaggugaacgugaccggcgucaucccgcugacgaccacccccaccaagagccacuucgccaaccugaaggggacggagacccggggcaagcucugccccaagugccugaacugcaccgaccuggacguggcccucgggcgccccaagugcaccggcaacaucccguccgcccgggugagcauccugcacgagguccgccccgugacguccggcugcuuccccaucaugcacgaccggaccaagauccgccagcugcccaaccuccugcggggguacgagcacauccgccugagcacccacaacgugaucaacgccgagaacgcgccgggcgggcccuacaagaucggcaccuccgggagcugccccaacgucacgaacggcaacggcuucuucgccaccauggccugggccgugcccaagaacgacaacaacaagaccgcgaccaacucccucacgaucgaggugccguacaucugcaccgagggggaggaccagaucaccgucuggggcuuccacagcgacaacgaggcccagauggccaagcuguacggggacuccaagccccagaaguucaccagcuccgccaacggcgugacgacccacuacgugagccagaucggcggguuccccaaccagaccgaggacggcgggcugccccaguccggccggaucgucguggacuacauggugcagaaguccgggaagaccggcacgaucaccuaccagcgcggcauccuccugccgcagaaggucuggugcgcccgggggcgcuccaaggugaucaagggcagccugccccucaucggggaggcggacugccugcacgagaaguacggcgggcugaacaagagcaagcccuacuacaccggcgagcacgccaaggccaucggcaacugccccaucugggugaagaccccgcucaagcuggccaacgggacgaaguaccggccgcccgccaagcugcucaaggagcgcggcuucuucggggcgaucgccggcuuccuggagggcgggugggagggcaugaucgccggguggcacggcuacaccucccacggggcccacggcgucgccguggcggccgaccucaagagcacccaggaggccaucaacaagaucaccaagaaccugaacucccugagcgagcuggaggucaagaaccuccagcggcuguccggcgccauggacgagcugcacaacgagauccucgagcuggacgagaagguggacgaccugcgcgccgacacgaucagcucccagaucgagcucgcggugcugcugagcaacgaggggaucaucaacuccgaggacgagcaccuccuggcccuggagcggaagcucaagaagaugcugggccccagcgccgucgagaucgggaacggcugcuucgagaccaagcacaagugcaaccagaccugccuggaccgcaucgccgcggggaccuucgacgccggcgaguucucccuccccaccuucgacagccugaacaucacggccgccucccugaacgacgacggccucgacaaccacaccauccugcuguacuacagcaccgccgcguccagccuggccgugacccucaugaucgccaucuucguggucuacaugaucucccgggacaacgugagcugcuccaucugccuguga

SEQ ID NO: 90642 - RNA, 1758 nt, Artificial Sequence; identical to SEQ ID NO: 90589
  derived and/or modified CDS sequence (opt1) from hemagglutinin__InfluenzaB__AEO80205

SEQ ID NO: 90643 - RNA, 1758 nt, Artificial Sequence; identical to SEQ ID NO: 90589
  derived and/or modified CDS sequence (opt1) from hemagglutinin__InfluenzaB__AEO80216

SEQ ID NO: 90644 - RNA, 1755 nt, Artificial Sequence
  derived and/or modified CDS sequence (opt1) from hemagglutinin__InfluenzaB__AEO80227
augaaggccaucaucgugcugcucauggucgugaccagcaacgccgaccgcaucugcaccggcaucacguccagcaacagcccccacguggucaagaccgcgacccagggggaggugaacgugaccggcgucaucccgcugacgaccacccccaccaaguccuacuucgccaaccugaaggggacgcggacccgcggcaagcucugccccgacugccugaacugcaccgaccuggacguggcccucgggcggcccaugugcgugggcaccacgccguccgccaaggccagcauccugcacgagguccgccccgugaccuccggcugcuuccccaucaugcacgaccggaccaagauccgccagcuggcgaaccuccugcggggguacgagaacauccgccugagcacccagaacgugaucgacgccgagaaggcccccggcgggccguaccggcucggcacguccgggagcugccccaacgccaccuccaagagcggcuucuucgcgaccauggccugggccguccccaaggacaacaacaagaacgccaccaacccccugacgguggaggugccguacaucugcaccgagggcgaggaccagaucaccgucuggggguuccacuccgacaacaagauccagaugaagaaccuguacggcgacagcaacccccagaaguucaccuccagcgccaacggggugacgacccacuacgugucccagaucggcggcuuccccgaccagaccgaggacgggggccucccccagagcgggcgcaucgucguggacuacaugaugcagaagccgggcaagaccgggacgaucguguaccagcggggcguccugcugccccagaagguguggugcgcguccggccgcagcaaggugaucaaggggagccucccccugaucggcgaggccgacugccugcacgagaaguacgggggccucaacaaguccaagcccuacuacaccggggagcacgccaaggccaucggcaacugcccgaucugggucaagacgccccugaagcuggccaacggcaccaaguaccggccgcccgcgaagcuccugaaggagcgcggguucuucggcgccaucgccggguuccuggagggcgggugggagggcaugaucgccggcuggcacggguacaccagccacggcgcccacgggguggcggucgccgccgaccucaaguccacccaggaggccaucaacaagaucaccaagaaccugaacagccuguccgagcucgaggugaagaaccugcagcggcugagcggcgccauggacgagcuccacaacgagauccuggagcuggacgagaagguggacgaccuccgcgcggacaccaucuccagccagaucgagcuggccguccugcucuccaacgagggcaucaucaacagcgaggacgagcaccuccuggcccuggagcggaagcugaagaagaugcuggggcccuccgccguggacaucggcaacgggugcuucgagacgaagcacaagugcaaccagaccugccucgaccgcaucgcggccggcaccuucaacgccggggaguucagccugcccaccuucgacucccugaacaucaccgccgccagccucaacgacgacggccuggacaaccacacgauccugcuguacuacuccaccgcggccagcucccucgccgugacccugaugcuggccaucuucaucgucuacauggugagccgggacaacguguccugcagcaucugccucuga

SEQ ID NO: 90645 - RNA, 1758 nt, Artificial Sequence; identical to SEQ ID NO: 90606
  derived and/or modified CDS sequence (opt1) from hemagglutinin__InfluenzaB__AEO80238

SEQ ID NO: 90646 - RNA, 1758 nt, Artificial Sequence
  derived and/or modified CDS sequence (opt1) from hemagglutinin__InfluenzaB__AEP20178
augaaggccaucaucgugcugcucauggucgugaccagcaacgccgaccgcaucugcaccggcaucacguccagcaacagcccccacguggucaagaccgcgacccagggggaggugaacgugaccggcgucaucccgcugacgaccacccccaccaagagccacuucuccaaccugaaggggacggagacccggggcaagcucugccccaagugccugaacugcaccgaccuggacguggcccucgggcgccccaagugcaccggcaacaucccgagcgcccggguguccauccugcacgagguccgccccgugacgagcggcugcuuccccaucaugcacgaccggaccaagauccgccagcugcccaaccuccugcggggguacgagcacauccgccuguccacccacaacgugaucaacgccgagaacgccccgggcgggcccuacaagaucggcaccagcggguccugccccaacgucacgaacggcaacggcuucuucgcgaccauggccugggccgugcccaagaacgacaacaacaagaccgccaccaacagccucacgaucgaggugccguacaucugcaccgagggggaggaccagaucaccgucuggggcuuccacuccgacaacgagacccagauggcgaagcuguacggggacagcaagccccagaaguucacguccagcgccaacggcgugaccacccacuacgugucccagaucggcggguuccccaaccagaccgaggacggcgggcugccccagagcggccggaucgucguggacuacauggugcagaaguccgggaagacgggcaccaucaccuaccagcgcggcauccuccugccgcagaaggucuggugcgccagcgggcggagcaaggugaucaagggcucccugccccucaucggggaggccgacugccugcacgagaaguacggcgggcugaacaagagcaagcccuacuacaccggcgagcacgccaaggcgaucggcaacugccccaucugggugaagacgccgcucaagcuggccaacgggaccaaguaccgcccgcccgccaagcugcucaaggagcggggcuucuucggggccaucgccggcuuccuggagggcgggugggagggcaugaucgcgggguggcacggcuacaccucccacggggcccacggcgucgccguggccgccgaccugaaguccacccaggaggcgaucaacaagaucacgaagaaccucaacucccugagcgagcuggaggucaagaaccuccagcgccuguccggcgccauggacgagcugcacaacgagauccucgagcuggacgagaagguggacgaccugcgggccgacaccaucagcucccagaucgagcucgccgugcugcugagcaacgaggggaucaucaacuccgaggacgagcaccuccuggcccuggagcgcaagcucaagaagaugcugggccccagcgcggucgagaucgggaacggcugcuucgagaccaagcacaagugcaaccagaccugccuggaccggaucgccgccgggaccuucgacgccggcgaguucucccuccccacguucgacagccugaacaucaccgcggccucccugaacgacgacggccucgacaaccacaccauccugcuguacuacagcaccgccgccuccagccuggccgugacgcucaugaucgcgaucuucguggucuacauggugucccgcgacaacgugagcugcagcaucugccuguga

SEQ ID NO: 90647 - RNA, 1758 nt, Artificial Sequence
  derived and/or modified CDS sequence (opt1) from hemagglutinin__InfluenzaB__AEP20189
augaaggccaucaucgugcugcucauggucgugaccagcaacgccgaccgcaucugcaccggcaucacguccagcaacagcccccacguggucaagaccgcgacccagggggaggugaacgugaccggcgucaucccgcugacgaccacccccaccaagagccacuucgccaaccugaaggggacggagacccggggcaagcucugccccaagugccugaacugcaccgaccuggacguggcccucgggcgccccaagugcaccggcaacaucccguccgcccgggugagcauccugcacgagguccgccccgugacguccggcugcuuccccaucaugcacgaccggaccaagauccgccagcugcccaaccuccugcggggguacgagcacauccgccugagcacccacaacgugaucaacgccgagaacgcgccgggcgggcccuacaagaucggcaccuccgggagcugccccaacgucacgaacggcaacggcuucuucgccaccauggccugggccgugcccaagaacgacaacaacaagaccgcgaccaacucccucacgaucgaggugccguacaucugcaccgagggggaggaccagaucaccgucuggggcuuccacagcgacaacgagacccagauggccaagcuguacggggacuccaagccccagaaguucacgagcuccgccaacggcgugaccacccacuacgugagccagaucggcggguuccccaaccagaccgaggacggcgggcugccccaguccggccggaucgucguggacuacauggugcagaaguccgggaagacgggcaccaucaccuaccagcgcggcauccuccugccgcagaaggucuggugcgccuccgggcggagcaaggugaucaagggcagccugccccucaucggggaggccgacugccugcacgagaaguacggcgggcugaacaaguccaagcccuacuacaccggcgagcacgcgaaggccaucggcaacugccccaucugggugaagacgccgcucaagcuggccaacgggaccaaguaccgcccgcccgccaagcugcucaaggagcggggcuucuucggggccaucgcgggcuuccuggagggcgggugggagggcaugaucgccggguggcacggcuacaccagccacggggcccacggcgucgccguggccgcggaccugaaguccacccaggaggccaucaacaagaucacgaagaaccucaacagccuguccgagcuggaggucaagaaccuccagcgccugagcggcgccauggacgagcugcacaacgagauccucgagcuggacgagaagguggacgaccugcgggccgacaccaucuccagccagaucgagcucgccgugcugcuguccaacgaggggaucaucaacagcgaggacgagcaccuccuggcgcuggagcgcaagcucaagaagaugcugggccccuccgccgucgagaucgggaacggcugcuucgagaccaagcacaagugcaaccagaccugccuggaccggaucgccgccgggaccuucgacgcgggcgaguucagccuccccacguucgacucccugaacaucaccgccgccagccugaacgacgacggccucgacaaccacaccgugcugcuguacuacuccaccgccgccagcucccuggcggugacgcucaugaucgccaucuucgucguguacauggugagccgcgacaacgucuccugcagcaucugccuguga

SEQ ID NO: 90648 - RNA, 1758 nt, Artificial Sequence; identical to SEQ ID NO: 90538
  derived and/or modified CDS sequence (opt1) from hemagglutinin__InfluenzaB__AEP20200

SEQ ID NO: 90649 - RNA, 1755 nt, Artificial Sequence; identical to SEQ ID NO: 90429
  derived and/or modified CDS sequence (opt1) from hemagglutinin__InfluenzaB__AEP20211

SEQ ID NO: 90650 - RNA, 1755 nt, Artificial Sequence
  derived and/or modified CDS sequence (opt1) from hemagglutinin__InfluenzaB__AEP20222
augaaggccaucaucgugcugcucauggucgugaccagcaacgccgaccgcaucugcaccggcaucacguccagcaacagcccccacguggucaagaccgcgacccagggggaggugaacgugaccggcgccaucccgcugacgaccacccccaccaagagccacuucgccaaccugaaggggacgaagacccggggcaagcucugcccgaccugcuucaacugcaccgaccuggacgucgcccuggggcgccccaugugcgugggcaucacgcccuccgccaaggcgagcauccuccacgaggugcggcccgucaccuccggcugcuuccccaucaugcacgaccgcaccaagauccggcagcugcccaaccugcuccgcggguacgagaagauccggcugagcacccagaacgugaucgacgccgagaaggccccgggcgggcccuaccgccugggcacguccgggagcugccccaacgccaccuccaagagcggcuucuucgcgaccauggccugggccgugccccgggacaacaacaagaccgccacgaacccgcucaccgucgaggugcccaacaucugcaccaaggaggaggaccagaucaccguguggggcuuccacuccgacaacaagacgcagaugaagaaccuguacggggaccccaacccccagaaguucaccagcuccgccaacggcaucaccacccacuacgucagccagaucgggggcuucccggaccagacggaggacggcgggcugccccaguccggccgcaucgugguggacuacaugguccagaagcccgggaagaccggcaccaucguguaccagcgggggauccuccugccccagaagguguggugcgcgagcggccgcuccaaggucaucaagggcagccugccgcucaucggggaggccgacugccugcacgagaaguacggcgggcugaacaagagcaagcccuacuacaccggcgagcacgccaaggccaucgggaacugccccaucugggugaagacgccccucaagcuggccaacggcaccaaguaccggccgcccgcgaagcugcucaaggagcgcggcuucuucggggccaucgccggcuuccuggagggcgggugggaggggaugaucgccggcuggcacggcuacaccucccacggggcccacggcguggcggucgccgccgaccugaaguccacccaggaggccaucaacaagaucacgaagaaccucaacucccugagcgagcuggaggugaagaaccuccagcggcuguccggggccauggacgagcugcacaacgagauccucgagcuggacgagaaggucgacgaccugcgcgcggacaccaucagcucccagaucgagcucgccgugcugcugagcaacgagggcaucaucaacuccgaggacgagcaccuccuggcccuggagcggaagcucaagaagaugcugggccccagcgccguggacaucgggaacggcugcuucgagaccaagcacaagugcaaccagaccugccuggaccgcaucgcggccgggaccuucaacgccggcgaguucucccuccccacguucgacagccugaacaucaccgccgccucccugaacgacgacgggcucgacaaccacaccauccugcuguacuacagcaccgcggccuccagccuggccgucacgcucaugaucgccaucuucaucguguacaugaucucccgggacaacgugagcugcuccaucugccuguga

SEQ ID NO: 90651 - RNA, 1755 nt, Artificial Sequence; identical to SEQ ID NO: 90535
  derived and/or modified CDS sequence (opt1) from hemagglutinin__InfluenzaB__AEP20233

SEQ ID NO: 90652 - RNA, 1755 nt, Artificial Sequence
  derived and/or modified CDS sequence (opt1) from hemagglutinin__InfluenzaB__AEP20244
augaaggccaucaucgugcugcucauggucgugaccagcaacgccgaccgcaucugcaccggcaucacguccagcaacagcccccacguggucaagaccgcgacccagggggaggugaacgugaccggcgccaucccgcugacgaccacccccaccaagucccacuucgccaaccugaaggggacgaagacccggggcaagcucugcccgaccugcuucaacugcaccgaccuggacgucgcccuggggcgccccaugugcaugggcaucacgcccuccgccaaggcgagcauccuccacgaggugcggcccgugaccuccggcugcuuccccaucaugcacgaccgcaccaagauccggcagcugcccaaccugcuccgcggguacgagaagauccggcugagcacccagaacgucaucgacgccgagaaggccccgggcgggcccuaccgccugggcacguccgggagcugccccaacgccaccuccaagagcggcuucuucgcgaccauggccugggccgugccccggggcaacaacaagaccgccacgaacccgcucaccguggaggucccccacaucugcaccaaggaggaggaccagaucaccguguggggguuccacuccgacaacaagacgcagaugaagaaccuguacggcgacagcaacccccagaaguucaccuccagcgccaacgggaucaccacccacuacgugucccagaucggcggcuuccccgaccagacggaggacgggggccugccgcagagcgggcgcaucgucguggacuacauggugcagaagcccggcaagaccgggaccaucgucuaccagcggggcauccuccugccccagaagguguggugcgcguccggccgcagcaaggugaucaaggggagccugccccucaucggcgaggccgacugccugcacgagaaguacgggggccugaacaaguccaagccguacuacaccggggagcacgccaaggccaucggcaacugccccaucugggucaagacgccccucaagcuggccaacggcaccaaguaccggcccccggcgaagcugcucaaggagcgcggguucuucggcgccaucgccggguuccuggagggcgggugggagggcaugaucgccggcuggcacggguacaccagccacggcgcccacgggguggcgguggccgccgaccugaaguccacccaggaggccaucaacaagaucacgaagaaccucaacagccuguccgagcuggaggucaagaaccuccagcggcugagcggcgccauggacgagcugcacaacgagauccucgagcuggacgagaagguggacgaccugcgcgcggacaccaucuccagccagaucgagcucgccguccugcuguccaacgagggcaucaucaacagcgaggacgagcaccuccuggcccuggagcggaagcucaagaagaugcuggggcccuccgccguggacaucggcaacgggugcuucgagaccaagcacaagugcaaccagaccugccuggaccgcaucgcggccggcaccuucaacgccggggaguucagccuccccacguucgacucccugaacaucaccgccgccagccugaacgacgacggccucgacaaccacaccauccugcuguacuacuccaccgcggccagcucccuggccgugacgcucaugaucgccaucuucaucgucuacaugaucagccgggacaacguguccugcagcaucugccuguga

SEQ ID NO: 90653 - RNA, 1758 nt, Artificial Sequence; identical to SEQ ID NO: 90443
  derived and/or modified CDS sequence (opt1) from hemagglutinin__InfluenzaB__AEP20255

SEQ ID NO: 90654 - RNA, 1758 nt, Artificial Sequence
  derived and/or modified CDS sequence (opt1) from hemagglutinin__InfluenzaB__AEP20277
augaaggccaucaucgugcugcucauggucgugaccagcaacgccgaccgcaucugcaccggcaucacguccagcaacagcccccacguggucaagaccgcgacccagggggaggugaacgugaccggcgucaucccgcugacgaccacccccaccaagagccacuucgccaaccugaaggggacgaagacccggggcaagcucugccccaagugccugaacugcaccgaccuggacguggcccucgggcgccccaagugcaccggcaacaucccguccgccgaggugagcauccugcacgagguccggcccgugacguccggcugcuuccccaucaugcacgaccgcaccaagauccggcagcugcccaaccuccugcgcggguacgagcacauccggcugagcacccacaacgugaucaacgccgagaaggcgccgggcgggcccuacaagaucggcaccuccgggagcugccccaacgucacgaacggcaacggcuucuucgccaccauggccugggccgugcccaagaacgacaacaacaagaccgcgaccaacucccucacgaucgaggugccguacaucugcaccgagggggaggaccagaucaccgucuggggcuuccacagcgacaacgagacccagauggccaagcuguacggggacuccaagccccagaaguucacgagcuccgccaacggcgugaccacccacuacgugagccagaucggcggguuccccaaccagaccgaggacggcgggcugccccaguccggccgcaucgucguggacuacauggugcagaaguccgggaagacgggcaccaucaccuaccagcggggcauccuccugccgcagaaggucuggugcgccuccgggcgcagcaaggugaucaagggcagccugccccucaucggggaggccgacugccugcacgagaaguacggcgggcugaacaaguccaagcccuacuacaccggcgagcacgcgaaggccaucggcaacugccccaucugggugaagacgccgcucaagcuggccaacgggaccaaguaccggccgcccgccaagcugcucaaggagcgcggcuucuucggggccaucgcgggcuuccuggagggcgggugggagggcaugaucgccggguggcacggcuacaccagccacggggcccacggcgucgccguggccgcggaccugaaguccacccaggaggccaucaacaagaucacgaagaaccucaacagccuguccgagcuggaggucaagaaccuccagcggcugagcggcgccauggacgagcugcacaacgagauccucgagcuggacgagaagguggacgaccugcgcgccgacaccaucuccagccagaucgagcucgccgugcugcuguccaacgaggggaucaucaacagcgaggacgagcaccuccuggcgcuggagcggaagcucaagaagaugcugggccccuccgccgucgagaucgggaacggcugcuucgagaccaagcacaagugcaaccagaccugccuggacaagaucgccgccgggaccuucgacgcgggcgaguucagccuccccacguucgacucccugaacaucaccgccgccagccugaacgacgacggccucgacaaccacaccauccugcuguacuacuccaccgccgccagcucccuggcggugacgcucaugaucgccaucuucguggucuacauggugagccgcgacaacguguccugcagcaucugccuguga

SEQ ID NO: 90655 - RNA, 1755 nt, Artificial Sequence
  derived and/or modified CDS sequence (opt1) from hemagglutinin__InfluenzaB__AEP20299
augaaggccaucaucgugcugcucauggucgugaccagcaacgccgaccgcaucugcaccggcaucacguccagcaacagcccccacguggucaagaccgcgacccagggggaggugaacgugaccggcgucaucccgcugacgaccacccccaccaaguccuacuucgccaaccugaaggggacgcggacccgcggcaagcucugccccgacugccugaacugcaccgaccuggacguggcccucgggcggcccaugugcgugggcaccacgccguccgccaaggccagcauccugcacgagguccgccccgugaccuccggcugcuuccccaucaugcacgaccggaccaagauccgccagcuggcgaaccuccugcggggguacgagaacauccgccugagcacccagaacgugaucgacgccgagaaggcccccggcgggccguaccggcucggcacguccgggagcugccccaacgccaccuccaagagcggcuucuucgcgaccauggccugggccguccccaagaacaacaacaagaacgccaccaacccccugacgguggaggugccguacaucugcaccgagggcgaggaccagaucaccgucuggggguuccacuccgacaacaagacccagaugaagaaccuguacggcgacagcaacccccagaaguucacguccagcgccaacggggugaccacccacuacgugucccagaucggcggcuuccccgaccagaccgaggacgggggccucccccagagcgggcgcaucgucguggacuacaugaugcagaagccgggcaagacggggaccaucguguaccagcggggcguccugcugccccagaagguguggugcgcguccggccgcagcaaggugaucaaggggagccucccccugaucggcgaggccgacugccugcacgagaaguacgggggccucaacaaguccaagcccuacuacaccggggagcacgccaaggccaucggcaacugcccgaucugggucaagacgccccugaagcuggccaacggcaccaaguaccggccgcccgcgaagcuccugaaggagcgcggguucuucggcgccaucgccggguuccuggagggcgggugggagggcaugaucgccggcuggcacggguacaccagccacggcgcccacgggguggcggucgccgccgaccucaaguccacccaggaggccaucaacaagaucaccaagaaccugaacagccuguccgagcucgaggugaagaaccugcagcggcugagcggcgccauggacgagcuccacaacgagauccuggagcuggacgagaagguggacgaccuccgcgcggacacgaucuccagccagaucgagcuggccguccugcucuccaacgagggcaucaucaacagcgaggacgagcaccuccuggcccuggagcggaagcugaagaagaugcuggggcccuccgccguggacaucggcaacgggugcuucgagaccaagcacaagugcaaccagaccugccucgaccgcaucgcggccggcaccuucaacgccggggaguucagccugcccaccuucgacucccugaacaucacggccgccagccucaacgacgacggccuggacaaccacaccauccugcuguacuacuccaccgcggccagcucccucgccgugacccugaugcuggccaucuucaucgucuacauggugagccgggacaacguguccugcagcaucugccucuga

SEQ ID NO: 90656 - RNA, 1755 nt, Artificial Sequence
  derived and/or modified CDS sequence (opt1) from hemagglutinin__InfluenzaB__AEP20310
augaaggccaucaucgugcugcucauggucgugaccagcaacgccgaccgcaucugcaccggcaucacguccagcaacagcccccacguggucaagaccgcgacccagggggaggugaacgugaccggcgucaucccgcugacgaccacccccaccaaguccuacuucgccaaccugaaggggacgcggacccgcggcaagcucugccccgacugccugaacugcaccgaccuggacguggcccucgggcggcccaugugcgugggcaccacgccguccgccaaggccagcauccugcacgagguccgccccgugaccuccggcugcuuccccaucaugcacgaccggaccaagauccgccagcugcccaaccuccugcggggguacgagaacauccgccugagcacccagaacgugaucgacgcggagaaggccccgggcgggcccuaccggcucggcacguccgggagcugccccaacgccaccuccaagagcggcuucuucgccaccauggcgugggccguccccaaggacaacaacaagaacgccaccaacccgcugacgguggaggugcccuacaucugcaccgagggcgaggaccagaucaccgucuggggguuccacuccgacaacaagacccagaugaagaaccuguacggcgacagcaacccccagaaguucacguccagcgccaacggggugaccgcccacuacgugucccagaucggcggcuuccccgaccagaccgaggacgggggccucccgcagagcgggcgcaucgucguggacuacaugaugcagaagcccggcaagaccgggacgaucguguaccagcggggcguccugcugccccagaagguguggugcgcguccggccgcagcaaggugaucaaggggagccucccccugaucggcgaggccgacugccugcacgagaaguacgggggccucaacaaguccaagccguacuacaccggggagcacgccaaggccaucggcaacugccccaucugggucaagacgccccugaagcuggccaacggcaccaaguaccggcccccggcgaagcuccugaaggagcgcggguucuucggcgccaucgccggguuccuggagggcgggugggagggcaugaucgccggcuggcacggguacaccagccacggcgcccacgggguggcggucgccgccgaccucaaguccacccaggaggccaucaacaagaucaccaagaaccugaacagccuguccgagcucgaggugaagaaccugcagcggcugagcggcgccauggacgagcuccacaacgagauccuggagcuggacgagaagguggacgaccuccgcgcggacaccaucuccagccagaucgagcuggccguccugcucuccaacgagggcaucaucaacagcgaggacgagcaccuccuggcccuggagcggaagcugaagaagaugcuggggcccuccgccguggacaucggcaacgggugcuucgagacgaagcacaagugcaaccagaccugccucgaccgcaucgcggccggcaccuucaacgccggggaguucagccugcccaccuucgacucccugaacaucaccgccgccagccucaacgacgacggccuggacaaccacacgauccugcuguacuacuccaccgcggccagcucccucgccgugacccugaugcuggccaucuucaucgucuacauggugagccgggacaacguguccugcagcaucugccucuga

SEQ ID NO: 90657 - RNA, 1758 nt, Artificial Sequence
  derived and/or modified CDS sequence (opt1) from hemagglutinin__InfluenzaB__AEP20332
augaaggccaucaucgugcugcucauggucgugaccagcaacgccgaccgcaucugcaccggcaucacguccagcaacagcccccacguggucaagaccgcgacccagggggaggugaacgugaccggcgucaucccgcugacgaccacccccaccaagagccacuucgccaaccugaaggggacgaagacccggggcaagcucugccccaagugccugaacugcaccgaccuggacguggcccucgggcgccccaagugcaccggcaacaucccguccgccgaggugagcauccugcacgagguccggcccgugacguccggcugcuuccccaucaugcacgaccgcaccaagauccggcagcugcccaaccuccugcgcggguacgagcacauccggcugagcacccacaacgugaucaacgccgagaaggcgccgggcgggcccuacaagaucggcaccuccgggagcugccccaacgucacgaacggcaacggcuucuucgccaccauggccugggccgugcccaagaacgacaacaacaagaccgcgaccaacccgcucacgaucgaggugcccuacaucugcaccgagggggaggaccagaucaccgucuggggcuuccacuccgacaacgagacccagauggccaagcuguacggggacagcaagccccagaaguucacguccagcgccaacggcgugaccacccacuacgugucccagaucggcggguuccccaaccagaccgaggacggcgggcugccgcagagcggccgcaucgucguggacuacauggugcagaaguccgggaagacgggcaccaucaccuaccagcggggcauccuccugccccagaaggucuggugcgccagcgggcgcuccaaggugaucaagggcagccugccccucaucggggaggccgacugccugcacgagaaguacggcgggcugaacaagagcaagcccuacuacaccggcgagcacgcgaaggccaucggcaacugcccgaucugggugaagacgccccucaagcuggccaacgggaccaaguaccggccgcccgccaagcugcucaaggagcgcggcuucuucggggccaucgcgggcuuccuggagggcgggugggagggcaugaucgccggguggcacggcuacaccucccacggggcccacggcgucgccguggccgcggaccugaaguccacccaggaggccaucaacaagaucacgaagaaccucaacucccugagcgagcuggaggucaagaaccuccagcggcuguccggcgccauggacgagcugcacaacgagauccucgagcuggacgagaagguggacgaccugcgcgccgacaccaucagcucccagaucgagcucgccgugcugcugagcaacgaggggaucaucaacuccgaggacgagcaccuccuggcgcuggagcggaagcucaagaagaugcugggccccagcgccgucgagaucgggaacggcugcuucgagaccaagcacaagugcaaccagaccugccuggaccgcaucgccgccgggaccuucgacgcgggcgaguucucccuccccacguucgacagccugaacaucaccgccgccucccugaacgacgacggccucgacaaccacaccauccugcuguacuacagcaccgccgccuccagccuggcggugacgcucaugaucgccaucuucguggucuacauggugucccgggacaacgugagcugcuccaucugccuguga

SEQ ID NO: 90658 - RNA, 1755 nt, Artificial Sequence; identical to SEQ ID NO: 90450
  derived and/or modified CDS sequence (opt1) from hemagglutinin__InfluenzaB__AEP20343

SEQ ID NO: 90659 - RNA, 1755 nt, Artificial Sequence; identical to SEQ ID NO: 90450
  derived and/or modified CDS sequence (opt1) from hemagglutinin__InfluenzaB__AEP20354

SEQ ID NO: 90660 - RNA, 1755 nt, Artificial Sequence; identical to SEQ ID NO: 90450
  derived and/or modified CDS sequence (opt1) from hemagglutinin__InfluenzaB__AEP20365

SEQ ID NO: 90661 - RNA, 1755 nt, Artificial Sequence; identical to SEQ ID NO: 90450
  derived and/or modified CDS sequence (opt1) from hemagglutinin__InfluenzaB__AEP20376

SEQ ID NO: 90662 - RNA, 1758 nt, Artificial Sequence
  derived and/or modified CDS sequence (opt1) from hemagglutinin__InfluenzaB__AEP20398
augaaggccaucaucgugcugcucauggucgugaccagcaacgccgaccgcaucugcaccggcaucacguccagcaacagcccccacguggucaagaccgcgacccagggggaggugaacgugaccggcgucaucccgcugacgaccacccccaccaagagccacuucgccaaccugaaggggacgaagacccggggcaagcucugccccaagugccugaacugcaccgaccuggacguggcccucgggcgccccaagugcaccggcaacaucccguccgccgaggugagcauccugcacgagguccggcccgugacguccggcugcuuccccaucaugcacgaccgcaccaagauccggcagcugcccaaccuccugcgcggguacgagcacauccggcugagcacccacaacgugaucaacgccgagaaggcgccgggcgggcccuacaagaucggcaccuccgggagcugccccaacgucacgaacggcaacggcuucuucgccaccauggccugggccgugcccaagaacgacaacaacaagaccgcgaccaacucccucacgaucgaggugccguacaucugcaccgagggggaggaccagaucaccaucuggggcuuccacagcgacaacgagacccagauggccaagcuguacggggacuccaagccccagaaguucacgagcuccgccaacggcgucaccacccacuacgugagccagaucggcggguuccccaaccagaccgaggacggcgggcugccccaguccggccgcaucguggucgacuacauggugcagaaguccgggaagacgggcaccaucaccuaccagcggggcauccuccugccgcagaagguguggugcgccuccgggcgcagcaaggucaucaagggcagccugccccucaucggggaggccgacugccugcacgagaaguacggcgggcugaacaaguccaagcccuacuacaccggcgagcacgcgaaggccaucggcaacugccccaucugggugaagacgccgcucaagcuggccaacgggaccaaguaccggccgcccgccaagcugcucaaggagcgcggcuucuucggggccaucgcgggcuuccuggagggcgggugggagggcaugaucgccggguggcacggcuacaccagccacggggcccacggcguggccgucgccgcggaccugaaguccacccaggaggccaucaacaagaucacgaagaaccucaacagccuguccgagcuggaggugaagaaccuccagcggcugagcggcgccauggacgagcugcacaacgagauccucgagcuggacgagaaggucgacgaccugcgcgccgacaccaucuccagccagaucgagcucgccgugcugcuguccaacgaggggaucaucaacagcgaggacgagcaccuccuggcgcuggagcggaagcucaagaagaugcugggccccuccgccguggagaucgggaacggcugcuucgagaccaagcacaagugcaaccagaccugccuggaccgcaucgccgccgggaccuucgacgcgggcgaguucagccuccccacguucgacucccugaacaucaccgccgccagccugaacgacgacggccucgacaaccacaccauccugcuguacuacuccaccgccgccagcucccuggcggucacgcucaugaucgccaucuucgugguguacauggucagccgggacaacguguccugcagcaucugccuguga

SEQ ID NO: 90663 - RNA, 1758 nt, Artificial Sequence; identical to SEQ ID NO: 90632
  derived and/or modified CDS sequence (opt1) from hemagglutinin__InfluenzaB__AEP20409

SEQ ID NO: 90664 - RNA, 1758 nt, Artificial Sequence; identical to SEQ ID NO: 90632
  derived and/or modified CDS sequence (opt1) from hemagglutinin__InfluenzaB__AEP20420

SEQ ID NO: 90665 - RNA, 1758 nt, Artificial Sequence; identical to SEQ ID NO: 90632
  derived and/or modified CDS sequence (opt1) from hemagglutinin__InfluenzaB__AEP20431

SEQ ID NO: 90666 - RNA, 1758 nt, Artificial Sequence; identical to SEQ ID NO: 90632
  derived and/or modified CDS sequence (opt1) from hemagglutinin__InfluenzaB__AEP20442

SEQ ID NO: 90667 - RNA, 1758 nt, Artificial Sequence; identical to SEQ ID NO: 90632
  derived and/or modified CDS sequence (opt1) from hemagglutinin__InfluenzaB__AEP20453

SEQ ID NO: 90668 - RNA, 1755 nt, Artificial Sequence; identical to SEQ ID NO: 90450
  derived and/or modified CDS sequence (opt1) from hemagglutinin__InfluenzaB__AEQ39027

SEQ ID NO: 90669 - RNA, 1758 nt, Artificial Sequence
  derived and/or modified CDS sequence (opt1) from hemagglutinin__InfluenzaB__AEQ39260
augaaggccaucaucgugcugcucauggucgugaccagcaacgccgaccgcaucugcaccggcaucacguccagcaacagcccccacguggucaagaccgcgacccagggggaggugaacgugaccggcgucaucccgcugacgaccacccccaccaagagccacuucgccaaccugaaggggacggagacccggggcaagcucugccccaagugccugaacugcaccgaccuggacguggcccucgggcgccccaagugcaccggcaagaucccguccgcccgggugagcauccugcacgagguccgccccgugacguccggcugcuuccccaucaugcacgaccggaccaagauccgccagcugcccaaccuccugcggggguacgagcacauccgccugagcacccacaacgugaucaacgccgagaacgcgccgggcgggcccuacaagaucggcaccuccgggagcugccccaacgucacgaacggcaacggcuucuucgccaccauggccugggccgugcccaagaacgacaagaacaagaccgcgaccaacccgcucacgaucgaggugcccuacaucugcaccgagggggaggaccagaucaccgucuggggcuuccacuccgacaacgagacccagauggccaagcuguacggggacagcaagccccagaaguucacguccagcgccaacggcgugaccacccacuacgugucccagaucggcggguuccccaaccagaccgaggacggcgggcugccgcagagcggccggaucgucguggacuacauggugcagaaguccgggaagacgggcaccaucaccuaccagcgcggcauccuccugccccagaaggucuggugcgccagcgggcgguccaaggugaucaagggcagccugccccucaucggggaggccgacugccugcacgagaaguacggcgggcugaacaagagcaagcccuacuacaccggcgagcacgcgaaggccaucggcaacugcccgaucugggugaagacgccccucaagcuggccaacgggaccaaguaccgcccgcccgccaagcugcucaaggagcggggcuucuucggggccaucgcgggcuuccuggagggcgggugggagggcaugaucgccggguggcacggcuacaccucccacggggcccacggcgucgccguggccgcggaccugaaguccacccaggaggccaucaacaagaucacgaagaaccucaacucccugagcgagcuggaggucaagaaccuccagcgccuguccggcgccauggacgagcugcacaacgagauccucgagcuggacgagaagguggacgaccugcgggccgacaccaucagcucccagaucgagcucgccgugcugcugagcaacgaggggaucaucaacuccgaggacgagcaccuccuggcgcuggagcgcaagcucaagaagaugcugggccccagcgccgucgagaucgggaacggcugcuucgagaccaagcacaagugcaaccagaccugccuggaccggaucgccgccgggaccuucgacgcgggcgaguucucccuccccacguucgacagccugaacaucaccgccgccucccugaacgacgacggccucgacaaccacaccauccugcuguacuacagcaccgccgccuccagccuggcggugacgcucaugaucgccaucuucguggucuacauggugucccgcgacaacgugagcugcuccaucugccuguga

SEQ ID NO: 90670 - RNA, 1758 nt, Artificial Sequence; identical to SEQ ID NO: 90669
  derived and/or modified CDS sequence (opt1) from hemagglutinin__InfluenzaB__AEQ39271

SEQ ID NO: 90671 - RNA, 1758 nt, Artificial Sequence
  derived and/or modified CDS sequence (opt1) from hemagglutinin__InfluenzaB__AEQ39282
augaaggccaucaucgugcugcucauggucgugaccagcaacgccgaccgcaucugcaccggcaucacguccagcaacagcccccacguggucaagaccgcgacccagggggaggugaacgugaccggcgucaucccgcugacgaccacccccaccaagagccacuucgccaaccugaaggggacggagacccggggcaagcucugccccaagugccugaacugcaccgaccuggacguggcccucgggcgccccaagugcaccggcaagaucccguccgcccgggugagcauccugcacgagguccgccccgugacguccggcugcuuccccaucaugcacgaccggaccaagauccgccagcugcccaaccuccugcggggguacgagcacauccgccugagcacccacaacgugaucaacgccgagaacgcgccgggcgggcccuacaagaucggcaccuccgggagcugccccaacgucacgaacggcaacggcuucuucgccaccauggccugggccgugcccaagaacgacaagaacaagaccgcgaccaacccgcucacgaucgaggugcccuacaucugcaccgagggggaggaccagaucaccgucuggggcuuccacuccgacaacgagacccagauggccaagcuguacggggacagcaagccccagaaguucacguccagcgccaacggcgugaccacccacuacgugucccagaucggcggguuccccaaccagaccgaggacggcgggcugccgcagagcggccggaucgucguggacuacauggugcagaaguccgggaagacgggcaccaucaccuaccagcgcggcauccuccugccccagaaggucuggugcgccagcgggcgguccaaggugaucaagggcagccugccccucaucggggaggccgacugccugcacgagaaguacggcgggcugaacaagagcaagcccuacuacaccggcgagcacgcgaaggccaucggcaacugcccgaucugggugaagacgccccucaagcuggccaacgggaccaaguaccgcccgcccgccaagcugcucaaggagcggggcuucuucggggccaucgcgggcuuccuggagggcgggugggagggcaugaucgccggguggcacggcuacaccucccacggggcccacggcgucgccguggccgcggaccugaaguccacccaggaggccaucaacaagaucacgaagaaccucaacucccugagcgagcuggaggucaagaaccuccagcgccuguccggcgccauggacgagcugcacaacgagauccucgagcuggacgagaagguggacgaccugcgggccgacaccaucagcucccagaucgagcucgccgugcugcugagcaacgaggggaucaucaacuccgaggacgagcaccuccuggcgcuggagcgcaagcucaagaagaugcugggccccagcgccgucgagaucgggaacggcugcuucgagaccaagcacaagugcaaccagaccugccuggaccggaucgccgccgggaccuucgacgcgggcgaguucucccuccccacguucgacagccugaacaucaccgccgccucccugaacggcgacgagcucgacaaccacaccauccugcuguacuacagcaccgccgccuccagccuggcggugacgcucaugaucgccaucuucguggucuacauggugucccgcgacaacgugagcugcuccaucugccuguga

SEQ ID NO: 90672 - RNA, 1758 nt, Artificial Sequence
  derived and/or modified CDS sequence (opt1) from hemagglutinin__InfluenzaB__AEQ39315
augaaggccaucaucgugcugcucauggucgugaccagcaacgccgaccgcaucugcaccggcaucacguccagcaacagcccccacguggucaagaccgcgacccagggggaggugaacgugaccggcgucaucccgcugacgaccacccccaccaagagccacuucgccaaccugaaggggacggagacccggggcaagcucugccccaagugccugaacugcaccgaccuggacguggcccucgggcgccccaagugcaccggcaagaucccguccgcccgggugagcauccugcacgagguccgccccgugacguccggcugcuuccccaucaugcacgaccggaccaagauccgccagcugcccaaccuccugcggggguacgagcacauccgccugagcacccacaacgugaucaacgccgagaacgcgccgggcgggcccuacaagaucggcaccuccgggagcugccccaacgucacgaacggcaacggcuucuucgccaccauggccugggccgugcccaagaacgacaagaacaagaccgcgaccaacccgcucacgaucgaggugcccuacaucugcaccgagggggaggaccagaucaccgucuggggcuuccacuccgacaacgagacccagauggccaagcuguacggggacagcaagccccagaaguucacguccagcgccaacggcgugaccacccacuacgugucccagaucggcggguuccccaaccagaccgaggacggcgggcugccgcagagcggccggaucgucguggacuacauggugcagaaguccgggaagacgggcaccaucaccuaccagcgcggcauccuccugccccagaaggucuggugcgccagcgggcgguccaaggugaucaagggcagccugccccucaucggggaggccgacugccugcacgagaaguacggcgggcugaacaagagcaagcccuacuacaccggcgagcacgcgaaggccaucggcaacugcccgaucugggugaagacgccccucaagcuggccaacgggaccaaguaccgcccgcccgccaagcugcucaaggagcggggcuucuucggggccaucgcgggcuuccuggagggcgggugggagggcaugaucgccggguggcacggcuacaccucccacggggcccacggcgucgccguggccgcggaccugaaguccacccaggaggccaucaacaagaucacgaagaaccucaacucccugagcgagcuggaggucaagaaccuccagcgccuguccggcgccauggacgagcugcacaacgagauccucgagcuggacgagaagguggacgaccugcgggccgacaccaucagcucccagaucgagcucgccgugcugcugagcaacgaggggaucaucaacuccgaggacgagcaccuccuggcgcuggagcgcaagcucaagaagaugcugggccccagcgccgucgagaucgggaacggcugcuucgagaccaagcacaagugcaaccagaccugccuggaccggaucgccgccgggaccuucgacgcgggcgaguucucccuccccacguucgacagccugaacaucaccgccgccucccugaacggcgacgggcucgacaaccacaccauccugcuguacuacagcaccgccgccuccagccuggcggugacgcucaugaucgccaucuucguggucuacauggugucccgcgacaacgugagcugcuccaucugccuguga

SEQ ID NO: 90673 - RNA, 1758 nt, Artificial Sequence; identical to SEQ ID NO: 90672
  derived and/or modified CDS sequence (opt1) from hemagglutinin__InfluenzaB__AEQ39326

SEQ ID NO: 90674 - RNA, 1758 nt, Artificial Sequence
  derived and/or modified CDS sequence (opt1) from hemagglutinin__InfluenzaB__AEQ39337
augaaggccaucaucgugcugcucauggucgugaccagcaacgccgaccgcaucugcaccggcaucacguccagcaacagcccccacguggucaagaccgcgacccagggggaggugaacgugaccggcgucaucccgcugacgaccacccccaccaagagccacuucgccaaccugaaggggacggagacccggggcaagcucugccccaagugccugaacugcaccgaccuggacguggcccucgggcgccccaagugcaccggcaagaucccguccgcccgggugagcauccugcacgagguccgccccgugacguccggcugcuuccccaucaugcacgaccggaccaagauccgccagcugcccaaccuccugcggggguacgagcacauccgccugagcacccacaacgugaucaacgccggcaacgcgcccgggggccccuacaagaucgggaccuccggcagcugccccaacgucacgaacggcaacggguucuucgccaccauggccugggccgugcccaagaacgacaagaacaagaccgcgaccaacccgcucacgaucgaggugcccuacaucugcaccgagggcgaggaccagaucaccgucuggggguuccacuccgacaacgagacccagauggccaagcuguacggcgacagcaagccccagaaguucacguccagcgccaacggcgugaccacccacuacgugucccagaucgggggcuuccccaaccagaccgaggacgggggccugccgcagagcgggcggaucgucguggacuacauggugcagaaguccggcaagacgggcaccaucaccuaccagcgcgggauccuccugccccagaaggucuggugcgccagcggccgguccaaggugaucaaggggagccugccccucaucggcgaggccgacugccugcacgagaaguacgggggccugaacaagagcaagcccuacuacaccggcgagcacgcgaaggccaucgggaacugcccgaucugggugaagaagccccucaagcuggccaacggcacgaaguaccgcccgcccgccaagcugcucaaggagcggggguucuucggcgccaucgcgggguuccuggagggcggcugggaggggaugaucgccggcuggcacggguacaccucccacggcgcccacggcgucgccguggccgcggaccugaaguccacccaggaggccaucaacaagaucaccaagaaccucaacucccugagcgagcuggaggucaagaaccuccagcgccuguccggggccauggacgagcugcacaacgagauccucgagcuggacgagaagguggacgaccugcgggccgacacgaucagcucccagaucgagcucgccgugcugcugagcaacgagggcaucaucaacuccgaggacgagcaccuccuggcgcuggagcgcaagcucaagaagaugcuggggccgagcgccgucgagaucggcaacgggugcuucgagaccaagcacaagugcaaccagaccugccuggaccggaucgccgccggcaccuucgacgcgggcgaguucucccuccccaccuucgacagccugaacaucacggccgccucccugaacgacgacgggcucgacaaccacaccauccugcuguacuacagcaccgccgccuccagccuggcggugacccucaugaucgccaucuucguggucuacauggugucccgcgacaacgugagcugcuccaucugccuguga

SEQ ID NO: 90675 - RNA, 1758 nt, Artificial Sequence
  derived and/or modified CDS sequence (opt1) from hemagglutinin__InfluenzaB__AEQ39348
augaaggccaucaucgugcugcucauggucgugaccagcaacgccgaccgcaucugcaccggcaucacguccagcaacagcccccacguggucaagaccgcgacccagggggaggugaacgugaccggcgucaucccgcugacgaccacccccaccaagagccacuucgccaaccugaaggggacggagacccggggcaagcucugccccaagugccugaacugcaccgaccuggacguggcccucgggcgccccaagugcaccggcaagaucccguccgcccgggugagcauccugcacgagguccgccccgugacguccggcugcuuccccaucaugcacgaccggaccaagauccgccagcugcccaaccuccugcggggguacgagcacauccgccugagcacccacaacgugaucaacgccgagaacgcgccgggcgggcccuacaagaucggcaccuccgggagcugccccaacgucacgaacggcaacggcuucuucgccaccauggccugggccgugcccaagaacgacaagaacaagaccgcgaccaacccgcucacgaucgaggugcccuacaucugcaccgagggggaggaccagaucaccgucuggggcuuccacuccgacaacgagacccagauggccaagcuguacggggacagcaagccccagaaguucacguccagcgccaacggcgugaccacccacuacgugucccagaucggcggguuccccaaccagaccgaggacggcgggcugccgcagagcggccggaucgucguggacuacauggugcagaaguccgggaagacgggcaccaucaccuaccagcgcggcauccuccugccccagaaggucuggugcgccagcgggcgguccaaggugaucaagggcagccugccccucaucggggaggccgacugccugcacgagaaguacggcgggcugaacaagagcaagcccuacuacaccggcgagcacgcgaaggccaucggcaacugcccgaucugggugaagacgccccucaagcuggccaacgggaccaaguaccgcccgcccgccaagcugcucaaggagcggggcuucuucggggccaucgcgggcuuccuggagggcgggugggagggcaugaucgccggguggcacggcuacaccucccacggggcccacggcgucgccguggccgcggaccugaaguccacccaggaggccaucaacaagaucacgaagaaccucaacucccugagcgagcuggaggucaagaaccuccagcgccuguccggcgccauggacgagcugcacaacgagauccucgagcuggacgagaagguggacgaccugcgggccgacaccaucagcucccagaucgagcucgccgugcugcugagcaacgaggggaucaucaacuccgaggacgagcaccuccuggcgcuggagcgcaagcucaagaagaugcugggccccagcgccgucgagaucgggaacggcugcuucgagaccaagcacaagugcaaccagaccugccuggaccggaucgccgccgggaccuucgacgcgggcgaguucucccuccccacguucgacagccugaacaucaccgccgccucccugaacgacgacggccucgacaaccacaucauccugcuguacuacagcaccgccgccuccagccuggcggugacccucaugaucgccaucuucguggucuacauggugucccgcgacaacgugagcugcuccaucugccuguga

SEQ ID NO: 90676 - RNA, 1758 nt, Artificial Sequence; identical to SEQ ID NO: 90672
  derived and/or modified CDS sequence (opt1) from hemagglutinin__InfluenzaB__AEQ39359

SEQ ID NO: 90677 - RNA, 1758 nt, Artificial Sequence
  derived and/or modified CDS sequence (opt1) from hemagglutinin__InfluenzaB__AEQ39370
augaaggccaucaucgugcugcucauggucgugaccagcaacgccgaccgcaucugcaccggcaucacguccagcaacagcccccacguggucaagaccgcgacccagggggaggugaacgugaccggcgucaucccgcugacgaccacccccaccaagagccacuucgccaaccugaaggggacggagacccggggcaagcucugccccaagugccugaacugcaccgaccuggacguggcccucgggcgccccaagugcaccggcaacaucccguccgcccgggugagcauccugcacgagguccgccccgugacguccggcugcuuccccaucaugcacgaccggaccaagauccgccagcugcccaaccuccugcggggguacgagcacauccgccugagcacccacaacguggucaacgccgagaacgcgccgggcgggcccuacaagaucggcaccuccgggagcugccccaacgugacgaacggcaacggcuucuucgccaccauggccugggccgugcccaagaacgacaacaacaagaccgcgaccaacucccucacgaucgaggucccguacaucugcaccgagggggaggaccagaucaccguguggggcuuccacagcgacaacgagacccagauggccaagcuguacggggacuccaagccccagaaguucacgagcuccgccaacggcgugaccacccacuacgucagccagaucggcggguuccccaaccagaccgaggacggcgggcugccccaguccggccggaucgugguggacuacaugguccagaaguccgggaagacgggcaccaucaccuaccagcgcggcauccuccugccgcagaagguguggugcgccuccgggcggagcaaggugaucaagggcagccugccccucaucggggaggccgacugccugcacgagaaguacggcgggcugaacaaguccaagcccuacuacaccggcgagcacgcgaaggccaucggcaacugccccaucugggucaagacgccgcucaagcuggccaacgggaccaaguaccgcccgcccgccaagcugcucaaggagcggggcuucuucggggccaucgcgggcuuccuggagggcgggugggagggcaugaucgccggguggcacggcuacaccagccacggggcccacggcguggccgucgccgcggaccugaaguccacccaggaggccaucaacaagaucacgaagaaccucaacagccuguccgagcuggaggugaagaaccuccagcgccugagcggcgccauggacgagcugcacaacgagauccucgagcuggacgagaagguggacgaccugcgggccgacaccaucuccagccagaucgagcucgccguccugcuguccaacgaggggaucaucaacagcgaggacgagcaccuccuggcgcuggagcgcaagcucaagaagaugcugggccccuccgccguggagaucgggaacggcugcuucgagaccaagcacaagugcaaccagaccugccuggaccggaucgccgccgggaccuucgacgcgggcgaguucagccuccccacguucgacucccugaacaucaccgccgccagccugaacgacgacggccucgacaaccacaccauccugcuguacuacuccaccgccgccagcucccuggcggugacgcucaugaucgccaucuucgucguguacauggugagccgcgacaacgucuccugcagcaucugccuguga

SEQ ID NO: 90678 - RNA, 1755 nt, Artificial Sequence; identical to SEQ ID NO: 90450
  derived and/or modified CDS sequence (opt1) from hemagglutinin__InfluenzaB__AEQ39392

SEQ ID NO: 90679 - RNA, 1755 nt, Artificial Sequence; identical to SEQ ID NO: 90450
  derived and/or modified CDS sequence (opt1) from hemagglutinin__InfluenzaB__AEQ39429

SEQ ID NO: 90680 - RNA, 1755 nt, Artificial Sequence; identical to SEQ ID NO: 90450
  derived and/or modified CDS sequence (opt1) from hemagglutinin__InfluenzaB__AEQ39440

SEQ ID NO: 90681 - RNA, 1755 nt, Artificial Sequence; identical to SEQ ID NO: 90450
  derived and/or modified CDS sequence (opt1) from hemagglutinin__InfluenzaB__AEQ39451

SEQ ID NO: 90682 - RNA, 1758 nt, Artificial Sequence; identical to SEQ ID NO: 90662
  derived and/or modified CDS sequence (opt1) from hemagglutinin__InfluenzaB__AEQ39462

SEQ ID NO: 90683 - RNA, 1758 nt, Artificial Sequence; identical to SEQ ID NO: 90669
  derived and/or modified CDS sequence (opt1) from hemagglutinin__InfluenzaB__AEQ39484

SEQ ID NO: 90684 - RNA, 1755 nt, Artificial Sequence; identical to SEQ ID NO: 90429
  derived and/or modified CDS sequence (opt1) from hemagglutinin__InfluenzaB__AEQ39506

SEQ ID NO: 90685 - RNA, 1758 nt, Artificial Sequence
  derived and/or modified CDS sequence (opt1) from hemagglutinin__InfluenzaB__AEQ39517
augaaggccaucaucgugcugcucauggucgugaccagcaacgccgaccgcaucugcaccggcaucacguccagcaacagcccccacguggucaagaccgcgacccagggggaggugaacgugaccggcgucaucccgcugacgaccacccccaccaagagccacuucgccaaccugaaggggacgaagacccggggcaagcucugccccaagugccugaacugcaccgaccuggacguggcccucgggcgccccaagugcaccggcaacaucccguccgccgaggugagcauccugcacgagguccggcccgugacguccggcugcuuccccaucaugcacgaccgcaccaagauccggcagcugcccaaccuccugcgcggguacgagcacauccggcugagcacccacaacgugaucaacgccgagaaggcgccgggcgggcccuacaagaucggcaccuccgggagcugccccaacgucacgaacggcaacggcuucuucgccaccauggccugggccgugcccaagaacgacaacaacaagaccgcgaccaacucccucacgaucgaggugccguacaucugcaccgagggggaggaccagaucaccaucuggggcuuccacagcgacaacgagacccagauggccaagcuguacggggacuccaagccccagaaguucacgagcuccgccaacggcgucaccacccacuacgugagccagaucggcggguuccccaaccagaccgaggacggcgggcugccccaguccggccgcaucguggucgacuacauggugcagaaguccgggaagacgggcaccaucaccuaccagcggggcauccuccugccgcagaagguguggugcgccuccgggcgcagcaaggucaucaagggcagccugccccucaucggggaggccgacugccugcacgagaaguacggcgggcugaacaaguccaagcccuacuacaccggcgagcacgcgaaggccaucggcaacugccccaucugggugaagacgccgcucaagcuggccaacgggaccaaguaccggccgcccgccaagcugcucaaggagcgcggcuucuucggggccaucgcgggcuuccuggagggcgggugggagggcaugaucgccggguggcacggcuacaccagccacggggcccacggcguggccgucgccgcggaccugaaguccacccaggaggccaucaacaagaucacgaagaaccucaacagccuguccgagcuggaggugaagaaccuccagcggcugagcggcgccauggacgagcugcacaacgagauccucgagcuggacgagaaggucgacgaccugcgcgccgacaccaucuccagccagaucgagcucgccgugcugcuguccaacgaggggaucaucaacagcgaggacgagcaccuccuggcgcuggagcggaagcucaagaagaugcugggccccuccgccguggagaucgggaacggcugcuucgagaccaagcacaagugcaaccagaccugccuggaccgcaucgccgccgggaccuucgacgcgggcgaguucagccuccccacguucgacucccugaacaucaccgccgccagccugaacgacaacggccucgacaaccacaccauccugcuguacuacuccaccgccgccagcucccuggcggucacgcucaugaucgccaucuucgugguguacauggucagccgggacaacguguccugcagcaucugccuguga

SEQ ID NO: 90686 - RNA, 1758 nt, Artificial Sequence
  derived and/or modified CDS sequence (opt1) from hemagglutinin__InfluenzaB__AER27038
augaaggccaucaucgugcugcucauggucgugaccagcaacgccgaccgcaucugcaccggcaucacguccagcaacagcccccacguggucaagaccgcgacccagggggaggugaacgugaccggcgucaucccgcugacgaccacccccaccaagagccacuucgccaaccugaaggggacggagacccggggcaagcucugccccaagugccccaacugcaccgaccuggacguggcccuggggcgcccgaagugcaccggcaagauccccuccgcccgggugagcauccuccacgagguccgccccgugacguccggcugcuuccccaucaugcacgaccggaccaagauccgccagcugccgaaccugcuccggggguacgagcacauccgccugagcacccacaacgugaucaacgccgagaacgcgcccggcgggcccuacaagaucggcaccuccgggagcugccccaacgucacgaacggcaacggcuucuucgccaccauggccugggccgugccgaagaacgacaagaacaagaccgcgaccaacccccugacgaucgaggugcccuacaucugcaccaagggggaggaccagaucaccgucuggggcuuccacuccgacaacgagacccagauggccaagcucuacggggacagcaagccccagaaguucacguccagcgccaacggcgugaccacccacuacgugucccagaucggcggguucccgaaccagaccgaggacggcgggcugccccagagcggccggaucgucguggacuacauggugcagaaguccgggaagacgggcaccaucaccuaccagcgcggcauccugcucccccagaaggucuggugcgccagcgggcgguccaaggugaucaagggcagccugccccugaucggggaggccgacugccuccacgagaaguacggcgggcugaacaagagcaagccguacuacaccggcgagcacgcgaaggccaucggcaacugccccaucugggugaagacgccccugaagcucgccaacgggaccaaguaccggcccccggccaagcugcugaaggagcgcggcuucuucggggccaucgcgggcuuccucgagggcgggugggagggcaugaucgccggguggcacggcuacaccucccacggggcccacggcaucgccgucgccgcggaccugaaguccacccaggaggccaucaacaagaucacgaagaaccugaacucccucagcgagcuggaggugaagaaccugcagcgccucuccggcgccauggacgagcugcacaacgagauccuggagcucgacgagaaggucgacgaccugcgggccgacaccaucagcucccagaucgagcuggccgugcuccugagcaacgaggggaucaucaacuccgaggacgagcaccuccuggcgcuggagcgcaagcugaagaagaugcucggccccagcgccguggagaucgggaacggcugcuucgagaccaagcacaagugcaaccagaccugccuggaccggaucgccgccgggaccuucgacgcgggcgaguucucccugcccacguucgacagccucaacaucaccgccgccucccugaacgacgacggccuggacaaccacaccauccuccuguacuacagcaccgccgccuccagccuggcggucacgcugaugaucgccaucuucgugguguacauggucucccgcgacaacgugagcugcuccaucugccucuga

SEQ ID NO: 90687 - RNA, 1758 nt, Artificial Sequence; identical to SEQ ID NO: 90632
  derived and/or modified CDS sequence (opt1) from hemagglutinin__InfluenzaB__AER27060

SEQ ID NO: 90688 - RNA, 1758 nt, Artificial Sequence
  derived and/or modified CDS sequence (opt1) from hemagglutinin__InfluenzaB__AET10061
augaaggccaucaucgugcugcucauggucgugaccagcaacgccgaccgcaucugcaccggcaucacguccagcaacagcccccacguggucaagaccgcgacccagggggaggugaacgugaccggcgucaucccgcugacgaccacccccaccaagagccacuucgccaaccugaaggggacggagacccggggcaagcucugccccaagugccugaacugcaccgaccuggacguggcccucgggcgccccaagugcaccggcaacaucccguccgcccgggugagcauccugcacgagguccgccccgugacguccggcugcuuccccaucaugcacgaccggaccaagauccgccagcugcccaaccuccugcggggguacgagcacauccgccugagcacccacaacgugaucaacgccaagaacgcgccgggcgggcccuacaagaucggcaccuccgggagcugccccaacgucacgaacggcaacggcuucuucgccaccauggccugggccgugcccaagaacgacaagaaccggaccgcgaccaacucccucacgaucgaggugccguacaucugcaaggagggggaggaccagaucaccgucuggggcuuccacagcgacaacgagacccagauggccaagcuguacggggacuccaagccccagaaguucaccagcuccgccaacggcgugacgacccacuacgugagccagaucggcggguuccccaaccagaccgaggacggcgggcugccccaguccggccgcaucgucguggacuacauggugcagaaguccgggaagaccggcacgaucaccuaccagcggggcauccuccugccgcagaaggucuggugcgccuccgggcgcagcaaggugaucaagggcagccugccccucaucggggaggccgacugccugcacgagaaguacggcgggcugaacaaguccaagcccuacuacaccggcgagcacgcgaaggccaucggcaacugccccaucugggugaagaccccgcucaagcuggccaacgggacgaaguaccggccgcccgccaagcugcucaaggagcgcggcuucuucggggccaucgcgggcuuccuggagggcgggugggagggcaugaucgccggguggcacggcuacaccagccacggggcccacggcgucgccguggccgcggaccugaaguccacccaggaggccaucaacaagaucaccaagaaccucaacagccuguccgagcuggaggucaagaaccuccagcggcugagcggcgccauggacgagcugcacaacgagauccucgagcuggacgagaagguggacgaccugcgcgccgacacgaucuccagccagaucgagcucgccgugcugcuguccaacgaggggaucaucaacagcgaggacgagcaccuccuggcgcuggagcggaagcucaagaagaugcugggccccuccgccgucgagaucgggaacggcugcuucgagaccaagcacaagugcaaccagaccugccuggaccgcaucgccgccgggaccuucgacgcgggcgaguucagccuccccaccuucgacucccugaacaucacggccgccagccugaacgacgacggccucgacaaccacaccauccugcuguacuacuccaccgccgccagcucccuggcggugacccucaugaucgccaucuucguggucuacauggugagccgggacaacguguccugcagcaucugccuguga

SEQ ID NO: 90689 - RNA, 1755 nt, Artificial Sequence
  derived and/or modified CDS sequence (opt1) from hemagglutinin__InfluenzaB__AET10062
augaaggccaucaucgugcugcucauggucgugaccagcaacgccgaccgcaucugcaccggcaucacguccagcaacagcccccacguggucaagaccgcgacccagggggaggugaacgugaccggcgucaucccgcugacgaucacccccaccaaguccuacuucgccaaccugaaggggacccggacgcgcggcaagcucugccccgacugccugaacugcaccgaccuggacguggcccucgggcggcccaugugcgugggcaccaccccguccgccaaggccagcauccugcacgagguccgccccgugacguccggcugcuuccccaucaugcacgaccggaccaagauccgccagcugcccaaccuccugcggggguacgagaacauccgccugagcacccagaacgugaucgacgcggagaaggccccgggcgggcccuaccggcucggcaccuccgggagcugccccaacgccacguccaagaucggcuucuucgccaccauggcgugggccguccccaaggacaacuacaagaacgccaccaacccgcugaccguggaggugcccuacaucugcaaggagggcgaggaccagaucacggucuggggguuccacagcgacaacaagacccagaugaagaaccuguacggcgacuccaacccccagaaguucaccagcuccgccaacggggugaccacgcacuacgugagccagaucggcgacuuccccgaccagaccgaggacggcgggcucccgcaguccggccgcaucgucguggacuacaugaugcagaagcccgggaagaccggcaccaucguguaccagcgcgggguccugcugccccagaagguguggugcgccagcggccgguccaaggugaucaagggcagccucccccugaucggggaggcggacugccugcacgagaaguacggcgggcucaacaagagcaagccguacuacacgggcgagcacgccaaggccaucgggaacugccccaucugggucaagacgccccugaagcuggccaacggcaccaaguaccggcccccggccaagcuccugaaggagcgcggcuucuucggggcgaucgccggcuuccuggagggcgggugggaggggaugaucgccggcuggcacggcuacaccucccacggggcccacggcguggccgucgcggccgaccucaagagcacccaggaggccaucaacaagaucaccaagaaccugaacucccugagcgagcucgaggugaagaaccugcagcggcuguccggggccauggacgagcuccacaacgagauccuggagcuggacgagaagguggacgaccuccgcgccgacaccaucagcucccagaucgagcuggcgguccugcucagcaacgagggcaucaucaacuccgaggacgagcaccuccuggcccuggagcggaagcugaagaagaugcugggccccagcgccguggacaucgggaacggcugcuucgagaccaagcacaagugcaaccagacgugccucgaccgcaucgccgcggggaccuucaacgccggcgaguucucccugcccaccuucgacagccugaacaucaccgccgccucccucaacgacgacgggcuggacaaccacaccauccugcuguacuacagcacggccgcguccagccucgccgugacccugaugcuggccaucuucaucgucuacauggugucccgggacaacgugagcugcuccaucugccucuga

SEQ ID NO: 90690 - RNA, 1755 nt, Artificial Sequence
  derived and/or modified CDS sequence (opt1) from hemagglutinin__InfluenzaB__AET10064
augaaggccaucaucgugcugcucauggucgugaccagcaacgccgaccgcaucugcaccggcaucacguccagcaacagcccccacguggucaagaccgcgacccagggggaggugaacgugaccggcgucaucccgcugacgaccacccccaccaaguccuacuucgccaaccugaaggggacgcggacccgcggcaagcucugccccgacugccugaacugcaccgaccuggacguggcccucgggcggcccaugugcgugggcaccacgccguccgccaaggccagcauccugcacgagguccgccccgugaccuccggcugcuuccccaucaugcacgaccggaccaagauccgccagcugcccaaccuccugcggggguacgagaacauccgccugagcacccagaacgugaucgacgcggagaaggccccgggcgggcccuaccggcucggcacguccgggagcugccccaacgccaccuccaagaucggcuucuucgccaccauggcgugggccguccccaaggacaacuacaagaacgccaccaacccgcugacgguggaggugcccuacaucugcaccgagggcgaggaccagaucaccaucuggggguuccacagcgacaacaagacccagaugaagaaccuguacggcgacuccaacccccagaaguucacgagcuccgccaacggggucaccacccacuacgugagccagaucggcgacuuccccgaccagaccgaggacggcgggcucccgcaguccggccgcaucguggucgacuacaugaugcagaagcccgggaagacgggcaccaucguguaccagcgcggggugcugcugccccagaaggucuggugcgccagcggccgguccaaggugaucaagggcagccucccccugaucggggaggcggacugccugcacgagaaguacggcgggcucaacaagagcaagccguacuacaccggcgagcacgccaaggccaucgggaacugccccaucugggugaagacgccccugaagcuggccaacggcaccaaguaccggcccccggccaagcuccugaaggagcgcggcuucuucggggcgaucgccggcuuccuggagggcgggugggaggggaugaucgccggcuggcacggcuacaccucccacggggcccacggcgucgccguggcggccgaccucaagagcacccaggaggccaucaacaagaucaccaagaaccugaacucccugagcgagcucgaggucaagaaccugcagcggcuguccggggccauggacgagcuccacaacgagauccuggagcuggacgagaagguggacgaccuccgcgccgacacgaucagcucccagaucgagcuggcggugcugcucagcaacgagggcaucaucaacuccgaggacgagcaccuccuggcccuggagcggaagcugaagaagaugcugggccccagcgccgucgacaucgggaacggcugcuucgagaccaagcacaagugcaaccagaccugccucgaccgcaucgccgcggggaccuucaacgccggcgaguucucccugcccaccuucgacagccugaacaucacggccgccucccucaacgacgacgggcuggacaaccacaccauccugcuguacuacagcaccgccgcguccagccucgccgugacccugaugcuggccaucuucaucguguacauggucucccgggacaacgugagcugcuccaucugccucuga

SEQ ID NO: 90691 - RNA, 1755 nt, Artificial Sequence
  derived and/or modified CDS sequence (opt1) from hemagglutinin__InfluenzaB__AET10065
augaaggccaucaucgugcugcucauggucgugaccagcaacgccgaccgcaucugcaccggcaucacguccagcaacagcccccacguggucaagaccgcgacccagggggaggugaacgugaccggcgucaucccgcugacgaccacccccaccaaguccuacuucgccaaccugaaggggacgcggacccgcggcaagcucugccccgacugccugaacugcaccgaccuggacguggcccucgggcggcccaugugcgugggcaccacgccguccgccaaggccagcauccugcacgagguccgccccgugaccuccggcugcuuccccaucaugcacgaccggaccaagauccgccagcugcccaaccuccugcggggguacgagaacauccgccugagcacccagaacgugaucgacgcggagaaggccccgggcgggcccuaccggcucggcacguccgggagcugccccaacgccaccuccaagaucggcuucuucgccaccauggcgugggccguccccaaggacaacuacaagaacgccaccaacccgcugacgguggaggugcccuacaucugcaaggagggcgaggaccagaucaccgucuggggguuccacagcgacaacaagacccagaugaagaaccuguacggcgacuccaacccccagaaguucaccagcuccgccaacggggugacgacccacuacgugagccagaucggcgacuuccccgaccagaccgaggacggcgggcucccgcaguccggccgcaucgucguggacuacaugaugcagaagcccgggaagaccggcacgaucguguaccagcgcgggguccugcugccccagaagguguggugcgccagcggccgguccaaggugaucaagggcagccucccccugaucggggaggcggacugccugcacgagaaguacggcgggcucaacaagagcaagccguacuacaccggcgagcacgccaaggccaucgggaacugccccaucugggucaagacgccccugaagcuggccaacggcaccaaguaccggcccccggccaagcuccugaaggagcgcggcuucuucggggcgaucgccggcuuccuggagggcgggugggaggggaugaucgccggcuggcacggcuacaccucccacggggcccacggcguggccgucgcggccgaccucaagagcacccaggaggccaucaacaagaucaccaagaaccugaacucccugagcgagcucgaggugaagaaccugcagcggcuguccggggccauggacgagcuccacaacgagauccuggagcuggacgagaagguggacgaccuccgcgccgacaccaucagcucccagaucgagcuggcgguccugcucagcaacgagggcaucaucaacuccgaggacgagcaccuccuggcccuggagcggaagcugaagaagaugcugggccccagcgccguggacaucgggaacggcugcuucgagacgaagcacaagugcaaccagaccugccucgaccgcaucgccgcggggaccuucaacgccggcgaguucucccugcccaccuucgacagccugaacaucaccgccgccucccucaacgacgacgggcuggacaaccacacgauccugcuguacuacagcaccgccgcguccagccucgccgugacccugaugcuggccaucuucaucgucuacauggugucccgggacaacgugagcugcuccaucugccucuga

SEQ ID NO: 90692 - RNA, 1755 nt, Artificial Sequence; identical to SEQ ID NO: 90691
  derived and/or modified CDS sequence (opt1) from hemagglutinin__InfluenzaB__AET10066

SEQ ID NO: 90693 - RNA, 1755 nt, Artificial Sequence
  derived and/or modified CDS sequence (opt1) from hemagglutinin__InfluenzaB__AET10067
augaaggccaucaucgugcugcucauggucgugaccagcaacgccgaccgcaucugcaccggcaucacguccagcaacagcccccacguggucaagaccgcgacccagggggaggugaacgugaccggcgucaucccgcugacggccacccccaccaaguccuacuucgccaaccugaaggggacccggacgcgcggcaagcucugccccgacugccugaacugcaccgaccuggacguggcccucgggcggcccaugugcgugggcaccaccccguccgccaaggcgagcauccugcacgagguccgccccgugacguccggcugcuuccccaucaugcacgaccggaccaagauccgccagcugcccaaccuccugcggggguacgagaacauccgccugagcacccagaacgugaucgacgccgagaaggccccgggcgggcccuaccggcucggcaccuccgggagcugccccaacgccacguccaagaucggcuucuucgcgaccauggccugggccguccccaaggacaacuacaagaacgccaccaacccgcugaccguggaggugcccuacaucugcaaggagggcgaggaccagaucacggucuggggguuccacagcgacaacaagacccagaugaagaaccuguacggcgacuccaacccccagaaguucaccagcuccgccaacggggugaccacgcacuacgugagccagaucggcgacuuccccgaccagaccgaggacggcgggcucccgcaguccggccgcaucgucguggacuacaugaugcagaagcccgggaagaccggcaccaucguguaccagcgcgggguccugcugccccagaagguguggugcgcgagcggccgguccaaggugaucaagggcagccucccccugaucggggaggccgacugccugcacgagaaguacggcgggcucaacaagagcaagccguacuacacgggcgagcacgccaaggccaucgggaacugccccaucugggucaagacgccccugaagcuggccaacggcaccaaguaccggcccccggcgaagcuccugaaggagcgcggcuucuucggggccaucgccggcuuccuggagggcgggugggaggggaugaucgccggcuggcacggcuacaccucccacggggcccacggcguggcggucgccgccgaccucaagagcacccaggaggccaucaacaagaucaccaagaaccugaacucccugagcgagcucgaggugaagaaccugcagcggcuguccggggccauggacgagcuccacaacgagauccuggagcuggacgagaagguggacgaccuccgcgcggacaccaucagcucccagaucgagcuggccguccugcucagcaacgagggcaucaucaacuccgaggacgagcaccuccuggcccuggagcggaagcugaagaagaugcugggccccagcgccguggacaucgggaacggcugcuucgagaccaagcacaagugcaaccagacgugccucgaccgcaucgcggccgggaccuucaacgccggcgaguucucccugcccaccuucgacagccugaacaucaccgccgccucccucaacgacgacgggcuggacaaccacaccauccugcuguacuacagcacggcggccuccagccucgccgugacccugaugcuggccaucuucaucgucuacauggugucccgggacaacgugagcugcuccaucugccucuga

SEQ ID NO: 90694 - RNA, 1755 nt, Artificial Sequence
  derived and/or modified CDS sequence (opt1) from hemagglutinin__InfluenzaB__AET10068
augaaggccaucaucgugcugcucauggucgugaccagcaacgccgaccgcaucugcaccggcaucacguccagcaacagcccccacguggucaagaccgcgacccagggggaggugaacgugaccggcgucaucccgcugacgaccgcccccaccaaguccuacuucgccaaccugaaggggacccggacgcgcggcaagcucugccccgacugccugaacugcaccgaccuggacguggcccucgggcggcccaugugcgccggcaccaccccguccgcgaaggccagcauccugcacgaggugcgccccgucacguccggcugcuuccccaucaugcacgaccggaccaagauccgccagcugcccaaccuccugcggggguacgagaacauccgccugagcacccagaacgugaucgacgccgagaaggccccgggcgggcccuaccggcucggcaccuccgggagcugccccaacgcgacguccaagaucggcuucuucgccaccauggccugggccgugcccaaggacaacuacaagaacgccaccaacccgcugaccgucgaggugcccuacaucugcaaggagggcgaggaccagaucacgguguggggguuccacagcgacaacaagacccagaugaagaaccuguacggcgacuccaacccccagaaguucaccagcuccgcgaacggggucaccacgcacuacgugagccagaucggcgacuuccccgaccagaccgaggacggcgggcucccgcaguccggccgcaucguggucgacuacaugaugcagaagcccgggaagaccggcaccaucguguaccagcgcggggugcugcugccccagaaggucuggugcgccagcggccgguccaaggugaucaagggcagccucccccugaucggggaggccgacugccugcacgagaaguacggcgggcucaacaagagcaagccguacuacacgggcgagcacgccaaggccaucgggaacugccccaucugggugaagacgccccugaagcuggcgaacggcaccaaguaccggcccccggccaagcuccugaaggagcgcggcuucuucggggccaucgccggcuuccuggagggcgggugggaggggaugaucgccggcuggcacggcuacaccucccacggggcgcacggcgucgccguggccgccgaccucaagagcacccaggaggccaucaacaagaucaccaagaaccugaacucccugagcgagcucgaggucaagaaccugcagcggcuguccggggcgauggacgagcuccacaacgagauccuggagcuggacgagaagguggacgaccuccgcgccgacaccaucagcucccagaucgagcuggccgugcugcucagcaacgagggcaucaucaacuccgaggacgagcaccuccuggcccuggagcggaagcugaagaagaugcugggccccagcgcggucgacaucgggaacggcugcuucgagaccaagcacaagugcaaccagacgugccucgaccgcaucgccgccgggaccuucaacgccggcgaguucucccugcccaccuucgacagccugaacaucaccgccgcgucccucaacgacgacgggcuggacaaccacaccauccugcuguacuacagcacggccgccuccagccucgccgugacccugaugcuggccaucuucaucguguacauggucucccgggacaacgugagcugcuccaucugccucuga

SEQ ID NO: 90695 - RNA, 1755 nt, Artificial Sequence; identical to SEQ ID NO: 90691
  derived and/or modified CDS sequence (opt1) from hemagglutinin__InfluenzaB__AET10069

SEQ ID NO: 90696 - RNA, 1758 nt, Artificial Sequence
  derived and/or modified CDS sequence (opt1) from hemagglutinin__InfluenzaB__AET10070
augaaggccaucaucgugcugcucauggucgugaccagcaacgccgaccgcaucugcaccggcaucacguccagcaacagcccccacguggucaagaccgcgacccagggggaggugaaggugaccggcgucaucccgcugacgaccacccccaccaagagccacuucgccaaccugaaggggacggagacccggggcaagcucugccccaagugccccaacugcaccgaccuggacguggcccuggggcgcccgaagugcaccggcaagauccccuccgcccgggugagcauccuccacgagguccgccccgugacguccggcugcuuccccaucaugcacgaccggaccaagauccgccagcugccgaaccugcuccggggguacgagcacauccgccugagcacccacaacgugaucaacgccgagaacgcgcccggcgggcccuacaagaucggcaccuccgggagcugccccaacgucacgaacggcaacggcuucuucgccaccauggccugggccgugccgaagaacgacaagaacaagaccgcgaccaacccccugacgaucgaggugcccuacaucugcaccgagggggaggaccagaucaccgucuggggcuuccacuccgacaacgagacccagauggccaagcucuacggggacagcaagccccagaaguucacguccagcgccaacggcgugaccacccacuacgugucccagaucggcggguucccgaaccagaccgaggacggcgggcugccccagagcggccggaucgucguggacuacauggugcagaaguccgggaagacgggcaccaucaccuaccagcgcggcauccugcucccccagaaggucuggugcgccagcgggcgguccaaggugaucaagggcagccugccccugaucggggaggccgacugccuccacgagaaguacggcgggcugaacaagagcaagccguacuacaccggcgagcacgcgaaggccaucggcaacugccccaucugggugaagacgccccugaagcucgccaacgggaccaaguaccggcccccggccaagcugcugaaggagcgcggcuucuucggggccaucgcgggcuuccucgagggcgggugggagggcaugaucgccggguggcacggcuacaccucccacggggcccacggcgucgccguggccgcggaccugaaguccacccaggaggccaucaacaagaucacgaagaaccugaacucccucagcgagcuggaggucaagaaccugcagcgccucuccggcgccauggacgagcugcacaacgagauccuggagcucgacgagaagguggacgaccugcgggccgacaccaucagcucccagaucgagcuggccgugcuccugagcaacgaggggaucaucaacuccgaggacgagcaccuccuggcgcuggagcgcaagcugaagaagaugcucggccccagcgccgucgagaucgggaacggcugcuucgagaccaagcacaagugcaaccagaccugccuggaccggaucgccgccgggaccuucgacgcgggcgaguucucccugcccacguucgacagccucaacaucaccgccgccucccugaacgacgacggccuggacaaccacaccauccuccuguacuacagcaccgccgccuccagccuggcggugacgcugaugaucgccaucuucguggucuacauggugucccgcgacaacgugagcugcuccaucugccucuga

SEQ ID NO: 90697 - RNA, 1758 nt, Artificial Sequence; identical to SEQ ID NO: 90632
  derived and/or modified CDS sequence (opt1) from hemagglutinin__InfluenzaB__AET10071

SEQ ID NO: 90698 - RNA, 1758 nt, Artificial Sequence; identical to SEQ ID NO: 90632
  derived and/or modified CDS sequence (opt1) from hemagglutinin__InfluenzaB__AET10072

SEQ ID NO: 90699 - RNA, 1755 nt, Artificial Sequence
  derived and/or modified CDS sequence (opt1) from hemagglutinin__InfluenzaB__AET10073
augaaggccaucaucgugcugcucauggucgugaccagcaacgccgaccgcaucugcaccggcaucacguccagcaacagcccccacguggucaagaccgcgacccagggggaggugaacgugaccggcgucaucccgcugacgaccacccccaccaaguccuacuucgccaaccugaaggggacgcggacccgcggcaagcucugccccgacugccugaacugcaccgaccuggacguggcccucgggcggcccaugugcgugggcaccacgccguccgccaaggccagcauccugcacgagguccgccccgugaccuccggcugcuuccccaucaugcacgaccggaccaagauccgccagcugcccaaccuccugcgggggugcgagaacauccgccugagcacccagaacgugaucgacgcggagaaggccccgggcgggcccuaccggcucggcacguccgggagcugccccaacgccaccuccaagaucggcuucuucgccaccauggcgugggccguccccaaggacaacuacaagaacgccaccaacccgcugacgguggaggugcccuacaucugcaaggagggcgaggaccagaucaccgucuggggguuccacagcgacaacaagacccagaugaagaaccuguacggcgacuccaacccccagaaguucaccagcuccgccaacggggugacgacccacuacgugagccagaucggcgacuuccccgaccagaccgaggacggcgggcucccgcaguccggccgcaucgucguggacuacaugaugcagaagcccgggaagaccggcacgaucguguaccagcgcgggguccugcugccccagaagguguggugcgccagcggccgguccaaggugaucaagggcagccucccccugaucggggaggcggacugccugcacgagaaguacggcgggcucaacaagagcaagccguacuacaccggcgagcacgccaaggccaucgggaacugccccaucugggucaagacgccccugaagcuggccaacggcaccaaguaccggcccccggccaagcuccugaaggagcgcggcuucuucggggcgaucgccggcuuccuggagggcgggugggaggggaugaucgccggcuggcacggcuacaccucccacggggcccacggcguggccgucgcggccgaccucaagagcacccaggaggccaucaacaagaucaccaagaaccugaacucccugagcgagcucgaggugaagaaccugcagcggcuguccggggccauggacgagcuccacaacgagauccuggagcuggacgagaagguggacgaccuccgcgccgacaccaucagcucccagaucgagcuggcgguccugcucagcaacgagggcaucaucaacuccgaggacgagcaccuccuggcccuggagcggaagcugaagaagaugcugggccccagcgccguggacaucgggaacggcugcuucgagacgaagcacaagugcaaccagaccugccucgaccgcaucgccgcggggaccuucaacgccggcgaguucucccugcccaccuucgacagccugaacaucaccgccgccucccucaacgacgacgggcuggacaaccacacgauccugcuguacuacagcaccgccgcguccagccucgccgugacccugaugcuggccaucuucaucgucuacauggugucccgggacaacgugagcugcuccaucugccucuga

SEQ ID NO: 90700 - RNA, 1758 nt, Artificial Sequence
  derived and/or modified CDS sequence (opt1) from hemagglutinin__InfluenzaB__AET10074
augaaggccaucaucgugcugcucauggucgugaccagcaacgccgaccgcaucugcaccggcaucacguccagcaacagcccccacguggucaagaccgcgacccagggggaggugaacgugaccggcgucaucccgcugacgaccacccccacccggagccacuucgccaaccugaaggggacggagacccgcggcaagcucugccccaagugccccaacugcaccgaccuggacguggcccuggggcggccgaagugcaccggcaagauccccuccgcccgcgugagcauccuccacgagguccggcccgugacguccggcugcuuccccaucaugcacgaccgcaccaagauccggcagcugccgaaccugcuccgcggguacgagcacauccggcugagcacccacaacgugaucaacgccgagaacgcgcccggcgggcccuacaagaucggcaccuccgggagcugccccaacgucacgaacggcaacggcuucuucgccaccauggccugggccgugccgaagaacgacaagaacaagaccgcgaccaacccccugacgaucgaggugcccuacaucugcaccgagggggaggaccagaucaccgucuggggcuuccacuccgacaacgagacccagauggccaagcucuacggggacagcaagccccagaaguucacguccagcgccaacggcgugaccacccacuacgugucccagaucggcggguucccgaaccagaccgaggacggcgggcugccccagagcggccgcaucgucguggacuacauggugcagaaguccgggcggacgggcaccaucaccuaccagcgcggcauccugcucccccagaaggucuggugcgccagcgggcgguccaaggugaucaagggcagccugccccugaucggggaggccgacugccuccacgagaaguacggcgggcugaacaagagcaagccguacuacaccggcgagcacgcgaaggccaucggcaacugccccaucugggugaagacgccccugaagcucgccaacgggaccaaguaccggcccccggccaagcugcugaaggagcgcggcuucuucggggccaucgcgggcuuccucgagggcgggugggagggcaugaucgccggguggcacggcuacaccucccacggggcccacggcgucgccguggccgcggaccugaaguccacccaggaggccaucaacaagaucacgaagaaccugaacucccucagcgagcuggaggucaagaaccugcagcgccucuccggcgccauggacgagcugcacaacgagauccuggagcucgacgagaagguggacgaccugcgggccgacaccaucagcucccagaucgagcuggccgugcuccugagcaacgaggggaucaucaacuccgaggacgagcaccuccuggcgcuggagcgcaagcugaagaagaugcucggccccagcgccgucgagaucgggaacggcugcuucgagaccaagcacaagugcaaccagaccugccuggaccggaucgccgccgggaccuucgacgcgggcgaguucucccugcccacguucgacagccucaacaucaccgccgccucccuggacgacgacggccuggacaaccacaccauccuccuguacuacagcaccgccgccuccagccuggcggugacgcugaugaucgccaucuucguggucuacauggugucccgcgacaacgugagcugcuccaucugccucuga

SEQ ID NO: 90701 - RNA, 1758 nt, Artificial Sequence; identical to SEQ ID NO: 90632
  derived and/or modified CDS sequence (opt1) from hemagglutinin__InfluenzaB__AET10076

SEQ ID NO: 90702 - RNA, 1758 nt, Artificial Sequence; identical to SEQ ID NO: 90632
  derived and/or modified CDS sequence (opt1) from hemagglutinin__InfluenzaB__AET10077

SEQ ID NO: 90703 - RNA, 1758 nt, Artificial Sequence
  derived and/or modified CDS sequence (opt1) from hemagglutinin__InfluenzaB__AET10078
augaaggccaucaucgugcugcucauggucgugaccagcaacgccgaccgcaucugcaccggcaucacguccagcaacagcccccacguggucaagaccgcgacccagggggaggugaacgugaccggcgucaucccgcugacgaccacccccaccaagagccacuucgccaaccugaaggggacggagacccggggcaagcucugccccaagugccugaacugcaccgaccuggacguggcccucgggcgccccaagugcaccggcaagaucccguccgcccgggugagcguccugcacgaggugcgccccgugacguccggcugcuuccccaucaugcacgaccggaccaagauccgccagcugcccaaccuccugcggggguacgagcacauccgccugagcacccacaacgucaucaacgccgagaacgcgccgggcgggcccuacaagaucggcaccuccgggagcugccccaacgugacgaacggcaacggcuucuucgccaccauggccugggccgugcccaagaacgacaagaacaagaccgcgaccaacccgcucacgaucgagguccccuacaucugcaccgagggggaggaccagaucaccguguggggcuuccacuccgacaacgagacccagauggccaagcuguacggggacagcaagccccagaaguucacguccagcgccaacggcgugaccacccacuacgucucccagaucggcggguuccccaaccagaccgaggacggcgggcugccgcagagcggccggaucgugguggacuacaugguccagaaguccgggaagacgggcaccaucaccuaccagcgcggcauccuccugccccagaagguguggugcgccagcgggcgguccaaggugaucaagggcagccugccccucaucggggaggccgacugccugcacgagaaguacggcgggcugaacaagagcaagcccuacuacaccggcgagcacgcgaaggccaucggcaacugcccgaucugggucaagacgccccucaagcuggccaacgggaccaaguaccgcccgcccgccaagcugcucaaggagcggggcuucuucggggccaucgcgggcuuccuggagggcgggugggagggcaugaucgccggguggcacggcuacaccucccacggggcccacggcguggccgucgccgcggaccugaaguccacccaggaggccaucaacaagaucacgaagaaccucaacucccugagcgagcuggaggugaagaaccuccagcgccuguccggcgccauggacgagcugcacaacgagauccucgagcuggacgagaagguggacgaccugcgggccgacaccaucagcucccagaucgagcucgccguccugcugagcaacgaggggaucaucaacuccgaggacgagcaccuccuggcgcuggagcgcaagcucaagaagaugcugggccccagcgccguggagaucgggaacggcugcuucgagaccaagcacaagugcaaccagaccugccuggaccggaucgccgccgggaccuucaacgcgggcgaguucucccuccccacguucgacagccugaacaucaccgccgccucccugaacgaggacggccucgacaaccacgccauccugcuguacuacagcaccgccgcguccagccuggccgugacccucaugaucgccaucuucgucguguacauggugucccgcgacaacgucagcugcuccaucugccuguga

SEQ ID NO: 90704 - RNA, 1758 nt, Artificial Sequence
  derived and/or modified CDS sequence (opt1) from hemagglutinin__InfluenzaB__AET10079
augaaggccaucaucgugcugcucauggucgugaccagcaacgccgacggcaucugcaccgggaucacguccagcaacagcccccacguggucaagaccgcgacccagggcgaggugaacgugaccggggucaucccgcugacgaccacccccaccaagagccacuucgccaaccugaagggcacggagacccgcgggaagcucugccccaagugccccaacugcaccgaccuggacguggcccugggccggccgaagugcaccggcaagauccccuccgcccgcgugagcauccuccacgagguccggcccgugacguccgggugcuuccccaucaugcacgaccgcaccaagauccggcagcugccgaaccugcuccgcggcuacgagcacauccggcugagcacccacaacgugaucaacgccgagaacgcgcccgggggccccuacaagaucgggaccuccggcagcugccccaacgucacgaacggcaacggguucuucaccaccauggccugggccgugccgaagaacgacaagaacaagaccgccacgaacccccugaccaucgaggugcccuacaucugcaccgagggcgaggaccagaucaccgucuggggguuccacuccgacaacgagacgcagauggcgaagcucuacggcgacagcaagccccagaaguucaccuccagcgccaacggcgugaccacccacuacgugucccagaucgggggcuucccgaaccagacggaggacgggggccugccccagagcgggcgcaucgucguggacuacauggugcagaaguccggcaagaccggcaccaucaccuaccagcgggggauccugcucccccagaaggucuggugcgccagcggccgcuccaaggugaucaaggggagccugccccugaucggcgaggccgacugccuccacgagaaguacgggggccugaacaagagcaagccguacuacacgggcgagcacgccaaggcgaucgggaacugccccaucugggugaagacgccccugaagcucgccaacggcaccaaguaccggcccccggccaagcugcugaaggagcgcggguucuucggcgccaucgccggguuccucgagggcggcugggaggggaugaucgcgggcuggcacggguacaccucccacggcgcccacggcgucgccguggccgccgaccugaaguccacccaggaggcgaucaacaagaucaccaagaaccugaacucccucagcgagcuggaggucgagaaccugcagcggcucuccggggccauggacgagcugcacaacgagauccuggagcucgacgagaagguggacgaccugcgcgccgacaccaucagcucccagaucgagcuggccgugcuccugagcaacgagggcaucaucaacuccgaggacgagcaccuccuggcccuggagcggaagcugaagaagaugcucgggcccagcgcggucgagaucggcaacgggugcuucgagaccaagcacaagugcaaccagaccugccuggaccgcaucgccgccggcacguucgacgccggcgaguucucccugcccaccuucgacagccucaacaucaccgcggccucccugaacgacgacgggcuggacaaccacaccauccuccuguacuacagcacggccgccuccagccuggccgugacccugaugaucgcgaucuucguggucuacauggugucccgggacaacgugagcugcuccaucugccucuga

SEQ ID NO: 90705 - RNA, 1758 nt, Artificial Sequence; identical to SEQ ID NO: 90632
  derived and/or modified CDS sequence (opt1) from hemagglutinin__InfluenzaB__AET10080

SEQ ID NO: 90706 - RNA, 1758 nt, Artificial Sequence; identical to SEQ ID NO: 90632
  derived and/or modified CDS sequence (opt1) from hemagglutinin__InfluenzaB__AET10081

SEQ ID NO: 90707 - RNA, 1758 nt, Artificial Sequence
  derived and/or modified CDS sequence (opt1) from hemagglutinin__InfluenzaB__AET10082
augaaggccaucaucgugcugcucauggucgugaccagcaacgccgaccgcaucugcaccggcaucacguccagcaacagcccccacaucgugaagaccgcgacccagggggaggucaacgugaccggcgugaucccgcugacgaccacccccaccaagagccacuucgccaaccugaaggggacggagacccggggcaagcucugccccaagugccugaacugcaccgaccuggacgucgcccucgggcgccccaagugcaccggcaagaucccguccgcccgggugagcauccugcacgaggugcgccccgucacguccggcugcuuccccaucaugcacgaccggaccaagauccgccagcugcccaaccuccugcggggguacgagcacauccgccugagcacccacaacgugaucaacgccgagaacgcgccgggcgggcccuacaagaucggcaccuccgggagcugccccaacaucacgaacggcaacggcuucuucgccaccauggccugggccgugcccaagaacgacaagaacaagaccgcgaccaacccgcucacgaucgagguccccuacaucugcaccgagggggaggaccagaucaccguguggggcuuccacuccgacaacgagacccagauggccaagcuguacggggacagcaagccccagaaguucacguccagcgccaacggcgugaccacccacuacgucucccagaucggcggguuccccaaccagaccgaggacggcgggcugccgcagagcggccggaucgugguggacuacaugguccagaaguccgggaagacgggcaccaucaccuaccagcgcggcauccuccugccccagaagguguggugcgccagcgggcgguccaaggugaucaagggcagccugccccucaucggggaggccgacugccugcacgagaaguacggcgggcugaacaagagcaagcccuacuacaccggcgagcacgcgaaggccaucggcaacugcccgaucugggucaagacgccccucaagcuggccaacgggaccaaguaccgcccgcccgccaagcugcucaaggagcggggcuucuucggggccaucgcgggcuuccuggagggcgggugggagggcaugaucgccggguggcacggcuacaccucccacggggcccacggcguggccguggccgcggaccugaaguccacccaggaggccaucaacaagaucacgaagaaccucaacucccugagcgagcuggaggucaagaaccuccagcgccuguccggcgccauggacgagcugcacaacgagauccucgagcuggacgagaagguggacgaccugcgggccgacaccaucagcucccagaucgagcucgccguccugcugagcaacgaggggaucaucaacuccgaggacgagcaccuccuggcgcuggagcgcaagcucaagaagaugcugggccccagcgccguggagaucgggaacggcugcuucgagaccaagcacaagugcaaccagaccugccuggaccggaucgccgccgggaccuucgacgcgggcgaguucucccuccccacguucgacagccugaacaucaccgccgccucccugaacgacgacggccucgacaaccacaccauccugcuguacuacagcaccgccgccuccagccuggcggugacgcucaugaucgccaucuucgucguguacauggugucccgcgacaacgucagcugcuccaucugccuguga

SEQ ID NO: 90708 - RNA, 1758 nt, Artificial Sequence
  derived and/or modified CDS sequence (opt1) from hemagglutinin__InfluenzaB__AET10083
augaaggccaucaucgugcugcucauggucgugaccagcaacgccgaccgcaucugcaccggcaucacguccagcaacagcccccacguggucaagaccgcgacccagggggaggugaacgugaccggcgucaucccgcugacgaccacccccaccaagagccacuucgccaaccugaaggggacggagacccggggcaagcucugccccaagugccugaacugcaccgaccuggacguggcccucgggcgccccaagugcaccggcaaggugccguccgcccgggucagcauccugcacgaggugcgccccgugacguccggcugcuuccccaucaugcacgaccggaccaagauccgccagcugcccaaccuccugcggggguacgagcacauccgccugagcacccacaacgucaucaacgccgagaacgcgccgggcgggcccuacaagaucggcaccuccgggagcugccccaacaucacgaacggcaacggcuucuucgccaccauggccugggccgugcccaagaacgacaagaacaagaccgcgaccaacccgcucacgaucgaggugcccuacaucugcaccgagggggaggaccagaucaccgucuggggcuuccacuccgacaacgagacccagauggccaagcuguacggggacagcaagccccagaaguucacguccagcgccaacggcgugaccacccacuacgugucccagaucggcggguuccccaaccagaccgaggacggcgggcugccgcagagcggccggaucgucguggacuacauggugcagaaguccgggaagacgggcaccaucaccuaccagcgcggcauccuccugccccagaaggucuggugcgccagcgggcgguccaaggugaucaagggcagccugccccucaucggggaggccgacugccugcacgagaaguacggcgggcugaacaagagcaagcccuacuacaccggcgagcacgcgaaggccaucggcaacugcccgaucugggugaagacgccccucaagcuggccaacgggaccaaguaccgcccgcccgccaagcugcucaaggagcggggcuucuucggggccaucgcgggcuuccuggagggcgggugggagggcaugaucgccggguggcacggcuacaccucccacggggcccacggcgucgccguggccgcggaccugaaguccacccaggaggccaucaacaagaucacgaagaaccucaacucccugagcgagcuggaggucaagaaccuccagcgccuguccggcgccauggacgagcugcacaacgagauccucgagcuggacgagaagguggacgaccugcgggccgacaccaucagcucccagaucgagcucgccgugcugcugagcaacgaggggaucaucaacuccgaggacgagcaccuccuggcgcuggagcgcaagcucaagaagaugcugggccccagcgccgucgagaucgggaacggcugcuucgagaccaagcacaagugcaaccagaccugccuggaccggaucgccgccgggaccuucgacgcgggcgaguucucccuccccacguucgacagccugaacaucaccgccgccucccugaacgacgacggccucgacaaccacaccauccugcuguacuacagcaccgccgccuccagccuggcggugacgcucaugaucgccaucuucguggucuacauggugucccgcgacaacgugagcugcuccaucugccuguga

SEQ ID NO: 90709 - RNA, 1758 nt, Artificial Sequence; identical to SEQ ID NO: 90669
  derived and/or modified CDS sequence (opt1) from hemagglutinin__InfluenzaB__AET10084

SEQ ID NO: 90710 - RNA, 1758 nt, Artificial Sequence; identical to SEQ ID NO: 90632
  derived and/or modified CDS sequence (opt1) from hemagglutinin__InfluenzaB__AET10085

SEQ ID NO: 90711 - RNA, 1758 nt, Artificial Sequence; identical to SEQ ID NO: 90672
  derived and/or modified CDS sequence (opt1) from hemagglutinin__InfluenzaB__AET43124

SEQ ID NO: 90712 - RNA, 1758 nt, Artificial Sequence; identical to SEQ ID NO: 90672
  derived and/or modified CDS sequence (opt1) from hemagglutinin__InfluenzaB__AET43135

SEQ ID NO: 90713 - RNA, 1758 nt, Artificial Sequence; identical to SEQ ID NO: 90672
  derived and/or modified CDS sequence (opt1) from hemagglutinin__InfluenzaB__AET43146

SEQ ID NO: 90714 - RNA, 1758 nt, Artificial Sequence; identical to SEQ ID NO: 90672
  derived and/or modified CDS sequence (opt1) from hemagglutinin__InfluenzaB__AET43157

SEQ ID NO: 90715 - RNA, 1758 nt, Artificial Sequence
  derived and/or modified CDS sequence (opt1) from hemagglutinin__InfluenzaB__AET43168
augaaggccaucaucgugcugcucauggucgugaccagcaacgccgaccgcaucugcaccggcaucacguccagcaacagcccccacguggucaagaccgcgacccagggggaggugaacgugaccggcgucaucccgcugacgaccacccccaccaagagccacuucgccaaccugaaggggacggagacccggggcaagcucugccccaagugccugaacugcaccgaccuggacgugacccucgggcgccccaagugcacgggcaagaucccguccgcccgggugagcauccugcacgagguccgccccgugaccuccggcugcuuccccaucaugcacgaccggaccaagauccgccagcugcccaaccuccugcggggguacgagcacauccgccugagcacccacaacgugaucaacgccgagaacgccccgggcgggcccuacaagaucggcacguccgggagcugccccaacgucaccaacggcaacggcuucuucgcgaccauggccugggccgugcccaagaacgacaagaacaagaccgccacgaacccgcucaccaucgaggugcccuacaucugcaccgagggggaggaccagaucaccgucuggggcuuccacuccgacaacgagacgcagauggcgaagcuguacggggacagcaagccccagaaguucaccuccagcgccaacggcgugaccacccacuacgugucccagaucggcggguuccccaaccagacggaggacggcgggcugccgcagagcggccggaucgucguggacuacauggugcagaaguccgggaagaccggcaccaucaccuaccagcgcggcauccuccugccccagaaggucuggugcgccagcgggcgguccaaggugaucaagggcagccugccccucaucggggaggccgacugccugcacgagaaguacggcgggcugaacaagagcaagcccuacuacacgggcgagcacgccaaggcgaucggcaacugcccgaucugggugaagacgccccucaagcuggccaacgggaccaaguaccgcccgcccgccaagcugcucaaggagcggggcuucuucggggccaucgccggcuuccuggagggcgggugggagggcaugaucgcgggguggcacggcuacaccucccacggggcccacggcgucgccguggccgccgaccugaaguccacccaggaggcgaucaacaagaucaccaagaaccucaacucccugagcgagcuggaggucaagaaccuccagcgccuguccggcgccauggacgagcugcacaacgagauccucgagcuggacgagaagguggacgaccugcgggccgacaccaucagcucccagaucgagcucgccgugcugcugagcaacgaggggaucaucaacuccgaggacgagcaccuccuggcccuggagcgcaagcucaagaagaugcugggccccagcgcggucgagaucgggaacggcugcuucgagaccaagcacaagugcaaccagaccugccuggaccggaucgccgccgggacguucgacgccggcgaguucucccuccccaccuucgacagccugaacaucaccgcggccucccugaacgacgacggccucgacaaccacaccauccugcuguacuacagcacggccgccuccagccuggccgugacccucaugaucgcgaucuucguggucuacauggugucccgcgacaacgugagcugcuccaucugccuguga

SEQ ID NO: 90716 - RNA, 1758 nt, Artificial Sequence; identical to SEQ ID NO: 90672
  derived and/or modified CDS sequence (opt1) from hemagglutinin__InfluenzaB__AET43179

SEQ ID NO: 90717 - RNA, 1758 nt, Artificial Sequence; identical to SEQ ID NO: 90672
  derived and/or modified CDS sequence (opt1) from hemagglutinin__InfluenzaB__AET43190

SEQ ID NO: 90718 - RNA, 1758 nt, Artificial Sequence
  derived and/or modified CDS sequence (opt1) from hemagglutinin__InfluenzaB__AET43201
augaaggccaucaucgugcugcucauggucgugaccagcaacgccgaccgcaucugcaccggcaucacguccagcaacagcccccacguggucaagaccgcgacccagggggaggugaacgugaccggcgucaucccgcugacgaccacccccaccaagagccacuucgccaaccugaaggggacggagacccggggcaagcucugccccaagugccugaacugcaccgaccuggacguggcccucgggcgccccaagugcaccggcaagaucccguccgcccgggugagcauccugcacgagguccgccccgugacguccggcugcuuccccaucaugcacgaccggaccaagauccgccagcugcccaaccuccugcggggguacgagcacauccgccugagcacccacaacgugaucaacgccggcaacgcgcccgggggccccuacaagaucgggaccuccggcagcugccccaacgucacgaacggcaacggguucuucgccaccauggccugggccgugcccaagaacgacaagaacaagaccgcgaccaacccgcucacgaucgaggugcccuacaucugcaccgagggcgaggaccagaucaccgucuggggguuccacuccgacaacgagacccagauggccaagcuguacggcgacagcaagccccagaaguucacguccagcgccaacggcgugaccacccacuacgugucccagaucgggggcuuccccaaccagaccgaggacgggggccugccgcagagcgggcggaucgucguggacuacauggugcagaaguccggcaagacgggcaccaucaccuaccagcgcgggauccuccugccccagaaggucuggugcgccagcggccgguccaaggugaucaaggggagccugccccucaucggcgaggccgacugccugcacgagaaguacgggggccugaacaagagcaagcccuacuacaccggcgagcacgcgaaggccaucgggaacugcccgaucugggugaagacgccccucaagcuggccaacggcaccaaguaccgcccgcccgccaagcugcucaaggagcggggguucuucggcgccaucgcgggguuccuggagggcggcugggaggggaugaucgccggcuggcacggguacaccucccacggcgcccacggcgucgccguggccgcggaccugaaguccacccaggaggccaucaacaagaucacgaagaaccucaacucccugagcgagcuggaggucaagaaccuccagcgccuguccggggccauggacgagcugcacaacgagauccucgagcuggacgagaagguggacgaccugcgggccgacaccaucagcucccagaucgagcucgccgugcugcugagcaacgagggcaucaucaacuccgaggacgagcaccuccuggcgcuggagcgcaagcucaagaagaugcuggggccgagcgccgucgagaucggcaacgggugcuucgagaccaagcacaagugcaaccagaccugccuggaccggaucgccgccggcaccuucgacgcgggcgaguucucccuccccacguucgacagccugaacaucaccgccgccucccugaacgacgacgggcucgacaaccacaccauccugcuguacuacagcaccgccgccuccagccuggcggugacgcucaugaucgccaucuucguggucuacauggugucccgcgacaacgugagcugcuccaucugccuguga

SEQ ID NO: 90719 - RNA, 1758 nt, Artificial Sequence; identical to SEQ ID NO: 90672
  derived and/or modified CDS sequence (opt1) from hemagglutinin__InfluenzaB__AET43212

SEQ ID NO: 90720 - RNA, 1758 nt, Artificial Sequence; identical to SEQ ID NO: 90672
  derived and/or modified CDS sequence (opt1) from hemagglutinin__InfluenzaB__AET43223

SEQ ID NO: 90721 - RNA, 1758 nt, Artificial Sequence; identical to SEQ ID NO: 90718
  derived and/or modified CDS sequence (opt1) from hemagglutinin__InfluenzaB__AET50943

SEQ ID NO: 90722 - RNA, 1758 nt, Artificial Sequence; identical to SEQ ID NO: 90672
  derived and/or modified CDS sequence (opt1) from hemagglutinin__InfluenzaB__AET50954

SEQ ID NO: 90723 - RNA, 1758 nt, Artificial Sequence; identical to SEQ ID NO: 90672
  derived and/or modified CDS sequence (opt1) from hemagglutinin__InfluenzaB__AET50965

SEQ ID NO: 90724 - RNA, 1758 nt, Artificial Sequence; identical to SEQ ID NO: 90672
  derived and/or modified CDS sequence (opt1) from hemagglutinin__InfluenzaB__AET50976

SEQ ID NO: 90725 - RNA, 1758 nt, Artificial Sequence; identical to SEQ ID NO: 90672
  derived and/or modified CDS sequence (opt1) from hemagglutinin__InfluenzaB__AET74255

SEQ ID NO: 90726 - RNA, 1758 nt, Artificial Sequence; identical to SEQ ID NO: 90718
  derived and/or modified CDS sequence (opt1) from hemagglutinin__InfluenzaB__AET74277

SEQ ID NO: 90727 - RNA, 1758 nt, Artificial Sequence; identical to SEQ ID NO: 90672
  derived and/or modified CDS sequence (opt1) from hemagglutinin__InfluenzaB__AET74288

SEQ ID NO: 90728 - RNA, 1758 nt, Artificial Sequence
  derived and/or modified CDS sequence (opt1) from hemagglutinin__InfluenzaB__AET74299
augaaggccaucaucgugcugcucauggucgugaccagcaacgccgaccgcaucugcaccggcaucacguccagcaacagcccccacguggucaagaccgcgacccagggggaggugaacgugaccggcgucaucccgcugacgaccacccccaccaagagccacuucgccaaccugaaggggacggagacccggggcaagcucugccccaagugccugaacugcaccgaccuggacgugacccucgggcgccccaagugcacgggcaagaucccguccgcccgggugagcauccugcacgagguccgccccgugaccuccggcugcuuccccaucaugcacgaccggaccaagauccgccagcugcccaaccuccugcggggguacgagcacauccgccugagcacccacaacgugaucaacgccgagaacgccccgggcgggcccuacaagaucggcacguccgggagcugccccaacgucaccaacggcaacggcuucuucgcgaccauggccugggccgugcccaagaacgacaagaacaagaccgccacgaacccgcucaccaucgaggugcccuacaucugcaccgagggggaggaccagaucaccgucuggggcuuccacuccgacaacgagacgcagauggcgaagcuguacggggacagcaagccccagaaguucaccuccagcgccaacggcgugaccacccacuacgugucccagaucggcggguuccccaaccagacggaggacggcgggcugccgcagagcggccggaucgucguggacuacauggugcagaaguccgggaagaccggcaccaucaccuaccagcgcggcauccuccugccccagaaggucuggugcgccagcgggcgguccaaggugaucaagggcagccugccccucaucggggaggccgacugccugcacgagaaguacggcgggcugaacaagagcaagcccuacuacacgggcgagcacgccaaggcgaucggcaacugcccgaucugggugaagacgccccucaagcuggccaacgggaccaaguaccgcccgcccgccaagcugcucaaggagcggggcuucuucggggccaucgccggcuuccuggagggcgggugggagggcaugaucgcgggguggcacggcuacaccucccacggggcccacggcgucgccguggccgccgaccugaaguccacccaggaggcgaucaacaagaucaccaacaaccucaacucccugagcgagcuggaggucaagaaccuccagcgccuguccggcgccauggacgagcugcacaacgagauccucgagcuggacgagaagguggacgaccugcgggccgacaccaucagcucccagaucgagcucgccgugcugcugagcaacgaggggaucaucaacuccgaggacgagcaccuccuggcccuggagcgcaagcucaagaagaugcugggccccagcgcggucgagaucgggaacggcugcuucgagaccaagcacaagugcaaccagaccugccuggaccggaucgccgccgggacguucgacgccggcgaguucucccuccccaccuucgacagccugaacaucaccgcggccucccugaacgacgacggccucgacaaccacaccauccugcuguacuacagcacggccgccuccagccuggccgugacccucaugaucgcgaucuucguggucuacauggugucccgcgacaacgugagcugcuccaucugccuguga

SEQ ID NO: 90729 - RNA, 1758 nt, Artificial Sequence; identical to SEQ ID NO: 90672
  derived and/or modified CDS sequence (opt1) from hemagglutinin__InfluenzaB__AET74329

SEQ ID NO: 90730 - RNA, 1758 nt, Artificial Sequence; identical to SEQ ID NO: 90672
  derived and/or modified CDS sequence (opt1) from hemagglutinin__InfluenzaB__AET74340

SEQ ID NO: 90731 - RNA, 1758 nt, Artificial Sequence; identical to SEQ ID NO: 90672
  derived and/or modified CDS sequence (opt1) from hemagglutinin__InfluenzaB__AET74351

SEQ ID NO: 90732 - RNA, 1758 nt, Artificial Sequence; identical to SEQ ID NO: 90669
  derived and/or modified CDS sequence (opt1) from hemagglutinin__InfluenzaB__AEY69077

SEQ ID NO: 90733 - RNA, 1758 nt, Artificial Sequence; identical to SEQ ID NO: 90669
  derived and/or modified CDS sequence (opt1) from hemagglutinin__InfluenzaB__AFB77676

SEQ ID NO: 90734 - RNA, 1758 nt, Artificial Sequence
  derived and/or modified CDS sequence (opt1) from hemagglutinin__InfluenzaB__AFB77677
augaaggccaucaucgugcugcucauggucgugaccagcaacgccgaccgcaucugcaccggcaucacguccagcaacagcccccacguggucaagaccgcgacccagggggaggugaacgugaccggcgucaucccgcugacgaccacccccaccaagagccacuucgccaaccugaaggggacggagacccggggcaagcucugccccaagugcuucaacugcaccgaccuggacguggcccuggggcgccccaagugcaccggcaagaucccguccgcccgggugagcauccuccacgagguccgccccgugacguccggcugcuuccccaucaugcacgaccggaccaagauccgccagcugcccaaccugcuccggggguacgagcacauccgccugagcacccacaacgugaucaacgccgagaacgcgccgggcgggcccuacaagaucggcaccuccgggagcugccccaacgucacgaacggcaacggcuucuucgccaccauggccugggccgugcccaagaacgacaagaacaagaccgcgaccaacccgcugacgaucgaggugcccuacaucugcaccgagggggaggaccagaucaccgucuggggcuuccacuccgacaacgagacccagauggccaagcucuacggggacagcaagccccagaaguucacguccagcgccaacggcgugaccacccacuacgugucccagaucggcggguuccccaaccagaccgaggacggcgggcugccgcagagcggccggaucgucguggacuacauggugcagaaguccgggaagacgggcaccaucaccuaccagcgcggcauccugcucccccagaaggucuggugcgccagcgggcgguccaaggugaucaagggcagccugccccugaucggggaggccgacugccuccacgagaaguacggcgggcugaacaagagcaagcccuacuacaccggcgagcacgcgaaggccaucggcaacugcccgaucugggugaagacgccccugaagcucgccaacgggaccaaguaccgcccgcccgccaagcugcugaaggagcggggcuucuucggggccaucgcgggcuuccucgagggcgggugggagggcaugaucgccggguggcacggcuacaccucccacggggcccacggcgucgccguggccgcggaccugaaguccacccaggaggccaucaacaagaucacgaagaaccugaacucccucagcgagcuggaggucaagaaccugcagcgccucuccggcgccauggacgagcugcacaacgagauccuggagcucgacgagaagguggacgaccugcgggccgacaccaucagcucccagaucgagcuggccgugcuccugagcaacgaggggaucaucaacuccgaggacgagcaccuccuggcgcuggagcgcaagcugaagaagaugcucggccccagcgccgucgagaucgggaacggcugcuucgagaccaagcacaagugcaaccagaccugccuggaccggaucgccgccgggaccuucgacgcgggcgaguucucccugcccacguucgacagccucaacaucaccgccgccucccugaacgacgacggccuggacaaccacaccauccuccuguacuacagcaccgccgccuccagccuggcggugacgcugaugaucgccaucuucguggucuacauggugucccgcgacaacgugagcugcuccaucugccucuga

SEQ ID NO: 90735 - RNA, 1758 nt, Artificial Sequence; identical to SEQ ID NO: 90669
  derived and/or modified CDS sequence (opt1) from hemagglutinin__InfluenzaB__AFB77678

SEQ ID NO: 90736 - RNA, 1758 nt, Artificial Sequence; identical to SEQ ID NO: 90669
  derived and/or modified CDS sequence (opt1) from hemagglutinin__InfluenzaB__AFB77679

SEQ ID NO: 90737 - RNA, 1758 nt, Artificial Sequence
  derived and/or modified CDS sequence (opt1) from hemagglutinin__InfluenzaB__AFB77680
augaaggccaucaucgugcugcucauggucgugaccagcaacgccgaccgcaucugcaccggcaucacguccagcaacagcccccacguggucaagaccgcgacccagggggaggugaacgugaccggcgucaucccgcugacgaccacccccaccaagagccacuucgccaaccugaaggggacggagacccggggcaagcucugccccaagugccugaacugcaccgaccuggacguggcccucgggcgccccaagugcaccggcaagaucccguccgcccgggugagcauccugcacgagguccgccccaucacguccggcugcuuccccaucaugcacgaccggaccaagauccgccagcugcccaaccuccugcggggguacgagcacauccgccugagcacccacaacgugaucaacgccgagaacgcgccgggcgggcccuacaagaucggcaccuccgggagcugccccaacgugacgaacggcaacggcuucuucgccaccauggccugggccguccccaagaacgacaagaacaagaccgcgaccaacccgcucacgaucgaggugcccuacaucugcaccgagggggaggaccagaucaccguguggggcuuccacuccgacaacgagacccagauggccaagcuguacggggacagcaagccccagaaguucacguccagcgccaacggcgucaccacccacuacgugucccagaucggcggguuccccaaccagaccgaggacggcgggcugccgcagagcggccggaucguggucgacuacauggugcagaaguccgggaagacgggcaccaucaccuaccagcgcggcauccuccugccccagaagguguggugcgccagcgggcgguccaaggucaucaagggcagccugccccucaucggggaggccgacugccugcacgagaaguacggcgggcugaacaagagcaagcccuacuacaccggcgagcacgcgaaggccaucggcaacugcccgaucugggugaagacgccccucaagcuggccaacgggaccaaguaccgcccgcccgccaagcugcucaaggagcggggcuucuucggggccaucgcgggcuuccuggagggcgggugggagggcaugaucgccggguggcacggcuacaccucccacggggcccacggcguggccgucgccgcggaccugaaguccacccaggaggccaucaacaagaucacgaagaaccucaacucccugagcgagcuggaggugaagaaccuccagcgccuguccggcgccauggacgagcugcacaacgagauccucgagcuggacgagaaggucgacgaccugcgggccgacaccaucagcucccagaucgagcucgccgugcugcugagcaacgaggggaucaucaacuccgaggacgagcaccuccuggcgcuggagcgcaagcucaagaagaugcugggccccagcgccguggagaucgggaacggcugcuucgagaccaagcacaagugcaaccagaccugccuggaccggaucgccgccgggaccuucgacgcgggcgaguucucccuccccacguucgacagccugaacaucaccgccgccucccugaacgacgacggccucgacaaccacaccauccugcuguacuacagcaccgccgccuccagccuggcggucacgcucaugaucgccaucuucgugguguacauggucucccgcgacaacgugagcugcuccaucugccuguga

SEQ ID NO: 90738 - RNA, 1758 nt, Artificial Sequence; identical to SEQ ID NO: 90669
  derived and/or modified CDS sequence (opt1) from hemagglutinin__InfluenzaB__AFB77681

SEQ ID NO: 90739 - RNA, 1758 nt, Artificial Sequence
  derived and/or modified CDS sequence (opt1) from hemagglutinin__InfluenzaB__AFB77682
augaaggccaucaucgugcugcucauggucgugaccagcaacgccgaccgcaucugcaccggcaucacguccagcaacagcccccacguggucaagaccgcgacccagggggaggugaacgugaccggcgucaucccgcugacgaccacccccaccaagagccacuucgccaaccugaaggggacggagacccggggcaagcucugccccaagugccugaacugcaccgaccuggacguggcccucgggcgccccaagugcaccggcaagaucccguccgcccgggugagcauccugcacgagguccgccccgugacguccggcugcuuccccaucaugcacgaccggaccaagauccgccagcugcccaaccuccugcggggguacgagcacauccgccugagcacccacaacgugaucaacgccgagaacgcgccgggcgggcccuacaagaucggcaccuccgggagcugccccaacaucacgaacggcaacggcuucuucgccaccauggccugggccguccccaagaacgacaagaacaagaccgcgaccaacccgcucacgaucgaggugcccuacaucugcaccgagggggaggaccagaucaccguguggggcuuccacuccgacaacgagacccagauggccaagcuguacggggacagcaagccccagaaguucacguccagcgccaacggcgucaccacccacuacgugucccagaucggcggguuccccaaccagaccgaggacggcgggcugccgcagagcggccggaucguggucgacuacauggugcagaaguccgggaagacgggcaccaucaccuaccagcgcggcauccuccugccccagaagguguggugcgccagcgggcgguccaaggucaucaagggcagccugccccucaucggggaggccgacugccugcacgagaaguacggcgggcugaacaagagcaagcccuacuacaccggcgagcacgcgaaggccaucggcaacugcccgaucugggugaagacgccccucaagcuggccaacgggaccaaguaccgcccgcccgccaagcugcucaaggagcggggcuucuucggggccaucgcgggcuuccuggagggcgggugggagggcaugaucgccggguggcacggcuacaccucccacggggcccacggcguggccgucgccgcggaccugaaguccacccaggaggccaucaacaagaucacgcagaaccucaacucccugagcgagcuggaggugaagaaccuccagcgccuguccggcgccauggacgagcugcacaacgagauccucgagcuggacgagaaggucgacgaccugcgggccgacaccaucagcucccagaucgagcucgccgugcugcugagcaacgaggggaucaucaacuccgaggacgagcaccuccuggcgcuggagcgcaagcucaagaagaugcugggccccagcgccguggagaucgggaacggcugcuucgagaccaagcacaagugcaaccagaccugccuggaccggaucgccgccgggaccuucgacgcgggcgaguucucccuccccacguucgacagccugaacaucaccgccgccucccugaacgacgacggccucgacaaccacaccauccugcuguacuacagcaccgccgccuccagccuggcggucacgcucaugaucgccaucuucgugguguacauggucucccgcgacaacgugagcugcuccaucugccuguga

SEQ ID NO: 90740 - RNA, 1758 nt, Artificial Sequence; identical to SEQ ID NO: 90669
  derived and/or modified CDS sequence (opt1) from hemagglutinin__InfluenzaB__AFB77683

SEQ ID NO: 90741 - RNA, 1758 nt, Artificial Sequence; identical to SEQ ID NO: 90669
  derived and/or modified CDS sequence (opt1) from hemagglutinin__InfluenzaB__AFB77684

SEQ ID NO: 90742 - RNA, 1758 nt, Artificial Sequence
  derived and/or modified CDS sequence (opt1) from hemagglutinin__InfluenzaB__AFB77685
augaaggccaucaucgugcugcucauggucgugaccagcaacgccgaccgcaucugcaccggcaucacguccagcaacagcccccacguggucaagaccgcgacccagggggaggugaacgugaccggcgucaucccgcugacgaccacccccaccaagagccacuucgccaaccugaaggggacggagacccggggcaagcucugccccaagugccugaacugcaccgaccuggacguggcccucgggcgccccaagugcaccggcaagacgccguccgcccgggugagcauccugcacgagguccgccccgugaccuccggcugcuuccccaucaugcacgaccggaccaagauccgccagcugcccaaccuccugcggggguacgagcacauccgccugagcacccacaacgugaucaacgccgagaacgcgccgggcgggcccuacaagaucggcacguccgggagcugccccaacaucaccaacggcaacggcuucuucgccaccauggccugggccguccccaagaacgacaagaacaagaccgcgacgaacccgcucaccaucgaggugcccuacaucugcaccgagggggaggaccagaucaccguguggggcuuccacuccgacaacgagacgcagauggccaagcuguacggggacagcaagccccagaaguucaccuccagcgccaacggcgucaccacccacuacaucucccagaucggcggguuccccaaccagacggaggacggcgggcugccgcagagcggccggaucgugguggacuacaugguccagaaguccgagaagaccgggaccaucaccuaccagcgcggcauccuccugccccagaagguguggugcgccagcggccgguccaaggugaucaaggggagccugccccucaucggcgaggccgacugccugcacgagaaguacgggggccugaacaagagcaagcccuacuacacgggggagcacgcgaaggccaucggcaacugcccgaucugggucaagacgccccucaagcuggccaacggcaccaaguaccgcccgcccgccaagcugcucaaggagcggggguucuucggcgccaucgcgggguuccuggagggcgggugggagggcaugaucgccggcuggcacggguacaccucccacggcgcccacgggguggccguggccgcggaccugaaguccacccaggaggccaucaacaagaucaccaagaaccucaacucccugagcgagcuggaggucaagaaccuccagcgccuguccggcgccauggacgagcugcacaacgagauccucgagcuggacgagaagguggacgaccugcgggccgacaccaucagcucccagaucgagcucgccguccugcugagcaacgagggcaucaucaacuccgaggacgagcaccuccuggcgcuggagcgcaagcucaagaagaugcuggggcccagcgccguggagaucggcaacgggugcuucgagaccaagcacaagugcaaccagaccugccuggaccggaucgccgccggcacguucgacgcgggggaguucucccuccccaccuucgacagccugaacaucaccgccgccucccugaacgacgacggccucgacaaccacaccauccugcuguacuacagcacggccgccuccagccuggcggugacccucaugaucgccaucuucgucguguacauggugucccgcgacaacgucagcugcuccaucugccuguga

SEQ ID NO: 90743 - RNA, 1758 nt, Artificial Sequence
  derived and/or modified CDS sequence (opt1) from hemagglutinin__InfluenzaB__AFB77686
augaaggccaucaucgugcugcucauggucgugaccagcaacgccgaccgcaucugcaccggcaucacguccagcaacagcccccacguggucaagaccgcgacccagggggaggugaacgugaccggcgucaucccgcugacgaccacccccaccaagagccacuucgccaaccugaaggggacggagacccggggcaagcucugccccaagugccugaacugcaccgaccuggacguggcccucgggcgccccaagugcaccggcaagaucccguccgcccgggugagcauccugcacgagguccgccccgugacguccggcugcuuccccaucaugcacgaccggaccaagauccgccagcugcccaaccuccugcggggguacgagcacauccgccugagcacccacaacgugaucaacgccgagaacgcgccgggcgggcccuacaagaucggcaccuccgggagcugccccaacaucacgaacggcaacggcuucuucgccaccauggccugggccguccccaagaacgacaagaacaagaccgcgaccaacccgcucacgaucgaggugcccuacaucugcaccgagggggaggaccagaucaccguguggggcuuccacuccgacaacgagacccagauggccaagcuguacggggacagcaagccccagaaguucacguccagcgccaacggcgucaccacccacuacgugucccagaucagcggcuuccccaaccagaccgaggacgggggccugccgcaguccgggcggaucguggucgacuacauggugcagaaguccggcaagacggggaccaucaccuaccagcgcggcauccuccugccccagaagguguggugcgccuccggccggagcaaggucaucaaggggagccugccccucaucggcgaggccgacugccugcacgagaaguacgggggccugaacaaguccaagcccuacuacaccggggagcacgcgaaggccaucggcaacugcccgaucugggugaagacgccccucaagcuggccaacggcaccaaguaccgcccgcccgccaagcugcucaaggagcggggguucuucggcgccaucgcgggguuccuggagggcgggugggagggcaugaucgccggcuggcacggguacaccagccacggcgcccacgggguggccgucgccgcggaccugaaguccacccaggaggccaucaacaagaucacgcagaaccucaacagccuguccgagcuggaggugaagaaccuccagcgccugagcggcgccauggacgagcugcacaacgagauccucgagcuggacgagaaggucgacgaccugcgggccgacaccaucuccagccagaucgagcucgccgugcugcuguccaacgagggcaucaucaacagcgaggacgagcaccuccuggcgcuggagcgcaagcucaagaagaugcuggggcccuccgccguggagaucggcaacgggugcuucgagaccaagcacaagugcaaccagaccugccuggaccggaucgccgccggcaccuucgacgcgggggaguucagccuccccacguucgacucccugaacaucaccgccgccagccugaacgacgacggccucgacaaccacaccauccugcuguacuacuccaccgccgccagcucccuggcggucacgcucaugaucgccaucuucgugguguacauggucagccgcgacaacguguccugcagcaucugccuguga

SEQ ID NO: 90744 - RNA, 1758 nt, Artificial Sequence
  derived and/or modified CDS sequence (opt1) from hemagglutinin__InfluenzaB__AFB77687
augaaggccaucaucgugcugcucauggucgugaccagcaacgccgaccgcaucugcaccggcaucacguccagcaacagcccccacguggucaagaccgcgacccagggggaggugaacgugaccggcgucaucccgcugacgaccacccccaccaagagccacuucgccaaccugaaggggacggagacccggggcaagcucugccccaagugccugaacugcaccgaccuggacguggcccucgggcgccccaagugcaccggcaagaucccguccgcccgggugagcauccugcacgagguccgccccgugacguccggcugcuuccccaucaugcacgaccggaccaagauccgccagcugcccaaccuccugcggggguacgagcacaucaagcugagcacccacaacgugaucaacgccgagaacgcgccgggcgggcccuacaagaucggcaccuccgggagcugccccaacgucacgaacggcaacggcuucuucgccaccauggccugggccgugcccaagaacgacaagaacaagaccgcgaccaacccgcucacgaucgaggugcccuacaucugcaccgagggggaggaccagaucaccgucuggggcuuccacuccgacaacgagacccagauggccaagcuguacggggacagcaagccccagaaguucacguccagcgccaacggcgugaccacccacuacgugucccagaucggcggguuccccaaccagaccgaggacggcgggcugccgcagagcggccgcaucgucguggacuacauggugcagaaguccgggaagacgggcaccaucaccuaccagcggggcauccuccugccccagaaggucuggugcgccagcgggcgcuccaaggugaucaagggcagccugccccucaucggggaggccgacugccugcacgagaaguacggcgggcugaacaagagcaagcccuacuacaccggcgagcacgcgaaggccaucggcaacugcccgaucugggugaagacgccccucaagcuggccaacgggaccaaguaccggccgcccgccaagcugcucaaggagcgcggcuucuucggggccaucgcgggcuuccuggagggcgggugggagggcaugaucgccggguggcacggcuacaccucccacggggcccacggcgucgccguggccgcggaccugaaguccacccaggaggccaucaacaagaucacgaagaaccucaacucccugagcgagcuggaggucaagaaccuccagcggcuguccggcgccauggacgagcugcacaacgagauccucgagcuggacgagaagguggacgaccugcgcgccgacaccaucagcucccagaucgagcucgccgugcugcugagcaacgaggggaucaucaacuccgaggacgagcaccuccuggcgcuggagcggaagcucaagaagaugcugggccccagcgccgucgagaucgggaacggcugcuucgagaccaagcacaagugcaaccagaccugccuggaccgcaucgccgccgggaccuucgacgcgggcgaguucucccuccccacguucgacagccugaacaucaccgccgccucccugaacgacgacggccucgacaaccacaccauccugcuguacuacagcaccgccgccuccagccuggcggugacgcucaugaucgccaucuucguggucuacauggugucccgggacaacgugagcugcuccaucugccuguga

SEQ ID NO: 90745 - RNA, 1758 nt, Artificial Sequence
  derived and/or modified CDS sequence (opt1) from hemagglutinin__InfluenzaB__AFB77688
augaaggccaucaucgugcugcucauggucgugaccagcaacgccgaccgcaucugcaccggcaucacguccagcaacagcccccacguggucaagaccgcgacccagggggaggugaacgugaccggcgucaucccgcugacgaccacccccaccaagagccacuucgccaaccugaaggggacggagacccggggcaagcucugccccaagugccugaacugcaccgaccuggacguggcccucgggcgccccaagugcaccggcaagaucccguccgcccgggugagcauccugcacgagguccgccccgugacguccggcugcuuccccaucaugcacgaccggaccaagauccgccagcugcccaaccuccugcggggguacgagcacauccgccugagcacccacaacgugaucaacgccgagaacgcgccgggcgggcccuacaagaucggcaccuccgggagcugccccaacgucacgaacggcaacggcuucuucgccaccauggccugggccgugcccaagaacgacaagaacaagaccgcgaccaacccgcucacgaucgaggugcccuacaucugcaccgagggggaggaccagaucaccgucuggggcuuccacuccgacaacgagacccagauggccaagcuguacggggacagcaagccccagaaguucacguccagcgccaacggcgugaccacccacuacgugucccagaucggcggguuccccaaccagaccgaggacggcgggcugccgcagagcggccggaucgucguggacuacauggugcagaaguccgggaagacgggcaccaucaccuaccagcgcggcauccuccugccccagaaggucuggugcgccagcgggcgguccaaggugaucaagggcagccugccccucaucggggaggccgacugccugcacgagaaguacggcgggcugaacaagagcaagcccuacuacaccggcgagcacgcgaaggccaucggcaacugcccgaucugggugaaggcgccccucaagcuggccaacgggacgaaguaccgcccgcccgccaagcugcucaaggagcggggcuucuucggggccaucgccggcuuccuggagggcgggugggagggcaugaucgccggguggcacggcuacaccucccacggggcccacggcgucgccguggcggccgaccugaaguccacccaggaggccaucaacaagaucaccaagaaccucaacucccugagcgagcuggaggucaagaaccuccagcgccuguccggcgccauggacgagcugcacaacgagauccucgagcuggacgagaagguggacgaccugcgggccgacacgaucagcucccagaucgagcucgcggugcugcugagcaacgaggggaucaucaacuccgaggacgagcaccuccuggcccuggagcgcaagcucaagaagaugcugggccccagcgccgucgagaucgggaacggcugcuucgagaccaagcacaagugcaaccagaccugccuggaccggaucgccgcggggaccuucgacgccggcgaguucucccuccccaccuucgacagccugaacaucacggccgccucccugaacgacgacggccucgacaaccacaccauccugcuguacuacagcaccgccgcguccagccuggccgugacccucaugaucgccaucuucguggucuacauggugucccgcgacaacgugagcugcuccaucugccuguga

SEQ ID NO: 90746 - RNA, 1758 nt, Artificial Sequence; identical to SEQ ID NO: 90669
  derived and/or modified CDS sequence (opt1) from hemagglutinin__InfluenzaB__AFB77689

SEQ ID NO: 90747 - RNA, 1758 nt, Artificial Sequence; identical to SEQ ID NO: 90669
  derived and/or modified CDS sequence (opt1) from hemagglutinin__InfluenzaB__AFB77690

SEQ ID NO: 90748 - RNA, 1758 nt, Artificial Sequence; identical to SEQ ID NO: 90707
  derived and/or modified CDS sequence (opt1) from hemagglutinin__InfluenzaB__AFE00360

SEQ ID NO: 90749 - RNA, 1758 nt, Artificial Sequence; identical to SEQ ID NO: 90707
  derived and/or modified CDS sequence (opt1) from hemagglutinin__InfluenzaB__AFF18534

SEQ ID NO: 90750 - RNA, 1758 nt, Artificial Sequence; identical to SEQ ID NO: 90707
  derived and/or modified CDS sequence (opt1) from hemagglutinin__InfluenzaB__AFF18543

SEQ ID NO: 90751 - RNA, 1758 nt, Artificial Sequence; identical to SEQ ID NO: 90669
  derived and/or modified CDS sequence (opt1) from hemagglutinin__InfluenzaB__AFG48978

SEQ ID NO: 90752 - RNA, 1758 nt, Artificial Sequence; identical to SEQ ID NO: 90669
  derived and/or modified CDS sequence (opt1) from hemagglutinin__InfluenzaB__AFG48997

SEQ ID NO: 90753 - RNA, 1758 nt, Artificial Sequence
  derived and/or modified CDS sequence (opt1) from hemagglutinin__InfluenzaB__AFG48998
augaaggccaucaucgugcugcucauggucgugaccagcaacgccgaccgcaucugcaccggcaucacguccagcaacagcccccacguggucaagaccgcgacccagggggaggugaacgugaccggcgucaucccgcugacgaccacccccaccaagagccacuucgccaaccugaaggggacggagacccggggcaagcucugccccaagugccccaacugcaccgaccuggacguggcccuggggcgcccgaagugcaccggcaagauccccuccgcccgggugagcauccuccacgagguccgccccgugacguccggcugcuuccccaucaugcacgaccggaccaagauccgccagcugccgaaccugcuccggggguacgagcacauccgccugagcacccacaacgugaucaacgccgagaacgcgcccggcgggcccuacaagaucggcaccuccgggagcugccccaacgucacgaacggcaacggcuucuucgagaccauggccugggccgugccgaagaacgacaagaacaagaccgccaccaacccccugacgaucgaggugcccuacaucugcaccgagggggaggaccagaucaccgucuggggcuuccacuccgacaacgagacccagauggcgaagcucuacggggacagcaagccccagaaguucacguccagcgccaacggcgugaccacccacuacgugucccagaucggcggguucccgaaccagaccgaggacggcgggcugccccagagcggccggaucgucguggacuacauggugcagaaguccgggaagacgggcaccaucaccuaccagcgcggcauccugcucccccagaaggucuggugcgccagcgggcgguccaaggugaucaagggcagccugccccugaucggggaggccgacugccuccacgagaaguacggcgggcugaacaagagcaagccguacuacaccggcgagcacgccaaggcgaucggcaacugccccaucugggugaagacgccccugaagcucgccaacgggaccaaguaccggcccccggccaagcugcugaaggagcgcggcuucuucggggccaucgccggcuuccucgagggcgggugggagggcaugaucgcgggguggcacggcuacaccucccacggggcccacggcgucgccguggccgccgaccugaaguccacccaggaggcgaucaacaagaucacgaagaaccugaacucccucagcgagcuggaggucaagaaccugcagcgccucuccggcgccauggacgagcugcacaacgagauccuggagcucgacgagaagguggacgaccugcgggccgacaccaucagcucccagaucgagcuggccgugcuccugagcaacgaggggaucaucaacuccgaggacgagcaccuccuggcccuggagcgcaagcugaagaagaugcucggccccagcgcggucgagaucgggaacggcugcuucgagaccaagcacaagugcaaccagaccugccuggaccggaucgccgccgggaccuucgacgccggcgaguucucccugcccacguucgacagccucaacaucaccgcggccucccugaacgacgacggccuggacaaccacaccauccuccuguacuacagcaccgccgccuccagccuggccgugacgcugaugaucgcgaucuucguggucuacauggugucccgcgacaacgugagcugcuccaucugccucuga

SEQ ID NO: 90754 - RNA, 1755 nt, Artificial Sequence
  derived and/or modified CDS sequence (opt1) from hemagglutinin__InfluenzaB__AFG49012
augaaggccaucaucgugcugcucauggucgugaccagcaacgccgaccgcaucugcaccggcaucacguccagcaacagcccccacguggucaagaccgcgacccagggggaggugaacgugaccggcgucaucccgcugacgaccacccccaccaaguccuacuucgccaaccugaaggggacgaagacccggggcaagcucugccccgacugccugaacugcaccgaccuggacguggcccucgggcgccccaugugcgugggcaccacgccguccgccaaggccagcauccugcacgagguccggcccgugaccuccggcugcuuccccaucaugcacgaccgcaccaagauccggcagcugcccaaccuccugcgcggguacgagaacauccggcugagcacccagaacgugaucgacgcggagaaggccccgggcgggcccuaccgccucggcacguccgggagcugccccaacgccaccuccaagaucggcuucuucgccaccauggcgugggccguccccaaggacaacuacaagaacgccaccaacccgcugacgguggaggugcccuacaucugcaccgagggcgaggaccagaucaccgucuggggguuccacagcgacaacaagacccagaugaagaaccuguacggcgacuccaacccccagaaguucacgagcuccgccaacggggugaccacccacuacgugagccagaucggcgacuuccccgaccagaccgaggacggcgggcucccgcaguccggccggaucgucguggacuacaugaugcagaagcccgggaagacgggcaccaucguguaccagcgcgggguccugcugccccagaagguguggugcgccagcggccgguccaaggugaucaagggcagccucccccugaucggggaggcggacugccugcacgagaaguacggcgggcucaacaagagcaagccguacuacaccggcgagcacgccaaggccaucgggaacugccccaucugggucaagacgccccugaagcuggccaacggcaccaaguaccggcccccggccaagcuccugaaggagcgcggcuucuucggggcgaucgccuccuuccuggagggcgggugggagggcaugaucgccggguggcacggcuacaccagccacggcgcccacgggguggccgucgcggccgaccucaaguccacccaggaggccaucaacaagaucaccaagaaccugaacagccuguccgagcucgaggugaagaaccugcagcgccugagcggcgccauggacgagcuccacaacgagauccuggagcuggacgagaagguggacgaccuccgggccgacacgaucuccagccagaucgagcuggcgguccugcucuccaacgaggggaucaucaacagcgaggacgagcaccuccuggcccuggagcgcaagcugaagaagaugcugggccccuccgccguggacaucggcaacgggugcuucgagaccaagcacaagugcaaccagaccugccucgaccggaucgccgcgggcaccuucaacgccggggaguucagccugcccaccuucgacucccugaacaucacggccgccagccucaacgacgacggccuggacaaccacaccauccugcuguacuacuccaccgccgcgagcucccucgccgugacccugaugcuggccaucuucaucgucuacauggugagccgcgacaacguguccugcagcaucugccucuga

SEQ ID NO: 90755 - RNA, 1755 nt, Artificial Sequence
  derived and/or modified CDS sequence (opt1) from hemagglutinin__InfluenzaB__AFG49013
augaaggccaucaucgugcugcucauggucgugaccagcaacgccgaccgcaucugcaccggcaucacguccagcaacagcccccacguggucaagaccgcgacccagggggaggugaacgugaccggcgucaucccgcugacgaccacccccaccaaguccuacuucgccaaccugaaggggacgaagacccggggcaagcucugccccgacugccugaacugcaccgaccuggacguggcccucgggcgccccaugugcgugggcaccacgccguccgccaaggccagcauccugcacgagguccggcccgugaccuccggcugcuuccccaucaugcacgaccgcaccaagauccggcagcuggcgaaccuccugcgcggguacgagaacauccggcugagcacccagaacgugaucgacgccgagaaggcccccggcgggccguaccgccucggcacguccgggagcugccccaacgccaccuccaagagcggcuucuucgcgaccauggccugggccguccccaaggacaacaacaagaacgccaccaacccccugacgguggaggugccguacaucugcaccgagggcgaggaccagaucaccgucuggggguuccacuccgacaacaagacccagaugaagaaccuguacggcgacagcaacccccagaaguucacguccagcgccaacggggugaccacccacuacgugucccagaucggcggcuuccccgaccagaccgaggacgggggccucccccagagcgggcggaucgucguggacuacaugaugcagaagccgggcaagacggggaccaucguguaccagcgcggcguccugcugccccagaagguguggugcgcguccggccggagcaaggugaucaaggggagccucccccugaucggcgaggccgacugccugcacgagaaguacgggggccucaacaaguccaagcccuacuacaccggggagcacgccaaggccaucggcaacugcccgaucugggucaagacgccccugaagcuggccaacggcaccaaguaccgcccgcccgcgaagcuccugaaggagcggggguucuucggcgccaucgccggguuccuggagggcgggugggagggcaugaucgccggcuggcacggguacaccagccacggcgcccacgggguggcggucgccgccgaccucaaguccacccaggaggccaucaacaagaucaccaagaaccugaacagccuguccgagcucgaggugaagaaccugcagcgccugagcggcgccauggacgagcuccacaacgagauccuggagcuggacgagaagguggacgaccuccgggcggacacgaucuccagccagaucgagcuggccguccugcucuccaacgagggcaucaucaacagcgaggacgagcaccuccuggcccuggagcgcaagcugaagaagaugcuggggcccuccgccguggacaucggcaacgggugcuucgagaccaagcacaagugcaaccagaccugccucgaccggaucgcggccggcaccuucaacgccggggaguucagccugcccaccuucgacucccugaacaucacggccgccagccucaacgacgacggccuggacaaccacaccauccugcuguacuacuccaccgcggccagcucccucgccgugacccugaugcuggccaucuucaucgucuacauggugagccgcgacaacguguccugcagcaucugccucuga

SEQ ID NO: 90756 - RNA, 1755 nt, Artificial Sequence
  derived and/or modified CDS sequence (opt1) from hemagglutinin__InfluenzaB__AFH57865
augaaggccaucaucgugcugcucauggucgugaccagcaacgccgaccgcaucugcaccggcaucacguccagcaacagcccccacguggucaagaccgcgacccagggggaggugaacgugaccggcgucaucccgcugacgaccacccccaccaaguccuacuucgccaaccugaaggggacgcggacccgcggcaagcucugccccgacugccugaacugcaccgaccuggacguggcccucgggcggcccaugugcgugggcaccacgccguccgccaaggccagcauccugcacgagguccgccccgugaccuccggcugcuuccccaucaugcacgaccggaccaagauccgccagcugcccaaccuccugcggggguacgagaacauccgccugagcacccagaacgugaucgacgcggagaaggccccgggcgggcccuaccggcucggcacguccgggagcugccccaacgccaccuccaagagcggcuucuucgccaccauggcgugggccguccccaaggacaacaacaagaacgccaccaacccgcugacgguggaggugcccuacaucugcaccgagggcgaggaccagaucaccgucuggggguuccacuccgacaacaagacccccaugaagaaccuguacggcgacagcaacccccagaaguucacguccagcgccaacggggugaccacccacuacgugucccagaucggcggcuucccggaccagaccgaggacgggggccucccccagagcgggcgcaucgucguggacuacaugaugcagaagcccggcaagacggggaccaucguguaccagcggggcguccugcugccccagaagguguggugcgccuccggccgcagcaaggugaucaaggggagccucccgcugaucggcgaggcggacugccugcacgagaaguacgggggccucaacaaguccaagcccuacuacaccggggagcacgccaaggccaucggcaacugccccaucugggucaagacgccccugaagcuggccaacggcaccaaguaccggccgcccgccaagcuccugaaggagcgcggguucuucggcgcgaucgccggguuccuggagggcgggugggagggcaugaucgccggcuggcacggguacaccagccacggcgcccacgggguggccgucgcggccgaccucaaguccacccaggaggccaucaacaagaucaccaagaaccugaacagccuguccgagcucgaggugaagaaccugcagcggcugagcggcgccauggacgagcuccacaacgagauccuggagcuggacgagaagguggacgaccuccgcgccgacacgaucuccagccagaucgagcuggcgguccugcucuccaacgagggcaucaucaacagcgaggacgagcaccuccuggcccuggagcggaagcugaagaagaugcuggggcccuccgccguggacaucggcaacgggugcuucgagaccaagcacaagugcaaccagaccugccucgaccgcaucgccgcgggcaccuucaacgccggggaguucagccugcccaccuucgacucccugaacaucacggccgccagccucaacgacgacggccuggacaaccacaccauccugcuguacuacuccaccgccgcgagcucccucgccgugacccugaugcuggccaucuucaucgucuacauggugagccgggacaacguguccugcagcaucugccucuga

SEQ ID NO: 90757 - RNA, 1755 nt, Artificial Sequence
  derived and/or modified CDS sequence (opt1) from hemagglutinin__InfluenzaB__AFH57876
augaaggccaucaucgugcugcucauggucgugaccagcaacgccgaccgcaucugcaccggcaucacguccagcaacagcccccacguggucaagaccgcgacccagggggaggugaacgugaccggcgucaucccgcugacgaccacccccaccaaguccuacuucgccaaccugaaggggacgcggacccgcggcaagcucugccccgacugccugaacugcaccgaccuggacguggcccucgggcggcccaugugcgugggcaccacgccguccgccaaggccagcauccugcacgagguccgccccgugaccuccggcugcuuccccaucaugcacgaccggaccaagauccgccagcugcccaaccuccugcggggguacgagaacauccgccugagcacccagaacgugaucgacgcggagaaggccccgggcgggcccuaccggcucggcacguccgggagcugccccaacgccaccuccaagagcggcuucuucgccaccauggcgugggccguccccaaggacaacaacaagaacgccaccaacccgcugacgguggaggugcccuacaucugcaccgagggcgaggaccagaucaccgucuggggguuccacuccgacaacaagaaccagaugaagaaccuguacggcgacagcaacccccagaaguucaccuccagcgccaacggggugacgacccacuacgugucccagaucggcagcuuccccgaccagaccgaggacggcgggcucccgcaguccggccgcaucgucguggacuacaugaugcagaagcccgggaagaccggcacgaucguguaccagcgggggauccugcugccccagaaggucuggugcgccagcggccgcagcaaggugaucaagggcucccucccccugaucggggaggcggacugccugcacgagaaguacggcgggcucaacaagagcaagccguacuacaccggcgagcacgccaaggccaucgggaacugccccaucugggugaagacgccccugaagcuggccaacggcaccaaguaccggcccccggccaagcuccugaaggagcgcggcuucuucggggcgaucgccggcuuccuggagggcgggugggaggggaugaucgccggcuggcacggcuacaccucccacggggcccacggcgucgccguggcggccgaccucaagagcacccaggaggccaucaacaagaucaccaagaaccugaacucccugagcgagcucgaggucaagaaccugcagcggcuguccggggccauggacgagcuccacaacgagauccuggagcuggacgagaagguggacgaccuccgcgccgacaccaucagcucccagaucgagcuggcggugcugcucagcaacgagggcaucaucaacuccgaggacgagcaccuccuggcccuggagcggaagcugaagaagaugcugggccccagcgccgucgagaucgggaacggcugcuucgagacgaagcacaagugcaaccagaccugccucgaccgcaucgccgcggggaccuucaacgccggcgaguucucccugcccaccuucgacagccugaacaucaccgccgccucccucaacgacgacgggcuggacaaccacacgauccugcuguacuacagcaccgccgcguccagccucgccgugacccugaugcuggccaucuucaucguguacauggucucccgggacaacgugagcugcagcaucugccucuga

SEQ ID NO: 90758 - RNA, 1755 nt, Artificial Sequence
  derived and/or modified CDS sequence (opt1) from hemagglutinin__InfluenzaB__AFH57942
augaaggccaucaucgugcugcucauggucgugaccagcaacgccgaccgcaucugcaccggcaucacguccagcaacagcccccacguggucaagaccgcgacccagggggaggugaacgugaccggcgucaucccgcugacgaccacccccaccaaguccuacuucgccaaccugaaggggacgcggacccgcggcaagcucugccccgacugccugaacugcaccgaccuggacguggcccucgggcggcccaugugcgugggcaccacgccguccgccaaggccagcauccugcacgagguccgccccgugaccuccggcugcuuccccaucaugcacgaccggaccaagauccgccagcugcccaaccuccugcggggguacgagaacauccgccugagcacccagaacgugaucgacgcggagaaggccccgggcgggcccuaccggcucggcacguccgggagcugccccaacgccaccuccaagaucggcuucuucgccaccauggcgugggccguccccaaggacaacuacaagaacgccaccaacccgcugacgguggaggugcccuacaucugcaccgagggcgaggaccagaucaccgucuggggguuccacagcgacaacaagaaccagaugaagucccuguacggcgacagcaacccccagaaguucaccuccagcgccaacggggugacgacccacuacgugucccagaucggcgacuuccccgaccagaccgaggacggcgggcucccgcagagcggccgcaucgucguggacuacaugaugcagaagcccgggaagaccggcacgaucguguaccagcgcgggguccugcugccccagaagguguggugcgccuccggccggagcaaggugaucaagggcagccucccccugaucggggaggcggacugccugcacgagaaguacggcgggcucaacaaguccaagccguacuacaccggcgagcacgccaaggccaucgggaacugccccaucugggucaagacgccccugaagcuggccaacggcaccaaguaccggcccccggccaagcuccugaaggagcgcggcuucuucggggcgaucgccggcuuccuggagggcgggugggaggggaugaucgccggcuggcacggcuacaccagccacggggcccacggcguggccgucgcggccgaccucaaguccacccaggaggccaucaacaagaucaccaagaaccugaacagccuguccgagcucgaggugaagaaccugcagcggcugagcggggccauggacgagcuccacaacgagauccuggagcuggacgagaagguggacgaccuccgcgccgacaccaucuccagccagaucgagcuggcgguccugcucuccaacgagggcaucaucaacagcgaggacgagcaccuccuggcccuggagcggaagcugaagaagaugcugggccccuccgccguggacaucgggaacggcugcuucgagacgaagcacaagugcaaccagaccugccucgaccgcaucgccgcggggaccuucaacgccggcgaguucagccugcccaccuucgacucccugaacaucaccgccgccagccucaacgacgacgggcuggacaaccacacgauccugcuguacuacuccaccgccgcgagcucccucgccgugacccugaugcuggccaucuucaucgucuacauggugagccgggacaacguguccugcagcaucugccucuga

SEQ ID NO: 90759 - RNA, 1752 nt, Artificial Sequence
  derived and/or modified CDS sequence (opt1) from hemagglutinin__InfluenzaB__AFH57986
augaaggccaucaucgugcugcucauggucgugaccagcaacgccgaccgcaucugcaccggcaucacguccagcaacagcccccacguggucaagaccgcgacccagggggaggugaacgugaccggcgucaucccgcugacgaccacccccaccaagucccacuucgccaaccugaaggggacgaagacccggggcaagcucugccccaacugccugaacugcaccgaccuggacguggcccucgggcgccccaugugcgugggcaccacgccguccgccaaggccagcauccugcacgagguccggcccgugaccuccggcugcuuccccaucaugcacgaccgcaccaagauccggcagcugcccaaccuccugcgcggguacgagaacauccggcugagcacccagaacgugaucaacgcggagcgcgccccgggcgggcccuaccggcucggcacguccgggagcugccccaacgucaccucccgcgacggcuucuucgccaccauggccugggcggugccccgggacaacaagaccgccacgaacccgcugaccguggagguccccuacaucugcaccaagggcgaggaccagaucaccguguggggguuccacagcgacgacaagacgcagaugaagaaccuguacggcgacuccaacccccagaaguucaccagcuccgccaacggggugaccacccacuacgucagccagaucggcggcuuccccaaccagacggaggacgggggccucccgcaguccgggcgcaucgugguggacuacaugguccagaagcccggcaagaccgggaccaucguguaccagcggggcgugcugcugccccagaaggucuggugcgccagcggccgcuccaaggugaucaaggggagccucccccugaucggcgaggccgacugccugcacgagaaguacgggggccucaacaagagcaagccguacuacaccggggagcacgcgaaggccaucggcaacugccccaucugggucaagacgccccugaagcuggccaacggcaccaaguaccggcccccggccaagcuccugaaggagcgcggguucuucggcgccaucgcgggguuccuggagggcgggugggagggcaugaucgccggcuggcacggguacaccucccacggcgcccacgggguggccguggccgcggaccucaagagcacccaggaggccaucaacaagaucacgaagaaccugaacucccugagcgagcucgaggucaagaaccugcagcggcuguccggcgccauggacgagcuccacaacgagauccuggagcuggacgagaagguggacgaccuccgcgccgacaccaucagcucccagaucgagcuggccgugcugcucagcaacgagggcaucaucaacuccgaggacgagcaccuccuggcgcuggagcggaagcugaagaagaugcuggggcccagcgccgucgacaucggcaacgggugcuucgagaccaagcacaagugcaaccagaccugccucgaccgcaucgccgccggcaccuucaacgcgggggaguucucccugcccacguucgacagccugaacaucaccgccgccucccucaacgacgacggccuggacaaccacaccauccugcuguacuacagcaccgccgccuccagccucgcggugacgcugaugaucgccaucuucaucguguacauggucucccgggacaacgugagcugcuccaucugccuguga

SEQ ID NO: 90760 - RNA, 1758 nt, Artificial Sequence
  derived and/or modified CDS sequence (opt1) from hemagglutinin__InfluenzaB__AFH58249
augaaggccaucaucgugcugcucauggucgugaccagcaacgccgaccgcaucugcaccggcaucacguccagcaacagcccccacguggucaagaccgcgacccagggggaggugaacgugaccggcgucaucccgcugacgaccacccccaccaagagccacuucgccaaccugaaggggacgaagacccggggcaagcucugccccaagugccugaacugcaccgaccuggacguggcccucgggcgccccaagugcaccggcaacaucccgcccgccaagguguccauccugcacgagguccggcccgugacgagcggcugcuuccccaucaugcacgaccgcaccaagauccggcagcugccgaaccuccugcgcggguacgagcggauccgccuguccaaccacaacgugaucaacgccgaggaggcgcccggcgggcccuacaagaucggcaccagcggguccugccccaacgucaccaacggcaacggcuucuucgccacgauggccugggccgugccgaagaacgagaacaacaagaccgcgaccaacagccucaccaucgaggugcccuacaucugcacggagggggaggaccagaucaccgucuggggcuuccacuccgacagcgagacccagauggccaagcuguacggggacuccaagccccagaaguucaccagcuccgccaacggcgugacgacccacuacgugagccagaucggcggguuccccaaccagaccgaggacggcgggcugccgcaguccggccggaucgucguggacuacauggugcagaaguccgggaagaccggcacgaucaccuaccagcgcggcauccuccugccccagaaggucuggugcgccuccgggcggagcaaggugaucaagggcagccugccccucaucggggaggccgacugccugcacgagaaguacggcgggcugaacaaguccaagcccuacuacaccggcgagcacgcgaaggccaucggcaacugcccgaucugggugaagacgccccucaagcuggccaacgggaccaaguaccgcccgcccgccacccugcucaaggagcggggcuucuucggggccaucgcgggcuuccuggagggcgggugggagggcaugaucgccggguggcacggcuacaccagccacggggcccacggcgucgccguggccgcggaccugaaguccacccaggaggccaucaacaagaucacgaagaaccucaacagccuguccgagcuggaggucaagaaccuccagcgccugagcggcgccauggacgagcugcacaacgagauccucgagcuggacgagaagguggacgaccugcgggccgacaccaucuccagccagaucgagcucgccgugcugcuguccaacgaggggaucaucaacagcgaggacgagcaccuccuggcgcuggagcgcaagcucaagaagaugcugggccccuccgccgucgagaucgggaacggcugcuucgagaccaagcacaagugcaaccagaccugccuggaccggaucgccgccgggaccuucaacgcgggcgaguucagccuccccacguucgacucccugaacaucaccgccgccagccugaacgacgacggccucgacaaccacaccauccugcuguacuacuccaccgccgccagcucccuggcggugacgcucaugaucgccaucuucguggucuacauggugagccgcgacaacguguccugcagcaucugccuguga

SEQ ID NO: 90761 - RNA, 1758 nt, Artificial Sequence
  derived and/or modified CDS sequence (opt1) from hemagglutinin__InfluenzaB__AFH58260
augaaggccaucaucgugcugcucauggucgugaccagcaacgccgaccgcaucugcaccggcaucacguccagcaacagcccccacguggucaagaccgcgacccagggggaggugaacgugaccggcgucaucccgcugacgaccacccccaccaagagccacuucgccaaccugaaggggacgaagacccggggcaagcucugccccaagugccugaacugcaccgaccuggacguggcccucgggcgccccaagugcaccggcaacaucccguccgccgaggugagcauccugcacgagguccggcccgugacguccggcugcuuccccaucaugcacgaccgcaccaagauccggcagcugcccaaccuccugcgcggguacgagcacauccggcugagcacccacaacgugaucaacgccgagaaggcgccgggcgggcccuacaagaucggcaccuccgggagcugccccaacgucacgaacggcaacggcuucuucgccaccauggccugggccgugcccaagaacgacaacaacaagaccgcgaccaacucccucacgaucgaggugccguacaucugcaccgagggggaggaccagaucaccgucuggggcuuccacagcgacaacgagauccagauggccaagcuguacggggacuccaagccccagaaguucaccagcuccagcaacggcgugacgacccacuacgugucccagaucggcggguuccccaaccagaccgaggacggcgggcugccccagagcggccgcaucgucguggacuacauggugcagaaguccgggaagaccggcacgaucaccuaccagcggggcauccuccugccgcagaaggucuggugcgccagcgggcgcagcaaggugaucaagggcucccugccccucaucggggaggccgacugccugcacgagcgguacggcgggcugaacaagagcaagcccuacuacaccggcgagcacgccaaggcgaucggcaacugccccaucugggugaagaccccgcucaagcuggccaacgggacgaaguaccgcccgcccgccaagcugcucaaggagcggggcuucuucggggccaucgccggcuuccuggagggcgggugggagggcaugaucgcgggguggcacggcuacaccucccacggggcccacggcgucgccguggccgccgaccugaaguccacccaggaggcgaucaacaagaucaccaagaaccucaacucccugagcgagcuggaggucaagaaccuccagcgccuguccggcgccauggacgagcugcacaacgagauccucgagcuggacgagaagguggacgaccugcgggccgacacgaucagcucccagaucgagcucgccgugcugcugagcaacgaggggaucaucaacuccgaggacgagcaccuccuggcccuggagcgcaagcucaagaagaugcugggccccagcgcggucgagaucgggaacggcugcuucgagaccaagcacaagugcaaccagaccugccuggaccggaucgccgccgggaccuucgacgccggcgaguucucccuccccaccuucgacagccugaacaucacggcggccucccugaacgacgacggccucgacaaccacaccauccugcuguacuacagcaccgccgccuccagccuggccgugacccucaugaucgcgaucuucguggucuacauggugucccgcgacaacgugagcugcagcaucugccuguga

SEQ ID NO: 90762 - RNA, 1755 nt, Artificial Sequence
  derived and/or modified CDS sequence (opt1) from hemagglutinin__InfluenzaB__AFH58271
augaaggccaucaucgugcugcucauggucgugaccagcaacgccgaccgcaucugcaccggcaucacguccagcaacagcccccacguggucaagaccgcgacccagggggaggugaacgugaccggcgucaucccgcugacgaccacccccaccaaguccuacuucgccaaccugaaggggacgcggacccgcggcaagcucugccccgacugccugaacugcaccgaccuggacguggcccucgggcggcccaugugcgugggcaccacgccguccgccaaggccagcauccugcacgaggucaagcccgugaccuccggcugcuuccccaucaugcacgaccgcaccaagauccggcagcugcccaaccuccugcgcggguacgagaacauccggcugagcacccagaacgugaucgacgcggagaaggccccgggcgggcccuaccgccucggcacguccgggagcugccccaacgccaccuccaagagcggcuucuucgccaccauggcgugggccguccccaaggacaacaacaagaacgccaccaacccgcugacgguggaggugcccuacaucugcaccgagggcgaggaccagaucaccgucuggggguuccacuccgacgacaagacccagaugaagaaccuguacggcgacagcaacccccagaaguucacguccagcgccaacggggugaccacccacuacgugucccagaucggcagcuuccccgaccagaccgaggacggcgggcucccgcaguccggccggaucgucguggacuacaugaugcagaagcccgggaagacgggcaccaucguguaccagcgcgggguccugcugccccagaagguguggugcgccagcggccggagcaaggugaucaagggcucccucccccugaucggggaggcggacugccugcacgagaaguacggcgggcucaacaagagcaagccguacuacaccggcgagcacgccaaggccaucgggaacugccccaucugggucaagacgccccugaagcuggccaacggcaccaaguaccggcccccggccaagcuccugaaggagcgcggcuucuucggggcgaucgccggcuuccuggagggcgggugggaggggaugaucgccggcuggcacggcuacaccucccacggggcccacggcguggccgucgcggccgaccucaagagcacccaggaggccaucaacaagaucaccaagaaccugaacucccugagcgagcucgaggugaagaaccugcagcgccuguccggggccauggacgagcuccacaacgagauccuggagcuggacgagaagguggacgaccuccgggccgacacgaucagcucccagaucgagcuggcgguccugcucagcaacgagggcaucaucaacuccgaggacgagcaccuccuggcccuggagcgcaagcugaagaagaugcugggccccagcgccguggagaucgggaacggcugcuucgagaccaagcacaagugcaaccagaccugccucgaccggaucgccgcggggaccuucaacgccggcgaguucucccugcccaccuucgacagccugaacaucacggccgccucccucaacgacgacgggcuggacaaccacaccauccugcuguacuacagcaccgccgcguccagccucgccgugacccugaugcuggccaucuucaucgucuacauggugucccgcgacaacgugagcugcagcaucugccucuga

SEQ ID NO: 90763 - RNA, 1755 nt, Artificial Sequence; identical to SEQ ID NO: 90762
  derived and/or modified CDS sequence (opt1) from hemagglutinin__InfluenzaB__AFH58282

SEQ ID NO: 90764 - RNA, 1758 nt, Artificial Sequence
  derived and/or modified CDS sequence (opt1) from hemagglutinin__InfluenzaB__AFH58293
augaaggccaucaucgugcugcucauggucgugaccagcaacgccgaccgcaucugcaccggcaucacguccagcaacagcccccacguggucaagaccgcgacccagggggaggugaacgugaccggcgucaucccgcugacgaccacccccaccaagagccacuucgccaaccugaaggggacggagacccggggcaagcucugccccaagugccugaacugcaccgaccuggacguggcccucgggcgccccaagugcaccggcaagaucccguccgcccgggugagcauccugcacgagguccgccccgugacguccggcugcuuccccaucaugcacgaccggaccaagauccgccagcugcccaaccuccugcggggguacgagcacauccgccugagcacccacaacgugaucaacgccgagaacgcgccgggcgggcccuacaagaucggcaccuccgggagcugccccaacaucacgaacggcaacggcuucuucgccaccauggccugggccguccccaagaacgacaagaacaagaccgcgaccaacccgcucacgaucgaggugcccuacaucugcaccgagggggaggaccagaucaccguguggggcuuccacuccgacgacgagacccagauggccaagcuguacggggacagcaagccccagaaguucacguccagcgccaacggcgucaccacccacuacgugucccagaucggcggguuccccaaccagaccgaggacggcgggcugccgcagagcggccggaucguggucgacuacauggugcagaaguccgggaagacgggcaccaucaccuaccagcgcggcauccuccugccccagaagguguggugcgccagcgggcgguccaaggucaucaagggcagccugccccucaucggggaggccgacugccugcacgagaaguacggcgggcugaacaagagcaagcccuacuacaccggcgagcacgcgaaggccaucggcaacugcccgaucugggugaagacgccccucaagcuggccaacgggaccaaguaccgcccgcccgccaagcugcucaaggagcggggcuucuucggggccaucgcgggcuuccuggagggcgggugggagggcaugaucgccggguggcacggcuacaccucccacggggcccacggcguggccgucgccgcggaccugaaguccacccaggaggccaucaacaagaucacgaagaaccucaacucccugagcgagcuggaggugaagaaccuccagcgccuguccggcgccauggacgagcugcacaacgagauccucgagcuggacgagaaggucgacgaccugcgggccgacaccaucagcucccagaucgagcucgccgugcugcugagcaacgaggggaucaucaacuccgaggacgagcaccuccuggcgcuggagcgcaagcucaagaagaugcugggccccagcgccguggagaucgggaacggcugcuucgagaccaagcacaagugcaaccagaccugccuggaccggaucgccgccgggaccuucgacgcgggcgaguucucccuccccacguucgacagccugaacaucaccgccgccucccugaacgacgacggccucgacaaccacaccauccugcuguacuacagcaccgccgccuccagccuggcggucacgcucaugaucgccaucuucgugguguacauggucucccgcgacaacgugagcugcuccaucugccuguga

SEQ ID NO: 90765 - RNA, 1755 nt, Artificial Sequence
  derived and/or modified CDS sequence (opt1) from hemagglutinin__InfluenzaB__AFH58304
augaaggccaucaucgugcugcucauggucgugaccagcaacgccgaccgcaucugcaccggcaucacguccagcaacagcccccacguggucaagaccgcgacccagggggaggugaacgugaccggcgucaucccgcugacgaccacccccaccaaguccuacuucgccaaccugaaggggacgcggacccgcggcaagcucugccccgacugccugaacugcaccgaccuggacguggcccucgggcggcccaugugcgugggcaccacgccguccgccaaggccagcauccugcacgagguccgccccgugaccuccggcugcuuccccaucaugcacgaccggaccaagauccgccagcugcccaaccuccugcggggguacgagaacauccgccugagcacccagaacgugaucgacgcggagaaggccccgggcgggcccuaccggcucggcacguccgggagcugccccaacgccaccuccaagaucggcuucuucgccaccauggcgugggccguccccaaggacaacuacaagaacgccaccaacccgcugacgguggaggugcccuacaucugcaccgagggcgaggaccagaucaccgucuggggguuccacagcgacgacaagacccagaugaagaaccuguacggcgacuccaacccccagaaguucacgagcuccgccaacggggugaccacccacuacgugagccagaucggcgacuuccccgaccagaccgaggacggcgggcucccgcaguccggccgcaucgucguggacuacaugaugcagaagcccgggaagacgggcaccaucguguaccagcgcgggguccugcugccccagaagguguggugcgccagcggccgguccaaggugaucaagggcagccucccccugaucggggaggcggacugccugcacgagaaguacggcgggcucaacaagagcaagccguacuacaccggcgagcacgccaaggccaucgggaacugccccaucugggucaagacgccccugaagcuggccaacggcaccaaguaccggcccccggccaagcuccugaaggagcgcggcuucuucggggcgaucgccggcuuccuggagggcgggugggaggggaugaucgccggcuggcacggcuacaccucccacggggcccacggcguggccgucgcggccgaccucaagagcacccaggaggccaucaacaagaucaccaagaaccugaacucccugagcgagcucgaggugaagaaccugcagcggcuguccggggccauggacgagcuccacaacgagauccuggagcuggacgagaagguggacgaccuccgcgccgacacgaucagcucccagaucgagcuggcgguccugcucagcaacgagggcaucaucaacuccgaggacgagcaccuccuggcccuggagcggaagcugaagaagaugcugggccccagcgccguggacaucgggaacggcugcuucgagaccaagcacaagugcaaccagaccugccucgaccgcaucgccgcggggaccuucaacgccggcgaguucucccugcccaccuucgacagccugaacaucacggccgccucccucaacgacgacgggcuggacaaccacaccauccugcuguacuacagcaccgccgcguccagccucgccgugacccugaugcuggccaucuucaucgucuacauggugucccgggacaacgugagcugcuccaucugccucuga

SEQ ID NO: 90766 - RNA, 1755 nt, Artificial Sequence; identical to SEQ ID NO: 90765
  derived and/or modified CDS sequence (opt1) from hemagglutinin__InfluenzaB__AFH58315

SEQ ID NO: 90767 - RNA, 1755 nt, Artificial Sequence
  derived and/or modified CDS sequence (opt1) from hemagglutinin__InfluenzaB__AFH58326
augaaggccaucaucgugcugcucauggucgugaccagcaacgccgaccgcaucugcaccggcaucacguccagcaacagcccccacguggucaagaccgcgacccagggggaggugaacgugaccggcgucaucccgcugacgaccacccccaccaagagcuacuucgccaaccugaaggggacgcggacccgcggcaagcucugccccgacugccugaacugcaccgaccuggacguggcccucgggcggcccaugugcgugggcaccacgccguccgccaaggccagcauccugcacgagguccgccccgugaccuccggcugcuuccccaucaugcacgaccggaccaagauccgccagcugcccaaccuccugcggggguacgagaacauccgccugagcacccagaacgugaucgacgcggagaaggccccgggcgggcccuaccggcucggcacguccgggagcugccccaacgccaccuccaagaucggcuucuucgccaccauggcgugggccguccccaaggacaacuacaagaacgccaccaacccgcugacgguggaggugcccuacaucugcaccgagggcgaggaccagaucaccgucuggggguuccacagcgacaacaaggcccagaugaagaaccuguacggcgacuccaacccccagaaguucaccagcuccgccaacggggugacgacccacuacgugagccagaucggcgacuuccccgaccagaccgaggacggcgggccgccccaguccggccgcaucgucguggacuacaugaugcagaagcccgggaagaccggcacgaucguguaccagcgcgggguccuccugccccagaagguguggugcgcgagcggccgguccaaggugaucaagggcagccugccgcucaucggggaggccgacugccugcacgagaaguacggcgggcugaacaagagcaagcccuacuacaccggcgagcacgccaaggccaucgggaacugccccaucugggucaagacgccccucaagcuggccaacggcaccaaguaccggccgcccgcgaagcugcucaaggagcgcggcuucuucggggccaucgccggcuuccuggagggcgggugggaggggaugaucgccggcuggcacggcuacaccucccacggggcccacggcguggcggucgccgccgaccugaaguccacccaggaggccaucaacaagaucaccaagaaccucaacucccugagcgagcuggaggugaagaaccuccagcggcuguccggggccauggacgagcugcacaacgagauccucgagcuggacgagaagguggacgaccugcgcgcggacaccaucagcucccagaucgagcucgccguccugcugagcaacgagggcaucaucaacuccgaggacgagcaccuccuggcccuggagcggaagcucaagaagaugcugggccccagcgccguggacaucgggaacggcugcuucgagacgaagcacaagugcaaccagaccugccuggaccgcaucgcggccgggaccuucaacgccggcgaguucucccuccccaccuucgacagccugaacaucaccgccgccucccugaacgacgacgggcucgacaaccacacgauccugcuguacuacagcaccgcggccuccagccuggccgugacccucaugcuggccaucuucaucgucuacauggugucccgggacaacgugagcugcuccaucugccuguga

SEQ ID NO: 90768 - RNA, 1755 nt, Artificial Sequence
  derived and/or modified CDS sequence (opt1) from hemagglutinin__InfluenzaB__AFH58337
augaaggccaucaucgugcugcucauggucgugaccagcaacgccgaccgcaucugcaccggcaucacguccagcaacagcccccacguggucaagaccgcgacccagggggaggugaacgugaccggcgucaucccgcugacgaccacccccaccaaguccuacuucgccaaccugaaggggacgcggacccgcggcaagcucugccccgacugccugaacugcaccgaccuggacguggcccucgggcggcccaugugcgugggcaccacgccguccgccaaggccagcauccugcacgagguccgccccgugaccuccggcugcuuccccaucaugcacgaccggaccaagauccgccagcugcccaaccuccugcggggguacgagaacauccgccugagcacccagaacgugaucgacgcggagaaggccccgggcgggcccuaccggcucggcacguccgggagcugccccaacgccaccuccaagaucggcuucuucgccaccauggcgugggccguccccaaggacaacuacaagaacgccaccaacccgcugacgguggaggugcccuacaucugcaccgagggcgaggaccagaucaccgucuggggguuccacagcgacaacaaggcccagaugaagaaccuguacggcgacuccaacccccagaaguucaccagcuccgccaacggggugacgacccacuacgugagccagaucggcgacuuccccgaccagaccgaggacggcgggcucccgcaguccggccgcaucgucguggacuacaugaugcagaagcccgggaagaccggcacgaucguguaccagcgcgggguccugcugccccagaagguguggugcgcgagcggccgguccaaggugaucaagggcagccucccccugaucggggaggccgacugccugcacgagaaguacggcgggcucaacaagagcaagccguacuacaccggcgagcacgccaaggccaucgggaacugccccaucugggucaagacgccccugaagcuggccaacggcaccaaguaccggcccccggcgaagcuccugaaggagcgcggcuucuucggggccaucgccggcuuccuggagggcgggugggaggggaugaucgccggcuggcacggcuacaccucccacggggcccacggcguggcggucgccgccgaccucaagagcacccaggaggccaucaacaagaucaccaagaaccugaacucccugagcgagcucgaggugaagaaccugcagcggcuguccggggccauggacgagcuccacaacgagauccuggagcuggacgagaagguggacgaccuccgcgcggacaccaucagcucccagaucgagcuggccguccugcucagcaacgagggcaucaucaacuccgaggacgagcaccuccuggcccuggagcggaagcugaagaagaugcugggccccagcgccguggacaucgggaacggcugcuucgagacgaagcacaagugcaaccagaccugccucgaccgcaucgcggccgggaccuucaacgccggcgaguucucccugcccaccuucgacagccugaacaucaccgccgccucccucaacgacgacgggcuggacaaccacacgauccugcuguacuacagcaccgcggccuccagccucgccgugacccugaugcuggccaucuucaucgucuacauggugucccgggacaacgugagcugcuccaucugccucuga

SEQ ID NO: 90769 - RNA, 1758 nt, Artificial Sequence
  derived and/or modified CDS sequence (opt1) from hemagglutinin__InfluenzaB__AFH58348
augaaggccaucaucgugcugcucauggucgugaccagcaacgccgaccgcaucugcaccggcaucacguccagcaacagcccccacguggucaagaccgcgacccagggggaggugaacgugaccggcgucaucccgcugacgaccacccccaccaagagccacuucgccaaccugaaggggacggagacccggggcaagcucugccccaagugccugaacugcaccgaccuggacguggcccucgggcgccccaagugcaccggcaacaucccguccgcccgggugagcauccugcacgagguccgccccgugacguccggcugcuuccccaucaugcacgaccggaccaagauccgccagcugcccaaccuccugcggggguacgagcacauccgccugagcgcccacaacgugaucaacgcggagaacgccccgggcgggcccuacaagaucggcaccuccgggagcugccccaacgucaccaacggcaacggcuucuucgccacgauggccugggcggugcccaagaacgacaacaacaagaccgccaccaacucccucaccaucgaggugccguacaucugcacggagggggaggaccagaucaccgucuggggcuuccacagcgacaaggagacccagauggccaagcuguacggggacuccaagccccagaaguucaccagcuccgccaacggcgugacgacccacuacgugagccagaucggcggguuccccaaccagaccgaggacggcgggcugccccaguccggccggaucgucguggacuacauggugcagaaguccgggaagaccggcacgaucaccuaccagcgcggcauccuccugccgcagaaggucuggugcgccuccgggcggagcaaggugaucaagggcagccugccccucaucggggaggcggacugccugcacgagaaguacggcgggcugaacaaguccaagcccuacuacaccggcgagcacgccaaggccaucggcaacugccccaucugggugaagaccccgcucaagcuggccaacgggacgaaguaccgcccgcccgccaagcugcucaaggagcggggcuucuucggggcgaucgccggcuuccuggagggcgggugggagggcaugaucgccggguggcacggcuacaccagccacggggcccacggcgucgccguggcggccgaccugaaguccacccaggaggccaucaacaagaucaccaagaaccucaacagccuguccgagcuggaggucaagaaccuccagcgccugagcggcgccauggacgagcugcacaacgagauccucgagcuggacgagaagguggacgaccugcgggccgacacgaucuccagccagaucgagcucgcggugcugcuguccaacgaggggaucaucaacagcgaggacgagcaccuccuggcccuggagcgcaagcucaagaagaugcugggccccuccgccgucgagaucgggaacggcugcuucgagaccaagcacaagugcaaccagaccugccuggaccggaucgccgcggggaccuucaacgccggcgaguucagccuccccaccuucgacucccugaacaucacggccgccagccugaacgacgacggccucgacaaccacaccauccugcuguacuacuccaccgccgcgagcucccuggccgugacccucaugaucgccaucuucguggucuacauggugagccgcgacaacguguccugcagcaucugccuguga

SEQ ID NO: 90770 - RNA, 1758 nt, Artificial Sequence
  derived and/or modified CDS sequence (opt1) from hemagglutinin__InfluenzaB__AFH58370
augaaggccaucaucgugcugcucauggucgugaccagcaacgccgaccgcaucugcaccggcaucacguccagcaacagcccccacguggucaagaccgcgacccagggggaggugaacgugaccggcgucaucccgcugacgaccacccccaccaagagccacuucgccaaccugaaggggacggagacccggggcaagcucugccccaagugccugaacugcaccgaccuggacguggcccucgggcgccccaagugcaccggcaacaucccguccgcccgggugagcauccugcacgagguccgccccgugacguccggcugcuuccccaucaugcacgaccggaccaagauccgccagcugcccaaccuccugcggggguacgagcacauccgccugagcgcccacaacgugaucaacgcggagaacgccccgggcgggcccuacaagaucggcaccuccgggagcugccccaacgucaccaacggcaacggcuucuucgccacgauggccugggcggugcccaagaacgacaacaacaagaccgccaccaacucccucaccaucgaggugccguacaucugcacggagggggaggaccagaucaccgucuggggcuuccacagcgacaacgagauccagauggccaagcuguacggggacuccaagccccagaaguucaccagcuccgccaacggcgugaccacgcacuacgugagccagaucggcggguuccccaaccagaccgaggacggcgggcugccccaguccggccggaucgucguggacuacauggugcagaaguccgggaagaccggcaccaucacguaccagcgcggcauccuccugccgcagaaggucuggugcgccuccgggcggagcaaggugaucaagggcagccugccccucaucggggaggcggacugccugcacgagaaguacggcgggcugaacaaguccaagcccuacuacaccggcgagcacgccaaggccaucggcaacugccccaucugggugaagaccccgcucaagcuggccaacgggaccaaguaccgcccgcccgccaagcugcucaaggagcggggcuucuucggggcgaucgccggcuuccuggagggcgggugggagggcaugaucgccggguggcacggcuacacgagccacggggcccacggcgucgccguggcggccgaccugaaguccacccaggaggccaucaacaagaucaccaagaaccucaacagccuguccgagcuggaggucaagaaccuccagcgccugagcggcgccauggacgagcugcacaacgagauccucgagcuggacgagaagguggacgaccugcgggccgacaccaucuccagccagaucgagcucgcggugcugcuguccaacgaggggaucaucaacagcgaggacgagcaccuccuggcccuggagcgcaagcucaagaagaugcugggccccuccgccgucgagaucgggaacggcugcuucgagacgaagcacaagugcaaccagaccugccuggaccggaucgccgcggggaccuucaacgccggcgaguucagccuccccaccuucgacucccugaacaucaccgccgccagccugaacgacgacggccucgacaaccacacgauccugcuguacuacuccaccgccgcgagcucccuggccgugacccucaugaucgccaucuucguggucuacauggugagccgcgacaacguguccugcagcaucugccuguga

SEQ ID NO: 90771 - RNA, 1758 nt, Artificial Sequence
  derived and/or modified CDS sequence (opt1) from hemagglutinin__InfluenzaB__AFH58392
augaaggccaucaucgugcugcucauggucgugaccagcaacgccgaccgcaucugcaccggcaucacguccagcaacagcccccacguggucaagaccgcgacccagggggaggugaacgugaccggcgucaucccgcugacgaccacccccaccaagagccacuucgccaaccugaaggggacggagacccggggcaagcucugccccaagugccugaacugcaccgaccuggacguggcccucgggcgccccaagugcaccggcaagaucccguccgcccgggugagcauccugcacgagguccgccccgugacguccggcugcuuccccaucaugcacgaccggaccaagauccgccagcugcccaaccuccugcggggguacgagcacauccgccugagcacccacaacgugaucaacgccgagaacgcgccgggcgggcccuacaagaucggcaccuccgggagcugccccaacaucacgaacggcaacggcuucuucgccaccauggccugggccguccccaagaacgacaagaacaagaccgcgaccaacccgcucacgaucgaggugcccuacaucugcaccgagggggaggaccagaucaccguguggggcuuccacuccgacaacgagauccagauggccaagcuguacggggacagcaagccccagaaguucaccuccagcgccaacggcgucacgacccacuacgugucccagaucggcggguuccccaaccagaccgaggacggcgggcugccgcagagcggccggaucguggucgacuacauggugcagaaguccgggaagaccggcacgaucaccuaccagcgcggcauccuccugccccagaagguguggugcgccagcgggcgguccaaggucaucaagggcagccugccccucaucggggaggccgacugccugcacgagaaguacggcgggcugaacaagagcaagcccuacuacaccggcgagcacgcgaaggccaucggcaacugcccgaucugggugaagacgccccucaagcuggccaacgggaccaaguaccgcccgcccgccaagcugcucaaggagcggggcuucuucggggccaucgcgggcuuccuggagggcgggugggagggcaugaucgccggguggcacggcuacaccucccacggggcccacggcguggccgucgccgcggaccugaaguccacccaggaggccaucaacaagaucaccaagaaccucaacucccugagcgagcuggaggugaagaaccuccagcgccuguccggcgccauggacgagcugcacaacgagauccucgagcuggacgagaaggucgacgaccugcgggccgacacgaucagcucccagaucgagcucgccgugcugcugagcaacgaggggaucaucaacuccgaggacgagcaccuccuggcgcuggagcgcaagcucaagaagaugcugggccccagcgccguggagaucgggaacggcugcuucgagaccaagcacaagugcaaccagaccugccuggaccggaucgccgccgggaccuucgacgcgggcgaguucucccuccccaccuucgacagccugaacaucacggccgccucccugaacgacgacggccucgacaaccacaccauccugcuguacuacagcaccgccgccuccagccuggcggucacccucaugaucgccaucuucgugguguacauggucucccgcgacaacgugagcugcuccaucugccuguga

SEQ ID NO: 90772 - RNA, 1758 nt, Artificial Sequence; identical to SEQ ID NO: 90764
  derived and/or modified CDS sequence (opt1) from hemagglutinin__InfluenzaB__AFH58403

SEQ ID NO: 90773 - RNA, 1758 nt, Artificial Sequence; identical to SEQ ID NO: 90764
  derived and/or modified CDS sequence (opt1) from hemagglutinin__InfluenzaB__AFH58414

SEQ ID NO: 90774 - RNA, 1758 nt, Artificial Sequence; identical to SEQ ID NO: 90764
  derived and/or modified CDS sequence (opt1) from hemagglutinin__InfluenzaB__AFH58425

SEQ ID NO: 90775 - RNA, 1758 nt, Artificial Sequence; identical to SEQ ID NO: 90764
  derived and/or modified CDS sequence (opt1) from hemagglutinin__InfluenzaB__AFH58436

SEQ ID NO: 90776 - RNA, 1758 nt, Artificial Sequence
  derived and/or modified CDS sequence (opt1) from hemagglutinin__InfluenzaB__AFH58458
augaaggccaucaucgugcugcucauggucgugaccagcaacgccgaccgcaucugcaccggcaucacguccagcaacagcccccacguggucaagaccgcgacccagggggaggugaacgugaccggcgucaucccgcugacgaccacccccaccaagagccacuucgccaaccugaaggggacggagacccggggcaagcucugccccaagugccugaacugcaccgaccuggacguggcccucgggcgccccaagugcaccggcaagaucccguccgcccgggugagcauccugcacgagguccgccccgugacguccggcugcuuccccaucaugcacgaccggaccaagauccgccagcugcccaaccuccugcggggguacgagcacauccgccugagcaccaacaacgugaucaacgccgagaacgcgccgggcgggcccuacaagaucggcaccuccgggagcugccccaacgucacgaacggcaacggcuucuucgccaccauggccugggccgugcccaagaacgacaagaacaagaccgcgaccaacccgcucacgaucgaggugcccuacaucugcaccgagggggaggaccagaucaccgucuggggcuuccacuccgacaacgagauccagauggccaagcuguacggggacagccggccccagaaguucaccuccagcgccaacggcgugacgacccacuacgugucccagaucggcggguuccccaaccagaccgaggacggcgggcugccgcagagcggccgcaucgucguggacuacauggugcagaaguccgggaagaccggcacgaucaccuaccagcggggcauccuccugccccagaaggucuggugcgccagcgggcgcuccaaggugaucaagggcagccugccccucaucggggaggccgacugccugcacgagaaguacggcgggcugaacaagagcaagcccuacuacaccggcgagcacgcgaaggccaucggcaacugcccgaucugggugaagacgccccucaagcuggccaacgggaccaaguaccggccgcccgccaagcugcucaaggagcgcggcuucuucggggccaucgcgggcuuccuggagggcgggugggagggcaugaucgccggguggcacggcuacaccucccacggggcccacggcgucgccguggccgcggaccugaaguccacccaggaggccaucaacaagaucaccaagaaccucaacucccugagcgagcuggaggucaagaaccuccagcggcuguccggcgccauggacgagcugcacaacgagauccucgagcuggacgagaagguggacgaccugcgcgccgacacgaucagcucccagaucgagcucgccgugcugcugagcaacgaggggaucaucaacuccgaggacgagcaccuccuggcgcuggagcggaagcucaagaagaugcugggccccagcgccgucgagaucgggaacggcugcuucgagaccaagcacaagugcaaccagaccugccuggaccgcaucgccgccgggaccuucgacgcgggcgaguucucccuccccaccuucgacagccugaacaucacggccgccucccugaacgacgacggccucgacaaccacaccauccugcuguacuacagcaccgccgccuccagccuggcggugacccucaugaucgccaucuucguggucuacauggugucccgggacaacgugagcugcuccaucugccuguga

SEQ ID NO: 90777 - RNA, 1758 nt, Artificial Sequence; identical to SEQ ID NO: 90776
  derived and/or modified CDS sequence (opt1) from hemagglutinin__InfluenzaB__AFH58469

SEQ ID NO: 90778 - RNA, 1755 nt, Artificial Sequence; identical to SEQ ID NO: 90758
  derived and/or modified CDS sequence (opt1) from hemagglutinin__InfluenzaB__AFH58480

SEQ ID NO: 90779 - RNA, 1755 nt, Artificial Sequence
  derived and/or modified CDS sequence (opt1) from hemagglutinin__InfluenzaB__AFH58502
augaaggccaucaucgugcugcucauggucgugaccagcaacgccgaccgcaucugcaccggcaucacguccagcaacagcccccacguggucaagaccgcgacccagggggaggugaacgugaccggcgucaucccgcugacgaccacccccaccaaguccuacuucgccaaccugaaggggacgcggacccgcggcaagcucugccccgacugccugaacugcaccgaccuggacguggcccucgggcggcccaugugcgugggcaccacgccguccgccaaggccagcauccugcacgagguccgccccgugaccuccggcugcuuccccaucaugcacgaccggaccaagauccgccagcugcccaaccuccugcggggguacgagaacauccgccugagcacccagaacgugaucgacgcggagaaggccccgggcgggcccuaccggcucggcacguccgggagcugccccaacgccaccuccaagaucggcuucuucgccaccauggcgugggccguccccaaggacaacuacaagaacgccaccaacccgcugacgguggaggugcccuacaucugcaccgagggcgaggaccagaucaccgucuggggguuccacagcgacgacaagacccagaugaagucccuguacggcgacagcaacccccagaaguucacguccagcgccaacggggugaccacccacuacgugucccagaucggcgacuuccccgaccagaccgaggacggcgggcucccgcagagcggccgcaucgucguggacuacaugaugcagaagcccgggaagacgggcaccaucguguaccagcgcgggguccugcugccccagaagguguggugcgccuccggccggagcaaggugaucaagggcagccucccccugaucggggaggcggacugccugcacgagaaguacggcgggcucaacaaguccaagccguacuacaccggcgagcacgccaaggccaucgggaacugccccaucugggucaagacgccccugaagcuggccaacggcaccaaguaccggcccccggccaagcuccugaaggagcgcggcuucuucggggcgaucgccggcuuccuggagggcgggugggaggggaugaucgccggcuggcacggcuacaccagccacggggcccacggcguggccgucgcggccgaccucaaguccacccaggaggccaucaacaagaucaccaagaaccugaacagccuguccgagcucgaggugaagaaccugcagcggcugagcggggccauggacgagcuccacaacgagauccuggagcuggacgagaagguggacgaccuccgcgccgacacgaucuccagccagaucgagcuggcgguccugcucuccaacgagggcaucaucaacagcgaggacgagcaccuccuggcccuggagcggaagcugaagaagaugcugggccccuccgccguggacaucgggaacggcugcuucgagaccaagcacaagugcaaccagaccugccucgaccgcaucgccgcggggaccuucaacgccggcgaguucagccugcccaccuucgacucccugaacaucacggccgccagccucaacgacgacgggcuggacaaccacaccauccugcuguacuacuccaccgccgcgagcucccucgccgugacccugaugcuggccaucuucaucgucuacauggugagccgggacaacguguccugcagcaucugccucuga

SEQ ID NO: 90780 - RNA, 1758 nt, Artificial Sequence
  derived and/or modified CDS sequence (opt1) from hemagglutinin__InfluenzaB__AFH58513
augaaggccaucaucgugcugcucauggucgugaccagcaacgccgaccgcaucugcaccggcaucacguccagcaacagcccccacguggucaagaccgcgacccagggggaggugaacgugaccggcgucaucccgcugacgaccacccccaccaagagccacuucgccaaccugaaggggacggagacccggggcaagcucugccccaagugccccaacugcaccgaccuggacguggcccuggggcgcccgaagugcaccggcaagauccccuccgcccgggugagcauccuccacgagguccgccccgugacguccggcugcuuccccaucaugcacgaccggaccaagauccgccagcugccgaaccugcuccggggguacgagcacauccgccugagcacccacaacgugaucaacgccgagaacgcgcccggcgggcccuacaagaucggcaccuccgggagcugccccaacgucacgaacggcaacggcuucuucgccaccauggccugggccgugccgaagaacgacaagaacaagaccgcgaccaacccccugacgaucgaggugcccuacaucugcaccgagggggaggaccagaucaccgucuggggcuuccacuccgacgacgagacccagauggccaagcucuacggggacagcaagccccagaaguucacguccagcgccaacggcgugaccacccacuacgugucccagaucggcggguucccgaaccagaccgaggacggcgggcugccccagagcggccggaucgucguggacuacauggugcagaaguccgggaagacgggcaccaucaccuaccagcgcggcauccugcucccccagaaggucuggugcgccagcgggcgguccaaggugaucaagggcagccugccccugaucggggaggccgacugccuccacgagaaguacggcgggcugaacaagagcaagccguacuacaccggcgagcacgcgaaggccaucggcaacugccccaucugggugaagacgccccugaagcucgccaacgggaccaaguaccggcccccggccaagcugcugaaggagcgcggcuucuucggggccaucgcgggcuuccucgagggcgggugggagggcaugaucgccggguggcacggcuacaccucccacggggcccacggcgucgccguggccgcggaccugaaguccacccaggaggccaucaacaagaucacgaagaaccugaacucccucagcgagcuggaggucaagaaccugcagcgccucuccggcgccauggacgagcugcacaacgagauccuggagcucgacgagaagguggacgaccugcgggccgacaccaucagcucccagaucgagcuggccgugcuccugagcaacgaggggaucaucaacuccgaggacgagcaccuccuggcgcuggagcgcaagcugaagaagaugcucggccccagcgccgucgagaucgggaacggcugcuucgagaccaagcacaagugcaaccagaccugccuggaccggaucgccgccgggaccuucgacgcgggcgaguucucccugcccacguucgacagccucaacaucaccgccgccucccugaacgacgacggccuggacaaccacaccauccuccuguacuacagcaccgccgccuccagccuggcggugacgcugaugaucgccaucuucguggucuacauggugucccgcgacaacgugagcugcuccaucugccucuga

SEQ ID NO: 90781 - RNA, 1758 nt, Artificial Sequence; identical to SEQ ID NO: 90780
  derived and/or modified CDS sequence (opt1) from hemagglutinin__InfluenzaB__AFH58524

SEQ ID NO: 90782 - RNA, 1755 nt, Artificial Sequence
  derived and/or modified CDS sequence (opt1) from hemagglutinin__InfluenzaB__AFH58535
augaaggccaucaucgugcugcucauggucgugaccagcaacgccgaccgcaucugcaccggcaucacguccagcaacagcccccacguggucaagaccgcgacccagggggaggugaacgugaccggcgucaucccgcugacgaccacccccaccaagucccacuucgccaaccugaaggggacgcagacccggggcaagcucugccccaacugcuucaacugcaccgaccuggacguggcccuggggcgccccaagugcaugggcaacaccccguccgccaaggugagcauccuccacgaggucaagcccgccacguccggcugcuuccccaucaugcacgaccggaccaagauccgccagcugcccaaccugcuccggggguacgagaacauccgccugagcaccuccaacgugaucaacaccgagacggcgccgggcgggcccuacaaggugggcaccagcggguccugccccaacgucgccaacggcaacggcuucuucaacaccauggccugggugauccccaaggacaacaacaagaccgccaucaacccggugacggucgaggugcccuacaucugcagcgagggggaggaccagaucaccguguggggcuuccacuccgacgacaagacccagauggagcggcuguacggggacagcaacccccagaaguucaccuccagcgcgaacggcgucacgacccacuacgugucccagaucggcggguuccccaaccagaccgaggacgagggccucaagcagagcgggcgcaucguggucgacuacauggugcagaagccgggcaagaccgggacgaucguguaccagcggggcauccugcugccccagaaggucuggugcgccuccggccgcagcaaggugaucaaggggagccucccccugaucggcgaggccgacugccugcacgagaaguacgggggccucaacaaguccaagcccuacuacaccggggagcacgccaaggccaucggcaacugcccgaucugggucaagacgccccugaagcuggcgaacggcaccaaguaccggccgcccgccaagcuccugaaggagcgcggguucuucggcgccaucgccggguuccuggagggcgggugggagggcaugaucgccggcuggcacggguacaccagccacggcgcgcacgggguggccguggccgccgaccucaaguccacccaggaggccaucaacaagaucaccaagaaccugaacuaccugagcgagcucgaggucaagaaccugcagcggcuguccggcgcgaugaacgagcuccacgacgagauccuggagcuggacgagaagguggacgaccuccgcgccgacaccaucagcucccagaucgagcuggccgugcugcucagcaacgagggcaucaucaacuccgaggacgagcaccuccuggcccuggagcggaagcugaagaagaugcuggggcccagcgccgucgagaucggcaacgggugcuucgagacgaagcacaagugcaaccagaccugccucgaccgcaucgcggccggcaccuucaacgccggggacuucucccugcccaccuucgacagccugaacaucaccgccgcgucccucaacgacgacggccuggacaaccacacgauccugcucuacuacagcaccgccgccuccagccuggccgugacccugaugaucgccaucuucaucguguacauggucucccgggacaacgugagcugcuccaucugccuguga

SEQ ID NO: 90783 - RNA, 1752 nt, Artificial Sequence
  derived and/or modified CDS sequence (opt1) from hemagglutinin__InfluenzaB__AFH58557
augaaggccaucaucgugcugcucauggucgugaccagcaacgccgaccgcaucugcaccggcaucacguccagcaacagcccccacguggucaagaccgcgacccagggggaggugaacgugaccggcgucaucccgcugacgaccacccccaccaagucccacuucgccaaccugaaggggacgaagacccggggcaagcucugccccaacugccugaacugcaccgaccuggacguggcccucgggcgccccaugugcgugggcaccacgccguccgccaaggccagcauccugcacgagguccggcccgugaccuccggcugcuuccccaucaugcacgaccgcaccaagauccggcagcugcccaaccuccugcgcggguacgagaacauccggcugagcacccagaacgugaucaacgcggagcgcgccccgggcgggcccuaccggcucggcacguccgggagcugccccaacgucaccucccgcgacggcuucuucgccaccauggccugggcggugccccgggacaacaagaccgccacgaacccgcugaccguggagguccccuacaucugcaccaagggcgaggaccagaucaccguguggggguuccacagcgacgacaagacgcagaugaagaaccuguacggcgacuccaacccccagaaguucaccagcuccgccaacggggugaccacccacuacgucagccagaucggcggcuuccccaaccagacggaggacgggggccucccgcaguccgggcgcaucgugguggacuacaugguccagaagcccggcaagaccgggaccaucguguaccagcggggcgugcugcugccccagaaggucuggugcgccagcggccgcuccaaggugaucaaggggagccucccccugaucggcgaggccgacugccugcacgagaaguacgggggccucaacaagagcaagccguacuacaccggggagcacgcgaaggccaucggcaacugccccaucugggucaagacgccccugaagcuggccaacggcaccaaguaccggcccccggccaagcuccugaaggagcgcggguucuucggcgccaucgcgggguuccuggagggcgggugggagggcaugaucgccggcuggcacggguacaccucccacggcgcccacgggguggccguggccgcggaccucaagagcacccaggaggccaucaacaagaucacgaagaaccugaacucccugagcgagcucgaggucaagaaccugcagcggcuguccggcgccauggacgagcuccacaacgagauccuggagcuggacgagaagguggacgaccuccgcgccgacaccaucagcucccagaucgagcuggccgugcugcucagcaacgagggcaucaucaacuccgaggacgagcaccuccuggcgcuggagcggaagcugaagaagaugcuggggcccagcgccgucgacaucggcaacgggugcuucgagaccaagcacaagugcaaccagaccugccucgaccgcaucgccgccggcaccuucaacgcgggggaguucuccuuccccacguucgacagccugaacaucaccgccgccucccugaacgacgacggccucgacaaccacaccauccugcuguacuacagcaccgccgccuccagccuggcggugacgcucaugaucgccaucuucaucguguacauggucucccgggacaacgugagcugcuccaucugccuguga

SEQ ID NO: 90784 - RNA, 1755 nt, Artificial Sequence
  derived and/or modified CDS sequence (opt1) from hemagglutinin__InfluenzaB__AFJ76224
augaaggccaucaucgugcugcucauggucgugaccagcaacgccgaccgcaucugcaccggcaucacguccagcaacagcccccacguggucaagaccgcgacccagggggaggugaacgugaccggcgucaucccgcugacgaccacccccaccaagucccacuucgccaaccugaaggggacgaagacccggggcaagcucugcccgaccugccugaacugcaccgaccuggacguggcccucgggucccccaugugcgugggcaucacgcccagcgccaaggccuccauccugcacgagguccgccccgugaccagcggcugcuuccccaucaugcacgaccggaccaagauccgccagcugcccaaccuccugcggggguacgagaagauccgccuguccacccagaacgugaucaacaucgagaaggcgccgggcgggcccuaccggcucggcacgagcggguccugccccaacgccaccagccgcuccggcuucuucgccaccauggccugggcggucccccgggacaacaacaagaccgccacgaacccgcugaccguggaggugccccacaucugcaccaaggaggaggaccagaucaccgucuggggcuuccacagcgacaacaagacgcagaugaagaaccuguacggggacuccaacccccagaaguucaccagcuccgccaacggcgugaccacccacuacgugagccagaucgggggcuuccccgaccagacggaggacggcgggcucccgcaguccggccgcaucgucguggacuacauggugcagaagcccgggaagaccggcaccaucgucuaccagcgggggauccugcugccccagaagguguggugcgccagcggccgcagcaaggugaucaagggcucccucccccugaucggggaggccgacugccugcacgagaaguacggcgggcucaacaagagcaagccguacuacaccggcgagcacgcgaaggccaucgggaacugccccaucugggucaagacgccccugaagcuggccaacggcaccaaguaccggcccccggccaagcuccugaaggagcgcggcuucuucggggccaucgcgggcuuccuggagggcgggugggaggggaugaucgccggcuggcacggcuacaccucccacggggcccacggcguggccgucgccgcggaccucaagagcacccaggaggccaucaacaagaucacgaagaaccugaacucccugagcgagcucgaggugaagaaccugcagcggcuguccggggccauggacgagcuccacaacgagauccuggagcuggacgagaagguggacgaccuccgcgccgacaccaucagcucccagaucgagcuggccguccugcucagcaacgagggcaucaucaacuccgaggacgagcaccuccuggcgcuggagcggaagcugaagaagaugcugggccccagcgccguggacaucgggaacggcugcuucgagaccaagcacaagugcaaccagaccugccucgaccgcaucgccgccgggaccuucaacgcgggcgaguucucccugcccacguucgacagccugaacaucaccgccgccucccucaacgacgacgggcuggacaaccacaccauccugcuguacuacagcaccgccgccuccagccucgcggugacgcugaugaucgccaucuucaucgucuacaugaucucccgggacaacgugagcugcagcaucugccuguga

SEQ ID NO: 90785 - RNA, 1755 nt, Artificial Sequence
  derived and/or modified CDS sequence (opt1) from hemagglutinin__InfluenzaB__AFJ76235
augaaggccaucaucgugcugcucauggucgugaccagcaacgccgaccgcaucugcaccggcaucacguccagcaacagcccccacguggucaagaccgcgacccagggggaggugaacgugaccggcgucaucccgcugacgaccacccccaccaagucccacuucgccaaccugaaggggacgaagacccggggcaagcucugcccgaccugccugaacugcaccgaccuggacguggcccucgggucccccaugugcgugggcaucacgccgagcgccaaggccuccauccugcacgagguccgccccgugaccagccggugcuuccccaucaugcacgaccgcaccaagauccggcagcugcccaaccuccugcgcggcuacgagaagauccggcuguccacccagaacgugaucaacaucgagaaggcgcccgggggccccuaccgccucgggacgagcggcuccugccccaacgccaccagccgguccggguucuucgccaccauggccugggcggucccccgcgacaacaacaagaccgccacgaacccgcugaccguggaggugccccacaucugcaccaaggaggaggaccagaucaccgucuggggcuuccacagcgacaacaagacgcagaugaagaaccuguacggcgacuccaacccccagaaguucaccagcuccgccaacggggugaccacccacuacgugagccagaucggcggguuccccgaccagacggaggacggcggccucccgcaguccgggcggaucgucguggacuacauggugcagaagcccggcaagaccgggaccaucgucuaccagcgcggcauccugcugccccagaagguguggugcgccagcgggcggagcaaggugaucaagggcucccucccccugaucggcgaggccgacugccugcacgagaaguacgggggccucaacaagagcaagccguacuacaccggggagcacgcgaaggccaucggcaacugccccaucugggucaagacgccccugaagcuggccaacgggaccaaguaccggcccccggccaagcuccugaaggagcgcggcuucuucggcgccaucgcgggguuccuggagggcgggugggagggcaugaucgccggguggcacggcuacaccucccacggcgcccacgggguggccgucgccgcggaccucaagagcacccaggaggccaucaacaagaucacgaagaaccugaacucccugagcgagcucgaggugaagaaccugcagcgccuguccggcgccauggacgagcuccacaacgagauccuggagcuggacgagaagguggacgaccuccgggccgacaccaucagcucccagaucgagcuggccguccugcucagcaacgaggggaucaucaacuccgaggacgagcaccuccuggcgcuggagcgcaagcugaagaagaugcugggccccagcgccguggacaucggcaacgggugcuucgagaccaagcacaagugcaaccagaccugccucgaccggaucgccgccggcaccuucaacgcgggggaguucucccugcccacguucgacagccugaacaucaccgccgccucccucaacgacgacggccuggacaaccacaccauccugcuguacuacagcaccgccgccuccagccucgcggugacgcugaugaucgccaucuucaucgucuacaugaucucccgcgacaacgugagcugcagcaucugccuguga

SEQ ID NO: 90786 - RNA, 1755 nt, Artificial Sequence; identical to SEQ ID NO: 90784
  derived and/or modified CDS sequence (opt1) from hemagglutinin__InfluenzaB__AFJ76246

SEQ ID NO: 90787 - RNA, 1758 nt, Artificial Sequence; identical to SEQ ID NO: 90538
  derived and/or modified CDS sequence (opt1) from hemagglutinin__InfluenzaB__AFJ76268

SEQ ID NO: 90788 - RNA, 1758 nt, Artificial Sequence; identical to SEQ ID NO: 90589
  derived and/or modified CDS sequence (opt1) from hemagglutinin__InfluenzaB__AFJ76301

SEQ ID NO: 90789 - RNA, 1755 nt, Artificial Sequence; identical to SEQ ID NO: 90450
  derived and/or modified CDS sequence (opt1) from hemagglutinin__InfluenzaB__AFJ76323

SEQ ID NO: 90790 - RNA, 1758 nt, Artificial Sequence
  derived and/or modified CDS sequence (opt1) from hemagglutinin__InfluenzaB__AFJ76334
augaaggccaucaucgugcugcucauggucgugaccagcaacgccgaccgcaucugcaccggcaucacguccagcaacagcccccacguggucaagaccgcgacccagggggaggugaacgugaccggcgucaucccgcugacgaccacccccaccaagagccacuucgccaaccugaaggggacggagacccggggcaagcucugccccaagugccugaacugcaccgaccuggacguggcccucgggcgccccaagugcaccggcaacaucccguccgcccgggugagcauccugcacgagguccgccccgugacguccggcugcuuccccaucaugcacgaccggaccaagauccgccagcugcccaaccuccugcggggguacgagcacauccgccugagcacccacaacgugaucaacgccgagaacgcgccgggcgggcccuacaagaucggcaccuccgggagcugccccaacgucacgaacggcaacggcuucuucgccaccauggccugggccgugcccaagaacgacaacaacaagaccgcgaccaacucccucacgaucgaggugccguacaucugcaccgagggggaggaccagaucaccgucuggggcuuccacagcgacuccgagacccagauggccaagcuguacggggacagcaagccccagaaguucacguccagcgccaacggcgugaccacccacuacgugucccagaucggcggguuccccaaccagaccgaggacggcgggcugccccagagcggccggaucgucguggacuacauggugcagaaguccgggaagacgggcaccaucaccuaccagcgcggcauccuccugccgcagaaggucuggugcgccagcgggcggagcaaggugaucaagggcucccugccccucaucggggaggccgacugccugcacgagaaguacggcgggcugaacaagagcaagcccuacuacaccggcgagcacgcgaaggccaucggcaacugccccaucugggugaagacgccgcucaagcuggccaacgggaccaaguaccgcccgcccgccaagcugcucaaggagcggggcuucuucggggccaucgcgggcuuccuggagggcggguggaagggcaugaucgccggguggcacggcuacaccucccacggggcccacggcgucgccguggccgcggaccugaaguccacccaggaggccaucaacaagaucacgaagaaccucaacucccugagcgagcuggaggucaagaaccuccagcgccuguccggcgccauggacgagcugcacaacgagauccucgagcuggacgagaagguggacgaccugcgggccgacaccaucagcucccagaucgagcucgccgugcugcugagcaacgaggggaucaucaacuccgaggacgagcaccuccuggcgcuggagcgcaagcucaagaagaugcugggccccagcgccgucgagaucgggaacggcugcuucgagaccaagcacaagugcaaccagaccugccuggaccggaucgccgccgggaccuucgacgcgggcgaguucucccuccccacguucgacagccugaacaucaccgccgccucccugaacgacgacggccucgacaaccacaccauccugcuguacuacagcaccgccgccuccagccuggcggugacgcucaugaucgccguguucgucguguacauggugucccgcgacaacgucagcugcagcaucugccuguga

SEQ ID NO: 90791 - RNA, 1758 nt, Artificial Sequence; identical to SEQ ID NO: 90538
  derived and/or modified CDS sequence (opt1) from hemagglutinin__InfluenzaB__AFJ77327

SEQ ID NO: 90792 - RNA, 1755 nt, Artificial Sequence; identical to SEQ ID NO: 90450
  derived and/or modified CDS sequence (opt1) from hemagglutinin__InfluenzaB__AFJ77369

SEQ ID NO: 90793 - RNA, 1755 nt, Artificial Sequence; identical to SEQ ID NO: 90450
  derived and/or modified CDS sequence (opt1) from hemagglutinin__InfluenzaB__AFJ77380

SEQ ID NO: 90794 - RNA, 1755 nt, Artificial Sequence
  derived and/or modified CDS sequence (opt1) from hemagglutinin__InfluenzaB__AFJ80139
augaaggccaucaucgugcugcucauggucgugaccagcaacgccgaccgcaucugcaccggcaucacguccagcaacagcccccacguggucaagaccgcgacccagggggaggugaacgugaccggcgucaucccgcugacgaccacccccaccaagucccacuucgccaaccugaaggggacgaagacccggggcaagcucugcccgaccugccugaacugcaccgaccuggacguggcccucgggcgccccaugugcgugggcaucacgcccuccgccaaggccagcauccugcacgagguccggcccgugaccuccggcugcuuccccaucaugcacgaccgcaccaagauccggcagcugcccaaccuccugcgcggguacgagaagauccggcugagcacccagaacgugaucaacgcggagaaggccccgggcgggcccuaccgccucggcacguccgggagcugccccaacgccaccucccggagcggcuucuucgccaccauggcgugggccgucccccgcgacaacaacaagaccgccacgaacccgcugaccguggaggugcccuacaucugcaccaaggaggaggaccagaucaccgucuggggcuuccacuccgacaacaagacgcagaugaagaaccuguacggggacagcaacccccagaaguucaccuccagcgccaacggcgugaccacccacuacgugucccagaucgggggcuuccccgaccagacggaggacggcgggcucccgcagagcggccggaucgucguggacuacauggugcagaagcccgggaagaccggcaccaucgucuaccagcgcgggauccugcugccccagaagguguggugcgccuccggccggagcaaggugaucaagggcuuccucccccugaucggggaggcggacugccugcacgagaaguacggcgggcucaacaagagcaagccguacuacaccggcgagcacgccaaggccaucgggaacugccccaucugggucaagacgccccugaagcuggccaacggcaccaaguaccggcccccggccaagcuccugaaggagcgcggcuucuucggggcgaucgccggcuuccuggagggcgggugggaggggaugaucgccggcuggcacggcuacaccucccacggggcccacggcguggccgucgcggccgaccucaagagcacccaggaggccaucaacaagaucacgaagaaccugaacucccugagcgagcucgaggugaagaaccugcagcgccuguccggggccauggacgagcuccacaacgagauccuggagcuggacgagaagguggacgaccuccgggccgacaccaucagcucccagaucgagcuggcgguccugcucagcaacgagggcaucaucaacuccgaggacgagcaccuccuggcccuggagcgcaagcugaagaagaugcugggccccagcgccguggacaucgggaacggcugcuucgagaccaagcacaagugcaaccagaccugccucgaccggaucgccgcggggaccuucaacgccggcgaguucucccugcccacguucgacagccugaacaucaccgccgccucccucaacgacgacgggcuggacaaccacaccauccugcuguacuacagcaccgccgcguccagccucgccgugacgcugaugaucgccaucuucaucgucuacaugaucucccgcgacaacgugagcugcuccaucugccuguga

SEQ ID NO: 90795 - RNA, 1755 nt, Artificial Sequence
  derived and/or modified CDS sequence (opt1) from hemagglutinin__InfluenzaB__AFJ80150
augaaggccaucaucgugcugcucauggucgugaccagcaacgccgaccgcaucugcaccggcaucacguccagcaacagcccccacguggucaagaccgcgacccagggggaggugaacgugaccggcgucaucccgcugacgaccacccccaccaagucccacuucgccaaccugaaggggacgaagacccggggcaagcucugcccgaccugccugaacugcaccgaccuggacguggcccucgggcgccccaugugcgugggcaucacgcccuccgccaaggccagcauccugcacgagguccggcccgugaccuccggcugcuuccccaucaugcacgaccgcaccaagauccggcagcugcccaaccuccugcgcggguacgagaagauccggcugagcacccagaacgugaucaacgcggagaaggccccgggcgggcccuaccgccucggcacguccgggagcugccccaacgccaccucccggagcggcuucuucgccaccauggcgugggccgucccccgcgacaacaacaagaccgccacgaacccgcugaccguggaggugcccuacaucugcaccaaggaggaggaccagaucaccgucuggggcuuccacuccgacaacaagacgcagaugaagaaccuguacggggacagcaacccccagaaguucaccuccagcgccaacggcgugaccacccacuacgugucccagaucgggggcuuccccgaccagacggaggacggcgggcucccgcagagcggccggaucgucguggacuacauggugcagaagcccgggaagaccggcaccaucgucuaccagcgcgggauccugcugccccagaagguguggugcgccuccggccggagcaaggugaucaagggcagccucccccugaucggggaggcggacugccugcacgagaaguacggcgggcucaacaaguccaagccguacuacaccggcgagcacgccaaggccaucgggaacugccccaucugggucaagacgccccugaagcuggccaacggcaccaaguaccggcccccggccaagcuccugaaggagcgcggcuucuucggggcgaucgccggcuuccuggagggcgggugggaggggaugaucgccggcuggcacggcuacaccagccacggggcccacggcguggccgucgcggccgaccucaaguccacccaggaggccaucaacaagaucacgaagaaccugaacagccuguccgagcucgaggugaagaaccugcagcgccugagcggggccauggacgagcuccacaacgagauccuggagcuggacgagaagguggacgaccuccgggccgacaccaucuccagccagaucgagcuggcgguccugcucuccaacgagggcaucaucaacagcgaggacgagcaccuccuggcccuggagcgcaagcugaagaagaugcugggccccuccgccguggacaucgggaacggcugcuucgagaccaagcacaagugcaaccagaccugccucgaccggaucgccgcggggaccuucaacgccggcgaguucagccugcccacguucgacucccugaacaucaccgccgccagccucaacgacgacgggcuggacaaccacaccauccugcuguacuacuccaccgccgcgagcucccucgccgugacgcugaugaucgccaucuucaucgucuacaugaucagccgcgacaacguguccugcagcaucugccuguga

SEQ ID NO: 90796 - RNA, 1755 nt, Artificial Sequence
  derived and/or modified CDS sequence (opt1) from hemagglutinin__InfluenzaB__AFJ80161
augaaggccaucaucgugcugcucauggucgugaccagcaacgccgaccgcaucugcaccggcaucacguccagcaacagcccccacguggucaagaccgcgacccagggggaggugaacgugaccggcgccaucccgcugacgaccacccccaccaagucccacuucgccaaccugaaggggacgaagacccggggcaagcucugcccgaccugccugaacugcaccgaccuggacgucgcccucgggcgccccaugugcgugggcaucacgcccuccgccaaggcgagcauccugcacgaggugcggcccgucaccuccggcugcuuccccaucaugcacgaccgcaccaagauccggcagcugcccaaccuccugcgcggguacgagaagauccggcugagcacccagaacgugaucaacgccgagaaggccccgggcgggcccuaccgccucggcacguccgggagcugccccaacgccaccucccggagcggcuucuucgcgaccauggccugggccgugccccgcgacaacaacaagaccgccacgaacccgcugaccgucgaggugccccacaucugcaccaaggaggaggaccagaucaccguguggggcuuccacuccgacaacaagacgcagaugaagaaccuguacggggacagcaacccccagaaguucaccuccagcgccaacggcaucaccacccacuacgucucccagaucgggggcuuccccgaccagacggaggacggcgggcucccgcagagcggccggaucgugguggacuacaugguccagaagcccgggaagaccggcaccaucguguaccagcgcgggauccugcugccccagaagguguggugcgcguccggccggagcaaggucaucaagggcagccucccccugaucggggaggccgacugccugcacgagaaguacggcgggcucaacaaguccaagccguacuacaccggcgagcacgccaaggccaucgggaacugccccaucugggugaagacgccccugaagcuggccaacggcaccaaguaccggcccccggcgaagcuccugaaggagcgcggcuucuucggggccaucgccggcuuccuggagggcgggugggaggggaugaucgccggcuggcacggcuacaccagccacggggcccacggcguggcggucgccgccgaccucaaguccacccaggaggccaucaacaagaucacgaagaaccugaacagccuguccgagcucgaggugaagaaccugcagcgccugagcggggccauggacgagcuccacaacgagauccuggagcuggacgagaaggucgacgaccuccgggcggacaccaucuccagccagaucgagcuggccgugcugcucuccaacgagggcaucaucaacagcgaggacgagcaccuccuggcccuggagcgcaagcugaagaagaugcugggccccuccgccguggacaucgggaacggcugcuucgagaccaagcacaagugcaaccagaccugccucgaccggaucgcggccgggaccuucaacgccggcgaguucagccugcccacguucgacucccugaacaucaccgccgccagccucaacgacgacgggcuggacaaccacaccauccugcuguacuacuccaccgcggccagcucccucgccgucacgcugaugaucgccaucuucaucguguacaugaucuuccgcgacaacgugagcugcuccaucugccuguga

SEQ ID NO: 90797 - RNA, 1755 nt, Artificial Sequence
  derived and/or modified CDS sequence (opt1) from hemagglutinin__InfluenzaB__AFJ80172
augaaggccaucaucgugcugcucauggucgugaccagcaacgccgaccgcaucugcaccggcaucacguccagcaacagcccccacguggucaagaccgcgacccagggggaggugaacgugaccggcgucaucccgcugacgaccacccccaccaagucccacuucgccaaccugaaggggacgaagacccggggcaagcucugcccgaccugccugaacugcaccgaccuggacguggcccucgggcgccccaugugcgugggcaucacgcccuccgccaaggccagcauccugcacgagguccggcccgugaccuccggcugcuuccccaucaugcacgaccgcaccaagauccggcagcugcccaaccuccugcgcggguacgagaagauccggcugagcacccagaacgugaucaacgcggagaaggccccgggcgggcccuaccgccucggcacguccgggagcugccccaacgccaccucccggagcggcuucuucgccaccauggcgugggccgucccccgcgacaacaacaagaccgccacgaacccgcugaccguggaggugcccuacaucugcaccaaggaggaggaccagaucaccgucuggggcuuccacuccgacaacaagacgcagaugaagaaccuguacggggacagcaacccccagaaguucaccuccagcgccaacggcgugaccacccacuacgugucccagaucggggacuuccccgaccagacggaggacggcggccucccgcagagcgggcggaucgucguggacuacauggugcagaagcccggcaagaccgggaccaucgucuaccagcgcggcauccugcugccccagaagguguggugcgccuccgggcggagcaaggugaucaagggcagccucccccugaucggcgaggcggacugccugcacgagaaguacgggggccucaacaaguccaagccguacuacaccggggagcacgccaaggccaucggcaacugccccaucugggucaagacgccccugaagcuggccaacgggaccaaguaccggcccccggccaagcuccugaaggagcgcggcuucuucggcgcgaucgccggguuccuggagggcgggugggagggcaugaucgccggguggcacggcuacaccagccacggcgcccacgggguggccgucgcggccgaccucaaguccacccaggaggccaucaacaagaucacgaagaaccugaacagccuguccgagcucgaggugaagaaccugcagcgccugagcggcgccauggacgagcuccacaacgagauccuggagcuggacgagaagguggacgaccuccgggccgacaccaucuccagccagaucgagcuggcgguccugcucuccaacgaggggaucaucaacagcgaggacgagcaccuccuggcccuggagcgcaagcugaagaagaugcugggccccuccgccguggacaucggcaacgggugcuucgagaccaagcacaagugcaaccagaccugccucgaccggaucgccgcgggcaccuucaacgccggggaguucagccugcccacguucgacucccugaacaucaccgccgccagccucaacgacgacggccuggacaaccacaccauccugcuguacuacuccaccgccgcgagcucccucgccgugacgcugaugaucgccaucuucaucgucuacaugaucagccgcgacaacguguccugcagcaucugccuguga

SEQ ID NO: 90798 - RNA, 1755 nt, Artificial Sequence; identical to SEQ ID NO: 90784
  derived and/or modified CDS sequence (opt1) from hemagglutinin__InfluenzaB__AFJ80183

SEQ ID NO: 90799 - RNA, 1755 nt, Artificial Sequence; identical to SEQ ID NO: 90795
  derived and/or modified CDS sequence (opt1) from hemagglutinin__InfluenzaB__AFJ80194

SEQ ID NO: 90800 - RNA, 1755 nt, Artificial Sequence; identical to SEQ ID NO: 90784
  derived and/or modified CDS sequence (opt1) from hemagglutinin__InfluenzaB__AFJ80205

SEQ ID NO: 90801 - RNA, 1755 nt, Artificial Sequence; identical to SEQ ID NO: 90429
  derived and/or modified CDS sequence (opt1) from hemagglutinin__InfluenzaB__AFJ80216

SEQ ID NO: 90802 - RNA, 1755 nt, Artificial Sequence; identical to SEQ ID NO: 90784
  derived and/or modified CDS sequence (opt1) from hemagglutinin__InfluenzaB__AFJ80227

SEQ ID NO: 90803 - RNA, 1758 nt, Artificial Sequence
  derived and/or modified CDS sequence (opt1) from hemagglutinin__InfluenzaB__AFJ80238
augaaggccaucaucgugcugcucauggucgugaccagcaacgccgaccgcaucugcaccggcaucacguccagcaacagcccccacguggucaagaccgcgacccagggggaggugaacgugaccggcgucaucccgcugacgaccacccccaccaagagccacuucgccaaccugaaggggacgaagacccggggcaagcucugccccaagugccugaacugcaccgaccuggacguggcccucgggcgccccaagugcaccggcaacaucccguccgccaaggugagcauccugcacgagguccggcccgugacguccggcugcuuccccaucaugcacgaccgcaccaagauccggcagcugcccaaccuccugcgcggguacgagcacauccggcugagcauccacaacgugaucaacgccgagaaggcgccgggcgggcccuacaagaucggcaccuccgggagcugccccaacgucaccaacggcaacggcuucuucgccacgauggccugggccgugcccaagaacgacaacaacaagaccgcgaccaacucccucaccaucgaggugccguacaucugcacggagggggaggaccagaucaccgucuggggcuuccacagcgacaacgagacccagauggccaagcuguacggggacuccaagccccagaaguucaccagcuccgccaacggcgugacgacccacuacgugagccagaucggcggguuccccaaccagaccgaggacggcgggcugccccaguccggccgcaucgucguggacuacauggugcagaaguccgggaagaccggcacgaucaccuaccagcggggcauccuccugccgcagaaggucuggugcgccuccgggcgcagcaaggugaucaagggcagccugccccucaucggggaggccgacugccugcacgagaaguacggcgggcugaacaaguccaagcccuacuacaccggcgagcacgcgaaggccaucggcaacugccccaucugggugaagaccccgcucaagcuggccaacgggacgaaguaccggccgcccgccaagcugcucaaggagcgcggcuucuucggggccaucgcgggcuuccuggagggcgggugggagggcaugaucgccggguggcacggcuacaccagccacggggcccacggcgucgccguggccgcggaccugaaguccacccaggaggccaucaacaagaucaccaagaaccucaacagccuguccgagcuggaggucaagaaccuccagcggcugagcggcgccauggacgagcugcacaacgagauccucgagcuggacgagaagguggacgaccugcgcgccgacacgaucuccagccagaucgagcucgccgugcugcuguccaacgaggggaucaucaacagcgaggacgagcaccuccuggcgcuggagcggaagcucaagaagaugcugggccccuccgccgucgagaucgggaacggcugcuucgagaccaagcacaagugcaaccagaccugccuggaccgcaucgccgccgggaccuucgacgcgggcgaguucagccuccccaccuucgacucccugaacaucacggccgccagccugaacgacgacggccucgacaaccacaccauccugcuguacuacuccaccgccgccagcucccuggcggugacccucaugaucgccaucuucguggucuacauggugagccgggacaacguguccugcagcaucugccuguga

SEQ ID NO: 90804 - RNA, 1755 nt, Artificial Sequence
  derived and/or modified CDS sequence (opt1) from hemagglutinin__InfluenzaB__AFJ80656
augaaggccaucaucgugcugcucauggucgugaccagcaacgccgaccgcaucugcaccggcaucacguccagcaacagcccccacgugguccggaccgcgacccagggggaggugaacgugaccggcgucaucccgcugacgaccacccccaccaagucccacuucgccaaccugaaggggacgaagacccgcggcaagcucugcccgaccugccugaacugcaccgaccuggacguggcccucgggcggcccaugugcgugggcaucacgcccuccgccaaggccagcauccugcacgagguccgccccgugaccuccggcugcuuccccaucaugcacgaccggaccaagauccgccagcugcccaaccuccugcggggguacgagaagauccgccugagcacccagaacgugaucaacgcggagaaggccccgggcgggcccuaccggcucggcacguccgggagcugccccaacgccaccucccgcagcggcuucuucgccaccauggcgugggccgucccccgggacaacaacaagaccgccacgaacccgcugaccguggaggugccccacaucugcaccaaggaggaggaccagaucaccgucuggggcuuccacuccgacaacaagacgcagaugaagaaccuguacggggacagcaacccccagaaguucaccuccagcgccaacggcgugaccacccacuacgugucccagaucgggggcuuccccgaccagacggaggacggcgggcucccgcagagcggccgcaucgucguggacuacauggugcagaagcccgggaagaccggcaccaucgucuaccagcgggggauccugcugccccagaagguguggugcgccuccggccgcagcaaggugaucaagggcagccucccccugaucggggaggcggacugccugcacgagaaguacggcgggcucaacaaguccaagccguacuacaccggcgagcacgccaaggccaucgggaacugccccaucugggucaagacgccccugaagcuggccaacggcaccaaguaccggcccccggccaagcuccugaaggagcgcggcuucuucggggcgaucgccggcuuccuggagggcgggugggaggggaugaucgccggcuggcacggcuacaccagccacggggcccacggcguggccgucgcggccgaccucaaguccacccaggaggccaucaacaagaucacgaagaaccugaacagccuguccgagcucgaggugaagaaccugcagcggcugagcggggccauggacgagcuccacaacgagauccuggagcuggacgagaagguggacgaccuccgcgccgacaccaucuccagccagaucgagcuggcgguccugcucuccaacgagggcaucaucaacagcgaggacgagcaccuccuggcccuggagcggaagcugaagaagaugcugggccccuccgccguggacaucgggaacggcugcuucgagaccaagcacaagugcaaccagaccugccucgaccgcaucgccgcggggaccuucaacgccggcgaguucagccugcccacguucgacucccugaacaucaccgccgccagccucaacgacgacgggcuggacaaccacaccauccugcuguacuacuccaccgccgcgagcucccucgccgugacgcugaugaucgccaucuucaucgucuacaugaucagccgggacaacguguccugcagcaucugccuguga

SEQ ID NO: 90805 - RNA, 1755 nt, Artificial Sequence; identical to SEQ ID NO: 90784
  derived and/or modified CDS sequence (opt1) from hemagglutinin__InfluenzaB__AFJ80667

SEQ ID NO: 90806 - RNA, 1755 nt, Artificial Sequence; identical to SEQ ID NO: 90784
  derived and/or modified CDS sequence (opt1) from hemagglutinin__InfluenzaB__AFJ80678

SEQ ID NO: 90807 - RNA, 1755 nt, Artificial Sequence; identical to SEQ ID NO: 90784
  derived and/or modified CDS sequence (opt1) from hemagglutinin__InfluenzaB__AFJ80689

SEQ ID NO: 90808 - RNA, 1755 nt, Artificial Sequence
  derived and/or modified CDS sequence (opt1) from hemagglutinin__InfluenzaB__AFJ80711
augaaggccaucaucgugcugcucauggucgugaccagcaacgccgaccgcaucugcaccggcaucacguccagcaacagcccccacguggucaagaccgcgacccagggggaggugaacgugaccggcgucaucccgcugacgaccacccccaucaaguccuacuucgccaaccugaaggggaccaagacgcggggcaagcucugccccgacugccugaacugcaccgaccuggacguggcccucgggcgccccaugugcgugggcaccaccccguccgccaaggccagcauccugcacgagguccggcccgugacguccggcugcuuccccaucaugcacgaccgcaccaagauccggcagcugcccaaccuccugcgcggguacgagaacauccggcugagcacccagaacgugaucgacgcggagaaggccccgggcgggcccuaccgccucggcaccuccgggagcugccccaacgccacguccaagagcggcuucuucgccaccauggcgugggccguccccaaggacaacaacaagaacgccaccaacccgcugaccguggaggugcccuacgucugcacggagggcgaggaccagaucaccguguggggguuccacuccgacaacaagacccagaugaagaaccuguacggcgacagcaacccccagaaguucaccuccagcgccaacggggugacgacccacuacgucucccagaucggcggcuuccccgaccagaccgaggacgggggccucccgcagagcgggcggaucgugguggacuacaugguccagaagcccggcaagaccgggacgaucguguaccagcgcggcgugcugcugccccagaaggucuggugcgccuccggccggagcaaggugaucaaggggagccucccccugaucggcgaggcggacugccugcacgagaaguacgggggccucaacaaguccaagccguacuacaccggggagcacgccaaggccaucggcaacugccccaucugggucaagacgccccugaagcuggccaacggcaccaaguaccggcccccggccaagcuccugaaggagcgcggguucuucggcgcgaucgccggguuccuggagggcgggugggagggcaugaucgccggcuggcacggguacaccagccacggcgcccacgggguggccguggcggccgaccucaaguccacccaggaggccaucaacaagaucaccaagaaccugaacagccuguccgagcucgaggucaagaaccugcagcgccugagcggcgccauggacgagcuccacaacgagauccuggagcuggacgagaagguggacgaccuccgggccgacaccaucuccagccagaucgagcuggcggugcugcucuccaacgagggcaucaucaacagcgaggacgagcaccuccuggcccuggagcgcaagcugaagaagaugcuggggcccuccgccgucgacaucggcaacgggugcuucgagacgaagcacaagugcaaccagaccugccucgaccggaucgccgcgggcaccuucaacgccggggaguucagccugcccaccuucgacucccugaacaucaccgccgccagccucaacgacgacggccuggacaaccacacgauccugcuguacuacuccaccgccgcgagcucccucgccgugacccugaugcuggccaucuucaucguguacauggucagccgcgacaacguguccugcagcaucugccucuga

SEQ ID NO: 90809 - RNA, 1755 nt, Artificial Sequence; identical to SEQ ID NO: 90808
  derived and/or modified CDS sequence (opt1) from hemagglutinin__InfluenzaB__AFJ80722

SEQ ID NO: 90810 - RNA, 1755 nt, Artificial Sequence
  derived and/or modified CDS sequence (opt1) from hemagglutinin__InfluenzaB__AFJ80733
augaaggccaucaucgugcugcucauggucgugaccagcaacgccgaccgcaucugcaccggcaucacguccagcaacagcccccacguggucaagaccgcgacccagggggaggugaacgugaccggcgucaucccgcugacgaccacccccaccaaguccuacuucgccaaccugaaggggacgcggacccgcggcaagcucugccccgacugccugaacugcaccgaccuggacguggcccucgggcggcccaugugcaugggcaccacgccguccgccaaggccagcauccugcacgaggugcgccccgucaccuccggcugcuuccccaucaugcacgaccggaccaagauccgccagcugcccaaccuccugcggggguacgagaacauccgccugagcacccagaacgugaucgacgcggagaaggccccgggcgggcccuaccggcucggcacguccgggagcugccccgacgccaccaacaaguccggcuucuucgccaccauggcgugggccgugcccaaggacaacaacaagaacgccaccaacccgcugacggucgaggugcccuacaucugcaccgagggcgaggaccagaucaccguguggggguuccacagcgacaacaagacccagaugaagaaccuguacggcgacuccaacccccagaaguucacgagcuccgccaacggggucaccacccacuacgugagccagaucggcggcuuccccgaccagaccgaggacgggggccucccgcaguccgggcgcaucguggucgacuacaugaugcagaagcccggcaagacggggaccaucguguaccagcggggcgugcugcugccccagaaggucuggugcgccagcggccgcuccaaggugaucaaggggagccucccccugaucggcgaggcggacugccugcacgagaaguacgggggccucaacaagagcaagccguacuacaccggggagcacgccaaggccaucggcaacugccccaucugggugaagacgccccugaagcuggccaacggcaccaaguaccggcccccggccaagcuccugaaggagcgcggguucuucggcgcgaucgccggguuccuggagggcgggugggagggcaugaucgccggcuggcacggguacaccucccacggcgcccacggggucgccguggcggccgaccucaagagcacccaggaggccaucaacaagaucaccaagaaccugaacucccugagcgagcucgaggucaagaaccugcagcggcuguccggcgccauggacgagcuccacaacgagauccuggagcuggacgagaagguggacgaccuccgcgccgacacgaucagcucccagaucgagcuggcggugcugcucagcaacgagggcaucaucaacuccgaggacgagcaccuccuggcccuggagcggaagcugaagaagaugcuggggcccagcgccgucgacaucggcaacgggugcuucgagaccaagcacaagugcaaccagaccugccucgaccgcaucgccgcgggcaccuucaacgccggggaguucucccugcccaccuucgacagccugaacaucacggccgccucccucaacgacgacggccuggacaaccacaccauccugcuguacuacagcaccgccgcguccagccucgccgugacccugaugcuggccaucuucaucguguacauggucucccgggacaacgugagcugcuccaucugccucuga

SEQ ID NO: 90811 - RNA, 1758 nt, Artificial Sequence; identical to SEQ ID NO: 90538
  derived and/or modified CDS sequence (opt1) from hemagglutinin__InfluenzaB__AFJ80744

SEQ ID NO: 90812 - RNA, 1758 nt, Artificial Sequence; identical to SEQ ID NO: 90538
  derived and/or modified CDS sequence (opt1) from hemagglutinin__InfluenzaB__AFJ80755

SEQ ID NO: 90813 - RNA, 1758 nt, Artificial Sequence; identical to SEQ ID NO: 90538
  derived and/or modified CDS sequence (opt1) from hemagglutinin__InfluenzaB__AFJ80781

SEQ ID NO: 90814 - RNA, 1758 nt, Artificial Sequence; identical to SEQ ID NO: 90538
  derived and/or modified CDS sequence (opt1) from hemagglutinin__InfluenzaB__AFJ80792

SEQ ID NO: 90815 - RNA, 1758 nt, Artificial Sequence; identical to SEQ ID NO: 90538
  derived and/or modified CDS sequence (opt1) from hemagglutinin__InfluenzaB__AFJ80803

SEQ ID NO: 90816 - RNA, 1758 nt, Artificial Sequence; identical to SEQ ID NO: 90538
  derived and/or modified CDS sequence (opt1) from hemagglutinin__InfluenzaB__AFJ80814

SEQ ID NO: 90817 - RNA, 1758 nt, Artificial Sequence
  derived and/or modified CDS sequence (opt1) from hemagglutinin__InfluenzaB__AFJ80825
augaaggccaucaucgugcugcucauggucgugaccagcaacgccgaccgcaucugcaccggcaucacguccagcaacagcccccacguggucaagaccgcgacccagggggaggugaacgugaccggcgucaucccgcugacgaccacccccaccaagagccacuucgccaaccugaaggggacggagacccggggcaagcucugccccaagugccugaacugcaccgaccuggacguggcccucgggcgccccaagugcaccggcaacaucccguccgcccgggugagcauccugcacgagguccgccccaucacguccggcugcuuccccaucaugcacgaccggaccaagauccgccagcugcccaaccuccugcggggguacgagcacauccgccugagcacccacaacgugaucaacgccgagaacgcgccgggcgggcccuacaagaucggcaccuccgggagcugccccaacgugacgaacggcaacggcuucuucgccaccauggccugggccguccccaagaacgacaacaacaagaccgcgaccaacucccucacgaucgaggugccguacaucugcaccgagggggaggaccagaucaccguguggggcuuccacagcgacaacgagacccagauggccaagcuguacggggacuccaagccccagaaguucacgagcuccgccaacggcgucaccacccacuacgugagccagaucggcggguuccccaaccagaccgaggacggcgggcugccccaguccggccggaucguggucgacuacauggugcagaaguccgggaagacgggcaccaucaccuaccagcgcggcauccuccugccgcagaagguguggugcgccuccgggcggagcaaggucaucaagggcagccugccccucaucggggaggccgacugccugcacgagaaguacggcgggcugaacaaguccaagcccuacuacaccggcgagcacgcgaaggccaucggcaacugccccaucugggugaagacgccgcucaagcuggccaacgggaccaaguaccgcccgcccgccaagcugcucaaggagcggggcuucuucggggccaucgcgggcuuccuggagggcgggugggagggcaugaucgccggguggcacggcuacaccagccacggggcccacggcguggccgucgccgcggaccugaaguccacccaggaggccaucaacaagaucacgaagaaccucaacagccuguccgagcuggaggugaagaaccuccagcgccugagcggcgccauggacgagcugcacaacgagauccucgagcuggacgagaaggucgacgaccugcgggccgacaccaucuccagccagaucgagcucgccgugcugcuguccaacgaggggaucaucaacagcgaggacgagcaccuccuggcgcuggagcgcaagcucaagaagaugcugggccccuccgccguggagaucgggaacggcugcuucgagaccaagcacaagugcaaccagaccugccuggaccggaucgccgccgggaccuucgacgcgggcgaguucagccuccccacguucgacucccugaacaucaccgccgccagccugaacgacgacggccucgacaaccacaccauccugcuguacuacuccaccgccgccagcucccuggcggucacgcucaugaucgccaucuucgugguguacauggucagccgcgacaacguguccugcagcaucugccuguga

SEQ ID NO: 90818 - RNA, 1758 nt, Artificial Sequence; identical to SEQ ID NO: 90538
  derived and/or modified CDS sequence (opt1) from hemagglutinin__InfluenzaB__AFJ80836

SEQ ID NO: 90819 - RNA, 1758 nt, Artificial Sequence; identical to SEQ ID NO: 90606
  derived and/or modified CDS sequence (opt1) from hemagglutinin__InfluenzaB__AFJ80847

SEQ ID NO: 90820 - RNA, 1758 nt, Artificial Sequence; identical to SEQ ID NO: 90538
  derived and/or modified CDS sequence (opt1) from hemagglutinin__InfluenzaB__AFJ80858

SEQ ID NO: 90821 - RNA, 1758 nt, Artificial Sequence; identical to SEQ ID NO: 90538
  derived and/or modified CDS sequence (opt1) from hemagglutinin__InfluenzaB__AFJ80869

SEQ ID NO: 90822 - RNA, 1758 nt, Artificial Sequence; identical to SEQ ID NO: 90538
  derived and/or modified CDS sequence (opt1) from hemagglutinin__InfluenzaB__AFJ80880

SEQ ID NO: 90823 - RNA, 1758 nt, Artificial Sequence; identical to SEQ ID NO: 90589
  derived and/or modified CDS sequence (opt1) from hemagglutinin__InfluenzaB__AFJ80891

SEQ ID NO: 90824 - RNA, 1758 nt, Artificial Sequence; identical to SEQ ID NO: 90589
  derived and/or modified CDS sequence (opt1) from hemagglutinin__InfluenzaB__AFJ80902

SEQ ID NO: 90825 - RNA, 1758 nt, Artificial Sequence; identical to SEQ ID NO: 90538
  derived and/or modified CDS sequence (opt1) from hemagglutinin__InfluenzaB__AFJ80913

SEQ ID NO: 90826 - RNA, 1758 nt, Artificial Sequence
  derived and/or modified CDS sequence (opt1) from hemagglutinin__InfluenzaB__AFJ80924
augaaggccaucaucgugcugcucauggucgugaccagcaacgccgaccgcaucugcaccggcaucacguccagcaacagcccccacguggucaagaccgcgacccagggggaggugaacgugaccggcgucaucccgcugacgaccacccccaccaagagccacuucgccaaccugaaggggacggagacccggggcaagcucugccccaagugccugaacugcaccgaccuggacguggcccucgggcgccccaagugcaccggcaacaucccguccgcccgggugagcauccugcacgagguccgccccgugacguccggcugcuuccccaucaugcacgaccggaccaagauccgccagcugcccaaccuccugcggggguacgagcacauccgccugagcacccacaacgugaucaacgccgagaacgcgccgggcgggcccuacaagaucggcaccuccgggagcugccccaacgucacgaacggcaacggcuucuucgccaccauggccugggccgugcccaagaacgacaacaacaagaccgcgaccaacucccucacgaucgaggugccguacaucugcgccgagggggaggaccagaucaccgucuggggcuuccacagcgacaacgagacccagauggccaagcuguacggggacuccaagccccagaaguucaccagcuccgccaacggcgugacgacccacuacgugagccagaucggcggguuccccaaccagaccgaggacggcgggcugccccaguccggccggaucgucguggacuacauggugcagaaguccgggaagaccggcacgaucaccuaccagcgcggcauccuccugccgcagaaggucuggugcgccuccgggcggagcaaggugaucaagggcagccugccccucaucggggaggcggacugccugcacgagaaguacggcgggcugaacaaguccaagcccuacuacaccggcgagcacgccaaggccaucggcaacugccccaucugggugaagaccccgcucaagcuggccaacgggacgaaguaccgcccgcccgccaagcugcucaaggagcggggcuucuucggggcgaucgccggcuuccuggagggcgggugggagggcaugaucgccggguggcacggcuacaccagccacggggcccacggcgucgccguggcggccgaccugaaguccacccaggaggccaucaacaagaucaccaagaaccucaacagccuguccgagcuggaggucaagaaccuccagcgccugagcggcgccauggacgagcugcacaacgagauccucgagcuggacgagaagguggacgaccugcgggccgacacgaucuccagccagaucgagcucgcggugcugcuguccaacgaggggaucaucaacagcgaggacgagcaccuccuggcccuggagcgcaagcucaagaagaugcugggccccuccgccgucgagaucgggaacggcugcuucgagaccaagcacaagugcaaccagaccugccuggaccggaucgccgcggggaccuucgacgccggcgaguucagccuccccaccuucgacucccugaacaucacggccgccagccugaacgacgacggccucgacaaccacaccauccugcuguacuacuccaccgccgcgagcucccuggccgugacccucaugaucgccaucuucguggucuacauggugagccgcgacaacguguccugcagcaucugccuguga

SEQ ID NO: 90827 - RNA, 1758 nt, Artificial Sequence; identical to SEQ ID NO: 90589
  derived and/or modified CDS sequence (opt1) from hemagglutinin__InfluenzaB__AFJ80935

SEQ ID NO: 90828 - RNA, 1755 nt, Artificial Sequence; identical to SEQ ID NO: 90450
  derived and/or modified CDS sequence (opt1) from hemagglutinin__InfluenzaB__AFJ80946

SEQ ID NO: 90829 - RNA, 1758 nt, Artificial Sequence
  derived and/or modified CDS sequence (opt1) from hemagglutinin__InfluenzaB__AFJ80957
augaaggccaucaucgugcugcucauggucgccaccagcaacgcggaccgcaucugcaccggcaucacguccagcaacagcccccacguggugaagaccgccacccagggggaggucaacgugaccggcgugaucccgcugacgaccacccccaccaagagccacuucgccaaccugaaggggacggagacccggggcaagcucugccccaagugccugaacugcaccgaccuggacgucgcccucgggcgccccaagugcaccggcaacaucccguccgcccgggugagcauccugcacgaggugcgccccgucacguccggcugcuuccccaucaugcacgaccggaccaagauccgccagcugcccaaccuccugcggggguacgagcacauccgccugagcacccacaacgugaucaacgcggagaacgccccgggcgggcccuacaagaucggcaccuccgggagcugccccaacgugacgaacggcaacggcuucuucgccaccauggccugggcgguccccaagaacgacaacaacaagaccgccaccaacucccucacgaucgaggugccguacaucugcaccgagggggaggaccagaucaccguguggggcuuccacagcgacaacgagacccagauggccaagcuguacggggacuccaagccccagaaguucacgagcuccgccaacggcgucaccacccacuacgugagccagaucggcggguuccccaaccagaccgaggacggcgggcugccccaguccggccggaucguggucgacuacauggugcagaaguccgggaagacgggcaccaucaccuaccagcgcggcauccuccugccgcagaagguguggugcgccuccgggcggagcaaggucaucaagggcagccugccccucaucggggaggcggacugccugcacgagaaguacggcgggcugaacaaguccaagcccuacuacaccggcgagcacgccaaggccaucggcaacugccccaucugggugaagacgccgcucaagcuggccaacgggaccaaguaccgcccgcccgccaagcugcucaaggagcggggcuucuucggggcgaucgccggcuuccuggagggcgggugggagggcaugaucgccggguggcacggcuacaccagccacggggcccacggcguggccgucgcggccgaccugaaguccacccaggaggccaucaacaagaucacgaagaaccucaacagccuguccgagcuggaggugaagaaccuccagcgccugagcggcgccauggacgagcugcacaacgagauccucgagcuggacgagaaggucgacgaccugcgggccgacaccaucuccagccagaucgagcucgcggugcugcuguccaacgaggggaucaucaacagcgaggacgagcaccuccuggcccuggagcgcaagcucaagaagaugcugggccccuccgccguggagaucgggaacggcugcuucgagaccaagcacaagugcaaccagaccugccuggaccggaucgccgcggggaccuucaacgccggcgaguucagccuccccacguucgacucccugaacaucaccgccgccagccugaacgacgacggccucgacaaccacaccauccugcuguacuacuccaccgccgcgagcucccuggccgucacgcucaugaucgccaucuucgugguguacauggucagccgcgacaacguguccugcagcaucugccuguga

SEQ ID NO: 90830 - RNA, 1755 nt, Artificial Sequence; identical to SEQ ID NO: 90450
  derived and/or modified CDS sequence (opt1) from hemagglutinin__InfluenzaB__AFJ80968

SEQ ID NO: 90831 - RNA, 1755 nt, Artificial Sequence; identical to SEQ ID NO: 90450
  derived and/or modified CDS sequence (opt1) from hemagglutinin__InfluenzaB__AFJ80979

SEQ ID NO: 90832 - RNA, 1755 nt, Artificial Sequence
  derived and/or modified CDS sequence (opt1) from hemagglutinin__InfluenzaB__AFJ80990
augaaggccaucaucgugcugcucauggucgugaccagcaacgccgaccgcaucugcaccggcaucacguccagcaacagcccccacguggucaagaccgcgacccagggggaggugaacgugaccggcgucaucccgcugacgaccacccccaccaaguccuacuucgccaaccugaaggggacgcggacccgcggcaagcucugccccgacugccugaacugcaccgaccuggacguggcccucgggcggcccaugugcgugggcaccacgccguccgccgaggccagcauccugcacgagguccgccccgugaccuccggcugcuuccccaucaugcacgaccggaccaagauccgccagcugcccaaccuccugcggggguacgagaacauccgccugagcacccagaacgugaucgacgcggagaaggccccgggcgggcccuaccggcucggcacguccgggagcugccccaacgccaccaacaaguccggcuucuucgccaccauggcgugggccguccccaaggacaacaacaagaacgccaccaacccgcugacgguggaggugcccuacaucugcaccgagggcgaggaccagaucaccgucuggggguuccacagcgacaacaagacccagaugaagaaccuguacggcgacuccaacccccagaaguucacgagcuccgccaacggggugaccacccacuacgugagccagaucggcggcuuccccgaccagaccgaggacgggggccucccgcaguccgggcgcaucgucguggacuacaugaugcagaagcccggcaagacggggaccaucguguaccagcggggcguccugcugccccagaagguguggugcgccagcggccgcuccaaggugaucaaggggagccucccccugaucggcgaggcggacugccugcacgagaaguacgggggccucaacaagagcaagccguacuacaccggggagcacgccaaggccaucggcaacugccccaucugggucaagacgccccugaagcuggccaacggcaccaaguaccggcccccggccaagcuccugaaggagcgcggguucuucggcgcgaucgccggguuccuggagggcgggugggagggcaugaucgccggcuggcacggguacaccucccacggcgcccacgggguggccgucgcggccgaccucaagagcacccaggaggccaucaacaagaucaccaagaaccugaacucccugagcgagcucgaggugaagaaccugcagcggcuguccggcgccauggacgagcuccacaacgagauccuggagcuggacgagaagguggacgaccuccgcgccgacacgaucagcucccagaucgagcuggcgguccugcucagcaacgagggcaucaucaacuccgaggacgagcaccuccuggcccuggagcggaagcugaagaagaugcuggggcccagcgccguggacaucggcaacgggugcuucgagaccaagcacaagugcaaccagaccugccucgaccgcaucgccgcgggcaccuucaacgccggggaguucucccugcccaccuucgacagccugaacaucacggccgccucccucaacgacgacggccuggacaaccacaccauccugcuguacuacagcaccgccgcguccagccucgccgugacccugaugcuggccaucuucaucgucuacauggugucccgggacaacgugagcugcuccaucugccucuga

SEQ ID NO: 90833 - RNA, 1755 nt, Artificial Sequence; identical to SEQ ID NO: 90450
  derived and/or modified CDS sequence (opt1) from hemagglutinin__InfluenzaB__AFJ81001

SEQ ID NO: 90834 - RNA, 1755 nt, Artificial Sequence; identical to SEQ ID NO: 90450
  derived and/or modified CDS sequence (opt1) from hemagglutinin__InfluenzaB__AFJ84360

SEQ ID NO: 90835 - RNA, 1758 nt, Artificial Sequence; identical to SEQ ID NO: 90538
  derived and/or modified CDS sequence (opt1) from hemagglutinin__InfluenzaB__AFJ90395

SEQ ID NO: 90836 - RNA, 1755 nt, Artificial Sequence; identical to SEQ ID NO: 90450
  derived and/or modified CDS sequence (opt1) from hemagglutinin__InfluenzaB__AFJ90406

SEQ ID NO: 90837 - RNA, 1755 nt, Artificial Sequence; identical to SEQ ID NO: 90450
  derived and/or modified CDS sequence (opt1) from hemagglutinin__InfluenzaB__AFJ90417

SEQ ID NO: 90838 - RNA, 1755 nt, Artificial Sequence; identical to SEQ ID NO: 90450
  derived and/or modified CDS sequence (opt1) from hemagglutinin__InfluenzaB__AFJ90428

SEQ ID NO: 90839 - RNA, 1755 nt, Artificial Sequence; identical to SEQ ID NO: 90450
  derived and/or modified CDS sequence (opt1) from hemagglutinin__InfluenzaB__AFJ90450

SEQ ID NO: 90840 - RNA, 1755 nt, Artificial Sequence; identical to SEQ ID NO: 90450
  derived and/or modified CDS sequence (opt1) from hemagglutinin__InfluenzaB__AFJ91038

SEQ ID NO: 90841 - RNA, 1755 nt, Artificial Sequence
  derived and/or modified CDS sequence (opt1) from hemagglutinin__InfluenzaB__AFJ91049
augaaggccaucaucgugcugcucauggucgugaccagcaacgccgaccgcaucugcaccggcaucacguccagcaacagcccccacguggucaagaccgcgacccagggggaggugaacgugaccggcgucaucccgcugacgaucacccccaccaaguccuacuucgccaaccugaaggggacccggacgcgcggcaagcucugccccgacugccugaacugcaccgaccuggacguggcccucgggcggcccaugugcgugggcaccaccccguccgccaaggccagcauccugcacgagguccgccccgugacguccggcugcuuccccaucaugcacgaccggaccaagauccgccagcuggcgaaccuccugcggggguacgagaacauccgccugagcacccagaacgugaucgacgccgagaaggcccccggcgggccguaccggcucggcaccuccgggagcugccccaacgccacguccaagagcggcuucuucgcgaccauggccugggccguccccaaggacaacaacaagaacgccaccaacccccugaccguggaggugccguacaucugcacggagggcgaggaccagaucaccgucuggggguuccacuccgacaacaagacccagaugaagaaccuguacggcgacagcaacccccagaaguucaccuccagcgccaacggggugacgacccacuacgugucccagaucggcggcuuccccgaccagaccgaggacgggggccucccccagagcgggcgcaucgucguggacuacaugaugcagaagccgggcaagaccgggacgaucguguaccagcggggcguccugcugccccagaagguguggugcgcguccggccgcagcaaggugaucaaggggagccucccccugaucggcgaggccgacugccugcacgagaaguacgggggccucaacaaguccaagcccuacuacaccggggagcacgccaaggccaucggcaacugcccgaucugggucaagacgccccugaagcuggccaacggcaccaaguaccggccgcccgcgaagcuccugaaggagcgcggguucuucggcgccaucgccggguuccuggagggcgggugggagggcaugaucgccggcuggcacggguacaccagccacggcgcccacgggguggcggucgccgccgaccucaaguccacccaggaggccaucaacaagaucaccaagaaccugaacagccuguccgagcucgaggugaagaaccugcagcggcugagcggcgccauggacgagcuccacaacgagauccuggagcuggacgagaagguggacgaccuccgcgcggacaccaucuccagccagaucgagcuggccguccugcucuccaacgagggcaucaucaacagcgaggacgagcaccuccuggcccuggagcggaagcugaagaagaugcuggggcccuccgccguggacaucggcaacgggugcuucgagacgaagcacaagugcaaccagaccugccucgaccgcaucgcggccggcaccuucaacgccggggaguucagccugcccaccuucgacucccugaacaucaccgccgccagccucaacgacgacggccuggacaaccacacgauccugcuguacuacuccaccgcggccagcucccucgccgugacccugaugcuggccaucuucaucgucuacauggugagccgggacaacguguccugcagcaucugccucuga

SEQ ID NO: 90842 - RNA, 1758 nt, Artificial Sequence
  derived and/or modified CDS sequence (opt1) from hemagglutinin__InfluenzaB__AFJ91060
augaaggccaucaucgugcugcucauggucgugaccagcaacgccgaccgcaucugcaccggcaucacguccagcaacagcccccacguggucaagaccgcgacccagggggaggugaacgugaccggcgucaucccgcugacgaccacccccaccaagagccacuucgccaaccugaaggggacggagacccggggcaagcucugcccccgcugccugaacugcaccgaccuggacguggcccucgggcggcccaagugcaccggcaacaucccguccgcccgcgugagcauccugcacgagguccggcccgugacguccggcugcuuccccaucaugcacgaccgcaccaagauccggcagcugcccaaccuccugcgcggguacgagcacauccggcugagcacccacaacgugaucaacgccgagaacgcgccgggcgggcccuacaagaucggcaccuccgggagcugccccaacgucacgaacggcaacggcuucuucgccaccauggccugggccgugcccaagaacgacaacaacaagaccgcgaccaacucccucacgaucgaggugccguacaucugcaccgagggggaggaccagaucaccgucuggggcuuccacagcgacaacgaggcccagauggccaagcuguacggggacuccaagccccagaaguucaccagcuccgccaacggcgugacgacccacuacgugagccagaucggcggguuccccaaccagaccgaggacggcgggcugccccaguccggccgcaucgucguggacuacauggugcagaaguccgggaagaccggcacgaucaccuaccagcggggcauccuccugccgcagaaggucuggugcgccuccgggcgcagcaaggugaucaagggcagccugccccucaucggggaggcggacugccugcacgagaaguacggcgggcugaacaaguccaagcccuacuacaccggcgagcacgccaaggccaucggcaacugccccaucugggugaagaccccgcucaagcuggccaacgggacgaaguaccggccgcccgccaagcugcucaaggagcgcggcuucuucggggcgaucgccggcuuccuggagggcgggugggagggcaugaucgccggguggcacggcuacaccagccacggggcccacggcgucgccguggcggccgaccugaaguccacccaggaggccaucaacaagaucaccaagaaccucaacagccuguccgagcuggaggucaagaaccuccagcggcugagcggcgccauggacgagcugcacaacgagauccucgagcuggacgagaagguggacgaccugcgcgccgacacgaucuccagccagaucgagcucgcggugcugcuguccaacgaggggaucaucaacagcgaggacgagcaccuccuggcccuggagcggaagcucaagaagaugcugggccccuccgccgucgagaucgggaacggcugcuucgagaccaagcacaagugcaaccagaccugccuggaccgcaucgccgcggggaccuucgacgccggcgaguucagccuccccaccuucgacucccugaacaucacggccgccagccugaacgacgacggccucgacaaccacaccauccugcuguacuacuccaccgccgcgagcucccuggccgugacccucaugaucgccaucuucguggucuacauggugagccgggacaacguguccugcagcaucugccuguga

SEQ ID NO: 90843 - RNA, 1755 nt, Artificial Sequence; identical to SEQ ID NO: 90450
  derived and/or modified CDS sequence (opt1) from hemagglutinin__InfluenzaB__AFJ91071

SEQ ID NO: 90844 - RNA, 1755 nt, Artificial Sequence
  derived and/or modified CDS sequence (opt1) from hemagglutinin__InfluenzaB__AFJ91082
augaaggccaucaucgugcugcucauggucgugaccagcaacgccgaccgcaucugcaccggcaucacguccagcaacagcccccacguggucaagaccgcgacccagggggaggugaacgugaccggcgucaucccgcugacgaccacccccaccaaguccuacuucgccaaccugaaggggacgcggacccgcggcaagcucugccccgacugccugaacugcaccgaccuggacguggcccucgggcggcccaugugcgugggcaccacgccguccgccaaggccagcauccugcacgagguccgccccgugaccuccggcugcuuccccaucaugcacgaccggaccaagauccgccagcugcccaaccuccugcggggguacgagaacauccgccugagcacccagaacgugaucgacgcggagaaggccccgggcgggcccuaccggcucggcacguccgggagcugccccaacgccaccuccaagaucggcuucuucgccaccauggcgugggccguccccaaggacaacuacaagaacgccaccaacccgcugacgguggaggugcccuacaucugcaccgagggcgaggaccagaucaccgucuggggguuccacagcgacaacaagacccagaugaagaaccuguacggcgacuccaacccccagaaguucacgagcuccgccaacggggugaccacccacuacgugagccagaucggcgacuuccccgaccagaccgaggacggcgggcucccgcaguccggccgcaucgucguggacuacaugaugcagaagcccgggaagacgggcaccaucguguaccagcgcgggguccugcugccccagaagguguggugcgccagcggccgguccaaggugaucaagggcagccucccccugaucggggaggcggacugccugcacgagaaguacggcgggcucaacaagagcaagccguacuacaccggcgagcacgccaaggccaucgggaacugccccaucugggucaagacgccccugaagcuggccaacggcaccaaguaccggcccccggccaagcuccugaaggagcgcggcuucuucggggcgaucgccggcuuccuggagggcgggugggaggggaugaucgccggcuggcacggcuacaccucccacggggcccacggcguggccgucgcggccgaccucaagagcacccaggaggccaucaacaagaucaccaagaaccugaacucccugagcgagcucgaggugaagaaccugcagcggcuguccggggccauggacgagcuccacaacgagauccuggagcuggacgagaagguggacgaccuccgcgccgacacgaucagcucccagaucgagcuggcgguccugcucagcaacgagggcaucaucaacuccgaggacgagcaccuccuggcccuggagcggaagcugaagaagaugcugggccccagcgccguggacaucgggaacggcugcuucgagaccaagcacaagugcaaccagaccugccucgaccgcaucgccgcggggaccuucaacgccggcgaguucucccugcccaccuucgacagccugaacaucacggccgccucccucaacgacgacgggcuggacaaccacaccauccugcuguacuacagcaccgccgcguccagccucgccgugacccugaugcuggccaucuucaucgucuacauggugucccgggacaacgugagcugcuccaucugccucuga

SEQ ID NO: 90845 - RNA, 1755 nt, Artificial Sequence; identical to SEQ ID NO: 90844
  derived and/or modified CDS sequence (opt1) from hemagglutinin__InfluenzaB__AFJ91093

SEQ ID NO: 90846 - RNA, 1755 nt, Artificial Sequence; identical to SEQ ID NO: 90844
  derived and/or modified CDS sequence (opt1) from hemagglutinin__InfluenzaB__AFJ91104

SEQ ID NO: 90847 - RNA, 1755 nt, Artificial Sequence; identical to SEQ ID NO: 90844
  derived and/or modified CDS sequence (opt1) from hemagglutinin__InfluenzaB__AFJ91115

SEQ ID NO: 90848 - RNA, 1758 nt, Artificial Sequence
  derived and/or modified CDS sequence (opt1) from hemagglutinin__InfluenzaB__AFJ91704
augaaggccaucaucgugcugcucauggucgugaccagcaacgccgaccgcaucugcaccggcaucacguccagcaacagcccccacguggucaagaccgcgacccagggggaggugaacgugaccggcgucaucccgcugacgaccacccccaccaagagccacuucgccaaccugaaggggacggagacccggggcaagcucugccccaagugccugaacugcaccgaccuggacguggcccucgggcgccccaagugcaccggcaacaucccguccgcccgggugagcauccugcacgagguccgccccgugacguccggcugcuuccccaucaugcacgaccggaccaagauccgccagcugcccaaccuccugcggggguacgagcacauccgccugagcacccacaacgugaucaacgccgagaacgcgccgggcgggcccuacaagaucggcaccuccgggagcugccccaacgucacgaacggcaagggcuucuucgccaccauggccugggccgugcccaagaacgacaacaacaagaccgcgaccaacucccucacgaucgaggugccguacaucugcaccgagggggaggaccagaucaccgucuggggcuuccacagcgacaacgagacccagauggccaagcuguacggggacuccaagccccagaaguucacgagcuccgccaacggcgugaccacccacuacgugagccagaucggcggguuccccaaccagaccgaggacggcgggcugccccaguccggccggaucgucguggacuacauggugcagaaguccgggaagacgggcaccaucaccuaccagcgcggcauccuccugccgcagaaggucuggugcgccuccgggcggagcaaggugaucaagggcagccugccccucaucggggaggccgacugccugcacgagaaguacggcgggcugaacaaguccaagcccuacuacaccggcgagcacgcgaaggccaucggcaacugccccaucugggugaagacgccgcucaagcuggccaacgggaccaaguaccgcccgcccgccaagcugcucaaggagcggggcuucuucggggccaucgcgggcuuccuggagggcgggugggagggcaugaucgccggguggcacggcuacaccagccacggggcccacggcgucgccguggccgcggaccugaaguccacccaggaggccaucaacaagaucacgaagaaccucaacagccuguccgagcuggaggucaagaaccuccagcgccugagcggcgccauggacgagcugcacaacgagauccucgagcuggacgagaagguggacgaccugcgggccgacaccaucuccagccagaucgagcucgccgugcugcuguccaacgaggggaucaucaacagcgaggacgagcaccuccuggcgcuggagcgcaagcucaagaagaugcugggccccuccgccgucgagaucgggaacggcugcuucgagaccaagcacaagugcaaccagaccugccuggaccggaucgccgccgggaccuucgacgcgggcgaguucagccuccccacguucgacucccugaacaucaccgccgccagccugaacgacgacggccucgacaaccacaccauccugcuguacuacuccaccgccgccagcucccuggcggugacgcucaugaucgccaucuucguggucuacauggugagccgcgacaacguguccugcagcaucugccuguga

SEQ ID NO: 90849 - RNA, 1755 nt, Artificial Sequence
  derived and/or modified CDS sequence (opt1) from hemagglutinin__InfluenzaB__AFK09797
augaaggccaucaucgugcugcucauggucgugaccagcaacgccgaccgcaucugcaccggcaucacguccagcaacagcccccacguggucaagaccgcgacccagggggaggugaacgugaccggcgucaucccgcugacgaccacccccaucaaguccuacuucgccaaccugaaggggaccaagacgcggggcaagcucugccccgacugccugaacugcaccgaccuggacguggcccucgggcgccccaugugcgugggcaccaccccguccgccaaggccagcauccugcacgagguccggcccgugacguccggcugcuuccccaucaugcacgaccgcaccaagauccggcagcugcccaaccuccugcgcggguacgagaacauccggcugagcacccagaacgugaucgacgcggagaaggccccgggcgggcccuaccgccucggcaccuccgggagcugccccaacgccacguccaagagcggcuucuucgccaccauggcgugggccguccccaaggacaacaacaagaacgccaccaacccgcugaccguggaggugcccuacgucugcacggagggcgaggaccagaucaccguguggggguuccacuccgacaacaagaaccagaugaagaaccuguacggcgacagcaacccccagaaguucaccuccagcgccaacggggugaccacgcacuacgucucccagaucggcggcuuccccgaccagaccgaggacgggggccucccgcagagcgggcggaucgugguggacuacaugguccagaagcccggcaagaccgggaccaucguguaccagcgcggcgugcugcugccccagaaggucuggugcgccuccggccggagcaaggugaucaaggggagccucccccugaucggcgaggcggacugccugcacgagaaguacgggggccucaacaaguccaagccguacuacacgggggagcacgccaaggccaucggcaacugccccaucugggucaagacgccccugaagcuggccaacggcaccaaguaccggcccccggccaagcuccugaaggagcgcggguucuucggcgcgaucgccggguuccuggagggcgggugggagggcaugaucgccggcuggcacggguacaccagccacggcgcccacgggguggccguggcggccgaccucaaguccacccaggaggccaucaacaagaucaccaagaaccugaacagccuguccgagcucgaggucaagaaccugcagcgccugagcggcgccauggacgagcuccacaacgagauccuggagcuggacgagaagguggacgaccuccgggccgacaccaucuccagccagaucgagcuggcggugcugcucuccaacgagggcaucaucaacagcgaggacgagcaccuccuggcccuggagcgcaagcugaagaagaugcuggggcccuccgccgucgacaucggcaacgggugcuucgagaccaagcacaagugcaaccagacgugccucgaccggaucgccgcgggcaccuucaacgccggggaguucagccugcccaccuucgacucccugaacaucaccgccgccagccucaacgacgacggccuggacaaccacaccauccugcuguacuacuccacggccgcgagcucccucgccgugacccugaugcuggccaucuucaucguguacauggucagccgcgacaacguguccugcagcaucugccucuga

SEQ ID NO: 90850 - RNA, 1755 nt, Artificial Sequence; identical to SEQ ID NO: 90844
  derived and/or modified CDS sequence (opt1) from hemagglutinin__InfluenzaB__AFN54654

SEQ ID NO: 90851 - RNA, 1755 nt, Artificial Sequence; identical to SEQ ID NO: 90591
  derived and/or modified CDS sequence (opt1) from hemagglutinin__InfluenzaB__AFN54665

SEQ ID NO: 90852 - RNA, 1755 nt, Artificial Sequence; identical to SEQ ID NO: 90591
  derived and/or modified CDS sequence (opt1) from hemagglutinin__InfluenzaB__AFN54676

SEQ ID NO: 90853 - RNA, 1755 nt, Artificial Sequence; identical to SEQ ID NO: 90844
  derived and/or modified CDS sequence (opt1) from hemagglutinin__InfluenzaB__AFN54687

SEQ ID NO: 90854 - RNA, 1755 nt, Artificial Sequence
  derived and/or modified CDS sequence (opt1) from hemagglutinin__InfluenzaB__AFN54698
augaaggccaucaucgugcugcucauggucgugaccagcaacgccgaccgcaucugcaccggcaucacguccagcaacagcccccacguggucaagaccgcgacccagggggaggugaacgugaccggcgucaucccgcugacgaccacccccaccaaguccuacuucgccaaccugaaggggacgcggacccgcggcaagcucugccccgacugccugaacugcaccgaccuggacguggcccucgggcggcccaugugcgugggcaccacgccguccgccaaggccagcauccugcacgagguccgccccgugaccuccggcugcuuccccaucaugcacgaccggaccaagauccgccagcugcccaaccuccugcggggguacgagaacauccgccugagcacccagaacgugaucgacgcggagaaggccccgggcgggcccuaccggcucggcacguccgggagcugccccaacgccaccuccaagaucggcuucuucgccaccauggcgugggccguccccaaggacaacuacaagaacgccaccaacccgcugacgguggaggugcccuacaucugcaccgagggcgaggaccagaucaccgucuggggguuccacagcgacaacaagacccagaugaagaaccuguacggcgacuccaacccccagaaguucacgagcuucgccaacggggugaccacccacuacgugucccagaucggcgacuuccccgaccagaccgaggacggcgggcucccgcagagcggccgcaucgucguggacuacaugaugcagaagcccgggaagacgggcaccaucguguaccagcgcgggguccugcugccccagaagguguggugcgccuccggccggagcaaggugaucaagggcucccucccccugaucggggaggcggacugccugcacgagaaguacggcgggcucaacaagagcaagccguacuacaccggcgagcacgccaaggccaucgggaacugccccaucugggucaagacgccccugaagcuggccaacggcaccaaguaccggcccccggccaagcuccugaaggagcgcggcuucuucggggcgaucgccggcuuccuggagggcgggugggaggggaugaucgccggcuggcacggcuacaccagccacggggcccacggcguggccgucgcggccgaccucaaguccacccaggaggccaucaacaagaucaccaagaaccugaacagccuguccgagcucgaggugaagaaccugcagcggcugagcggggccauggacgagcuccacaacgagauccuggagcuggacgagaagguggacgaccuccgcgccgacacgaucuccagccagaucgagcuggcgguccugcucuccaacgagggcaucaucaacagcgaggacgagcaccuccuggcccuggagcggaagcugaagaagaugcugggccccuccgccguggacaucgggaacggcugcuucgagaccaagcacaagugcaaccagaccugccucgaccgcaucgccgcggggaccuucaacgccggcgaguucagccugcccaccuucgacucccugaacaucacggccgccagccucaacgacgacgggcuggacaaccacaccauccugcuguacuacuccaccgccgcgagcucccucgccgugacccugaugcuggccaucuucaucgucuacauggugagccgggacaacguguccugcagcaucugccucuga

SEQ ID NO: 90855 - RNA, 1755 nt, Artificial Sequence; identical to SEQ ID NO: 90844
  derived and/or modified CDS sequence (opt1) from hemagglutinin__InfluenzaB__AFN54709

SEQ ID NO: 90856 - RNA, 1755 nt, Artificial Sequence; identical to SEQ ID NO: 90844
  derived and/or modified CDS sequence (opt1) from hemagglutinin__InfluenzaB__AFN54720

SEQ ID NO: 90857 - RNA, 1755 nt, Artificial Sequence; identical to SEQ ID NO: 90844
  derived and/or modified CDS sequence (opt1) from hemagglutinin__InfluenzaB__AFN54731

SEQ ID NO: 90858 - RNA, 1755 nt, Artificial Sequence; identical to SEQ ID NO: 90844
  derived and/or modified CDS sequence (opt1) from hemagglutinin__InfluenzaB__AFN54742

SEQ ID NO: 90859 - RNA, 1755 nt, Artificial Sequence; identical to SEQ ID NO: 90844
  derived and/or modified CDS sequence (opt1) from hemagglutinin__InfluenzaB__AFN54753

SEQ ID NO: 90860 - RNA, 1755 nt, Artificial Sequence; identical to SEQ ID NO: 90844
  derived and/or modified CDS sequence (opt1) from hemagglutinin__InfluenzaB__AFN54764

SEQ ID NO: 90861 - RNA, 1755 nt, Artificial Sequence; identical to SEQ ID NO: 90844
  derived and/or modified CDS sequence (opt1) from hemagglutinin__InfluenzaB__AFN54775

SEQ ID NO: 90862 - RNA, 1755 nt, Artificial Sequence; identical to SEQ ID NO: 90844
  derived and/or modified CDS sequence (opt1) from hemagglutinin__InfluenzaB__AFN54786

SEQ ID NO: 90863 - RNA, 1755 nt, Artificial Sequence; identical to SEQ ID NO: 90844
  derived and/or modified CDS sequence (opt1) from hemagglutinin__InfluenzaB__AFN54797

SEQ ID NO: 90864 - RNA, 1755 nt, Artificial Sequence; identical to SEQ ID NO: 90844
  derived and/or modified CDS sequence (opt1) from hemagglutinin__InfluenzaB__AFN54808

SEQ ID NO: 90865 - RNA, 1755 nt, Artificial Sequence; identical to SEQ ID NO: 90591
  derived and/or modified CDS sequence (opt1) from hemagglutinin__InfluenzaB__AFN54819

SEQ ID NO: 90866 - RNA, 1755 nt, Artificial Sequence; identical to SEQ ID NO: 90844
  derived and/or modified CDS sequence (opt1) from hemagglutinin__InfluenzaB__AFN54830

SEQ ID NO: 90867 - RNA, 1755 nt, Artificial Sequence; identical to SEQ ID NO: 90844
  derived and/or modified CDS sequence (opt1) from hemagglutinin__InfluenzaB__AFN54841

SEQ ID NO: 90868 - RNA, 1755 nt, Artificial Sequence; identical to SEQ ID NO: 90844
  derived and/or modified CDS sequence (opt1) from hemagglutinin__InfluenzaB__AFN54852

SEQ ID NO: 90869 - RNA, 1755 nt, Artificial Sequence; identical to SEQ ID NO: 90844
  derived and/or modified CDS sequence (opt1) from hemagglutinin__InfluenzaB__AFN54863

SEQ ID NO: 90870 - RNA, 1758 nt, Artificial Sequence
  derived and/or modified CDS sequence (opt1) from hemagglutinin__InfluenzaB__AFU34595
augaaggccaucaucgugcugcucauggucgugaccagcaacgccgaccgcaucugcaccggcaucacguccagcaacagcccccacguggucaagaccgcgacccagggggaggugaacgugaccggcgucaucccgcugacgaccacccccaccaagagccacuucgccaaccugaaggggacggagacccggggcaagcucugccccaagugccccaacugcaccgaccuggacguggcccuggggcgcccgaagugcaccggcaagauccccuccgcccgggugagcauccuccacgagguccgccccgugacguccggcugcuuccccaucaugcacgaccggaccaagauccgccagcugccgaaccugcuccggggguacgagcacauccgccugagcacccacaacgugaucaacgccgagaacgcgcccggcgggcccuacaagaucggcaccuccgggagcugccccaacgucacgaacggcaacggcuucuucgccaccauggccugggccgugccgaagaacgacaagaacaagaccgcgaccaacccccugacgaucgaggugcccuacaucugcaccgagggggaggaccagaucaccgucuggggcuuccacuccgacaacgagacccagauggccaagcucuaccgggacagcaagccccagaaguucacguccagcgccaacggggugaccacccacuacgugucccagaucggcggcuucccgaaccagaccgaggacgggggccugccccagagcgggcgcaucgucguggacuacauggugcagaaguccggcaagacggggaccaucaccuaccagcggggcauccugcucccccagaaggucuggugcgccagcggccgcuccaaggugaucaaggggagccugccccugaucggcgaggccgacugccuccacgagaaguacgggggccugaacaagagcaagccguacuacaccggggagcacgcgaaggccaucggcaacugccccaucugggugaagacgccccugaagcucgccaacggcaccaaguaccggcccccgaccaagcugcugaaggagcgcggguucuucggcgccaucgccggguuccucgagggcgggugggagggcaugaucgcgggcuggcacggguacaccucccacggcgcccacggggucgccguggccgccgaccugaaguccacgcaggaggcgaucaacaagaucaccaagaaccugaacucccucagcgagcuggaggucaagaaccugcagcggcucuccggcgccauggacgagcugcacaacgagauccuggagcucgacgagaagguggacgaccugcgcgccgacaccaucagcucccagaucgagcuggccgugcuccugagcaacgagggcaucaucaacuccgaggacgagcaccuccuggcccuggagcggaagcugaagaagaugcucgggcccagcgcggucgagaucggcaacgggugcuucgagaccaagcacaagugcaaccagaccugccuggaccgcaucgccgccggcacguucgacgccggggaguucucccugcccaccuucgacagccucaacaucaccgcggccucccugaacgacgacggccuggacaaccacaccauccuccuguacuacagcacggccgccuccagccuggccgugacccugaugaucgcgaucuucguggucuacauggugucccgggacaacgugagcugcuccaucugccucuga

SEQ ID NO: 90871 - RNA, 1758 nt, Artificial Sequence
  derived and/or modified CDS sequence (opt1) from hemagglutinin__InfluenzaB__AFU34606
augaaggccaucaucgugcugcucauggucgugaccagcaacgccgaccgcaucugcaccggcaucacguccagcaacagcccccacguggucaagaccgcgacccagggggaggugaacgugaccggcgucaucccgcugacgaccacccccaccaagagccacuucgccaaccugaaggggacggagacccggggcaagcucugccccaagugccccaacugcaccgaccuggacguggcccuggaccgcccgaagugcaccgggaagauccccuccgcccgggugagcauccuccacgagguccgccuggugacguccggcugcuuccccaucaugcacgaccggaccaagauccgccagcugcccaaccuccugcggggcuacgagcacauccgccugagcacccacaacgugaucaacgccgagaacgcgcccgggggccccuacaagaucgggaccuccggcagcugccccaacgucacgaacgggaacggcuucuucgccaccauggccugggccgugcccaagaacgacaagaacaagaccgcgaccaacccgcucacgaucgaggugcccuacaucugcaccgagggcgaggaccagaucaccgucuggggguuccacuccgacgacgagacccagauggccaagcuguacggcgacagcaagccccagaaguucacguccagcgccaacggggugaccacccacuacgugucccagaucggcggcuuccccaaccagaccgaggacgggggccugccgcagagcgggcggaucgucguggacuacauggugcagaaguccggcaagacggggaccaucaccuaccagcgcggcauccuccugccccagaaggucuggugcgccagcggccgguccaaggugaucaaggggagccugccccucaucggcgaggccgacugccugcacgagaaguacgggggccugaacaagagcaagcccuacuacaccggggagcacgcgaaggccaucggcaacugcccgaucugggugaagacgccccucaagcuggccaacggcaccaaguaccgcccgcccgccaagcugcucaaggagcggggguucuucggcgccaucgcgggguuccuggagggcgggugggagggcaugaucgccggcuggcacggguacaccucccacggcgcccacggggucgccguggccgcggaccugaaguccacccaggaggccaucaacaagaucacgaagaaccucaacucccugagcgagcuggaggucaagaaccuccagcgccuguccggcgccauggacgagcugcacaacgagauccucgagcuggacgagaagguggacgaccugcgggccgacaccaucagcucccagaucgagcucgccgugcugcugagcaacgagggcaucaucaacuccgaggacgagcaccuccuggcgcuggagcgcaagcucaagaagaugcuggggccgagcgccgucgagaucggcaacgggugcuucgagaccaagcacaagugcaaccagaccugccuggaccggaucgccgccggcaccuucgacgcgggggaguucucccuccccacguucgacagccugaacaucaccgccgccucccugaacgacgacggccucgacaaccacaccauccugcuguacuacagcaccgccgccuccagccuggcggugacgcucaugaucgccaucuucguggucuacauggugucccgcgacaacgugagcugcuccaucugccuguga

SEQ ID NO: 90872 - RNA, 1758 nt, Artificial Sequence; identical to SEQ ID NO: 90780
  derived and/or modified CDS sequence (opt1) from hemagglutinin__InfluenzaB__AFU34617

SEQ ID NO: 90873 - RNA, 1758 nt, Artificial Sequence
  derived and/or modified CDS sequence (opt1) from hemagglutinin__InfluenzaB__AFU34628
augaaggccaucaucgugcugcucauggucgugaccagcaacgccgaccgcaucugcaccggcaucacguccagcaacagcccccacguggucaagaccgcgacccagggggaggugaacgugaccggcgucaucccgcugacgaccacccccaccaagagccacuucgccaaccugaaggggacggagacccggggcaagcucugccccaagugccccaacugcaccgaccuggacguggcccuggggcgcccgaagugcaccggcaagauccccuccgcccgggugagcauccuccacgagguccgccccgugacguccggcugcuuccccaucaugcacgaccggaccaagauccgccagcugccgaaccugcuccggggguacgagcacauccgccugagcacccacaacgugaucaacgccgagaacgcgcccggcgggcccuacaagaucggcaccuccgggagcugccccaacgucacgaacggcaacggcuucuucgccaccauggccugggccgugccgaagaacgacaagaacaagaccgcgaccaacccccugacgaucgaggugcccuacaucugcaccgagggggaggaccagaucaccgucuggggcuuccacuccgacgacgagacccagauggccaagcucuacggggacagcaagccccagaaguucacguccagcgccaacggcgugaccacccacuacgugucccagaucggcggguucccgaaccagaccgaggacggcgggcugccccagagcggccggaucgucguggacuacauggugcagaaguccgggaagacgggcaccaucaccuaccagcgcggcauccugcucccccagaaggucuggugcgccagcgggcgguccaaggugaucaagggcagccugccccugaucggggaggccgacugccuccacgagaaguacggcgggcugaacaagagcaagccguacuacaccggcgagcacgcgaaggccaucggcaacugccccaucugggugaagacgccccugaagcucgccaacgggaccaaguaccggcccccggccaagcugcugaaggagcgcggcuuccucggggccaucgcgggcuuccuggagggcggguggaagggcaugaucgccggguggcacggcuacaccucccacggggcccacggcgucgccguggccgcggaccugaaguccacccaggaggccaucaacaagaucacgaagaaccucaacucccugagcgagcuggaggucaagaaccuccagcgccuguccggcgccauggacgagcugcacaacgagauccucgagcuggacgagaagguggacgaccugcgggccgacaccaucagcucccagaucgagcucgccgugcugcugagcaacgaggggaucaucaacuccgaggacgagcaccuccuggcgcuggagcgcaagcucaagaagaugcugggccccagcgccgucgagaucgggaacggcugcuucgagaccaagcacaagugcaaccagaccugccuggaccggaucgccgccgggaccuucgacgcgggcgaguucucccuccccacguucgacagccugaacaucaccgccgccucccugaacgacgacggccucgacaaccacaccauccugcuguacuacagcaccgccgccuccagccuggcggugacgcucaugaucgccaucuucguggucuacauggugucccgcgacaacgugagcugcuccaucugccuguga

SEQ ID NO: 90874 - RNA, 1758 nt, Artificial Sequence; identical to SEQ ID NO: 90632
  derived and/or modified CDS sequence (opt1) from hemagglutinin__InfluenzaB__AFU34639

SEQ ID NO: 90875 - RNA, 1758 nt, Artificial Sequence; identical to SEQ ID NO: 90669
  derived and/or modified CDS sequence (opt1) from hemagglutinin__InfluenzaB__AGB08299

SEQ ID NO: 90876 - RNA, 1758 nt, Artificial Sequence; identical to SEQ ID NO: 90669
  derived and/or modified CDS sequence (opt1) from hemagglutinin__InfluenzaB__AGB08300

SEQ ID NO: 90877 - RNA, 1755 nt, Artificial Sequence
  derived and/or modified CDS sequence (opt1) from hemagglutinin__InfluenzaB__AGB97259
augaaggccaucaucgugcugcucauggucgugaccagcaacgccgaccgcaucugcaccggcaucacguccagcaacagcccccacguggucaagaccgcgacccagggggaggugaacgugaccggcgucaucccgcugacgaccacccccaccaaguccuacuucgccaaccugaaggggacgcggacccgcggcaagcucugccccgacugccugaacugcaccgaccuggacguggcccucgggcggcccaugugcgugggcaccacgccguccgccaaggccagcauccugcacgagguccgccccgugaccuccggcugcuuccccaucaugcacgaccggaccaagauccgccagcugcccaaccuccugcggggguacgagaagauccgccugagcacccagaacgugaucgacgcggagaaggccccgggcgggcccuaccggcucggcacguccgggagcugccccaacgccaccuccaagaucggcuucuucgccaccauggcgugggccguccccaaggacaacuacaagaacgccaccaacccgcugacgguggaggugcccuacaucugcaccgagggcgaggaccagaucaccgucuggggguuccacagcgacaacaagacccagaugaagucccuguacggcgacagcaacccccagaaguucacguccagcgccaacggggugaccacccacuacgugucccagaucggcgacuuccccgaccagaccgaggacggcgggcucccgcagagcggccgcaucgucguggacuacaugaugcagaagcccgggaagacgggcaccaucguguaccagcgcgggguccugcugccccagaagguguggugcgccuccggccggagcaaggugaucaagggcagccucccccugaucggggaggcggacugccugcacgaggaguacggcgggcucaacaaguccaagccguacuacaccggcaagcacgccaaggccaucgggaacugccccaucugggucaagacgccccugaagcuggccaacggcaccaaguaccggcccccggccaagcuccugaaggagcgcggcuucuucggggcgaucgccggcuuccuggagggcgggugggaggggaugaucgccggcuggcacggcuacaccagccacggggcccacggcguggccgucgcggccgaccucaaguccacccaggaggccaucaacaagaucaccaagaaccugaacagccuguccgagcucgaggugaagaaccugcagcggcugagcggggccauggacgagcuccacaacgagauccuggagcuggacgagaagguggacgaccuccgcgccgacacgaucuccagccagaucgagcuggcgguccugcucuccaacgagggcaucaucaacagcgaggacgagcaccuccuggcccuggagcggaagcugaagaagaugcugggccccuccgccguggacaucgggaacggcugcuucgagaccaagcacaagugcaaccagaccugccucgaccgcaucgccgcggggaccuucaacgccggcgaguucagccugcccaccuucgacucccugaacaucacggccgccagccucaacgacgacgggcuggacaaccacaccauccugcuguacuacuccaccgccgcgagcucccucgccgugacccugaugcuggccaucuucaucgucuacaucgugagccgggacaacguguccugcagcaucugccucuga

SEQ ID NO: 90878 - RNA, 1755 nt, Artificial Sequence
  derived and/or modified CDS sequence (opt1) from hemagglutinin__InfluenzaB__AGB97265
augaaggccaucaucgugcugcucauggucgugaccagcaacgccgaccgcaucugcaccggcaucacguccagcaacagcccccacguggucaagaccgcgacccagggggaggugaacgugaccggcgucaucccgcugacgaccacccccaccaaguccuacuucgccaaccugaaggggacgaagacccggggcaagcucugccccgacugccugaacugcaccgaccuggacguggcccucgggcgccccaugugcgugggcaccacgccguccgccaaggccagcauccugcacgagguccggcccgugaccuccggcugcuuccccaucaugcacgaccgcaccaagauccggcagcuggcgaaccuccugcgcggguacgagaacauccggcugagcacccagaacgugaucgacgccgagaaggcccccggcgggccguaccgccucggcacguccgggagcugccccaacgccaccuccaagagcggcuucuucgcgaccauggccugggccguccccaaggacaacaacaagaacgccaccaacccccugacgguggaggugccguacaucugcgccgagggcgaggaccagaucaccgucuggggguuccacuccgacaacaagacccagaugaagaaccuguacggcgacagcaacccccagaaguucaccuccagcgcgaacggggugacgacccacuacgugucccagaucggcggcuuccccgaccagaccgaggacgggggccucccccagagcgggcggaucgucguggacuacaugaugcagaagccgggcaagaccgggacgaucguguaccagcgcggcguccugcugccccagaagguguggugcgccuccggccggagcaaggugaucaaggggagccucccccugaucggcgaggccgacugccugcacgagaaguacgggggccucaacaaguccaagcccuacuacaccggggagcacgccaaggccaucggcaacugcccgaucugggucaagacgccccugaagcuggcgaacggcaccaaguaccgcccgcccgccaagcuccugaaggagcggggguucuucggcgccaucgccggguuccuggagggcgggugggagggcaugaucgccggcuggcacggguacaccagccacggcgcgcacgggguggccgucgccgccgaccucaaguccacccaggaggccaucaacaagaucaccaagaaccugaacagccuguccgagcucgaggugaagaaccugcagcgccugagcggcgcgauggacgagcuccacaacgagauccuggagcuggacgagaagguggacgaccuccgggccgacaccaucuccagccagaucgagcuggccguccugcucuccaacgagggcaucaucaacagcgaggacgagcaccuccuggcccuggagcgcaagcugaagaagaugcuggggcccuccgcgguggacaucggcaacgggugcuucgagacgaagcacaagugcaaccagaccugccucgaccggaucgccgccggcaccuucaacgccggggaguucagccugcccaccuucgacucccugaacaucaccgccgcgagccucaacgacgacggccuggacaaccacacgauccugcuguacuacuccaccgccgccagcucccucgccgugacccugaugcuggccaucuucaucgucuacauggugagccgcgacaacguguccugcagcaucugccucuga

SEQ ID NO: 90879 - RNA, 1755 nt, Artificial Sequence; identical to SEQ ID NO: 90878
  derived and/or modified CDS sequence (opt1) from hemagglutinin__InfluenzaB__AGF44878

SEQ ID NO: 90880 - RNA, 1755 nt, Artificial Sequence; identical to SEQ ID NO: 90878
  derived and/or modified CDS sequence (opt1) from hemagglutinin__InfluenzaB__AGF44879

SEQ ID NO: 90881 - RNA, 1755 nt, Artificial Sequence
  derived and/or modified CDS sequence (opt1) from hemagglutinin__InfluenzaB__AGF44881
augaaggccaucaucgugcugcucauggucgugaccagcaacgccgaccgcaucugcaccggcaucacguccagcaacagcccccacguggucaagaccgcgacccagggggaggugaacgugaccggcgucaucccgcugacgaccacccccaccaaguccuacuucgccaaccugaaggggacgaagacccggggcaagcucugccccgacugccugaacugcaccgaccuggacguggcccucgggcgccccaugugcgugggcaccacgccguccgccaaggccagcauccugcacgagguccggcccgugaccuccggcugcuuccccaucaugcacgaccgcaccaagauccggcagcuggcgaaccuccugcgcggguacgagaacauccggcugagcacccagaacgugaucgacgccgagaaggcccccggcgggccguaccgccucggcacguccgggagcugccccaacgccaccuccaagagcggcuucuucgcgaccauggccugggccguccccaaggacaacaacaagaacgccaccaacccccugacgguggaggugccguacaucugcgccgagggcgaggaccagaucgcggucuggggguuccacuccgacaacaagacccagaugaagaaccuguacggcgacagcaacccccagaaguucaccuccagcgccaacggggugaccacgcacuacgugucccagaucggcggcuuccccgaccagaccgaggacgggggccucccccagagcgggcggaucgucguggacuacaugaugcagaagccgggcaagaccgggaccaucguguaccagcgcggcguccugcugccccagaagguguggugcgccuccggccggagcaaggugaucaaggggagccucccccugaucggcgaggccgacugccugcacgagaaguacgggggccucaacaaguccaagcccuacuacacgggggagcacgccaaggcgaucggcaacugcccgaucugggucaagacgccccugaagcuggccaacggcaccaaguaccgcccgcccgccaagcuccugaaggagcggggguucuucggcgccaucgccggguuccuggagggcgggugggagggcaugaucgcgggcuggcacggguacaccagccacggcgcccacgggguggccgucgccgccgaccucaaguccacccaggaggcgaucaacaagaucaccaagaaccugaacagccuguccgagcucgaggugaagaaccugcagcgccugagcggcgccauggacgagcuccacaacgagauccuggagcuggacgagaagguggacgaccuccgggccgacaccaucuccagccagaucgagcuggccguccugcucuccaacgagggcaucaucaacagcgaggacgagcaccuccuggcgcuggagcgcaagcugaagaagaugcuggggcccuccgccguggacaucggcaacgggugcuucgagaccaagcacaagugcaaccagacgugccucgaccggaucgccgccggcaccuucaacgccggggaguucagccugcccaccuucgacucccugaacaucaccgcggccagccucaacgacgacggccuggacaaccacaccauccugcuguacuacuccacggccgccagcucccucgccgugauccugaugcuggcgaucuucaucgucuacauggugagccgcgacaacguguccugcagcaucugccucuga

SEQ ID NO: 90882 - RNA, 1755 nt, Artificial Sequence
  derived and/or modified CDS sequence (opt1) from hemagglutinin__InfluenzaB__AGF44882
augaaggccaucaucgugcugcucauggucgugaccagcaacgccgaccgcaucugcaccggcaucacguccagcaacagcccccacguggucaagaccgcgacccagggggaggugaacgugaccggcgucaucccgcugacgaccacccccaccaaguccuacuucgccaaccugaaggggacgaagacccggggcaagcucugccccgacugccugaacugcaccgaccuggacguggcccucgggcgccccaugugcgugggcaccacgccguccgccaaggccagcauccugcacgagguccggcccgugaccuccggcugcuuccccaucaugcacgaccgcaccaagauccggcagcuggcgaaccuccugcgcggguacgagaacauccggcugagcacccagaacgugaucgacgccgagaaggcccccggcgggccguaccgccucggcacguccgggagcugccccaacgccaccuccaagagcggcuucuucgcgaccauggccugggccguccccaaggacaacaacaagaacgccaccaacccccugacgguggaggugccguacaucugcgccgagggcgaggaccagaucaccgucuggggguuccacuccgacaacaagacccagaugaagaaccuguacggcgacagcaacccccagaaguucaccuccagcgcgaacggggugacgacccacuacgugucccagaucggcggcuuccccgaccagaccgaggacgggggccucccccagagcgggcggaucgucguggacuacaugaugcagaagccgggcaagaccgggacgaucguguaccagcgcggcguccugcugccccagaagguguggugcgccuccggcaagagcaaggugaucaaggggagccucccccugaucggcgaggccgacugccugcacgagaaguacgggggccucaacaaguccaagcccuacuacaccggggagcacgccaaggccaucggcaacugcccgaucugggucaagacgccccugaagcuggcgaacggcaccaaguaccggccgcccgccaagcuccugaaggagcgcggguucuucggcgccaucgccggguuccuggagggcgggugggagggcaugaucgccggcuggcacggguacaccagccacggcgcgcacgggguggccgucgccgccgaccucaaguccacccaggaggccaucaacaagaucaccaagaaccugaacagccuguccgagcucgaggugaagaaccugcagcggcugagcggcgcgauggacgagcuccacaacgagauccuggagcuggacgagaagguggacgaccuccgcgccgacaccaucuccagccagaucgagcuggccguccugcucuccaacgagggcaucaucaacagcgaggacgagcaccuccuggcccuggagcggaagcugaagaagaugcuggggcccuccgcgguggacaucggcaacgggugcuucgagacgaagcacaagugcaaccagaccugccucgaccgcaucgccgccggcaccuucaacgccggggaguucagccugcccaccuucgacucccugaacaucaccgccgcgagccucaacgacgacggccuggacaaccacacgauccugcuguacuacuccaccgccgccagcucccucgccgugacccugaugcuggccaucuucaucgucuacauggugagccgggacaacguguccugcagcaucugccucuga

SEQ ID NO: 90883 - RNA, 1755 nt, Artificial Sequence; identical to SEQ ID NO: 90878
  derived and/or modified CDS sequence (opt1) from hemagglutinin__InfluenzaB__AGF44883

SEQ ID NO: 90884 - RNA, 1755 nt, Artificial Sequence; identical to SEQ ID NO: 90878
  derived and/or modified CDS sequence (opt1) from hemagglutinin__InfluenzaB__AGF44884

SEQ ID NO: 90885 - RNA, 1755 nt, Artificial Sequence; identical to SEQ ID NO: 90878
  derived and/or modified CDS sequence (opt1) from hemagglutinin__InfluenzaB__AGF44886

SEQ ID NO: 90886 - RNA, 1755 nt, Artificial Sequence; identical to SEQ ID NO: 90878
  derived and/or modified CDS sequence (opt1) from hemagglutinin__InfluenzaB__AGF44887

SEQ ID NO: 90887 - RNA, 1755 nt, Artificial Sequence; identical to SEQ ID NO: 90878
  derived and/or modified CDS sequence (opt1) from hemagglutinin__InfluenzaB__AGF44888

SEQ ID NO: 90888 - RNA, 1755 nt, Artificial Sequence
  derived and/or modified CDS sequence (opt1) from hemagglutinin__InfluenzaB__AGL09834
augaaggccaucaucgugcugcucauggucgugaccagcaacgccgaccgcaucugcaccggcaucacguccagcaacagcccccacguggucaagaccgcgacccagggggaggugaacgugaccggcgucaucccgcugacgaccacccccaccaaguccuacuucgccaaccugaaggggacgaagacccggggcaagcucugccccgacugccugaacugcaccgaccuggacguggcccucgggcgccccaugugcgugggcaccacgccguccgccaaggccagcauccugcacgagguccggcccgugaccuccggcugcuuccccaucaugcacgaccgcaccaagauccggcagcuggcgaaccuccugcgcggguacgagaacauccggcugagcacccagaacgugaucgacgccgagaaggcccccggcgggccguaccgccucggcacguccgggagcugccccaacgccaccuccaagagcggcuucuucgcgaccauggccugggccguccccaaggacaacaacaagaacgccaccaacccccugacgguggaggugccguacaucugcgccgagggcgaggaccagaucgcggucuggggguuccacuccgacaacaagacccagaugaagaaccuguacggcgacagcaacccccagaaguucaccuccagcgccaacggggugaccacgcacuacgugucccagaucggcggcuuccccgaccagaccgaggacgggggccucccccagagcgggcggaucgucguggacuacaugaugcagaagccgggcaagaccgggaccaucguguaccagcgcggcguccugcugccccagaagguguggugcgccuccggccggagcaaggugaucaaggggagccucccccugaucggcgaggccgacugccugcacgagaaguacgggggccucaacaaguccaagcccuacuacacgggggagcacgccaaggcgaucggcaacugcccgaucugggucaagacgccccugaagcuggccaacggcaccaaguaccgcccgcccgccaagcuccugaaggagcggggguucuucggcgccaucgccggguuccuggagggcgggugggagggcaugaucgcgggcuggcacggguacaccagccacggcgcccacgggguggccgucgccgccgaccucaaguccacccaggaggcgaucaacaagaucaccaagaaccugaacagccuguccgagcucgaggugaagaaccugcagcgccugagcggcgccauggacgagcuccacaacgagauccuggagcuggacgagaagguggacgaccuccgggccgacaccaucuccagccagaucgagcuggccguccugcucuccaacgagggcaucaucaacagcgaggacgagcaccuccuggcgcuggagcgcaagcugaagaagaugcuggggcccuccgccguggacaucggcaacgggugcuucgagaccaagcacaagugcaaccagacgugccucgaccggaucgccgccggcaccuucaacgccggggacuucagccugcccaccuucgacucccugaacaucaccgcggccagccucaacgacgacggccuggacaaccacaccauccugcuguacuacuccacggccgccagcucccucgccgugacccugaugcuggcgaucuucaucgucuacauggugagccgcgacaacguguccugcagcaucugccucuga

SEQ ID NO: 90889 - RNA, 1755 nt, Artificial Sequence; identical to SEQ ID NO: 90878
  derived and/or modified CDS sequence (opt1) from hemagglutinin__InfluenzaB__AGL09835

SEQ ID NO: 90890 - RNA, 1755 nt, Artificial Sequence
  derived and/or modified CDS sequence (opt1) from hemagglutinin__InfluenzaB__AGL09836
augaaggccaucaucgugcugcucauggucgugaccagcaacgccgaccgcaucugcaccggcaucacguccagcaacagcccccacguggucaagaccgcgacccagggggaggugaacgugaccggcgucaucccgcugacgaccacccccaccaaguccuacuucgccaaccugaaggggacgaagacccggggcaagcucugccccgacugccugaacugcaccgaccuggacguggcccucgggcgccccaugugcgugggcaccacgccguccgccaaggccagcauccugcacgagguccggcccgugaccuccggcugcuuccccaucaugcacgaccgcaccaagauccggcagcuggcgaaccuccugcgcggguacgagaacauccggcugagcacccagaacgugaucgacgccaagaaggcccccggcgggccguaccgccucggcacguccgggagcugccccaacgccaccuccaagagcggcuucuucgcgaccauggccugggccguccccgaggacaacaacaagaacgccaccaacccccugacgguggaggugccguacaucugcgccgagggcgaggaccagaucaccgucuggggguuccacuccgacaacaagacccagaugaagaaccuguacggcgacagcaacccccagaaguucaccuccagcgcgaacggggugacgacccacuacgugucccagaucggcggcuuccccgaccagaccgaggacgggggccucccccagagcgggcggaucgucguggacuacaugaugcagaagccgggcaagaccgggacgaucguguaccagcgcggcguccugcugccccagaagguguggugcgccuccggccggagcaaggugaucaaggggagccucccccugaucggcgaggccgacugccugcacgagaaguacgggggccucaacaaguccaagcccuacuacaccggggagcacgccaaggccaucggcaacugcccgaucugggucaagacgccccugaagcuggcgaacggcaccaaguaccgcccgcccgccaagcuccugaaggagcggggguucuucggcgccaucgccggguuccuggagggcgggugggagggcaugaucgccggcuggcacggguacaccagccacggcgcgcacgggguggccgucgccgccgaccucaaguccacccaggaggccaucaacaagaucaccaagaaccugaacagccuguccgagcucgaggugaagaaccugcagcgccugagcggcgcgauggacgagcuccacaacgagauccuggagcuggacgagaagguggacgaccuccgggccgacaccaucuccagccagaucgagcuggccguccugcucuccaacgagggcaucaucaacagcgaggacgagcaccuccuggcccuggagcgcaagcugaagaagaugcuggggcccuccgcgguggacaucggcaacgggugcuucgagacgaagcacaagugcaaccagaccugccucgaccggaucgccgccggcaccuucaacgccggggaguucagccugcccaccuucgacucccugaacaucaccgccgcgagccucaacgacgacggccuggacaaccacacgauccugcuguacuacuccaccgccgccagcucccucgccgugacccugaugcuggccaucuucaucgucuacauggugagccgcgacaacguguccugcagcaucugccucuga

SEQ ID NO: 90891 - RNA, 1755 nt, Artificial Sequence; identical to SEQ ID NO: 90878
  derived and/or modified CDS sequence (opt1) from hemagglutinin__InfluenzaB__AGL09837

SEQ ID NO: 90892 - RNA, 1755 nt, Artificial Sequence; identical to SEQ ID NO: 90878
  derived and/or modified CDS sequence (opt1) from hemagglutinin__InfluenzaB__AGL09838

SEQ ID NO: 90893 - RNA, 1755 nt, Artificial Sequence; identical to SEQ ID NO: 90878
  derived and/or modified CDS sequence (opt1) from hemagglutinin__InfluenzaB__AGL09839

SEQ ID NO: 90894 - RNA, 1755 nt, Artificial Sequence; identical to SEQ ID NO: 90878
  derived and/or modified CDS sequence (opt1) from hemagglutinin__InfluenzaB__AGL09840

SEQ ID NO: 90895 - RNA, 1755 nt, Artificial Sequence; identical to SEQ ID NO: 90878
  derived and/or modified CDS sequence (opt1) from hemagglutinin__InfluenzaB__AGL09841

SEQ ID NO: 90896 - RNA, 1758 nt, Artificial Sequence
  derived and/or modified CDS sequence (opt1) from hemagglutinin__InfluenzaB__AGL09842
augaaggccaucaucgugcugcucauggucgugaccagcaacgccgaccgcaucugcaccggcaucacguccagcaacagcccccacguggucaagaccgcgacccagggggaggugaacgugaccggcgucaucccgcugacgaccacccccaccaagagccacuucgccaaccugaaggggacggagacccggggcaagcucugccccaagugccugaacugcaccgaccuggacguggcccucgggcgccccaagugcaccggcaagaucccguccgcccgggugagcauccugcacgagguccgccccgugacguccggcugcuuccccaucaugcacgaccggaccaagauccgccagcugcccaaccuccugcggggguacgagcacauccgccugagcacccacaacgugaucaacgccgagaacgcgccgggcgggcccuacaagaucggcaccuccgggagcugccccaacgucacgaacggcaacggcuucuucgccaccauggccugggccgugcccaagaacgacaagaacaagaccgagaccaacccgcucacgaucgaggugcccuacaucugcaccgagggggaggaccagaucaccgucuggggcuuccacuccgacaacgagacccagauggcgaagcuguacggggacagcaagccccagaaguucacguccagcgccaacggcgugaccacccacuacgugucccagaucggcggguuccccaaccagaccgaggacggcgggcugccgcagagcggccggaucgucguggacuacauggugcagaaguccgggaagacgggcaccaucaccuaccagcgcggcauccuccugccccagaaggucuggugcgccagcgggcgguccaaggugaucaagggcagccugccccucaucggggaggccgacugccugcacgagaaguacggcgggcugaacaagagcaagcccuacuacaccggcgagcacgccaaggcgaucggcaacugcccgaucugggugaagacgccccucaagcuggccaacgggaccaaguaccgcccgcccgccaagcugcucaaggagcggggcuucuucggggccaucgccggcuuccuggagggcgggugggagggcaugaucgcgggguggcacggcuacaccucccacggggcccacggcgucgccguggccgccgaccugaaguccacccaggaggcgaucaacaagaucacgaagaaccucaacucccugagcgagcuggaggucaagaaccuccagcgccuguccggcgccauggacgagcugcacaacgagauccucgagcuggacgagaagguggacgaccugcgggccgacaccaucagcucccagaucgagcucgccgugcugcugagcaacgaggggaucaucaacuccgaggacgagcaccuccuggcccuggagcgcaagcucaagaagaugcugggccccagcgcggucgagaucgggaacggcugcuucgagaccaagcacaagugcaaccagaccugccuggaccggaucgccgccgggaccuucgacgccggcgaguucucccuccccacguucgacagccugaacaucaccgcggccucccugaacgacgacggccucgacaaccacaccauccugcuguacuacagcaccgccgccuccagccuggccgugacgcucaugaucgcgaucuucguggucuacauggugucccgcgacaacgugagcugcuccaucugccuguga

SEQ ID NO: 90897 - RNA, 1755 nt, Artificial Sequence; identical to SEQ ID NO: 90878
  derived and/or modified CDS sequence (opt1) from hemagglutinin__InfluenzaB__AGL09843

SEQ ID NO: 90898 - RNA, 1755 nt, Artificial Sequence
  derived and/or modified CDS sequence (opt1) from hemagglutinin__InfluenzaB__AGL09844
augaaggccaucaucgugcugcucauggucgugaccagcaacgccgaccgcaucugcaccggcaucacguccagcaacagcccccacguggucaagaccgcgacccagggggaggugaacgugaccggcgucaucccgcugacgaccacccccaccaaguccuacuucgccaaccugaaggggacgaagacccggggcaagcucugccccgacugccugaacugcaccgaccuggacguggcccucgggcgccccaugugcgugggcaccacgccguccgccaaggccagcauccugcacgagguccggcccgugaccuccggcugcuuccccaucaugcacgaccgcaccaagauccggcagcuggcgaaccuccugcgcggguacgagaacauccggcugagcacccagaacgugaucgacgccgagaaggcccccggcgggccguaccgccucggcacguccgggagcugccccaacgccaccuccaagagcggcuucuucgcgaccauggccugggccguccccaaggacaacaacaagaacgccaccaacccccugacgguggaggugccguacaucugcgccgagggcgaggaccagaucaccgucuggggguuccacuccgacaacaagacccagaugaagaaccuguacggcgacagcaacccccagaaguucaccuccagcgcgaacggggugacgacccacuacgugucccagaucggcggcuuccccgaccagaaggaggacgggggccucccccagagcgggcggaucgucguggacuacaugaugcagaagccgggcaagaccgggaccaucguguaccagcgcggcguccugcugccccagaagguguggugcgccuccggccggagcaaggugaucaaggggagccucccccugaucggcgaggccgacugccugcacgagaaguacgggggccucaacaaguccaagcccuacuacacgggggagcacgccaaggccaucggcaacugcccgaucugggucaagacgccccugaagcuggcgaacggcaccaaguaccgcccgcccgccaagcuccugaaggagcggggguucuucggcgccaucgccggguuccuggagggcgggugggagggcaugaucgccggcuggcacggguacaccagccacggcgcgcacgggguggccgucgccgccgaccucaaguccacccaggaggccaucaacaagaucaccaagaaccugaacagccuguccgagcucgaggugaagaaccugcagcgccugagcggcgcgauggacgagcuccacaacgagauccuggagcuggacgagaagguggacgaccuccgggccgacaccaucuccagccagaucgagcuggccguccugcucuccaacgagggcaucaucaacagcgaggacgagcaccuccuggcccuggagcgcaagcugaagaagaugcuggggcccuccgcgguggacaucggcaacgggugcuucgagaccaagcacaagugcaaccagacgugccucgaccggaucgccgccggcaccuucaacgccggggaguucagccugcccaccuucgacucccugaacaucaccgccgcgagccucaacgacgacggccuggacaaccacaccauccugcuguacuacuccacggccgccagcucccucgccgugacccugaugcuggccaucuucaucgucuacauggugagccgcgacaacguguccugcagcaucugccucuga

SEQ ID NO: 90899 - RNA, 1755 nt, Artificial Sequence; identical to SEQ ID NO: 90878
  derived and/or modified CDS sequence (opt1) from hemagglutinin__InfluenzaB__AGL09845

SEQ ID NO: 90900 - RNA, 1755 nt, Artificial Sequence; identical to SEQ ID NO: 90878
  derived and/or modified CDS sequence (opt1) from hemagglutinin__InfluenzaB__AGL09846

SEQ ID NO: 90901 - RNA, 1755 nt, Artificial Sequence
  derived and/or modified CDS sequence (opt1) from hemagglutinin__InfluenzaB__AGL09847
augaaggccaucaucgugcugcucauggucgugaccagcaacgccgaccgcaucugcaccggcaucacguccagcaacagcccccacguggucaagaccgcgacccagggggaggugaacgugaccggcgucaucccgcugacgaccacccccaccaaguccuacuucgccaaccugaaggggacgaagacccggggcaagcucugccccgacugccugaacugcaccgaccuggacguggcccucgggcgccccaugugcgugggcaccacgccguccgccaaggccagcauccugcacgagguccggcccgugaccuccggcugcuuccccaucaugcacgaccgcaccaagauccggcagcuggcgaaccuccugcgcggguacgagaacauccggcugagcacccagaacgugaucgacgccgagaaggcccccggcgggccguaccgccucggcacguccgggagcugccccaacgccaccuccaagagcggcuucuucgcgaccauggccugggccguccccaaggacaacaacaagaacgccaccaacccccugacgguggaggugccguacaucugcgccgagggcgaggaccagaucgcgaucuggggguuccacuccgacaacaagacccagaugaagaaccuguacggcgacagcaacccccagaaguucaccuccagcgccaacggggucaccacgcacuacgugucccagaucggcggcuuccccgaccagaccgaggacgggggccucccccagagcgggcggaucguggucgacuacaugaugcagaagccgggcaagaccgggaccaucguguaccagcgcggcgugcugcugccccagaaggucuggugcgccuccggccggagcaaggugaucaaggggagccucccccugaucggcgaggccgacugccugcacgagaaguacgggggccucaacaaguccaagcccuacuacacgggggagcacgccaaggcgaucggcaacugcccgaucugggugaagacgccccugaagcuggccaacggcaccaaguaccgcccgcccgccaagcuccugaaggagcggggguucuucggcgccaucgccggguuccuggagggcgggugggagggcaugaucgcgggcuggcacggguacaccagccacggcgcccacggggucgccguggccgccgaccucaaguccacccaggaggcgaucaacaagaucaccaagaaccugaacagccuguccgagcucgaggucaagaaccugcagcgccugagcggcgccauggacgagcuccacaacgagauccuggagcuggacgagaagguggacgaccuccgggccgacaccaucuccagccagaucgagcuggccgugcugcucuccaacgagggcaucaucaacagcgaggacgagcaccuccuggcgcuggagcgcaagcugaagaagaugcuggggcccuccgccgucgacaucggcaacgggugcuucgagaccaagcacaagugcaaccagacgugccucgaccggaucgccgccggcaccuucaacgccggggaguucagccugcccaccuucgacucccugaacaucaccgcggccagccucaacgacgacggccuggacaaccacaccauccugcuguacuacuccacggccgccagcucccucgccgugacccugaugcuggcgaucuucaucguguacauggucagccgcgacaacguguccugcagcaucugccucuga

SEQ ID NO: 90902 - RNA, 1755 nt, Artificial Sequence
  derived and/or modified CDS sequence (opt1) from hemagglutinin__InfluenzaB__AGL09849
augaaggccaucaucgugcugcucauggucgugaccagcaacgccgaccgcaucugcaccggcaucacguccagcaacagcccccacguggucaagaccgcgacccagggggaggugaacgugaccggcgucaucccgcugacgaccacccccaccaaguccuacuucgccaaccugaaggggacgaagacccggggcaagcucugccccgacugccugaacugcaccgaccuggacguggcccucgggcgccccaugugcgugggcaccacgccguccgccaaggccagcauccugcacgagguccggcccgugaccuccggcugcuuccccaucaugcacgaccgcaccaagauccggcagcuggcgaaccuccugcgcggguacgagaacauccggcugagcacccagaacgugaucaacgccgagaaggcccccggcgggccguaccgccucggcacguccgggagcugccccaacgccaccuccaagagcggcuucuucgcgaccauggccugggccguccccaaggacaacaacaagaacgccaccaacccccugacgguggaggugccguacaucugcgccgagggcgaggaccagaucaccgucuggggguuccacuccgacaacaagacccagaugaagaaccuguacggcgacagcaacccccagaaguucaccuccagcgcgaacggggugacgacccacuacgugucccagaucggcggcuuccccgaccagaccgaggacgggggccucccccagagcgggcggaucgucguggacuacaugaugcagaagccgggcaagaccgggacgaucguguaccagcgcggcguccugcugccccagaagguguggugcgccuccggccggagcaaggugaucaaggggagccucccccugaucggcgaggccgacugccugcacgagaaguacgggggccucaacaaguccaagcccuacuacaccggggagcacgccaaggccaucggcaacugcccgaucugggucaagacgccccugaagcuggcgaacggcaccaaguaccgcccgcccgccaagcuccugaaggagcggggguucuucggcgccaucgccggguuccuggagggcgggugggagggcaugaucgccggcuggcacggguacaccagccacggcgcgcacgggguggccgucgccgccgaccucaaguccacccaggaggccaucaacaagaucaccaagaaccugaacagccuguccgagcucgaggugaagaaccugcagcgccugagcggcgcgauggacgagcuccacaacgagauccuggagcuggacgagaagguggacgaccuccgggccgacaccaucuccagccagaucgagcuggccguccugcucuccaacgagggcaucaucaacagcgaggacgagcaccuccuggcccuggagcgcaagcugaagaagaugcuggggcccuccgcgguggacaucggcaacgggugcuucgagacgaagcacaagugcaaccagaccugccucgaccggaucgccgccggcaccuucaacgccggggaguucagccugcccaccuucgacucccugaacaucaccgccgcgagccucaacgacgacggccuggacaaccacacgauccugcuguacuacuccaccgccgccagcucccucgccgugacccugaugcuggccaucuucaucgucuacauggugagccgcgacaacguguccugcagcaucugccucuga

SEQ ID NO: 90903 - RNA, 1755 nt, Artificial Sequence; identical to SEQ ID NO: 90878
  derived and/or modified CDS sequence (opt1) from hemagglutinin__InfluenzaB__AGL09850

SEQ ID NO: 90904 - RNA, 1755 nt, Artificial Sequence; identical to SEQ ID NO: 90878
  derived and/or modified CDS sequence (opt1) from hemagglutinin__InfluenzaB__AGL09851

SEQ ID NO: 90905 - RNA, 1758 nt, Artificial Sequence; identical to SEQ ID NO: 90669
  derived and/or modified CDS sequence (opt1) from hemagglutinin__InfluenzaB__AGL09852

SEQ ID NO: 90906 - RNA, 1755 nt, Artificial Sequence; identical to SEQ ID NO: 90878
  derived and/or modified CDS sequence (opt1) from hemagglutinin__InfluenzaB__AGL09853

SEQ ID NO: 90907 - RNA, 1755 nt, Artificial Sequence; identical to SEQ ID NO: 90878
  derived and/or modified CDS sequence (opt1) from hemagglutinin__InfluenzaB__AGL09854

SEQ ID NO: 90908 - RNA, 1758 nt, Artificial Sequence
  derived and/or modified CDS sequence (opt1) from hemagglutinin__InfluenzaB__AGL09855
augaaggccaucaucgugcugcucauggucgugaccagcaacgccgaccgcaucugcaccggcaucacguccagcaacagcccccacguggucaagaccgcgacccagggggaggugaacgugaccggcgucaucccgcugacgaccacccccaccaagagccacuucgccaaccugaaggggacggagacccggggcaagcucugccccaagugccugaacugcaccgaccuggacguggcccucgggcgccccaagugcaccggcaagaucccguccgcccgggugagcauccugcacgagguccgccccgugacguccggcugcuuccccaucaugcacgaccggaccaagauccgccagcugcccaaccuccugcggggguacgagcacauccgccugagcacccacaacgugaucaacgccgagaacgcgccgggcgggcccuacaagaucggcaccuccgggagcugccccaacgucacgaacggcaacggcuucuucgccaccauggccugggccgugcccaagaacgacaagaacaagaccgagaccaacccgcucacgaucgaggugcccuacaucugcaccgaggaggaggaccagaucaccgucuggggguuccacuccgacaacgagacccagauggcgaagcuguacggcgacagcaagccccagaaguucacguccagcgccaacggggugaccacccacuacgugucccagaucggcgacuuccccaaccagaccgaggacggcgggcugccgcagagcggccggaucgucguggacuacauggugcagaaguccgggaagacgggcaccaucaccuaccagcgcgggauccuccugccccagaaggucuggugcgccagcggccgguccaaggugaucaagggcagccugccccucaucggggaggccgacugccugcacgagaaguacggcgggcugaacaagagcaagcccuacuacaccggcgagcacgccaaggcgaucgggaacugcccgaucugggugaagacgccccucaagcuggccaacggcaccaaguaccgcccgcccgccaagcugcucaaggagcggggcuucuucggggccaucgccggcuuccuggagggcgggugggaggggaugaucgcgggcuggcacggcuacaccucccacggggcccacggcgucgccguggccgccgaccugaaguccacccaggaggcgaucaacaagaucacgaagaaccucaacucccugagcgagcuggaggucaagaaccuccagcgccuguccggggccauggacgagcugcacaacgagauccucgagcuggacgagaagguggacgaccugcgggccgacaccaucagcucccagaucgagcucgccgugcugcugagcaacgagggcaucaucaacuccgaggacgagcaccuccuggcccuggagcgcaagcucaagaagaugcugggccccagcgcggucgagaucgggaacggcugcuucgagaccaagcacaagugcaaccagaccugccuggaccggaucgccgccgggaccuucgacgccggcgaguucucccuccccacguucgacagccugaacaucaccgcggccucccugaacgacgacgggcucgacaaccacaccauccugcuguacuacagcaccgccgccuccagccuggccgugacgcucaugaucgcgaucuucguggucuacauggugucccgcgacaacgugagcugcuccaucugccuguga

SEQ ID NO: 90909 - RNA, 1755 nt, Artificial Sequence; identical to SEQ ID NO: 90878
  derived and/or modified CDS sequence (opt1) from hemagglutinin__InfluenzaB__AGL09856

SEQ ID NO: 90910 - RNA, 1755 nt, Artificial Sequence
  derived and/or modified CDS sequence (opt1) from hemagglutinin__InfluenzaB__AGL09857
augaaggccaucaucgugcugcucauggucgugaccagcaacgccgaccgcaucugcaccggcaucacguccagcaacagcccccacguggucaagaccgcgacccagggggaggugaacgugaccggcgucaucccgcugacgaccacccccaccaaguccuacuucgccaaccugaaggggacgaagacccggggcaagcucugccccgacugccugaacugcaccgaccuggacguggcccucgggcgccccaugugcgugggcaccacgccguccgccaaggccagcauccugcacgagguccggcccgugaccuccggcugcuuccccaucaugcacgaccgcaccaagauccggcagcuggcgaaccuccugcgcggguacgagaacauccggcugagcacccagaaggugaucgacgccgagaaggcccccggcgggccguaccgccucggcacguccgggagcugccccaacgccaccuccaagagcggcuucuucgcgaccauggccugggccguccccaaggacaacaacaagaacgccaccaacccccugacgguggaggugccguacaucugcgccgagggcgaggaccagaucaccgucuggggguuccacuccgacaacaagacccagaugaagaaccuguacggcgacagcaacccccagaaguucaccuccagcgcgaacggggugacgacccacuacgugucccagaucggcggcuuccccgaccagaccgaggacgggggccucccccagagcgggcggaucgucguggacuacaugauccagaagccgggcaagaccgggacgaucguguaccagcgcggcguccugcugccccagaagguguggugcgccuccggccggagcaaggugaucaaggggagccucccccugaucggcgaggccgacugccugcacgagaaguacgggggccucaacaaguccaagcccuacuacaccggggagcacgccaaggccaucggcaacugcccgaucugggucaagacgccccugaagcuggcgaacggcaccaaguaccgcccgcccgccaagcuccugaaggagcggggguucuucggcgccaucgccggguuccuggagggcgggugggagggcaugaucgccggcuggcacggguacaccagccacggcgcgcacgggguggccgucgccgccgaccucaaguccacccaggaggccaucaacaagaucaccaagaaccugaacagccuguccgagcucgaggugaagaaccugcagcgccugagcggcgcgauggacgagcuccacaacgagauccuggagcuggacgagaagguggacgaccuccgggccgacaccaucuccagccagaucgagcuggccguccugcucuccaacgagggcaucaucaacagcgaggacgagcaccuccuggcccuggagcgcaagcugaagaagaugcuggggcccuccgcgguggacaucggcaacgggugcuucgagacgaagcacaagugcaaccagaccugccucgaccggaucgccgccggcaccuucaacgccggggaguucagccugcccaccuucgacucccugaacaucaccgccgcgagccucaacgacgacggccuggacaaccacacgauccugcuguacuacuccaccgccgccagcucccucgccgugacccugaugcuggccaucuucaucgucuacauggugagccgcgacaacguguccugcagcaucugccucuga

SEQ ID NO: 90911 - RNA, 1758 nt, Artificial Sequence
  derived and/or modified CDS sequence (opt1) from hemagglutinin__InfluenzaB__AGL09859
augaaggccaucaucgugcugcucauggucgugaccagcaacgccgaccgcaucugcaccggcaucacguccagcaacagcccccacguggucaagaccgcgacccagggggaggugaacgugaccggcgucaucccgcugacgaccacccccaccaagagccacuucgccaaccugaaggggacggagacccggggcaagcucugccccaagugccugaacugcaccgaccuggacguggcccucgggcgccccaagugcaccggcaagaucccguccgcccgggugagcauccugcacgagguccgccccgugacguccggcugcuuccccaucaugcacgaccggaccaagauccgccagcugcccaaccuccugcggggguacgagcacauccgccugagcacccacaacgugaucaacgccgaggacgcgccgggcgggcccuacaagaucggcaccuccgggagcugccccaacgucacgaacggcaacggcuucuucgccaccauggccugggccgugcccaagaacgacaagaacaagaccgcgaccaacccgcucacgaucgaggugcccuacaucugcaccgagggggaggaccagaucaccgucuggggcuuccacuccgacaacgagacccagauggccaagcuguacggggacagcaagccccagaaguucacguccagcgccaacggcgugaccacccacuacgugucccagaucggcggguuccccaaccagaccgaggacggcgggcugccgcagagcggccggaucgucguggacuacauggugcagaaguccgggaagacgggcaccaucaccuaccagcgcggcauccuccugccccagaaggucuggugcgccagcgggcgguccaaggugaucaagggcagccugccccucaucggggaggccgacugccugcacgagaaguacggcgggcugaacaagagcaagcccuacuacaccggcgagcacgcgaaggccaucggcaacugcccgaucugggugaagacgccccucaagcuggccaacgggaccaaguaccgcccgcccgccaagcugcucaaggagcggggcuucuucggggccaucgcgggcuuccuggagggcgggugggagggcaugaucgccggguggcacggcuacaccucccacggggcccacggcgucgccguggccgcggaccugaaguccacccaggaggccaucaacaagaucacgaagaaccucaacucccugagcgagcuggaggucaagaaccuccagcgccuguccggcgccauggacgagcugcacaacgagauccucgagcuggacgagaagguggacgaccugcgggccgacaccaucagcucccagaucgagcucgccgugcugcugagcaacgaggggaucaucaacuccgaggacgagcaccuccuggcgcuggagcgcaagcucaagaagaugcugggccccagcgccgucgagaucgggaacggcugcuucgagaccaagcacaagugcaaccagaccugccuggaccggaucgccgccgggaccuucgacgcgggcgaguucucccuccccacguucgacagccugaacaucaccgccgccucccugaacgacgacggccucgacaaccacaccauccugcuguacuacagcaccgccgccuccagccuggcggugacgcucaugaucgccaucuucguggucuacauggugucccgcgacaacgugagcugcuccaucugccuguga

SEQ ID NO: 90912 - RNA, 1758 nt, Artificial Sequence; identical to SEQ ID NO: 90911
  derived and/or modified CDS sequence (opt1) from hemagglutinin__InfluenzaB__AGL09860

SEQ ID NO: 90913 - RNA, 1758 nt, Artificial Sequence; identical to SEQ ID NO: 90911
  derived and/or modified CDS sequence (opt1) from hemagglutinin__InfluenzaB__AGL09861

SEQ ID NO: 90914 - RNA, 1758 nt, Artificial Sequence; identical to SEQ ID NO: 90911
  derived and/or modified CDS sequence (opt1) from hemagglutinin__InfluenzaB__AGL09862

SEQ ID NO: 90915 - RNA, 1758 nt, Artificial Sequence; identical to SEQ ID NO: 90911
  derived and/or modified CDS sequence (opt1) from hemagglutinin__InfluenzaB__AGL09863

SEQ ID NO: 90916 - RNA, 1755 nt, Artificial Sequence; identical to SEQ ID NO: 90878
  derived and/or modified CDS sequence (opt1) from hemagglutinin__InfluenzaB__AGL09864

SEQ ID NO: 90917 - RNA, 1755 nt, Artificial Sequence; identical to SEQ ID NO: 90878
  derived and/or modified CDS sequence (opt1) from hemagglutinin__InfluenzaB__AGL09866

SEQ ID NO: 90918 - RNA, 1755 nt, Artificial Sequence; identical to SEQ ID NO: 90878
  derived and/or modified CDS sequence (opt1) from hemagglutinin__InfluenzaB__AGL09867

SEQ ID NO: 90919 - RNA, 1755 nt, Artificial Sequence; identical to SEQ ID NO: 90878
  derived and/or modified CDS sequence (opt1) from hemagglutinin__InfluenzaB__AGL09868

SEQ ID NO: 90920 - RNA, 1755 nt, Artificial Sequence
  derived and/or modified CDS sequence (opt1) from hemagglutinin__InfluenzaB__AGL09869
augaaggccaucaucgugcugcucauggucgugaccagcaacgccgaccgcaucugcaccggcaucacguccagcaacagcccccacguggucaagaccgcgacccagggggaggugaacgugaccggcgucaucccgcugacgaccacccccaccaaguccuacuucgccaaccugaaggggacgaagacccggggcaagcucugccccgacugccugaacugcaccgaccuggacguggcccucgggcgccccaugugcgugggcaccacgccguccgccaaggccagcauccugcacgagguccggcccgugaccuccggcugcuuccccaucaugcacgaccgcaccaagauccggcagcuggcgaaccuccugcgcggguacgagaacauccggcugagcacccagaacgugaucgacgccgagaaggcccccggcgggccguaccgccucggcacguccgggagcugccccaacaccaccuccaagagcggcuucuucgccaccauggcgugggccguccccaaggacaacaacaagaacgccacgaacccccugaccguggaggugccguacaucugcgccgagggcgaggaccagaucaccgucuggggguuccacuccgacaacaagacccagaugaagaaccuguacggcgacagcaacccccagaaguucacguccagcgccaacggggugaccacccacuacgugucccagaucggcggcuuccccgaccagaccgaggacgggggccucccccagagcgggcggaucgucguggacuacaugaugcagaagccgggcaagacggggaccaucguguaccagcgcggcguccugcugccccagaagguguggugcgcguccggccggagcaaggugaucaaggggagccucccccugaucggcgaggccgacugccugcacgagaaguacgggggccucaacaaguccaagcccuacuacaccggggagcacgccaaggccaucggcaacugcccgaucugggucaagacgccccugaagcuggccaacggcaccaaguaccgcccgcccgcgaagcuccugaaggagcggggguucuucggcgccaucgccggguuccuggagggcgggugggagggcaugaucgccggcuggcacggguacaccagccacggcgcccacgggguggcggucgccgccgaccucaaguccacccaggaggccaucaacaagaucaccaagaaccugaacagccuguccgagcucgaggugaagaaccugcagcgccugagcggcgccauggacgagcuccacaacgagauccuggagcuggacgagaagguggacgaccuccgggcggacacgaucuccagccagaucgagcuggccguccugcucuccaacgagggcaucaucaacagcgaggacgagcaccuccuggcccuggagcgcaagcugaagaagaugcuggggcccuccgccguggacaucggcaacgggugcuucgagaccaagcacaagugcaaccagaccugccucgaccggaucgcggccggcaccuucaacgccggggaguucagccugcccaccuucgacucccugaacaucacggccgccagccucaacgacgacggccuggacaaccacaccauccugcuguacuacuccaccgcggccagcucccucgccgugacccugaugcuggccaucuucaucgucuacauggugagccgcgacaacguguccugcagcaucugccucuga

SEQ ID NO: 90921 - RNA, 1755 nt, Artificial Sequence
  derived and/or modified CDS sequence (opt1) from hemagglutinin__InfluenzaB__AGL09870
augaaggccaucaucgugcugcucauggucgugaccagcaacgccgaccgcaucugcaccggcaucacguccagcaacagcccccacguggucaagaccgcgacccagggggaggugaacgugaccggcgucaucccgcugacgaccacccccaccaaguccuacuucgccaaccugaaggggacgaagacccggggcaagcucugccccgacugccugaacugcaccgaccuggacguggcccucgggcgccccaugugcgugggcaccacgccguccgccaaggccagcauccugcacgagguccggcccgugaccuccggcugcuuccccaucaugcacgaccgcaccaagauccggcagcuggcgaaccuccugcgcggguacgagaacauccggcugagcacccagaacgugaucgacgccgagaaggcccccggcgggccguaccgccucggcacguccgggagcugccccaacgccaccuccaagagcggcuucuucgcgaccauggccugggccguccccaaggacaacaacaagaacgccaccaacccccugacgguggaggugccguacaucugcgccgagggcgaggaccagaucaccgucuggggguuccacuccgacaacaagacccagaugaagaaccuguacggcgacagcaacccccagcgguucaccuccagcgcgaacggggugacgacccacuacgugucccagaucggcggcuuccccgaccagaccgaggacgggggccucccccagagcgggcgcaucgucguggacuacaugaugcagaagccgggcaagaccgggacgaucguguaccagcggggcguccugcugccccagaagguguggugcgccuccggccgcagcaaggugaucaaggggagccucccccugaucggcgaggccgacugccugcacgagaaguacgggggccucaacaaguccaagcccuacuacaccggggagcacgccaaggccaucggcaacugcccgaucugggucaagacgccccugaagcuggcgaacggcaccaaguaccggccgcccgccaagcuccugaaggagcgcggguucuucggcgccaucgccggguuccuggagggcgggugggagggcaugaucgccggcuggcacggguacaccagccacggcgcgcacgggguggccgucgccgccgaccucaaguccacccaggaggccaucaacaagaucaccaagaaccugaacagccuguccgagcucgaggugaagaaccugcagcggcugagcggcgcgauggacgagcuccacaacgagauccuggagcuggacgagaagguggacgaccuccgcgccgacaccaucuccagccagaucgagcuggccguccugcucuccaacgagggcaucaucaacagcgaggacgagcaccuccuggcccuggagcggaagcugaagaagaugcuggggcccuccgcgguggacaucggcaacgggugcuucgagacgaagcacaagugcaaccagaccugccucgaccgcaucgccgccggcaccuucaacgccggggaguucagccugcccaccuucgacucccugaacaucaccgccgcgagccucaacgacgacggccuggacaaccacacgauccugcuguacuacuccaccgccgccagcucccucgccgugacccugaugcuggccaucuucaucgucuacauggugagccgggacaacguguccugcagcaucugccucuga

SEQ ID NO: 90922 - RNA, 1755 nt, Artificial Sequence; identical to SEQ ID NO: 90878
  derived and/or modified CDS sequence (opt1) from hemagglutinin__InfluenzaB__AGL09871

SEQ ID NO: 90923 - RNA, 1755 nt, Artificial Sequence
  derived and/or modified CDS sequence (opt1) from hemagglutinin__InfluenzaB__AGL09872
augaaggccaucaucgugcugcucauggucgugaccagcaacgccgaccgcaucugcaccggcaucacguccagcaacagcccccacguggucaagaccgcgacccagggggaggugaacgugaccggcgucaucccgcugacgaccacccccaccaaguccuacuucgccaaccugaaggggacgaagacccggggcaagcucugccccgacugccugaacugcaccgaccuggacguggcccucgggcgccccaugugcgugggcaccacgccguccgccaaggccagcauccugcacgagguccggcccgugaccuccggcugcuuccccaucaugcacgaccgcaccaagauccggcagcuggcgaaccuccugcgcggguacgagaacauccggcugagcacccagaacgugaucgacgccgagaaggcccccggcgggccguaccgccucggcacguccgggagcugccccaacgccaccuccaagagcggcuucuucgcgaccauggccugggccguccccaaggacaacaacaagaacgccaccaacccccugacgguggaggugccguacaucugcgccgagggcgaggaccagaucgcggucuggggguuccacuccgacaacaagacccagaugaagaaccuguacggcgacagcaacccccagaaguucaccuccagcgccaacggggugaccacgcacuacgugucccagaucggcggcuuccccgaccagaccgaggacgggggccucccccagagcgggcggaucgucguggacuacaugaugcagaagccgggcaagaccgggaccaucguguaccagcgcggcguccugcugccccagaagguguggugcgccuccggccggagcaaggugaucaaggggagccucccccugaucggcgaggccgacugccugcacgagaaguacgggggccucaacaaguccaagcccuacuacacgggggagcacgccaaggcgaucggcaacugcccgaucugggucaagacgccccugaagcuggccaacggcaccaaguaccgcccgcccgccaagcuccugaaggagcggggguucuucggcgccaucgccggguuccuggagggcgggugggagggcaugaucgcgggcuggcacggguacaccagccacggcgcccacgggguggccgucgccgccgaccucaaguccacccaggaggcgaucaacaagaucaccaagaaccugaacagccuguccgagcucgaggugaagaaccugcagcgccugagcggcgccauggacgagcuccacaacgagauccuggagcuggacgagaagguggacgaccuccgggccgacaccaucuccagccagaucgagcuggccguccugcucuccaacgagggcaucaucaacagcgaggacgagcaccuccuggcgcuggagcgcaagcugaagaagaugcuggggcccuccgccguggacaucggcaacgggugcuucgagaccaagcacaagugcaaccagacgugccucgaccggaucgccgccggcaccuucaacgccggggaguucagccugcccaccuucgacucccugaacaucaccgcggccagccucaacgacgacggccuggacaaccacaccauccugcuguacuacuccacggccgccagcucccucgccgugacccugaugcuggcgaucuucaucgucuacauggugagccgcgacaacguguccugcagcaucugccucuga

SEQ ID NO: 90924 - RNA, 1755 nt, Artificial Sequence; identical to SEQ ID NO: 90878
  derived and/or modified CDS sequence (opt1) from hemagglutinin__InfluenzaB__AGL09873

SEQ ID NO: 90925 - RNA, 1758 nt, Artificial Sequence; identical to SEQ ID NO: 90911
  derived and/or modified CDS sequence (opt1) from hemagglutinin__InfluenzaB__AGL09874

SEQ ID NO: 90926 - RNA, 1758 nt, Artificial Sequence; identical to SEQ ID NO: 90896
  derived and/or modified CDS sequence (opt1) from hemagglutinin__InfluenzaB__AGO02695

SEQ ID NO: 90927 - RNA, 1755 nt, Artificial Sequence; identical to SEQ ID NO: 90878
  derived and/or modified CDS sequence (opt1) from hemagglutinin__InfluenzaB__AGQ16249

SEQ ID NO: 90928 - RNA, 1758 nt, Artificial Sequence; identical to SEQ ID NO: 90911
  derived and/or modified CDS sequence (opt1) from hemagglutinin__InfluenzaB__AGQ16250

SEQ ID NO: 90929 - RNA, 1758 nt, Artificial Sequence; identical to SEQ ID NO: 90911
  derived and/or modified CDS sequence (opt1) from hemagglutinin__InfluenzaB__AGQ16251

SEQ ID NO: 90930 - RNA, 1755 nt, Artificial Sequence
  derived and/or modified CDS sequence (opt1) from hemagglutinin__InfluenzaB__AGQ16252
augaaggccaucaucgugcugcucauggucgugaccagcaacgccgaccgcaucugcaccggcaucacguccagcaacagcccccacguggucaagaccgcgacccagggggaggugaacgugaccggcgucaucccgcugacgaccacccccgccaaguccuacuucgccaaccugaaggggacccggacgcgcggcaagcucugccccgacugccugaacugcaccgaccuggacguggcccucgggcggcccaugugcgugggcaccaccccguccgccaaggcgagcauccugcacgagguccgccccgugacguccggcugcuuccccaucaugcacgaccggaccaagauccgccagcugcccaaccuccugcggggguacgagaacauccgccugagcacccagaacgugaucgacgccgagaaggccccgggcgggcccuaccggcucggcaccuccgggagcugccccaacgccacguccaagaucggcuucuucgcgaccauggccugggccguccccaaggacaacuacaagaacgccaccaacccgcugaccguggaggugcccuacaucugcaaggagggcgaggaccagaucacggucuggggguuccacagcgacaacaagacccagaugaagaaccuguacggcgacuccaacccccagaaguucaccagcuccgccaacggggugaccacgcacuacgugagccagaucggcgacuuccccgaccagaccgaggacggcgggcucccgcaguccggccgcaucgucguggacuacaugaugcagaagcccgggaagaccggcaccaucguguaccagcgcgggguccugcugccccagaagguguggugcgcgagcggccgguccaaggugaucaagggcagccucccccugaucggggaggccgacugccugcacgaggaguacggcgggcucaacaagagcaagccguacuacacgggcaagcacgccaaggccaucgggaacugccccaucugggucaagacgccccugaagcuggccaacggcaccaaguaccggcccccggcgaagcuccugaaggagcgcggcuucuucggggccaucgccggcuuccuggagggcgggugggaggggaugaucgccggcuggcacggcuacaccucccacggggcccacggcguggcggucgccgccgaccucaagagcacccaggaggccaucaacaagaucaccaagaaccugaacucccugagcgagcucgaggugaagaaccugcagcggcuguccggggccauggacgagcuccacaacgagauccuggagcuggacgagaagguggacgaccuccgcgcggacaccaucagcucccagaucgagcuggccguccugcucagcaacgagggcaucaucaacuccgaggacgagcaccuccuggcccuggagcggaagcugaagaagaugcugggccccagcgccguggacaucgggaacggcugcuucgagaccaagcacaagugcaaccagacgugccucgaccgcaucgcggccgggaccuucaacgccggcgaguucucccugcccaccuucgacagccugaacaucaccgccgccucccucaacgacgacgggcuggacaaccacaccauccugcuguacuacagcacggcggccuccagccucgccgugacccugaugcuggccaucuucaucgucuacauggugucccgggacaacgugagcugcuccaucugccucuga

SEQ ID NO: 90931 - RNA, 1755 nt, Artificial Sequence; identical to SEQ ID NO: 90878
  derived and/or modified CDS sequence (opt1) from hemagglutinin__InfluenzaB__AGQ16253

SEQ ID NO: 90932 - RNA, 1755 nt, Artificial Sequence
  derived and/or modified CDS sequence (opt1) from hemagglutinin__InfluenzaB__AGQ16255
augaaggccaucaucgugcugcucauggucgugaccagcaacgccgaccgcaucugcaccggcaucacguccagcaacagcccccacguggucaagaccgcgacccagggggaggugaacgugaccggcgucaucccgcugacgaccacccccaccaaguccuacuucgccaaccugaaggggacgaagacccggggcaagcucugccccgacugccugaacugcaccgaccuggacguggcccucgggcgccccaugugcgugggcaccacgccguccgccaaggccagcauccugcacgagguccggcccgugaccuccggcugcuuccccaucaugcacgaccgcaccaagauccggcagcuggcgaaccuccugcgcggguacgagaacauccggcugagcacccagaacgugaucgacgccgagaaggcccccggcgggccguaccgccucggcacguccgggagcugccccaacgccaccuccaagagcggcuucuucgcgaccauggccugggccguccccaaggacaacaacaagaacgccaccaacccccugacgguggaggugccguacaucugcgccgagggcgaggaccagaucaccgucuggggguuccacuccgacaacaagacccagaugaagaaccuguacggcgacagcaacccccagaaguucaccuccagcgcgaacgggaucacgacccacuacgugucccagaucggcggcuuccccgaccagaccgaggacgggggccucccccagagcgggcggaucguggucgacuacaugaugcagaagccgggcaagaccgggacgaucguguaccagcgcggcgugcugcugccccagaaggucuggugcgccuccggccggagcaaggugaucaaggggagccucccccugaucggcgaggccgacugccugcacgagaaguacgggggccucaacaaguccaagcccuacuacaccggggagcacgccaaggccaucggcaacugcccgaucugggugaagacgccccugaagcuggcgaacggcaccaaguaccgcccgcccgccaagcuccugaaggagcggggguucuucggcgccaucgccggguuccuggagggcgggugggagggcaugaucgccggcuggcacggguacaccagccacggcgcgcacggggucgccguggccgccgaccucaaguccacccaggaggccaucaacaagaucaccaagaaccugaacagccuguccgagcucgaggucaagaaccugcagcgccugagcggcgcgauggacgagcuccacaacgagauccuggagcuggacgagaagguggacgaccuccgggccgacaccaucuccagccagaucgagcuggccgugcugcucuccaacgagggcaucaucaacagcgaggacgagcaccuccuggcccuggagcgcaagcugaagaagaugcuggggcccuccgcggucgacaucggcaacgggugcuucgagacgaagcacaagugcaaccagaccugccucgaccggaucgccgccggcaccuucaacgccggggaguucagccugcccaccuucgacucccugaacaucaccgccgcgagccucaacgacgacggccuggacaaccacaucauccugcuguacuacuccacggccgccagcucccucgccgugacccugaugcuggccaucuucaucguguacauggucagccgcgacaacguguccugcagcaucugccucuga

SEQ ID NO: 90933 - RNA, 1755 nt, Artificial Sequence
  derived and/or modified CDS sequence (opt1) from hemagglutinin__InfluenzaB__AGQ16256
augaaggccaucaucgugcugcucauggucgugaccagcaacgccgaccgcaucugcaccggcaucacguccagcaacagcccccacguggucaagaccgugacccagggggaggugaacgucaccggcgugaucccgcugacgaccacccccaccaaguccuacuucgcgaaccugaaggggacgaagacccggggcaagcucugccccgacugccugaacugcaccgaccuggacguggcccucgggcgccccaugugcgucggcaccacgccguccgccaaggccagcauccugcacgaggugcggcccgugaccuccggcugcuuccccaucaugcacgaccgcaccaagauccggcagcuggccaaccuccugcgcggguacgagaacauccggcugagcacccagaacgucaucgacgcggagaaggcccccggcgggccguaccgccucggcacguccgggagcugccccaacgccaccuccaagagcggcuucuucgccaccauggcgugggccgugcccaaggacuccaacaagaacgccaccaacccccugacgguggaggucccguacaucugcgccgagggcgaggaccagaucaccguguggggguuccacagcgacaacaagacccagaugaagaaccuguacggcgacuccaacccccagaaguucaccagcuccgccaacggggugacgacccacuacgucagccagaucggcggcuuccccgaccagaccgaggacgggggccucccccaguccgggcggaucgugguggacuacaugaugcagaagccgggcaagaccgggacgaucgucuaccagcgcggcgugcugcugccccagaagguguggugcgcgagcggccggagcaaggucaucaaggggucccucccccugaucggcgaggccgacugccugcacgagaaguacgggggccucaacaagagcaagcccuacuacaccggggagcacgccaaggccaucggcaacugcccgaucugggugaagacgccccugaagcuggccaacggcaccaaguaccgcccgcccgcgaagcuccugaaggagcggggguucuucggcgccaucgccggguuccuggagggcgggugggagggcaugaucgccggcuggcacggguacaccucccacggcgcccacggggucgcgguggccgccgaccucaagagcacccaggaggccaucaacaagaucaccaagaaccugaacucccugagcgagcucgaggugaagaaccugcagcgccuguccggcgccauggacgagcuccacaacgagauccuggagcuggacgagaaggucgacgaccuccgggcggacaccaucagcucccagaucgagcuggccgugcugcucagcaacgagggcaucaucaacuccgaggacgagcaccuccuggcccuggagcgcaagcugaagaagaugcuggggcccagcgccguggacaucggcaacgggugcuucgagacgaagcacaagugcaaccagaccugccucgaccggaucgcggccggcaccuucaacgccggggaguucucccugcccaccuucgacagccugaacaucaccgccgccucccucaacgacgacggccuggacaaccacacgauccugcuguacuacagcaccgcggccuccagccucgccgucacccugaugcuggccaucuucaucguguacauggugucccgcgacaacgucagcugcagcaucugccucuga

SEQ ID NO: 90934 - RNA, 1755 nt, Artificial Sequence; identical to SEQ ID NO: 90878
  derived and/or modified CDS sequence (opt1) from hemagglutinin__InfluenzaB__AGQ16257

SEQ ID NO: 90935 - RNA, 1755 nt, Artificial Sequence; identical to SEQ ID NO: 90878
  derived and/or modified CDS sequence (opt1) from hemagglutinin__InfluenzaB__AGQ16258

SEQ ID NO: 90936 - RNA, 1755 nt, Artificial Sequence; identical to SEQ ID NO: 90878
  derived and/or modified CDS sequence (opt1) from hemagglutinin__InfluenzaB__AGQ16259

SEQ ID NO: 90937 - RNA, 1755 nt, Artificial Sequence
  derived and/or modified CDS sequence (opt1) from hemagglutinin__InfluenzaB__AGQ16260
augaagaccaucaucgugcugcucauggucgugaccagcaacgccgaccgcaucugcacgggcaucaccuccagcaacagcccccacguggucaagaccgccacccagggggaggugaacgugacgggcgucaucccgcugaccaccacccccaccaaguccuacuucgcgaaccugaaggggaccaagacccggggcaagcucugccccgacugccugaacugcaccgaccuggacguggcccucgggcgccccaugugcgugggcacgaccccguccgccaaggccagcauccugcacgagguccggcccgugaccuccggcugcuuccccaucaugcacgaccgcaccaagauccggcagcuggccaaccuccugcgcggguacgagaacauccggcugagcucccagaacgugaucgacgcggagaaggcccccggcgggccguaccgccucggcacgagcggguccugccccaacgccaccagcaaguccggcuucuucgccaccauggcgugggccguccccaaggacaacaacaagaacgccaccaacccccugacgguggaggugccguacaucugcgccgagggcgaggaccagaucaccgucuggggguuccacagcgacaacaagacccagaugaagaaccuguacggcgacuccaacccccagaaguucaccagcuccgccaacggggugacgacccacuacgugagccagaucggcggcuuccccgaccagaccgaggacgggggccucccccaguccgggcggaucgucguggacuacaugaugcagaagccgggcaagaccgggacgaucguguaccagcgcggcguccugcugccccagaagguguggugcgcgagcggccggagcaaggugaucaaggggucccucccccugaucggcgaggccgacugccugcacgagaaguacgggggccucaacaagagcaagcccuacuacaccggggagcacgccaaggccaucggcaacugcccgaucugggucaagacgccccugaagcuggccaacggcaccaaguaccgcccgcccgcgaagcuccugaaggagcggggguucuucggcgccaucgccggguuccuggagggcgggugggagggcaugaucgccggcuggcacggguacacgucccacggcgcccacgggguggcggucgccgccgaccucaagagcacccaggaggccaucaacaagaucaccaagaaccugaacucccugagcgagcucgaggugaagaaccugcagcgccuguccggcgccauggacgagcuccacaacgagauccuggagcuggacgagaagguggacgaccuccgggcggacaccaucagcucccagaucgagcuggccguccugcucagcaacgagggcaucaucaacuccgaggacgagcaccuccuggcccuggagcgcaagcugaagaagaugcuggggcccagcgccguggacaucggcaacgggugcuucgagacgaagcacaagugcaaccagaccugccucgaccggaucgcggccggcaccuucaacgccggggaguucucccugcccaccuucgacagccugaacaucaccgccgccucccucaacgacgacggccuggacaaccacacgauccugcuguacuacagcaccgcggccuccagccucgccgugacccugaugcuggccaucuucaucgucuacauggugucccgcgacaacgugagcugcagcaucugccucuga

SEQ ID NO: 90938 - RNA, 1755 nt, Artificial Sequence; identical to SEQ ID NO: 90878
  derived and/or modified CDS sequence (opt1) from hemagglutinin__InfluenzaB__AGQ16261

SEQ ID NO: 90939 - RNA, 1755 nt, Artificial Sequence; identical to SEQ ID NO: 90878
  derived and/or modified CDS sequence (opt1) from hemagglutinin__InfluenzaB__AGQ16262

SEQ ID NO: 90940 - RNA, 1758 nt, Artificial Sequence; identical to SEQ ID NO: 90911
  derived and/or modified CDS sequence (opt1) from hemagglutinin__InfluenzaB__AGQ16263

SEQ ID NO: 90941 - RNA, 1758 nt, Artificial Sequence; identical to SEQ ID NO: 90911
  derived and/or modified CDS sequence (opt1) from hemagglutinin__InfluenzaB__AGQ16264

SEQ ID NO: 90942 - RNA, 1755 nt, Artificial Sequence; identical to SEQ ID NO: 90923
  derived and/or modified CDS sequence (opt1) from hemagglutinin__InfluenzaB__AGQ16265

SEQ ID NO: 90943 - RNA, 1755 nt, Artificial Sequence
  derived and/or modified CDS sequence (opt1) from hemagglutinin__InfluenzaB__AGQ16266
augaaggccaucaucgugcugcucauggucgugaccagcaacgccgaccgcaucugcaccggcaucacguccagcaacagcccccacguggucaagaccgcgacccagggggaggugaacgugaccggcgucaucccgcugacgaccacccccaccaaguccuacuucgccaaccugaaggggacgaagacccggggcaagcucugccccgacugccugaacugcaccgaccuggacguggcccucgggcgccccaugugcgugggcaccacgccguccgccaaggccagcauccugcacgagguccggcccgugaccuccggcugcuuccccaucaugcacgaccgcaccaagauccggcagcuggcgaaccuccugcgcggguacgagaacauccggcugagcacccagaacgugaucgacgccgagaaggcccccggcgggccguaccgccucggcacguccgggagcugccccaacgccaccuccaagagcggcuucuucgcgaccauggccugggccguccccaaggacaacaacaagaacgccaccaacccccugacgguggaggugccguacaucugcgccgagggcgaggaccagaucaccgucuggggguuccacuccgacaacaagacccagaugaagaaccuguacggcgacagcaacccccagaaguucaccuccagcgcgaacggggugacgacccacuacgugucccaggucggcggcuuccccgaccagaccgaggacgggggccucccccagagcgggcggaucgugguggacuacaugaugcagaagccgggcaagaccgggacgaucgucuaccagcgcggcgugcugcugccccagaagguguggugcgccuccggccggagcaaggucaucaaggggagccucccccugaucggcgaggccgacugccugcacgagaaguacgggggccucaacaaguccaagcccuacuacaccggggagcacgccaaggccaucggcaacugcccgaucugggugaagacgccccugaagcuggcgaacggcaccaaguaccgcccgcccgccaagcuccugaaggagcggggguucuucggcgccaucgccggguuccuggagggcgggugggagggcaugaucgccggcuggcacggguacaccagccacggcgcgcacggggucgccguggccgccgaccucaaguccacccaggaggccaucaacaagaucaccaagaaccugaacagccuguccgagcucgaggugaagaaccugcagcgccugagcggcgcgauggacgagcuccacaacgagauccuggagcuggacgagaaggucgacgaccuccgggccgacaccaucuccagccagaucgagcuggccgugcugcucuccaacgagggcaucaucaacagcgaggacgagcaccuccuggcccuggagcgcaagcugaagaagaugcuggggcccuccgcgguggacaucggcaacgggugcuucgagacgaagcacaagugcaaccagaccugccucgaccggaucgccgccggcaccuucaacgccggggaguucagccugcccaccuucgacucccugaacaucaccgccgcgagccucaacgacgacggccuggacaaccacacgauccugcuguacuacuccaccgccgccagcucccucgccgucacccugaugcuggccaucuucaucguguacauggugagccgcgacaacgucuccugcagcaucugccucuga

SEQ ID NO: 90944 - RNA, 1755 nt, Artificial Sequence; identical to SEQ ID NO: 90923
  derived and/or modified CDS sequence (opt1) from hemagglutinin__InfluenzaB__AGQ16267

SEQ ID NO: 90945 - RNA, 1755 nt, Artificial Sequence; identical to SEQ ID NO: 90923
  derived and/or modified CDS sequence (opt1) from hemagglutinin__InfluenzaB__AGQ16268

SEQ ID NO: 90946 - RNA, 1758 nt, Artificial Sequence; identical to SEQ ID NO: 90896
  derived and/or modified CDS sequence (opt1) from hemagglutinin__InfluenzaB__AGQ16269

SEQ ID NO: 90947 - RNA, 1755 nt, Artificial Sequence; identical to SEQ ID NO: 90923
  derived and/or modified CDS sequence (opt1) from hemagglutinin__InfluenzaB__AGQ16270

SEQ ID NO: 90948 - RNA, 1755 nt, Artificial Sequence
  derived and/or modified CDS sequence (opt1) from hemagglutinin__InfluenzaB__AGQ16272
augaaggccaucaucgugcugcucauggucgugaccagcaacgccgaccgcaucugcaccggcaucacguccagcaacagcccccacguggucaagaccgcgacccagggggaggugaacgugaccggcgucaucccgcugacgaccacccccaccaaguccuacuucgccaaccugaaggggacgaagacccggggcaagcucugccccgacugccugaacugcaccgaccuggacguggcccucgggcgccccaugugcgugggcaccacgccguccgccaaggccagcauccugcacgagguccggcccgugaccuccggcugcuuccccaucaugcacgaccgcaccaagauccggcagcuggcgaaccuccugcgcggguacgagaacauccggcugagcacccagaacgugaucgacgccgagaaggcccccggcgggccguaccgccucggcacguccgggagcugccccaacgccaccuccaagagcggcuucuucgcgaccauggccugggccgucccccgggacaacaacaagaacgccaccaacccccugacgguggaggugccguacaucugcgaggagggcgaggaccagaucaccgucuggggguuccacuccgacaacaagacccagaugaagaaccuguacggcgacagcaacccccagaaguucaccuccagcgccaacggggugacgacccacuacgugucccagaucggcggcuuccccgaccagaccgaggacgggggccucccccagagcgggcgcaucgucguggacuacaugaugcagaagccgggcaagaccgggacgaucguguaccagcggggcguccugcugccccagaagguguggugcgcguccggccgcagcaaggugaucaaggggagccucccccugaucggcgaggccgacugccugcacgagaaguacgggggccucaacaaguccaagcccuacuacaccggggagcacgccaaggccaucggcaacugcccgaucugggucaagacgccccugaagcuggccaacggcaccaaguaccggccgcccgcgaagcuccugaaggagcgcggguucuucggcgccaucgccggguuccuggagggcgggugggagggcaugaucgccggcuggcacggguacaccagccacggcgcccacgggguggcggucgccgccgaccucaaguccacccaggaggccaucaacaagaucaccaagaaccugaacagccuguccgagcucgaggugaagaaccugcagcggcugagcggcgccauggacgagcuccacaacgagauccuggagcuggacgagaagguggacgaccuccgcgcggacaccaucuccagccagaucgagcuggccguccugcucuccaacgagggcaucaucaacagcgaggacgagcaccuccuggcccuggagcggaagcugaagaagaugcuggggcccuccgccguggacaucggcaacgggugcuucgagacgaagcacaagugcaaccagaccugccucgaccgcaucgcggccggcaccuucaacgccggggaguucagccugcccaccuucgacucccugaacaucaccgccgccagccucaacgacgacggccuggacaaccacacgauccugcuguacuacuccaccgcggccagcucccucgccgugacccugaugcuggccaucuucaucgucuacauggugagccgggacaacguguccugcagcaucugccucuga

SEQ ID NO: 90949 - RNA, 1755 nt, Artificial Sequence; identical to SEQ ID NO: 90878
  derived and/or modified CDS sequence (opt1) from hemagglutinin__InfluenzaB__AGQ16273

SEQ ID NO: 90950 - RNA, 1755 nt, Artificial Sequence; identical to SEQ ID NO: 90878
  derived and/or modified CDS sequence (opt1) from hemagglutinin__InfluenzaB__AGQ16274

SEQ ID NO: 90951 - RNA, 1755 nt, Artificial Sequence; identical to SEQ ID NO: 90878
  derived and/or modified CDS sequence (opt1) from hemagglutinin__InfluenzaB__AGQ16275

SEQ ID NO: 90952 - RNA, 1755 nt, Artificial Sequence; identical to SEQ ID NO: 90878
  derived and/or modified CDS sequence (opt1) from hemagglutinin__InfluenzaB__AGQ16276

SEQ ID NO: 90953 - RNA, 1755 nt, Artificial Sequence; identical to SEQ ID NO: 90923
  derived and/or modified CDS sequence (opt1) from hemagglutinin__InfluenzaB__AGQ16277

SEQ ID NO: 90954 - RNA, 1755 nt, Artificial Sequence; identical to SEQ ID NO: 90923
  derived and/or modified CDS sequence (opt1) from hemagglutinin__InfluenzaB__AGQ16278

SEQ ID NO: 90955 - RNA, 1755 nt, Artificial Sequence; identical to SEQ ID NO: 90923
  derived and/or modified CDS sequence (opt1) from hemagglutinin__InfluenzaB__AGQ16279

SEQ ID NO: 90956 - RNA, 1755 nt, Artificial Sequence; identical to SEQ ID NO: 90923
  derived and/or modified CDS sequence (opt1) from hemagglutinin__InfluenzaB__AGQ16280

SEQ ID NO: 90957 - RNA, 1755 nt, Artificial Sequence
  derived and/or modified CDS sequence (opt1) from hemagglutinin__InfluenzaB__AGQ16281
augaaggccaucaucgugcugcucauggucgugaccagcaacgccgaccgcaucugcaccggcaucacguccagcaacagcccccacguggucaagaccgcgacccagggggaggugaacgugaccggcgucaucccgcugacgaccacccccaccaaguccuacuucgccaaccugaaggggacgaagacccggggcaagcucugccccgacugccugaacugcaccgaccuggacguggcccucgggcgccccaugugcgugggcaccacgccguccgccaaggccagcauccugcacgagguccggcccgugaccuccggcugcuuccccaucaugcacgaccgcaccaagauccggcagcuggcgaaccuccugcgcggguacgagaacauccggcugagcacccagaacgugaucgacgccgagaaggcccccggcgggccguaccgccucggcacguccgggagcugccccaacgccaccuccaagagcggcuucuucgcgaccauggccugggccguccccaaggacaacaacaagaacgccaccaacccccugacgguggaggugccguacaucugcgccgagggcgaggaccagaucaccgucuggggguuccacuccgacaacaagacccagaugaagaaccuguacggcgacagcaacccccagaaguucaccuccagcgcgaacggggugacgacccacuacgugucccagaucggcagcuuccccgaccagaccgaggacggcgggcucccccaguccggccggaucgucguggacuacaugaugcagaagccggggaagaccggcacgaucguguaccagcgcgggguccugcugccccagaagguguggugcgccagcggccggagcaaggugaucaagggcucccucccccugaucggggaggccgacugccugcacgagaaguacggcgggcucaacaagagcaagcccuacuacaccggcgagcacgccaaggccaucgggaacugcccgaucugggucaagacgccccugaagcuggcgaacggcaccaaguaccgcccgcccgccaagcuccugaaggagcggggcuucuucggggccaucgccggcuuccuggagggcgggugggaggggaugaucgccggcuggcacggcuacaccucccacggggcgcacggcguggccgucgccgccgaccucaagagcacccaggaggccaucaacaagaucaccaagaaccugaacucccugagcgagcucgaggugaagaaccugcagcgccuguccggggcgauggacgagcuccacaacgagauccuggagcuggacgagaagguggacgaccuccgggccgacaccaucagcucccagaucgagcuggccguccugcucagcaacgagggcaucaucaacuccgaggacgagcaccuccuggcccuggagcgcaagcugaagaagaugcugggccccagcgcgguggacaucgggaacggcugcuucgagacgaagcacaagugcaaccagaccugccucgaccggaucgccgccgggaccuucaacgccggcgaguucucccugcccaccuucgacagccugaacaucaccgccgcgucccucaacgacgacgggcuggacaaccacacgauccugcuguacuacagcaccgccgccuccagccucgccgugacccugaugcuggccaucuucaucgucuacauggugucccgcgacaacgugagcugcagcaucugccucuga

SEQ ID NO: 90958 - RNA, 1755 nt, Artificial Sequence
  derived and/or modified CDS sequence (opt1) from hemagglutinin__InfluenzaB__AGQ16282
augaaggccaucaucgugcugcucauggucgugaccagcaacgccgaccgcaucugcaccggcaucacguccagcaacagcccccacguggucaagaccgcgacccagggggaggugaacgugaccggcgucaucccgcugacgaccacccccaccaaguccuacuucgccaaccugaaggggacgaagacccggggcaagcucugccccgacugccugaacugcaccgaccuggacguggcccucgggcgccccaugugcgugggcaccacgccguccgccaaggccagcauccugcacgagguccggcccgugaccuccggcugcuuccccaucaugcacgaccgcaccaagauccggcagcuggcgaaccuccugcgcggguacgagaacauccggcugagcacccagaacgugaucgacgccgagaaggcccccggcgggccguaccgccucggcacguccgggagcugccccaacgccaccuccaagagcggcuucuucgcgaccauggccugggccguccccaagggcaacaacaagaacgccaccaacccccugacgguggaggugccguacaucugcgccgagggggaggaccagaucaccgucuggggcuuccacuccgacaacaagacccagaugaagaaccuguacggggacagcaacccccagcgguucaccuccagcgcgaacggcgugacgacccacuacgugucccagaucggcggguuccccgaccagaccgaggacggcgggcucccccagagcggccgcaucgucguggacuacaugaugcagaagccggggaagaccggcacgaucguguaccagcggggcguccugcugccccagaagguguggugcgccuccgggcgcagcaaggugaucaagggcagccucccccugaucggggaggccgacugccugcacgagaaguacggcgggcucaacaaguccaagcccuacuacaccggcgagcacgccaaggccaucggcaacugcccgaucugggucaagacgccccugaagcuggcgaacgggaccaaguaccggccgcccgccaagcuccugaaggagcgcggcuucuucggggccaucgccggcuuccuggagggcgggugggagggcaugaucgccggguggcacggcuacaccagccacggggcgcacggcguggccgucgccgccgaccucaaguccacccaggaggccaucaacaagaucaccaagaaccugaacagccuguccgagcucgaggugaagaaccugcagcggcugagcggcgcgauggacgagcuccacaacgagauccuggagcuggacgagaagguggacgaccuccgcgccgacaccaucuccagccagaucgagcuggccguccugcucuccaacgaggggaucaucaacagcgaggacgagcaccuccuggcccuggagcggaagcugaagaagaugcugggccccuccgcgguggacaucgggaacggcugcuucgagacgaagcacaagugcaaccagaccugccucgaccgcaucgccgccgggaccuucaacgccggcgaguucagccugcccaccuucgacucccugaacaucaccgccgcgagccucaacgacgacggccuggacaaccacacgauccugcuguacuacuccaccgccgccagcucccucgccgugacccugaugcuggccaucuucaucgucuacauggugagccgggacaacguguccugcagcaucugccucuga

SEQ ID NO: 90959 - RNA, 1755 nt, Artificial Sequence
  derived and/or modified CDS sequence (opt1) from hemagglutinin__InfluenzaB__AGQ16283
augaaggccaucaucgugcugcucauggucgugaccagcaacgccgaccgcaucugcaccggcaucacguccagcaacagcccccacguggucaagaccgcgacccacggggaggugaacgugaccggcgucaucccgcugacgaccacccccaccaaguccuacuucgccaaccugaaggggacgaagacccggggcaagcucugccccgacugccugaacugcaccgaccuggacguggcccucgggcgccccaugugcgugggcaccacgccguccgccaaggccagcauccugcacgagguccggcccgugaccuccggcugcuuccccaucaugcacgaccgcaccaagauccggcagcuggcgaaccuccugcgcggguacgagaacauccggcugagcacccagaacgugaucgacgccgagaaggcccccggcgggccguaccgccucggcacguccgggagcugccccaacgccaccuccaagagcggcuucuucgcgaccauggccugggccguccccaaggacaacaacaagaacgccaccaacccccugacgguggaggugccguacaucugcgccgagggcgaggaccagaucgcggucuggggguuccacuccgacaacaagacccagaugaagaaccuguacggcgacagcaacccccagaaguucaccuccagcgccaacggggugaccacgcacuacgugucccagaucggcggcuuccccgaccagaccgaggacgggggccucccccagagcgggcggaucgucguggacuacaugaugcagaagccgggcaagaccgggaccaucguguaccagcgcggcguccugcugccccagaagguguggugcgccuccggccggagcaaggugaucaaggggagccucccccugaucggcgaggccgacugccugcacgagaaguacgggggccucaacaaguccaagcccuacuacacgggggagcacgccaaggcgaucggcaacugcccgaucugggucaagacgccccugaagcuggccaacggcaccaaguaccgcccgcccgccaagcuccugaaggagcggggguucuucggcgccaucgccggguuccuggagggcgggugggagggcaugaucgcgggcuggcacggguacaccagccacggcgcccacgggguggccgucgccgccgaccucaaguccacccaggaggcgaucaacaagaucaccaagaaccugaacagccuguccgagcucgaggugaagaaccugcagcgccugagcggcgccauggacgagcuccacaacgagauccuggagcuggacgagaagguggacgaccuccgggccgacaccaucuccagccagaucgagcuggccguccugcucuccaacgagggcaucaucaacagcgaggacgagcaccuccuggcgcuggagcgcaagcugaagaagaugcuggggcccuccgccguggacaucggcaacgggugcuucgagaccaagcacaagugcaaccagacgugccucgaccggaucgccgccggcaccuucaacgccggggaguucagccugcccaccuucgacucccugaacaucaccgcggccagccucaacgacgacggccuggacaaccacaccauccugcuguacuacuccacggccgccagcucccucgccgugacccugaugcuggcgaucuucaucgucuacauggugagccgcgacaacguguccugcagcaucugccucuga

SEQ ID NO: 90960 - RNA, 1758 nt, Artificial Sequence
  derived and/or modified CDS sequence (opt1) from hemagglutinin__InfluenzaB__AGQ16284
augaaggccaucaucgugcugcucauggucgugaccagcaacgccgaccgcaucugcaccggcaucacguccagcaacagcccccacguggucaagaccgcgacccagggggaggugaacgugaccggcgucaucccgcugacgaccacccccaccaagagccacuucgccaaccugaaggggacggagacccggggcaagcucugccccaagugccugaacugcaccgaccuggacguggcccucgggcgccccaagugcaccggcaagaucccguccgcccgggugagcauccugcacgaggcccgccccgucacguccggcugcuuccccaucaugcacgaccggaccaagauccgccagcugcccaaccuccugcggggguacgagcacaucaagcugagcacccacaacgugaucaacgcggagaacgccccgggcgggcccuacaagaucggcaccuccgggagcugccccaacgugacgaacggcaacggcuucuucgccaccauggccugggcgguccccaagaacgacaagaacaagaccgccaccaacccgcucacgaucgaggugcccuacaucugcaccgagggggaggaccagaucaccguguggggcuuccacuccgacaacgagacccagauggccaagcuguacggggacagcaagccccagaaguucacguccagcgccaacggcgucaccacccacuacgugucccagaucggcggguuccccaaccagaccgaggacggcgggcugccgcagagcggccgcaucguggucgacuacauggugcagaaguccgggaagacgggcaccaucaccuaccagcggggcauccuccugccccagaagguguggugcgccagcgggcgcuccaaggucaucaagggcagccugccccucaucggggaggcggacugccugcacgagaaguacggcgggcugaacaagagcaagcccuacuacaccggcgagcacgccaaggccaucggcaacugcccgaucugggugaagacgccccucaagcuggccaacgggaccaaguaccggccgcccgccaagcugcucaaggagcgcggcuucuucggggcgaucgccggcuuccuggagggcgggugggagggcaugaucgccggguggcacggcuacaccucccacggggcccacggcguggccgucgcggccgaccugaaguccacccaggaggccaucaacaagaucacgaagaaccucaacucccugagcgagcuggaggugaagaaccuccagcggcuguccggcgccauggacgagcugcacaacgagauccucgagcuggacgagaaggucgacgaccugcgcgccgacaccaucagcucccagaucgagcucgcggugcugcugagcaacgaggggaucaucaacuccgaggacgagcaccuccuggcccuggagcggaagcucaagaagaugcugggccccagcgccguggagaucgggaacggcugcuucgagaccaagcacaagugcaaccagaccugccuggaccgcaucgccgcggggaccuucgacgccggcgaguucucccuccccacguucgacagccugaacaucaccgccgccucccugaacgacgacggccucgacaaccacaccauccugcuguacuacagcaccgccgcguccagccuggccgucacgcucaugaucgccaucuucgugguguacauggucucccgggacaacgugagcugcuccaucugccuguga

SEQ ID NO: 90961 - RNA, 1755 nt, Artificial Sequence; identical to SEQ ID NO: 90923
  derived and/or modified CDS sequence (opt1) from hemagglutinin__InfluenzaB__AGQ16285

SEQ ID NO: 90962 - RNA, 1755 nt, Artificial Sequence; identical to SEQ ID NO: 90923
  derived and/or modified CDS sequence (opt1) from hemagglutinin__InfluenzaB__AGQ16286

SEQ ID NO: 90963 - RNA, 1755 nt, Artificial Sequence
  derived and/or modified CDS sequence (opt1) from hemagglutinin__InfluenzaB__AGQ16287
augaaggccaucaucgugcugcucauggucgugaccagcaacgccgaccgcaucugcaccggcaucacguccagcaacagcccccacguggucaagaccgcgacccagggggaggugaacgugaccggcgucaucccgcugacgaccacccccaccaaguccuacuucgccaaccugaaggggacgaagacccggggcaagcucugccccgacugccugaacugcaccgaccuggacguggcccucgggcgccccaugugcgugggcaccacgccguccgccaaggccagcauccugcacgagguccggcccgugaccuccggcugcuuccccaucaugcacgaccgcaccaagauccggcagcuggcgaaccuccugcgcggguacgagaacauccggcugagcacccagaacgugaucgacgccgagaaggcccccggcgggccguaccgccucggcacguccgggagcugccccaacgccaccuccaagagcggcuucuucgcgaccauggccugggccguccccaaggacaacaacaagaacgccaccaacccccugacgguggaggugccguacaucugcgaggagggcgaggaccagaucaccgucuggggguuccacuccgacaacaagacccagaugaagaaccuguacggcgacagcaacccccagaaguucaccuccagcgccaacggggugacgacccacuacgugucccagaucggcggcuuccccgaccagaccgaggacgggggccucccccagagcgggcggaucgucguggacuacaugaugcagaagccgggcaagaccgggacgaucguguaccagcgcggcguccugcugccccagaagguguggugcgcguccggccggagcaaggugaucaaggggagccucccccugaucggcgaggccgacugccugcacgagaaguacgggggccucaacaaguccaagcccuacuacaccggggagcacgccaaggccaucggcaacugcccgaucugggucaagacgccccugaagcuggccaacggcaccaaguaccgcccgcccgcgaagcuccugaaggagcggggguucuucggcgccaucgccggguuccuggagggcgggugggagggcaugaucgccggcuggcacggguacaccagccacggcgcccacgggguggcggucgccgccgaccucaaguccacccaggaggccaucaacaagaucaccaagaaccugaacagccuguccgagcucgaggugaagaaccugcagcgccugagcggcgccauggacgagcuccacaacgagauccuggagcuggacgagaagguggacgaccuccgggcggacaccaucuccagccagaucgagcuggccguccugcucuccaacgagggcaucaucaacagcgaggacgagcaccuccuggcccuggagcgcaagcugaagaagaugcuggggcccuccgccguggacaucggcaacgggugcuucgagacgaagcacaagugcaaccagaccugccucgaccggaucgcggccggcaccuucaacgccggggaguucagccugcccaccuucgacucccugaacaucaccgccgccagccucaacgacgacggccuggacaaccacacgauccugcuguacuacuccaccgcggccagcucccucgccgugacccugaugcuggccaucuucaucgucuacauggugagccgcgacaacguguccugcagcaucugccucuga

SEQ ID NO: 90964 - RNA, 1755 nt, Artificial Sequence; identical to SEQ ID NO: 90878
  derived and/or modified CDS sequence (opt1) from hemagglutinin__InfluenzaB__AGQ16289

SEQ ID NO: 90965 - RNA, 1755 nt, Artificial Sequence; identical to SEQ ID NO: 90878
  derived and/or modified CDS sequence (opt1) from hemagglutinin__InfluenzaB__AGQ16290

SEQ ID NO: 90966 - RNA, 1755 nt, Artificial Sequence
  derived and/or modified CDS sequence (opt1) from hemagglutinin__InfluenzaB__AGQ16291
augaaggccaucaucgugcugcucauggucgugaccagcaacgccgaccgcaucugcaccggcaucacguccagcaacagcccccacguggucaagaccgcgacccagggggaggugaacgugaccggcgucaucccgcugacgaccacccccaccaaguccuacuucgccaaccugaaggggacgaagacccggggcaagcucugccccgacugccugaacugcaccgaccuggacguggcccucgggcgccccaugugcgugggcaccacgccguccgccaaggccagcauccugcacgagguccggcccgugaccuccggcugcuuccccaucaugcacgaccgcaccaagauccggcagcuggcgaaccuccugcgcggguacgagaacauccggcugagcacccagaacgugaucgacgccgagaaggcccccggcgggccguaccgccucggcacguccgggagcugccccaacaccaccuccaagagcggcuucuucgccaccauggcgugggccguccccaaggacaacaacaagaacgccacgaacccccugaccguggaggugccguacaucugcgccgagggcgaggaccagaucgccgucuggggguuccacuccgacaacaagacccagaugaagaaccuguacggcgacagcaacccccagaaguucaccuccagcgcgaacggggugacgacccacuacgugucccagaucggcggcuuccccgaccagaccgaggacgggggccucccccagagcgggcggaucgucguggacuacaugaugcagaagccgggcaagaccgggacgaucguguaccagcgcggcguccugcugccccagaagguguggugcgccuccggccggagcaaggugaucaaggggagccucccccugaucggcgaggccgacugccugcacgagaaguacgggggccucaacaaguccaagcccuacuacaccggggagcacgccaaggccaucggcaacugcccgaucugggucaagacgccccugaagcuggcgaacggcaccaaguaccgcccgcccgccaagcuccugaaggagcggggguucuucggcgccaucgccggguuccuggagggcgggugggagggcaugaucgccggcuggcacggguacaccagccacggcgcgcacgggguggccgucgccgccgaccucaaguccacccaggaggccaucaacaagaucaccaagaaccugaacagccuguccgagcucgaggugaagaaccugcagcgccugagcggcgcgauggacgagcuccacaacgagauccuggagcuggacgagaagguggacgaccuccgggccgacaccaucuccagccagaucgagcuggccguccugcucuccaacgagggcaucaucaacagcgaggacgagcaccuccuggcccuggagcgcaagcugaagaagaugcuggggcccuccgcgguggacaucggcaacgggugcuucgagacgaagcacaagugcaaccagaccugccucgaccggaucgccgccggcaccuucaacgccggggaguucagccugcccaccuucgacucccugaacaucaccgccgcgagccucaacgacgacggccuggacaaccacacgauccugcuguacuacuccaccgccgccagcucccucgccgugacccugaugcuggccaucuucaucgucuacauggugagccgcgacaacguguccugcagcaucugccucuga

SEQ ID NO: 90967 - RNA, 1755 nt, Artificial Sequence
  derived and/or modified CDS sequence (opt1) from hemagglutinin__InfluenzaB__AGQ16292
augaaggccaucaucgugcugcucauggucgugaccagcaacgccgaccgcaucugcaccggcaucacguccagcaacagcccccacguggucaagaccgcgacccagggggaggugaacgugaccggcgucaucccgcugacgaccacccccaccaaguccuacuucgccaaccugaaggggacgaagacccggggcaagcucugccccgacugccugaacugcaccgaccuggacguggcccucgggcgccccaugugcgugggcaccacgccguccgccaaggccagcauccugcacgagguccggcccgugaccuccggcugcuuccccaucaugcacgaccgcaccaagauccggcagcuggcgaaccuccugcgcggguacgagaacauccggcugagcacccagaacgugaucgacgccgagaaggcccccggcgggccguaccgccucggcacguccgggagcugccccaacgccaccuccaagagcggcuucuucgcgaccauggccugggccguccccaaggacaacaacaagaacgccaccaacccccugacgguggaggugccguacaucugcgccgagggcgaggaccagaucgcggucuggggguuccacuccgacaacaagacccagaugaagaaccuguacggcgacagcaacccccagaaguucaccuccagcgccaacggggugaccacgcacuacgugucccagaucggcggcuuccccgaccagaccgaggacgggggccucccccagagcgggcggaucgucguggacuacaugaugcagaagccgggcaagaccgggaccaucguguaccagcgcggcguccugcugccccagaagguguggugcgccuccggccggagcaaggugaucaaggggagccucccccugaucggcgaggccgacugccugcacgagaaguacgggggccucaacaaguccaagcccuacuacacgggggagcacgccaaggcgaucggcaacugcccgaucugggucaagacgccccugaagcuggccaacggcaccaaguaccgcccgcccgccaagcuccugaaggagcggggguucuucggcgccaucgccggguuccuggagggcgggugggagggcaugaucgcgggcuggcacggguacaccagccacggcgcccacgggguggccgucgccgccgaccucaaguccacccaggaggcgaucaacaagaucaccaagaaccugaacagccuguccgagcucgagaucaagaaccugcagcgccugagcggcgccauggacgagcuccacaacgagauccuggagcuggacgagaagguggacgaccuccgggccgacaccaucuccagccagaucgagcuggccgugcugcucuccaacgagggcaucaucaacagcgaggacgagcaccuccuggcgcuggagcgcaagcugaagaagaugcuggggcccuccgccgucgacaucggcaacgggugcuucgagaccaagcacaagugcaaccagacgugccucgaccggaucgccgccggcaccuucaacgccggggaguucagccugcccaccuucgacucccugaacaucaccgcggccagccucaacgacgacggccuggacaaccacaccauccugcuguacuacuccacggccgccagcucccucgccgugacccugaugcuggcgaucuucaucguguacauggucagccgcgacaacguguccugcagcaucugccucuga

SEQ ID NO: 90968 - RNA, 1755 nt, Artificial Sequence; identical to SEQ ID NO: 90967
  derived and/or modified CDS sequence (opt1) from hemagglutinin__InfluenzaB__AGQ16293

SEQ ID NO: 90969 - RNA, 1755 nt, Artificial Sequence; identical to SEQ ID NO: 90967
  derived and/or modified CDS sequence (opt1) from hemagglutinin__InfluenzaB__AGQ16294

SEQ ID NO: 90970 - RNA, 1758 nt, Artificial Sequence
  derived and/or modified CDS sequence (opt1) from hemagglutinin__InfluenzaB__AGQ16295
augaaggccaucaucgugcugcucauggucgugaccagcaacgccgaccgcaucugcaccggcaucacguccagcaacagcccccacguggucaagaccgcgacccagggggaggugaacgugaccggcgccaucccgcugacgaccacccccaccaagagccacuucgccaaccugaaggggacggagacccggggcaagcucugccccaagugccugaacugcaccgaccuggacgucgcccucgggcgccccaagugcaccggcaagaucccguccgcccgggugagcauccugcacgaggugcgccccgucacguccggcugcuuccccaucaugcacgaccggaccaagauccgccagcugcccaaccuccugcggggguacgagcacauccgccugagcacccacaacgugaucaacgcggagaacgccccgggcgggcccuacaagaucggcaccuccgggagcugccccaacgugacgaacggcaacggcuucuucgccaccauggccugggcgguccccaagaacgacaagaacaagaccgagaccaacccgcucacgaucgaggugcccuacaucugcaccgaggaggaggaccagaucaccguguggggguuccacuccgacaacgagacccagauggccaagcuguacggcgacagcaagccccagaaguucacguccagcgccaacggggucaccacccacuacgugucccagaucggcggcuuccccaaccagaccgaggacgggggccugccgcagagcgggcggaucguggucgacuacauggugcagaaguccggcaagacggggaccaucaccuaccagcgcggcauccuccugccccagaagguguggugcgccagcggccgguccaaggucaucaaggggagccugccccucaucggcgaggccgacugccugcacgagaaguacgggggccugaacaagagcaagcccuacuacaccggggagcacgcgaaggccaucggcaacugcccgaucugggugaagacgccccucaagcuggccaacggcaccaaguaccgcccgcccgccaagcugcucaaggagcggggguucuucggcgccaucgcgggguuccuggagggcgggugggagggcaugaucgccggcuggcacggguacaccucccacggcgcccacgggguggccgucgccgcggaccugaaguccacccaggaggccaucaacaagaucacgaagaaccucaacucccugagcgagcuggaggugaagaaccuccagcgccuguccggcgccauggacgagcugcacaacgagauccucgagcuggacgagaaggucgacgaccugcgggccgacaccaucagcucccagaucgagcucgccgugcugcugagcaacgagggcaucaucaacuccgaggacgagcaccuccuggcgcuggagcgcaagcucaagaagaugcuggggcccagcgccguggagaucggcaacgggugcuucgagaccaagcacaagugcaaccagaccugccuggaccggaucgccgccggcaccuucgacgcgggggaguucucccuccccacguucgacagccugaacaucaccgccgccucccugaacgacgacggccucgacaaccacaccauccugcuguacuacagcaccgccgccuccagccuggcggucacgcucaugaucgccaucuucgugguguacauggucucccgcgacaacgugagcugcuccaucugccuguga

SEQ ID NO: 90971 - RNA, 1758 nt, Artificial Sequence; identical to SEQ ID NO: 90911
  derived and/or modified CDS sequence (opt1) from hemagglutinin__InfluenzaB__AGQ16296

SEQ ID NO: 90972 - RNA, 1755 nt, Artificial Sequence; identical to SEQ ID NO: 90878
  derived and/or modified CDS sequence (opt1) from hemagglutinin__InfluenzaB__AGQ16297

SEQ ID NO: 90973 - RNA, 1755 nt, Artificial Sequence
  derived and/or modified CDS sequence (opt1) from hemagglutinin__InfluenzaB__AGQ16298
augaaggccaucaucgugcugcucauggucgugaccagcaacgccgaccgcaucugcaccggcaucacguccagcaacagcccccacguggucaagaccgcgacccagggggaggugaacgugaccggcgucaucccgcugacgaccacccccaccaaguccuacuucgccaaccugaaggggacgaagacccggggcaagcucugccccgacugccugaacugcaccgaccuggacguggcccucgggcgccccaugugcgugggcaccacgccguccgccaaggccagcauccugcacgagguccggcccgugaccuccggcugcuuccccaucaugcacgaccgcaccaagauccggcagcuggcgaaccuccugcgcggguacgagaacauccggcugagcacccagaacgugaucgacgccgagaaggcccccggcgggccguaccgccucggcacguccgggagcugccccaacgccaccuccaagagcggcuucuucgcgaccauggccugggccguccccaaggacaacaacaagaacgccaccaacccccugacgguggaggugccguacaucugcgccgagggcgaggaccagaucaccgucuggggguuccacuccgacaacaagacccagaugaagaaccuguacggcgacagcaacccccagaaguucaccuccagcgcgaacggggugacgacccacuacgugucccagaucggcggcuuccccgaccagaccgaggacgggggccucccccagagcgggcggaucgucguggacuacaugaugcagaagccgggcaagaccgggacgaucguguaccagcgcggcguccugcugccccagaagguguggugcgccuccggccggagcaaggugaucaaggggagccucccccugaucggcgaggccgacugccugcacgagaaguacgggggccucaacaaguccaagcccuacuacaccggggagcacgccaaggccaucggcaacugcccgaucugggucaagacgccccugaagcuggcgaacggcaccaaguaccgcccgcccgccaagcuccugaaggagcggggguucuucggcgccaucgccggguuccuggagggcgggugggagggcaugaucgccggcuggcacggguacaccagccacggcgcgcacgggguggccaucgccgccgaccucaaguccacccaggaggccaucaacaagaucaccaagaaccugaacagccuguccgagcucgaggucaagaaccugcagcgccugagcggcgcgauggacgagcuccacaacgagauccuggagcuggacgagaagguggacgaccuccgggccgacaccaucuccagccagaucgagcuggccgugcugcucuccaacgagggcaucaucaacagcgaggacgagcaccuccuggcccuggagcgcaagcugaagaagaugcuggggcccuccgcggucgacaucggcaacgggugcuucgagacgaagcacaagugcaaccagaccugccucgaccggaucgccgccggcaccuucaacgccggggaguucagccugcccaccuucgacucccugaacaucaccgccgcgagccucaacgacgacggccuggacaaccacacgauccugcuguacuacuccaccgccgccagcucccucgccgugacccugaugcuggccaucuucaucguguacauggucagccgcgacaacguguccugcagcaucugccucuga

SEQ ID NO: 90974 - RNA, 1755 nt, Artificial Sequence; identical to SEQ ID NO: 90923
  derived and/or modified CDS sequence (opt1) from hemagglutinin__InfluenzaB__AGQ16299

SEQ ID NO: 90975 - RNA, 1755 nt, Artificial Sequence; identical to SEQ ID NO: 90923
  derived and/or modified CDS sequence (opt1) from hemagglutinin__InfluenzaB__AGQ16300

SEQ ID NO: 90976 - RNA, 1755 nt, Artificial Sequence; identical to SEQ ID NO: 90878
  derived and/or modified CDS sequence (opt1) from hemagglutinin__InfluenzaB__AGQ16301

SEQ ID NO: 90977 - RNA, 1755 nt, Artificial Sequence; identical to SEQ ID NO: 90878
  derived and/or modified CDS sequence (opt1) from hemagglutinin__InfluenzaB__AGQ16302

SEQ ID NO: 90978 - RNA, 1755 nt, Artificial Sequence; identical to SEQ ID NO: 90878
  derived and/or modified CDS sequence (opt1) from hemagglutinin__InfluenzaB__AGQ16303

SEQ ID NO: 90979 - RNA, 1755 nt, Artificial Sequence; identical to SEQ ID NO: 90878
  derived and/or modified CDS sequence (opt1) from hemagglutinin__InfluenzaB__AGQ16305

SEQ ID NO: 90980 - RNA, 1758 nt, Artificial Sequence
  derived and/or modified CDS sequence (opt1) from hemagglutinin__InfluenzaB__AGQ16306
augaaggccaucaucgugcugcucauggucgugaccagcaacgccgaccgcaucugcaccggcaucacguccagcaacagcccccacguggucaagaccgcgacccagggggaggugaacgugaccggcgucaucccgcugacgaccacccccaccaagagccacuucgccaaccugaaggggacggagacccggggcaagcucugccccaagugccugaacugcaccgaccuggacguggcccucgggcgccccaagugcaccggcaagaucccguccgcccgggugagcauccugcacgagguccgccccgugacguccggcugcuuccccaucaugcacgaccggaccaagauccgccagcugcccaaccuccugcggggguacgagcacauccgccugagcacccacaacgugaucaacgccgagaacgcgccgggcgggcccuacaagaucggcaccuccgggagcugccccaacgucacgaacggcaacggcuucuucgccaccauggccugggccgugcccaagaacgacaagaacaagaccgagaccaacccgcucacgaucgaggugcccuacaucugcaaggagggggaggaccagaucaccgucuggggcuuccacuccgacaacgagacccagauggcgaagcuguacggggacagcaagccccagaaguucaccuccagcgccaacggcgugacgacccacuacgugucccagaucggcggguuccccaaccagaccgaggacggcgggcugccgcagagcggccggaucgucguggacuacauggugcagaaguccgggaagaccggcacgaucaccuaccagcgcggcauccuccugccccagaaggucuggugcgccagcgggcgguccaaggugaucaagggcagccugccccucaucggggaggccgacugccugcacgagaaguacggcgggcugaacaagagcaagcccuacuacaccggcgagcacgccaaggcgaucggcaacugcccgaucugggugaagacgccccucaagcuggccaacgggaccaaguaccgcccgcccgccaagcugcucaaggagcggggcuucuucggggccaucgccggcuuccuggagggcgggugggagggcaugaucgcgggguggcacggcuacaccucccacggggcccacggcgucgccguggccgccgaccugaaguccacccaggaggcgaucaacaagaucaccaagaaccucaacucccugagcgagcuggaggucaagaaccuccagcgccuguccggcgccauggacgagcugcacaacgagauccucgagcuggacgagaagguggacgaccugcgggccgacacgaucagcucccagaucgagcucgccgugcugcugagcaacgaggggaucaucaacuccgaggacgagcaccuccuggcccuggagcgcaagcucaagaagaugcugggccccagcgcggucgagaucgggaacggcugcuucgagaccaagcacaagugcaaccagaccugccuggaccggaucgccgccgggaccuucgacgccggcgaguucucccuccccaccuucgacagccugaacaucacggcggccucccugaacgacgacggccucgacaaccacaccauccugcuguacuacagcaccgccgccuccagccuggccgugacccucaugaucgcgaucuucguggucuacauggugucccgcgacaacgugagcugcuccaucugccuguga

SEQ ID NO: 90981 - RNA, 1755 nt, Artificial Sequence; identical to SEQ ID NO: 90878
  derived and/or modified CDS sequence (opt1) from hemagglutinin__InfluenzaB__AGQ16307

SEQ ID NO: 90982 - RNA, 1758 nt, Artificial Sequence; identical to SEQ ID NO: 90911
  derived and/or modified CDS sequence (opt1) from hemagglutinin__InfluenzaB__AGQ16308

SEQ ID NO: 90983 - RNA, 1755 nt, Artificial Sequence
  derived and/or modified CDS sequence (opt1) from hemagglutinin__InfluenzaB__AGQ16309
augaaggccaucaucgugcugcucauggucgugaccagcaacgccgaccgcaucugcaccggcaucacguccagcaacagcccccacguggucaagaccgcgacccagggggaggugaacgugaccggcgucaucccgcugacgaccacccccaccaaguccuacuucgccaaccugaaggggacgaagacccggggcaagcucugccccgacugccugaacugcaccgaccuggacguggcccucgggcgccccaugugcgugggcaccacgccguccgccaaggccagcauccugcacgagguccggcccgugaccuccggcugcuuccccaucaugcacgaccgcaccaagauccggcagcuggcgaaccuccugcgcggguacgagaacauccggcugagcacccagaacgugaucgacgccgagaaggcccccggcgggccguaccgccucggcacguccgggagcugccccaacgccaccuccaagagcggcuucuucgcgaccauggccugggccguccccaaggacaacaacaagaacgccaccaacccccugacgguggaggugccguacaucugcgccgagggcgaggaccagaucaccgucuggggguuccacuccgacaacaagacccagaugaagaaccuguacggcgacagcaacccccagaaguucaccuccagcgcgaacggggugacgacccacuacgugucccagaucggcggcuuccccgaccagaccgaggacgggggccucccccagagcgggcggaucgucgccgacuacaugaugcagaagccgggcaagaccgggacgaucguguaccagcgcggcgugcugcugccccagaaggucuggugcgccuccggccggagcaaggugaucaaggggagccucccccugaucggcgaggccgacugccugcacgagaaguacgggggccucaacaaguccaagcccuacuacaccggggagcacgccaaggcgaucggcaacugcccgaucugggugaagacgccccugaagcuggccaacggcaccaaguaccgcccgcccgccaagcuccugaaggagcggggguucuucggcgccaucgccggguuccuggagggcgggugggagggcaugaucgcgggcuggcacggguacaccagccacggcgcccacggggucgccguggccgccgaccucaaguccacccaggaggcgaucaacaagaucaccaagaaccugaacagccuguccgagcucgaggucaagaaccugcagcgccugagcggcgccauggacgagcuccacaacgagauccuggagcuggacgagaagguggacgaccuccgggccgacaccaucuccagccagaucgagcuggccgugcugcucuccaacgagggcaucaucaacagcgaggacgagcaccuccuggcgcuggagcgcaagcugaagaagaugcuggggcccuccgccgucgacaucggcaacgggugcuucgagacgaagcacaagugcaaccagaccugccucgaccggaucgccgccggcaccuucaacgccggggaguucagccugcccaccuucgacucccugaacaucaccgcggccagccucaacgacgacggccuggacaaccacacgauccugcuguacuacuccaccgccgccagcucccucgccgugacccugaugcuggcgaucuucaucguguacauggucagccgcgacaacguguccugcagcaucugccucuga

SEQ ID NO: 90984 - RNA, 1755 nt, Artificial Sequence
  derived and/or modified CDS sequence (opt1) from hemagglutinin__InfluenzaB__AGQ16310
augaaggccaucaucgugcugcucauggucgugaccagcaacgccgaccgcaucugcaccggcaucacguccagcaacagcccccacguggucaagaccgcgacccagggggaggugaacgugaccggcgucaucccgcugacgaccacccccaccaaguccuacuucgccaaccugaaggggacgaagacccggggcaagcucugccccgacugccugaacugcaccgaccuggacguggcccucgggcgccccaugugcgugggcaccacgccguccgccaaggccagcauccugcacgagguccggcccgugaccuccggcugcuuccccaucaugcacgaccgcaccaagauccggcagcuggcgaaccuccugcgcggguacgagaacauccggcugagcacccagaacgugaucgacgccgagaaggcccccggcgggccguaccgccucggcacguccgggagcugccccaacgccaccuccaagagcggcuucuucgcgaccauggccugggccguccccaaggacaacaacaagaacgccaccaacccccugacgguggaggugccguacaucugcgccgagggcgaggaccagaucaccgucuggggguuccacuccgacaacaagacccagaugaagaaccuguacggcgacagcaacccccagaaguucaccuccagcgcgaacggggugacgacccacuacgugucccagaucggcggcuuccccgaccagaccgaggacgggggccucccccagagcgggcggaucgucguggacuacaugaugcagaagccgggcaagaccgggacgaucguguaccagcgcggcguccugcugccccagaagguguggugcgccuccggccggagcaaggugaucaaggggagccucccccugaucggcgaggccgacugccugcacgagaaguacgggggccucaacaaguccaagcccuacuacaccggggagcacgccaaggccaucggcaacugcccgaucugggucaagacgccccugaagcuggcgaacggcaccaaguaccgcccgcccgccaagcuccugaaggagcggggguucuucggcgccaucgccggguuccuggagggcgggugggagggcaugguggccggcuggcacggguacaccagccacggcgcgcacggggucgccguggccgccgaccucaaguccacccaggaggccaucaacaagaucaccaagaaccugaacagccuguccgagcucgaggugaagaaccugcagcgccugagcggcgcgauggacgagcuccacaacgagauccuggagcuggacgagaaggucgacgaccuccgggccgacaccaucuccagccagaucgagcuggccgugcugcucuccaacgagggcaucaucaacagcgaggacgagcaccuccuggcccuggagcgcaagcugaagaagaugcuggggcccuccgcgguggacaucggcaacgggugcuucgagacgaagcacaagugcaaccagaccugccucgaccggaucgccgccggcaccuucaacgccggggaguucagccugcccaccuucgacucccugaacaucaccgccgcgagccucaacgacgacggccuggacaaccacacgauccugcuguacuacuccaccgccgccagcucccucgccgucacccugaugcuggccaucuucaucguguacauggugagccgcgacaacgucuccugcagcaucugccucuga

SEQ ID NO: 90985 - RNA, 1758 nt, Artificial Sequence; identical to SEQ ID NO: 90911
  derived and/or modified CDS sequence (opt1) from hemagglutinin__InfluenzaB__AGQ16311

SEQ ID NO: 90986 - RNA, 1755 nt, Artificial Sequence; identical to SEQ ID NO: 90878
  derived and/or modified CDS sequence (opt1) from hemagglutinin__InfluenzaB__AGQ16312

SEQ ID NO: 90987 - RNA, 1755 nt, Artificial Sequence
  derived and/or modified CDS sequence (opt1) from hemagglutinin__InfluenzaB__AGQ16313
augaaggccaucaucgugcugcucauggucgugaccagcaacgccgaccgcaucugcaccggcaucacguccagcaacagcccccacguggucaagaccgcgacccagggggaggugaacgugaccggcgucaucccgcugacgaccacccccaccaaguccuacuucgccaaccugaaggggacgaagacccggggcaagcucugccccgacugccugaacugcaccgaccuggacguggcccucgggcgccccaugugcgugggcaccacgccguccgccaaggccagcauccugcacgagguccggcccgugaccuccggcugcuuccccaucaugcacgaccgcaccaagauccggcagcuggcgaaccuccugcgcggguacgagaacauccggcugagcacccagaacgugaucgacgccgagaaggcccccggcgggccguaccgccucggcacguccgggagcugccccaacgccaccuccaagagcggcuucuucgcgaccauggccugggccguccccaaggacaacaacaagaacgccaccaacccccugacgguggaggugccguacaucugcgccgagggcgaggaccagaucgcggucuggggguuccacuccgacaacaagacccagaugaagaaccuguacggcgacagcaacccccagaaguucaccuccagcgccaacggggugaccacgcacuacgugucccagaucggcggcuuccccgaccagaccgaggacgggggccucccccagagcgggcggaucgucguggacuacaugaugcagaagccgggcaagaccgggaccaucguguaccagcgcggcguccugcugccccagaagguguggugcgccuccggccggagcaaggugaucaaggggagccucccccugaucggcgaggccgacugccugcacgagaaguacgggggccucaacaaguccaagcccuacuacacgggggagcacgccaaggcgaucggcaacugcccgaucugggucaagacgccccugaagcuggccaacggcaccaaguaccgcccgcccgccaagcuccugaaggagaagggguucuucggcgccaucgccggguuccuggagggcgggugggagggcaugaucgcgggcuggcacggguacaccagccacggcgcccacgggguggccgucgccgccgaccucaaguccacccaggaggcgaucaacaagaucaccaagaaccugaacagccuguccgagcucgaggugaagaaccugcagcggcugagcggcgccauggacgagcuccacaacgagauccuggagcuggacgagaagguggacgaccuccgcgccgacaccaucuccagccagaucgagcuggccguccugcucuccaacgagggcaucaucaacagcgaggacgagcaccuccuggcgcuggagcggaagcugaagaagaugcuggggcccuccgccguggacaucggcaacgggugcuucgagaccaagcacaagugcaaccagacgugccucgaccgcaucgccgccggcaccuucaacgccggggaguucagccugcccaccuucgacucccugaacaucaccgcggccagccucaacgacgacggccuggacaaccacaccauccugcuguacuacuccacggccgccagcucccucgccgugacccugaugcuggcgaucuucaucgucuacauggugagccgggacaacguguccugcagcaucugccucuga

SEQ ID NO: 90988 - RNA, 1758 nt, Artificial Sequence
  derived and/or modified CDS sequence (opt1) from hemagglutinin__InfluenzaB__AGQ16314
augaaggccaucaucgugcugcucauggucgugaccagcaacgccgaccgcaucugcaccggcaucacguccagcaacagcccccacguggucaagaccgcgacccagggggaggugaacgugaccggcgucaucccgcugacgaccacccccaccaagagccacuucgccaaccugaaggggacggagacccggggcaagcucugccccaagugccugaacugcaccgaccuggacguggcccucgggcgccccaagugcaccggcaagaucccguccgcccgggugagcauccugcacgagguccgccccgugacguccggcugcuuccccaucaugcacgaccggaccaagauccgccagcugcccaaccuccugcggggguacgagcacauccgccugagcacccacaacgugaucaacgccgagaacgcgccgggcgggcccuacaagaucggcaccuccgggagcugccccaacgucacgaacggcaacggcuucuucgccaccauggccugggccgugcccaagaacgacaagaacaagaccgagaccaacccgcucacgaucgaggugcccuacaucugcaccgaggaggaggaccagaucaccgucuggggguuccacuccgacaacgagacccagauggcgaagcuguacggcgacagcaagccccagaaguucacguccagcgccaacggggugaccacccacuacgugucccagaucggcggcuuccccaaccagaccgaggacgggggccugccgcagagcgggcggaucgucguggacuacauggugcagaaguccggcaagacggggaccaucaccuaccagcgcggcauccuccugccccagaaggucuggugcgccagcggccgguccaaggugaucaaggggagccugccccucaucggcgaggccgacugccugcacgagaaguacgggggccugaacaagagcaagcccuacuacaccggggagcacgccaaggcgaucggcaacugcccgaucugggugaagacgccccucaagcuggccaacggcaccaaguaccgcccgcccgccaagcugcucaaggagcggggguucuucggcgccaucgccggguuccuggagggcgggugggagggcaugaucgcgggcuggcacggguacaccucccacggcgcccacggggucgccguggccgccgaccugaaguccacccaggaggcgaucaacaagaucacgaagaaccucaacucccugagcgagcuggaggucaagaaccuccagcgccuguccggcgccauggacgagcugcacaacgagauccucgagcuggacgagaagguggacgaccugcgggccgacaccaucagcucccagaucgagcucgccgugcugcugagcaacgagggcaucaucaacuccgaggacgagcaccuccuggcccuggagcgcaagcucaagaagaugcuggggcccagcgcggucgagaucggcaacgggugcuucgagaccaagcacaagugcaaccagaccugccuggaccggaucgccgccggcaccuucgacgccggggaguucucccuccccacguucgacagccugaacaucaccgcggccucccugaacgacgacggccucgacaaccacaccauccugcuguacuacagcaccgccgccuccagccuggccgugacgcucaugaucgcgaucuucguggucuacauggugucccgcgacaacgugagcugcuccaucugccuguga

SEQ ID NO: 90989 - RNA, 1755 nt, Artificial Sequence
  derived and/or modified CDS sequence (opt1) from hemagglutinin__InfluenzaB__AGQ16315
augaaggccaucaucgugcugcucauggucgugaccagcaacgccgaccgcaucugcaccggcaucacguccagcaacagcccccacguggucaagaccgcgacccagggggaggugaacgugaccggcgucaucccgcugacgaccacccccaccaaguccuacuucgccaaccugaaggggacgaagacccggggcaagcucugccccgacugccugaacugcaccgaccuggacguggcccucgggcgccccaugugcgugggcaccacgccguccgccaaggccagcauccugcacgagguccggcccgugaccuccggcugcuuccccaucaugcacgaccgcaccaagauccggcagcuggcgaaccuccugcgcggguacgagaacauccggcugagcacccagacggugaucgacgccgagaaggcccccggcgggccguaccgccucggcaccuccgggagcugccccaacgccaccuccaagagcggcuucuucgcgaccauggccugggccguccccaaggacaacaacaagaacgccacgaacccccugaccguggaggugccguacaucugcgccgagggcgaggaccagaucaccgucuggggguuccacuccgacaacaagacccagaugaagaaccuguacggcgacagcaacccccagaaguucacguccagcgcgaacgggaucaccacccacuacgugucccagaucggcggcuuccccgaccagaccgaggacgggggccucccccagagcgggcggaucguggucgacuacaugaugcagaagccgggcaagacggggaccaucguguaccagcgcggcgugcugcugccccagaaggucuggugcgccuccggccggagcaaggugaucaaggggagccucccccugaucggcgaggccgacugccugcacgagaaguacgggggccucaacaaguccaagcccuacuacaccggggagcacgccaaggccaucggcaacugcccgaucugggugaagacgccccugaagcuggcgaacggcaccaaguaccgcccgcccgccaagcuccugaaggagcggggguucuucggcgccaucgccggguuccuggagggcgggugggagggcaugaucgccggcuggcacggguacaccagccacggcgcgcacggggucgccguggccgccgaccucaaguccacccaggaggccaucaacaagaucaccaagaaccugaacagccuguccgagcucgaggucaagaaccugcagcgccugagcggcgcgauggacgagcuccacaacgagauccuggagcuggacgagaagguggacgaccuccgggccgacacgaucuccagccagaucgagcuggccgugcugcucuccaacgagggcaucaucaacagcgaggacgagcaccuccuggcccuggagcgcaagcugaagaagaugcuggggcccuccgcggucgacaucggcaacgggugcuucgagaccaagcacaagugcaaccagaccugccucgaccggaucgccgccggcaccuucaacgccggggaguucagccugcccaccuucgacucccugaacaucacggccgcgagccucaacgacgacggccuggacaaccacaucauccugcuguacuacuccaccgccgccagcucccucgccgugacccugaugcuggccaucuucaucguguacauggucagccgcgacaacguguccugcagcaucugccucuga

SEQ ID NO: 90990 - RNA, 1755 nt, Artificial Sequence; identical to SEQ ID NO: 90878
  derived and/or modified CDS sequence (opt1) from hemagglutinin__InfluenzaB__AGQ16316

SEQ ID NO: 90991 - RNA, 1755 nt, Artificial Sequence; identical to SEQ ID NO: 90878
  derived and/or modified CDS sequence (opt1) from hemagglutinin__InfluenzaB__AGQ16317

SEQ ID NO: 90992 - RNA, 1758 nt, Artificial Sequence; identical to SEQ ID NO: 90669
  derived and/or modified CDS sequence (opt1) from hemagglutinin__InfluenzaB__AGQ16318

SEQ ID NO: 90993 - RNA, 1755 nt, Artificial Sequence
  derived and/or modified CDS sequence (opt1) from hemagglutinin__InfluenzaB__AGQ16319
augaaggccaucaucgugcugcucauggucgugaccagcaacgccgaccgcaucugcaccggcaucacguccagcaacagcccccacguggucaagaccgcgacccagggggaggugaacgugaccggcgucaucccgcugacgaccacccccaccaaguccuacuucgccaaccugaaggggacgaagacccggggcaagcucugccccgggugccugaacugcaccgaccuggacguggcccucggccgccccaugugcgugggcaccacgccguccgccaaggccagcauccugcacgagguccggcccgugaccuccgggugcuuccccaucaugcacgaccgcaccaagauccggcagcuggcgaaccuccugcgcggcuacgagaacauccggcugagcacccagaacgugaucgacgccgagaaggcccccgggggcccguaccgccucgggacguccggcagcugccccaacgccaccuccaagagcggcuucuucgcgaccauggccugggccguccccaaggacaacaacaagaacgccaccaacccccugacgguggaggugccguacaucugcgccgagggggaggaccagaucgcggucuggggcuuccacuccgacaacaagacccagaugaagaaccuguacggggacagcaacccccagaaguucaccuccagcgccaacggcgugaccacgcacuacgugucccagaucggcggguuccccgaccagaccgaggacggcgggcucccccagagcggccggaucgucguggacuacaugaugcagaagccggggaagaccggcaccaucguguaccagcgcggcguccugcugccccagaagguguggugcgccuccgggcggagcaaggugaucaagggcagccucccccugaucggggaggccgacugccugcacgagaaguacggcgggcucaacaaguccaagcccuacuacacgggcgagcacgccaaggcgaucggcaacugcccgaucugggucaagacgccccugaagcuggccaacgggaccaaguaccgcccgcccgccaagcuccugaaggagcggggcuucuucggggccaucgccggcuuccuggagggcgggugggagggcaugaucgcgggguggcacggcuacaccagccacggggcccacggcguggccgucgccgccgaccucaaguccacccaggaggcgaucaacaagaucaccaagaaccugaacagccuguccgagcucgaggugaagaaccugcagcgccugagcggcgccauggacgagcuccacaacgagauccuggagcuggacgagaagguggacgaccuccgggccgacaccaucuccagccagaucgagcuggccguccugcucuccaacgaggggaucaucaacagcgaggacgagcaccuccuggcgcuggagcgcaagcugaagaagaugcugggccccuccgccguggacaucgggaacggcugcuucgagaccaagcacaagugcaaccagacgugccucgaccggaucgccgccgggaccuucaacgccggcgaguucagccugcccaccuucgacucccugaacaucaccgcggccagccucaacgacgacggccuggacaaccacaccauccugcuguacuacuccacggccgccagcucccucgccgugacccugaugcuggcgaucuucaucgucuacauggugagccgcgacaacguguccugcagcaucugccucuga

SEQ ID NO: 90994 - RNA, 1755 nt, Artificial Sequence; identical to SEQ ID NO: 90923
  derived and/or modified CDS sequence (opt1) from hemagglutinin__InfluenzaB__AGQ16320

SEQ ID NO: 90995 - RNA, 1755 nt, Artificial Sequence; identical to SEQ ID NO: 90878
  derived and/or modified CDS sequence (opt1) from hemagglutinin__InfluenzaB__AGQ16321

SEQ ID NO: 90996 - RNA, 1755 nt, Artificial Sequence; identical to SEQ ID NO: 90878
  derived and/or modified CDS sequence (opt1) from hemagglutinin__InfluenzaB__AGQ16322

SEQ ID NO: 90997 - RNA, 1758 nt, Artificial Sequence
  derived and/or modified CDS sequence (opt1) from hemagglutinin__InfluenzaB__AGQ16323
augaaggccaucaucgugcugcucauggucgugaccagcaacgccgaccgcaucugcaccggcaucacguccagcaacagcccccacguggucaagaccgcgacccagggggaggugaacgugaccggcgucaucccgcugacgaccacccccaccaagagccacuucgccucccugaaggggacggagacccggggcaagcucugccccaagugccugaacugcaccgaccuggacguggcccucgggcgccccaagugcaccggcaagaucccgagcgcccggguguccauccugcacgagguccgccccgugacgagcggcugcuuccccaucaugcacgaccggaccaagauccgccagcugcccaaccuccugcggggguacgagcacauccgccuguccacccacaacgugaucaacgccgaggacgcgccgggcgggcccuacaagaucggcaccagcggguccugccccaacgucacgaacggcaacggcuucuucgccaccauggccugggccgugcccaagaacgacaagaacaagaccgcgaccaacccgcucacgaucgaggugcccuacaucugcaccgagggggaggaccagaucaccgucuggggcuuccacagcgacaacgagacccagauggccaagcuguacggggacuccaagccccagaaguucacgagcuccgccaacggcgugaccacccacuacgugagccagaucggcggguuccccaaccagaccgaggacggcgggcugccgcaguccggccggaucgucguggacuacauggugcagaaguccgggaagacgggcaccaucaccuaccagcgcggcauccuccugccccagaaggucuggugcgccuccgggcggagcaaggugaucaagggcagccugccccucaucggggaggccgacugccugcacgagaaguacggcgggcugaacaaguccaagcccuacuacaccggcgagcacgcgaaggccaucggcaacugcccgaucugggugaagacgccccucaagcuggccaacgggaccaaguaccgcccgcccgccaagcugcucaaggagcggggcuucuucggggccaucgcgggcuuccuggagggcgggugggagggcaugaucgccggguggcacggcuacaccagccacggggcccacggcgucgccguggccgcggaccugaaguccacccaggaggccaucaacaagaucacgaagaaccucaacagccuguccgagcuggaggucaagaaccuccagcgccugagcggcgccauggacgagcugcacaacgagauccucgagcuggacgagaagguggacgaccugcgggccgacaccaucuccagccagaucgagcucgccgugcugcuguccaacgaggggaucaucaacagcgaggacgagcaccuccuggcgcuggagcgcaagcucaagaagaugcugggccccuccgccgucgagaucgggaacggcugcuucgagaccaagcacaagugcaaccagaccugccuggaccggaucgccgccgggaccuucgacgcgggcgaguucagccuccccacguucgacucccugaacaucaccgccgccagccugaacgacgacggccucgacaaccacaccauccugcuguacuacuccaccgccgccagcucccuggcggugacgcucaugaucgccaucuucguggucuacauggugagccgcgacaacguguccugcagcaucugccuguga

SEQ ID NO: 90998 - RNA, 1755 nt, Artificial Sequence; identical to SEQ ID NO: 90878
  derived and/or modified CDS sequence (opt1) from hemagglutinin__InfluenzaB__AGQ16324

SEQ ID NO: 90999 - RNA, 1755 nt, Artificial Sequence; identical to SEQ ID NO: 90878
  derived and/or modified CDS sequence (opt1) from hemagglutinin__InfluenzaB__AGQ16325

SEQ ID NO: 91000 - RNA, 1755 nt, Artificial Sequence; identical to SEQ ID NO: 90878
  derived and/or modified CDS sequence (opt1) from hemagglutinin__InfluenzaB__AGQ16326

SEQ ID NO: 91001 - RNA, 1755 nt, Artificial Sequence; identical to SEQ ID NO: 90878
  derived and/or modified CDS sequence (opt1) from hemagglutinin__InfluenzaB__AGQ16327

SEQ ID NO: 91002 - RNA, 1758 nt, Artificial Sequence
  derived and/or modified CDS sequence (opt1) from hemagglutinin__InfluenzaB__AGQ16328
augaaggccaucaucgugcugcucauggucgugaccagcaacgccgaccgcaucugcaccggcaucacguccagcaacagcccccacguggucaagaccgcgacccagggggaggugaacgugaccggcgucaucccgcugacgaccacccccaccaagagccacuucgccaaccugaaggggacggagacccggggcaagcucugccccaagugccugaacugcaccgaccuggacguggcccucgggcgccccaagugcaccggcaagacgccguccgcccgggugagcauccugcacgagguccgccccgugaccuccggcugcuuccccaucaugcacgaccggaccaagauccgccagcugcccaaccuccugcggggguacgagcacauccgccugagcacccacaacgugaucaacgccgagaacgcgccgggcgggcccuacaagaucggcacguccgggagcugccccaacgucaccaacggcaacggcuucuucgccaccauggccugggccgugcccaagaacgacaagaacaagaccgcgacgaacccgcucaccaucgaggugcccuacaucugcaccgagggggaggaccagaucaccgucuggggcuuccacuccgacaacgagacgcagauggccaagcuguacggggacagcaacccccagaaguucaccuccagcgccaacggcgugaccacccacuacgugucccagaucggcggguuccccaaccagacggaggacggcgggcugccgcagagcggccggaucgucguggacuacauggugcagaaguccgggaagaccggcaccaucaccuaccagcgcggcauccuccugccccagaaggucuggugcgccagcgggcgguccaaggugaucaagggcagccugccccucaucggggaggccgacugccugcacgagaaguacggcgggcugaacaagagcaagcccuacuacacgggcgagcacgcgaaggccaucggcaacugcccgaucugggugaagacgccccucaagcuggccaacgggaccaaguaccgcccgcccgccaagcugcucaaggagcggggcuucuucggggccaucgcgggcuuccuggagggcgggugggagggcaugaucgccggguggcacggcuacaccucccacggggcccacggcgucgccguggccgcggaccugaaguccacccaggaggccaucaacaagaucaccaagaaccucaacucccugagcgagcuggaggucaagaaccuccagcgccuguccggcgccauggacgagcugcacaacgagauccucgagcuggacgagaagguggacgaccugcgggccgacaccaucagcucccagaucgagcucgccgugcugcugagcaacgaggggaucaucaacuccgaggacgagcaccuccuggcgcuggagcgcaagcucaagaagaugcugggccccagcgccgucgagaucgggaacggcugcuucgagaccaagcacaagugcaaccagaccugccuggaccggaucgccgccgggacguucgacgcgggcgaguucucccuccccaccuucgacagccugaacaucaccgccgccucccugaacgacgacggccucgacaaccacaccauccugcuguacuacagcacggccgccuccagccuggcggugacccucaugaucgccaucuucguggucuacauggugucccgcgacaacgugagcugcuccaucugccuguga

SEQ ID NO: 91003 - RNA, 1758 nt, Artificial Sequence
  derived and/or modified CDS sequence (opt1) from hemagglutinin__InfluenzaB__AGX15487
augaaggccaucaucgugcugcucauggucgugaccagcaacgccgaccgcaucugcaccggcaucacguccagcaacagcccccacguggucaagaccgcgacccagggggaggugaacgugaccggcgucaucccgcugacgaccacccccaccaagagccacuucgccaaccugaaggggacgaagacccggggcaagcucugccccaagugccugaacugcaccgaccuggacguggcccucgggcgccccaagugcaccggcaacaucccguccgccaaggugagcauccugcacgagguccggcccgugacguccggcugcuuccccaucaugcacgaccgcaccaagauccggcagcugcccaaccuccugcgcggguacgagcacauccggcugagcacccacaacgugaucaacgccgagaaggcgccgggcgggcccuacaagaucggcaccuccgggagcugccccaacgucacgaacggcaacggcuucuucgccaccauggccugggccgugcccaagaacgacaacaacaagaccgcgaccaacucccucacgaucgaggugccguacaucugcaccgagggggaggaccagaucaccgucuggggcuuccacagcgacaacgagacccagauggccaagcuguacggggacuccaagccccagaaguucacgagcuccgccaacggcgugaccacccacuacgugagccagaucggcggguuccccaaccagaccgaggacggcgggcugccccaguccggccgcaucgucguggacuacauggugcagaaguccgggaagacgggcaccaucaccuaccagcggggcauccuccugccgcagaaggucuggugcgccuccgggcgcagcaaggugaucaagggcagccugccccucaucggggaggccgacugccugcacgagaaguacggcgggcugaacaaguccaagcccuacuacaccggcgagcacgcgaaggccaucggcaacugccccaucugggugaagacgccgcucaagcuggccaacgggaccaaguaccggccgcccgccaagcugcucaaggagcgcggcuucuucggggccaucgcgggcuuccuggagggcgggugggagggcaugaucgccggguggcacggcuacaccagccacggggcccacggcgucgccguggccgcggaccugaaguccacccaggaggccaucaacaagaucacgaagaaccucaacagccuguccgagcuggaggucaagaaccuccagcggcugagcggcgccauggacgagcugcacaacgagauccucgagcuggacgagaagguggacgaccugcgcgccgacaccaucuccagccagaucgagcucgccgugcugcuguccaacgaggggaucaucaacagcgaggacgagcaccuccuggcgcuggagcggaagcucaagaagaugcugggccccuccgccgucgagaucgggaacggcugcuucgagaccaagcacaagugcaaccagaccugccuggaccgcaucgccgccgggaccuucgacgcgggcgaguucagccuccccacguucgacucccugaacaucaccgccgccagccugaacgacgacggccucgacaaccacaccauccugcuguacuacuccaccgccgccagcucccuggcggugacgcucaugaucgccaucuucguggucuacauggugagccgggacaacguguccugcagcaucugccuguga

SEQ ID NO: 91004 - RNA, 1758 nt, Artificial Sequence; identical to SEQ ID NO: 91003
  derived and/or modified CDS sequence (opt1) from hemagglutinin__InfluenzaB__AGX15496

SEQ ID NO: 91005 - RNA, 1758 nt, Artificial Sequence
  derived and/or modified CDS sequence (opt1) from hemagglutinin__InfluenzaB__AGX15518
augaaggccaucaucgugcugcucauggucgugaccagcaacgccgaccgcaucugcaccggcaucacguccagcaacagcccccacguggucaagaccgcgacccagggggaggugaacgugaccggcgucaucccgcugacgaccgcccccaccaagagccacuucgccaaccugaaggggaccaagacgcggggcaagcucugccccaagugccugaacugcaccgaccuggacguggcccucgggcgccccaagugcaccggcaacaucccguccgccgaggugagcauccugcacgagguccggcccgugaccuccggcugcuuccccaucaugcacgaccgcacgaagauccggcagcugcccaaccuccugcgcggguacgagcacauccggcugagcacccacaacgugaucaacgcggagaaggccccgggcgggcccuacaagaucggcaccuccgggagcugccccaacgucaccaacggcaacggcuucuucgccacgauggccugggcggugcccaagaacgacaacaacaagaccgccaccaacucccucaccaucgaggugccguacaucugcacggagggggaggaccagaucaccaucuggggcuuccacagcgacaacgagacccagauggccaagcuguacggggacuccaagccccagaaguucaccagcuccgccaacggcgucacgacccacuacgugagccagaucggcggguuccccaaccagaccgaggacggcgggcugccccaguccggccgcaucguggucgacuacauggugcagaagccggggaagaccggcacgaucaccuaccagcggggcauccuccugccccagaagguguggugcgccagcgggcgcuccaaggucaucaagggcagccugccccucaucggggaggcggacugccugcacgagaaguacggcgggcugaacaagagcaagcccuacuacaccggcgagcacgccaaggccaucggcaacugcccgaucugggugaagacgccccucaagcuggccaacgggaccaaguaccggccgcccgccaagcugcucaaggagcgcggcuucuucggggcgaucgccggcuuccuggagggcgggugggagggcaugaucgccggguggcacggcuacaccucccacggggcccacggcguggccgucgcggccgaccugaaguccacccaggaggccaucaacaagaucaccaagaaccucaacucccugagcgagcuggaggugaagaaccuccagcggcuguccagcgccauggacgagcugcacaacgagauccucgagcuggacgagaaggucgacgaccugcgcgccgacacgaucuccagccagaucgagcucgcggugcugcuguccaacgagggcaucaucaacagcgaggacgagcaccuccuggcccuggagcggaagcucaagaagaugcuggggcccuccgccguggagaucggcaacgggugcuucgagaccaagcacaagugcaaccagaccugccuggaccgcaucgccgcgggcaccuucgacgccggggaguucagccuccccaccuucgacucccugaacaucacggccgccagccugaacgacgacggccucgacaaccacaccauccugcuguacuacuccaccgccgcgagcucccuggccgucacccucaugaucgccaucuucgugguguacauggucagccgggacaacguguccugcagcaucugccuguga

SEQ ID NO: 91006 - RNA, 1758 nt, Artificial Sequence
  derived and/or modified CDS sequence (opt1) from hemagglutinin__InfluenzaB__AGX15529
augaaggccaucaucgugcugcucauggucgugaccagcaacgccgaccgcgugugcaccggcaucacguccagcaacagcccccacgucgugaagaccgcgacccagggggaggugaacgucaccggcgugaucccgcugacgaccacccccaccaagagccacuucgccaaccugaaggggacgaagacccggggcaagcucugccccaagugccugaacugcaccgaccuggacguggcccucgggcgccccaagugcaccggcaacaucccguccgccgaggucagcauccuguacgaggugcggcccgugacguccggcugcuuccccaucaugcacgaccgcaccaagauccggcagcugcccaaccuccugcgcggguacgagcacauccggcugagcacccacaacgucaucaacgccgagaaggcgccgggcgggcccuacaagaucggcaccuccgggagcugccccaacgugacgaacggcaacggcuucuucgccaccauggccugggccgugcccaagaacgacaacaacaagaccgcgaccaacucccucacgaucgaggucccguacaucugcaccgagggggaggaccagaucaccaucuggggcuuccacagcgacaacgagacccagauggccaagcuguacggggacuccaagccccagaaguucacgagcuccgccaacggcgugaccacccacuacgugagccagaucggcggguuccccaaccagaccgaggacggcgggcugccccaguccggccgcaucgucguggacuacauggugcagaaguccgggaagacgggcaccaucaccuaccagcggggcauccuccugccgcagaaggucuggugcgccuccgggcgcagcaaggugaucaagggcacccugccccucaucggggaggccgacugccugcacgagaaguacggcgggcugaacaagagcaagcccuacuacacgggcgagcacgcgaaggccaucggcaacugccccaucugggugaagaccccgcucaagcuggccaacgggaccaaguaccggccgcccgccaagcugcucaaggagcgcggcuucuucggggccaucgcgggcuuccuggagggcgggugggagggcaugaucgccggguggcacggcuacaccucccacggggcccacggcgucgccguggccgcggaccucaagagcacgcaggaggccaucaacaagaucaccaagaaccugaacucccugagcgagcuggaggucaagaaccuccagcggcuguccggcgccauggacgagcugcacaacgagauccucgagcuggacgagaagguggacgaccugcgcgccgacaccaucagcucccagaucgagcucgccgugcugcugagcaacgaggggaucaucaacuccgaggacgagcaccuccuggcgcuggagcggaagcucaagaagaugcugggccccagcgccgucgagaucgggaacggcugcuucgagaccaagcacaagugcaaccagaccugccuggaccgcaucgccgccgggacguucgacgcgggcgaguucucccuccccaccuucgacagccugaacaucaccgccgccucccugaacgacgacggccucgacaaccacaccauccugcuguacuacagcacggccgccuccagccuggcggugacccucaugaucgccaucuucguggucuacauggugucccgggacaacgugagcugcuccaucugccuguga

SEQ ID NO: 91007 - RNA, 1758 nt, Artificial Sequence; identical to SEQ ID NO: 90597
  derived and/or modified CDS sequence (opt1) from hemagglutinin__InfluenzaB__AGX15541

SEQ ID NO: 91008 - RNA, 1758 nt, Artificial Sequence
  derived and/or modified CDS sequence (opt1) from hemagglutinin__InfluenzaB__AGX15552
augaaggccaucaucgugcugcucauggucgugaccagcaacgccgaccgcaucugcaccggcaucacguccagcaacagcccccacguggucaagaccgcgacccagggggaggugaacgugaccggcgucaucccgcugacgaccacccccaccaagagccacuucgccaaccugaaggggacggagacccggggcaagcucugccccaagugccugaacugcaccgaccuggacguggcccucgggcgccccaagugcaccggcaacaucccguccgcccgggugagcauccugcacgagguccgccccgugacguccggcugcuuccccaucaugcacgaccggaccaagauccgccagcugcccaaccuccugcggggguacgagcacauccgccugagcacccacaacgugaucaacgccaagaacgcgccgggcgggcccuacaagaucggcaccuccgggagcugccccaacgucacgaacggcaacggcuucuucgccaccauggccugggccgugcccaagaacgacaacaacaagaccgcgaccaacucccucacgaucgaggugccguacaucugcaccgagggggaggaccagaucaccgucuggggcuuccacagcgacaacgagacccagauggccaagcuguacggggacuccaagccccagaaguucacgagcuccgccaacggcgugaccacccacuacgugagccagaucggcggguuccccaaccagaccgaggacggcgggcugccccaguccggccggaucgucguggacuacauggugcagaaguccgggaagacgggcaccaucaccuaccagcgcggcauccuccugccgcagaaggucuggugcgccuccgggcggagcaaggugaucaagggcagccugccccucaucggggaggccgacugccugcacgagaaguacggcgggcugaacaaguccaagcccuacuacaccggcgagcacgcgaaggccaucggcaacugccccaucugggugaagacgccgcucaagcuggccaacgggaccaaguaccgcccgcccgccaagcugcucaaggagcggggcuucuucggggccaucgcgggcuuccuggagggcgggugggagggcaugaucgccggguggcacggcuacaccagccacggggcccacggcgucgccguggccgcggaccugaaguccacccaggaggccaucaacaagaucacgaagaaccucaacagccuguccgagcuggaggucaagaaccuccagcgccugagcggcgccauggacgagcugcacaacgagauccucgagcuggacgagaagguggacgaccugcgggccgacaccaucuccagccagaucgagcucgccgugcugcuguccaacgaggggaucaucaacagcgaggacgagcaccuccuggcgcuggagcgcaagcucaagaagaugcugggccccuccgccgucgagaucgggaacggcugcuucgagaccaagcacaagugcaaccagaccugccuggaccggaucgccgccgggaccuucgacgcgggcgaguucagccuccccacguucgacucccugaacaucaccgccgccagccugaacgacgacggccucgacaaccacaccauccugcuguacuacuccaccgccgccagcucccuggcggugacgcucaugaucgccaucuucguggucuacauggugagccgcgacaacguguccugcagcaucugccuguga

SEQ ID NO: 91009 - RNA, 1758 nt, Artificial Sequence; identical to SEQ ID NO: 90606
  derived and/or modified CDS sequence (opt1) from hemagglutinin__InfluenzaB__AGX15563

SEQ ID NO: 91010 - RNA, 1758 nt, Artificial Sequence; identical to SEQ ID NO: 90606
  derived and/or modified CDS sequence (opt1) from hemagglutinin__InfluenzaB__AGX15574

SEQ ID NO: 91011 - RNA, 1758 nt, Artificial Sequence
  derived and/or modified CDS sequence (opt1) from hemagglutinin__InfluenzaB__AGX15607
augaaggccaucaucgugcugcucauggucgugaccagcaacgccgaccgcaucugcaccggcaucacguccagcaacagcccccacguggucaagaccgcgacccagggggaggugaacgugaccggcgucaucccgcugacgaccacccccaccaagagccacuucgccaaccugaaggggacggagacccggggcaagcucugccccaagugccugaacugcaccgaccuggacguggcccucgggcgccccaagugcaccggcaacacgccguccgcccgggugagcauccugcacgagguccgccccgugaccuccggcugcuuccccaucaugcacgaccggaccaagauccgccagcugcccaaccuccugcggggguacgagcacauccgccugagcacccacaacgugaucaacgccgagaacgcgccgggcgggcccuacaagaucggcacguccgggagcugccccaacgucaccaacggcaacggcuucuucgccaccauggccugggccgugcccaagaacgacaacaacaagaccgcgacgaacucccucaccaucgaggugccguacaucugcaccgagggggaggaccagaucaccgucuggggcuuccacagcgacaacgagacgcagauggccaagcuguacggggacuccaagccccagaaguucaccagcuccgccaacggcgugaccacccacuacgugagccagaucggcggguuccccaaccagacggaggacggcgggcugccccaguccggccggaucgucguggacuacauggugcagaaguccgggaagaccggcaccaucaccuaccagcgcggcauccuccugccgcagaaggucuggugcgccuccgggcggagcaaggugaucaagggcagccugccccucaucggggaggccgacugccugcacgagaaguacggcgggcugaacaaguccaagcccuacuacacgggcgagcacgcgaaggccaucggcaacugccccaucugggugaagaccccgcucaagcuggccaacgggaccaaguaccgcccgcccgccaagcugcucaaggagcggggcuucuucggggccaucgcgggcuuccuggagggcgggugggagggcaugaucgccggguggcacggcuacaccagccacggggcccacggcgucgccguggccgcggaccugaaguccacgcaggaggccaucaacaagaucaccaagaaccucaacagccuguccgagcuggaggucaagaaccuccagcgccugagcggcgccauggacgagcugcacaacgagauccucgagcuggacgagaagguggacgaccugcgggccgacaccaucuccagccagaucgagcucgccgugcugcuguccaacgaggggaucaucaacagcgaggacgagcaccuccuggcgcuggagcgcaagcucaagaagaugcugggccccuccgccgucgagaucgggaacggcugcuucgagaccaagcacaagugcaaccagaccugccuggaccggaucgccgccgggacguucgacgcgggcgaguucagccuccccaccuucgacucccugaacaucaccgccgccagccugaacgacgacggccucgacaaccacaccauccugcuguacuacuccacggccgccagcucccuggcggugacccucaugaucgccaucuucguggucuacauggugagccgcgacaacguguccugcagcaucugccuguga

SEQ ID NO: 91012 - RNA, 1758 nt, Artificial Sequence
  derived and/or modified CDS sequence (opt1) from hemagglutinin__InfluenzaB__AGX15629
augaaggccaucaucgugcugcucauggucgugaccagcaacgccgaccgcaucugcaccggcaucacguccagcaacagcccccacguggucaagaccgcgacccagggggaggugaacgugaccggcgucaucccgcugacgaccacccccaccaagagccacuucgccaaccugaaggggacggagacccggggcaagcucugccccaagugccugaacugcaccgaccuggacguggcccucgggcgccccaagugcaccggcaacaucccguccgcccgggugagcauccugcacgagguccgccccgugacguccggcugcuuccccaucaugcacgaccggaccaagauccgccagcugcccaaccuccugcggggguacgagcacauccgccugagcacccacaacgugaucaacgccgagaacgcgccgggcgggcccuacaagaucggcaccuccgggagcugccccaacgucacgaacggcaacggcuucuucgccaccauggccugggccgugcccaagaacgacaacaacaagaccgcgaccaacucccucacgaucgaggugccguacaucugcaccgagggggaggaccagaucaccgucuggggcuuccacagcgacaacgagauccagauggccaagcuguacggggacuccaagccccagaaguucaccagcuccgccaacggcgugacgacccacuacgugagccagaucggcggguuccccaaccagaccgaggacggcgggcugccccaguccggccggaucgucguggacuacauggugcagaaguccgggaagaccggcacgaucaccuaccagcgcggcauccuccugccgcagaaggucuggugcaccuccgggcggagcaaggugaucaagggcagccugccccucaucggggaggccgacugccugcacgagaaguacggcgggcugaacaaguccaagcccuacuacaccggcgagcacgccaaggcgaucggcaacugccccaucugggugaagacgccgcucaagcuggccaacgggaccaaguaccgcccgcccgccaagcugcucaaggagcggggcuucuucggggccaucgccggcuuccuggagggcgggugggagggcaugaucgcgggguggcacggcuacaccagccacggggcccacggcgucgccguggccgccgaccugaaguccacccaggaggcgaucaacaagaucacgaagaaccucaacagccuguccgagcuggaggucaagaaccuccagcgccugagcggcgccauggacgagcugcacaacgagauccucgagcuggacgagaagguggacgaccugcgggccgacaccaucuccagccagaucgagcucgccgugcugcuguccaacgaggggaucaucaacagcgaggacgagcaccuccuggcccuggagcgcaagcucaagaagaugcugggccccuccgcggucgagaucgggaacggcugcuucgagaccaagcacaagugcaaccagaccugccuggaccggaucgccgccgggaccuucgacgccggcgaguucagccuccccacguucgacucccugaacaucaccgcggccagccugaacgacgacggccucgacaaccacaccauccugcuguacuacuccaccgccgccagcucccuggccgugacgcucaugaucgcgaucuucguggucuacauggugagccgcgacaacguguccugcagcaucugccuguga

SEQ ID NO: 91013 - RNA, 1758 nt, Artificial Sequence
  derived and/or modified CDS sequence (opt1) from hemagglutinin__InfluenzaB__AGX15651
augaaggccaucaucgugcugcucauggucgugaccagcaacgccgaccgcaucugcaccggcaucacguccagcaacagcccccacguggucaagaccgcgacccagggggaggugaacgugaccggcgucaucccgcugacgaccacccccaccaagagccacuucgccaaccugaaggggacggagacccggggcaagcucugccccaagugccugaacugcaccgaccuggacguggcccucgggcgccccaagugcaccggcaagaucccguccgcccgggugagcauccugcacgagguccgccccgugacguccggcugcuuccccaucaugcacgaccggaccaagauccgccagcugcccaaccuccugcggggguacgagcacauccgccugagcacccacaacgugaucaacgccgagaacgcgccgggcgggcccuacaagaucggcaccuccgggagcugccccaacaucacgaacggcaacggcuucuucgccaccauggccugggccguccccaagaacgacaagaacaagaccgcgaccaacccgcucacgaucgaggugcccuacaucugcaccgagggggaggaccagaucaccguguggggcuuccacuccgacaacgagacccagauggccaagcuguacggggacagcaagccccagaaguucacguccagcgccaacggcgucaccacccacuacgugucccagaucggcggguuccccaaccagaccgaggacggcgggcugccgcagagcggccggaucguggucgacuacauggugcagaaguccgggaagacgggcaccaucaccuaccagcgcggcauccuccugccccagaagguguggugcgccagcgggcgguccaaggucaucaagggcagccugccccucaucggggaggccgacugccugcacgagaaguacggcgggcugaacaagagcaagcccuacuacaccggcgagcacgcgaaggccaucggcaacugcccgaucugggugaagacgccccucaagcuggccaacgggaccaaguaccgcccgcccgccaagcugcucaaggagcggggcuucuucggggccaucgcgggcuuccuggagggcgggugggagggcaugaucgccggguggcacggcuacaccucccacggggcccacggcguggccgucgccgcggaccugaaguccacccaggaggccaucaacaagaucacgaagaaccucaacucccugagcgagcuggaggugaagaaccuccagcgccuguccggcgccauggacgagcugcacaacgagauccucgagcuggacgagaaggucgacgaccugcgggccgacaccaucagcucccagaucgagcucgccgugcugcugagcaacgaggggaucaucaacuccgaggacgagcaccuccuggcgcuggagcgcaagcucaagaagaugcugggccccagcgccguggagaucgggaacggcugcuucgagaccaagcacaagugcaaccagaccugccuggaccggaucgccgccgggaccuucgacgcgggcgaguucucccuccccacguucgacagccugaacaucaccgccgccucccugaacgacgacggccucgacaaccacaccauccugcuguacuacagcaccgccgccuccagccuggcggucacgcucaugaucgccaucuucgugguguacauggucucccgcgacaacgugagcugcuccaucugccuguga

SEQ ID NO: 91014 - RNA, 1758 nt, Artificial Sequence; identical to SEQ ID NO: 91013
  derived and/or modified CDS sequence (opt1) from hemagglutinin__InfluenzaB__AGX15675

SEQ ID NO: 91015 - RNA, 1758 nt, Artificial Sequence; identical to SEQ ID NO: 91013
  derived and/or modified CDS sequence (opt1) from hemagglutinin__InfluenzaB__AGX15686

SEQ ID NO: 91016 - RNA, 1758 nt, Artificial Sequence
  derived and/or modified CDS sequence (opt1) from hemagglutinin__InfluenzaB__AGX15697
augaaggccaucaucgugcugcucauggucgugaccagcaacgccgaccgcaucugcaccggcaucacguccagcaacagcccccacguggucaagaccgcgacccagggggaggugaacgugaccggcgucaucccgcugacgaccacccccaccaagagccacuucgccaaccugaaggggacggagacccggggcaagcucugccccaagugccugaacugcaccgaccuggacguggcccucgggcgccccaagugcaccggcaagaucccguccgcccgggugagcauccugcacgagguccgccccgugacguccggcugcuuccccaucaugcacgaccggaccaagauccgccagcugcccaaccuccugcggggguacgagcacauccgccugagcacccacaacgugaucaacgccgagaacgcgccgggcgggcccuacaagaucggcaccuccgggagcugccccaacaucacgaacggcaacggcuucuucgccaccauggccugggccguccccaagaacgacaagaacaagaccgcgaccaacccgcucacgaucgaggugcccuacaucugcaccgagggggaggaccagaucaccguguggggcuuccacuccgacaacgagaaccagauggccaagcuguacggggacagcaagccccagaaguucaccuccagcgccaacggcgucacgacccacuacgugucccagaucggcggguuccccaaccagaccgaggacggcgggcugccgcagagcggccggaucguggucgacuacauggugcagaaguccgggaagaccggcacgaucaccuaccagcgcggcauccuccugccccagaagguguggugcgccagcgggcgguccaaggucaucaagggcagccugccccucaucggggaggccgacugccugcacgagaaguacggcgggcugaacaagagcaagcccuacuacaccggcgagcacgcgaaggccaucggcaacugcccgaucugggugaagacgccccucaagcuggccaacgggaccaaguaccgcccgcccgccaagcugcucaaggagcggggcuucuucggggccaucgcgggcuuccuggagggcgggugggagggcaugaucgccggguggcacggcuacaccucccacggggcccacggcguggccgucgccgcggaccugaaguccacccaggaggccaucaacaagaucaccaagaaccucaacucccugagcgagcuggaggugaagaaccuccagcgccuguccggcgccauggacgagcugcacaacgagauccucgagcuggacgagaaggucgacgaccugcgggccgacacgaucagcucccagaucgagcucgccgugcugcugagcaacgaggggaucaucaacuccgaggacgagcaccuccuggcgcuggagcgcaagcucaagaagaugcugggccccagcgccguggagaucgggaacggcugcuucgagaccaagcacaagugcaaccagaccugccuggaccggaucgccgccgggaccuucgacgcgggcgaguucucccuccccaccuucgacagccugaacaucacggccgccucccugaacgacgacggccucgacaaccacaccauccugcuguacuacagcaccgccgccuccagccuggcggucacccucaugaucgccaucuucgugguguacauggucucccgcgacaacgugagcugcuccaucugccuguga

SEQ ID NO: 91017 - RNA, 1758 nt, Artificial Sequence; identical to SEQ ID NO: 91013
  derived and/or modified CDS sequence (opt1) from hemagglutinin__InfluenzaB__AGX15708

SEQ ID NO: 91018 - RNA, 1758 nt, Artificial Sequence; identical to SEQ ID NO: 91013
  derived and/or modified CDS sequence (opt1) from hemagglutinin__InfluenzaB__AGX15719

SEQ ID NO: 91019 - RNA, 1758 nt, Artificial Sequence; identical to SEQ ID NO: 90538
  derived and/or modified CDS sequence (opt1) from hemagglutinin__InfluenzaB__AGX15730

SEQ ID NO: 91020 - RNA, 1758 nt, Artificial Sequence; identical to SEQ ID NO: 91013
  derived and/or modified CDS sequence (opt1) from hemagglutinin__InfluenzaB__AGX15741

SEQ ID NO: 91021 - RNA, 1758 nt, Artificial Sequence; identical to SEQ ID NO: 91013
  derived and/or modified CDS sequence (opt1) from hemagglutinin__InfluenzaB__AGX15753

SEQ ID NO: 91022 - RNA, 1758 nt, Artificial Sequence
  derived and/or modified CDS sequence (opt1) from hemagglutinin__InfluenzaB__AGX15764
augaaggccaucaucgugcugcucauggucgugaccagcaacgccgaccgcaucugcaccggcaucacguccagcaacagcccccacguggucaagaccgcgacccagggggaggugaacgugaccggcgucaucccgcugacgaccacccccaccaagagccacuucgccaaccugaaggggacggagacccggggcaagcucugccccaagugccugaacugcaccgaccuggacguggcccucgggcgccccaagugcaccggcaagaucccguccgcccgggugagcauccugcacgagguccgccccgugacguccggcugcuuccccaucaugcacgaccggaccaagauccgccagcugcccaaccuccugcggggguacgagcacauccgccugagcacccacaacgugaucaacgccgagaacgcgccgggcgggcccuacaagaucggcaccuccgggagcugccccaacaucacgaacggcaacggcuucuucgccaccauggccugggccguccccaagaacgacaagaacaagaccgcgaccaacccgcucacgaucgaggugcccuacaucugcaccgagggggaggaccagaucaccguguggggcuuccacuccgacaacgagacccagauggccaagcuguacggggacagcaagccccagaaguucacguccagcgccaacggcgucaccacccacuacgugucccagaucggcggguuccccaaccagaccgaggacggcgggcugccgcagagcggccggaucguggucgacuacauggugcagaaguccgggaagacgggcaccaucaccuaccagcgcggcauccuccugccccagaagguguggugcgccagcgggcgguccaaggucaucaagggcagccugccccucaucggggaggccgacugccugcacgagaaguacggcgggcugaacaagagcaagcccuacuacaccggcgagcacgcgaaggccaucggcaacugcccgaucugggugaagacgccccucaagcuggccaacgggaccaaguaccgcccgcccgccaagcugcucaaggagcggggcuucuucggggccaucgcgggcuuccuggagggcgggugggagggcaugaucgccggguggcacggcuacaccucccacggggcccacggcguggccgucgccgcggaccugaaguccacccaggaggccaucaacaagaucacgaagaaccucaacucccugagcgagcuggaggugaagaaccuccagcgccuguccggcgccauggacgagcugcacaacgagauccucgagcuggacgagaaggucgacgaccugcgggccgacaccaucagcucccagaucgagcucgccgugcugcugagcaacgaggggaucaucaacuccgaggacgagcaccuccuggcgcuggagcgcaagcucaagaagaugcugggccccagcgccguggagaucgggaacggcugcuucgagaccaagcacaagugcaaccagaccugccuggaccggaucgccgccgggaccuucgacgcgggcgaguucucccuccccacguucgacagccugaacaucaccgccgccucccugaacgacgacggccucgacaaccacaccauccugcuguacuacagcaccgccgccuccagccuggcgaucacgcucaugaucgccaucuucgucguguacauggugucccgcgacaacgucagcugcuccaucugccuguga

SEQ ID NO: 91023 - RNA, 1755 nt, Artificial Sequence
  derived and/or modified CDS sequence (opt1) from hemagglutinin__InfluenzaB__AGX15775
augaaggccaucaucgugcugcucauggucgugaccagcaacgccgaccgcaucugcaccggcaucacguccagcaacagcccccacguggucaagaccgcgacccagggggaggugaacgugaccggcgucaucccgcugacgaccacccccaccaaguccuacuucgccaaccugaaggggacgcggacccgcggcaagcucugccccgacugccugaacugcaccgaccuggacguggcccucgggcggcccaugugcgugggcaccacgccguccgccaaggccagcauccugcacgagguccgccccgugaccuccggcugcuuccccaucaugcacgaccggaccaagauccgccagcugcccaaccuccugcggggguacgagaacauccgccugagcacccagaacgugaucgacgcggagaaggccccgggcgggcccuaccggcucggcacguccgggagcugccccaacgccaccuccaagagcggcuucuucgccaccauggcgugggccguccccaaggacaacaacaagaacgccaccaacccgcugacgguggaggugcccuacaucugcaccgagggcgaggaccagaucaccgucuggggguuccacuccgacaacaagauccagaugaagaaccuguacggcgacagcaacccccagaaguucaccuccagcgccaacggggugacgacccacuacgugucccagaucggcagcuuccccgaccagaccgaggacggcgggcucccgcaguccggccgcaucgucguggacuacaugaugcagaagcccgggaagaccggcacgaucguguaccagcgcgggguccugcugccccagcgcguguggugcgccagcggccggagcaaggugaucaagggcucccucccccugaucggggaggcggacugccugcacgagaaguacggcgggcucaacaagagcaagccguacuacaccggcgagcacgccaaggccaucgggaacugccccaucugggucaagacgccccugaagcuggccaacggcaccaaguaccggcccccggccaagcuccugaaggagcggggcuucuucggggcgaucgccggcuuccuggagggcgggugggaggggaugaucgccggcuggcacggcuacaccucccacggggcccacggcguggccgucgcggccgaccucaagagcacccaggaggccaucaacaagaucaccaagaaccugaacucccugagcgagcucgaggugaagaaccugcagcgccuguccggggccauggacgagcuccacaacgagauccuggagcuggacgagaagguggacgaccuccgggccgacaccaucagcucccagaucgagcuggcgguccugcucagcaacgagggcaucaucaacuccgaggacgagcaccuccuggcccuggagcgcaagcugaagaagaugcugggccccagcgccguggagaucgggaacggcugcuucgagacgaagcacaagugcaaccagaccugccucgaccggaucgccgcggggaccuucaacgccggcgaguucucccugcccaccuucgacagccugaacaucaccgccgccucccucaacgacgacgggcuggacaaccacacgauccugcuguacuacagcaccgccgcguccagccucgccgugacccugaugcuggccaucuucaucgucuacauggugucccgcgacaacgugagcugcagcaucugccucuga

SEQ ID NO: 91024 - RNA, 1758 nt, Artificial Sequence
  derived and/or modified CDS sequence (opt1) from hemagglutinin__InfluenzaB__AGX15786
augaaggccaucaucgugcugcucauggucgugaccagcaacgccgaccgcaucugcaccggcaucacguccagcaacagcccccacguggucaagaccgcgacccagggggaggugaacgugaccggcgucaucccgcugacgaccacccccaccaagagccacuucgccaaccugaaggggacggagacccggggcaagcucugccccaagugccugaacugcaccgaccuggacguggcccucgggcgccccaagugcaccggcaagaucccguccgcccgggugagcauccugcacgagguccgccccgugacguccggcugcuuccccaucaugcacgaccggaccaagauccgccagcugcccaaccuccugcggggguacgagcacauccgccugagcacccacaacgugaucaacgccgagaacgcgccgggcgggcccuacaagaucggcaccuccgggagcugccccaacaucacgaacggcaacggcuucuucgccaccauggccugggccguccccaagaacgacaagaacaagaccgcgaccaacccgcucacgaucgaggugcccuacaucugcaccgagggggaggaccagaucaccguguggggcuuccacuccgacaacgagacccagauggccaagcuguacggggacagcaagccccagaaguucacguccagcgccaacggcgucaccacccacuacgugucccagaucggcggguuccccaaccagaccgaggacggcgggcugccgcagagcggccggaucguggucgacuacauggugcagaaguccgggaagacgggcaccaucaccuaccagcgcggcauccuccugccccagaagguguggugcgccagcgggcgguccaaggucaucaagggcagccugccccucaucggggaggccgacugccugcacgagaaguacggcgggcugaacaagagcaagcccuacuacaccggcgagcacgcgaaggccaucggcaacugcccgaucugggugaagacgccccucaagcuggccaacgggaccaaguaccgcccgcccgccaagcugcucaaggagcggggcuucuucggggccaucgcgggcuuccuggagggcgggugggagggcaugaucgccggguggcacggcuacaccucccacggggcccacggcguggccgucgccgcggaccugaaguccacccaggaggccaucaacaagaucacgaagaaccucaacucccugagcgagcuggaggugaagaaccuccagcgccuguccggcgccauggacgagcugcacaacgagauccucgagcuggacgagaaggucgacgaccugcgggccgacaccaucagcucccagaucgagcucgccgugcugcugagcaacgaggggaucaucaacuccgaggacgagcaccuccuggcgcuggagcgcaagcucaagaagaugcugggccccagcgccguggagaucgggaacggcugcuucgagaccaagcacaagugcaaccagaccugccuggaccggaucgccgccgggaccuucgacgcgggcgaguucuuccuccccacguucgacucccugaacaucaccgccgccagccugaacgacgacggccucgacaaccacaccauccugcuguacuacuccaccgccgccagcucccuggcggucacgcucaugaucgccaucuucgugguguacauggucagccgcgacaacguguccugcagcaucugccuguga

SEQ ID NO: 91025 - RNA, 1758 nt, Artificial Sequence; identical to SEQ ID NO: 91013
  derived and/or modified CDS sequence (opt1) from hemagglutinin__InfluenzaB__AGX15797

SEQ ID NO: 91026 - RNA, 1758 nt, Artificial Sequence
  derived and/or modified CDS sequence (opt1) from hemagglutinin__InfluenzaB__AGX15808
augaaggccaucaucgugcugcucauggucgugaccagcaacgccgaccgcaucugcaccggcaucacguccagcaacagcccccacguggucaagaccgcgacccagggggaggugaacgugaccggcgucaucccgcugacgaccacccccaccaagucccacuucgccaaccugaaggggacggagacccggggcaagcucugccccaagugccugaacugcaccgaccuggacguggcccucgggcgccccaagugcaccggcaagaucccguccgcccgggugagcauccugcacgagguccgccccgugacguccggcugcuuccccaucaugcacgaccggaccaagauccgccagcugcccaaccuccugcggggguacgagcacauccgccugagcacccacaacgugaucaacgccgagaacgcgccgggcgggcccuacaagaucggcaccuccgggagcugccccaacgucacgaacggcaacggcuucuucgccaccauggccugggccgugcccaagaacgacaagaacaagaccgcgaccaacccgcucacgaucgaggugcccuacaucugcaccgagggggaggaccagaucaccgucuggggcuuccacuccgacaacgagacccagauggccaagcuguacggggacagcaagccccagaaguucacguccagcgccaacggcgugaccacccacuacgugucccagaucggcggguuccccaaccagaccgaggacggcgggcugccgcagagcggccggaucgucguggacuacauggugcagaaguccgggaagacgggcaccaucaccuaccagcgcggcauccuccugccccagaaggucuggugcgccaucgggcggagcaaggugaucaagggcucccugccccucaucggggaggccgacugccugcacgagaaguacggcgggcugaacaagagcaagcccuacuacaccggcgagcacgcgaaggccaucggcaacugcccgaucugggugaagacgccccucaagcuggccaacgggaccaaguaccgcccgcccgccaagcugcucaaggagcggggcuucuucggggccaucgcgggcuuccuggagggcgggugggagggcaugaucgccggguggcacggcuacaccagccacggggcccacggcgucgccguggccgcggaccugaaguccacccaggaggccaucaacaagaucacgaagaaccucaacagccuguccgagcuggaggucaagaaccuccagcgccugagcggcgccauggacgagcugcacaacgagauccucgagcuggacgagaagguggacgaccugcgggccgacaccaucuccagccagaucgagcucgccgugcugcuguccaacgaggggaucaucaacagcgaggacgagcaccuccuggcgcuggagcgcaagcucaagaagaugcugggccccuccgccgucgagaucgggaacggcugcuucgagaccaagcacaagugcaaccagaccugccuggaccggaucgccgccgggaccuucgacgcgggcgaguucagccuccccacguucgacucccugaacaucaccgccgccagccugaacgacgacggccucgacaaccacaccauccugcuguacuacuccaccgccgccagcucccuggcggugacgcucaugaucgccaucuucguggucuacauggugagccgcgacaacguguccugcagcaucugccuguga

SEQ ID NO: 91027 - RNA, 1758 nt, Artificial Sequence; identical to SEQ ID NO: 90632
  derived and/or modified CDS sequence (opt1) from hemagglutinin__InfluenzaB__AGX15830

SEQ ID NO: 91028 - RNA, 1758 nt, Artificial Sequence; identical to SEQ ID NO: 90632
  derived and/or modified CDS sequence (opt1) from hemagglutinin__InfluenzaB__AGX15841

SEQ ID NO: 91029 - RNA, 1758 nt, Artificial Sequence; identical to SEQ ID NO: 90632
  derived and/or modified CDS sequence (opt1) from hemagglutinin__InfluenzaB__AGX15852

SEQ ID NO: 91030 - RNA, 1758 nt, Artificial Sequence; identical to SEQ ID NO: 90632
  derived and/or modified CDS sequence (opt1) from hemagglutinin__InfluenzaB__AGX15863

SEQ ID NO: 91031 - RNA, 1758 nt, Artificial Sequence
  derived and/or modified CDS sequence (opt1) from hemagglutinin__InfluenzaB__AGX15874
augaaggccaucaucgugcugcucauggucgugaccagcaacgccgaccgcaucugcaccggcaucacguccagcaacagcccccacguggucaagaccgcgacccagggggaggugaacgugaccggcgucaucccgcugacgaccacccccaccaagagccacuucgccaaccugaaggggacggagacccggggcaagcucugccccaagugccccaacugcaccgaccuggacguggcccuggggcgcccgaagugcaccggcaagauccccuccgcccgggugagcauccuccacgagguccgccccgugacguccggcugcuuccccaucaugcacgaccggaccaagauccgccagcugccgaaccugcuccggggguacgagcacauccgccugagcacccacaacgugaucaacgccgagaacgcgcccggcgggcccuacaagaucggcaccuccgggagcugccccaacgucacgaacggcaacggcuucuucgccaccauggccugggccgugccgaagaacgacaagaacaagaccgcgaccaacccccugacgaucgaggugcccuacaucugcaccgagggggaggaccagaucaccgucuggggcuuccacuccgacaacgagacccagauggccaagcucuacggggacagcaagccccagaaguucacguccagcgccaacggcgugaccacccacuacgugucccagaucggcggguucccgaaccagaccgaggacggcgggcugccccagagcggccggaucgucguggacuacauggugcagaaguccgggaagacgggcaccaucaccuaccagcgcggcauccugcucccccagaaggucuggugcgccagcgggcgguccaaggugaucaagggcagccugccccugaucggggaggccgacugccuccacgagaaguacggcgggcugaacaagagcaagccguacuacaccggcgagcacgcgaaggccaucggcaacugccccaucugggugaagacgccccugaagcucgccaacgggaccaaguaccggcccccggccaagcugcugaaggagcgcggcuucuucggggccaucgcgggcuuccucgagggcgggugggagggcaugaucgccggguggcacggcuacaccucccacggggcccacggcgucgccguggccgcggaccugaaguccacccaggaggccaucaacaagaucacgaagaaccugaacucccucagcgagcuggaggucaagaaccugcagcgccucuccggcgccauggacgagcugcacaacgagauccuggagcucgacgagaagguggacgaccugcgggccgacaccaucagcucccagaucgagcuggccgugcuccugagcaacgaggggaucaucaacuccgaggacgagcaccuccuggcgcuggagcgcaagcugaagaagaugcucggccccagcgccgucgagaucgggaacggcugcuucgagaccaagcacaagugcaaccagaccugccuggaccggaucgccgccgggaccuucgacgcgggcgaguucucccugcccacguucgacagccucaacaucaccgccgccucccugaacgacgacggccugaacaaccacaccauccuccuguacuacagcaccgccgccuccagccuggcggugacgcugaugaucgccaucuucguggucuacauggugucccgcgacaacgugagcugcuccaucugccucuga

SEQ ID NO: 91032 - RNA, 1758 nt, Artificial Sequence; identical to SEQ ID NO: 90632
  derived and/or modified CDS sequence (opt1) from hemagglutinin__InfluenzaB__AGX15885

SEQ ID NO: 91033 - RNA, 1758 nt, Artificial Sequence
  derived and/or modified CDS sequence (opt1) from hemagglutinin__InfluenzaB__AGX15896
augaaggccaucaucgugcugcucauggucgugaccagcaacgccgaccgcaucugcaccggcaucacguccagcaacagcccccacguggucaagaccgcgacccagggggaggugaacgugaccggcgucaucccgcugacgaccacccccaccaagagccacuucgccaaccugaaggggacggagacccggggcaagcucugccccaagugccccaacugcaccgaccuggacguggcccuggggcgcccgaagugcaccggcaagauccccuccgcccgggugagcauccuccacgagguccgccccgugacguccggcugcuuccccaucaugcacgaccggaccaagauccgccagcugccgaaccugcuccggggguacgagcacauccgccugagcacccacaacgugaucaacgccgagaacgcgcccggcgggcccuacaagaucggcaccuccgggagcugccccaacgucacgaacggcaacggcuucuucgccaccauggccugggccgugccgaagaacgacaagaacaagaccgcgaccaacccccugacgaucgaggugcccuacaucugcaccgagggggaggaccagaucaccgucuggggcuuccacuccgacaacgagacccagauggccaagcucuacggggacagcaagccccagaaguucacguccagcgccaacggcgugaccgcccacuacgugucccagaucggcggguucccgaaccagaccgaggacggcgggcugccccagagcggccggaucgucguggacuacauggugcagaaguccgggaagaccggcacgaucaccuaccagcgcggcauccugcucccccagaaggucuggugcgccagcgggcgguccaaggugaucaagggcagccugccccugaucggggaggcggacugccuccacgagaaguacggcgggcugaacaagagcaagccguacuacaccggcgagcacgccaaggccaucggcaacugccccaucugggugaagacgccccugaagcucgccaacgggaccaaguaccggcccccggccaagcugcugaaggagcgcggcuucuucggggcgaucgccggcuuccucgagggcgggugggagggcaugaucgccggguggcacggcuacaccucccacggggcccacggcgucgccguggcggccgaccugaaguccacccaggaggccaucaacaagaucaccaagaaccugaacucccucagcgagcuggaggucaagaaccugcagcgccucuccggcgccauggacgagcugcacggggagauccuggagcucgacgagaagguggacgaccugcgggccgacacgaucagcucccagaucgagcuggcggugcuccugagcaacgagggcaucaucaacuccgaggacgagcaccuccuggcccuggagcgcaagcugaagaagaugcucgggcccagcgccgucgagaucggcaacgggugcuucgagaccaagcacaagugcaaccagaccugccuggaccggaucgccgcgggcaccuucgacgccggcgaguucucccugcccaccuucgacagccucaacaucacggccgccucccugaacgacgacgggcuggacaaccacaccauccuccuguacuacagcaccgccgcguccagccuggccgugacccugaugaucgccaucuucguggucuacauggugucccgcgacaacgugagcugcuccaucugccucuga

SEQ ID NO: 91034 - RNA, 1758 nt, Artificial Sequence; identical to SEQ ID NO: 90632
  derived and/or modified CDS sequence (opt1) from hemagglutinin__InfluenzaB__AGX15907

SEQ ID NO: 91035 - RNA, 1758 nt, Artificial Sequence; identical to SEQ ID NO: 90632
  derived and/or modified CDS sequence (opt1) from hemagglutinin__InfluenzaB__AGX15918

SEQ ID NO: 91036 - RNA, 1758 nt, Artificial Sequence
  derived and/or modified CDS sequence (opt1) from hemagglutinin__InfluenzaB__AGX15929
augaaggccaucaucgugcugcucauggucgugaccagcaacgccgaccgcaucugcaccggcaucacguccagcaacagcccccacguggucaagaccgcgacccagggggaggugaacgugaccggcgucaucccgcugacgaccacccccaccaagagccacuucgccaaccugaaggggacggagacccggggcaagcucugccccaagugccugaacugcaccgaccuggacguggcccucgggcgccccaagugcaccggcaagaucccguccgcccgggugagcauccugcacgagguccgccccgugacguccggcugcuuccccaucaugcacgaccggaccaagauccgccagcugcccaaccuccugcggggguacgagcacauccgccugagcaccaacaacgugaucaacgccgagaacgcgccgggcgggcccuacaagaucggcaccuccgggagcugccccaacgucacgaacggcaacggcuucuucgccaccauggccugggccgugcccaagaacgacaagaacaagaccgcgaccaacccgcucacgaucgaggugcccuacaucugcaccgagggggaggaccagaucaccgucuggggcuuccacuccgacaacgagacccagauggccaagcuguacggggacagcaagccccagaaguucacguccagcgccaacggcgugaccacccacuacgugucccagaucggcggguuccccaaccagaccgaggacggcgggcugccgcagagcggccggaucgucguggacuacauggugcagaaguccgagaagacggggaccaucaccuaccagcgcggcauccuccugccccagaaggucuggugcgccagcggccgguccaaggugaucaaggggagccugccccucaucggcgaggccgacugccugcacgagaaguacgggggccugaacaagagcaagcccuacuacaccggggagcacgcgaaggccaucggcaacugcccgaucugggugaagacgccccucaagcuggccaacggcaccaaguaccgcccgcccgccaagcugcucaaggagcggggguucuucggcgccaucgcgggguuccuggagggcgggugggagggcaugaucgccggcuggcacggguacaccucccacggcgcccacggggucgccguggccgcggaccugaaguccacccaggaggccaucaacaagaucacgaagaaccucaacucccugagcgagcuggaggucaagaaccuccagcgccuguccggcgccauggacgagcugcacaacgagauccucgagcuggacgagaagguggacgaccugcgggccgacaccaucagcucccagaucgagcucgccgugcugcugagcaacgagggcaucaucaacuccgaggacgagcaccuccuggcgcuggagcgcaagcucaagaagaugcuggggcccagcgccgucgagaucggcaacgggugcuucgagaccaagcacaagugcaaccagaccugccuggaccggaucgccgccggcaccuucgacgcgggggaguucucccuccccacguucgacagccugaacaucaccgccgccucccugaacgacgacggccucgacaaccacaccauccugcuguacuacagcaccgccgccuccagccuggcggugacgcucaugaucgccaucuucguggucuacauggugucccgcgacaacgugagcugcuccaucugccuguga

SEQ ID NO: 91037 - RNA, 1758 nt, Artificial Sequence; identical to SEQ ID NO: 90632
  derived and/or modified CDS sequence (opt1) from hemagglutinin__InfluenzaB__AGX15940

SEQ ID NO: 91038 - RNA, 1758 nt, Artificial Sequence
  derived and/or modified CDS sequence (opt1) from hemagglutinin__InfluenzaB__AGX15962
augaaggccaucaucgugcugcucauggucgugaccagcaacgccgaccgcaucugcaccggcaucacguccagcaacagcccccacaucgugaagaccgcgacccagggggaggucaacgugaccggcgugaucccgcugacgaccacccccaccaagagccacuucgccaaccugaaggggacggagacccggggcaagcucugccccaagugccugaacugcaccgaccuggacgucgcccucgggcgccccaagugcaccggcaagaucccguccgcccgggugagcauccugcacgaggugcgccccgucacguccggcugcuuccccaucaugcacgaccggaccaagauccgccagcugcccaaccuccugcggggguacgagcacauccgccugagcacccacaacgugaucaacgccgagaacgcgccgggcgggcccuacaagaucggcaccuccgggagcugccccaacaucacgaacggcaacggcuucuucgccaccauggccugggccgugcccaagaacgacaagaacaagaccgcgaccaacccgcucacgaucgagguccccuacaucugcaccgagggggaggaccagaucaccguguggggcuuccacuccgacaacgagacccagauggccaagcuguacggggacagcaagccccagaaguucacguccagcgccaacggcgugaccacccacuacgucucccagaucggcggguuccccaaccagaccgaggacggcgggcugccgcagagcggccggaucgugguggacuacaugaugcagaaguccgggaagacgggcaccaucaccuaccagcgcggcauccuccugccccagaaggucuggugcgccagcgggcgguccaaggugaucaagggcagccugccccucaucggggaggccgacugccugcacgagaaguacggcgggcugaacaagagcaagcccuacuacaccggcgagcacgcgaaggccaucggcaacugcccgaucugggugaagacgccccucaagcuggccaacgggaccaaguaccgcccgcccgccaagcugcucaaggagcggggcuucuucggggccaucgcgggcuuccuggagggcgggugggagggcaugaucgccggguggcacggcuacaccucccacggggcccacggcgucgccguggccgcggaccugaaguccacccaggaggccaucaacaagaucacgaagaaccucaacucccugagcgagcuggaggugaagaaccuccagcgccuguccggcgccauggacgagcugcacaacgagauccucgagcuggacgagaaggucgacgaccugcgggccgacaccaucagcucccagaucgagcucgccgugcugcugagcaacgaggggaucaucaacuccgaggacgagcaccuccuggcgcuggagcgcaagcucaagaagaugcugggccccagcgccgucgagaucgggaacggcugcuucgagaccaagcacaagugcaaccagaccugccuggaccggaucgccgccgggaccuucgacgcgggcgaguucucccuccccacguucgacagccugaacaucaccgccgccucccugaacgacgacggccucgacaaccacaccauccugcuguacuacagcaccgccgccuccagccuggcggugacgcucaugaucgccaucuucguggucuacauggugucccgcgacaacgugagcugcuccaucugccuguga

SEQ ID NO: 91039 - RNA, 1758 nt, Artificial Sequence; identical to SEQ ID NO: 90669
  derived and/or modified CDS sequence (opt1) from hemagglutinin__InfluenzaB__AGX15973

SEQ ID NO: 91040 - RNA, 1758 nt, Artificial Sequence; identical to SEQ ID NO: 90669
  derived and/or modified CDS sequence (opt1) from hemagglutinin__InfluenzaB__AGX15984

SEQ ID NO: 91041 - RNA, 1758 nt, Artificial Sequence; identical to SEQ ID NO: 90707
  derived and/or modified CDS sequence (opt1) from hemagglutinin__InfluenzaB__AGX15995

SEQ ID NO: 91042 - RNA, 1758 nt, Artificial Sequence; identical to SEQ ID NO: 90707
  derived and/or modified CDS sequence (opt1) from hemagglutinin__InfluenzaB__AGX16006

SEQ ID NO: 91043 - RNA, 1758 nt, Artificial Sequence
  derived and/or modified CDS sequence (opt1) from hemagglutinin__InfluenzaB__AGX16017
augaaggccaucaucgugcugcucauggucgugaccagcaacgccgaccgcaucugcaccggcaucacguccagcaacagcccccacaucgugaagaccgcgacccagggggaggucaacgugaccggcgugaucccgcugacgaccacccccaccaagagccacuucgccaaccugaaggggacggagacccggggcaagcucugccccaagugccugaacugcaccgaccuggacgucgcccucgggcgccccaagugcaccggcaagaucccguccgcccgggugagcauccugcacgaggugcgccccgucacguccggcugcuuccccaucaugcacgaccggaccaagauccgccagcugcccaaccuccugcggggguacgagcacauccgccugagcacccacaacgugaucaacgccgagaacgcgccgggcgggcccuacaagaucggcaccuccgggagcugccccaacaucacgaacggcaacggcuucuucgccaccauggccugggccgugcccaagaacgacaagaacaagaccgcgaccaacccgcucacgaucgagguccccuacaucugcaccgagggggaggaccagaucaccguguggggcuuccacuccgacaacgagauccagauggccaagcuguacggggacagcaagccccagaaguucaccuccagcgccaacggcgugacgacccacuacgucucccagaucggcggguuccccaaccagaccgaggacggcgggcugccgcagagcggccggaucgugguggacuacaugguccagaaguccgggaagaccggcacgaucaccuaccagcgcggcauccuccugccccagaagguguggugcgccagcgggcgguccaaggugaucaagggcagccugccccucaucggggaggccgacugccugcacgagaaguacggcgggcugaacaagagcaagcccuacuacaccggcgagcacgcgaaggccaucggcaacugcccgaucugggucaagacgccccucaagcuggccaacgggaccaaguaccgcccgcccgccaagcugcucaaggagcggggcuucuucggggccaucgcgggcuuccuggagggcgggugggagggcaugaucgccggguggcacggcuacaccucccacggggcccacggcguggccguggccgcggaccugaaguccacccaggaggccaucaacaagaucaccaagaaccucaacucccugagcgagcuggaggucaagaaccuccagcgccuguccggcgccauggacgagcugcacaacgagauccucgagcuggacgagaagguggacgaccugcgggccgacacgaucagcucccagaucgagcucgccguccugcugagcaacgaggggaucaucaacuccgaggacgagcaccuccuggcgcuggagcgcaagcucaagaagaugcugggccccagcgccguggagaucgggaacggcugcuucgagaccaagcacaagugcaaccagaccugccuggaccggaucgccgccgggaccuucgacgcgggcgaguucucccuccccaccuucgacagccugaacaucacggccgccucccugaacgacgacggccucgacaaccacaccauccugcuguacuacagcaccgccgccuccagccuggcggugacccucaugaucgccaucuucgucguguacauggugucccgcgacaacgucagcugcuccaucugccuguga

SEQ ID NO: 91044 - RNA, 1755 nt, Artificial Sequence; identical to SEQ ID NO: 90450
  derived and/or modified CDS sequence (opt1) from hemagglutinin__InfluenzaB__AGX16028

SEQ ID NO: 91045 - RNA, 1755 nt, Artificial Sequence
  derived and/or modified CDS sequence (opt1) from hemagglutinin__InfluenzaB__AGX16039
augaaggccaucaucgugcugcucauggucgugaccagcaacgccgaccgcaucugcaccggcaucacguccagcaacagcccccacguggucaagaccgcgacccagggggaggugaacgugaccggcgucaucccgcugacgaccacccccaccaaguccuacuucgccaaccugaaggggacgcggacccgcggcaagcucugccccgacugccugaacugcaccgaccuggacguggcccucgggcggcccaugugcgugggcaccacgccguccgccaaggccagcauccugcacgagguccgccccgugaccuccggcugcuuccccaucaugcacgaccggaccaagauccgccagcugcccaaccuccugcggggguacgagaacauccgccugagcacccagaacgugaucgacgcggagaaggccccgggcgggcccuaccggcucggcacguccgggagcugccccaacgccaccuccaagagcggcuucuucgccaccauggcgugggccguccccaaggacaacaacaagaacgccaccaacccgcugacgguggaggugcccuacaucugcaccgagggcgaggaccagaucaccgucuggggguuccacuccgacaacaagacccagaugaagaaccuguacggcgacagcaacccccagaaguucacguccagcgccaacggggugaccacccacuacgugucccagaucggcggcuuccccgaccagaccgaggacgggggccucccgcagagcgggcgcaucgucguggacuacaugaugcagaagcccggcaagacggggaccaucguguaccagcggggcguccugcugccccagaagguguggugcgccuccggccgcagcaaggugaucaaggggagccucccccugaucggcgaggcggacugccugcacgagaaguacgggggccucaacaaguccaagccguacuacaccggggagcacgccaaggccaucggcaacugccccaucugggucaagacgccccugaagcuggccaacggcaccaaguaccggcccccggccaagcuccugaaggagcgcggguucuucggcgcgaucgccggguuccuggagggcgggugggagggcaugaucgccggcuggcacggguacaccagccacggcgcccacgggguggccgucgcggccgaccucaaguccacccaggaggccaucaacaagaucaccaagaaccugaacagccuguccgagcucgaggugaagaaccugcagcggcugagcggcgccguggacgagcuccacaacgagauccuggagcuggacgagaaggucgacgaccuccgcgccgacacgaucuccagccagaucgagcuggcggugcugcucuccaacgagggcaucaucaacagcgaggacgagcaccuccuggcccuggagcggaagcugaagaagaugcuggggcccuccgccguggacaucggcaacgggugcuucgagaccaagcacaagugcaaccagaccugccucgaccgcaucgccgcgggcaccuucaacgccggggaguucagccugcccaccuucgacucccugaacaucacggccgccagccucaacgacgacggccuggacaaccacaccauccugcuguacuacuccaccgccgcgagcucccucgccgucacccugaugcuggccaucuucaucguguacauggugagccgggacaacgucuccugcagcaucugccucuga

SEQ ID NO: 91046 - RNA, 1755 nt, Artificial Sequence
  derived and/or modified CDS sequence (opt1) from hemagglutinin__InfluenzaB__AGX16050
augaaggccaucaucgugcugcucauggucgugaccagcaacgccgaccgcaucugcaccggcaucacguccagcaacagcccccacguggucaagaccgcgacccagggggaggugaacgugaccggcgucaucccgcugacgaccacccccaccaaguccuacuucgccaaccugaaggggacgcggacccgcggcaagcucugccccgacugccugaacugcaccgaccuggacguggcccucgggcggcccaugugcgugggcaccacgccguccgccaaggccagcauccugcacgagguccgccccgugaccuccggcugcuuccccaucaugcacgaccggaccaagauccgccagcugcccaaccuccugcggggguacgagaacauccgccugagcacccagaacgugaucgacgcggagaacgccccgggcgggcccuaccggcucggcacguccgggagcugccccaacgccaccuccaagagcggcuucuucgccaccauggcgugggccguccccaaggacaacaacaagaacgccaccaacccgcugacgguggaggugcccuacaucugcaccgagggcgaggaccagaucaccgucuggggguuccacuccgacaacaagacccagaugaagaaccuguacggcgacagcaacccccagaaguucacguccagcgccaacggggugaccacccacuacgugucccagaucggcggcuuccccgcccagaccgaggacgggggccucccgcagagcgggcgcaucgucguggacuacauggugcagaagccccggaagacgggcaccaucgucuaccagcgcggggugcugcugccccagaagguguggugcgcguccggccggagcaaggucaucaagggcagccucccccugaucggggaggccgacugccugcacgagaaguacggcgggcucaacaaguccaagccguacuacaccggcgagcacgccaaggccaucgggaacugccccaucugggugaagacgccccugaagcuggccaacggcaccaaguaccggcccccggcgaagcuccugaaggagcgcggcuucuucggggccaucgccggcuuccuggagggcgggugggaggggaugaucgccggcuggcacggcuacaccagccacggggcccacggcgucgcgguggccgccgaccucaaguccacccaggaggccaucaacaagaucaccaagaaccugaacagccuguccgagcucgaggugaagaaccugcagcgccugagcggggccauggacgagcuccacaacgagauccuggagcuggacgagaaggucgacgaccuccgggcggacacgaucuccagccagaucgagcuggccgugcugcucuccaacgagggcaucaucaacagcgaggacgagcaccuccuggcccuggagcgcaagcugaagaagaugcugggccccuccgccguggacaucgggaacggcugcuucgagaccaagcacaagugcaaccagaccugccucgaccggaucgcggccgggaccuucaacgccggcgaguucagccugcccaccuucgacucccugaacaucacggccgccagccucaacgacgacgggcuggacaaccacaccauccugcuguacuacuccaccgcggccagcucccucgccgucacccugaugcuggccaucuucaucguguacauggugagccgcgacaacgucuccugcagcaucugccucuga

SEQ ID NO: 91047 - RNA, 1755 nt, Artificial Sequence
  derived and/or modified CDS sequence (opt1) from hemagglutinin__InfluenzaB__AGX16061
augaaggccaucaucgugcugcucauggucgugaccagcaacgccgaccgcaucugcaccggcaucacguccagcaacagcccccacguggucaagaccgcgacccagggggaggugaacgugaccggcgucaucccgcugacgaccacccccaccaaguccuacuucgccaaccugaaggggacgcggacccgcggcaagcucugccccgacugccugaacugcaccgaccuggacguggcccucgggcggcccaugugcgugggcaccacgccguccgccaaggccagcauccugcacgagguccgccccgugaccuccggcugcuuccccaucaugcacgaccggaccaagauccgccagcugcccaaccuccugcggggguacgagaacauccgccugagcacccagaacgugaucgacgcggagaaggccccgggcgggcccuaccggcucggcacguccgggagcugccccaacgccaccuccaagagcggcuucuucgccaccauggcgugggccguccccaaggacaacaacaagaacgccaccaacccgcugacgguggaggugcccuacaucugcaccgagggcgaggaccagaucaccgucuggggguuccacuccgacaacaagacccagaugaagaaccuguacggcgacagcaacccccagaaguucacguccagcgccaacggggugaccacccacuacgugucccagaucggcggcuuccccgaccagaccgaggacgggggccucccgcagagcgggcgcaucgucguggacuacaugaugcagaagcccggcaagacggggaccaucguguaccagcggggcguccugcugccccagaagguguggugcgccuccggccgcagcaaggugaucaaggggagccucccccugaucggcgaggcggacugccugcacgagaaguacgggggccucaacaaguccaagccguacuacaccggggagcacgccaaggccaucggcaacugccccaucugggucaagacgccccugaagcuggccaacggcaccaaguaccggcccccggccaagcuccugaaggagcgcggguucuucggcgcgaucgccggguuccuggagggcgggugggagggcaugaucgccggcuggcacggguacaccagccacggcgcccacgggguggccgucgcggccgaccucaaguccacccaggaggccaucaacaagaucaccaagaaccugaacagccuguccgagcucgaggugaagaaccugcagcggcugagcggcgccauggacgagcuccacaacgagauccuggagcuggacgagaagguggacgaccuccgcgccgacacgaucuccagccagaucgagcuggcgguccugcucuccaacgagggcaucaucaacagcgaggacgagcaccuccuggcccuggagcggaagcugaagaagaugcuggggcccuccgccguggacaucggcaacgggugcuucgagaccaagcacaagugcaaccagaccugccucgaccgcaucgccgcgggcaccuucaacgccggggaguucagccugcccaccuucgacucccugaacaucacggccgccagccucaacgacgacggccuggacaaccacaccauccugcuguacuacuccaccgccgcgagcucccucgccgugacccugaugcuggccaucuucaucgucuacauggugagccgggacaacguguccugcagcaucugccucuga

SEQ ID NO: 91048 - RNA, 1755 nt, Artificial Sequence
  derived and/or modified CDS sequence (opt1) from hemagglutinin__InfluenzaB__AGX16083
augaaggccaucaucgugcugcucauggucgugaccagcaacgccgaccgcaucugcaccggcaucacguccagcaacagcccccacguggucaagaccgcgacccagggggaggugaacgugaccggcgucaucccgcugacgaccacccccaccaaguccuacuucgccaaccugaaggggacgcggacccgcggcaagcucugccccgacugccugaacugcaccgaccuggacguggcccucgggcggcccaugugcgugggcaccacgccguccgccaaggccagcauccugcacgagguccgccccgugaccuccggcugcuuccccaucaugcacgaccggaccaagauccgccagcugcccaaccuccugcggggguacgagaacauccgccugagcacccagaacgugaucgacgcggagaaggccccgggcgggcccuaccggcucggcacguccgggagcugccccaacgccaccuccaagagcggcuucuucgccaccauggcgugggccguccccaaggacaacaacaagaacgccaccaacccgcugacgguggaggugcccuacaucugcaccgagggcgaggaccagaucaccgucuggggguuccacuccgacaacaagacccagaugaagaaccuguacggcgacagcaacccccagaaguucacguccagcgccaacggggugaccacccacuacgugucccagaucggcggcuuccccgaccagaccgaggacgggggccucccgcagagcgggcgcaucgucguggacuacaugaugcagaagcccggcaagacggggaccaucguguaccagcggggcguccugcugccccagaagguguggugcgccuccggccgcagcaaggugaucaaggggagccucccccugaucggcgaggcggacugccugcacgagaaguacgggggccucaacaaguccaagccguacuacaccggggagcacgccaaggccaucggcaacugccccaucugggucaagacgccccugaagcuggccaacggcaccaaguaccggcccccggccaagcuccugaaggagcgcggguucuucggcgcgaucgccggguuccuggagggcgggugggagggcaugaucgccggcuggcacggguacaccagccacggcgcccacgggguggccgucgcggccgaccucaaguccacccaggaggccaucaacaagaucaccaagaaccugaacagccuguccgagcucgaggugaagaaccugcagcggcugagcggcgccauggacgagcuccacaacgagauccuggagcuggacgagaagguggacgaccuccgcgccgacacgaucuccagccagaucgagcuggcgguccugcucuccaacgagggcaucaucaacagcgaggacgagcaccuccuggcccuggagcggaagcugaagaagaugcuggggcccuccgccguggagaucggcaacgggugcuucgagaccaagcacaagugcaaccagaccugccucgaccgcaucgccgcgggcaccuucaacgccggggaguucagccugcccaccuucgacucccugaacaucacggccgccagccucaacgacgacggccuggacaaccacaccauccugcuguacuacuccaccgccgcgagcucccucgccgugacccugaugcuggccaucuucaucgucuacauggugagccgggacaacguguccugcagcaucugccucuga

SEQ ID NO: 91049 - RNA, 1755 nt, Artificial Sequence
  derived and/or modified CDS sequence (opt1) from hemagglutinin__InfluenzaB__AGX16105
augaaggccaucaucgugcugcucauggucgugaccagcaacgccgaccgcaucugcaccggcaucacguccagcuccagcccccacguggucaagaccgcgacccagggggaggugaacgugaccggcgucaucccgcugacgaccacccccaccaaguccuacuucgccaaccugaaggggacgcggacccgcggcaagcucugccccgacugccugaacugcaccgaccuggacguggcccucgggcggcccaugugcgugggcaccacgccgagcgccaaggccuccauccugcacgagguccgccccgugaccagcggcugcuuccccaucaugcacgaccggaccaagauccgccagcugcccaaccuccugcggggguacgagaacauccgccuguccacccagaacgugaucgacgcggagaaggccccgggcgggcccuaccggcucggcacgagcggguccugccccaacgccaccagcaaguccggcuucuucgccaccauggcgugggccguccccaaggacaacaacaagaacgccaccaacccgcugacgguggaggugcccuacaucugcaccgagggcgaggaccagaucaccgucuggggguuccacagcgacaacaagacccagaugaagaaccuguacggcgacuccaacccccagaaguucacgagcuccgccaacggggugaccacccacuacgugagccagaucggcggcuuccccgaccagaccgaggacgggggccucccgcaguccgggcgcaucgucguggacuacaugaugcagaagcccggcaagacggggaccaucguguaccagcggggcguccugcugccccagaagguguggugcgccagcggccgcagcaaggugaucaaggggucccucccccugaucggcgaggcggacugccugcacgagaaguacgggggccucaacaagagcaagccguacuacaccggggagcacgccaaggccaucggcaacugccccaucugggucaagacgccccugaagcuggccaacggcaccaaguaccggcccccggccaagcuccugaaggagcgcggguucuucggcgcgaucgccggguuccuggagggcgggugggagggcaugaucgccggcuggcacggguacaccucccacggcgcccacgggguggccgucgcggccgaccucaagagcacccaggaggccaucaacaagaucaccaagaaccugaacucccugagcgagcucgaggugaagaaccugcagcggcuguccggcgccauggacgagcuccacagcgagauccuggagcuggacgagaagguggacgaccuccgcgccgacacgaucuccagccagaucgagcuggcgguccugcucuccaacgagggcaucaucaacagcgaggacgagcaccuccuggcccuggagcggaagcugaagaagaugcuggggcccuccgccguggacaucggcaacgggugcuucgagaccaagcacaagugcaaccagaccugccucgaccgcaucgccgcgggcaccuucaacgccggggaguucagccugcccaccuucgacucccugaacaucacggccgccagccucaacgacgacggccuggacaaccacaccauccugcuguacuacuccaccgccgcgagcucccucgccgugacccugaugcuggccaucuucaucgucuacauggugagccgggacaacgugagcugcuccaucugccucuga

SEQ ID NO: 91050 - RNA, 1755 nt, Artificial Sequence
  derived and/or modified CDS sequence (opt1) from hemagglutinin__InfluenzaB__AGX16116
augaaggccaucaucgugcugcucauggucgugaccagcaacgccgaccgcaucugcaccggcaucacguccagcaacagcccccacguggucaagaccgcgacccagggggaggugaacgugaccggcgucaucccgcugacgaccacccccaccaaguccuacuucgccaaccugaaggggacgcggacccgcggcaagcucugccccgacugccugaacugcaccgaccuggacguggcccucgggcggcccaugugcgugggcaccacgccguccgccaaggccagcauccugcacgagguccgccccgugaccuccggcugcuuccccaucaugcacgaccggaccaagauccgccagcugcccaaccuccugcggggguacgagaacauccgccugagcacccagaacgugaucgacgcggagaacgccccgggcgggcccuaccggcucggcacguccgggagcugccccaacgccaccuccaagagcggcuucuucgccaccauggcgugggccguccccaaggacaacaacaagaacgccaccaacccgcugacgguggaggugcccuacgucugcaccgagggcgaggaccagaucaccguguggggguuccacuccgacaacaagacccagaugaagaaccuguacggcgacagcaacccccagaaguucacguccagcgccaacggggugaccacccacuacgucucccagaucggcggcuuccccgcccagaccgaggacgggggccucccgcagagcgggcgcaucgugguggacuacaugguccagaagccccggaagacgggcaccaucguguaccagcgcggggugcugcugccccagaaggucuggugcgcguccggccggagcaaggugaucaagggcagccucccccugaucggggaggccgacugccugcacgagaaguacggcgggcucaacaaguccaagccguacuacaccggcgagcacgccaaggccaucgggaacugccccaucugggucaagacgccccugaagcuggccaacggcaccaaguaccggcccccggcgaagcuccugaaggagcgcggcuucuucggggccaucgccggcuuccuggagggcgggugggaggggaugaucgccggcuggcacggcuacaccagccacggggcccacggcguggcgguggccgccgaccucaaguccacccaggaggccaucaacaagaucaccaagaaccugaacagccuguccgagcucgagaucaagaaccugcagcgccugagcggggccauggacgagcuccacaacgagauccuggagcuggacgagaaggucgacgaccuccgggcggacacgaucuccagccagaucgagcuggccgugcugcucuccaacgagggcaucaucaacagcgaggacgagcaccuccuggcccuggagcgcaagcugaagaagaugcugggccccuccgccguggacaucgggaacggcugcuucgagaccaagcacaagugcaaccagaccugccucgaccggaucgcggccgggaccuucaacgccggcgaguucagccugcccaccuucgacucccugaacaucacggccgccagccucaacgacgacgggcuggacaaccacaccauccugcuguacuacuccaccgcggccagcucccucgccgucacccugaugcuggccaucuucaucguguacauggugagccgcgacaacgucuccugcagcaucugccucuga

SEQ ID NO: 91051 - RNA, 1755 nt, Artificial Sequence
  derived and/or modified CDS sequence (opt1) from hemagglutinin__InfluenzaB__AGX16127
augaaggccaucaucgugcugcucauggucgugaccagcaacgccgaccgcaucugcaccggcaucacguccagcaacagcccccacguggucaagaccgcgacccagggggaggugaacgugaccggcgucaucccgcugacgaccacccccaccaaguccuacuucgccaaccugaaggggacgcggacccgcggcaagcucugccccgacugccugaacugcaccgaccuggacguggcccucgggcggcccaugugcgugggcaccacgccguccgccaaggccagcauccugcacgagguccgccccgugaccuccggcugcuuccccaucaugcacgaccggaccaagauccgccagcugcccaaccuccugcggggguacgagaacauccgccugagcacccagaacgugaucgacgcggagaacgccccgggcgggcccuaccggcucggcacguccgggagcugccccaacgccaccuccaagagcggcuucuucgccaccauggcgugggccguccccaaggacaacaacaagaacgccaccaacccgcugacgguggaggugcccuacgucugcaccgagggcgaggaccagaucaccguguggggguuccacuccgacaacaagauccagaugaagaaccuguacggcgacagcaacccccagaaguucaccuccagcgccaacggggugacgacccacuacgucucccagaucggcggcuuccccgcccagaccgaggacgggggccucccgcagagcgggcgcaucgugguggacuacaugguccagaagccccggaagaccggcacgaucguguaccagcgcggggugcugcugccccagaaggucuggugcgcguccggccggagcaaggugaucaagggcagccucccccugaucggggaggccgacugccugcacgagaaguacggcgggcucaacaaguccaagccguacuacaccggcgagcacgccaaggccaucgggaacugccccaucugggucaagacgccccugaagcuggccaacggcaccaaguaccggcccccggcgaagcuccugaaggagcgcggcuucuucggggccaucgccggcuuccuggagggcgggugggaggggaugaucgccggcuggcacggcuacaccagccacggggcccacggcguggcgguggccgccgaccucaaguccacccaggaggccaucaacaagaucaccaagaaccugaacagccuguccgagcucgagaucaagaaccugcagcgccugagcggggccauggacgagcuccacaacgagauccuggagcuggacgagaaggucgacgaccuccgggcggacaccaucuccagccagaucgagcuggccgugcugcucuccaacgagggcaucaucaacagcgaggacgagcaccuccuggcccuggagcgcaagcugaagaagaugcugggccccuccgccguggacaucgggaacggcugcuucgagacgaagcacaagugcaaccagaccugccucgaccggaucgcggccgggaccuucaacgccggcgaguucagccugcccaccuucgacucccugaacaucaccgccgccagccucaacgacgacgggcuggacaaccacacgauccugcuguacuacuccaccgcggccagcucccucgccgucacccugaugcuggccaucuucaucguguacauggugagccgcgacaacgucuccugcagcaucugccucuga

SEQ ID NO: 91052 - RNA, 1755 nt, Artificial Sequence; identical to SEQ ID NO: 91050
  derived and/or modified CDS sequence (opt1) from hemagglutinin__InfluenzaB__AGX16138

SEQ ID NO: 91053 - RNA, 1755 nt, Artificial Sequence; identical to SEQ ID NO: 91047
  derived and/or modified CDS sequence (opt1) from hemagglutinin__InfluenzaB__AGX16149

SEQ ID NO: 91054 - RNA, 1755 nt, Artificial Sequence; identical to SEQ ID NO: 91048
  derived and/or modified CDS sequence (opt1) from hemagglutinin__InfluenzaB__AGX16160

SEQ ID NO: 91055 - RNA, 1755 nt, Artificial Sequence; identical to SEQ ID NO: 91048
  derived and/or modified CDS sequence (opt1) from hemagglutinin__InfluenzaB__AGX16182

SEQ ID NO: 91056 - RNA, 1755 nt, Artificial Sequence; identical to SEQ ID NO: 90450
  derived and/or modified CDS sequence (opt1) from hemagglutinin__InfluenzaB__AGX16193

SEQ ID NO: 91057 - RNA, 1755 nt, Artificial Sequence; identical to SEQ ID NO: 90450
  derived and/or modified CDS sequence (opt1) from hemagglutinin__InfluenzaB__AGX16215

SEQ ID NO: 91058 - RNA, 1755 nt, Artificial Sequence; identical to SEQ ID NO: 90450
  derived and/or modified CDS sequence (opt1) from hemagglutinin__InfluenzaB__AGX16226

SEQ ID NO: 91059 - RNA, 1755 nt, Artificial Sequence
  derived and/or modified CDS sequence (opt1) from hemagglutinin__InfluenzaB__AGX16237
augaaggccaucaucgugcugcucauggucgugaccagcaacgccgaccgcaucugcaccggcaucacguccagcaacagcccccacguggucaagaccgcgacccagggggaggugaacgugaccggcgucaucccgcugacgaccacccccaccaaguccuacuucgccaaccugaaggggacgcggacccgcggcaagcucugccccgacugccugaacugcaccgaccuggacguggcccucgggcggcccaugugcgugggcaccacgccguccgccaaggccagcauccugcacgagguccgccccgugaccuccggcugcuuccccaucaugcacgaccggaccaagauccgccagcugcccaaccuccugcggggguacgagaacauccgccugagcacccagaacgugaucgacgcggagaaggccccgggcgggcccuaccggcucggcacguccgggagcugccccaacgccaccuccaagagcggcuucuucgccaccauggcgugggccguccccaaggacaacaacaagaacgccaccaacccgcugacgguggaggugcccuacaucugcaccgagggcgaggaccagaucaccgucuggggguuccacuccgacaacaagacccagaugaagaaccuguacggcgacagcaacccccagaaguucacguccagcgccaacggggugaccacccacuacgugucccagaucggcggcuuccccgaccagaccgaggacgggggccucccgcagagcgggcgcaucgucguggacuacaugaugcagaagcccggcaagacggggaccaucguguaccagcggggcguccugcugccccagaagguguggugcgccuccggccgcagcaaggugaucaaggggagccucccccugaucggcgaggcggacugccugcacgagaaguacgggggccucaacaaguccaagccguacuacaccggggagcacgccaaggccaucggcaacugccccaucugggucaagacgccccugaagcuggccaacggcaccaaguaccggcccccggccaagcuccugaaggagcgcggguucuucggcgcgaucgccggguuccuggagggcgggugggagggcaugaucgccggcuggcacggguacaccagccacggcgcccacgggguggccgucgcggccgaccucaaguccacccaggaggccaucaacaagaucaccaagaaccugaacagccuguccgagcucgaggugaagaaccugcagcggcugagcggcgccauggacgagcuccacaacgagauccuggagcuggacgagaagguggacgaccuccgcgccgacacgaucuccagccagaucgagcuggcgguccugcucuccaacgagggcaucaucaacagcgaggacgagcaccuccuggcccuggagcggaagcugaagaagaugcuggggcccuccgccguggacaucggcaacgggugcuucgagaccaagcacaagugcaaccagaccugccucgaccgcaucgccgcgggcaccuucaacgccggggaguucagccugcccaccuucgacucccugaacaucacggccgccagccucaacgacgacggccuggacaaccacaccauccugcuguacuacuccaccgccgcgagcucccucgccaucacccugaugcuggccaucuucaucguguacauggucagccgggacaacguguccugcagcaucugccucuga

SEQ ID NO: 91060 - RNA, 1755 nt, Artificial Sequence; identical to SEQ ID NO: 90450
  derived and/or modified CDS sequence (opt1) from hemagglutinin__InfluenzaB__AGX16248

SEQ ID NO: 91061 - RNA, 1755 nt, Artificial Sequence; identical to SEQ ID NO: 90450
  derived and/or modified CDS sequence (opt1) from hemagglutinin__InfluenzaB__AGX16259

SEQ ID NO: 91062 - RNA, 1755 nt, Artificial Sequence
  derived and/or modified CDS sequence (opt1) from hemagglutinin__InfluenzaB__AGX16270
augaaggccaucaucgugcugcucauggucgugaccagcaacgccgaccgcaucugcaccggcaucacguccagcaacagcccccacguggucaagaccgcgacccagggggaggugaacgugaccggcgucaucccgcugacgaccacccccaccaaguccuacuucgccaaccugaaggggacgcggacccgcggcaagcucugccccgacugccugaacugcaccgaccuggacguggcccucgggcggcccaugugcgugggcaccacgccguccgccaaggccagcauccugcacgagguccgccccgugaccuccggcugcuuccccaucaugcacgaccggaccaagauccgccagcuggcgaaccuccugcggggguacgagaacauccgccugagcacccagaacgugaucgacgccgagaaggcccccggcgggccguaccggcucggcacguccgggagcugccccaacgccaccuccaagagcggcuucuucgcgaccauggccugggccguccccaaggacaacaacaagaacgccaccaacccccugacgguggaggugccguacaucugcaaggagggcgaggaccagaucaccgucuggggguuccacuccgacaacaagacccagaugaagaaccuguacggcgacagcaacccccagaaguucaccuccagcgccaacggggugacgacccacuacgugucccagaucggcggcuuccccgaccagaccgaggacgggggccucccccagagcgggcgcaucgucguggacuacaugauccagaagccgggcaagaccgggacgaucguguaccagcggggcguccugcugccccagaagguguggugcgcguccggccgcagcaaggugaucaaggggagccucccccugaucggcgaggccgacugccugcacgagaaguacgggggccucaacaaguccaagcccuacuacaccggggagcacgccaaggccaucggcaacugcccgaucugggucaagacgccccugaagcuggccaacggcaccaaguaccggccgcccgcgaagcuccugaaggagcgcggguucuucggcgccaucgccggguuccuggagggcgggugggagggcaugaucgccggcuggcacggguacaccagccacggcgcccacgggguggcggucgccgccgaccucaaguccacccaggaggccaucaacaagaucaccaagaaccugaacagccuguccgagcucgaggugaagaaccugcagcggcugagcggcgccauggacgagcuccacaacgagauccuggagcuggacgagaagguggacgaccuccgcgcggacaccaucuccagccagaucgagcuggccguccugcucuccaacgagggcaucaucaacagcgaggacgagcaccuccuggcccuggagcggaagcugaagaagaugcuggggcccuccgccguggacaucggcaacgggugcuucgagacgaagcacaagugcaaccagaccugccucgaccgcaucgcggccggcaccuucaacgccggggaguucagccugcccaccuucgacucccugaacaucaccgccgccagccucaacgacgacggccuggacaaccacacgauccugcuguacuacuccaccgcggccagcucccucgccgugacccugaugcuggccaucuucaucgucuacauggugagccgggacaacguguccugcagcaucugccucuga

SEQ ID NO: 91063 - RNA, 1755 nt, Artificial Sequence; identical to SEQ ID NO: 91062
  derived and/or modified CDS sequence (opt1) from hemagglutinin__InfluenzaB__AGX16281

SEQ ID NO: 91064 - RNA, 1755 nt, Artificial Sequence
  derived and/or modified CDS sequence (opt1) from hemagglutinin__InfluenzaB__AGX16292
augaaggccaucaucgugcugcucauggucgugaccagcaacgccgaccgcaucugcaccggcaucacguccagcaacagcccccacguggucaagaccgcgacccagggggaggugaacgugaccggcgucaucccgcugacgaccacccccaccaaguccuacuucgccaaccugaaggggacgcggacccgcggcaagcucugccccgacugccugaacugcaccgaccuggacguggcccucgggcggcccaugugcgugggcaccacgccguccgccaaggccagcauccugcacgagguccgccccgugaccuccggcugcuuccccaucaugcacgaccggaccaagauccgccagcuggcgaaccuccugcggggguacgagaacauccgccugagcaaccagaacgugaucgacgccgagaaggcccccggcgggccguaccggcucggcaccuccgggagcugccccaacgccacguccaagagcggcuucuucgcgaccauggccugggccguccccaaggacaacaacaagaacgccaccaacccccugaccguggaggugccguacaucugcacggagggcgaggaccagaucaccgucuggggguuccacuccgacaacaagacccagaugaagaaccuguacggcgacagcaacccccagaaguucaccuccagcgccaacggggugacgacccacuacgugucccagaucggcggcuuccccgaccagaccgaggacgggggccucccccagagcgggcgcaucgucguggacuacaugaugcagaagccgggcaagaccgggacgaucguguaccagcggggcguccugcugccccagaagguguggugcgcguccggccgcagcaaggugaucaagggggcccucccccugaucggcgaggccgacugccugcacgagaaguacgggggccucaacaagagcaagcccuacuacaccggggagcacgccaaggccaucggcaacugcccgaucugggucaagacgccccugaagcuggcgaacggcaccaaguaccggccgcccgccaagcuccugaaggagcgcggguucuucggcgccaucgccggguuccuggagggcgggugggagggcaugaucgccggcuggcacggguacaccucccacggcgcgcacgggguggccgucgccgccgaccucaagagcacccaggaggccaucaacaagaucaccaagaaccugaacucccugagcgagcucgaggugaagaaccugcagcggcuguccggcgcgauggacgagcuccacaacgagauccuggagcuggacgagaagguggacgaccuccgcgccgacaccaucagcucccagaucgagcuggccguccugcucagcaacgagggcaucaucaacuccgaggacgagcaccuccuggcccuggagcggaagcugaagaagaugcuggggcccagcgcgguggacaucggcaacgggugcuucgagacgaagcacaagugcaaccagaccugccucgaccgcaucgccgccggcaccuucaacgccggggaguucucccugcccaccuucgacagccugaacaucaccgccgcgucccucaacgacgacggccuggacaaccacacgauccugcuguacuacagcaccgccgccuccagccucgccgugacccugaugcuggccaucuucaucgucuacauggugucccgggacaacgugagcugcuccaucugccucuga

SEQ ID NO: 91065 - RNA, 1758 nt, Artificial Sequence; identical to SEQ ID NO: 90538
  derived and/or modified CDS sequence (opt1) from hemagglutinin__InfluenzaB__AGX16303

SEQ ID NO: 91066 - RNA, 1755 nt, Artificial Sequence; identical to SEQ ID NO: 90450
  derived and/or modified CDS sequence (opt1) from hemagglutinin__InfluenzaB__AGX16314

SEQ ID NO: 91067 - RNA, 1755 nt, Artificial Sequence; identical to SEQ ID NO: 90450
  derived and/or modified CDS sequence (opt1) from hemagglutinin__InfluenzaB__AGX16325

SEQ ID NO: 91068 - RNA, 1755 nt, Artificial Sequence; identical to SEQ ID NO: 90755
  derived and/or modified CDS sequence (opt1) from hemagglutinin__InfluenzaB__AGX16336

SEQ ID NO: 91069 - RNA, 1755 nt, Artificial Sequence; identical to SEQ ID NO: 90755
  derived and/or modified CDS sequence (opt1) from hemagglutinin__InfluenzaB__AGX16347

SEQ ID NO: 91070 - RNA, 1755 nt, Artificial Sequence; identical to SEQ ID NO: 90755
  derived and/or modified CDS sequence (opt1) from hemagglutinin__InfluenzaB__AGX16358

SEQ ID NO: 91071 - RNA, 1755 nt, Artificial Sequence
  derived and/or modified CDS sequence (opt1) from hemagglutinin__InfluenzaB__AGX16369
augaaggccaucaucgugcugcucauggucgugaccagcaacgccgaccgcaucugcaccggcaucacguccagcaacagcccccacguggucaagaccgcgacccagggggaggugaacgugaccggcgucaucccgcugacgaccacccccaccaaguccuacuucgccaaccugaaggggacgcggacccgcggcaagcucugccccgacugccugaacugcaccgaccuggacguggcccucgggcggcccaugugcgugggcaccacgccguccgccaaggccagcauccugcacgagguccgccccgugaccuccggcugcuuccccaucaugcacgaccggaccaagauccgccagcugcccaaccuccugcggggguacgagaacauccgccugagcacccagaacgugaucgacgcggagaaggccccgggcgggcccuaccggcucggcacguccgggagcugccccaacgccaccuccaagagcggcuucuucgccaccauggcgugggccguccccaaggacaacaacaagaacgccaccaacccgcugacgguggaggugcccuacaucugcaccgagggcgaggaccagaucaccgucuggggguuccacuccgacaacaagacccagaugaagaaccuguacggcgacagcaacccccagaaguucacguccagcgccaacggggugaccacccacuacgugucccagaucggcagcuuccccgaccagaccgaggacggcgggcucccgcaguccggccgcaucgucguggacuacaugaugcagaagcccgggaagacgggcaccaucguguaccagcgggggauccugcugccccagaaggucuggugcgccagcggccgcagcaaggugaucaagggcucccucccccugaucggggaggcggacugccugcacgagaaguacggcgggcucaacaagagcaagccguacuacaccggcgagcacgccaaggccaucgggaacugccccaucugggugaagacgccccugaagcuggccaacggcaccaaguaccggcccccggccaagcuccugaaggagcgcggcuucuucggggcgaucgccggcuuccuggagggcgggugggaggggaugaucgccggcuggcacggcuacaccucccacggggcccacggcgucgccguggcggccgaccucaagagcacccaggaggccaucaacaagaucaccaagaaccugaacucccugagcgagcucgaggucaagaaccugcagcggcuguccggggccauggacgagcuccacaacgagauccuggagcuggacgagaagguggacgaccuccgcgccgacacgaucagcucccagaucgagcuggcggugcugcucagcaacgagggcaucaucaacuccgaggacgagcaccuccuggcccuggagcggaagcugaagaagaugcugggccccagcgccgucgagaucgggaacggcugcuucgagaccaagcacaagugcaaccagaccugccucgaccgcaucgccgcggggaccuucaacgccggcgaguucucccugcccaccuucgacagccugaacaucacggccgccucccucaacgacgacgggcuggacaaccacaccauccugcuguacuacagcaccgccgcguccagccucgccgugacccugaugcuggccaucuucaucguguacauggucucccgggacaacgugagcugcagcaucugccucuga

SEQ ID NO: 91072 - RNA, 1755 nt, Artificial Sequence
  derived and/or modified CDS sequence (opt1) from hemagglutinin__InfluenzaB__AGX16380
augaaggccaucgugguccugcucaugguggugaccagcaacgccgaccgcaucugcaccggcaucacguccagcaacagcccccacgucgugaagaccgcgacccagggggaggugaacgucaccggcgugaucccgcugacgaccacccccaccaaguccuacuucgccaaccugaaggggacgcggacccgcggcaagcucugccccgacugccugaacugcaccgaccuggacguggcccucgggcggcccaugugcgucggcgccaccccguccgccaaggcgagcauccugcacgaggugcgccccgugacguccggcugcuuccccaugaugcacgaccggaccaagauccgccagcugcccaaccuccugcggggguacgagaacauccgccugagcacccagaacgucaucgacgccgagaaggccccgggcgggcccuaccggcucggcaccuccgggagcugccccaacgccacguccaagagcggcuucuucgcgaccauggccugggccgugcccaaggacaacaacaagaacgccaccaacccgcugaccguggagguccccuacaucugcacggagggcgaggaccagaucaccguguggggguuccacuccgacaacaagacccagaugaagaaccuguacggcgacagcaacccccagaaguucaccuccagcgccaacggggugacgacccacuacgucucccagaucggcagcuuccccgaccagaccgaggacggcgggcucccgcaguccggccgcaucgugguggacuacaugaugcagaagcccgggaagaccggcacgaucgucuaccagcgcggggugcugcugccccagaagguguggugcgcgagcggccggagcaaggucaucaagggcucccucccccugaucggggaggccgacugccugcacgagaaguacggcgggcucaacaagagcaagccguacuacaccggcgagcacgccaaggccaucgggaacugccccaucugggugaagacgccccugaagcuggccaacggcaccaaguaccggcccccggcgaagcuccugaaggagcgcggcuucuucggggccaucgccggcuuccuggagggcgggugggaggggaugaucgccggcuggcacggcuacaccucccacggggcccacggcgucgcgguggccgccgaccucaagagcacccaggaggccaucaacaagaucaccaagaaccugaacucccugagcgagcucgaggugaagaaccugcagcggcuguccggggccauggacgagcuccacaacgagauccuggagcuggacgagaaggucgacgaccuccgcgcggacaccaucagcucccagaucgagcuggccgugcugcucagcaacgagggcaucaucaacuccgaggacgagcaccuccuggcccuggagcggaagcugaagaagaugcugggccccagcgccguggagaucgggaacggcugcuucgagacgaagcacaagugcaaccagaccugccucgaccgcaucgcggccgggaccuucaacgccggcgaguucucccugcccaccuucgacagccugaacaucaccgccgccucccucaacgacgacgggcuggacaaccacacgauccugcuguacuacagcaccgcggccuccagccucgccgucacccugaugcuggccaucuucaucguguacauggugucccgggacaacgucagcugcagcaucugccucuga

SEQ ID NO: 91073 - RNA, 1755 nt, Artificial Sequence; identical to SEQ ID NO: 90591
  derived and/or modified CDS sequence (opt1) from hemagglutinin__InfluenzaB__AGX16391

SEQ ID NO: 91074 - RNA, 1755 nt, Artificial Sequence
  derived and/or modified CDS sequence (opt1) from hemagglutinin__InfluenzaB__AGX16402
augaaggccaucaucgugcugcucauggucgugaccagcaacgccgaccgcaucugcaccggcaucacguccagcaacagcccccacguggucaagaccgcgacccagggggaggugaacgugaccggcgucaucccgcugacgaccacccccaccaaguccuacuucgccaaccugaaggggacgcggacccgcggcaagcucugccccgacugccugaacugcaccgaccuggacguggcccucgggcggcccaugugcgugggcaccacgccguccgccaaggccagcauccugcacgagguccgccccgugaccuccggcugcuuccccaucaugcacgaccggaccaagauccgccagcugcccaaccuccugcggggguacgagaacauccgccugagcacccagaacgugaucgacgcggagaaggccccgggcgggcccuaccggcucggcacguccgggagcugccccaacgccaccuccaagaucggcuucuucgccaccauggcgugggccguccccaaggacaacuacaagaacgccaccaacccgcugacgguggaggugcccuacaucugcaccgagggcgaggaccagaucaccgucuggggguuccacagcgacaacaagccccagaugaagaaccuguacggcgacuccaacccccagaaguucaccagcuccgccaacggggugacgacccacuacgugagccagaucggcgacuucccggaccagaccgaggacggcgggcucccccaguccggccgcaucgucguggacuacaugaugcagaagcccgggaagaccggcacgaucguguaccagcgcgggguccugcugccccagaagguguggugcgccagcggccgguccaaggugaucaagggcagccucccgcugaucggggaggcggacugccugcacgagaaguacggcgggcucaacaagagcaagcccuacuacaccggcgagcacgccaaggccaucgggaacugccccaucugggucaagacgccccugaagcuggccaacggcaccaaguaccggccgcccgccaagcuccugaaggagcgcggcuucuucggggcgaucgccggcuuccuggagggcgggugggaggggaugaucgccggcuggcacggcuacaccucccacggggcccacggcguggccgucgcggccgaccucaagagcacccaggaggccaucaacaagaucaccaagaaccugaacucccugagcgagcucgaggugaagaaccugcagcggcuguccggggccauggacgagcuccacaacgagauccuggagcuggacgagaagguggacgaccuccgcgccgacaccaucagcucccagaucgagcuggcgguccugcucagcaacgagggcaucaucaacuccgaggacgagcaccuccuggcccuggagcggaagcugaagaagaugcugggccccagcgccguggacaucgggaacggcugcuucgagacgaagcacaagugcaaccagaccugccucgaccgcaucgccgcggggaccuucaacgccggcgaguucucccugcccaccuucgacagccugaacaucaccgccgccucccucaacgacgacgggcuggacaaccacacgauccugcuguacuacagcaccgccgcguccagccucgccgugacccugaugcuggccaucuucaucgucuacauggugucccgggacaacgugagcugcuccaucugccucuga

SEQ ID NO: 91075 - RNA, 1755 nt, Artificial Sequence; identical to SEQ ID NO: 90844
  derived and/or modified CDS sequence (opt1) from hemagglutinin__InfluenzaB__AGX16413

SEQ ID NO: 91076 - RNA, 1755 nt, Artificial Sequence; identical to SEQ ID NO: 90844
  derived and/or modified CDS sequence (opt1) from hemagglutinin__InfluenzaB__AGX16423

SEQ ID NO: 91077 - RNA, 1755 nt, Artificial Sequence; identical to SEQ ID NO: 90844
  derived and/or modified CDS sequence (opt1) from hemagglutinin__InfluenzaB__AGX16434

SEQ ID NO: 91078 - RNA, 1755 nt, Artificial Sequence; identical to SEQ ID NO: 90844
  derived and/or modified CDS sequence (opt1) from hemagglutinin__InfluenzaB__AGX16445

SEQ ID NO: 91079 - RNA, 1755 nt, Artificial Sequence; identical to SEQ ID NO: 90844
  derived and/or modified CDS sequence (opt1) from hemagglutinin__InfluenzaB__AGX16456

SEQ ID NO: 91080 - RNA, 1755 nt, Artificial Sequence
  derived and/or modified CDS sequence (opt1) from hemagglutinin__InfluenzaB__AGX16467
augaaggccaucaucgugcugcucauggucgugaccagcaacgccgaccgcaucugcaccggcaucacguccagcaacagcccccacguggucaagaccgcgacccagggggaggugaacgugaccggcgucaucccgcugacgaccacccccaccaaguccuacuucgccaaccugaaggggacgcggacccgcggcaagcucugccccgacugccugaacugcaccgaccuggacguggcccucgggcggcccaugugcgugggcaccacgccguccgccaaggccagcauccugcacgagguccgccccgugaccuccggcugcuuccccaucaugcacgaccggaccaagauccgccagcugcccaaccuccugcggggguacgagaacauccgccugagcacccagaacgugaucgacgcggagaaggccccgggcgggcccuaccggcucggcacguccgggagcugccccaacgccaccuccaagagcggcuucuucgccaccauggcgugggccguccccaaggacaacaacaagaacgccaccaacccgcugacgguggaggugcccuacaucugcaccgagggcgaggaccagaucaccgucuggggguuccacuccgacaacaagacccagaugaagaaccuguacggcgacagcaacccccagaaguucacguccagcgccaacggggugaccacccacuacgugucccagaucggcagcuuccccgaccagaccgaggacggcgggcucccgcaguccggccgcaucgucguggacuacaugaugcagaagcccgggaagacgggcaccaucguguaccagcgcgggguccugcugccccagcgcguguggugcgccagcggccggagcaaggugaucaagggcucccucccccugaucggggaggcggacugccugcacgagaaguacggcgggcucaacaagagcaagccguacuacaccggcgagcacgccaaggccaucgggaacugccccaucugggucaagacgccccugaagcuggccaacggcaccaaguaccggcccccggccaagcuccugaaggagcggggcuucuucggggcgaucgccggcuuccuggagggcgggugggaggggaugaucgccggcuggcacggcuacaccucccacggggcccacggcguggccgucgcggccgaccucaagagcacccaggaggccaucaacaagaucaccaagaaccugaacucccugagcgagcucgaggugaagaaccugcagcgccuguccggggccauggacgagcuccacaacgagauccuggagcuggacgagaagguggacgaccuccgggccgacacgaucagcucccagaucgagcuggcgguccugcucagcaacgagggcaucaucaacuccgaggacgagcaccuccuggcccuggagcgcaagcugaagaagaugcugggccccagcgccguggagaucgggaacggcugcuucgagaccaagcacaagugcaaccagaccugccucgaccggaucgccgcggggaccuucaacgccggcgaguucucccugcccaccuucgacagccugaacaucacggccgccucccucaacgacgacgggcuggacaaccacaccauccugcuguacuacagcaccgccgcguccagccucgccgugacccugaugcuggccaucuucaucgucuacauggugucccgcgacaacgugagcugcagcaucugccucuga

SEQ ID NO: 91081 - RNA, 1755 nt, Artificial Sequence; identical to SEQ ID NO: 90844
  derived and/or modified CDS sequence (opt1) from hemagglutinin__InfluenzaB__AGX16478

SEQ ID NO: 91082 - RNA, 1755 nt, Artificial Sequence; identical to SEQ ID NO: 90591
  derived and/or modified CDS sequence (opt1) from hemagglutinin__InfluenzaB__AGX16489

SEQ ID NO: 91083 - RNA, 1758 nt, Artificial Sequence; identical to SEQ ID NO: 91003
  derived and/or modified CDS sequence (opt1) from hemagglutinin__InfluenzaB__AGX16500

SEQ ID NO: 91084 - RNA, 1758 nt, Artificial Sequence; identical to SEQ ID NO: 91003
  derived and/or modified CDS sequence (opt1) from hemagglutinin__InfluenzaB__AGX16511

SEQ ID NO: 91085 - RNA, 1758 nt, Artificial Sequence; identical to SEQ ID NO: 91003
  derived and/or modified CDS sequence (opt1) from hemagglutinin__InfluenzaB__AGX16522

SEQ ID NO: 91086 - RNA, 1758 nt, Artificial Sequence
  derived and/or modified CDS sequence (opt1) from hemagglutinin__InfluenzaB__AGX16533
augaaggccaucaucgugcugcucauggucgugaccagcaacgccgaccgcaucugcaccggcaucacguccagcaacagcccccacguggucaagaccgcgacccagggggaggugaacgugaccggcgucaucccgcugacgaccacccccaccaagagccacuucgccaaccugaaggggacgaagacccggggcaagcucugccccaagugccugaacugcaccgaccuggacguggcccucgggcgccccaagugcaccggcaacaucccguccgccaaggugagcauccugcacgagguccggcccgugacguccggcugcuuccccaucaugcacgaccgcaccaagauccggcagcugcccaaccuccugcgcggguacgagcacauccggcugagcacccacaacgugaucaacgccgagaaggcgccgggcgggcccuacaagaucggcaccuccgggagcugccccaacgucacgaacggcaacggcuucuucgccaccauggccugggccgugcccaagaacgacaacaacaagaccgcgaccaacucccucacgaucgaggugccguacaucugcaccgagggggaggaccagaucaccgucuggggcuuccacagcgacaaggagacccagauggccaagcuguacggggacuccaagccccagaaguucacgagcuccgccaacggcgugaccacccacuacgugagccagaucggcggguuccccaaccagaccgaggacggcgggcugccccaguccggccgcaucgucguggacuacauggugcagaaguccgggaagacgggcaccaucaccuaccagcggggcauccuccugccgcagaaggucuggugcgccuccgggcgcagcaaggugaucaagggcagccugccccucaucggggaggccgacugccugcacgagaaguacggcgggcugaacaaguccaagcccuacuacaccggcgagcacgcgaaggccaucggcaacugccccaucugggugaagacgccgcucaagcuggccaacgggaccaaguaccggccgcccgccaagcugcucaaggagcgcggcuucuucggggccaucgcgggcuuccuggagggcgggugggagggcaugaucgccggguggcacggcuacaccagccacggggcccacggcgucgccguggccgcggaccugaaguccacccaggaggccaucaacaagaucacgaagaaccucaacagccuguccgagcuggaggucaagaaccuccagcggcugagcggcgccauggacgagcugcacaacgagauccucgagcuggacgagaagguggacgaccugcgcgccgacaccaucuccagccagaucgagcucgccgugcugcuguccaacgaggggaucaucaacagcgaggacgagcaccuccuggcgcuggagcggaagcucaagaagaugcugggccccuccgccgucgagaucgggaacggcugcuucgagaccaagcacaagugcaaccagaccugccuggaccgcaucgccgccgggaccuucgacgcgggcgaguucagccuccccacguucgacucccugaacaucaccgccgccagccugaacgacgacggccucgacaaccacaccauccugcuguacuacuccaccgccgccagcucccuggcggugacgcucaugaucgccaucuucguggucuacauggugagccgggacaacguguccugcagcaucugccuguga

SEQ ID NO: 91087 - RNA, 1758 nt, Artificial Sequence
  derived and/or modified CDS sequence (opt1) from hemagglutinin__InfluenzaB__AGX16555
augaaggccaucaucgugcugcucauggucgugaccagcaacgccgaccgcaucugcaccggcaucacguccagcaacagcccccacguggucaagaccgcgacccagggggaggugaacgugaccggcgucaucccgcugacgaccacccccaccaagagccacuucgccaaccugaaggggacgaagacccggggcaagcucugccccaagugccugaacugcaccgaccuggacguggcccucgggcgccccaagugcaccggcaacaucccguccgccaaggugagcauccugcacgagguccggcccgugacguccggcugcuuccccaucaugcacgaccgcaccaagauccggcagcugcccaaccuccugcgcggguacgagcacauccggcugagcacccacaacgugaucaacgccgagaaggcgccgggcgggcccuacaagaucggcaccuccgggagcugccccaacgucacgaacggcaacggcuucuucgccaccauggccugggccgugcccaagaacgacaacaacaagaccgcgaccaacucccucacgaucgaggugccguacaucugcaccgagggggaggaccagaucaccgucuggggcuuccacagcgacaacgaggcccagauggccaagcuguacggggacuccaagccccagaaguucaccagcuccgccaacggcgugacgacccacuacgugagccagaucggcggguuccccaaccagaccgaggacggcgggcugccccaguccggccgcaucgucguggacuacauggugcagaaguccgggaagaccggcacgaucaccuaccagcggggcauccuccugccgcagaaggucuggugcgccuccgggcgcagcaaggugaucaagggcagccugccccucaucggggaggcggacugccugcacgagaaguacggcgggcugaacaaguccaagcccuacuacaccggcgagcacgccaaggccaucggcaacugccccaucugggugaagaccccgcucaagcuggccaacgggacgaaguaccggccgcccgccaagcugcucaaggagcgcggcuucuucggggcgaucgccggcuuccuggagggcgggugggagggcaugaucgccggguggcacggcuacaccagccacggggcccacggcgucgccguggcggccgaccugaaguccacccaggaggccaucaacaagaucaccaagaaccucaacagccuguccgagcuggaggucaagaaccuccagcggcugagcggcgccauggacgagcugcacaacgagauccucgagcuggacgagaagguggacgaccugcgcgccgacacgaucuccagccagaucgagcucgcggugcugcuguccaacgaggggaucaucaacagcgaggacgagcaccuccuggcccuggagcggaagcucaagaagaugcugggccccuccgccgucgagaucgggaacggcugcuucgagaccaagcacaagugcaaccagaccugccuggaccgcaucgccgcggggaccuucgacgccggcgaguucagccuccccaccuucgacucccugaacaucacggccgccagccugaacgacgacggccucgacaaccacaccauccugcuguacuacuccaccgccgcgagcucccuggccgugacccucaugaucgccaucuucguggucuacauggugagccgggacaacguguccugcagcaucugccuguga

SEQ ID NO: 91088 - RNA, 1758 nt, Artificial Sequence
  derived and/or modified CDS sequence (opt1) from hemagglutinin__InfluenzaB__AGX16566
augaaggccaucaucgugcugcucauggucgugaccagcaacgccgaccgcaucugcaccggcaucacguccagcaacagcccccacguggucaagaccgcgacccagggggaggugaacgugaccggcgucaucccgcugacgaccacccccaccaagagccacuucgccaaccugaaggggacgaagacccggggcaagcucugccccaagugccugaacugcaccgaccuggacguggcccucgggcgccccaagugcaccggcaacaucccguccgccaaggugagcauccugcacgagguccggcccgugacguccggcugcuuccccaucaugcacgaccgcaccaagauccggcagcugcccaaccuccugcgcggguacgagcacauccggcugagcacccacaacgugaucaacgccgagaaggcgccgggcgggcccuacaagaucggcaccuccgggagcugccccaacgucacgaacggcaacggcuucuucgccaccauggccugggccgugcccaagaacgacaacaacaagaccgcgaccaacucccucacgaucgaggugccguacaucugcaccgagggggaggaccagaucaccgucuggggcuuccacagcgacaacgagauccagauggccaagcuguacggggacuccaagccccagaaguucaccagcuccgccaacggcgugacgacccacuacgugagccagaucggcggguuccccaaccagaccgaggacggcgggcugccccaguccggccgcaucgucguggacuacauggugcagaaguccgggaagaccggcacgaucaccuaccagcggggcauccuccugccgcagaaggucuggugcgccuccgggcgcagcaaggugaucaagggcagccugccccucaucggggaggccgacugccugcacgagaaguacggcgggcugaacaaguccaagcccuacuacaccggcgagcacgcgaaggccaucggcaacugccccaucugggugaagaccccgcucaagcuggccaacgggacgaaguaccggccgcccgccaagcugcucaaggagcgcggcuucuucggggccaucgcgggcuuccuggagggcgggugggagggcaugaucgccggguggcacggcuacaccagccacggggcccacggcgucgccguggccgcggaccugaaguccacccaggaggccaucaacaagaucaccaagaaccucaacagccuguccgagcuggaggucaagaaccuccagcggcugagcggcgccauggacgagcugcacaacgagauccucgagcuggacgagaagguggacgaccugcgcgccgacacgaucuccagccagaucgagcucgccgugcugcuguccaacgaggggaucaucaacagcgaggacgagcaccuccuggcgcuggagcggaagcucaagaagaugcugggccccuccgccgucgagaucgggaacggcugcuucgagaccaagcacaagugcaaccagaccugccuggaccgcaucgccgccgggaccuucgacgcgggcgaguucagccuccccaccuucgacucccugaacaucacggccgccagccugaacgacgacggccucgacaaccacaccauccugcuguacuacuccaccgccgccagcucccuggcggugacccucaugaucgccaucuucguggucuacauggugagccgggacaacguguccugcagcaucugccuguga

SEQ ID NO: 91089 - RNA, 1758 nt, Artificial Sequence; identical to SEQ ID NO: 91003
  derived and/or modified CDS sequence (opt1) from hemagglutinin__InfluenzaB__AGX16577

SEQ ID NO: 91090 - RNA, 1758 nt, Artificial Sequence
  derived and/or modified CDS sequence (opt1) from hemagglutinin__InfluenzaB__AGX16588
augaaggccaucaucgugcugcucauggucgugaccagcaacgccgaccgcaucugcaccggcaucacguccagcaacagcccccacguggucaagaccgcgacccagggggaggugaacgugaccggcgucaucccgcugacgaccacccccaccaagagccacuucgccaaccugaaggggacgaagacccggggcaagcucugccccaagugccugaacugcaccgaccuggacguggcccucgggcgccccaagugcaccggcaacaucccguccgccaaggugagcauccugcacgagguccggcccgugacguccggcugcuuccccaucaugcacgaccgcaccaagauccggcagcugcccaaccuccugcgcggguacgagcacauccggcugagcacccacaacgugaucaacgccgagaaggcgccgggcgggcccuacaagaucggcaccuccgggagcugccccaacgucacgaacggcaacggcuucuucgccaccauggccugggccgugcccaagaacgacaacaacaagaccgcgaccaacucccucacgaucgaggugccguacaucugcaccgagggggaggaccagaucaccgucuggggcuuccacagcgacaacgagauccagauggccaagcuguacggggacuccaagccccagaaguucaccagcuccgccaacggcgugacgacccacuacgugagccagaucggcggguuccccaaccagaccgaggacggcgggcugccccaguccggccgcaucgucguggacuacauggugcagaaguccgggaagaccggcacgaucaccuaccagcggggcauccuccugccgcagaaggucuggugcgccuccgggcgcagcaaggugaucaagggcagccugccccucaucggggaggccgacugccugcacgagaaguacggcgggcugaacaaguccaagcccuacuacaccggcgagcacgcgaaggccaucggcaacugccccaucugggugaagaccccgcucaagcuggccaacgggacgaaguaccggccgcccgccaagcugcucaaggagcgcggcuucuucggggccaucgcgggcuuccuggagggcgggugggagggcaugaucgccggguggcacggcuacaccagccacggggcccacggcgucgccguggccgcggaccugaaguccacccaggaggccaucaacaagaucaccaagaaccucaacagccuguccgagcuggaggucaagaaccuccagcggcugagcggcgccauggacgagcugcacaacgagauccucgagcuggacgagaagguggacgaccugcgcgccgacacgaucuccagccagaucgagcucgccgugcugcuguccaacgaggggaucaucaacagcgaggacgagcaccuccuggcgcuggagcggaagcucaagaagaugcugggccccuccgccaucgagaucgggaacggcugcuucgagaccaagcacaagugcaaccagaccugccuggaccgcaucgccgccgggaccuucgacgcgggcgaguucagccuccccaccuucgacucccugaacaucacggccgccagccugaacgacgacggccucgacaaccacaccauccugcuguacuacuccaccgccgccagcucccuggcggucacccucaugaucgccaucuucgugguguacauggucagccgggacaacguguccugcagcaucugccuguga

SEQ ID NO: 91091 - RNA, 1758 nt, Artificial Sequence; identical to SEQ ID NO: 91003
  derived and/or modified CDS sequence (opt1) from hemagglutinin__InfluenzaB__AGX16599

SEQ ID NO: 91092 - RNA, 1758 nt, Artificial Sequence; identical to SEQ ID NO: 91086
  derived and/or modified CDS sequence (opt1) from hemagglutinin__InfluenzaB__AGX16610

SEQ ID NO: 91093 - RNA, 1758 nt, Artificial Sequence; identical to SEQ ID NO: 91003
  derived and/or modified CDS sequence (opt1) from hemagglutinin__InfluenzaB__AGX16621

SEQ ID NO: 91094 - RNA, 1758 nt, Artificial Sequence
  derived and/or modified CDS sequence (opt1) from hemagglutinin__InfluenzaB__AGX16654
augaaggccaucaucgugcugcucauggucgugaccagcaacgccgaccgcaucugcaccggcaucacguccagcaacagcccccacguggucaagaccgcgacccagggggaggugaacgugaccggcgucaucccgcugacgaccacccccaccaagagccacuucgccaaccugaaggggacgaagacccggggcaagcucugccccaagugccugaacugcaccgaccuggacguggcccucgggcgccccaagugcaccggcaacaucccguccgccaaggugagcauccugcacgagguccggcccgugacguccggcugcuuccccaucaugcacgaccgcaccaagauccggcagcugcccaaccuccugcgcggguacgagcacauccggcugagcacccacaacgugaucaacgccgagaaggcgccgggcgggcccuacaagaucggcaccuccgggagcugccccaacgucacgaacggcaacggcuucuucgccaccauggccugggccgugcccaagaacgacaacaacaagaccgcgaucaacucccucaccaucgaggugccguacaucugcacggagggggaggaccagaucaccgucuggggcuuccacagcgacaacgagacccagauggccaagcuguacggggacuccaagccccagaaguucaccagcuccgccaacggcgugacgacccacuacgugagccagaucggcggguuccccaaccagaccgaggacggcgggcugccccaguccggccgcaucgucguggacuacauggugcagaaguccgggaagaccggcacgaucaccuaccagcggggcauccuccugccgcagaaggucuggugcgccuccgggcgcagcaaggugaucaagggcagccugccccucaucggggaggccgacugccugcacgagaaguacggcgggcugaacaaguccaagcccuacuacaccggcgagcacgcgaaggccaucggcaacugccccaucugggugaagaccccgcucaagcuggccaacgggacgaaguaccggccgcccgccaagcugcucaaggagcgcggcuucuucggggccaucgcgggcuuccuggagggcgggugggagggcaugaucgccggguggcacggcuacaccagccacggggcccacggcgucgccguggccgcggaccugaaguccacccaggaggccaucaacaagaucaccaagaaccucaacagccuguccgagcuggaggucaagaaccuccagcggcugagcggcgccauggacgagcugcacaacgagauccucgagcuggacgagaagguggacgaccugcgcgccgacacgaucuccagccagaucgagcucgccgugcugcuguccaacgaggggaucaucaacagcgaggacgagcaccuccuggcgcuggagcggaagcucaagaagaugcugggccccuccgccaucgagaucgggaacggcugcuucgagaccaagcacaagugcaaccagaccugccuggaccgcaucgccgccgggaccuucgacgcgggcgaguucagccuccccaccuucgacucccugaacaucacggccgccagccugaacgacgacggccucgacaaccacaccauccugcuguacuacuccaccgccgccagcucccuggcggucacccucaugaucgccaucuucgugguguacauggucagccgggacaacguguccugcagcaucugccuguga

SEQ ID NO: 91095 - RNA, 1758 nt, Artificial Sequence; identical to SEQ ID NO: 91003
  derived and/or modified CDS sequence (opt1) from hemagglutinin__InfluenzaB__AGX16665

SEQ ID NO: 91096 - RNA, 1758 nt, Artificial Sequence; identical to SEQ ID NO: 91003
  derived and/or modified CDS sequence (opt1) from hemagglutinin__InfluenzaB__AGX16676

SEQ ID NO: 91097 - RNA, 1758 nt, Artificial Sequence; identical to SEQ ID NO: 91003
  derived and/or modified CDS sequence (opt1) from hemagglutinin__InfluenzaB__AGX16687

SEQ ID NO: 91098 - RNA, 1758 nt, Artificial Sequence; identical to SEQ ID NO: 91003
  derived and/or modified CDS sequence (opt1) from hemagglutinin__InfluenzaB__AGX16698

SEQ ID NO: 91099 - RNA, 1758 nt, Artificial Sequence
  derived and/or modified CDS sequence (opt1) from hemagglutinin__InfluenzaB__AGX16709
augaaggccaucaucgugcugcucauggucgugaccagcaacgccgaccgcaucugcaccggcaucacguccagcaacagcccccacguggucaagaccgcgacccagggggaggugaacgugaccggcgucaucccgcugacgaccacccccaccaagagccacuucgccaaccugaaggggacgaagacccggggcaagcucugccccaagugccugaacugcaccgaccuggacguggcccucgggcgccccaagugcaccgagaacaucccguccgccaaggugagcauccugcacgagguccggcccgugacguccggcugcuuccccaucaugcacgaccgcaccaagauccggcagcugcccaaccuccugcgcggcuacgagcacauccggcugagcacccacaacgugaucaacgccgagaaggcgcccgggggccccuacaagaucgggaccuccggcagcugccccaacgucacgaacgggaacggcuucuucgccaccauggccugggccgugcccaagaacgacaacaacaagaccgcgaccaacucccucacgaucgaggugccguacaucugcaccgagggcgaggaccagaucaccgucuggggguuccacagcgacaacgagacccagauggccaagcuguacggcgacuccaagccccagaaguucacgagcuccgccaacggggugaccacccacuacgugagccagaucggcggcuuccccaaccagaccgaggacgggggccugccccaguccgggcgcaucgucguggacuacauggugcagaaguccggcaagacggggaccaucaccuaccagcggggcauccuccugccgcagaaggucuggugcgccuccggccgcagcaaggugaucaaggggagccugccccucaucggcgaggccgacugccugcacgagaaguacgggggccugaacaaguccaagcccuacuacaccggggagcacgcgaaggccaucggcaacugccccaucugggugaagacgccgcucaagcuggccaacggcaccaaguaccggccgcccgccaagcugcucaaggagcgcggguucuucggcgccaucgcgggguuccuggagggcgggugggagggcaugaucgccggcuggcacggguacaccagccacggcgcccacggggucgccguggccgcggaccugaaguccacccaggaggccaucaacaagaucacgaagaaccucaacagccuguccgagcuggaggucaagaaccuccagcggcugagcggcgccauggacgagcugcacaacgagauccucgagcuggacgagaagguggacgaccugcgcgccgacaccaucuccagccagaucgagcucgccgugcugcuguccaacgagggcaucaucaacagcgaggacgagcaccuccuggcgcuggagcggaagcucaagaagaugcuggggcccuccgccgucgagaucggcaacgggugcuucgagaccaagcacaagugcaaccagaccugccuggaccgcaucgccgccggcaccuucgacgcgggggaguucagccucccgacguucgacucccugaacaucaccgccgccagccugaacgacgacggccucgacaaccacaccauccugcuguacuacuccaccgccgccagcucccuggcggugacgcucaugaucgccaucuucguggucuacauggugagccgggacaacguguccugcagcaucugccuguga

SEQ ID NO: 91100 - RNA, 1758 nt, Artificial Sequence; identical to SEQ ID NO: 91003
  derived and/or modified CDS sequence (opt1) from hemagglutinin__InfluenzaB__AGX16720

SEQ ID NO: 91101 - RNA, 1758 nt, Artificial Sequence; identical to SEQ ID NO: 91003
  derived and/or modified CDS sequence (opt1) from hemagglutinin__InfluenzaB__AGX16731

SEQ ID NO: 91102 - RNA, 1758 nt, Artificial Sequence
  derived and/or modified CDS sequence (opt1) from hemagglutinin__InfluenzaB__AGX16742
augaaggccaucaucgugcugcucauggucgugaccagcaacgccgaccgcaucugcaccggcaucacguccagcaacagcccccacguggucaagaccgcgacccagggggaggugaacgugaccggcgucaucccgcugacgaccacccccaccaagagccacuucgccaaccugaaggggacgaagacccggggcaagcucugccccaagugccugaacugcaccgaccuggacguggcccucgggcgccccaagugcaccggcaacaucccguccgccaaggugagcaucauccacgagguccggcccgugacguccggcugcuuccccaucaugcacgaccgcaccaagauccggcagcugcccaaccugcuccgcggguacgagcacauccggcugagcacccacaacgugaucaacgccgagaaggcgccgggcgggcccuacaagaucggcaccuccgggagcugccccaacgucacgaacggcaacggcuucuucgccaccauggccugggccgugcccaagaacgacaacaacaagaccgcgaccaacucccugacgaucgaggugccguacaucugcaccgagggggaggaccagaucaccgucuggggcuuccacagcgacaacgagacccagauggccaagcucuacggggacuccaagccccagaaguucacgagcuccgccaacggcgugaccacccacuacgugagccagaucggcggguuccccaaccagaccgaggacggcgggcugccccaguccggccgcaucgucguggacuacauggugcagaaguccgggaagacgggcaccaucaccuaccagcggggcauccugcucccgcagaaggucuggugcgccuccgggcgcagcaaggugaucaagggcagccugccccugaucggggaggccgacugccuccacgagaaguacggcgggcugaacaaguccaagcccuacuacaccggcgagcacgcgaaggccaucggcaacugccccaucugggugaagacgccgcugaagcucgccaacgggaccaaguaccggccgcccgccaagcugcugaaggagcgcggcuucuucggggccaucgcgggcuuccucgagggcgggugggagggcaugaucgccggguggcacggcuacaccagccacggggcccacggcgucgccguggccgcggaccugaaguccacccaggaggccaucaacaagaucacgaagaaccugaacagccucuccgagcuggaggucaagaaccugcagcggcucagcggcgccauggacgagcugcacaacgagauccuggagcucgacgagaagguggacgaccugcgcgccgacaccaucuccagccagaucgagcuggccgugcuccuguccaacgaggggaucaucaacagcgaggacgagcaccuccuggcgcuggagcggaagcugaagaagaugcucggccccuccgccgucgagaucgggaacggcugcuucgagaccaagcacaagugcaaccagaccugccuggaccgcaucgccgccgggaccuucgacgcgggcgaguucagccugcccacguucgacucccucaacaucaccgccgccagccugaacgacgacggccuggacaaccacaccauccuccuguacuacuccaccgccgccagcucccuggcggugacgcugaugaucgccaucuucguggucuacauggugagccgggacaacguguccugcagcaucugccucuga

SEQ ID NO: 91103 - RNA, 1758 nt, Artificial Sequence; identical to SEQ ID NO: 91003
  derived and/or modified CDS sequence (opt1) from hemagglutinin__InfluenzaB__AGX16753

SEQ ID NO: 91104 - RNA, 1758 nt, Artificial Sequence; identical to SEQ ID NO: 91003
  derived and/or modified CDS sequence (opt1) from hemagglutinin__InfluenzaB__AGX16764

SEQ ID NO: 91105 - RNA, 1758 nt, Artificial Sequence; identical to SEQ ID NO: 91003
  derived and/or modified CDS sequence (opt1) from hemagglutinin__InfluenzaB__AGX16775

SEQ ID NO: 91106 - RNA, 1758 nt, Artificial Sequence
  derived and/or modified CDS sequence (opt1) from hemagglutinin__InfluenzaB__AGX16797
augaaggccaucaucgugcugcucauggucgugaccagcaacgccgaccgcaucugcaccggcaucacguccagcaacagcccccacguggucaagaccgcgacccagggggaggugaacgugaccggcgucaucccgcugacgaccacccccaccaagagccacuucgccaaccugaaggggacgaagacccggggcaagcucugccccaagugccugaacugcaccgaccuggacguggcccucgggcgccccaagugcaccggcaacaugccguccgccaaggugagcauccugcacgagguccggcccgugacguccggcugcuuccccaucaugcacgaccgcaccaagauccggcagcugcccaaccuccugcgcggguacgagcacauccggcugagcacccacaacgugaucaacgccgagaaggcgccgggcgggcccuacaagaucggcaccuccgggagcugccccaacgucacgaacggcaacggcuucuucgccaccauggccugggccgugcccaagaacgacaacaacaagaccgcgaccaacucccucacgaucgaggugccguacaucugcaccgagggggaggaccagaucaccgucuggggcuuccacagcgacaacgagacccagauggccaagcuguacggggacuccaagccccagaaguucacgagcuccgccaacggcgugaccacccacuacgugagccagaucggcggguuccccaaccagaccgaggacggcgggcugccccaguccggccgcaucgucguggacuacauggugcagaaguccgggaagacgggcaccaucaccuaccagcggggcauccuccugccgcagaaggucuggugcgccuccgggcgcagcaaggugaucaagggcagccugccccucaucggggaggccgacugccugcacgagaaguacggcgggcugaacaaguccaagcccuacuacaccggcgagcacgcgaaggccaucggcaacugccccaucugggugaagacgccgcucaagcuggccaacgggaccaaguaccggccgcccgccaagcugcucaaggagcgcggcuucuucggggccaucgcgggcuuccuggagggcgggugggagggcaugaucgccggguggcacggcuacaccagccacggggcccacggcgucgccguggccgcggaccugaaguccacccaggaggccaucaacaagaucacgaagaaccucaacagccuguccgagcuggaggucaagaaccuccagcggcugagcggcgccauggacgagcugcacaacgagauccucgagcuggacgagaagguggacgaccugcgcgccgacaccaucuccagccagaucgagcucgccgugcugcuguccaacgaggggaucaucaacagcgaggacgagcaccuccuggcgcuggagcggaagcucaagaagaugcugggccccuccgccgucgagaucgggaacggcugcuucgagaccaagcacaagugcaaccagaccugccuggaccgcaucgccgccgggaccuucgacgcgggcgaguucagccuccccacguucgacucccugaacaucaccgccgccagccugaacgacgacggccucgacaaccacaccauccugcuguacuacuccaccgccgccagcucccuggcggugacgcucaugaucgccaucuucguggucuacauggugagccgggacaacguguccugcagcaucugccuguga

SEQ ID NO: 91107 - RNA, 1758 nt, Artificial Sequence; identical to SEQ ID NO: 91003
  derived and/or modified CDS sequence (opt1) from hemagglutinin__InfluenzaB__AGX16808

SEQ ID NO: 91108 - RNA, 1758 nt, Artificial Sequence
  derived and/or modified CDS sequence (opt1) from hemagglutinin__InfluenzaB__AGX16819
augaaggccaucaucgugcugcucauggucgugaccagcaacgccgaccgcaucugcaccggcaucacguccagcaacagcccccacguggucaagaccgcgacccagggggaggugaacgugaccggcgucaucccgcugacgaccacccccaccaagagccacuucgccaaccugaaggggacgaagacccggggcaagcucugccccaagugccugaacugcaccgaccuggacguggcccucgggcgccccaagugcaccggcaacaucccguccgccaaggugagcauccugcacgagguccggcccgugacguccggcugcuuccccaucaugcacgaccgcaccaagauccggcagcugcccaaccuccugcgcggguacgagcacauccggcugagcacccacaacgugaucaacgccgagaaggcgccgggcgggcccuacaagaucggcaccuccgggagcugccccaacgucacgaacggcaacggcuucuucgccaccauggccugggccgugcccaagaacgacaacaacaagaccgcgaccaacucccucacgaucgaggugccguacaucugcaccgagggggaggaccagaucaccgucuggggcuuccacagcgacuccgagacccagauggccaagcuguacggggacagcaagccccagaaguucacguccagcgccaacggcgugaccacccacuacgugucccagaucggcggguuccccaaccagaccgaggacggcgggcugccccagagcggccgcaucgucguggacuacauggugcagaaguccgggaagacgggcaccaucaccuaccagcggggcauccuccugccgcagaaggucuggugcgccagcgggcgcagcaaggugaucaagggcucccugccccucaucggggaggccgacugccugcacgagaaguacggcgggcugaacaagagcaagcccuacuacaccggcgagcacgcgaaggccaucggcaacugccccaucugggugaagacgccgcucaagcuggccaacgggaccaaguaccggccgcccgccaagcugcucaaggagcgcggcuucuucggggccaucgcgggcuuccuggagggcgggugggagggcaugaucgccggguggcacggcuacaccucccacggggcccacggcgucgccguggccgcggaccugaaguccacccaggaggccaucaacaagaucacgaagaaccucaacucccugagcgagcuggaggucaagaaccuccagcggcuguccggcgccauggacgagcugcacaacgagauccucgagcuggacgagaagguggacgaccugcgcgccgacaccaucagcucccagaucgagcucgccgugcugcugagcaacgaggggaucaucaacuccgaggacgagcaccuccuggcgcuggagcggaagcucaagaagaugcugggccccagcgccgucgagaucgggaacggcugcuucgagaccaagcacaagugcaaccagaccugccuggaccgcaucgccgccgggaccuucgacgcgggcgaguucucccuccccacguucgacagccugaacaucaccgccgccucccugaacgacgacggccucgacaaccacaccauccugcuguacuacagcaccgccgccuccagccuggcggugacgcucaugaucgccaucuucaucguguacauggucucccgggacaacgugagcugcagcaucugccuguga

SEQ ID NO: 91109 - RNA, 1758 nt, Artificial Sequence; identical to SEQ ID NO: 91003
  derived and/or modified CDS sequence (opt1) from hemagglutinin__InfluenzaB__AGX16830

SEQ ID NO: 91110 - RNA, 1758 nt, Artificial Sequence
  derived and/or modified CDS sequence (opt1) from hemagglutinin__InfluenzaB__AGX16841
augaaggccaucaucgugcugcucauggucgugaccagcaacgccgaccgcaucugcaccggcaucacguccagcaacagcccccacguggucaagaccgcgacccagggggaggugaacgugaccggcgucaucccgcugacgaccacccccaccaagagccacuucgccaaccugaaggggacgaagacccggggcaagcucugccccaagugccugaacugcaccgaccuggacguggcccucgggcgccccaagugcaccggcaacaucccguccgccaaggugagcauccugcacgagguccggcccgugacguccggcugcuuccccaucaugcacgaccgcaccaagauccggcagcugcccaaccuccugcgcggguacgagcacauccggcugagcacccacaacgugaucaacgccgagaaggcgccgggcgggcccuacaagaucggcaccuccgggagcugccccaacgucacgaacggcaacggcuucuucgccaccauggccugggccgugcccaagaacgacaacaacaagaccgcgaccaacucccucacgaucgaggugccguacaucugcaccgagggggaggaccagaucaccgucuggggcuuccacagcgacaacgagacccagauggccaagcuguacggggacuccaagccccagaaguucacgagcuccgccaacggcaugaccacccacuacgugagccagaucggcggguuccccaaccagaccgaggacggcgggcugccccaguccggccgcaucguggucgacuacauggugcagaaguccgggaagacgggcaccaucaccuaccagcggggcauccuccugccgcagaagguguggugcgccuccgggcgcagcaaggucaucaagggcagccugccccucaucggggaggccgacugccugcacgagaaguacggcgggcugaacaaguccaagcccuacuacaccggcgagcacgcgaaggccaucggcaacugccccaucugggugaagacgccgcucaagcuggccaacgggaccaaguaccggccgcccgccaagcugcucaaggagcgcggcuucuucggggccaucgcgggcuuccuggagggcgggugggagggcaugaucgccggguggcacggcuacaccagccacggggcccacggcguggccgucgccgcggaccugaaguccacccaggaggccaucaacaagaucacgaagaaccucaacagccuguccgagcuggaggugaagaaccuccagcggcugagcggcgccauggacgagcugcacaacgagauccucgagcuggacgagaaggucgacgaccugcgcgccgacaccaucuccagccagaucgagcucgccgugcugcuguccaacgaggggaucaucaacagcgaggacgagcaccuccuggcgcuggagcggaagcucaagaagaugcugggccccuccgccguggagaucgggaacggcugcuucgagaccaagcacaagugcaaccagaccugccuggaccgcaucgccgccgggaccuucgacgcgggcgaguucagccuccccacguucgacucccugaacaucaccgccgccagccugaacggcgacgggcucgacaaccacaccauccugcuguacuacuccaccgccgccagcucccuggcggucacgcucaugaucgccaucuucgugguguacauggucagccgggacaacguguccugcagcaucugccuguga

SEQ ID NO: 91111 - RNA, 1758 nt, Artificial Sequence
  derived and/or modified CDS sequence (opt1) from hemagglutinin__InfluenzaB__AGX16852
augaaggccaucaucgugcugcucauggucgugaccagcaacgccgaccgcaucugcaccggcaucacguccagcaacagcccccacguggucaagaccgcgacccagggggaggugaacgugaccggcgucaucccgcugacgaccacccccaccaagagccacuucgccaaccugaaggggacgaagacccggggcaagcucugccccaagugccugaacugcaccgaccuggacguggcccucgggcgccccaagugcaccggcaacaucccguccgccaaggugagcauccugcacgagguccggcccgugacguccggcugcuuccccaucaugcacgaccgcaccaagauccggcagcugcccaaccuccugcgcggguacgagcacauccggcugagcacccacaacgugaucaacgccgagaaggcgccgggcgggcccuacaagaucggcaccuccgggagcugccccaacgucacgaacggcaacggcuucuucgccaccauggccugggccgugcccaagaacgacaacaacaagaccgcgaccaacucccucacgaucgaggugccguacaucugcaccgagggggaggaccagaucaccgucuggggcuuccacagcgacaacgagacccagauggccaagcuguacggggacuccaagccccagaaguucacgagcuccgccaacggcgugaccacccacuacgugagccagaucggcggguuccccaaccagaccgaggacggcgggcugccccaguccggccgcaucgucguggacuacauggugcagaaguccgggaagacgggcaccaucaccuaccagcggggcauccuccugccgcagaaggucuggugcgccuccgggcgcagcaaggugaucaagggcagccugccccucaucggggaggccgacugccugcacgagaaguacggcgggcugaacaaguccaagcccuacuacaccggcgagcacgcgaaggccaucggcaacugccccaucugggugaagacgccgcucaagcuggccaacgggaccaaguaccggccgcccgccaagcugcucaaggagcgcggcuucuucggggccaucgcgggcuuccuggagggcgggugggagggcaugaucgccggguggcacggcuacaccagccacggggcccacggcgucgccguggccgcggaccugaaguccacccaggaggccaucaacaagaucacgaagaaccucaacagccuguccgagcuggaggucaagaaccuccagcggaucagcggcgccauggacgagcugcacaacgagauccuggagcucgacgagaagguggacgaccugcgcgccgacaccaucuccagccagaucgagcuggccgugcuccuguccaacgaggggaucaucaacagcgaggacgagcaccuccuggcgcuggagcggaagcugaagaagaugcucggccccuccgccgucgagaucgggaacggcugcuucgagaccaagcacaagugcaaccagaccugccuggaccgcaucgccgccgggaccuucgacgcgggcgaguucagccugcccacguucgacucccucaacaucaccgccgccagccugaacgacgacggccuggacaaccacaccauccuccuguacuacuccaccgccgccagcucccuggcggugacgcugaugaucgccaucuucguggucuacauggugagccgggacaacguguccugcagcaucugccucuga

SEQ ID NO: 91112 - RNA, 1758 nt, Artificial Sequence; identical to SEQ ID NO: 91003
  derived and/or modified CDS sequence (opt1) from hemagglutinin__InfluenzaB__AGX16863

SEQ ID NO: 91113 - RNA, 1758 nt, Artificial Sequence; identical to SEQ ID NO: 91003
  derived and/or modified CDS sequence (opt1) from hemagglutinin__InfluenzaB__AGX16874

SEQ ID NO: 91114 - RNA, 1758 nt, Artificial Sequence
  derived and/or modified CDS sequence (opt1) from hemagglutinin__InfluenzaB__AGX16885
augaaggccaucaucgugcugcucauggucgugaccagcaacgccgaccgcaucugcaccggcaucacguccagcaacagcccccacguggucaagaccgcgacccagggggaggugaacgugaccggcgucaucccgcugacgaccacccccaccaagagccacuucgccaaccugaaggggacgaagacccggggcaagcucugccccaagugccugaacugcaccgaccuggacguggcccucgggcgccccaagugcaccggcaacaucccguccgccaaggugagcauccugcacgagguccggcccgugacguccggcugcuuccccaucaugcacgaccgcaccaagauccggcagcugcccaaccuccugcgcggguacgagcacauccggcugagcacccacaacgugaucaacgccgagaaggcgccgggcgggcccuacaagaucggcaccuccgggagcugccccaacgucacgaacggcaacggcuucuucgccaccauggccugggccgugcccaagaacgacaacaacaagaccgcgaccaacucccucacgaucgaggugccguacaucugcaccgagggggaggaccagaucaccgucuggggcuuccacagcgacaacgagacccagauggccaagcuguacggggacuccaagccccagaaguucacgagcuccgccaacggcgugaccacccacuacgugagccagaucggcggguuccccaaccagaccgaggacggcgggcugccccaguccggccgcaucgucguggacuacauggugcagaaguccgggaagacgggcaccaucaccuaccagcggggcauccuccugccgcagaaggucuggugcgccuccgggcgcagcaaggugaucaagggcagccugccccucaucggggaggccgacugccugcacgagaaguacggcgggcugaacaaguccaagcccuacuacaccggcgagcacgcgaaggccaucggcaacugccccaucugggugaagacgccgcucaagcuggccaacgggaccaaguaccggccgcccgccaagcugcucaaggagcgcggcuucuucggggccaucgcgggcuuccuggagggcgggugggagggcaugaucgccggguggcacggcuacaccagccacggggcccacggcgucgccguggccgcggaccugaaguccacccaggaggccaucaacaagaucacgaagaaccucaacagccuguccgagcuggaggucaagaaccuccagcggcugagcggcgccauggacgagcugcacaacgagauccucgagcuggacgagaagguggacgaccugcgcgccgacaccaucuccagccagaucgagcucgccgugcugcuguccaacgaggggaucaucaacagcgaggacgagcaccuccuggcgcuggagcggaagcucaagaagaugcugggccccuccgccaucgagaucgggaacggcugcuucgagaccaagcacaagugcaaccagaccugccuggaccgcaucgccgccgggaccuucgacgcgggcgaguucagccuccccacguucgacucccugaacaucaccgccgccagccugaacgacgacggccucgacaaccacaccauccugcuguacuacuccaccgccgccagcucccuggcggucacgcucaugaucgccaucuucgugguguacauggucagccgggacaacguguccugcagcaucugccuguga

SEQ ID NO: 91115 - RNA, 1758 nt, Artificial Sequence; identical to SEQ ID NO: 91114
  derived and/or modified CDS sequence (opt1) from hemagglutinin__InfluenzaB__AGX16896

SEQ ID NO: 91116 - RNA, 1758 nt, Artificial Sequence; identical to SEQ ID NO: 91003
  derived and/or modified CDS sequence (opt1) from hemagglutinin__InfluenzaB__AGX16907

SEQ ID NO: 91117 - RNA, 1758 nt, Artificial Sequence; identical to SEQ ID NO: 91088
  derived and/or modified CDS sequence (opt1) from hemagglutinin__InfluenzaB__AGX16918

SEQ ID NO: 91118 - RNA, 1758 nt, Artificial Sequence; identical to SEQ ID NO: 91003
  derived and/or modified CDS sequence (opt1) from hemagglutinin__InfluenzaB__AGX16940

SEQ ID NO: 91119 - RNA, 1758 nt, Artificial Sequence; identical to SEQ ID NO: 91114
  derived and/or modified CDS sequence (opt1) from hemagglutinin__InfluenzaB__AGX16951

SEQ ID NO: 91120 - RNA, 1758 nt, Artificial Sequence
  derived and/or modified CDS sequence (opt1) from hemagglutinin__InfluenzaB__AGX16962
augaaggccaucaucgugcugcucauggucgugaccagcaacgccgaccgcaucugcaccggcaucacguccagcaacagcccccacguggucaagaccgcgacccagggggaggugaacgugaccggcgucaucccgcugacgaccacccccaccgagagccacuucgccaaccugaaggggacgaagacccggggcaagcucugccccaagugccugaacugcaccgaccuggacguggcccucgggcgccccaagugcaccggcaacaucccguccgccaaggugagcauccugcacgagguccggcccgugacguccggcugcuuccccaucaugcacgaccgcaccaagauccggcagcugcccaaccuccugcgcggguacgagcacauccggcugagcacccacaacgugaucaacgccgagaaggcgccgggcgggcccuacaagaucggcaccuccgggagcugccccaacgucacgaacggcaacggcuucuucgccaccauggccugggccgugcccaagaacgacaacaacaagaccgcgaccaacucccucacgaucgaggugccguacaucugcaccgagggggaggaccagaucaccgucuggggcuuccacagcgacaacgagacccagauggccaagcuguacggggacuccaagccccagaaguucacgagcuccgccaacggcgugaccacccacuacgugagccagaucggcggguuccccaaccagaaggaggacggcgggcugccccaguccggccgcaucgucguggacuacauggugcagaaguccgggaacaccggcacgaucaccuaccagcggggcauccuccugccgcagaaggucuggugcgccuccgggcgcagcaaggugaucaagggcagccugccccucaucggggaggccgacugccugcacgagaaguacggcgggcugaacaaguccaagcccuacuacaccggcgagcacgcgaaggccaucggcaacugccccaucugggugaagaccccgcucaagcuggccaacgggacgaaguaccggccgcccgccaagcugcucaaggagcgcggcuucuucggggccaucgcgggcuuccuggagggcgggugggagggcaugaucgccggguggcacggcuacaccagccacggggcccacggcgucgccguggccgcggaccugaaguccacccaggaggccaucaacaagaucaccaagaaccucaacagccuguccgagcuggaggucaagaaccuccagcggcugagcggcgccauggacgagcugcacaacgagauccucgagcuggacgagaagguggacgaccugcgcgccgacacgaucuccagccagaucgagcucgccgugcugcuguccaacgaggggaucaucaacagcgaggacgagcaccuccuggcgcuggagcggaagcucaagaagaugcugggccccuccgccgucgagaucgggaacggcugcuucgagaccaagcacaagugcaaccagaccugccuggaccgcaucgccgccgggaccuucgacgcgggcgaguucagccuccccaccuucgacucccugaacaucacggccgccagccugaacgacgacggccucgacaaccacaccauccugcuguacuacuccaccgccgccagcucccuggcggugacccucaugaucgccaucuucguggucuacauggugagccgggacaacguguccugcagcaucugccuguga

SEQ ID NO: 91121 - RNA, 1758 nt, Artificial Sequence; identical to SEQ ID NO: 91003
  derived and/or modified CDS sequence (opt1) from hemagglutinin__InfluenzaB__AGX16973

SEQ ID NO: 91122 - RNA, 1758 nt, Artificial Sequence
  derived and/or modified CDS sequence (opt1) from hemagglutinin__InfluenzaB__AGX16995
augaaggccaucaucgugcugcucauggucgugaccagcaacgccgaccgcaucugcaccggcaucacguccagcaacagcccccacguggucaagaccgcgacccagggggaggugaacgugaccggcgucaucccgcugacgaccacccccaccaagagccacuucgccaaccugaaggggacgaagacccggggcaagcucugccccaagugccugaacugcaccgaccuggacguggcccucgggcgccccaagugcaccggcaacaucccguccgccaaggugagcauccugcacgagguccggcccgugacguccggcugcuuccccaucaugcacgaccgcaccaagauccggcagcugcccaaccuccugcgcggguacgagcacauccggcugagcacccacaacgugaucaacgccgagaaggcgccgggcgggcccuacaagaucggcaccuccgggagcugccccaacgucacgaacggcaacggcuucuucgccaccauggccugggccgugcccaagaacgacaacaacaagaccgcgaccaacucccucacgguggaggucccguacaucugcaccgagggggaggaccagaucaccguguggggcuuccacagcgacaacgagauccagauggccaagcuguacggggacuccaagccccagaaguucaccagcuccgccaacggcgugacgacccacuacgucagccagaucggcggguuccccaaccagaccgaggacggcgggcugccccaguccggccgcaucgugguggacuacaugguccagaaguccgggaagaccggcacgaucaccuaccagcggggcauccuccugccgcagaagguguggugcgccuccgggcgcagcaaggugaucaagggcagccugccccucaucggggaggccgacugccugcacgagaaguacggcgggcugaacaaguccaagcccuacuacaccggcgagcacgcgaaggccaucggcaacugccccaucugggucaagaccccgcucaagcuggccaacgggacgaaguaccggccgcccgccaagcugcucaaggagcgcggcuucuucggggccaucgcgggcuuccuggagggcgggugggagggcaugaucgccggguggcacggcuacaccagccacggggcccacggcguggccgucgccgcggaccugaaguccacccaggaggccaucaacaagaucaccaagaaccucaacagccuguccgagcuggaggugaagaaccuccagcggcugagcggcgccauggacgagcugcacaacgagauccucgagcuggacgagaagguggacgaccugcgcgccgacacgaucuccagccagaucgagcucgccguccugcuguccaacgaggggaucaucaacagcgaggacgagcaccuccuggcgcuggagcggaagcucaagaagaugcugggccccuccgccguggagaucgggaacggcugcuucgagaccaagcacaagugcaaccagaccugccuggaccgcaucgccgccgggaccuucgacgcgggcgaguucagccuccccaccuucgacucccugaacaucacggccgccagccugaacgacgacggccucgacaaccacaccauccugcuguacuacuccaccgccgccagcucccuggcggugacccucaugaucgccaucuucgucguguacauggugagccgggacaacgucuccugcagcaucugccuguga

SEQ ID NO: 91123 - RNA, 1758 nt, Artificial Sequence
  derived and/or modified CDS sequence (opt1) from hemagglutinin__InfluenzaB__AGX17006
augaaggccaucaucgugcugcucauggucgugaccagcaacgccgaccgcaucugcaccggcaucacguccagcaacagcccccacguggucaagaccgcgacccagggggaggugaacgugaccggcgucaucccgcugacgaccacccccaccaagagccacuucgccaaccugaaggggacgaagacccggggcaagcucugccccaagugccugaacugcaccgaccuggacguggcccucgggcgccccaagugcaccggcaacaucccguccgccaaggugagcauccugcacgagguccggcccgugacguccggcugcuuccccaucaugcacgaccgcaccaagauccggcagcugcccaaccuccugcgcggguacgagcacauccggcugagcacccacaacgugaucaacgccgagaaggcgccgggcgggcccuacaagaucggcaccuccgggagcugccccaacgucacgaacggcaacggcuucuucgccaccauggccugggccgugcccaagaacgacaacaacaagaccgcgaccaacucccucacgaucgaggugccguacaucugcaccgagggggaggaccagaucaccgucuggggcuuccacagcgacaacgagaaccagauggccaagcuguacggggacuccaagccccagaaguucaccagcuccgccaacggcgugacgacccacuacgugagccagaucggcggguuccccaaccagaccgaggacggcgggcugccccaguccggccgcaucgucguggacuacauggugcagaaguccgggaagaccggcacgaucaccuaccagcggggcauccuccugccgcagaaggucuggugcgccuccgggcgcagcaaggugaucaagggcagccugccccucaucggggaggccgacugccugcacgagaaguacggcgggcugaacaaguccaagcccuacuacaccggcgagcacgcgaaggccaucggcaacugccccaucugggugaagaccccgcucaagcuggccaacgggacgaaguaccggccgcccgccaagcugcucaaggagcgcggcuucuucggggccaucgcgggcuuccuggagggcgggugggagggcaugaucgccggguggcacggcuacaccagccacggggcccacggcgucgccguggccgcggaccugaaguccacccaggaggccaucaacaagaucaccaagaaccucaacagccuguccgagcuggaggucaagaaccuccagcggcugagcggcgccauggacgagcugcacaacgagauccucgagcuggacgagaagguggacgaccugcgcgccgacacgaucuccagccagaucgagcucgccgugcugcuguccaacgaggggaucaucaacagcgaggacgagcaccuccuggcgcuggagcggaagcucaagaagaugcugggccccuccgccgucgagaucgggaacggcugcuucgagaccaagcacaagugcaaccagaccugccuggaccgcaucgccgccgggaccuucgacgcgggcgaguucagccuccccaccuucgacucccugaacaucacggccgccagccugaacgacgacggccucgacaaccacaccauccugcuguacuacuccaccgccgccagcucccuggcggugacccucaugaucgccaucuucguggucuacauggugagccgggacaacguguccugcagcaucugccuguga

SEQ ID NO: 91124 - RNA, 1758 nt, Artificial Sequence; identical to SEQ ID NO: 91003
  derived and/or modified CDS sequence (opt1) from hemagglutinin__InfluenzaB__AGX17017

SEQ ID NO: 91125 - RNA, 1758 nt, Artificial Sequence; identical to SEQ ID NO: 91003
  derived and/or modified CDS sequence (opt1) from hemagglutinin__InfluenzaB__AGX17028

SEQ ID NO: 91126 - RNA, 1758 nt, Artificial Sequence
  derived and/or modified CDS sequence (opt1) from hemagglutinin__InfluenzaB__AGX17039
augaaggccaucaucgugcugcucauggucgugaccagcaacgccgaccgcaucugcaccggcaucacguccagcaacagcccccacguggucaagaccgcgacccagggggaggugaacgugaccggcgucaucccgcugacgaccacccccaccgagagccacuucgccaaccugaaggggacgaagacccggggcaagcucugccccaagugccugaacugcaccgaccuggacguggcccucgggcgccccaagugcaccggcaacaucccguccgccaaggugagcauccugcacgagguccggcccgugacguccggcugcuuccccaucaugcacgaccgcaccaagauccggcagcugcccaaccuccugcgcggguacgagcacauccggcugagcacccacaacgugaucaacgccgagaaggcgccgggcgggcccuacaagaucggcaccuccgggagcugccccaacgucacgaacggcaacggcuucuucgccaccauggccugggccgugcccaagaacgacaacaacaagaccgcgaccaacucccucacgaucgaggugccguacaucugcaccgagggggaggaccagaucaccgucuggggcuuccacagcgacaacgagacccagauggccaagcuguacggggacuccaagccccagaaguucacgagcuccgccaacggcgugaccacccacuacgugagccagaucggcggguuccccaaccagaccgaggacggcgggcugccccaguccggccgcaucgucguggacuacauggugcagaaguccgggaacacgggcaccaucaccuaccagcggggcauccuccugccgcagaaggucuggugcgccuccgggcgcagcaaggugaucaagggcagccugccccucaucggggaggccgacugccugcacgagaaguacggcgggcugaacaaguccaagcccuacuacaccggcgagcacgcgaaggccaucggcaacugccccaucugggugaagacgccgcucaagcuggccaacgggaccaaguaccggccgcccgccaagcugcucaaggagcgcggcuucuucggggccaucgcgggcuuccuggagggcgggugggagggcaugaucgccggguggcacggcuacaccagccacggggcccacggcgucgccguggccgcggaccugaaguccacccaggaggccaucaacaagaucacgaagaaccucaacagccuguccgagcuggaggucaagaaccuccagcggcugagcggcgccauggacgagcugcacaacgagauccucgagcuggacgagaagguggacgaccugcgcgccgacaccaucuccagccagaucgagcucgccgugcugcuguccaacgaggggaucaucaacagcgaggacgagcaccuccuggcgcuggagcggaagcucaagaagaugcugggccccuccgccgucgagaucgggaacggcugcuucgagaccaagcacaagugcaaccagaccugccuggaccgcaucgccgccgggaccuucgacgcgggcgaguucagccuccccacguucgacucccugaacaucaccgccgccagccugaacgacgacggccucgacaaccacaccaucaugcuguacuacuccaccgccgccagcucccuggcggugacgcugaugaucgccaucuucguggucuacauggugagccgggacaacguguccugcagcaucugccucuga

SEQ ID NO: 91127 - RNA, 1758 nt, Artificial Sequence; identical to SEQ ID NO: 91003
  derived and/or modified CDS sequence (opt1) from hemagglutinin__InfluenzaB__AGX17050

SEQ ID NO: 91128 - RNA, 1758 nt, Artificial Sequence
  derived and/or modified CDS sequence (opt1) from hemagglutinin__InfluenzaB__AGX17061
augaaggccaucaucgugcugcucauggucgugaccagcaacgccgaccgcaucugcaccggcaucacguccagcaacagcccccacguggucaagaccgcgacccagggggaggugaacgugaccggcgucaucccgcugacgaccacccccaccaagagccacuucgccaaccugaaggggacgaagacccggggcaagcucugccccaagugccugaacugcaccgaccuggacguggcccucgggcgccccaagugcaccggcaacaucccguccgccaaggugagcauccugcacgagguccggcccgugacguccggcugcuuccccaucaugcacgaccgcaccaagauccggcagcugcccaaccuccugcgcggguacgagcggauccgccugagcaaccacaacgugaucaacgccgagaaggcgccgggcgggcccuacaagaucggcaccuccgggagcugccccaacgucaccaacggcaacggcuucuucgccacgauggccugggccgugcccaagaacgagaacaacaagaccgcgaccaacucccucaccaucgaggugccguacaucugcacggagggggaggaccagaucaccgucuggggcuuccacagcgacaacgagacccagauggccaagcuguacggggacuccaagccccagaaguucaccagcuccgccaacggcgugacgacccacuacgugagccagaucggcggguuccccaaccagaccgaggacggcgggcugccccaguccggccggaucgucguggacuacauggugcagaaguccgggaagaccggcacgaucaccuaccagcgcggcauccuccugccgcagaaggucuggugcgccuccgggcggagcaaggugaucaagggcagccugccccucaucggggaggccgacugccugcacgagaaguacggcgggcugaacaaguccaagcccuacuacaccggcgagcacgcgaaggccaucggcaacugccccaucugggugaagaccccgcucaagcuggccaacgggacgaaguaccgcccgcccgccaagcugcucaaggagcggggcuucuucggggccaucgcgggcuuccuggagggcgggugggagggcaugaucgccggguggcacggcuacaccagccacggggcccacggcgucgccguggccgcggaccugaaguccacccaggaggccaucaacaagaucaccaagaaccucaacagccuguccgagcuggaggucaagaaccuccagcgccugagcggcgccauggacgagcugcacaacgagauccucgagcuggacgagaagguggacgaccugcgggccgacacgaucuccagccagaucgagcucgccgugcugcuguccaacgaggggaucaucaacagcgaggacgagcaccuccuggcgcuggagcgcaagcucaagaagaugcugggccccuccgccgucgagaucgggaacggcugcuucgagaccaagcacaagugcaaccagaccugccuggaccggaucgccgccgggaccuucaacgcgggcgaguucagccuccccaccuucgacucccugaacaucacggccgccagccugaacgacgacggccucgacaaccacaccauccugcuguacuacuccaccgccgccagcucccuggcggugacccucaugaucgccaucuucguggucuacauggugagccgcgacaacguguccugcagcaucugccuguga

SEQ ID NO: 91129 - RNA, 1758 nt, Artificial Sequence
  derived and/or modified CDS sequence (opt1) from hemagglutinin__InfluenzaB__AGX17072
augaaggccaucaucgugcugcucauggucgugaccagcaacgccgaccgcaucugcaccggcaucacguccagcaacagcccccacguggucaagaccgcgacccagggggaggugaacgugaccggcgucaucccgcugacgaccacccccaccgagagccacuucgccaaccugaaggggacgaagacccggggcaagcucugccccaagugccugaacugcaccgaccuggacguggcccucgggcgccccaagugcaccggcaacaucccguccgccaaggugagcauccugcacgagguccggcccgugacguccggcugcuuccccaucaugcacgaccgcaccaagauccggcagcugcccaaccuccugcgcggguacgagcacauccggcugagcacccacaacgugaucaacgccgagaaggcgccgggcgggcccuacaagaucggcaccuccgggagcugccccaacgucacgaacggcaacggcuucuucgccaccauggccugggccgugcccaagaacgacaacaacaagaccgcgaccaacucccucacgaucgaggugccguacaucugcaccgagggggaggaccagaucaccgucuggggcuuccacagcgacaacgagacccagauggccaagcuguacggggacuccaagccccagaaguucacgagcuccgccaacggcgugaccacccacuacgugagccagaucggcggguuccccaaccagaccgaggacggcgggcugccccaguccggccgcaucgucguggacuacauggugcagaaguccgggaacacgggcaccaucaccuaccagcggggcauccuccugccgcagaaggucuggugcgccuccgggcgcagcaaggugaucaagggcagccugccccucaucggggaggccgacugccugcacgagaaguacggcgggcugaacaaguccaagcccuacuacaccggcgagcacgcgaaggccaucggcaacugccccaucugggugaagacgccgcucaagcuggccaacgggaccaaguaccggccgcccgccaagcugcucaaggagcgcggcuucuucggggccaucgcgggcuuccuggagggcgggugggagggcaugaucgccggguggcacggcuacaccagccacggggcccacggcgucgccguggccgcggaccugaaguccacccaggaggccaucaacaagaucacgaagaaccucaacagccuguccgagcuggaggucaagaaccuccagcggcugagcggcgccauggacgagcugcacaacgagauccucgagcuggacgagaagguggacgaccugcgcgccgacaccaucuccagccagaucgagcucgccgugcugcuguccaacgaggggaucaucaacagcgaggacgagcaccuccuggcgcuggagcggaagcucaagaagaugcugggccccuccgccgucgagaucgggaacggcugcuucgagaccaagcacaagugcaaccagaccugccuggaccgcaucgccgccgggaccuucgacgcgggcgaguucagccuccccacguucgacucccugaacaucaccgccgccagccugaacgacgacggccucgacaaccacaccauccugcuguacuacuccaccgccgccagcucccuggcggugacgcucaugaucgccaucuucguggucuacauggugagccgggacaacguguccugcagcaucugccuguga

SEQ ID NO: 91130 - RNA, 1758 nt, Artificial Sequence; identical to SEQ ID NO: 91114
  derived and/or modified CDS sequence (opt1) from hemagglutinin__InfluenzaB__AGX17083

SEQ ID NO: 91131 - RNA, 1758 nt, Artificial Sequence
  derived and/or modified CDS sequence (opt1) from hemagglutinin__InfluenzaB__AGX17094
augaaggccaucaucgugcugcucauggucgugaccagcaacgccgaccgcaucugcaccggcaucacguccagcaacagcccccacguggucaagaccgcgacccagggggaggugaacgugaccggcgucaucccgcugacgaccacccccaccaagagccacuucgccaaccugaaggggacgaagacccggggcaagcucugccccaagugccugaacugcaccgaccuggacguggcccucgggcgccccaagugcaccggcaacaucccguccgccaaggugagcauccugcacgagguccggcccgugacguccggcugcuuccccaucaugcacgaccgcaccaagauccggcagcugcccaaccuccugcgcggguacgagcacauccggcugagcacccacaacgugaucaacgccgagaaggcgccgggcgggcccuacaagaucggcaccuccgggagcugccccaacgucacgaacggcaacggcuucuucgccaccauggccugggccgugcccaagaacgacaacaacaagaccgcgaccaacucccucacgaucgaggugccguacaucugcaccgagggggaggaccagaucaccgucuggggcuuccacagcgacuccgagacccagauggccaagcuguacggggacagcaagccccagaaguucacguccagcgccaacggcgugaccacccacuacgugucccagaucggcggguuccccaaccagaccgaggacggcgggcugccccagagcggccgcaucgucguggacuacauggugcagaaguccgggaagacgggcaccaucaccuaccagcggggcauccuccugccgcagaaggucuggugcgccagcgggcgcagcaaggugaucaagggcucccugccccucaucggggaggccgacugccugcacgagaaguacggcgggcugaacaagagcaagcccuacuacaccggcgagcacgcgaaggccaucggcaacugccccaucugggugaagacgccgcucaagcuggccaacgggaccaaguaccggccgcccgccaagcugcucaaggagcgcggcuucuucggggccaucgcgggcuuccuggagggcgggugggagggcaugaucgccggguggcacggcuacaccucccacggggcccacggcgucgccguggccgcggaccugaaguccacccaggaggccaucaacaagaucacgaagaaccucaacucccugagcgagcuggaggucaagaaccuccagcggcuguccggcgccauggacgagcugcacaacgagauccucgagcuggacgagaagguggacgaccugcgcgccgacaccaucagcucccagaucgagcucgccgugcugcugagcaacgaggggaucaucaacuccgaggacgagcaccuccuggcgcuggagcggaagcucaagaagaugcugggccccagcgccgucgagaucgggaacggcugcuucgagaccaagcacaagugcaaccagaccugccuggaccgcaucgccgccgggaccuucgacgcgggcgaguucucccuccccacguucgacagccugaacaucaccgccgccucccugaacgacgacggccucgacaaccacaccauccugcuguacuacagcaccgccgccuccagccuggcggugacgcucaugaucgccaucuucguggucuacauggugucccgggacaacgugagcugcagcaucugccuguga

SEQ ID NO: 91132 - RNA, 1758 nt, Artificial Sequence
  derived and/or modified CDS sequence (opt1) from hemagglutinin__InfluenzaB__AGX17105
augaaggccaucaucgugcugcucauggucgugaccagcaacgccgaccgcaucugcaccggcaucacguccagcaacagcccccacguggucaagaccgcgacccagggggagaucaacgugaccggcgugaucccgcugacgaccacccccaccaagagccacuucgccaaccugaaggggacgaagacccggggcaagcucugccccaagugccugaacugcaccgaccuggacgucgcccucgggcgccccaagugcaccggcaacaucccguccgccaaggugagcauccugcacgaggugcggcccgucacguccggcugcuuccccaucaugcacgaccgcaccaagauccggcagcugcccaaccuccugcgcggguacgagcacauccggcugagcacccacaacgugaucaacgccgagaaggcgccgggcgggcccuacaagaucggcaccuccgggagcugccccaacgugacgaacggcaacggcuucuucgccaccauggccugggccguccccaagaacgacaacaacaagaccgcgaccaacucccucacgaucgaggugccgcacaucugcaccgagggggaggaccagaucaccguguggggcuuccacagcgacaacgagauccagauggccaagcuguacggggacuccaagccccagaaguucaccagcuccgccaacggcgucacgacccacuacaucagccagaucggcggguuccccaaccagaccgaggacggcgggcugccccaguccggccgcaucgugguggacuacaugguccagaaguccgggaagaccggcacgaucaccuaccagcggggcauccuccugccgcagaagguguggugcgccuccgggcgcagcaaggugaucaagggcagccugccccucaucggggaggccgacugccugcacgagaaguacggcgggcugaacaaguccaagcccuacuacaccggcgagcacgcgaaggccaucggcaacugccccaucugggucaagaccccgcucaagcuggccaacgggacgaaguaccggccgcccgccaagcugcucaaggagcgcggcuucuucggggccaucgcgggcuuccuggagggcgggugggagggcaugaucgccggguggcacggcuacaccagccacggggcccacggcguggccguggccgcggaccugaaguccacccaggaggccaucaacaagaucaccaagaaccucaacagccuguccgagcuggaggucaagaaccuccagcggcugagcggcgccauggacgagcugcacaacgagauccucgagcuggacgagaagguggacgaccugcgcgccgacacgaucuccagccagaucgagcucgccguccugcuguccaacgaggggaucaucaacagcgaggacgagcaccuccuggcgcuggagcggaagcucaagaagaugcugggccccuccgccaucgagaucgggaacggcugcuucgagaccaagcacaagugcaaccagaccugccuggaccgcaucgccgccgggaccuucgacgcgggcgaguucagccuccccaccuucgacucccugaacaucacggccgccagccugaacgacgacggccucgacaaccacaccauccugcuguacuacuccaccgccgccagcucccuggcggugacccucaugaucgccaucuucguggucuacauggugagccgggacaacguguccugcagcaucugccuguga

SEQ ID NO: 91133 - RNA, 1758 nt, Artificial Sequence; identical to SEQ ID NO: 91114
  derived and/or modified CDS sequence (opt1) from hemagglutinin__InfluenzaB__AGX17116

SEQ ID NO: 91134 - RNA, 1758 nt, Artificial Sequence
  derived and/or modified CDS sequence (opt1) from hemagglutinin__InfluenzaB__AGX17127
augaaggccaucaucgugcugcucauggucgugaccagcaacgccgaccgcaucugcaccggcaucacguccagcaacagcccccacguggucaagaccgcgacccagggggaggugaacgugaccggcgucaucccgcugacgaccacccccaccgagagccacuucgccaaccugaaggggacgaagacccggggcaagcucugccccaagugccugaacugcaccgaccuggacguggcccucgggcgccccaagugcaccggcaacaucccguccgccaaggugagcauccugcacgagguccggcccgugacguccggcugcuuccccaucaugcacgaccgcaccaagauccggcagcugcccaaccuccugcgcggguacgagcacauccggcugagcacccacaacgugaucaacgccgagaaggcgccgggcgggcccuacaagaucggcaccuccgggagcugccccaacgucacgaacggcaacggcuucuucgccaccauggccugggccgugcccaagaacgacaacaacaagaccgcgaccaacucccucacgaucgaggugccguacaucugcaccgagggggaggaccagaucaccgucuggggcuuccacagcgacaacgagaaccagauggccaagcuguacggggacuccaagccccagaaguucaccagcuccgccaacggcgugacgacccacuacgugagccagaucggcggguuccccaaccagaccgaggacggcgggcugccccaguccggccgcaucgucguggacuacauggugcagaaguccgggaacaccggcacgaucaccuaccagcggggcauccuccugccgcagaaggucuggugcgccuccgggcgcagcaaggugaucaagggcagccugccccucaucggggaggccgacugccugcacgagaaguacggcgggcugaacaaguccaagcccuacuacaccggcgagcacgcgaaggccaucggcaacugccccaucugggugaagaccccgcucaagcuggccaacgggacgaaguaccggccgcccgccaagcugcucaaggagcgcggcuucuucggggccaucgcgggcuuccuggagggcgggugggagggcaugaucgccggguggcacggcuacaccagccacggggcccacggcgucgccguggccgcggaccugaaguccacccaggaggccaucaacaagaucaccaagaaccucaacagccuguccgagcuggaggucaagaaccuccagcggcugagcggcgccauggacgagcugcacaacgagauccucgagcuggacgagaagguggacgaccugcgcgccgacacgaucuccagccagaucgagcucgccgugcugcuguccaacgaggggaucaucaacagcgaggacgagcaccuccuggcgcuggagcggaagcucaagaagaugcugggccccuccgccgucgagaucgggaacggcugcuucgagaccaagcacaagugcaaccagaccugccuggaccgcaucgccgccgggaccuucgacgcgggcgaguucagccuccccaccuucgacucccugaacaucacggccgccagccugaacgacgacggccucgacaaccacaccauccugcuguacuacuccaccgccgccagcucccuggcggugacccucaugaucgccaucuucguggucuacauggugagccgggacaacguguccugcagcaucugccuguga

SEQ ID NO: 91135 - RNA, 1758 nt, Artificial Sequence; identical to SEQ ID NO: 91123
  derived and/or modified CDS sequence (opt1) from hemagglutinin__InfluenzaB__AGX17138

SEQ ID NO: 91136 - RNA, 1758 nt, Artificial Sequence; identical to SEQ ID NO: 91123
  derived and/or modified CDS sequence (opt1) from hemagglutinin__InfluenzaB__AGX17149

SEQ ID NO: 91137 - RNA, 1758 nt, Artificial Sequence
  derived and/or modified CDS sequence (opt1) from hemagglutinin__InfluenzaB__AGX17160
augaaggccaucaucgugcugcucauggucgugaccagcaacgccgaccgcaucugcaccggcaucacguccagcaacagcccccacguggucaagaccgcgacccagggggaggugaacgugaccggcaugaucccgcugacgaccacccccaccaagagccacuucgccaaccugaaggggacgaagacccggggcaagcucugccccaagugccugaacugcaccgaccuggacgucgcccucgggcgccccaagugcaccggcaacaucccguccgccaaggugagcauccugcacgaggugcggcccgucacguccggcugcuuccccaucaugcacgaccgcaccaagauccggcagcugcccaaccuccugcgcggguacgagcacauccggcugagcacccacaacgugaucaacgccgagaaggcgccgggcgggcccuacaagaucggcaccuccgggagcugccccaacgugacgaacggcaacggcuucuucgccaccauggccugggccguccccaagaacgacaacaacaagaccgcgaccaacucccucacgaucgaggugccguacaucugcaccgagggggaggaccagaucaccguguggggcuuccacagcgacaacgagacccagauggccaagcuguacggggacuccaagccccagaaguucacgagcuccgccaacggcgucaccacccacuacgugagccagaucggcggguuccccaaccagaccgaggacggcgggcugccccaguccggccgcaucguggucgacuacauggugcagaaguccgggaagacgggcaccaucaccuaccagcggggcauccuccugccgcagaagguguggugcgccuccgggcgcagcaaggucaucaagggcagccugccccucaucggggaggccgacugccugcacgagaaguacggcgggcugaacaaguccaagcccuacuacaccggcgagcacgcgaaggccaucggcaacugccccaucugggugaagacgccgcucaagcuggccaacgggaccaaguaccggccgcccgccaagcugcucaaggagcgcggcuucuucggggccaucgcgggcuuccuggagggcgggugggagggcaugaucgccggguggcacggcuacaccagccacggggcccacggcguggccgucgccgcggaccugaaguccacccaggaggccaucaacaagaucacgaagaaccucaacagccuguccgagcuggaggugaagaaccuccagcggcugagcggcgccauggacgagcugcacaacgagauccucgagcuggacgagaaggucgacgaccugcgcgccgacaccaucuccagccagaucgagcucgccgugcugcuguccaacgaggggaucaucaacagcgaggacgagcaccuccuggcgcuggagcggaagcucaagaagaugcugggccccuccgccguggagaucgggaacggcugcuucgagaccaagcacaagugcaaccagaccugccuggaccgcaucgccgccgggaccuucgacgcgggcgaguucagccuccccacguucgacucccugaacaucaccgccgccagccugaacgacgacggccucgacaaccacaccauccugcuguacuacuccaccgccgccagcucccuggcggucacgcucaugaucgccaucuucgugguguacauggucagccgggacaacguguccugcagcaucugccuguga

SEQ ID NO: 91138 - RNA, 1758 nt, Artificial Sequence
  derived and/or modified CDS sequence (opt1) from hemagglutinin__InfluenzaB__AGX17171
augaaggccaucaucgugcugcucauggucgugaccagcaacgccgaccgcaucugcaccggcaucacguccagcaacagcccccacguggucaagaccgcgacccagggggaggugaacgugaccggcgucaucccgcugacgaccacccccaccgagagccacuucgccaaccugaaggggacgaagacccggggcaagcucugccccaagugccugaacugcaccgaccuggacguggcccucgggcgccccaagugcaccggcaacaucccguccgccaaggugagcauccugcacgagguccggcccgugacguccggcugcuuccccaucaugcacaaccgcaccaagauccggcagcugcccaaccuccugcgcggguacgagcacauccggcugagcacccacaacgugaucaacgccgagaaggcgccgggcgggcccuacaagaucggcaccuccgggagcugccccaacgucacgaacggcaacggcuucuucgccaccauggccugggccgugcccaagaacgacaacaacaagaccgcgaccaacucccucacgaucgaggugccguacaucugcaccgagggggaggaccagaucaccgucuggggcuuccacagcgacaacgaggcccagauggccaagcuguacggggacuccaagccccagaaguucaccagcuccgccaacggcgugacgacccacuacgugagccagaucggcggguuccccaaccagaccgaggacggcgggcugccccaguccggccgcaucgucguggacuacauggugcagaaguccgggaacaccggcacgaucaccuaccagcggggcauccuccugccgcagaaggucuggugcgccuccgggcgcagcaaggugaucaagggcagccugccccucaucggggaggcggacugccugcacgagaaguacggcgggcugaacaaguccaagcccuacuacaccggcgagcacgccaaggccaucggcaacugccccaucugggugaagaccccgcucaagcuggccaacgggacgaaguaccggccgcccgccaagcugcucaaggagcgcggcuucuucggggcgaucgccggcuuccuggagggcgggugggagggcaugaucgccggguggcacggcuacaccagccacggggcccacggcgucgccguggcggccgaccugaaguccacccaggaggccaucaacaagaucaccaagaaccucaacagccuguccgagcuggaggucaagaaccuccagcggcugagcggcgccauggacgagcugcacaacgagauccucgagcuggacgagaagguggacgaccugcgcgccgacacgaucuccagccagaucgagcucgcggugcugcuguccaacgaggggaucaucaacagcgaggacgagcaccuccuggcccuggagcggaagcucaagaagaugcugggccccuccgccgucgagaucgggaacggcugcuucgagaccaagcacaagugcaaccagaccugccuggaccgcaucgccgcggggaccuucgacgccggcgaguucagccuccccaccuucgacucccugaacaucacggccgccagccugaacgacgacggccucgacaaccacaccauccugcuguacuacuccaccgccgcgagcucccuggccgugacccucaugaucgccaucuucguggucuacauggugagccgggacaacguguccugcagcaucugccuguga

SEQ ID NO: 91139 - RNA, 1758 nt, Artificial Sequence; identical to SEQ ID NO: 91003
  derived and/or modified CDS sequence (opt1) from hemagglutinin__InfluenzaB__AGX17182

SEQ ID NO: 91140 - RNA, 1758 nt, Artificial Sequence; identical to SEQ ID NO: 91003
  derived and/or modified CDS sequence (opt1) from hemagglutinin__InfluenzaB__AGX17193

SEQ ID NO: 91141 - RNA, 1758 nt, Artificial Sequence; identical to SEQ ID NO: 91003
  derived and/or modified CDS sequence (opt1) from hemagglutinin__InfluenzaB__AGX17204

SEQ ID NO: 91142 - RNA, 1758 nt, Artificial Sequence
  derived and/or modified CDS sequence (opt1) from hemagglutinin__InfluenzaB__AGX17215
augaaggccaucaucgugcugcucauggucgugaccagcaacgccgaccgcaucugcaccggcaucacguccagcaacagcccccacguggucaagaccgcgacccagggggaggugaacgugaccggcgucaucccgcugacgaccacccccaccaagagccacuucgccaaccugaaggggacgaagacccggggcaagcucugccccaagugccugaacugcaccgaccuggacguggcccucgggcgccccaagugcaccggcaacaucccguccgccaaggugagcauccugcacgagguccggcccgugacguccggcugcuuccccaucaugcacgaccgcaccaagauccggcagcugcccaaccuccugcgcggguacgagcacauccggcugagcacccacaacgugaucaacgccgagaaggcgccgggcgggcccuacaagaucggcaccuccgggagcugccccaacgucacgaacggcaacggcuucuucgccaccauggccugggccgugcccaagaacgacaacaacaagaccgcgaccaacucccucacgaucgaggugccguacaucugcaccgagggggaggaccagaucaccgucuggggcuuccacagcgacaacgaggcccagauggccaagcuguacggggacuccaagccccagaaguucaccagcuccgccaacggcgugacgacccacuacgugagccagaucggcggguuccccaaccagaccgaggacggcgggcugccccaguccggccgcaucgucguggacuacauggugcagaaguccgggaagaccggcacgaucaccuaccagcggggcauccuccugccgcagaaggucuggugcgccuccgggcgcagcaaggugaucaagggcagccugccccucaucggggaggcggacugccugcacgagaaguacggcgggcugaacaaguccaagcccuacuacaccggcgagcacgccaaggccaucggcaacugccccaucugggugaagaccccgcucaagcuggccaacgggacgaaguaccggccgcccgccaagcugcucaaggagcgcggcuucuucggggcgaucgccggcuuccuggagggcgggugggagggcaugaucgccggguggcacggcuacaccagccacggggcccacggcgucgccguggcggccgaccugaaguccacccaggaggccaucaacaagaucaccaagaaccucaacagccuguccgagcuggaggucaagaaccuccagcggcugagcggcgccauggacgagcugcacaacgagauccucgagcuggacgagaagguggacgaccugcgcgccgacacgaucuccagccagaucgagcucgcggugcugcuguccaacgaggggaucaucaacagcgaggacgagcaccuccuggcccuggagcggaagcucaagaagaugcugggccccuccgccaucgagaucgggaacggcugcuucgagaccaagcacaagugcaaccagaccugccuggaccgcaucgccgcggggaccuucgacgccggcgaguucagccuccccaccuucgacucccugaacaucacggccgccagccugaacgacgacggccucgacaaccacaccauccugcuguacuacuccaccgccgcgagcucccuggccgucacccucaugaucgccaucuucgugguguacauggucagccgggacaacguguccugcagcaucugccuguga

SEQ ID NO: 91143 - RNA, 1758 nt, Artificial Sequence; identical to SEQ ID NO: 91003
  derived and/or modified CDS sequence (opt1) from hemagglutinin__InfluenzaB__AGX17226

SEQ ID NO: 91144 - RNA, 1758 nt, Artificial Sequence
  derived and/or modified CDS sequence (opt1) from hemagglutinin__InfluenzaB__AGX17237
augaaggccaucaucgugcugcucauggucgugaccagcaacgccgaccgcaucugcaccggcaucacguccagcaacagcccccacguggucaagaccgcgacccagggggaggugaacgugaccggcgucaucccgcugacgaccacccccaccaagagccacuucgccaaccugaaggggacgaagacccggggcaagcucugccccaagugccugaacugcaccgaccuggacguggcccucgggcgccccaagugcaccggcaacaucccguccgccaaggugagcauccugcacgagguccggcccgugacguccggcugcuuccccaucaugcacgaccgcaccaagauccggcagcugcccaaccuccugcgcggguacgagcacauccggcugagcacccacaacgugaucaacgccgagaaggcgccgggcgggcccuacaagaucggcaccuccgggagcugccccaacaucacgaacggcaacggcuucuucgccaccauggccugggccguccccaagaacgacaacaacaagaccgcgaccaacucccucacgaucgaggugccguacaucugcaccgagggggaggaccagaucaccguguggggcuuccacagcgacaacgagauccagauggccaagcuguacggggacuccaagccccagaaguucaccagcuccgccaacggcgucacgacccacuacgugagccagaucggcggguuccccaaccagaccgaggacggcgggcugccccaguccggccgcaucguggucgacuacauggugcagaaguccgggaagaccggcacgaucaccuaccagcggggcauccuccugccgcagaagguguggugcgccuccgggcgcagcaaggucaucaagggcagccugccccucaucggggaggccgacugccugcacgagaaguacggcgggcugaacaaguccaagcccuacuacaccggcgagcacgcgaaggccaucggcaacugccccaucugggugaagaccccgcucaagcuggccaacgggacgaaguaccggccgcccgccaagcugcucaaggagcgcggcuucuucggggccaucgcgggcuuccuggagggcgggugggagggcaugaucgccggguggcacggcuacaccagccacggggcccacggcguggccgucgccgcggaccugaaguccacccaggaggccaucaacaagaucaccaagaaccucaacagccuguccgagcuggaggugaagaaccuccagcggcugagcggcgccauggacgagcugcacaacgagauccucgagcuggacgagaaggucgacgaccugcgcgccgacacgaucuccagccagaucgagcucgccgugcugcuguccaacgaggggaucaucaacagcgaggacgagcaccuccuggcgcuggagcggaagcucaagaagaugcugggccccuccgccguggagaucgggaacggcugcuucgagaccaagcacaagugcaaccagaccugccuggaccgcaucgccgccgggaccuucgacgcgggcgaguucagccuccccaccuucgacucccugaacaucacggccgccagccugaacgacgacggccucgacaaccacaccauccugcuguacuacuccaccgccgccagcucccuggcggucacccucaugaucgccaucuucgugguguacauggucagccgggacaacguguccugcagcaucugccuguga

SEQ ID NO: 91145 - RNA, 1758 nt, Artificial Sequence
  derived and/or modified CDS sequence (opt1) from hemagglutinin__InfluenzaB__AGX17248
augaaggccaucaucgugcugcucauggucgugaccagcaacgccgaccgcaucugcaccggcaucacguccagcaacagcccccacguggucaagaccgcgacccagggggaggugaacgugaccggcgucaucccgcugacgaccacccccaccaagagccacuucgccaaccugaaggggacgaagacccggggcaagcucugccccaagugccugaacugcaccgaccuggacguggcccucgggcgccccaagugcaccggcaacaucccguccgccaaggugagcauccugcacgagguccggcccgugacguccggcugcuuccccaucaugcacgaccgcaccaagauccggcagcugcccaaccuccugcgcggguacgagcacauccggcugagcacccacaacgugaucaacgccgagaaggcgccgggcgggcccuacaagaucggcaccuccgggagcugccccaacgucacgaacggcaacggcuucuucgccaccauggccugggccgugcccaagaacgacaacaacaagaccgcgaccaacucccucacgaucgaggugccguacaucugcaccgagggggaggaccagaucaccgucuggggcuuccacagcgacaacgagacccagauggccaagcuguacggggacuccaagccccagaaguucacgagcuccgccaacggcgugaccacccacuacgugagccagaucggcggguuccccaaccagaccgaggacggcgggcugccccaguccggccgcaucgucguggacuacauggugcagaaguccgggaagacgggcaccaucaccuaccagcggggcauccuccugccgcagaaggucuggugcaccuccgggcgcagcaaggugaucaagggcagccugccccucaucggggaggccgacugccugcacgagaaguacggcgggcugaacaaguccaagcccuacuacacgggcgagcacgccaaggcgaucggcaacugccccaucugggugaagaccccgcucaagcuggccaacgggaccaaguaccggccgcccgccaagcugcucaaggagcgcggcuucuucggggccaucgccggcuuccuggagggcgggugggagggcaugaucgcgggguggcacggcuacaccagccacggggcccacggcgucgccguggccgccgaccugaaguccacgcaggaggcgaucaacaagaucaccaagaaccucaacagccuguccgagcuggaggucaagaaccuccagcggcugagcggcgccauggacgagcugcacaacgagauccucgagcuggacgagaagguggacgaccugcgcgccgacaccaucuccagccagaucgagcucgccgugcugcuguccaacgaggggaucaucaacagcgaggacgagcaccuccuggcccuggagcggaagcucaagaagaugcugggccccuccgcggucgagaucgggaacggcugcuucgagaccaagcacaagugcaaccagaccugccuggaccgcaucgccgccgggacguucgacgccggcgaguucagccuccccaccuucgacucccugaacaucaccgcggccagccugaacgacgacggccucgacaaccacaccauccugcuguacuacuccacggccgccagcucccuggccgugacccucaugaucgcgaucuucguggucuacauggugagccgggacaacguguccugcagcaucugccuguga

SEQ ID NO: 91146 - RNA, 1758 nt, Artificial Sequence; identical to SEQ ID NO: 91087
  derived and/or modified CDS sequence (opt1) from hemagglutinin__InfluenzaB__AGX17270

SEQ ID NO: 91147 - RNA, 1758 nt, Artificial Sequence; identical to SEQ ID NO: 91003
  derived and/or modified CDS sequence (opt1) from hemagglutinin__InfluenzaB__AGX17281

SEQ ID NO: 91148 - RNA, 1758 nt, Artificial Sequence; identical to SEQ ID NO: 91003
  derived and/or modified CDS sequence (opt1) from hemagglutinin__InfluenzaB__AGX17292

SEQ ID NO: 91149 - RNA, 1758 nt, Artificial Sequence; identical to SEQ ID NO: 91003
  derived and/or modified CDS sequence (opt1) from hemagglutinin__InfluenzaB__AGX17303

SEQ ID NO: 91150 - RNA, 1758 nt, Artificial Sequence; identical to SEQ ID NO: 91129
  derived and/or modified CDS sequence (opt1) from hemagglutinin__InfluenzaB__AGX17314

SEQ ID NO: 91151 - RNA, 1758 nt, Artificial Sequence; identical to SEQ ID NO: 91003
  derived and/or modified CDS sequence (opt1) from hemagglutinin__InfluenzaB__AGX17325

SEQ ID NO: 91152 - RNA, 1758 nt, Artificial Sequence; identical to SEQ ID NO: 91114
  derived and/or modified CDS sequence (opt1) from hemagglutinin__InfluenzaB__AGX17336

SEQ ID NO: 91153 - RNA, 1758 nt, Artificial Sequence; identical to SEQ ID NO: 91003
  derived and/or modified CDS sequence (opt1) from hemagglutinin__InfluenzaB__AGX17347

SEQ ID NO: 91154 - RNA, 1758 nt, Artificial Sequence; identical to SEQ ID NO: 91003
  derived and/or modified CDS sequence (opt1) from hemagglutinin__InfluenzaB__AGX17358

SEQ ID NO: 91155 - RNA, 1758 nt, Artificial Sequence
  derived and/or modified CDS sequence (opt1) from hemagglutinin__InfluenzaB__AGX17369
augaaggccaucaucgugcugcucauggucgugaccagcaacgccgaccgcaucugcaccggcaucacguccagcaacagcccccacguggucaagaccgcgacccagggggaggugaacgugaccggcgucaucccgcugacgaccacccccaccaagagccacuucgccaaccugaaggggacgaagacccggggcaagcucugccccaagugccugaacugcaccgaccuggacguggcccucgggcgccccaagugcaccggcaacaucccguccgccaaggugagcauccugcacgagguccggcccgugacguccggcugcuuccccaucaugcacgaccgcaccaagauccggcagcugcccaaccuccugcgcggguacgagcacauccggcugagcacccacaacgugaucaacgccgagaaggcgccgggcgggcccuacaagaucggcaccuccgggagcugccccaacgucacgaacggcaacggcuucuucgccaccauggccugggccgugcccaagaacgacaacaacaagaccgcgaccaacucccucacgaucgaggugccguacaucugcaccgagggggaggaccagaucaccgucuggggcuuccacagcgacaacgagacccagauggccaagcuguacggggacuccaagccccagaaguucacgagcuccgccaacggcgugaccacccacuacgugagccagaucggcggguuccccaaccagaccgaggacggcgggcugccccaguccggccgcaucgucgccgacuacauggugcagaaguccgggaagacgggcaccaucaccuaccagcggggcauccuccugccgcagaagguguggugcgccuccgggcgcagcaaggucaucaagggcagccugccccucaucggggaggcggacugccugcacgagaaguacggcgggcugaacaaguccaagcccuacuacaccggcgagcacgccaaggccaucggcaacugccccaucugggugaagacgccgcucaagcuggccaacgggaccaaguaccggccgcccgccaagcugcucaaggagcgcggcuucuucggggcgaucgccggcuuccuggagggcgggugggagggcaugaucgccggguggcacggcuacaccagccacggggcccacggcguggccgucgcggccgaccugaaguccacccaggaggccaucaacaagaucacgaagaaccucaacagccuguccgagcuggaggugaagaaccuccagcggcugagcggcgccauggacgagcugcacaacgagauccucgagcuggacgagaaggucgacgaccugcgcgccgacaccaucuccagccagaucgagcucgcggugcugcuguccaacgaggggaucaucaacagcgaggacgagcaccuccuggcccuggagcggaagcucaagaagaugcugggccccuccgccguggagaucgggaacggcugcuucgagaccaagcacaagugcaaccagaccugccuggaccgcaucgccgcggggaccuucgacgccggcgaguucagccuccccacguucgacucccugaacaucaccgccgccagccugaacgacgacggccucgacaaccacaccauccugcuguacuacuccaccgccgcgagcucccuggccgucacgcucaugaucgccaucuucgugguguacauggucagccgggacaacguguccugcagcaucugccuguga

SEQ ID NO: 91156 - RNA, 1758 nt, Artificial Sequence; identical to SEQ ID NO: 91129
  derived and/or modified CDS sequence (opt1) from hemagglutinin__InfluenzaB__AGX17380

SEQ ID NO: 91157 - RNA, 1758 nt, Artificial Sequence; identical to SEQ ID NO: 91003
  derived and/or modified CDS sequence (opt1) from hemagglutinin__InfluenzaB__AGX17391

SEQ ID NO: 91158 - RNA, 1758 nt, Artificial Sequence
  derived and/or modified CDS sequence (opt1) from hemagglutinin__InfluenzaB__AGX17400
augaaggccaucaucgugcugcucauggucgugaccagcaacgccgaccgcaucugcaccggcaucacguccagcaacagcccccacauggugaagaccgcgacccagggggaggucaacgugaccggcgugaucccgcugacgaccacccccaccaagagccacuucgccaaccugaaggggacgaagacccggggcaagcucugccccaagugccugaacugcaccgaccuggacgucgcccucgggcgccccaagugcaccggcaacaucccguccgccaaggugagcauccugcacgaggugcggcccgucacguccggcugcuuccccaucaugcacgaccgcaccaagauccggcagcugcccaaccuccugcgcggguacgagcacauccggcugagcacccacaacgugaucaacgccgagaaggcgccgggcgggcccuacaagaucggcaccuccgggagcugccccaacgugacgaacggcaacggcuucuucgccaccauggccugggccguccccaagaacgacaacaacaagaccgcgaccaacucccucacgaucgaggugccguacaucugcaccgagggggaggaccagaucaccguguggggcuuccacagcgacaacgagacccagauggccaagcuguacggggacuccaagccccagaaguucacgagcuccgccaacggcgucaccacccacuacgugagccagaucggcggguuccccaaccagaccgaggacggcgggcugccccaguccggccgcaucguggucgacuacauggugcagaaguccgggaagacgggcaccaucaccuaccagcggggcauccuccugccgcagaagguguggugcgccuccgggcgcagcaaggucaucaagggcagccugccccucaucggggaggccgacugccugcacgagaaguacggcgggcugaacaaguccaagcccuacuacaccggcgagcacgcgaaggccaucggcaacugccccaucugggugaagacgccgcucaagcuggccaacgggaccaaguaccggccgcccgccaagcugcucaaggagcgcggcuucuucggggccaucgcgggcuuccuggagggcgggugggagggcaugaucgccggguggcacggcuacaccagccacggggcccacggcguggccgucgccgcggaccugaaguccacccaggaggccaucaacaagaucacgaagaaccucaacagccuguccgagcuggaggugaagaaccuccagcggcugagcggcgccauggacgagcugcacaacgagauccucgagcuggacgagaaggucgacgaccugcgcgccgacaccaucuccagccagaucgagcucgccgugcugcuguccaacgaggggaucaucaacagcgaggacgagcaccuccuggcgcuggagcggaagcucaagaagaugcugggccccuccgccguggagaucgggaacggcugcuucgagaccaagcacaagugcaaccagaccugccuggaccgcaucgccgccgggaccuucgacgcgggcgaguucagccuccccacguucgacucccugaacaucaccgccgccagccugaacgacgacggccucgacaaccacaccauccugcuguacuacuccaccgccgccagcucccuggcggucacgcucaugaucgccaucuucgugguguacauggucagccgggacaacguguccugcagcaucugccuguga

SEQ ID NO: 91159 - RNA, 1758 nt, Artificial Sequence; identical to SEQ ID NO: 91003
  derived and/or modified CDS sequence (opt1) from hemagglutinin__InfluenzaB__AGX17411

SEQ ID NO: 91160 - RNA, 1758 nt, Artificial Sequence; identical to SEQ ID NO: 91003
  derived and/or modified CDS sequence (opt1) from hemagglutinin__InfluenzaB__AGX17422

SEQ ID NO: 91161 - RNA, 1758 nt, Artificial Sequence; identical to SEQ ID NO: 91086
  derived and/or modified CDS sequence (opt1) from hemagglutinin__InfluenzaB__AGX17433

SEQ ID NO: 91162 - RNA, 1758 nt, Artificial Sequence; identical to SEQ ID NO: 91003
  derived and/or modified CDS sequence (opt1) from hemagglutinin__InfluenzaB__AGX17444

SEQ ID NO: 91163 - RNA, 1758 nt, Artificial Sequence; identical to SEQ ID NO: 91086
  derived and/or modified CDS sequence (opt1) from hemagglutinin__InfluenzaB__AGX17455

SEQ ID NO: 91164 - RNA, 1758 nt, Artificial Sequence; identical to SEQ ID NO: 91129
  derived and/or modified CDS sequence (opt1) from hemagglutinin__InfluenzaB__AGX17466

SEQ ID NO: 91165 - RNA, 1758 nt, Artificial Sequence; identical to SEQ ID NO: 91003
  derived and/or modified CDS sequence (opt1) from hemagglutinin__InfluenzaB__AGX17477

SEQ ID NO: 91166 - RNA, 1758 nt, Artificial Sequence; identical to SEQ ID NO: 91088
  derived and/or modified CDS sequence (opt1) from hemagglutinin__InfluenzaB__AGX17488

SEQ ID NO: 91167 - RNA, 1758 nt, Artificial Sequence; identical to SEQ ID NO: 91003
  derived and/or modified CDS sequence (opt1) from hemagglutinin__InfluenzaB__AGX17499

SEQ ID NO: 91168 - RNA, 1758 nt, Artificial Sequence; identical to SEQ ID NO: 91129
  derived and/or modified CDS sequence (opt1) from hemagglutinin__InfluenzaB__AGX17510

SEQ ID NO: 91169 - RNA, 1758 nt, Artificial Sequence; identical to SEQ ID NO: 91129
  derived and/or modified CDS sequence (opt1) from hemagglutinin__InfluenzaB__AGX17521

SEQ ID NO: 91170 - RNA, 1758 nt, Artificial Sequence; identical to SEQ ID NO: 91131
  derived and/or modified CDS sequence (opt1) from hemagglutinin__InfluenzaB__AGX17532

SEQ ID NO: 91171 - RNA, 1758 nt, Artificial Sequence
  derived and/or modified CDS sequence (opt1) from hemagglutinin__InfluenzaB__AGX17543
augaaggccaucaucgugcugcucauggucgugaccagcaacgccgaccgcaucugcaccggcaucacguccagcaacagcccccacguggucaagaccgcgacccagggggaggugaacgugaccggcgucaucccgcugacgaccacccccaccaagagccacuucgccucccugaaggggacgaagacccggggcaagcucugccccaagugccugaacugcaccgaccuggacguggcccucgggcgccccaagugcaccggcaacaucccgagcgccaagguguccauccugcacgagguccggcccgugacgagcggcugcuuccccaucaugcacgaccgcaccaagauccggcagcugcccaaccuccugcgcggguacgagcacauccggcuguccacccacaacgugaucaacgccgagaaggcgccgggcgggcccuacaagaucggcaccagcggguccugccccaacgucacgaacggcaacggcuucuucgccaccauggccugggccgugcccaagaacgacaacaacaagaccgcgaccaacagccucacgaucgaggugccguacaucugcaccgagggggaggaccagaucaccgucuggggcuuccacuccgacaacgagacccagauggccaagcuguacggggacagcaagccccagaaguucacguccagcgccaacggcgugaccacccacuacgugucccagaucggcggguuccccaaccagaccgaggacggcgggcugccccagagcggccgcaucgucguggacuacauggugcagaaguccgggaagacgggcaccaucaccuaccagcggggcauccuccugccgcagaaggucuggugcgccagcgggcgcagcaaggugaucaagggcucccugccccucaucggggaggccgacugccugcacgagaaguacggcgggcugaacaagagcaagcccuacuacaccggcgagcacgcgaaggccaucggcaacugccccaucugggugaagacgccgcucaagcuggccaacgggaccaaguaccggccgcccgccaagcugcucaaggagcgcggcuucuucggggccaucgcgggcuuccuggagggcgggugggagggcaugaucgccggguggcacggcuacaccucccacggggcccacggcgucgccguggccgcggaccugaaguccacccaggaggccaucaacaagaucacgaagaaccucaacucccugagcgagcuggaggucaagaaccuccagcggcuguccggcgccaugaacgagcugcacaacgagauccucgagcuggacgagaagguggacgaccugcgcgccgacaccaucagcucccagaucgagcucgccgugcugcugagcaacgaggggaucaucaacuccgaggacgagcaccuccuggcgcuggagcggaagcucaagaagaugcugggccccagcgccgucgagaucgggaacggcugcuucgagaccaagcacaagugcaaccagaccugccuggaccgcaucgccgccgggaccuucgacgcgggcgaguucucccuccccacguucgacagccugaacaucaccgccgccucccugaacgacgacggccucgacaaccacaccauccugcuguacuacagcaccgccgccuccagccuggcggugacgcucaugaucgccaucuucguggucuacauggugucccgggacaacgugagcugcagcaucugccuguga

SEQ ID NO: 91172 - RNA, 1758 nt, Artificial Sequence
  derived and/or modified CDS sequence (opt1) from hemagglutinin__InfluenzaB__AGX17554
augaaggccaucaucgugcugcuccuggucgugaccagcaacgccgaccgcaucugcaccggcaucacguccagcaacagcccccacguggucaagaccgcgacccagggggaggugaacgugaccggcgucaucccgcugacgaccacccccaccaagagccacuucgccaaccucaaggggacgaagacccggggcaagcugugccccaagugccugaacugcaccgaccucgacguggcccuggggcgccccaagugcaccggcaacaucccguccgccaaggugagcauccugcacgagguccggcccgugacguccggcugcuuccccaucaugcacgaccgcaccaagauccggcagcuccccaaccugcugcgcggguacgagcacauccggcucagcacccacaacgugaucaacgccgagaaggcgccgggcgggcccuacaagaucggcaccuccgggagcugccccaacgucacgaacggcaacggcuucuucgccaccauggccugggccgugcccaagaacgacaacaacaagaccgcgaccaacucccugacgaucgaggugccguacaucugcaccgagggggaggaccagaucaccgucuggggcuuccacagcgacaacgagacccagauggccaagcuguacggggacuccaagccccagaaguucacgagcuccgccaacggcgugaccacccacuacgugagccagaucggcggguuccccaaccagaccgaggacggcgggcucccccaguccggccgcaucgucguggacuacauggugcagaaguccgggaagacgggcaccaucaccuaccagcggggcauccugcugccgcagaaggucuggugcgccuccgggcgcagcaaggugaucaagggcagccucccccugaucggggaggccgacugccugcacgagaaguacggcgggcucaacaaguccaagcccuacuacaccggcgagcacgcgaaggccaucggcaacugccccaucugggugaagacgccgcugaagcuggccaacgggaccaaguaccggccgcccgccaagcuccugaaggagcgcggcuucuucggggccaucgcgggcuuccuggagggcgggugggagggcaugaucgccggguggcacggcuacaccagccacggggcccacggcgucgccguggccgcggaccucaaguccacccaggaggccaucaacaagaucacgaagaaccugaacagccuguccgagcucgaggucaagaaccugcagcggcugagcggcgccauggacgagcuccacaacgagauccuggagcuggacgagaagguggacgaccuccgcgccgacaccaucuccagccagaucgagcuggccgugcugcucuccaacgaggggaucaucaacagcgaggacgagcaccuccuggcgcuggagcggaagcugaagaagaugcugggccccuccgccgucgagaucgggaacggcugcuucgagaccaagcacaagugcaaccagaccugccucgaccgcaucgccgccgggaccuucgacgcgggcgaguucagccugcccacguucgacucccugaacaucaccgccgccagccucaacgacgacggccuggacaaccacaccauccugcuguacuacuccaccgccgccagcucccucgcggugacgcugaugaucgccaucuucguggucuacauggugagccgggacaacguguccugcagcaucugccuguga

SEQ ID NO: 91173 - RNA, 1755 nt, Artificial Sequence; identical to SEQ ID NO: 91047
  derived and/or modified CDS sequence (opt1) from hemagglutinin__InfluenzaB__AGX17565

SEQ ID NO: 91174 - RNA, 1758 nt, Artificial Sequence
  derived and/or modified CDS sequence (opt1) from hemagglutinin__InfluenzaB__AGX17576
augaaggccaucaucgugcugcucauggucgugaccagcaacgccgaccgcaucugcaccggcaucacguccagcaacagcccccacguggucaagaccgcgacccagggggaggugaacgugaccggcgucaucccgcugacgaccacccccaccaagagccacuucgccaaccugaaggggacgaagacccggggcaagcucugccccaagugccugaacugcaccgaccuggacguggcccucgggcgccccaagugcaccggcaacaucccguccgccgaggugagcauccugcacgagguccggcccgugacguccggcugcuuccccaucaugcacgaccgcaccaagauccggcagcugcccaaccuccugcgcggguacgagcacauccggcugagcacccacaacgugaucaacgccgagaaggcgccgggcgggcccuacaagaucggcaccuccgggagcugccccaacgucacgaacggcaacggcuucuucgccaccauggccugggccgugcccaagaacgacaacaacaagaccgcgaccaacucccucacgaucgaggugccguacaucugcaccgagggggaggaccagaucaccaucuggggcuuccacagcgacaacgagacccagauggccaagcuguacggggacuccaagccccagaaguucacgagcuccgccaacggcgucaccacccacuacgugagccagaucggcggguuccccaaccagaccgaggacggcgggcugccccaguccggccgcaucguggucgacuacauggugcagaaguccgggaagacgggcaccaucaccuaccagcggggcauccuccugccgcagaagguguggugcgccuccgggcgcagcaaggucaucaagggcagccugccccucaucggggaggccgacugccugcacgagaaguacggcgggcugaacaaguccaagcccuacuacaccggcgagcacgcgaaggccaucggcaacugccccaucugggugaagacgccgcucaagcuggccaacgggaccaaguaccggccgcccgccaagcugcucaaggagcgcggcuucuucggggccaucgcgggcuuccuggagggcgggugggagggcaugaucgccggguggcacggcuacaccagccacggggcccacggcguggccgucgccgcggaccugaaguccacccaggaggccaucaacaagaucacgaagaaccucaacagccuguccgagcuggaggugaagaaccuccagcggcugagcggcgccauggacgagcugcacaacgagauccucgagcuggacgagaaggucgacgaccugcgcgccgacaccaucuccagccagaucgagcucgccgugcugcuguccaacgaggggaucaucaacagcgaggacgagcaccuccuggcgcuggagcggaagcucaagaagaugcugggccccuccgccguggagaucgggaacggcugcuucgagaccaagcacaagugcaaccagaccugccuggaccgcaucgccgccgggaccuucgacgcgggcgaguucagccuccccacguucgacucccugaacaucaccgccgccagccugaacgacgacggccucgacaaccacaccauccugcuguacuacuccaccgccgccagcucccuggcggucacgcucaugauggccaucuucgugguguacauggucagccgggacaacguguccugcagcaucugccuguga

SEQ ID NO: 91175 - RNA, 1758 nt, Artificial Sequence; identical to SEQ ID NO: 90538
  derived and/or modified CDS sequence (opt1) from hemagglutinin__InfluenzaB__AGX17598

SEQ ID NO: 91176 - RNA, 1758 nt, Artificial Sequence
  derived and/or modified CDS sequence (opt1) from hemagglutinin__InfluenzaB__AGX17609
augaaggccaucaucgugcugcucauggucgugaccagcaacgccgaccgcaucugcaccggcaucacguccagcaacagcccccacguggucaagaccgcgacccagggggaggugaacgugaccggcgucaucccgcugacgaccacccccaccaagagccacuucgccaaccugaaggggacggagacccggggcaagcucugccccaagugccugaacugcaccgaccuggacguggcccucgggcgccccaagugcaccggcaagaucccguccgcccgggugagcauccugcacgagguccgccccgugacguccggcugcuuccccaucaugcacgaccggaccaagauccgccagcugcccaaccuccugcggggguacgagcacauccgccugagcacccacaacgugaucaacgccgagaacgcgccgggcgggcccuacaagaucggcaccuccgggagcugccccaacgucacgaacggcaacggcuucuucgccaccauggccugggccgugcccaagaacgacaacaacaagaccgcgaccaacucccucacgaucgaggugccguacaucugcaccgagggggaggaccagaucaccgucuggggcuuccacagcgacaacgagacccagauggccaagcuguacggggacuccaagccccagaaguucacgagcuccgccaacggcgugaccacccacuacgugagccagaucggcggguuccccaaccagaccgaggacggcgggcugccccaguccggccggaucgucguggacuacauggugcagaaguccgggaagacgggcaccaucaccuaccagcgcggcauccuccugccgcagaaggucuggugcgccuccgggcggagcaaggugaucaagggcagccugccccucaucggggaggccgacugccugcacgagaaguacggcgggcugaacaaguccaagcccuacuacaccggcgagcacgcgaaggccaucggcaacugccccaucugggugaagacgccgcucaagcuggccaacgggaccaaguaccgcccgcccgccaagcugcucaaggagcggggcuucuucggggccaucgcgggcuuccuggagggcgggugggagggcaugaucgccggguggcacggcuacaccagccacggggcccacggcgucgccguggccgcggaccugaaguccacccaggaggccaucaacaagaucacgaagaaccucaacagccuguccgagcuggaggucaagaaccuccagcgccugagcggcgccauggacgagcugcacaacgagauccucgagcuggacgagaagguggacgaccugcgggccgacaccaucuccagccagaucgagcucgccgugcugcuguccaacgaggggaucaucaacagcgaggacgagcaccuccuggcgcuggagcgcaagcucaagaagaugcugggccccuccgccgucgagaucgggaacggcugcuucgagaccaagcacaagugcaaccagaccugccuggaccggaucgccgccgggaccuucgacgcgggcgaguucagccuccccacguucgacucccugaacaucaccgccgccagccugaacgacgacggccucgacaaccacaccauccugcuguacuacuccaccgccgccagcucccuggcggugacgcucaugaucgccaucuucguggucuacauggugagccgcgacaacguguccugcagcaucugccuguga

SEQ ID NO: 91177 - RNA, 1758 nt, Artificial Sequence; identical to SEQ ID NO: 91005
  derived and/or modified CDS sequence (opt1) from hemagglutinin__InfluenzaB__AGX17620

SEQ ID NO: 91178 - RNA, 1758 nt, Artificial Sequence; identical to SEQ ID NO: 90538
  derived and/or modified CDS sequence (opt1) from hemagglutinin__InfluenzaB__AGX17631

SEQ ID NO: 91179 - RNA, 1758 nt, Artificial Sequence; identical to SEQ ID NO: 90662
  derived and/or modified CDS sequence (opt1) from hemagglutinin__InfluenzaB__AGX17642

SEQ ID NO: 91180 - RNA, 1758 nt, Artificial Sequence; identical to SEQ ID NO: 91005
  derived and/or modified CDS sequence (opt1) from hemagglutinin__InfluenzaB__AGX17653

SEQ ID NO: 91181 - RNA, 1758 nt, Artificial Sequence; identical to SEQ ID NO: 90538
  derived and/or modified CDS sequence (opt1) from hemagglutinin__InfluenzaB__AGX17664

SEQ ID NO: 91182 - RNA, 1758 nt, Artificial Sequence; identical to SEQ ID NO: 90662
  derived and/or modified CDS sequence (opt1) from hemagglutinin__InfluenzaB__AGX17675

SEQ ID NO: 91183 - RNA, 1758 nt, Artificial Sequence; identical to SEQ ID NO: 91005
  derived and/or modified CDS sequence (opt1) from hemagglutinin__InfluenzaB__AGX17686

SEQ ID NO: 91184 - RNA, 1758 nt, Artificial Sequence
  derived and/or modified CDS sequence (opt1) from hemagglutinin__InfluenzaB__AGX17697
augaaggccaucaucgugcugcucauggucgugaccagcaacgccgaccgcaucugcaccggcaucacguccagcaacagcccccacguggucaagaccgcgacccagggggaggugaacgugaccggcgucaucccgcugacgaccacccccaccaagagccacuucgccaaccugaaggggacggagacccggggcaagcucugccccaagugccugaacugcaccgaccuggacguggcccucgggcgccccaagugcaccggcgagaucccguccgcccgggugagcauccugcacgagguccgccccgugacguccggcugcuuccccaucaugcacgaccggaccaagauccgccagcugcccaaccuccugcggggguacgagcacauccgccugagcacccacaacgccaucaacgcggagaacgccccgggcgggcccuacaagaucggcaccuccgggagcugccccaacgugacgaacggcaacggcuucuucgccaccauggccugggcgguccccaagaacgacaacaacaagaccgccaccaacucccucacgaucgaggugccguacaucugcaccgagggggaggaccagaucaccguguggggcuuccacagcgacaacgagacccagauggccaagcuguacggggacuccaagccccagaaguucacgagcuccgccaacggcgucaccacccacuacgugagccagaucggcggguuccccaaccagaccgaggacggcgggcugccccaguccggccggaucguggucgacuacauggugcagaaguccgggaagacgggcaccaucaccuaccagcgcggcauccuccugccgcagaagguguggugcgccuccgggcggagcaaggucaucaagggcagccugccccucaucggggaggcggacugccugcacgagaaguacggcgggcugaacaaguccaagcccuacuacaccggcgagcacgccaaggccaucggcaacugccccaucugggugaagacgccgcucaagcuggccaacgggaccaaguaccgcccgcccgccaagcugcucaaggagcggggcuucuucggggcgaucgccggcuuccuggagggcgggugggagggcaugaucgccggguggcacggcuacaccagccacggggcccacggcguggccgucgcggccgaccugaaguccacccaggaggccaucaacaagaucacgaagaaccucaacagccuguccgagcuggaggugaagaaccuccagcgccugagcggcgccauggacgagcugcacaacgagauccucgagcuggacgagaaggucgacgaccugcgggccgacaccaucuccagccagaucgagcucgcggugcugcuguccaacgaggggaucaucaacagcgaggacgagcaccuccuggcccuggagcgcaagcucaagaagaugcugggccccuccgccguggagaucgggaacggcugcuucgagaccaagcacaagugcaaccagaccugccuggaccggaucgccgcggggaccuucgacgccggcgaguucagccuccccacguucgacucccugaacaucaccgccgccagccugaacgacgacggccucgacaaccacaccauccugcuguacuacuccaccgccgcgagcucccuggccgucacgcucaugaucgccaucuucgugguguacauggucagccgcgacaacguguccugcagcaucugccuguga

SEQ ID NO: 91185 - RNA, 1758 nt, Artificial Sequence; identical to SEQ ID NO: 90662
  derived and/or modified CDS sequence (opt1) from hemagglutinin__InfluenzaB__AGX17708

SEQ ID NO: 91186 - RNA, 1758 nt, Artificial Sequence; identical to SEQ ID NO: 91005
  derived and/or modified CDS sequence (opt1) from hemagglutinin__InfluenzaB__AGX17719

SEQ ID NO: 91187 - RNA, 1758 nt, Artificial Sequence; identical to SEQ ID NO: 90662
  derived and/or modified CDS sequence (opt1) from hemagglutinin__InfluenzaB__AGX17730

SEQ ID NO: 91188 - RNA, 1758 nt, Artificial Sequence; identical to SEQ ID NO: 90538
  derived and/or modified CDS sequence (opt1) from hemagglutinin__InfluenzaB__AGX17741

SEQ ID NO: 91189 - RNA, 1758 nt, Artificial Sequence; identical to SEQ ID NO: 91005
  derived and/or modified CDS sequence (opt1) from hemagglutinin__InfluenzaB__AGX17752

SEQ ID NO: 91190 - RNA, 1758 nt, Artificial Sequence; identical to SEQ ID NO: 91005
  derived and/or modified CDS sequence (opt1) from hemagglutinin__InfluenzaB__AGX17774

SEQ ID NO: 91191 - RNA, 1758 nt, Artificial Sequence
  derived and/or modified CDS sequence (opt1) from hemagglutinin__InfluenzaB__AGX17785
augaaggccaucaucgugcugcucauggucgugaccagcaacgccgaccgcaucugcaccggcaucacguccagcaacagcccccacguggucaagaccgcgacccagggggaggugaacgugaccggcgucaucccgcugacgaccacccccaccaagagccacuucgccaaccugaaggggacgaagacccggggcaagcucugccccaagugccugaacugcaccgaccuggacguggcccucgggcgccccaagugcaccggcaacaucccguccgccgaggugagcauccugcacgagguccggcccgugacguccggcugcuuccccaucaugcacgaccgcaccaagauccggcagcugcccaaccuccugcgcggguacgagcacgugcggcugagcacccacaacgucaucaacgccgagaaggcgccgggcgggcccuacaagaucggcaccuccgggagcugccccaacgugacgaacggcaacggcuucuucgccaccauggccugggccgugcccaagaacgacaacaacaagaccgcgaccaacucccucacgaucgaggucccguacaucugcaccgagggggaggaccagaucaccaucuggggcuuccacagcgacaacgagacccagauggccaagcuguacggggacuccaagccccagaaguucacgagcuccgccaacggcgugaccacccacuacgugagccagaucggcggguuccccaaccagaccgaggacggcgggcugccccaguccggccgcaucgucguggacuacauggugcagaaguccgggaagacgggcaccaucaccuaccagcggggcauccuccugccgcagaaggucuggugcgccuccgggcgcagcaaggugaucaagggcagccugccccucaucggggaggccgacugccugcacgagaaguacggcgggcugaacaaguccaagcccuacuacaccggcgagcacgcgaaggccaucggcaacugccccaucugggugaagacgccgcucaagcuggccaacgggaccaaguaccggccgcccgccaagcugcucaaggagcgcggcuucuucggggccaucgcgggcuuccuggagggcgggugggagggcaugaucgccggguggcacggcuacaccagccacggggcccacggcgucgccguggccgcggaccugaaguccacccaggaggccaucaacaagaucacgaagaaccucaacagccuguccgagcuggaggucaagaaccuccagcggcugagcggcgccauggacgagcugcacaacgagauccucgagcuggacgagaagguggacgaccugcgcgccgacaccaucuccagccagaucgagcucgccgugcugcuguccaacgaggggaucaucaacagcgaggacgagcaccuccuggcgcuggagcggaagcucaagaagaugcugggccccuccgccgucgagaucgggaacggcugcuucgagaccaagcacaagugcaaccagaccugccuggaccgcaucgccgccgggaccuucgacgcgggcgaguucagccuccccacguucgacucccugaacaucaccgccgccagccugaacgacgacggccucgacaaccacaccauccugcuguacuacuccaccgccgccagcucccuggcggugacgcucaugaucgccaucuucguggucuacauggugagccgggacaacguguccugcagcaucugccuguga

SEQ ID NO: 91192 - RNA, 1758 nt, Artificial Sequence; identical to SEQ ID NO: 91005
  derived and/or modified CDS sequence (opt1) from hemagglutinin__InfluenzaB__AGX17796

SEQ ID NO: 91193 - RNA, 1758 nt, Artificial Sequence; identical to SEQ ID NO: 90589
  derived and/or modified CDS sequence (opt1) from hemagglutinin__InfluenzaB__AGX17807

SEQ ID NO: 91194 - RNA, 1758 nt, Artificial Sequence; identical to SEQ ID NO: 91176
  derived and/or modified CDS sequence (opt1) from hemagglutinin__InfluenzaB__AGX17818

SEQ ID NO: 91195 - RNA, 1758 nt, Artificial Sequence
  derived and/or modified CDS sequence (opt1) from hemagglutinin__InfluenzaB__AGX17829
augaaggccaucaucgugcugcucauggucgugaccagcaacgccgaccgcaucugcaccggcaucacguccagcaacagcccccacguggucaagaccgcgacccagggggaggugaacgugaccggcgucaucccgcugacgaccacccccaccaagagccacuucgccaaccugaaggggacggagacccggggcaagcucugccccaagugccugaacugcaccgaccuggacguggcccucgggcgccccaagugcaccggcaagaucccguccgcccgggugagcauccugcacgagguccgccccgugacguccggcugcuuccccaucaugcacgaccggaccaagauccgccagcugcccaaccuccugcggggguacgagcacauccgccugagcacccacaacgugaucaacgccgagaacgcgccgggcgggcccuacaagaucggcaccuccgggagcugccccaacgucacgaacggcaacggcuucuucgccaccauggccugggccgugcccaagaacgacaacaacaagaccgcgaccaacucccucacgaucgaggugccguacaucugcaccgagggggaggaccagaucaccgucuggggcuuccacagcgacaacgagacccagauggccaagcuguacggggacuccaagccccagaaguucacgagcuccgccaacggcgugaccacccacuacgugagccagaucggcggguuccccaaccagaccgaggacggcgggcugccccaguccggccggaucgucguggacuacauggugcagaaguccgggaagacgggcaccaucaccuaccagcgcggcauccuccugccgcagaaggucuggugcgccuccgggcggagcaaggugaucaagggcagccugccccucaucggggaggccgacugccugcacgagaaguacggcgggcugaacaaguccaagcccuacuacaccggcgagcacgcgaaggccaucggcaacugccccaucugggugaagacgccgcucaagcuggccaacgggaccaaguaccgcccgcccgccaagcugcucaaggagcggggcuucuucggggccaucgcgggcuuccuggagggcgggugggagggcaugaucgccggguggcacggcuacaccagccacggggcccacggcgucgccguggccgcggaccugaaguccacccaggaggccgucaacaagaucacgaagaaccucaacagccuguccgagcuggaggugaagaaccuccagcgccugagcggcgccauggacgagcugcacaacgagauccucgagcuggacgagaagguggacgaccugcgggccgacaccaucuccagccagaucgagcucgccguccugcuguccaacgaggggaucaucaacagcgaggacgagcaccuccuggcgcuggagcgcaagcucaagaagaugcugggccccuccgccguggagaucgggaacggcugcuucgagaccaagcacaagugcaaccagaccugccuggaccggaucgccgccgggaccuucgacgcgggcgaguucagccuccccacguucgacucccugaacaucaccgccgccagccugaacgacgacggccucgacaaccacaccauccugcuguacuacuccaccgccgccagcucccuggcggugacgcucaugaucgccaucuucgucguguacauggugagccgcgacaacgucuccugcagcaucugccuguga

SEQ ID NO: 91196 - RNA, 1758 nt, Artificial Sequence; identical to SEQ ID NO: 90662
  derived and/or modified CDS sequence (opt1) from hemagglutinin__InfluenzaB__AGX17840

SEQ ID NO: 91197 - RNA, 1758 nt, Artificial Sequence; identical to SEQ ID NO: 91005
  derived and/or modified CDS sequence (opt1) from hemagglutinin__InfluenzaB__AGX17851

SEQ ID NO: 91198 - RNA, 1758 nt, Artificial Sequence
  derived and/or modified CDS sequence (opt1) from hemagglutinin__InfluenzaB__AGX17862
augaaggccaucaucgugcugcucauggucgugaccagcaacgccgaccgcaucugcaccggcaucacguccagcaacagcccccacguggucaagaccgcgacccagggggaggugaacgugaccggcgucaucccgcugacgaccacccccaccaagagccacuucgccaaccugaaggggacgaagacccggggcaagcucugccccaagugccugaacugcaccgaccuggacguggcccucgggcgccccaagugcaccggcaacaucccguccgccgaggugagcauccugcacgagguccggcccgugacguccggcugcuuccccaucaugcacgaccgcaccaagauccggcagcugcccaaccuccugcgcggguacgagcacauccggcugagcacccacaacgugaucaacgccgagaaggcgccgggcgggcccuacaagaucggcaccuccgggagcugccccaacgucacgaacggcaacggcuucuucgccaccauggccugggccgugcccaagaacgacaacaacaagaccgcgaccaacucccucacgaucgaggugccguacaucugcaccgagggggaggaccagaucaccaucuggggcuuccacagcgacaacgagacccagauggccaagcuguacggggacuccaagccccagaaguucacgagcuccgccaacggcgucaccacccacuacgugagccagaucggcggguuccccaaccagaccgaggacggcgggcugccccaguccggccgcaucguggucgacuacauggugcagaaguccgggaagacgggcaccaucaccuaccagcggggcauccuccugccgcagaagguguggugcgccuccgggcgcagcaaggucaucaagggcacccugccccucaucggggaggccgacugccugcacgagaaguacggcgggcugaacaagagcaagcccuacuacacgggcgagcacgcgaaggccaucggcaacugccccaucugggugaagaccccgcucaagcuggccaacgggaccaaguaccggccgcccgccaagcugcucaaggagcgcggcuucuucggggccaucgcgggcuuccuggagggcgggugggagggcaugaucgccggguggcacggcuacaccucccacggggcccacggcguggccgucgccgcggaccucaagagcacgcaggaggccaucaacaagaucaccaagaaccugaacucccugagcgagcuggaggugaagaaccuccagcggcuguccggcgccauggacgagcugcacaacgagauccucgagcuggacgagaaggucgacgaccugcgcgccgacaccaucagcucccagaucgagcucgccgugcugcugagcaacgaggggaucaucaacuccgaggacgagcaccuccuggcgcuggagcggaagcucaagaagaugcugggccccagcgccguggagaucgggaacggcugcuucgagaccaagcacaagugcaaccagaccugccuggaccgcaucgccgccgggacguucgacgcgggcgaguucucccuccccaccuucgacagccugaacaucaccgccgccucccugaacgacgacggccucgacaaccacaccauccugcuguacuacagcacggccgccuccagccuggcggucacccucaugaucgccaucuucgugguguacauggucucccgggacaacgugagcugcuccaucugccuguga

SEQ ID NO: 91199 - RNA, 1758 nt, Artificial Sequence
  derived and/or modified CDS sequence (opt1) from hemagglutinin__InfluenzaB__AGX17873
augaaggccaucaucgugcugcucauggucgugaccagcaacgccgaccgcaucugcaccggcaucacguccagcaacagcccccacguggucaagaccgcgacccagggggaggugaacgugaccggcgucaucccgcugacgaccacccccaccaagagccacuucgccaaccugaaggggacggagacccggggcaagcucugccccaagugccuggacugcaccgaccuggacguggcccucgggcgccccaagugcaccggcaacaucccguccgcccgggugagcauccugcacgagguccgccccgugacguccggcugcuuccccaucaugcacgaccggaccaagauccgccagcugcccaaccuccugcggggguacgagcacauccgccugagcacccacaacgugaucaacgccgagaacgcgccgggcgggcccuacaagaucggcaccuccgggagcugccccaacgucacgaacggcaacggcuucuucgccaccauggccugggccgugcccaagaacgacaacaacaagaccgcgaccaacucccucacgaucgaggugccguacaucugcaccgagggggaggaccagaucaccgucuggggcuuccacagcgacaacgagacccagauggccaagcuguacggggacuccaagccccagaaguucacgagcuccgccaacggcgugaccacccacuacgugagccagaucggcggguuccccaaccagaccgaggacggcgggcugccccaguccggccggaucgucguggacuacauggugcagaaguccgggaagacgggcaccaucaccuaccagcgcggcauccuccugccgcagaaggucuggugcgccuccgggcggagcaaggugaucaagggcagccugccccucaucggggaggccgacugccugcacgagaaguacggcgggcugaacaaguccaagcccuacuacaccggcgagcacgcgaaggccaucggcaacugccccaucugggugaagacgccgcucaagcuggccaacgggaccaaguaccgcccgcccgccaagcugcucaaggagcggggcuucuucggggccaucgcgggcuuccuggagggcgggugggagggcaugaucgccggguggcacggcuacaccagccacggggcccacggcgucgccguggccgcggaccugaaguccacccaggaggccaucaacaagaucacgaagaaccucaacagccuguccgagcuggaggucaagaaccuccagcgccugagcggcgccauggacgagcugcacaacgagauccucgagcuggacgagaagguggacgaccugcgggccgacaccaucuccagccagaucgagcucgccgugcugcuguccaacgaggggaucaucaacagcgaggacgagcaccuccuggcgcuggagcgcaagcucaagaagaugcugggccccuccgccgucgagaucgggaacggcugcuucgagaccaagcacaagugcaaccagaccugccuggaccggaucgccgccgggaccuucgacgcgggcgaguucagccuccccacguucgacucccugaacaucaccgccgccagccugaacgacgacggccucgacaaccacaccauccugcuguacuacuccaccgccgccagcucccuggcggugacgcucaugaucgccaucuucguggucuacauggugagccgcgacaacguguccugcagcaucugccuguga

SEQ ID NO: 91200 - RNA, 1758 nt, Artificial Sequence; identical to SEQ ID NO: 90662
  derived and/or modified CDS sequence (opt1) from hemagglutinin__InfluenzaB__AGX17884

SEQ ID NO: 91201 - RNA, 1758 nt, Artificial Sequence
  derived and/or modified CDS sequence (opt1) from hemagglutinin__InfluenzaB__AGX17895
augaaggccaucaucgugcugcucauggucgugaccagcaacgccgaccgcaucugcaccggcaucacguccagcaacagcccccacguggucaagaccgcgacccagggggaggugaacgugaccggcgucaucccgcugacgaccacccccaccaagagccacuucgccaaccugaaggggacggagacccggggcaagcucugccccaagugccugaacugcaccgaccuggacguggcccucgggcgccccaagugcaccggcaacaucccguccgcccgggugagcauccugcacgagguccgccccgugacguccggcugcuuccccaucaugcacgaccggaccaagauccgccagcugcccaaccuccugcggggguacgagcacauccgccugagcacccacaacgugaucaacgccgagaacgcgccgggcgggcccuacaagaucggcaccuccgggagcugccccaacgucacgaacggcaacggcuucuucgccaccauggccugggccgugcccaagaacgacaacaacaagaccgcgaccaacucccucacgaucgaggugccguacaucugcaccgagggggaggaccagaucaccgucuggggcuuccacagcgacaacgagaaccagauggccaagcuguacggggacuccaagccccagaaguucaccagcuccgccaacggcgugacgacccacuacgugagccagaucggcggguuccccaaccagaccgaggacggcgggcugccccaguccggccggaucgucguggacuacauggugcagaaguccgggaagaccggcacgaucaccuaccagcgcggcauccuccugccgcagaaggucuggugcgccuccgggcggagcaaggugaucaagggcagccugccccucaucggggaggccgacugccugcacgagaaguacggcgggcugaacaaguccaagcccuacuacaccggcgagcacgcgaaggccaucggcaacugccccaucugggugaagaccccgcucaagcuggccaacgggacgaaguaccgcccgcccgccaagcugcucaaggagcggggcuucuucggggccaucgcgggcuuccuggagggcgggugggagggcaugaucgccggguggcacggcuacaccagccacggggcccacggcgucgccguggccgcggaccugaaguccacccaggaggccaucaacaagaucaccaagaaccucaacagccuguccgagcuggaggucaagaaccuccagcgccugagcggcgccauggacgagcugcacaacgagauccucgagcuggacgagaagguggacgaccugcgggccgacacgaucuccagccagaucgagcucgccgugcugcuguccaacgaggggaucaucaacagcgaggacgagcaccuccuggcgcuggagcgcaagcucaagaagaugcugggccccuccgccgucgagaucgggaacggcugcuucgagaccaagcacaagugcaaccagaccugccuggaccggaucgccgccgggaccuucgacgcgggcgaguucagccuccccaccuucgacucccugaacaucacggccgccagccugaacgacgacggccucgacaaccacaccauccugcuguacuacuccaccgccgccagcucccuggcggugacccucaugaucgccaucuucguggucuacauggugagccgcgacaacguguccugcagcaucugccuguga

SEQ ID NO: 91202 - RNA, 1758 nt, Artificial Sequence; identical to SEQ ID NO: 90662
  derived and/or modified CDS sequence (opt1) from hemagglutinin__InfluenzaB__AGX17906

SEQ ID NO: 91203 - RNA, 1758 nt, Artificial Sequence; identical to SEQ ID NO: 90662
  derived and/or modified CDS sequence (opt1) from hemagglutinin__InfluenzaB__AGX17917

SEQ ID NO: 91204 - RNA, 1758 nt, Artificial Sequence
  derived and/or modified CDS sequence (opt1) from hemagglutinin__InfluenzaB__AGX17928
augaagaccaucaucgugcugcucauggucgugaccagcaacgccgaccgcaucugcacgggcaucaccuccagcaacagcccccacguggucaagaccgccacccagggggaggugaacgugacgggcgucaucccgcugaccaccacccccaccaagagccacuucgcgaaccugaaggggacgaagacccggggcaagcucugccccaagugccugaacugcaccgaccuggacguggcccucgggcgccccaagugcacgggcaacaucccguccgccgaggugagcauccugcacgagguccggcccgugaccuccggcugcuuccccaucaugcacgaccgcaccaagauccggcagcugcccaaccuccugcgcggguacgagcacauccggcugagcacccacaacgugaucaacgccgagaaggccccgggcgggcccuacaagaucggcacguccgggagcugccccaacgucaccaacggcaacggcuucuucgcgaccauggccugggccgugcccaagaacgacaacaacaagaccgccacgaacucccucaccaucgaggugccguacaucugcaccgagggggaggaccagaucaccaucuggggcuuccacagcgacaacgagacgcagauggcgaagcuguacggggacuccaagccccagaaguucaccagcuccgccaacggcgucaccacccacuacgugagccagaucggcggguuccccaaccagacggaggacggcgggcugccccaguccggccgcaucguggucgacuacauggugcagaaguccgggaagaccggcaccaucaccuaccagcggggcauccuccugccgcagaagguguggugcgccuccgggcgcagcaaggucaucaagggcacgcugccccucaucggggaggccgacugccugcacgagaaguacggcgggcugaacaagagcaagcccuacuacaccggcgagcacgccaaggcgaucggcaacugccccaucugggugaagaccccgcucaagcuggccaacgggaccaaguaccggccgcccgccaagcugcucaaggagcgcggcuucuucggggccaucgccggcuuccuggagggcgggugggagggcaugaucgcgggguggcacggcuacacgucccacggggcccacggcguggccgucgccgccgaccucaagagcacccaggaggcgaucaacaagaucaccaagaaccugaacucccugagcgagcuggaggugaagaaccuccagcggcuguccggcgccauggacgagcugcacaacgagauccucgagcuggacgagaaggucgacgaccugcgcgccgacaccaucagcucccagaucgagcucgccgugcugcugagcaacgaggggaucaucaacuccgaggacgagcaccuccuggcccuggagcggaagcucaagaagaugcugggccccagcgcgguggagaucgggaacggcugcuucgagaccaagcacaagugcaaccagacgugccuggaccgcaucgccgccgggaccuucgacgccggcgaguucucccuccccaccuucgacagccugaacaucaccgcggccucccugaacgacgacggccucgacaaccacacgauccugcuguacuacagcaccgccgccuccagccuggccgucacccucaugaucgcgaucuucgugguguacauggucucccgggacaacgugagcugcuccaucugccuguga

SEQ ID NO: 91205 - RNA, 1758 nt, Artificial Sequence; identical to SEQ ID NO: 90538
  derived and/or modified CDS sequence (opt1) from hemagglutinin__InfluenzaB__AGX17939

SEQ ID NO: 91206 - RNA, 1758 nt, Artificial Sequence; identical to SEQ ID NO: 90538
  derived and/or modified CDS sequence (opt1) from hemagglutinin__InfluenzaB__AGX17950

SEQ ID NO: 91207 - RNA, 1758 nt, Artificial Sequence; identical to SEQ ID NO: 90538
  derived and/or modified CDS sequence (opt1) from hemagglutinin__InfluenzaB__AGX17961

SEQ ID NO: 91208 - RNA, 1758 nt, Artificial Sequence; identical to SEQ ID NO: 91005
  derived and/or modified CDS sequence (opt1) from hemagglutinin__InfluenzaB__AGX17972

SEQ ID NO: 91209 - RNA, 1758 nt, Artificial Sequence; identical to SEQ ID NO: 90538
  derived and/or modified CDS sequence (opt1) from hemagglutinin__InfluenzaB__AGX17983

SEQ ID NO: 91210 - RNA, 1758 nt, Artificial Sequence; identical to SEQ ID NO: 90662
  derived and/or modified CDS sequence (opt1) from hemagglutinin__InfluenzaB__AGX17994

SEQ ID NO: 91211 - RNA, 1758 nt, Artificial Sequence
  derived and/or modified CDS sequence (opt1) from hemagglutinin__InfluenzaB__AGX18005
augaaggccaucaucgugcugcucauggucgugaccagcaacgccgaccgcaucugcaccggcaucacguccagcaacagcccccacguggucaagaccgcgacccagggggaggugaacgugaccggcgucaucccgcugacgaccacccccaccaagagccacuucgccaaccugaaggggacggagacccggggcaagcucugccccaagugccugaacugcaccgaccuggacguggcccucgggcgccccaagugcaccggcaacaucccguccgcccgggugagcauccugcacgagguccgccccgugacguccggcugcuuccccaucaugcacgaccggaccaagauccgccagcugcccaaccuccugcggggguacgagcacauccgccugagcacccacaacgugaucaacgccgagaacgcgccgggcgggcccuacaagaucggcaccuccgggagcugccccaacgucacgaacggcaacggcuucuucgccaccauggccugggccgugcccaagaacgacaacaacaagaccgcgaccaacucccucacgaucgaggugccguacaucugcaccgagggggaggaccagaucaccgucuggggcuuccacagcgacaacgagacccagauggccaagcuguacggggacuccaagccccagaaguucacgagcuccgccaacggcgugaccacccacuacgugagccagaucggcggguuccccaaccagaccgaggacggcgggcugccccaguccggccggaucgucguggacuacauggugcagaaguccgggaagacgggcaccaucaccuaccagcgcggcauccuccugccgcagaaggucuggugcgccuccgggcggagcaaggugaucaagggcagccugccccucaucggggaggccgacugccugcacgagaaguacggcgggcugaacaaguccaagcccuacuacaccggcgagcacgcgaaggccaucggcaacugccccaucugggugaagacgccgcucaagcuggccaacgggaccaaguaccgcccgcccgccaagcugcucaaggagcggggcuucuucggggccaucgcgggcuuccuggagggcgggugggagggcaugaucgccggguggcacggcuacaccagccacggggcccacggcgucgccguggccgcggacaucaaguccacccaggaggccaucaacaagaucacgaagaaccugaacagccucuccgagcuggaggucaagaaccugcagcgccucagcggcgccauggacgagcugcacaacgagauccuggagcucgacgagaagguggacgaccugcgggccgacaccaucuccagccagaucgagcuggccgugcuccuguccaacgaggggaucaucaacagcgaggacgagcaccuccuggcgcuggagcgcaagcugaagaagaugcucggccccuccgccgucgagaucgggaacggcugcuucgagaccaagcacaagugcaaccagaccugccuggaccggaucgccgccgggaccuucgacgcgggcgaguucagccugcccacguucgacucccucaacaucaccgccgccagccugaacgacgacggccuggacaaccacaccauccuccuguacuacuccaccgccgccagcucccuggcggugacgcugaugaucgccaucuucguggucuacauggugagccgcgacaacguguccugcagcaucugccucuga

SEQ ID NO: 91212 - RNA, 1758 nt, Artificial Sequence
  derived and/or modified CDS sequence (opt1) from hemagglutinin__InfluenzaB__AGX18016
augaaggccaucaucgugcugcucauggucgugaccagcaacgccgaccgcaucugcaccggcaucacguccagcaacagcccccacguggucaagaccgcgacccagggggaggugaacgugaccggcgucaucccgcugacgaccacccccaccaagagccacuucgccaaccugaaggggacggagacccggggcaagcucugccccaagugccugaacugcaccgaccuggacguggcccucgggcgccccaagugcaccggcaacaucccguccgcccgggugagcauccugcacgagguccgccccgugacguccggcugcuuccccaucaugcacgaccggaccaagauccgccagcugcccaaccuccugcggggguacgagcacauccgccugagcacccacaacgugaucaacgccgagaacgcgccgggcgggcccuacaagaucggcaccuccgggagcugccccaacgucacgaacggcaacggcuucuucgccaccauggccugggccgugcccaagaacgacaacaacaagaccgcgaccaacucccucacgaucgaggugccguacaucugcaucgagggggaggaccagaucaccgucuggggcuuccacagcgacaacgagacccagauggccaagcuguacggggacuccaagccccagaaguucaccagcuccgccaacggcgugacgacccacuacgugagccagaucggcggguuccccaaccagaccgaggacggcgggcugccccaguccggccggaucgucguggacuacauggugcagaaguccgggaagaccggcacgaucaccuaccagcgcggcauccuccugccgcagaaggucuggugcgccuccgggcggagcaaggugaucaagggcagccugccccucaucggggaggccgacugccugcacgagaaguacggcgggcugaacaaguccaagcccuacuacaccggcgagcacgcgaaggccaucggcaacugccccaucugggugaagaccccgcucaagcuggccaacgggacgaaguaccgcccgcccgccaagcugcucaaggagcggggcuucuucggggccaucgcgggcuuccuggagggcgggugggagggcaugaucgccggguggcacggcuacaccagccacggggcccacggcgucgccguggccgcggaccugaaguccacccaggaggccaucaacaagaucaccaagaaccucaacagccuguccgagcuggaggucaagaaccuccagcgccugagcggcgccauggacgagcugcacaacgagauccucgagcuggacgagaagguggacgaccugcgggccgacacgaucuccagccagaucgagcucgccgugcugcuguccaacgaggggaucaucaacagcgaggacgagcaccuccuggcgcuggagcgcaagcucaagaagaugcugggccccuccgccgucgagaucgggaacggcugcuucgagaccaagcacaagugcaaccagaccugccuggaccggaucgccgccgggaccuucgacgcgggcgaguucagccuccccaccuucgacucccugaacaucacggccgccagccugaacgacgacggccucgacaaccacaccauccugcuguacuacuccaccgccgccagcucccuggcggugacccucaugaucgccaucuucguggucuacauggugagccgcgacaacguguccugcagcaucugccuguga

SEQ ID NO: 91213 - RNA, 1758 nt, Artificial Sequence; identical to SEQ ID NO: 91176
  derived and/or modified CDS sequence (opt1) from hemagglutinin__InfluenzaB__AGX18027

SEQ ID NO: 91214 - RNA, 1758 nt, Artificial Sequence; identical to SEQ ID NO: 90662
  derived and/or modified CDS sequence (opt1) from hemagglutinin__InfluenzaB__AGX18038

SEQ ID NO: 91215 - RNA, 1758 nt, Artificial Sequence; identical to SEQ ID NO: 90662
  derived and/or modified CDS sequence (opt1) from hemagglutinin__InfluenzaB__AGX18049

SEQ ID NO: 91216 - RNA, 1758 nt, Artificial Sequence; identical to SEQ ID NO: 90662
  derived and/or modified CDS sequence (opt1) from hemagglutinin__InfluenzaB__AGX18060

SEQ ID NO: 91217 - RNA, 1758 nt, Artificial Sequence; identical to SEQ ID NO: 90538
  derived and/or modified CDS sequence (opt1) from hemagglutinin__InfluenzaB__AGX18071

SEQ ID NO: 91218 - RNA, 1758 nt, Artificial Sequence; identical to SEQ ID NO: 91198
  derived and/or modified CDS sequence (opt1) from hemagglutinin__InfluenzaB__AGX18082

SEQ ID NO: 91219 - RNA, 1758 nt, Artificial Sequence; identical to SEQ ID NO: 91198
  derived and/or modified CDS sequence (opt1) from hemagglutinin__InfluenzaB__AGX18093

SEQ ID NO: 91220 - RNA, 1758 nt, Artificial Sequence; identical to SEQ ID NO: 91005
  derived and/or modified CDS sequence (opt1) from hemagglutinin__InfluenzaB__AGX18104

SEQ ID NO: 91221 - RNA, 1758 nt, Artificial Sequence; identical to SEQ ID NO: 90662
  derived and/or modified CDS sequence (opt1) from hemagglutinin__InfluenzaB__AGX18115

SEQ ID NO: 91222 - RNA, 1758 nt, Artificial Sequence; identical to SEQ ID NO: 90662
  derived and/or modified CDS sequence (opt1) from hemagglutinin__InfluenzaB__AGX18126

SEQ ID NO: 91223 - RNA, 1758 nt, Artificial Sequence; identical to SEQ ID NO: 90538
  derived and/or modified CDS sequence (opt1) from hemagglutinin__InfluenzaB__AGX18137

SEQ ID NO: 91224 - RNA, 1758 nt, Artificial Sequence; identical to SEQ ID NO: 91198
  derived and/or modified CDS sequence (opt1) from hemagglutinin__InfluenzaB__AGX18148

SEQ ID NO: 91225 - RNA, 1758 nt, Artificial Sequence; identical to SEQ ID NO: 90538
  derived and/or modified CDS sequence (opt1) from hemagglutinin__InfluenzaB__AGX18159

SEQ ID NO: 91226 - RNA, 1758 nt, Artificial Sequence; identical to SEQ ID NO: 90538
  derived and/or modified CDS sequence (opt1) from hemagglutinin__InfluenzaB__AGX18170

SEQ ID NO: 91227 - RNA, 1758 nt, Artificial Sequence; identical to SEQ ID NO: 91198
  derived and/or modified CDS sequence (opt1) from hemagglutinin__InfluenzaB__AGX18181

SEQ ID NO: 91228 - RNA, 1758 nt, Artificial Sequence
  derived and/or modified CDS sequence (opt1) from hemagglutinin__InfluenzaB__AGX18192
augaaggccaucaucgugcugcucauggucgugaccagcaacgccgaccgcaucugcaccggcaucacguccagcaacagcccccacguggucaagaccgcgacccagggggaggugaacgugaccggcgucaucccgcugacgaccacccccaccaagagccacuucgccaaccugaaggggacgaagacccggggcaagcucugccccaagugccugaacugcaccgaccuggacguggcccucgggcgccccaagugcaccggcaacaucccguccgccgaggugagcauccugcacgagguccggcccgugacguccggcugcuuccccaucaugcacgaccgcaccaagauccggcagcugcccaaccuccugcgcggguacgagcacauccggcugagcacccacaacgugaucaacgccgagaaggcgccgggcgggcccuacaagaucggcaccuccgggagcugccccaacgucacgaacggcaacggcuucuucgccaccauggccugggccgugcccaagaacgacaacaacaagaccgcgaccaacucccucacgaucgaggugccguacaucugcaccgagggggaggaccagaucaccaucuggggcuuccacagcgacaacgagacccagauggccaagcuguacggggacuccaagccccagaaguucacgagcuccaccaacggcgucaccacccacuacgugagccagaucggcggguuccccaaccagacggaggacggcgggcugccccaguccggccgcaucguggucgacuacauggugcagaagccggggaagaccggcaccaucaccuaccagcggggcauccuccugccccagaagguguggugcgccagcgggcgcuccaaggucaucaagggcagccugccccucaucggggaggccgacugccugcacgagaaguacggcgggcugaacaagagcaagcccuacuacacgggcgagcacgccaaggcgaucggcaacugcccgaucugggugaagacgccccucaagcuggccaacgggaccaaguaccggccgcccgccaagcugcucaaggagcgcggcuucuucggggccaucgccggcuuccuggagggcgggugggagggcaugaucgcgggguggcacggcuacaccucccacggggcccacggcguggccgucgccgccgaccugaaguccacccaggaggcgaucaacaagaucaccaagaaccucaacucccugagcgagcuggaggugaagaaccuccagcggcuguccagcgccauggacgagcugcacaacgagauccucgagcuggacgagaaggucgacgaccugcgcgccgacaccaucuccagccagaucgagcucgccgugcugcuguccaacgagggcaucaucaacagcgaggacgagcaccuccuggcccuggagcggaagcucaagaagaugcuggggcccuccgcgguggagaucggcaacgggugcuucgagaccaagcacaagugcaaccagaccugccuggaccgcaucgccgccggcacguucgacgccggggaguucagccuccccaccuucgacucccugaacaucaccgcggccagccugaacgacgacggccucgacaaccacaccauccugcuguacuacuccacggccgccagcucccuggccgucacccucaugaucgcgaucuucgugguguacauggucagccgggacaacguguccugcagcaucugccuguga

SEQ ID NO: 91229 - RNA, 1758 nt, Artificial Sequence; identical to SEQ ID NO: 91176
  derived and/or modified CDS sequence (opt1) from hemagglutinin__InfluenzaB__AGX18203

SEQ ID NO: 91230 - RNA, 1758 nt, Artificial Sequence
  derived and/or modified CDS sequence (opt1) from hemagglutinin__InfluenzaB__AGX18214
augaaggccaucaucgugcugcucauggucgugaccagcaacgccgaccgcaucugcaccggcaucacguccagcaacagcccccacguggucaagaccgcgacccagggggaggugaacgugaccggcgucaucccgcugacgaccacccccaccaagagccacuucgccaaccugaaggggacgaagacccggggcaagcucugccccaagugccugaacugcaccgaccuggacguggcccucgggcgccccaagugcaccggcaacaucccguccgccgaggugagcauccugcacgagguccggcccgugacguccggcugcuuccccaucaugcacgaccgcaccaagauccggcagcugcccaaccuccugcgcggguacgagcacauccggcugagcacccacaacgugaucaacgccgagaaggcgccgggcgggcccuacaagaccggcacguccgggagcugccccaacgucaccaacggcaacggcuucuucgccaccauggccugggccgugcccaagaacgacaacaacaagaccgcgacgaacucccucaccaucgaggugccguacaucugcaccgagggggaggaccagaucaccaucuggggcuuccacagcgacaacgagacgcagauggccaagcuguacggggacuccaagccccagaaguucaccagcuccgccaacggcgucaccacccacuacgugagccagaucggcggguuccccaaccagacggaggacggcgggcugccccaguccggccgcaucguggucgacuacauggugcagaaguccgggaagaccggcaccaucaccuaccagcggggcauccuccugccgcagaagguguggugcgccuccgggcgcagcaaggucaucaagggcagccugccccucaucggggaggccgacugccugcacgagaaguacggcgggcugaacaaguccaagcccuacuacacgggcgagcacgcgaaggccaucggcaacugccccaucugggugaagaccccgcucaagcuggccaacgggaccaaguaccggccgcccgccaagcugcucaaggagcgcggcuucuucggggccaucgcgggcuuccuggagggcgggugggagggcaugaucgccggguggcacggcuacaccagccacggggcccacggcguggccgucgccgcggaccugaaguccacgcaggaggccaucaacaagaucaccaagaaccucaacagccuguccgagcuggaggugaagaaccuccagcggcugagcggcgccauggacgagcugcacaacgagauccucgagcuggacgagaaggucgacgaccugcgcgccgacaccaucuccagccagaucgagcucgccgugcugcuguccaacgaggggaucaucaacagcgaggacgagcaccuccuggcgcuggagcggaagcucaagaagaugcugggccccuccgccguggagaucgggaacggcugcuucgagaccaagcacaagugcaaccagaccugccuggaccgcaucgccgccgggacguucgacgcgggcgaguucagccuccccaccuucgacucccugaacaucaccgccgccagccugaacgacgacggccucgacaaccacaucauccugcuguacuacuccaccgccgccagcucccuggcggucacgcucaugaucgccaucuucgugguguacauggucagccgggacaacguguccugcagcaucugccuguga

SEQ ID NO: 91231 - RNA, 1758 nt, Artificial Sequence
  derived and/or modified CDS sequence (opt1) from hemagglutinin__InfluenzaB__AGX18225
augaaggccaucaucgugcugcucauggucgugaccagcaacgccgaccgcaucugcaccggcaucacguccagcaacagcccccacguggucaagaccgcgacccagggggaggugaacgugaccggcgucaucccgcugacgaccacccccaccaagagccacuucgccaaccugaaggggacgaagacccggggcaagcucugccccaagugccugaacugcaccgaccuggacguggcccucgggcgccccaagugcaccggcaacaucccguccgccgaggugagcauccugcacgagguccggcccgugacguccggcugcuuccccaucaugcacgaccgcaccaagauccggcagcugcccaaccuccugcgcggguacgagcacauccggcugagcacccacaacgugaucaacgccgagaaggcgccgggcgggcccuacaagaucggcaccuccgggagcugccccaacgucacgaacggcaacggcuucuucgccaccauggccugggccgugcccaagaacgacaacaacaagaccgcgaccaacucccucacgaucgaggugccguacaucugcaccgagggggaggaccagaucaccaucuggggcuuccacagcgacaacgagacccagauggccaagcuguacggggacuccaagccccagaaguucacgagcuccgccaacggcgucaccacccacuacgugagccagaucggcggguuccccaaccagaccgaggacggcgggcugccccaguccggccgcaucguggucgacuacauggugcagaaguccgggaagacgggcaccaucaccuaccagcggggcauccuccugccgcagaagguguggugcgccuccgggcgcagcaaggucaucaagggcagccugccccucaucggggaggccgacugccugcacgagaaguacggcgggcugaacaaguccaagcccuacuacaccggcgagcacgcgaaggccaucggcaacugccccaucugggugaagacgccgcucaagcuggccaacgggaccaaguaccggccgcccgccaagcugcucaaggagcgcggcuucuucggggccaucgcgggcuuccuggagggcgggugggagggcaugaucgccggguggcacggcuacaccagccacggggcccacggcguggccgucgccgcggaccugaaguccacccaggaggccaucaaccggaucacgaagaaccucaacagccuguccgagcuggaggugaagaaccuccagcgccugagcggcgccauggacgagcugcacaacgagauccucgagcuggacgagaaggucgacgaccugcgggccgacaccaucuccagccagaucgagcucgccgugcugcuguccaacgaggggaucaucaacagcgaggacgagcaccuccuggcgcuggagcgcaagcucaagaagaugcugggccccuccgccguggagaucgggaacggcugcuucgagaccaagcacaagugcaaccagaccugccuggaccggaucgccgccgggaccuucgacgcgggcgaguucagccuccccacguucgacucccugaacaucaccgccgccagccugaacgacgacggccucgacaaccacaccauccugcuguacuacuccaccgccgccagcucccuggcggucacgcucaugaucgccaucuucgugguguacauggucagccgcgacaacguguccugcagcaucugccuguga

SEQ ID NO: 91232 - RNA, 1758 nt, Artificial Sequence
  derived and/or modified CDS sequence (opt1) from hemagglutinin__InfluenzaB__AGX18236
augaaggccaucaucgugcugcucauggucgugaccagcaacgccgaccgcaucugcaccggcaucacguccagcaacagcccccacguggucaagaccgcgacccagggggaggugaacgugaccggcgucaucccgcugacgaccacccccaccaagagccacuucgccaaccugaaggggacgaagacccggggcaagcucugccccaagugccugaacugcaccgaccuggacguggcccucgggcgccccaagugcaccggcaacaucccguccgccgaggugagcauccugcacgagguccggcccgugacguccggcugcuuccccaucaugcacgaccgcaccaagauccggcagcugcccaaccuccugcgcggguacgagcacauccggcugagcacccacaacgugaucaacgccgagaaggcgccgggcgggcccuacaagaucggcaccuccgggagcugccccaacgucacgaacggcaacggcuucuucgccaccauggccugggccgugcccaagaacgacaacaacaagaccgcgaccaacucccucacgaucgaggugccguacaucugcaccgagggggaggaccagaucaccaucuggggcuuccacagcgacaacgagacccagauggccaagcuguacggggacuccaagccccagaaguucacgagcuccgccaacggcgucaccacccacuacgugagccagaucggcggguuccccaaccagaccgaggacggcgggcugccccaguccggccgcaucguggucgacuacaugaugcagaaguccgggaagacgggcaccaucaccuaccagcggggcauccuccugccgcagaagguguggugcgccuccgggcgcagcaaggugaucaagggcagccugccccucaucggggaggccgacugccugcacgagaaguacggcgggcugaacaaguccaagcccuacuacaccggcgagcacgcgaaggccaucggcaacugccccaucugggucaagacgccgcucaagcuggccaacgggaccaaguaccggccgcccgccaagcugcucaaggagcgcggcuucuucggggccaucgcgggcuuccuggagggcgggugggagggcaugaucgccggguggcacggcuacaccagccacggggcccacggcguggccguggccgcggaccugaaguccacccaggaggccaucaacaagaucacgaagaaccucaacagccuguccgagcuggaggucaagaaccuccagcggcugagcggcgccauggacgagcugcacaacgagauccucgagcuggacgagaagguggacgaccugcgcgccgacaccaucuccagccagaucgagcucgccguccugcuguccaacgaggggaucaucaacagcgaggacgagcaccuccuggcgcuggagcggaagcucaagaagaugcugggccccuccgccguggagaucgggaacggcugcuucgagaccaagcacaagugcaaccagaccugccuggaccgcaucgccgccgggaccuucgacgcgggcgaguucagccuccccacguucgacucccugaacaucaccgccgccagccugaacgacgacggccucgacaaccacaccauccugcuguacuacuccaccgccgccagcucccuggcggugacgcucaugaucgccaucuucgucguguacauggugagccgggacaacgucuccugcagcaucugccuguga

SEQ ID NO: 91233 - RNA, 1758 nt, Artificial Sequence; identical to SEQ ID NO: 90589
  derived and/or modified CDS sequence (opt1) from hemagglutinin__InfluenzaB__AGX18247

SEQ ID NO: 91234 - RNA, 1758 nt, Artificial Sequence
  derived and/or modified CDS sequence (opt1) from hemagglutinin__InfluenzaB__AGX18258
augaaggccaucaucgugcugcucauggucgugaccagcaacgccgaccgcaucugcaccggcaucacguccagcaacagcccccacguggucaagaccgcgacccagggggaggugaacgugaccggcgucaucccgcugacgaccacccccaccaagagccacuucgccaaccugaaggggacgaagacccggggcaagcucugccccaagugccugaacugcaccgaccuggacguggcccucgggcgccccaagugcaccggcaacaucccguccgccgaggugagcauccugcacgagguccggcccgugacguccggcugcuuccccaucaugcacgaccgcaccaagauccggcagcugcccaaccuccugcgcggguacgagcacauccggcugagcacccacaacgugaucaacgccgagaaggcgccgggcgggcccuacaagaucggcaccuccgggagcugccccaacgucacgaacggcaacggcuucuucgccaccauggccugggccgugcccaagaacgacaagaacaagaccgcgaccaacucccucacgaucgaggugccguacaucugcaccgagggggaggaccagaucaccaucuggggcuuccacagcgacaacgagacccagauggccaagcuguacggggacuccaagccccagaaguucacgagcuccgccaacggcgucaccacccacuacgugagccagaucggcggguuccccaaccagaccgaggacggcgggcugccccaguccggccgcaucguggucgacuacauggugcagaaguccgggaagacgggcaccaucaccuaccagcggggcauccuccugccgcagaagguguggugcgccuccgggcgcagcaaggucaucaagggcacccugccccucaucggggaggccgacugccugcacgagaaguacggcgggcugaacaagagcaagcccuacuacacgggcgagcacgcgaaggccaucggcaacugccccaucugggugaagaccccgcucaagcuggccaacgggaccaaguaccggccgcccgccaagcugcucaaggagcgcggcuucuucggggccaucgcgggcuuccuggagggcgggugggagggcaugaucgccggguggcacggcuacaccucccacggggcccacggcguggccgucgccgcggaccucaagagcacgcaggaggccaucaacaagaucaccaagaaccugaacucccugagcgagcuggaggugaagaaccuccagcggcuguccggcgccauggacgagcugcacaacgagauccucgagcuggacgagaaggucgacgaccugcgcgccgacaccaucagcucccagaucgagcucgccgugcugcugagcaacgaggggaucaucaacuccgaggacgagcaccuccuggcgcuggagcggaagcucaagaagaugcugggccccagcgccguggagaucgggaacggcugcuucgagaccaagcacaagugcaaccagaccugccuggaccgcaucgccgccgggacguucgacgcgggcgaguucucccuccccaccuucgacagccugaacaucaccgccgccucccugaacgacgacggccucgacaaccacaccauccugcuguacuacagcacggccgccuccagccuggcggucacccucaugaucgccaucuucgugguguacauggucucccgggacaacgugagcugcuccaucugccuguga

SEQ ID NO: 91235 - RNA, 1758 nt, Artificial Sequence; identical to SEQ ID NO: 90538
  derived and/or modified CDS sequence (opt1) from hemagglutinin__InfluenzaB__AGX18280

SEQ ID NO: 91236 - RNA, 1758 nt, Artificial Sequence
  derived and/or modified CDS sequence (opt1) from hemagglutinin__InfluenzaB__AGX18291
augaaggccaucaucgugcugcucauggucgugaccagcaacgccgaccgcaucugcaccggcaucacguccagcaacagcccccacguggucaagaccgcgacccagggggaggugaacgugaccggcgucaucccgcugacgaccacccccaccaagagccacuucgccaaccugaaggggacgaagacccggggcaagcucugccccaagugccugaacugcaccgaccuggacguggcccucgggcgccccaagugcaccggcaacaucccguccgccgaggugagcauccugcacgagguccggcccgugacguccggcugcuuccccaucaugcacgaccgcaccaagauccggcagcugcccaaccuccugcgcggguacgagcacauccggcugagcacccacaacgugaucaacgccgagaaggcgccgggcgggcccuacaagaucggcaccuccgggagcugccccaacgucacgaacggcaacggcuucuucgccaccauggccugggccgugcccaagaacgacaacaacaagaccgcgaccaacucccucacgaucgaggugccguacaucugcaccgagggggaggaccagaucaccaucuggggcuuccacagcgacaacgagacccagauggccaagcuguacggggacuccaagccccagaaguucacgagcuccgccaacggcgucaccacccacuacgugagccagaucggcggguuccccaaccagaccgaggacggcgggcugccccaguccggccgcaucguggucgacuacauggugcagaaguccgggaagacgggcaccaucaccuaccagcggggcauccuccugccgcagaagguguggugcgucuccgggcgcagcaaggugaucaagggcagccugccccucaucggggaggccgacugccugcacgagaaguacggcgggcugaacaaguccaagcccuacuacaccggcgagcacgccaaggcgaucggcaacugccccaucugggugaagacgccgcucaagcuggccaacgggaccaaguaccggccgcccgccaagcugcucaaggagcgcggcuucuucggggccaucgccggcuuccuggagggcgggugggagggcaugaucgcgggguggcacggcuacaccagccacggggcccacggcgucgccguggccgccgaccugaaguccacccaggaggcgaucaacaagaucacgaagaaccucaacagccuguccgagcuggaggucaagaaccuccagcggcugagcggcgccauggacgagcugcacaacgagauccucgagcuggacgagaagguggacgaccugcgcgccgacaccaucuccagccagaucgagcucgccgugcugcuguccaacgaggggaucaucaacagcgaggacgagcaccuccuggcccuggagcggaagcucaagaagaugcugggccccuccgcggucgagaucgggaacggcugcuucgagaccaagcacaagugcaaccagaccugccuggaccgcaucgccgccgggaccuucgacgccggcgaguucagccuccccacguucgacucccugaacaucaccgcggccagccugaacgacgacggccucgacaaccacaccauccugcuguacuacuccaccgccgccagcucccuggccgugacgcucaugaucgcgaucuucguggucuacauggugagccgggacaacguguccugcagcaucugccuguga

SEQ ID NO: 91237 - RNA, 1758 nt, Artificial Sequence
  derived and/or modified CDS sequence (opt1) from hemagglutinin__InfluenzaB__AGX18302
augaaggccaucaucgugcugcucauggucgugaccagcaacgccgaccgcaucugcaccggcaucacguccagcaacagcccccacguggucaagaccgcgacccagggggaggugaacgugaccggcgucaucccgcugacgaccacccccaccaagagccacuucgccaaccugaaggggacgaagacccggggcaagcucugccccaagugccugaacugcaccgaccuggacguggcccucgggcgccccaagugcaccggcaacaucccguccgccgaggugagcauccugcacgagguccggcccgugacguccggcugcuuccccaucaugcacgaccgcaccaagauccggcagcugcccaaccuccugcgcggguacaagcacauccggcugagcacccacaacgugaucaacgccgagaaggcgccgggcgggcccuacaagaucggcaccuccgggagcugccccaacgucacgaacggcaacggcuucuucgccaccauggccugggccgugcccaagaacgacaacaacaagaccgcgaccaacucccucacgaucgaggugccguacaucugcaccgagggggaggaccagaucaccaucuggggcuuccacagcgacaacgagacccagauggccaagcuguacggggacuccaagccccagaaguucacgagcuccgccaacggcgucaccacccacuacgugagccagaucggcggguuccccaaccagaccgaggacggcgggcugccccaguccggccgcaucguggucgacuacauggugcagaaguccgggaagacgggcaccaucaccuaccagcggggcauccuccugccgcagaagguguggugcgccuccgggcgcagcaaggucaucaagggcacccugccccucaucggggaggccgacugccugcacgagaaguacggcgggcugaacaagagcaagcccuacuacacgggcgagcacgcgaaggccaucggcaacugccccaucugggugaagaccccgcucaagcuggccaacgggaccaaguaccggccgcccgccaagcugcucaaggagcgcggcuucuucggggccaucgcgggcuuccuggagggcgggugggagggcaugaucgccggguggcacggcuacaccucccacggggcccacggcguggccgucgccgcggaccucaagagcacgcaggaggccaucaacaagaucaccaagaaccugaacucccugagcgagcuggaggugaagaaccuccagcggcuguccggcgccauggacgagcugcacaacgagauccucgagcuggacgagaaggucgacgaccugcgcgccgacaccaucagcucccagaucgagcucgccgugcugcugagcaacgaggggaucaucaacuccgaggacgagcaccuccuggcgcuggagcggaagcucaagaagaugcugggccccagcgccguggagaucgggaacggcugcuucgagaccaagcacaagugcaaccagaccugccuggaccgcaucgccgccgggacguucgacgcgggcgaguucucccuccccaccuucgacagccugaacaucaccgccgccucccugaacgacgacggccucgacaaccacaccauccugcuguacuacagcacggccgccuccagccuggcggucacccucaugaucgccaucuucgugguguacauggucucccgggacaacgugagcugcuccaucugccuguga

SEQ ID NO: 91238 - RNA, 1758 nt, Artificial Sequence; identical to SEQ ID NO: 90538
  derived and/or modified CDS sequence (opt1) from hemagglutinin__InfluenzaB__AGX18313

SEQ ID NO: 91239 - RNA, 1758 nt, Artificial Sequence
  derived and/or modified CDS sequence (opt1) from hemagglutinin__InfluenzaB__AGX18324
augaaggccaucaucgugcugcucauggucgugaccagcaacgccgaccgcaucugcaccggcaucacguccagcaacagcccccacguggucaagaccgcgacccagggggaggugaacgugaccggcgucaucccgcugacgaccacccccaccaagagccacuucgccaaccugaaggggacgaagacccggggcaagcucugccccaagugccugaacugcaccgaccuggacguggcccucgggcgccccaagugcaccggcaacaucccguccgccgaggugagcauccugcacgagguccggcccgugacguccggcugcuuccccaucaugcacgaccgcaccaagauccggcagcugcccaaccuccugcgcggguacgagcacauccggcugagcacccacaacgugaucaacgccgagaaggcgccgggcgggcccuacaagaucggcaccuccgggagcugccccaacgucacgaacggcaacggcuucuucgccaccauggccugggccgugcccaagaacgacaacaacaagaccgcgaccaacucccucacgaucgaggugccguacaucugcaccgagggggaggaccagaucaccaucuggggcuuccacagcgacaacgaggcccagauggccaagcuguacggggacuccaagccccagaaguucaccagcuccgccaacggcgucacgacccacuacgugagccagaucggcggguuccccaaccagaccgaggacggcgggcugccccaguccggccgcaucguggucgacuacauggugcagaaguccgggaagaccggcacgaucaccuaccagcggggcauccuccugccgcagaagguguggugcgccuccgggcgcagcaaggucaucaagggcagccugccccucaucggggaggcggacugccugcacgagaaguacggcgggcugaacaaguccaagcccuacuacaccggcgagcacgccaaggccaucggcaacugccccaucugggugaagaccccgcucaagcuggccaacgggacgaaguaccggccgcccgccaagcugcucaaggagcgcggcuucuucggggcgaucgccggcuuccuggagggcgggugggagggcaugaucgccggguggcacggcuacaccagccacggggcccacggcguggccgucgcggccgaccugaaguccacccaggaggccaucaacaagaucaccaagaaccucaacagccuguccgagcuggaggugaagaaccuccagcggcugagcggcgccauggacgagcugcacaacgagauccucgagcuggacgagaaggucgacgaccugcgcgccgacacgaucuccagccagaucgagcucgcggugcugcuguccaacgaggggaucaucaacagcgaggacgagcaccuccuggcccuggagcggaagcucaagaagaugcugggccccuccgccguggagaucgggaacggcugcuucgagaccaagcacaagugcaaccagaccugccuggaccgcaucgccgcggggaccuucgacgccggcgaguucagccuccccaccuucgacucccugaacaucacggccgccagccugaacgacgacggccucgacaaccacaccauccugcuguacuacuccaccgccgcgagcucccuggccgucacccucaugaucgccaucuucgugguguacauggucagccgggacaacguguccugcagcaucugccuguga

SEQ ID NO: 91240 - RNA, 1758 nt, Artificial Sequence; identical to SEQ ID NO: 91198
  derived and/or modified CDS sequence (opt1) from hemagglutinin__InfluenzaB__AGX18335

SEQ ID NO: 91241 - RNA, 1758 nt, Artificial Sequence
  derived and/or modified CDS sequence (opt1) from hemagglutinin__InfluenzaB__AGX18346
augaaggccaucaucgugcugcucauggucgugaccagcaacgccgaccgcaucugcaccggcaucacguccagcaacagcccccacguggucaagaccgcgacccagggggaggugaacgugaccggcgucaucccgcugacgaccacccccaccaagagccacuucgccaaccugaaggggacgaagacccggggcaagcucugccccaagugccugaacugcaccgaccuggacguggcccucgggcgccccaagugcaccggcaacaucccguccgccgaggugagcauccugcacgagguccggcccgugacguccggcugcuuccccaucaugcacgaccgcaccaagauccggcagcugcccaaccuccugcgcggguacgagcacauccggcugagcacccacaacgugaucaacgccgagaaggcgccgggcgggcccuacaagaucggcaccuccgggagcugccccaacgucacgaacggcaacggcuucuucgccaccauggccugggccgugcccaagaacgacaacaacaagaccgcgaccaacucccucacgaucgaggugccguacaucugcaccgagggggaggaccagaucaccaucuggggcuuccacagcgacaacgagacccagauggccaagcuguacggggacuccaagccccagaaguucacgagcuccgccaacggcgucaccacccacuacgugagccagaucggcggguuccccaaccagaccgaggacggcgggcugccccaguccggccgcaucguggucgacuacauggugcagaaguccgggaagacgggcaccaucaccuaccagcggggcauccuccugccgcagaagguguggugcgccuccgggcgcagcaaggucaucaagggcagccugccccucaucggggaggccgacugccugcacgagaaguacggcgggcugaacaaguccaagcccuacuacaccggcgagcacgcgaaggccaucggcaacugccccaucugggugaagacgccgcucaagcuggccaacgggaccaaguaccggccgcccgccaagcugcucaaggagcgcggcuucuucggggccaucgcgggcuuccuggagggcgggugggagggcaugaucgccggguggcacggcuacaccagccacggggcccacggcguggccgucgccgcggaccugaaguccacccaggaggccaucaacaagaucacgaagaaccucaacagccuguccgagcuggaggugaagaaccuccagcggcugagcggcgccauggacgagcugcacaacgagauccucgagcuggacgagaaggucgacgaccugcgcgccgacaccaucuccagccagaucgagcucgccgugcugcuguccaacgaggggaucaucaacagcgaggacgagcaccuccuggcgcuggagcggaagcucaagaagaugcugggccccuccgccguggagaucgggaacggcugcuucgagaccaagcacaagugcaaccagaccugccuggaccgcaucgccgccgggaccuucgacgcgggcgaguucagccuccccacguucgacucccugaacaucaccgccgccagccugaacgaggacggccucgacaaccacaccauccugcuguacuacuccaccgccgccagcucccuggcggucacgcucaugaucgccaucuucgugguguacauggucagccgggacaacguguccugcagcaucugccuguga

SEQ ID NO: 91242 - RNA, 1758 nt, Artificial Sequence
  derived and/or modified CDS sequence (opt1) from hemagglutinin__InfluenzaB__AGX18357
augaaggccaucaucgugcugcucauggucgugaccagcaacgccgaccgcaucugcaccggcaucacguccagcaacagcccccacguggucaagaccgcgacccagggggaggugaacgugaccggcgucaucccgcugacgaccgcccccaccaagagccacuucgccaaccugaaggggaccaagacgcggggcaagcucugccccaagugccugaacugcaccgaccuggacguggcccucgggcgccccaagugcaccggcaacaucccguccgccgaggugagcauccugcacgagguccggcccgugaccuccggcugcuuccccaucaugcacgaccgcacgaagauccggcagcugcccaaccuccugcgcggguacgagcacauccggcugagcacccacaacgugaucaacgcggagaaggccccgggcgggcccuacaagaucggcaccuccgggagcugccccaacgucaccaacggcaacggcuucuucgccacgauggccugggcggugcccaagaacgacaacaacaagaccgccaccaacucccucaccaucgaggugccguacaucugcacggagggggaggaccagaucaccaucuggggcuuccacagcgacaaggagacccagauggccaagcuguacggggacuccaagccccagaaguucaccagcuccgccaacggcgucacgacccacuacgugagccagaucggcggguuccccaaccagaccgaggacggcgggcugccccaguccggccgcaucguggucgacuacauggugcagaagccggggaagaccggcacgaucaccuaccagcggggcauccuccugccccagaagguguggugcgccagcgggcgcuccaaggucaucaagggcagccugccccucaucggggaggcggacugccugcacgagaaguacggcgggcugaacaagagcaagcccuacuacaccggcgagcacgccaaggccaucggcaacugcccgaucugggugaagacgccccucaagcuggccaacgggaccaaguaccggccgcccgccaagcugcucaaggagcgcggcuucuucggggcgaucgccggcuuccuggagggcgggugggagggcaugaucgccggguggcacggcuacaccucccacggggcccacggcguggccgucgcggccgaccugaaguccacccaggaggccaucaacaagaucaccaagaaccucaacucccugagcgagcuggaggugaagaaccuccagcggcuguccagcgccauggacgagcugcacaacgagauccucgagcuggacgagaaggucgacgaccugcgcgccgacacgaucuccagccagaucgagcucgcggugcugcuguccaacgagggcaucaucaacagcgaggacgagcaccuccuggcccuggagcggaagcucaagaagaugcuggggcccuccgccguggagaucggcaacgggugcuucgagaccaagcacaagugcaaccagaccugccuggaccgcaucgccgcgggcaccuucgacgccggggaguucagccuccccaccuucgacucccugaacaucacggccgccagccugaacgacgacggccucgacaaccacaccauccugcuguacuacuccaccgccgcgagcucccuggccgucacccucaugaucgccaucuucgugguguacauggucagccgggacaacguguccugcagcaucugccuguga

SEQ ID NO: 91243 - RNA, 1758 nt, Artificial Sequence
  derived and/or modified CDS sequence (opt1) from hemagglutinin__InfluenzaB__AGX18368
augaaggccaucaucgugcugcucauggucgugaccagcaacgccgaccgcaucugcaccggcaucacguccagcaacagcccccacguggucaagaccgcgacccagggggaggugaacgugaccggcgucaucccgcugacgaccgcccccaccaagagccacuucgccaaccugaaggggaccaagacgcggggcaagcucugccccaagugccugaacugcaccgaccuggacguggcccucgggcgccccaagugcaccggcaacaccccguccgccgaggugagcauccugcacgagguccggcccgugacguccggcugcuuccccaucaugcacgaccgcaccaagauccggcagcugcccaaccuccugcgcggguacgagcacauccggcugagcaaccacaacgugaucaacgcggagaaggccccgggcgggcccuacaagaucggcaccuccgggagcugccccaacgucaccaacggcaacggcuucuucgccacgauggccugggcggugcccaagaacgacaacaacaagaccgccaccaacucccucaccaucgaggugccguacaucugcacggagggggaggaccagaucaccaucuggggcuuccacagcgacaacgagacccagauggccaagcuguacggggacuccaagccccagaaguucaccagcuccgccaacggcgucacgacccacuacgugagccagaucggcggguuccccaaccagaccgaggacggcgggcugccccaguccggccgcaucguggucgacuacauggugcagaagccggggaagaccggcacgaucaccuaccagcggggcauccuccugccccagaagguguggugcgccagcgggcgcuccaaggucaucaagggcagccugccccucaucggggaggcggacugccugcacgagaaguacggcgggcugaacaagagcaagcccuacuacaccggcgagcacgccaaggccaucggcaacugcccgaucugggugaagacgccccucaagcuggccaacgggaccaaguaccggccgcccgccaagcugcucaaggagcgcggcuucuucggggcgaucgccggcuuccuggagggcgggugggagggcaugaucgccggguggcacggcuacaccucccacggggcccacggcguggccgucgcggccgaccugaaguccacccaggaggccaucaacaagaucaccaagaaccucaacucccugagcgagcuggaggugaagaaccuccagcggcuguccagcgccauggacgagcugcacaacgagauccucgagcuggacgagaaggucgacgaccugcgcgccgacacgaucuccagccagaucgagcucgcggugcugcuguccaacgagggcaucaucaacagcgaggacgagcaccuccuggcccuggagcggaagcucaagaagaugcuggggcccuccgccguggagaucggcaacgggugcuucgagaccaagcacaagugcaaccagaccugccuggaccgcaucgccgcgggcaccuucgacgccggggaguucagccuccccaccuucgacucccugaacaucacggccgccagccugaacgacgacggccucgacaaccacaccauccugcuguacuacuccaccgccgcgagcucccuggccgucacccucaugaucgccaucuucgugguguacauggucagccgggacaacguguccugcagcaucugccuguga

SEQ ID NO: 91244 - RNA, 1758 nt, Artificial Sequence; identical to SEQ ID NO: 90662
  derived and/or modified CDS sequence (opt1) from hemagglutinin__InfluenzaB__AGX18379

SEQ ID NO: 91245 - RNA, 1758 nt, Artificial Sequence; identical to SEQ ID NO: 91198
  derived and/or modified CDS sequence (opt1) from hemagglutinin__InfluenzaB__AGX18390

SEQ ID NO: 91246 - RNA, 1758 nt, Artificial Sequence
  derived and/or modified CDS sequence (opt1) from hemagglutinin__InfluenzaB__AGX18401
augaaggccaucaucgugcugcucauggucgugaccagcaacgccgaccgcaucugcaccggcaucacguccagcaacagcccccacguggucaagaccgcgacccagggggaggugaacgugaccggcgucaucccgcugacgaccgcccccaccaagagccacuucgccaaccugaaggggaccaagacgcggggcaagcucugccccaagugccugaacugcaccgaccuggacguggcccucgggcgccccaagugcaccggcaacaucccguccgccgaggugagcauccugcacgagguccggcccgugaccuccggcugcuuccccaucaugcacgaccgcacgaagauccggcagcugcccaaccuccugcgcggguacgagcacauccggcugagcacccacaacgugaucaacgcggagaaggccccgggcgggcccuacaagaucggcaccuccgggagcugccccaacgucaccaacggcaacggcuucuucgccacgauggccugggcggugcccaagaacgacaacaacaagaccgccaccaacucccucaccaucgaggugccguacaucugcacggagggggaggaccagaucaccaucuggggcuuccacagcgacaacgagauccagauggccaagcuguacggggacuccaagccccagaaguucaccagcuccgccaacggcgucaccacgcacuacgugagccagaucggcggguuccccaaccagaccgaggacggcgggcugccccaguccggccgcaucguggucgacuacauggugcagaagccggggaagaccggcaccaucacguaccagcggggcauccuccugccccagaagguguggugcgccagcgggcgcuccaaggucaucaagggcagccugccccucaucggggaggcggacugccugcacgagaaguacggcgggcugaacaagagcaagcccuacuacaccggcgagcacgccaaggccaucggcaacugcccgaucugggugaagacgccccucaagcuggccaacgggaccaaguaccggccgcccgccaagcugcucaaggagcgcggcuucuucggggcgaucgccggcuuccuggagggcgggugggagggcaugaucgccggguggcacggcuacaccucccacggggcccacggcguggccgucgcggccgaccugaaguccacccaggaggccaucaacaagaucaccaagaaccucaacucccugagcgagcuggaggugaagaaccuccagcggcuguccagcgccauggacgagcugcacaacgagauccucgagcuggacgagaaggucgacgaccugcgcgccgacaccaucuccagccagaucgagcucgcggugcugcuguccaacgagggcaucaucaacagcgaggacgagcaccuccuggcccuggagcggaagcucaagaagaugcuggggcccuccgccguggagaucggcaacgggugcuucgagacgaagcacaagugcaaccagaccugccuggaccgcaucgccgcgggcaccuucgacgccggggaguucagccuccccaccuucgacucccugaacaucaccgccgccagccugaacgacgacggccucgacaaccacacgauccugcuguacuacuccaccgccgcgagcucccuggccgucacccucaugaucgccaucuucgugguguacauggucagccgggacaacguguccugcagcaucugccuguga

SEQ ID NO: 91247 - RNA, 1758 nt, Artificial Sequence
  derived and/or modified CDS sequence (opt1) from hemagglutinin__InfluenzaB__AGX18412
augaaggccaucaucgugcugcucauggucgugaccagcaacgccgaccgcaucugcaccggcaucacguccagcaacagcccccacguggucaagaccgcgacccagggggaggugaacgugaccggcgucaucccgcugacgaccacccccaccaagagccacuucgccaaccugaaggggacgaagacccggggcaagcucugccccaagugccugaacugcaccgaccuggacguggcccucgggcgccccaagugcaccggcaacaucccguccgccgaggugagcauccugcacgagguccggcccgugacguccggcugcuuccccaucaugcacgaccgcaccaagauccggcagcugcccaaccuccugcgcggguacgagcacauccggcugagcaaccacaacgugaucaacgccgagaaggcgccgggcgggcccuacaagaucggcaccuccgggagcugccccaacgucaccaacggcaacggcuucuucgccacgauggccugggccgugcccaagaacgacaacaacaagaccgcgaccaacucccucaccaucgaggugccguacaucugcacggagggggaggaccagaucaccaucuggggcuuccacagcgacaacgaggcccagauggccaagcuguacggggacuccaagccccagaaguucaccagcuccgccaacggcgucaccacgcacuacgugagccagaucggcggguuccccaaccagaccgaggacggcgggcugccccaguccggccgcaucguggucgacuacauggugcagaaguccgggaagaccggcaccaucacguaccagcggggcauccuccugccgcagaagguguggugcgccuccgggcgcagcaaggucaucaagggcagccugccccucaucggggaggcggacugccugcacgagaaguacggcgggcugaacaaguccaagcccuacuacaccggcgagcacgccaaggccaucggcaacugccccaucugggugaagaccccgcucaagcuggccaacgggaccaaguaccggccgcccgccaagcugcucaaggagcgcggcuucuucggggcgaucgccggcuuccuggagggcgggugggagggcaugaucgccggguggcacggcuacacgagccacggggcccacggcguggccgucgcggccgaccugaaguccacccaggaggccaucaacaagaucaccaagaaccucaacagccuguccgagcuggaggugaagaaccuccagcggcugagcggcgccauggacgagcugcacaacgagauccucgagcuggacgagaaggucgacgaccugcgcgccgacaccaucuccagccagaucgagcucgcggugcugcuguccaacgaggggaucaucaacagcgaggacgagcaccuccuggcccuggagcggaagcucaagaagaugcugggccccuccgccguggagaucgggaacggcugcuucgagacgaagcacaagugcaaccagaccugccuggaccgcaucgccgcggggaccuucgacgccggcgaguucagccuccccaccuucgacucccugaacaucaccgccgccagccugaacgacgacggccucgacaaccacacgauccugcuguacuacuccaccgccgcgagcucccuggccgucacccucaugaucgccaucuucgugguguacauggucagccgggacaacguguccugcagcaucugccuguga

SEQ ID NO: 91248 - RNA, 1758 nt, Artificial Sequence; identical to SEQ ID NO: 91005
  derived and/or modified CDS sequence (opt1) from hemagglutinin__InfluenzaB__AGX18423

SEQ ID NO: 91249 - RNA, 1755 nt, Artificial Sequence
  derived and/or modified CDS sequence (opt1) from hemagglutinin__InfluenzaB__AGX18424
augaaggccaucaucgugcugcucauggucgugaccagcaacgccgaccgcaucugcaccggcaucacguccagcaacagcccccacguggucaagaccgcgacccagggggaggugaacgugaccggcgucaucccgcugacgaccacccccaucaagucccacuucgccaaccugaaggggacccggacgcgcggcaagcucugccccgacugccugaacugcaccgaccuggacguggcccucgggcggcccaugugcgugggcaccaccccguccgccaaggccagcauccugcacgagguccgccccgugacguccggcugcuuccccaucaugcacgaccggaccaagauccgccagcugcccaaccuccugcggggguacgagaacauccgccugagcacccagaacgugaucgacgcggagaaggcccucggcgggccguaccggcugggcaccuccgggagcugccccaacgccacguccaagagcggcuucuucgccaccauggcgugggccguccccaaggacaacaacaagaacgccaccaacccccugaccguggaggugccguacaucugcacggagggcgaggaccagaucaccgucuggggguuccacuccgacgacaagacccagaugaagaaccucuacggcgacagcaacccccagaaguucaccuccagcgccaacggggugacgacccacuacgugucccagaucggcggcuuccccgaccagaccgaggacgggggccugccccagagcgggcgcaucgucguggacuacauggugcagaagccgggcaagaccgggacgaucgucuaccagcggggcgugcugcucccccagaagguguggugcgccuccggccgcagcaaggucaucaaggggagccugccccugaucggcgaggcggacugccuccacgagaaguacgggggccugaacaaguccaagcccuacuacaccggggagcacgccaaggccaucggcaacugcccgaucugggugaagacgccccugaagcucgccaacggcaccaaguaccggccgcccgccaagcugcugaaggagcgcggguucuucggcgcgaucgccggguuccucgagggcgggugggagggcaugaucgccggcuggcacggguacaccagccacggcgcccacggggucgccguggcggccgaccugaaguccacccaggaggccaucaacaagaucaccaagaaccugaacagccucuccgagcuggaggugaagaaccugcagcggcucagcggcgccauggacgagcugcacaacgagauccuggagcucgacgagaaggucgacgaccugcgcgccgacaccaucuccagccagaucgagcuggcggugcuccuguccaacgagggcaucaucaacagcgaggacgagcaccuccuggcccuggagcggaagcugaagaagaugcucgggcccuccgccguggacaucggcaacgggugcuucgagacgaagcacaagugcaaccagaccugccuggaccgcaucgccgcgggcaccuucaacgccggggaguucagccugcccaccuucgacucccucaacaucaccgccgccagccugaacgacgacggccuggacaaccacacgauccugcucuacuacuccaccgccgcgagcucccuggccgucacccugaugcucgccaucuucaucguguacauggugagccgggacaacgucuccugcagcaucugccuguga

SEQ ID NO: 91250 - RNA, 1758 nt, Artificial Sequence
  derived and/or modified CDS sequence (opt1) from hemagglutinin__InfluenzaB__AGX18435
augaaggccaucaucgugcugcucauggucgugaccagcaacgccgaccgcaucugcaccggcaucacguccagcaacagcccccacguggucaagaccgcgacccagggggaggugaacgugaccggcgucaucccgcugacgaccacccccaccaagagccacuucgccaaccugaaggggacgaagacccggggcaagcucugccccaagugccugaacugcaccgaccuggacguggcccucgggcgccccaagugcaccggcaacaucccguccgccgaggugagcauccugcacgagguccggcccgugacguccggcugcuuccccaucaugcacgaccgcaccaagauccggcagcugcccaaccuccugcgcggguacgagcacauccggcugagcacccacaacgugaucaacgccgagaaggcgccgggcgggcccuacaagaucggcaccuccgggagcugccccaacgucacgaacggcaacggcuucuucgccaccauggccugggccgugcccaagaacgacaacaacaagaccgcgaccaacucccucacgaucgaggugccguacaucugcaccgagggggaggaccagaucaccaucuggggcuuccacagcgacaacgagauccagauggccaagcuguacggggacuccaagccccagaaguucaccagcuccgccaacggcgucacgacccacuacgugagccagaucggcggguuccccaaccagaccgaggacggcgggcugccccaguccggccgcaucguggucgacuacauggugcagaaguccgggaagaccggcacgaucaccuaccagcggggcauccuccugccgcagaagguguggugcgccuccgggcgcagcaaggucaucaagggcagccugccccucaucggggaggccgacugccugcacgagaaguacggcgggcugaacaaguccaagcccuacuacaccggcgagcacgcgaaggccaucggcaacugccccaucugggugaagaccccgcucaagcuggccaacgggacgaaguaccggccgcccgccaagcugcucaaggagcgcggcuucuucggggccaucgcgggcuuccuggagggcgggugggagggcaugaucgccggguggcacggcuacaccagccacggggcccacggcguggccgucgccgcggaccugaaguccacccaggaggccaucaacaagaucaccaagaaccucaacagccuguccgagcuggaggugaagaaccuccagcggcugagcggcgccauggacgagcugcacaacgagauccucgagcuggacgagaaggucgacgaccugcgcgccgacacgaucuccagccagaucgagcucgccgugcugcuguccaacgaggggaucaucaacagcgaggacgagcaccuccuggcgcuggagcggaagcucaagaagaugcugggccccuccgccguggagaucgggaacggcugcuucgagaccaagcacaagugcaaccagaccugccuggaccgcaucgccgccgggaccuucgacgcgggcgaguucagccuccccaccuucgacucccugaacaucacggccgccagccugaacgacgacggccucgacaaccacaccauccugcuguacuacuccaccgccgccagcucccuggcggucacccucaugaucgccaucuucgugguguacauggucagccgggacaacguguccugcagcaucugccuguga

SEQ ID NO: 91251 - RNA, 1758 nt, Artificial Sequence; identical to SEQ ID NO: 90662
  derived and/or modified CDS sequence (opt1) from hemagglutinin__InfluenzaB__AGX18446

SEQ ID NO: 91252 - RNA, 1758 nt, Artificial Sequence; identical to SEQ ID NO: 91198
  derived and/or modified CDS sequence (opt1) from hemagglutinin__InfluenzaB__AGX18457

SEQ ID NO: 91253 - RNA, 1758 nt, Artificial Sequence; identical to SEQ ID NO: 91005
  derived and/or modified CDS sequence (opt1) from hemagglutinin__InfluenzaB__AGX18468

SEQ ID NO: 91254 - RNA, 1758 nt, Artificial Sequence; identical to SEQ ID NO: 91198
  derived and/or modified CDS sequence (opt1) from hemagglutinin__InfluenzaB__AGX18479

SEQ ID NO: 91255 - RNA, 1758 nt, Artificial Sequence; identical to SEQ ID NO: 90538
  derived and/or modified CDS sequence (opt1) from hemagglutinin__InfluenzaB__AGX18490

SEQ ID NO: 91256 - RNA, 1758 nt, Artificial Sequence
  derived and/or modified CDS sequence (opt1) from hemagglutinin__InfluenzaB__AGX18512
augaaggccaucaucgugcugcucauggucgugaccagcaacgccgaccgcaucugcaccggcaucacguccagcaacagcccccacguggucaagaccgcgacccagggggaggugaacgugaccggcgucaucccgcugacgaccacccccaccaagagccacuucgccaaccugaaggggacggagacccggggccgccucugccccaagugccugaacugcaccgaccuggacguggcccucgggcggcccaagugcaccggcaacaucccguccgcccgcgugagcauccugcacgagguccggcccgugacguccggcugcuuccccaucaugcacgaccgcaccaagauccggcagcugcccaaccuccugcgcggguacgagcacauccggcugagcacccacaacgugaucaacgccgagaacgcgccgggcgggcccuacaagaucggcaccuccgggagcugccccaacgucacgaacggcaacggcuucuucgccaccauggccugggccgugcccaagaacgacaacaacaagaccgcgaccaacucccucacgaucgaggugccguacaucugcaccgagggggaggaccagaucaccgucuggggcuuccacagcgacaacgagacccagauggccaagcuguacggggacuccaagccccagaaguucacgagcuccgccaacggcgugaccacccacuacgugagccagaucggcggguuccccaaccagaccgaggacggcgggcugccccaguccggccgcaucgucguggacuacauggugcagaaguccgggaagacgggcaccaucaccuaccagcggggcauccuccugccgcagaaggucuggugcgccuccgggcgcagcaaggugaucaagggcagccugccccucaucggggaggccgacugccugcacgagaaguacggcgggcugaacaaguccaagcccuacuacaccggcgagcacgcgaaggccaucggcaacugccccaucugggugaagacgccgcucaagcuggccaacgggaccaaguaccggccgcccgccaagcugcucaaggagcgcggcuucuucggggccaucgcgggcuuccuggagggcgggugggagggcaugaucgccggguggcacggcuacaccagccacggggcccacggcgucgccguggccgcggaccugaaguccacccaggaggccaucaacaagaucacgaagaaccucaacagccuguccgagcuggaggucaagaaccuccagcggcugagcggcgccauggacgagcugcacaacgagauccucgagcuggacgagaagguggacgaccugcgcgccgacaccaucuccagccagaucgagcucgccgugcugcuguccaacgaggggaucaucaacagcgaggacgagcaccuccuggcgcuggagcggaagcucaagaagaugcugggccccuccgccgucgagaucgggaacggcugcuucgagaccaagcacaagugcaaccagaccugccuggaccgcaucgccgccgggaccuucgacgcgggcgaguucagccuccccacguucgacucccugaacaucaccgccgccagccugaacgacgacggccucgacaaccacaccauccugcuguacuacuccaccgccgccagcucccuggcggugacgcucaugaucgccaucuucguggucuacauggugagccgggacaacguguccugcagcaucugccuguga

SEQ ID NO: 91257 - RNA, 1758 nt, Artificial Sequence; identical to SEQ ID NO: 90538
  derived and/or modified CDS sequence (opt1) from hemagglutinin__InfluenzaB__AGX18523

SEQ ID NO: 91258 - RNA, 1758 nt, Artificial Sequence; identical to SEQ ID NO: 90538
  derived and/or modified CDS sequence (opt1) from hemagglutinin__InfluenzaB__AGX18534

SEQ ID NO: 91259 - RNA, 1758 nt, Artificial Sequence; identical to SEQ ID NO: 90599
  derived and/or modified CDS sequence (opt1) from hemagglutinin__InfluenzaB__AGX18545

SEQ ID NO: 91260 - RNA, 1758 nt, Artificial Sequence; identical to SEQ ID NO: 90538
  derived and/or modified CDS sequence (opt1) from hemagglutinin__InfluenzaB__AGX18556

SEQ ID NO: 91261 - RNA, 1758 nt, Artificial Sequence; identical to SEQ ID NO: 90538
  derived and/or modified CDS sequence (opt1) from hemagglutinin__InfluenzaB__AGX18567

SEQ ID NO: 91262 - RNA, 1758 nt, Artificial Sequence
  derived and/or modified CDS sequence (opt1) from hemagglutinin__InfluenzaB__AGX18578
augaaggccaucaucgugcugcucauggucgugaccagcaacgccgaccgcaucugcaccggcaucacguccagcaacagcccccacguggucaagaccgcgacccagggggaggugaacgugaccggcgucaucccgcugacgaccacccccaccaagagccacuucgccaaccugaaggggacggagacccggggcaagcucugccccaagugccugaacugcaccgaccuggacguggcccucgggcgccccaagugcaccggcaacaucccguccgcccgggugagcauccugcacgagguccgccccgugacguccggcugcuuccccaucaugcacgaccggaccaagauccgccagcugcccaaccuccugcggggguacgagcacauccgccugagcacccacaacgugaucaacgccgagaacgcgccgggcgggcccuacaagaucggcaccuccgggagcugccccaacgucacgaacggcaacggcuucuucgccaccauggccugggccgugcccaagaacgacaagaacaagaccgcgaccaacucccucacgaucgaggugccguacaucugcaccgagggggaggaccagaucaccgucuggggcuuccacagcgacaacgagacccagauggccaagcuguacggggacuccaagccccagaaguucacgagcuccgccaacggcgugaccacccacuacgugagccagaucggcggguuccccaaccagaccgaggacggcgggcugccccaguccggccggaucgucguggacuacauggugcagaaguccgggaagacgggcaccaucaccuaccagcgcggcauccuccugccgcagaaggucuggugcgccuccgggcggagcaaggugaucaagggcagccugccccucaucggggaggccgacugccugcacgagaaguacggcgggcugaacaaguccaagcccuacuacaccggcgagcacgcgaaggccaucggcaacugccccaucugggugaagacgccgcucaagcuggccaacgggaccaaguaccgcccgcccgccaagcugcucaaggagcggggcuucuucggggccaucgcgggcuuccuggagggcgggugggagggcaugaucgccggguggcacggcuacaccagccacggggcccacggcgucgccguggccgcggaccugaaguccacccaggaggccaucaacaagaucacgaagaaccucaacagccuguccgagcuggaggucaagaaccuccagcgccugagcggcgccauggacgagcugcacaaggagauccucgagcuggacgagaagguggacgaccugcgggccgacaccaucuccagccagaucgagcucgccgugcugcuguccaacgaggggaucaucaacagcgaggacgagcaccuccuggcgcuggagcgcaagcucaagaagaugcugggccccuccgccgucgagaucgggaacggcugcuucgagaccaagcacaagugcaaccagaccugccuggaccggaucgccgccgggaccuucgacgcgggcgaguucagccuccccacguucgacucccugaacaucaccgccgccagccugaacgacgacggccucgacaaccacaccauccugcuguacuacuccaccgccgccagcucccuggcggugacgcucaugaucgccaucuucguggucuacauggugagccgcgacaacguguccugcagcaucugccuguga

SEQ ID NO: 91263 - RNA, 1758 nt, Artificial Sequence
  derived and/or modified CDS sequence (opt1) from hemagglutinin__InfluenzaB__AGX18589
augaaggccaucaucgugcugcucauggucgugaccagcaacgccgaccgcaucugcaccggcaucacguccagcaacagcccccacguggucaagaccgcgacccagggggaggugaacgugaccggcgucaucccgcugacgaccacccccaccaagagccacuucgccaaccugaaggggacggagacccggggcaagcucugccccaagugccugaacugcaccgaccuggacguggcccucgggcgccccaagugcaccggcaacaucccguccgcccgggugagcauccugcacgagguccgccccgugacguccggcugcuuccccaucaugcacgaccggaccaagauccgccagcugcccaaccuccugcggggguacgagcacauccgccugagcacccacaacgugaucaacgccgagaacgcgccgggcgggcccuacaagaucggcaccuccgggagcugccccaacgucacgaacggcaacggcuucuucgccaccauggccugggccgugcccaagaacgacaacaacaagaccgcgaccaacucccucacgaucgaggugccguacaucugcaccgagggggaggaccagaucaccgucuggggcuuccacagcgacaccgagacgcagauggccaagcuguacggggacuccaagccccagaaguucaccagcuccgccaacggcgugaccacccacuacgugagccagaucggcgacuuccccaaccagacggaggacgggggccugccccaguccgggcggaucgucguggacuacauggugcagaaguccggcaagaccgggaccaucaccuaccagcgcggcauccuccugccgcagaaggucuggugcgccuccggccggagcaaggugaucaaggggagccugccccucaucggcgaggccgacugccugcacgagaaguacgggggccugaacaaguccaagcccuacuacacgggggagcacgcgaaggccaucggcaacugccccaucugggugaagaccccgcucaagcuggccaacggcaccaaguaccgcccgcccgccaagcugcucaaggagcggggguucuucggcgccaucgcgggguuccuggagggcgggugggagggcaugaucgccggcuggcacggguacaccagccacggcgcccacggggucgccguggccgcggaccugaaguccacgcaggaggccaucaacaagaucaccaagaaccucaacagccuguccgagcuggaggucaagaaccuccagcgccugagcggcgccauggacgagcugcacaacgagauccucgagcuggacgagaagguggacgaccugcgggccgacaccaucuccagccagaucgagcucgccgugcugcuguccaacgagggcaucaucaacagcgaggacgagcaccuccuggcgcuggagcgcaagcucaagaagaugcuggggcccuccgccgucgagaucggcaacgggugcuucgagaccaagcacaagugcaaccagaccugccuggaccggaucgccgccggcacguucgacgcgggggaguucagccuccccaccuucgacucccugaacaucaccgccgccagccugaacgacgacggccucgacaaccacaccauccugcuguacuacuccacggccgccagcucccuggcggugacccucaugaucgccaucuucguggucuacauggugagccgcgacaacguguccugcagcaucugccuguga

SEQ ID NO: 91264 - RNA, 1758 nt, Artificial Sequence; identical to SEQ ID NO: 90538
  derived and/or modified CDS sequence (opt1) from hemagglutinin__InfluenzaB__AGX18600

SEQ ID NO: 91265 - RNA, 1758 nt, Artificial Sequence; identical to SEQ ID NO: 90538
  derived and/or modified CDS sequence (opt1) from hemagglutinin__InfluenzaB__AGX18611

SEQ ID NO: 91266 - RNA, 1758 nt, Artificial Sequence; identical to SEQ ID NO: 90538
  derived and/or modified CDS sequence (opt1) from hemagglutinin__InfluenzaB__AGX18622

SEQ ID NO: 91267 - RNA, 1758 nt, Artificial Sequence; identical to SEQ ID NO: 90538
  derived and/or modified CDS sequence (opt1) from hemagglutinin__InfluenzaB__AGX18633

SEQ ID NO: 91268 - RNA, 1758 nt, Artificial Sequence; identical to SEQ ID NO: 90538
  derived and/or modified CDS sequence (opt1) from hemagglutinin__InfluenzaB__AGX18644

SEQ ID NO: 91269 - RNA, 1758 nt, Artificial Sequence; identical to SEQ ID NO: 90538
  derived and/or modified CDS sequence (opt1) from hemagglutinin__InfluenzaB__AGX18655

SEQ ID NO: 91270 - RNA, 1758 nt, Artificial Sequence; identical to SEQ ID NO: 90538
  derived and/or modified CDS sequence (opt1) from hemagglutinin__InfluenzaB__AGX18666

SEQ ID NO: 91271 - RNA, 1758 nt, Artificial Sequence; identical to SEQ ID NO: 90538
  derived and/or modified CDS sequence (opt1) from hemagglutinin__InfluenzaB__AGX18677

SEQ ID NO: 91272 - RNA, 1758 nt, Artificial Sequence; identical to SEQ ID NO: 90538
  derived and/or modified CDS sequence (opt1) from hemagglutinin__InfluenzaB__AGX18688

SEQ ID NO: 91273 - RNA, 1758 nt, Artificial Sequence; identical to SEQ ID NO: 90538
  derived and/or modified CDS sequence (opt1) from hemagglutinin__InfluenzaB__AGX18699

SEQ ID NO: 91274 - RNA, 1758 nt, Artificial Sequence; identical to SEQ ID NO: 90538
  derived and/or modified CDS sequence (opt1) from hemagglutinin__InfluenzaB__AGX18710

SEQ ID NO: 91275 - RNA, 1758 nt, Artificial Sequence; identical to SEQ ID NO: 90538
  derived and/or modified CDS sequence (opt1) from hemagglutinin__InfluenzaB__AGX18721

SEQ ID NO: 91276 - RNA, 1758 nt, Artificial Sequence; identical to SEQ ID NO: 90538
  derived and/or modified CDS sequence (opt1) from hemagglutinin__InfluenzaB__AGX18732

SEQ ID NO: 91277 - RNA, 1758 nt, Artificial Sequence
  derived and/or modified CDS sequence (opt1) from hemagglutinin__InfluenzaB__AGX18743
augaaggccaucaucgugcugcucauggucgugaccagcaacgccgaccgcaucugcaccggcaucacguccagcaacagcccccacguggucaagaccgcgacccagggggaggugaacgugaccggcgucaucccgcugacgaccacccccaccaagagccacuucgccaaccugaaggggacggagacccggggcaagcucugccccaagugccugaacugcaccgaccuggacguggcccucgggcgccccaagugcaccggcaacaucccguccgcccgggugagcauccugcacgagguccgccccgugacguccggcugcuuccccaucaugcacgaccggaccaagauccgccagcugcccaaccuccugcggggguacgagcacauccgccugagcaaccacaacgugaucaacgccgagaacgcgccgggcgggcccuacaagaucggcaccuccgggagcugccccaacgucaccaacggcaacggcuucuucgccacgauggccugggccgugcccaagaacgacaacaacaagaccgcgaccaacucccucaccaucgaggugccguacaucugcacggagggggaggaccagaucaccgucuggggcuuccacagcgacaacgagacccagauggccaagcuguacggggacuccaagccccagaaguucaccagcuccgccaacggcgugacgacccacuacgugagccagaucggcggguuccccaaccagaccgaggacggcgggcugccccaguccggccggaucgucguggacuacauggugcagaaguccgggaagaccggcacgaucaccuaccagcgcggcauccuccugccgcagaaggucuggugcgccuccgggcggagcaaggugaucaagggcagccugccccucaucggggaggccgacugccugcacgagaaguacggcgggcugaacaaguccaagcccuacuacaccggcgagcacgcgaaggccaucggcaacugccccaucugggugaagaccccgcucaagcuggccaacgggacgaaguaccgcccgcccgccaagcugcucaaggagcggggcuucuucggggccaucgcgggcuuccuggagggcgggugggagggcaugaucgccggguggcacggcuacaccagccacggggcccacggcgucgccguggccgcggaccugaaguccacccaggaggccaucaacaagaucaccaagaaccucaacagccuguccgagcuggaggucaagaaccuccagcgccugagcggcgccauggacgagcugcacaacgagauccucgagcuggacgagaagguggacgaccugcgggccgacacgaucuccagccagaucgagcucgccgugcugcuguccaacgaggggaucaucaacagcgaggacgagcaccuccuggcgcuggagcgcaagcucaagaagaugcugggccccuccgccgucgagaucgggaacggcugcuucgagaccaagcacaagugcaaccagaccugccuggaccggaucgccgccgggaccuucgacgcgggcgaguucagccuccccaccuucgacucccugaacaucacggccgccagccugaacgacgacggccucgacaaccacaccauccugcuguacuacuccaccgccgccagcucccuggcggugacccucaugaucgccaucuucguggucuacauggugagccgcgacaacguguccugcagcaucugccuguga

SEQ ID NO: 91278 - RNA, 1758 nt, Artificial Sequence; identical to SEQ ID NO: 90538
  derived and/or modified CDS sequence (opt1) from hemagglutinin__InfluenzaB__AGX18754

SEQ ID NO: 91279 - RNA, 1758 nt, Artificial Sequence; identical to SEQ ID NO: 90538
  derived and/or modified CDS sequence (opt1) from hemagglutinin__InfluenzaB__AGX18765

SEQ ID NO: 91280 - RNA, 1758 nt, Artificial Sequence; identical to SEQ ID NO: 90589
  derived and/or modified CDS sequence (opt1) from hemagglutinin__InfluenzaB__AGX18776

SEQ ID NO: 91281 - RNA, 1758 nt, Artificial Sequence; identical to SEQ ID NO: 90538
  derived and/or modified CDS sequence (opt1) from hemagglutinin__InfluenzaB__AGX18787

SEQ ID NO: 91282 - RNA, 1758 nt, Artificial Sequence; identical to SEQ ID NO: 90538
  derived and/or modified CDS sequence (opt1) from hemagglutinin__InfluenzaB__AGX18798

SEQ ID NO: 91283 - RNA, 1758 nt, Artificial Sequence
  derived and/or modified CDS sequence (opt1) from hemagglutinin__InfluenzaB__AGX18809
augaaggccaucaucgugcugcucauggucgugaccagcaacgccgaccgcaucugcaccggcaucacguccagcaacagcccccacguggucaagaccgcgacccagggggaggugaacgugaccggcgucaucccgcugacgaccacccccaccaagagccacuucgccaaccugaaggggacggagacccggggcaagcucugccccaagugccugaacugcaccgaccuggacguggcccucgggcgccccaagugcaccggcaacaucccguccgcccgggugagcauccugcacgagguccgccccgugacguccggcugcuuccccaucaugcacgaccggaccaagauccgccagcugcccaaccuccugcggggguacgagcacauccgccugagcacccacaacgugaucaacgccgagaacgcgccgggcgggcccuacaagaucggcaccuccgggagcugccccaacgucacgaacggcaacggcuucuucgccaccauggccugggccgugcccaagaacgacaacaacaagaccgcgaccaacucccucacgaucgaggugccguacaucugcaccgagggggaggaccagaucaccgucuggggcuuccacagcgacuccgagacccagauggccaagcuguacggggacagcaagccccagaaguucacguccagcgccaacggcgugaccacccacuacgugucccagaucggcggguuccccaaccagaccgaggacggcgggcugccccagagcggccggaucgucguggacuacaugaugcagaaguccgggaagacgggcaccaucaccuaccagcgcggcauccuccugccgcagaagguguggugcgccagcgggcggagcaaggucaucaagggcucccugccccucaucggggaggccgacugccugcacgagaaguacggcgggcugaacaagagcaagcccuacuacaccggcgagcacgcgaaggccaucggcaacugccccaucugggugaagacgccgcucaagcuggccaacgggaccaaguaccgcccgcccgccaagcugcucaaggagcggggcuucuucggggccaucgcgggcuuccuggagggcgggugggagggcaugaucgccggguggcacggcuacaccucccacggggcccacggcguggccgucgccgcggaccugaaguccacccaggaggccaucaacaagaucacgaagaaccucaacucccugagcgagcuggaggugaagaaccuccagcgccuguccggcgccauggacgagcugcacaacgagauccucgagcuggacgagaaggucgacgaccugcgggccgacaccaucagcucccagaucgagcucgccgugcugcugagcaacgaggggaucaucaacuccgaggacgagcaccuccuggcgcuggagcgcaagcucaagaagaugcugggccccagcgccguggagaucgggaacggcugcuucgagaccaagcacaagugcaaccagaccugccuggaccggaucgccgccgggaccuucgacgcgggcgaguucucccuccccacguucgacagccugaacaucaccgccgccucccugaacgacgacggccucgacaaccacaccauccugcuguacuacagcaccgccgccuccagccuggcggucacgcucaugaucgccaucuucgugguguacauggucucccgcgacaacgugagcugcagcaucugccuguga

SEQ ID NO: 91284 - RNA, 1758 nt, Artificial Sequence; identical to SEQ ID NO: 91201
  derived and/or modified CDS sequence (opt1) from hemagglutinin__InfluenzaB__AGX18820

SEQ ID NO: 91285 - RNA, 1758 nt, Artificial Sequence; identical to SEQ ID NO: 90538
  derived and/or modified CDS sequence (opt1) from hemagglutinin__InfluenzaB__AGX18831

SEQ ID NO: 91286 - RNA, 1758 nt, Artificial Sequence; identical to SEQ ID NO: 90538
  derived and/or modified CDS sequence (opt1) from hemagglutinin__InfluenzaB__AGX18842

SEQ ID NO: 91287 - RNA, 1758 nt, Artificial Sequence; identical to SEQ ID NO: 90606
  derived and/or modified CDS sequence (opt1) from hemagglutinin__InfluenzaB__AGX18853

SEQ ID NO: 91288 - RNA, 1758 nt, Artificial Sequence
  derived and/or modified CDS sequence (opt1) from hemagglutinin__InfluenzaB__AGX18864
augaaggccaucaucgugcugcucauggucgugaccagcaacgccgaccgcaucugcaccggcaucacguccagcaacagcccccacguggucaagaccgcgacccagggggaggugaacgugaccggcgucaucccgcugacgaccacccccaccaagagcuacuucgccaaccugaaggggacggagacccggggcaagcucugccccaagugccugaacugcaccgaccuggacguggcccucgggcgccccaagugcaccggcaacaucccguccgcccgggugagcauccugcacgagguccgccccgugacguccggcugcuuccccaucaugcacgaccggaccaagauccgccagcugcccaaccuccugcggggguacgagcacauccgccugagcaaccacaacgugaucaacgccgagaacgcgccgggcgggcccuacaagaucggcaccuccgggagcugccccaacgucaccaacggcaacggcuucuucgccacgauggccugggccgugcccaagaacgacaacaacaagaccgcgaccaacucccucaccaucgaggugccguacaucugcacggagggggaggaccagaucaccgucuggggcuuccacagcgacaacgaggcccagauggccaagcuguacggggacuccaagccccagaaguucaccagcuccgccaacggcgugaccacgcacuacgugagccagaucggcggguuccccaaccagaccgaggacggcgggcugccccaguccggccggaucgucguggacuacauggugcagaaguccgggaagaccggcaccaucacguaccagcgcggcauccuccugccgcagaaggucuggugcgccuccgggcggagcaaggugaucaagggcagccugccccucaucggggaggcggacugccugcacgagaaguacggcgggcugaacaaguccaagcccuacuacaccggcgagcacgccaaggccaucggcaacugccccaucugggugaagaccccgcucaagcuggccaacgggaccaaguaccgcccgcccgccaagcugcucaaggagcggggcuucuucggggcgaucgccggcuuccuggagggcgggugggagggcaugaucgccggguggcacggcuacacgagccacggggcccacggcgucgccguggcggccgaccugaaguccacccaggaggccaucaacaagaucaccaagaaccucaacagccuguccgagcuggaggucaagaaccuccagcgccugagcggcgccauggacgagcugcacaacgagauccucgagcuggacgagaagguggacgaccugcgggccgacaccaucuccagccagaucgagcucgcggugcugcuguccaacgaggggaucaucaacagcgaggacgagcaccuccuggcccuggagcgcaagcucaagaagaugcugggccccuccgccgucgagaucgggaacggcugcuucgagacgaagcacaagugcaaccagaccugccuggaccggaucgccgcggggaccuucgacgccggcgaguucagccuccccaccuucgacucccugaacaucaccgccgccagccugaacgacgacggccucgacaaccacacgauccugcuguacuacuccaccgccgcgagcucccuggccgugacccucaugaucgccaucuucguggucuacauggugagccgcgacaacguguccugcagcaucugccuguga

SEQ ID NO: 91289 - RNA, 1758 nt, Artificial Sequence
  derived and/or modified CDS sequence (opt1) from hemagglutinin__InfluenzaB__AGX18875
augaaggccaucaucgugcugcucauggucgugaccagcaacgccgaccgcaucugcaccggcaucacguccagcaacagcccccacguggucaagaccgcgacccagggggaggugaacgugaccggcgucaucccgcugacgaccacccccaccaagagccacuucgccaaccugaaggggacggagacccggggcaagcucugccccaagugccugaacugcaccgaccuggacguggcccucgggcgccccaagugcaccggcaacaucccguccgcccgggugagcauccugcacgagguccgccccgugacguccggcugcuuccccaucaugcacgaccggaccaagauccgccagcugcccaaccuccugcggggguacgagcacauccgccugagcacccacaacgugaucaacgccgagaacgcgccgggcgggcccuacaagaucggcaccuccgggagcugccccaacgucacgaaccggaacggcuucuucgccaccauggccugggccgugcccaagaacgacaacaacaagaccgcgaccaacucccucacgaucgaggugccguacaucugcaccgagggcgaggaccagaucaccgucuggggguuccacagcgacaacgagauccagauggccaagcuguacggcgacuccaagccccagaaguucaccagcuccgccaacggggugacgacccacuacgugagccagaucggcggcuuccccaaccagaccgaggacgggggccugccccaguccgggcgcaucgucguggacuacauggugcagaaguccggcaagaccgggacgaucaccuaccagcggggcauccuccugccgcagaaggucuggugcgccuccggccgcagcaaggugaucaaggggagccugccccucaucggcgaggccgacugccugcacgagaaguacgggggccugaacaaguccaagcccuacuacaccggggagcacgcgaaggccaucggcaacugccccaucugggugaagaccccgcucaagcuggccaacggcacgaaguaccggccgcccgccaagcugcucaaggagcgcggguucuucggcgccaucgcgggguuccuggagggcgggugggagggcaugaucgccggcuggcacggguacaccagccacggcgcccacggggucgccguggccgcggaccugaaguccacccaggaggccaucaacaagaucaccaagaaccucaacagccuguccgagcuggaggucaagaaccuccagcggcugagcggcgccaucgacgagcugcacaacgagauccucgagcuggacgagaagguggacgaccugcgcgccgacacgaucuccagccagaucgagcucgccgugcugcuguccaacgagggcaucaucaacagcgaggacgagcaccuccuggcgcuggagcggaagcucaagaagaugcuggggcccuccgccgucgagaucggcaacgggugcuucgagaccaagcacaagugcaaccagaccugccuggaccgcaucgccgccggcaccuucgacgcgggggaguucagccuccccaccuucgacucccugaacaucacggccgccagccugaacgacgacggccucgacaaccacaccauccugcuguacuacuccaccgccgccagcucccuggcggugacccucaugaucgccaucuucguggucuacauggugagccgggacaacguguccugcagcaucugccuguga

SEQ ID NO: 91290 - RNA, 1758 nt, Artificial Sequence
  derived and/or modified CDS sequence (opt1) from hemagglutinin__InfluenzaB__AGX18886
augaaggccaucaucgugcugcucauggucgugaccagcaacgccgaccgcaucugcaccggcaucacguccagcaacagcccccacguggucaagaccgcgacccagggggaggugaacgugaccggcgucaucccgcugacgaccacccccaccaagagccacuucgccaaccugaaggggacggagacccggggcaagcucugccccaagugccugaacugcaccgaccuggacguggcccucgggcgccccaagugcaccggcaacaucccguccgcccgggugagcauccugcacgagguccgccccgugacguccggcugcuuccccaucaugcacgaccggaccaagauccgccagcugcccaaccuccugcggggguacgagcacauccgccugagcacccacaacgugaucaacgccgagaacgcgccgggcgggcccuacaagaucggcaccuccgggagcugccccaacgucacgaacggcaacggcuucuucgccaccauggccugggccgugcccaagaacgacaacaacaagaccgcgaccaacucccucacgaucgaggugccguacaucugcaccgagggggaggaccagaucaccgucuggggcuuccacagcgacaacgagauccagauggccaagcuguacggggacuccaagccccagaaguucaccagcuccgccaacggcgugacgacccacuacgugagccagaucggcggguuccccaaccagaccgaggacggcgggcugccccaguccggccggaucgucguggacuacauggugcagaaguccgggaagaccggcacgaucaccuaccagcgcggcauccuccugccgcagaaggucuggugcgccuccgggcggagcaaggugaucaagggcagccugccccucaucggggaggccgacugccugcacgagaaguacggcgggcugaacaaguccaagcccuacuacaccggcgagcacgcgaaggccaucggcaacugccccaucugggugaagaccccgcucaagcuggccaacgggacgaaguaccgcccgcccgccaagcugcucaaggagcggggcuucuucggggccaucgcgggcuuccuggagggcgggugggagggcaugaucgccggguggcacggcuacaccagccacggggcccacggcgucgccguggccgcggaccugaaguccacccaggaggccaucaacaagaucaccaagaaccucaacagccuguccgagcuggaggucaagaaccuccagcgccugagcggcgccauggacgagcugcacaacgagauccucgagcuggacgagaagguggacgaccugcgggccgacacgaucuccagccagaucgagcucgccgugcugcuguccaacgaggggaucaucaacagcgaggacgagcaccuccuggcgcuggagcgcaagcucaagaagaugcugggccccuccgccgucgagaucgggaacggcugcuucgagaccaagcacaagugcaaccagaccugccuggaccggaucgccgccgggaccuucgacgcgggcgaguucagccuccccaccuucgacucccugaacaucacggccgccagccugaacgacaacggccucgacaaccacaccauccugcuguacuacuccaccgccgccagcucccuggcggugacccucaucaucgccaucuucguggucuacauggugagccgcgacaacguguccugcagcaucugccuguga

SEQ ID NO: 91291 - RNA, 1758 nt, Artificial Sequence; identical to SEQ ID NO: 91011
  derived and/or modified CDS sequence (opt1) from hemagglutinin__InfluenzaB__AGX18897

SEQ ID NO: 91292 - RNA, 1758 nt, Artificial Sequence; identical to SEQ ID NO: 90538
  derived and/or modified CDS sequence (opt1) from hemagglutinin__InfluenzaB__AGX18908

SEQ ID NO: 91293 - RNA, 1758 nt, Artificial Sequence; identical to SEQ ID NO: 90538
  derived and/or modified CDS sequence (opt1) from hemagglutinin__InfluenzaB__AGX18919

SEQ ID NO: 91294 - RNA, 1758 nt, Artificial Sequence
  derived and/or modified CDS sequence (opt1) from hemagglutinin__InfluenzaB__AGX18930
augaaggccaucaucgugcugcucauggucgugaccagcaacgccgaccgcaucugcaccggcaucacguccagcaacagcccccacguggucaagaccgcgacccagggggaggugaacgugaccggcgucaucccgcugacgaccacccccaccaagagccacuucgccaaccugaaggggacggagacccggggcaagcucugccccaagugccugaacugcaccgaccuggacguggcccucgggcgccccaagugcaccggcaacaucccguccgcccgggugagcauccugcacgagguccgccccgugacguccggcugcuuccccaucaugcacgaccggaccaagauccgccagcugcccaaccuccugcggggguacgagcacauccgccugagcacccacaacgugaucaacgccgagaacgcgccgggcgggcccuacaagaucggcaccuccgggagcugccccaacgucacgaacggcaacggcuucuucgccaccauggccugggccgugcccaagaacgacaacaacaagaccgcgaccaacucccucacgaucgaggugccguacaucugcaccgagggggaggaccagaucaccgucuggggcuuccacagcgacaacgagacccagauggccaagcuguacggggacuccaagccccagaaguucacgagcuccgccaacggcgugaccacccacuacgugagccagaucggcggguuccccaaccagaccgaggacggcgggcugccccaguccggccggaucgucguggacuacauggugcagaaguccgggaagacgggcaccaucaccuaccagcgcggcauccuccugccgcagaaggucuggugcgccuccgggcggagcaaggugaucaagggcagccugccccucaucggggaggccgacugccugcacgagaaguacggcgggcugaacaaguccaagcccuacuacaccggcgagcacgcgaaggccaucggcaacugccccaucugggugaagacgccgcucaagcuggccaacgggaccaaguaccgcccgcccgccaagcugcucaaggagcggggcuucuucggggccaucgcgggcuuccuggagggcgggugggagggcaugaucgccggguggcacggcuacaccagccacggggcccacggcgucgccguggccgcggaccugaaguccacccaggaggccaucaacaagaucacgaagaaccucaacagccuguccgagcuggaggucaagaaccuccagcgccugagcggcgccauggacgagcugcacaacgagauccucgagcuggacgagaagguggacgaccugcgggccgacaccaucuccagccagaucgagcucgccgugcugcuguccaacgaggggaucaucaacagcgaggacgagcaccuccuggcgcuggagcgcaagcucaagaagaugcugggccccuccgccgucgagaucgggaacggcugcuucgagaccaagcacaagugcaaccagaccugcaucgaccggaucgccgccgggaccuucgacgcgggcgaguucagccugcccacguucgacucccucaacaucaccgccgccagccugaacgacgacggccuggacaaccacaccauccuccuguacuacuccaccgccgccagcucccuggcggugacgcugaugaucgccaucuucguggucuacauggugagccgcgacaacguguccugcagcaucugccucuga

SEQ ID NO: 91295 - RNA, 1758 nt, Artificial Sequence; identical to SEQ ID NO: 90538
  derived and/or modified CDS sequence (opt1) from hemagglutinin__InfluenzaB__AGX18941

SEQ ID NO: 91296 - RNA, 1758 nt, Artificial Sequence; identical to SEQ ID NO: 90538
  derived and/or modified CDS sequence (opt1) from hemagglutinin__InfluenzaB__AGX18952

SEQ ID NO: 91297 - RNA, 1758 nt, Artificial Sequence; identical to SEQ ID NO: 90538
  derived and/or modified CDS sequence (opt1) from hemagglutinin__InfluenzaB__AGX18963

SEQ ID NO: 91298 - RNA, 1758 nt, Artificial Sequence
  derived and/or modified CDS sequence (opt1) from hemagglutinin__InfluenzaB__AGX18974
augaaggccaucaucgugcugcucauggucgugaccagcaacgccgaccgcaucugcaccggcaucacguccagcaacagcccccacguggucaagaccgcgacccagggggaggugaacgugaccggcgucaucccgcugacgaccacccccaccaagagccacuucgccaaccugaaggggacggagacccggggcaagcucugccccaagugccugaacugcaccgaccuggacguggcccucgggcgccccaagugcaccggcaacaucccguccgcccgggugagcauccugcacgagguccgccccgugacguccggcugcuuccccaucaugcacgaccggaccaagauccgccagcugcccaaccuccugcggggguacgagcacauccgccugagcacccacaacgugaucaacgccgagaacgcgccgggcgggcccuacaagaucggcaccuccgggagcugccccaacgucacgaacggcaacggcuucuucgccaccauggccugggccgugcccaagaacgacaacaacaagaccgcgaccaacucccucacgaucgaggugccguacaucugcaccgagggggaggaccagaucaccgucuggggcuuccacagcgacaacgagacccagauggccaagcuguacggggacuccaagccccagaaguucacgagcuccgccaacggcgugaccacccacuacgugagccagaucggcggguuccccaaccagaccgaggacggcgggcugccccaguccggccggaucgucguggacuacauggugcagaaguccgggaagacgggcaccaucaccuaccagcgcggcauccuccugccgcagaaggucuggugcgccuccgggcggagcaaggugaucaagggcagccugccccucaucggggaggccgacugccugcacgagaaguacggcgggcugaacaaguccaagcccuacuacaccggcgagcacgcgaaggccaucggcaacugccccaucugggugaagacgccgcucaagcuggccaacgggaccaaguaccgcccgcccgccaagcugcucaaggagcggggcuucuucggggccaucgcgggcuuccuggagggcgggugggagggcaugaucgccggguggcacggcuacaccagccacggggcccacggcgucgccguggccgcggaccugaaguccacccaggaggccaucaacaagaucacgaagaaccucaacagccuguccgagcuggaggucaagaaccuccagcgccugagcggcgccauggacgagcugcacaacgagauccucgagcuggacgagaagguggacgaccugcgggccgacaccaucuccagccagaucgagcucgccgugcugcuguccaacgaggggaucaucaacagcgaggacgagcaccuccuggcgcuggagaagaagcucaagaagaugcugggccccuccgccgucgagaucgggaacggcugcuucgagaccaagcacaagugcaaccagaccugccuggaccgcaucgccgccgggaccuucgacgcgggcgaguucagccuccccacguucgacucccugaacaucaccgccgccagccugaacgacgacggccucgacaaccacaccauccugcuguacuacuccaccgccgccagcucccuggcggugacgcucaugaucgccaucuucguggucuacauggugagccgggacaacguguccugcagcaucugccuguga

SEQ ID NO: 91299 - RNA, 1758 nt, Artificial Sequence; identical to SEQ ID NO: 90538
  derived and/or modified CDS sequence (opt1) from hemagglutinin__InfluenzaB__AGX18985

SEQ ID NO: 91300 - RNA, 1758 nt, Artificial Sequence
  derived and/or modified CDS sequence (opt1) from hemagglutinin__InfluenzaB__AGX18996
augaaggccaucaucgugcugcucauggucgugaccagcaacgccgaccgcaucugcaccggcaucacguccagcaacagcccccacguggucaagaccgcgacccagggggaggugaacgugaccggcgucaucccgcugacgaccacccccaccaagagccacuucgccaaccugaaggggacggagacccggggcaagcucugccccaagugccugaacugcaccgaccuggacguggcccucgggcgccccaagugcaccggcaacacgccguccgcccgggugagcauccugcacgagguccgccccgugaccuccggcugcuuccccaucaugcacgaccggaccaagauccgccagcugcccaaccuccugcggggguacgagcacauccgccugagcacccacaacgugaucaacgccgagaacgcgccgggcgggcccuacaagaucggcacguccgggagcugccccaacgucaccaacggcaacggcuucuucgccaccauggccugggccgugcccaagaacgacaacaacaagaccgcgacgaacucccucaccaucgaggugccguacaucugcaccgagggggaggaccagaucaccgucuggggcuuccacagcgacaacgggacgcagauggccaagcuguacggcgacuccaagccccagaaguucaccagcuccgccaacggcgugaccacccacuacgugagccagaucgggggcuuccccaaccagacggaggacgggggccugccccaguccgggcggaucgucguggacuacauggugcagaaguccggcaagaccggcaccaucaccuaccagcgcgggauccuccugccgcagaaggucuggugcgccuccggccggagcaaggugaucaaggggagccugccccucaucggcgaggccgacugccugcacgagaaguacgggggccugaacaaguccaagcccuacuacacgggcgagcacgcgaaggccaucgggaacugccccaucugggugaagaccccgcucaagcuggccaacggcaccaaguaccgcccgcccgccaagcugcucaaggagcggggguucuucggcgccaucgcgggguuccuggagggcggcugggaggggaugaucgccggcuggcacggguacaccagccacggcgcccacggcgucgccguggccgcggaccugaaguccacgcaggaggccaucaacaagaucaccaagaaccucaacagccuguccgagcuggaggucaagaaccuccagcgccugagcggggccauggacgagcugcacaacgagauccucgagcuggacgagaagguggacgaccugcgggccgacaccaucuccagccagaucgagcucgccgugcugcuguccaacgagggcaucaucaacagcgaggacgagcaccuccuggcgcuggagcgcaagcucaagaagaugcuggggcccuccgccgucgagaucggcaacgggugcuucgagaccaagcacaagugcaaccagaccugccuggaccggaucgccgccggcacguucgacgcgggcgaguucagccuccccaccuucgacucccugaacaucaccgccgccagccugaacgacgacgggcucgacaaccacaccauccugcuguacuacuccacggccgccagcucccuggcggugacccucaugaucgccaucuucguggucuacauggugagccgcgacaacguguccugcagcaucugccuguga

SEQ ID NO: 91301 - RNA, 1758 nt, Artificial Sequence; identical to SEQ ID NO: 90538
  derived and/or modified CDS sequence (opt1) from hemagglutinin__InfluenzaB__AGX19007

SEQ ID NO: 91302 - RNA, 1758 nt, Artificial Sequence
  derived and/or modified CDS sequence (opt1) from hemagglutinin__InfluenzaB__AGX19018
augaaggccaucaucgugcugcucauggucgugaccagcaacgccgaccgcaucugcaccggcaucacguccagcaacagcccccacguggucaagaccgcgacccagggggaggugaacgugaccggcgucaucccgcugacgaccacccccaccaagagccacuucgccaaccugaaggggacggagacccggggcaagcucugccccaagugccugaacugcaccgaccuggacguggcccucgggcgccccaagugcaccggcaacaucccguccgcccgggugagcauccugcacgagguccgccccgugacguccggcugcuuccccaucaugcacgaccggaccaagauccgccagcugcccaacuuccuccggggguacgagcacauccgccugagcacccacaacgugaucaacgccgagaacgcgccgggcgggcccuacaagaucggcaccuccgggagcugccccaacgucacgaacggcaacggcuucuucgccaccauggccugggccgugcccaagaacgacaacaacaagaccgcgaccaacucccugacgaucgaggugccguacaucugcaccgagggggaggaccagaucaccgucuggggcuuccacagcgacuccgagacccagauggccaagcucuacggggacagcaagccccagaaguucacguccagcgccaacggcgugaccacccacuacgugucccagaucggcggguuccccaaccagaccgaggacggcgggcugccccagagcggccggaucgucguggacuacauggugcagaaguccgggaagacgggcaccaucaccuaccagcgcggcauccugcucccgcagaaggucuggugcgccagcgggcggagcaaggugaucaagggcucccugccccugaucggggaggccgacugccuccacgagaaguacggcgggcugaacaagagcaagcccuacuacaccggcgagcacgcgaaggccaucggcaacugccccaucugggugaagacgccgcugaagcucgccaacgggaccaaguaccgcccgcccgccaagcugcugaaggagcggggcuucuucggggccaucgcgggcuuccucgagggcgggugggagggcaugaucgccggguggcacggcuacaccucccacggggcccacggcgucgccguggccgcggaccugaaguccacccaggaggccaucaacaagaucacgaagaaccugaacucccucagcgagcuggaggucaagaaccugcagcgccucuccggcgccauggacgagcugcacaacgagauccuggagcucgacgagaagguggacgaccugcgggccgacaccaucagcucccagaucgagcuggccgugcuccugagcaacgaggggaucaucaacuccgaggacgagcaccuccuggcgcuggagcgcaagcugaagaagaugcucggccccagcgccgucgagaucgggaacggcugcuucgagaccaagcacaagugcaaccagaccugccuggaccggaucgccgccgggaccuucgacgcgggcgaguucucccugcccacguucgacagccucaacaucaccgccgccucccugaacgacgacggccuggacaaccacaccauccuccuguacuacagcaccgccgccuccagccuggcggugacgcugaugaucgccaucuucguggucuacauggugucccgcgacaacgugagcugcagcaucugccucuga

SEQ ID NO: 91303 - RNA, 1758 nt, Artificial Sequence; identical to SEQ ID NO: 91201
  derived and/or modified CDS sequence (opt1) from hemagglutinin__InfluenzaB__AGX19029

SEQ ID NO: 91304 - RNA, 1758 nt, Artificial Sequence; identical to SEQ ID NO: 90538
  derived and/or modified CDS sequence (opt1) from hemagglutinin__InfluenzaB__AGX19040

SEQ ID NO: 91305 - RNA, 1758 nt, Artificial Sequence
  derived and/or modified CDS sequence (opt1) from hemagglutinin__InfluenzaB__AGX19051
augaaggccaucaucgugcugcucauggucgugaccagcaacgccgaccgcaucugcaccggcaucacguccagcaacagcccccacguggucaagaccgcgacccagggggaggugaacgugaccggcgucaucccgcugacgaccacccccaccaagagccacuucgccaaccugaaggggacggagacccggggcaagcucugccccaagugccugaacugcaccgaccuggacguggcccucgggcgccccaagugcaccggcaacaucccguccgcccgggugagcauccugcacgagguccgccccgugacguccggcugcuuccccaucaugcacgaccggaccaagauccgccagcugcccaaccuccugcggggguacgagcacauccgccugagcacccacaacgugaucaacaccgagaacgccccgggcgggcccuacaagaucggcacguccgggagcugccccaacgucaccaacggcaacggcuucuucgcgaccauggccugggccgugcccaagaacgacaacaacaagaccgccacgaacucccucaccaucgaggugccguacaucugcaccgagggggaggaccagaucaccgucuggggcuuccacagcgacuccgagacgcagauggcgaagcuguacggggacagcaagccccagaaguucaccuccagcgccaacggcgugaccacccacuacgugucccagaucggcggguuccccaaccagacggaggacggcgggcugccccagagcggccggaucgucguggacuacauggugcagaaguccgggaagaccggcaccaucaccuaccagcgcggcauccuccugccgcagaaggucuggugcgccagcgggcggagcaaggugaucaagggcucccugccccucaucggggaggccgacugccugcacgagaaguacggcgggcugaacaagagcaagcccuacuacacgggcgagcacgccaaggcgaucggcaacugccccaucugggugaagaccccgcucaagcuggccaacgggaccaaguaccgcccgcccgccaagcugcucaaggagcggggcuucuucggggccaucgccggcuuccuggagggcgggugggagggcaugaucgcgggguggcacggcuacaccucccacggggcccacggcgucgccguggccgccgaccugaaguccacgcaggaggcgaucaacaagaucaccaagaaccucaacucccugagcgagcuggaggucaagaaccuccagcgccuguccggcgccauggacgagcugcacaacgagauccucgagcuggacgagaagguggacgaccugcgggccgacaccaucagcucccagaucgagcucgccgugcugcugagcaacgaggggaucaucaacuccgaggacgagcaccuccuggcccuggagcgcaagcucaagaagaugcugggccccagcgcggucgagaucgggaacggcugcuucgagaccaagcacaagugcaaccagaccugccuggaccggaucgccgccgggacguucgacgccggcgaguucucccuccccaccuucgacagccugaacaucaccgcggccucccugaacgacgacggccucgacaaccacaccauccugcuguacuacagcacggccgccuccagccuggccgugacccucaugaucgcgaucuucguggucuacauggugucccgcgacaacgugagcugcagcaucugccuguga

SEQ ID NO: 91306 - RNA, 1758 nt, Artificial Sequence
  derived and/or modified CDS sequence (opt1) from hemagglutinin__InfluenzaB__AGX19062
augaaggccaucaucgugcugcucauggucgugaccagcaacgccgaccgcaucugcaccggcaucacguccagcaacagcccccacguggucaagaccgcgacccagggggaggugaacgugaccggcgucaucccgcugacgaccacccccaccaagagccacuucgccaaccugaaggggacggagacccggggcaagcucugccccaagugccugaacugcaccgaccuggacguggcccucgggcgccccaagugcaccggcaacaucccguccgcccgggugagcauccugcacgagguccgccccgugacguccggcugcuuccccaucaugcacgaccggaccaagauccgccagcugcccaaccuccugcggggguacgagcacauccgccugagcacccacaacgugaucaacgccgagaacgcgccgggcgggcccuacaagaucggcaccuccgggagcugccccaacgucacgaacggcaacggcuucuucgccaccauggccugggccgugcccaagaacgacaacaacaagaccgcgaccaacucccucacgaucgaggugccguacaucugcaccgagggggaggaccagaucaccgucuggggcuuccacagcgacaacgagacccagauggccaagcuguacggggacuccaagccccagaaguucacgagcuccgccaacggcgugaccacccacuacgugagccagaucggcggguuccccaaccagaccgaggacggcgggcugccccaguccggccggaucgucguggacuacauggugcagaaguccgggaagacgggcaccaucaccuaccagcgcggcauccuccugccgcagaaggucuggugcgccuccgggcggagcaaggugaucaagggcagccugccccucaucggggaggccgacugccugcacgagaaguacggcgggcugaacaaguccaagcccuacuacaccggcgagcacgcgaaggccaucggcaacugccccaucugggugaagacgccgcucaagcuggccaacgggaccaaguaccgcccgcccgccaagcugcucaaggagcggggcuucuucggggccaucgcgggcuuccuggagggcgggugggagggcaugaucgccggguggcacggcuacaccagccacggggcccacggcgucgccguggccgcggaccugaaguccacccaggaggccaucaacaagaucacgaagaacuucaacagccucuccgagcuggaggucaagaaccugcagcgccucagcggcgccauggacgagcugcacaacgagauccuggagcucgacgagaagguggacgaccugcgggccgacaccaucuccagccagaucgagcuggccgugcuccuguccaacgaggggaucaucaacagcgaggacgagcaccuccuggcgcuggagcgcaagcugaagaagaugcucggccccuccgccgucgagaucgggaacggcugcuucgagaccaagcacaagugcaaccagaccugccuggaccggaucgccgccgggaccuucgacgcgggcgaguucagccugcccacguucgacucccucaacaucaccgccgccagccugaacgacgacggccuggacaaccacaccauccuccuguacuacuccaccgccgccagcucccuggcggugacgcugaugaucgccaucuucguggucuacauggugagccgcgacaacguguccugcagcaucugccucuga

SEQ ID NO: 91307 - RNA, 1758 nt, Artificial Sequence; identical to SEQ ID NO: 90538
  derived and/or modified CDS sequence (opt1) from hemagglutinin__InfluenzaB__AGX19073

SEQ ID NO: 91308 - RNA, 1758 nt, Artificial Sequence
  derived and/or modified CDS sequence (opt1) from hemagglutinin__InfluenzaB__AGX19084
augaaggccaucaucgugcugcucauggucgugaccagcaacgccgaccgcaucugcaccggcaucacguccagcaacagcccccacguggucaagaccgcgacccagggggaggugaacgugaccggcgucaucccgcugacgaccacccccaccaagagccacuucgccaaccugaaggggacggagacccggggcaagcucugccccaagugccugaacugcaccgaccuggacguggcccucgggcgccccaagugcaccggcaacaucccguccgcccgggugagcauccugcacgagguccgccccgugacguccggcugcuuccccaucaugcacgaccggaccaagauccgccagcugcccaaccuccugcggggguacgagcacaucaagcugagcacccacaacgugaucaacgccgagaacgcgccgggcgggcccuacaagaucggcaccuccgggagcugccccaacgucacgaacggcaacggcuucuucgccaccauggccugggccgugcccaagaacgacaacaacaagaccgcgaccaacucccucacgaucgaggugccguacaucugcaccgagggggaggaccagaucaccgucuggggcuuccacagcgacaacgagaaccagauggccaagcuguacggggacuccaagccccagaaguucaccagcuccgccaacggcgugacgacccacuacgugagccagaucggcggguuccccaaccagaccgaggacggcgggcugccccaguccggccgcaucgucguggacuacauggugcagaaguccgggaagaccggcacgaucaccuaccagcggggcauccuccugccgcagaaggucuggugcgccuccgggcgcagcaaggugaucaagggcagccugccccucaucggggaggccgacugccugcacgagaaguacggcgggcugaacaaguccaagcccuacuacaccggcgagcacgcgaaggccaucggcaacugccccaucugggugaagaccccgcucaagcuggccaacgggacgaaguaccggccgcccgccaagcugcucaaggagcgcggcuucuucggggccaucgcgggcuuccuggagggcgggugggagggcaugaucgccggguggcacggcuacaccagccacggggcccacggcgucgccguggccgcggaccugaaguccacccaggaggccaucaacaagaucaccaagaaccucaacagccuguccgagcuggaggucaagaaccuccagcggcugagcggcgccauggacgagcugcacaacgagauccucgagcuggacgagaagguggacgaccugcgcgccgacacgaucuccagccagaucgagcucgccgugcugcuguccaacgaggggaucaucaacagcgaggacgagcaccuccuggcgcuggagcggaagcucaagaagaugcugggccccuccgccgucgagaucgggaacggcugcuucgagaccaagcacaagugcaaccagaccugccuggaccgcaucgccgccgggaccuucgacgcgggcgaguucagccuccccaccuucgacucccugaacaucacggccgccagccugaacgacgacggccucgacaaccacaccauccugcuguacuacuccaccgccgccagcucccuggcggugacccucaugaucgccaucuucguggucuacauggugagccgggacaacguguccugcagcaucugccuguga

SEQ ID NO: 91309 - RNA, 1758 nt, Artificial Sequence; identical to SEQ ID NO: 90538
  derived and/or modified CDS sequence (opt1) from hemagglutinin__InfluenzaB__AGX19095

SEQ ID NO: 91310 - RNA, 1758 nt, Artificial Sequence; identical to SEQ ID NO: 91201
  derived and/or modified CDS sequence (opt1) from hemagglutinin__InfluenzaB__AGX19106

SEQ ID NO: 91311 - RNA, 1758 nt, Artificial Sequence; identical to SEQ ID NO: 90538
  derived and/or modified CDS sequence (opt1) from hemagglutinin__InfluenzaB__AGX19117

SEQ ID NO: 91312 - RNA, 1758 nt, Artificial Sequence
  derived and/or modified CDS sequence (opt1) from hemagglutinin__InfluenzaB__AGX19128
augaaggccaucaucgugcugcucauggucgugaccagcaacgccgaccgcaucugcaccggcaucacguccagcaacagcccccacguggucaagaccgcgacccagggggaggugaacgugaccggcgucaucccgcugacgaccacccccaccaagagccacuucgccaaccugaaggggacggagacccggggcaagcucugccccaagugccugaacugcaccgaccuggacguggcccucgggcgccccaagugcaccggcaacacgccguccgcccgggugagcauccugcacgagguccgccccgugaccuccggcugcuuccccaucaugcacgaccggaccaagauccgccagcugcccaaccuccugcggggguacgagcacauccgccugagcacccacaacgugaucaacgccgagaacgcgccgggcgggcccuacaagaucggcacguccgggagcugccccaacgucaccaacggcaacggcuucuucgccaccauggccugggccgugcccaagaacgacaacaacaagaccgcgacgaacucccucaccaucgaggugccguacaucugcaccgagggggaggaccagaucaccgucuggggcuuccacagcgacuccgagacgcagauggccaagcuguacggggacagcaagccccagaaguucaccuccagcgccaacggcgugaccacccacuacgugucccagaucggcggguuccccaaccagacggaggacggcgggcugccccagagcggccggaucgucguggacuacauggugcagaaguccgggaagaccggcaccaucaccuaccagcgcggcauccuccugccgcagaaggucuggugcgccagcgggcggagcaaggugaucaagggcucccugccccucaucggggaggccgacugccugcacgagaaguacggcgggcugaacaagagcaagcccuacuacacgggcgagcacgcgaaggccaucggcaacugccccaucugggugaagaccccgcucaagcuggccaacgggaccaaguaccgcccgcccgccaagcugcucaaggagcggggcuucuucggggccaucgcgggcuuccuggagggcgggugggagggcaugaucgccggguggcacggcuacaccucccacggggcccacggcgucgccguggccgcggaccugaaguccacgcaggaggccaucaacaagaucaccaagaaccucaacucccugagcgagcuggaggucaagaaccuccagcgccuguccggcgccauggacgagcugcacaacgagauccucgagcuggacgagaagguggacgaccugcgggccgacaccaucagcucccagaucgagcucgccgugcugcugagcaacgaggggaucaucaacuccgaggacgagcaccuccuggcgcuggagcgcaagcucaagaagaugcugggccccagcgccgucgagaucgggaacggcugcuucgagaccaagcacaagugcaaccagaccugccuggaccggaucgccgccgggacguucgacgcgggcgaguucucccuccccaccuucgacagccugaacaucaccgccgccucccugaacgacgacggccucgacaaccacaccauccugcuguacuacagcacggccgccuccagccuggcggugacccucaugaucgccaucuucguggucuacauggugucccgcgacaacgugagcugcagcaucugccuguga

SEQ ID NO: 91313 - RNA, 1758 nt, Artificial Sequence; identical to SEQ ID NO: 90538
  derived and/or modified CDS sequence (opt1) from hemagglutinin__InfluenzaB__AGX19139

SEQ ID NO: 91314 - RNA, 1758 nt, Artificial Sequence; identical to SEQ ID NO: 91011
  derived and/or modified CDS sequence (opt1) from hemagglutinin__InfluenzaB__AGX19150

SEQ ID NO: 91315 - RNA, 1758 nt, Artificial Sequence; identical to SEQ ID NO: 90538
  derived and/or modified CDS sequence (opt1) from hemagglutinin__InfluenzaB__AGX19161

SEQ ID NO: 91316 - RNA, 1758 nt, Artificial Sequence; identical to SEQ ID NO: 91011
  derived and/or modified CDS sequence (opt1) from hemagglutinin__InfluenzaB__AGX19172

SEQ ID NO: 91317 - RNA, 1758 nt, Artificial Sequence
  derived and/or modified CDS sequence (opt1) from hemagglutinin__InfluenzaB__AGX19183
augaaggccaucaucgugcugcucauggucgugaccagcaacgccgaccgcaucugcaccggcaucacguccagcaacagcccccacguggucaagaccgcgacccagggggaggugaacgugaccggcgucaucccgcugacgaccacccccaccaagagccacuucgccaaccugaaggggacggagacccggggcaagcucugccccaagugccugaacugcaccgaccuggacguggcccucgggcgccccaagugcaccggcaacaucccguccgcccgggugagcauccugcacgagguccgccccgugacguccggcugcuuccccaucaugcacgaccggaccaagauccgccagcugcccaaccuccugcggggguacgagcacauccgccugagcacccacaacgugaucaacgccgagaacgcgccgggcgggcccuacaagaucggcaccuccgggagcugccccaacgucacgaacggcaacggcuucuucgccaccauggccugggccgugcccaagaacgacaacaacaagaccgcgaccaacucccucacgaucgaggugccguacaucugcaccgagggggaggaccagaucaccgucuggggcuuccacagcgacaccgagacgcagauggccaagcuguacggggacuccaagccccagaaguucaccagcuccgccaacggcgugaccacccacuacgugagccagaucggcggguuccccaaccagacggaggacggcgggcugccccaguccggccggaucgucguggacuacauggugcagaaguccgggaagaccggcaccaucaccuaccagcgcggcauccuccugccgcagaaggucuggugcgccuccgggcggagcaaggugaucaagggcagccugccccucaucggggaggccgacugccugcacgagaaguacggcgggcugaacaaguccaagcccuacuacacgggcgagcacgcgaaggccaucggcaacugccccaucugggugaagaccccgcucaagcuggccaacgggaccaaguaccgcccgcccgccaagcugcucaaggagcggggcuucuucggggccaucgcgggcuuccuggagggcgggugggagggcaugaucgccggguggcacggcuacaccagccacggggcccacggcgucgccguggccgcggaccugaaguccacgcaggaggccaucaacaagaucaccaagaaccucaacagccuguccgagcuggaggucaagaaccuccagcgccugagcggcgccauggacgagcugcacaacgagauccucgagcuggacgagaagguggacgaccugcgggccgacaccaucuccagccagaucgagcucgccgugcugcuguccaacgaggggaucaucaacagcgaggacgagcaccuccuggcgcuggagcgcaagcucaagaagaugcugggccccuccgccgucgagaucgggaacggcugcuucgagaccaagcacaagugcaaccagaccugccuggaccggaucgccgccgggacguucgacgcgggcgaguucagccuccccaccuucgacucccugaacaucaccgccgccagccugaacgacgacggccucgacaaccacaccauccugcuguacuacuccacggccgccagcucccuggcggugacccucaugaucgccaucuucguggucuacauggugagccgcgacaacguguccugcagcaucugccuguga

SEQ ID NO: 91318 - RNA, 1758 nt, Artificial Sequence; identical to SEQ ID NO: 90538
  derived and/or modified CDS sequence (opt1) from hemagglutinin__InfluenzaB__AGX19194

SEQ ID NO: 91319 - RNA, 1758 nt, Artificial Sequence
  derived and/or modified CDS sequence (opt1) from hemagglutinin__InfluenzaB__AGX19205
augaaggccaucaucgugcugcucauggucgugaccagcaacgccgaccgcgugugcaccggcaucacguccagcaacagcccccacgucgugaagaccgcgacccagggggaggugaacgucaccggcgugaucccgcugacgaccacccccaccaagagccacuucgccaaccugaaggggacggagacccggggcaagcucugccccaagugccugaacugcaccgaccuggacguggcccucgggcgccccaagugcaccggcaacaucccguccgcccgggucagcauccugcacgaggugcgccccgugacguccggcugcuuccccaucaugcacgaccggaccaagauccgccagcugcccaaccuccugcggggguacgagcacauccgccugagcacccacaacgucaucaacgccgagaacgcgccgggcgggcccuacaagaucggcaccuccgggagcugccccaacgugacgaacggcaacggcuucuucgccaccauggccugggccgugcccaagaacgacaacaacaagaccgcgaccaacucccucacgaucgaggucccguacaucugcaccgagggggaggaccagaucaccguguggggcuuccacagcgacaacgagacccagauggccaagcuguacggggacuccaagccccagaaguucacgagcuccgccaacggcgugaccacccacuacgucagccagaucggcggguuccccaaccagaccgaggacggcgggcugccccaguccggccggaucgugguggacuacaugguccagaaguccgggaagacgggcaccaucaccuaccagcgcggcauccuccugccgcagaagguguggugcgccuccgggcggagcaaggugaucaagggcagccugccccucaucggggaggccgacugccugcacgagaaguacggcgggcugaacaaguccaagcccuacuacaccggcgagcacgcgaaggccaucggcaacugccccaucugggucaagacgccgcucaagcuggccaacgggaccaaguaccgcccgcccgccaagcugcucaaggagcggggcuucuucggggccaucgcgggcuuccuggagggcgggugggagggcaugaucgccggguggcacggcuacaccagccacggggcccacggcguggccgucgccgcggaccugaaguccacccaggaggccaucaacaagaucacgaagaaccucaacagccuguccgagcuggaggugaagaaccuccagcgccugagcggcgccauggacgagcugcacaacgagauccucgagcuggacgagaagguggacgaccugcgggccgacaccaucuccagccagaucgagcucgccguccugcuguccaacgaggggaucaucaacagcgaggacgagcaccuccuggcgcuggagcgcaagcucaagaagaugcugggccccuccgccguggagaucgggaacggcugcuucgagaccaagcacaagugcaaccagaccugccuggaccggaucgccgccgggaccuucgacgcgggcgaguucagccuccccacguucgacucccugaacaucaccgccgccagccugaacgacgacggccucgacaaccacaccauccugcuguacuacuccaccgccgccagcucccuggcggugacgcucaugaucgccaucuucgucguguacauggugagccgcgacaacgucuccugcagcaucugccuguga

SEQ ID NO: 91320 - RNA, 1758 nt, Artificial Sequence
  derived and/or modified CDS sequence (opt1) from hemagglutinin__InfluenzaB__AGX19216
augaaggccaucaucgugcugcucauggucgugaccagcaacgccgaccgcaucugcaccggcaucacguccagcaacagcccccacguggucaagaccgcgacccagggggaggugaacgugaccggcgucaucccgcugacgaccacccccaccaagagccacuucgccaaccugaaggggacggagacccggggcaagcucugccccaagugccugaacugcaccgaccuggacguggcccucgggcgccccaagugcaccggcaacaucccguccgcccgggugagcauccugcacgagguccgccccgugacguccggcugcuuccccaucaugcacgaccggaccaagauccgccagcugcccaaccuccugcggggguacgagcacauccgccugagcacccacaacgugaucaacgccgagaacgcgccgggcgggcccuacaagaucggcaccuccgggagcugccccaacgucacgaacggcaacggcuucuucgccaccauggccugggccgugcccaagaacgacaacaacaagaccgcgaccaacucccucacgaucgaggugccguacaucugcaccgagggggaggaccagaucaccgucuggggcuuccacagcgacaacgagacccagauggccaagcuguacggggacuccaagccccagaaguucacgagcuccgccaacggcgugaccacccacuacgugagccagaucggcggguuccccaaccagaccgaggacggcgggcugccccaguccggccggaucgucguggacuacauggugcagaaguccgggaagccgggcacgaucaccuaccagcgcggcauccuccugccccagaaggucuggugcgccuccgggcggagcaaggugaucaagggcagccugccccucaucggggaggccgacugccugcacgagaaguacggcgggcugaacaaguccaagcccuacuacaccggcgagcacgcgaaggccaucggcaacugcccgaucugggugaagacgccccucaagcuggccaacgggaccaaguaccgcccgcccgccaagcugcucaaggagcggggcuucuucggggccaucgcgggcuuccuggagggcgggugggagggcaugaucgccggguggcacggcuacaccagccacggggcccacggcgucgccguggccgcggaccugaaguccacccaggaggccaucaacaagaucaccaagaaccucaacagccuguccgagcuggaggucaagaaccuccagcgccugagcggcgccauggacgagcugcacaacgagauccucgagcuggacgagaagguggacgaccugcgggccgacacgaucuccagccagaucgagcucgccgugcugcuguccaacgaggggaucaucaacagcgaggacgagcaccuccuggcgcuggagcgcaagcucaagaagaugcugggccccuccgccgucgagaucgggaacggcugcuucgagaccaagcacaagugcaaccagaccugccuggaccggaucgccgccgggaccuucgacgcgggcgaguucagccuccccaccuucgacucccugaacaucacggccgccagccugaacgacgacggccucgacaaccacaccauccugcuguacuacuccaccgccgccagcucccuggcggugacccucaugaucgccaucuucguggucuacauggugagccgcgacaacguguccugcagcaucugccuguga

SEQ ID NO: 91321 - RNA, 1758 nt, Artificial Sequence
  derived and/or modified CDS sequence (opt1) from hemagglutinin__InfluenzaB__AGX19227
augaaggccaucaucgugcugcucauggucgugaccagcaacgccgaccgcaucugcaccggcaucacguccagcaacagcccccacguggucaagaccgcgacccagggggaggugaacgugaccggcgucaucccgcugacgaccacccccaccaagagccacuucgccaaccugaaggggacggagacccggggcaagcucugcccccagugccugaacugcaccgaccuggacguggcccucgggcgccccaagugcaccggcaacaucccguccgcccgggugagcauccugcacgagguccgccccgugacguccggcugcuuccccaucaugcacgaccggaccaagauccgccagcugcccaaccuccugcggggguacgagcacauccgccugagcacccacaacgugaucaacgccgagaacgcgccgggcgggcccuacaagaucggcaccuccgggagcugccccaacgucacgaacggcaacggcuucuucgccaccauggccugggccgugcccaaguccgacaacaacaagaccgcgaccaacagccucacgaucgaggugccguacaucugcaccgagggggaggaccagaucaccgucuggggcuuccacuccgacaacgagacccagauggccaagcuguacggggacagcaagccccagaaguucacguccagcgccaacggcgugaccacccacuacgugucccagaucggcggguuccccaaccagaccgaggacggcgggcugccccagagcggccggaucgucguggacuacauggugcagaaguccgggaagacgggcaccaucaccuaccagcgcggcauccuccugccgcagaaggucuggugcgccagcgggcggagcaaggugaucaagggcucccugccccucaucggggaggccgacugccugcacgagaaguacggcgggcugaacaagagcaagcccuacuacaccggcgagcacgcgaaggccaucggcaacugccccaucugggugaagacgccgcucaagcuggccaacgggaccaaguaccgcccgcccgccaagcugcucaaggagcggggcuucuucggggccaucgcgggcuuccuggagggcgggugggagggcaugaucgccggguggcacggcuacaccucccacggggcccacggcgucgccguggccgcggaccugaaguccacccaggaggccaucaacaagaucacgaagaaccucaacucccugagcgagcuggaggucaagaaccuccagcgccuguccggcgccauggacgagcugcacaacgagauccucgagcuggacgagaagguggacgaccugcgggccgacaccaucagcucccagaucgagcucgccgugcugcugagcaacgaggggaucaucaacuccgaggacgagcaccuccuggcgcuggagcgcaagcucaagaagaugcugggccccagcgccgucgagaucgggaacggcugcuucgagaccaagcacaagugcaaccagaccugccuggaccggaucgccgccgggaccuucgacgcgggcgaguucucccuccccacguucgacagccugaacaucaccgccgccucccugaacgacgacggccucgacaaccacaccauccugcuguacuacagcaccgccgccuccagccuggcggugacgcucaugaucgccaucuucguggucuacauggugucccgcgacaacgugagcugcagcaucugccuguga

SEQ ID NO: 91322 - RNA, 1758 nt, Artificial Sequence
  derived and/or modified CDS sequence (opt1) from hemagglutinin__InfluenzaB__AGX19238
augaaggccaucaucgugcugcucauggucgugaccagcaacgccgaccgcaucugcaccggcaucacguccagcaacagcccccacguggucaagaccgcgacccagggggaggugaacgugaccggcgucaucccgcugacgaccacccccaccaagagccacuucgccaaccugaaggggacggagacccggggcaagcucugccccaagugccugaacugcaccgaccuggacguggcccucgggcgccccaagugcaccggcaacaucccguccgcccgggugagcauccugcacgagguccgccccgugacguccggcugcuuccccaucaugcacgaccggaccaagauccgccagcugcccaaccuccugcggggguacgagcacauccgccugagcacccacaacgugaucaacgccgagaacgcgccgggcgggcccuacaagaucggcaccuccgggagcugccccaacgucacgaacggcaacggcuucuucgccaccauggccugggccgugcccaagaacgacaagaacaagaccgcgaccaacucccucacgaucgaggugccguacaucugcaccgagggggaggaccagaucaccgucuggggcuuccacagcgacaacgagacccagauggccaagcuguacggggacuccaagccccagaaguucacgagcuccgccaacggcgugaccacccacuacgugagccagaucggcggguuccccaaccagaccgaggacggcgggcugccccaguccggccggaucgucguggacuacauggugcagaaguccgggaagacgggcaccaucaccuaccagcgcggcauccuccugccgcagaaggucuggugcgccuccgggcggagcaaggugaucaagggcagccugccccucaucggggaggccgacugccugcacgagaaguacggcgggcugaacaaguccaagcccuacuacaccggcgagcacgcgaaggccaucggcaacugccccaucugggugaagacgccgcucaagcuggccaacgggaccaaguaccgcccgcccgccaagcugcucaaggagcggggcuucuucggggccaucgcgggcuuccuggagggcgggugggagggcaugaucgccggguggcacggcuacaccagccacggggcccacggcgucgccguggccgcggaccugaaguccacccaggaggccaucaacaagaucacgaagaaccucaacagccuguccgagcuggaggucaagaaccuccagcgccugagcggcgccauggacgagcugcacaacgagauccucgagcuggacgagaagguggacgaccugcgggccgacaccaucuccagccagaucgagcucgccgugcugcuguccaacgaggggaucaucaacagcgaggacgagcaccuccuggcgcuggagcgcaagcucaagaagaugcugggccccuccgccgucgagaucgggaacggcugcuucgagaccaagcacaagugcaaccagaccugccuggaccggaucgccgccgggaccuucgacgcgggcgaguucagccuccccacguucgacucccugaacaucaccgccgccagccugaacgacgacggccucgacaaccacaccauccugcuguacuacuccaccgccgccagcucccuggcggugacgcucaugaucgccaucuucguggucuacauggugagccgcgacaacguguccugcagcaucugccuguga

SEQ ID NO: 91323 - RNA, 1758 nt, Artificial Sequence; identical to SEQ ID NO: 91322
  derived and/or modified CDS sequence (opt1) from hemagglutinin__InfluenzaB__AGX19249

SEQ ID NO: 91324 - RNA, 1758 nt, Artificial Sequence; identical to SEQ ID NO: 90538
  derived and/or modified CDS sequence (opt1) from hemagglutinin__InfluenzaB__AGX19260

SEQ ID NO: 91325 - RNA, 1758 nt, Artificial Sequence; identical to SEQ ID NO: 90538
  derived and/or modified CDS sequence (opt1) from hemagglutinin__InfluenzaB__AGX19271

SEQ ID NO: 91326 - RNA, 1758 nt, Artificial Sequence
  derived and/or modified CDS sequence (opt1) from hemagglutinin__InfluenzaB__AGX19282
augaaggccaucaucgugcugcucauggucgugaccagcaacgccgaccgcaucugcaccggcaucacguccagcaacagcccccacguggucaagaccgcgacccagggggaggugaacgugaccggcgucaucccgcugacgaccacccccaccaagagccacuucgccaaccugaaggggacggagacccggggcaagcucugccccaagugccugaacugcaccgaccuggacguggcccucgggcgccccaagugcaccggcaacaucccguccgcccgggugagcauccugcacgagguccgccccgugacguccggcugcuuccccaucaugcacgaccggaccaagauccgccagcugcccaaccuccugcggggguacgagcacauccgccugagcacccacaacgugaucaacgccgagaacgcgccgggcgggcccuacaagaucggcaccuccgggagcugccccaacgucacgaacggcaacggcuucuucgccaccauggccugggccgugcccaagaacgacaacaacaagaccgcgaccaacucccucacgaucgaggugccguacaucugcaccgagggggaggaccagaucaccgucuggggcuuccacagcgacaacgagacccagauggccaagcuguacggggacuccaagccccagaaguucacgagcuccgccaacggcgugaccacccacuacgugagccagaucggcggguuccccaaccagaccgaggacggcgggcugccccaguccggccggaucgucguggacuacauggugcagaaguccgggaagacgggcaccaucaccuaccagcgcggcauccuccugccgcagaaggucuggugcaccuccgggcggagcaaggugaucaagggcagccugccccucaucggggaggccgacugccugcacgagaaguacggcgggcugaacaaguccaagcccuacuacacgggcgagcacgccaaggcgaucggcaacugccccaucugggugaagaccccgcucaagcuggccaacgggaccaaguaccgcccgcccgccaagcugcucaaggagcggggcuucuucggggccaucgccggcuuccuggagggcgggugggagggcaugaucgcgggguggcacggcuacaccagccacggggcccacggcgucgccguggccgccgaccugaaguccacgcaggaggcgaucaacaagaucaccaagaaccucaacagccuguccgagcuggaggucaagaaccuccagcgccugagcggcgccauggacgagcugcacaacgagauccucgagcuggacgagaagguggacgaccugcgggccgacaccaucuccagccagaucgagcucgccgugcugcuguccaacgaggggaucaucaacagcgaggacgagcaccuccuggcccuggagcgcaagcucaagaagaugcugggccccuccgcggucgagaucgggaacggcugcuucgagaccaagcacaagugcaaccagaccugccuggaccggaucgccgccgggacguucgacgccggcgaguucagccuccccaccuucgacucccugaacaucaccgcggccagccugaacgacgacggccucgacaaccacaccauccugcuguacuacuccacggccgccagcucccuggccgugacccucaugaucgcgaucuucguggucuacauggugagccgcgacaacguguccugcagcaucugccuguga

SEQ ID NO: 91327 - RNA, 1758 nt, Artificial Sequence
  derived and/or modified CDS sequence (opt1) from hemagglutinin__InfluenzaB__AGX19304
augaaggccaucaucgugcugcucauggucgugaccagcaacgccgaccgcaucugcaccggcaucacguccagcaacagcccccacguggucaagaccgcgacccagggggaggugaacgugaccggcgucaucccgcugacgaccacccccaccaagagccacuucgccaaccugaaggggacggagacccggggcaagcucugccccaagugccugaacugcaccgaccuggacguggcccucgggcgccccaagugcaccggcaacaucccguccgcccgggugagcauccugcacgagguccgccccgugacguccggcugcuuccccaucaugcacgaccggaccaagauccgccagcugcccaaccuccugcggggguacgagcacauccgccugagcacccacaacgugaucaacgccgagaacgcgccgggcgggcccuacaagaucggcaccuccgggagcugccccaacgucacgaacggcaacggcuucuucgccaccauggccugggccgugcccaagaacgacaacaacaagaccgcgaucaacucccucaccaucgaggugccguacaucugcacggagggggaggaccagaucaccgucuggggcuuccacagcgacaacgagacccagauggccaagcuguacggggacuccaagccccagaaguucaccagcuccgccaacggcgugacgacccacuacgugagccagaucggcggguuccccaaccagaccgaggacggcgggcugccccaguccggccggaucgucguggacuacauggugcagaaguccgggaagaccggcacgaucaccuaccagcgcggcauccuccugccgcagaaggucuggugcgccuccgggcggagcaaggugaucaagggcagccugccccucaucggggaggccgacugccugcacgagaaguacggcgggcugaacaaguccaagcccuacuacaccggcgagcacgcgaaggccaucggcaacugccccaucugggugaagaccccgcucaagcuggccaacgggacgaaguaccgcccgcccgccaagcugcucaaggagcggggcuucuucggggccaucgcgggcuuccuggagggcgggugggagggcaugaucgccggguggcacggcuacaccagccacggggcccacggcgucgccguggccgcggaccugaaguccacccaggaggccaucaacaagaucaccaagaaccucaacagccuguccgagcuggaggucaagaaccuccagcgccugagcggcgccauggacgagcugcacaacgagauccucgagcuggacgagaagguggacgaccugcgggccgacacgaucuccagccagaucgagcucgccgugcugcuguccaacgaggggaucaucaacagcgaggacgagcaccuccuggcgcuggagcgcaagcucaagaagaugcugggccccuccgccgucgagaucgggaacggcugcuucgagaccaagcacaagugcaaccagaccugccuggaccggaucgccgccgggaccuucgacgcgggcgaguucagccuccccaccuucgacucccugaacaucacggccgccagccugaacgacgacggccucgacaaccacaccauccugcuguacuacuccaccgccgccagcucccuggcggugacccucaugaucgccaucuucguggucuacauggugagccgcgacaacguguccugcagcaucugccuguga

SEQ ID NO: 91328 - RNA, 1758 nt, Artificial Sequence; identical to SEQ ID NO: 91327
  derived and/or modified CDS sequence (opt1) from hemagglutinin__InfluenzaB__AGX19315

SEQ ID NO: 91329 - RNA, 1758 nt, Artificial Sequence; identical to SEQ ID NO: 91326
  derived and/or modified CDS sequence (opt1) from hemagglutinin__InfluenzaB__AGX19326

SEQ ID NO: 91330 - RNA, 1758 nt, Artificial Sequence; identical to SEQ ID NO: 91326
  derived and/or modified CDS sequence (opt1) from hemagglutinin__InfluenzaB__AGX19337

SEQ ID NO: 91331 - RNA, 1758 nt, Artificial Sequence
  derived and/or modified CDS sequence (opt1) from hemagglutinin__InfluenzaB__AGX19348
augaaggccaucaucgugcugcucauggucgugaccagcaacgccgaccgcaucugcaccggcaucacguccagcaacagcccccacguggucaagaccgcgacccagggggaggugaacgugaccggcgucaucccgcugacgaccacccccaccaagagccacuucgccaaccugaaggggacggagacccggggcaagcucugccccaagugccugaacugcaccgaccuggacguggcccucgggcgccccaagugcaccggcaacaucccguccgcccgggugagcauccugcacgagguccgccccgugacguccggcugcuuccccaucaugcacgaccggaccaagauccgccagcugcccaaccuccugcggggguacgagcacauccgccugagcacccacaacgugaucaacgccgagaacgcgccgggcgggcccuacaagaucggcaccuccgggagcugccccaacgucacgaacggcaacggcuucuucgccaccauggccugggccgugcccaagaacgacaacaacaagaccgcgaccaacucccucacgaucgaggugccguacaucugcaccgagggggaggaccagaucaccgucuggggcuuccacagcgacaacgaggcccagauggccaagcuguacggggacuccaagccccagaaguucaccagcuccgccaacggcgugacgacccacuacgugagccagaucggcggguuccccaaccagaccgaggacggcgggcugccccaguccggccggaucgucguggacuacauggugcagaaguccgggaagaccggcacgaucaccuaccagcgcggcauccuccugccgcagaaggucuggugcaccuccgggcggagcaaggugaucaagggcagccugccccucaucggggaggccgacugccugcacgagaaguacggcgggcugaacaaguccaagcccuacuacaccggcgagcacgcgaaggccaucggcaacugccccaucugggugaagacgccgcucaagcuggccaacgggaccaaguaccgcccgcccgccaagcugcucaaggagcggggcuucuucggggccaucgcgggcuuccuggagggcgggugggagggcaugaucgccggguggcacggcuacaccagccacggggcccacggcgucgccguggccgcggaccugaaguccacccaggaggccaucaacaagaucacgaagaaccucaacagccuguccgagcuggaggucaagaaccuccagcgccugagcggcgccauggacgagcugcacaacgagauccucgagcuggacgagaagguggacgaccugcgggccgacaccaucuccagccagaucgagcucgccgugcugcuguccaacgaggggaucaucaacagcgaggacgagcaccuccuggcgcuggagcgcaagcucaagaagaugcugggccccuccgccgucgagaucgggaacggcugcuucgagaccaagcacaagugcaaccagaccugccuggaccggaucgccgccgggaccuucgacgcgggcgaguucagccuccccacguucgacucccugaacaucaccgccgccagccugaacgacgacggccucgacaaccacaccauccugcuguacuacuccaccgccgccagcucccuggcggugacgcucaugaucgccaucuucguggucuacauggugagccgcgacaacguguccugcagcaucugccuguga

SEQ ID NO: 91332 - RNA, 1758 nt, Artificial Sequence; identical to SEQ ID NO: 91326
  derived and/or modified CDS sequence (opt1) from hemagglutinin__InfluenzaB__AGX19359

SEQ ID NO: 91333 - RNA, 1755 nt, Artificial Sequence; identical to SEQ ID NO: 90755
  derived and/or modified CDS sequence (opt1) from hemagglutinin__InfluenzaB__AGX19370

SEQ ID NO: 91334 - RNA, 1758 nt, Artificial Sequence; identical to SEQ ID NO: 90589
  derived and/or modified CDS sequence (opt1) from hemagglutinin__InfluenzaB__AGX19381

SEQ ID NO: 91335 - RNA, 1758 nt, Artificial Sequence; identical to SEQ ID NO: 91326
  derived and/or modified CDS sequence (opt1) from hemagglutinin__InfluenzaB__AGX19392

SEQ ID NO: 91336 - RNA, 1758 nt, Artificial Sequence; identical to SEQ ID NO: 91326
  derived and/or modified CDS sequence (opt1) from hemagglutinin__InfluenzaB__AGX19403

SEQ ID NO: 91337 - RNA, 1758 nt, Artificial Sequence; identical to SEQ ID NO: 91013
  derived and/or modified CDS sequence (opt1) from hemagglutinin__InfluenzaB__AGX19414

SEQ ID NO: 91338 - RNA, 1755 nt, Artificial Sequence
  derived and/or modified CDS sequence (opt1) from hemagglutinin__InfluenzaB__AGX19425
augaagaccaucaucgugcugcucauggucgugaccagcaacgccgaccgcaucugcacgggcaucaccuccagcaacagcccccacguggucaagaccgccacccagggggaggugaacgugacgggcgucaucccgcugaccaccacccccacgaaguccuacuucgcgaaccugaaggggacccggacccgcggcaagcucugccccgacugccugaacugcaccgaccuggacguggcccucgggcggcccaugugcgugggcacgaccccguccgccaaggccagcauccugcacgagguccgccccgugaccuccggcugcuuccccaucaugcacgaccggaccaagauccgccagcugcccaaccuccugcggggguacgagaacauccgccugagcacgcagaacgugaucgacgccgagaaggcgccgggcgggcccuaccggcucggcaccuccgggagcugccccaacgccaccuccaagagcggcuucuucgccaccauggccugggcgguccccaaggacaacaacaagaacgccacgaacccgcugaccguggaggugcccuacaucugcaccgagggcgaggaccagaucaccgucuggggguuccacuccgacaacaagacgcagaugcgcaaccuguacggcgacagcaacccccagaaguucaccuccagcgccaacggggugaccacccacuacgugucccagaucggcagcuuccccgaccagacggaggacggcgggcucccgcaguccggccggaucgucguggacuacaugaugcagaagcccgggaagaccggcaccaucguguaccagcgcgggguccugcugccccagcggguguggugcgccagcggccgcagcaaggugaucaagggcgcccucccccugaucggggaggcggacugccugcacgagaaguacggcgggcucaacaaguccaagccguacuacaccggcgagcacgccaaggccaucgggaacugccccaucugggucaagacgccccugaagcuggccaacggcaccaaguaccggcccccggccaagcuccugaaggagcgcggcuucuucggggcgaucgccggcuuccuggagggcgggugggaggggaugaucgccggcuggcacggcuacaccagccacggggcccacggcguggccgucgcggccgaccucaaguccacccaggaggccaucaacaagaucacgaagaaccugaacagccuguccgagcucgaggugaagaaccugcagcggcugagcggggccauggacgagcuccacaacgagauccuggagcuggacgagaagguggacgaccuccgcgccgacaccaucuccagccagaucgagcuggcgguccugcucuccaacgagggcaucaucaacagcgaggacgagcaccuccuggcccuggagcggaagcugaagaagaugcugggccccuccgccguggagaucgggaacggcugcuucgagaccaagcacaagugcaaccagaccugccucgaccgcaucgccgcggggaccuucaacgccggcgaguucagccugcccacguucgacucccugaacaucaccgccgccagccucaacgacgacgggcuggacaaccacaccauccugcuguacuacuccaccgccgcgagcucccucgccgugacgcugaugcuggccaucuucaucgucuacauggugagccgggacaacguguccugcagcaucugccucuga

SEQ ID NO: 91339 - RNA, 1758 nt, Artificial Sequence; identical to SEQ ID NO: 90538
  derived and/or modified CDS sequence (opt1) from hemagglutinin__InfluenzaB__AGX19436

SEQ ID NO: 91340 - RNA, 1758 nt, Artificial Sequence; identical to SEQ ID NO: 91201
  derived and/or modified CDS sequence (opt1) from hemagglutinin__InfluenzaB__AGX19447

SEQ ID NO: 91341 - RNA, 1755 nt, Artificial Sequence; identical to SEQ ID NO: 91080
  derived and/or modified CDS sequence (opt1) from hemagglutinin__InfluenzaB__AGX19458

SEQ ID NO: 91342 - RNA, 1755 nt, Artificial Sequence; identical to SEQ ID NO: 91080
  derived and/or modified CDS sequence (opt1) from hemagglutinin__InfluenzaB__AGX19469

SEQ ID NO: 91343 - RNA, 1758 nt, Artificial Sequence; identical to SEQ ID NO: 91013
  derived and/or modified CDS sequence (opt1) from hemagglutinin__InfluenzaB__AGX19480

SEQ ID NO: 91344 - RNA, 1758 nt, Artificial Sequence; identical to SEQ ID NO: 90606
  derived and/or modified CDS sequence (opt1) from hemagglutinin__InfluenzaB__AGX19491

SEQ ID NO: 91345 - RNA, 1758 nt, Artificial Sequence
  derived and/or modified CDS sequence (opt1) from hemagglutinin__InfluenzaB__AGX19502
augaaggccaucaucgugcugcucauggucgugaccagcaacgccgaccgcaucugcaccggcaucacguccagcaacagcccccacguggucaagaccgcgacccagggggaggugaacgugaccggcgucaucccgcugacgaccacccccaccaagagccacuucgccaaccugaaggggacggagacccggggcaagcucugccccaagugccugaacugcaccgaccuggacguggcccucgggcgccccaagugcaccggcaagaucccguccgcccgggugagcauccugcacgagguccgccccgugacguccggcugcuuccccaucaugcacgaccggaccaagauccgccagcugcccaaccuccugcggggguacgagcacauccgccugagcacccacaacgugaucaacgccgagaacgcgccgggcgggcccuacaagaucggcaccuccgggagcugccccaacaucacgaacggcaacggcuucuucgccaccauggccugggccguccccaagaacgacaagaacaagaccgcgaccaacccgcucacgaucgaggugcccuacaucugcaccgagggggaggaccagaucaccguguggggcuuccacuccgacagcgagacccagauggccaagcuguacggggacuccaagccccagaaguucacgagcuccgccaacggcgucaccacccacuacgugagccagaucggcggguuccccaaccagaccgaggacggcgggcugccgcaguccggccggaucguggucgacuacauggugcagaaguccgggaagacgggcaccaucaccuaccagcgcggcauccuccugccccagaagguguggugcgccuccgggcggagcaaggucaucaagggcagccugccccucaucggggaggccgacugccugcacgagaaguacggcgggcugaacaaguccaagcccuacuacaccggcgagcacgcgaaggccaucggcaacugcccgaucugggugaagacgccccucaagcuggccaacgggaccaaguaccgcccgcccgccaagcugcucaaggagcggggcuucuucggggccaucgcgggcuuccuggagggcgggugggagggcaugaucgccggguggcacggcuacaccagccacggggcccacggcguggccgucgccgcggaccugaaguccacccaggaggccaucaacaagaucacgaagaaccucaacagccuguccgagcuggaggugaagaaccuccagcgccugagcggcgccauggacgagcugcacaacgagauccucgagcuggacgagaaggucgacgaccugcgggccgacaccaucuccagccagaucgagcucgccgugcugcuguccaacgaggggaucaucaacagcgaggacgagcaccuccuggcgcuggagcgcaagcucaagaagaugcugggccccuccgccguggagaucgggaacggcugcuucgagaccaagcacaagugcaaccagaccugccuggaccggaucgccgccgggaccuucgacgcgggcgaguucagccuccccacguucgacucccugaacaucaccgccgccagccugaacgacgacggccucgacaaccacaccauccugcuguacuacuccaccgccgccagcucccuggcggucacgcucaugaucgccaucuucgugguguacauggucagccgcgacaacguguccugcagcaucugccuguga

SEQ ID NO: 91346 - RNA, 1758 nt, Artificial Sequence
  derived and/or modified CDS sequence (opt1) from hemagglutinin__InfluenzaB__AGX19513
augaaggccaucaucgugcugcucauggucgugaccagcaacgccgaccgcaucugcaccggcaucacguccagcaacagcccccacguggucaagaccgcgacccagggggaggugaacgugaccggcgucaucccgcugacgaccacccccaccaagagccacuucgccaaccugaaggggacggagacccggggcaagcucugccccaagugccugaacugcaccgaccuggacguggcccucgggcgccccaagugcaccggcaagaucccguccgcccgggugagcauccugcacgagguccgccccgugacguccggcugcuuccccaucaugcacgaccggaccaagauccgccagcugcccaaccuccugcggggguacgagcacauccgccugagcacccacaacgugaucaacgccgagaacgcgccgggcgggcccuacaagaucggcaccuccgggagcugccccaacaucacgaacggcaacggcuucuucgccaccauggccugggccguccccaagaacgacaagaacaagaccgcgaccaacccgcucacgaucgaggugcccuacaucugcaccgagggggaggaccagaucaccguguggggcuuccacuccgacaacgagacccagauggccaagcuguacggggacagcaagccccagaaguucacguccagcgccaacggcgucaccacccacuacaucucccagaucggcggguuccccaaccagaccgaggacggcgggcugccgcagagcggccggaucgugguggacuacaugguccagaaguccgggaagacgggcaccaucaccuaccagcgcggcauccuccugccccagaagguguggugcgccagcgggcgguccaaggugaucaagggcagccugccccucaucggggaggccgacugccugcacgagaaguacggcgggcugaacaagagcaagcccuacuacaccggcgagcacgcgaaggccaucggcaacugcccgaucugggucaagacgccccucaagcuggccaacgggaccaaguaccgcccgcccgccaagcugcucaaggagcggggcuucuucggggccaucgcgggcuuccuggagggcgggugggagggcaugaucgccggguggcacggcuacaccucccacggggcccacggcguggccguggccgcggaccugaaguccacccaggaggccaucaacaagaucacgaagaaccucaacucccugagcgagcuggaggucaagaaccuccagcgccuguccggcgccauggacgagcugcacaacgagauccucgagcuggacgagaagguggacgaccugcgggccgacaccaucagcucccagaucgagcucgccguccugcugagcaacgaggggaucaucaacuccgaggacgagcaccuccuggcgcuggagcgcaagcucaagaagaugcugggccccagcgccguggagaucgggaacggcugcuucgagaccaagcacaagugcaaccagaccugccuggaccggaucgccgccgggaccuucgacgcgggcgaguucucccuccccacguucgacagccugaacaucaccgccgccucccugaacgacgacggccucgacaaccacaccauccugcuguacuacagcaccgccgccuccagccuggcggugacgcucaugaucgccaucuucgucguguacauggugucccgcgacaacgucagcugcuccaucugccuguga

SEQ ID NO: 91347 - RNA, 1758 nt, Artificial Sequence; identical to SEQ ID NO: 91346
  derived and/or modified CDS sequence (opt1) from hemagglutinin__InfluenzaB__AGX19524

SEQ ID NO: 91348 - RNA, 1758 nt, Artificial Sequence
  derived and/or modified CDS sequence (opt1) from hemagglutinin__InfluenzaB__AGX19535
augaaggccaucaucgugcugcucauggucgugaccagcaacgccgaccgcaucugcaccggcaucacguccagcaacagcccccacguggucaagaccgcgacccagggggaggugaacgugaccggcgucaucccgcugacgaccacccccaccaagagccacuucgccaaccugaaggggacggagacccggggcaagcucugccccaagugccugaacugcaccgaccuggacguggcccucgggcgccccaagugcaccggcaacaucccguccgcccgggugagcauccugcacgagguccgccccgugacguccggcugcuuccccaucaugcacgaccggaccaagauccgccagcugcccaaccuccugcggggguacgagcacauccgccugagcacccacaacgugaucaacgccgagaacgcgccgggcgggcccuacaagaucggcaccuccgggagcugccccaacgucacgaacggcaacggcuucuucgccaccauggccugggccgugcccaagaacgacaacaacaagaccgcgaccaacucccucacgaucgaggugccguacaucugcaccgagggggaggaccagaucaccgucuggggcuuccacagcgacgacgagacccagauggccaagcuguacggggacuccaagccccagaaguucacgagcuccgccaacggcgugaccacccacuacgugagccagaucggcggguuccccaaccagaccgaggacggcgggcugccccaguccggccggaucgucguggacuacauggugcagaaguccgggaagacgggcaccaucaccuaccagcgcggcauccuccugccgcagaaggucuggugcgccuccgggcggagcaaggugaucaagggcagccugccccucaucggggaggccgacugccugcacgagaaguacggcgggcugaacaaguccaagcccuacuacaccggcgagcacgcgaaggccaucggcaacugccccaucugggugaagacgccgcucaagcuggccaacgggaccaaguaccgcccgcccgccaagcugcucaaggagcggggcuucuucggggccaucgcgggcuuccuggagggcgggugggagggcaugaucgccggguggcacggcuacaccagccacggggcccacggcgucgccguggccgcggaccugaaguccacccaggaggccaucaacaagaucacgaagaaccucaacagccuguccgagcuggaggucaagaaccuccagcgccugagcggcgccauggacgagcugcacaacgagauccucgagcuggacgagaagguggacgaccugcgggccgacaccaucuccagccagaucgagcucgccgugcugcuguccaacgaggggaucaucaacagcgaggacgagcaccuccuggcgcuggagcgcaagcucaagaagaugcugggccccuccgccgucgagaucgggaacggcugcuucgagaccaagcacaagugcaaccagaccugccuggaccggaucgccgccgggaccuucgacgcgggcgaguucagccuccccacguucgacucccugaacaucaccgccgccagccugaacgacgacggccucgacaaccacaccauccugcuguacuacuccaccgccgccagcucccuggcggugacgcucaugaucgccaucuucguggucuacauggugagccgcgacaacguguccugcagcaucugccuguga

SEQ ID NO: 91349 - RNA, 1758 nt, Artificial Sequence
  derived and/or modified CDS sequence (opt1) from hemagglutinin__InfluenzaB__AGX19546
augaaggccaucaucgugcugcucauggucgugaccagcaacgccgaccgcaucugcaccggcaucacguccagcaacagcccccacguggucaagaccgcgacccagggggaggugaacgugaccggcgucaucccgcugacgaccacccccaccaagagccacuucgccaaccugaaggggacggagacccggggcaagcucugccccaagugccugaacugcaccgaccuggacguggcccucgggcgccccaagugcaccggcaacaucccguccgcccgggugagcauccugcacgagguccgccccgugacguccggcugcuuccccaucaugcacgaccggaccaagauccgccagcugcccaaccuccugcggggguacgagcacauccgccugagcacccacaacgugaucaacgccgagaacgcgccgggcgggcccuacaagaucggcaccuccgggagcugccccaacgucacgaacggcaacggcuucuucgccaccauggccugggccgugcccaagaacgacaacaacaagaccgcgaccaacucccucacgaucgaggugccguacaucugcaccgagggggaggaccagaucaccgucuggggcuuccacagcgacaaggagacccagauggccaagcuguacggggacuccaagccccagaaguucacgagcuccgccaacggcgugaccacccacuacgugagccagaucggcggguuccccaaccagaccgaggacggcgggcugccccaguccggccggaucgucguggacuacauggugcagaaguccgggaagacgggcaccaucaccuaccagcgcggcauccuccugccgcagaaggucuggugcgccuccgggcggagcaaggugaucaagggcagccugccccucaucggggaggccgacugccugcacgagaaguacggcgggcugaacaaguccaagcccuacuacaccggcgagcacgcgaaggccaucggcaacugccccaucugggugaagacgccgcucaagcuggccaacgggaccaaguaccgcccgcccgccaagcugcucaaggagcggggcuucuucggggccaucgcgggcuuccuggagggcgggugggagggcaugaucgccggguggcacggcuacaccagccacggggcccacggcgucgccguggccgcggaccugaaguccacccaggaggccaucaacaagaucacgaagaaccucaacagccuguccgagcuggaggucaagaaccuccagcgccugagcggcgccauggacgagcugcacaacgagauccucgagcuggacgagaagguggacgaccugcgggccgacaccaucuccagccagaucgagcucgccgugcugcuguccaacgaggggaucaucaacagcgaggacgagcaccuccuggcgcuggagcgcaagcucaagaagaugcugggccccuccgccgucgagaucgggaacggcugcuucgagaccaagcacaagugcaaccagaccugccuggaccggaucgccgccgggaccuucgacgcgggcgaguucagccuccccacguucgacucccugaacaucaccgccgccagccugaacgacgacggccucgacaaccacaccauccugcuguacuacuccaccgccgccagcucccuggcggugacgcucaugaucgccaucuucguggucuacauggugagccgcgacaacguguccugcagcaucugccuguga

SEQ ID NO: 91350 - RNA, 1758 nt, Artificial Sequence
  derived and/or modified CDS sequence (opt1) from hemagglutinin__InfluenzaB__AGX19557
augaaggccaucaucgugcugcucauggucgugaccagcaacgccgaccgcaucugcaccggcaucacguccagcaacagcccccacguggucaagaccgcgacccagggggaggugaacgugaccggcgucaucccgcugacgaccacccccaccaagagccacuucgccaaccugaaggggacggagacccggggcaagcucugccccaagugccugaacugcaccgaccuggacguggcccucgggcgccccaagugcaccggcaacaucccguccgcccgggugagcauccugcacgagguccgccccgugacguccggcugcuuccccaucaugcacgaccggaccaagauccgccagcugcccaaccuccugcggggguacgagcacauccgccugagcacccacaacgugaucaacgccgagaacgcgccgggcgggcccuacaagaucggcaccuccgggagcugccccaacgucacgaacggcaacggcuucuucgccaccauggccugggccgugcccaagaacgacaacaacaagaccgcgaccaacucccucacgaucgaggugccguacaucugcaccgggggcgaggaccagaucaccgucuggggguuccacagcgacaacgagacccagauggccaagcuguacggcgacuccaagccccagaaguucacgagcuccgccaacggcgugaccacccacuacgugagccagaucgggggcuuccccaaccagaccgaggacgggggccugccccaguccgggcggaucgucguggacuacauggugcagaaguccggcaagacgggcaccaucaccuaccagcgcgggauccuccugccgcagaaggucuggugcgccuccggccggagcaaggugaucaaggggagccugccccucaucggcgaggccgacugccugcacgagaaguacgggggccugaacaaguccaagcccuacuacaccggcgagcacgcgaaggccaucgggaacugccccaucugggugaagacgccgcucaagcuggccaacggcaccaaguaccgcccgcccgccaagcugcucaaggagcggggguucuucggcgccaucgcgggguuccuggagggcggcugggaggggaugaucgccggcuggcacggguacaccagccacggcgcccacggcgucgccguggccgcggaccugaaguccacccaggaggccaucaacaagaucacgaagaaccucaacagccuguccgagcuggaggucaagaaccuccagcgccugagcggggccauggacgagcugcacaacgagauccucgagcuggacgagaagguggacgaccugcgggccgacaccaucuccagccagaucgagcucgccgugcugcuguccaacgagggcaucaucaacagcgaggacgagcaccuccuggcgcuggagcgcaagcucaagaagaugcuggggcccuccgccgucgagaucggcaacgggugcuucgagaccaagcacaagugcaaccagaccugccuggaccggaucgccgccggcaccuucgacgcgggcgaguucagccuccccacguucgacucccugaacaucaccgccgccagccugaacgacgacgggcucgacaaccacaccauccugcuguacuacuccaccgccgccagcucccuggcggugacgcucaugaucgccaucuucguggucuacauggugagccgcgacaacguguccugcagcaucugccuguga

SEQ ID NO: 91351 - RNA, 1758 nt, Artificial Sequence; identical to SEQ ID NO: 91013
  derived and/or modified CDS sequence (opt1) from hemagglutinin__InfluenzaB__AGX19568

SEQ ID NO: 91352 - RNA, 1758 nt, Artificial Sequence; identical to SEQ ID NO: 91346
  derived and/or modified CDS sequence (opt1) from hemagglutinin__InfluenzaB__AGX19579

SEQ ID NO: 91353 - RNA, 1758 nt, Artificial Sequence; identical to SEQ ID NO: 91013
  derived and/or modified CDS sequence (opt1) from hemagglutinin__InfluenzaB__AGX19590

SEQ ID NO: 91354 - RNA, 1758 nt, Artificial Sequence; identical to SEQ ID NO: 91013
  derived and/or modified CDS sequence (opt1) from hemagglutinin__InfluenzaB__AGX19601

SEQ ID NO: 91355 - RNA, 1758 nt, Artificial Sequence; identical to SEQ ID NO: 91013
  derived and/or modified CDS sequence (opt1) from hemagglutinin__InfluenzaB__AGX19612

SEQ ID NO: 91356 - RNA, 1758 nt, Artificial Sequence
  derived and/or modified CDS sequence (opt1) from hemagglutinin__InfluenzaB__AGX19623
augaaggccaucaucgugcugcucauggucgugaccagcaacgccgaccgcaucugcaccggcaucacguccagcaacagcccccacguggucaagaccgcgacccagggggaggugaacgugaccggcgucaucccgcugacgaccacccccaccaagagccacuucgccaaccugaaggggacggagacccggggcaagcucugccccaagugccugaacugcaccgaccuggacguggcccucgggcgccccaagugcaccggcaacaucccguccgcccgggugagcauccugcacgagguccgccccgugacguccggcugcuuccccaucaugcacgaccggaccaagauccgccagcugcccaaccuccugcggggguacgagcacauccgccugagcacccacaacgugaucaacgccgagaacgcgccgggcgggcccuacaagaucggcaccuccgggagcugccccaacgucacgaacggcaacggcuucuucgccaccauggccugggccgugcccaagaacgacaacaacaagaccgcgaccaacucccucacgaucgaggugccguacaucugcaccgagggggaggaccagaucaccgucuggggcuuccacagcgacaacgagacccagauggccaagcuguacggggacuccaagccccagaaguucacgagcuccgccaacggcgugaccacccacuacgugagccagaucggcggguuccccaaccagaccgaggacggcgggcugccccaguccggccggaucgucguggacuacauggugcagaaguccgggaagacgggcaccaucaccuaccagcgcggcauccuccugccgcagaaggucuggugcgccuccgggcggagcaaggugaucaagggcagccugccccucaucggggaggccgacugccugcacgagaaguacggcgggcugaacaaguccaagcccuacuacaccggcgagcacgcgaaggccaucggcaacugccccaucugggugaagacgccgcucaagcuggccaacgggaccaaguaccgcccgcccgccaagcugcucaaggagcggggcuucuucggggccaucgcgggcuuccuggagggcgggugggagggcaugaucgccggguggcacggcuacaccagccacggggcccacggcgucgccguggccgcggaccugaaguccacccaggaggccaucaacaagaucacgaagaaccucaacagccuguccgagcuggaggucaagaaccuccagcgccugagcggcgccauggacgagcugcacaacgagauccucgagcuggacgagaagguggacgaccugcgggccgacaccaucuccagccagaucgagcucgccgugcugcuguccaacgaggggaucaucaacagcgaggacgagcaccuccuggcgcuggagcgcaagcucaagaagaugcugggccccuccgccgucgagaucgggaacggcugcuucgagaccaagcacaagugcaaccagaccugccuggaccggaucgccgccgggaccuucgacgcgggcgaguucagccuccccacguucgacucccugaacaucaccgccgccagccugaacgacgacggccucgacaaccacaccauccugcuguacuacuccaccgccgccagcucccuggcgguggcccucaugaucgccaucuucguggucuacauggugagccgcgacaacguguccugcagcaucugccuguga

SEQ ID NO: 91357 - RNA, 1758 nt, Artificial Sequence; identical to SEQ ID NO: 91013
  derived and/or modified CDS sequence (opt1) from hemagglutinin__InfluenzaB__AGX19634

SEQ ID NO: 91358 - RNA, 1758 nt, Artificial Sequence; identical to SEQ ID NO: 90538
  derived and/or modified CDS sequence (opt1) from hemagglutinin__InfluenzaB__AGX19645

SEQ ID NO: 91359 - RNA, 1758 nt, Artificial Sequence; identical to SEQ ID NO: 90589
  derived and/or modified CDS sequence (opt1) from hemagglutinin__InfluenzaB__AGX19656

SEQ ID NO: 91360 - RNA, 1758 nt, Artificial Sequence
  derived and/or modified CDS sequence (opt1) from hemagglutinin__InfluenzaB__AGX19667
augaaggccaucaucgugcugcucauggucgugaccagcaacgccgaccgcaucugcaccggcaucacguccagcaacagcccccacguggucaagaccgcgacccagggggaggugaacgugaccggcgucaucccgcugacgaccacccccaccaagagccacuucgccaaccugaaggggacggagacccggggcaagcucugccccaagugccugaacugcaccgaccuggacguggcccucgggcgccccaagugcaccggcaagaucccguccgcccgggugagcauccugcacgagguccgccccgugacguccggcugcuuccccaucaugcacgaccggaccaagauccgccagcugcccaaccuccugcggggguacgagcacauccgccugagcacccacaacgugaucaacgccgagaacgcgccgggcgggcccuacaagaucggcaccuccgggagcugccccaacaucacgaacggcaacggcuucuucgccaccauggccugggccguccccaagaacgacaagaacaagaccgcgaccaacccgcucacgaucgaggugcccuacaucugcaccgagggggaggaccagaucaccguguggggcuuccacuccgacaacgagacccagauggccaagcuguacggggacagcaagccccagaaguucacguccagcgccaacggcgucaccacccacuacgugucccagaucggcggguuccccaaccagaccgaggacggcgggcugccgcagagcggccggaucguggucgacuacauggugcagaaguccgggaagacgggcaccaucaccuaccagcgcggcauccuccugccccagaagguguggugcgccagcgggcgguccaaggucaucaagggcagccugccccucaucggggaggccgacugccugcacgagaaguacggcgggcugaacaagagcaagcccuacuacaccggcgagcacgcgaaggccaucggcaacugcccgaucugggugaagacgccccucaagcuggccaacgggaccaaguaccgcccgcccgccaagcugcucaaggagcggggcuucuucggggccaucgcgggcuuccuggagggcgggugggagggcaugaucgccggguggcacggcuacaccucccacggggcccacggcguggccgucgccgcggaccugaaguccacccaggaggccaucaacaagaucacgaagaaccucaacucccugagcgagcuggaggugaaggaccuccagcgccuguccggcgccauggacgagcugcacaacgagauccucgagcuggacgagaaggucgacgaccugcgggccgacaccaucagcucccagaucgagcucgccgugcugcugagcaacgaggggaucaucaacuccgaggacgagcaccuccuggcgcuggagcgcaagcucaagaagaugcugggccccagcgccguggagaucgggaacggcugcuucgagaccaagcacaagugcaaccagaccugccuggaccggaucgccgccgggaccuucgacgcgggcgaguucucccuccccacguucgacagccugaacaucaccgccgccucccugaacgacgacggccucgacaaccacaccauccugcuguacuacagcaccgccgccuccagccuggcggucacgcucaugaucgccaucuucgugguguacauggucucccgcgacaacgugagcugcuccaucugccuguga

SEQ ID NO: 91361 - RNA, 1758 nt, Artificial Sequence; identical to SEQ ID NO: 91013
  derived and/or modified CDS sequence (opt1) from hemagglutinin__InfluenzaB__AGX19678

SEQ ID NO: 91362 - RNA, 1758 nt, Artificial Sequence; identical to SEQ ID NO: 90538
  derived and/or modified CDS sequence (opt1) from hemagglutinin__InfluenzaB__AGX19700

SEQ ID NO: 91363 - RNA, 1758 nt, Artificial Sequence
  derived and/or modified CDS sequence (opt1) from hemagglutinin__InfluenzaB__AGX19711
augaaggccaucaucgugcugcucauggucgugaccagcaacgccgaccgcaucugcaccggcaucacguccagcaacagcccccacguggucaagaccgcgacccagggggaggugaacgugaccggcgucaucccgcugacgaccacccccaccaagagccacuucgccaaccugaaggggacggagacccggggcaagcucugccccaagugccugaacugcaccgaccuggacguggcccucgggcgccccaagugcaccggcaacaucccguccgcccgggugagcauccugcacgagguccgccccgugacguccggcugcuuccccaucaugcacgaccggaccaagauccgccagcugcccaaccuccugcggggguacgagcacauccgccugagcacccacaacgugaucaacgccgagaacgcgccgggcgggcccuacaagaucggcaccuccgggagcugccccaacgucacgaacggcaacggcuucuucgccaccauggccugggccgugcccaagaacgacaagaacaagaccgcgaccaacucccucacgaucgaggugccguacaucugcaaggagggggaggaccagaucaccgucuggggcuuccacagcgacaacgagacccagauggccaagcuguacggggacuccaagccccagaaguucaccagcuccgccaacggcgugacgacccacuacgugagccagaucggcggguuccccaaccagaccgaggacggcgggcugccccaguccggccggaucgucguggacuacauggugcagaaguccgggaagaccggcacgaucaccuaccagcgcggcauccuccugccgcagaaggucuggugcgccuccgggcggagcaaggugaucaagggcagccugccccucaucggggaggccgacugccugcacgagaaguacggcgggcugaacaaguccaagcccuacuacaccggcgagcacgcgaaggccaucggcaacugccccaucugggugaagaccccgcucaagcuggccaacgggacgaaguaccgcccgcccgccaagcugcucaaggagcggggcuucuucggggccaucgcgggcuuccuggagggcgggugggagggcaugaucgccggguggcacggcuacaccagccacggggcccacggcgucgccguggccgcggaccugaaguccacccaggaggccaucaacaagaucaccaagaaccucaacagccuguccgagcuggaggucaagaaccuccagcgccugagcggcgccauggacgagcugcacaacgagauccucgagcuggacgagaagguggacgaccugcgggccgacacgaucuccagccagaucgagcucgccgugcugcuguccaacgaggggaucaucaacagcgaggacgagcaccuccuggcgcuggagcgcaagcucaagaagaugcugggccccuccgccgucgagaucgggaacggcugcuucgagaccaagcacaagugcaaccagaccugccuggaccggaucgccgccgggaccuucgacgcgggcgaguucagccuccccaccuucgacucccugaacaucacggccgccagccugaacgacgacggccucgacaaccacaccauccugcuguacuacuccaccgccgccagcucccuggcggugacccucaugaucgccaucuucguggucuacauggugagccgcgacaacguguccugcagcaucugccuguga

SEQ ID NO: 91364 - RNA, 1758 nt, Artificial Sequence; identical to SEQ ID NO: 91013
  derived and/or modified CDS sequence (opt1) from hemagglutinin__InfluenzaB__AGX19722

SEQ ID NO: 91365 - RNA, 1758 nt, Artificial Sequence; identical to SEQ ID NO: 91013
  derived and/or modified CDS sequence (opt1) from hemagglutinin__InfluenzaB__AGX19733

SEQ ID NO: 91366 - RNA, 1758 nt, Artificial Sequence; identical to SEQ ID NO: 91013
  derived and/or modified CDS sequence (opt1) from hemagglutinin__InfluenzaB__AGX19744

SEQ ID NO: 91367 - RNA, 1758 nt, Artificial Sequence; identical to SEQ ID NO: 90538
  derived and/or modified CDS sequence (opt1) from hemagglutinin__InfluenzaB__AGX19755

SEQ ID NO: 91368 - RNA, 1758 nt, Artificial Sequence; identical to SEQ ID NO: 91013
  derived and/or modified CDS sequence (opt1) from hemagglutinin__InfluenzaB__AGX19766

SEQ ID NO: 91369 - RNA, 1758 nt, Artificial Sequence; identical to SEQ ID NO: 91346
  derived and/or modified CDS sequence (opt1) from hemagglutinin__InfluenzaB__AGX19788

SEQ ID NO: 91370 - RNA, 1758 nt, Artificial Sequence; identical to SEQ ID NO: 91013
  derived and/or modified CDS sequence (opt1) from hemagglutinin__InfluenzaB__AGX19799

SEQ ID NO: 91371 - RNA, 1758 nt, Artificial Sequence; identical to SEQ ID NO: 91013
  derived and/or modified CDS sequence (opt1) from hemagglutinin__InfluenzaB__AGX19810

SEQ ID NO: 91372 - RNA, 1758 nt, Artificial Sequence
  derived and/or modified CDS sequence (opt1) from hemagglutinin__InfluenzaB__AGX19821
augaaggccaucaucgugcugcucauggucgugaccagcaacgccgaccgcaucugcaccggcaucacguccagcaacagcccccacguggucaagaccgcgacccagggggaggugaacgugaccggcgucaucccgcugacgaccacccccaccaagagccacuucgccaaccugaaggggacggagacccggggcaagcucugccccaagugccugaacugcaccgaccuggacguggcccucgggcgccccaagugcaccggcaacaucccguccgcccgggugagcauccugcacgagguccgccccgugacguccggcugcuuccccaucaugcacgaccggaccaagauccgccagcugcccaaccuccugcggggguacgagcacauccgccugagcacccacaacgugaucaacgccgagaacgcgccgggcgggcccuacaagaucggcaccuccgggagcugccccaacgucacgaacggcaacggcuucuucgccaccauggccugggccgugcccaagaacgacaacaacaagaccgcgaccaacucccucacgaucgaggugccguacaucugcaccgagggggaggaccagaucaccgucuggggcuuccacagcgacaacgagacccagauggccaagcuguacggggacuccaagccccagaaguucacgagcuccgccaacggcgugaccacccacuacgugagccagaucggcggguuccccaaccagaccgaggacggcgggcugccccaguccggccggaucgucguggacuacauggugcagaaguccgggaagacgggcaccaucaccuaccagcgcggcauccuccugccgcagaaggucuggugcgccuccgggcggagcaaggugaucaagggcagccugccccucaucggggaggccgacugccugcacgagaaguacggcgggcugaacaaguccaagcccuacuacaccggcgagcacgcgaaggccaucggcaacugccccaucugggugaagacgccgcucaagcuggccaacgggaccaaguaccgcccgcccgccaagcugcucaaggagcggggcuucuucggggccaucgcgggcuuccuggagggcgggugggagggcaugaucgccggguggcacggcuacaccagccacggggcccacggcgucgccguggccgcggaccugaaguccacccaggaggccaucaacaagaucacgaagaaccucaacagccuguccgagcuggaggucaagaaccuccagcgccugagcggcuccauggacgagcugcacaacgagauccucgagcuggacgagaagguggacgaccugcgggccgacaccaucagcucccagaucgagcucgccgugcugcugagcaacgaggggaucaucaacuccgaggacgagcaccuccuggcccuggagcgcaagcucaagaagaugcugggccccagcgcggucgagaucgggaacggcugcuucgagaccaagcacaagugcaaccagaccugccuggaccggaucgccgccgggaccuucgacgccggcgaguucucccuccccacguucgacagccugaacaucaccgcggccucccugaacgacgacggccucgacaaccacaccauccugcuguacuacagcaccgccgccuccagccuggccgugacgcucaugaucgcgaucuucguggucuacauggugucccgcgacaacgugagcugcagcaucugccuguga

SEQ ID NO: 91373 - RNA, 1758 nt, Artificial Sequence; identical to SEQ ID NO: 91346
  derived and/or modified CDS sequence (opt1) from hemagglutinin__InfluenzaB__AGX19832

SEQ ID NO: 91374 - RNA, 1758 nt, Artificial Sequence; identical to SEQ ID NO: 91013
  derived and/or modified CDS sequence (opt1) from hemagglutinin__InfluenzaB__AGX19843

SEQ ID NO: 91375 - RNA, 1758 nt, Artificial Sequence; identical to SEQ ID NO: 91013
  derived and/or modified CDS sequence (opt1) from hemagglutinin__InfluenzaB__AGX19854

SEQ ID NO: 91376 - RNA, 1758 nt, Artificial Sequence; identical to SEQ ID NO: 91013
  derived and/or modified CDS sequence (opt1) from hemagglutinin__InfluenzaB__AGX19865

SEQ ID NO: 91377 - RNA, 1758 nt, Artificial Sequence; identical to SEQ ID NO: 91346
  derived and/or modified CDS sequence (opt1) from hemagglutinin__InfluenzaB__AGX19876

SEQ ID NO: 91378 - RNA, 1758 nt, Artificial Sequence; identical to SEQ ID NO: 91013
  derived and/or modified CDS sequence (opt1) from hemagglutinin__InfluenzaB__AGX19887

SEQ ID NO: 91379 - RNA, 1758 nt, Artificial Sequence
  derived and/or modified CDS sequence (opt1) from hemagglutinin__InfluenzaB__AGX19898
augaaggccaucaucgugcugcucauggucgugaccagcaacgccgaccgcaucugcaccggcaucacguccagcaacagcccccacguggucaagaccgcgacccagggggaggugaacgugaccggcgucaucccgcugacgaccacccccaccaagagccacuucgccaaccugaaggggacggagacccggggcaagcucugccccaagugccugaacugcaccgaccuggacguggcccucgggcgccccaagugcaccggcaagaucccguccgcccgggugagcauccugcacgagguccgccccgugacguccggcugcuuccccaucaugcacgaccggaccaagauccgccagcugcccaaccuccugcggggguacgagcacauccgccugagcacccacaacgugaucaacgccgagaacgcgccgggcgggcccuacaagaucggcaccuccgggagcugccccaacaucacgaacgagaacggcuucuucgccaccauggccugggccguccccaagaacgacaagaacaagaccgcgaccaacccgcucacgaucgaggugcccuacaucugcaccgagggcgaggaccagaucaccguguggggguuccacuccgacaacgagacccagauggccaagcuguacggcgacagcaagccccagaaguucacguccagcgccaacggggucaccacccacuacgugucccagaucggcggcuuccccaaccagaccgaggacgggggccugccgcagagcgggcggaucguggucgacuacauggugcagaaguccggcaagacggggaccaucaccuaccagcgcggcauccuccugccccagaagguguggugcgccagcggccgguccaaggucaucaaggggagccugccccucaucggcgaggccgacugccugcacgagaaguacgggggccugaacaagagcaagcccuacuacaccggggagcacgcgaaggccaucggcaacugcccgaucugggugaagacgccccucaagcuggccaacggcaccaaguaccgcccgcccgccaagcugcucaaggagcggggguucuucggcgccaucgcgggguuccuggagggcgggugggagggcaugaucgccggcuggcacggguacaccucccacggcgcccacgggguggccgucgccgcggaccugaaguccacccaggaggccaucaacaagaucacgaagaaccucaacucccugagcgagcuggaggugaagaaccuccagcgccuguccggcgccauggacgagcugcacaacgagauccucgagcuggacgagaaggucgacgaccugcgggccgacaccaucagcucccagaucgagcucgccgugcugcugagcaacgagggcaucaucaacuccgaggacgagcaccuccuggcgcuggagcgcaagcucaagaagaugcuggggcccagcgccguggagaucggcaacgggugcuucgagaccaagcacaagugcaaccagaccugccuggaccggaucgccgccggcaccuucgacgcgggggaguucucccuccccacguucgacagccugaacaucaccgccgccucccugaacgacgacggccucgacaaccacaccauccugcuguacuacagcaccgccgccuccagccuggcggucacgcucaugaucgccaucuucgugguguacauggucucccgcgacaacgugagcugcuccaucugccuguga

SEQ ID NO: 91380 - RNA, 1758 nt, Artificial Sequence; identical to SEQ ID NO: 90538
  derived and/or modified CDS sequence (opt1) from hemagglutinin__InfluenzaB__AGX19909

SEQ ID NO: 91381 - RNA, 1758 nt, Artificial Sequence; identical to SEQ ID NO: 91013
  derived and/or modified CDS sequence (opt1) from hemagglutinin__InfluenzaB__AGX19920

SEQ ID NO: 91382 - RNA, 1758 nt, Artificial Sequence; identical to SEQ ID NO: 91379
  derived and/or modified CDS sequence (opt1) from hemagglutinin__InfluenzaB__AGX19931

SEQ ID NO: 91383 - RNA, 1758 nt, Artificial Sequence; identical to SEQ ID NO: 91346
  derived and/or modified CDS sequence (opt1) from hemagglutinin__InfluenzaB__AGX19942

SEQ ID NO: 91384 - RNA, 1758 nt, Artificial Sequence; identical to SEQ ID NO: 91013
  derived and/or modified CDS sequence (opt1) from hemagglutinin__InfluenzaB__AGX19953

SEQ ID NO: 91385 - RNA, 1758 nt, Artificial Sequence; identical to SEQ ID NO: 90771
  derived and/or modified CDS sequence (opt1) from hemagglutinin__InfluenzaB__AGX19964

SEQ ID NO: 91386 - RNA, 1758 nt, Artificial Sequence; identical to SEQ ID NO: 90538
  derived and/or modified CDS sequence (opt1) from hemagglutinin__InfluenzaB__AGX19975

SEQ ID NO: 91387 - RNA, 1758 nt, Artificial Sequence
  derived and/or modified CDS sequence (opt1) from hemagglutinin__InfluenzaB__AGX19986
augaaggccaucaucgugcugcucauggucgugaccagcaacgccgaccgcaucugcaccggcaucacguccagcaacagcccccacguggucaagaccgcgacccagggggaggugaacgugaccggcgucaucccgcugacgaccacccccaccaagagccacuucgccaaccugaaggggacggagacccggggcaagcucugccccaagugccugaacugcaccgaccuggacguggcccucgggcgccccaagugcaccggcaagaucccguccgcccgggugagcauccugcacgagguccgccccgugacguccggcugcuuccccaucaugcacgaccggaccaagauccgccagcugcccaaccuccugcggggguacgagcacauccgccugagcacccacaacgugaucaacgccgagaacgcgccgggcgggcccuacaagaucggcaccuccgggagcugccccaacaucacgaacggcaacggcuucuucgccaccauggccugggccguccccaagaacgacaagaacaagaccgcgaccaacccgcucacgaucgaggugcccuacaucugcaccgagggggaggaccagaucaccguguggggcuuccacuccgacaacgagacccagauggccaagcuguacggggacagcaagccccagaaguucacguccagcgccaacggcgucaccacccacuacgugucccagaucggcggguuccccaaccagaccgaggacggcgggcugccgcagagcggccggaucguggucgacuacauggugcagaaguccgggaagacgggcaccaucaccuaccagcgcggcauccuccugccccagaagguguggugcgucagcgggcgguccaaggugaucaagggcagccugccccucaucggggaggccgacugccugcacgagaaguacggcgggcugaacaagagcaagcccuacuacaccggcgagcacgccaaggcgaucggcaacugcccgaucugggugaagacgccccucaagcuggccaacgggaccaaguaccgcccgcccgccaagcugcucaaggagcggggcuucuucggggccaucgccggcuuccuggagggcgggugggagggcaugaucgcgggguggcacggcuacaccucccacggggcccacggcgucgccguggccgccgaccugaaguccacccaggaggcgaucaacaagaucacgaagaaccucaacucccugagcgagcuggaggucaagaaccuccagcgccuguccggcgccauggacgagcugcacaacgagauccucgagcuggacgagaagguggacgaccugcgggccgacaccaucagcucccagaucgagcucgccgugcugcugagcaacgaggggaucaucaacuccgaggacgagcaccuccuggcccuggagcgcaagcucaagaagaugcugggccccagcgcggucgagaucgggaacggcugcuucgagaccaagcacaagugcaaccagaccugccuggaccggaucgccgccgggaccuucgacgccggcgaguucucccuccccacguucgacagccugaacaucaccgcggccucccugaacgacgacggccucgacaaccacaccauccugcuguacuacagcaccgccgccuccagccuggccgugacgcucaugaucgcgaucuucguggucuacauggugucccgcgacaacgugagcugcuccaucugccuguga

SEQ ID NO: 91388 - RNA, 1758 nt, Artificial Sequence
  derived and/or modified CDS sequence (opt1) from hemagglutinin__InfluenzaB__AGX19997
augaaggccaucaucgugcugcucauggucgugaccagcaacgccgaccgcaucugcaccggcaucacguccagcaacagcccccacguggucaagaccgcgacccagggggaggugaacgugaccggcgucaucccgcugacgaccacccccaccaagagccacuucgccaaccugaaggggacggagacccggggcaagcucugccccaagugccugaacugcaccgaccuggacguggcccucgggcgccccaagugcaccggcaagaucccguccgcccgggugagcauccugcacgagguccgccccgugacguccggcugcuuccccaucaugcacgaccggaccaagauccgccagcugcccaaccuccugcggggguacgagcacauccgccugagcacccacaacgugaucaacgccgagaacgcgccgggcgggcccuacaagaucggcaccuccgggagcugccccaacaucacgaacggcaacggcuucuucgccaccauggccugggccguccccaagaacgacaagaacaagaccgcgaccaacccgcucacgaucgaggugcccuacaucugcaccgagggggaggaccagaucaccguguggggcuuccacuccgacaacgagacccagauggccaagcuguacggggacagcaagccccagaaguucacguccagcgccaacggcgucaccacccacuacgugucccagaucggcggguuccccaaccagaucgaggacggcgggcugccgcagagcggccggaucguggucgacuacauggugcagaaguccgggaagaccggcacgaucaccuaccagcgcggcauccuccugccccagaagguguggugcgccagcgggcgguccaaggucaucaagggcagccugccccucaucggggaggccgacugccugcacgagaaguacggcgggcugaacaagagcaagcccuacuacaccggcgagcacgcgaaggccaucggcaacugcccgaucugggugaagacgccccucaagcuggccaacgggaccaaguaccgcccgcccgccaagcugcucaaggagcggggcuucuucggggccaucgcgggcuuccuggagggcgggugggagggcaugaucgccggguggcacggcuacaccucccacggggcccacggcguggccgucgccgcggaccugaaguccacccaggaggccaucaacaagaucaccaagaaccucaacucccugagcgagcuggaggugaagaaccuccagcgccuguccggcgccauggacgagcugcacaacgagauccucgagcuggacgagaaggucgacgaccugcgggccgacacgaucagcucccagaucgagcucgccgugcugcugagcaacgaggggaucaucaacuccgaggacgagcaccuccuggcgcuggagcgcaagcucaagaagaugcugggccccagcgccguggagaucgggaacggcugcuucgagaccaagcacaagugcaaccagaccugccuggaccggaucgccgccgggaccuucgacgcgggcgaguucucccuccccaccuucgacagccugaacaucacggccgccucccugaacgacgacggccucgacaaccacaccauccugcuguacuacagcaccgccgccuccagccuggcggucacccucaugaucgccaucuucgugguguacauggucucccgcgacaacgugagcugcuccaucugccuguga

SEQ ID NO: 91389 - RNA, 1758 nt, Artificial Sequence; identical to SEQ ID NO: 91013
  derived and/or modified CDS sequence (opt1) from hemagglutinin__InfluenzaB__AGX20008

SEQ ID NO: 91390 - RNA, 1758 nt, Artificial Sequence; identical to SEQ ID NO: 91013
  derived and/or modified CDS sequence (opt1) from hemagglutinin__InfluenzaB__AGX20019

SEQ ID NO: 91391 - RNA, 1758 nt, Artificial Sequence; identical to SEQ ID NO: 91013
  derived and/or modified CDS sequence (opt1) from hemagglutinin__InfluenzaB__AGX20030

SEQ ID NO: 91392 - RNA, 1758 nt, Artificial Sequence
  derived and/or modified CDS sequence (opt1) from hemagglutinin__InfluenzaB__AGX20041
augaaggccaucaucgugcugcucauggucgugaccagcgacgccgaccgcaucugcaccggcaucacguccagcaacagcccccacguggucaagaccgcgacccagggggaggugaacgugaccggcgucaucccgcugacgaccacccccaccaagagccacuucgccaaccugaaggggaaggagacgcggggcaagcucugccccaagugccugaacugcaccgaccuggacguggcccucgggcgccccaagugcaccggcaagaucccguccgcccgggugagcauccugcacgagguccgccccgugaccuccggcugcuuccccaucaugcacgaccggacgaagauccgccagcugcccaaccuccugcggggguacgagcacauccgccugagcacccacaacgugaucaacgccgagaacgcgccgggcgggcccuacaagaucggcaccuccgggagcugccccaacaucaccaacggcaacggcuucuucgccacgauggccugggccguccccaagaacgacaagaacaagaccgcgaccaacccgcucaccaucgaggugcccuacaucugcacggagggggaggaccagaucaccguguggggcuuccacuccgacaacgagacccagauggccaagcuguacggggacagcaagccccagaaguucaccuccagcgccaacggcgucacgacccacuacgugucccagaucggcggguuccccaaccagaccgaggacggcgggcugccgcagagcggccggaucguggucgacuacauggugcagaaguccgggaagaccggcacgaucaccuaccagcgcggcauccuccugccccagaagguguggugcgccagcgggcgguccaaggucaucaagggcagccugccccucaucggggaggccgacugccugcacgagaaguacggcgggcugaacaagagcaagcccuacuacaccggcgagcacgcgaaggccaucggcaacugcccgaucugggugaagacgccccucaagcuggccaacgggaccaaguaccgcccgcccgccaagcugcucaaggagcggggcuucuucggggccaucgcgggcuuccuggagggcgggugggagggcaugaucgccggguggcacggcuacaccucccacggggcccacggcguggccgucgccgcggaccugaaguccacccaggaggccaucaacaagaucaccaagaaccucaacucccugagcgagcuggaggugaagaaccuccagcgccuguccggcgccauggacgagcugcacaacgagauccucgagcuggacgagaaggucgacgaccugcgggccgacacgaucagcucccagaucgagcucgccgugcugcugagcaacgaggggaucaucaacuccgaggacgagcaccuccuggcgcuggagcgcaagcucaagaagaugcugggccccagcgccguggagaucgggaacggcugcuucgagaccaagcacaagugcaaccagaccugccuggaccggaucgccgccgggaccuucgacgcgggcgaguucucccuccccaccuucgacagccugaacaucacggccgccucccugaacgacgacggccucgacaaccacaccauccugcuguacuacagcaccgccgccuccagccuggcggucacccucaugaucgccaucuucgugguguacauggucucccgcgacaacgugagcugcuccaucugccuguga

SEQ ID NO: 91393 - RNA, 1758 nt, Artificial Sequence; identical to SEQ ID NO: 91013
  derived and/or modified CDS sequence (opt1) from hemagglutinin__InfluenzaB__AGX20052

SEQ ID NO: 91394 - RNA, 1758 nt, Artificial Sequence; identical to SEQ ID NO: 91013
  derived and/or modified CDS sequence (opt1) from hemagglutinin__InfluenzaB__AGX20063

SEQ ID NO: 91395 - RNA, 1758 nt, Artificial Sequence
  derived and/or modified CDS sequence (opt1) from hemagglutinin__InfluenzaB__AGX20074
augaaggccaucaucgcccugcucaugguggucaccagcaacgcggaccgcaucugcaccggcaucacguccagcaacagcccccacguggugaagaccgccacccagggggaggucaacgugaccggcgugaucccgcugacgaccacccccaccaagagccacuucgccaaccugaaggggacggagacccggggcaagcucugccccaagugccugaacugcaccgaccuggacgucgcccucgggcgccccaagugcaccggcaagaucccguccgcccgggugagcauccugcacgaggugcgccccgucacguccggcugcuuccccaucaugcacgaccggaccaagauccgccagcugcccaaccuccugcggggguacgagcacauccgccugagcacccacaacgugaucaacgcggagaacgccccgggcgggcccuacaagaucggcaccuccgggagcugccccaacaucacgaacggcaacggcuucuucgccaccauggccugggcggugcccaagaacgacaagaacaagaccgccaccaacccgcucacgaucgagguccccuacaucugcaccgagggggaggaccagaucaccguguggggcuuccacuccgacaacgagacccagauggccaagcuguacggggacagcaagccccagaaguucacguccagcgccaacggcgugaccacccacuacgucucccagaucggcggguuccccaaccagaccgaggacggcgggcugccgcagagcggccggaucgugguggacuacaugguccagaaguccgggaagacgggcaccaucaccuaccagcgcggcauccuccugccccagaagguguggugcgccagcgggcgguccaaggugaucaagggcagccugccccucaucggggaggcggacugccugcacgagaaguacggcgggcugaacaagagcaagcccuacuacaccggcgagcacgccaaggccaucggcaacugcccgaucugggucaagacgccccucaagcuggccaacgggaccaaguaccgcccgcccgccaagcugcucaaggagcggggcuucuucggggcgaucgccggcuuccuggagggcgggugggagggcaugaucgccggguggcacggcuacaccucccacggggcccacggcguggccguggcggccgaccugaaguccacccaggaggccaucaacaagaucacgaagaaccucaacucccugagcgagcuggaggucaagaaccuccagcgccuguccggcgccauggacgagcugcacaacgagauccucgagcuggacgagaagguggacgaccugcgggccgacaccaucagcucccagaucgagcucgcgguccugcugagcaacgaggggaucaucaacuccgaggacgagcaccuccuggcccuggagcgcaagcucaagaagaugcugggccccagcgccguggagaucgggaacggcugcuucgagaccaagcacaagugcaaccagaccugccuggaccggaucgccgcggggaccuucgacgccggcgaguucucccuccccacguucgacagccugaacaucaccgccgccucccugaacgacgacggccucgacaaccacaccauccugcuguacuacagcaccgccgcguccagccuggccgugacgcucaugaucgccaucuucgucguguacauggugucccgcgacaacgucagcugcuccaucugccuguga

SEQ ID NO: 91396 - RNA, 1758 nt, Artificial Sequence
  derived and/or modified CDS sequence (opt1) from hemagglutinin__InfluenzaB__AGX20085
augaaggccaucaucgugcugcucauggucgugaccagcaacgccgaccgcaucugcaccggcaucacguccagcaacagcccccacguggucaagaccgcgacccagggggaggugaacgugaccggcgucaucccgcugacgaccacccccaccaagagccacuucgccaaccugaaggggacggagacccggggcaagcucugccccaagugccugaacugcaccgaccuggacguggcccucgggcgccccaagugcaccggcaagaucccguccgcccgggugagcauccugcacgagguccgccccgugacguccggcugcuuccccaucaugcacgaccggaccaagauccgccagcugcccaaccuccugcggggguacgagcacauccgccugagcacccacaacgugaucaacgccgagaacgcgccgggcgggcccuacaagaucggcaccuccgggagcugccccaacaucacgaacggcaacggcuucuucgccaccauggccugggccguccccaagaacgacaagaacaagaccgcgaccaacccgcucacgaucgaggugcccuacaucugcaccgagggggaggaccagaucaccaucuggggcuuccacuccgacaacgagacccagauggccaagcuguacggggacagcaagccccagaaguucacguccagcgccaacggcgugaccacccacuacgucucccagaucggcggguuccccaaccagaccgaggacggcgggcugccgcagagcggccggaucgugguggacuacaugguccagaaguccgggaagacgggcaccaucaccuaccagcgcggcauccuccugccccagaagguguggugcgccagcgggcgguccaaggugaucaagggcagccugccccucaucggggaggccgacugccugcacgagaaguacggcgggcugaacaagagcaagcccuacuacaccggcgagcacgcgaaggccaucggcaacugcccgaucugggucaagacgccccucaagcuggccaacgggaccaaguaccgcccgcccgccaagcugcucaaggagcggggcuucuucggggccaucgcgggcuuccuggagggcgggugggagggcaugaucgccggguggcacggcuacaccucccacggggcccacggcguggccguggccgcggaccugaaguccacccaggaggccaucaacaagaucacgaagaaccucaacucccugagcgagcuggaggucaagaaccuccagcgccuguccggcgccauggacgagcugcacaacgagauccucgagcuggacgagaagguggacgaccugcgggccgacaccaucagcucccagaucgagcucgccguccugcugagcaacgaggggaucaucaacuccgaggacgagcaccuccuggcgcuggagcgcaagcucaagaagaugcugggccccagcgccguggagaucgggaacggcugcuucgagaccaagcacaagugcaaccagaccugccuggaccggaucgccgccgggaccuucgacgcgggcgaguucucccuccccacguucgacagccugaacaucaccgccgccucccugaacgacgacggccucgacaaccacaccauccugcuguacuacagcaccgccgccuccagccuggcggugacgcucaugaucgccaucuucgucguguacauggugucccgcgacaacgucagcugcuccaucugccuguga

SEQ ID NO: 91397 - RNA, 1758 nt, Artificial Sequence
  derived and/or modified CDS sequence (opt1) from hemagglutinin__InfluenzaB__AGX20096
augaaggccaucaucgugcugcucauggucgugaccagcaacgccgaccgcaucugcaccggcgugacguccagcaacagcccccacgucgugaagaccgcgacccagggggaggugaacgucaccggcgugaucccgcugacgaccacccccaccaagagccacuucgccaaccugaaggggacggagacccggggcaagcucugccccaagugccugaacugcaccgaccuggacguggcccucgggcgccccaagugcaccggcaacaucccguccgcccgggucagcauccugcacgaggugcgccccgugacguccggcugcuuccccaucaugcacgaccggaccaagauccgccagcugcccaaccuccugcggggguacgagcacauccgccugagcacccacaacgucaucaacgccgagaacgcgccgggcgggcccuacaagaucggcaccuccgggagcugccccaacgugacgaacggcaacggcuucuucgccaccauggccugggccgugcccaagaacgacaacaacaagaccgcgaccaacucccucacgaucgaggucccguacaucugcaccgagggggaggaccagaucaccguguggggcuuccacagcgacaacgagacccagauggccaagcuguacggggacuccaagccccagaaguucacgagcuccgccaacggcgugaccacccacuacgucagccagaucggcggguuccccaaccagaccgaggacggcgggcugccccaguccggccggaucgugguggacuacaugguccagaaguccgggaagacgggcaccaucaccuaccagcgcggcauccuccugccgcagaagguguggugcgccuccgggcggagcaaggugaucaagggcagccugccccucaucggggaggccgacugccugcacgagaaguacggcgggcugaacaaguccaagcccuacuacaccggcgagcacgcgaaggccaucggcaacugccccaucugggucaagacgccgcucaagcuggccaacgggaccaaguaccgcccgcccgccaagcugcucaaggagcggggcuucuucggggccaucgcgggcuuccuggagggcgggugggagggcaugaucgccggguggcacggcuacaccagccacggggcccacggcguggccgucgccgcggaccugaaguccacccaggaggccaucaacaagaucacgaagaaccucaacagccuguccgagcuggaggugaagaaccuccagcgccugagcggcgccauggacgagcugcacaacgagauccucgagcuggacgagaagguggacgaccugcgggccgacaccaucuccagccagaucgagcucgccguccugcuguccaacgaggggaucaucaacagcgaggacgagcaccuccuggcgcuggagcgcaagcucaagaagaugcugggccccuccgccguggagaucgggaacggcugcuucgagaccaagcacaagugcaaccagaccugccuggaccggaucgccgccgggaccuucgacgcgggcgaguucagccuccccacguucgacucccugaacaucaccgccgccagccugaacgacgacggccucgacaaccacaccauccugcuguacuacuccaccgccgccagcucccuggcggugacgcucaugaucgccaucuucgucguguacauggugagccgcgacaacgucuccugcagcaucugccuguga

SEQ ID NO: 91398 - RNA, 1758 nt, Artificial Sequence; identical to SEQ ID NO: 90632
  derived and/or modified CDS sequence (opt1) from hemagglutinin__InfluenzaB__AGX20107

SEQ ID NO: 91399 - RNA, 1758 nt, Artificial Sequence; identical to SEQ ID NO: 90632
  derived and/or modified CDS sequence (opt1) from hemagglutinin__InfluenzaB__AGX20118

SEQ ID NO: 91400 - RNA, 1758 nt, Artificial Sequence; identical to SEQ ID NO: 90632
  derived and/or modified CDS sequence (opt1) from hemagglutinin__InfluenzaB__AGX20129

SEQ ID NO: 91401 - RNA, 1758 nt, Artificial Sequence; identical to SEQ ID NO: 90632
  derived and/or modified CDS sequence (opt1) from hemagglutinin__InfluenzaB__AGX20140

SEQ ID NO: 91402 - RNA, 1758 nt, Artificial Sequence; identical to SEQ ID NO: 90632
  derived and/or modified CDS sequence (opt1) from hemagglutinin__InfluenzaB__AGX20151

SEQ ID NO: 91403 - RNA, 1758 nt, Artificial Sequence; identical to SEQ ID NO: 90632
  derived and/or modified CDS sequence (opt1) from hemagglutinin__InfluenzaB__AGX20162

SEQ ID NO: 91404 - RNA, 1758 nt, Artificial Sequence; identical to SEQ ID NO: 90632
  derived and/or modified CDS sequence (opt1) from hemagglutinin__InfluenzaB__AGX20173

SEQ ID NO: 91405 - RNA, 1758 nt, Artificial Sequence; identical to SEQ ID NO: 90632
  derived and/or modified CDS sequence (opt1) from hemagglutinin__InfluenzaB__AGX20184

SEQ ID NO: 91406 - RNA, 1758 nt, Artificial Sequence; identical to SEQ ID NO: 90632
  derived and/or modified CDS sequence (opt1) from hemagglutinin__InfluenzaB__AGX20195

SEQ ID NO: 91407 - RNA, 1758 nt, Artificial Sequence; identical to SEQ ID NO: 90632
  derived and/or modified CDS sequence (opt1) from hemagglutinin__InfluenzaB__AGX20206

SEQ ID NO: 91408 - RNA, 1758 nt, Artificial Sequence; identical to SEQ ID NO: 90632
  derived and/or modified CDS sequence (opt1) from hemagglutinin__InfluenzaB__AGX20217

SEQ ID NO: 91409 - RNA, 1758 nt, Artificial Sequence; identical to SEQ ID NO: 90669
  derived and/or modified CDS sequence (opt1) from hemagglutinin__InfluenzaB__AGX20228

SEQ ID NO: 91410 - RNA, 1758 nt, Artificial Sequence
  derived and/or modified CDS sequence (opt1) from hemagglutinin__InfluenzaB__AGX20239
augaaggccaucaucgugcugcucauggucgugaccagcaacgccgaccgcaucugcaccggcaucacguccagcaacagcccccacguggucaagaccgcgacccagggggaggugaacgugaccggcgucaucccgcugacgaccacccccaccaagagccacuucgccaaccugaaggggacggagacccggggcaagcucugccccaagugccccaacugcaccgaccuggacguggcccuggggcgcccgaagugcaccggcaagauccccuccgcccgggugagcauccuccacgagguccgccccgugacguccggcugcuuccccaucaugcacgaccggaccaagauccgccagcugccgaaccugcuccggggguacgagcacauccgccugagcacccacaacgugaucaacgccgagaacgcgcccggcgggcccuacaagaucggcaccuccgggagcugccccaacgucacgaacggcaacggcuucuucgccaccauggccugggccgugccgaagaacgacaagaacaagaccgcgaccaacccccugacgaucgaggugcccuacaucugcaccgagggggaggaccagaucaucgucuggggcuuccacuccgacaacgagacccagauggccaagcucuacggggacagcaagccccagaaguucaccuccagcgccaacggcgugacgacccacuacgugucccagaucggcggguucccgaaccagaccgaggacggcgggcugccccagagcggccggaucgucguggacuacauggugcagaaguccgggaagaccggcacgaucaccuaccagcgcggcauccugcucccccagaaggucuggugcgccagcgggcgguccaaggugaucaagggcagccugccccugaucggggaggccgacugccuccacgagaaguacggcgggcugaacaagagcaagccguacuacaccggcgagcacgcgaaggccaucggcaacugccccaucugggugaagacgccccugaagcucgccaacgggaccaaguaccggcccccggccaagcugcugaaggagcgcggcuucuucggggccaucgcgggcuuccucgagggcgggugggagggcaugaucgccggguggcacggcuacaccucccacggggcccacggcgucgccguggccgcggaccugaaguccacccaggaggccaucaacaagaucaccaagaaccugaacucccucagcgagcuggaggucaagaaccugcagcgccucuccggcgccauggacgagcugcacaacgagauccuggagcucgacgagaagguggacgaccugcgggccgacacgaucagcucccagaucgagcuggccgugcuccugagcaacgaggggaucaucaacuccgaggacgagcaccuccuggcgcuggagcgcaagcugaagaagaugcucggccccagcgccgucgagaucgggaacggcugcuucgagaccaagcacaagugcaaccagaccugccuggaccggaucgccgccgggaccuucgacgcgggcgaguucucccugcccaccuucgacagccucaacaucacggccgccucccugaacgacgacggccuggacaaccacaccauccuccuguacuacagcaccgccgccuccagccuggcggugacccugaugaucgccaucuucguggucuacauggugucccgcgacaacgugagcugcuccaucugccucuga

SEQ ID NO: 91411 - RNA, 1758 nt, Artificial Sequence; identical to SEQ ID NO: 90632
  derived and/or modified CDS sequence (opt1) from hemagglutinin__InfluenzaB__AGX20250

SEQ ID NO: 91412 - RNA, 1758 nt, Artificial Sequence; identical to SEQ ID NO: 90632
  derived and/or modified CDS sequence (opt1) from hemagglutinin__InfluenzaB__AGX20261

SEQ ID NO: 91413 - RNA, 1758 nt, Artificial Sequence; identical to SEQ ID NO: 90632
  derived and/or modified CDS sequence (opt1) from hemagglutinin__InfluenzaB__AGX20272

SEQ ID NO: 91414 - RNA, 1758 nt, Artificial Sequence; identical to SEQ ID NO: 90632
  derived and/or modified CDS sequence (opt1) from hemagglutinin__InfluenzaB__AGX20283

SEQ ID NO: 91415 - RNA, 1758 nt, Artificial Sequence; identical to SEQ ID NO: 90632
  derived and/or modified CDS sequence (opt1) from hemagglutinin__InfluenzaB__AGX20294

SEQ ID NO: 91416 - RNA, 1758 nt, Artificial Sequence
  derived and/or modified CDS sequence (opt1) from hemagglutinin__InfluenzaB__AGX20305
augaaggccaucaucgugcugcucauggucgugaccagcaacgccgaccgcaucugcaccggcaucacguccagcaacagcccccacguggucaagaccgcgacccagggggaggugaacgugaccggcgucaucccgcugacgaccacccccaccaagagccacuucgccaaccugaaggggacggagacccggggcaagcucugccccaagugccccaacugcaccgaccuggacguggcccuggggcgcccgaagugcaccggcaagauccccuccgcccgggugagcauccuccacgagguccgccccgugacguccggcugcuuccccaucaugcacgaccggaccaagauccgccagcugccgaaccugcuccggggguacgagcacauccgccugagcacccacaacgugaucaacgccgagaacgcgcccggcgggcccuacaagaucggcaccuccgggagcugccccaacgucacgaacggcaacggcuucuucgccaccauggccugggccgugccgaagaacgacaagaacaagaccgcgaccaaccagcugacgaucgaggugcccuacaucugcaccgagggggaggaccagaucaccgucuggggcuuccacuccgacaacgagacccagauggccaagcucuacggggacagcaagccccagaaguucacguccagcgccaacggcgugaccacccacuacgugucccagaucggcggguuccccaaccagaccgaggacggcgggcugccgcagagcggccggaucgucguggacuacauggugcagaaguccgggaagacgggcaccaucaccuaccagcgcggcauccugcucccccagaaggucuggugcgccagcgggcgguccaaggugaucaagggcagccugccccugaucggggaggccgacugccuccacgagaaguacggcgggcugaacaagagcaagcccuacuacaccggcgagcacgcgaaggccaucggcaacugcccgaucugggugaagacgccccugaagcucgccaacgggaccaaguaccgcccgcccgccaagcugcugaaggagcggggcuucuucggggccaucgcgggcuuccucgagggcgggugggagggcaugaucgccggguggcacggcuacaccucccacggggcccacggcgucgccguggccgcggaccugaaguccacccaggaggccaucaacaagaucacgaagaaccugaacucccucagcgagcuggaggucaagaaccugcagcgccucuccggcgccauggacgagcugcacaacgagauccuggagcucgacgagaagguggacgaccugcgggccgacaccaucagcucccagaucgagcuggccgugcuccugagcaacgaggggaucaucaacuccgaggacgagcaccuccuggcgcuggagcgcaagcugaagaagaugcucggccccagcgccgucgagaucgggaacggcugcuucgagaccaagcacaagugcaaccagaccugccuggaccggaucgccgccgggaccuucgacgcgggcgaguucucccugcccacguucgacagccucaacaucaccgccgccucccugaacgacgacggccuggacaaccacaccauccuccuguacuacagcaccgccgccuccagccuggcggugacgcugaugaucgccaucuucguggucuacauggugucccgcgacaacgugagcugcuccaucugccucuga

SEQ ID NO: 91417 - RNA, 1758 nt, Artificial Sequence; identical to SEQ ID NO: 90632
  derived and/or modified CDS sequence (opt1) from hemagglutinin__InfluenzaB__AGX20316

SEQ ID NO: 91418 - RNA, 1758 nt, Artificial Sequence; identical to SEQ ID NO: 90632
  derived and/or modified CDS sequence (opt1) from hemagglutinin__InfluenzaB__AGX20327

SEQ ID NO: 91419 - RNA, 1758 nt, Artificial Sequence
  derived and/or modified CDS sequence (opt1) from hemagglutinin__InfluenzaB__AGX20338
augaaggccaucaucgugcugcucauggucgugaccagcaacgccgaccgcaucugcaccggcaucacguccagcaacagcccccacguggucaagaccgcgacccagggggaggugaacgugaccggcgucaucccgcugacgaccacccccaccaagagccacuucgccaaccugaaggggacggagacccggggcaagcucugccccaagugccccaacugcaccgaccuggacguggcccuggggcgcccgaagugcaccggcaagauccccuccgcccgggugagcauccuccacgagguccgccccgugacguccggcugcuuccccaucaugcacgaccggaccaagauccgccagcugccgaaccugcuccggggguacgagcacauccgccugagcacccacaacgugaucaacgccgagaacgcgcccggcgggcccuacaagaucggcaccuccgggagcugccccaacgucacgaacggcaacggcuucuucgccaccauggccugggccgugccgaagaacgacaagaacaagaccgcgaccaacccccugacgaucgaggugcccuacaucugcaccgagggggaggaccagaucaccgucuggggcuuccacuccgacaacgagacccagauggccaaccucuacggggacagcaagccccagaaguucacguccagcgccaacggcgugaccacccacuacgugucccagaucggcggguucccgaaccagaccgaggacggcgggcugccccagagcggccggaucgucguggacuacauggugcagaaguccgggaagacgggcaccaucaccuaccagcgcggcauccugcucccccagaaggucuggugcgccagcgggcgguccaaggugaucaagggcagccugccccugaucggggaggccgacugccuccacgagaaguacggcgggcugaacaagagcaagccguacuacaccggcgagcacgcgaaggccaucggcaacugccccaucugggugaagacgccccugaagcucgccaacgggaccaaguaccggcccccggccaagcugcugaaggagcgcggcuucuucggggccaucgcgggcuuccucgagggcgggugggagggcaugaucgccggguggcacggcuacaccucccacggggcccacggcgucgccguggccgcggaccugaaguccacccaggaggccaucaacaagaucacgaagaaccugaacucccucagcgagcuggaggucaagaaccugcagcgccucuccggcgccauggacgagcugcacaacgagauccuggagcucgacgagaagguggacgaccugcgggccgacaccaucagcucccagaucgagcuggccgugcuccugagcaacgaggggaucaucaacuccgaggacgagcaccuccuggcgcuggagcgcaagcugaagaagaugcucggccccagcgccgucgagaucgggaacggcugcuucgagaccaagcacaagugcaaccagaccugccuggaccggaucgccgccgggaccuucgacgcgggcgaguucucccugcccacguucgacagccucaacaucaccgccgccucccugaacgacgacggccuggacaaccacaccauccuccuguacuacagcaccgccgccuccagccuggcggugacgcugaugaucgccaucuucguggucuacauggugucccgcgacaacgugagcugcuccaucugccucuga

SEQ ID NO: 91420 - RNA, 1758 nt, Artificial Sequence; identical to SEQ ID NO: 90632
  derived and/or modified CDS sequence (opt1) from hemagglutinin__InfluenzaB__AGX20349

SEQ ID NO: 91421 - RNA, 1758 nt, Artificial Sequence; identical to SEQ ID NO: 90632
  derived and/or modified CDS sequence (opt1) from hemagglutinin__InfluenzaB__AGX20360

SEQ ID NO: 91422 - RNA, 1758 nt, Artificial Sequence; identical to SEQ ID NO: 90669
  derived and/or modified CDS sequence (opt1) from hemagglutinin__InfluenzaB__AGX20371

SEQ ID NO: 91423 - RNA, 1758 nt, Artificial Sequence
  derived and/or modified CDS sequence (opt1) from hemagglutinin__InfluenzaB__AGX20382
augaaggccaucaucgugcugcucauggucgugaccagcaacgccgaccgcaucugcaccggcaucacguccagcaacagcccccacguggucaagaccgcgacccagggggaggugaacgugaccggcgucaucccgcugacgaccacccccaccaagagccacuucgccaaccugaaggggacggagacccggggcaagcucugccccaagugccccaacugcaccgaccuggacguggcccuggggcgcccgaagugcaccggcaagauccccuccgcccgggugagcauccuccacgagguccgccccgugacguccggcugcuuccccaucaugcacgaccggaccaagauccgccagcugccgaaccugcuccggggguacgagcacauccgccugagcacccacaacgugaucaacgccgagaacgcgcccggcgggcccuacaagaucggcaccuccgggagcugccccaacgucacgaacggcaacggcuucuucgccaccauggccugggccgugccgaagaacgacaagaacaagaccgcgaccaacccccugacgaucgaggugcccuacaucugcaccgagggggaggaccagaucaccgucuggggcuuccacuccgacaacgagacccagauggccaagcucuacggggacagcaagccccagaaguucacguccagcgccaacggcgugaccacccacuacgugucccagaucggcggguucccgaaccagaccgaggacggcgggcugccccagagcggccggaucgucguggacuacauggugcagaaguccgggaagacgggcaccaucaccuaccagcgcggcauccugcucccccagaaggucuggugcgccagcgggcgguccaaggugaucaagggcagccugccccugaucggggaggccgacugccuccacgagaaguacggcgggcugaacaagagcaagccguacuacaccggcgagcacgcgaaggccaucggcaacugccccaucugggugaagacgccccugaagcucgccaacgggaccaaguaccggcccccggccaagcugcugaaggagcgcggcuucuucggggccaucgcgggcuuccucgagggcgggugggagggcaugaucgccggguggcacggcuacaccucccacggggcccacggcgucgccguggccgcggaccugaaguccacccaggaggccaucaacaagaucacgaagaaccugaacucccucagcgagcuggaggucaagaaccugcagcgccucuccggcgccaugaacgagcugcacaacgagauccuggagcucgacgagaagguggacgaccugcgggccgacaccaucagcucccagaucgagcuggccgugcuccugagcaacgaggggaucaucaacuccgaggacgagcaccuccuggcgcuggagcgcaagcugaagaagaugcucggccccagcgccgucgagaucgggaacggcugcuucgagaccaagcacaagugcaaccagaccugccuggaccggaucgccgccgggaccuucgacgcgggcgaguucucccugcccacguucgacagccucaacaucaccgccgccucccugaacgacgacggccuggacaaccacaccauccuccuguacuacagcaccgccgccuccagccuggcggugacgcugaugaucgccaucuucguggucuacauggugucccgcgacaacgugagcugcuccaucugccucuga

SEQ ID NO: 91424 - RNA, 1758 nt, Artificial Sequence; identical to SEQ ID NO: 90632
  derived and/or modified CDS sequence (opt1) from hemagglutinin__InfluenzaB__AGX20393

SEQ ID NO: 91425 - RNA, 1758 nt, Artificial Sequence; identical to SEQ ID NO: 90669
  derived and/or modified CDS sequence (opt1) from hemagglutinin__InfluenzaB__AGX20404

SEQ ID NO: 91426 - RNA, 1758 nt, Artificial Sequence; identical to SEQ ID NO: 90632
  derived and/or modified CDS sequence (opt1) from hemagglutinin__InfluenzaB__AGX20415

SEQ ID NO: 91427 - RNA, 1758 nt, Artificial Sequence; identical to SEQ ID NO: 90632
  derived and/or modified CDS sequence (opt1) from hemagglutinin__InfluenzaB__AGX20426

SEQ ID NO: 91428 - RNA, 1758 nt, Artificial Sequence; identical to SEQ ID NO: 90632
  derived and/or modified CDS sequence (opt1) from hemagglutinin__InfluenzaB__AGX20437

SEQ ID NO: 91429 - RNA, 1758 nt, Artificial Sequence; identical to SEQ ID NO: 90632
  derived and/or modified CDS sequence (opt1) from hemagglutinin__InfluenzaB__AGX20448

SEQ ID NO: 91430 - RNA, 1758 nt, Artificial Sequence; identical to SEQ ID NO: 90632
  derived and/or modified CDS sequence (opt1) from hemagglutinin__InfluenzaB__AGX20459

SEQ ID NO: 91431 - RNA, 1758 nt, Artificial Sequence; identical to SEQ ID NO: 90632
  derived and/or modified CDS sequence (opt1) from hemagglutinin__InfluenzaB__AGX20470

SEQ ID NO: 91432 - RNA, 1758 nt, Artificial Sequence; identical to SEQ ID NO: 90632
  derived and/or modified CDS sequence (opt1) from hemagglutinin__InfluenzaB__AGX20481

SEQ ID NO: 91433 - RNA, 1758 nt, Artificial Sequence; identical to SEQ ID NO: 90632
  derived and/or modified CDS sequence (opt1) from hemagglutinin__InfluenzaB__AGX20492

SEQ ID NO: 91434 - RNA, 1758 nt, Artificial Sequence; identical to SEQ ID NO: 90632
  derived and/or modified CDS sequence (opt1) from hemagglutinin__InfluenzaB__AGX20503

SEQ ID NO: 91435 - RNA, 1758 nt, Artificial Sequence; identical to SEQ ID NO: 90632
  derived and/or modified CDS sequence (opt1) from hemagglutinin__InfluenzaB__AGX20514

SEQ ID NO: 91436 - RNA, 1758 nt, Artificial Sequence
  derived and/or modified CDS sequence (opt1) from hemagglutinin__InfluenzaB__AGX20525
augaaggccaucaucgugcugcucauggucgugaccagcaacgccgaccgcaucugcaccggcaucacguccagcaacagcccccacguggucaagaccgcgacccagggggaggugaacgugaccggcgucaucccgcugacgaccacccccaccaagagccacuucuccaaccugaaggggacggagacccggggcaagcucugccccaagugccccaacugcaccgaccuggacguggcccuggggcgcccgaagugcaccggcaagauccccagcgcccggguguccauccuccacgagguccgccccgugacgagcggcugcuuccccaucaugcacgaccggaccaagauccgccagcugccgaaccugcuccggggguacgagcacauccgccuguccacccacaacgugaucaacgccgagaacgcccccggcgggcccuacaagaucggcaccagcggguccugccccaacgucacgaacggcaacggcuucuucgcgaccauggccugggccgugccgaagaacgacaagaacaagaccgccaccaacccccugacgaucgaggugcccuacaucugcaccgagggggaggaccagaucaccgucuggggcuuccacagcgacaacgagacccagauggcgaagcucuacggggacuccaagccccagaaguucacgagcuccgccaacggcgugaccacccacuacgugagccagaucggcggguucccgaaccagaccgaggacggcgggcugccccaguccggccggaucgucguggacuacauggugcagaaguccgggaagacgggcaccaucaccuaccagcgcggcauccugcucccccagaaggucuggugcgccuccgggcggagcaaggugaucaagggcagccugccccugaucggggaggccgacugccuccacgagaaguacggcgggcugaacaaguccaagccguacuacaccggcgagcacgccaaggcgaucggcaacugccccaucugggugaagacgccccugaagcucgccaacgggaccaaguaccggcccccggccaagcugcugaaggagcgcggcuucuucggggccaucgccggcuuccucgagggcgggugggagggcaugaucgcgggguggcacggcuacaccagccacggggcccacggcgucgccguggccgccgaccugaaguccacccaggaggcgaucaacaagaucacgaagaaccugaacagccucuccgagcuggaggucaagaaccugcagcgccucagcggcgccauggacgagcugcacaacgagauccuggagcucgacgagaagguggacgaccugcgggccgacaccaucuccagccagaucgagcuggccgugcuccuguccaacgaggggaucaucaacagcgaggacgagcaccuccuggcccuggagcgcaagcugaagaagaugcucggccccuccgcggucgagaucgggaacggcugcuucgagaccaagcacaagugcaaccagaccugccuggaccggaucgccgccgggaccuucgacgccggcgaguucagccugcccacguucgacucccucaacaucaccgcggccagccugaacgacgacggccuggacaaccacaccauccuccuguacuacuccaccgccgccagcucccuggccgugacgcugaugaucgcgaucuucguggucuacauggugagccgcgacaacguguccugcagcaucugccucuga

SEQ ID NO: 91437 - RNA, 1758 nt, Artificial Sequence; identical to SEQ ID NO: 90632
  derived and/or modified CDS sequence (opt1) from hemagglutinin__InfluenzaB__AGX20536

SEQ ID NO: 91438 - RNA, 1758 nt, Artificial Sequence
  derived and/or modified CDS sequence (opt1) from hemagglutinin__InfluenzaB__AGX20547
augaaggccaucaucgugcugcucauggucgugaccagcaacgccgaccgcaucugcaccggcaucacguccagcaacagcccccacguggucaagaccgcgacccagggggaggugaacgugaccggcgucaucccgcugacgaccacccccaccaagagccacuucgccaaccugaaggggacggagacccggggcaagcucugccccaagugccugaacugcaccgaccuggacguggcccucgggcgccccaagugcaccggcaagaucccguccgcccgggugagcauccugcacgagguccgccccgugacguccggcugcuuccccaucaugcacgaccggaccaagauccgccagcugcccaaccuccugcggggguacgagcacauccgccugagcacccacaacgugaucaacgccgagaacgcgccgggcgggcccuacaagaucggcaccuccgggagcugccccaacgucacgaacggcaacggcuucuucgccaccauggccugggccgugcccaagaacgacaagaacaagaccgcgaccaacccgcucacgaucgaggugcccuacaucugcaccgagggggaggaccagaucaccgucuggggcuuccacuccgacaacgagacccagauggccaagcuguacggggacagcaagccccagaaguucacguccagcgccaacggcgugaccacccaccacgugucccagaucggcggguuccccaaccagaccgaggacggcgggcugccgcagagcggccggaucgucguggacuacauggugcagaaguccgggaagacgggcaccaucaccuaccagcgcggcauccuccugccccagaaggucuggugcgccagcgggcgguccaaggugaucaagggcagccugccccucaucggggaggccgacugccugcacgagaaguacggcgggcugaacaagagcaagcccuacuacaccggcgagcacgcgaaggccaucggcaacugcccgaucugggugaagacgccccucaagcuggccaacgggaccaaguaccgcccgcccgccaagcugcucaaggagcggggcuucuucggggccaucgcgggcuuccuggagggcgggugggagggcaugaucgccggguggcacggcuacaccucccacggggcccacggcgucgccguggccgcggaccugaaguccacccaggaggccaucaacaagaucacgaagaaccucaacucccugagcgagcuggagaucaagaaccuccagcgccuguccggcgccauggacgagcugcacaacgagauccucgagcuggacgagaaggucgacgaccugcgggccgacaccaucagcucccagaucgagcucgccgugcugcugagcaacgaggggaucaucaacuccgaggacgagcaccuccuggcgcuggagcgcaagcucaagaagaugcugggccccagcgccguggagaucgggaacggcugcuucgagaccaagcacaagugcaaccagaccugccuggaccggaucgccgccgggaccuucgacgcgggcgaguucucccuccccacguucgacagccugaacaucaccgccgccucccugaacgacgacggccucgacaaccacaccauccugcuguacuacagcaccgccgccuccagccuggcggucacgcucaugaucgccaucuucgugguguacauggucucccgcgacaacgugagcugcuccaucugccuguga

SEQ ID NO: 91439 - RNA, 1758 nt, Artificial Sequence; identical to SEQ ID NO: 90686
  derived and/or modified CDS sequence (opt1) from hemagglutinin__InfluenzaB__AGX20558

SEQ ID NO: 91440 - RNA, 1758 nt, Artificial Sequence; identical to SEQ ID NO: 90632
  derived and/or modified CDS sequence (opt1) from hemagglutinin__InfluenzaB__AGX20569

SEQ ID NO: 91441 - RNA, 1758 nt, Artificial Sequence; identical to SEQ ID NO: 90669
  derived and/or modified CDS sequence (opt1) from hemagglutinin__InfluenzaB__AGX20580

SEQ ID NO: 91442 - RNA, 1758 nt, Artificial Sequence; identical to SEQ ID NO: 90632
  derived and/or modified CDS sequence (opt1) from hemagglutinin__InfluenzaB__AGX20591

SEQ ID NO: 91443 - RNA, 1758 nt, Artificial Sequence; identical to SEQ ID NO: 90632
  derived and/or modified CDS sequence (opt1) from hemagglutinin__InfluenzaB__AGX20602

SEQ ID NO: 91444 - RNA, 1758 nt, Artificial Sequence; identical to SEQ ID NO: 90632
  derived and/or modified CDS sequence (opt1) from hemagglutinin__InfluenzaB__AGX20613

SEQ ID NO: 91445 - RNA, 1758 nt, Artificial Sequence; identical to SEQ ID NO: 90632
  derived and/or modified CDS sequence (opt1) from hemagglutinin__InfluenzaB__AGX20624

SEQ ID NO: 91446 - RNA, 1758 nt, Artificial Sequence
  derived and/or modified CDS sequence (opt1) from hemagglutinin__InfluenzaB__AGX20635
augaaggccaucaucgugcugcucauggucgugaccagcaacgccgaccgcaucugcaccggcaucacguccagcaacagcccccacguggucaagaccgcgacccagggggaggugaacgugaccggcgucaucccgcugacgaccacccccaccaagucccacuucgccaaccugaaggggacggagacccggggcaagcucugccccaagugccugaacugcaccgaccuggacguggcccucgggcgccccaagugcaccggcaagaucccguccgcccgggugagcauccugcacgagguccgccccgugacguccggcugcuuccccaucaugcacgaccggaccaagauccgccagcugcccaaccuccugcggggguacgagcacauccgccugagcacccacaacgugaucaacgccgagaacgcgccgggcgggcccuacaagaucggcaccuccgggagcugccccaacgucacgaacggcaacggcuucuucgccaccauggccugggccgugcccaagaacgacaagaacaagaccgcgaccaacccgcucacgaucgaggugcccuacaucugcaccgagggggaggaccagaucaccgucuggggcuuccacuccgacaacgagacccugauggccaagcuguacggggacagcaagccccagaaguucacguccagcgccaacggcgugaccacccacuacgugucccagaucggcggguuccccaaccagaccgaggacggcgggcucccgcagagcggccggaucgucguggacuacauggugcagaaguccgggaagacgggcaccaucaccuaccagcgcggcauccugcugccccagaaggucuggugcgccagcgggcgguccaaggugaucaagggcagccucccccugaucggggaggccgacugccugcacgagaaguacggcgggcucaacaagagcaagcccuacuacaccggcgagcacgcgaaggccaucggcaacugcccgaucugggugaagacgccccugaagcuggccaacgggaccaaguaccgcccgcccgccaagcuccugaaggagcggggcuucuucggggccaucgcgggcuuccuggagggcgggugggagggcaugaucgccggguggcacggcuacaccucccacggggcccacggcgucgccguggccgcggaccucaagagcacccaggaggccaucaacaagaucacgaagaaccugaacucccugagcgagcucgaggucaagaaccugcagcgccuguccggcgccauggacgagcuccacaacgagauccuggagcuggacgagaagguggacgaccuccgggccgacaccaucagcucccagaucgagcuggccgugcugcucagcaacgaggggaucaucaacuccgaggacgagcaccuccuggcgcuggagcgcaagcugaagaagaugcugggccccagcgccgucgagaucgggaacggcugcuucgagaccaagcacaagugcaaccagaccugccucgaccggaucgccgccgggaccuucgacgcgggcgaguucucccugcccacguucgacagccugaacaucaccgccgccucccucaacgacgacggccuggacaaccacaccauccugcuguacuacagcaccgccgccuccagccucgcggugacgcugaugaucgccaucuucguggucuacauggugucccgcgacaacgugagcugcuccaucugccuguga

SEQ ID NO: 91447 - RNA, 1758 nt, Artificial Sequence; identical to SEQ ID NO: 90632
  derived and/or modified CDS sequence (opt1) from hemagglutinin__InfluenzaB__AGX20646

SEQ ID NO: 91448 - RNA, 1758 nt, Artificial Sequence
  derived and/or modified CDS sequence (opt1) from hemagglutinin__InfluenzaB__AGX20668
augaaggccaucaucgugcugcucauggucgugaccagcaacgccgaccgcaucugcaccggcaucacguccagcaacagcccccacguggucaagaccgcgacccagggggaggugaacgugaccggcgucaucccgcugacgaccacccccaccaagagccacuucgccaaccugaaggggacggagacccggggcaagcucugccccaagugccccaacugcaccgaccuggacguggcccuggggcgcccgaagugcaccggcaagauccccuccgcccgggugagcauccuccacgagguccgccccgugacguccggcugcuuccccaucaugcacgaccggaccaagauccgccagcugccgaaccugcuccggggguacgagcacauccgccugagcacccacaacgugaucaacgccgagaacgcgcccggcgggcccuacaagaucggcaccuccgggagcugccccaacgucacgaacggcaacggcuucuucgccaccauggccugggccgugccgaagaacgacaagaccaagaccgcgacgaacccccugaccaucgaggugcccuacaucugcaccgagggggaggaccagaucaccgucuggggcuuccacuccgacaacgagacgcagauggccaagcucuacggggacagcaagccccagaaguucaccuccagcgccaacggcgugaccacccacuacgugucccagaucggcggguucccgaaccagacggaggacggcgggcugccccagagcggccggaucgucguggacuacauggugcagaaguccgggaagaccggcaccaucaccuaccagcgcggcauccugcucccccagaaggucuggugcgccagcgggcgguccaaggugaucaagggcagccugccccugaucggggaggccgacugccuccacgagaaguacggcgggcugaacaagagcaagccguacuacacgggcgagcacgcgaaggccaucggcaacugccccaucugggugaagacgccccugaagcucgccaacgggaccaaguaccggcccccggccaagcugcugaaggagcgcggcuucuucggggccaucgcgggcuuccucgagggcgggugggagggcaugaucgccggguggcacggcuacaccucccacggggcccacggcgucgccguggccgcggaccugaaguccacccaggaggccaucaacaagaucaccaagaaccugaacucccucagcgagcuggaggucaagaaccugcagcgccucuccggcgccauggacgagcugcacaacgagauccuggagcucgacgagaagguggacgaccugcgggccgacaccaucagcucccagaucgagcuggccgugcuccugagcaacgaggggaucaucaacuccgaggacgagcaccuccuggcgcuggagcgcaagcugaagaagaugcucggccccagcgccgucgagaucgggaacggcugcuucgagaccaagcacaagugcaaccagaccugccuggaccggaucgccgccgggacguucgacgcgggcgaguucucccugcccaccuucgacagccucaacaucaccgccgccucccugaacgacgacggccuggacaaccacaccauccuccuguacuacagcacggccgccuccagccuggcggugacccugaugaucgccaucuucguggucuacauggugucccgcgacaacgugagcugcuccaucugccucuga

SEQ ID NO: 91449 - RNA, 1758 nt, Artificial Sequence; identical to SEQ ID NO: 90707
  derived and/or modified CDS sequence (opt1) from hemagglutinin__InfluenzaB__AGX20679

SEQ ID NO: 91450 - RNA, 1758 nt, Artificial Sequence; identical to SEQ ID NO: 90669
  derived and/or modified CDS sequence (opt1) from hemagglutinin__InfluenzaB__AGX20690

SEQ ID NO: 91451 - RNA, 1758 nt, Artificial Sequence; identical to SEQ ID NO: 90669
  derived and/or modified CDS sequence (opt1) from hemagglutinin__InfluenzaB__AGX20701

SEQ ID NO: 91452 - RNA, 1758 nt, Artificial Sequence; identical to SEQ ID NO: 91013
  derived and/or modified CDS sequence (opt1) from hemagglutinin__InfluenzaB__AGX20712

SEQ ID NO: 91453 - RNA, 1758 nt, Artificial Sequence; identical to SEQ ID NO: 90632
  derived and/or modified CDS sequence (opt1) from hemagglutinin__InfluenzaB__AGX20723

SEQ ID NO: 91454 - RNA, 1758 nt, Artificial Sequence
  derived and/or modified CDS sequence (opt1) from hemagglutinin__InfluenzaB__AGX20734
augaaggccaucaucgugcugcucauggucgugaccagcaacgccgaccgcaucugcaccggcaucacguccagcaacagcccccacguggucaagaccgcgacccagggggaggugaacgugaccggcgucaucccgcugacgaccacccccaccaagagccacuucgccaaccugaaggggacggagacccggggcaagcucugccccaagugccugaacugcaccgaccuggacguggcccucgggcgccccaagugcaccggcaagaucccguccgcccgggugagcauccugcacgagguccgccccgugacguccggcugcuuccccaucaugcacgaccggaccaagauccgccagcugcccaaccuccugcggggguacgagcacauccgccugagcaccaacaacgugaucaacgccgagaacgcgccgggcgggcccuacaagaucggcaccuccgggagcugccccaacgucacgaacggcaacggcuucuucgccaccauggccugggccgugcccaagaacgacaagaacaagaccgcgaccaacccgcucacgaucgaggugcccuacaucugcaccgagggggaggaccagaucaccgucuggggcuuccacuccgacaacgagacccagauggccaagcuguacggggacagcaagccccagaaguucacguccagcgccaacggcgugaccacccacuacgugucccagaucggcggguuccccaaccagaccgaggacggcgggcugccgcagagcggccggaucgucguggacuacauggugcagaaguccgggaagacgggcaccaucaccuaccagcgcggcauccuccugccccagaaggucuggugcgccagcgggcgguccaaggugaucaagggcagccugccccucaucggggaggccgacugccugcacgagaaguacggcgggcugaacaagagcaagcccuacuacaccggcgagcacgcgaaggccaucggcaacugcccgaucugggugaagacgccccucaagcuggccaacgggaccaaguaccgcccgcccgccaagcugcucaaggagcggggcuucuucggggccaucgcgggcuuccuggagggcgggugggagggcaugaucgccggguggcacggcuacaccucccacggggcccacggcgucgccguggccgcggaccugaaguccacccaggaggccaucaacaagaucacgaagaaccucaacucccugagcgagcuggaggucaagaaccuccagcgccuguccggcgccauggacgagcugcacaacgagauccucgagcuggacgagaagguggacgaccugcgggccgacaccaucagcucccagaucgagcucgccgugcugcugagcaacgaggggaucaucaacuccgaggacgagcaccuccuggcgcuggagcgcaagcucaagaagaugcugggccccagcgccgucgagaucgggaacggcugcuucgagaccaagcacaagugcaaccagaccugccuggaccggaucgccgccgggaccuucgacgcgggcgaguucucccuccccacguucgacagccugaacaucaccgccgccucccugaacgacgacggccucgacaaccacaccauccugcuguacuacagcaccgccgccuccagccuggcggugacgcucaugaucgccaucuucguggucuacauggugucccgcgacaacgugagcugcuccaucugccuguga

SEQ ID NO: 91455 - RNA, 1758 nt, Artificial Sequence
  derived and/or modified CDS sequence (opt1) from hemagglutinin__InfluenzaB__AGX20745
augaaggccaucaucgugcugcucauggucgugaccagcaacgccgaccgcaucugcaccggcaucacguccagcaacagcccccacguggucaagaccgcgacccagggggaggugaacgugaccggcgucaucccgcugacgaccacccccaccaagagccacuucgccaaccugaaggggacggagacccggggcaagcucugccccaagugccccaacugcaccgaccuggacguggcccuggggcgcccgaagugcaccggcaagauccccuccgcccgggugagcauccuccacgagguccgccccgugacguccggcugcuuccccaucaugcacgaccggaccaagauccgccagcugccgaaccugcuccggggguacgagcacauccgccugagcacccacaacgugaucaacgccgagaacgcgcccggcgggcccuacaagaucggcaccuccgggagcugccccaacgucacgaacggcaacggcuucuucgccaccauggccugggccgugccgaagaacgacaagaacaagaccgcgaccaacccccugacgaucgaggugcccuacaucugcaccgagggggaggaccagaucaccaucuggggcuuccacuccgacaacgagacccagauggccaagcucuacggggacagcaagccccagaaguucacguccagcgccaacggcgucaccacccacuacgugucccagaucggcggguucccgaaccagaccgaggacggcgggcugccccagagcggccggaucguggucgacuacauggugcagaaguccgggaagacgggcaccaucaccuaccagcgcggcauccugcucccccagaagguguggugcgccagcgggcgguccaaggucaucaagggcagccugccccugaucggggaggccgacugccuccacgagaaguacggcgggcugaacaagagcaagccguacuacaccggcgagcacgcgaaggccaucggcaacugccccaucugggugaagacgccccugaagcucgccaacgggaccaaguaccggcccccggccaagcugcugaaggagcgcggcuucuucggggccaucgcgggcuuccucgagggcgggugggagggcaugaucgccggguggcacggcuacaccucccacggggcccacggcguggccgucgccgcggaccugaaguccacccaggaggccaucaacaagaucacgaagaaccugaacucccucagcgagcuggaggugaagaaccugcagcgccucuccggcgccauggacgagcugcacaacgagauccuggagcucgacgagaaggucgacgaccugcgggccgacaccaucagcucccagaucgagcuggccgugcuccugagcaacgaggggaucaucaacuccgaggacgagcaccuccuggcgcuggagcgcaagcugaagaagaugcucggccccagcgccguggagaucgggaacggcugcuucgagaccaagcacaagugcaaccagaccugccuggaccggaucgccgccgggaccuucgacgcgggcgaguucucccugcccacguucgacagccucaacaucaccgccgccucccugaacgacgacggccuggacaaccacaccauccuccuguacuacagcaccgccgccuccagccuggcggucacgcugaugaucgccaucuucgugguguacauggucucccgcgacaacgugagcugcuccaucugccucuga

SEQ ID NO: 91456 - RNA, 1758 nt, Artificial Sequence; identical to SEQ ID NO: 91013
  derived and/or modified CDS sequence (opt1) from hemagglutinin__InfluenzaB__AGX20756

SEQ ID NO: 91457 - RNA, 1758 nt, Artificial Sequence; identical to SEQ ID NO: 90632
  derived and/or modified CDS sequence (opt1) from hemagglutinin__InfluenzaB__AGX20767

SEQ ID NO: 91458 - RNA, 1758 nt, Artificial Sequence; identical to SEQ ID NO: 90669
  derived and/or modified CDS sequence (opt1) from hemagglutinin__InfluenzaB__AGX20778

SEQ ID NO: 91459 - RNA, 1758 nt, Artificial Sequence
  derived and/or modified CDS sequence (opt1) from hemagglutinin__InfluenzaB__AGX20789
augaaggccaucaucgugcugcucauggucgugaccagcaacgccgaccgcaucugcaccggcaucacguccagcaacagcccccacguggucaagaccgcgacccagggggaggugaacgugaccggcgucaucccgcugacgaccacccccaccaagagccacuucgccaaccugaaggggacggagacccggggcaagcucugccccaagugccccaacugcaccgaccuggacguggcccuggggcgcccgaagugcaccggcaagauccccuccgcccgggugagcauccuccacgagguccgccccgugacguccggcugcuuccccaucaugcacgaccggaccaagauccgccagcugccgaaccugcuccggggguacgagcacauccgccugagcacccacaacgugaucaacgccgagaacgcgcccggcgggcccuacaagaucggcaccuccgggagcugccccaacgucacgaacggcaacggcuucuucgccaccauggccugggccgugccgaagaacgacaagaacaagaccgcgaccaacccccugacgaucgaggugcccuacaucugcaccgagggggaggaccagaucaccgucuggggcuuccacuccgacaacgagacccagauggccaagcucuacggggacagcaagccccagaaguucacguccagcgccaacggcgugaccacccacuacgugucccagaucggcggguucccgaaccagaccgaggacggcgggcugccccagagcggccggaucgucguggacuacauggugcagaaguccgggaagacgggcaccaucaccuaccagcgcggcauccugcucccccagaaggucuggugcgccagcgggcgguccaaggugaucaagggcagccugccccugaucggggaggccgacugccuccacgagaaguacggcgggcugaacaagagcaagccguacuacaccggcgagcacgcgaaggccaucggcaacugccccaucugggugaagacgccccugaagcucgccaacgggaccaaguaccggcccccggccaagcugcugaaggagcgcggcuucuucggggccaucgcgggcuuccucgagggcgggugggagggcaugaucgccggguggcacggcuacaccucccacggggcccacggcgucgccguggccgcggaccugaaguccacccaggaggccaucaacaagaucacgaagaaccugaacucccucagcgagcuggaggucaagaaccugcagcgccucuccggcgccauggacgagcugcacggggagauccuggagcucgacgagaagguggacgaccugcgggccgacaccaucagcucccagaucgagcuggccgugcuccugagcaacgagggcaucaucaacuccgaggacgagcaccuccuggcgcuggagcgcaagcugaagaagaugcucgggcccagcgccgucgagaucggcaacgggugcuucgagaccaagcacaagugcaaccagaccugccuggaccggaucgccgccggcaccuucgacgcgggcgaguucucccugcccacguucgacagccucaacaucaccgccgccucccugaacgacgacgggcuggacaaccacaccauccuccuguacuacagcaccgccgccuccagccuggcggugacgcugaugaucgccaucuucguggucuacauggugucccgcgacaacgugagcugcuccaucugccucuga

SEQ ID NO: 91460 - RNA, 1758 nt, Artificial Sequence
  derived and/or modified CDS sequence (opt1) from hemagglutinin__InfluenzaB__AGX20800
augaaggccaucaucgugcugcucauggucgugaccagcaacgccgaccgcaucugcaccggcaucacguccagcaacagcccccacguggucaagaccgcgacccagggggaggugaacgugaccggcgucaucccgcugacgaccacccccaccaagagccacuucgccaaccugaaggggacggagacccggggcaagcucugccccaagugccccaacugcaccgaccuggacguggcccuggggcgcccgaagugcaccggcaagauccccuccgcccgggugagcauccuccacgagguccgccccgugacguccggcugcuuccccaucaugcacgaccggaccaagauccgccagcugccgaaccugcuccggggguacgagcacauccgccugagcacccacaacgugaucaacgccgagaacgcgcccggcgggcccuacaagaucggcaccuccgggagcugccccaacgucacgaacggcaacggcuucuucgccaccauggccugggccgugccgaagaacgacaagaacaagaccgcgaccaacccccugacgaucgaggugcccuacaucugcaccgagggggaggaccagaucaccgucuggggcuuccacuccgacaacgagacccagauggccaagcucuacggggacagcaagccccagaaguucacguccagcgccaacggcgugaccacccacuacgugucccagaucggcggguucccgaaccagaccgaggacggcgggcugccccagagcggccggaucgucguggacuacauggugcagaaguccgggaagacgggcaccaucaccuaccagcgcggcauccugcucccccagaaggucuggugcgccagcgggcgguccaaggugaucaagggcagccugccccugaucggggaggccgacugccuccacgagaaguacggcgggcugaacaagagcaagccguacuacaccggcgagcacgcgaaggccaucggcaacugccccaucugggugaagacgccccugaagcucgccaacgggaccaaguaccggcccccggccaagcugcugaaggagcgcggcuucuucggggccaucgcgggcuuccucgagggcgggugggagggcaugaucgccggguggcacggcuacaccucccacggggcccacggcgucgccguggccgcggaccugaaguccacccaggaggccaucaacaagaucacgaagaaccugaacucccucagcgagcuggaggucaagaaccugcagcgccucuccggcgccauggacgagcugcacaacgagauccuggagcucgacgagaagguggacgaccugcgggccgacaccaucagcucccagaucgagcuggccgugcuccugagcaacgaggggaucaucaacuccgaggacgagcaccuccuggcgcuggagcgcaagcugaagaagaugcucggccccagcgccgucgagaucgggaacggcugcuucgagaccaagcacaagugcaaccagaccugccuggaccggaucgccgccgggaccuucgacgcgggcgaguucucccugcccacguucgacagccucaacaucaccgccgccucccugaacgacgacgagcuggacaaccacaccauccuccuguacuacagcaccgccgccuccagccuggcggugacgcugaugaucgccaucuucguggucuacauggugucccgcgacaacgugagcugcuccaucugccucuga

SEQ ID NO: 91461 - RNA, 1758 nt, Artificial Sequence; identical to SEQ ID NO: 90707
  derived and/or modified CDS sequence (opt1) from hemagglutinin__InfluenzaB__AGX20811

SEQ ID NO: 91462 - RNA, 1758 nt, Artificial Sequence; identical to SEQ ID NO: 90707
  derived and/or modified CDS sequence (opt1) from hemagglutinin__InfluenzaB__AGX20822

SEQ ID NO: 91463 - RNA, 1758 nt, Artificial Sequence; identical to SEQ ID NO: 90707
  derived and/or modified CDS sequence (opt1) from hemagglutinin__InfluenzaB__AGX20833

SEQ ID NO: 91464 - RNA, 1758 nt, Artificial Sequence
  derived and/or modified CDS sequence (opt1) from hemagglutinin__InfluenzaB__AGX20844
augaaggccaucaucgugcugcucauggucgugaccagcaacgccgaccgcaucugcaccggcaucacguccagcaacagcccccacaucgugaagaccgcgacccagggggaggucaacgugaccggcgugaucccgcugacgaccacccccaccaagagccacuucgccaaccugaaggggacggagacccggggcaagcucugccccaagugccugaacugcaccgaccuggacgucgcccucgggcgccccaagugcaugggcaagaucccguccgcccgggugagcauccugcacgaggugcgccccgucaccuccggcugcuuccccaucaugcacgaccggacgaagauccgccagcugcccaaccuccugcggggguacgagcacauccgccugagcacccacaacgugaucaacgccgagaacgcgccgggcgggcccuacaagaucggcaccuccgggagcugccccaacaucaccaacggcaacggcuucuucgccacgauggccugggccgugcccaagaacgacaagaacaagaccgcgaccaacccgcucaccaucgagguccccuacaucugcacggagggggaggaccagaucaccguguggggcuuccacuccgacaacgagacccagauggccaagcuguacggggacagcaagccccagaaguucaccuccagcgccaacggcgugacgacccacuacgucucccagaucggcggguuccccaaccagaccgaggacggcgggcugccgcagagcggccggaucgugguggacuacaugguccagaaguccgggaagaccggcacgaucaccuaccagcgcggcauccuccugccccagaagguguggugcgccagcgggcgguccaaggugaucaagggcagccugccccucaucggggaggccgacugccugcacgagaaguacggcgggcugaacaagagcaagcccuacuacaccggcgagcacgcgaaggccaucggcaacugcccgaucugggucaagacgccccucaagcuggccaacgggaccaaguaccgcccgcccgccaagcugcucaaggagcggggcuucuucggggccaucgcgggcuuccuggagggcgggugggagggcaugaucgccggguggcacggcuacaccucccacggggcccacggcguggccguggccgcggaccugaaguccacccaggaggccaucaacaagaucaccaagaaccucaacucccugagcgagcuggaggucaagaaccuccagcgccuguccggcgccauggacgagcugcacaacgagauccucgagcuggacgagaagguggacgaccugcgggccgacacgaucagcucccagaucgagcucgccguccugcugagcaacgaggggaucaucaacuccgaggacgagcaccuccuggcgcuggagcgcaagcucaagaagaugcugggccccagcgccguggagaucgggaacggcugcuucgagaccaagcacaagugcaaccagaccugccuggaccggaucgccgccgggaccuucgacgcgggcgaguucucccuccccaccuucgacagccugaacaucacggccgccucccugaacgacgacggccucgacaaccacaccauccugcuguacuacagcaccgccgccuccagccuggcggugacccucaugaucgccaucuucgucguguacauggugucccgcgacaacgucagcugcuccaucugccuguga

SEQ ID NO: 91465 - RNA, 1758 nt, Artificial Sequence; identical to SEQ ID NO: 90632
  derived and/or modified CDS sequence (opt1) from hemagglutinin__InfluenzaB__AGX20855

SEQ ID NO: 91466 - RNA, 1758 nt, Artificial Sequence; identical to SEQ ID NO: 90707
  derived and/or modified CDS sequence (opt1) from hemagglutinin__InfluenzaB__AGX20866

SEQ ID NO: 91467 - RNA, 1758 nt, Artificial Sequence; identical to SEQ ID NO: 90707
  derived and/or modified CDS sequence (opt1) from hemagglutinin__InfluenzaB__AGX20877

SEQ ID NO: 91468 - RNA, 1758 nt, Artificial Sequence
  derived and/or modified CDS sequence (opt1) from hemagglutinin__InfluenzaB__AGX20888
augaaggccaucaucgugcugcucauggucgugaccagcaacgccgaccgcaucugcaccggcaucacguccagcaacagcccccacguggucaagaccgcgacccagggggaggugaacgugaccggcgucaucccgcugacgaccacccccaccaagagccacuucgccaaccugaaggggacggagacccggggcaagcucugccccaagugccccaacugcaccgaccuggacguggcccuggggcgcccgaagugcaccggcaagauccccuccgcccgggugagcauccuccacgagguccgccccgugacguccggcugcuuccccaucaugcacgaccggaccaagauccgccagcugccgaaccugcuccggggguacgagcacauccgccugagcacccacaacgugaucaacgccgagaacgcgcccggcgggcccuacaagaucggcaccuccgggagcugccccaacgucacgaacggcaacggcuucuucgccaccauggccugggccgugccgaagaacgacaagaacaagaccgcgaccaacccccugacgaucgaggugcccuacaucugcaccgagggggaggaccagaucaccgucuggggcuuccacuccgacagcgagacccagauggccaagcucuacggggacuccaagccccagaaguucacgagcuccgccaacggcgugaccacccacuacgugagccagaucggcggguucccgaaccagaccgaggacggcgggcugccccaguccggccggaucgucguggacuacauggugcagaaguccgggaagacgggcaccaucaccuaccagcgcggcauccugcucccccagaaggucuggugcgccuccgggcggagcaaggugaucaagggcagccugccccugaucggggaggccgacugccuccacgagaaguacggcgggcugaacaaguccaagccguacuacaccggcgagcacgcgaaggccaucggcaacugccccaucugggugaagacgccccugaagcucgccaacgggaccaaguaccggcccccggccaagcugcugaaggagcgcggcuucuucggggccaucgcgggcuuccucgagggcgggugggagggcaugaucgccggguggcacggcuacaccagccacggggcccacggcgucgccguggccgcggaccugaaguccacccaggaggccaucaacaagaucacgaagaaccugaacagccucuccgagcuggaggucaagaaccugcagcgccucagcggcgccauggacgagcugcacaacgagauccuggagcucgacgagaagguggacgaccugcgggccgacaccaucuccagccagaucgagcuggccgugcuccuguccaacgaggggaucaucaacagcgaggacgagcaccuccuggcgcuggagcgcaagcugaagaagaugcucggccccuccgccgucgagaucgggaacggcugcuucgagaccaagcacaagugcaaccagaccugccuggaccggaucgccgccgggaccuucgacgcgggcgaguucagccugcccacguucgacucccucaacaucaccgccgccagccugaacgacgacggccuggacaaccacaccauccuccuguacuacuccaccgccgccagcucccuggcggugacgcugaugaucgccaucuucguggucuacauggugagccgcgacaacguguccugcagcaucugccucuga

SEQ ID NO: 91469 - RNA, 1758 nt, Artificial Sequence; identical to SEQ ID NO: 90707
  derived and/or modified CDS sequence (opt1) from hemagglutinin__InfluenzaB__AGX20899

SEQ ID NO: 91470 - RNA, 1758 nt, Artificial Sequence; identical to SEQ ID NO: 90707
  derived and/or modified CDS sequence (opt1) from hemagglutinin__InfluenzaB__AGX20910

SEQ ID NO: 91471 - RNA, 1758 nt, Artificial Sequence; identical to SEQ ID NO: 90632
  derived and/or modified CDS sequence (opt1) from hemagglutinin__InfluenzaB__AGX20921

SEQ ID NO: 91472 - RNA, 1758 nt, Artificial Sequence
  derived and/or modified CDS sequence (opt1) from hemagglutinin__InfluenzaB__AGX20932
augaaggccaucaucgugcugcucauggucgugaccagcaacgccgaccgcaucugcaccggcaucacguccagcaacagcccccacguggucaagaccgcgacccagggggaggugaacgugaccggcgucaucccgcugacgaccacccccaccaagagccacuucgccaaccugaaggggacggagacccggggcaagcucugccccaagugccccaacugcaccgaccuggacguggcccuggggcgcccgaagugcaccggcaagauccccuccgcccgggugagcauccuccacgagguccgccccgugacguccggcugcuuccccaucaugcacgaccggaccaagauccgccagcugccgaaccugcuccggggguacgagcacauccgccugagcacccacaacgugaucaacgccgagaacgcgcccggcgggcccuacaagaucggcaccuccgggagcugccccaacgucacgaacggcaacggcuucuucgccaccauggccugggccgugccgaagaacgacaagaacaagaccgcgaccaacccccugacgaucgaggugcccuacaucugcaccgagggggaggaccagaucaccgucuggggcuuccacuccgacaacgagacccagauggccaagcucuacggggaccccaagccgcagaaguucacgagcuccgccaacggcgugaccacccacuacgugagccagaucggcggguuccccaaccagaccgaggacggcgggcugccccaguccggccggaucgucguggacuacauggugcagaaguccgggaagacgggcaccaucaccuaccagcgcggcauccugcucccccagaaggucuggugcgccuccgggcggagcaaggugaucaagggcucccugccgcugaucggggaggccgacugccuccacgagaaguacggcgggcugaacaagagcaagcccuacuacaccggcgagcacgcgaaggccaucggcaacugccccaucugggugaagacgccccugaagcucgccaacgggaccaaguaccgcccgcccgccaagcugcugaaggagcggggcuucuucggggccaucgcgggcuuccucgagggcgggugggagggcaugaucgccggguggcacggcuacaccagccacggggcccacggcgucgccguggccgcggaccugaaguccacccaggaggccaucaacaagaucacgaagaaccugaacagccucuccgagcuggaggucaagaaccugcagcgccucagcggcgccauggacgagcugcacaacgagauccuggagcucgacgagaagguggacgaccugcgggccgacaccaucuccagccagaucgagcuggccgugcuccuguccaacgaggggaucaucaacagcgaggacgagcaccuccuggcgcuggagcgcaagcugaagaagaugcucggccccuccgccgucgagaucgggaacggcugcuucgagaccaagcacaagugcaaccagaccugccuggaccggaucgccgccgggaccuucgacgcgggcgaguucagccugcccacguucgacucccucaacaucaccgccgccagccugaacgacgacggccuggacaaccacaccauccuccuguacuacuccaccgccgccagcucccuggcggugacgcugaugaucgccaucuucguggucuacauggugagccgcgacaacguguccugcagcaucugccucuga

SEQ ID NO: 91473 - RNA, 1758 nt, Artificial Sequence; identical to SEQ ID NO: 90632
  derived and/or modified CDS sequence (opt1) from hemagglutinin__InfluenzaB__AGX20943

SEQ ID NO: 91474 - RNA, 1758 nt, Artificial Sequence; identical to SEQ ID NO: 90632
  derived and/or modified CDS sequence (opt1) from hemagglutinin__InfluenzaB__AGX20954

SEQ ID NO: 91475 - RNA, 1758 nt, Artificial Sequence; identical to SEQ ID NO: 90632
  derived and/or modified CDS sequence (opt1) from hemagglutinin__InfluenzaB__AGX20965

SEQ ID NO: 91476 - RNA, 1758 nt, Artificial Sequence
  derived and/or modified CDS sequence (opt1) from hemagglutinin__InfluenzaB__AGX20976
augaaggccaucaucgugcugcucauggucgugaccagcaacgccgaccgcaucugcaccggcaucacguccagcaacagcccccacguggucaagaccgcgacccagggggaggugaacgugaccggcgucaucccgcugacgaccacccccaccaagagccacuucgccaaccugaaggggacggagacccggggcaagcucugccccaagugccugaacugcaccgaccuggacguggcccucgggcgccccaagugcaccggcaagaucccguccgcccgggugagcauccugcacgagguccgccccgugacguccggcugcuuccccaucaugcacgaccggaccaagauccgccagcugcccaaccuccugcggggguacgagcacauccgccugagcacccacaacgugaucaacgccgagaacgcgccgggcgggcccuacaagaucggcaccuccgggagcugccccaacgucacgaacggcaacggcuucuucgccaccauggccugggccgugcccaagaacgacaagaacaagaccgcgaccaacccgcucacgaucgaggugcccuacaucugcaccgagggggaggaccagaucaccgucuggggcuuccacuccgacaacgagacccagauggccaagcuguacggggacagcaagccccagaaguucacguccagcgccaacggcgugaccacccacuacgugucccagaucggcggguuccccaaccagaccgaggacggcgggcugccgcagagcggccggaucgucguggacuacauggugcagaaguccgggaagacgggcaccaucaccuaccagcgcggcauccuccugccccagaaggucuggugcgccagcgggcgguccaaggugaucaagggcagccugccccucaucggggaggccgacugccugcacgagaaguacggcgggcugaacaagagcaagcccuacuacaccggcgagcacgcgaaggccaucggcaacugcccgaucugggugaagacgccccucaagcuggccaacgggaccaaguaccgcccgcccgccaagcugcucaaggagcggggcuucuucggggccaucgcgggcuuccuggagggcgggugggagggcaugaucgccggguggcacggcuacaccucccacggggcccacggcgucgccguggccgcggaccugaaguccacccaggaggccaucaacaagaucacgaagaaccucaacucccugagcgagcuggaggucaagaaccuccagcgccuguccggcgccauggacgagcugcacggggagauccucgagcuggacgagaagguggacgaccugcgggccgacaccaucagcucccagaucgagcucgccgugcugcugagcaacgagggcaucaucaacuccgaggacgagcaccuccuggcgcuggagcgcaagcucaagaagaugcuggggcccagcgccgucgagaucggcaacgggugcuucgagaccaagcacaagugcaaccagaccugccuggaccggaucgccgccggcaccuucgacgcgggcgaguucucccuccccacguucgacagccugaacaucaccgccgccucccugaacgacgacgggcucgacaaccacaccauccugcuguacuacagcaccgccgccuccagccuggcggugacgcucaugaucgccaucuucguggucuacauggugucccgcgacaacgugagcugcuccaucugccuguga

SEQ ID NO: 91477 - RNA, 1758 nt, Artificial Sequence; identical to SEQ ID NO: 90632
  derived and/or modified CDS sequence (opt1) from hemagglutinin__InfluenzaB__AGX20987

SEQ ID NO: 91478 - RNA, 1758 nt, Artificial Sequence; identical to SEQ ID NO: 90707
  derived and/or modified CDS sequence (opt1) from hemagglutinin__InfluenzaB__AGX20998

SEQ ID NO: 91479 - RNA, 1758 nt, Artificial Sequence
  derived and/or modified CDS sequence (opt1) from hemagglutinin__InfluenzaB__AGX21009
augaaggccaucaucgugcugcucauggucgugaccagcaacgccgaccgcaucugcaccggcaucacguccagcaacagcccccacguggucaagaccgcgacccagggggaggugaacgugaccggcgucaucccgcugacgaccacccccaccaagagccacuucgccaaccugaaggggacggagacccggggcaagcucugccccaagugccccaacugcaccgaccuggacguggcccuggggcgcccgaagugcaccggcaagauccccuccgcccgggugagcauccuccacgagguccgccccgugacguccggcugcuuccccaucaugcacgaccggaccaagauccgccagcugccgaaccugcuccggggguacgagcacauccgccugagcacccacaacgugaucaacgccgagaacgcgcccggcgggcccuacaagaucggcaccuccgggagcugccccaacgucacgaacggcaacggcuucuucgccaccauggccugggccgugccgaagaacgacaagaacaagaccgcgaccaacccccugacgaucgaggugcccuacaucugcaccgagggggaggaccagaucaccgucuggggcuuccacuccgacaacgagacccagauggccaagcucuacggggacagcaagccccagaaguucacguccagcgccaacggcgugaccacccacuacgugucccagaucggcggguucccgaaccagaccgaggacggcgggcugccccagagcggccggaucgucguggacuacauggugcagaaguccgggaagacgggcaccaucaccuaccagcgcggcauccugcucccccagaaggucuggugcgccagcgggcgguccaaggugaucaagggcagccugccccugaucggggaggccgacugccuccacgagaaguacggcgggcugaacaagagcaagccguacuacaccggcgagcacgcgaaggccaucggcaacugccccaucugggugaagacgccccugaagcucgccaacgggaccaaguaccggcccccggccaagcugcugaaggagcgcggcuucuucggggccaucgcgggcuuccucgagggcgggugggagggcaugaucgccggguggcacggcuacaccucccacggggcccacggcgucgccguggccgcggaccugaaguccacccaggaggccaucaacaagaucacgaagaaccugaacucccucagcgagcuggaggucaagaaccugcagcgccucuccggcgccauggacgagcugcacaacgagauccuggagcucgacgagaagguggacgaccugcgggccgacaccaucagcucccagaucgagcuggccgugcuccugagcaacgaggggaucaucaacuccgaggacgagcaccuccuggcgcuggagcgcaagcugaagaagaugcucggccccagcgccgucgagaucgggaacggcugcuucgagaccaagcacaagugcaaccagaccugccuggaccggaucgccgccgggaccuucgacgcgggcgaguucucccugcccacguucgacagccucaacaucaccgccgccucccugaacgacgacggccuggacaaccacaccauccuccuguacuacagcaccgccgccuccagccuggcggugacgcugaugaucgccaucuucguggucuacaugaucucccgcgacaacgugagcugcuccaucugccucuga

SEQ ID NO: 91480 - RNA, 1758 nt, Artificial Sequence
  derived and/or modified CDS sequence (opt1) from hemagglutinin__InfluenzaB__AGX21020
augaaggccaucaucgugcugcucauggucgugaccagcaacgccgaccgcaucugcaccggcaucacguccagcaacagcccccacguggucaagaccgcgacccagggggaggugaacgugaccggcgucaucccgcugacgaccacccccaccaagagccacuucgccaaccugaaggggacggagacccggggcaagcucugccccaagugccugaacugcaccgaccuggacguggcccucgggcgccccaagugcaccggcaagaucccguccgcccgggugagcauccugcacgagguccgccccgugacguccggcugcuuccccaucaugcacgaccggaccaagauccgccagcugcccaaccuccugcggggguacgagcacauccgccugagcacccacaacgugaucaacgccgagaacgcgccgggcgggcccuacaagaucggcaccuccgggagcugccccaacgucacgaacggcaacggcuucuucgccaccauggccugggccgugcccaagaacgacaagaacaagaccgcgaccaacccgcucacgaucgaggugcccuacaucugcaccgagggggaggaccagaucaccgucuggggcuuccacuccgacaacgagacccagauggccaagcuguacggggacagcgagccccagaaguucacguccagcgccaacggcgugaccacccacuacgugucccagaucggcggguuccccaaccagaccgaggacggcgggcugccgcagagcggccggaucgucguggacuacauggugcagaaguccgggaagacgggcaccaucaccuaccagcgcggcauccuccugccccagaaggucuggugcgccagcgggcgguccaaggugaucaagggcagccugccccucaucggggaggccgacugccugcacgagaaguacggcgggcugaacaagagcaagcccuacuacaccggcgagcacgcgaaggccaucggcaacugcccgaucugggugaagacgccccucaagcuggccaacgggaccaaguaccgcccgcccgccaagcugcucaaggagcggggcuucuucggggccaucgcgggcuuccuggagggcgggugggagggcaugaucgccggguggcacggcuacaccucccacggggcccacggcgucgccguggccgcggaccugaaguccacccaggaggccaucaacaagaucacgaagaaccucaacucccugagcgagcuggaggucaagaaccuccagcgccuguccggcgccauggacgagcugcacaacgagauccucgagcuggacgagaagguggacgaccugcgggccgacaccaucagcucccagaucgagcucgccgugcugcugagcaacgaggggaucaucaacuccgaggacgagcaccuccuggcgcuggagcgcaagcucaagaagaugcugggccccagcgccgucgagaucgggaacggcugcuucgagaccaagcacaagugcaaccagaccugccuggaccggaucgccgccgggaccuucgacgcgggcgaguucucccuccccacguucgacagccugaacaucaccgccgccucccugaacgacgacggccucgacaaccacaccauccugcuguacuacagcaccgccgccuccagccuggcggugacgcucaugaucgccaucuucguggucuacauggugucccgcgacaacgugagcugcuccaucugccuguga

SEQ ID NO: 91481 - RNA, 1758 nt, Artificial Sequence; identical to SEQ ID NO: 90707
  derived and/or modified CDS sequence (opt1) from hemagglutinin__InfluenzaB__AGX21031

SEQ ID NO: 91482 - RNA, 1758 nt, Artificial Sequence
  derived and/or modified CDS sequence (opt1) from hemagglutinin__InfluenzaB__AGX21042
augaaggccaucaucgugcugcucauggucgugaccagcaacgccgaccgcaucugcaccggcaucacguccagcaacagcccccacguggucaagaccgcgacccagggggaggugaacgugaccggcgucaucccgcugacgaccacccccaccaagagccacuucgccaaccugaaggggacggagacccggggcaagcucugccccaagugccugaacugcaccgaccuggacguggcccucgggcgccccaagugcaccggcaagaucccguccgcccgggugagcauccugcacgagguccgccccgugacguccggcugcuuccccaucaugcacgaccggaccaagauccgccagcugcccaaccuccugcggggguacgagcacauccgccugagcacccacaacgugaucaacaccgagaacgccccgggcgggcccuacaagaucggcacguccgggagcugccccaacgucaccaacggcaacggcuucuucgcgaccauggccugggccgugcccaagaacgacaagaacaagaccgccacgaacccgcucaccaucgaggugcccuacaucugcaccgagggggaggaccagaucaccgucuggggcuuccacuccgacaacgagacgcagauggcgaagcuguacggggacagcaagccccagaaguucaccuccagcgccaacggcgugaccacccacuacgugucccagaucggcggguuccccaaccagacggaggacggcgggcugccgcagagcggccggaucgucguggacuacauggugcagaaguccgggaagaccggcaccaucaccuaccagcgcggcauccuccugccccagaaggucuggugcgccagcgggcgguccaaggugaucaagggcagccugccccucaucggggaggccgacugccugcacgagaaguacggcgggcugaacaagagcaagcccuacuacacgggcgagcacgccaaggcgaucggcaacugcccgaucugggugaagacgccccucaagcuggccaacgggaccaaguaccgcccgcccgccaagcugcucaaggagcggggcuucuucggggccaucgccggcuuccuggagggcgggugggagggcaugaucgcgggguggcacggcuacaccucccacggggcccacggcgucgccguggccgccgaccugaaguccacccaggaggcgaucaacaagaucaccaagaaccucaacucccugagcgagcuggaggucaagaaccuccagcgccuguccggcgccauggacgagcugcacaacgagauccucgagcuggacgagaagguggacgaccugcgggccgacaccaucagcucccagaucgagcucgccgugcugcugagcaacgaggggaucaucaacuccgaggacgagcaccuccuggcccuggagcgcaagcucaagaagaugcugggccccagcgcggucgagaucgggaacggcugcuucgagaccaagcacaagugcaaccagaccugccuggaccggaucgccgccgggacguucgacgccggcgaguucucccuccccaccuucgacagccugaacaucaccgcggccucccugaacgacgacggccucgacaaccacaccauccugcuguacuacagcacggccgccuccagccuggccgugacccucaugaucgcgaucuucguggucuacauggugucccgcgacaacgugagcugcuccaucugccuguga

SEQ ID NO: 91483 - RNA, 1758 nt, Artificial Sequence; identical to SEQ ID NO: 90669
  derived and/or modified CDS sequence (opt1) from hemagglutinin__InfluenzaB__AGX21053

SEQ ID NO: 91484 - RNA, 1758 nt, Artificial Sequence; identical to SEQ ID NO: 90632
  derived and/or modified CDS sequence (opt1) from hemagglutinin__InfluenzaB__AGX21064

SEQ ID NO: 91485 - RNA, 1758 nt, Artificial Sequence; identical to SEQ ID NO: 90669
  derived and/or modified CDS sequence (opt1) from hemagglutinin__InfluenzaB__AGX21075

SEQ ID NO: 91486 - RNA, 1758 nt, Artificial Sequence; identical to SEQ ID NO: 90669
  derived and/or modified CDS sequence (opt1) from hemagglutinin__InfluenzaB__AGX21084

SEQ ID NO: 91487 - RNA, 1758 nt, Artificial Sequence; identical to SEQ ID NO: 90669
  derived and/or modified CDS sequence (opt1) from hemagglutinin__InfluenzaB__AGX21095

SEQ ID NO: 91488 - RNA, 1758 nt, Artificial Sequence
  derived and/or modified CDS sequence (opt1) from hemagglutinin__InfluenzaB__AGX21106
augaaggccaucaucgugcugcucauggucgugaccagcaacgccgaccgcaucugcaccggcaucacguccagcaacagcccccacguggucaagaccgcgacccagggggaggugaacgugaccggcgucaucccgcugacgaccacccccaccaagagccacuucgccaaccugaaggggacggagacccggggcaagcucugccccaagugccccaacugcaccgaccuggacguggcccuggggcgcccgaagugcaccggcaagauccccuccgcccgggugagcauccuccacgagguccgccccgugacguccggcugcuuccccaucaugcacgaccggaccaagauccgccagcugccgaaccugcuccggggguacgagcacauccgccugagcacccacaacgugaucaacgccgagaacgcgcccggcgggcccuacaagaucggcaccuccgggagcugccccaacgucacgaacggcaacggcuucuucgccaccauggccugggccgugccgaagaacgacaagaacaagaccgcgaccaacccccugacgaucgaggugcccuacaucugcaccgagggggaggaccagaucaccgucuggggcuuccacuccgacaacgaggcccagauggccaagcucuacggggacagcaagccccagaaguucaccuccagcgccaacggcgugacgacccacuacgugucccagaucggcggguucccgaaccagaccgaggacggcgggcugccccagagcggccggaucgucguggacuacauggugcagaaguccgggaagaccggcacgaucaccuaccagcgcggcauccugcucccccagaaggucuggugcgccagcgggcgguccaaggugaucaagggcagccugccccugaucggggaggcggacugccuccacgagaaguacggcgggcugaacaagagcaagccguacuacaccggcgagcacgccaaggccaucggcaacugccccaucugggugaagacgccccugaagcucgccaacgggaccaaguaccggcccccggccaagcugcugaaggagcgcggcuucuucggggcgaucgccggcuuccucgagggcgggugggagggcaugaucgccggguggcacggcuacaccucccacggggcccacggcgucgccguggcggccgaccugaaguccacccaggaggccaucaacaagaucaccaagaaccugaacucccucagcgagcuggaggucaagaaccugcagcgccucuccggcgccauggacgagcugcacaacgagauccuggagcucgacgagaagguggacgaccugcgggccgacacgaucagcucccagaucgagcuggcggugcuccugagcaacgaggggaucaucaacuccgaggacgagcaccuccuggcccuggagcgcaagcugaagaagaugcucggccccagcgccgucgagaucgggaacggcugcuucgagaccaagcacaagugcaaccagaccugccuggaccggaucgccgcggggaccuucgacgccggcgaguucucccugcccaccuucgacagccucaacaucacggccgccucccugaacgacgacggccuggacaaccacaccauccuccuguacuacagcaccgccgcguccagccuggccgugacccugaugaucgccaucuucguggucuacauggugucccgcgacaacgugagcugcuccaucugccucuga

SEQ ID NO: 91489 - RNA, 1758 nt, Artificial Sequence; identical to SEQ ID NO: 90632
  derived and/or modified CDS sequence (opt1) from hemagglutinin__InfluenzaB__AGX21117

SEQ ID NO: 91490 - RNA, 1758 nt, Artificial Sequence; identical to SEQ ID NO: 91482
  derived and/or modified CDS sequence (opt1) from hemagglutinin__InfluenzaB__AGX21128

SEQ ID NO: 91491 - RNA, 1758 nt, Artificial Sequence
  derived and/or modified CDS sequence (opt1) from hemagglutinin__InfluenzaB__AGX21139
augaaggccaucaucgugcugcucauggucgugaccagcaacgccgaccgcaucugcaccggcaucacguccagcaacagcccccacguggucaagaccgcgacccagggggaggugaacgugaccggcgucaucccgcugacgaccacccccaccaagagccacuucgccaaccugaaggggacggagacccggggcaagcucugccccaagugccccaacugcaccgaccuggacguggcccuggggcgcccgaagugcaccggcaagauccccuccgcccgggugagcauccuccacgagguccgccccgugacguccggcugcuuccccaucaugcacgaccggaccaagauccgccagcugccgaaccugcuccggggguacgagcacauccgccugagcacccacaacgugaucaacgccgagaacgcgcccggcgggcccuacaagaucggcaccuccgggagcugccccaacgucacgaacggcaacggcuucuucgccaccauggccugggccgugccgaagaacgacaagaacaagaccgcgaccaacccccugacgaucgaggugcccuacaucugcaccgagggggaggaccagaucaccgucuggggcuuccacuccgacaacgagacccagauggccaagcucuacggggacagcaagccccagaaguucacguccagcgccaacggcgugaccacccacuacgugucccagaucggcgacuucccgaaccagaccgaggacgggggccugccccagagcgggcggaucgucguggacuacauggugcagaaguccggcaagacggggaccaucaccuaccagcgcggcauccugcucccccagaaggucuggugcgccagcggccgguccaaggugaucaaggggagccugccccugaucggcgaggccgacugccuccacgagaaguacgggggccugaacaagagcaagccguacuacaccggggagcacgcgaaggccaucggcaacugccccaucugggugaagacgccccugaagcucgccaacggcaccaaguaccggcccccggccaagcugcugaaggagcgcggguucuucggcgccaucgcgggguuccucgagggcgggugggagggcaugaucgccggcuggcacggguacaccucccacggcgcccacggggucgccguggccgcggaccugaaguccacccaggaggccaucaacaagaucacgaagaaccugaacucccucagcgagcuggaggucaagaaccugcagcgccucuccggcgccauggacgagcugcacaacgagauccuggagcucgacgagaagguggacgaccugcgggccgacaccaucagcucccagaucgagcuggccgugcuccugagcaacgagggcaucaucaacuccgaggacgagcaccuccuggcgcuggagcgcaagcugaagaagaugcucgggcccagcgccgucgagaucggcaacgggugcuucgagaccaagcacaagugcaaccagaccugccuggaccggaucgccgccggcaccuucgacgcgggggaguucucccugcccacguucgacagccucaacaucaccgccgccucccugaacgacgacggccuggacaaccacaccauccuccuguacuacagcaccgccgccuccagccuggcggugacgcugaugaucgccaucuucguggucuacauggugucccgcgacaacgugagcugcuccaucugccucuga

SEQ ID NO: 91492 - RNA, 1758 nt, Artificial Sequence; identical to SEQ ID NO: 90707
  derived and/or modified CDS sequence (opt1) from hemagglutinin__InfluenzaB__AGX21150

SEQ ID NO: 91493 - RNA, 1758 nt, Artificial Sequence; identical to SEQ ID NO: 90632
  derived and/or modified CDS sequence (opt1) from hemagglutinin__InfluenzaB__AGX21161

SEQ ID NO: 91494 - RNA, 1758 nt, Artificial Sequence; identical to SEQ ID NO: 90707
  derived and/or modified CDS sequence (opt1) from hemagglutinin__InfluenzaB__AGX21172

SEQ ID NO: 91495 - RNA, 1758 nt, Artificial Sequence; identical to SEQ ID NO: 90669
  derived and/or modified CDS sequence (opt1) from hemagglutinin__InfluenzaB__AGX21183

SEQ ID NO: 91496 - RNA, 1758 nt, Artificial Sequence; identical to SEQ ID NO: 90707
  derived and/or modified CDS sequence (opt1) from hemagglutinin__InfluenzaB__AGX21194

SEQ ID NO: 91497 - RNA, 1758 nt, Artificial Sequence
  derived and/or modified CDS sequence (opt1) from hemagglutinin__InfluenzaB__AGX21205
augaaggccaucaucgugcugcucauggucgugaccagcaacgccgaccgcaucugcaccggcaucacguccagcaacagcccccacaucgugaagaccgcgacccagggggaggucaacgugaccggcgugaucccgcugacgaccacccccaccaagagccacuucgccaaccugaaggggacggagacccggggcaagcucugccccaagugccugaacugcaccgaccuggacgucgcccucgggcgccccaagugcaccggcaagaucccguccgcccgggugagcauccugcacgaggugcgccccgucacguccggcugcuuccccaucaugcacgaccggaccaagauccgccagcugcccaaccuccugcggggguacgagcacauccgccugagcacccacaacgugaucaacgccaagaacgcgccgggcgggcccuacaagaucggcaccuccgggagcugccccaacaucacgaacggcaacggcuucuucgccaccauggccugggccgugcccaagaacgacaagaacaagaccgcgaccaacccgcucacgaucgagguccccuacaucugcaccgagggggaggaccagaucaccguguggggcuuccacuccgacaacgagacccagauggccaagcuguacggggacagcaagccccagaaguucacguccagcgccaacggcgugaccacccacuacgucucccagaucggcggguuccccaaccagaccgaggacggcgggcugccgcagagcggccggaucgugguggacuacaugguccagaaguccgggaagacgggcaccaucaccuaccagcgcggcauccuccugccccagaagguguggugcgccagcgggcgguccaaggugaucaagggcagccugccccucaucggggaggccgacugccugcacgagaaguacggcgggcugaacaagagcaagcccuacuacaccggcgagcacgcgaaggccaucggcaacugcccgaucugggucaagacgccccucaagcuggccaacgggaccaaguaccgcccgcccgccaagcugcucaaggagcggggcuucuucggggccaucgcgggcuuccuggagggcgggugggagggcaugaucgccggguggcacggcuacaccucccacggggcccacggcguggccguggccgcggaccugaaguccacccaggaggccaucaacaagaucacgaagaaccucaacucccugagcgagcuggaggucaagaaccuccagcgccuguccggcgccauggacgagcugcacaacgagauccucgagcuggacgagaagguggacgaccugcgggccgacaccaucagcucccagaucgagcucgccguccugcugagcaacgaggggaucaucaacuccgaggacgagcaccuccuggcgcuggagcgcaagcucaagaagaugcugggccccagcgccguggagaucgggaacggcugcuucgagaccaagcacaagugcaaccagaccugccuggaccggaucgccgccgggaccuucgacgcgggcgaguucucccuccccacguucgacagccugaacaucaccgccgccucccugaacgacgacggccucgacaaccacaccauccugcuguacuacagcaccgccgccuccagccuggcggugacgcucaugaucgccaucuucgucguguacauggugucccgcgacaacgucagcugcuccaucugccuguga

SEQ ID NO: 91498 - RNA, 1758 nt, Artificial Sequence; identical to SEQ ID NO: 90669
  derived and/or modified CDS sequence (opt1) from hemagglutinin__InfluenzaB__AGX21216

SEQ ID NO: 91499 - RNA, 1758 nt, Artificial Sequence; identical to SEQ ID NO: 90632
  derived and/or modified CDS sequence (opt1) from hemagglutinin__InfluenzaB__AGX21227

SEQ ID NO: 91500 - RNA, 1758 nt, Artificial Sequence
  derived and/or modified CDS sequence (opt1) from hemagglutinin__InfluenzaB__AGX21238
augaaggccaucaucgugcugcucauggucgugaccagcaacgccgaccgcaucugcaccggcaucacguccagcaacagcccccacguggucaagaccgcgacccagggggaggugaacgugaccggcgucaucccgcugacgaccacccccaccaagucccacuucgccaaccugaaggggacggagacccggggcaagcucugccccaagugccugaacugcaccgaccuggacguggcccucgggcgccccaagugcaccggcaagaucccguccgcccgggugagcauccugcacgagguccgccccgugacguccggcugcuuccccaucaugcacgaccggaccaagauccgccagcugcccaaccuccugcggggguacgagcacauccgccugagcacccacaacgugaucaacgccgagaacgcgccgggcgggcccuacaagaucggcaccuccgggagcugccccaacgucacgaacggcaacggcuucuucgccaccauggccugggccgugcccaagaacgacaagaacaagaccgcgaccaacccgcucacgaucgaggugcccuacaucugcaccgagggggaggaccagaucaccgucuggggcuuccacuccgacaacgagacccagauggccaagcuguacggggacagcaagccccagaaguucacguccagcgccaacggcgugaccacccacuacgugucccagaucggcggguuccccaaccagaccgaggacggcgggcugccgcagagcggccggaucgucguggacuacauggugcagaaguccgggaagacgggcaccaucaccuaccagcgcggcauccuccugccccagaaggucuggugcgccaacgggcggagcaaggugaucaagggcucccugccccucaucggggaggccgacugccugcacgagaaguacggcgggcugaacaagagcaagcccuacuacaccggcgagcacgcgaaggccaucggcaacugcccgaucugggugaagacgccccucaagcuggccaacgggaccaaguaccgcccgcccgccaagcugcucaaggagcggggcuucuucggggccaucgcgggcuuccuggagggcgggugggagggcaugaucgccggguggcacggcuacaccagccacggggcccacggcgucgccguggccgcggaccugaaguccacccaggaggccaucaacaagaucacgaagaaccucaacagccuguccgagcuggaggucaagaaccuccagcgccugagcggcgccauggacgagcugcacaacgagauccucgagcuggacgagaagguggacgaccugcgggccgacaccaucuccagccagaucgagcucgccgugcugcuguccaacgaggggaucaucaacagcgaggacgagcaccuccuggcgcuggagcgcaagcucaagaagaugcugggccccuccgccgucgagaucgggaacggcugcuucgagaccaagcacaagugcaaccagaccugccuggaccggaucgccgccgggaccuucgacgcgggcgaguucagccuccccacguucgacucccugaacaucaccgccgccagccugaacgacgacggccucgacaaccacaccauccugcuguacuacuccaccgccgccagcucccuggcggugacgcucaugaucgccaucuucguggucuacaugaucagccgcgacaacguguccugcagcaucugccuguga

SEQ ID NO: 91501 - RNA, 1758 nt, Artificial Sequence; identical to SEQ ID NO: 90707
  derived and/or modified CDS sequence (opt1) from hemagglutinin__InfluenzaB__AGX21249

SEQ ID NO: 91502 - RNA, 1758 nt, Artificial Sequence
  derived and/or modified CDS sequence (opt1) from hemagglutinin__InfluenzaB__AGX21260
augaaggccaucaucgugcugcucauggucgugaccagcaacgccgaccgcaucugcaccggcaucacguccagcaacagcccccacguggucaagaccgcgacccagggggaggugaacgugaccggcgucaucccgcugacgaccacccccaccaagagccacuucgccaaccugaaggggacggagacccggggcaagcucugccccaagugccugaacugcaccgaccuggacguggcccucgggcgccccaagugcaccggcaagaucccguccgcccgggugagcauccugcacgagguccgccccgugacguccggcugcuuccccaucaugcacgaccggaccaagauccgccagcugcccaaccuccugcggggguacgagcacauccgccugagcacccacaacgugaucaacgccgagaacgcgccgggcgggcccuacaagaucggcaccuccgggagcugccccaacgucacgaacggcaacggcuucuucgccaccauggccugggccgugcccaagaacgacaagaacaagaccgcgaccaacccgcucacgaucgaggugcccuacaucugcaccgagggggaggaccagaucaccgucuggggcuuccacuccgacaacgagacccagauggccaagcuguacggggacagcaagccccagaaguucacguccagcgccaacggcgugaccacccacuacgugucccagaucggcggguuccccaaccagaccgaggacggcgggcugccgcagagcggccggaucgucguggacuacauggugcagaaguccgggaagacgggcaccaucaccuaccagcgcggcauccuccugccccagcgggucuggugcgccagcgggcgcuccaaggugaucaagggcagccugccccucaucggggaggccgacugccugcacgagaaguacggcgggcugaacaagagcaagcccuacuacaccggcgagcacgcgaaggccaucggcaacugcccgaucugggugaagacgccccucaagcuggccaacgggaccaaguaccggccgcccgccaagcugcucaaggagcgcggcuucuucggggccaucgcgggcuuccuggagggcgggugggagggcaugaucgccggguggcacggcuacaccucccacggggcccacggcgucgccguggccgcggaccugaaguccacccaggaggccaucaacaagaucacgaagaaccucaacucccugagcgagcuggaggucaagaaccuccagcggcuguccggcgccauggacgagcugcacaacgagauccucgagcuggacgagaagguggacgaccugcgcgccgacaccaucagcucccagaucgagcucgccgugcugcugagcaacgaggggaucaucaacuccgaggacgagcaccuccuggcgcuggagcggaagcucaagaagaugcugggccccagcgccgucgagaucgggaacggcugcuucgagaccaagcacaagugcaaccagaccugccuggaccgcaucgccgccgggaccuucgacgcgggcgaguucucccuccccacguucgacagccugaacaucaccgccgccucccugaacgacgacggccucgacaaccacaccauccugcuguacuacagcaccgccgccuccagccuggcggugacgcucaugaucgccaucuucguggucuacauggugucccgggacaacgugagcugcuccaucugccuguga

SEQ ID NO: 91503 - RNA, 1758 nt, Artificial Sequence; identical to SEQ ID NO: 90632
  derived and/or modified CDS sequence (opt1) from hemagglutinin__InfluenzaB__AGX21271

SEQ ID NO: 91504 - RNA, 1758 nt, Artificial Sequence
  derived and/or modified CDS sequence (opt1) from hemagglutinin__InfluenzaB__AGX21282
augaaggccaucaucgugcugcucauggucgugaccagcaacgccgaccgcaucugcaccggcaucacguccagcaacagcccccacaucgugaagaccgcgacccagggggaggucaacgugaccggcgugaucccgcugacgaccagccccaccaagucccacuucgccaaccugaaggggaccgagacgcggggcaagcucugccccaagugccugaacugcaccgaccuggacgucgcccucgggcgccccaagugcaccggcaagaucccgagcgcccggguguccauccugcacgaggugcgccccgucaccagcggcugcuuccccaucaugcacgaccggacgaagauccgccagcugcccaaccuccugcggggguacgagcacauccgccuguccacccacaacgugaucaacgccaagaacgcgccgggcgggcccuacaagaucggcaccagcggguccugccccaacaucaccaacggcaacggcuucuucgccacgauggccugggccgugcccaagaacgacaagaacaagaccgcgaccaacccgcucaccaucgagguccccuacaucugcacggagggggaggaccagaucaccguguggggcuuccacagcgacaacgagacccagauggccaagcuguacggggacuccaagccccagaaguucaccagcuccgccaacggcgugacgacccacuacgucagccagaucggcggguuccccaaccagaccgaggacggcgggcugccgcaguccggccggaucgugguggacuacaugguccagaaguccgggaagaccggcacgaucaccuaccagcgcggcauccuccugccccagaagguguggugcgccuccgggcggagcaaggugaucaagggcagccugccccucaucggggaggccgacugccugcacgagaaguacggcgggcugaacaaguccaagcccuacuacaccggcgagcacgcgaaggccaucggcaacugcccgaucugggucaagacgccccucaagcuggccaacgggaccaaguaccgcccgcccgccaagcugcucaaggagcggggcuucuucggggccaucgcgggcuuccuggagggcgggugggagggcaugaucgccggguggcacggcuacaccagccacggggcccacggcguggccguggccgcggaccugaaguccacccaggaggccaucaacaagaucaccaagaaccucaacagccuguccgagcuggaggucaagaaccuccagcgccugagcggcgccauggacgagcugcacaacgagauccucgagcuggacgagaagguggacgaccugcgggccgacacgaucuccagccagaucgagcucgccguccugcuguccaacgaggggaucaucaacagcgaggacgagcaccuccuggcgcuggagcgcaagcucaagaagaugcugggccccuccgccguggagaucgggaacggcugcuucgagaccaagcacaagugcaaccagaccugccuggaccggaucgccgccgggaccuucgacgcgggcgaguucagccuccccaccuucgacucccugaacaucacggccgccagccugaacgacgacggccucgacaaccacaccauccugcuguacuacuccaccgccgccagcucccuggcggugacccucaugaucgccaucuucgucguguacauggugagccgcgacaacgucuccugcagcaucugccuguga

SEQ ID NO: 91505 - RNA, 1758 nt, Artificial Sequence; identical to SEQ ID NO: 90669
  derived and/or modified CDS sequence (opt1) from hemagglutinin__InfluenzaB__AGX21293

SEQ ID NO: 91506 - RNA, 1758 nt, Artificial Sequence; identical to SEQ ID NO: 90707
  derived and/or modified CDS sequence (opt1) from hemagglutinin__InfluenzaB__AGX21304

SEQ ID NO: 91507 - RNA, 1758 nt, Artificial Sequence; identical to SEQ ID NO: 90669
  derived and/or modified CDS sequence (opt1) from hemagglutinin__InfluenzaB__AGX21315

SEQ ID NO: 91508 - RNA, 1758 nt, Artificial Sequence; identical to SEQ ID NO: 90632
  derived and/or modified CDS sequence (opt1) from hemagglutinin__InfluenzaB__AGX21326

SEQ ID NO: 91509 - RNA, 1758 nt, Artificial Sequence
  derived and/or modified CDS sequence (opt1) from hemagglutinin__InfluenzaB__AGX21337
augaaggccaucaucgugcugcucauggucgugaccagcaacgccgaccgcaucugcaccggcaucacguccagcaacagcccccacguggucaagaccgcgacccagggggaggugaacgugaccggcgucaucccgcugacgaccacccccaccaagagccacuucgccaaccugaaggggacggagacccggggcaagcucugccccaagugccccaacugcaccgaccuggacguggcccuggggcgcccgaagugcaccggcaagauccccuccgcccgggugagcauccuccacgagguccgccccgugacguccggcugcuuccccaucaugcacgaccggaccaagauccgccagcugccgaaccugcuccggggguacgagcacauccgccugagcacccacaacgugaucaacgccgagaacgcgcccggcgggcccuacaagaucggcaccuccgggagcugccccaacgucacgaacggcaacggcuucuucgccaccauggccugggccgugccgaagaacgacaagaacaagaccgcgaccaacccccugacgaucgaggugcccuacaucugcaccgagggggaggaccagaucaccgucuggggcuuccacuccgacaaggagacccagauggccaagcucuacggggacagcaagccccagaaguucacguccagcgccaacggcgugaccacccacuacgugucccagaucggcggguucccgaaccagaccgaggacggcgggcugccccagagcggccggaucgucguggacuacauggugcagaaguccgggaagacgggcaccaucaccuaccagcgcggcauccugcucccccagaaggucuggugcgccagcgggcgguccaaggugaucaagggcagccugccccugaucggggaggccgacugccuccacgagaaguacggcgggcugaacaagagcaagccguacuacaccggcgagcacgcgaaggccaucggcaacugccccaucugggugaagacgccccugaagcucgccaacgggaccaaguaccggcccccggccaagcugcugaaggagcgcggcuucuucggggccaucgcgggcuuccucgagggcgggugggagggcaugaucgccggguggcacggcuacaccucccacggggcccacggcgucgccguggccgcggaccugaaguccacccaggaggccaucaacaagaucacgaagaaccugaacucccucagcgagcuggaggucaagaaccugcagcgccucuccggcgccauggacgagcugcacaacgagauccuggagcucgacgagaagguggacgaccugcgggccgacaccaucagcucccagaucgagcuggccgugcuccugagcaacgaggggaucaucaacuccgaggacgagcaccuccuggcgcuggagcgcaagcugaagaagaugcucggccccagcgccgucgagaucgggaacggcugcuucgagaccaagcacaagugcaaccagaccugccuggaccggaucgccgccgggaccuucgacgcgggcgaguucucccugcccacguucgacagccucaacaucaccgccgccucccugaacgacgacggccuggacaaccacaccauccuccuguacuacagcaccgccgccuccagccuggcggugacgcugaugaucgccaucuucguggucuacauggugucccgcgacaacgugagcugcuccaucugccucuga

SEQ ID NO: 91510 - RNA, 1758 nt, Artificial Sequence; identical to SEQ ID NO: 90669
  derived and/or modified CDS sequence (opt1) from hemagglutinin__InfluenzaB__AGX21348

SEQ ID NO: 91511 - RNA, 1758 nt, Artificial Sequence; identical to SEQ ID NO: 90669
  derived and/or modified CDS sequence (opt1) from hemagglutinin__InfluenzaB__AGX21359

SEQ ID NO: 91512 - RNA, 1758 nt, Artificial Sequence
  derived and/or modified CDS sequence (opt1) from hemagglutinin__InfluenzaB__AGX21370
augaaggccaucaucgugcugcucauggucgugaccagcaacgccgaccgcaucugcaccggcaucacguccagcaacagcccccacguggucaagaccgcgacccagggggaggugaacgugaccggcgucaucccgcugacgaccacccccaccaagagccacuucgccaaccugaaggggacggagacccggggcaagcucugccccaagugccccaacugcaccgaccuggacguggcccuggggcgcccgaagugcaugggcaagauccccuccgcccgggugagcauccuccacgagguccgccccgugaccuccggcugcuuccccaucaugcacgaccggacgaagauccgccagcugccgaaccugcuccggggguacgagcacauccgccugagcacccacaacgugaucaacgccgagaacgcgcccggcgggcccuacaagaucggcaccuccgggagcugccccaacgucaccaacggcaacggcuucuucgccacgauggccugggccgugccgaagaacgacaagaacaagaccgcgaccaacccccugaccaucgaggugcccuacaucugcacggagggggaggaccagaucaccgucuggggcuuccacuccgacaacgagacccagauggccaagcucuacggggacagcaagccccagaaguucaccuccagcgccaacggcgugacgacccacuacgugucccagaucggcggguucccgaaccagaccgaggacggcgggcugccccagagcggccggaucgucguggacuacauggugcagaaguccgggaagaccggcacgaucaccuaccagcgcggcauccugcucccccagaaggucuggugcgccagcgggcgguccaaggugaucaagggcagccugccccugaucggggaggccgacugccuccacgagaaguacggcgggcugaacaagagcaagccguacuacaccggcgagcacgcgaaggccaucggcaacugccccaucugggugaagacgccccugaagcucgccaacgggaccaaguaccggcccccggccaagcugcugaaggagcgcggcuucuucggggccaucgcgggcuuccucgagggcgggugggagggcaugaucgccggguggcacggcuacaccucccacggggcccacggcgucgccguggccgcggaccugaaguccacccaggaggccaucaacaagaucaccaagaaccugaacucccucagcgagcuggaggucaagaaccugcagcgccucuccggcgccauggacgagcugcacaacgagauccuggagcucgacgagaagguggacgaccugcgggccgacacgaucagcucccagaucgagcuggccgugcuccugagcaacgaggggaucaucaacuccgaggacgagcaccuccuggcgcuggagcgcaagcugaagaagaugcucggccccagcgccgucgagaucgggaacggcugcuucgagaccaagcacaagugcaaccagaccugccuggaccggaucgccgccgggaccuucgacgcgggcgaguucucccugcccaccuucgacagccucaacaucacggccgccucccugaacgacgacggccuggacaaccacaccauccuccuguacuacagcaccgccgccuccagccuggcggugacccugaugaucgccaucuucguggucuacauggugucccgcgacaacgugagcugcuccaucugccucuga

SEQ ID NO: 91513 - RNA, 1758 nt, Artificial Sequence
  derived and/or modified CDS sequence (opt1) from hemagglutinin__InfluenzaB__AGX21381
augaaggccaucaucgugcugcucauggucgugaccagcaacgccgaccgcaucugcaccggcaucacguccagcaacagcccccacaucgugaagaccgcgacccagggggaggucaacgugaccggcgugaucccgcugacgaccacccccaccaagagccacuucgccaaccugaaggggacggagacccggggcaagcucugccccaagugccugaacugcaccgaccuggacgucgcccucgggcgccccaagugcaccggcaagaucccguccgcccgggugagcauccugcacgaggugcgccccgucacguccggcugcuuccccaucaugcacgaccggaccaagauccgccagcugcccaaccuccugcggggguacgagcacauccgccugagcacccacaacgugaucaacgccgagaacgcgccgggcgggcccuacaagaucggcaccuccgggagcugccccaacaucacgaacggcaacggcuucuucgccaccauggccugggccgugcccaagaacgacaagaacaagaccgcgaccaacccgcucacgaucgagguccccuacaucugcaccgagggggaggaccagaucaccguguggggcuuccacuccgacaacgagacccagauggccaagcuguacggggacagcaagccccagaaguucacguccagcgccaacggcgugaccacccacuacaucucccagaucggcggguuccccaaccagaccgaggacggcgggcugccgcagagcggccggaucgucguggacuacauggugcagaaguccgggaagacgggcaccaucaccuaccagcgcggcauccuccugccccagaaggucuggugcgccagcgggcgguccaaggugaucaagggcagccugccccucaucggggaggccgacugccugcacgagaaguacggcgggcugaacaagagcaagcccuacuacaccggcgagcacgcgaaggccaucggcaacugcccgaucugggugaagacgccccucaagcuggccaacgggaccaaguaccgcccgcccgccaagcugcucaaggagcggggcuucuucggggccaucgcgggcuuccuggagggcgggugggagggcaugaucgccggguggcacggcuacaccucccacggggcccacggcgucgccguggccgcggaccugaaguccacccaggaggccaucaacaagaucacgaagaaccucaacucccugagcgagcuggaggugaagaaccuccagcgccuguccggcgccauggacgagcugcacaacgagauccucgagcuggacgagaaggucgacgaccugcgggccgacaccaucagcucccagaucgagcucgccgugcugcugagcaacgaggggaucaucaacuccgaggacgagcaccuccuggcgcuggagcgcaagcucaagaagaugcugggccccagcgccgucgagaucgggaacggcugcuucgagaccaagcacaagugcaaccagaccugccuggaccggaucgccgccgggaccuucgacgcgggcgaguucucccuccccacguucgacagccugaacaucaccgccgccucccugaacgacgacggccucgacaaccacaccauccugcuguacuacagcaccgccgccuccagccuggcggugacgcucaugaucgccaucuucguggucuacauggugucccgcgacaacgugagcugcuccaucugccuguga

SEQ ID NO: 91514 - RNA, 1758 nt, Artificial Sequence
  derived and/or modified CDS sequence (opt1) from hemagglutinin__InfluenzaB__AGX21392
augaaggccaucaucgugcugcucauggucgugaccagcaacgccgaccgcaucugcaccggcaucacguccagcaacagcccccacaucgugaagaccgcgacccagggggaggucaacgugaccggcgugaucccgcugacgaccacccccaccaagagccacuucgccaaccugaaggggacggagacccggggcaagcucugccccaagugccugaacugcaccgaccuggacgucgcccucgggcgccccaagugcaccggcaagaucccguccgcccgggugagcauccugcacgaggugcgccccgucacguccggcugcuuccccaucaugcacgaccggaccaagauccgccagcugcccaaccuccugcggggguacgagcacauccgccugagcacccacaacgugaucaacgccgagaacgcgccgggcgggcccuacaagaucggcaccuccgggagcugccccaacaucacgaacggcaacggcuucuucgccaccauggccugggccgugcccaagaacgacaagaacaagaccgcgaccaacccgcucacgaucgagguccccuacaucugcaccgagggggaggaccagaucaccguguggggcuuccacuccgacaacgaggcccagauggccaagcuguacggggacagcaagccccagaaguucaccuccagcgccaacggcgugacgacccacuacgucucccagaucggcggguuccccaaccagaccgaggacggcgggcugccgcagagcggccggaucgugguggacuacaugguccagaaguccgggaagaccggcacgaucaccuaccagcgcggcauccuccugccccagaagguguggugcgccagcgggcgguccaaggugaucaagggcagccugccccucaucggggaggcggacugccugcacgagaaguacggcgggcugaacaagagcaagcccuacuacaccggcgagcacgccaaggccaucggcaacugcccgaucugggucaagacgccccucaagcuggccaacgggaccaaguaccgcccgcccgccaagcugcucaaggagcggggcuucuucggggcgaucgccggcuuccuggagggcgggugggagggcaugaucgccggguggcacggcuacaccucccacggggcccacggcguggccguggcggccgaccugaaguccacccaggaggccaucaacaagaucaccaagaaccucaacucccugagcgagcuggaggucaagaaccuccagcgccuguccggcgccauggacgagcugcacaacgagauccucgagcuggacgagaagguggacgaccugcgggccgacacgaucagcucccagaucgagcucgcgguccugcugagcaacgaggggaucaucaacuccgaggacgagcaccuccuggcccuggagcgcaagcucaagaagaugcugggccccagcgccguggagaucgggaacggcugcuucgagaccaagcacaagugcaaccagaccugccuggaccggaucgccgcggggaccuucgacgccggcgaguucucccuccccaccuucgacagccugaacaucacggccgccucccugaacgacgacggccucgacaaccacaccauccugcuguacuacagcaccgccgcguccagccuggccgugacccucaugaucgccaucuucgucguguacauggugucccgcgacaacgucagcugcuccaucugccuguga

SEQ ID NO: 91515 - RNA, 1758 nt, Artificial Sequence
  derived and/or modified CDS sequence (opt1) from hemagglutinin__InfluenzaB__AGX21403
augaaggccaucaucgugcugcucauggucgugaccagcaacgccgaccgcaucugcaccggcaucacguccagcaacagcccccacguggucaagaccgcgacccagggggaggugaacgugaccggcgucaucccgcugacgaccacccccaccaagagccacuucgccaaccugaaggggacggagacccggggcaagcucugccccaagugccccaacugcaccgaccuggacguggcccuggggcgcccgaagugcaccggcaagauccccuccgcccgggugagcauccuccacgagguccgccccgugacguccggcugcuuccccaucaugcacgaccggaccaagauccgccagcugccgaaccugcuccggggguacgagcacauccgccugagcacccacaacgugaucaacgccgagaacgcgcccggcgggcccuacaagaucggcaccuccgggagcugccccaacgucacgaacggcaacggcuucuucgccaccauggccugggccgugccgaagaacgacaagaacaagaccgcgaccaacccccugacgaucgaggugcccuacaucugcaccgagggggaggaccagaucaccgucuggggcuuccacuccgacaacgagacccagauggccaagcucuacggggacagcaagccccagaaguucacguccagcgccaacggcgugaccacccacuacgugucccagaucggcggguucccgaaccagaccgaggacggcgggcugccccagagcggccggaucgucguggacuacauggugcagaaguccgggaagacgggcaccaucaccuaccagcgcggcauccugcucccccagaaggucuggugcgccagcgggcgguccaaggugaucaagggcagccugccccugaucggggaggccgacugccuccacgagaaguacggcgggcugaacaagagcaagccguacuacaccggcgagcacgcgaaggccaucggcaacugccccaucugggugaagacgccccugaagcucgccaacgggaccaaguaccggcccccggccaagcugcugaaggagcgcggcuucuucggggccaucgcgggcuuccucgagggcgggugggagggcaugaucgccggguggcacggcuacaccucccacggggcccacggcgucgccguggccgcggaccugaaguccacccaggaggccaucaacaagaucacgaagaaccugaacucccucagcgagcuggaggucaagaaccugcagcgccucuccggcgccauggacgagcugcacaacgagauccuggagcucgacgagaagguggacgaccugcgggccgacaccaucagcucccagaucgagcuggccgugcuccugagcaacgaggggaucaucaacuccgaggacgagcaccuccuggcgcuggagcgcaagcugaagaagaugcucggccccagcgccgucgagaucgggaacggcugcuucgagaccaagcacaagugcaaccagaccugccugaaccggaucgccgccgggaccuucgacgcgggcgaguucucccugcccacguucgacagccucaacaucaccgccgccucccugaacgacgacggccuggacaaccacaccauccuccuguacuacagcaccgccgccuccagccuggcggugacgcugaugaucgccaucuucguggucuacauggugucccgcgacaacgugagcugcuccaucugccucuga

SEQ ID NO: 91516 - RNA, 1758 nt, Artificial Sequence
  derived and/or modified CDS sequence (opt1) from hemagglutinin__InfluenzaB__AGX21414
augaaggccaucaucgugcugcucauggucgugaccagcaacgccgaccgcaucugcaccggcaucacguccagcaacagcccccacguggucaagaccgcgacccagggggaggugaacgugaccggcgucaucccgcugacgaccacccccaccaagagccacuucgccaaccugaaggggacggagacccggggcaagcucugccccaagugccccaacugcaccgaccuggacguggcccuggggcgcccgaagugcaccggcaagauccccuccgcccgggugagcauccuccacgagguccgccccgugacguccggcugcuuccccaucaugcacgaccggaccaagauccgccagcugccgaaccugcuccggggguacgagcacauccgccugagcacccacaacgugaucaacgccgagaacgcgcccggcgggcccuacaagaucggcaccuccgggagcugccccaacgucacgaacggcaacggcuucuucgccaccauggccugggccgugccgaagaacgacaagaacaagaccgcgaccgacccccugacgaucgaggugcccuacaucugcaccgagggggaggaccagaucaccgucuggggcuuccacuccgacaacgagacccagauggccaagcucuacggggacagcaagccccagaaguucacguccagcuccaacggcgugaccacccacuacgugagccagaucggcggguucccgaaccagaccgaggacggcgggcugccccaguccggccggaucgucguggacuacauggugcagaaguccgggaagacgggcaccaucaccuaccagcgcggcauccugcucccccagaaggucuggugcgccuccgggcggagcaaggugaucaagggcagccugccccugaucggggaggccgacugccuccacgagaaguacggcgggcugaacaaguccaagccguacuacaccggcgagcacgccaaggcgaucggcaacugccccaucugggugaagacgccccugaagcucgccaacgggaccaaguaccggcccccggccaagcugcugaaggagcgcggcuucuucggggccaucgccggcuuccucgagggcgggugggagggcaugaucgcgggguggcacggcuacaccagccacggggcccacggcgucgccguggccgccgaccugaaguccacccaggaggcgaucaacaagaucacgaagaaccugaacagccucuccgagcuggaggucaagaaccugcagcgccucagcggcgccauggacgagcugcacaacgagauccuggagcucgacgagaagguggacgaccugcgggccgacaccaucuccagccagaucgagcuggccgugcuccuguccaacgaggggaucaucaacagcgaggacgagcaccuccuggcccuggagcgcaagcugaagaagaugcucggccccuccgcggucgagaucgggaacggcugcuucgagaccaagcacaagugcaaccagaccugccuggaccggaucgccgccgggaccuucgacgccggcgaguucagccugcccacguucgacucccucaacaucaccgcggccagccugaacgacgacggccuggacaaccacaccauccuccuguacuacuccaccgccgccagcucccuggccgugacgcugaugaucgcgaucuucguggucuacauggugagccgcgacaacguguccugcagcaucugccucuga

SEQ ID NO: 91517 - RNA, 1758 nt, Artificial Sequence; identical to SEQ ID NO: 90632
  derived and/or modified CDS sequence (opt1) from hemagglutinin__InfluenzaB__AGX21425

SEQ ID NO: 91518 - RNA, 1758 nt, Artificial Sequence
  derived and/or modified CDS sequence (opt1) from hemagglutinin__InfluenzaB__AGX21436
augaaggccaucaucgugcugcucauggucgugaccagcaacgccgaccgcaucugcaccggcaucacguccagcaacagcccccacaucgugaagaccgcgacccagggggaggucaacgugaccggcgugaucccgcugacgaccacccccaccaagagccacuucgccaaccugaaggggacggagacccggggcaagcucugccccaagugccugaacugcaccgaccuggacgucgcccucgggcgccccaagugcaccggcaagaucccguccgcccgggugagcauccugcacgaggugcgccccgucacguccggcugcuuccccaucaugcacgaccggaccaagauccgccagcugcccaaccuccugcggggguacgagcacauccgccugagcacccacaacgugaucaacgccgagaacgcgccgggcgggcccuacaagaucggcaccuccgggagcugccccaacaucacgaacggcaacggcuucuucgccaccauggccugggccgugcccaagaacgacaagaacaagaccgcgaccaacccgcucacgaucgagguccccuacaucugcaccgagggggaggaccagaucaccguguggggcuuccacuccgacaacgagacccagauggccaagcuguacggggacagcaagccccagaaguucacguccagcgccaacggcgugaccacccacuacgucucccagaucggcggguuccccaaccagaccgaggacggcgggcugccgcagagcggccggaucgugguggacuacaugguccagaaguccgggaagacgggcaccaucaccuaccagcgcggcauccuccugccccagaagguguggugcgccagcgggcgguccaaggugaucaagggcagccugccccucaucggggaggccgacugccugcacgagaaguacggcgggcugaacaagagcaagcccuacuacaccggcgagcacgcgaaggccaucggcaacugcccgaucugggucaagacgccccucaagcuggccaacgggaccaaguaccgcccgcccgccaagcugcucaaggagcggggcuucuucggggccaucgcgggcuuccuggagggcgggugggagggcaugaucgccggguggcacggcuacaccucccacggggcccacggcguggccguggccgcggaccugaaguccacccaggaggccaucaacaagaucacgaagaaccucaacucccugagcgagcuggaggucaagaaccuccagcgccuguccggcgccauggacgagcugcacaacgagauccucgagcuggacgagaagguggacgaccugcgggccgacaccaucagcucccagaucgagcucgccguccugcugagcaacgaggggaucaucaacuccgaggacgagcaccuccuggcgcuggagcgcaagcucaagaagaugcugggccccagcgccguggagaucgggaacggcugcuucgagaccaagcacaagugcaaccagaccugccuggaccggaucgccgccgggaccuucgacgcgggcgaguucucccuccccacguucgacagccugaacaucaccgccgccucccugaacgacgacggccucgacaaccacaccauccugcuguacuacagcaccguggccuccagccuggccgucacgcucaugaucgcgaucuucgugguguacauggucucccgcgacaacgugagcugcuccaucugccuguga

SEQ ID NO: 91519 - RNA, 1758 nt, Artificial Sequence; identical to SEQ ID NO: 90707
  derived and/or modified CDS sequence (opt1) from hemagglutinin__InfluenzaB__AGX21447

SEQ ID NO: 91520 - RNA, 1758 nt, Artificial Sequence; identical to SEQ ID NO: 90632
  derived and/or modified CDS sequence (opt1) from hemagglutinin__InfluenzaB__AGX21458

SEQ ID NO: 91521 - RNA, 1758 nt, Artificial Sequence; identical to SEQ ID NO: 90632
  derived and/or modified CDS sequence (opt1) from hemagglutinin__InfluenzaB__AGX21469

SEQ ID NO: 91522 - RNA, 1758 nt, Artificial Sequence
  derived and/or modified CDS sequence (opt1) from hemagglutinin__InfluenzaB__AGX21480
augaaggccaucaucgugcugcucauggucgugaccagcaacgccgaccgcaucugcaccggcaucacguccagcaacagcccccacguggucaagaccgcgacccagggggaggugaacgugaccggcgucaucccgcugacgaccacccccaccaagagccacuucgccaaccugaaggggacggagacccggggcaagcucugccccaagugccugaacugcaccgaccuggacguggcccucgggcgccccaagugcaccggcaagaucccguccgcccgggugagcauccugcacgagguccgccccgugacguccggcugcuuccccaucaugcacgaccggaccaagauccgccagcugcccaaccuccugcggggguacgagcacauccgccugagcacccacaacgugaucaacgccgagaacgcgccgggcgggcccuacaagaucggcaccuccgggagcugccccaacgucacgaacggcaacggcuucuucgccaccauggccugggccgugcccaagaacgacaagaacaagaccgcgaccaacccgcucacgaucgaggugcccuacaucugcaccgagggggaggaccagaucaccgucuggggcuuccacuccgacaacgagacccagauggccaagcuguacggggacagcaagccccagaaguucacguccagcgccaacggcgugaccacccacuacgugucccagaucggcggguuccccaaccagaccgaggacggcgggcugccgcagagcggccggaucgucguggacuacauggugcagaaguccgggaagacgggcaccaucaccuaccagcgcggcauccuccugccccagaaggucuggugcgccagcgggcgguccaaggugaucaagggcagccugccccucaucggggaggccgacugccugcacgagaaguacggcgggcugaacaagagcaagcccuacuacaccggcgagcacgcgaaggccaucggcaacugcccgaucugggugaagacgccccucaagcuggccaacgggaccaaguaccgcccgcccgccaagcugcucaaggagcggggcuucuucggggccaucgcgggcuuccuggagggcgggugggagggcaugaucgccggguggcacggcuacaccucccacggggcccacggcgucgccguggccgcggaccugaaguccacccaggaggccaucaacaagaucacgaagaaccucaacucccugagcgagcuggaggucaagaaccuccagcgccuguccggcgccauggacgagcugcacaacgagauccucgagcuggacgagaagguggacgaccugcgggccgacaccaucagcucccagaucgagcucgccgugcugcugagcaacgaggggaucaucaacuccgaggacgagcaccuccuggcgcuggagcgcaagcucaagaagaugcugggccccagcgccgucgagaucgggaacggcugcuucgagaccaagcacaagugcaaccagaccugccuggaccggaucgccgccgggaccuucgacgcgggcgaguucucccuccccacguucgacagccugaacaucaccgccgccucccugaacgaggacggccucgacaaccacaccauccugcuguacuacagcaccgccgccuccagccuggcggugacgcucaugaucgccaucuucguggucuacauggugucccgcgacaacgugagcugcuccaucugccuguga

SEQ ID NO: 91523 - RNA, 1758 nt, Artificial Sequence; identical to SEQ ID NO: 90707
  derived and/or modified CDS sequence (opt1) from hemagglutinin__InfluenzaB__AGX21491

SEQ ID NO: 91524 - RNA, 1758 nt, Artificial Sequence; identical to SEQ ID NO: 90707
  derived and/or modified CDS sequence (opt1) from hemagglutinin__InfluenzaB__AGX21502

SEQ ID NO: 91525 - RNA, 1758 nt, Artificial Sequence; identical to SEQ ID NO: 90632
  derived and/or modified CDS sequence (opt1) from hemagglutinin__InfluenzaB__AGX21513

SEQ ID NO: 91526 - RNA, 1758 nt, Artificial Sequence; identical to SEQ ID NO: 90669
  derived and/or modified CDS sequence (opt1) from hemagglutinin__InfluenzaB__AGX21524

SEQ ID NO: 91527 - RNA, 1758 nt, Artificial Sequence
  derived and/or modified CDS sequence (opt1) from hemagglutinin__InfluenzaB__AGX21535
augaaggccaucaucgugcugcucauggucgugaccagcaacgccgaccgcaucugcaccggcaucacguccagcaacagcccccacaucgugaagaccgcgacccagggggaggucaacgugaccggcgugaucccgcugacgaccacccccaccaagagccacuucgccaaccugaaggggacggagacccggggcaagcucugccccaagugccugaacugcaccgaccuggacgucgcccucgggcgccccaagugcaccggcaagaucccguccgcccgggugagcauccugcacgaggugcgccccgucacguccggcugcuuccccaucaugcacgaccggaccaagauccgccagcugcccaaccuccugcggggguacgagcacauccgccugagcacccacaacgugaucaacgccgagaacgcgccgggcgggcccuacaagaucggcaccuccgggagcugccccaacaucacgaacggcaacggcuucuucgccaccauggccugggccgugcccaagaacgacaagaacaagaccgcgaccaacccgcucacgaucgagguccccuacaucugcaccgagggggaggaccagaucaccguguggggcuuccacuccgacagcgagacccagauggccaagcuguacggggacuccaagccccagaaguucacgagcuccgccaacggcgugaccacccacuacgucagccagaucggcggguuccccaaccagaccgaggacggcgggcugccgcaguccggccggaucgugguggacuacaugguccagaaguccgggaagacgggcaccaucaccuaccagcgcggcauccuccugccccagaagguguggugcgccuccgggcggagcaaggugaucaagggcagccugccccucaucggggaggccgacugccugcacgagaaguacggcgggcugaacaaguccaagcccuacuacaccggcgagcacgcgaaggccaucggcaacugcccgaucugggucaagacgccccucaagcuggccaacgggaccaaguaccgcccgcccgccaagcugcucaaggagcggggcuucuucggggccaucgcgggcuuccuggagggcgggugggagggcaugaucgccggguggcacggcuacaccagccacggggcccacggcguggccguggccgcggaccugaaguccacccaggaggccaucaacaagaucacgaagaaccucaacagccuguccgagcuggaggucaagaaccuccagcgccugagcggcgccauggacgagcugcacaacgagauccucgagcuggacgagaagguggacgaccugcgggccgacaccaucuccagccagaucgagcucgccguccugcuguccaacgaggggaucaucaacagcgaggacgagcaccuccuggcgcuggagcgcaagcucaagaagaugcugggccccuccgccguggagaucgggaacggcugcuucgagaccaagcacaagugcaaccagaccugccuggaccggaucgccgccgggaccuucgacgcgggcgaguucagccuccccacguucgacucccugaacaucaccgccgccagccugaacgacgacggccucgacaaccacaccauccugcuguacuacuccaccgccgccagcucccuggcggugacgcucaugaucgccaucuucgucguguacauggugagccgcgacaacgucuccugcagcaucugccuguga

SEQ ID NO: 91528 - RNA, 1758 nt, Artificial Sequence; identical to SEQ ID NO: 90669
  derived and/or modified CDS sequence (opt1) from hemagglutinin__InfluenzaB__AGX21546

SEQ ID NO: 91529 - RNA, 1758 nt, Artificial Sequence
  derived and/or modified CDS sequence (opt1) from hemagglutinin__InfluenzaB__AGX21557
augaaggccaucaucgugcugcucauggucgugaccagcaacgccgaccgcaucugcaccggcaucacguccagcaacagcccccacguggucaagaccgcgacccagggggaggugaacgugaccggcgucaucacgcugaccaccaccccgacgaagucccacuucgccaaccugaaggggaccgagacccggggcaagcucugccccaagugccugaacugcaccgaccuggacguggcccucgggcgccccaagugcacgggcaagauccccuccgcccgggugagcauccugcacgagguccgcccggugaccuccggcugcuuccccaucaugcacgaccggaccaagauccgccagcugcccaaccuccugcggggguacgagcacauccgccugagcacccacaacgugaucaacgccgagaacgcgcccggcgggccguacaagaucggcacguccgggagcugccccaacgucaccaacggcaacggcuucuucgccaccauggccugggccgugcccaagaacgacaagaacaagaccgcgacgaacccccucaccaucgaggugccguacaucugcaccgagggggaggaccagaucaccgucuggggcuuccacuccgacaacgagacgcagauggccaagcuguacggggacagcaagccccagaaguucaccuccagcgccaacggcgugaccacccacuacgugucccagaucggcggguuccccaaccagacggaggacggcgggcugccccagagcggccggaucgucguggacuacauggugcagaaguccgggaagaccggcaccaucaccuaccagcgcggcauccuccugccgcagaaggucuggugcgccagcgggcgguccaaggugaucaagggcagccugccccucaucggggaggccgacugccugcacgagaaguacggcgggcugaacaagagcaagcccuacuacacgggcgagcacgcgaaggccaucggcaacugccccaucugggugaagaccccgcucaagcuggccaacgggaccaaguaccgcccgcccgccaagcugcucaaggagcggggcuucuucggggccaucgcgggcuuccuggagggcgggugggagggcaugaucgccggguggcacggcuacaccucccacggggcccacggcgucgccguggccgcggaccucaagagcacgcaggaggccaucaacaagaucaccaagaaccugaacucccugagcgagcuggaggucaagaaccuccagcgccuguccggcgccauggacgagcugcacaacgagauccucgagcuggacgagaagguggacgaccugcgggccgacaccaucagcucccagaucgagcucgccgugcugcugagcaacgaggggaucaucaacuccgaggacgagcaccuccuggcgcuggagcgcaagcucaagaagaugcugggccccagcgccgucgagaucgggaacggcugcuucgagaccaagcacaagugcaaccagaccugccuggaccggaucgccgccgggacguucgacgcgggcgaguucucccuccccaccuucgacagccugaacaucaccgccgccucccugaacgacgacggccucgacaaccacaccauccugcuguacuacagcacggccgccuccagccuggcggugacccucaugaucgccaucuucguggucuacauggugucccgcgacaacgugagcugcuccaucugccuguga

SEQ ID NO: 91530 - RNA, 1758 nt, Artificial Sequence
  derived and/or modified CDS sequence (opt1) from hemagglutinin__InfluenzaB__AGX21568
augaaggccaucaucgugcugcucauggucgugaccagcaacgccgaccgcaucugcaccggcaucacguccagcaacagcccccacguggucaagaccgcgacccagggggaggugaacgugaccggcgucaucccgcugacgaccacccccaccaagagccacuucgccaaccugaaggggacggagacccggggcaagcucugccccaagugccugaacugcaccgaccuggacguggcccucgggcgccccaagugcaccggcaagaucccguccgcccgggugagcauccugcacgagguccgccccgugacguccggcugcuuccccaugaugcacgaccggaccaagauccgccagcugcccaaccuccugcggggguacgagcacauccgccugagcacccacaacgugaucaacgccgagaacgcgccgggcgggcccuacaagaucggcaccuccgggagcugccccaacgucacgaacggcaacggcuucuucgccaccauggccugggccgugcccaagaacgacaagaacaagaccgcgaccaacccgcucacgaucgaggugcccuacaucugcaccgagggggaggaccagaucaccgucuggggcuuccacuccgacaacgagacccagauggccaagcuguacggggacagcaagccccagaaguucacguccagcgccaacggcgugaccacccacuacgugucccagaucggcggguuccccaaccagaccgaggacggcgggcugccgcagagcggccggaucgucguggacuacauggugcagaaguccgggaagacgggcaccaucaccuaccagcgcggcauccuccugccccagaaggucuggugcgccagcgggcgguccaaggugaucaagggcagccugccccucaucggggaggccgacugccugcacgagaaguacggcgggcugaacaagagcaagcccuacuacaccggcgagcacgcgaaggccaucggcaacugcccgaucugggugaagacgccccucaagcuggccaacgggaccaaguaccgcccgcccgccaagcugcucaaggagcggggcuucuucggggccaucgcgggcuuccuggagggcgggugggagggcaugaucgccggguggcacggcuacaccucccacggggcccacggcgucgccguggccgcggaccugaaguccacccaggaggccaucaacaagaucacgaagaaccucaacucccugagcgagcuggaggucaagaaccuccagcgccuguccggcgccauggacgagcugcacaacgagauccucgagcuggacgagaagguggacgaccugcgggccgacaccaucagcucccagaucgagcucgccgugcugcugagcaacgaggggaucaucaacuccgaggacgagcaccuccuggcgcuggagcgcaagcucaagaagaugcugggccccagcgccgucgagaucgggaacggcugcuucgagaccaagcacaagugcaaccagaccugccuggaccggaucgccgccgggaccuucgacgcgggcgaguucucccuccccacguucgacagccugaacaucaccgccgccucccugaacgacgacggccucgacaaccacaccauccugcuguacuacagcaccgccgccuccagccuggcggugacgcucaugaucgccaucuucguggucuacauggugucccgcgacaacgugagcugcuccaucugccuguga

SEQ ID NO: 91531 - RNA, 1758 nt, Artificial Sequence; identical to SEQ ID NO: 90632
  derived and/or modified CDS sequence (opt1) from hemagglutinin__InfluenzaB__AGX21579

SEQ ID NO: 91532 - RNA, 1758 nt, Artificial Sequence; identical to SEQ ID NO: 90669
  derived and/or modified CDS sequence (opt1) from hemagglutinin__InfluenzaB__AGX21590

SEQ ID NO: 91533 - RNA, 1758 nt, Artificial Sequence; identical to SEQ ID NO: 91482
  derived and/or modified CDS sequence (opt1) from hemagglutinin__InfluenzaB__AGX21601

SEQ ID NO: 91534 - RNA, 1758 nt, Artificial Sequence; identical to SEQ ID NO: 90669
  derived and/or modified CDS sequence (opt1) from hemagglutinin__InfluenzaB__AGX21611

SEQ ID NO: 91535 - RNA, 1758 nt, Artificial Sequence; identical to SEQ ID NO: 91013
  derived and/or modified CDS sequence (opt1) from hemagglutinin__InfluenzaB__AGX21622

SEQ ID NO: 91536 - RNA, 1758 nt, Artificial Sequence
  derived and/or modified CDS sequence (opt1) from hemagglutinin__InfluenzaB__AGX21633
augaaggccaucaucgugcugcucauggucgugaccagcaacgccgaccgcaucugcaccggcaucacguccagcaacagcccccacaucgugaagaccgcgacccagggggaggucaacgugaccggcgugaucccgcugacgaccacccccaccaagagccacuucgccaaccugaaggggacggagacccggggcaagcucugccccaagugccugaacugcaccgaccuggacgucgcccucgggcgccccaagugcaccggcaagaucccguccgcccgggugagcauccugcacgaggugcgccccgucacguccggcugcuuccccaucaugcacgaccggaccaagauccgccagcugcccaaccuccugcggggguacgagcacauccgccugagcacccacaacgugaucaacgccgagaacgcgccgggcgggcccuacaagaucggcaccuccgggagcugccccaacaucacgaacggcaacggcuucuucgccaccauggccugggccgugcccaagaacgacaagaacaagaccgcgaccaacccgcucacgaucgagguccccuacaucugcaccgagggggaggaccagaucaccguguggggcuuccacuccgacaacgagacccagauggccaagcuguacggggacagcaagccccagaaguucacguccagcgccaacggcgugaccacccacuacgucucccagaucggcggguuccccaaccagaccgaggacggcgggcugccgcagagcggccggaucgugguggacuacaugguccagaaguccgggaagacgggcaccaucaccuaccagcgcggcauccuccugccccagaagguguggugcgccagcgggcgguccaaggugaucaagggcagccugccccucaucggggaggccgacugccugcacgagaaguacggcgggcugaacaagagcaagcccuacuacaccggcgagcacgcgaaggccaucggcaacugcccgaucugggucaagacgccccucaagcuggccaacgggaccaaguaccgcccgcccgcccggcugcucaaggagcgcggcuucuucggggccaucgcgggcuuccuggagggcgggugggagggcaugaucgccggguggcacggcuacaccucccacggggcccacggcguggccguggccgcggaccugaaguccacccaggaggccaucaacaagaucacgaagaaccucaacucccugagcgagcuggaggucaagaaccuccagcggcuguccggcgccauggacgagcugcacaacgagauccucgagcuggacgagaagguggacgaccugcgcgccgacaccaucagcucccagaucgagcucgccguccugcugagcaacgaggggaucaucaacuccgaggacgagcaccuccuggcgcuggagcggaagcucaagaagaugcugggccccagcgccguggagaucgggaacggcugcuucgagaccaagcacaagugcaaccagaccugccuggaccgcaucgccgccgggaccuucgacgcgggcgaguucucccuccccacguucgacagccugaacaucaccgccgccucccugaacgacgacggccucgacaaccacaccauccugcuguacuacagcaccgccgccuccagccuggcggugacgcucaugaucgccaucuucgucguguacauggugucccgggacaacgucagcugcuccaucugccuguga

SEQ ID NO: 91537 - RNA, 1758 nt, Artificial Sequence; identical to SEQ ID NO: 90707
  derived and/or modified CDS sequence (opt1) from hemagglutinin__InfluenzaB__AGX21644

SEQ ID NO: 91538 - RNA, 1758 nt, Artificial Sequence; identical to SEQ ID NO: 90632
  derived and/or modified CDS sequence (opt1) from hemagglutinin__InfluenzaB__AGX21655

SEQ ID NO: 91539 - RNA, 1758 nt, Artificial Sequence
  derived and/or modified CDS sequence (opt1) from hemagglutinin__InfluenzaB__AGX21666
augaaggccaucaucgugcugcucauggucgugaccagcaacgccgaccgcaucugcaccggcaucacguccagcaacagcccccacguggucaagaccgcgacccagggggaggugaacgugaccggcgucaucccgcugacgaccacccccaccaagagccacuucgccaaccugaaggggacggagacccggggcaagcucugccccaagugccccaacugcaccgaccuggacguggcccuggggcgcccgaagugcaccggcaagauccccuccgcccgggugagcauccuccacgagguccgccccgugacguccggcugcuuccccaucaugcacgaccggaccaagauccgccagcugccgaaccugcuccggggguacgagcacauccgccugagcacccacaacgugaucaacgccgagaacgcgcccggcgggcccuacaagaucggcaccuccgggagcugccccaacgucacgaacggcaacggcuucuucgccaccauggccugggccgugccgaagaacgacaagaacaagaccgcgaccaacccccugacgaucgaggugcccuacaucugcaccgagggggaggaccagaucaccgucuggggcuuccacuccgacaacgagacccagauggccaagcucuacggggacagcaagccccagaaguucacguccagcgccaacggcgugaccacccacuacgugucccagaucggcggguucccgaaccagaccgaggacggcgggcugccccagagcggccggaucgucguggacuacauggugcagaaguccgggaagacgggcaccaucaccuaccagcgcggcauccugcucccccagaaggucuggugcgccagcgggcgguccaaggugaucaagggcagccugccccugaucggggaggccgacugccuccacgagaaguacggcgggcugaacaagagcaagccguacuacaccggcgagcacgcgaaggccaucggcaacugccccaucugggugaagacgccccugaagcucgccaacgggaccaaguaccggcccccggccaagcugcugaaggagcgcggcuucuucggggccaucgcgggcuuccucgagggcgggugggagggcaugaucgccggguggcacggcuacaccucccacggggcccacggcgucgccguggccgcggaccugaaguccacccaggaggccaucaacaagaucacgaagaaccugaacucccucagcgagcuggaggucaagaaccugcagcgccucuccggcgccauggacgagcugcacaacgagauccuggagcucgacgagaagguggacgaccugcgggccgacaccaucagcucccagaucgagcuggccgugcuccugagcaacgaggggaucaucaacuccgaggacgagcaccuccuggcgcuggagcgcaagcugaagaagaugcucggccccagcgccgucgagaucgggaacggcugcuucgagaccaagcacaagugcaaccagaccugccuggacaagaucgccgccgggaccuucgacgcgggcgaguucucccugcccacguucgacagccucaacaucaccgccgccucccugaacgacgacggccuggacaaccacaccauccuccuguacuacagcaccgccgccuccagccuggcggugacgcugaugaucgccaucuucguggucuacauggugucccgggacaacgugagcugcuccaucugccucuga

SEQ ID NO: 91540 - RNA, 1758 nt, Artificial Sequence; identical to SEQ ID NO: 90707
  derived and/or modified CDS sequence (opt1) from hemagglutinin__InfluenzaB__AGX21677

SEQ ID NO: 91541 - RNA, 1758 nt, Artificial Sequence; identical to SEQ ID NO: 90632
  derived and/or modified CDS sequence (opt1) from hemagglutinin__InfluenzaB__AGX21688

SEQ ID NO: 91542 - RNA, 1758 nt, Artificial Sequence
  derived and/or modified CDS sequence (opt1) from hemagglutinin__InfluenzaB__AGX21699
augaaggccaucaucgugcugcucauggucgugaccagcaacgccgaccgcaucugcaccggcaucacguccagcaacagcccccacguggucaagaccgcgacccagggggaggugaacgugaccggcgucaucccgcugacgaccacccccaccaagagccacuucgccaaccugaaggggacggagacccggggcaagcucugccccaagugccugaacugcaccgaccuggacguggcccucgggcgccccaagugcaccggcaagaucccguccgcccgggugagcauccugcacgagguccgccccgugacguccggcugcuuccccaucaugcacgaccggaccaagauccgccagcugcccaaccuccugcggggguacgagcacauccgccugagcacccacaacgugaucaacgccgagaacgcgccgggcgggcccuacaagaucggcaccuccgggagcugccccaacgucacgaacggcaacggcuucuucgccaccauggccugggccgugcccaagaacgacaagaacaagaccgcgaccaacccgcucacgaucgaggugcccuacaucugcaccgagggggaggaccagaucaccgucuggggcuuccacuccgacaacgagacccagauggccaagcuguacggggacagcaagccccagaaguucacguccagcgccaacggcgugaccacccacuacgugucccagaucggcggguuccccaaccagaccgaggacggcgggcugccgcagagcggccggaucgucguggacuacauggugcagaaguccgggaagacgggcaccaucaccuaccagcgcggcauccuccugccccagaaggucuggugcgccagcgggcgguccaaggugaucaagggcagccugccccucaucggggaggccgacugccugcacgagaaguacggcgggcugaacaagagcaagcccuacuacaccggcgagcacgcgaaggccaucggcaacugcccgaucugggugaagacgccccucaaccuggccaacgggaccaaguaccgcccgcccgccaagcugcucaaggagcggggcuucuucggggccaucgcgggcuuccuggagggcgggugggagggcaugaucgccggguggcacggcuacaccucccacggggcccacggcgucgccguggccgcggaccugaaguccacccaggaggccaucaacaagaucacgaagaaccucaacucccugagcgagcuggaggucaagaaccuccagcgccuguccggcgccauggacgagcugcacaacgagauccucgagcuggacgagaagguggacgaccugcgggccgacaccaucagcucccagaucgagcucgccgugcugcugagcaacgaggggaucaucaacuccgaggacgagcaccuccuggcgcuggagcgcaagcucaagaagaugcugggccccagcgccgucgagaucgggaacggcugcuucgagaccaagcacaagugcaaccagaccugccuggaccggaucgccgccgggaccuucgacgcgggcgaguucucccuccccacguucgacagccugaacaucaccgccgccucccugagcgacgacggccucgacaaccacaccauccugcuguacuacuccaccgccgccagcucccuggcggugacgcucaugaucgccaucuucguggucuacauggugagccgcgacaacguguccugcagcaucugccuguga

SEQ ID NO: 91543 - RNA, 1758 nt, Artificial Sequence; identical to SEQ ID NO: 91482
  derived and/or modified CDS sequence (opt1) from hemagglutinin__InfluenzaB__AGX21710

SEQ ID NO: 91544 - RNA, 1758 nt, Artificial Sequence; identical to SEQ ID NO: 90707
  derived and/or modified CDS sequence (opt1) from hemagglutinin__InfluenzaB__AGX21721

SEQ ID NO: 91545 - RNA, 1755 nt, Artificial Sequence
  derived and/or modified CDS sequence (opt1) from hemagglutinin__InfluenzaB__AGX21732
augaaggccaucaucgugcugcucauggucgugaccagcaacgccgaccgcaucugcaccggcaucacguccagcaacagcccccacguggucaagaccgcgacccagggggaggugaacgugaccggcgccaucccgcugacgaccacccccaccaagucccacuucgccaaccugaaggggacgaagacccggggcaagcucugcccgaccugccugaacugcaccgaccuggacgucgcccucgggggccccaugugcgugggcaucacgccguccgccaaggcgagcauccugcacgaggugcgccccgucaccuccgggugcuuccccaucaugcacgaccggaccaagauccgccagcugcccaaccuccugcggggcuacgagaagauccgccugagcgcccagaacgugaucaacgccgagaaggcccccgggggccccuacaagcucgggaccuccggcagcugccccaacgcgacguccaagagcggcuucuucgccaccauggccugggccgugccccgggacgacaacaagaccgccaccaacccgcugacggucgaggugccccacaucugcgcgaacgaggaggaccagaucaccguguggggguuccacuccgacaacaagacccagaugaagaaccuguacggcgacagcaacccccagaaguucaccuccagcgccaacgggaucacgacccacuacgucucccagaucggcggcuuccccgaccagaccgaggacgggggccucccgcagagcgggcgcaucgugguggacuacaugguccagaagcccggcaagaccgggacgaucguguaccagcggggcauccugcugccccagaagguguggugcgccuccggccgcagcaaggucaucaaggggagccucccccugaucggcgaggccgacugccugcacgagaaguacgggggccucaacaaguccaagccguacuacaccggggagcacgccaaggcgaucggcaacugccccaucugggugaagacgccccugaagcuggccaacggcaccaaguaccggcccccggccaagcuccugaaggagcgcggguucuucggcgccaucgccggguuccuggagggcgggugggagggcaugaucgcgggcuggcacggguacaccagccacggcgcccacgggguggccgucgccgccgaccucaaguccacccaggaggcgaucaacaagaucaccaagaaccugaacagccuguccgagcucgaggugaagaaccugcagcggcugagcggcgccauggacgagcuccacaacgagauccuggagcuggacgagaaggucgacgaccuccgcgccgacaccaucuccagccagaucgagcuggccgugcugcucuccaacgagggcaucaucaacagcgaggacgagcaccuccuggcgcuggagcggaagcugaagaagaugcuggggcccuccgccguggacaucggcaacgggugcuucgagacgaagcacaagugcaaccagaccugccucgaccgcaucgccgccggcaccuucaacgccggggaguucagccugcccaccuucgacucccugaacaucaccgcggccagccucaacgacgacggccuggacaaccacacgauccugcuguacuacuccaccgccgccagcucccucgccgucacccugaugaucgcgaucuucaucguguacaugaucagccgggacaacguguccugcagcaucugccuguga

SEQ ID NO: 91546 - RNA, 1755 nt, Artificial Sequence
  derived and/or modified CDS sequence (opt1) from hemagglutinin__InfluenzaB__AGX21743
augaaggccaucaucgugcugcucauggucgugaccagcaacgccgaccgcaucugcaccggcaucacguccagcaacagcccccacguggucaagaccgcgacccagggggaggugaacgugaccggcgucaucccgcugacgaccacccccaccaagucccacuucgccaaccugaaggggacgcggacccgcggcaagcucugccccgacugccugaacugcaccgaccuggacguggcccucgggcggcccaugugcgugggcaccacgccguccgccaaggccagcauccugcacgagguccgccccgugaccuccggcugcuuccccaucaugcacgaccggaccaagauccgccagcugcccaaccuccugcggggguacgagaacauccgccugagcacccagaacgugaucgacgcggagaaggcccucggcgggccguaccggcugggcacguccgggagcugccccaacgccaccuccaagagcggcuucuucgccaccauggcgugggccguccccaaggacaacaacaagaacgccaccaacccccugacgguggaggugccguacaucugcaccgagggcgaggaccagaucaccgucuggggguuccacuccgacaacaagacccagaugaagaaccucuacggcgacagcaacccccagaaguucacguccagcgccaacggggugaccacccacuacgugucccagaucggcggcuuccccgaccagaccgaggacgggggccugccccagagcgggcgcaucgucguggacuacauggugcagaagccgggcaagacggggaccaucgucuaccagcggggcgugcugcucccccagaagguguggugcgccuccggcaagagcaaggucaucaaggggagccugccccugaucggcgaggcggacugccuccacgagaaguacgggggccugaacaaguccaagcccuacuacaccggggagcacgccaaggccaucggcaacugcccgaucugggugaagacgccccugaagcucgccaacggcaccaaguaccgcccgcccgccaagcugcugaaggagcggggguucuucggcgcgaucgccggguuccucgagggcgggugggagggcaugaucgccggcuggcacggguacaccagccacggcgcccacggggucgccguggcggccgaccugaaguccacccaggaggccaucaacaagaucaccaagaaccugaacagccucuccgagcuggaggugaagaaccugcagcgccucagcggcgccauggacgagcugcacaacgagauccuggagcucgacgagaaggucgacgaccugcgggccgacacgaucuccagccagaucgagcuggcggugcuccuguccaacgagggcaucaucaacagcgaggacgagcaccuccuggcccuggagcgcaagcugaagaagaugcucgggcccuccgccguggacaucggcaacgggugcuucgagaccaagcacaagugcaaccagaccugccuggaccggaucgccgcgggcaccuucaacgccggggaguucagccugcccaccuucgacucccucaacaucacggccgccagccugaacgacgacggccuggacaaccacaccauccugcucuacuacuccaccgccgcgagcucccuggccgucacccugaugcucgccaucuucaucguguacauggugagccgcgacaacgucuccugcagcaucugccuguga

SEQ ID NO: 91547 - RNA, 1755 nt, Artificial Sequence
  derived and/or modified CDS sequence (opt1) from hemagglutinin__InfluenzaB__AGX21754
augaaggccaucaucgugcugcucauggucgugaccagcaacgccgaccgcaucugcaccggcaucacguccagcaacagcccccacguggucaagaccgcgacccagggggaggugaacgugaccggcgccaucccgcugacgaccacccccgccaagucccacuucgccaaccugaaggggaccaagacgcggggcaagcucugcccgaccugccugaacugcaccgaccuggacgucgcccucgggggccccaugugcgugggcaucaccccguccgcgaaggccagcauccugcacgaggugcgccccgucacguccgggugcuuccccaucaugcacgaccggaccaagauccgccagcugcccaaccuccugcggggcuacgagaagauccgccugagcgcccagaacgugaucaacgccgagaaggcgcccgggggccccuacaagcucgggaccuccggcagcugccccaacgccaccuccaagagcggcuucuucgccacgauggccugggccgugccccgggacgacaacaagaccgcgaccaacccgcugaccgucgaggugccccacaucugcgccaacgaggaggaccagaucacgguguggggguuccacuccgacaacaagacccagaugaagaaccuguacggcgacagcaacccccagaaguucaccuccagcgccaacgggaucaccacgcacuacgucucccagaucggcggcuuccccgaccagaccgaggacgggggccucccgcagagcgggcgcaucgugguggacuacaugguccagaagcccggcaagaccgggaccaucguguaccagcggggcauccugcugccccagaagguguggugcgccuccggccgcagcaaggucaucaaggggagccucccccugaucggcgaggccgacugccugcacgagaaguacgggggccucaacaaguccaagccguacuacacgggggagcacgcgaaggccaucggcaacugccccaucugggugaagacgccccugaagcuggccaacggcaccaaguaccggcccccggccaagcuccugaaggagcgcggguucuucggcgccaucgcgggguuccuggagggcgggugggagggcaugaucgccggcuggcacggguacaccagccacggcgcccacgggguggccgucgccgcggaccucaaguccacccaggaggccaucaacaagaucaccaagaaccugaacagccuguccgagcucgaggugaagaaccugcagcggcugagcggcgccauggacgagcuccacaacgagauccuggagcuggacgagaaggucgacgaccuccgcgccgacaccaucuccagccagaucgagcuggcggugcugcucuccaacgagggcaucaucaacagcgaggacgagcaccuccuggcccuggagcggaagcugaagaagaugcuggggcccuccgccguggacaucggcaacgggugcuucgagaccaagcacaagugcaaccagacgugccucgaccgcaucgccgccggcaccuucaacgcgggggaguucagccugcccaccuucgacucccugaacaucaccgccgccagccucaacgacgacggccuggacaaccacaccauccugcuguacuacuccacggccgccagcucccucgcggucacccugaugaucgccaucuucaucguguacaugaucagccgggacaacguguccugcagcaucugccuguga

SEQ ID NO: 91548 - RNA, 1755 nt, Artificial Sequence
  derived and/or modified CDS sequence (opt1) from hemagglutinin__InfluenzaB__AGX21776
augaaggccaucaucgugcugcucauggucgugaccagcaacgccgaccgcaucugcaccggcaucacguccagcaacagcccccacguggucaagaccgcgacccagggggaggugaacgugaccggcgucaucccgcugacgaccacccccaccaaguccuacuucgccaaccugaaggggacgcggacccgcggcaagcucugccccgacugccugaacugcaccgaccuggacguggcccucgggcggcccaugugcgugggcaucaccccguccgccaaggccagcauccugcacgagguccgccccgugacguccggcugcuuccccaucaugcacgaccggaccaagauccgccagcugcccaaccuccugcggggguacgagaacauccgccugagcacccagaacgugaucgacgcggagaaggccccgggcgggcccuaccggcucggcaccuccgggagcugccccaacgccacguccaagagcggcuucuucgccaccauggcgugggccguccccaaggacaacaacaagaacgccaccaacccgcugaccguggaggugcccuacgucugcacggagggcgaggaccagaucaccguguggggguuccacuccgacaacaagacccagaugaagaaccuguacggcgacagcaacccccagaaguucaccuccagcgccaacggggugacgacccacuacgucucccagaucggcggcuuccccgaccagaccgaggacgggggccucccgcagagcgggcgcaucgugguggacuacaugguccagaagcccggcaagaccgggacgaucguguaccagcggggcgugcugcugccccagaaggucuggugcgccuccggccgcagcaaggugaucaaggggagccucccccugaucggcgaggcggacugccugcacgagaaguacgggggccucaacaaguccaagccguacuacaccggggagcacgccaaggccaucggcaacugccccaucugggucaagacgccccugaagcuggccaacggcaccaaguaccggcccccggccaagcuccugaaggagcgcggguucuucggcgcgaucgccggguuccuggagggcgggugggagggcaugaucgccggcuggcacggguacaccagccacggcgcccacgggguggccguggcggccgaccucaaguccacccaggaggccaucaacaagaucaccaagaaccugaacagccuguccgagcucgaggucaagaaccugcagcggcugagcggcgccauggacgagcuccacaacgagauccuggagcuggacgagaagguggacgaccuccgcgccgacaccaucuccagccagaucgagcuggcggugcugcucuccaacgagggcaucaucaacagcgaggacgagcaccuccuggcccuggagcggaagcugaagaagaugcuggggcccuccgccgucgacaucggcaacgggugcuucgagacgaagcacaagugcaaccagaccugccucgaccgcaucgccgcgggcaccuucaacgccggggaguucagccugcccaccuucgacucccugaacaucaccgccgccagccucaacgacgacggccuggacaaccacacgauccugcuguacuacuccaccgccgcgagcucccucgccgugacccugaugcuggccaucuucaucguguacauggucagccgggacaacguguccugcagcaucugccucuga

SEQ ID NO: 91549 - RNA, 1758 nt, Artificial Sequence; identical to SEQ ID NO: 91003
  derived and/or modified CDS sequence (opt1) from hemagglutinin__InfluenzaB__AGX21787

SEQ ID NO: 91550 - RNA, 1755 nt, Artificial Sequence
  derived and/or modified CDS sequence (opt1) from hemagglutinin__InfluenzaB__AGX21798
augaaggccaucaucgugcugcucauggucgugaccagcaacgccgaccgcaucugcaccggcaucacguccagcaacagcccccacguggucaagaccgcgacccagggggaggugaacgugaccggcgucaucccgcugacgaccacccccaccaaguccuacuucgccaaccugaaggggacgcggacccgcggcaagcucugccccgacugccugaacugcaccgaccuggacguggcccucgggcggcccaugugcgugggcaccacgccguccgccaaggccagcauccugcacgagguccgccccgugaccuccggcugcuuccccaucaugcacgaccggaccaagauccgccagcugcccaaccuccugcggggguacgagaacauccgccugagcacccagaacgugaucgacgcggagaaggccccgggcgggcccuaccggcucggcacguccgggagcugccccaacgccaccuccaagagcggcuucuucgccaccauggcgugggccguccccaaggacaacaacaagaacgccaccaacccgcugacgguggaggugcccuacgucugcaccgagggcgaggaccagaucaccguguggggguuccacuccgacaacaagacccagaugaagaaccuguacggcgacagcaacccccagaaguucacguccagcgccaacggggugaccacccacuacgucucccagaucggcggcuuccccgaccagaccgaggacgggggccucccgcagagcgggcgcaucgugguggacuacaugguccagaagcccggcaagacggggaccaucguguaccagcggggcgugcugcugccccagaaggucuggugcgccuccggccgcagcaaggugaucaaggggagccucccccugaucggcgaggcggacugccugcacgagaaguacgggggccucaacaaguccaagccguacuacaccggggagcacgccaaggccaucggcaacugccccaucugggucaagacgccccugaagcuggccaacggcaccaaguaccggcccccggccaagcuccugaaggagcgcggguucuucggcgcgaucgccggguuccuggagggcgggugggagggcaugaucgccggcuggcacggguacaccagccacggcgcccacgggguggccguggcggccgaccucaaguccacccaggaggccaucaacaagaucaccaagaaccugaacagccuguccgagcucgaggucaagaaccugcagcggcugagcggcgccauggacgagcuccacaacgagauccuggagcuggacgagaagguggacgaccuccgcgccgacacgaucuccagccagaucgagcuggcggugcugcucuccaacgagggcaucaucaacagcgaggacgagcaccuccuggcccuggagcggaagcugaagaagaugcuggggcccuccgccgucgacaucggcaacgggugcuucgagaccaagcacaagugcaaccagaccugccucgaccgcaucgccgcgggcaccuucaacgccggggaguucagccugcccaccuucgacucccugaacaucacggccgccagccucaacgacgacggccuggacaaccacaccauccugcuguacuacuccaccgccgcgagcucccucgccgugacccugaugcuggccaucuucaucguguacauggucagccgggacaacguguccugcagcaucugccucuga

SEQ ID NO: 91551 - RNA, 1755 nt, Artificial Sequence
  derived and/or modified CDS sequence (opt1) from hemagglutinin__InfluenzaB__AGX21809
augaaggccaucaucgugcugcucauggucgugaccagcaacgccgaccgcaucugcaccggcaucacguccagcaacagcccccacguggucaagaccgcgacccagggggaggugaacgugaccggcgucaucccgcugacgaccacccccaccaaguccuacuucgccaaccugaaggggacgcggacccgcggcaagcucugccccgacugccugaacugcaccgaccuggacguggcccucgggcggcccaugugcgugggcaccacgccguccgccaaggccagcauccugcacgagguccgccccgugaccuccggcugcuuccccaucaugcacgaccggaccaagauccgccagcugcccaaccuccugcggggguacgagaacauccgccugagcacccagaacgugaucgacgcggagaaggccccgggcgggcccuaccggcucggcacguccgggagcugccccaacgccaccuccaagagcggcuucuucgccaccauggcgugggccguccccaaggacaacaacaagaacgccaccaacccgcugacgguggaggugcccuacgucugcaccgagggcgaggaccagaucaccguguggggguuccacuccgacaacaagacccagaugaagaaccuguacggcgacagcaacccccagaaguucacguccagcgccaacggggugaccacccacuacgucucccagaucggcggcuuccccgaccagaccgaggacgggggccucccgcagagcgggcgcaucgugguggacuacaugguccagaagcccggcaagacggggaccaucguguaccagcggggcgugcugcugccccagaaggucuggugcgccuccggccgcagcaaggugaucaaggggagccucccccugaucggcgaggcggacugccugcacgagaaguacgggggccucaacaagucccggccguacuacaccggggagcacgccaaggccaucggcaacugccccaucugggucaagacgccccugaagcuggccaacggcaccaaguaccggcccccggccaagcuccugaaggagcgcggguucuucggcgcgaucgccggguuccuggagggcgggugggagggcaugaucgccggcuggcacggguacaccagccacggcgcccacgggguggccguggcggccgaccucaaguccacccaggaggccaucaacaagaucaccaagaaccugaacagccuguccgagcucgaggucaagaaccugcagcgccugagcggcgccauggacgagcuccacaacgagauccuggagcuggacgagaagguggacgaccuccgggccgacacgaucuccagccagaucgagcuggcggugcugcucuccaacgagggcaucaucaacagcgaggacgagcaccuccuggcccuggagcgcaagcugaagaagaugcuggggcccuccgccgucgacaucggcaacgggugcuucgagaccaagcacaagugcaaccagaccugccucgaccggaucgccgcgggcaccuucaacgccggggaguucagccugcccaccuucgacucccugaacaucacggccgccagccucaacgacgacggccuggacaaccacaccauccugcuguacuacuccaccgccgcgagcucccucgccgugacccugaugcuggccaucuucaucguguacauggucagccgcgacaacguguccugcagcaucugccucuga

SEQ ID NO: 91552 - RNA, 1755 nt, Artificial Sequence
  derived and/or modified CDS sequence (opt1) from hemagglutinin__InfluenzaB__AGX21820
augaaggccaucaucgugcugcucauggucgugaccagcaacgccgaccgcaucugcaccggcaucacguccagcaacagcccccacguggucaagaccgcgacccagggggaggugaacgugaccggcgucaucccgcugacgaccacccccaccaaguccuacuucgccaaccugaaggggacgcggacccgcggcaagcucugccccgacugccugaacugcaccgaccuggacguggcccucgggcggcccaugugcgugggcaccacgccguccgccaaggccagcauccugcacgagguccgccccgugaccuccggcugcuuccccaucaugcacgaccggaccaagauccgccagcugcccaaccuccugcggggguacgagaacauccgccugagcacccagaacgugaucgacgcggagaaggccccgggcgggcccuaccggcucggcacguccgggagcugccccaacgccaccaacaaguccggcuucuucgccaccauggcgugggccguccccaaggacaacaacaagaacgccaccaacccgcugacgguggaggugcccuacaucugcaccgagggcgaggaccagaucaccgucuggggguuccacagcgacaacaagacccagaugaagaaccuguacggcgacuccaacccccagaaguucacgagcuccgccaacggggugaccacccacuacgugagccagaucggcggcuuccccgaccagaccgaggacgggggccucccgcaguccgggcgcaucgucguggacuacaugaugcagaagcccggcaagacggggaccaucguguaccagcggggcguccugcugccccagaagguguggugcgccagcggccgcuccaaggugaucaaggggagccucccccugaucggcgaggcggacugccugcacgagaaguacgggggccucaacaagagcaagccguacuacaccggggagcacgccaaggccaucggcaacugccccaucugggucaagacgccccugaagcuggccaacggcaccaaguaccggcccccggccaagcuccugaaggagcgcggguucuucggcgcgaucgccggguuccuggagggcgggugggagggcaugaucgccggcuggcacggguacaccucccacggcgcccacgggguggccgucgcggccgaccucaagagcacccaggaggccaucaacaagaucaccaagaaccugaacucccugagcgagcucgaggugaagaaccugcagcggcuguccggcgccauggacgagcuccacaacgagauccuggagcuggacgagaagguggacgaccuccgcgccgacacgaucagcucccagaucgagcuggcgguccugcucagcaacgagggcaucaucaacuccgaggacgagcaccuccuggcccuggagcggaagcugaagaagaugcuggggcccagcgccguggacaucggcaacgggugcuucgagaccaagcacaagugcaaccagaccugccucgaccgcaucgccgcgggcaccuucaacgccggggaguucucccugcccaccuucgacagccugaacaucacggccgccucccucaacgacgacggccuggacaaccacaccauccugcuguacuacagcaccgccgcguccagccucgccgugacccugaugcuggccaucuucaucgucuacauggugucccgggacaacgugagcugcuccaucugccucuga

SEQ ID NO: 91553 - RNA, 1755 nt, Artificial Sequence; identical to SEQ ID NO: 91047
  derived and/or modified CDS sequence (opt1) from hemagglutinin__InfluenzaB__AGX21831

SEQ ID NO: 91554 - RNA, 1755 nt, Artificial Sequence; identical to SEQ ID NO: 91050
  derived and/or modified CDS sequence (opt1) from hemagglutinin__InfluenzaB__AGX21842

SEQ ID NO: 91555 - RNA, 1755 nt, Artificial Sequence; identical to SEQ ID NO: 91050
  derived and/or modified CDS sequence (opt1) from hemagglutinin__InfluenzaB__AGX21853

SEQ ID NO: 91556 - RNA, 1755 nt, Artificial Sequence
  derived and/or modified CDS sequence (opt1) from hemagglutinin__InfluenzaB__AGX21864
augaaggccaucaucgugcugcucauggucgugaccagcaacgccgaccgcaucugcaccggcaucacguccagcaacagcccccacguggucaagaccgcgacccagggggaggugaacgugaccggcgucaucccgcugacgaccacccccaccaaguccuacuucgccaaccugaaggggacgcggacccgcggcaagcucugccccgacugccugaacugcaccgaccuggacguggcccucgggcggcccaugugcgugggcaccacgccguccgccaaggccagcauccugcacgagguccgccccgugaccuccggcugcuuccccaucaugcacgaccggaccaagauccgccagcugcccaaccuccugcggggguacgagaacauccgccugagcaaccagaacgugaucgacgcggagaaggccccgggcgggcccuaccggcucggcaccuccgggagcugccccaacgccacguccaagagcggcuucuucgccaccauggcgugggccguccccaaggacaacaacaagaacgccaccaacccgcugaccguggaggugcccuacaucugcacggagggcgaggaccagaucaccgucuggggguuccacuccgacaacaagacccagaugaagaaccuguacggcgacagcaacccccagaaguucaccuccagcgccaacggggugacgacccacuacgugucccagaucggcggcuuccccgaccagaccgaggacgggggccucccgcagagcgggcgcaucgucguggacuacaugaugcagaagcccggcaagaccgggacgaucguguaccagcggggcguccugcugccccagaagguguggugcgccuccggccgcagcaaggugaucaaggggagccucccccugaucggcgaggcggacugccugcacgagaaguacgggggccucaacaaguccaagccguacuacaccggggagcacgccaaggccaucggcaacugccccaucugggucaagacgccccugaagcuggccaacggcaccaaguaccggcccccggccaagcuccugaaggagcgcggguucuucggcgcgaucgccggguuccuggagggcgggugggagggcaugaucgccggcuggcacggguacaccagccacggcgcccacgggguggccgucgcggccgaccucaaguccacccaggaggccaucaacaagaucaccaagaaccugaacagccuguccgagcucgaggugaagaaccugcagcggcugagcggcgccauggacgagcuccacaacgagauccuggagcuggacgagaagguggacgaccuccgcgccgacaccaucuccagccagaucgagcuggcgguccugcucuccaacgagggcaucaucaacagcgaggacgagcaccuccuggcccuggagcggaagcugaagaagaugcuggggcccuccgccguggacaucggcaacgggugcuucgagacgaagcacaagugcaaccagaccugccucgaccgcaucgccgcgggcaccuucaacgccggggaguucagccugcccaccuucgacucccugaacaucaccgccgccagccucaacgacgacggccuggacaaccacacgauccugcuguacuacuccaccgccgcgagcucccucgccgugacccugaugcuggccaucuucaucgucuacauggugagccgggacaacguguccugcagcaucugccucuga

SEQ ID NO: 91557 - RNA, 1755 nt, Artificial Sequence; identical to SEQ ID NO: 91048
  derived and/or modified CDS sequence (opt1) from hemagglutinin__InfluenzaB__AGX21875

SEQ ID NO: 91558 - RNA, 1755 nt, Artificial Sequence; identical to SEQ ID NO: 91047
  derived and/or modified CDS sequence (opt1) from hemagglutinin__InfluenzaB__AGX21886

SEQ ID NO: 91559 - RNA, 1755 nt, Artificial Sequence; identical to SEQ ID NO: 91047
  derived and/or modified CDS sequence (opt1) from hemagglutinin__InfluenzaB__AGX21897

SEQ ID NO: 91560 - RNA, 1755 nt, Artificial Sequence; identical to SEQ ID NO: 91047
  derived and/or modified CDS sequence (opt1) from hemagglutinin__InfluenzaB__AGX21908

SEQ ID NO: 91561 - RNA, 1755 nt, Artificial Sequence
  derived and/or modified CDS sequence (opt1) from hemagglutinin__InfluenzaB__AGX21919
augaaggccaucaucgugcugcucauggucgugaccagcaacgccgaccgcaucugcaccggcaucacguccagcaacagcccccacguggucaagaccgcgacccagggggaggugaacgugaccggcgucaucccgcugacgaccacccccaccaaguccuacuucgccaaccugaaggggacgcggacccgcggcaagcucugccccgacugccugaacugcaccgaccuggacguggcccucgggcggcccaugugcgugggcaccacgccguccgccaaggccagcauccugcacgagguccgccccgugaccuccggcugcuuccccaucaugcacgaccggaccaagauccgccagcugcccaaccuccugcggggguacgagaacauccgccugagcacccagaacgugaucgacgcggagaaggccccgggcgggcccuaccggcucggcacguccgggagcugccccaacgccaccuccaagagcggcuucuucgccaccauggcgugggccguccccaaggacaacaacaagaacgccaccaacccgcugacgguggaggugcccuacaucugcaccgagggcgaggaccagaucaccgucuggggguuccacuccgacaacaagacccagaugaagaaccuguacggcgacagcaacccccagaaguucacguccagcgccaacggggugaccacccacuacgugucccagaucggcggcuuccccgaccagaccgaggacgggggccucccgcagagcgggcgcaucgucguggacuacaugaugcagaagcccggcaaggccgggacgaucguguaccagcggggcguccugcugccccagaagguguggugcgcguccggccgcagcaaggugaucaaggggagccucccccugaucggcgaggccgacugccugcacgagaaguacgggggccucaacaaguccaagccguacuacaccggggagcacgccaaggccaucggcaacugccccaucugggucaagacgccccugaagcuggccaacggcaccaaguaccggcccccggcgaagcuccugaaggagcgcggguucuucggcgccaucgccggguuccuggagggcgggugggagggcaugaucgccggcuggcacggguacaccagccacggcgcccacgggguggcggucgccgccgaccucaaguccacccaggaggccaucaacaagaucaccaagaaccugaacagccuguccgagcucgaggugaagaaccugcagcggcugagcggcgccauggacgagcuccacaacgagauccuggagcuggacgagaagguggacgaccuccgcgcggacaccaucuccagccagaucgagcuggccguccugcucuccaacgagggcaucaucaacagcgaggacgagcaccuccuggcccuggagcggaagcugaagaagaugcuggggcccuccgccguggacaucggcaacgggugcuucgagacgaagcacaagugcaaccagaccugccucgaccgcaucgcggccggcaccuucaacgccggggaguucagccugcccaccuucgacucccugaacaucaccgccgccagccucaacgacgacggccuggacaaccacacgauccugcuguacuacuccaccgcggccagcucccucgccgugacccugaugcuggccaucuucaucgucuacauggugagccgggacaacguguccugcagcaucugccucuga

SEQ ID NO: 91562 - RNA, 1755 nt, Artificial Sequence; identical to SEQ ID NO: 91050
  derived and/or modified CDS sequence (opt1) from hemagglutinin__InfluenzaB__AGX21941

SEQ ID NO: 91563 - RNA, 1755 nt, Artificial Sequence; identical to SEQ ID NO: 91047
  derived and/or modified CDS sequence (opt1) from hemagglutinin__InfluenzaB__AGX21952

SEQ ID NO: 91564 - RNA, 1755 nt, Artificial Sequence; identical to SEQ ID NO: 91050
  derived and/or modified CDS sequence (opt1) from hemagglutinin__InfluenzaB__AGX21963

SEQ ID NO: 91565 - RNA, 1755 nt, Artificial Sequence
  derived and/or modified CDS sequence (opt1) from hemagglutinin__InfluenzaB__AGX21974
augaaggccaucaucgugcugcucauggucgugaccagcaacgccgaccgcaucugcaccggcaucacguccagcaacagcccccacguggucaagaccgcgacccagggggaggugaacgugaccggcgucaucccgcugacgaccacccccaccaaguccuacuucgccaaccugaaggggacgcggacccgcggcaagcucugccccgacugccugaacugcaccgaccuggacguggcccucgggcggcccaugugcgugggcaccacgccguccgccaaggccagcauccugcacgagguccgccccgugaccuccggcugcuuccccaucaugcacgaccggaccaagauccgccagcugcccaaccuccugcggggguacgagaacauccgccugagcacccagaacgugaucgacgcggagaaggccccgggcgggcccuaccggcucggcacguccgggagcugccccaacgccaccuccaagagcggcuucuucgccaccauggcgugggccguccccaaggugaacaacaagaacgccaccaacccgcugacgguggagguccccuacaucugcaccgagggcgaggaccagaucaccguguggggguuccacuccgacaacaagacccagaugaagaaccuguacggcgacagcaacccccagaaguucacguccagcgccaacggggugaccacccacuacgucucccagaucggcagcuuccccgaccagaccgaggacggcgggcucccgcaguccggccgcaucgugguggacuacaugaugcagaagcccgggaagacgggcaccaucgucuaccagcgcggggugcugcugccccagaagguguggugcgccagcggccggagcaaggucaucaagggcucccucccccugaucggggaggcggacugccugcacgagaaguacggcgggcucaacaagagcaagccguacuacaccggcgagcacgccaaggccaucgggaacugccccaucugggugaagacgccccugaagcuggccaacggcaccaaguaccggcccccggccaagcuccugaaggagcgcggcuucuucggggcgaucgccggcuuccuggagggcgggugggaggggaugaucgccggcuggcacggcuacaccucccacggggcccacggcgucgccguggcggccgaccucaagagcacccaggaggccaucaacaagaucaccaagaaccugaacucccugagcgagcucgaggugaagaaccugcagcggcuguccggggccauggacgagcuccacaacgagauccuggagcuggacgagaaggucgacgaccuccgcgccgacacgaucagcucccagaucgagcuggcggugcugcucagcaacgagggcaucaucaacuccgaggacgagcaccuccuggcccuggagcggaagcugaagaagaugcugggccccagcgccguggacaucgggaacggcugcuucgagaccaagcacaagugcaaccagaccugccucgaccgcaucgccgcggggaccuucaacgccggcgaguucucccugcccaccuucgacagccugaacaucacggccgccucccucaacgacgacgggcuggacaaccacaccauccugcuguacuacagcaccgccgcguccagccucgccgucacccugaugcuggccaucuucaucguguacaugaucucccgggacaacgugagcugcagcaucugccucuga

SEQ ID NO: 91566 - RNA, 1755 nt, Artificial Sequence; identical to SEQ ID NO: 91050
  derived and/or modified CDS sequence (opt1) from hemagglutinin__InfluenzaB__AGX21985

SEQ ID NO: 91567 - RNA, 1755 nt, Artificial Sequence; identical to SEQ ID NO: 91048
  derived and/or modified CDS sequence (opt1) from hemagglutinin__InfluenzaB__AGX21996

SEQ ID NO: 91568 - RNA, 1755 nt, Artificial Sequence; identical to SEQ ID NO: 91048
  derived and/or modified CDS sequence (opt1) from hemagglutinin__InfluenzaB__AGX22007

SEQ ID NO: 91569 - RNA, 1755 nt, Artificial Sequence; identical to SEQ ID NO: 91047
  derived and/or modified CDS sequence (opt1) from hemagglutinin__InfluenzaB__AGX22018

SEQ ID NO: 91570 - RNA, 1755 nt, Artificial Sequence; identical to SEQ ID NO: 91047
  derived and/or modified CDS sequence (opt1) from hemagglutinin__InfluenzaB__AGX22029

SEQ ID NO: 91571 - RNA, 1755 nt, Artificial Sequence; identical to SEQ ID NO: 91047
  derived and/or modified CDS sequence (opt1) from hemagglutinin__InfluenzaB__AGX22040

SEQ ID NO: 91572 - RNA, 1755 nt, Artificial Sequence
  derived and/or modified CDS sequence (opt1) from hemagglutinin__InfluenzaB__AGX22051
augaaggccaucaucgugcugcucauggucgugaccagcaacgccgaccgcaucugcaccggcaucacguccagcaacagcccccacguggucaagaccgcgacccagggggaggugaacgugaccggcgucaucccgcugacgaccacccccaccaaguccuacuucgccaaccugaaggggacgcggacccgcggcaagcucugccccgacugccugaacugcaccgaccuggacguggcccucgggcggcccaugugcgugggcaccacgccguccgccaaggccagcauccugcacgagguccgccccgugaccuccggcugcuuccccaucaugcacgaccggaccaagauccgccagcugcccaaccuccugcggggguacgagaacauccgccugagcacccagaacgugaucgacgcggagaaggccccgggcgggcccuaccggcucggcacguccgggagcugccccaacgccaccuccaagagcggcuucuucgccaccauggcgugggccguccccaaggacaacaacaagaacgccaccaacccgcugacgguggaggugcccuacaucugcaccgagggcgaggaccagaucaccgucuggggguuccacuccgacaacaagacccagaugaagaaccuguacggcgacagcaacccccagaaguucacguccagcgccaacggggugaccacccacuacgugucccagaucggcggcuuccccgaccagaucgaggacgggggccucccgcagagcgggcgcaucgucguggacuacaugaugcagaagcccggcaagaccgggacgaucguguaccagcggggcguccugcugccccagaagguguggugcgccuccggccgcagcaaggugaucaaggggagccucccccugaucggcgaggcggacugccugcacgagaaguacgggggccucaacaaguccaagccguacuacaccggggagcacgccaaggccaucggcaacugccccaucugggucaagacgccccugaagcuggccaacggcaccaaguaccggcccccggccaagcuccugaaggagcgcggguucuucggcgcgaucgccggguuccuggagggcgggugggagggcaugaucgccggcuggcacggguacaccagccacggcgcccacgggguggccgucgcggccgaccucaaguccacccaggaggccaucaacaagaucaccaagaaccugaacagccuguccgagcucgaggugaagaaccugcagcggcugagcggcgccauggacgcccuccacaacgagauccuggagcuggacgagaagguggacgaccuccgcgcggacaccaucuccagccagaucgagcuggccguccugcucuccaacgagggcaucaucaacagcgaggacgagcaccuccuggcccuggagcggaagcugaagaagaugcuggggcccuccgccguggagaucggcaacgggugcuucgagacgaagcacaagugcaaccagaccugccucgaccgcaucgcggccggcaccuucaacgccggggaguucagccugcccaccuucgacucccugaacaucaccgccgccagccucaacgacgacggccuggacaaccacacgauccugcuguacuacuccaccgcggccagcucccucgccgugacccugaugcuggccaucuucaucgucuacauggugagccgggacaacguguccugcagcaucugccucuga

SEQ ID NO: 91573 - RNA, 1755 nt, Artificial Sequence; identical to SEQ ID NO: 91047
  derived and/or modified CDS sequence (opt1) from hemagglutinin__InfluenzaB__AGX22062

SEQ ID NO: 91574 - RNA, 1755 nt, Artificial Sequence
  derived and/or modified CDS sequence (opt1) from hemagglutinin__InfluenzaB__AGX22073
augaaggccaucaucgugcugcucauggucgugaccagcaacgccgaccgcaucugcaccggcaucacguccagcaacagcccccacguggucaagaccgcgacccagggggaggugaacgugaccggcgucaucccgcugacgaccacccccaccaaguccuacuucgccaaccugaaggggacgcggacccgcggcaagcucugccccgacugccugaacugcaccgaccuggacguggcccucgggcggcccaugugcgugggcaccacgccguccgccaaggccagcauccugcacgagguccgccccgugaccuccggcugcuuccccaucaugcacgaccggaccaagauccgccagcugcccaaccuccugcggggguacgagaacauccgccugagcacccagaacgugaucgacgcggagaaggccccgggcgggcccuaccggcucggcacguccgggagcugccccaacgccaccuccaagagcggcuucuucgccaccauggcgugggccguccccaaggacaacaacaagaacgccaccaacccgcugacgguggaggugcccuacaucugcaccgagggcgaggaccagaucaccgucuggggguuccacuccgacaacaagacccagaugaagaaccuguacggcgacagcaacccccagaaguucacguccagcgccaacggggugaccacccacuacgugucccagaucggcggcuuccccgaccagaccgaggacgggggccucccgcagagcgggcgcaucgucguggacuacaugaugcagaagcccggcaagacggggaccaucguguaccagcggggcguccugcugccccagaagguguggugcgccuccggccgcagcaaggugaucaaggggagccucccccugaucggcgaggcggacugccugcacgagaaguacgggggccucaacaaguccaagccguacuacaccggggagcacgccaaggccaucggcaacugccccaucugggucaagacgccccugaagcuggccaacggcaccaaguaccggcccccggccaagcuccugaaggagcgcggguucuucggcgcgaucgccggguucaucgagggcgggugggagggcaugaucgccggcuggcacggguacaccagccacggcgcccacgggguggccgucgcggccgaccugaaguccacccaggaggccaucaacaagaucaccaagaaccucaacagccuguccgagcuggaggugaagaaccuccagcggcugagcggcgccauggacgagcugcacaacgagauccucgagcuggacgagaagguggacgaccugcgcgccgacacgaucuccagccagaucgagcucgcgguccugcuguccaacgagggcaucaucaacagcgaggacgagcaccuccuggcccuggagcggaagcucaagaagaugcuggggcccuccgccguggacaucggcaacgggugcuucgagaccaagcacaagugcaaccagaccugccuggaccgcaucgccgcgggcaccuucaacgccggggacuucagccuccccaccuucgacucccugaacaucacggccgccagccugaacgacgacggccucgacaaccacaccauccugcuguacuacuccaccgccgcgagcucccuggccgugacccucaugcuggccaucuucaucgucuacauggugagccgggacaacguguccugcagcaucugccuguga

SEQ ID NO: 91575 - RNA, 1755 nt, Artificial Sequence; identical to SEQ ID NO: 91050
  derived and/or modified CDS sequence (opt1) from hemagglutinin__InfluenzaB__AGX22095

SEQ ID NO: 91576 - RNA, 1755 nt, Artificial Sequence; identical to SEQ ID NO: 91048
  derived and/or modified CDS sequence (opt1) from hemagglutinin__InfluenzaB__AGX22106

SEQ ID NO: 91577 - RNA, 1755 nt, Artificial Sequence
  derived and/or modified CDS sequence (opt1) from hemagglutinin__InfluenzaB__AGX22128
augaaggccaucaucgugcugcucauggucgugaccagcaacgccgaccgcaucugcaccggcaucacguccagcaacagcccccacguggucaagaccgcgacccagggggaggugaacgugaccggcgucaucccgcugacgaccacccccaccaaguccuacuucgccaaccugaaggggacgcggacccgcggcaagcucugccccgacugccugaacugcaccgaccuggacguggcccucgggcggcccaugugcgugggcaccacgccguccgccaaggccagcauccugcacgagguccgccccgugaccuccggcugcuuccccaucaugcacgaccggaccaagauccgccagcugcccaaccuccugcggggguacgagaacauccgccugagcacccagaacgugaucgacgcggagaacgccccgggcgggcccuaccggcucggcacguccgggagcugccccaacgccaccuccaagagcggcuucuucgccaccauggcgugggccguccccaaggacaacaacaagaacgccaccaacccgcugacgguggaggugcccuacgucugcaccgagggcgaggaccagaucaccguguggggguuccacuccgacaacaagacccagaugaagaaccuguacggcgacagcaacccccagaaguucacguccagcgccaacggggugaccacccacuacgucucccagaucggcggcuuccccgcccagaccgaggacgggggccucccgcagagcgggcgcaucgugguggacuacaugguccagaagccccggaagacgggcaccaucguguaccagcgcggggugcugcugccccagaaggucuggugcgcguccggccggagcaaggugaucaagggcagccucccccugaucggggaggccgacugccugcacgagaaguacggcgggcucaacaaguccaagccguacuacaccggcgagcacgccaaggccaucgggaacugccccaucugggucaagacgccccugaagcuggccaacggcaccaaguaccggcccccggcgaagcuccugaaggagcgcggcuucuucggggccaucgccggcuuccuggagggcgggugggaggggaugaucgccggcuggcacggcuacaccagccacggggcccacggcguggcgguggccgccgaccucaaguccacccaggaggccaucaacaagaucaccaagaaccugaacagccuguccgagcucgagaucaagaaccugcagcgccugagcggggccaugaacgagcuccacaacgagauccuggagcuggacgagaaggucgacgaccuccgggcggacacgaucuccagccagaucgagcuggccgugcugcucuccaacgagggcaucaucaacagcgaggacgagcaccuccuggcccuggagcgcaagcugaagaagaugcugggccccuccgccguggacaucgggaacggcugcuucgagaccaagcacaagugcaaccagaccugccucgaccggaucgcggccgggaccuucaacgccggcgaguucagccugcccaccuucgacucccugaacaucacggccgccagccucaacgacgacgggcuggacaaccacaccauccugcuguacuacuccaccgcggccagcucccucgccgucacccugaugcuggccaucuucaucguguacauggugagccgcgacaacgucuccugcagcaucugccucuga

SEQ ID NO: 91578 - RNA, 1755 nt, Artificial Sequence
  derived and/or modified CDS sequence (opt1) from hemagglutinin__InfluenzaB__AGX22139
augaaggccaucaucgugcugcucauggucgugaccagcaacgccgaccgcaucugcaccggcaucacguccagcaacagcccccacguggucaagaccgcgacccagggggaggugaacgugaccggcgucaucccgcugacgaccacccccaccaaguccuacuucgccaaccugaaggggacgcggacccgcggcaagcucugccccgacugccugaacugcaccgaccuggacguggcccucgggcggcccaugugcgugggcaccacgccguccgccgaggccagcauccugcacgagguccgccccgugaccuccggcugcuuccccaucaugcacgaccggaccaagauccgccagcugcccaaccuccugcggggguacgagaacauccgccugagcacccagaacgugaucgacgcggagaaggccccgggcgggcccuaccggcucggcacguccgggagcugccccaacgccaccuccaagagcggcuucuucgccaccauggcgugggccguccccaaggacaacaacaagaacgccaccaacccgcugacgguggaggugcccuacaucugcaccgagggcgaggaccagaucaccgucuggggguuccacuccgacaacaagacccagaugaagaaccuguacggcgacagcaacccccagaaguucacguccagcgccaacggggugaccacccacuacgugucccagaucggcggcuuccccgaccagaccgaggacgggggccucccgcagagcgggcgcaucgucguggacuacaugaugcagaagcccggcaagacggggaccaucguguaccagcggggcguccugcugccccagaagguguggugcgccuccggccgcagcaaggugaucaaggggagccucccccugaucggcgaggcggacugccugcacgagaaguacgggggccucaacaaguccaagccguacuacaccggggagcacgccaaggccaucggcaacugccccaucugggucaagacgccccugaagcuggccaacggcaccaaguaccggcccccggccaagcuccugaaggagcgcggguucuucggcgcgaucgccggguuccuggagggcgggugggagggcaugaucgccggcuggcacggguacaccagccacggcgcccacgggguggccgucgcggccgaccucaaguccacccaggaggccaucaacaagaucaccaagaaccugaacagccuguccgagcucgaggugaagaaccugcagcggcugagcggcgccauggacgagcuccacaacgagauccuggagcuggacgagaagguggacgaccuccgcgccgacacgaucuccagccagaucgagcuggcgguccugcucuccaacgagggcaucaucaacagcgaggacgagcaccuccuggcccuggagcggaagcugaagaagaugcuggggcccuccgccguggacaucggcaacgggugcuucgagaccaagcacaagugcaaccagaccugccucgaccgcaucgccgcgggcaccuucaacgccggggaguucagccugcccaccuucgacucccugaacaucacggccgccagccucaacgacgacggccuggacaaccacaccauccugcuguacuacuccaccgccgcgagcucccucgccgugacccugaugcuggccaucuucaucgucuacauggugagccgggacaacguguccugcagcaucugccucuga

SEQ ID NO: 91579 - RNA, 1755 nt, Artificial Sequence; identical to SEQ ID NO: 91578
  derived and/or modified CDS sequence (opt1) from hemagglutinin__InfluenzaB__AGX22150

SEQ ID NO: 91580 - RNA, 1755 nt, Artificial Sequence; identical to SEQ ID NO: 91578
  derived and/or modified CDS sequence (opt1) from hemagglutinin__InfluenzaB__AGX22161

SEQ ID NO: 91581 - RNA, 1755 nt, Artificial Sequence; identical to SEQ ID NO: 91047
  derived and/or modified CDS sequence (opt1) from hemagglutinin__InfluenzaB__AGX22172

SEQ ID NO: 91582 - RNA, 1755 nt, Artificial Sequence; identical to SEQ ID NO: 91578
  derived and/or modified CDS sequence (opt1) from hemagglutinin__InfluenzaB__AGX22183

SEQ ID NO: 91583 - RNA, 1755 nt, Artificial Sequence; identical to SEQ ID NO: 91578
  derived and/or modified CDS sequence (opt1) from hemagglutinin__InfluenzaB__AGX22194

SEQ ID NO: 91584 - RNA, 1755 nt, Artificial Sequence; identical to SEQ ID NO: 91578
  derived and/or modified CDS sequence (opt1) from hemagglutinin__InfluenzaB__AGX22205

SEQ ID NO: 91585 - RNA, 1755 nt, Artificial Sequence; identical to SEQ ID NO: 91048
  derived and/or modified CDS sequence (opt1) from hemagglutinin__InfluenzaB__AGX22216

SEQ ID NO: 91586 - RNA, 1755 nt, Artificial Sequence; identical to SEQ ID NO: 91050
  derived and/or modified CDS sequence (opt1) from hemagglutinin__InfluenzaB__AGX22227

SEQ ID NO: 91587 - RNA, 1755 nt, Artificial Sequence
  derived and/or modified CDS sequence (opt1) from hemagglutinin__InfluenzaB__AGX22238
augaaggccaucaucgugcugcucauggucgugaccagcaacgccgaccgcaucugcaccggcaucacguccagcaacagcccccacauggugaagaccgcgacccagggggaggucaacgugaccggcgugaucccgcugacgaccacccccaccaaguccuacuucgccaaccugaaggggacgcggacccgcggcaagcucugccccgacugccugaacugcaccgaccuggacgucgcccucgggcggcccaugugcgugggcaccacgccguccgccaaggccagcauccugcacgaggugcgccccgucaccuccggcugcuuccccaucaugcacgaccggaccaagauccgccagcugcccaaccuccugcggggguacgagaacauccgccugagcacccagaacgugaucgacgcggagaaggccccgggcgggcccuaccggcucggcacguccgggagcugccccaacgccaccuccaagagcggcuucuucgccaccauggcgugggccgugcccaaggacaacaacaagaacgccaccaacccgcugacggucgaggugcccuacaucugcaccgagggcgaggaccagaucaccguguggggguuccacuccgacaacaagacccagaugaagaaccuguacggcgacagcaacccccagaaguucacguccagcgccaacggggucaccacccacuacgugucccagaucggcggcuuccccgaccagaccgaggacgggggccucccgcagagcgggcgcaucguggucgacuacaugaugcagaagcccggcaagacggggaccaucguguaccagcggggcgugcugcugccccagaaggucuggugcgccuccggccgcagcaaggugaucaaggggagccucccccugaucggcgaggcggacugccugcacgagaaguacgggggccucaacaaguccaagccguacuacaccggggagcacgccaaggccaucggcaacugccccaucugggugaagacgccccugaagcuggccaacggcaccaaguaccggcccccggccaagcuccugaaggagcgcggguucuucggcgcgaucgccggguuccuggagggcgggugggagggcaugaucgccggcuggcacggguacaccagccacggcgcccacggggucgccguggcggccgaccucaaguccacccaggaggccaucaacaagaucaccaagaaccugaacagccuguccgagcucgaggucaagaaccugcagcggcugagcggcgccauggacgagcuccacaacgagauccuggagcuggacgagaagguggacgaccuccgcgccgacacgaucuccagccagaucgagcuggcggugcugcucuccaacgagggcaucaucaacagcgaggacgagcaccuccuggcccuggagcggaagcugaagaagaugcuggggcccuccgccgucgacaucggcaacgggugcuucgagaccaagcacaagugcaaccagaccugccucgaccgcaucgccgcgggcaccuucaacgccggggaguucagccugcccaccuucgacucccugaacaucacggccgccagccucaacgacgacggccuggacaaccacaccauccugcuguacuacuccaccgccgcgagcucccucgccgugacccugaugcuggccaucuucaucguguacauggucagccgggacaacguguccugcagcaucugccucuga

SEQ ID NO: 91588 - RNA, 1755 nt, Artificial Sequence; identical to SEQ ID NO: 91048
  derived and/or modified CDS sequence (opt1) from hemagglutinin__InfluenzaB__AGX22249

SEQ ID NO: 91589 - RNA, 1755 nt, Artificial Sequence; identical to SEQ ID NO: 91047
  derived and/or modified CDS sequence (opt1) from hemagglutinin__InfluenzaB__AGX22260

SEQ ID NO: 91590 - RNA, 1755 nt, Artificial Sequence
  derived and/or modified CDS sequence (opt1) from hemagglutinin__InfluenzaB__AGX22271
augaaggccaucaucgugcugcucauggucgugaccagcaacgccgaccgcaucugcaccggcaucacguccagcaacagcccccacguggucaagaccgcgacccagggggaggugaacgugaccggcgucaucccgcugacgaccacccccaccaaguccuacuucgccaaccugaaggggacgcggacccgcggcaagcucugccccgacugccugaacugcaccgaccuggacguggcccucgggcggcccaugugcgugggcaccacgccguccgccaaggccagcauccugcacgagguccgccccgugaccuccggcugcuuccccaucaugcacgaccggaccaagauccgccagcugcccaaccuccugcggggguacgagaacauccgccugagcacccagaacgugaucgacgcggagaaggccccgggcgggcccuaccggcucggcacguccgggagcugccccaacgccaccuccaagagcggcuucuucgccaccauggcgugggccguccccaaggacaacaacaagaacgccaccaacccgcugacgguggaggugcccuacaucugcaccgagggcgaggaccagaucaccgucuggggguuccacuccgacaacaagacccagaugaagaaccuguacggcgacagcaacccccagaaguucacguccagcgccaacggggugaccacccacuacgugucccagaucggcggcuuccccgaccagaccgaggacgggggccucccgcagagcgggcgcaucgucguggacuacaugaugcagaagcccggcaagacggggaccaucguguaccagcggggcguccugcugccccagaagguguggugcgccuccggccgcagcaaggugaucaaggggagccucccccugaucggcgaggcggacugccugcacgagaaguacgggggccucaacaaguccaagccguacuacaccggggagcacgccaaggccaucggcaacugccccaucugggucaagacgccccugaagcuggccaacggcaccaaguaccggcccagcgccaagcuccugaaggagcgcggguucuucggcgcgaucgccggguuccuggagggcgggugggagggcaugaucgccggcuggcacggguacaccucccacggcgcccacgggguggccgucgcggccgaccucaagagcacccaggaggccaucaacaagaucaccaagaaccugaacucccugagcgagcucgaggugaagaaccugcagcggcuguccggcgccauggacgagcuccacaacgagauccuggagcuggacgagaagguggacgaccuccgcgccgacacgaucagcucccagaucgagcuggcgguccugcucagcaacgagggcaucaucaacuccgaggacgagcaccuccuggcccuggagcggaagcugaagaagaugcuggggccgagcgccguggagaucggcaacgggugcuucgagaccaagcacaagugcaaccagaccugccucgaccgcaucgccgcgggcaccuucaacgccggggaguucucccugcccaccuucgacagccugaacaucacggccgccucccucaacgacgacggccuggacaaccacaccauccugcuguacuacagcaccgccgcguccagccucgccgugacccugaugcuggccaucuucaucgucuacauggugucccgggacaacgugagcugcagcaucugccucuga

SEQ ID NO: 91591 - RNA, 1755 nt, Artificial Sequence
  derived and/or modified CDS sequence (opt1) from hemagglutinin__InfluenzaB__AGX22282
augaaggccaucaucgugcugcucauggucgugaccagcaacgccgaccgcaucugcaccggcaucacguccagcaacagcccccacguggucaagaccgcgacccagggggaggugaacgugaccggcgucaucccgcugacgaccacccccaccaaguccuacuucgccaaccugaaggggacgcggacccgcggcaagcucugccccgacugccugaacugcaccgaccuggacguggcccucgggcggcccaugugcgugggcaccacgccguccgccaaggccagcauccugcacgagguccgccccgugaccuccggcugcuuccccaucaugcacgaccggaccaagauccgccagcugcccaaccuccugcggggguacgagaacauccgccugagcacccagaacgugaucgacgcggagaaggccccgggcgggcccuaccggcucggcacguccgggagcugccccaacgccaccuccaagagcggcuucuucgccaccauggcgugggccguccccaaggacaacaacaagaacgccaccaacccgcugacgguggaggugcccuacaucugcaccgagggcgaggaccagaucaccgucuggggguuccacuccgacaacaagacccagaugaagaaccuguacggcgacagcaacccccagaaguucacguccagcgccaacggggugaccacccacuacgugucccagaucggcgacuuccccgaccagaccgaggacggcgggcucccgcagagcggccgcaucgucguggacuacaugaugcagaagcccgggaagacgggcaccaucguguaccagcgcgggguccugcugccccagaagguguggugcgccuccggccggagcaaggugaucaagggcagccucccccugaucggggaggcggacugccugcacgagaaguacggcgggcucaacaaguccaagccguacuacaccggcgagcacgccaaggccaucgggaacugccccaucugggucaagacgccccugaagcuggccaacggcaccaaguaccggcccccggccaagcuccugaaggagcgcggcuucuucggggcgaucgccggcuuccuggagggcgggugggaggggaugaucgccggcuggcacggcuacaccagccacggggcccacggcguggccgucgcggccgaccucaaguccacccaggaggccaucaacaagaucaccaagaaccugaacagccuguccgagcucgaggugaagaaccugcagcggcugagcggggccauggacgagcuccacaacgagauccuggagcuggacgagaagguggacgaccuccgcgccgacacgaucuccagccagaucgagcuggcgguccugcucuccaacgagggcaucaucaacagcgaggacgagcaccuccuggcccuggagcggaagcugaagaagaugcugggccccuccgccguggacaucgggaacggcugcuucgagaccaagcacaagugcaaccagaccugccucgaccgcaucgccgcggggaccuucaacgccggcgaguucagccugcccaccuucgacucccugaacaucacggccgccagccucaacgacgacgggcuggacaaccacaccauccugcuguacuacuccaccgccgcgagcucccucgccgugacccugaugcuggccaucuucaucgucuacauggugagccgggacaacguguccugcagcaucugccucuga

SEQ ID NO: 91592 - RNA, 1755 nt, Artificial Sequence; identical to SEQ ID NO: 91047
  derived and/or modified CDS sequence (opt1) from hemagglutinin__InfluenzaB__AGX22293

SEQ ID NO: 91593 - RNA, 1755 nt, Artificial Sequence
  derived and/or modified CDS sequence (opt1) from hemagglutinin__InfluenzaB__AGX22304
augaaggccaucaucgugcugcucauggucgugaccagcaacgccgaccgcaucugcaccggcaucacguccagcaacagcccccacguggucaagaccgcgacccagggggaggugaacgugaccggcgucaucccgcugacgaccacccccaccaaguccuacuucgccaaccugaaggggacgcggacccgcggcaagcucugccccgacugccugaacugcaccgaccuggacguggcccucgggcggcccaugugcgugggcaccacgccguccgccaaggccagcauccugcacgagguccgccccgugaccuccggcugcuuccccaucaugcacgaccggaccaagauccgccagcugcccaaccuccugcggggguacgagaacauccgccugagcacccagaacgugaucgacgcggagaaggccccgggcgggcccuaccggcucggcacguccgggagcugccccaacgccaccuccaagagcggcuucuucgccaccauggcgugggccguccccaaggacaacaacaagaacgccaccaacccgcugacgguggaggugcccuacaucugcaccgagggcgaggaccagaucaccgucuggggguuccacuccgacaacaagacccagaugaagaaccuguacggcgacagcaacccccagaaguucacguccagcaccaacggggugaccacccacuacgugucccagaucggcggcuuccccgaccagacggaggacgggggccucccgcagagcgggcgcaucgucguggacuacaugaugcagaagcccggcaagaccgggaccaucguguaccagcggggcguccugcugccccagaagguguggugcgccuccggccgcagcaaggugaucaaggggagccucccccugaucggcgaggccgacugccugcacgagaaguacgggggccucaacaaguccaagccguacuacaccggggagcacgcgaaggccaucggcaacugccccaucugggucaagacgccccugaagcuggccaacggcaccaaguaccggcccccggccaagcuccugaaggagcgcggguucuucggcgccaucgcgggguuccuggagggcgggugggagggcaugaucgccggcuggcacggguacaccagccacggcgcccacgggguggccgucgccgcggaccucaaguccacccaggaggccaucaacaagaucacgaagaaccugaacagccuguccgagcucgaggugaagaaccugcagcggcugagcggcgccauggacgagcuccacaacgagauccuggagcuggacgagaagguggacgaccuccgcgccgacaccaucuccagccagaucgagcuggccguccugcucuccaacgagggcaucaucaacagcgaggacgagcaccuccuggcgcuggagcggaagcugaagaagaugcuggggcccuccgccguggacaucggcaacgggugcuucgagaccaagcacaagugcaaccagaccugccucgaccgcaucgccgccggcaccuucaacgcgggggaguucagccugcccacguucgacucccugaacaucaccgccgccagccucaacgacgacggccuggacaaccacaccauccugcuguacuacuccaccgccgccagcucccucgcggugacgcugaugcuggccaucuucaucgucuacauggugagccgggacaacguguccugcagcaucugccucuga

SEQ ID NO: 91594 - RNA, 1755 nt, Artificial Sequence; identical to SEQ ID NO: 91047
  derived and/or modified CDS sequence (opt1) from hemagglutinin__InfluenzaB__AGX22315

SEQ ID NO: 91595 - RNA, 1755 nt, Artificial Sequence; identical to SEQ ID NO: 90450
  derived and/or modified CDS sequence (opt1) from hemagglutinin__InfluenzaB__AGX22326

SEQ ID NO: 91596 - RNA, 1755 nt, Artificial Sequence; identical to SEQ ID NO: 91050
  derived and/or modified CDS sequence (opt1) from hemagglutinin__InfluenzaB__AGX22337

SEQ ID NO: 91597 - RNA, 1755 nt, Artificial Sequence; identical to SEQ ID NO: 91050
  derived and/or modified CDS sequence (opt1) from hemagglutinin__InfluenzaB__AGX22348

SEQ ID NO: 91598 - RNA, 1755 nt, Artificial Sequence
  derived and/or modified CDS sequence (opt1) from hemagglutinin__InfluenzaB__AGX22359
augaaggccaucaucgugcugcucauggucgugaccagcaacgccgaccgcaucugcaccggcaucacguccagcaacagcccccacguggucaagaccgcgacccagggggaggugaacgugaccggcgucaucccgcugacgaccacccccaccaaguccuacuucgccaaccugaaggggacgcggacccgcggcaagcucugccccgacugccugaacugcaccgaccuggacguggcccucgggcggcccaugugcgugggcaccacgccguccgccaaggccagcauccugcacgagguccgccccgugaccuccggcugcuuccccaucaugcacgaccggaccaagauccgccagcugcccaaccuccugcggggguacgagaacauccgccugagcacccagaacgugaucgacgcggagaacgccccgggcgggcccuaccggcucggcacguccgggagcugccccaacgccaccuccaagagcggcuucuucgccaccauggcgugggccguccccaaggacaacaacaagaacgccaccaacccgcugacgguggaggugcccuacgucugcaccgagggcgaggaccagaucaccguguggggguuccacuccgacaacaagacccagaugaagaaccuguacggcgacagcaacccccagaaguucacguccagcgccaacggggugaccacccacuacgucucccagaucggcggcuuccccgcccagaccgaggacgggggccucccgcagagcgggcgcaucgugguggacuacaugguccagaagcccaagaagacgggcaccaucguguaccagcgcggggugcugcugccccagaaggucuggugcgcguccggccggagcaaggugaucaagggcagccucccccugaucggggaggccgacugccugcacgagaaguacggcgggcucaacaaguccaagccguacuacaccggcgagcacgccaaggccaucgggaacugccccaucugggucaagacgccccugaagcuggccaacggcaccaaguaccggcccccggcgaagcuccugaaggagcgcggcuucuucggggccaucgccggcuuccuggagggcgggugggaggggaugaucgccggcuggcacggcuacaccagccacggggcccacggcguggcgguggccgccgaccucaaguccacccaggaggccaucaacaagaucaccaagaaccugaacagccuguccgagcucgagaucaagaaccugcagcggcugagcggggccauggacgagcuccacaacgagauccuggagcuggacgagaaggucgacgaccuccgcgcggacacgaucuccagccagaucgagcuggccgugcugcucuccaacgagggcaucaucaacagcgaggacgagcaccuccuggcccuggagcggaagcugaagaagaugcugggccccuccgccguggacaucgggaacggcugcuucgagaccaagcacaagugcaaccagaccugccucgaccgcaucgcggccgggaccuucaacgccggcgaguucagccugcccaccuucgacucccugaacaucacggccgccagccucaacgacgacgggcuggacaaccacaccauccugcuguacuacuccaccgcggccagcucccucgccgucacccugaugcuggccaucuucaucguguacauggugagccgggacaacgucuccugcagcaucugccucuga

SEQ ID NO: 91599 - RNA, 1755 nt, Artificial Sequence; identical to SEQ ID NO: 91048
  derived and/or modified CDS sequence (opt1) from hemagglutinin__InfluenzaB__AGX22370

SEQ ID NO: 91600 - RNA, 1755 nt, Artificial Sequence
  derived and/or modified CDS sequence (opt1) from hemagglutinin__InfluenzaB__AGX22381
augaaggccaucaucgugcugcucauggucgugaccagcaacgccgaccgcaucugcaccggcaucacguccagcaacagcccccacguggucaagaccgcgacccagggggaggugaacgugaccggcgucaucccgcugacgaccacccccaccaaguccuacuucgccaaccugaaggggacgcggacccgcggcaagcucugccccgacugccugaacugcaccgaccuggacguggcccucgggcggcccaugugcgugggcaccacgccguccgccaaggccagcauccugcacgagguccgccccgugaccuccggcugcuuccccaucaugcacgaccggaccaagauccgccagcugagcaaccuccugcggggguacgagaacauccgccuguccacccagaacgugaucgacgcggagaaggcccccggcgggccguaccggcucggcacgagcggguccugccccaacgccaccagcaaguccggcuucuucgccaccauggcgugggccguccccaaggacaacaacaagaacgccaccaacccccugacgguggaggugccguacaucugcaccgagggcgaggaccagaucaccgucuggggguuccacagcgacaacaagacccagaugaagaaccuguacggcgacuccaacccccagaaguucacgagcuccgccaacggggugaccacccacuacgugagccagaucggcggcuuccccgaccagaccgaggacgggggccucccccaguccgggcgcaucgucguggacuacaugaugcagaagccgggcaagacggggaccaucguguaccagcggggcguccugcugccccagaagguguggugcgccagcggccgcagcaaggugaucaaggggucccucccccugaucggcgaggcggacugccugcacgagaaguacgggggccucaacaagagcaagcccuacuacaccggggagcacgccaaggccaucggcaacugcccgaucugggucaagacgccccugaagcuggccaacggcaccaaguaccggccgcccgccaagcuccugaaggagcgcggguucuucggcgcgaucgccggguuccuggagggcgggugggagggcaugaucgccggcuggcacggguacaccucccacggcgcccacgggguggccgucgcggccgaccucaagagcacccaggaggccaucaacaagaucaccaagaaccugaacucccugagcgagcucgaggugaagaaccugcagcggcuguccggcgccauggacgagcuccacaacgagauccuggagcuggacgagaagguggacgaccuccgcgccgacacgaucagcucccagaucgagcuggcgguccugcucagcaacgagggcaucaucaacuccgaggacgagcaccuccuggcccuggagcggaagcugaagaagaugcuggggcccagcgccguggacaucggcaacgggugcuucgagaccaagcacaagugcaaccagaccugccucgaccgcaucgccgcgggcaccuucaacgccggggaguucucccugcccaccuucgacagccugaacaucacggccgccucccucaacgacgacggccuggacaaccacaccauccugcuguacuacagcaccgccgcguccagccucgccgugacccugaugcuggccaucuucaucgucuacauggugucccgggacaacgugagcugcagcaucugccucuga

SEQ ID NO: 91601 - RNA, 1755 nt, Artificial Sequence; identical to SEQ ID NO: 91047
  derived and/or modified CDS sequence (opt1) from hemagglutinin__InfluenzaB__AGX22392

SEQ ID NO: 91602 - RNA, 1755 nt, Artificial Sequence
  derived and/or modified CDS sequence (opt1) from hemagglutinin__InfluenzaB__AGX22403
augaaggccaucaucgugcugcucauggucgugaccagcaacgccgaccgcaucugcaccggcaucacguccagcaacagcccccacguggucaagaccgcgacccagggggaggugaacgugaccggcgucaucccgcugacgaccacccccaccaaguccuacuucgccaaccugaaggggacgcggacccgcggcaagcucugccccgacugccugaacugcaccgaccuggacguggcccucgggcggcccaugugcgugggcaccacgccguccgccaaggccagcauccugcacgagguccgccccgugaccuccggcugcuuccccaucaugcacgaccggaccaagauccgccagcugcccaaccuccugcggggguacgagaacauccgccugagcacccagaacgugaucgacgcggagaaggccccgggcgggcccuaccggcucggcacguccgggagcugccccaacgccaccuccaagagcggcuucuucgccaccauggcgugggccguccccaaggacaacaacaagaacgccaccaacccgcugacgguggaggugcccuacaucugcaccgagggcgaggaccagaucaccgucuggggguuccacuccgacaacaagacccagaugaagaaccuguacggcgacagcaacccccagaaguucacguccagcgccaacggggugaccacccacuacgugucccagaucggcggcuuccccgaccagaccgaggacgggggccucccgcagagcgggcgcaucgucguggacuacaugaugcagaagcccggcaagacggggaccaucguguaccagcggggcguccugcugccccagaagguguggugcgccuccggccgcagcaaggugaucaaggggagccucccccugaucggcgaggcggacugccugcacgagaaguacgggggccucaacaaguccaagccguacuacaccggggagcacgccaaggccaucggcaacugccccaucugggucaagacgccccugaagcuggccaacggcaccaaguaccggcccccggccaagcuccugaaggagcgcggguucuucggcgcgaucgccggguuccuggagggcgggugggagggcaugaucgccggcuggcacggguacaccagccacggcgcccacgggguggccgucgcggccgaccucaaguccacccaggaggccaucaacaagaucaccaagaaccugaacagccuguccgagcucgaggugaagaaccugcagcggcugagcggcgccauggacgagcuccacaacgagauccuggagcuggacgagaagguggacgaccuccgcgccgacacgaucuccagccagaucgagcuggcgguccugcucuccaacgagggcaucaucaacagcgaggacgagcaccuccuggcccuggagcggaagcugaagaagaugcuggggcccuccgccguggacaucggcaacgggugcuucgagaccaagcacaagugcaaccagaccugccucgaccgcaucgccgcgggcaccuucaacgccggggacuucagccugcccaccuucgacucccugaacaucacggccgccagccucaacgacgacggccuggacaaccacaccauccugcuguacuacuccaccgccgcgagcucccucgccgugacccugaugcuggccaucuucaucgucuacauggugagccgggacaacguguccugcagcaucugccucuga

SEQ ID NO: 91603 - RNA, 1755 nt, Artificial Sequence; identical to SEQ ID NO: 91047
  derived and/or modified CDS sequence (opt1) from hemagglutinin__InfluenzaB__AGX22414

SEQ ID NO: 91604 - RNA, 1755 nt, Artificial Sequence
  derived and/or modified CDS sequence (opt1) from hemagglutinin__InfluenzaB__AGX22425
augaaggccaucaucgugcugcucauggucgugaccagcaacgccgaccgcaucugcaccggcaucacguccagcaacagcccccacguggucaagaccgcgacccagggggaggugaacgugaccggcgucaucccgcugacgaccacccccaccaaguccuacuucgccaaccugaaggggacgcggacccgcggcaagcucugccccgacugccugaacugcaccgaccuggacguggcccucgggcggcccaugugcgugggcaccacgccguccgccaaggccagcauccugcacgagguccgccccgugaccuccggcugcuuccccaucaugcacgaccggaccaagauccgccagcugcccaaccuccugcggggguacgagaacauccgccugagcacccagaacgugaucgacgcggagaaggccccgggcgggcccuaccggcucggcacguccgggagcugccccaacgccaccuccaagagcggcuucuucgccaccauggcgugggccguccccaaggacaacaacaagaacgccaccaacccgcugacgguggaggugcccuacaucugcaccgagggcgaggaccagaucaccgucuggggguuccacuccgacaacaagauccagaugaagaaccuguacggcgacagcaacccccagaaguucaccuccagcgccaacggggugacgacccacuacgugucccagaucggcggcuuccccgaccagaccgaggacgggggccucccgcagagcgggcgcaucgucguggacuacaugaugcagaagcccggcaagaccgggacgaucguguaccagcggggcguccugcugccccagaagguguggugcgccuccggccgcagcaaggugaucaaggggagccucccccugaucggcgaggcggacugccugcacgagaaguacgggggccucaacaaguccaagccguacuacaccggggagcacgccaaggccaucggcaacugccccaucugggucaagacgccccugaagcuggccaacggcaccaaguaccggcccccggccaagcuccugaaggagcgcggguucuucggcgcgaucgccggguuccuggagggcgggugggagggcaugaucgccggcuggcacggguacaccagccacggcgcccacgggguggccgucgcggccgaccucaaguccacccaggaggccaucaacaagaucaccaagaaccugaacagccuguccgagcucgaggugaagaaccugcagcggcugagcggcgccauggacgagcuccacaacgagauccuggagcuggacgagaagguggacgaccuccgcgccgacaccaucuccagccagaucgagcuggcgguccugcucuccaacgagggcaucaucaacagcgaggacgagcaccuccuggcccuggagcggaagcugaagaagaugcuggggcccuccgccguggagaucggcaacgggugcuucgagacgaagcacaagugcaaccagaccugccucgaccgcaucgccgcgggcaccuucaacgccggggaguucagccugcccaccuucgacucccugaacaucaccgccgccagccucaacgacgacggccuggacaaccacacgauccugcuguacuacuccaccgccgcgagcucccucgccgugacccugaugcuggccaucuucaucgucuacauggugagccgggacaacguguccugcagcaucugccucuga

SEQ ID NO: 91605 - RNA, 1755 nt, Artificial Sequence; identical to SEQ ID NO: 91048
  derived and/or modified CDS sequence (opt1) from hemagglutinin__InfluenzaB__AGX22436

SEQ ID NO: 91606 - RNA, 1755 nt, Artificial Sequence; identical to SEQ ID NO: 91048
  derived and/or modified CDS sequence (opt1) from hemagglutinin__InfluenzaB__AGX22445

SEQ ID NO: 91607 - RNA, 1755 nt, Artificial Sequence
  derived and/or modified CDS sequence (opt1) from hemagglutinin__InfluenzaB__AGX22456
augaaggccaucaucgugcugcucauggucgugaccagcaacgccgaccgcaucugcaccggcaucacguccagcuccagcccccacguggucaagaccgcgacccagggggaggugaacgugaccggcgucaucccgcugacgaccacccccaccaaguccuacuucgccaaccugaaggggacgcggacccgcggcaagcucugccccgacugccugaacugcaccgaccuggacguggcccucgggcggcccaugugcgugggcaccacgccgagcgccaaggccuccauccugcacgagguccgccccgugaccagcggcugcuuccccaucaugcacgaccggaccaagauccgccagcugcccaaccuccugcggggguacgagaacauccgccuguccacccagaacgugaucgacgcggagaaggccccgggcgggcccuaccggcucggcacgagcggguccugccccaacgccaccagcaaguccggcuucuucgccaccauggcgugggccguccccaaggacaacaacaagaacgccaccaacccgcugacgguggaggugcccuacaucugcaccgagggcgaggaccagaucaccgucuggggguuccacagcgacaacaagacccagaugaagaaccuguacggcgacuccaacccccagaaguucacgagcuccgccaacggggugaccacccacuacgugagccagaucggcggcuuccccgaccagaccgaggacgggggccucccgcaguccgggcgcaucgucguggacuacaugaugcagaagcccggcaagacggggaccaucguguaccagcggggcguccugcugccccagaagguguggugcgccagcggccgcagcaaggugaucaaggggucccucccccugaucggcgaggcggacugccugcacgagaaguacgggggccucaacaagagcaagccguacuacaccggggagcacgccaaggccaucggcaacugccccaucugggucaagacgccccugaagcuggccaacggcaccaaguaccggcccccggccaagcuccugaaggagcgcggguucuucggcgcgaucgccggguuccuggagggcgggugggagggcaugaucgccggcuggcacggguacaccucccacggcgcccacgggguggccgucgcggccgaccucaagagcacccaggaggccaucaacaagaucaccaagaaccugaacucccugagcgagcucgaggugaagaaccugcagcggcuguccggcgccauggacgagcuccacagcgagauccuggagcuggacgagaagguggacgaccuccgcgccgacacgaucuccagccagaucgagcuggcgguccugcucuccaacgagggcaucaucaacagcgaggacgagcaccuccuggcccuggagcggaagcugaagaagaugcuggggcccuccgccguggacaucggcaacgggugcuucgagaccaagcacaagugcaaccagaccugccucgaccgcaucgccgcgggcaccuucaacgccggggaguucagccugcccaccuucgacucccugaacaucacggccgccagccucaacgacgacggccuggacaaccacaccauccugcuguacuacuccaccgccgcgagcucccucgccgugacccugaugcuggccaucuucaucgucuacaucgugagccgggacaacgugagcugcuccaucugccucuga

SEQ ID NO: 91608 - RNA, 1755 nt, Artificial Sequence; identical to SEQ ID NO: 91047
  derived and/or modified CDS sequence (opt1) from hemagglutinin__InfluenzaB__AGX22467

SEQ ID NO: 91609 - RNA, 1755 nt, Artificial Sequence; identical to SEQ ID NO: 91047
  derived and/or modified CDS sequence (opt1) from hemagglutinin__InfluenzaB__AGX22478

SEQ ID NO: 91610 - RNA, 1755 nt, Artificial Sequence
  derived and/or modified CDS sequence (opt1) from hemagglutinin__InfluenzaB__AGX22489
augaaggccaucaucgugcugcucauggucgugaccagcaacgccgaccgcaucugcaccggcaucacguccagcaacagcccccacguggucaagaccgcgacccagggggaggugaacgugaccggcgucaucccgcugacgaccacccccaccaaguccuacuucgccaaccugaaggggacgcggacccgcggcaagcucugccccgacugccugaacugcaccgaccuggacguggcccucgggcggcccaugugcgugggcaccacgccguccgccaaggccagcauccugcacgagguccgccccgugaccuccggcugcuuccccaucaugcacgaccggaccaagauccgccagcugcccaaccuccugcggggguacgagaacauccgccugagcacccaguccgcgaucgacgccgagaaggccccgggcgggcccuaccggcucggcacgagcggguccugccccaacgccaccagcaaguccggcuucuucgcgaccauggccugggccgugcccaaggacaacaacaagaacgccaccaacccgcugacggucgaggugcccuacaucugcaccgagggcgaggaccagaucaccguguggggguuccacagcgacaacaagacccagaugaagaaccuguacggcgacuccaacccccagaaguucacgagcuccgccaacggggucaccacccacuacgugagccagaucggcggcuuccccgggcagaccgaggacggcgggcucccgcaguccggccgcaucguggucgacuacaugauccagaagcccgggaagacgggcaccaucguguaccagcggggcgugcugcugccccagaaggucuggugcgcgagcgggcgcagcaaggugaucaagggcucccucccccugaucggggaggccgacugccugcacgagaaguacggcgggcucaacaagagcaagccguacuacaccggcgagcacgccaaggccaucggcaacugccccaucugggugaagacgccccugaagcuggccaacgggaccaaguaccggcccccggcgaagcuccugaaggagcgcggcuucuucggggccaucgccggcuuccuggagggcgggugggagggcaugaucgccggguggcacggcuacaccucccacggggcccacggcgucgcgguggccgccgaccucaagagcacccaggaggccaucaacaagaucaccaagaaccugaacucccugagcgagcucgaggucaagaaccugcagcggcuguccggcgccauggacgagcuccacaacgagauccuggagcuggacgagaagguggacgaccuccgcgcggacacgaucagcgcccagaucgagcuggccgugcugcucuccaacgaggggaucaucaacagcgaggacgagcaccuccuggcccuggagcggaagcugaagaagaugcugggccccuccgcggucgacaucgggaacggcugcuucgagaccaagcacaagugcaaccagaccugccucgaccgcaucgccgccgggaccuucaacgccggcgaguucagccugcccaccuucgacucccugaacaucacggccgcgagccucaacgacgacggccuggacaaccacaccauccugcuguacuacuccaccgccgccagcucccucgccgugacccugaugcuggccaucuucaucguguacauggucagccgggacaacguguccugcagcaucugccucuga

SEQ ID NO: 91611 - RNA, 1755 nt, Artificial Sequence
  derived and/or modified CDS sequence (opt1) from hemagglutinin__InfluenzaB__AGX22500
augaaggccaucaucgugcugcucauggucgugaccagcaacgccgaccgcaucugcaccggcaucacguccagcaacagcccccacguggucaagaccgcgacccagggggaggugaacgugaccggcgucaucccgcugacgaccacccccaccaaguccuacuucgccaaccugaaggggacgcggacccgcggcaagcucugccccgacugccugaacugcaccgaccuggacguggcccucgggcggcccaugugcgugggcaccacgccguccgccaaggccagcauccugcacgagguccgccccgugaccuccggcugcuuccccaucaugcacgaccggaccaagauccgccagcugcccaaccuccugcggggguacgagaacauccgccugagcacccagaacgugaucgacgcggagaacgccccgggcgggcccuaccggcucggcacguccgggagcugccccaacgccaccuccaagagcggcuucuucgccaccauggcgugggccguccccaaggacaacaacaagaacgccaccaacccgcugacgguggaggugcccuacaucugcaccgagggcgaggaccagaucaccgucuggggguuccacuccgacaacaagacccagaugaagaaccuguacggcgacagcaacccccagaaguucacguccagcgccaacggggugaccacccacuacgugucccagaucggcggcuuccccgcccagaccgaggacgggggccucccgcagagcgggcgcaucaucgucgacuacauggugcagaagccccggaagacgggcaccaucguguaccagcgcgggguccugcugccccagaagguguggugcgcguccggccggagcaaggugaucaagggcagccucccccugaucggggaggccgacugccugcacgagaaguacggcgggcucaacaaguccaagccguacuacaccggcgagcacgccaaggccaucgggaacugccccaucugggucaagacgccccugaagcuggccaacggcaccaaguaccggcccccggcgaagcuccugaaggagcgcggcuucuucggggccaucgccggcuuccuggagggcgggugggaggggaugaucgccggcuggcacggcuacaccagccacggggcccacggcguggcggucgccgccgaccucaaguccacccaggaggccaucaacaagaucaccaagaaccugaacagccuguccgagcucgaggugaagaaccugcagcgccugagcggggccauggacgagcuccacaacgagauccuggagcuggacgagaagguggacgaccuccgggcggacacgaucuccagccagaucgagcuggccguccugcucuccaacgagggcaucaucaacagcgaggacgagcaccuccuggcccuggagcgcaagcugaagaagaugcugggccccuccgccguggacaucgggaacggcugcuucgagaccaagcacaagugcaaccagaccugccucgaccggaucgcggccgggaccuucaacgccggcgaguucagccugcccaccuucgacucccugaacaucacggccgccagccucaacgacgacgggcuggacaaccacaccauccugcuguacuacuccaccguggcgagcucccucgccgucacccugaugcuggccaucuucaucguguacauggugagccgcgacaacgucuccugcagcaucugccucuga

SEQ ID NO: 91612 - RNA, 1755 nt, Artificial Sequence; identical to SEQ ID NO: 91048
  derived and/or modified CDS sequence (opt1) from hemagglutinin__InfluenzaB__AGX22511

SEQ ID NO: 91613 - RNA, 1755 nt, Artificial Sequence
  derived and/or modified CDS sequence (opt1) from hemagglutinin__InfluenzaB__AGX22522
augaaggccaucaucgugcugcucauggucgugaccagcaacgccgaccgcaucugcaccggcaucacguccagcaacagcccccacguggucaagaccgcgacccagggggaggugaacgugaccggcgucaucccgcugacgaccacccccaccaaguccuacuucgccaaccugaaggggacgcggacccgcggcaagcucugccccgacugccugaacugcaccgaccuggacguggcccucgggcggcccaugugcgugggcaccacgccguccgccaaggccagcauccugcacgagguccgccccgugaccuccggcugcuuccccaucaugcacgaccggaccaagauccgccagcuggcgaaccuccugcggggguacgagaacauccgccugagcacccagaacgugaucgacgccgagaaggcccccggcgggccguaccggcucggcacguccgggagcugccccaacgccaccuccaagagcggcuucuucgcgaccauggccugggccguccccaaggacaacaacaagaacgccaccaacccccugacgguggaggugccguacaucugcaccgagggcgaggaccagaucaccgucuggggguuccacuccgacaacaagacccagaugaagaaccuguacggcgacagcaacccccagaaguucacguccagcgccaacggggugaccaagcacuacgugucccagaucggcggcuuccccgaccagaccgaggacgggggccucccccagagcgggcgcaucgucguggacuacaugaugcagaagccgggcaagaccgggacgaucguguaccagcggggcguccugcugccccagaagguguggugcgcguccggccgcagcaaggugaucaaggggagccucccccugaucggcgaggccgacugccugcacgagaaguacgggggccucaacaaguccaagcccuacuacaccggggagcacgccaaggccaucggcaacugcccgaucugggucaagacgccccugaagcuggccaacggcaccaaguaccggccgcccgcgaagcuccugaaggagcgcggguucuucggcgccaucgccggguuccuggagggcgggugggagggcaugaucgccggcuggcacggguacaccagccacggcgcccacgggguggcggucgccgccgaccucaaguccacccaggaggccaucaacaagaucaccaagaaccugaacagccuguccgagcucgaggugaagaaccugcagcggcugagcggcgccauggacgagcuccacaacgagauccuggagcuggacgagaagguggacgaccuccgcgcggacaccaucuccagccagaucgagcuggccguccugcucuccaacgagggcaucaucaacagcgaggacgagcaccuccuggcccuggagcggaagcugaagaagaugcuggggcccuccgccguggacaucggcaacgggugcuucgagacgaagcacaagugcaaccagaccugccucgaccgcaucgcggccggcaccuucaacgccggggaguucagccugcccaccuucgacucccugaacaucaccgccgccagccucaacgacgacggccuggacaaccacacgauccugcuguacuacuccaccgcggccagcucccucgccgugacccugaugcuggccaucuucaucgucuacauggugagccgggacaacguguccugcagcaucugccucuga

SEQ ID NO: 91614 - RNA, 1755 nt, Artificial Sequence; identical to SEQ ID NO: 90450
  derived and/or modified CDS sequence (opt1) from hemagglutinin__InfluenzaB__AGX22533

SEQ ID NO: 91615 - RNA, 1755 nt, Artificial Sequence; identical to SEQ ID NO: 91062
  derived and/or modified CDS sequence (opt1) from hemagglutinin__InfluenzaB__AGX22566

SEQ ID NO: 91616 - RNA, 1755 nt, Artificial Sequence; identical to SEQ ID NO: 91048
  derived and/or modified CDS sequence (opt1) from hemagglutinin__InfluenzaB__AGX22577

SEQ ID NO: 91617 - RNA, 1755 nt, Artificial Sequence; identical to SEQ ID NO: 91062
  derived and/or modified CDS sequence (opt1) from hemagglutinin__InfluenzaB__AGX22588

SEQ ID NO: 91618 - RNA, 1755 nt, Artificial Sequence; identical to SEQ ID NO: 90450
  derived and/or modified CDS sequence (opt1) from hemagglutinin__InfluenzaB__AGX22599

SEQ ID NO: 91619 - RNA, 1755 nt, Artificial Sequence
  derived and/or modified CDS sequence (opt1) from hemagglutinin__InfluenzaB__AGX22610
augaaggccaucaucgugcugcucauggucgugaccagcaacgccgaccgcaucugcaccggcaucacguccagcaacagcccccacguggucaagaccgcgacccagggggaggugaacgugaccggcgucaucccgcugacgaccacccccaccaaguccuacuucgccaaccugaaggggacgcggacccgcggcaagcucugccccgacugccugaacugcaccgaccuggacguggcccucgggcggcccaugugcgugggcaccacgccguccgccaaggccagcauccugcacgagguccgccccgugaccuccggcugcuuccccaucaugcacgaccggaccaagauccgccagcugcccaaccuccugcggggguacgagaacauccgccugagcacccagaacgugaucgacgcggagaaggccccgggcgggcccuaccggcucggcacguccgggagcugccccaacgccaccuccaagagcggcuucuucgccaccauggcgugggccguccccaaggacaacaacaagaacgccaccaacccgcugacgguggaggugcccuacaucugcaccgagggcgaggaccagaucaccgucuggggguuccacuccgacaacaagacccagaugaagaaccuguacggcgaccccaacccccagaaguucacgagcuccgccaacggggugaccacccacuacgugagccagaucggcggcuucccggaccagaccgaggacgggggccucccccaguccgggcgcaucgucguggacuacaugaugcagaagcccggcaagacggggaccaucguguaccagcggggcguccugcugccccagaagguguggugcgccagcggccgcuccaaggugaucaaggggagccucccgcugaucggcgaggcggacugccugcacgagaaguacgggggccucaacaagagcaagcccuacuacaccggggagcacgccaaggccaucggcaacugccccaucugggucaagacgccccugaagcuggccaacggcaccaaguaccggccgcccgccaagcuccugaaggagcgcggguucuucggcgcgaucgccggguuccuggagggcgggugggagggcaugaucgccggcuggcacggguacaccucccacggcgcccacgggguggccgucgcggccgaccucaagagcacccaggaggccaucaacaagaucaccaagaaccugaacucccugagcgagcucgaggugaagaaccugcagcggcuguccggcgccauggacgagcuccacaacgagauccuggagcuggacgagaagguggacgaccuccgcgccgacacgaucagcucccagaucgagcuggcgguccugcucagcaacgagggcaucaucaacuccgaggacgagcaccuccuggcccuggagcggaagcugaagaagaugcuggggcccagcgccguggacaucggcaacgggugcuucgagaccaagcacaagugcaaccagaccugccucgaccgcaucgccgcgggcaccuucaacgccggggaguucucccugcccaccuucgacagccugaacaucacggccgccucccucaacgacgacggccuggacaaccacaccauccugcuguacuacagcaccgccgcguccagccucgccgugacccugaugcuggccaucuucaucgucuacauggugucccgggacaacgugagcugcuccaucugccucuga

SEQ ID NO: 91620 - RNA, 1755 nt, Artificial Sequence
  derived and/or modified CDS sequence (opt1) from hemagglutinin__InfluenzaB__AGX22621
augaaggccaucaucgugcugcucauggucgugaccagcaacgccgaccgcaucugcaccggcaucacguccagcaacagcccccacguggucaagaccgcgacccagggggaggugaacgugaccggcgucaucccgcugacgaccacccccaccaaguccuacuucgccaaccugaaggggacgcggacccgcggcaagcucugccccgacugccugaacugcaccgaccuggacguggcccucgggcggcccaugugcgugggcaccacgccguccgccaaggccagcauccugcacgagguccgccccgugaccuccggcugcuuccccaucaugcacgaccggaccaagauccgccagcuggcgaaccuccugcggggguacgagaacauccgccugagcacccagaacgugaucgacgccgagaaggcccccggcgggccguaccggcucggcacguccgggagcugccccaacgccaccuccaagagcggcuucuucgcgaccauggccugggccguccccaaggacaacaacaagaacgccaccaacccccugacgguggaggugccguacaucugcaccggcggggaggaccagaucaccgucuggggcuuccacuccgacaacaagacccagaugaagaaccuguacggggacagcaacccccagaaguucacguccagcgccaacggcgugaccacccacuacgugucccagaucggcggguuccccgaccagaccgaggacggcgggcucccccagagcggccgcaucgucguggacuacaugaugcagaagccggggaagacgggcaccaucguguaccagcggggcguccugcugccccagaagguguggugcgcguccgggcgcagcaaggugaucaagggcagccucccccugaucggggaggccgacugccugcacgagaaguacggcgggcucaacaaguccaagcccuacuacaccggcgagcacgccaaggccaucggcaacugcccgaucugggucaagacgccccugaagcuggccaacgggaccaaguaccggccgcccgcgaagcuccugaaggagcgcggcuucuucggggccaucgccggcuuccuggagggcgggugggagggcaugaucgccggguggcacggcuacaccagccacggggcccacggcguggcggucgccgccgaccucaaguccacccaggaggccaucaacaagaucaccaagaaccugaacagccuguccgagcucgaggugaagaaccugcagcggcugagcggcgccauggacgagcuccacaacgagauccuggagcuggacgagaagguggacgaccuccgcgcggacacgaucuccagccagaucgagcuggccguccugcucuccaacgaggggaucaucaacagcgaggacgagcaccuccuggcccuggagcggaagcugaagaagaugcugggccccuccgccguggacaucgggaacggcugcuucgagaccaagcacaagugcaaccagaccugccucgaccgcaucgcggccgggaccuucaacgccggcgaguucagccugcccaccuucgacucccugaacaucacggccgccagccucaacgacgacggccuggacaaccacaccauccugcuguacuacuccaccgcggccagcucccucgccgugacccugaugcuggccaucuucaucgucuacauggugagccgggacaacguguccugcagcaucugccucuga

SEQ ID NO: 91621 - RNA, 1755 nt, Artificial Sequence; identical to SEQ ID NO: 90450
  derived and/or modified CDS sequence (opt1) from hemagglutinin__InfluenzaB__AGX22632

SEQ ID NO: 91622 - RNA, 1755 nt, Artificial Sequence
  derived and/or modified CDS sequence (opt1) from hemagglutinin__InfluenzaB__AGX22643
augaaggccaucaucgugcugcucauggucgugaccagcaacgccgaccgcaucugcaccggcaucacguccagcaacagcccccacguggucaagaccgcgacccagggggaggugaacgugaccggcgucaucccgcugacgaccacccccaccaaguccuacuucgccaaccugaaggggacgcggacccgcggcaagcucugccccgacugccugaacugcaccgaccuggacguggcccucgggcggcccaugugcgugggcaccacgccguccgccaaggccagcauccugcacgagguccgccccgugaccuccggcugcuuccccaucaugcacgaccggaccaagauccgccagcuggcgaaccuccugcggggguacgagaacauccgccugagcauccagaacgugaucgacgccgagaaggcccccggcgggccguaccggcucggcaccuccgggagcugccccaacgccacguccaagagcggcuucuucgcgaccauggccugggccguccccaaggacaacaacaagaacgccaccaacccccugaccguggaggugccguacaucugcacggagggcgaggaccagaucaccgucuggggguuccacuccgacaacaagacccagaugaagaaccuguacggcgacagcaacccccagaaguucaccuccagcgccaacggggugacgacccacuacgugucccagaucggcggcuuccccgaccagaccgaggacgggggccucccccagagcgggcgcaucgucguggacuacaugaugcagaagccgggcaagaccgggacgaucguguaccagcggggcguccugcugccccagaagguguggugcgcguccggccgcagcaaggugaucaaggggagccucccccugaucggcgaggccgacugccugcacgagaaguacgggggccucaacaaguccaagcccuacuacaccggggagcacgccaaggccaucggcaacugcccgaucugggucaagacgccccugaagcuggccaacggcaccaaguaccggccgcccgcgaagcuccugaaggagcgcggguucuucggcgccaucgccggguuccuggagggcgggugggagggcaugaucgccggcuggcacggguacaccagccacggcgcccacgggguggcggucgccgccgaccucaaguccacccaggaggccaucaacaagaucaccaagaaccugaacagccuguccgagcucgaggugaagaaccugcagcggcugagcggcgccauggacgagcuccacaacgagauccuggagcuggacgagaagguggacgaccuccgcgcggacaccaucuccagccagaucgagcuggccguccugcucuccaacgagggcaucaucaacagcgaggacgagcaccuccuggcccuggagcggaagcugaagaagaugcuggggcccuccgccguggacaucggcaacgggugcuucgagacgaagcacaagugcaaccagaccugccucgaccgcaucgcggccggcaccuucaacgccggggaguucagccugcccaccuucgacucccugaacaucaccgccgccagccucaacgacgacggccuggacaaccacacgauccugcuguacuacuccaccgcggccagcucccucgccgugacccugaugcuggccaucuucaucgucuacauggugagccgggacaacguguccugcagcaucugccucuga

SEQ ID NO: 91623 - RNA, 1755 nt, Artificial Sequence
  derived and/or modified CDS sequence (opt1) from hemagglutinin__InfluenzaB__AGX22654
augaaggccaucaucgugcugcucauggucgugaccagcaacgccgaccgcaucugcaccggcaucacguccagcaacagcccccacguggucaagaccgcgacccagggggaggugaacgugaccggcgucaucccgcugacgaccacccccaccaaguccuacuucgccaaccugaaggggacgcggacccgcggcaagcucugccccgacugccugaacugcaccgaccuggacguggcccucgggcggcccaugugcgugggcaccacgccguccgccaaggccagcauccugcacgagguccgccccgugaccuccggcugcuuccccaucaugcacgaccggaccaagauccgccagcuggcgaaccuccugcggggguacgagaacauccgccugagcacccagaacgugaucgacgccgagaaggcccccggcgggccguaccggcucggcacguccgggagcugccccaacgccaccuccaagagcggcuucuucgcgaccauggccugggccguccccaaggacaacaacaagaacgccaccaacccccugacgguggaggugccguacaucugcaccgagggcgaggaccagaucaccgucuggggguuccacuccgacaacaagacccagaugaagaaccuguacggcgacagcaacccccagaaguucacguccagcgccaacggggugaccacccacuacgugucccagaucggcggcuuccccgaccagaccgaggacgggggccucccccagagcgggcgcaucgucguggacuacaugaugcagaagccgggcaagacggggaccaucguguaccagcggggcguccugcugccccagaagguguggugcgcguccggccgcagcaaggugaucaaggggagccucccccugaucggcgaggccgacugccugcacgagaaguacgggggccucaacaaguccaagcccuacuacaccggggagcacgccaaggccaucggcaacugcccgaucugggucaagacgccccugaagcuggccaacggcaccaaguaccggccgcccgcgaagcuccugaaggagcgcggguucuucggcgccaucgccggguuccuggagggcgggugggagggcaugaucgccggcuggcacggguacaccagccacggcgcccacgggguggcggucgccgccgaccucaaguccacccaggaggccaucaacaagaucaccaagaaccugaacagccuguccgagcucgaggugaagaaccugcagcggcugagcggcgccauggacgagcuccacuccgagauccuggagcuggacgagaagguggacgaccuccgcgcggacacgaucagcucccagaucgagcuggccguccugcucagcaacgagggcaucaucaacuccgaggacgagcaccuccuggcccuggagcggaagcugaagaagaugcuggggcccagcgccguggacaucggcaacgggugcuucgagaccaagcacaagugcaaccagaccugccucgaccgcaucgcggccggcaccuucaacgccggggaguucucccugcccaccuucgacagccugaacaucacggccgccucccucaacgacgacggccuggacaaccacaccauccugcuguacuacagcaccgcggccuccagccucgccgugacccugaugcuggccaucuucaucgucuacauggugucccgggacaacgugagcugcagcaucugccucuga

SEQ ID NO: 91624 - RNA, 1755 nt, Artificial Sequence; identical to SEQ ID NO: 91062
  derived and/or modified CDS sequence (opt1) from hemagglutinin__InfluenzaB__AGX22665

SEQ ID NO: 91625 - RNA, 1755 nt, Artificial Sequence; identical to SEQ ID NO: 91062
  derived and/or modified CDS sequence (opt1) from hemagglutinin__InfluenzaB__AGX22676

SEQ ID NO: 91626 - RNA, 1755 nt, Artificial Sequence; identical to SEQ ID NO: 90450
  derived and/or modified CDS sequence (opt1) from hemagglutinin__InfluenzaB__AGX22687

SEQ ID NO: 91627 - RNA, 1755 nt, Artificial Sequence; identical to SEQ ID NO: 91062
  derived and/or modified CDS sequence (opt1) from hemagglutinin__InfluenzaB__AGX22698

SEQ ID NO: 91628 - RNA, 1755 nt, Artificial Sequence
  derived and/or modified CDS sequence (opt1) from hemagglutinin__InfluenzaB__AGX22709
augaaggccaucaucgugcugcucauggucgugaccagcaacgccgaccgcaucugcaccggcaucacguccagcaacagcccccacguggucaagaccgcgacccagggggaggugaacgugaccggcgucaucccgcugacgaccacccccaccaaguccuacuucgccaaccugaaggggacgcggacccgcggcaagcucugccccgacugccugaacugcaccgaccuggacguggcccucgggcggcccaugugcgugggcaccacgccguccgccaaggccagcauccugcacgagguccgccccgugaccuccggcugcuuccccaucaugcacgaccggaccaagauccgccagcuggcgaaccuccugcggggguacgagaacauccgccugagcacccagaacgugaucgacgccgagaaggcccccggcgggccguaccggcucggcacguccgggagcugccccaacgccaccuccaagagcggcuucuucgcgaccauggccugggccguccccaaggacaacaacaagaacgccaccaacccccugacgguggaggugccguacaucugcaccgagggcgaggaccagaucaccgucuggggguuccacuccgacaacaagacccagaugaagaaccuguacggcgacagcaacccccagaaguucacguccagcgccaacggggugaccacccacuacgugucccagaucggcggcuuccccgaccagaccgaggacgggggccucccccagagcgggcgcaucgucguggacuacaugaugcagaagccggagaagacgggcaccaucguguaccagcgcgggguccugcugccccagaagguguggugcgcguccggccggagcaaggugaucaagggcagccucccccugaucggggaggccgacugccugcacgagaaguacggcgggcucaacaaguccaagcccuacuacaccggcgagcacgccaaggccaucgggaacugcccgaucugggucaagacgccccugaagcuggccaacggcaccaaguaccggccgcccgcgaagcuccugaaggagcgcggcuucuucggggccaucgccggcuuccuggagggcgggugggaggggaugaucgccggcuggcacggcuacaccagccacggggcccacggcguggcggucgccgccgaccucaaguccacccaggaggccaucaacaagaucaccaagaaccugaacagccuguccgagcucgaggugaagaaccugcagcggcugagcggggccauggacgagcuccacaacgagauccuggagcuggacgagaagguggacgaccuccgcgcggacacgaucuccagccagaucgagcuggccguccugcucuccaacgagggcaucaucaacagcgaggacgagcaccuccuggcccuggagcggaagcugaagaagaugcugggccccuccgccguggacaucgggaacggcugcuucgagaccaagcacaagugcaaccagaccugccucgaccgcaucgcggccgggaccuucaacgccggcgaguucagccugcccaccuucgacucccugaacaucacggccgccagccucaacgacgacgggcuggacaaccacaccauccugcuguacuacuccaccgcggccagcucccucgccgugacccugaugcuggccaucuucaucgucuacauggugagccgggacaacguguccugcagcaucugccucuga

SEQ ID NO: 91629 - RNA, 1755 nt, Artificial Sequence
  derived and/or modified CDS sequence (opt1) from hemagglutinin__InfluenzaB__AGX22720
augaaggccaucaucgugcugcucauggucgugaccagcaacgccgaccgcaucugcaccggcaucacguccagcaacagcccccacguggucaagaccgcgacccagggggaggugaacgugaccggcgucaucccgcugacgaccacccccaccaaguccuacuucgccaaccugaaggggacgcggacccgcggcaagcucugccccgacugccugaacugcaccgaccuggacguggcccucgggcggcccaugugcgugggcaccacgccguccgccaaggccagcauccugcacgagguccgccccgugaccuccggcugcuuccccaucaugcacgaccggaccaagauccgccagcugcccaaccuccugcggggguacgagaacauccgccugagcacccagaacgugaucgacgcggagaaggccccgggcgggcccuaccggcucggcacguccgggagcugccccaacgccaccuccaagagcggcuucuucgccaccauggcgugggccguccccaaggacaacaacaagaacgccaccaacccgcugacgguggaggugcccuacaucugcaccgagggcgaggaccagaucaccgucuggggguuccacuccgacaacaagacccagaugaagaaccuguacggcgacagcaacccccagaaguucacguccagcgccaacggggccaccacccacuacgugucccagaucggcggcuuccccgaccagaccgaggacgggggccucccgcagagcgggcgcaucguggucgacuacaugaugcagaagcccggcaagacggggaccaucguguaccagcggggcgugcugcugccccagaaggucuggugcgcguccggccgcagcaaggugaucaaggggagccucccccugaucggcgaggccgacugccugcacgagaaguacgggggccucaacaaguccaagccguacuacaccggggagcacgccaaggccaucggcaacugccccaucugggugaagacgccccugaagcuggccaacggcaccaaguaccggcccccggcgaagcuccugaaggagcgcggguucuucggcgccaucgccggguuccuggagggcgggugggagggcaugaucgccggcuggcacggguacaccagccacggcgcccacggggucgcgguggccgccgaccucaaguccacccaggaggccaucaacaagaucaccaagaaccugaacagccuguccgagcucgaggucaagaaccugcagcggcugagcggcgccauggacgagcuccacaacgagauccuggagcuggacgagaagguggacgaccuccgcgcggacacgaucuccagccagaucgagcuggccgugcugcucuccaacgagggcaucaucaacagcgaggacgagcaccuccuggcccuggagcggaagcugaagaagaugcuggggcccuccgccgucgacaucggcaacgggugcuucgagaccaagcacaagugcaaccagaccugccucgaccgcaucgcggccggcaccuucaacgccggggaguucagccugcccaccuucgacucccugaacaucacggccgccagccucaacgacgacggccuggacaaccacaccauccugcuguacuacuccaccgcggccagcucccucgccgugacccugaugcuggccaucuucaucguguacauggucagccgggacaacguguccugcagcaucugccucuga

SEQ ID NO: 91630 - RNA, 1755 nt, Artificial Sequence; identical to SEQ ID NO: 91062
  derived and/or modified CDS sequence (opt1) from hemagglutinin__InfluenzaB__AGX22731

SEQ ID NO: 91631 - RNA, 1755 nt, Artificial Sequence; identical to SEQ ID NO: 91623
  derived and/or modified CDS sequence (opt1) from hemagglutinin__InfluenzaB__AGX22742

SEQ ID NO: 91632 - RNA, 1755 nt, Artificial Sequence
  derived and/or modified CDS sequence (opt1) from hemagglutinin__InfluenzaB__AGX22753
augaaggccaucaucgugcugcucauggucgugaccagcaacgccgaccgcaucugcaccggcaucacguccagcaacagcccccacguggucaagaccgcgacccagggggaggugaacgugaccggcgucaucccgcugacgaccacccccgccaaguccuacuucgccaaccugaaggggacccggacgcgcggcaagcucugccccgacugccugaacugcaccgaccuggacguggcccucgggcggcccaugugcgugggcaccaccccguccgccaaggcgagcauccugcacgagguccgccccgugacguccggcugcuuccccaucaugcacgaccggaccaagauccgccagcuggccaaccuccugcggggguacgagaacauccgccugagcacccagaacgugaucgacgccgagaaggcccccggcgggccguaccggcucggcaccuccgggagcugccccaacgcgacguccaagagcggcuucuucgccaccauggccugggccguccccaaggacaacaacaagaacgccaccaacccccugaccguggaggugccguacaucugcaaggagggcgaggaccagaucacggucuggggguuccacuccgacaacaagacccagaugaagaaccuguacggcgacagcaacccccagaaguucaccuccagcgcgaacggggugaccacgcacuacgugucccagaucggcggcuuccccgaccagaccgaggacgggggccucccccagagcgggcgcaucgucguggacuacaugauccagaagccgggcaagaccgggaccaucguguaccagcggggcguccugcugccccagaagguguggugcgccuccggccgcagcaaggugaucaaggggagccucccccugaucggcgaggccgacugccugcacgagaaguacgggggccucaacaaguccaagcccuacuacacgggggagcacgccaaggccaucggcaacugcccgaucugggucaagacgccccugaagcuggcgaacggcaccaaguaccggccgcccgccaagcuccugaaggagcgcggguucuucggcgccaucgccggguuccuggagggcgggugggagggcaugaucgccggcuggcacggguacaccagccacggcgcgcacgggguggccgucgccgccgaccucaaguccacccaggaggccaucaacaagaucaccaagaaccugaacagccuguccgagcucgaggugaagaaccugcagcggcugagcggcgcgauggacgagcuccacaacgagauccuggagcuggacgagaagguggacgaccuccgcgccgacaccaucuccagccagaucgagcuggccguccugcucuccaacgagggcaucaucaacagcgaggacgagcaccuccuggcccuggagcggaagcugaagaagaugcuggggcccuccgcgguggacaucggcaacgggugcuucgagaccaagcacaagugcaaccagacgugccucgaccgcaucgccgccggcaccuucaacgccggggaguucagccugcccaccuucgacucccugaacaucaccgccgcgagccucaacgacgacggccuggacaaccacaccauccugcuguacuacuccacggccgccagcucccucgccgugacccugaugcuggccaucuucaucgucuacauggugagccgggacaacguguccugcagcaucugccucuga

SEQ ID NO: 91633 - RNA, 1755 nt, Artificial Sequence
  derived and/or modified CDS sequence (opt1) from hemagglutinin__InfluenzaB__AGX22764
augaaggccaucaucgugcugcucauggucgugaccagcaacgccgaccgcaucugcaccggcaucacguccagcaacagcccccacguggucaagaccgcgacccagggggaggugaacgugaccggcgucaucccgcugacgaccacccccaccaaguccuacuucgccaaccugaaggggacgcggacccgcggcaagcucugccccgacugccugaacugcaccgaccuggacguggcccucgggcggcccaugugcgugggcaccacgccguccgccaaggccagcauccugcacgagguccgccccgugaccuccggcugcuuccccaucaugcacgaccggaccaagauccgccagcuggcgaaccuccugcggggguacgagaacauccgccugagcacccagaacgugaucgacgccgagaaggcccccggcgggccguaccggcucggcacguccgggagcugccccaacgccaccuccaagagcggcuucuucgcgaccauggccugggccguccccaaggacaacaacaagaacgccaccaacccccugacgguggaggugccguacaucugcaaggagggcgaggaccagaucaccgucuggggguuccacuccgacaacaagacccagaugaagaaccuguacggcgacagcaacccccagaaguucaccuccagcgccaacggggugacgacccacuacgugucccagaucggcggcuuccccgaccagaccgaggacgggggccucccccagagcgggcgcaucgucguggacuacaugauccagaagccgggcaagaccgggacgaucguguaccagcggggcguccugcugccccagaagguguggugcgcguccggccgcagcaaggugaucaaggggagccucccccugaucggcgaggccgacugccugcacgagaaguacgggggccucaacaaguccaagcccuacuacaccggggaccacgccaaggccaucggcaacugcccgaucugggucaagacgccccugaagcuggccaacggcaccaaguaccggccgcccgcgaagcuccugaaggagcgcggguucuucggcgccaucgccggguuccuggagggcgggugggagggcaugaucgccggcuggcacggguacaccagccacggcgcccacgggguggcggucgccgccgaccucaaguccacccaggaggccaucaacaagaucaccaagaaccugaacagccuguccgagcucgaggugaagaaccugcagcggcugagcggcgccauggacgagcuccacaacgagauccuggagcuggacgagaagguggacgaccuccgcgcggacaccaucuccagccagaucgagcuggccguccugcucuccaacgagggcaucaucaacagcgaggacgagcaccuccuggcccuggagcggaagcugaagaagaugcuggggcccuccgccguggacaucggcaacgggugcuucgagacgaagcacaagugcaaccagaccugccucgaccgcaucgcggccggcaccuucaacgccggggaguucagccugcccaccuucgacucccugaacaucaccgccgccagccucaacgacgacggccuggacaaccacacgauccugcuguacuacuccaccgcggccagcucccucgccgugacccugaugcuggccaucuucaucgucuacauggugagccgggacaacguguccugcagcaucugccucuga

SEQ ID NO: 91634 - RNA, 1755 nt, Artificial Sequence
  derived and/or modified CDS sequence (opt1) from hemagglutinin__InfluenzaB__AGX22775
augaaggccaucaucgugcugcucauggucgugaccagcaacgccgaccgcaucugcaccggcaucacguccagcaacagcccccacguggucaagaccgcgacccagggggaggugaacgugaccggcgucaucccgcugacgaccacccccaccaaguccuacuucgccaaccugaaggggacgcggacccgcggcaagcucugccccgacugccugaacugcaccgaccuggacguggcccucgggcggcccaugugcgugggcaccacgccguccgccaaggccagcauccugcacgagguccgccccgugaccuccggcugcuuccccaucaugcacgaccggaccaagauccgccagcugcccaaccuccugcggggguacgagaacauccgccugagcacccagaacgugaucgacgcggagaaggccccgggcgggcccuaccggcucggcacguccgggagcugccccaacgccaccuccaagagcggcuucuucgccaccauggcgugggccguccccaaggacaacaacaagaacgccaccaacccgcugacgguggaggugcccuacaucugcaccgagggcgaggaccagaucaccgucuggggguuccacuccgacaacaagacccagaugaagaaccuguacggcgacagcaacccccagaaguucacguccagcgccaacggggugaccacccacuacgugucccagaucggcggcuuccccgaccagaccgaggacgggggccucccgcagagcgggcgcaucgucguggacuacaugaugcagaagcccggcaagacggggaccaucguguaccagcggggcguccugcugccccagaagguguggugcgccuccggccgcagcaaggugaucaaggggagccucccccugaucggcgaggcggacugccugcacgagaaguacgggggccucaacaaguccaagccguacuacaccggggagcacgccaaggccaucggcaacugccccaucugggucaagacgccccugaagcuggccaacggcaccaaguaccggcccccggccaagcuccugaaggagcgcggguucuucggcgcgaucgccggguuccuggagggcgggugggagggcaugaucgccggcuggcacggguacaccagccacggcgcccacgggguggccgucgcggccgaccucaaguccacccaggaggccaucaacaagaucaccaagaaccugaacagccuguccgagcucgaggugaagaaccugcagcggcugagcggcgccauggacgagcuccacaacgagauccuggagcuggacgagaagguggacgaccuccgcgccgacacgaucuccagccagaucgagcuggcgguccugcucuccaacgagggcaucaucaacagcgaggacgagcaccuccuggcccuggagcggcgccugaagaagaugcuggggcccuccgccguggagaucggcaacgggugcuucgagaccaagcacaagugcaaccagaccugccucgaccggaucgccgcgggcaccuucaacgccggggaguucagccugcccaccuucgacucccugaacaucacggccgccagccucaacgacgacggccuggacaaccacaccauccugcuguacuacuccaccgccgcgagcucccucgccgugacccugaugcuggccaucuucaucgucuacauggugagccgcgacaacguguccugcagcaucugccucuga

SEQ ID NO: 91635 - RNA, 1755 nt, Artificial Sequence; identical to SEQ ID NO: 91062
  derived and/or modified CDS sequence (opt1) from hemagglutinin__InfluenzaB__AGX22786

SEQ ID NO: 91636 - RNA, 1755 nt, Artificial Sequence
  derived and/or modified CDS sequence (opt1) from hemagglutinin__InfluenzaB__AGX22797
augaaggccaucaucgugcugcucauggucgugaccagcaacgccgaccgcaucugcaccggcaucacguccagcaacagcccccacguggucaagaccgcgacccagggggaggugaacgugaccggcgucaucccgcugacgaccacccccaccaaguccuacuucgccaaccugaaggggacgcggacccgcggcaagcucugccccgacugccugaacugcaccgaccuggacguggcccucgggcggcccaugugcgugggcaccacgccguccgccaaggccagcauccugcacgagguccgccccgugaccuccggcugcuuccccaucaugcacgaccggaccaagauccgccagcuggcgaaccuccugcggggguacgagaacauccgccugagcacccagaacgugaucgacgccgagaaggcccccggcgggccguaccggcucggcacguccgggagcugccccaacgccaccuccaagagcggcuucuucgcgaccauggccugggccguccccaaggacaacaacaagaacgccaccaacccccugacgguggaggugccguacaucugcaaggagggcgaggaccagaucaccgucuggggguuccacuccgacaacaagacccagaugaagaaccuguacggcgacagcaacccccagaaguucaccuccagcgccaacggggugacgacccacuacgugucccagaucggcggcuuccccgaccagaccgaggacgggggccucccccagagcgggcgcaucgucguggacuacaugauccagaagccgggcaagaccgggacgaucguguaccagcggggcguccuguucccccagaagguguggugcgcguccggccgcagcaaggugaucaaggggagccugccccucaucggcgaggccgacugccugcacgagaaguacgggggccugaacaaguccaagcccuacuacaccggggagcacgccaaggccaucggcaacugcccgaucugggucaagacgccccucaagcuggccaacggcaccaaguaccggccgcccgcgaagcugcucaaggagcgcggguucuucggcgccaucgccggguuccuggagggcgggugggagggcaugaucgccggcuggcacggguacaccagccacggcgcccacgggguggcggucgccgccgaccugaaguccacccaggaggccaucaacaagaucaccaagaaccucaacagccuguccgagcuggaggugaagaaccuccagcggcugagcggcgccauggacgagcugcacaacgagauccucgagcuggacgagaagguggacgaccugcgcgcggacaccaucuccagccagaucgagcucgccguccugcuguccaacgagggcaucaucaacagcgaggacgagcaccuccuggcccuggagcggaagcucaagaagaugcuggggcccuccgccguggacaucggcaacgggugcuucgagacgaagcacaagugcaaccagaccugccuggaccgcaucgcggccggcaccuucaacgccggggaguucagccuccccaccuucgacucccugaacaucaccgccgccagccugaacgacgacggccucgacaaccacacgauccugcuguacuacuccaccgcggccagcucccuggccgugacccucaugcuggccaucuucaucgucuacauggugagccgggacaacguguccugcagcaucugccuguga

SEQ ID NO: 91637 - RNA, 1755 nt, Artificial Sequence; identical to SEQ ID NO: 91062
  derived and/or modified CDS sequence (opt1) from hemagglutinin__InfluenzaB__AGX22808

SEQ ID NO: 91638 - RNA, 1755 nt, Artificial Sequence; identical to SEQ ID NO: 91062
  derived and/or modified CDS sequence (opt1) from hemagglutinin__InfluenzaB__AGX22819

SEQ ID NO: 91639 - RNA, 1755 nt, Artificial Sequence; identical to SEQ ID NO: 91062
  derived and/or modified CDS sequence (opt1) from hemagglutinin__InfluenzaB__AGX22830

SEQ ID NO: 91640 - RNA, 1755 nt, Artificial Sequence
  derived and/or modified CDS sequence (opt1) from hemagglutinin__InfluenzaB__AGX22841
augaaggccaucaucgugcugcucauggucgugaccagcaacgccgaccgcaucugcaccggcaucacguccagcaacagcccccacguggucaagaccgcgacccagggggaggugaacgugaccggcgucaucccgcugacgaccacccccaccaaguccuacuucgccaaccugaaggggacgcggacccgcggcaagcucugccccgacugccugaacugcaccgaccuggacguggcccucgggcggcccaugugcgugggcaccacgccguccgccaaggccagcauccugcacgagguccgccccgugaccuccggcugcuuccccaucaugcacgaccggaccaagauccgccagcuggcgaaccuccugcggggguacgagaacauccgccugagcacccagaacgugaucgacgccgagaaggcccccggcgggccguaccggcucggcacguccgggagcugccccaacgccaccuccaagagcggcuucuucgcgaccauggccugggccguccccaaggacaacaacaagaacgccaccaacccccugacgguggaggugccguacaucugcaaggagggcgaggaccagaucaccgucuggggguuccacuccgacaacaagacccagaugaagaaccuguacggcgacagcaacccccagaaguucaccuccagcgccgacggggugacgacccacuacgugucccagaucggcggcuuccccgaccagaccgaggacgggggccucccccagagcgggcgcaucgucguggacuacaugauccagaagccgggcaagaccgggacgaucguguaccagcggggcguccugcugccccagaagguguggugcgcguccggccgcagcaaggugaucaaggggagccucccccugaucggcgaggccgacugccugcacgagaaguacgggggccucaacaaguccaagcccuacuacaccggggagcacgccaaggccaucggcaacugcccgaucugggucaagacgccccugaagcuggccaacggcaccaaguaccggccgcccgcgaagcuccugaaggagcgcggguucuucggcgccaucgccggguuccuggagggcgggugggagggcaugaucgccggcuggcacggguacaccagccacggcgcccacgggguggcggucgccgccgaccucaaguccacccaggaggccaucaacaagaucaccaagaaccugaacagccuguccgagcucgaggugaagaaccugcagcggcugagcggcgccauggacgagcuccacaacgagauccuggagcuggacgagaagguggacgaccuccgcgcggacaccaucuccagccagaucgagcuggccguccugcucuccaacgagggcaucaucaacagcgaggacgagcaccuccuggcccuggagcggaagcugaagaagaugcuggggcccuccgccguggacaucggcaacgggugcuucgagacgaagcacaagugcaaccagaccugccucgaccgcaucgcggccggcaccuucaacgccggggaguucagccugcccaccuucgacucccugaacaucaccgccgccagccucaacgacgacggccuggacaaccacacgauccugcuguacuacuccaccgcggccagcucccucgccgugacccugaugcuggccaucuucaucgucuacauggugagccgggacaacguguccugcagcaucugccucuga

SEQ ID NO: 91641 - RNA, 1755 nt, Artificial Sequence; identical to SEQ ID NO: 90450
  derived and/or modified CDS sequence (opt1) from hemagglutinin__InfluenzaB__AGX22852

SEQ ID NO: 91642 - RNA, 1755 nt, Artificial Sequence; identical to SEQ ID NO: 91062
  derived and/or modified CDS sequence (opt1) from hemagglutinin__InfluenzaB__AGX22863

SEQ ID NO: 91643 - RNA, 1755 nt, Artificial Sequence; identical to SEQ ID NO: 91062
  derived and/or modified CDS sequence (opt1) from hemagglutinin__InfluenzaB__AGX22874

SEQ ID NO: 91644 - RNA, 1755 nt, Artificial Sequence; identical to SEQ ID NO: 90450
  derived and/or modified CDS sequence (opt1) from hemagglutinin__InfluenzaB__AGX22885

SEQ ID NO: 91645 - RNA, 1755 nt, Artificial Sequence; identical to SEQ ID NO: 91623
  derived and/or modified CDS sequence (opt1) from hemagglutinin__InfluenzaB__AGX22896

SEQ ID NO: 91646 - RNA, 1755 nt, Artificial Sequence
  derived and/or modified CDS sequence (opt1) from hemagglutinin__InfluenzaB__AGX22907
augaaggccaucaucgugcugcucauggucgugaccagcaacgccgaccgcaucugcaccggcaucacguccagcaacagcccccacguggucaagaccgcgacccagggggaggugaacgugaccggcgucaucccgcugacgaccacccccaccaaguccuacuucgccaaccugaaggggacgcggacccgcggcaagcucugccccgacugccugaacugcaccgaccuggacguggcccucgggcggcccaugugcgugggcaccacgccguccgccaaggccagcauccugcacgagguccgccccgugaccuccggcugcuuccccaucaugcacgaccggaccaagauccgccagcuggcgaaccuccugcggggguacgagaacauccgccugagcacccagaacgugaucgacgccgagaaggcccccggcgggccguaccggcucggcacguccgggagcugccccaacgccaccuccaagagcggcuucuucgcgaccauggccugggccguccccaaggacaacaacaagaacgccaccaacccccugacgguggaggugccguacaucugcaccgagggcgaggaccagaucaccgucuggggguuccacuccgacaacaagacccagaugaagaaccuguacggcgacagcaacccccagaaguucacguccagcgccaacggggugaccacccacuacgugucccagaucggcggcuuccccgaccagaccgaggacgggggccucccccagagcgggcgcaucgucguggacuacaugaugcagaagccgggcaagacggggaccaucguguaccagcggggcguccugcugccccagaagguguggugcgcguccggccgcagcaaggugaucaaggggagccucccccugaucggcgaggccgacugccugcacgagaaguacgggggccucaacaaguccaagcccuacuacaccggggagcacgccaaggccaucggcaacugcccgaucugggucaagacgccccugaagcuggccaacggcaccaaguaccggccgcccgcgaagcuccugaaggagcgcggguucuucggcgccaucgccggguuccuggagggcgggugggagggcaugaucgccggcuggcacggguacaccagccacggcgcccacgggguggcggucgccgccgaccucaaguccacccaggaggccaucaacaagaucaccaagaaccugaacagccuguccgagcucgaggugaagaaccugcagcggcugagcggcgccauggacgagcuccacaacgagauccuggagcuggacgagaagguggacgaccuccgcgcggacacgaucuccagccagaucgagcuggccguccugcucuccaacgagggcaucaucaacagcgaggacgagcaccuccuggcccuggagcggaagcugaagaagaugcuggggcccuccgccguggacaucggcaacgggugcuucgagaccaagcacaagugcaaccagaccugccucgaccgcaucgcggccggcaccuucaacgccggggaguucagccugcccaccuucgacucccugaacaucacggccgccagccucaacgacgacggccuggacaaccacaccauccugcuguacuacuccaccgcggccagcucccucgccgugacccugaugcuggccaucuucaucgucuacauggugagccgggacuccgugagcugcagcaucugccucuga

SEQ ID NO: 91647 - RNA, 1755 nt, Artificial Sequence; identical to SEQ ID NO: 90450
  derived and/or modified CDS sequence (opt1) from hemagglutinin__InfluenzaB__AGX22918

SEQ ID NO: 91648 - RNA, 1755 nt, Artificial Sequence; identical to SEQ ID NO: 90450
  derived and/or modified CDS sequence (opt1) from hemagglutinin__InfluenzaB__AGX22929

SEQ ID NO: 91649 - RNA, 1755 nt, Artificial Sequence; identical to SEQ ID NO: 91062
  derived and/or modified CDS sequence (opt1) from hemagglutinin__InfluenzaB__AGX22940

SEQ ID NO: 91650 - RNA, 1755 nt, Artificial Sequence; identical to SEQ ID NO: 90450
  derived and/or modified CDS sequence (opt1) from hemagglutinin__InfluenzaB__AGX22951

SEQ ID NO: 91651 - RNA, 1755 nt, Artificial Sequence; identical to SEQ ID NO: 90450
  derived and/or modified CDS sequence (opt1) from hemagglutinin__InfluenzaB__AGX22962

SEQ ID NO: 91652 - RNA, 1755 nt, Artificial Sequence; identical to SEQ ID NO: 90450
  derived and/or modified CDS sequence (opt1) from hemagglutinin__InfluenzaB__AGX22973

SEQ ID NO: 91653 - RNA, 1755 nt, Artificial Sequence; identical to SEQ ID NO: 90450
  derived and/or modified CDS sequence (opt1) from hemagglutinin__InfluenzaB__AGX22984

SEQ ID NO: 91654 - RNA, 1755 nt, Artificial Sequence; identical to SEQ ID NO: 90450
  derived and/or modified CDS sequence (opt1) from hemagglutinin__InfluenzaB__AGX22995

SEQ ID NO: 91655 - RNA, 1755 nt, Artificial Sequence; identical to SEQ ID NO: 90450
  derived and/or modified CDS sequence (opt1) from hemagglutinin__InfluenzaB__AGX23006

SEQ ID NO: 91656 - RNA, 1755 nt, Artificial Sequence
  derived and/or modified CDS sequence (opt1) from hemagglutinin__InfluenzaB__AGX23017
augaaggccaucaucgugcugcucauggucgugaccagcaacgccgaccgcaucugcaccggcaucacguccagcaacagcccccacguggucaagaccgcgacccagggggaggugaacgugaccggcgucaucccgcugacgaccacccccaccaaguccuacuucgccaaccugaaggggacgcggacccgcggcaagcucugccccgacugccugaacugcaccgaccuggacguggcccucgggcggcccaugugcgugggcaccacgccguccgccaaggccagcauccugcacgagauccgccccgucaccuccggcugcuuccccaucaugcacgaccggaccaagauccgccagcuggcgaaccuccugcggggguacgagaacauccgccugagcacccagaacgugaucgacgccgagaaggcccccggcgggccguaccggcucggcacguccgggagcugccccaacgccaccuccaagagcggcuucuucgcgaccauggccugggccgugcccaaggacaacaacaagaacgccaccaacccccugacggucgaggugccguacaucugcaccgagggcgaggaccagaucaccguguggggguuccacuccgacaacaagacccagaugaagaaccuguacggcgacagcaacccccagaaguucacguccagcgccaacggggucaccacccacuacgugucccagaucggcggcuuccccgaccagaccgaggacgggggccucccccagagcgggcgcaucguggucgacuacaugaugcagaagccgggcaagacggggaccaucguguaccagcggggcgugcugcugccccagaaggucuggugcgcguccggccgcagcaaggugaucaaggggagccucccccugaucggcgaggccgacugccugcacgagaaguacgggggccucaacaaguccaagcccuacuacaccggggagcacgccaaggccaucggcaacugcccgaucugggugaagacgccccugaagcuggccaacggcaccaaguaccggccgcccgcgaagcuccugaaggagcgcggguucuucggcgccaucgccggguuccuggagggcgggugggagggcaugaucgccggcuggcacggguacaccagccacggcgcccacggggucgcgguggccgccgaccucaaguccacccaggaggccaucaacaagaucaccaagaaccugaacagccuguccgagcucgaggucaagaaccugcagcggcugagcggcgccauggacgagcuccacaacgagauccuggagcuggacgagaagguggacgaccuccgcgcggacacgaucuccagccagaucgagcuggccgugcugcucuccaacgagggcaucaucaacagcgaggacgagcaccuccuggcccuggagcggaagcugaagaagaugcuggggcccuccgccgucgacaucggcaacgggugcuucgagaccaagcacaagugcaaccagaccugccucgaccgcaucgcggccggcaccuucaacgccggggaguucagccugcccaccuucgacucccugaacaucacggccgccagccucaacgacgacggccuggacaaccacaccauccugcuguacuacuccaccgcggccagcucccucgccgugacccugaugcuggccaucuucaucguguacauggucagccgggacaacguguccugcagcaucugccucuga

SEQ ID NO: 91657 - RNA, 1755 nt, Artificial Sequence
  derived and/or modified CDS sequence (opt1) from hemagglutinin__InfluenzaB__AGX23028
augaaggccaucaucgugcugcucauggucgugaccagcaacgccgaccgcaucugcaccggcaucacguccagcaacagcccccacguggucaagaccgcgacccagggggaggugaacgugaccggcgucaucccgcugacgaccacccccaccaaguccuacuucgccaaccugaaggggacgaagacccggggcaagcucugccccgacugccugaacugcaccgaccuggacguggcccucgggcgccccaugugcgugggcaccacgccguccgccaaggccagcauccugcacgagguccggcccgugaccuccggcugcuuccccaucaugcacgaccgcaccaagauccggcagcuggcgaaccuccugcgcggguacgagaacauccggcugagcacccagaacgugaucgacgccgagaaggcccccggcgggccguacaagcucggcacguccgggagcugccccaacgccaccuccaagagcggcuucuucgcgaccauggccugggccguccccaaggacaacaacaagaacgccaccaacccccugacgguggaggugccguacaucugcaccgagggcgaggaccagaucaccgucuggggguuccacuccgacaacaagacccagaugaagaaccuguacggcgacagcaacccccagaaguucacguccagcgccaacggggugaccacccacuacgugucccagaucggcggcuuccccgaccagaccgaggacgggggccucccccagagcgggcgcaucgucguggacuacaugaugcagaagccgggcaagacggggaccaucguguaccagcggggcguccugcugccccagaagguguggugcgcguccggccgcagcaaggugaucaaggggagccucccccugaucggcgaggccgacugccugcacgagaaguacgggggccucaacaaguccaagcccuacuacaccggggagcacgccaaggccaucggcaacugcccgaucugggucaagacgccccugaagcuggccaacggcaccaaguaccggccgcccgcgaagcuccugaaggagcgcggguucuucggcgccaucgccggguuccuggagggcgggugggagggcaugaucgccggcuggcacggguacaccagccacggcgcccacgggguggcggucgccgccgaccucaaguccacccaggaggccaucaacaagaucaccaagaaccugaacagccuguccgagcucgaggugaagaaccugcagcggcugagcggcgccauggacgagcuccacaacgagauccuggagcuggacgagaagguggacgaccuccgcgcggacacgaucuccagccagaucgagcuggccguccugcucuccaacgagggcaucaucaacagcgaggacgagcaccuccuggcccuggagcggaagcugaagaagaugcuggggcccuccgccguggacaucggcaacgggugcuucgagaccaagcacaagugcaaccagaccugccucgaccgcaucgcggccggcaccuucaacgccggggaguucagccugcccaccuucgacucccugaacaucacggccgccagccucaacgacgacggccuggacaaccacaccauccugcuguacuacuccaccgcggccagcucccucgccgugacccugaugcuggccaucuucaucgucuacauggugagccgggacaacguguccugcagcaucugccucuga

SEQ ID NO: 91658 - RNA, 1755 nt, Artificial Sequence; identical to SEQ ID NO: 90450
  derived and/or modified CDS sequence (opt1) from hemagglutinin__InfluenzaB__AGX23039

SEQ ID NO: 91659 - RNA, 1755 nt, Artificial Sequence
  derived and/or modified CDS sequence (opt1) from hemagglutinin__InfluenzaB__AGX23050
augaaggccaucaucgugcugcucauggucgugaccagcaacgccgaccgcaucugcaccggcaucacguccagcaacagcccccacguggucaagaccgcgacccagggggaggugaacgugaccggcgucaucccgcugacgaccacccccaccaaguccuacuucgccaaccugaaggggacgcggacccgcggcaagcucugccccgacugccugaacugcaccgaccuggacguggcccucgggcggcccaugugcgugggcaccacgccguccgccaaggccagcauccugcacgaggucucccccgugaccagcggcugcuuccccaucaugcacgaccgcaccaagauccggcagcuggcgaaccuccugcgcggguacgagaacauccggcuguccacccagaacgugaucgacgccgagaaggcccccggcgggccguaccgccucggcacgagcggguccugccccaacgccaccagcaaguccggcuucuucgcgaccauggccugggccguccccaaggacaacaacaagaacgccaccaacccccugacgguggaggugccguacaucugcaccgagggcgaggaccagaucaccgucuggggguuccacagcgacaacaagacccagaugaagaaccuguacggcgacuccaacccccagaaguucacgagcuccgccaacggggugaccacccacuacgugagccagaucggcggcuuccccgaccagaccgaggacgggggccucccccaguccgggcggaucgucguggacuacaugaugcagaagccgggcaagacggggaccaucguguaccagcgcggcguccugcugccccagaagguguggugcgcgagcggccggagcaaggugaucaaggggucccucccccugaucggcgaggccgacugccugcacgagaaguacgggggccucaacaagagcaagcccuacuacaccggggagcacgccaaggccaucggcaacugcccgaucugggucaagacgccccugcgccuggccaacggcaccaaguaccggccgcccgcgaagcuccugaaggagcgcggguucuucggcgccaucgccggguuccuggagggcgggugggagggcaugaucgccggcuggcacggguacaccucccacggcgcccacgggguggcggucgccgccgaccucaagagcacccaggaggccaucaacaagaucaccaagaaccugaacucccugagcgagcucgaggugaagaaccugcagcggcuguccggcgccauggacgagcuccacaacgagauccuggagcuggacgagaagguggacgaccuccgcgcggacacgaucagcucccagaucgagcuggccguccugcucagcaacgagggcaucaucaacuccgaggacgagcaccuccuggcccuggagcggaagcugaagaagaugcuggggcccagcgccguggacaucggcaacgggugcuucgagaccaagcacaagugcaaccagaccugccucgaccgcaucgcggccggcaccuucaacgccggggaguucucccugcccaccuucgacagccugaacaucacggccgccucccucaacgacgacggccuggacaaccacaccauccugcuguacuacagcaccgcggccuccagccucgccgugacccugaugcuggccaucuucaucgucuacauggugucccgggacaacgugagcugcagcaucugccucuga

SEQ ID NO: 91660 - RNA, 1755 nt, Artificial Sequence
  derived and/or modified CDS sequence (opt1) from hemagglutinin__InfluenzaB__AGX23061
augaaggccaucaucgugcugcucauggucgugaccagcaacgccgaccgcaucugcaccggcaucacguccagcaacagcccccacguggucaagaccgcgacccagggggaggugaacgugaccggcgucaucccgcugacgaccacccccaccaaguccuacuucgccaaccugaaggggacgcggacccgcggcaagcucugccccgacugccugaacugcaccgaccuggacguggcccucgggcggcccaugugcgugggcaccacgccguccgccaaggccagcauccugcacgagguccgccccgugaccuccggcugcuuccccaucaugcacgaccggaccaagauccgccagcuggcgaaccuccugcggggguacgagaacauccgccugagcacccagaacgugaucgacgccgagaaggcccccggcgggccguaccggcucggcacguccgggagcugccccaacgccaccuccaagagcggcuucuucgcgaccauggccugggccguccccaaggacaacaacaagaacgccaccaacccccugacgguggaggugccguacaucugcaccgagggcgaggaccagaucaccgucuggggguuccacuccgacaacaagacccagaugaagaaccuguacggcgacagcaacccccagaaguucacguccagcgccaacggggugaccacccacuacgugucccagaucggcggcuuccccgaccagaccgaggacgggggccucccccagagcgggcgcaucgucguggacuacaugaugcagaagccgggcaagacggggaccaucguguaccagcggggcguccugcugccccagaagguguggugcgcguccggccgcagcaaggugaucaaggggagccucccccugaucggcgaggccgacugccugcacgagaaguacgggggccucaacaaguccaagcccuacuacaccggggagcacgccaaggccaucggcaacugcccgaucugggucaagacgccccugcggcuggccaacggcaccaaguaccgcccgcccgcgaagcuccugaaggagcggggguucuucggcgccaucgccggguuccuggagggcgggugggagggcaugaucgccggcuggcacggguacaccagccacggcgcccacgggguggcggucgccgccgaccucaaguccacccaggaggccaucaacaagaucaccaagaaccugaacagccuguccgagcucgaggugaagaaccugcagcgccugagcggcgccauggacgagcuccacaacgagauccuggagcuggacgagaagguggacgaccuccgggcggacacgaucuccagccagaucgagcuggccguccugcucuccaacgagggcaucaucaacagcgaggacgagcaccuccuggcccuggagcgcaagcugaagaagaugcuggggcccuccgccguggacaucggcaacgggugcuucgagaccaagcacaagugcaaccagaccugccucgaccggaucgcggccggcaccuucaacgccggggaguucagccugcccaccuucgacucccugaacaucacggccgccagccucaacgacgacggccuggacaaccacaccauccugcuguacuacuccaccgcggccagcucccucgccgugacccugaugcuggccaucuucaucgucuacauggugagccgcgacaacguguccugcagcaucugccucuga

SEQ ID NO: 91661 - RNA, 1755 nt, Artificial Sequence; identical to SEQ ID NO: 90450
  derived and/or modified CDS sequence (opt1) from hemagglutinin__InfluenzaB__AGX23072

SEQ ID NO: 91662 - RNA, 1755 nt, Artificial Sequence; identical to SEQ ID NO: 91062
  derived and/or modified CDS sequence (opt1) from hemagglutinin__InfluenzaB__AGX23083

SEQ ID NO: 91663 - RNA, 1755 nt, Artificial Sequence; identical to SEQ ID NO: 90450
  derived and/or modified CDS sequence (opt1) from hemagglutinin__InfluenzaB__AGX23094

SEQ ID NO: 91664 - RNA, 1755 nt, Artificial Sequence; identical to SEQ ID NO: 90450
  derived and/or modified CDS sequence (opt1) from hemagglutinin__InfluenzaB__AGX23105

SEQ ID NO: 91665 - RNA, 1755 nt, Artificial Sequence; identical to SEQ ID NO: 91062
  derived and/or modified CDS sequence (opt1) from hemagglutinin__InfluenzaB__AGX23116

SEQ ID NO: 91666 - RNA, 1755 nt, Artificial Sequence; identical to SEQ ID NO: 90450
  derived and/or modified CDS sequence (opt1) from hemagglutinin__InfluenzaB__AGX23127

SEQ ID NO: 91667 - RNA, 1755 nt, Artificial Sequence; identical to SEQ ID NO: 90450
  derived and/or modified CDS sequence (opt1) from hemagglutinin__InfluenzaB__AGX23138

SEQ ID NO: 91668 - RNA, 1755 nt, Artificial Sequence
  derived and/or modified CDS sequence (opt1) from hemagglutinin__InfluenzaB__AGX23149
augaaggccaucaucgugcugcucauggucgugaccagcaacgccgaccgcaucugcaccggcaucacguccagcgacagcccccacguggucaagaccgcgacccagggggaggugaacgugaccggcgucaucccgcugacgaccacccccaccaaguccuacuucgccaaccugaaggggacgcggacccgcggcaagcucugccccgacugccugaacugcaccgaccuggacguggcccucgggcggcccaugugcgugggcaccacgccguccgccaaggccagcauccugcacgagguccgccccgugaccuccggcugcuuccccaucaugcacgaccggaccaagauccgccagcuggcgaaccuccugcggggguacgagaacauccgccugagcacccagaacgugaucgacgccgagaaggcccccggcgggccguaccggcucggcacguccgggagcugccccaacgccaccuccaagagcggcuucuucgcgaccauggccugggccguccccaaggacaacaacaagaacgccaccaacccccugacgguggaggugccguacaucugcaccgagggcgaggaccagaucaccgucuggggguuccacuccgacaacaagacccagaugaagaaccuguacggcgacagcaacccccagaaguucacguccagcgccaacggggugaccacccacuacgugucccagaucggcggcuuccccgaccagaccgaggacgggggccucccccagagcgggcgcaucgucguggacuacaugaugcagaagccgggcaagacggggaccaucguguaccagcggggcguccugcugccccagaagguguggugcgcguccggccgcagcaaggugaucaaggggagccucccccugaucggcgaggccgacugccugcacgagaaguacgggggccucaacaaguccaagcccuacuacaccggggagcacgccaaggccaucggcaacugcccgaucugggucaagacgccccugaagcuggccaacggcaccaaguaccggccgcccgcgaagcuccugaaggagcgcggguucuucggcgccaucgccggguuccuggagggcgggugggagggcaugaucgccggcuggcacggguacaccagccacggcgcccacgggguggcggucgccgccgaccucaaguccacccaggaggccaucaacaagaucaccaagaaccugaacagccuguccgagcucgaggugaagaaccugcagcggcugagcggcgccauggacgagcuccacaacgagauccuggagcuggacgagaagguggacgaccuccgcgcggacacgaucuccagccagaucgagcuggccguccugcucuccaacgagggcaucaucaacagcgaggacgagcaccuccuggcccuggagcggaagcugaagaagaugcuggggcccuccgccguggacaucggcaacgggugcuucgagaccaagcacaagugcaaccagaccugccucgaccgcaucgcggccggcaccuucaacgccggggaguucagccugcccaccuucgacucccugaacaucacggccgccagccucaacgacgacggccuggacaaccacaccauccugcuguacuacuccaccgcggccagcucccucgccgugacccugaugcuggccaucuucaucgucuacauggugagccgggacaacguguccugcagcaucugccucuga

SEQ ID NO: 91669 - RNA, 1755 nt, Artificial Sequence
  derived and/or modified CDS sequence (opt1) from hemagglutinin__InfluenzaB__AGX23160
augaaggccaucaucgugcugcucauggucgugaccagcaacgccgaccgcaucugcaccggcaucacguccagcaacagcccccacguggucaagaccgcgacccagggggaggugaacgugaccggcgucaucccgcugacgaccacccccaccaaguccuacuucgccaaccugaaggggacgcggacccgcggcaagcucugccccgacugccugaacugcaccgaccuggacguggcccucgggcggcccaugugcgugggcaucaccccguccgccaaggccagcauccugcacgagguccgccccgugacguccggcugcuuccccaucaugcacgaccggaccaagauccgccagcuggcgaaccuccugcggggguacgagaacauccgccugagcacccagaacgugaucgacgccgagaaggcccccggcgggccguaccggcucggcaccuccgggagcugccccaacgccacguccaagagcggcuucuucgcgaccauggccugggccguccccaaggacaacaacaagaacgccaccaacccccugaccguggaggugccguacaucugcacggagggcgaggaccagaucaccgucuggggguuccacuccgacaacaagacccagaugaagaaccuguacggcgacagcaacccccagcgcuucaccuccagcgccaacggggugacgacccacuacgugucccagaucggcggcuuccccgaccagaccgaggacgggggccucccccagagcgggcggaucgucguggacuacaugaugcagaagccgggcaagaccgggacgaucguguaccagcgcggcguccugcugccccagaagguguggugcgcguccggccggagcaaggugaucaaggggagccucccccugaucggcgaggccgacugccugcacgagaaguacgggggccucaacaaguccaagcccuacuacaccggggagcacgccaaggccaucggcaacugcccgaucugggucaagacgccccugcgccuggccaacggcaccaaguaccggccgcccgcgaagcuccugaaggagcgcggguucuucggcgccaucgccggguuccuggagggcgggugggagggcaugaucgccggcuggcacggguacaccagccacggcgcccacgggguggcggucgccgccgaccucaaguccacccaggaggccaucaacaagaucaccaagaaccugaacagccuguccgagcucgaggugaagaaccugcagcggcugagcggcgccauggacgagcuccacaacgagauccuggagcuggacgagaagguggacgaccuccgcgcggacaccaucuccagccagaucgagcuggccguccugcucuccaacgagggcaucaucaacagcgaggacgagcaccuccuggcccuggagcggaagcugaagaagaugcuggggcccuccgccguggacaucggcaacgggugcuucgagacgaagcacaagugcaaccagaccugccucgaccgcaucgcggccggcaccuucaacgccggggaguucagccugcccaccuucgacucccugaacaucaccgccgccagccucaacgacgacggccuggacaaccacacgauccugcuguacuacuccaccgcggccagcucccucgccgugacccugaugcuggccaucuucaucgucuacauggugagccgggacaacguguccugcagcaucugccucuga

SEQ ID NO: 91670 - RNA, 1755 nt, Artificial Sequence
  derived and/or modified CDS sequence (opt1) from hemagglutinin__InfluenzaB__AGX23171
augaaggccaucaucgugcugcucauggucgugaccagcaacgccgaccgcaucugcaccggcaucacguccagcaacagcccccacguggucaagaccgcgacccagggggaggugaacgugaccggcgucaucccgcugacgaccacccccaccaaguccuacuucgccaaccugaaggggacgcggacccgcggcaagcucugccccgacugccugaacugcaccgaccuggacguggcccucgggcggcccaugugcgugggcaccacgccguccgccaaggccagcauccugcacgagguccgccccgugaccuccggcugcuuccccaucaugcacgaccggaccaagauccgccagcuggcgaaccuccugcggggguacgagaacauccgccugagcacccagaacgugaucgacgccgagaaggcccccggcgggccguaccggcucggcacguccgggagcugccccaacgccaccuccaagagcggcuucuucgcgaccauggccugggccguccccaaggacaacaacaagaacgccaccaacccccugacgguggaggugccguacaucugcaccgagggcgaggaccagaucaccgucuggggguuccacuccgacaacaagacccagaugaagaaccuguacggcgacagcaacccccagcgcuucacguccagcgccaacggggugaccacccacuacgugucccagaucggcggcuuccccgaccagaccgaggacgggggccucccccagagcgggcggaucgucguggacuacaugaugcagaagccgggcaagacggggaccaucguguaccagcgcggcguccugcugccccagaagguguggugcgcguccggccggagcaaggugaucaaggggagccucccccugaucggcgaggccgacugccugcacgagaaguacgggggccucaacaaguccaagcccuacuacaccggggagcacgccaaggccaucggcaacugcccgaucugggucaagacgccccugcgccuggccaacggcaccaaguaccggccgcccgcgaagcuccugaaggagcgcggguucuucggcgccaucgccggguuccuggagggcgggugggagggcaugaucgccggcuggcacggguacaccagccacggcgcccacgggguggcggucgccgccgaccucaaguccacccaggaggccaucaacaagaucaccaagaaccugaacagccuguccgagcucgaggugaagaaccugcagcggcugagcggcgccauggacgagcuccacaacgagauccuggagcuggacgagaagguggacgaccuccgcgcggacacgaucuccagccagaucgagcuggccguccugcucuccaacgagggcaucaucaacagcgaggacgagcaccuccuggcccuggagcggaagcugaagaagaugcuggggcccuccgccguggacaucggcaacgggugcuucgagaccaagcacaagugcaaccagaccugccucgaccgcaucgcggccggcaccuucaacgccggggaguucagccugcccaccuucgacucccugaacaucacggccgccagccucaacgacgacggccuggacaaccacaccauccugcuguacuacuccaccgcggccagcucccucgccgugacccugaugcuggccaucuucaucgucuacauggugagccgggacaacguguccugcagcaucugccucuga

SEQ ID NO: 91671 - RNA, 1755 nt, Artificial Sequence; identical to SEQ ID NO: 90450
  derived and/or modified CDS sequence (opt1) from hemagglutinin__InfluenzaB__AGX23182

SEQ ID NO: 91672 - RNA, 1755 nt, Artificial Sequence; identical to SEQ ID NO: 90450
  derived and/or modified CDS sequence (opt1) from hemagglutinin__InfluenzaB__AGX23193

SEQ ID NO: 91673 - RNA, 1755 nt, Artificial Sequence; identical to SEQ ID NO: 91062
  derived and/or modified CDS sequence (opt1) from hemagglutinin__InfluenzaB__AGX23204

SEQ ID NO: 91674 - RNA, 1755 nt, Artificial Sequence; identical to SEQ ID NO: 90450
  derived and/or modified CDS sequence (opt1) from hemagglutinin__InfluenzaB__AGX23215

SEQ ID NO: 91675 - RNA, 1755 nt, Artificial Sequence
  derived and/or modified CDS sequence (opt1) from hemagglutinin__InfluenzaB__AGX23226
augaaggccaucaucgugcugcucauggucgugaccagcaacgccgaccgcaucugcaccggcaucacguccagcaacagcccccacguggucaagaccgcgacccagggggaggugaacgugaccggcgucaucccgcugacgaccacccccaccaaguccuacuucgccaaccugaaggggacgcggacccgcggcaagcucugccccgacugccugaacugcaccgaccuggacguggcccucgggcggcccaugugcgugggcaccacgccguccgccaaggccagcauccugcacgagguccgccccgugaccuccggcugcuuccccaucaugcacgaccggaccaagauccgccagcuggcgaaccuccugcggggguacgagaacauccgccugagcacccagaacgugaucgacgccgagaaggcccccggcgggccguaccggcucggcacguccgggagcugccccaacgccaccuccaagagcggcuucuucgcgaccauggccugggccguccccaaggacaacaacaagaacgccaccaacccccugacgguggaggugccguacaucugcaaggagggcgaggaccagaucaccgucuggggguuccacuccgacaacaagacccagaugaagaaccuguacggcgacagcaacccccagaaguucaccuccagcgccuccggggugacgacccacuacgugagccagaucggcggcuuccccgaccagaccgaggacgggggccucccccaguccgggcgcaucgucguggacuacaugauccagaagccgggcaagaccgggacgaucguguaccagcggggcguccugcugccccagaagguguggugcgcgagcggccgcagcaaggugaucaaggggucccucccccugaucggcgaggccgacugccugcacgagaaguacgggggccucaacaagagcaagcccuacuacaccggggagcacgccaaggccaucggcaacugcccgaucugggucaagacgccccugaagcuggccaacggcaccaaguaccggccgcccgcgaagcuccugaaggagcgcggguucuucggcgccaucgccggguuccuggagggcgggugggagggcaugaucgccggcuggcacggguacaccucccacggcgcccacgggguggcggucgccgccgaccucaagagcacccaggaggccaucaacaagaucaccaagaaccugaacucccugagcgagcucgaggugaagaaccugcagcggcuguccggcgccauggacgagcuccacaacgagauccuggagcuggacgagaagguggacgaccuccgcgcggacaccaucagcucccagaucgagcuggccguccugcucagcaacgagggcaucaucaacuccgaggacgagcaccuccuggcccuggagcggaagcugaagaagaugcuggggcccagcgccguggacaucggcaacgggugcuucgagacgaagcacaagugcaaccagaccugccucgaccgcaucgcggccggcaccuucaacgccggggaguucucccugcccaccuucgacagccugaacaucaccgccgccucccucaacgacgacggccuggacaaccacacgauccugcuguacuacagcaccgcggccuccagccucgccgugacccugaugcuggccaucuucaucgucuacauggugucccgggacaacgugagcugcagcaucugccucuga

SEQ ID NO: 91676 - RNA, 1755 nt, Artificial Sequence; identical to SEQ ID NO: 91623
  derived and/or modified CDS sequence (opt1) from hemagglutinin__InfluenzaB__AGX23237

SEQ ID NO: 91677 - RNA, 1755 nt, Artificial Sequence
  derived and/or modified CDS sequence (opt1) from hemagglutinin__InfluenzaB__AGX23248
augaaggccaucaucgugcugcucauggucgugaccagcaacgccgaccgcaucugcaccggcaucacguccagcaacagcccccacguggucaagaccgcgacccagggggaggugaacgugaccggcgucaucccgcugacgaccacccccaccaaguccuacuucgccaaccugaaggggacgcggacccgcggcaagcucugccccgacugccugaacugcaccgaccuggacguggcccucgggcggcccaugugcgugggcaccacgccguccgccaaggccagcauccugcacgagguccgccccgugaccuccggcugcuuccccaucaugcacgaccggaccaagauccgccagcuggcgaaccuccugcggggguacgagaacauccgccugagcacccagaacgugaucgacgccgagaaggcccccggcgggccguaccggcucggcacguccgggagcugccccaacgccaccuccaagagcggcuucuucgcgaccauggccugggccguccccaaggacaacaacaagaacgccaccaacccccugacgguggaggugccguacaucugcaaggagggcgaggaccagaucaccgucuggggguuccacuccgacaacaagacccagaugaagaaccuguacggcgacagcaacccccagaaguucaccuccagcgccuccggggugacgacccacuacgugagccagaucggcggcuuccccgaccagaccgaggacgggggccucccccaguccgggcgcaucgucguggacuacaugauccagaagccgggcaagaccgggacgaucguguaccagcggggcguccugcugccccagaagguguggugcgcgagcggccgcagcaaggugaucaaggggucccucccccugaucggcgaggccgacugccugcacgagaaguacgggggccucaacaagagcaagcccuacuacaccggggagcacgccaaggccaucggcaacugcccgaucugggucaagacgccccugaagcuggccaacggcaccaaguaccggccgcccgcgaagcuccugaaggagcgcggguucuucggcgccaucgccggguuccuggagggcgggugggagggcaugaucgccggcuggcacggguacaccucccacggcgcccacgggguggcggucgccgccgaccucaagagcacccaggaggccaucaacaagaucaccaagaaccugaacucccugagcgagcucgaggugaagaaccugcagcggcuguccggcgccauggacgagcuccacaacgagauccuggagcuggacgagaagguggacgaccuccgcgcggacaccaucagcucccagaucgagcuggccguccugcucagcaacgagggcaucaucaacuccgaggacgagcaccuccuggcccuggagcggaagcugaagaagaugcuggggcccagcgccguggacaucggcaacgggugcuucgagacgaagcacaagugcaaccagaccugccucaaccgcaucgcggccggcaccuucaacgccggggaguucucccugcccaccuucgacagccugaacaucaccgccgccucccucaacgacgacggccuggacaaccacacgauccugcuguacuacagcaccgcggccuccagccucgccgugacccugaugcuggccaucuucaucgucuacauggugucccgggacaacgugagcugcagcaucugccucuga

SEQ ID NO: 91678 - RNA, 1755 nt, Artificial Sequence; identical to SEQ ID NO: 90450
  derived and/or modified CDS sequence (opt1) from hemagglutinin__InfluenzaB__AGX23259

SEQ ID NO: 91679 - RNA, 1755 nt, Artificial Sequence; identical to SEQ ID NO: 90450
  derived and/or modified CDS sequence (opt1) from hemagglutinin__InfluenzaB__AGX23270

SEQ ID NO: 91680 - RNA, 1755 nt, Artificial Sequence
  derived and/or modified CDS sequence (opt1) from hemagglutinin__InfluenzaB__AGX23281
augaaggccaucaucgugcugcucauggucgugaccagcaacgccgaccgcaucugcaccggcaucacguccagcaacagcccccacguggucaagaccgcgacccagggggaggugaacgugaccggcgucaucccgcugacgaccacccccaccaaguccuacuucgccaaccugaaggggacgcggacccgcggcaagcucugccccgacugccugaacugcaccgaccuggacguggcccucgggcggcccaugugcgugggcaccacgccguccgccaaggccagcauccugcacgagguccgccccgugaccuccggcugcuuccccaucaugcacgaccggaccaagauccgccagcuggcgaaccuccugcggggguacgagaacauccgccugagcacccagaacgugaucgacgccgagaaggcccccggcgggccguaccggcucggcacguccgggagcugccccaacgccgcguccaagagcggcuucuucgccaccauggccugggccguccccaaggacaacaacaagaacgccaccaacccccugaccguggaggugccguacaucugcacggagggcgaggaccagaucaccgucuggggguuccacuccgacaacaagacccagaugaagaaccuguacggcgacagcaacccccagaaguucaccuccagcgcgaacggggugacgacccacuacgugucccagaucggcggcuuccccgaccagaccgaggacgggggccucccccagagcgggcgcaucgucguggacuacaugaugcagaagccgggcaagaccgggacgaucguguaccagcggggcguccugcugccccagaagguguggugcgccuccggccgcagcaaggugaucaaggggagccucccccugaucggcgaggccgacugccugcacgagaaguacgggggccucaacaaguccaagcccuacuacaccggggagcacgccaaggccaucggcaacugcccgaucugggucaagacgccccugaagcuggcgaacggcaccaaguaccggccgcccgccaagcuccugaaggagcgcggguucuucggcgccaucgccggguuccuggagggcgggugggagggcaugaucgccggcuggcacggguacaccagccacggcgcgcacgggguggccgucgccgccgaccucaaguccacccaggaggccaucaacaagaucaccaagaaccugaacagccuguccgagcucgaggugaagaaccugcagcggcugagcggcgcgauggacgagcuccacuccgagauccuggagcuggacgagaagguggacgaccuccgcgccgacaccaucagcucccagaucgagcuggccguccugcucagcaacgagggcaucaucaacuccgaggacgagcaccuccuggcccuggagcggaagcugaagaagaugcuggggcccagcgcgguggacaucggcaacgggugcuucgagacgaagcacaagugcaaccagaccugccucgaccgcaucgccgccggcaccuucaacgccggggaguucucccugcccaccuucgacagccugaacaucaccgccgcgucccucaacgacgacggccuggacaaccacacgauccugcuguacuacagcaccgccgccuccagccucgccgugacccugaugcuggccaucuucaucgucuacauggugucccgggacaacgugagcugcagcaucugccucuga

SEQ ID NO: 91681 - RNA, 1755 nt, Artificial Sequence
  derived and/or modified CDS sequence (opt1) from hemagglutinin__InfluenzaB__AGX23292
augaaggccaucaucgugcugcucauggucgugaccagcaacgccgaccgcaucugcaccggcaucacguccagcaacagcccccacguggucaagaccgcgacccagggggaggugaacgugaccggcgucaucccgcugacgaccacccccaccaaguccuacuucgccaaccugaaggggacgcggacccgcggcaagcucugccccgacugccugaacugcaccgaccuggacguggcccucgggcggcccaugugcgugggcaccacgccguccgccaaggccagcauccugcacgagguccgccccgugaccuccggcugcuuccccaucaugcacgaccggaccaagauccgccagcuggcgaaccuccugcggggguacgagaacauccgccugagcacccagaacgugaucgacgccgagaaggcccccggcgggccguaccggcucggcacguccgggagcugccccaacgccaacuccaagagcggcuucuucgcgaccauggccugggccguccccaaggacaacaacaagaacgccaccaacccccugaccguggaggugccguacaucugcacggagggcgaggaccagaucaccgucuggggguuccacuccgacaacaagacccagaugaagaaccuguacggcgacagcaacccccagaaguucaccuccagcgccaacggggugacgacccacuacgugucccagaucggcggcuuccccgaccagaccgaggacgggggccucccccagagcgggcgcaucgucguggacuacaugaugcagaagccgggcaagaccgggacgaucguguaccagcggggcguccugcugccccagaagguguggugcgcguccggccgcagcaaggugaucaaggggagccucccccugaucggcgaggccgacugccugcacgagaaguacgggggccucaacaaguccaagcccuacuacaccggggagcacgccaaggccaucggcaacugcccgaucugggucaagacgccccugaagcuggccaacggcaccaaguaccggccgcccgcgaagcuccugaaggagcgcggguucuucggcgccaucgccggguuccuggagggcgggugggagggcaugaucgccggcuggcacggguacaccagccacggcgcccacgggguggcggucgccgccgaccucaaguccacccaggaggccaucaacaagaucaccaagaaccugaacagccuguccgagcucgaggugaagaaccugcagcggcugagcggcgccauggacgagcuccacaacgagauccuggagcuggacgagaagguggacgaccuccgcgcggacaccaucuccagccagaucgagcuggccguccugcucuccaacgagggcaucaucaacagcgaggacgagcaccuccuggcccuggagcggaagcugaagaagaugcuggggcccuccgccguggacaucggcaacgggugcuucgagacgaagcacaagugcaaccagaccugccucgaccgcaucgcggccggcaccuucaacgccggggaguucagccugcccaccuucgacucccugaacaucaccgccgccagccucaacgacgacggccuggacaaccacacgauccugcuguacuacuccaccgcggccagcucccucgccgugacccugaugcuggccaucuucaucgucuacauggugagccgggacaacguguccugcagcaucugccucuga

SEQ ID NO: 91682 - RNA, 1755 nt, Artificial Sequence
  derived and/or modified CDS sequence (opt1) from hemagglutinin__InfluenzaB__AGX23314
augaaggccaucaucgugcugcucauggucgugaccagcaacgccgaccgcaucugcaccggcaucacguccagcaacagcccccacguggucaagaccgcgacccagggggaggugaacgugaccggcgucaucccgcugacgaccacccccaccaaguccuacuucgccaaccugaaggggacgcggacccgcggcaagcucugccccgacugccugaacugcaccgaccuggacguggcccucgggcggcccaugugcgugggcaccacgccguccgccaaggccagcauccugcacgagguccgccccgugaccuccggcugcuuccccaucaugcacgaccggaccaagauccgccagcuggcgaaccuccugcggggguacgagaacauccgccugagcacccagaacgugaucgacgccgagcgggcccccggcgggccguaccgccucggcacguccgggagcugccccaacgccaccuccaagagcggcuucuucgcgaccauggccugggccguccccaaggacaacaacaagaacgccaccaacccccugacgguggaggugccguacaucugcaccgagggcgaggaccagaucaccgucuggggguuccacuccgacaacaagacccagaugaagaaccuguacggcgacagcaacccccagaaguucacguccagcgccaacggggugaccacccacuacgugucccagaucggcggcuuccccgaccagaccgaggacgggggccucccccagagcgggcggaucgucguggacuacaugaugcagaagccgggcaagacggggaccaucguguaccagcgcggcguccugcugccccagaagguguggugcgcguccggccggagcaaggugaucaaggggagccucccccugaucggcgaggccgacugccugcacgagaaguacgggggccucaacaaguccaagcccuacuacaccggggagcacgccaaggccaucggcaacugcccgaucugggucaagacgccccugaagcuggccaacggcaccaaguaccgcccgcccgcgaagcuccugaaggagcggggguucuucggcgccaucgccggguuccuggagggcgggugggagggcaugaucgccggcuggcacggguacaccagccacggcgcccacgggguggcggucgccgccgaccucaaguccacccaggaggccaucaacaagaucaccaagaaccugaacagccuguccgagcucgaggugaagaaccugcagcgccugagcggcgccauggacgagcuccacaacgagauccuggagcuggacgagaagguggacgaccuccgggcggacacgaucuccagccagaucgagcuggccguccugcucuccaacgagggcaucaucaacagcgaggacgagcaccuccuggcccuggagcgcaagcugaagaagaugcuggggcccuccgccguggacaucggcaacgggugcuucgagaccaagcacaagugcaaccagaccugccucgaccggaucgcggccggcaccuucaacgccggggaguucagccugcccaccuucgacucccugaacaucacggccgccagccucaacgacgacggccuggacaaccacaccauccugcuguacuacuccaccgcggccagcucccucgccgugacccugaugcuggccaucuucaucgucuacauggugagccgcgacaacguguccugcagcaucugccucuga

SEQ ID NO: 91683 - RNA, 1755 nt, Artificial Sequence; identical to SEQ ID NO: 91682
  derived and/or modified CDS sequence (opt1) from hemagglutinin__InfluenzaB__AGX23325

SEQ ID NO: 91684 - RNA, 1755 nt, Artificial Sequence; identical to SEQ ID NO: 91682
  derived and/or modified CDS sequence (opt1) from hemagglutinin__InfluenzaB__AGX23336

SEQ ID NO: 91685 - RNA, 1755 nt, Artificial Sequence; identical to SEQ ID NO: 91682
  derived and/or modified CDS sequence (opt1) from hemagglutinin__InfluenzaB__AGX23347

SEQ ID NO: 91686 - RNA, 1755 nt, Artificial Sequence; identical to SEQ ID NO: 91682
  derived and/or modified CDS sequence (opt1) from hemagglutinin__InfluenzaB__AGX23358

SEQ ID NO: 91687 - RNA, 1755 nt, Artificial Sequence; identical to SEQ ID NO: 91682
  derived and/or modified CDS sequence (opt1) from hemagglutinin__InfluenzaB__AGX23369

SEQ ID NO: 91688 - RNA, 1755 nt, Artificial Sequence; identical to SEQ ID NO: 91682
  derived and/or modified CDS sequence (opt1) from hemagglutinin__InfluenzaB__AGX23380

SEQ ID NO: 91689 - RNA, 1755 nt, Artificial Sequence; identical to SEQ ID NO: 90450
  derived and/or modified CDS sequence (opt1) from hemagglutinin__InfluenzaB__AGX23391

SEQ ID NO: 91690 - RNA, 1755 nt, Artificial Sequence
  derived and/or modified CDS sequence (opt1) from hemagglutinin__InfluenzaB__AGX23413
augaaggccaucaucgugcugcucauggucgugaccagcaacgccgaccgcaucugcaccggcaucacguccagcaacagcccccacguggucaagaccgcgacccagggggaggugaacgugaccggcgucaucccgcugacgaccacccccaccaaguccuacuucgccaaccugaaggggacgcggacccgcggcaagcucugccccgacugccugaacugcaccgaccuggacguggcccucgggcggcccaugugcgugggcaccacgccguccgccaaggccagcauccugcacgagguccgccccgugaccuccggcugcuuccccaucaugcacgaccggaccaagauccgccagcuggcgaaccuccugcggggguacgagaacauccgccugagcaaccagaacgugaucgacgccgagcgggcccccggcgggccguaccgccucggcaccuccgggagcugccccaacgccacguccaagagcggcuucuucgcgaccauggccugggccguccccaaggacaacaacaagaacgccaccaacccccugaccguggaggugccguacaucugcacggagggcgaggaccagaucaccgucuggggguuccacuccgacaacaagacccagaugaagaaccuguacggcgacagcaacccccagaaguucaccuccagcgccaacggggugacgacccacuacgugucccagaucggcggcuuccccgaccagaccgaggacgggggccucccccagagcgggcggaucgucguggacuacaugaugcagaagccgggcaagaccgggacgaucguguaccagcgcggcguccugcugccccagaagguguggugcgcguccggccggagcaaggugaucaaggggagccucccccugaucggcgaggccgacugccugcacgagaaguacgggggccucaacaaguccaagcccuacuacaccggggagcacgccaaggccaucggcaacugcccgaucugggucaagacgccccugaagcuggccaacggcaccaaguaccgcccgcccgcgaagcuccugaaggagcggggguucuucggcgccaucgccggguuccuggagggcgggugggagggcaugaucgccggcuggcacggguacaccagccacggcgcccacgggguggcggucgccgccgaccucaaguccacccaggaggccaucaacaagaucaccaagaaccugaacagccuguccgagcucgaggugaagaaccugcagcgccugagcggcgccauggacgagcuccacaacgagauccuggagcuggacgagaagguggacgaccuccgggcggacaccaucuccagccagaucgagcuggccguccugcucuccaacgagggcaucaucaacagcgaggacgagcaccuccuggcccuggagcgcaagcugaagaagaugcuggggcccuccgccguggacaucggcaacgggugcuucgagacgaagcacaagugcaaccagaccugccucgaccggaucgcggccggcaccuucaacgccggggaguucagccugcccaccuucgacucccugaacaucaccgccgccagccucaacgacgacggccuggacaaccacacgauccugcuguacuacuccaccgcggccagcucccucgccgugacccugaugcuggccaucuucaucgucuacauggugagccgcgacaacguguccugcagcaucugccucuga

SEQ ID NO: 91691 - RNA, 1755 nt, Artificial Sequence; identical to SEQ ID NO: 91690
  derived and/or modified CDS sequence (opt1) from hemagglutinin__InfluenzaB__AGX23424

SEQ ID NO: 91692 - RNA, 1755 nt, Artificial Sequence; identical to SEQ ID NO: 90844
  derived and/or modified CDS sequence (opt1) from hemagglutinin__InfluenzaB__AGX23435

SEQ ID NO: 91693 - RNA, 1755 nt, Artificial Sequence; identical to SEQ ID NO: 90755
  derived and/or modified CDS sequence (opt1) from hemagglutinin__InfluenzaB__AGX23446

SEQ ID NO: 91694 - RNA, 1755 nt, Artificial Sequence; identical to SEQ ID NO: 90844
  derived and/or modified CDS sequence (opt1) from hemagglutinin__InfluenzaB__AGX23457

SEQ ID NO: 91695 - RNA, 1755 nt, Artificial Sequence; identical to SEQ ID NO: 90755
  derived and/or modified CDS sequence (opt1) from hemagglutinin__InfluenzaB__AGX23468

SEQ ID NO: 91696 - RNA, 1755 nt, Artificial Sequence; identical to SEQ ID NO: 90450
  derived and/or modified CDS sequence (opt1) from hemagglutinin__InfluenzaB__AGX23479

SEQ ID NO: 91697 - RNA, 1755 nt, Artificial Sequence; identical to SEQ ID NO: 90450
  derived and/or modified CDS sequence (opt1) from hemagglutinin__InfluenzaB__AGX23490

SEQ ID NO: 91698 - RNA, 1755 nt, Artificial Sequence; identical to SEQ ID NO: 91071
  derived and/or modified CDS sequence (opt1) from hemagglutinin__InfluenzaB__AGX23501

SEQ ID NO: 91699 - RNA, 1755 nt, Artificial Sequence
  derived and/or modified CDS sequence (opt1) from hemagglutinin__InfluenzaB__AGX23512
augaaggccaucaucgugcugcucauggucgugaccagcaacgccgaccgcaucugcaccggcaucacguccagcaacagcccccacguggucaagaccgcgacccagggggaggugaacgugaccggcgucaucccgcugacgaccacccccaccaaguccuacuucgccaaccugaaggggacgaagacccggggcaagcucugccccgacugccugaacugcaccgaccuggacguggcccucgggcgccccaugugcgugggcaccacgccguccgccaaggccagcauccugcacgagguccggcccgugaccuccggcugcuuccccaucaugcacgaccgcaccaagauccggcagcuggcgaaccuccugcgcggguacgagaacauccggcugagcacccagaacgugaucgacgccgagaaggcccccggcgggccguaccgccucggcacguccgggagcugccccaacgccaccuccaagagcggcuucuucgcgaccauggccugggccguccccaaggacaacaacaagaacgccaccaacccccugacgguggaggugccguacaucugcaccgagggcgaggaccagaucaccgucuggggguuccacuccgacaacaagacccagaugaagacgcuguacggcgacagcaacccccagaaguucaccuccagcgccaacggggugaccacccacuacgugucccagaucggcggcuuccccgaccagacggaggacgggggccucccccagagcgggcggaucgucguggacuacaugaugcagaagccgggcaagaccgggaccaucguguaccagcgcggcguccugcugccccagaagguguggugcgcguccggccggagcaaggugaucaaggggagccucccccugaucggcgaggccgacugccugcacgagaaguacgggggccucaacaaguccaagcccuacuacaccggggagcacgccaaggccaucggcaacugcccgaucugggucaagacgccccugaagcuggccaacggcaccaaguaccgcccgcccgcgaagcuccugaaggagcggggguucuucggcgccaucgccggguuccuggagggcgggugggagggcaugaucgccggcuggcacggguacaccagccacggcgcccacgggguggcggucgccgccgaccucaaguccacccaggaggccaucaacaagaucacgaagaaccugaacagccuguccgagcucgaggugaagaaccugcagcgccugagcggcgccauggacgagcuccacaacgagauccuggagcuggacgagaagguggacgaccuccgggcggacaccaucuccagccagaucgagcuggccguccugcucuccaacgagggcaucaucaacagcgaggacgagcaccuccuggcccuggagcgcaagcugaagaagaugcuggggcccuccgccguggacaucggcaacgggugcuucgagaccaagcacaagugcaaccagaccugccucgaccggaucgcggccggcaccuucaacgccggggaguucagccugcccacguucgacucccugaacaucaccgccgccagccucaacgacgacggccuggacaaccacaccauccugcuguacuacuccaccgcggccagcucccucgccgugacgcugaugcuggccaucuucaucgucuacauggugagccgcgacaacguguccugcagcaucugccucuga

SEQ ID NO: 91700 - RNA, 1755 nt, Artificial Sequence; identical to SEQ ID NO: 90450
  derived and/or modified CDS sequence (opt1) from hemagglutinin__InfluenzaB__AGX23523

SEQ ID NO: 91701 - RNA, 1755 nt, Artificial Sequence; identical to SEQ ID NO: 90755
  derived and/or modified CDS sequence (opt1) from hemagglutinin__InfluenzaB__AGX23534

SEQ ID NO: 91702 - RNA, 1755 nt, Artificial Sequence; identical to SEQ ID NO: 90755
  derived and/or modified CDS sequence (opt1) from hemagglutinin__InfluenzaB__AGX23545

SEQ ID NO: 91703 - RNA, 1755 nt, Artificial Sequence; identical to SEQ ID NO: 90450
  derived and/or modified CDS sequence (opt1) from hemagglutinin__InfluenzaB__AGX23556

SEQ ID NO: 91704 - RNA, 1755 nt, Artificial Sequence; identical to SEQ ID NO: 90450
  derived and/or modified CDS sequence (opt1) from hemagglutinin__InfluenzaB__AGX23567

SEQ ID NO: 91705 - RNA, 1755 nt, Artificial Sequence; identical to SEQ ID NO: 90450
  derived and/or modified CDS sequence (opt1) from hemagglutinin__InfluenzaB__AGX23578

SEQ ID NO: 91706 - RNA, 1755 nt, Artificial Sequence; identical to SEQ ID NO: 90450
  derived and/or modified CDS sequence (opt1) from hemagglutinin__InfluenzaB__AGX23600

SEQ ID NO: 91707 - RNA, 1755 nt, Artificial Sequence
  derived and/or modified CDS sequence (opt1) from hemagglutinin__InfluenzaB__AGX23611
augaaggccaucaucgugcugcucauggucgugaccagcaacgccgaccgcaucugcaccggcaucacguccagcaacagcccccacguggucaagaccgcgacccagggggaggugaacgugaccggcgucaucccgcugacgaccacccccaccaaguccuacuucgccaaccugaaggggacgcggacccgcggcaagcucugccccgacugccugaacugcaccgaccuggacguggcccucgggcggcccaugugcgugggcaccacgccguccgccaaggccagcauccugcacgagguccgccccgugaccuccggcugcuuccccaucaugcacgaccggaccaagauccgccagcuggcgaaccuccugcggggguacgagaacauccgccugagcacccagaacgugaucgacgccgagaaggcccccggcgggccguaccggcucggcacguccgggagcugccccaacgccaccuccaagagcggcuucuucgcgaccauggccugggccguccccaaggacaacaacaagaacgccaccaacccccugacgguggaggugccguacaucugcaccgagggcgaggaccagaucaccgucuggggguuccacuccgacaacaagacccagaugaagaaccuguacggcgacagcaacccccagaaguucacguccagcgccaacggggugaccacccacuacgugucccagaucggcggcuuccccgaccagaccgaggacgggggccucccccagagcgggcgcaucgucguggacuacaugaugcagaagccgggcaagacggggaccaucguguaccagcggggcguccugcugccccagaagguguggugcgcguccggccgcagcaaggugaucaaggggagccucccccugaucggcgaggccgacugccugcacgagaaguacgggggccucaacaaguccaagcccuacuacaccggggagcacgccaaggccaucggcaacugcccgaucugggucaagacgccccugaagcuggccaacggcaccaaguaccggccgcccgcgaagcuccugaaggagcgcggguucuucggcgccaucgccggguuccuggagggcgggugggagggcaugaucgccggcuggcacggguacaccagccacggcgcccacgggguggcggucgccgccgaccucaaguccacccaggaggccaucaacaagaucaccaagaaccugaacagccuguccgagcucgagaucaagaaccugcagcggcugagcggcgccauggacgagcuccacaacgagauccuggagcuggacgagaagguggacgaccuccgcgcggacacgaucuccagccagaucgagcuggccgugcugcucuccaacgagggcaucaucaacagcgaggacgagcaccuccuggcccuggagcggaagcugaagaagaugcuggggcccuccgccgucgacaucggcaacgggugcuucgagaccaagcacaagugcaaccagaccugccucgaccgcaucgcggccggcaccuucaacgccggggaguucagccugcccaccuucgacucccugaacaucacggccgccagccucaacgacgacggccuggacaaccacaccauccugcuguacuacuccaccgcggccagcucccucgccgugacccugaugcuggccaucuucaucguguacauggucagccgggacaacguguccugcagcaucugccucuga

SEQ ID NO: 91708 - RNA, 1755 nt, Artificial Sequence; identical to SEQ ID NO: 90450
  derived and/or modified CDS sequence (opt1) from hemagglutinin__InfluenzaB__AGX23622

SEQ ID NO: 91709 - RNA, 1755 nt, Artificial Sequence; identical to SEQ ID NO: 90755
  derived and/or modified CDS sequence (opt1) from hemagglutinin__InfluenzaB__AGX23633

SEQ ID NO: 91710 - RNA, 1755 nt, Artificial Sequence; identical to SEQ ID NO: 90755
  derived and/or modified CDS sequence (opt1) from hemagglutinin__InfluenzaB__AGX23644

SEQ ID NO: 91711 - RNA, 1755 nt, Artificial Sequence; identical to SEQ ID NO: 90450
  derived and/or modified CDS sequence (opt1) from hemagglutinin__InfluenzaB__AGX23655

SEQ ID NO: 91712 - RNA, 1755 nt, Artificial Sequence; identical to SEQ ID NO: 90755
  derived and/or modified CDS sequence (opt1) from hemagglutinin__InfluenzaB__AGX23666

SEQ ID NO: 91713 - RNA, 1755 nt, Artificial Sequence
  derived and/or modified CDS sequence (opt1) from hemagglutinin__InfluenzaB__AGX23677
augaaggccaucaucgugcugcucauggucgugaccagcaacgccgaccgcaucugcaccggcaucacguccagcaacagcccccacguggucaagaccgcgacccagggggaggugaacgugaccggcgucaucccgcugacgaccacccccaccaaguccuacuucgccaaccugaaggggacgaagacccggggcaagcucugccccgacugccugaacugcaccgaccuggacguggcccucgggcgccccaugugcgugggcaccacgccguccgccaaggccagcauccugcacgagguccggcccgugaccuccggcugcuuccccaucaugcacgaccgcaccaagauccggcagcuggcgaaccuccugcgcggguacgagaagauccggcugagcacccagaacgugaucgacgccgagaaggcccccggcgggccguaccgccucggcacguccgggagcugccccaacgccaccuccaagagcggcuucuucgcgaccauggccugggccguccccaaggacaacaacaagaacgccaccaacccccugacgguggaggugccguacaucugcaucgagggcgaggaccagaucaccgucuggggguuccacuccgacaacaagacccagaugaagaaccuguacggcgacagcaacccccagaaguucaccuccagcgccaacggggugacgacccacuacgugucccagaucggcggcuuccccgaccagaccgaggacgggggccucccccagagcgggcggaucgucguggacuacaugaugcagaagccgggcaagaccgggacgaucguguaccagcgcggcguccugcugccccagaagguguggugcgcguccggccggagcaaggugaucaaggggagccucccccugaucggcgaggccgacugccugcacgagaaguacgggggccucaacaaguccaagcccuacuacaccggggagcacgccaaggccaucggcaacugcccgaucugggucaagacgccccugaagcuggccaacggcaccaaguaccgcccgcccgcgaagcuccugaaggagcggggguucuucggcgccaucgccggguuccuggagggcgggugggagggcaugaucgccggcuggcacggguacaccagccacggcgcccacgggguggcggucgccgccgaccucaaguccacccaggaggccaucaacaagaucaccaagaaccugaacagccuguccgagcucgaggugaagaaccugcagcgccugagcggcgccauggacgagcuccacaacgagauccuggagcuggacgagaagguggacgaccuccgggcggacaccaucuccagccagaucgagcuggccguccugcucuccaacgagggcaucaucaacagcgaggacgagcaccuccuggcccuggagcgcaagcugaagaagaugcuggggcccuccgccguggacaucggcaacgggugcuucgagacgaagcacaagugcaaccagaccugccucgaccggaucgcggccggcaccuucaacgccggggaguucagccugcccaccuucgacucccugaacaucaccgccgccagccucaacgacgacggccuggacaaccacacgauccugcuguacuacuccaccgcggccagcucccucgccgugacccugaugcuggccaucuucaucgucuacauggugagccgcgacaacguguccugcagcaucugccucuga

SEQ ID NO: 91714 - RNA, 1755 nt, Artificial Sequence; identical to SEQ ID NO: 90755
  derived and/or modified CDS sequence (opt1) from hemagglutinin__InfluenzaB__AGX23688

SEQ ID NO: 91715 - RNA, 1755 nt, Artificial Sequence; identical to SEQ ID NO: 90755
  derived and/or modified CDS sequence (opt1) from hemagglutinin__InfluenzaB__AGX23699

SEQ ID NO: 91716 - RNA, 1755 nt, Artificial Sequence; identical to SEQ ID NO: 90450
  derived and/or modified CDS sequence (opt1) from hemagglutinin__InfluenzaB__AGX23710

SEQ ID NO: 91717 - RNA, 1755 nt, Artificial Sequence; identical to SEQ ID NO: 90755
  derived and/or modified CDS sequence (opt1) from hemagglutinin__InfluenzaB__AGX23721

SEQ ID NO: 91718 - RNA, 1755 nt, Artificial Sequence; identical to SEQ ID NO: 90450
  derived and/or modified CDS sequence (opt1) from hemagglutinin__InfluenzaB__AGX23732

SEQ ID NO: 91719 - RNA, 1755 nt, Artificial Sequence; identical to SEQ ID NO: 90755
  derived and/or modified CDS sequence (opt1) from hemagglutinin__InfluenzaB__AGX23743

SEQ ID NO: 91720 - RNA, 1755 nt, Artificial Sequence; identical to SEQ ID NO: 90755
  derived and/or modified CDS sequence (opt1) from hemagglutinin__InfluenzaB__AGX23754

SEQ ID NO: 91721 - RNA, 1755 nt, Artificial Sequence; identical to SEQ ID NO: 90450
  derived and/or modified CDS sequence (opt1) from hemagglutinin__InfluenzaB__AGX23765

SEQ ID NO: 91722 - RNA, 1755 nt, Artificial Sequence; identical to SEQ ID NO: 90755
  derived and/or modified CDS sequence (opt1) from hemagglutinin__InfluenzaB__AGX23776

SEQ ID NO: 91723 - RNA, 1755 nt, Artificial Sequence; identical to SEQ ID NO: 90755
  derived and/or modified CDS sequence (opt1) from hemagglutinin__InfluenzaB__AGX23787

SEQ ID NO: 91724 - RNA, 1755 nt, Artificial Sequence; identical to SEQ ID NO: 90450
  derived and/or modified CDS sequence (opt1) from hemagglutinin__InfluenzaB__AGX23798

SEQ ID NO: 91725 - RNA, 1755 nt, Artificial Sequence; identical to SEQ ID NO: 90450
  derived and/or modified CDS sequence (opt1) from hemagglutinin__InfluenzaB__AGX23809

SEQ ID NO: 91726 - RNA, 1755 nt, Artificial Sequence; identical to SEQ ID NO: 90450
  derived and/or modified CDS sequence (opt1) from hemagglutinin__InfluenzaB__AGX23820

SEQ ID NO: 91727 - RNA, 1755 nt, Artificial Sequence; identical to SEQ ID NO: 90755
  derived and/or modified CDS sequence (opt1) from hemagglutinin__InfluenzaB__AGX23831

SEQ ID NO: 91728 - RNA, 1755 nt, Artificial Sequence; identical to SEQ ID NO: 90450
  derived and/or modified CDS sequence (opt1) from hemagglutinin__InfluenzaB__AGX23842

SEQ ID NO: 91729 - RNA, 1755 nt, Artificial Sequence
  derived and/or modified CDS sequence (opt1) from hemagglutinin__InfluenzaB__AGX23853
augaaggccaucaucgugcugcucauggucgugaccagcaacgccgaccgcaucugcaccggcaucacguccagcaacagcccccacguggucaagaccgcgacccagggggaggugaacgugaccggcgucaucccgcugacgaccacccccaccaaguccuacuucgccaaccugaaggggacgcggacccgcggcaagcucugccccgacugccugaacugcaccgaccuggacguggcccucgggcggcccaugugcgugggcaccacgccguccgccaaggccagcauccugcacgagguccgccccgugaccuccggcugcuuccccaucaugcacgaccggaccaagauccgccagcuggcgaaccuccugcggggguacgagaacauccgccugagcauccagaacgugaucgacgccgagaaggcccccggcgggccguaccggcucggcaccuccgggagcugccccaacgccacguccaagagcggcuucuucgcgaccauggccugggccguccccaaggacaacaacaagaacgccaccaacccccugaccguggaggugccguacaucugcacggagggcgaggaccagaucaccgucuggggguuccacuccgacaacaagacccagaugaagaaccuguacggcgacagcaacccccagaaguucaccuccagcgccaacggggugacgacccacuacgugucccagaucggcggcuuccccgaccagaccgaggacgggggccucccccagagcgggcgcaucgucguggacuacaugaugcagaaguccggcaagaccgggacgaucguguaccagcggggcguccugcugccgcagaagguguggugcgcgagcggccgcagcaaggugaucaaggggucccucccccugaucggcgaggccgacugccugcacgagaaguacgggggccucaacaagagcaagcccuacuacaccggggagcacgccaaggccaucggcaacugccccaucugggucaagaccccgcugaagcuggccaacggcaccaaguaccggccgcccgcgaagcuccugaaggagcgcggguucuucggcgccaucgccggguuccuggagggcgggugggagggcaugaucgccggcuggcacggguacacgucccacggcgcccacgggguggcggucgccgccgaccucaagagcacccaggaggccaucaacaagaucaccaagaaccugaacucccugagcgagcucgaggugaagaaccugcagcggcuguccggcgccauggacgagcuccacaacgagauccuggagcuggacgagaagguggacgaccuccgcgcggacaccaucagcucccagaucgagcuggccguccugcucagcaacgagggcaucaucaacuccgaggacgagcaccuccuggcccuggagcggaagcugaagaagaugcuggggcccagcgccguggacaucggcaacgggugcuucgagacgaagcacaagugcaaccagaccugccucgaccgcaucgcggccggcaccuucaacgccggggaguucucccugcccaccuucgacagccugaacaucaccgccgccucccucaacgacgacggccuggacaaccacacgauccugcuguacuacagcaccgcggccuccagccucgccgugacccugaugcuggccaucuucaucgucuacauggugucccgggacaacgugagcugcagcaucugccucuga

SEQ ID NO: 91730 - RNA, 1755 nt, Artificial Sequence; identical to SEQ ID NO: 90450
  derived and/or modified CDS sequence (opt1) from hemagglutinin__InfluenzaB__AGX23864

SEQ ID NO: 91731 - RNA, 1755 nt, Artificial Sequence; identical to SEQ ID NO: 90755
  derived and/or modified CDS sequence (opt1) from hemagglutinin__InfluenzaB__AGX23875

SEQ ID NO: 91732 - RNA, 1755 nt, Artificial Sequence; identical to SEQ ID NO: 90450
  derived and/or modified CDS sequence (opt1) from hemagglutinin__InfluenzaB__AGX23886

SEQ ID NO: 91733 - RNA, 1755 nt, Artificial Sequence
  derived and/or modified CDS sequence (opt1) from hemagglutinin__InfluenzaB__AGX23897
augaaggccaucaucgugcugcucauggucgugaccagcaacgccgaccgcaucugcaccggcaucacguccagcaacagcccccacguggucaagaccgcgacccagggggaggugaacgugaccggcgucaucccgcugacgaccacccccaccaaguccuacuucgccaaccugaaggggacgcggacccgcggcaagcucugccccgacugccugaacugcaccgaccuggacguggcccucgggcggcccaugugcgugggcaccacgccguccgccaaggccagcauccugcacgagguccgccccgugaccuccggcugcuuccccaucaugcacgaccggaccaagauccgccagcuggcgaaccuccugcggggguacgagaacauccgccugagcacccagaacgugaucgacgccgagaaggcccccggcgggccguaccggcucggcacguccgggagcugccccaacgccaccuccaagagcggcuucuucgcgaccauggccugggccguccccaaggacaacaacaagaacgccaccaacccccugacgguggaggugccguacaucugcaccgagggcgaggaccagaucaccgucuggggguuccacuccgacaacaagacccagaugaagaaccuguacggcgacagcaacccccagaaguucacguccagcgccaacggggugaccacccacuacgugucccagaucggcggcuuccccgaccagaccgaggacgggggccucccccagagcgggcgcaucgucguggacuacaugaugcagaaguccggcaagacggggaccaucguguaccagcggggcguccugcugccgcagaagguguggugcgcgagcggccgcagcaaggugaucaaggggucccucccccugaucggcgaggccgacugccugcacgagaaguacgggggccucaacaagagcaagcccuacuacaccggggagcacgccaaggccaucggcaacugccccaucugggucaagaccccgcugaagcuggccaacggcacgaaguaccggccgcccgcgaagcuccugaaggagcgcggguucuucggcgccaucgccggguuccuggagggcgggugggagggcaugaucgccggcuggcacggguacaccucccacggcgcccacgggguggcggucgccgccgaccucaagagcacccaggaggccaucaacaagaucaccaagaaccugaacucccugagcgagcucgaggugaagaaccugcagcggcuguccggcgccauggacgagcuccacaacgagauccuggagcuggacgagaagguggacgaccuccgcgcggacacgaucagcucccagaucgagcuggccguccugcucagcaacgagggcaucaucaacuccgaggacgagcaccuccuggcccuggagcggaagcugaagaagaugcuggggcccagcgccguggacaucggcaacgggugcuucgagaccaagcacaagugcaaccagaccugccucgaccgcaucgcggccggcaccuucaacgccggggaguucucccugcccaccuucgacagccugaacaucacggccgccucccucaacgacgacggccuggacaaccacaccauccugcuguacuacagcaccgcggccuccagccucgccgugacccugaugcuggccaucuucaucgucuacauggugucccgggacaacgugagcugcagcaucugccucuga

SEQ ID NO: 91734 - RNA, 1755 nt, Artificial Sequence
  derived and/or modified CDS sequence (opt1) from hemagglutinin__InfluenzaB__AGX23908
augaaggccaucaucgugcugcucauggucgugaccagcaacgccgaccgcaucugcaccggcaucacguccagcaacagcccccacguggucaagaccgcgacccagggggaggugaacgugaccggcgucaucccgcugacgaccacccccaccaaguccuacuucgccaaccugaaggggacgcggacccgcggcaagcucugccccgacugccugaacugcaccgaccuggacguggcccucgggcggcccaugugcgugggcaccacgccguccgccaaggccagcauccugcacgagguccgccccgugaccuccggcugcuuccccaucaugcacgaccggaccaagauccgccagcuggcgaaccuccugcggggguacgagaacauccgccugagcacccagaacgugaucgacgccgagaaggcccccggcgggccguaccggcucggcacguccgggagcugccccaacgccaccuccaagagcggcuucuucgucaccauggcgugggccgugcccaaggacaacaacaagaacgccaccaacccccugacgguggaggucccguacaucugcaccgagggcgaggaccagaucaccguguggggguuccacuccgacaacaagacccagaugaagaaccuguacggcgacagcaacccccagaaguucacguccagcgccaacggggugaccacccacuacgucucccagaucggcggcuuccccgaccagaccgaggacgggggccucccccagagcgggcgcaucgugguggacuacaugaugcagaagccgggcaagacggggaccaucgucuaccagcggggcgugcugcugccccagaagguguggugcgccuccggccgcagcaaggucaucaaggggagccucccccugaucggcgaggcggacugccugcacgagaaguacgggggccucaacaaguccaagcccuacuacaccggggagcacgccaaggccaucggcaacugcccgaucugggugaagacgccccugaagcuggccaacggcaccaaguaccggccgcccgccaagcuccugaaggagcgcggguucuucggcgcgaucgccggguuccuggagggcgggugggagggcaugaucgccggcuggcacggguacaccagccacggcgcccacggggucgccguggcggccgaccucaaguccacccaggaggccaucaacaagaucaccaagaaccugaacagccuguccgagcucgaggugaagaaccugcagcggcugagcggcgccauggacgagcuccacaacgagauccuggagcuggacgagaaggucgacgaccuccgcgccgacacgaucuccagccagaucgagcuggcggugcugcucuccaacgagggcaucaucaacagcgaggacgagcaccuccuggcccuggagcggaagcugaagaagaugcuggggcccuccgccguggacaucggcaacgggugcuucgagaccaagcacaagugcaaccagaccugccucgaccgcaucgccgcgggcaccuucaacgccggggaguucagccugcccaccuucgacucccugaacaucacggccgccagccucaacgacgacggccuggacaaccacaccauccugcuguacuacuccaccgccgcgagcucccucgccgucacccugaugcuggccaucuucaucguguacauggugagccgggacaacgucuccugcagcaucugccucuga

SEQ ID NO: 91735 - RNA, 1755 nt, Artificial Sequence; identical to SEQ ID NO: 90591
  derived and/or modified CDS sequence (opt1) from hemagglutinin__InfluenzaB__AGX23919

SEQ ID NO: 91736 - RNA, 1755 nt, Artificial Sequence; identical to SEQ ID NO: 91071
  derived and/or modified CDS sequence (opt1) from hemagglutinin__InfluenzaB__AGX23930

SEQ ID NO: 91737 - RNA, 1755 nt, Artificial Sequence; identical to SEQ ID NO: 90450
  derived and/or modified CDS sequence (opt1) from hemagglutinin__InfluenzaB__AGX23941

SEQ ID NO: 91738 - RNA, 1755 nt, Artificial Sequence; identical to SEQ ID NO: 90755
  derived and/or modified CDS sequence (opt1) from hemagglutinin__InfluenzaB__AGX23952

SEQ ID NO: 91739 - RNA, 1755 nt, Artificial Sequence; identical to SEQ ID NO: 90755
  derived and/or modified CDS sequence (opt1) from hemagglutinin__InfluenzaB__AGX23963

SEQ ID NO: 91740 - RNA, 1755 nt, Artificial Sequence; identical to SEQ ID NO: 91071
  derived and/or modified CDS sequence (opt1) from hemagglutinin__InfluenzaB__AGX23974

SEQ ID NO: 91741 - RNA, 1755 nt, Artificial Sequence; identical to SEQ ID NO: 90591
  derived and/or modified CDS sequence (opt1) from hemagglutinin__InfluenzaB__AGX23985

SEQ ID NO: 91742 - RNA, 1755 nt, Artificial Sequence
  derived and/or modified CDS sequence (opt1) from hemagglutinin__InfluenzaB__AGX23996
augaaggccaucaucgugcugcucauggucgugaccagcaacgccgaccgcaucugcaccggcaucacguccagcaacagcccccacguggucaagaccgcgacccagggggaggugaacgugaccggcgucaucccgcugacgaccacccccaccaaguccuacuucgccaaccugaaggggacgcggacccgcggcaagcucugccccgacugccugaacugcaccgaccuggacguggcccucgggcggcccaugugcgugggcaccacgccguccgccaaggccagcauccugcacgagguccgccccaucaccuccggcugcuuccccaucaugcacgaccggaccaagauccgccagcuggcgaaccuccugcggggguacgagaacauccgccugagcacccagaacgugaucgacgccgagaaggcccccggcgggccguaccggcucggcacguccgggagcugccccaacgccaccuccaagagcggcuucuucgcgaccauggccugggccgugcccaaggacaacaacaagaacgccaccaacccccugacggucgaggugccguacaucugcaccgagggcgaggaccagaucaccguguggggguuccacuccgacaacaagacccagaugaagaaccuguacggcgacagcaacccccagaaguucacguccagcgccaacggggucaccacccacuacgugucccagaucggcggcuuccccgaccagaccgaggacgggggccucccccagagcgggcgcaucguggucgacuacaugaugcagaagccgggcaagacggggaccaucguguaccagcggggcgugcugcugccccagaaggucuggugcgcguccggccgcagcaaggugaucaaggggagccucccccugaucggcgaggccgacugccugcacgagaaguacgggggccucaacaaguccaagcccuacuacaccggggagcacgccaaggccaucggcaacugcccgaucugggugaagacgccccugaagcuggccaacggcaccaaguaccggccgcccgcgaagcuccugaaggagcgcggguucuucggcgccaucgccggguuccuggagggcgggugggagggcaugaucgccggcuggcacggguacaccagccacggcgcccacggggucgcgguggccgccgaccucaaguccacccaggaggccaucaacaagaucaccaagaaccugaacagccuguccgagcucgaggucaagaaccugcagcggcugagcggcgccauggacgagcuccacaacgagauccuggagcuggacgagaagguggacgaccuccgcgcggacacgaucuccagccagaucgagcuggccgugcugcucuccaacgagggcaucaucaacagcgaggacgagcaccuccuggcccuggagcggaagcugaagaagaugcuggggcccuccgccgucgacaucggcaacgggugcuucgagaccaagcacaagugcaaccagaccugccucgaccgcaucgcggccggcaccuucaacgccggggaguucagccugcccaccuucgacucccugaacaucacggccgccagccucaacgacgacggccuggacaaccacaccauccugcuguacuacuccaccgcggccagcucccucgccgugacccugaugcuggccaucuucaucguguacauggucagccgggacaacguguccugcagcaucugccucuga

SEQ ID NO: 91743 - RNA, 1755 nt, Artificial Sequence; identical to SEQ ID NO: 91071
  derived and/or modified CDS sequence (opt1) from hemagglutinin__InfluenzaB__AGX24007

SEQ ID NO: 91744 - RNA, 1755 nt, Artificial Sequence; identical to SEQ ID NO: 91071
  derived and/or modified CDS sequence (opt1) from hemagglutinin__InfluenzaB__AGX24018

SEQ ID NO: 91745 - RNA, 1755 nt, Artificial Sequence
  derived and/or modified CDS sequence (opt1) from hemagglutinin__InfluenzaB__AGX24029
augaaggccaucaucgugcugcucauggucgugaccagcaacgccgaccgcaucugcaccggcaucacguccagcaacagcccccacguggucaagaccgcgacccagggggaggugaacgugaccggcgucaucccgcugacgaccacccccaccaaguccuacuucgccaaccugaaggggacgcggacccgcggcaagcucugccccgacugccugaacugcaccgaccuggacguggcccucgggcggcccaugugcgugggcaccacgccguccgccaaggccagcauccugcacgagguccgccccgugaccuccggcugcuuccccaucaugcacgaccggaccaagauccgccagcugcccaaccuccugcggggguacgagaacauccgccugagcacccagaacgugaucgacgcggagaaggccccgggcgggcccuaccggcucggcacguccgggagcugccccaacgccaccuccaagagcggcuucuucgccaccauggcgugggccguccccaaggacaacaacaagaacgccaccaacccgcugacgguggaggugcccuacaucugcaaggagggcgaggaccagaucaccgucuggggguuccacuccgacaacaagacccagaugaagaaccuguacggcgacagcaacccccagaaguucaccuccagcgccaacggggugacgacccacuacgugucccagaucggcagcuuccccgaccagaccgaggacggcgggcucccgcaguccggccgcaucgucguggacuacaugaugcagaagcccgggaagaccggcacgaucguguaccagcgcgggguccugcugccccagaagguguggugcgccagcggccggagcaaggugaucaagggcucccucccccugaucggggaggcggacugccugcacgagaaguacggcgggcucaacaagagcaagccguacuacaccggcgagcacgccaaggccaucgggaacugccccaucugggucaagacgccccugaagcuggccaacggcaccaaguaccggcccccggccaagcuccugaaggagcgcggcuucuucggggcgaucgccggcuuccuggagggcgggugggaggggaugaucgccggcuggcacggcuacaccucccacggggcccacggcguggccgucgcggccgaccucaagagcacccaggaggccaucaacaagaucaccaagaaccugaacucccugagcgagcucgaggugaagaaccugcagcggcuguccggggccauggacgagcuccacaacgagauccuggagcuggacgagaagguggacgaccuccgcgccgacaccaucagcucccagaucgagcuggcgguccugcucagcaacgagggcaucaucaacuccgaggacgagcaccuccuggcccuggagcggaagcugaagaagaugcugggccccagcgccguggagaucgggaacggcugcuucgagacgaagcacaagugcaaccagaccugccucaaccgcaucgccgcggggaccuucaacgccggcgaguucucccugcccaccuucgacagccugaacaucaccgccgccucccucaacgacgacgggcuggacaaccacacgauccugcuguacuacagcaccgccgcguccagccucgccgugacccugaugcuggccaucuucaucgucuacauggugucccgggacaacgugagcugcagcaucugccucuga

SEQ ID NO: 91746 - RNA, 1755 nt, Artificial Sequence; identical to SEQ ID NO: 91071
  derived and/or modified CDS sequence (opt1) from hemagglutinin__InfluenzaB__AGX24040

SEQ ID NO: 91747 - RNA, 1755 nt, Artificial Sequence; identical to SEQ ID NO: 90755
  derived and/or modified CDS sequence (opt1) from hemagglutinin__InfluenzaB__AGX24051

SEQ ID NO: 91748 - RNA, 1755 nt, Artificial Sequence; identical to SEQ ID NO: 90844
  derived and/or modified CDS sequence (opt1) from hemagglutinin__InfluenzaB__AGX24062

SEQ ID NO: 91749 - RNA, 1755 nt, Artificial Sequence; identical to SEQ ID NO: 90591
  derived and/or modified CDS sequence (opt1) from hemagglutinin__InfluenzaB__AGX24073

SEQ ID NO: 91750 - RNA, 1755 nt, Artificial Sequence
  derived and/or modified CDS sequence (opt1) from hemagglutinin__InfluenzaB__AGX24084
augaaggccaucaucgugcugcucauggucgugaccagcaacgccgaccgcaucugcaccggcaucacguccagcaacagcccccacguggucaagaccgcgacccagggggaggugaacgugaccggcgucaucccgcugacgaccacccccaccaaguccuacuucgccaaccugaaggggacgcggacccgcggcaagcucugccccgacugccugaacugcaccgaccuggacguggcccucgggcggcccaugugcgugggcaccacgccguccgccaaggccagcaucauccacgagguccgccccgugaccuccggcugcuuccccaucaugcacgaccggaccaagauccgccagcuggcgaaccugcuccggggguacgagaacauccgccugagcacccagaacgugaucgacgccgagaaggcccccggcgggccguaccggcugggcacguccgggagcugccccaacgccaccuccaagagcggcuucuucgcgaccauggccugggccguccccaaggacaacaacaagaacgccaccaacccccucacgguggaggugccguacaucugcaccgagggcgaggaccagaucaccgucuggggguuccacuccgacaacaagacccagaugaagaaccuguacggcgacagcaacccccagaaguucacguccagcgccaacggggugaccacccacuacgugucccagaucggcggcuuccccgaccagaccgaggacgggggccugccccagagcgggcgcaucgucguggacuacaugaugcagaagccgggcaagacggggaccaucguguaccagcggggcguccuccugccccagaagguguggugcgcguccggccgcagcaaggugaucaaggggagccugccccucaucggcgaggccgacugccugcacgagaaguacgggggccugaacaaguccaagcccuacuacaccggggagcacgccaaggccaucggcaacugcccgaucugggucaagacgccccucaagcuggccaacggcaccaaguaccggccgcccgcgaagcugcucaaggagcgcggguucuucggcgccaucgccggguuccuggagggcgggugggagggcaugaucgccggcuggcacggguacaccagccacggcgcccacgggguggcggucgccgccgaccugaaguccacccaggaggccaucaacaagaucaccaagaaccucaacagccuguccgagcuggaggugaagaaccuccagcggcugagcggcgccauggacgagcugcacaacgagauccucgagcuggacgagaagguggacgaccugcgcgcggacacgaucuccagccagaucgagcucgccguccugcuguccaacgagggcaucaucaacagcgaggacgagcaccuccuggcccuggagcggaagcucaagaagaugcuggggcccuccgccguggacaucggcaacgggugcuucgagaccaagcacaagugcaaccagaccugccuggaccgcaucgcggccggcaccuucaacgccggggaguucagccuccccaccuucgacucccugaacaucacggccgccagccugaacgacgacggccucgacaaccacaccauccugcuguacuacuccaccgcggccagcucccuggccgugacccucaugcuggccaucuucaucgucuacauggugagccgggacaacguguccugcagcaucugccuguga

SEQ ID NO: 91751 - RNA, 1755 nt, Artificial Sequence; identical to SEQ ID NO: 91071
  derived and/or modified CDS sequence (opt1) from hemagglutinin__InfluenzaB__AGX24095

SEQ ID NO: 91752 - RNA, 1755 nt, Artificial Sequence
  derived and/or modified CDS sequence (opt1) from hemagglutinin__InfluenzaB__AGX24106
augaaggccaucaucgugcugcucauggucgugaccagcaacgccgaccgcaucugcaccggcaucacguccagcaacagcccccacguggucaagaccgcgacccagggggaggugaacgugaccggcgucaucccgcugacgaccacccccaccaaguccuacuucgccaaccugaaggggacgcggacccgcggcaagcucugccccgacugccugaacugcaccgaccuggacguggcccucgggcggcccaugugcgugggcaccacgccguccgccaaggccagcauccugcacgagguccgccccgugaccuccggcugcuuccccaucaugcacgaccggaccaagauccgccagcuggcgaaccuccugcggggguacgagaacauccgccugagcacccagaacgugaucgacgccgagaaggcccccggcgggccguaccggcucggcacguccgggagcugccccaacaccaccuccaagagcggcuucuucgccaccauggcgugggccguccccaaggacaacaacaagaacgccacgaacccccugaccguggaggugccguacaucugcaccgagggcgaggaccagaucaccgucuggggguuccacuccgacaacaagacgcagaugaagaaccuguacggcgacagcaacccccagaaguucaccuccagcgccaacggggugaccacccacuacgugucccagaucggcggcuuccccgaccagacggaggacgggggccucccccagagcgggcgcaucgucguggacuacaugaugcagaagccgggcaagaccgggaccaucguguaccagcggggcguccugcugccccagaagguguggugcgccuccggccgcagcaaggugaucaaggggagccucccccugaucggcgaggcggacugccugcacgagaaguacgggggccucaacaaguccaagcccuacuacaccggggagcacgccaaggccaucggcaacugcccgaucugggucaagacgccccugaagcuggccaacggcaccaaguaccggccgcccgccaagcuccugaaggagcgcggguucuucggcgcgaucgccggguuccuggagggcgggugggagggcaugaucgccggcuggcacggguacaccagccacggcgcccacgggguggccgucgcggccgaccucaaguccacccaggaggccaucaacaagaucacgaagaaccugaacagccuguccgagcucgaggugaagaaccugcagcggcugagcggcgccauggacgagcuccacaacgagauccuggagcuggacgagaagguggacgaccuccgcgccgacaccaucuccagccagaucgagcuggcgguccugcucuccaacgagggcaucaucaacagcgaggacgagcaccuccuggcccuggagcggaagcugaagaagaugcuggggcccuccgccguggacaucggcaacgggugcuucgagaccaagcacaagugcaaccagaccugccucgaccgcaucgccgcgggcaccuucaacgccggggaguucagccugcccacguucgacucccugaacaucaccgccgccagccucaacgacgacggccuggacaaccacaccauccugcuguacuacuccaccgccgcgagcucccucgccgugacgcugaugcuggccaucuucaucgucuacauggugagccgggacaacguguccugcagcaucugccucuga

SEQ ID NO: 91753 - RNA, 1755 nt, Artificial Sequence
  derived and/or modified CDS sequence (opt1) from hemagglutinin__InfluenzaB__AGX24117
augaaggccaucaucgugcugcucauggucgugaccagcaacgccgaccgcaucugcaccggcaucacguccagcaacagcccccacguggucaagaccgcgacccagggggaggugaacgugaccggcgucaucccgcugacgaccacccccaccaaguccuacuucgccaaccugaaggggacgcggacccgcggcaagcucugccccgacugccugaacugcaccgaccuggacguggcccucgggcggcccaugugcgugggcaccacgccguccgccaaggccagcauccugcacgagguccgccccgugaccuccggcugcuuccccaucaugcacgaccggaccaagauccgccagcugcccaaccuccugcggggguacgagaacauccgccugagcacccagaacgugaucgacgcggagaaggccccgggcgggcccuaccggcucggcacguccgggagcugccccaacaccaccuccaagagcggcuucuucgccaccauggccugggcgguccccaaggacaacaacaagaacgccacgaacccgcugaccguggaggugcccuacaucugcaccgagggcgaggaccagaucaccgucuggggguuccacuccgacaacaagacgcagaugaagaaccuguacggcgacagcaacccccagaaguucaccuccagcgccaacggggugaccacccacuacgugucccagaucggcagcuuccccgaccagacggaggacggcgggcucccgcaguccggccgcaucgucguggacuacaugaugcagaagcccgggaagaccggcaccaucguguaccagcgggggauccugcugccccagaaggucuggugcgccagcggccgcagcaaggugaucaagggcucccucccccugaucggggaggccgacugccugcacgagaaguacggcgggcucaacaagagcaagccguacuacaccggcgagcacgcgaaggccaucgggaacugccccaucugggugaagacgccccugaagcuggccaacggcaccaaguaccggcccccggccaagcuccugaaggagcgcggcuucuucggggccaucgcgggcuuccuggagggcgggugggaggggaugaucgccggcuggcacggcuacaccucccacggggcccacggcgucgccguggccgcggaccucaagagcacccaggaggccaucaacaagaucacgaagaaccugaacucccugagcgagcucgaggucaagaaccugcagcggcuguccggggccauggacgagcuccacaacgagauccuggagcuggacgagaagguggacgaccuccgcgccgacaccaucagcucccagaucgagcuggccgugcugcucagcaacgagggcaucaucaacuccgaggacgagcaccuccuggcgcuggagcggaagcugaagaagaugcugggccccagcgccgucgagaucgggaacggcugcuucgagaccaagcacaagugcaaccagaccugccucgaccgcaucgccgccgggaccuucaacgcgggcgaguucucccugcccacguucgacagccugaacaucaccgccgccucccucaacgacgacgggcuggacaaccacaccauccugcuguacuacagcaccgccgccuccagccucgcggugacgcugaugcuggccaucuucaucguguacauggucucccgggacaacgugagcugcagcaucugccucuga

SEQ ID NO: 91754 - RNA, 1755 nt, Artificial Sequence
  derived and/or modified CDS sequence (opt1) from hemagglutinin__InfluenzaB__AGX24128
augaaggccaucaucgugcugcucauggucgugaccagcaacgccgaccgcaucugcaccggcaucacguccagcaacagcccccacguggucaagaccgcgacccagggggaggugaacgugaccggcgucaucccgcugacgaccacccccaccaagagcuacuucgccaaccugaaggggacgcggacccgcggcaagcucugccccgacugccugaacugcaccgaccuggacguggcccucgggcggcccaugugcgugggcaccacgccguccgccaaggccagcauccugcacgagguccgccccgugaccuccggcugcuuccccaucaugcacgaccggaccaagauccgccagcugcccaaccuccugcggggguacgagaacauccgccugagcacccagaacgugaucgacgcggagaaggccccgggcgggcccuaccggcucggcacguccgggagcugccccaacgccaccuccaagaucggcuucuucgccaccauggcgugggccguccccaaggacaacuacaagaacgccaccaacccgcugacgguggaggugcccuacaucugcaccgagggcgaggaccagaucaccgucuggggguuccacagcgacaacaagacccagaugaagaaccuguacggcgacuccaacccccagaaguucacgagcuccgccaacggggugaccacccacuacgugagccagaucggcgacuuccccgaccagaccgaggacggcgggcucccgcaguccggccgcaucgucguggacuacaugaugcagaagcccgggaagacgggcaccaucguguaccagcgcgggguccugcugccccagaagguguggugcgccagcggccgguccaaggugaucaagggcagccucccccugaucggggaggcggacugcauccacgagaaguacggcgggcugaacaagagcaagccguacuacaccggcgagcacgccaaggccaucgggaacugccccaucugggucaagacgccccucaagcuggccaacggcaccaaguaccggcccccggccaagcugcucaaggagcgcggcuucuucggggcgaucgccggcuuccuggagggcgggugggaggggaugaucgccggcuggcacggcuacaccucccacggggcccacggcguggccgucgcggccgaccugaaguccacccaggaggccaucaacaagaucaccaagaaccucaacucccugagcgagcuggaggugaagaaccuccagcggcuguccggggccauggacgagcugcacaacgagauccucgagcuggacgagaagguggacgaccugcgcgccgacacgaucagcucccagaucgagcucgcgguccugcugagcaacgagggcaucaucaacuccgaggacgagcaccuccuggcccuggagcggaagcucaagaagaugcugggccccagcgccguggacaucgggaacggcugcuucgagaccaagcacaagugcaaccagaccugccuggaccgcaucgccgcggggaccuucaacgccggcgaguucucccuccccaccuucgacagccugaacaucacggccgccucccugaacgacgacgggcucgacaaccacaccauccugcuguacuacagcaccgccgcguccagccuggccgugacccucaugcuggccaucuucaucgucuacauggugucccgggacaacgugagcugcuccaucugccuguga

SEQ ID NO: 91755 - RNA, 1755 nt, Artificial Sequence; identical to SEQ ID NO: 90450
  derived and/or modified CDS sequence (opt1) from hemagglutinin__InfluenzaB__AGX24139

SEQ ID NO: 91756 - RNA, 1755 nt, Artificial Sequence
  derived and/or modified CDS sequence (opt1) from hemagglutinin__InfluenzaB__AGX24150
augaaggccaucaucgugcugcucauggucgugaccagcaacgccgaccgcaucugcaccggcaucacguccagcaacagcccccacguggucaagaccgcgacccagggggaggugaacgugaccggcgucaucccgcugacgaccacccccaccaaguccuacuucgccaaccugaaggggacgcggacccgcggcaagcucugccccuacugccugaacugcaccgaccuggacguggcccucgggcggcccaugugcgugggcaccacgccguccgccaaggccagcauccugcacgagguccgccccgugaccuccggcugcuuccccaucaugcacgaccggaccaagauccgccagcugcccaaccuccugcggggguacgagaacauccgccugagcacccagaacgugaucgacgcggagaaggccccgggcgggcccuaccggcucggcacguccgggagcugccccaacgccaccuccaagagcggcuucuucgccaccauggcgugggccguccccaaggacaacaacaagaacgccaccaacccgcugacgguggaggugcccuacaucugcaccgagggcgaggaccagaucaccgucuggggguuccacuccgacaacaagacccagaugaagaaccuguacggcgacagcaacccccagaaguucacguccagcgccaacggggugaccacccacuacgugucccagaucggcagcuuccccgaccagaccgaggacggcgggcucccgcaguccggccgcaucgucguggacuacaugaugcagaagcccgggaagacgggcaccaucguguaccagcgggggauccugcugccccagaaggucuggugcgccagcggccgcagcaaggugaucaagggcucccucccccugaucggggaggcggacugccugcacgagaaguacggcgggcucaacaagagcaagccguacuacaccggcgagcacgccaaggccaucgggaacugccccaucugggugaagacgccccugaagcuggccaacggcaccaaguaccggcccccggccaagcuccugaaggagcgcggcuucuucggggcgaucgccggcuuccuggagggcgggugggaggggaugaucgccggcuggcacggcuacaccucccacggggcccacggcgucgccguggcggccgaccucaagagcacccaggaggccaucaacaagaucaccaagaaccugaacucccugagcgagcucgaggucaagaaccugcagcggcuguccggggccauggacgagcuccacaacgagauccuggagcuggacgagaagguggacgaccuccgcgccgacacgaucagcucccagaucgagcuggcggugcugcucagcaacgagggcaucaucaacuccgaggacgagcaccuccuggcccuggagcggaagcugaagaagaugcugggccccagcgccgucgagaucgggaacggcugcuucgagaccaagcacaagugcaaccagaccugccucgaccgcaucgccgcggggaccuucaacgccggcgaguucucccugcccaccuucgacagccugaacaucacggccgccucccucaacgacgacgggcuggacaaccacaccauccugcuguacuacagcaccgccgcguccagccucgccgugacccugaugcuggccaucuucaucguguacauggucucccgggacaacgugagcugcagcaucugccucuga

SEQ ID NO: 91757 - RNA, 1755 nt, Artificial Sequence; identical to SEQ ID NO: 91071
  derived and/or modified CDS sequence (opt1) from hemagglutinin__InfluenzaB__AGX24161

SEQ ID NO: 91758 - RNA, 1755 nt, Artificial Sequence; identical to SEQ ID NO: 90844
  derived and/or modified CDS sequence (opt1) from hemagglutinin__InfluenzaB__AGX24172

SEQ ID NO: 91759 - RNA, 1755 nt, Artificial Sequence; identical to SEQ ID NO: 90844
  derived and/or modified CDS sequence (opt1) from hemagglutinin__InfluenzaB__AGX24183

SEQ ID NO: 91760 - RNA, 1755 nt, Artificial Sequence; identical to SEQ ID NO: 90844
  derived and/or modified CDS sequence (opt1) from hemagglutinin__InfluenzaB__AGX24194

SEQ ID NO: 91761 - RNA, 1755 nt, Artificial Sequence; identical to SEQ ID NO: 90591
  derived and/or modified CDS sequence (opt1) from hemagglutinin__InfluenzaB__AGX24205

SEQ ID NO: 91762 - RNA, 1755 nt, Artificial Sequence; identical to SEQ ID NO: 90755
  derived and/or modified CDS sequence (opt1) from hemagglutinin__InfluenzaB__AGX24227

SEQ ID NO: 91763 - RNA, 1755 nt, Artificial Sequence; identical to SEQ ID NO: 90844
  derived and/or modified CDS sequence (opt1) from hemagglutinin__InfluenzaB__AGX24238

SEQ ID NO: 91764 - RNA, 1755 nt, Artificial Sequence
  derived and/or modified CDS sequence (opt1) from hemagglutinin__InfluenzaB__AGX24249
augaaggccaucaucgugcugcucauggucgugaccagcaacgccgaccgcaucugcaccggcaucacguccagcaagagcccccacguggucaagaccgcgacccagggggaggugaacgugaccggcgucaucccgcugacgaccacccccaccaaguccuacuucgccaaccugaaggggacgcggacccgcggcaagcucugccccgacugccugaacugcaccgaccuggacguggcccucgggcggcccaugugcgugggcaccacgccguccgccaaggccagcauccugcacgagguccgccccgugaccuccggcugcuuccccaucaugcacgaccggaccaagauccgccagcugcccaaccuccugcggggguacgagaacauccgccugagcacccagaacgugaucgacgcggagaaggccccgggcgggcccuaccggcucggcacguccgggagcugccccaacgccaccuccaagaucggcuucuucgccaccauggcgugggccguccccaaggacaacuacaagaacgccaccaacccgcugacgguggaggugcccuacaucugcaccgagggcgaggaccagaucaccgucuggggguuccacagcgacaacaagacccagaugaagaaccuguacggcgacuccaacccccagaaguucacgagcuccgccaacggggugaccacccacuacgugagccagaucggcgacuuccccgaccagaccgaggacggcgggcucccgcaguccggccgcaucgucguggacuacaugaugcagaagcccgggaagacgggcaccaucguguaccagcgcgggguccugcugccccagaagguguggugcgccagcggccgguccaaggugaucaagggcagccucccccugaucggggaggcggacugccugcacgagaaguacggcgggcucaacaagagcaagccguacuacaccggcgagcacgccaaggccaucgggaacugccccaucugggucaagacgccccugaagcuggccaacggcaccaaguaccggcccccggccaagcuccugaaggagcgcggcuucuucggggcgaucgccggcuuccuggagggcgggugggaggggaugaucgccggcuggcacggcuacaccucccacggggcccacggcguggccgucgcggccgaccucaagagcacccaggaggccaucaacaagaucaccaagaaccugaacucccugagcgagcucgaggugaagaaccugcagcggcuguccggggccauggacgagcuccacaacgagauccuggagcuggacgagaagguggacgaccuccgcgccgacacgaucagcucccagaucgagcuggcgguccugcucagcaacgagggcaucaucaacuccgaggacgagcaccuccuggcccuggagcggaagcugaagaagaugcugggccccagcgccguggacaucgggaacggcugcuucgagaccaagcacaagugcaaccagaccugccucgaccgcaucgccgcggggaccuucaacgccggcgaguucucccugcccaccuucgacagccugaacaucacggccgccucccucaacgacgacgggcuggacaaccacaccauccugcuguacuacagcaccgccgcguccagccucgccgugacccugaugcuggccaucuucaucgucuacauggugucccgggacaacgugagcugcuccaucugccucuga

SEQ ID NO: 91765 - RNA, 1755 nt, Artificial Sequence; identical to SEQ ID NO: 90591
  derived and/or modified CDS sequence (opt1) from hemagglutinin__InfluenzaB__AGX24260

SEQ ID NO: 91766 - RNA, 1755 nt, Artificial Sequence; identical to SEQ ID NO: 91080
  derived and/or modified CDS sequence (opt1) from hemagglutinin__InfluenzaB__AGX24271

SEQ ID NO: 91767 - RNA, 1755 nt, Artificial Sequence
  derived and/or modified CDS sequence (opt1) from hemagglutinin__InfluenzaB__AGX24282
augaaggccaucaucgugcugcucauggucgugaccagcaacgccgaccgcaucugcaccggcaucacguccagcaacagcccccacguggucaagaccgcgacccagggggaggugaacgugaccggcgucaucccgcugacgaccacccccaccaaguccuacuucgccaaccugaaggggacgcggacccgcggcaagcucugccccgacugccugaacugcaccgaccuggacguggcccucgggcggcccaugugcgugggcaccacgccguccgccaaggccagcauccugcacgagguccgccccgugaccuccggcugcuuccccaucaugcacgaccggaccaagauccgccagcugcccaaccuccugcggggguacgagaacauccgccugagcacccagaacgugaucgacgcggagaaggccccgggcgggcccuaccggcucggcacguccgggagcugccccaacgccaccuccaagagcggcuucuucgccaccauggcgugggccguccccaaggacaacaacaagaacgccaccaacccgcugacgguggaggugcccuacaucugcaccaagggcgaggaccagaucaccgucuggggguuccacuccgacaacaagacccagaugaagaaccuguacggcgacagcaacccccagaaguucacguccagcgccaacggggugaccacccacuacgugucccagaucggcagcuuccccgaccagaccgaggacggcgggcucccgcaguccggccgcaucgucguggacuacaugaugcagaagcccgggaagacgggcaccaucguguaccagcgcgggguccugcugccccagcgcguguggugcgccagcggccggagcaaggugaucaagggcucccucccccugaucggggaggcggacugccugcacgagaaguacggcgggcucaacaagagcaagccguacuacaccggcgagcacgccaaggccaucgggaacugccccaucugggucaagacgccccugaagcuggccaacggcaccaaguaccggcccccggccaagcuccugaaggagcggggcuucuucggggcgaucgccggcuuccuggagggcgggugggaggggaugaucgccggcuggcacggcuacaccucccacggggcccacggcguggccgucgcggccgaccucaagagcacccaggaggccaucaacaagaucaccaagaaccugaacucccugagcgagcucgaggugaagaaccugcagcgccuguccggggccauggacgagcuccacaacgagauccuggagcuggacgagaagguggacgaccuccgggccgacacgaucagcucccagaucgagcuggcgguccugcucagcaacgagggcaucaucaacuccgaggacgagcaccuccuggcccuggagcgcaagcugaagaagaugcugggccccagcgccguggagaucgggaacggcugcuucgagaccaagcacaagugcaaccagaccugccucgaccggaucgccgcggggaccuucaacgccggcgaguucucccugcccaccuucgacagccugaacaucacggccgccucccucaacgacgacgggcuggacaaccacaccauccugcuguacuacagcaccgccgcguccagccucgccgugacccugaugcuggccaucuucaucgucuacauggugucccgcgacaacgugagcugcagcaucugccucuga

SEQ ID NO: 91768 - RNA, 1755 nt, Artificial Sequence; identical to SEQ ID NO: 90591
  derived and/or modified CDS sequence (opt1) from hemagglutinin__InfluenzaB__AGX24293

SEQ ID NO: 91769 - RNA, 1755 nt, Artificial Sequence; identical to SEQ ID NO: 90591
  derived and/or modified CDS sequence (opt1) from hemagglutinin__InfluenzaB__AGX24304

SEQ ID NO: 91770 - RNA, 1755 nt, Artificial Sequence; identical to SEQ ID NO: 91080
  derived and/or modified CDS sequence (opt1) from hemagglutinin__InfluenzaB__AGX24315

SEQ ID NO: 91771 - RNA, 1755 nt, Artificial Sequence
  derived and/or modified CDS sequence (opt1) from hemagglutinin__InfluenzaB__AGX24326
augaaggccaucaucgugcugcucauggucgugaccagcaacgccgaccgcaucugcaccggcaucacguccagcaacagcccccacguggucaagaccgcgacccagggggaggugaacgugaccggcgucaucccgcugacgaccacccccaccaaguccuacuucgccaaccugaaggggacgcggacccgcggcaagcucugccccgacugccugaacugcaccgaccuggacguggcccucgggcggccgaccugcgugggcacgacccccuccgccaaggccagcauccugcacgagguccgccccgugaccuccggcugcuuccccaucaugcacgaccggaccaagauccgccagcugcccaaccuccugcggggguacgagaacauccgccugagcacgcagaacgugaucgacgcggagaaggccccgggcgggcccuaccggcucggcaccuccgggagcugccccaacgccaccuccaagagcggcuucuucgccaccauggcgugggccguccccaaggacaacaacaagaacgccacgaacccgcugaccguggaggugcccuacaucugcaccgagggcgaggaccagaucaccgucuggggguuccacuccgacaacaagacgcagaugaagaaccuguacggcgacagcaacccccagaaguucaccuccagcgccaacggggugaccacccacuacgugucccagaucggcagcuuccccgaccagacggaggacggcgggcucccgcaguccggccgcaucgucguggacuacaugaugcagaagcccgggaagaccggcaccaucguguaccagcgggggauccugcugccccagaaggucuggugcgccagcggccgcagcaaggugaucaagggcucccucccccugaucggggaggcggacugccugcacgagaaguacggcgggcucaacaagagcaagccguacuacaccggcgagcacgccaaggccaucgggaacugccccaucugggugaagacgccccugaagcuggccaacggcaccaaguaccggcccccggccaagcuccugaaggagcgcggcuucuucggggcgaucgccggcuuccuggagggcgggugggaggggaugaucgccggcuggcacggcuacaccucccacggggcccacggcgucgccguggcggccgaccucaagagcacccaggaggccaucaacaagaucacgaagaaccugaacucccugagcgagcucgaggucaagaaccugcagcggcuguccggggccauggacgagcuccacaacgagauccuggagcuggacgagaagguggacgaccuccgcgccgacaccaucagcucccagaucgagcuggcggugcugcucagcaacgagggcaucaucaacuccgaggacgagcaccuccuggcccuggagcggaagcugaagaagaugcugggccccagcgccgucgagaucgggaacggcugcuucgagaccaagcacaagugcaaccagaccugccucgaccgcaucgccgcggggaccuucaacgccggcgaguucucccugcccacguucgacagccugaacaucaccgccgccucccucaacgacgacgggcuggacaaccacaccauccugcuguacuacagcaccgccgcguccagccucgccgugacgcugaugcuggccaucuucaucguguacauggucucccgggacaacgugagcugcagcaucugccucuga

SEQ ID NO: 91772 - RNA, 1755 nt, Artificial Sequence
  derived and/or modified CDS sequence (opt1) from hemagglutinin__InfluenzaB__AGX24337
augaaggccaucaucgugcugcucauggucgugaccagcaacgccgaccgcaucugcaccggcaucacguccagcaacagcccccacguggucaagaccgcgacccagggggaggugaacgugaccggcgucaucccgcugacgaccacccccaccaaguccuacuucgccaaccugaaggggacgcggacccgcggcaagcucugccccgacugccugaacugcaccgaccuggacguggcccucgggaugcccaugugcgugggcaccacgccguccgccaaggccagcauccugcacgagguccggcccgugaccuccggcugcuuccccaucaugcacgaccgcaccaagauccggcagcugcccaaccuccugcgcggguacgagaacauccggcugagcacccagaacgugaucgacgcggagaaggccccgggcgggcccuaccgccucggcacguccgggagcugccccaacgccaccuccaagaucggcuucuucgccaccauggcgugggccguccccaaggacaacuacaagaacgccaccaacccgcugacgguggaggugcccuacaucugcaccgagggcgaggaccagaucaccgucuggggguuccacagcgacaacaagacccagaugaagaaccuguacggcgacuccaacccccagaaguucacgagcuccgccaacggggugaccacccacuacgugagccagaucggcgacuuccccgaccagaccgaggacggcgggcucccgcaguccggccggaucgucguggacuacaugaugcagaagcccgggaagacgggcaccaucguguaccagcgcgggguccugcugccccagaagguguggugcgccagcggccgguccaaggugaucaagggcagccucccccugaucggggaggcggacugccugcacgagaaguacggcgggcucaacaagagcaagccguacuacaccggcgagcacgccaaggccaucgggaacugccccaucugggucaagacgccccugaagcuggccaacggcaccaaguaccggcccccggccaagcuccugaaggagcgcggcuucuucggggcgaucgccggcuuccuggagggcgggugggaggggaugaucgccggcuggcacggcuacaccucccacggggcccacggcguggccgucgcggccgaccucaagagcacccaggaggccaucaacaagaucaccaagaaccugaacucccugagcgagcucgaggugaagaaccugcagcgccuguccggggccauggacgagcuccacaacgagauccuggagcuggacgagaagguggacgaccuccgggccgacacgaucagcucccagaucgagcuggcgguccugcucagcaacgagggcaucaucaacuccgaggacgagcaccuccuggcccuggagcgcaagcugaagaagaugcugggccccagcgccguggacaucgggaacggcugcuucgagaccaagcacaagugcaaccagaccugccucgaccggaucgccgcggggaccuucaacgccggcgaguucucccugcccaccuucgacagccugaacaucacggccgccucccucaacgacgacgggcuggacaaccacaccauccugcuguacuacagcaccgccgcguccagccucgccgugacccugaugcuggccaucuucaucgucuacauggugucccgcgacaacgugagcugcuccaucugccucuga

SEQ ID NO: 91773 - RNA, 1755 nt, Artificial Sequence; identical to SEQ ID NO: 90844
  derived and/or modified CDS sequence (opt1) from hemagglutinin__InfluenzaB__AGX24348

SEQ ID NO: 91774 - RNA, 1755 nt, Artificial Sequence; identical to SEQ ID NO: 90591
  derived and/or modified CDS sequence (opt1) from hemagglutinin__InfluenzaB__AGX24359

SEQ ID NO: 91775 - RNA, 1755 nt, Artificial Sequence; identical to SEQ ID NO: 90844
  derived and/or modified CDS sequence (opt1) from hemagglutinin__InfluenzaB__AGX24381

SEQ ID NO: 91776 - RNA, 1755 nt, Artificial Sequence
  derived and/or modified CDS sequence (opt1) from hemagglutinin__InfluenzaB__AGX24392
augaaggccaucaucgugcugcucauggucgugaccagcaacgccgaccgcaucugcaccggcaucacguccagcaacagcccccacguggucaagaccgcgacccagggggaggugaacgugaccggcgucaucccgcugacgaccacccccaccaaguccuacuucgccaaccugaaggggacgcggacccgcggcaagcucugccccgacugccugaacugcaccgaccuggacguggcccucgggcggcccaugugcgugggcaccacgccguccgccaaggccagcauccugcacgagguccgccccgugaccuccggcugcuuccccaucaugcacgaccggaccaagauccgccagcugcccaaccuccugcggggguacgagaacauccgccugagcacccagaacgugaucgacgcggagaaggccccgggcgggcccuaccggcucggcacguccgggagcugccccaacgccaccuccaagagcggcuucuucgccaccauggcgugggccguccccaaggacaacaacaagaacgccaccaacccgcugacgguggagauccccuacaucugcaccgagggcgaggaccagaucaccguguggggguuccacuccgacaacaagacccagaugaagaaccuguacggcgacagcaacccccagaaguucacguccagcgccaacggggucaccacccacuacgugucccagaucggcagcuuccccgaccagaccgaggacggcgggcucccgcaguccggccgcaucguggucgacuacaugaugcagaagcccgggaagacgggcaccaucguguaccagcgcggggugcugcugccccagaaggucuggugcgccagcggccggagcaaggugaucaagggcucccucccccugaucggggaggcggacugccugcacgagaaguacggcgggcucaacaagagcaagccguacuacaccggcgagcacgccaaggccaucgggaacugccccaucugggugaagacgccccugaagcuggccaacggcaccaaguaccggcccccggccaagcuccugaaggagcgcggcuucuucggggcgaucgccggcuuccuggagggcgggugggaggggaugaucgccggcuggcacggcuacaccucccacggggcccacggcgucgccguggcggccgaccucaagagcacccaggaggccaucaacaagaucaccaagaaccugaacucccugagcgagcucgaggucaagaaccugcagcggcuguccggggccauggacgagcuccacaacgagauccuggagcuggacgagaagguggacgaccuccgcgccgacacgaucagcucccagaucgagcuggcggugcugcucagcaacgagggcaucaucaacuccgaggacgagcaccuccuggcccuggagcggaagcugaagaagaugcugggccccagcgccgucgagaucgggaacggcugcuucgagaccaagcacaagugcaaccagaccugccucgaccgcaucgccgcggggaccuucaacgccggcgaguucucccugcccaccuucgacagccugaacaucacggccgccucccucaacgacgacgggcuggacaaccacaccauccugcuguacuacagcaccgccgcguccagccucgccgugacccugaugcuggccaucuucaucguguacauggucucccgggacaacgugagcugcagcaucugccucuga

SEQ ID NO: 91777 - RNA, 1755 nt, Artificial Sequence; identical to SEQ ID NO: 90591
  derived and/or modified CDS sequence (opt1) from hemagglutinin__InfluenzaB__AGX24403

SEQ ID NO: 91778 - RNA, 1755 nt, Artificial Sequence; identical to SEQ ID NO: 90844
  derived and/or modified CDS sequence (opt1) from hemagglutinin__InfluenzaB__AGX24414

SEQ ID NO: 91779 - RNA, 1755 nt, Artificial Sequence; identical to SEQ ID NO: 90591
  derived and/or modified CDS sequence (opt1) from hemagglutinin__InfluenzaB__AGX24425

SEQ ID NO: 91780 - RNA, 1755 nt, Artificial Sequence; identical to SEQ ID NO: 90591
  derived and/or modified CDS sequence (opt1) from hemagglutinin__InfluenzaB__AGX24436

SEQ ID NO: 91781 - RNA, 1755 nt, Artificial Sequence; identical to SEQ ID NO: 91080
  derived and/or modified CDS sequence (opt1) from hemagglutinin__InfluenzaB__AGX24447

SEQ ID NO: 91782 - RNA, 1755 nt, Artificial Sequence; identical to SEQ ID NO: 91771
  derived and/or modified CDS sequence (opt1) from hemagglutinin__InfluenzaB__AGX24458

SEQ ID NO: 91783 - RNA, 1755 nt, Artificial Sequence
  derived and/or modified CDS sequence (opt1) from hemagglutinin__InfluenzaB__AGX24469
augaaggccaucaucgugcugcucauggucgugaccagcaacgccgaccgcaucugcaccggcaucacguccagcaacagcccccacguggucaagaccgcgacccagggggaggugaacgugaccggcgucaucccgcugacgaccacccccaccaaguccuacuucgccaaccugaaggggacgcggacccgcggcaagcucugccccgacugccugaacugcaccgaccuggacguggcccucgggcggccgaccugcgugggcacgacccccuccgccaaggccagcauccugcacgagguccgccccgugaccuccggcugcuuccccaucaugcacgaccggaccaagauccgccagcugcccaaccuccugcggggguacgagaacauccgccugagcacgcagaacgugaucgacgcggagaaggccccgggcgggcccuaccggcucggcaccuccgggagcugccccaacgccaccuccaagagcggcuucuucgccaccauggcgugggccguccccaaggacaacaacaagaacgccacgaacccgcugaccguggaggugcccuacaucugcaccgagggcgaggaccagaucaccgucuggggguuccacuccgacaacaagacgcagaugaagaaccuguacggcgacagcaacccccagaaguucaccuccagcgccaacggggugaccacccacuacgugucccagaucggcagcuuccccgaccagacggaggacggcgggcucccgcaguccggccgcaucgucguggacuacaugaugcagaagcccgggaagaccggcaccaucguguaccagcgggggauccugcugccccagaaggucuggugcgccagcggccgcagcaaggugaucaagggcucccucccccugaucggggaggcggacugccugcacgagaaguacggcgggcucaacaagagcaagccguacuacaccggcgagcacgccaaggccaucgggaacugccccaucugggugaagacgccccugaagcuggccaacggcaccaaguaccggcccccggccaagcuccugaaggagcgcggcuucuucggggcgaucgccggcuuccuggagggcgggugggaggggauggucgccggcuggcacggcuacaccucccacggggcccacggcguggccgucgcggccgaccucaagagcacccaggaggccaucaacaagaucacgaagaaccugaacucccugagcgagcucgaggugaagaaccugcagcggcuguccggggccauggacgagcuccacaacgagauccuggagcuggacgagaagguggacgaccuccgcgccgacaccaucagcucccagaucgagcuggcgguccugcucagcaacgagggcaucaucaacuccgaggacgagcaccuccuggcccuggagcggaagcugaagaagaugcugggccccagcgccguggagaucgggaacggcugcuucgagaccaagcacaagugcaaccagaccugccucgaccgcaucgccgcggggaccuucaacgccggcgaguucucccugcccacguucgacagccugaacaucaccgccgccucccucaacgacgacgggcuggacaaccacaccauccugcuguacuacagcaccgccgcguccagccucgccgugacgcugaugcuggccaucuucaucgucuacauggugucccgggacaacgugagcugcagcaucugccucuga

SEQ ID NO: 91784 - RNA, 1755 nt, Artificial Sequence; identical to SEQ ID NO: 91080
  derived and/or modified CDS sequence (opt1) from hemagglutinin__InfluenzaB__AGX24480

SEQ ID NO: 91785 - RNA, 1755 nt, Artificial Sequence; identical to SEQ ID NO: 91080
  derived and/or modified CDS sequence (opt1) from hemagglutinin__InfluenzaB__AGX24491

SEQ ID NO: 91786 - RNA, 1755 nt, Artificial Sequence
  derived and/or modified CDS sequence (opt1) from hemagglutinin__InfluenzaB__AGX24502
augaaggccaucaucgugcugcucauggucgugaccagcaacgccgaccgcaucugcaccggcaucacguccagcaacagcccccacguggucaagaccgcgacccagggggaggugaacgugaccggcgucaucccgcugacgaccacccccaccaaguccuacuucgccaaccugaaggggacgcggacccgcggcaagcucugccccgacugccugaacugcaccgaccuggacguggcccucgggcggcccaugugcgugggcaccacgccguccgccaaggccagcauccugcacgagguccgccccgugaccuccggcugcuuccccaucaugcacgaccggaccaagauccgccagcugcccaaccuccugcggggguacgagaacauccgccugagcacccagaacgugaucgacgcggagaaggccccgggcgggcccuaccggcucggcacguccgggagcugccccaacgccaccuccaagagcggcuucuucgccaccauggcgugggccguccagaaggacaacaacaagaacgccaccaacccccugacgguggaggugccguacaucugcaccgagggcgaggaccagaucaccgucuggggguuccacuccgacaacaagacccagaugaagaaccuguacggcgacagcaacccccagaaguucacguccagcgccaacggggugaccacccacuacgugucccagaucggcagcuuccccgaccagaccgaggacggcgggcucccccaguccggccgcaucgucguggacuacaugaugcagaagccggggaagacgggcaccaucguguaccagcgcgggguccugcugccccagcggguguggugcgccagcggccggagcaaggugaucaagggcucccucccccugaucggggaggcggacugccugcacgagaaguacggcgggcucaacaagagcaagcccuacuacaccggcgagcacgccaaggccaucgggaacugcccgaucugggucaagacgccccugaagcuggccaacggcaccaaguaccgcccgcccgccaagcuccugaaggagcggggcuucuucggggcgaucgccggcuuccuggagggcgggugggaggggaugaucgccggcuggcacggcuacaccucccacggggcccacggcguggccgucgcggccgaccucaagagcacccaggaggccaucaacaagaucaccaagaaccugaacucccugagcgagcucgaggugaagaaccugcagcgccuguccggggccauggacgagcuccacaacgagauccuggagcuggacgagaagguggacgaccuccgggccgacacgaucagcucccagaucgagcuggcgguccugcucagcaacgagggcaucaucaacuccgaggacgagcaccuccuggcccuggagcgcaagcugaagaagaugcugggccccagcgccguggagaucgggaacggcugcuucgagaccaagcacaagugcaaccagaccugccucgaccggaucgccgcggggaccuucaacgccggcgaguucucccugcccaccuucgacagccugaacaucacggccgccucccucaacgacgacgggcuggacaaccacaccauccugcuguacuacagcaccgccgcguccagccucgccgugacccugaugcuggccaucuucaucgucuacauggugucccgcgacaacgugagcugcagcaucugccucuga

SEQ ID NO: 91787 - RNA, 1755 nt, Artificial Sequence; identical to SEQ ID NO: 90755
  derived and/or modified CDS sequence (opt1) from hemagglutinin__InfluenzaB__AGX24513

SEQ ID NO: 91788 - RNA, 1755 nt, Artificial Sequence; identical to SEQ ID NO: 91080
  derived and/or modified CDS sequence (opt1) from hemagglutinin__InfluenzaB__AGX24524

SEQ ID NO: 91789 - RNA, 1755 nt, Artificial Sequence
  derived and/or modified CDS sequence (opt1) from hemagglutinin__InfluenzaB__AGX24535
augaaggccaucaucgugcugcucauggucgugaccagcaacgccgaccgcaucugcaccggcaucacguccagcaacagcccccacguggucaagaccgcgacccagggggaggugaacgugaccggcgucaucccgcugacgaccacccccaccaaguccuacuucgccaaccugaaggggacgcggacccgcggcaagcucugccccgacugccugaacugcaccgaccuggacguggcccucgggcggcccaugugcgugggcaccacgccguccgccaaggccagcauccugcacgagguccgccccgugaccuccggcugcuuccccaucaugcacgaccggaccaagauccgccagcugcccaaccuccugcggggguacgagaacauccgccugagcacccagaacgugaucgacgcggagaaggccccgggcgggcccuaccggcucggcacguccgggagcugccccaacgccaccuccaagaucggcuucuucgccaccauggcgugggccguccccaaggacaacuacaagaacgccaccaacccgcugacgguggaggugcccuacaucugcaccgagggcgaggaccagaucaccgucuggggguuccacagcgacaacaagacccagaugaagaaccuguacggcgacuccaacccccagaaguucacgagcuccgccaacggggugaccacccacuacgugagccagaucggcgacuuccccgaccagaccgaggacggcgggcucccgcaguccggccgcaucgucguggacuacaugaugcagaagcccgggaagacgggcaccaucguguaccagcgcgggguccugcugccccagaagguguggugcgccagcggccgguccaaggugaucaagggcagccucccccugaucggggaggcggacugccugcacgagaaguacggcgggcucaacaagagcaagccguacuacaccggcgagcacgccaaggccaucgggaacugccccaucugggucaagacgccccugaagcuggccaacggcaccaaguaccggcccccggccaagcuccugaaggagcgcggcuucuucggggcgaucgccggcuuccuggagggcgggugggaggggaugaucgccggcuggcacggcuacaccucccacggggcccacggcguggccgucgcggccgaccucaagagcacccaggaggccaucaacaagaucaccaagaaccugaacucccugagcgagcucgaggugaagaaccugcagcggcuguccggggccauggacgagcuccacaacgagauccuggagcuggacgagaagguggacgaccuccgcgccgacacgaucagcgcgcagaucgagcuggccguccugcucuccaacgagggcaucaucaacagcgaggacgagcaccuccuggcccuggagcggaagcugaagaagaugcugggccccuccgccguggacaucgggaacggcugcuucgagaccaagcacaagugcaaccagaccugccucgaccgcaucgcggccgggaccuucaacgccggcgaguucagccugcccaccuucgacucccugaacaucacggccgccagccucaacgacgacgggcuggacaaccacaccauccugcuguacuacuccaccgcggccagcucccucgccgugacccugaugcuggccaucuucaucgucuacauggugagccgggacaacguguccugcagcaucugccucuga

SEQ ID NO: 91790 - RNA, 1755 nt, Artificial Sequence; identical to SEQ ID NO: 90591
  derived and/or modified CDS sequence (opt1) from hemagglutinin__InfluenzaB__AGX24546

SEQ ID NO: 91791 - RNA, 1755 nt, Artificial Sequence
  derived and/or modified CDS sequence (opt1) from hemagglutinin__InfluenzaB__AGX24557
augaagaccaucaucgugcugcucauggucgugaccagcaacgccgaccgcaucugcacgggcaucaccuccagcaacagcccccacguggucaagaccgccacccagggggaggugaacgugacgggcgucaucccgcugaccaccacccccaccaaguccuacuucgcgaaccugaaggggacccggacccgcggcaagcucugccccgacugccugaacugcaccgaccuggacguggcccucgggcggcccacgugcgugggcaccaccccguccgccaaggccagcauccugcacgagguccgccccgugaccuccggcugcuuccccaucaugcacgaccggacgaagauccgccagcugcccaaccuccugcggggguacgagaacauccgccugagcacccagaacgugaucgacgccgagaaggcgccgggcgggcccuaccggcucggcaccuccgggagcugccccaacgccaccuccaagagcggcuucuucgccacgauggccugggcgguccccaaggacaacaacaagaacgccaccaacccgcugaccguggaggugcccuacaucugcaccgagggcgaggaccagaucacggucuggggguuccacuccgacaacaagacccagaugaagaaccuguacggcgacagcaacccccagaaguucaccuccagcgccaacggggugaccacgcacuacgugucccagaucggcagcuuccccgaccagaccgaggacggcgggcucccgcaguccggccgcaucgucguggacuacaugaugcagaagcccgggaagaccggcaccaucguguaccagcgggggauccugcugccccagaaggucuggugcgccagcggccgcagcaaggugaucaagggcucccucccccugaucggggaggccgacugccugcacgagaaguacggcgggcucaacaagagcaagccguacuacacgggcgagcacgcgaaggccaucgggaacugccccaucugggugaagacgccccugaagcuggccaacggcaccaaguaccggcccccggccaagcuccugaaggagcgcggcuucuucggggccaucgcgggcuuccuggagggcgggugggaggggaugaucgccggcuggcacggcuacaccucccacggggcccacggcgucgccguggccgcggaccucaagagcacgcaggaggccaucaacaagaucaccaagaaccugaacucccugagcgagcucgaggucaagaaccugcagcggcuguccggggccauggacgagcuccacaacgagauccuggagcuggacgagaagguggacgaccuccgcgccgacaccaucagcucccagaucgagcuggccgugcugcucagcaacgagggcaucaucaacuccgaggacgagcaccuccuggcgcuggagcggaagcugaagaagaugcugggccccagcgccgucgagaucgggaacggcugcuucgagaccaagcacaagugcaaccagaccugccucgaccgcaucgccgccgggacguucaacgcgggcgaguucucccugcccaccuucgacagccugaacaucaccgccgccucccucaacgacgacgggcuggacaaccacaccauccugcuguacuacagcacggccgccuccagccucgcggugacccugaugcuggccaucuucaucguguacauggucucccgggacaacgugagcugcagcaucugccucuga

SEQ ID NO: 91792 - RNA, 1755 nt, Artificial Sequence; identical to SEQ ID NO: 91080
  derived and/or modified CDS sequence (opt1) from hemagglutinin__InfluenzaB__AGX24579

SEQ ID NO: 91793 - RNA, 1755 nt, Artificial Sequence; identical to SEQ ID NO: 91080
  derived and/or modified CDS sequence (opt1) from hemagglutinin__InfluenzaB__AGX24590

SEQ ID NO: 91794 - RNA, 1755 nt, Artificial Sequence; identical to SEQ ID NO: 91080
  derived and/or modified CDS sequence (opt1) from hemagglutinin__InfluenzaB__AGX24601

SEQ ID NO: 91795 - RNA, 1755 nt, Artificial Sequence; identical to SEQ ID NO: 91080
  derived and/or modified CDS sequence (opt1) from hemagglutinin__InfluenzaB__AGX24612

SEQ ID NO: 91796 - RNA, 1755 nt, Artificial Sequence; identical to SEQ ID NO: 90591
  derived and/or modified CDS sequence (opt1) from hemagglutinin__InfluenzaB__AGX24623

SEQ ID NO: 91797 - RNA, 1755 nt, Artificial Sequence; identical to SEQ ID NO: 91080
  derived and/or modified CDS sequence (opt1) from hemagglutinin__InfluenzaB__AGX24634

SEQ ID NO: 91798 - RNA, 1755 nt, Artificial Sequence; identical to SEQ ID NO: 91789
  derived and/or modified CDS sequence (opt1) from hemagglutinin__InfluenzaB__AGX24656

SEQ ID NO: 91799 - RNA, 1755 nt, Artificial Sequence; identical to SEQ ID NO: 90591
  derived and/or modified CDS sequence (opt1) from hemagglutinin__InfluenzaB__AGX24667

SEQ ID NO: 91800 - RNA, 1755 nt, Artificial Sequence; identical to SEQ ID NO: 90844
  derived and/or modified CDS sequence (opt1) from hemagglutinin__InfluenzaB__AGX24678

SEQ ID NO: 91801 - RNA, 1755 nt, Artificial Sequence; identical to SEQ ID NO: 91080
  derived and/or modified CDS sequence (opt1) from hemagglutinin__InfluenzaB__AGX24689

SEQ ID NO: 91802 - RNA, 1755 nt, Artificial Sequence; identical to SEQ ID NO: 91080
  derived and/or modified CDS sequence (opt1) from hemagglutinin__InfluenzaB__AGX24700

SEQ ID NO: 91803 - RNA, 1755 nt, Artificial Sequence; identical to SEQ ID NO: 91080
  derived and/or modified CDS sequence (opt1) from hemagglutinin__InfluenzaB__AGX24711

SEQ ID NO: 91804 - RNA, 1755 nt, Artificial Sequence; identical to SEQ ID NO: 90591
  derived and/or modified CDS sequence (opt1) from hemagglutinin__InfluenzaB__AGX24722

SEQ ID NO: 91805 - RNA, 1755 nt, Artificial Sequence; identical to SEQ ID NO: 90591
  derived and/or modified CDS sequence (opt1) from hemagglutinin__InfluenzaB__AGX24733

SEQ ID NO: 91806 - RNA, 1755 nt, Artificial Sequence; identical to SEQ ID NO: 90591
  derived and/or modified CDS sequence (opt1) from hemagglutinin__InfluenzaB__AGX24744

SEQ ID NO: 91807 - RNA, 1755 nt, Artificial Sequence; identical to SEQ ID NO: 90591
  derived and/or modified CDS sequence (opt1) from hemagglutinin__InfluenzaB__AGX24755

SEQ ID NO: 91808 - RNA, 1755 nt, Artificial Sequence; identical to SEQ ID NO: 91080
  derived and/or modified CDS sequence (opt1) from hemagglutinin__InfluenzaB__AGX24766

SEQ ID NO: 91809 - RNA, 1755 nt, Artificial Sequence; identical to SEQ ID NO: 90591
  derived and/or modified CDS sequence (opt1) from hemagglutinin__InfluenzaB__AGX24777

SEQ ID NO: 91810 - RNA, 1755 nt, Artificial Sequence; identical to SEQ ID NO: 90591
  derived and/or modified CDS sequence (opt1) from hemagglutinin__InfluenzaB__AGX24788

SEQ ID NO: 91811 - RNA, 1755 nt, Artificial Sequence; identical to SEQ ID NO: 90591
  derived and/or modified CDS sequence (opt1) from hemagglutinin__InfluenzaB__AGX24799

SEQ ID NO: 91812 - RNA, 1755 nt, Artificial Sequence; identical to SEQ ID NO: 91080
  derived and/or modified CDS sequence (opt1) from hemagglutinin__InfluenzaB__AGX24810

SEQ ID NO: 91813 - RNA, 1755 nt, Artificial Sequence; identical to SEQ ID NO: 91080
  derived and/or modified CDS sequence (opt1) from hemagglutinin__InfluenzaB__AGX24821

SEQ ID NO: 91814 - RNA, 1755 nt, Artificial Sequence
  derived and/or modified CDS sequence (opt1) from hemagglutinin__InfluenzaB__AGX24832
augaaggccaucaucgugcugcucauggucgugaccagcaacgccgaccgcaucugcaccggcaucacguccagcaacagcccccacguggucaagaccgcgacccagggggaggugaacgugaccggcgucaucccgcugacgaccacccccaccaaguccuacuucgccaaccugaaggggacgcggacccgcggcaagcucugccccgacugccugaacugcaccgaccuggacguggcccucgggcggcccaugugcgugggcaccacgccguccgccaaggccagcauccugcacgagguccgccccgugaccuccggcugcuuccccaucaugcacgaccggaccaagauccgccagcugcccaaccuccugcggggguacgagaacauccgccugagcacccagaacgugaucgacgcggagaaggccccgggcgggcccuaccggcucggcacguccgggagcugccccaacgccaccuccaagagcggcuucuucgccaccauggcgugggccguccccaaggacaacaacaagaacgccaccaacccgcugacgguggaggugcccuacaucugcaccgagggcgaggaccagaucaccgucuggggguuccacuccgacaacaagacccagaugaagaaccuguacggcgacagcaacccccagaaguucacguccagcgccaacggggugaccacccacuacgugucccagaucggcagcuuccccgaccagaccgaggacggcgggcucccgcaguccggccgcaucgucguggacuacaugaugcagaagcccgggaagacgggcaccaucguguaccagcgggggauccugcugccccagcgcgucuggugcgccagcggccggagcaaggugaucaagggcucccucccccugaucggggaggcggacugccugcacgagaaguacggcgggcucaacaagagcaagccguacuacaccggcgagcacgccaaggccaucgggaacugccccaucugggugaagacgccccugaagcuggccaacggcaccaaguaccggcccccggccaagcuccugaaggagcgcggcuucuucggggcgaucgccggcuuccuggagggcgggugggaggggaugaucgccggcuggcacggcuacaccucccacggggcccacggcgucgccguggcggccgaccucaagagcacccaggaggccaucaacaagaucaccaagaaccugaacucccugagcgagcucgaggucaagaaccugcagcgccuguccggggccauggacgagcuccacaacgagauccuggagcuggacgagaagguggacgaccuccgggccgacacgaucagcucccagaucgagcuggcggugcugcucagcaacgagggcaucaucaacuccgaggacgagcaccuccuggcccuggagcgcaagcugaagaagaugcugggccccagcgccgucgagaucgggaacggcugcuucgagaccaagcacaagugcaaccagaccugccucgaccggaucgccgcggggaccuucaacgccggcgaguucucccugcccaccuucgacagccugaacaucacggccgccucccucaacgacgacgggcuggacaaccacaccauccugcuguacuacagcaccgccgcguccagccucgccgugacccugaugcuggccaucuucaucguguacauggucucccgcgacaacgugagcugcagcaucugccucuga

SEQ ID NO: 91815 - RNA, 1755 nt, Artificial Sequence
  derived and/or modified CDS sequence (opt1) from hemagglutinin__InfluenzaB__AGX24843
augaaggccaucaucgugcugcucauggucgugaccagcaacgccgaccgcaucugcaccggcaucacguccagcaacagcccccacguggucaagaccgcgacccagggggaggugaacgugaccggcgucaucccgcugacgaccacccccaccaaguccuacuucgccaaccugaaggggacgcggacccgcggcaagcucugccccgacugccugaacugcaccgaccuggacguggcccucgggcggcccaugugcgugggcaccacgccguccgccaaggccagcauccugcacgagguccgccccgugaccuccggcugcuuccccaucaugcacgaccggaccaagauccgccagcugcccaaccuccugcggggguacgagaacauccgccugagcacccagaacgugaucgacgcggagaaggccccgggcgggcccuaccggcucggcacguccgggagcugccccaacgccaccuccaagaucggcuucuucgccaccauggcgugggccguccccaaggacaacuacaagaacgccaccaacccgcugacgguggaggugcccuacaucugcaccgagggcgaggaccagaucaccgucuggggguuccacagcgacaacaagacccagaugaagaaccuguacggcgacuccaacccccagaaguucacgagcuccgccaacggggugaccacccacuacgugagccagaucggcgacuuccccgaccagaccgaggacggcgggcucccgcaguccggccgcaucgucguggacuacauggugcagaagcccgggaagacgggcaccaucgucuaccagcgcggggugcugcugccccagcgcguguggugcaccagcggccgguccaaggucaucaagggcagccucccccugaucggggaggccgacugccugcacgagaaguacggcgggcucaacaagagcaagccguacuacaccggcgagcacgcgaaggccaucgggaacugccccaucugggugaagacgccccugaagcuggccaacggcaccaaguaccggcccccggccaagcuccugaaggagcggggcuucuucggggccaucgcgggcuuccuggagggcgggugggaggggaugaucgccggcuggcacggcuacaccucccacggggcccacggcgucgccguggccgcggaccucaagagcacccaggaggccaucaacaagaucacgaagaaccugaacucccugagcgagcucgaggugaagaaccugcagcgccuguccggggccauggacgagcuccacaacgagauccuggagcuggacgagaaggucgacgaccuccgggccgacaccaucagcucccagaucgagcuggccgugcugcucagcaacgagggcaucaucaacuccgaggacgagcaccuccuggcgcuggagcgcaagcugaagaagaugcugggccccagcgccguggacaucgggaacggcugcuucgagaccaagcacaagugcaaccagaccugccucgaccggaucgccgccgggaccuucaacgcgggcgaguucucccugcccacguucgacagccugaacaucaccgccgccucccucaacgacgacgggcuggacaaccacaccauccugcuguacuacagcaccgccgccuccagccucgcggucacgcugaugcuggccaucuucaucguguacauggugucccgcgacaacgucagcugcuccaucugccucuga

SEQ ID NO: 91816 - RNA, 1755 nt, Artificial Sequence
  derived and/or modified CDS sequence (opt1) from hemagglutinin__InfluenzaB__AGX24854
augaaggccaucaucgugcugcucauggucgugaccagcaacgccgaccgcaucugcaccggcaucacguccagcaacagcccccacguggucaagaccgcgacccagggggaggugaacgugaccggcgucaucccgcugacgaccacccccaccaaguccuacuucgccaaccugaaggggacgcggacccgcggcaagcucugccccgagugccugaacugcaccgaccuggacguggcccucgggcggcccaugugcgugggcaccacgccguccgccaaggccagcauccugcacgagguccgccccgugaccuccggcugcuuccccaucaugcacgaccggaccaagauccgccagcugcccaaccuccugcggggguacgagaacauccgccugagcacccagaacgugaucgacgcggagaaggccccgggcgggcccuaccggcucggcacguccgggagcugccccaacgccaccuccaagaucggcuucuucgccaccauggcgugggccguccccaaggacaacuacaagaacgccaccaacccgcugacgguggaggugcccuacaucugcgccgagggcgaggaccagaucaccgucuggggguuccacagcgacaacaagacccagaugaagaaccuguacggcgacuccaacccccagaaguucaccagcuccgccaacggggugacgacccacuacgugagccagaucggcgacuuccccgaccagaccgaggacggcgggcucccgcaguccggccgcaucgucguggacuacauggugcagcggcccgggaagaccggcacgaucgucuaccagcgcggggugcugcugccccagaagguguggugcgcgagcggccgguccaaggucaucaagggcagccucccccugaucggggaggccgacugccugcacgagaaguacggcgggcucaacaagagcaagccguacuacaccggcgagcacgccaaggccaucgggaacugccccaucugggugaagacgccccugaagcuggccaacggcaccaaguaccggcccccggcgaagcuccugaaggagcgcggcuucuucggggccaucgccggcuuccuggagggcgggugggaggggaugaucgccggcuggcacggcuacaccucccacggggcccacggcgucgcgguggccgccgaccucaagagcacccaggaggccaucaacaagaucaccaagaaccugaacucccugagcgagcucgaggugaagaaccugcagcgccuguccggggccauggacgagcuccacaacgagauccuggagcuggacgagaaggucgacgaccuccgggcggacaccaucagcucccagaucgagcuggccgugcugcucagcaacgagggcaucaucaacuccgaggacgagcaccuccuggcccuggagcgcaagcugaagaagaugcugggccccagcgccguggacaucgggaacggcugcuucgagacgaagcacaagugcaaccagaccugccucgaccggaucgcggccgggaccuucaacgccggcgaguucucccugcccaccuucgacagccugaacaucaccgccgccucccucaacgacgacgggcuggacaaccacacgauccugcuguacuacagcaccgcggccuccagccucgccgucacccugaugcuggccaucuucaucguguacauggugucccgcgacaacgucagcugcuccaucugccucuga

SEQ ID NO: 91817 - RNA, 1755 nt, Artificial Sequence
  derived and/or modified CDS sequence (opt1) from hemagglutinin__InfluenzaB__AGX24865
augaaggccaucaucgugcugcucauggucgugaccagcaacgccgaccgcaucugcaccggcaucacguccagcaacagcccccacguggucaagaccgcgacccagggggaggugaacgugaccggcgucaucccgcugacgaccacccccaccaaguccuacuucgccaaccugaaggggacgcggacccgcggcaagcucugccccgacugccugaacugcaccgaccuggacguggcccucgggcggcccaugugcgugggcaccacgccguccgccaaggccagcauccugcacgagguccgccccgugaccuccggcugcuuccccaucaugcacgaccggaccaagauccgccagcugcccaaccuccugcggggguacgagaacauccgccugagcacccagaacgugaucgacgcggagaaggccccgggcgggcccuaccggcucggcacguccgggagcugccccaacgccaccuccaagaucggcuucuucgccaccauggcgugggccguccccaaggacaacuacaagaacgccaccaacccgcugacgguggaggugcccuacaucugcgccgagggcgaggaccagaucaccgucuggggguuccacagcgacaacaagacccagaugaagaaccuguacggcgacuccaacccccagaaguucaccagcuccgccaacggggugacgacccacuacgugagccagaucggcgacuuccccgaccagaccgaggacggcgggcucccgcaguccggccgcaucgucguggacuacauggugcagcggcccgggaagaccggcacgaucgucuaccagcgcggggugcugcugccccagaagguguggugcgcgagcggccgguccaaggucaucaagggcagccucccccugaucggggaggccgacugccugcacgagaaguacggcgggcucaacaagagcaagccguacuacaccggcgagcacgccaaggccaucgggaacugccccaucugggugaagacgccccugaagcuggccaacggcaccaaguaccggcccccggcgaagcuccugaaggagcgcggcuucuucggggccaucgccggcuuccuggagggcgggugggaggggaugaucgccggcuggcacggcuacaccucccacggggcccacggcgucgcgguggccgccgaccucaagagcacccaggaggccaucaacaagaucaccaagaaccugaacucccugagcgagcucgaggugaagaaccugcagcgccuguccggggccauggacgagcuccacaacgagauccuggagcuggacgagaaggucgacgaccuccgggcggacaccaucagcucccagaucgagcuggccgugcugcucagcaacgagggcaucaucaacuccgaggacgagcaccuccuggcccuggagcgcaagcugaagaagaugcugggccccagcgccguggacaucgggaacggcugcuucgagacgaagcacaagugcaaccagaccugccucgaccggaucgcggccgggaccuucaacgccggcgaguucucccugcccaccuucgacagccugaacaucaccgccgccucccucaacgacgacgggcuggacaaccacacgauccugcuguacuacagcaccgcggccuccagccucgccgucacccugaugcuggccaucuucaucguguacauggugucccgcgacaacgucagcugcuccaucugccucuga

SEQ ID NO: 91818 - RNA, 1755 nt, Artificial Sequence
  derived and/or modified CDS sequence (opt1) from hemagglutinin__InfluenzaB__AGX24876
augaaggccaucaucgugcugcucauggucgugaccagcaacgccgaccgcaucugcaccggcaucacguccagcaacagcccccacguggucaagaccgcgacccagggggaggugaacgugaccggcgucaucccgcugacgaccacccccaccaaguccuacuucgccaaccugaaggggacgcggacccgcggcaagcucugccccgacugccugaacugcaccgaccuggacguggcccucgggcggcccaugugcgugggcaccacgccguccgccaaggccagcauccugcacgagguccgccccgugaccuccggcugcuuccccaucaugcacgaccggaccaagauccgccagcugcccaaccuccugcggggguacgagaacauccgccugagcacccagaacgugaucgacgcggagaaggccccgggcgggcccuaccggcucggcacguccgggagcugccccaacgccaccuccaagaucggcuucuucgccaccauggcgugggccguccccaaggacaacuacaagaacgccaccaacagccugacgguggaggugccguacaucugcaaggagggcgaggaccagaucaccgucuggggguuccacuccgacaacaagccccagaugaagaaccuguacggcgacagcaacccccagaaguucaccuccagcgccaacggggugaccacgcacuacgugucccaggucggcgacuuccccgaccagaccgaggacggcgggcucccgcagagcggccgcaucgugguggacuacaugaugcagaagcccgggcggaccggcaccaucgucuaccagcgcggggugcugcugccccagaagguguggugcgccuccggccggagcaaggucaucaagggcagccucccccugaucggggaggcggacugccugcacgagaaguacggcgggcucaacaaguccaagccguacuacacgggcgagcacgccaaggccaucgggaacugccccaucugggugaagacgccccugaagcuggccaacggcaccaaguaccggcccccggccaagcuccugaaggagcgcggcuucuucggggcgaucgccggcuuccuggagggcgggugggaggggaugaucgccggcuggcacggcuacaccagccacggggcccacggcgucgccguggcggccgaccucaaguccacccaggaggccaucaacaagaucaccaagaaccugaacagccuguccgagcucgaggugaagaaccugcagcgccugagcggggccauggacgagcuccacaacgagauccuggagcuggacgagaaggucgacgaccuccgggccgacaccaucuccagccagaucgagcuggcggugcugcucuccaacgagggcaucaucaacagcgaggacgagcaccuccuggcccuggagcgcaagcugaagaagaugcugggccccuccgccguggacaucgggaacggcugcuucgagaccaagcacaagugcaaccagacgugccucgaccggaucgccgcggggaccuucaacgccggcgaguucagccugcccaccuucgacucccugaacaucaccgccgccagccucaacgacgacgggcuggacaaccacaccauccugcuguacuacuccacggccgcgagcucccucgccgucacccugaugcuggccaucuucaucguguacauggugagccgcgacaacgucuccugcagcaucugccucuga

SEQ ID NO: 91819 - RNA, 1755 nt, Artificial Sequence
  derived and/or modified CDS sequence (opt1) from hemagglutinin__InfluenzaB__AGX24887
augaaggccaucaucgugcugcucauggucgugaccagcaacgccgaccgcaucugcaccggcaucacguccagcaacagcccccacguggucaagaccgcgacccagggggaggugaacgugaccggcgccaucccgcugacgaccacccccaccaagagcuacuucgccaaccugaaggggacgcggacccgcggcaagcucugccccgacugccugaacugcaccgaccuggacgucgcccucgggcggcccaugugcgugggcaccacgccguccgccaaggcgagcauccugcacgaggugcgccccgucaccuccggcugcuuccccaucaugcacgaccggaccaagauccgccagcugcccaaccuccugcggggguacgagaacauccgccugagcacccagaacgugaucgacgccgagaaggccccgggcgggcccuaccggcucggcacguccgggagcugccccaacgccaccuccaagaucggcuucuucgcgaccauggccugggccgugcccaaggacaacuacaagaacgccaccaacccgcagacggucgaggugcccuacaucugcaccgagggcgaggaccagaucaccguguggggguuccacagcgacaacaagacccagaugaagaaccuguacggcgacuccaacccccagaaguucacgagcuccgccaacggggucaccacccacuacgugagccagaucggcgacuuccccgaccagaccgaggacggcgggcugccgcaguccggccgcaucguggucgacuacauggugcagaagcccgggaagacgggcaccaucguguaccagcgcgggguccuccugccccagaagguguggugcgcgagcggccgguccaaggugaucaagggcagccugccccucaucggggaggccgacugccugcacgagaaguacggcgggcugaacaagagcaagccguacuacaccggcgagcacgccaaggccaucgggaacugccccaucugggucaagacgccccucaagcuggccaacggcaccaaguaccggcccccggcgaagcugcucaaggagcgcggcuucuucggggccaucgccggcuuccuggagggcgggugggaggggaugaucgccggcuggcacggcuacaccucccacggggcccacggcguggcggucgccgccgaccugaaguccacccaggaggccaucaacaagaucaccaagaaccucaacucccugagcgagcuggaggugaagaaccuccagcggcuguccggggccauggacgagcugcacaacgagauccucgagcuggacgagaagguggacgaccugcgcgcggacacgaugagcucccagaucgagcucgccguccugcugagcaacgagggcaucaucaacuccgaggacgagcaccuccuggcccuggagcggaagcucaagaagaugcugggccccagcgccguggacaucgggaacggcugcuucgagaccaagcacaagugcaaccagaccugccuggaccgcaucgcggccgggaccuucaacgccggcgaguucucccuccccaccuucgacagccugaacaucacggccgccucccugaacgacgacgggcucgacaaccacaccauccugcuguacuacagcaccgcggccuccagccuggccgugacccucaugcuggccaucuucaucgucuacauggugucccgggacaacgugagcugcuccaucugccuguga

SEQ ID NO: 91820 - RNA, 1755 nt, Artificial Sequence
  derived and/or modified CDS sequence (opt1) from hemagglutinin__InfluenzaB__AGX24898
augaaggccaucaucgugcugcucauggucgugaccagcaacgccgaccgcaucugcaccggcaucacguccagcaacagcccccacguggucaagaccgcgacccagggggaggugaacgugaccggcgucaucccgcugacgaccacccccaccaaguccuacuucgccaaccugaaggggacgcggacccgcggcaagcucugccccgacugccugaacugcaccgaccuggacguggcccucgggcggcccaugugcgugggcaccacgccguccgccaaggccagcauccugcacgagguccgccccgugaccuccggcugcuuccccaucaugcacgaccggaccaagauccgccagcugcccaaccuccugcggggguacgagaagauccgccugagcacccagaacgugaucgacgcggagaaggccccgggcgggcccuaccggcucggcacguccgggagcugccccaacgccaccuccaagaucggcuucuucgccaccauggcgugggccguccccaaggacaacuacaagaacgccaccaacccgcugacgguggaggugcccuacaucugcaccggcggggaggaccagaucaccgucuggggcuuccacagcgacaacaagacccagaugaagucccuguacggggacagcaacccccagaaguucacguccagcgccaacggcgugaccacccacuacgugucccagaucggcgacuuccccgaccagaccgaggacgggggccucccgcagagcgggcgcaucgucguggacuacaugaugcagaagcccggcaagacggggaccaucguguaccagcggggcguccugcugccccagaagguguggugcgccuccggccgcagcaaggugaucaaggggagccucccccugaucggcgaggcggacugccugcacgagaaguacgggggccucaacaaguccaagccguacuacaccggggagcacgccaaggccaucggcaacugccccaucugggucaagacgccccugaagcuggccaacggcaccaaguaccggcccccggccaagcuccugaaggagcgcggguucuucggcgcgaucgccggguuccuggagggcgggugggagggcaugaucgccggcuggcacggguacaccagccacggcgcccacgggguggccgucgcggccgaccucaaguccacccaggaggccaucaacaagaucaccaagaaccugaacagccuguccgagcucgaggugaagaaccugcagcggcugagcggcgccauggacgagcuccacaacgagauccuggagcuggacgagaagguggacgaccuccgcgccgacacgaucuccagccagaucgagcuggcgguccugcucuccaacgagggcaucaucaacagcgaggacgagcaccuccuggcccuggagcggaagcugaagaagaugcuggggcccuccgccguggacaucggcaacgggugcuucgagaccaagcacaagugcaaccagaccugccucgaccgcaucgccgcgggcaccuucaacgccggggaguucagccugcccaccuucgacucccugaacaucacggccgccagccucaacgacgacggccuggacaaccacaccauccugcuguacuacuccaccgccgcgagcucccucgccgugacccugaugcuggccaucuucaucgucuacauggugagccgggacaacguguccugcagcaucugccucuga

SEQ ID NO: 91821 - RNA, 1758 nt, Artificial Sequence; identical to SEQ ID NO: 90707
  derived and/or modified CDS sequence (opt1) from hemagglutinin__InfluenzaB__AGX84854

SEQ ID NO: 91822 - RNA, 1758 nt, Artificial Sequence
  derived and/or modified CDS sequence (opt1) from hemagglutinin__InfluenzaB__AGX84865
augaaggccaucaucgugcugcucauggucgugaccagcaacgccgaccgcaucugcaccggcaucacguccagcaacagcccccacaucgugaagaccgcgacccagggggaggucaacgugaccggcgugaucccgcugacgaccacccccaccaagagccacuucgccaaccugaaggggacggagacccggggcaagcucugccccaagugccccaacugcaccgaccuggacgucgcccuggggcgcccgaagugcaccggcaagauccccuccgcccgggugagcauccuccacgaggugcgccccgucacguccggcugcuuccccaucaugcacgaccggaccaagauccgccagcugccgaaccugcuccggggguacgagcacauccgccugagcacccacaacgugaucaacgccgagaacgcgcccggcgggcccuacaagaucggcaccuccgggagcugccccaacgugacgaacggcaacggcuucuucgccaccauggccugggccgucccgaagaacgacaagaacaagaccgcgaccaacccccugacgaucgaggugcccuacaucugcaccgagggggaggaccagaucaccguguggggcuuccacuccgacaacgagacccagauggccaagcucuacggggacagcaagccccagaaguucacguccagcgccaacggcgucaccacccacuacgugucccagaucggcggguucccgaaccagaccgaggacggcgggcugccccagagcggccggaucguggucgacuacauggugcagaaguccgggaagacgggcaccaucaccuaccagcgcggcauccugcucccccagaagguguggugcgccagcgggcgguccaaggucaucaagggcagccugccccugaucggggaggccgacugccuccacgagaaguacggcgggcugaacaagagcaagccguacuacaccggcgagcacgcgaaggccaucggcaacugccccaucugggugaagacgccccugaagcucgccaacgggaccaaguaccggcccccggccaagcugcugaaggagcgcggcuucuucggggccaucgcgggcuuccucgagggcgggugggagggcaugaucgccggguggcacggcuacaccucccacggggcccacggcguggccgucgccgcggaccugaaguccacccaggaggccaucaacaagaucacgaagaaccugaacucccucagcgagcuggaggugaagaaccugcagcgccucuccggcgccauggacgagcugcacaacgagauccuggagcucgacgagaaggucgacgaccugcgggccgacaccaucagcucccagaucgagcuggccgugcuccugagcaacgaggggaucaucaacuccgaggacgagcaccuccuggcgcuggagcgcaagcugaagaagaugcucggccccagcgccguggagaucgggaacggcugcuucgagaccaagcacaagugcaaccagaccugccuggaccggaucgccgccgggaccuucgacgcgggcgaguucucccugcccacguucgacagccucaacaucaccgccgccucccugaacgacgacggccuggacaaccacaccauccuccuguacuacagcaccgccgccuccagccuggcggucacgcugaugaucgccaucuucgugguguacauggucucccgcgacaacgugagcugcuccaucugccucuga

SEQ ID NO: 91823 - RNA, 1758 nt, Artificial Sequence; identical to SEQ ID NO: 91822
  derived and/or modified CDS sequence (opt1) from hemagglutinin__InfluenzaB__AGX84876

SEQ ID NO: 91824 - RNA, 1758 nt, Artificial Sequence; identical to SEQ ID NO: 91822
  derived and/or modified CDS sequence (opt1) from hemagglutinin__InfluenzaB__AGX84887

SEQ ID NO: 91825 - RNA, 1758 nt, Artificial Sequence; identical to SEQ ID NO: 90707
  derived and/or modified CDS sequence (opt1) from hemagglutinin__InfluenzaB__AGX84898

SEQ ID NO: 91826 - RNA, 1758 nt, Artificial Sequence
  derived and/or modified CDS sequence (opt1) from hemagglutinin__InfluenzaB__AGX84920
augaaggccaucaucgugcugcucauggucgugaccagcaacgccgaccgcaucugcaccggcaucacguccagcaacagcccccacguggucaagaccgcgacccagggggaggugaacgugaccggcgucaucccgcugacgaccacccccaccaagagccacuucgccaaccugaaggggacggagacccggggcaagcucugccccaagugccccaacugcaccgaccuggacguggcccuggggcgcccgaagugcaccggcaagauccccuccgccggcgugagcauccuccacgagguccggcccgugacguccgggugcuuccccaucaugcacgaccgcaccaagauccggcagcugccgaaccugcuccgcggcuacgagcacauccggcugagcacccacaacgugaucaacgccgagaacgcgcccgggggccccuacaagaucgggaccuccggcagcugccccaacgucacgaacggcaacggguucuucgccaccauggccugggccgugccgaagaacgacaagaacaagaccgcgaccaacccccugacgaucgaggugcccuacaucugcaccgagggcgaggaccagaucaccgucuggggguuccacuccgacaacgagacccagauggccaagcucuacggcgacagcaagccccagaaguucacguccagcgccaacggcgugaccacccacuacgugucccagaucgggggcuucccgaaccagaccgaggacgggggccugccccagagcgggcgcaucgucguggacuacauggugcagaaguccggcaagacgggcaccaucaccuaccagcgggggauccugcucccccagaaggucuggugcgccagcggccgcuccaaggugaucaaggggagccugccccugaucggcgaggccgacugccuccacgagaaguacgggggccugaacaagagcaagccguacuacaccggcgagcacgcgaaggccaucgggaacugccccaucugggugaagacgccccugaagcucgccaacggcaccaaguaccggcccccggccaagcugcugaaggagcgcggguucuucggcgccaucgcgggguuccucgagggcggcugggaggggaugaucgccggcuggcacggguacaccucccacggcgcccacggcgucgccguggccgcggaccugaaguccacccaggaggccaucaacaagaucacgaagaaccugaacucccucagcgagcuggaggucaagaaccugcagcggcucuccggggccauggacgagcugcacaacgagauccuggagcucgacgagaagguggacgaccugcgcgccgacaccaucagcucccagaucgagcuggccgugcuccugagcaacgagggcaucaucaacuccgaggacgagcaccuccuggcgcuggagcggaagcugaagaagaugcucgggcccagcgccgucgagaucggcaacgggugcuucgagaccaagcacaagugcaaccagaccugccuggaccgcaucgccgccggcaccuucgacgcgggcgaguucucccugcccacguucgacagccucaacaucaccgccgccucccugaacgacgacgggcuggacaaccacaccauccuccuguacuacagcaccgccgccuccagccuggcggugacgcugaugaucgccaucuucguggucuacauggugucccgggacaacgugagcugcuccaucugccucuga

SEQ ID NO: 91827 - RNA, 1758 nt, Artificial Sequence
  derived and/or modified CDS sequence (opt1) from hemagglutinin__InfluenzaB__AGZ59821
augaaggccaucaucgugcugcucauggucgugaccagcaacgccgaccgcaucugcaccggcaucacguccagcaacagcccccacguggucaagaccgcgacccagggggaggugaacgugaccggcgucaucccgcugacgaccacccccaccaagagccacuucgccaaccugaaggggacgaagacccggggcaagcucugccccaagugcuucaacugcaccgaccuggacguggcccuggggcgccccaagugcaccggcaacaucccguccgccaaggugagcauccuccacgagguccggcccgugacguccggcugcuuccccaucaugcacgaccgcaccaaggugcggcagcugcccaaccugcuccgcggguacgagcacauccggcugagcacccacaacgucaucaacgccgagaaggcgccgggcgggcccuacaagaucggcaccuccgggagcugccccaacgugacgaacggcaacggcuucuucgccaccauggccugggccgugcccaagaacgacaacaacaagaccgcgaccaacucccugacgaucgaggucccguacaucugcaccgagggggaggaccagaucaccguguggggcuuccacagcgacaacgagacccagauggccaagcucuacggggacuccaagccccagaaguucacgagcuccgccaacggcgugaccacccacuacgucagccagaucggcggguuccccaaccagaccgaggacggcgggcugccccaguccggccgcaucgugguggacuacaugguccagaaguccgggaagacgggcaccaucaccuaccagcggggcauccugcucccgcagaagguguggugcgccuccgggcgcagcaaggugaucaagggcagccugccccugaucggggaggccgacugccuccacgagaaguacggcgggcugaacaaguccaagcccuacuacaccggcgagcacgcgaaggccaucggcaacugccccaucugggucaagacgccgcugaagcucgccaacgggaccaaguaccggccgcccgccaagcugcugaaggagcgcggcuucuucggggccaucgcgggcuuccucgagggcgggugggagggcaugaucgccggguggcacggcuacaccagccacggggcccacggcguggccgucgccgcggaccugaaguccacccaggaggccaucaacaagaucacgaagaaccugaacagccucuccgagcuggaggugaagaaccugcagcggcucagcggcgccauggacgagcugcacaacgagauccuggagcucgacgagaagguggacgaccugcgcgccgacaccaucuccagccagaucgagcuggccguccuccuguccaacgaggggaucaucaacagcgaggacgagcaccuccuggcgcuggagcggaagcugaagaagaugcucggccccuccgccguggagaucgggaacggcugcuucgagaccaagcacaagugcaaccagaccugccuggaccgcaucgccgccgggaccuucgacgcgggcgaguucagccugcccacguucgacucccucaacaucaccgccgccagccugaacgacgacggccuggacaaccacaccauccuccuguacuacuccaccgccgccagcucccuggcggugacgcugaugaucgccaucuucgucguguacauggugagccgggacaacgucuccugcagcaucugccucuga

SEQ ID NO: 91828 - RNA, 1758 nt, Artificial Sequence
  derived and/or modified CDS sequence (opt1) from hemagglutinin__InfluenzaB__AGZ59832
augaaggccaucaucgugcugcucauggucgugaccagcaacgccgaccgcaucugcaccggcaucacguccagcaacagcccccacguggucaagaccgcgacccagggggaggugaacgugaccggcgucaucccgcugacgaccacccccaccaagagccacuucgccaaccugaaggggacgaagacccggggcaagcucugccccaagugccugaacugcaccgaccuggacguggcccucgggcgccccaagugcaccggcaacaucccguccgccaaggugagcauccugcacgagguccggcccgugacguccggcugcuuccccaucaugcacgaccgcaccaagauccggcagcugcccaaccuccugcgcggguacgagcacauccggcugagcacccacaacgugaucaacgccgagaaggcgccgggcgggcccuacaagaucggcaccuccgggagcugccccaacgucacgaacggcaacggcuucuucgccaccauggccugggccgugcccaagaacgacaacaacaagaccgcgaccaacucccucacgaucgaggugccguacaucugcaccgagggggaggaccagaucaccgucuggggcuuccacagcgacaacgagacccagauggccaagcuguacggggacuccaagccccagaaguucacgagcuccgccaacggcgugaccacccacuacgugagccagaucggcggguuccccaaccagaccgaggacggcgggcugccccaguccggccgcaucgucguggacuacauggugcagaaguccgggaagacgggcaccaucaccuaccagcggggcauccuccugccgcagaaggucuggugcgccuccggcaagagcaaggugaucaaggggagccugccccucaucggggaggccgacugccugcacgagaaguacggcgggcugaacaaguccaagcccuacuacaccggcgagcacgcgaaggccaucggcaacugccccaucugggugaagacgccgcucaagcuggccaacgggaccaaguaccgcccgcccgccaagcugcucaaggagcggggcuucuucggggccaucgcgggcuuccuggagggcgggugggagggcaugaucgccggguggcacggcuacaccagccacggggcccacggcgucgccguggccgcggaccugaaguccacccaggaggccaucaacaagaucacgaagaaccucaacagccuguccgagcuggaggucaagaaccuccagcgccugagcggcgccauggacgagcugcacaacgagauccucgagcuggacgagaagguggacgaccugcgggccgacaccaucuccagccagaucgagcucgccgugcugcuguccaacgaggggaucaucaacagcgaggacgagcaccuccuggcgcuggagcgcaagcucaagaagaugcugggccccuccgccgucgagaucgggaacggcugcuucgagaccaagcacaagugcaaccagaccugccuggaccggaucgccgccgggaccuucgacgcgggcgaguucagccuccccacguucgacucccugaacaucaccgccgccagccugaacgaggacggccucgacaaccacaccauccugcuguacuacuccaccgccgccagcucccuggcggugacgcucaugaucgccaucuucguggucuacauggugagccgcgacaacguguccugcagcaucugccuguga

SEQ ID NO: 91829 - RNA, 1758 nt, Artificial Sequence
  derived and/or modified CDS sequence (opt1) from hemagglutinin__InfluenzaB__AGZ59843
augaaggccaucaucgugcugcucauggucgugaccagcaacgccgaccgcaucugcaccggcaucacguccagcaacagcccccacguggucaagaccgcgacccagggggaggugaacgugaccggcgucaucccgcugacgaccacccccaccaagagccacuucgccaaccugaaggggacggagacccggggcaagcucugccccaagugccugaacugcaccgaccuggacguggcccucgggcgccccaagugcaccggcaacaucccguccgcccgggugagcauccugcacgagguccgccccgugacguccggcugcuuccccaucaugcacgaccggaccaagauccgccagcugcccaaccuccugcggggguacgagcacauccgccugagcacccacaacgugaucaacgccgagaacgcgccgggcgggcccuacaagaucggcaccuccgggagcugccccaacgucacgaacggcaacggcuucuucgccaccauggccugggccgugcccaagaacgacaacaacaagaccgcgaccaacucccucacgaucgaggugccguacaucugcaccgagggggaggaccagaucaccgucuggggcuuccacagcgacaacgagacccagauggccaagcuguacggggacuccaagccccagaaguucacgagcuccgccaacggcgugaccacccacuacgugagccagaucggcggguuccccaaccagaccgaggacggcgggcugccccaguccggccggaucgucguggacuacauggugcagaaguccgggaagacgggcaccaucaccuaccagcgcggcauccuccugccgcagaaggucuggugcgccuccgggcggagcaaggugaucaagggcagccugccccucaucggggaggccgacugccugcacgagaaguacggcgggcugaacaaguccaagcccuacuacaccggcgagcacgcgaaggccaucggcaacugccccaucugggugaagacgccgcucaagcuggccaacgggaccaaguaccgcccgcccgccaagcugcucaaggagcggggcuucuucggggccaucgcgggcuuccuggagggcgggugggagggcaugaucgccggguggcacggcuacaccagccacggggcccacggcgucgccguggccgcggaccugaaguccacccaggaggccaucaacaagaucacgaagaaccucaacagccuguccgagcuggaggucaagaaccuccagcgccugagcggcgccauggacgagcugcacaacgagauccucgagcuggacgagaagguggacgaccugcgggccgacaccaucuccagccagaucgagcucgccgugcugcuguccaacgaggggaucaucaacagcgaggacgagcaccuccuggcgcuggagcgcaagcucaagaagaugcugggccccuccgccgucgagaucgggaacggcugcuucgagaccaagcacaagugcaaccagaccugccuggaccggaucgccgccgggaccuucgacgcgggcgaguucagccuccccacguucgacucccugaacaucaccgccgccagccugaacgacgacggccucgacaaccacaccauccugcuguacuacuccaccgccgccagcucccuggcggugacgcucaugaucgccaucuucaucguguacauggucagccgcgacaacguguccugcagcaucugccuguga

SEQ ID NO: 91830 - RNA, 1758 nt, Artificial Sequence; identical to SEQ ID NO: 91176
  derived and/or modified CDS sequence (opt1) from hemagglutinin__InfluenzaB__AGZ59854

SEQ ID NO: 91831 - RNA, 1758 nt, Artificial Sequence; identical to SEQ ID NO: 90538
  derived and/or modified CDS sequence (opt1) from hemagglutinin__InfluenzaB__AGZ59865

SEQ ID NO: 91832 - RNA, 1758 nt, Artificial Sequence
  derived and/or modified CDS sequence (opt1) from hemagglutinin__InfluenzaB__AGZ59876
augaaggccaucaucgugcugcucauggucgugaccagcaacgccgaccgcaucugcaccggcaucacguccagcaacagcccccacguggucaagaccgcgacccagggggaggugaacgugaccggcgucaucccgcugacgaccacccccaccaagagccacuucgccaaccugaaggggacggagacccggggcaagcucugccccaagugccugaacugcaccgaccuggacguggcccucgggcgccccaagugcaccggcaacaucccguccgcccgggugagcauccugcacgagguccgccccgugacguccggcugcuuccccaucaugcacgaccggaccaagauccgccagcugcccaaccuccugcggggguacgagcacauccgccugagcacccacaacgugaucaacgccgagaacgcgccgggcgggcccuacaagaucggcaccuccgggagcugccccaacgucacgaacggcaacggcuucuucgccaccauggccugggccgugcccaagaacgacaagaacaagaccgcgaccaacucccucacgaucgaggugccguacaucugcaccgagggggaggaccagaucaccgucuggggcuuccacagcgacaacgagacccagauggccaagcuguacggggacuccaagccccagaaguucacgagcuccgccaacggcgugaccacccacuacgugagccagaucggcggguuccccaaccagaccgaggacggcgggcugccccaguccggccggaucgucguggacuacauggugcagaaguccgggaagacgggcaccaucaccuaccagcgcggcauccuccugccgcagaaggucuggugcaccuccgggcggagcaaggugaucaagggcagccugccccucaucggggaggccgacugccugcacgagaaguacggcgggcugaacaaguccaagcccuacuacacgggcgagcacgccaaggcgaucggcaacugccccaucugggugaagaccccgcucaagcuggccaacgggaccaaguaccgcccgcccgccaagcugcucaaggagcggggcuucuucggggccaucgccggcuuccuggagggcgggugggagggcaugaucgcgggguggcacggcuacaccagccacggggcccacggcgucgccguggccgccgaccugaaguccacgcaggaggcgaucaacaagaucaccaagaaccucaacagccuguccgagcuggaggucaagaaccuccagcgccugagcggcgccauggacgagcugcacaacgagauccucgagcuggacgagaagguggacgaccugcgggccgacaccaucuccagccagaucgagcucgccgugcugcuguccaacgaggggaucaucaacagcgaggacgagcaccuccuggcccuggagcgcaagcucaagaagaugcugggccccuccgcggucgagaucgggaacggcugcuucgagaccaagcacaagugcaaccagaccugccuggaccggaucgccgccgggacguucgacgccggcgaguucagccuccccaccuucgacucccugaacaucaccgcggccagccugaacgacgacggccucgacaaccacaccauccugcuguacuacuccacggccgccagcucccuggccgugacccucaugaucgcgaucuucguggucuacauggugagccgcgacaacguguccugcagcaucugccuguga

SEQ ID NO: 91833 - RNA, 1755 nt, Artificial Sequence; identical to SEQ ID NO: 90591
  derived and/or modified CDS sequence (opt1) from hemagglutinin__InfluenzaB__AGZ59887

SEQ ID NO: 91834 - RNA, 1758 nt, Artificial Sequence; identical to SEQ ID NO: 91013
  derived and/or modified CDS sequence (opt1) from hemagglutinin__InfluenzaB__AGZ59898

SEQ ID NO: 91835 - RNA, 1758 nt, Artificial Sequence; identical to SEQ ID NO: 91379
  derived and/or modified CDS sequence (opt1) from hemagglutinin__InfluenzaB__AGZ59909

SEQ ID NO: 91836 - RNA, 1758 nt, Artificial Sequence; identical to SEQ ID NO: 91013
  derived and/or modified CDS sequence (opt1) from hemagglutinin__InfluenzaB__AGZ59920

SEQ ID NO: 91837 - RNA, 1758 nt, Artificial Sequence; identical to SEQ ID NO: 91013
  derived and/or modified CDS sequence (opt1) from hemagglutinin__InfluenzaB__AGZ59931

SEQ ID NO: 91838 - RNA, 1758 nt, Artificial Sequence; identical to SEQ ID NO: 91013
  derived and/or modified CDS sequence (opt1) from hemagglutinin__InfluenzaB__AGZ59942

SEQ ID NO: 91839 - RNA, 1758 nt, Artificial Sequence; identical to SEQ ID NO: 91013
  derived and/or modified CDS sequence (opt1) from hemagglutinin__InfluenzaB__AGZ59953

SEQ ID NO: 91840 - RNA, 1758 nt, Artificial Sequence
  derived and/or modified CDS sequence (opt1) from hemagglutinin__InfluenzaB__AGZ59965
augaaggccaucaucgugcugcucauggucgugaccagcaacgccgaccgcaucugcaccggcaucacguccagcaacagcccccacguggucaagaccgcgacccagggggaggugaacgugaccggcgucaucccgcugacgaccacccccaccaagagccacuucgccaaccugaaggggacggagacccggggcaagcucugccccaagugccugaacugcaccgaccuggacguggcccucgggcgccccaagugcaccggcaagaucccguccgcccgggugagcauccugcacgagguccgccccgugacguccggcugcuuccccaucaugcacgaccggaccaagauccgccagcugcccaaccuccugcggggguacgagcacauccgccugagcacccacaacgugaucaacgccgagaacgcgccgggcgggcccuacaagaucggcaccuccgggagcugccccaacaucacgaacggcaacggcuucuucgccaccauggccugggccguccccaagaacgacaagaacaagaccgcgaccaacccgcucacgaucgaggugcccuacaucugcaccgagggggaggaccagaucaccguguggggcuuccacuccgacaacgagacccagauggccaagcuguacggggacagcaagccccagaaguucacguccagcgccaacggcgucaccacccacuacgugucccagaucggcggguuccccaaccagaccgaggacggcgggcugccgcagagcggccggguggucguggacuacaugaugcagaaguccgggaagacgggcaccaucaccuaccagcgcggcauccuccugccccagaagguguggugcgccagcgggcgguccaaggucaucaagggcagccugccccucaucggggaggccgacugccugcacgagaaguacggcgggcugaacaagagcaagcccuacuacaccggcgagcacgcgaaggccaucggcaacugcccgaucugggugaagacgccccucaagcuggccaacgggaccaaguaccgcccgcccgccaagcugcucaaggagcggggcuucuucggggccaucgcgggcuuccuggagggcgggugggagggcaugaucgccggguggcacggcuacaccucccacggggcccacggcguggccgucgccgcggaccugaaguccacccaggaggccaucaacaagaucacgaagaaccucaacucccugagcgagcuggaggugaagaaccuccagcgccuguccggcgccauggacgagcugcacaacgagauccucgagcuggacgagaaggucgacgaccugcgggccgacaccaucagcucccagaucgagcucgccgugcugcugagcaacgaggggaucaucaacuccgaggacgagcaccuccuggcgcuggagcgcaagcucaagaagaugcugggccccagcgccguggagaucgggaacggcugcuucgagaccaagcacaagugcaaccagaccugccuggaccggaucgccgccgggaccuucgacgcgggcgaguucucccuccccacguucgacagccugaacaucaccgccgccucccugaacgacgacggccucgacaaccacaccauccugcuguacuacagcaccgccgccuccagccuggcggucacgcucaugaucgccaucuucgugguguacauggucucccgcgacaacgugagcugcuccaucugccuguga

SEQ ID NO: 91841 - RNA, 1758 nt, Artificial Sequence; identical to SEQ ID NO: 91013
  derived and/or modified CDS sequence (opt1) from hemagglutinin__InfluenzaB__AGZ59976

SEQ ID NO: 91842 - RNA, 1758 nt, Artificial Sequence; identical to SEQ ID NO: 91013
  derived and/or modified CDS sequence (opt1) from hemagglutinin__InfluenzaB__AGZ59987

SEQ ID NO: 91843 - RNA, 1758 nt, Artificial Sequence; identical to SEQ ID NO: 91013
  derived and/or modified CDS sequence (opt1) from hemagglutinin__InfluenzaB__AGZ59999

SEQ ID NO: 91844 - RNA, 1758 nt, Artificial Sequence; identical to SEQ ID NO: 90632
  derived and/or modified CDS sequence (opt1) from hemagglutinin__InfluenzaB__AGZ60010

SEQ ID NO: 91845 - RNA, 1758 nt, Artificial Sequence; identical to SEQ ID NO: 90632
  derived and/or modified CDS sequence (opt1) from hemagglutinin__InfluenzaB__AGZ60021

SEQ ID NO: 91846 - RNA, 1758 nt, Artificial Sequence; identical to SEQ ID NO: 90632
  derived and/or modified CDS sequence (opt1) from hemagglutinin__InfluenzaB__AGZ60033

SEQ ID NO: 91847 - RNA, 1755 nt, Artificial Sequence
  derived and/or modified CDS sequence (opt1) from hemagglutinin__InfluenzaB__AGZ60044
augaaggccaucaucgugcugcucauggucgugaccagcaacgccgaccgcaucugcaccggcaucacguccagcaacagcccccacguggucaagaccgcgacccagggggaggugaacgugaccggcgucaucccgcugacgaccacccccaccaaguccuacuucgccaaccugaaggggacgcggacccgcggcaagcucugccccgacugccugaacugcaccgaccuggacguggcccucgggcggcccaugugcgugggcaccacgccguccgccaaggccagcauccugcacgagguccgccccgugaccuccggcugcuuccccaucaugcacgaccggaccaagauccgccagcugcccaaccuccugcggggguacgagaacauccgccugagcacccagaacgugaucgacgcggagaacgccccgggcgggcccuaccggcucggcacguccgggagcugccccaacgccaccuccaagagcggcuucuucgccaccauggcgugggccguccccaaggacaacaacaagaacgccaccaacccgcugacgguggaggugcccuacgucugcaccgagggcgaggaccagaucaccguguggggguuccacuccgacaacaagacccagaugaagaaccuguacggcgacagcaacccccagaaguucacguccagcgccaacggggugaccacccacuacgucucccagaucggcggcuuccccgcccagaccgaggacgggggccucccgcagagcgggcgcaucgugguggacuacaugguccagaagccccggaagacgggcaccaucguguaccagcgcggggugcugcugccccagaaggucuggugcgcguccggccggagcaaggugaucaagggcagccucccccugaucggggaggccgacugccugcacgagaaguacggcgggcucaacaaguccaagccguacuacaccggcgagcacgccaaggccaucgggaacugccccaucugggucaagacgccccugaagcuggccaacggcaccaaguaccggcccccggcgaagcuccugaaggagcgcggcuucuucggggccaucgccggcuuccuggagggcgggugggaggggaugaucgccggcuggcacggcuacaccagccacggggcccacggcguggcgguggccgccgaccucaaguccacccaggaggccaucaacaagaucaccaagaaccugaacagccuguccgagcucgaggucaagaaccugcagcgccugagcggggccauggacgagcuccacaacgagauccuggagcuggacgagaagguggacgaccuccgggcggacacgaucuccagccagaucgagcuggccgugcugcucuccaacgagggcaucaucaacagcgaggacgagcaccuccuggcccuggagcgcaagcugaagaagaugcugggccccuccgccgucgacaucgggaacggcugcuucgagaccaagcacaagugcaaccagaccugccucgaccggaucgcggccgggaccuucaacgccggcgaguucagccugcccaccuucgacucccugaacaucacggccgccagccucaacgacgacgggcuggacaaccacaccauccugcuguacuacuccaccgcggccagcucccucgccgugacccugaugcuggccaucuucaucguguacauggucagccgcgacaacguguccugcagcaucugccucuga

SEQ ID NO: 91848 - RNA, 1755 nt, Artificial Sequence; identical to SEQ ID NO: 91050
  derived and/or modified CDS sequence (opt1) from hemagglutinin__InfluenzaB__AGZ60055

SEQ ID NO: 91849 - RNA, 1755 nt, Artificial Sequence
  derived and/or modified CDS sequence (opt1) from hemagglutinin__InfluenzaB__AGZ60066
augaaggccaucaucgugcugcucauggucgugaccagcaacgccgaccgcaucugcaccggcaucacguccagcaacagcccccacguggucaagaccgcgacccagggggaggugaacgugaccggcgucaucccgcugacgaccacccccaccaagucccacuucgccaaccugaaggggacgcggacccgcggcaagcucugccccgacugccugaacugcaccgaccuggacguggcccucgggcggcccaugugcgugggcaccacgccguccgccaaggccagcauccugcacgagguccgccccgugaccuccggcugcuuccccaucaugcacgaccggaccaagauccgccagcugcccaaccuccugcggggguacgagaacauccgccugagcacccagaacgugaucgacgcggagaaggcccucggcgggccguaccggcugggcacguccgggagcugccccaacgccaccuccaagagcggcuucuucgccaccauggcgugggccguccccaaggacaacaacaagaacgccaccaacccccugacgguggaggugccguacaucugcaccgagggcgaggaccagaucaccgucuggggguuccacuccgacaacaagacccagaugaagaaccucuacggcgacagcaacccccagaaguucacguccagcgccaacggggugaccacccacuacgugucccagaucggcggcuuccccgaccagaccgaggacgggggccugccccagagcgggcgcaucgucguggacuacauggugcagaagccgggcaagacggggaccaucgucuaccagcggggcgugcugcucccccagaagguguggugcgccuccggccgcagcaaggucaucaaggggagccugccccugaucggcgaggcggacugccuccacgagaaguacgggggccugaacaaguccaagcccuacuacaccggggagcacgccaaggccaucggcaacugcccgaucugggugaagacgccccugaagcucgccaacggcaccaaguaccggccgcccgccaagcugcugaaggagcgcggguucuucggcgcgaucgccggguuccucgagggcgggugggagggcaugaucgccggcuggcacggguacaccagccacggcgcccacggggucgccguggcggccgaccugaaguccacccaggaggccaucaacaagaucaccaagaaccugaacagccucuccgagcuggaggugaagaaccugcagcggcucagcggcgccauggacgagcugcacaacgagauccuggagcucgacgagaaggucgacgaccugcgcgccgacacgaucuccagccagaucgagcuggcggugcuccuguccaacgagggcaucaucaacagcgaggacgagcaccuccuggcccuggagcggaagcugaagaagaugcucgggcccuccgccguggacaucggcaacgggugcuucgagaccaagcacaagugcaaccagaccugccuggaccgcaucgccgcgggcaccuucaacgccggggaguucagccugcccaccuucgacucccucaacaucacggccgccagccugaacgacgacggccuggacaaccacaccauccugcucuacuacuccaccgccgcgagcucccuggccgucacccugaugcucgccaucuucaucguguacauggugagccgggacaacgucuccugcagcaucugccuguga

SEQ ID NO: 91850 - RNA, 1755 nt, Artificial Sequence
  derived and/or modified CDS sequence (opt1) from hemagglutinin__InfluenzaB__AGZ60077
augaaggccaucaucgugcugcucauggucgugaccagcaacgccgaccgcaucugcaccggcaucacguccagcaacagcccccacguggucaagaccgcgacccagggggaggugaacgugaccggcgucaucccgcugacgaccacccccaccaagagcuacuucgccaaccugaaggggacgcggacccgcggcaagcucugccccgacugccugaacugcaccgaccuggacguggcccucgggucccccaugugcgugggcaccacgccgagcgccaaggccuccauccugcacgagguccggcccgugaccagcggcugcuuccccaucaugcacgaccgcaccaagauccggcagcuggcgaaccuccugcgcggguacgagaacauccggcuguccacccagaacgugaucgacgccgagaaggcccccggcgggccguaccgccucggcacgagcggguccugccccaacgccaccagcaaguccggcuucuucgcgaccauggccugggccguccccaaggacaacaacaagaacgccaccaacccccugacgguggaggugccguacaucugcaccgagggcgaggaccagaucaccgucuggggguuccacagcgacaacaagacccagaugaagaaccuguacggcgacuccaacccccagaaguucacgagcuccgccaacggggugaccacccacuacgugagccagaucggcggcuuccccgaccagaccgaggacgggggccucccccaguccgggcggaucgucguggacuacaugaugcagaaguccggcaagacggggaccaucguguaccagcgcggcguccugcugccgcagaagguguggugcgcgagcggccgguccaaggugaucaaggggagccucccccugaucggcgaggccgacugccugcacgagaaguacgggggccucaacaaguccaagcccuacuacaccggggagcacgccaaggccaucggcaacugccccaucugggucaagaccccgcugaagcuggccaacggcacgaaguaccgcccgcccgcgaagcuccugaaggagcggggguucuucggcgccaucgccggguuccuggagggcgggugggagggcaugaucgccggcuggcacggguacaccagccacggcgcccacgggguggcggucgccgccgaccucaaguccacccaggaggccaucaacaagaucaccaagaaccugaacagccuguccgagcucgaggugaagaaccugcagcgccugagcggcgccauggacgagcuccacuccgagauccuggagcuggacgagaagguggacgaccuccgggcggacacgaucagcucccagaucgagcuggccguccugcucagcaacgagggcaucaucaacuccgaggacgagcaccuccuggcccuggagcgcaagcugaagaagaugcuggggcccagcgccguggacaucggcaacgggugcuucgagaccaagcacaagugcaaccagaccugccucgaccggaucgcggccggcaccuucaacgccggggaguucucccugcccaccuucgacagccugaacaucacggccgccucccucaacgacgacggccuggacaaccacaccauccugcuguacuacagcaccgcggccuccagccucgccgugacccugaugcuggccaucuucaucgucuacauggugagccgcgacaacguguccugcagcaucugccucuga

SEQ ID NO: 91851 - RNA, 1755 nt, Artificial Sequence; identical to SEQ ID NO: 90755
  derived and/or modified CDS sequence (opt1) from hemagglutinin__InfluenzaB__AGZ60088

SEQ ID NO: 91852 - RNA, 1755 nt, Artificial Sequence; identical to SEQ ID NO: 90450
  derived and/or modified CDS sequence (opt1) from hemagglutinin__InfluenzaB__AGZ60099

SEQ ID NO: 91853 - RNA, 1755 nt, Artificial Sequence
  derived and/or modified CDS sequence (opt1) from hemagglutinin__InfluenzaB__AGZ60131
augaaggccaucaucgugcugcucauggucgugaccagcaacgccgaccgcaucugcaccggcaucacguccagcaacagcccccacguggucaagaccgcgacccagggggaggugaacgugaccggcgucaucccgcugacgaccacccccaccaaguccuacuucgccaaccugaaggggacgcggacccgcggcaagcucugccccgacugccugaacugcaccgaccuggacguggcccucgggcggcccaugugcgugggcaccacgccguccgccaaggccagcauccugcacgagguccgccccaucaccuccggcugcuuccccaucaugcacgaccggaccaagauccgccagcugcccaaccuccugcggggguacgagaacauccgccugagcacccagaacgugaucgacgcggagaaggccccgggcgggcccuaccggcucggcacguccgggagcugccccaacgccaccuccaagagcggcuucuucgccaccauggcgugggccgugcccaaggacaacaacaagaacgccaccaacccgcugacggucgaggugcccuacaucugcaccgagggcgaggaccagaucaccguguggggguuccacuccgacaacaagacccagaugaagaaccuguacggcgacagcaacccccagaaguucacguccagcgccaacggggucaccacccacuacgugucccagaucggcagcuuccccgaccagaccgaggacggcgggcucccgcaguccggccgcaucguggucgacuacaugaugcagaagcccgggaagacgggcaccaucguguaccagcgcggggugcugcugccccagaaggucuggugcgccagcggccggagcaaggugaucaagggcucccucccccugaucggggaggcggacugccugcacgagaaguacggcgggcucaacaagagcaagccguacuacaccggcgagcacgccaaggccaucgggaacugccccaucugggugaagacgccccugaagcuggccaacggcaccaaguaccggcccccggccaagcuccugaaggagcgcggcuucuucggggcgaucgccggcuuccuggagggcgggugggaggggaugaucgccggcuggcacggcuacaccucccacggggcccacggcgucgccguggcggccgaccucaagagcacccaggaggccaucaacaagaucaccaagaaccugaacucccugagcgagcucgaggucaagaaccugcagcggcuguccggggccauggacgagcuccacaacgagauccuggagcuggacgagaagguggacgaccuccgcgccgacacgaucagcucccagaucgagcuggcggugcugcucagcaacgagggcaucaucaacuccgaggacgagcaccuccuggcccuggagcggaagcugaagaagaugcugggccccagcgccgucgagaucgggaacggcugcuucgagaccaagcacaagugcaaccagaccugccucgaccgcaucgccgcggggaccuucaacgccggcgaguucucccugcccaccuucgacagccugaacaucacggccgccucccucaacgacgacgggcuggacaaccacaccauccugcuguacuacagcaccgccgcguccagccucgccgugacccugaugcuggccaucuucaucguguacauggucucccgggacaacgugagcugcagcaucugccucuga

SEQ ID NO: 91854 - RNA, 1755 nt, Artificial Sequence; identical to SEQ ID NO: 90755
  derived and/or modified CDS sequence (opt1) from hemagglutinin__InfluenzaB__AGZ60142

SEQ ID NO: 91855 - RNA, 1755 nt, Artificial Sequence; identical to SEQ ID NO: 90755
  derived and/or modified CDS sequence (opt1) from hemagglutinin__InfluenzaB__AGZ60160

SEQ ID NO: 91856 - RNA, 1755 nt, Artificial Sequence; identical to SEQ ID NO: 90844
  derived and/or modified CDS sequence (opt1) from hemagglutinin__InfluenzaB__AGZ60172

SEQ ID NO: 91857 - RNA, 1755 nt, Artificial Sequence; identical to SEQ ID NO: 90844
  derived and/or modified CDS sequence (opt1) from hemagglutinin__InfluenzaB__AGZ60183

SEQ ID NO: 91858 - RNA, 1755 nt, Artificial Sequence
  derived and/or modified CDS sequence (opt1) from hemagglutinin__InfluenzaB__AGZ60194
augaaggccaucaucgugcugcucauggucgugaccagcaacgccgaccgcaucugcaccggcaucacguccagcaacagcccccacguggucaagaccgcgacccagggggaggugaacgugaccggcgucaucccgcugacgaccacccccaccaaguccuacuucgccaaccugaaggggacgcggacccgcggcaagcucugccccgacugccugaacugcaccgaccuggacguggcccucgggcggcccaugugcgugggcaccacgccguccgccaaggccagcauccugcacgagguccgccccgugaccuccggcugcuuccccaucaugcacgaccggaccaagauccgccagcugcccaaccuccugcggggguacgagaacauccgccugagcacccagaacgugaucgacgcggagaaggccccgggcgggcccuaccggcucggcacguccgggagcugccccaacgccaccuccaagaucggcuucuucgccaccauggcgugggccguccccaaggacaacuacaagaacgccaccaacccgcugacgguggaggugcccuacaucugcaccgagggcgaggaccagaucaccgucuggggguuccacagcgacaacaagacccagaugaagaaccuguacggcgacuccaacccccagaaguucacgagcuccgccaacggggugaccacccacuacgugagccagaucggcgacuuccccgaccagaccgaggacggcgggcucccgcaguccggccgcaucgucguggacuacaugaugcagaagacggggaagaccggcaccaucguguaccagcgcgggguccugcugccccagaagguguggugcgccagcggccgguccaaggugaucaagggcagccucccccugaucggggaggcggacugccugcacgagaaguacggcgggcucaacaagagcaagcccuacuacaccggcgagcacgccaaggccaucgggaacugcccgaucugggucaagacgccccugaagcuggccaacggcaccaaguaccggccgcccgccaagcuccugaaggagcgcggcuucuucggggcgaucgccggcuuccuggagggcgggugggaggggaugaucgccggcuggcacggcuacaccucccacggggcccacggcguggccgucgcggccgaccucaagagcacccaggaggccaucaacaagaucacgaagaaccugaacucccugagcgagcucgaggugaagaaccugcagcggcuguccggggccauggacgagcuccacaacgagauccuggagcuggacgagaagguggacgaccuccgcgccgacaccaucagcucccagaucgagcuggcgguccugcucagcaacgagggcaucaucaacuccgaggacgagcaccuccuggcccuggagcggaagcugaagaagaugcugggccccagcgccguggacaucgggaacggcugcuucgagaccaagcacaagugcaaccagaccugccucgaccgcaucgccgcggggaccuucaacgccggcgaguucucccugcccacguucgacagccugaacaucaccgccgccucccucaacgacgacgggcuggacaaccacaccauccugcuguacuacagcaccgccgcguccagccucgccgugacgcugaugcuggccaucuucaucgucuacauggugucccgggacaacgugagcugcuccaucugccucuga

SEQ ID NO: 91859 - RNA, 1755 nt, Artificial Sequence
  derived and/or modified CDS sequence (opt1) from hemagglutinin__InfluenzaB__AGZ60206
augaaggccaucaucgugcugcucauggucgugaccagcaacgccgaccgcaucugcaccggcaucacguccagcaacagcccccacguggucaagaccgcgacccagggggaggugaacgugaccggcgucaucccgcugacgaccacccccaucaaguccuacuucgccaaccugaaggggacccggacgcgcggcaagcucugccccgacugccugaacugcaccgaccuggacguggcccucgggcggcccaugugcgugggcaccaccccguccgccaaggccagcauccugcacgagguccgccccgugacguccggcugcuuccccaucaugcacgaccggaccaagauccgccagcugcccaaccuccugcggggguacgagaacauccgccugagcacccagaacgugaucgacgcggagaaggccccgggcgggcccuaccggcucggcaccuccgggagcugccccaacgccacguccaagaucggcuucuucgccaccauggcgugggccguccccaaggacaacuacaagaacgccaccaacccgcugaccguggaggugcccuacaucugcacggagggcgaggaccagaucaccgucuggggguuccacagcgacaacaagacccagaugaagaaccuguacggcgacuccaacccccagaaguucaccagcuccgccaacggggugacgacccacuacgugagccagaucggcgacuuccccgaccagaccgaggacggcgggcucccgcaguccggccgcaucgucguggacuacaugaugcagaagcccgggaagaccggcacgaucguguaccagcgcgggguccugcugccccagaagguguggugcgccagcggccgguccaaggugaucaagggcagccucccccugaucggggaggcggacugccugcacgagaaguacggcgggcucaacaagagcaagccguacuacaccggcgagcacgccaaggccaucgggaacugccccaucugggucaagacgccccugaagcuggccaacggcaccaaguaccggcccccggccaagcuccugaaggagcgcggcuucuucggggcgaucgccggcuuccuggagggcgggugggaggggaugaucgccggcuggcacggcuacaccucccacggggcccacggcguggccgucgcggccgaccucaagagcacccaggaggccaucaacaagaucaccaagaaccugaacucccugagcgagcucgaggugaagaaccugcagcggcuguccggggccauggacgagcuccacaacgagauccuggagcuggacgagaagguggacgaccuccgcgccgacaccaucagcucccagaucgagcuggcgguccugcucagcaacgagggcaucaucaacuccgaggacgagcaccuccuggcccuggagcggaagcugaagaagaugcugggccccagcgccguggacaucgggaacggcugcuucgagacgaagcacaagugcaaccagaccugccucgaccgcaucgccgcggggaccuucaacgccggcgaguucucccugcccaccuucgacagccugaacaucaccgccgccucccucaacgacgacgggcuggacaaccacacgauccugcuguacuacagcaccgccgcguccagccucgccgugacccugaugcuggccaucuucaucgucuacauggugucccgggacaacgugagcugcuccaucugccucuga

SEQ ID NO: 91860 - RNA, 1755 nt, Artificial Sequence; identical to SEQ ID NO: 91789
  derived and/or modified CDS sequence (opt1) from hemagglutinin__InfluenzaB__AGZ60217

SEQ ID NO: 91861 - RNA, 1755 nt, Artificial Sequence
  derived and/or modified CDS sequence (opt1) from hemagglutinin__InfluenzaB__AGZ60268
augaaggccaucaucgugcugcucauggucgugaccagcaacgccgaccgcaucugcaccggcaucacguccagcaacagcccccacguggucaagaccgcgacccagggggaggugaacgugaccggcgucaucccgcugacgaccacccccaccaaguccuacuucgccaaccugaaggggacgcggacccgcggcaagcucugccccgacugccugaacugcaccgaccuggacguggcccucgggcggcccaugugcgugggcaccacgccguccgccaaggccagcauccugcacgagguccgccccgugaccuccggcugcuuccccaucaugcacgaccggaccaagauccgccagcuggcgaaccuccugcggggguacgagaacauccgccugagcacccagaacgugaucgacgccgagaaggcccccggcgggccguaccggcucggcacguccgggagcugccccaacgccaccuccaagagcggcuucuucgcgaccauggccugggccguccccaaggacaacaacaagaacgccaccaacccccugacgguggaggugccguacaucugcaccgagggcgaggaccagaucaccgucuggggguuccacuccgacaacaagacccagaugaagaaccuguacggcgacagcaacccccagaaguucacguccagcgccaacggggugaccacccacuacgugucccagaucggcggcuuccccgaccagaccgaggacgggggccucccccagagcgggcgcaucgucguggacuacaugaugcagaagccgggcaagacggggaccaucguguaccagcggggcguccugcugccccagaagguguggugcgcguccggccgcagcaaggugaucaaggggagccucccccugaucggcgaggccgacugccugcacgagaaguacgggggccucaacaaguccaagcccuacuacaccggggagcacgccaaggccaucggcaacugcccgaucugggucaagacgccccugaagcuggccaacggcaccaaguaccggccgcccgcgaagcuccugaaggagcgcggguucuucggcgccaucgccggguuccuggagggcgggugggagggcaugaucgccggcuggcacggguacaccagccacggcgcccacgggguggcggucgccgccgaccucaaguccacccaggaggccaucaacaagaucaccaagaaccugaacagccuguccgagcucgaggugaagaaccugcagcggcugagcggcgccauggacgagcuccacaacgagauccuggagcuggacgagaagguggacgaccuccgcgcggacacgaucuccagccagaucgagcuggccguccugcucuccaacgagggcaucaucaacagcgaggacgagcaccuccuggcccuggagcggaagcugaagaagaugcuggggcccuccgccaucgacaucggcaacgggugcuucgagaccaagcacaagugcaaccagaccugccucgaccgcaucgcggccggcaccuucaacgccggggaguucagccugcccaccuucgacucccugaacaucacggccgccagccucaacgacgacggccuggacaaccacaccauccugcuguacuacuccaccgcggccagcucccucgccgugacccugaugcuggccaucuucaucguguacauggucagccgggacaacguguccugcagcaucugccucuga

SEQ ID NO: 91862 - RNA, 1755 nt, Artificial Sequence; identical to SEQ ID NO: 90878
  derived and/or modified CDS sequence (opt1) from hemagglutinin__InfluenzaB__AHE37993

SEQ ID NO: 91863 - RNA, 1755 nt, Artificial Sequence; identical to SEQ ID NO: 90923
  derived and/or modified CDS sequence (opt1) from hemagglutinin__InfluenzaB__AHE37994

SEQ ID NO: 91864 - RNA, 1755 nt, Artificial Sequence; identical to SEQ ID NO: 90878
  derived and/or modified CDS sequence (opt1) from hemagglutinin__InfluenzaB__AHE37995

SEQ ID NO: 91865 - RNA, 1755 nt, Artificial Sequence; identical to SEQ ID NO: 90878
  derived and/or modified CDS sequence (opt1) from hemagglutinin__InfluenzaB__AHE37996

SEQ ID NO: 91866 - RNA, 1755 nt, Artificial Sequence; identical to SEQ ID NO: 90923
  derived and/or modified CDS sequence (opt1) from hemagglutinin__InfluenzaB__AHE37997

SEQ ID NO: 91867 - RNA, 1755 nt, Artificial Sequence; identical to SEQ ID NO: 90923
  derived and/or modified CDS sequence (opt1) from hemagglutinin__InfluenzaB__AHE37998

SEQ ID NO: 91868 - RNA, 1755 nt, Artificial Sequence; identical to SEQ ID NO: 90923
  derived and/or modified CDS sequence (opt1) from hemagglutinin__InfluenzaB__AHE37999

SEQ ID NO: 91869 - RNA, 1755 nt, Artificial Sequence; identical to SEQ ID NO: 90878
  derived and/or modified CDS sequence (opt1) from hemagglutinin__InfluenzaB__AHE38000

SEQ ID NO: 91870 - RNA, 1755 nt, Artificial Sequence; identical to SEQ ID NO: 90878
  derived and/or modified CDS sequence (opt1) from hemagglutinin__InfluenzaB__AHE38001

SEQ ID NO: 91871 - RNA, 1755 nt, Artificial Sequence
  derived and/or modified CDS sequence (opt1) from hemagglutinin__InfluenzaB__AHE38002
augaaggccaucaucgugcugcucauggucgugaccagcaacgccgaccgcaucugcaccggcaucacguccagcaacagcccccacguggucaagaccgcgacccagggggaggugaacgugaccggcgucaucccgcugacgaccacccccaccaaguccuacuucgccaaccugaaggggacgaagacccggggcaagcucugccccgacugccugaacugcaccgaccuggacguggcccucgggcgccccaugugcgugggcaccacgccguccgccaaggccagcauccugcacgagguccggcccgugaccuccggcugcuuccccaucaugcacgaccgcaccaagauccggcagcuggcgaaccuccugcgcggguacgagaacauccggcugagcacccagaacgugaucgacgccaagaaggcccccggcgggccguaccgccucggcacguccgggagcugccccaacgccaccuccaagagcggcuucuucgcgaccauggccugggccguccccaaggacaacaacaagaacgccaccaacccccugacgguggaggugccguacaucugcgccgagggcgaggaccagaucaccgucuggggguuccacuccgacaacaagacccagaugaagaaccuguacggcgacagcaacccccagaaguucaccuccagcgcgaacggggugacgacccacuacgugucccagaucggcggcuuccccgaccagaccgaggacgggggccucccccagagcgggcggaucgucguggacuacaugaugcagaagccgggcaagaccgggacgaucguguaccagcgcggcguccugcugccccagaagguguggugcgccuccggccggagcaaggugaucaaggggagccucccccugaucggcgaggccgacugccugcacgagaaguacgggggccucaacaaguccaagcccuacuacaccggggagcacgccaaggccaucggcaacugcccgaucugggucaagacgccccugaagcuggcgaacggcaccaaguaccgcccgcccgccaagcuccugaaggagcggggguucuucggcgccaucgccggguuccuggagggcgggugggagggcaugaucgccggcuggcacggguacaccagccacggcgcgcacgggguggccgucgccgccgaccucaaguccacccaggaggccaucaacaagaucaccaagaaccugaacagccuguccgagcucgaggugaagaaccugcagcgccugagcggcgcgauggacgagcuccacaacgagauccuggagcuggacgagaagguggacgaccuccgggccgacaccaucuccagccagaucgagcuggccguccugcucuccaacgagggcaucaucaacagcgaggacgagcaccuccuggcccuggagcgcaagcugaagaagaugcuggggcccuccgcgguggacaucggcaacgggugcuucgagacgaagcacaagugcaaccagaccugccucgaccggaucgccgccggcaccuucaacgccggggaguucagccugcccaccuucgacucccugaacaucaccgccgcgagccucaacgacgacggccuggacaaccacacgauccugcuguacuacuccaccgccgccagcucccucgccgugacccugaugcuggccaucuucaucgucuacauggugagccgcgacaacguguccugcagcaucugccucuga

SEQ ID NO: 91872 - RNA, 1755 nt, Artificial Sequence; identical to SEQ ID NO: 90878
  derived and/or modified CDS sequence (opt1) from hemagglutinin__InfluenzaB__AHE38003

SEQ ID NO: 91873 - RNA, 1755 nt, Artificial Sequence; identical to SEQ ID NO: 90878
  derived and/or modified CDS sequence (opt1) from hemagglutinin__InfluenzaB__AHE38004

SEQ ID NO: 91874 - RNA, 1755 nt, Artificial Sequence; identical to SEQ ID NO: 90878
  derived and/or modified CDS sequence (opt1) from hemagglutinin__InfluenzaB__AHE38005

SEQ ID NO: 91875 - RNA, 1755 nt, Artificial Sequence
  derived and/or modified CDS sequence (opt1) from hemagglutinin__InfluenzaB__AHE38006
augaaggccaucaucgugcugcucauggucgugaccagcaacgccgaccgcaucugcaccggcaucacguccagcaacagcccccacguggucaagaccgcgacccagggggaggugaacgugaccggcgucaucccgcugacgaccacccccaccaaguccuacuucgccaaccugaaggggacgaagacccggggcaagcucugccccgacugccugaacugcaccgaccuggacguggcccucgggcgccccaugugcgugggcgccaccccguccgccaaggcgagcauccugcacgagguccggcccgugacguccggcugcuuccccaucaugcacgaccgcaccaagauccggcagcuggccaaccuccugcgcggguacgagaacauccggcugagcacccagaacgugaucgacgccgagaaggcccccggcgggccguaccgccucggcaccuccgggagcugccccaacgcgacguccaagagcggcuucuucgccaccauggccugggccguccccaaggacaacaacaagaacgccaccaacccccugaccguggaggugccguacaucugcgcggagggcgaggaccagaucacggucuggggguuccacuccgacaacaagacccagaugaagaaccuguacggcgacagcaacccccagaaguucaccuccagcgccaacggggugaccacgcacuacgugucccagaucggcggcuuccccgaccagaccgaggacgggggccucccccagagcgggcggaucgucguggacuacaugaugcagaagccgggcaagaccgggaccaucguguaccagcgcggcguccugcugccccagaagguguggugcgccuccggccggagcaaggugaucaaggggagccucccccugaucggcgaggccgacugccugcacgagaaguacgggggccucaacaaguccaagcccuacuacacgggggagcacgccaaggcgaucggcaacugcccgaucugggucaagacgccccugaagcuggccaacggcaccaaguaccgcccgcccgccaagcuccugaaggagcggggguucuucggcgccaucgccggguuccuggagggcgggugggagggcaugaucgcgggcuggcacggguacaccagccacggcgcccacgggguggccgucgccgccgaccucaaguccacccaggaggcgaucaacaagaucaccaagaaccugaacagccuguccgagcucgaggugaagaaccugcagcgccugagcggcgccguggacgagcuccacaacgagauccuggagcuggacgagaaggucgacgaccuccgggccgacaccaucuccagccagaucgagcuggccgugcugcucuccaacgagggcaucaucaacagcgaggacgagcaccuccuggcgcuggagcgcaagcugaagaagaugcuggggcccuccgccguggacaucggcaacgggugcuucgagaccaagcacaagugcaaccagacgugccucgaccggaucgccgccggcaccuucaacgccggggaguucagccugcccaccuucgacucccugaacaucaccgcggccagccucaacgacgacggccuggacaaccacaccauccugcuguacuacuccacggccgccagcucccucgccgucacccugaugcuggcgaucuucaucguguacauggugagccgcgacaacgucuccugcagcaucugccucuga

SEQ ID NO: 91876 - RNA, 1755 nt, Artificial Sequence; identical to SEQ ID NO: 90878
  derived and/or modified CDS sequence (opt1) from hemagglutinin__InfluenzaB__AHE38007

SEQ ID NO: 91877 - RNA, 1755 nt, Artificial Sequence
  derived and/or modified CDS sequence (opt1) from hemagglutinin__InfluenzaB__AHE38008
augaaggccaucaucgcccugcucaugguggucaccagcaacgcggaccgcaucugcaccggcaucacguccagcaacagcccccacguggugaagaccgccacccagggggaggucaacgugaccggcgugaucccgcugacgaccacccccaccaaguccuacuucgccaaccugaaggggacgaagacccggggcaagcucugccccgacugccugaacugcaccgaccuggacgucgcccucgggcgccccaugugcgugggcaccacgccguccgccaaggcgagcauccugcacgaggugcggcccgucaccuccggcugcuuccccaucaugcacgaccgcaccaagauccggcagcuggccaaccuccugcgcggguacgagaacauccggcugagcacccagaacgugaucgacgccgagaaggcccccggcgggccguaccgccucggcacguccgggagcugccccaacgcgaccuccaagagcggcuucuucgccaccauggccugggccgugcccaaggacaacaacaagaacgccaccaacccccugacggucgaggugccguacaucugcgcggagggcgaggaccagaucgccguguggggguuccacuccgacaacaagacccagaugaagaaccuguacggcgacagcaacccccagaaguucaccuccagcgccaacggggucaccacgcacuacgugucccagaucggcggcuuccccgaccagaccgaggacgggggccucccccagagcgggcggaucguggucgacuacaugaugcagaagccgggcaagaccgggaccaucguguaccagcgcggcgugcugcugccccagaaggucuggugcgccuccggccggagcaaggugaucaaggggagccucccccugaucggcgaggccgacugccugcacgagaaguacgggggccucaacaaguccaagcccuacuacacgggggagcacgcgaaggccaucggcaacugcccgaucugggugaagacgccccugaagcuggccaacggcaccaaguaccgcccgcccgccaagcuccugaaggagcggggguucuucggcgccaucgcgggguuccuggagggcgggugggagggcaugaucgccggcuggcacggguacaccagccacggcgcccacggggucgccguggccgcggaccucaaguccacccaggaggccaucaacaagaucaccaagaaccugaacagccuguccgagcucgaggucaagaaccugcagcgccugagcggcgccauggacgagcuccacaacgagauccuggagcuggacgagaagguggacgaccuccgggccgacaccaucuccagccagaucgagcuggcggugcugcucuccaacgagggcaucaucaacagcgaggacgagcaccuccuggcccuggagcgcaagcugaagaagaugcuggggcccuccgccgucgacaucggcaacgggugcuucgagaccaagcacaagugcaaccagacgugccucgaccggaucgccgccggcaccuucaacgcgggggaguucagccugcccaccuucgacucccugaacaucaccgccgccagccucaacgacgacggccuggacaaccacaccauccugcuguacuacuccacggccgccagcucccucgcggugacccugaugcuggccaucuucaucguguacauggucagccgcgacaacguguccugcagcaucugccucuga

SEQ ID NO: 91878 - RNA, 1755 nt, Artificial Sequence; identical to SEQ ID NO: 90923
  derived and/or modified CDS sequence (opt1) from hemagglutinin__InfluenzaB__AHE38009

SEQ ID NO: 91879 - RNA, 1755 nt, Artificial Sequence; identical to SEQ ID NO: 90923
  derived and/or modified CDS sequence (opt1) from hemagglutinin__InfluenzaB__AHE38010

SEQ ID NO: 91880 - RNA, 1755 nt, Artificial Sequence; identical to SEQ ID NO: 90878
  derived and/or modified CDS sequence (opt1) from hemagglutinin__InfluenzaB__AHE38012

SEQ ID NO: 91881 - RNA, 1755 nt, Artificial Sequence
  derived and/or modified CDS sequence (opt1) from hemagglutinin__InfluenzaB__AHE38013
augaaggccaucaucgugcugcucauggucgugaccagcaacgccgaccgcaucugcaccggcaucacguccagcaacagcccccacguggucaagaccgcgacccagggggaggugaacgugaccggcgucaucccgcugacgaccacccccaccaaguccuacuucgccaaccugaaggggacgaagacccggggcaagcucugccccgacugccugaacugcaccgaccuggacguggcccucgggcgccccaugugcgugggcaccacgccguccgccaaggccagcauccugcacgagguccggcccgugaccuccggcugcuuccccaucaugcacgaccgcaccaagauccggcagcuggcgaaccuccugcgcggguacgagaacauccggcugagcacccagaacgugaucgacgccgagaaggcccccggcgggccguaccgccucggcacguccgggagcugccccaacgccaccuccaagagcggcuucuucgcgaccauggccugggccguccccaaggacaacaacaagaacgccaccaacccccugacgguggaggugccguacaucugcgccgagggcgaggaccagaucaccgucuggggguuccacuccgacaacaagacccagaugaagaaccuguacggcgacagcaacccccagaaguucaccuccagcgcgaacggggugacgacccacuacgugucccagaucggcggcuuccccgaccagaccgaggacgggggccucccccagagcgggcggaucgucguggacuacaugaugcagaagccgggcaagaccgggacgaucguguaccagcgcggcguccugcugccccagaagguguggugcguguccggccggagcaaggucaucaaggggagccucccccugaucggcgaggccgacugccugcacgagaaguacgggggccucaacaaguccaagcccuacuacaccggggagcacgccaaggccaucggcaacugcccgaucugggugaagacgccccugaagcuggccaacggcaccaaguaccgcccgcccgcgaagcuccugaaggagcggggguucuucggcgccaucgccggguuccuggagggcgggugggagggcaugaucgccggcuggcacggguacaccagccacggcgcccacgggauggcggucgccgccgaccucaaguccacccaggaggccaucaacaagaucaccaagaaccugaacagccuguccgagcucgaggugaagaaccugcagcgccugagcggcgccauggacgagcuccacaacgagauccuggagcuggacgagaagguggacgaccuccgggcggacaccaucuccagccagaucgagcuggccguccugcucuccaacgagggcaucaucaacagcgaggacgagcaccuccuggcccuggagcgcaagcugaagaagaugcuggggcccuccgccguggacaucggcaacgggugcuucgagacgaagcacaagugcaaccagaccugccucgaccggaucgcggccggcaccuucaacgccggggaguucagccugcccaccuucgacucccugaacaucaccgccgccagccucaacgacgacggccuggacaaccacacgauccugcuguacuacuccaccgcggccagcucccucgccgugacccugaugcuggccaucuucaucgucuacauggugagccgcgacaacguguccugcagcaucugccucuga

SEQ ID NO: 91882 - RNA, 1755 nt, Artificial Sequence; identical to SEQ ID NO: 90878
  derived and/or modified CDS sequence (opt1) from hemagglutinin__InfluenzaB__AHE38014

SEQ ID NO: 91883 - RNA, 1758 nt, Artificial Sequence; identical to SEQ ID NO: 90669
  derived and/or modified CDS sequence (opt1) from hemagglutinin__InfluenzaB__AHE38015

SEQ ID NO: 91884 - RNA, 1758 nt, Artificial Sequence
  derived and/or modified CDS sequence (opt1) from hemagglutinin__InfluenzaB__AHE38016
augaaggccaucaucgugcugcucauggucgugaccagcaacgccgaccgcaucugcaccggcaucacguccagcaacagcccccacguggucaagaccgcgacccagggggaggugaacgugaccggcgucaucccgcugacgaccacccccaccaagagccacuucgccaaccugaaggggacggagacccggggcaagcucugccccaagugccugaacugcaccgaccuggacguggcccucgggcgccccaagugcaccggcaagaucccguccgcccgggugagcauccugcacgagguccgccccgugacguccggcugcuuccccaucaugcacgaccggaccaagauccgccagcugcccaaccuccugcggggguacgagcacauccgccugagcacccacaacgugaucaacgccgagaacgcgccgggcgggcccuacaagaucggcaccuccgggagcugccccaacgucacgaacggcaacggcuucuucgccaccauggccugggccgugcccaagaacgacaagaacaagaccgcgaccaacccgcucacgaucgaggugcccuacaucugcaccgagggggaggaccagaucaccgucuggggcuuccacuccgacaacgagacccagauggccaagcuguacggggacagcaagccccagaaguucacguccagcgccaacggcgugaccacccacuacgugucccagaucggcggguuccccaaccagaccgaggacggcgggcugccgcagagcggccggaucgucguggacuacauggugcagaaguccgggaagacgggcaccaucaccuaccagcgcggcauccuccugccccagaaggucuggugcgccagcgggaaguccaaggugaucaagggcagccugccccucaucggggaggccgacugccugcacgagaaguacggcgggcugaacaagagcaagcccuacuacaccggcgagcacgcgaaggccaucggcaacugcccgaucugggugaagacgccccucaagcuggccaacgggaccaaguaccggccgcccgccaagcugcucaaggagcgcggcuucuucggggccaucgcgggcuuccuggagggcgggugggagggcaugaucgccggguggcacggcuacaccucccacggggcccacggcgucgccguggccgcggaccugaaguccacccaggaggccaucaacaagaucacgaagaaccucaacucccugagcgagcuggaggucaagaaccuccagcggcuguccggcgccauggacgagcugcacaacgagauccucgagcuggacgagaagguggacgaccugcgcgccgacaccaucagcucccagaucgagcucgccgugcugcugagcaacgaggggaucaucaacuccgaggacgagcaccuccuggcgcuggagcggaagcucaagaagaugcugggccccagcgccgucgagaucgggaacggcugcuucgagaccaagcacaagugcaaccagaccugccuggaccgcaucgccgccgggaccuucgacgcgggcgaguucucccuccccacguucgacagccugaacaucaccgccgccucccugaacgacgacggccucgacaaccacaucauccugcuguacuacagcaccgccgccuccagccuggcggugacccucaugaucgccaucuucguggucuacauggugucccgggacaacgugagcugcuccaucugccuguga

SEQ ID NO: 91885 - RNA, 1758 nt, Artificial Sequence; identical to SEQ ID NO: 90988
  derived and/or modified CDS sequence (opt1) from hemagglutinin__InfluenzaB__AHE38017

SEQ ID NO: 91886 - RNA, 1758 nt, Artificial Sequence; identical to SEQ ID NO: 90911
  derived and/or modified CDS sequence (opt1) from hemagglutinin__InfluenzaB__AHE38018

SEQ ID NO: 91887 - RNA, 1758 nt, Artificial Sequence; identical to SEQ ID NO: 90896
  derived and/or modified CDS sequence (opt1) from hemagglutinin__InfluenzaB__AHE38019

SEQ ID NO: 91888 - RNA, 1758 nt, Artificial Sequence
  derived and/or modified CDS sequence (opt1) from hemagglutinin__InfluenzaB__AHE38020
augaaggccaucaucgugcugcucauggucgugaccagcaacgccgaccgcaucugcaccggcaucacguccagcaacagcccccacguggucaagaccgcgacccagggggaggugaacgugaccggcgucaucccgcugacgaucacccccaccaagagccacuucgccaaccugaaggggaccgagacgcggggcaagcucugccccaagugccugaacugcaccgaccuggacguggcccucgggcgccccaagugcaccggcaagaucccguccgcccgggugagcauccugcacgagguccgccccgugaccuccggcugcuuccccaucaugcacgaccggacgaagauccgccagcugcccaaccuccugcggggguacgagcacauccgccugagcacccacaacgugaucaacgccgaggacgcgccgggcgggcccuacaagaucggcaccuccgggagcugccccaacgucaccaacggcaacggcuucuucgccacgauggccugggccgugcccaagaacgacaagaacaagaccgcgaccaacccgcucaccaucgaggugcccuacaucugcacggagggggaggaccagaucaccgucuggggcuuccacuccgacaacgagacccagauggccaagcuguacggggacagcaagccccagaaguucaccuccagcgccaacggcgugacgacccacuacgugucccagaucggcggguuccccaaccagaccgaggacggcgggcugccgcagagcggccggaucgucguggacuacauggugcagaaguccgggaagaccggcacgaucaccuaccagcgcggcauccuccugccccagaaggucuggugcgccagcgggcgguccaaggugaucaagggcagccugccccucaucggggaggccgacugccugcacgagaaguacggcgggcugaacaagagcaagcccuacuacaccggcgagcacgcgaaggccaucggcaacugcccgaucugggugaagacgccccucaagcuggccaacgggaccaaguaccgcccgcccgccaagcugcucaaggagcggggcuucuucggggccaucgcgggcuuccuggagggcgggugggagggcaugaucgccggguggcacggcuacaccucccacggggcccacggcgucgccguggccgcggaccugaaguccacccaggaggccaucaacaagaucaccaagaaccucaacucccugagcgagcuggaggucaagaaccuccagcgccuguccggcgccauggacgagcugcacaacgagauccucgagcuggacgagaagguggacgaccugcgggccgacacgaucagcucccagaucgagcucgccgugcugcugagcaacgaggggaucaucaacuccgaggacgagcaccuccuggcgcuggagcgcaagcucaagaagaugcugggccccagcgccgucgagaucgggaacggcugcuucgagaccaagcacaagugcaaccagaccugccuggaccggaucgccgccgggaccuucgacgcgggcgaguucucccuccccaccuucgacagccugaacaucacggccgccucccugaacgacgacggccucgacaaccacaccauccugcuguacuacagcaccgccgccuccagccuggcggugacccucaugaucgccaucuucguggucuacauggugucccgcgacaacgugagcugcuccaucugccuguga

SEQ ID NO: 91889 - RNA, 1758 nt, Artificial Sequence
  derived and/or modified CDS sequence (opt1) from hemagglutinin__InfluenzaB__AHE38021
augaaggccaucaucgugcugcucauggucgugaccagcaacgccgaccgcaucugcaccggcaucacguccagcaacagcccccacguggucaagaccgcgacccagggggaggugaacgugaccggcgucaucccgcugacgaccacccccaccaagagccacuucgccaaccugaaggggacggagacccggggcaagcucugccccaagugccugaacugcaccgaccuggacguggcccucgggcgccccaagugcaccggcaagaucccguccgcccgggugagcauccugcacgagguccgccccgugacguccggcugcuuccccaucaugcacgaccggaccaagauccgccagcugcccaaccuccugcggggguacgagcacauccgccugagcacccacaacgugaucaacgccgagaacgcgccgggcgggcccuacaagaucggcaccuccgggagcugccccaacgucacgaacggcaacggcuucuucgccaccauggccugggccgugcccaagaacgacaagaacaagaccgcgaccaacccgcucacgaucgaggugcccuacaucugcaccgagggggaggaccagaucaccgucuggggcuuccacuccgacaacgagacccagauggccaagcuguacggggacagcaacccccagaaguucacguccagcgccaacggcgugaccacccacuacgugucccagaucggcggguuccccaaccagaccgaggacggcgggcugccgcagagcggccggaucgucguggacuacauggugcagaaguccgggaagacgggcaccaucaccuaccagcgcggcauccuccugccccagaaggucuggugcgccagcgggcgguccaaggugaucaagggcagccugccccucaucggggaggccgacugccugcacgagaaguacggcgggcugaacaagagcaagcccuacuacaccggcgagcacgcgaaggccaucggcaacugcccgaucugggugaagacgccccucaagcuggccaacgggaccaaguaccgcccgcccgccaagcugcucaaggagcggggcuucuucggggccaucgcgggcuuccuggagggcgggugggagggcaugaucgccggguggcacggcuacaccucccacggggcccacggcgucgccguggccgcggaccugaaguccacccaggaggccaucaacaagaucacgaagaaccucaacucccugagcgagcuggaggucaagaaccuccagcgccuguccggcgccauggacgagcugcacaacgagauccucgagcuggacgagaagguggacgaccugcgggccgacaccaucagcucccagaucgagcucgccgugcugcugagcaacgaggggaucaucaacuccgaggacgagcaccuccuggcgcuggagcgcaagcucaagaagaugcugggccccagcgccgucgagaucgggaacggcugcuucgagaccaagcacaagugcaaccagaccugccuggaccggaucgccgccgggaccuucgacgcgggcgaguucucccuccccacguucgacagccugaacaucaccgccgccucccugaacgacgacggccucgacaaccacaccauccugcuguacuacagcaccgccgccuccagccuggcggugacgcucaugaucgccaucuucguggucuacauggugucccgcgacaacgugagcugcuccaucugccuguga

SEQ ID NO: 91890 - RNA, 1758 nt, Artificial Sequence; identical to SEQ ID NO: 90911
  derived and/or modified CDS sequence (opt1) from hemagglutinin__InfluenzaB__AHE38022

SEQ ID NO: 91891 - RNA, 1752 nt, Artificial Sequence
  derived and/or modified CDS sequence (opt1) from hemagglutinin__InfluenzaB__AHL91189
augaaggccaucaucgugcugcucauggucgccaccagcaacgcggaccgcaucugcaccggcaucacguccagcaacagcccccacguggugaagaccgccacccagggggaggucaacgugaccggcgugaucucccugacgaccaccccgaccaagucccacuucgccaaccugaaggggacgaagacccggggcaagcucugccccaacugccugaacugcaccgaccuggacgucgcccucgggcgccccaucugcaucggcaccauccccagcgccaaggcguccauccugcacgaggugcggccggugacgagcggcugcuuccccaucaugcacgaccgcaccaagauccggcagcugcccaaccuccugcgcggguacgagcacauccggcuguccacccacaacgucaucaacgccgagcgcgcccccggcgggccguaccggcucggcaccagcggguccugccccaacgugacgagccgcuccggcuucuucgccaccauggcgugggccgugccccgggacaacaagaccgccaccaacccccugacggucgaggugccguacaucugcaccaagggcgaggaccagaucaccguguggggguuccacagcgacaacaagacccagaugaagaaccuguacggcgacuccaacccccagaaguucacgagcuccgccaacggggucaccacccacuacgugagccagaucggcggcuuccccaaccagaccgaggacgggggccucccccaguccgggcgcaucguggucgacuacauggugcagaagccgggcaagacggggaccaucguguaccagcggggcguccugcugccccagaagguguggugcgccagcggccgcagcaaggugaucaaggggucccucccccugaucggcgaggcggacugccugcacgagaaguacgggggccucaacaagagcaagcccuacuacaccggggagcacgccaaggccaucggcaacugcccgaucugggucaagacgccccugaagcuggccaacggcaccaaguaccggccgcccgccaagcuccugaaggagcgcggguucuucggcgcgaucgccggguuccuggagggcgggugggagggcaugaucgccggcuggcacggguacaccucccacggcgcccacgggguggccgucgcggccgaccucaagagcacccaggaggccaucaacaagaucaccaagaaccugaacucccugagcgagcucgaggugaagaaccugcagcggcuguccggcgccauggacgagcuccacaacgagauccuggagcuggacgagaagguggacgaccuccgcgccgacacgaucagcucccagaucgagcuggcgguccugcucagcaacgagggcaucaucaacuccgaggacgagcaccuccuggcccuggagcggaagcugaagaagaugcuggggcccagcgccguggacaucggcaacgggugcuucgagaccaagcacaagugcaaccagaccugccucgaccgcaucgccgcgggcaccuucaacgccggggaguucucccugcccaccuucgacagccugaacaucacggccgccucccucaacgacgacggccuggacaaccacaccauccugcuguacuacagcaccgccgcguccagccucgccgugacccugaugaucgccaucuucaucgucuacauggugucccgggacaacgugagcugcagcaucugccuguga

SEQ ID NO: 91892 - RNA, 1752 nt, Artificial Sequence
  derived and/or modified CDS sequence (opt1) from hemagglutinin__InfluenzaB__AHL91200
augaaggccaucaucgugcugcucauggucgugaccagcaacgccgaccgcaucugcaccggcaucacguccagcaacagcccccacguggucaagaccgcgacccagggggaggugaacgugaccggcgucaucccgcugacgaccacccccaccaagucccacuucgccaaccugaaggggacgaagacccggggcaagcucugccccaacugccugaacugcaccgaccuggacguggcccucgggcgccccaugugcaucggcaccaucccguccgccaaggccagcauccugcacgaggugcggcccgucacguccggcugcuuccccaucaugcacgaccgcaccaagauccggcagcugcccaaccuccugcgcggguacgagcacauccggcugagcacccacaacgugaucaacgcggagcgcgccccgggcgggcccuaccggcucggcaccuccgggagcugccccaacgugacgucccgcagcggcuucuucgccaccauggccugggcggucccccgggacaacaagaccgccaccaacccgcugacgguggaggugcccuacaucugcaccaagggcgaggaccagaucaccgucuggggguuccacuccgacaacaagacccagaugaagaaccuguacggcgacagcaacccccagaaguucacguccagcgccaacggggugaccacccacuacgugucccagaucggcgacuuccccaaccagaccgaggacggcgggcucccgcagagcggccgcaucgucguggacuacauggugcagaagcccgggaagacgggcaccaucgucuaccagcgcggggugcugcugccccagaagguguggugcgccuccggccggagcaaggucaucaagggcagccucccccugaucggggaggccgacugccugcacgagaaguacggcgggcucaacaaguccaagccguacuacaccggcgagcacgcgaaggccaucgggaacugccccaucugggugaagacgccccugaagcuggccaacggcaccaaguaccggcccccggccaagcuccugaaggagcgcggcuucuucggggccaucgcgggcuuccuggagggcgggugggaggggaugaucgccggcuggcacggcuacaccagccacggggcccacggcgucgccguggccgcggaccucaaguccacccaggaggccaucaacaagaucaccaagaaccugaacagccuguccgagcucgaggugaagaaccugcagcggcugagcggggccauggacgagcuccacaacgagauccuggagcuggacgagaaggucgacgaccuccgcgccgacacgaucuccagccagaucgagcuggccgugcugcucuccaacgagggcaucaucaacagcgaggacgagcaccuccuggcgcuggagcggaagcugaagaagaugcugggccccuccgccguggacaucgggaacggcugcuucgagaccaagcacaagugcaaccagaccugccucgaccgcaucgccgccgggaccuucaacgcgggcgaguucagccugcccaccuucgacucccugaacaucacggccgccagccucaacgacgacgggcuggacaaccacaccauccugcuguacuacuccaccgccgccagcucccucgcggucacccugaugaucgccaucuucaucguguacauggugagccgggacaacgucuccugcagcaucugccuguga

SEQ ID NO: 91893 - RNA, 1752 nt, Artificial Sequence
  derived and/or modified CDS sequence (opt1) from hemagglutinin__InfluenzaB__AHL91211
augaaggccaucaucgugcugcucauggucgccaccagcaacgcggaccgcaucugcaccggcaucacguccagcaacagcccccacguggugaagaccgccacccagggggaggucaacgugaccggcgugaucucccugacgaccaccccgaccaagucccacuucgccaaccugaaggggacgaagacccggggcaagcucugccccaacugccugaacugcaccgaccuggacgucgcccucgggcgccccaugugcaucggcaccauccccagcgccaaggcguccauccugcacgaggugcggccggugacgagcggcugcuuccccaucaugcacgaccgcaccaagauccggcagcugcccaaccuccugcgcggguacgagcacauccggcuguccacccacaacgucaucaacgccgagcgcgcccccggcgggccguaccggcucggcaccagcggguccugccccaacgugacgagccgcuccggcuucuucgccaccauggcgugggccgugccccgggacaacaagaccgccaccaacccccugacggucgaggugccguacaucugcaccaagggcgaggaccagaucaccguguggggguuccacagcgacaacaagacccagaugaagaaccuguacggcgacuccaacccccagaaguucacgagcuccgccaacggggucaccacccacuacgugagccagaucggcggcuuccccaaccagaccgaggacgggggccucccccaguccgggcgcaucguggucgacuacauggugcagaagccgggcaagacggggaccaucguguaccagcggggcguccugcugccccagaagguguggugcgccagcggccgcagcaaggugaucaaggggucccucccccugaucggcgaggcggacugccugcacgagaaguacgggggccucaacaagagcaagcccuacuacaccggggagcacgccaaggccaucggcaacugcccgaucugggucaagacgccccugaagcuggccaacggcaccaaguaccggccgcccgccaagcuccugaaggagcgcggguucuucggcgcgaucgccggguuccuggagggcgggugggagggcaugaucgccggcuggcacggguacaccucccacggcgcccacgggguggccgucgcggccgaccucaagagcacccaggaggccaucaacaagaucaccaagaaccugaacucccugagcgagcucgaggugaagaaccugcagcggcuguccggcgccauggacgagcuccacaacgagauccuggagcuggacgagaagguggacgaccuccgcgccgacacgaucagcucccagaucgagcuggcgguccugcucagcaacgagggcaucaucaacuccgaggacgagcaccuccuggcccuggagcggaagcugaagaagaugcuggggcccagcgccguggacaucggcaacgggugcuucgagaccaagcacaagugcaaccagaccugccucgaccgcaucgccgcgggcaccuucaacgccggggaguucucccugcccaccuucgacagccugaacaucacggccgccucccucaacgacgacggccuggacaaccacaccauccugcuguacuacagcaccgccgcguccagccucgccgugacccugaugaucgccaucuucaucgucuacauggugucccgggacaacgugagcugcagcaucugccuguga

SEQ ID NO: 91894 - RNA, 1755 nt, Artificial Sequence
  derived and/or modified CDS sequence (opt1) from hemagglutinin__InfluenzaB__AHL91222
augaaggccaucaucgugcugcucauggucgugaccagcaacgccgaccgcaucugcaccggcaucacguccagcaacagcccccacguggucaagaccgcgacccagggggaggugaacgugaccggcgucaucccgcugacgaccacccccaccaagucccacuucgccaaccugaaggggacgaagacccggggcaagcucugccccaacugccugaacugcaccgaccuggacguggcccucgggcgccccaugugcgugggcaccacgccguccgccaaggccagcauccugcacgagguccggcccgugaccuccggcugcuuccccaucaugcacgaccgcaccaagauccggcagcugcccaaccuccugcgcggguacgagaacauccggcugagcacccagaacgugaucaacgcggagaaggccccgggcgggcccuaccgccucggcacguccgggagcugccccaacgccaccucccggagcggcuucuucgccaccauggcgugggccgucccccgcgacaacaacaagaccgccacgaacccgcugaccguggaggugcccuacgucugcaccgagggcgaggaccagaucaccguguggggguuccacuccgacaacaagacgcagaugaagaaccuguacggcgacagcaacccccagaaguucaccuccagcgccaacggggugaccacccacuacgucucccagaucggcggcuuccccgaccagacggaggacgggggccucccgcagagcgggcggaucgugguggacuacaugguccagaagcccggcaagaccgggaccaucguguaccagcgcggcgugcugcugccccagaaggucuggugcgccuccggccggagcaaggugaucaaggggagccucccccugaucggcgaggcggacugccugcacgagaaguacgggggccucaacaaguccaagccguacuacaccggggagcacgccaaggccaucggcaacugccccaucugggucaagacgccccugaagcuggccaacggcaccaaguaccggcccccggccaagcuccugaaggagcgcggguucuucggcgcgaucgccggguuccuggagggcgggugggagggcaugaucgccggcuggcacggguacaccagccacggcgcccacgggguggccguggcggccgaccucaaguccacccaggaggccaucaacaagaucacgaagaaccugaacagccuguccgagcucgaggucaagaaccugcagcgccugagcggcgccauggacgagcuccacaacgagauccuggagcuggacgagaagguggacgaccuccgggccgacaccaucuccagccagaucgagcuggcggugcugcucuccaacgagggcaucaucaacagcgaggacgagcaccuccuggcccuggagcgcaagcugaagaagaugcuggggcccuccgccgucgacaucggcaacgggugcuucgagaccaagcacaagugcaaccagaccugccucgaccggaucgccgcgggcaccuucaacgccggggaguucagccugcccacguucgacucccugaacaucaccgccgccagccucaacgacgacggccuggacaaccacaccauccugcuguacuacuccaccgccgcgagcucccucgccgugacgcugaugaucgccaucuucaucguguacauggucagccgcgacaacaucuccugcagcaucugccuguga

SEQ ID NO: 91895 - RNA, 1755 nt, Artificial Sequence
  derived and/or modified CDS sequence (opt1) from hemagglutinin__InfluenzaB__AHL91244
augaaggccaucaucgugcugcucauggucgugaccagcaacgccgaccgcaucugcaccggcaucacguccagcaacagcccccacguggucaagaccgcgacccagggggaggugaacgugaccggcgucaucccgcugacgaccacccccaccaagucccacuucgccaaccugaaggggacgaagacccggggcaagcucugcccgaccugccugaacugcaccgaccuggacguggcccucgggcgccccaugugcgugggcacgacccccuccgccaaggccagcauccugcacgagguccggcccgugaccuccggcugcuuccccaucaugcacgaccgcaccaagauccggcagcugcccaaccuccugcgcggguacgagaagauccggcugagcacgcagaacgugaucaacgcggagaaggccccgggcgggcccuaccgccucggcaccuccgggagcugccccaacgccaccucccggagcggcuucuucgccaccauggcgugggccgucccccgcgacaacaacaagacggccaccaacccgcugaccguggaggugcccuacaucugcaccaaggaggaggaccagaucacggucuggggcuuccacuccgacaacaagacccagaugaagaaccuguacggggacagcaacccccagaaguucaccuccagcgccaacggcgugaccacgcacuacgugucccagaucgggggcuuccccgaccagaccgaggacggcgggcucccgcagagcggccggaucgucguggacuacauggugcagaagcccgggaagaccggcaccaucgucuaccagcgcggggugcugcugccccagaagguguggugcgccuccggccggagcaaggucaucaagggcagccucccccugaucggggaggcggacugccugcacgagaaguacggcgggcucaacaaguccaagccguacuacacgggcgagcacgccaaggccaucgggaacugccccaucugggugaagacgccccugaagcuggccaacggcaccaaguaccggcccccggccaagcuccugaaggagcgcggcuucuucggggcgaucgccggcuuccuggagggcgggugggaggggaugaucgccggcuggcacggcuacaccagccacggggcccacggcgucgccguggcggccgaccucaaguccacccaggaggccaucaacaagaucaccaagaaccugaacagccuguccgagcucgaggugaagaaccugcagcgccugagcggggccauggacgagcuccacaacgagauccuggagcuggacgagaaggucgacgaccuccgggccgacaccaucuccagccagaucgagcuggcggugcugcucuccaacgagggcaucaucaacagcgaggacgagcaccuccuggcccuggagcgcaagcugaagaagaugcugggccccuccgccguggacaucgggaacggcugcuucgagaccaagcacaagugcaaccagaccugccucgaccggaucgccgcggggacguucaacgccggcgaguucagccugcccaccuucgacucccugaacaucaccgccgccagccucaacgacgacgggcuggacaaccacaccauccugcuguacuacuccacggccgcgagcucccucgccgucacccugaugaucgccaucuucaucguguacauggugagccgcgacaacgucuccugcagcaucugccuguga

SEQ ID NO: 91896 - RNA, 1755 nt, Artificial Sequence; identical to SEQ ID NO: 90525
  derived and/or modified CDS sequence (opt1) from hemagglutinin__InfluenzaB__AHL91255

SEQ ID NO: 91897 - RNA, 1755 nt, Artificial Sequence; identical to SEQ ID NO: 90525
  derived and/or modified CDS sequence (opt1) from hemagglutinin__InfluenzaB__AHL91266

SEQ ID NO: 91898 - RNA, 1752 nt, Artificial Sequence
  derived and/or modified CDS sequence (opt1) from hemagglutinin__InfluenzaB__AHL91277
augaaggccaucaucgugcugcucauggucgugaccagcaacgccgaccgcaucugcaccggcaucacguccagcaacagcccccacguggucaagaccgcgacccagggggaggugaacgugaccggcgucaucccgcugacgaccacccccaccaagucccacuucgccaaccugaaggggacgaagacccggggcaagcucugccccaacugccugaacugcaccgaccuggacguggcccucgggcgccccaugugcaucggcaucaccccguccgccaaggccagcauccugcacgaggugcggcccgucacguccggcugcuuccccaucaugcacgaccgcaccaagauccggcagcugcccaaccuccugcgcggguacgagcacauccggcugagcacccacaacgugaucaacgcggagcgcgccccgggcgggcccuaccggcucggcaccuccgggagcugccccaacgugacgucccgcagcggcuucuucgccaccauggccugggcggucccccgggacaacaagaccgccaccaacccgcugacgguggaggugcccuacaucugcaccaagggcgaggaccagaucaccgucuggggguuccacuccgacaacaagacccagaugaagaaccuguacggcgacagcaacccccagaaguucacguccagcgccaacgggaucaccacccacuacgugucccagaucggcggcuuccccaaccagaccgaggacgggggccucccgcagagcgggcgcaucguggucgacuacauggugcagaagcccggcaagacggggaccaucguguaccagcggggcguccugcugccccagaagguguggugcgccuccggccgcagcaaggugaucaaggggagccucccccugaucggcgaggccgacugccugcacgagaaguacgggggccucaacaaguccaagccguacuacaccggggagcacgcgaaggccaucggcaacugccccaucugggucaagacgccccugaagcuggccaacggcaccaaguaccggcccccggccaagcuccugaaggagcgcggguucuucggcgccaucgcgggguuccuggagggcgggugggagggcaugaucgccggcuggcacggguacaccagccacggcgcccacgggguggccgucgccgcggaccucaaguccacccaggaggccaucaacaagaucaccaagaaccugaacagccuguccgagcucgaggugaagaaccugcagcggcugagcggcgccauggacgagcuccacaacgagauccuggagcuggacgagaagguggacgaccuccgcgccgacacgaucuccagccagaucgagcuggccguccugcucuccaacgagggcaucaucaacagcgaggacgagcaccuccuggcgcuggagcggaagcugaagaagaugcuggggcccuccgccguggacaucggcaacgggugcuucgagaccaagcacaagugcaaccagaccugccucgaccgcaucgccgccggcaccuucaacgcgggggaguucagccugcccaccuucgacucccugaacaucacggccgccagccucaacgacgacggccuggacaaccacaccauccugcuguacuacuccaccgccgccagcucccucgcggugacccugaugaucgccaucuucaucgucuacauggugagccgggacaacguguccugcagcaucugccuguga

SEQ ID NO: 91899 - RNA, 1755 nt, Artificial Sequence
  derived and/or modified CDS sequence (opt1) from hemagglutinin__InfluenzaB__AHL91299
augaaggccaucaucgugcugcucauggucgugaccagcaacgccgaccgcaucugcaccggcaucacguccagcaacagcccccacguggucaagaccgcgacccagggggaggugaacgugaccggcgucaucccgcugacgaccacccccacccggucccacuucgccaaccugaaggggacgaagacccgcggcaagcucugcccgaccugccugaacugcaccgaccuggacguggcccucgggcggcccaugugcgugggcacgacccccuccgccaaggccagcauccugcacgagguccgccccgugaccuccggcugcuuccccaucaugcacgaccggaccaagauccgccagcugcccaaccuccugcggggguacgagaagauccgccugagcacgcagaacgugaucaacgcggagaaggccccgggcgggcccuaccggcucggcaccuccgggagcugccccaacgccaccucccgcagcggcuucuucgccaccauggcgugggccgucccccgggacaacaacaagacggccaccaacccgcugaccguggaggugcccuacaucugcaccaaggaggaggaccagaucacggucuggggcuuccacuccgacaacaagacccagaugaagaaccuguacggggacagcaacccccagaaguucaccuccagcgccaacggcgugaccacgcacuacgugucccagaucgggggcuuccccgaccagaccgaggacggcgggcucccgcagagcggccgcaucgucguggacuacauggugcagaagcccgggaagaccggcaccaucgucuaccagcgggggauccugcugccccagaagguguggugcgccuccggccgcagcaaggugaucaagggcagccucccccugaucggggaggcggacugccugcacgagaaguacggcgggcucaacaaguccaagccguacuacacgggcgagcacgccaaggccaucgggaacugccccaucugggucaagacgccccugaagcuggccaacggcaccaaguaccggcccccggccaagcuccugaaggagcgcggcuucuucggggcgaucgccggcuuccuggagggcgggugggaggggaugaucgccggcuggcacggcuacaccagccacggggcccacggcguggccgucgcggccgaccucaaguccacccaggaggccaucaacaagaucaccaagaaccugaacagccuguccgagcucgaggugaagaaccugcagcggcugagcggggccauggacgagcuccacaacgagauccuggagcuggacgagaagguggacgaccuccgcgccgacaccaucuccagccagaucgagcuggcgguccugcucuccaacgagggcaucaucaacagcgaggacgagcaccuccuggcccuggagcggaagcugaagaagaugcugggccccuccgccguggacaucgggaacggcugcuucgagaccaagcacaagugcaaccagaccugccucgaccgcaucgccgcggggacguucaacgccggcgaguucagccugcccaccuucgacucccugaacaucaccgccgccagccucaacgacgacgggcuggacaaccacaccauccugcuguacuacuccacggccgcgagcucccucgccgugacccugaugaucgccaucuucaucgucuacaugaucagccgggacaacguguccugcagcaucugccuguga

SEQ ID NO: 91900 - RNA, 1755 nt, Artificial Sequence
  derived and/or modified CDS sequence (opt1) from hemagglutinin__InfluenzaB__AHL91310
augaaggccaucaucgugcugcucauggucgugaccagcaacgccgaccgcaucugcaccggcaucacguccagcaacagcccccacguggucaagaccgcgacccagggggaggugaacgugaccggcgucaucccgcugacgaccacccccaccaagucccacuucgccaaccugaaggggacgaagacccggggcaagcucugcccgaccugccugaacugcaccgaccuggacguggcccucgggcgccccaugugcgugggcacgacccccuccgccaaggccagcauccugcacgagguccggcccgugaccuccggcugcuuccccaucaugcacgaccgcaccaagauccggcagcugcccaaccuccugcgcggguacgagaagauccggcugagcacgcagaacgugaucaacgcggagaaggccccgggcgggcccuaccgccucggcaccuccgggagcugccccaacgccaccucccggagcggcuucuucgccaccauggcgugggccgucccccgcgacaacaacaagacggccaccaacccgcugaccguggaggugcccuacaucugcaccaaggaggaggaccagaucacggucuggggcuuccacuccgacaacaagacccagaugaagaaccuguacggggacagcaacccccagaaguucaccuccagcgccaacggcgugaccacgcacuacgugucccagaucgggggcuuccccgaccagaccgaggacggcgggcucccgcagagcggccggaucgucguggacuacauggugcagaagcccgggaagaccggcaccaucgucuaccagcgcgggauccugcugccccagaagguguggugcgccuccggccggagcaaggugaucaagggcagccucccccugaucggggaggcggacugccugcacgagaaguacggcgggcucaacaaguccaagccguacuacacgggcgagcacgccaaggccaucgggaacugccccaucugggucaagacgccccugaagcuggccaacggcaccaaguaccggcccccggccaagcuccugaaggagcgcggcuucuucggggcgaucgccggcuuccuggagggcgggugggaggggaugaucgccggcuggcacggcuacaccagccacggggcccacggcguggccgucgcggccgaccucaaguccacccaggaggccaucaacaagaucaccaagaaccugaacagccuguccgagcucgaggugaagaaccugcagcgccugagcggggccauggacgagcuccacaacgagauccuggagcuggacgagaagguggacgaccuccgggccgacaccaucuccagccagaucgagcuggcgguccugcucuccaacgagggcaucaucaacagcgaggacgagcaccuccuggcccuggagcgcaagcugaagaagaugcugggccccuccgccguggacaucgggaacggcugcuucgagaccaagcacaagugcaaccagaccugccucgaccggaucgccgcggggacguucaacgccggcgaguucagccugcccaccuucgacucccugaacaucaccgccgccagccucaacgacgacgggcuggacaaccacaccauccugcuguacuacuccacggccgcgagcucccucgccgugacccugaugaucgccaucuucaucgucuacaugaucagccgcgacaacguguccugcagcaucugccuguga

SEQ ID NO: 91901 - RNA, 1755 nt, Artificial Sequence
  derived and/or modified CDS sequence (opt1) from hemagglutinin__InfluenzaB__AHL91321
augaaggccaucaucgugcugcucauggucgugaccagcaacgccgaccgcaucugcaccggcaucacguccagcaacagcccccacguggucaagaccgcgacccagggggaggugaacgugaccggcgucaucccgcugacgaccacccccaccaagucccacuucgccaaccugaaggggacgaagacccggggcaagcucugcccgaccugccugaacugcaccgaccuggacguggcccucgggcgccccaugugcgugggcacgacccccuccgccaaggccagcauccugcacgagguccggcccgugaccuccggcugcuuccccaucaugcacgaccgcaccaagauccggcagcugcccaaccuccugcgcggguacgagaagauccggcugagcacgcagaacgugaucaacgcggagaaggccccgggcgggcccuaccgccucggcaccuccgggagcugccccaacgccaccucccggagcggcuucuucgccaccauggcgugggccgucccccgcgacaacaacaagacggccaccaacccgcugaccguggaggugcccuacaucugcaccaaggaggaggaccagaucacggucuggggcuuccacuccgacaacaagacccagaugaagaaccuguacggggacagcaacccccagaaguucaccuccagcgccaacggcgugaccacgcacuacgugucccagaucgggggcuuccccgaccagaccgaggacggcgggcucccgcagagcggccggaucgucguggacuacauggugcagaagcccgggaagaccggcaccaucgucuaccagcgcggggugcugcugccccagaagguguggugcgccuccggccggagcaaggucaucaagggcagccucccccugaucggggaggcggacugccugcacgagaaguacggcgggcucaacaaguccaagccguacuacacgggcgagcacgccaaggccaucgggaacugccccaucugggugaagacgccccugaagcuggccaacggcaccaaguaccggcccccggccaagcuccugaaggagaagggcuucuucggggcgaucgccggcuuccuggagggcgggugggaggggaugaucgccggcuggcacggcuacaccagccacggggcccacggcgucgccguggcggccgaccucaaguccacccaggaggccaucaacaagaucaccaagaaccugaacagccuguccgagcucgaggugaagaaccugcagcgccugagcggggccauggacgagcuccacaacgagauccuggagcuggacgagaaggucgacgaccuccgcgccgacaccaucuccagccagaucgagcuggcggugcugcucuccaacgagggcaucaucaacagcgaggacgagcaccuccuggcccuggagcggaagcugaagaagaugcugggccccuccgccguggacaucgggaacggcugcuucgagaccaagcacaagugcaaccagaccugccucgaccgcaucgccgcggggacguucaacgccggcgaguucagccugcccaccuucgacucccugaacaucaccgccgccagccucaacgacgacgggcuggacaaccacaccauccugcuguacuacuccacggccgcgagcucccucgccgucacccugaugaucgccaucuucaucguguacauggugagccgggacaacgucuccugcagcaucugccuguga

SEQ ID NO: 91902 - RNA, 1755 nt, Artificial Sequence; identical to SEQ ID NO: 91900
  derived and/or modified CDS sequence (opt1) from hemagglutinin__InfluenzaB__AHL91332

SEQ ID NO: 91903 - RNA, 1755 nt, Artificial Sequence; identical to SEQ ID NO: 91900
  derived and/or modified CDS sequence (opt1) from hemagglutinin__InfluenzaB__AHL91343

SEQ ID NO: 91904 - RNA, 1755 nt, Artificial Sequence; identical to SEQ ID NO: 91900
  derived and/or modified CDS sequence (opt1) from hemagglutinin__InfluenzaB__AHL91354

SEQ ID NO: 91905 - RNA, 1755 nt, Artificial Sequence; identical to SEQ ID NO: 90503
  derived and/or modified CDS sequence (opt1) from hemagglutinin__InfluenzaB__AHL91365

SEQ ID NO: 91906 - RNA, 1755 nt, Artificial Sequence
  derived and/or modified CDS sequence (opt1) from hemagglutinin__InfluenzaB__AHL91376
augaaggccaucaucgugcugcucauggucgugaccagcaacgccgaccgcaucugcaccggcaucacguccagcaacagcccccacguggucaagaccgcgacccagggggaggugaacgugaccggcgucaucccgcugacggccacccccaccaagucccacuucgccaaccugaaggggaccaagacgcggggcaagcucugcccgaccugccugaacugcaccgaccuggacguggcccucgggcgccccaugugcgugggcgucacccccuccgccaaggcgagcauccugcacgaggugcggcccgugacguccggcugcuuccccaucaugcacgaccgcaccaagauccggcagcugcccaaccuccugcgcggguacgagaagauccggcugagcacccagaacgucaucaacgccgagaaggccccgggcgggcccuaccgccucggcaccuccgggagcugccccaacgccacgucccggagcggcuucuucgcgaccauggccugggccgugccccgcgacaacaacaagaccgccaccaacccgcugacgguggaggucccccacaucugcaccaaggaggaggaccagaucaccguguggggcuuccacuccgacaacaagacccagaugaagaaccuguacggggacagcaacccccagaaguucacguccagcgccaacggcgugaccacccacuacgucucccagaucgggggcuuccccgaccagaccgaggacggcgggcucccgcagagcggccggaucgugguggacuacaugguccagaagcccgggaagacgggcaccaucguguaccagcgcgggauccugcugccccagaagguguggugcgcguccggccggagcaaggucaucaagggcagccucccccugaucggggaggccgacugccugcacgagaaguacggcgggcucaacaaguccaagccguacuacaccggcgagcacgccaaggccaucgggaacugccccaucugggugaagacgccccugaagcuggccaacggcaccaaguaccggcccccggcgaagcuccugaaggagcgcggcuucuucggggccaucgccggcuuccuggagggcgggugggaggggaugaucgccggcuggcacggcuacaccagccacggggcccacggcgucgcgguggccgccgaccucaaguccacccaggaggccaucaacaagaucaccaagaaccugaacagccuguccgagcucgaggugaagaaccugcagcgccugagcggggccauggacgagcuccacaacgagauccuggagcuggacgagaaggucgacgaccuccgggcggacacgaucuccagccagaucgagcuggccgugcugcucuccaacgagggcaucaucaacagcgaggacgagcaccuccuggcccuggagcgcaagcugaagaagaugcugggccccuccgccguggacaucgggaacggcugcuucgagaccaagcacaagugcaaccagaccugccucgaccggaucgcggccgggaccuucaacgccggcgaguucagccugcccaccuucgacucccugaacaucacggccgccagccucaacgacgacgggcuggacaaccacaccauccugcuguacuacuccaccgcggccagcucccucgccgucacccugaugaucgccaucuucaucguguacaugaucagccgcgacaacguguccugcagcaucugccuguga

SEQ ID NO: 91907 - RNA, 1755 nt, Artificial Sequence
  derived and/or modified CDS sequence (opt1) from hemagglutinin__InfluenzaB__AHL91387
augaaggccaucaucgugcugcucauggucgugaccagcaacgccgaccgcaucugcaccggcaucacguccagcaacagcccccacguggucaagaccgcgacccagggggaggugaacgugaccggcgucaucccgcugacgaccacccccgccaagucccacuucgccaaccugaaggggaccaagacgcggggcaagcucugcccgaccugccugaacugcaccgaccuggacguggcccucgggcgccccaugugcgugggcgucacccccuccgccaaggcgagcauccugcacgaggugcggcccgugacguccggcugcuuccccaucaugcacgaccgcaccaagauccggcagcugcccaaccuccugcgcggguacgagaagauccggcugagcacccagaacgucaucaacgccgagaaggccccgggcgggcccuaccgccucggcaccuccgggagcugccccaacgccacgucccggagcggcuucuucgcgaccauggccugggccgugccccgcgacaacaacaagaccgccaccaacccgcugacgguggaggucccccacaucugcaccaaggaggaggaccagaucaccguguggggcuuccacuccgacaacaagacccagaugaagaaccuguacggggacagcaacccccagaaguucacguccagcgccaacggcgugaccacccacuacgucucccagaucgggggcuuccccgaccagaccgaggacggcgggcucccgcagagcggccggaucgugguggacuacaugguccagaagcccgggaagacgggcaccaucguguaccagcgcgggauccugcugccccagaagguguggugcgcguccggccggagcaaggucaucaagggcagccucccccugaucggggaggccgacugccugcacgagaaguacggcgggcucaacaaguccaagccguacuacaccggcgagcacgccaaggccaucgggaacugccccaucugggugaagacgccccugaagcuggccaacggcaccaaguaccggcccccggcgaagcuccugaaggagcgcggcuucuucggggccaucgccggcuuccuggagggcgggugggaggggaugaucgccggcuggcacggcuacaccagccacggggcccacggcgucgcgguggccgccgaccucaaguccacccaggaggccaucaacaagaucaccaagaaccugaacagccuguccgagcucgaggugaagaaccugcagcgccugagcggggccauggacgagcuccacaacgagauccuggagcuggacgagaaggucgacgaccuccgggcggacacgaucuccagccagaucgagcuggccgugcugcucuccaacgagggcaucaucaacagcgaggacgagcaccuccuggcccuggagcgcaagcugaagaagaugcugggccccuccgccguggacaucgggaacggcugcuucgagaccaagcacaagugcaaccagaccugccucgaccggaucgcggccgggaccuucaacgccggcgaguucagccugcccaccuucgacucccugaacaucacggccgccagccucaacgacgacgggcuggacaaccacaccauccugcuguacuacuccaccgcggccagcucccucgccgucacccugaugaucgccaucuucaucguguacaugaucagccgcgacaacguguccugcagcaucugccuguga

SEQ ID NO: 91908 - RNA, 1755 nt, Artificial Sequence
  derived and/or modified CDS sequence (opt1) from hemagglutinin__InfluenzaB__AHL91409
augaaggccaucaucgugcugcucauggucgugaccagcaacgccgaccgcaucugcaccggcaucacguccagcgacagcccccacguggucaagaccgcgacccagggggaggugaacgugaccggcgccaucccgcugacgaccacccccaccaaguccuacuucgccaaccugaaggggacgaagacccggggcaagcucugcccgaccugccugaacugcaccgaccuggacgucgcccucgggcgccccaugugcgugggcaucacgcccuccgccaaggcgagcauccugcacgaggugcggcccgucaccuccggcugcuuccccaucaugcacgaccgcaccaagauccggcagcugcccaaccuccugcgcggguacgagaagauccggcugagcacccagaacgugaucaacgccgagaaggccccgggcgggcccuaccgccucggcacguccgggagcugccccaacgccaccucccggagcggcuucuucgcgaccauggccugggccgugccccgcgacaacaacaagaccgccacgaacccgcugaccgucgaggugccccacaucugcaccaaggaggaggaccagaucaccguguggggcuuccacuccgacaacaagacgcagaugaagaaccuguacggggacagcaacccccagaaguucaccuccagcgccaacggcaucaccacccacuacgucucccagaucgggggcuuccccgaccagacggaggacggcgggcucccgcagagcggccggaucgugguggacuacaugguccagaagcccgggaagaccggcaccaucguguaccagcgcgggauccugcugccccagaagguguggugcgcguccggccggagcaaggucaucaagggcagccucccccugaucggggaggccgacugccugcacgagaaguacggcgggcucaacaaguccaagccguacuacaccggcgagcacgccaaggccaucgggaacugccccaucugggugaagacgccccugaagcuggccaacggcaccaaguaccggcccccggcgaagcuccugaaggagcgcggcuucuucggggccaucgccggcuuccuggagggcgggugggaggggaugguggccggcuggcacggcuacaccagccacggggcccacggcgucgcgguggccgccgaccucaaguccacccaggaggccaucaacaagaucacgaagaaccugaacagccuguccgagcucgaggucaagaaccugcagcgccugagcggggccauggacgagcuccacaacgagauccuggagcuggacgagaagguggacgaccuccgggcggacaccaucuccagccagaucgagcuggccgugcugcucuccaacgagggcaucaucaacagcgaggacgagcaccuccuggcccuggagcgcaagcugaagaagaugcugggccccuccgccgucgacaucgggaacggcugcuucgagaccaagcacaagugcaaccagaccugccucgaccggaucgcggccgggaccuucaacgccggcgaguucagccugcccacguucgacucccugaacaucaccgccgccagccucaacgacgacgggcuggacaaccacaccauccugcuguacuacuccaccgcggccagcucccucgccgugacgcugaugaucgccaucuucaucguguacaugaucagccgcgacaacgucuccugcagcaucugccuguga

SEQ ID NO: 91909 - RNA, 1755 nt, Artificial Sequence
  derived and/or modified CDS sequence (opt1) from hemagglutinin__InfluenzaB__AHL91431
augaaggccaucaucgugcugcucauggucgugaccagcaacgccgaccgcaucugcaccggcaucacguccagcaacagcccccacguggucaagaccgcgacccagggggaggugaacgugaccggcgccaucccgcugacgaccacccccaccaagucccacuucgccaaccugaaggggacgaagacccggggcaagcucugcccgaccugccugaacugcaccgaccuggacgucgcccucgggcgccccaugugcgugggcaucacgcccuccgccaaggcgagcauccugcacgaggugcggcccgucaccuccggcugcuuccccaucaugcacgaccgcaccaagauccggcagcugcccaaccuccugcgcggguacgagaagauccggcugagcacccagaacgugaucaacgccgagaaggccccgggcgggcccuaccgccucggcacguccgggagcugccccaacgccaccuccaagagcggcuucuucgcgaccauggccugggccgugccccgggacaacaacaagaccgccacgaacccgcugaccgucgaggugccccacaucugcaccaaggaggaggaccagaucaccguguggggcuuccacuccgacaacaagacgcagaugaagaaccuguacggggacagcaacccccagaaguucaccuccagcgccaacggcaucaccacccacuacgucucccagaucgggggcuuccccgaccagacggaggacggcgggcucccgcagagcggccgcaucgugguggacuacaugguccagaagcccgggaagaccggcaccaucguguaccagcgggggauccugcugccccagaagguguggugcgcguccggccgcagcaaggucaucaagggcagccucccccugaucggggaggccgacugccugcacgagaaguacggcgggcucaacaaguccaagccguacuacaccggcgagcacgccaaggccaucgggaacugccccaucugggugaagacgccccugaagcuggccaacggcaccaaguaccggcccccggcgaagcuccugaaggagcgcggcuucuucggggccaucgccggcuuccuggagggcgggugggaggggaugaucgccggcuggcacggcuacaccagccacggggcccacggcguggcggucgccgccgaccucaaguccacccaggaggccaucaacaagaucacgaagaaccugaacuuccugagcgagcucgaggugaagaaccugcagcggcuguccggggccauggacgagcuccacaacgagauccuggagcuggacgagaaggucgacgaccuccgcgcggacaccaucagcucccagaucgagcuggccgugcugcucagcaacgagggcaucaucaacuccgaggacgagcaccuccuggcccuggagcggaagcugaagaagaugcugggccccagcgccguggacaucgggaacggcugcuucgagaccaagcacaagugcaaccagaccugccucgaccgcaucgcggccgggaccuucaacgccggcgaguucucccugcccacguucgacagccugaacaucaccgccgccucccucaacgacgacgggcuggacaaccacaccauccugcuguacuacagcaccgcggccuccagccucgccgucacgcugaugaucgccaucuucaucguguacaugaucucccgggacaacgugagcugcuccaucugccuguga

SEQ ID NO: 91910 - RNA, 1755 nt, Artificial Sequence
  derived and/or modified CDS sequence (opt1) from hemagglutinin__InfluenzaB__AHL91442
augaaggccaucaucgugcugcucauggucgugaccagcaacgccgaccgcaucugcaccggcaucacguccagcaacagcccccacguggucaagaccgcgacccagggggaggugaacgugaccggcgccaucccgcugacgaccacccccaccaagucccacuucgccaaccugaaggggacgaagacccggggcaagcucugcccgaccugccugaacugcaccgaccuggacgucgcccucgggcgccccaugugcgugggcaucacgcccuccgccaaggcgagcauccugcacgaggugcggcccgucaccuccggcugcuuccccaucaugcacgaccgcaccaagauccggcagcugcccaaccuccugcgcggguacgagaagauccggcugagcacccagaacgugaucaacgccgagacggccccgggcgggcccuaccgccucggcaccuccgggagcugccccaacgccaccuccaagagcggcuucuucgcgaccauggccugggccgugccccgggacaacaacaagacggccaccaacccgcugaccgucgaggugccccacaucugcaccaaggaggaggaccagaucacgguguggggcuuccacuccgacaacaagacccagaugaagaaccuguacggggacagcaacccccagaaguucaccuccagcgccaacggcaucaccacgcacuacgucucccagaucgggggcuuccccgaccagaccgaggacggcgggcucccgcagagcggccgcaucgugguggacuacaugguccagaagcccgggaagaccggcaccaucguguaccagcgggggauccugcugccccagaagguguggugcgcguccggccgcagcaaggucaucaagggcagccucccccugaucggggaggccgacugccugcacgagaaguacggcgggcucaacaaguccaagccguacuacacgggcgagcacgccaaggccaucgggaacugccccaucugggugaagacgccccugaagcuggccaacggcaccaaguaccggcccccggcgaagcuccugaaggagcgcggcuucuucggggccaucgccggcuuccuggagggcgggugggaggggaugaucgccggcuggcacggcuacaccagccacggggcccacggcguggcggucgccgccgaccucaaguccacccaggaggccaucaacaagaucaccaagaaccugaacagccuguccgagcucgaggugaagaaccugcagcggcugagcggggccauggacgagcuccacaacgagauccuggagcuggacgagaaggucgacgaccuccgcgcggacaccaucuccagccagaucgagcuggccgugcugcucuccaacgagggcaucaucaacagcgaggacgagcaccuccuggcccuggagcggaagcugaagaagaugcugggccccuccgccguggacaucgggaacggcugcuucgagaccaagcacaagugcaaccagaccugccucgaccgcaucgcggccgggacguucaacgccggcgaguucagccugcccaccuucgacucccugaacaucaccgccgccagccucaacgacgacgggcuggacaaccacaccauccugcuguacuacuccacggcggccagcucccucgccgucacccugaugaucgccaucuucaucguguacaugaucagccgggacaacguguccugcagcaucugccuguga

SEQ ID NO: 91911 - RNA, 1755 nt, Artificial Sequence
  derived and/or modified CDS sequence (opt1) from hemagglutinin__InfluenzaB__AHL91453
augaaggccaucaucgugcugcucauggucgugaccagcaacgccgaccgcaucugcaccggcaucacguccagcaacagcccccacguggucaagaccgcgacccagggggaggugaacgugaccggcgccaucccgcugacgaccacccccaccaagucccacuucgccaaccugaaggggacgaagacccggggcaagcucugcccgaccugccugaacugcaccgaccuggacgucgcccucgggcgccccaugugcgugggcaucacgcccuccgccaaggcgagcauccugcacgaggugcggcccgucaccuccggcugcuuccccaucaugcacgaccgcaccaagauccggcagcugcccaaccuccugcgcggguacgagaagauccggcugagcacccagaacgugaucaacgccgagaaggccccgggcgggcccuaccgccucggcacguccgggagcugccccaacgccaccuccaagagcggcuucuucgcgaccauggccugggccgugccccgggacaacaacaagaccgccacgaacccgcugaccaucgaggucccccacgugugcaccaaggaggaggaccagaucaccguguggggcuuccacuccgacaacaagacgcagaugaagaaccuguacggggacagcaacccccagaaguucaccuccagcgccaacggcaucaccacccacuacgucucccagaucgggggcuuccccgaccagacggaggacggcgggcucccgcagagcggccgcaucgugguggacuacaugguccagaagcccgggaagaccggcaccaucguguaccagcgggggauccugcugccccagaagguguggugcgcguccggccgcagcaaggucaucaagggcagccucccccugaucggggaggccgacugccugcacgagaaguacggcgggcucaacaaguccaagccguacuacaccggcgagcacgccaaggccaucgggaacugccccaucugggugaagacgccccugaagcuggccaacggcaccaaguaccggcccccggcgaagcuccugaaggagcgcggcuucuucggggccaucgccggcuuccuggagggcgggugggaggggaugaucgccggcuggcacggcuacaccagccacggggcccacggcguggcggucgccgccgaccucaaguccacccaggaggccaucaacaagaucacgaagaaccugaacagccuguccgagcucgaggugaagaaccugcagcggcugagcggggccauggacgagcuccacaacgagauccuggagcuggacgagaaggucgacgaccuccgcgcggacaccaucuccagccagaucgagcuggccgugcugcucuccaacgagggcaucaucaacagcgaggacgagcaccuccuggcccuggagcggaagcugaagaagaugcugggccccuccgccguggacaucgggaacggcugcuucgagaccaagcacaagugcaaccagaccugccucgaccgcaucgcggccgggaccuucaacgccggcgaguucagccugcccacguucgacucccugaacaucaccgccgccagccucaacgacgacgggcuggacaaccacaccauccugcuguacuacuccaccgcggccagcucccucgccgucacgcugaugaucgccaucuucaucguguacaugaucagccgggacaacguguccugcagcaucugccuguga

SEQ ID NO: 91912 - RNA, 1755 nt, Artificial Sequence; identical to SEQ ID NO: 90429
  derived and/or modified CDS sequence (opt1) from hemagglutinin__InfluenzaB__AHL91464

SEQ ID NO: 91913 - RNA, 1755 nt, Artificial Sequence; identical to SEQ ID NO: 90535
  derived and/or modified CDS sequence (opt1) from hemagglutinin__InfluenzaB__AHL91475

SEQ ID NO: 91914 - RNA, 1755 nt, Artificial Sequence; identical to SEQ ID NO: 91910
  derived and/or modified CDS sequence (opt1) from hemagglutinin__InfluenzaB__AHL91486

SEQ ID NO: 91915 - RNA, 1755 nt, Artificial Sequence; identical to SEQ ID NO: 91910
  derived and/or modified CDS sequence (opt1) from hemagglutinin__InfluenzaB__AHL91497

SEQ ID NO: 91916 - RNA, 1755 nt, Artificial Sequence; identical to SEQ ID NO: 91910
  derived and/or modified CDS sequence (opt1) from hemagglutinin__InfluenzaB__AHL91530

SEQ ID NO: 91917 - RNA, 1755 nt, Artificial Sequence; identical to SEQ ID NO: 90429
  derived and/or modified CDS sequence (opt1) from hemagglutinin__InfluenzaB__AHL91541

SEQ ID NO: 91918 - RNA, 1755 nt, Artificial Sequence; identical to SEQ ID NO: 91910
  derived and/or modified CDS sequence (opt1) from hemagglutinin__InfluenzaB__AHL91552

SEQ ID NO: 91919 - RNA, 1755 nt, Artificial Sequence; identical to SEQ ID NO: 91910
  derived and/or modified CDS sequence (opt1) from hemagglutinin__InfluenzaB__AHL91574

SEQ ID NO: 91920 - RNA, 1755 nt, Artificial Sequence
  derived and/or modified CDS sequence (opt1) from hemagglutinin__InfluenzaB__AHL91585
augaaggccaucaucgugcugcucauggucgugaccagcaacgccgaccgcaucugcaccggcaucacguccagcaacagcccccacguggucaagaccgcgacccagggggaggugaacgugaccggcgccaucccgcugacgaccacccccaccaagucccacuucgccaaccugaaggggacgaagacccggggcaagcucugcccgaccugccugaacugcaccgaccuggacgucgcccucgggcgccccaugugcgugggcaucacgcccuccgccaaggcgagcauccugcacgaggugcggcccgucaccuccggcugcuuccccaucaugcacgaccgcaccaagauccggcagcugcccaaccuccugcgcggguacgagaagauccggcugagcacccagaacgugaucaacgccgagaaggccccgggcgggcccuaccgccucggcacguccgggagcugccccaacgccaccuccaagagcggcuucuucgcgaccauggccugggccgugccccgggacaacaacaagaccgccacgaacccgcugaccgucgaggugccccacaucugcaccaaggaggaggaccagaucaccguguggggcuuccacuccgacaacaagacgcagaugaagaaccuguacggggacagcaacccccagaaguucaccuccagcgccaacggcaugaccacccacuacgucucccagaucgggggcuuccccgaccagacggaggacggcgggcucccgcagagcggccgcaucgugguggacuacaugguccagaagcccgggaagaccggcaccaucguguaccagcgggggauccugcugccccagaagguguggugcgcguccggccgcagcaaggucaucaagggcagccucccccugaucggggaggccgacugccugcacgagaaguacggcgggcucaacaaguccaagccguacuacaccggcgagcacgccaaggccaucgggaacugccccaucugggugaagacgccccugaagcuggccaacggcaccaaguaccggcccccggcgaagcuccugaaggagcgcggcuucuucggggccaucgccggcuuccuggagggcgggugggaggggaugaucgccggcuggcacggcuacaccagccacggggcccacggcguggcggucgccgccgaccucaaguccacccaggaggccaucaacaagaucacgaagaaccugaacagccuguccgagcucgaggugaagaaccugcagcggcugagcggggccauggacgagcuccacaacgagauccuggagcuggacgagaaggucgacgaccuccgcgcggacaccaucuccagccagaucgagcuggccgugcugcucuccaacgagggcaucaucaacagcgaggacgagcaccuccuggcccuggagcggaagcugaagaagaugcugggccccuccgccguggacaucgggaacggcugcuucgagaccaagcacaagugcaaccagaccugccucgaccgcaucgcggccgggaccuucaacgccggcgaguucagccugcccacguucgacucccugaacaucaccgccgccagccucaacgacgacgggcuggacaaccacaccauccugcuguacuacuccaccgcggccagcucccucgccgucacgcugaugaucgccaucuucaucguguacaugaucagccgggacaacguguccugcagcaucugccuguga

SEQ ID NO: 91921 - RNA, 1755 nt, Artificial Sequence
  derived and/or modified CDS sequence (opt1) from hemagglutinin__InfluenzaB__AHL91596
augaaggccaucaucgugcugcucauggucgugaccagcaacgccgaccgcaucugcaccggcaucacguccagcaacagcccccacguggucaagaccgcgacccagggggaggugaacgugaccggcgccaucccgcugacgaccacccccaccaagucccacuucgccaaccugaaggggacgaagacccggggcaagcucugcccgaccugccugaacugcaccgaccuggacgucgcccucgggcgccccaugugcgugggcaucacgcccuccgccaaggcgagcauccugcacgaggugcggcccgucaccuccggcugcuuccccaucaugcacgaccgcaccaagauccggcagcugcccaaccuccugcgcggguacgagaagauccggcugagcacccagaacgugaucaacgccgagaaggccccgggcgggcccuaccgccucggcacguccgggagcugccccaacgccaccuccaagagcggcuucuucgcgaccauggccugggccgugccccgggacaacaacaagaccgccacgaacccgcugaccgucgaggugccccacaucugcaccaaggaggaggaccagaucaccguguggggcuuccacuccgacaacaagacgcagaugaagaaccuguacggggacagcaacccccagaaguucaccuccagcgccaacggcaucaccacccacuacgucucccagaucgggggcuuccccgaccagacggaggacggcgggcucccgcagagcggccgcaucgugguggacuacaugguccagaagcccgggaagaccggcaccaucguguaccagcgggggauccugcugccccagaagguguggugcgcguccggccgcagcaaggucaucaagggcagccucccccugaucggggaggccgacugccugcacgagaaguacggcgggcucaacaaguccaagccguacuacaccggcgagcacgccaaggccaucgggaacugccccaucugggugaagacgccccugaagcuggccaacggcaccaaguaccggcccccggcgaagauccucaaggagcgcggcuucuucggggccaucgccggcuuccuggagggcgggugggaggggaugaucgccggcuggcacggcuacaccagccacggggcccacggcguggcggucgccgccgaccugaaguccacccaggaggccaucaacaagaucacgaagaaccucaacagccuguccgagcuggaggugaagaaccuccagcggcugagcggggccauggacgagcugcacaacgagauccucgagcuggacgagaaggucgacgaccugcgcgcggacaccaucuccagccagaucgagcucgccgugcugcuguccaacgagggcaucaucaacagcgaggacgagcaccuccuggcccuggagcggaagcucaagaagaugcugggccccuccgccguggacaucgggaacggcugcuucgagaccaagcacaagugcaaccagaccugccuggaccgcaucgcggccgggaccuucaacgccggcgaguucagccuccccacguucgacucccugaacaucaccgccgccagccugaacgacgacgggcucgacaaccacaccauccugcuguacuacuccaccgcggccagcucccuggccgucacgcucaugaucgccaucuucaucguguacaugaucagccgggacaacguguccugcagcaucugccuguga

SEQ ID NO: 91922 - RNA, 1755 nt, Artificial Sequence; identical to SEQ ID NO: 91921
  derived and/or modified CDS sequence (opt1) from hemagglutinin__InfluenzaB__AHL91607

SEQ ID NO: 91923 - RNA, 1755 nt, Artificial Sequence
  derived and/or modified CDS sequence (opt1) from hemagglutinin__InfluenzaB__AHL91618
augaaggccaucaucgugcugcucauggucgugaccagcaacgccgaccgcaucugcaccggcaucacguccagcaacagcccccacguggucaagaccgcgacccagggggaggugaacgugaccggcgccaucccgcugacgaccacccccaccaagucccacuucgccaaccugaaggggacgaagacccggggcaagcucugcccgaccugccugaacugcaccgaccuggacgucgcccucgggcgccccaugugcgugggcaucacgcccuccgccaaggcgagcauccugcacgaggugcggcccgucaccuccggcugcuuccccaucaugcacgaccgcaccaagauccggcagcugcccaaccuccugcgcggguacgagaagauccggcugagcacccagaacgugaucaacgccgagacggccccgggcgggcccuaccgccucggcaccuccgggagcugccccaacgccaccuccaagagcggcuucuucgcgaccauggccugggccgugccccgggacaacaacaagacggccaccaacccgcugaccgucgaggugccccacaucugcaccaaggaggaggaccagaucacgguguggggcuuccacuccgacaacaagacccagaugaagaaccuguacggggacagcaacccccagaaguucaccuccagcgccaacggcaucaccacgcacuacgucucccagaucgggggcuuccccgaccagaccgaggacggcgggcucccgcagagcggccgcaucgugguggacuacaugguccagaagcccgggaagaccggcaccaucguguaccagcgggggauccugcugccccagaagguguggugcgcguccggccgcagcaaggucaucaagggcagccucccccugaucggggaggccgacugccugcacgagaaguacggcgggcucaacaaguccaagccguacuacacgggcgagcacgccaaggccaucgggaacugccccaucugggugaagacgccccugaagcuggccaacggcaccaaguaccggcccccggcgaagcuccugaaggagcgcggcuucuucggggccaucgccggcuuccuggagggcgggugggaggggaugaucgccggcuggcacggcuacaccagccacggggcccacggcguggcggucgccgccgaccucaaguccacccaggaggccaucaacaagaucaccaagaaccugaacagccuguccgagcucgaggugaagaaccugcagcggcugagcggggccauggacgagcuccacaacgagauccuggagcuggacgagaaggucgacgaccuccgcgcggacaccaucuccagccagaucgagcuggccgugcugcucuccaacgagggcaucaucaacagcgaggacgagcaccuccuggcccuggagcggaagcugaagaagaugcugggccccuccgccguggacaucgggaacggcugcuucgagaccaagcacaagugcaaccagaccugccucgaccgcaucgcggccgggacguucaacgucggcgaguucagccugcccaccuucgacucccugaacaucaccgccgccagccucaacgacgacgggcuggacaaccacaccauccugcuguacuacuccacggccgcgagcucccucgccgugacccugaugaucgccaucuucaucguguacaugaucagccgggacaacgucuccugcagcaucugccuguga

SEQ ID NO: 91924 - RNA, 1755 nt, Artificial Sequence
  derived and/or modified CDS sequence (opt1) from hemagglutinin__InfluenzaB__AHL91629
augaaggccaucaucgugcugcucauggucgugaccagcaacgccgaccgcaucugcaccggcaucacguccagcaacagcccccacguggucaagaccgcgacccagggggaggugaacgugaccggcgccaucccgcugacgaccacccccaccaagucccacuucgccaaccugaaggggacgaagacccggggcaagcucugcccgaccugcuucaacugcaccgaccuggacgucgcccuggggcgccccaugugcgugggcaucacgcccuccgccaaggcgagcauccuccacgaggugcggcccgucaccuccggcugcuuccccaucaugcacgaccgcaccaagauccggcagcugcccaaccugcuccgcggguacgagaagauccggcugagcacccagaacgugaucgacgccgagaaggccccgggcgggcccuacaagcugggcacguccgggagcugccccaacgccaccuccaagagcggcuucuucgcgaccauggccugggccgugccccgcgacaacaacaagaccgccacgaacccgcucaccgucgaggugccccacaucugcaccaaggaggaggaccagaucaccguguggggcuuccacuccgacaacaagacgcagaugaagaaccuguacggggacagcaacccccagaaguucaccuccagcgccaacggcaucaccacccacuacgucucccagaucgggggcuuccccgaccagacggaggacggcgggcugccgcagagcggccggaucgugguggacuacaugguccagaagcccgggaagaccggcaccaucguguaccagcgcgggauccuccugccccagaagguguggugcgcguccggccggagcaaggucaucaagggcagccugccccucaucggggaggccgacugccugcacgagaaguacggcgggcugaacaaguccaagccguacuacaccggcgagcacgccaaggccaucgggaacugccccaucugggugaagacgccccucaagcuggccaacggcaccaaguaccggcccccggcgaagcugcucaaggagcgcggcuucuucggggccaucgccggcuuccuggagggcgggugggaggggaugaucgccggcuggcacggcuacaccagccacggggcccacggcguggcggucgccgccgaccugaaguccacccaggaggccaucaacaagaucacgaagaaccucaacagccuguccgagcuggaggugaagaaccuccagcgccugagcggggccauggacgagcugcacaacgagauccucgagcuggacgagaaggucgacgaccugcgggcggacaccaucuccagccagaucgagcucgccgugcugcuguccaacgagggcaucaucaacagcgaggacgagcaccuccuggcccuggagcgcaagcucaagaagaugcugggccccuccgccguggacaucgggaacggcugcuucgagaccaagcacaagugcaaccagaccugccuggaccggaucgcggccgggaccuucaacgccggcgaguucagccuccccacguucgacucccugaacaucaccgccgccagccugaacgacgacgggcucgacaaccacaccauccugcuguacuacuccaccgcggccagcucccuggccgucacgcucaugaucgccaucuucaucguguacaugaucagccgcgacaacguguccugcagcaucugccuguga

SEQ ID NO: 91925 - RNA, 1755 nt, Artificial Sequence; identical to SEQ ID NO: 91924
  derived and/or modified CDS sequence (opt1) from hemagglutinin__InfluenzaB__AHL91640

SEQ ID NO: 91926 - RNA, 1755 nt, Artificial Sequence; identical to SEQ ID NO: 90431
  derived and/or modified CDS sequence (opt1) from hemagglutinin__InfluenzaB__AHL91651

SEQ ID NO: 91927 - RNA, 1752 nt, Artificial Sequence
  derived and/or modified CDS sequence (opt1) from hemagglutinin__InfluenzaB__AHL91662
augaaggccaucaucgugcugcucauggucgugaccagcaacgccgaccgcaucugcaccggcaucacguccagcaacagcccccacguggucaagaccgcgacccagggggaggugaacgugaccggcgccaucccgcugacgaccacccccaccaagucccacuucgccaaccugaaggggacgaagacccggggcaagcucugcccgaccugccugaacugcaccgaccuggacgucgcccucgggcgccccaugugcgugggcaucacgcccuccgccaaggcgagcauccugcacgaggugcggcccgucaccuccggcugcuuccccaucaugcacgaccgcaccaagauccggcagcugcccaaccuccugcgcggguacgagaagauccggcugagcacccagaacgugaucaacgccgagacggccccgggcgggcccuaccgccucggcaccuccgggagcugccccaacgccaccuccaagagcggcuucuucgcgaccauggccugggccgugccccgggacaacaacaagacggccaccaacccgcugaccgucgaggugccccacaucugcaccaaggaggaggaccagaucacgguguggggcuuccacuccgacaacaagacccagaugaagaaccuguacggggacagcaacccccagaaguucaccuccagcgccaacggcaucaccacgcacuacgucucccagaucgggggcuuccccgaccagaccgaggacggcgggcucccgcagagcggccgcaucgugguggacuacaugguccagaagcccgggaagaccggcaccaucguguaccagcgggggauccugcugccccagaagguguggugcgcguccggccgcagcaaggucaucaagggcagccucccccugaucggggaggccgacugccugcacgagaaguacggcgggcucaacaaguccaagccguacuacacgggcgagcacgccaaggccaucgggaacugccccaucugggugaagacgccccugaagcuggccaacggcaccaaguaccggcccccggcgaagcuccugaaggagcgcggcuucuucggggccaucgccggcuuccuggagggcgggugggaggggaugaucgccggcuggcacggcuacaccagccacggggcccacggcguggcggucgccgccgaccucaaguccacccaggaggccaucaacaagaucaccaagaaccugaacagccuguccgagcucgaggugaagaaccugcagcggcugagcggggccauggacgagcuccacaacgagauccuggagcuggacgagaaggucgacgaccuccgcgcggacaccaucuccagccagaucgagcuggccgugcugcucuccaacgagggcaucaucaacagcgaggacgagcaccuccuggcccuggagcggaagcugaagaagaugcugggccccuccgccguggacaucgggaacggcugcuucgagaccaagcacaagugcaaccagaccugccucgaccgcaucgcggccgggacguucaacgccggcgaguucagccugcccaccuucgacucccugaacaucaccgccgccagccucaacgacgggcuggacaaccacaccauccugcuguacuacuccacggcggccagcucccucgccgucacccugaugaucgccaucuucaucguguacaugaucagccgggacaacguguccugcagcaucugccuguga

SEQ ID NO: 91928 - RNA, 1755 nt, Artificial Sequence; identical to SEQ ID NO: 90535
  derived and/or modified CDS sequence (opt1) from hemagglutinin__InfluenzaB__AHL91673

SEQ ID NO: 91929 - RNA, 1755 nt, Artificial Sequence
  derived and/or modified CDS sequence (opt1) from hemagglutinin__InfluenzaB__AHL91684
augaaggccaucaucgugcugcucauggucgugaccagcaacgccgaccgcaucugcaccggcaucacguccagcaacagcccccacguggucaagaccgcgacccagggggaggugaacgugaccggcgccaucccgcugacgaccacccccaccaagucccacuucgccaaccugaaggggacgaagacccggggcaagcucugcccgaccugccugaacugcaccgaccuggacgucgcccucgggcgccccaugugcgugggcaucacgcccuccgccaaggcgagcauccugcacgaggugcggcccgucaccuccggcugcuuccccaucaugcacgaccgcaccaagauccggcagcugcccaaccuccugcgcggguacgagaagauccggcugagcacccagaacgugaucaacgccgagaaggccccgggcgggcccuaccgccucggcacguccgggagcugccccaacgccaccuccaagagcggcuucuucgcgaccauggccugggccgugccccgggacaacaacaagaccgccacgaacccgcugaccaucgaggucccccacaucugcaccaaggaggaggaccagaucaccguguggggcuuccacuccgacaacaagacgcagaugaagaaccuguacggggacagcaacccccagaaguucaccuccagcgccaacggcaucaccacccacuacgugucccagaucgggggcuuccccgaccagacggaggacggcgggcucccgcagagcggccgcaucgucguggacuacauggugcagaagcccgggaagaccggcaccaucgucuaccagcgggggauccugcugccccagaagguguggugcgcguccggccgcagcaaggugaucaagggcuuccucccccugaucggggaggccgacugccugcacgagaaguacggcgggcucaacaagagcaagccguacuacaccggcgagcacgccaaggccaucgggaacugccccaucugggucaagacgccccugaagcuggccaacggcaccaaguaccggcccccggcgaagcuccugaaggagcgcggcuucuucggggccaucgccggcuuccuggagggcgggugggaggggaugaucgccggcuggcacggcuacaccucccacggggcccacggcguggcgguggccgccgaccucaagagcacccaggaggccaucaacaagaucacgaagaaccugaacucccugagcgagcucgaggucaagaaccugcagcggcuguccggggccauggacgagcuccacaacgagauccuggagcuggacgagaagguggacgaccuccgcgcggacaccaucagcucccagaucgagcuggccguccugcucagcaacgagggcaucaucaacuccgaggacgagcaccuccuggcccuggagcggaagcugaagaagaugcugggccccagcgccguggacaucgggaacggcugcuucgagaccaagcacaagugcaaccagaccugccucgaccgcaucgcggccgggaccuucaacgccggcgaguucucccugcccacguucgacagccugaacaucaccgccgccucccucaacgacgacgggcuggacaaccacaccauccugcuguacuacagcaccgcggccuccagccucgccgugacgcugaugaucgccaucuucaucgucuacaugaucucccgggacaacgugagcugcuccaucugccuguga

SEQ ID NO: 91930 - RNA, 1755 nt, Artificial Sequence; identical to SEQ ID NO: 90431
  derived and/or modified CDS sequence (opt1) from hemagglutinin__InfluenzaB__AHL91695

SEQ ID NO: 91931 - RNA, 1755 nt, Artificial Sequence; identical to SEQ ID NO: 90535
  derived and/or modified CDS sequence (opt1) from hemagglutinin__InfluenzaB__AHL91706

SEQ ID NO: 91932 - RNA, 1758 nt, Artificial Sequence; identical to SEQ ID NO: 91003
  derived and/or modified CDS sequence (opt1) from hemagglutinin__InfluenzaB__AHL91717

SEQ ID NO: 91933 - RNA, 1758 nt, Artificial Sequence; identical to SEQ ID NO: 91003
  derived and/or modified CDS sequence (opt1) from hemagglutinin__InfluenzaB__AHL91728

SEQ ID NO: 91934 - RNA, 1758 nt, Artificial Sequence; identical to SEQ ID NO: 91003
  derived and/or modified CDS sequence (opt1) from hemagglutinin__InfluenzaB__AHL91739

SEQ ID NO: 91935 - RNA, 1755 nt, Artificial Sequence; identical to SEQ ID NO: 90535
  derived and/or modified CDS sequence (opt1) from hemagglutinin__InfluenzaB__AHL91750

SEQ ID NO: 91936 - RNA, 1758 nt, Artificial Sequence; identical to SEQ ID NO: 91003
  derived and/or modified CDS sequence (opt1) from hemagglutinin__InfluenzaB__AHL91761

SEQ ID NO: 91937 - RNA, 1758 nt, Artificial Sequence
  derived and/or modified CDS sequence (opt1) from hemagglutinin__InfluenzaB__AHL91772
augaaggccaucaucgugcugcucauggucgugaccagcaacgccgaccgcaucugcaccggcaucacguccagcaacagcccccacguggucaagaccgcgacccagggggaggugaacgugaccggcgucaucccgcugacgaccacccccaccaagagccacuucgccaaccugaaggggacgaagacccggggcaagcucugccccaagugccugaacugcaccgaccuggacguggcccucgggcgccccaagugcaccggcaacaucccguccgccaaggugagcauccugcacgagguccggcccgugacguccggcugcuuccccaucaugcacgaccgcaccaagauccggcagcugcccaaccuccugcgcggguacgagcacauccggcugagcacccacaacgugaucaacgccgagaaggcgccgggcgggcccuacaagaucggcaccuccgggagcugccccaacaucacgaacggcaacggcuucuucgccaccauggccugggccguccccaagaacgacaacaacaagaccgcgaccaacucccucacgaucgaggugccguacaucugcaccgagggggaggaccagaucaccguguggggcuuccacagcgacaacgagacccagauggccaagcuguacggggacuccaagccccagaaguucacgagcuccgccaacggcgucaccacccacuacgugagccagaucggcggguuccccaaccagaccgaggacggcgggcugccccaguccggccgcaucguggucgacuacauggugcagaaguccgggaagacgggcaccaucaccuaccagcggggcauccuccugccgcagaagguguggugcgccuccgggcgcagcaaggucaucaagggcagccugccccucaucggggaggccgacugccugcacgagaaguacggcgggcugaacaaguccaagcccuacuacaccggcgagcacgcgaaggccaucggcaacugccccaucugggugaagacgccgcucaagcuggccaacgggaccaaguaccggccgcccgccaagcugcucaaggagcgcggcuucuucggggccaucgcgggcuuccuggagggcgggugggagggcaugaucgccggguggcacggcuacaccagccacggggcccacggcguggccgucgccgcggaccugaaguccacccaggaggccaucaacaagaucacgaagaaccucaacagccuguccgagcuggaggugaagaaccuccagcggcugagcggcgccauggacgagcugcacaacgagauccucgagcuggacgagaaggucgacgaccugcgcgccgacaccaucuccagccagaucgagcucgccgugcugcuguccaacgaggggaucaucaacagcgaggacgagcaccuccuggcgcuggagcggaagcucaagaagaugcugggccccuccgccguggagaucgggaacggcugcuucgagaccaagcacaagugcaaccagaccugccuggaccgcaucgccgccgggaccuucgacgcgggcgaguucagccuccccacguucgacucccugaacaucaccgccgccagccugaacgacgacggccucgacaaccacaccauccugcuguacuacuccaccgccgccagcucccuggcggucacgcucaugaucgccaucuucgugguguacauggucagccgggacaacguguccugcagcaucugccuguga

SEQ ID NO: 91938 - RNA, 1758 nt, Artificial Sequence; identical to SEQ ID NO: 91937
  derived and/or modified CDS sequence (opt1) from hemagglutinin__InfluenzaB__AHL91783

SEQ ID NO: 91939 - RNA, 1758 nt, Artificial Sequence; identical to SEQ ID NO: 91937
  derived and/or modified CDS sequence (opt1) from hemagglutinin__InfluenzaB__AHL91794

SEQ ID NO: 91940 - RNA, 1758 nt, Artificial Sequence
  derived and/or modified CDS sequence (opt1) from hemagglutinin__InfluenzaB__AHL91805
augaaggccaucaucgugcugcucauggucgugaccagcaacgccgaccgcaucugcaccggcaucacguccagcaacagcccccacguggucaagaccgcgacccagggggaggugaacgugaccggcgucaucccgcugacgaccacccccaccaagagccacuucgccaaccugaaggggacgaagacccggggcaagcucugccccaagugcuucaacugcaccgaccuggacguggcccuggggcgccccaagugcaccggcaacaucccguccgccgaggugagcauccuccacgagguccggcccgugacguccggcugcuuccccaucaugcacgaccgcaccaagauccggcagcugcccaaccugcuccgcggguacgagcacauccggcugagcacccacaacgugaucaacgccgagaaggcgccgggcgggcccuacaagaucggcaccuccgggagcugccccaacgucacgaacggcaacggcuucuucgccaccauggccugggccgugcccaagaacgacaacaacaagaccgcgaccaacucccugacgaucgaggugccguacaucugcaccgagggggaggaccagaucaccgucuggggcuuccacagcgacaacgagacccagauggccaagcucuacggggacuccaagccccagaaguucacgagcuccgccaacggcgugaccacccacuacgugagccagaucggcggguuccccaaccagaccgaggacggcgggcugccccaguccggccgcaucgucguggacuacauggugcagaaguccgggaagacgggcaccaucaccuaccagcggggcauccugcucccgcagaaggucuggugcgccuccgggcgcagcaaggugaucaagggcagccugccccugaucggggaggccgacugccuccacgagaaguacggcgggcugaacaaguccaagcccuacuacaccggcgagcacgcgaaggccaucggcaacugccccaucugggugaagacgccgcugaagcucgccaacgggaccaaguaccggccgcccgccaagcugcugaaggagcgcggcuucuucggggccaucgcgggcuuccucgagggcgggugggagggcaugaucgccggguggcacggcuacaccagccacggggcccacggcgucgccguggccgcggaccugaaguccacccaggaggccaucaacaagaucacgaagaaccugaacagccucuccgagcuggaggucaagaaccugcagcggcucagcggcgccauggacgagcugcacaacgagauccuggagcucgacgagaagguggacgaccugcgcgccgacaccaucuccagccagaucgagcuggccgugcuccuguccaacgaggggaucaucaacagcgaggacgagcaccuccuggcgcuggagcggaagcugaagaagaugcucggccccuccgccgucgagaucgggaacggcugcuucgagaccaagcacaagugcaaccagaccugccuggaccgcaucgccgccgggaccuucgacgcgggcgaguucagccugcccacguucgacucccucaacaucaccgccgccagccugaacgacgacggccuggacaaccacaccauccuccuguacuacuccaccgccgccagcucccuggcggugacgcugaugaucgccaucuucguggucuacauggugagccgggacaacguguccugcagcaucugccucuga

SEQ ID NO: 91941 - RNA, 1758 nt, Artificial Sequence; identical to SEQ ID NO: 90443
  derived and/or modified CDS sequence (opt1) from hemagglutinin__InfluenzaB__AHL91816

SEQ ID NO: 91942 - RNA, 1758 nt, Artificial Sequence; identical to SEQ ID NO: 90443
  derived and/or modified CDS sequence (opt1) from hemagglutinin__InfluenzaB__AHL91827

SEQ ID NO: 91943 - RNA, 1755 nt, Artificial Sequence; identical to SEQ ID NO: 91050
  derived and/or modified CDS sequence (opt1) from hemagglutinin__InfluenzaB__AHL91838

SEQ ID NO: 91944 - RNA, 1755 nt, Artificial Sequence
  derived and/or modified CDS sequence (opt1) from hemagglutinin__InfluenzaB__AHL91849
augaaggccaucaucgugcugcucauggucgugaccagcaacgccgaccgcaucugcaccggcaucacguccagcaacagcccccacguggucaagaccgcgacccagggggaggugaacgugaccggcgucaucccgcugacgaccacccccaccaaguccuacuucgccaaccugaaggggacgcggacccgcggcaagcucugccccgacugccugaacugcaccgaccuggacguggcccucgggcggcccaugugcgugggcaccacgccguccgccaaggccagcauccugcacgaggcgcgccccgucaccuccggcugcuuccccaucaugcacgaccggaccaagauccgccagcugcccaaccuccugcggggguacgagaacauccgccugagcacccagaacgugaucgacgccgagaacgccccgggcgggcccuaccggcucggcacguccgggagcugccccaacgccaccuccaagagcggcuucuucgcgaccauggccugggccgugcccaaggacaacaacaagaacgccaccaacccgcugacggucgaggugcccuacaucugcaaggagggcgaggaccagaucaccguguggggguuccacuccgacaacaagacccagaugaagaaccuguacggcgacagcaacccccagaaguucaccuccagcgccaacggggucacgacccacuacgugucccagaucagcggcuuccccgcgcagaccgaggacggcgggcucccgcaguccggccgcaucguggucgacuacauggugcagaagccccggaagaccgggacgaucguguaccagcgcggcguccugcugccccagaagguguggugcgccagcgggcggagcaaggugaucaagggcucccucccccugaucggcgaggccgacugccugcacgagaaguacgggggccucaacaagagcaagccguacuacaccggggagcacgccaaggccaucggcaacugccccaucugggucaagacgccccugaagcuggcgaacgggaccaaguaccggcccccggccaagcuccugaaggagcgcggcuucuucggcgccaucgccggguuccuggagggcgggugggagggcaugaucgccggguggcacggcuacaccucccacggcgcgcacgggguggccgucgccgccgaccucaagagcacccaggaggccaucaacaagaucaccaagaaccugaacucccugagcgagcucgaggugaagaaccugcagcgccuguccggcgcgauggacgagcuccacaacgagauccuggagcuggacgagaagguggacgaccuccgggccgacaccaucagcucccagaucgagcuggccguccugcucagcaacgaggggaucaucaacuccgaggacgagcaccuccuggcccuggagcgcaagcugaagaagaugcugggccccagcgcgguggacaucggcaacgggugcuucgagacgaagcacaagugcaaccagaccugccucgaccggaucgccgccggcaccuucaacgccggggaguucucccugcccaccuucgacagccugaacaucaccgccgcgucccucaacgacgacggccuggacaaccacacgauccugcuguacuacagcaccgccgccuccagccucgccgugacccugaugcuggccaucuucaucgucuacauggugucccgcgacaacgugagcugcagcaucugccucuga

SEQ ID NO: 91945 - RNA, 1755 nt, Artificial Sequence
  derived and/or modified CDS sequence (opt1) from hemagglutinin__InfluenzaB__AHL91860
augaaggccaucaucgugcugcucauggucgugaccagcaacgccgaccgcaucugcaccggcaucacguccagcaacagcccccacguggucaagaccgcgacccagggggaggugaacgugaccggcgucaucccgcugacgaccacccccaccaaguccuacuucgccaaccugaaggggacgcggacccgcggcaagcucugccccgacugccugaacugcaccgaccuggacguggcccucgggcggcccaugugcgugggcaccacgccguccgccaaggccagcauccugcacgagguccgccccgugaccuccggcugcuuccccaucaugcacgaccggaccaagauccgccagcugcccaaccuccugcggggguacgagaacauccgccugagcacccagaacgugaucgacgcggagaaggccccgggcgggcccuaccggcucggcacguccgggagcugccccaacgccaccuccaagagcggcuucuucgccaccauggcgugggccguccccaaggacaacaacaagaacgccaccaacccgcugacgguggagauccccuacaucugcaccgagggcgaggaccagaucaccguguggggguuccacuccgacaacaagacccagaugaagaaccuguacggcgacagcaacccccagaaguucacguccagcgccaacggggucaccacccacuacgugucccagaucggcggcuuccccgaccagaccgaggacgggggccucccgcagagcgggcgcaucguggucgacuacaugaugcagaagcccggcaagacggggaccaucguguaccagcggggcgugcugcugccccagaaggucuggugcgccuccggccgcagcaaggugaucaaggggagccucccccugaucggcgaggcggacugccugcacgagaaguacgggggccucaacaaguccaagccguacuacaccggggagcacgccaaggccaucggcaacugccccaucugggugaagacgccccugaagcuggccaacggcaccaaguaccggcccccggccaagcuccugaaggagcgcggguucuucggcgcgaucgccggguuccuggagggcgggugggagggcaugaucgccggcuggcacggguacaccagccacggcgcccacggggucgccguggcggccgaccucaaguccacccaggaggccaucaacaagaucaccaagaaccugaacagccuguccgagcucgaggucaagaaccugcagcggcugagcggcgccauggacgagcuccacaacgagauccuggagcuggacgagaagguggacgaccuccgcgccgacacgaucuccagccagaucgagcuggcggugcugcucuccaacgagggcaucaucaacagcgaggacgagcaccuccuggcccuggagcggaagcugaagaagaugcuggggcccuccgccgucgagaucggcaacgggugcuucgagaccaagcacaagugcaaccagaccugccucgaccgcaucgccgcgggcaccuucaacgccggggaguucagccugcccaccuucgacucccugaacaucacggccgccagccucaacgacgacggccuggacaaccacgccauccugcuguacuacuccaccgcggccagcucccucgccgugacccugaugcuggccaucuucaucguguacauggucagccgggacaacguguccugcagcaucugccucuga

SEQ ID NO: 91946 - RNA, 1755 nt, Artificial Sequence
  derived and/or modified CDS sequence (opt1) from hemagglutinin__InfluenzaB__AHL91871
augaaggccaucaucgugcugcucauggucgugaccagcaacgccgaccgcaucugcaccggcaucacguccagcaacagcccccacguggucaagaccgcgacccagggggaggugaacgugaccggcgucaucccgcugacgaccacccccaccaaguccuacuucgccaaccugaaggggacgcggacccgcggcaagcucugccccgacugccugaacugcaccgaccuggacguggcccucgggcggcccaugugcgugggcaccacgccguccgccaaggccagcauccugcacgagguccgccccgugaccuccggcugcuuccccaucaugcacgaccggaccaagauccgccagcugcccaaccuccugcggggguacgagaacauccgccugagcacccagaacgugaucgacgcggagaaggccccgggcgggcccuaccggcucggcacguccgggagcugccccaacgccaccuccaagagcggcuucuucgccaccauggcgugggccguccccaaggacaacaacaagaacgccaccaacccgcugacgguggagauccccuacaucugcaccgagggcgaggaccagaucaccguguggggguuccacuccgacaacaagacccagaugaagaaccuguacggcgacagcaacccccagaaguucacguccagcgccaacggggucaccacccacuacgugucccagaucggcggcuuccccgaccagaccgaggacgggggccucccgcagagcgggcgcaucguggucgacuacaugaugcagaagcccggcaagacggggaccaucguguaccagcggggcgugcugcugccccagaaggucuggugcgccuccggccgcagcaaggugaucaaggggagccucccccugaucggcgaggcggacugccugcacgagaaguacgggggccucaacaaguccaagccguacuacaccggggagcacgccaaggccaucggcaacugccccaucugggugaagacgccccugaagcuggccaacggcaccaaguaccggcccccggccaagcuccugaaggagcgcggguucuucggcgcgaucgccggguuccuggagggcgggugggagggcaugaucgccggcuggcacggguacaccagccacggcgcccacggggucgccguggcggccgaccucaaguccacccaggaggccaucaacaagaucaccaagaaccugaacagccuguccgagcucgaggucaagaaccugcagcggcugagcggcgccauggacgagcuccacaacgagauccuggagcuggacgagaagguggacgaccuccgcgccgacacgaucuccagccagaucgagcuggcggugcugcucuccaacgagggcaucaucaacagcgaggacgagcaccuccuggcccuggagcggaagcugaagaagaugcuggggcccuccgccgucgagaucggcaacgggugcuucgagaccaagcacaagugcaaccagaccugccucgaccgcaucgccgcgggcaccuucaacgccggggaguucagccugcccaccuucgacucccugaacaucacggccgccagccucaacgacgacggccuggacaaccacaccauccugcuguacuacuccaccgccgcgagcucccucgccgugacccugaugcuggccaucuucaucguguacauggucagccgggacaacguguccugcagcaucugccucuga

SEQ ID NO: 91947 - RNA, 1755 nt, Artificial Sequence; identical to SEQ ID NO: 90450
  derived and/or modified CDS sequence (opt1) from hemagglutinin__InfluenzaB__AHL91882

SEQ ID NO: 91948 - RNA, 1755 nt, Artificial Sequence
  derived and/or modified CDS sequence (opt1) from hemagglutinin__InfluenzaB__AHL91904
augaaggccaucaucgugcugcucauggucgugaccagcaacgccgaccgcaucugcaccggcaucacguccagcaacagcccccacguggucaagaccgcgacccagggggaggugaacgugaccggcgucaucccgcugacgaccacccccaccaaguccuacuucgccaaccugaaggggacgcggacccgcggcaagcucugccccgacugccugaacugcaccgaccuggacguggcccucgggcggcccaugugcgugggcaccacgccguccgccaaggccagcauccugcacgagguccgccccgugaccuccggcugcuuccccaucaugcacgaccggaccaagauccgccagcuggcgaaccuccugcggggguacgagaacauccgccugagcacccagaacgugaucgacgccgagaaggcccccggcgggccguaccggcucggcacguccgggagcugccccaacgccaccuccaagagcggcuucuucgcgaccauggccugggccguccccaaggacaacaacaagaacgccaccaacccccugacgguggaggugccguacaucugcaccgagggcgaggaccagaucaccgucuggggguuccacuccgacaacaagacccagaugaagaaccuguacggcgacagcaacccccagaaguucacguccagcgccaacggggugaccacccacuacgugucccagaucggcggcuuccccgaccagaccgaggacgggggccucccccagagcgggcgcaucgucguggacuacaugaugcagaagcacggcaagacggggaccaucguguaccagcggggcguccugcugccgcagaagguguggugcgcguccggccgcagcaaggugaucaaggggagccucccccugaucggcgaggccgacugccugcacgagaaguacgggggccucaacaaguccaagcccuacuacaccggggagcacgccaaggccaucggcaacugccccaucugggucaagaccccgcugaagcuggccaacggcacgaaguaccggccgcccgcgaagcuccugaaggagcgcggguucuucggcgccaucgccggguuccuggagggcgggugggagggcaugaucgccggcuggcacggguacaccagccacggcgcccacgggguggcggucgccgccgaccucaaguccacccaggaggccaucaacaagaucaccaagaaccugaacagccuguccgagcucgaggugaagaaccugcagcggcugagcggcgccauggacgagcuccacaacgagauccuggagcuggacgagaagguggacgaccuccgcgcggacacgaucuccagccagaucgagcuggccguccugcucuccaacgagggcaucaucaacagcgaggacgagcaccuccuggcccuggagcggaagcugaagaagaugcuggggcccuccgccguggacaucggcaacgggugcuucgagaccaagcacaagugcaaccagaccugccucgaccgcaucgcggccggcaccuucaacgccggggaguucagccugcccaccuucgacucccugaacaucacggccgccagccucaacgacgacggccuggacaaccacaccauccugcuguacuacuccaccgcggccagcucccucgccgugacccugaugcuggccaucuucaucgucuacauggugagccgggacaacguguccugcagcaucugccucuga

SEQ ID NO: 91949 - RNA, 1755 nt, Artificial Sequence
  derived and/or modified CDS sequence (opt1) from hemagglutinin__InfluenzaB__AHL91915
augaaggccaucaucgugcugcucauggucgugaccagcaacgccgaccgcaucugcaccggcaucacguccagcaacagcccccacguggucaagaccgcgacccagggggaggugaacgugaccggcgucaucccgcugacgaccacccccaccaaguccuacuucgccaaccugaaggggacgcggacccgcggcaagcucugccccgacugccugaacugcaccgaccuggacguggcccucgggcggcccaugugcgugggcaccacgccguccgccaaggccagcauccugcacgagguccgccccgugaccuccggcugcuuccccaucaugcacgaccggaccaagauccgccagcugcccaaccuccugcggggguacgagaacauccgccugagcacccagaacgugaucgacgcggagaaggccccgggcgggcccuaccggcucggcacguccgggagcugccccaacgccaccuccaagagcggcuucuucgccaccauggcgugggccguccccaaggacaacuacaagaacgccaccaacccgcugacgguggaggugcccuacaucugcaccgagggcgaggaccagaucaccgucuggggguuccacuccgacaacaagacccagaugaagaaccuguacggcgacagcaacccccagaaguucacguccagcgccaacggggugaccacccacuacgugucccagaucggcggcuuccccgaccagaccgaggacgggggccucccgcagagcgggcgcaucgucguggacuacaugaugcagaagcccggcaagacggggaccaucguguaccagcggggcguccugcugccccagaagguguggugcgccuccggccgcagcaaggugaucaaggggagccucccccugaucggcgaggcggacugccugcacgagaaguacgggggccucaacaaguccaagccguacuacaccggggagcacgccaaggccaucggcaacugccccaucugggucaagacgccccugaagcuggccaacggcaccaaguaccggcccccggccaagcuccugaaggagcgcggguucuucggcgcgaucgccggguuccuggagggcgggugggagggcaugaucgccggcuggcacggguacaccagccacggcgcccacgggguggccgucgcggccgaccucaaguccacccaggaggccaucaacaagaucaccaagaaccugaacagccuguccgagcucgaggugaagaaccugcagcggcugagcggcgccauggacgagcuccacaacgagauccuggagcuggacgagaagguggacgaccuccgcgccgacacgaucuccagccagaucgagcuggcgguccugcucuccaacgagggcaucaucaacagcgaggacgagcaccuccuggcccuggagcggaagcugaagaagaugcuggggcccuccgccguggacaucggcaacgggugcuucgagaccaagcacaagugcaaccagaccugccucgaccgcaucgccgcgggcaccuucaacgccggggaguucagccugcccaccuucgacucccugaacaucacggccgccagccucaacgacgacggccuggacaaccacaccauccugcuguacuacuccaccgccgcgagcucccucgccgugacccugaugcuggccaucuucaucgucuacauggugagccgggacaacguguccugcagcaucugccucuga

SEQ ID NO: 91950 - RNA, 1755 nt, Artificial Sequence; identical to SEQ ID NO: 91048
  derived and/or modified CDS sequence (opt1) from hemagglutinin__InfluenzaB__AHL91926

SEQ ID NO: 91951 - RNA, 1755 nt, Artificial Sequence; identical to SEQ ID NO: 91623
  derived and/or modified CDS sequence (opt1) from hemagglutinin__InfluenzaB__AHL91937

SEQ ID NO: 91952 - RNA, 1755 nt, Artificial Sequence; identical to SEQ ID NO: 90450
  derived and/or modified CDS sequence (opt1) from hemagglutinin__InfluenzaB__AHL91948

SEQ ID NO: 91953 - RNA, 1758 nt, Artificial Sequence
  derived and/or modified CDS sequence (opt1) from hemagglutinin__InfluenzaB__AHL91959
augaaggccaucaucgugcugcucauggucgugaccagcaacgccgaccgcaucugcaccggcaucacguccagcaacagcccccacguggucaagaccgcgacccagggggaggugaacgugaccggcgucaucccgcugacgaccacccccaccaagagccacuucgccaaccugaaggggacgaagacccggggcaagcucugccccaagugccugaacugcaccgaccuggacguggcccucgggcgccccaagugcaccggcaacaucccguccgccgaggugagcauccugcacgagguccggcccgugacguccggcugcuuccccaucaugcacgaccgcaccaagauccggcagcugcccaaccuccugcgcggguacgagcacauccggcugagcacccacaacgugaucaacgccgagaaggcgccgggcgggcccuacaagaucggcaccuccgggagcugccccaacgucacgaacggcaacggcuucuucgccaccauggccugggccgugcccaagaacgacaacaacaagaccgcgaccaacucccucacgaucgaggugccguacaucugcaccgagggggaggaccagaucaccaucuggggcuuccacagcgacaacgagacccagauggccaagcuguacggggacuccaagccccagaaguucacgagcuccgccaacggcgucaccacccacuacgugagccagaucggcggguuccccaaccagaccgaggacggcgggcugccccaguccggccgcaucguggucgacuacauggugcagaaguccgggaagacgggcaccaucaccuaccagcggggcauccuccugccgcagaagguguggugcgccuccgggcgcagcaaggucaucaagggcagccugccccucaucggggaggccgacugccugcacgagaaguacggcgggcugaacaaguccaagcccuacuacaccggcgagcacgcgaaggccaucggcaacugccccaucugggugaagacgccgcucaagcuggccaacgggaccaaguaccggccgcccgccaagcugcucaaggagcgcggcuucuucggggccaucgcgggcuuccuggagggcgggugggagggcaugaucgccggguggcacggcuacaccagccacggggcccacggcguggccgucgccgcggaccugaaguccacccaggaggccaucaacaagaucacgaagaaccucaacagccuguccgagcuggaggugaagaaccuccagcggcugagcggcgccauggacgagcugcacaacgagauccucgagcuggacgagaaggucgacgaccugcgcgccgacaccaucuccagccagaucgagcucgccgugcugcuguccaacgaggggaucaucaacagcgaggacgagcaccuccuggcgcuggagcggaagcucaagaagaugcugggccccuccgccguggagaucgggaacggcugcuucgagaccaagcacaagugcaaccagaccugccuggaccgcaucgccgccgggaccuucgacgcgggcgaguucagccuccccacguucgacucccugaacaucaccgccgccagcuucaacgacgacggccuggacaaccacaccauccuccuguacuacuccaccgccgccagcucccuggcggucacgcugaugaucgccaucuucgugguguacauggucagccgggacaacguguccugcagcaucugccucuga

SEQ ID NO: 91954 - RNA, 1758 nt, Artificial Sequence; identical to SEQ ID NO: 90662
  derived and/or modified CDS sequence (opt1) from hemagglutinin__InfluenzaB__AHL91970

SEQ ID NO: 91955 - RNA, 1755 nt, Artificial Sequence
  derived and/or modified CDS sequence (opt1) from hemagglutinin__InfluenzaB__AHL91991
augaaggccaucaucgugcugcucauggucgugaccagcaacgccgaccgcaucugcaccggcaucacguccagcaacagcccccacguggucaagaccgcgacccagggggaggugaacgugaccggcgucaucccgcugacgaccacccccaccaaguccuacuucgccaaccugaaggggacgcggacccgcggcaagcucugccccgacugccugaacugcaccgaccuggacguggcccucgggcggcccaugugcgugggcaccacgccguccgccaaggccagcauccugcacgagguccgccccgugaccuccggcugcuuccccaucaugcacgaccggaccaagauccgccagcuggcgaaccuccugcggggguacgagaacauccgccugagcacccagaacgugaucgacgccgagaaggcccccggcgggccguaccggcucggcacguccgggagcugccccaacgccaccaacaaguccggcuucuucgcgaccauggccugggccguccccaaggacaacaacaagaacgccaccaacccccugacgguggaggugccguacaucugcaccgagggcgaggaccagaucaccgucuggggguuccacagcgacaacaagacccagaugaagaaccuguacggcgacuccaacccccagaaguucacgagcuccgccaacggggugaccacccacuacgugagccagaucggcggcuuccccgaccagaccgaggacgggggccucccccaguccgggcgcaucgucguggacuacaugaugcagaagccgggcaagacggggaccaucguguaccagcggggcguccugcugccccagaagguguggugcgcgagcggccgcuccaaggugaucaaggggagccucccccugaucggcgaggccgacugccugcacgagaaguacgggggccucaacaagagcaagcccuacuacaccggggagcacgccaaggccaucggcaacugcccgaucugggucaagacgccccugaagcuggccaacggcaccaaguaccggccgcccgcgaagcuccugaaggagcgcggguucuucggcgccaucgccggguuccuggagggcgggugggagggcaugaucgccggcuggcacggguacaccucccacggcgcccacgggguggcggucgccgccgaccucaagagcacccaggaggccaucaacaagaucaccaagaaccugaacucccugagcgagcucgaggugaagaaccugcagcggcuguccggcgccauggacgagcuccacaacgagauccuggagcuggacgagaagguggacgaccuccgcgcggacacgaucagcucccagaucgagcuggccguccugcucagcaacgagggcaucaucaacuccgaggacgagcaccuccuggcccuggagcggaagcugaagaagaugcuggggcccagcgccguggacaucggcaacgggugcuucgagaccaagcacaagugcaaccagaccugccucgaccgcaucgcggccggcaccuucaacgccggggaguucucccugcccaccuucgacagccugaacaucacggccgccucccucaacgacgacggccuggacaaccacaccauccugcuguacuacagcaccgcggccuccagccucgccgugacccugaugcuggccaucuucaucgucuacauggugucccgggacaacgugagcugcuccaucugccucuga

SEQ ID NO: 91956 - RNA, 1758 nt, Artificial Sequence; identical to SEQ ID NO: 90538
  derived and/or modified CDS sequence (opt1) from hemagglutinin__InfluenzaB__AHL92002

SEQ ID NO: 91957 - RNA, 1758 nt, Artificial Sequence; identical to SEQ ID NO: 90538
  derived and/or modified CDS sequence (opt1) from hemagglutinin__InfluenzaB__AHL92013

SEQ ID NO: 91958 - RNA, 1758 nt, Artificial Sequence; identical to SEQ ID NO: 90538
  derived and/or modified CDS sequence (opt1) from hemagglutinin__InfluenzaB__AHL92024

SEQ ID NO: 91959 - RNA, 1758 nt, Artificial Sequence; identical to SEQ ID NO: 90538
  derived and/or modified CDS sequence (opt1) from hemagglutinin__InfluenzaB__AHL92035

SEQ ID NO: 91960 - RNA, 1758 nt, Artificial Sequence; identical to SEQ ID NO: 90538
  derived and/or modified CDS sequence (opt1) from hemagglutinin__InfluenzaB__AHL92046

SEQ ID NO: 91961 - RNA, 1758 nt, Artificial Sequence; identical to SEQ ID NO: 90538
  derived and/or modified CDS sequence (opt1) from hemagglutinin__InfluenzaB__AHL92057

SEQ ID NO: 91962 - RNA, 1758 nt, Artificial Sequence
  derived and/or modified CDS sequence (opt1) from hemagglutinin__InfluenzaB__AHL92068
augaaggccaucaucgugcugcucauggucgugaccagcaacgccgaccgcaucugcaccggcaucacguccagcaacagcccccacguggucaagaccgcgacccagggggaggugaacgugaccggcgucaucccgcugacgaccacccccaccaagagccacuucgccaaccugaaggggacggagacccggggcaagcucugccccaagugccugaacugcaccgaccuggacguggcccucgggcgccccaagugcaccggcaacaucccguccgcccgggugagcauccugcacgagguccgccccgugacguccggcugcuuccccaucaugcacgaccggaccaagauccgccagcugcccaaccuccugcggggguacgagcacauccgccugagcacccacaacgugaucaacgccgagaacgcgccgggcgggcccuacaagaucggcaccuccgggagcugccccaacaucacgaacggcaacggcuucuucgccaccauggccugggccguccccaagaacgacaacaacaagaccgcgaccaacucccucacgaucgaggugccguacaucugcaccgagggggaggaccagaucaccguguggggcuuccacagcgacaacgagacccagauggccaagcuguacggggacuccaagccccagaaguucacgagcuccgccaacggcgucaccacccacuacgugagccaggugggcggguuccccaaccagaccgaggacggcgggcugccccaguccggccggaucgucguggacuacauggugcagaaguccgggaagacgggcaccaucaccuaccagcgcggcauccuccugccgcagaaggucuggugcgccuccgggcggagcaaggugaucaagggcagccugccccucaucggggaggccgacugccugcacgagaaguacggcgggcugaacaaguccaagcccuacuacaccggcgagcacgcgaaggccaucggcaacugccccaucugggugaagacgccgcucaagcuggccaacgggaccaaguaccgcccgcccgccaagcugcucaaggagcggggcuucuucggggccaucgcgggcuuccuggagggcgggugggagggcaugaucgccggguggcacggcuacaccagccacggggcccacggcgucgccguggccgcggaccugaaguccacccaggaggccaucaacaagaucacgaagaaccucaacagccuguccgagcuggaggucaagaaccuccagcgccugagcggcgccauggacgagcugcacaacgagauccucgagcuggacgagaagguggacgaccugcgggccgacaccaucuccagccagaucgagcucgccgugcugcuguccaacgaggggaucaucaacagcgaggacgagcaccuccuggcgcuggagcgcaagcucaagaagaugcugggccccuccgccgucgagaucgggaacggcugcuucgagaccaagcacaagugcaaccagaccugccuggaccggaucgccgccgggaccuucgacgcgggcgaguucagccuccccacguucgacucccugaacaucaccgccgccagccugaacgacgacggccucgacaaccacaccauccugcuguacuacuccaccgccgccagcucccuggcggugacgcucaugaucgccaucuucguggucuacauggugagccgcgacaacguguccugcagcaucugccuguga

SEQ ID NO: 91963 - RNA, 1758 nt, Artificial Sequence
  derived and/or modified CDS sequence (opt1) from hemagglutinin__InfluenzaB__AHL92079
augaaggccaucaucgugcugcucauggucgugaccagcaacgccgaccgcaucugcaccggcaucacguccagcaacagcccccacguggucaagaccgcgacccagggggaggugaacgugaccggcgucaucccgcugacgaccacccccaccaagagccacuucgccaaccugaaggggacggagacccggggcaagcucugccccaagugccugaacugcaccgaccuggacguggcccucgggcgccccaagugcaccggcaacaucccguccgcccgggugagcauccugcacgagguccgccccgugacguccggcugcuuccccaucaugcacgaccggaccaagauccgccagcugcccaaccuccugcggggguacgagcacauccgccugagcacccacaacgugaucaacgccgagaacgcgccgggcgggcccuacaagaucggcaccuccgggagcugccccaacaucacgaacggcaacggcuucuucgccaccauggccugggccguccccaagaacgacaacaacaagaccgcgaccaacucccucacgaucgaggugccguacaucugcaccgagggggaggaccagaucaccguguggggcuuccacagcgacaacgagacccagauggccaagcuguacggggacuccaagccccagaaguucacgagcuccgccaacggcgucaccacccacuacgugagccagaucggcggguuccccaaccagaccgaggacggcgggcugccccaguccggccggaucguggucgacuacauggugcagaaguccgggaagacgggcaccaucaccuaccagcgcggcauccuccugccgcagaagguguggugcgccuccgggcggagcaaggucaucaagggcagccugccccucaucggggaggccgacugccugcacgagaaguacggcgggcugaacaaguccaagcccuacuacaccggcgagcacgcgaaggccaucggcaacugccccaucugggugaagacgccgcucaagcuggccaacgggaccaaguaccgcccgcccgccaagcugcucaaggagcggggcuucuucggggccaucgcgggcuuccuggagggcgggugggagggcaugaucgccggguggcacggcuacaccagccacggggcccacggcguggccgucgccgcggaccugaaguccacccaggaggccaucaacaagaucacgaagaaccucaacagccuguccgagcuggaggugaagaaccuccagcgccugagcggcgccauggacgagcugcacaacgagauccucgagcuggacgagaaggucgacgaccugcgggccgacaccaucuccagccagaucgagcucgccgugcugcuguccaacgaggggaucaucaacagcgaggacgagcaccuccuggcgcuggagcgcaagcucaagaagaugcugggccccuccgccguggagaucgggaacggcugcuucgagaccaagcacaagugcaaccagaccugccuggaccggaucgccgccgggaccuucgacgcgggcgaguucagccuccccacguucgacucccugaacaucaccgccgccagccugaacgacgacggccucgacaaccacaccauccugcuguacuacuccaccgccgccagcucccuggcggucacgcucaugaucgccaucuucgugguguacauggucagccgcgacaacguguccugcagcaucugccuguga

SEQ ID NO: 91964 - RNA, 1758 nt, Artificial Sequence; identical to SEQ ID NO: 91963
  derived and/or modified CDS sequence (opt1) from hemagglutinin__InfluenzaB__AHL92090

SEQ ID NO: 91965 - RNA, 1758 nt, Artificial Sequence; identical to SEQ ID NO: 90538
  derived and/or modified CDS sequence (opt1) from hemagglutinin__InfluenzaB__AHL92101

SEQ ID NO: 91966 - RNA, 1755 nt, Artificial Sequence; identical to SEQ ID NO: 90591
  derived and/or modified CDS sequence (opt1) from hemagglutinin__InfluenzaB__AHL92112

SEQ ID NO: 91967 - RNA, 1758 nt, Artificial Sequence; identical to SEQ ID NO: 90538
  derived and/or modified CDS sequence (opt1) from hemagglutinin__InfluenzaB__AHL92123

SEQ ID NO: 91968 - RNA, 1758 nt, Artificial Sequence; identical to SEQ ID NO: 91963
  derived and/or modified CDS sequence (opt1) from hemagglutinin__InfluenzaB__AHL92134

SEQ ID NO: 91969 - RNA, 1758 nt, Artificial Sequence; identical to SEQ ID NO: 91963
  derived and/or modified CDS sequence (opt1) from hemagglutinin__InfluenzaB__AHL92145

SEQ ID NO: 91970 - RNA, 1758 nt, Artificial Sequence; identical to SEQ ID NO: 90538
  derived and/or modified CDS sequence (opt1) from hemagglutinin__InfluenzaB__AHL92156

SEQ ID NO: 91971 - RNA, 1758 nt, Artificial Sequence; identical to SEQ ID NO: 91963
  derived and/or modified CDS sequence (opt1) from hemagglutinin__InfluenzaB__AHL92167

SEQ ID NO: 91972 - RNA, 1758 nt, Artificial Sequence; identical to SEQ ID NO: 90538
  derived and/or modified CDS sequence (opt1) from hemagglutinin__InfluenzaB__AHL92178

SEQ ID NO: 91973 - RNA, 1758 nt, Artificial Sequence; identical to SEQ ID NO: 90538
  derived and/or modified CDS sequence (opt1) from hemagglutinin__InfluenzaB__AHL92189

SEQ ID NO: 91974 - RNA, 1755 nt, Artificial Sequence; identical to SEQ ID NO: 90591
  derived and/or modified CDS sequence (opt1) from hemagglutinin__InfluenzaB__AHL92200

SEQ ID NO: 91975 - RNA, 1758 nt, Artificial Sequence; identical to SEQ ID NO: 90538
  derived and/or modified CDS sequence (opt1) from hemagglutinin__InfluenzaB__AHL92211

SEQ ID NO: 91976 - RNA, 1758 nt, Artificial Sequence; identical to SEQ ID NO: 90538
  derived and/or modified CDS sequence (opt1) from hemagglutinin__InfluenzaB__AHL92222

SEQ ID NO: 91977 - RNA, 1755 nt, Artificial Sequence; identical to SEQ ID NO: 91853
  derived and/or modified CDS sequence (opt1) from hemagglutinin__InfluenzaB__AHL92233

SEQ ID NO: 91978 - RNA, 1758 nt, Artificial Sequence; identical to SEQ ID NO: 91963
  derived and/or modified CDS sequence (opt1) from hemagglutinin__InfluenzaB__AHL92244

SEQ ID NO: 91979 - RNA, 1758 nt, Artificial Sequence; identical to SEQ ID NO: 90538
  derived and/or modified CDS sequence (opt1) from hemagglutinin__InfluenzaB__AHL92255

SEQ ID NO: 91980 - RNA, 1758 nt, Artificial Sequence; identical to SEQ ID NO: 90538
  derived and/or modified CDS sequence (opt1) from hemagglutinin__InfluenzaB__AHL92266

SEQ ID NO: 91981 - RNA, 1758 nt, Artificial Sequence
  derived and/or modified CDS sequence (opt1) from hemagglutinin__InfluenzaB__AHL92277
augaaggccaucaucgugcugcucauggucgugaccagcaacgccgaccgcaucugcaccggcaucacguccagcaacagcccccacguggucaagaccgcgacccagggggaggugaacgugaccggcgucaucccgcugacgaccacccccaccaagagccacuucgccaaccugaaggggacggagacccggggcaagcucugccccaagugccugaacugcaccgaccuggacguggcccucgggcgccccaagugcaccggcaacaucccguccgcccgggugagcauccugcacgagguccgccccgugacguccggcugcuuccccaucaugcacgaccggaccaagauccgccagcugcccaaccuccugcggggguacgagcacauccgccugagcacccacaacgugaucaacgccgagaacgcgccgggcgggcccuacaagaucggcaccuccgggagcugccccaacgucacgaacggcaacggcuucuucgccaccauggccugggccgugcccaagaacgacaacaacaagaccgcgaccaacucccucacgaucgaggugccguacaucugcaccgagggggaggaccagaucaccgucuggggcuuccacagcgacaacgagacccagauggccaagcuguacggggacuccaagccccagaaguucacgagcuccgccaacggcgugaccacccacuacgugagccagaucggcggguuccccaaccagaccgaggacggcgggcugccccaguccggccggaucgucguggacuacauggugcagaaguccgggaagacgggcaccaucaccuaccagcgcggcauccuccugccgcagaaggucuggugcgccuccgggcggagcaaggugaucaagggcagccugccccucaucggggaggccgacugccugcacgagaaguacggcgggcugaacaaguccaagcccuacuacaccggcgagcacgcgaaggccaucggcaacugccccaucugggugaagacgccgcucaagcuggccaacgggaccaaguaccgcccgcccgccaagcugcucaaggagcggggcuucuucggggccaucgcgggcuuccuggagggcgggugggagggcaugaucgccggguggcacggcuacaccagccacggggcccacggcgucgccguggccgcggaccugaaguccacccaggaggccaucaacaagaucacgaagaaccucaacagccuguccgagcuggaggucaagaaccuccagcgccugagcggcgccauggacgagcugcacaacgagauccucgagcuggacgagaagguggacgaccugcgggccgacaccaucuccagccagaucgagcucgccgugcugcuguccaacgaggggaucaucaacagcgaggacgagcaccuccuggcgcuggagcgcaagcucaagaagaugcugggccccuccgccgucgagaucgggaacggcugcuucgagaccaagcacaagugcaaccagaccugccuggaccggaucgccaccgggacguucgacgccggcgaguucagccuccccaccuucgacucccugaacaucaccgcggccagccugaacgacgacggccucgacaaccacaccauccugcuguacuacuccacggccgccagcucccuggccgugacccucaugaucgcgaucuucguggucuacauggugagccgcgacaacguguccugcagcaucugccuguga

SEQ ID NO: 91982 - RNA, 1758 nt, Artificial Sequence; identical to SEQ ID NO: 90538
  derived and/or modified CDS sequence (opt1) from hemagglutinin__InfluenzaB__AHL92288

SEQ ID NO: 91983 - RNA, 1758 nt, Artificial Sequence; identical to SEQ ID NO: 90538
  derived and/or modified CDS sequence (opt1) from hemagglutinin__InfluenzaB__AHL92299

SEQ ID NO: 91984 - RNA, 1755 nt, Artificial Sequence; identical to SEQ ID NO: 91656
  derived and/or modified CDS sequence (opt1) from hemagglutinin__InfluenzaB__AHL92310

SEQ ID NO: 91985 - RNA, 1755 nt, Artificial Sequence; identical to SEQ ID NO: 90591
  derived and/or modified CDS sequence (opt1) from hemagglutinin__InfluenzaB__AHL92321

SEQ ID NO: 91986 - RNA, 1755 nt, Artificial Sequence; identical to SEQ ID NO: 90591
  derived and/or modified CDS sequence (opt1) from hemagglutinin__InfluenzaB__AHL92332

SEQ ID NO: 91987 - RNA, 1755 nt, Artificial Sequence
  derived and/or modified CDS sequence (opt1) from hemagglutinin__InfluenzaB__AHL92354
augaaggccaucaucgugcugcucauggucgugaccagcaacgccgaccgcaucugcaccggcaucacguccagcaacagcccccacguggucaagaccgcgacccagggggaggugaacgugaccggcgucaucccgcugacgaccacccccaccaaguccuacuucgccaaccugaaggggacgcggacccgcggcaagcucugccccgacugccugaacugcaccgaccuggacguggcccucgggcggcccaugugcgugggcaucaccccguccgccaaggccagcauccugcacgagguccgccccgugacguccggcugcuuccccaucaugcacgaccggaccaagauccgccagcuggcgaaccuccugcggggguacgagaacauccgccugagcacccagaacguggucgacgccgagaaggcccccggcgggccguaccggcucggcaccuccgggagcugccccaacgccacguccaagagcggcuucuucgcgaccauggccugggccgugcccaaggacaacaacaagaacgccaccaacccccugaccguggaggucccguacaucugcacggagggcgaggaccagaucaccguguggggguuccacuccgacaacaagacccagaugaagaaccuguacggcgacagcaacccccagaaguucaccuccagcgccaacggggugacgacccacuacgucucccagaucggcggcuuccccgaccagaccgaggacgggggccucccccagagcgggcgcaucgugguggacuacaugaugcagaagccgggcaagaccgggacgaucgucuaccagcggggcgugcugcugccccagaagguguggugcgcguccggccgcagcaaggucaucaaggggagccucccccugaucggcgaggccgacugccugcacgagaaguacgggggccucaacaaguccaagcccuacuacaccggggagcacgccaaggccaucggcaacugcccgaucugggugaagacgccccugaagcuggccaacggcaccaaguaccggccgcccgcgaagcuccugaaggagcgcggguucuucggcgccaucgccggguuccuggagggcgggugggagggcaugaucgccggcuggcacggguacaccagccacggcgcccacggggucgcgguggccgccgaccucaaguccacccaggaggccaucaacaagaucaccaagaaccugaacagccuguccgagcucgaggugaagaaccugcagcggcugagcggcgccauggacgagcuccacaacgagauccuggagcuggacgagaaggucgacgaccuccgcgcggacaccaucuccagccagaucgagcuggccgugcugcucuccaacgagggcaucaucaacagcgaggacgagcaccuccuggcccuggagcggaagcugaagaagaugcuggggcccuccgccguggacaucggcaacgggugcuucgagacgaagcacaagugcaaccagaccugccucgaccgcaucgcggccggcaccuucaacgccggggaguucagccugcccaccuucgacucccugaacaucaccgccgccagccucaacgacgacggccuggacaaccacacgauccugcuguacuacuccaccgcggccagcucccucgccgucacccugaugcuggccaucuucaucguguacauggugagccgggacaacgucuccugcagcaucugccucuga

SEQ ID NO: 91988 - RNA, 1755 nt, Artificial Sequence; identical to SEQ ID NO: 91987
  derived and/or modified CDS sequence (opt1) from hemagglutinin__InfluenzaB__AHL92365

SEQ ID NO: 91989 - RNA, 1755 nt, Artificial Sequence; identical to SEQ ID NO: 90844
  derived and/or modified CDS sequence (opt1) from hemagglutinin__InfluenzaB__AHL92376

SEQ ID NO: 91990 - RNA, 1755 nt, Artificial Sequence; identical to SEQ ID NO: 90844
  derived and/or modified CDS sequence (opt1) from hemagglutinin__InfluenzaB__AHL92387

SEQ ID NO: 91991 - RNA, 1755 nt, Artificial Sequence; identical to SEQ ID NO: 90844
  derived and/or modified CDS sequence (opt1) from hemagglutinin__InfluenzaB__AHL92398

SEQ ID NO: 91992 - RNA, 1755 nt, Artificial Sequence; identical to SEQ ID NO: 90844
  derived and/or modified CDS sequence (opt1) from hemagglutinin__InfluenzaB__AHL92409

SEQ ID NO: 91993 - RNA, 1755 nt, Artificial Sequence; identical to SEQ ID NO: 90844
  derived and/or modified CDS sequence (opt1) from hemagglutinin__InfluenzaB__AHL92420

SEQ ID NO: 91994 - RNA, 1755 nt, Artificial Sequence; identical to SEQ ID NO: 90591
  derived and/or modified CDS sequence (opt1) from hemagglutinin__InfluenzaB__AHL92431

SEQ ID NO: 91995 - RNA, 1755 nt, Artificial Sequence; identical to SEQ ID NO: 90844
  derived and/or modified CDS sequence (opt1) from hemagglutinin__InfluenzaB__AHL92442

SEQ ID NO: 91996 - RNA, 1755 nt, Artificial Sequence; identical to SEQ ID NO: 90844
  derived and/or modified CDS sequence (opt1) from hemagglutinin__InfluenzaB__AHL92453

SEQ ID NO: 91997 - RNA, 1755 nt, Artificial Sequence; identical to SEQ ID NO: 90844
  derived and/or modified CDS sequence (opt1) from hemagglutinin__InfluenzaB__AHL92464

SEQ ID NO: 91998 - RNA, 1755 nt, Artificial Sequence
  derived and/or modified CDS sequence (opt1) from hemagglutinin__InfluenzaB__AHL92475
augaaggccaucaucgugcugcucauggucgugaccagcaacgccgaccgcaucugcaccggcaucacguccagcaacagcccccacguggucaagaccgcgacccagggggaggugaacgugaccggcgucaucccgcugacgaccacccccaccaaguccuacuucgccaaccugaaggggacgcggacccgcggcaagcucugccccgacugccugaacugcaccgaccuggacguggcccucgggcggcccaugugcgugggcaccacgccguccgccaaggccagcauccugcacgagguccgccccgugaccuccggcugcuuccccaucaugcacgaccggaccaagauccgccagcugcccaaccuccugcggggguacgagaacauccgccugagcacccagaacgugaucgacgcggagaaggccccgggcgggcccuaccggcucggcacguccgggagcugccccaacgccaccuccaagaucggcuucuucgccaccauggcgugggccguccccaaggacaacuacaagaacgccaccaacccgcugacgguggaggugcccuacaucugcaccgagggcgaggaccagaucaccgucuggggguuccacagcgacaacaagacccagaugaagaaccuguacggcgacuccaacccccagaaguucacgagcuccgccaacggggugaccacccacuacgugagccagaucggcgacuuccccgaccagaccgaggacggcgggcucccgcaguccggccgcaucgucguggacuacaugaugcagaagcccgggaagacgggcaccaucguguaccagcgcgggguccugcugccccagaagguguggugcgccagcggccgguccaaggugaucaagggcagccucccccugaucggggaggcggacugccugcacgagaaguacggcgggcucaacaagagcaagccguacuacaccggcgagcacgccaaggccaucgggaacugccccaucugggucaagacgccccugaagcuggccaacggcaccaaguaccggcccccggccaagcuccugaaggagcgcggcuucuucggggcgaucgccggcuuccuggagggcgggugggaggggaugaucgccggcuggcacggcuacaccucccacggggcccacggcguggccgucgcggccgaccucaagagcacccaggaggccaucaacaagaucaccaagaaccugaacucccugagcgagcucgaggugaagaaccugcagcggcuguccggggccauggacgagcuccacaacgagauccuggagcuggacgagaagguggacgaccuccgcgccgacacgaucagcucccagaucgagcuggcgguccugcucagcaacgagggcaucaucaacuccgaggacgagcaccuccuggcccuggagcggaagcugaagaagaugcugggccccagcgccguggacaucgggaacggcugcuucgagaccaagcacaagugcaaccaggccugccucgaccgcaucgcggccgggaccuucaacgccggcgaguucucccugcccaccuucgacagccugaacaucaccgccgccucccucaacgacgacgggcuggacaaccacacgauccugcuguacuacagcaccgcggccuccagccucgccgugacccugaugcuggccaucuucaucgucuacauggugucccgggacaacgugagcugcuccaucugccucuga

SEQ ID NO: 91999 - RNA, 1755 nt, Artificial Sequence; identical to SEQ ID NO: 90591
  derived and/or modified CDS sequence (opt1) from hemagglutinin__InfluenzaB__AHL92486

SEQ ID NO: 92000 - RNA, 1755 nt, Artificial Sequence; identical to SEQ ID NO: 90844
  derived and/or modified CDS sequence (opt1) from hemagglutinin__InfluenzaB__AHL92497

SEQ ID NO: 92001 - RNA, 1755 nt, Artificial Sequence; identical to SEQ ID NO: 90844
  derived and/or modified CDS sequence (opt1) from hemagglutinin__InfluenzaB__AHL92508

SEQ ID NO: 92002 - RNA, 1755 nt, Artificial Sequence; identical to SEQ ID NO: 90844
  derived and/or modified CDS sequence (opt1) from hemagglutinin__InfluenzaB__AHL92519

SEQ ID NO: 92003 - RNA, 1755 nt, Artificial Sequence; identical to SEQ ID NO: 90844
  derived and/or modified CDS sequence (opt1) from hemagglutinin__InfluenzaB__AHL92530

SEQ ID NO: 92004 - RNA, 1755 nt, Artificial Sequence; identical to SEQ ID NO: 90591
  derived and/or modified CDS sequence (opt1) from hemagglutinin__InfluenzaB__AHL92541

SEQ ID NO: 92005 - RNA, 1752 nt, Artificial Sequence
  derived and/or modified CDS sequence (opt1) from hemagglutinin__InfluenzaB__AHL92563
augaaggccaucaucgugcugcucauggucgugaccagcaacgccgaccgcaucugcaccggcaucacguccagcaacagcccccacguggucaagaccgcgacccagggggaggugaacgugaccggcgucaucccgcugacgaccacccccaagaaguccuacuucgccaaccugaaggggacccggacgcgcggcaagcucugccccgacugccugaacugcaccgaccuggacguggcccucgggcggcccaugugcgugggcaccaccccguccgccaaggccagcauccugcacgagguccgccccgugacguccggcugcuuccccaucaugcacgaccggaccaagauccgccagcugcccaaccuccugcggggguacgagaacauccgccugagcacccagaacgugaucgacgcggagaaggccccgggcgggcccuaccggcucggcaccuccgggagcugccccaacgccacguccaagaucggcuucuucgccaccauggcgugggccguccccaaggacaacuacaagaacgccaccaacccgcugaccguggaggugcccuacaucugcacggagggcgaggaccagaucaccgucuggggguuccacagcgacaacaagacccagaugaagaaccuguacggcgacuccaacccccagaaguucaccagcuccgccaacggggugacgacccacuacgugagccagaucggcgacuuccccgaccagaccgaggacggcgggcucccgcaguccggccgcaucgucguggacuacaugaugcagaagcccgggaagaccggcacgaucguguaccagcgcgggguccugcugccccagaagguguggugcgccagcggccgguccaaggugaucaagggcagccucccccugaucggggaggcggacugccugcacgagaaguacggcgggcucaacaagagcaagccguacuacaccggcgagcacgccaaggccaucgggaacugccccaucugggucaagacgccccugaagcuggccaacggcaccaaguaccggcccccggccaagcuccugaaggagcgcggcuucuucggggcgaucgccggcuuccuggagggcgggugggaggggaugaucgccggcuggcacggcuacaccucccacggggcccacggcguggccgucgcggccgaccucaagagcacccaggaggccaucaacaagaucaccaagaaccugaacucccugagcgagcucgaggugaagaaccugcagcggcuguccggggccauggacgagcuccacaacgagauccuggagcuggacgagaagguggacgaccuccgcgccgacaccaucagcucccagaucgagcuggcgguccugcucagcaacgagggcaucaucaacuccgaggacgagcaccuccuggcccuggagcggaagcugaagaagaugcugggccccagcgccguggacaucgggaacggcugcuucgagacgaagcacaagugcaaccagaccugccucgaccgcaucgccgcggggaccuucaacgccggcgaguucucccugcccaccuucgacagccugaacaucaccgccgccucccucaacgacgggcuggacaaccacacgauccugcuguacuacagcaccgccgcguccagccucgccgugacccugaugcuggccaucuucaucgucuacauggugucccgggacaacgugagcugcuccaucugccucuga

SEQ ID NO: 92006 - RNA, 1755 nt, Artificial Sequence; identical to SEQ ID NO: 90844
  derived and/or modified CDS sequence (opt1) from hemagglutinin__InfluenzaB__AHL92574

SEQ ID NO: 92007 - RNA, 1755 nt, Artificial Sequence
  derived and/or modified CDS sequence (opt1) from hemagglutinin__InfluenzaB__AHL92585
augaaggccaucaucgugcugcucauggucgugaccagcaacgccgaccgcaucugcaccggcaucacguccagcaacagcccccacguggucaagaccgcgacccagggggaggugaacgugaccggcgucaucccgcugacgaccacccccaccaaguccuacuucgccaaccugaaggggacgcggacccgcggcaagcucugccccgacugccugaacugcaccgaccuggacguggcccucgggcggcccaugugcgugggcgccaccccguccgccaaggcgagcauccugcacgagguccgccccgugacguccggcugcuuccccaucaugcacgaccggaccaagauccgccagcugcccaaccuccugcggggguacgagaacauccgccugagcacccagaacgugaucgacgccgagaaggccccgggcgggcccuaccggcucggcaccuccgggagcugccccaacgccacguccaagagcggcuucuucgcgaccauggccugggccguccccaaggacaacaacaagaacgccaccaacccgcugaccguggaggugcccuacaucugcacggagggcgaggaccagaucaccgucuggggguuccacuccgacaacaagacccagaugaagaaccuguacggcgacagcaacccccagaaguucaccuccagcgccaacggggugacgacccacuacgugucccagaucggcagcuuccccgaccagaccgaggacggcgggcucccgcaguccggccgcaucgucguggacuacaugaugcagaagcccgggaagaccggcacgaucguguaccagcgcgggguccugcugccccagaagguguggugcgcgagcggccggagcaaggugaucaagggcucccucccccugaucggggaggccgacugccugcacgagaaguacggcgggcucaacaagagcaagccguacuacaccggcgagcacgccaaggccaucgggaacugccccaucugggucaagacgccccugaagcuggccaacggcaccaaguaccggcccccggcgaagcuccugaaggagcgcggcuucuucggggccaucgccggcuuccuggagggcgggugggaggggaugaucgccggcuggcacggcuacaccucccacggggcccacggcguggcggucgccgccgaccucaagagcacccaggaggccaucaacaagaucaccaagaaccugaacucccugagcgagcucgaggugaagaaccugcagcggcuguccggggccauggacgagcuccacaacgagauccuggagcuggacgagaagguggacgaccuccgcgcggacaccaucagcucccagaucgagcuggccguccugcucagcaacgagggcaucaucaacuccgaggacgagcaccuccuggcccuggagcggaagcugaagaagaugcugggccccagcgccguggagaucgggaacggcugcuucgagacgaagcacaagugcaaccagaccugccucgaccgcaucgcggccgggaccuucaacgccggcgaguucucccugcccaccuucgacagccugaacaucaccgccgccucccucaacgacgacgggcuggacaaccacacgauccugcuguacuacagcaccgcggccuccagccucgccgugacccugaugcuggccaucuucaucgucuacauggugucccgggacaacgugagcugcagcaucugccucuga

SEQ ID NO: 92008 - RNA, 1755 nt, Artificial Sequence; identical to SEQ ID NO: 90844
  derived and/or modified CDS sequence (opt1) from hemagglutinin__InfluenzaB__AHL92596

SEQ ID NO: 92009 - RNA, 1755 nt, Artificial Sequence; identical to SEQ ID NO: 90591
  derived and/or modified CDS sequence (opt1) from hemagglutinin__InfluenzaB__AHL92607

SEQ ID NO: 92010 - RNA, 1755 nt, Artificial Sequence
  derived and/or modified CDS sequence (opt1) from hemagglutinin__InfluenzaB__AHL92629
augaaggccaucaucgugcugcucauggucgugaccagcaacgccgaccgcaucugcaccggcaucacguccagcaacagcccccacguggucaagaccgcgacccagggggaggugaacgugaccggcgucaucccgcugacgaccacccccgagaaguccuacuucgccaaccugaaggggacccggacgcgcggcaagcucugccccgacugccugaacugcaccgaccuggacguggcccucgggcggcccaugugcgugggcaccaccccguccgccaaggccagcauccugcacgagguccgccccgugacguccggcugcuuccccaucaugcacgaccggaccaagauccgccagcugcccaaccuccugcggggguacgagaacauccgccugagcacccagaacgugaucgacgcggagaaggccccgggcgggcccuaccggcucggcaccuccgggagcugccccaacgccacguccaagaucggcuucuucgccaccauggcgugggccguccccaaggacaacuacaagaacgccaccaacccgcugaccguggaggugcccuacaucugcacggagggcgaggaccagaucaccgucuggggguuccacagcgacaacaagacccagaugaagaaccuguacggcgacuccaacccccagaaguucaccagcuccgccaacggggugacgacccacuacgugagccagaucggcgacuuccccgaccagaccgaggacggcgggcucccgcaguccggccgcaucgucguggacuacaugaugcagaagcccgggaagaccggcacgaucguguaccagcgcgggguccugcugccccagaagguguggugcgccagcggccgguccaaggugaucaagggcagccucccccugaucggggaggcggacugccugcacgagaaguacggcgggcucaacaagagcaagccguacuacaccggcgagcacgccaaggccaucgggaacugccccaucugggucaagacgccccugaagcuggccaacggcaccaaguaccggcccccggccaagcuccugaaggagcgcggcuucuucggggcgaucgccggcuuccuggagggcgggugggaggggaugaucgccggcuggcacggcuacaccucccacggggcccacggcguggccgucgcggccgaccucaagagcacccaggaggccaucaacaagaucaccaagaaccugaacucccugagcgagcucgaggugaagaaccugcagcggcuguccggggccauggacgagcuccacaacgagauccuggagcuggacgagaagguggacgaccuccgcgccgacaccaucagcucccagaucgagcuggcgguccugcucagcaacgagggcaucaucaacuccgaggacgagcaccuccuggcccuggagcggaagcugaagaagaugcugggccccagcgccguggacaucgggaacggcugcuucgagacgaagcacaagugcaaccagaccugccucgaccgcaucgccgcggggaccuucaacgccggcgaguucucccugcccaccuucgacagccugaacaucaccgccgccucccucaacgacgacgggcuggacaaccacacgauccugcuguacuacagcaccgccgcguccagccucgccgugacccugaugcuggccaucuucaucgucuacauggugucccgggacaacgugagcugcuccaucugccucuga

SEQ ID NO: 92011 - RNA, 1755 nt, Artificial Sequence; identical to SEQ ID NO: 90591
  derived and/or modified CDS sequence (opt1) from hemagglutinin__InfluenzaB__AHL92640

SEQ ID NO: 92012 - RNA, 1755 nt, Artificial Sequence; identical to SEQ ID NO: 90591
  derived and/or modified CDS sequence (opt1) from hemagglutinin__InfluenzaB__AHL92651

SEQ ID NO: 92013 - RNA, 1755 nt, Artificial Sequence
  derived and/or modified CDS sequence (opt1) from hemagglutinin__InfluenzaB__AHL92684
augaaggccaucaucgugcugcucauggucgugaccagcaacgccgaccgcaucugcaccggcaucacguccagcaacagcccccacguggucaagaccgcgacccagggggaggugaacgugaccggcgucaucccgcugacgaccacccccaccaaguccuacuucgccaaccugaaggggacgcggacccgcggcaagcucugccccgacugccugaacugcaccgaccuggacguggcccucgggcggcccaugugcgugggcaccacgccguccgccaaggccagcauccugcacgagguccgccccgugaccuccggcugcuuccccaucaugcacgaccggaccaagauccgccagcugcccaaccuccugcggggguacgagaacauccgccugagcacccagaacgugaucgacgcggagaaggccccgggcgggcccuaccggcucggcacguccgggagcugccccaacgccaccuccaagagcggcuucuucgccaccauggcgugggccguccccaaggacaacaacaagaacgccaccaacccgcugacgguggaggugcccuacaucugcaccgagggcgaggaccagaucaccgucuggggguuccacuccgacaacaagacccagaugaagaaccuguacggcgacagcaacccccagaaguucacguccagcgccaacggggugaccacccacuacgugucccagaucggcagcuuccccgaccagaccgaggacggcgggcucccgcaguccggccgcaucgucguggacuacaugaugcagaagcccgggaagacgggcaccaucguguaccagcgcgggguccugcugccccagaagguguggugcgccagcggccggagcaaggugaucaagggcucccucccccugaucggggaggcggacugccugcacgagaaguacggcgggcucaacaagagcaagccguacuacaccggcgagcacgccaaggccaucgggaacugccccaucugggucaagacgccccugaagcuggccaacggcaccaaguaccggcccccggccaagcuccugaaggagcgcggcuucuucggggcgaucgccggcuuccuggagggcgggugggaggggaugaucgccggcuggcacggcuacaccucccacggggcccacggcguggccgucgcggccgaccucaagagcacccaggaggccaucaacaagaucaccaagaaccugaacucccugagcgagcucgaggugaagaaccugcagcggcuguccggggccauggacgagcuccacaacgagauccuggagcuggacgagaagguggacgaccuccgcgccgacacgaucagcucccagaucgagcuggcgguccugcucagcaacgagggcaucaucaacuccgaggacgagcaccuccuggcccuggagcggaagcugaagaagaugcugggccccagcgccguggagaucgggaacggcugcuucgagaccaagcacaagugcaaccagaccugccucgaccgcaucgccgcggggaccuucaacgccggcgaguucucccugcccaccuucgacagccugaacaucacggccgccucccucaacgacgacgggcuggacaaccacaucauccugcuguacuacagcaccgccgcguccagccucgccgugacccugaugcuggccaucuucaucgucuacauggugucccgggacaacgugagcugcagcaucugccucuga

SEQ ID NO: 92014 - RNA, 1755 nt, Artificial Sequence; identical to SEQ ID NO: 90844
  derived and/or modified CDS sequence (opt1) from hemagglutinin__InfluenzaB__AHL92695

SEQ ID NO: 92015 - RNA, 1755 nt, Artificial Sequence; identical to SEQ ID NO: 90844
  derived and/or modified CDS sequence (opt1) from hemagglutinin__InfluenzaB__AHL92706

SEQ ID NO: 92016 - RNA, 1755 nt, Artificial Sequence
  derived and/or modified CDS sequence (opt1) from hemagglutinin__InfluenzaB__AHL92728
augaaggccaucaucgugcugcucauggucgugaccagcaacgccgaccgcaucugcaccggcaucacguccagcaacagcccccacguggucaagaccgcgacccagggggaggugaacgugaccggcgucaucccgcugacgaccacccccaccaaguccuacuucgccaaccugaaggggacgcggacccgcggcaagcucugccccgacugccugaacugcaccgaccuggacguggcccucgggcggcccaugugcgugggcaccacgccguccgccaaggccagcauccugcacgagguccgccccgugaccuccggcugcuuccccaucaugcacgaccggaccaagauccgccagcugcccaaccuccugcggggguacgagaacauccgccugagcacccagaacgugaucgacgcggagaaggccccgggcgggcccuaccggcucggcacguccgggagcugccccaacgccaccuccaagaucggcuucuucgccaccauggcgugggccguccccaaggacaacuacaagaacgccaccaacccgcugacgguggaggugcccuacaucugcaccgagggcgaggaccagaucaccgucuggggguuccacagcgacaacaagacccagaugaagaaccuguacggcgacuccaacccccagaaguucacgagcuccgccaacggggugaccacccacuacgugagccagaucggcgacuuccccgaccagaccgaggacggcgggcucccgcaguccggccgcaucgucguggacuacaugaugcagaagcccgggaagacgggcaccaucguguaccagcgcgggguccugcugccccagaagguguggugcgccagcggccgguccaaggugaucaagggcagccucccccugaucggggaggcggacugccugcacgagaaguacggcgggcucaacaagagcaagccguacuacaccggcaagcacgccaaggccaucgggaacugccccaucugggucaagacgccccugaagcuggccaacggcaccaaguaccggcccccggccaagcuccugaaggagcgcggcuucuucggggcgaucgccggcuuccuggagggcgggugggaggggaugaucgccggcuggcacggcuacaccucccacggggcccacggcguggccgucgcggccgaccucaagagcacccaggaggccaucaacaagaucaccaagaaccugaacucccugagcgagcucgaggugaagaaccugcagcggcuguccggggccauggacgagcuccacaacgagaucaucgagcuggacgagaagguggacgaccugcgcgccgacacgaucagcucccagaucgagcucgcgguccugcugagcaacgagggcaucaucaacuccgaggacgagcaccuccuggcccuggagcggaagcucaagaagaugcugggccccagcgccguggacaucgggaacggcugcuucgagaccaagcacaagugcaaccagaccugccuggaccgcaucgccgcggggaccuucaacgccggcgaguucucccuccccaccuucgacagccugaacaucacggccgccucccugaacgacgacgggcucgacaaccacaccauccugcuguacuacagcaccgccgcguccagccuggccgugacccucaugcuggccaucuucaucgucuacauggugucccgggacaacgugagcugcuccaucugccuguga

SEQ ID NO: 92017 - RNA, 1755 nt, Artificial Sequence; identical to SEQ ID NO: 92016
  derived and/or modified CDS sequence (opt1) from hemagglutinin__InfluenzaB__AHL92739

SEQ ID NO: 92018 - RNA, 1755 nt, Artificial Sequence; identical to SEQ ID NO: 92016
  derived and/or modified CDS sequence (opt1) from hemagglutinin__InfluenzaB__AHL92750

SEQ ID NO: 92019 - RNA, 1755 nt, Artificial Sequence; identical to SEQ ID NO: 90844
  derived and/or modified CDS sequence (opt1) from hemagglutinin__InfluenzaB__AHL92761

SEQ ID NO: 92020 - RNA, 1755 nt, Artificial Sequence
  derived and/or modified CDS sequence (opt1) from hemagglutinin__InfluenzaB__AHL92772
augaaggccaucaucgugcugcucauggucgugaccagcaacgccgaccgcaucugcaccggcaucacguccagcaacagcccccacguggucaagaccgcgacccagggggaggugaacgugaccggcgucaucccgcugacgaccacccccaccaaguccuacuucgccaaccugaaggggacgcggacccgcggcaagcucugccccgacugccugaacugcaccgaccuggacguggcccucgggcggcccaugugcaugggcaccacgccguccgccaaggccagcauccugcacgaggugcgccccgucaccuccggcugcuuccccaucaugcacgaccggaccaagauccgccagcugcccaaccuccugcggggguacgagaacauccgccugagcacccagaacgugaucgacgcggagaaggccccgggcgggcccuaccggcucggcacguccgggagcugccccaacgccaccuccaagaucggcuucuucgccaccauggcgugggccgugcccaaggacaacuacaagaacgccaccaacccgcugacggucgaggugcccuacaucugcaccgagggcgaggaccagaucaccguguggggguuccacagcgacaacaagacccagaugaagaaccuguacggcgacuccaacccccagaaguucacgagcuccgccaacggggucaccacccacuacgugagccagaucggcgacuuccccgaccagaccgaggacggcgggcucccgcaguccggccgcaucguggucgacuacaugaugcagaagcccgggaagacgggcaccaucguguaccagcgcggggugcugcugccccagaaggucuggugcgccagcggccgguccaaggugaucaagggcagccucccccugaucggggaggcggacugccugcacgagaaguacggcgggcucaacaagagcaagccguacuacaccggcgagcacgccaaggccaucgggaacugccccaucugggugaagacgccccugaagcuggccaacggcaccaaguaccggcccccggccaagcuccugaaggagcgcggcuucuucggggcgaucgccggcuuccuggagggcgggugggaggggaugaucgccggcuggcacggcuacaccucccacggggcccacggcgucgccguggcggccgaccucaagagcacccaggaggccaucaacaagaucaccaagaaccugaacucccugagcgagcucgaggucaagaaccugcagcggcuguccggggccauggacgagcuccacaacgagauccuggagcuggacgagaagguggacgaccuccgcgccgacacgaucagcucccagaucgagcuggcggugcugcucagcaacgagggcaucaucaacuccgaggacgagcaccuccuggcccuggagcggaagcugaagaagaugcugggccccagcgccgucgacaucgggaacggcugcuucgagaccaagcacaagugcaaccagaccugccucgaccgcaucgccgcggggaccuucaacgccggcgaguucucccugcccaccuucgacagccugaacaucacggccgccucccucaacgacgacgggcuggacaaccacaccauccugcuguacuacagcaccgccgcguccagccucgccgugacccugaugcuggccaucuucaucguguacauggucucccgggacaacgugagcugcuccaucugccucuga

SEQ ID NO: 92021 - RNA, 1755 nt, Artificial Sequence; identical to SEQ ID NO: 90844
  derived and/or modified CDS sequence (opt1) from hemagglutinin__InfluenzaB__AHL92794

SEQ ID NO: 92022 - RNA, 1755 nt, Artificial Sequence; identical to SEQ ID NO: 90844
  derived and/or modified CDS sequence (opt1) from hemagglutinin__InfluenzaB__AHL92805

SEQ ID NO: 92023 - RNA, 1755 nt, Artificial Sequence; identical to SEQ ID NO: 90844
  derived and/or modified CDS sequence (opt1) from hemagglutinin__InfluenzaB__AHL92816

SEQ ID NO: 92024 - RNA, 1755 nt, Artificial Sequence
  derived and/or modified CDS sequence (opt1) from hemagglutinin__InfluenzaB__AHL92827
augaaggccaucaucgugcugcucauggucgugaccagcaacgccgaccgcaucugcaccggcaucacguccagcaacagcccccacguggucaagaccgcgacccagggggaggugaacgugaccggcgucaucccgcugacgaccacccccaccaaguccuacuucgccaaccugaaggggacgcggacccgcggcaagcucugccccgacugccugaacugcaccgaccuggacguggcccucgggcggcccaugugcgugggcaccacgccguccgccaaggccagcauccugcacgagguccgccccgugaccuccggcugcuuccccaucaugcacgaccggaccaagauccgccagcugcccaaccuccugcggggguacgagaacauccgccugagcacccagaacgugaucgacgcggagaaggccccgggcgggcccuaccggcucggcacguccgggagcugccccaacgccaccuccaagaucggcuucuucgccaccauggcgugggccguccccaaggacaacuacaagaacgccaccaacccgcugacgguggaggugcccuacaucugcaccgagggcgaggaccagaucaccgucuggggguuccacagcgacaacaagacccagaugaagaaccuguacggcgacuccaacccccagaaguucacgagcuccgccaacggggugaccacccacuacgugagccagaucggcgacuuccccgaccagaccgaggacggcgggcucccgcaguccggccgcaucgucguggacuacaugaugcagaagcccgggaagacgggcaccaucguguaccagcgcgggguccugcugccccagaagguguggugcgccagcggccgguccaaggugaucaagggcagccucccccugaucggggaggcggacugccugcacgagaaguacggcgggcucaacaagagcaagccguacuacaccggcgagcacgccaaggccaucgggaacugccccaucugggucaagacgccccugaagcuggccaacggcaccaaguaccggcccccggccaagcuccugaaggagcgcggcuucuucggggcgaucgccggcuuccuggagggcgggugggaggggaugaucgccggcuggcacggcuacaccucccacggggcccacggcguggccgucgcggccgaccucaagagcacccaggaggccaucaacaagaucaccaagaaccugaacucccugagcgagcucgaggugaagaaccugcagcggcuguccggggccauggacgagcuccacaacgagauccuggagcuggacgagaagguggacgaccuccgcgccgacacgaucagcucccagaucgagcuggcgguccugcucagcaacgagggcaucaucaacuccgaggacgagcaccuccuggcccuggagcggaagcugaagaagaugcugggccccagcgccguggacaucgggaacggcugcuucgagaccaagcacaagugcaaccagaccugccucgaccgcaucgccgcggggaccuucaacgccggcgaguucucccugcccaccuucgacagccugaacaucacggccgccucccucaacgacgacgggcuggacaaccacaccauccugcuguacuacagcaccgccgcguccagccucgccgugacccugaugcuggccaucuucgucguguacauggugucccgggacaacgucagcugcuccaucugccucuga

SEQ ID NO: 92025 - RNA, 1755 nt, Artificial Sequence; identical to SEQ ID NO: 90844
  derived and/or modified CDS sequence (opt1) from hemagglutinin__InfluenzaB__AHL92838

SEQ ID NO: 92026 - RNA, 1755 nt, Artificial Sequence; identical to SEQ ID NO: 90844
  derived and/or modified CDS sequence (opt1) from hemagglutinin__InfluenzaB__AHL92849

SEQ ID NO: 92027 - RNA, 1755 nt, Artificial Sequence; identical to SEQ ID NO: 90844
  derived and/or modified CDS sequence (opt1) from hemagglutinin__InfluenzaB__AHL92860

SEQ ID NO: 92028 - RNA, 1758 nt, Artificial Sequence; identical to SEQ ID NO: 90662
  derived and/or modified CDS sequence (opt1) from hemagglutinin__InfluenzaB__AHL92871

SEQ ID NO: 92029 - RNA, 1755 nt, Artificial Sequence; identical to SEQ ID NO: 90450
  derived and/or modified CDS sequence (opt1) from hemagglutinin__InfluenzaB__AHL92882

SEQ ID NO: 92030 - RNA, 1758 nt, Artificial Sequence
  derived and/or modified CDS sequence (opt1) from hemagglutinin__InfluenzaB__AHL92893
augaaggccaucaucgugcugcucauggucgugaccagcaacgccgaccgcaucugcaccggcaucacguccagcaacagcccccacguggucaagaccgcgacccagggggaggugaacgugaccggcgucaucccgcugacgaccacccccaccaagagccacuucgccaaccugaaggggacgaagacccggggcaagcucugccccaagugccugaacugcaccgaccuggacguggcccucgggcgccccaagugcaccggcaacaucccguccgccgaggugagcauccugcacgagguccggcccgugacguccggcugcuuccccaucaugcacgaccgcaccaagauccggcagcugcccaaccuccugcgcggguacgagcacauccggcugagcacccacaacgugaucaacgccgagaaggcgccgggcgggcccuacaagaucggcaccuccgggagcugccccaacgucacgaacggcaacggcuucuucgccaccauggccugggccgugcccaagaacgacaacaacaagaccgcgaccaacucccucacgaucgaggugccguacaucugcaccgagggggaggaccagaucaccaucuggggcuuccacagcgacaaggagacccagauggccaagcuguacggggacuccaagccccagaaguucacgagcuccgccaacggcgucaccacccacuacgugagccagaucggcggguuccccaaccagaccgaggacggcgggcugccccaguccggccgcaucguggucgacuacauggugcagaaguccgggaagacgggcaccaucaccuaccagcggggcauccuccugccgcagaagguguggugcgccuccgggcgcagcaaggucaucaagggcagccugccccucaucggggaggccgacugccugcacgagaaguacggcgggcugaacaaguccaagcccuacuacaccggcgagcacgcgaaggccaucggcaacugccccaucugggugaagacgccgcucaagcuggccaacgggaccaaguaccggccgcccgccaagcugcucaaggagcgcggcuucuucggggccaucgcgggcuuccuggagggcgggugggagggcaugaucgccggguggcacggcuacaccagccacggggcccacggcguggccgucgccgcggaccugaaguccacccaggaggccaucaacaagaucacgaagaaccucaacagccuguccgagcuggaggugaagaaccuccagcggcugagcggcgccauggacgagcugcacaacgagauccucgagcuggacgagaaggucgacgaccugcgcgccgacaccaucuccagccagaucgagcucgccgugcugcuguccaacgaggggaucaucaacagcgaggacgagcaccuccuggcgcuggagcggaagcucaagaagaugcugggccccuccgccguggagaucgggaacggcugcuucgagaccaagcacaagugcaaccagaccugccuggaccgcaucgccgccgggaccuucgacgcgggcgaguucagccuccccacguucgacucccugaacaucaccgccgccagccugaacgacgacggccucgacaaccacaccauccugcuguacuacuccaccgccgccagcucccuggcggucacgcucaugaucgccaucuucaucguguacauggugagccgggacaacgucuccugcagcaucugccuguga

SEQ ID NO: 92031 - RNA, 1755 nt, Artificial Sequence; identical to SEQ ID NO: 91047
  derived and/or modified CDS sequence (opt1) from hemagglutinin__InfluenzaB__AHL92904

SEQ ID NO: 92032 - RNA, 1758 nt, Artificial Sequence
  derived and/or modified CDS sequence (opt1) from hemagglutinin__InfluenzaB__AHL92915
augaaggccaucaucgugcugcucauggucgugaccagcaacgccgaccgcaucugcaccggcaucacguccagcaacagcccccacguggucaagaccgcgacccagggggaggugaacgugaccggcgucaucccgcugacgaccacccccaccaagagccacuucgccaaccugaaggggacgaagacccggggcaagcucugccccaagugccugaacugcaccgaccuggacguggcccucgggcgccccaagugcaccggcaacaucccguccgccgaggugagcauccugcacgagguccggcccgugacguccggcugcuuccccaucaugcacgaccgcaccaagauccggcagcugcccaaccuccugcgcggguacgagcacauccggcugagcacccacaacgugaucaacgccgagaaggcgccgggcgggcccuacaagaucggcaccuccgggagcugccccaacgucacgaacggcaacggcuucuucgccaccauggccugggccgugcccaagaacgacaacaacaagaccgcgaccaacucccucacgaucgaggugccguacaucugcaccgagggggaggaccagaucaccaucuggggcuuccacagcgacaacgagacccagauggccaagcuguacggggacuccaagccccagaaguucacgagcuccgccaacggcgucaccacccacuacgugagccagaucggcggguuccccaaccagaccgaggacggcgggcugccccaguccggccgcaucguggucgacuacauggugcagaaguccgggaagacgggcaccaucaccuaccagcggggcauccuccugccgcagaagguguggugcgccuccgggcgcagcaaggucaucaagggcagccugccccucaucggggaggccgacugccugcacgagaaguacggcgggcugaacaaguccaagcccuacuacaccggcgagcacgcgaaggccaucggcaacugccccaucugggugaagacgccgcucaagcuggccaacgggaccaaguaccggccgcccgccaagcugcucaaggagcgcggcuucuucggggccaucgcgggcuuccuggagggcgggugggagggcaugaucgccggguggcacggcuacaccagccacggggcccacggcguggccgucgccgcggaccugaaguccacccaggaggccaucaacaagaucacgaagaaccucaacagccuguccgagcuggaggugaagaaccuccagcggcugagcggcgccauggacgagcugcacaacgagauccucgagcuggacgagaaggucgacgaccugcgcgccgacaccaucuccagccagaucgagcucgccgugcugcuguccaacgaggggaucaucaacagcgaggacgagcaccuccuggcgcuggagcggaagcucaagaagaugcugggccccuccgccguggagaucgggaacggcugcuucgagaccaagcacaagugcaaccagaccugccuggaccgcaucgccgccgggaccuucgacgcgggcgaguucagccuccccacguucgacucccugaacaucaccgccgccagccugaacgacgacggccucgacaaccacaccauccugcuguacuacuccaccgccgccagcucccuggcggucacgcucaugaucgccaucuucaucguguacauggugagccgggacaacgucuccugcagcaucugccuguga

SEQ ID NO: 92033 - RNA, 1758 nt, Artificial Sequence; identical to SEQ ID NO: 90662
  derived and/or modified CDS sequence (opt1) from hemagglutinin__InfluenzaB__AHL92926

SEQ ID NO: 92034 - RNA, 1755 nt, Artificial Sequence; identical to SEQ ID NO: 91623
  derived and/or modified CDS sequence (opt1) from hemagglutinin__InfluenzaB__AHL92937

SEQ ID NO: 92035 - RNA, 1758 nt, Artificial Sequence; identical to SEQ ID NO: 90538
  derived and/or modified CDS sequence (opt1) from hemagglutinin__InfluenzaB__AHL92948

SEQ ID NO: 92036 - RNA, 1758 nt, Artificial Sequence; identical to SEQ ID NO: 90538
  derived and/or modified CDS sequence (opt1) from hemagglutinin__InfluenzaB__AHL92959

SEQ ID NO: 92037 - RNA, 1758 nt, Artificial Sequence; identical to SEQ ID NO: 90538
  derived and/or modified CDS sequence (opt1) from hemagglutinin__InfluenzaB__AHL92970

SEQ ID NO: 92038 - RNA, 1758 nt, Artificial Sequence; identical to SEQ ID NO: 90538
  derived and/or modified CDS sequence (opt1) from hemagglutinin__InfluenzaB__AHL92981

SEQ ID NO: 92039 - RNA, 1758 nt, Artificial Sequence; identical to SEQ ID NO: 90538
  derived and/or modified CDS sequence (opt1) from hemagglutinin__InfluenzaB__AHL92992

SEQ ID NO: 92040 - RNA, 1758 nt, Artificial Sequence; identical to SEQ ID NO: 91963
  derived and/or modified CDS sequence (opt1) from hemagglutinin__InfluenzaB__AHL93004

SEQ ID NO: 92041 - RNA, 1758 nt, Artificial Sequence; identical to SEQ ID NO: 90538
  derived and/or modified CDS sequence (opt1) from hemagglutinin__InfluenzaB__AHL93015

SEQ ID NO: 92042 - RNA, 1758 nt, Artificial Sequence; identical to SEQ ID NO: 90538
  derived and/or modified CDS sequence (opt1) from hemagglutinin__InfluenzaB__AHL93026

SEQ ID NO: 92043 - RNA, 1755 nt, Artificial Sequence; identical to SEQ ID NO: 91987
  derived and/or modified CDS sequence (opt1) from hemagglutinin__InfluenzaB__AHL93037

SEQ ID NO: 92044 - RNA, 1755 nt, Artificial Sequence; identical to SEQ ID NO: 91987
  derived and/or modified CDS sequence (opt1) from hemagglutinin__InfluenzaB__AHL93048

SEQ ID NO: 92045 - RNA, 1755 nt, Artificial Sequence; identical to SEQ ID NO: 92016
  derived and/or modified CDS sequence (opt1) from hemagglutinin__InfluenzaB__AHL93059

SEQ ID NO: 92046 - RNA, 1755 nt, Artificial Sequence; identical to SEQ ID NO: 90844
  derived and/or modified CDS sequence (opt1) from hemagglutinin__InfluenzaB__AHL93070

SEQ ID NO: 92047 - RNA, 1755 nt, Artificial Sequence
  derived and/or modified CDS sequence (opt1) from hemagglutinin__InfluenzaB__AHL93081
augaaggccaucaucgugcugcucauggucgugaccagcaacgccgaccgcaucugcaccggcaucacguccagcaacagcccccacguggucaagaccgcgacccagggggaggugaacgugaccggcgucaucccgcugacgaccacccccaccaaguccuacuucgccaaccugaaggggacgcggacccgcggcaagcucugccccgacugccugaacugcaccgaccuggacguggcccucgggcggcccaugugcgugggcaccacgccguccgccaaggccagcauccugcacgagguccgccccgugaccuccggcugcuuccccaucaugcacgaccggaccaagauccgccagcugcccaaccuccugcggggguacgagaacauccgccugagcacccagaacgugaucgacgcggagaaggccccgggcgggcccuaccggcucggcacguccgggagcugccccaacgccaccuccaagaucggcuucuucgccaccauggcgugggccguccccaaggacaacuacaagaacgccaccaacccgcugacgguggaggugcccuacaucugcaccgagggcgaggaccagaucaccgucuggggguuccacagcgacaacaagacccagaugaagaaccuguacggcgacuccaacccccagaaguucacgagcuccgccaacggggugaccacccacuacgugagccagaucggcgacuuccccgaccagaccgaggacggcgggcucccgcaguccggccgcaucgucguggacuacaugaugcagaagcccgggaagacgggcaccaucguguaccagcgcgggguccugcugccccagaagguguggugcgccagcggccgguccaaggugaucaagggcagccucccccugaucggggaggcggacugccugcacgagaaguacggcgggcucaacaagagcaagccguacuacaccggcgagcacgccaaggccaucgggaacugccccaucugggucaagacgccccugaagcuggccaacggcaccaaguaccggcccccggccaagcuccugaaggagcgcggcuucuucggggcgaucgccggcuuccuggagggcgggugggaggggaugaucgccggcuggcacggcuacaccucccacggggcccacggcguggccgucgcggccgaccucaagagcacccaggaggccaucaacaagaucaccaagaaccugaacucccugagcgagcucgaggugaagaaccugcagcggcuguccggggccauggacgagcuccacaacgagauccuggagcuggacggcaagguggacgaccuccgcgccgacacgaucagcucccagaucgagcuggcgguccugcucagcaacgagggcaucaucaacuccgaggacgagcaccuccuggcccuggagcggaagcugaagaagaugcuggggcccagcgccguggacaucggcaacgggugcuucgagaccaagcacaagugcaaccagaccugccucgaccgcaucgccgcgggcaccuucaacgccggggaguucucccugcccaccuucgacagccugaacaucacggccgccucccucaacgacgacggccuggacaaccacaccauccugcuguacuacagcaccgccgcguccagccucgccgugacccugaugcuggccaucuucaucgucuacauggugucccgggacaacgugagcugcuccaucugccucuga

SEQ ID NO: 92048 - RNA, 1755 nt, Artificial Sequence; identical to SEQ ID NO: 90844
  derived and/or modified CDS sequence (opt1) from hemagglutinin__InfluenzaB__AHL93092

SEQ ID NO: 92049 - RNA, 1755 nt, Artificial Sequence; identical to SEQ ID NO: 90844
  derived and/or modified CDS sequence (opt1) from hemagglutinin__InfluenzaB__AHL93103

SEQ ID NO: 92050 - RNA, 1755 nt, Artificial Sequence; identical to SEQ ID NO: 90844
  derived and/or modified CDS sequence (opt1) from hemagglutinin__InfluenzaB__AHL93114

SEQ ID NO: 92051 - RNA, 1755 nt, Artificial Sequence; identical to SEQ ID NO: 90591
  derived and/or modified CDS sequence (opt1) from hemagglutinin__InfluenzaB__AHL93125

SEQ ID NO: 92052 - RNA, 1755 nt, Artificial Sequence
  derived and/or modified CDS sequence (opt1) from hemagglutinin__InfluenzaB__AHL93136
augaaggccaucaucgugcugcucauggucgugaccagcaacgccgaccgcaucugcaccggcaucacguccagcaacagcccccacguggucaagaccgcgacccagggggaggugaacgugaccggcgucaucccgcugacgaccacccccaccaaguccuacuucgccaaccugaaggggacgcggacccgcggcaagcucugccccgacugccugaacugcaccgaccuggacguggcccucgggcggcccaugugcgugggcaccacgccguccgccaaggccagcauccugcacgagguccgccccgugaccuccggcugcuuccccaucaugcacgaccggaccaagauccgccagcugcccaaccuccugcggggguacgagaacauccgccugagcacccagaacgugaucgacgcggagaaggccccgggcgggcccuaccggcucggcacguccgggagcugccccaacgccaccuccaagaucggcuucuucgccaccauggcgugggccguccccaaggacaacuacaagaacgccaccaacccgcugacgguggaggugcccuacaucugcaccgagggcgaggaccagaucaccgucuggggguuccacagcgacaacaagacccagaugaagaaccuguacggcgacuccaacccccagaaguucacgagcuccgccaacggggugaccacccacuacgugagccagaucggcgacuuccccgaccagaccgaggacggcgggcucccgcaguccggccgcaucgucguggacuacaugaugcagaagcccgggaagacgggcaccaucguguaccagcgcgggguccugcugccccagcgcguguggugcgccagcggccgguccaaggugaucaagggcagccucccccugaucggggaggcggacugccugcacgagaaguacggcgggcucaacaagagcaagccguacuacaccggcgagcacgccaaggccaucgggaacugccccaucugggucaagacgccccugaagcuggccaacggcaccaaguaccggcccccggccaagcuccugaaggagcggggcuucuucggggcgaucgccggcuuccuggagggcgggugggaggggaugaucgccggcuggcacggcuacaccucccacggggcccacggcguggccgucgcggccgaccucaagagcacccaggaggccaucaacaagaucaccaagaaccugaacucccugagcgagcucgaggugaagaaccugcagcgccuguccggggccauggacgagcuccacaacgagauccuggagcuggacgagaagguggacgaccuccgggccgacacgaucagcucccagaucgagcuggcgguccugcucagcaacgagggcaucaucaacuccgaggacgagcaccuccuggcccuggagcgcaagcugaagaagaugcugggccccagcgccguggacaucgggaacggcugcuucgagaccaagcacaagugcaaccagaccugccucgaccggaucgccgcggggaccuucaacgccggcgaguucucccugcccaccuucgacagccugaacaucacggccgccucccucaacgacgacgggcuggacaaccacaccauccugcuguacuacagcaccgccgcguccagccucgccgugacccugaugcuggccaucuucaucgucuacauggugucccgcgacaacgugagcugcuccaucugccucuga

SEQ ID NO: 92053 - RNA, 1755 nt, Artificial Sequence; identical to SEQ ID NO: 90591
  derived and/or modified CDS sequence (opt1) from hemagglutinin__InfluenzaB__AHL93147

SEQ ID NO: 92054 - RNA, 1755 nt, Artificial Sequence; identical to SEQ ID NO: 90844
  derived and/or modified CDS sequence (opt1) from hemagglutinin__InfluenzaB__AHL93158

SEQ ID NO: 92055 - RNA, 1755 nt, Artificial Sequence
  derived and/or modified CDS sequence (opt1) from hemagglutinin__InfluenzaB__AHL93169
augaaggccaucaucgugcugcucauggucgugaccagcaacgccgaccgcaucugcaccggcaucacguccagcaacagcccccacguggucaagaccgcgacccagggggaggugaacgugaccggcgucaucccgcugacgaccacccccaccaagagcuacuucgccaaccugaaggggacgcggacccgcggcaagcucugccccgacugcuucaacugcaccgaccuggacguggcccuggggcggcccaugugcgugggcaccacgccguccgccaaggccagcauccuccacgagguccgccccgugaccuccggcugcuuccccaucaugcacgaccggaccaagauccgccagcugcccaaccugcuccggggguacgagaacauccgccugagcacccagaacgugaucgacgcggagaaggccccgggcgggcccuaccggcugggcacguccgggagcugccccaacgccaccuccaagaucggcuucuucgccaccauggcgugggccguccccaaggacaacuacaagaacgccaccaacccgcucacgguggaggugcccuacaucugcaccgagggcgaggaccagaucaccgucuggggguuccacagcgacaacaagacccagaugaagaaccuguacggcgacuccaacccccagaaguucacgagcuccgccaacggggugaccacccacuacgugagccagaucggcgacuuccccgaccagaccgaggacggcgggcugccgcaguccggccgcaucgucguggacuacaugaugcagaagcccgggaagacgggcaccaucguguaccagcgcgggguccuccugccccagaagguguggugcgccagcggccgguccaaggugaucaagggcagccugccccucaucggggaggcggacugccugcacgagaaguacggcgggcugaacaagagcaagccguacuacaccggcgagcacgccaaggccaucgggaacugccccaucugggucaagacgccccucaagcuggccaacggcaccaaguaccggcccccggccaagcugcucaaggagcgcggcuucuucggggcgaucgccggcuuccuggagggcgggugggaggggaugaucgccggcuggcacggcuacaccucccacggggcccacggcguggccgucgcggccgaccugaaguccacccaggaggccaucaacaagaucaccaagaaccucaacucccugagcgagcuggaggugaagaaccuccagcggcuguccggggccauggacgagcugcacaacgagauccucgagcuggacgagaagguggacgaccugcgcgccgacacgaucagcucccagaucgagcucgcgguccugcugagcaacgagggcaucaucaacuccgaggacgagcaccuccuggcccuggagcggaagcucaagaagaugcugggccccagcgccguggacaucgggaacggcugcuucgagaccaagcacaagugcaaccagaccugccuggaccgcaucgccgcggggaccuucaacgccggcgaguucucccuccccaccuucgacagccugaacaucacggccgccucccugaacgacgacgggcucgacaaccacaccauccugcuguacuacagcaccgccgcguccagccuggccgugacccucaugcuggccaucuucaucgucuacauggugucccgggacaacgugagcugcuccaucugccuguga

SEQ ID NO: 92056 - RNA, 1755 nt, Artificial Sequence
  derived and/or modified CDS sequence (opt1) from hemagglutinin__InfluenzaB__AHL93180
augaaggccaucaucgugcugcucauggucgugaccagcaacgccgaccgcaucugcaccggcaucacguccagcaacagcccccacguggucaagaccgcgacccagggggaggugaacgugaccggcgucaucccgcugacgaccacccccaccaaguccuacuucgccaaccugaaggggacgcggacccgcggcaagcucugccccgacugccugaacugcaccgaccuggacguggcccucgggcggcccaugugcgugggcaccacgccguccgccaaggccagcauccugcacgagguccgccccgugaccuccggcugcuuccccaucauccacgaccggaccaagauccgccagcugcccaaccuccugcggggguacgagaacauccgccugagcacccagaacgugaucgacgcggagaaggccccgggcgggcccuaccggcucggcacguccgggagcugccccaacgccaccuccaagagcggcuucuucgccaccauggcgugggccguccccaaggacaacaacaagaacgccaccaacccgcugacgguggaggugcccuacaucugcaccgagggcgaggaccagaucaccgucuggggguuccacuccgacaacaagacccagaugaagaaccuguacggcgacagcaacccccagaaguucacguccagcgccaacggggugaccacccacuacgugucccagaucggcagcuuccccgaccagaccgaggacggcgggcucccgcaguccggccgcaucgucguggacuacaugaugcagaagcccgggaagacgggcaccaucguguaccagcgcgggguccugcugccccagcgcguguggugcgccagcggccggagcaaggugaucaagggcucccucccccugaucggggaggcggacugccugcacgagaaguacggcgggcucaacaagagcaagccguacuacaccggcgagcacgccaaggccaucgggaacugccccaucugggucaagacgccccugaagcuggccaacggcaccaaguaccggcccccggccaagcuccugaaggagcggggcuucuucggggcgaucgccggcuuccuggagggcgggugggaggggaugaucgccggcuggcacggcuacaccucccacggggcccacggcguggccgucgcggccgaccucaagagcacccaggaggccaucaacaagaucaccaagaaccugaacucccugagcgagcucgaggugaagaaccugcagcgccuguccggggccauggacgagcuccacaacgagauccuggagcuggacgagaagguggacgaccuccgggccgacacgaucagcucccagaucgagcuggcgguccugcucagcaacgagggcaucaucaacuccgaggacgagcaccuccuggcccuggagcgcaagcugaagaagaugcugggccccagcgccguggagaucgggaacggcugcuucgagaccaagcacaagugcaaccagaccugccucgaccggaucgccgcggggaccuucaacgccggcgaguucucccugcccaccuucgacagccugaacaucacggccgccucccucaacgacgacgggcuggacaaccacaccauccugcuguacuacagcaccgccgcguccagccucgccgugacccugaugcuggccaucuucaucgucuacauggugucccgcgacaacgugagcugcagcaucugccucuga

SEQ ID NO: 92057 - RNA, 1755 nt, Artificial Sequence
  derived and/or modified CDS sequence (opt1) from hemagglutinin__InfluenzaB__AHL93191
augaaggccaucaucgugcugcucauggucgugaccagcaacgccgaccgcaucugcaccggcaucacguccagcaacagcccccacguggucaagaccgcgacccagggggaggugaacgugaccggcgucaucccgcugacgaccacccccaccaaguccuacuucgccaaccugaaggggacgcggacccgcggcaagcucugccccgacugccugaacugcaccgaccuggacguggcccucgggcggcccaugugcgugggcaccacgccguccgccaaggccagcauccugcacgagguccgccccgugaccuccggcugcuuccccaucaugcacgaccggaccaagauccgccagcugcccaaccuccugcggggguacgagaacauccgccugagcacccagaacgugaucgacgcggagaaggccccgggcgggcccuaccggcucggcacguccgggagcugccccaacgacaccuccaagaucggcuucuucgccaccauggccugggcgguccccaaggacaacuacaagaacgccaccaacccgcugacgguggaggugcccuacaucugcaccgagggcgaggaccagaucaccgucuggggguuccacagcgacaacaagacccagaugaagaaccuguacggcgacuccaacccccagaaguucacgagcuccgccaacggggugaccacccacuacgugagccagaucggcgacuuccccgaccagaccgaggacggcgggcucccgcaguccggccgcaucgucguggacuacaugaugcagaagcccgggaagacgggcaccaucguguaccagcgcgggguccugcugccccagaagguguggugcgccagcggccgguccaaggugaucaagggcagccucccccugaucggggaggccgacugccugcacgagaaguacggcgggcucaacaagagcaagccguacuacaccggcgagcacgcgaaggccaucgggaacugccccaucugggucaagacgccccugaagcuggccaacggcaccaaguaccggcccccggccaagcuccugaaggagcgcggcuucuucggggccaucgcgggcuuccuggagggcgggugggaggggaugaucgccggcuggcacggcuacaccucccacggggcccacggcguggccgucgccgcggaccucaagagcacccaggaggccaucaacaagaucaccaagaaccugaacucccugagcgagcucgaggugaagaaccugcagcggcuguccggggccauggacgagcuccacaacgagauccuggagcuggacgagaagguggacgaccuccgcgccgacacgaucagcucccagaucgagcuggccguccugcucagcaacgagggcaucaucaacuccgaggacgagcaccuccuggcgcuggagcggaagcugaagaagaugcugggccccagcgccguggacaucgggaacggcugcuucgagaccaagcacaagugcaaccagaccugccucgaccgcaucgccgccgggaccuucaacgcgggcgaguucucccugcccaccuucgacagccugaacaucacggccgccucccucaacgacgacgggcuggacaaccacaccauccugcuguacuacagcaccgccgccuccagccucgcggugacccugaugcuggccaucuucaucgucuacauggugucccgggacaacgugagcugcuccaucugccucuga

SEQ ID NO: 92058 - RNA, 1755 nt, Artificial Sequence
  derived and/or modified CDS sequence (opt1) from hemagglutinin__InfluenzaB__AHL93202
augaaggccaucaucgugcugcucauggucgugaccagcaacgccgaccgcaucugcaccggcaucacguccagcaacagcccccacguggucaagaccgcgacccagggggaggugaacgugaccggcgucaucccgcugacgaccacccccaccaaguccuacuucgccaaccugaaggggacgcggacccgcggcaagcucugccccgacugccugaacugcaccgaccuggacguggcccucgggcggcccaugugcgugggcaccacgccguccgccaaggccagcauccugcacgagguccgccccgugaccuccggcugcuuccccaucaugcacgaccggaccaagauccgccagcugcccaaccuccugcggggguacgagaacauccgccugagcacccagaacgugaucgacgcggagaaggccccgggcgggcccuaccggcucggcacguccgggagcugccccaacgccaccuccaagaucggcuucuucgccaccauggcgugggccguccccaaggacaacuacaagaacgccaccaacccgcugacgguggaggugcccuacaucugcaccgagggcgaggaccagaucaccgucuggggguuccacagcgacaacaagacccagaugaagaaccuguacggcgacuccaacccccagaaguucacgagcuccgccaacggggugaccacccacuacgugagccagaucggcgacuuccccgaccagaccgaggacggcgggcucccgcaguccggccgcaucgucguggacuacaugaugcagaagcccgggaagacgggcaccaucguguaccagcgcgggguccugcugccccagaagguguggugcgccagcggccgguccaaggugaucaagggcagccucccccugaucggggaggcggacugccugcacgagaaguacggcgggcucaacaagagcaagccguacuacaccggcgagcacgccaaggccaucgggaacugccccaucugggucaagacgccccugaagcuggccaacggcaccaaguaccggcccccggccaagcuccugaaggagcgcggcuucuucggggcgaucgccggcuuccuggagggcgggugggaggggaugaucgccggcuggcacggcuacaccucccacggggcccacggcguggccgucgcggccgaccucaagagcacccaggaggccaucaacaagaucaccaagaaccugaacucccugagcgagcucgaggugaagaaccugcagcggcuguccggggccauggacgaguuccacaacgagauccucgagcuggacgagaagguggacgaccugcgcgccgacacgaucagcucccagaucgagcucgcgguccugcugagcaacgagggcaucaucaacuccgaggacgagcaccuccuggcccuggagcggaagcucaagaagaugcugggccccagcgccguggacaucgggaacggcugcuucgagaccaagcacaagugcaaccagaccugccuggaccgcaucgccgcggggaccuucaacgccggcgaguucucccuccccaccuucgacagccugaacaucacggccgccucccugaacgacgacgggcucgacaaccacaccauccugcuguacuacagcaccgccgcguccagccuggccgugacccucaugcuggccaucuucaucgucuacauggugucccgggacaacgugagcugcuccaucugccuguga

SEQ ID NO: 92059 - RNA, 1758 nt, Artificial Sequence; identical to SEQ ID NO: 91013
  derived and/or modified CDS sequence (opt1) from hemagglutinin__InfluenzaB__AHL93213

SEQ ID NO: 92060 - RNA, 1758 nt, Artificial Sequence; identical to SEQ ID NO: 91013
  derived and/or modified CDS sequence (opt1) from hemagglutinin__InfluenzaB__AHL93224

SEQ ID NO: 92061 - RNA, 1758 nt, Artificial Sequence
  derived and/or modified CDS sequence (opt1) from hemagglutinin__InfluenzaB__AHL93235
augaaggccaucaucgugcugcucauggucgugaccagcaacgccgaccgcaucugcaccggcaucacguccagcaacagcccccacguggucaagaccgcgacccagggggaggugaacgugaccggcgucaucccgcugacgaccacccccaccaagagccacuucgccaaccugaaggggacggagacccggggcaagcucugccccaagugccccaacugcaccgaccuggacguggcccuggggcgcccgaagugcaccggcaagauccccuccgcccgggugagcauccuccacgagguccgccccgugacguccggcugcuuccccaucaugcacgaccggaccaagauccgccagcugccgaaccugcuccggggguacgagcacauccgccugagcacccacaacgugaucaacgccgagaacgcgcccggcgggcccuacaagaucggcaccuccgggagcugccccaacgucacgaacggcaacggcuucuucgccaccauggccugggccgugccgaagaacgacaagaacaagaccgcgaccaacccccugacgaucgaggugcccuacaucugcaccgagggggaggaccagaucaccgucuggggcuuccacuccgacaacgagacccagauggccaagcucuacggggacagcaagccccagaaguucacguccagcgccaacggcgugaccacccacuacgugucccagaucggcggguucccgaaccagaccgaggacggcgggcugccccagagcggccggaucgucguggacuacauggugcagaaguccgggaagacgggcaccaucaccuaccagcgcggcauccugcucccccagaaggucuggugcgccagcgggcgguccaaggugaucaagggcagccugccccugaucggggaggccgacugccuccacgagaaguacggcgggcugaacaagagcaagccguacuacaccggcgagcacgcgaaggccaucggcaacugccccaucugggugaagacgccccugaagcucgccaacgggaccaaguaccggcccccggccaagcugcugaaggagcgcggcuucuucggggccaucgcgggcuuccucgagggcgggugggagggcaugaucgccggguggcacggcuacaccucccacggggcccacggcgucgccguggccgcggaccugaaguccacccaggaggccaucaacaagaucacgaagaaccugaacucccucagcgagcuggaggucaagaaccugcagcgccucuccggcgccauggacgagcugcacaacgagauccuggagcucgacgagaagguggacgaccugcgggccgacaccaucagcucccagaucgagcuggccgugcuccugagcaacgaggggaucaucaacuccgaggacgagcaccuccuggcgcuggagcgcaagcugaagaagaugcucggccccagcgccgucgagaucgggaacggcugcuucgagaccaagcacaagugcaaccagaccugccuggaccggaucgccgccgggaccuucgacgcgggcgaguucucccugcccacguucgacagccucaacaucaccgccgccucccugaacaacgacggccuggacaaccacaccauccuccuguacuacagcaccgccgccuccagccuggcggugacgcugaugaucgccaucuucguggucuacauggugucccgcgacaacgugagcugcuccaucugccucuga

SEQ ID NO: 92062 - RNA, 1758 nt, Artificial Sequence
  derived and/or modified CDS sequence (opt1) from hemagglutinin__InfluenzaB__AHL93246
augaaggccaucaucgugcugcucauggucgugaccagcaacgccgaccgcaucugcaccggcaucacguccagcaacagcccccacguggucaagaccgcgacccagggggaggugaacgugaccggcgucaucccgcugacgaccacccccaccaagagccacuucgccaaccugaaggggacggagacccggggcaagcucugccccaagugccugaacugcaccgaccuggacguggcccucgggcgccccaagugcaccggcaacaucccguccgcccgggugagcauccugcacgagguccgccccgugacguccggcugcuuccccaucaugcacgaccggaccaagauccgccagcugcccaaccuccugcggggguacgagcacauccgccugagcacccacaacgugaucaacgccgagaacgcgccgggcgggcccuacaagaucggcaccuccgggagcugccccaacgucacgaacggcaacggcuucuucgccaccauggccugggccgugcccaagaacgacaagaacaagaccgcgaccaacucccucacgaucgaggugccguacaucugcaccgagggggaggaccagaucaccaucuggggcuuccacagcgacaacgagacccagauggccaagcuguacggggacuccaagccccagaaguucacgagcuccgccaacggcgucaccacccacuacgugagccagaucggcggguuccccaaccagaccgaggacggcgggcugccccaguccggccggaucguggucgacuacauggugcagaaguccgggaagacgggcaccaucaccuaccagcgcggcauccuccugccgcagaagguguggugcgccuccgggcggagcaaggucaucaagggcagccugccccucaucggggaggccgacugccugcacgagaaguacggcgggcugaacaaguccaagcccuacuacaccggcgagcacgcgaaggccaucggcaacugccccaucugggugaagacgccgcucaagcuggccaacgggaccaaguaccgcccgcccgccaagcugcucaaggagcggggcuucuucggggccaucgcgggcuuccuggagggcgggugggagggcaugaucgccggguggcacggcuacaccagccacggggcccacggcguggccgucgccgcggaccugaaguccacccaggaggccaucaacaagaucacgaagaaccucaacagccugggcgagcuggaggugaagaaccuccagcgccuguccggggccauggacgagcugcacaacgagauccucgagcuggacgagaaggucgacgaccugcgggccgacaccaucagcucccagaucgagcucgccgugcugcugagcaacgagggcaucaucaacuccgaggacgagcaccuccuggcgcuggagcgcaagcucaagaagaugcuggggcccagcgccguggagaucggcaacgggugcuucgagaccaagcacaagugcaaccagaccugccuggaccggaucgccgccggcaccuucgacgcgggcgaguucucccuccccacguucgacagccugaacaucaccgccgccucccugaacgacgacgggcucgacaaccacaccauccugcuguacuacagcaccgccgccuccagccuggcggucacgcucaugaucgccaucuucgugguguacauggucucccgcgacaacgugagcugcuccaucugccuguga

SEQ ID NO: 92063 - RNA, 1758 nt, Artificial Sequence; identical to SEQ ID NO: 91013
  derived and/or modified CDS sequence (opt1) from hemagglutinin__InfluenzaB__AHL93257

SEQ ID NO: 92064 - RNA, 1758 nt, Artificial Sequence; identical to SEQ ID NO: 91346
  derived and/or modified CDS sequence (opt1) from hemagglutinin__InfluenzaB__AHL93268

SEQ ID NO: 92065 - RNA, 1758 nt, Artificial Sequence
  derived and/or modified CDS sequence (opt1) from hemagglutinin__InfluenzaB__AHL93279
augaaggccaucaucgugcugcucauggucgugaccagcaacgccgaccgcaucugcaccggcaucacguccagcaacagcccccacguggucaagaccgcgacccagggggaggugaacgugaccggcgucaucccgcugacgaccacccccaccaagagccacuucgccaaccugaaggggacggagacccggggcaagcucugccccaagugccugaacugcaccgaccuggacguggcccucgggcgccccaagugcaccggcaagaucccguccgcccgggugagcauccugcacgagguccgccccgugacguccggcugcuuccccaucaugcacgaccggaccaagauccgccagcugcccaaccuccugcggggguacgagcacauccgccugagcacccacaacgugaucaacgccgagaacgcgccgggcgggcccuacaagaucggcaccuccgggagcugccccaacaucacgaacggcaacggcuucuucgccaccauggccugggccguccccaagaacgacaagaacaagaccgcgaccaacccgcucacgaucgaggugcccuacaucugcaccgagggggaggaccagaucaccguguggggcuuccacuccgacaacgagacccagauggccaagcuguacggggacagcaagccccagaaguucacguccagcgccaacggcgucaccacccacuacgugucccagaucggcggguuccccaaccagaccgaggacggcgggcugccgcagagcggccggaucguggucgacuacauggugcagaaguccgggaagacgggcaccaucaccuaccagcgcggcauccuccugccccagaagguguggugcgccagcgggaaguccaaggucaucaagggcagccugccccucaucggggaggccgacugccugcacgagaaguacggcgggcugaacaagagcaagcccuacuacaccggcgagcacgcgaaggccaucggcaacugcccgaucugggugaagacgccccucaagcuggccaacgggaccaaguaccggccgcccgccaagcugcucaaggagcgcggcuucuucggggccaucgcgggcuuccuggagggcgggugggagggcaugaucgccggguggcacggcuacaccucccacggggcccacggcguggccgucgccgcggaccugaaguccacccaggaggccaucaacaagaucacgaagaaccucaacucccugagcgagcuggaggugaagaaccuccagcggcuguccggcgccauggacgagcugcacaacgagauccucgagcuggacgagaaggucgacgaccugcgcgccgacaccaucagcucccagaucgagcucgccgugcugcugagcaacgaggggaucaucaacuccgaggacgagcaccuccuggcgcuggagcggaagcucaagaagaugcugggccccagcgccguggagaucgggaacggcugcuucgagaccaagcacaagugcaaccagaccugccuggaccgcaucgccgccgggaccuucgacgcgggcgaguucucccuccccacguucgacagccugaacaucaccgccgccucccugaacgacgacggccucgacaaccacaccauccugcuguacuacagcaccgccgccuccagccuggcggucacgcucaugaucgccaucuucgugguguacauggucucccgggacaacgugagcugcuccaucugccuguga

SEQ ID NO: 92066 - RNA, 1758 nt, Artificial Sequence; identical to SEQ ID NO: 91013
  derived and/or modified CDS sequence (opt1) from hemagglutinin__InfluenzaB__AHL93290

SEQ ID NO: 92067 - RNA, 1758 nt, Artificial Sequence
  derived and/or modified CDS sequence (opt1) from hemagglutinin__InfluenzaB__AHL93301
augaaggccaucaucgugcugcucauggucgugaccagcaacgccgaccgcaucugcaccggcaucacguccagcaacagcccccacguggucaagaccgcgacccagggggaggugaacgugaccggcgucaucccgcugacgaccacccccaccaagagccacuucgccaaccugaaggggacggagacccggggcaagcucugccccaagugccugaacugcaccgaccuggacguggcccucgggcgccccaagugcaccggcaagaucccguccgcccgggugagcauccugcacgagguccgccccgugacguccggcugcuuccccaucaugcacgaccggaccaagauccgccagcugcccaaccuccugcggggguacgagcacauccgccugagcacccacaacgugaucaacgccgagaacgcgccgggcgggcccuacaagaucggcaccuccgggagcugccccaacaucacgaacggcaacggcuucuucgccaccauggccugggccguccccaagaacgacaagaacaagaccgcgaccaacccgcucacgaucgaggugcccuacaucugcaccgagggggaggaccagaucaccguguggggcuuccacuccgacaacgagacccagauggccaagcuguacggggacagcaagccccagaaguucacguccagcgccaacggcgucaccacccacuacgugucccagaucggcggguuccccaaccagaccgaggacggcgggcugccgcagagcggccggaucguggucgacuacauggugcagaaguccgggaagacgggcaccaucaccuaccagcgcggcauccuccugccccagaagguguggugcgccagcgggcgguccaaggucaucaagggcagccugccccucaucggggaggccgacugccugcacgagaaguacggcgggcugaacaagagcaagcccuacuacaccggcgagcacgcgaaggccaucggcaacugcccgaucugggugaagacgccccucaagcuggccaacgggaccaaguaccgcccgcccgccaagcugcucaaggagcggggcuucuucggggccaucgcgggcuuccuggagggcgggugggagggcaugaucgccggguggcacggcuacaccucccacggggcccacggcguggccgucgccgcggaccugaaguccacccaggaggccaucaacaagaucacgaagaaccucaacucccugagcgagcuggaggugaagaaccuccagcgccuguccggcgccauggacgagcugcacaacgagauccucgagcuggacgagaaggucgacgaccugcgggccgacaccaucagcucccagaucgagcucgccgugcugcugagcaacgaggggaucaucaacuccgaggacgagcaccuccuggcgcuggagcgcaagcucaagaagaugcugggccccagcgccguggagaucgggaacggcugcuucgagaccaagcacaagugcaaccagaccugccuggaccggaucgccgccgggaccuucaacgcgggcgaguucucccuccccacguucgacagccugaacaucaccgccgccucccugaacgacgacggccucgacaaccacaccauccugcuguacuacagcaccgccgccuccagccuggcggucacgcucaugaucgccaucuucgugguguacauggucucccgcgacaacgugagcugcuccaucugccuguga

SEQ ID NO: 92068 - RNA, 1758 nt, Artificial Sequence
  derived and/or modified CDS sequence (opt1) from hemagglutinin__InfluenzaB__AHL93312
augaaggccaucaucgugcugcucauggucgugaccagcaacgccgaccgcaucugcaccggcaucacguccagcaacagcccccacguggucaagaccgcgacccagggggaggugaacgugaccggcgucaucccgcugacgaccacccccaccaagagccacuucgccaaccugaaggggacggagacccggggcaagcucugccccaagugccugaacugcaccgaccuggacguggcccucgggcgccccaagugcaccggcaagaucccguccgcccgggugagcauccugcacgagguccgccccgugacguccggcugcuuccccaucaugcacgaccggaccaagauccgccagcugcccaaccuccugcggggguacgagcacauccgccugagcacccacaacgugaucaacgccgagaacgcgccgggcgggcccuacaagaucggcaccuccgggagcugccccaacaucacgaacggcaacggcuucuacgccaccauggccugggccguccccaagaacgacaagaacaagaccgcgaccaacccgcucacgaucgaggugcccuacaucugcaccgagggggaggaccagaucaccguguggggcuuccacuccgacaacgagacccagauggccaagcuguacggggacagcaagccccagaaguucacguccagcgccaacggcgucaccacccacuacgugucccagaucggcggguuccccaaccagaccgaggacggcgggcugccgcagagcggccggaucguggucgacuacauggugcagaaguccgggaagacgggcaccaucaccuaccagcgcggcauccuccugccccagaagguguggugcgccagcgggcgguccaaggucaucaagggcagccugccccucaucggggaggccgacugccugcacgagaaguacggcgggcugaacaagagcaagcccuacuacaccggcgagcacgcgaaggccaucggcaacugcccgaucugggugaagacgccccucaagcuggccaacgggaccaaguaccgcccgcccgccaagcugcucaaggagcggggcuucuucggggccaucgcgggcuuccuggagggcgggugggagggcaugaucgccggguggcacggcuacaccucccacggggcccacggcguggccgucgccgcggaccugaaguccacccaggaggccaucaacaagaucacgaagaaccucaacucccugagcgagcuggaggugaagaaccuccagcgccuguccggcgccauggacgagcugcacaacgagauccucgagcuggacgagaaggucgacgaccugcgggccgacaccaucagcucccagaucgagcucgccgugcugcugagcaacgaggggaucaucaacuccgaggacgagcaccuccuggcgcuggagcgcaagcucaagaagaugcugggccccagcgccguggagaucgggaacggcugcuucgagaccaagcacaagugcaaccagaccugccuggaccggaucgccgccgggaccuucgacgcgggcgaguucucccuccccacguucgacagccugaacaucaccgccgccucccugaacgacgacggccucgacaaccacaccauccugcuguacuacagcaccgccgccuccagccuggcggucacgcucaugaucgccaucuucgugguguacauggucucccgcgacaacgugagcugcuccaucugccuguga

SEQ ID NO: 92069 - RNA, 1758 nt, Artificial Sequence
  derived and/or modified CDS sequence (opt1) from hemagglutinin__InfluenzaB__AHL93323
augaaggccaucaucgugcugcucauggucgugaccagcaacgccgaccgcaucugcaccggcaucacguccagcaacagcccccacguggucaagaccgcgacccagggggaggugaacgugaccggcgucaucccgcugacgaccacccccaccaagagccacuucgccaaccugaaggggacggagacccggggcaagcucugccccaagugccugaacugcaccgaccuggacguggcccucgggcgccccaagugcaccggcaagaucccguccgcccgggugagcauccugcacgagguccgccccgugacguccggcugcuuccccaucaugcacgaccggaccaagauccgccagcugcccaaccuccugcggggguacgagcacauccgccugagcacccacaacgugaucaacgccgagaacgcgccgggcgggcccuacaagaucggcaccuccgggagcugccccaacaucacgaacggcaacggcuucuucgccaccauggccugggccguccccaagaacgacaagaacaagaccgcgaccaacccgcucacgaucgaggugcccuacaucugcaccgagggggaggaccagaucaccguguggggcuuccacuccgacaacgagacccagauggccaagcuguacggggacagcaagccccagaaguucacguccagcgccaacggcgucaccacccacuacgugucccagaucggcggguuccccaaccagaccgaggacggcgggcugccgcagagcggccggaucguggucgacuacauggugcagaaguccgggaagacgggcaccaucaccuaccagcgcggcauccuccugccccagaagguguggugcaccagcgggcgguccaaggucaucaagggcagccugccccucaucggggaggccgacugccugcacgagaaguacggcgggcugaacaagagcaagcccuacuacacgggcgagcacgccaaggcgaucggcaacugcccgaucugggugaagacgccccucaagcuggccaacgggaccaaguaccgcccgcccgccaagcugcucaaggagcggggcuucuucggggccaucgccggcuuccuggagggcgggugggagggcaugaucgcgggguggcacggcuacaccucccacggggcccacggcguggccgucgccgccgaccugaaguccacccaggaggcgaucaacaagaucaccaagaaccucaacucccugagcgagcuggaggugaagaaccuccagcgccuguccggcgccauggacgagcugcacaacgagauccucgagcuggacgagaaggucgacgaccugcgggccgacaccaucagcucccagaucgagcucgccgugcugcugagcaacgaggggaucaucaacuccgaggacgagcaccuccuggcccuggagcgcaagcucaagaagaugcugggccccagcgcgguggagaucgggaacggcugcuucgagaccaagcacaagugcaaccagaccugccuggaccggaucgccgccgggacguucgacgccggcgaguucucccuccccaccuucgacagccugaacaucaccgcggccucccugaacgacgacggccucgacaaccacaccauccugcuguacuacagcacggccgccuccagccuggccgucacccucaugaucgcgaucuucgugguguacauggucucccgcgacaacgugagcugcuccaucugccuguga

SEQ ID NO: 92070 - RNA, 1758 nt, Artificial Sequence
  derived and/or modified CDS sequence (opt1) from hemagglutinin__InfluenzaB__AHL93334
augaaggccaucaucgugcugcucauggucgugaccagcaacgccgaccgcaucugcaccggcaucacguccagcaacagcccccacguggucaagaccgcgacccagggggaggugaacgugaccggcgucaucccgcugacgaccacccccaccaagagccacuucgccaaccugaaggggacggagacccggggcaagcucugccccaagugccccaacugcaccgaccuggacguggcccuggggcgcccgaagugcaccggcaagauccccuccgcccgggugagcauccuccacgagguccgccccgugacguccggcugcuuccccaucaugcacgaccggaccaagauccgccagcugccgaaccugcuccggggguacgagcacauccgccugagcacccacaacgugaucaacgccgagaacgcgcccggcgggcccuacaagaucggcaccuccgggagcugccccaacaucacgaacggcaacggcuucuucgccaccauggccugggccgucccgaagaacgacaagaacaagaccgcgaccaacccccugacgaucgaggugcccuacaucugcaccgagggggaggaccagaucaccguguggggcuuccacuccgacaacgagacccagauggccaagcucuacggggacagcaagccccagaaguucacguccagcgccaacggcgucaccacccacuacgugucccagaucggcggguucccgaaccagaccgaggacggcgggcugccccagagcggccggaucguggucgacuacauggugcagaaguccgggaagacgggcaccaucaccuaccagcgcggcauccugcucccccagaagguguggugcaccagcgggcgguccaaggucaucaagggcagccugccccugaucggggaggccgacugccuccacgagaaguacggcgggcugaacaagagcaagccguacuacacgggcgagcacgccaaggcgaucggcaacugccccaucugggugaagacgccccugaagcucgccaacgggaccaaguaccggcccccggccaagcugcugaaggagcgcggcuucuucggggccaucgccggcuuccucgagggcgggugggagggcaugaucgcgggguggcacggcuacaccucccacggggcccacggcguggccgucgccgccgaccugaaguccacccaggaggcgaucaacaagaucaccaagaaccugaacucccucagcgagcuggaggugaagaaccugcagcgccucuccggcgccauggacgagcugcacaacgagauccuggagcucgacgagaaggucgacgaccugcgggccgacaccaucagcucccagaucgagcuggccgugcuccugagcaacgaggggaucaucaacuccgaggacgagcaccuccuggcccuggagcgcaagcugaagaagaugcucggccccagcgcgguggagaucgggaacggcugcuucgagaccaagcacaagugcaaccagaccugccuggaccggaucgccgccgggacguucgacgccggcgaguucucccugcccaccuucgacagccucaacaucaccgcggccucccugaacgacgacggccuggacaaccacaccauccuccuguacuacagcacggccgccuccagccuggccgucacccugaugaucgcgaucuucgugguguacauggucucccgcgacaacgugagcugcuccaucugccucuga

SEQ ID NO: 92071 - RNA, 1758 nt, Artificial Sequence; identical to SEQ ID NO: 91013
  derived and/or modified CDS sequence (opt1) from hemagglutinin__InfluenzaB__AHL93345

SEQ ID NO: 92072 - RNA, 1758 nt, Artificial Sequence; identical to SEQ ID NO: 91013
  derived and/or modified CDS sequence (opt1) from hemagglutinin__InfluenzaB__AHL93356

SEQ ID NO: 92073 - RNA, 1758 nt, Artificial Sequence
  derived and/or modified CDS sequence (opt1) from hemagglutinin__InfluenzaB__AHL93367
augaaggccaucaucgugcugcucauggucgugaccagcaacgccgaccgcaucugcaccggcaucacguccagcaacagcccccacguggucaagaccgcgacccagggggaggugaacgugaccggcgucaucccgcugacgaccacccccaccaagagccacuucgccaaccugaaggggacggagacccggggcaagcucugccccaagugccugaacugcaccgaccuggacguggcccucgggcgccccaagugcaccggcaagaucccguccgcccgggugagcauccugcacgagguccgccccgugacguccggcugcuuccccaucaugcacgaccggaccaagauccgccagcugcccaaccuccugcggggguacgaguacauccgccugagcacccacaacgugaucaacgccgagaacgcgccgggcgggcccuacaagaucggcaccuccgggagcugccccaacaucacgaacggcaacggcuucuucgccaccauggccugggccguccccaagaacgacaagaacaagaccgcgaccaacccgcucacgaucgaggugcccuacaucugcaccgagggggaggaccagaucaccguguggggcuuccacuccgacaacgagacccagauggccaagcuguacggggacagcaagccccagaaguucacguccagcgccaacggcgucaccacccacuacgugucccagaucggcggguuccccaaccagaccgaggacggcgggcugccgcagagcggccggaucguggucgacuacauggugcagaaguccgggaagacgggcaccaucaccuaccagcgcggcauccuccugccccagaagguguggugcgccagcgggcgguccaaggucaucaagggcagccugccccucaucggggaggccgacugccugcacgagaaguacggcgggcugaacaagagcaagcccuacuacaccggcgagcacgcgaaggccaucggcaacugcccgaucugggugaagacgccccucaagcuggccaacgggaccaaguaccgcccgcccgccaagcugcucaaggagcggggcuucuucggggccaucgcgggcuuccuggagggcgggugggagggcaugaucgccggguggcacggcuacaccucccacggggcccacggcguggccgucgccgcggaccugaaguccacccaggaggccaucaacaagaucacgaagaaccucaacucccugagcgagcuggaggugaagaaccuccagcgccuguccggcgccauggacgagcugcacaacgagauccucgagcuggacgagaaggucgacgaccugcgggccgacaccaucagcucccagaucgagcucgccgugcugcugagcaacgaggggaucaucaacuccgaggacgagcaccuccuggcgcuggagcgcaagcucaagaagaugcugggccccagcgccguggagaucgggaacggcugcuucgagaccaagcacaagugcaaccagaccugccuggaccggaucgccgccgggaccuucgacgcgggcgaguucucccuccccacguucgacagccugaacaucaccgccgccucccugaacgacgacggccucgacaaccacaccauccugcuguacuacagcaccgccgccuccagccuggcggucacgcucaugaucgccaucuucgugguguacauggucucccgcgacaacgugagcugcuccaucugccuguga

SEQ ID NO: 92074 - RNA, 1758 nt, Artificial Sequence; identical to SEQ ID NO: 91013
  derived and/or modified CDS sequence (opt1) from hemagglutinin__InfluenzaB__AHL93378

SEQ ID NO: 92075 - RNA, 1758 nt, Artificial Sequence
  derived and/or modified CDS sequence (opt1) from hemagglutinin__InfluenzaB__AHL93389
augaaggccaucaucgugcugcucauggucgugaccagcaacgccgaccgcaucugcaccggcaucacguccagcaacagcccccacguggucaagaccgcgacccagggggaggugaacgugaccggcgucaucccgcugacgaccacccccaccaagagcuacuucgccaaccugaaggggacggagacccggggcaagcucugccccaagugccugaacugcaccgaccuggacguggcccucgggcgccccaagugcaccggcaagaucccguccgcccgggugagcauccugcacgagguccgccccgugacguccggcugcuuccccaucaugcacgaccggaccaagauccgccagcugcccaaccuccugcggggguacgagcacauccgccugagcacccacaacgugaucaacgccgagaacgcgccgggcgggcccuacaagaucggcaccuccgggagcugccccaacaucacgaacggcaacggcuucuucgccaccauggccugggccguccccaagaacgacaagaacaagaccgcgaccaacccgcucacgaucgaggugcccuacaucugcaccgagggggaggaccagaucaccguguggggcuuccacuccgacaacgagacccagauggccaagcuguacggggacagcaagccccagaaguucacguccagcgccaacggcgucaccacccacuacgugucccagaucggcggguuccccaaccagaccgaggacggcgggcugccgcagagcggccggaucguggucgacuacauggugcagaaguccgggaagacgggcaccaucaccuaccagcgcggcauccuccugccccagaagguguggugcgccagcgggcgguccaaggucaucaagggcagccugccccucaucggggaggccgacugccugcacgagaaguacggcgggcugaacaagagcaagcccuacuacaccggcgagcacgcgaaggccaucggcaacugcccgaucugggugaagacgccccucaagcuggccaacgggaccaaguaccgcccgcccgccaagcugcucaaggagcggggcuucuucggggccaucgcgggcuuccuggagggcgggugggagggcaugaucgccggguggcacggcuacaccucccacggggcccacggcguggccgucgccgcggaccugaaguccacccaggaggccaucaacaagaucacgaagaaccucaacucccugagcgagcuggaggugaagaaccuccagcgccuguccggcgccauggacgagcugcacaacgagauccucgagcuggacgagaaggucgacgaccugcgggccgacaccaucagcucccagaucgagcucgccgugcugcugagcaacgaggggaucaucaacuccgaggacgagcaccuccuggcgcuggagcgcaagcucaagaagaugcugggccccagcgccguggagaucgggaacggcugcuucgagaccaagcacaagugcaaccagaccugccuggaccggaucgccgccgggaccuucgacgcgggcgaguucucccuccccacguucgacagccugaacaucaccgccgccucccugaacgacgacggccucgacaaccacaccauccugcuguacuacagcaccgccgccuccagccuggcggucacgcucaugaucgccaucuucgugguguacauggucucccgcgacaacgugagcugcuccaucugccuguga

SEQ ID NO: 92076 - RNA, 1758 nt, Artificial Sequence; identical to SEQ ID NO: 91013
  derived and/or modified CDS sequence (opt1) from hemagglutinin__InfluenzaB__AHL93400

SEQ ID NO: 92077 - RNA, 1758 nt, Artificial Sequence; identical to SEQ ID NO: 91346
  derived and/or modified CDS sequence (opt1) from hemagglutinin__InfluenzaB__AHL93411

SEQ ID NO: 92078 - RNA, 1758 nt, Artificial Sequence; identical to SEQ ID NO: 91346
  derived and/or modified CDS sequence (opt1) from hemagglutinin__InfluenzaB__AHL93422

SEQ ID NO: 92079 - RNA, 1758 nt, Artificial Sequence; identical to SEQ ID NO: 91346
  derived and/or modified CDS sequence (opt1) from hemagglutinin__InfluenzaB__AHL93433

SEQ ID NO: 92080 - RNA, 1758 nt, Artificial Sequence; identical to SEQ ID NO: 91013
  derived and/or modified CDS sequence (opt1) from hemagglutinin__InfluenzaB__AHL93444

SEQ ID NO: 92081 - RNA, 1758 nt, Artificial Sequence
  derived and/or modified CDS sequence (opt1) from hemagglutinin__InfluenzaB__AHL93455
augaaggccaucaucgugcugcucauggucgugaccagcaacgccgaccgcaucugcaccggcaucacguccagcaacagcccccacguggucaagaccgcgacccagggggaggugaacgugaccggcgucaucccgcugacgaccacccccaccaagagccacuucgccaaccugaaggggacggagacccggggcaagcucugccccaagugccugaacugcaccgaccuggacguggcccucgggcgccccaagugcaccggcaagaucccguccgcccgggugagcauccugcacgagguccgccccgugacguccggcugcuuccccaucaugcacgaccggaccaagauccgccagcugcccaaccuccugcggggguacgagcacauccgccugagcacccacaacgugaucaacgccgagaacgcgccgggcgggcccuacaagaucggcaccuccgggagcugccccaacaucacgaacggcaacggcuucuucgccaccauggccugggccguccccaagaacgacaagaacaagaccgcgaccaacccgcucacgaucgaggugcccuacaucugcaccgagggggaggaccagaucaccguguggggcuuccacuccgacaacgagacccagauggccaagcuguacggggacagcaagccccagaaguucacguccagcgccaacggcgucaccacccacuacgugucccagaucggcggguuccccaaccagaccgaggacggcgggcugccgcagagcggccggaucguggucgacuacauggugcagaaguccgggaagacgggcaccaucaccuaccagcgcggcauccuccugccccagaagguguggugcgccagcgggcgguccaaggucaucaagggcagccugccccucaucggggaggccgacugccugcacgagaaguacggcgggcugaacaagagcaagcccuacuacaccggcgagcacgcgaaggccaucggcaacugcccgaucugggugaagacgccccucaagcuggccaacgggaccaaguaccgcccgcccgccaagcugcucaaggagcggggcuucuucggggccaucgcgggcuuccuggagggcgggugggagggcaugaucgccggguggcacggcuacaccucccacggggcccacggcguggccgucgccgcggaccugaaguccacccaggaggccaucaacaagaucacgaagaaccucaacucccugagcgagcuggaggugaagaaccuccagcgccuguccggcgccaugaacgagcugcacaacgagauccucgagcuggacgagaaggucgacgaccugcgggccgacaccaucagcucccagaucgagcucgccgugcugcugagcaacgaggggaucaucaacuccgaggacgagcaccuccuggcgcuggagcgcaagcucaagaagaugcugggccccagcgccguggagaucgggaacggcugcuucgagaccaagcacaagugcaaccagaccugccuggaccggaucgccgccgggaccuucgacgcgggcgaguucucccuccccacguucgacagccugaacaucaccgccgccucccugaacgacgacggccucgacaaccacaccauccugcuguacuacagcaccgccgccuccagccuggcggucacgcucaugaucgccaucuucgugguguacauggucucccgcgacaacgugagcugcuccaucugccuguga

SEQ ID NO: 92082 - RNA, 1758 nt, Artificial Sequence; identical to SEQ ID NO: 91013
  derived and/or modified CDS sequence (opt1) from hemagglutinin__InfluenzaB__AHL93466

SEQ ID NO: 92083 - RNA, 1758 nt, Artificial Sequence; identical to SEQ ID NO: 90632
  derived and/or modified CDS sequence (opt1) from hemagglutinin__InfluenzaB__AHL93477

SEQ ID NO: 92084 - RNA, 1758 nt, Artificial Sequence; identical to SEQ ID NO: 90707
  derived and/or modified CDS sequence (opt1) from hemagglutinin__InfluenzaB__AHL93488

SEQ ID NO: 92085 - RNA, 1755 nt, Artificial Sequence
  derived and/or modified CDS sequence (opt1) from hemagglutinin__InfluenzaB__AHL93499
augaaggccaucaucgugcugcucauggucgugaccagcaacgccgaccgcaucugcaccggcaucacguccagcaacagcccccacguggucaagaccgcgacccagggggaggugaacgugaccggcgucaucccgcugacgaccacccccaccaaguccuacuucgccaaccugaaggggacgcggacccgcggcaagcucugccccgacugccugaacugcaccgaccuggacguggcccucgggcggcccaugugcgugggcaccacgccguccgccaaggccagcauccugcacgagauccgccccgucaccuccggcugcuuccccaucaugcacgaccggaccaagauccgccagcugcccaaccuccugcggggguacgagaacauccgccugagcacccagaacgugaucgacgcggagaaggccccgggcgggcccuaccggcucggcacguccgggagcugccccaacgccaccuccaagaucggcuucuucgccaccauggcgugggccgugcccaaggacaacuacaagaacgccaccaacccgcugacggucgaggugcccuacaucugcaccgagggcgaggaccagaucaccguguggggguuccacagcgacaacaagacccagaugaagaaccuguacggcgacuccaacccccagaaguucacgagcuccgccaacggggucaccgcccacuacgugagccagaucggcgacuuccccgaccagaccgaggacggcgggcucccgcaguccggccgcaucguggucgacuacaugaugcagaagcccgggaagaccggcacgaucguguaccagcgcggggugcugcugccccagaaggucuggugcgcgagcggccgguccaaggugaucaagggcagccucccccugaucggggaggccgacugccugcacgagaaguacggcgggcucaacaagagcaagccguacuacaccggcgagcacgccaaggccaucgggaacugccccaucugggugaagacgccccugaagcuggccaacggcaccaaguaccggcccccggcgaagcuccugaaggagcgcggcuucuucggggccaucgccggcuuccuggagggcgggugggaggggaugaucgccggcuggcacggcuacaccucccacggggcccacggcgucgcgguggccgccgaccucaagagcacccaggaggccaucaacaagaucaccaagaaccugaacucccugagcgagcucgaggucaagaaccugcagcggcuguccggggccauggacgagcuccacaacgagauccuggagcuggacgagaagguggacgaccuccgcgcggacaccaucagcucccagaucgagcuggccgugcugcucagcaacgagggcaucaucaacuccgaggacgagcaccuccuggcccuggagcggaagcugaagaagaugcugggccccagcgccgucgacaucgggaacggcugcuucgagacgaagcacaagugcaaccagaccugccucgaccgcaucgcggccgggaccuucaacgccggcgaguucucccugcccaccuucgacagccugaacaucaccgccgccucccucaacgacgacgggcuggacaaccacacgauccugcuguacuacagcaccgcggccuccagccucgccgugacccugaugcuggccaucuucaucguguacauggucucccgggacaacgugagcugcuccaucugccucuga

SEQ ID NO: 92086 - RNA, 1758 nt, Artificial Sequence; identical to SEQ ID NO: 90632
  derived and/or modified CDS sequence (opt1) from hemagglutinin__InfluenzaB__AHL93510

SEQ ID NO: 92087 - RNA, 1755 nt, Artificial Sequence
  derived and/or modified CDS sequence (opt1) from hemagglutinin__InfluenzaB__AHL93521
augaaggccaucaucgcccugcucaugguggucaccagcaacgcggaccgcaucugcaccggcaucacguccagcaacagcccccacguggugaagaccgccacccagggggaggucaacgugaccggcgugaucccgcugacgaccacccccaccaaguccuacuucgccaaccugaaggggacgcggacccgcggcaagcucugccccgacugccugaacugcaccgaccuggacgucgcccucgggcggcccaugugcgugggcaccacgccguccgccaaggcgagcauccugcacgaggugcgccccgucaccuccggcugcuuccccaucaugcacgaccggaccaagauccgccagcugcccaaccuccugcggggguacgagaacauccgccugagcacccagaacgugaucgacgccgagaaggccccgggcgggcccuaccggcucggcacguccgggagcugccccaacgccaccuccaagaucggcuucuucgcgaccauggccugggccgugcccaaggacaacuacaagaacgccaccaacccgcugacggucgaggugcccuacaucugcaccgagggcgaggaccagaucaccguguggggguuccacagcgacaacaagacccagaugaagaaccuguacggcgacuccaacccccagcgcuucacgagcuccgccaacggggucaccacccacuacgugagccagaucggcgacuuccccgaccagaccgaggacggcgggcucccgcaguccggccggaucguggucgacuacauggugcagaagcccgggaagacgggcaccaucguguaccagcgcgggguccugcugccccagaagguguggugcgcgagcggccgguccaaggugaucaagggcagccucccccugaucggggaggccgacugccugcacgagaaguacggcgggcucaacaagagcaagccguacuacaccggcgagcacgccaaggccaucgggaacugccccaucugggucaagacgccccugaagcuggccaacggcaccaaguaccggcccccggcgaagcuccugaaggagcgcggcuucuucggggccaucgccggcuuccuggagggcgggugggaggggaugaucgccggcuggcacggcuacaccucccacggggcccacggcguggcggucgccgccgaccucaagagcacccaggaggccaucaacaagaucaccaagaaccugaacucccugagcgagcucgaggugaagaaccugcagcgccuguccggggccauggacgagcuccacaacgagauccuggagcuggacgagaagguggacgaccuccgggcggacacgaucagcucccagaucgagcuggccguccugcucagcaacgagggcaucaucaacuccgaggacgagcaccuccuggcccuggagcgcaagcugaagaagaugcugggccccagcgccguggacaucgggaacggcugcuucgagaccaagcacaagugcaaccagaccugccucgaccggaucgcggccgggaccuucaacgccggcgaguucucccugcccaccuucgacagccugaacaucacggccgccucccucaacgacgacgggcuggacaaccacaccauccugcuguacuacagcaccgcggccuccagccucgccgugacccugaugcuggccaucuucaucgucuacauggugucccgcgacaacgugagcugcuccaucugccucuga

SEQ ID NO: 92088 - RNA, 1758 nt, Artificial Sequence; identical to SEQ ID NO: 90707
  derived and/or modified CDS sequence (opt1) from hemagglutinin__InfluenzaB__AHL93532

SEQ ID NO: 92089 - RNA, 1758 nt, Artificial Sequence; identical to SEQ ID NO: 90669
  derived and/or modified CDS sequence (opt1) from hemagglutinin__InfluenzaB__AHL93543

SEQ ID NO: 92090 - RNA, 1758 nt, Artificial Sequence; identical to SEQ ID NO: 90669
  derived and/or modified CDS sequence (opt1) from hemagglutinin__InfluenzaB__AHL93554

SEQ ID NO: 92091 - RNA, 1758 nt, Artificial Sequence; identical to SEQ ID NO: 90669
  derived and/or modified CDS sequence (opt1) from hemagglutinin__InfluenzaB__AHL93565

SEQ ID NO: 92092 - RNA, 1758 nt, Artificial Sequence; identical to SEQ ID NO: 90707
  derived and/or modified CDS sequence (opt1) from hemagglutinin__InfluenzaB__AHL93576

SEQ ID NO: 92093 - RNA, 1758 nt, Artificial Sequence; identical to SEQ ID NO: 90707
  derived and/or modified CDS sequence (opt1) from hemagglutinin__InfluenzaB__AHL93587

SEQ ID NO: 92094 - RNA, 1758 nt, Artificial Sequence
  derived and/or modified CDS sequence (opt1) from hemagglutinin__InfluenzaB__AHL93609
augaaggccaucaucgugcugcucauggucgugaccagcaacgccgaccgcaucugcaccggcaucacguccagcaacagcccccacguggucaagaccgcgacccagggggaggugaacgugaccggcgucaucccgcugacgaccacccccaccaagagccacuucgccaaccugaaggggacggagacccggggcaagcucugccccaagugccccaacugcaccgaccuggacguggcccuggggcgcccgaagugcaccggcaagauccccuccgcccgggugagcauccuccacgagguccgccccgugacguccggcugcuuccccaucaugcacgaccggaccaagauccgccagcugccgaaccugcuccggggguacgagcacauccgccugagcacccacaacgugaucaacgccgagaacgcgcccggcgggcccuacaagaucggcaccuccgggagcugccccaacgucacgaacggcaacggcuucuucgccaccauggccugggccgugccgaagaacgacaagaacaagaccgcgaccaacccccugacgaucgaggugcccuacaucugcaccgagggggaggaccagaucaccgucuggggcuuccacuccgacaacgagacccagauggccaagcucuacggggacagcaagccccagaaguucacguccagcgccaacggcgugaccacccacuacgugucccagaucggcggguucccgaaccagaccgaggacggcgggcugccccagagcggccggaucgucguggacuacauggugcagaaguccgggaagacgggcaccaucaccuaccagcgcggcauccugcucccccagaaggucuggugcgccagcgggcgguccaaggugaucaagggcagccugccccugaucggggaggccgacugccuccacgagaaguacggcgggcugaacaagagcaagccguacuacaccggcgagcacgcgaaggccaucggcaacugccccaucugggugaagacgccccugaagcucgccaacgggaccaaguaccggcccccggccaagcugcugaccgagcgcggcuucuucggggccaucgcgggcuuccucgagggcgggugggagggcaugaucgccggguggcacggcuacaccucccacggggcccacggcgucgccguggccgcggaccugaaguccacgcaggaggccaucaacaagaucaccaagaaccugaacucccucagcgagcuggaggucaagaaccugcagcgccucuccggcgccauggacgagcugcacaacgagauccuggagcucgacgagaagguggacgaccugcgggccgacaccaucagcucccagaucgagcuggccgugcuccugagcaacgaggggaucaucaacuccgaggacgagcaccuccuggcgcuggagcgcaagcugaagaagaugcucggccccagcgccgucgagaucgggaacggcugcuucgagaccaagcacaagugcaaccagaccugccuggaccggaucgccgccgggacguucgacgcgggcgaguucucccugcccaccuucgacagccucaacaucaccgccgccucccugaacgacgacggccuggacaaccacaccauccuccuguacuacagcacggccgccuccagccuggcggugacccugaugaucgccaucuucguggucuacauggugucccgcgacaacgugagcugcuccaucugccucuga

SEQ ID NO: 92095 - RNA, 1758 nt, Artificial Sequence; identical to SEQ ID NO: 90707
  derived and/or modified CDS sequence (opt1) from hemagglutinin__InfluenzaB__AHL93620

SEQ ID NO: 92096 - RNA, 1758 nt, Artificial Sequence; identical to SEQ ID NO: 92094
  derived and/or modified CDS sequence (opt1) from hemagglutinin__InfluenzaB__AHL93631

SEQ ID NO: 92097 - RNA, 1758 nt, Artificial Sequence; identical to SEQ ID NO: 92094
  derived and/or modified CDS sequence (opt1) from hemagglutinin__InfluenzaB__AHL93642

SEQ ID NO: 92098 - RNA, 1755 nt, Artificial Sequence
  derived and/or modified CDS sequence (opt1) from hemagglutinin__InfluenzaB__AHL93653
augaaggccaucaucgugcugcucauggucgugaccagcaacgccgaccgcaucugcaccggcaucacguccagcaacagcccccacguggucaagaccgcgacccagggggaggugaacgugaccggcgucaucccgcugacgaccacccccaccaaguccuacuucgccaaccugaaggggacgcggacccgcggcaagcucugccccgacugccugaacugcaccgaccuggacguggcccucgggcggcccaugugcgugggcaccacgccguccgccaaggccagcauccugcacgagguccgccccgugaccuccggcugcuuccccaucaugcacgaccggaccaagauccgccagcugcccaaccuccugcggggguacgagaacauccgccugagcacccagaacgugaucgacgcggagaaggccccgggcgggcccuaccggcucggcacguccgggagcugccccaacgccaccuccaagaucggcuucuucgccaccauggcgugggccguccccaaggacaacuacaagaacgccaccaacccgcugacgguggaggugcccuacaucugcaccgagggcgaggaccagaucaccgucuggggguuccacagcgacaacaagacccagaugaagaaccuguacggcgacuccaacccccagaaguucacgagcuccgccaacggggugaccacccacuacgugagccagaucggcgacuuccccgaccagaccgaggacggcgggcucccgcaguccggccgcaucgucguggacuacauggugcagaagcccgggaagacgggcaccaucgucuaccagcgcggggugcugcugccccagaagguguggugcgccagcggccgguccaaggucaucaagggcagccucccccugaucggggaggcggacugccugcacgagaaguacggcgggcucaacaagagcaagccguacuacaccggcgagcacgccaaggccaucggggacugccccaucugggugaagacgccccugaagcuggccaacggcaccaaguaccggcccccggccaagcuccugaaggagcgcggcuucuucggggcgaucgccggcuuccuggagggcgggugggaggggaugaucgccggcuggcacggcuacaccucccacggggcccacggcgucgccguggcggccgaccucaagagcacccaggaggccaucaacaagaucaccaagaaccugaacucccugagcgagcucgaggugaagaaccugcagcggcuguccggggccauggacgagcuccacaacgagauccuggagcuggacgagaaggucgacgaccuccgcgccgacacgaucagcucccagaucgagcuggcggugcugcucagcaacgagggcaucaucaacuccgaggacgagcaccuccuggcccuggagcggaagcugaagaagaugcugggccccagcgccguggacaucgggaacggcugcuucgagaccaagcacaagugcaaccagaccugccucgaccgcaucgccgcggggaccuucaacgccggcgaguucucccugcccaccuucgacagccugaacaucacggccgccucccucaacgacgacgggcuggacaaccacaccauccugcuguacuacagcaccgccgcguccagccucgccgucacccugaugcuggccaucuucaucguguacauggugucccgggacaacgucagcugcuccaucugccucuga

SEQ ID NO: 92099 - RNA, 1758 nt, Artificial Sequence; identical to SEQ ID NO: 90707
  derived and/or modified CDS sequence (opt1) from hemagglutinin__InfluenzaB__AHL93664

SEQ ID NO: 92100 - RNA, 1758 nt, Artificial Sequence; identical to SEQ ID NO: 90632
  derived and/or modified CDS sequence (opt1) from hemagglutinin__InfluenzaB__AHL93675

SEQ ID NO: 92101 - RNA, 1758 nt, Artificial Sequence; identical to SEQ ID NO: 92094
  derived and/or modified CDS sequence (opt1) from hemagglutinin__InfluenzaB__AHL93686

SEQ ID NO: 92102 - RNA, 1758 nt, Artificial Sequence; identical to SEQ ID NO: 92094
  derived and/or modified CDS sequence (opt1) from hemagglutinin__InfluenzaB__AHL93697

SEQ ID NO: 92103 - RNA, 1758 nt, Artificial Sequence
  derived and/or modified CDS sequence (opt1) from hemagglutinin__InfluenzaB__AHL93708
augaaggccaucaucgugcugcucauggucgugaccagcaacgccgaccgcaucugcaccggcaucacguccagcaacagcccccacguggucaagaccgcgacccagggggaggugaacgugaccggcgucaucccgcugacgaccacccccaccaagagccacuucgccaaccugaaggggacggagacccggggcaagcucugccccaagugccccaacugcaccgaccuggacguggcccuggggcgcccgaagugcaccggcaagauccccuccgcccgggugagcauccuccacgagguccgccccgugacguccggcugcuuccccaucaugcacgaccggaccaagauccgccagcugccgaaccugcuccggggguacgagcacauccgccugagcacccacaacgugaucaacgccgagaacgcgcccggcgggcccuacaagaucggcaccuccgggagcugccccaacgucacgaacggcaacggcuucuucgccaccauggccugggccgugccgaagaacgacaagaacaagaccgcgaccaacccccugacgaucgaggugcccuacaucugcaccgagggggaggaccagaucaccgucuggggcuuccacuccgacaacgagacccagauggccaagcucuacggggacagcaagccccagaaguucacguccagcgccaacggcgugaccacccacuacgugucccagaucggcggguucccgaaccagaccgaggacggcgggcugccccagagcggccggaucgucguggacuacauggugcagaaguccgggaagacgggcaccaucaccuaccagcgcggcauccugcucccccagaaggucuggugcgccagcgggcgguccaaggugaucaagggcagccugccccugaucggggaggccgacugccuccacgagaaguacggcgggcugaacaagagcaagccguacuacaccggcaagcacgcgaaggccaucggcaacugccccaucugggugaagacgccccugaagcucgccaacgggaccaaguaccggcccccggccaagcugcugaccgagcgcggcuucuucggggccaucgcgggcuuccucgagggcgggugggagggcaugaucgccggguggcacggcuacaccucccacggggcccacggcgucgccguggccgcggaccugaaguccacgcaggaggccaucaacaagaucaccaagaaccugaacucccucagcgagcuggaggucaagaaccugcagcgccucuccggcgccauggacgagcugcacaacgagauccuggagcucgacgagaagguggacgaccugcgggccgacaccaucagcucccagaucgagcuggccgugcuccugagcaacgaggggaucaucaacuccgaggacgagcaccuccuggcgcuggagcgcaagcugaagaagaugcucggccccagcgccgucgagaucgggaacggcugcuucgagaccaagcacaagugcaaccagaccugccuggaccggaucgccgccgggacguucgacgcgggcgaguucucccugcccaccuucgacagccucaacaucaccgccgccucccugaacgacgacggccuggacaaccacaccauccuccuguacuacagcacggccgccuccagccuggcggugacccugaugaucgccaucuucguggucuacauggugucccgcgacaacgugagcugcuccaucugccucuga

SEQ ID NO: 92104 - RNA, 1758 nt, Artificial Sequence
  derived and/or modified CDS sequence (opt1) from hemagglutinin__InfluenzaB__AHL93719
augaaggccaucaucgugcugcucauggucgugaccagcaacgccgaccgcaucugcaccggcaucacguccagcaacagcccccacaucgugaagaccgcgacccagggggaggucaacgugaccggcgugaucccgcugacgaccacccccaccaagagccacuucgccaaccugaaggggacggagacccggggcaagcucugccccaagugccugaacugcaccgaccuggacgucgcccucgggcgccccaagugcaccggcaagaucccguccgcccgggugagcauccugcacgaggugauccccgucacguccggcugcuuccccaucaugcacgaccgcaccaagauccggcagcugcccaaccuccugcgcggguacgagcacauccggcugagcacccacaacgugaucaacgccgagaacgcgccgggcgggcccuacaagaucggcaccuccgggagcugccccaacaucacgaacggcaacggcuucuucgccaccauggccugggccgugcccaagaacgacaagaacaagaccgcgaccaacccgcucacgaucgagguccccuacaucugcaccgagggggaggaccagaucaccguguggggcuuccacuccgacaacgagacccagauggccaagcuguacggggacagcaagccccagaaguucacguccagcgccaacggcgugaccacccacuacgucucccagaucggcggguuccccaaccagaccgaggacggcgggcugccgcagagcggccgcaucgugguggacuacaugguccagaaguccgggaagacgggcaccaucaccuaccagcggggcauccuccugccccagaagguguggugcgccagcgggcgcuccaaggugaucaagggcagccugccccucaucggggaggccgacugccugcacgagaaguacggcgggcugaacaagagcaagcccuacuacaccggcgagcacgcgaaggccaucggcaacugcccgaucugggucaagacgccccucaagcuggccaacgggaccaaguaccggccgcccgccaagcugcucaaggagcgcggcuucuucggggccaucgcgggcuuccuggagggcgggugggagggcaugaucgccggguggcacggcuacaccucccacggggcccacggcguggccguggccgcggaccugaaguccacccaggaggccaucaacaagaucacgaagaaccucaacucccugagcgagcuggaggucaagaaccuccagcggcuguccggcgccauggacgagcugcacaacgagauccucgagcuggacgagaagguggacgaccugcgcgccgacaccaucagcucccagaucgagcucgccguccugcugagcaacgaggggaucaucaacuccgaggacgagcaccuccuggcgcuggagcggaagcucaagaagaugcugggccccagcgccguggagaucgggaacggcugcuucgagaccaagcacaagugcaaccagaccugccuggaccgcaucgccgccgggaccuucgacgcgggcgaguucucccuccccacguucgacagccugaacaucaccgccgccucccugaacgacgacggccucgacaaccacaccauccugcuguacuacagcaccgccgccuccagccuggcggugacgcucaugaucgccaucuucgucguguacauggugucccgggacaacgucagcugcuccaucugccuguga

SEQ ID NO: 92105 - RNA, 1758 nt, Artificial Sequence; identical to SEQ ID NO: 90707
  derived and/or modified CDS sequence (opt1) from hemagglutinin__InfluenzaB__AHL93730

SEQ ID NO: 92106 - RNA, 1758 nt, Artificial Sequence; identical to SEQ ID NO: 90707
  derived and/or modified CDS sequence (opt1) from hemagglutinin__InfluenzaB__AHL93741

SEQ ID NO: 92107 - RNA, 1758 nt, Artificial Sequence; identical to SEQ ID NO: 90669
  derived and/or modified CDS sequence (opt1) from hemagglutinin__InfluenzaB__AHL93752

SEQ ID NO: 92108 - RNA, 1758 nt, Artificial Sequence; identical to SEQ ID NO: 92094
  derived and/or modified CDS sequence (opt1) from hemagglutinin__InfluenzaB__AHL93763

SEQ ID NO: 92109 - RNA, 1758 nt, Artificial Sequence; identical to SEQ ID NO: 90632
  derived and/or modified CDS sequence (opt1) from hemagglutinin__InfluenzaB__AHL93774

SEQ ID NO: 92110 - RNA, 1758 nt, Artificial Sequence; identical to SEQ ID NO: 92094
  derived and/or modified CDS sequence (opt1) from hemagglutinin__InfluenzaB__AHL93785

SEQ ID NO: 92111 - RNA, 1758 nt, Artificial Sequence; identical to SEQ ID NO: 90707
  derived and/or modified CDS sequence (opt1) from hemagglutinin__InfluenzaB__AHL93796

SEQ ID NO: 92112 - RNA, 1758 nt, Artificial Sequence; identical to SEQ ID NO: 90632
  derived and/or modified CDS sequence (opt1) from hemagglutinin__InfluenzaB__AHL93818

SEQ ID NO: 92113 - RNA, 1758 nt, Artificial Sequence
  derived and/or modified CDS sequence (opt1) from hemagglutinin__InfluenzaB__AHL93829
augaaggccaucaucgugcugcucauggucgugaccagcaacgccgaccgcaucugcaccggcaucacguccagcaacagcccccacaucgugaagaccgcgacccagggggaggucaacgugaccggcgugaucccgcugacgaccacccccaccaagagccacuucgccaaccugaaggggacggagacccggggcaagcucugccccaagugccugaacugcaccgaccuggacgucgcccucgggcgccccaagugcaccggcaagaucccguccgcccgggugagcauccugcacgaggugcgccccgucacguccggcugcuuccccaucaugcacgaccggaccaagauccgccagcugcccaaccuccugcggggguacgagcacauccgccugagcacccacaacgugaucaacaccgagaacgccccgggcgggcccuacaagaucggcacguccgggagcugccccaacaucaccaacggcaacggcuucuucgcgaccauggccugggccgugcccaagaacgacaagaacaagaccgccacgaacccgcucaccaucgagguccccuacaucugcaccgagggggaggaccagaucaccguguggggcuuccacuccgacaacgagacgcagauggcgaagcuguacggggacagcaagccccagaaguucaccuccagcgccaacggcgugaccacccacuacgucucccagaucggcggguuccccaaccagacggaggacggcgggcugccgcagagcggccggaucgugguggacuacaugguccagaaguccgggaagaccggcaccaucaccuaccagcgcggcauccuccugccccagaagguguggugcgccagcgggcgguccaaggugaucaagggcagccugccccucaucggggaggccgacugccugcacgagaaguacggcgggcugaacaagagcaagcccuacuacacgggcgagcacgccaaggcgaucggcaacugcccgaucugggucaagacgccccucaagcuggccaacgggaccaaguaccgcccgcccgccaagcugcucaaggagcggggcuucuucggggccaucgccggcuuccuggagggcgggugggagggcaugaucgcgggguggcacggcuacaccucccacggggcccacggcguggccguggccgccgaccugaaguccacccaggaggcgaucaacaagaucaccaagaaccucaacucccugagcgagcuggaggucaagaaccuccagcgccuguccggcgccauggacgagcugcacaacgagauccucgagcuggacgagaagguggacgaccugcgggccgacaccaucagcucccagaucgagcucgccguccugcugagcaacgaggggaucaucaacuccgaggacgagcaccuccuggcccuggagcgcaagcucaagaagaugcugggccccagcgcgguggagaucgggaacggcugcuucgagaccaagcacaagugcaaccagaccugccuggaccggaucgccgccgggacguucgacgccggcgaguucucccuccccaccuucgacagccugaacaucaccgcggccucccugaacgacgacggccucgacaaccacaccauccugcuguacuacagcacggccgccuccagccuggccgugacccucaugaucgcgaucuucgucguguacauggugucccgcgacaacgucagcugcuccaucugccuguga

SEQ ID NO: 92114 - RNA, 1758 nt, Artificial Sequence; identical to SEQ ID NO: 91013
  derived and/or modified CDS sequence (opt1) from hemagglutinin__InfluenzaB__AHL93840

SEQ ID NO: 92115 - RNA, 1758 nt, Artificial Sequence; identical to SEQ ID NO: 90707
  derived and/or modified CDS sequence (opt1) from hemagglutinin__InfluenzaB__AHL93851

SEQ ID NO: 92116 - RNA, 1758 nt, Artificial Sequence; identical to SEQ ID NO: 90707
  derived and/or modified CDS sequence (opt1) from hemagglutinin__InfluenzaB__AHL93862

SEQ ID NO: 92117 - RNA, 1758 nt, Artificial Sequence
  derived and/or modified CDS sequence (opt1) from hemagglutinin__InfluenzaB__AHL93873
augaaggccaucaucgugcugcucauggucgugaccagcaacgccgaccgcaucugcaccggcaucacguccagcaacagcccccacaucgugaagaccgcgacccagggggaggucaacgugaccggcgugaucccgcugacgaccacccccaccaagagccacuucgccaaccugaaggggacggagacccggggcgagcucugccccaagugccugaacugcaccgaccuggacgucgcccucgggcgccccaagugcaccggcaagaucccguccgcccgggugagcauccugcacgaggugcgccccgucacguccggcugcuuccccaucaugcacgaccggaccaagauccgccagcugcccaaccuccugcggggguacgagcacauccgccugagcacccacaacgugaucaacgccgagaacgcgccgggcgggcccuacaagaucggcaccuccgggagcugccccaacaucacgaacggcaacggcuucuucgccaccauggccugggccgugcccaagaacgacaagaacaagaccgcgaccaacccgcucacgaucgagguccccuacaucugcaccgagggggaggaccagaucaccguguggggcuuccacuccgacaacgagacccagauggccaagcuguacggggacagcaagccccagaaguucacguccagcgccaacggcgugaccacccacuacgucucccagaucggcggguuccccaaccagaccgaggacggcgggcugccgcagagcggccggaucgugguggacuacaugguccagaaguccgggaagacgggcaccaucaccuaccagcgcggcauccuccugccccagaagguguggugcgccagcgggcgguccaaggugaucaagggcagccugccccucaucggggaggccgacugccugcacgagaaguacggcgggcugaacaagagcaagcccuacuacaccggcgagcacgcgaaggccaucggcaacugcccgaucugggucaagacgccccucaagcuggccaacgggaccaaguaccgcccgcccgccaagcugcucaaggagcggggcuucuucggggccaucgcgggcuuccuggagggcgggugggagggcaugaucgccggguggcacggcuacaccucccacggggcccacggcguggccguggccgcggaccugaaguccacccaggaggccaucaacaagaucacgaagaaccucaacucccugagcgagcuggaggucaagaaccuccagcgccuguccggcgccauggacgagcugcacaacgagauccucgagcuggacgagaagguggacgaccugcgggccgacaccaucagcucccagaucgagcucgccguccugcugagcaacgaggggaucaucaacuccgaggacgagcaccuccuggcgcuggagcgcaagcucaagaagaugcugggccccagcgccguggagaucgggaacggcugcuucgagaccaagcacaagugcaaccagaccugccuggaccggaucgccgccgggaccuucgacgcgggcgaguucucccuccccacguucgacagccugaacaucaccgccgccucccugaacgacgacggccucgacaaccacaccauccugcuguacuacagcaccgccgccuccagccuggcggugacgcucaugaucgccaucuucgucguguacauggugucccgcgacaacgucagcugcuccaucugccuguga

SEQ ID NO: 92118 - RNA, 1758 nt, Artificial Sequence; identical to SEQ ID NO: 90707
  derived and/or modified CDS sequence (opt1) from hemagglutinin__InfluenzaB__AHL93884

SEQ ID NO: 92119 - RNA, 1758 nt, Artificial Sequence; identical to SEQ ID NO: 90707
  derived and/or modified CDS sequence (opt1) from hemagglutinin__InfluenzaB__AHL93895

SEQ ID NO: 92120 - RNA, 1758 nt, Artificial Sequence; identical to SEQ ID NO: 90707
  derived and/or modified CDS sequence (opt1) from hemagglutinin__InfluenzaB__AHL93906

SEQ ID NO: 92121 - RNA, 1758 nt, Artificial Sequence; identical to SEQ ID NO: 90707
  derived and/or modified CDS sequence (opt1) from hemagglutinin__InfluenzaB__AHL93917

SEQ ID NO: 92122 - RNA, 1758 nt, Artificial Sequence; identical to SEQ ID NO: 90632
  derived and/or modified CDS sequence (opt1) from hemagglutinin__InfluenzaB__AHL93928

SEQ ID NO: 92123 - RNA, 1758 nt, Artificial Sequence; identical to SEQ ID NO: 90669
  derived and/or modified CDS sequence (opt1) from hemagglutinin__InfluenzaB__AHL93939

SEQ ID NO: 92124 - RNA, 1758 nt, Artificial Sequence; identical to SEQ ID NO: 90707
  derived and/or modified CDS sequence (opt1) from hemagglutinin__InfluenzaB__AHL93950

SEQ ID NO: 92125 - RNA, 1758 nt, Artificial Sequence; identical to SEQ ID NO: 90669
  derived and/or modified CDS sequence (opt1) from hemagglutinin__InfluenzaB__AHL93961

SEQ ID NO: 92126 - RNA, 1758 nt, Artificial Sequence
  derived and/or modified CDS sequence (opt1) from hemagglutinin__InfluenzaB__AHL93972
augaaggccaucaucgugcugcucauggucgugaccagcaccgccgaccgcaucugcacgggcaucaccuccagcaacagcccccacguggucaagaccgcgacccagggggaggugaacgugacgggcgucaucccgcugaccaccacccccaccaagagccacuucgccaaccugaaggggaccgagacccggggcaagcucugccccaagugccugaacugcaccgaccuggacguggcccucgggcgccccaagugcacgggcaagaucccguccgcccgggugagcauccugcacgagguccgccccgugaccuccggcugcuuccccaucaugcacgaccggaccaagauccgccagcugcccaaccuccugcggggguacgagcacauccgccugagcacccacaacgugaucaacgccgagaacgcgccgggcgggcccuacaagaucggcacguccgggagcugccccaacgucaccaacggcaacggcuucuucgccaccauggccugggccgugcccaagaacgacaagaacaagaccgcgacgaacccgcucaccaucgaggugcccuacaucugcaccgagggggaggaccagaucaccgucuggggcuuccacuccgacaacgagacgcagauggccaagcuguacggggacagcaagccccagaaguucaccuccagcgccaacggcgugaccacccacuacgugucccagaucggcggguuccccaaccagacggaggacggcgggcugccgcagagcggccggaucgucguggacuacauggugcagaaguccgggaagaccggcaccaucaccuaccagcgcggcauccuccugccccagaaggucuggugcgccagcgggcgguccaaggugaucaagggcagccugccccucaucggggaggccgacugccugcacgagaaguacggcgggcugaacaagagcaagcccuacuacacgggcgagcacgcgaaggccgugggcaacugcccgaucugggucaagacgccccucaagcuggccaacgggaccaaguaccgcccgcccgccaagcugcucaaggagcggggcuucuucggggccaucgcgggcuuccuggagggcgggugggagggcaugaucgccggguggcacggcuacaccucccacggggcccacggcguggccgucgccgcggaccugaaguccacgcaggaggccaucaacaagaucaccaagaaccucaacucccugagcgagcuggaggugaagaaccuccagcgccuguccggcgccauggacgagcugcacaacgagauccucgagcuggacgagaagguggacgaccugcgggccgacaccaucagcucccagaucgagcucgccguccugcugagcaacgaggggaucaucaacuccgaggacgagcaccuccuggcgcuggagcgcaagcucaagaagaugcugggccccagcgccguggagaucgggaacggcugcuucgagaccaagcacaagugcaaccagaccugccuggaccggaucgccgccgggacguucgacgcgggcgaguucucccuccccaccuucgacagccugaacaucaccgccgccucccugaacgacgacggccucgacaaccacaccauccugcuguacuacagcacggccgccuccagccuggcggugacccucaugaucgccaucuucgucguguacauggugucccgcgacaacgucagcugcuccaucugccuguga

SEQ ID NO: 92127 - RNA, 1758 nt, Artificial Sequence; identical to SEQ ID NO: 90632
  derived and/or modified CDS sequence (opt1) from hemagglutinin__InfluenzaB__AHL93983

SEQ ID NO: 92128 - RNA, 1755 nt, Artificial Sequence
  derived and/or modified CDS sequence (opt1) from hemagglutinin__InfluenzaB__AHL93994
augaaggccaucaucgugcugcucauggucgugaccagcaacgccgaccgcaucugcaccggcaucacguccagcaacagcccccacguggucaagaccgcgacccagggggaggugaacgugaccggcgucaucccgcugacgaccacccccaagaaguccuacuucgccaaccugaaggggaccaagacgcggggcaagcucugccccgacugccugaacugcaccgaccuggacguggcccucgggcgccccaugugcgugggcaccaccccguccgccaaggccagcauccugcacgagguccggcccgugacguccggcugcuuccccaucaugcacgaccgcaccaagauccggcagcuggcgaaccuccugcgcggguacgagaacauccggcugagcacccagaacgugaucgacgccgagaaggcccccggcgggccguaccgccucggcaccuccgggagcugccccaacgccacguccaagagcggcuucuucgcgaccauggccugggccguccccaaggacaacaacaagaacgccaccaacccccugaccguggaggugccguacaucugcgccgagggcgaggaccagaucacggucuggggguuccacuccgacaacaagacccagaugaagaaccuguacggcgacagcaacccccagaaguucaccuccagcgcgaacggggugaccacgcacuacgugucccagaucggcggcuuccccgaccagaccgaggacgggggccucccccagagcgggcggaucgucguggacuacaugaugcagaagccgggcaagaccgggaccaucguguaccagcgcggcguccugcugccccagaagguguggugcgccuccggccggagcaaggugaucaaggggagccucccccugaucggcgaggccgacugccugcacgagaaguacgggggccucaacaaguccaagcccuacuacacgggggagcacgccaaggccaucggcaacugcccgaucugggucaagacgccccugaagcuggcgaacggcaccaaguaccgcccgcccgccaagcuccugaaggagcggggguucuucggcgccaucgccggguuccuggagggcgggugggagggcaugaucgccggcuggcacggguacaccagccacggcgcgcacgggguggccgucgccgccgaccucaaguccacccaggaggccaucaacaagaucaccaagaaccugaacagccuguccgagcucgaggugaagaaccugcagcgccugagcggcgcgauggacgagcuccacaacgagauccuggagcuggacgagaagguggacgaccuccgggccgacaccaucuccagccagaucgagcuggccguccugcucuccaacgagggcaucaucaacagcgaggacgagcaccuccuggcccuggagcgcaagcugaagaagaugcuggggcccuccgcgguggacaucggcaacgggugcuucgagaccaagcacaagugcaaccagacgugccucgaccggaucgccgccggcaccuucaacgccggggaguucagccugcccaccuucgacucccugaacaucaccgccgcgagccucaacgacgacggccuggacaaccacaccauccugcuguacuacuccacggccgccagcucccucgccgugacccugaugcuggccaucuucaucgucuacaugaucagccgcgacaacguguccugcagcaucugccucuga

SEQ ID NO: 92129 - RNA, 1758 nt, Artificial Sequence; identical to SEQ ID NO: 90707
  derived and/or modified CDS sequence (opt1) from hemagglutinin__InfluenzaB__AHL94005

SEQ ID NO: 92130 - RNA, 1758 nt, Artificial Sequence; identical to SEQ ID NO: 90707
  derived and/or modified CDS sequence (opt1) from hemagglutinin__InfluenzaB__AHL94016

SEQ ID NO: 92131 - RNA, 1758 nt, Artificial Sequence
  derived and/or modified CDS sequence (opt1) from hemagglutinin__InfluenzaB__AHL94027
augaaggccaucaucgugcugcucauggucgugaccagcaacgccgaccgcaucugcaccggcaucacguccagcaacagcccccacaucgugaagaccgcgacccagggggaggucaacgugaccggcgugaucccgcugacgaccacccccaccaagagccacuucgccaaccugaaggggacggagacccggggcaagcucugccccaagugccugaacugcaccgaccuggacgucgcccucgggcgccccaagugcaccggcaagaucccguccgcccgggugagcauccugcacgaggugcgccccgucacguccggcugcuuccccaucaugcacgaccggaccaagauccgccagcugcccaaccuccugcggggguacgagcacauccgccugagcacccacaacgugaucaacgccgagaacgcgccgggcgggcccuacaagaucggcaccuccgggagcugccccaacaucacgaacggcaacggcuucuucgccaccauggccugggccgugcccaagaacgacaagaacaagaccgcgaccaacccgcucacgaucgagguccccuacaucugcaccgagggggaggaccagaucaccguguggggcuuccacuccgacaacgagacccagauggccaagcuguacggggacagcaagccccagaaguucacguccagcgccaacggcgugaccacccacuacgucucccagaucggcggguuccccaaccagaccgaggacggcgggcugccgcagagcggccggaucgugguggacuacaugguccagaaguccgggaagacgggcaccaucaccuaccagaugggcgugcuccugccccagaagguguggugcgccagcgggcgcuccaaggucaucaagggcagccugccccucaucggggaggccgacugccugcacgagaaguacggcgggcugaacaagagcaagcccuacuacaccggcgagcacgcgaaggccaucggcaacugcccgaucugggugaagacgccccucaagcuggccaacgggaccaaguaccggccgcccgccaagcugcucaaggagcgcggcuucuucggggccaucgcgggcuuccuggagggcgggugggagggcaugaucgccggguggcacggcuacaccucccacggggcccacggcguggccgucgccgcggaccugaaguccacccaggaggccaucaacaagaucacgaagaaccucaacucccugagcgagcuggaggugaagaaccuccagcggcuguccggcgccauggacgagcugcacaacgagauccucgagcuggacgagaaggucgacgaccugcgcgccgacaccaucagcucccagaucgagcucgccgugcugcugagcaacgaggggaucaucaacuccgaggacgagcaccuccuggcgcuggagcggaagcucaagaagaugcugggccccagcgccguggagaucgggaacggcugcuucgagaccaagcacaagugcaaccagaccugccuggaccgcaucgccgccgggaccuucgacgcgggcgaguucucccuccccacguucgacagccugaacaucaccgccgccucccugaacgacgacggccucgacaaccacaccauccugcuguacuacagcaccgccgccuccagccuggcggucacgcucaugaucgccaucuucgugguguacauggucucccgggacaacgugagcugcuccaucugccuguga

SEQ ID NO: 92132 - RNA, 1758 nt, Artificial Sequence; identical to SEQ ID NO: 90669
  derived and/or modified CDS sequence (opt1) from hemagglutinin__InfluenzaB__AHL94038

SEQ ID NO: 92133 - RNA, 1758 nt, Artificial Sequence; identical to SEQ ID NO: 90632
  derived and/or modified CDS sequence (opt1) from hemagglutinin__InfluenzaB__AHL94049

SEQ ID NO: 92134 - RNA, 1758 nt, Artificial Sequence; identical to SEQ ID NO: 90707
  derived and/or modified CDS sequence (opt1) from hemagglutinin__InfluenzaB__AHL94060

SEQ ID NO: 92135 - RNA, 1758 nt, Artificial Sequence
  derived and/or modified CDS sequence (opt1) from hemagglutinin__InfluenzaB__AHL94071
augaaggccaucaucgugcugcucauggucgugaccagcaacgccgaccgcaucugcaccggcaucacguccagcaacagcccccacaucgugaagaccgcgacccagggggaggucaacgugaccggcgugaucccgcugacgaccacccccaccaagagccacuucgccaaccugaaggggacggagacccggggcaagcucugccccaagugccugaacugcaccgaccuggacgucgcccucgggcgccccaagugcaccggcaagaucccguccgcccgggugagcauccugcacgaggugcgccccgucacguccggcugcuuccccaucaugcacgaccggaccaagauccgccagcugcccaaccuccugcggggguacgagcacauccgccugagcacccacaacgugaucaacgccgagaacgcgccgggcgggcccuacaagaucggcaccuccgggagcugccccaacaucacgaacggcaacggcuucuucgccaccauggccugggccgugcccaagaacgacaagaacaagaccgcgaccaacccgcucacgaucgagguccccuacaucugcaccgagggggaggaccagaucaccguguggggcuuccacuccgacaacgagacccagauggccaagcuguacggggacagcaagccccagaaguucacguccagcgccaacggcgugaccacccacuacgucucccagaucggcggguuccccaaccagaccgaggacggcgggcugccgcagagcggccggaucgugguggacuacaugaugcagaaguccgggaagacgggcaccaucaccuaccagcgcggcauccuccugccccagaaggucuggugcgccagcgggcgguccaaggugaucaagggcagccugccccucaucggggaggccgacugccugcacgagaaguacggcgggcugaacaagagcaagcccuacuacaccggcgagcacgcgaaggccaucggcaacugcccgaucugggugaagacgccccucaagcuggccaacgggaccaaguaccgcccgcccgccaagcugcucaaggagcggggcuucuucggggccaucgcgggcuuccuggagggcgggugggagggcaugaucgccggguggcacggcuacaccucccacggggcccacggcgucgccguggccgcggaccugaaguccacccaggaggccaucuccaagaucacgaagaaccucaacagccuguccgagcuggaggugaagaaccuccagcgccugagcggcgccauggacgagcugcacaacgagauccucgagcuggacgagaaggucgacgaccugcgggccgacaccaucuccagccagaucgagcucgccgugcugcuguccaacgaggggaucaucaacagcgaggacgagcaccuccuggcgcuggagcgcaagcucaagaagaugcugggccccuccgccgucgagaucgggaacggcugcuucgagaccaagcacaagugcaaccagaccugccuggaccggaucgccgccgggaccuucgacgcgggcgaguucagccuccccacguucgacucccugaacaucaccgccgccagccugaacgacgacggccucgacaaccacaccauccugcuguacuacuccaccgccgccagcucccuggcggugacgcucaugaucgccaucuucguggucuacauggugagccgcgacaacguguccugcagcaucugccuguga

SEQ ID NO: 92136 - RNA, 1755 nt, Artificial Sequence
  derived and/or modified CDS sequence (opt1) from hemagglutinin__InfluenzaB__AHL94082
augaaggccaucaucgugcugcucauggucgugaccagcaacgccgaccgcaucugcaccggcaucacguccagcaacagcccccacguggucaagaccgcgacccagggggaggugaacgugaccggcgucaucccgcugacgaccacccccaccaaguccuacuucgccaaccugaaggggacgcggacccgcggcaagcucugccccgacugccugaacugcaccgaccuggacguggcccucgggcggcccaugugcgugggcaccacgccguccgccaaggccagcauccugcacgagauccgccccgucaccuccggcugcuuccccaucaugcacgaccggaccaagauccgccagcugcccaaccuccugcggggguacgagaacauccgccugagcacccagaacgugaucgacgcggagaaggccccgggcgggcccuaccggcucggcacguccgggagcugccccaacgccaccuccaagaucggcuucuucgccaccauggcgugggccgugcccaaggacaacuacaagaacgccaccaacccgcugacggucgaggugcccuacaucugcaccgagggcgaggaccagaucaccguguggggguuccacagcgacaacaagacccagaugaagaaccuguacggcgacuccaacccccagaaguucacgagcuccgccaacggggucaccacccacuacgugagccagaucggcgacuuccccgaccagaccgaggacggcgggcucccgcaguccggccgcaucguggucgacuacaugaugcagaagcccgggaagacgggcaccaucguguaccagcgcggggugcugcugccccagaaggucuggugcgccagcggccgguccaaggugaucaagggcagccucccccugaucggggaggcggacugccugcacgagaaguacggcgggcucaacaagagcaagccguacuacaccggcgagcacgccaaggccaucgggaacugccccaucugggugaagacgccccugaagcuggccaacggcaccaaguaccggcccccggccaagcuccugaaggagcgcggcuucuucggggcgaucgccggcuuccuggagggcgggugggaggggaugaucgccggcuggcacggcuacaccucccacggggcccacggcgucgccguggcggccgaccucaagagcacccaggaggccaucaacaagaucaccaagaaccugaacucccugagcgagcucgaggucaagaaccugcagcggcuguccggggccauggacgagcuccacaacgagauccuggagcuggacgagaagguggacgaccuccgcgccgacacgaucagcucccagaucgagcuggcggugcugcucagcaacgagggcaucaucaacuccgaggacgagcaccuccuggcccuggagcggaagcugaagaagaugcugggccccagcgccgucgacaucgggaacggcugcuucgagaccaagcacaagugcaaccagaccugccucgaccgcaucgccgcggggaccuucaacgccggcgaguucucccugcccaccuucgacagccugaacaucacggccgccucccucaacgacgacgggcuggacaaccacaccauccugcuguacuacagcaccgccgcguccagccucgccgugacccugaugcuggccaucuucaucguguacauggucucccgggacaacgugagcugcuccaucugccucuga

SEQ ID NO: 92137 - RNA, 1758 nt, Artificial Sequence; identical to SEQ ID NO: 90669
  derived and/or modified CDS sequence (opt1) from hemagglutinin__InfluenzaB__AHL94093

SEQ ID NO: 92138 - RNA, 1758 nt, Artificial Sequence; identical to SEQ ID NO: 90707
  derived and/or modified CDS sequence (opt1) from hemagglutinin__InfluenzaB__AHL94102

SEQ ID NO: 92139 - RNA, 1758 nt, Artificial Sequence
  derived and/or modified CDS sequence (opt1) from hemagglutinin__InfluenzaB__AHL94113
augaaggccaucaucgugcugcucauggucgugaccagcaacgccgaccgcaucugcaccggcaucacguccagcaacagcccccacaucgugaagaccgcgacccagggggaggucaacgugaccggcgugaucccgcugacgaccacccccaccaagucccacuucgccaaccugaaggggacggagacccggggcaagcucugccccaagugccugaacugcaccgaccuggacgucgcccucgggcgccccaagugcaccggcaagaucccguccgcccgggugagcauccugcacgaggugcgccccgucacguccggcugcuuccccaucaugcacgaccggaccaagauccgccagcugcccaaccuccugcggggguacgagcacauccgccugagcacccacaacgugaucaacgccgagaacgcgccgggcgggcccuacaagaucggcaccuccgggagcugccucaacaucacgaacggcaacggcuucuucgccaccauggccugggccgugcccaagaacgacaagaacaagaccgcgaccaacccccugacgaucgaggucccguacaucugcaccgagggggaggaccagaucaccguguggggcuuccacuccgacaacgagacccagauggccaagcuguacggggacagcaagccccagaaguucacguccagcgccaacggcgugaccacccacuacgucucccagaucggcggguuccccaaccagaccgaggacggcgggcucccccagagcggccggaucgugguggacuacaugguccagaaguccgggaagacgggcaccaucaccuaccagcgcggcauccugcugccgcagaagguguggugcgccagcgggcgguccaaggugaucaagggcagccucccccugaucggggaggccgacugccugcacgagaaguacggcgggcucaacaagagcaagcccuacuacaccggcgagcacgcgaaggccaucggcaacugccccaucugggucaagacgccgcugaagcuggccaacgggaccaaguaccgcccgcccgccaagcuccugaaggagcggggcuucuucggggccaucgcgggcuuccuggagggcgggugggagggcaugaucgccggguggcacggcuacaccucccacggggcccacggcguggccguggccgcggaccucaagagcacccaggaggccaucaacaagaucacgaagaaccugaacucccugagcgagcucgaggucaagaaccugcagcgccuguccggcgccauggacgagcuccacaacgagauccuggagcuggacgagaagguggacgaccuccgggccgacaccaucagcucccagaucgagcuggccguccugcucagcaacgaggggaucaucaacuccgaggacgagcaccuccuggcgcuggagcgcaagcugaagaagaugcugggccccagcgccguggagaucgggaacggcugcuucgagaccaagcacaagugcaaccagaccugccucgaccggaucgccgccgggaccuucgacgcgggcgaguucucccugcccacguucgacagccugaacaucaccgccgccucccucaacgacgacggccuggacaaccacaccauccugcuguacuacagcaccgccgccuccagccucgcggugacgcugaugaucgccaucuucgucguguacauggugucccgcgacaacgucagcugcuccaucugccuguga

SEQ ID NO: 92140 - RNA, 1758 nt, Artificial Sequence
  derived and/or modified CDS sequence (opt1) from hemagglutinin__InfluenzaB__AHL94124
augaaggccaucaucgugcugcucauggucgugaccagcaacgccgaccgcaucugcaccggcaucacguccagcaacagcccccacaucgugaagaccgcgacccagggggaggucaacgugaccggcgugaucccgcugacgaccacccccaccaagagccacuucgccaaccugaaggggacggagacccggggcaagcucugccccaagugccugaacugcaccgaccuggacgucgcccucgggcgccccaagugcaccggcaagaucccguccgcccgggugagcauccugcacgagauccgccccgugacguccggcugcuuccccaucaugcacgaccggaccaagauccgccagcugcccaaccuccugcggggguacgagcacauccgccugagcacccacaacgucaucaacgccgagaacgcgccgggcgggcccuacaagaucggcaccuccgggagcugccccaacaucacgaacggcaacggcuucuucgccaccauggccugggccgugcccaagaacgacaagaacaagaccgcgaccaacccgcucacgaucgaggugcccuacaucugcaccgagggggaggaccagaucaccgucuggggcuuccacuccgacaacgagacccagauggccaagcuguacggggacagcaagccccagaaguucacguccagcgccaacggcgugaccacccacuacgugucccagaucggcggguuccccaaccagaccgaggacggcgggcugccgcagagcggccggaucgucguggacuacauggugcagaaguccgggaagacgggcaccaucaccuaccagcgcggcauccuccugccccagaaggucuggugcgccagcgggcgguccaaggugaucaagggcagccugccccucaucggggaggccgacugccugcacgagaaguacggcgggcugaacaagagcaagcccuacuacaccggcgagcacgcgaaggccaucggcaacugcccgaucugggugaagacgccccucaagcuggccaacgggaccaaguaccgcccgcccgccaagcugcucaaggagcggggcuucuucggggccaucgcgggcuuccuggagggcgggugggagggcaugaucgccggguggcacggcuacaccucccacggggcccacggcgucgccguggccgcggaccugaaguccacccaggaggccaucaacaagaucacgaagaaccucaacucccugagcgagcuggaggugaagaaccuccagcgccuguccggcgccauggacgagcugcacaacgagauccucgagcuggacgagaaggucgacgaccugcgggccgacaccaucagcucccagaucgagcucgccgugcugcugagcaacgaggggaucaucaacuccgaggacgagcaccuccuggcgcuggagcgcaagcucaagaagaugcugggccccagcgccgucgagaucgggaacggcugcuucgagaccaagcacaagugcaaccagaccugccuggaccggaucgccgccgggaccuucgacgcgggcgaguucucccuccccacguucgacagccugaacaucaccgccgccucccugaacgacgacggccucgacaaccacaccauccugcuguacuacagcaccgccgccuccagccuggcggugacgcucaugaucgccaucuucguggucuacauggugucccgcgacaacgugagcugcuccaucugccuguga

SEQ ID NO: 92141 - RNA, 1758 nt, Artificial Sequence; identical to SEQ ID NO: 90632
  derived and/or modified CDS sequence (opt1) from hemagglutinin__InfluenzaB__AHL94135

SEQ ID NO: 92142 - RNA, 1758 nt, Artificial Sequence; identical to SEQ ID NO: 90632
  derived and/or modified CDS sequence (opt1) from hemagglutinin__InfluenzaB__AHL94146

SEQ ID NO: 92143 - RNA, 1758 nt, Artificial Sequence; identical to SEQ ID NO: 90707
  derived and/or modified CDS sequence (opt1) from hemagglutinin__InfluenzaB__AHL94157

SEQ ID NO: 92144 - RNA, 1758 nt, Artificial Sequence; identical to SEQ ID NO: 90707
  derived and/or modified CDS sequence (opt1) from hemagglutinin__InfluenzaB__AHL94168

SEQ ID NO: 92145 - RNA, 1758 nt, Artificial Sequence; identical to SEQ ID NO: 90632
  derived and/or modified CDS sequence (opt1) from hemagglutinin__InfluenzaB__AHL94179

SEQ ID NO: 92146 - RNA, 1758 nt, Artificial Sequence; identical to SEQ ID NO: 90632
  derived and/or modified CDS sequence (opt1) from hemagglutinin__InfluenzaB__AHL94190

SEQ ID NO: 92147 - RNA, 1758 nt, Artificial Sequence
  derived and/or modified CDS sequence (opt1) from hemagglutinin__InfluenzaB__AHL94201
augaaggccaucaucgugcugcucauggucgugaccagcaacgccgaccgcaucugcaccggcaucacguccagcaacagcccccacaucgugaagaccgcgacccagggggaggucaacgugaccggcgugaucccgcugacgaccacccccaccaagagccacuucgccaaccugaaggggacggagacccggggcaagcucugccccaagugccugaacugcaccgaccuggacgucgcccucgggcgccccaagugcaccggcaagaucccguccgcccgggugagcauccugcacgaggugcgccccgucacguccggcugcuuccccaucaugcacgaccggaccaagauccgccagcugcccaaccuccugcggggguacgagcacauccgccugagcacccacaacgugaucaacgccgagaacgcgccgggcgggcccuacaagaucggcaccuccgggagcugccccaacaucacgaacggcaacggcuucuucgagaccauggccugggccgugcccaagaacgacaagaacaagaccgccaccaacccgcucacgaucgagguccccuacaucugcaccgagggggaggaccagaucaccguguggggcuuccacuccgacaacgagacccagauggcgaagcuguacggggacagcaagccccagaaguucacguccagcgccaacggcgugaccacccacuacgucucccagaucggcggguuccccaaccagaccgaggacggcgggcugccgcagagcggccggaucgugguggacuacaugguccagaaguccgggaagacgggcaccaucaccuaccagcgcggcauccuccugccccagaagguguggugcgccagcgggcgguccaaggugaucaagggcagccugccccucaucggggaggccgacugccugcacgagaaguacggcgggcugaacaagagcaagcccuacuacaccggcgagcacgccaaggcgaucggcaacugcccgaucugggucaagacgccccucaagcuggccaacgggaccaaguaccgcccgcccgccaagcugcucaaggagcggggcuucuucggggccaucgccggcuuccuggagggcgggugggagggcaugaucgcgggguggcacggcuacaccucccacggggcccacggcguggccguggccgccgaccugaaguccacccaggaggcgaucaacaagaucacgaagaaccucaacucccugagcgagcuggaggucaagaaccuccagcgccuguccggcgccauggacgagcugcacaacgagauccucgagcuggacgagaagguggacgaccugcgggccgacaccaucagcucccagaucgagcucgccguccugcugagcaacgaggggaucaucaacuccgaggacgagcaccuccuggcccuggagcgcaagcucaagaagaugcugggccccagcgcgguggagaucgggaacggcugcuucgagaccaagcacaagugcaaccagaccugccuggaccggaucgccgccgggaccuucgacgccggcgaguucucccuccccacguucgacagccugaacaucaccgcggccucccugaacgacgacggccucgacaaccacaccauccugcuguacuacagcaccgccgccuccagccuggccgugacgcucaugaucgcgaucuucgucguguacauggugucccgcaacaacgucagcugcuccaucugccuguga

SEQ ID NO: 92148 - RNA, 1758 nt, Artificial Sequence
  derived and/or modified CDS sequence (opt1) from hemagglutinin__InfluenzaB__AHL94212
augaaggccaucaucgugcugcucauggucgugaccagcaacgccgaccgcaucugcaccggcaucacguccagcaacagcccccacguggucaagaccgcgacccagggggaggugaacgugaccggcgucaucccgcugacgaccacccccaccaagagccacuucgccaaccugaaggggacggagacccggggcaagcucugccccaagugccugaacugcaccgaccuggacguggcccucgggcgccccaagugcaccggcaagaucccguccgcccgggugagcauccugcacgagguccgccccgugacguccggcugcuuccccaucaugcacgaccggaccaagauccgccagcugcccaaccuccugcggggguacgagcacauccgccugagcacccacaacgugaucaacgccgagaacgcgccgggcgggcccuacaagaucggcaccuccgggagcugccccaacgucacgaacggcaacggcuucuucgccaccauggccugggccgugcccaagaacgacaagaacaagaccgcgaccaacccgcucacgaucgaggugcccuacaucugcaccgagggggaggaccaggucaccguguggggcuuccacuccgacaacgagacccagauggccaagcuguacggggacagcaagccccagaaguucacguccagcgccaacggcgugaccacccacuacgucucccagaucggcggguuccccaaccagaccgaggacggcgggcugccgcagagcggccggaucgugguggacuacaugguccagaaguccgggaagacgggcaccaucaccuaccagcgcggcauccuccugccccagaagguguggugcgccagcgggcgguccaaggugaucaagggcagccugccccucaucggggaggccgacugccugcacgagaaguacggcgggcugaacaagagcaagcccuacuacaccggcgagcacgcgaaggccaucggcaacugcccgaucugggucaagacgccccucaagcuggccaacgggaccaaguaccgcccgcccgccaagcugcucaaggagcggggcuucuucggggccaucgcgggcuuccuggagggcgggugggagggcaugaucgccggguggcacggcuacaccucccacggggcccacggcguggccgucgccgcggaccugaaguccacccaggaggccaucaacaagaucacgaagaaccucaacucccugagcgagcuggaggugaagaaccuccagcgccuguccggcgccauggacgagcugcacaacgagauccucgagcuggacgagaagguggacgaccugcgggccgacaccaucagcucccagaucgagcucgccguccugcugagcaacgaggggaucaucaacuccgaggacgagcaccuccuggcgcuggagcgcaagcucaagaagaugcugggccccagcgccguggagaucgggaacggcugcuucgagaccaagcacaagugcaaccagaccugccuggaccggaucgccgccgggaccuucgacgcgggcgaguucucccuccccacguucgacagccugaacaucaccgccgccucccugaacgacgacggccucgacaaccacaccauccugcuguacuacagcaccgccgccuccagccuggcggugacgcucaugaucgccaucuucgucguguacauggugucccgcgacaacgucagcugcuccaucugccuguga

SEQ ID NO: 92149 - RNA, 1758 nt, Artificial Sequence; identical to SEQ ID NO: 90707
  derived and/or modified CDS sequence (opt1) from hemagglutinin__InfluenzaB__AHL94220

SEQ ID NO: 92150 - RNA, 1758 nt, Artificial Sequence; identical to SEQ ID NO: 90707
  derived and/or modified CDS sequence (opt1) from hemagglutinin__InfluenzaB__AHL94231

SEQ ID NO: 92151 - RNA, 1758 nt, Artificial Sequence
  derived and/or modified CDS sequence (opt1) from hemagglutinin__InfluenzaB__AHL94242
augaaggccaucaucgugcugcucauggucgugaccagcaacgccgaccgcaucugcaccggcaucacguccagcaacagcccccacguggucaagaccgcgacccagggggaggugaacgugaccggcgucaucccgcugacgaccacccccaccaagucccacuucgccaaccugaaggggacggagacccggggcaagcucugccccaagugccugaacugcaccgaccuggacguggcccucgggcgccccaagugcaccggcaagaucccguccgcccgggugagcauccugcacgagguccgccccgugacguccggcugcuuccccaucaugcacgaccggaccaagauccgccagcugcccaaccuccugcggggguacgagcacauccgccugagcacccacaacgugaucaacgccgagaacgcgccgggcgggcccuacaagaucggcaccuccgggagcugccccaacgucacgaacggcaacggcuucuucgccaccauggccugggccgugcccaagaacgacaagaacaagaccgcgaccaacccgcucacgaucgaggugcccuacaucugcaccgagggggaggaccagaucaccgucuggggcuuccacuccgacaacgagacccagauggccaagcuguacggggacagcaagccccagaaguucacguccagcgccaacggcgugaccacccacuacgugucccagaucggcggguuccccaaccagaccgaggacggcgggcugccgcagagcggccggaucgucguggacuacauggugcagaaguccgggaagacgggcaccaucaccuaccagcgcggcauccuccugccccagaaggucuggugcgccaacgggcggagcaaggugaucaagggcucccugccccucaucggggaggccgacugccugcacgagaaguacggcgggcugaacaagagcaagcccuacuacaccggcgagcacgcgaaggccaucggcaacugcccgaucugggugaagacgccccucaagcuggccaacgggaccaaguaccgcccgcccgccaagcugcucaaggagcggggcuucuucggggccaucgcgggcuuccuggagggcgggugggagggcaugaucgccggguggcacggcuacaccagccacggggcccacggcgucgccguggccgcggaccugaaguccacccaggaggccaucaacaagaucacgaagaaccucaacagccuguccgagcuggaggucaagaaccuccagcgccugagcggcgccauggacgagcugcacaacgagauccucgagcuggacgagaagguggacgaccugcgggccgacaccaucuccagccagaucgagcucgccgugcugcuguccaacgaggggaucaucaacagcgaggacgagcaccuccuggcgcuggagcgcaagcucaagaagaugcugggccccuccgccgucgagaucgggaacggcugcuucgagaccaagcacaagugcaaccagaccugccuggaccggaucgccgccgggaccuucgacgcgggcgaguucagccuccccacguucgacucccugaacaucaccgccgccagccugaacgacgacggccucgacaaccacaccauccugcuguacuacuccaccgccgccagcucccuggcggugacgcucaugaucgccaucuucguggucuacauggugagccgcgacaacguguccugcagcaucugccuguga

SEQ ID NO: 92152 - RNA, 1758 nt, Artificial Sequence; identical to SEQ ID NO: 90669
  derived and/or modified CDS sequence (opt1) from hemagglutinin__InfluenzaB__AHL94253

SEQ ID NO: 92153 - RNA, 1755 nt, Artificial Sequence
  derived and/or modified CDS sequence (opt1) from hemagglutinin__InfluenzaB__AHL94274
augaaggccaucaucgugcugcucauggucgugaccagcaacgccgaccgcaucugcaccggcaucacguccagcaacagcccccacguggucaagaccgcgacccagggggaggugaacgugaccggcgucaucccgcugacgaccacccccaccaaguccuacuucgccaaccugaaggggacgcggacccgcggcaagcucugccccgacugccugaacugcaccgaccuggacguggcccucgggcggcccaugugcgugggcaccacgccguccgccaaggccagcauccugcacgagguccgccccgugaccuccggcugcuuccccaucaugcacgaccggaccaagauccgccagcugcccaaccuccugcggggguacgagaagauccgccugagcacccagaacgugaucgacgcggagaaggccccgggcgggcccuaccggcucggcacguccgggagcugccccaacgccaccuccaagaucggcuucuucgccaccauggcgugggccguccccaaggacaacuacaagaacgccaccaacccgcugacgguggaggugcccuacaucugcaccgagggcgaggaccagaucaccgucuggggguuccacagcgacaacaagacccagaugaagucccuguacggcgacagcaacccccagaaguucacguccagcgccaacggggugaccacccacuacgugucccagaucggcgacuuccccgaccagaccgaggacggcgggcucccgcagagcggccgcaucgucguggacuacaugaugcagaagcccgggaagacgggcaccaucguguaccagcgcgggguccugcugccccagaagguguggugcgccuccggccggagcaaggugaucaagggcagccucccccugaucggggaggcggacugccugcacgaggaguacggcgggcucaacaaguccaagccguacuacaccggcaagcacgccaaggccaucgggaacugccccaucugggucaagacgccccugaagcuggccaacggcaccaaguaccggcccccggccaagcuccugaaggagcgcggcuucuucggggcgaucgccggcuuccuggagggcgggugggaggggaugaucgccggcuggcacggcuacaccagccacggggcccacggcguggccgucgcggccgaccucaaguccacccaggaggccaucaacaagaucaccaagaaccugaacagccuguccgagcucgaggugaagaaccugcagcggcugagcggggccauggacgagcuccacaacgagauccuggagcuggacgagaagguggacgaccuccgcgccgacacgaucuccagccagaucgagcuggcgguccugcucuccaacgagggcaucaucaacagcgaggacgagcaccuccuggcccuggagcggaagcugaagaagaugcugggccccuccgccguggacaucgggaacggcugcuucgagaccaagcacaagugcaaccagaccugccucgaccgcaucgccgcggggaccuucaacgccggcgaguucagccugcccaccuucgacucccugaacaucacggccgccagccucaacgacgacgggcuggacaaccacaccauccugcuguacuacuccaccgccgcgagcucccucgccgugacccugaugcuggccaucuucaucgucuacauggugagccgggacaacguguccugcagcaucugccucuga

SEQ ID NO: 92154 - RNA, 1755 nt, Artificial Sequence; identical to SEQ ID NO: 92153
  derived and/or modified CDS sequence (opt1) from hemagglutinin__InfluenzaB__AHL94295

SEQ ID NO: 92155 - RNA, 1755 nt, Artificial Sequence
  derived and/or modified CDS sequence (opt1) from hemagglutinin__InfluenzaB__AHL94306
augaaggccaucaucgugcugcucauggucgugaccagcaacgccgaccgcaucugcaccggcaucacguccagcaacagcccccacguggucaagaccgcgacccagggggaggugaacgugaccggcgccaucccgcugacgaccacccccaccaagagcuacuucgccaaccugaaggggacgcggacccgcggcaagcucugccccgacugccugaacugcaccgaccuggacgucgcccucgggcggcccaugugcgugggcaccacgccguccgccaaggcgagcauccugcacgaggugcgccccgucaccuccggcugcuuccccaucaugcacgaccggaccaagauccgccagcugcccaaccuccugcggggguacgagaacauccgccugagcacccagaacgugaucgacgccgagaaggccccgggcgggcccuaccggcucggcacguccgggagcugccccaacgccaccuccaagaucggcuucuucgcgaccauggccugggccgugcccaaggacaacuacaagaacgccaccaacccgcagacggucgaggugcccuacaucugcaccgagggcgaggaccagaucaccguguggggguuccacagcgacaacaagacccagaugaagaaccuguacggcgacuccaacccccagaaguucacgagcuccgccaacggggucaccacccacuacgugagccagaucggcgacuuccccgaccagaccgaggacggcgggcugccgcaguccggccgcaucguggucgacuacauggugcagaagcccgggaagacgggcaccaucguguaccagcgcgggguccuccugccccagaagguguggugcgcgagcggccgguccaaggugaucaagggcagccugccccucaucggggaggccgacugccugcacgagaaguacggcgggcugaacaagagcaagccguacuacaccggcgagcacgccaaggccaucgggaacugccccaucugggucaagacgccccucaagcuggccaacggcaccaaguaccggcccccggcgaagcugcucaaggagcgcggcuucuucggggccaucgccggcuuccuggagggcgggugggaggggaugaucgccggcuggcacggcuacaccucccacggggcccacggcguggcggucgccgccgaccugaaguccacccaggaggccaucaacaagaucaccaagaaccucaacucccugagcgagcuggaggugaagaaccuccagcggcuguccggggccauggacgagcugcacaacgagauccucgagcuggacgagaagguggacgaccugcgcgcggacacgaucagcucccagaucgagcucgccguccugcugagcaacgagggcaucaucaacuccgaggacgagcaccuccuggcccuggagcggaagcucaagaagaugcugggccccagcgccguggacaucgggaacggcugcuucgagaccaagcacaagugcaaccagaccugccuggaccgcaucgcggccgggaccuucaacgccggcgaguucucccuccccaccuucgacagccugaacaucacggccgccucccugaacgacgacgggcucgacaaccacaccauccugcuguacuacagcaccgcggccuccagccuggccgugacccucaugcuggccaucuucaucgucuacauggugucccgggacaacgugagcugcuccaucugccuguga

SEQ ID NO: 92156 - RNA, 1755 nt, Artificial Sequence
  derived and/or modified CDS sequence (opt1) from hemagglutinin__InfluenzaB__AHL94317
augaaggccaucaucgugcugcucauggucgugaccagcaacgccgaccgcaucugcaccggcaucacguccagcaacagcccccacguggucaagaccgcgacccagggggaggugaacgugaccggcgccaucccgcugacgaccacccccaccaagagcuacuucgccaaccugaaggggauccggacgcgcggcaagcucugccccgacugccugaacugcaccgaccuggacgucgcccucgggcggcccaugugcgugggcaccaccccguccgccaaggcgagcauccugcacgaggugcgccccgucacguccggcugcuuccccaucaugcacgaccggaccaagauccgccagcugcccaaccuccugcggggguacgagaacauccgccugagcacccagaacgugaucgacgccgagaaggccccgggcgggcccuaccggcucggcaccuccgggagcugccccaacgccacguccaagaucggcuucuucgcgaccauggccugggccgugccccgcgacaacuacaagaacgccaccaacccgcagaccgucgaggugcccuacaucugcacggagggcgaggaccagaucaccguguggggguuccacagcgacaacaagacccagaugaagaaccuguacggcgacuccaacccccagaaguucaccagcuccgccaacggggucacgacccacuacgugagccagaucggcgacuuccccgaccagaccgaggacggcgggcugccgcaguccggccggaucguggucgacuacauggugcagaagcccgggaagaccggcacgaucguguaccagcgcgggguccuccugccccagaagguguggugcgcgagcggccgguccaaggugaucaagggcagccugccccucaucggggaggccgacugccugcacgagaaguacggcgggcugaacaagagcaagccguacuacaccggcgagcacgccaaggccaucgggaacugccccaucugggucaagacgccccucaagcuggccaacggcaccaaguaccggcccccggcgaagcugcucaaggagcgcggcuucuucggggccaucgccggcuuccuggagggcgggugggaggggaugaucgccggcuggcacggcuacaccucccacggggcccacggcguggcggucgccgccgaccugaaguccacccaggaggccaucaacaagaucaccaagaaccucaacucccugagcgagcuggaggugaagaaccuccagcgccuguccggggccauggacgagcugcacaacgagauccucgagcuggacgagaagguggacgaccugcgggcggacaccaucagcucccagaucgagcucgccguccugcugagcaacgagggcaucaucaacuccgaggacgagcaccuccuggcccuggagcgcaagcucaagaagaugcugggccccagcgccguggacaucgggaacggcugcuucgagacgaagcacaagugcaaccagaccugccuggaccggaucgcggccgggaccuucaacgccggcgaguucucccuccccaccuucgacagccugaacaucaccgccgccucccugaacgacgacgggcucgacaaccacacgauccugcuguacuacagcaccgcggccuccagccuggccgugacccucaugcuggccaucuucaucgucuacauggugucccgcgacaacgugagcugcuccaucugccuguga

SEQ ID NO: 92157 - RNA, 1755 nt, Artificial Sequence; identical to SEQ ID NO: 92155
  derived and/or modified CDS sequence (opt1) from hemagglutinin__InfluenzaB__AHL94328

SEQ ID NO: 92158 - RNA, 1755 nt, Artificial Sequence; identical to SEQ ID NO: 92153
  derived and/or modified CDS sequence (opt1) from hemagglutinin__InfluenzaB__AHL94339

SEQ ID NO: 92159 - RNA, 1758 nt, Artificial Sequence
  derived and/or modified CDS sequence (opt1) from hemagglutinin__InfluenzaB__AHL94350
augaaggccaucaucgugcugcucauggucgugaccagcaacgccgaccgcaucugcaccggcaucacguccagcaacagcccccacguggucaagaccgcgacccagggggaggugaacgugaccggcgucaucccgcugacgaccacccccaccaagagccacuucgccaaccugaaggggacggagacccggggcaagcucugccccaagugccugaacugcaccgaccuggacguggcccucgggcgccccaagugcaccggcaagaucccguccgcccgggugagcauccugcacgagguccgccccgugacguccggcugcuuccccaucaugcacgaccggaccaagauccgccagcugcccaaccuccugcggggguacgagcacauccgccugagcacccacaacgugaucaacgccgagaacgcgccgggcgggcccuacaagaucggcaccuccgggagcugccccaacgucacgaacggcaacggcuucuucgccaccauggccugggccgugcccaagaacgacaagaacaagaccgcgaccaacccgcucacgaucgaggugcccuacaucugcaccgagggggaggaccagaucaccgucuggggcuuccacuccgacaacgagacccagauggccaagcuguacggggacagcaacccccagaaguucacguccagcgccaacggcgugaccacccacuacgugucccagaucggcggguuccccaaccagaccgaggacggcgggcugccgcagagcggccggaucgucguggacuacauggugcagaaguccgggaagacgggcaccaucaccuaccagcgcggcauccuccugccccagaaggucuggugcgccagcgggcgguccaaggugaucaagggcagccugccccucaucggggaggccgacugccugcacgagaaguacggcgggcugaacaagagcaagcccuacuacaccggcgagcacgcgaaggccaucggcaacugcccgaucugggugaagacgccccucaagcuggccaacgggaccaaguaccgcccgcccgccaagcugcucaaggagcggggcuucuucggggccaucgcgggcuuccuggagggcgggugggagggcaugaucgccggguggcacggcuacaccucccacggggcccacggcgucgccguggccgcggaccugaaguccacccaggaggccaucaacaagaucacgaagaaccucaacucccugagcgagcuggaggucaagaaccuccagcgccuguccggcgccauggacgagcugcacaacgagauccucgagcuggacgagaagguggacgaccugcgggccgacaccaucagcucccagaucgagcucgccgugcugcugagcaacgaggggaucaucaacuccgaggacgagcaccuccuggcgcuggagcgcaagcucaagaagaugcugggccccagcgccgucgagaucgggaacggcugcuucgagaccaagcacaagugcaaccagaccugccuggaccggaucgccgccgggaccuucgacgcgggcgaguucucccuccccacguucgacagccugaacaucaccgccgccucccugaacgacgacggccucgacaaccacaccauccugcuguacuacagcaccgccgccuccagccuggcggugacgcucaugaucgccaucuucguggucuacaugguguccaaggacaacgugagcugcuccaucugccuguga

SEQ ID NO: 92160 - RNA, 1758 nt, Artificial Sequence
  derived and/or modified CDS sequence (opt1) from hemagglutinin__InfluenzaB__AHL94361
augaaggccaucaucgugcugcucauggucgugaccagcaacgccgaccgcaucugcaccggcaucacguccagcaacagcccccacguggucaagaccgcgacccagggggaggugaacgugaccggcgucaucccgcugacgaccacccccaccaagagccacuucgccaaccugaaggggacggagacccggggcaagcucugccccaagugccugaacugcaccgaccuggacguggcccucgggcgccccaagugcaccggcaagaucccguccgcccgggugagcauccugcacgagguccgccccgugacguccggcugcuuccccaucaugcacgaccggaccaagauccgccagcugcccaaccuccugcggggguacgagcacauccgccugagcacccacaacgugaucaacgccgagaacgcgccgggcgggcccuacaagaucggcaccuccgggagcugccccaacgucacgaacggcaacggcuucuucgccaccauggccugggccgugcccaagaacgacaagaacaagaccgcgaccaacccgcucacgaucgaggugcccuacaucugcaccgagggggaggaccagaucaccgucuggggcuuccacuccgacaacgagacccagauggccaagcuguacggggacagcaacccccagaaguucacguccagcgccaacggcgugaccacccacuacgugucccagaucggcggguuccccaaccagaccgaggacggcgggcugccgcagagcggccggaucgucguggacuacauggugcagaaguccgggaagacgggcaccaucgccuaccagcgcggcauccuccugccccagaaggucuggugcgccagcgggcgguccaaggugaucaagggcagccugccccucaucggggaggcggacugccugcacgagaaguacggcgggcugaacaagagcaagcccuacuacaccggcgagcacgccaaggccaucggcaacugcccgaucugggugaagacgccccucaagcuggccaacgggaccaaguaccgcccgcccgccaagcugcucaaggagcggggcuucuucggggcgaucgccggcuuccuggagggcgggugggagggcaugaucgccggguggcacggcuacaccucccacggggcccacggcgucgccguggcggccgaccugaaguccacccaggaggccaucaacaagaucaccaagaaccucaacucccugagcgagcuggaggucaagaaccuccagcgccuguccggcgccauggacgagcugcacaacgagauccucgagcuggacgagaagguggacgaccugcgggccgacacgaucagcucccagaucgagcucgcggugcugcugagcaacgaggggaucaucaacuccgaggacgagcaccuccuggcccuggagcgcaagcucaagaagaugcugggccccagcgccgucgagaucgggaacggcugcuucgagaccaagcacaagugcaaccagaccugccuggaccggaucgccgcggggaccuucgacgccggcgaguucucccuccccaccuucgacagccugaacaucacggccgccucccugaacgacgacggccucgacaaccacaccauccugcuguacuacagcaccgccgcguccagccuggccgugacccucaugaucgccaucuucguggucuacauggugucccgcgacagcguguccugcagcaucugccuguga

SEQ ID NO: 92161 - RNA, 1758 nt, Artificial Sequence
  derived and/or modified CDS sequence (opt1) from hemagglutinin__InfluenzaB__AHL94383
augaaggccaucaucgugcugcucauggucgugaccagcaacgccgaccgcaucugcaccggcaucacguccagcaacagcccccacguggucaagaccgcgacccagggggaggugaacgugaccggcgucaucccgcugacgaccacccccaccaagagccacuucgccaaccugaaggggacggagacccggggcaagcucugccccaagugccugaacugcaccgaccuggacguggcccucgggcgccccaagugcaccggcaagaucccguccgcccgggugagcauccugcacgagguccgccccgugacguccggcugcuuccccaucaugcacgaccggaccaagauccgccagcugcccaaccuccugcggggguacgagcacauccgccugagcacccacaacgugaucaacgccgagaacgcgccgggcgggcccuacaagaucggcaccuccgggagcugccccaacgucacgaacggcaacggcuucuucgccaccauggccugggccgugcccaagaacgacaagaacaagaccgcgaccaacccgcucacgaucgaggugcccuacaucugcaccgagggggaggaccagaucaccgucuggggcuuccacuccgacaacgagacccagauggagaagcuguacggggacagcaagccccagaaguucacguccagcgccaacggcgugaccacccacuacgugucccagaucggcggguuccccaaccagaccgaggacggcgggcugccgcagagcggccggaucgucguggacuacauggugcagaaguccgggaagacgggcaccaucaccuaccagcgcggcauccuccugccccagaaggucuggugcgccagcgggcgguccaaggugaucaagggcagccugccccucaucggggaggccgacugccugcacgagaaguacggcgggcugaacaagagcaagcccuacuacaccggcgagcacgccaaggcgaucggcaacugcccgaucugggugaagacgccccucaagcuggccaacgggaccaaguaccgcccgcccgccaagcugcucaaggagcggggcuucuucggggccaucgccggcuuccuggagggcgggugggagggcaugaucgcgggguggcacggcuacaccucccacggggcccacggcgucgccguggccgccgaccugaaguccacccaggaggcgaucaacaagaucacgaagaaccucaacucccugagcgagcuggaggucaagaaccuccagcgccuguccggcgccauggacgagcugcacaacgagauccucgagcuggacgagaagguggacgaccugcgggccgacaccaucagcucccagaucgagcucgccgugcugcugagcaacgaggggaucaucaacuccgaggacgagcaccuccuggcccuggagcgcaagcucaagaagaugcugggccccagcgcggucgagaucgggaacggcugcuucgagaccaagcacaagugcaaccagaccugccuggaccggaucgccgccgggaccuucgacgccggcgaguucucccuccccacguucgacagccugaacaucaccgcggccucccugaacgacgacggccucgacaaccacaccauccugcuguacuacagcaccgccgccuccagccuggccgugacgcucaugaucgcgaucuucguggucuacauggugucccgcgacaacgugagcugcuccaucugccuguga

SEQ ID NO: 92162 - RNA, 1758 nt, Artificial Sequence; identical to SEQ ID NO: 90669
  derived and/or modified CDS sequence (opt1) from hemagglutinin__InfluenzaB__AHL94394

SEQ ID NO: 92163 - RNA, 1758 nt, Artificial Sequence
  derived and/or modified CDS sequence (opt1) from hemagglutinin__InfluenzaB__AHL94405
augaaggccaucaucgugcugcucauggucgugaccagcaacgccgaccgcaucugcaccggcaucacguccagcaacagcccccacguggucaagaccgcgacccagggggaggugaacgugaccggcgucaucccgcugacgaccacccccaccaagagccacuucgccaaccugaaggggacggagacccggggcaagcucugccccaagugccugaacugcaccgaccuggacguggcccucgggcgccccaagugcaccggcaagaucccguccgcccgggugagcauccugcacgagguccgccccgugacguccggcugcuuccccaucaugcacgaccggaccaagauccgccagcugcccaaccuccugcggggguacgagcacauccgccugagcacccacaacgugaucaacgccgagaacgcgccgggcgggcccuacaagaucggcaccuccgggagcugccccaacgucacgaacggcaacggcuucuucgccaccauggccugggccgugcccaagaacgacaagaacaagaccgcgaccaacccgcucacgaucgaggugcccuacaucugcaccgagggggaggaccagaucaccgucuggggcuuccacuccgacaacgagacccagauggccaagcuguacggggacagcaagccccagaaguucacguccagcgccaacggcgugaccacccacuacgugucccagaucggcggguuccccaaccagaccgaggacggcgggcugccgcagagcggccggaucgucguggacuacauggugcagaaguccgggaagacgggcaccaucaccuaccagcgcggcauccuccugccccagaaggucuggugcgccagcgggcgguccaaggugaucaagggcagccugccccucaucggggaggccgacugccugcacgagaaguacggcgggcugaacaagagcaagcccuacuacaccggcgagcacgcgaaggccaucggcaacugcccgaucugggugaagacgccccucaagcuggccaacgggaccaaguaccgcccgcccgccaagcugcucaaggagcggggcuucuucggggccaucgcgggcuuccuggagggcgggugggagggcaugaucgccggguggcacggcuacaccucccacggggcccacggcgucgccguggccgcggaccugaaguccacccaggaggccaucaacaagaucacgaagaaccucaacucccugagcgagcuggaggucaagaaccuccagcgccuguccggcgccauggacgagcugcacaacgagauccucgagcuggacgagaagguggacgaccugcgggccgacaccaucagcucccagaucgagcucgccgugcugcugagcaacgaggggaucaucaacuccgaggacgagcaccuccuggcgcuggagcgcaagcucaagaagaugcugggccccagcgccgucgagaucgggaacggcugcuucgagaccaagcacaagugcaaccagaccugccuggaccggaucgccgccgggaccuucaacgcgggcgaguucucccuccccacguucgacagccugaacaucaccgccgccucccugaacgacgacggccucgacaaccacaccauccugcuguacuacagcaccgccgccuccagccuggcggugacgcucaugaucgccaucuucguggucuacauggugucccgcgacaacgugagcugcuccaucugccuguga

SEQ ID NO: 92164 - RNA, 1758 nt, Artificial Sequence; identical to SEQ ID NO: 90669
  derived and/or modified CDS sequence (opt1) from hemagglutinin__InfluenzaB__AHL94416

SEQ ID NO: 92165 - RNA, 1755 nt, Artificial Sequence; identical to SEQ ID NO: 90878
  derived and/or modified CDS sequence (opt1) from hemagglutinin__InfluenzaB__AHL94427

SEQ ID NO: 92166 - RNA, 1755 nt, Artificial Sequence
  derived and/or modified CDS sequence (opt1) from hemagglutinin__InfluenzaB__AHL94438
augaaggccaucaucgugcugcucauggucgugaccagcaacgccgaccgcaucugcaccggcaucacguccagcaacagcccccacguggucaagaccgcgacccagggggaggugaacgugaccggcgccaucccgcugacgaccacccccaccaagagcuacuucgccaaccugaaggggacgcggacccgcggcaagcucugccccgacugccugaacugcaccgaccuggacgucgcccucgggcggcccaugugcgugggcaccacgccguccgccaaggcgagcauccugcacgaggugcgccccgucaccuccggcugcuuccccaucaugcacgaccggaccaagauccgccagcugcccaaccuccugcggggguacgagaacauccgccugagcacccagaacgugaucgacgccgagaaggccccgggcgggcccuaccggcucggcacguccgggagcugccccaacgccaccuccaagaucggcuucuucgagaccauggcgugggccgugcccaaggacaacuacaagaacgccaccaacccgcagacggucgaggugcccuacaucugcaccgagggcgaggaccagaucaccguguggggguuccacagcgacaacaagacccagaugaagaaccuguacggcgacuccaacccccagaaguucacgagcuccgccaacggggucaccacccacuacgugagccagaucggcgacuuccccgaccagaccgaggacggcgggcugccgcaguccggccgcaucguggucgacuacauggugcagaagcccgggaagacgggcaccaucguguaccagcgcgggguccuccugccccagaagguguggugcgccagcggccgguccaaggugaucaagggcagccugccccucaucggggaggcggacugccugcacgagaaguacggcgggcugaacaagagcaagccguacuacaccggcgagcacgccaaggccaucgggaacugccccaucugggucaagacgccccucaagcuggccaacggcaccaaguaccggcccccggccaagcugcucaaggagcgcggcuucuucggggcgaucgccggcuuccuggagggcgggugggaggggaugaucgccggcuggcacggcuacaccucccacggggcccacggcguggccgucgcggccgaccugaaguccacccaggaggccaucaacaagaucaccaagaaccucaacucccugagcgagcuggaggugaagaaccuccagcggcuguccggggccauggacgagcugcacaacgagauccucgagcuggacgagaagguggacgaccugcgcgccgacacgaucagcucccagaucgagcucgcgguccugcugagcaacgagggcaucaucaacuccgaggacgagcaccuccuggcccuggagcggaagcucaagaagaugcugggccccagcgccguggacaucgggaacggcugcuucgagaccaagcacaagugcaaccagaccugccuggaccgcaucgccgcggggaccuucaacgccggcgaguucucccuccccaccuucgacagccugaacaucacggccgccucccugaacgacgacgggcucgacaaccacaccauccugcuguacuacagcaccgccgcguccagccuggccgugacccucaugcuggccaucuucaucgucuacauggugucccgggacaacgugagcugcuccaucugccuguga

SEQ ID NO: 92167 - RNA, 1755 nt, Artificial Sequence
  derived and/or modified CDS sequence (opt1) from hemagglutinin__InfluenzaB__AHL94460
augaaggccaucaucgugcugcucauggucgugaccagcaacgccgaccgcaucugcaccggcaucacguccagcaacagcccccacguggucaagaccgcgacccagggggaggugaacgugaccggcgccaucccgcugacgaccacccccaccaagagcuacuucgccaaccugaaggggacgcggacccgcggcaagcucugccccgacugccugaacugcaccgaccuggacgucgcccucgggcggcccaugugcgugggcaccacgccguccgccaaggcgagcauccugcacgaggugcgccccgucaccuccggcugcuuccccaucaugcacgaccggaccaagauccgccagcugcccaaccuccugcggggguacgagaacauccgccugagcacccagaacgugaucgacgccgagaaggccccgggcgggcccuaccggcucggcacguccgggagcugccccaacgccaccuccaagaucggcuucuucgcgaccauggccugggccgugcccaaggacaacuacaagaacgccaccaacccgcagacggucgaggugcccuacaucugcaccgaggaggaggaccagaucaccguguggggcuuccacagcgacaacaagacccagaugaagaaccuguacggggacuccaacccccagaaguucacgagcuccgccaacggcgucaccacccacuacgugagccagaucggggacuuccccgaccagaccgaggacggcggccugccgcaguccgggcgcaucguggucgacuacauggugcagaagcccggcaagacggggaccaucguguaccagcggggcguccuccugccccagaagguguggugcgcgagcgggcgcuccaaggugaucaagggcagccugccccucaucggcgaggccgacugccugcacgagaaguacgggggccugaacaagagcaagccguacuacaccggggagcacgccaaggccaucggcaacugccccaucugggucaagacgccccucaagcuggccaacgggaccaaguaccggcccccggcgaagcugcucaaggagcgcggcuucuucggcgccaucgccggguuccuggagggcgggugggagggcaugaucgccggguggcacggcuacaccucccacggcgcccacgggguggcggucgccgccgaccugaaguccacccaggaggccaucaacaagaucaccaagaaccucaacucccugagcgagcuggaggugaagaaccuccagcggcuguccggcgccauggacgagcugcacaacgagauccucgagcuggacgagaagguggacgaccugcgcgcggacacgaucagcucccagaucgagcucgccguccugcugagcaacgaggggaucaucaacuccgaggacgagcaccuccuggcccuggagcggaagcucaagaagaugcugggccccagcgccguggacaucggcaacgggugcuucgagaccaagcacaagugcaaccagaccugccuggaccgcaucgcggccggcaccuucaacgccggggaguucucccuccccaccuucgacagccugaacaucacggccgccucccugaacgacgacggccucgacaaccacaccauccugcuguacuacagcaccgcggccuccagccuggccgugacccucaugcuggccaucuucaucgucuacauggugucccgggacaacgugagcugcuccaucugccuguga

SEQ ID NO: 92168 - RNA, 1755 nt, Artificial Sequence
  derived and/or modified CDS sequence (opt1) from hemagglutinin__InfluenzaB__AHL94471
augaaggccaucaucgugcugcucauggucgugaccagcaacgccgaccgcaucugcaccggcaucacguccagcaacagcccccacguggucaagaccgcgacccagggggaggugaacgugaccggcgucaucccgcugacgaccacccccaccaaguccuacuucgccaaccugaaggggacgcggacccgcggcaagcucugccccgacugccugaacugcaccgaccuggacguggcccucgggcggcccaugugcgugggcaccacgccguccgccaaggccagcauccugcacgagguccgccccgugaccuccggcugcuuccccaucaugcacgaccggaccaagauccgccagcugcccaaccuccugcggggguacgagaagauccgccugagcacccagaacgugaucgacgcggagaaggccccgggcgggcccuaccggcucggcacguccgggagcugccccaacgccaccuccaagaucggcuucuucgccaccauggcgugggccguccccaaggacaacuacaagaacgccaccaacccgcugacgguggaggugcccuacaucugcaccgagggcgaggaccagaucaccgucuggggguuccacagcgacaacaagacccagaugaagucccuguacggcgacagcaacccccagaaguucacguccagcgccaacggggugaccacccacuacgugucccagaucggcgacuuccccgaccagaccgaggacggcgggcucccgcagagcggccgcaucgucguggacuacaugaugcagaagcccgggaagacgggcaccaucguguaccagcgcgggguccugcugccccagaagguguggugcgccuccggccggagcaaggugaucaagggcagccucccccugaucggggaggcggacugccugcacgaggaguacggcgggcucaacaaguccaagccguacuacaccggcaagcacgccaaggccaucgggaacugccccaucugggucaagacgccccugaagcuggccaacggcaccaaguaccggcccccggccaagcuccugaaggagcgcggcuucuucggggcgaucgccggcuuccuggagggcgggugggaggggaugaucgccggcuggcacggcuacaccagccacggggcccacggcguggccgucgcggccgaccucaaguccacccaggaggccaucaacaagaucaccaagaaccugaacagccuguccgagcucgaggugaagaaccugcagcggcugagcggggccauggacgagcuccacaacgagauccuggagcuggacgagaagguggacgaccuccgcgccgacacgaucuccagccagaucgagcuggcgguccugcucuccaacgagggcaucaucaacagcgaggacgagcaccuccuggcccuggagcggaagcugaagaagaugcugggccccuccgccguggacaucgggaacggcugcuucgagaccaagcacaagugcaaccagaccugccucgaccgcaucgccgcggggaccuucaacgccggcgaguucagccugcccaccuucgacucccugaacaucacggccgccagccucaacgacgacgggcuggacaaccacaccauccugcuguacuacuccaccgccgcgagcucccucgccgugacccugaugcuggccaucuucaucgucuacauggugagccgggacaacaucuccugcagcaucugccucuga

SEQ ID NO: 92169 - RNA, 1758 nt, Artificial Sequence
  derived and/or modified CDS sequence (opt1) from hemagglutinin__InfluenzaB__AHL94482
augaaggccaucaucgugcugcucauggucgugaccagcaacgccgaccgcaucugcaccggcaucacguccagcaacagcccccacguggucaagaccgcgacccagggggaggugaacgugaccggcgucaucccgcugacgaccacccccaccaagagccacuucgccaaccugaaggggacggagacccggggcaagcucugccccaagugccugaacugcaccgaccuggacguggcccucgggcgccccaagugcaccggcaagaucccguccgcccgggugagcauccugcacgagguccgccccgugacguccggcugcuuccccaucaugcacgaccggaccaagauccgccagcugcccaaccuccugcggggguacgagcacauccgccugagcacccacaacgugaucaacgccgagaacgcgccgggcgggcccuacaagaucggcaccuccgggagcugccccaacgucacgaacggcaacggcuucuucaccaccauggccugggccgugcccaagaacgacaagaacaagaccgccacgaacccgcucaccaucgaggugcccuacaucugcaccgagggggaggaccagaucaccgucuggggcuuccacuccgacaacgagacgcagauggcgaagcuguacggggacagcaagccccagaaguucaccuccagcgccaacggcgugaccacccacuacgugucccagaucggcggguuccccaaccagacggaggacggcgggcugccgcagagcggccggaucgucguggacuacauggugcagaaguccgggaagaccggcaccaucaccuaccagcgcggcauccuccugccccagaaggucuggugcgccagcgggcgguccaaggugaucaagggcagccugccccucaucggggaggccgacugccugcacgagaaguacggcgggcugaacaagagcaagcccuacuacacgggcgagcacgccaaggcgaucggcaacugcccgaucugggugaagacgccccucaagcuggccaacgggaccaaguaccgcccgcccgccaagcugcucaaggagcggggcuucuucggggccaucgccggcuuccuggagggcgggugggagggcaugaucgcgggguggcacggcuacaccucccacggggcccacggcgucgccguggccgccgaccugaaguccacccaggaggcgaucaacaagaucaccaagaaccucaacucccugagcgagcuggaggucaagaaccuccagcgccuguccggcgccauggacgagcugcacaacgagauccucgagcuggacgagaagguggacgaccugcgggccgacaccaucagcucccagaucgagcucgccgugcugcugagcaacgaggggaucaucaacuccgaggacgagcaccuccuggcccuggagcgcaagcucaagaagaugcugggccccagcgcggucgagaucgggaacggcugcuucgagaccaagcacaagugcaaccagaccugccuggaccggaucgccgccgggacguucgacgccggcgaguucucccuccccaccuucgacagccugaacaucaccgcggccucccugaacgacgacggccucgacaaccacaccauccugcuguacuacagcacggccgccuccagccuggccgugacccucaugaucgcgaucuucguggucuacauggugucccgcgacaacgugagcugcuccaucugccuguga

SEQ ID NO: 92170 - RNA, 1755 nt, Artificial Sequence; identical to SEQ ID NO: 92153
  derived and/or modified CDS sequence (opt1) from hemagglutinin__InfluenzaB__AHL94493

SEQ ID NO: 92171 - RNA, 1755 nt, Artificial Sequence; identical to SEQ ID NO: 92155
  derived and/or modified CDS sequence (opt1) from hemagglutinin__InfluenzaB__AHL94504

SEQ ID NO: 92172 - RNA, 1758 nt, Artificial Sequence
  derived and/or modified CDS sequence (opt1) from hemagglutinin__InfluenzaB__AHL94515
augaaggccaucaucgugcugcucauggucgugaccagcaacgccgaccgcaucugcaccggcaucacguccagcaacagcccccacguggucaagaccgcgacccagggggaggugaacgugaccggcgucaucccgcugacgaccacccccaccaagagccacuucgccaaccugaaggggacggagacccggggcaagcucugccccaagugccugaacugcaccgaccuggacguggcccucgggcgccccaagugcaccggcaagaucccguccgcccgggugagcauccugcacgagguccgccccgugacguccggcugcuuccccaucaugcacgaccggaccaagauccgccagcugcccaaccuccugcggggguacgagcacauccgccugagcaccuacaacgugaucaacgccgaggacgcgccgggcgggcccuacaagaucggcaccuccgggagcugccccaacgucacgaacggcaacggcuucuucgccaccauggccugggccgugcccaagaacgacaagaacaagaccgcgaccaacccgcucacgaucgaggugcccuacaucugcaccgagggggaggaccagaucaccgucuggggcuuccacuccgacaacgagacccagauggagaagcuguacggggacagcaagccccagaaguucacguccagcgccaacggcgugaccacccacuacgugucccagaucggcggguuccccaaccagaccgaggacggcgggcugccgcagagcggccggaucgucguggacuacauggugcagaaguccgggaagacgggcaccaucaccuaccagcgcggcauccuccugccccagaaggucuggugcgccagcgggcgguccaaggugaucaagggcagccugccccucaucggggaggccgacugccugcacgagaaguacggcgggcugaacaagagcaagcccuacuacaccggcgagcacgccaaggcgaucggcaacugcccgaucugggugaagacgccccucaagcuggccaacgggaccaaguaccgcccgcccgccaagcugcucaaggagcggggcuucuucggggccaucgccggcuuccuggagggcgggugggagggcaugaucgcgggguggcacggcuacaccucccacggggcccacggcgucgccguggccgccgaccugaaguccacccaggaggcgaucaacaagaucacgaagaaccucaacucccugagcgagcuggaggucaagaaccuccagcgccuguccggcgccauggacgagcugcacaacgagauccucgagcuggacgagaagguggacgaccugcgggccgacaccaucagcucccagaucgagcucgccgugcugcugagcaacgaggggaucaucaacuccgaggacgagcaccuccuggcccuggagcgcaagcucaagaagaugcugggccccagcgcggucgagaucgggaacggcugcuucgagaccaagcacaagugcaaccagaccugccuggaccggaucgccgccgggaccuucgacgccggcgaguucucccuccccacguucgacagccugaacaucaccgcggccucccugaacgacgacggccucgacaaccacaccauccugcuguacuacagcaccgccgccuccagccuggccgugacgcucaugaucgcgaucuucguggucuacauggugucccgcgacaacgugagcugcuccaucugccuguga

SEQ ID NO: 92173 - RNA, 1755 nt, Artificial Sequence; identical to SEQ ID NO: 92155
  derived and/or modified CDS sequence (opt1) from hemagglutinin__InfluenzaB__AHL94526

SEQ ID NO: 92174 - RNA, 1758 nt, Artificial Sequence
  derived and/or modified CDS sequence (opt1) from hemagglutinin__InfluenzaB__AHL94537
augaaggccaucaucgugcugcucauggucgugaccagcaacgccgaccgcaucugcaccggcaucacguccagcaacagcccccacguggucaagaccgcgacccagggggaggugaacgugaccggcgucaucccgcugacgaccacccccaccaagagccacuucgccaaccugaaggggacggagacccggggcaagcucugccccaagugccugaacugcaccgaccuggacguggcccucgggcgccccaagugcaccggcaagaucccguccgcccgggugagcauccugcacgagguccgccccgugacguccggcugcuuccccaucaugcacgaccggaccaagauccgccagcugcccaaccuccugcggggguacgagcacauccgccugagcacccacaacgugaucaacgccgagaacgcgccgggcgggcccuacaagaucggcaccuccgggagcugccccaacgucacgaacggcaacggcuucuucgccaccauggccugggccgugcccaagaacgacaagaacaagaccgcgaccaacccgcucacgaucgaggugcccuacaucugcaccgagggggaggaccagaucaccgucuggggcuuccacuccgacaacgagacccagauggccaagcuguacggggacagcaacccccagaaguucacguccagcgccaacggcgugaccacccacuacaucucccagaucggcggguuccccaaccagaccgaggacggcgggcugccgcagagcggccggaucguggucgacuacauggugcagaaguccgggaagacgggcaccaucaccuaccagcgcggcauccuccugccccagaagguguggugcgccagcgggcgguccaaggucaucaagggcagccugccccucaucggggaggccgacugccugcacgagaaguacggcgggcugaacaagagcaagcccuacuacaccggcgagcacgcgaaggccaucggcaacugcccgaucugggugaagacgccccucaagcuggccaacgggaccaaguaccgcccgcccgccaagcugcucaaggagcggggcuucuucggggccaucgcgggcuuccuggagggcgggugggagggcaugaucgccggguggcacggcuacaccucccacggggcccacggcguggccgucgccgcggaccugaaguccacccaggaggccaucaacaagaucacgaagaaccucaacucccugagcgagcuggaggugaagaaccuccagcgccuguccggcgccauggacgagcugcacaacgagauccucgagcuggacgagaaggucgacgaccugcgggccgacaccaucagcucccagaucgagcucgccgugcugcugagcaacgaggggaucaucaacuccgaggacgagcaccuccuggcgcuggagcgcaagcucaagaagaugcugggccccagcgccguggagaucgggaacggcugcuucgagaccaagcacaagugcaaccagaccugccuggaccggaucgccgccgggaccuucgacgcgggcgaguucucccuccccacguucgacagccugaacaucaccgccgccucccugaacgacgacggccucgacaaccacaccauccugcuguacuacagcaccgccgccuccagccuggcggucacgcucaugaucgccaucuucgugguguacauggucucccgcgacaacgugagcugcuccaucugccuguga

SEQ ID NO: 92175 - RNA, 1755 nt, Artificial Sequence
  derived and/or modified CDS sequence (opt1) from hemagglutinin__InfluenzaB__AHL94548
augaaggccaucaucgugcugcucauggucgugaccagcaacgccgaccgcaucugcaccggcaucacguccagcaacagcccccacguggucaagaccgcgacccagggggaggugaacgugaccggcgucaucccgcugacgaccacccccaucaaguccuacuucgccaaccugaaggggaccaagacgcggggcaagcucugccccgacugccugaacugcaccgaccuggacguggcccucgggcgccccaugugcgugggcaccaccccguccgccaaggccagcauccugcacgagguccggcccgugacguccggcugcuuccccaucaugcacgaccgcaccaagauccggcagcuggcgaaccuccugcgcggguacgagaacauccggcugagcacccagaacgugaucgacgccgagcgcgcccccggcgggccguaccggcucggcaccuccgggagcugccccaacgccacguccaagagcggcuucuucgcgaccauggccugggccguccccaaggacaacaacaagaacgccaccaacccccugaccguggaggugccguacaucugcgccgagggcgaggaccagaucacggucuggggguuccacuccgacaacaagacccagaugaagaaccuguacggcgacagcaacccccagaaguucaccuccagcgcgaacggggugaccacgcacuacgugucccagaucggcggcuuccccgaccagaccgaggacgggggccucccccagagcgggcgcaucgucguggacuacaugaugcagaagccgggcaagaccgggaccaucguguaccagcggggcguccugcugccccagaagguguggugcgccuccggccgcagcaaggugaucaaggggagccucccccugaucggcgaggccgacugccugcacgagaaguacgggggccucaacaaguccaagcccuacuacacgggggagcacgccaaggccaucggcaacugcccgaucugggucaagacgccccugaagcuggcgaacggcaccaaguaccggccgcccgccaagcuccugaaggagcgcggguucuucggcgccaucgccggguuccuggagggcgggugggagggcaugaucgccggcuggcacggguacaccagccacggcgcgcacgggguggccgucgccgccgaccucaaguccacccaggaggccaucaacaagaucaccaagaaccugaacagccuguccgagcucgaggugaagaaccugcagcggcugagcggcgcgauggacgagcuccacaacgagauccuggagcuggacgagaagguggacgaccuccgcgccgacaccaucuccagccagaucgagcuggccguccugcucuccaacgagggcaucaucaacagcgaggacgagcaccuccuggcccuggagcggaagcugaagaagaugcuggggcccuccgcgguggacaucggcaacgggugcuucgagaccaagcacaagugcaaccagacgugccucgaccgcaucgccgccggcaccuucaacgccggggaguucagccugcccaccuucgacucccugaacaucaccgccgcgagccucaacgacgacggccuggacaaccacaccauccugcuguacuacuccacggccgccagcucccucgccgugacccugaugcuggccaucuucaucgucuacauggugagccgggacaacguguccugcagcaucugccucuga

SEQ ID NO: 92176 - RNA, 1755 nt, Artificial Sequence; identical to SEQ ID NO: 92153
  derived and/or modified CDS sequence (opt1) from hemagglutinin__InfluenzaB__AHL94559

SEQ ID NO: 92177 - RNA, 1755 nt, Artificial Sequence; identical to SEQ ID NO: 90878
  derived and/or modified CDS sequence (opt1) from hemagglutinin__InfluenzaB__AHL94570

SEQ ID NO: 92178 - RNA, 1755 nt, Artificial Sequence; identical to SEQ ID NO: 90878
  derived and/or modified CDS sequence (opt1) from hemagglutinin__InfluenzaB__AHL94581

SEQ ID NO: 92179 - RNA, 1755 nt, Artificial Sequence; identical to SEQ ID NO: 90878
  derived and/or modified CDS sequence (opt1) from hemagglutinin__InfluenzaB__AHL94592

SEQ ID NO: 92180 - RNA, 1758 nt, Artificial Sequence
  derived and/or modified CDS sequence (opt1) from hemagglutinin__InfluenzaB__AHL94603
augaaggccaucaucgugcugcucauggucgugaccagcaacgccgaccgcaucugcaccggcaucacguccagcaacagcccccacguggucaagaccgcgacccagggggaggugaacgugaccggcgucaucccgcugacgaccacccccaccaagagccacuucgccaaccugaaggggacggagacccggggcaagcucugccccaagugccugaacugcaccgaccuggacguggcccucgggcgccccaagugcaccggcaagaucccguccgcccgggugagcauccugcacgagguccgccccgugacguccggcugcuuccccaucaugcacgaccggaccaagauccgccagcugcccaaccuccugcggggguacgagaacauccgccugagcacccacaacgugaucaacgccgagaacgcgccgggcgggcccuacaagaucggcaccuccgggagcugccccaacgucacgaacggcaacggcuucuucgccaccauggccugggccgugcccaagaacgacaagaacaagaccgcgaccaacccgcucacgaucgaggugcccuacaucugcaccgagggggaggaccagaucaccgucuggggcuuccacuccgacaacgagacccagauggccaagcuguacggggacagcaagccccagaaguucacguccagcgccaacggcgugaccacccacuacgugucccagaucggcggguuccccaaccagaccgaggacggcgggcugccgcagagcggccggaucgucguggacuacauggugcagaaguccgggaagacgggcaccaucaccuaccagcgcggcauccuccugccccagaaggucuggugcgccagcgggcgguccaaggugaucaagggcagccugccccucaucggggaggccgacugccugcacgagaaguacggcgggcugaacaagagcaagcccuacuacaccggcgagcacgcgaaggccaucggcaacugcccgaucugggugaagacgccccucaagcuggccaacgggaccaaguaccgcccgcccgccaagcugcucaaggagcggggcuucuucggggccaucgcgggcuuccuggagggcgggugggagggcaugaucgccggguggcacggcuacaccucccacggggcccacggcgucgccguggccgcggaccugaaguccacccaggaggccaucaacaagaucacgaagaaccucaacucccugagcgagcuggaggucaagaaccuccagcgccuguccggcgccauggacgagcugcacaacgagauccucgagcuggacgagaagguggacgaccugcgggccgacaccaucagcucccagaucgagcucgccgugcugcugagcaacgaggggaucaucaacuccgaggacgagcaccuccuggcgcuggagcgcaagcucaagaagaugcugggccccagcgccgucgagaucgggaacggcugcuucgagaccaagcacaagugcaaccagaccugccuggaccggaucgccgccgggaccuucgacgcgggcgaguucucccuccccacguucgacagccugaacaucaccgccgccucccugaacgacgacggccucgacaaccacaccauccugcuguacuacagcaccgccgccuccagccuggcggugacgcucaugaucgccaucuucguggucuacauggugucccgcgacaacgugagcugcuccaucugccuguga

SEQ ID NO: 92181 - RNA, 1758 nt, Artificial Sequence
  derived and/or modified CDS sequence (opt1) from hemagglutinin__InfluenzaB__AHL94614
augaaggccaucaucgugcugcucauggucgugaccagcaacgccgaccgcaucugcaccggcaucacguccagcaacagcccccacguggucaagaccgcgacccagggggaggugaacgugaccggcgucaucccgcugacgaccacccccaccaagagccacuucgccaaccugaaggggacggagacccggggcaagcucugccccaagugccugaacugcaccgaccuggacguggcccucgggcgccccaagugcaccggcaagaucccguccgcccgggugagcauccugcacgagguccgccccgugacguccggcugcuuccccaucaugcacgaccggaccaagauccgccagcugcccaaccuccugcggggguacgagcacauccgccugagcacccacaacgugaucaacgccgagaacgcgccgggcgggcccuacaagaucggcaccuccgggagcugccccaacgucacgaacggcaacggcuucuucgccaccauggccugggccgugcccaagaacgacaagaacaagaccgcgaccaacccgcucacgaucgaggugcccuacaucugcaccgagggggaggaccagaucaccgucuggggcuuccacuccgacaacgagacccagauggccaagcuguacggggacagcaagccccagaaguucacguccagcgccaacggcgugaccacccacuacgugucccagaucggcggguuccccaaccagaccgaggacggcgggcugccgcagagcggccggaucgucguggacuacauggugcagaaguccgggaagacgggcaccaucaccuaccagcgcggcauccuccugccccagaaggucuggugcgccagcgggcgguccaaggugaucaagggcagccugccccucaucggggaggccgacugccugcacgagaaguacggcgggcugaacaagagcaagcccuacuacaccggcgagcacgcgaaggccaucggcaacugcccgaucugggugaagacgccccucaagcuggccaacgggaccaaguaccgcccgcccgccaagcugcucaaggagcggggcuucuucggggccaucgcgggcuuccuggagggcgggugggagggcaugaucgccggguggcacggcuacaucucccacggggcccacggcgucgccguggccgcggaccugaaguccacccaggaggccaucaacaagaucaccaagaaccucaacucccugagcgagcuggaggucaagaaccuccagcgccuguccggcgccauggacgagcugcacaacgagauccucgagcuggacgagaagguggacgaccugcgggccgacacgaucagcucccagaucgagcucgccgugcugcugagcaacgaggggaucaucaacuccgaggacgagcaccuccuggcgcuggagcgcaagcucaagaagaugcugggccccagcgccgucgagaucgggaacggcugcuucgagaccaagcacaagugcaaccagaccugccuggaccggaucgccgccgggaccuucgacgcgggcgaguucucccuccccaccuucgacagccugaacaucacggccgccucccugaacgacgacggccucgacaaccacaccauccugcuguacuacagcaccgccgccuccagccuggcggugacccucaugaucgccaucuucguggucuacauggugucccgcgacaacgugagcugcuccaucugccuguga

SEQ ID NO: 92182 - RNA, 1755 nt, Artificial Sequence; identical to SEQ ID NO: 92155
  derived and/or modified CDS sequence (opt1) from hemagglutinin__InfluenzaB__AHL94624

SEQ ID NO: 92183 - RNA, 1758 nt, Artificial Sequence
  derived and/or modified CDS sequence (opt1) from hemagglutinin__InfluenzaB__AHL94646
augaaggccaucaucgugcugcucauggucgugaccagcaacgccgaccgcaucugcaccggcaucacguccagcaacagcccccacguggucaagaccgcgacccagggggaggugaacgugaccggcgucaucccgcugacgaccacccccaccaagucccacuucgccaaccugaaggggacggagacccggggcaagcucugccccaagugccugaacugcaccgaccuggacguggcccucgggcgccccaagugcaccggcaagaucccguccgcccgggugagcauccugcacgagguccgccccgugacguccggcugcuuccccaucaugcacgaccggaccaagauccgccagcugcccaaccuccugcggggguacgagcacauccgccugagcacccacaacgugaucaacgccgagaacgcgccgggcgggcccuacaagaucggcaccuccgggagcugccucaacgucacgaacggcaacggcuucuucgccaccauggccugggccgugcccaagaacgacaagaacaagaccgcgaccaacccccugacgaucgaggugccguacaucugcaccgagggggaggaccagaucaccgucuggggcuuccacuccgacaacgagacccagauggccaagcuguacggggacagcaagccccagaaguucacguccagcgccaacggcgugaccacccacuacgugucccagaucggcggguuccccaaccagaccgaggacggcgggcucccccagagcggccggaucgucguggacuacauggugcagaaguccgggaagacgggcaccaucaccuaccagcgcggcauccugcugccgcagaaggucuggugcgccagcgggcgguccaaggugaucaagggcagccucccccugaucggggaggccgacugccugcacgagaaguacggcgggcucaacaagagcaagcccuacuacaccggcgagcacgcgaaggccaucggcaacugccccaucugggugaagacgccgcugaagcuggccaacgggaccaaguaccgcccgcccgccaagcuccugaaggagcggggcuucuucggggccaucgcgggcuuccuggagggcgggugggagggcaugaucgccggguggcacggcuacaccucccacggggcccacggcgucgccguggccgcggaccucaagagcacccaggaggccaucaacaagaucacgaagaaccugaacucccugagcgagcucgaggucaagaaccugcagcgccuguccggcgccauggacgagcuccacaacgagauccuggagcuggacgagaagguggacgaccuccgggccgacaccaucagcucccagaucgagcuggccgugcugcucagcaacgaggggaucaucaacuccgaggacgagcaccuccuggcgcuggagcgcaagcugaagaagaugcugggccccagcgccgucgagaucgggaacggcugcuucgagaccaagcacaagugcaaccagaccugccucgaccggaucgccgccgggaccuucgacgcgggcgaguucucccugcccacguucgacagccugaacaucaccgccgccucccucaacgacgacggccuggacaaccacaccauccugcuguacuacagcaccgccgccuccagccucgcggugacgcugaugaucgccaucuucguggucuacauggugucccgcgacaacgugagcugcuccaucugccuguga

SEQ ID NO: 92184 - RNA, 1758 nt, Artificial Sequence
  derived and/or modified CDS sequence (opt1) from hemagglutinin__InfluenzaB__AHL94657
augaaggccaucaucgugcugcucauggucgugaccagcaacgccgaccgcaucugcaccggcaucacguccagcaacagcccccacguggucaagaccgcgacccagggggaggugaacgugaccggcgucaucccgcugacgaccacccccaccaagagccacuucgccaaccugaaggggacggagacccggggcaagcucugccccaagugccccaacugcaccgaccuggacguggcccuggggcgcccgaagugcaccggcaagauccccuccgcccgggugagcauccuccacgagguccgccccgugacguccggcugcuuccccaucaugcacgaccggaccaagauccgccagcugccgaaccugcuccggggguacgagcacauccgccugagcacccacaacgugaucaacgccgaguccgcgcccggcgggcccuacaagaucggcaccagcggguccugccccaacgucacgaacggcaacggcuucuucgccaccauggccugggccgugccgaagaacgacaagaacaagaccgcgaccgacccccugacgaucgaggugcccuacaucugcaccgagggggaggaccagaucaccgucuggggcuuccacagcgacaacgagacccagauggccaagcucuacggggacuccaagccccagaaguucacgagcuccgccaacggcgugaccacccacuacgugagccagaucggcggguucccgaaccagaccgaggacggcgggcugccccaguccggccggaucgucguggacuacauggugcagaaguccgggaagacgggcaccaucaccuaccagcgcggcauccugcucccccagaaggucuggugcgccuccgggcggagcaaggugaucaagggcagccugccccugaucggggaggccgacugccuccacgagaaguacggcgggcugaacaaguccaagccguacuacaccggcgagcacgcgaaggccaucggcaacugccccaucugggugaagacgccccugaagcucgccaacgggaccaaguaccggcccccggccaagcugcugaaggagcgcggcuucuucggggccaucgcgggcuuccucgagggcgggugggagggcaugaucgccggguggcacggcuacaccagccacggggcccacggcgucgccguggccgcggaccugaaguccacccaggaggccaucaacaagaucacgaagaaccugaacagccucuccgagcuggaggucaagaaccugcagcgccucagcggcgccauggacgagcugcacaacgagauccuggagcucgacgagaagguggacgaccugcgggccgacaccaucuccagccagaucgagcuggccgugcuccuguccaacgaggggaucaucaacagcgaggacgagcaccuccuggcgcuggagcgcaagcugaagaagaugcucggccccuccgccgucgagaucgggaacggcugcuucgagaccaagcacaagugcaaccagaccugccuggaccggaucgccgccgggaccuucgacgcgggcgaguucagccugcccacguucgacucccucaacaucaccgccgccagccugaacgacgacggccuggacaaccacaccauccuccuguacuacuccaccgccgccagcucccuggcggugacgcugaugaucgccaucuucguggucuacauggugagccgcgacaacguguccugcagcaucugccucuga

SEQ ID NO: 92185 - RNA, 1755 nt, Artificial Sequence; identical to SEQ ID NO: 92155
  derived and/or modified CDS sequence (opt1) from hemagglutinin__InfluenzaB__AHL94668

SEQ ID NO: 92186 - RNA, 1755 nt, Artificial Sequence; identical to SEQ ID NO: 92155
  derived and/or modified CDS sequence (opt1) from hemagglutinin__InfluenzaB__AHL94679

SEQ ID NO: 92187 - RNA, 1758 nt, Artificial Sequence; identical to SEQ ID NO: 92180
  derived and/or modified CDS sequence (opt1) from hemagglutinin__InfluenzaB__AHL94690

SEQ ID NO: 92188 - RNA, 1758 nt, Artificial Sequence
  derived and/or modified CDS sequence (opt1) from hemagglutinin__InfluenzaB__AHL94701
augaaggccaucaucgugcugcucauggucgugaccagcaacgccgaccgcaucugcaccggcaucacguccagcaacagcccccacguggucaagaccgcgacccagggggaggugaacgugaccggcgucaucccgcugacgaccacccugaccaagagccacuucgccaaccucaaggggacggagacccggggcaagcugugccccaagugccugaacugcaccgaccucgacguggcccuggggcgccccaagugcaccggcaagauccccuccgcccgggugagcauccugcacgagguccgcccggugacguccggcugcuuccccaucaugcacgaccggaccaagauccgccagcuccccaaccugcugcggggguacgagcacauccgccucagcacccacaacgugaucaacgccgagaacgcgcccggcgggccguacaagaucggcaccuccgggagcugccugaacgucacgaacggcaacggcuucuucgccaccauggccugggccgugcccaagaacgacaagaacaagaccgcgaccaacccccugacgaucgaggugcccuacaucugcaccgagggggaggaccagaucaccgucuggggcuuccacuccgacaacgagacccagauggccaagcucuacggggacagcaagccgcagaaguucacguccagcgccaacggcgugaccacccacuacgugucccagaucggcggguuccccaaccagaccgaggacggcgggcugccccagagcggccggaucgucguggacuacauggugcagaaguccgggaagacgggcaccaucaccuaccagcgcggcauccugcucccccagaaggucuggugcgccagcgggcgguccaaggugaucaagggcagccugccgcugaucggggaggccgacugccuccacgagaaguacggcgggcugaacaagagcaagcccuacuacaccggcgagcacgcgaaggccaucggcaacugccccaucugggugaagacgccccugaagcucgccaacgggaccaaguaccgcccgcccgccaagcugcugaaggagcggggcuucuucggggccaucgcgggcuuccucgagggcgggugggagggcaugaucgccggguggcacggcuacaccucccacggggcccacggcgucgccguggccgcggaccugaaguccacccaggaggccaucaacaagaucacgaagaaccugaacucccucagcgagcuggaggucaagaaccugcagcgccucuccggcgccauggacgagcugcacaacgagauccuggagcucgacgagaagguggacgaccugcgggccgacaccaucagcucccagaucgagcuggccgugcuccugagcaacgaggggaucaucaacuccgaggacgagcaccuccuggcgcuggagcgcaagcugaagaagaugcucggccccagcgccgucgagaucgggaacggcugcuucgagaccaagcacaagugcaaccagaccugccuggaccggaucgccgccgggaccuucgacgcgggcgaguucucccugcccacguucgacagccucaacaucaccgccgccucccugaacgacgacggccuggacaaccacaccauccugcucuacuacagcaccgccgccuccagccuggcggugacgcugaugaucgccaucuucguggucuacauggugucccgcgacaacgugagcugcuccaucugccucuga

SEQ ID NO: 92189 - RNA, 1755 nt, Artificial Sequence; identical to SEQ ID NO: 92153
  derived and/or modified CDS sequence (opt1) from hemagglutinin__InfluenzaB__AHL94712

SEQ ID NO: 92190 - RNA, 1758 nt, Artificial Sequence; identical to SEQ ID NO: 92184
  derived and/or modified CDS sequence (opt1) from hemagglutinin__InfluenzaB__AHL94723

SEQ ID NO: 92191 - RNA, 1755 nt, Artificial Sequence; identical to SEQ ID NO: 92153
  derived and/or modified CDS sequence (opt1) from hemagglutinin__InfluenzaB__AHL94734

SEQ ID NO: 92192 - RNA, 1758 nt, Artificial Sequence
  derived and/or modified CDS sequence (opt1) from hemagglutinin__InfluenzaB__AHL94745
augaaggccaucaucgugcugcucauggucgugaccagcaacgccgaccgcaucugcaccggcaucacguccagcaacagcccccacguggucaagaccgcgacccagggggaggugaacgugaccggcgucaucccgcugacgaccacccccaccaagucccacuucgccaaccugaaggggacggagacccggggcaagcucugccccaagugccugaacugcaccgaccuggacguggcccucgggcgccccaagugcaccggcaagaucccguccgcccgggugagcauccugcacgagguccgccccgugacguccggcugcuuccccaucaugcacgaccggaccaagauccgccagcugcccaaccuccugcggggguacgagcacauccgccugagcacccacaacgugaucaacgccgagaacgcgccgggcgggcccuacaagaucggcaccuccgggagcugccucaacgucacgaacggcaacggcuucuucgccaccauggccugggccgugcccaagaacgacaagaacaagaccgcgaccaacccccugacgaucgaggugccguacaucugcaccgagggggaggaccagaucaccgucuggggcuuccacuccgacaacgagacccagauggccaagcuguacggggacagcaagccccagaaguucacguccagcgccaacggcgugaccacccacuacgugucccagaucggcggguuccccaaccagaccgaggacggcgggcucccccagagcggccggaucgucguggacuacauggugcagaaguccgggaagacgggcaccaucaccuaccagcgcggcauccugcugccgcagaaggucuggugcgccagcgggcgguccaaggugaucaagggcagccucccccugaucggggaggccgacugccugcacgagaaguacggcgggcucaacaagagcaagcccuacuacaccggcgagcacgcgaaggccaucggcaacugccccaucugggugaagacgccgcugaagcuggccaacgggaccaaguaccgcccgcccgccaagcuccugaaggagcggggcuucuucggggccaucgcgggcuuccuggagggcgggugggagggcaugaucgccggguggcacggcuacaccucccacggggcccacggcgucgccguggccgcggaccucaagagcacccaggaggccaucaacaagaucacgaagaaccugaacucccugagcgagcucgaggucaagaaccugcagcgccuguccggcgccauggacgagcuccacaacgagauccuggagcuggacgagaagguggacgaccuccgggccgacaccaucagcucccagaucgagcuggccgugcugcucagcaacgaggggaucaucaacuccgaggacgagcaccuccuggcgcuggagcgcaagcugaagaagaugcugggccccagcgccgucgagaucgggaacggcugcuucgagaccaagcacaagugcaaccagaccugccucgaccggaucgccgccgggaccuucgacgcgggcgaguucucccugcccacguucgacagccugaacaucaccgccgccucccucaacggcgacgggcuggacaaccacaccauccugcuguacuacagcaccgccgccuccagccucgcggugacgcugaugaucgccaucuucguggucuacauggugucccgcgacaacgugagcugcuccaucugccuguga

SEQ ID NO: 92193 - RNA, 1755 nt, Artificial Sequence; identical to SEQ ID NO: 90878
  derived and/or modified CDS sequence (opt1) from hemagglutinin__InfluenzaB__AHL94756

SEQ ID NO: 92194 - RNA, 1758 nt, Artificial Sequence; identical to SEQ ID NO: 92183
  derived and/or modified CDS sequence (opt1) from hemagglutinin__InfluenzaB__AHL94766

SEQ ID NO: 92195 - RNA, 1755 nt, Artificial Sequence
  derived and/or modified CDS sequence (opt1) from hemagglutinin__InfluenzaB__AHL94777
augaaggccaucaucgugcugcucauggucgugaccagcaacgccgaccgcaucugcaccggcaucacguccagcaacagcccccacguggucaagaccgcgacccagggggaggugaacgugaccggcgccaucccgcugacgaccacccccaccaagagcuacuucgccaaccugaaggggacgcggacccgcggcaagcucugccccgacugcuucaacugcaccgaccuggacgucgcccuggggcggcccaugugcgugggcaccacgccguccgccaaggcgagcauccuccacgaggugcgccccgucaccuccggcugcuuccccaucaugcacgaccggaccaagauccgccagcugcccaaccugcuccggggguacgagaacauccgccugagcacccagaacgccaucgacgccgagaaggccccgggcgggcccuaccggcugggcacguccgggagcugccccaacgcgaccuccaagaucggcuucuucgccaccauggccugggccgugcccaaggacaacuacaagaacgccaccaacccgcagacgguggagguccccuacaucugcaccgagggcgaggaccagaucaccguguggggguuccacagcgacaacaagacccagaugaagaaccucuacggcgacuccaacccccagaaguucacgagcuccgcgaacggggugaccacccacuacgucagccagaucggcgacuuccccgaccagaccgaggacggcgggcugccgcaguccggccgcaucgugguggacuacaugguccagaagcccgggaagacgggcaccaucguguaccagcgcggggugcugcucccccagaaggucuggugcgccagcggccgguccaaggugaucaagggcagccugccccugaucggggaggccgacugccuccacgagaaguacggcgggcugaacaagagcaagccguacuacaccggcgagcacgccaaggccaucgggaacugccccaucugggugaagacgccccugaagcucgcgaacggcaccaaguaccggcccccggccaagcugcugaaggagcgcggcuucuucggggccaucgccggcuuccucgagggcgggugggaggggaugaucgccggcuggcacggcuacaccucccacggggcgcacggcgucgccguggccgccgaccugaaguccacccaggaggccaucaacaagaucaccaagaaccugaacucccucagcgagcuggaggucaagaaccugcagcggcucuccggggcgauggacgagcugcacaacgagauccuggagcucgacgagaagguggacgaccugcgcgccgacacgaucagcucccagaucgagcuggccgugcuccugagcaacgagggcaucaucaacuccgaggacgagcaccuccuggcccuggagcggaagcugaagaagaugcucggccccagcgcggucgacaucgggaacggcugcuucgagaccaagcacaagugcaaccagaccugccuggaccgcaucgccgccgggaccuucaacgccggcgaguucucccugcccaccuucgacagccucaacaucacggccgcgucccugaacgacgacgggcuggacaaccacaccauccuccuguacuacagcaccgccgccuccagccuggccgugacccugaugcucgccaucuucaucguguacauggucucccgggacaacgugagcugcuccaucugccuguga

SEQ ID NO: 92196 - RNA, 1758 nt, Artificial Sequence; identical to SEQ ID NO: 92180
  derived and/or modified CDS sequence (opt1) from hemagglutinin__InfluenzaB__AHL94797

SEQ ID NO: 92197 - RNA, 1755 nt, Artificial Sequence
  derived and/or modified CDS sequence (opt1) from hemagglutinin__InfluenzaB__AHL94808
augaaggccaucaucgugcugcucauggucgugaccagcaacgccgaccgcaucugcaccggcaucacguccagcaacagcccccacguggucaagaccgcgacccagggggaggugaacgugaccggcgccaucccgcugacgaccacccccaccaagagcuacuucgccaaccugaaggggauccggacgcgcggcaagcucugccccgacugccugaacugcaccgaccuggacgucgcccucgggcggcccaugugcgugggcaccaccccguccgccaaggcgagcauccugcacgaggugcgccccgucacguccggcugcuuccccaucaugcacgaccggaccaagauccgccagcugcccaaccuccugcggggguacgagaacauccgccugagcacccagaacgugaucgacgccgagaaggccccgggcgggcccuaccggcucggcaccuccgggagcugccccaacgccacguccaagaucggcuucuucgcgaccauggccugggccgugcccaaggacaacuacaagaacgccaccaacccgcagaccgucgaggugcccuacaucugcacggagggcgaggaccagaucaccguguggggguuccacagcgacaacaagacccagaugaagaaccuguacggcgacuccaacccccagaaguucaccagcuccgccaacggggucacgacccacuacgugagccagaucggcgacuuccccgaccagaccgaggacggcgggcugccgcaguccggccgcaucguggucgacuacauggugcagaagcccgggaagaccggcacgaucguguaccagcgcgggguccuccugccccagaagguguggugcgcgagcggccgguccaaggugaucaagggcagccugccccucaucggggaggccgacugccugcacgagaaguacggcgggcugaacaagagcaagccguacuacaccggcgagcacgccaaggccaucgggaacugccccaucugggucaagacgccccucaagcuggccaacggcaccaaguaccggcccccggcgaagcugcucaaggagcgcggcuucuucggggccaucgccggcuuccuggagggcgggugggaggggaugaucgccggcuggcacggcuacaccucccacggggcccacggcguggcggucgccgccgaccugaaguccacccaggaggccaucaacaagaucaccaagaaccucaacucccugagcgagcuggaggugaagaaccuccagcggcuguccggggccauggacgagcugcacaacgagauccucgagcuggacgagaagguggacgaccugcgcgcggacaccaucagcucccagaucgagcucgccguccugcugagcaacgagggcaucaucaacuccgaggacgagcaccuccuggcccuggagcggaagcucaagaagaugcugggccccagcgccguggacaucgggaacggcugcuucgagacgaagcacaagugcaaccagaccugccuggaccgcaucgcggccgggaccuucaacgccggcgaguucucccuccccaccuucgacagccugaacaucaccgccgccucccugaacgacgacgggcucgacaaccacacgauccugcuguacuacagcaccgcggccuccagccuggccgugacccucaugcuggccaucuucaucgucuacauggugucccgggacaacgugagcugcuccaucugccuguga

SEQ ID NO: 92198 - RNA, 1755 nt, Artificial Sequence
  derived and/or modified CDS sequence (opt1) from hemagglutinin__InfluenzaB__AHL94817
augaaggccaucaucgugcugcucauggucgugaccagcaacgccgaccgcaucugcaccggcaucacguccagcaacagcccccacguggucaagaccgcgacccagggggaggugaacgugaccggcgccaucccgcugacgaccacccccaccaagagcuacuucgccaaccugaaggggacgcggacccgcggcaagcucugccccgacugccugaacugcaccgaccuggacgucgcccucgggcggcccaugugcgugggcaccacgccguccgccaaggcgagcauccugcacgaggugcgccccgucaccuccggcugcuuccccaucaugcacgaccggaccaagauccgccagcugcccaaccuccugcggggguacgagaacauccgccugagcacccagaacgugaucgacgccgagaaggccccgggcgggcccuaccggcucggcacguccgggagcugccccaacgccaccuccaagaucggcuucuucgcgaccauggccugggccgugcccaaggacaacuacaagaacgccaccaacccgcagacggucgaggugcccuacaucugcaccgagggcgaggaccagaucaccguguggggguuccacagcgacaacaagacccagaugaagaaccuguacggcgacuccaacccccagaaguucacgagcuccgccaacggggucaccacccacuacgugagccagaucggcgacuuccccgaccagaccgaggacggcgggcugccgcaguccggccgcaucguggucgacuacauggugcagaagcccgggaagacgggcaccaucguguaccagcgcgggguccuccugccccagaagguguggugcgcgagcggccgguccaaggugaucaagggcagccugccccucaucggggaggccgacugccugcacgagaaguacggcgggcugaacaagagcaagccguacuacaccggcgagcacgccaaggccaucgggaacugccccaucugggucaagacgccccucaagcuggccaacggcaccaaguaccggcccccggcgaagcugcucaaggagcgcggcuucuucggggccaucgccggcuuccuggagggcgggugggaggggaugaucgccggcuggcacggcuacaccucccacggggcccacggcguggcggucgccgccgaccugaaguccacccaggaggccaucaacaagaucaccaagaaccucaacucccugagcgagcuggaggugaagaaccuccagcggcuguccggggccauggacgagcugcacaacgagaucaucgagcucgacgagaagguggacgaccugcgcgcggacacgaucagcucccagaucgagcuggccguccuccugagcaacgagggcaucaucaacuccgaggacgagcaccuccuggcccuggagcggaagcugaagaagaugcucggccccagcgccguggacaucgggaacggcugcuucgagaccaagcacaagugcaaccagaccugccuggaccgcaucgcggccgggaccuucaacgccggcgaguucucccugcccaccuucgacagccucaacaucacggccgccucccugaacgacgacgggcuggacaaccacaccauccuccuguacuacagcaccgcggccuccagccuggccgugacccugaugcucgccaucuucaucgucuacauggugucccgggacaacgugagcugcuccaucugccuguga

SEQ ID NO: 92199 - RNA, 1758 nt, Artificial Sequence; identical to SEQ ID NO: 91889
  derived and/or modified CDS sequence (opt1) from hemagglutinin__InfluenzaB__AHL94827

SEQ ID NO: 92200 - RNA, 1755 nt, Artificial Sequence
  derived and/or modified CDS sequence (opt1) from hemagglutinin__InfluenzaB__AHL94837
augaaggccaucaucgugcugcucauggucgugaccagcaacgccgaccgcaucugcaccggcaucacguccagcaacagcccccacguggucaagaccgcgacccagggggaggugaacgugaccggcgucaucccgcugacgaccacccccgccaaguccuacuucgccaaccugaaggggacccggacgcgcggcaagcucugccccgacugccugaacugcaccgaccuggacguggcccucgggcggcccaugugcgugggcaccaccccguccgccaaggcgagcauccugcacgagguccgccccgugacguccggcugcuuccccaucaugcacgaccggaccaagauccgccagcugcccaaccuccugcggggguacgagaacauccgccugagcacccagaacgugaucgacgccgagaaggccccgggcgggcccuacaagcucggcaccuccgggagcugccccaacgccacguccaagaucggcuucuucgcgaccauggccugggccguccccaaggacaacuacaagaacgccaccaacccgcugaccguggaggugcccuacaucugcaaggagggcgaggaccagaucacggucuggggguuccacagcgacaacaagacccagaugaagaaccuguacggcgacuccaacccccagaaguucaccagcuccgccaacggggugaccacgcacuacgugagccagaucggcgacuuccccgaccagaccgaggacggcgggcucccgcaguccggccggaucgucguggacuacaugaugcagaagcccgggaagaccggcaccaucguguaccagcgcgggguccugcugccccagaagguguggugcgcgagcggccgguccaaggugaucaagggcagccucccccugaucggggaggccgacugccugcacgaggaguacggcgggcucaacaagagcaagccguacuacacgggcaagcacgccaaggccaucgggaacugccccaucugggucaagacgccccugaagcuggccaacggcaccaaguaccggcccccggcgaagcuccugaaggagcgcggcuucuucggggccaucgccggcuuccuggagggcgggugggaggggaugaucgccggcuggcacggcuacaccucccacggggcccacggcguggcggucgccgccgaccucaagagcacccaggaggccaucaacaagaucaccaagaaccugaacucccugagcgagcucgaggugaagaaccugcagcgccuguccggggccauggacgagcuccacaacgagauccuggagcuggacgagaagguggacgaccuccgggcggacaccaucagcucccagaucgagcuggccguccugcucagcaacgagggcaucaucaacuccgaggacgagcaccuccuggcccuggagcgcaagcugaagaagaugcugggccccagcgccguggacaucgggaacggcugcuucgagaccaagcacaagugcaaccagacgugccucgaccggaucgcggccgggaccuucaacgccggcgaguucucccugcccaccuucgacagccugaacaucaccgccgccucccucaacgacgacgggcuggacaaccacaccauccugcuguacuacagcacggcggccuccagccucgccgugacccugaugcuggccaucuucaucgucuacauggugucccgcgacaacgugagcugcuccaucugccucuga

SEQ ID NO: 92201 - RNA, 1755 nt, Artificial Sequence; identical to SEQ ID NO: 90878
  derived and/or modified CDS sequence (opt1) from hemagglutinin__InfluenzaB__AHL94847

SEQ ID NO: 92202 - RNA, 1758 nt, Artificial Sequence
  derived and/or modified CDS sequence (opt1) from hemagglutinin__InfluenzaB__AHL94858
augaaggccaucaucgugcugcucauggucgugaccagcaacgccgaccgcaucugcaccggcaucacguccagcaacagcccccacguggucaagaccgcgacccagggggaggugaacgugaccggcgucaucccgcugacgaccacccccaccaagagccacuucgccaaccugaaggggacggagacccggggcaagcucugccccaagugccugaacugcaccgaccuggacguggcccucgggcgccccaagugcaccggcaacaucccguccgcccgggugagcauccugcacgagguccgccccgugacguccggcugcuuccccaucaugcacgaccggaccaagauccgccagcugcccaaccuccugcggggguacgagcacauccgccugagcacccacaacgugaucaacgccgagaacgcgccgggcgggcccuacaagaucggcaccuccgggagcugccccaacgucacgaacggcaacggcuucuucgccaccauggccugggccgugcccaagaacgacaacaacaagaccgcgaccaacucccucacgaucgaggugccguacaucugcaccgagggggaggaccagaucaccgucuggggcuuccacagcgacaacgagacccagauggccaagcuguacggggacuccaagccccagaaguucacgagcuccgccaacggcgugaccacccacuacgugagccagaucggcggguuccccaaccagaccgaggacggcgggcugccccaguccggccggaucgucguggacuacauggugcagaaguccgggaaggccggcacgaucaccuaccagcgcggcauccuccugccgcagaaggucuggugcgccuccgggcggagcaaggugaucaagggcagccugccccucaucggggaggcggacugccugcacgagaaguacggcgggcugaacaaguccaagcccuacuacaccggcgagcacgccaaggccaucggcaacugccccaucugggugaagaccccgcucaagcuggccaacgggacgaaguaccgcccgcccgccaagcugcucaaggagcggggcuucuucggggcgaucgccggcuuccuggagggcgggugggagggcaugaucgccggguggcacggcuacaccagccacggggcccacggcgucgccguggcggccgaccugaaguccacccaggaggccaucaacaagaucaccaagaaccucaacagccuguccgagcuggaggucaagaaccuccagcgccugagcggcgccauggacgagcugcacaacgagauccucgagcuggacgagaagguggacgaccugcgggccgacacgaucuccagccagaucgagcucgcggugcugcuguccaacgaggggaucaucaacagcgaggacgagcaccuccuggcccuggagcgcaagcucaagaagaugcugggccccuccgccgucgagaucgggaacggcugcuucgagaccaagcacaagugcaaccagaccugccuggaccggaucgccgcggggaccuucgacgccggcgaguucagccuccccaccuucgacucccugaacaucacggccgccagccugaacgacgacggccucgacaaccacaccauccugcuguacuacuccaccgccgcgagcucccuggccgugacccucaugaucgccaucuucguggucuacauggugagccgcgacaacguguccugcagcaucugccuguga

SEQ ID NO: 92203 - RNA, 1755 nt, Artificial Sequence; identical to SEQ ID NO: 90844
  derived and/or modified CDS sequence (opt1) from hemagglutinin__InfluenzaB__AHL94869

SEQ ID NO: 92204 - RNA, 1758 nt, Artificial Sequence; identical to SEQ ID NO: 91013
  derived and/or modified CDS sequence (opt1) from hemagglutinin__InfluenzaB__AHL94880

SEQ ID NO: 92205 - RNA, 1758 nt, Artificial Sequence; identical to SEQ ID NO: 91346
  derived and/or modified CDS sequence (opt1) from hemagglutinin__InfluenzaB__AHL94889

SEQ ID NO: 92206 - RNA, 1758 nt, Artificial Sequence; identical to SEQ ID NO: 91013
  derived and/or modified CDS sequence (opt1) from hemagglutinin__InfluenzaB__AHL94900

SEQ ID NO: 92207 - RNA, 1758 nt, Artificial Sequence
  derived and/or modified CDS sequence (opt1) from hemagglutinin__InfluenzaB__AHL94911
augaaggccaucaucgugcugcucauggucgugaccagcaacgccgaccgcaucugcaccggcaucacguccagcaacagcccccacguggucaagaccgcgacccagggggaggugaacgugaccggcgucaucccgcugacgaccacccccaccaagagccacuucgccaaccugaaggggacggagacccggggcaagcucugccccaagugccccaacugcaccgaccuggacguggcccuggggcgcccgaagugcaccggcaagauccccuccgcccgggugagcauccuccacgagguccgccccgugacguccggcugcuuccccaucaugcacgaccggaccaagauccgccagcugccgaaccugcuccggggguacgagcacauccgccugagcacccacaacgugaucaacgccgagaacgcgcccggcgggcccuacaagaucggcaccuccgggagcugccccaacgucacgaacggcaacggcuucuucgccaccauggccugggccgugccgaagaacgacaagaacaagaccgcgaccaacccccugacgaucgaggugcccuacaucugcaccgagggggaggaccagaucaccgucuggggcuuccacuccgacaacgagacccagauggccaagcucuacggggacagcaagccccagaaguucacguccagcgccaacggcgugaccacccacuacgugucccagaucggcggguucccgaaccagaccgaggacggcgggcugccccagagcggccggaucgucguggacuacauggugcagaaguccgggcgcacgggcaccaucaccuaccagcggggcauccugcucccccagaaggucuggugcgccagcgggcgcuccaaggugaucaagggcagccugccccugaucggggaggccgacugccuccacgagaaguacggcgggcugaacaagagcaagccguacuacaccggcgagcacgcgaaggccaucggcaacugccccaucugggugaagacgccccugaagcucgccaacgggaccaaguaccggcccccggccaagcugcugaaggagcgcggcuucuucggggccaucgcgggcuuccucgagggcgggugggagggcaugaucgccggguggcacggcuacaccucccacggggcccacggcgucgccguggccgcggaccugaaguccacccaggaggccaucaacaagaucacgaagaaccugaacucccucagcgagcuggaggucaagaaccugcagcggcucuccggcgccauggacgagcugcacaacgagauccuggagcucgacgagaagguggacgaccugcgcgccgacaccaucagcucccagaucgagcuggccgugcuccugagcaacgaggggaucaucaacuccgaggacgagcaccuccuggcgcuggagcggaagcugaagaagaugcucggccccagcgccgucgagaucgggaacggcugcuucgagaccaagcacaagugcaaccagaccugccuggaccgcaucgccgccgggaccuucgacgcgggcgaguucucccugcccacguucgacagccucaacaucaccgccgccucccugaacgacgacggccuggacaaccacaccauccuccuguacuacagcaccgccgccuccagccuggcggugacgcugaugaucgccaucuucguggucuacauggugucccgggacaacgugagcugcuccaucugccucuga

SEQ ID NO: 92208 - RNA, 1758 nt, Artificial Sequence; identical to SEQ ID NO: 91013
  derived and/or modified CDS sequence (opt1) from hemagglutinin__InfluenzaB__AHL94922

SEQ ID NO: 92209 - RNA, 1758 nt, Artificial Sequence
  derived and/or modified CDS sequence (opt1) from hemagglutinin__InfluenzaB__AHL94933
augaaggccaucaucgugcugcucauggucgugaccagcaacgccgaccgcaucugcaccggcaucacguccagcaacagcccccacguggucaagaccgcgacccagggggaggugaacgugaccggcgucaucccgcugacgaccacccccaccaagagccacuucgccaaccugaaggggacggagacccggggcaagcucugccccaagugccugaacugcaccgaccuggacguggcccucgggcgccccaagugcaccggcaagaucccguccgcccgggugagcauccugcacgagguccgccccgugacguccggcugcuuccccaucaugcacgaccggaccaagauccgccagcugcccaaccuccugcggggguacgagcacauccgccugagcacccacaacgugaucaacgccgagaacgcgccgggcgggcccuacaagaucggcaccuccgggagcugccccaacaucacgaacggcaacggcuucuucgccaccauggccugggccguccccaagaacgacaagaacaagaccgcgaccaacccgcucacgaucgaggugcccuacaucugcaccgagggggaggaccagaucaccguguggggcuuccacuccgacaacgagacccagauggccaagcuguacggggacagcaagccccagaaguucacguccagcgccaacggcgucaccacccacuacgugucccagaucggcggguuccccaaccagaccgaggacggcgggcugccgcagagcggccggaucguggucgacuacauggugcagaaguccgggaaggccggcacgaucaccuaccagcgcggcauccuccugccccagaagguguggugcgccagcgggcgguccaaggucaucaagggcagccugccccucaucggggaggcggacugccugcacgagaaguacggcgggcugaacaagagcaagcccuacuacaccggcgagcacgccaaggccaucggcaacugcccgaucugggugaagacgccccucaagcuggccaacgggaccaaguaccgcccgcccgccaagcugcucaaggagcggggcuucuucggggcgaucgccggcuuccuggagggcgggugggagggcaugaucgccggguggcacggcuacaccucccacggggcccacggcguggccgucgcggccgaccugaaguccacccaggaggccaucaacaagaucaccaagaaccucaacucccugagcgagcuggaggugaagaaccuccagcgccuguccggcgccauggacgagcugcacaacgagauccucgagcuggacgagaaggucgacgaccugcgggccgacacgaucagcucccagaucgagcucgcggugcugcugagcaacgaggggaucaucaacuccgaggacgagcaccuccuggcccuggagcgcaagcucaagaagaugcugggccccagcgccguggagaucgggaacggcugcuucgagaccaagcacaagugcaaccagaccugccuggaccggaucgccgcggggaccuucgacgccggcgaguucucccuccccaccuucgacagccugaacaucacggccgccucccugaacgacgacggccucgacaaccacaccauccugcuguacuacagcaccgccgcguccagccuggccgucacccucaugaucgccaucuucgugguguacauggucucccgcgacaacgugagcugcuccaucugccuguga

SEQ ID NO: 92210 - RNA, 1758 nt, Artificial Sequence; identical to SEQ ID NO: 92094
  derived and/or modified CDS sequence (opt1) from hemagglutinin__InfluenzaB__AHL94944

SEQ ID NO: 92211 - RNA, 1758 nt, Artificial Sequence; identical to SEQ ID NO: 90707
  derived and/or modified CDS sequence (opt1) from hemagglutinin__InfluenzaB__AHL94955

SEQ ID NO: 92212 - RNA, 1758 nt, Artificial Sequence; identical to SEQ ID NO: 90707
  derived and/or modified CDS sequence (opt1) from hemagglutinin__InfluenzaB__AHL94965

SEQ ID NO: 92213 - RNA, 1758 nt, Artificial Sequence; identical to SEQ ID NO: 90707
  derived and/or modified CDS sequence (opt1) from hemagglutinin__InfluenzaB__AHL94975

SEQ ID NO: 92214 - RNA, 1755 nt, Artificial Sequence; identical to SEQ ID NO: 90878
  derived and/or modified CDS sequence (opt1) from hemagglutinin__InfluenzaB__AHM00986

SEQ ID NO: 92215 - RNA, 1758 nt, Artificial Sequence; identical to SEQ ID NO: 90911
  derived and/or modified CDS sequence (opt1) from hemagglutinin__InfluenzaB__AHM00997

SEQ ID NO: 92216 - RNA, 1758 nt, Artificial Sequence
  derived and/or modified CDS sequence (opt1) from hemagglutinin__InfluenzaB__AHM01008
augaaggccaucaucgugcugcucauggucgugaccagcaacgccgaccgcaucugcaccggcaucacguccagcaacagcccccacguggucaagaccgcgacccagggggaggugaacgugaccggcgucaucccgcugacgaccacccccaccaagagccacuucgccaaccugaaggggacggagacccggggcaagcucugccccaagugccugaacugcaccgaccuggacguggcccucgggcgccccaagugcaccggcaagaucccguccgcccgggugagcauccugcacgagguccgccccgugacguccggcugcuuccccaucaugcacgaccggaccaagauccgccagcugcccaaccuccugcggggguacgagcacauccgccugagcacccacaacgugaucaacgccgaggacgcgccgggcgggcccuacaagaucggcaccuccgggagcugccccaacgucacgaacggcaacggcuucuucgccaccauggccuggaccgugcccaagaacgacaagaacaagaccgccacgaacccgcucaccaucgaggugcccuacaucugcaccgagggggaggaccagaucaccgucuggggcuuccacuccgacaacgagacgcagauggcgaagcuguacggggacagcaagccccagaaguucaccuccagcgccaacggcgugaccacccacuacgugucccagaucggcggguuccccaaccagacggaggacggcgggcugccgcagagcggccggaucgucguggacuacauggugcagaaguccgggaagaccggcaccaucaccuaccagcgcggcauccuccugccccagaaggucuggugcgccagcgggcgguccaaggugaucaagggcagccugccccucaucggggaggccgacugccugcacgagaaguacggcgggcugaacaagagcaagcccuacuacacgggcgagcacgccaaggcgaucggcaacugcccgaucugggugaagacgccccucaagcuggccaacgggaccaaguaccgcccgcccgccaagcugcucaaggagcggggcuucuucggggccaucgccggcuuccuggagggcgggugggagggcaugaucgcgggguggcacggcuacaccucccacggggcccacggcgucgccguggccgccgaccugaaguccacccaggaggcgaucaacaagaucaccaagaaccucaacucccugagcgagcuggaggucaagaaccuccagcgccuguccggcgccauggacgagcugcacaacgagauccucgagcuggacgagaagguggacgaccugcgggccgacaccaucagcucccagaucgagcucgccgugcugcugagcaacgaggggaucaucaacuccgaggacgagcaccuccuggcccuggagcgcaagcucaagaagaugcugggccccagcgcggucgagaucgggaacggcugcuucgagaccaagcacaagugcaaccagaccugccuggaccggaucgccgccgggacguucgacgccggcgaguucucccuccccaccuucgacagccugaacaucaccgcggccucccugaacgacgacggccucgacaaccacaccauccugcuguacuacagcacggccgccuccagccuggccgugacccucaugaucgcgaucuucguggucuacauggugucccgcgacaacgugagcugcuccaucugccuguga

SEQ ID NO: 92217 - RNA, 1758 nt, Artificial Sequence; identical to SEQ ID NO: 90911
  derived and/or modified CDS sequence (opt1) from hemagglutinin__InfluenzaB__AHM01019

SEQ ID NO: 92218 - RNA, 1758 nt, Artificial Sequence; identical to SEQ ID NO: 90911
  derived and/or modified CDS sequence (opt1) from hemagglutinin__InfluenzaB__AHM01030

SEQ ID NO: 92219 - RNA, 1758 nt, Artificial Sequence
  derived and/or modified CDS sequence (opt1) from hemagglutinin__InfluenzaB__AHM01041
augaaggccaucaucgugcugcucauggucgugaccagcaacgccgaccgcaucugcaccggcaucacguccagcaacagcccccacguggucaagaccgcgacccagggggaggugaacgugaccggcgucaucccgcugacgaccacccccaccaagagccacuucgccaaccugaaggggacggagacccggggcaagcucugccccaagugccugaacugcaccgaccuggacguggcccucgggcgccccaagugcaccggcaagaucccguccgcccgggugagcauccugcacgagguccgccccgugacguccggcugcuuccccaucaugcacgaccggaccaagauccgccagcugcccaaccuccugcggggguacgagcacauccgccugagcacccacaacgugaucaacgccgaggacgcgccgggcgggcccuacaagaucggcaccuccgggagcugccccaacgucacgaacggcaacggcuucuucgccaccauggccugggccgugcccaagaacgacaagaacaagaccgcgaccaacccgcucacgaucgaggugcccuacaucugcaccgagggggaggaccagaucaccgucuggggcuuccacuccgacaacgagacccagauggccaagcuguacggggacagcaagccccagaaguucacguccagcgccaacggcgugaccacccacuacgugucccagaucggcggguuccccaaccagaccgaggacggcgggcugccgcagagcggccggaucgucguggacuacauggugcagaaguccgagaagacggggaccaucaccuaccagcgcggcauccuccugccccagaaggucuggugcgccagcggccgguccaaggugaucaaggggagccugccccucaucggcgaggccgacugccugcacgagaaguacgggggccugaacaagagcaagcccuacuacaccggggagcacgcgaaggccaucggcaacugcccgaucugggugaagacgccccucaagcuggccaacggcaccaaguaccgcccgcccgccaagcugcucaaggagcggggguucuucggcgccaucgcgggguuccuggagggcgggugggagggcaugaucgccggcuggcacggguacaccucccacggcgcccacggggucgccguggccgcggaccugaaguccacccaggaggccaucaacaagaucacgaagaaccucaacucccugagcgagcuggaggucaagaaccuccagcgccuguccggcgccauggacgagcugcacaacgagauccucgagcuggacgagaagguggacgaccugcgggccgacaccaucagcucccagaucgagcucgccgugcugcugagcaacgagggcaucaucaacuccgaggacgagcaccuccuggcgcuggagcgcaagcucaagaagaugcuggggcccagcgccgucgagaucggcaacgggugcuucgagaccaagcacaagugcaaccagaccugccuggaccggaucgccgccggcaccuucgacgcgggggaguucucccuccccacguucgacagccugaacaucaccgccgccucccugaacgacgacggccucgacaaccacaccauccugcuguacuacagcaccgccgccuccagccuggcggugacgcucaugaucgccaucuucguggucuacauggugucccgcgacaacgugagcugcuccaucugccuguga

SEQ ID NO: 92220 - RNA, 1758 nt, Artificial Sequence
  derived and/or modified CDS sequence (opt1) from hemagglutinin__InfluenzaB__AHM01052
augaaggccaucaucgugcugcucauggucgugaccagcaacgccgaccgcaucugcaccggcaucacguccagcaacagcccccacguggucaagaccgcgacccagggggaggugaacgugaccggcgucaucccgcugacgaccacccccaccaagagccacuucgccaaccugaaggggacggagacccggggcaagcucugccccaagugccugaacugcaccgaccuggacguggcccucgggcgccccaagugcaccggcaagaucccguccgcccgggugagcauccugcacgagguccgccccgugacguccggcugcuuccccaucaugcacgaccggaccaagauccgccagcugcccaaccuccugcggggguacgagcacauccgccugagcacccacaacgugaucaacgccgagaacgcgccgggcgggcccuacaagaucggcaccuccgggagcugccccaacgucacgaacggcaacggcuucuucgccaccauggccugggccgugcccaagaacgacaagaacaagaccgcgaccaacccgcucacgaucgaggugcccuacaucugcaccgagggggaggaccagaucaccgucuggggcuuccacuccgacaacgagacccagauggccaagcuguacggggacagcaagccccagaaguucacguccagcgccaacggcgugaccacccacuacgugucccagaucggcggguuccccaaccagaccgaggacggcgggcugccgcagagcggccggaucgucguggacuacauggugcagaaguccgggaagacgggcaccaucaccuaccagcgcggcauccuccugccccagaaggucuggugcgccagcgggcgguccaaggugaucaagggcagccugccccucaucggggaggccgacugccugcacgagaaguacggcgggcugaacaagagcaagcccuacuacaccggcgagcacgcgaaggccaucggcaacugcccgaucugggugaagacgccccucaagcuggccaacgggaccaaguaccgcccgcccgccaagcugcucaaggagcggggcuucuucggggccaucgcgggcuuccuggagggcgggugggagggcaugaucgccggguggcacggcuacaccucccacggggcccacggcgucgccguggccgcggaccugaaguccacccaggaggccaucaacaagaucacgaagaaccucaacucccugagcgagcuggaggucaagaaccuccagcgccuguccggcgccauggacgagcugcacaacgagauccucgagcuggacgagaagguggacgaccugcgggccgacaccaucagcucccagaucgagcucgccgugcugcugagcaacgaggggaucaucaacuccgaggacgagcaccuccuggcgcuggagcgcaagcucaagaagaugcugggccccagcgccgucgagaucgggaacggcugcuucgagaccaagcacaagugcaaccagaccugccuggaccggaucgccgccgggaccuucgacgcgggcgaguucucccuccccacguucgacagccugaacaucaccgccgccucccugaacgacgacggccucgacaaccacaccaucaugcuguacuacagcaccgccgccuccagccuggcggugacgcugaugaucgccaucuucguggucuacauggugucccgcgacaacgugagcugcuccaucugccucuga

SEQ ID NO: 92221 - RNA, 1758 nt, Artificial Sequence; identical to SEQ ID NO: 90911
  derived and/or modified CDS sequence (opt1) from hemagglutinin__InfluenzaB__AHM01063

SEQ ID NO: 92222 - RNA, 1755 nt, Artificial Sequence; identical to SEQ ID NO: 90878
  derived and/or modified CDS sequence (opt1) from hemagglutinin__InfluenzaB__AHM01074

SEQ ID NO: 92223 - RNA, 1755 nt, Artificial Sequence
  derived and/or modified CDS sequence (opt1) from hemagglutinin__InfluenzaB__AHM01096
augaaggccaucaucgugcugcucauggucgugaccagcaacgccgaccgcaucugcaccggcaucacguccagcaacagcccccacguggucaagaccgcgacccagggggaggugaacgugaccggcgucaucccgcugacgaccacccccaccaaguccuacuucgccaaccugaaggggacgaagacccggggcaagcucugccccgacugccugaacugcaccgaccuggacguggcccucgggcgccccaugugcgugggcaccacgccguccgccaaggccagcauccugcacgagguccggcccgugaccuccggcugcuuccccaucaugcacgaccgcaccaagauccggcagcuggcgaaccuccugcgcggguacgagaacauccggcugagcacccagaacgugaucgacgccgagaaggcccccggcgggccguaccgccucggcacguccgggagcugccccaacgccaccuccaagagcggcuucuucgcgaccauggccugggccguccccaaggacaacaacaagaacgccaccaacccccugacgguggaggugccguacaucugcgccgagggcgaggaccagaucaccgucuggggguuccacuccgacaacaagacccagaugaagaaccuguacggcgacagcaacccccagaaguucaccuccagcgcgaacggggugacgacccacuacgugucccagaucggcggcuuccccgaccagaccgaggacgggggccucccccagagcgggcggaucgucguggacuacaugaugcagaagccgggcaagaccgggacgaucguguaccagcgcggcauccugcugccccagaaggucuggugcgccuccggccggagcaaggugaucaaggggagccucccccugaucggcgaggccgacugccugcacgagaaguacgggggccucaacaaguccaagcccuacuacaccggggagcacgccaaggccaucggcaacugcccgaucugggugaagacgccccugaagcuggcgaacggcaccaaguaccgcccgcccgccaagcuccugaaggagcggggguucuucggcgccaucgccggguuccuggagggcgggugggagggcaugaucgccggcuggcacggguacaccagccacggcgcgcacggggucgccguggccgccgaccucaaguccacccaggaggccaucaacaagaucaccaagaaccugaacagccuguccgagcucgaggucaagaaccugcagcgccugagcggcgcgauggacgagcuccacaacgagauccuggagcuggacgagaagguggacgaccuccgggccgacaccaucuccagccagaucgagcuggccgugcugcucuccaacgagggcaucaucaacagcgaggacgagcaccuccuggcccuggagcgcaagcugaagaagaugcuggggcccuccgcggucgacaucggcaacgggugcuucgagacgaagcacaagugcaaccagaccugccucgaccggaucgccgccggcaccuucaacgccggggaguucagccugcccaccuucgacucccugaacaucaccgccgcgagccucaacgacgacggccuggacaaccacacgauccugcuguacuacuccaccgccgccagcucccucgccgugacccugaugcuggccaucuucaucguguacauggucagccgcgacaacguguccugcagcaucugccucuga

SEQ ID NO: 92224 - RNA, 1758 nt, Artificial Sequence; identical to SEQ ID NO: 90911
  derived and/or modified CDS sequence (opt1) from hemagglutinin__InfluenzaB__AHM01107

SEQ ID NO: 92225 - RNA, 1758 nt, Artificial Sequence
  derived and/or modified CDS sequence (opt1) from hemagglutinin__InfluenzaB__AHM01118
augaaggccaucaucgugcugcucauggucgugaccagcaacgccgaccgcaucugcaccggcaucacguccagcaacagcccccacguggucaagaccgcgacccagggggaggugaacgugaccggcgucaucccgcugacgaccacccccaccaagagccacuucgccaaccugaaggggacggagacccggggcaagcucugccccaagugccugaacugcaccgaccuggacguggcccucgggcgccccaagugcaccggcaagaucccguccgcccgggugagcauccugcacgagguccgccccgugacguccggcugcuuccccaucaugcacgaccggaccaagauccgccagcugcccaaccuccugcggggguacgagcacauccgccugagcacccacaacgugaucaacgccgaggacgcgccgggcgggcccuacaagaucggcaccuccgggagcugccccaacgucacgaacggcaacggcuucuucgccaccauggccugggccgugcccaagaacgacaagaacaagaccgcgaccaacccgcucacgaucgaggugcccuacaucugcaccgagggggaggaccagaucaccgucuggggcuuccacuccgacaacgagacccagauggccaagcuguacggggacagcaagccccagaaguucacguccagcgccaacggcgugaccacccacuacgugucccagaucggcggguuccccaaccagaccgaggacggcgggcugccgcagagcggccggaucgucguggacuacauggugcagaaguccgggaagacgggcaccaucaccuaccagcgcggcauccuccugccccagaaggucuggugcgccagcgggcgguccaaggugaucaagggcagccugccccucaucggggaggccgacugccugcacgagaaguacggcgggcugaacaagagcaagcccuacuacaccggcgagcacgcgaaggccaucggcaacugcccgaucugggugaagacgccccucaagcuggccaacgggaccaaguaccgcccgcccgccaagcugcucaaggagcggggcuucuucggggccaucgcgggcuuccuggagggcgggugggagggcaugaucgccggguggcacggcuacaccucccacggggcccacggcgucgccguggccgcggaccugaaguccacccaggaggccaucaacaagaucacgaagaaccucaacucccugagcgagcuggaggucaagaaccuccagcgccuguccggcgccauggacgagcugcacaacgagauccucgagcuggacgagaagguggacgaccugcgggccgacaccaucagcucccagaucgagcucgccgugcugcugagcaacgaggggaucaucaacuccgaggacgagcaccuccuggcgcuggagcgcaagcucaagaagaugcugggccccagcgccgucgagaucgggaacggcugcuucgagaccaagcacaagugcaaccagaccugccuggaccggaucgccgccgggaccuucgacgcgggcgaguucucccuccccacguucgacagccugaacaucaccgccgugucccugaacgacgacggccucgacaaccacaccauccugcuguacuacagcaccgccgccuccagccuggccgugacgcucaugaucgcgaucuucgucguguacauggugucccgcgacaacgucagcugcuccaucugccuguga

SEQ ID NO: 92226 - RNA, 1758 nt, Artificial Sequence; identical to SEQ ID NO: 90911
  derived and/or modified CDS sequence (opt1) from hemagglutinin__InfluenzaB__AHM01129

SEQ ID NO: 92227 - RNA, 1758 nt, Artificial Sequence
  derived and/or modified CDS sequence (opt1) from hemagglutinin__InfluenzaB__AHM01140
augaaggccaucaucgugcugcucauggucgugaccagcaacgccgaccgcaucugcaccggcaucacguccagcaacagcccccacguggucaagaccgcgacccagggggaggugaacgugaccggcgucaucccgcugacgaccacccccaccaagagccacuucgccaaccugaaggggacggagacccggggcaagcucugccccaagugccugaacugcaccgaccuggacguggcccucgggcgccccaagugcaccggcaagaucccguccgcccgggugagcauccugcacgagguccgccccgugacguccggcugcuuccccaucaugcacgaccggaccaagauccgccagcugcccaaccuccugcggggguacgagcacauccgccugagcgcccacaacgugaucaacgcggagaacgccccgggcgggcccuacaagaucggcaccuccgggagcugccccaacgucaccaacggcaacggcuucuucgccacgauggccugggcggugcccaagaacgacaagaacaagaccgccaccaacccgcucaccaucgaggugcccuacaucugcacggagggggaggaccagaucaccgucuggggcuuccacuccgacaacgagacccagauggccaagcuguacggggacagcaagccccagaaguucaccuccagcgccaacggcgugacgacccacuacgugucccagaucggcggguuccccaaccagaccgaggacggcgggcugccgcagagcggccggaucgucguggacuacauggugcagaaguccgggaagaccggcacgaucaccuaccagcgcggcauccuccugccccagaaggucuggugcgccagcgggcgguccaaggugaucaagggcagccugccccucaucggggaggcggacugccugcacgagaaguacggcgggcugaacaagagcaagcccuacuacaccggcgagcacgccaaggccaucggcaacugcccgaucugggugaagacgccccucaagcuggccaacgggaccaaguaccgcccgcccgccaagcugcucaaggagcggggcuucuucggggcgaucgccggcuuccuggagggcgggugggagggcaugaucgccggguggcacggcuacaccucccacggggcccacggcgucgccguggcggccgaccugaaguccacccaggaggccaucaacaagaucaccaagaaccucaacucccugagcgagcuggaggucaagaaccuccagcgccuguccggcgccauggacgagcugcacaacgagauccucgagcuggacgagaagguggacgaccugcgggccgacacgaucagcucccagaucgagcucgcggugcugcugagcaacgaggggaucaucaacuccgaggacgagcaccuccuggcccuggagcgcaagcucaagaagaugcugggccccagcgccgucgagaucgggaacggcugcuucgagaccaagcacaagugcaaccagaccugccuggaccggaucgccgcggggaccuucgacgccggcgaguucucccuccccaccuucgacagccugaacaucacggccgccucccugaacgacgacggccucgacaaccacaccauccugcuguacuacagcaccgccgcguccagccuggccgugacccucaugaucgccaucuucguggucuacauggugucccgcgacaacgugagcugcuccaucugccuguga

SEQ ID NO: 92228 - RNA, 1758 nt, Artificial Sequence; identical to SEQ ID NO: 90896
  derived and/or modified CDS sequence (opt1) from hemagglutinin__InfluenzaB__AHM01151

SEQ ID NO: 92229 - RNA, 1758 nt, Artificial Sequence
  derived and/or modified CDS sequence (opt1) from hemagglutinin__InfluenzaB__AHM01162
augaaggccaucaucgugcugcucauggucgugaccagcaacgccgaccgcaucugcaccggcaucacguccagcaacagcccccacguggucaagaccgcgacccagggggaggugaacgugaccggcgucaucccgcugacgaccacccccaccaagagccacuucgccaaccugaaggggacggagacccggggcaagcucugccccaagugccugaacugcaccgaccuggacguggcccucgggcgccccaagugcaccggcaagaucccguccgcccgggugagcauccugcacgagguccgccccgugacguccggcugcuuccccaucaugcacgaccggaccaagauccgccagcugcccaaccuccugcggggguacgagcacauccgccugagcacccacaacgugaucaacgccaaggacgcgccgggcgggcccuacaagaucggcaccuccgggagcugccccaacgucacgaacggcaacggcuucuucgccaccauggccugggccgugcccaagaacgacaagaacaagaccgcgaccaacccgcucacgaucgaggugcccuacaucugcaccgagggggaggaccagaucaccgucuggggcuuccacuccgacaacgagacccagauggccaagcuguacggggacagcaagccccagaaguucacguccagcgccaacggcgugaccacccacuacgugucccagaucggcggguuccccaaccagaccgaggacggcgggcugccgcagagcggccggaucgucguggacuacauggugcagaaguccgggaagacgggcaccaucaccuaccagcgcggcauccuccugccccagaaggucuggugcgccagcgggcgguccaaggugaucaagggcagccugccccucaucggggaggccgacugccugcacgagaaguacggcgggcugaacaagagcaagcccuacuacaccggcgagcacgcgaaggccaucggcaacugcccgaucugggugaagacgccccucaagcuggccaacgggaccaaguaccgcccgcccgccaagcugcucaaggagcggggcuucuucggggccaucgcgggcuuccuggagggcgggugggagggcaugaucgccggguggcacggcuacaccucccacggggcccacggcgucgccguggccgcggaccugaaguccacccaggaggccaucaacaagaucacgaagaaccucaacucccugagcgagcuggaggucaagaaccuccagcgccuguccggcgccauggacgagcugcacaacgagauccucgagcuggacgagaagguggacgaccugcgggccgacaccaucagcucccagaucgagcucgccgugcugcugagcaacgaggggaucaucaacuccgaggacgagcaccuccuggcgcuggagcgcaagcucaagaagaugcugggccccagcgccgucgagaucgggaacggcugcuucgagaccaagcacaagugcaaccagaccugccuggaccggaucgccgccgggaccuucgacgcgggcgaguucucccuccccacguucgacagccugaacaucaccgccgccucccugaacgacgacggccucgacaaccacaccauccugcuguacuacagcaccgccgccuccagccuggcggugacgcucaugaucgccaucuucguggucuacauggugucccgcgacaacgugagcugcuccaucugccuguga

SEQ ID NO: 92230 - RNA, 1755 nt, Artificial Sequence; identical to SEQ ID NO: 90878
  derived and/or modified CDS sequence (opt1) from hemagglutinin__InfluenzaB__AHM01173

SEQ ID NO: 92231 - RNA, 1758 nt, Artificial Sequence
  derived and/or modified CDS sequence (opt1) from hemagglutinin__InfluenzaB__AHM01184
augaaggccaucaucgugcugcucauggucgugaccagcaacgccgaccgcaucugcaccggcaucacguccagcaacagcccccacguggucaagaccgcgacccagggggaggugaacgugaccggcgucaucacgcugaccaccaccccgacgaagucccacuucgccaaccugaaggggaccgagacccggggcaagcucugccccaagugccugaacugcaccgaccuggacguggcccucgggcgccccaagugcacgggcaagauccccuccgcccgggugagcauccugcacgagguccgcccggugaccuccggcugcuuccccaucaugcacgaccggaccaagauccgccagcugcccaaccuccugcggggguacgagcacauccgccugagcacccacaacgugaucaacgccgaggacgcgcccggcgggccguacaagaucggcacguccgggagcugccccaacgucaccaacggcaacggcuucuucgccaccauggccugggccgugcccaagaacgacaagaacaagaccgcgacgaacccccucaccaucgaggugccguacaucugcaccgagggggaggaccagaucaccgucuggggcuuccacuccgacaacgagacgcagauggccaagcuguacggggacagcaagccccagaaguucaccuccagcgccaacggcgugaccacccacuacgugucccagaucggcggguuccccaaccagacggaggacggcgggcugccccagagcggccggaucgucguggacuacauggugcagaaguccgggaagaccggcaccaucaccuaccagcgcggcauccuccugccgcagaaggucuggugcgccagcgggcgguccaaggugaucaagggcagccugccccucaucggggaggccgacugccugcacgagaaguacggcgggcugaacaagagcaagcccuacuacacgggcgagcacgcgaaggccaucggcaacugccccaucugggugaagaccccgcucaagcuggccaacgggaccaaguaccgcccgcccgccaagcugcucaaggagcggggcuucuucggggccaucgcgggcuuccuggagggcgggugggagggcaugaucgccggguggcacggcuacaccucccacggggcccacggcgucgccguggccgcggaccucaagagcacgcaggaggccaucaacaagaucaccaagaaccugaacucccugagcgagcuggaggucaagaaccuccagcgccuguccggcgccauggacgagcugcacaacgagauccucgagcuggacgagaagguggacgaccugcgggccgacaccaucagcucccagaucgagcucgccgugcugcugagcaacgaggggaucaucaacuccgaggacgagcaccuccuggcgcuggagcgcaagcucaagaagaugcugggccccagcgccgucgagaucgggaacggcugcuucgagaccaagcacaagugcaaccagaccugccuggaccggaucgccgccgggacguucgacgcgggcgaguucucccuccccaccuucgacagccugaacaucaccgccgccucccugaacgacgacggccucgacaaccacaccauccugcuguacuacagcacggccgccuccagccuggcggugacccucaugaucgccaucuucguggucuacauggugucccgcgacaacgugagcugcuccaucugccuguga

SEQ ID NO: 92232 - RNA, 1758 nt, Artificial Sequence; identical to SEQ ID NO: 92227
  derived and/or modified CDS sequence (opt1) from hemagglutinin__InfluenzaB__AHM01195

SEQ ID NO: 92233 - RNA, 1758 nt, Artificial Sequence
  derived and/or modified CDS sequence (opt1) from hemagglutinin__InfluenzaB__AHM01206
augaaggccaucaucgugcugcucauggucgugaccagcaacgccgaccgcaucugcaccggcaucacguccagcaacagcccccacguggucaagaccgcgacccagggggaggugaacgugaccggcgucaucccgcugacgaccacccccaccaagagccacuucgccaaccugaaggggacggagacccggggcaagcucugccccaagugccugaacugcaccgaccuggacguggcccucgggcgccccaagugcaccggcaagaucccguccgcccgggugagcauccugcacgagguccgccccgugacguccggcugcuuccccaucaugcacgaccggaccaagauccgccagcugcccaaccuccugcggggguacgagcacauccgccugagcacccacaacgugaucaacgccgaggacgcgccgggcgggcccuacaagaucggcaccuccgggagcugccccaacgucacgaacggcaacggcuucuucgccaccauggccugggccgugcccaagaacgacaagaacaagaccgcgaccaacccgcucacgaucgaggugcccuacaucugcaccgagggggaggaccagaucaccgucuggggcuuccacuccgacaacgagacccagauggccaagcuguacggggacagcaagccccagaaguucacguccagcgccaacggcgugaccacccacuacgugucccagaucggcggguuccccaaccagaccgaggacggcgggcugccgcagagcggccggaucgucguggacuacauggugcagaaguccgagaagacggggaccaucaccuaccagcgcggcauccuccugccccagaaggucuggugcgccagcggccgguccaaggugaucaaggggagccugccccucaucggcgaggccgacugccugcacgagaaguacgggggccugaacaagagcaagcccuacuacaccggggagcacgcgaaggccaucggcaacugcccgaucugggugaagacgccccucaagcuggccaacggcaccaaguaccgcccgcccgccaagcugcucaaggagcggggguucuucggcgccaucgcgggguuccuggagggcgggugggagggcaugaucgccggcuggcacggguacaccucccacggcgcccacggggucgccguggccgcggaccugaaguccacccaggaggccaucaacaagaucacgaagaaccucaacucccugagcgagcuggaggucaagaaccuccagcgccuguccggcgccauggacgagcugcacaacgagauccucgagcuggacgagaagguggacgaccugcgggccgacaccaucagcucccagaucgagcucgccgugcugcugagcaacgagggcaucaucaacuccgaggacgagcaccuccuggcgcuggagcgcaagcucaagaagaugcuggggcccagcgccgucgagaucggcaacgggugcuucgagaccaagcacaagugcaaccagaccugccuggaccggaucgccgccggcaccuucgacgcgggggaguucucccuccccacguucgacagccugaacaucaccgccgccucccugaacgacgacggccucggcaaccacaccauccugcuguacuacagcaccgccgccuccagccuggcggugacgcucaugaucgccaucuucguggucuacauggugucccgcgacaacgugagcugcuccaucugccuguga

SEQ ID NO: 92234 - RNA, 1758 nt, Artificial Sequence; identical to SEQ ID NO: 90896
  derived and/or modified CDS sequence (opt1) from hemagglutinin__InfluenzaB__AHM01217

SEQ ID NO: 92235 - RNA, 1755 nt, Artificial Sequence; identical to SEQ ID NO: 90878
  derived and/or modified CDS sequence (opt1) from hemagglutinin__InfluenzaB__AHM01228

SEQ ID NO: 92236 - RNA, 1758 nt, Artificial Sequence; identical to SEQ ID NO: 90911
  derived and/or modified CDS sequence (opt1) from hemagglutinin__InfluenzaB__AHM01239

SEQ ID NO: 92237 - RNA, 1758 nt, Artificial Sequence; identical to SEQ ID NO: 90911
  derived and/or modified CDS sequence (opt1) from hemagglutinin__InfluenzaB__AHM01250

SEQ ID NO: 92238 - RNA, 1758 nt, Artificial Sequence
  derived and/or modified CDS sequence (opt1) from hemagglutinin__InfluenzaB__AHM01261
augaaggccaucaucgugcugcucauggucgugaccagcaacgccgaccgcaucugcaccggcaucacguccagcaacagcccccacguggucaagaccgcgacccagggggaggugaacgugaccggcgucaucccgcugacgaccacccccaccaagucccacuucgccaaccugaaggggacggagacccggggcaagcucugccccaagugccugaacugcaccgaccuggacguggcccucgggcgccccaagugcaccggcaagaucccguccgcccgggugagcauccugcacgagguccgccccgugacguccggcugcuuccccaucaugcacgaccggaccaagauccgccagcugcccaaccuccugcggggguacgagcacauccgccugagcacccacaacgugaucaacgccgagaacgcgccgggcgggcccuacaagaucggcaccuccgggagcugccccaacgucacgaacggcaacggcuucuucgccaccauggccugggccgugcccaagaacgacaagaacaagaccgcgaccaacccgcucacgaucgaggugcccuacaucugcaccgagggggaggaccagaucaccaucuggggcuuccacuccgacaacgagacccagauggccaagcuguacggggacagcaacccccagaaguucacguccagcgccaacggcgucaccacccacuacgugucccagaucggcggguuccccaaccagaccgaggacggcgggcugccgcagagcggccggaucguggucgacuacauggugcagaaguccgggaagacgggcaccaucaccuaccagcgcggcauccuccugccccagaagguguggugcgccgggggccggagcaaggucaucaaggggucccugccccucaucggcgaggccgacugccugcacgagaaguacgggggccugaacaagagcaagcccuacuacaccggcgagcacgcgaaggccaucgggaacugcccgaucugggugaagacgccccucaagcuggccaacggcaccaaguaccgcccgcccgccaagcugcucaaggagcggggguucuucggcgccaucgcgggguuccuggagggcggcugggaggggaugaucgccggcuggcacggguacaccagccacggcgcccacggcguggccgucgccgcggaccugaaguccacccaggaggccaucaacaagaucacgaagaaccucaacagccuguccgagcuggaggugaagaaccuccagcgccugagcggggccauggacgagcugcacaacgagauccucgagcuggacgagaaggucgacgaccugcgggccgacaccaucuccagccagaucgagcucgccgugcugcuguccaacgagggcaucaucaacagcgaggacgagcaccuccuggcgcuggagcgcaagcucaagaagaugcuggggcccuccgccguggagaucggcaacgggugcuucgagaccaagcacaagugcaaccagaccugccuggaccggaucgccgccggcaccuucgacgcgggcgaguucagccuccccacguucgacucccugaacaucaccgccgccagccugaacgacgacgggcucgacaaccacaccauccugcuguacuacuccaccgccgccagcucccuggcggucacgcucaugaucgccaucuucgugguguacauggucagccgcgacaacguguccugcagcaucugccuguga

SEQ ID NO: 92239 - RNA, 1755 nt, Artificial Sequence; identical to SEQ ID NO: 90878
  derived and/or modified CDS sequence (opt1) from hemagglutinin__InfluenzaB__AHM01272

SEQ ID NO: 92240 - RNA, 1758 nt, Artificial Sequence; identical to SEQ ID NO: 92227
  derived and/or modified CDS sequence (opt1) from hemagglutinin__InfluenzaB__AHM01283

SEQ ID NO: 92241 - RNA, 1758 nt, Artificial Sequence; identical to SEQ ID NO: 92227
  derived and/or modified CDS sequence (opt1) from hemagglutinin__InfluenzaB__AHM01294

SEQ ID NO: 92242 - RNA, 1755 nt, Artificial Sequence; identical to SEQ ID NO: 90878
  derived and/or modified CDS sequence (opt1) from hemagglutinin__InfluenzaB__AHM01305

SEQ ID NO: 92243 - RNA, 1758 nt, Artificial Sequence; identical to SEQ ID NO: 90911
  derived and/or modified CDS sequence (opt1) from hemagglutinin__InfluenzaB__AHM01316

SEQ ID NO: 92244 - RNA, 1758 nt, Artificial Sequence; identical to SEQ ID NO: 92227
  derived and/or modified CDS sequence (opt1) from hemagglutinin__InfluenzaB__AHM01327

SEQ ID NO: 92245 - RNA, 1758 nt, Artificial Sequence; identical to SEQ ID NO: 90911
  derived and/or modified CDS sequence (opt1) from hemagglutinin__InfluenzaB__AHM01338

SEQ ID NO: 92246 - RNA, 1758 nt, Artificial Sequence; identical to SEQ ID NO: 90911
  derived and/or modified CDS sequence (opt1) from hemagglutinin__InfluenzaB__AHM01349

SEQ ID NO: 92247 - RNA, 1758 nt, Artificial Sequence
  derived and/or modified CDS sequence (opt1) from hemagglutinin__InfluenzaB__AHM01360
augaaggccaucaucgugcugcucauggucgugaccagcaacgccgaccgcaucugcaccggcaucacguccagcaacagcccccacguggucaagaccgcgacccagggggaggugaacgugaccggcgucaucccgcugacgaccacccccaccaagagccacuucgccaaccugaaggggacggagacccggggcaagcucugccccaagugccugaacugcaccgaccuggacguggcccucgggcgccccaagugcaccggcaagaucccguccgcccgggugagcauccugcacgagguccgccccgugacguccggcugcuuccccaucaugcacgaccggaccaagauccgccagcugcccaaccuccugcggggguacgagcacauccgccugagcacccacaacgugaucaacgccgagaacgcgccgggcgggcccuacaagaucggcaccuccgggagcugccccaacgucacgaacggcaacggcuucuucgccaccauggccugggccgugcccaagaacgacaagaacaagaccgcgaccaacccgcucacgaucgaggugcccuacaucugcaccaagggggaggaccagaucaccgucuggggcuuccacuccgacaacgagacccagauggccaagcuguacggggacagcaacccccagaaguucacguccagcgccaacggcgugaccacccacuacgugucccagaucggcggguuccccaaccagaccgaggacggcgggcugccgcagagcggccggaucgucguggacuacauggugcagaaguccgggaagacgggcaccaucaccuaccagcgcggcauccuccugccccagaaggucuggugcgccagcgggcgguccaaggugaucaagggcagccugccccucaucggggaggccgacugccugcacgagaaguacggcgggcugaacaagagcaagcccuacuacaccggcgagcacgcgaaggccaucggcaacugcccgaucugggugaagacgccccucaagcuggccaacgggaccaaguaccgcccgcccgccaagcugcucaaggagcggggcuucuucggggccaucgcgggcuuccuggagggcgggugggagggcaugaucgccggguggcacggcuacaccucccacggggcccacggcgucgccguggccgcggaccugaaguccacccaggaggccaucaacaagaucacgaagaaccucaacucccugagcgagcuggaggucaagaaccuccagcgccuguccggcgccauggacgagcugcacaacgagauccucgagcuggacgagaagguggacgaccugcgggccgacaccaucagcucccagaucgagcucgccgugcugcugagcaacgaggggaucaucaacuccgaggacgagcaccuccuggcgcuggagcgcaagcucaagaagaugcugggccccagcgccgucgagaucgggaacggcugcuucgagaccaagcacaagugcaaccagaccugccuggaccggaucgccgccgggaccuucgacgcgggcgaguucucccuccccacguucgacagccugaacaucaccgccgccucccugaacgacgacggccucgacaaccacaccauccugcuguacuacagcaccgccgccuccagccuggcggugacgcucaugaucgccaucuucguggucuacauggugucccgcgacaacgugagcugcuccaucugccuguga

SEQ ID NO: 92248 - RNA, 1755 nt, Artificial Sequence
  derived and/or modified CDS sequence (opt1) from hemagglutinin__InfluenzaB__AHM01371
augaaggccaucaucgugcugcucauggucgugaccagcaacgccgaccgcaucugcaccggcaucacguccagcaacagcccccacguggucaagaccgcgacccagggggaggugaacgugaccggcgucaucccgcugacgaccacccccaccaaguccuacuucgccaaccugaaggggacgaagacccggggcaagcucugccccgacugccugaacugcaccgaccuggacguggcccucgggcgccccaugugcgugggcaccacgccguccgccaaggccagcauccugcacgagguccggcccgugaccuccggcugcuuccccaucaugcacgaccgcaccaagauccggcagcuggcgaaccuccugcgcggguacgagaacauccggcugagcacccagaacgugaucgacgccgagaaggcccccggcgggccguaccgccucggcacguccgggagcugccccaacgccaccuccaagaacggcuucuucgcgaccauggccugggccguccccaaggacaacaacaagaacgccaccaacccccugacgguggaggugccguacaucugcgccgagggcgaggaccagaucgcggucuggggguuccacagcgacaacaagacccagaugaagaaccuguacggcgacuccaacccccagaaguucaccagcuccgccaacggggugaccacgcacuacgugagccagaucggcggcuuccccgaccagaccgaggacgggggccucccccaguccgggcggaucgucguggacuacaugaugcagaagccgggcaagaccgggaccaucguguaccagcgcggcguccugcugccccagaagguguggugcgccagcggccgguccaaggugaucaaggggagccucccccugaucggcgaggccgacugccugcacgagaaguacgggggccucaacaagagcaagcccuacuacacgggggagcacgccaaggcgaucggcaacugcccgaucugggucaagacgccccugaagcuggccaacggcaccaaguaccgcccgcccgccaagcuccugaaggagcggggguucuucggcgccaucgccggguuccuggagggcgggugggagggcaugaucgcgggcuggcacggguacaccucccacggcgcccacgggguggccgucgccgccgaccucaagagcacccaggaggcgaucaacaagaucaccaagaaccugaacucccugagcgagcucgaggugaagaaccugcagcgccuguccggcgccauggacgagcuccacaacgagauccuggagcuggacgagaagguggacgaccuccgggccgacaccaucagcucccagaucgagcuggccguccugcucagcaacgagggcaucaucaacuccgaggacgagcaccuccuggcgcuggagcgcaagcugaagaagaugcuggggcccagcgccguggacaucggcaacgggugcuucgagaccaagcacaagugcaaccagacgugccucgaccggaucgccgccggcaccuucaacgccggggaguucucccugcccaccuucgacagccugaacaucaccgcggccucccucaacgacgacggccuggacaaccacaccauccugcuguacuacagcacggccgccuccagccucgccgugacccugaugcuggcgaucuucaucgucuacauggugucccgcgacaacgugagcugcuccaucugccucuga

SEQ ID NO: 92249 - RNA, 1755 nt, Artificial Sequence; identical to SEQ ID NO: 90878
  derived and/or modified CDS sequence (opt1) from hemagglutinin__InfluenzaB__AHM01382

SEQ ID NO: 92250 - RNA, 1758 nt, Artificial Sequence
  derived and/or modified CDS sequence (opt1) from hemagglutinin__InfluenzaB__AHM01393
augaaggccaucaucgugcugcucauggucgugaccagcaacgccgaccgcaucugcaccggcaucacguccagcaacagcccccacaucgugaagaccgcgacccagggggaggucaacgugaccggcgugaucccgcugacgaccacccccaccaagagccacuucgccaaccugaaggggacggagacccggggcaagcucugccccaagugccugaacugcaccgaccuggacgucgcccucgggcgccccaagugcaccggcaagaucccguccgcccgggugagcauccugcacgaggugcgccccgucacguccggcugcuuccccaucaugcacgaccggaccaagauccgccagcugcccaaccuccugcggggguacgagcacauccgccugagcacccacaacgugaucaacgccgagaacgcgccgggcgggcccuacaagaucggcaccuccgggagcugccccaacgugacgaacggcaacggcuucuucgccaccauggccugggccguccccaagaacgacaagaacaagaccgcgaccaacccgcucacgaucgaggugcccuacaucugcaccgagggggaggaccagaucaccguguggggcuuccacuccgacaacgagacccagauggccaagcuguacggggacagcaagccccagaaguucacguccagcgccaacggcgucaccacccacuacgugucccagaucggcggguuccccaaccagaccgaggacggcgggcugccgcagagcggccggaucguggucgacuacauggugcagaaguccgggaagacgggcaccaucaccuaccagcgcggcauccuccugccccagaagguguggugcgccagcgggcgguccaaggucaucaagggcagccugccccucaucggggaggccgacugccugcacgagaaguacggcgggcugaacaagagcaagcccuacuacaccggcgagcacgcgaaggccaucggcaacugcccgaucugggugaagacgccccucaagcuggccaacgggaccaaguaccgcccgcccgccaagcugcucaaggagcggggcuucuucggggccaucgcgggcuuccuggagggcgggugggagggcaugaucgccggguggcacggcuacaccucccacggggcccacggcguggccgucgccgcggaccugaaguccacccaggaggccaucaacaagaucacgaagaaccucaacucccugagcgagcuggaggugaagaaccuccagcgccuguccggcgccauggacgagcugcacaacgagauccucgagcuggacgagaaggucgacgaccugcgggccgacaccaucagcucccagaucgagcucgccgugcugcugagcaacgaggggaucaucaacuccgaggacgagcaccuccuggcgcuggagcgcaagcucaagaagaugcugggccccagcgccguggagaucgggaacggcugcuucgagaccaagcacaagugcaaccagaccugccuggaccggaucgccgccgggaccuucgacgcgggcgaguucucccuccccacguucgacagccugaacaucaccgccgccucccugaacgacgacggccucgacaaccacaccauccugcuguacuacagcaccgccgccuccagccuggcggucacgcucaugaucgccaucuucgugguguacauggucucccgcgacaacgugagcugcuccaucugccuguga

SEQ ID NO: 92251 - RNA, 1758 nt, Artificial Sequence; identical to SEQ ID NO: 90911
  derived and/or modified CDS sequence (opt1) from hemagglutinin__InfluenzaB__AHM01404

SEQ ID NO: 92252 - RNA, 1758 nt, Artificial Sequence
  derived and/or modified CDS sequence (opt1) from hemagglutinin__InfluenzaB__AHM01415
augaaggccaucaucgugcugcucauggucgugaccagcaacgccgaccgcaucugcaccggcaucacguccagcaacagcccccacguggucaagaccgcgacccagggggaggugaacgugaccggcgucaucccgcugacgaccacccccaccaagagccacuucgccaaccugaaggggacggagacccggggcaagcucugccccaagugccugaacugcaccgaccuggacguggcccucgggcgccccaagugcaccggcaagaucccguccgcccgggugagcauccugcacgagguccgccccgugacguccggcugcuuccccaucaugcacgaccggaccaagauccgccagcugcccaaccuccugcggggguacgagcacauccgccugagcacccacaacgugaucaacgccgaggacgcgccgggcgggcccuacaagaucggcaccuccgggagcugccccaacgucacgaacggcaacggcuucuucgccaccauggccugggccgugcccaagaacgacaagaacaagaccgcgaccaacccgcucacgaucgaggugcccuacaucugcaccgagggggaggaccagaucaccgucuggggcuuccacuccgacaacgagacccagauggccaagcuguacggggacagcaagccccagaaguucacguccagcgccaacggcgugaccacccacuacgugucccagaucggcggguuccccaaccagaccgaggacggcgggcugccgcagagcggccggaucgucaucgacuacauggugcagaaguccgggaagacgggcaccaucaccuaccagcgcggcauccuccugccccagaagguguggugcgccagcgggcgguccaaggucaucaagggcagccugccccucaucggggaggccgacugccugcacgagaaguacggcgggcugaacaagagcaagcccuacuacaccggcgagcacgcgaaggccaucggcaacugcccgaucugggugaagacgccccucaagcuggccaacgggaccaaguaccgcccgcccgccaagcugcucaaggagcggggcuucuucggggccaucgcgggcuuccuggagggcgggugggagggcaugaucgccggguggcacggcuacaccucccacggggcccacggcguggccgucgccgcggaccugaaguccacccaggaggccaucaacaagaucacgaagaaccucaacucccugagcgagcuggaggugaagaaccuccagcgccuguccggcgccauggacgagcugcacaacgagauccucgagcuggacgagaaggucgacgaccugcgggccgacaccaucagcucccagaucgagcucgccgugcugcugagcaacgaggggaucaucaacuccgaggacgagcaccuccuggcgcuggagcgcaagcucaagaagaugcugggccccagcgccguggagaucgggaacggcugcuucgagaccaagcacaagugcaaccagaccugccuggaccggaucgccgccgggaccuucgacgcgggcgaguucucccuccccacguucgacagccugaacaucaccgccgccucccugaacgacgacggccucgacaaccacaccauccugcuguacuacagcaccgccgccuccagccuggcggucacgcucaugaucgccaucuucgugguguacauggucucccgcgacaacgugagcugcuccaucugccuguga

SEQ ID NO: 92253 - RNA, 1758 nt, Artificial Sequence
  derived and/or modified CDS sequence (opt1) from hemagglutinin__InfluenzaB__AHM01426
augaaggccaucaucgugcugcucauggucgugaccagcaacgccgaccgcaucugcaccggcaucacguccagcaacagcccccacguggucaagaccgcgacccagggggaggugaacgugaccggcgucaucccgcugacgaccacccccaccaagagccacuucgccaaccugaaggggacggagacccggggcaagcucugccccaagugccugaacugcaccgaccuggacguggcccucgggcgccccaagugcaccggcaagaucccguccgcccgggugagcauccugcacgagguccgccccgugacguccggcugcuuccccaucaugcacgaccggaccaagauccgccagcugcccaaccuccugcggggguacgagcacauccgccugagcacccacaacgugaucaacgccgagaacgcgccgggcgggcccuacaagaucggcaccuccgggagcugccccaacgucacgaacggcaacggcuucuucgccaccauggccugggccgugcccaagaacgacaagaacaagaccgcgaccaacccgcucacgaucgaggugcccuacaucugcaccgagggggaggaccagaucaccaucuggggcuuccacuccgacaacgagacccagauggccaagcuguacggggacagcaacccccagaaguucacguccagcgccaacggcgucaccacccacuacgugucccagaucggcggguuccccaaccagaccgaggacggcgggcugccgcagagcggccggaucguggucgacuacauggugcagaaguccgggaagacgggcaccaucaccuaccagcgcggcauccuccugccccagaagguguggugcgccagcgggcgguccaaggucaucaagggcagccugccccucaucggggaggccgacugccugcacgagaaguacggcgggcugaacaagagcaagcccuacuacaccggcgagcacgcgaaggccaucggcaacugcccgaucugggugaagacgccccucaagcuggccaacgggaccaaguaccgcccgcccgccaagcugcucaaggagcggggcuucuucggggccaucgcgggcuuccuggagggcgggugggagggcaugaucgccggguggcacggcuacaccucccacggggcccacggcguggccgucgccgcggaccugaaguccacccaggaggccaucaacaagaucacgaagaaccucaacucccugagcgagcuggaggugaagaaccuccagcgccuguccggcgccauggacgagcugcacaacgagauccucgagcuggacgagaaggucgacgaccugcgggccgacaccaucagcucccagaucgagcucgccgugcugcugagcaacgaggggaucaucaacuccgaggacgagcaccuccuggcgcuggagcgcaagcucaagaagaugcugggccccagcgccguggagaucgggaacggcugcuucgagaccaagcacaagugcaaccagaccugccuggaccggaucgccgccgggaccuucgacgcgggcgaguucucccuccccacguucgacagccugaacaucaccgccgccucccugaacgacgacggccucgacaaccacaccauccugcuguacuacagcaccgccgccuccagccuggcggucacgcucaugaucgccaucuucgugguguacauggucucccgcgacaacgugagcugcuccaucugccuguga

SEQ ID NO: 92254 - RNA, 1755 nt, Artificial Sequence
  derived and/or modified CDS sequence (opt1) from hemagglutinin__InfluenzaB__AHM01437
augaaggccgugaucguccugcucaugguggugaccagcaacgccgaccgcaucugcaccggcaucacguccagcaacagcccccacgucgugaagaccgcgacccagggggaggugaacgucaccggcgugaucccgcugacgaccacccccaccaaguccuacuucgccaaccugaaggggacgaagacccggggcaagcucugccccgacugccugaacugcaccgaccuggacguggcccucgggcgccccaugugcgucggcaccacgccguccgccaaggccagcauccugcacgaggugcggcccgugaccuccggcugcuuccccaucaugcacgaccgcaccaagauccggcagcuggcgaaccuccugcgcggguacgagaacauccggcugagcacccagaacgucaucgacgccgagaaggcccccggcgggccguaccgccucggcacguccgggagcugccccaacgccaccuccaagagcggcuucuucgcgaccauggccugggccgugcccaaggacaacaacaagaacgccaccaacccccugacgguggaggucccguacaucugcgccgaggaggaggaccagaucaccguguggggcuuccacuccgacaacaagacccagaugaagaaccuguacggggacagcaacccccagaaguucaccuccagcgcgaacggcgugacgacccacuacgucucccagaucgggggcuuccccgaccagaccgaggacggcgggcucccccagagcggccggaucgugguggacuacaugaugcagaagccggggaagaccggcacgaucgucuaccagcgcggggugcugcugccccagaagguguggugcgccuccggccggagcaaggucaucaagggcagccucccccugaucggggaggccgacugccugcacgagaaguacggcgggcucaacaaguccaagcccuacuacaccggcgagcacgccaaggccaucgggaacugcccgaucugggugaagacgccccugaagcuggcgaacggcaccaaguaccgcccgcccgccaagcuccugaaggagcggggcuucuucggggccaucgccggcuuccuggagggcgggugggaggggaugaucgccggcuggcacggcuacaccagccacggggcgcacggcgucgccguggccgccgaccucaaguccacccaggaggccaucaacaagaucaccaagaaccugaacagccuguccgagcucgaggugaagaaccugcagcgccugagcggggcgauggacgagcuccacaacgagauccuggagcuggacgagaaggucgacgaccuccgggccgacaccaucuccagccagaucgagcuggccgugcugcucuccaacgagggcaucaucaacagcgaggacgagcaccuccuggcccuggagcgcaagcugaagaagaugcugggccccuccgcgguggacaucgggaacggcugcuucgagacgaagcacaagugcaaccagaccugccucgaccggaucgccgccgggaccuucaacgccggcgaguucagccugcccaccuucgacucccugaacaucaccgccgcgagccucaacgacgacgggcuggacaaccacacgauccugcuguacuacuccaccgccgccagcucccucgccgucacccugaugcuggccaucuucaucguguacauggugagccgcgacaacgucuccugcagcaucugccucuga

SEQ ID NO: 92255 - RNA, 1755 nt, Artificial Sequence
  derived and/or modified CDS sequence (opt1) from hemagglutinin__InfluenzaB__AHM01448
augaaggccaucaucgugcugcucauggucgugaccagcaacgccgaccgcaucugcaccggcaucacguccagcaacagcccccacguggucaagaccgcgacccagggggaggugaacgugaccggcgucaucccgcugacgaccacccccaccaaguccuacuucgccaaccugaaggggacgaagacccggggcaagcucugccccgacugccugaacugcaccgaccuggacguggcccucgggcgccccaugugcgugggcaccacgccguccgccaaggccagcauccugcacgagguccggcccgugaccuccggcugcuuccccaucaugcacgaccgcaccaagauccggcagcuggcgaaccuccugcgcggguacgagaacauccggcugagcacccagaacgugaucgacgccgagaaggcccccggcgggccguaccgccucggcacguccgggagcugccccaacgccaccuccaagagcggcuucuucgcgaccauggccugggccguccccaaggacaacaacaagaacgccaccaacccccugacggccgaggugccguacaucugcgcggagggcgaggaccagaucaccguguggggguuccacuccgacaacaagacccagaugaagaaccuguacggcgacagcaacccccagaaguucaccuccagcgccaacggggucacgacccacuacgugucccagaucggcggcuuccccgaccagaccgaggacgggggccucccccagagcgggcggaucguggucgacuacaugaugcagaagccgggcaagaccgggacgaucguguaccagcgcggcgugcugcugccccagaaggucuggugcgccuccggccggagcaaggugaucaaggggagccucccccugaucggcgaggccgacugccugcacgagaaguacgggggccucaacaaguccaagcccuacuacaccggggagcacgccaaggcgaucggcaacugcccgaucugggugaagacgccccugaagcuggccaacggcaccaaguaccgcccgcccgccaagcuccugaaggagcggggguucuucggcgccaucgccggguuccuggagggcgggugggagggcaugaucgcgggcuggcacggguacaccagccacggcgcccacggggucgccguggccgccgaccucaaguccacccaggaggcgaucaacaagaucaccaagaaccugaacagccuguccgagcucgaggucaagaaccugcagcgccugagcggcgccauggacgagcuccacaacgagauccuggagcuggacgagaagguggacgaccuccgggccgacaccaucuccagccagaucgagcuggccgugcugcucuccaacgagggcaucaucaacagcgaggacgagcaccuccuggcgcuggagcgcaagcugaagaagaugcuggggcccuccgccgucgacaucggcaacgggugcuucgagacgaagcacaagugcaaccagaccugccucgaccggaucgccgccggcaccuucaacgccggggaguucagccugcccaccuucgacucccugaacaucaccgcggccagccucaacgacgacggccuggacaaccacacgauccugcuguacuacuccaccgccgccagcucccucgccgugacccugaugcuggcgaucuucaucguguacauggucagccgcgacaacguguccugcagcaucugccucuga

SEQ ID NO: 92256 - RNA, 1758 nt, Artificial Sequence; identical to SEQ ID NO: 90669
  derived and/or modified CDS sequence (opt1) from hemagglutinin__InfluenzaB__AHM01459

SEQ ID NO: 92257 - RNA, 1755 nt, Artificial Sequence
  derived and/or modified CDS sequence (opt1) from hemagglutinin__InfluenzaB__AHM01470
augaaggccaucaucgugcugcucauggucgugaccagcaacgccgaccgcaucugcaccggcaucacguccagcaacagcccccacguggucaagaccgcgacccagggggaggugaacgugaccggcgucaucccgcugacgaccacccccaccaaguccuacuucgccaaccugaaggggacgaagacccggggcaagcucugccccgacugccugaacugcaccgaccuggacguggcccucgggcgccccaugugcgugggcaccacgccguccgccaaggccagcauccugcacgagguccggcccgugaccuccggcugcuuccccaucaugcacgaccgcaccaagauccggcagcuggcgaaccuccugcgcggguacgagaacauccggcugagcacccagaacgugaucgacgccgagaaggcccccggcgggccguaccgccucggcacguccgggagcugccccaacgccaccuccaagagcggcuucuucgcgaccauggccugggccguccccaaggacaacaacaagaacgccaccaacccccugacgguggaggugccguacaucugcaccgagggcgaggaccagaucgccgucuggggguuccacuccgacaacaagacccagaugaagaaccuguacggcgacagcaacccccagaaguucaccuccagcgcgaacggggugacgacccacuacgugucccagaucggcggcuuccccgaccagaccgaggacgggggccucccccagagcgggcggaucgucguggacuacaugaugcagaagccgggcaagaccgggacgaucguguaccagcgcggcguccugcugccccagaagguguggugcgccuccggccggagcaaggugaucaaggggagccucccccugaucggcgaggccgacugccugcacgagaaguacgggggccucaacaaguccaagcccuacuacaccggggagcacgccaaggccaucggcaacugcccgaucugggucaagacgccccugaagcuggcgaacggcaccaaguaccgcccgcccgccaagcuccugaaggagcggggguucuucggcgccaucgccggguuccuggagggcgggugggagggcaugaucgccggcuggcacggguacaccagccacggcgcgcacgggguggccgucgccgccgaccucaaguccacccaggaggccgugaacaagaucaccaagaaccugaacagccuguccgagcucgaggugaagaaccugcagcgccugagcggcgcgauggacgagcuccacaacgagauccuggagcuggacgagaaggucgacgaccuccgggccgacaccaucuccagccagaucgagcuggccgugcugcucuccaacgagggcaucaucaacagcgaggacgagcaccuccuggcccuggagcgcaagcugaagaagaugcuggggcccuccgcgguggacaucggcaacgggugcuucgagacgaagcacaagugcaaccagaccugccucgaccggaucgccgccggcaccuucaacgccggggaguucagccugcccaccuucgacucccugaacaucaccgccgcgagccucaacgacgacggccuggacaaccacacgauccugcuguacuacuccaccgccgccagcucccucgccgucacccugaugcuggccaucuucaucguguacauggugagccgcgacaacgucuccugcagcaucugccucuga

SEQ ID NO: 92258 - RNA, 1755 nt, Artificial Sequence
  derived and/or modified CDS sequence (opt1) from hemagglutinin__InfluenzaB__AHM01481
augaaggccaucaucgugcugcucauggucgugaccagcaacgccgaccgcaucugcaccggcaucacguccagcaacagcccccacguggucaagaccgcgacccagggggaggugaacgugaccggcgucaucccgcugacgaccacccccaccaaguccuacuucgccaaccugaaggggacgaagacccggggcaagcucugccccgacugccugaacugcaccgaccuggacguggcccucgggcgccccaugugcgugggcaccacgccguccgccaaggccagcauccugcacgagguccggcccgugaccuccggcugcuuccccaucaugcacgaccgcaccaagauccggcagcuggcgaaccuccugcgcggguacgagaacauccggcugagcacccagaacgugaucgacgccgagaaggcccccggcgggccguaccgccucggcacguccgggagcugccccaacgccaccuccaagagcggcuucuucgcgaccauggccugggccguccccaaggacaacaacaagaacgccaccaacccccugacgguggaggugccguacaucugcgccgagggcgaggaccagaucaccgucuggggguuccacuccgacaacaagacccagaugaagaaccuguacggcgacagcaacccccagaaguucaccuccagcgcgaacggggugacgacccacuacgugucccagaucggcggcuuccccgaccagaccgaggacgggggccucccccagagcgggcggaucgucguggacuacaugaugcagaagccgggcaagaccgggacgaucguguaccagcgcggcguccugcugccccagcggguguggugcgccuccggccgcagcaaggugaucaaggggagccucccccugaucggcgaggccgacugccugcacgagaaguacgggggccucaacaaguccaagcccuacuacaccggggagcacgccaaggccaucggcaacugcccgaucugggucaagacgccccugaagcuggcgaacggcaccaaguaccggccgcccgccaagcuccugaaggagcgcggguucuucggcgccaucgccggguuccuggagggcgggugggagggcaugaucgccggcuggcacggguacaccagccacggcgcgcacgggguggccgucgccgccgaccucaaguccacccaggaggccaucaacaagaucaccaagaaccugaacagccuguccgagcucgaggugaagaaccugcagcggcugagcggcgcgauggacgagcuccacaacgagauccuggagcuggacgagaagguggacgaccuccgcgccgacaccaucuccagccagaucgagcuggccguccugcucuccaacgagggcaucaucaacagcgaggacgagcaccuccuggcccuggagcggaagcugaagaagaugcuggggcccuccgcgguggacaucggcaacgggugcuucgagacgaagcacaagugcaaccagaccugccucgaccgcaucgccgccggcaccuucaacgccggggaguucagccugcccaccuucgacucccugaacaucaccgccgcgagccucaacgacgacggccuggacaaccacacgauccugcuguacuacuccaccgccgccagcucccucgccgugacccugaugcuggccaucuucaucgucuacauggugagccgggacaacguguccugcagcaucugccucuga

SEQ ID NO: 92259 - RNA, 1755 nt, Artificial Sequence; identical to SEQ ID NO: 90923
  derived and/or modified CDS sequence (opt1) from hemagglutinin__InfluenzaB__AHM01492

SEQ ID NO: 92260 - RNA, 1755 nt, Artificial Sequence; identical to SEQ ID NO: 90878
  derived and/or modified CDS sequence (opt1) from hemagglutinin__InfluenzaB__AHM01503

SEQ ID NO: 92261 - RNA, 1755 nt, Artificial Sequence; identical to SEQ ID NO: 90878
  derived and/or modified CDS sequence (opt1) from hemagglutinin__InfluenzaB__AHM01514

SEQ ID NO: 92262 - RNA, 1755 nt, Artificial Sequence
  derived and/or modified CDS sequence (opt1) from hemagglutinin__InfluenzaB__AHM01525
augaaggccaucaucgugcugcucauggucgugaccagcaacgccgaccgcaucugcaccggcaucacguccagcaacagcccccacguggucaagaccgcgacccagggggaggugaacgugaccggcgucaucccgcugacgaccacccccaccaaguccuacuucgccaaccugaaggggacgaagacccggggcaagcucugccccgacugccugaacugcaccgaccuggacguggcccucgggcgccccaugugcgugggcaccacgccguccgccaaggccagcauccugcacgagguccggcccgugaccuccggcugcuuccccaucaugcacgaccgcaccaagauccggcagcuggcgaaccuccugcgcggguacgagaacauccggcugagcacccagaacgugaucgacgccgagaaggcccccggcgggccguaccgccucggcacguccgggagcugccccaacgccaccuccaagagcggcuucuucgcgaccauggccugggccguccccaaggacaacaacaagaacgccaccaacccccugacgguggaggugccguacaucugcgccgagggcgaggaccagaucaccgucuggggguuccacuccgacaacaagacccagaugaagaaccuguacggcgacagcaacccccagaaguucaccuccagcgcgaacggggugacgacccacuacgugucccagaucggcggcuuccccgaccagaccgaggacgggggccucccccagagcgggcggaucgucguggacuacaugauccagaagccgggcaagaccgggacgaucguguaccagcgcggcguccugcugccccagaagguguggugcgccuccggccggagcaaggugaucaaggggagccucccccugaucggcgaggccgacugccugcacgagaaguacgggggccucaacaaguccaagcccuacuacaccggggagcacgccaaggccaucggcaacugcccgaucugggucaagacgccccugaagcuggcgaacggcaccaaguaccgcccgcccgccaagcuccugaaggagcggggguucuucggcgccaucgccggguuccuggagggcgggugggagggcaugaucgccggcuggcacggguacaccagccacggcgcgcacgggguggccgucgccgccgaccucaaguccacccaggaggccaucaacaagaucaccaagaaccugaacagccuguccgagcucgaggugaagaaccugcagcgccugagcggcgcgauggacgagcuccacaacgagauccuggagcuggacgagaagguggacgaccuccgggccgacaccaucuccagccagaucgagcuggccguccugcucuccaacgagggcaucaucaacagcgaggacgagcaccuccuggcccuggagcgcaagcugaagaagaugcuggggcccuccgcgguggacaucggcaacgggugcuucgagacgaagcacaagugcaaccagaccugccucgaccggaucgccgccggcaccuucaacgccggggaguucagccugcccaccuucgacucccugaacaucaccgccgcgagccucaacgacgacggccuggacaaccacacgauccugcuguacuacuccaccgccgccagcucccucgccgugacccugaugcuggccaucuucaucgucuacauggugagccgcgacaacguguccugcagcaucugccucuga

SEQ ID NO: 92263 - RNA, 1755 nt, Artificial Sequence
  derived and/or modified CDS sequence (opt1) from hemagglutinin__InfluenzaB__AHM01536
augaaggccaucaucgugcugcucauggucgugaccagcaacgccgaccgcaucugcaccggcaucacguccagcaacagcccccacguggucaagaccgcgacccagggggaggugaacgugaccggcgucaucccgcugacgaccacccccaccaaguccuacuucgccaaccugaaggggacgaagacccggggcaagcucugccccgacugccugaacugcaccgaccuggacguggcccucgggcgccccaugugcgugggcaccacgccguccgccaaggccagcauccugcacgagguccggcccgugaccuccggcugcuuccccaucaugcacgaccgcaccaagauccggcagcuggcgaaccuccugcgcggguacgagaacauccggcugagcacccagaacgugaucgacgccgagaaggcccccggcgggccguaccgccucggcacguccgggagcugccccaacgccaccuccaagagcggcuucuucgcgaccauggccugggccguccccaaggacaacaacaagaacgccaccaacccccugacgguggaggugccguacaucugcgccgagggcgaggaccagaucaccgucuggggguuccacuccgacaacaagacccagaugaagaaccuguacggcgacagcaacccccagaaguucaccuccagcgcgaacggggugacgacccacuacgugucccagaucggcggcuuccccgaccagaccgaggacgggggccucccccagagcgggcggaucgucguggacuacaugaugcagaagccgggcaagaccgggacgaucguguaccagcgcggcguccugcugccccagaagguguggugcgccuccggccggagcaaggugaucaaggggagccucccccugaucggcgaggccgacugccugcacgagaaguacgggggccucaacaaguccaagcccuacuacaccggggagcacgccaaggccaucggcaacugcccgaucugggucaagacgccccugaagcuggcgaacggcaccaaguaccgcccgcccgccaagcuccugaaggagcggggguucuucggcgccaucgccggguuccuggagggcgggugggagggcaugaucgccggcuggcacggguacaccagccacggcgugcacggggucgcgguggccgccgaccucaaguccacccaggaggccaucaacaagaucaccaagaaccugaacagccuguccgagcucgaggugaagaaccugcagcgccugagcggcgccauggacgagcuccacaacgagauccuggagcuggacgagaaggucgacgaccuccgggcggacaccaucuccagccagaucgagcuggccgugcugcucuccaacgagggcaucaucaacagcgaggacgagcaccuccuggcccuggagcgcaagcugaagaagaugcuggggcccuccgccguggacaucggcaacgggugcuucgagacgaagcacaagugcaaccagaccugccucgaccggaucgcggccggcaccuucaacgccggggaguucagccugcccaccuucgacucccugaacaucaccgccgccagccucaacgacgacggccuggacaaccacacgauccugcuguacuacuccaccgcggccagcucccucgccgucacccugaugcuggccaucuucaucguguacauggugagccgcgacaacgucuccugcagcaucugccucuga

SEQ ID NO: 92264 - RNA, 1755 nt, Artificial Sequence; identical to SEQ ID NO: 90878
  derived and/or modified CDS sequence (opt1) from hemagglutinin__InfluenzaB__AHM01547

SEQ ID NO: 92265 - RNA, 1755 nt, Artificial Sequence; identical to SEQ ID NO: 90923
  derived and/or modified CDS sequence (opt1) from hemagglutinin__InfluenzaB__AHM01558

SEQ ID NO: 92266 - RNA, 1758 nt, Artificial Sequence; identical to SEQ ID NO: 90764
  derived and/or modified CDS sequence (opt1) from hemagglutinin__InfluenzaB__AHV83951

SEQ ID NO: 92267 - RNA, 1755 nt, Artificial Sequence; identical to SEQ ID NO: 92153
  derived and/or modified CDS sequence (opt1) from hemagglutinin__InfluenzaB__AHV83952

SEQ ID NO: 92268 - RNA, 1758 nt, Artificial Sequence; identical to SEQ ID NO: 90707
  derived and/or modified CDS sequence (opt1) from hemagglutinin__InfluenzaB__AHZ36697

SEQ ID NO: 92269 - RNA, 1758 nt, Artificial Sequence
  derived and/or modified CDS sequence (opt1) from hemagglutinin__InfluenzaB__AHZ36708
augaaggccaucaucgugcugcucauggucgugaccagcaacgccgaccgcaucugcaccggcaucacguccagcaacagcccccacguggucaagaccgcgacccagggggaggugaacgugaccggcgucaucccgcugacgaccacccccaccaagucccacuucgccaaccugaaggggacggagacccggggcaagcucugccccaagugccugaacugcaccgaccuggacguggcccucgggcgccccaagugcaccggcaagaucccguccgcccgggugagcauccugcacgagguccgccccgugacguccggcugcuuccccaucaugcacgaccggaccaagauccgccagcugcccaaccuccugcggggguacgagcacauccgccugagcacccacaacgugaucaacgccgagaacgcgccgggcgggcccuacaagaucggcaccuccgggagcugccucaacgucacgaacggcaacggcuucuucgccaccauggccugggccgugcccaagaacgacaagaacaagaccgcgaccaacccccugacgaucgaggugccguacaucugcaccgagggggaggaccagaucaccgucuggggcuuccacuccgacaacgagacccagauggccaagcuguacggggacagcaagccccagaaguucacguccagcgccaacggcgugaccacccacuacgugucccagaucggcggguuccccaaccagaccgaggacggcgggcucccccagagcggccggaucgucguggacuacauggugcagaaguccgggaagacgggcaccaucaccuaccagcgcggcauccugcugccgcagaaggucuggugcaccagcgggcgguccaaggugaucaagggcagccucccccugaucggggaggccgacugccugcacgagaaguacggcgggcucaacaagagcaagcccuacuacacgggcgagcacgccaaggcgaucggcaacugccccaucugggugaagaccccgcugaagcuggccaacgggaccaaguaccgcccgcccgccaagcuccugaaggagcggggcuucuucggggccaucgccggcuuccuggagggcgggugggagggcaugaucgcgggguggcacggcuacaccucccacggggcccacggcgucgccguggccgccgaccucaagagcacgcaggaggcgaucaacaagaucaccaagaaccugaacucccugagcgagcucgaggucaagaaccugcagcgccuguccggcgccauggacgagcuccacaacgagauccuggagcuggacgagaagguggacgaccuccgggccgacaccaucagcucccagaucgagcuggccgugcugcucagcaacgaggggaucaucaacuccgaggacgagcaccuccuggcccuggagcgcaagcugaagaagaugcugggccccagcgcggucgagaucgggaacggcugcuucgagaccaagcacaagugcaaccagaccugccucgaccggaucgccgccgggacguucgacgccggcgaguucucccugcccaccuucgacagccugaacaucaccgcggccucccucaacgacgacggccuggacaaccacaccauccugcuguacuacagcacggccgccuccagccucgccgugacccugaugaucgcgaucuucguggucuacauggugucccgcgacaacgugagcugcuccaucugccuguga

SEQ ID NO: 92270 - RNA, 1758 nt, Artificial Sequence
  derived and/or modified CDS sequence (opt1) from hemagglutinin__InfluenzaB__AHZ36719
augaaggccaucaucgugcugcucauggucgugaccagcaacgccgaccgcaucugcaccggcaucacguccagcaacagcccccacguggucaagaccgcgacccagggggaggugaacgugaccggcgucaucccgcugacgaccacccccaccaagagccacuucgccaaccugaaggggacggagacccggggcaagcucugccccaagugccugaacugcaccgaccuggacguggcccucgggcgccccaagugcaccggcaagaucccguccgcccgggugagcauccugcacgagguccgccccgugacguccggcugcuuccccaucaugcacgaccggaccaagauccgccagcugcccaaccuccugcggggguacgagcacauccgccugagcacccacaacgugaucaacgccgagaacgcgccgggcgggcccuacaagaucggcaccuccgggagcugccccaacgucacgaacggcaacggcuucuucgccaccauggccugggccgugcccaagaacgacaagaacaagaccgcgaccaacccgcucacgaucgaggugcccuacgucugcaccgagggggaggaccagaucaccguguggggcuuccacuccgacaacgagacccagauggccaagcuguacggggacagcaagccccagaaguucacguccagcgccaacggcgugaccacccacuacgucucccagaucggcggguuccccaaccagaccgaggacggcgggcugccgcagagcggccggaucgugguggacuacaugguccagaaguccgggaagacgggcaccaucaccuaccagcgcggcauccuccugccccagaagguguggugcgccagcgggcgguccaaggugaucaagggcagccugccccucaucggggaggccgacugccugcacgagaaguacggcgggcugaacaagagcaagcccuacuacaccggcgagcacgcgaaggccaucggcaacugcccgaucugggucaagacgccccucaagcuggccaacgggaccaaguaccgcccgcccgccaagcugcucaaggagcggggcuucuucggggccaucgcgggcuuccuggagggcgggugggagggcaugaucgccggguggcacggcuacaccucccacggggcccacggcguggccgucgccgcggaccugaaguccacccaggaggccaucaacaagaucacgaagaaccucaacucccugagcgagcuggaggugaagaaccuccagcgccuguccggcgccauggacgagcugcacaacgagauccucgagcuggacgagaagguggacgaccugcgggccgacaccaucagcucccagaucgagcucgccguccugcugagcaacgaggggaucaucaacuccgaggacgagcaccuccuggcgcuggagcgcaagcucaagaagaugcugggccccagcgccguggagaucgggaacggcugcuucgagaccaagcacaagugcaaccagaccugccuggaccggaucgccgccgggaccuucgacgcgggcgaguucucccuccccacguucgacagccugaacaucaccgccgccucccugaacgacgacggccucgacaaccacaccauccugcuguacuacagcaccgccgccuccagccuggcggugacgcucaugaucgccaucuucgucguguacauggugucccgcgacaacgucagcugcuccaucugccuguga

SEQ ID NO: 92271 - RNA, 1758 nt, Artificial Sequence; identical to SEQ ID NO: 90707
  derived and/or modified CDS sequence (opt1) from hemagglutinin__InfluenzaB__AHZ36730

SEQ ID NO: 92272 - RNA, 1758 nt, Artificial Sequence; identical to SEQ ID NO: 90707
  derived and/or modified CDS sequence (opt1) from hemagglutinin__InfluenzaB__AHZ36752

SEQ ID NO: 92273 - RNA, 1758 nt, Artificial Sequence; identical to SEQ ID NO: 90669
  derived and/or modified CDS sequence (opt1) from hemagglutinin__InfluenzaB__AHZ36763

SEQ ID NO: 92274 - RNA, 1758 nt, Artificial Sequence
  derived and/or modified CDS sequence (opt1) from hemagglutinin__InfluenzaB__AHZ36774
augaaggccaucaucgugcugcucauggucgugaccagcaacgccgaccgcaucugcaccggcaucacguccagcaacagcccccacguggucaagaccgcgacccagggggaggugaacgugaccggcgucaucccgcugacgaccacccccaccaagagccacuucgccaaccugaaggggacggagacccggggcaagcucugccccaagugccccaacugcaccgaccuggacguggcccuggggcgcccgaagugcaccggcaagauccccuccgcccgggugagcauccuccacgagguccgccccgugacguccggcugcuuccccaucaugcacgaccggaccaagauccgccagcugccgaaccugcuccggggguacgagcacauccgccugagcacccacaacgugaucaacgccgaguccgcgcccggcgggcccuacaagaucggcaccagcggguccugccccaacgucacgaacggcaacggcuucuucgccaccauggccugggccgugccgaagaacgacaagaacaagaccgcgaccgacccccugacgaucgaggugcccuacaucugcaccgaggaggaggaccagaucaccgucuggggguuccacagcgacaacgagacccagauggccaagcucuacggcgacuccaagccccagaaguucacgagcuccgccaacggggugaccacccacuacgugagccagaucggcggcuucccgaaccagaccgaggacgggggccugccccaguccgggcggaucgucguggacuacauggugcagaaguccggcaagacggggaccaucaccuaccagcgcggcauccugcucccccagaaggucuggugcgccuccggccggagcaaggugaucaaggggagccugccccugaucggcgaggccgacugccuccacgagaaguacgggggccugaacaaguccaagccguacuacaccggggagcacgcgaaggccaucggcaacugccccaucugggugaagacgccccugaagcucgccaacggcaccaaguaccggcccccggccaagcugcugaaggagcgcggguucuucggcgccaucgcgggguuccucgagggcgggugggagggcaugaucgccggcuggcacggguacaccagccacggcgcccacggggucgccguggccgcggaccugaaguccacccaggaggccaucaacaaggucacgaagaaccugaacagccucuccgagcuggaggugaagaaccugcagcgccucagcggcgccauggacgagcugcacaacgagauccuggagcucgacgagaagguggacgaccugcgggccgacaccaucuccagccagaucgagcuggccguccuccuguccaacgagggcaucaucaacagcgaggacgagcaccuccuggcgcuggagcgcaagcugaagaagaugcucgggcccuccgccguggagaucggcaacgggugcuucgagaccaagcacaagugcaaccagaccugccuggaccggaucgccgccggcaccuucgacgcgggggaguucagccugcccacguucgacucccucaacaucaccgccgccagccugaacgacgacggccuggacaaccacaccauccuccuguacuacuccaccgccgccagcucccuggcggugacgcugaugaucgccaucuucgucguguacauggugagccgcgacaacgucuccugcagcaucugccucuga

SEQ ID NO: 92275 - RNA, 1758 nt, Artificial Sequence; identical to SEQ ID NO: 92183
  derived and/or modified CDS sequence (opt1) from hemagglutinin__InfluenzaB__AHZ36785

SEQ ID NO: 92276 - RNA, 1758 nt, Artificial Sequence; identical to SEQ ID NO: 92183
  derived and/or modified CDS sequence (opt1) from hemagglutinin__InfluenzaB__AHZ36796

SEQ ID NO: 92277 - RNA, 1755 nt, Artificial Sequence
  derived and/or modified CDS sequence (opt1) from hemagglutinin__InfluenzaB__AHZ36807
augaaggccaucaucgugcugcucauggucgugaccagcaacgccgaccgcaucugcaccggcaucacguccagcaacagcccccacguggucaagaccgcgacccagggggaggugaacgugaccggcgucaucccgcugacgaccacccccaccaaguccuacuucgccaaccugaaggggacgaagacccggggcaagcucugccccgacugccugaacugcaccgaccuggacguggcccucgggcgccccaugugcgugggcaccacgccguccgccaaggccagcauccugcacgagguccggcccgugaccuccggcugcuuccccaucaugcacgaccgcaccaagauccggcagcuggcgaaccuccugcgcggguacgagaacauccggcugagcacccagaacgugaucgacgccgagaaggcccccggcgggccguaccgccucggcacguccgggagcugccccaacgccaccuccaagagcggcuucuucgcgaccauggccugggccguccccaaggacaacaacaagaacgccaccaacccccugacgguggaggugccguacaucugcgccgagggcgaggaccagaucaccgucuggggguuccacuccgacaacaagacccagaugaagaaccuguacggcgacagcaacccccagaaguucaccuccagcgcgaacggggugacgacccacuacgugucccagaucggcggcuuccccgaccagaccgaggacgggggccucccccagagcgggcggaucgucguggacuacaugaugcagaagccggagaagaccggcacgaucguguaccagcgcgggguccugcugccccagaagguguggugcgccuccggccggagcaaggugaucaagggcagccucccccugaucggggaggccgacugccugcacgagaaguacggcgggcucaacaaguccaagcccuacuacaccggcgagcacgccaaggccaucgggaacugcccgaucugggucaagacgccccugaagcuggcgaacggcaccaaguaccgcccgcccgccaagcuccugaaggagcggggcuucuucggggccaucgccggcuuccuggagggcgggugggaggggaugaucgccggcuggcacggcuacaccagccacggggcgcacggcguggccgucgccgccgaccucaaguccacccaggaggccaucaacaagaucaccaagaaccugaacagccuguccgagcucgaggugaagaaccugcagcgccugagcggggcgauggacgagcuccacaacgagauccuggagcuggacgagaagguggacgaccuccgggccgacaccaucuccagccagaucgagcuggccguccugcucuccaacgagggcaucaucaacagcgaggacgagcaccuccuggcccuggagcgcaagcugaagaagaugcugggccccuccgcgguggacaucgggaacggcugcuucgagacgaagcacaagugcaaccagaccugccucgaccggaucgccgccgggaccuucaacgccggcgaguucagccugcccaccuucgacucccugaacaucaccgccgcgagccucaacgacgacgggcuggacaaccacacgauccugcuguacuacuccaccgccgccagcucccucgccgugacccugaugcuggccaucuucaucgucuacauggugagccgcgacaacguguccugcagcaucugccucuga

SEQ ID NO: 92278 - RNA, 1758 nt, Artificial Sequence; identical to SEQ ID NO: 90707
  derived and/or modified CDS sequence (opt1) from hemagglutinin__InfluenzaB__AHZ36818

SEQ ID NO: 92279 - RNA, 1758 nt, Artificial Sequence; identical to SEQ ID NO: 90669
  derived and/or modified CDS sequence (opt1) from hemagglutinin__InfluenzaB__AHZ36829

SEQ ID NO: 92280 - RNA, 1758 nt, Artificial Sequence; identical to SEQ ID NO: 90669
  derived and/or modified CDS sequence (opt1) from hemagglutinin__InfluenzaB__AHZ36840

SEQ ID NO: 92281 - RNA, 1758 nt, Artificial Sequence; identical to SEQ ID NO: 92183
  derived and/or modified CDS sequence (opt1) from hemagglutinin__InfluenzaB__AHZ36851

SEQ ID NO: 92282 - RNA, 1758 nt, Artificial Sequence; identical to SEQ ID NO: 90707
  derived and/or modified CDS sequence (opt1) from hemagglutinin__InfluenzaB__AHZ36862

SEQ ID NO: 92283 - RNA, 1758 nt, Artificial Sequence; identical to SEQ ID NO: 90669
  derived and/or modified CDS sequence (opt1) from hemagglutinin__InfluenzaB__AHZ36873

SEQ ID NO: 92284 - RNA, 1758 nt, Artificial Sequence
  derived and/or modified CDS sequence (opt1) from hemagglutinin__InfluenzaB__AHZ36884
augaaggccaucaucgugcugcucauggucgugaccagcaacgccgaccgcaucugcaccggcaucacguccagcaacagcccccacaucgugaagaccgcgacccagggggaggucaacgugaccggcgugaucccgcugacgaccacccccaccaagagccacuucgccaaccugaaggggacggagacccggggcaagcucugccccaagugccugaacugcaccgaccuggacgucgcccucgggcgccccaagugcaccggcaagaucccguccgcccgggugagcauccugcacgaggugcgccccgucacguccggcugcuuccccaucaugcacgaccggaccaagauccgccagcugcccaaccuccugcggggguacgagcacauccgccugagcacccacaacgugaucaacgccgagaacgcgccgggcgggcccuacaagaucggcaccuccgggagcugccccaacaucacgaacggcaacggcuucuucgagaccauggccugggccgugcccaagaacgacaagaacaagaccgccaccaacccgcucacgaucgagguccccuacaucugcaccgagggggaggaccagaucaccguguggggcuuccacuccgacaacgagacccagauggcgaagcuguacggggacagcaagccccagaaguucacguccagcgccaacggcgugaccacccacuacgucucccagaucggcggguuccccaaccagaccgaggacggcgggcugccgcagagcggccggaucgugguggacuacaugguccagaaguccgggaagacgggcaccaucaccuaccagcgcggcauccuccugccccagaagguguggugcgccagcgggcgguccaaggugaucaagggcagccugccccucaucggggaggccgacugccugcacgagaaguacggcgggcugaacaagagcaagcccuacuacaccggcgagcacgccaaggcgaucggcaacugcccgaucugggucaagacgccccucaagcuggccaacgggaccaaguaccgcccgcccgccaagcugcucaaggagcggggcuucuucggggccaucgccggcuuccuggagggcgggugggagggcaugaucgcgggguggcacggcuacaccucccacggggcccacggcguggccguggccgccgaccugaaguccacccaggaggcgaucaacaagaucacgaagaaccucaacucccugagcgagcuggaggucaagaaccuccagcgccuguccggcgccauggacgagcugcacaacgagauccucgagcuggacgagaagguggacgaccugcgggccgacaccaucagcucccagaucgagcucgccguccugcugagcaacgaggggaucaucaacuccgaggacgagcaccuccuggcccuggagcgcaagcucaagaagaugcugggccccagcgcgguggagaucgggaacggcugcuucgagaccaagcacaagugcaaccagaccugccuggaccggaucgccgccgggaccuucgacgccggcgaguucucccuccccacguucgacagccugaacaucaccgcggccucccugaacgacgacggccucgacaaccacaccauccugcuguacuacagcaccgccgccuccagccuggccgugacgcucaugaucgcgaucuucgucguguacauggugucccgcgacaacgucagcugcuccaucugccuguga

SEQ ID NO: 92285 - RNA, 1758 nt, Artificial Sequence; identical to SEQ ID NO: 90707
  derived and/or modified CDS sequence (opt1) from hemagglutinin__InfluenzaB__AHZ36895

SEQ ID NO: 92286 - RNA, 1758 nt, Artificial Sequence; identical to SEQ ID NO: 90707
  derived and/or modified CDS sequence (opt1) from hemagglutinin__InfluenzaB__AHZ36906

SEQ ID NO: 92287 - RNA, 1758 nt, Artificial Sequence
  derived and/or modified CDS sequence (opt1) from hemagglutinin__InfluenzaB__AHZ36928
augaaggccaucaucgugcugcucauggucgugaccagcaacgccgaccgcaucugcaccggcaucacguccagcaacagcccccacguggucaagaccgcgacccagggggaggugaacgugaccggcgucaucccgcugacgaccacccccaccaagucccacuucgccaaccugaaggggacgaagacccggggcaagcucugccccaagugccugaacugcaccgaccuggacguggcccucgggcgccccaagugcaccggcaagaucccguccgcccgggugagcauccugcacgagguccgccccgugacguccggcugcuuccccaucaugcacgaccggaccaagauccgccagcugcccaaccuccugcggggguacgagcacauccgccugagcacccacaacgugaucaacgccgagaacgcgccgggcgggcccuacaagaucggcaccuccgggagcugccucaacgucacgaacggcaacggcuucuucgccaccauggccugggccgugcccaagaacgacaagaacaagaccgcgaccaacccccugacgaucgaggugccguacaucugcaccgagggggaggaccagaucaccgucuggggcuuccacuccgacaacgagacccagauggccaagcuguacggggacagcaagccccagaaguucacguccagcgccaacggcgugaccacccacuacgugucccagaucggcggguuccccaaccagaccgaggacggcgggcucccccagagcggccggaucgucguggacuacauggugcagaaguccgggaagacgggcaccaucaccuaccagcgcggcauccugcugccgcagaaggucuggugcgccagcgggcgguccaaggugaucaagggcagccucccccugaucggggaggccgacugccugcacgagaaguacggcgggcucaacaagagcaagcccuacuacaccggcgagcacgcgaaggccaucggcaacugccccaucugggugaagacgccgcugaagcuggccaacgggaccaaguaccgcccgcccgccaagcuccugaaggagcggggcuucuucggggccaucgcgggcuuccuggagggcgggugggagggcaugaucgccggguggcacggcuacaccucccacggggcccacggcgucgccguggccgcggaccucaagagcacccaggaggccaucaacaagaucacgaagaaccugaacucccugagcgagcucgaggucaagaaccugcagcgccuguccggcgccauggacgagcuccacaacgagauccuggagcuggacgagaagguggacgaccuccgggccgacaccaucagcucccagaucgagcuggccgugcugcucagcaacgaggggaucaucaacuccgaggacgagcaccuccuggcgcuggagcgcaagcugaagaagaugcugggccccagcgccgucgagaucgggaacggcugcuucgagaccaagcacaagugcaaccagaccugccucgaccggaucgccgccgggaccuucgacgcgggcgaguucucccugcccacguucgacagccugaacaucaccgccgccucccucaacgacgacggccuggacaaccacaccauccugcuguacuacagcaccgccgccuccagccucgcggugacgcugaugaucgccaucuucguggucuacauggugucccgcgacaacgugagcugcuccaucugccuguga

SEQ ID NO: 92288 - RNA, 1758 nt, Artificial Sequence; identical to SEQ ID NO: 92183
  derived and/or modified CDS sequence (opt1) from hemagglutinin__InfluenzaB__AHZ36939

SEQ ID NO: 92289 - RNA, 1758 nt, Artificial Sequence
  derived and/or modified CDS sequence (opt1) from hemagglutinin__InfluenzaB__AHZ36950
augaaggccaucaucgugcugcucauggucgugaccagcaacgccgaccgcaucugcaccggcaucacguccagcaacagcccccacaucgugaagaccgcgacccagggggaggucaacgugaccggcgugaucccgcugacgaccacccccaccaagagccacuucgccaaccugaaggggacggagacccggggcaagcucugccccaagugccugaacugcaccgaccuggacgucgcccucgggcgccccaagugcaccggcaagaucccguccgcccgggugagcauccugcacgaggugcgccccaucacguccggcugcuuccccaucaugcacgaccggaccaagauccgccagcugcccaaccuccugcggggguacgagcacauccgccugagcacccacaacgucaucaacgccgagaacgcgccgggcgggcccuacaagaucggcaccuccgggagcugccccaacaucacgaacggcaacggcuucuucgccaccauggccugggccgugcccaagaacgacaagaacaagaccgcgaccaacccgcucacgaucgaggugcccuacaucugcaccgagggggaggaccagaucaccgucuggggcuuccacuccgacaacgagacccagauggccaagcuguacggggacagcaagccccagaaguucacguccagcgccaacggcgugaccacccacuacgugucccagaucggcggguuccccaaccagaccgaggacggcgggcugccgcagagcggccggaucgucguggacuacauggugcagaaguccgggaagacgggcaccaucaccuaccagcgcggcauccuccugccccagaaggucuggugcgccagcgggcgguccaaggugaucaagggcagccugccccucaucggggaggccgacugccugcacgagaaguacggcgggcugaacaagagcaagcccuacuacaccggcgagcacgcgaaggccaucggcaacugcccgaucugggugaagacgccccucaagcuggccaacgggaccaaguaccgcccgcccgccaagcugcucaaggagcggggcuucuucggggccaucgcgggcuuccuggagggcgggugggagggcaugaucgccggguggcacggcuacaccucccacggggcccacggcgucgccguggccgcggaccugaaguccacccaggaggccaucaacaagaucacgaagaaccucaacucccugagcgagcuggaggugaagaaccuccagcgccuguccggcgccauggacgagcugcacaacgagauccucgagcuggacgagaaggucgacgaccugcgggccgacaccaucagcucccagaucgagcucgccgugcugcugagcaacgaggggaucaucaacuccgaggacgagcaccuccuggcgcuggagcgcaagcucaagaagaugcugggccccagcgccgucgagaucgggaacggcugcuucgagaccaagcacaagugcaaccagaccugccuggaccggaucgccgccgggaccuucgacgcgggcgaguucucccuccccacguucgacagccugaacaucaccgccgccucccugaacgacgacggccucgacaaccacaccauccugcuguacuacagcaccgccgccuccagccuggcggugacgcucaugaucgccaucuucguggucuacauggugucccgcgacaacgugagcugcuccaucugccuguga

SEQ ID NO: 92290 - RNA, 1758 nt, Artificial Sequence
  derived and/or modified CDS sequence (opt1) from hemagglutinin__InfluenzaB__AHZ36961
augaaggccaucaucgugcugcucauggucgugaccagcaacgccgaccgcaucugcaccggcaucacguccagcaacagcccccacguggucaagaccgcgacccagggggaggugaacgugaccggcgucaucccgcugacgaccacccccaccaagagccacuucgccaaccugaaggggacggagacccggggcaagcucugccccaagugccugaacugcaccgaccuggacguggcccucgggcgccccaagugcaccggcaagaucccguccgcccgggugagcauccugcacgagguccgccccgugacguccggcugcuuccccaucaugcacgaccggaccaagauccgccagcugcccaaccuccugcggggguacgagcacauccgccugagcacccacaacgugaucaacgccgagaacgcgccgggcgggcccuacaagaucggcaccuccgggagcugccccaacgucacgaacggcaacggcuucuucgccaccauggccugggccgugcccaagaacgacaagaacaagaccgcgaccaacccgcucacgaucgaggugcccuacaucugcaccgagggggaggaccagaucaccgucuggggcuuccacuccgacaacgagacccagauggccaagcuguacggggacagcaagccccagaaguucacguccagcgccaacggcgugaccacccacuacgugucccagaucggcggguuccccaaccagaccgaggacggcgggcugccgcagagcggccggaucgucguggacuacauggugcagaaguccgggaagacgggcaccaucaccuaccagcgcggcauccuccugccccagaaggucuggugcgccagcgggggcuccaaggugaucaaggggagccugccccucaucggcgaggccgacugccugcacgagaaguacgggggccugaacaagagcaagcccuacuacaccggcgagcacgcgaaggccaucgggaacugcccgaucugggugaagacgccccucaagcuggccaacggcaccaaguaccggccgcccgccaagcugcucaaggagcgcggguucuucggcgccaucgcgggguuccuggagggcggcugggaggggaugaucgccggcuggcacggguacaccucccacggcgcccacggcgucgccguggccgcggaccugaaguccacccaggaggccaucaacaagaucacgaagaaccucaacucccugagcgagcuggaggucaagaaccuccagcggcuguccggggccauggacgagcugcacaacgagauccucgagcuggacgagaagguggacgaccugcgcgccgacaccaucagcucccagaucgagcucgccgugcugcugagcaacgagggcaucaucaacuccgaggacgagcaccuccuggcgcuggagcggaagcucaagaagaugcuggggcccagcgccgucgagaucggcaacgggugcuucgagaccaagcacaagugcaaccagaccugccuggaccgcaucgccgccggcaccuucgacgcgggcgaguucucccuccccacguucgacagccugaacaucaccgccgccucccugaacgacgacgggcucgacaaccacaccauccugcuguacuacagcaccgccgccuccagccuggcggugacgcucaugaucgccaucuucguggucuacauggugucccgggacaacgugagcugcuccaucugccuguga

SEQ ID NO: 92291 - RNA, 1758 nt, Artificial Sequence; identical to SEQ ID NO: 90707
  derived and/or modified CDS sequence (opt1) from hemagglutinin__InfluenzaB__AHZ36972

SEQ ID NO: 92292 - RNA, 1758 nt, Artificial Sequence
  derived and/or modified CDS sequence (opt1) from hemagglutinin__InfluenzaB__AHZ36983
augaaggccaucaucgugcugcucauggucgugaccagcaacgccgaccgcaucugcaccggcaucacguccagcaacagcccccacaucgugaagaccgcgacccagggggaggucaacgugaccggcgugaucccgcugacgaccacccccaccaagagccacuucgccaaccugaaggggacggagacccggggcaagcucugccccaagugccugaacugcaccgaccuggacgucgcccucgggcgccccaagugcaccggcaagaucccguccgcccgggugagcauccugcacgaggugcgccccgucacguccggcugcuuccccaucaugcacgaccggaccaagauccgccagcugcccaaccuccugcggggguacgagcacauccgccugagcacccacaacgugaucaacgccgagaacgcgccgggcgggcccuacaagaucggcaccuccgggagcugccccaacaucacgaacggcaacggcuucuucgccaccauggccugggccgugcccaagaacgacaagaacaagaccgcgaccaacccgcucacgaucgagguccccuacaucugcaccgagggggaggaccagaucaccguguggggcuuccacuccgacaacgagacccagauggccaagcuguacggggacagcaagccccagaaguucacguccagcgccaacggcgugaccgcccacuacgucucccagaucggcggguuccccaaccagaccgaggacggcgggcugccgcagagcggccggaucgugguggacuacaugguccagaaguccgggaagaccggcacgaucaccuaccagcgcggcauccuccugccccagaagguguggugcgccagcgggcgguccaaggugaucaagggcagccugccccucaucggggaggcggacugccugcacgagaaguacggcgggcugaacaagagcaagcccuacuacaccggcgagcacgccaaggccaucggcaacugcccgaucugggucaagacgccccucaagcuggccaacgggaccaaguaccgcccgcccgccaagcugcucaaggagcggggcuucuucggggcgaucgccggcuuccuggagggcgggugggagggcaugaucgccggguggcacggcuacaccucccacggggcccacggcguggccguggcggccgaccugaaguccacccaggaggccaucaacaagaucaccaagaaccucaacucccugagcgagcuggaggucaagaaccuccagcgccuguccggcgccauggacgagcugcacaacgagauccucgagcuggacgagaagguggacgaccugcgggccgacacgaucagcucccagaucgagcucgcgguccugcugagcaacgaggggaucaucaacuccgaggacgagcaccuccuggcccuggagcgcaagcucaagaagaugcugggccccagcgccguggagaucgggaacggcugcuucgagaccaagcacaagugcaaccagaccugccuggaccggaucgccgcggggaccuucgacgccggcgaguucucccuccccaccuucgacagccugaacaucacggccgccucccugaacgacgacggccucgacaaccacaccauccugcuguacuacagcaccgccgcguccagccuggccgugacccucaugaucgccaucuucgucguguacauggugucccgcgacaacgucagcugcuccaucugccuguga

SEQ ID NO: 92293 - RNA, 1758 nt, Artificial Sequence
  derived and/or modified CDS sequence (opt1) from hemagglutinin__InfluenzaB__AHZ37005
augaaggccaucaucgugcugcucauggucgugaccagcaacgccgaccgcaucugcaccggcaucacguccagcaacagcccccacguggucaagaccgcgacccagggggaggugaacgugaccggcgucaucccgcugacgaccacccccaccaagagccacuucgccaaccugaaggggacggagacccggggcaagcucugccccaagugccccaacugcaccgaccuggacguggcccuggggcgcccgaagugcaccggcaagauccccuccgcccgggugagcauccuccacgagguccgccccgugacguccggcugcuuccccaucaugcacgaccggaccaagauccgccagcugccgaaccugcuccggggguacgagcacauccgccugagcacccacaacgugaucaacgccgaguccgcgcccggcgggcccuacaagaucggcaccagcggguccugccccaacgucacgaacggcaacggcuucuucgccaccauggccugggccgugccgaagaacgacaagaacaagaccgcgaccgacccccugacgaucgaggugcccuacaucugcaccgaggaggaggaccagaucaccgucuggggguuccacagcgacaacgagacccagauggccaagcucuacggcgacuccaagccccagaaguucacgagcuccgccaacggggugaccacccacuacgugagccagaucggcggcuucccgaaccagaccgaggacgggggccugccccaguccgggcggaucgucguggacuacauggugcagaaguccggcaagacggggaccaucaccuaccagcgcggcauccugcucccccagaaggucuggugcgccuccggccggagcaaggugaucaaggggagccugccccugaucggcgaggccgacugccuccacgagaaguacgggggccugaacaaguccaagccguacuacaccggggagcacgcgaaggccaucggcaacugccccaucugggugaagacgccccugaagcucgccaacggcaccaaguaccggcccccggccaagcugcugaaggagcgcggguucuucggcgccaucgcgggguuccucgagggcgggugggagggcaugaucgccggcuggcacggguacaccagccacggcgcccacggggucgccguggccgcggaccugaaguccacccaggaggccaucaacaagaucacgaagaaccugaacagccucuccgagcuggaggucaagaaccugcagcgccucagcggcgccauggacgagcugcacaacgagauccuggagcucgacgagaagguggacgaccugcgggccgacaccaucuccagccagaucgagcuggccgugcuccuguccaacgagggcaucaucaacagcgaggacgagcaccuccuggcgcuggagcgcaagcugaagaagaugcucgggcccuccgccgucgagaucggcaacgggugcuucgagaccaagcacaagugcaaccagaccugccuggaccggaucgccgccggcaccuucgacgcgggggaguucagccugcccacguucgacucccucaacaucaccgccgccagccugaacgacgacggccuggacaaccacaccauccuccuguacuacuccaccgccgccagcucccuggcggugacgcugaugaucgccaucuucguggucuacauggugagccgcgacaacguguccugcagcaucugccucuga

SEQ ID NO: 92294 - RNA, 1758 nt, Artificial Sequence; identical to SEQ ID NO: 90669
  derived and/or modified CDS sequence (opt1) from hemagglutinin__InfluenzaB__AHZ37016

SEQ ID NO: 92295 - RNA, 1758 nt, Artificial Sequence
  derived and/or modified CDS sequence (opt1) from hemagglutinin__InfluenzaB__AHZ37027
augaaggccaucaucgugcugcucauggucgugaccagcaacgccgaccgcaucugcaccggcaucacguccagcaacagcccccacguggucaagaccgcgacccagggggaggugaacgugaccggcgucaucccgcugacgaccacccccaccaagagccacuucgccaaccugaaggggacggagacccggggcaagcucugccccaagugccugaacugcaccgaccuggacguggcccucgggcgccccaagugcaccggcaagaucccguccgcccgggugagcaucauccacgagguccgccccgugacguccggcugcuuccccaucaugcacgaccggaccaagauccgccagcugcccaaccugcuccggggguacgagcacauccgccugagcacccacaacgugaucaacgccgagaacgcgccgggcgggcccuacaagaucggcaccuccgggagcugccugaacgucacgaacggcaacggcuucuucgccaccauggccugggccgugcccaagaacgacaagaacaagaccgcgaccaacccccucacgaucgaggugccguacaucugcaccgagggggaggaccagaucaccgucuggggcuuccacuccgacaacgagacccagauggccaagcuguacggggacagcaagccccagaaguucacguccagcgccaacggcgugaccacccacuacgugucccagaucggcggguuccccaaccagaccgaggacggcgggcugccccagagcggccggaucgucguggacuacauggugcagaaguccgggaagacgggcaccaucaccuaccagcgcggcauccuccugccgcagaaggucuggugcgccagcgggcgguccaaggugaucaagggcagccugccccucaucggggaggccgacugccugcacgagaaguacggcgggcugaacaagagcaagcccuacuacaccggcgagcacgcgaaggccaucggcaacugccccaucugggugaagacgccgcucaagcuggccaacgggaccaaguaccgcccgcccgccaagcugcucaaggagcggggcuucuucggggccaucgcgggcuuccuggagggcgggugggagggcaugaucgccggguggcacggcuacaccucccacggggcccacggcgucgccguggccgcggaccugaaguccacccaggaggccaucaacaagaucacgaagaaccucaacucccugagcgagcuggaggucaagaaccuccagcgccuguccggcgccauggacgagcugcacaacgagauccucgagcuggacgagaagguggacgaccugcgggccgacaccaucagcucccagaucgagcucgccgugcugcugagcaacgaggggaucaucaacuccgaggacgagcaccuccuggcgcuggagcgcaagcucaagaagaugcugggccccagcgccgucgagaucgggaacggcugcuucgagaccaagcacaagugcaaccagaccugccuggaccggaucgccgccgggaccuucgacgcgggcgaguucucccuccccacguucgacagccugaacaucaccgccgccucccugaacgacgacggccucgacaaccacaccauccugcuguacuacagcaccgccgccuccagccuggcggugacgcucaugaucgccaucuucguggucuacauggugucccgcgacaacgugagcugcuccaucugccuguga

SEQ ID NO: 92296 - RNA, 1758 nt, Artificial Sequence; identical to SEQ ID NO: 90669
  derived and/or modified CDS sequence (opt1) from hemagglutinin__InfluenzaB__AHZ37038

SEQ ID NO: 92297 - RNA, 1758 nt, Artificial Sequence; identical to SEQ ID NO: 92183
  derived and/or modified CDS sequence (opt1) from hemagglutinin__InfluenzaB__AHZ37049

SEQ ID NO: 92298 - RNA, 1758 nt, Artificial Sequence; identical to SEQ ID NO: 92183
  derived and/or modified CDS sequence (opt1) from hemagglutinin__InfluenzaB__AHZ37060

SEQ ID NO: 92299 - RNA, 1758 nt, Artificial Sequence; identical to SEQ ID NO: 90669
  derived and/or modified CDS sequence (opt1) from hemagglutinin__InfluenzaB__AHZ37071

SEQ ID NO: 92300 - RNA, 1758 nt, Artificial Sequence; identical to SEQ ID NO: 90669
  derived and/or modified CDS sequence (opt1) from hemagglutinin__InfluenzaB__AHZ37082

SEQ ID NO: 92301 - RNA, 1758 nt, Artificial Sequence; identical to SEQ ID NO: 92183
  derived and/or modified CDS sequence (opt1) from hemagglutinin__InfluenzaB__AHZ37093

SEQ ID NO: 92302 - RNA, 1758 nt, Artificial Sequence
  derived and/or modified CDS sequence (opt1) from hemagglutinin__InfluenzaB__AHZ37104
augaaggccaucaucgugcugcucauggucgugaccagcaacgccgaccgcaucugcaccggcaucacguccagcaacagcccccacguggucaagaccgcgacccagggggaggugaacgugaccggcgucaucccgcugacgaccacccccaccaagagccacuucgccaaccugaaggggacggagacccggggcaagcucugccccaagugccugaacugcaccgaccuggacguggcccucgggcgccccaagugcaccggcaagaucccguccgcccgggugagcauccugcacgagguccgccccgugacguccggcugcuuccccaucaugcacgaccggaccaagauccgccagcugcccaaccuccugcggggguacgagcacauccgccugagcacccacaacgugaucaacgccgagaacgcgccgggcgggcccuacaagaucggcaccuccgggagcugccccaacgucacgaacggcaacggcuucuucgccaccauggccugggccgugcccaagaacgacaagaacaagaccgcgaccaacccgcucacgaucgaggugcccuacaucugcaccgagggggaggaccagaucaccgucuggggcuuccacuccgacaacgagacccagauggccaagcuguacggggacagcaagccccagaaguucacguccagcgccaacggcgugaccacccacuacgugucccagaucggcggguuccccaaccagaccgaggacggcgggcugccgcagagcggccggaucgucguggaccacauggugcagaaguccgggaagacgggcaccaucaccuaccagcgcggcauccuccugccccagaaggucuggugcgccagcgggcgguccaaggugaucaagggcagccugccccucaucggggaggccgacugccugcacgagaaguacggcgggcugaacaagagcaagcccuacuacaccggcgagcacgcgaaggccaucggcaacugcccgaucugggugaagacgccccucaagcuggccaacgggaccaaguaccgcccgcccgccaagcugcucaaggagcggggcuucuucggggccaucgcgggcuuccuggagggcgggugggagggcaugaucgccggguggcacggcuacaccucccacggggcccacggcgucgccguggccgcggaccugaaguccacccaggaggccaucaacaagaucacgaagaaccucaacucccugagcgagcuggaggucaagaaccuccagcgccuguccggcgccauggacgagcugcacaacgagauccucgagcuggacgagaagguggacgaccugcgggccgacaccaucagcucccagaucgagcucgccgugcugcugagcaacgaggggaucaucaacuccgaggacgagcaccuccuggcgcuggagcgcaagcucaagaagaugcugggccccagcgccgucgagaucgggaacggcugcuucgagaccaagcacaagugcaaccagaccugccuggaccggaucgccgccgggaccuucgacgcgggcgaguucucccuccccacguucgacagccugaacaucaccgccgccucccugaacgacgacggccucgacaaccacaccauccugcuguacuacagcaccgccgccuccagccuggcggugacgcucaugaucgccaucuucguggucuacauggugucccgcgacaacgugagcugcuccaucugccuguga

SEQ ID NO: 92303 - RNA, 1758 nt, Artificial Sequence
  derived and/or modified CDS sequence (opt1) from hemagglutinin__InfluenzaB__AHZ41770
augaaggccaucaucgugcugcucauggucgugaccagcaacgccgaccgcaucugcaccggcaucacguccagcaacagcccccacaucgugaagaccgcgacccagggggaggucaacgugaccggcgugaucccgcugacgaccacccccaccaagagccacuucgccaaccugaaggggacggagacccggggcaagcucugccccaagugccugaacugcaccgaccuggacgucgcccucgggcgccccaagugcaccggcaagaucccguccgcccgggugagcauccugcacgaggugcgccccgucacguccggcugcuuccccaucaugcacgaccggaccaagauccgccagcugcccaaccuccugcggggguacgagcacauccgccugagcacccacaacgugaucaacgccgagaacgcgccgggcgggcccuacaagaucggcaccuccgggagcugccccaacaucacgaacggcaacggcuucuucgccaccauggccugggccgugcccaagaacgacaagaacaagaccgcgaucaacccgcucaccaucgagguccccuacaucugcacggagggggaggaccagaucaccguguggggcuuccacuccgacaacgagacccagauggccaagcuguacggggacagcgagccccagaaguucaccuccagcgccaacggcgugacgacccacuacgucucccagaucggcggguuccccaaccagaccgaggacggcgggcugccgcagagcggccggaucgugguggacuacaugguccagaaguccgggaagaccggcacgaucaccuaccagcgcggcauccuccugccccagaagguguggugcgccagcgggcgguccaaggugaucaagggcagccugccccucaucggggaggccgacugccugcacgagaaguacggcgggcugaacaagagcaagcccuacuacaccggcgagcacgcgaaggccaucggcaacugcccgaucugggucaagacgccccucaagcuggccaacgggaccaaguaccgcccgcccgccaagcugcucaaggagcggggcuucuucggggccaucgcgggcuuccuggagggcgggugggagggcaugaucgccggguggcacggcuacaccucccacggggcccacggcguggccguggccgcggaccugaaguccacccaggaggccaucaacaagaucaccaagaaccucaacucccugagcgagcuggaggucaagaaccuccagcgccuguccggcgccauggacgagcugcacaacgagauccucgagcuggacgagaagguggacgaccugcgggccgacacgaucagcucccagaucgagcucgccguccugcugagcaacgaggggaucaucaacuccgaggacgagcaccuccuggcgcuggagcgcaagcucaagaagaugcugggccccagcgccguggagaucgggaacggcugcuucgagaccaagcacaagugcaaccagaccugccuggaccggaucgccgccgggaccuucgacgcgggcgaguucucccuccccaccuucgacagccugaacaucacggccgccucccugaacgacgacggccucgacaaccacaccauccugcuguacuacagcaccgccgccuccagccuggcggugacccucaugaucgccaucuucgucguguacauggugucccgcgacaacgucagcugcuccaucugccuguga

SEQ ID NO: 92304 - RNA, 1758 nt, Artificial Sequence; identical to SEQ ID NO: 90707
  derived and/or modified CDS sequence (opt1) from hemagglutinin__InfluenzaB__AHZ41781

SEQ ID NO: 92305 - RNA, 1758 nt, Artificial Sequence; identical to SEQ ID NO: 90707
  derived and/or modified CDS sequence (opt1) from hemagglutinin__InfluenzaB__AHZ41792

SEQ ID NO: 92306 - RNA, 1758 nt, Artificial Sequence; identical to SEQ ID NO: 90707
  derived and/or modified CDS sequence (opt1) from hemagglutinin__InfluenzaB__AHZ41803

SEQ ID NO: 92307 - RNA, 1758 nt, Artificial Sequence
  derived and/or modified CDS sequence (opt1) from hemagglutinin__InfluenzaB__AHZ41814
augaaggccaucaucgugcugcucauggucgugaccagcaacgccgaccgcaucugcaccggcaucacguccagcaacagcccccacguggucaagaccgcgacccagggggaggugaacgugaccggcgucaucccgcugacgaccacccccaccaagagccacuucgccaaccugaaggggacggagacccggggcaagcucugccccaagugccccaacugcaccgaccuggacguggcccuggggcgcccgaagugcaccggcaagauccccuccgcccgggugagcauccuccacgagguccgccccgugacguccggcugcuuccccaucaugcacgaccggaccaagauccgccagcugccgaaccugcuccggggguacgagcacauccgccugagcacccacaacgugaucaacgccgagaacgcgcccggcgggcccuacaagaucggcaccuccgggagcugccccaacgucacgaacggcaacggcuucuucgccaccauggccugggccgugccgaagaacgacaagaacaagaccgcgaccaacccccugacgaucgaggugcccuacaucugcaccgagggggaggaccagaucaccgucuggggcuuccacuccgacaacgagacccagauggccaagcucuacggggacagcaagccccagaaguucacguccagcgccaacggcgugaccacccacuacgugucccagaucggcggguucccgaaccagaccgaggacggcgggcugccccagagcggccggaucgucguggacuacauggugcagaaguccgggaagacgggcaccgucaccuaccagcgcggcauccugcucccccagaagguguggugcgccagcgggcgguccaaggugaucaagggcagccugccccugaucggggaggccgacugccuccacgagaaguacggcgggcugaacaagagcaagccguacuacaccggcgagcacgcgaaggccaucggcaacugccccaucugggucaagacgccccugaagcucgccaacgggaccaaguaccggcccccggccaagcugcugaaggagcgcggcuucuucggggccaucgcgggcuuccucgagggcgggugggagggcaugaucgccggguggcacggcuacaccucccacggggcccacggcguggccgucgccgcggaccugaaguccacccaggaggccaucaacaagaucacgaagaaccugaacucccucagcgagcuggaggugaagaaccugcagcgccucuccggcgccauggacgagcugcacaacgagauccuggagcucgacgagaagguggacgaccugcgggccgacaccaucagcucccagaucgagcuggccguccuccugagcaacgaggggaucaucaacuccgaggacgagcaccuccuggcgcuggagcgcaagcugaagaagaugcucggccccagcgccguggagaucgggaacggcugcuucgagaccaagcacaagugcaaccagaccugccuggaccggaucgccgccgggaccuucgacgcgggcgaguucucccugcccacguucgacagccucaacaucaccgccgccucccugaacgacgacggccuggacaaccacaccauccuccuguacuacagcaccgccgccuccagccuggcggugacgcugaugaucgccaucuucgucguguacauggugucccgcgacaacgucagcugcuccaucugccucuga

SEQ ID NO: 92308 - RNA, 1758 nt, Artificial Sequence; identical to SEQ ID NO: 90707
  derived and/or modified CDS sequence (opt1) from hemagglutinin__InfluenzaB__AHZ41825

SEQ ID NO: 92309 - RNA, 1758 nt, Artificial Sequence; identical to SEQ ID NO: 90707
  derived and/or modified CDS sequence (opt1) from hemagglutinin__InfluenzaB__AHZ41836

SEQ ID NO: 92310 - RNA, 1758 nt, Artificial Sequence; identical to SEQ ID NO: 90707
  derived and/or modified CDS sequence (opt1) from hemagglutinin__InfluenzaB__AHZ41847

SEQ ID NO: 92311 - RNA, 1755 nt, Artificial Sequence; identical to SEQ ID NO: 92155
  derived and/or modified CDS sequence (opt1) from hemagglutinin__InfluenzaB__AHZ41858

SEQ ID NO: 92312 - RNA, 1758 nt, Artificial Sequence; identical to SEQ ID NO: 92180
  derived and/or modified CDS sequence (opt1) from hemagglutinin__InfluenzaB__AHZ41869

SEQ ID NO: 92313 - RNA, 1755 nt, Artificial Sequence
  derived and/or modified CDS sequence (opt1) from hemagglutinin__InfluenzaB__AIC73844
augaaggccaucaucgugcugcucauggucgugaccagcaacgccgaccgcaucugcaccggcaucacguccagcaacagcccccacguggucaagaccgcgacccagggggaggugaacgugaccggcgucaucccgcugacgaccacccccaccaaguccuacuucgccaaccugaaggggacgcggacccgcggcaagcucugccccgacugccugaacugcaccgaccuggacguggcccucgggcggcccaugugcgugggcaccacgccguccgccaaggccagcauccugcacgagguccgccccgugaccuccggcugcuuccccaucaugcacgaccggaccaagauccgccagcugcccaaccuccugcggggguacgagaagauccgccugagcacccagaacgugaucgacgcggagaaggccccgggcgggcccuaccggcucggcacguccgggagcugccccaacgccaccuccaagaucggcuucuucgccaccauggcgugggccguccccaaggacaacuacaagaacgccaccaacccgcagacgguggaggugcccuacaucugcaccgagggcgaggaccagaucaccgucuggggguuccacagcgacaacaagacccagaugaagucccuguacggcgacagcaacccccagaaguucacguccagcgccaacggggugaccacccacuacgugucccagaucggcgacuuccccgaccagaccgaggacggcgggcugccgcagagcggccgcaucgucguggacuacaugaugcagaagcccgggaagacgggcaccaucguguaccagcgcgggguccuccugccccagaagguguggugcgccuccggccggagcaaggugaucaagggcagccugccccucaucggggaggcggacugccugcacgaggaguacggcgggcugaacaaguccaagccguacuacaccggcaagcacgccaaggccaucgggaacugccccaucugggucaagacgccccucaagcuggccaacggcaccaaguaccggcccccggccaagcugcucaaggagcgcggcuucuucggggcgaucgccggcuuccuggagggcgggugggaggggaugaucgccggcuggcacggcuacaccagccacggggcccacggcguggccgucgcggccgaccugaaguccacccaggaggccaucaacaagaucaccaagaaccucaacagccuguccgagcuggaggugaagaaccuccagcggcugagcggggccauggacgagcugcacaacgagauccucgagcuggacgagaagguggacgaccugcgcgccgacacgaucuccagccagaucgagcucgcgguccugcuguccaacgagggcaucaucaacagcgaggacgagcaccuccuggcccuggagcggaagcucaagaagaugcugggccccuccgccguggacaucgggaacggcugcuucgagaccaagcacaagugcaaccagaccugccuggaccgcaucgccgcggggaccuucaacgccggcgaguucagccuccccaccuucgacucccugaacaucacggccgccagccugaacgacgacgggcucgacaaccacaccauccugcuguacuacuccaccgccgcgagcucccuggccgugacccucaugcuggccaucuucaucgucuacauggugagccgggacaacguguccugcagcaucugccuguga

SEQ ID NO: 92314 - RNA, 1758 nt, Artificial Sequence; identical to SEQ ID NO: 91889
  derived and/or modified CDS sequence (opt1) from hemagglutinin__InfluenzaB__AIC73845

SEQ ID NO: 92315 - RNA, 1758 nt, Artificial Sequence; identical to SEQ ID NO: 91889
  derived and/or modified CDS sequence (opt1) from hemagglutinin__InfluenzaB__AIC73846

SEQ ID NO: 92316 - RNA, 1758 nt, Artificial Sequence
  derived and/or modified CDS sequence (opt1) from hemagglutinin__InfluenzaB__AIC73847
augaaggccaucaucgugcugcucauggucgugaccagcaacgccgaccgcaucugcaccggcaucacguccagcaacagcccccacguggucaagaccgcgacccagggggaggugaacgugaccggcgucaucccgcugacgaccacccccaccaagagccacuucgccaaccugaaggggacggagacccggggcaagcucugccccaagugccuggacugcaccgaccuggacguggcccucgggcgccccaagugcaccggcaagaucccguccgcccgggugagcauccugcacgagguccgccccgugacguccggcugcuuccccaucaugcacgaccggaccaagauccgccagcugcccaaccuccugcggggguacgagcacauccgccugagcacccacaacgugaucaacgccgaggacgcgccgggcgggcccuacaagaucggcaccuccgggagcugccccaacgucacgaacggcaacggcuucuucgccaccauggccugggccgugcccaagaacgacaagaacaagaccgcgaccaacccgcucacgaucgaggugcccuacaucugcaccgagggggaggaccagaucaccgucuggggcuuccacuccgacaacgagacccagauggccaagcuguacggggacagcaagccccagaaguucacguccagcgccaacggcgugaccacccacuacgugucccagaucggcggguuccccaaccagaccgaggacggcgggcugccgcagagcggccggaucgucguggacuacauggugcagaaguccgggaagacgggcaccaucaccuaccagcgcggcauccuccugccccagaaggucuggugcgccagcgggcgguccaaggugaucaagggcagccugccccucaucggggaggccgacugccugcacgagaaguacggcgggcugaacaagagcaagcccuacuacaccggcgagcacgcgaaggccaucggcaacugcccgaucugggugaagacgccccucaagcuggccaacgggaccaaguaccgcccgcccgccaagcugcucaaggagcggggcuucuucggggccaucgcgggcuuccuggagggcgggugggagggcaugaucgccggguggcacggcuacaccucccacggggcccacggcgucgccguggccgcggaccugaaguccacccaggaggccaucaacaagaucacgaagaaccucaacucccugagcgagcuggaggucaagaaccuccagcgccuguccggcgccauggacgagcugcacaacgagauccucgagcuggacgagaagguggacgaccugcgggccgacaccaucagcucccagaucgagcucgccgugcugcugagcaacgaggggaucaucaacuccgaggacgagcaccuccuggcgcuggagcgcaagcucaagaagaugcugggccccagcgccgucgagaucgggaacggcugcuucgagaccaagcacaagugcaaccagaccugccuggaccggaucgccgccgggaccuucgacgcgggcgaguucucccuccccacguucgacagccugaacaucaccgccgccucccugaacgacgacggccucgacaaccacaccauccugcuguacuacagcaccgccgccuccagccuggcggugacgcucaugaucgccaucuucguggucuacauggugucccgcgacaacgugagcugcuccaucugccuguga

SEQ ID NO: 92317 - RNA, 1758 nt, Artificial Sequence; identical to SEQ ID NO: 91889
  derived and/or modified CDS sequence (opt1) from hemagglutinin__InfluenzaB__AIC73848

SEQ ID NO: 92318 - RNA, 1755 nt, Artificial Sequence; identical to SEQ ID NO: 92153
  derived and/or modified CDS sequence (opt1) from hemagglutinin__InfluenzaB__AIC73849

SEQ ID NO: 92319 - RNA, 1758 nt, Artificial Sequence
  derived and/or modified CDS sequence (opt1) from hemagglutinin__InfluenzaB__AIC73850
augaaggccaucaucgugcugcucauggucgccaccagcaacgcggaccgcaucugcaccggcaucacguccagcaacagcccccacguggugaagaccgccacccagggggaggucaacgugaccggcgugaucccgcugacgaccacccccaccaagagccacuucgccaaccugaaggggacggagacccggggcaagcucugccccaagugccugaacugcaccgaccuggacgucgcccucgggcgccccaagugcaccggcaagaucccguccgcccgggugagcauccugcacgaggugcgccccgucacguccggcugcuuccccaucaugcacgaccggaccaagauccgccagcugcccaaccuccugcggggguacgagcacauccgccugagcacccacaacgugaucaacgcggaggacgccccgggcgggcccuacaagaucggcaccuccgggagcugccccaacgugacgaacggcaacggcuucuucgccaccauggccugggcgguccccaagaacgacaagaacaagaccgccaccaacccgcucacgaucgaggugcccuacaucugcaccgagggggaggaccagaucaccguguggggcuuccacuccgacaacgagacccagauggccaagcuguacggggacagcaagccccagaaguucacguccagcgccaacggcgucaccacccacuacgugucccagaucggcggguuccccaaccagaccgaggacggcgggcugccgcagagcggccggaucguggucgacuacauggugcagaaguccgggaagacgggcaccaucaccuaccagcgcggcauccuccugccccagaagguguggugcgccagcgggcgguccaaggucaucaagggcagccugccccucaucggggaggcggacugccugcacgagaaguacggcgggcugaacaagagcaagcccuacuacaccggcgagcacgccaaggccaucggcaacugcccgaucugggugaagacgccccucaagcuggccaacgggaccaaguaccgcccgcccgccaagcugcucaaggagcggggcuucuucggggcgaucgccggcuuccuggagggcgggugggagggcaugaucgccggguggcacggcuacaccucccacggggcccacggcguggccgucgcggccgaccugaaguccacccaggaggccaucaacaagaucacgaagaaccucaacucccugagcgagcuggaggugaagaaccuccagcgccuguccggcgccauggacgagcugcacaacgagauccucgagcuggacgagaaggucgacgaccugcgggccgacaccaucagcucccagaucgagcucgcggugcugcugagcaacgaggggaucaucaacuccgaggacgagcaccuccuggcccuggagcgcaagcucaagaagaugcugggccccagcgccguggagaucgggaacggcugcuucgagaccaagcacaagugcaaccagaccugccuggaccggaucgccgcggggaccuucgacgccggcgaguucucccuccccacguucgacagccugaacaucaccgccgccucccugaacgacgacggccucgacaaccacaccauccugcuguacuacagcaccgccgcguccagccuggccgucacgcucaugaucgccaucuucgugguguacauggucucccgcgacaacgugagcugcuccaucugccuguga

SEQ ID NO: 92320 - RNA, 1758 nt, Artificial Sequence; identical to SEQ ID NO: 90911
  derived and/or modified CDS sequence (opt1) from hemagglutinin__InfluenzaB__AIC73851

SEQ ID NO: 92321 - RNA, 1755 nt, Artificial Sequence; identical to SEQ ID NO: 92313
  derived and/or modified CDS sequence (opt1) from hemagglutinin__InfluenzaB__AIC73852

SEQ ID NO: 92322 - RNA, 1755 nt, Artificial Sequence; identical to SEQ ID NO: 92313
  derived and/or modified CDS sequence (opt1) from hemagglutinin__InfluenzaB__AIC73853

SEQ ID NO: 92323 - RNA, 1758 nt, Artificial Sequence
  derived and/or modified CDS sequence (opt1) from hemagglutinin__InfluenzaB__AIC73855
augaaggccaucaucgugcugcucauggucgugaccagcaacgccgaccgcaucugcaccggcaucacguccagcaacagcccccacguggucaagaccgcgacccagggggaggugaacgugaccggcgucaucccgcugacgaccacccccaccaagagccacuucgccaaccugaaggggacggagacccggggcaagcucugccccaagugccugaacugcaccgaccuggacguggcccucgggcgccccaagugcaccggcaagaucccguccgcccgggugagcauccugcacgagguccgccccgugacguccggcugcuuccccaucaugcacgaccggaccaagauccgccagcugcccaaccuccugcggggguacgagcacauccgccugagcacccacaacgugaucaacgccgagaacgcgccgggcgggcccuacaucaucggcaccuccgggagcugccccaacgucacgaacggcaacggcuucuucgccaccauggccugggccgugcccaagaacgacaagaacaagaccgcgaccaacccgcucacgaucgaggugcccuacaucugcaccgagggggaggaccagaucaccgucuggggcuuccacuccgacaacgagacccagauggccaagcuguacggggacagcaacccccagaaguucacguccagcgccaacggcgugaccacccacuacgugucccagaucggcggguuccccaaccagaccgaggacggcgggcugccgcagagcggccggaucgucguggacuacauggugcagaaguccgggaagacgggcaccaucaccuaccagcgcggcauccuccugccccagaaggucuggugcgccagcgggcgguccaaggugaucaagggcagccugccccucaucggggaggccgacugccugcacgagaaguacggcgggcugaacaagagcaagcccuacuacaccggcgagcacgcgaaggccaucggcaacugcccgaucugggugaagacgccccucaagcuggccaacgggaccaaguaccgcccgcccgccaagcugcucaaggagcggggcuucuucggggccaucgcgggcuuccuggagggcgggugggagggcaugaucgccggguggcacggcuacaccucccacggggcccacggcgucgccguggccgcggaccugaaguccacccaggaggccaucaacaagaucacgaagaaccucaacucccugagcgagcuggaggucaagaaccuccagcgccuguccggcgccauggacgagcugcacaacgagauccucgagcuggacgagaagguggacgaccugcgggccgacaccaucagcucccagaucgagcucgccgugcugcugagcaacgaggggaucaucaacuccgaggacgagcaccuccuggcgcuggagcgcaagcucaagaagaugcugggccccagcgccgucgagaucgggaacggcugcuucgagaccaagcacaagugcaaccagaccugccuggaccggaucgccgccgggaccuucgacgcgggcgaguucucccuccccacguucgacagccugaacaucaccgccgccucccugaacgacgacggccucgacaaccacaccauccugcuguacuacagcaccgccgccuccagccuggcggugacgcucaugaucgccaucuucguggucuacauggugucccgcgacaacgugagcugcuccaucugccuguga

SEQ ID NO: 92324 - RNA, 1758 nt, Artificial Sequence; identical to SEQ ID NO: 91889
  derived and/or modified CDS sequence (opt1) from hemagglutinin__InfluenzaB__AIC73856

SEQ ID NO: 92325 - RNA, 1758 nt, Artificial Sequence; identical to SEQ ID NO: 91889
  derived and/or modified CDS sequence (opt1) from hemagglutinin__InfluenzaB__AIC73857

SEQ ID NO: 92326 - RNA, 1758 nt, Artificial Sequence; identical to SEQ ID NO: 91889
  derived and/or modified CDS sequence (opt1) from hemagglutinin__InfluenzaB__AIC73859

SEQ ID NO: 92327 - RNA, 1758 nt, Artificial Sequence
  derived and/or modified CDS sequence (opt1) from hemagglutinin__InfluenzaB__AIC73860
augaaggccaucaucgugcugcucauggucgugaccagcaacgccgaccgcaucugcaccggcaucacguccagcaacagcccccacguggucaagaccgcgacccagggggaggugaacgugaccggcgucaucccgcugacgaccacccccaccaagagccacuucgccaaccugaaggggacggagacccggggcaagcucugccccaagugccugaacugcaccgaccuggacguggcccucgggcgccccaagugcaccggcaagaucccguccgcccgggugagcauccugcacgagguccgccccgugacguccggcugcuuccccaucaugcacgaccggaccaagauccgccagcugcccaaccuccugcggggguacgagcacauccgccugagcacccacaacgugaucaacgccgagaacgcgccgggcgggcccuacaagaucggcaccuccgggagcugccccaacgucacgaacggcaacggcuucuucgccaccauggccugggccgugcccaagaacgacaagaacaagaccgcgaccaacccgcucacgaucgaggugcccuacaucugcaccgagggggaggaccagaucaccgucuggggcuuccacuccgacaacgagacccagauggccaagcuguacggggacagcaacccccagaaguucacguccagcgccaacggcgugaccacccacuacgugucccagaucggcggguuccccaaccagaccgaggacggcgggcugccgcagagcggccggaucgucguggacuacauggugcagaaguccgggaagacgggcaccaucaccuaccagcgcggcauccuccugccccagaaggucuggugcgccagcgggcgguccaaggugaucaagggcagccugccccucaucggggaggccgacugccugcacgagaaguacggcgggcugaacaagagcaagcccuacuacaccggcgagcacgcgaaggccaucggcaacugcccgaucugggugaagacgccccucaagcuggccaacgggaccaaguaccgcccgcccgccaagcugcucaaggagcggggcuucuucggggccaucgcgggcuuccuggagggcgggugggagggcaugaucgccggguggcacggcuacaccucccacggggcccacggcgucgccguggccgcggaccugaaguccacccaggaggccaucaacaagaucacgaagaaccucaacucccugagcgagcuggaggucaagaaccuccagcgccuguccggcgccauggacgagcugcacaacgagauccucgagcuggacgagaagguggacgaccugcgggccgacaccaugagcucccagaucgagcucgccgugcugcugagcaacgaggggaucaucaacuccgaggacgagcaccuccuggcgcuggagcgcaagcucaagaagaugcugggccccagcgccgucgagaucgggaacggcugcuucgagaccaagcacaagugcaaccagaccugccuggaccggaucgccgccgggaccuucgacgcgggcgaguucucccuccccacguucgacagccugaacaucaccgccgccucccugaacgacgacggccucgacaaccacaccauccugcuguacuacagcaccgccgccuccagccuggcggugacgcucaugaucgccaucuucguggucuacauggugucccgcgacaacgugagcugcuccaucugccuguga

SEQ ID NO: 92328 - RNA, 1758 nt, Artificial Sequence
  derived and/or modified CDS sequence (opt1) from hemagglutinin__InfluenzaB__AIC73861
augaaggccaucaucgugcugcucauggucgugaccagcaacgccgaccgcaucugcaccggcaucacguccagcaacagcccccacguggucaagaccgcgacccagggggaggugaacgugaccggcgucaucccgcugacgaccacccccaccaagagccacuucgccaaccugaaggggacggagacccggggcaagcucugccccaagugccugaacugcaccgaccuggacguggcccucgggcgccccaagugcaccggcaagaucccguccgcccgggugagcauccugcacgagguccgccccgugacguccggcugcuuccccaucaugcacgaccggaccaagauccgccagcugcccaaccuccugcggggguacgagcacauccgccugagcacccacaacgugaucaacaccgagaacgccccgggcgggcccuacaagaucggcacguccgggagcugccccaacgucaccaacggcaacggcuucuucgcgaccauggccugggccgugcccaagaacgacaagaacaagaccgccacgaacccgcucaccaucgaggugcccuacaucugcaccgagggggaggaccagaucaccgucuggggcuuccacuccgacaacgagacgcagauggcgaagcuguacggggacagcaacccccagaaguucaccuccagcgccaacggcgugaccauccacuacgugucccagaucggcggguuccccaaccagaccgaggacggcgggcugccgcagagcggccggaucgucguggacuacauggugcagaaguccgggaagacgggcaccaucaccuaccagcgcggcauccuccugccccagaaggucuggugcgccagcgggcgguccaaggugaucaagggcagccugccccucaucggggaggccgacugccugcacgagaaguacggcgggcugaacaagagcaagcccuacuacaccggcgagcacgccaaggcgaucggcaacugcccgaucugggugaagacgccccucaagcuggccaacgggaccaaguaccgcccgcccgccaagcugcucaaggagcggggcuucuucggggccaucgccggcuuccuggagggcgggugggagggcaugaucgcgggguggcacggcuacaccucccacggggcccacggcgucgccguggccgccgaccugaaguccacccaggaggcgaucaacaagaucacgaagaaccucaacucccugagcgagcuggaggucaagaaccuccagcgccuguccggcgccauggacgagcugcacaacgagauccucgagcuggacgagaagguggacgaccugcgggccgacaccaucagcucccagaucgagcucgccgugcugcugagcaacgaggggaucaucaacuccgaggacgagcaccuccuggcccuggagcgcaagcucaagaagaugcugggccccagcgcggucgagaucgggaacggcugcuucgagaccaagcacaagugcaaccagaccugccuggaccggaucgccgccgggaccuucgacgccggcgaguucucccuccccacguucgacagccugaacaucaccgcggccucccugaacgacgacggccucgacaaccacaccauccugcuguacuacagcaccgccgccuccagccuggccgugacgcucaugaucgcgaucuucguggucuacauggugucccgcgacaacgugagcugcuccaucugccuguga

SEQ ID NO: 92329 - RNA, 1758 nt, Artificial Sequence; identical to SEQ ID NO: 92327
  derived and/or modified CDS sequence (opt1) from hemagglutinin__InfluenzaB__AIC73862

SEQ ID NO: 92330 - RNA, 1758 nt, Artificial Sequence; identical to SEQ ID NO: 92327
  derived and/or modified CDS sequence (opt1) from hemagglutinin__InfluenzaB__AIC73863

SEQ ID NO: 92331 - RNA, 1758 nt, Artificial Sequence; identical to SEQ ID NO: 92327
  derived and/or modified CDS sequence (opt1) from hemagglutinin__InfluenzaB__AIC73864

SEQ ID NO: 92332 - RNA, 1755 nt, Artificial Sequence
  derived and/or modified CDS sequence (opt1) from hemagglutinin__InfluenzaB__AIC73865
augaaggccaucaucgugcugcucauggucgugaccagcaacgccgaccgcaucugcaccggcaucacguccagcaacagcccccacguggucaagaccgcgacccagggggaggugaacgugaccggcgucaucccgcugacgaccacccccaccaaguccuacuucgccaaccugaaggggacgaagacccggggcaagcucugccccgacugccugaacugcaccgaccuggacguggcccucgggcgccccaugugcgugggcaccacgccguccgccaaggccagcauccugcacgagguccggcccgugaccuccggcugcuuccccaucaugcacgaccgcaccaagauccggcagcuggcgaaccuccugcgcggguacgagaacauccggcugagcacccagaacgugaucgacgccgagaaggcccccggcgggccguaccgccucggcacguccgggagcugccccaacgccaccuccaagagcggcuucuucgcgaccauggccugggccguccccaaggacaacaacaagaacgccaccaacccccugacgguggaggugccguacaucugcgccgagggcgaggaccagaucaccgucuggggguuccacuccgacaacaagacccagaugaagaaccuguacggcgacagcaacccccagaaguucaccuccagcgcgaacggggugacgacccacuacgugucccagaucggcggcuuccccgaccagcgggaggacgggggccucccccagagcgggcgcaucgucguggacuacaugaugcagaagccgggcaagaccgggaccaucguguaccagcggggcguccugcugccccagaagguguggugcgccuccggccgcagcaaggugaucaaggggagccucccccugaucggcgaggccgacugccugcacgagaaguacgggggccucaacaaguccaagcccuacuacacgggggagcacgccaaggccaucggcaacugcccgaucugggucaagacgccccugaagcuggcgaacggcaccaaguaccggccgcccgccaagcuccugaaggagcgcggguucuucggcgccaucgccggguuccuggagggcgggugggagggcaugaucgccggcuggcacggguacaccagccacggcgcgcacgggguggccgucgccgccgaccucaaguccacccaggaggccaucaacaagaucaccaagaaccugaacagccuguccgagcucgaggugaagaaccugcagcggcugagcggcgcgauggacgagcuccacaacgagauccuggagcuggacgagaagguggacgaccuccgcgccgacaccaucuccagccagaucgagcuggccguccugcucuccaacgagggcaucaucaacagcgaggacgagcaccuccuggcccuggagcggaagcugaagaagaugcuggggcccuccgcgguggacaucggcaacgggugcuucgagaccaagcacaagugcaaccagacgugccucgaccgcaucgccgccggcaccuucaacgccggggaguucagccugcccaccuucgacucccugaacaucaccgccgcgagccucaacgacgacggccuggacaaccacaccauccugcuguacuacuccacggccgccagcucccucgccgugacccugaugcuggccaucuucaucgucuacauggugagccgggacaacguguccugcagcaucugccucuga

SEQ ID NO: 92333 - RNA, 1758 nt, Artificial Sequence
  derived and/or modified CDS sequence (opt1) from hemagglutinin__InfluenzaB__AIC73867
augaaggccaucaucgugcugcucauggucgugaccagcaacgccgaccgcaucugcaccggcaucacguccagcaacagcccccacguggucaagaccgcgacccagggggaggugaacgugaccggcgucaucccgcugacgaccacccccaccaagagccacuucgccaaccugaaggggacggagacccggggcaagcucugccccaagugccugaacugcaccgaccuggacguggcccucgggcgccccaagugcaccggcaagaucccguccgcccgggugagcauccugcacgagguccgccccgugacguccggcugcuuccccaucaugcacgaccggaccaagauccgccagcugcccaaccuccugcggggguacgagcacauccgccugagcacccacaacgugaucgacgccgagaacgcgccgggcgggcccuacaagaucggcaccuccgggagcugccccaacgucacgaacggcaacggcuucuucgccaccauggccugggccgugcccaagaacgacaagaacaagaccgcgaccaacccgcucacgaucgaggugcccuacaucugcaccgagggggaggaccagaucaccgucuggggcuuccacuccgacaacgagacccagauggccaagcuguacggggacagcaacccccagaaguucacguccagcgccaacggcgugaccacccacuacgugucccagaucggcggguuccccaaccagaccgaggacggcgggcugccgcagagcggccggaucgucguggacuacauggugcagaaguccgggaagacgggcaccaucaccuaccagcgcggcauccuccugccccagaaggucuggugcgccagcgggcgguccaaggugaucaagggcagccugccccucaucggggaggccgacugccugcacgagaaguacggcgggcugaacaagagcaagcccuacuacaccggcgagcacgcgaaggccaucggcaacugcccgaucugggugaagacgccccucaagcuggccaacgggaccaaguaccgcccgcccgccaagcugcucaaggagcggggcuucuucggggccaucgcgggcuuccuggagggcgggugggagggcaugaucgccggguggcacggcuacaccucccacggggcccacggcgucgccguggccgcggaccugaaguccacccaggaggccaucaacaagaucacgaagaaccucaacucccugagcgagcuggaggucaagaaccuccagcgccuguccggcgccauggacgagcugcacaacgagauccucgagcuggacgagaagguggacgaccugcgggccgacaccaucagcucccagaucgagcucgccgugcugcugagcaacgaggggaucaucaacuccgaggacgagcaccuccuggcgcuggagcgcaagcucaagaagaugcugggccccagcgccgucgagaucgggaacggcugcuucgagaccaagcacaagugcaaccagaccugccuggaccggaucgccgccgggaccuucgacgcgggcgaguucucccuccccacguucgacagccugaacaucaccgccgccucccugaacgacgacggccucgacaaccacaccauccugcuguacuacagcaccgccgccuccagccuggcggugacgcucaugaucgccaucuucguggucuacauggugucccgcgacaacgugagcugcuccaucugccuguga

SEQ ID NO: 92334 - RNA, 1758 nt, Artificial Sequence; identical to SEQ ID NO: 90911
  derived and/or modified CDS sequence (opt1) from hemagglutinin__InfluenzaB__AIC73868

SEQ ID NO: 92335 - RNA, 1758 nt, Artificial Sequence; identical to SEQ ID NO: 92327
  derived and/or modified CDS sequence (opt1) from hemagglutinin__InfluenzaB__AIC73869

SEQ ID NO: 92336 - RNA, 1758 nt, Artificial Sequence; identical to SEQ ID NO: 92327
  derived and/or modified CDS sequence (opt1) from hemagglutinin__InfluenzaB__AIC73870

SEQ ID NO: 92337 - RNA, 1758 nt, Artificial Sequence; identical to SEQ ID NO: 91889
  derived and/or modified CDS sequence (opt1) from hemagglutinin__InfluenzaB__AIC73871

SEQ ID NO: 92338 - RNA, 1755 nt, Artificial Sequence; identical to SEQ ID NO: 92313
  derived and/or modified CDS sequence (opt1) from hemagglutinin__InfluenzaB__AIC73872

SEQ ID NO: 92339 - RNA, 1755 nt, Artificial Sequence; identical to SEQ ID NO: 92153
  derived and/or modified CDS sequence (opt1) from hemagglutinin__InfluenzaB__AIC73873

SEQ ID NO: 92340 - RNA, 1755 nt, Artificial Sequence; identical to SEQ ID NO: 92313
  derived and/or modified CDS sequence (opt1) from hemagglutinin__InfluenzaB__AIC73874

SEQ ID NO: 92341 - RNA, 1755 nt, Artificial Sequence; identical to SEQ ID NO: 92332
  derived and/or modified CDS sequence (opt1) from hemagglutinin__InfluenzaB__AIC73875

SEQ ID NO: 92342 - RNA, 1755 nt, Artificial Sequence
  derived and/or modified CDS sequence (opt1) from hemagglutinin__InfluenzaB__AIC73876
augaaggccaucaucgugcugcucauggucgugaccagcaacgccgaccgcaucugcaccggcaucacguccagcaacagcccccacguggucaagaccgcgacccagggggaggugaacgugaccggcgucaucccgcugacgaccacccccaccaaguccuacuucgccaaccugaaggggacgaagacccggggcaagcucugccccgacugccugaacugcaccgaccuggacguggcccucgggcgccccaugugcgugggcaccacgccguccgccaaggccagcauccugcacgagguccggcccgugaccuccggcugcuuccccaucaugcacgaccgcaccaagauccggcagcuggcgaaccuccugcgcggguacgagaacauccggcugagcacccagaacgugaucgacgccgagaaggcccccggcgggccguaccgccucggcacguccgggagcugccccaacgccaccuccaagagcggcuucuucgcgaccauggccugggccguccccaaggacaacaacaagaacgccaccaacccccugacgguggaggugccguacaucugcgccgagggcgaggaccagaucaccgucuggggguuccacuccgacaacaagacccagaugaagaaccuguacggcgacagcaacccccagaaguucaccuccagcgcgaacggggugacgacccacuacgugucccagaucggcggcuuccccgaccagcgggaggacgggggccucccccagagcgggcgcaucgucguggacuacaugaugcagaagccgggcaagaccgggaccaucguguaccagcggggcguccugcugccccagaagguguggugcgccuccggccgcagcaaggugaucaaggggagccucccccugaucggcgaggccgacugccugcacgagaaguacgggggccucaacaaguccaagcccuacuacacgggggagcacgccaaggccaucggcaacugcccgaucugggucaagacgccccugaagcuggcgaacggcaccaaguaccggccgcccgccaagcuccugaaggagcgcggguucuucggcgccaucgccggguuccuggagggcgggugggagggcaugaucgccggcuggcacggguacaccagccacggcgcgcacgggguggccgucgccgccgaccucaaguccacccaggaggccaucaacaagaucaccaagaaccugaacagccuguccgagcucgaggugaagaaccugcagcggcugagcggcgcgauggacgagcuccacaacgagauccuggagcuggacgagaagguggacgaccuccgcgccgacaccaucuccagccagaucgagcuggccguccugcucuccaacgagggcaucaucaacagcgaggacgagcaccuccuggcccuggagcggaagcugaagaagaugcuggggcccuccgcgguggacaucggcaacgggugcuucgagaccaagcacaagugcaaccagacgugccucaaccgcaucgccgccggcaccuucaacgccggggaguucagccugcccaccuucgacucccugaacaucaccgccgcgagccucaacgacgacggccuggacaaccacaccauccugcuguacuacuccacggccgccagcucccucgccgugacccugaugcuggccaucuucaucgucuacauggugagccgggacaacguguccugcagcaucugccucuga

SEQ ID NO: 92343 - RNA, 1755 nt, Artificial Sequence; identical to SEQ ID NO: 92332
  derived and/or modified CDS sequence (opt1) from hemagglutinin__InfluenzaB__AIC73877

SEQ ID NO: 92344 - RNA, 1755 nt, Artificial Sequence; identical to SEQ ID NO: 92332
  derived and/or modified CDS sequence (opt1) from hemagglutinin__InfluenzaB__AIC73878

SEQ ID NO: 92345 - RNA, 1755 nt, Artificial Sequence; identical to SEQ ID NO: 92332
  derived and/or modified CDS sequence (opt1) from hemagglutinin__InfluenzaB__AIC73879

SEQ ID NO: 92346 - RNA, 1755 nt, Artificial Sequence; identical to SEQ ID NO: 92332
  derived and/or modified CDS sequence (opt1) from hemagglutinin__InfluenzaB__AIC73880

SEQ ID NO: 92347 - RNA, 1755 nt, Artificial Sequence; identical to SEQ ID NO: 92332
  derived and/or modified CDS sequence (opt1) from hemagglutinin__InfluenzaB__AIC73881

SEQ ID NO: 92348 - RNA, 1755 nt, Artificial Sequence; identical to SEQ ID NO: 92332
  derived and/or modified CDS sequence (opt1) from hemagglutinin__InfluenzaB__AIC73882

SEQ ID NO: 92349 - RNA, 1755 nt, Artificial Sequence; identical to SEQ ID NO: 92153
  derived and/or modified CDS sequence (opt1) from hemagglutinin__InfluenzaB__AIC73883

SEQ ID NO: 92350 - RNA, 1755 nt, Artificial Sequence; identical to SEQ ID NO: 92332
  derived and/or modified CDS sequence (opt1) from hemagglutinin__InfluenzaB__AIC73884

SEQ ID NO: 92351 - RNA, 1758 nt, Artificial Sequence
  derived and/or modified CDS sequence (opt1) from hemagglutinin__InfluenzaB__AIC73885
auggaggccaucaucgugcugcucauggucgugaccagcaacgccgaccgcaucugcaccggcaucacguccagcaacagcccccacguggucaagaccgcgacccagggggaggugaacgugaccggcgucaucccgcugacgaccacccccaccaagagccacuucgccaaccugaaggggacggagacccggggcaagcucugccccaagugccugaacugcaccgaccuggacguggcccucgggcgccccaagugcaccggcaagaucccguccgcccgggugagcauccugcacgagguccgccccgugacguccggcugcuuccccaucaugcacgaccggaccaagauccgccagcugcccaaccuccugcggggguacgagcacauccgccugagcacccacaacgugaucaacgccgaggacgcgccgggcgggcccuacaagaucggcaccuccgggagcugccccaacgucacgaacggcaacggcuucuucgccaccauggccugggccgugcccaagaacgacaagaacaagaccgcgaccaacccgcucacgaucgaggugcccuacaucugcaccgagggggaggaccagaucaccgucuggggcuuccacuccgacaacgagacccagauggccaagcuguacggggacagcaagccccagaaguucacguccagcgccaacggcgugaccacccacuacgugucccagaucggcggguuccccaaccagaccgaggacggcgggcugccgcagagcggccggaucgucguggacuacauggugcagaaguccgggaagacgggcaccaucaccuaccagcgcggcauccuccugccccagaaggucuggugcgccagcgggcgguccaaggugaucaagggcagccugccccucaucggggaggccgacugccugcacgagaaguacggcgggcugaacaagagcaagcccuacuacaccggcgagcacgcgaaggccaucggcaacugcccgaucugggugaagacgccccucaagcuggccaacgggaccaaguaccgcccgcccgccaagcugcucaaggagcggggcuucuucggggccaucgcgggcuuccuggagggcgggugggagggcaugaucgccggguggcacggcuacaccucccacggggcccacggcgucgccguggccgcggaccugaaguccacccaggaggccaucaacaagaucacgaagaaccucaacucccugagcgagcuggaggucaagaaccuccagcgccuguccggcgccauggacgagcugcacaacgagauccucgagcuggacgagaagguggacgaccugcgggccgacaccaucagcucccagaucgagcucgccgugcugcugagcaacgaggggaucaucaacuccgaggacgagcaccuccuggcgcuggagcgcaagcucaagaagaugcugggccccagcgccgucgagaucgggaacggcugcuucgagaccaagcacaagugcaaccagaccugccuggaccggaucgccgccgggaccuucgacgcgggcgaguucucccuccccacguucgacagccugaacaucaccgccgccucccugaacgacgacggccucgacaaccacaccauccugcuguacuacagcaccgccgccuccagccuggcggugacgcucaugaucgccaucuucguggucuacauggugucccgcgacaacgugagcugcuccaucugccuguga

SEQ ID NO: 92352 - RNA, 1758 nt, Artificial Sequence; identical to SEQ ID NO: 91889
  derived and/or modified CDS sequence (opt1) from hemagglutinin__InfluenzaB__AIC73886

SEQ ID NO: 92353 - RNA, 1758 nt, Artificial Sequence; identical to SEQ ID NO: 92333
  derived and/or modified CDS sequence (opt1) from hemagglutinin__InfluenzaB__AIC73887

SEQ ID NO: 92354 - RNA, 1755 nt, Artificial Sequence; identical to SEQ ID NO: 92153
  derived and/or modified CDS sequence (opt1) from hemagglutinin__InfluenzaB__AIC73888

SEQ ID NO: 92355 - RNA, 1755 nt, Artificial Sequence; identical to SEQ ID NO: 92313
  derived and/or modified CDS sequence (opt1) from hemagglutinin__InfluenzaB__AIC73889

SEQ ID NO: 92356 - RNA, 1755 nt, Artificial Sequence; identical to SEQ ID NO: 92313
  derived and/or modified CDS sequence (opt1) from hemagglutinin__InfluenzaB__AIC73890

SEQ ID NO: 92357 - RNA, 1758 nt, Artificial Sequence
  derived and/or modified CDS sequence (opt1) from hemagglutinin__InfluenzaB__AIC73892
augaaggccaucaucgugcugcucauggucgugaccagcaacgccgaccgcaucugcaccggcaucacguccagcaacagcccccacguggucaagaccgcgacccagggggaggugaacgugaccggcgucaucccgcugacgaccacccccaccaagucccacuucgccaaccugaaggggacggagacccggggcaagcucugccccaagugccugaacugcaccgaccuggacguggcccucgggcgccccaagugcaccggcaagaucccguccgcccgggugagcauccugcacgagguccgccccgugacguccggcugcuuccccaucaugcacgaccggaccaagauccgccagcugcccaaccuccugcggggguacgagcacauccgccugagcacccacaacgugaucaacgccgaggacgcgccgggcgggcccuacaagaucggcaccuccgggagcugccccaacgucacgaacggcaacggcuucuucgccaccauggccugggccgugcccaagaacgacaagaacaagaccgcgaccaacccgcucacgaucgaggugcccuacaucugcaccgagggggaggaccagaucaccgucuggggcuuccacuccgacaacgagacccagauggccaagcuguacggggacagcaagccccagaaguucacguccagcgccaacggcgugaccacccacuacgugucccagaucggcggguuccccaaccagaccgaggacggcgggcugccgcagagcggccggaucgucguggacuacauggugcagaaguccgggaagacgggcaccaucaccuaccagcgcggcauccuccugccccagaaggucuggugcgccagcgggcgguccaaggugaucaagggcagccugccccucaucggggaggccgacugccugcacgagaaguacggcgggcugaacaagagcaagcccuacuacaccggcgagcacgcgaaggccaucggcaacugcccgaucugggugaagacgucccucaagcuggccaacgggaccaaguaccgcccgcccgccaagcugcucaaggagcggggcuucuucggggccaucgcgggcuuccuggagggcgggugggagggcaugaucgccggguggcacggcuacaccagccacggggcccacggcgucgccguggccgcggaccugaaguccacccaggaggccaucaacaagaucacgaagaaccucaacagccuguccgagcuggaggucaagaaccuccagcgccugagcggcgccauggacgagcugcacaacgagauccucgagcuggacgagaagguggacgaccugcgggccgacaccaucuccagccagaucgagcucgccgugcugcuguccaacgaggggaucaucaacagcgaggacgagcaccuccuggcgcuggagcgcaagcucaagaagaugcugggccccuccgccgucgagaucgggaacggcugcuucgagaccaagcacaagugcaaccagaccugccuggaccggaucgccgccgggaccuucgacgcgggcgaguucagccuccccacguucgacucccugaacaucaccgccgccagccugaacgacgacggccucgacaaccacaccauccugcuguacuacuccaccgccgccagcucccuggcggugacgcucaugaucgccaucuucguggucuacauggugagccgcgacaacguguccugcagcaucugccuguga

SEQ ID NO: 92358 - RNA, 1755 nt, Artificial Sequence; identical to SEQ ID NO: 92153
  derived and/or modified CDS sequence (opt1) from hemagglutinin__InfluenzaB__AIC73893

SEQ ID NO: 92359 - RNA, 1755 nt, Artificial Sequence; identical to SEQ ID NO: 92313
  derived and/or modified CDS sequence (opt1) from hemagglutinin__InfluenzaB__AIC73894

SEQ ID NO: 92360 - RNA, 1755 nt, Artificial Sequence; identical to SEQ ID NO: 92313
  derived and/or modified CDS sequence (opt1) from hemagglutinin__InfluenzaB__AIC73895

SEQ ID NO: 92361 - RNA, 1755 nt, Artificial Sequence; identical to SEQ ID NO: 92313
  derived and/or modified CDS sequence (opt1) from hemagglutinin__InfluenzaB__AIC73896

SEQ ID NO: 92362 - RNA, 1755 nt, Artificial Sequence; identical to SEQ ID NO: 92313
  derived and/or modified CDS sequence (opt1) from hemagglutinin__InfluenzaB__AIC73897

SEQ ID NO: 92363 - RNA, 1755 nt, Artificial Sequence; identical to SEQ ID NO: 92313
  derived and/or modified CDS sequence (opt1) from hemagglutinin__InfluenzaB__AIC73898

SEQ ID NO: 92364 - RNA, 1755 nt, Artificial Sequence; identical to SEQ ID NO: 92313
  derived and/or modified CDS sequence (opt1) from hemagglutinin__InfluenzaB__AIC73899

SEQ ID NO: 92365 - RNA, 1755 nt, Artificial Sequence; identical to SEQ ID NO: 92313
  derived and/or modified CDS sequence (opt1) from hemagglutinin__InfluenzaB__AIC73900

SEQ ID NO: 92366 - RNA, 1755 nt, Artificial Sequence; identical to SEQ ID NO: 92313
  derived and/or modified CDS sequence (opt1) from hemagglutinin__InfluenzaB__AIC73902

SEQ ID NO: 92367 - RNA, 1755 nt, Artificial Sequence
  derived and/or modified CDS sequence (opt1) from hemagglutinin__InfluenzaB__AIC73903
augaaggccaucaucgugcugcucauggucgugaccagcaacgccgaccgcaucugcaccggcaucacguccagcaacagcccccacguggucaagaccgcgacccagggggaggugaacgugaccggcgucaucccgcugacgaccacccccaccaaguccuacuucgccaaccugaaggggacgcggacccgcggcaagcucugccccgacugccugaacugcaccgaccuggacguggcccucgggcggcccaugugcgugggcaccacgccguccgccaaggccagcauccugcacgagguccgccccgugaccuccggcugcuuccccaucaugcacgaccggaccaagauccgccagcugcccaaccuccugcggggguacgagaagauccgccugagcacccagaacgugaucgacgcggagaaggccccgggcgggcccuaccggcucggcacguccgggagcugccccaacgccaccuccaagaucggcuucuucgccaccauggcgugggccguccccaaggacaacuacaagaacgccaccaacccgcagacgguggaggugcccuacaucugcaccgagggcgaggaccagaucaccgucuggggguuccacagcgacaacaagacccagaugaagucccuguacggcgacagcaacccccagaaguucacguccagcgccaacgggaucaccacccacuacgugucccagaucggcgacuuccccgaccagaccgaggacggcgggcugccgcagagcggccgcaucguggucgacuacaugaugcagaagcccgggaagacgggcaccaucguguaccagcgcggggugcuccugccccagaaggucuggugcgccuccggccggagcaaggugaucaagggcagccugccccucaucggggaggcggacugccugcacgaggaguacggcgggcugaacaaguccaagccguacuacaccggcaagcacgccaaggccaucgggaacugccccaucugggugaagacgccccucaagcuggccaacggcaccaaguaccggcccccggccaagcugcucaaggagcgcggcuucuucggggcgaucgccggcuuccuggagggcgggugggaggggaugaucgccggcuggcacggcuacaccagccacggggcccacggcgucgccguggcggccgaccugaaguccacccaggaggccaucaacaagaucaccaagaaccucaacagccuguccgagcuggaggucaagaaccuccagcggcugagcggggccauggacgagcugcacaacgagauccucgagcuggacgagaagguggacgaccugcgcgccgacacgaucuccagccagaucgagcucgcggugcugcuguccaacgagggcaucaucaacagcgaggacgagcaccuccuggcccuggagcggaagcucaagaagaugcugggccccuccgccgucgacaucgggaacggcugcuucgagaccaagcacaagugcaaccagaccugccuggaccgcaucgccgcggggaccuucaacgccggcgaguucagccuccccaccuucgacucccugaacaucacggccgccagccugaacgacgacgggcucgacaaccacaccauccugcuguacuacuccaccgccgcgagcucccuggccgugacccucaugcuggccaucuucaucguguacauggucagccgggacaacguguccugcagcaucugccuguga

SEQ ID NO: 92368 - RNA, 1755 nt, Artificial Sequence
  derived and/or modified CDS sequence (opt1) from hemagglutinin__InfluenzaB__AIC73904
augaaggccaucaucgugcugcucauggucgugaccagcaacgccgaccgcaucugcaccggcaucacguccagcaacagcccccacguggucaagaccgcgacccagggggaggugaacgugaccggcgucaucccgcugacgaccacccccaccaaguccuacuucgccaaccugaaggggacgcggacccgcggcaagcucugccccgacugccugaacugcaccgaccuggacguggcccucgggcggcccaugugcgugggcaucaccccguccgccaaggccagcauccugcacgagguccgccccgugacguccggcugcuuccccaucaugcacgaccggaccaagauccgccagcugcccaaccuccugcggggguacgagaagauccgccugagcacccagaacgugaucgacgcggagaaggccccgggcgggcccuaccggcucggcaccuccgggagcugccccaacgccacguccaagaucggcuucuucgccaccauggcgugggccguccccaaggacaacuacaagaacgccaccaacccgcagaccguggaggugcccuacaucugcacggagggcgaggaccagaucaccgucuggggguuccacagcgacaacaagacccagaugaagucccuguacggcgacagcaacccccagaaguucaccuccagcgccaacggggugacgacccacuacgugucccagaucggcgacuuccccgaccagaccgaggacggcgggcugccgcagagcggccgcaucgucguggacuacaugaugcagaagcccgggaagaccggcacgaucguguaccagcgcgggguccuccugccccagaagguguggugcgccuccggccggagcaaggugaucaagggcagccugccccucaucggggaggcggacugccugcacgaggaguacggcgggcugaacaaguccaagccguacuacaccggcaagcacgccaaggccaucgggaacugccccaucugggucaagacgccccucaagcuggccaacggcaccaaguaccggcccccggccaagcugcucaaggagcgcggcuucuucggggcgaucgccggcuuccuggagggcgggugggaggggaugaucgccggcuggcacggcuacaccagccacggggcccacggcguggccgucgcggccgaccugaaguccacccaggaggccaucaacaagaucaccaagaaccucaacagccuguccgagcuggaggugaagaaccuccagcggcugagcggggccauggacgagcugcacaacgagauccucgagcuggacgagaagguggacgaccugcgcgccgacaccaucuccagccagaucgagcucgcgguccugcuguccaacgagggcaucaucaacagcgaggacgagcaccuccuggcccuggagcggaagcucaagaagaugcugggccccuccgccguggacaucgggaacggcugcuucgagacgaagcacaagugcaaccagaccugccuggaccgcaucgccgcggggaccuucaacgccggcgaguucagccuccccaccuucgacucccugaacaucaccgccgccagccugaacgacgacgggcucgacaaccacacgauccugcuguacuacuccaccgccgcgagcucccuggccgugacccucaugcuggccaucuucaucgucuacauggugagccgggacaacguguccugcagcaucugccuguga

SEQ ID NO: 92369 - RNA, 1755 nt, Artificial Sequence; identical to SEQ ID NO: 92313
  derived and/or modified CDS sequence (opt1) from hemagglutinin__InfluenzaB__AIC73905

SEQ ID NO: 92370 - RNA, 1755 nt, Artificial Sequence; identical to SEQ ID NO: 92313
  derived and/or modified CDS sequence (opt1) from hemagglutinin__InfluenzaB__AIC73906

SEQ ID NO: 92371 - RNA, 1755 nt, Artificial Sequence; identical to SEQ ID NO: 92313
  derived and/or modified CDS sequence (opt1) from hemagglutinin__InfluenzaB__AIC73907

SEQ ID NO: 92372 - RNA, 1755 nt, Artificial Sequence; identical to SEQ ID NO: 92313
  derived and/or modified CDS sequence (opt1) from hemagglutinin__InfluenzaB__AIC73908

SEQ ID NO: 92373 - RNA, 1755 nt, Artificial Sequence; identical to SEQ ID NO: 92313
  derived and/or modified CDS sequence (opt1) from hemagglutinin__InfluenzaB__AIC73909

SEQ ID NO: 92374 - RNA, 1755 nt, Artificial Sequence; identical to SEQ ID NO: 92313
  derived and/or modified CDS sequence (opt1) from hemagglutinin__InfluenzaB__AIC73910

SEQ ID NO: 92375 - RNA, 1755 nt, Artificial Sequence; identical to SEQ ID NO: 92313
  derived and/or modified CDS sequence (opt1) from hemagglutinin__InfluenzaB__AIC73911

SEQ ID NO: 92376 - RNA, 1755 nt, Artificial Sequence; identical to SEQ ID NO: 92313
  derived and/or modified CDS sequence (opt1) from hemagglutinin__InfluenzaB__AIC73912

SEQ ID NO: 92377 - RNA, 1755 nt, Artificial Sequence; identical to SEQ ID NO: 92313
  derived and/or modified CDS sequence (opt1) from hemagglutinin__InfluenzaB__AIC73913

SEQ ID NO: 92378 - RNA, 1755 nt, Artificial Sequence; identical to SEQ ID NO: 92313
  derived and/or modified CDS sequence (opt1) from hemagglutinin__InfluenzaB__AIC73914

SEQ ID NO: 92379 - RNA, 1755 nt, Artificial Sequence; identical to SEQ ID NO: 92313
  derived and/or modified CDS sequence (opt1) from hemagglutinin__InfluenzaB__AIC73915

SEQ ID NO: 92380 - RNA, 1755 nt, Artificial Sequence; identical to SEQ ID NO: 92313
  derived and/or modified CDS sequence (opt1) from hemagglutinin__InfluenzaB__AIC73916

SEQ ID NO: 92381 - RNA, 1755 nt, Artificial Sequence; identical to SEQ ID NO: 92313
  derived and/or modified CDS sequence (opt1) from hemagglutinin__InfluenzaB__AIC73917

SEQ ID NO: 92382 - RNA, 1755 nt, Artificial Sequence; identical to SEQ ID NO: 92313
  derived and/or modified CDS sequence (opt1) from hemagglutinin__InfluenzaB__AIC73918

SEQ ID NO: 92383 - RNA, 1755 nt, Artificial Sequence; identical to SEQ ID NO: 92153
  derived and/or modified CDS sequence (opt1) from hemagglutinin__InfluenzaB__AIC73919

SEQ ID NO: 92384 - RNA, 1755 nt, Artificial Sequence; identical to SEQ ID NO: 92313
  derived and/or modified CDS sequence (opt1) from hemagglutinin__InfluenzaB__AIC73920

SEQ ID NO: 92385 - RNA, 1758 nt, Artificial Sequence; identical to SEQ ID NO: 91889
  derived and/or modified CDS sequence (opt1) from hemagglutinin__InfluenzaB__AIC73921

SEQ ID NO: 92386 - RNA, 1755 nt, Artificial Sequence; identical to SEQ ID NO: 92313
  derived and/or modified CDS sequence (opt1) from hemagglutinin__InfluenzaB__AIC73922

SEQ ID NO: 92387 - RNA, 1758 nt, Artificial Sequence; identical to SEQ ID NO: 90911
  derived and/or modified CDS sequence (opt1) from hemagglutinin__InfluenzaB__AIC73924

SEQ ID NO: 92388 - RNA, 1758 nt, Artificial Sequence
  derived and/or modified CDS sequence (opt1) from hemagglutinin__InfluenzaB__AIC73925
augaaggccaccaucgugcugcucauggucgugaccagcaacgccgaccgcaucugcacgggcaucaccuccagcaacagcccccacguggucaagaccgcgacccagggggaggugaacgugacgggcgucaucccgcugaccaccacccccaccaagagccacuucgccaaccugaaggggaccgagacccggggcaagcucugccccaagugccugaacugcaccgaccuggacguggcccucgggcgccccaagugcacgggcaagaucccguccgcccgggugagcauccugcacgagguccgccccgugaccuccggcugcuuccccaucaugcacgaccggaccaagauccgccagcugcccaaccuccugcggggguacgagcacauccgccugagcacccacaacgugaucaacgccgaggacgcgccgggcgggcccuacaagaucggcacguccgggagcugccccaacgucaccaacggcaacggcuucuucgccaccauggccugggccgugcccaagaacgacaagaacaagaccgcgacgaacccgcucaccaucgaggugcccuacaucugcaccgagggggaggaccagaucaccgucuggggcuuccacuccgacaacgagacgcagauggccaagcuguacggggacagcaagccccagaaguucaccuccagcgccaacggcgugaccacccacuacgugucccagaucggcggguuccccaaccagacggaggacggcgggcugccgcagagcggccggaucgucguggacuacauggugcagaaguccgggaagaccggcaccaucaccuaccagcgcggcauccuccugccccagaaggucuggugcgccagcgggcgguccaaggugaucaagggcagccugccccucaucggggaggccgacugccugcacgagaaguacggcgggcugaacaagagcaagcccuacuacacgggcgagcacgcgaaggccaucggcaacugcccgaucugggugaagacgccccucaagcuggccaacgggaccaaguaccgcccgcccgccaagcugcucaaggagcggggcuucuucggggccaucgcgggcuuccuggagggcgggugggagggcaugaucgccggguggcacggcuacaccucccacggggcccacggcgucgccguggccgcggaccugaaguccacgcaggaggccaucaacaagaucaccaagaaccucaacucccugagcgagcuggaggucaagaaccuccagcgccuguccggcgccauggacgagcugcacaacgagauccucgagcuggacgagaagguggacgaccugcgggccgacaccaucagcucccagaucgagcucgccgugcugcugagcaacgaggggaucaucaacuccgaggacgagcaccuccuggcgcuggagcgcaagcucaagaagaugcugggccccagcgccgucgagaucgggaacggcugcuucgagaccaagcacaagugcaaccagaccugccuggaccggaucgccgccgggacguucgacgcgggcgaguucucccuccccaccuucgacagccugaacaucaccgccgccucccugaacgacgacggccucgacaaccacaccauccugcuguacuacagcacggccgccuccagccuggcggugacccucaugaucgccaucuucguggucuacauggugucccgcgacaacgugagcugcuccaucugccuguga

SEQ ID NO: 92389 - RNA, 1755 nt, Artificial Sequence; identical to SEQ ID NO: 92313
  derived and/or modified CDS sequence (opt1) from hemagglutinin__InfluenzaB__AIC73926

SEQ ID NO: 92390 - RNA, 1755 nt, Artificial Sequence; identical to SEQ ID NO: 90591
  derived and/or modified CDS sequence (opt1) from hemagglutinin__InfluenzaB__AIL94977

SEQ ID NO: 92391 - RNA, 1755 nt, Artificial Sequence; identical to SEQ ID NO: 90591
  derived and/or modified CDS sequence (opt1) from hemagglutinin__InfluenzaB__AIL94988
